United States Patent Application Publication US 2026/0258423 A1 - sequence listing, part 36

SEQ ID NO: 213075 - DNA, 20 bp, synthetic construct
  source 1..20: mol_type = other DNA
gccccccagccagtgcaggt

SEQ ID NO: 213076 - DNA, 20 bp, synthetic construct
  source 1..20: mol_type = other DNA
agccccccagccagtgcagg

SEQ ID NO: 213077 - DNA, 20 bp, synthetic construct
  source 1..20: mol_type = other DNA
gagccccccagccagtgcag

SEQ ID NO: 213078 - DNA, 20 bp, synthetic construct
  source 1..20: mol_type = other DNA
agagccccccagccagtgca

SEQ ID NO: 213079 - DNA, 20 bp, synthetic construct
  source 1..20: mol_type = other DNA
gagagccccccagccagtgc

SEQ ID NO: 213080 - DNA, 20 bp, synthetic construct
  source 1..20: mol_type = other DNA
agagagccccccagccagtg

SEQ ID NO: 213081 - DNA, 20 bp, synthetic construct
  source 1..20: mol_type = other DNA
aagagagccccccagccagt

SEQ ID NO: 213082 - DNA, 20 bp, synthetic construct
  source 1..20: mol_type = other DNA
caagagagccccccagccag

SEQ ID NO: 213083 - DNA, 20 bp, synthetic construct
  source 1..20: mol_type = other DNA
tcaagagagccccccagcca

SEQ ID NO: 213084 - DNA, 20 bp, synthetic construct
  source 1..20: mol_type = other DNA
gtcaagagagccccccagcc

SEQ ID NO: 213085 - DNA, 20 bp, synthetic construct
  source 1..20: mol_type = other DNA
cgtcaagagagccccccagc

SEQ ID NO: 213086 - DNA, 20 bp, synthetic construct
  source 1..20: mol_type = other DNA
acgtcaagagagccccccag

SEQ ID NO: 213087 - DNA, 20 bp, synthetic construct
  source 1..20: mol_type = other DNA
tacgtcaagagagcccccca

SEQ ID NO: 213088 - DNA, 20 bp, synthetic construct
  source 1..20: mol_type = other DNA
ttacgtcaagagagcccccc

SEQ ID NO: 213089 - DNA, 20 bp, synthetic construct
  source 1..20: mol_type = other DNA
gttacgtcaagagagccccc

SEQ ID NO: 213090 - DNA, 20 bp, synthetic construct
  source 1..20: mol_type = other DNA
cgttacgtcaagagagcccc

SEQ ID NO: 213091 - DNA, 20 bp, synthetic construct
  source 1..20: mol_type = other DNA
acgttacgtcaagagagccc

SEQ ID NO: 213092 - DNA, 20 bp, synthetic construct
  source 1..20: mol_type = other DNA
cacgttacgtcaagagagcc

SEQ ID NO: 213093 - DNA, 20 bp, synthetic construct
  source 1..20: mol_type = other DNA
acacgttacgtcaagagagc

SEQ ID NO: 213094 - DNA, 20 bp, synthetic construct
  source 1..20: mol_type = other DNA
aacacgttacgtcaagagag

SEQ ID NO: 213095 - DNA, 20 bp, synthetic construct
  source 1..20: mol_type = other DNA
gaacacgttacgtcaagaga

SEQ ID NO: 213096 - DNA, 20 bp, synthetic construct
  source 1..20: mol_type = other DNA
ggaacacgttacgtcaagag

SEQ ID NO: 213097 - DNA, 20 bp, synthetic construct
  source 1..20: mol_type = other DNA
gggaacacgttacgtcaaga

SEQ ID NO: 213098 - DNA, 20 bp, synthetic construct
  source 1..20: mol_type = other DNA
agggaacacgttacgtcaag

SEQ ID NO: 213099 - DNA, 20 bp, synthetic construct
  source 1..20: mol_type = other DNA
gagggaacacgttacgtcaa

SEQ ID NO: 213100 - DNA, 20 bp, synthetic construct
  source 1..20: mol_type = other DNA
agagggaacacgttacgtca

SEQ ID NO: 213101 - DNA, 20 bp, synthetic construct
  source 1..20: mol_type = other DNA
cagagggaacacgttacgtc

SEQ ID NO: 213102 - DNA, 20 bp, synthetic construct
  source 1..20: mol_type = other DNA
tcagagggaacacgttacgt

SEQ ID NO: 213103 - DNA, 20 bp, synthetic construct
  source 1..20: mol_type = other DNA
ctcagagggaacacgttacg

SEQ ID NO: 213104 - DNA, 20 bp, synthetic construct
  source 1..20: mol_type = other DNA
gctcagagggaacacgttac

SEQ ID NO: 213105 - DNA, 20 bp, synthetic construct
  source 1..20: mol_type = other DNA
tgctcagagggaacacgtta

SEQ ID NO: 213106 - DNA, 20 bp, synthetic construct
  source 1..20: mol_type = other DNA
atgctcagagggaacacgtt

SEQ ID NO: 213107 - DNA, 20 bp, synthetic construct
  source 1..20: mol_type = other DNA
catgctcagagggaacacgt

SEQ ID NO: 213108 - DNA, 20 bp, synthetic construct
  source 1..20: mol_type = other DNA
acatgctcagagggaacacg

SEQ ID NO: 213109 - DNA, 20 bp, synthetic construct
  source 1..20: mol_type = other DNA
aacatgctcagagggaacac

SEQ ID NO: 213110 - DNA, 20 bp, synthetic construct
  source 1..20: mol_type = other DNA
taacatgctcagagggaaca

SEQ ID NO: 213111 - DNA, 20 bp, synthetic construct
  source 1..20: mol_type = other DNA
gtaacatgctcagagggaac

SEQ ID NO: 213112 - DNA, 20 bp, synthetic construct
  source 1..20: mol_type = other DNA
tgtaacatgctcagagggaa

SEQ ID NO: 213113 - DNA, 20 bp, synthetic construct
  source 1..20: mol_type = other DNA
ctgtaacatgctcagaggga

SEQ ID NO: 213114 - DNA, 20 bp, synthetic construct
  source 1..20: mol_type = other DNA
tctgtaacatgctcagaggg

SEQ ID NO: 213115 - DNA, 20 bp, synthetic construct
  source 1..20: mol_type = other DNA
atctgtaacatgctcagagg

SEQ ID NO: 213116 - DNA, 20 bp, synthetic construct
  source 1..20: mol_type = other DNA
aatctgtaacatgctcagag

SEQ ID NO: 213117 - DNA, 20 bp, synthetic construct
  source 1..20: mol_type = other DNA
gaatctgtaacatgctcaga

SEQ ID NO: 213118 - DNA, 20 bp, synthetic construct
  source 1..20: mol_type = other DNA
agaatctgtaacatgctcag

SEQ ID NO: 213119 - DNA, 20 bp, synthetic construct
  source 1..20: mol_type = other DNA
cagaatctgtaacatgctca

SEQ ID NO: 213120 - DNA, 20 bp, synthetic construct
  source 1..20: mol_type = other DNA
tcagaatctgtaacatgctc

SEQ ID NO: 213121 - DNA, 20 bp, synthetic construct
  source 1..20: mol_type = other DNA
gtcagaatctgtaacatgct

SEQ ID NO: 213122 - DNA, 20 bp, synthetic construct
  source 1..20: mol_type = other DNA
tgtcagaatctgtaacatgc

SEQ ID NO: 213123 - DNA, 20 bp, synthetic construct
  source 1..20: mol_type = other DNA
atgtcagaatctgtaacatg

SEQ ID NO: 213124 - DNA, 20 bp, synthetic construct
  source 1..20: mol_type = other DNA
aatgtcagaatctgtaacat

SEQ ID NO: 213125 - DNA, 20 bp, synthetic construct
  source 1..20: mol_type = other DNA
gaatgtcagaatctgtaaca

SEQ ID NO: 213126 - DNA, 20 bp, synthetic construct
  source 1..20: mol_type = other DNA
agaatgtcagaatctgtaac

SEQ ID NO: 213127 - DNA, 20 bp, synthetic construct
  source 1..20: mol_type = other DNA
aagaatgtcagaatctgtaa

SEQ ID NO: 213128 - DNA, 20 bp, synthetic construct
  source 1..20: mol_type = other DNA
taagaatgtcagaatctgta

SEQ ID NO: 213129 - DNA, 20 bp, synthetic construct
  source 1..20: mol_type = other DNA
ataagaatgtcagaatctgt

SEQ ID NO: 213130 - DNA, 20 bp, synthetic construct
  source 1..20: mol_type = other DNA
cataagaatgtcagaatctg

SEQ ID NO: 213131 - DNA, 20 bp, synthetic construct
  source 1..20: mol_type = other DNA
acataagaatgtcagaatct

SEQ ID NO: 213132 - DNA, 20 bp, synthetic construct
  source 1..20: mol_type = other DNA
aacataagaatgtcagaatc

SEQ ID NO: 213133 - DNA, 20 bp, synthetic construct
  source 1..20: mol_type = other DNA
gaacataagaatgtcagaat

SEQ ID NO: 213134 - DNA, 20 bp, synthetic construct
  source 1..20: mol_type = other DNA
ggaacataagaatgtcagaa

SEQ ID NO: 213135 - DNA, 20 bp, synthetic construct
  source 1..20: mol_type = other DNA
aggaacataagaatgtcaga

SEQ ID NO: 213136 - DNA, 20 bp, synthetic construct
  source 1..20: mol_type = other DNA
aaggaacataagaatgtcag

SEQ ID NO: 213137 - DNA, 20 bp, synthetic construct
  source 1..20: mol_type = other DNA
gaaggaacataagaatgtca

SEQ ID NO: 213138 - DNA, 20 bp, synthetic construct
  source 1..20: mol_type = other DNA
agaaggaacataagaatgtc

SEQ ID NO: 213139 - DNA, 20 bp, synthetic construct
  source 1..20: mol_type = other DNA
cagaaggaacataagaatgt

SEQ ID NO: 213140 - DNA, 20 bp, synthetic construct
  source 1..20: mol_type = other DNA
acagaaggaacataagaatg

SEQ ID NO: 213141 - DNA, 20 bp, synthetic construct
  source 1..20: mol_type = other DNA
cacagaaggaacataagaat

SEQ ID NO: 213142 - DNA, 20 bp, synthetic construct
  source 1..20: mol_type = other DNA
ccacagaaggaacataagaa

SEQ ID NO: 213143 - DNA, 20 bp, synthetic construct
  source 1..20: mol_type = other DNA
tccacagaaggaacataaga

SEQ ID NO: 213144 - DNA, 20 bp, synthetic construct
  source 1..20: mol_type = other DNA
ctccacagaaggaacataag

SEQ ID NO: 213145 - DNA, 20 bp, synthetic construct
  source 1..20: mol_type = other DNA
tctccacagaaggaacataa

SEQ ID NO: 213146 - DNA, 20 bp, synthetic construct
  source 1..20: mol_type = other DNA
ctctccacagaaggaacata

SEQ ID NO: 213147 - DNA, 20 bp, synthetic construct
  source 1..20: mol_type = other DNA
tctctccacagaaggaacat

SEQ ID NO: 213148 - DNA, 20 bp, synthetic construct
  source 1..20: mol_type = other DNA
gtctctccacagaaggaaca

SEQ ID NO: 213149 - DNA, 20 bp, synthetic construct
  source 1..20: mol_type = other DNA
tgtctctccacagaaggaac

SEQ ID NO: 213150 - DNA, 20 bp, synthetic construct
  source 1..20: mol_type = other DNA
atgtctctccacagaaggaa

SEQ ID NO: 213151 - DNA, 20 bp, synthetic construct
  source 1..20: mol_type = other DNA
catgtctctccacagaagga

SEQ ID NO: 213152 - DNA, 20 bp, synthetic construct
  source 1..20: mol_type = other DNA
acatgtctctccacagaagg

SEQ ID NO: 213153 - DNA, 20 bp, synthetic construct
  source 1..20: mol_type = other DNA
tacatgtctctccacagaag

SEQ ID NO: 213154 - DNA, 20 bp, synthetic construct
  source 1..20: mol_type = other DNA
gtacatgtctctccacagaa

SEQ ID NO: 213155 - DNA, 20 bp, synthetic construct
  source 1..20: mol_type = other DNA
agtacatgtctctccacaga

SEQ ID NO: 213156 - DNA, 20 bp, synthetic construct
  source 1..20: mol_type = other DNA
aagtacatgtctctccacag

SEQ ID NO: 213157 - DNA, 20 bp, synthetic construct
  source 1..20: mol_type = other DNA
taagtacatgtctctccaca

SEQ ID NO: 213158 - DNA, 20 bp, synthetic construct
  source 1..20: mol_type = other DNA
ctaagtacatgtctctccac

SEQ ID NO: 213159 - DNA, 20 bp, synthetic construct
  source 1..20: mol_type = other DNA
actaagtacatgtctctcca

SEQ ID NO: 213160 - DNA, 20 bp, synthetic construct
  source 1..20: mol_type = other DNA
cactaagtacatgtctctcc

SEQ ID NO: 213161 - DNA, 20 bp, synthetic construct
  source 1..20: mol_type = other DNA
tcactaagtacatgtctctc

SEQ ID NO: 213162 - DNA, 20 bp, synthetic construct
  source 1..20: mol_type = other DNA
gtcactaagtacatgtctct

SEQ ID NO: 213163 - DNA, 20 bp, synthetic construct
  source 1..20: mol_type = other DNA
ggtcactaagtacatgtctc

SEQ ID NO: 213164 - DNA, 20 bp, synthetic construct
  source 1..20: mol_type = other DNA
aggtcactaagtacatgtct

SEQ ID NO: 213165 - DNA, 20 bp, synthetic construct
  source 1..20: mol_type = other DNA
taggtcactaagtacatgtc

SEQ ID NO: 213166 - DNA, 20 bp, synthetic construct
  source 1..20: mol_type = other DNA
ttaggtcactaagtacatgt

SEQ ID NO: 213167 - DNA, 20 bp, synthetic construct
  source 1..20: mol_type = other DNA
gttaggtcactaagtacatg

SEQ ID NO: 213168 - DNA, 20 bp, synthetic construct
  source 1..20: mol_type = other DNA
agttaggtcactaagtacat

SEQ ID NO: 213169 - DNA, 20 bp, synthetic construct
  source 1..20: mol_type = other DNA
gagttaggtcactaagtaca

SEQ ID NO: 213170 - DNA, 20 bp, synthetic construct
  source 1..20: mol_type = other DNA
tgagttaggtcactaagtac

SEQ ID NO: 213171 - DNA, 20 bp, synthetic construct
  source 1..20: mol_type = other DNA
gtgagttaggtcactaagta

SEQ ID NO: 213172 - DNA, 20 bp, synthetic construct
  source 1..20: mol_type = other DNA
agtgagttaggtcactaagt

SEQ ID NO: 213173 - DNA, 20 bp, synthetic construct
  source 1..20: mol_type = other DNA
aagtgagttaggtcactaag

SEQ ID NO: 213174 - DNA, 20 bp, synthetic construct
  source 1..20: mol_type = other DNA
aaagtgagttaggtcactaa

SEQ ID NO: 213175 - DNA, 20 bp, synthetic construct
  source 1..20: mol_type = other DNA
taaagtgagttaggtcacta

SEQ ID NO: 213176 - DNA, 20 bp, synthetic construct
  source 1..20: mol_type = other DNA
ctaaagtgagttaggtcact

SEQ ID NO: 213177 - DNA, 20 bp, synthetic construct
  source 1..20: mol_type = other DNA
gctaaagtgagttaggtcac

SEQ ID NO: 213178 - DNA, 20 bp, synthetic construct
  source 1..20: mol_type = other DNA
tgctaaagtgagttaggtca

SEQ ID NO: 213179 - DNA, 20 bp, synthetic construct
  source 1..20: mol_type = other DNA
atgctaaagtgagttaggtc

SEQ ID NO: 213180 - DNA, 20 bp, synthetic construct
  source 1..20: mol_type = other DNA
tatgctaaagtgagttaggt

SEQ ID NO: 213181 - DNA, 20 bp, synthetic construct
  source 1..20: mol_type = other DNA
atatgctaaagtgagttagg

SEQ ID NO: 213182 - DNA, 20 bp, synthetic construct
  source 1..20: mol_type = other DNA
aatatgctaaagtgagttag

SEQ ID NO: 213183 - DNA, 20 bp, synthetic construct
  source 1..20: mol_type = other DNA
aaatatgctaaagtgagtta

SEQ ID NO: 213184 - DNA, 20 bp, synthetic construct
  source 1..20: mol_type = other DNA
aaaatatgctaaagtgagtt

SEQ ID NO: 213185 - DNA, 20 bp, synthetic construct
  source 1..20: mol_type = other DNA
aaaaatatgctaaagtgagt

SEQ ID NO: 213186 - DNA, 20 bp, synthetic construct
  source 1..20: mol_type = other DNA
caaaaatatgctaaagtgag

SEQ ID NO: 213187 - DNA, 20 bp, synthetic construct
  source 1..20: mol_type = other DNA
gcaaaaatatgctaaagtga

SEQ ID NO: 213188 - DNA, 20 bp, synthetic construct
  source 1..20: mol_type = other DNA
agcaaaaatatgctaaagtg

SEQ ID NO: 213189 - DNA, 20 bp, synthetic construct
  source 1..20: mol_type = other DNA
gagcaaaaatatgctaaagt

SEQ ID NO: 213190 - DNA, 20 bp, synthetic construct
  source 1..20: mol_type = other DNA
tgagcaaaaatatgctaaag

SEQ ID NO: 213191 - DNA, 20 bp, synthetic construct
  source 1..20: mol_type = other DNA
atgagcaaaaatatgctaaa

SEQ ID NO: 213192 - DNA, 20 bp, synthetic construct
  source 1..20: mol_type = other DNA
gatgagcaaaaatatgctaa

SEQ ID NO: 213193 - DNA, 20 bp, synthetic construct
  source 1..20: mol_type = other DNA
cgatgagcaaaaatatgcta

SEQ ID NO: 213194 - DNA, 20 bp, synthetic construct
  source 1..20: mol_type = other DNA
acgatgagcaaaaatatgct

SEQ ID NO: 213195 - DNA, 20 bp, synthetic construct
  source 1..20: mol_type = other DNA
aacgatgagcaaaaatatgc

SEQ ID NO: 213196 - DNA, 20 bp, synthetic construct
  source 1..20: mol_type = other DNA
aaacgatgagcaaaaatatg

SEQ ID NO: 213197 - DNA, 20 bp, synthetic construct
  source 1..20: mol_type = other DNA
caaacgatgagcaaaaatat

SEQ ID NO: 213198 - DNA, 20 bp, synthetic construct
  source 1..20: mol_type = other DNA
acaaacgatgagcaaaaata

SEQ ID NO: 213199 - DNA, 20 bp, synthetic construct
  source 1..20: mol_type = other DNA
cacaaacgatgagcaaaaat

SEQ ID NO: 213200 - DNA, 20 bp, synthetic construct
  source 1..20: mol_type = other DNA
acacaaacgatgagcaaaaa

SEQ ID NO: 213201 - DNA, 20 bp, synthetic construct
  source 1..20: mol_type = other DNA
tacacaaacgatgagcaaaa

SEQ ID NO: 213202 - DNA, 20 bp, synthetic construct
  source 1..20: mol_type = other DNA
ctacacaaacgatgagcaaa

SEQ ID NO: 213203 - DNA, 20 bp, synthetic construct
  source 1..20: mol_type = other DNA
gctacacaaacgatgagcaa

SEQ ID NO: 213204 - DNA, 20 bp, synthetic construct
  source 1..20: mol_type = other DNA
agctacacaaacgatgagca

SEQ ID NO: 213205 - DNA, 20 bp, synthetic construct
  source 1..20: mol_type = other DNA
aagctacacaaacgatgagc

SEQ ID NO: 213206 - DNA, 20 bp, synthetic construct
  source 1..20: mol_type = other DNA
taagctacacaaacgatgag

SEQ ID NO: 213207 - DNA, 20 bp, synthetic construct
  source 1..20: mol_type = other DNA
ttaagctacacaaacgatga

SEQ ID NO: 213208 - DNA, 20 bp, synthetic construct
  source 1..20: mol_type = other DNA
tttaagctacacaaacgatg

SEQ ID NO: 213209 - DNA, 20 bp, synthetic construct
  source 1..20: mol_type = other DNA
ctttaagctacacaaacgat

SEQ ID NO: 213210 - DNA, 20 bp, synthetic construct
  source 1..20: mol_type = other DNA
cctttaagctacacaaacga

SEQ ID NO: 213211 - DNA, 20 bp, synthetic construct
  source 1..20: mol_type = other DNA
tcctttaagctacacaaacg

SEQ ID NO: 213212 - DNA, 20 bp, synthetic construct
  source 1..20: mol_type = other DNA
ttcctttaagctacacaaac

SEQ ID NO: 213213 - DNA, 20 bp, synthetic construct
  source 1..20: mol_type = other DNA
attcctttaagctacacaaa

SEQ ID NO: 213214 - DNA, 20 bp, synthetic construct
  source 1..20: mol_type = other DNA
gattcctttaagctacacaa

SEQ ID NO: 213215 - DNA, 20 bp, synthetic construct
  source 1..20: mol_type = other DNA
tgattcctttaagctacaca

SEQ ID NO: 213216 - DNA, 20 bp, synthetic construct
  source 1..20: mol_type = other DNA
ctgattcctttaagctacac

SEQ ID NO: 213217 - DNA, 20 bp, synthetic construct
  source 1..20: mol_type = other DNA
tctgattcctttaagctaca

SEQ ID NO: 213218 - DNA, 20 bp, synthetic construct
  source 1..20: mol_type = other DNA
atctgattcctttaagctac

SEQ ID NO: 213219 - DNA, 20 bp, synthetic construct
  source 1..20: mol_type = other DNA
tatctgattcctttaagcta

SEQ ID NO: 213220 - DNA, 20 bp, synthetic construct
  source 1..20: mol_type = other DNA
ttatctgattcctttaagct

SEQ ID NO: 213221 - DNA, 20 bp, synthetic construct
  source 1..20: mol_type = other DNA
attatctgattcctttaagc

SEQ ID NO: 213222 - DNA, 20 bp, synthetic construct
  source 1..20: mol_type = other DNA
aattatctgattcctttaag

SEQ ID NO: 213223 - DNA, 20 bp, synthetic construct
  source 1..20: mol_type = other DNA
taattatctgattcctttaa

SEQ ID NO: 213224 - DNA, 20 bp, synthetic construct
  source 1..20: mol_type = other DNA
gtaattatctgattccttta

SEQ ID NO: 213225 - DNA, 20 bp, synthetic construct
  source 1..20: mol_type = other DNA
ggtaattatctgattccttt

SEQ ID NO: 213226 - DNA, 20 bp, synthetic construct
  source 1..20: mol_type = other DNA
gggtaattatctgattcctt

SEQ ID NO: 213227 - DNA, 20 bp, synthetic construct
  source 1..20: mol_type = other DNA
ggggtaattatctgattcct

SEQ ID NO: 213228 - DNA, 20 bp, synthetic construct
  source 1..20: mol_type = other DNA
gggggtaattatctgattcc

SEQ ID NO: 213229 - DNA, 20 bp, synthetic construct
  source 1..20: mol_type = other DNA
agggggtaattatctgattc

SEQ ID NO: 213230 - DNA, 20 bp, synthetic construct
  source 1..20: mol_type = other DNA
gagggggtaattatctgatt

SEQ ID NO: 213231 - DNA, 20 bp, synthetic construct
  source 1..20: mol_type = other DNA
ggagggggtaattatctgat

SEQ ID NO: 213232 - DNA, 20 bp, synthetic construct
  source 1..20: mol_type = other DNA
gggagggggtaattatctga

SEQ ID NO: 213233 - DNA, 20 bp, synthetic construct
  source 1..20: mol_type = other DNA
ggggagggggtaattatctg

SEQ ID NO: 213234 - DNA, 20 bp, synthetic construct
  source 1..20: mol_type = other DNA
tggggagggggtaattatct

SEQ ID NO: 213235 - DNA, 20 bp, synthetic construct
  source 1..20: mol_type = other DNA
gtggggagggggtaattatc

SEQ ID NO: 213236 - DNA, 20 bp, synthetic construct
  source 1..20: mol_type = other DNA
agtggggagggggtaattat

SEQ ID NO: 213237 - DNA, 20 bp, synthetic construct
  source 1..20: mol_type = other DNA
tagtggggagggggtaatta

SEQ ID NO: 213238 - DNA, 20 bp, synthetic construct
  source 1..20: mol_type = other DNA
gtagtggggagggggtaatt

SEQ ID NO: 213239 - DNA, 20 bp, synthetic construct
  source 1..20: mol_type = other DNA
agtagtggggagggggtaat

SEQ ID NO: 213240 - DNA, 20 bp, synthetic construct
  source 1..20: mol_type = other DNA
aagtagtggggagggggtaa

SEQ ID NO: 213241 - DNA, 20 bp, synthetic construct
  source 1..20: mol_type = other DNA
aaagtagtggggagggggta

SEQ ID NO: 213242 - DNA, 20 bp, synthetic construct
  source 1..20: mol_type = other DNA
gaaagtagtggggagggggt

SEQ ID NO: 213243 - DNA, 20 bp, synthetic construct
  source 1..20: mol_type = other DNA
cgaaagtagtggggaggggg

SEQ ID NO: 213244 - DNA, 20 bp, synthetic construct
  source 1..20: mol_type = other DNA
ccgaaagtagtggggagggg

SEQ ID NO: 213245 - DNA, 20 bp, synthetic construct
  source 1..20: mol_type = other DNA
tccgaaagtagtggggaggg

SEQ ID NO: 213246 - DNA, 20 bp, synthetic construct
  source 1..20: mol_type = other DNA
ttccgaaagtagtggggagg

SEQ ID NO: 213247 - DNA, 20 bp, synthetic construct
  source 1..20: mol_type = other DNA
cttccgaaagtagtggggag

SEQ ID NO: 213248 - DNA, 20 bp, synthetic construct
  source 1..20: mol_type = other DNA
gcttccgaaagtagtgggga

SEQ ID NO: 213249 - DNA, 20 bp, synthetic construct
  source 1..20: mol_type = other DNA
tgcttccgaaagtagtgggg

SEQ ID NO: 213250 - DNA, 20 bp, synthetic construct
  source 1..20: mol_type = other DNA
gtgcttccgaaagtagtggg

SEQ ID NO: 213251 - DNA, 20 bp, synthetic construct
  source 1..20: mol_type = other DNA
tgtgcttccgaaagtagtgg

SEQ ID NO: 213252 - DNA, 20 bp, synthetic construct
  source 1..20: mol_type = other DNA
ttgtgcttccgaaagtagtg

SEQ ID NO: 213253 - DNA, 20 bp, synthetic construct
  source 1..20: mol_type = other DNA
tttgtgcttccgaaagtagt

SEQ ID NO: 213254 - DNA, 20 bp, synthetic construct
  source 1..20: mol_type = other DNA
atttgtgcttccgaaagtag

SEQ ID NO: 213255 - DNA, 20 bp, synthetic construct
  source 1..20: mol_type = other DNA
catttgtgcttccgaaagta

SEQ ID NO: 213256 - DNA, 20 bp, synthetic construct
  source 1..20: mol_type = other DNA
gcatttgtgcttccgaaagt

SEQ ID NO: 213257 - DNA, 20 bp, synthetic construct
  source 1..20: mol_type = other DNA
tgcatttgtgcttccgaaag

SEQ ID NO: 213258 - DNA, 20 bp, synthetic construct
  source 1..20: mol_type = other DNA
ttgcatttgtgcttccgaaa

SEQ ID NO: 213259 - DNA, 20 bp, synthetic construct
  source 1..20: mol_type = other DNA
attgcatttgtgcttccgaa

SEQ ID NO: 213260 - DNA, 20 bp, synthetic construct
  source 1..20: mol_type = other DNA
cattgcatttgtgcttccga

SEQ ID NO: 213261 - DNA, 20 bp, synthetic construct
  source 1..20: mol_type = other DNA
gcattgcatttgtgcttccg

SEQ ID NO: 213262 - DNA, 20 bp, synthetic construct
  source 1..20: mol_type = other DNA
ggcattgcatttgtgcttcc

SEQ ID NO: 213263 - DNA, 20 bp, synthetic construct
  source 1..20: mol_type = other DNA
gggcattgcatttgtgcttc

SEQ ID NO: 213264 - DNA, 20 bp, synthetic construct
  source 1..20: mol_type = other DNA
agggcattgcatttgtgctt

SEQ ID NO: 213265 - DNA, 20 bp, synthetic construct
  source 1..20: mol_type = other DNA
tagggcattgcatttgtgct

SEQ ID NO: 213266 - DNA, 20 bp, synthetic construct
  source 1..20: mol_type = other DNA
ctagggcattgcatttgtgc

SEQ ID NO: 213267 - DNA, 20 bp, synthetic construct
  source 1..20: mol_type = other DNA
tctagggcattgcatttgtg

SEQ ID NO: 213268 - DNA, 20 bp, synthetic construct
  source 1..20: mol_type = other DNA
ttctagggcattgcatttgt

SEQ ID NO: 213269 - DNA, 20 bp, synthetic construct
  source 1..20: mol_type = other DNA
attctagggcattgcatttg

SEQ ID NO: 213270 - DNA, 20 bp, synthetic construct
  source 1..20: mol_type = other DNA
aattctagggcattgcattt

SEQ ID NO: 213271 - DNA, 20 bp, synthetic construct
  source 1..20: mol_type = other DNA
caattctagggcattgcatt

SEQ ID NO: 213272 - DNA, 20 bp, synthetic construct
  source 1..20: mol_type = other DNA
acaattctagggcattgcat

SEQ ID NO: 213273 - DNA, 20 bp, synthetic construct
  source 1..20: mol_type = other DNA
tacaattctagggcattgca

SEQ ID NO: 213274 - DNA, 20 bp, synthetic construct
  source 1..20: mol_type = other DNA
gtacaattctagggcattgc

SEQ ID NO: 213275 - DNA, 20 bp, synthetic construct
  source 1..20: mol_type = other DNA
agtacaattctagggcattg

SEQ ID NO: 213276 - DNA, 20 bp, synthetic construct
  source 1..20: mol_type = other DNA
cagtacaattctagggcatt

SEQ ID NO: 213277 - DNA, 20 bp, synthetic construct
  source 1..20: mol_type = other DNA
ccagtacaattctagggcat

SEQ ID NO: 213278 - DNA, 20 bp, synthetic construct
  source 1..20: mol_type = other DNA
cccagtacaattctagggca

SEQ ID NO: 213279 - DNA, 20 bp, synthetic construct
  source 1..20: mol_type = other DNA
ccccagtacaattctagggc

SEQ ID NO: 213280 - DNA, 20 bp, synthetic construct
  source 1..20: mol_type = other DNA
tccccagtacaattctaggg

SEQ ID NO: 213281 - DNA, 20 bp, synthetic construct
  source 1..20: mol_type = other DNA
gtccccagtacaattctagg

SEQ ID NO: 213282 - DNA, 20 bp, synthetic construct
  source 1..20: mol_type = other DNA
agtccccagtacaattctag

SEQ ID NO: 213283 - DNA, 20 bp, synthetic construct
  source 1..20: mol_type = other DNA
gagtccccagtacaattcta

SEQ ID NO: 213284 - DNA, 20 bp, synthetic construct
  source 1..20: mol_type = other DNA
tgagtccccagtacaattct

SEQ ID NO: 213285 - DNA, 20 bp, synthetic construct
  source 1..20: mol_type = other DNA
ttgagtccccagtacaattc

SEQ ID NO: 213286 - DNA, 20 bp, synthetic construct
  source 1..20: mol_type = other DNA
tttgagtccccagtacaatt

SEQ ID NO: 213287 - DNA, 20 bp, synthetic construct
  source 1..20: mol_type = other DNA
ttttgagtccccagtacaat

SEQ ID NO: 213288 - DNA, 20 bp, synthetic construct
  source 1..20: mol_type = other DNA
tttttgagtccccagtacaa

SEQ ID NO: 213289 - DNA, 20 bp, synthetic construct
  source 1..20: mol_type = other DNA
ctttttgagtccccagtaca

SEQ ID NO: 213290 - DNA, 20 bp, synthetic construct
  source 1..20: mol_type = other DNA
tctttttgagtccccagtac

SEQ ID NO: 213291 - DNA, 20 bp, synthetic construct
  source 1..20: mol_type = other DNA
ttctttttgagtccccagta

SEQ ID NO: 213292 - DNA, 20 bp, synthetic construct
  source 1..20: mol_type = other DNA
tttctttttgagtccccagt

SEQ ID NO: 213293 - DNA, 20 bp, synthetic construct
  source 1..20: mol_type = other DNA
ttttctttttgagtccccag

SEQ ID NO: 213294 - DNA, 20 bp, synthetic construct
  source 1..20: mol_type = other DNA
cttttctttttgagtcccca

SEQ ID NO: 213295 - DNA, 20 bp, synthetic construct
  source 1..20: mol_type = other DNA
tcttttctttttgagtcccc

SEQ ID NO: 213296 - DNA, 20 bp, synthetic construct
  source 1..20: mol_type = other DNA
ctcttttctttttgagtccc

SEQ ID NO: 213297 - DNA, 20 bp, synthetic construct
  source 1..20: mol_type = other DNA
tctcttttctttttgagtcc

SEQ ID NO: 213298 - DNA, 20 bp, synthetic construct
  source 1..20: mol_type = other DNA
ctctcttttctttttgagtc

SEQ ID NO: 213299 - DNA, 20 bp, synthetic construct
  source 1..20: mol_type = other DNA
actctcttttctttttgagt

SEQ ID NO: 213300 - DNA, 20 bp, synthetic construct
  source 1..20: mol_type = other DNA
tactctcttttctttttgag

SEQ ID NO: 213301 - DNA, 20 bp, synthetic construct
  source 1..20: mol_type = other DNA
ctactctcttttctttttga

SEQ ID NO: 213302 - DNA, 20 bp, synthetic construct
  source 1..20: mol_type = other DNA
actactctcttttctttttg

SEQ ID NO: 213303 - DNA, 20 bp, synthetic construct
  source 1..20: mol_type = other DNA
tactactctcttttcttttt

SEQ ID NO: 213304 - DNA, 20 bp, synthetic construct
  source 1..20: mol_type = other DNA
ttactactctcttttctttt

SEQ ID NO: 213305 - DNA, 20 bp, synthetic construct
  source 1..20: mol_type = other DNA
tttactactctcttttcttt

SEQ ID NO: 213306 - DNA, 20 bp, synthetic construct
  source 1..20: mol_type = other DNA
ttttactactctcttttctt

SEQ ID NO: 213307 - DNA, 20 bp, synthetic construct
  source 1..20: mol_type = other DNA
attttactactctcttttct

SEQ ID NO: 213308 - DNA, 20 bp, synthetic construct
  source 1..20: mol_type = other DNA
gattttactactctcttttc

SEQ ID NO: 213309 - DNA, 20 bp, synthetic construct
  source 1..20: mol_type = other DNA
agattttactactctctttt

SEQ ID NO: 213310 - DNA, 20 bp, synthetic construct
  source 1..20: mol_type = other DNA
tagattttactactctcttt

SEQ ID NO: 213311 - DNA, 20 bp, synthetic construct
  source 1..20: mol_type = other DNA
atagattttactactctctt

SEQ ID NO: 213312 - DNA, 20 bp, synthetic construct
  source 1..20: mol_type = other DNA
aatagattttactactctct

SEQ ID NO: 213313 - DNA, 20 bp, synthetic construct
  source 1..20: mol_type = other DNA
taatagattttactactctc

SEQ ID NO: 213314 - DNA, 20 bp, synthetic construct
  source 1..20: mol_type = other DNA
ttaatagattttactactct

SEQ ID NO: 213315 - DNA, 20 bp, synthetic construct
  source 1..20: mol_type = other DNA
tttaatagattttactactc

SEQ ID NO: 213316 - DNA, 20 bp, synthetic construct
  source 1..20: mol_type = other DNA
ctttaatagattttactact

SEQ ID NO: 213317 - DNA, 20 bp, synthetic construct
  source 1..20: mol_type = other DNA
cctttaatagattttactac

SEQ ID NO: 213318 - DNA, 20 bp, synthetic construct
  source 1..20: mol_type = other DNA
ccctttaatagattttacta

SEQ ID NO: 213319 - DNA, 20 bp, synthetic construct
  source 1..20: mol_type = other DNA
cccctttaatagattttact

SEQ ID NO: 213320 - DNA, 20 bp, synthetic construct
  source 1..20: mol_type = other DNA
tcccctttaatagattttac

SEQ ID NO: 213321 - DNA, 20 bp, synthetic construct
  source 1..20: mol_type = other DNA
gtcccctttaatagatttta

SEQ ID NO: 213322 - DNA, 20 bp, synthetic construct
  source 1..20: mol_type = other DNA
tgtcccctttaatagatttt

SEQ ID NO: 213323 - DNA, 20 bp, synthetic construct
  source 1..20: mol_type = other DNA
ttgtcccctttaatagattt

SEQ ID NO: 213324 - DNA, 20 bp, synthetic construct
  source 1..20: mol_type = other DNA
tttgtcccctttaatagatt

SEQ ID NO: 213325 - DNA, 20 bp, synthetic construct
  source 1..20: mol_type = other DNA
ctttgtcccctttaatagat

SEQ ID NO: 213326 - DNA, 20 bp, synthetic construct
  source 1..20: mol_type = other DNA
tctttgtcccctttaataga

SEQ ID NO: 213327 - DNA, 20 bp, synthetic construct
  source 1..20: mol_type = other DNA
gtctttgtcccctttaatag

SEQ ID NO: 213328 - DNA, 20 bp, synthetic construct
  source 1..20: mol_type = other DNA
tgtctttgtcccctttaata

SEQ ID NO: 213329 - DNA, 20 bp, synthetic construct
  source 1..20: mol_type = other DNA
ctgtctttgtcccctttaat

SEQ ID NO: 213330 - DNA, 20 bp, synthetic construct
  source 1..20: mol_type = other DNA
gctgtctttgtcccctttaa

SEQ ID NO: 213331 - DNA, 20 bp, synthetic construct
  source 1..20: mol_type = other DNA
ggctgtctttgtccccttta

SEQ ID NO: 213332 - DNA, 20 bp, synthetic construct
  source 1..20: mol_type = other DNA
aggctgtctttgtccccttt

SEQ ID NO: 213333 - DNA, 20 bp, synthetic construct
  source 1..20: mol_type = other DNA
taggctgtctttgtcccctt

SEQ ID NO: 213334 - DNA, 20 bp, synthetic construct
  source 1..20: mol_type = other DNA
ataggctgtctttgtcccct

SEQ ID NO: 213335 - DNA, 20 bp, synthetic construct
  source 1..20: mol_type = other DNA
tataggctgtctttgtcccc

SEQ ID NO: 213336 - DNA, 20 bp, synthetic construct
  source 1..20: mol_type = other DNA
atataggctgtctttgtccc

SEQ ID NO: 213337 - DNA, 20 bp, synthetic construct
  source 1..20: mol_type = other DNA
tatataggctgtctttgtcc

SEQ ID NO: 213338 - DNA, 20 bp, synthetic construct
  source 1..20: mol_type = other DNA
gtatataggctgtctttgtc

SEQ ID NO: 213339 - DNA, 20 bp, synthetic construct
  source 1..20: mol_type = other DNA
agtatataggctgtctttgt

SEQ ID NO: 213340 - DNA, 20 bp, synthetic construct
  source 1..20: mol_type = other DNA
tagtatataggctgtctttg

SEQ ID NO: 213341 - DNA, 20 bp, synthetic construct
  source 1..20: mol_type = other DNA
gtagtatataggctgtcttt

SEQ ID NO: 213342 - DNA, 20 bp, synthetic construct
  source 1..20: mol_type = other DNA
tgtagtatataggctgtctt

SEQ ID NO: 213343 - DNA, 20 bp, synthetic construct
  source 1..20: mol_type = other DNA
ttgtagtatataggctgtct

SEQ ID NO: 213344 - DNA, 20 bp, synthetic construct
  source 1..20: mol_type = other DNA
cttgtagtatataggctgtc

SEQ ID NO: 213345 - DNA, 20 bp, synthetic construct
  source 1..20: mol_type = other DNA
gcttgtagtatataggctgt

SEQ ID NO: 213346 - DNA, 20 bp, synthetic construct
  source 1..20: mol_type = other DNA
agcttgtagtatataggctg

SEQ ID NO: 213347 - DNA, 20 bp, synthetic construct
  source 1..20: mol_type = other DNA
aagcttgtagtatataggct

SEQ ID NO: 213348 - DNA, 20 bp, synthetic construct
  source 1..20: mol_type = other DNA
aaagcttgtagtatataggc

SEQ ID NO: 213349 - DNA, 20 bp, synthetic construct
  source 1..20: mol_type = other DNA
gaaagcttgtagtatatagg

SEQ ID NO: 213350 - DNA, 20 bp, synthetic construct
  source 1..20: mol_type = other DNA
agaaagcttgtagtatatag

SEQ ID NO: 213351 - DNA, 20 bp, synthetic construct
  source 1..20: mol_type = other DNA
tagaaagcttgtagtatata

SEQ ID NO: 213352 - DNA, 20 bp, synthetic construct
  source 1..20: mol_type = other DNA
atagaaagcttgtagtatat

SEQ ID NO: 213353 - DNA, 20 bp, synthetic construct
  source 1..20: mol_type = other DNA
aatagaaagcttgtagtata

SEQ ID NO: 213354 - DNA, 20 bp, synthetic construct
  source 1..20: mol_type = other DNA
aaatagaaagcttgtagtat

SEQ ID NO: 213355 - DNA, 20 bp, synthetic construct
  source 1..20: mol_type = other DNA
aaaatagaaagcttgtagta

SEQ ID NO: 213356 - DNA, 20 bp, synthetic construct
  source 1..20: mol_type = other DNA
aaaaatagaaagcttgtagt

SEQ ID NO: 213357 - DNA, 20 bp, synthetic construct
  source 1..20: mol_type = other DNA
taaaaatagaaagcttgtag

SEQ ID NO: 213358 - DNA, 20 bp, synthetic construct
  source 1..20: mol_type = other DNA
ataaaaatagaaagcttgta

SEQ ID NO: 213359 - DNA, 20 bp, synthetic construct
  source 1..20: mol_type = other DNA
cataaaaatagaaagcttgt

SEQ ID NO: 213360 - DNA, 20 bp, synthetic construct
  source 1..20: mol_type = other DNA
ccataaaaatagaaagcttg

SEQ ID NO: 213361 - DNA, 20 bp, synthetic construct
  source 1..20: mol_type = other DNA
gccataaaaatagaaagctt

SEQ ID NO: 213362 - DNA, 20 bp, synthetic construct
  source 1..20: mol_type = other DNA
tgccataaaaatagaaagct

SEQ ID NO: 213363 - DNA, 20 bp, synthetic construct
  source 1..20: mol_type = other DNA
ctgccataaaaatagaaagc

SEQ ID NO: 213364 - DNA, 20 bp, synthetic construct
  source 1..20: mol_type = other DNA
tctgccataaaaatagaaag

SEQ ID NO: 213365 - DNA, 20 bp, synthetic construct
  source 1..20: mol_type = other DNA
ctctgccataaaaatagaaa

SEQ ID NO: 213366 - DNA, 20 bp, synthetic construct
  source 1..20: mol_type = other DNA
tctctgccataaaaatagaa

SEQ ID NO: 213367 - DNA, 20 bp, synthetic construct
  source 1..20: mol_type = other DNA
ttctctgccataaaaataga

SEQ ID NO: 213368 - DNA, 20 bp, synthetic construct
  source 1..20: mol_type = other DNA
attctctgccataaaaatag

SEQ ID NO: 213369 - DNA, 20 bp, synthetic construct
  source 1..20: mol_type = other DNA
cattctctgccataaaaata

SEQ ID NO: 213370 - DNA, 20 bp, synthetic construct
  source 1..20: mol_type = other DNA
gcattctctgccataaaaat

SEQ ID NO: 213371 - DNA, 20 bp, synthetic construct
  source 1..20: mol_type = other DNA
ggcattctctgccataaaaa

SEQ ID NO: 213372 - DNA, 20 bp, synthetic construct
  source 1..20: mol_type = other DNA
tggcattctctgccataaaa

SEQ ID NO: 213373 - DNA, 20 bp, synthetic construct
  source 1..20: mol_type = other DNA
atggcattctctgccataaa

SEQ ID NO: 213374 - DNA, 20 bp, synthetic construct
  source 1..20: mol_type = other DNA
aatggcattctctgccataa

SEQ ID NO: 213375 - DNA, 20 bp, synthetic construct
  source 1..20: mol_type = other DNA
aaatggcattctctgccata

SEQ ID NO: 213376 - DNA, 20 bp, synthetic construct
  source 1..20: mol_type = other DNA
aaaatggcattctctgccat

SEQ ID NO: 213377 - DNA, 20 bp, synthetic construct
  source 1..20: mol_type = other DNA
gaaaatggcattctctgcca

SEQ ID NO: 213378 - DNA, 20 bp, synthetic construct
  source 1..20: mol_type = other DNA
agaaaatggcattctctgcc

SEQ ID NO: 213379 - DNA, 20 bp, synthetic construct
  source 1..20: mol_type = other DNA
tagaaaatggcattctctgc

SEQ ID NO: 213380 - DNA, 20 bp, synthetic construct
  source 1..20: mol_type = other DNA
ttagaaaatggcattctctg

SEQ ID NO: 213381 - DNA, 20 bp, synthetic construct
  source 1..20: mol_type = other DNA
cttagaaaatggcattctct

SEQ ID NO: 213382 - DNA, 20 bp, synthetic construct
  source 1..20: mol_type = other DNA
acttagaaaatggcattctc

SEQ ID NO: 213383 - DNA, 20 bp, synthetic construct
  source 1..20: mol_type = other DNA
tacttagaaaatggcattct

SEQ ID NO: 213384 - DNA, 20 bp, synthetic construct
  source 1..20: mol_type = other DNA
ttacttagaaaatggcattc

SEQ ID NO: 213385 - DNA, 20 bp, synthetic construct
  source 1..20: mol_type = other DNA
tttacttagaaaatggcatt

SEQ ID NO: 213386 - DNA, 20 bp, synthetic construct
  source 1..20: mol_type = other DNA
gtttacttagaaaatggcat

SEQ ID NO: 213387 - DNA, 20 bp, synthetic construct
  source 1..20: mol_type = other DNA
tgtttacttagaaaatggca

SEQ ID NO: 213388 - DNA, 20 bp, synthetic construct
  source 1..20: mol_type = other DNA
ctgtttacttagaaaatggc

SEQ ID NO: 213389 - DNA, 20 bp, synthetic construct
  source 1..20: mol_type = other DNA
tctgtttacttagaaaatgg

SEQ ID NO: 213390 - DNA, 20 bp, synthetic construct
  source 1..20: mol_type = other DNA
ctctgtttacttagaaaatg

SEQ ID NO: 213391 - DNA, 20 bp, synthetic construct
  source 1..20: mol_type = other DNA
tctctgtttacttagaaaat

SEQ ID NO: 213392 - DNA, 20 bp, synthetic construct
  source 1..20: mol_type = other DNA
ttctctgtttacttagaaaa

SEQ ID NO: 213393 - DNA, 20 bp, synthetic construct
  source 1..20: mol_type = other DNA
gttctctgtttacttagaaa

SEQ ID NO: 213394 - DNA, 20 bp, synthetic construct
  source 1..20: mol_type = other DNA
agttctctgtttacttagaa

SEQ ID NO: 213395 - DNA, 20 bp, synthetic construct
  source 1..20: mol_type = other DNA
cagttctctgtttacttaga

SEQ ID NO: 213396 - DNA, 20 bp, synthetic construct
  source 1..20: mol_type = other DNA
gcagttctctgtttacttag

SEQ ID NO: 213397 - DNA, 20 bp, synthetic construct
  source 1..20: mol_type = other DNA
tgcagttctctgtttactta

SEQ ID NO: 213398 - DNA, 20 bp, synthetic construct
  source 1..20: mol_type = other DNA
atgcagttctctgtttactt

SEQ ID NO: 213399 - DNA, 20 bp, synthetic construct
  source 1..20: mol_type = other DNA
aatgcagttctctgtttact

SEQ ID NO: 213400 - DNA, 20 bp, synthetic construct
  source 1..20: mol_type = other DNA
aaatgcagttctctgtttac

SEQ ID NO: 213401 - DNA, 20 bp, synthetic construct
  source 1..20: mol_type = other DNA
caaatgcagttctctgttta

SEQ ID NO: 213402 - DNA, 20 bp, synthetic construct
  source 1..20: mol_type = other DNA
tcaaatgcagttctctgttt

SEQ ID NO: 213403 - DNA, 20 bp, synthetic construct
  source 1..20: mol_type = other DNA
gtcaaatgcagttctctgtt

SEQ ID NO: 213404 - DNA, 20 bp, synthetic construct
  source 1..20: mol_type = other DNA
ggtcaaatgcagttctctgt

SEQ ID NO: 213405 - DNA, 20 bp, synthetic construct
  source 1..20: mol_type = other DNA
aggtcaaatgcagttctctg

SEQ ID NO: 213406 - DNA, 20 bp, synthetic construct
  source 1..20: mol_type = other DNA
caggtcaaatgcagttctct

SEQ ID NO: 213407 - DNA, 20 bp, synthetic construct
  source 1..20: mol_type = other DNA
gcaggtcaaatgcagttctc

SEQ ID NO: 213408 - DNA, 20 bp, synthetic construct
  source 1..20: mol_type = other DNA
tgcaggtcaaatgcagttct

SEQ ID NO: 213409 - DNA, 20 bp, synthetic construct
  source 1..20: mol_type = other DNA
ttgcaggtcaaatgcagttc

SEQ ID NO: 213410 - DNA, 20 bp, synthetic construct
  source 1..20: mol_type = other DNA
attgcaggtcaaatgcagtt

SEQ ID NO: 213411 - DNA, 20 bp, synthetic construct
  source 1..20: mol_type = other DNA
tattgcaggtcaaatgcagt

SEQ ID NO: 213412 - DNA, 20 bp, synthetic construct
  source 1..20: mol_type = other DNA
atattgcaggtcaaatgcag

SEQ ID NO: 213413 - DNA, 20 bp, synthetic construct
  source 1..20: mol_type = other DNA
gatattgcaggtcaaatgca

SEQ ID NO: 213414 - DNA, 20 bp, synthetic construct
  source 1..20: mol_type = other DNA
tgatattgcaggtcaaatgc

SEQ ID NO: 213415 - DNA, 20 bp, synthetic construct
  source 1..20: mol_type = other DNA
ttgatattgcaggtcaaatg

SEQ ID NO: 213416 - DNA, 20 bp, synthetic construct
  source 1..20: mol_type = other DNA
tttgatattgcaggtcaaat

SEQ ID NO: 213417 - DNA, 20 bp, synthetic construct
  source 1..20: mol_type = other DNA
atttgatattgcaggtcaaa

SEQ ID NO: 213418 - DNA, 20 bp, synthetic construct
  source 1..20: mol_type = other DNA
catttgatattgcaggtcaa

SEQ ID NO: 213419 - DNA, 20 bp, synthetic construct
  source 1..20: mol_type = other DNA
gcatttgatattgcaggtca

SEQ ID NO: 213420 - DNA, 20 bp, synthetic construct
  source 1..20: mol_type = other DNA
tgcatttgatattgcaggtc

SEQ ID NO: 213421 - DNA, 20 bp, synthetic construct
  source 1..20: mol_type = other DNA
atgcatttgatattgcaggt

SEQ ID NO: 213422 - DNA, 20 bp, synthetic construct
  source 1..20: mol_type = other DNA
catgcatttgatattgcagg

SEQ ID NO: 213423 - DNA, 20 bp, synthetic construct
  source 1..20: mol_type = other DNA
ccatgcatttgatattgcag

SEQ ID NO: 213424 - DNA, 20 bp, synthetic construct
  source 1..20: mol_type = other DNA
tccatgcatttgatattgca

SEQ ID NO: 213425 - DNA, 20 bp, synthetic construct
  source 1..20: mol_type = other DNA
atccatgcatttgatattgc

SEQ ID NO: 213426 - DNA, 20 bp, synthetic construct
  source 1..20: mol_type = other DNA
aatccatgcatttgatattg

SEQ ID NO: 213427 - DNA, 20 bp, synthetic construct
  source 1..20: mol_type = other DNA
aaatccatgcatttgatatt

SEQ ID NO: 213428 - DNA, 20 bp, synthetic construct
  source 1..20: mol_type = other DNA
caaatccatgcatttgatat

SEQ ID NO: 213429 - DNA, 20 bp, synthetic construct
  source 1..20: mol_type = other DNA
tcaaatccatgcatttgata

SEQ ID NO: 213430 - DNA, 20 bp, synthetic construct
  source 1..20: mol_type = other DNA
atcaaatccatgcatttgat

SEQ ID NO: 213431 - DNA, 20 bp, synthetic construct
  source 1..20: mol_type = other DNA
catcaaatccatgcatttga

SEQ ID NO: 213432 - DNA, 20 bp, synthetic construct
  source 1..20: mol_type = other DNA
gcatcaaatccatgcatttg

SEQ ID NO: 213433 - DNA, 20 bp, synthetic construct
  source 1..20: mol_type = other DNA
agcatcaaatccatgcattt

SEQ ID NO: 213434 - DNA, 20 bp, synthetic construct
  source 1..20: mol_type = other DNA
aagcatcaaatccatgcatt

SEQ ID NO: 213435 - DNA, 20 bp, synthetic construct
  source 1..20: mol_type = other DNA
aaagcatcaaatccatgcat

SEQ ID NO: 213436 - DNA, 20 bp, synthetic construct
  source 1..20: mol_type = other DNA
caaagcatcaaatccatgca

SEQ ID NO: 213437 - DNA, 20 bp, synthetic construct
  source 1..20: mol_type = other DNA
ccaaagcatcaaatccatgc

SEQ ID NO: 213438 - DNA, 20 bp, synthetic construct
  source 1..20: mol_type = other DNA
tccaaagcatcaaatccatg

SEQ ID NO: 213439 - DNA, 20 bp, synthetic construct
  source 1..20: mol_type = other DNA
ttccaaagcatcaaatccat

SEQ ID NO: 213440 - DNA, 20 bp, synthetic construct
  source 1..20: mol_type = other DNA
tttccaaagcatcaaatcca

SEQ ID NO: 213441 - DNA, 20 bp, synthetic construct
  source 1..20: mol_type = other DNA
ctttccaaagcatcaaatcc

SEQ ID NO: 213442 - DNA, 20 bp, synthetic construct
  source 1..20: mol_type = other DNA
gctttccaaagcatcaaatc

SEQ ID NO: 213443 - DNA, 20 bp, synthetic construct
  source 1..20: mol_type = other DNA
tgctttccaaagcatcaaat

SEQ ID NO: 213444 - DNA, 20 bp, synthetic construct
  source 1..20: mol_type = other DNA
ttgctttccaaagcatcaaa

SEQ ID NO: 213445 - DNA, 20 bp, synthetic construct
  source 1..20: mol_type = other DNA
gttgctttccaaagcatcaa

SEQ ID NO: 213446 - DNA, 20 bp, synthetic construct
  source 1..20: mol_type = other DNA
agttgctttccaaagcatca

SEQ ID NO: 213447 - DNA, 20 bp, synthetic construct
  source 1..20: mol_type = other DNA
cagttgctttccaaagcatc

SEQ ID NO: 213448 - DNA, 20 bp, synthetic construct
  source 1..20: mol_type = other DNA
acagttgctttccaaagcat

SEQ ID NO: 213449 - DNA, 20 bp, synthetic construct
  source 1..20: mol_type = other DNA
aacagttgctttccaaagca

SEQ ID NO: 213450 - DNA, 20 bp, synthetic construct
  source 1..20: mol_type = other DNA
aaacagttgctttccaaagc

SEQ ID NO: 213451 - DNA, 20 bp, synthetic construct
  source 1..20: mol_type = other DNA
aaaacagttgctttccaaag

SEQ ID NO: 213452 - DNA, 20 bp, synthetic construct
  source 1..20: mol_type = other DNA
gaaaacagttgctttccaaa

SEQ ID NO: 213453 - DNA, 20 bp, synthetic construct
  source 1..20: mol_type = other DNA
agaaaacagttgctttccaa

SEQ ID NO: 213454 - DNA, 20 bp, synthetic construct
  source 1..20: mol_type = other DNA
cagaaaacagttgctttcca

SEQ ID NO: 213455 - DNA, 20 bp, synthetic construct
  source 1..20: mol_type = other DNA
gcagaaaacagttgctttcc

SEQ ID NO: 213456 - DNA, 20 bp, synthetic construct
  source 1..20: mol_type = other DNA
cgcagaaaacagttgctttc

SEQ ID NO: 213457 - DNA, 20 bp, synthetic construct
  source 1..20: mol_type = other DNA
acgcagaaaacagttgcttt

SEQ ID NO: 213458 - DNA, 20 bp, synthetic construct
  source 1..20: mol_type = other DNA
aacgcagaaaacagttgctt

SEQ ID NO: 213459 - DNA, 20 bp, synthetic construct
  source 1..20: mol_type = other DNA
taacgcagaaaacagttgct

SEQ ID NO: 213460 - DNA, 20 bp, synthetic construct
  source 1..20: mol_type = other DNA
ttaacgcagaaaacagttgc

SEQ ID NO: 213461 - DNA, 20 bp, synthetic construct
  source 1..20: mol_type = other DNA
attaacgcagaaaacagttg

SEQ ID NO: 213462 - DNA, 20 bp, synthetic construct
  source 1..20: mol_type = other DNA
gattaacgcagaaaacagtt

SEQ ID NO: 213463 - DNA, 20 bp, synthetic construct
  source 1..20: mol_type = other DNA
agattaacgcagaaaacagt

SEQ ID NO: 213464 - DNA, 20 bp, synthetic construct
  source 1..20: mol_type = other DNA
cagattaacgcagaaaacag

SEQ ID NO: 213465 - DNA, 20 bp, synthetic construct
  source 1..20: mol_type = other DNA
ccagattaacgcagaaaaca

SEQ ID NO: 213466 - DNA, 20 bp, synthetic construct
  source 1..20: mol_type = other DNA
cccagattaacgcagaaaac

SEQ ID NO: 213467 - DNA, 20 bp, synthetic construct
  source 1..20: mol_type = other DNA
acccagattaacgcagaaaa

SEQ ID NO: 213468 - DNA, 20 bp, synthetic construct
  source 1..20: mol_type = other DNA
cacccagattaacgcagaaa

SEQ ID NO: 213469 - DNA, 20 bp, synthetic construct
  source 1..20: mol_type = other DNA
acacccagattaacgcagaa

SEQ ID NO: 213470 - DNA, 20 bp, synthetic construct
  source 1..20: mol_type = other DNA
gacacccagattaacgcaga

SEQ ID NO: 213471 - DNA, 20 bp, synthetic construct
  source 1..20: mol_type = other DNA
agacacccagattaacgcag

SEQ ID NO: 213472 - DNA, 20 bp, synthetic construct
  source 1..20: mol_type = other DNA
aagacacccagattaacgca

SEQ ID NO: 213473 - DNA, 20 bp, synthetic construct
  source 1..20: mol_type = other DNA
gaagacacccagattaacgc

SEQ ID NO: 213474 - DNA, 20 bp, synthetic construct
  source 1..20: mol_type = other DNA
ggaagacacccagattaacg

SEQ ID NO: 213475 - DNA, 20 bp, synthetic construct
  source 1..20: mol_type = other DNA
cggaagacacccagattaac

SEQ ID NO: 213476 - DNA, 20 bp, synthetic construct
  source 1..20: mol_type = other DNA
acggaagacacccagattaa

SEQ ID NO: 213477 - DNA, 20 bp, synthetic construct
  source 1..20: mol_type = other DNA
cacggaagacacccagatta

SEQ ID NO: 213478 - DNA, 20 bp, synthetic construct
  source 1..20: mol_type = other DNA
tcacggaagacacccagatt

SEQ ID NO: 213479 - DNA, 20 bp, synthetic construct
  source 1..20: mol_type = other DNA
ttcacggaagacacccagat

SEQ ID NO: 213480 - DNA, 20 bp, synthetic construct
  source 1..20: mol_type = other DNA
tttcacggaagacacccaga

SEQ ID NO: 213481 - DNA, 20 bp, synthetic construct
  source 1..20: mol_type = other DNA
atttcacggaagacacccag

SEQ ID NO: 213482 - DNA, 20 bp, synthetic construct
  source 1..20: mol_type = other DNA
catttcacggaagacaccca

SEQ ID NO: 213483 - DNA, 20 bp, synthetic construct
  source 1..20: mol_type = other DNA
acatttcacggaagacaccc

SEQ ID NO: 213484 - DNA, 20 bp, synthetic construct
  source 1..20: mol_type = other DNA
gacatttcacggaagacacc

SEQ ID NO: 213485 - DNA, 20 bp, synthetic construct
  source 1..20: mol_type = other DNA
ggacatttcacggaagacac

SEQ ID NO: 213486 - DNA, 20 bp, synthetic construct
  source 1..20: mol_type = other DNA
aggacatttcacggaagaca

SEQ ID NO: 213487 - DNA, 20 bp, synthetic construct
  source 1..20: mol_type = other DNA
gaggacatttcacggaagac

SEQ ID NO: 213488 - DNA, 20 bp, synthetic construct
  source 1..20: mol_type = other DNA
ggaggacatttcacggaaga

SEQ ID NO: 213489 - DNA, 20 bp, synthetic construct
  source 1..20: mol_type = other DNA
aggaggacatttcacggaag

SEQ ID NO: 213490 - DNA, 20 bp, synthetic construct
  source 1..20: mol_type = other DNA
caggaggacatttcacggaa

SEQ ID NO: 213491 - DNA, 20 bp, synthetic construct
  source 1..20: mol_type = other DNA
gcaggaggacatttcacgga

SEQ ID NO: 213492 - DNA, 20 bp, synthetic construct
  source 1..20: mol_type = other DNA
ggcaggaggacatttcacgg

SEQ ID NO: 213493 - DNA, 20 bp, synthetic construct
  source 1..20: mol_type = other DNA
aggcaggaggacatttcacg

SEQ ID NO: 213494 - DNA, 20 bp, synthetic construct
  source 1..20: mol_type = other DNA
aaggcaggaggacatttcac

SEQ ID NO: 213495 - DNA, 20 bp, synthetic construct
  source 1..20: mol_type = other DNA
aaaggcaggaggacatttca

SEQ ID NO: 213496 - DNA, 20 bp, synthetic construct
  source 1..20: mol_type = other DNA
caaaggcaggaggacatttc

SEQ ID NO: 213497 - DNA, 20 bp, synthetic construct
  source 1..20: mol_type = other DNA
ccaaaggcaggaggacattt

SEQ ID NO: 213498 - DNA, 20 bp, synthetic construct
  source 1..20: mol_type = other DNA
gccaaaggcaggaggacatt

SEQ ID NO: 213499 - DNA, 20 bp, synthetic construct
  source 1..20: mol_type = other DNA
agccaaaggcaggaggacat

SEQ ID NO: 213500 - DNA, 20 bp, synthetic construct
  source 1..20: mol_type = other DNA
aagccaaaggcaggaggaca

SEQ ID NO: 213501 - DNA, 20 bp, synthetic construct
  source 1..20: mol_type = other DNA
taagccaaaggcaggaggac

SEQ ID NO: 213502 - DNA, 20 bp, synthetic construct
  source 1..20: mol_type = other DNA
ttaagccaaaggcaggagga

SEQ ID NO: 213503 - DNA, 20 bp, synthetic construct
  source 1..20: mol_type = other DNA
tttaagccaaaggcaggagg

SEQ ID NO: 213504 - DNA, 20 bp, synthetic construct
  source 1..20: mol_type = other DNA
gtttaagccaaaggcaggag

SEQ ID NO: 213505 - DNA, 20 bp, synthetic construct
  source 1..20: mol_type = other DNA
tgtttaagccaaaggcagga

SEQ ID NO: 213506 - DNA, 20 bp, synthetic construct
  source 1..20: mol_type = other DNA
gtgtttaagccaaaggcagg

SEQ ID NO: 213507 - DNA, 20 bp, synthetic construct
  source 1..20: mol_type = other DNA
agtgtttaagccaaaggcag

SEQ ID NO: 213508 - DNA, 20 bp, synthetic construct
  source 1..20: mol_type = other DNA
tagtgtttaagccaaaggca

SEQ ID NO: 213509 - DNA, 20 bp, synthetic construct
  source 1..20: mol_type = other DNA
ctagtgtttaagccaaaggc

SEQ ID NO: 213510 - DNA, 20 bp, synthetic construct
  source 1..20: mol_type = other DNA
gctagtgtttaagccaaagg

SEQ ID NO: 213511 - DNA, 20 bp, synthetic construct
  source 1..20: mol_type = other DNA
agctagtgtttaagccaaag

SEQ ID NO: 213512 - DNA, 20 bp, synthetic construct
  source 1..20: mol_type = other DNA
aagctagtgtttaagccaaa

SEQ ID NO: 213513 - DNA, 20 bp, synthetic construct
  source 1..20: mol_type = other DNA
aaagctagtgtttaagccaa

SEQ ID NO: 213514 - DNA, 20 bp, synthetic construct
  source 1..20: mol_type = other DNA
caaagctagtgtttaagcca

SEQ ID NO: 213515 - DNA, 20 bp, synthetic construct
  source 1..20: mol_type = other DNA
acaaagctagtgtttaagcc

SEQ ID NO: 213516 - DNA, 20 bp, synthetic construct
  source 1..20: mol_type = other DNA
gacaaagctagtgtttaagc

SEQ ID NO: 213517 - DNA, 20 bp, synthetic construct
  source 1..20: mol_type = other DNA
agacaaagctagtgtttaag

SEQ ID NO: 213518 - DNA, 20 bp, synthetic construct
  source 1..20: mol_type = other DNA
tagacaaagctagtgtttaa

SEQ ID NO: 213519 - DNA, 20 bp, synthetic construct
  source 1..20: mol_type = other DNA
gtagacaaagctagtgttta

SEQ ID NO: 213520 - DNA, 20 bp, synthetic construct
  source 1..20: mol_type = other DNA
tgtagacaaagctagtgttt

SEQ ID NO: 213521 - DNA, 20 bp, synthetic construct
  source 1..20: mol_type = other DNA
ctgtagacaaagctagtgtt

SEQ ID NO: 213522 - DNA, 20 bp, synthetic construct
  source 1..20: mol_type = other DNA
gctgtagacaaagctagtgt

SEQ ID NO: 213523 - DNA, 20 bp, synthetic construct
  source 1..20: mol_type = other DNA
ggctgtagacaaagctagtg

SEQ ID NO: 213524 - DNA, 20 bp, synthetic construct
  source 1..20: mol_type = other DNA
tggctgtagacaaagctagt

SEQ ID NO: 213525 - DNA, 20 bp, synthetic construct
  source 1..20: mol_type = other DNA
atggctgtagacaaagctag

SEQ ID NO: 213526 - DNA, 20 bp, synthetic construct
  source 1..20: mol_type = other DNA
aatggctgtagacaaagcta

SEQ ID NO: 213527 - DNA, 20 bp, synthetic construct
  source 1..20: mol_type = other DNA
gaatggctgtagacaaagct

SEQ ID NO: 213528 - DNA, 20 bp, synthetic construct
  source 1..20: mol_type = other DNA
ggaatggctgtagacaaagc

SEQ ID NO: 213529 - DNA, 20 bp, synthetic construct
  source 1..20: mol_type = other DNA
tggaatggctgtagacaaag

SEQ ID NO: 213530 - DNA, 20 bp, synthetic construct
  source 1..20: mol_type = other DNA
atggaatggctgtagacaaa

SEQ ID NO: 213531 - DNA, 20 bp, synthetic construct
  source 1..20: mol_type = other DNA
gatggaatggctgtagacaa

SEQ ID NO: 213532 - DNA, 20 bp, synthetic construct
  source 1..20: mol_type = other DNA
ggatggaatggctgtagaca

SEQ ID NO: 213533 - DNA, 20 bp, synthetic construct
  source 1..20: mol_type = other DNA
aggatggaatggctgtagac

SEQ ID NO: 213534 - DNA, 20 bp, synthetic construct
  source 1..20: mol_type = other DNA
caggatggaatggctgtaga

SEQ ID NO: 213535 - DNA, 20 bp, synthetic construct
  source 1..20: mol_type = other DNA
tcaggatggaatggctgtag

SEQ ID NO: 213536 - DNA, 20 bp, synthetic construct
  source 1..20: mol_type = other DNA
ttcaggatggaatggctgta

SEQ ID NO: 213537 - DNA, 20 bp, synthetic construct
  source 1..20: mol_type = other DNA
gttcaggatggaatggctgt

SEQ ID NO: 213538 - DNA, 20 bp, synthetic construct
  source 1..20: mol_type = other DNA
ggttcaggatggaatggctg

SEQ ID NO: 213539 - DNA, 20 bp, synthetic construct
  source 1..20: mol_type = other DNA
aggttcaggatggaatggct

SEQ ID NO: 213540 - DNA, 20 bp, synthetic construct
  source 1..20: mol_type = other DNA
caggttcaggatggaatggc

SEQ ID NO: 213541 - DNA, 20 bp, synthetic construct
  source 1..20: mol_type = other DNA
gcaggttcaggatggaatgg

SEQ ID NO: 213542 - DNA, 20 bp, synthetic construct
  source 1..20: mol_type = other DNA
ggcaggttcaggatggaatg

SEQ ID NO: 213543 - DNA, 20 bp, synthetic construct
  source 1..20: mol_type = other DNA
gggcaggttcaggatggaat

SEQ ID NO: 213544 - DNA, 20 bp, synthetic construct
  source 1..20: mol_type = other DNA
tgggcaggttcaggatggaa

SEQ ID NO: 213545 - DNA, 20 bp, synthetic construct
  source 1..20: mol_type = other DNA
ttgggcaggttcaggatgga

SEQ ID NO: 213546 - DNA, 20 bp, synthetic construct
  source 1..20: mol_type = other DNA
attgggcaggttcaggatgg

SEQ ID NO: 213547 - DNA, 20 bp, synthetic construct
  source 1..20: mol_type = other DNA
gattgggcaggttcaggatg

SEQ ID NO: 213548 - DNA, 20 bp, synthetic construct
  source 1..20: mol_type = other DNA
agattgggcaggttcaggat

SEQ ID NO: 213549 - DNA, 20 bp, synthetic construct
  source 1..20: mol_type = other DNA
aagattgggcaggttcagga

SEQ ID NO: 213550 - DNA, 20 bp, synthetic construct
  source 1..20: mol_type = other DNA
caagattgggcaggttcagg

SEQ ID NO: 213551 - DNA, 20 bp, synthetic construct
  source 1..20: mol_type = other DNA
acaagattgggcaggttcag

SEQ ID NO: 213552 - DNA, 20 bp, synthetic construct
  source 1..20: mol_type = other DNA
gacaagattgggcaggttca

SEQ ID NO: 213553 - DNA, 20 bp, synthetic construct
  source 1..20: mol_type = other DNA
agacaagattgggcaggttc

SEQ ID NO: 213554 - DNA, 20 bp, synthetic construct
  source 1..20: mol_type = other DNA
cagacaagattgggcaggtt

SEQ ID NO: 213555 - DNA, 20 bp, synthetic construct
  source 1..20: mol_type = other DNA
tcagacaagattgggcaggt

SEQ ID NO: 213556 - DNA, 20 bp, synthetic construct
  source 1..20: mol_type = other DNA
ttcagacaagattgggcagg

SEQ ID NO: 213557 - DNA, 20 bp, synthetic construct
  source 1..20: mol_type = other DNA
attcagacaagattgggcag

SEQ ID NO: 213558 - DNA, 20 bp, synthetic construct
  source 1..20: mol_type = other DNA
gattcagacaagattgggca

SEQ ID NO: 213559 - DNA, 20 bp, synthetic construct
  source 1..20: mol_type = other DNA
ggattcagacaagattgggc

SEQ ID NO: 213560 - DNA, 20 bp, synthetic construct
  source 1..20: mol_type = other DNA
aggattcagacaagattggg

SEQ ID NO: 213561 - DNA, 20 bp, synthetic construct
  source 1..20: mol_type = other DNA
caggattcagacaagattgg

SEQ ID NO: 213562 - DNA, 20 bp, synthetic construct
  source 1..20: mol_type = other DNA
ccaggattcagacaagattg

SEQ ID NO: 213563 - DNA, 20 bp, synthetic construct
  source 1..20: mol_type = other DNA
accaggattcagacaagatt

SEQ ID NO: 213564 - DNA, 20 bp, synthetic construct
  source 1..20: mol_type = other DNA
aaccaggattcagacaagat

SEQ ID NO: 213565 - DNA, 20 bp, synthetic construct
  source 1..20: mol_type = other DNA
aaaccaggattcagacaaga

SEQ ID NO: 213566 - DNA, 20 bp, synthetic construct
  source 1..20: mol_type = other DNA
gaaaccaggattcagacaag

SEQ ID NO: 213567 - DNA, 20 bp, synthetic construct
  source 1..20: mol_type = other DNA
tgaaaccaggattcagacaa

SEQ ID NO: 213568 - DNA, 20 bp, synthetic construct
  source 1..20: mol_type = other DNA
gtgaaaccaggattcagaca

SEQ ID NO: 213569 - DNA, 20 bp, synthetic construct
  source 1..20: mol_type = other DNA
ggtgaaaccaggattcagac

SEQ ID NO: 213570 - DNA, 20 bp, synthetic construct
  source 1..20: mol_type = other DNA
tggtgaaaccaggattcaga

SEQ ID NO: 213571 - DNA, 20 bp, synthetic construct
  source 1..20: mol_type = other DNA
gtggtgaaaccaggattcag

SEQ ID NO: 213572 - DNA, 20 bp, synthetic construct
  source 1..20: mol_type = other DNA
agtggtgaaaccaggattca

SEQ ID NO: 213573 - DNA, 20 bp, synthetic construct
  source 1..20: mol_type = other DNA
cagtggtgaaaccaggattc

SEQ ID NO: 213574 - DNA, 20 bp, synthetic construct
  source 1..20: mol_type = other DNA
tcagtggtgaaaccaggatt

SEQ ID NO: 213575 - DNA, 20 bp, synthetic construct
  source 1..20: mol_type = other DNA
gtcagtggtgaaaccaggat

SEQ ID NO: 213576 - DNA, 20 bp, synthetic construct
  source 1..20: mol_type = other DNA
tgtcagtggtgaaaccagga

SEQ ID NO: 213577 - DNA, 20 bp, synthetic construct
  source 1..20: mol_type = other DNA
ttgtcagtggtgaaaccagg

SEQ ID NO: 213578 - DNA, 20 bp, synthetic construct
  source 1..20: mol_type = other DNA
cttgtcagtggtgaaaccag

SEQ ID NO: 213579 - DNA, 20 bp, synthetic construct
  source 1..20: mol_type = other DNA
gcttgtcagtggtgaaacca

SEQ ID NO: 213580 - DNA, 20 bp, synthetic construct
  source 1..20: mol_type = other DNA
agcttgtcagtggtgaaacc

SEQ ID NO: 213581 - DNA, 20 bp, synthetic construct
  source 1..20: mol_type = other DNA
cagcttgtcagtggtgaaac

SEQ ID NO: 213582 - DNA, 20 bp, synthetic construct
  source 1..20: mol_type = other DNA
acagcttgtcagtggtgaaa

SEQ ID NO: 213583 - DNA, 20 bp, synthetic construct
  source 1..20: mol_type = other DNA
cacagcttgtcagtggtgaa

SEQ ID NO: 213584 - DNA, 20 bp, synthetic construct
  source 1..20: mol_type = other DNA
acacagcttgtcagtggtga

SEQ ID NO: 213585 - DNA, 20 bp, synthetic construct
  source 1..20: mol_type = other DNA
cacacagcttgtcagtggtg

SEQ ID NO: 213586 - DNA, 20 bp, synthetic construct
  source 1..20: mol_type = other DNA
acacacagcttgtcagtggt

SEQ ID NO: 213587 - DNA, 20 bp, synthetic construct
  source 1..20: mol_type = other DNA
gacacacagcttgtcagtgg

SEQ ID NO: 213588 - DNA, 20 bp, synthetic construct
  source 1..20: mol_type = other DNA
ggacacacagcttgtcagtg

SEQ ID NO: 213589 - DNA, 20 bp, synthetic construct
  source 1..20: mol_type = other DNA
aggacacacagcttgtcagt

SEQ ID NO: 213590 - DNA, 20 bp, synthetic construct
  source 1..20: mol_type = other DNA
aaggacacacagcttgtcag

SEQ ID NO: 213591 - DNA, 20 bp, synthetic construct
  source 1..20: mol_type = other DNA
caaggacacacagcttgtca

SEQ ID NO: 213592 - DNA, 20 bp, synthetic construct
  source 1..20: mol_type = other DNA
ccaaggacacacagcttgtc

SEQ ID NO: 213593 - DNA, 20 bp, synthetic construct
  source 1..20: mol_type = other DNA
cccaaggacacacagcttgt

SEQ ID NO: 213594 - DNA, 20 bp, synthetic construct
  source 1..20: mol_type = other DNA
gcccaaggacacacagcttg

SEQ ID NO: 213595 - DNA, 20 bp, synthetic construct
  source 1..20: mol_type = other DNA
tgcccaaggacacacagctt

SEQ ID NO: 213596 - DNA, 20 bp, synthetic construct
  source 1..20: mol_type = other DNA
ttgcccaaggacacacagct

SEQ ID NO: 213597 - DNA, 20 bp, synthetic construct
  source 1..20: mol_type = other DNA
cttgcccaaggacacacagc

SEQ ID NO: 213598 - DNA, 20 bp, synthetic construct
  source 1..20: mol_type = other DNA
acttgcccaaggacacacag

SEQ ID NO: 213599 - DNA, 20 bp, synthetic construct
  source 1..20: mol_type = other DNA
aacttgcccaaggacacaca

SEQ ID NO: 213600 - DNA, 20 bp, synthetic construct
  source 1..20: mol_type = other DNA
taacttgcccaaggacacac

SEQ ID NO: 213601 - DNA, 20 bp, synthetic construct
  source 1..20: mol_type = other DNA
gtaacttgcccaaggacaca

SEQ ID NO: 213602 - DNA, 20 bp, synthetic construct
  source 1..20: mol_type = other DNA
agtaacttgcccaaggacac

SEQ ID NO: 213603 - DNA, 20 bp, synthetic construct
  source 1..20: mol_type = other DNA
aagtaacttgcccaaggaca

SEQ ID NO: 213604 - DNA, 20 bp, synthetic construct
  source 1..20: mol_type = other DNA
gaagtaacttgcccaaggac

SEQ ID NO: 213605 - DNA, 20 bp, synthetic construct
  source 1..20: mol_type = other DNA
tgaagtaacttgcccaagga

SEQ ID NO: 213606 - DNA, 20 bp, synthetic construct
  source 1..20: mol_type = other DNA
gtgaagtaacttgcccaagg

SEQ ID NO: 213607 - DNA, 20 bp, synthetic construct
  source 1..20: mol_type = other DNA
ggtgaagtaacttgcccaag

SEQ ID NO: 213608 - DNA, 20 bp, synthetic construct
  source 1..20: mol_type = other DNA
aggtgaagtaacttgcccaa

SEQ ID NO: 213609 - DNA, 20 bp, synthetic construct
  source 1..20: mol_type = other DNA
caggtgaagtaacttgccca

SEQ ID NO: 213610 - DNA, 20 bp, synthetic construct
  source 1..20: mol_type = other DNA
acaggtgaagtaacttgccc

SEQ ID NO: 213611 - DNA, 20 bp, synthetic construct
  source 1..20: mol_type = other DNA
gacaggtgaagtaacttgcc

SEQ ID NO: 213612 - DNA, 20 bp, synthetic construct
  source 1..20: mol_type = other DNA
agacaggtgaagtaacttgc

SEQ ID NO: 213613 - DNA, 20 bp, synthetic construct
  source 1..20: mol_type = other DNA
cagacaggtgaagtaacttg

SEQ ID NO: 213614 - DNA, 20 bp, synthetic construct
  source 1..20: mol_type = other DNA
acagacaggtgaagtaactt

SEQ ID NO: 213615 - DNA, 20 bp, synthetic construct
  source 1..20: mol_type = other DNA
cacagacaggtgaagtaact

SEQ ID NO: 213616 - DNA, 20 bp, synthetic construct
  source 1..20: mol_type = other DNA
gcacagacaggtgaagtaac

SEQ ID NO: 213617 - DNA, 20 bp, synthetic construct
  source 1..20: mol_type = other DNA
agcacagacaggtgaagtaa

SEQ ID NO: 213618 - DNA, 20 bp, synthetic construct
  source 1..20: mol_type = other DNA
aagcacagacaggtgaagta

SEQ ID NO: 213619 - DNA, 20 bp, synthetic construct
  source 1..20: mol_type = other DNA
gaagcacagacaggtgaagt

SEQ ID NO: 213620 - DNA, 20 bp, synthetic construct
  source 1..20: mol_type = other DNA
tgaagcacagacaggtgaag

SEQ ID NO: 213621 - DNA, 20 bp, synthetic construct
  source 1..20: mol_type = other DNA
ctgaagcacagacaggtgaa

SEQ ID NO: 213622 - DNA, 20 bp, synthetic construct
  source 1..20: mol_type = other DNA
tctgaagcacagacaggtga

SEQ ID NO: 213623 - DNA, 20 bp, synthetic construct
  source 1..20: mol_type = other DNA
ctctgaagcacagacaggtg

SEQ ID NO: 213624 - DNA, 20 bp, synthetic construct
  source 1..20: mol_type = other DNA
actctgaagcacagacaggt

SEQ ID NO: 213625 - DNA, 20 bp, synthetic construct
  source 1..20: mol_type = other DNA
gactctgaagcacagacagg

SEQ ID NO: 213626 - DNA, 20 bp, synthetic construct
  source 1..20: mol_type = other DNA
ggactctgaagcacagacag

SEQ ID NO: 213627 - DNA, 20 bp, synthetic construct
  source 1..20: mol_type = other DNA
aggactctgaagcacagaca

SEQ ID NO: 213628 - DNA, 20 bp, synthetic construct
  source 1..20: mol_type = other DNA
gaggactctgaagcacagac

SEQ ID NO: 213629 - DNA, 20 bp, synthetic construct
  source 1..20: mol_type = other DNA
tgaggactctgaagcacaga

SEQ ID NO: 213630 - DNA, 20 bp, synthetic construct
  source 1..20: mol_type = other DNA
atgaggactctgaagcacag

SEQ ID NO: 213631 - DNA, 20 bp, synthetic construct
  source 1..20: mol_type = other DNA
gatgaggactctgaagcaca

SEQ ID NO: 213632 - DNA, 20 bp, synthetic construct
  source 1..20: mol_type = other DNA
agatgaggactctgaagcac

SEQ ID NO: 213633 - DNA, 20 bp, synthetic construct
  source 1..20: mol_type = other DNA
cagatgaggactctgaagca

SEQ ID NO: 213634 - DNA, 20 bp, synthetic construct
  source 1..20: mol_type = other DNA
acagatgaggactctgaagc

SEQ ID NO: 213635 - DNA, 20 bp, synthetic construct
  source 1..20: mol_type = other DNA
cacagatgaggactctgaag

SEQ ID NO: 213636 - DNA, 20 bp, synthetic construct
  source 1..20: mol_type = other DNA
tcacagatgaggactctgaa

SEQ ID NO: 213637 - DNA, 20 bp, synthetic construct
  source 1..20: mol_type = other DNA
ctcacagatgaggactctga

SEQ ID NO: 213638 - DNA, 20 bp, synthetic construct
  source 1..20: mol_type = other DNA
actcacagatgaggactctg

SEQ ID NO: 213639 - DNA, 20 bp, synthetic construct
  source 1..20: mol_type = other DNA
aactcacagatgaggactct

SEQ ID NO: 213640 - DNA, 20 bp, synthetic construct
  source 1..20: mol_type = other DNA
caactcacagatgaggactc

SEQ ID NO: 213641 - DNA, 20 bp, synthetic construct
  source 1..20: mol_type = other DNA
ccaactcacagatgaggact

SEQ ID NO: 213642 - DNA, 20 bp, synthetic construct
  source 1..20: mol_type = other DNA
cccaactcacagatgaggac

SEQ ID NO: 213643 - DNA, 20 bp, synthetic construct
  source 1..20: mol_type = other DNA
ccccaactcacagatgagga

SEQ ID NO: 213644 - DNA, 20 bp, synthetic construct
  source 1..20: mol_type = other DNA
tccccaactcacagatgagg

SEQ ID NO: 213645 - DNA, 20 bp, synthetic construct
  source 1..20: mol_type = other DNA
ttccccaactcacagatgag

SEQ ID NO: 213646 - DNA, 20 bp, synthetic construct
  source 1..20: mol_type = other DNA
attccccaactcacagatga

SEQ ID NO: 213647 - DNA, 20 bp, synthetic construct
  source 1..20: mol_type = other DNA
gattccccaactcacagatg

SEQ ID NO: 213648 - DNA, 20 bp, synthetic construct
  source 1..20: mol_type = other DNA
agattccccaactcacagat

SEQ ID NO: 213649 - DNA, 20 bp, synthetic construct
  source 1..20: mol_type = other DNA
cagattccccaactcacaga

SEQ ID NO: 213650 - DNA, 20 bp, synthetic construct
  source 1..20: mol_type = other DNA
ccagattccccaactcacag

SEQ ID NO: 213651 - DNA, 20 bp, synthetic construct
  source 1..20: mol_type = other DNA
tccagattccccaactcaca

SEQ ID NO: 213652 - DNA, 20 bp, synthetic construct
  source 1..20: mol_type = other DNA
gtccagattccccaactcac

SEQ ID NO: 213653 - DNA, 20 bp, synthetic construct
  source 1..20: mol_type = other DNA
tgtccagattccccaactca

SEQ ID NO: 213654 - DNA, 20 bp, synthetic construct
  source 1..20: mol_type = other DNA
ctgtccagattccccaactc

SEQ ID NO: 213655 - DNA, 20 bp, synthetic construct
  source 1..20: mol_type = other DNA
tctgtccagattccccaact

SEQ ID NO: 213656 - DNA, 20 bp, synthetic construct
  source 1..20: mol_type = other DNA
ttctgtccagattccccaac

SEQ ID NO: 213657 - DNA, 20 bp, synthetic construct
  source 1..20: mol_type = other DNA
attctgtccagattccccaa

SEQ ID NO: 213658 - DNA, 20 bp, synthetic construct
  source 1..20: mol_type = other DNA
gattctgtccagattcccca

SEQ ID NO: 213659 - DNA, 20 bp, synthetic construct
  source 1..20: mol_type = other DNA
agattctgtccagattcccc

SEQ ID NO: 213660 - DNA, 20 bp, synthetic construct
  source 1..20: mol_type = other DNA
tagattctgtccagattccc

SEQ ID NO: 213661 - DNA, 20 bp, synthetic construct
  source 1..20: mol_type = other DNA
gtagattctgtccagattcc

SEQ ID NO: 213662 - DNA, 20 bp, synthetic construct
  source 1..20: mol_type = other DNA
ggtagattctgtccagattc

SEQ ID NO: 213663 - DNA, 20 bp, synthetic construct
  source 1..20: mol_type = other DNA
gggtagattctgtccagatt

SEQ ID NO: 213664 - DNA, 20 bp, synthetic construct
  source 1..20: mol_type = other DNA
ggggtagattctgtccagat

SEQ ID NO: 213665 - DNA, 20 bp, synthetic construct
  source 1..20: mol_type = other DNA
tggggtagattctgtccaga

SEQ ID NO: 213666 - DNA, 20 bp, synthetic construct
  source 1..20: mol_type = other DNA
atggggtagattctgtccag

SEQ ID NO: 213667 - DNA, 20 bp, synthetic construct
  source 1..20: mol_type = other DNA
tatggggtagattctgtcca

SEQ ID NO: 213668 - DNA, 20 bp, synthetic construct
  source 1..20: mol_type = other DNA
ctatggggtagattctgtcc

SEQ ID NO: 213669 - DNA, 20 bp, synthetic construct
  source 1..20: mol_type = other DNA
cctatggggtagattctgtc

SEQ ID NO: 213670 - DNA, 20 bp, synthetic construct
  source 1..20: mol_type = other DNA
ccctatggggtagattctgt

SEQ ID NO: 213671 - DNA, 20 bp, synthetic construct
  source 1..20: mol_type = other DNA
gccctatggggtagattctg

SEQ ID NO: 213672 - DNA, 20 bp, synthetic construct
  source 1..20: mol_type = other DNA
cgccctatggggtagattct

SEQ ID NO: 213673 - DNA, 20 bp, synthetic construct
  source 1..20: mol_type = other DNA
acgccctatggggtagattc

SEQ ID NO: 213674 - DNA, 20 bp, synthetic construct
  source 1..20: mol_type = other DNA
tacgccctatggggtagatt

SEQ ID NO: 213675 - DNA, 20 bp, synthetic construct
  source 1..20: mol_type = other DNA
ctacgccctatggggtagat

SEQ ID NO: 213676 - DNA, 20 bp, synthetic construct
  source 1..20: mol_type = other DNA
actacgccctatggggtaga

SEQ ID NO: 213677 - DNA, 20 bp, synthetic construct
  source 1..20: mol_type = other DNA
cactacgccctatggggtag

SEQ ID NO: 213678 - DNA, 20 bp, synthetic construct
  source 1..20: mol_type = other DNA
tcactacgccctatggggta

SEQ ID NO: 213679 - DNA, 20 bp, synthetic construct
  source 1..20: mol_type = other DNA
ctcactacgccctatggggt

SEQ ID NO: 213680 - DNA, 20 bp, synthetic construct
  source 1..20: mol_type = other DNA
cctcactacgccctatgggg

SEQ ID NO: 213681 - DNA, 20 bp, synthetic construct
  source 1..20: mol_type = other DNA
tcctcactacgccctatggg

SEQ ID NO: 213682 - DNA, 20 bp, synthetic construct
  source 1..20: mol_type = other DNA
atcctcactacgccctatgg

SEQ ID NO: 213683 - DNA, 20 bp, synthetic construct
  source 1..20: mol_type = other DNA
catcctcactacgccctatg

SEQ ID NO: 213684 - DNA, 20 bp, synthetic construct
  source 1..20: mol_type = other DNA
acatcctcactacgccctat

SEQ ID NO: 213685 - DNA, 20 bp, synthetic construct
  source 1..20: mol_type = other DNA
cacatcctcactacgcccta

SEQ ID NO: 213686 - DNA, 20 bp, synthetic construct
  source 1..20: mol_type = other DNA
acacatcctcactacgccct

SEQ ID NO: 213687 - DNA, 20 bp, synthetic construct
  source 1..20: mol_type = other DNA
aacacatcctcactacgccc

SEQ ID NO: 213688 - DNA, 20 bp, synthetic construct
  source 1..20: mol_type = other DNA
caacacatcctcactacgcc

SEQ ID NO: 213689 - DNA, 20 bp, synthetic construct
  source 1..20: mol_type = other DNA
tcaacacatcctcactacgc

SEQ ID NO: 213690 - DNA, 20 bp, synthetic construct
  source 1..20: mol_type = other DNA
ttcaacacatcctcactacg

SEQ ID NO: 213691 - DNA, 20 bp, synthetic construct
  source 1..20: mol_type = other DNA
attcaacacatcctcactac

SEQ ID NO: 213692 - DNA, 20 bp, synthetic construct
  source 1..20: mol_type = other DNA
aattcaacacatcctcacta

SEQ ID NO: 213693 - DNA, 20 bp, synthetic construct
  source 1..20: mol_type = other DNA
taattcaacacatcctcact

SEQ ID NO: 213694 - DNA, 20 bp, synthetic construct
  source 1..20: mol_type = other DNA
ataattcaacacatcctcac

SEQ ID NO: 213695 - DNA, 20 bp, synthetic construct
  source 1..20: mol_type = other DNA
gataattcaacacatcctca

SEQ ID NO: 213696 - DNA, 20 bp, synthetic construct
  source 1..20: mol_type = other DNA
ggataattcaacacatcctc

SEQ ID NO: 213697 - DNA, 20 bp, synthetic construct
  source 1..20: mol_type = other DNA
gggataattcaacacatcct

SEQ ID NO: 213698 - DNA, 20 bp, synthetic construct
  source 1..20: mol_type = other DNA
tgggataattcaacacatcc

SEQ ID NO: 213699 - DNA, 20 bp, synthetic construct
  source 1..20: mol_type = other DNA
ttgggataattcaacacatc

SEQ ID NO: 213700 - DNA, 20 bp, synthetic construct
  source 1..20: mol_type = other DNA
cttgggataattcaacacat

SEQ ID NO: 213701 - DNA, 20 bp, synthetic construct
  source 1..20: mol_type = other DNA
acttgggataattcaacaca

SEQ ID NO: 213702 - DNA, 20 bp, synthetic construct
  source 1..20: mol_type = other DNA
cacttgggataattcaacac

SEQ ID NO: 213703 - DNA, 20 bp, synthetic construct
  source 1..20: mol_type = other DNA
ccacttgggataattcaaca

SEQ ID NO: 213704 - DNA, 20 bp, synthetic construct
  source 1..20: mol_type = other DNA
gccacttgggataattcaac

SEQ ID NO: 213705 - DNA, 20 bp, synthetic construct
  source 1..20: mol_type = other DNA
agccacttgggataattcaa

SEQ ID NO: 213706 - DNA, 20 bp, synthetic construct
  source 1..20: mol_type = other DNA
tagccacttgggataattca

SEQ ID NO: 213707 - DNA, 20 bp, synthetic construct
  source 1..20: mol_type = other DNA
gtagccacttgggataattc

SEQ ID NO: 213708 - DNA, 20 bp, synthetic construct
  source 1..20: mol_type = other DNA
tgtagccacttgggataatt

SEQ ID NO: 213709 - DNA, 20 bp, synthetic construct
  source 1..20: mol_type = other DNA
gtgtagccacttgggataat

SEQ ID NO: 213710 - DNA, 20 bp, synthetic construct
  source 1..20: mol_type = other DNA
tgtgtagccacttgggataa

SEQ ID NO: 213711 - DNA, 20 bp, synthetic construct
  source 1..20: mol_type = other DNA
ctgtgtagccacttgggata

SEQ ID NO: 213712 - DNA, 20 bp, synthetic construct
  source 1..20: mol_type = other DNA
tctgtgtagccacttgggat

SEQ ID NO: 213713 - DNA, 20 bp, synthetic construct
  source 1..20: mol_type = other DNA
ctctgtgtagccacttggga

SEQ ID NO: 213714 - DNA, 20 bp, synthetic construct
  source 1..20: mol_type = other DNA
actctgtgtagccacttggg

SEQ ID NO: 213715 - DNA, 20 bp, synthetic construct
  source 1..20: mol_type = other DNA
tactctgtgtagccacttgg

SEQ ID NO: 213716 - DNA, 20 bp, synthetic construct
  source 1..20: mol_type = other DNA
ttactctgtgtagccacttg

SEQ ID NO: 213717 - DNA, 20 bp, synthetic construct
  source 1..20: mol_type = other DNA
cttactctgtgtagccactt

SEQ ID NO: 213718 - DNA, 20 bp, synthetic construct
  source 1..20: mol_type = other DNA
gcttactctgtgtagccact

SEQ ID NO: 213719 - DNA, 20 bp, synthetic construct
  source 1..20: mol_type = other DNA
tgcttactctgtgtagccac

SEQ ID NO: 213720 - DNA, 20 bp, synthetic construct
  source 1..20: mol_type = other DNA
gtgcttactctgtgtagcca

SEQ ID NO: 213721 - DNA, 20 bp, synthetic construct
  source 1..20: mol_type = other DNA
agtgcttactctgtgtagcc

SEQ ID NO: 213722 - DNA, 20 bp, synthetic construct
  source 1..20: mol_type = other DNA
gagtgcttactctgtgtagc

SEQ ID NO: 213723 - DNA, 20 bp, synthetic construct
  source 1..20: mol_type = other DNA
tgagtgcttactctgtgtag

SEQ ID NO: 213724 - DNA, 20 bp, synthetic construct
  source 1..20: mol_type = other DNA
ttgagtgcttactctgtgta

SEQ ID NO: 213725 - DNA, 20 bp, synthetic construct
  source 1..20: mol_type = other DNA
tttgagtgcttactctgtgt

SEQ ID NO: 213726 - DNA, 20 bp, synthetic construct
  source 1..20: mol_type = other DNA
atttgagtgcttactctgtg

SEQ ID NO: 213727 - DNA, 20 bp, synthetic construct
  source 1..20: mol_type = other DNA
catttgagtgcttactctgt

SEQ ID NO: 213728 - DNA, 20 bp, synthetic construct
  source 1..20: mol_type = other DNA
tcatttgagtgcttactctg

SEQ ID NO: 213729 - DNA, 20 bp, synthetic construct
  source 1..20: mol_type = other DNA
atcatttgagtgcttactct

SEQ ID NO: 213730 - DNA, 20 bp, synthetic construct
  source 1..20: mol_type = other DNA
catcatttgagtgcttactc

SEQ ID NO: 213731 - DNA, 20 bp, synthetic construct
  source 1..20: mol_type = other DNA
acatcatttgagtgcttact

SEQ ID NO: 213732 - DNA, 20 bp, synthetic construct
  source 1..20: mol_type = other DNA
gacatcatttgagtgcttac

SEQ ID NO: 213733 - DNA, 20 bp, synthetic construct
  source 1..20: mol_type = other DNA
tgacatcatttgagtgctta

SEQ ID NO: 213734 - DNA, 20 bp, synthetic construct
  source 1..20: mol_type = other DNA
atgacatcatttgagtgctt

SEQ ID NO: 213735 - DNA, 20 bp, synthetic construct
  source 1..20: mol_type = other DNA
gatgacatcatttgagtgct

SEQ ID NO: 213736 - DNA, 20 bp, synthetic construct
  source 1..20: mol_type = other DNA
cgatgacatcatttgagtgc

SEQ ID NO: 213737 - DNA, 20 bp, synthetic construct
  source 1..20: mol_type = other DNA
acgatgacatcatttgagtg

SEQ ID NO: 213738 - DNA, 20 bp, synthetic construct
  source 1..20: mol_type = other DNA
aacgatgacatcatttgagt

SEQ ID NO: 213739 - DNA, 20 bp, synthetic construct
  source 1..20: mol_type = other DNA
caacgatgacatcatttgag

SEQ ID NO: 213740 - DNA, 20 bp, synthetic construct
  source 1..20: mol_type = other DNA
acaacgatgacatcatttga

SEQ ID NO: 213741 - DNA, 20 bp, synthetic construct
  source 1..20: mol_type = other DNA
gacaacgatgacatcatttg

SEQ ID NO: 213742 - DNA, 20 bp, synthetic construct
  source 1..20: mol_type = other DNA
tgacaacgatgacatcattt

SEQ ID NO: 213743 - DNA, 20 bp, synthetic construct
  source 1..20: mol_type = other DNA
atgacaacgatgacatcatt

SEQ ID NO: 213744 - DNA, 20 bp, synthetic construct
  source 1..20: mol_type = other DNA
catgacaacgatgacatcat

SEQ ID NO: 213745 - DNA, 20 bp, synthetic construct
  source 1..20: mol_type = other DNA
tcatgacaacgatgacatca

SEQ ID NO: 213746 - DNA, 20 bp, synthetic construct
  source 1..20: mol_type = other DNA
atcatgacaacgatgacatc

SEQ ID NO: 213747 - DNA, 20 bp, synthetic construct
  source 1..20: mol_type = other DNA
aatcatgacaacgatgacat

SEQ ID NO: 213748 - DNA, 20 bp, synthetic construct
  source 1..20: mol_type = other DNA
caatcatgacaacgatgaca

SEQ ID NO: 213749 - DNA, 20 bp, synthetic construct
  source 1..20: mol_type = other DNA
gcaatcatgacaacgatgac

SEQ ID NO: 213750 - DNA, 20 bp, synthetic construct
  source 1..20: mol_type = other DNA
agcaatcatgacaacgatga

SEQ ID NO: 213751 - DNA, 20 bp, synthetic construct
  source 1..20: mol_type = other DNA
cagcaatcatgacaacgatg

SEQ ID NO: 213752 - DNA, 20 bp, synthetic construct
  source 1..20: mol_type = other DNA
acagcaatcatgacaacgat

SEQ ID NO: 213753 - DNA, 20 bp, synthetic construct
  source 1..20: mol_type = other DNA
aacagcaatcatgacaacga

SEQ ID NO: 213754 - DNA, 20 bp, synthetic construct
  source 1..20: mol_type = other DNA
taacagcaatcatgacaacg

SEQ ID NO: 213755 - DNA, 20 bp, synthetic construct
  source 1..20: mol_type = other DNA
gtaacagcaatcatgacaac

SEQ ID NO: 213756 - DNA, 20 bp, synthetic construct
  source 1..20: mol_type = other DNA
ggtaacagcaatcatgacaa

SEQ ID NO: 213757 - DNA, 20 bp, synthetic construct
  source 1..20: mol_type = other DNA
tggtaacagcaatcatgaca

SEQ ID NO: 213758 - DNA, 20 bp, synthetic construct
  source 1..20: mol_type = other DNA
ctggtaacagcaatcatgac

SEQ ID NO: 213759 - DNA, 20 bp, synthetic construct
  source 1..20: mol_type = other DNA
tctggtaacagcaatcatga

SEQ ID NO: 213760 - DNA, 20 bp, synthetic construct
  source 1..20: mol_type = other DNA
ctctggtaacagcaatcatg

SEQ ID NO: 213761 - DNA, 20 bp, synthetic construct
  source 1..20: mol_type = other DNA
gctctggtaacagcaatcat

SEQ ID NO: 213762 - DNA, 20 bp, synthetic construct
  source 1..20: mol_type = other DNA
ggctctggtaacagcaatca

SEQ ID NO: 213763 - DNA, 20 bp, synthetic construct
  source 1..20: mol_type = other DNA
aggctctggtaacagcaatc

SEQ ID NO: 213764 - DNA, 20 bp, synthetic construct
  source 1..20: mol_type = other DNA
taggctctggtaacagcaat

SEQ ID NO: 213765 - DNA, 20 bp, synthetic construct
  source 1..20: mol_type = other DNA
ctaggctctggtaacagcaa

SEQ ID NO: 213766 - DNA, 20 bp, synthetic construct
  source 1..20: mol_type = other DNA
tctaggctctggtaacagca

SEQ ID NO: 213767 - DNA, 20 bp, synthetic construct
  source 1..20: mol_type = other DNA
ctctaggctctggtaacagc

SEQ ID NO: 213768 - DNA, 20 bp, synthetic construct
  source 1..20: mol_type = other DNA
actctaggctctggtaacag

SEQ ID NO: 213769 - DNA, 20 bp, synthetic construct
  source 1..20: mol_type = other DNA
aactctaggctctggtaaca

SEQ ID NO: 213770 - DNA, 20 bp, synthetic construct
  source 1..20: mol_type = other DNA
gaactctaggctctggtaac

SEQ ID NO: 213771 - DNA, 20 bp, synthetic construct
  source 1..20: mol_type = other DNA
tgaactctaggctctggtaa

SEQ ID NO: 213772 - DNA, 20 bp, synthetic construct
  source 1..20: mol_type = other DNA
atgaactctaggctctggta

SEQ ID NO: 213773 - DNA, 20 bp, synthetic construct
  source 1..20: mol_type = other DNA
aatgaactctaggctctggt

SEQ ID NO: 213774 - DNA, 20 bp, synthetic construct
  source 1..20: mol_type = other DNA
gaatgaactctaggctctgg

SEQ ID NO: 213775 - DNA, 20 bp, synthetic construct
  source 1..20: mol_type = other DNA
agaatgaactctaggctctg

SEQ ID NO: 213776 - DNA, 20 bp, synthetic construct
  source 1..20: mol_type = other DNA
cagaatgaactctaggctct

SEQ ID NO: 213777 - DNA, 20 bp, synthetic construct
  source 1..20: mol_type = other DNA
tcagaatgaactctaggctc

SEQ ID NO: 213778 - DNA, 20 bp, synthetic construct
  source 1..20: mol_type = other DNA
atcagaatgaactctaggct

SEQ ID NO: 213779 - DNA, 20 bp, synthetic construct
  source 1..20: mol_type = other DNA
tatcagaatgaactctaggc

SEQ ID NO: 213780 - DNA, 20 bp, synthetic construct
  source 1..20: mol_type = other DNA
gtatcagaatgaactctagg

SEQ ID NO: 213781 - DNA, 20 bp, synthetic construct
  source 1..20: mol_type = other DNA
agtatcagaatgaactctag

SEQ ID NO: 213782 - DNA, 20 bp, synthetic construct
  source 1..20: mol_type = other DNA
gagtatcagaatgaactcta

SEQ ID NO: 213783 - DNA, 20 bp, synthetic construct
  source 1..20: mol_type = other DNA
cgagtatcagaatgaactct

SEQ ID NO: 213784 - DNA, 20 bp, synthetic construct
  source 1..20: mol_type = other DNA
tcgagtatcagaatgaactc

SEQ ID NO: 213785 - DNA, 20 bp, synthetic construct
  source 1..20: mol_type = other DNA
ctcgagtatcagaatgaact

SEQ ID NO: 213786 - DNA, 20 bp, synthetic construct
  source 1..20: mol_type = other DNA
actcgagtatcagaatgaac

SEQ ID NO: 213787 - DNA, 20 bp, synthetic construct
  source 1..20: mol_type = other DNA
gactcgagtatcagaatgaa

SEQ ID NO: 213788 - DNA, 20 bp, synthetic construct
  source 1..20: mol_type = other DNA
agactcgagtatcagaatga

SEQ ID NO: 213789 - DNA, 20 bp, synthetic construct
  source 1..20: mol_type = other DNA
cagactcgagtatcagaatg

SEQ ID NO: 213790 - DNA, 20 bp, synthetic construct
  source 1..20: mol_type = other DNA
acagactcgagtatcagaat

SEQ ID NO: 213791 - DNA, 20 bp, synthetic construct
  source 1..20: mol_type = other DNA
cacagactcgagtatcagaa

SEQ ID NO: 213792 - DNA, 20 bp, synthetic construct
  source 1..20: mol_type = other DNA
ccacagactcgagtatcaga

SEQ ID NO: 213793 - DNA, 20 bp, synthetic construct
  source 1..20: mol_type = other DNA
gccacagactcgagtatcag

SEQ ID NO: 213794 - DNA, 20 bp, synthetic construct
  source 1..20: mol_type = other DNA
ggccacagactcgagtatca

SEQ ID NO: 213795 - DNA, 20 bp, synthetic construct
  source 1..20: mol_type = other DNA
gggccacagactcgagtatc

SEQ ID NO: 213796 - DNA, 20 bp, synthetic construct
  source 1..20: mol_type = other DNA
tgggccacagactcgagtat

SEQ ID NO: 213797 - DNA, 20 bp, synthetic construct
  source 1..20: mol_type = other DNA
atgggccacagactcgagta

SEQ ID NO: 213798 - DNA, 20 bp, synthetic construct
  source 1..20: mol_type = other DNA
gatgggccacagactcgagt

SEQ ID NO: 213799 - DNA, 20 bp, synthetic construct
  source 1..20: mol_type = other DNA
ggatgggccacagactcgag

SEQ ID NO: 213800 - DNA, 20 bp, synthetic construct
  source 1..20: mol_type = other DNA
tggatgggccacagactcga

SEQ ID NO: 213801 - DNA, 20 bp, synthetic construct
  source 1..20: mol_type = other DNA
ctggatgggccacagactcg

SEQ ID NO: 213802 - DNA, 20 bp, synthetic construct
  source 1..20: mol_type = other DNA
gctggatgggccacagactc

SEQ ID NO: 213803 - DNA, 20 bp, synthetic construct
  source 1..20: mol_type = other DNA
ggctggatgggccacagact

SEQ ID NO: 213804 - DNA, 20 bp, synthetic construct
  source 1..20: mol_type = other DNA
gggctggatgggccacagac

SEQ ID NO: 213805 - DNA, 20 bp, synthetic construct
  source 1..20: mol_type = other DNA
tgggctggatgggccacaga

SEQ ID NO: 213806 - DNA, 20 bp, synthetic construct
  source 1..20: mol_type = other DNA
ctgggctggatgggccacag

SEQ ID NO: 213807 - DNA, 20 bp, synthetic construct
  source 1..20: mol_type = other DNA
cctgggctggatgggccaca

SEQ ID NO: 213808 - DNA, 20 bp, synthetic construct
  source 1..20: mol_type = other DNA
acctgggctggatgggccac

SEQ ID NO: 213809 - DNA, 20 bp, synthetic construct
  source 1..20: mol_type = other DNA
tacctgggctggatgggcca

SEQ ID NO: 213810 - DNA, 20 bp, synthetic construct
  source 1..20: mol_type = other DNA
ttacctgggctggatgggcc

SEQ ID NO: 213811 - DNA, 20 bp, synthetic construct
  source 1..20: mol_type = other DNA
cttacctgggctggatgggc

SEQ ID NO: 213812 - DNA, 20 bp, synthetic construct
  source 1..20: mol_type = other DNA
ccttacctgggctggatggg

SEQ ID NO: 213813 - DNA, 20 bp, synthetic construct
  source 1..20: mol_type = other DNA
tccttacctgggctggatgg

SEQ ID NO: 213814 - DNA, 20 bp, synthetic construct
  source 1..20: mol_type = other DNA
ttccttacctgggctggatg

SEQ ID NO: 213815 - DNA, 20 bp, synthetic construct
  source 1..20: mol_type = other DNA
attccttacctgggctggat

SEQ ID NO: 213816 - DNA, 20 bp, synthetic construct
  source 1..20: mol_type = other DNA
tattccttacctgggctgga

SEQ ID NO: 213817 - DNA, 20 bp, synthetic construct
  source 1..20: mol_type = other DNA
ctattccttacctgggctgg

SEQ ID NO: 213818 - DNA, 20 bp, synthetic construct
  source 1..20: mol_type = other DNA
actattccttacctgggctg

SEQ ID NO: 213819 - DNA, 20 bp, synthetic construct
  source 1..20: mol_type = other DNA
aactattccttacctgggct

SEQ ID NO: 213820 - DNA, 20 bp, synthetic construct
  source 1..20: mol_type = other DNA
caactattccttacctgggc

SEQ ID NO: 213821 - DNA, 20 bp, synthetic construct
  source 1..20: mol_type = other DNA
ccaactattccttacctggg

SEQ ID NO: 213822 - DNA, 20 bp, synthetic construct
  source 1..20: mol_type = other DNA
tccaactattccttacctgg

SEQ ID NO: 213823 - DNA, 20 bp, synthetic construct
  source 1..20: mol_type = other DNA
ctccaactattccttacctg

SEQ ID NO: 213824 - DNA, 20 bp, synthetic construct
  source 1..20: mol_type = other DNA
cctccaactattccttacct

SEQ ID NO: 213825 - DNA, 20 bp, synthetic construct
  source 1..20: mol_type = other DNA
tcctccaactattccttacc

SEQ ID NO: 213826 - DNA, 20 bp, synthetic construct
  source 1..20: mol_type = other DNA
ctcctccaactattccttac

SEQ ID NO: 213827 - DNA, 20 bp, synthetic construct
  source 1..20: mol_type = other DNA
actcctccaactattcctta

SEQ ID NO: 213828 - DNA, 20 bp, synthetic construct
  source 1..20: mol_type = other DNA
aactcctccaactattcctt

SEQ ID NO: 213829 - DNA, 20 bp, synthetic construct
  source 1..20: mol_type = other DNA
caactcctccaactattcct

SEQ ID NO: 213830 - DNA, 20 bp, synthetic construct
  source 1..20: mol_type = other DNA
ccaactcctccaactattcc

SEQ ID NO: 213831 - DNA, 20 bp, synthetic construct
  source 1..20: mol_type = other DNA
cccaactcctccaactattc

SEQ ID NO: 213832 - DNA, 20 bp, synthetic construct
  source 1..20: mol_type = other DNA
gcccaactcctccaactatt

SEQ ID NO: 213833 - DNA, 20 bp, synthetic construct
  source 1..20: mol_type = other DNA
tgcccaactcctccaactat

SEQ ID NO: 213834 - DNA, 20 bp, synthetic construct
  source 1..20: mol_type = other DNA
atgcccaactcctccaacta

SEQ ID NO: 213835 - DNA, 20 bp, synthetic construct
  source 1..20: mol_type = other DNA
catgcccaactcctccaact

SEQ ID NO: 213836 - DNA, 20 bp, synthetic construct
  source 1..20: mol_type = other DNA
acatgcccaactcctccaac

SEQ ID NO: 213837 - DNA, 20 bp, synthetic construct
  source 1..20: mol_type = other DNA
aacatgcccaactcctccaa

SEQ ID NO: 213838 - DNA, 20 bp, synthetic construct
  source 1..20: mol_type = other DNA
gaacatgcccaactcctcca

SEQ ID NO: 213839 - DNA, 20 bp, synthetic construct
  source 1..20: mol_type = other DNA
tgaacatgcccaactcctcc

SEQ ID NO: 213840 - DNA, 20 bp, synthetic construct
  source 1..20: mol_type = other DNA
ctgaacatgcccaactcctc

SEQ ID NO: 213841 - DNA, 20 bp, synthetic construct
  source 1..20: mol_type = other DNA
gctgaacatgcccaactcct

SEQ ID NO: 213842 - DNA, 20 bp, synthetic construct
  source 1..20: mol_type = other DNA
agctgaacatgcccaactcc

SEQ ID NO: 213843 - DNA, 20 bp, synthetic construct
  source 1..20: mol_type = other DNA
aagctgaacatgcccaactc

SEQ ID NO: 213844 - DNA, 20 bp, synthetic construct
  source 1..20: mol_type = other DNA
caagctgaacatgcccaact

SEQ ID NO: 213845 - DNA, 20 bp, synthetic construct
  source 1..20: mol_type = other DNA
tcaagctgaacatgcccaac

SEQ ID NO: 213846 - DNA, 20 bp, synthetic construct
  source 1..20: mol_type = other DNA
ttcaagctgaacatgcccaa

SEQ ID NO: 213847 - DNA, 20 bp, synthetic construct
  source 1..20: mol_type = other DNA
cttcaagctgaacatgccca

SEQ ID NO: 213848 - DNA, 20 bp, synthetic construct
  source 1..20: mol_type = other DNA
tcttcaagctgaacatgccc

SEQ ID NO: 213849 - DNA, 20 bp, synthetic construct
  source 1..20: mol_type = other DNA
ctcttcaagctgaacatgcc

SEQ ID NO: 213850 - DNA, 20 bp, synthetic construct
  source 1..20: mol_type = other DNA
cctcttcaagctgaacatgc

SEQ ID NO: 213851 - DNA, 20 bp, synthetic construct
  source 1..20: mol_type = other DNA
tcctcttcaagctgaacatg

SEQ ID NO: 213852 - DNA, 20 bp, synthetic construct
  source 1..20: mol_type = other DNA
ctcctcttcaagctgaacat

SEQ ID NO: 213853 - DNA, 20 bp, synthetic construct
  source 1..20: mol_type = other DNA
tctcctcttcaagctgaaca

SEQ ID NO: 213854 - DNA, 20 bp, synthetic construct
  source 1..20: mol_type = other DNA
gtctcctcttcaagctgaac

SEQ ID NO: 213855 - DNA, 20 bp, synthetic construct
  source 1..20: mol_type = other DNA
cgtctcctcttcaagctgaa

SEQ ID NO: 213856 - DNA, 20 bp, synthetic construct
  source 1..20: mol_type = other DNA
tcgtctcctcttcaagctga

SEQ ID NO: 213857 - DNA, 20 bp, synthetic construct
  source 1..20: mol_type = other DNA
gtcgtctcctcttcaagctg

SEQ ID NO: 213858 - DNA, 20 bp, synthetic construct
  source 1..20: mol_type = other DNA
tgtcgtctcctcttcaagct

SEQ ID NO: 213859 - DNA, 20 bp, synthetic construct
  source 1..20: mol_type = other DNA
ctgtcgtctcctcttcaagc

SEQ ID NO: 213860 - DNA, 20 bp, synthetic construct
  source 1..20: mol_type = other DNA
cctgtcgtctcctcttcaag

SEQ ID NO: 213861 - DNA, 20 bp, synthetic construct
  source 1..20: mol_type = other DNA
ccctgtcgtctcctcttcaa

SEQ ID NO: 213862 - DNA, 20 bp, synthetic construct
  source 1..20: mol_type = other DNA
cccctgtcgtctcctcttca

SEQ ID NO: 213863 - DNA, 20 bp, synthetic construct
  source 1..20: mol_type = other DNA
tcccctgtcgtctcctcttc

SEQ ID NO: 213864 - DNA, 20 bp, synthetic construct
  source 1..20: mol_type = other DNA
atcccctgtcgtctcctctt

SEQ ID NO: 213865 - DNA, 20 bp, synthetic construct
  source 1..20: mol_type = other DNA
tatcccctgtcgtctcctct

SEQ ID NO: 213866 - DNA, 20 bp, synthetic construct
  source 1..20: mol_type = other DNA
atatcccctgtcgtctcctc

SEQ ID NO: 213867 - DNA, 20 bp, synthetic construct
  source 1..20: mol_type = other DNA
catatcccctgtcgtctcct

SEQ ID NO: 213868 - DNA, 20 bp, synthetic construct
  source 1..20: mol_type = other DNA
ccatatcccctgtcgtctcc

SEQ ID NO: 213869 - DNA, 20 bp, synthetic construct
  source 1..20: mol_type = other DNA
cccatatcccctgtcgtctc

SEQ ID NO: 213870 - DNA, 20 bp, synthetic construct
  source 1..20: mol_type = other DNA
tcccatatcccctgtcgtct

SEQ ID NO: 213871 - DNA, 20 bp, synthetic construct
  source 1..20: mol_type = other DNA
atcccatatcccctgtcgtc

SEQ ID NO: 213872 - DNA, 20 bp, synthetic construct
  source 1..20: mol_type = other DNA
tatcccatatcccctgtcgt

SEQ ID NO: 213873 - DNA, 20 bp, synthetic construct
  source 1..20: mol_type = other DNA
ctatcccatatcccctgtcg

SEQ ID NO: 213874 - DNA, 20 bp, synthetic construct
  source 1..20: mol_type = other DNA
actatcccatatcccctgtc

SEQ ID NO: 213875 - DNA, 20 bp, synthetic construct
  source 1..20: mol_type = other DNA
aactatcccatatcccctgt

SEQ ID NO: 213876 - DNA, 20 bp, synthetic construct
  source 1..20: mol_type = other DNA
caactatcccatatcccctg

SEQ ID NO: 213877 - DNA, 20 bp, synthetic construct
  source 1..20: mol_type = other DNA
tcaactatcccatatcccct

SEQ ID NO: 213878 - DNA, 20 bp, synthetic construct
  source 1..20: mol_type = other DNA
ttcaactatcccatatcccc

SEQ ID NO: 213879 - DNA, 20 bp, synthetic construct
  source 1..20: mol_type = other DNA
attcaactatcccatatccc

SEQ ID NO: 213880 - DNA, 20 bp, synthetic construct
  source 1..20: mol_type = other DNA
gattcaactatcccatatcc

SEQ ID NO: 213881 - DNA, 20 bp, synthetic construct
  source 1..20: mol_type = other DNA
agattcaactatcccatatc

SEQ ID NO: 213882 - DNA, 20 bp, synthetic construct
  source 1..20: mol_type = other DNA
cagattcaactatcccatat

SEQ ID NO: 213883 - DNA, 20 bp, synthetic construct
  source 1..20: mol_type = other DNA
acagattcaactatcccata

SEQ ID NO: 213884 - DNA, 20 bp, synthetic construct
  source 1..20: mol_type = other DNA
cacagattcaactatcccat

SEQ ID NO: 213885 - DNA, 20 bp, synthetic construct
  source 1..20: mol_type = other DNA
tcacagattcaactatccca

SEQ ID NO: 213886 - DNA, 20 bp, synthetic construct
  source 1..20: mol_type = other DNA
ttcacagattcaactatccc

SEQ ID NO: 213887 - DNA, 20 bp, synthetic construct
  source 1..20: mol_type = other DNA
cttcacagattcaactatcc

SEQ ID NO: 213888 - DNA, 20 bp, synthetic construct
  source 1..20: mol_type = other DNA
ccttcacagattcaactatc

SEQ ID NO: 213889 - DNA, 20 bp, synthetic construct
  source 1..20: mol_type = other DNA
cccttcacagattcaactat

SEQ ID NO: 213890 - DNA, 20 bp, synthetic construct
  source 1..20: mol_type = other DNA
gcccttcacagattcaacta

SEQ ID NO: 213891 - DNA, 20 bp, synthetic construct
  source 1..20: mol_type = other DNA
ggcccttcacagattcaact

SEQ ID NO: 213892 - DNA, 20 bp, synthetic construct
  source 1..20: mol_type = other DNA
gggcccttcacagattcaac

SEQ ID NO: 213893 - DNA, 20 bp, synthetic construct
  source 1..20: mol_type = other DNA
ggggcccttcacagattcaa

SEQ ID NO: 213894 - DNA, 20 bp, synthetic construct
  source 1..20: mol_type = other DNA
gggggcccttcacagattca

SEQ ID NO: 213895 - DNA, 20 bp, synthetic construct
  source 1..20: mol_type = other DNA
agggggcccttcacagattc

SEQ ID NO: 213896 - DNA, 20 bp, synthetic construct
  source 1..20: mol_type = other DNA
cagggggcccttcacagatt

SEQ ID NO: 213897 - DNA, 20 bp, synthetic construct
  source 1..20: mol_type = other DNA
ccagggggcccttcacagat

SEQ ID NO: 213898 - DNA, 20 bp, synthetic construct
  source 1..20: mol_type = other DNA
cccagggggcccttcacaga

SEQ ID NO: 213899 - DNA, 20 bp, synthetic construct
  source 1..20: mol_type = other DNA
tcccagggggcccttcacag

SEQ ID NO: 213900 - DNA, 20 bp, synthetic construct
  source 1..20: mol_type = other DNA
atcccagggggcccttcaca

SEQ ID NO: 213901 - DNA, 20 bp, synthetic construct
  source 1..20: mol_type = other DNA
catcccagggggcccttcac

SEQ ID NO: 213902 - DNA, 20 bp, synthetic construct
  source 1..20: mol_type = other DNA
tcatcccagggggcccttca

SEQ ID NO: 213903 - DNA, 20 bp, synthetic construct
  source 1..20: mol_type = other DNA
ttcatcccagggggcccttc

SEQ ID NO: 213904 - DNA, 20 bp, synthetic construct
  source 1..20: mol_type = other DNA
cttcatcccagggggccctt

SEQ ID NO: 213905 - DNA, 20 bp, synthetic construct
  source 1..20: mol_type = other DNA
tcttcatcccagggggccct

SEQ ID NO: 213906 - DNA, 20 bp, synthetic construct
  source 1..20: mol_type = other DNA
ttcttcatcccagggggccc

SEQ ID NO: 213907 - DNA, 20 bp, synthetic construct
  source 1..20: mol_type = other DNA
gttcttcatcccagggggcc

SEQ ID NO: 213908 - DNA, 20 bp, synthetic construct
  source 1..20: mol_type = other DNA
agttcttcatcccagggggc

SEQ ID NO: 213909 - DNA, 20 bp, synthetic construct
  source 1..20: mol_type = other DNA
cagttcttcatcccaggggg

SEQ ID NO: 213910 - DNA, 20 bp, synthetic construct
  source 1..20: mol_type = other DNA
ccagttcttcatcccagggg

SEQ ID NO: 213911 - DNA, 20 bp, synthetic construct
  source 1..20: mol_type = other DNA
gccagttcttcatcccaggg

SEQ ID NO: 213912 - DNA, 20 bp, synthetic construct
  source 1..20: mol_type = other DNA
tgccagttcttcatcccagg

SEQ ID NO: 213913 - DNA, 20 bp, synthetic construct
  source 1..20: mol_type = other DNA
atgccagttcttcatcccag

SEQ ID NO: 213914 - DNA, 20 bp, synthetic construct
  source 1..20: mol_type = other DNA
catgccagttcttcatccca

SEQ ID NO: 213915 - DNA, 20 bp, synthetic construct
  source 1..20: mol_type = other DNA
acatgccagttcttcatccc

SEQ ID NO: 213916 - DNA, 20 bp, synthetic construct
  source 1..20: mol_type = other DNA
aacatgccagttcttcatcc

SEQ ID NO: 213917 - DNA, 20 bp, synthetic construct
  source 1..20: mol_type = other DNA
gaacatgccagttcttcatc

SEQ ID NO: 213918 - DNA, 20 bp, synthetic construct
  source 1..20: mol_type = other DNA
agaacatgccagttcttcat

SEQ ID NO: 213919 - DNA, 20 bp, synthetic construct
  source 1..20: mol_type = other DNA
cagaacatgccagttcttca

SEQ ID NO: 213920 - DNA, 20 bp, synthetic construct
  source 1..20: mol_type = other DNA
acagaacatgccagttcttc

SEQ ID NO: 213921 - DNA, 20 bp, synthetic construct
  source 1..20: mol_type = other DNA
cacagaacatgccagttctt

SEQ ID NO: 213922 - DNA, 20 bp, synthetic construct
  source 1..20: mol_type = other DNA
acacagaacatgccagttct

SEQ ID NO: 213923 - DNA, 20 bp, synthetic construct
  source 1..20: mol_type = other DNA
cacacagaacatgccagttc

SEQ ID NO: 213924 - DNA, 20 bp, synthetic construct
  source 1..20: mol_type = other DNA
ccacacagaacatgccagtt

SEQ ID NO: 213925 - DNA, 20 bp, synthetic construct
  source 1..20: mol_type = other DNA
gccacacagaacatgccagt

SEQ ID NO: 213926 - DNA, 20 bp, synthetic construct
  source 1..20: mol_type = other DNA
agccacacagaacatgccag

SEQ ID NO: 213927 - DNA, 20 bp, synthetic construct
  source 1..20: mol_type = other DNA
gagccacacagaacatgcca

SEQ ID NO: 213928 - DNA, 20 bp, synthetic construct
  source 1..20: mol_type = other DNA
ggagccacacagaacatgcc

SEQ ID NO: 213929 - DNA, 20 bp, synthetic construct
  source 1..20: mol_type = other DNA
tggagccacacagaacatgc

SEQ ID NO: 213930 - DNA, 20 bp, synthetic construct
  source 1..20: mol_type = other DNA
ctggagccacacagaacatg

SEQ ID NO: 213931 - DNA, 20 bp, synthetic construct
  source 1..20: mol_type = other DNA
cctggagccacacagaacat

SEQ ID NO: 213932 - DNA, 20 bp, synthetic construct
  source 1..20: mol_type = other DNA
ccctggagccacacagaaca

SEQ ID NO: 213933 - DNA, 20 bp, synthetic construct
  source 1..20: mol_type = other DNA
gccctggagccacacagaac

SEQ ID NO: 213934 - DNA, 20 bp, synthetic construct
  source 1..20: mol_type = other DNA
tgccctggagccacacagaa

SEQ ID NO: 213935 - DNA, 20 bp, synthetic construct
  source 1..20: mol_type = other DNA
gtgccctggagccacacaga

SEQ ID NO: 213936 - DNA, 20 bp, synthetic construct
  source 1..20: mol_type = other DNA
agtgccctggagccacacag

SEQ ID NO: 213937 - DNA, 20 bp, synthetic construct
  source 1..20: mol_type = other DNA
cagtgccctggagccacaca

SEQ ID NO: 213938 - DNA, 20 bp, synthetic construct
  source 1..20: mol_type = other DNA
tcagtgccctggagccacac

SEQ ID NO: 213939 - DNA, 20 bp, synthetic construct
  source 1..20: mol_type = other DNA
ctcagtgccctggagccaca

SEQ ID NO: 213940 - DNA, 20 bp, synthetic construct
  source 1..20: mol_type = other DNA
gctcagtgccctggagccac

SEQ ID NO: 213941 - DNA, 20 bp, synthetic construct
  source 1..20: mol_type = other DNA
tgctcagtgccctggagcca

SEQ ID NO: 213942 - DNA, 20 bp, synthetic construct
  source 1..20: mol_type = other DNA
ctgctcagtgccctggagcc

SEQ ID NO: 213943 - DNA, 20 bp, synthetic construct
  source 1..20: mol_type = other DNA
cctgctcagtgccctggagc

SEQ ID NO: 213944 - DNA, 20 bp, synthetic construct
  source 1..20: mol_type = other DNA
tcctgctcagtgccctggag

SEQ ID NO: 213945 - DNA, 20 bp, synthetic construct
  source 1..20: mol_type = other DNA
gtcctgctcagtgccctgga

SEQ ID NO: 213946 - DNA, 20 bp, synthetic construct
  source 1..20: mol_type = other DNA
ggtcctgctcagtgccctgg

SEQ ID NO: 213947 - DNA, 20 bp, synthetic construct
  source 1..20: mol_type = other DNA
gggtcctgctcagtgccctg

SEQ ID NO: 213948 - DNA, 20 bp, synthetic construct
  source 1..20: mol_type = other DNA
tgggtcctgctcagtgccct

SEQ ID NO: 213949 - DNA, 20 bp, synthetic construct
  source 1..20: mol_type = other DNA
atgggtcctgctcagtgccc

SEQ ID NO: 213950 - DNA, 20 bp, synthetic construct
  source 1..20: mol_type = other DNA
aatgggtcctgctcagtgcc

SEQ ID NO: 213951 - DNA, 20 bp, synthetic construct
  source 1..20: mol_type = other DNA
aaatgggtcctgctcagtgc

SEQ ID NO: 213952 - DNA, 20 bp, synthetic construct
  source 1..20: mol_type = other DNA
caaatgggtcctgctcagtg

SEQ ID NO: 213953 - DNA, 20 bp, synthetic construct
  source 1..20: mol_type = other DNA
gcaaatgggtcctgctcagt

SEQ ID NO: 213954 - DNA, 20 bp, synthetic construct
  source 1..20: mol_type = other DNA
ggcaaatgggtcctgctcag

SEQ ID NO: 213955 - DNA, 20 bp, synthetic construct
  source 1..20: mol_type = other DNA
tggcaaatgggtcctgctca

SEQ ID NO: 213956 - DNA, 20 bp, synthetic construct
  source 1..20: mol_type = other DNA
ttggcaaatgggtcctgctc

SEQ ID NO: 213957 - DNA, 20 bp, synthetic construct
  source 1..20: mol_type = other DNA
tttggcaaatgggtcctgct

SEQ ID NO: 213958 - DNA, 20 bp, synthetic construct
  source 1..20: mol_type = other DNA
ctttggcaaatgggtcctgc

SEQ ID NO: 213959 - DNA, 20 bp, synthetic construct
  source 1..20: mol_type = other DNA
actttggcaaatgggtcctg

SEQ ID NO: 213960 - DNA, 20 bp, synthetic construct
  source 1..20: mol_type = other DNA
gactttggcaaatgggtcct

SEQ ID NO: 213961 - DNA, 20 bp, synthetic construct
  source 1..20: mol_type = other DNA
agactttggcaaatgggtcc

SEQ ID NO: 213962 - DNA, 20 bp, synthetic construct
  source 1..20: mol_type = other DNA
gagactttggcaaatgggtc

SEQ ID NO: 213963 - DNA, 20 bp, synthetic construct
  source 1..20: mol_type = other DNA
tgagactttggcaaatgggt

SEQ ID NO: 213964 - DNA, 20 bp, synthetic construct
  source 1..20: mol_type = other DNA
ctgagactttggcaaatggg

SEQ ID NO: 213965 - DNA, 20 bp, synthetic construct
  source 1..20: mol_type = other DNA
cctgagactttggcaaatgg

SEQ ID NO: 213966 - DNA, 20 bp, synthetic construct
  source 1..20: mol_type = other DNA
ccctgagactttggcaaatg

SEQ ID NO: 213967 - DNA, 20 bp, synthetic construct
  source 1..20: mol_type = other DNA
tccctgagactttggcaaat

SEQ ID NO: 213968 - DNA, 20 bp, synthetic construct
  source 1..20: mol_type = other DNA
gtccctgagactttggcaaa

SEQ ID NO: 213969 - DNA, 20 bp, synthetic construct
  source 1..20: mol_type = other DNA
tgtccctgagactttggcaa

SEQ ID NO: 213970 - DNA, 20 bp, synthetic construct
  source 1..20: mol_type = other DNA
gtgtccctgagactttggca

SEQ ID NO: 213971 - DNA, 20 bp, synthetic construct
  source 1..20: mol_type = other DNA
tgtgtccctgagactttggc

SEQ ID NO: 213972 - DNA, 20 bp, synthetic construct
  source 1..20: mol_type = other DNA
ctgtgtccctgagactttgg

SEQ ID NO: 213973 - DNA, 20 bp, synthetic construct
  source 1..20: mol_type = other DNA
actgtgtccctgagactttg

SEQ ID NO: 213974 - DNA, 20 bp, synthetic construct
  source 1..20: mol_type = other DNA
aactgtgtccctgagacttt

SEQ ID NO: 213975 - DNA, 20 bp, synthetic construct
  source 1..20: mol_type = other DNA
aaactgtgtccctgagactt

SEQ ID NO: 213976 - DNA, 20 bp, synthetic construct
  source 1..20: mol_type = other DNA
gaaactgtgtccctgagact

SEQ ID NO: 213977 - DNA, 20 bp, synthetic construct
  source 1..20: mol_type = other DNA
agaaactgtgtccctgagac

SEQ ID NO: 213978 - DNA, 20 bp, synthetic construct
  source 1..20: mol_type = other DNA
tagaaactgtgtccctgaga

SEQ ID NO: 213979 - DNA, 20 bp, synthetic construct
  source 1..20: mol_type = other DNA
ctagaaactgtgtccctgag

SEQ ID NO: 213980 - DNA, 20 bp, synthetic construct
  source 1..20: mol_type = other DNA
gctagaaactgtgtccctga

SEQ ID NO: 213981 - DNA, 20 bp, synthetic construct
  source 1..20: mol_type = other DNA
agctagaaactgtgtccctg

SEQ ID NO: 213982 - DNA, 20 bp, synthetic construct
  source 1..20: mol_type = other DNA
tagctagaaactgtgtccct

SEQ ID NO: 213983 - DNA, 20 bp, synthetic construct
  source 1..20: mol_type = other DNA
atagctagaaactgtgtccc

SEQ ID NO: 213984 - DNA, 20 bp, synthetic construct
  source 1..20: mol_type = other DNA
tatagctagaaactgtgtcc

SEQ ID NO: 213985 - DNA, 20 bp, synthetic construct
  source 1..20: mol_type = other DNA
ctatagctagaaactgtgtc

SEQ ID NO: 213986 - DNA, 20 bp, synthetic construct
  source 1..20: mol_type = other DNA
tctatagctagaaactgtgt

SEQ ID NO: 213987 - DNA, 20 bp, synthetic construct
  source 1..20: mol_type = other DNA
gtctatagctagaaactgtg

SEQ ID NO: 213988 - DNA, 20 bp, synthetic construct
  source 1..20: mol_type = other DNA
tgtctatagctagaaactgt

SEQ ID NO: 213989 - DNA, 20 bp, synthetic construct
  source 1..20: mol_type = other DNA
ctgtctatagctagaaactg

SEQ ID NO: 213990 - DNA, 20 bp, synthetic construct
  source 1..20: mol_type = other DNA
tctgtctatagctagaaact

SEQ ID NO: 213991 - DNA, 20 bp, synthetic construct
  source 1..20: mol_type = other DNA
ttctgtctatagctagaaac

SEQ ID NO: 213992 - DNA, 20 bp, synthetic construct
  source 1..20: mol_type = other DNA
tttctgtctatagctagaaa

SEQ ID NO: 213993 - DNA, 20 bp, synthetic construct
  source 1..20: mol_type = other DNA
ttttctgtctatagctagaa

SEQ ID NO: 213994 - DNA, 20 bp, synthetic construct
  source 1..20: mol_type = other DNA
tttttctgtctatagctaga

SEQ ID NO: 213995 - DNA, 20 bp, synthetic construct
  source 1..20: mol_type = other DNA
atttttctgtctatagctag

SEQ ID NO: 213996 - DNA, 20 bp, synthetic construct
  source 1..20: mol_type = other DNA
aatttttctgtctatagcta

SEQ ID NO: 213997 - DNA, 20 bp, synthetic construct
  source 1..20: mol_type = other DNA
aaatttttctgtctatagct

SEQ ID NO: 213998 - DNA, 20 bp, synthetic construct
  source 1..20: mol_type = other DNA
aaaatttttctgtctatagc

SEQ ID NO: 213999 - DNA, 20 bp, synthetic construct
  source 1..20: mol_type = other DNA
gaaaatttttctgtctatag

SEQ ID NO: 214000 - DNA, 20 bp, synthetic construct
  source 1..20: mol_type = other DNA
agaaaatttttctgtctata

SEQ ID NO: 214001 - DNA, 20 bp, synthetic construct
  source 1..20: mol_type = other DNA
cagaaaatttttctgtctat

SEQ ID NO: 214002 - DNA, 20 bp, synthetic construct
  source 1..20: mol_type = other DNA
acagaaaatttttctgtcta

SEQ ID NO: 214003 - DNA, 20 bp, synthetic construct
  source 1..20: mol_type = other DNA
gacagaaaatttttctgtct

SEQ ID NO: 214004 - DNA, 20 bp, synthetic construct
  source 1..20: mol_type = other DNA
tgacagaaaatttttctgtc

SEQ ID NO: 214005 - DNA, 20 bp, synthetic construct
  source 1..20: mol_type = other DNA
gtgacagaaaatttttctgt

SEQ ID NO: 214006 - DNA, 20 bp, synthetic construct
  source 1..20: mol_type = other DNA
agtgacagaaaatttttctg

SEQ ID NO: 214007 - DNA, 20 bp, synthetic construct
  source 1..20: mol_type = other DNA
gagtgacagaaaatttttct

SEQ ID NO: 214008 - DNA, 20 bp, synthetic construct
  source 1..20: mol_type = other DNA
tgagtgacagaaaatttttc

SEQ ID NO: 214009 - DNA, 20 bp, synthetic construct
  source 1..20: mol_type = other DNA
ctgagtgacagaaaattttt

SEQ ID NO: 214010 - DNA, 20 bp, synthetic construct
  source 1..20: mol_type = other DNA
tctgagtgacagaaaatttt

SEQ ID NO: 214011 - DNA, 20 bp, synthetic construct
  source 1..20: mol_type = other DNA
ctctgagtgacagaaaattt

SEQ ID NO: 214012 - DNA, 20 bp, synthetic construct
  source 1..20: mol_type = other DNA
cctctgagtgacagaaaatt

SEQ ID NO: 214013 - DNA, 20 bp, synthetic construct
  source 1..20: mol_type = other DNA
tcctctgagtgacagaaaat

SEQ ID NO: 214014 - DNA, 20 bp, synthetic construct
  source 1..20: mol_type = other DNA
atcctctgagtgacagaaaa

SEQ ID NO: 214015 - DNA, 20 bp, synthetic construct
  source 1..20: mol_type = other DNA
catcctctgagtgacagaaa

SEQ ID NO: 214016 - DNA, 20 bp, synthetic construct
  source 1..20: mol_type = other DNA
tcatcctctgagtgacagaa

SEQ ID NO: 214017 - DNA, 20 bp, synthetic construct
  source 1..20: mol_type = other DNA
ttcatcctctgagtgacaga

SEQ ID NO: 214018 - DNA, 20 bp, synthetic construct
  source 1..20: mol_type = other DNA
tttcatcctctgagtgacag

SEQ ID NO: 214019 - DNA, 20 bp, synthetic construct
  source 1..20: mol_type = other DNA
ttttcatcctctgagtgaca

SEQ ID NO: 214020 - DNA, 20 bp, synthetic construct
  source 1..20: mol_type = other DNA
attttcatcctctgagtgac

SEQ ID NO: 214021 - DNA, 20 bp, synthetic construct
  source 1..20: mol_type = other DNA
tattttcatcctctgagtga

SEQ ID NO: 214022 - DNA, 20 bp, synthetic construct
  source 1..20: mol_type = other DNA
ctattttcatcctctgagtg

SEQ ID NO: 214023 - DNA, 20 bp, synthetic construct
  source 1..20: mol_type = other DNA
tctattttcatcctctgagt

SEQ ID NO: 214024 - DNA, 20 bp, synthetic construct
  source 1..20: mol_type = other DNA
ttctattttcatcctctgag

SEQ ID NO: 214025 - DNA, 20 bp, synthetic construct
  source 1..20: mol_type = other DNA
attctattttcatcctctga

SEQ ID NO: 214026 - DNA, 20 bp, synthetic construct
  source 1..20: mol_type = other DNA
cattctattttcatcctctg

SEQ ID NO: 214027 - DNA, 20 bp, synthetic construct
  source 1..20: mol_type = other DNA
tcattctattttcatcctct

SEQ ID NO: 214028 - DNA, 20 bp, synthetic construct
  source 1..20: mol_type = other DNA
ctcattctattttcatcctc

SEQ ID NO: 214029 - DNA, 20 bp, synthetic construct
  source 1..20: mol_type = other DNA
gctcattctattttcatcct

SEQ ID NO: 214030 - DNA, 20 bp, synthetic construct
  source 1..20: mol_type = other DNA
ggctcattctattttcatcc

SEQ ID NO: 214031 - DNA, 20 bp, synthetic construct
  source 1..20: mol_type = other DNA
gggctcattctattttcatc

SEQ ID NO: 214032 - DNA, 20 bp, synthetic construct
  source 1..20: mol_type = other DNA
ggggctcattctattttcat

SEQ ID NO: 214033 - DNA, 20 bp, synthetic construct
  source 1..20: mol_type = other DNA
gggggctcattctattttca

SEQ ID NO: 214034 - DNA, 20 bp, synthetic construct
  source 1..20: mol_type = other DNA
agggggctcattctattttc

SEQ ID NO: 214035 - DNA, 20 bp, synthetic construct
  source 1..20: mol_type = other DNA
aagggggctcattctatttt

SEQ ID NO: 214036 - DNA, 20 bp, synthetic construct
  source 1..20: mol_type = other DNA
taagggggctcattctattt

SEQ ID NO: 214037 - DNA, 20 bp, synthetic construct
  source 1..20: mol_type = other DNA
ttaagggggctcattctatt

SEQ ID NO: 214038 - DNA, 20 bp, synthetic construct
  source 1..20: mol_type = other DNA
cttaagggggctcattctat

SEQ ID NO: 214039 - DNA, 20 bp, synthetic construct
  source 1..20: mol_type = other DNA
tcttaagggggctcattcta

SEQ ID NO: 214040 - DNA, 20 bp, synthetic construct
  source 1..20: mol_type = other DNA
ctcttaagggggctcattct

SEQ ID NO: 214041 - DNA, 20 bp, synthetic construct
  source 1..20: mol_type = other DNA
cctcttaagggggctcattc

SEQ ID NO: 214042 - DNA, 20 bp, synthetic construct
  source 1..20: mol_type = other DNA
acctcttaagggggctcatt

SEQ ID NO: 214043 - DNA, 20 bp, synthetic construct
  source 1..20: mol_type = other DNA
tacctcttaagggggctcat

SEQ ID NO: 214044 - DNA, 20 bp, synthetic construct
  source 1..20: mol_type = other DNA
ttacctcttaagggggctca

SEQ ID NO: 214045 - DNA, 20 bp, synthetic construct
  source 1..20: mol_type = other DNA
attacctcttaagggggctc

SEQ ID NO: 214046 - DNA, 20 bp, synthetic construct
  source 1..20: mol_type = other DNA
cattacctcttaagggggct

SEQ ID NO: 214047 - DNA, 20 bp, synthetic construct
  source 1..20: mol_type = other DNA
tcattacctcttaagggggc

SEQ ID NO: 214048 - DNA, 20 bp, synthetic construct
  source 1..20: mol_type = other DNA
ctcattacctcttaaggggg

SEQ ID NO: 214049 - DNA, 20 bp, synthetic construct
  source 1..20: mol_type = other DNA
gctcattacctcttaagggg

SEQ ID NO: 214050 - DNA, 20 bp, synthetic construct
  source 1..20: mol_type = other DNA
agctcattacctcttaaggg

SEQ ID NO: 214051 - DNA, 20 bp, synthetic construct
  source 1..20: mol_type = other DNA
gagctcattacctcttaagg

SEQ ID NO: 214052 - DNA, 20 bp, synthetic construct
  source 1..20: mol_type = other DNA
ggagctcattacctcttaag

SEQ ID NO: 214053 - DNA, 20 bp, synthetic construct
  source 1..20: mol_type = other DNA
gggagctcattacctcttaa

SEQ ID NO: 214054 - DNA, 20 bp, synthetic construct
  source 1..20: mol_type = other DNA
agggagctcattacctctta

SEQ ID NO: 214055 - DNA, 20 bp, synthetic construct
  source 1..20: mol_type = other DNA
cagggagctcattacctctt

SEQ ID NO: 214056 - DNA, 20 bp, synthetic construct
  source 1..20: mol_type = other DNA
acagggagctcattacctct

SEQ ID NO: 214057 - DNA, 20 bp, synthetic construct
  source 1..20: mol_type = other DNA
gacagggagctcattacctc

SEQ ID NO: 214058 - DNA, 20 bp, synthetic construct
  source 1..20: mol_type = other DNA
tgacagggagctcattacct

SEQ ID NO: 214059 - DNA, 20 bp, synthetic construct
  source 1..20: mol_type = other DNA
atgacagggagctcattacc

SEQ ID NO: 214060 - DNA, 20 bp, synthetic construct
  source 1..20: mol_type = other DNA
aatgacagggagctcattac

SEQ ID NO: 214061 - DNA, 20 bp, synthetic construct
  source 1..20: mol_type = other DNA
caatgacagggagctcatta

SEQ ID NO: 214062 - DNA, 20 bp, synthetic construct
  source 1..20: mol_type = other DNA
ccaatgacagggagctcatt

SEQ ID NO: 214063 - DNA, 20 bp, synthetic construct
  source 1..20: mol_type = other DNA
tccaatgacagggagctcat

SEQ ID NO: 214064 - DNA, 20 bp, synthetic construct
  source 1..20: mol_type = other DNA
ttccaatgacagggagctca

SEQ ID NO: 214065 - DNA, 20 bp, synthetic construct
  source 1..20: mol_type = other DNA
cttccaatgacagggagctc

SEQ ID NO: 214066 - DNA, 20 bp, synthetic construct
  source 1..20: mol_type = other DNA
ccttccaatgacagggagct

SEQ ID NO: 214067 - DNA, 20 bp, synthetic construct
  source 1..20: mol_type = other DNA
tccttccaatgacagggagc

SEQ ID NO: 214068 - DNA, 20 bp, synthetic construct
  source 1..20: mol_type = other DNA
atccttccaatgacagggag

SEQ ID NO: 214069 - DNA, 20 bp, synthetic construct
  source 1..20: mol_type = other DNA
aatccttccaatgacaggga

SEQ ID NO: 214070 - DNA, 20 bp, synthetic construct
  source 1..20: mol_type = other DNA
gaatccttccaatgacaggg

SEQ ID NO: 214071 - DNA, 20 bp, synthetic construct
  source 1..20: mol_type = other DNA
ggaatccttccaatgacagg

SEQ ID NO: 214072 - DNA, 20 bp, synthetic construct
  source 1..20: mol_type = other DNA
tggaatccttccaatgacag

SEQ ID NO: 214073 - DNA, 20 bp, synthetic construct
  source 1..20: mol_type = other DNA
ctggaatccttccaatgaca

SEQ ID NO: 214074 - DNA, 20 bp, synthetic construct
  source 1..20: mol_type = other DNA
tctggaatccttccaatgac

SEQ ID NO: 214075 - DNA, 20 bp, synthetic construct
  source 1..20: mol_type = other DNA
ttctggaatccttccaatga

SEQ ID NO: 214076 - DNA, 20 bp, synthetic construct
  source 1..20: mol_type = other DNA
cttctggaatccttccaatg

SEQ ID NO: 214077 - DNA, 20 bp, synthetic construct
  source 1..20: mol_type = other DNA
tcttctggaatccttccaat

SEQ ID NO: 214078 - DNA, 20 bp, synthetic construct
  source 1..20: mol_type = other DNA
ctcttctggaatccttccaa

SEQ ID NO: 214079 - DNA, 20 bp, synthetic construct
  source 1..20: mol_type = other DNA
gctcttctggaatccttcca

SEQ ID NO: 214080 - DNA, 20 bp, synthetic construct
  source 1..20: mol_type = other DNA
agctcttctggaatccttcc

SEQ ID NO: 214081 - DNA, 20 bp, synthetic construct
  source 1..20: mol_type = other DNA
tagctcttctggaatccttc

SEQ ID NO: 214082 - DNA, 20 bp, synthetic construct
  source 1..20: mol_type = other DNA
ctagctcttctggaatcctt

SEQ ID NO: 214083 - DNA, 20 bp, synthetic construct
  source 1..20: mol_type = other DNA
cctagctcttctggaatcct

SEQ ID NO: 214084 - DNA, 20 bp, synthetic construct
  source 1..20: mol_type = other DNA
acctagctcttctggaatcc

SEQ ID NO: 214085 - DNA, 20 bp, synthetic construct
  source 1..20: mol_type = other DNA
tacctagctcttctggaatc

SEQ ID NO: 214086 - DNA, 20 bp, synthetic construct
  source 1..20: mol_type = other DNA
ttacctagctcttctggaat

SEQ ID NO: 214087 - DNA, 20 bp, synthetic construct
  source 1..20: mol_type = other DNA
gttacctagctcttctggaa

SEQ ID NO: 214088 - DNA, 20 bp, synthetic construct
  source 1..20: mol_type = other DNA
ggttacctagctcttctgga

SEQ ID NO: 214089 - DNA, 20 bp, synthetic construct
  source 1..20: mol_type = other DNA
tggttacctagctcttctgg

SEQ ID NO: 214090 - DNA, 20 bp, synthetic construct
  source 1..20: mol_type = other DNA
gtggttacctagctcttctg

SEQ ID NO: 214091 - DNA, 20 bp, synthetic construct
  source 1..20: mol_type = other DNA
agtggttacctagctcttct

SEQ ID NO: 214092 - DNA, 20 bp, synthetic construct
  source 1..20: mol_type = other DNA
aagtggttacctagctcttc

SEQ ID NO: 214093 - DNA, 20 bp, synthetic construct
  source 1..20: mol_type = other DNA
aaagtggttacctagctctt

SEQ ID NO: 214094 - DNA, 20 bp, synthetic construct
  source 1..20: mol_type = other DNA
taaagtggttacctagctct

SEQ ID NO: 214095 - DNA, 20 bp, synthetic construct
  source 1..20: mol_type = other DNA
ctaaagtggttacctagctc

SEQ ID NO: 214096 - DNA, 20 bp, synthetic construct
  source 1..20: mol_type = other DNA
cctaaagtggttacctagct

SEQ ID NO: 214097 - DNA, 20 bp, synthetic construct
  source 1..20: mol_type = other DNA
acctaaagtggttacctagc

SEQ ID NO: 214098 - DNA, 20 bp, synthetic construct
  source 1..20: mol_type = other DNA
cacctaaagtggttacctag

SEQ ID NO: 214099 - DNA, 20 bp, synthetic construct
  source 1..20: mol_type = other DNA
gcacctaaagtggttaccta

SEQ ID NO: 214100 - DNA, 20 bp, synthetic construct
  source 1..20: mol_type = other DNA
agcacctaaagtggttacct

SEQ ID NO: 214101 - DNA, 20 bp, synthetic construct
  source 1..20: mol_type = other DNA
tagcacctaaagtggttacc

SEQ ID NO: 214102 - DNA, 20 bp, synthetic construct
  source 1..20: mol_type = other DNA
atagcacctaaagtggttac

SEQ ID NO: 214103 - DNA, 20 bp, synthetic construct
  source 1..20: mol_type = other DNA
gatagcacctaaagtggtta

SEQ ID NO: 214104 - DNA, 20 bp, synthetic construct
  source 1..20: mol_type = other DNA
tgatagcacctaaagtggtt

SEQ ID NO: 214105 - DNA, 20 bp, synthetic construct
  source 1..20: mol_type = other DNA
ttgatagcacctaaagtggt

SEQ ID NO: 214106 - DNA, 20 bp, synthetic construct
  source 1..20: mol_type = other DNA
cttgatagcacctaaagtgg

SEQ ID NO: 214107 - DNA, 20 bp, synthetic construct
  source 1..20: mol_type = other DNA
ccttgatagcacctaaagtg

SEQ ID NO: 214108 - DNA, 20 bp, synthetic construct
  source 1..20: mol_type = other DNA
cccttgatagcacctaaagt

SEQ ID NO: 214109 - DNA, 20 bp, synthetic construct
  source 1..20: mol_type = other DNA
ccccttgatagcacctaaag

SEQ ID NO: 214110 - DNA, 20 bp, synthetic construct
  source 1..20: mol_type = other DNA
gccccttgatagcacctaaa

SEQ ID NO: 214111 - DNA, 20 bp, synthetic construct
  source 1..20: mol_type = other DNA
agccccttgatagcacctaa

SEQ ID NO: 214112 - DNA, 20 bp, synthetic construct
  source 1..20: mol_type = other DNA
aagccccttgatagcaccta

SEQ ID NO: 214113 - DNA, 20 bp, synthetic construct
  source 1..20: mol_type = other DNA
aaagccccttgatagcacct

SEQ ID NO: 214114 - DNA, 20 bp, synthetic construct
  source 1..20: mol_type = other DNA
aaaagccccttgatagcacc

SEQ ID NO: 214115 - DNA, 20 bp, synthetic construct
  source 1..20: mol_type = other DNA
aaaaagccccttgatagcac

SEQ ID NO: 214116 - DNA, 20 bp, synthetic construct
  source 1..20: mol_type = other DNA
aaaaaagccccttgatagca

SEQ ID NO: 214117 - DNA, 20 bp, synthetic construct
  source 1..20: mol_type = other DNA
gaaaaaagccccttgatagc

SEQ ID NO: 214118 - DNA, 20 bp, synthetic construct
  source 1..20: mol_type = other DNA
agaaaaaagccccttgatag

SEQ ID NO: 214119 - DNA, 20 bp, synthetic construct
  source 1..20: mol_type = other DNA
aagaaaaaagccccttgata

SEQ ID NO: 214120 - DNA, 20 bp, synthetic construct
  source 1..20: mol_type = other DNA
aaagaaaaaagccccttgat

SEQ ID NO: 214121 - DNA, 20 bp, synthetic construct
  source 1..20: mol_type = other DNA
taaagaaaaaagccccttga

SEQ ID NO: 214122 - DNA, 20 bp, synthetic construct
  source 1..20: mol_type = other DNA
ttaaagaaaaaagccccttg

SEQ ID NO: 214123 - DNA, 20 bp, synthetic construct
  source 1..20: mol_type = other DNA
tttaaagaaaaaagcccctt

SEQ ID NO: 214124 - DNA, 20 bp, synthetic construct
  source 1..20: mol_type = other DNA
ctttaaagaaaaaagcccct

SEQ ID NO: 214125 - DNA, 20 bp, synthetic construct
  source 1..20: mol_type = other DNA
actttaaagaaaaaagcccc

SEQ ID NO: 214126 - DNA, 20 bp, synthetic construct
  source 1..20: mol_type = other DNA
gactttaaagaaaaaagccc

SEQ ID NO: 214127 - DNA, 20 bp, synthetic construct
  source 1..20: mol_type = other DNA
ggactttaaagaaaaaagcc

SEQ ID NO: 214128 - DNA, 20 bp, synthetic construct
  source 1..20: mol_type = other DNA
aggactttaaagaaaaaagc

SEQ ID NO: 214129 - DNA, 20 bp, synthetic construct
  source 1..20: mol_type = other DNA
aaggactttaaagaaaaaag

SEQ ID NO: 214130 - DNA, 20 bp, synthetic construct
  source 1..20: mol_type = other DNA
aaaggactttaaagaaaaaa

SEQ ID NO: 214131 - DNA, 20 bp, synthetic construct
  source 1..20: mol_type = other DNA
gaaaggactttaaagaaaaa

SEQ ID NO: 214132 - DNA, 20 bp, synthetic construct
  source 1..20: mol_type = other DNA
ggaaaggactttaaagaaaa

SEQ ID NO: 214133 - DNA, 20 bp, synthetic construct
  source 1..20: mol_type = other DNA
tggaaaggactttaaagaaa

SEQ ID NO: 214134 - DNA, 20 bp, synthetic construct
  source 1..20: mol_type = other DNA
ttggaaaggactttaaagaa

SEQ ID NO: 214135 - DNA, 20 bp, synthetic construct
  source 1..20: mol_type = other DNA
tttggaaaggactttaaaga

SEQ ID NO: 214136 - DNA, 20 bp, synthetic construct
  source 1..20: mol_type = other DNA
ttttggaaaggactttaaag

SEQ ID NO: 214137 - DNA, 20 bp, synthetic construct
  source 1..20: mol_type = other DNA
cttttggaaaggactttaaa

SEQ ID NO: 214138 - DNA, 20 bp, synthetic construct
  source 1..20: mol_type = other DNA
gcttttggaaaggactttaa

SEQ ID NO: 214139 - DNA, 20 bp, synthetic construct
  source 1..20: mol_type = other DNA
agcttttggaaaggacttta

SEQ ID NO: 214140 - DNA, 20 bp, synthetic construct
  source 1..20: mol_type = other DNA
aagcttttggaaaggacttt

SEQ ID NO: 214141 - DNA, 20 bp, synthetic construct
  source 1..20: mol_type = other DNA
gaagcttttggaaaggactt

SEQ ID NO: 214142 - DNA, 20 bp, synthetic construct
  source 1..20: mol_type = other DNA
agaagcttttggaaaggact

SEQ ID NO: 214143 - DNA, 20 bp, synthetic construct
  source 1..20: mol_type = other DNA
cagaagcttttggaaaggac

SEQ ID NO: 214144 - DNA, 20 bp, synthetic construct
  source 1..20: mol_type = other DNA
tcagaagcttttggaaagga

SEQ ID NO: 214145 - DNA, 20 bp, synthetic construct
  source 1..20: mol_type = other DNA
ctcagaagcttttggaaagg

SEQ ID NO: 214146 - DNA, 20 bp, synthetic construct
  source 1..20: mol_type = other DNA
tctcagaagcttttggaaag

SEQ ID NO: 214147 - DNA, 20 bp, synthetic construct
  source 1..20: mol_type = other DNA
atctcagaagcttttggaaa

SEQ ID NO: 214148 - DNA, 20 bp, synthetic construct
  source 1..20: mol_type = other DNA
aatctcagaagcttttggaa

SEQ ID NO: 214149 - DNA, 20 bp, synthetic construct
  source 1..20: mol_type = other DNA
caatctcagaagcttttgga

SEQ ID NO: 214150 - DNA, 20 bp, synthetic construct
  source 1..20: mol_type = other DNA
gcaatctcagaagcttttgg

SEQ ID NO: 214151 - DNA, 20 bp, synthetic construct
  source 1..20: mol_type = other DNA
tgcaatctcagaagcttttg

SEQ ID NO: 214152 - DNA, 20 bp, synthetic construct
  source 1..20: mol_type = other DNA
atgcaatctcagaagctttt

SEQ ID NO: 214153 - DNA, 20 bp, synthetic construct
  source 1..20: mol_type = other DNA
tatgcaatctcagaagcttt

SEQ ID NO: 214154 - DNA, 20 bp, synthetic construct
  source 1..20: mol_type = other DNA
ttatgcaatctcagaagctt

SEQ ID NO: 214155 - DNA, 20 bp, synthetic construct
  source 1..20: mol_type = other DNA
tttatgcaatctcagaagct

SEQ ID NO: 214156 - DNA, 20 bp, synthetic construct
  source 1..20: mol_type = other DNA
gtttatgcaatctcagaagc

SEQ ID NO: 214157 - DNA, 20 bp, synthetic construct
  source 1..20: mol_type = other DNA
tgtttatgcaatctcagaag

SEQ ID NO: 214158 - DNA, 20 bp, synthetic construct
  source 1..20: mol_type = other DNA
ttgtttatgcaatctcagaa

SEQ ID NO: 214159 - DNA, 20 bp, synthetic construct
  source 1..20: mol_type = other DNA
attgtttatgcaatctcaga

SEQ ID NO: 214160 - DNA, 20 bp, synthetic construct
  source 1..20: mol_type = other DNA
tattgtttatgcaatctcag

SEQ ID NO: 214161 - DNA, 20 bp, synthetic construct
  source 1..20: mol_type = other DNA
ctattgtttatgcaatctca

SEQ ID NO: 214162 - DNA, 20 bp, synthetic construct
  source 1..20: mol_type = other DNA
cctattgtttatgcaatctc

SEQ ID NO: 214163 - DNA, 20 bp, synthetic construct
  source 1..20: mol_type = other DNA
tcctattgtttatgcaatct

SEQ ID NO: 214164 - DNA, 20 bp, synthetic construct
  source 1..20: mol_type = other DNA
ttcctattgtttatgcaatc

SEQ ID NO: 214165 - DNA, 20 bp, synthetic construct
  source 1..20: mol_type = other DNA
cttcctattgtttatgcaat

SEQ ID NO: 214166 - DNA, 20 bp, synthetic construct
  source 1..20: mol_type = other DNA
gcttcctattgtttatgcaa

SEQ ID NO: 214167 - DNA, 20 bp, synthetic construct
  source 1..20: mol_type = other DNA
ggcttcctattgtttatgca

SEQ ID NO: 214168 - DNA, 20 bp, synthetic construct
  source 1..20: mol_type = other DNA
tggcttcctattgtttatgc

SEQ ID NO: 214169 - DNA, 20 bp, synthetic construct
  source 1..20: mol_type = other DNA
atggcttcctattgtttatg

SEQ ID NO: 214170 - DNA, 20 bp, synthetic construct
  source 1..20: mol_type = other DNA
gatggcttcctattgtttat

SEQ ID NO: 214171 - DNA, 20 bp, synthetic construct
  source 1..20: mol_type = other DNA
agatggcttcctattgttta

SEQ ID NO: 214172 - DNA, 20 bp, synthetic construct
  source 1..20: mol_type = other DNA
aagatggcttcctattgttt

SEQ ID NO: 214173 - DNA, 20 bp, synthetic construct
  source 1..20: mol_type = other DNA
caagatggcttcctattgtt

SEQ ID NO: 214174 - DNA, 20 bp, synthetic construct
  source 1..20: mol_type = other DNA
ccaagatggcttcctattgt

SEQ ID NO: 214175 - DNA, 20 bp, synthetic construct
  source 1..20: mol_type = other DNA
accaagatggcttcctattg

SEQ ID NO: 214176 - DNA, 20 bp, synthetic construct
  source 1..20: mol_type = other DNA
caccaagatggcttcctatt

SEQ ID NO: 214177 - DNA, 20 bp, synthetic construct
  source 1..20: mol_type = other DNA
gcaccaagatggcttcctat

SEQ ID NO: 214178 - DNA, 20 bp, synthetic construct
  source 1..20: mol_type = other DNA
agcaccaagatggcttccta

SEQ ID NO: 214179 - DNA, 20 bp, synthetic construct
  source 1..20: mol_type = other DNA
aagcaccaagatggcttcct

SEQ ID NO: 214180 - DNA, 20 bp, synthetic construct
  source 1..20: mol_type = other DNA
aaagcaccaagatggcttcc

SEQ ID NO: 214181 - DNA, 20 bp, synthetic construct
  source 1..20: mol_type = other DNA
taaagcaccaagatggcttc

SEQ ID NO: 214182 - DNA, 20 bp, synthetic construct
  source 1..20: mol_type = other DNA
ttaaagcaccaagatggctt

SEQ ID NO: 214183 - DNA, 20 bp, synthetic construct
  source 1..20: mol_type = other DNA
gttaaagcaccaagatggct

SEQ ID NO: 214184 - DNA, 20 bp, synthetic construct
  source 1..20: mol_type = other DNA
tgttaaagcaccaagatggc

SEQ ID NO: 214185 - DNA, 20 bp, synthetic construct
  source 1..20: mol_type = other DNA
gtgttaaagcaccaagatgg

SEQ ID NO: 214186 - DNA, 20 bp, synthetic construct
  source 1..20: mol_type = other DNA
tgtgttaaagcaccaagatg

SEQ ID NO: 214187 - DNA, 20 bp, synthetic construct
  source 1..20: mol_type = other DNA
ttgtgttaaagcaccaagat

SEQ ID NO: 214188 - DNA, 20 bp, synthetic construct
  source 1..20: mol_type = other DNA
tttgtgttaaagcaccaaga

SEQ ID NO: 214189 - DNA, 20 bp, synthetic construct
  source 1..20: mol_type = other DNA
gtttgtgttaaagcaccaag

SEQ ID NO: 214190 - DNA, 20 bp, synthetic construct
  source 1..20: mol_type = other DNA
agtttgtgttaaagcaccaa

SEQ ID NO: 214191 - DNA, 20 bp, synthetic construct
  source 1..20: mol_type = other DNA
gagtttgtgttaaagcacca

SEQ ID NO: 214192 - DNA, 20 bp, synthetic construct
  source 1..20: mol_type = other DNA
agagtttgtgttaaagcacc

SEQ ID NO: 214193 - DNA, 20 bp, synthetic construct
  source 1..20: mol_type = other DNA
gagagtttgtgttaaagcac

SEQ ID NO: 214194 - DNA, 20 bp, synthetic construct
  source 1..20: mol_type = other DNA
ggagagtttgtgttaaagca

SEQ ID NO: 214195 - DNA, 20 bp, synthetic construct
  source 1..20: mol_type = other DNA
gggagagtttgtgttaaagc

SEQ ID NO: 214196 - DNA, 20 bp, synthetic construct
  source 1..20: mol_type = other DNA
ggggagagtttgtgttaaag

SEQ ID NO: 214197 - DNA, 20 bp, synthetic construct
  source 1..20: mol_type = other DNA
tggggagagtttgtgttaaa

SEQ ID NO: 214198 - DNA, 20 bp, synthetic construct
  source 1..20: mol_type = other DNA
ctggggagagtttgtgttaa

SEQ ID NO: 214199 - DNA, 20 bp, synthetic construct
  source 1..20: mol_type = other DNA
actggggagagtttgtgtta

SEQ ID NO: 214200 - DNA, 20 bp, synthetic construct
  source 1..20: mol_type = other DNA
cactggggagagtttgtgtt

SEQ ID NO: 214201 - DNA, 20 bp, synthetic construct
  source 1..20: mol_type = other DNA
tcactggggagagtttgtgt

SEQ ID NO: 214202 - DNA, 20 bp, synthetic construct
  source 1..20: mol_type = other DNA
atcactggggagagtttgtg

SEQ ID NO: 214203 - DNA, 20 bp, synthetic construct
  source 1..20: mol_type = other DNA
catcactggggagagtttgt

SEQ ID NO: 214204 - DNA, 20 bp, synthetic construct
  source 1..20: mol_type = other DNA
tcatcactggggagagtttg

SEQ ID NO: 214205 - DNA, 20 bp, synthetic construct
  source 1..20: mol_type = other DNA
ctcatcactggggagagttt

SEQ ID NO: 214206 - DNA, 20 bp, synthetic construct
  source 1..20: mol_type = other DNA
cctcatcactggggagagtt

SEQ ID NO: 214207 - DNA, 20 bp, synthetic construct
  source 1..20: mol_type = other DNA
ccctcatcactggggagagt

SEQ ID NO: 214208 - DNA, 20 bp, synthetic construct
  source 1..20: mol_type = other DNA
accctcatcactggggagag

SEQ ID NO: 214209 - DNA, 20 bp, synthetic construct
  source 1..20: mol_type = other DNA
aaccctcatcactggggaga

SEQ ID NO: 214210 - DNA, 20 bp, synthetic construct
  source 1..20: mol_type = other DNA
caaccctcatcactggggag

SEQ ID NO: 214211 - DNA, 20 bp, synthetic construct
  source 1..20: mol_type = other DNA
tcaaccctcatcactgggga

SEQ ID NO: 214212 - DNA, 20 bp, synthetic construct
  source 1..20: mol_type = other DNA
ctcaaccctcatcactgggg

SEQ ID NO: 214213 - DNA, 20 bp, synthetic construct
  source 1..20: mol_type = other DNA
gctcaaccctcatcactggg

SEQ ID NO: 214214 - DNA, 20 bp, synthetic construct
  source 1..20: mol_type = other DNA
ggctcaaccctcatcactgg

SEQ ID NO: 214215 - DNA, 20 bp, synthetic construct
  source 1..20: mol_type = other DNA
tggctcaaccctcatcactg

SEQ ID NO: 214216 - DNA, 20 bp, synthetic construct
  source 1..20: mol_type = other DNA
ttggctcaaccctcatcact

SEQ ID NO: 214217 - DNA, 20 bp, synthetic construct
  source 1..20: mol_type = other DNA
tttggctcaaccctcatcac

SEQ ID NO: 214218 - DNA, 20 bp, synthetic construct
  source 1..20: mol_type = other DNA
ctttggctcaaccctcatca

SEQ ID NO: 214219 - DNA, 20 bp, synthetic construct
  source 1..20: mol_type = other DNA
gctttggctcaaccctcatc

SEQ ID NO: 214220 - DNA, 20 bp, synthetic construct
  source 1..20: mol_type = other DNA
ggctttggctcaaccctcat

SEQ ID NO: 214221 - DNA, 20 bp, synthetic construct
  source 1..20: mol_type = other DNA
tggctttggctcaaccctca

SEQ ID NO: 214222 - DNA, 20 bp, synthetic construct
  source 1..20: mol_type = other DNA
ctggctttggctcaaccctc

SEQ ID NO: 214223 - DNA, 20 bp, synthetic construct
  source 1..20: mol_type = other DNA
tctggctttggctcaaccct

SEQ ID NO: 214224 - DNA, 20 bp, synthetic construct
  source 1..20: mol_type = other DNA
atctggctttggctcaaccc

SEQ ID NO: 214225 - DNA, 20 bp, synthetic construct
  source 1..20: mol_type = other DNA
aatctggctttggctcaacc

SEQ ID NO: 214226 - DNA, 20 bp, synthetic construct
  source 1..20: mol_type = other DNA
caatctggctttggctcaac

SEQ ID NO: 214227 - DNA, 20 bp, synthetic construct
  source 1..20: mol_type = other DNA
ccaatctggctttggctcaa

SEQ ID NO: 214228 - DNA, 20 bp, synthetic construct
  source 1..20: mol_type = other DNA
gccaatctggctttggctca

SEQ ID NO: 214229 - DNA, 20 bp, synthetic construct
  source 1..20: mol_type = other DNA
tgccaatctggctttggctc

SEQ ID NO: 214230 - DNA, 20 bp, synthetic construct
  source 1..20: mol_type = other DNA
ttgccaatctggctttggct

SEQ ID NO: 214231 - DNA, 20 bp, synthetic construct
  source 1..20: mol_type = other DNA
cttgccaatctggctttggc

SEQ ID NO: 214232 - DNA, 20 bp, synthetic construct
  source 1..20: mol_type = other DNA
gcttgccaatctggctttgg

SEQ ID NO: 214233 - DNA, 20 bp, synthetic construct
  source 1..20: mol_type = other DNA
tgcttgccaatctggctttg

SEQ ID NO: 214234 - DNA, 20 bp, synthetic construct
  source 1..20: mol_type = other DNA
ctgcttgccaatctggcttt

SEQ ID NO: 214235 - DNA, 20 bp, synthetic construct
  source 1..20: mol_type = other DNA
tctgcttgccaatctggctt

SEQ ID NO: 214236 - DNA, 20 bp, synthetic construct
  source 1..20: mol_type = other DNA
ctctgcttgccaatctggct

SEQ ID NO: 214237 - DNA, 20 bp, synthetic construct
  source 1..20: mol_type = other DNA
tctctgcttgccaatctggc

SEQ ID NO: 214238 - DNA, 20 bp, synthetic construct
  source 1..20: mol_type = other DNA
ctctctgcttgccaatctgg

SEQ ID NO: 214239 - DNA, 20 bp, synthetic construct
  source 1..20: mol_type = other DNA
cctctctgcttgccaatctg

SEQ ID NO: 214240 - DNA, 20 bp, synthetic construct
  source 1..20: mol_type = other DNA
tcctctctgcttgccaatct

SEQ ID NO: 214241 - DNA, 20 bp, synthetic construct
  source 1..20: mol_type = other DNA
ctcctctctgcttgccaatc

SEQ ID NO: 214242 - DNA, 20 bp, synthetic construct
  source 1..20: mol_type = other DNA
tctcctctctgcttgccaat

SEQ ID NO: 214243 - DNA, 20 bp, synthetic construct
  source 1..20: mol_type = other DNA
gtctcctctctgcttgccaa

SEQ ID NO: 214244 - DNA, 20 bp, synthetic construct
  source 1..20: mol_type = other DNA
agtctcctctctgcttgcca

SEQ ID NO: 214245 - DNA, 20 bp, synthetic construct
  source 1..20: mol_type = other DNA
aagtctcctctctgcttgcc

SEQ ID NO: 214246 - DNA, 20 bp, synthetic construct
  source 1..20: mol_type = other DNA
caagtctcctctctgcttgc

SEQ ID NO: 214247 - DNA, 20 bp, synthetic construct
  source 1..20: mol_type = other DNA
acaagtctcctctctgcttg

SEQ ID NO: 214248 - DNA, 20 bp, synthetic construct
  source 1..20: mol_type = other DNA
cacaagtctcctctctgctt

SEQ ID NO: 214249 - DNA, 20 bp, synthetic construct
  source 1..20: mol_type = other DNA
acacaagtctcctctctgct

SEQ ID NO: 214250 - DNA, 20 bp, synthetic construct
  source 1..20: mol_type = other DNA
tacacaagtctcctctctgc

SEQ ID NO: 214251 - DNA, 20 bp, synthetic construct
  source 1..20: mol_type = other DNA
gtacacaagtctcctctctg

SEQ ID NO: 214252 - DNA, 20 bp, synthetic construct
  source 1..20: mol_type = other DNA
tgtacacaagtctcctctct

SEQ ID NO: 214253 - DNA, 20 bp, synthetic construct
  source 1..20: mol_type = other DNA
ttgtacacaagtctcctctc

SEQ ID NO: 214254 - DNA, 20 bp, synthetic construct
  source 1..20: mol_type = other DNA
cttgtacacaagtctcctct

SEQ ID NO: 214255 - DNA, 20 bp, synthetic construct
  source 1..20: mol_type = other DNA
ccttgtacacaagtctcctc

SEQ ID NO: 214256 - DNA, 20 bp, synthetic construct
  source 1..20: mol_type = other DNA
tccttgtacacaagtctcct

SEQ ID NO: 214257 - DNA, 20 bp, synthetic construct
  source 1..20: mol_type = other DNA
ctccttgtacacaagtctcc

SEQ ID NO: 214258 - DNA, 20 bp, synthetic construct
  source 1..20: mol_type = other DNA
actccttgtacacaagtctc

SEQ ID NO: 214259 - DNA, 20 bp, synthetic construct
  source 1..20: mol_type = other DNA
aactccttgtacacaagtct

SEQ ID NO: 214260 - DNA, 20 bp, synthetic construct
  source 1..20: mol_type = other DNA
gaactccttgtacacaagtc

SEQ ID NO: 214261 - DNA, 20 bp, synthetic construct
  source 1..20: mol_type = other DNA
ggaactccttgtacacaagt

SEQ ID NO: 214262 - DNA, 20 bp, synthetic construct
  source 1..20: mol_type = other DNA
aggaactccttgtacacaag

SEQ ID NO: 214263 - DNA, 20 bp, synthetic construct
  source 1..20: mol_type = other DNA
gaggaactccttgtacacaa

SEQ ID NO: 214264 - DNA, 20 bp, synthetic construct
  source 1..20: mol_type = other DNA
cgaggaactccttgtacaca

SEQ ID NO: 214265 - DNA, 20 bp, synthetic construct
  source 1..20: mol_type = other DNA
tcgaggaactccttgtacac

SEQ ID NO: 214266 - DNA, 20 bp, synthetic construct
  source 1..20: mol_type = other DNA
ctcgaggaactccttgtaca

SEQ ID NO: 214267 - DNA, 20 bp, synthetic construct
  source 1..20: mol_type = other DNA
actcgaggaactccttgtac

SEQ ID NO: 214268 - DNA, 20 bp, synthetic construct
  source 1..20: mol_type = other DNA
gactcgaggaactccttgta

SEQ ID NO: 214269 - DNA, 20 bp, synthetic construct
  source 1..20: mol_type = other DNA
tgactcgaggaactccttgt

SEQ ID NO: 214270 - DNA, 20 bp, synthetic construct
  source 1..20: mol_type = other DNA
ttgactcgaggaactccttg

SEQ ID NO: 214271 - DNA, 20 bp, synthetic construct
  source 1..20: mol_type = other DNA
attgactcgaggaactcctt

SEQ ID NO: 214272 - DNA, 20 bp, synthetic construct
  source 1..20: mol_type = other DNA
aattgactcgaggaactcct

SEQ ID NO: 214273 - DNA, 20 bp, synthetic construct
  source 1..20: mol_type = other DNA
caattgactcgaggaactcc

SEQ ID NO: 214274 - DNA, 20 bp, synthetic construct
  source 1..20: mol_type = other DNA
gcaattgactcgaggaactc

SEQ ID NO: 214275 - DNA, 20 bp, synthetic construct
  source 1..20: mol_type = other DNA
agcaattgactcgaggaact

SEQ ID NO: 214276 - DNA, 20 bp, synthetic construct
  source 1..20: mol_type = other DNA
aagcaattgactcgaggaac

SEQ ID NO: 214277 - DNA, 20 bp, synthetic construct
  source 1..20: mol_type = other DNA
aaagcaattgactcgaggaa

SEQ ID NO: 214278 - DNA, 20 bp, synthetic construct
  source 1..20: mol_type = other DNA
aaaagcaattgactcgagga

SEQ ID NO: 214279 - DNA, 20 bp, synthetic construct
  source 1..20: mol_type = other DNA
aaaaagcaattgactcgagg

SEQ ID NO: 214280 - DNA, 20 bp, synthetic construct
  source 1..20: mol_type = other DNA
gaaaaagcaattgactcgag

SEQ ID NO: 214281 - DNA, 20 bp, synthetic construct
  source 1..20: mol_type = other DNA
ggaaaaagcaattgactcga

SEQ ID NO: 214282 - DNA, 20 bp, synthetic construct
  source 1..20: mol_type = other DNA
aggaaaaagcaattgactcg

SEQ ID NO: 214283 - DNA, 20 bp, synthetic construct
  source 1..20: mol_type = other DNA
aaggaaaaagcaattgactc

SEQ ID NO: 214284 - DNA, 20 bp, synthetic construct
  source 1..20: mol_type = other DNA
caaggaaaaagcaattgact

SEQ ID NO: 214285 - DNA, 20 bp, synthetic construct
  source 1..20: mol_type = other DNA
acaaggaaaaagcaattgac

SEQ ID NO: 214286 - DNA, 20 bp, synthetic construct
  source 1..20: mol_type = other DNA
aacaaggaaaaagcaattga

SEQ ID NO: 214287 - DNA, 20 bp, synthetic construct
  source 1..20: mol_type = other DNA
gaacaaggaaaaagcaattg

SEQ ID NO: 214288 - DNA, 20 bp, synthetic construct
  source 1..20: mol_type = other DNA
agaacaaggaaaaagcaatt

SEQ ID NO: 214289 - DNA, 20 bp, synthetic construct
  source 1..20: mol_type = other DNA
tagaacaaggaaaaagcaat

SEQ ID NO: 214290 - DNA, 20 bp, synthetic construct
  source 1..20: mol_type = other DNA
ctagaacaaggaaaaagcaa

SEQ ID NO: 214291 - DNA, 20 bp, synthetic construct
  source 1..20: mol_type = other DNA
gctagaacaaggaaaaagca

SEQ ID NO: 214292 - DNA, 20 bp, synthetic construct
  source 1..20: mol_type = other DNA
ggctagaacaaggaaaaagc

SEQ ID NO: 214293 - DNA, 20 bp, synthetic construct
  source 1..20: mol_type = other DNA
tggctagaacaaggaaaaag

SEQ ID NO: 214294 - DNA, 20 bp, synthetic construct
  source 1..20: mol_type = other DNA
ctggctagaacaaggaaaaa

SEQ ID NO: 214295 - DNA, 20 bp, synthetic construct
  source 1..20: mol_type = other DNA
gctggctagaacaaggaaaa

SEQ ID NO: 214296 - DNA, 20 bp, synthetic construct
  source 1..20: mol_type = other DNA
ggctggctagaacaaggaaa

SEQ ID NO: 214297 - DNA, 20 bp, synthetic construct
  source 1..20: mol_type = other DNA
tggctggctagaacaaggaa

SEQ ID NO: 214298 - DNA, 20 bp, synthetic construct
  source 1..20: mol_type = other DNA
ctggctggctagaacaagga

SEQ ID NO: 214299 - DNA, 20 bp, synthetic construct
  source 1..20: mol_type = other DNA
tctggctggctagaacaagg

SEQ ID NO: 214300 - DNA, 20 bp, synthetic construct
  source 1..20: mol_type = other DNA
ctctggctggctagaacaag

SEQ ID NO: 214301 - DNA, 20 bp, synthetic construct
  source 1..20: mol_type = other DNA
cctctggctggctagaacaa

SEQ ID NO: 214302 - DNA, 20 bp, synthetic construct
  source 1..20: mol_type = other DNA
ccctctggctggctagaaca

SEQ ID NO: 214303 - DNA, 20 bp, synthetic construct
  source 1..20: mol_type = other DNA
gccctctggctggctagaac

SEQ ID NO: 214304 - DNA, 20 bp, synthetic construct
  source 1..20: mol_type = other DNA
agccctctggctggctagaa

SEQ ID NO: 214305 - DNA, 20 bp, synthetic construct
  source 1..20: mol_type = other DNA
gagccctctggctggctaga

SEQ ID NO: 214306 - DNA, 20 bp, synthetic construct
  source 1..20: mol_type = other DNA
ggagccctctggctggctag

SEQ ID NO: 214307 - DNA, 20 bp, synthetic construct
  source 1..20: mol_type = other DNA
aggagccctctggctggcta

SEQ ID NO: 214308 - DNA, 20 bp, synthetic construct
  source 1..20: mol_type = other DNA
caggagccctctggctggct

SEQ ID NO: 214309 - DNA, 20 bp, synthetic construct
  source 1..20: mol_type = other DNA
acaggagccctctggctggc

SEQ ID NO: 214310 - DNA, 20 bp, synthetic construct
  source 1..20: mol_type = other DNA
aacaggagccctctggctgg

SEQ ID NO: 214311 - DNA, 20 bp, synthetic construct
  source 1..20: mol_type = other DNA
caacaggagccctctggctg

SEQ ID NO: 214312 - DNA, 20 bp, synthetic construct
  source 1..20: mol_type = other DNA
ccaacaggagccctctggct

SEQ ID NO: 214313 - DNA, 20 bp, synthetic construct
  source 1..20: mol_type = other DNA
tccaacaggagccctctggc

SEQ ID NO: 214314 - DNA, 20 bp, synthetic construct
  source 1..20: mol_type = other DNA
ttccaacaggagccctctgg

SEQ ID NO: 214315 - DNA, 20 bp, synthetic construct
  source 1..20: mol_type = other DNA
tttccaacaggagccctctg

SEQ ID NO: 214316 - DNA, 20 bp, synthetic construct
  source 1..20: mol_type = other DNA
ttttccaacaggagccctct

SEQ ID NO: 214317 - DNA, 20 bp, synthetic construct
  source 1..20: mol_type = other DNA
gttttccaacaggagccctc

SEQ ID NO: 214318 - DNA, 20 bp, synthetic construct
  source 1..20: mol_type = other DNA
tgttttccaacaggagccct

SEQ ID NO: 214319 - DNA, 20 bp, synthetic construct
  source 1..20: mol_type = other DNA
ctgttttccaacaggagccc

SEQ ID NO: 214320 - DNA, 20 bp, synthetic construct
  source 1..20: mol_type = other DNA
cctgttttccaacaggagcc

SEQ ID NO: 214321 - DNA, 20 bp, synthetic construct
  source 1..20: mol_type = other DNA
tcctgttttccaacaggagc

SEQ ID NO: 214322 - DNA, 20 bp, synthetic construct
  source 1..20: mol_type = other DNA
ctcctgttttccaacaggag

SEQ ID NO: 214323 - DNA, 20 bp, synthetic construct
  source 1..20: mol_type = other DNA
tctcctgttttccaacagga

SEQ ID NO: 214324 - DNA, 20 bp, synthetic construct
  source 1..20: mol_type = other DNA
gtctcctgttttccaacagg

SEQ ID NO: 214325 - DNA, 20 bp, synthetic construct
  source 1..20: mol_type = other DNA
ggtctcctgttttccaacag

SEQ ID NO: 214326 - DNA, 20 bp, synthetic construct
  source 1..20: mol_type = other DNA
cggtctcctgttttccaaca

SEQ ID NO: 214327 - DNA, 20 bp, synthetic construct
  source 1..20: mol_type = other DNA
ccggtctcctgttttccaac

SEQ ID NO: 214328 - DNA, 20 bp, synthetic construct
  source 1..20: mol_type = other DNA
tccggtctcctgttttccaa

SEQ ID NO: 214329 - DNA, 20 bp, synthetic construct
  source 1..20: mol_type = other DNA
ctccggtctcctgttttcca

SEQ ID NO: 214330 - DNA, 20 bp, synthetic construct
  source 1..20: mol_type = other DNA
tctccggtctcctgttttcc

SEQ ID NO: 214331 - DNA, 20 bp, synthetic construct
  source 1..20: mol_type = other DNA
ctctccggtctcctgttttc

SEQ ID NO: 214332 - DNA, 20 bp, synthetic construct
  source 1..20: mol_type = other DNA
cctctccggtctcctgtttt

SEQ ID NO: 214333 - DNA, 20 bp, synthetic construct
  source 1..20: mol_type = other DNA
gcctctccggtctcctgttt

SEQ ID NO: 214334 - DNA, 20 bp, synthetic construct
  source 1..20: mol_type = other DNA
agcctctccggtctcctgtt

SEQ ID NO: 214335 - DNA, 20 bp, synthetic construct
  source 1..20: mol_type = other DNA
cagcctctccggtctcctgt

SEQ ID NO: 214336 - DNA, 20 bp, synthetic construct
  source 1..20: mol_type = other DNA
tcagcctctccggtctcctg

SEQ ID NO: 214337 - DNA, 20 bp, synthetic construct
  source 1..20: mol_type = other DNA
ctcagcctctccggtctcct

SEQ ID NO: 214338 - DNA, 20 bp, synthetic construct
  source 1..20: mol_type = other DNA
cctcagcctctccggtctcc

SEQ ID NO: 214339 - DNA, 20 bp, synthetic construct
  source 1..20: mol_type = other DNA
gcctcagcctctccggtctc

SEQ ID NO: 214340 - DNA, 20 bp, synthetic construct
  source 1..20: mol_type = other DNA
ggcctcagcctctccggtct

SEQ ID NO: 214341 - DNA, 20 bp, synthetic construct
  source 1..20: mol_type = other DNA
aggcctcagcctctccggtc

SEQ ID NO: 214342 - DNA, 20 bp, synthetic construct
  source 1..20: mol_type = other DNA
caggcctcagcctctccggt

SEQ ID NO: 214343 - DNA, 20 bp, synthetic construct
  source 1..20: mol_type = other DNA
tcaggcctcagcctctccgg

SEQ ID NO: 214344 - DNA, 20 bp, synthetic construct
  source 1..20: mol_type = other DNA
gtcaggcctcagcctctccg

SEQ ID NO: 214345 - DNA, 20 bp, synthetic construct
  source 1..20: mol_type = other DNA
ggtcaggcctcagcctctcc

SEQ ID NO: 214346 - DNA, 20 bp, synthetic construct
  source 1..20: mol_type = other DNA
tggtcaggcctcagcctctc

SEQ ID NO: 214347 - DNA, 20 bp, synthetic construct
  source 1..20: mol_type = other DNA
ttggtcaggcctcagcctct

SEQ ID NO: 214348 - DNA, 20 bp, synthetic construct
  source 1..20: mol_type = other DNA
tttggtcaggcctcagcctc

SEQ ID NO: 214349 - DNA, 20 bp, synthetic construct
  source 1..20: mol_type = other DNA
gtttggtcaggcctcagcct

SEQ ID NO: 214350 - DNA, 20 bp, synthetic construct
  source 1..20: mol_type = other DNA
ggtttggtcaggcctcagcc

SEQ ID NO: 214351 - DNA, 20 bp, synthetic construct
  source 1..20: mol_type = other DNA
tggtttggtcaggcctcagc

SEQ ID NO: 214352 - DNA, 20 bp, synthetic construct
  source 1..20: mol_type = other DNA
ctggtttggtcaggcctcag

SEQ ID NO: 214353 - DNA, 20 bp, synthetic construct
  source 1..20: mol_type = other DNA
gctggtttggtcaggcctca

SEQ ID NO: 214354 - DNA, 20 bp, synthetic construct
  source 1..20: mol_type = other DNA
agctggtttggtcaggcctc

SEQ ID NO: 214355 - DNA, 20 bp, synthetic construct
  source 1..20: mol_type = other DNA
aagctggtttggtcaggcct

SEQ ID NO: 214356 - DNA, 20 bp, synthetic construct
  source 1..20: mol_type = other DNA
gaagctggtttggtcaggcc

SEQ ID NO: 214357 - DNA, 20 bp, synthetic construct
  source 1..20: mol_type = other DNA
agaagctggtttggtcaggc

SEQ ID NO: 214358 - DNA, 20 bp, synthetic construct
  source 1..20: mol_type = other DNA
cagaagctggtttggtcagg

SEQ ID NO: 214359 - DNA, 20 bp, synthetic construct
  source 1..20: mol_type = other DNA
gcagaagctggtttggtcag

SEQ ID NO: 214360 - DNA, 20 bp, synthetic construct
  source 1..20: mol_type = other DNA
tgcagaagctggtttggtca

SEQ ID NO: 214361 - DNA, 20 bp, synthetic construct
  source 1..20: mol_type = other DNA
ctgcagaagctggtttggtc

SEQ ID NO: 214362 - DNA, 20 bp, synthetic construct
  source 1..20: mol_type = other DNA
cctgcagaagctggtttggt

SEQ ID NO: 214363 - DNA, 20 bp, synthetic construct
  source 1..20: mol_type = other DNA
gcctgcagaagctggtttgg

SEQ ID NO: 214364 - DNA, 20 bp, synthetic construct
  source 1..20: mol_type = other DNA
ggcctgcagaagctggtttg

SEQ ID NO: 214365 - DNA, 20 bp, synthetic construct
  source 1..20: mol_type = other DNA
tggcctgcagaagctggttt

SEQ ID NO: 214366 - DNA, 20 bp, synthetic construct
  source 1..20: mol_type = other DNA
ctggcctgcagaagctggtt

SEQ ID NO: 214367 - DNA, 20 bp, synthetic construct
  source 1..20: mol_type = other DNA
gctggcctgcagaagctggt

SEQ ID NO: 214368 - DNA, 20 bp, synthetic construct
  source 1..20: mol_type = other DNA
agctggcctgcagaagctgg

SEQ ID NO: 214369 - DNA, 20 bp, synthetic construct
  source 1..20: mol_type = other DNA
cagctggcctgcagaagctg

SEQ ID NO: 214370 - DNA, 20 bp, synthetic construct
  source 1..20: mol_type = other DNA
ccagctggcctgcagaagct

SEQ ID NO: 214371 - DNA, 20 bp, synthetic construct
  source 1..20: mol_type = other DNA
cccagctggcctgcagaagc

SEQ ID NO: 214372 - DNA, 20 bp, synthetic construct
  source 1..20: mol_type = other DNA
tcccagctggcctgcagaag

SEQ ID NO: 214373 - DNA, 20 bp, synthetic construct
  source 1..20: mol_type = other DNA
ctcccagctggcctgcagaa

SEQ ID NO: 214374 - DNA, 20 bp, synthetic construct
  source 1..20: mol_type = other DNA
cctcccagctggcctgcaga

SEQ ID NO: 214375 - DNA, 20 bp, synthetic construct
  source 1..20: mol_type = other DNA
gcctcccagctggcctgcag

SEQ ID NO: 214376 - DNA, 20 bp, synthetic construct
  source 1..20: mol_type = other DNA
ggcctcccagctggcctgca

SEQ ID NO: 214377 - DNA, 20 bp, synthetic construct
  source 1..20: mol_type = other DNA
tggcctcccagctggcctgc

SEQ ID NO: 214378 - DNA, 20 bp, synthetic construct
  source 1..20: mol_type = other DNA
gtggcctcccagctggcctg

SEQ ID NO: 214379 - DNA, 20 bp, synthetic construct
  source 1..20: mol_type = other DNA
tgtggcctcccagctggcct

SEQ ID NO: 214380 - DNA, 20 bp, synthetic construct
  source 1..20: mol_type = other DNA
ttgtggcctcccagctggcc

SEQ ID NO: 214381 - DNA, 20 bp, synthetic construct
  source 1..20: mol_type = other DNA
gttgtggcctcccagctggc

SEQ ID NO: 214382 - DNA, 20 bp, synthetic construct
  source 1..20: mol_type = other DNA
agttgtggcctcccagctgg

SEQ ID NO: 214383 - DNA, 20 bp, synthetic construct
  source 1..20: mol_type = other DNA
gagttgtggcctcccagctg

SEQ ID NO: 214384 - DNA, 20 bp, synthetic construct
  source 1..20: mol_type = other DNA
ggagttgtggcctcccagct

SEQ ID NO: 214385 - DNA, 20 bp, synthetic construct
  source 1..20: mol_type = other DNA
aggagttgtggcctcccagc

SEQ ID NO: 214386 - DNA, 20 bp, synthetic construct
  source 1..20: mol_type = other DNA
taggagttgtggcctcccag

SEQ ID NO: 214387 - DNA, 20 bp, synthetic construct
  source 1..20: mol_type = other DNA
gtaggagttgtggcctccca

SEQ ID NO: 214388 - DNA, 20 bp, synthetic construct
  source 1..20: mol_type = other DNA
ggtaggagttgtggcctccc

SEQ ID NO: 214389 - DNA, 20 bp, synthetic construct
  source 1..20: mol_type = other DNA
aggtaggagttgtggcctcc

SEQ ID NO: 214390 - DNA, 20 bp, synthetic construct
  source 1..20: mol_type = other DNA
taggtaggagttgtggcctc

SEQ ID NO: 214391 - DNA, 20 bp, synthetic construct
  source 1..20: mol_type = other DNA
gtaggtaggagttgtggcct

SEQ ID NO: 214392 - DNA, 20 bp, synthetic construct
  source 1..20: mol_type = other DNA
cgtaggtaggagttgtggcc

SEQ ID NO: 214393 - DNA, 20 bp, synthetic construct
  source 1..20: mol_type = other DNA
ccgtaggtaggagttgtggc

SEQ ID NO: 214394 - DNA, 20 bp, synthetic construct
  source 1..20: mol_type = other DNA
cccgtaggtaggagttgtgg

SEQ ID NO: 214395 - DNA, 20 bp, synthetic construct
  source 1..20: mol_type = other DNA
tcccgtaggtaggagttgtg

SEQ ID NO: 214396 - DNA, 20 bp, synthetic construct
  source 1..20: mol_type = other DNA
ttcccgtaggtaggagttgt

SEQ ID NO: 214397 - DNA, 20 bp, synthetic construct
  source 1..20: mol_type = other DNA
tttcccgtaggtaggagttg

SEQ ID NO: 214398 - DNA, 20 bp, synthetic construct
  source 1..20: mol_type = other DNA
ttttcccgtaggtaggagtt

SEQ ID NO: 214399 - DNA, 20 bp, synthetic construct
  source 1..20: mol_type = other DNA
gttttcccgtaggtaggagt

SEQ ID NO: 214400 - DNA, 20 bp, synthetic construct
  source 1..20: mol_type = other DNA
agttttcccgtaggtaggag

SEQ ID NO: 214401 - DNA, 20 bp, synthetic construct
  source 1..20: mol_type = other DNA
cagttttcccgtaggtagga

SEQ ID NO: 214402 - DNA, 20 bp, synthetic construct
  source 1..20: mol_type = other DNA
tcagttttcccgtaggtagg

SEQ ID NO: 214403 - DNA, 20 bp, synthetic construct
  source 1..20: mol_type = other DNA
ttcagttttcccgtaggtag

SEQ ID NO: 214404 - DNA, 20 bp, synthetic construct
  source 1..20: mol_type = other DNA
cttcagttttcccgtaggta

SEQ ID NO: 214405 - DNA, 20 bp, synthetic construct
  source 1..20: mol_type = other DNA
ccttcagttttcccgtaggt

SEQ ID NO: 214406 - DNA, 20 bp, synthetic construct
  source 1..20: mol_type = other DNA
cccttcagttttcccgtagg

SEQ ID NO: 214407 - DNA, 20 bp, synthetic construct
  source 1..20: mol_type = other DNA
gcccttcagttttcccgtag

SEQ ID NO: 214408 - DNA, 20 bp, synthetic construct
  source 1..20: mol_type = other DNA
tgcccttcagttttcccgta

SEQ ID NO: 214409 - DNA, 20 bp, synthetic construct
  source 1..20: mol_type = other DNA
atgcccttcagttttcccgt

SEQ ID NO: 214410 - DNA, 20 bp, synthetic construct
  source 1..20: mol_type = other DNA
gatgcccttcagttttcccg

SEQ ID NO: 214411 - DNA, 20 bp, synthetic construct
  source 1..20: mol_type = other DNA
agatgcccttcagttttccc

SEQ ID NO: 214412 - DNA, 20 bp, synthetic construct
  source 1..20: mol_type = other DNA
gagatgcccttcagttttcc

SEQ ID NO: 214413 - DNA, 20 bp, synthetic construct
  source 1..20: mol_type = other DNA
agagatgcccttcagttttc

SEQ ID NO: 214414 - DNA, 20 bp, synthetic construct
  source 1..20: mol_type = other DNA
tagagatgcccttcagtttt

SEQ ID NO: 214415 - DNA, 20 bp, synthetic construct
  source 1..20: mol_type = other DNA
atagagatgcccttcagttt

SEQ ID NO: 214416 - DNA, 20 bp, synthetic construct
  source 1..20: mol_type = other DNA
aatagagatgcccttcagtt

SEQ ID NO: 214417 - DNA, 20 bp, synthetic construct
  source 1..20: mol_type = other DNA
aaatagagatgcccttcagt

SEQ ID NO: 214418 - DNA, 20 bp, synthetic construct
  source 1..20: mol_type = other DNA
aaaatagagatgcccttcag

SEQ ID NO: 214419 - DNA, 20 bp, synthetic construct
  source 1..20: mol_type = other DNA
aaaaatagagatgcccttca

SEQ ID NO: 214420 - DNA, 20 bp, synthetic construct
  source 1..20: mol_type = other DNA
taaaaatagagatgcccttc

SEQ ID NO: 214421 - DNA, 20 bp, synthetic construct
  source 1..20: mol_type = other DNA
ctaaaaatagagatgccctt

SEQ ID NO: 214422 - DNA, 20 bp, synthetic construct
  source 1..20: mol_type = other DNA
tctaaaaatagagatgccct

SEQ ID NO: 214423 - DNA, 20 bp, synthetic construct
  source 1..20: mol_type = other DNA
atctaaaaatagagatgccc

SEQ ID NO: 214424 - DNA, 20 bp, synthetic construct
  source 1..20: mol_type = other DNA
aatctaaaaatagagatgcc

SEQ ID NO: 214425 - DNA, 20 bp, synthetic construct
  source 1..20: mol_type = other DNA
taatctaaaaatagagatgc

SEQ ID NO: 214426 - DNA, 20 bp, synthetic construct
  source 1..20: mol_type = other DNA
ctaatctaaaaatagagatg

SEQ ID NO: 214427 - DNA, 20 bp, synthetic construct
  source 1..20: mol_type = other DNA
gctaatctaaaaatagagat

SEQ ID NO: 214428 - DNA, 20 bp, synthetic construct
  source 1..20: mol_type = other DNA
tgctaatctaaaaatagaga

SEQ ID NO: 214429 - DNA, 20 bp, synthetic construct
  source 1..20: mol_type = other DNA
ttgctaatctaaaaatagag

SEQ ID NO: 214430 - DNA, 20 bp, synthetic construct
  source 1..20: mol_type = other DNA
tttgctaatctaaaaataga

SEQ ID NO: 214431 - DNA, 20 bp, synthetic construct
  source 1..20: mol_type = other DNA
ttttgctaatctaaaaatag

SEQ ID NO: 214432 - DNA, 20 bp, synthetic construct
  source 1..20: mol_type = other DNA
cttttgctaatctaaaaata

SEQ ID NO: 214433 - DNA, 20 bp, synthetic construct
  source 1..20: mol_type = other DNA
tcttttgctaatctaaaaat

SEQ ID NO: 214434 - DNA, 20 bp, synthetic construct
  source 1..20: mol_type = other DNA
ttcttttgctaatctaaaaa

SEQ ID NO: 214435 - DNA, 20 bp, synthetic construct
  source 1..20: mol_type = other DNA
tttcttttgctaatctaaaa

SEQ ID NO: 214436 - DNA, 20 bp, synthetic construct
  source 1..20: mol_type = other DNA
ttttcttttgctaatctaaa

SEQ ID NO: 214437 - DNA, 20 bp, synthetic construct
  source 1..20: mol_type = other DNA
attttcttttgctaatctaa

SEQ ID NO: 214438 - DNA, 20 bp, synthetic construct
  source 1..20: mol_type = other DNA
tattttcttttgctaatcta

SEQ ID NO: 214439 - DNA, 20 bp, synthetic construct
  source 1..20: mol_type = other DNA
ttattttcttttgctaatct

SEQ ID NO: 214440 - DNA, 20 bp, synthetic construct
  source 1..20: mol_type = other DNA
tttattttcttttgctaatc

SEQ ID NO: 214441 - DNA, 20 bp, synthetic construct
  source 1..20: mol_type = other DNA
atttattttcttttgctaat

SEQ ID NO: 214442 - DNA, 20 bp, synthetic construct
  source 1..20: mol_type = other DNA
aatttattttcttttgctaa

SEQ ID NO: 214443 - DNA, 20 bp, synthetic construct
  source 1..20: mol_type = other DNA
aaatttattttcttttgcta

SEQ ID NO: 214444 - DNA, 20 bp, synthetic construct
  source 1..20: mol_type = other DNA
taaatttattttcttttgct

SEQ ID NO: 214445 - DNA, 20 bp, synthetic construct
  source 1..20: mol_type = other DNA
ttaaatttattttcttttgc

SEQ ID NO: 214446 - DNA, 20 bp, synthetic construct
  source 1..20: mol_type = other DNA
cttaaatttattttcttttg

SEQ ID NO: 214447 - DNA, 20 bp, synthetic construct
  source 1..20: mol_type = other DNA
acttaaatttattttctttt

SEQ ID NO: 214448 - DNA, 20 bp, synthetic construct
  source 1..20: mol_type = other DNA
aacttaaatttattttcttt

SEQ ID NO: 214449 - DNA, 20 bp, synthetic construct
  source 1..20: mol_type = other DNA
aaacttaaatttattttctt

SEQ ID NO: 214450 - DNA, 20 bp, synthetic construct
  source 1..20: mol_type = other DNA
caaacttaaatttattttct

SEQ ID NO: 214451 - DNA, 20 bp, synthetic construct
  source 1..20: mol_type = other DNA
tcaaacttaaatttattttc

SEQ ID NO: 214452 - DNA, 20 bp, synthetic construct
  source 1..20: mol_type = other DNA
ctcaaacttaaatttatttt

SEQ ID NO: 214453 - DNA, 20 bp, synthetic construct
  source 1..20: mol_type = other DNA
actcaaacttaaatttattt

SEQ ID NO: 214454 - DNA, 20 bp, synthetic construct
  source 1..20: mol_type = other DNA
gactcaaacttaaatttatt

SEQ ID NO: 214455 - DNA, 20 bp, synthetic construct
  source 1..20: mol_type = other DNA
agactcaaacttaaatttat

SEQ ID NO: 214456 - DNA, 20 bp, synthetic construct
  source 1..20: mol_type = other DNA
gagactcaaacttaaattta

SEQ ID NO: 214457 - DNA, 20 bp, synthetic construct
  source 1..20: mol_type = other DNA
ggagactcaaacttaaattt

SEQ ID NO: 214458 - DNA, 20 bp, synthetic construct
  source 1..20: mol_type = other DNA
aggagactcaaacttaaatt

SEQ ID NO: 214459 - DNA, 20 bp, synthetic construct
  source 1..20: mol_type = other DNA
aaggagactcaaacttaaat

SEQ ID NO: 214460 - DNA, 20 bp, synthetic construct
  source 1..20: mol_type = other DNA
aaaggagactcaaacttaaa

SEQ ID NO: 214461 - DNA, 20 bp, synthetic construct
  source 1..20: mol_type = other DNA
caaaggagactcaaacttaa

SEQ ID NO: 214462 - DNA, 20 bp, synthetic construct
  source 1..20: mol_type = other DNA
gcaaaggagactcaaactta

SEQ ID NO: 214463 - DNA, 20 bp, synthetic construct
  source 1..20: mol_type = other DNA
tgcaaaggagactcaaactt

SEQ ID NO: 214464 - DNA, 20 bp, synthetic construct
  source 1..20: mol_type = other DNA
ttgcaaaggagactcaaact

SEQ ID NO: 214465 - DNA, 20 bp, synthetic construct
  source 1..20: mol_type = other DNA
gttgcaaaggagactcaaac

SEQ ID NO: 214466 - DNA, 20 bp, synthetic construct
  source 1..20: mol_type = other DNA
agttgcaaaggagactcaaa

SEQ ID NO: 214467 - DNA, 20 bp, synthetic construct
  source 1..20: mol_type = other DNA
aagttgcaaaggagactcaa

SEQ ID NO: 214468 - DNA, 20 bp, synthetic construct
  source 1..20: mol_type = other DNA
aaagttgcaaaggagactca

SEQ ID NO: 214469 - DNA, 20 bp, synthetic construct
  source 1..20: mol_type = other DNA
aaaagttgcaaaggagactc

SEQ ID NO: 214470 - DNA, 20 bp, synthetic construct
  source 1..20: mol_type = other DNA
taaaagttgcaaaggagact

SEQ ID NO: 214471 - DNA, 20 bp, synthetic construct
  source 1..20: mol_type = other DNA
ttaaaagttgcaaaggagac

SEQ ID NO: 214472 - DNA, 20 bp, synthetic construct
  source 1..20: mol_type = other DNA
tttaaaagttgcaaaggaga

SEQ ID NO: 214473 - DNA, 20 bp, synthetic construct
  source 1..20: mol_type = other DNA
ttttaaaagttgcaaaggag

SEQ ID NO: 214474 - DNA, 20 bp, synthetic construct
  source 1..20: mol_type = other DNA
cttttaaaagttgcaaagga

SEQ ID NO: 214475 - DNA, 20 bp, synthetic construct
  source 1..20: mol_type = other DNA
tcttttaaaagttgcaaagg

SEQ ID NO: 214476 - DNA, 20 bp, synthetic construct
  source 1..20: mol_type = other DNA
gtcttttaaaagttgcaaag

SEQ ID NO: 214477 - DNA, 20 bp, synthetic construct
  source 1..20: mol_type = other DNA
tgtcttttaaaagttgcaaa

SEQ ID NO: 214478 - DNA, 20 bp, synthetic construct
  source 1..20: mol_type = other DNA
atgtcttttaaaagttgcaa

SEQ ID NO: 214479 - DNA, 20 bp, synthetic construct
  source 1..20: mol_type = other DNA
gatgtcttttaaaagttgca

SEQ ID NO: 214480 - DNA, 20 bp, synthetic construct
  source 1..20: mol_type = other DNA
agatgtcttttaaaagttgc

SEQ ID NO: 214481 - DNA, 20 bp, synthetic construct
  source 1..20: mol_type = other DNA
aagatgtcttttaaaagttg

SEQ ID NO: 214482 - DNA, 20 bp, synthetic construct
  source 1..20: mol_type = other DNA
aaagatgtcttttaaaagtt

SEQ ID NO: 214483 - DNA, 20 bp, synthetic construct
  source 1..20: mol_type = other DNA
taaagatgtcttttaaaagt

SEQ ID NO: 214484 - DNA, 20 bp, synthetic construct
  source 1..20: mol_type = other DNA
ataaagatgtcttttaaaag

SEQ ID NO: 214485 - DNA, 20 bp, synthetic construct
  source 1..20: mol_type = other DNA
aataaagatgtcttttaaaa

SEQ ID NO: 214486 - DNA, 20 bp, synthetic construct
  source 1..20: mol_type = other DNA
caataaagatgtcttttaaa

SEQ ID NO: 214487 - DNA, 20 bp, synthetic construct
  source 1..20: mol_type = other DNA
tcaataaagatgtcttttaa

SEQ ID NO: 214488 - DNA, 20 bp, synthetic construct
  source 1..20: mol_type = other DNA
ctcaataaagatgtctttta

SEQ ID NO: 214489 - DNA, 20 bp, synthetic construct
  source 1..20: mol_type = other DNA
tctcaataaagatgtctttt

SEQ ID NO: 214490 - DNA, 20 bp, synthetic construct
  source 1..20: mol_type = other DNA
atctcaataaagatgtcttt

SEQ ID NO: 214491 - DNA, 20 bp, synthetic construct
  source 1..20: mol_type = other DNA
catctcaataaagatgtctt

SEQ ID NO: 214492 - DNA, 20 bp, synthetic construct
  source 1..20: mol_type = other DNA
tcatctcaataaagatgtct

SEQ ID NO: 214493 - DNA, 20 bp, synthetic construct
  source 1..20: mol_type = other DNA
atcatctcaataaagatgtc

SEQ ID NO: 214494 - DNA, 20 bp, synthetic construct
  source 1..20: mol_type = other DNA
gatcatctcaataaagatgt

SEQ ID NO: 214495 - DNA, 20 bp, synthetic construct
  source 1..20: mol_type = other DNA
tgatcatctcaataaagatg

SEQ ID NO: 214496 - DNA, 20 bp, synthetic construct
  source 1..20: mol_type = other DNA
atgatcatctcaataaagat

SEQ ID NO: 214497 - DNA, 20 bp, synthetic construct
  source 1..20: mol_type = other DNA
aatgatcatctcaataaaga

SEQ ID NO: 214498 - DNA, 20 bp, synthetic construct
  source 1..20: mol_type = other DNA
gaatgatcatctcaataaag

SEQ ID NO: 214499 - DNA, 20 bp, synthetic construct
  source 1..20: mol_type = other DNA
tgaatgatcatctcaataaa

SEQ ID NO: 214500 - DNA, 20 bp, synthetic construct
  source 1..20: mol_type = other DNA
gtgaatgatcatctcaataa

SEQ ID NO: 214501 - DNA, 20 bp, synthetic construct
  source 1..20: mol_type = other DNA
tgtgaatgatcatctcaata

SEQ ID NO: 214502 - DNA, 20 bp, synthetic construct
  source 1..20: mol_type = other DNA
atgtgaatgatcatctcaat

SEQ ID NO: 214503 - DNA, 20 bp, synthetic construct
  source 1..20: mol_type = other DNA
aatgtgaatgatcatctcaa

SEQ ID NO: 214504 - DNA, 20 bp, synthetic construct
  source 1..20: mol_type = other DNA
gaatgtgaatgatcatctca

SEQ ID NO: 214505 - DNA, 20 bp, synthetic construct
  source 1..20: mol_type = other DNA
agaatgtgaatgatcatctc

SEQ ID NO: 214506 - DNA, 20 bp, synthetic construct
  source 1..20: mol_type = other DNA
tagaatgtgaatgatcatct

SEQ ID NO: 214507 - DNA, 20 bp, synthetic construct
  source 1..20: mol_type = other DNA
atagaatgtgaatgatcatc

SEQ ID NO: 214508 - DNA, 20 bp, synthetic construct
  source 1..20: mol_type = other DNA
tatagaatgtgaatgatcat

SEQ ID NO: 214509 - DNA, 20 bp, synthetic construct
  source 1..20: mol_type = other DNA
ttatagaatgtgaatgatca

SEQ ID NO: 214510 - DNA, 20 bp, synthetic construct
  source 1..20: mol_type = other DNA
tttatagaatgtgaatgatc

SEQ ID NO: 214511 - DNA, 20 bp, synthetic construct
  source 1..20: mol_type = other DNA
ttttatagaatgtgaatgat

SEQ ID NO: 214512 - DNA, 20 bp, synthetic construct
  source 1..20: mol_type = other DNA
attttatagaatgtgaatga

SEQ ID NO: 214513 - DNA, 20 bp, synthetic construct
  source 1..20: mol_type = other DNA
aattttatagaatgtgaatg

SEQ ID NO: 214514 - DNA, 20 bp, synthetic construct
  source 1..20: mol_type = other DNA
gaattttatagaatgtgaat

SEQ ID NO: 214515 - DNA, 20 bp, synthetic construct
  source 1..20: mol_type = other DNA
ggaattttatagaatgtgaa

SEQ ID NO: 214516 - DNA, 20 bp, synthetic construct
  source 1..20: mol_type = other DNA
gggaattttatagaatgtga

SEQ ID NO: 214517 - DNA, 20 bp, synthetic construct
  source 1..20: mol_type = other DNA
ggggaattttatagaatgtg

SEQ ID NO: 214518 - DNA, 20 bp, synthetic construct
  source 1..20: mol_type = other DNA
gggggaattttatagaatgt

SEQ ID NO: 214519 - DNA, 20 bp, synthetic construct
  source 1..20: mol_type = other DNA
tgggggaattttatagaatg

SEQ ID NO: 214520 - DNA, 20 bp, synthetic construct
  source 1..20: mol_type = other DNA
gtgggggaattttatagaat

SEQ ID NO: 214521 - DNA, 20 bp, synthetic construct
  source 1..20: mol_type = other DNA
agtgggggaattttatagaa

SEQ ID NO: 214522 - DNA, 20 bp, synthetic construct
  source 1..20: mol_type = other DNA
aagtgggggaattttataga

SEQ ID NO: 214523 - DNA, 20 bp, synthetic construct
  source 1..20: mol_type = other DNA
aaagtgggggaattttatag

SEQ ID NO: 214524 - DNA, 20 bp, synthetic construct
  source 1..20: mol_type = other DNA
caaagtgggggaattttata

SEQ ID NO: 214525 - DNA, 20 bp, synthetic construct
  source 1..20: mol_type = other DNA
tcaaagtgggggaattttat

SEQ ID NO: 214526 - DNA, 20 bp, synthetic construct
  source 1..20: mol_type = other DNA
ctcaaagtgggggaatttta

SEQ ID NO: 214527 - DNA, 20 bp, synthetic construct
  source 1..20: mol_type = other DNA
actcaaagtgggggaatttt

SEQ ID NO: 214528 - DNA, 20 bp, synthetic construct
  source 1..20: mol_type = other DNA
aactcaaagtgggggaattt

SEQ ID NO: 214529 - DNA, 20 bp, synthetic construct
  source 1..20: mol_type = other DNA
taactcaaagtgggggaatt

SEQ ID NO: 214530 - DNA, 20 bp, synthetic construct
  source 1..20: mol_type = other DNA
gtaactcaaagtgggggaat

SEQ ID NO: 214531 - DNA, 20 bp, synthetic construct
  source 1..20: mol_type = other DNA
tgtaactcaaagtgggggaa

SEQ ID NO: 214532 - DNA, 20 bp, synthetic construct
  source 1..20: mol_type = other DNA
ttgtaactcaaagtggggga

SEQ ID NO: 214533 - DNA, 20 bp, synthetic construct
  source 1..20: mol_type = other DNA
attgtaactcaaagtggggg

SEQ ID NO: 214534 - DNA, 20 bp, synthetic construct
  source 1..20: mol_type = other DNA
aattgtaactcaaagtgggg

SEQ ID NO: 214535 - DNA, 20 bp, synthetic construct
  source 1..20: mol_type = other DNA
gaattgtaactcaaagtggg

SEQ ID NO: 214536 - DNA, 20 bp, synthetic construct
  source 1..20: mol_type = other DNA
tgaattgtaactcaaagtgg

SEQ ID NO: 214537 - DNA, 20 bp, synthetic construct
  source 1..20: mol_type = other DNA
ctgaattgtaactcaaagtg

SEQ ID NO: 214538 - DNA, 20 bp, synthetic construct
  source 1..20: mol_type = other DNA
actgaattgtaactcaaagt

SEQ ID NO: 214539 - DNA, 20 bp, synthetic construct
  source 1..20: mol_type = other DNA
cactgaattgtaactcaaag

SEQ ID NO: 214540 - DNA, 20 bp, synthetic construct
  source 1..20: mol_type = other DNA
ccactgaattgtaactcaaa

SEQ ID NO: 214541 - DNA, 20 bp, synthetic construct
  source 1..20: mol_type = other DNA
accactgaattgtaactcaa

SEQ ID NO: 214542 - DNA, 20 bp, synthetic construct
  source 1..20: mol_type = other DNA
aaccactgaattgtaactca

SEQ ID NO: 214543 - DNA, 20 bp, synthetic construct
  source 1..20: mol_type = other DNA
aaaccactgaattgtaactc

SEQ ID NO: 214544 - DNA, 20 bp, synthetic construct
  source 1..20: mol_type = other DNA
aaaaccactgaattgtaact

SEQ ID NO: 214545 - DNA, 20 bp, synthetic construct
  source 1..20: mol_type = other DNA
taaaaccactgaattgtaac

SEQ ID NO: 214546 - DNA, 20 bp, synthetic construct
  source 1..20: mol_type = other DNA
ctaaaaccactgaattgtaa

SEQ ID NO: 214547 - DNA, 20 bp, synthetic construct
  source 1..20: mol_type = other DNA
actaaaaccactgaattgta

SEQ ID NO: 214548 - DNA, 20 bp, synthetic construct
  source 1..20: mol_type = other DNA
gactaaaaccactgaattgt

SEQ ID NO: 214549 - DNA, 20 bp, synthetic construct
  source 1..20: mol_type = other DNA
agactaaaaccactgaattg

SEQ ID NO: 214550 - DNA, 20 bp, synthetic construct
  source 1..20: mol_type = other DNA
aagactaaaaccactgaatt

SEQ ID NO: 214551 - DNA, 20 bp, synthetic construct
  source 1..20: mol_type = other DNA
gaagactaaaaccactgaat

SEQ ID NO: 214552 - DNA, 20 bp, synthetic construct
  source 1..20: mol_type = other DNA
ggaagactaaaaccactgaa

SEQ ID NO: 214553 - DNA, 20 bp, synthetic construct
  source 1..20: mol_type = other DNA
aggaagactaaaaccactga

SEQ ID NO: 214554 - DNA, 20 bp, synthetic construct
  source 1..20: mol_type = other DNA
aaggaagactaaaaccactg

SEQ ID NO: 214555 - DNA, 20 bp, synthetic construct
  source 1..20: mol_type = other DNA
caaggaagactaaaaccact

SEQ ID NO: 214556 - DNA, 20 bp, synthetic construct
  source 1..20: mol_type = other DNA
tcaaggaagactaaaaccac

SEQ ID NO: 214557 - DNA, 20 bp, synthetic construct
  source 1..20: mol_type = other DNA
atcaaggaagactaaaacca

SEQ ID NO: 214558 - DNA, 20 bp, synthetic construct
  source 1..20: mol_type = other DNA
catcaaggaagactaaaacc

SEQ ID NO: 214559 - DNA, 20 bp, synthetic construct
  source 1..20: mol_type = other DNA
tcatcaaggaagactaaaac

SEQ ID NO: 214560 - DNA, 20 bp, synthetic construct
  source 1..20: mol_type = other DNA
atcatcaaggaagactaaaa

SEQ ID NO: 214561 - DNA, 20 bp, synthetic construct
  source 1..20: mol_type = other DNA
aatcatcaaggaagactaaa

SEQ ID NO: 214562 - DNA, 20 bp, synthetic construct
  source 1..20: mol_type = other DNA
aaatcatcaaggaagactaa

SEQ ID NO: 214563 - DNA, 20 bp, synthetic construct
  source 1..20: mol_type = other DNA
aaaatcatcaaggaagacta

SEQ ID NO: 214564 - DNA, 20 bp, synthetic construct
  source 1..20: mol_type = other DNA
caaaatcatcaaggaagact

SEQ ID NO: 214565 - DNA, 20 bp, synthetic construct
  source 1..20: mol_type = other DNA
tcaaaatcatcaaggaagac

SEQ ID NO: 214566 - DNA, 20 bp, synthetic construct
  source 1..20: mol_type = other DNA
atcaaaatcatcaaggaaga

SEQ ID NO: 214567 - DNA, 20 bp, synthetic construct
  source 1..20: mol_type = other DNA
catcaaaatcatcaaggaag

SEQ ID NO: 214568 - DNA, 20 bp, synthetic construct
  source 1..20: mol_type = other DNA
ccatcaaaatcatcaaggaa

SEQ ID NO: 214569 - DNA, 20 bp, synthetic construct
  source 1..20: mol_type = other DNA
accatcaaaatcatcaagga

SEQ ID NO: 214570 - DNA, 20 bp, synthetic construct
  source 1..20: mol_type = other DNA
gaccatcaaaatcatcaagg

SEQ ID NO: 214571 - DNA, 20 bp, synthetic construct
  source 1..20: mol_type = other DNA
agaccatcaaaatcatcaag

SEQ ID NO: 214572 - DNA, 20 bp, synthetic construct
  source 1..20: mol_type = other DNA
aagaccatcaaaatcatcaa

SEQ ID NO: 214573 - DNA, 20 bp, synthetic construct
  source 1..20: mol_type = other DNA
aaagaccatcaaaatcatca

SEQ ID NO: 214574 - DNA, 20 bp, synthetic construct
  source 1..20: mol_type = other DNA
aaaagaccatcaaaatcatc

SEQ ID NO: 214575 - DNA, 20 bp, synthetic construct
  source 1..20: mol_type = other DNA
gaaaagaccatcaaaatcat

SEQ ID NO: 214576 - DNA, 20 bp, synthetic construct
  source 1..20: mol_type = other DNA
agaaaagaccatcaaaatca

SEQ ID NO: 214577 - DNA, 20 bp, synthetic construct
  source 1..20: mol_type = other DNA
aagaaaagaccatcaaaatc

SEQ ID NO: 214578 - DNA, 20 bp, synthetic construct
  source 1..20: mol_type = other DNA
taagaaaagaccatcaaaat

SEQ ID NO: 214579 - DNA, 20 bp, synthetic construct
  source 1..20: mol_type = other DNA
ttaagaaaagaccatcaaaa

SEQ ID NO: 214580 - DNA, 20 bp, synthetic construct
  source 1..20: mol_type = other DNA
cttaagaaaagaccatcaaa

SEQ ID NO: 214581 - DNA, 20 bp, synthetic construct
  source 1..20: mol_type = other DNA
ccttaagaaaagaccatcaa

SEQ ID NO: 214582 - DNA, 20 bp, synthetic construct
  source 1..20: mol_type = other DNA
gccttaagaaaagaccatca

SEQ ID NO: 214583 - DNA, 20 bp, synthetic construct
  source 1..20: mol_type = other DNA
agccttaagaaaagaccatc

SEQ ID NO: 214584 - DNA, 20 bp, synthetic construct
  source 1..20: mol_type = other DNA
gagccttaagaaaagaccat

SEQ ID NO: 214585 - DNA, 20 bp, synthetic construct
  source 1..20: mol_type = other DNA
agagccttaagaaaagacca

SEQ ID NO: 214586 - DNA, 20 bp, synthetic construct
  source 1..20: mol_type = other DNA
aagagccttaagaaaagacc

SEQ ID NO: 214587 - DNA, 20 bp, synthetic construct
  source 1..20: mol_type = other DNA
caagagccttaagaaaagac

SEQ ID NO: 214588 - DNA, 20 bp, synthetic construct
  source 1..20: mol_type = other DNA
ccaagagccttaagaaaaga

SEQ ID NO: 214589 - DNA, 20 bp, synthetic construct
  source 1..20: mol_type = other DNA
tccaagagccttaagaaaag

SEQ ID NO: 214590 - DNA, 20 bp, synthetic construct
  source 1..20: mol_type = other DNA
ttccaagagccttaagaaaa

SEQ ID NO: 214591 - DNA, 20 bp, synthetic construct
  source 1..20: mol_type = other DNA
cttccaagagccttaagaaa

SEQ ID NO: 214592 - DNA, 20 bp, synthetic construct
  source 1..20: mol_type = other DNA
tcttccaagagccttaagaa

SEQ ID NO: 214593 - DNA, 20 bp, synthetic construct
  source 1..20: mol_type = other DNA
gtcttccaagagccttaaga

SEQ ID NO: 214594 - DNA, 20 bp, synthetic construct
  source 1..20: mol_type = other DNA
ggtcttccaagagccttaag

SEQ ID NO: 214595 - DNA, 20 bp, synthetic construct
  source 1..20: mol_type = other DNA
gggtcttccaagagccttaa

SEQ ID NO: 214596 - DNA, 20 bp, synthetic construct
  source 1..20: mol_type = other DNA
tgggtcttccaagagcctta

SEQ ID NO: 214597 - DNA, 20 bp, synthetic construct
  source 1..20: mol_type = other DNA
ctgggtcttccaagagcctt

SEQ ID NO: 214598 - DNA, 20 bp, synthetic construct
  source 1..20: mol_type = other DNA
tctgggtcttccaagagcct

SEQ ID NO: 214599 - DNA, 20 bp, synthetic construct
  source 1..20: mol_type = other DNA
ttctgggtcttccaagagcc

SEQ ID NO: 214600 - DNA, 20 bp, synthetic construct
  source 1..20: mol_type = other DNA
cttctgggtcttccaagagc

SEQ ID NO: 214601 - DNA, 20 bp, synthetic construct
  source 1..20: mol_type = other DNA
gcttctgggtcttccaagag

SEQ ID NO: 214602 - DNA, 20 bp, synthetic construct
  source 1..20: mol_type = other DNA
ggcttctgggtcttccaaga

SEQ ID NO: 214603 - DNA, 20 bp, synthetic construct
  source 1..20: mol_type = other DNA
aggcttctgggtcttccaag

SEQ ID NO: 214604 - DNA, 20 bp, synthetic construct
  source 1..20: mol_type = other DNA
gaggcttctgggtcttccaa

SEQ ID NO: 214605 - DNA, 20 bp, synthetic construct
  source 1..20: mol_type = other DNA
agaggcttctgggtcttcca

SEQ ID NO: 214606 - DNA, 20 bp, synthetic construct
  source 1..20: mol_type = other DNA
gagaggcttctgggtcttcc

SEQ ID NO: 214607 - DNA, 20 bp, synthetic construct
  source 1..20: mol_type = other DNA
tgagaggcttctgggtcttc

SEQ ID NO: 214608 - DNA, 20 bp, synthetic construct
  source 1..20: mol_type = other DNA
ctgagaggcttctgggtctt

SEQ ID NO: 214609 - DNA, 20 bp, synthetic construct
  source 1..20: mol_type = other DNA
tctgagaggcttctgggtct

SEQ ID NO: 214610 - DNA, 20 bp, synthetic construct
  source 1..20: mol_type = other DNA
gtctgagaggcttctgggtc

SEQ ID NO: 214611 - DNA, 20 bp, synthetic construct
  source 1..20: mol_type = other DNA
tgtctgagaggcttctgggt

SEQ ID NO: 214612 - DNA, 20 bp, synthetic construct
  source 1..20: mol_type = other DNA
gtgtctgagaggcttctggg

SEQ ID NO: 214613 - DNA, 20 bp, synthetic construct
  source 1..20: mol_type = other DNA
tgtgtctgagaggcttctgg

SEQ ID NO: 214614 - DNA, 20 bp, synthetic construct
  source 1..20: mol_type = other DNA
ctgtgtctgagaggcttctg

SEQ ID NO: 214615 - DNA, 20 bp, synthetic construct
  source 1..20: mol_type = other DNA
cctgtgtctgagaggcttct

SEQ ID NO: 214616 - DNA, 20 bp, synthetic construct
  source 1..20: mol_type = other DNA
acctgtgtctgagaggcttc

SEQ ID NO: 214617 - DNA, 20 bp, synthetic construct
  source 1..20: mol_type = other DNA
cacctgtgtctgagaggctt

SEQ ID NO: 214618 - DNA, 20 bp, synthetic construct
  source 1..20: mol_type = other DNA
ccacctgtgtctgagaggct

SEQ ID NO: 214619 - DNA, 20 bp, synthetic construct
  source 1..20: mol_type = other DNA
cccacctgtgtctgagaggc

SEQ ID NO: 214620 - DNA, 20 bp, synthetic construct
  source 1..20: mol_type = other DNA
acccacctgtgtctgagagg

SEQ ID NO: 214621 - DNA, 20 bp, synthetic construct
  source 1..20: mol_type = other DNA
cacccacctgtgtctgagag

SEQ ID NO: 214622 - DNA, 20 bp, synthetic construct
  source 1..20: mol_type = other DNA
acacccacctgtgtctgaga

SEQ ID NO: 214623 - DNA, 20 bp, synthetic construct
  source 1..20: mol_type = other DNA
cacacccacctgtgtctgag

SEQ ID NO: 214624 - DNA, 20 bp, synthetic construct
  source 1..20: mol_type = other DNA
ccacacccacctgtgtctga

SEQ ID NO: 214625 - DNA, 20 bp, synthetic construct
  source 1..20: mol_type = other DNA
tccacacccacctgtgtctg

SEQ ID NO: 214626 - DNA, 20 bp, synthetic construct
  source 1..20: mol_type = other DNA
ctccacacccacctgtgtct

SEQ ID NO: 214627 - DNA, 20 bp, synthetic construct
  source 1..20: mol_type = other DNA
cctccacacccacctgtgtc

SEQ ID NO: 214628 - DNA, 20 bp, synthetic construct
  source 1..20: mol_type = other DNA
ccctccacacccacctgtgt

SEQ ID NO: 214629 - DNA, 20 bp, synthetic construct
  source 1..20: mol_type = other DNA
gccctccacacccacctgtg

SEQ ID NO: 214630 - DNA, 20 bp, synthetic construct
  source 1..20: mol_type = other DNA
cgccctccacacccacctgt

SEQ ID NO: 214631 - DNA, 20 bp, synthetic construct
  source 1..20: mol_type = other DNA
acgccctccacacccacctg

SEQ ID NO: 214632 - DNA, 20 bp, synthetic construct
  source 1..20: mol_type = other DNA
tacgccctccacacccacct

SEQ ID NO: 214633 - DNA, 20 bp, synthetic construct
  source 1..20: mol_type = other DNA
ctacgccctccacacccacc

SEQ ID NO: 214634 - DNA, 20 bp, synthetic construct
  source 1..20: mol_type = other DNA
gctacgccctccacacccac

SEQ ID NO: 214635 - DNA, 20 bp, synthetic construct
  source 1..20: mol_type = other DNA
tgctacgccctccacaccca

SEQ ID NO: 214636 - DNA, 20 bp, synthetic construct
  source 1..20: mol_type = other DNA
gtgctacgccctccacaccc

SEQ ID NO: 214637 - DNA, 20 bp, synthetic construct
  source 1..20: mol_type = other DNA
tgtgctacgccctccacacc

SEQ ID NO: 214638 - DNA, 20 bp, synthetic construct
  source 1..20: mol_type = other DNA
ctgtgctacgccctccacac

SEQ ID NO: 214639 - DNA, 20 bp, synthetic construct
  source 1..20: mol_type = other DNA
tctgtgctacgccctccaca

SEQ ID NO: 214640 - DNA, 20 bp, synthetic construct
  source 1..20: mol_type = other DNA
ctctgtgctacgccctccac

SEQ ID NO: 214641 - DNA, 20 bp, synthetic construct
  source 1..20: mol_type = other DNA
cctctgtgctacgccctcca

SEQ ID NO: 214642 - DNA, 20 bp, synthetic construct
  source 1..20: mol_type = other DNA
gcctctgtgctacgccctcc

SEQ ID NO: 214643 - DNA, 20 bp, synthetic construct
  source 1..20: mol_type = other DNA
tgcctctgtgctacgccctc

SEQ ID NO: 214644 - DNA, 20 bp, synthetic construct
  source 1..20: mol_type = other DNA
ctgcctctgtgctacgccct

SEQ ID NO: 214645 - DNA, 20 bp, synthetic construct
  source 1..20: mol_type = other DNA
tctgcctctgtgctacgccc

SEQ ID NO: 214646 - DNA, 20 bp, synthetic construct
  source 1..20: mol_type = other DNA
gtctgcctctgtgctacgcc

SEQ ID NO: 214647 - DNA, 20 bp, synthetic construct
  source 1..20: mol_type = other DNA
agtctgcctctgtgctacgc

SEQ ID NO: 214648 - DNA, 20 bp, synthetic construct
  source 1..20: mol_type = other DNA
aagtctgcctctgtgctacg

SEQ ID NO: 214649 - DNA, 20 bp, synthetic construct
  source 1..20: mol_type = other DNA
gaagtctgcctctgtgctac

SEQ ID NO: 214650 - DNA, 20 bp, synthetic construct
  source 1..20: mol_type = other DNA
agaagtctgcctctgtgcta

SEQ ID NO: 214651 - DNA, 20 bp, synthetic construct
  source 1..20: mol_type = other DNA
gagaagtctgcctctgtgct

SEQ ID NO: 214652 - DNA, 20 bp, synthetic construct
  source 1..20: mol_type = other DNA
tgagaagtctgcctctgtgc

SEQ ID NO: 214653 - DNA, 20 bp, synthetic construct
  source 1..20: mol_type = other DNA
atgagaagtctgcctctgtg

SEQ ID NO: 214654 - DNA, 20 bp, synthetic construct
  source 1..20: mol_type = other DNA
aatgagaagtctgcctctgt

SEQ ID NO: 214655 - DNA, 20 bp, synthetic construct
  source 1..20: mol_type = other DNA
aaatgagaagtctgcctctg

SEQ ID NO: 214656 - DNA, 20 bp, synthetic construct
  source 1..20: mol_type = other DNA
gaaatgagaagtctgcctct

SEQ ID NO: 214657 - DNA, 20 bp, synthetic construct
  source 1..20: mol_type = other DNA
ggaaatgagaagtctgcctc

SEQ ID NO: 214658 - DNA, 20 bp, synthetic construct
  source 1..20: mol_type = other DNA
aggaaatgagaagtctgcct

SEQ ID NO: 214659 - DNA, 20 bp, synthetic construct
  source 1..20: mol_type = other DNA
caggaaatgagaagtctgcc

SEQ ID NO: 214660 - DNA, 20 bp, synthetic construct
  source 1..20: mol_type = other DNA
ccaggaaatgagaagtctgc

SEQ ID NO: 214661 - DNA, 20 bp, synthetic construct
  source 1..20: mol_type = other DNA
cccaggaaatgagaagtctg

SEQ ID NO: 214662 - DNA, 20 bp, synthetic construct
  source 1..20: mol_type = other DNA
acccaggaaatgagaagtct

SEQ ID NO: 214663 - DNA, 20 bp, synthetic construct
  source 1..20: mol_type = other DNA
gacccaggaaatgagaagtc

SEQ ID NO: 214664 - DNA, 20 bp, synthetic construct
  source 1..20: mol_type = other DNA
agacccaggaaatgagaagt

SEQ ID NO: 214665 - DNA, 20 bp, synthetic construct
  source 1..20: mol_type = other DNA
gagacccaggaaatgagaag

SEQ ID NO: 214666 - DNA, 20 bp, synthetic construct
  source 1..20: mol_type = other DNA
ggagacccaggaaatgagaa

SEQ ID NO: 214667 - DNA, 20 bp, synthetic construct
  source 1..20: mol_type = other DNA
gggagacccaggaaatgaga

SEQ ID NO: 214668 - DNA, 20 bp, synthetic construct
  source 1..20: mol_type = other DNA
ggggagacccaggaaatgag

SEQ ID NO: 214669 - DNA, 20 bp, synthetic construct
  source 1..20: mol_type = other DNA
aggggagacccaggaaatga

SEQ ID NO: 214670 - DNA, 20 bp, synthetic construct
  source 1..20: mol_type = other DNA
aaggggagacccaggaaatg

SEQ ID NO: 214671 - DNA, 20 bp, synthetic construct
  source 1..20: mol_type = other DNA
aaaggggagacccaggaaat

SEQ ID NO: 214672 - DNA, 20 bp, synthetic construct
  source 1..20: mol_type = other DNA
taaaggggagacccaggaaa

SEQ ID NO: 214673 - DNA, 20 bp, synthetic construct
  source 1..20: mol_type = other DNA
ttaaaggggagacccaggaa

SEQ ID NO: 214674 - DNA, 20 bp, synthetic construct
  source 1..20: mol_type = other DNA
attaaaggggagacccagga

SEQ ID NO: 214675 - DNA, 20 bp, synthetic construct
  source 1..20: mol_type = other DNA
cattaaaggggagacccagg

SEQ ID NO: 214676 - DNA, 20 bp, synthetic construct
  source 1..20: mol_type = other DNA
tcattaaaggggagacccag

SEQ ID NO: 214677 - DNA, 20 bp, synthetic construct
  source 1..20: mol_type = other DNA
gtcattaaaggggagaccca

SEQ ID NO: 214678 - DNA, 20 bp, synthetic construct
  source 1..20: mol_type = other DNA
agtcattaaaggggagaccc

SEQ ID NO: 214679 - DNA, 20 bp, synthetic construct
  source 1..20: mol_type = other DNA
gagtcattaaaggggagacc

SEQ ID NO: 214680 - DNA, 20 bp, synthetic construct
  source 1..20: mol_type = other DNA
agagtcattaaaggggagac

SEQ ID NO: 214681 - DNA, 20 bp, synthetic construct
  source 1..20: mol_type = other DNA
gagagtcattaaaggggaga

SEQ ID NO: 214682 - DNA, 20 bp, synthetic construct
  source 1..20: mol_type = other DNA
tgagagtcattaaaggggag

SEQ ID NO: 214683 - DNA, 20 bp, synthetic construct
  source 1..20: mol_type = other DNA
ctgagagtcattaaagggga

SEQ ID NO: 214684 - DNA, 20 bp, synthetic construct
  source 1..20: mol_type = other DNA
tctgagagtcattaaagggg

SEQ ID NO: 214685 - DNA, 20 bp, synthetic construct
  source 1..20: mol_type = other DNA
ctctgagagtcattaaaggg

SEQ ID NO: 214686 - DNA, 20 bp, synthetic construct
  source 1..20: mol_type = other DNA
tctctgagagtcattaaagg

SEQ ID NO: 214687 - DNA, 20 bp, synthetic construct
  source 1..20: mol_type = other DNA
gtctctgagagtcattaaag

SEQ ID NO: 214688 - DNA, 20 bp, synthetic construct
  source 1..20: mol_type = other DNA
ggtctctgagagtcattaaa

SEQ ID NO: 214689 - DNA, 20 bp, synthetic construct
  source 1..20: mol_type = other DNA
gggtctctgagagtcattaa

SEQ ID NO: 214690 - DNA, 20 bp, synthetic construct
  source 1..20: mol_type = other DNA
ggggtctctgagagtcatta

SEQ ID NO: 214691 - DNA, 20 bp, synthetic construct
  source 1..20: mol_type = other DNA
aggggtctctgagagtcatt

SEQ ID NO: 214692 - DNA, 20 bp, synthetic construct
  source 1..20: mol_type = other DNA
gaggggtctctgagagtcat

SEQ ID NO: 214693 - DNA, 20 bp, synthetic construct
  source 1..20: mol_type = other DNA
ggaggggtctctgagagtca

SEQ ID NO: 214694 - DNA, 20 bp, synthetic construct
  source 1..20: mol_type = other DNA
aggaggggtctctgagagtc

SEQ ID NO: 214695 - DNA, 20 bp, synthetic construct
  source 1..20: mol_type = other DNA
aaggaggggtctctgagagt

SEQ ID NO: 214696 - DNA, 20 bp, synthetic construct
  source 1..20: mol_type = other DNA
gaaggaggggtctctgagag

SEQ ID NO: 214697 - DNA, 20 bp, synthetic construct
  source 1..20: mol_type = other DNA
ggaaggaggggtctctgaga

SEQ ID NO: 214698 - DNA, 20 bp, synthetic construct
  source 1..20: mol_type = other DNA
gggaaggaggggtctctgag

SEQ ID NO: 214699 - DNA, 20 bp, synthetic construct
  source 1..20: mol_type = other DNA
ggggaaggaggggtctctga

SEQ ID NO: 214700 - DNA, 20 bp, synthetic construct
  source 1..20: mol_type = other DNA
gggggaaggaggggtctctg

SEQ ID NO: 214701 - DNA, 20 bp, synthetic construct
  source 1..20: mol_type = other DNA
agggggaaggaggggtctct

SEQ ID NO: 214702 - DNA, 20 bp, synthetic construct
  source 1..20: mol_type = other DNA
cagggggaaggaggggtctc

SEQ ID NO: 214703 - DNA, 20 bp, synthetic construct
  source 1..20: mol_type = other DNA
gcagggggaaggaggggtct

SEQ ID NO: 214704 - DNA, 20 bp, synthetic construct
  source 1..20: mol_type = other DNA
ggcagggggaaggaggggtc

SEQ ID NO: 214705 - DNA, 20 bp, synthetic construct
  source 1..20: mol_type = other DNA
gggcagggggaaggaggggt

SEQ ID NO: 214706 - DNA, 20 bp, synthetic construct
  source 1..20: mol_type = other DNA
ggggcagggggaaggagggg

SEQ ID NO: 214707 - DNA, 20 bp, synthetic construct
  source 1..20: mol_type = other DNA
aggggcagggggaaggaggg

SEQ ID NO: 214708 - DNA, 20 bp, synthetic construct
  source 1..20: mol_type = other DNA
caggggcagggggaaggagg

SEQ ID NO: 214709 - DNA, 20 bp, synthetic construct
  source 1..20: mol_type = other DNA
ccaggggcagggggaaggag

SEQ ID NO: 214710 - DNA, 20 bp, synthetic construct
  source 1..20: mol_type = other DNA
gccaggggcagggggaagga

SEQ ID NO: 214711 - DNA, 20 bp, synthetic construct
  source 1..20: mol_type = other DNA
agccaggggcagggggaagg

SEQ ID NO: 214712 - DNA, 20 bp, synthetic construct
  source 1..20: mol_type = other DNA
aagccaggggcagggggaag

SEQ ID NO: 214713 - DNA, 20 bp, synthetic construct
  source 1..20: mol_type = other DNA
gaagccaggggcagggggaa

SEQ ID NO: 214714 - DNA, 20 bp, synthetic construct
  source 1..20: mol_type = other DNA
agaagccaggggcaggggga

SEQ ID NO: 214715 - DNA, 20 bp, synthetic construct
  source 1..20: mol_type = other DNA
tagaagccaggggcaggggg

SEQ ID NO: 214716 - DNA, 20 bp, synthetic construct
  source 1..20: mol_type = other DNA
gtagaagccaggggcagggg

SEQ ID NO: 214717 - DNA, 20 bp, synthetic construct
  source 1..20: mol_type = other DNA
ggtagaagccaggggcaggg

SEQ ID NO: 214718 - DNA, 20 bp, synthetic construct
  source 1..20: mol_type = other DNA
gggtagaagccaggggcagg

SEQ ID NO: 214719 - DNA, 20 bp, synthetic construct
  source 1..20: mol_type = other DNA
ggggtagaagccaggggcag

SEQ ID NO: 214720 - DNA, 20 bp, synthetic construct
  source 1..20: mol_type = other DNA
tggggtagaagccaggggca

SEQ ID NO: 214721 - DNA, 20 bp, synthetic construct
  source 1..20: mol_type = other DNA
ctggggtagaagccaggggc

SEQ ID NO: 214722 - DNA, 20 bp, synthetic construct
  source 1..20: mol_type = other DNA
cctggggtagaagccagggg

SEQ ID NO: 214723 - DNA, 20 bp, synthetic construct
  source 1..20: mol_type = other DNA
ccctggggtagaagccaggg

SEQ ID NO: 214724 - DNA, 20 bp, synthetic construct
  source 1..20: mol_type = other DNA
cccctggggtagaagccagg

SEQ ID NO: 214725 - DNA, 20 bp, synthetic construct
  source 1..20: mol_type = other DNA
acccctggggtagaagccag

SEQ ID NO: 214726 - DNA, 20 bp, synthetic construct
  source 1..20: mol_type = other DNA
cacccctggggtagaagcca

SEQ ID NO: 214727 - DNA, 20 bp, synthetic construct
  source 1..20: mol_type = other DNA
acacccctggggtagaagcc

SEQ ID NO: 214728 - DNA, 20 bp, synthetic construct
  source 1..20: mol_type = other DNA
tacacccctggggtagaagc

SEQ ID NO: 214729 - DNA, 20 bp, synthetic construct
  source 1..20: mol_type = other DNA
ctacacccctggggtagaag

SEQ ID NO: 214730 - DNA, 20 bp, synthetic construct
  source 1..20: mol_type = other DNA
tctacacccctggggtagaa

SEQ ID NO: 214731 - DNA, 20 bp, synthetic construct
  source 1..20: mol_type = other DNA
ctctacacccctggggtaga

SEQ ID NO: 214732 - DNA, 20 bp, synthetic construct
  source 1..20: mol_type = other DNA
actctacacccctggggtag

SEQ ID NO: 214733 - DNA, 20 bp, synthetic construct
  source 1..20: mol_type = other DNA
aactctacacccctggggta

SEQ ID NO: 214734 - DNA, 20 bp, synthetic construct
  source 1..20: mol_type = other DNA
aaactctacacccctggggt

SEQ ID NO: 214735 - DNA, 20 bp, synthetic construct
  source 1..20: mol_type = other DNA
aaaactctacacccctgggg

SEQ ID NO: 214736 - DNA, 20 bp, synthetic construct
  source 1..20: mol_type = other DNA
caaaactctacacccctggg

SEQ ID NO: 214737 - DNA, 20 bp, synthetic construct
  source 1..20: mol_type = other DNA
gcaaaactctacacccctgg

SEQ ID NO: 214738 - DNA, 20 bp, synthetic construct
  source 1..20: mol_type = other DNA
ggcaaaactctacacccctg

SEQ ID NO: 214739 - DNA, 20 bp, synthetic construct
  source 1..20: mol_type = other DNA
tggcaaaactctacacccct

SEQ ID NO: 214740 - DNA, 20 bp, synthetic construct
  source 1..20: mol_type = other DNA
atggcaaaactctacacccc

SEQ ID NO: 214741 - DNA, 20 bp, synthetic construct
  source 1..20: mol_type = other DNA
aatggcaaaactctacaccc

SEQ ID NO: 214742 - DNA, 20 bp, synthetic construct
  source 1..20: mol_type = other DNA
aaatggcaaaactctacacc

SEQ ID NO: 214743 - DNA, 20 bp, synthetic construct
  source 1..20: mol_type = other DNA
aaaatggcaaaactctacac

SEQ ID NO: 214744 - DNA, 20 bp, synthetic construct
  source 1..20: mol_type = other DNA
gaaaatggcaaaactctaca

SEQ ID NO: 214745 - DNA, 20 bp, synthetic construct
  source 1..20: mol_type = other DNA
ggaaaatggcaaaactctac

SEQ ID NO: 214746 - DNA, 20 bp, synthetic construct
  source 1..20: mol_type = other DNA
tggaaaatggcaaaactcta

SEQ ID NO: 214747 - DNA, 20 bp, synthetic construct
  source 1..20: mol_type = other DNA
ttggaaaatggcaaaactct

SEQ ID NO: 214748 - DNA, 20 bp, synthetic construct
  source 1..20: mol_type = other DNA
cttggaaaatggcaaaactc

SEQ ID NO: 214749 - DNA, 20 bp, synthetic construct
  source 1..20: mol_type = other DNA
gcttggaaaatggcaaaact

SEQ ID NO: 214750 - DNA, 20 bp, synthetic construct
  source 1..20: mol_type = other DNA
tgcttggaaaatggcaaaac

SEQ ID NO: 214751 - DNA, 20 bp, synthetic construct
  source 1..20: mol_type = other DNA
ctgcttggaaaatggcaaaa

SEQ ID NO: 214752 - DNA, 20 bp, synthetic construct
  source 1..20: mol_type = other DNA
tctgcttggaaaatggcaaa

SEQ ID NO: 214753 - DNA, 20 bp, synthetic construct
  source 1..20: mol_type = other DNA
ttctgcttggaaaatggcaa

SEQ ID NO: 214754 - DNA, 20 bp, synthetic construct
  source 1..20: mol_type = other DNA
gttctgcttggaaaatggca

SEQ ID NO: 214755 - DNA, 20 bp, synthetic construct
  source 1..20: mol_type = other DNA
agttctgcttggaaaatggc

SEQ ID NO: 214756 - DNA, 20 bp, synthetic construct
  source 1..20: mol_type = other DNA
aagttctgcttggaaaatgg

SEQ ID NO: 214757 - DNA, 20 bp, synthetic construct
  source 1..20: mol_type = other DNA
gaagttctgcttggaaaatg

SEQ ID NO: 214758 - DNA, 20 bp, synthetic construct
  source 1..20: mol_type = other DNA
tgaagttctgcttggaaaat

SEQ ID NO: 214759 - DNA, 20 bp, synthetic construct
  source 1..20: mol_type = other DNA
atgaagttctgcttggaaaa

SEQ ID NO: 214760 - DNA, 20 bp, synthetic construct
  source 1..20: mol_type = other DNA
aatgaagttctgcttggaaa

SEQ ID NO: 214761 - DNA, 20 bp, synthetic construct
  source 1..20: mol_type = other DNA
aaatgaagttctgcttggaa

SEQ ID NO: 214762 - DNA, 20 bp, synthetic construct
  source 1..20: mol_type = other DNA
gaaatgaagttctgcttgga

SEQ ID NO: 214763 - DNA, 20 bp, synthetic construct
  source 1..20: mol_type = other DNA
ggaaatgaagttctgcttgg

SEQ ID NO: 214764 - DNA, 20 bp, synthetic construct
  source 1..20: mol_type = other DNA
aggaaatgaagttctgcttg

SEQ ID NO: 214765 - DNA, 20 bp, synthetic construct
  source 1..20: mol_type = other DNA
gaggaaatgaagttctgctt

SEQ ID NO: 214766 - DNA, 20 bp, synthetic construct
  source 1..20: mol_type = other DNA
agaggaaatgaagttctgct

SEQ ID NO: 214767 - DNA, 20 bp, synthetic construct
  source 1..20: mol_type = other DNA
aagaggaaatgaagttctgc

SEQ ID NO: 214768 - DNA, 20 bp, synthetic construct
  source 1..20: mol_type = other DNA
gaagaggaaatgaagttctg

SEQ ID NO: 214769 - DNA, 20 bp, synthetic construct
  source 1..20: mol_type = other DNA
agaagaggaaatgaagttct

SEQ ID NO: 214770 - DNA, 20 bp, synthetic construct
  source 1..20: mol_type = other DNA
cagaagaggaaatgaagttc

SEQ ID NO: 214771 - DNA, 20 bp, synthetic construct
  source 1..20: mol_type = other DNA
acagaagaggaaatgaagtt

SEQ ID NO: 214772 - DNA, 20 bp, synthetic construct
  source 1..20: mol_type = other DNA
cacagaagaggaaatgaagt

SEQ ID NO: 214773 - DNA, 20 bp, synthetic construct
  source 1..20: mol_type = other DNA
acacagaagaggaaatgaag

SEQ ID NO: 214774 - DNA, 20 bp, synthetic construct
  source 1..20: mol_type = other DNA
gacacagaagaggaaatgaa

SEQ ID NO: 214775 - DNA, 20 bp, synthetic construct
  source 1..20: mol_type = other DNA
agacacagaagaggaaatga

SEQ ID NO: 214776 - DNA, 20 bp, synthetic construct
  source 1..20: mol_type = other DNA
tagacacagaagaggaaatg

SEQ ID NO: 214777 - DNA, 20 bp, synthetic construct
  source 1..20: mol_type = other DNA
gtagacacagaagaggaaat

SEQ ID NO: 214778 - DNA, 20 bp, synthetic construct
  source 1..20: mol_type = other DNA
tgtagacacagaagaggaaa

SEQ ID NO: 214779 - DNA, 20 bp, synthetic construct
  source 1..20: mol_type = other DNA
gtgtagacacagaagaggaa

SEQ ID NO: 214780 - DNA, 20 bp, synthetic construct
  source 1..20: mol_type = other DNA
agtgtagacacagaagagga

SEQ ID NO: 214781 - DNA, 20 bp, synthetic construct
  source 1..20: mol_type = other DNA
gagtgtagacacagaagagg

SEQ ID NO: 214782 - DNA, 20 bp, synthetic construct
  source 1..20: mol_type = other DNA
agagtgtagacacagaagag

SEQ ID NO: 214783 - DNA, 20 bp, synthetic construct
  source 1..20: mol_type = other DNA
aagagtgtagacacagaaga

SEQ ID NO: 214784 - DNA, 20 bp, synthetic construct
  source 1..20: mol_type = other DNA
aaagagtgtagacacagaag

SEQ ID NO: 214785 - DNA, 20 bp, synthetic construct
  source 1..20: mol_type = other DNA
caaagagtgtagacacagaa

SEQ ID NO: 214786 - DNA, 20 bp, synthetic construct
  source 1..20: mol_type = other DNA
acaaagagtgtagacacaga

SEQ ID NO: 214787 - DNA, 20 bp, synthetic construct
  source 1..20: mol_type = other DNA
cacaaagagtgtagacacag

SEQ ID NO: 214788 - DNA, 20 bp, synthetic construct
  source 1..20: mol_type = other DNA
gcacaaagagtgtagacaca

SEQ ID NO: 214789 - DNA, 20 bp, synthetic construct
  source 1..20: mol_type = other DNA
agcacaaagagtgtagacac

SEQ ID NO: 214790 - DNA, 20 bp, synthetic construct
  source 1..20: mol_type = other DNA
aagcacaaagagtgtagaca

SEQ ID NO: 214791 - DNA, 20 bp, synthetic construct
  source 1..20: mol_type = other DNA
gaagcacaaagagtgtagac

SEQ ID NO: 214792 - DNA, 20 bp, synthetic construct
  source 1..20: mol_type = other DNA
agaagcacaaagagtgtaga

SEQ ID NO: 214793 - DNA, 20 bp, synthetic construct
  source 1..20: mol_type = other DNA
aagaagcacaaagagtgtag

SEQ ID NO: 214794 - DNA, 20 bp, synthetic construct
  source 1..20: mol_type = other DNA
aaagaagcacaaagagtgta

SEQ ID NO: 214795 - DNA, 20 bp, synthetic construct
  source 1..20: mol_type = other DNA
gaaagaagcacaaagagtgt

SEQ ID NO: 214796 - DNA, 20 bp, synthetic construct
  source 1..20: mol_type = other DNA
agaaagaagcacaaagagtg

SEQ ID NO: 214797 - DNA, 20 bp, synthetic construct
  source 1..20: mol_type = other DNA
aagaaagaagcacaaagagt

SEQ ID NO: 214798 - DNA, 20 bp, synthetic construct
  source 1..20: mol_type = other DNA
caagaaagaagcacaaagag

SEQ ID NO: 214799 - DNA, 20 bp, synthetic construct
  source 1..20: mol_type = other DNA
gcaagaaagaagcacaaaga

SEQ ID NO: 214800 - DNA, 20 bp, synthetic construct
  source 1..20: mol_type = other DNA
ggcaagaaagaagcacaaag

SEQ ID NO: 214801 - DNA, 20 bp, synthetic construct
  source 1..20: mol_type = other DNA
tggcaagaaagaagcacaaa

SEQ ID NO: 214802 - DNA, 20 bp, synthetic construct
  source 1..20: mol_type = other DNA
ctggcaagaaagaagcacaa

SEQ ID NO: 214803 - DNA, 20 bp, synthetic construct
  source 1..20: mol_type = other DNA
gctggcaagaaagaagcaca

SEQ ID NO: 214804 - DNA, 20 bp, synthetic construct
  source 1..20: mol_type = other DNA
agctggcaagaaagaagcac

SEQ ID NO: 214805 - DNA, 20 bp, synthetic construct
  source 1..20: mol_type = other DNA
aagctggcaagaaagaagca

SEQ ID NO: 214806 - DNA, 20 bp, synthetic construct
  source 1..20: mol_type = other DNA
aaagctggcaagaaagaagc

SEQ ID NO: 214807 - DNA, 20 bp, synthetic construct
  source 1..20: mol_type = other DNA
aaaagctggcaagaaagaag

SEQ ID NO: 214808 - DNA, 20 bp, synthetic construct
  source 1..20: mol_type = other DNA
aaaaagctggcaagaaagaa

SEQ ID NO: 214809 - DNA, 20 bp, synthetic construct
  source 1..20: mol_type = other DNA
gaaaaagctggcaagaaaga

SEQ ID NO: 214810 - DNA, 20 bp, synthetic construct
  source 1..20: mol_type = other DNA
agaaaaagctggcaagaaag

SEQ ID NO: 214811 - DNA, 20 bp, synthetic construct
  source 1..20: mol_type = other DNA
gagaaaaagctggcaagaaa

SEQ ID NO: 214812 - DNA, 20 bp, synthetic construct
  source 1..20: mol_type = other DNA
ggagaaaaagctggcaagaa

SEQ ID NO: 214813 - DNA, 20 bp, synthetic construct
  source 1..20: mol_type = other DNA
aggagaaaaagctggcaaga

SEQ ID NO: 214814 - DNA, 20 bp, synthetic construct
  source 1..20: mol_type = other DNA
aaggagaaaaagctggcaag

SEQ ID NO: 214815 - DNA, 20 bp, synthetic construct
  source 1..20: mol_type = other DNA
aaaggagaaaaagctggcaa

SEQ ID NO: 214816 - DNA, 20 bp, synthetic construct
  source 1..20: mol_type = other DNA
caaaggagaaaaagctggca

SEQ ID NO: 214817 - DNA, 20 bp, synthetic construct
  source 1..20: mol_type = other DNA
gcaaaggagaaaaagctggc

SEQ ID NO: 214818 - DNA, 20 bp, synthetic construct
  source 1..20: mol_type = other DNA
ggcaaaggagaaaaagctgg

SEQ ID NO: 214819 - DNA, 20 bp, synthetic construct
  source 1..20: mol_type = other DNA
gggcaaaggagaaaaagctg

SEQ ID NO: 214820 - DNA, 20 bp, synthetic construct
  source 1..20: mol_type = other DNA
cgggcaaaggagaaaaagct

SEQ ID NO: 214821 - DNA, 20 bp, synthetic construct
  source 1..20: mol_type = other DNA
gcgggcaaaggagaaaaagc

SEQ ID NO: 214822 - DNA, 20 bp, synthetic construct
  source 1..20: mol_type = other DNA
ggcgggcaaaggagaaaaag

SEQ ID NO: 214823 - DNA, 20 bp, synthetic construct
  source 1..20: mol_type = other DNA
gggcgggcaaaggagaaaaa

SEQ ID NO: 214824 - DNA, 20 bp, synthetic construct
  source 1..20: mol_type = other DNA
agggcgggcaaaggagaaaa

SEQ ID NO: 214825 - DNA, 20 bp, synthetic construct
  source 1..20: mol_type = other DNA
aagggcgggcaaaggagaaa

SEQ ID NO: 214826 - DNA, 20 bp, synthetic construct
  source 1..20: mol_type = other DNA
gaagggcgggcaaaggagaa

SEQ ID NO: 214827 - DNA, 20 bp, synthetic construct
  source 1..20: mol_type = other DNA
ggaagggcgggcaaaggaga

SEQ ID NO: 214828 - DNA, 20 bp, synthetic construct
  source 1..20: mol_type = other DNA
aggaagggcgggcaaaggag

SEQ ID NO: 214829 - DNA, 20 bp, synthetic construct
  source 1..20: mol_type = other DNA
aaggaagggcgggcaaagga

SEQ ID NO: 214830 - DNA, 20 bp, synthetic construct
  source 1..20: mol_type = other DNA
gaaggaagggcgggcaaagg

SEQ ID NO: 214831 - DNA, 20 bp, synthetic construct
  source 1..20: mol_type = other DNA
ggaaggaagggcgggcaaag

SEQ ID NO: 214832 - DNA, 20 bp, synthetic construct
  source 1..20: mol_type = other DNA
aggaaggaagggcgggcaaa

SEQ ID NO: 214833 - DNA, 20 bp, synthetic construct
  source 1..20: mol_type = other DNA
aaggaaggaagggcgggcaa

SEQ ID NO: 214834 - DNA, 20 bp, synthetic construct
  source 1..20: mol_type = other DNA
gaaggaaggaagggcgggca

SEQ ID NO: 214835 - DNA, 20 bp, synthetic construct
  source 1..20: mol_type = other DNA
ggaaggaaggaagggcgggc

SEQ ID NO: 214836 - DNA, 20 bp, synthetic construct
  source 1..20: mol_type = other DNA
aggaaggaaggaagggcggg

SEQ ID NO: 214837 - DNA, 20 bp, synthetic construct
  source 1..20: mol_type = other DNA
aaggaaggaaggaagggcgg

SEQ ID NO: 214838 - DNA, 20 bp, synthetic construct
  source 1..20: mol_type = other DNA
gaaggaaggaaggaagggcg

SEQ ID NO: 214839 - DNA, 20 bp, synthetic construct
  source 1..20: mol_type = other DNA
ggaaggaaggaaggaagggc

SEQ ID NO: 214840 - DNA, 20 bp, synthetic construct
  source 1..20: mol_type = other DNA
gggaaggaaggaaggaaggg

SEQ ID NO: 214841 - DNA, 20 bp, synthetic construct
  source 1..20: mol_type = other DNA
agggaaggaaggaaggaagg

SEQ ID NO: 214842 - DNA, 20 bp, synthetic construct
  source 1..20: mol_type = other DNA
gagggaaggaaggaaggaag

SEQ ID NO: 214843 - DNA, 20 bp, synthetic construct
  source 1..20: mol_type = other DNA
ggagggaaggaaggaaggaa

SEQ ID NO: 214844 - DNA, 20 bp, synthetic construct
  source 1..20: mol_type = other DNA
gggagggaaggaaggaagga

SEQ ID NO: 214845 - DNA, 20 bp, synthetic construct
  source 1..20: mol_type = other DNA
agggagggaaggaaggaagg

SEQ ID NO: 214846 - DNA, 20 bp, synthetic construct
  source 1..20: mol_type = other DNA
gagggagggaaggaaggaag

SEQ ID NO: 214847 - DNA, 20 bp, synthetic construct
  source 1..20: mol_type = other DNA
ggagggagggaaggaaggaa

SEQ ID NO: 214848 - DNA, 20 bp, synthetic construct
  source 1..20: mol_type = other DNA
gggagggagggaaggaagga

SEQ ID NO: 214849 - DNA, 20 bp, synthetic construct
  source 1..20: mol_type = other DNA
ggggagggagggaaggaagg

SEQ ID NO: 214850 - DNA, 20 bp, synthetic construct
  source 1..20: mol_type = other DNA
gggggagggagggaaggaag

SEQ ID NO: 214851 - DNA, 20 bp, synthetic construct
  source 1..20: mol_type = other DNA
ggggggagggagggaaggaa

SEQ ID NO: 214852 - DNA, 20 bp, synthetic construct
  source 1..20: mol_type = other DNA
aggggggagggagggaagga

SEQ ID NO: 214853 - DNA, 20 bp, synthetic construct
  source 1..20: mol_type = other DNA
aaggggggagggagggaagg

SEQ ID NO: 214854 - DNA, 20 bp, synthetic construct
  source 1..20: mol_type = other DNA
gaaggggggagggagggaag

SEQ ID NO: 214855 - DNA, 20 bp, synthetic construct
  source 1..20: mol_type = other DNA
ggaaggggggagggagggaa

SEQ ID NO: 214856 - DNA, 20 bp, synthetic construct
  source 1..20: mol_type = other DNA
gggaaggggggagggaggga

SEQ ID NO: 214857 - DNA, 20 bp, synthetic construct
  source 1..20: mol_type = other DNA
agggaaggggggagggaggg

SEQ ID NO: 214858 - DNA, 20 bp, synthetic construct
  source 1..20: mol_type = other DNA
gagggaaggggggagggagg

SEQ ID NO: 214859 - DNA, 20 bp, synthetic construct
  source 1..20: mol_type = other DNA
ggagggaaggggggagggag

SEQ ID NO: 214860 - DNA, 20 bp, synthetic construct
  source 1..20: mol_type = other DNA
aggagggaaggggggaggga

SEQ ID NO: 214861 - DNA, 20 bp, synthetic construct
  source 1..20: mol_type = other DNA
aaggagggaaggggggaggg

SEQ ID NO: 214862 - DNA, 20 bp, synthetic construct
  source 1..20: mol_type = other DNA
gaaggagggaaggggggagg

SEQ ID NO: 214863 - DNA, 20 bp, synthetic construct
  source 1..20: mol_type = other DNA
ggaaggagggaaggggggag

SEQ ID NO: 214864 - DNA, 20 bp, synthetic construct
  source 1..20: mol_type = other DNA
gggaaggagggaagggggga

SEQ ID NO: 214865 - DNA, 20 bp, synthetic construct
  source 1..20: mol_type = other DNA
agggaaggagggaagggggg

SEQ ID NO: 214866 - DNA, 20 bp, synthetic construct
  source 1..20: mol_type = other DNA
gagggaaggagggaaggggg

SEQ ID NO: 214867 - DNA, 20 bp, synthetic construct
  source 1..20: mol_type = other DNA
agagggaaggagggaagggg

SEQ ID NO: 214868 - DNA, 20 bp, synthetic construct
  source 1..20: mol_type = other DNA
aagagggaaggagggaaggg

SEQ ID NO: 214869 - DNA, 20 bp, synthetic construct
  source 1..20: mol_type = other DNA
aaagagggaaggagggaagg

SEQ ID NO: 214870 - DNA, 20 bp, synthetic construct
  source 1..20: mol_type = other DNA
gaaagagggaaggagggaag

SEQ ID NO: 214871 - DNA, 20 bp, synthetic construct
  source 1..20: mol_type = other DNA
ggaaagagggaaggagggaa

SEQ ID NO: 214872 - DNA, 20 bp, synthetic construct
  source 1..20: mol_type = other DNA
gggaaagagggaaggaggga

SEQ ID NO: 214873 - DNA, 20 bp, synthetic construct
  source 1..20: mol_type = other DNA
agggaaagagggaaggaggg

SEQ ID NO: 214874 - DNA, 20 bp, synthetic construct
  source 1..20: mol_type = other DNA
gagggaaagagggaaggagg

SEQ ID NO: 214875 - DNA, 20 bp, synthetic construct
  source 1..20: mol_type = other DNA
ggagggaaagagggaaggag

SEQ ID NO: 214876 - DNA, 20 bp, synthetic construct
  source 1..20: mol_type = other DNA
aggagggaaagagggaagga

SEQ ID NO: 214877 - DNA, 20 bp, synthetic construct
  source 1..20: mol_type = other DNA
aaggagggaaagagggaagg

SEQ ID NO: 214878 - DNA, 20 bp, synthetic construct
  source 1..20: mol_type = other DNA
gaaggagggaaagagggaag

SEQ ID NO: 214879 - DNA, 20 bp, synthetic construct
  source 1..20: mol_type = other DNA
ggaaggagggaaagagggaa

SEQ ID NO: 214880 - DNA, 20 bp, synthetic construct
  source 1..20: mol_type = other DNA
gggaaggagggaaagaggga

SEQ ID NO: 214881 - DNA, 20 bp, synthetic construct
  source 1..20: mol_type = other DNA
ggggaaggagggaaagaggg

SEQ ID NO: 214882 - DNA, 20 bp, synthetic construct
  source 1..20: mol_type = other DNA
gggggaaggagggaaagagg

SEQ ID NO: 214883 - DNA, 20 bp, synthetic construct
  source 1..20: mol_type = other DNA
ggggggaaggagggaaagag

SEQ ID NO: 214884 - DNA, 20 bp, synthetic construct
  source 1..20: mol_type = other DNA
aggggggaaggagggaaaga

SEQ ID NO: 214885 - DNA, 20 bp, synthetic construct
  source 1..20: mol_type = other DNA
aaggggggaaggagggaaag

SEQ ID NO: 214886 - DNA, 20 bp, synthetic construct
  source 1..20: mol_type = other DNA
gaaggggggaaggagggaaa

SEQ ID NO: 214887 - DNA, 20 bp, synthetic construct
  source 1..20: mol_type = other DNA
ggaaggggggaaggagggaa

SEQ ID NO: 214888 - DNA, 20 bp, synthetic construct
  source 1..20: mol_type = other DNA
tggaaggggggaaggaggga

SEQ ID NO: 214889 - DNA, 20 bp, synthetic construct
  source 1..20: mol_type = other DNA
gtggaaggggggaaggaggg

SEQ ID NO: 214890 - DNA, 20 bp, synthetic construct
  source 1..20: mol_type = other DNA
ggtggaaggggggaaggagg

SEQ ID NO: 214891 - DNA, 20 bp, synthetic construct
  source 1..20: mol_type = other DNA
gggtggaaggggggaaggag

SEQ ID NO: 214892 - DNA, 20 bp, synthetic construct
  source 1..20: mol_type = other DNA
agggtggaaggggggaagga

SEQ ID NO: 214893 - DNA, 20 bp, synthetic construct
  source 1..20: mol_type = other DNA
aagggtggaaggggggaagg

SEQ ID NO: 214894 - DNA, 20 bp, synthetic construct
  source 1..20: mol_type = other DNA
gaagggtggaaggggggaag

SEQ ID NO: 214895 - DNA, 20 bp, synthetic construct
  source 1..20: mol_type = other DNA
ggaagggtggaaggggggaa

SEQ ID NO: 214896 - DNA, 20 bp, synthetic construct
  source 1..20: mol_type = other DNA
gggaagggtggaagggggga

SEQ ID NO: 214897 - DNA, 20 bp, synthetic construct
  source 1..20: mol_type = other DNA
ggggaagggtggaagggggg

SEQ ID NO: 214898 - DNA, 20 bp, synthetic construct
  source 1..20: mol_type = other DNA
gggggaagggtggaaggggg

SEQ ID NO: 214899 - DNA, 20 bp, synthetic construct
  source 1..20: mol_type = other DNA
ggggggaagggtggaagggg

SEQ ID NO: 214900 - DNA, 20 bp, synthetic construct
  source 1..20: mol_type = other DNA
aggggggaagggtggaaggg

SEQ ID NO: 214901 - DNA, 20 bp, synthetic construct
  source 1..20: mol_type = other DNA
aaggggggaagggtggaagg

SEQ ID NO: 214902 - DNA, 20 bp, synthetic construct
  source 1..20: mol_type = other DNA
gaaggggggaagggtggaag

SEQ ID NO: 214903 - DNA, 20 bp, synthetic construct
  source 1..20: mol_type = other DNA
ggaaggggggaagggtggaa

SEQ ID NO: 214904 - DNA, 20 bp, synthetic construct
  source 1..20: mol_type = other DNA
gggaaggggggaagggtgga

SEQ ID NO: 214905 - DNA, 20 bp, synthetic construct
  source 1..20: mol_type = other DNA
ggggaaggggggaagggtgg

SEQ ID NO: 214906 - DNA, 20 bp, synthetic construct
  source 1..20: mol_type = other DNA
gggggaaggggggaagggtg

SEQ ID NO: 214907 - DNA, 20 bp, synthetic construct
  source 1..20: mol_type = other DNA
ggggggaaggggggaagggt

SEQ ID NO: 214908 - DNA, 20 bp, synthetic construct
  source 1..20: mol_type = other DNA
aggggggaaggggggaaggg

SEQ ID NO: 214909 - DNA, 20 bp, synthetic construct
  source 1..20: mol_type = other DNA
aaggggggaaggggggaagg

SEQ ID NO: 214910 - DNA, 20 bp, synthetic construct
  source 1..20: mol_type = other DNA
gaaggggggaaggggggaag

SEQ ID NO: 214911 - DNA, 20 bp, synthetic construct
  source 1..20: mol_type = other DNA
ggaaggggggaaggggggaa

SEQ ID NO: 214912 - DNA, 20 bp, synthetic construct
  source 1..20: mol_type = other DNA
gggaaggggggaagggggga

SEQ ID NO: 214913 - DNA, 20 bp, synthetic construct
  source 1..20: mol_type = other DNA
agggaaggggggaagggggg

SEQ ID NO: 214914 - DNA, 20 bp, synthetic construct
  source 1..20: mol_type = other DNA
gagggaaggggggaaggggg

SEQ ID NO: 214915 - DNA, 20 bp, synthetic construct
  source 1..20: mol_type = other DNA
ggagggaaggggggaagggg

SEQ ID NO: 214916 - DNA, 20 bp, synthetic construct
  source 1..20: mol_type = other DNA
aggagggaaggggggaaggg

SEQ ID NO: 214917 - DNA, 20 bp, synthetic construct
  source 1..20: mol_type = other DNA
aaggagggaaggggggaagg

SEQ ID NO: 214918 - DNA, 20 bp, synthetic construct
  source 1..20: mol_type = other DNA
gaaggagggaaggggggaag

SEQ ID NO: 214919 - DNA, 20 bp, synthetic construct
  source 1..20: mol_type = other DNA
ggaaggagggaaggggggaa

SEQ ID NO: 214920 - DNA, 20 bp, synthetic construct
  source 1..20: mol_type = other DNA
aggaaggagggaagggggga

SEQ ID NO: 214921 - DNA, 20 bp, synthetic construct
  source 1..20: mol_type = other DNA
aaggaaggagggaagggggg

SEQ ID NO: 214922 - DNA, 20 bp, synthetic construct
  source 1..20: mol_type = other DNA
gaaggaaggagggaaggggg

SEQ ID NO: 214923 - DNA, 20 bp, synthetic construct
  source 1..20: mol_type = other DNA
ggaaggaaggagggaagggg

SEQ ID NO: 214924 - DNA, 20 bp, synthetic construct
  source 1..20: mol_type = other DNA
aggaaggaaggagggaaggg

SEQ ID NO: 214925 - DNA, 20 bp, synthetic construct
  source 1..20: mol_type = other DNA
aaggaaggaaggagggaagg

SEQ ID NO: 214926 - DNA, 20 bp, synthetic construct
  source 1..20: mol_type = other DNA
gaaggaaggaaggagggaag

SEQ ID NO: 214927 - DNA, 20 bp, synthetic construct
  source 1..20: mol_type = other DNA
ggaaggaaggaaggagggaa

SEQ ID NO: 214928 - DNA, 20 bp, synthetic construct
  source 1..20: mol_type = other DNA
aggaaggaaggaaggaggga

SEQ ID NO: 214929 - DNA, 20 bp, synthetic construct
  source 1..20: mol_type = other DNA
aaggaaggaaggaaggaggg

SEQ ID NO: 214930 - DNA, 20 bp, synthetic construct
  source 1..20: mol_type = other DNA
gaaggaaggaaggaaggagg

SEQ ID NO: 214931 - DNA, 20 bp, synthetic construct
  source 1..20: mol_type = other DNA
ggaaggaaggaaggaaggag

SEQ ID NO: 214932 - DNA, 20 bp, synthetic construct
  source 1..20: mol_type = other DNA
aggaaggaaggaaggaagga

SEQ ID NO: 214933 - DNA, 20 bp, synthetic construct
  source 1..20: mol_type = other DNA
caggaaggaaggaaggaagg

SEQ ID NO: 214934 - DNA, 20 bp, synthetic construct
  source 1..20: mol_type = other DNA
gcaggaaggaaggaaggaag

SEQ ID NO: 214935 - DNA, 20 bp, synthetic construct
  source 1..20: mol_type = other DNA
ggcaggaaggaaggaaggaa

SEQ ID NO: 214936 - DNA, 20 bp, synthetic construct
  source 1..20: mol_type = other DNA
aggcaggaaggaaggaagga

SEQ ID NO: 214937 - DNA, 20 bp, synthetic construct
  source 1..20: mol_type = other DNA
caggcaggaaggaaggaagg

SEQ ID NO: 214938 - DNA, 20 bp, synthetic construct
  source 1..20: mol_type = other DNA
gcaggcaggaaggaaggaag

SEQ ID NO: 214939 - DNA, 20 bp, synthetic construct
  source 1..20: mol_type = other DNA
ggcaggcaggaaggaaggaa

SEQ ID NO: 214940 - DNA, 20 bp, synthetic construct
  source 1..20: mol_type = other DNA
aggcaggcaggaaggaagga

SEQ ID NO: 214941 - DNA, 20 bp, synthetic construct
  source 1..20: mol_type = other DNA
aaggcaggcaggaaggaagg

SEQ ID NO: 214942 - DNA, 20 bp, synthetic construct
  source 1..20: mol_type = other DNA
gaaggcaggcaggaaggaag

SEQ ID NO: 214943 - DNA, 20 bp, synthetic construct
  source 1..20: mol_type = other DNA
ggaaggcaggcaggaaggaa

SEQ ID NO: 214944 - DNA, 20 bp, synthetic construct
  source 1..20: mol_type = other DNA
aggaaggcaggcaggaagga

SEQ ID NO: 214945 - DNA, 20 bp, synthetic construct
  source 1..20: mol_type = other DNA
aaggaaggcaggcaggaagg

SEQ ID NO: 214946 - DNA, 20 bp, synthetic construct
  source 1..20: mol_type = other DNA
gaaggaaggcaggcaggaag

SEQ ID NO: 214947 - DNA, 20 bp, synthetic construct
  source 1..20: mol_type = other DNA
ggaaggaaggcaggcaggaa

SEQ ID NO: 214948 - DNA, 20 bp, synthetic construct
  source 1..20: mol_type = other DNA
aggaaggaaggcaggcagga

SEQ ID NO: 214949 - DNA, 20 bp, synthetic construct
  source 1..20: mol_type = other DNA
aaggaaggaaggcaggcagg

SEQ ID NO: 214950 - DNA, 20 bp, synthetic construct
  source 1..20: mol_type = other DNA
gaaggaaggaaggcaggcag

SEQ ID NO: 214951 - DNA, 20 bp, synthetic construct
  source 1..20: mol_type = other DNA
ggaaggaaggaaggcaggca

SEQ ID NO: 214952 - DNA, 20 bp, synthetic construct
  source 1..20: mol_type = other DNA
aggaaggaaggaaggcaggc

SEQ ID NO: 214953 - DNA, 20 bp, synthetic construct
  source 1..20: mol_type = other DNA
aaggaaggaaggaaggcagg

SEQ ID NO: 214954 - DNA, 20 bp, synthetic construct
  source 1..20: mol_type = other DNA
gaaggaaggaaggaaggcag

SEQ ID NO: 214955 - DNA, 20 bp, synthetic construct
  source 1..20: mol_type = other DNA
ggaaggaaggaaggaaggca

SEQ ID NO: 214956 - DNA, 20 bp, synthetic construct
  source 1..20: mol_type = other DNA
aggaaggaaggaaggaaggc

SEQ ID NO: 214957 - DNA, 20 bp, synthetic construct
  source 1..20: mol_type = other DNA
aaggaaggaaggaaggaagg

SEQ ID NO: 214958 - DNA, 20 bp, synthetic construct
  source 1..20: mol_type = other DNA
gaaggaaggaaggaaggaag

SEQ ID NO: 214959 - DNA, 20 bp, synthetic construct
  source 1..20: mol_type = other DNA
ggaaggaaggaaggaaggaa

SEQ ID NO: 214960 - DNA, 20 bp, synthetic construct
  source 1..20: mol_type = other DNA
aggaaggaaggaaggaagga

SEQ ID NO: 214961 - DNA, 20 bp, synthetic construct
  source 1..20: mol_type = other DNA
aaggaaggaaggaaggaagg

SEQ ID NO: 214962 - DNA, 20 bp, synthetic construct
  source 1..20: mol_type = other DNA
gaaggaaggaaggaaggaag

SEQ ID NO: 214963 - DNA, 20 bp, synthetic construct
  source 1..20: mol_type = other DNA
ggaaggaaggaaggaaggaa

SEQ ID NO: 214964 - DNA, 20 bp, synthetic construct
  source 1..20: mol_type = other DNA
aggaaggaaggaaggaagga

SEQ ID NO: 214965 - DNA, 20 bp, synthetic construct
  source 1..20: mol_type = other DNA
aaggaaggaaggaaggaagg

SEQ ID NO: 214966 - DNA, 20 bp, synthetic construct
  source 1..20: mol_type = other DNA
gaaggaaggaaggaaggaag

SEQ ID NO: 214967 - DNA, 20 bp, synthetic construct
  source 1..20: mol_type = other DNA
ggaaggaaggaaggaaggaa

SEQ ID NO: 214968 - DNA, 20 bp, synthetic construct
  source 1..20: mol_type = other DNA
aggaaggaaggaaggaagga

SEQ ID NO: 214969 - DNA, 20 bp, synthetic construct
  source 1..20: mol_type = other DNA
aaggaaggaaggaaggaagg

SEQ ID NO: 214970 - DNA, 20 bp, synthetic construct
  source 1..20: mol_type = other DNA
gaaggaaggaaggaaggaag

SEQ ID NO: 214971 - DNA, 20 bp, synthetic construct
  source 1..20: mol_type = other DNA
ggaaggaaggaaggaaggaa

SEQ ID NO: 214972 - DNA, 20 bp, synthetic construct
  source 1..20: mol_type = other DNA
aggaaggaaggaaggaagga

SEQ ID NO: 214973 - DNA, 20 bp, synthetic construct
  source 1..20: mol_type = other DNA
aaggaaggaaggaaggaagg

SEQ ID NO: 214974 - DNA, 20 bp, synthetic construct
  source 1..20: mol_type = other DNA
gaaggaaggaaggaaggaag

SEQ ID NO: 214975 - DNA, 20 bp, synthetic construct
  source 1..20: mol_type = other DNA
ggaaggaaggaaggaaggaa

SEQ ID NO: 214976 - DNA, 20 bp, synthetic construct
  source 1..20: mol_type = other DNA
aggaaggaaggaaggaagga

SEQ ID NO: 214977 - DNA, 20 bp, synthetic construct
  source 1..20: mol_type = other DNA
aaggaaggaaggaaggaagg

SEQ ID NO: 214978 - DNA, 20 bp, synthetic construct
  source 1..20: mol_type = other DNA
gaaggaaggaaggaaggaag

SEQ ID NO: 214979 - DNA, 20 bp, synthetic construct
  source 1..20: mol_type = other DNA
ggaaggaaggaaggaaggaa

SEQ ID NO: 214980 - DNA, 20 bp, synthetic construct
  source 1..20: mol_type = other DNA
aggaaggaaggaaggaagga

SEQ ID NO: 214981 - DNA, 20 bp, synthetic construct
  source 1..20: mol_type = other DNA
aaggaaggaaggaaggaagg

SEQ ID NO: 214982 - DNA, 20 bp, synthetic construct
  source 1..20: mol_type = other DNA
gaaggaaggaaggaaggaag

SEQ ID NO: 214983 - DNA, 20 bp, synthetic construct
  source 1..20: mol_type = other DNA
ggaaggaaggaaggaaggaa

SEQ ID NO: 214984 - DNA, 20 bp, synthetic construct
  source 1..20: mol_type = other DNA
aggaaggaaggaaggaagga

SEQ ID NO: 214985 - DNA, 20 bp, synthetic construct
  source 1..20: mol_type = other DNA
aaggaaggaaggaaggaagg

SEQ ID NO: 214986 - DNA, 20 bp, synthetic construct
  source 1..20: mol_type = other DNA
gaaggaaggaaggaaggaag

SEQ ID NO: 214987 - DNA, 20 bp, synthetic construct
  source 1..20: mol_type = other DNA
ggaaggaaggaaggaaggaa

SEQ ID NO: 214988 - DNA, 20 bp, synthetic construct
  source 1..20: mol_type = other DNA
aggaaggaaggaaggaagga

SEQ ID NO: 214989 - DNA, 20 bp, synthetic construct
  source 1..20: mol_type = other DNA
caggaaggaaggaaggaagg

SEQ ID NO: 214990 - DNA, 20 bp, synthetic construct
  source 1..20: mol_type = other DNA
ccaggaaggaaggaaggaag

SEQ ID NO: 214991 - DNA, 20 bp, synthetic construct
  source 1..20: mol_type = other DNA
accaggaaggaaggaaggaa

SEQ ID NO: 214992 - DNA, 20 bp, synthetic construct
  source 1..20: mol_type = other DNA
taccaggaaggaaggaagga

SEQ ID NO: 214993 - DNA, 20 bp, synthetic construct
  source 1..20: mol_type = other DNA
ataccaggaaggaaggaagg

SEQ ID NO: 214994 - DNA, 20 bp, synthetic construct
  source 1..20: mol_type = other DNA
cataccaggaaggaaggaag

SEQ ID NO: 214995 - DNA, 20 bp, synthetic construct
  source 1..20: mol_type = other DNA
acataccaggaaggaaggaa

SEQ ID NO: 214996 - DNA, 20 bp, synthetic construct
  source 1..20: mol_type = other DNA
cacataccaggaaggaagga

SEQ ID NO: 214997 - DNA, 20 bp, synthetic construct
  source 1..20: mol_type = other DNA
tcacataccaggaaggaagg

SEQ ID NO: 214998 - DNA, 20 bp, synthetic construct
  source 1..20: mol_type = other DNA
gtcacataccaggaaggaag

SEQ ID NO: 214999 - DNA, 20 bp, synthetic construct
  source 1..20: mol_type = other DNA
agtcacataccaggaaggaa

SEQ ID NO: 215000 - DNA, 20 bp, synthetic construct
  source 1..20: mol_type = other DNA
tagtcacataccaggaagga

SEQ ID NO: 215001 - DNA, 20 bp, synthetic construct
  source 1..20: mol_type = other DNA
ttagtcacataccaggaagg

SEQ ID NO: 215002 - DNA, 20 bp, synthetic construct
  source 1..20: mol_type = other DNA
attagtcacataccaggaag

SEQ ID NO: 215003 - DNA, 20 bp, synthetic construct
  source 1..20: mol_type = other DNA
aattagtcacataccaggaa

SEQ ID NO: 215004 - DNA, 20 bp, synthetic construct
  source 1..20: mol_type = other DNA
aaattagtcacataccagga

SEQ ID NO: 215005 - DNA, 20 bp, synthetic construct
  source 1..20: mol_type = other DNA
gaaattagtcacataccagg

SEQ ID NO: 215006 - DNA, 20 bp, synthetic construct
  source 1..20: mol_type = other DNA
agaaattagtcacataccag

SEQ ID NO: 215007 - DNA, 20 bp, synthetic construct
  source 1..20: mol_type = other DNA
cagaaattagtcacatacca

SEQ ID NO: 215008 - DNA, 20 bp, synthetic construct
  source 1..20: mol_type = other DNA
acagaaattagtcacatacc

SEQ ID NO: 215009 - DNA, 20 bp, synthetic construct
  source 1..20: mol_type = other DNA
aacagaaattagtcacatac

SEQ ID NO: 215010 - DNA, 20 bp, synthetic construct
  source 1..20: mol_type = other DNA
aaacagaaattagtcacata

SEQ ID NO: 215011 - DNA, 20 bp, synthetic construct
  source 1..20: mol_type = other DNA
gaaacagaaattagtcacat

SEQ ID NO: 215012 - DNA, 20 bp, synthetic construct
  source 1..20: mol_type = other DNA
tgaaacagaaattagtcaca

SEQ ID NO: 215013 - DNA, 20 bp, synthetic construct
  source 1..20: mol_type = other DNA
ctgaaacagaaattagtcac

SEQ ID NO: 215014 - DNA, 20 bp, synthetic construct
  source 1..20: mol_type = other DNA
cctgaaacagaaattagtca

SEQ ID NO: 215015 - DNA, 20 bp, synthetic construct
  source 1..20: mol_type = other DNA
tcctgaaacagaaattagtc

SEQ ID NO: 215016 - DNA, 20 bp, synthetic construct
  source 1..20: mol_type = other DNA
gtcctgaaacagaaattagt

SEQ ID NO: 215017 - DNA, 20 bp, synthetic construct
  source 1..20: mol_type = other DNA
tgtcctgaaacagaaattag

SEQ ID NO: 215018 - DNA, 20 bp, synthetic construct
  source 1..20: mol_type = other DNA
atgtcctgaaacagaaatta

SEQ ID NO: 215019 - DNA, 20 bp, synthetic construct
  source 1..20: mol_type = other DNA
tatgtcctgaaacagaaatt

SEQ ID NO: 215020 - DNA, 20 bp, synthetic construct
  source 1..20: mol_type = other DNA
ttatgtcctgaaacagaaat

SEQ ID NO: 215021 - DNA, 20 bp, synthetic construct
  source 1..20: mol_type = other DNA
tttatgtcctgaaacagaaa

SEQ ID NO: 215022 - DNA, 20 bp, synthetic construct
  source 1..20: mol_type = other DNA
atttatgtcctgaaacagaa

SEQ ID NO: 215023 - DNA, 20 bp, synthetic construct
  source 1..20: mol_type = other DNA
catttatgtcctgaaacaga

SEQ ID NO: 215024 - DNA, 20 bp, synthetic construct
  source 1..20: mol_type = other DNA
acatttatgtcctgaaacag

SEQ ID NO: 215025 - DNA, 20 bp, synthetic construct
  source 1..20: mol_type = other DNA
aacatttatgtcctgaaaca

SEQ ID NO: 215026 - DNA, 20 bp, synthetic construct
  source 1..20: mol_type = other DNA
caacatttatgtcctgaaac

SEQ ID NO: 215027 - DNA, 20 bp, synthetic construct
  source 1..20: mol_type = other DNA
acaacatttatgtcctgaaa

SEQ ID NO: 215028 - DNA, 20 bp, synthetic construct
  source 1..20: mol_type = other DNA
gacaacatttatgtcctgaa

SEQ ID NO: 215029 - DNA, 20 bp, synthetic construct
  source 1..20: mol_type = other DNA
ggacaacatttatgtcctga

SEQ ID NO: 215030 - DNA, 20 bp, synthetic construct
  source 1..20: mol_type = other DNA
tggacaacatttatgtcctg

SEQ ID NO: 215031 - DNA, 20 bp, synthetic construct
  source 1..20: mol_type = other DNA
ctggacaacatttatgtcct

SEQ ID NO: 215032 - DNA, 20 bp, synthetic construct
  source 1..20: mol_type = other DNA
cctggacaacatttatgtcc

SEQ ID NO: 215033 - DNA, 20 bp, synthetic construct
  source 1..20: mol_type = other DNA
gcctggacaacatttatgtc

SEQ ID NO: 215034 - DNA, 20 bp, synthetic construct
  source 1..20: mol_type = other DNA
agcctggacaacatttatgt

SEQ ID NO: 215035 - DNA, 20 bp, synthetic construct
  source 1..20: mol_type = other DNA
cagcctggacaacatttatg

SEQ ID NO: 215036 - DNA, 20 bp, synthetic construct
  source 1..20: mol_type = other DNA
acagcctggacaacatttat

SEQ ID NO: 215037 - DNA, 20 bp, synthetic construct
  source 1..20: mol_type = other DNA
aacagcctggacaacattta

SEQ ID NO: 215038 - DNA, 20 bp, synthetic construct
  source 1..20: mol_type = other DNA
gaacagcctggacaacattt

SEQ ID NO: 215039 - DNA, 20 bp, synthetic construct
  source 1..20: mol_type = other DNA
agaacagcctggacaacatt

SEQ ID NO: 215040 - DNA, 20 bp, synthetic construct
  source 1..20: mol_type = other DNA
aagaacagcctggacaacat

SEQ ID NO: 215041 - DNA, 20 bp, synthetic construct
  source 1..20: mol_type = other DNA
aaagaacagcctggacaaca

SEQ ID NO: 215042 - DNA, 20 bp, synthetic construct
  source 1..20: mol_type = other DNA
caaagaacagcctggacaac

SEQ ID NO: 215043 - DNA, 20 bp, synthetic construct
  source 1..20: mol_type = other DNA
ccaaagaacagcctggacaa

SEQ ID NO: 215044 - DNA, 20 bp, synthetic construct
  source 1..20: mol_type = other DNA
accaaagaacagcctggaca

SEQ ID NO: 215045 - DNA, 20 bp, synthetic construct
  source 1..20: mol_type = other DNA
gaccaaagaacagcctggac

SEQ ID NO: 215046 - DNA, 20 bp, synthetic construct
  source 1..20: mol_type = other DNA
agaccaaagaacagcctgga

SEQ ID NO: 215047 - DNA, 20 bp, synthetic construct
  source 1..20: mol_type = other DNA
aagaccaaagaacagcctgg

SEQ ID NO: 215048 - DNA, 20 bp, synthetic construct
  source 1..20: mol_type = other DNA
aaagaccaaagaacagcctg

SEQ ID NO: 215049 - DNA, 20 bp, synthetic construct
  source 1..20: mol_type = other DNA
gaaagaccaaagaacagcct

SEQ ID NO: 215050 - DNA, 20 bp, synthetic construct
  source 1..20: mol_type = other DNA
agaaagaccaaagaacagcc

SEQ ID NO: 215051 - DNA, 20 bp, synthetic construct
  source 1..20: mol_type = other DNA
cagaaagaccaaagaacagc

SEQ ID NO: 215052 - DNA, 20 bp, synthetic construct
  source 1..20: mol_type = other DNA
acagaaagaccaaagaacag

SEQ ID NO: 215053 - DNA, 20 bp, synthetic construct
  source 1..20: mol_type = other DNA
aacagaaagaccaaagaaca

SEQ ID NO: 215054 - DNA, 20 bp, synthetic construct
  source 1..20: mol_type = other DNA
caacagaaagaccaaagaac

SEQ ID NO: 215055 - DNA, 20 bp, synthetic construct
  source 1..20: mol_type = other DNA
ccaacagaaagaccaaagaa

SEQ ID NO: 215056 - DNA, 20 bp, synthetic construct
  source 1..20: mol_type = other DNA
tccaacagaaagaccaaaga

SEQ ID NO: 215057 - DNA, 20 bp, synthetic construct
  source 1..20: mol_type = other DNA
atccaacagaaagaccaaag

SEQ ID NO: 215058 - DNA, 20 bp, synthetic construct
  source 1..20: mol_type = other DNA
tatccaacagaaagaccaaa

SEQ ID NO: 215059 - DNA, 20 bp, synthetic construct
  source 1..20: mol_type = other DNA
ttatccaacagaaagaccaa

SEQ ID NO: 215060 - DNA, 20 bp, synthetic construct
  source 1..20: mol_type = other DNA
attatccaacagaaagacca

SEQ ID NO: 215061 - DNA, 20 bp, synthetic construct
  source 1..20: mol_type = other DNA
cattatccaacagaaagacc

SEQ ID NO: 215062 - DNA, 20 bp, synthetic construct
  source 1..20: mol_type = other DNA
ccattatccaacagaaagac

SEQ ID NO: 215063 - DNA, 20 bp, synthetic construct
  source 1..20: mol_type = other DNA
tccattatccaacagaaaga

SEQ ID NO: 215064 - DNA, 20 bp, synthetic construct
  source 1..20: mol_type = other DNA
gtccattatccaacagaaag

SEQ ID NO: 215065 - DNA, 20 bp, synthetic construct
  source 1..20: mol_type = other DNA
tgtccattatccaacagaaa

SEQ ID NO: 215066 - DNA, 20 bp, synthetic construct
  source 1..20: mol_type = other DNA
atgtccattatccaacagaa

SEQ ID NO: 215067 - DNA, 20 bp, synthetic construct
  source 1..20: mol_type = other DNA
aatgtccattatccaacaga

SEQ ID NO: 215068 - DNA, 20 bp, synthetic construct
  source 1..20: mol_type = other DNA
aaatgtccattatccaacag

SEQ ID NO: 215069 - DNA, 20 bp, synthetic construct
  source 1..20: mol_type = other DNA
caaatgtccattatccaaca

SEQ ID NO: 215070 - DNA, 20 bp, synthetic construct
  source 1..20: mol_type = other DNA
ccaaatgtccattatccaac

SEQ ID NO: 215071 - DNA, 20 bp, synthetic construct
  source 1..20: mol_type = other DNA
gccaaatgtccattatccaa

SEQ ID NO: 215072 - DNA, 20 bp, synthetic construct
  source 1..20: mol_type = other DNA
tgccaaatgtccattatcca

SEQ ID NO: 215073 - DNA, 20 bp, synthetic construct
  source 1..20: mol_type = other DNA
atgccaaatgtccattatcc

SEQ ID NO: 215074 - DNA, 20 bp, synthetic construct
  source 1..20: mol_type = other DNA
aatgccaaatgtccattatc

SEQ ID NO: 215075 - DNA, 20 bp, synthetic construct
  source 1..20: mol_type = other DNA
caatgccaaatgtccattat

SEQ ID NO: 215076 - DNA, 20 bp, synthetic construct
  source 1..20: mol_type = other DNA
tcaatgccaaatgtccatta

SEQ ID NO: 215077 - DNA, 20 bp, synthetic construct
  source 1..20: mol_type = other DNA
ctcaatgccaaatgtccatt

SEQ ID NO: 215078 - DNA, 20 bp, synthetic construct
  source 1..20: mol_type = other DNA
tctcaatgccaaatgtccat

SEQ ID NO: 215079 - DNA, 20 bp, synthetic construct
  source 1..20: mol_type = other DNA
ctctcaatgccaaatgtcca

SEQ ID NO: 215080 - DNA, 20 bp, synthetic construct
  source 1..20: mol_type = other DNA
tctctcaatgccaaatgtcc

SEQ ID NO: 215081 - DNA, 20 bp, synthetic construct
  source 1..20: mol_type = other DNA
ctctctcaatgccaaatgtc

SEQ ID NO: 215082 - DNA, 20 bp, synthetic construct
  source 1..20: mol_type = other DNA
cctctctcaatgccaaatgt

SEQ ID NO: 215083 - DNA, 20 bp, synthetic construct
  source 1..20: mol_type = other DNA
gcctctctcaatgccaaatg

SEQ ID NO: 215084 - DNA, 20 bp, synthetic construct
  source 1..20: mol_type = other DNA
agcctctctcaatgccaaat

SEQ ID NO: 215085 - DNA, 20 bp, synthetic construct
  source 1..20: mol_type = other DNA
cagcctctctcaatgccaaa

SEQ ID NO: 215086 - DNA, 20 bp, synthetic construct
  source 1..20: mol_type = other DNA
gcagcctctctcaatgccaa

SEQ ID NO: 215087 - DNA, 20 bp, synthetic construct
  source 1..20: mol_type = other DNA
agcagcctctctcaatgcca

SEQ ID NO: 215088 - DNA, 20 bp, synthetic construct
  source 1..20: mol_type = other DNA
aagcagcctctctcaatgcc

SEQ ID NO: 215089 - DNA, 20 bp, synthetic construct
  source 1..20: mol_type = other DNA
aaagcagcctctctcaatgc

SEQ ID NO: 215090 - DNA, 20 bp, synthetic construct
  source 1..20: mol_type = other DNA
aaaagcagcctctctcaatg

SEQ ID NO: 215091 - DNA, 20 bp, synthetic construct
  source 1..20: mol_type = other DNA
aaaaagcagcctctctcaat

SEQ ID NO: 215092 - DNA, 20 bp, synthetic construct
  source 1..20: mol_type = other DNA
gaaaaagcagcctctctcaa

SEQ ID NO: 215093 - DNA, 20 bp, synthetic construct
  source 1..20: mol_type = other DNA
agaaaaagcagcctctctca

SEQ ID NO: 215094 - DNA, 20 bp, synthetic construct
  source 1..20: mol_type = other DNA
cagaaaaagcagcctctctc

SEQ ID NO: 215095 - DNA, 20 bp, synthetic construct
  source 1..20: mol_type = other DNA
tcagaaaaagcagcctctct

SEQ ID NO: 215096 - DNA, 20 bp, synthetic construct
  source 1..20: mol_type = other DNA
ttcagaaaaagcagcctctc

SEQ ID NO: 215097 - DNA, 20 bp, synthetic construct
  source 1..20: mol_type = other DNA
tttcagaaaaagcagcctct

SEQ ID NO: 215098 - DNA, 20 bp, synthetic construct
  source 1..20: mol_type = other DNA
atttcagaaaaagcagcctc

SEQ ID NO: 215099 - DNA, 20 bp, synthetic construct
  source 1..20: mol_type = other DNA
gatttcagaaaaagcagcct

SEQ ID NO: 215100 - DNA, 20 bp, synthetic construct
  source 1..20: mol_type = other DNA
tgatttcagaaaaagcagcc

SEQ ID NO: 215101 - DNA, 20 bp, synthetic construct
  source 1..20: mol_type = other DNA
atgatttcagaaaaagcagc

SEQ ID NO: 215102 - DNA, 20 bp, synthetic construct
  source 1..20: mol_type = other DNA
catgatttcagaaaaagcag

SEQ ID NO: 215103 - DNA, 20 bp, synthetic construct
  source 1..20: mol_type = other DNA
acatgatttcagaaaaagca

SEQ ID NO: 215104 - DNA, 20 bp, synthetic construct
  source 1..20: mol_type = other DNA
aacatgatttcagaaaaagc

SEQ ID NO: 215105 - DNA, 20 bp, synthetic construct
  source 1..20: mol_type = other DNA
gaacatgatttcagaaaaag

SEQ ID NO: 215106 - DNA, 20 bp, synthetic construct
  source 1..20: mol_type = other DNA
agaacatgatttcagaaaaa

SEQ ID NO: 215107 - DNA, 20 bp, synthetic construct
  source 1..20: mol_type = other DNA
aagaacatgatttcagaaaa

SEQ ID NO: 215108 - DNA, 20 bp, synthetic construct
  source 1..20: mol_type = other DNA
caagaacatgatttcagaaa

SEQ ID NO: 215109 - DNA, 20 bp, synthetic construct
  source 1..20: mol_type = other DNA
ccaagaacatgatttcagaa

SEQ ID NO: 215110 - DNA, 20 bp, synthetic construct
  source 1..20: mol_type = other DNA
cccaagaacatgatttcaga

SEQ ID NO: 215111 - DNA, 20 bp, synthetic construct
  source 1..20: mol_type = other DNA
ccccaagaacatgatttcag

SEQ ID NO: 215112 - DNA, 20 bp, synthetic construct
  source 1..20: mol_type = other DNA
gccccaagaacatgatttca

SEQ ID NO: 215113 - DNA, 20 bp, synthetic construct
  source 1..20: mol_type = other DNA
ggccccaagaacatgatttc

SEQ ID NO: 215114 - DNA, 20 bp, synthetic construct
  source 1..20: mol_type = other DNA
gggccccaagaacatgattt

SEQ ID NO: 215115 - DNA, 20 bp, synthetic construct
  source 1..20: mol_type = other DNA
tgggccccaagaacatgatt

SEQ ID NO: 215116 - DNA, 20 bp, synthetic construct
  source 1..20: mol_type = other DNA
ctgggccccaagaacatgat

SEQ ID NO: 215117 - DNA, 20 bp, synthetic construct
  source 1..20: mol_type = other DNA
tctgggccccaagaacatga

SEQ ID NO: 215118 - DNA, 20 bp, synthetic construct
  source 1..20: mol_type = other DNA
ttctgggccccaagaacatg

SEQ ID NO: 215119 - DNA, 20 bp, synthetic construct
  source 1..20: mol_type = other DNA
gttctgggccccaagaacat

SEQ ID NO: 215120 - DNA, 20 bp, synthetic construct
  source 1..20: mol_type = other DNA
ggttctgggccccaagaaca

SEQ ID NO: 215121 - DNA, 20 bp, synthetic construct
  source 1..20: mol_type = other DNA
aggttctgggccccaagaac

SEQ ID NO: 215122 - DNA, 20 bp, synthetic construct
  source 1..20: mol_type = other DNA
taggttctgggccccaagaa

SEQ ID NO: 215123 - DNA, 20 bp, synthetic construct
  source 1..20: mol_type = other DNA
ctaggttctgggccccaaga

SEQ ID NO: 215124 - DNA, 20 bp, synthetic construct
  source 1..20: mol_type = other DNA
cctaggttctgggccccaag

SEQ ID NO: 215125 - DNA, 20 bp, synthetic construct
  source 1..20: mol_type = other DNA
acctaggttctgggccccaa

SEQ ID NO: 215126 - DNA, 20 bp, synthetic construct
  source 1..20: mol_type = other DNA
cacctaggttctgggcccca

SEQ ID NO: 215127 - DNA, 20 bp, synthetic construct
  source 1..20: mol_type = other DNA
acacctaggttctgggcccc

SEQ ID NO: 215128 - DNA, 20 bp, synthetic construct
  source 1..20: mol_type = other DNA
cacacctaggttctgggccc

SEQ ID NO: 215129 - DNA, 20 bp, synthetic construct
  source 1..20: mol_type = other DNA
acacacctaggttctgggcc

SEQ ID NO: 215130 - DNA, 20 bp, synthetic construct
  source 1..20: mol_type = other DNA
cacacacctaggttctgggc

SEQ ID NO: 215131 - DNA, 20 bp, synthetic construct
  source 1..20: mol_type = other DNA
gcacacacctaggttctggg

SEQ ID NO: 215132 - DNA, 20 bp, synthetic construct
  source 1..20: mol_type = other DNA
agcacacacctaggttctgg

SEQ ID NO: 215133 - DNA, 20 bp, synthetic construct
  source 1..20: mol_type = other DNA
aagcacacacctaggttctg

SEQ ID NO: 215134 - DNA, 20 bp, synthetic construct
  source 1..20: mol_type = other DNA
gaagcacacacctaggttct

SEQ ID NO: 215135 - DNA, 20 bp, synthetic construct
  source 1..20: mol_type = other DNA
agaagcacacacctaggttc

SEQ ID NO: 215136 - DNA, 20 bp, synthetic construct
  source 1..20: mol_type = other DNA
cagaagcacacacctaggtt

SEQ ID NO: 215137 - DNA, 20 bp, synthetic construct
  source 1..20: mol_type = other DNA
tcagaagcacacacctaggt

SEQ ID NO: 215138 - DNA, 20 bp, synthetic construct
  source 1..20: mol_type = other DNA
gtcagaagcacacacctagg

SEQ ID NO: 215139 - DNA, 20 bp, synthetic construct
  source 1..20: mol_type = other DNA
agtcagaagcacacacctag

SEQ ID NO: 215140 - DNA, 20 bp, synthetic construct
  source 1..20: mol_type = other DNA
aagtcagaagcacacaccta

SEQ ID NO: 215141 - DNA, 20 bp, synthetic construct
  source 1..20: mol_type = other DNA
aaagtcagaagcacacacct

SEQ ID NO: 215142 - DNA, 20 bp, synthetic construct
  source 1..20: mol_type = other DNA
caaagtcagaagcacacacc

SEQ ID NO: 215143 - DNA, 20 bp, synthetic construct
  source 1..20: mol_type = other DNA
acaaagtcagaagcacacac

SEQ ID NO: 215144 - DNA, 20 bp, synthetic construct
  source 1..20: mol_type = other DNA
aacaaagtcagaagcacaca

SEQ ID NO: 215145 - DNA, 20 bp, synthetic construct
  source 1..20: mol_type = other DNA
aaacaaagtcagaagcacac

SEQ ID NO: 215146 - DNA, 20 bp, synthetic construct
  source 1..20: mol_type = other DNA
aaaacaaagtcagaagcaca

SEQ ID NO: 215147 - DNA, 20 bp, synthetic construct
  source 1..20: mol_type = other DNA
gaaaacaaagtcagaagcac

SEQ ID NO: 215148 - DNA, 20 bp, synthetic construct
  source 1..20: mol_type = other DNA
agaaaacaaagtcagaagca

SEQ ID NO: 215149 - DNA, 20 bp, synthetic construct
  source 1..20: mol_type = other DNA
aagaaaacaaagtcagaagc

SEQ ID NO: 215150 - DNA, 20 bp, synthetic construct
  source 1..20: mol_type = other DNA
gaagaaaacaaagtcagaag

SEQ ID NO: 215151 - DNA, 20 bp, synthetic construct
  source 1..20: mol_type = other DNA
ggaagaaaacaaagtcagaa

SEQ ID NO: 215152 - DNA, 20 bp, synthetic construct
  source 1..20: mol_type = other DNA
aggaagaaaacaaagtcaga

SEQ ID NO: 215153 - DNA, 20 bp, synthetic construct
  source 1..20: mol_type = other DNA
caggaagaaaacaaagtcag

SEQ ID NO: 215154 - DNA, 20 bp, synthetic construct
  source 1..20: mol_type = other DNA
tcaggaagaaaacaaagtca

SEQ ID NO: 215155 - DNA, 20 bp, synthetic construct
  source 1..20: mol_type = other DNA
atcaggaagaaaacaaagtc

SEQ ID NO: 215156 - DNA, 20 bp, synthetic construct
  source 1..20: mol_type = other DNA
gatcaggaagaaaacaaagt

SEQ ID NO: 215157 - DNA, 20 bp, synthetic construct
  source 1..20: mol_type = other DNA
ggatcaggaagaaaacaaag

SEQ ID NO: 215158 - DNA, 20 bp, synthetic construct
  source 1..20: mol_type = other DNA
tggatcaggaagaaaacaaa

SEQ ID NO: 215159 - DNA, 20 bp, synthetic construct
  source 1..20: mol_type = other DNA
ttggatcaggaagaaaacaa

SEQ ID NO: 215160 - DNA, 20 bp, synthetic construct
  source 1..20: mol_type = other DNA
tttggatcaggaagaaaaca

SEQ ID NO: 215161 - DNA, 20 bp, synthetic construct
  source 1..20: mol_type = other DNA
atttggatcaggaagaaaac

SEQ ID NO: 215162 - DNA, 20 bp, synthetic construct
  source 1..20: mol_type = other DNA
aatttggatcaggaagaaaa

SEQ ID NO: 215163 - DNA, 20 bp, synthetic construct
  source 1..20: mol_type = other DNA
gaatttggatcaggaagaaa

SEQ ID NO: 215164 - DNA, 20 bp, synthetic construct
  source 1..20: mol_type = other DNA
agaatttggatcaggaagaa

SEQ ID NO: 215165 - DNA, 20 bp, synthetic construct
  source 1..20: mol_type = other DNA
cagaatttggatcaggaaga

SEQ ID NO: 215166 - DNA, 20 bp, synthetic construct
  source 1..20: mol_type = other DNA
tcagaatttggatcaggaag

SEQ ID NO: 215167 - DNA, 20 bp, synthetic construct
  source 1..20: mol_type = other DNA
atcagaatttggatcaggaa

SEQ ID NO: 215168 - DNA, 20 bp, synthetic construct
  source 1..20: mol_type = other DNA
tatcagaatttggatcagga

SEQ ID NO: 215169 - DNA, 20 bp, synthetic construct
  source 1..20: mol_type = other DNA
atatcagaatttggatcagg

SEQ ID NO: 215170 - DNA, 20 bp, synthetic construct
  source 1..20: mol_type = other DNA
catatcagaatttggatcag

SEQ ID NO: 215171 - DNA, 20 bp, synthetic construct
  source 1..20: mol_type = other DNA
acatatcagaatttggatca

SEQ ID NO: 215172 - DNA, 20 bp, synthetic construct
  source 1..20: mol_type = other DNA
gacatatcagaatttggatc

SEQ ID NO: 215173 - DNA, 20 bp, synthetic construct
  source 1..20: mol_type = other DNA
ggacatatcagaatttggat

SEQ ID NO: 215174 - DNA, 20 bp, synthetic construct
  source 1..20: mol_type = other DNA
tggacatatcagaatttgga

SEQ ID NO: 215175 - DNA, 20 bp, synthetic construct
  source 1..20: mol_type = other DNA
atggacatatcagaatttgg

SEQ ID NO: 215176 - DNA, 20 bp, synthetic construct
  source 1..20: mol_type = other DNA
aatggacatatcagaatttg

SEQ ID NO: 215177 - DNA, 20 bp, synthetic construct
  source 1..20: mol_type = other DNA
aaatggacatatcagaattt

SEQ ID NO: 215178 - DNA, 20 bp, synthetic construct
  source 1..20: mol_type = other DNA
taaatggacatatcagaatt

SEQ ID NO: 215179 - DNA, 20 bp, synthetic construct
  source 1..20: mol_type = other DNA
ttaaatggacatatcagaat

SEQ ID NO: 215180 - DNA, 20 bp, synthetic construct
  source 1..20: mol_type = other DNA
tttaaatggacatatcagaa

SEQ ID NO: 215181 - DNA, 20 bp, synthetic construct
  source 1..20: mol_type = other DNA
atttaaatggacatatcaga

SEQ ID NO: 215182 - DNA, 20 bp, synthetic construct
  source 1..20: mol_type = other DNA
aatttaaatggacatatcag

SEQ ID NO: 215183 - DNA, 20 bp, synthetic construct
  source 1..20: mol_type = other DNA
caatttaaatggacatatca

SEQ ID NO: 215184 - DNA, 20 bp, synthetic construct
  source 1..20: mol_type = other DNA
tcaatttaaatggacatatc

SEQ ID NO: 215185 - DNA, 20 bp, synthetic construct
  source 1..20: mol_type = other DNA
atcaatttaaatggacatat

SEQ ID NO: 215186 - DNA, 20 bp, synthetic construct
  source 1..20: mol_type = other DNA
gatcaatttaaatggacata

SEQ ID NO: 215187 - DNA, 20 bp, synthetic construct
  source 1..20: mol_type = other DNA
agatcaatttaaatggacat

SEQ ID NO: 215188 - DNA, 20 bp, synthetic construct
  source 1..20: mol_type = other DNA
tagatcaatttaaatggaca

SEQ ID NO: 215189 - DNA, 20 bp, synthetic construct
  source 1..20: mol_type = other DNA
ctagatcaatttaaatggac

SEQ ID NO: 215190 - DNA, 20 bp, synthetic construct
  source 1..20: mol_type = other DNA
tctagatcaatttaaatgga

SEQ ID NO: 215191 - DNA, 20 bp, synthetic construct
  source 1..20: mol_type = other DNA
gtctagatcaatttaaatgg

SEQ ID NO: 215192 - DNA, 20 bp, synthetic construct
  source 1..20: mol_type = other DNA
ggtctagatcaatttaaatg

SEQ ID NO: 215193 - DNA, 20 bp, synthetic construct
  source 1..20: mol_type = other DNA
gggtctagatcaatttaaat

SEQ ID NO: 215194 - DNA, 20 bp, synthetic construct
  source 1..20: mol_type = other DNA
tgggtctagatcaatttaaa

SEQ ID NO: 215195 - DNA, 20 bp, synthetic construct
  source 1..20: mol_type = other DNA
gtgggtctagatcaatttaa

SEQ ID NO: 215196 - DNA, 20 bp, synthetic construct
  source 1..20: mol_type = other DNA
tgtgggtctagatcaattta

SEQ ID NO: 215197 - DNA, 20 bp, synthetic construct
  source 1..20: mol_type = other DNA
ctgtgggtctagatcaattt

SEQ ID NO: 215198 - DNA, 20 bp, synthetic construct
  source 1..20: mol_type = other DNA
cctgtgggtctagatcaatt

SEQ ID NO: 215199 - DNA, 20 bp, synthetic construct
  source 1..20: mol_type = other DNA
ccctgtgggtctagatcaat

SEQ ID NO: 215200 - DNA, 20 bp, synthetic construct
  source 1..20: mol_type = other DNA
gccctgtgggtctagatcaa

SEQ ID NO: 215201 - DNA, 20 bp, synthetic construct
  source 1..20: mol_type = other DNA
tgccctgtgggtctagatca

SEQ ID NO: 215202 - DNA, 20 bp, synthetic construct
  source 1..20: mol_type = other DNA
gtgccctgtgggtctagatc

SEQ ID NO: 215203 - DNA, 20 bp, synthetic construct
  source 1..20: mol_type = other DNA
agtgccctgtgggtctagat

SEQ ID NO: 215204 - DNA, 20 bp, synthetic construct
  source 1..20: mol_type = other DNA
cagtgccctgtgggtctaga

SEQ ID NO: 215205 - DNA, 20 bp, synthetic construct
  source 1..20: mol_type = other DNA
acagtgccctgtgggtctag

SEQ ID NO: 215206 - DNA, 20 bp, synthetic construct
  source 1..20: mol_type = other DNA
cacagtgccctgtgggtcta

SEQ ID NO: 215207 - DNA, 20 bp, synthetic construct
  source 1..20: mol_type = other DNA
ccacagtgccctgtgggtct

SEQ ID NO: 215208 - DNA, 20 bp, synthetic construct
  source 1..20: mol_type = other DNA
cccacagtgccctgtgggtc

SEQ ID NO: 215209 - DNA, 20 bp, synthetic construct
  source 1..20: mol_type = other DNA
tcccacagtgccctgtgggt

SEQ ID NO: 215210 - DNA, 20 bp, synthetic construct
  source 1..20: mol_type = other DNA
gtcccacagtgccctgtggg

SEQ ID NO: 215211 - DNA, 20 bp, synthetic construct
  source 1..20: mol_type = other DNA
tgtcccacagtgccctgtgg

SEQ ID NO: 215212 - DNA, 20 bp, synthetic construct
  source 1..20: mol_type = other DNA
ctgtcccacagtgccctgtg

SEQ ID NO: 215213 - DNA, 20 bp, synthetic construct
  source 1..20: mol_type = other DNA
tctgtcccacagtgccctgt

SEQ ID NO: 215214 - DNA, 20 bp, synthetic construct
  source 1..20: mol_type = other DNA
atctgtcccacagtgccctg

SEQ ID NO: 215215 - DNA, 20 bp, synthetic construct
  source 1..20: mol_type = other DNA
gatctgtcccacagtgccct

SEQ ID NO: 215216 - DNA, 20 bp, synthetic construct
  source 1..20: mol_type = other DNA
ggatctgtcccacagtgccc

SEQ ID NO: 215217 - DNA, 20 bp, synthetic construct
  source 1..20: mol_type = other DNA
aggatctgtcccacagtgcc

SEQ ID NO: 215218 - DNA, 20 bp, synthetic construct
  source 1..20: mol_type = other DNA
gaggatctgtcccacagtgc

SEQ ID NO: 215219 - DNA, 20 bp, synthetic construct
  source 1..20: mol_type = other DNA
tgaggatctgtcccacagtg

SEQ ID NO: 215220 - DNA, 20 bp, synthetic construct
  source 1..20: mol_type = other DNA
ctgaggatctgtcccacagt

SEQ ID NO: 215221 - DNA, 20 bp, synthetic construct
  source 1..20: mol_type = other DNA
actgaggatctgtcccacag

SEQ ID NO: 215222 - DNA, 20 bp, synthetic construct
  source 1..20: mol_type = other DNA
cactgaggatctgtcccaca

SEQ ID NO: 215223 - DNA, 20 bp, synthetic construct
  source 1..20: mol_type = other DNA
ccactgaggatctgtcccac

SEQ ID NO: 215224 - DNA, 20 bp, synthetic construct
  source 1..20: mol_type = other DNA
tccactgaggatctgtccca

SEQ ID NO: 215225 - DNA, 20 bp, synthetic construct
  source 1..20: mol_type = other DNA
ttccactgaggatctgtccc

SEQ ID NO: 215226 - DNA, 20 bp, synthetic construct
  source 1..20: mol_type = other DNA
gttccactgaggatctgtcc

SEQ ID NO: 215227 - DNA, 20 bp, synthetic construct
  source 1..20: mol_type = other DNA
tgttccactgaggatctgtc

SEQ ID NO: 215228 - DNA, 20 bp, synthetic construct
  source 1..20: mol_type = other DNA
atgttccactgaggatctgt

SEQ ID NO: 215229 - DNA, 20 bp, synthetic construct
  source 1..20: mol_type = other DNA
catgttccactgaggatctg

SEQ ID NO: 215230 - DNA, 20 bp, synthetic construct
  source 1..20: mol_type = other DNA
tcatgttccactgaggatct

SEQ ID NO: 215231 - DNA, 20 bp, synthetic construct
  source 1..20: mol_type = other DNA
gtcatgttccactgaggatc

SEQ ID NO: 215232 - DNA, 20 bp, synthetic construct
  source 1..20: mol_type = other DNA
agtcatgttccactgaggat

SEQ ID NO: 215233 - DNA, 20 bp, synthetic construct
  source 1..20: mol_type = other DNA
gagtcatgttccactgagga

SEQ ID NO: 215234 - DNA, 20 bp, synthetic construct
  source 1..20: mol_type = other DNA
agagtcatgttccactgagg

SEQ ID NO: 215235 - DNA, 20 bp, synthetic construct
  source 1..20: mol_type = other DNA
cagagtcatgttccactgag

SEQ ID NO: 215236 - DNA, 20 bp, synthetic construct
  source 1..20: mol_type = other DNA
acagagtcatgttccactga

SEQ ID NO: 215237 - DNA, 20 bp, synthetic construct
  source 1..20: mol_type = other DNA
tacagagtcatgttccactg

SEQ ID NO: 215238 - DNA, 20 bp, synthetic construct
  source 1..20: mol_type = other DNA
ttacagagtcatgttccact

SEQ ID NO: 215239 - DNA, 20 bp, synthetic construct
  source 1..20: mol_type = other DNA
gttacagagtcatgttccac

SEQ ID NO: 215240 - DNA, 20 bp, synthetic construct
  source 1..20: mol_type = other DNA
cgttacagagtcatgttcca

SEQ ID NO: 215241 - DNA, 20 bp, synthetic construct
  source 1..20: mol_type = other DNA
tcgttacagagtcatgttcc

SEQ ID NO: 215242 - DNA, 20 bp, synthetic construct
  source 1..20: mol_type = other DNA
ctcgttacagagtcatgttc

SEQ ID NO: 215243 - DNA, 20 bp, synthetic construct
  source 1..20: mol_type = other DNA
tctcgttacagagtcatgtt

SEQ ID NO: 215244 - DNA, 20 bp, synthetic construct
  source 1..20: mol_type = other DNA
ctctcgttacagagtcatgt

SEQ ID NO: 215245 - DNA, 20 bp, synthetic construct
  source 1..20: mol_type = other DNA
gctctcgttacagagtcatg

SEQ ID NO: 215246 - DNA, 20 bp, synthetic construct
  source 1..20: mol_type = other DNA
tgctctcgttacagagtcat

SEQ ID NO: 215247 - DNA, 20 bp, synthetic construct
  source 1..20: mol_type = other DNA
atgctctcgttacagagtca

SEQ ID NO: 215248 - DNA, 20 bp, synthetic construct
  source 1..20: mol_type = other DNA
aatgctctcgttacagagtc

SEQ ID NO: 215249 - DNA, 20 bp, synthetic construct
  source 1..20: mol_type = other DNA
aaatgctctcgttacagagt

SEQ ID NO: 215250 - DNA, 20 bp, synthetic construct
  source 1..20: mol_type = other DNA
aaaatgctctcgttacagag

SEQ ID NO: 215251 - DNA, 20 bp, synthetic construct
  source 1..20: mol_type = other DNA
caaaatgctctcgttacaga

SEQ ID NO: 215252 - DNA, 20 bp, synthetic construct
  source 1..20: mol_type = other DNA
acaaaatgctctcgttacag

SEQ ID NO: 215253 - DNA, 20 bp, synthetic construct
  source 1..20: mol_type = other DNA
aacaaaatgctctcgttaca

SEQ ID NO: 215254 - DNA, 20 bp, synthetic construct
  source 1..20: mol_type = other DNA
aaacaaaatgctctcgttac

SEQ ID NO: 215255 - DNA, 20 bp, synthetic construct
  source 1..20: mol_type = other DNA
aaaacaaaatgctctcgtta

SEQ ID NO: 215256 - DNA, 20 bp, synthetic construct
  source 1..20: mol_type = other DNA
caaaacaaaatgctctcgtt

SEQ ID NO: 215257 - DNA, 20 bp, synthetic construct
  source 1..20: mol_type = other DNA
acaaaacaaaatgctctcgt

SEQ ID NO: 215258 - DNA, 20 bp, synthetic construct
  source 1..20: mol_type = other DNA
gacaaaacaaaatgctctcg

SEQ ID NO: 215259 - DNA, 20 bp, synthetic construct
  source 1..20: mol_type = other DNA
tgacaaaacaaaatgctctc

SEQ ID NO: 215260 - DNA, 20 bp, synthetic construct
  source 1..20: mol_type = other DNA
ttgacaaaacaaaatgctct

SEQ ID NO: 215261 - DNA, 20 bp, synthetic construct
  source 1..20: mol_type = other DNA
tttgacaaaacaaaatgctc

SEQ ID NO: 215262 - DNA, 20 bp, synthetic construct
  source 1..20: mol_type = other DNA
ttttgacaaaacaaaatgct

SEQ ID NO: 215263 - DNA, 20 bp, synthetic construct
  source 1..20: mol_type = other DNA
attttgacaaaacaaaatgc

SEQ ID NO: 215264 - DNA, 20 bp, synthetic construct
  source 1..20: mol_type = other DNA
cattttgacaaaacaaaatg

SEQ ID NO: 215265 - DNA, 20 bp, synthetic construct
  source 1..20: mol_type = other DNA
tcattttgacaaaacaaaat

SEQ ID NO: 215266 - DNA, 20 bp, synthetic construct
  source 1..20: mol_type = other DNA
ctcattttgacaaaacaaaa

SEQ ID NO: 215267 - DNA, 20 bp, synthetic construct
  source 1..20: mol_type = other DNA
tctcattttgacaaaacaaa

SEQ ID NO: 215268 - DNA, 20 bp, synthetic construct
  source 1..20: mol_type = other DNA
ttctcattttgacaaaacaa

SEQ ID NO: 215269 - DNA, 20 bp, synthetic construct
  source 1..20: mol_type = other DNA
gttctcattttgacaaaaca

SEQ ID NO: 215270 - DNA, 20 bp, synthetic construct
  source 1..20: mol_type = other DNA
tgttctcattttgacaaaac

SEQ ID NO: 215271 - DNA, 20 bp, synthetic construct
  source 1..20: mol_type = other DNA
atgttctcattttgacaaaa

SEQ ID NO: 215272 - DNA, 20 bp, synthetic construct
  source 1..20: mol_type = other DNA
tatgttctcattttgacaaa

SEQ ID NO: 215273 - DNA, 20 bp, synthetic construct
  source 1..20: mol_type = other DNA
atatgttctcattttgacaa

SEQ ID NO: 215274 - DNA, 20 bp, synthetic construct
  source 1..20: mol_type = other DNA
aatatgttctcattttgaca

SEQ ID NO: 215275 - DNA, 20 bp, synthetic construct
  source 1..20: mol_type = other DNA
taatatgttctcattttgac

SEQ ID NO: 215276 - DNA, 20 bp, synthetic construct
  source 1..20: mol_type = other DNA
ataatatgttctcattttga

SEQ ID NO: 215277 - DNA, 20 bp, synthetic construct
  source 1..20: mol_type = other DNA
aataatatgttctcattttg

SEQ ID NO: 215278 - DNA, 20 bp, synthetic construct
  source 1..20: mol_type = other DNA
caataatatgttctcatttt

SEQ ID NO: 215279 - DNA, 20 bp, synthetic construct
  source 1..20: mol_type = other DNA
gcaataatatgttctcattt

SEQ ID NO: 215280 - DNA, 20 bp, synthetic construct
  source 1..20: mol_type = other DNA
ggcaataatatgttctcatt

SEQ ID NO: 215281 - DNA, 20 bp, synthetic construct
  source 1..20: mol_type = other DNA
aggcaataatatgttctcat

SEQ ID NO: 215282 - DNA, 20 bp, synthetic construct
  source 1..20: mol_type = other DNA
aaggcaataatatgttctca

SEQ ID NO: 215283 - DNA, 20 bp, synthetic construct
  source 1..20: mol_type = other DNA
aaaggcaataatatgttctc

SEQ ID NO: 215284 - DNA, 20 bp, synthetic construct
  source 1..20: mol_type = other DNA
gaaaggcaataatatgttct

SEQ ID NO: 215285 - DNA, 20 bp, synthetic construct
  source 1..20: mol_type = other DNA
tgaaaggcaataatatgttc

SEQ ID NO: 215286 - DNA, 20 bp, synthetic construct
  source 1..20: mol_type = other DNA
atgaaaggcaataatatgtt

SEQ ID NO: 215287 - DNA, 20 bp, synthetic construct
  source 1..20: mol_type = other DNA
gatgaaaggcaataatatgt

SEQ ID NO: 215288 - DNA, 20 bp, synthetic construct
  source 1..20: mol_type = other DNA
agatgaaaggcaataatatg

SEQ ID NO: 215289 - DNA, 20 bp, synthetic construct
  source 1..20: mol_type = other DNA
cagatgaaaggcaataatat

SEQ ID NO: 215290 - DNA, 20 bp, synthetic construct
  source 1..20: mol_type = other DNA
tcagatgaaaggcaataata

SEQ ID NO: 215291 - DNA, 20 bp, synthetic construct
  source 1..20: mol_type = other DNA
atcagatgaaaggcaataat

SEQ ID NO: 215292 - DNA, 20 bp, synthetic construct
  source 1..20: mol_type = other DNA
aatcagatgaaaggcaataa

SEQ ID NO: 215293 - DNA, 20 bp, synthetic construct
  source 1..20: mol_type = other DNA
caatcagatgaaaggcaata

SEQ ID NO: 215294 - DNA, 20 bp, synthetic construct
  source 1..20: mol_type = other DNA
acaatcagatgaaaggcaat

SEQ ID NO: 215295 - DNA, 20 bp, synthetic construct
  source 1..20: mol_type = other DNA
tacaatcagatgaaaggcaa

SEQ ID NO: 215296 - DNA, 20 bp, synthetic construct
  source 1..20: mol_type = other DNA
ttacaatcagatgaaaggca

SEQ ID NO: 215297 - DNA, 20 bp, synthetic construct
  source 1..20: mol_type = other DNA
tttacaatcagatgaaaggc

SEQ ID NO: 215298 - DNA, 20 bp, synthetic construct
  source 1..20: mol_type = other DNA
gtttacaatcagatgaaagg

SEQ ID NO: 215299 - DNA, 20 bp, synthetic construct
  source 1..20: mol_type = other DNA
tgtttacaatcagatgaaag

SEQ ID NO: 215300 - DNA, 20 bp, synthetic construct
  source 1..20: mol_type = other DNA
atgtttacaatcagatgaaa

SEQ ID NO: 215301 - DNA, 20 bp, synthetic construct
  source 1..20: mol_type = other DNA
tatgtttacaatcagatgaa

SEQ ID NO: 215302 - DNA, 20 bp, synthetic construct
  source 1..20: mol_type = other DNA
ttatgtttacaatcagatga

SEQ ID NO: 215303 - DNA, 20 bp, synthetic construct
  source 1..20: mol_type = other DNA
attatgtttacaatcagatg

SEQ ID NO: 215304 - DNA, 20 bp, synthetic construct
  source 1..20: mol_type = other DNA
tattatgtttacaatcagat

SEQ ID NO: 215305 - DNA, 20 bp, synthetic construct
  source 1..20: mol_type = other DNA
gtattatgtttacaatcaga

SEQ ID NO: 215306 - DNA, 20 bp, synthetic construct
  source 1..20: mol_type = other DNA
tgtattatgtttacaatcag

SEQ ID NO: 215307 - DNA, 20 bp, synthetic construct
  source 1..20: mol_type = other DNA
atgtattatgtttacaatca

SEQ ID NO: 215308 - DNA, 20 bp, synthetic construct
  source 1..20: mol_type = other DNA
catgtattatgtttacaatc

SEQ ID NO: 215309 - DNA, 20 bp, synthetic construct
  source 1..20: mol_type = other DNA
acatgtattatgtttacaat

SEQ ID NO: 215310 - DNA, 20 bp, synthetic construct
  source 1..20: mol_type = other DNA
aacatgtattatgtttacaa

SEQ ID NO: 215311 - DNA, 20 bp, synthetic construct
  source 1..20: mol_type = other DNA
aaacatgtattatgtttaca

SEQ ID NO: 215312 - DNA, 20 bp, synthetic construct
  source 1..20: mol_type = other DNA
taaacatgtattatgtttac

SEQ ID NO: 215313 - DNA, 20 bp, synthetic construct
  source 1..20: mol_type = other DNA
ataaacatgtattatgttta

SEQ ID NO: 215314 - DNA, 20 bp, synthetic construct
  source 1..20: mol_type = other DNA
tataaacatgtattatgttt

SEQ ID NO: 215315 - DNA, 20 bp, synthetic construct
  source 1..20: mol_type = other DNA
ttataaacatgtattatgtt

SEQ ID NO: 215316 - DNA, 20 bp, synthetic construct
  source 1..20: mol_type = other DNA
tttataaacatgtattatgt

SEQ ID NO: 215317 - DNA, 20 bp, synthetic construct
  source 1..20: mol_type = other DNA
ttttataaacatgtattatg

SEQ ID NO: 215318 - DNA, 20 bp, synthetic construct
  source 1..20: mol_type = other DNA
gttttataaacatgtattat

SEQ ID NO: 215319 - DNA, 20 bp, synthetic construct
  source 1..20: mol_type = other DNA
tgttttataaacatgtatta

SEQ ID NO: 215320 - DNA, 20 bp, synthetic construct
  source 1..20: mol_type = other DNA
ctgttttataaacatgtatt

SEQ ID NO: 215321 - DNA, 20 bp, synthetic construct
  source 1..20: mol_type = other DNA
actgttttataaacatgtat

SEQ ID NO: 215322 - DNA, 20 bp, synthetic construct
  source 1..20: mol_type = other DNA
tactgttttataaacatgta

SEQ ID NO: 215323 - DNA, 20 bp, synthetic construct
  source 1..20: mol_type = other DNA
atactgttttataaacatgt

SEQ ID NO: 215324 - DNA, 20 bp, synthetic construct
  source 1..20: mol_type = other DNA
tatactgttttataaacatg

SEQ ID NO: 215325 - DNA, 20 bp, synthetic construct
  source 1..20: mol_type = other DNA
ttatactgttttataaacat

SEQ ID NO: 215326 - DNA, 20 bp, synthetic construct
  source 1..20: mol_type = other DNA
attatactgttttataaaca

SEQ ID NO: 215327 - DNA, 20 bp, synthetic construct
  source 1..20: mol_type = other DNA
cattatactgttttataaac

SEQ ID NO: 215328 - DNA, 20 bp, synthetic construct
  source 1..20: mol_type = other DNA
tcattatactgttttataaa

SEQ ID NO: 215329 - DNA, 20 bp, synthetic construct
  source 1..20: mol_type = other DNA
ctcattatactgttttataa

SEQ ID NO: 215330 - DNA, 20 bp, synthetic construct
  source 1..20: mol_type = other DNA
tctcattatactgttttata

SEQ ID NO: 215331 - DNA, 20 bp, synthetic construct
  source 1..20: mol_type = other DNA
gtctcattatactgttttat

SEQ ID NO: 215332 - DNA, 20 bp, synthetic construct
  source 1..20: mol_type = other DNA
tgtctcattatactgtttta

SEQ ID NO: 215333 - DNA, 20 bp, synthetic construct
  source 1..20: mol_type = other DNA
ttgtctcattatactgtttt

SEQ ID NO: 215334 - DNA, 20 bp, synthetic construct
  source 1..20: mol_type = other DNA
tttgtctcattatactgttt

SEQ ID NO: 215335 - DNA, 20 bp, synthetic construct
  source 1..20: mol_type = other DNA
ttttgtctcattatactgtt

SEQ ID NO: 215336 - DNA, 20 bp, synthetic construct
  source 1..20: mol_type = other DNA
tttttgtctcattatactgt

SEQ ID NO: 215337 - DNA, 20 bp, synthetic construct
  source 1..20: mol_type = other DNA
atttttgtctcattatactg

SEQ ID NO: 215338 - DNA, 20 bp, synthetic construct
  source 1..20: mol_type = other DNA
catttttgtctcattatact

SEQ ID NO: 215339 - DNA, 20 bp, synthetic construct
  source 1..20: mol_type = other DNA
acatttttgtctcattatac

SEQ ID NO: 215340 - DNA, 20 bp, synthetic construct
  source 1..20: mol_type = other DNA
tacatttttgtctcattata

SEQ ID NO: 215341 - DNA, 20 bp, synthetic construct
  source 1..20: mol_type = other DNA
ctacatttttgtctcattat

SEQ ID NO: 215342 - DNA, 20 bp, synthetic construct
  source 1..20: mol_type = other DNA
tctacatttttgtctcatta

SEQ ID NO: 215343 - DNA, 20 bp, synthetic construct
  source 1..20: mol_type = other DNA
gtctacatttttgtctcatt

SEQ ID NO: 215344 - DNA, 20 bp, synthetic construct
  source 1..20: mol_type = other DNA
tgtctacatttttgtctcat

SEQ ID NO: 215345 - DNA, 20 bp, synthetic construct
  source 1..20: mol_type = other DNA
gtgtctacatttttgtctca

SEQ ID NO: 215346 - DNA, 20 bp, synthetic construct
  source 1..20: mol_type = other DNA
agtgtctacatttttgtctc

SEQ ID NO: 215347 - DNA, 20 bp, synthetic construct
  source 1..20: mol_type = other DNA
tagtgtctacatttttgtct

SEQ ID NO: 215348 - DNA, 20 bp, synthetic construct
  source 1..20: mol_type = other DNA
ttagtgtctacatttttgtc

SEQ ID NO: 215349 - DNA, 20 bp, synthetic construct
  source 1..20: mol_type = other DNA
attagtgtctacatttttgt

SEQ ID NO: 215350 - DNA, 20 bp, synthetic construct
  source 1..20: mol_type = other DNA
tattagtgtctacatttttg

SEQ ID NO: 215351 - DNA, 20 bp, synthetic construct
  source 1..20: mol_type = other DNA
ttattagtgtctacattttt

SEQ ID NO: 215352 - DNA, 20 bp, synthetic construct
  source 1..20: mol_type = other DNA
cttattagtgtctacatttt

SEQ ID NO: 215353 - DNA, 20 bp, synthetic construct
  source 1..20: mol_type = other DNA
ccttattagtgtctacattt

SEQ ID NO: 215354 - DNA, 20 bp, synthetic construct
  source 1..20: mol_type = other DNA
cccttattagtgtctacatt

SEQ ID NO: 215355 - DNA, 20 bp, synthetic construct
  source 1..20: mol_type = other DNA
tcccttattagtgtctacat

SEQ ID NO: 215356 - DNA, 20 bp, synthetic construct
  source 1..20: mol_type = other DNA
ttcccttattagtgtctaca

SEQ ID NO: 215357 - DNA, 20 bp, synthetic construct
  source 1..20: mol_type = other DNA
tttcccttattagtgtctac

SEQ ID NO: 215358 - DNA, 20 bp, synthetic construct
  source 1..20: mol_type = other DNA
ttttcccttattagtgtcta

SEQ ID NO: 215359 - DNA, 20 bp, synthetic construct
  source 1..20: mol_type = other DNA
attttcccttattagtgtct

SEQ ID NO: 215360 - DNA, 20 bp, synthetic construct
  source 1..20: mol_type = other DNA
gattttcccttattagtgtc

SEQ ID NO: 215361 - DNA, 20 bp, synthetic construct
  source 1..20: mol_type = other DNA
agattttcccttattagtgt

SEQ ID NO: 215362 - DNA, 20 bp, synthetic construct
  source 1..20: mol_type = other DNA
gagattttcccttattagtg

SEQ ID NO: 215363 - DNA, 20 bp, synthetic construct
  source 1..20: mol_type = other DNA
ggagattttcccttattagt

SEQ ID NO: 215364 - DNA, 20 bp, synthetic construct
  source 1..20: mol_type = other DNA
gggagattttcccttattag

SEQ ID NO: 215365 - DNA, 20 bp, synthetic construct
  source 1..20: mol_type = other DNA
agggagattttcccttatta

SEQ ID NO: 215366 - DNA, 20 bp, synthetic construct
  source 1..20: mol_type = other DNA
tagggagattttcccttatt

SEQ ID NO: 215367 - DNA, 20 bp, synthetic construct
  source 1..20: mol_type = other DNA
ttagggagattttcccttat

SEQ ID NO: 215368 - DNA, 20 bp, synthetic construct
  source 1..20: mol_type = other DNA
attagggagattttccctta

SEQ ID NO: 215369 - DNA, 20 bp, synthetic construct
  source 1..20: mol_type = other DNA
aattagggagattttccctt

SEQ ID NO: 215370 - DNA, 20 bp, synthetic construct
  source 1..20: mol_type = other DNA
caattagggagattttccct

SEQ ID NO: 215371 - DNA, 20 bp, synthetic construct
  source 1..20: mol_type = other DNA
acaattagggagattttccc

SEQ ID NO: 215372 - DNA, 20 bp, synthetic construct
  source 1..20: mol_type = other DNA
tacaattagggagattttcc

SEQ ID NO: 215373 - DNA, 20 bp, synthetic construct
  source 1..20: mol_type = other DNA
atacaattagggagattttc

SEQ ID NO: 215374 - DNA, 20 bp, synthetic construct
  source 1..20: mol_type = other DNA
aatacaattagggagatttt

SEQ ID NO: 215375 - DNA, 20 bp, synthetic construct
  source 1..20: mol_type = other DNA
aaatacaattagggagattt

SEQ ID NO: 215376 - DNA, 20 bp, synthetic construct
  source 1..20: mol_type = other DNA
gaaatacaattagggagatt

SEQ ID NO: 215377 - DNA, 20 bp, synthetic construct
  source 1..20: mol_type = other DNA
agaaatacaattagggagat

SEQ ID NO: 215378 - DNA, 20 bp, synthetic construct
  source 1..20: mol_type = other DNA
gagaaatacaattagggaga

SEQ ID NO: 215379 - DNA, 20 bp, synthetic construct
  source 1..20: mol_type = other DNA
agagaaatacaattagggag

SEQ ID NO: 215380 - DNA, 20 bp, synthetic construct
  source 1..20: mol_type = other DNA
aagagaaatacaattaggga

SEQ ID NO: 215381 - DNA, 20 bp, synthetic construct
  source 1..20: mol_type = other DNA
gaagagaaatacaattaggg

SEQ ID NO: 215382 - DNA, 20 bp, synthetic construct
  source 1..20: mol_type = other DNA
tgaagagaaatacaattagg

SEQ ID NO: 215383 - DNA, 20 bp, synthetic construct
  source 1..20: mol_type = other DNA
gtgaagagaaatacaattag

SEQ ID NO: 215384 - DNA, 20 bp, synthetic construct
  source 1..20: mol_type = other DNA
tgtgaagagaaatacaatta

SEQ ID NO: 215385 - DNA, 20 bp, synthetic construct
  source 1..20: mol_type = other DNA
ctgtgaagagaaatacaatt

SEQ ID NO: 215386 - DNA, 20 bp, synthetic construct
  source 1..20: mol_type = other DNA
tctgtgaagagaaatacaat

SEQ ID NO: 215387 - DNA, 20 bp, synthetic construct
  source 1..20: mol_type = other DNA
ctctgtgaagagaaatacaa

SEQ ID NO: 215388 - DNA, 20 bp, synthetic construct
  source 1..20: mol_type = other DNA
tctctgtgaagagaaataca

SEQ ID NO: 215389 - DNA, 20 bp, synthetic construct
  source 1..20: mol_type = other DNA
ttctctgtgaagagaaatac

SEQ ID NO: 215390 - DNA, 20 bp, synthetic construct
  source 1..20: mol_type = other DNA
tttctctgtgaagagaaata

SEQ ID NO: 215391 - DNA, 20 bp, synthetic construct
  source 1..20: mol_type = other DNA
ctttctctgtgaagagaaat

SEQ ID NO: 215392 - DNA, 20 bp, synthetic construct
  source 1..20: mol_type = other DNA
gctttctctgtgaagagaaa

SEQ ID NO: 215393 - DNA, 20 bp, synthetic construct
  source 1..20: mol_type = other DNA
ggctttctctgtgaagagaa

SEQ ID NO: 215394 - DNA, 20 bp, synthetic construct
  source 1..20: mol_type = other DNA
gggctttctctgtgaagaga

SEQ ID NO: 215395 - DNA, 20 bp, synthetic construct
  source 1..20: mol_type = other DNA
ggggctttctctgtgaagag

SEQ ID NO: 215396 - DNA, 20 bp, synthetic construct
  source 1..20: mol_type = other DNA
aggggctttctctgtgaaga

SEQ ID NO: 215397 - DNA, 20 bp, synthetic construct
  source 1..20: mol_type = other DNA
caggggctttctctgtgaag

SEQ ID NO: 215398 - DNA, 20 bp, synthetic construct
  source 1..20: mol_type = other DNA
acaggggctttctctgtgaa

SEQ ID NO: 215399 - DNA, 20 bp, synthetic construct
  source 1..20: mol_type = other DNA
aacaggggctttctctgtga

SEQ ID NO: 215400 - DNA, 20 bp, synthetic construct
  source 1..20: mol_type = other DNA
caacaggggctttctctgtg

SEQ ID NO: 215401 - DNA, 20 bp, synthetic construct
  source 1..20: mol_type = other DNA
ccaacaggggctttctctgt

SEQ ID NO: 215402 - DNA, 20 bp, synthetic construct
  source 1..20: mol_type = other DNA
cccaacaggggctttctctg

SEQ ID NO: 215403 - DNA, 20 bp, synthetic construct
  source 1..20: mol_type = other DNA
gcccaacaggggctttctct

SEQ ID NO: 215404 - DNA, 20 bp, synthetic construct
  source 1..20: mol_type = other DNA
tgcccaacaggggctttctc

SEQ ID NO: 215405 - DNA, 20 bp, synthetic construct
  source 1..20: mol_type = other DNA
atgcccaacaggggctttct

SEQ ID NO: 215406 - DNA, 20 bp, synthetic construct
  source 1..20: mol_type = other DNA
tatgcccaacaggggctttc

SEQ ID NO: 215407 - DNA, 20 bp, synthetic construct
  source 1..20: mol_type = other DNA
atatgcccaacaggggcttt

SEQ ID NO: 215408 - DNA, 20 bp, synthetic construct
  source 1..20: mol_type = other DNA
tatatgcccaacaggggctt

SEQ ID NO: 215409 - DNA, 20 bp, synthetic construct
  source 1..20: mol_type = other DNA
atatatgcccaacaggggct

SEQ ID NO: 215410 - DNA, 20 bp, synthetic construct
  source 1..20: mol_type = other DNA
tatatatgcccaacaggggc

SEQ ID NO: 215411 - DNA, 20 bp, synthetic construct
  source 1..20: mol_type = other DNA
gtatatatgcccaacagggg

SEQ ID NO: 215412 - DNA, 20 bp, synthetic construct
  source 1..20: mol_type = other DNA
agtatatatgcccaacaggg

SEQ ID NO: 215413 - DNA, 20 bp, synthetic construct
  source 1..20: mol_type = other DNA
gagtatatatgcccaacagg

SEQ ID NO: 215414 - DNA, 20 bp, synthetic construct
  source 1..20: mol_type = other DNA
agagtatatatgcccaacag

SEQ ID NO: 215415 - DNA, 20 bp, synthetic construct
  source 1..20: mol_type = other DNA
tagagtatatatgcccaaca

SEQ ID NO: 215416 - DNA, 20 bp, synthetic construct
  source 1..20: mol_type = other DNA
ctagagtatatatgcccaac

SEQ ID NO: 215417 - DNA, 20 bp, synthetic construct
  source 1..20: mol_type = other DNA
actagagtatatatgcccaa

SEQ ID NO: 215418 - DNA, 20 bp, synthetic construct
  source 1..20: mol_type = other DNA
aactagagtatatatgccca

SEQ ID NO: 215419 - DNA, 20 bp, synthetic construct
  source 1..20: mol_type = other DNA
aaactagagtatatatgccc

SEQ ID NO: 215420 - DNA, 20 bp, synthetic construct
  source 1..20: mol_type = other DNA
caaactagagtatatatgcc

SEQ ID NO: 215421 - DNA, 20 bp, synthetic construct
  source 1..20: mol_type = other DNA
acaaactagagtatatatgc

SEQ ID NO: 215422 - DNA, 20 bp, synthetic construct
  source 1..20: mol_type = other DNA
aacaaactagagtatatatg

SEQ ID NO: 215423 - DNA, 20 bp, synthetic construct
  source 1..20: mol_type = other DNA
aaacaaactagagtatatat

SEQ ID NO: 215424 - DNA, 20 bp, synthetic construct
  source 1..20: mol_type = other DNA
taaacaaactagagtatata

SEQ ID NO: 215425 - DNA, 20 bp, synthetic construct
  source 1..20: mol_type = other DNA
ataaacaaactagagtatat

SEQ ID NO: 215426 - DNA, 20 bp, synthetic construct
  source 1..20: mol_type = other DNA
aataaacaaactagagtata

SEQ ID NO: 215427 - DNA, 20 bp, synthetic construct
  source 1..20: mol_type = other DNA
aaataaacaaactagagtat

SEQ ID NO: 215428 - DNA, 20 bp, synthetic construct
  source 1..20: mol_type = other DNA
caaataaacaaactagagta

SEQ ID NO: 215429 - DNA, 20 bp, synthetic construct
  source 1..20: mol_type = other DNA
acaaataaacaaactagagt

SEQ ID NO: 215430 - DNA, 20 bp, synthetic construct
  source 1..20: mol_type = other DNA
aacaaataaacaaactagag

SEQ ID NO: 215431 - DNA, 20 bp, synthetic construct
  source 1..20: mol_type = other DNA
aaacaaataaacaaactaga

SEQ ID NO: 215432 - DNA, 20 bp, synthetic construct
  source 1..20: mol_type = other DNA
caaacaaataaacaaactag

SEQ ID NO: 215433 - DNA, 20 bp, synthetic construct
  source 1..20: mol_type = other DNA
tcaaacaaataaacaaacta

SEQ ID NO: 215434 - DNA, 20 bp, synthetic construct
  source 1..20: mol_type = other DNA
gtcaaacaaataaacaaact

SEQ ID NO: 215435 - DNA, 20 bp, synthetic construct
  source 1..20: mol_type = other DNA
agtcaaacaaataaacaaac

SEQ ID NO: 215436 - DNA, 20 bp, synthetic construct
  source 1..20: mol_type = other DNA
tagtcaaacaaataaacaaa

SEQ ID NO: 215437 - DNA, 20 bp, synthetic construct
  source 1..20: mol_type = other DNA
gtagtcaaacaaataaacaa

SEQ ID NO: 215438 - DNA, 20 bp, synthetic construct
  source 1..20: mol_type = other DNA
tgtagtcaaacaaataaaca

SEQ ID NO: 215439 - DNA, 20 bp, synthetic construct
  source 1..20: mol_type = other DNA
gtgtagtcaaacaaataaac

SEQ ID NO: 215440 - DNA, 20 bp, synthetic construct
  source 1..20: mol_type = other DNA
tgtgtagtcaaacaaataaa

SEQ ID NO: 215441 - DNA, 20 bp, synthetic construct
  source 1..20: mol_type = other DNA
atgtgtagtcaaacaaataa

SEQ ID NO: 215442 - DNA, 20 bp, synthetic construct
  source 1..20: mol_type = other DNA
tatgtgtagtcaaacaaata

SEQ ID NO: 215443 - DNA, 20 bp, synthetic construct
  source 1..20: mol_type = other DNA
atatgtgtagtcaaacaaat

SEQ ID NO: 215444 - DNA, 20 bp, synthetic construct
  source 1..20: mol_type = other DNA
tatatgtgtagtcaaacaaa

SEQ ID NO: 215445 - DNA, 20 bp, synthetic construct
  source 1..20: mol_type = other DNA
atatatgtgtagtcaaacaa

SEQ ID NO: 215446 - DNA, 20 bp, synthetic construct
  source 1..20: mol_type = other DNA
catatatgtgtagtcaaaca

SEQ ID NO: 215447 - DNA, 20 bp, synthetic construct
  source 1..20: mol_type = other DNA
acatatatgtgtagtcaaac

SEQ ID NO: 215448 - DNA, 20 bp, synthetic construct
  source 1..20: mol_type = other DNA
tacatatatgtgtagtcaaa

SEQ ID NO: 215449 - DNA, 20 bp, synthetic construct
  source 1..20: mol_type = other DNA
atacatatatgtgtagtcaa

SEQ ID NO: 215450 - DNA, 20 bp, synthetic construct
  source 1..20: mol_type = other DNA
aatacatatatgtgtagtca

SEQ ID NO: 215451 - DNA, 20 bp, synthetic construct
  source 1..20: mol_type = other DNA
gaatacatatatgtgtagtc

SEQ ID NO: 215452 - DNA, 20 bp, synthetic construct
  source 1..20: mol_type = other DNA
agaatacatatatgtgtagt

SEQ ID NO: 215453 - DNA, 20 bp, synthetic construct
  source 1..20: mol_type = other DNA
aagaatacatatatgtgtag

SEQ ID NO: 215454 - DNA, 20 bp, synthetic construct
  source 1..20: mol_type = other DNA
aaagaatacatatatgtgta

SEQ ID NO: 215455 - DNA, 20 bp, synthetic construct
  source 1..20: mol_type = other DNA
aaaagaatacatatatgtgt

SEQ ID NO: 215456 - DNA, 20 bp, synthetic construct
  source 1..20: mol_type = other DNA
gaaaagaatacatatatgtg

SEQ ID NO: 215457 - DNA, 20 bp, synthetic construct
  source 1..20: mol_type = other DNA
agaaaagaatacatatatgt

SEQ ID NO: 215458 - DNA, 20 bp, synthetic construct
  source 1..20: mol_type = other DNA
aagaaaagaatacatatatg

SEQ ID NO: 215459 - DNA, 20 bp, synthetic construct
  source 1..20: mol_type = other DNA
taagaaaagaatacatatat

SEQ ID NO: 215460 - DNA, 20 bp, synthetic construct
  source 1..20: mol_type = other DNA
ataagaaaagaatacatata

SEQ ID NO: 215461 - DNA, 20 bp, synthetic construct
  source 1..20: mol_type = other DNA
cataagaaaagaatacatat

SEQ ID NO: 215462 - DNA, 20 bp, synthetic construct
  source 1..20: mol_type = other DNA
acataagaaaagaatacata

SEQ ID NO: 215463 - DNA, 20 bp, synthetic construct
  source 1..20: mol_type = other DNA
tacataagaaaagaatacat

SEQ ID NO: 215464 - DNA, 20 bp, synthetic construct
  source 1..20: mol_type = other DNA
atacataagaaaagaataca

SEQ ID NO: 215465 - DNA, 20 bp, synthetic construct
  source 1..20: mol_type = other DNA
tatacataagaaaagaatac

SEQ ID NO: 215466 - DNA, 20 bp, synthetic construct
  source 1..20: mol_type = other DNA
ttatacataagaaaagaata

SEQ ID NO: 215467 - DNA, 20 bp, synthetic construct
  source 1..20: mol_type = other DNA
tttatacataagaaaagaat

SEQ ID NO: 215468 - DNA, 20 bp, synthetic construct
  source 1..20: mol_type = other DNA
ttttatacataagaaaagaa

SEQ ID NO: 215469 - DNA, 20 bp, synthetic construct
  source 1..20: mol_type = other DNA
tttttatacataagaaaaga

SEQ ID NO: 215470 - DNA, 20 bp, synthetic construct
  source 1..20: mol_type = other DNA
atttttatacataagaaaag

SEQ ID NO: 215471 - DNA, 20 bp, synthetic construct
  source 1..20: mol_type = other DNA
aatttttatacataagaaaa

SEQ ID NO: 215472 - DNA, 20 bp, synthetic construct
  source 1..20: mol_type = other DNA
gaatttttatacataagaaa

SEQ ID NO: 215473 - DNA, 20 bp, synthetic construct
  source 1..20: mol_type = other DNA
agaatttttatacataagaa

SEQ ID NO: 215474 - DNA, 20 bp, synthetic construct
  source 1..20: mol_type = other DNA
cagaatttttatacataaga

SEQ ID NO: 215475 - DNA, 20 bp, synthetic construct
  source 1..20: mol_type = other DNA
tcagaatttttatacataag

SEQ ID NO: 215476 - DNA, 20 bp, synthetic construct
  source 1..20: mol_type = other DNA
ttcagaatttttatacataa

SEQ ID NO: 215477 - DNA, 20 bp, synthetic construct
  source 1..20: mol_type = other DNA
gttcagaatttttatacata

SEQ ID NO: 215478 - DNA, 20 bp, synthetic construct
  source 1..20: mol_type = other DNA
tgttcagaatttttatacat

SEQ ID NO: 215479 - DNA, 20 bp, synthetic construct
  source 1..20: mol_type = other DNA
atgttcagaatttttataca

SEQ ID NO: 215480 - DNA, 20 bp, synthetic construct
  source 1..20: mol_type = other DNA
catgttcagaatttttatac

SEQ ID NO: 215481 - DNA, 20 bp, synthetic construct
  source 1..20: mol_type = other DNA
gcatgttcagaatttttata

SEQ ID NO: 215482 - DNA, 20 bp, synthetic construct
  source 1..20: mol_type = other DNA
tgcatgttcagaatttttat

SEQ ID NO: 215483 - DNA, 20 bp, synthetic construct
  source 1..20: mol_type = other DNA
gtgcatgttcagaattttta

SEQ ID NO: 215484 - DNA, 20 bp, synthetic construct
  source 1..20: mol_type = other DNA
tgtgcatgttcagaattttt

SEQ ID NO: 215485 - DNA, 20 bp, synthetic construct
  source 1..20: mol_type = other DNA
atgtgcatgttcagaatttt

SEQ ID NO: 215486 - DNA, 20 bp, synthetic construct
  source 1..20: mol_type = other DNA
aatgtgcatgttcagaattt

SEQ ID NO: 215487 - DNA, 20 bp, synthetic construct
  source 1..20: mol_type = other DNA
aaatgtgcatgttcagaatt

SEQ ID NO: 215488 - DNA, 20 bp, synthetic construct
  source 1..20: mol_type = other DNA
gaaatgtgcatgttcagaat

SEQ ID NO: 215489 - DNA, 20 bp, synthetic construct
  source 1..20: mol_type = other DNA
agaaatgtgcatgttcagaa

SEQ ID NO: 215490 - DNA, 20 bp, synthetic construct
  source 1..20: mol_type = other DNA
cagaaatgtgcatgttcaga

SEQ ID NO: 215491 - DNA, 20 bp, synthetic construct
  source 1..20: mol_type = other DNA
gcagaaatgtgcatgttcag

SEQ ID NO: 215492 - DNA, 20 bp, synthetic construct
  source 1..20: mol_type = other DNA
tgcagaaatgtgcatgttca

SEQ ID NO: 215493 - DNA, 20 bp, synthetic construct
  source 1..20: mol_type = other DNA
ttgcagaaatgtgcatgttc

SEQ ID NO: 215494 - DNA, 20 bp, synthetic construct
  source 1..20: mol_type = other DNA
gttgcagaaatgtgcatgtt

SEQ ID NO: 215495 - DNA, 20 bp, synthetic construct
  source 1..20: mol_type = other DNA
agttgcagaaatgtgcatgt

SEQ ID NO: 215496 - DNA, 20 bp, synthetic construct
  source 1..20: mol_type = other DNA
tagttgcagaaatgtgcatg

SEQ ID NO: 215497 - DNA, 20 bp, synthetic construct
  source 1..20: mol_type = other DNA
gtagttgcagaaatgtgcat

SEQ ID NO: 215498 - DNA, 20 bp, synthetic construct
  source 1..20: mol_type = other DNA
agtagttgcagaaatgtgca

SEQ ID NO: 215499 - DNA, 20 bp, synthetic construct
  source 1..20: mol_type = other DNA
cagtagttgcagaaatgtgc

SEQ ID NO: 215500 - DNA, 20 bp, synthetic construct
  source 1..20: mol_type = other DNA
acagtagttgcagaaatgtg

SEQ ID NO: 215501 - DNA, 20 bp, synthetic construct
  source 1..20: mol_type = other DNA
aacagtagttgcagaaatgt

SEQ ID NO: 215502 - DNA, 20 bp, synthetic construct
  source 1..20: mol_type = other DNA
aaacagtagttgcagaaatg

SEQ ID NO: 215503 - DNA, 20 bp, synthetic construct
  source 1..20: mol_type = other DNA
aaaacagtagttgcagaaat

SEQ ID NO: 215504 - DNA, 20 bp, synthetic construct
  source 1..20: mol_type = other DNA
gaaaacagtagttgcagaaa

SEQ ID NO: 215505 - DNA, 20 bp, synthetic construct
  source 1..20: mol_type = other DNA
tgaaaacagtagttgcagaa

SEQ ID NO: 215506 - DNA, 20 bp, synthetic construct
  source 1..20: mol_type = other DNA
gtgaaaacagtagttgcaga

SEQ ID NO: 215507 - DNA, 20 bp, synthetic construct
  source 1..20: mol_type = other DNA
agtgaaaacagtagttgcag

SEQ ID NO: 215508 - DNA, 20 bp, synthetic construct
  source 1..20: mol_type = other DNA
aagtgaaaacagtagttgca

SEQ ID NO: 215509 - DNA, 20 bp, synthetic construct
  source 1..20: mol_type = other DNA
caagtgaaaacagtagttgc

SEQ ID NO: 215510 - DNA, 20 bp, synthetic construct
  source 1..20: mol_type = other DNA
tcaagtgaaaacagtagttg

SEQ ID NO: 215511 - DNA, 20 bp, synthetic construct
  source 1..20: mol_type = other DNA
atcaagtgaaaacagtagtt

SEQ ID NO: 215512 - DNA, 20 bp, synthetic construct
  source 1..20: mol_type = other DNA
catcaagtgaaaacagtagt

SEQ ID NO: 215513 - DNA, 20 bp, synthetic construct
  source 1..20: mol_type = other DNA
tcatcaagtgaaaacagtag

SEQ ID NO: 215514 - DNA, 20 bp, synthetic construct
  source 1..20: mol_type = other DNA
atcatcaagtgaaaacagta

SEQ ID NO: 215515 - DNA, 20 bp, synthetic construct
  source 1..20: mol_type = other DNA
catcatcaagtgaaaacagt

SEQ ID NO: 215516 - DNA, 20 bp, synthetic construct
  source 1..20: mol_type = other DNA
gcatcatcaagtgaaaacag

SEQ ID NO: 215517 - DNA, 20 bp, synthetic construct
  source 1..20: mol_type = other DNA
tgcatcatcaagtgaaaaca

SEQ ID NO: 215518 - DNA, 20 bp, synthetic construct
  source 1..20: mol_type = other DNA
atgcatcatcaagtgaaaac

SEQ ID NO: 215519 - DNA, 20 bp, synthetic construct
  source 1..20: mol_type = other DNA
catgcatcatcaagtgaaaa

SEQ ID NO: 215520 - DNA, 20 bp, synthetic construct
  source 1..20: mol_type = other DNA
ccatgcatcatcaagtgaaa

SEQ ID NO: 215521 - DNA, 20 bp, synthetic construct
  source 1..20: mol_type = other DNA
tccatgcatcatcaagtgaa

SEQ ID NO: 215522 - DNA, 20 bp, synthetic construct
  source 1..20: mol_type = other DNA
gtccatgcatcatcaagtga

SEQ ID NO: 215523 - DNA, 20 bp, synthetic construct
  source 1..20: mol_type = other DNA
ggtccatgcatcatcaagtg

SEQ ID NO: 215524 - DNA, 20 bp, synthetic construct
  source 1..20: mol_type = other DNA
aggtccatgcatcatcaagt

SEQ ID NO: 215525 - DNA, 20 bp, synthetic construct
  source 1..20: mol_type = other DNA
gaggtccatgcatcatcaag

SEQ ID NO: 215526 - DNA, 20 bp, synthetic construct
  source 1..20: mol_type = other DNA
agaggtccatgcatcatcaa

SEQ ID NO: 215527 - DNA, 20 bp, synthetic construct
  source 1..20: mol_type = other DNA
gagaggtccatgcatcatca

SEQ ID NO: 215528 - DNA, 20 bp, synthetic construct
  source 1..20: mol_type = other DNA
agagaggtccatgcatcatc

SEQ ID NO: 215529 - DNA, 20 bp, synthetic construct
  source 1..20: mol_type = other DNA
tagagaggtccatgcatcat

SEQ ID NO: 215530 - DNA, 20 bp, synthetic construct
  source 1..20: mol_type = other DNA
ctagagaggtccatgcatca

SEQ ID NO: 215531 - DNA, 20 bp, synthetic construct
  source 1..20: mol_type = other DNA
tctagagaggtccatgcatc

SEQ ID NO: 215532 - DNA, 20 bp, synthetic construct
  source 1..20: mol_type = other DNA
ctctagagaggtccatgcat

SEQ ID NO: 215533 - DNA, 20 bp, synthetic construct
  source 1..20: mol_type = other DNA
actctagagaggtccatgca

SEQ ID NO: 215534 - DNA, 20 bp, synthetic construct
  source 1..20: mol_type = other DNA
cactctagagaggtccatgc

SEQ ID NO: 215535 - DNA, 20 bp, synthetic construct
  source 1..20: mol_type = other DNA
acactctagagaggtccatg

SEQ ID NO: 215536 - DNA, 20 bp, synthetic construct
  source 1..20: mol_type = other DNA
tacactctagagaggtccat

SEQ ID NO: 215537 - DNA, 20 bp, synthetic construct
  source 1..20: mol_type = other DNA
gtacactctagagaggtcca

SEQ ID NO: 215538 - DNA, 20 bp, synthetic construct
  source 1..20: mol_type = other DNA
cgtacactctagagaggtcc

SEQ ID NO: 215539 - DNA, 20 bp, synthetic construct
  source 1..20: mol_type = other DNA
acgtacactctagagaggtc

SEQ ID NO: 215540 - DNA, 20 bp, synthetic construct
  source 1..20: mol_type = other DNA
aacgtacactctagagaggt

SEQ ID NO: 215541 - DNA, 20 bp, synthetic construct
  source 1..20: mol_type = other DNA
aaacgtacactctagagagg

SEQ ID NO: 215542 - DNA, 20 bp, synthetic construct
  source 1..20: mol_type = other DNA
gaaacgtacactctagagag

SEQ ID NO: 215543 - DNA, 20 bp, synthetic construct
  source 1..20: mol_type = other DNA
agaaacgtacactctagaga

SEQ ID NO: 215544 - DNA, 20 bp, synthetic construct
  source 1..20: mol_type = other DNA
aagaaacgtacactctagag

SEQ ID NO: 215545 - DNA, 20 bp, synthetic construct
  source 1..20: mol_type = other DNA
gaagaaacgtacactctaga

SEQ ID NO: 215546 - DNA, 20 bp, synthetic construct
  source 1..20: mol_type = other DNA
agaagaaacgtacactctag

SEQ ID NO: 215547 - DNA, 20 bp, synthetic construct
  source 1..20: mol_type = other DNA
aagaagaaacgtacactcta

SEQ ID NO: 215548 - DNA, 20 bp, synthetic construct
  source 1..20: mol_type = other DNA
gaagaagaaacgtacactct

SEQ ID NO: 215549 - DNA, 20 bp, synthetic construct
  source 1..20: mol_type = other DNA
ggaagaagaaacgtacactc

SEQ ID NO: 215550 - DNA, 20 bp, synthetic construct
  source 1..20: mol_type = other DNA
aggaagaagaaacgtacact

SEQ ID NO: 215551 - DNA, 20 bp, synthetic construct
  source 1..20: mol_type = other DNA
aaggaagaagaaacgtacac

SEQ ID NO: 215552 - DNA, 20 bp, synthetic construct
  source 1..20: mol_type = other DNA
taaggaagaagaaacgtaca

SEQ ID NO: 215553 - DNA, 20 bp, synthetic construct
  source 1..20: mol_type = other DNA
gtaaggaagaagaaacgtac

SEQ ID NO: 215554 - DNA, 20 bp, synthetic construct
  source 1..20: mol_type = other DNA
tgtaaggaagaagaaacgta

SEQ ID NO: 215555 - DNA, 20 bp, synthetic construct
  source 1..20: mol_type = other DNA
ttgtaaggaagaagaaacgt

SEQ ID NO: 215556 - DNA, 20 bp, synthetic construct
  source 1..20: mol_type = other DNA
tttgtaaggaagaagaaacg

SEQ ID NO: 215557 - DNA, 20 bp, synthetic construct
  source 1..20: mol_type = other DNA
ctttgtaaggaagaagaaac

SEQ ID NO: 215558 - DNA, 20 bp, synthetic construct
  source 1..20: mol_type = other DNA
gctttgtaaggaagaagaaa

SEQ ID NO: 215559 - DNA, 20 bp, synthetic construct
  source 1..20: mol_type = other DNA
tgctttgtaaggaagaagaa

SEQ ID NO: 215560 - DNA, 20 bp, synthetic construct
  source 1..20: mol_type = other DNA
ctgctttgtaaggaagaaga

SEQ ID NO: 215561 - DNA, 20 bp, synthetic construct
  source 1..20: mol_type = other DNA
actgctttgtaaggaagaag

SEQ ID NO: 215562 - DNA, 20 bp, synthetic construct
  source 1..20: mol_type = other DNA
aactgctttgtaaggaagaa

SEQ ID NO: 215563 - DNA, 20 bp, synthetic construct
  source 1..20: mol_type = other DNA
caactgctttgtaaggaaga

SEQ ID NO: 215564 - DNA, 20 bp, synthetic construct
  source 1..20: mol_type = other DNA
ccaactgctttgtaaggaag

SEQ ID NO: 215565 - DNA, 20 bp, synthetic construct
  source 1..20: mol_type = other DNA
gccaactgctttgtaaggaa

SEQ ID NO: 215566 - DNA, 20 bp, synthetic construct
  source 1..20: mol_type = other DNA
agccaactgctttgtaagga

SEQ ID NO: 215567 - DNA, 20 bp, synthetic construct
  source 1..20: mol_type = other DNA
aagccaactgctttgtaagg

SEQ ID NO: 215568 - DNA, 20 bp, synthetic construct
  source 1..20: mol_type = other DNA
gaagccaactgctttgtaag

SEQ ID NO: 215569 - DNA, 20 bp, synthetic construct
  source 1..20: mol_type = other DNA
cgaagccaactgctttgtaa

SEQ ID NO: 215570 - DNA, 20 bp, synthetic construct
  source 1..20: mol_type = other DNA
gcgaagccaactgctttgta

SEQ ID NO: 215571 - DNA, 20 bp, synthetic construct
  source 1..20: mol_type = other DNA
ggcgaagccaactgctttgt

SEQ ID NO: 215572 - DNA, 20 bp, synthetic construct
  source 1..20: mol_type = other DNA
gggcgaagccaactgctttg

SEQ ID NO: 215573 - DNA, 20 bp, synthetic construct
  source 1..20: mol_type = other DNA
tgggcgaagccaactgcttt

SEQ ID NO: 215574 - DNA, 20 bp, synthetic construct
  source 1..20: mol_type = other DNA
ctgggcgaagccaactgctt

SEQ ID NO: 215575 - DNA, 20 bp, synthetic construct
  source 1..20: mol_type = other DNA
cctgggcgaagccaactgct

SEQ ID NO: 215576 - DNA, 20 bp, synthetic construct
  source 1..20: mol_type = other DNA
ccctgggcgaagccaactgc

SEQ ID NO: 215577 - DNA, 20 bp, synthetic construct
  source 1..20: mol_type = other DNA
accctgggcgaagccaactg

SEQ ID NO: 215578 - DNA, 20 bp, synthetic construct
  source 1..20: mol_type = other DNA
caccctgggcgaagccaact

SEQ ID NO: 215579 - DNA, 20 bp, synthetic construct
  source 1..20: mol_type = other DNA
gcaccctgggcgaagccaac

SEQ ID NO: 215580 - DNA, 20 bp, synthetic construct
  source 1..20: mol_type = other DNA
tgcaccctgggcgaagccaa

SEQ ID NO: 215581 - DNA, 20 bp, synthetic construct
  source 1..20: mol_type = other DNA
gtgcaccctgggcgaagcca

SEQ ID NO: 215582 - DNA, 20 bp, synthetic construct
  source 1..20: mol_type = other DNA
ggtgcaccctgggcgaagcc

SEQ ID NO: 215583 - DNA, 20 bp, synthetic construct
  source 1..20: mol_type = other DNA
tggtgcaccctgggcgaagc

SEQ ID NO: 215584 - DNA, 20 bp, synthetic construct
  source 1..20: mol_type = other DNA
ctggtgcaccctgggcgaag

SEQ ID NO: 215585 - DNA, 20 bp, synthetic construct
  source 1..20: mol_type = other DNA
cctggtgcaccctgggcgaa

SEQ ID NO: 215586 - DNA, 20 bp, synthetic construct
  source 1..20: mol_type = other DNA
tcctggtgcaccctgggcga

SEQ ID NO: 215587 - DNA, 20 bp, synthetic construct
  source 1..20: mol_type = other DNA
gtcctggtgcaccctgggcg

SEQ ID NO: 215588 - DNA, 20 bp, synthetic construct
  source 1..20: mol_type = other DNA
tgtcctggtgcaccctgggc

SEQ ID NO: 215589 - DNA, 20 bp, synthetic construct
  source 1..20: mol_type = other DNA
gtgtcctggtgcaccctggg

SEQ ID NO: 215590 - DNA, 20 bp, synthetic construct
  source 1..20: mol_type = other DNA
cgtgtcctggtgcaccctgg

SEQ ID NO: 215591 - DNA, 20 bp, synthetic construct
  source 1..20: mol_type = other DNA
ccgtgtcctggtgcaccctg

SEQ ID NO: 215592 - DNA, 20 bp, synthetic construct
  source 1..20: mol_type = other DNA
accgtgtcctggtgcaccct

SEQ ID NO: 215593 - DNA, 20 bp, synthetic construct
  source 1..20: mol_type = other DNA
aaccgtgtcctggtgcaccc

SEQ ID NO: 215594 - DNA, 20 bp, synthetic construct
  source 1..20: mol_type = other DNA
aaaccgtgtcctggtgcacc

SEQ ID NO: 215595 - DNA, 20 bp, synthetic construct
  source 1..20: mol_type = other DNA
aaaaccgtgtcctggtgcac

SEQ ID NO: 215596 - DNA, 20 bp, synthetic construct
  source 1..20: mol_type = other DNA
caaaaccgtgtcctggtgca

SEQ ID NO: 215597 - DNA, 20 bp, synthetic construct
  source 1..20: mol_type = other DNA
ccaaaaccgtgtcctggtgc

SEQ ID NO: 215598 - DNA, 20 bp, synthetic construct
  source 1..20: mol_type = other DNA
gccaaaaccgtgtcctggtg

SEQ ID NO: 215599 - DNA, 20 bp, synthetic construct
  source 1..20: mol_type = other DNA
agccaaaaccgtgtcctggt

SEQ ID NO: 215600 - DNA, 20 bp, synthetic construct
  source 1..20: mol_type = other DNA
gagccaaaaccgtgtcctgg

SEQ ID NO: 215601 - DNA, 20 bp, synthetic construct
  source 1..20: mol_type = other DNA
agagccaaaaccgtgtcctg

SEQ ID NO: 215602 - DNA, 20 bp, synthetic construct
  source 1..20: mol_type = other DNA
cagagccaaaaccgtgtcct

SEQ ID NO: 215603 - DNA, 20 bp, synthetic construct
  source 1..20: mol_type = other DNA
acagagccaaaaccgtgtcc

SEQ ID NO: 215604 - DNA, 20 bp, synthetic construct
  source 1..20: mol_type = other DNA
gacagagccaaaaccgtgtc

SEQ ID NO: 215605 - DNA, 20 bp, synthetic construct
  source 1..20: mol_type = other DNA
ggacagagccaaaaccgtgt

SEQ ID NO: 215606 - DNA, 20 bp, synthetic construct
  source 1..20: mol_type = other DNA
gggacagagccaaaaccgtg

SEQ ID NO: 215607 - DNA, 20 bp, synthetic construct
  source 1..20: mol_type = other DNA
ggggacagagccaaaaccgt

SEQ ID NO: 215608 - DNA, 20 bp, synthetic construct
  source 1..20: mol_type = other DNA
tggggacagagccaaaaccg

SEQ ID NO: 215609 - DNA, 20 bp, synthetic construct
  source 1..20: mol_type = other DNA
ctggggacagagccaaaacc

SEQ ID NO: 215610 - DNA, 20 bp, synthetic construct
  source 1..20: mol_type = other DNA
cctggggacagagccaaaac

SEQ ID NO: 215611 - DNA, 20 bp, synthetic construct
  source 1..20: mol_type = other DNA
ccctggggacagagccaaaa

SEQ ID NO: 215612 - DNA, 20 bp, synthetic construct
  source 1..20: mol_type = other DNA
accctggggacagagccaaa

SEQ ID NO: 215613 - DNA, 20 bp, synthetic construct
  source 1..20: mol_type = other DNA
caccctggggacagagccaa

SEQ ID NO: 215614 - DNA, 20 bp, synthetic construct
  source 1..20: mol_type = other DNA
acaccctggggacagagcca

SEQ ID NO: 215615 - DNA, 20 bp, synthetic construct
  source 1..20: mol_type = other DNA
gacaccctggggacagagcc

SEQ ID NO: 215616 - DNA, 20 bp, synthetic construct
  source 1..20: mol_type = other DNA
tgacaccctggggacagagc

SEQ ID NO: 215617 - DNA, 20 bp, synthetic construct
  source 1..20: mol_type = other DNA
gtgacaccctggggacagag

SEQ ID NO: 215618 - DNA, 20 bp, synthetic construct
  source 1..20: mol_type = other DNA
cgtgacaccctggggacaga

SEQ ID NO: 215619 - DNA, 20 bp, synthetic construct
  source 1..20: mol_type = other DNA
ccgtgacaccctggggacag

SEQ ID NO: 215620 - DNA, 20 bp, synthetic construct
  source 1..20: mol_type = other DNA
cccgtgacaccctggggaca

SEQ ID NO: 215621 - DNA, 20 bp, synthetic construct
  source 1..20: mol_type = other DNA
tcccgtgacaccctggggac

SEQ ID NO: 215622 - DNA, 20 bp, synthetic construct
  source 1..20: mol_type = other DNA
gtcccgtgacaccctgggga

SEQ ID NO: 215623 - DNA, 20 bp, synthetic construct
  source 1..20: mol_type = other DNA
ggtcccgtgacaccctgggg

SEQ ID NO: 215624 - DNA, 20 bp, synthetic construct
  source 1..20: mol_type = other DNA
tggtcccgtgacaccctggg

SEQ ID NO: 215625 - DNA, 20 bp, synthetic construct
  source 1..20: mol_type = other DNA
ctggtcccgtgacaccctgg

SEQ ID NO: 215626 - DNA, 20 bp, synthetic construct
  source 1..20: mol_type = other DNA
cctggtcccgtgacaccctg

SEQ ID NO: 215627 - DNA, 20 bp, synthetic construct
  source 1..20: mol_type = other DNA
ccctggtcccgtgacaccct

SEQ ID NO: 215628 - DNA, 20 bp, synthetic construct
  source 1..20: mol_type = other DNA
cccctggtcccgtgacaccc

SEQ ID NO: 215629 - DNA, 20 bp, synthetic construct
  source 1..20: mol_type = other DNA
tcccctggtcccgtgacacc

SEQ ID NO: 215630 - DNA, 20 bp, synthetic construct
  source 1..20: mol_type = other DNA
atcccctggtcccgtgacac

SEQ ID NO: 215631 - DNA, 20 bp, synthetic construct
  source 1..20: mol_type = other DNA
catcccctggtcccgtgaca

SEQ ID NO: 215632 - DNA, 20 bp, synthetic construct
  source 1..20: mol_type = other DNA
tcatcccctggtcccgtgac

SEQ ID NO: 215633 - DNA, 20 bp, synthetic construct
  source 1..20: mol_type = other DNA
atcatcccctggtcccgtga

SEQ ID NO: 215634 - DNA, 20 bp, synthetic construct
  source 1..20: mol_type = other DNA
gatcatcccctggtcccgtg

SEQ ID NO: 215635 - DNA, 20 bp, synthetic construct
  source 1..20: mol_type = other DNA
agatcatcccctggtcccgt

SEQ ID NO: 215636 - DNA, 20 bp, synthetic construct
  source 1..20: mol_type = other DNA
gagatcatcccctggtcccg

SEQ ID NO: 215637 - DNA, 20 bp, synthetic construct
  source 1..20: mol_type = other DNA
tgagatcatcccctggtccc

SEQ ID NO: 215638 - DNA, 20 bp, synthetic construct
  source 1..20: mol_type = other DNA
gtgagatcatcccctggtcc

SEQ ID NO: 215639 - DNA, 20 bp, synthetic construct
  source 1..20: mol_type = other DNA
tgtgagatcatcccctggtc

SEQ ID NO: 215640 - DNA, 20 bp, synthetic construct
  source 1..20: mol_type = other DNA
ctgtgagatcatcccctggt

SEQ ID NO: 215641 - DNA, 20 bp, synthetic construct
  source 1..20: mol_type = other DNA
cctgtgagatcatcccctgg

SEQ ID NO: 215642 - DNA, 20 bp, synthetic construct
  source 1..20: mol_type = other DNA
ccctgtgagatcatcccctg

SEQ ID NO: 215643 - DNA, 20 bp, synthetic construct
  source 1..20: mol_type = other DNA
accctgtgagatcatcccct

SEQ ID NO: 215644 - DNA, 20 bp, synthetic construct
  source 1..20: mol_type = other DNA
gaccctgtgagatcatcccc

SEQ ID NO: 215645 - DNA, 20 bp, synthetic construct
  source 1..20: mol_type = other DNA
agaccctgtgagatcatccc

SEQ ID NO: 215646 - DNA, 20 bp, synthetic construct
  source 1..20: mol_type = other DNA
cagaccctgtgagatcatcc

SEQ ID NO: 215647 - DNA, 20 bp, synthetic construct
  source 1..20: mol_type = other DNA
gcagaccctgtgagatcatc

SEQ ID NO: 215648 - DNA, 20 bp, synthetic construct
  source 1..20: mol_type = other DNA
ggcagaccctgtgagatcat

SEQ ID NO: 215649 - DNA, 20 bp, synthetic construct
  source 1..20: mol_type = other DNA
tggcagaccctgtgagatca

SEQ ID NO: 215650 - DNA, 20 bp, synthetic construct
  source 1..20: mol_type = other DNA
atggcagaccctgtgagatc

SEQ ID NO: 215651 - DNA, 20 bp, synthetic construct
  source 1..20: mol_type = other DNA
gatggcagaccctgtgagat

SEQ ID NO: 215652 - DNA, 20 bp, synthetic construct
  source 1..20: mol_type = other DNA
agatggcagaccctgtgaga

SEQ ID NO: 215653 - DNA, 20 bp, synthetic construct
  source 1..20: mol_type = other DNA
cagatggcagaccctgtgag

SEQ ID NO: 215654 - DNA, 20 bp, synthetic construct
  source 1..20: mol_type = other DNA
gcagatggcagaccctgtga

SEQ ID NO: 215655 - DNA, 20 bp, synthetic construct
  source 1..20: mol_type = other DNA
ggcagatggcagaccctgtg

SEQ ID NO: 215656 - DNA, 20 bp, synthetic construct
  source 1..20: mol_type = other DNA
gggcagatggcagaccctgt

SEQ ID NO: 215657 - DNA, 20 bp, synthetic construct
  source 1..20: mol_type = other DNA
agggcagatggcagaccctg

SEQ ID NO: 215658 - DNA, 20 bp, synthetic construct
  source 1..20: mol_type = other DNA
cagggcagatggcagaccct

SEQ ID NO: 215659 - DNA, 20 bp, synthetic construct
  source 1..20: mol_type = other DNA
gcagggcagatggcagaccc

SEQ ID NO: 215660 - DNA, 20 bp, synthetic construct
  source 1..20: mol_type = other DNA
ggcagggcagatggcagacc

SEQ ID NO: 215661 - DNA, 20 bp, synthetic construct
  source 1..20: mol_type = other DNA
aggcagggcagatggcagac

SEQ ID NO: 215662 - DNA, 20 bp, synthetic construct
  source 1..20: mol_type = other DNA
caggcagggcagatggcaga

SEQ ID NO: 215663 - DNA, 20 bp, synthetic construct
  source 1..20: mol_type = other DNA
ccaggcagggcagatggcag

SEQ ID NO: 215664 - DNA, 20 bp, synthetic construct
  source 1..20: mol_type = other DNA
gccaggcagggcagatggca

SEQ ID NO: 215665 - DNA, 20 bp, synthetic construct
  source 1..20: mol_type = other DNA
ggccaggcagggcagatggc

SEQ ID NO: 215666 - DNA, 20 bp, synthetic construct
  source 1..20: mol_type = other DNA
cggccaggcagggcagatgg

SEQ ID NO: 215667 - DNA, 20 bp, synthetic construct
  source 1..20: mol_type = other DNA
ccggccaggcagggcagatg

SEQ ID NO: 215668 - DNA, 20 bp, synthetic construct
  source 1..20: mol_type = other DNA
tccggccaggcagggcagat

SEQ ID NO: 215669 - DNA, 20 bp, synthetic construct
  source 1..20: mol_type = other DNA
ctccggccaggcagggcaga

SEQ ID NO: 215670 - DNA, 20 bp, synthetic construct
  source 1..20: mol_type = other DNA
cctccggccaggcagggcag

SEQ ID NO: 215671 - DNA, 20 bp, synthetic construct
  source 1..20: mol_type = other DNA
gcctccggccaggcagggca

SEQ ID NO: 215672 - DNA, 20 bp, synthetic construct
  source 1..20: mol_type = other DNA
agcctccggccaggcagggc

SEQ ID NO: 215673 - DNA, 20 bp, synthetic construct
  source 1..20: mol_type = other DNA
cagcctccggccaggcaggg

SEQ ID NO: 215674 - DNA, 20 bp, synthetic construct
  source 1..20: mol_type = other DNA
gcagcctccggccaggcagg

SEQ ID NO: 215675 - DNA, 20 bp, synthetic construct
  source 1..20: mol_type = other DNA
tgcagcctccggccaggcag

SEQ ID NO: 215676 - DNA, 20 bp, synthetic construct
  source 1..20: mol_type = other DNA
atgcagcctccggccaggca

SEQ ID NO: 215677 - DNA, 20 bp, synthetic construct
  source 1..20: mol_type = other DNA
gatgcagcctccggccaggc

SEQ ID NO: 215678 - DNA, 20 bp, synthetic construct
  source 1..20: mol_type = other DNA
cgatgcagcctccggccagg

SEQ ID NO: 215679 - DNA, 20 bp, synthetic construct
  source 1..20: mol_type = other DNA
tcgatgcagcctccggccag

SEQ ID NO: 215680 - DNA, 20 bp, synthetic construct
  source 1..20: mol_type = other DNA
ctcgatgcagcctccggcca

SEQ ID NO: 215681 - DNA, 20 bp, synthetic construct
  source 1..20: mol_type = other DNA
tctcgatgcagcctccggcc

SEQ ID NO: 215682 - DNA, 20 bp, synthetic construct
  source 1..20: mol_type = other DNA
ctctcgatgcagcctccggc

SEQ ID NO: 215683 - DNA, 20 bp, synthetic construct
  source 1..20: mol_type = other DNA
cctctcgatgcagcctccgg

SEQ ID NO: 215684 - DNA, 20 bp, synthetic construct
  source 1..20: mol_type = other DNA
ccctctcgatgcagcctccg

SEQ ID NO: 215685 - DNA, 20 bp, synthetic construct
  source 1..20: mol_type = other DNA
gccctctcgatgcagcctcc

SEQ ID NO: 215686 - DNA, 20 bp, synthetic construct
  source 1..20: mol_type = other DNA
ggccctctcgatgcagcctc

SEQ ID NO: 215687 - DNA, 20 bp, synthetic construct
  source 1..20: mol_type = other DNA
tggccctctcgatgcagcct

SEQ ID NO: 215688 - DNA, 20 bp, synthetic construct
  source 1..20: mol_type = other DNA
ttggccctctcgatgcagcc

SEQ ID NO: 215689 - DNA, 20 bp, synthetic construct
  source 1..20: mol_type = other DNA
cttggccctctcgatgcagc

SEQ ID NO: 215690 - DNA, 20 bp, synthetic construct
  source 1..20: mol_type = other DNA
ccttggccctctcgatgcag

SEQ ID NO: 215691 - DNA, 20 bp, synthetic construct
  source 1..20: mol_type = other DNA
cccttggccctctcgatgca

SEQ ID NO: 215692 - DNA, 20 bp, synthetic construct
  source 1..20: mol_type = other DNA
ccccttggccctctcgatgc

SEQ ID NO: 215693 - DNA, 20 bp, synthetic construct
  source 1..20: mol_type = other DNA
gccccttggccctctcgatg

SEQ ID NO: 215694 - DNA, 20 bp, synthetic construct
  source 1..20: mol_type = other DNA
tgccccttggccctctcgat

SEQ ID NO: 215695 - DNA, 20 bp, synthetic construct
  source 1..20: mol_type = other DNA
gtgccccttggccctctcga

SEQ ID NO: 215696 - DNA, 20 bp, synthetic construct
  source 1..20: mol_type = other DNA
ggtgccccttggccctctcg

SEQ ID NO: 215697 - DNA, 20 bp, synthetic construct
  source 1..20: mol_type = other DNA
tggtgccccttggccctctc

SEQ ID NO: 215698 - DNA, 20 bp, synthetic construct
  source 1..20: mol_type = other DNA
gtggtgccccttggccctct

SEQ ID NO: 215699 - DNA, 20 bp, synthetic construct
  source 1..20: mol_type = other DNA
cgtggtgccccttggccctc

SEQ ID NO: 215700 - DNA, 20 bp, synthetic construct
  source 1..20: mol_type = other DNA
acgtggtgccccttggccct

SEQ ID NO: 215701 - DNA, 20 bp, synthetic construct
  source 1..20: mol_type = other DNA
cacgtggtgccccttggccc

SEQ ID NO: 215702 - DNA, 20 bp, synthetic construct
  source 1..20: mol_type = other DNA
acacgtggtgccccttggcc

SEQ ID NO: 215703 - DNA, 20 bp, synthetic construct
  source 1..20: mol_type = other DNA
gacacgtggtgccccttggc

SEQ ID NO: 215704 - DNA, 20 bp, synthetic construct
  source 1..20: mol_type = other DNA
cgacacgtggtgccccttgg

SEQ ID NO: 215705 - DNA, 20 bp, synthetic construct
  source 1..20: mol_type = other DNA
acgacacgtggtgccccttg

SEQ ID NO: 215706 - DNA, 20 bp, synthetic construct
  source 1..20: mol_type = other DNA
cacgacacgtggtgcccctt

SEQ ID NO: 215707 - DNA, 20 bp, synthetic construct
  source 1..20: mol_type = other DNA
ccacgacacgtggtgcccct

SEQ ID NO: 215708 - DNA, 20 bp, synthetic construct
  source 1..20: mol_type = other DNA
cccacgacacgtggtgcccc

SEQ ID NO: 215709 - DNA, 20 bp, synthetic construct
  source 1..20: mol_type = other DNA
acccacgacacgtggtgccc

SEQ ID NO: 215710 - DNA, 20 bp, synthetic construct
  source 1..20: mol_type = other DNA
tacccacgacacgtggtgcc

SEQ ID NO: 215711 - DNA, 20 bp, synthetic construct
  source 1..20: mol_type = other DNA
gtacccacgacacgtggtgc

SEQ ID NO: 215712 - DNA, 20 bp, synthetic construct
  source 1..20: mol_type = other DNA
agtacccacgacacgtggtg

SEQ ID NO: 215713 - DNA, 20 bp, synthetic construct
  source 1..20: mol_type = other DNA
cagtacccacgacacgtggt

SEQ ID NO: 215714 - DNA, 20 bp, synthetic construct
  source 1..20: mol_type = other DNA
acagtacccacgacacgtgg

SEQ ID NO: 215715 - DNA, 20 bp, synthetic construct
  source 1..20: mol_type = other DNA
gacagtacccacgacacgtg

SEQ ID NO: 215716 - DNA, 20 bp, synthetic construct
  source 1..20: mol_type = other DNA
tgacagtacccacgacacgt

SEQ ID NO: 215717 - DNA, 20 bp, synthetic construct
  source 1..20: mol_type = other DNA
ttgacagtacccacgacacg

SEQ ID NO: 215718 - DNA, 20 bp, synthetic construct
  source 1..20: mol_type = other DNA
tttgacagtacccacgacac

SEQ ID NO: 215719 - DNA, 20 bp, synthetic construct
  source 1..20: mol_type = other DNA
gtttgacagtacccacgaca

SEQ ID NO: 215720 - DNA, 20 bp, synthetic construct
  source 1..20: mol_type = other DNA
tgtttgacagtacccacgac

SEQ ID NO: 215721 - DNA, 20 bp, synthetic construct
  source 1..20: mol_type = other DNA
ttgtttgacagtacccacga

SEQ ID NO: 215722 - DNA, 20 bp, synthetic construct
  source 1..20: mol_type = other DNA
cttgtttgacagtacccacg

SEQ ID NO: 215723 - DNA, 20 bp, synthetic construct
  source 1..20: mol_type = other DNA
tcttgtttgacagtacccac

SEQ ID NO: 215724 - DNA, 20 bp, synthetic construct
  source 1..20: mol_type = other DNA
ctcttgtttgacagtaccca

SEQ ID NO: 215725 - DNA, 20 bp, synthetic construct
  source 1..20: mol_type = other DNA
gctcttgtttgacagtaccc

SEQ ID NO: 215726 - DNA, 20 bp, synthetic construct
  source 1..20: mol_type = other DNA
ggctcttgtttgacagtacc

SEQ ID NO: 215727 - DNA, 20 bp, synthetic construct
  source 1..20: mol_type = other DNA
aggctcttgtttgacagtac

SEQ ID NO: 215728 - DNA, 20 bp, synthetic construct
  source 1..20: mol_type = other DNA
aaggctcttgtttgacagta

SEQ ID NO: 215729 - DNA, 20 bp, synthetic construct
  source 1..20: mol_type = other DNA
gaaggctcttgtttgacagt

SEQ ID NO: 215730 - DNA, 20 bp, synthetic construct
  source 1..20: mol_type = other DNA
tgaaggctcttgtttgacag

SEQ ID NO: 215731 - DNA, 20 bp, synthetic construct
  source 1..20: mol_type = other DNA
ctgaaggctcttgtttgaca

SEQ ID NO: 215732 - DNA, 20 bp, synthetic construct
  source 1..20: mol_type = other DNA
tctgaaggctcttgtttgac

SEQ ID NO: 215733 - DNA, 20 bp, synthetic construct
  source 1..20: mol_type = other DNA
ctctgaaggctcttgtttga

SEQ ID NO: 215734 - DNA, 20 bp, synthetic construct
  source 1..20: mol_type = other DNA
gctctgaaggctcttgtttg

SEQ ID NO: 215735 - DNA, 20 bp, synthetic construct
  source 1..20: mol_type = other DNA
ggctctgaaggctcttgttt

SEQ ID NO: 215736 - DNA, 20 bp, synthetic construct
  source 1..20: mol_type = other DNA
aggctctgaaggctcttgtt

SEQ ID NO: 215737 - DNA, 20 bp, synthetic construct
  source 1..20: mol_type = other DNA
aaggctctgaaggctcttgt

SEQ ID NO: 215738 - DNA, 20 bp, synthetic construct
  source 1..20: mol_type = other DNA
gaaggctctgaaggctcttg

SEQ ID NO: 215739 - DNA, 20 bp, synthetic construct
  source 1..20: mol_type = other DNA
ggaaggctctgaaggctctt

SEQ ID NO: 215740 - DNA, 20 bp, synthetic construct
  source 1..20: mol_type = other DNA
tggaaggctctgaaggctct

SEQ ID NO: 215741 - DNA, 20 bp, synthetic construct
  source 1..20: mol_type = other DNA
gtggaaggctctgaaggctc

SEQ ID NO: 215742 - DNA, 20 bp, synthetic construct
  source 1..20: mol_type = other DNA
tgtggaaggctctgaaggct

SEQ ID NO: 215743 - DNA, 20 bp, synthetic construct
  source 1..20: mol_type = other DNA
ctgtggaaggctctgaaggc

SEQ ID NO: 215744 - DNA, 20 bp, synthetic construct
  source 1..20: mol_type = other DNA
actgtggaaggctctgaagg

SEQ ID NO: 215745 - DNA, 20 bp, synthetic construct
  source 1..20: mol_type = other DNA
gactgtggaaggctctgaag

SEQ ID NO: 215746 - DNA, 20 bp, synthetic construct
  source 1..20: mol_type = other DNA
agactgtggaaggctctgaa

SEQ ID NO: 215747 - DNA, 20 bp, synthetic construct
  source 1..20: mol_type = other DNA
aagactgtggaaggctctga

SEQ ID NO: 215748 - DNA, 20 bp, synthetic construct
  source 1..20: mol_type = other DNA
aaagactgtggaaggctctg

SEQ ID NO: 215749 - DNA, 20 bp, synthetic construct
  source 1..20: mol_type = other DNA
gaaagactgtggaaggctct

SEQ ID NO: 215750 - DNA, 20 bp, synthetic construct
  source 1..20: mol_type = other DNA
agaaagactgtggaaggctc

SEQ ID NO: 215751 - DNA, 20 bp, synthetic construct
  source 1..20: mol_type = other DNA
aagaaagactgtggaaggct

SEQ ID NO: 215752 - DNA, 20 bp, synthetic construct
  source 1..20: mol_type = other DNA
aaagaaagactgtggaaggc

SEQ ID NO: 215753 - DNA, 20 bp, synthetic construct
  source 1..20: mol_type = other DNA
aaaagaaagactgtggaagg

SEQ ID NO: 215754 - DNA, 20 bp, synthetic construct
  source 1..20: mol_type = other DNA
caaaagaaagactgtggaag

SEQ ID NO: 215755 - DNA, 20 bp, synthetic construct
  source 1..20: mol_type = other DNA
gcaaaagaaagactgtggaa

SEQ ID NO: 215756 - DNA, 20 bp, synthetic construct
  source 1..20: mol_type = other DNA
agcaaaagaaagactgtgga

SEQ ID NO: 215757 - DNA, 20 bp, synthetic construct
  source 1..20: mol_type = other DNA
aagcaaaagaaagactgtgg

SEQ ID NO: 215758 - DNA, 20 bp, synthetic construct
  source 1..20: mol_type = other DNA
gaagcaaaagaaagactgtg

SEQ ID NO: 215759 - DNA, 20 bp, synthetic construct
  source 1..20: mol_type = other DNA
ggaagcaaaagaaagactgt

SEQ ID NO: 215760 - DNA, 20 bp, synthetic construct
  source 1..20: mol_type = other DNA
gggaagcaaaagaaagactg

SEQ ID NO: 215761 - DNA, 20 bp, synthetic construct
  source 1..20: mol_type = other DNA
tgggaagcaaaagaaagact

SEQ ID NO: 215762 - DNA, 20 bp, synthetic construct
  source 1..20: mol_type = other DNA
ctgggaagcaaaagaaagac

SEQ ID NO: 215763 - DNA, 20 bp, synthetic construct
  source 1..20: mol_type = other DNA
gctgggaagcaaaagaaaga

SEQ ID NO: 215764 - DNA, 20 bp, synthetic construct
  source 1..20: mol_type = other DNA
tgctgggaagcaaaagaaag

SEQ ID NO: 215765 - DNA, 20 bp, synthetic construct
  source 1..20: mol_type = other DNA
atgctgggaagcaaaagaaa

SEQ ID NO: 215766 - DNA, 20 bp, synthetic construct
  source 1..20: mol_type = other DNA
aatgctgggaagcaaaagaa

SEQ ID NO: 215767 - DNA, 20 bp, synthetic construct
  source 1..20: mol_type = other DNA
caatgctgggaagcaaaaga

SEQ ID NO: 215768 - DNA, 20 bp, synthetic construct
  source 1..20: mol_type = other DNA
gcaatgctgggaagcaaaag

SEQ ID NO: 215769 - DNA, 20 bp, synthetic construct
  source 1..20: mol_type = other DNA
agcaatgctgggaagcaaaa

SEQ ID NO: 215770 - DNA, 20 bp, synthetic construct
  source 1..20: mol_type = other DNA
aagcaatgctgggaagcaaa

SEQ ID NO: 215771 - DNA, 20 bp, synthetic construct
  source 1..20: mol_type = other DNA
gaagcaatgctgggaagcaa

SEQ ID NO: 215772 - DNA, 20 bp, synthetic construct
  source 1..20: mol_type = other DNA
ggaagcaatgctgggaagca

SEQ ID NO: 215773 - DNA, 20 bp, synthetic construct
  source 1..20: mol_type = other DNA
gggaagcaatgctgggaagc

SEQ ID NO: 215774 - DNA, 20 bp, synthetic construct
  source 1..20: mol_type = other DNA
ggggaagcaatgctgggaag

SEQ ID NO: 215775 - DNA, 20 bp, synthetic construct
  source 1..20: mol_type = other DNA
cggggaagcaatgctgggaa

SEQ ID NO: 215776 - DNA, 20 bp, synthetic construct
  source 1..20: mol_type = other DNA
gcggggaagcaatgctggga

SEQ ID NO: 215777 - DNA, 20 bp, synthetic construct
  source 1..20: mol_type = other DNA
agcggggaagcaatgctggg

SEQ ID NO: 215778 - DNA, 20 bp, synthetic construct
  source 1..20: mol_type = other DNA
cagcggggaagcaatgctgg

SEQ ID NO: 215779 - DNA, 20 bp, synthetic construct
  source 1..20: mol_type = other DNA
ccagcggggaagcaatgctg

SEQ ID NO: 215780 - DNA, 20 bp, synthetic construct
  source 1..20: mol_type = other DNA
accagcggggaagcaatgct

SEQ ID NO: 215781 - DNA, 20 bp, synthetic construct
  source 1..20: mol_type = other DNA
caccagcggggaagcaatgc

SEQ ID NO: 215782 - DNA, 20 bp, synthetic construct
  source 1..20: mol_type = other DNA
ccaccagcggggaagcaatg

SEQ ID NO: 215783 - DNA, 20 bp, synthetic construct
  source 1..20: mol_type = other DNA
tccaccagcggggaagcaat

SEQ ID NO: 215784 - DNA, 20 bp, synthetic construct
  source 1..20: mol_type = other DNA
gtccaccagcggggaagcaa

SEQ ID NO: 215785 - DNA, 20 bp, synthetic construct
  source 1..20: mol_type = other DNA
agtccaccagcggggaagca

SEQ ID NO: 215786 - DNA, 20 bp, synthetic construct
  source 1..20: mol_type = other DNA
gagtccaccagcggggaagc

SEQ ID NO: 215787 - DNA, 20 bp, synthetic construct
  source 1..20: mol_type = other DNA
agagtccaccagcggggaag

SEQ ID NO: 215788 - DNA, 20 bp, synthetic construct
  source 1..20: mol_type = other DNA
cagagtccaccagcggggaa

SEQ ID NO: 215789 - DNA, 20 bp, synthetic construct
  source 1..20: mol_type = other DNA
tcagagtccaccagcgggga

SEQ ID NO: 215790 - DNA, 20 bp, synthetic construct
  source 1..20: mol_type = other DNA
ttcagagtccaccagcgggg

SEQ ID NO: 215791 - DNA, 20 bp, synthetic construct
  source 1..20: mol_type = other DNA
attcagagtccaccagcggg

SEQ ID NO: 215792 - DNA, 20 bp, synthetic construct
  source 1..20: mol_type = other DNA
gattcagagtccaccagcgg

SEQ ID NO: 215793 - DNA, 20 bp, synthetic construct
  source 1..20: mol_type = other DNA
agattcagagtccaccagcg

SEQ ID NO: 215794 - DNA, 20 bp, synthetic construct
  source 1..20: mol_type = other DNA
tagattcagagtccaccagc

SEQ ID NO: 215795 - DNA, 20 bp, synthetic construct
  source 1..20: mol_type = other DNA
ctagattcagagtccaccag

SEQ ID NO: 215796 - DNA, 20 bp, synthetic construct
  source 1..20: mol_type = other DNA
tctagattcagagtccacca

SEQ ID NO: 215797 - DNA, 20 bp, synthetic construct
  source 1..20: mol_type = other DNA
ttctagattcagagtccacc

SEQ ID NO: 215798 - DNA, 20 bp, synthetic construct
  source 1..20: mol_type = other DNA
gttctagattcagagtccac

SEQ ID NO: 215799 - DNA, 20 bp, synthetic construct
  source 1..20: mol_type = other DNA
agttctagattcagagtcca

SEQ ID NO: 215800 - DNA, 20 bp, synthetic construct
  source 1..20: mol_type = other DNA
tagttctagattcagagtcc

SEQ ID NO: 215801 - DNA, 20 bp, synthetic construct
  source 1..20: mol_type = other DNA
ctagttctagattcagagtc

SEQ ID NO: 215802 - DNA, 20 bp, synthetic construct
  source 1..20: mol_type = other DNA
gctagttctagattcagagt

SEQ ID NO: 215803 - DNA, 20 bp, synthetic construct
  source 1..20: mol_type = other DNA
agctagttctagattcagag

SEQ ID NO: 215804 - DNA, 20 bp, synthetic construct
  source 1..20: mol_type = other DNA
gagctagttctagattcaga

SEQ ID NO: 215805 - DNA, 20 bp, synthetic construct
  source 1..20: mol_type = other DNA
ggagctagttctagattcag

SEQ ID NO: 215806 - DNA, 20 bp, synthetic construct
  source 1..20: mol_type = other DNA
tggagctagttctagattca

SEQ ID NO: 215807 - DNA, 20 bp, synthetic construct
  source 1..20: mol_type = other DNA
ctggagctagttctagattc

SEQ ID NO: 215808 - DNA, 20 bp, synthetic construct
  source 1..20: mol_type = other DNA
cctggagctagttctagatt

SEQ ID NO: 215809 - DNA, 20 bp, synthetic construct
  source 1..20: mol_type = other DNA
gcctggagctagttctagat

SEQ ID NO: 215810 - DNA, 20 bp, synthetic construct
  source 1..20: mol_type = other DNA
cgcctggagctagttctaga

SEQ ID NO: 215811 - DNA, 20 bp, synthetic construct
  source 1..20: mol_type = other DNA
gcgcctggagctagttctag

SEQ ID NO: 215812 - DNA, 20 bp, synthetic construct
  source 1..20: mol_type = other DNA
ggcgcctggagctagttcta

SEQ ID NO: 215813 - DNA, 20 bp, synthetic construct
  source 1..20: mol_type = other DNA
aggcgcctggagctagttct

SEQ ID NO: 215814 - DNA, 20 bp, synthetic construct
  source 1..20: mol_type = other DNA
gaggcgcctggagctagttc

SEQ ID NO: 215815 - DNA, 20 bp, synthetic construct
  source 1..20: mol_type = other DNA
agaggcgcctggagctagtt

SEQ ID NO: 215816 - DNA, 20 bp, synthetic construct
  source 1..20: mol_type = other DNA
gagaggcgcctggagctagt

SEQ ID NO: 215817 - DNA, 20 bp, synthetic construct
  source 1..20: mol_type = other DNA
ggagaggcgcctggagctag

SEQ ID NO: 215818 - DNA, 20 bp, synthetic construct
  source 1..20: mol_type = other DNA
tggagaggcgcctggagcta

SEQ ID NO: 215819 - DNA, 20 bp, synthetic construct
  source 1..20: mol_type = other DNA
ttggagaggcgcctggagct

SEQ ID NO: 215820 - DNA, 20 bp, synthetic construct
  source 1..20: mol_type = other DNA
tttggagaggcgcctggagc

SEQ ID NO: 215821 - DNA, 20 bp, synthetic construct
  source 1..20: mol_type = other DNA
atttggagaggcgcctggag

SEQ ID NO: 215822 - DNA, 20 bp, synthetic construct
  source 1..20: mol_type = other DNA
aatttggagaggcgcctgga

SEQ ID NO: 215823 - DNA, 20 bp, synthetic construct
  source 1..20: mol_type = other DNA
gaatttggagaggcgcctgg

SEQ ID NO: 215824 - DNA, 20 bp, synthetic construct
  source 1..20: mol_type = other DNA
tgaatttggagaggcgcctg

SEQ ID NO: 215825 - DNA, 20 bp, synthetic construct
  source 1..20: mol_type = other DNA
ctgaatttggagaggcgcct

SEQ ID NO: 215826 - DNA, 20 bp, synthetic construct
  source 1..20: mol_type = other DNA
tctgaatttggagaggcgcc

SEQ ID NO: 215827 - DNA, 20 bp, synthetic construct
  source 1..20: mol_type = other DNA
gtctgaatttggagaggcgc

SEQ ID NO: 215828 - DNA, 20 bp, synthetic construct
  source 1..20: mol_type = other DNA
cgtctgaatttggagaggcg

SEQ ID NO: 215829 - DNA, 20 bp, synthetic construct
  source 1..20: mol_type = other DNA
ccgtctgaatttggagaggc

SEQ ID NO: 215830 - DNA, 20 bp, synthetic construct
  source 1..20: mol_type = other DNA
cccgtctgaatttggagagg

SEQ ID NO: 215831 - DNA, 20 bp, synthetic construct
  source 1..20: mol_type = other DNA
tcccgtctgaatttggagag

SEQ ID NO: 215832 - DNA, 20 bp, synthetic construct
  source 1..20: mol_type = other DNA
ctcccgtctgaatttggaga

SEQ ID NO: 215833 - DNA, 20 bp, synthetic construct
  source 1..20: mol_type = other DNA
gctcccgtctgaatttggag

SEQ ID NO: 215834 - DNA, 20 bp, synthetic construct
  source 1..20: mol_type = other DNA
agctcccgtctgaatttgga

SEQ ID NO: 215835 - DNA, 20 bp, synthetic construct
  source 1..20: mol_type = other DNA
cagctcccgtctgaatttgg

SEQ ID NO: 215836 - DNA, 20 bp, synthetic construct
  source 1..20: mol_type = other DNA
ccagctcccgtctgaatttg

SEQ ID NO: 215837 - DNA, 20 bp, synthetic construct
  source 1..20: mol_type = other DNA
cccagctcccgtctgaattt

SEQ ID NO: 215838 - DNA, 20 bp, synthetic construct
  source 1..20: mol_type = other DNA
ccccagctcccgtctgaatt

SEQ ID NO: 215839 - DNA, 20 bp, synthetic construct
  source 1..20: mol_type = other DNA
gccccagctcccgtctgaat

SEQ ID NO: 215840 - DNA, 20 bp, synthetic construct
  source 1..20: mol_type = other DNA
tgccccagctcccgtctgaa

SEQ ID NO: 215841 - DNA, 20 bp, synthetic construct
  source 1..20: mol_type = other DNA
gtgccccagctcccgtctga

SEQ ID NO: 215842 - DNA, 20 bp, synthetic construct
  source 1..20: mol_type = other DNA
agtgccccagctcccgtctg

SEQ ID NO: 215843 - DNA, 20 bp, synthetic construct
  source 1..20: mol_type = other DNA
tagtgccccagctcccgtct

SEQ ID NO: 215844 - DNA, 20 bp, synthetic construct
  source 1..20: mol_type = other DNA
atagtgccccagctcccgtc

SEQ ID NO: 215845 - DNA, 20 bp, synthetic construct
  source 1..20: mol_type = other DNA
aatagtgccccagctcccgt

SEQ ID NO: 215846 - DNA, 20 bp, synthetic construct
  source 1..20: mol_type = other DNA
taatagtgccccagctcccg

SEQ ID NO: 215847 - DNA, 20 bp, synthetic construct
  source 1..20: mol_type = other DNA
ataatagtgccccagctccc

SEQ ID NO: 215848 - DNA, 20 bp, synthetic construct
  source 1..20: mol_type = other DNA
tataatagtgccccagctcc

SEQ ID NO: 215849 - DNA, 20 bp, synthetic construct
  source 1..20: mol_type = other DNA
ttataatagtgccccagctc

SEQ ID NO: 215850 - DNA, 20 bp, synthetic construct
  source 1..20: mol_type = other DNA
attataatagtgccccagct

SEQ ID NO: 215851 - DNA, 20 bp, synthetic construct
  source 1..20: mol_type = other DNA
cattataatagtgccccagc

SEQ ID NO: 215852 - DNA, 20 bp, synthetic construct
  source 1..20: mol_type = other DNA
gcattataatagtgccccag

SEQ ID NO: 215853 - DNA, 20 bp, synthetic construct
  source 1..20: mol_type = other DNA
tgcattataatagtgcccca

SEQ ID NO: 215854 - DNA, 20 bp, synthetic construct
  source 1..20: mol_type = other DNA
ttgcattataatagtgcccc

SEQ ID NO: 215855 - DNA, 20 bp, synthetic construct
  source 1..20: mol_type = other DNA
tttgcattataatagtgccc

SEQ ID NO: 215856 - DNA, 20 bp, synthetic construct
  source 1..20: mol_type = other DNA
atttgcattataatagtgcc

SEQ ID NO: 215857 - DNA, 20 bp, synthetic construct
  source 1..20: mol_type = other DNA
gatttgcattataatagtgc

SEQ ID NO: 215858 - DNA, 20 bp, synthetic construct
  source 1..20: mol_type = other DNA
agatttgcattataatagtg

SEQ ID NO: 215859 - DNA, 20 bp, synthetic construct
  source 1..20: mol_type = other DNA
tagatttgcattataatagt

SEQ ID NO: 215860 - DNA, 20 bp, synthetic construct
  source 1..20: mol_type = other DNA
ctagatttgcattataatag

SEQ ID NO: 215861 - DNA, 20 bp, synthetic construct
  source 1..20: mol_type = other DNA
cctagatttgcattataata

SEQ ID NO: 215862 - DNA, 20 bp, synthetic construct
  source 1..20: mol_type = other DNA
gcctagatttgcattataat

SEQ ID NO: 215863 - DNA, 20 bp, synthetic construct
  source 1..20: mol_type = other DNA
tgcctagatttgcattataa

SEQ ID NO: 215864 - DNA, 20 bp, synthetic construct
  source 1..20: mol_type = other DNA
ttgcctagatttgcattata

SEQ ID NO: 215865 - DNA, 20 bp, synthetic construct
  source 1..20: mol_type = other DNA
tttgcctagatttgcattat

SEQ ID NO: 215866 - DNA, 20 bp, synthetic construct
  source 1..20: mol_type = other DNA
ctttgcctagatttgcatta

SEQ ID NO: 215867 - DNA, 20 bp, synthetic construct
  source 1..20: mol_type = other DNA
gctttgcctagatttgcatt

SEQ ID NO: 215868 - DNA, 20 bp, synthetic construct
  source 1..20: mol_type = other DNA
ggctttgcctagatttgcat

SEQ ID NO: 215869 - DNA, 20 bp, synthetic construct
  source 1..20: mol_type = other DNA
gggctttgcctagatttgca

SEQ ID NO: 215870 - DNA, 20 bp, synthetic construct
  source 1..20: mol_type = other DNA
agggctttgcctagatttgc

SEQ ID NO: 215871 - DNA, 20 bp, synthetic construct
  source 1..20: mol_type = other DNA
gagggctttgcctagatttg

SEQ ID NO: 215872 - DNA, 20 bp, synthetic construct
  source 1..20: mol_type = other DNA
ggagggctttgcctagattt

SEQ ID NO: 215873 - DNA, 20 bp, synthetic construct
  source 1..20: mol_type = other DNA
gggagggctttgcctagatt

SEQ ID NO: 215874 - DNA, 20 bp, synthetic construct
  source 1..20: mol_type = other DNA
tgggagggctttgcctagat

SEQ ID NO: 215875 - DNA, 20 bp, synthetic construct
  source 1..20: mol_type = other DNA
ttgggagggctttgcctaga

SEQ ID NO: 215876 - DNA, 20 bp, synthetic construct
  source 1..20: mol_type = other DNA
attgggagggctttgcctag

SEQ ID NO: 215877 - DNA, 20 bp, synthetic construct
  source 1..20: mol_type = other DNA
tattgggagggctttgccta

SEQ ID NO: 215878 - DNA, 20 bp, synthetic construct
  source 1..20: mol_type = other DNA
gtattgggagggctttgcct

SEQ ID NO: 215879 - DNA, 20 bp, synthetic construct
  source 1..20: mol_type = other DNA
ggtattgggagggctttgcc

SEQ ID NO: 215880 - DNA, 20 bp, synthetic construct
  source 1..20: mol_type = other DNA
tggtattgggagggctttgc

SEQ ID NO: 215881 - DNA, 20 bp, synthetic construct
  source 1..20: mol_type = other DNA
ctggtattgggagggctttg

SEQ ID NO: 215882 - DNA, 20 bp, synthetic construct
  source 1..20: mol_type = other DNA
cctggtattgggagggcttt

SEQ ID NO: 215883 - DNA, 20 bp, synthetic construct
  source 1..20: mol_type = other DNA
tcctggtattgggagggctt

SEQ ID NO: 215884 - DNA, 20 bp, synthetic construct
  source 1..20: mol_type = other DNA
atcctggtattgggagggct

SEQ ID NO: 215885 - DNA, 20 bp, synthetic construct
  source 1..20: mol_type = other DNA
gatcctggtattgggagggc

SEQ ID NO: 215886 - DNA, 20 bp, synthetic construct
  source 1..20: mol_type = other DNA
ggatcctggtattgggaggg

SEQ ID NO: 215887 - DNA, 20 bp, synthetic construct
  source 1..20: mol_type = other DNA
tggatcctggtattgggagg

SEQ ID NO: 215888 - DNA, 20 bp, synthetic construct
  source 1..20: mol_type = other DNA
ctggatcctggtattgggag

SEQ ID NO: 215889 - DNA, 20 bp, synthetic construct
  source 1..20: mol_type = other DNA
tctggatcctggtattggga

SEQ ID NO: 215890 - DNA, 20 bp, synthetic construct
  source 1..20: mol_type = other DNA
ttctggatcctggtattggg

SEQ ID NO: 215891 - DNA, 20 bp, synthetic construct
  source 1..20: mol_type = other DNA
attctggatcctggtattgg

SEQ ID NO: 215892 - DNA, 20 bp, synthetic construct
  source 1..20: mol_type = other DNA
cattctggatcctggtattg

SEQ ID NO: 215893 - DNA, 20 bp, synthetic construct
  source 1..20: mol_type = other DNA
ccattctggatcctggtatt

SEQ ID NO: 215894 - DNA, 20 bp, synthetic construct
  source 1..20: mol_type = other DNA
cccattctggatcctggtat

SEQ ID NO: 215895 - DNA, 20 bp, synthetic construct
  source 1..20: mol_type = other DNA
ccccattctggatcctggta

SEQ ID NO: 215896 - DNA, 20 bp, synthetic construct
  source 1..20: mol_type = other DNA
accccattctggatcctggt

SEQ ID NO: 215897 - DNA, 20 bp, synthetic construct
  source 1..20: mol_type = other DNA
caccccattctggatcctgg

SEQ ID NO: 215898 - DNA, 20 bp, synthetic construct
  source 1..20: mol_type = other DNA
ccaccccattctggatcctg

SEQ ID NO: 215899 - DNA, 20 bp, synthetic construct
  source 1..20: mol_type = other DNA
cccaccccattctggatcct

SEQ ID NO: 215900 - DNA, 20 bp, synthetic construct
  source 1..20: mol_type = other DNA
ccccaccccattctggatcc

SEQ ID NO: 215901 - DNA, 20 bp, synthetic construct
  source 1..20: mol_type = other DNA
gccccaccccattctggatc

SEQ ID NO: 215902 - DNA, 20 bp, synthetic construct
  source 1..20: mol_type = other DNA
ggccccaccccattctggat

SEQ ID NO: 215903 - DNA, 20 bp, synthetic construct
  source 1..20: mol_type = other DNA
gggccccaccccattctgga

SEQ ID NO: 215904 - DNA, 20 bp, synthetic construct
  source 1..20: mol_type = other DNA
agggccccaccccattctgg

SEQ ID NO: 215905 - DNA, 20 bp, synthetic construct
  source 1..20: mol_type = other DNA
aagggccccaccccattctg

SEQ ID NO: 215906 - DNA, 20 bp, synthetic construct
  source 1..20: mol_type = other DNA
aaagggccccaccccattct

SEQ ID NO: 215907 - DNA, 20 bp, synthetic construct
  source 1..20: mol_type = other DNA
caaagggccccaccccattc

SEQ ID NO: 215908 - DNA, 20 bp, synthetic construct
  source 1..20: mol_type = other DNA
gcaaagggccccaccccatt

SEQ ID NO: 215909 - DNA, 20 bp, synthetic construct
  source 1..20: mol_type = other DNA
ggcaaagggccccaccccat

SEQ ID NO: 215910 - DNA, 20 bp, synthetic construct
  source 1..20: mol_type = other DNA
gggcaaagggccccacccca

SEQ ID NO: 215911 - DNA, 20 bp, synthetic construct
  source 1..20: mol_type = other DNA
agggcaaagggccccacccc

SEQ ID NO: 215912 - DNA, 20 bp, synthetic construct
  source 1..20: mol_type = other DNA
cagggcaaagggccccaccc

SEQ ID NO: 215913 - DNA, 20 bp, synthetic construct
  source 1..20: mol_type = other DNA
tcagggcaaagggccccacc

SEQ ID NO: 215914 - DNA, 20 bp, synthetic construct
  source 1..20: mol_type = other DNA
ttcagggcaaagggccccac

SEQ ID NO: 215915 - DNA, 20 bp, synthetic construct
  source 1..20: mol_type = other DNA
tttcagggcaaagggcccca

SEQ ID NO: 215916 - DNA, 20 bp, synthetic construct
  source 1..20: mol_type = other DNA
ttttcagggcaaagggcccc

SEQ ID NO: 215917 - DNA, 20 bp, synthetic construct
  source 1..20: mol_type = other DNA
cttttcagggcaaagggccc

SEQ ID NO: 215918 - DNA, 20 bp, synthetic construct
  source 1..20: mol_type = other DNA
gcttttcagggcaaagggcc

SEQ ID NO: 215919 - DNA, 20 bp, synthetic construct
  source 1..20: mol_type = other DNA
agcttttcagggcaaagggc

SEQ ID NO: 215920 - DNA, 20 bp, synthetic construct
  source 1..20: mol_type = other DNA
cagcttttcagggcaaaggg

SEQ ID NO: 215921 - DNA, 20 bp, synthetic construct
  source 1..20: mol_type = other DNA
acagcttttcagggcaaagg

SEQ ID NO: 215922 - DNA, 20 bp, synthetic construct
  source 1..20: mol_type = other DNA
aacagcttttcagggcaaag

SEQ ID NO: 215923 - DNA, 20 bp, synthetic construct
  source 1..20: mol_type = other DNA
aaacagcttttcagggcaaa

SEQ ID NO: 215924 - DNA, 20 bp, synthetic construct
  source 1..20: mol_type = other DNA
taaacagcttttcagggcaa

SEQ ID NO: 215925 - DNA, 20 bp, synthetic construct
  source 1..20: mol_type = other DNA
ctaaacagcttttcagggca

SEQ ID NO: 215926 - DNA, 20 bp, synthetic construct
  source 1..20: mol_type = other DNA
actaaacagcttttcagggc

SEQ ID NO: 215927 - DNA, 20 bp, synthetic construct
  source 1..20: mol_type = other DNA
aactaaacagcttttcaggg

SEQ ID NO: 215928 - DNA, 20 bp, synthetic construct
  source 1..20: mol_type = other DNA
aaactaaacagcttttcagg

SEQ ID NO: 215929 - DNA, 20 bp, synthetic construct
  source 1..20: mol_type = other DNA
caaactaaacagcttttcag

SEQ ID NO: 215930 - DNA, 20 bp, synthetic construct
  source 1..20: mol_type = other DNA
tcaaactaaacagcttttca

SEQ ID NO: 215931 - DNA, 20 bp, synthetic construct
  source 1..20: mol_type = other DNA
ttcaaactaaacagcttttc

SEQ ID NO: 215932 - DNA, 20 bp, synthetic construct
  source 1..20: mol_type = other DNA
tttcaaactaaacagctttt

SEQ ID NO: 215933 - DNA, 20 bp, synthetic construct
  source 1..20: mol_type = other DNA
ttttcaaactaaacagcttt

SEQ ID NO: 215934 - DNA, 20 bp, synthetic construct
  source 1..20: mol_type = other DNA
attttcaaactaaacagctt

SEQ ID NO: 215935 - DNA, 20 bp, synthetic construct
  source 1..20: mol_type = other DNA
tattttcaaactaaacagct

SEQ ID NO: 215936 - DNA, 20 bp, synthetic construct
  source 1..20: mol_type = other DNA
gtattttcaaactaaacagc

SEQ ID NO: 215937 - DNA, 20 bp, synthetic construct
  source 1..20: mol_type = other DNA
tgtattttcaaactaaacag

SEQ ID NO: 215938 - DNA, 20 bp, synthetic construct
  source 1..20: mol_type = other DNA
ttgtattttcaaactaaaca

SEQ ID NO: 215939 - DNA, 20 bp, synthetic construct
  source 1..20: mol_type = other DNA
tttgtattttcaaactaaac

SEQ ID NO: 215940 - DNA, 20 bp, synthetic construct
  source 1..20: mol_type = other DNA
gtttgtattttcaaactaaa

SEQ ID NO: 215941 - DNA, 20 bp, synthetic construct
  source 1..20: mol_type = other DNA
tgtttgtattttcaaactaa

SEQ ID NO: 215942 - DNA, 20 bp, synthetic construct
  source 1..20: mol_type = other DNA
ctgtttgtattttcaaacta

SEQ ID NO: 215943 - DNA, 20 bp, synthetic construct
  source 1..20: mol_type = other DNA
cctgtttgtattttcaaact

SEQ ID NO: 215944 - DNA, 20 bp, synthetic construct
  source 1..20: mol_type = other DNA
tcctgtttgtattttcaaac

SEQ ID NO: 215945 - DNA, 20 bp, synthetic construct
  source 1..20: mol_type = other DNA
ctcctgtttgtattttcaaa

SEQ ID NO: 215946 - DNA, 20 bp, synthetic construct
  source 1..20: mol_type = other DNA
tctcctgtttgtattttcaa

SEQ ID NO: 215947 - DNA, 20 bp, synthetic construct
  source 1..20: mol_type = other DNA
gtctcctgtttgtattttca

SEQ ID NO: 215948 - DNA, 20 bp, synthetic construct
  source 1..20: mol_type = other DNA
tgtctcctgtttgtattttc

SEQ ID NO: 215949 - DNA, 20 bp, synthetic construct
  source 1..20: mol_type = other DNA
ctgtctcctgtttgtatttt

SEQ ID NO: 215950 - DNA, 20 bp, synthetic construct
  source 1..20: mol_type = other DNA
tctgtctcctgtttgtattt

SEQ ID NO: 215951 - DNA, 20 bp, synthetic construct
  source 1..20: mol_type = other DNA
ttctgtctcctgtttgtatt

SEQ ID NO: 215952 - DNA, 20 bp, synthetic construct
  source 1..20: mol_type = other DNA
tttctgtctcctgtttgtat

SEQ ID NO: 215953 - DNA, 20 bp, synthetic construct
  source 1..20: mol_type = other DNA
ttttctgtctcctgtttgta

SEQ ID NO: 215954 - DNA, 20 bp, synthetic construct
  source 1..20: mol_type = other DNA
cttttctgtctcctgtttgt

SEQ ID NO: 215955 - DNA, 20 bp, synthetic construct
  source 1..20: mol_type = other DNA
acttttctgtctcctgtttg

SEQ ID NO: 215956 - DNA, 20 bp, synthetic construct
  source 1..20: mol_type = other DNA
aacttttctgtctcctgttt

SEQ ID NO: 215957 - DNA, 20 bp, synthetic construct
  source 1..20: mol_type = other DNA
aaacttttctgtctcctgtt

SEQ ID NO: 215958 - DNA, 20 bp, synthetic construct
  source 1..20: mol_type = other DNA
caaacttttctgtctcctgt

SEQ ID NO: 215959 - DNA, 20 bp, synthetic construct
  source 1..20: mol_type = other DNA
ccaaacttttctgtctcctg

SEQ ID NO: 215960 - DNA, 20 bp, synthetic construct
  source 1..20: mol_type = other DNA
gccaaacttttctgtctcct

SEQ ID NO: 215961 - DNA, 20 bp, synthetic construct
  source 1..20: mol_type = other DNA
agccaaacttttctgtctcc

SEQ ID NO: 215962 - DNA, 20 bp, synthetic construct
  source 1..20: mol_type = other DNA
tagccaaacttttctgtctc

SEQ ID NO: 215963 - DNA, 20 bp, synthetic construct
  source 1..20: mol_type = other DNA
ttagccaaacttttctgtct

SEQ ID NO: 215964 - DNA, 20 bp, synthetic construct
  source 1..20: mol_type = other DNA
tttagccaaacttttctgtc

SEQ ID NO: 215965 - DNA, 20 bp, synthetic construct
  source 1..20: mol_type = other DNA
atttagccaaacttttctgt

SEQ ID NO: 215966 - DNA, 20 bp, synthetic construct
  source 1..20: mol_type = other DNA
aatttagccaaacttttctg

SEQ ID NO: 215967 - DNA, 20 bp, synthetic construct
  source 1..20: mol_type = other DNA
taatttagccaaacttttct

SEQ ID NO: 215968 - DNA, 20 bp, synthetic construct
  source 1..20: mol_type = other DNA
ttaatttagccaaacttttc

SEQ ID NO: 215969 - DNA, 20 bp, synthetic construct
  source 1..20: mol_type = other DNA
attaatttagccaaactttt

SEQ ID NO: 215970 - DNA, 20 bp, synthetic construct
  source 1..20: mol_type = other DNA
cattaatttagccaaacttt

SEQ ID NO: 215971 - DNA, 20 bp, synthetic construct
  source 1..20: mol_type = other DNA
ccattaatttagccaaactt

SEQ ID NO: 215972 - DNA, 20 bp, synthetic construct
  source 1..20: mol_type = other DNA
tccattaatttagccaaact

SEQ ID NO: 215973 - DNA, 20 bp, synthetic construct
  source 1..20: mol_type = other DNA
atccattaatttagccaaac

SEQ ID NO: 215974 - DNA, 20 bp, synthetic construct
  source 1..20: mol_type = other DNA
tatccattaatttagccaaa

SEQ ID NO: 215975 - DNA, 20 bp, synthetic construct
  source 1..20: mol_type = other DNA
ttatccattaatttagccaa

SEQ ID NO: 215976 - DNA, 20 bp, synthetic construct
  source 1..20: mol_type = other DNA
tttatccattaatttagcca

SEQ ID NO: 215977 - DNA, 20 bp, synthetic construct
  source 1..20: mol_type = other DNA
ctttatccattaatttagcc

SEQ ID NO: 215978 - DNA, 20 bp, synthetic construct
  source 1..20: mol_type = other DNA
actttatccattaatttagc

SEQ ID NO: 215979 - DNA, 20 bp, synthetic construct
  source 1..20: mol_type = other DNA
aactttatccattaatttag

SEQ ID NO: 215980 - DNA, 20 bp, synthetic construct
  source 1..20: mol_type = other DNA
aaactttatccattaattta

SEQ ID NO: 215981 - DNA, 20 bp, synthetic construct
  source 1..20: mol_type = other DNA
aaaactttatccattaattt

SEQ ID NO: 215982 - DNA, 20 bp, synthetic construct
  source 1..20: mol_type = other DNA
taaaactttatccattaatt

SEQ ID NO: 215983 - DNA, 20 bp, synthetic construct
  source 1..20: mol_type = other DNA
ttaaaactttatccattaat

SEQ ID NO: 215984 - DNA, 20 bp, synthetic construct
  source 1..20: mol_type = other DNA
gttaaaactttatccattaa

SEQ ID NO: 215985 - DNA, 20 bp, synthetic construct
  source 1..20: mol_type = other DNA
cgttaaaactttatccatta

SEQ ID NO: 215986 - DNA, 20 bp, synthetic construct
  source 1..20: mol_type = other DNA
tcgttaaaactttatccatt

SEQ ID NO: 215987 - DNA, 20 bp, synthetic construct
  source 1..20: mol_type = other DNA
atcgttaaaactttatccat

SEQ ID NO: 215988 - DNA, 20 bp, synthetic construct
  source 1..20: mol_type = other DNA
catcgttaaaactttatcca

SEQ ID NO: 215989 - DNA, 20 bp, synthetic construct
  source 1..20: mol_type = other DNA
ccatcgttaaaactttatcc

SEQ ID NO: 215990 - DNA, 20 bp, synthetic construct
  source 1..20: mol_type = other DNA
accatcgttaaaactttatc

SEQ ID NO: 215991 - DNA, 20 bp, synthetic construct
  source 1..20: mol_type = other DNA
taccatcgttaaaactttat

SEQ ID NO: 215992 - DNA, 20 bp, synthetic construct
  source 1..20: mol_type = other DNA
ttaccatcgttaaaacttta

SEQ ID NO: 215993 - DNA, 20 bp, synthetic construct
  source 1..20: mol_type = other DNA
gttaccatcgttaaaacttt

SEQ ID NO: 215994 - DNA, 20 bp, synthetic construct
  source 1..20: mol_type = other DNA
ggttaccatcgttaaaactt

SEQ ID NO: 215995 - DNA, 20 bp, synthetic construct
  source 1..20: mol_type = other DNA
tggttaccatcgttaaaact

SEQ ID NO: 215996 - DNA, 20 bp, synthetic construct
  source 1..20: mol_type = other DNA
atggttaccatcgttaaaac

SEQ ID NO: 215997 - DNA, 20 bp, synthetic construct
  source 1..20: mol_type = other DNA
tatggttaccatcgttaaaa

SEQ ID NO: 215998 - DNA, 20 bp, synthetic construct
  source 1..20: mol_type = other DNA
ctatggttaccatcgttaaa

SEQ ID NO: 215999 - DNA, 20 bp, synthetic construct
  source 1..20: mol_type = other DNA
actatggttaccatcgttaa

SEQ ID NO: 216000 - DNA, 20 bp, synthetic construct
  source 1..20: mol_type = other DNA
tactatggttaccatcgtta

SEQ ID NO: 216001 - DNA, 20 bp, synthetic construct
  source 1..20: mol_type = other DNA
ctactatggttaccatcgtt

SEQ ID NO: 216002 - DNA, 20 bp, synthetic construct
  source 1..20: mol_type = other DNA
cctactatggttaccatcgt

SEQ ID NO: 216003 - DNA, 20 bp, synthetic construct
  source 1..20: mol_type = other DNA
ccctactatggttaccatcg

SEQ ID NO: 216004 - DNA, 20 bp, synthetic construct
  source 1..20: mol_type = other DNA
accctactatggttaccatc

SEQ ID NO: 216005 - DNA, 20 bp, synthetic construct
  source 1..20: mol_type = other DNA
aaccctactatggttaccat

SEQ ID NO: 216006 - DNA, 20 bp, synthetic construct
  source 1..20: mol_type = other DNA
gaaccctactatggttacca

SEQ ID NO: 216007 - DNA, 20 bp, synthetic construct
  source 1..20: mol_type = other DNA
tgaaccctactatggttacc

SEQ ID NO: 216008 - DNA, 20 bp, synthetic construct
  source 1..20: mol_type = other DNA
atgaaccctactatggttac

SEQ ID NO: 216009 - DNA, 20 bp, synthetic construct
  source 1..20: mol_type = other DNA
gatgaaccctactatggtta

SEQ ID NO: 216010 - DNA, 20 bp, synthetic construct
  source 1..20: mol_type = other DNA
cgatgaaccctactatggtt

SEQ ID NO: 216011 - DNA, 20 bp, synthetic construct
  source 1..20: mol_type = other DNA
tcgatgaaccctactatggt

SEQ ID NO: 216012 - DNA, 20 bp, synthetic construct
  source 1..20: mol_type = other DNA
gtcgatgaaccctactatgg

SEQ ID NO: 216013 - DNA, 20 bp, synthetic construct
  source 1..20: mol_type = other DNA
tgtcgatgaaccctactatg

SEQ ID NO: 216014 - DNA, 20 bp, synthetic construct
  source 1..20: mol_type = other DNA
ctgtcgatgaaccctactat

SEQ ID NO: 216015 - DNA, 20 bp, synthetic construct
  source 1..20: mol_type = other DNA
gctgtcgatgaaccctacta

SEQ ID NO: 216016 - DNA, 20 bp, synthetic construct
  source 1..20: mol_type = other DNA
ggctgtcgatgaaccctact

SEQ ID NO: 216017 - DNA, 20 bp, synthetic construct
  source 1..20: mol_type = other DNA
tggctgtcgatgaaccctac

SEQ ID NO: 216018 - DNA, 20 bp, synthetic construct
  source 1..20: mol_type = other DNA
ctggctgtcgatgaacccta

SEQ ID NO: 216019 - DNA, 20 bp, synthetic construct
  source 1..20: mol_type = other DNA
gctggctgtcgatgaaccct

SEQ ID NO: 216020 - DNA, 20 bp, synthetic construct
  source 1..20: mol_type = other DNA
cgctggctgtcgatgaaccc

SEQ ID NO: 216021 - DNA, 20 bp, synthetic construct
  source 1..20: mol_type = other DNA
tcgctggctgtcgatgaacc

SEQ ID NO: 216022 - DNA, 20 bp, synthetic construct
  source 1..20: mol_type = other DNA
atcgctggctgtcgatgaac

SEQ ID NO: 216023 - DNA, 20 bp, synthetic construct
  source 1..20: mol_type = other DNA
catcgctggctgtcgatgaa

SEQ ID NO: 216024 - DNA, 20 bp, synthetic construct
  source 1..20: mol_type = other DNA
ccatcgctggctgtcgatga

SEQ ID NO: 216025 - DNA, 20 bp, synthetic construct
  source 1..20: mol_type = other DNA
accatcgctggctgtcgatg

SEQ ID NO: 216026 - DNA, 20 bp, synthetic construct
  source 1..20: mol_type = other DNA
aaccatcgctggctgtcgat

SEQ ID NO: 216027 - DNA, 20 bp, synthetic construct
  source 1..20: mol_type = other DNA
gaaccatcgctggctgtcga

SEQ ID NO: 216028 - DNA, 20 bp, synthetic construct
  source 1..20: mol_type = other DNA
agaaccatcgctggctgtcg

SEQ ID NO: 216029 - DNA, 20 bp, synthetic construct
  source 1..20: mol_type = other DNA
cagaaccatcgctggctgtc

SEQ ID NO: 216030 - DNA, 20 bp, synthetic construct
  source 1..20: mol_type = other DNA
tcagaaccatcgctggctgt

SEQ ID NO: 216031 - DNA, 20 bp, synthetic construct
  source 1..20: mol_type = other DNA
ttcagaaccatcgctggctg

SEQ ID NO: 216032 - DNA, 20 bp, synthetic construct
  source 1..20: mol_type = other DNA
gttcagaaccatcgctggct

SEQ ID NO: 216033 - DNA, 20 bp, synthetic construct
  source 1..20: mol_type = other DNA
tgttcagaaccatcgctggc

SEQ ID NO: 216034 - DNA, 20 bp, synthetic construct
  source 1..20: mol_type = other DNA
gtgttcagaaccatcgctgg

SEQ ID NO: 216035 - DNA, 20 bp, synthetic construct
  source 1..20: mol_type = other DNA
agtgttcagaaccatcgctg

SEQ ID NO: 216036 - DNA, 20 bp, synthetic construct
  source 1..20: mol_type = other DNA
aagtgttcagaaccatcgct

SEQ ID NO: 216037 - DNA, 20 bp, synthetic construct
  source 1..20: mol_type = other DNA
caagtgttcagaaccatcgc

SEQ ID NO: 216038 - DNA, 20 bp, synthetic construct
  source 1..20: mol_type = other DNA
tcaagtgttcagaaccatcg

SEQ ID NO: 216039 - DNA, 20 bp, synthetic construct
  source 1..20: mol_type = other DNA
gtcaagtgttcagaaccatc

SEQ ID NO: 216040 - DNA, 20 bp, synthetic construct
  source 1..20: mol_type = other DNA
tgtcaagtgttcagaaccat

SEQ ID NO: 216041 - DNA, 20 bp, synthetic construct
  source 1..20: mol_type = other DNA
atgtcaagtgttcagaacca

SEQ ID NO: 216042 - DNA, 20 bp, synthetic construct
  source 1..20: mol_type = other DNA
catgtcaagtgttcagaacc

SEQ ID NO: 216043 - DNA, 20 bp, synthetic construct
  source 1..20: mol_type = other DNA
acatgtcaagtgttcagaac

SEQ ID NO: 216044 - DNA, 20 bp, synthetic construct
  source 1..20: mol_type = other DNA
tacatgtcaagtgttcagaa

SEQ ID NO: 216045 - DNA, 20 bp, synthetic construct
  source 1..20: mol_type = other DNA
atacatgtcaagtgttcaga

SEQ ID NO: 216046 - DNA, 20 bp, synthetic construct
  source 1..20: mol_type = other DNA
aatacatgtcaagtgttcag

SEQ ID NO: 216047 - DNA, 20 bp, synthetic construct
  source 1..20: mol_type = other DNA
taatacatgtcaagtgttca

SEQ ID NO: 216048 - DNA, 20 bp, synthetic construct
  source 1..20: mol_type = other DNA
ttaatacatgtcaagtgttc

SEQ ID NO: 216049 - DNA, 20 bp, synthetic construct
  source 1..20: mol_type = other DNA
gttaatacatgtcaagtgtt

SEQ ID NO: 216050 - DNA, 20 bp, synthetic construct
  source 1..20: mol_type = other DNA
agttaatacatgtcaagtgt

SEQ ID NO: 216051 - DNA, 20 bp, synthetic construct
  source 1..20: mol_type = other DNA
gagttaatacatgtcaagtg

SEQ ID NO: 216052 - DNA, 20 bp, synthetic construct
  source 1..20: mol_type = other DNA
tgagttaatacatgtcaagt

SEQ ID NO: 216053 - DNA, 20 bp, synthetic construct
  source 1..20: mol_type = other DNA
gtgagttaatacatgtcaag

SEQ ID NO: 216054 - DNA, 20 bp, synthetic construct
  source 1..20: mol_type = other DNA
ggtgagttaatacatgtcaa

SEQ ID NO: 216055 - DNA, 20 bp, synthetic construct
  source 1..20: mol_type = other DNA
aggtgagttaatacatgtca

SEQ ID NO: 216056 - DNA, 20 bp, synthetic construct
  source 1..20: mol_type = other DNA
taggtgagttaatacatgtc

SEQ ID NO: 216057 - DNA, 20 bp, synthetic construct
  source 1..20: mol_type = other DNA
ttaggtgagttaatacatgt

SEQ ID NO: 216058 - DNA, 20 bp, synthetic construct
  source 1..20: mol_type = other DNA
attaggtgagttaatacatg

SEQ ID NO: 216059 - DNA, 20 bp, synthetic construct
  source 1..20: mol_type = other DNA
gattaggtgagttaatacat

SEQ ID NO: 216060 - DNA, 20 bp, synthetic construct
  source 1..20: mol_type = other DNA
ggattaggtgagttaataca

SEQ ID NO: 216061 - DNA, 20 bp, synthetic construct
  source 1..20: mol_type = other DNA
gggattaggtgagttaatac

SEQ ID NO: 216062 - DNA, 20 bp, synthetic construct
  source 1..20: mol_type = other DNA
ggggattaggtgagttaata

SEQ ID NO: 216063 - DNA, 20 bp, synthetic construct
  source 1..20: mol_type = other DNA
tggggattaggtgagttaat

SEQ ID NO: 216064 - DNA, 20 bp, synthetic construct
  source 1..20: mol_type = other DNA
gtggggattaggtgagttaa

SEQ ID NO: 216065 - DNA, 20 bp, synthetic construct
  source 1..20: mol_type = other DNA
tgtggggattaggtgagtta

SEQ ID NO: 216066 - DNA, 20 bp, synthetic construct
  source 1..20: mol_type = other DNA
atgtggggattaggtgagtt

SEQ ID NO: 216067 - DNA, 20 bp, synthetic construct
  source 1..20: mol_type = other DNA
aatgtggggattaggtgagt

SEQ ID NO: 216068 - DNA, 20 bp, synthetic construct
  source 1..20: mol_type = other DNA
aaatgtggggattaggtgag

SEQ ID NO: 216069 - DNA, 20 bp, synthetic construct
  source 1..20: mol_type = other DNA
aaaatgtggggattaggtga

SEQ ID NO: 216070 - DNA, 20 bp, synthetic construct
  source 1..20: mol_type = other DNA
taaaatgtggggattaggtg

SEQ ID NO: 216071 - DNA, 20 bp, synthetic construct
  source 1..20: mol_type = other DNA
gtaaaatgtggggattaggt

SEQ ID NO: 216072 - DNA, 20 bp, synthetic construct
  source 1..20: mol_type = other DNA
tgtaaaatgtggggattagg

SEQ ID NO: 216073 - DNA, 20 bp, synthetic construct
  source 1..20: mol_type = other DNA
ctgtaaaatgtggggattag

SEQ ID NO: 216074 - DNA, 20 bp, synthetic construct
  source 1..20: mol_type = other DNA
tctgtaaaatgtggggatta

SEQ ID NO: 216075 - DNA, 20 bp, synthetic construct
  source 1..20: mol_type = other DNA
gtctgtaaaatgtggggatt

SEQ ID NO: 216076 - DNA, 20 bp, synthetic construct
  source 1..20: mol_type = other DNA
tgtctgtaaaatgtggggat

SEQ ID NO: 216077 - DNA, 20 bp, synthetic construct
  source 1..20: mol_type = other DNA
ttgtctgtaaaatgtgggga

SEQ ID NO: 216078 - DNA, 20 bp, synthetic construct
  source 1..20: mol_type = other DNA
attgtctgtaaaatgtgggg

SEQ ID NO: 216079 - DNA, 20 bp, synthetic construct
  source 1..20: mol_type = other DNA
cattgtctgtaaaatgtggg

SEQ ID NO: 216080 - DNA, 20 bp, synthetic construct
  source 1..20: mol_type = other DNA
gcattgtctgtaaaatgtgg

SEQ ID NO: 216081 - DNA, 20 bp, synthetic construct
  source 1..20: mol_type = other DNA
tgcattgtctgtaaaatgtg

SEQ ID NO: 216082 - DNA, 20 bp, synthetic construct
  source 1..20: mol_type = other DNA
ttgcattgtctgtaaaatgt

SEQ ID NO: 216083 - DNA, 20 bp, synthetic construct
  source 1..20: mol_type = other DNA
tttgcattgtctgtaaaatg

SEQ ID NO: 216084 - DNA, 20 bp, synthetic construct
  source 1..20: mol_type = other DNA
ctttgcattgtctgtaaaat

SEQ ID NO: 216085 - DNA, 20 bp, synthetic construct
  source 1..20: mol_type = other DNA
cctttgcattgtctgtaaaa

SEQ ID NO: 216086 - DNA, 20 bp, synthetic construct
  source 1..20: mol_type = other DNA
tcctttgcattgtctgtaaa

SEQ ID NO: 216087 - DNA, 20 bp, synthetic construct
  source 1..20: mol_type = other DNA
ctcctttgcattgtctgtaa

SEQ ID NO: 216088 - DNA, 20 bp, synthetic construct
  source 1..20: mol_type = other DNA
cctcctttgcattgtctgta

SEQ ID NO: 216089 - DNA, 20 bp, synthetic construct
  source 1..20: mol_type = other DNA
gcctcctttgcattgtctgt

SEQ ID NO: 216090 - DNA, 20 bp, synthetic construct
  source 1..20: mol_type = other DNA
agcctcctttgcattgtctg

SEQ ID NO: 216091 - DNA, 20 bp, synthetic construct
  source 1..20: mol_type = other DNA
gagcctcctttgcattgtct

SEQ ID NO: 216092 - DNA, 20 bp, synthetic construct
  source 1..20: mol_type = other DNA
agagcctcctttgcattgtc

SEQ ID NO: 216093 - DNA, 20 bp, synthetic construct
  source 1..20: mol_type = other DNA
cagagcctcctttgcattgt

SEQ ID NO: 216094 - DNA, 20 bp, synthetic construct
  source 1..20: mol_type = other DNA
ccagagcctcctttgcattg

SEQ ID NO: 216095 - DNA, 20 bp, synthetic construct
  source 1..20: mol_type = other DNA
cccagagcctcctttgcatt

SEQ ID NO: 216096 - DNA, 20 bp, synthetic construct
  source 1..20: mol_type = other DNA
tcccagagcctcctttgcat

SEQ ID NO: 216097 - DNA, 20 bp, synthetic construct
  source 1..20: mol_type = other DNA
ctcccagagcctcctttgca

SEQ ID NO: 216098 - DNA, 20 bp, synthetic construct
  source 1..20: mol_type = other DNA
cctcccagagcctcctttgc

SEQ ID NO: 216099 - DNA, 20 bp, synthetic construct
  source 1..20: mol_type = other DNA
acctcccagagcctcctttg

SEQ ID NO: 216100 - DNA, 20 bp, synthetic construct
  source 1..20: mol_type = other DNA
aacctcccagagcctccttt

SEQ ID NO: 216101 - DNA, 20 bp, synthetic construct
  source 1..20: mol_type = other DNA
caacctcccagagcctcctt

SEQ ID NO: 216102 - DNA, 20 bp, synthetic construct
  source 1..20: mol_type = other DNA
tcaacctcccagagcctcct

SEQ ID NO: 216103 - DNA, 20 bp, synthetic construct
  source 1..20: mol_type = other DNA
ctcaacctcccagagcctcc

SEQ ID NO: 216104 - DNA, 20 bp, synthetic construct
  source 1..20: mol_type = other DNA
actcaacctcccagagcctc

SEQ ID NO: 216105 - DNA, 20 bp, synthetic construct
  source 1..20: mol_type = other DNA
cactcaacctcccagagcct

SEQ ID NO: 216106 - DNA, 20 bp, synthetic construct
  source 1..20: mol_type = other DNA
tcactcaacctcccagagcc

SEQ ID NO: 216107 - DNA, 20 bp, synthetic construct
  source 1..20: mol_type = other DNA
gtcactcaacctcccagagc

SEQ ID NO: 216108 - DNA, 20 bp, synthetic construct
  source 1..20: mol_type = other DNA
agtcactcaacctcccagag

SEQ ID NO: 216109 - DNA, 20 bp, synthetic construct
  source 1..20: mol_type = other DNA
aagtcactcaacctcccaga

SEQ ID NO: 216110 - DNA, 20 bp, synthetic construct
  source 1..20: mol_type = other DNA
caagtcactcaacctcccag

SEQ ID NO: 216111 - DNA, 20 bp, synthetic construct
  source 1..20: mol_type = other DNA
gcaagtcactcaacctccca

SEQ ID NO: 216112 - DNA, 20 bp, synthetic construct
  source 1..20: mol_type = other DNA
ggcaagtcactcaacctccc

SEQ ID NO: 216113 - DNA, 20 bp, synthetic construct
  source 1..20: mol_type = other DNA
gggcaagtcactcaacctcc

SEQ ID NO: 216114 - DNA, 20 bp, synthetic construct
  source 1..20: mol_type = other DNA
ggggcaagtcactcaacctc

SEQ ID NO: 216115 - DNA, 20 bp, synthetic construct
  source 1..20: mol_type = other DNA
tggggcaagtcactcaacct

SEQ ID NO: 216116 - DNA, 20 bp, synthetic construct
  source 1..20: mol_type = other DNA
ttggggcaagtcactcaacc

SEQ ID NO: 216117 - DNA, 20 bp, synthetic construct
  source 1..20: mol_type = other DNA
tttggggcaagtcactcaac

SEQ ID NO: 216118 - DNA, 20 bp, synthetic construct
  source 1..20: mol_type = other DNA
ctttggggcaagtcactcaa

SEQ ID NO: 216119 - DNA, 20 bp, synthetic construct
  source 1..20: mol_type = other DNA
actttggggcaagtcactca

SEQ ID NO: 216120 - DNA, 20 bp, synthetic construct
  source 1..20: mol_type = other DNA
gactttggggcaagtcactc

SEQ ID NO: 216121 - DNA, 20 bp, synthetic construct
  source 1..20: mol_type = other DNA
cgactttggggcaagtcact

SEQ ID NO: 216122 - DNA, 20 bp, synthetic construct
  source 1..20: mol_type = other DNA
gcgactttggggcaagtcac

SEQ ID NO: 216123 - DNA, 20 bp, synthetic construct
  source 1..20: mol_type = other DNA
tgcgactttggggcaagtca

SEQ ID NO: 216124 - DNA, 20 bp, synthetic construct
  source 1..20: mol_type = other DNA
gtgcgactttggggcaagtc

SEQ ID NO: 216125 - DNA, 20 bp, synthetic construct
  source 1..20: mol_type = other DNA
tgtgcgactttggggcaagt

SEQ ID NO: 216126 - DNA, 20 bp, synthetic construct
  source 1..20: mol_type = other DNA
ctgtgcgactttggggcaag

SEQ ID NO: 216127 - DNA, 20 bp, synthetic construct
  source 1..20: mol_type = other DNA
gctgtgcgactttggggcaa

SEQ ID NO: 216128 - DNA, 20 bp, synthetic construct
  source 1..20: mol_type = other DNA
agctgtgcgactttggggca

SEQ ID NO: 216129 - DNA, 20 bp, synthetic construct
  source 1..20: mol_type = other DNA
gagctgtgcgactttggggc

SEQ ID NO: 216130 - DNA, 20 bp, synthetic construct
  source 1..20: mol_type = other DNA
ggagctgtgcgactttgggg

SEQ ID NO: 216131 - DNA, 20 bp, synthetic construct
  source 1..20: mol_type = other DNA
aggagctgtgcgactttggg

SEQ ID NO: 216132 - DNA, 20 bp, synthetic construct
  source 1..20: mol_type = other DNA
taggagctgtgcgactttgg

SEQ ID NO: 216133 - DNA, 20 bp, synthetic construct
  source 1..20: mol_type = other DNA
ttaggagctgtgcgactttg

SEQ ID NO: 216134 - DNA, 20 bp, synthetic construct
  source 1..20: mol_type = other DNA
cttaggagctgtgcgacttt

SEQ ID NO: 216135 - DNA, 20 bp, synthetic construct
  source 1..20: mol_type = other DNA
acttaggagctgtgcgactt

SEQ ID NO: 216136 - DNA, 20 bp, synthetic construct
  source 1..20: mol_type = other DNA
cacttaggagctgtgcgact

SEQ ID NO: 216137 - DNA, 20 bp, synthetic construct
  source 1..20: mol_type = other DNA
tcacttaggagctgtgcgac

SEQ ID NO: 216138 - DNA, 20 bp, synthetic construct
  source 1..20: mol_type = other DNA
ttcacttaggagctgtgcga

SEQ ID NO: 216139 - DNA, 20 bp, synthetic construct
  source 1..20: mol_type = other DNA
cttcacttaggagctgtgcg

SEQ ID NO: 216140 - DNA, 20 bp, synthetic construct
  source 1..20: mol_type = other DNA
ccttcacttaggagctgtgc

SEQ ID NO: 216141 - DNA, 20 bp, synthetic construct
  source 1..20: mol_type = other DNA
tccttcacttaggagctgtg

SEQ ID NO: 216142 - DNA, 20 bp, synthetic construct
  source 1..20: mol_type = other DNA
atccttcacttaggagctgt

SEQ ID NO: 216143 - DNA, 20 bp, synthetic construct
  source 1..20: mol_type = other DNA
aatccttcacttaggagctg

SEQ ID NO: 216144 - DNA, 20 bp, synthetic construct
  source 1..20: mol_type = other DNA
gaatccttcacttaggagct

SEQ ID NO: 216145 - DNA, 20 bp, synthetic construct
  source 1..20: mol_type = other DNA
cgaatccttcacttaggagc

SEQ ID NO: 216146 - DNA, 20 bp, synthetic construct
  source 1..20: mol_type = other DNA
ccgaatccttcacttaggag

SEQ ID NO: 216147 - DNA, 20 bp, synthetic construct
  source 1..20: mol_type = other DNA
tccgaatccttcacttagga

SEQ ID NO: 216148 - DNA, 20 bp, synthetic construct
  source 1..20: mol_type = other DNA
ctccgaatccttcacttagg

SEQ ID NO: 216149 - DNA, 20 bp, synthetic construct
  source 1..20: mol_type = other DNA
actccgaatccttcacttag

SEQ ID NO: 216150 - DNA, 20 bp, synthetic construct
  source 1..20: mol_type = other DNA
cactccgaatccttcactta

SEQ ID NO: 216151 - DNA, 20 bp, synthetic construct
  source 1..20: mol_type = other DNA
ccactccgaatccttcactt

SEQ ID NO: 216152 - DNA, 20 bp, synthetic construct
  source 1..20: mol_type = other DNA
tccactccgaatccttcact

SEQ ID NO: 216153 - DNA, 20 bp, synthetic construct
  source 1..20: mol_type = other DNA
gtccactccgaatccttcac

SEQ ID NO: 216154 - DNA, 20 bp, synthetic construct
  source 1..20: mol_type = other DNA
agtccactccgaatccttca

SEQ ID NO: 216155 - DNA, 20 bp, synthetic construct
  source 1..20: mol_type = other DNA
gagtccactccgaatccttc

SEQ ID NO: 216156 - DNA, 20 bp, synthetic construct
  source 1..20: mol_type = other DNA
ggagtccactccgaatcctt

SEQ ID NO: 216157 - DNA, 20 bp, synthetic construct
  source 1..20: mol_type = other DNA
tggagtccactccgaatcct

SEQ ID NO: 216158 - DNA, 20 bp, synthetic construct
  source 1..20: mol_type = other DNA
ctggagtccactccgaatcc

SEQ ID NO: 216159 - DNA, 20 bp, synthetic construct
  source 1..20: mol_type = other DNA
cctggagtccactccgaatc

SEQ ID NO: 216160 - DNA, 20 bp, synthetic construct
  source 1..20: mol_type = other DNA
gcctggagtccactccgaat

SEQ ID NO: 216161 - DNA, 20 bp, synthetic construct
  source 1..20: mol_type = other DNA
tgcctggagtccactccgaa

SEQ ID NO: 216162 - DNA, 20 bp, synthetic construct
  source 1..20: mol_type = other DNA
ctgcctggagtccactccga

SEQ ID NO: 216163 - DNA, 20 bp, synthetic construct
  source 1..20: mol_type = other DNA
gctgcctggagtccactccg

SEQ ID NO: 216164 - DNA, 20 bp, synthetic construct
  source 1..20: mol_type = other DNA
ggctgcctggagtccactcc

SEQ ID NO: 216165 - DNA, 20 bp, synthetic construct
  source 1..20: mol_type = other DNA
aggctgcctggagtccactc

SEQ ID NO: 216166 - DNA, 20 bp, synthetic construct
  source 1..20: mol_type = other DNA
caggctgcctggagtccact

SEQ ID NO: 216167 - DNA, 20 bp, synthetic construct
  source 1..20: mol_type = other DNA
ccaggctgcctggagtccac

SEQ ID NO: 216168 - DNA, 20 bp, synthetic construct
  source 1..20: mol_type = other DNA
accaggctgcctggagtcca

SEQ ID NO: 216169 - DNA, 20 bp, synthetic construct
  source 1..20: mol_type = other DNA
gaccaggctgcctggagtcc

SEQ ID NO: 216170 - DNA, 20 bp, synthetic construct
  source 1..20: mol_type = other DNA
agaccaggctgcctggagtc

SEQ ID NO: 216171 - DNA, 20 bp, synthetic construct
  source 1..20: mol_type = other DNA
cagaccaggctgcctggagt

SEQ ID NO: 216172 - DNA, 20 bp, synthetic construct
  source 1..20: mol_type = other DNA
tcagaccaggctgcctggag

SEQ ID NO: 216173 - DNA, 20 bp, synthetic construct
  source 1..20: mol_type = other DNA
gtcagaccaggctgcctgga

SEQ ID NO: 216174 - DNA, 20 bp, synthetic construct
  source 1..20: mol_type = other DNA
agtcagaccaggctgcctgg

SEQ ID NO: 216175 - DNA, 20 bp, synthetic construct
  source 1..20: mol_type = other DNA
gagtcagaccaggctgcctg

SEQ ID NO: 216176 - DNA, 20 bp, synthetic construct
  source 1..20: mol_type = other DNA
ggagtcagaccaggctgcct

SEQ ID NO: 216177 - DNA, 20 bp, synthetic construct
  source 1..20: mol_type = other DNA
gggagtcagaccaggctgcc

SEQ ID NO: 216178 - DNA, 20 bp, synthetic construct
  source 1..20: mol_type = other DNA
agggagtcagaccaggctgc

SEQ ID NO: 216179 - DNA, 20 bp, synthetic construct
  source 1..20: mol_type = other DNA
cagggagtcagaccaggctg

SEQ ID NO: 216180 - DNA, 20 bp, synthetic construct
  source 1..20: mol_type = other DNA
gcagggagtcagaccaggct

SEQ ID NO: 216181 - DNA, 20 bp, synthetic construct
  source 1..20: mol_type = other DNA
tgcagggagtcagaccaggc

SEQ ID NO: 216182 - DNA, 20 bp, synthetic construct
  source 1..20: mol_type = other DNA
gtgcagggagtcagaccagg

SEQ ID NO: 216183 - DNA, 20 bp, synthetic construct
  source 1..20: mol_type = other DNA
agtgcagggagtcagaccag

SEQ ID NO: 216184 - DNA, 20 bp, synthetic construct
  source 1..20: mol_type = other DNA
cagtgcagggagtcagacca

SEQ ID NO: 216185 - DNA, 20 bp, synthetic construct
  source 1..20: mol_type = other DNA
gcagtgcagggagtcagacc

SEQ ID NO: 216186 - DNA, 20 bp, synthetic construct
  source 1..20: mol_type = other DNA
cgcagtgcagggagtcagac

SEQ ID NO: 216187 - DNA, 20 bp, synthetic construct
  source 1..20: mol_type = other DNA
gcgcagtgcagggagtcaga

SEQ ID NO: 216188 - DNA, 20 bp, synthetic construct
  source 1..20: mol_type = other DNA
agcgcagtgcagggagtcag

SEQ ID NO: 216189 - DNA, 20 bp, synthetic construct
  source 1..20: mol_type = other DNA
cagcgcagtgcagggagtca

SEQ ID NO: 216190 - DNA, 20 bp, synthetic construct
  source 1..20: mol_type = other DNA
acagcgcagtgcagggagtc

SEQ ID NO: 216191 - DNA, 20 bp, synthetic construct
  source 1..20: mol_type = other DNA
cacagcgcagtgcagggagt

SEQ ID NO: 216192 - DNA, 20 bp, synthetic construct
  source 1..20: mol_type = other DNA
gcacagcgcagtgcagggag

SEQ ID NO: 216193 - DNA, 20 bp, synthetic construct
  source 1..20: mol_type = other DNA
agcacagcgcagtgcaggga

SEQ ID NO: 216194 - DNA, 20 bp, synthetic construct
  source 1..20: mol_type = other DNA
aagcacagcgcagtgcaggg

SEQ ID NO: 216195 - DNA, 20 bp, synthetic construct
  source 1..20: mol_type = other DNA
taagcacagcgcagtgcagg

SEQ ID NO: 216196 - DNA, 20 bp, synthetic construct
  source 1..20: mol_type = other DNA
ataagcacagcgcagtgcag

SEQ ID NO: 216197 - DNA, 20 bp, synthetic construct
  source 1..20: mol_type = other DNA
gataagcacagcgcagtgca

SEQ ID NO: 216198 - DNA, 20 bp, synthetic construct
  source 1..20: mol_type = other DNA
agataagcacagcgcagtgc

SEQ ID NO: 216199 - DNA, 20 bp, synthetic construct
  source 1..20: mol_type = other DNA
gagataagcacagcgcagtg

SEQ ID NO: 216200 - DNA, 20 bp, synthetic construct
  source 1..20: mol_type = other DNA
agagataagcacagcgcagt

SEQ ID NO: 216201 - DNA, 20 bp, synthetic construct
  source 1..20: mol_type = other DNA
cagagataagcacagcgcag

SEQ ID NO: 216202 - DNA, 20 bp, synthetic construct
  source 1..20: mol_type = other DNA
ccagagataagcacagcgca

SEQ ID NO: 216203 - DNA, 20 bp, synthetic construct
  source 1..20: mol_type = other DNA
gccagagataagcacagcgc

SEQ ID NO: 216204 - DNA, 20 bp, synthetic construct
  source 1..20: mol_type = other DNA
ggccagagataagcacagcg

SEQ ID NO: 216205 - DNA, 20 bp, synthetic construct
  source 1..20: mol_type = other DNA
gggccagagataagcacagc

SEQ ID NO: 216206 - DNA, 20 bp, synthetic construct
  source 1..20: mol_type = other DNA
ggggccagagataagcacag

SEQ ID NO: 216207 - DNA, 20 bp, synthetic construct
  source 1..20: mol_type = other DNA
tggggccagagataagcaca

SEQ ID NO: 216208 - DNA, 20 bp, synthetic construct
  source 1..20: mol_type = other DNA
ttggggccagagataagcac

SEQ ID NO: 216209 - DNA, 20 bp, synthetic construct
  source 1..20: mol_type = other DNA
attggggccagagataagca

SEQ ID NO: 216210 - DNA, 20 bp, synthetic construct
  source 1..20: mol_type = other DNA
cattggggccagagataagc

SEQ ID NO: 216211 - DNA, 20 bp, synthetic construct
  source 1..20: mol_type = other DNA
gcattggggccagagataag

SEQ ID NO: 216212 - DNA, 20 bp, synthetic construct
  source 1..20: mol_type = other DNA
ggcattggggccagagataa

SEQ ID NO: 216213 - DNA, 20 bp, synthetic construct
  source 1..20: mol_type = other DNA
cggcattggggccagagata

SEQ ID NO: 216214 - DNA, 20 bp, synthetic construct
  source 1..20: mol_type = other DNA
gcggcattggggccagagat

SEQ ID NO: 216215 - DNA, 20 bp, synthetic construct
  source 1..20: mol_type = other DNA
ggcggcattggggccagaga

SEQ ID NO: 216216 - DNA, 20 bp, synthetic construct
  source 1..20: mol_type = other DNA
tggcggcattggggccagag

SEQ ID NO: 216217 - DNA, 20 bp, synthetic construct
  source 1..20: mol_type = other DNA
atggcggcattggggccaga

SEQ ID NO: 216218 - DNA, 20 bp, synthetic construct
  source 1..20: mol_type = other DNA
catggcggcattggggccag

SEQ ID NO: 216219 - DNA, 20 bp, synthetic construct
  source 1..20: mol_type = other DNA
gcatggcggcattggggcca

SEQ ID NO: 216220 - DNA, 20 bp, synthetic construct
  source 1..20: mol_type = other DNA
tgcatggcggcattggggcc

SEQ ID NO: 216221 - DNA, 20 bp, synthetic construct
  source 1..20: mol_type = other DNA
ctgcatggcggcattggggc

SEQ ID NO: 216222 - DNA, 20 bp, synthetic construct
  source 1..20: mol_type = other DNA
tctgcatggcggcattgggg

SEQ ID NO: 216223 - DNA, 20 bp, synthetic construct
  source 1..20: mol_type = other DNA
ttctgcatggcggcattggg

SEQ ID NO: 216224 - DNA, 20 bp, synthetic construct
  source 1..20: mol_type = other DNA
cttctgcatggcggcattgg

SEQ ID NO: 216225 - DNA, 20 bp, synthetic construct
  source 1..20: mol_type = other DNA
acttctgcatggcggcattg

SEQ ID NO: 216226 - DNA, 20 bp, synthetic construct
  source 1..20: mol_type = other DNA
cacttctgcatggcggcatt

SEQ ID NO: 216227 - DNA, 20 bp, synthetic construct
  source 1..20: mol_type = other DNA
acacttctgcatggcggcat

SEQ ID NO: 216228 - DNA, 20 bp, synthetic construct
  source 1..20: mol_type = other DNA
gacacttctgcatggcggca

SEQ ID NO: 216229 - DNA, 20 bp, synthetic construct
  source 1..20: mol_type = other DNA
agacacttctgcatggcggc

SEQ ID NO: 216230 - DNA, 20 bp, synthetic construct
  source 1..20: mol_type = other DNA
cagacacttctgcatggcgg

SEQ ID NO: 216231 - DNA, 20 bp, synthetic construct
  source 1..20: mol_type = other DNA
ccagacacttctgcatggcg

SEQ ID NO: 216232 - DNA, 20 bp, synthetic construct
  source 1..20: mol_type = other DNA
cccagacacttctgcatggc

SEQ ID NO: 216233 - DNA, 20 bp, synthetic construct
  source 1..20: mol_type = other DNA
ccccagacacttctgcatgg

SEQ ID NO: 216234 - DNA, 20 bp, synthetic construct
  source 1..20: mol_type = other DNA
cccccagacacttctgcatg

SEQ ID NO: 216235 - DNA, 20 bp, synthetic construct
  source 1..20: mol_type = other DNA
gcccccagacacttctgcat

SEQ ID NO: 216236 - DNA, 20 bp, synthetic construct
  source 1..20: mol_type = other DNA
tgcccccagacacttctgca

SEQ ID NO: 216237 - DNA, 20 bp, synthetic construct
  source 1..20: mol_type = other DNA
gtgcccccagacacttctgc

SEQ ID NO: 216238 - DNA, 20 bp, synthetic construct
  source 1..20: mol_type = other DNA
agtgcccccagacacttctg

SEQ ID NO: 216239 - DNA, 20 bp, synthetic construct
  source 1..20: mol_type = other DNA
aagtgcccccagacacttct

SEQ ID NO: 216240 - DNA, 20 bp, synthetic construct
  source 1..20: mol_type = other DNA
aaagtgcccccagacacttc

SEQ ID NO: 216241 - DNA, 20 bp, synthetic construct
  source 1..20: mol_type = other DNA
caaagtgcccccagacactt

SEQ ID NO: 216242 - DNA, 20 bp, synthetic construct
  source 1..20: mol_type = other DNA
acaaagtgcccccagacact

SEQ ID NO: 216243 - DNA, 20 bp, synthetic construct
  source 1..20: mol_type = other DNA
gacaaagtgcccccagacac

SEQ ID NO: 216244 - DNA, 20 bp, synthetic construct
  source 1..20: mol_type = other DNA
agacaaagtgcccccagaca

SEQ ID NO: 216245 - DNA, 20 bp, synthetic construct
  source 1..20: mol_type = other DNA
gagacaaagtgcccccagac

SEQ ID NO: 216246 - DNA, 20 bp, synthetic construct
  source 1..20: mol_type = other DNA
agagacaaagtgcccccaga

SEQ ID NO: 216247 - DNA, 20 bp, synthetic construct
  source 1..20: mol_type = other DNA
cagagacaaagtgcccccag

SEQ ID NO: 216248 - DNA, 20 bp, synthetic construct
  source 1..20: mol_type = other DNA
acagagacaaagtgccccca

SEQ ID NO: 216249 - DNA, 20 bp, synthetic construct
  source 1..20: mol_type = other DNA
gacagagacaaagtgccccc

SEQ ID NO: 216250 - DNA, 20 bp, synthetic construct
  source 1..20: mol_type = other DNA
tgacagagacaaagtgcccc

SEQ ID NO: 216251 - DNA, 20 bp, synthetic construct
  source 1..20: mol_type = other DNA
ctgacagagacaaagtgccc

SEQ ID NO: 216252 - DNA, 20 bp, synthetic construct
  source 1..20: mol_type = other DNA
tctgacagagacaaagtgcc

SEQ ID NO: 216253 - DNA, 20 bp, synthetic construct
  source 1..20: mol_type = other DNA
gtctgacagagacaaagtgc

SEQ ID NO: 216254 - DNA, 20 bp, synthetic construct
  source 1..20: mol_type = other DNA
tgtctgacagagacaaagtg

SEQ ID NO: 216255 - DNA, 20 bp, synthetic construct
  source 1..20: mol_type = other DNA
ctgtctgacagagacaaagt

SEQ ID NO: 216256 - DNA, 20 bp, synthetic construct
  source 1..20: mol_type = other DNA
tctgtctgacagagacaaag

SEQ ID NO: 216257 - DNA, 20 bp, synthetic construct
  source 1..20: mol_type = other DNA
ttctgtctgacagagacaaa

SEQ ID NO: 216258 - DNA, 20 bp, synthetic construct
  source 1..20: mol_type = other DNA
attctgtctgacagagacaa

SEQ ID NO: 216259 - DNA, 20 bp, synthetic construct
  source 1..20: mol_type = other DNA
aattctgtctgacagagaca

SEQ ID NO: 216260 - DNA, 20 bp, synthetic construct
  source 1..20: mol_type = other DNA
gaattctgtctgacagagac

SEQ ID NO: 216261 - DNA, 20 bp, synthetic construct
  source 1..20: mol_type = other DNA
cgaattctgtctgacagaga

SEQ ID NO: 216262 - DNA, 20 bp, synthetic construct
  source 1..20: mol_type = other DNA
ccgaattctgtctgacagag

SEQ ID NO: 216263 - DNA, 20 bp, synthetic construct
  source 1..20: mol_type = other DNA
tccgaattctgtctgacaga

SEQ ID NO: 216264 - DNA, 20 bp, synthetic construct
  source 1..20: mol_type = other DNA
ctccgaattctgtctgacag

SEQ ID NO: 216265 - DNA, 20 bp, synthetic construct
  source 1..20: mol_type = other DNA
tctccgaattctgtctgaca

SEQ ID NO: 216266 - DNA, 20 bp, synthetic construct
  source 1..20: mol_type = other DNA
atctccgaattctgtctgac

SEQ ID NO: 216267 - DNA, 20 bp, synthetic construct
  source 1..20: mol_type = other DNA
catctccgaattctgtctga

SEQ ID NO: 216268 - DNA, 20 bp, synthetic construct
  source 1..20: mol_type = other DNA
acatctccgaattctgtctg

SEQ ID NO: 216269 - DNA, 20 bp, synthetic construct
  source 1..20: mol_type = other DNA
cacatctccgaattctgtct

SEQ ID NO: 216270 - DNA, 20 bp, synthetic construct
  source 1..20: mol_type = other DNA
acacatctccgaattctgtc

SEQ ID NO: 216271 - DNA, 20 bp, synthetic construct
  source 1..20: mol_type = other DNA
tacacatctccgaattctgt

SEQ ID NO: 216272 - DNA, 20 bp, synthetic construct
  source 1..20: mol_type = other DNA
atacacatctccgaattctg

SEQ ID NO: 216273 - DNA, 20 bp, synthetic construct
  source 1..20: mol_type = other DNA
catacacatctccgaattct

SEQ ID NO: 216274 - DNA, 20 bp, synthetic construct
  source 1..20: mol_type = other DNA
gcatacacatctccgaattc

SEQ ID NO: 216275 - DNA, 20 bp, synthetic construct
  source 1..20: mol_type = other DNA
agcatacacatctccgaatt

SEQ ID NO: 216276 - DNA, 20 bp, synthetic construct
  source 1..20: mol_type = other DNA
aagcatacacatctccgaat

SEQ ID NO: 216277 - DNA, 20 bp, synthetic construct
  source 1..20: mol_type = other DNA
caagcatacacatctccgaa

SEQ ID NO: 216278 - DNA, 20 bp, synthetic construct
  source 1..20: mol_type = other DNA
gcaagcatacacatctccga

SEQ ID NO: 216279 - DNA, 20 bp, synthetic construct
  source 1..20: mol_type = other DNA
ggcaagcatacacatctccg

SEQ ID NO: 216280 - DNA, 20 bp, synthetic construct
  source 1..20: mol_type = other DNA
gggcaagcatacacatctcc

SEQ ID NO: 216281 - DNA, 20 bp, synthetic construct
  source 1..20: mol_type = other DNA
agggcaagcatacacatctc

SEQ ID NO: 216282 - DNA, 20 bp, synthetic construct
  source 1..20: mol_type = other DNA
cagggcaagcatacacatct

SEQ ID NO: 216283 - DNA, 20 bp, synthetic construct
  source 1..20: mol_type = other DNA
ccagggcaagcatacacatc

SEQ ID NO: 216284 - DNA, 20 bp, synthetic construct
  source 1..20: mol_type = other DNA
accagggcaagcatacacat

SEQ ID NO: 216285 - DNA, 20 bp, synthetic construct
  source 1..20: mol_type = other DNA
taccagggcaagcatacaca

SEQ ID NO: 216286 - DNA, 20 bp, synthetic construct
  source 1..20: mol_type = other DNA
ataccagggcaagcatacac

SEQ ID NO: 216287 - DNA, 20 bp, synthetic construct
  source 1..20: mol_type = other DNA
cataccagggcaagcataca

SEQ ID NO: 216288 - DNA, 20 bp, synthetic construct
  source 1..20: mol_type = other DNA
ccataccagggcaagcatac

SEQ ID NO: 216289 - DNA, 20 bp, synthetic construct
  source 1..20: mol_type = other DNA
gccataccagggcaagcata

SEQ ID NO: 216290 - DNA, 20 bp, synthetic construct
  source 1..20: mol_type = other DNA
tgccataccagggcaagcat

SEQ ID NO: 216291 - DNA, 20 bp, synthetic construct
  source 1..20: mol_type = other DNA
gtgccataccagggcaagca

SEQ ID NO: 216292 - DNA, 20 bp, synthetic construct
  source 1..20: mol_type = other DNA
agtgccataccagggcaagc

SEQ ID NO: 216293 - DNA, 20 bp, synthetic construct
  source 1..20: mol_type = other DNA
aagtgccataccagggcaag

SEQ ID NO: 216294 - DNA, 20 bp, synthetic construct
  source 1..20: mol_type = other DNA
gaagtgccataccagggcaa

SEQ ID NO: 216295 - DNA, 20 bp, synthetic construct
  source 1..20: mol_type = other DNA
agaagtgccataccagggca

SEQ ID NO: 216296 - DNA, 20 bp, synthetic construct
  source 1..20: mol_type = other DNA
gagaagtgccataccagggc

SEQ ID NO: 216297 - DNA, 20 bp, synthetic construct
  source 1..20: mol_type = other DNA
agagaagtgccataccaggg

SEQ ID NO: 216298 - DNA, 20 bp, synthetic construct
  source 1..20: mol_type = other DNA
aagagaagtgccataccagg

SEQ ID NO: 216299 - DNA, 20 bp, synthetic construct
  source 1..20: mol_type = other DNA
aaagagaagtgccataccag

SEQ ID NO: 216300 - DNA, 20 bp, synthetic construct
  source 1..20: mol_type = other DNA
aaaagagaagtgccatacca

SEQ ID NO: 216301 - DNA, 20 bp, synthetic construct
  source 1..20: mol_type = other DNA
aaaaagagaagtgccatacc

SEQ ID NO: 216302 - DNA, 20 bp, synthetic construct
  source 1..20: mol_type = other DNA
aaaaaagagaagtgccatac

SEQ ID NO: 216303 - DNA, 20 bp, synthetic construct
  source 1..20: mol_type = other DNA
aaaaaaagagaagtgccata

SEQ ID NO: 216304 - DNA, 20 bp, synthetic construct
  source 1..20: mol_type = other DNA
caaaaaaagagaagtgccat

SEQ ID NO: 216305 - DNA, 20 bp, synthetic construct
  source 1..20: mol_type = other DNA
tcaaaaaaagagaagtgcca

SEQ ID NO: 216306 - DNA, 20 bp, synthetic construct
  source 1..20: mol_type = other DNA
ctcaaaaaaagagaagtgcc

SEQ ID NO: 216307 - DNA, 20 bp, synthetic construct
  source 1..20: mol_type = other DNA
tctcaaaaaaagagaagtgc

SEQ ID NO: 216308 - DNA, 20 bp, synthetic construct
  source 1..20: mol_type = other DNA
gtctcaaaaaaagagaagtg

SEQ ID NO: 216309 - DNA, 20 bp, synthetic construct
  source 1..20: mol_type = other DNA
tgtctcaaaaaaagagaagt

SEQ ID NO: 216310 - DNA, 20 bp, synthetic construct
  source 1..20: mol_type = other DNA
ctgtctcaaaaaaagagaag

SEQ ID NO: 216311 - DNA, 20 bp, synthetic construct
  source 1..20: mol_type = other DNA
tctgtctcaaaaaaagagaa

SEQ ID NO: 216312 - DNA, 20 bp, synthetic construct
  source 1..20: mol_type = other DNA
ttctgtctcaaaaaaagaga

SEQ ID NO: 216313 - DNA, 20 bp, synthetic construct
  source 1..20: mol_type = other DNA
attctgtctcaaaaaaagag

SEQ ID NO: 216314 - DNA, 20 bp, synthetic construct
  source 1..20: mol_type = other DNA
gattctgtctcaaaaaaaga

SEQ ID NO: 216315 - DNA, 20 bp, synthetic construct
  source 1..20: mol_type = other DNA
agattctgtctcaaaaaaag

SEQ ID NO: 216316 - DNA, 20 bp, synthetic construct
  source 1..20: mol_type = other DNA
gagattctgtctcaaaaaaa

SEQ ID NO: 216317 - DNA, 20 bp, synthetic construct
  source 1..20: mol_type = other DNA
tgagattctgtctcaaaaaa

SEQ ID NO: 216318 - DNA, 20 bp, synthetic construct
  source 1..20: mol_type = other DNA
gtgagattctgtctcaaaaa

SEQ ID NO: 216319 - DNA, 20 bp, synthetic construct
  source 1..20: mol_type = other DNA
agtgagattctgtctcaaaa

SEQ ID NO: 216320 - DNA, 20 bp, synthetic construct
  source 1..20: mol_type = other DNA
gagtgagattctgtctcaaa

SEQ ID NO: 216321 - DNA, 20 bp, synthetic construct
  source 1..20: mol_type = other DNA
agagtgagattctgtctcaa

SEQ ID NO: 216322 - DNA, 20 bp, synthetic construct
  source 1..20: mol_type = other DNA
cagagtgagattctgtctca

SEQ ID NO: 216323 - DNA, 20 bp, synthetic construct
  source 1..20: mol_type = other DNA
acagagtgagattctgtctc

SEQ ID NO: 216324 - DNA, 20 bp, synthetic construct
  source 1..20: mol_type = other DNA
gacagagtgagattctgtct

SEQ ID NO: 216325 - DNA, 20 bp, synthetic construct
  source 1..20: mol_type = other DNA
tgacagagtgagattctgtc

SEQ ID NO: 216326 - DNA, 20 bp, synthetic construct
  source 1..20: mol_type = other DNA
gtgacagagtgagattctgt

SEQ ID NO: 216327 - DNA, 20 bp, synthetic construct
  source 1..20: mol_type = other DNA
ggtgacagagtgagattctg

SEQ ID NO: 216328 - DNA, 20 bp, synthetic construct
  source 1..20: mol_type = other DNA
gggtgacagagtgagattct

SEQ ID NO: 216329 - DNA, 20 bp, synthetic construct
  source 1..20: mol_type = other DNA
agggtgacagagtgagattc

SEQ ID NO: 216330 - DNA, 20 bp, synthetic construct
  source 1..20: mol_type = other DNA
cagggtgacagagtgagatt

SEQ ID NO: 216331 - DNA, 20 bp, synthetic construct
  source 1..20: mol_type = other DNA
ccagggtgacagagtgagat

SEQ ID NO: 216332 - DNA, 20 bp, synthetic construct
  source 1..20: mol_type = other DNA
gccagggtgacagagtgaga

SEQ ID NO: 216333 - DNA, 20 bp, synthetic construct
  source 1..20: mol_type = other DNA
agccagggtgacagagtgag

SEQ ID NO: 216334 - DNA, 20 bp, synthetic construct
  source 1..20: mol_type = other DNA
cagccagggtgacagagtga

SEQ ID NO: 216335 - DNA, 20 bp, synthetic construct
  source 1..20: mol_type = other DNA
ccagccagggtgacagagtg

SEQ ID NO: 216336 - DNA, 20 bp, synthetic construct
  source 1..20: mol_type = other DNA
tccagccagggtgacagagt

SEQ ID NO: 216337 - DNA, 20 bp, synthetic construct
  source 1..20: mol_type = other DNA
ctccagccagggtgacagag

SEQ ID NO: 216338 - DNA, 20 bp, synthetic construct
  source 1..20: mol_type = other DNA
actccagccagggtgacaga

SEQ ID NO: 216339 - DNA, 20 bp, synthetic construct
  source 1..20: mol_type = other DNA
cactccagccagggtgacag

SEQ ID NO: 216340 - DNA, 20 bp, synthetic construct
  source 1..20: mol_type = other DNA
gcactccagccagggtgaca

SEQ ID NO: 216341 - DNA, 20 bp, synthetic construct
  source 1..20: mol_type = other DNA
tgcactccagccagggtgac

SEQ ID NO: 216342 - DNA, 20 bp, synthetic construct
  source 1..20: mol_type = other DNA
ctgcactccagccagggtga

SEQ ID NO: 216343 - DNA, 20 bp, synthetic construct
  source 1..20: mol_type = other DNA
actgcactccagccagggtg

SEQ ID NO: 216344 - DNA, 20 bp, synthetic construct
  source 1..20: mol_type = other DNA
cactgcactccagccagggt

SEQ ID NO: 216345 - DNA, 20 bp, synthetic construct
  source 1..20: mol_type = other DNA
ccactgcactccagccaggg

SEQ ID NO: 216346 - DNA, 20 bp, synthetic construct
  source 1..20: mol_type = other DNA
gccactgcactccagccagg

SEQ ID NO: 216347 - DNA, 20 bp, synthetic construct
  source 1..20: mol_type = other DNA
tgccactgcactccagccag

SEQ ID NO: 216348 - DNA, 20 bp, synthetic construct
  source 1..20: mol_type = other DNA
atgccactgcactccagcca

SEQ ID NO: 216349 - DNA, 20 bp, synthetic construct
  source 1..20: mol_type = other DNA
catgccactgcactccagcc

SEQ ID NO: 216350 - DNA, 20 bp, synthetic construct
  source 1..20: mol_type = other DNA
tcatgccactgcactccagc

SEQ ID NO: 216351 - DNA, 20 bp, synthetic construct
  source 1..20: mol_type = other DNA
atcatgccactgcactccag

SEQ ID NO: 216352 - DNA, 20 bp, synthetic construct
  source 1..20: mol_type = other DNA
gatcatgccactgcactcca

SEQ ID NO: 216353 - DNA, 20 bp, synthetic construct
  source 1..20: mol_type = other DNA
agatcatgccactgcactcc

SEQ ID NO: 216354 - DNA, 20 bp, synthetic construct
  source 1..20: mol_type = other DNA
gagatcatgccactgcactc

SEQ ID NO: 216355 - DNA, 20 bp, synthetic construct
  source 1..20: mol_type = other DNA
tgagatcatgccactgcact

SEQ ID NO: 216356 - DNA, 20 bp, synthetic construct
  source 1..20: mol_type = other DNA
ctgagatcatgccactgcac

SEQ ID NO: 216357 - DNA, 20 bp, synthetic construct
  source 1..20: mol_type = other DNA
gctgagatcatgccactgca

SEQ ID NO: 216358 - DNA, 20 bp, synthetic construct
  source 1..20: mol_type = other DNA
agctgagatcatgccactgc

SEQ ID NO: 216359 - DNA, 20 bp, synthetic construct
  source 1..20: mol_type = other DNA
gagctgagatcatgccactg

SEQ ID NO: 216360 - DNA, 20 bp, synthetic construct
  source 1..20: mol_type = other DNA
tgagctgagatcatgccact

SEQ ID NO: 216361 - DNA, 20 bp, synthetic construct
  source 1..20: mol_type = other DNA
gtgagctgagatcatgccac

SEQ ID NO: 216362 - DNA, 20 bp, synthetic construct
  source 1..20: mol_type = other DNA
agtgagctgagatcatgcca

SEQ ID NO: 216363 - DNA, 20 bp, synthetic construct
  source 1..20: mol_type = other DNA
cagtgagctgagatcatgcc

SEQ ID NO: 216364 - DNA, 20 bp, synthetic construct
  source 1..20: mol_type = other DNA
gcagtgagctgagatcatgc

SEQ ID NO: 216365 - DNA, 20 bp, synthetic construct
  source 1..20: mol_type = other DNA
tgcagtgagctgagatcatg

SEQ ID NO: 216366 - DNA, 20 bp, synthetic construct
  source 1..20: mol_type = other DNA
ttgcagtgagctgagatcat

SEQ ID NO: 216367 - DNA, 20 bp, synthetic construct
  source 1..20: mol_type = other DNA
gttgcagtgagctgagatca

SEQ ID NO: 216368 - DNA, 20 bp, synthetic construct
  source 1..20: mol_type = other DNA
ggttgcagtgagctgagatc

SEQ ID NO: 216369 - DNA, 20 bp, synthetic construct
  source 1..20: mol_type = other DNA
aggttgcagtgagctgagat

SEQ ID NO: 216370 - DNA, 20 bp, synthetic construct
  source 1..20: mol_type = other DNA
gaggttgcagtgagctgaga

SEQ ID NO: 216371 - DNA, 20 bp, synthetic construct
  source 1..20: mol_type = other DNA
ggaggttgcagtgagctgag

SEQ ID NO: 216372 - DNA, 20 bp, synthetic construct
  source 1..20: mol_type = other DNA
cggaggttgcagtgagctga

SEQ ID NO: 216373 - DNA, 20 bp, synthetic construct
  source 1..20: mol_type = other DNA
gcggaggttgcagtgagctg

SEQ ID NO: 216374 - DNA, 20 bp, synthetic construct
  source 1..20: mol_type = other DNA
ggcggaggttgcagtgagct

SEQ ID NO: 216375 - DNA, 20 bp, synthetic construct
  source 1..20: mol_type = other DNA
aggcggaggttgcagtgagc

SEQ ID NO: 216376 - DNA, 20 bp, synthetic construct
  source 1..20: mol_type = other DNA
gaggcggaggttgcagtgag

SEQ ID NO: 216377 - DNA, 20 bp, synthetic construct
  source 1..20: mol_type = other DNA
ggaggcggaggttgcagtga

SEQ ID NO: 216378 - DNA, 20 bp, synthetic construct
  source 1..20: mol_type = other DNA
gggaggcggaggttgcagtg

SEQ ID NO: 216379 - DNA, 20 bp, synthetic construct
  source 1..20: mol_type = other DNA
tgggaggcggaggttgcagt

SEQ ID NO: 216380 - DNA, 20 bp, synthetic construct
  source 1..20: mol_type = other DNA
ctgggaggcggaggttgcag

SEQ ID NO: 216381 - DNA, 20 bp, synthetic construct
  source 1..20: mol_type = other DNA
cctgggaggcggaggttgca

SEQ ID NO: 216382 - DNA, 20 bp, synthetic construct
  source 1..20: mol_type = other DNA
acctgggaggcggaggttgc

SEQ ID NO: 216383 - DNA, 20 bp, synthetic construct
  source 1..20: mol_type = other DNA
aacctgggaggcggaggttg

SEQ ID NO: 216384 - DNA, 20 bp, synthetic construct
  source 1..20: mol_type = other DNA
gaacctgggaggcggaggtt

SEQ ID NO: 216385 - DNA, 20 bp, synthetic construct
  source 1..20: mol_type = other DNA
tgaacctgggaggcggaggt

SEQ ID NO: 216386 - DNA, 20 bp, synthetic construct
  source 1..20: mol_type = other DNA
ttgaacctgggaggcggagg

SEQ ID NO: 216387 - DNA, 20 bp, synthetic construct
  source 1..20: mol_type = other DNA
cttgaacctgggaggcggag

SEQ ID NO: 216388 - DNA, 20 bp, synthetic construct
  source 1..20: mol_type = other DNA
gcttgaacctgggaggcgga

SEQ ID NO: 216389 - DNA, 20 bp, synthetic construct
  source 1..20: mol_type = other DNA
tgcttgaacctgggaggcgg

SEQ ID NO: 216390 - DNA, 20 bp, synthetic construct
  source 1..20: mol_type = other DNA
ttgcttgaacctgggaggcg

SEQ ID NO: 216391 - DNA, 20 bp, synthetic construct
  source 1..20: mol_type = other DNA
attgcttgaacctgggaggc

SEQ ID NO: 216392 - DNA, 20 bp, synthetic construct
  source 1..20: mol_type = other DNA
aattgcttgaacctgggagg

SEQ ID NO: 216393 - DNA, 20 bp, synthetic construct
  source 1..20: mol_type = other DNA
gaattgcttgaacctgggag

SEQ ID NO: 216394 - DNA, 20 bp, synthetic construct
  source 1..20: mol_type = other DNA
agaattgcttgaacctggga

SEQ ID NO: 216395 - DNA, 20 bp, synthetic construct
  source 1..20: mol_type = other DNA
aagaattgcttgaacctggg

SEQ ID NO: 216396 - DNA, 20 bp, synthetic construct
  source 1..20: mol_type = other DNA
caagaattgcttgaacctgg

SEQ ID NO: 216397 - DNA, 20 bp, synthetic construct
  source 1..20: mol_type = other DNA
acaagaattgcttgaacctg

SEQ ID NO: 216398 - DNA, 20 bp, synthetic construct
  source 1..20: mol_type = other DNA
cacaagaattgcttgaacct

SEQ ID NO: 216399 - DNA, 20 bp, synthetic construct
  source 1..20: mol_type = other DNA
gcacaagaattgcttgaacc

SEQ ID NO: 216400 - DNA, 20 bp, synthetic construct
  source 1..20: mol_type = other DNA
ggcacaagaattgcttgaac

SEQ ID NO: 216401 - DNA, 20 bp, synthetic construct
  source 1..20: mol_type = other DNA
aggcacaagaattgcttgaa

SEQ ID NO: 216402 - DNA, 20 bp, synthetic construct
  source 1..20: mol_type = other DNA
gaggcacaagaattgcttga

SEQ ID NO: 216403 - DNA, 20 bp, synthetic construct
  source 1..20: mol_type = other DNA
tgaggcacaagaattgcttg

SEQ ID NO: 216404 - DNA, 20 bp, synthetic construct
  source 1..20: mol_type = other DNA
ctgaggcacaagaattgctt

SEQ ID NO: 216405 - DNA, 20 bp, synthetic construct
  source 1..20: mol_type = other DNA
gctgaggcacaagaattgct

SEQ ID NO: 216406 - DNA, 20 bp, synthetic construct
  source 1..20: mol_type = other DNA
ggctgaggcacaagaattgc

SEQ ID NO: 216407 - DNA, 20 bp, synthetic construct
  source 1..20: mol_type = other DNA
aggctgaggcacaagaattg

SEQ ID NO: 216408 - DNA, 20 bp, synthetic construct
  source 1..20: mol_type = other DNA
gaggctgaggcacaagaatt

SEQ ID NO: 216409 - DNA, 20 bp, synthetic construct
  source 1..20: mol_type = other DNA
ggaggctgaggcacaagaat

SEQ ID NO: 216410 - DNA, 20 bp, synthetic construct
  source 1..20: mol_type = other DNA
gggaggctgaggcacaagaa

SEQ ID NO: 216411 - DNA, 20 bp, synthetic construct
  source 1..20: mol_type = other DNA
tgggaggctgaggcacaaga

SEQ ID NO: 216412 - DNA, 20 bp, synthetic construct
  source 1..20: mol_type = other DNA
ttgggaggctgaggcacaag

SEQ ID NO: 216413 - DNA, 20 bp, synthetic construct
  source 1..20: mol_type = other DNA
cttgggaggctgaggcacaa

SEQ ID NO: 216414 - DNA, 20 bp, synthetic construct
  source 1..20: mol_type = other DNA
acttgggaggctgaggcaca

SEQ ID NO: 216415 - DNA, 20 bp, synthetic construct
  source 1..20: mol_type = other DNA
tacttgggaggctgaggcac

SEQ ID NO: 216416 - DNA, 20 bp, synthetic construct
  source 1..20: mol_type = other DNA
ctacttgggaggctgaggca

SEQ ID NO: 216417 - DNA, 20 bp, synthetic construct
  source 1..20: mol_type = other DNA
gctacttgggaggctgaggc

SEQ ID NO: 216418 - DNA, 20 bp, synthetic construct
  source 1..20: mol_type = other DNA
agctacttgggaggctgagg

SEQ ID NO: 216419 - DNA, 20 bp, synthetic construct
  source 1..20: mol_type = other DNA
cagctacttgggaggctgag

SEQ ID NO: 216420 - DNA, 20 bp, synthetic construct
  source 1..20: mol_type = other DNA
ccagctacttgggaggctga

SEQ ID NO: 216421 - DNA, 20 bp, synthetic construct
  source 1..20: mol_type = other DNA
cccagctacttgggaggctg

SEQ ID NO: 216422 - DNA, 20 bp, synthetic construct
  source 1..20: mol_type = other DNA
tcccagctacttgggaggct

SEQ ID NO: 216423 - DNA, 20 bp, synthetic construct
  source 1..20: mol_type = other DNA
atcccagctacttgggaggc

SEQ ID NO: 216424 - DNA, 20 bp, synthetic construct
  source 1..20: mol_type = other DNA
aatcccagctacttgggagg

SEQ ID NO: 216425 - DNA, 20 bp, synthetic construct
  source 1..20: mol_type = other DNA
taatcccagctacttgggag

SEQ ID NO: 216426 - DNA, 20 bp, synthetic construct
  source 1..20: mol_type = other DNA
ataatcccagctacttggga

SEQ ID NO: 216427 - DNA, 20 bp, synthetic construct
  source 1..20: mol_type = other DNA
tataatcccagctacttggg

SEQ ID NO: 216428 - DNA, 20 bp, synthetic construct
  source 1..20: mol_type = other DNA
ctataatcccagctacttgg

SEQ ID NO: 216429 - DNA, 20 bp, synthetic construct
  source 1..20: mol_type = other DNA
tctataatcccagctacttg

SEQ ID NO: 216430 - DNA, 20 bp, synthetic construct
  source 1..20: mol_type = other DNA
atctataatcccagctactt

SEQ ID NO: 216431 - DNA, 20 bp, synthetic construct
  source 1..20: mol_type = other DNA
catctataatcccagctact

SEQ ID NO: 216432 - DNA, 20 bp, synthetic construct
  source 1..20: mol_type = other DNA
acatctataatcccagctac

SEQ ID NO: 216433 - DNA, 20 bp, synthetic construct
  source 1..20: mol_type = other DNA
cacatctataatcccagcta

SEQ ID NO: 216434 - DNA, 20 bp, synthetic construct
  source 1..20: mol_type = other DNA
gcacatctataatcccagct

SEQ ID NO: 216435 - DNA, 20 bp, synthetic construct
  source 1..20: mol_type = other DNA
tgcacatctataatcccagc

SEQ ID NO: 216436 - DNA, 20 bp, synthetic construct
  source 1..20: mol_type = other DNA
gtgcacatctataatcccag

SEQ ID NO: 216437 - DNA, 20 bp, synthetic construct
  source 1..20: mol_type = other DNA
ggtgcacatctataatccca

SEQ ID NO: 216438 - DNA, 20 bp, synthetic construct
  source 1..20: mol_type = other DNA
tggtgcacatctataatccc

SEQ ID NO: 216439 - DNA, 20 bp, synthetic construct
  source 1..20: mol_type = other DNA
atggtgcacatctataatcc

SEQ ID NO: 216440 - DNA, 20 bp, synthetic construct
  source 1..20: mol_type = other DNA
gatggtgcacatctataatc

SEQ ID NO: 216441 - DNA, 20 bp, synthetic construct
  source 1..20: mol_type = other DNA
cgatggtgcacatctataat

SEQ ID NO: 216442 - DNA, 20 bp, synthetic construct
  source 1..20: mol_type = other DNA
acgatggtgcacatctataa

SEQ ID NO: 216443 - DNA, 20 bp, synthetic construct
  source 1..20: mol_type = other DNA
cacgatggtgcacatctata

SEQ ID NO: 216444 - DNA, 20 bp, synthetic construct
  source 1..20: mol_type = other DNA
gcacgatggtgcacatctat

SEQ ID NO: 216445 - DNA, 20 bp, synthetic construct
  source 1..20: mol_type = other DNA
ggcacgatggtgcacatcta

SEQ ID NO: 216446 - DNA, 20 bp, synthetic construct
  source 1..20: mol_type = other DNA
aggcacgatggtgcacatct

SEQ ID NO: 216447 - DNA, 20 bp, synthetic construct
  source 1..20: mol_type = other DNA
taggcacgatggtgcacatc

SEQ ID NO: 216448 - DNA, 20 bp, synthetic construct
  source 1..20: mol_type = other DNA
ctaggcacgatggtgcacat

SEQ ID NO: 216449 - DNA, 20 bp, synthetic construct
  source 1..20: mol_type = other DNA
gctaggcacgatggtgcaca

SEQ ID NO: 216450 - DNA, 20 bp, synthetic construct
  source 1..20: mol_type = other DNA
agctaggcacgatggtgcac

SEQ ID NO: 216451 - DNA, 20 bp, synthetic construct
  source 1..20: mol_type = other DNA
tagctaggcacgatggtgca

SEQ ID NO: 216452 - DNA, 20 bp, synthetic construct
  source 1..20: mol_type = other DNA
ttagctaggcacgatggtgc

SEQ ID NO: 216453 - DNA, 20 bp, synthetic construct
  source 1..20: mol_type = other DNA
tttagctaggcacgatggtg

SEQ ID NO: 216454 - DNA, 20 bp, synthetic construct
  source 1..20: mol_type = other DNA
atttagctaggcacgatggt

SEQ ID NO: 216455 - DNA, 20 bp, synthetic construct
  source 1..20: mol_type = other DNA
aatttagctaggcacgatgg

SEQ ID NO: 216456 - DNA, 20 bp, synthetic construct
  source 1..20: mol_type = other DNA
aaatttagctaggcacgatg

SEQ ID NO: 216457 - DNA, 20 bp, synthetic construct
  source 1..20: mol_type = other DNA
aaaatttagctaggcacgat

SEQ ID NO: 216458 - DNA, 20 bp, synthetic construct
  source 1..20: mol_type = other DNA
aaaaatttagctaggcacga

SEQ ID NO: 216459 - DNA, 20 bp, synthetic construct
  source 1..20: mol_type = other DNA
caaaaatttagctaggcacg

SEQ ID NO: 216460 - DNA, 20 bp, synthetic construct
  source 1..20: mol_type = other DNA
acaaaaatttagctaggcac

SEQ ID NO: 216461 - DNA, 20 bp, synthetic construct
  source 1..20: mol_type = other DNA
tacaaaaatttagctaggca

SEQ ID NO: 216462 - DNA, 20 bp, synthetic construct
  source 1..20: mol_type = other DNA
gtacaaaaatttagctaggc

SEQ ID NO: 216463 - DNA, 20 bp, synthetic construct
  source 1..20: mol_type = other DNA
agtacaaaaatttagctagg

SEQ ID NO: 216464 - DNA, 20 bp, synthetic construct
  source 1..20: mol_type = other DNA
aagtacaaaaatttagctag

SEQ ID NO: 216465 - DNA, 20 bp, synthetic construct
  source 1..20: mol_type = other DNA
aaagtacaaaaatttagcta

SEQ ID NO: 216466 - DNA, 20 bp, synthetic construct
  source 1..20: mol_type = other DNA
aaaagtacaaaaatttagct

SEQ ID NO: 216467 - DNA, 20 bp, synthetic construct
  source 1..20: mol_type = other DNA
taaaagtacaaaaatttagc

SEQ ID NO: 216468 - DNA, 20 bp, synthetic construct
  source 1..20: mol_type = other DNA
ctaaaagtacaaaaatttag

SEQ ID NO: 216469 - DNA, 20 bp, synthetic construct
  source 1..20: mol_type = other DNA
actaaaagtacaaaaattta

SEQ ID NO: 216470 - DNA, 20 bp, synthetic construct
  source 1..20: mol_type = other DNA
tactaaaagtacaaaaattt

SEQ ID NO: 216471 - DNA, 20 bp, synthetic construct
  source 1..20: mol_type = other DNA
ttactaaaagtacaaaaatt

SEQ ID NO: 216472 - DNA, 20 bp, synthetic construct
  source 1..20: mol_type = other DNA
tttactaaaagtacaaaaat

SEQ ID NO: 216473 - DNA, 20 bp, synthetic construct
  source 1..20: mol_type = other DNA
ctttactaaaagtacaaaaa

SEQ ID NO: 216474 - DNA, 20 bp, synthetic construct
  source 1..20: mol_type = other DNA
tctttactaaaagtacaaaa

SEQ ID NO: 216475 - DNA, 20 bp, synthetic construct
  source 1..20: mol_type = other DNA
atctttactaaaagtacaaa

SEQ ID NO: 216476 - DNA, 20 bp, synthetic construct
  source 1..20: mol_type = other DNA
catctttactaaaagtacaa

SEQ ID NO: 216477 - DNA, 20 bp, synthetic construct
  source 1..20: mol_type = other DNA
acatctttactaaaagtaca

SEQ ID NO: 216478 - DNA, 20 bp, synthetic construct
  source 1..20: mol_type = other DNA
aacatctttactaaaagtac

SEQ ID NO: 216479 - DNA, 20 bp, synthetic construct
  source 1..20: mol_type = other DNA
caacatctttactaaaagta

SEQ ID NO: 216480 - DNA, 20 bp, synthetic construct
  source 1..20: mol_type = other DNA
acaacatctttactaaaagt

SEQ ID NO: 216481 - DNA, 20 bp, synthetic construct
  source 1..20: mol_type = other DNA
aacaacatctttactaaaag

SEQ ID NO: 216482 - DNA, 20 bp, synthetic construct
  source 1..20: mol_type = other DNA
aaacaacatctttactaaaa

SEQ ID NO: 216483 - DNA, 20 bp, synthetic construct
  source 1..20: mol_type = other DNA
aaaacaacatctttactaaa

SEQ ID NO: 216484 - DNA, 20 bp, synthetic construct
  source 1..20: mol_type = other DNA
caaaacaacatctttactaa

SEQ ID NO: 216485 - DNA, 20 bp, synthetic construct
  source 1..20: mol_type = other DNA
gcaaaacaacatctttacta

SEQ ID NO: 216486 - DNA, 20 bp, synthetic construct
  source 1..20: mol_type = other DNA
agcaaaacaacatctttact

SEQ ID NO: 216487 - DNA, 20 bp, synthetic construct
  source 1..20: mol_type = other DNA
cagcaaaacaacatctttac

SEQ ID NO: 216488 - DNA, 20 bp, synthetic construct
  source 1..20: mol_type = other DNA
acagcaaaacaacatcttta

SEQ ID NO: 216489 - DNA, 20 bp, synthetic construct
  source 1..20: mol_type = other DNA
cacagcaaaacaacatcttt

SEQ ID NO: 216490 - DNA, 20 bp, synthetic construct
  source 1..20: mol_type = other DNA
acacagcaaaacaacatctt

SEQ ID NO: 216491 - DNA, 20 bp, synthetic construct
  source 1..20: mol_type = other DNA
aacacagcaaaacaacatct

SEQ ID NO: 216492 - DNA, 20 bp, synthetic construct
  source 1..20: mol_type = other DNA
caacacagcaaaacaacatc

SEQ ID NO: 216493 - DNA, 20 bp, synthetic construct
  source 1..20: mol_type = other DNA
ccaacacagcaaaacaacat

SEQ ID NO: 216494 - DNA, 20 bp, synthetic construct
  source 1..20: mol_type = other DNA
gccaacacagcaaaacaaca

SEQ ID NO: 216495 - DNA, 20 bp, synthetic construct
  source 1..20: mol_type = other DNA
ggccaacacagcaaaacaac

SEQ ID NO: 216496 - DNA, 20 bp, synthetic construct
  source 1..20: mol_type = other DNA
tggccaacacagcaaaacaa

SEQ ID NO: 216497 - DNA, 20 bp, synthetic construct
  source 1..20: mol_type = other DNA
ttggccaacacagcaaaaca

SEQ ID NO: 216498 - DNA, 20 bp, synthetic construct
  source 1..20: mol_type = other DNA
cttggccaacacagcaaaac

SEQ ID NO: 216499 - DNA, 20 bp, synthetic construct
  source 1..20: mol_type = other DNA
gcttggccaacacagcaaaa

SEQ ID NO: 216500 - DNA, 20 bp, synthetic construct
  source 1..20: mol_type = other DNA
agcttggccaacacagcaaa

SEQ ID NO: 216501 - DNA, 20 bp, synthetic construct
  source 1..20: mol_type = other DNA
cagcttggccaacacagcaa

SEQ ID NO: 216502 - DNA, 20 bp, synthetic construct
  source 1..20: mol_type = other DNA
tcagcttggccaacacagca

SEQ ID NO: 216503 - DNA, 20 bp, synthetic construct
  source 1..20: mol_type = other DNA
atcagcttggccaacacagc

SEQ ID NO: 216504 - DNA, 20 bp, synthetic construct
  source 1..20: mol_type = other DNA
gatcagcttggccaacacag

SEQ ID NO: 216505 - DNA, 20 bp, synthetic construct
  source 1..20: mol_type = other DNA
agatcagcttggccaacaca

SEQ ID NO: 216506 - DNA, 20 bp, synthetic construct
  source 1..20: mol_type = other DNA
gagatcagcttggccaacac

SEQ ID NO: 216507 - DNA, 20 bp, synthetic construct
  source 1..20: mol_type = other DNA
cgagatcagcttggccaaca

SEQ ID NO: 216508 - DNA, 20 bp, synthetic construct
  source 1..20: mol_type = other DNA
tcgagatcagcttggccaac

SEQ ID NO: 216509 - DNA, 20 bp, synthetic construct
  source 1..20: mol_type = other DNA
ttcgagatcagcttggccaa

SEQ ID NO: 216510 - DNA, 20 bp, synthetic construct
  source 1..20: mol_type = other DNA
gttcgagatcagcttggcca

SEQ ID NO: 216511 - DNA, 20 bp, synthetic construct
  source 1..20: mol_type = other DNA
agttcgagatcagcttggcc

SEQ ID NO: 216512 - DNA, 20 bp, synthetic construct
  source 1..20: mol_type = other DNA
aagttcgagatcagcttggc

SEQ ID NO: 216513 - DNA, 20 bp, synthetic construct
  source 1..20: mol_type = other DNA
aaagttcgagatcagcttgg

SEQ ID NO: 216514 - DNA, 20 bp, synthetic construct
  source 1..20: mol_type = other DNA
aaaagttcgagatcagcttg

SEQ ID NO: 216515 - DNA, 20 bp, synthetic construct
  source 1..20: mol_type = other DNA
caaaagttcgagatcagctt

SEQ ID NO: 216516 - DNA, 20 bp, synthetic construct
  source 1..20: mol_type = other DNA
ccaaaagttcgagatcagct

SEQ ID NO: 216517 - DNA, 20 bp, synthetic construct
  source 1..20: mol_type = other DNA
gccaaaagttcgagatcagc

SEQ ID NO: 216518 - DNA, 20 bp, synthetic construct
  source 1..20: mol_type = other DNA
ggccaaaagttcgagatcag

SEQ ID NO: 216519 - DNA, 20 bp, synthetic construct
  source 1..20: mol_type = other DNA
aggccaaaagttcgagatca

SEQ ID NO: 216520 - DNA, 20 bp, synthetic construct
  source 1..20: mol_type = other DNA
gaggccaaaagttcgagatc

SEQ ID NO: 216521 - DNA, 20 bp, synthetic construct
  source 1..20: mol_type = other DNA
tgaggccaaaagttcgagat

SEQ ID NO: 216522 - DNA, 20 bp, synthetic construct
  source 1..20: mol_type = other DNA
ttgaggccaaaagttcgaga

SEQ ID NO: 216523 - DNA, 20 bp, synthetic construct
  source 1..20: mol_type = other DNA
cttgaggccaaaagttcgag

SEQ ID NO: 216524 - DNA, 20 bp, synthetic construct
  source 1..20: mol_type = other DNA
acttgaggccaaaagttcga

SEQ ID NO: 216525 - DNA, 20 bp, synthetic construct
  source 1..20: mol_type = other DNA
cacttgaggccaaaagttcg

SEQ ID NO: 216526 - DNA, 20 bp, synthetic construct
  source 1..20: mol_type = other DNA
tcacttgaggccaaaagttc

SEQ ID NO: 216527 - DNA, 20 bp, synthetic construct
  source 1..20: mol_type = other DNA
atcacttgaggccaaaagtt

SEQ ID NO: 216528 - DNA, 20 bp, synthetic construct
  source 1..20: mol_type = other DNA
gatcacttgaggccaaaagt

SEQ ID NO: 216529 - DNA, 20 bp, synthetic construct
  source 1..20: mol_type = other DNA
agatcacttgaggccaaaag

SEQ ID NO: 216530 - DNA, 20 bp, synthetic construct
  source 1..20: mol_type = other DNA
cagatcacttgaggccaaaa

SEQ ID NO: 216531 - DNA, 20 bp, synthetic construct
  source 1..20: mol_type = other DNA
gcagatcacttgaggccaaa

SEQ ID NO: 216532 - DNA, 20 bp, synthetic construct
  source 1..20: mol_type = other DNA
ggcagatcacttgaggccaa

SEQ ID NO: 216533 - DNA, 20 bp, synthetic construct
  source 1..20: mol_type = other DNA
aggcagatcacttgaggcca

SEQ ID NO: 216534 - DNA, 20 bp, synthetic construct
  source 1..20: mol_type = other DNA
taggcagatcacttgaggcc

SEQ ID NO: 216535 - DNA, 20 bp, synthetic construct
  source 1..20: mol_type = other DNA
gtaggcagatcacttgaggc

SEQ ID NO: 216536 - DNA, 20 bp, synthetic construct
  source 1..20: mol_type = other DNA
ggtaggcagatcacttgagg

SEQ ID NO: 216537 - DNA, 20 bp, synthetic construct
  source 1..20: mol_type = other DNA
aggtaggcagatcacttgag

SEQ ID NO: 216538 - DNA, 20 bp, synthetic construct
  source 1..20: mol_type = other DNA
gaggtaggcagatcacttga

SEQ ID NO: 216539 - DNA, 20 bp, synthetic construct
  source 1..20: mol_type = other DNA
tgaggtaggcagatcacttg

SEQ ID NO: 216540 - DNA, 20 bp, synthetic construct
  source 1..20: mol_type = other DNA
ctgaggtaggcagatcactt

SEQ ID NO: 216541 - DNA, 20 bp, synthetic construct
  source 1..20: mol_type = other DNA
gctgaggtaggcagatcact

SEQ ID NO: 216542 - DNA, 20 bp, synthetic construct
  source 1..20: mol_type = other DNA
ggctgaggtaggcagatcac

SEQ ID NO: 216543 - DNA, 20 bp, synthetic construct
  source 1..20: mol_type = other DNA
aggctgaggtaggcagatca

SEQ ID NO: 216544 - DNA, 20 bp, synthetic construct
  source 1..20: mol_type = other DNA
gaggctgaggtaggcagatc

SEQ ID NO: 216545 - DNA, 20 bp, synthetic construct
  source 1..20: mol_type = other DNA
ggaggctgaggtaggcagat

SEQ ID NO: 216546 - DNA, 20 bp, synthetic construct
  source 1..20: mol_type = other DNA
gggaggctgaggtaggcaga

SEQ ID NO: 216547 - DNA, 20 bp, synthetic construct
  source 1..20: mol_type = other DNA
tgggaggctgaggtaggcag

SEQ ID NO: 216548 - DNA, 20 bp, synthetic construct
  source 1..20: mol_type = other DNA
ttgggaggctgaggtaggca

SEQ ID NO: 216549 - DNA, 20 bp, synthetic construct
  source 1..20: mol_type = other DNA
tttgggaggctgaggtaggc

SEQ ID NO: 216550 - DNA, 20 bp, synthetic construct
  source 1..20: mol_type = other DNA
ctttgggaggctgaggtagg

SEQ ID NO: 216551 - DNA, 20 bp, synthetic construct
  source 1..20: mol_type = other DNA
actttgggaggctgaggtag

SEQ ID NO: 216552 - DNA, 20 bp, synthetic construct
  source 1..20: mol_type = other DNA
cactttgggaggctgaggta

SEQ ID NO: 216553 - DNA, 20 bp, synthetic construct
  source 1..20: mol_type = other DNA
gcactttgggaggctgaggt

SEQ ID NO: 216554 - DNA, 20 bp, synthetic construct
  source 1..20: mol_type = other DNA
agcactttgggaggctgagg

SEQ ID NO: 216555 - DNA, 20 bp, synthetic construct
  source 1..20: mol_type = other DNA
cagcactttgggaggctgag

SEQ ID NO: 216556 - DNA, 20 bp, synthetic construct
  source 1..20: mol_type = other DNA
ccagcactttgggaggctga

SEQ ID NO: 216557 - DNA, 20 bp, synthetic construct
  source 1..20: mol_type = other DNA
cccagcactttgggaggctg

SEQ ID NO: 216558 - DNA, 20 bp, synthetic construct
  source 1..20: mol_type = other DNA
tcccagcactttgggaggct

SEQ ID NO: 216559 - DNA, 20 bp, synthetic construct
  source 1..20: mol_type = other DNA
atcccagcactttgggaggc

SEQ ID NO: 216560 - DNA, 20 bp, synthetic construct
  source 1..20: mol_type = other DNA
aatcccagcactttgggagg

SEQ ID NO: 216561 - DNA, 20 bp, synthetic construct
  source 1..20: mol_type = other DNA
taatcccagcactttgggag

SEQ ID NO: 216562 - DNA, 20 bp, synthetic construct
  source 1..20: mol_type = other DNA
gtaatcccagcactttggga

SEQ ID NO: 216563 - DNA, 20 bp, synthetic construct
  source 1..20: mol_type = other DNA
tgtaatcccagcactttggg

SEQ ID NO: 216564 - DNA, 20 bp, synthetic construct
  source 1..20: mol_type = other DNA
ctgtaatcccagcactttgg

SEQ ID NO: 216565 - DNA, 20 bp, synthetic construct
  source 1..20: mol_type = other DNA
cctgtaatcccagcactttg

SEQ ID NO: 216566 - DNA, 20 bp, synthetic construct
  source 1..20: mol_type = other DNA
gcctgtaatcccagcacttt

SEQ ID NO: 216567 - DNA, 20 bp, synthetic construct
  source 1..20: mol_type = other DNA
tgcctgtaatcccagcactt

SEQ ID NO: 216568 - DNA, 20 bp, synthetic construct
  source 1..20: mol_type = other DNA
atgcctgtaatcccagcact

SEQ ID NO: 216569 - DNA, 20 bp, synthetic construct
  source 1..20: mol_type = other DNA
catgcctgtaatcccagcac

SEQ ID NO: 216570 - DNA, 20 bp, synthetic construct
  source 1..20: mol_type = other DNA
tcatgcctgtaatcccagca

SEQ ID NO: 216571 - DNA, 20 bp, synthetic construct
  source 1..20: mol_type = other DNA
ctcatgcctgtaatcccagc

SEQ ID NO: 216572 - DNA, 20 bp, synthetic construct
  source 1..20: mol_type = other DNA
gctcatgcctgtaatcccag

SEQ ID NO: 216573 - DNA, 20 bp, synthetic construct
  source 1..20: mol_type = other DNA
ggctcatgcctgtaatccca

SEQ ID NO: 216574 - DNA, 20 bp, synthetic construct
  source 1..20: mol_type = other DNA
tggctcatgcctgtaatccc

SEQ ID NO: 216575 - DNA, 20 bp, synthetic construct
  source 1..20: mol_type = other DNA
gtggctcatgcctgtaatcc

SEQ ID NO: 216576 - DNA, 20 bp, synthetic construct
  source 1..20: mol_type = other DNA
ggtggctcatgcctgtaatc

SEQ ID NO: 216577 - DNA, 20 bp, synthetic construct
  source 1..20: mol_type = other DNA
tggtggctcatgcctgtaat

SEQ ID NO: 216578 - DNA, 20 bp, synthetic construct
  source 1..20: mol_type = other DNA
atggtggctcatgcctgtaa

SEQ ID NO: 216579 - DNA, 20 bp, synthetic construct
  source 1..20: mol_type = other DNA
catggtggctcatgcctgta

SEQ ID NO: 216580 - DNA, 20 bp, synthetic construct
  source 1..20: mol_type = other DNA
gcatggtggctcatgcctgt

SEQ ID NO: 216581 - DNA, 20 bp, synthetic construct
  source 1..20: mol_type = other DNA
ggcatggtggctcatgcctg

SEQ ID NO: 216582 - DNA, 20 bp, synthetic construct
  source 1..20: mol_type = other DNA
aggcatggtggctcatgcct

SEQ ID NO: 216583 - DNA, 20 bp, synthetic construct
  source 1..20: mol_type = other DNA
caggcatggtggctcatgcc

SEQ ID NO: 216584 - DNA, 20 bp, synthetic construct
  source 1..20: mol_type = other DNA
ccaggcatggtggctcatgc

SEQ ID NO: 216585 - DNA, 20 bp, synthetic construct
  source 1..20: mol_type = other DNA
gccaggcatggtggctcatg

SEQ ID NO: 216586 - DNA, 20 bp, synthetic construct
  source 1..20: mol_type = other DNA
tgccaggcatggtggctcat

SEQ ID NO: 216587 - DNA, 20 bp, synthetic construct
  source 1..20: mol_type = other DNA
ctgccaggcatggtggctca

SEQ ID NO: 216588 - DNA, 20 bp, synthetic construct
  source 1..20: mol_type = other DNA
actgccaggcatggtggctc

SEQ ID NO: 216589 - DNA, 20 bp, synthetic construct
  source 1..20: mol_type = other DNA
cactgccaggcatggtggct

SEQ ID NO: 216590 - DNA, 20 bp, synthetic construct
  source 1..20: mol_type = other DNA
acactgccaggcatggtggc

SEQ ID NO: 216591 - DNA, 20 bp, synthetic construct
  source 1..20: mol_type = other DNA
cacactgccaggcatggtgg

SEQ ID NO: 216592 - DNA, 20 bp, synthetic construct
  source 1..20: mol_type = other DNA
ccacactgccaggcatggtg

SEQ ID NO: 216593 - DNA, 20 bp, synthetic construct
  source 1..20: mol_type = other DNA
gccacactgccaggcatggt

SEQ ID NO: 216594 - DNA, 20 bp, synthetic construct
  source 1..20: mol_type = other DNA
tgccacactgccaggcatgg

SEQ ID NO: 216595 - DNA, 20 bp, synthetic construct
  source 1..20: mol_type = other DNA
gtgccacactgccaggcatg

SEQ ID NO: 216596 - DNA, 20 bp, synthetic construct
  source 1..20: mol_type = other DNA
agtgccacactgccaggcat

SEQ ID NO: 216597 - DNA, 20 bp, synthetic construct
  source 1..20: mol_type = other DNA
aagtgccacactgccaggca

SEQ ID NO: 216598 - DNA, 20 bp, synthetic construct
  source 1..20: mol_type = other DNA
gaagtgccacactgccaggc

SEQ ID NO: 216599 - DNA, 20 bp, synthetic construct
  source 1..20: mol_type = other DNA
agaagtgccacactgccagg

SEQ ID NO: 216600 - DNA, 20 bp, synthetic construct
  source 1..20: mol_type = other DNA
aagaagtgccacactgccag

SEQ ID NO: 216601 - DNA, 20 bp, synthetic construct
  source 1..20: mol_type = other DNA
taagaagtgccacactgcca

SEQ ID NO: 216602 - DNA, 20 bp, synthetic construct
  source 1..20: mol_type = other DNA
gtaagaagtgccacactgcc

SEQ ID NO: 216603 - DNA, 20 bp, synthetic construct
  source 1..20: mol_type = other DNA
cgtaagaagtgccacactgc

SEQ ID NO: 216604 - DNA, 20 bp, synthetic construct
  source 1..20: mol_type = other DNA
acgtaagaagtgccacactg

SEQ ID NO: 216605 - DNA, 20 bp, synthetic construct
  source 1..20: mol_type = other DNA
cacgtaagaagtgccacact

SEQ ID NO: 216606 - DNA, 20 bp, synthetic construct
  source 1..20: mol_type = other DNA
acacgtaagaagtgccacac

SEQ ID NO: 216607 - DNA, 20 bp, synthetic construct
  source 1..20: mol_type = other DNA
cacacgtaagaagtgccaca

SEQ ID NO: 216608 - DNA, 20 bp, synthetic construct
  source 1..20: mol_type = other DNA
acacacgtaagaagtgccac

SEQ ID NO: 216609 - DNA, 20 bp, synthetic construct
  source 1..20: mol_type = other DNA
aacacacgtaagaagtgcca

SEQ ID NO: 216610 - DNA, 20 bp, synthetic construct
  source 1..20: mol_type = other DNA
gaacacacgtaagaagtgcc

SEQ ID NO: 216611 - DNA, 20 bp, synthetic construct
  source 1..20: mol_type = other DNA
tgaacacacgtaagaagtgc

SEQ ID NO: 216612 - DNA, 20 bp, synthetic construct
  source 1..20: mol_type = other DNA
ctgaacacacgtaagaagtg

SEQ ID NO: 216613 - DNA, 20 bp, synthetic construct
  source 1..20: mol_type = other DNA
gctgaacacacgtaagaagt

SEQ ID NO: 216614 - DNA, 20 bp, synthetic construct
  source 1..20: mol_type = other DNA
cgctgaacacacgtaagaag

SEQ ID NO: 216615 - DNA, 20 bp, synthetic construct
  source 1..20: mol_type = other DNA
ccgctgaacacacgtaagaa

SEQ ID NO: 216616 - DNA, 20 bp, synthetic construct
  source 1..20: mol_type = other DNA
tccgctgaacacacgtaaga

SEQ ID NO: 216617 - DNA, 20 bp, synthetic construct
  source 1..20: mol_type = other DNA
gtccgctgaacacacgtaag

SEQ ID NO: 216618 - DNA, 20 bp, synthetic construct
  source 1..20: mol_type = other DNA
tgtccgctgaacacacgtaa

SEQ ID NO: 216619 - DNA, 20 bp, synthetic construct
  source 1..20: mol_type = other DNA
gtgtccgctgaacacacgta

SEQ ID NO: 216620 - DNA, 20 bp, synthetic construct
  source 1..20: mol_type = other DNA
agtgtccgctgaacacacgt

SEQ ID NO: 216621 - DNA, 20 bp, synthetic construct
  source 1..20: mol_type = other DNA
cagtgtccgctgaacacacg

SEQ ID NO: 216622 - DNA, 20 bp, synthetic construct
  source 1..20: mol_type = other DNA
acagtgtccgctgaacacac

SEQ ID NO: 216623 - DNA, 20 bp, synthetic construct
  source 1..20: mol_type = other DNA
aacagtgtccgctgaacaca

SEQ ID NO: 216624 - DNA, 20 bp, synthetic construct
  source 1..20: mol_type = other DNA
aaacagtgtccgctgaacac

SEQ ID NO: 216625 - DNA, 20 bp, synthetic construct
  source 1..20: mol_type = other DNA
taaacagtgtccgctgaaca

SEQ ID NO: 216626 - DNA, 20 bp, synthetic construct
  source 1..20: mol_type = other DNA
ataaacagtgtccgctgaac

SEQ ID NO: 216627 - DNA, 20 bp, synthetic construct
  source 1..20: mol_type = other DNA
gataaacagtgtccgctgaa

SEQ ID NO: 216628 - DNA, 20 bp, synthetic construct
  source 1..20: mol_type = other DNA
agataaacagtgtccgctga

SEQ ID NO: 216629 - DNA, 20 bp, synthetic construct
  source 1..20: mol_type = other DNA
aagataaacagtgtccgctg

SEQ ID NO: 216630 - DNA, 20 bp, synthetic construct
  source 1..20: mol_type = other DNA
gaagataaacagtgtccgct

SEQ ID NO: 216631 - DNA, 20 bp, synthetic construct
  source 1..20: mol_type = other DNA
agaagataaacagtgtccgc

SEQ ID NO: 216632 - DNA, 20 bp, synthetic construct
  source 1..20: mol_type = other DNA
cagaagataaacagtgtccg

SEQ ID NO: 216633 - DNA, 20 bp, synthetic construct
  source 1..20: mol_type = other DNA
acagaagataaacagtgtcc

SEQ ID NO: 216634 - DNA, 20 bp, synthetic construct
  source 1..20: mol_type = other DNA
gacagaagataaacagtgtc

SEQ ID NO: 216635 - DNA, 20 bp, synthetic construct
  source 1..20: mol_type = other DNA
ggacagaagataaacagtgt

SEQ ID NO: 216636 - DNA, 20 bp, synthetic construct
  source 1..20: mol_type = other DNA
gggacagaagataaacagtg

SEQ ID NO: 216637 - DNA, 20 bp, synthetic construct
  source 1..20: mol_type = other DNA
agggacagaagataaacagt

SEQ ID NO: 216638 - DNA, 20 bp, synthetic construct
  source 1..20: mol_type = other DNA
gagggacagaagataaacag

SEQ ID NO: 216639 - DNA, 20 bp, synthetic construct
  source 1..20: mol_type = other DNA
ggagggacagaagataaaca

SEQ ID NO: 216640 - DNA, 20 bp, synthetic construct
  source 1..20: mol_type = other DNA
tggagggacagaagataaac

SEQ ID NO: 216641 - DNA, 20 bp, synthetic construct
  source 1..20: mol_type = other DNA
ttggagggacagaagataaa

SEQ ID NO: 216642 - DNA, 20 bp, synthetic construct
  source 1..20: mol_type = other DNA
cttggagggacagaagataa

SEQ ID NO: 216643 - DNA, 20 bp, synthetic construct
  source 1..20: mol_type = other DNA
tcttggagggacagaagata

SEQ ID NO: 216644 - DNA, 20 bp, synthetic construct
  source 1..20: mol_type = other DNA
gtcttggagggacagaagat

SEQ ID NO: 216645 - DNA, 20 bp, synthetic construct
  source 1..20: mol_type = other DNA
cgtcttggagggacagaaga

SEQ ID NO: 216646 - DNA, 20 bp, synthetic construct
  source 1..20: mol_type = other DNA
ccgtcttggagggacagaag

SEQ ID NO: 216647 - DNA, 20 bp, synthetic construct
  source 1..20: mol_type = other DNA
accgtcttggagggacagaa

SEQ ID NO: 216648 - DNA, 20 bp, synthetic construct
  source 1..20: mol_type = other DNA
caccgtcttggagggacaga

SEQ ID NO: 216649 - DNA, 20 bp, synthetic construct
  source 1..20: mol_type = other DNA
gcaccgtcttggagggacag

SEQ ID NO: 216650 - DNA, 20 bp, synthetic construct
  source 1..20: mol_type = other DNA
agcaccgtcttggagggaca

SEQ ID NO: 216651 - DNA, 20 bp, synthetic construct
  source 1..20: mol_type = other DNA
cagcaccgtcttggagggac

SEQ ID NO: 216652 - DNA, 20 bp, synthetic construct
  source 1..20: mol_type = other DNA
tcagcaccgtcttggaggga

SEQ ID NO: 216653 - DNA, 20 bp, synthetic construct
  source 1..20: mol_type = other DNA
ctcagcaccgtcttggaggg

SEQ ID NO: 216654 - DNA, 20 bp, synthetic construct
  source 1..20: mol_type = other DNA
gctcagcaccgtcttggagg

SEQ ID NO: 216655 - DNA, 20 bp, synthetic construct
  source 1..20: mol_type = other DNA
agctcagcaccgtcttggag

SEQ ID NO: 216656 - DNA, 20 bp, synthetic construct
  source 1..20: mol_type = other DNA
gagctcagcaccgtcttgga

SEQ ID NO: 216657 - DNA, 20 bp, synthetic construct
  source 1..20: mol_type = other DNA
tgagctcagcaccgtcttgg

SEQ ID NO: 216658 - DNA, 20 bp, synthetic construct
  source 1..20: mol_type = other DNA
ctgagctcagcaccgtcttg

SEQ ID NO: 216659 - DNA, 20 bp, synthetic construct
  source 1..20: mol_type = other DNA
cctgagctcagcaccgtctt

SEQ ID NO: 216660 - DNA, 20 bp, synthetic construct
  source 1..20: mol_type = other DNA
acctgagctcagcaccgtct

SEQ ID NO: 216661 - DNA, 20 bp, synthetic construct
  source 1..20: mol_type = other DNA
gacctgagctcagcaccgtc

SEQ ID NO: 216662 - DNA, 20 bp, synthetic construct
  source 1..20: mol_type = other DNA
cgacctgagctcagcaccgt

SEQ ID NO: 216663 - DNA, 20 bp, synthetic construct
  source 1..20: mol_type = other DNA
acgacctgagctcagcaccg

SEQ ID NO: 216664 - DNA, 20 bp, synthetic construct
  source 1..20: mol_type = other DNA
aacgacctgagctcagcacc

SEQ ID NO: 216665 - DNA, 20 bp, synthetic construct
  source 1..20: mol_type = other DNA
gaacgacctgagctcagcac

SEQ ID NO: 216666 - DNA, 20 bp, synthetic construct
  source 1..20: mol_type = other DNA
tgaacgacctgagctcagca

SEQ ID NO: 216667 - DNA, 20 bp, synthetic construct
  source 1..20: mol_type = other DNA
atgaacgacctgagctcagc

SEQ ID NO: 216668 - DNA, 20 bp, synthetic construct
  source 1..20: mol_type = other DNA
aatgaacgacctgagctcag

SEQ ID NO: 216669 - DNA, 20 bp, synthetic construct
  source 1..20: mol_type = other DNA
taatgaacgacctgagctca

SEQ ID NO: 216670 - DNA, 20 bp, synthetic construct
  source 1..20: mol_type = other DNA
gtaatgaacgacctgagctc

SEQ ID NO: 216671 - DNA, 20 bp, synthetic construct
  source 1..20: mol_type = other DNA
agtaatgaacgacctgagct

SEQ ID NO: 216672 - DNA, 20 bp, synthetic construct
  source 1..20: mol_type = other DNA
cagtaatgaacgacctgagc

SEQ ID NO: 216673 - DNA, 20 bp, synthetic construct
  source 1..20: mol_type = other DNA
ccagtaatgaacgacctgag

SEQ ID NO: 216674 - DNA, 20 bp, synthetic construct
  source 1..20: mol_type = other DNA
gccagtaatgaacgacctga

SEQ ID NO: 216675 - DNA, 20 bp, synthetic construct
  source 1..20: mol_type = other DNA
tgccagtaatgaacgacctg

SEQ ID NO: 216676 - DNA, 20 bp, synthetic construct
  source 1..20: mol_type = other DNA
ctgccagtaatgaacgacct

SEQ ID NO: 216677 - DNA, 20 bp, synthetic construct
  source 1..20: mol_type = other DNA
tctgccagtaatgaacgacc

SEQ ID NO: 216678 - DNA, 20 bp, synthetic construct
  source 1..20: mol_type = other DNA
gtctgccagtaatgaacgac

SEQ ID NO: 216679 - DNA, 20 bp, synthetic construct
  source 1..20: mol_type = other DNA
tgtctgccagtaatgaacga

SEQ ID NO: 216680 - DNA, 20 bp, synthetic construct
  source 1..20: mol_type = other DNA
ttgtctgccagtaatgaacg

SEQ ID NO: 216681 - DNA, 20 bp, synthetic construct
  source 1..20: mol_type = other DNA
gttgtctgccagtaatgaac

SEQ ID NO: 216682 - DNA, 20 bp, synthetic construct
  source 1..20: mol_type = other DNA
agttgtctgccagtaatgaa

SEQ ID NO: 216683 - DNA, 20 bp, synthetic construct
  source 1..20: mol_type = other DNA
cagttgtctgccagtaatga

SEQ ID NO: 216684 - DNA, 20 bp, synthetic construct
  source 1..20: mol_type = other DNA
gcagttgtctgccagtaatg

SEQ ID NO: 216685 - DNA, 20 bp, synthetic construct
  source 1..20: mol_type = other DNA
agcagttgtctgccagtaat

SEQ ID NO: 216686 - DNA, 20 bp, synthetic construct
  source 1..20: mol_type = other DNA
cagcagttgtctgccagtaa

SEQ ID NO: 216687 - DNA, 20 bp, synthetic construct
  source 1..20: mol_type = other DNA
tcagcagttgtctgccagta

SEQ ID NO: 216688 - DNA, 20 bp, synthetic construct
  source 1..20: mol_type = other DNA
atcagcagttgtctgccagt

SEQ ID NO: 216689 - DNA, 20 bp, synthetic construct
  source 1..20: mol_type = other DNA
aatcagcagttgtctgccag

SEQ ID NO: 216690 - DNA, 20 bp, synthetic construct
  source 1..20: mol_type = other DNA
aaatcagcagttgtctgcca

SEQ ID NO: 216691 - DNA, 20 bp, synthetic construct
  source 1..20: mol_type = other DNA
gaaatcagcagttgtctgcc

SEQ ID NO: 216692 - DNA, 20 bp, synthetic construct
  source 1..20: mol_type = other DNA
ggaaatcagcagttgtctgc

SEQ ID NO: 216693 - DNA, 20 bp, synthetic construct
  source 1..20: mol_type = other DNA
tggaaatcagcagttgtctg

SEQ ID NO: 216694 - DNA, 20 bp, synthetic construct
  source 1..20: mol_type = other DNA
ttggaaatcagcagttgtct

SEQ ID NO: 216695 - DNA, 20 bp, synthetic construct
  source 1..20: mol_type = other DNA
gttggaaatcagcagttgtc

SEQ ID NO: 216696 - DNA, 20 bp, synthetic construct
  source 1..20: mol_type = other DNA
tgttggaaatcagcagttgt

SEQ ID NO: 216697 - DNA, 20 bp, synthetic construct
  source 1..20: mol_type = other DNA
ctgttggaaatcagcagttg

SEQ ID NO: 216698 - DNA, 20 bp, synthetic construct
  source 1..20: mol_type = other DNA
tctgttggaaatcagcagtt

SEQ ID NO: 216699 - DNA, 20 bp, synthetic construct
  source 1..20: mol_type = other DNA
ttctgttggaaatcagcagt

SEQ ID NO: 216700 - DNA, 20 bp, synthetic construct
  source 1..20: mol_type = other DNA
attctgttggaaatcagcag

SEQ ID NO: 216701 - DNA, 20 bp, synthetic construct
  source 1..20: mol_type = other DNA
aattctgttggaaatcagca

SEQ ID NO: 216702 - DNA, 20 bp, synthetic construct
  source 1..20: mol_type = other DNA
caattctgttggaaatcagc

SEQ ID NO: 216703 - DNA, 20 bp, synthetic construct
  source 1..20: mol_type = other DNA
gcaattctgttggaaatcag

SEQ ID NO: 216704 - DNA, 20 bp, synthetic construct
  source 1..20: mol_type = other DNA
ggcaattctgttggaaatca

SEQ ID NO: 216705 - DNA, 20 bp, synthetic construct
  source 1..20: mol_type = other DNA
tggcaattctgttggaaatc

SEQ ID NO: 216706 - DNA, 20 bp, synthetic construct
  source 1..20: mol_type = other DNA
atggcaattctgttggaaat

SEQ ID NO: 216707 - DNA, 20 bp, synthetic construct
  source 1..20: mol_type = other DNA
gatggcaattctgttggaaa

SEQ ID NO: 216708 - DNA, 20 bp, synthetic construct
  source 1..20: mol_type = other DNA
ggatggcaattctgttggaa

SEQ ID NO: 216709 - DNA, 20 bp, synthetic construct
  source 1..20: mol_type = other DNA
aggatggcaattctgttgga

SEQ ID NO: 216710 - DNA, 20 bp, synthetic construct
  source 1..20: mol_type = other DNA
gaggatggcaattctgttgg

SEQ ID NO: 216711 - DNA, 20 bp, synthetic construct
  source 1..20: mol_type = other DNA
agaggatggcaattctgttg

SEQ ID NO: 216712 - DNA, 20 bp, synthetic construct
  source 1..20: mol_type = other DNA
aagaggatggcaattctgtt

SEQ ID NO: 216713 - DNA, 20 bp, synthetic construct
  source 1..20: mol_type = other DNA
gaagaggatggcaattctgt

SEQ ID NO: 216714 - DNA, 20 bp, synthetic construct
  source 1..20: mol_type = other DNA
agaagaggatggcaattctg

SEQ ID NO: 216715 - DNA, 20 bp, synthetic construct
  source 1..20: mol_type = other DNA
gagaagaggatggcaattct

SEQ ID NO: 216716 - DNA, 20 bp, synthetic construct
  source 1..20: mol_type = other DNA
ggagaagaggatggcaattc

SEQ ID NO: 216717 - DNA, 20 bp, synthetic construct
  source 1..20: mol_type = other DNA
gggagaagaggatggcaatt

SEQ ID NO: 216718 - DNA, 20 bp, synthetic construct
  source 1..20: mol_type = other DNA
ggggagaagaggatggcaat

SEQ ID NO: 216719 - DNA, 20 bp, synthetic construct
  source 1..20: mol_type = other DNA
aggggagaagaggatggcaa

SEQ ID NO: 216720 - DNA, 20 bp, synthetic construct
  source 1..20: mol_type = other DNA
caggggagaagaggatggca

SEQ ID NO: 216721 - DNA, 20 bp, synthetic construct
  source 1..20: mol_type = other DNA
gcaggggagaagaggatggc

SEQ ID NO: 216722 - DNA, 20 bp, synthetic construct
  source 1..20: mol_type = other DNA
cgcaggggagaagaggatgg

SEQ ID NO: 216723 - DNA, 20 bp, synthetic construct
  source 1..20: mol_type = other DNA
tcgcaggggagaagaggatg

SEQ ID NO: 216724 - DNA, 20 bp, synthetic construct
  source 1..20: mol_type = other DNA
gtcgcaggggagaagaggat

SEQ ID NO: 216725 - DNA, 20 bp, synthetic construct
  source 1..20: mol_type = other DNA
agtcgcaggggagaagagga

SEQ ID NO: 216726 - DNA, 20 bp, synthetic construct
  source 1..20: mol_type = other DNA
aagtcgcaggggagaagagg

SEQ ID NO: 216727 - DNA, 20 bp, synthetic construct
  source 1..20: mol_type = other DNA
aaagtcgcaggggagaagag

SEQ ID NO: 216728 - DNA, 20 bp, synthetic construct
  source 1..20: mol_type = other DNA
gaaagtcgcaggggagaaga

SEQ ID NO: 216729 - DNA, 20 bp, synthetic construct
  source 1..20: mol_type = other DNA
tgaaagtcgcaggggagaag

SEQ ID NO: 216730 - DNA, 20 bp, synthetic construct
  source 1..20: mol_type = other DNA
ctgaaagtcgcaggggagaa

SEQ ID NO: 216731 - DNA, 20 bp, synthetic construct
  source 1..20: mol_type = other DNA
tctgaaagtcgcaggggaga

SEQ ID NO: 216732 - DNA, 20 bp, synthetic construct
  source 1..20: mol_type = other DNA
ctctgaaagtcgcaggggag

SEQ ID NO: 216733 - DNA, 20 bp, synthetic construct
  source 1..20: mol_type = other DNA
actctgaaagtcgcagggga

SEQ ID NO: 216734 - DNA, 20 bp, synthetic construct
  source 1..20: mol_type = other DNA
cactctgaaagtcgcagggg

SEQ ID NO: 216735 - DNA, 20 bp, synthetic construct
  source 1..20: mol_type = other DNA
acactctgaaagtcgcaggg

SEQ ID NO: 216736 - DNA, 20 bp, synthetic construct
  source 1..20: mol_type = other DNA
cacactctgaaagtcgcagg

SEQ ID NO: 216737 - DNA, 20 bp, synthetic construct
  source 1..20: mol_type = other DNA
tcacactctgaaagtcgcag

SEQ ID NO: 216738 - DNA, 20 bp, synthetic construct
  source 1..20: mol_type = other DNA
gtcacactctgaaagtcgca

SEQ ID NO: 216739 - DNA, 20 bp, synthetic construct
  source 1..20: mol_type = other DNA
ggtcacactctgaaagtcgc

SEQ ID NO: 216740 - DNA, 20 bp, synthetic construct
  source 1..20: mol_type = other DNA
aggtcacactctgaaagtcg

SEQ ID NO: 216741 - DNA, 20 bp, synthetic construct
  source 1..20: mol_type = other DNA
gaggtcacactctgaaagtc

SEQ ID NO: 216742 - DNA, 20 bp, synthetic construct
  source 1..20: mol_type = other DNA
tgaggtcacactctgaaagt

SEQ ID NO: 216743 - DNA, 20 bp, synthetic construct
  source 1..20: mol_type = other DNA
ctgaggtcacactctgaaag

SEQ ID NO: 216744 - DNA, 20 bp, synthetic construct
  source 1..20: mol_type = other DNA
tctgaggtcacactctgaaa

SEQ ID NO: 216745 - DNA, 20 bp, synthetic construct
  source 1..20: mol_type = other DNA
gtctgaggtcacactctgaa

SEQ ID NO: 216746 - DNA, 20 bp, synthetic construct
  source 1..20: mol_type = other DNA
agtctgaggtcacactctga

SEQ ID NO: 216747 - DNA, 20 bp, synthetic construct
  source 1..20: mol_type = other DNA
gagtctgaggtcacactctg

SEQ ID NO: 216748 - DNA, 20 bp, synthetic construct
  source 1..20: mol_type = other DNA
tgagtctgaggtcacactct

SEQ ID NO: 216749 - DNA, 20 bp, synthetic construct
  source 1..20: mol_type = other DNA
ttgagtctgaggtcacactc

SEQ ID NO: 216750 - DNA, 20 bp, synthetic construct
  source 1..20: mol_type = other DNA
tttgagtctgaggtcacact

SEQ ID NO: 216751 - DNA, 20 bp, synthetic construct
  source 1..20: mol_type = other DNA
ttttgagtctgaggtcacac

SEQ ID NO: 216752 - DNA, 20 bp, synthetic construct
  source 1..20: mol_type = other DNA
tttttgagtctgaggtcaca

SEQ ID NO: 216753 - DNA, 20 bp, synthetic construct
  source 1..20: mol_type = other DNA
atttttgagtctgaggtcac

SEQ ID NO: 216754 - DNA, 20 bp, synthetic construct
  source 1..20: mol_type = other DNA
aatttttgagtctgaggtca

SEQ ID NO: 216755 - DNA, 20 bp, synthetic construct
  source 1..20: mol_type = other DNA
taatttttgagtctgaggtc

SEQ ID NO: 216756 - DNA, 20 bp, synthetic construct
  source 1..20: mol_type = other DNA
ctaatttttgagtctgaggt

SEQ ID NO: 216757 - DNA, 20 bp, synthetic construct
  source 1..20: mol_type = other DNA
tctaatttttgagtctgagg

SEQ ID NO: 216758 - DNA, 20 bp, synthetic construct
  source 1..20: mol_type = other DNA
ttctaatttttgagtctgag

SEQ ID NO: 216759 - DNA, 20 bp, synthetic construct
  source 1..20: mol_type = other DNA
cttctaatttttgagtctga

SEQ ID NO: 216760 - DNA, 20 bp, synthetic construct
  source 1..20: mol_type = other DNA
acttctaatttttgagtctg

SEQ ID NO: 216761 - DNA, 20 bp, synthetic construct
  source 1..20: mol_type = other DNA
cacttctaatttttgagtct

SEQ ID NO: 216762 - DNA, 20 bp, synthetic construct
  source 1..20: mol_type = other DNA
tcacttctaatttttgagtc

SEQ ID NO: 216763 - DNA, 20 bp, synthetic construct
  source 1..20: mol_type = other DNA
ttcacttctaatttttgagt

SEQ ID NO: 216764 - DNA, 20 bp, synthetic construct
  source 1..20: mol_type = other DNA
tttcacttctaatttttgag

SEQ ID NO: 216765 - DNA, 20 bp, synthetic construct
  source 1..20: mol_type = other DNA
ttttcacttctaatttttga

SEQ ID NO: 216766 - DNA, 20 bp, synthetic construct
  source 1..20: mol_type = other DNA
gttttcacttctaatttttg

SEQ ID NO: 216767 - DNA, 20 bp, synthetic construct
  source 1..20: mol_type = other DNA
tgttttcacttctaattttt

SEQ ID NO: 216768 - DNA, 20 bp, synthetic construct
  source 1..20: mol_type = other DNA
atgttttcacttctaatttt

SEQ ID NO: 216769 - DNA, 20 bp, synthetic construct
  source 1..20: mol_type = other DNA
gatgttttcacttctaattt

SEQ ID NO: 216770 - DNA, 20 bp, synthetic construct
  source 1..20: mol_type = other DNA
agatgttttcacttctaatt

SEQ ID NO: 216771 - DNA, 20 bp, synthetic construct
  source 1..20: mol_type = other DNA
aagatgttttcacttctaat

SEQ ID NO: 216772 - DNA, 20 bp, synthetic construct
  source 1..20: mol_type = other DNA
taagatgttttcacttctaa

SEQ ID NO: 216773 - DNA, 20 bp, synthetic construct
  source 1..20: mol_type = other DNA
ttaagatgttttcacttcta

SEQ ID NO: 216774 - DNA, 20 bp, synthetic construct
  source 1..20: mol_type = other DNA
tttaagatgttttcacttct

SEQ ID NO: 216775 - DNA, 20 bp, synthetic construct
  source 1..20: mol_type = other DNA
ttttaagatgttttcacttc

SEQ ID NO: 216776 - DNA, 20 bp, synthetic construct
  source 1..20: mol_type = other DNA
tttttaagatgttttcactt

SEQ ID NO: 216777 - DNA, 20 bp, synthetic construct
  source 1..20: mol_type = other DNA
gtttttaagatgttttcact

SEQ ID NO: 216778 - DNA, 20 bp, synthetic construct
  source 1..20: mol_type = other DNA
agtttttaagatgttttcac

SEQ ID NO: 216779 - DNA, 20 bp, synthetic construct
  source 1..20: mol_type = other DNA
tagtttttaagatgttttca

SEQ ID NO: 216780 - DNA, 20 bp, synthetic construct
  source 1..20: mol_type = other DNA
atagtttttaagatgttttc

SEQ ID NO: 216781 - DNA, 20 bp, synthetic construct
  source 1..20: mol_type = other DNA
gatagtttttaagatgtttt

SEQ ID NO: 216782 - DNA, 20 bp, synthetic construct
  source 1..20: mol_type = other DNA
tgatagtttttaagatgttt

SEQ ID NO: 216783 - DNA, 20 bp, synthetic construct
  source 1..20: mol_type = other DNA
gtgatagtttttaagatgtt

SEQ ID NO: 216784 - DNA, 20 bp, synthetic construct
  source 1..20: mol_type = other DNA
ggtgatagtttttaagatgt

SEQ ID NO: 216785 - DNA, 20 bp, synthetic construct
  source 1..20: mol_type = other DNA
aggtgatagtttttaagatg

SEQ ID NO: 216786 - DNA, 20 bp, synthetic construct
  source 1..20: mol_type = other DNA
aaggtgatagtttttaagat

SEQ ID NO: 216787 - DNA, 20 bp, synthetic construct
  source 1..20: mol_type = other DNA
aaaggtgatagtttttaaga

SEQ ID NO: 216788 - DNA, 20 bp, synthetic construct
  source 1..20: mol_type = other DNA
aaaaggtgatagtttttaag

SEQ ID NO: 216789 - DNA, 20 bp, synthetic construct
  source 1..20: mol_type = other DNA
gaaaaggtgatagtttttaa

SEQ ID NO: 216790 - DNA, 20 bp, synthetic construct
  source 1..20: mol_type = other DNA
agaaaaggtgatagttttta

SEQ ID NO: 216791 - DNA, 20 bp, synthetic construct
  source 1..20: mol_type = other DNA
aagaaaaggtgatagttttt

SEQ ID NO: 216792 - DNA, 20 bp, synthetic construct
  source 1..20: mol_type = other DNA
gaagaaaaggtgatagtttt

SEQ ID NO: 216793 - DNA, 20 bp, synthetic construct
  source 1..20: mol_type = other DNA
ggaagaaaaggtgatagttt

SEQ ID NO: 216794 - DNA, 20 bp, synthetic construct
  source 1..20: mol_type = other DNA
aggaagaaaaggtgatagtt

SEQ ID NO: 216795 - DNA, 20 bp, synthetic construct
  source 1..20: mol_type = other DNA
taggaagaaaaggtgatagt

SEQ ID NO: 216796 - DNA, 20 bp, synthetic construct
  source 1..20: mol_type = other DNA
ttaggaagaaaaggtgatag

SEQ ID NO: 216797 - DNA, 20 bp, synthetic construct
  source 1..20: mol_type = other DNA
attaggaagaaaaggtgata

SEQ ID NO: 216798 - DNA, 20 bp, synthetic construct
  source 1..20: mol_type = other DNA
gattaggaagaaaaggtgat

SEQ ID NO: 216799 - DNA, 20 bp, synthetic construct
  source 1..20: mol_type = other DNA
ggattaggaagaaaaggtga

SEQ ID NO: 216800 - DNA, 20 bp, synthetic construct
  source 1..20: mol_type = other DNA
aggattaggaagaaaaggtg

SEQ ID NO: 216801 - DNA, 20 bp, synthetic construct
  source 1..20: mol_type = other DNA
gaggattaggaagaaaaggt

SEQ ID NO: 216802 - DNA, 20 bp, synthetic construct
  source 1..20: mol_type = other DNA
ggaggattaggaagaaaagg

SEQ ID NO: 216803 - DNA, 20 bp, synthetic construct
  source 1..20: mol_type = other DNA
aggaggattaggaagaaaag

SEQ ID NO: 216804 - DNA, 20 bp, synthetic construct
  source 1..20: mol_type = other DNA
gaggaggattaggaagaaaa

SEQ ID NO: 216805 - DNA, 20 bp, synthetic construct
  source 1..20: mol_type = other DNA
agaggaggattaggaagaaa

SEQ ID NO: 216806 - DNA, 20 bp, synthetic construct
  source 1..20: mol_type = other DNA
gagaggaggattaggaagaa

SEQ ID NO: 216807 - DNA, 20 bp, synthetic construct
  source 1..20: mol_type = other DNA
ggagaggaggattaggaaga

SEQ ID NO: 216808 - DNA, 20 bp, synthetic construct
  source 1..20: mol_type = other DNA
gggagaggaggattaggaag

SEQ ID NO: 216809 - DNA, 20 bp, synthetic construct
  source 1..20: mol_type = other DNA
ggggagaggaggattaggaa

SEQ ID NO: 216810 - DNA, 20 bp, synthetic construct
  source 1..20: mol_type = other DNA
aggggagaggaggattagga

SEQ ID NO: 216811 - DNA, 20 bp, synthetic construct
  source 1..20: mol_type = other DNA
gaggggagaggaggattagg

SEQ ID NO: 216812 - DNA, 20 bp, synthetic construct
  source 1..20: mol_type = other DNA
ggaggggagaggaggattag

SEQ ID NO: 216813 - DNA, 20 bp, synthetic construct
  source 1..20: mol_type = other DNA
gggaggggagaggaggatta

SEQ ID NO: 216814 - DNA, 20 bp, synthetic construct
  source 1..20: mol_type = other DNA
agggaggggagaggaggatt

SEQ ID NO: 216815 - DNA, 20 bp, synthetic construct
  source 1..20: mol_type = other DNA
cagggaggggagaggaggat

SEQ ID NO: 216816 - DNA, 20 bp, synthetic construct
  source 1..20: mol_type = other DNA
acagggaggggagaggagga

SEQ ID NO: 216817 - DNA, 20 bp, synthetic construct
  source 1..20: mol_type = other DNA
gacagggaggggagaggagg

SEQ ID NO: 216818 - DNA, 20 bp, synthetic construct
  source 1..20: mol_type = other DNA
agacagggaggggagaggag

SEQ ID NO: 216819 - DNA, 20 bp, synthetic construct
  source 1..20: mol_type = other DNA
aagacagggaggggagagga

SEQ ID NO: 216820 - DNA, 20 bp, synthetic construct
  source 1..20: mol_type = other DNA
gaagacagggaggggagagg

SEQ ID NO: 216821 - DNA, 20 bp, synthetic construct
  source 1..20: mol_type = other DNA
ggaagacagggaggggagag

SEQ ID NO: 216822 - DNA, 20 bp, synthetic construct
  source 1..20: mol_type = other DNA
aggaagacagggaggggaga

SEQ ID NO: 216823 - DNA, 20 bp, synthetic construct
  source 1..20: mol_type = other DNA
aaggaagacagggaggggag

SEQ ID NO: 216824 - DNA, 20 bp, synthetic construct
  source 1..20: mol_type = other DNA
caaggaagacagggagggga

SEQ ID NO: 216825 - DNA, 20 bp, synthetic construct
  source 1..20: mol_type = other DNA
acaaggaagacagggagggg

SEQ ID NO: 216826 - DNA, 20 bp, synthetic construct
  source 1..20: mol_type = other DNA
aacaaggaagacagggaggg

SEQ ID NO: 216827 - DNA, 20 bp, synthetic construct
  source 1..20: mol_type = other DNA
caacaaggaagacagggagg

SEQ ID NO: 216828 - DNA, 20 bp, synthetic construct
  source 1..20: mol_type = other DNA
acaacaaggaagacagggag

SEQ ID NO: 216829 - DNA, 20 bp, synthetic construct
  source 1..20: mol_type = other DNA
gacaacaaggaagacaggga

SEQ ID NO: 216830 - DNA, 20 bp, synthetic construct
  source 1..20: mol_type = other DNA
ggacaacaaggaagacaggg

SEQ ID NO: 216831 - DNA, 20 bp, synthetic construct
  source 1..20: mol_type = other DNA
gggacaacaaggaagacagg

SEQ ID NO: 216832 - DNA, 20 bp, synthetic construct
  source 1..20: mol_type = other DNA
ggggacaacaaggaagacag

SEQ ID NO: 216833 - DNA, 20 bp, synthetic construct
  source 1..20: mol_type = other DNA
tggggacaacaaggaagaca

SEQ ID NO: 216834 - DNA, 20 bp, synthetic construct
  source 1..20: mol_type = other DNA
atggggacaacaaggaagac

SEQ ID NO: 216835 - DNA, 20 bp, synthetic construct
  source 1..20: mol_type = other DNA
gatggggacaacaaggaaga

SEQ ID NO: 216836 - DNA, 20 bp, synthetic construct
  source 1..20: mol_type = other DNA
agatggggacaacaaggaag

SEQ ID NO: 216837 - DNA, 20 bp, synthetic construct
  source 1..20: mol_type = other DNA
tagatggggacaacaaggaa

SEQ ID NO: 216838 - DNA, 20 bp, synthetic construct
  source 1..20: mol_type = other DNA
ttagatggggacaacaagga

SEQ ID NO: 216839 - DNA, 20 bp, synthetic construct
  source 1..20: mol_type = other DNA
attagatggggacaacaagg

SEQ ID NO: 216840 - DNA, 20 bp, synthetic construct
  source 1..20: mol_type = other DNA
cattagatggggacaacaag

SEQ ID NO: 216841 - DNA, 20 bp, synthetic construct
  source 1..20: mol_type = other DNA
tcattagatggggacaacaa

SEQ ID NO: 216842 - DNA, 20 bp, synthetic construct
  source 1..20: mol_type = other DNA
ttcattagatggggacaaca

SEQ ID NO: 216843 - DNA, 20 bp, synthetic construct
  source 1..20: mol_type = other DNA
gttcattagatggggacaac

SEQ ID NO: 216844 - DNA, 20 bp, synthetic construct
  source 1..20: mol_type = other DNA
agttcattagatggggacaa

SEQ ID NO: 216845 - DNA, 20 bp, synthetic construct
  source 1..20: mol_type = other DNA
tagttcattagatggggaca

SEQ ID NO: 216846 - DNA, 20 bp, synthetic construct
  source 1..20: mol_type = other DNA
atagttcattagatggggac

SEQ ID NO: 216847 - DNA, 20 bp, synthetic construct
  source 1..20: mol_type = other DNA
gatagttcattagatgggga

SEQ ID NO: 216848 - DNA, 20 bp, synthetic construct
  source 1..20: mol_type = other DNA
tgatagttcattagatgggg

SEQ ID NO: 216849 - DNA, 20 bp, synthetic construct
  source 1..20: mol_type = other DNA
atgatagttcattagatggg

SEQ ID NO: 216850 - DNA, 20 bp, synthetic construct
  source 1..20: mol_type = other DNA
catgatagttcattagatgg

SEQ ID NO: 216851 - DNA, 20 bp, synthetic construct
  source 1..20: mol_type = other DNA
ccatgatagttcattagatg

SEQ ID NO: 216852 - DNA, 20 bp, synthetic construct
  source 1..20: mol_type = other DNA
gccatgatagttcattagat

SEQ ID NO: 216853 - DNA, 20 bp, synthetic construct
  source 1..20: mol_type = other DNA
tgccatgatagttcattaga

SEQ ID NO: 216854 - DNA, 20 bp, synthetic construct
  source 1..20: mol_type = other DNA
ttgccatgatagttcattag

SEQ ID NO: 216855 - DNA, 20 bp, synthetic construct
  source 1..20: mol_type = other DNA
tttgccatgatagttcatta

SEQ ID NO: 216856 - DNA, 20 bp, synthetic construct
  source 1..20: mol_type = other DNA
ttttgccatgatagttcatt

SEQ ID NO: 216857 - DNA, 20 bp, synthetic construct
  source 1..20: mol_type = other DNA
tttttgccatgatagttcat

SEQ ID NO: 216858 - DNA, 20 bp, synthetic construct
  source 1..20: mol_type = other DNA
ctttttgccatgatagttca

SEQ ID NO: 216859 - DNA, 20 bp, synthetic construct
  source 1..20: mol_type = other DNA
tctttttgccatgatagttc

SEQ ID NO: 216860 - DNA, 20 bp, synthetic construct
  source 1..20: mol_type = other DNA
ctctttttgccatgatagtt

SEQ ID NO: 216861 - DNA, 20 bp, synthetic construct
  source 1..20: mol_type = other DNA
gctctttttgccatgatagt

SEQ ID NO: 216862 - DNA, 20 bp, synthetic construct
  source 1..20: mol_type = other DNA
ggctctttttgccatgatag

SEQ ID NO: 216863 - DNA, 20 bp, synthetic construct
  source 1..20: mol_type = other DNA
gggctctttttgccatgata

SEQ ID NO: 216864 - DNA, 20 bp, synthetic construct
  source 1..20: mol_type = other DNA
tgggctctttttgccatgat

SEQ ID NO: 216865 - DNA, 20 bp, synthetic construct
  source 1..20: mol_type = other DNA
atgggctctttttgccatga

SEQ ID NO: 216866 - DNA, 20 bp, synthetic construct
  source 1..20: mol_type = other DNA
aatgggctctttttgccatg

SEQ ID NO: 216867 - DNA, 20 bp, synthetic construct
  source 1..20: mol_type = other DNA
aaatgggctctttttgccat

SEQ ID NO: 216868 - DNA, 20 bp, synthetic construct
  source 1..20: mol_type = other DNA
gaaatgggctctttttgcca

SEQ ID NO: 216869 - DNA, 20 bp, synthetic construct
  source 1..20: mol_type = other DNA
agaaatgggctctttttgcc

SEQ ID NO: 216870 - DNA, 20 bp, synthetic construct
  source 1..20: mol_type = other DNA
cagaaatgggctctttttgc

SEQ ID NO: 216871 - DNA, 20 bp, synthetic construct
  source 1..20: mol_type = other DNA
ccagaaatgggctctttttg

SEQ ID NO: 216872 - DNA, 20 bp, synthetic construct
  source 1..20: mol_type = other DNA
accagaaatgggctcttttt

SEQ ID NO: 216873 - DNA, 20 bp, synthetic construct
  source 1..20: mol_type = other DNA
gaccagaaatgggctctttt

SEQ ID NO: 216874 - DNA, 20 bp, synthetic construct
  source 1..20: mol_type = other DNA
tgaccagaaatgggctcttt

SEQ ID NO: 216875 - DNA, 20 bp, synthetic construct
  source 1..20: mol_type = other DNA
atgaccagaaatgggctctt

SEQ ID NO: 216876 - DNA, 20 bp, synthetic construct
  source 1..20: mol_type = other DNA
aatgaccagaaatgggctct

SEQ ID NO: 216877 - DNA, 20 bp, synthetic construct
  source 1..20: mol_type = other DNA
aaatgaccagaaatgggctc

SEQ ID NO: 216878 - DNA, 20 bp, synthetic construct
  source 1..20: mol_type = other DNA
aaaatgaccagaaatgggct

SEQ ID NO: 216879 - DNA, 20 bp, synthetic construct
  source 1..20: mol_type = other DNA
gaaaatgaccagaaatgggc

SEQ ID NO: 216880 - DNA, 20 bp, synthetic construct
  source 1..20: mol_type = other DNA
agaaaatgaccagaaatggg

SEQ ID NO: 216881 - DNA, 20 bp, synthetic construct
  source 1..20: mol_type = other DNA
cagaaaatgaccagaaatgg

SEQ ID NO: 216882 - DNA, 20 bp, synthetic construct
  source 1..20: mol_type = other DNA
acagaaaatgaccagaaatg

SEQ ID NO: 216883 - DNA, 20 bp, synthetic construct
  source 1..20: mol_type = other DNA
cacagaaaatgaccagaaat

SEQ ID NO: 216884 - DNA, 20 bp, synthetic construct
  source 1..20: mol_type = other DNA
ccacagaaaatgaccagaaa

SEQ ID NO: 216885 - DNA, 20 bp, synthetic construct
  source 1..20: mol_type = other DNA
gccacagaaaatgaccagaa

SEQ ID NO: 216886 - DNA, 20 bp, synthetic construct
  source 1..20: mol_type = other DNA
ggccacagaaaatgaccaga

SEQ ID NO: 216887 - DNA, 20 bp, synthetic construct
  source 1..20: mol_type = other DNA
aggccacagaaaatgaccag

SEQ ID NO: 216888 - DNA, 20 bp, synthetic construct
  source 1..20: mol_type = other DNA
aaggccacagaaaatgacca

SEQ ID NO: 216889 - DNA, 20 bp, synthetic construct
  source 1..20: mol_type = other DNA
aaaggccacagaaaatgacc

SEQ ID NO: 216890 - DNA, 20 bp, synthetic construct
  source 1..20: mol_type = other DNA
gaaaggccacagaaaatgac

SEQ ID NO: 216891 - DNA, 20 bp, synthetic construct
  source 1..20: mol_type = other DNA
tgaaaggccacagaaaatga

SEQ ID NO: 216892 - DNA, 20 bp, synthetic construct
  source 1..20: mol_type = other DNA
ttgaaaggccacagaaaatg

SEQ ID NO: 216893 - DNA, 20 bp, synthetic construct
  source 1..20: mol_type = other DNA
tttgaaaggccacagaaaat

SEQ ID NO: 216894 - DNA, 20 bp, synthetic construct
  source 1..20: mol_type = other DNA
gtttgaaaggccacagaaaa

SEQ ID NO: 216895 - DNA, 20 bp, synthetic construct
  source 1..20: mol_type = other DNA
agtttgaaaggccacagaaa

SEQ ID NO: 216896 - DNA, 20 bp, synthetic construct
  source 1..20: mol_type = other DNA
gagtttgaaaggccacagaa

SEQ ID NO: 216897 - DNA, 20 bp, synthetic construct
  source 1..20: mol_type = other DNA
ggagtttgaaaggccacaga

SEQ ID NO: 216898 - DNA, 20 bp, synthetic construct
  source 1..20: mol_type = other DNA
gggagtttgaaaggccacag

SEQ ID NO: 216899 - DNA, 20 bp, synthetic construct
  source 1..20: mol_type = other DNA
tgggagtttgaaaggccaca

SEQ ID NO: 216900 - DNA, 20 bp, synthetic construct
  source 1..20: mol_type = other DNA
gtgggagtttgaaaggccac

SEQ ID NO: 216901 - DNA, 20 bp, synthetic construct
  source 1..20: mol_type = other DNA
ggtgggagtttgaaaggcca

SEQ ID NO: 216902 - DNA, 20 bp, synthetic construct
  source 1..20: mol_type = other DNA
aggtgggagtttgaaaggcc

SEQ ID NO: 216903 - DNA, 20 bp, synthetic construct
  source 1..20: mol_type = other DNA
taggtgggagtttgaaaggc

SEQ ID NO: 216904 - DNA, 20 bp, synthetic construct
  source 1..20: mol_type = other DNA
gtaggtgggagtttgaaagg

SEQ ID NO: 216905 - DNA, 20 bp, synthetic construct
  source 1..20: mol_type = other DNA
ggtaggtgggagtttgaaag

SEQ ID NO: 216906 - DNA, 20 bp, synthetic construct
  source 1..20: mol_type = other DNA
gggtaggtgggagtttgaaa

SEQ ID NO: 216907 - DNA, 20 bp, synthetic construct
  source 1..20: mol_type = other DNA
ggggtaggtgggagtttgaa

SEQ ID NO: 216908 - DNA, 20 bp, synthetic construct
  source 1..20: mol_type = other DNA
tggggtaggtgggagtttga

SEQ ID NO: 216909 - DNA, 20 bp, synthetic construct
  source 1..20: mol_type = other DNA
gtggggtaggtgggagtttg

SEQ ID NO: 216910 - DNA, 20 bp, synthetic construct
  source 1..20: mol_type = other DNA
agtggggtaggtgggagttt

SEQ ID NO: 216911 - DNA, 20 bp, synthetic construct
  source 1..20: mol_type = other DNA
cagtggggtaggtgggagtt

SEQ ID NO: 216912 - DNA, 20 bp, synthetic construct
  source 1..20: mol_type = other DNA
gcagtggggtaggtgggagt

SEQ ID NO: 216913 - DNA, 20 bp, synthetic construct
  source 1..20: mol_type = other DNA
agcagtggggtaggtgggag

SEQ ID NO: 216914 - DNA, 20 bp, synthetic construct
  source 1..20: mol_type = other DNA
gagcagtggggtaggtggga

SEQ ID NO: 216915 - DNA, 20 bp, synthetic construct
  source 1..20: mol_type = other DNA
ggagcagtggggtaggtggg

SEQ ID NO: 216916 - DNA, 20 bp, synthetic construct
  source 1..20: mol_type = other DNA
aggagcagtggggtaggtgg

SEQ ID NO: 216917 - DNA, 20 bp, synthetic construct
  source 1..20: mol_type = other DNA
caggagcagtggggtaggtg

SEQ ID NO: 216918 - DNA, 20 bp, synthetic construct
  source 1..20: mol_type = other DNA
ccaggagcagtggggtaggt

SEQ ID NO: 216919 - DNA, 20 bp, synthetic construct
  source 1..20: mol_type = other DNA
cccaggagcagtggggtagg

SEQ ID NO: 216920 - DNA, 20 bp, synthetic construct
  source 1..20: mol_type = other DNA
acccaggagcagtggggtag

SEQ ID NO: 216921 - DNA, 20 bp, synthetic construct
  source 1..20: mol_type = other DNA
cacccaggagcagtggggta

SEQ ID NO: 216922 - DNA, 20 bp, synthetic construct
  source 1..20: mol_type = other DNA
gcacccaggagcagtggggt

SEQ ID NO: 216923 - DNA, 20 bp, synthetic construct
  source 1..20: mol_type = other DNA
tgcacccaggagcagtgggg

SEQ ID NO: 216924 - DNA, 20 bp, synthetic construct
  source 1..20: mol_type = other DNA
atgcacccaggagcagtggg

SEQ ID NO: 216925 - DNA, 20 bp, synthetic construct
  source 1..20: mol_type = other DNA
aatgcacccaggagcagtgg

SEQ ID NO: 216926 - DNA, 20 bp, synthetic construct
  source 1..20: mol_type = other DNA
taatgcacccaggagcagtg

SEQ ID NO: 216927 - DNA, 20 bp, synthetic construct
  source 1..20: mol_type = other DNA
gtaatgcacccaggagcagt

SEQ ID NO: 216928 - DNA, 20 bp, synthetic construct
  source 1..20: mol_type = other DNA
ggtaatgcacccaggagcag

SEQ ID NO: 216929 - DNA, 20 bp, synthetic construct
  source 1..20: mol_type = other DNA
gggtaatgcacccaggagca

SEQ ID NO: 216930 - DNA, 20 bp, synthetic construct
  source 1..20: mol_type = other DNA
cgggtaatgcacccaggagc

SEQ ID NO: 216931 - DNA, 20 bp, synthetic construct
  source 1..20: mol_type = other DNA
tcgggtaatgcacccaggag

SEQ ID NO: 216932 - DNA, 20 bp, synthetic construct
  source 1..20: mol_type = other DNA
ttcgggtaatgcacccagga

SEQ ID NO: 216933 - DNA, 20 bp, synthetic construct
  source 1..20: mol_type = other DNA
tttcgggtaatgcacccagg

SEQ ID NO: 216934 - DNA, 20 bp, synthetic construct
  source 1..20: mol_type = other DNA
ctttcgggtaatgcacccag

SEQ ID NO: 216935 - DNA, 20 bp, synthetic construct
  source 1..20: mol_type = other DNA
gctttcgggtaatgcaccca

SEQ ID NO: 216936 - DNA, 20 bp, synthetic construct
  source 1..20: mol_type = other DNA
agctttcgggtaatgcaccc

SEQ ID NO: 216937 - DNA, 20 bp, synthetic construct
  source 1..20: mol_type = other DNA
cagctttcgggtaatgcacc

SEQ ID NO: 216938 - DNA, 20 bp, synthetic construct
  source 1..20: mol_type = other DNA
tcagctttcgggtaatgcac

SEQ ID NO: 216939 - DNA, 20 bp, synthetic construct
  source 1..20: mol_type = other DNA
ctcagctttcgggtaatgca

SEQ ID NO: 216940 - DNA, 20 bp, synthetic construct
  source 1..20: mol_type = other DNA
tctcagctttcgggtaatgc

SEQ ID NO: 216941 - DNA, 20 bp, synthetic construct
  source 1..20: mol_type = other DNA
gtctcagctttcgggtaatg

SEQ ID NO: 216942 - DNA, 20 bp, synthetic construct
  source 1..20: mol_type = other DNA
agtctcagctttcgggtaat

SEQ ID NO: 216943 - DNA, 20 bp, synthetic construct
  source 1..20: mol_type = other DNA
aagtctcagctttcgggtaa

SEQ ID NO: 216944 - DNA, 20 bp, synthetic construct
  source 1..20: mol_type = other DNA
gaagtctcagctttcgggta

SEQ ID NO: 216945 - DNA, 20 bp, synthetic construct
  source 1..20: mol_type = other DNA
tgaagtctcagctttcgggt

SEQ ID NO: 216946 - DNA, 20 bp, synthetic construct
  source 1..20: mol_type = other DNA
ctgaagtctcagctttcggg

SEQ ID NO: 216947 - DNA, 20 bp, synthetic construct
  source 1..20: mol_type = other DNA
actgaagtctcagctttcgg

SEQ ID NO: 216948 - DNA, 20 bp, synthetic construct
  source 1..20: mol_type = other DNA
cactgaagtctcagctttcg

SEQ ID NO: 216949 - DNA, 20 bp, synthetic construct
  source 1..20: mol_type = other DNA
gcactgaagtctcagctttc

SEQ ID NO: 216950 - DNA, 20 bp, synthetic construct
  source 1..20: mol_type = other DNA
tgcactgaagtctcagcttt

SEQ ID NO: 216951 - DNA, 20 bp, synthetic construct
  source 1..20: mol_type = other DNA
ctgcactgaagtctcagctt

SEQ ID NO: 216952 - DNA, 20 bp, synthetic construct
  source 1..20: mol_type = other DNA
tctgcactgaagtctcagct

SEQ ID NO: 216953 - DNA, 20 bp, synthetic construct
  source 1..20: mol_type = other DNA
ttctgcactgaagtctcagc

SEQ ID NO: 216954 - DNA, 20 bp, synthetic construct
  source 1..20: mol_type = other DNA
tttctgcactgaagtctcag

SEQ ID NO: 216955 - DNA, 20 bp, synthetic construct
  source 1..20: mol_type = other DNA
ctttctgcactgaagtctca

SEQ ID NO: 216956 - DNA, 20 bp, synthetic construct
  source 1..20: mol_type = other DNA
actttctgcactgaagtctc

SEQ ID NO: 216957 - DNA, 20 bp, synthetic construct
  source 1..20: mol_type = other DNA
cactttctgcactgaagtct

SEQ ID NO: 216958 - DNA, 20 bp, synthetic construct
  source 1..20: mol_type = other DNA
gcactttctgcactgaagtc

SEQ ID NO: 216959 - DNA, 20 bp, synthetic construct
  source 1..20: mol_type = other DNA
ggcactttctgcactgaagt

SEQ ID NO: 216960 - DNA, 20 bp, synthetic construct
  source 1..20: mol_type = other DNA
tggcactttctgcactgaag

SEQ ID NO: 216961 - DNA, 20 bp, synthetic construct
  source 1..20: mol_type = other DNA
ctggcactttctgcactgaa

SEQ ID NO: 216962 - DNA, 20 bp, synthetic construct
  source 1..20: mol_type = other DNA
cctggcactttctgcactga

SEQ ID NO: 216963 - DNA, 20 bp, synthetic construct
  source 1..20: mol_type = other DNA
gcctggcactttctgcactg

SEQ ID NO: 216964 - DNA, 20 bp, synthetic construct
  source 1..20: mol_type = other DNA
ggcctggcactttctgcact

SEQ ID NO: 216965 - DNA, 20 bp, synthetic construct
  source 1..20: mol_type = other DNA
gggcctggcactttctgcac

SEQ ID NO: 216966 - DNA, 20 bp, synthetic construct
  source 1..20: mol_type = other DNA
agggcctggcactttctgca

SEQ ID NO: 216967 - DNA, 20 bp, synthetic construct
  source 1..20: mol_type = other DNA
gagggcctggcactttctgc

SEQ ID NO: 216968 - DNA, 20 bp, synthetic construct
  source 1..20: mol_type = other DNA
agagggcctggcactttctg

SEQ ID NO: 216969 - DNA, 20 bp, synthetic construct
  source 1..20: mol_type = other DNA
cagagggcctggcactttct

SEQ ID NO: 216970 - DNA, 20 bp, synthetic construct
  source 1..20: mol_type = other DNA
acagagggcctggcactttc

SEQ ID NO: 216971 - DNA, 20 bp, synthetic construct
  source 1..20: mol_type = other DNA
gacagagggcctggcacttt

SEQ ID NO: 216972 - DNA, 20 bp, synthetic construct
  source 1..20: mol_type = other DNA
ggacagagggcctggcactt

SEQ ID NO: 216973 - DNA, 20 bp, synthetic construct
  source 1..20: mol_type = other DNA
gggacagagggcctggcact

SEQ ID NO: 216974 - DNA, 20 bp, synthetic construct
  source 1..20: mol_type = other DNA
ggggacagagggcctggcac

SEQ ID NO: 216975 - DNA, 20 bp, synthetic construct
  source 1..20: mol_type = other DNA
gggggacagagggcctggca

SEQ ID NO: 216976 - DNA, 20 bp, synthetic construct
  source 1..20: mol_type = other DNA
ggggggacagagggcctggc

SEQ ID NO: 216977 - DNA, 20 bp, synthetic construct
  source 1..20: mol_type = other DNA
tggggggacagagggcctgg

SEQ ID NO: 216978 - DNA, 20 bp, synthetic construct
  source 1..20: mol_type = other DNA
ctggggggacagagggcctg

SEQ ID NO: 216979 - DNA, 20 bp, synthetic construct
  source 1..20: mol_type = other DNA
tctggggggacagagggcct

SEQ ID NO: 216980 - DNA, 20 bp, synthetic construct
  source 1..20: mol_type = other DNA
atctggggggacagagggcc

SEQ ID NO: 216981 - DNA, 20 bp, synthetic construct
  source 1..20: mol_type = other DNA
gatctggggggacagagggc

SEQ ID NO: 216982 - DNA, 20 bp, synthetic construct
  source 1..20: mol_type = other DNA
cgatctggggggacagaggg

SEQ ID NO: 216983 - DNA, 20 bp, synthetic construct
  source 1..20: mol_type = other DNA
gcgatctggggggacagagg

SEQ ID NO: 216984 - DNA, 20 bp, synthetic construct
  source 1..20: mol_type = other DNA
ggcgatctggggggacagag

SEQ ID NO: 216985 - DNA, 20 bp, synthetic construct
  source 1..20: mol_type = other DNA
aggcgatctggggggacaga

SEQ ID NO: 216986 - DNA, 20 bp, synthetic construct
  source 1..20: mol_type = other DNA
aaggcgatctggggggacag

SEQ ID NO: 216987 - DNA, 20 bp, synthetic construct
  source 1..20: mol_type = other DNA
gaaggcgatctggggggaca

SEQ ID NO: 216988 - DNA, 20 bp, synthetic construct
  source 1..20: mol_type = other DNA
ggaaggcgatctggggggac

SEQ ID NO: 216989 - DNA, 20 bp, synthetic construct
  source 1..20: mol_type = other DNA
aggaaggcgatctgggggga

SEQ ID NO: 216990 - DNA, 20 bp, synthetic construct
  source 1..20: mol_type = other DNA
aaggaaggcgatctgggggg

SEQ ID NO: 216991 - DNA, 20 bp, synthetic construct
  source 1..20: mol_type = other DNA
caaggaaggcgatctggggg

SEQ ID NO: 216992 - DNA, 20 bp, synthetic construct
  source 1..20: mol_type = other DNA
acaaggaaggcgatctgggg

SEQ ID NO: 216993 - DNA, 20 bp, synthetic construct
  source 1..20: mol_type = other DNA
gacaaggaaggcgatctggg

SEQ ID NO: 216994 - DNA, 20 bp, synthetic construct
  source 1..20: mol_type = other DNA
agacaaggaaggcgatctgg

SEQ ID NO: 216995 - DNA, 20 bp, synthetic construct
  source 1..20: mol_type = other DNA
aagacaaggaaggcgatctg

SEQ ID NO: 216996 - DNA, 20 bp, synthetic construct
  source 1..20: mol_type = other DNA
gaagacaaggaaggcgatct

SEQ ID NO: 216997 - DNA, 20 bp, synthetic construct
  source 1..20: mol_type = other DNA
ggaagacaaggaaggcgatc

SEQ ID NO: 216998 - DNA, 20 bp, synthetic construct
  source 1..20: mol_type = other DNA
gggaagacaaggaaggcgat

SEQ ID NO: 216999 - DNA, 20 bp, synthetic construct
  source 1..20: mol_type = other DNA
agggaagacaaggaaggcga

SEQ ID NO: 217000 - DNA, 20 bp, synthetic construct
  source 1..20: mol_type = other DNA
cagggaagacaaggaaggcg

SEQ ID NO: 217001 - DNA, 20 bp, synthetic construct
  source 1..20: mol_type = other DNA
acagggaagacaaggaaggc

SEQ ID NO: 217002 - DNA, 20 bp, synthetic construct
  source 1..20: mol_type = other DNA
cacagggaagacaaggaagg

SEQ ID NO: 217003 - DNA, 20 bp, synthetic construct
  source 1..20: mol_type = other DNA
gcacagggaagacaaggaag

SEQ ID NO: 217004 - DNA, 20 bp, synthetic construct
  source 1..20: mol_type = other DNA
agcacagggaagacaaggaa

SEQ ID NO: 217005 - DNA, 20 bp, synthetic construct
  source 1..20: mol_type = other DNA
aagcacagggaagacaagga

SEQ ID NO: 217006 - DNA, 20 bp, synthetic construct
  source 1..20: mol_type = other DNA
caagcacagggaagacaagg

SEQ ID NO: 217007 - DNA, 20 bp, synthetic construct
  source 1..20: mol_type = other DNA
gcaagcacagggaagacaag

SEQ ID NO: 217008 - DNA, 20 bp, synthetic construct
  source 1..20: mol_type = other DNA
ggcaagcacagggaagacaa

SEQ ID NO: 217009 - DNA, 20 bp, synthetic construct
  source 1..20: mol_type = other DNA
aggcaagcacagggaagaca

SEQ ID NO: 217010 - DNA, 20 bp, synthetic construct
  source 1..20: mol_type = other DNA
caggcaagcacagggaagac

SEQ ID NO: 217011 - DNA, 20 bp, synthetic construct
  source 1..20: mol_type = other DNA
acaggcaagcacagggaaga

SEQ ID NO: 217012 - DNA, 20 bp, synthetic construct
  source 1..20: mol_type = other DNA
gacaggcaagcacagggaag

SEQ ID NO: 217013 - DNA, 20 bp, synthetic construct
  source 1..20: mol_type = other DNA
tgacaggcaagcacagggaa

SEQ ID NO: 217014 - DNA, 20 bp, synthetic construct
  source 1..20: mol_type = other DNA
gtgacaggcaagcacaggga

SEQ ID NO: 217015 - DNA, 20 bp, synthetic construct
  source 1..20: mol_type = other DNA
tgtgacaggcaagcacaggg

SEQ ID NO: 217016 - DNA, 20 bp, synthetic construct
  source 1..20: mol_type = other DNA
atgtgacaggcaagcacagg

SEQ ID NO: 217017 - DNA, 20 bp, synthetic construct
  source 1..20: mol_type = other DNA
aatgtgacaggcaagcacag

SEQ ID NO: 217018 - DNA, 20 bp, synthetic construct
  source 1..20: mol_type = other DNA
caatgtgacaggcaagcaca

SEQ ID NO: 217019 - DNA, 20 bp, synthetic construct
  source 1..20: mol_type = other DNA
acaatgtgacaggcaagcac

SEQ ID NO: 217020 - DNA, 20 bp, synthetic construct
  source 1..20: mol_type = other DNA
cacaatgtgacaggcaagca

SEQ ID NO: 217021 - DNA, 20 bp, synthetic construct
  source 1..20: mol_type = other DNA
acacaatgtgacaggcaagc

SEQ ID NO: 217022 - DNA, 20 bp, synthetic construct
  source 1..20: mol_type = other DNA
cacacaatgtgacaggcaag

SEQ ID NO: 217023 - DNA, 20 bp, synthetic construct
  source 1..20: mol_type = other DNA
ccacacaatgtgacaggcaa

SEQ ID NO: 217024 - DNA, 20 bp, synthetic construct
  source 1..20: mol_type = other DNA
cccacacaatgtgacaggca

SEQ ID NO: 217025 - DNA, 20 bp, synthetic construct
  source 1..20: mol_type = other DNA
acccacacaatgtgacaggc

SEQ ID NO: 217026 - DNA, 20 bp, synthetic construct
  source 1..20: mol_type = other DNA
aacccacacaatgtgacagg

SEQ ID NO: 217027 - DNA, 20 bp, synthetic construct
  source 1..20: mol_type = other DNA
gaacccacacaatgtgacag

SEQ ID NO: 217028 - DNA, 20 bp, synthetic construct
  source 1..20: mol_type = other DNA
ggaacccacacaatgtgaca

SEQ ID NO: 217029 - DNA, 20 bp, synthetic construct
  source 1..20: mol_type = other DNA
tggaacccacacaatgtgac

SEQ ID NO: 217030 - DNA, 20 bp, synthetic construct
  source 1..20: mol_type = other DNA
ctggaacccacacaatgtga

SEQ ID NO: 217031 - DNA, 20 bp, synthetic construct
  source 1..20: mol_type = other DNA
gctggaacccacacaatgtg

SEQ ID NO: 217032 - DNA, 20 bp, synthetic construct
  source 1..20: mol_type = other DNA
cgctggaacccacacaatgt

SEQ ID NO: 217033 - DNA, 20 bp, synthetic construct
  source 1..20: mol_type = other DNA
gcgctggaacccacacaatg

SEQ ID NO: 217034 - DNA, 20 bp, synthetic construct
  source 1..20: mol_type = other DNA
agcgctggaacccacacaat

SEQ ID NO: 217035 - DNA, 20 bp, synthetic construct
  source 1..20: mol_type = other DNA
cagcgctggaacccacacaa

SEQ ID NO: 217036 - DNA, 20 bp, synthetic construct
  source 1..20: mol_type = other DNA
ccagcgctggaacccacaca

SEQ ID NO: 217037 - DNA, 20 bp, synthetic construct
  source 1..20: mol_type = other DNA
tccagcgctggaacccacac

SEQ ID NO: 217038 - DNA, 20 bp, synthetic construct
  source 1..20: mol_type = other DNA
ttccagcgctggaacccaca

SEQ ID NO: 217039 - DNA, 20 bp, synthetic construct
  source 1..20: mol_type = other DNA
cttccagcgctggaacccac

SEQ ID NO: 217040 - DNA, 20 bp, synthetic construct
  source 1..20: mol_type = other DNA
ccttccagcgctggaaccca

SEQ ID NO: 217041 - DNA, 20 bp, synthetic construct
  source 1..20: mol_type = other DNA
tccttccagcgctggaaccc

SEQ ID NO: 217042 - DNA, 20 bp, synthetic construct
  source 1..20: mol_type = other DNA
ttccttccagcgctggaacc

SEQ ID NO: 217043 - DNA, 20 bp, synthetic construct
  source 1..20: mol_type = other DNA
attccttccagcgctggaac

SEQ ID NO: 217044 - DNA, 20 bp, synthetic construct
  source 1..20: mol_type = other DNA
cattccttccagcgctggaa

SEQ ID NO: 217045 - DNA, 20 bp, synthetic construct
  source 1..20: mol_type = other DNA
tcattccttccagcgctgga

SEQ ID NO: 217046 - DNA, 20 bp, synthetic construct
  source 1..20: mol_type = other DNA
ctcattccttccagcgctgg

SEQ ID NO: 217047 - DNA, 20 bp, synthetic construct
  source 1..20: mol_type = other DNA
cctcattccttccagcgctg

SEQ ID NO: 217048 - DNA, 20 bp, synthetic construct
  source 1..20: mol_type = other DNA
tcctcattccttccagcgct

SEQ ID NO: 217049 - DNA, 20 bp, synthetic construct
  source 1..20: mol_type = other DNA
ttcctcattccttccagcgc

SEQ ID NO: 217050 - DNA, 20 bp, synthetic construct
  source 1..20: mol_type = other DNA
gttcctcattccttccagcg

SEQ ID NO: 217051 - DNA, 20 bp, synthetic construct
  source 1..20: mol_type = other DNA
tgttcctcattccttccagc

SEQ ID NO: 217052 - DNA, 20 bp, synthetic construct
  source 1..20: mol_type = other DNA
ctgttcctcattccttccag

SEQ ID NO: 217053 - DNA, 20 bp, synthetic construct
  source 1..20: mol_type = other DNA
tctgttcctcattccttcca

SEQ ID NO: 217054 - DNA, 20 bp, synthetic construct
  source 1..20: mol_type = other DNA
atctgttcctcattccttcc

SEQ ID NO: 217055 - DNA, 20 bp, synthetic construct
  source 1..20: mol_type = other DNA
aatctgttcctcattccttc

SEQ ID NO: 217056 - DNA, 20 bp, synthetic construct
  source 1..20: mol_type = other DNA
gaatctgttcctcattcctt

SEQ ID NO: 217057 - DNA, 20 bp, synthetic construct
  source 1..20: mol_type = other DNA
agaatctgttcctcattcct

SEQ ID NO: 217058 - DNA, 20 bp, synthetic construct
  source 1..20: mol_type = other DNA
gagaatctgttcctcattcc

SEQ ID NO: 217059 - DNA, 20 bp, synthetic construct
  source 1..20: mol_type = other DNA
agagaatctgttcctcattc

SEQ ID NO: 217060 - DNA, 20 bp, synthetic construct
  source 1..20: mol_type = other DNA
cagagaatctgttcctcatt

SEQ ID NO: 217061 - DNA, 20 bp, synthetic construct
  source 1..20: mol_type = other DNA
ccagagaatctgttcctcat

SEQ ID NO: 217062 - DNA, 20 bp, synthetic construct
  source 1..20: mol_type = other DNA
accagagaatctgttcctca

SEQ ID NO: 217063 - DNA, 20 bp, synthetic construct
  source 1..20: mol_type = other DNA
aaccagagaatctgttcctc

SEQ ID NO: 217064 - DNA, 20 bp, synthetic construct
  source 1..20: mol_type = other DNA
gaaccagagaatctgttcct

SEQ ID NO: 217065 - DNA, 20 bp, synthetic construct
  source 1..20: mol_type = other DNA
agaaccagagaatctgttcc

SEQ ID NO: 217066 - DNA, 20 bp, synthetic construct
  source 1..20: mol_type = other DNA
gagaaccagagaatctgttc

SEQ ID NO: 217067 - DNA, 20 bp, synthetic construct
  source 1..20: mol_type = other DNA
ggagaaccagagaatctgtt

SEQ ID NO: 217068 - DNA, 20 bp, synthetic construct
  source 1..20: mol_type = other DNA
aggagaaccagagaatctgt

SEQ ID NO: 217069 - DNA, 20 bp, synthetic construct
  source 1..20: mol_type = other DNA
aaggagaaccagagaatctg

SEQ ID NO: 217070 - DNA, 20 bp, synthetic construct
  source 1..20: mol_type = other DNA
aaaggagaaccagagaatct

SEQ ID NO: 217071 - DNA, 20 bp, synthetic construct
  source 1..20: mol_type = other DNA
aaaaggagaaccagagaatc

SEQ ID NO: 217072 - DNA, 20 bp, synthetic construct
  source 1..20: mol_type = other DNA
caaaaggagaaccagagaat

SEQ ID NO: 217073 - DNA, 20 bp, synthetic construct
  source 1..20: mol_type = other DNA
tcaaaaggagaaccagagaa

SEQ ID NO: 217074 - DNA, 20 bp, synthetic construct
  source 1..20: mol_type = other DNA
ttcaaaaggagaaccagaga

SEQ ID NO: 217075 - DNA, 20 bp, synthetic construct
  source 1..20: mol_type = other DNA
cttcaaaaggagaaccagag

SEQ ID NO: 217076 - DNA, 20 bp, synthetic construct
  source 1..20: mol_type = other DNA
acttcaaaaggagaaccaga

SEQ ID NO: 217077 - DNA, 20 bp, synthetic construct
  source 1..20: mol_type = other DNA
aacttcaaaaggagaaccag

SEQ ID NO: 217078 - DNA, 20 bp, synthetic construct
  source 1..20: mol_type = other DNA
aaacttcaaaaggagaacca

SEQ ID NO: 217079 - DNA, 20 bp, synthetic construct
  source 1..20: mol_type = other DNA
taaacttcaaaaggagaacc

SEQ ID NO: 217080 - DNA, 20 bp, synthetic construct
  source 1..20: mol_type = other DNA
gtaaacttcaaaaggagaac

SEQ ID NO: 217081 - DNA, 20 bp, synthetic construct
  source 1..20: mol_type = other DNA
ggtaaacttcaaaaggagaa

SEQ ID NO: 217082 - DNA, 20 bp, synthetic construct
  source 1..20: mol_type = other DNA
aggtaaacttcaaaaggaga

SEQ ID NO: 217083 - DNA, 20 bp, synthetic construct
  source 1..20: mol_type = other DNA
aaggtaaacttcaaaaggag

SEQ ID NO: 217084 - DNA, 20 bp, synthetic construct
  source 1..20: mol_type = other DNA
gaaggtaaacttcaaaagga

SEQ ID NO: 217085 - DNA, 20 bp, synthetic construct
  source 1..20: mol_type = other DNA
cgaaggtaaacttcaaaagg

SEQ ID NO: 217086 - DNA, 20 bp, synthetic construct
  source 1..20: mol_type = other DNA
gcgaaggtaaacttcaaaag

SEQ ID NO: 217087 - DNA, 20 bp, synthetic construct
  source 1..20: mol_type = other DNA
agcgaaggtaaacttcaaaa

SEQ ID NO: 217088 - DNA, 20 bp, synthetic construct
  source 1..20: mol_type = other DNA
gagcgaaggtaaacttcaaa

SEQ ID NO: 217089 - DNA, 20 bp, synthetic construct
  source 1..20: mol_type = other DNA
ggagcgaaggtaaacttcaa

SEQ ID NO: 217090 - DNA, 20 bp, synthetic construct
  source 1..20: mol_type = other DNA
tggagcgaaggtaaacttca

SEQ ID NO: 217091 - DNA, 20 bp, synthetic construct
  source 1..20: mol_type = other DNA
gtggagcgaaggtaaacttc

SEQ ID NO: 217092 - DNA, 20 bp, synthetic construct
  source 1..20: mol_type = other DNA
ggtggagcgaaggtaaactt

SEQ ID NO: 217093 - DNA, 20 bp, synthetic construct
  source 1..20: mol_type = other DNA
tggtggagcgaaggtaaact

SEQ ID NO: 217094 - DNA, 20 bp, synthetic construct
  source 1..20: mol_type = other DNA
gtggtggagcgaaggtaaac

SEQ ID NO: 217095 - DNA, 20 bp, synthetic construct
  source 1..20: mol_type = other DNA
agtggtggagcgaaggtaaa

SEQ ID NO: 217096 - DNA, 20 bp, synthetic construct
  source 1..20: mol_type = other DNA
aagtggtggagcgaaggtaa

SEQ ID NO: 217097 - DNA, 20 bp, synthetic construct
  source 1..20: mol_type = other DNA
gaagtggtggagcgaaggta

SEQ ID NO: 217098 - DNA, 20 bp, synthetic construct
  source 1..20: mol_type = other DNA
agaagtggtggagcgaaggt

SEQ ID NO: 217099 - DNA, 20 bp, synthetic construct
  source 1..20: mol_type = other DNA
cagaagtggtggagcgaagg

SEQ ID NO: 217100 - DNA, 20 bp, synthetic construct
  source 1..20: mol_type = other DNA
tcagaagtggtggagcgaag

SEQ ID NO: 217101 - DNA, 20 bp, synthetic construct
  source 1..20: mol_type = other DNA
ctcagaagtggtggagcgaa

SEQ ID NO: 217102 - DNA, 20 bp, synthetic construct
  source 1..20: mol_type = other DNA
tctcagaagtggtggagcga

SEQ ID NO: 217103 - DNA, 20 bp, synthetic construct
  source 1..20: mol_type = other DNA
gtctcagaagtggtggagcg

SEQ ID NO: 217104 - DNA, 20 bp, synthetic construct
  source 1..20: mol_type = other DNA
ggtctcagaagtggtggagc

SEQ ID NO: 217105 - DNA, 20 bp, synthetic construct
  source 1..20: mol_type = other DNA
aggtctcagaagtggtggag

SEQ ID NO: 217106 - DNA, 20 bp, synthetic construct
  source 1..20: mol_type = other DNA
aaggtctcagaagtggtgga

SEQ ID NO: 217107 - DNA, 20 bp, synthetic construct
  source 1..20: mol_type = other DNA
gaaggtctcagaagtggtgg

SEQ ID NO: 217108 - DNA, 20 bp, synthetic construct
  source 1..20: mol_type = other DNA
ggaaggtctcagaagtggtg

SEQ ID NO: 217109 - DNA, 20 bp, synthetic construct
  source 1..20: mol_type = other DNA
gggaaggtctcagaagtggt

SEQ ID NO: 217110 - DNA, 20 bp, synthetic construct
  source 1..20: mol_type = other DNA
cgggaaggtctcagaagtgg

SEQ ID NO: 217111 - DNA, 20 bp, synthetic construct
  source 1..20: mol_type = other DNA
ccgggaaggtctcagaagtg

SEQ ID NO: 217112 - DNA, 20 bp, synthetic construct
  source 1..20: mol_type = other DNA
tccgggaaggtctcagaagt

SEQ ID NO: 217113 - DNA, 20 bp, synthetic construct
  source 1..20: mol_type = other DNA
ttccgggaaggtctcagaag

SEQ ID NO: 217114 - DNA, 20 bp, synthetic construct
  source 1..20: mol_type = other DNA
cttccgggaaggtctcagaa

SEQ ID NO: 217115 - DNA, 20 bp, synthetic construct
  source 1..20: mol_type = other DNA
acttccgggaaggtctcaga

SEQ ID NO: 217116 - DNA, 20 bp, synthetic construct
  source 1..20: mol_type = other DNA
aacttccgggaaggtctcag

SEQ ID NO: 217117 - DNA, 20 bp, synthetic construct
  source 1..20: mol_type = other DNA
caacttccgggaaggtctca

SEQ ID NO: 217118 - DNA, 20 bp, synthetic construct
  source 1..20: mol_type = other DNA
gcaacttccgggaaggtctc

SEQ ID NO: 217119 - DNA, 20 bp, synthetic construct
  source 1..20: mol_type = other DNA
ggcaacttccgggaaggtct

SEQ ID NO: 217120 - DNA, 20 bp, synthetic construct
  source 1..20: mol_type = other DNA
gggcaacttccgggaaggtc

SEQ ID NO: 217121 - DNA, 20 bp, synthetic construct
  source 1..20: mol_type = other DNA
ggggcaacttccgggaaggt

SEQ ID NO: 217122 - DNA, 20 bp, synthetic construct
  source 1..20: mol_type = other DNA
aggggcaacttccgggaagg

SEQ ID NO: 217123 - DNA, 20 bp, synthetic construct
  source 1..20: mol_type = other DNA
aaggggcaacttccgggaag

SEQ ID NO: 217124 - DNA, 20 bp, synthetic construct
  source 1..20: mol_type = other DNA
caaggggcaacttccgggaa

SEQ ID NO: 217125 - DNA, 20 bp, synthetic construct
  source 1..20: mol_type = other DNA
acaaggggcaacttccggga

SEQ ID NO: 217126 - DNA, 20 bp, synthetic construct
  source 1..20: mol_type = other DNA
aacaaggggcaacttccggg

SEQ ID NO: 217127 - DNA, 20 bp, synthetic construct
  source 1..20: mol_type = other DNA
aaacaaggggcaacttccgg

SEQ ID NO: 217128 - DNA, 20 bp, synthetic construct
  source 1..20: mol_type = other DNA
gaaacaaggggcaacttccg

SEQ ID NO: 217129 - DNA, 20 bp, synthetic construct
  source 1..20: mol_type = other DNA
agaaacaaggggcaacttcc

SEQ ID NO: 217130 - DNA, 20 bp, synthetic construct
  source 1..20: mol_type = other DNA
gagaaacaaggggcaacttc

SEQ ID NO: 217131 - DNA, 20 bp, synthetic construct
  source 1..20: mol_type = other DNA
agagaaacaaggggcaactt

SEQ ID NO: 217132 - DNA, 20 bp, synthetic construct
  source 1..20: mol_type = other DNA
gagagaaacaaggggcaact

SEQ ID NO: 217133 - DNA, 20 bp, synthetic construct
  source 1..20: mol_type = other DNA
ggagagaaacaaggggcaac

SEQ ID NO: 217134 - DNA, 20 bp, synthetic construct
  source 1..20: mol_type = other DNA
aggagagaaacaaggggcaa

SEQ ID NO: 217135 - DNA, 20 bp, synthetic construct
  source 1..20: mol_type = other DNA
gaggagagaaacaaggggca

SEQ ID NO: 217136 - DNA, 20 bp, synthetic construct
  source 1..20: mol_type = other DNA
agaggagagaaacaaggggc

SEQ ID NO: 217137 - DNA, 20 bp, synthetic construct
  source 1..20: mol_type = other DNA
gagaggagagaaacaagggg

SEQ ID NO: 217138 - DNA, 20 bp, synthetic construct
  source 1..20: mol_type = other DNA
ggagaggagagaaacaaggg

SEQ ID NO: 217139 - DNA, 20 bp, synthetic construct
  source 1..20: mol_type = other DNA
tggagaggagagaaacaagg

SEQ ID NO: 217140 - DNA, 20 bp, synthetic construct
  source 1..20: mol_type = other DNA
ctggagaggagagaaacaag

SEQ ID NO: 217141 - DNA, 20 bp, synthetic construct
  source 1..20: mol_type = other DNA
cctggagaggagagaaacaa

SEQ ID NO: 217142 - DNA, 20 bp, synthetic construct
  source 1..20: mol_type = other DNA
ccctggagaggagagaaaca

SEQ ID NO: 217143 - DNA, 20 bp, synthetic construct
  source 1..20: mol_type = other DNA
gccctggagaggagagaaac

SEQ ID NO: 217144 - DNA, 20 bp, synthetic construct
  source 1..20: mol_type = other DNA
agccctggagaggagagaaa

SEQ ID NO: 217145 - DNA, 20 bp, synthetic construct
  source 1..20: mol_type = other DNA
cagccctggagaggagagaa

SEQ ID NO: 217146 - DNA, 20 bp, synthetic construct
  source 1..20: mol_type = other DNA
gcagccctggagaggagaga

SEQ ID NO: 217147 - DNA, 20 bp, synthetic construct
  source 1..20: mol_type = other DNA
ggcagccctggagaggagag

SEQ ID NO: 217148 - DNA, 20 bp, synthetic construct
  source 1..20: mol_type = other DNA
gggcagccctggagaggaga

SEQ ID NO: 217149 - DNA, 20 bp, synthetic construct
  source 1..20: mol_type = other DNA
ggggcagccctggagaggag

SEQ ID NO: 217150 - DNA, 20 bp, synthetic construct
  source 1..20: mol_type = other DNA
tggggcagccctggagagga

SEQ ID NO: 217151 - DNA, 20 bp, synthetic construct
  source 1..20: mol_type = other DNA
ctggggcagccctggagagg

SEQ ID NO: 217152 - DNA, 20 bp, synthetic construct
  source 1..20: mol_type = other DNA
tctggggcagccctggagag

SEQ ID NO: 217153 - DNA, 20 bp, synthetic construct
  source 1..20: mol_type = other DNA
ctctggggcagccctggaga

SEQ ID NO: 217154 - DNA, 20 bp, synthetic construct
  source 1..20: mol_type = other DNA
gctctggggcagccctggag

SEQ ID NO: 217155 - DNA, 20 bp, synthetic construct
  source 1..20: mol_type = other DNA
agctctggggcagccctgga

SEQ ID NO: 217156 - DNA, 20 bp, synthetic construct
  source 1..20: mol_type = other DNA
cagctctggggcagccctgg

SEQ ID NO: 217157 - DNA, 20 bp, synthetic construct
  source 1..20: mol_type = other DNA
gcagctctggggcagccctg

SEQ ID NO: 217158 - DNA, 20 bp, synthetic construct
  source 1..20: mol_type = other DNA
ggcagctctggggcagccct

SEQ ID NO: 217159 - DNA, 20 bp, synthetic construct
  source 1..20: mol_type = other DNA
aggcagctctggggcagccc

SEQ ID NO: 217160 - DNA, 20 bp, synthetic construct
  source 1..20: mol_type = other DNA
gaggcagctctggggcagcc

SEQ ID NO: 217161 - DNA, 20 bp, synthetic construct
  source 1..20: mol_type = other DNA
agaggcagctctggggcagc

SEQ ID NO: 217162 - DNA, 20 bp, synthetic construct
  source 1..20: mol_type = other DNA
gagaggcagctctggggcag

SEQ ID NO: 217163 - DNA, 20 bp, synthetic construct
  source 1..20: mol_type = other DNA
tgagaggcagctctggggca

SEQ ID NO: 217164 - DNA, 20 bp, synthetic construct
  source 1..20: mol_type = other DNA
gtgagaggcagctctggggc

SEQ ID NO: 217165 - DNA, 20 bp, synthetic construct
  source 1..20: mol_type = other DNA
ggtgagaggcagctctgggg

SEQ ID NO: 217166 - DNA, 20 bp, synthetic construct
  source 1..20: mol_type = other DNA
aggtgagaggcagctctggg

SEQ ID NO: 217167 - DNA, 20 bp, synthetic construct
  source 1..20: mol_type = other DNA
gaggtgagaggcagctctgg

SEQ ID NO: 217168 - DNA, 20 bp, synthetic construct
  source 1..20: mol_type = other DNA
agaggtgagaggcagctctg

SEQ ID NO: 217169 - DNA, 20 bp, synthetic construct
  source 1..20: mol_type = other DNA
aagaggtgagaggcagctct

SEQ ID NO: 217170 - DNA, 20 bp, synthetic construct
  source 1..20: mol_type = other DNA
gaagaggtgagaggcagctc

SEQ ID NO: 217171 - DNA, 20 bp, synthetic construct
  source 1..20: mol_type = other DNA
ggaagaggtgagaggcagct

SEQ ID NO: 217172 - DNA, 20 bp, synthetic construct
  source 1..20: mol_type = other DNA
aggaagaggtgagaggcagc

SEQ ID NO: 217173 - DNA, 20 bp, synthetic construct
  source 1..20: mol_type = other DNA
caggaagaggtgagaggcag

SEQ ID NO: 217174 - DNA, 20 bp, synthetic construct
  source 1..20: mol_type = other DNA
gcaggaagaggtgagaggca

SEQ ID NO: 217175 - DNA, 20 bp, synthetic construct
  source 1..20: mol_type = other DNA
agcaggaagaggtgagaggc

SEQ ID NO: 217176 - DNA, 20 bp, synthetic construct
  source 1..20: mol_type = other DNA
cagcaggaagaggtgagagg

SEQ ID NO: 217177 - DNA, 20 bp, synthetic construct
  source 1..20: mol_type = other DNA
acagcaggaagaggtgagag

SEQ ID NO: 217178 - DNA, 20 bp, synthetic construct
  source 1..20: mol_type = other DNA
gacagcaggaagaggtgaga

SEQ ID NO: 217179 - DNA, 20 bp, synthetic construct
  source 1..20: mol_type = other DNA
tgacagcaggaagaggtgag

SEQ ID NO: 217180 - DNA, 20 bp, synthetic construct
  source 1..20: mol_type = other DNA
gtgacagcaggaagaggtga

SEQ ID NO: 217181 - DNA, 20 bp, synthetic construct
  source 1..20: mol_type = other DNA
ggtgacagcaggaagaggtg

SEQ ID NO: 217182 - DNA, 20 bp, synthetic construct
  source 1..20: mol_type = other DNA
gggtgacagcaggaagaggt

SEQ ID NO: 217183 - DNA, 20 bp, synthetic construct
  source 1..20: mol_type = other DNA
ggggtgacagcaggaagagg

SEQ ID NO: 217184 - DNA, 20 bp, synthetic construct
  source 1..20: mol_type = other DNA
tggggtgacagcaggaagag

SEQ ID NO: 217185 - DNA, 20 bp, synthetic construct
  source 1..20: mol_type = other DNA
gtggggtgacagcaggaaga

SEQ ID NO: 217186 - DNA, 20 bp, synthetic construct
  source 1..20: mol_type = other DNA
ggtggggtgacagcaggaag

SEQ ID NO: 217187 - DNA, 20 bp, synthetic construct
  source 1..20: mol_type = other DNA
tggtggggtgacagcaggaa

SEQ ID NO: 217188 - DNA, 20 bp, synthetic construct
  source 1..20: mol_type = other DNA
gtggtggggtgacagcagga

SEQ ID NO: 217189 - DNA, 20 bp, synthetic construct
  source 1..20: mol_type = other DNA
ggtggtggggtgacagcagg

SEQ ID NO: 217190 - DNA, 20 bp, synthetic construct
  source 1..20: mol_type = other DNA
tggtggtggggtgacagcag

SEQ ID NO: 217191 - DNA, 20 bp, synthetic construct
  source 1..20: mol_type = other DNA
atggtggtggggtgacagca

SEQ ID NO: 217192 - DNA, 20 bp, synthetic construct
  source 1..20: mol_type = other DNA
gatggtggtggggtgacagc

SEQ ID NO: 217193 - DNA, 20 bp, synthetic construct
  source 1..20: mol_type = other DNA
tgatggtggtggggtgacag

SEQ ID NO: 217194 - DNA, 20 bp, synthetic construct
  source 1..20: mol_type = other DNA
ctgatggtggtggggtgaca

SEQ ID NO: 217195 - DNA, 20 bp, synthetic construct
  source 1..20: mol_type = other DNA
cctgatggtggtggggtgac

SEQ ID NO: 217196 - DNA, 20 bp, synthetic construct
  source 1..20: mol_type = other DNA
ccctgatggtggtggggtga

SEQ ID NO: 217197 - DNA, 20 bp, synthetic construct
  source 1..20: mol_type = other DNA
gccctgatggtggtggggtg

SEQ ID NO: 217198 - DNA, 20 bp, synthetic construct
  source 1..20: mol_type = other DNA
tgccctgatggtggtggggt

SEQ ID NO: 217199 - DNA, 20 bp, synthetic construct
  source 1..20: mol_type = other DNA
ctgccctgatggtggtgggg

SEQ ID NO: 217200 - DNA, 20 bp, synthetic construct
  source 1..20: mol_type = other DNA
tctgccctgatggtggtggg

SEQ ID NO: 217201 - DNA, 20 bp, synthetic construct
  source 1..20: mol_type = other DNA
ttctgccctgatggtggtgg

SEQ ID NO: 217202 - DNA, 20 bp, synthetic construct
  source 1..20: mol_type = other DNA
cttctgccctgatggtggtg

SEQ ID NO: 217203 - DNA, 20 bp, synthetic construct
  source 1..20: mol_type = other DNA
acttctgccctgatggtggt

SEQ ID NO: 217204 - DNA, 20 bp, synthetic construct
  source 1..20: mol_type = other DNA
aacttctgccctgatggtgg

SEQ ID NO: 217205 - DNA, 20 bp, synthetic construct
  source 1..20: mol_type = other DNA
caacttctgccctgatggtg

SEQ ID NO: 217206 - DNA, 20 bp, synthetic construct
  source 1..20: mol_type = other DNA
ccaacttctgccctgatggt

SEQ ID NO: 217207 - DNA, 20 bp, synthetic construct
  source 1..20: mol_type = other DNA
cccaacttctgccctgatgg

SEQ ID NO: 217208 - DNA, 20 bp, synthetic construct
  source 1..20: mol_type = other DNA
tcccaacttctgccctgatg

SEQ ID NO: 217209 - DNA, 20 bp, synthetic construct
  source 1..20: mol_type = other DNA
gtcccaacttctgccctgat

SEQ ID NO: 217210 - DNA, 20 bp, synthetic construct
  source 1..20: mol_type = other DNA
tgtcccaacttctgccctga

SEQ ID NO: 217211 - DNA, 20 bp, synthetic construct
  source 1..20: mol_type = other DNA
ttgtcccaacttctgccctg

SEQ ID NO: 217212 - DNA, 20 bp, synthetic construct
  source 1..20: mol_type = other DNA
tttgtcccaacttctgccct

SEQ ID NO: 217213 - DNA, 20 bp, synthetic construct
  source 1..20: mol_type = other DNA
ctttgtcccaacttctgccc

SEQ ID NO: 217214 - DNA, 20 bp, synthetic construct
  source 1..20: mol_type = other DNA
gctttgtcccaacttctgcc

SEQ ID NO: 217215 - DNA, 20 bp, synthetic construct
  source 1..20: mol_type = other DNA
ggctttgtcccaacttctgc

SEQ ID NO: 217216 - DNA, 20 bp, synthetic construct
  source 1..20: mol_type = other DNA
aggctttgtcccaacttctg

SEQ ID NO: 217217 - DNA, 20 bp, synthetic construct
  source 1..20: mol_type = other DNA
gaggctttgtcccaacttct

SEQ ID NO: 217218 - DNA, 20 bp, synthetic construct
  source 1..20: mol_type = other DNA
agaggctttgtcccaacttc

SEQ ID NO: 217219 - DNA, 20 bp, synthetic construct
  source 1..20: mol_type = other DNA
gagaggctttgtcccaactt

SEQ ID NO: 217220 - DNA, 20 bp, synthetic construct
  source 1..20: mol_type = other DNA
ggagaggctttgtcccaact

SEQ ID NO: 217221 - DNA, 20 bp, synthetic construct
  source 1..20: mol_type = other DNA
aggagaggctttgtcccaac

SEQ ID NO: 217222 - DNA, 20 bp, synthetic construct
  source 1..20: mol_type = other DNA
taggagaggctttgtcccaa

SEQ ID NO: 217223 - DNA, 20 bp, synthetic construct
  source 1..20: mol_type = other DNA
gtaggagaggctttgtccca

SEQ ID NO: 217224 - DNA, 20 bp, synthetic construct
  source 1..20: mol_type = other DNA
agtaggagaggctttgtccc

SEQ ID NO: 217225 - DNA, 20 bp, synthetic construct
  source 1..20: mol_type = other DNA
cagtaggagaggctttgtcc

SEQ ID NO: 217226 - DNA, 20 bp, synthetic construct
  source 1..20: mol_type = other DNA
ccagtaggagaggctttgtc

SEQ ID NO: 217227 - DNA, 20 bp, synthetic construct
  source 1..20: mol_type = other DNA
gccagtaggagaggctttgt

SEQ ID NO: 217228 - DNA, 20 bp, synthetic construct
  source 1..20: mol_type = other DNA
agccagtaggagaggctttg

SEQ ID NO: 217229 - DNA, 20 bp, synthetic construct
  source 1..20: mol_type = other DNA
gagccagtaggagaggcttt

SEQ ID NO: 217230 - DNA, 20 bp, synthetic construct
  source 1..20: mol_type = other DNA
ggagccagtaggagaggctt

SEQ ID NO: 217231 - DNA, 20 bp, synthetic construct
  source 1..20: mol_type = other DNA
aggagccagtaggagaggct

SEQ ID NO: 217232 - DNA, 20 bp, synthetic construct
  source 1..20: mol_type = other DNA
caggagccagtaggagaggc

SEQ ID NO: 217233 - DNA, 20 bp, synthetic construct
  source 1..20: mol_type = other DNA
gcaggagccagtaggagagg

SEQ ID NO: 217234 - DNA, 20 bp, synthetic construct
  source 1..20: mol_type = other DNA
agcaggagccagtaggagag

SEQ ID NO: 217235 - DNA, 20 bp, synthetic construct
  source 1..20: mol_type = other DNA
aagcaggagccagtaggaga

SEQ ID NO: 217236 - DNA, 20 bp, synthetic construct
  source 1..20: mol_type = other DNA
aaagcaggagccagtaggag

SEQ ID NO: 217237 - DNA, 20 bp, synthetic construct
  source 1..20: mol_type = other DNA
aaaagcaggagccagtagga

SEQ ID NO: 217238 - DNA, 20 bp, synthetic construct
  source 1..20: mol_type = other DNA
gaaaagcaggagccagtagg

SEQ ID NO: 217239 - DNA, 20 bp, synthetic construct
  source 1..20: mol_type = other DNA
agaaaagcaggagccagtag

SEQ ID NO: 217240 - DNA, 20 bp, synthetic construct
  source 1..20: mol_type = other DNA
gagaaaagcaggagccagta

SEQ ID NO: 217241 - DNA, 20 bp, synthetic construct
  source 1..20: mol_type = other DNA
ggagaaaagcaggagccagt

SEQ ID NO: 217242 - DNA, 20 bp, synthetic construct
  source 1..20: mol_type = other DNA
gggagaaaagcaggagccag

SEQ ID NO: 217243 - DNA, 20 bp, synthetic construct
  source 1..20: mol_type = other DNA
agggagaaaagcaggagcca

SEQ ID NO: 217244 - DNA, 20 bp, synthetic construct
  source 1..20: mol_type = other DNA
aagggagaaaagcaggagcc

SEQ ID NO: 217245 - DNA, 20 bp, synthetic construct
  source 1..20: mol_type = other DNA
taagggagaaaagcaggagc

SEQ ID NO: 217246 - DNA, 20 bp, synthetic construct
  source 1..20: mol_type = other DNA
ctaagggagaaaagcaggag

SEQ ID NO: 217247 - DNA, 20 bp, synthetic construct
  source 1..20: mol_type = other DNA
cctaagggagaaaagcagga

SEQ ID NO: 217248 - DNA, 20 bp, synthetic construct
  source 1..20: mol_type = other DNA
acctaagggagaaaagcagg

SEQ ID NO: 217249 - DNA, 20 bp, synthetic construct
  source 1..20: mol_type = other DNA
gacctaagggagaaaagcag

SEQ ID NO: 217250 - DNA, 20 bp, synthetic construct
  source 1..20: mol_type = other DNA
ggacctaagggagaaaagca

SEQ ID NO: 217251 - DNA, 20 bp, synthetic construct
  source 1..20: mol_type = other DNA
tggacctaagggagaaaagc

SEQ ID NO: 217252 - DNA, 20 bp, synthetic construct
  source 1..20: mol_type = other DNA
ctggacctaagggagaaaag

SEQ ID NO: 217253 - DNA, 20 bp, synthetic construct
  source 1..20: mol_type = other DNA
gctggacctaagggagaaaa

SEQ ID NO: 217254 - DNA, 20 bp, synthetic construct
  source 1..20: mol_type = other DNA
ggctggacctaagggagaaa

SEQ ID NO: 217255 - DNA, 20 bp, synthetic construct
  source 1..20: mol_type = other DNA
aggctggacctaagggagaa

SEQ ID NO: 217256 - DNA, 20 bp, synthetic construct
  source 1..20: mol_type = other DNA
gaggctggacctaagggaga

SEQ ID NO: 217257 - DNA, 20 bp, synthetic construct
  source 1..20: mol_type = other DNA
ggaggctggacctaagggag

SEQ ID NO: 217258 - DNA, 20 bp, synthetic construct
  source 1..20: mol_type = other DNA
aggaggctggacctaaggga

SEQ ID NO: 217259 - DNA, 20 bp, synthetic construct
  source 1..20: mol_type = other DNA
gaggaggctggacctaaggg

SEQ ID NO: 217260 - DNA, 20 bp, synthetic construct
  source 1..20: mol_type = other DNA
agaggaggctggacctaagg

SEQ ID NO: 217261 - DNA, 20 bp, synthetic construct
  source 1..20: mol_type = other DNA
aagaggaggctggacctaag

SEQ ID NO: 217262 - DNA, 20 bp, synthetic construct
  source 1..20: mol_type = other DNA
gaagaggaggctggacctaa

SEQ ID NO: 217263 - DNA, 20 bp, synthetic construct
  source 1..20: mol_type = other DNA
agaagaggaggctggaccta

SEQ ID NO: 217264 - DNA, 20 bp, synthetic construct
  source 1..20: mol_type = other DNA
gagaagaggaggctggacct

SEQ ID NO: 217265 - DNA, 20 bp, synthetic construct
  source 1..20: mol_type = other DNA
ggagaagaggaggctggacc

SEQ ID NO: 217266 - DNA, 20 bp, synthetic construct
  source 1..20: mol_type = other DNA
tggagaagaggaggctggac

SEQ ID NO: 217267 - DNA, 20 bp, synthetic construct
  source 1..20: mol_type = other DNA
atggagaagaggaggctgga

SEQ ID NO: 217268 - DNA, 20 bp, synthetic construct
  source 1..20: mol_type = other DNA
gatggagaagaggaggctgg

SEQ ID NO: 217269 - DNA, 20 bp, synthetic construct
  source 1..20: mol_type = other DNA
agatggagaagaggaggctg

SEQ ID NO: 217270 - DNA, 20 bp, synthetic construct
  source 1..20: mol_type = other DNA
aagatggagaagaggaggct

SEQ ID NO: 217271 - DNA, 20 bp, synthetic construct
  source 1..20: mol_type = other DNA
gaagatggagaagaggaggc

SEQ ID NO: 217272 - DNA, 20 bp, synthetic construct
  source 1..20: mol_type = other DNA
tgaagatggagaagaggagg

SEQ ID NO: 217273 - DNA, 20 bp, synthetic construct
  source 1..20: mol_type = other DNA
ctgaagatggagaagaggag

SEQ ID NO: 217274 - DNA, 20 bp, synthetic construct
  source 1..20: mol_type = other DNA
cctgaagatggagaagagga

SEQ ID NO: 217275 - DNA, 20 bp, synthetic construct
  source 1..20: mol_type = other DNA
tcctgaagatggagaagagg

SEQ ID NO: 217276 - DNA, 20 bp, synthetic construct
  source 1..20: mol_type = other DNA
ctcctgaagatggagaagag

SEQ ID NO: 217277 - DNA, 20 bp, synthetic construct
  source 1..20: mol_type = other DNA
actcctgaagatggagaaga

SEQ ID NO: 217278 - DNA, 20 bp, synthetic construct
  source 1..20: mol_type = other DNA
gactcctgaagatggagaag

SEQ ID NO: 217279 - DNA, 20 bp, synthetic construct
  source 1..20: mol_type = other DNA
agactcctgaagatggagaa

SEQ ID NO: 217280 - DNA, 20 bp, synthetic construct
  source 1..20: mol_type = other DNA
gagactcctgaagatggaga

SEQ ID NO: 217281 - DNA, 20 bp, synthetic construct
  source 1..20: mol_type = other DNA
ggagactcctgaagatggag

SEQ ID NO: 217282 - DNA, 20 bp, synthetic construct
  source 1..20: mol_type = other DNA
aggagactcctgaagatgga

SEQ ID NO: 217283 - DNA, 20 bp, synthetic construct
  source 1..20: mol_type = other DNA
aaggagactcctgaagatgg

SEQ ID NO: 217284 - DNA, 20 bp, synthetic construct
  source 1..20: mol_type = other DNA
gaaggagactcctgaagatg

SEQ ID NO: 217285 - DNA, 20 bp, synthetic construct
  source 1..20: mol_type = other DNA
agaaggagactcctgaagat

SEQ ID NO: 217286 - DNA, 20 bp, synthetic construct
  source 1..20: mol_type = other DNA
gagaaggagactcctgaaga

SEQ ID NO: 217287 - DNA, 20 bp, synthetic construct
  source 1..20: mol_type = other DNA
ggagaaggagactcctgaag

SEQ ID NO: 217288 - DNA, 20 bp, synthetic construct
  source 1..20: mol_type = other DNA
tggagaaggagactcctgaa

SEQ ID NO: 217289 - DNA, 20 bp, synthetic construct
  source 1..20: mol_type = other DNA
gtggagaaggagactcctga

SEQ ID NO: 217290 - DNA, 20 bp, synthetic construct
  source 1..20: mol_type = other DNA
agtggagaaggagactcctg

SEQ ID NO: 217291 - DNA, 20 bp, synthetic construct
  source 1..20: mol_type = other DNA
gagtggagaaggagactcct

SEQ ID NO: 217292 - DNA, 20 bp, synthetic construct
  source 1..20: mol_type = other DNA
tgagtggagaaggagactcc

SEQ ID NO: 217293 - DNA, 20 bp, synthetic construct
  source 1..20: mol_type = other DNA
gtgagtggagaaggagactc

SEQ ID NO: 217294 - DNA, 20 bp, synthetic construct
  source 1..20: mol_type = other DNA
tgtgagtggagaaggagact

SEQ ID NO: 217295 - DNA, 20 bp, synthetic construct
  source 1..20: mol_type = other DNA
gtgtgagtggagaaggagac

SEQ ID NO: 217296 - DNA, 20 bp, synthetic construct
  source 1..20: mol_type = other DNA
cgtgtgagtggagaaggaga

SEQ ID NO: 217297 - DNA, 20 bp, synthetic construct
  source 1..20: mol_type = other DNA
acgtgtgagtggagaaggag

SEQ ID NO: 217298 - DNA, 20 bp, synthetic construct
  source 1..20: mol_type = other DNA
gacgtgtgagtggagaagga

SEQ ID NO: 217299 - DNA, 20 bp, synthetic construct
  source 1..20: mol_type = other DNA
tgacgtgtgagtggagaagg

SEQ ID NO: 217300 - DNA, 20 bp, synthetic construct
  source 1..20: mol_type = other DNA
atgacgtgtgagtggagaag

SEQ ID NO: 217301 - DNA, 20 bp, synthetic construct
  source 1..20: mol_type = other DNA
catgacgtgtgagtggagaa

SEQ ID NO: 217302 - DNA, 20 bp, synthetic construct
  source 1..20: mol_type = other DNA
tcatgacgtgtgagtggaga

SEQ ID NO: 217303 - DNA, 20 bp, synthetic construct
  source 1..20: mol_type = other DNA
gtcatgacgtgtgagtggag

SEQ ID NO: 217304 - DNA, 20 bp, synthetic construct
  source 1..20: mol_type = other DNA
agtcatgacgtgtgagtgga

SEQ ID NO: 217305 - DNA, 20 bp, synthetic construct
  source 1..20: mol_type = other DNA
aagtcatgacgtgtgagtgg

SEQ ID NO: 217306 - DNA, 20 bp, synthetic construct
  source 1..20: mol_type = other DNA
gaagtcatgacgtgtgagtg

SEQ ID NO: 217307 - DNA, 20 bp, synthetic construct
  source 1..20: mol_type = other DNA
tgaagtcatgacgtgtgagt

SEQ ID NO: 217308 - DNA, 20 bp, synthetic construct
  source 1..20: mol_type = other DNA
ctgaagtcatgacgtgtgag

SEQ ID NO: 217309 - DNA, 20 bp, synthetic construct
  source 1..20: mol_type = other DNA
gctgaagtcatgacgtgtga

SEQ ID NO: 217310 - DNA, 20 bp, synthetic construct
  source 1..20: mol_type = other DNA
tgctgaagtcatgacgtgtg

SEQ ID NO: 217311 - DNA, 20 bp, synthetic construct
  source 1..20: mol_type = other DNA
gtgctgaagtcatgacgtgt

SEQ ID NO: 217312 - DNA, 20 bp, synthetic construct
  source 1..20: mol_type = other DNA
ggtgctgaagtcatgacgtg

SEQ ID NO: 217313 - DNA, 20 bp, synthetic construct
  source 1..20: mol_type = other DNA
aggtgctgaagtcatgacgt

SEQ ID NO: 217314 - DNA, 20 bp, synthetic construct
  source 1..20: mol_type = other DNA
gaggtgctgaagtcatgacg

SEQ ID NO: 217315 - DNA, 20 bp, synthetic construct
  source 1..20: mol_type = other DNA
cgaggtgctgaagtcatgac

SEQ ID NO: 217316 - DNA, 20 bp, synthetic construct
  source 1..20: mol_type = other DNA
gcgaggtgctgaagtcatga

SEQ ID NO: 217317 - DNA, 20 bp, synthetic construct
  source 1..20: mol_type = other DNA
tgcgaggtgctgaagtcatg

SEQ ID NO: 217318 - DNA, 20 bp, synthetic construct
  source 1..20: mol_type = other DNA
atgcgaggtgctgaagtcat

SEQ ID NO: 217319 - DNA, 20 bp, synthetic construct
  source 1..20: mol_type = other DNA
gatgcgaggtgctgaagtca

SEQ ID NO: 217320 - DNA, 20 bp, synthetic construct
  source 1..20: mol_type = other DNA
tgatgcgaggtgctgaagtc

SEQ ID NO: 217321 - DNA, 20 bp, synthetic construct
  source 1..20: mol_type = other DNA
ctgatgcgaggtgctgaagt

SEQ ID NO: 217322 - DNA, 20 bp, synthetic construct
  source 1..20: mol_type = other DNA
actgatgcgaggtgctgaag

SEQ ID NO: 217323 - DNA, 20 bp, synthetic construct
  source 1..20: mol_type = other DNA
gactgatgcgaggtgctgaa

SEQ ID NO: 217324 - DNA, 20 bp, synthetic construct
  source 1..20: mol_type = other DNA
ggactgatgcgaggtgctga

SEQ ID NO: 217325 - DNA, 20 bp, synthetic construct
  source 1..20: mol_type = other DNA
tggactgatgcgaggtgctg

SEQ ID NO: 217326 - DNA, 20 bp, synthetic construct
  source 1..20: mol_type = other DNA
ctggactgatgcgaggtgct

SEQ ID NO: 217327 - DNA, 20 bp, synthetic construct
  source 1..20: mol_type = other DNA
tctggactgatgcgaggtgc

SEQ ID NO: 217328 - DNA, 20 bp, synthetic construct
  source 1..20: mol_type = other DNA
ttctggactgatgcgaggtg

SEQ ID NO: 217329 - DNA, 20 bp, synthetic construct
  source 1..20: mol_type = other DNA
attctggactgatgcgaggt

SEQ ID NO: 217330 - DNA, 20 bp, synthetic construct
  source 1..20: mol_type = other DNA
tattctggactgatgcgagg

SEQ ID NO: 217331 - DNA, 20 bp, synthetic construct
  source 1..20: mol_type = other DNA
atattctggactgatgcgag

SEQ ID NO: 217332 - DNA, 20 bp, synthetic construct
  source 1..20: mol_type = other DNA
catattctggactgatgcga

SEQ ID NO: 217333 - DNA, 20 bp, synthetic construct
  source 1..20: mol_type = other DNA
tcatattctggactgatgcg

SEQ ID NO: 217334 - DNA, 20 bp, synthetic construct
  source 1..20: mol_type = other DNA
gtcatattctggactgatgc

SEQ ID NO: 217335 - DNA, 20 bp, synthetic construct
  source 1..20: mol_type = other DNA
agtcatattctggactgatg

SEQ ID NO: 217336 - DNA, 20 bp, synthetic construct
  source 1..20: mol_type = other DNA
cagtcatattctggactgat

SEQ ID NO: 217337 - DNA, 20 bp, synthetic construct
  source 1..20: mol_type = other DNA
gcagtcatattctggactga

SEQ ID NO: 217338 - DNA, 20 bp, synthetic construct
  source 1..20: mol_type = other DNA
agcagtcatattctggactg

SEQ ID NO: 217339 - DNA, 20 bp, synthetic construct
  source 1..20: mol_type = other DNA
aagcagtcatattctggact

SEQ ID NO: 217340 - DNA, 20 bp, synthetic construct
  source 1..20: mol_type = other DNA
caagcagtcatattctggac

SEQ ID NO: 217341 - DNA, 20 bp, synthetic construct
  source 1..20: mol_type = other DNA
acaagcagtcatattctgga

SEQ ID NO: 217342 - DNA, 20 bp, synthetic construct
  source 1..20: mol_type = other DNA
aacaagcagtcatattctgg

SEQ ID NO: 217343 - DNA, 20 bp, synthetic construct
  source 1..20: mol_type = other DNA
gaacaagcagtcatattctg

SEQ ID NO: 217344 - DNA, 20 bp, synthetic construct
  source 1..20: mol_type = other DNA
tgaacaagcagtcatattct

SEQ ID NO: 217345 - DNA, 20 bp, synthetic construct
  source 1..20: mol_type = other DNA
ttgaacaagcagtcatattc

SEQ ID NO: 217346 - DNA, 20 bp, synthetic construct
  source 1..20: mol_type = other DNA
cttgaacaagcagtcatatt

SEQ ID NO: 217347 - DNA, 20 bp, synthetic construct
  source 1..20: mol_type = other DNA
acttgaacaagcagtcatat

SEQ ID NO: 217348 - DNA, 20 bp, synthetic construct
  source 1..20: mol_type = other DNA
cacttgaacaagcagtcata

SEQ ID NO: 217349 - DNA, 20 bp, synthetic construct
  source 1..20: mol_type = other DNA
gcacttgaacaagcagtcat

SEQ ID NO: 217350 - DNA, 20 bp, synthetic construct
  source 1..20: mol_type = other DNA
ggcacttgaacaagcagtca

SEQ ID NO: 217351 - DNA, 20 bp, synthetic construct
  source 1..20: mol_type = other DNA
tggcacttgaacaagcagtc

SEQ ID NO: 217352 - DNA, 20 bp, synthetic construct
  source 1..20: mol_type = other DNA
gtggcacttgaacaagcagt

SEQ ID NO: 217353 - DNA, 20 bp, synthetic construct
  source 1..20: mol_type = other DNA
ggtggcacttgaacaagcag

SEQ ID NO: 217354 - DNA, 20 bp, synthetic construct
  source 1..20: mol_type = other DNA
aggtggcacttgaacaagca

SEQ ID NO: 217355 - DNA, 20 bp, synthetic construct
  source 1..20: mol_type = other DNA
aaggtggcacttgaacaagc

SEQ ID NO: 217356 - DNA, 20 bp, synthetic construct
  source 1..20: mol_type = other DNA
aaaggtggcacttgaacaag

SEQ ID NO: 217357 - DNA, 20 bp, synthetic construct
  source 1..20: mol_type = other DNA
gaaaggtggcacttgaacaa

SEQ ID NO: 217358 - DNA, 20 bp, synthetic construct
  source 1..20: mol_type = other DNA
agaaaggtggcacttgaaca

SEQ ID NO: 217359 - DNA, 20 bp, synthetic construct
  source 1..20: mol_type = other DNA
gagaaaggtggcacttgaac

SEQ ID NO: 217360 - DNA, 20 bp, synthetic construct
  source 1..20: mol_type = other DNA
tgagaaaggtggcacttgaa

SEQ ID NO: 217361 - DNA, 20 bp, synthetic construct
  source 1..20: mol_type = other DNA
atgagaaaggtggcacttga

SEQ ID NO: 217362 - DNA, 20 bp, synthetic construct
  source 1..20: mol_type = other DNA
catgagaaaggtggcacttg

SEQ ID NO: 217363 - DNA, 20 bp, synthetic construct
  source 1..20: mol_type = other DNA
gcatgagaaaggtggcactt

SEQ ID NO: 217364 - DNA, 20 bp, synthetic construct
  source 1..20: mol_type = other DNA
tgcatgagaaaggtggcact

SEQ ID NO: 217365 - DNA, 20 bp, synthetic construct
  source 1..20: mol_type = other DNA
atgcatgagaaaggtggcac

SEQ ID NO: 217366 - DNA, 20 bp, synthetic construct
  source 1..20: mol_type = other DNA
aatgcatgagaaaggtggca

SEQ ID NO: 217367 - DNA, 20 bp, synthetic construct
  source 1..20: mol_type = other DNA
aaatgcatgagaaaggtggc

SEQ ID NO: 217368 - DNA, 20 bp, synthetic construct
  source 1..20: mol_type = other DNA
aaaatgcatgagaaaggtgg

SEQ ID NO: 217369 - DNA, 20 bp, synthetic construct
  source 1..20: mol_type = other DNA
aaaaatgcatgagaaaggtg

SEQ ID NO: 217370 - DNA, 20 bp, synthetic construct
  source 1..20: mol_type = other DNA
aaaaaatgcatgagaaaggt

SEQ ID NO: 217371 - DNA, 20 bp, synthetic construct
  source 1..20: mol_type = other DNA
aaaaaaatgcatgagaaagg

SEQ ID NO: 217372 - DNA, 20 bp, synthetic construct
  source 1..20: mol_type = other DNA
gaaaaaaatgcatgagaaag

SEQ ID NO: 217373 - DNA, 20 bp, synthetic construct
  source 1..20: mol_type = other DNA
agaaaaaaatgcatgagaaa

SEQ ID NO: 217374 - DNA, 20 bp, synthetic construct
  source 1..20: mol_type = other DNA
tagaaaaaaatgcatgagaa

SEQ ID NO: 217375 - DNA, 20 bp, synthetic construct
  source 1..20: mol_type = other DNA
ctagaaaaaaatgcatgaga

SEQ ID NO: 217376 - DNA, 20 bp, synthetic construct
  source 1..20: mol_type = other DNA
actagaaaaaaatgcatgag

SEQ ID NO: 217377 - DNA, 20 bp, synthetic construct
  source 1..20: mol_type = other DNA
cactagaaaaaaatgcatga

SEQ ID NO: 217378 - DNA, 20 bp, synthetic construct
  source 1..20: mol_type = other DNA
tcactagaaaaaaatgcatg

SEQ ID NO: 217379 - DNA, 20 bp, synthetic construct
  source 1..20: mol_type = other DNA
gtcactagaaaaaaatgcat

SEQ ID NO: 217380 - DNA, 20 bp, synthetic construct
  source 1..20: mol_type = other DNA
tgtcactagaaaaaaatgca

SEQ ID NO: 217381 - DNA, 20 bp, synthetic construct
  source 1..20: mol_type = other DNA
ttgtcactagaaaaaaatgc

SEQ ID NO: 217382 - DNA, 20 bp, synthetic construct
  source 1..20: mol_type = other DNA
attgtcactagaaaaaaatg

SEQ ID NO: 217383 - DNA, 20 bp, synthetic construct
  source 1..20: mol_type = other DNA
gattgtcactagaaaaaaat

SEQ ID NO: 217384 - DNA, 20 bp, synthetic construct
  source 1..20: mol_type = other DNA
tgattgtcactagaaaaaaa

SEQ ID NO: 217385 - DNA, 20 bp, synthetic construct
  source 1..20: mol_type = other DNA
gtgattgtcactagaaaaaa

SEQ ID NO: 217386 - DNA, 20 bp, synthetic construct
  source 1..20: mol_type = other DNA
tgtgattgtcactagaaaaa

SEQ ID NO: 217387 - DNA, 20 bp, synthetic construct
  source 1..20: mol_type = other DNA
ctgtgattgtcactagaaaa

SEQ ID NO: 217388 - DNA, 20 bp, synthetic construct
  source 1..20: mol_type = other DNA
gctgtgattgtcactagaaa

SEQ ID NO: 217389 - DNA, 20 bp, synthetic construct
  source 1..20: mol_type = other DNA
ggctgtgattgtcactagaa

SEQ ID NO: 217390 - DNA, 20 bp, synthetic construct
  source 1..20: mol_type = other DNA
tggctgtgattgtcactaga

SEQ ID NO: 217391 - DNA, 20 bp, synthetic construct
  source 1..20: mol_type = other DNA
gtggctgtgattgtcactag

SEQ ID NO: 217392 - DNA, 20 bp, synthetic construct
  source 1..20: mol_type = other DNA
ggtggctgtgattgtcacta

SEQ ID NO: 217393 - DNA, 20 bp, synthetic construct
  source 1..20: mol_type = other DNA
gggtggctgtgattgtcact

SEQ ID NO: 217394 - DNA, 20 bp, synthetic construct
  source 1..20: mol_type = other DNA
agggtggctgtgattgtcac

SEQ ID NO: 217395 - DNA, 20 bp, synthetic construct
  source 1..20: mol_type = other DNA
cagggtggctgtgattgtca

SEQ ID NO: 217396 - DNA, 20 bp, synthetic construct
  source 1..20: mol_type = other DNA
acagggtggctgtgattgtc

SEQ ID NO: 217397 - DNA, 20 bp, synthetic construct
  source 1..20: mol_type = other DNA
cacagggtggctgtgattgt

SEQ ID NO: 217398 - DNA, 20 bp, synthetic construct
  source 1..20: mol_type = other DNA
ccacagggtggctgtgattg

SEQ ID NO: 217399 - DNA, 20 bp, synthetic construct
  source 1..20: mol_type = other DNA
cccacagggtggctgtgatt

SEQ ID NO: 217400 - DNA, 20 bp, synthetic construct
  source 1..20: mol_type = other DNA
ccccacagggtggctgtgat

SEQ ID NO: 217401 - DNA, 20 bp, synthetic construct
  source 1..20: mol_type = other DNA
gccccacagggtggctgtga

SEQ ID NO: 217402 - DNA, 20 bp, synthetic construct
  source 1..20: mol_type = other DNA
tgccccacagggtggctgtg

SEQ ID NO: 217403 - DNA, 20 bp, synthetic construct
  source 1..20: mol_type = other DNA
ctgccccacagggtggctgt

SEQ ID NO: 217404 - DNA, 20 bp, synthetic construct
  source 1..20: mol_type = other DNA
cctgccccacagggtggctg

SEQ ID NO: 217405 - DNA, 20 bp, synthetic construct
  source 1..20: mol_type = other DNA
tcctgccccacagggtggct

SEQ ID NO: 217406 - DNA, 20 bp, synthetic construct
  source 1..20: mol_type = other DNA
ctcctgccccacagggtggc

SEQ ID NO: 217407 - DNA, 20 bp, synthetic construct
  source 1..20: mol_type = other DNA
actcctgccccacagggtgg

SEQ ID NO: 217408 - DNA, 20 bp, synthetic construct
  source 1..20: mol_type = other DNA
cactcctgccccacagggtg

SEQ ID NO: 217409 - DNA, 20 bp, synthetic construct
  source 1..20: mol_type = other DNA
acactcctgccccacagggt

SEQ ID NO: 217410 - DNA, 20 bp, synthetic construct
  source 1..20: mol_type = other DNA
gacactcctgccccacaggg

SEQ ID NO: 217411 - DNA, 20 bp, synthetic construct
  source 1..20: mol_type = other DNA
tgacactcctgccccacagg

SEQ ID NO: 217412 - DNA, 20 bp, synthetic construct
  source 1..20: mol_type = other DNA
atgacactcctgccccacag

SEQ ID NO: 217413 - DNA, 20 bp, synthetic construct
  source 1..20: mol_type = other DNA
gatgacactcctgccccaca

SEQ ID NO: 217414 - DNA, 20 bp, synthetic construct
  source 1..20: mol_type = other DNA
tgatgacactcctgccccac

SEQ ID NO: 217415 - DNA, 20 bp, synthetic construct
  source 1..20: mol_type = other DNA
atgatgacactcctgcccca

SEQ ID NO: 217416 - DNA, 20 bp, synthetic construct
  source 1..20: mol_type = other DNA
gatgatgacactcctgcccc

SEQ ID NO: 217417 - DNA, 20 bp, synthetic construct
  source 1..20: mol_type = other DNA
ggatgatgacactcctgccc

SEQ ID NO: 217418 - DNA, 20 bp, synthetic construct
  source 1..20: mol_type = other DNA
gggatgatgacactcctgcc

SEQ ID NO: 217419 - DNA, 20 bp, synthetic construct
  source 1..20: mol_type = other DNA
ggggatgatgacactcctgc

SEQ ID NO: 217420 - DNA, 20 bp, synthetic construct
  source 1..20: mol_type = other DNA
tggggatgatgacactcctg

SEQ ID NO: 217421 - DNA, 20 bp, synthetic construct
  source 1..20: mol_type = other DNA
atggggatgatgacactcct

SEQ ID NO: 217422 - DNA, 20 bp, synthetic construct
  source 1..20: mol_type = other DNA
catggggatgatgacactcc

SEQ ID NO: 217423 - DNA, 20 bp, synthetic construct
  source 1..20: mol_type = other DNA
acatggggatgatgacactc

SEQ ID NO: 217424 - DNA, 20 bp, synthetic construct
  source 1..20: mol_type = other DNA
aacatggggatgatgacact

SEQ ID NO: 217425 - DNA, 20 bp, synthetic construct
  source 1..20: mol_type = other DNA
aaacatggggatgatgacac

SEQ ID NO: 217426 - DNA, 20 bp, synthetic construct
  source 1..20: mol_type = other DNA
gaaacatggggatgatgaca

SEQ ID NO: 217427 - DNA, 20 bp, synthetic construct
  source 1..20: mol_type = other DNA
tgaaacatggggatgatgac

SEQ ID NO: 217428 - DNA, 20 bp, synthetic construct
  source 1..20: mol_type = other DNA
ttgaaacatggggatgatga

SEQ ID NO: 217429 - DNA, 20 bp, synthetic construct
  source 1..20: mol_type = other DNA
tttgaaacatggggatgatg

SEQ ID NO: 217430 - DNA, 20 bp, synthetic construct
  source 1..20: mol_type = other DNA
atttgaaacatggggatgat

SEQ ID NO: 217431 - DNA, 20 bp, synthetic construct
  source 1..20: mol_type = other DNA
catttgaaacatggggatga

SEQ ID NO: 217432 - DNA, 20 bp, synthetic construct
  source 1..20: mol_type = other DNA
tcatttgaaacatggggatg

SEQ ID NO: 217433 - DNA, 20 bp, synthetic construct
  source 1..20: mol_type = other DNA
ttcatttgaaacatggggat

SEQ ID NO: 217434 - DNA, 20 bp, synthetic construct
  source 1..20: mol_type = other DNA
cttcatttgaaacatgggga

SEQ ID NO: 217435 - DNA, 20 bp, synthetic construct
  source 1..20: mol_type = other DNA
tcttcatttgaaacatgggg

SEQ ID NO: 217436 - DNA, 20 bp, synthetic construct
  source 1..20: mol_type = other DNA
ttcttcatttgaaacatggg

SEQ ID NO: 217437 - DNA, 20 bp, synthetic construct
  source 1..20: mol_type = other DNA
attcttcatttgaaacatgg

SEQ ID NO: 217438 - DNA, 20 bp, synthetic construct
  source 1..20: mol_type = other DNA
aattcttcatttgaaacatg

SEQ ID NO: 217439 - DNA, 20 bp, synthetic construct
  source 1..20: mol_type = other DNA
caattcttcatttgaaacat

SEQ ID NO: 217440 - DNA, 20 bp, synthetic construct
  source 1..20: mol_type = other DNA
gcaattcttcatttgaaaca

SEQ ID NO: 217441 - DNA, 20 bp, synthetic construct
  source 1..20: mol_type = other DNA
tgcaattcttcatttgaaac

SEQ ID NO: 217442 - DNA, 20 bp, synthetic construct
  source 1..20: mol_type = other DNA
ctgcaattcttcatttgaaa

SEQ ID NO: 217443 - DNA, 20 bp, synthetic construct
  source 1..20: mol_type = other DNA
actgcaattcttcatttgaa

SEQ ID NO: 217444 - DNA, 20 bp, synthetic construct
  source 1..20: mol_type = other DNA
aactgcaattcttcatttga

SEQ ID NO: 217445 - DNA, 20 bp, synthetic construct
  source 1..20: mol_type = other DNA
gaactgcaattcttcatttg

SEQ ID NO: 217446 - DNA, 20 bp, synthetic construct
  source 1..20: mol_type = other DNA
tgaactgcaattcttcattt

SEQ ID NO: 217447 - DNA, 20 bp, synthetic construct
  source 1..20: mol_type = other DNA
ctgaactgcaattcttcatt

SEQ ID NO: 217448 - DNA, 20 bp, synthetic construct
  source 1..20: mol_type = other DNA
tctgaactgcaattcttcat

SEQ ID NO: 217449 - DNA, 20 bp, synthetic construct
  source 1..20: mol_type = other DNA
ctctgaactgcaattcttca

SEQ ID NO: 217450 - DNA, 20 bp, synthetic construct
  source 1..20: mol_type = other DNA
tctctgaactgcaattcttc

SEQ ID NO: 217451 - DNA, 20 bp, synthetic construct
  source 1..20: mol_type = other DNA
ctctctgaactgcaattctt

SEQ ID NO: 217452 - DNA, 20 bp, synthetic construct
  source 1..20: mol_type = other DNA
cctctctgaactgcaattct

SEQ ID NO: 217453 - DNA, 20 bp, synthetic construct
  source 1..20: mol_type = other DNA
ccctctctgaactgcaattc

SEQ ID NO: 217454 - DNA, 20 bp, synthetic construct
  source 1..20: mol_type = other DNA
gccctctctgaactgcaatt

SEQ ID NO: 217455 - DNA, 20 bp, synthetic construct
  source 1..20: mol_type = other DNA
tgccctctctgaactgcaat

SEQ ID NO: 217456 - DNA, 20 bp, synthetic construct
  source 1..20: mol_type = other DNA
ttgccctctctgaactgcaa

SEQ ID NO: 217457 - DNA, 20 bp, synthetic construct
  source 1..20: mol_type = other DNA
cttgccctctctgaactgca

SEQ ID NO: 217458 - DNA, 20 bp, synthetic construct
  source 1..20: mol_type = other DNA
acttgccctctctgaactgc

SEQ ID NO: 217459 - DNA, 20 bp, synthetic construct
  source 1..20: mol_type = other DNA
cacttgccctctctgaactg

SEQ ID NO: 217460 - DNA, 20 bp, synthetic construct
  source 1..20: mol_type = other DNA
tcacttgccctctctgaact

SEQ ID NO: 217461 - DNA, 20 bp, synthetic construct
  source 1..20: mol_type = other DNA
gtcacttgccctctctgaac

SEQ ID NO: 217462 - DNA, 20 bp, synthetic construct
  source 1..20: mol_type = other DNA
agtcacttgccctctctgaa

SEQ ID NO: 217463 - DNA, 20 bp, synthetic construct
  source 1..20: mol_type = other DNA
cagtcacttgccctctctga

SEQ ID NO: 217464 - DNA, 20 bp, synthetic construct
  source 1..20: mol_type = other DNA
ccagtcacttgccctctctg

SEQ ID NO: 217465 - DNA, 20 bp, synthetic construct
  source 1..20: mol_type = other DNA
gccagtcacttgccctctct

SEQ ID NO: 217466 - DNA, 20 bp, synthetic construct
  source 1..20: mol_type = other DNA
ggccagtcacttgccctctc

SEQ ID NO: 217467 - DNA, 20 bp, synthetic construct
  source 1..20: mol_type = other DNA
gggccagtcacttgccctct

SEQ ID NO: 217468 - DNA, 20 bp, synthetic construct
  source 1..20: mol_type = other DNA
tgggccagtcacttgccctc

SEQ ID NO: 217469 - DNA, 20 bp, synthetic construct
  source 1..20: mol_type = other DNA
ctgggccagtcacttgccct

SEQ ID NO: 217470 - DNA, 20 bp, synthetic construct
  source 1..20: mol_type = other DNA
gctgggccagtcacttgccc

SEQ ID NO: 217471 - DNA, 20 bp, synthetic construct
  source 1..20: mol_type = other DNA
ggctgggccagtcacttgcc

SEQ ID NO: 217472 - DNA, 20 bp, synthetic construct
  source 1..20: mol_type = other DNA
aggctgggccagtcacttgc

SEQ ID NO: 217473 - DNA, 20 bp, synthetic construct
  source 1..20: mol_type = other DNA
gaggctgggccagtcacttg

SEQ ID NO: 217474 - DNA, 20 bp, synthetic construct
  source 1..20: mol_type = other DNA
tgaggctgggccagtcactt

SEQ ID NO: 217475 - DNA, 20 bp, synthetic construct
  source 1..20: mol_type = other DNA
ttgaggctgggccagtcact

SEQ ID NO: 217476 - DNA, 20 bp, synthetic construct
  source 1..20: mol_type = other DNA
gttgaggctgggccagtcac

SEQ ID NO: 217477 - DNA, 20 bp, synthetic construct
  source 1..20: mol_type = other DNA
tgttgaggctgggccagtca

SEQ ID NO: 217478 - DNA, 20 bp, synthetic construct
  source 1..20: mol_type = other DNA
ctgttgaggctgggccagtc

SEQ ID NO: 217479 - DNA, 20 bp, synthetic construct
  source 1..20: mol_type = other DNA
gctgttgaggctgggccagt

SEQ ID NO: 217480 - DNA, 20 bp, synthetic construct
  source 1..20: mol_type = other DNA
agctgttgaggctgggccag

SEQ ID NO: 217481 - DNA, 20 bp, synthetic construct
  source 1..20: mol_type = other DNA
tagctgttgaggctgggcca

SEQ ID NO: 217482 - DNA, 20 bp, synthetic construct
  source 1..20: mol_type = other DNA
ctagctgttgaggctgggcc

SEQ ID NO: 217483 - DNA, 20 bp, synthetic construct
  source 1..20: mol_type = other DNA
gctagctgttgaggctgggc

SEQ ID NO: 217484 - DNA, 20 bp, synthetic construct
  source 1..20: mol_type = other DNA
ggctagctgttgaggctggg

SEQ ID NO: 217485 - DNA, 20 bp, synthetic construct
  source 1..20: mol_type = other DNA
tggctagctgttgaggctgg

SEQ ID NO: 217486 - DNA, 20 bp, synthetic construct
  source 1..20: mol_type = other DNA
ctggctagctgttgaggctg

SEQ ID NO: 217487 - DNA, 20 bp, synthetic construct
  source 1..20: mol_type = other DNA
actggctagctgttgaggct

SEQ ID NO: 217488 - DNA, 20 bp, synthetic construct
  source 1..20: mol_type = other DNA
cactggctagctgttgaggc

SEQ ID NO: 217489 - DNA, 20 bp, synthetic construct
  source 1..20: mol_type = other DNA
ccactggctagctgttgagg

SEQ ID NO: 217490 - DNA, 20 bp, synthetic construct
  source 1..20: mol_type = other DNA
tccactggctagctgttgag

SEQ ID NO: 217491 - DNA, 20 bp, synthetic construct
  source 1..20: mol_type = other DNA
gtccactggctagctgttga

SEQ ID NO: 217492 - DNA, 20 bp, synthetic construct
  source 1..20: mol_type = other DNA
ggtccactggctagctgttg

SEQ ID NO: 217493 - DNA, 20 bp, synthetic construct
  source 1..20: mol_type = other DNA
gggtccactggctagctgtt

SEQ ID NO: 217494 - DNA, 20 bp, synthetic construct
  source 1..20: mol_type = other DNA
ggggtccactggctagctgt

SEQ ID NO: 217495 - DNA, 20 bp, synthetic construct
  source 1..20: mol_type = other DNA
tggggtccactggctagctg

SEQ ID NO: 217496 - DNA, 20 bp, synthetic construct
  source 1..20: mol_type = other DNA
gtggggtccactggctagct

SEQ ID NO: 217497 - DNA, 20 bp, synthetic construct
  source 1..20: mol_type = other DNA
ggtggggtccactggctagc

SEQ ID NO: 217498 - DNA, 20 bp, synthetic construct
  source 1..20: mol_type = other DNA
tggtggggtccactggctag

SEQ ID NO: 217499 - DNA, 20 bp, synthetic construct
  source 1..20: mol_type = other DNA
ctggtggggtccactggcta

SEQ ID NO: 217500 - DNA, 20 bp, synthetic construct
  source 1..20: mol_type = other DNA
cctggtggggtccactggct

SEQ ID NO: 217501 - DNA, 20 bp, synthetic construct
  source 1..20: mol_type = other DNA
ccctggtggggtccactggc

SEQ ID NO: 217502 - DNA, 20 bp, synthetic construct
  source 1..20: mol_type = other DNA
gccctggtggggtccactgg

SEQ ID NO: 217503 - DNA, 20 bp, synthetic construct
  source 1..20: mol_type = other DNA
agccctggtggggtccactg

SEQ ID NO: 217504 - DNA, 20 bp, synthetic construct
  source 1..20: mol_type = other DNA
aagccctggtggggtccact

SEQ ID NO: 217505 - DNA, 20 bp, synthetic construct
  source 1..20: mol_type = other DNA
gaagccctggtggggtccac

SEQ ID NO: 217506 - DNA, 20 bp, synthetic construct
  source 1..20: mol_type = other DNA
agaagccctggtggggtcca

SEQ ID NO: 217507 - DNA, 20 bp, synthetic construct
  source 1..20: mol_type = other DNA
cagaagccctggtggggtcc

SEQ ID NO: 217508 - DNA, 20 bp, synthetic construct
  source 1..20: mol_type = other DNA
tcagaagccctggtggggtc

SEQ ID NO: 217509 - DNA, 20 bp, synthetic construct
  source 1..20: mol_type = other DNA
gtcagaagccctggtggggt

SEQ ID NO: 217510 - DNA, 20 bp, synthetic construct
  source 1..20: mol_type = other DNA
agtcagaagccctggtgggg

SEQ ID NO: 217511 - DNA, 20 bp, synthetic construct
  source 1..20: mol_type = other DNA
gagtcagaagccctggtggg

SEQ ID NO: 217512 - DNA, 20 bp, synthetic construct
  source 1..20: mol_type = other DNA
ggagtcagaagccctggtgg

SEQ ID NO: 217513 - DNA, 20 bp, synthetic construct
  source 1..20: mol_type = other DNA
tggagtcagaagccctggtg

SEQ ID NO: 217514 - DNA, 20 bp, synthetic construct
  source 1..20: mol_type = other DNA
ctggagtcagaagccctggt

SEQ ID NO: 217515 - DNA, 20 bp, synthetic construct
  source 1..20: mol_type = other DNA
actggagtcagaagccctgg

SEQ ID NO: 217516 - DNA, 20 bp, synthetic construct
  source 1..20: mol_type = other DNA
gactggagtcagaagccctg

SEQ ID NO: 217517 - DNA, 20 bp, synthetic construct
  source 1..20: mol_type = other DNA
ggactggagtcagaagccct

SEQ ID NO: 217518 - DNA, 20 bp, synthetic construct
  source 1..20: mol_type = other DNA
cggactggagtcagaagccc

SEQ ID NO: 217519 - DNA, 20 bp, synthetic construct
  source 1..20: mol_type = other DNA
ccggactggagtcagaagcc

SEQ ID NO: 217520 - DNA, 20 bp, synthetic construct
  source 1..20: mol_type = other DNA
cccggactggagtcagaagc

SEQ ID NO: 217521 - DNA, 20 bp, synthetic construct
  source 1..20: mol_type = other DNA
acccggactggagtcagaag

SEQ ID NO: 217522 - DNA, 20 bp, synthetic construct
  source 1..20: mol_type = other DNA
aacccggactggagtcagaa

SEQ ID NO: 217523 - DNA, 20 bp, synthetic construct
  source 1..20: mol_type = other DNA
gaacccggactggagtcaga

SEQ ID NO: 217524 - DNA, 20 bp, synthetic construct
  source 1..20: mol_type = other DNA
ggaacccggactggagtcag

SEQ ID NO: 217525 - DNA, 20 bp, synthetic construct
  source 1..20: mol_type = other DNA
gggaacccggactggagtca

SEQ ID NO: 217526 - DNA, 20 bp, synthetic construct
  source 1..20: mol_type = other DNA
agggaacccggactggagtc

SEQ ID NO: 217527 - DNA, 20 bp, synthetic construct
  source 1..20: mol_type = other DNA
aagggaacccggactggagt

SEQ ID NO: 217528 - DNA, 20 bp, synthetic construct
  source 1..20: mol_type = other DNA
aaagggaacccggactggag

SEQ ID NO: 217529 - DNA, 20 bp, synthetic construct
  source 1..20: mol_type = other DNA
gaaagggaacccggactgga

SEQ ID NO: 217530 - DNA, 20 bp, synthetic construct
  source 1..20: mol_type = other DNA
ggaaagggaacccggactgg

SEQ ID NO: 217531 - DNA, 20 bp, synthetic construct
  source 1..20: mol_type = other DNA
tggaaagggaacccggactg

SEQ ID NO: 217532 - DNA, 20 bp, synthetic construct
  source 1..20: mol_type = other DNA
gtggaaagggaacccggact

SEQ ID NO: 217533 - DNA, 20 bp, synthetic construct
  source 1..20: mol_type = other DNA
ggtggaaagggaacccggac

SEQ ID NO: 217534 - DNA, 20 bp, synthetic construct
  source 1..20: mol_type = other DNA
gggtggaaagggaacccgga

SEQ ID NO: 217535 - DNA, 20 bp, synthetic construct
  source 1..20: mol_type = other DNA
tgggtggaaagggaacccgg

SEQ ID NO: 217536 - DNA, 20 bp, synthetic construct
  source 1..20: mol_type = other DNA
ttgggtggaaagggaacccg

SEQ ID NO: 217537 - DNA, 20 bp, synthetic construct
  source 1..20: mol_type = other DNA
tttgggtggaaagggaaccc

SEQ ID NO: 217538 - DNA, 20 bp, synthetic construct
  source 1..20: mol_type = other DNA
atttgggtggaaagggaacc

SEQ ID NO: 217539 - DNA, 20 bp, synthetic construct
  source 1..20: mol_type = other DNA
gatttgggtggaaagggaac

SEQ ID NO: 217540 - DNA, 20 bp, synthetic construct
  source 1..20: mol_type = other DNA
ggatttgggtggaaagggaa

SEQ ID NO: 217541 - DNA, 20 bp, synthetic construct
  source 1..20: mol_type = other DNA
tggatttgggtggaaaggga

SEQ ID NO: 217542 - DNA, 20 bp, synthetic construct
  source 1..20: mol_type = other DNA
atggatttgggtggaaaggg

SEQ ID NO: 217543 - DNA, 20 bp, synthetic construct
  source 1..20: mol_type = other DNA
catggatttgggtggaaagg

SEQ ID NO: 217544 - DNA, 20 bp, synthetic construct
  source 1..20: mol_type = other DNA
ccatggatttgggtggaaag

SEQ ID NO: 217545 - DNA, 20 bp, synthetic construct
  source 1..20: mol_type = other DNA
tccatggatttgggtggaaa

SEQ ID NO: 217546 - DNA, 20 bp, synthetic construct
  source 1..20: mol_type = other DNA
ctccatggatttgggtggaa

SEQ ID NO: 217547 - DNA, 20 bp, synthetic construct
  source 1..20: mol_type = other DNA
cctccatggatttgggtgga

SEQ ID NO: 217548 - DNA, 20 bp, synthetic construct
  source 1..20: mol_type = other DNA
ccctccatggatttgggtgg

SEQ ID NO: 217549 - DNA, 20 bp, synthetic construct
  source 1..20: mol_type = other DNA
tccctccatggatttgggtg

SEQ ID NO: 217550 - DNA, 20 bp, synthetic construct
  source 1..20: mol_type = other DNA
ctccctccatggatttgggt

SEQ ID NO: 217551 - DNA, 20 bp, synthetic construct
  source 1..20: mol_type = other DNA
gctccctccatggatttggg

SEQ ID NO: 217552 - DNA, 20 bp, synthetic construct
  source 1..20: mol_type = other DNA
agctccctccatggatttgg

SEQ ID NO: 217553 - DNA, 20 bp, synthetic construct
  source 1..20: mol_type = other DNA
cagctccctccatggatttg

SEQ ID NO: 217554 - DNA, 20 bp, synthetic construct
  source 1..20: mol_type = other DNA
tcagctccctccatggattt

SEQ ID NO: 217555 - DNA, 20 bp, synthetic construct
  source 1..20: mol_type = other DNA
ctcagctccctccatggatt

SEQ ID NO: 217556 - DNA, 20 bp, synthetic construct
  source 1..20: mol_type = other DNA
gctcagctccctccatggat

SEQ ID NO: 217557 - DNA, 20 bp, synthetic construct
  source 1..20: mol_type = other DNA
ggctcagctccctccatgga

SEQ ID NO: 217558 - DNA, 20 bp, synthetic construct
  source 1..20: mol_type = other DNA
cggctcagctccctccatgg

SEQ ID NO: 217559 - DNA, 20 bp, synthetic construct
  source 1..20: mol_type = other DNA
tcggctcagctccctccatg

SEQ ID NO: 217560 - DNA, 20 bp, synthetic construct
  source 1..20: mol_type = other DNA
ctcggctcagctccctccat

SEQ ID NO: 217561 - DNA, 20 bp, synthetic construct
  source 1..20: mol_type = other DNA
tctcggctcagctccctcca

SEQ ID NO: 217562 - DNA, 20 bp, synthetic construct
  source 1..20: mol_type = other DNA
ttctcggctcagctccctcc

SEQ ID NO: 217563 - DNA, 20 bp, synthetic construct
  source 1..20: mol_type = other DNA
gttctcggctcagctccctc

SEQ ID NO: 217564 - DNA, 20 bp, synthetic construct
  source 1..20: mol_type = other DNA
tgttctcggctcagctccct

SEQ ID NO: 217565 - DNA, 20 bp, synthetic construct
  source 1..20: mol_type = other DNA
ctgttctcggctcagctccc

SEQ ID NO: 217566 - DNA, 20 bp, synthetic construct
  source 1..20: mol_type = other DNA
cctgttctcggctcagctcc

SEQ ID NO: 217567 - DNA, 20 bp, synthetic construct
  source 1..20: mol_type = other DNA
acctgttctcggctcagctc

SEQ ID NO: 217568 - DNA, 20 bp, synthetic construct
  source 1..20: mol_type = other DNA
cacctgttctcggctcagct

SEQ ID NO: 217569 - DNA, 20 bp, synthetic construct
  source 1..20: mol_type = other DNA
acacctgttctcggctcagc

SEQ ID NO: 217570 - DNA, 20 bp, synthetic construct
  source 1..20: mol_type = other DNA
gacacctgttctcggctcag

SEQ ID NO: 217571 - DNA, 20 bp, synthetic construct
  source 1..20: mol_type = other DNA
ggacacctgttctcggctca

SEQ ID NO: 217572 - DNA, 20 bp, synthetic construct
  source 1..20: mol_type = other DNA
aggacacctgttctcggctc

SEQ ID NO: 217573 - DNA, 20 bp, synthetic construct
  source 1..20: mol_type = other DNA
aaggacacctgttctcggct

SEQ ID NO: 217574 - DNA, 20 bp, synthetic construct
  source 1..20: mol_type = other DNA
gaaggacacctgttctcggc

SEQ ID NO: 217575 - DNA, 20 bp, synthetic construct
  source 1..20: mol_type = other DNA
tgaaggacacctgttctcgg

SEQ ID NO: 217576 - DNA, 20 bp, synthetic construct
  source 1..20: mol_type = other DNA
ctgaaggacacctgttctcg

SEQ ID NO: 217577 - DNA, 20 bp, synthetic construct
  source 1..20: mol_type = other DNA
cctgaaggacacctgttctc

SEQ ID NO: 217578 - DNA, 20 bp, synthetic construct
  source 1..20: mol_type = other DNA
tcctgaaggacacctgttct

SEQ ID NO: 217579 - DNA, 20 bp, synthetic construct
  source 1..20: mol_type = other DNA
ttcctgaaggacacctgttc

SEQ ID NO: 217580 - DNA, 20 bp, synthetic construct
  source 1..20: mol_type = other DNA
cttcctgaaggacacctgtt

SEQ ID NO: 217581 - DNA, 20 bp, synthetic construct
  source 1..20: mol_type = other DNA
tcttcctgaaggacacctgt

SEQ ID NO: 217582 - DNA, 20 bp, synthetic construct
  source 1..20: mol_type = other DNA
gtcttcctgaaggacacctg

SEQ ID NO: 217583 - DNA, 20 bp, synthetic construct
  source 1..20: mol_type = other DNA
cgtcttcctgaaggacacct

SEQ ID NO: 217584 - DNA, 20 bp, synthetic construct
  source 1..20: mol_type = other DNA
acgtcttcctgaaggacacc

SEQ ID NO: 217585 - DNA, 20 bp, synthetic construct
  source 1..20: mol_type = other DNA
cacgtcttcctgaaggacac

SEQ ID NO: 217586 - DNA, 20 bp, synthetic construct
  source 1..20: mol_type = other DNA
tcacgtcttcctgaaggaca

SEQ ID NO: 217587 - DNA, 20 bp, synthetic construct
  source 1..20: mol_type = other DNA
ttcacgtcttcctgaaggac

SEQ ID NO: 217588 - DNA, 20 bp, synthetic construct
  source 1..20: mol_type = other DNA
cttcacgtcttcctgaagga

SEQ ID NO: 217589 - DNA, 20 bp, synthetic construct
  source 1..20: mol_type = other DNA
gcttcacgtcttcctgaagg

SEQ ID NO: 217590 - DNA, 20 bp, synthetic construct
  source 1..20: mol_type = other DNA
ggcttcacgtcttcctgaag

SEQ ID NO: 217591 - DNA, 20 bp, synthetic construct
  source 1..20: mol_type = other DNA
tggcttcacgtcttcctgaa

SEQ ID NO: 217592 - DNA, 20 bp, synthetic construct
  source 1..20: mol_type = other DNA
ttggcttcacgtcttcctga

SEQ ID NO: 217593 - DNA, 20 bp, synthetic construct
  source 1..20: mol_type = other DNA
tttggcttcacgtcttcctg

SEQ ID NO: 217594 - DNA, 20 bp, synthetic construct
  source 1..20: mol_type = other DNA
ctttggcttcacgtcttcct

SEQ ID NO: 217595 - DNA, 20 bp, synthetic construct
  source 1..20: mol_type = other DNA
gctttggcttcacgtcttcc

SEQ ID NO: 217596 - DNA, 20 bp, synthetic construct
  source 1..20: mol_type = other DNA
ggctttggcttcacgtcttc

SEQ ID NO: 217597 - DNA, 20 bp, synthetic construct
  source 1..20: mol_type = other DNA
aggctttggcttcacgtctt

SEQ ID NO: 217598 - DNA, 20 bp, synthetic construct
  source 1..20: mol_type = other DNA
gaggctttggcttcacgtct

SEQ ID NO: 217599 - DNA, 20 bp, synthetic construct
  source 1..20: mol_type = other DNA
ggaggctttggcttcacgtc

SEQ ID NO: 217600 - DNA, 20 bp, synthetic construct
  source 1..20: mol_type = other DNA
tggaggctttggcttcacgt

SEQ ID NO: 217601 - DNA, 20 bp, synthetic construct
  source 1..20: mol_type = other DNA
gtggaggctttggcttcacg

SEQ ID NO: 217602 - DNA, 20 bp, synthetic construct
  source 1..20: mol_type = other DNA
ggtggaggctttggcttcac

SEQ ID NO: 217603 - DNA, 20 bp, synthetic construct
  source 1..20: mol_type = other DNA
aggtggaggctttggcttca

SEQ ID NO: 217604 - DNA, 20 bp, synthetic construct
  source 1..20: mol_type = other DNA
gaggtggaggctttggcttc

SEQ ID NO: 217605 - DNA, 20 bp, synthetic construct
  source 1..20: mol_type = other DNA
ggaggtggaggctttggctt

SEQ ID NO: 217606 - DNA, 20 bp, synthetic construct
  source 1..20: mol_type = other DNA
tggaggtggaggctttggct

SEQ ID NO: 217607 - DNA, 20 bp, synthetic construct
  source 1..20: mol_type = other DNA
ttggaggtggaggctttggc

SEQ ID NO: 217608 - DNA, 20 bp, synthetic construct
  source 1..20: mol_type = other DNA
tttggaggtggaggctttgg

SEQ ID NO: 217609 - DNA, 20 bp, synthetic construct
  source 1..20: mol_type = other DNA
gtttggaggtggaggctttg

SEQ ID NO: 217610 - DNA, 20 bp, synthetic construct
  source 1..20: mol_type = other DNA
agtttggaggtggaggcttt

SEQ ID NO: 217611 - DNA, 20 bp, synthetic construct
  source 1..20: mol_type = other DNA
gagtttggaggtggaggctt

SEQ ID NO: 217612 - DNA, 20 bp, synthetic construct
  source 1..20: mol_type = other DNA
tgagtttggaggtggaggct

SEQ ID NO: 217613 - DNA, 20 bp, synthetic construct
  source 1..20: mol_type = other DNA
ctgagtttggaggtggaggc

SEQ ID NO: 217614 - DNA, 20 bp, synthetic construct
  source 1..20: mol_type = other DNA
cctgagtttggaggtggagg

SEQ ID NO: 217615 - DNA, 20 bp, synthetic construct
  source 1..20: mol_type = other DNA
ccctgagtttggaggtggag

SEQ ID NO: 217616 - DNA, 20 bp, synthetic construct
  source 1..20: mol_type = other DNA
cccctgagtttggaggtgga

SEQ ID NO: 217617 - DNA, 20 bp, synthetic construct
  source 1..20: mol_type = other DNA
gcccctgagtttggaggtgg

SEQ ID NO: 217618 - DNA, 20 bp, synthetic construct
  source 1..20: mol_type = other DNA
ggcccctgagtttggaggtg

SEQ ID NO: 217619 - DNA, 20 bp, synthetic construct
  source 1..20: mol_type = other DNA
gggcccctgagtttggaggt

SEQ ID NO: 217620 - DNA, 20 bp, synthetic construct
  source 1..20: mol_type = other DNA
tgggcccctgagtttggagg

SEQ ID NO: 217621 - DNA, 20 bp, synthetic construct
  source 1..20: mol_type = other DNA
ctgggcccctgagtttggag

SEQ ID NO: 217622 - DNA, 20 bp, synthetic construct
  source 1..20: mol_type = other DNA
cctgggcccctgagtttgga

SEQ ID NO: 217623 - DNA, 20 bp, synthetic construct
  source 1..20: mol_type = other DNA
ccctgggcccctgagtttgg

SEQ ID NO: 217624 - DNA, 20 bp, synthetic construct
  source 1..20: mol_type = other DNA
tccctgggcccctgagtttg

SEQ ID NO: 217625 - DNA, 20 bp, synthetic construct
  source 1..20: mol_type = other DNA
ctccctgggcccctgagttt

SEQ ID NO: 217626 - DNA, 20 bp, synthetic construct
  source 1..20: mol_type = other DNA
actccctgggcccctgagtt

SEQ ID NO: 217627 - DNA, 20 bp, synthetic construct
  source 1..20: mol_type = other DNA
gactccctgggcccctgagt

SEQ ID NO: 217628 - DNA, 20 bp, synthetic construct
  source 1..20: mol_type = other DNA
ggactccctgggcccctgag

SEQ ID NO: 217629 - DNA, 20 bp, synthetic construct
  source 1..20: mol_type = other DNA
tggactccctgggcccctga

SEQ ID NO: 217630 - DNA, 20 bp, synthetic construct
  source 1..20: mol_type = other DNA
ctggactccctgggcccctg

SEQ ID NO: 217631 - DNA, 20 bp, synthetic construct
  source 1..20: mol_type = other DNA
cctggactccctgggcccct

SEQ ID NO: 217632 - DNA, 20 bp, synthetic construct
  source 1..20: mol_type = other DNA
gcctggactccctgggcccc

SEQ ID NO: 217633 - DNA, 20 bp, synthetic construct
  source 1..20: mol_type = other DNA
tgcctggactccctgggccc

SEQ ID NO: 217634 - DNA, 20 bp, synthetic construct
  source 1..20: mol_type = other DNA
gtgcctggactccctgggcc

SEQ ID NO: 217635 - DNA, 20 bp, synthetic construct
  source 1..20: mol_type = other DNA
ggtgcctggactccctgggc

SEQ ID NO: 217636 - DNA, 20 bp, synthetic construct
  source 1..20: mol_type = other DNA
gggtgcctggactccctggg

SEQ ID NO: 217637 - DNA, 20 bp, synthetic construct
  source 1..20: mol_type = other DNA
tgggtgcctggactccctgg

SEQ ID NO: 217638 - DNA, 20 bp, synthetic construct
  source 1..20: mol_type = other DNA
atgggtgcctggactccctg

SEQ ID NO: 217639 - DNA, 20 bp, synthetic construct
  source 1..20: mol_type = other DNA
gatgggtgcctggactccct

SEQ ID NO: 217640 - DNA, 20 bp, synthetic construct
  source 1..20: mol_type = other DNA
ggatgggtgcctggactccc

SEQ ID NO: 217641 - DNA, 20 bp, synthetic construct
  source 1..20: mol_type = other DNA
tggatgggtgcctggactcc

SEQ ID NO: 217642 - DNA, 20 bp, synthetic construct
  source 1..20: mol_type = other DNA
gtggatgggtgcctggactc

SEQ ID NO: 217643 - DNA, 20 bp, synthetic construct
  source 1..20: mol_type = other DNA
agtggatgggtgcctggact

SEQ ID NO: 217644 - DNA, 20 bp, synthetic construct
  source 1..20: mol_type = other DNA
gagtggatgggtgcctggac

SEQ ID NO: 217645 - DNA, 20 bp, synthetic construct
  source 1..20: mol_type = other DNA
tgagtggatgggtgcctgga

SEQ ID NO: 217646 - DNA, 20 bp, synthetic construct
  source 1..20: mol_type = other DNA
gtgagtggatgggtgcctgg

SEQ ID NO: 217647 - DNA, 20 bp, synthetic construct
  source 1..20: mol_type = other DNA
tgtgagtggatgggtgcctg

SEQ ID NO: 217648 - DNA, 20 bp, synthetic construct
  source 1..20: mol_type = other DNA
ttgtgagtggatgggtgcct

SEQ ID NO: 217649 - DNA, 20 bp, synthetic construct
  source 1..20: mol_type = other DNA
cttgtgagtggatgggtgcc

SEQ ID NO: 217650 - DNA, 20 bp, synthetic construct
  source 1..20: mol_type = other DNA
ccttgtgagtggatgggtgc

SEQ ID NO: 217651 - DNA, 20 bp, synthetic construct
  source 1..20: mol_type = other DNA
gccttgtgagtggatgggtg

SEQ ID NO: 217652 - DNA, 20 bp, synthetic construct
  source 1..20: mol_type = other DNA
agccttgtgagtggatgggt

SEQ ID NO: 217653 - DNA, 20 bp, synthetic construct
  source 1..20: mol_type = other DNA
cagccttgtgagtggatggg

SEQ ID NO: 217654 - DNA, 20 bp, synthetic construct
  source 1..20: mol_type = other DNA
ccagccttgtgagtggatgg

SEQ ID NO: 217655 - DNA, 20 bp, synthetic construct
  source 1..20: mol_type = other DNA
tccagccttgtgagtggatg

SEQ ID NO: 217656 - DNA, 20 bp, synthetic construct
  source 1..20: mol_type = other DNA
atccagccttgtgagtggat

SEQ ID NO: 217657 - DNA, 20 bp, synthetic construct
  source 1..20: mol_type = other DNA
tatccagccttgtgagtgga

SEQ ID NO: 217658 - DNA, 20 bp, synthetic construct
  source 1..20: mol_type = other DNA
atatccagccttgtgagtgg

SEQ ID NO: 217659 - DNA, 20 bp, synthetic construct
  source 1..20: mol_type = other DNA
catatccagccttgtgagtg

SEQ ID NO: 217660 - DNA, 20 bp, synthetic construct
  source 1..20: mol_type = other DNA
ccatatccagccttgtgagt

SEQ ID NO: 217661 - DNA, 20 bp, synthetic construct
  source 1..20: mol_type = other DNA
accatatccagccttgtgag

SEQ ID NO: 217662 - DNA, 20 bp, synthetic construct
  source 1..20: mol_type = other DNA
caccatatccagccttgtga

SEQ ID NO: 217663 - DNA, 20 bp, synthetic construct
  source 1..20: mol_type = other DNA
gcaccatatccagccttgtg

SEQ ID NO: 217664 - DNA, 20 bp, synthetic construct
  source 1..20: mol_type = other DNA
tgcaccatatccagccttgt

SEQ ID NO: 217665 - DNA, 20 bp, synthetic construct
  source 1..20: mol_type = other DNA
atgcaccatatccagccttg

SEQ ID NO: 217666 - DNA, 20 bp, synthetic construct
  source 1..20: mol_type = other DNA
aatgcaccatatccagcctt

SEQ ID NO: 217667 - DNA, 20 bp, synthetic construct
  source 1..20: mol_type = other DNA
gaatgcaccatatccagcct

SEQ ID NO: 217668 - DNA, 20 bp, synthetic construct
  source 1..20: mol_type = other DNA
ggaatgcaccatatccagcc

SEQ ID NO: 217669 - DNA, 20 bp, synthetic construct
  source 1..20: mol_type = other DNA
tggaatgcaccatatccagc

SEQ ID NO: 217670 - DNA, 20 bp, synthetic construct
  source 1..20: mol_type = other DNA
ctggaatgcaccatatccag

SEQ ID NO: 217671 - DNA, 20 bp, synthetic construct
  source 1..20: mol_type = other DNA
cctggaatgcaccatatcca

SEQ ID NO: 217672 - DNA, 20 bp, synthetic construct
  source 1..20: mol_type = other DNA
tcctggaatgcaccatatcc

SEQ ID NO: 217673 - DNA, 20 bp, synthetic construct
  source 1..20: mol_type = other DNA
ctcctggaatgcaccatatc

SEQ ID NO: 217674 - DNA, 20 bp, synthetic construct
  source 1..20: mol_type = other DNA
tctcctggaatgcaccatat

SEQ ID NO: 217675 - DNA, 20 bp, synthetic construct
  source 1..20: mol_type = other DNA
ctctcctggaatgcaccata

SEQ ID NO: 217676 - DNA, 20 bp, synthetic construct
  source 1..20: mol_type = other DNA
cctctcctggaatgcaccat

SEQ ID NO: 217677 - DNA, 20 bp, synthetic construct
  source 1..20: mol_type = other DNA
ccctctcctggaatgcacca

SEQ ID NO: 217678 - DNA, 20 bp, synthetic construct
  source 1..20: mol_type = other DNA
cccctctcctggaatgcacc

SEQ ID NO: 217679 - DNA, 20 bp, synthetic construct
  source 1..20: mol_type = other DNA
acccctctcctggaatgcac

SEQ ID NO: 217680 - DNA, 20 bp, synthetic construct
  source 1..20: mol_type = other DNA
aacccctctcctggaatgca

SEQ ID NO: 217681 - DNA, 20 bp, synthetic construct
  source 1..20: mol_type = other DNA
caacccctctcctggaatgc

SEQ ID NO: 217682 - DNA, 20 bp, synthetic construct
  source 1..20: mol_type = other DNA
ccaacccctctcctggaatg

SEQ ID NO: 217683 - DNA, 20 bp, synthetic construct
  source 1..20: mol_type = other DNA
cccaacccctctcctggaat

SEQ ID NO: 217684 - DNA, 20 bp, synthetic construct
  source 1..20: mol_type = other DNA
ccccaacccctctcctggaa

SEQ ID NO: 217685 - DNA, 20 bp, synthetic construct
  source 1..20: mol_type = other DNA
cccccaacccctctcctgga

SEQ ID NO: 217686 - DNA, 20 bp, synthetic construct
  source 1..20: mol_type = other DNA
gcccccaacccctctcctgg

SEQ ID NO: 217687 - DNA, 20 bp, synthetic construct
  source 1..20: mol_type = other DNA
cgcccccaacccctctcctg

SEQ ID NO: 217688 - DNA, 20 bp, synthetic construct
  source 1..20: mol_type = other DNA
tcgcccccaacccctctcct

SEQ ID NO: 217689 - DNA, 20 bp, synthetic construct
  source 1..20: mol_type = other DNA
ctcgcccccaacccctctcc

SEQ ID NO: 217690 - DNA, 20 bp, synthetic construct
  source 1..20: mol_type = other DNA
actcgcccccaacccctctc

SEQ ID NO: 217691 - DNA, 20 bp, synthetic construct
  source 1..20: mol_type = other DNA
cactcgcccccaacccctct

SEQ ID NO: 217692 - DNA, 20 bp, synthetic construct
  source 1..20: mol_type = other DNA
ccactcgcccccaacccctc

SEQ ID NO: 217693 - DNA, 20 bp, synthetic construct
  source 1..20: mol_type = other DNA
gccactcgcccccaacccct

SEQ ID NO: 217694 - DNA, 20 bp, synthetic construct
  source 1..20: mol_type = other DNA
ggccactcgcccccaacccc

SEQ ID NO: 217695 - DNA, 20 bp, synthetic construct
  source 1..20: mol_type = other DNA
aggccactcgcccccaaccc

SEQ ID NO: 217696 - DNA, 20 bp, synthetic construct
  source 1..20: mol_type = other DNA
gaggccactcgcccccaacc

SEQ ID NO: 217697 - DNA, 20 bp, synthetic construct
  source 1..20: mol_type = other DNA
agaggccactcgcccccaac

SEQ ID NO: 217698 - DNA, 20 bp, synthetic construct
  source 1..20: mol_type = other DNA
gagaggccactcgcccccaa

SEQ ID NO: 217699 - DNA, 20 bp, synthetic construct
  source 1..20: mol_type = other DNA
agagaggccactcgccccca

SEQ ID NO: 217700 - DNA, 20 bp, synthetic construct
  source 1..20: mol_type = other DNA
cagagaggccactcgccccc

SEQ ID NO: 217701 - DNA, 20 bp, synthetic construct
  source 1..20: mol_type = other DNA
acagagaggccactcgcccc

SEQ ID NO: 217702 - DNA, 20 bp, synthetic construct
  source 1..20: mol_type = other DNA
cacagagaggccactcgccc

SEQ ID NO: 217703 - DNA, 20 bp, synthetic construct
  source 1..20: mol_type = other DNA
acacagagaggccactcgcc

SEQ ID NO: 217704 - DNA, 20 bp, synthetic construct
  source 1..20: mol_type = other DNA
tacacagagaggccactcgc

SEQ ID NO: 217705 - DNA, 20 bp, synthetic construct
  source 1..20: mol_type = other DNA
gtacacagagaggccactcg

SEQ ID NO: 217706 - DNA, 20 bp, synthetic construct
  source 1..20: mol_type = other DNA
ggtacacagagaggccactc

SEQ ID NO: 217707 - DNA, 20 bp, synthetic construct
  source 1..20: mol_type = other DNA
gggtacacagagaggccact

SEQ ID NO: 217708 - DNA, 20 bp, synthetic construct
  source 1..20: mol_type = other DNA
cgggtacacagagaggccac

SEQ ID NO: 217709 - DNA, 20 bp, synthetic construct
  source 1..20: mol_type = other DNA
acgggtacacagagaggcca

SEQ ID NO: 217710 - DNA, 20 bp, synthetic construct
  source 1..20: mol_type = other DNA
cacgggtacacagagaggcc

SEQ ID NO: 217711 - DNA, 20 bp, synthetic construct
  source 1..20: mol_type = other DNA
ccacgggtacacagagaggc

SEQ ID NO: 217712 - DNA, 20 bp, synthetic construct
  source 1..20: mol_type = other DNA
cccacgggtacacagagagg

SEQ ID NO: 217713 - DNA, 20 bp, synthetic construct
  source 1..20: mol_type = other DNA
ccccacgggtacacagagag

SEQ ID NO: 217714 - DNA, 20 bp, synthetic construct
  source 1..20: mol_type = other DNA
tccccacgggtacacagaga

SEQ ID NO: 217715 - DNA, 20 bp, synthetic construct
  source 1..20: mol_type = other DNA
atccccacgggtacacagag

SEQ ID NO: 217716 - DNA, 20 bp, synthetic construct
  source 1..20: mol_type = other DNA
tatccccacgggtacacaga

SEQ ID NO: 217717 - DNA, 20 bp, synthetic construct
  source 1..20: mol_type = other DNA
ctatccccacgggtacacag

SEQ ID NO: 217718 - DNA, 20 bp, synthetic construct
  source 1..20: mol_type = other DNA
tctatccccacgggtacaca

SEQ ID NO: 217719 - DNA, 20 bp, synthetic construct
  source 1..20: mol_type = other DNA
atctatccccacgggtacac

SEQ ID NO: 217720 - DNA, 20 bp, synthetic construct
  source 1..20: mol_type = other DNA
catctatccccacgggtaca

SEQ ID NO: 217721 - DNA, 20 bp, synthetic construct
  source 1..20: mol_type = other DNA
gcatctatccccacgggtac

SEQ ID NO: 217722 - DNA, 20 bp, synthetic construct
  source 1..20: mol_type = other DNA
cgcatctatccccacgggta

SEQ ID NO: 217723 - DNA, 20 bp, synthetic construct
  source 1..20: mol_type = other DNA
gcgcatctatccccacgggt

SEQ ID NO: 217724 - DNA, 20 bp, synthetic construct
  source 1..20: mol_type = other DNA
tgcgcatctatccccacggg

SEQ ID NO: 217725 - DNA, 20 bp, synthetic construct
  source 1..20: mol_type = other DNA
ttgcgcatctatccccacgg

SEQ ID NO: 217726 - DNA, 20 bp, synthetic construct
  source 1..20: mol_type = other DNA
cttgcgcatctatccccacg

SEQ ID NO: 217727 - DNA, 20 bp, synthetic construct
  source 1..20: mol_type = other DNA
acttgcgcatctatccccac

SEQ ID NO: 217728 - DNA, 20 bp, synthetic construct
  source 1..20: mol_type = other DNA
cacttgcgcatctatcccca

SEQ ID NO: 217729 - DNA, 20 bp, synthetic construct
  source 1..20: mol_type = other DNA
ccacttgcgcatctatcccc

SEQ ID NO: 217730 - DNA, 20 bp, synthetic construct
  source 1..20: mol_type = other DNA
gccacttgcgcatctatccc

SEQ ID NO: 217731 - DNA, 20 bp, synthetic construct
  source 1..20: mol_type = other DNA
tgccacttgcgcatctatcc

SEQ ID NO: 217732 - DNA, 20 bp, synthetic construct
  source 1..20: mol_type = other DNA
atgccacttgcgcatctatc

SEQ ID NO: 217733 - DNA, 20 bp, synthetic construct
  source 1..20: mol_type = other DNA
gatgccacttgcgcatctat

SEQ ID NO: 217734 - DNA, 20 bp, synthetic construct
  source 1..20: mol_type = other DNA
cgatgccacttgcgcatcta

SEQ ID NO: 217735 - DNA, 20 bp, synthetic construct
  source 1..20: mol_type = other DNA
gcgatgccacttgcgcatct

SEQ ID NO: 217736 - DNA, 20 bp, synthetic construct
  source 1..20: mol_type = other DNA
ggcgatgccacttgcgcatc

SEQ ID NO: 217737 - DNA, 20 bp, synthetic construct
  source 1..20: mol_type = other DNA
tggcgatgccacttgcgcat

SEQ ID NO: 217738 - DNA, 20 bp, synthetic construct
  source 1..20: mol_type = other DNA
gtggcgatgccacttgcgca

SEQ ID NO: 217739 - DNA, 20 bp, synthetic construct
  source 1..20: mol_type = other DNA
tgtggcgatgccacttgcgc

SEQ ID NO: 217740 - DNA, 20 bp, synthetic construct
  source 1..20: mol_type = other DNA
atgtggcgatgccacttgcg

SEQ ID NO: 217741 - DNA, 20 bp, synthetic construct
  source 1..20: mol_type = other DNA
gatgtggcgatgccacttgc

SEQ ID NO: 217742 - DNA, 20 bp, synthetic construct
  source 1..20: mol_type = other DNA
cgatgtggcgatgccacttg

SEQ ID NO: 217743 - DNA, 20 bp, synthetic construct
  source 1..20: mol_type = other DNA
acgatgtggcgatgccactt

SEQ ID NO: 217744 - DNA, 20 bp, synthetic construct
  source 1..20: mol_type = other DNA
cacgatgtggcgatgccact

SEQ ID NO: 217745 - DNA, 20 bp, synthetic construct
  source 1..20: mol_type = other DNA
tcacgatgtggcgatgccac

SEQ ID NO: 217746 - DNA, 20 bp, synthetic construct
  source 1..20: mol_type = other DNA
ctcacgatgtggcgatgcca

SEQ ID NO: 217747 - DNA, 20 bp, synthetic construct
  source 1..20: mol_type = other DNA
actcacgatgtggcgatgcc

SEQ ID NO: 217748 - DNA, 20 bp, synthetic construct
  source 1..20: mol_type = other DNA
gactcacgatgtggcgatgc

SEQ ID NO: 217749 - DNA, 20 bp, synthetic construct
  source 1..20: mol_type = other DNA
ggactcacgatgtggcgatg

SEQ ID NO: 217750 - DNA, 20 bp, synthetic construct
  source 1..20: mol_type = other DNA
aggactcacgatgtggcgat

SEQ ID NO: 217751 - DNA, 20 bp, synthetic construct
  source 1..20: mol_type = other DNA
caggactcacgatgtggcga

SEQ ID NO: 217752 - DNA, 20 bp, synthetic construct
  source 1..20: mol_type = other DNA
ccaggactcacgatgtggcg

SEQ ID NO: 217753 - DNA, 20 bp, synthetic construct
  source 1..20: mol_type = other DNA
gccaggactcacgatgtggc

SEQ ID NO: 217754 - DNA, 20 bp, synthetic construct
  source 1..20: mol_type = other DNA
agccaggactcacgatgtgg

SEQ ID NO: 217755 - DNA, 20 bp, synthetic construct
  source 1..20: mol_type = other DNA
aagccaggactcacgatgtg

SEQ ID NO: 217756 - DNA, 20 bp, synthetic construct
  source 1..20: mol_type = other DNA
gaagccaggactcacgatgt

SEQ ID NO: 217757 - DNA, 20 bp, synthetic construct
  source 1..20: mol_type = other DNA
tgaagccaggactcacgatg

SEQ ID NO: 217758 - DNA, 20 bp, synthetic construct
  source 1..20: mol_type = other DNA
atgaagccaggactcacgat

SEQ ID NO: 217759 - DNA, 20 bp, synthetic construct
  source 1..20: mol_type = other DNA
catgaagccaggactcacga

SEQ ID NO: 217760 - DNA, 20 bp, synthetic construct
  source 1..20: mol_type = other DNA
ccatgaagccaggactcacg

SEQ ID NO: 217761 - DNA, 20 bp, synthetic construct
  source 1..20: mol_type = other DNA
cccatgaagccaggactcac

SEQ ID NO: 217762 - DNA, 20 bp, synthetic construct
  source 1..20: mol_type = other DNA
acccatgaagccaggactca

SEQ ID NO: 217763 - DNA, 20 bp, synthetic construct
  source 1..20: mol_type = other DNA
cacccatgaagccaggactc

SEQ ID NO: 217764 - DNA, 20 bp, synthetic construct
  source 1..20: mol_type = other DNA
tcacccatgaagccaggact

SEQ ID NO: 217765 - DNA, 20 bp, synthetic construct
  source 1..20: mol_type = other DNA
ctcacccatgaagccaggac

SEQ ID NO: 217766 - DNA, 20 bp, synthetic construct
  source 1..20: mol_type = other DNA
gctcacccatgaagccagga

SEQ ID NO: 217767 - DNA, 20 bp, synthetic construct
  source 1..20: mol_type = other DNA
agctcacccatgaagccagg

SEQ ID NO: 217768 - DNA, 20 bp, synthetic construct
  source 1..20: mol_type = other DNA
gagctcacccatgaagccag

SEQ ID NO: 217769 - DNA, 20 bp, synthetic construct
  source 1..20: mol_type = other DNA
ggagctcacccatgaagcca

SEQ ID NO: 217770 - DNA, 20 bp, synthetic construct
  source 1..20: mol_type = other DNA
tggagctcacccatgaagcc

SEQ ID NO: 217771 - DNA, 20 bp, synthetic construct
  source 1..20: mol_type = other DNA
ctggagctcacccatgaagc

SEQ ID NO: 217772 - DNA, 20 bp, synthetic construct
  source 1..20: mol_type = other DNA
cctggagctcacccatgaag

SEQ ID NO: 217773 - DNA, 20 bp, synthetic construct
  source 1..20: mol_type = other DNA
acctggagctcacccatgaa

SEQ ID NO: 217774 - DNA, 20 bp, synthetic construct
  source 1..20: mol_type = other DNA
gacctggagctcacccatga

SEQ ID NO: 217775 - DNA, 20 bp, synthetic construct
  source 1..20: mol_type = other DNA
ggacctggagctcacccatg

SEQ ID NO: 217776 - DNA, 20 bp, synthetic construct
  source 1..20: mol_type = other DNA
tggacctggagctcacccat

SEQ ID NO: 217777 - DNA, 20 bp, synthetic construct
  source 1..20: mol_type = other DNA
ttggacctggagctcaccca

SEQ ID NO: 217778 - DNA, 20 bp, synthetic construct
  source 1..20: mol_type = other DNA
gttggacctggagctcaccc

SEQ ID NO: 217779 - DNA, 20 bp, synthetic construct
  source 1..20: mol_type = other DNA
cgttggacctggagctcacc

SEQ ID NO: 217780 - DNA, 20 bp, synthetic construct
  source 1..20: mol_type = other DNA
tcgttggacctggagctcac

SEQ ID NO: 217781 - DNA, 20 bp, synthetic construct
  source 1..20: mol_type = other DNA
ctcgttggacctggagctca

SEQ ID NO: 217782 - DNA, 20 bp, synthetic construct
  source 1..20: mol_type = other DNA
tctcgttggacctggagctc

SEQ ID NO: 217783 - DNA, 20 bp, synthetic construct
  source 1..20: mol_type = other DNA
ttctcgttggacctggagct

SEQ ID NO: 217784 - DNA, 20 bp, synthetic construct
  source 1..20: mol_type = other DNA
cttctcgttggacctggagc

SEQ ID NO: 217785 - DNA, 20 bp, synthetic construct
  source 1..20: mol_type = other DNA
gcttctcgttggacctggag

SEQ ID NO: 217786 - DNA, 20 bp, synthetic construct
  source 1..20: mol_type = other DNA
ggcttctcgttggacctgga

SEQ ID NO: 217787 - DNA, 20 bp, synthetic construct
  source 1..20: mol_type = other DNA
tggcttctcgttggacctgg

SEQ ID NO: 217788 - DNA, 20 bp, synthetic construct
  source 1..20: mol_type = other DNA
ttggcttctcgttggacctg

SEQ ID NO: 217789 - DNA, 20 bp, synthetic construct
  source 1..20: mol_type = other DNA
cttggcttctcgttggacct

SEQ ID NO: 217790 - DNA, 20 bp, synthetic construct
  source 1..20: mol_type = other DNA
gcttggcttctcgttggacc

SEQ ID NO: 217791 - DNA, 20 bp, synthetic construct
  source 1..20: mol_type = other DNA
tgcttggcttctcgttggac

SEQ ID NO: 217792 - DNA, 20 bp, synthetic construct
  source 1..20: mol_type = other DNA
ctgcttggcttctcgttgga

SEQ ID NO: 217793 - DNA, 20 bp, synthetic construct
  source 1..20: mol_type = other DNA
cctgcttggcttctcgttgg

SEQ ID NO: 217794 - DNA, 20 bp, synthetic construct
  source 1..20: mol_type = other DNA
ccctgcttggcttctcgttg

SEQ ID NO: 217795 - DNA, 20 bp, synthetic construct
  source 1..20: mol_type = other DNA
cccctgcttggcttctcgtt

SEQ ID NO: 217796 - DNA, 20 bp, synthetic construct
  source 1..20: mol_type = other DNA
ccccctgcttggcttctcgt

SEQ ID NO: 217797 - DNA, 20 bp, synthetic construct
  source 1..20: mol_type = other DNA
gccccctgcttggcttctcg

SEQ ID NO: 217798 - DNA, 20 bp, synthetic construct
  source 1..20: mol_type = other DNA
ggccccctgcttggcttctc

SEQ ID NO: 217799 - DNA, 20 bp, synthetic construct
  source 1..20: mol_type = other DNA
gggccccctgcttggcttct

SEQ ID NO: 217800 - DNA, 20 bp, synthetic construct
  source 1..20: mol_type = other DNA
agggccccctgcttggcttc

SEQ ID NO: 217801 - DNA, 20 bp, synthetic construct
  source 1..20: mol_type = other DNA
aagggccccctgcttggctt

SEQ ID NO: 217802 - DNA, 20 bp, synthetic construct
  source 1..20: mol_type = other DNA
gaagggccccctgcttggct

SEQ ID NO: 217803 - DNA, 20 bp, synthetic construct
  source 1..20: mol_type = other DNA
tgaagggccccctgcttggc

SEQ ID NO: 217804 - DNA, 20 bp, synthetic construct
  source 1..20: mol_type = other DNA
ttgaagggccccctgcttgg

SEQ ID NO: 217805 - DNA, 20 bp, synthetic construct
  source 1..20: mol_type = other DNA
cttgaagggccccctgcttg

SEQ ID NO: 217806 - DNA, 20 bp, synthetic construct
  source 1..20: mol_type = other DNA
gcttgaagggccccctgctt

SEQ ID NO: 217807 - DNA, 20 bp, synthetic construct
  source 1..20: mol_type = other DNA
agcttgaagggccccctgct

SEQ ID NO: 217808 - DNA, 20 bp, synthetic construct
  source 1..20: mol_type = other DNA
gagcttgaagggccccctgc

SEQ ID NO: 217809 - DNA, 20 bp, synthetic construct
  source 1..20: mol_type = other DNA
tgagcttgaagggccccctg

SEQ ID NO: 217810 - DNA, 20 bp, synthetic construct
  source 1..20: mol_type = other DNA
ctgagcttgaagggccccct

SEQ ID NO: 217811 - DNA, 20 bp, synthetic construct
  source 1..20: mol_type = other DNA
gctgagcttgaagggccccc

SEQ ID NO: 217812 - DNA, 20 bp, synthetic construct
  source 1..20: mol_type = other DNA
agctgagcttgaagggcccc

SEQ ID NO: 217813 - DNA, 20 bp, synthetic construct
  source 1..20: mol_type = other DNA
aagctgagcttgaagggccc

SEQ ID NO: 217814 - DNA, 20 bp, synthetic construct
  source 1..20: mol_type = other DNA
aaagctgagcttgaagggcc

SEQ ID NO: 217815 - DNA, 20 bp, synthetic construct
  source 1..20: mol_type = other DNA
caaagctgagcttgaagggc

SEQ ID NO: 217816 - DNA, 20 bp, synthetic construct
  source 1..20: mol_type = other DNA
ccaaagctgagcttgaaggg

SEQ ID NO: 217817 - DNA, 20 bp, synthetic construct
  source 1..20: mol_type = other DNA
cccaaagctgagcttgaagg

SEQ ID NO: 217818 - DNA, 20 bp, synthetic construct
  source 1..20: mol_type = other DNA
gcccaaagctgagcttgaag

SEQ ID NO: 217819 - DNA, 20 bp, synthetic construct
  source 1..20: mol_type = other DNA
ggcccaaagctgagcttgaa

SEQ ID NO: 217820 - DNA, 20 bp, synthetic construct
  source 1..20: mol_type = other DNA
gggcccaaagctgagcttga

SEQ ID NO: 217821 - DNA, 20 bp, synthetic construct
  source 1..20: mol_type = other DNA
cgggcccaaagctgagcttg

SEQ ID NO: 217822 - DNA, 20 bp, synthetic construct
  source 1..20: mol_type = other DNA
ccgggcccaaagctgagctt

SEQ ID NO: 217823 - DNA, 20 bp, synthetic construct
  source 1..20: mol_type = other DNA
cccgggcccaaagctgagct

SEQ ID NO: 217824 - DNA, 20 bp, synthetic construct
  source 1..20: mol_type = other DNA
acccgggcccaaagctgagc

SEQ ID NO: 217825 - DNA, 20 bp, synthetic construct
  source 1..20: mol_type = other DNA
gacccgggcccaaagctgag

SEQ ID NO: 217826 - DNA, 20 bp, synthetic construct
  source 1..20: mol_type = other DNA
cgacccgggcccaaagctga

SEQ ID NO: 217827 - DNA, 20 bp, synthetic construct
  source 1..20: mol_type = other DNA
ccgacccgggcccaaagctg

SEQ ID NO: 217828 - DNA, 20 bp, synthetic construct
  source 1..20: mol_type = other DNA
cccgacccgggcccaaagct

SEQ ID NO: 217829 - DNA, 20 bp, synthetic construct
  source 1..20: mol_type = other DNA
ccccgacccgggcccaaagc

SEQ ID NO: 217830 - DNA, 20 bp, synthetic construct
  source 1..20: mol_type = other DNA
accccgacccgggcccaaag

SEQ ID NO: 217831 - DNA, 20 bp, synthetic construct
  source 1..20: mol_type = other DNA
taccccgacccgggcccaaa

SEQ ID NO: 217832 - DNA, 20 bp, synthetic construct
  source 1..20: mol_type = other DNA
gtaccccgacccgggcccaa

SEQ ID NO: 217833 - DNA, 20 bp, synthetic construct
  source 1..20: mol_type = other DNA
tgtaccccgacccgggccca

SEQ ID NO: 217834 - DNA, 20 bp, synthetic construct
  source 1..20: mol_type = other DNA
ctgtaccccgacccgggccc

SEQ ID NO: 217835 - DNA, 20 bp, synthetic construct
  source 1..20: mol_type = other DNA
cctgtaccccgacccgggcc

SEQ ID NO: 217836 - DNA, 20 bp, synthetic construct
  source 1..20: mol_type = other DNA
ccctgtaccccgacccgggc

SEQ ID NO: 217837 - DNA, 20 bp, synthetic construct
  source 1..20: mol_type = other DNA
accctgtaccccgacccggg

SEQ ID NO: 217838 - DNA, 20 bp, synthetic construct
  source 1..20: mol_type = other DNA
taccctgtaccccgacccgg

SEQ ID NO: 217839 - DNA, 20 bp, synthetic construct
  source 1..20: mol_type = other DNA
ctaccctgtaccccgacccg

SEQ ID NO: 217840 - DNA, 20 bp, synthetic construct
  source 1..20: mol_type = other DNA
tctaccctgtaccccgaccc

SEQ ID NO: 217841 - DNA, 20 bp, synthetic construct
  source 1..20: mol_type = other DNA
ctctaccctgtaccccgacc

SEQ ID NO: 217842 - DNA, 20 bp, synthetic construct
  source 1..20: mol_type = other DNA
gctctaccctgtaccccgac

SEQ ID NO: 217843 - DNA, 20 bp, synthetic construct
  source 1..20: mol_type = other DNA
cgctctaccctgtaccccga

SEQ ID NO: 217844 - DNA, 20 bp, synthetic construct
  source 1..20: mol_type = other DNA
ccgctctaccctgtaccccg

SEQ ID NO: 217845 - DNA, 20 bp, synthetic construct
  source 1..20: mol_type = other DNA
cccgctctaccctgtacccc

SEQ ID NO: 217846 - DNA, 20 bp, synthetic construct
  source 1..20: mol_type = other DNA
gcccgctctaccctgtaccc

SEQ ID NO: 217847 - DNA, 20 bp, synthetic construct
  source 1..20: mol_type = other DNA
ggcccgctctaccctgtacc

SEQ ID NO: 217848 - DNA, 20 bp, synthetic construct
  source 1..20: mol_type = other DNA
aggcccgctctaccctgtac

SEQ ID NO: 217849 - DNA, 20 bp, synthetic construct
  source 1..20: mol_type = other DNA
gaggcccgctctaccctgta

SEQ ID NO: 217850 - DNA, 20 bp, synthetic construct
  source 1..20: mol_type = other DNA
ggaggcccgctctaccctgt

SEQ ID NO: 217851 - DNA, 20 bp, synthetic construct
  source 1..20: mol_type = other DNA
gggaggcccgctctaccctg

SEQ ID NO: 217852 - DNA, 20 bp, synthetic construct
  source 1..20: mol_type = other DNA
ggggaggcccgctctaccct

SEQ ID NO: 217853 - DNA, 20 bp, synthetic construct
  source 1..20: mol_type = other DNA
tggggaggcccgctctaccc

SEQ ID NO: 217854 - DNA, 20 bp, synthetic construct
  source 1..20: mol_type = other DNA
ctggggaggcccgctctacc

SEQ ID NO: 217855 - DNA, 20 bp, synthetic construct
  source 1..20: mol_type = other DNA
gctggggaggcccgctctac

SEQ ID NO: 217856 - DNA, 20 bp, synthetic construct
  source 1..20: mol_type = other DNA
ggctggggaggcccgctcta

SEQ ID NO: 217857 - DNA, 20 bp, synthetic construct
  source 1..20: mol_type = other DNA
gggctggggaggcccgctct

SEQ ID NO: 217858 - DNA, 20 bp, synthetic construct
  source 1..20: mol_type = other DNA
ggggctggggaggcccgctc

SEQ ID NO: 217859 - DNA, 20 bp, synthetic construct
  source 1..20: mol_type = other DNA
aggggctggggaggcccgct

SEQ ID NO: 217860 - DNA, 20 bp, synthetic construct
  source 1..20: mol_type = other DNA
caggggctggggaggcccgc

SEQ ID NO: 217861 - DNA, 20 bp, synthetic construct
  source 1..20: mol_type = other DNA
gcaggggctggggaggcccg

SEQ ID NO: 217862 - DNA, 20 bp, synthetic construct
  source 1..20: mol_type = other DNA
ggcaggggctggggaggccc

SEQ ID NO: 217863 - DNA, 20 bp, synthetic construct
  source 1..20: mol_type = other DNA
tggcaggggctggggaggcc

SEQ ID NO: 217864 - DNA, 20 bp, synthetic construct
  source 1..20: mol_type = other DNA
atggcaggggctggggaggc

SEQ ID NO: 217865 - DNA, 20 bp, synthetic construct
  source 1..20: mol_type = other DNA
catggcaggggctggggagg

SEQ ID NO: 217866 - DNA, 20 bp, synthetic construct
  source 1..20: mol_type = other DNA
tcatggcaggggctggggag

SEQ ID NO: 217867 - DNA, 20 bp, synthetic construct
  source 1..20: mol_type = other DNA
ctcatggcaggggctgggga

SEQ ID NO: 217868 - DNA, 20 bp, synthetic construct
  source 1..20: mol_type = other DNA
cctcatggcaggggctgggg

SEQ ID NO: 217869 - DNA, 20 bp, synthetic construct
  source 1..20: mol_type = other DNA
gcctcatggcaggggctggg

SEQ ID NO: 217870 - DNA, 20 bp, synthetic construct
  source 1..20: mol_type = other DNA
ggcctcatggcaggggctgg

SEQ ID NO: 217871 - DNA, 20 bp, synthetic construct
  source 1..20: mol_type = other DNA
tggcctcatggcaggggctg

SEQ ID NO: 217872 - DNA, 20 bp, synthetic construct
  source 1..20: mol_type = other DNA
ttggcctcatggcaggggct

SEQ ID NO: 217873 - DNA, 20 bp, synthetic construct
  source 1..20: mol_type = other DNA
cttggcctcatggcaggggc

SEQ ID NO: 217874 - DNA, 20 bp, synthetic construct
  source 1..20: mol_type = other DNA
ccttggcctcatggcagggg

SEQ ID NO: 217875 - DNA, 20 bp, synthetic construct
  source 1..20: mol_type = other DNA
gccttggcctcatggcaggg

SEQ ID NO: 217876 - DNA, 20 bp, synthetic construct
  source 1..20: mol_type = other DNA
tgccttggcctcatggcagg

SEQ ID NO: 217877 - DNA, 20 bp, synthetic construct
  source 1..20: mol_type = other DNA
ctgccttggcctcatggcag

SEQ ID NO: 217878 - DNA, 20 bp, synthetic construct
  source 1..20: mol_type = other DNA
actgccttggcctcatggca

SEQ ID NO: 217879 - DNA, 20 bp, synthetic construct
  source 1..20: mol_type = other DNA
cactgccttggcctcatggc

SEQ ID NO: 217880 - DNA, 20 bp, synthetic construct
  source 1..20: mol_type = other DNA
gcactgccttggcctcatgg

SEQ ID NO: 217881 - DNA, 20 bp, synthetic construct
  source 1..20: mol_type = other DNA
tgcactgccttggcctcatg

SEQ ID NO: 217882 - DNA, 20 bp, synthetic construct
  source 1..20: mol_type = other DNA
atgcactgccttggcctcat

SEQ ID NO: 217883 - DNA, 20 bp, synthetic construct
  source 1..20: mol_type = other DNA
gatgcactgccttggcctca

SEQ ID NO: 217884 - DNA, 20 bp, synthetic construct
  source 1..20: mol_type = other DNA
cgatgcactgccttggcctc

SEQ ID NO: 217885 - DNA, 20 bp, synthetic construct
  source 1..20: mol_type = other DNA
acgatgcactgccttggcct

SEQ ID NO: 217886 - DNA, 20 bp, synthetic construct
  source 1..20: mol_type = other DNA
aacgatgcactgccttggcc

SEQ ID NO: 217887 - DNA, 20 bp, synthetic construct
  source 1..20: mol_type = other DNA
gaacgatgcactgccttggc

SEQ ID NO: 217888 - DNA, 20 bp, synthetic construct
  source 1..20: mol_type = other DNA
cgaacgatgcactgccttgg

SEQ ID NO: 217889 - DNA, 20 bp, synthetic construct
  source 1..20: mol_type = other DNA
gcgaacgatgcactgccttg

SEQ ID NO: 217890 - DNA, 20 bp, synthetic construct
  source 1..20: mol_type = other DNA
tgcgaacgatgcactgcctt

SEQ ID NO: 217891 - DNA, 20 bp, synthetic construct
  source 1..20: mol_type = other DNA
ctgcgaacgatgcactgcct

SEQ ID NO: 217892 - DNA, 20 bp, synthetic construct
  source 1..20: mol_type = other DNA
gctgcgaacgatgcactgcc

SEQ ID NO: 217893 - DNA, 20 bp, synthetic construct
  source 1..20: mol_type = other DNA
cgctgcgaacgatgcactgc

SEQ ID NO: 217894 - DNA, 20 bp, synthetic construct
  source 1..20: mol_type = other DNA
acgctgcgaacgatgcactg

SEQ ID NO: 217895 - DNA, 20 bp, synthetic construct
  source 1..20: mol_type = other DNA
tacgctgcgaacgatgcact

SEQ ID NO: 217896 - DNA, 20 bp, synthetic construct
  source 1..20: mol_type = other DNA
gtacgctgcgaacgatgcac

SEQ ID NO: 217897 - DNA, 20 bp, synthetic construct
  source 1..20: mol_type = other DNA
tgtacgctgcgaacgatgca

SEQ ID NO: 217898 - DNA, 20 bp, synthetic construct
  source 1..20: mol_type = other DNA
atgtacgctgcgaacgatgc

SEQ ID NO: 217899 - DNA, 20 bp, synthetic construct
  source 1..20: mol_type = other DNA
aatgtacgctgcgaacgatg

SEQ ID NO: 217900 - DNA, 20 bp, synthetic construct
  source 1..20: mol_type = other DNA
gaatgtacgctgcgaacgat

SEQ ID NO: 217901 - DNA, 20 bp, synthetic construct
  source 1..20: mol_type = other DNA
tgaatgtacgctgcgaacga

SEQ ID NO: 217902 - DNA, 20 bp, synthetic construct
  source 1..20: mol_type = other DNA
ctgaatgtacgctgcgaacg

SEQ ID NO: 217903 - DNA, 20 bp, synthetic construct
  source 1..20: mol_type = other DNA
tctgaatgtacgctgcgaac

SEQ ID NO: 217904 - DNA, 20 bp, synthetic construct
  source 1..20: mol_type = other DNA
ttctgaatgtacgctgcgaa

SEQ ID NO: 217905 - DNA, 20 bp, synthetic construct
  source 1..20: mol_type = other DNA
tttctgaatgtacgctgcga

SEQ ID NO: 217906 - DNA, 20 bp, synthetic construct
  source 1..20: mol_type = other DNA
gtttctgaatgtacgctgcg

SEQ ID NO: 217907 - DNA, 20 bp, synthetic construct
  source 1..20: mol_type = other DNA
ggtttctgaatgtacgctgc

SEQ ID NO: 217908 - DNA, 20 bp, synthetic construct
  source 1..20: mol_type = other DNA
tggtttctgaatgtacgctg

SEQ ID NO: 217909 - DNA, 20 bp, synthetic construct
  source 1..20: mol_type = other DNA
ttggtttctgaatgtacgct

SEQ ID NO: 217910 - DNA, 20 bp, synthetic construct
  source 1..20: mol_type = other DNA
tttggtttctgaatgtacgc

SEQ ID NO: 217911 - DNA, 20 bp, synthetic construct
  source 1..20: mol_type = other DNA
ctttggtttctgaatgtacg

SEQ ID NO: 217912 - DNA, 20 bp, synthetic construct
  source 1..20: mol_type = other DNA
gctttggtttctgaatgtac

SEQ ID NO: 217913 - DNA, 20 bp, synthetic construct
  source 1..20: mol_type = other DNA
ggctttggtttctgaatgta

SEQ ID NO: 217914 - DNA, 20 bp, synthetic construct
  source 1..20: mol_type = other DNA
aggctttggtttctgaatgt

SEQ ID NO: 217915 - DNA, 20 bp, synthetic construct
  source 1..20: mol_type = other DNA
taggctttggtttctgaatg

SEQ ID NO: 217916 - DNA, 20 bp, synthetic construct
  source 1..20: mol_type = other DNA
ctaggctttggtttctgaat

SEQ ID NO: 217917 - DNA, 20 bp, synthetic construct
  source 1..20: mol_type = other DNA
cctaggctttggtttctgaa

SEQ ID NO: 217918 - DNA, 20 bp, synthetic construct
  source 1..20: mol_type = other DNA
tcctaggctttggtttctga

SEQ ID NO: 217919 - DNA, 20 bp, synthetic construct
  source 1..20: mol_type = other DNA
ctcctaggctttggtttctg

SEQ ID NO: 217920 - DNA, 20 bp, synthetic construct
  source 1..20: mol_type = other DNA
gctcctaggctttggtttct

SEQ ID NO: 217921 - DNA, 20 bp, synthetic construct
  source 1..20: mol_type = other DNA
agctcctaggctttggtttc

SEQ ID NO: 217922 - DNA, 20 bp, synthetic construct
  source 1..20: mol_type = other DNA
cagctcctaggctttggttt

SEQ ID NO: 217923 - DNA, 20 bp, synthetic construct
  source 1..20: mol_type = other DNA
ccagctcctaggctttggtt

SEQ ID NO: 217924 - DNA, 20 bp, synthetic construct
  source 1..20: mol_type = other DNA
accagctcctaggctttggt

SEQ ID NO: 217925 - DNA, 20 bp, synthetic construct
  source 1..20: mol_type = other DNA
aaccagctcctaggctttgg

SEQ ID NO: 217926 - DNA, 20 bp, synthetic construct
  source 1..20: mol_type = other DNA
taaccagctcctaggctttg

SEQ ID NO: 217927 - DNA, 20 bp, synthetic construct
  source 1..20: mol_type = other DNA
ataaccagctcctaggcttt

SEQ ID NO: 217928 - DNA, 20 bp, synthetic construct
  source 1..20: mol_type = other DNA
gataaccagctcctaggctt

SEQ ID NO: 217929 - DNA, 20 bp, synthetic construct
  source 1..20: mol_type = other DNA
tgataaccagctcctaggct

SEQ ID NO: 217930 - DNA, 20 bp, synthetic construct
  source 1..20: mol_type = other DNA
atgataaccagctcctaggc

SEQ ID NO: 217931 - DNA, 20 bp, synthetic construct
  source 1..20: mol_type = other DNA
aatgataaccagctcctagg

SEQ ID NO: 217932 - DNA, 20 bp, synthetic construct
  source 1..20: mol_type = other DNA
gaatgataaccagctcctag

SEQ ID NO: 217933 - DNA, 20 bp, synthetic construct
  source 1..20: mol_type = other DNA
ggaatgataaccagctccta

SEQ ID NO: 217934 - DNA, 20 bp, synthetic construct
  source 1..20: mol_type = other DNA
cggaatgataaccagctcct

SEQ ID NO: 217935 - DNA, 20 bp, synthetic construct
  source 1..20: mol_type = other DNA
ccggaatgataaccagctcc

SEQ ID NO: 217936 - DNA, 20 bp, synthetic construct
  source 1..20: mol_type = other DNA
accggaatgataaccagctc

SEQ ID NO: 217937 - DNA, 20 bp, synthetic construct
  source 1..20: mol_type = other DNA
aaccggaatgataaccagct

SEQ ID NO: 217938 - DNA, 20 bp, synthetic construct
  source 1..20: mol_type = other DNA
aaaccggaatgataaccagc

SEQ ID NO: 217939 - DNA, 20 bp, synthetic construct
  source 1..20: mol_type = other DNA
taaaccggaatgataaccag

SEQ ID NO: 217940 - DNA, 20 bp, synthetic construct
  source 1..20: mol_type = other DNA
gtaaaccggaatgataacca

SEQ ID NO: 217941 - DNA, 20 bp, synthetic construct
  source 1..20: mol_type = other DNA
tgtaaaccggaatgataacc

SEQ ID NO: 217942 - DNA, 20 bp, synthetic construct
  source 1..20: mol_type = other DNA
ctgtaaaccggaatgataac

SEQ ID NO: 217943 - DNA, 20 bp, synthetic construct
  source 1..20: mol_type = other DNA
gctgtaaaccggaatgataa

SEQ ID NO: 217944 - DNA, 20 bp, synthetic construct
  source 1..20: mol_type = other DNA
agctgtaaaccggaatgata

SEQ ID NO: 217945 - DNA, 20 bp, synthetic construct
  source 1..20: mol_type = other DNA
cagctgtaaaccggaatgat

SEQ ID NO: 217946 - DNA, 20 bp, synthetic construct
  source 1..20: mol_type = other DNA
tcagctgtaaaccggaatga

SEQ ID NO: 217947 - DNA, 20 bp, synthetic construct
  source 1..20: mol_type = other DNA
atcagctgtaaaccggaatg

SEQ ID NO: 217948 - DNA, 20 bp, synthetic construct
  source 1..20: mol_type = other DNA
catcagctgtaaaccggaat

SEQ ID NO: 217949 - DNA, 20 bp, synthetic construct
  source 1..20: mol_type = other DNA
ccatcagctgtaaaccggaa

SEQ ID NO: 217950 - DNA, 20 bp, synthetic construct
  source 1..20: mol_type = other DNA
tccatcagctgtaaaccgga

SEQ ID NO: 217951 - DNA, 20 bp, synthetic construct
  source 1..20: mol_type = other DNA
ttccatcagctgtaaaccgg

SEQ ID NO: 217952 - DNA, 20 bp, synthetic construct
  source 1..20: mol_type = other DNA
cttccatcagctgtaaaccg

SEQ ID NO: 217953 - DNA, 20 bp, synthetic construct
  source 1..20: mol_type = other DNA
tcttccatcagctgtaaacc

SEQ ID NO: 217954 - DNA, 20 bp, synthetic construct
  source 1..20: mol_type = other DNA
ctcttccatcagctgtaaac

SEQ ID NO: 217955 - DNA, 20 bp, synthetic construct
  source 1..20: mol_type = other DNA
gctcttccatcagctgtaaa

SEQ ID NO: 217956 - DNA, 20 bp, synthetic construct
  source 1..20: mol_type = other DNA
tgctcttccatcagctgtaa

SEQ ID NO: 217957 - DNA, 20 bp, synthetic construct
  source 1..20: mol_type = other DNA
ctgctcttccatcagctgta

SEQ ID NO: 217958 - DNA, 20 bp, synthetic construct
  source 1..20: mol_type = other DNA
cctgctcttccatcagctgt

SEQ ID NO: 217959 - DNA, 20 bp, synthetic construct
  source 1..20: mol_type = other DNA
acctgctcttccatcagctg

SEQ ID NO: 217960 - DNA, 20 bp, synthetic construct
  source 1..20: mol_type = other DNA
cacctgctcttccatcagct

SEQ ID NO: 217961 - DNA, 20 bp, synthetic construct
  source 1..20: mol_type = other DNA
gcacctgctcttccatcagc

SEQ ID NO: 217962 - DNA, 20 bp, synthetic construct
  source 1..20: mol_type = other DNA
agcacctgctcttccatcag

SEQ ID NO: 217963 - DNA, 20 bp, synthetic construct
  source 1..20: mol_type = other DNA
aagcacctgctcttccatca

SEQ ID NO: 217964 - DNA, 20 bp, synthetic construct
  source 1..20: mol_type = other DNA
gaagcacctgctcttccatc

SEQ ID NO: 217965 - DNA, 20 bp, synthetic construct
  source 1..20: mol_type = other DNA
ggaagcacctgctcttccat

SEQ ID NO: 217966 - DNA, 20 bp, synthetic construct
  source 1..20: mol_type = other DNA
cggaagcacctgctcttcca

SEQ ID NO: 217967 - DNA, 20 bp, synthetic construct
  source 1..20: mol_type = other DNA
tcggaagcacctgctcttcc

SEQ ID NO: 217968 - DNA, 20 bp, synthetic construct
  source 1..20: mol_type = other DNA
ctcggaagcacctgctcttc

SEQ ID NO: 217969 - DNA, 20 bp, synthetic construct
  source 1..20: mol_type = other DNA
tctcggaagcacctgctctt

SEQ ID NO: 217970 - DNA, 20 bp, synthetic construct
  source 1..20: mol_type = other DNA
ttctcggaagcacctgctct

SEQ ID NO: 217971 - DNA, 20 bp, synthetic construct
  source 1..20: mol_type = other DNA
gttctcggaagcacctgctc

SEQ ID NO: 217972 - DNA, 20 bp, synthetic construct
  source 1..20: mol_type = other DNA
ggttctcggaagcacctgct

SEQ ID NO: 217973 - DNA, 20 bp, synthetic construct
  source 1..20: mol_type = other DNA
gggttctcggaagcacctgc

SEQ ID NO: 217974 - DNA, 20 bp, synthetic construct
  source 1..20: mol_type = other DNA
tgggttctcggaagcacctg

SEQ ID NO: 217975 - DNA, 20 bp, synthetic construct
  source 1..20: mol_type = other DNA
gtgggttctcggaagcacct

SEQ ID NO: 217976 - DNA, 20 bp, synthetic construct
  source 1..20: mol_type = other DNA
tgtgggttctcggaagcacc

SEQ ID NO: 217977 - DNA, 20 bp, synthetic construct
  source 1..20: mol_type = other DNA
ctgtgggttctcggaagcac

SEQ ID NO: 217978 - DNA, 20 bp, synthetic construct
  source 1..20: mol_type = other DNA
actgtgggttctcggaagca

SEQ ID NO: 217979 - DNA, 20 bp, synthetic construct
  source 1..20: mol_type = other DNA
cactgtgggttctcggaagc

SEQ ID NO: 217980 - DNA, 20 bp, synthetic construct
  source 1..20: mol_type = other DNA
gcactgtgggttctcggaag

SEQ ID NO: 217981 - DNA, 20 bp, synthetic construct
  source 1..20: mol_type = other DNA
agcactgtgggttctcggaa

SEQ ID NO: 217982 - DNA, 20 bp, synthetic construct
  source 1..20: mol_type = other DNA
gagcactgtgggttctcgga

SEQ ID NO: 217983 - DNA, 20 bp, synthetic construct
  source 1..20: mol_type = other DNA
agagcactgtgggttctcgg

SEQ ID NO: 217984 - DNA, 20 bp, synthetic construct
  source 1..20: mol_type = other DNA
aagagcactgtgggttctcg

SEQ ID NO: 217985 - DNA, 20 bp, synthetic construct
  source 1..20: mol_type = other DNA
aaagagcactgtgggttctc

SEQ ID NO: 217986 - DNA, 20 bp, synthetic construct
  source 1..20: mol_type = other DNA
caaagagcactgtgggttct

SEQ ID NO: 217987 - DNA, 20 bp, synthetic construct
  source 1..20: mol_type = other DNA
ccaaagagcactgtgggttc

SEQ ID NO: 217988 - DNA, 20 bp, synthetic construct
  source 1..20: mol_type = other DNA
gccaaagagcactgtgggtt

SEQ ID NO: 217989 - DNA, 20 bp, synthetic construct
  source 1..20: mol_type = other DNA
ggccaaagagcactgtgggt

SEQ ID NO: 217990 - DNA, 20 bp, synthetic construct
  source 1..20: mol_type = other DNA
tggccaaagagcactgtggg

SEQ ID NO: 217991 - DNA, 20 bp, synthetic construct
  source 1..20: mol_type = other DNA
ctggccaaagagcactgtgg

SEQ ID NO: 217992 - DNA, 20 bp, synthetic construct
  source 1..20: mol_type = other DNA
actggccaaagagcactgtg

SEQ ID NO: 217993 - DNA, 20 bp, synthetic construct
  source 1..20: mol_type = other DNA
cactggccaaagagcactgt

SEQ ID NO: 217994 - DNA, 20 bp, synthetic construct
  source 1..20: mol_type = other DNA
tcactggccaaagagcactg

SEQ ID NO: 217995 - DNA, 20 bp, synthetic construct
  source 1..20: mol_type = other DNA
gtcactggccaaagagcact

SEQ ID NO: 217996 - DNA, 20 bp, synthetic construct
  source 1..20: mol_type = other DNA
ggtcactggccaaagagcac

SEQ ID NO: 217997 - DNA, 20 bp, synthetic construct
  source 1..20: mol_type = other DNA
gggtcactggccaaagagca

SEQ ID NO: 217998 - DNA, 20 bp, synthetic construct
  source 1..20: mol_type = other DNA
tgggtcactggccaaagagc

SEQ ID NO: 217999 - DNA, 20 bp, synthetic construct
  source 1..20: mol_type = other DNA
ttgggtcactggccaaagag

SEQ ID NO: 218000 - DNA, 20 bp, synthetic construct
  source 1..20: mol_type = other DNA
cttgggtcactggccaaaga

SEQ ID NO: 218001 - DNA, 20 bp, synthetic construct
  source 1..20: mol_type = other DNA
ccttgggtcactggccaaag

SEQ ID NO: 218002 - DNA, 20 bp, synthetic construct
  source 1..20: mol_type = other DNA
cccttgggtcactggccaaa

SEQ ID NO: 218003 - DNA, 20 bp, synthetic construct
  source 1..20: mol_type = other DNA
acccttgggtcactggccaa

SEQ ID NO: 218004 - DNA, 20 bp, synthetic construct
  source 1..20: mol_type = other DNA
cacccttgggtcactggcca

SEQ ID NO: 218005 - DNA, 20 bp, synthetic construct
  source 1..20: mol_type = other DNA
gcacccttgggtcactggcc

SEQ ID NO: 218006 - DNA, 20 bp, synthetic construct
  source 1..20: mol_type = other DNA
ggcacccttgggtcactggc

SEQ ID NO: 218007 - DNA, 20 bp, synthetic construct
  source 1..20: mol_type = other DNA
aggcacccttgggtcactgg

SEQ ID NO: 218008 - DNA, 20 bp, synthetic construct
  source 1..20: mol_type = other DNA
gaggcacccttgggtcactg

SEQ ID NO: 218009 - DNA, 20 bp, synthetic construct
  source 1..20: mol_type = other DNA
agaggcacccttgggtcact

SEQ ID NO: 218010 - DNA, 20 bp, synthetic construct
  source 1..20: mol_type = other DNA
cagaggcacccttgggtcac

SEQ ID NO: 218011 - DNA, 20 bp, synthetic construct
  source 1..20: mol_type = other DNA
tcagaggcacccttgggtca

SEQ ID NO: 218012 - DNA, 20 bp, synthetic construct
  source 1..20: mol_type = other DNA
ctcagaggcacccttgggtc

SEQ ID NO: 218013 - DNA, 20 bp, synthetic construct
  source 1..20: mol_type = other DNA
tctcagaggcacccttgggt

SEQ ID NO: 218014 - DNA, 20 bp, synthetic construct
  source 1..20: mol_type = other DNA
ctctcagaggcacccttggg

SEQ ID NO: 218015 - DNA, 20 bp, synthetic construct
  source 1..20: mol_type = other DNA
cctctcagaggcacccttgg

SEQ ID NO: 218016 - DNA, 20 bp, synthetic construct
  source 1..20: mol_type = other DNA
gcctctcagaggcacccttg

SEQ ID NO: 218017 - DNA, 20 bp, synthetic construct
  source 1..20: mol_type = other DNA
ggcctctcagaggcaccctt

SEQ ID NO: 218018 - DNA, 20 bp, synthetic construct
  source 1..20: mol_type = other DNA
aggcctctcagaggcaccct

SEQ ID NO: 218019 - DNA, 20 bp, synthetic construct
  source 1..20: mol_type = other DNA
gaggcctctcagaggcaccc

SEQ ID NO: 218020 - DNA, 20 bp, synthetic construct
  source 1..20: mol_type = other DNA
cgaggcctctcagaggcacc

SEQ ID NO: 218021 - DNA, 20 bp, synthetic construct
  source 1..20: mol_type = other DNA
gcgaggcctctcagaggcac

SEQ ID NO: 218022 - DNA, 20 bp, synthetic construct
  source 1..20: mol_type = other DNA
tgcgaggcctctcagaggca

SEQ ID NO: 218023 - DNA, 20 bp, synthetic construct
  source 1..20: mol_type = other DNA
ctgcgaggcctctcagaggc

SEQ ID NO: 218024 - DNA, 20 bp, synthetic construct
  source 1..20: mol_type = other DNA
gctgcgaggcctctcagagg

SEQ ID NO: 218025 - DNA, 20 bp, synthetic construct
  source 1..20: mol_type = other DNA
tgctgcgaggcctctcagag

SEQ ID NO: 218026 - DNA, 20 bp, synthetic construct
  source 1..20: mol_type = other DNA
gtgctgcgaggcctctcaga

SEQ ID NO: 218027 - DNA, 20 bp, synthetic construct
  source 1..20: mol_type = other DNA
ggtgctgcgaggcctctcag

SEQ ID NO: 218028 - DNA, 20 bp, synthetic construct
  source 1..20: mol_type = other DNA
gggtgctgcgaggcctctca

SEQ ID NO: 218029 - DNA, 20 bp, synthetic construct
  source 1..20: mol_type = other DNA
cgggtgctgcgaggcctctc

SEQ ID NO: 218030 - DNA, 20 bp, synthetic construct
  source 1..20: mol_type = other DNA
ccgggtgctgcgaggcctct

SEQ ID NO: 218031 - DNA, 20 bp, synthetic construct
  source 1..20: mol_type = other DNA
tccgggtgctgcgaggcctc

SEQ ID NO: 218032 - DNA, 20 bp, synthetic construct
  source 1..20: mol_type = other DNA
ctccgggtgctgcgaggcct

SEQ ID NO: 218033 - DNA, 20 bp, synthetic construct
  source 1..20: mol_type = other DNA
cctccgggtgctgcgaggcc

SEQ ID NO: 218034 - DNA, 20 bp, synthetic construct
  source 1..20: mol_type = other DNA
acctccgggtgctgcgaggc

SEQ ID NO: 218035 - DNA, 20 bp, synthetic construct
  source 1..20: mol_type = other DNA
cacctccgggtgctgcgagg

SEQ ID NO: 218036 - DNA, 20 bp, synthetic construct
  source 1..20: mol_type = other DNA
gcacctccgggtgctgcgag

SEQ ID NO: 218037 - DNA, 20 bp, synthetic construct
  source 1..20: mol_type = other DNA
agcacctccgggtgctgcga

SEQ ID NO: 218038 - DNA, 20 bp, synthetic construct
  source 1..20: mol_type = other DNA
cagcacctccgggtgctgcg

SEQ ID NO: 218039 - DNA, 20 bp, synthetic construct
  source 1..20: mol_type = other DNA
gcagcacctccgggtgctgc

SEQ ID NO: 218040 - DNA, 20 bp, synthetic construct
  source 1..20: mol_type = other DNA
agcagcacctccgggtgctg

SEQ ID NO: 218041 - DNA, 20 bp, synthetic construct
  source 1..20: mol_type = other DNA
cagcagcacctccgggtgct

SEQ ID NO: 218042 - DNA, 20 bp, synthetic construct
  source 1..20: mol_type = other DNA
tcagcagcacctccgggtgc

SEQ ID NO: 218043 - DNA, 20 bp, synthetic construct
  source 1..20: mol_type = other DNA
ctcagcagcacctccgggtg

SEQ ID NO: 218044 - DNA, 20 bp, synthetic construct
  source 1..20: mol_type = other DNA
cctcagcagcacctccgggt

SEQ ID NO: 218045 - DNA, 20 bp, synthetic construct
  source 1..20: mol_type = other DNA
gcctcagcagcacctccggg

SEQ ID NO: 218046 - DNA, 20 bp, synthetic construct
  source 1..20: mol_type = other DNA
tgcctcagcagcacctccgg

SEQ ID NO: 218047 - DNA, 20 bp, synthetic construct
  source 1..20: mol_type = other DNA
ttgcctcagcagcacctccg

SEQ ID NO: 218048 - DNA, 20 bp, synthetic construct
  source 1..20: mol_type = other DNA
gttgcctcagcagcacctcc

SEQ ID NO: 218049 - DNA, 20 bp, synthetic construct
  source 1..20: mol_type = other DNA
cgttgcctcagcagcacctc

SEQ ID NO: 218050 - DNA, 20 bp, synthetic construct
  source 1..20: mol_type = other DNA
gcgttgcctcagcagcacct

SEQ ID NO: 218051 - DNA, 20 bp, synthetic construct
  source 1..20: mol_type = other DNA
ggcgttgcctcagcagcacc

SEQ ID NO: 218052 - DNA, 20 bp, synthetic construct
  source 1..20: mol_type = other DNA
gggcgttgcctcagcagcac

SEQ ID NO: 218053 - DNA, 20 bp, synthetic construct
  source 1..20: mol_type = other DNA
agggcgttgcctcagcagca

SEQ ID NO: 218054 - DNA, 20 bp, synthetic construct
  source 1..20: mol_type = other DNA
cagggcgttgcctcagcagc

SEQ ID NO: 218055 - DNA, 20 bp, synthetic construct
  source 1..20: mol_type = other DNA
tcagggcgttgcctcagcag

SEQ ID NO: 218056 - DNA, 20 bp, synthetic construct
  source 1..20: mol_type = other DNA
gtcagggcgttgcctcagca

SEQ ID NO: 218057 - DNA, 20 bp, synthetic construct
  source 1..20: mol_type = other DNA
agtcagggcgttgcctcagc

SEQ ID NO: 218058 - DNA, 20 bp, synthetic construct
  source 1..20: mol_type = other DNA
cagtcagggcgttgcctcag

SEQ ID NO: 218059 - DNA, 20 bp, synthetic construct
  source 1..20: mol_type = other DNA
acagtcagggcgttgcctca

SEQ ID NO: 218060 - DNA, 20 bp, synthetic construct
  source 1..20: mol_type = other DNA
tacagtcagggcgttgcctc

SEQ ID NO: 218061 - DNA, 20 bp, synthetic construct
  source 1..20: mol_type = other DNA
ttacagtcagggcgttgcct

SEQ ID NO: 218062 - DNA, 20 bp, synthetic construct
  source 1..20: mol_type = other DNA
cttacagtcagggcgttgcc

SEQ ID NO: 218063 - DNA, 20 bp, synthetic construct
  source 1..20: mol_type = other DNA
tcttacagtcagggcgttgc

SEQ ID NO: 218064 - DNA, 20 bp, synthetic construct
  source 1..20: mol_type = other DNA
ttcttacagtcagggcgttg

SEQ ID NO: 218065 - DNA, 20 bp, synthetic construct
  source 1..20: mol_type = other DNA
cttcttacagtcagggcgtt

SEQ ID NO: 218066 - DNA, 20 bp, synthetic construct
  source 1..20: mol_type = other DNA
ccttcttacagtcagggcgt

SEQ ID NO: 218067 - DNA, 20 bp, synthetic construct
  source 1..20: mol_type = other DNA
tccttcttacagtcagggcg

SEQ ID NO: 218068 - DNA, 20 bp, synthetic construct
  source 1..20: mol_type = other DNA
gtccttcttacagtcagggc

SEQ ID NO: 218069 - DNA, 20 bp, synthetic construct
  source 1..20: mol_type = other DNA
ggtccttcttacagtcaggg

SEQ ID NO: 218070 - DNA, 20 bp, synthetic construct
  source 1..20: mol_type = other DNA
tggtccttcttacagtcagg

SEQ ID NO: 218071 - DNA, 20 bp, synthetic construct
  source 1..20: mol_type = other DNA
atggtccttcttacagtcag

SEQ ID NO: 218072 - DNA, 20 bp, synthetic construct
  source 1..20: mol_type = other DNA
aatggtccttcttacagtca

SEQ ID NO: 218073 - DNA, 20 bp, synthetic construct
  source 1..20: mol_type = other DNA
gaatggtccttcttacagtc

SEQ ID NO: 218074 - DNA, 20 bp, synthetic construct
  source 1..20: mol_type = other DNA
tgaatggtccttcttacagt

SEQ ID NO: 218075 - DNA, 20 bp, synthetic construct
  source 1..20: mol_type = other DNA
atgaatggtccttcttacag

SEQ ID NO: 218076 - DNA, 20 bp, synthetic construct
  source 1..20: mol_type = other DNA
gatgaatggtccttcttaca

SEQ ID NO: 218077 - DNA, 20 bp, synthetic construct
  source 1..20: mol_type = other DNA
ggatgaatggtccttcttac

SEQ ID NO: 218078 - DNA, 20 bp, synthetic construct
  source 1..20: mol_type = other DNA
aggatgaatggtccttctta

SEQ ID NO: 218079 - DNA, 20 bp, synthetic construct
  source 1..20: mol_type = other DNA
gaggatgaatggtccttctt

SEQ ID NO: 218080 - DNA, 20 bp, synthetic construct
  source 1..20: mol_type = other DNA
tgaggatgaatggtccttct

SEQ ID NO: 218081 - DNA, 20 bp, synthetic construct
  source 1..20: mol_type = other DNA
ctgaggatgaatggtccttc

SEQ ID NO: 218082 - DNA, 20 bp, synthetic construct
  source 1..20: mol_type = other DNA
tctgaggatgaatggtcctt

SEQ ID NO: 218083 - DNA, 20 bp, synthetic construct
  source 1..20: mol_type = other DNA
ctctgaggatgaatggtcct

SEQ ID NO: 218084 - DNA, 20 bp, synthetic construct
  source 1..20: mol_type = other DNA
tctctgaggatgaatggtcc

SEQ ID NO: 218085 - DNA, 20 bp, synthetic construct
  source 1..20: mol_type = other DNA
ctctctgaggatgaatggtc

SEQ ID NO: 218086 - DNA, 20 bp, synthetic construct
  source 1..20: mol_type = other DNA
actctctgaggatgaatggt

SEQ ID NO: 218087 - DNA, 20 bp, synthetic construct
  source 1..20: mol_type = other DNA
cactctctgaggatgaatgg

SEQ ID NO: 218088 - DNA, 20 bp, synthetic construct
  source 1..20: mol_type = other DNA
ccactctctgaggatgaatg

SEQ ID NO: 218089 - DNA, 20 bp, synthetic construct
  source 1..20: mol_type = other DNA
gccactctctgaggatgaat

SEQ ID NO: 218090 - DNA, 20 bp, synthetic construct
  source 1..20: mol_type = other DNA
ggccactctctgaggatgaa

SEQ ID NO: 218091 - DNA, 20 bp, synthetic construct
  source 1..20: mol_type = other DNA
cggccactctctgaggatga

SEQ ID NO: 218092 - DNA, 20 bp, synthetic construct
  source 1..20: mol_type = other DNA
acggccactctctgaggatg

SEQ ID NO: 218093 - DNA, 20 bp, synthetic construct
  source 1..20: mol_type = other DNA
cacggccactctctgaggat

SEQ ID NO: 218094 - DNA, 20 bp, synthetic construct
  source 1..20: mol_type = other DNA
tcacggccactctctgagga

SEQ ID NO: 218095 - DNA, 20 bp, synthetic construct
  source 1..20: mol_type = other DNA
atcacggccactctctgagg

SEQ ID NO: 218096 - DNA, 20 bp, synthetic construct
  source 1..20: mol_type = other DNA
catcacggccactctctgag

SEQ ID NO: 218097 - DNA, 20 bp, synthetic construct
  source 1..20: mol_type = other DNA
gcatcacggccactctctga

SEQ ID NO: 218098 - DNA, 20 bp, synthetic construct
  source 1..20: mol_type = other DNA
agcatcacggccactctctg

SEQ ID NO: 218099 - DNA, 20 bp, synthetic construct
  source 1..20: mol_type = other DNA
cagcatcacggccactctct

SEQ ID NO: 218100 - DNA, 20 bp, synthetic construct
  source 1..20: mol_type = other DNA
gcagcatcacggccactctc

SEQ ID NO: 218101 - DNA, 20 bp, synthetic construct
  source 1..20: mol_type = other DNA
agcagcatcacggccactct

SEQ ID NO: 218102 - DNA, 20 bp, synthetic construct
  source 1..20: mol_type = other DNA
cagcagcatcacggccactc

SEQ ID NO: 218103 - DNA, 20 bp, synthetic construct
  source 1..20: mol_type = other DNA
gcagcagcatcacggccact

SEQ ID NO: 218104 - DNA, 20 bp, synthetic construct
  source 1..20: mol_type = other DNA
cgcagcagcatcacggccac

SEQ ID NO: 218105 - DNA, 20 bp, synthetic construct
  source 1..20: mol_type = other DNA
tcgcagcagcatcacggcca

SEQ ID NO: 218106 - DNA, 20 bp, synthetic construct
  source 1..20: mol_type = other DNA
gtcgcagcagcatcacggcc

SEQ ID NO: 218107 - DNA, 20 bp, synthetic construct
  source 1..20: mol_type = other DNA
tgtcgcagcagcatcacggc

SEQ ID NO: 218108 - DNA, 20 bp, synthetic construct
  source 1..20: mol_type = other DNA
ctgtcgcagcagcatcacgg

SEQ ID NO: 218109 - DNA, 20 bp, synthetic construct
  source 1..20: mol_type = other DNA
actgtcgcagcagcatcacg

SEQ ID NO: 218110 - DNA, 20 bp, synthetic construct
  source 1..20: mol_type = other DNA
gactgtcgcagcagcatcac

SEQ ID NO: 218111 - DNA, 20 bp, synthetic construct
  source 1..20: mol_type = other DNA
ggactgtcgcagcagcatca

SEQ ID NO: 218112 - DNA, 20 bp, synthetic construct
  source 1..20: mol_type = other DNA
gggactgtcgcagcagcatc

SEQ ID NO: 218113 - DNA, 20 bp, synthetic construct
  source 1..20: mol_type = other DNA
tgggactgtcgcagcagcat

SEQ ID NO: 218114 - DNA, 20 bp, synthetic construct
  source 1..20: mol_type = other DNA
gtgggactgtcgcagcagca

SEQ ID NO: 218115 - DNA, 20 bp, synthetic construct
  source 1..20: mol_type = other DNA
ggtgggactgtcgcagcagc

SEQ ID NO: 218116 - DNA, 20 bp, synthetic construct
  source 1..20: mol_type = other DNA
tggtgggactgtcgcagcag

SEQ ID NO: 218117 - DNA, 20 bp, synthetic construct
  source 1..20: mol_type = other DNA
atggtgggactgtcgcagca

SEQ ID NO: 218118 - DNA, 20 bp, synthetic construct
  source 1..20: mol_type = other DNA
gatggtgggactgtcgcagc

SEQ ID NO: 218119 - DNA, 20 bp, synthetic construct
  source 1..20: mol_type = other DNA
ggatggtgggactgtcgcag

SEQ ID NO: 218120 - DNA, 20 bp, synthetic construct
  source 1..20: mol_type = other DNA
gggatggtgggactgtcgca

SEQ ID NO: 218121 - DNA, 20 bp, synthetic construct
  source 1..20: mol_type = other DNA
agggatggtgggactgtcgc

SEQ ID NO: 218122 - DNA, 20 bp, synthetic construct
  source 1..20: mol_type = other DNA
gagggatggtgggactgtcg

SEQ ID NO: 218123 - DNA, 20 bp, synthetic construct
  source 1..20: mol_type = other DNA
ggagggatggtgggactgtc

SEQ ID NO: 218124 - DNA, 20 bp, synthetic construct
  source 1..20: mol_type = other DNA
gggagggatggtgggactgt

SEQ ID NO: 218125 - DNA, 20 bp, synthetic construct
  source 1..20: mol_type = other DNA
cgggagggatggtgggactg

SEQ ID NO: 218126 - DNA, 20 bp, synthetic construct
  source 1..20: mol_type = other DNA
tcgggagggatggtgggact

SEQ ID NO: 218127 - DNA, 20 bp, synthetic construct
  source 1..20: mol_type = other DNA
gtcgggagggatggtgggac

SEQ ID NO: 218128 - DNA, 20 bp, synthetic construct
  source 1..20: mol_type = other DNA
agtcgggagggatggtggga

SEQ ID NO: 218129 - DNA, 20 bp, synthetic construct
  source 1..20: mol_type = other DNA
gagtcgggagggatggtggg

SEQ ID NO: 218130 - DNA, 20 bp, synthetic construct
  source 1..20: mol_type = other DNA
agagtcgggagggatggtgg

SEQ ID NO: 218131 - DNA, 20 bp, synthetic construct
  source 1..20: mol_type = other DNA
gagagtcgggagggatggtg

SEQ ID NO: 218132 - DNA, 20 bp, synthetic construct
  source 1..20: mol_type = other DNA
tgagagtcgggagggatggt

SEQ ID NO: 218133 - DNA, 20 bp, synthetic construct
  source 1..20: mol_type = other DNA
gtgagagtcgggagggatgg

SEQ ID NO: 218134 - DNA, 20 bp, synthetic construct
  source 1..20: mol_type = other DNA
agtgagagtcgggagggatg

SEQ ID NO: 218135 - DNA, 20 bp, synthetic construct
  source 1..20: mol_type = other DNA
gagtgagagtcgggagggat

SEQ ID NO: 218136 - DNA, 20 bp, synthetic construct
  source 1..20: mol_type = other DNA
ggagtgagagtcgggaggga

SEQ ID NO: 218137 - DNA, 20 bp, synthetic construct
  source 1..20: mol_type = other DNA
gggagtgagagtcgggaggg

SEQ ID NO: 218138 - DNA, 20 bp, synthetic construct
  source 1..20: mol_type = other DNA
tgggagtgagagtcgggagg

SEQ ID NO: 218139 - DNA, 20 bp, synthetic construct
  source 1..20: mol_type = other DNA
ttgggagtgagagtcgggag

SEQ ID NO: 218140 - DNA, 20 bp, synthetic construct
  source 1..20: mol_type = other DNA
gttgggagtgagagtcggga

SEQ ID NO: 218141 - DNA, 20 bp, synthetic construct
  source 1..20: mol_type = other DNA
tgttgggagtgagagtcggg

SEQ ID NO: 218142 - DNA, 20 bp, synthetic construct
  source 1..20: mol_type = other DNA
ctgttgggagtgagagtcgg

SEQ ID NO: 218143 - DNA, 20 bp, synthetic construct
  source 1..20: mol_type = other DNA
tctgttgggagtgagagtcg

SEQ ID NO: 218144 - DNA, 20 bp, synthetic construct
  source 1..20: mol_type = other DNA
gtctgttgggagtgagagtc

SEQ ID NO: 218145 - DNA, 20 bp, synthetic construct
  source 1..20: mol_type = other DNA
agtctgttgggagtgagagt

SEQ ID NO: 218146 - DNA, 20 bp, synthetic construct
  source 1..20: mol_type = other DNA
aagtctgttgggagtgagag

SEQ ID NO: 218147 - DNA, 20 bp, synthetic construct
  source 1..20: mol_type = other DNA
gaagtctgttgggagtgaga

SEQ ID NO: 218148 - DNA, 20 bp, synthetic construct
  source 1..20: mol_type = other DNA
ggaagtctgttgggagtgag

SEQ ID NO: 218149 - DNA, 20 bp, synthetic construct
  source 1..20: mol_type = other DNA
gggaagtctgttgggagtga

SEQ ID NO: 218150 - DNA, 20 bp, synthetic construct
  source 1..20: mol_type = other DNA
tgggaagtctgttgggagtg

SEQ ID NO: 218151 - DNA, 20 bp, synthetic construct
  source 1..20: mol_type = other DNA
gtgggaagtctgttgggagt

SEQ ID NO: 218152 - DNA, 20 bp, synthetic construct
  source 1..20: mol_type = other DNA
agtgggaagtctgttgggag

SEQ ID NO: 218153 - DNA, 20 bp, synthetic construct
  source 1..20: mol_type = other DNA
cagtgggaagtctgttggga

SEQ ID NO: 218154 - DNA, 20 bp, synthetic construct
  source 1..20: mol_type = other DNA
acagtgggaagtctgttggg

SEQ ID NO: 218155 - DNA, 20 bp, synthetic construct
  source 1..20: mol_type = other DNA
tacagtgggaagtctgttgg

SEQ ID NO: 218156 - DNA, 20 bp, synthetic construct
  source 1..20: mol_type = other DNA
ttacagtgggaagtctgttg

SEQ ID NO: 218157 - DNA, 20 bp, synthetic construct
  source 1..20: mol_type = other DNA
tttacagtgggaagtctgtt

SEQ ID NO: 218158 - DNA, 20 bp, synthetic construct
  source 1..20: mol_type = other DNA
ctttacagtgggaagtctgt

SEQ ID NO: 218159 - DNA, 20 bp, synthetic construct
  source 1..20: mol_type = other DNA
gctttacagtgggaagtctg

SEQ ID NO: 218160 - DNA, 20 bp, synthetic construct
  source 1..20: mol_type = other DNA
agctttacagtgggaagtct

SEQ ID NO: 218161 - DNA, 20 bp, synthetic construct
  source 1..20: mol_type = other DNA
cagctttacagtgggaagtc

SEQ ID NO: 218162 - DNA, 20 bp, synthetic construct
  source 1..20: mol_type = other DNA
tcagctttacagtgggaagt

SEQ ID NO: 218163 - DNA, 20 bp, synthetic construct
  source 1..20: mol_type = other DNA
ttcagctttacagtgggaag

SEQ ID NO: 218164 - DNA, 20 bp, synthetic construct
  source 1..20: mol_type = other DNA
gttcagctttacagtgggaa

SEQ ID NO: 218165 - DNA, 20 bp, synthetic construct
  source 1..20: mol_type = other DNA
agttcagctttacagtggga

SEQ ID NO: 218166 - DNA, 20 bp, synthetic construct
  source 1..20: mol_type = other DNA
gagttcagctttacagtggg

SEQ ID NO: 218167 - DNA, 20 bp, synthetic construct
  source 1..20: mol_type = other DNA
agagttcagctttacagtgg

SEQ ID NO: 218168 - DNA, 20 bp, synthetic construct
  source 1..20: mol_type = other DNA
gagagttcagctttacagtg

SEQ ID NO: 218169 - DNA, 20 bp, synthetic construct
  source 1..20: mol_type = other DNA
ggagagttcagctttacagt

SEQ ID NO: 218170 - DNA, 20 bp, synthetic construct
  source 1..20: mol_type = other DNA
tggagagttcagctttacag

SEQ ID NO: 218171 - DNA, 20 bp, synthetic construct
  source 1..20: mol_type = other DNA
ctggagagttcagctttaca

SEQ ID NO: 218172 - DNA, 20 bp, synthetic construct
  source 1..20: mol_type = other DNA
gctggagagttcagctttac

SEQ ID NO: 218173 - DNA, 20 bp, synthetic construct
  source 1..20: mol_type = other DNA
tgctggagagttcagcttta

SEQ ID NO: 218174 - DNA, 20 bp, synthetic construct
  source 1..20: mol_type = other DNA
ttgctggagagttcagcttt

SEQ ID NO: 218175 - DNA, 20 bp, synthetic construct
  source 1..20: mol_type = other DNA
tttgctggagagttcagctt

SEQ ID NO: 218176 - DNA, 20 bp, synthetic construct
  source 1..20: mol_type = other DNA
atttgctggagagttcagct

SEQ ID NO: 218177 - DNA, 20 bp, synthetic construct
  source 1..20: mol_type = other DNA
gatttgctggagagttcagc

SEQ ID NO: 218178 - DNA, 20 bp, synthetic construct
  source 1..20: mol_type = other DNA
tgatttgctggagagttcag

SEQ ID NO: 218179 - DNA, 20 bp, synthetic construct
  source 1..20: mol_type = other DNA
gtgatttgctggagagttca

SEQ ID NO: 218180 - DNA, 20 bp, synthetic construct
  source 1..20: mol_type = other DNA
ggtgatttgctggagagttc

SEQ ID NO: 218181 - DNA, 20 bp, synthetic construct
  source 1..20: mol_type = other DNA
aggtgatttgctggagagtt

SEQ ID NO: 218182 - DNA, 20 bp, synthetic construct
  source 1..20: mol_type = other DNA
gaggtgatttgctggagagt

SEQ ID NO: 218183 - DNA, 20 bp, synthetic construct
  source 1..20: mol_type = other DNA
agaggtgatttgctggagag

SEQ ID NO: 218184 - DNA, 20 bp, synthetic construct
  source 1..20: mol_type = other DNA
gagaggtgatttgctggaga

SEQ ID NO: 218185 - DNA, 20 bp, synthetic construct
  source 1..20: mol_type = other DNA
cgagaggtgatttgctggag

SEQ ID NO: 218186 - DNA, 20 bp, synthetic construct
  source 1..20: mol_type = other DNA
gcgagaggtgatttgctgga

SEQ ID NO: 218187 - DNA, 20 bp, synthetic construct
  source 1..20: mol_type = other DNA
ggcgagaggtgatttgctgg

SEQ ID NO: 218188 - DNA, 20 bp, synthetic construct
  source 1..20: mol_type = other DNA
tggcgagaggtgatttgctg

SEQ ID NO: 218189 - DNA, 20 bp, synthetic construct
  source 1..20: mol_type = other DNA
ctggcgagaggtgatttgct

SEQ ID NO: 218190 - DNA, 20 bp, synthetic construct
  source 1..20: mol_type = other DNA
tctggcgagaggtgatttgc

SEQ ID NO: 218191 - DNA, 20 bp, synthetic construct
  source 1..20: mol_type = other DNA
gtctggcgagaggtgatttg

SEQ ID NO: 218192 - DNA, 20 bp, synthetic construct
  source 1..20: mol_type = other DNA
agtctggcgagaggtgattt

SEQ ID NO: 218193 - DNA, 20 bp, synthetic construct
  source 1..20: mol_type = other DNA
gagtctggcgagaggtgatt

SEQ ID NO: 218194 - DNA, 20 bp, synthetic construct
  source 1..20: mol_type = other DNA
agagtctggcgagaggtgat

SEQ ID NO: 218195 - DNA, 20 bp, synthetic construct
  source 1..20: mol_type = other DNA
gagagtctggcgagaggtga

SEQ ID NO: 218196 - DNA, 20 bp, synthetic construct
  source 1..20: mol_type = other DNA
agagagtctggcgagaggtg

SEQ ID NO: 218197 - DNA, 20 bp, synthetic construct
  source 1..20: mol_type = other DNA
gagagagtctggcgagaggt

SEQ ID NO: 218198 - DNA, 20 bp, synthetic construct
  source 1..20: mol_type = other DNA
ggagagagtctggcgagagg

SEQ ID NO: 218199 - DNA, 20 bp, synthetic construct
  source 1..20: mol_type = other DNA
aggagagagtctggcgagag

SEQ ID NO: 218200 - DNA, 20 bp, synthetic construct
  source 1..20: mol_type = other DNA
gaggagagagtctggcgaga

SEQ ID NO: 218201 - DNA, 20 bp, synthetic construct
  source 1..20: mol_type = other DNA
tgaggagagagtctggcgag

SEQ ID NO: 218202 - DNA, 20 bp, synthetic construct
  source 1..20: mol_type = other DNA
gtgaggagagagtctggcga

SEQ ID NO: 218203 - DNA, 20 bp, synthetic construct
  source 1..20: mol_type = other DNA
agtgaggagagagtctggcg

SEQ ID NO: 218204 - DNA, 20 bp, synthetic construct
  source 1..20: mol_type = other DNA
gagtgaggagagagtctggc

SEQ ID NO: 218205 - DNA, 20 bp, synthetic construct
  source 1..20: mol_type = other DNA
agagtgaggagagagtctgg

SEQ ID NO: 218206 - DNA, 20 bp, synthetic construct
  source 1..20: mol_type = other DNA
gagagtgaggagagagtctg

SEQ ID NO: 218207 - DNA, 20 bp, synthetic construct
  source 1..20: mol_type = other DNA
agagagtgaggagagagtct

SEQ ID NO: 218208 - DNA, 20 bp, synthetic construct
  source 1..20: mol_type = other DNA
gagagagtgaggagagagtc

SEQ ID NO: 218209 - DNA, 20 bp, synthetic construct
  source 1..20: mol_type = other DNA
agagagagtgaggagagagt

SEQ ID NO: 218210 - DNA, 20 bp, synthetic construct
  source 1..20: mol_type = other DNA
cagagagagtgaggagagag

SEQ ID NO: 218211 - DNA, 20 bp, synthetic construct
  source 1..20: mol_type = other DNA
ccagagagagtgaggagaga

SEQ ID NO: 218212 - DNA, 20 bp, synthetic construct
  source 1..20: mol_type = other DNA
cccagagagagtgaggagag

SEQ ID NO: 218213 - DNA, 20 bp, synthetic construct
  source 1..20: mol_type = other DNA
acccagagagagtgaggaga

SEQ ID NO: 218214 - DNA, 20 bp, synthetic construct
  source 1..20: mol_type = other DNA
gacccagagagagtgaggag

SEQ ID NO: 218215 - DNA, 20 bp, synthetic construct
  source 1..20: mol_type = other DNA
ggacccagagagagtgagga

SEQ ID NO: 218216 - DNA, 20 bp, synthetic construct
  source 1..20: mol_type = other DNA
tggacccagagagagtgagg

SEQ ID NO: 218217 - DNA, 20 bp, synthetic construct
  source 1..20: mol_type = other DNA
gtggacccagagagagtgag

SEQ ID NO: 218218 - DNA, 20 bp, synthetic construct
  source 1..20: mol_type = other DNA
agtggacccagagagagtga

SEQ ID NO: 218219 - DNA, 20 bp, synthetic construct
  source 1..20: mol_type = other DNA
tagtggacccagagagagtg

SEQ ID NO: 218220 - DNA, 20 bp, synthetic construct
  source 1..20: mol_type = other DNA
ctagtggacccagagagagt

SEQ ID NO: 218221 - DNA, 20 bp, synthetic construct
  source 1..20: mol_type = other DNA
tctagtggacccagagagag

SEQ ID NO: 218222 - DNA, 20 bp, synthetic construct
  source 1..20: mol_type = other DNA
ctctagtggacccagagaga

SEQ ID NO: 218223 - DNA, 20 bp, synthetic construct
  source 1..20: mol_type = other DNA
cctctagtggacccagagag

SEQ ID NO: 218224 - DNA, 20 bp, synthetic construct
  source 1..20: mol_type = other DNA
acctctagtggacccagaga

SEQ ID NO: 218225 - DNA, 20 bp, synthetic construct
  source 1..20: mol_type = other DNA
aacctctagtggacccagag

SEQ ID NO: 218226 - DNA, 20 bp, synthetic construct
  source 1..20: mol_type = other DNA
gaacctctagtggacccaga

SEQ ID NO: 218227 - DNA, 20 bp, synthetic construct
  source 1..20: mol_type = other DNA
ggaacctctagtggacccag

SEQ ID NO: 218228 - DNA, 20 bp, synthetic construct
  source 1..20: mol_type = other DNA
aggaacctctagtggaccca

SEQ ID NO: 218229 - DNA, 20 bp, synthetic construct
  source 1..20: mol_type = other DNA
gaggaacctctagtggaccc

SEQ ID NO: 218230 - DNA, 20 bp, synthetic construct
  source 1..20: mol_type = other DNA
tgaggaacctctagtggacc

SEQ ID NO: 218231 - DNA, 20 bp, synthetic construct
  source 1..20: mol_type = other DNA
ctgaggaacctctagtggac

SEQ ID NO: 218232 - DNA, 20 bp, synthetic construct
  source 1..20: mol_type = other DNA
gctgaggaacctctagtgga

SEQ ID NO: 218233 - DNA, 20 bp, synthetic construct
  source 1..20: mol_type = other DNA
ggctgaggaacctctagtgg

SEQ ID NO: 218234 - DNA, 20 bp, synthetic construct
  source 1..20: mol_type = other DNA
aggctgaggaacctctagtg

SEQ ID NO: 218235 - DNA, 20 bp, synthetic construct
  source 1..20: mol_type = other DNA
gaggctgaggaacctctagt

SEQ ID NO: 218236 - DNA, 20 bp, synthetic construct
  source 1..20: mol_type = other DNA
agaggctgaggaacctctag

SEQ ID NO: 218237 - DNA, 20 bp, synthetic construct
  source 1..20: mol_type = other DNA
gagaggctgaggaacctcta

SEQ ID NO: 218238 - DNA, 20 bp, synthetic construct
  source 1..20: mol_type = other DNA
agagaggctgaggaacctct

SEQ ID NO: 218239 - DNA, 20 bp, synthetic construct
  source 1..20: mol_type = other DNA
aagagaggctgaggaacctc

SEQ ID NO: 218240 - DNA, 20 bp, synthetic construct
  source 1..20: mol_type = other DNA
aaagagaggctgaggaacct

SEQ ID NO: 218241 - DNA, 20 bp, synthetic construct
  source 1..20: mol_type = other DNA
caaagagaggctgaggaacc

SEQ ID NO: 218242 - DNA, 20 bp, synthetic construct
  source 1..20: mol_type = other DNA
gcaaagagaggctgaggaac

SEQ ID NO: 218243 - DNA, 20 bp, synthetic construct
  source 1..20: mol_type = other DNA
ggcaaagagaggctgaggaa

SEQ ID NO: 218244 - DNA, 20 bp, synthetic construct
  source 1..20: mol_type = other DNA
aggcaaagagaggctgagga

SEQ ID NO: 218245 - DNA, 20 bp, synthetic construct
  source 1..20: mol_type = other DNA
aaggcaaagagaggctgagg

SEQ ID NO: 218246 - DNA, 20 bp, synthetic construct
  source 1..20: mol_type = other DNA
caaggcaaagagaggctgag

SEQ ID NO: 218247 - DNA, 20 bp, synthetic construct
  source 1..20: mol_type = other DNA
ccaaggcaaagagaggctga

SEQ ID NO: 218248 - DNA, 20 bp, synthetic construct
  source 1..20: mol_type = other DNA
accaaggcaaagagaggctg

SEQ ID NO: 218249 - DNA, 20 bp, synthetic construct
  source 1..20: mol_type = other DNA
aaccaaggcaaagagaggct

SEQ ID NO: 218250 - DNA, 20 bp, synthetic construct
  source 1..20: mol_type = other DNA
aaaccaaggcaaagagaggc

SEQ ID NO: 218251 - DNA, 20 bp, synthetic construct
  source 1..20: mol_type = other DNA
aaaaccaaggcaaagagagg

SEQ ID NO: 218252 - DNA, 20 bp, synthetic construct
  source 1..20: mol_type = other DNA
gaaaaccaaggcaaagagag

SEQ ID NO: 218253 - DNA, 20 bp, synthetic construct
  source 1..20: mol_type = other DNA
ggaaaaccaaggcaaagaga

SEQ ID NO: 218254 - DNA, 20 bp, synthetic construct
  source 1..20: mol_type = other DNA
gggaaaaccaaggcaaagag

SEQ ID NO: 218255 - DNA, 20 bp, synthetic construct
  source 1..20: mol_type = other DNA
tgggaaaaccaaggcaaaga

SEQ ID NO: 218256 - DNA, 20 bp, synthetic construct
  source 1..20: mol_type = other DNA
ctgggaaaaccaaggcaaag

SEQ ID NO: 218257 - DNA, 20 bp, synthetic construct
  source 1..20: mol_type = other DNA
gctgggaaaaccaaggcaaa

SEQ ID NO: 218258 - DNA, 20 bp, synthetic construct
  source 1..20: mol_type = other DNA
agctgggaaaaccaaggcaa

SEQ ID NO: 218259 - DNA, 20 bp, synthetic construct
  source 1..20: mol_type = other DNA
cagctgggaaaaccaaggca

SEQ ID NO: 218260 - DNA, 20 bp, synthetic construct
  source 1..20: mol_type = other DNA
acagctgggaaaaccaaggc

SEQ ID NO: 218261 - DNA, 20 bp, synthetic construct
  source 1..20: mol_type = other DNA
tacagctgggaaaaccaagg

SEQ ID NO: 218262 - DNA, 20 bp, synthetic construct
  source 1..20: mol_type = other DNA
ttacagctgggaaaaccaag

SEQ ID NO: 218263 - DNA, 20 bp, synthetic construct
  source 1..20: mol_type = other DNA
tttacagctgggaaaaccaa

SEQ ID NO: 218264 - DNA, 20 bp, synthetic construct
  source 1..20: mol_type = other DNA
ttttacagctgggaaaacca

SEQ ID NO: 218265 - DNA, 20 bp, synthetic construct
  source 1..20: mol_type = other DNA
attttacagctgggaaaacc

SEQ ID NO: 218266 - DNA, 20 bp, synthetic construct
  source 1..20: mol_type = other DNA
cattttacagctgggaaaac

SEQ ID NO: 218267 - DNA, 20 bp, synthetic construct
  source 1..20: mol_type = other DNA
ccattttacagctgggaaaa

SEQ ID NO: 218268 - DNA, 20 bp, synthetic construct
  source 1..20: mol_type = other DNA
tccattttacagctgggaaa

SEQ ID NO: 218269 - DNA, 20 bp, synthetic construct
  source 1..20: mol_type = other DNA
ctccattttacagctgggaa

SEQ ID NO: 218270 - DNA, 20 bp, synthetic construct
  source 1..20: mol_type = other DNA
gctccattttacagctggga

SEQ ID NO: 218271 - DNA, 20 bp, synthetic construct
  source 1..20: mol_type = other DNA
tgctccattttacagctggg

SEQ ID NO: 218272 - DNA, 20 bp, synthetic construct
  source 1..20: mol_type = other DNA
ttgctccattttacagctgg

SEQ ID NO: 218273 - DNA, 20 bp, synthetic construct
  source 1..20: mol_type = other DNA
tttgctccattttacagctg

SEQ ID NO: 218274 - DNA, 20 bp, synthetic construct
  source 1..20: mol_type = other DNA
ctttgctccattttacagct

SEQ ID NO: 218275 - DNA, 20 bp, synthetic construct
  source 1..20: mol_type = other DNA
tctttgctccattttacagc

SEQ ID NO: 218276 - DNA, 20 bp, synthetic construct
  source 1..20: mol_type = other DNA
ctctttgctccattttacag

SEQ ID NO: 218277 - DNA, 20 bp, synthetic construct
  source 1..20: mol_type = other DNA
cctctttgctccattttaca

SEQ ID NO: 218278 - DNA, 20 bp, synthetic construct
  source 1..20: mol_type = other DNA
ccctctttgctccattttac

SEQ ID NO: 218279 - DNA, 20 bp, synthetic construct
  source 1..20: mol_type = other DNA
gccctctttgctccatttta

SEQ ID NO: 218280 - DNA, 20 bp, synthetic construct
  source 1..20: mol_type = other DNA
ggccctctttgctccatttt

SEQ ID NO: 218281 - DNA, 20 bp, synthetic construct
  source 1..20: mol_type = other DNA
aggccctctttgctccattt

SEQ ID NO: 218282 - DNA, 20 bp, synthetic construct
  source 1..20: mol_type = other DNA
taggccctctttgctccatt

SEQ ID NO: 218283 - DNA, 20 bp, synthetic construct
  source 1..20: mol_type = other DNA
ataggccctctttgctccat

SEQ ID NO: 218284 - DNA, 20 bp, synthetic construct
  source 1..20: mol_type = other DNA
cataggccctctttgctcca

SEQ ID NO: 218285 - DNA, 20 bp, synthetic construct
  source 1..20: mol_type = other DNA
acataggccctctttgctcc

SEQ ID NO: 218286 - DNA, 20 bp, synthetic construct
  source 1..20: mol_type = other DNA
tacataggccctctttgctc

SEQ ID NO: 218287 - DNA, 20 bp, synthetic construct
  source 1..20: mol_type = other DNA
gtacataggccctctttgct

SEQ ID NO: 218288 - DNA, 20 bp, synthetic construct
  source 1..20: mol_type = other DNA
ggtacataggccctctttgc

SEQ ID NO: 218289 - DNA, 20 bp, synthetic construct
  source 1..20: mol_type = other DNA
gggtacataggccctctttg

SEQ ID NO: 218290 - DNA, 20 bp, synthetic construct
  source 1..20: mol_type = other DNA
tgggtacataggccctcttt

SEQ ID NO: 218291 - DNA, 20 bp, synthetic construct
  source 1..20: mol_type = other DNA
gtgggtacataggccctctt

SEQ ID NO: 218292 - DNA, 20 bp, synthetic construct
  source 1..20: mol_type = other DNA
tgtgggtacataggccctct

SEQ ID NO: 218293 - DNA, 20 bp, synthetic construct
  source 1..20: mol_type = other DNA
ttgtgggtacataggccctc

SEQ ID NO: 218294 - DNA, 20 bp, synthetic construct
  source 1..20: mol_type = other DNA
tttgtgggtacataggccct

SEQ ID NO: 218295 - DNA, 20 bp, synthetic construct
  source 1..20: mol_type = other DNA
ctttgtgggtacataggccc

SEQ ID NO: 218296 - DNA, 20 bp, synthetic construct
  source 1..20: mol_type = other DNA
cctttgtgggtacataggcc

SEQ ID NO: 218297 - DNA, 20 bp, synthetic construct
  source 1..20: mol_type = other DNA
acctttgtgggtacataggc

SEQ ID NO: 218298 - DNA, 20 bp, synthetic construct
  source 1..20: mol_type = other DNA
cacctttgtgggtacatagg

SEQ ID NO: 218299 - DNA, 20 bp, synthetic construct
  source 1..20: mol_type = other DNA
acacctttgtgggtacatag

SEQ ID NO: 218300 - DNA, 20 bp, synthetic construct
  source 1..20: mol_type = other DNA
cacacctttgtgggtacata

SEQ ID NO: 218301 - DNA, 20 bp, synthetic construct
  source 1..20: mol_type = other DNA
ccacacctttgtgggtacat

SEQ ID NO: 218302 - DNA, 20 bp, synthetic construct
  source 1..20: mol_type = other DNA
accacacctttgtgggtaca

SEQ ID NO: 218303 - DNA, 20 bp, synthetic construct
  source 1..20: mol_type = other DNA
aaccacacctttgtgggtac

SEQ ID NO: 218304 - DNA, 20 bp, synthetic construct
  source 1..20: mol_type = other DNA
caaccacacctttgtgggta

SEQ ID NO: 218305 - DNA, 20 bp, synthetic construct
  source 1..20: mol_type = other DNA
ccaaccacacctttgtgggt

SEQ ID NO: 218306 - DNA, 20 bp, synthetic construct
  source 1..20: mol_type = other DNA
tccaaccacacctttgtggg

SEQ ID NO: 218307 - DNA, 20 bp, synthetic construct
  source 1..20: mol_type = other DNA
ctccaaccacacctttgtgg

SEQ ID NO: 218308 - DNA, 20 bp, synthetic construct
  source 1..20: mol_type = other DNA
gctccaaccacacctttgtg

SEQ ID NO: 218309 - DNA, 20 bp, synthetic construct
  source 1..20: mol_type = other DNA
cgctccaaccacacctttgt

SEQ ID NO: 218310 - DNA, 20 bp, synthetic construct
  source 1..20: mol_type = other DNA
tcgctccaaccacacctttg

SEQ ID NO: 218311 - DNA, 20 bp, synthetic construct
  source 1..20: mol_type = other DNA
gtcgctccaaccacaccttt

SEQ ID NO: 218312 - DNA, 20 bp, synthetic construct
  source 1..20: mol_type = other DNA
agtcgctccaaccacacctt

SEQ ID NO: 218313 - DNA, 20 bp, synthetic construct
  source 1..20: mol_type = other DNA
gagtcgctccaaccacacct

SEQ ID NO: 218314 - DNA, 20 bp, synthetic construct
  source 1..20: mol_type = other DNA
ggagtcgctccaaccacacc

SEQ ID NO: 218315 - DNA, 20 bp, synthetic construct
  source 1..20: mol_type = other DNA
aggagtcgctccaaccacac

SEQ ID NO: 218316 - DNA, 20 bp, synthetic construct
  source 1..20: mol_type = other DNA
gaggagtcgctccaaccaca

SEQ ID NO: 218317 - DNA, 20 bp, synthetic construct
  source 1..20: mol_type = other DNA
ggaggagtcgctccaaccac

SEQ ID NO: 218318 - DNA, 20 bp, synthetic construct
  source 1..20: mol_type = other DNA
aggaggagtcgctccaacca

SEQ ID NO: 218319 - DNA, 20 bp, synthetic construct
  source 1..20: mol_type = other DNA
taggaggagtcgctccaacc

SEQ ID NO: 218320 - DNA, 20 bp, synthetic construct
  source 1..20: mol_type = other DNA
gtaggaggagtcgctccaac

SEQ ID NO: 218321 - DNA, 20 bp, synthetic construct
  source 1..20: mol_type = other DNA
tgtaggaggagtcgctccaa

SEQ ID NO: 218322 - DNA, 20 bp, synthetic construct
  source 1..20: mol_type = other DNA
atgtaggaggagtcgctcca

SEQ ID NO: 218323 - DNA, 20 bp, synthetic construct
  source 1..20: mol_type = other DNA
aatgtaggaggagtcgctcc

SEQ ID NO: 218324 - DNA, 20 bp, synthetic construct
  source 1..20: mol_type = other DNA
taatgtaggaggagtcgctc

SEQ ID NO: 218325 - DNA, 20 bp, synthetic construct
  source 1..20: mol_type = other DNA
ctaatgtaggaggagtcgct

SEQ ID NO: 218326 - DNA, 20 bp, synthetic construct
  source 1..20: mol_type = other DNA
cctaatgtaggaggagtcgc

SEQ ID NO: 218327 - DNA, 20 bp, synthetic construct
  source 1..20: mol_type = other DNA
ccctaatgtaggaggagtcg

SEQ ID NO: 218328 - DNA, 20 bp, synthetic construct
  source 1..20: mol_type = other DNA
gccctaatgtaggaggagtc

SEQ ID NO: 218329 - DNA, 20 bp, synthetic construct
  source 1..20: mol_type = other DNA
ggccctaatgtaggaggagt

SEQ ID NO: 218330 - DNA, 20 bp, synthetic construct
  source 1..20: mol_type = other DNA
aggccctaatgtaggaggag

SEQ ID NO: 218331 - DNA, 20 bp, synthetic construct
  source 1..20: mol_type = other DNA
gaggccctaatgtaggagga

SEQ ID NO: 218332 - DNA, 20 bp, synthetic construct
  source 1..20: mol_type = other DNA
cgaggccctaatgtaggagg

SEQ ID NO: 218333 - DNA, 20 bp, synthetic construct
  source 1..20: mol_type = other DNA
tcgaggccctaatgtaggag

SEQ ID NO: 218334 - DNA, 20 bp, synthetic construct
  source 1..20: mol_type = other DNA
ctcgaggccctaatgtagga

SEQ ID NO: 218335 - DNA, 20 bp, synthetic construct
  source 1..20: mol_type = other DNA
actcgaggccctaatgtagg

SEQ ID NO: 218336 - DNA, 20 bp, synthetic construct
  source 1..20: mol_type = other DNA
cactcgaggccctaatgtag

SEQ ID NO: 218337 - DNA, 20 bp, synthetic construct
  source 1..20: mol_type = other DNA
ccactcgaggccctaatgta

SEQ ID NO: 218338 - DNA, 20 bp, synthetic construct
  source 1..20: mol_type = other DNA
cccactcgaggccctaatgt

SEQ ID NO: 218339 - DNA, 20 bp, synthetic construct
  source 1..20: mol_type = other DNA
ccccactcgaggccctaatg

SEQ ID NO: 218340 - DNA, 20 bp, synthetic construct
  source 1..20: mol_type = other DNA
gccccactcgaggccctaat

SEQ ID NO: 218341 - DNA, 20 bp, synthetic construct
  source 1..20: mol_type = other DNA
agccccactcgaggccctaa

SEQ ID NO: 218342 - DNA, 20 bp, synthetic construct
  source 1..20: mol_type = other DNA
aagccccactcgaggcccta

SEQ ID NO: 218343 - DNA, 20 bp, synthetic construct
  source 1..20: mol_type = other DNA
gaagccccactcgaggccct

SEQ ID NO: 218344 - DNA, 20 bp, synthetic construct
  source 1..20: mol_type = other DNA
tgaagccccactcgaggccc

SEQ ID NO: 218345 - DNA, 20 bp, synthetic construct
  source 1..20: mol_type = other DNA
atgaagccccactcgaggcc

SEQ ID NO: 218346 - DNA, 20 bp, synthetic construct
  source 1..20: mol_type = other DNA
catgaagccccactcgaggc

SEQ ID NO: 218347 - DNA, 20 bp, synthetic construct
  source 1..20: mol_type = other DNA
tcatgaagccccactcgagg

SEQ ID NO: 218348 - DNA, 20 bp, synthetic construct
  source 1..20: mol_type = other DNA
atcatgaagccccactcgag

SEQ ID NO: 218349 - DNA, 20 bp, synthetic construct
  source 1..20: mol_type = other DNA
aatcatgaagccccactcga

SEQ ID NO: 218350 - DNA, 20 bp, synthetic construct
  source 1..20: mol_type = other DNA
caatcatgaagccccactcg

SEQ ID NO: 218351 - DNA, 20 bp, synthetic construct
  source 1..20: mol_type = other DNA
ccaatcatgaagccccactc

SEQ ID NO: 218352 - DNA, 20 bp, synthetic construct
  source 1..20: mol_type = other DNA
accaatcatgaagccccact

SEQ ID NO: 218353 - DNA, 20 bp, synthetic construct
  source 1..20: mol_type = other DNA
aaccaatcatgaagccccac

SEQ ID NO: 218354 - DNA, 20 bp, synthetic construct
  source 1..20: mol_type = other DNA
caaccaatcatgaagcccca

SEQ ID NO: 218355 - DNA, 20 bp, synthetic construct
  source 1..20: mol_type = other DNA
ccaaccaatcatgaagcccc

SEQ ID NO: 218356 - DNA, 20 bp, synthetic construct
  source 1..20: mol_type = other DNA
accaaccaatcatgaagccc

SEQ ID NO: 218357 - DNA, 20 bp, synthetic construct
  source 1..20: mol_type = other DNA
caccaaccaatcatgaagcc

SEQ ID NO: 218358 - DNA, 20 bp, synthetic construct
  source 1..20: mol_type = other DNA
ccaccaaccaatcatgaagc

SEQ ID NO: 218359 - DNA, 20 bp, synthetic construct
  source 1..20: mol_type = other DNA
tccaccaaccaatcatgaag

SEQ ID NO: 218360 - DNA, 20 bp, synthetic construct
  source 1..20: mol_type = other DNA
ctccaccaaccaatcatgaa

SEQ ID NO: 218361 - DNA, 20 bp, synthetic construct
  source 1..20: mol_type = other DNA
cctccaccaaccaatcatga

SEQ ID NO: 218362 - DNA, 20 bp, synthetic construct
  source 1..20: mol_type = other DNA
acctccaccaaccaatcatg

SEQ ID NO: 218363 - DNA, 20 bp, synthetic construct
  source 1..20: mol_type = other DNA
gacctccaccaaccaatcat

SEQ ID NO: 218364 - DNA, 20 bp, synthetic construct
  source 1..20: mol_type = other DNA
agacctccaccaaccaatca

SEQ ID NO: 218365 - DNA, 20 bp, synthetic construct
  source 1..20: mol_type = other DNA
gagacctccaccaaccaatc

SEQ ID NO: 218366 - DNA, 20 bp, synthetic construct
  source 1..20: mol_type = other DNA
ggagacctccaccaaccaat

SEQ ID NO: 218367 - DNA, 20 bp, synthetic construct
  source 1..20: mol_type = other DNA
tggagacctccaccaaccaa

SEQ ID NO: 218368 - DNA, 20 bp, synthetic construct
  source 1..20: mol_type = other DNA
ttggagacctccaccaacca

SEQ ID NO: 218369 - DNA, 20 bp, synthetic construct
  source 1..20: mol_type = other DNA
tttggagacctccaccaacc

SEQ ID NO: 218370 - DNA, 20 bp, synthetic construct
  source 1..20: mol_type = other DNA
gtttggagacctccaccaac

SEQ ID NO: 218371 - DNA, 20 bp, synthetic construct
  source 1..20: mol_type = other DNA
ggtttggagacctccaccaa

SEQ ID NO: 218372 - DNA, 20 bp, synthetic construct
  source 1..20: mol_type = other DNA
gggtttggagacctccacca

SEQ ID NO: 218373 - DNA, 20 bp, synthetic construct
  source 1..20: mol_type = other DNA
tgggtttggagacctccacc

SEQ ID NO: 218374 - DNA, 20 bp, synthetic construct
  source 1..20: mol_type = other DNA
gtgggtttggagacctccac

SEQ ID NO: 218375 - DNA, 20 bp, synthetic construct
  source 1..20: mol_type = other DNA
ggtgggtttggagacctcca

SEQ ID NO: 218376 - DNA, 20 bp, synthetic construct
  source 1..20: mol_type = other DNA
gggtgggtttggagacctcc

SEQ ID NO: 218377 - DNA, 20 bp, synthetic construct
  source 1..20: mol_type = other DNA
tgggtgggtttggagacctc

SEQ ID NO: 218378 - DNA, 20 bp, synthetic construct
  source 1..20: mol_type = other DNA
ctgggtgggtttggagacct

SEQ ID NO: 218379 - DNA, 20 bp, synthetic construct
  source 1..20: mol_type = other DNA
actgggtgggtttggagacc

SEQ ID NO: 218380 - DNA, 20 bp, synthetic construct
  source 1..20: mol_type = other DNA
cactgggtgggtttggagac

SEQ ID NO: 218381 - DNA, 20 bp, synthetic construct
  source 1..20: mol_type = other DNA
gcactgggtgggtttggaga

SEQ ID NO: 218382 - DNA, 20 bp, synthetic construct
  source 1..20: mol_type = other DNA
ggcactgggtgggtttggag

SEQ ID NO: 218383 - DNA, 20 bp, synthetic construct
  source 1..20: mol_type = other DNA
tggcactgggtgggtttgga

SEQ ID NO: 218384 - DNA, 20 bp, synthetic construct
  source 1..20: mol_type = other DNA
gtggcactgggtgggtttgg

SEQ ID NO: 218385 - DNA, 20 bp, synthetic construct
  source 1..20: mol_type = other DNA
ggtggcactgggtgggtttg

SEQ ID NO: 218386 - DNA, 20 bp, synthetic construct
  source 1..20: mol_type = other DNA
cggtggcactgggtgggttt

SEQ ID NO: 218387 - DNA, 20 bp, synthetic construct
  source 1..20: mol_type = other DNA
tcggtggcactgggtgggtt

SEQ ID NO: 218388 - DNA, 20 bp, synthetic construct
  source 1..20: mol_type = other DNA
ttcggtggcactgggtgggt

SEQ ID NO: 218389 - DNA, 20 bp, synthetic construct
  source 1..20: mol_type = other DNA
cttcggtggcactgggtggg

SEQ ID NO: 218390 - DNA, 20 bp, synthetic construct
  source 1..20: mol_type = other DNA
ccttcggtggcactgggtgg

SEQ ID NO: 218391 - DNA, 20 bp, synthetic construct
  source 1..20: mol_type = other DNA
gccttcggtggcactgggtg

SEQ ID NO: 218392 - DNA, 20 bp, synthetic construct
  source 1..20: mol_type = other DNA
agccttcggtggcactgggt

SEQ ID NO: 218393 - DNA, 20 bp, synthetic construct
  source 1..20: mol_type = other DNA
cagccttcggtggcactggg

SEQ ID NO: 218394 - DNA, 20 bp, synthetic construct
  source 1..20: mol_type = other DNA
tcagccttcggtggcactgg

SEQ ID NO: 218395 - DNA, 20 bp, synthetic construct
  source 1..20: mol_type = other DNA
ctcagccttcggtggcactg

SEQ ID NO: 218396 - DNA, 20 bp, synthetic construct
  source 1..20: mol_type = other DNA
tctcagccttcggtggcact

SEQ ID NO: 218397 - DNA, 20 bp, synthetic construct
  source 1..20: mol_type = other DNA
gtctcagccttcggtggcac

SEQ ID NO: 218398 - DNA, 20 bp, synthetic construct
  source 1..20: mol_type = other DNA
agtctcagccttcggtggca

SEQ ID NO: 218399 - DNA, 20 bp, synthetic construct
  source 1..20: mol_type = other DNA
cagtctcagccttcggtggc

SEQ ID NO: 218400 - DNA, 20 bp, synthetic construct
  source 1..20: mol_type = other DNA
gcagtctcagccttcggtgg

SEQ ID NO: 218401 - DNA, 20 bp, synthetic construct
  source 1..20: mol_type = other DNA
tgcagtctcagccttcggtg

SEQ ID NO: 218402 - DNA, 20 bp, synthetic construct
  source 1..20: mol_type = other DNA
ctgcagtctcagccttcggt

SEQ ID NO: 218403 - DNA, 20 bp, synthetic construct
  source 1..20: mol_type = other DNA
tctgcagtctcagccttcgg

SEQ ID NO: 218404 - DNA, 20 bp, synthetic construct
  source 1..20: mol_type = other DNA
atctgcagtctcagccttcg

SEQ ID NO: 218405 - DNA, 20 bp, synthetic construct
  source 1..20: mol_type = other DNA
catctgcagtctcagccttc

SEQ ID NO: 218406 - DNA, 20 bp, synthetic construct
  source 1..20: mol_type = other DNA
gcatctgcagtctcagcctt

SEQ ID NO: 218407 - DNA, 20 bp, synthetic construct
  source 1..20: mol_type = other DNA
tgcatctgcagtctcagcct

SEQ ID NO: 218408 - DNA, 20 bp, synthetic construct
  source 1..20: mol_type = other DNA
ttgcatctgcagtctcagcc

SEQ ID NO: 218409 - DNA, 20 bp, synthetic construct
  source 1..20: mol_type = other DNA
attgcatctgcagtctcagc

SEQ ID NO: 218410 - DNA, 20 bp, synthetic construct
  source 1..20: mol_type = other DNA
cattgcatctgcagtctcag

SEQ ID NO: 218411 - DNA, 20 bp, synthetic construct
  source 1..20: mol_type = other DNA
gcattgcatctgcagtctca

SEQ ID NO: 218412 - DNA, 20 bp, synthetic construct
  source 1..20: mol_type = other DNA
ggcattgcatctgcagtctc

SEQ ID NO: 218413 - DNA, 20 bp, synthetic construct
  source 1..20: mol_type = other DNA
tggcattgcatctgcagtct

SEQ ID NO: 218414 - DNA, 20 bp, synthetic construct
  source 1..20: mol_type = other DNA
gtggcattgcatctgcagtc

SEQ ID NO: 218415 - DNA, 20 bp, synthetic construct
  source 1..20: mol_type = other DNA
tgtggcattgcatctgcagt

SEQ ID NO: 218416 - DNA, 20 bp, synthetic construct
  source 1..20: mol_type = other DNA
ctgtggcattgcatctgcag

SEQ ID NO: 218417 - DNA, 20 bp, synthetic construct
  source 1..20: mol_type = other DNA
cctgtggcattgcatctgca

SEQ ID NO: 218418 - DNA, 20 bp, synthetic construct
  source 1..20: mol_type = other DNA
acctgtggcattgcatctgc

SEQ ID NO: 218419 - DNA, 20 bp, synthetic construct
  source 1..20: mol_type = other DNA
cacctgtggcattgcatctg

SEQ ID NO: 218420 - DNA, 20 bp, synthetic construct
  source 1..20: mol_type = other DNA
acacctgtggcattgcatct

SEQ ID NO: 218421 - DNA, 20 bp, synthetic construct
  source 1..20: mol_type = other DNA
gacacctgtggcattgcatc

SEQ ID NO: 218422 - DNA, 20 bp, synthetic construct
  source 1..20: mol_type = other DNA
ggacacctgtggcattgcat

SEQ ID NO: 218423 - DNA, 20 bp, synthetic construct
  source 1..20: mol_type = other DNA
aggacacctgtggcattgca

SEQ ID NO: 218424 - DNA, 20 bp, synthetic construct
  source 1..20: mol_type = other DNA
aaggacacctgtggcattgc

SEQ ID NO: 218425 - DNA, 20 bp, synthetic construct
  source 1..20: mol_type = other DNA
gaaggacacctgtggcattg

SEQ ID NO: 218426 - DNA, 20 bp, synthetic construct
  source 1..20: mol_type = other DNA
ggaaggacacctgtggcatt

SEQ ID NO: 218427 - DNA, 20 bp, synthetic construct
  source 1..20: mol_type = other DNA
aggaaggacacctgtggcat

SEQ ID NO: 218428 - DNA, 20 bp, synthetic construct
  source 1..20: mol_type = other DNA
gaggaaggacacctgtggca

SEQ ID NO: 218429 - DNA, 20 bp, synthetic construct
  source 1..20: mol_type = other DNA
tgaggaaggacacctgtggc

SEQ ID NO: 218430 - DNA, 20 bp, synthetic construct
  source 1..20: mol_type = other DNA
ctgaggaaggacacctgtgg

SEQ ID NO: 218431 - DNA, 20 bp, synthetic construct
  source 1..20: mol_type = other DNA
gctgaggaaggacacctgtg

SEQ ID NO: 218432 - DNA, 20 bp, synthetic construct
  source 1..20: mol_type = other DNA
ggctgaggaaggacacctgt

SEQ ID NO: 218433 - DNA, 20 bp, synthetic construct
  source 1..20: mol_type = other DNA
aggctgaggaaggacacctg

SEQ ID NO: 218434 - DNA, 20 bp, synthetic construct
  source 1..20: mol_type = other DNA
caggctgaggaaggacacct

SEQ ID NO: 218435 - DNA, 20 bp, synthetic construct
  source 1..20: mol_type = other DNA
ccaggctgaggaaggacacc

SEQ ID NO: 218436 - DNA, 20 bp, synthetic construct
  source 1..20: mol_type = other DNA
cccaggctgaggaaggacac

SEQ ID NO: 218437 - DNA, 20 bp, synthetic construct
  source 1..20: mol_type = other DNA
gcccaggctgaggaaggaca

SEQ ID NO: 218438 - DNA, 20 bp, synthetic construct
  source 1..20: mol_type = other DNA
tgcccaggctgaggaaggac

SEQ ID NO: 218439 - DNA, 20 bp, synthetic construct
  source 1..20: mol_type = other DNA
ctgcccaggctgaggaagga

SEQ ID NO: 218440 - DNA, 20 bp, synthetic construct
  source 1..20: mol_type = other DNA
gctgcccaggctgaggaagg

SEQ ID NO: 218441 - DNA, 20 bp, synthetic construct
  source 1..20: mol_type = other DNA
agctgcccaggctgaggaag

SEQ ID NO: 218442 - DNA, 20 bp, synthetic construct
  source 1..20: mol_type = other DNA
cagctgcccaggctgaggaa

SEQ ID NO: 218443 - DNA, 20 bp, synthetic construct
  source 1..20: mol_type = other DNA
tcagctgcccaggctgagga

SEQ ID NO: 218444 - DNA, 20 bp, synthetic construct
  source 1..20: mol_type = other DNA
ttcagctgcccaggctgagg

SEQ ID NO: 218445 - DNA, 20 bp, synthetic construct
  source 1..20: mol_type = other DNA
gttcagctgcccaggctgag

SEQ ID NO: 218446 - DNA, 20 bp, synthetic construct
  source 1..20: mol_type = other DNA
tgttcagctgcccaggctga

SEQ ID NO: 218447 - DNA, 20 bp, synthetic construct
  source 1..20: mol_type = other DNA
atgttcagctgcccaggctg

SEQ ID NO: 218448 - DNA, 20 bp, synthetic construct
  source 1..20: mol_type = other DNA
gatgttcagctgcccaggct

SEQ ID NO: 218449 - DNA, 20 bp, synthetic construct
  source 1..20: mol_type = other DNA
tgatgttcagctgcccaggc

SEQ ID NO: 218450 - DNA, 20 bp, synthetic construct
  source 1..20: mol_type = other DNA
atgatgttcagctgcccagg

SEQ ID NO: 218451 - DNA, 20 bp, synthetic construct
  source 1..20: mol_type = other DNA
catgatgttcagctgcccag

SEQ ID NO: 218452 - DNA, 20 bp, synthetic construct
  source 1..20: mol_type = other DNA
acatgatgttcagctgccca

SEQ ID NO: 218453 - DNA, 20 bp, synthetic construct
  source 1..20: mol_type = other DNA
cacatgatgttcagctgccc

SEQ ID NO: 218454 - DNA, 20 bp, synthetic construct
  source 1..20: mol_type = other DNA
acacatgatgttcagctgcc

SEQ ID NO: 218455 - DNA, 20 bp, synthetic construct
  source 1..20: mol_type = other DNA
tacacatgatgttcagctgc

SEQ ID NO: 218456 - DNA, 20 bp, synthetic construct
  source 1..20: mol_type = other DNA
ttacacatgatgttcagctg

SEQ ID NO: 218457 - DNA, 20 bp, synthetic construct
  source 1..20: mol_type = other DNA
tttacacatgatgttcagct

SEQ ID NO: 218458 - DNA, 20 bp, synthetic construct
  source 1..20: mol_type = other DNA
ttttacacatgatgttcagc

SEQ ID NO: 218459 - DNA, 20 bp, synthetic construct
  source 1..20: mol_type = other DNA
gttttacacatgatgttcag

SEQ ID NO: 218460 - DNA, 20 bp, synthetic construct
  source 1..20: mol_type = other DNA
cgttttacacatgatgttca

SEQ ID NO: 218461 - DNA, 20 bp, synthetic construct
  source 1..20: mol_type = other DNA
ccgttttacacatgatgttc

SEQ ID NO: 218462 - DNA, 20 bp, synthetic construct
  source 1..20: mol_type = other DNA
cccgttttacacatgatgtt

SEQ ID NO: 218463 - DNA, 20 bp, synthetic construct
  source 1..20: mol_type = other DNA
ccccgttttacacatgatgt

SEQ ID NO: 218464 - DNA, 20 bp, synthetic construct
  source 1..20: mol_type = other DNA
tccccgttttacacatgatg

SEQ ID NO: 218465 - DNA, 20 bp, synthetic construct
  source 1..20: mol_type = other DNA
atccccgttttacacatgat

SEQ ID NO: 218466 - DNA, 20 bp, synthetic construct
  source 1..20: mol_type = other DNA
tatccccgttttacacatga

SEQ ID NO: 218467 - DNA, 20 bp, synthetic construct
  source 1..20: mol_type = other DNA
ttatccccgttttacacatg

SEQ ID NO: 218468 - DNA, 20 bp, synthetic construct
  source 1..20: mol_type = other DNA
attatccccgttttacacat

SEQ ID NO: 218469 - DNA, 20 bp, synthetic construct
  source 1..20: mol_type = other DNA
tattatccccgttttacaca

SEQ ID NO: 218470 - DNA, 20 bp, synthetic construct
  source 1..20: mol_type = other DNA
ttattatccccgttttacac

SEQ ID NO: 218471 - DNA, 20 bp, synthetic construct
  source 1..20: mol_type = other DNA
cttattatccccgttttaca

SEQ ID NO: 218472 - DNA, 20 bp, synthetic construct
  source 1..20: mol_type = other DNA
tcttattatccccgttttac

SEQ ID NO: 218473 - DNA, 20 bp, synthetic construct
  source 1..20: mol_type = other DNA
atcttattatccccgtttta

SEQ ID NO: 218474 - DNA, 20 bp, synthetic construct
  source 1..20: mol_type = other DNA
tatcttattatccccgtttt

SEQ ID NO: 218475 - DNA, 20 bp, synthetic construct
  source 1..20: mol_type = other DNA
ttatcttattatccccgttt

SEQ ID NO: 218476 - DNA, 20 bp, synthetic construct
  source 1..20: mol_type = other DNA
attatcttattatccccgtt

SEQ ID NO: 218477 - DNA, 20 bp, synthetic construct
  source 1..20: mol_type = other DNA
tattatcttattatccccgt

SEQ ID NO: 218478 - DNA, 20 bp, synthetic construct
  source 1..20: mol_type = other DNA
ttattatcttattatccccg

SEQ ID NO: 218479 - DNA, 20 bp, synthetic construct
  source 1..20: mol_type = other DNA
gttattatcttattatcccc

SEQ ID NO: 218480 - DNA, 20 bp, synthetic construct
  source 1..20: mol_type = other DNA
tgttattatcttattatccc

SEQ ID NO: 218481 - DNA, 20 bp, synthetic construct
  source 1..20: mol_type = other DNA
ctgttattatcttattatcc

SEQ ID NO: 218482 - DNA, 20 bp, synthetic construct
  source 1..20: mol_type = other DNA
gctgttattatcttattatc

SEQ ID NO: 218483 - DNA, 20 bp, synthetic construct
  source 1..20: mol_type = other DNA
ggctgttattatcttattat

SEQ ID NO: 218484 - DNA, 20 bp, synthetic construct
  source 1..20: mol_type = other DNA
gggctgttattatcttatta

SEQ ID NO: 218485 - DNA, 20 bp, synthetic construct
  source 1..20: mol_type = other DNA
ggggctgttattatcttatt

SEQ ID NO: 218486 - DNA, 20 bp, synthetic construct
  source 1..20: mol_type = other DNA
aggggctgttattatcttat

SEQ ID NO: 218487 - DNA, 20 bp, synthetic construct
  source 1..20: mol_type = other DNA
aaggggctgttattatctta

SEQ ID NO: 218488 - DNA, 20 bp, synthetic construct
  source 1..20: mol_type = other DNA
caaggggctgttattatctt

SEQ ID NO: 218489 - DNA, 20 bp, synthetic construct
  source 1..20: mol_type = other DNA
gcaaggggctgttattatct

SEQ ID NO: 218490 - DNA, 20 bp, synthetic construct
  source 1..20: mol_type = other DNA
tgcaaggggctgttattatc

SEQ ID NO: 218491 - DNA, 20 bp, synthetic construct
  source 1..20: mol_type = other DNA
gtgcaaggggctgttattat

SEQ ID NO: 218492 - DNA, 20 bp, synthetic construct
  source 1..20: mol_type = other DNA
ggtgcaaggggctgttatta

SEQ ID NO: 218493 - DNA, 20 bp, synthetic construct
  source 1..20: mol_type = other DNA
aggtgcaaggggctgttatt

SEQ ID NO: 218494 - DNA, 20 bp, synthetic construct
  source 1..20: mol_type = other DNA
taggtgcaaggggctgttat

SEQ ID NO: 218495 - DNA, 20 bp, synthetic construct
  source 1..20: mol_type = other DNA
ataggtgcaaggggctgtta

SEQ ID NO: 218496 - DNA, 20 bp, synthetic construct
  source 1..20: mol_type = other DNA
cataggtgcaaggggctgtt

SEQ ID NO: 218497 - DNA, 20 bp, synthetic construct
  source 1..20: mol_type = other DNA
acataggtgcaaggggctgt

SEQ ID NO: 218498 - DNA, 20 bp, synthetic construct
  source 1..20: mol_type = other DNA
cacataggtgcaaggggctg

SEQ ID NO: 218499 - DNA, 20 bp, synthetic construct
  source 1..20: mol_type = other DNA
ccacataggtgcaaggggct

SEQ ID NO: 218500 - DNA, 20 bp, synthetic construct
  source 1..20: mol_type = other DNA
gccacataggtgcaaggggc

SEQ ID NO: 218501 - DNA, 20 bp, synthetic construct
  source 1..20: mol_type = other DNA
agccacataggtgcaagggg

SEQ ID NO: 218502 - DNA, 20 bp, synthetic construct
  source 1..20: mol_type = other DNA
cagccacataggtgcaaggg

SEQ ID NO: 218503 - DNA, 20 bp, synthetic construct
  source 1..20: mol_type = other DNA
acagccacataggtgcaagg

SEQ ID NO: 218504 - DNA, 20 bp, synthetic construct
  source 1..20: mol_type = other DNA
cacagccacataggtgcaag

SEQ ID NO: 218505 - DNA, 20 bp, synthetic construct
  source 1..20: mol_type = other DNA
tcacagccacataggtgcaa

SEQ ID NO: 218506 - DNA, 20 bp, synthetic construct
  source 1..20: mol_type = other DNA
ctcacagccacataggtgca

SEQ ID NO: 218507 - DNA, 20 bp, synthetic construct
  source 1..20: mol_type = other DNA
cctcacagccacataggtgc

SEQ ID NO: 218508 - DNA, 20 bp, synthetic construct
  source 1..20: mol_type = other DNA
tcctcacagccacataggtg

SEQ ID NO: 218509 - DNA, 20 bp, synthetic construct
  source 1..20: mol_type = other DNA
atcctcacagccacataggt

SEQ ID NO: 218510 - DNA, 20 bp, synthetic construct
  source 1..20: mol_type = other DNA
aatcctcacagccacatagg

SEQ ID NO: 218511 - DNA, 20 bp, synthetic construct
  source 1..20: mol_type = other DNA
taatcctcacagccacatag

SEQ ID NO: 218512 - DNA, 20 bp, synthetic construct
  source 1..20: mol_type = other DNA
ttaatcctcacagccacata

SEQ ID NO: 218513 - DNA, 20 bp, synthetic construct
  source 1..20: mol_type = other DNA
tttaatcctcacagccacat

SEQ ID NO: 218514 - DNA, 20 bp, synthetic construct
  source 1..20: mol_type = other DNA
gtttaatcctcacagccaca

SEQ ID NO: 218515 - DNA, 20 bp, synthetic construct
  source 1..20: mol_type = other DNA
tgtttaatcctcacagccac

SEQ ID NO: 218516 - DNA, 20 bp, synthetic construct
  source 1..20: mol_type = other DNA
ttgtttaatcctcacagcca

SEQ ID NO: 218517 - DNA, 20 bp, synthetic construct
  source 1..20: mol_type = other DNA
cttgtttaatcctcacagcc

SEQ ID NO: 218518 - DNA, 20 bp, synthetic construct
  source 1..20: mol_type = other DNA
tcttgtttaatcctcacagc

SEQ ID NO: 218519 - DNA, 20 bp, synthetic construct
  source 1..20: mol_type = other DNA
atcttgtttaatcctcacag

SEQ ID NO: 218520 - DNA, 20 bp, synthetic construct
  source 1..20: mol_type = other DNA
tatcttgtttaatcctcaca

SEQ ID NO: 218521 - DNA, 20 bp, synthetic construct
  source 1..20: mol_type = other DNA
ttatcttgtttaatcctcac

SEQ ID NO: 218522 - DNA, 20 bp, synthetic construct
  source 1..20: mol_type = other DNA
tttatcttgtttaatcctca

SEQ ID NO: 218523 - DNA, 20 bp, synthetic construct
  source 1..20: mol_type = other DNA
atttatcttgtttaatcctc

SEQ ID NO: 218524 - DNA, 20 bp, synthetic construct
  source 1..20: mol_type = other DNA
catttatcttgtttaatcct

SEQ ID NO: 218525 - DNA, 20 bp, synthetic construct
  source 1..20: mol_type = other DNA
acatttatcttgtttaatcc

SEQ ID NO: 218526 - DNA, 20 bp, synthetic construct
  source 1..20: mol_type = other DNA
cacatttatcttgtttaatc

SEQ ID NO: 218527 - DNA, 20 bp, synthetic construct
  source 1..20: mol_type = other DNA
acacatttatcttgtttaat

SEQ ID NO: 218528 - DNA, 20 bp, synthetic construct
  source 1..20: mol_type = other DNA
tacacatttatcttgtttaa

SEQ ID NO: 218529 - DNA, 20 bp, synthetic construct
  source 1..20: mol_type = other DNA
ttacacatttatcttgttta

SEQ ID NO: 218530 - DNA, 20 bp, synthetic construct
  source 1..20: mol_type = other DNA
gttacacatttatcttgttt

SEQ ID NO: 218531 - DNA, 20 bp, synthetic construct
  source 1..20: mol_type = other DNA
tgttacacatttatcttgtt

SEQ ID NO: 218532 - DNA, 20 bp, synthetic construct
  source 1..20: mol_type = other DNA
ctgttacacatttatcttgt

SEQ ID NO: 218533 - DNA, 20 bp, synthetic construct
  source 1..20: mol_type = other DNA
actgttacacatttatcttg

SEQ ID NO: 218534 - DNA, 20 bp, synthetic construct
  source 1..20: mol_type = other DNA
cactgttacacatttatctt

SEQ ID NO: 218535 - DNA, 20 bp, synthetic construct
  source 1..20: mol_type = other DNA
gcactgttacacatttatct

SEQ ID NO: 218536 - DNA, 20 bp, synthetic construct
  source 1..20: mol_type = other DNA
ggcactgttacacatttatc

SEQ ID NO: 218537 - DNA, 20 bp, synthetic construct
  source 1..20: mol_type = other DNA
aggcactgttacacatttat

SEQ ID NO: 218538 - DNA, 20 bp, synthetic construct
  source 1..20: mol_type = other DNA
caggcactgttacacattta

SEQ ID NO: 218539 - DNA, 20 bp, synthetic construct
  source 1..20: mol_type = other DNA
ccaggcactgttacacattt

SEQ ID NO: 218540 - DNA, 20 bp, synthetic construct
  source 1..20: mol_type = other DNA
gccaggcactgttacacatt

SEQ ID NO: 218541 - DNA, 20 bp, synthetic construct
  source 1..20: mol_type = other DNA
agccaggcactgttacacat

SEQ ID NO: 218542 - DNA, 20 bp, synthetic construct
  source 1..20: mol_type = other DNA
tagccaggcactgttacaca

SEQ ID NO: 218543 - DNA, 20 bp, synthetic construct
  source 1..20: mol_type = other DNA
atagccaggcactgttacac

SEQ ID NO: 218544 - DNA, 20 bp, synthetic construct
  source 1..20: mol_type = other DNA
tatagccaggcactgttaca

SEQ ID NO: 218545 - DNA, 20 bp, synthetic construct
  source 1..20: mol_type = other DNA
ctatagccaggcactgttac

SEQ ID NO: 218546 - DNA, 20 bp, synthetic construct
  source 1..20: mol_type = other DNA
tctatagccaggcactgtta

SEQ ID NO: 218547 - DNA, 20 bp, synthetic construct
  source 1..20: mol_type = other DNA
ttctatagccaggcactgtt

SEQ ID NO: 218548 - DNA, 20 bp, synthetic construct
  source 1..20: mol_type = other DNA
tttctatagccaggcactgt

SEQ ID NO: 218549 - DNA, 20 bp, synthetic construct
  source 1..20: mol_type = other DNA
atttctatagccaggcactg

SEQ ID NO: 218550 - DNA, 20 bp, synthetic construct
  source 1..20: mol_type = other DNA
tatttctatagccaggcact

SEQ ID NO: 218551 - DNA, 20 bp, synthetic construct
  source 1..20: mol_type = other DNA
atatttctatagccaggcac

SEQ ID NO: 218552 - DNA, 20 bp, synthetic construct
  source 1..20: mol_type = other DNA
aatatttctatagccaggca

SEQ ID NO: 218553 - DNA, 20 bp, synthetic construct
  source 1..20: mol_type = other DNA
aaatatttctatagccaggc

SEQ ID NO: 218554 - DNA, 20 bp, synthetic construct
  source 1..20: mol_type = other DNA
taaatatttctatagccagg

SEQ ID NO: 218555 - DNA, 20 bp, synthetic construct
  source 1..20: mol_type = other DNA
gtaaatatttctatagccag

SEQ ID NO: 218556 - DNA, 20 bp, synthetic construct
  source 1..20: mol_type = other DNA
agtaaatatttctatagcca

SEQ ID NO: 218557 - DNA, 20 bp, synthetic construct
  source 1..20: mol_type = other DNA
gagtaaatatttctatagcc

SEQ ID NO: 218558 - DNA, 20 bp, synthetic construct
  source 1..20: mol_type = other DNA
agagtaaatatttctatagc

SEQ ID NO: 218559 - DNA, 20 bp, synthetic construct
  source 1..20: mol_type = other DNA
aagagtaaatatttctatag

SEQ ID NO: 218560 - DNA, 20 bp, synthetic construct
  source 1..20: mol_type = other DNA
caagagtaaatatttctata

SEQ ID NO: 218561 - DNA, 20 bp, synthetic construct
  source 1..20: mol_type = other DNA
acaagagtaaatatttctat

SEQ ID NO: 218562 - DNA, 20 bp, synthetic construct
  source 1..20: mol_type = other DNA
aacaagagtaaatatttcta

SEQ ID NO: 218563 - DNA, 20 bp, synthetic construct
  source 1..20: mol_type = other DNA
taacaagagtaaatatttct

SEQ ID NO: 218564 - DNA, 20 bp, synthetic construct
  source 1..20: mol_type = other DNA
ataacaagagtaaatatttc

SEQ ID NO: 218565 - DNA, 20 bp, synthetic construct
  source 1..20: mol_type = other DNA
aataacaagagtaaatattt

SEQ ID NO: 218566 - DNA, 20 bp, synthetic construct
  source 1..20: mol_type = other DNA
taataacaagagtaaatatt

SEQ ID NO: 218567 - DNA, 20 bp, synthetic construct
  source 1..20: mol_type = other DNA
ttaataacaagagtaaatat

SEQ ID NO: 218568 - DNA, 20 bp, synthetic construct
  source 1..20: mol_type = other DNA
cttaataacaagagtaaata

SEQ ID NO: 218569 - DNA, 20 bp, synthetic construct
  source 1..20: mol_type = other DNA
ccttaataacaagagtaaat

SEQ ID NO: 218570 - DNA, 20 bp, synthetic construct
  source 1..20: mol_type = other DNA
cccttaataacaagagtaaa

SEQ ID NO: 218571 - DNA, 20 bp, synthetic construct
  source 1..20: mol_type = other DNA
tcccttaataacaagagtaa

SEQ ID NO: 218572 - DNA, 20 bp, synthetic construct
  source 1..20: mol_type = other DNA
ttcccttaataacaagagta

SEQ ID NO: 218573 - DNA, 20 bp, synthetic construct
  source 1..20: mol_type = other DNA
cttcccttaataacaagagt

SEQ ID NO: 218574 - DNA, 20 bp, synthetic construct
  source 1..20: mol_type = other DNA
tcttcccttaataacaagag

SEQ ID NO: 218575 - DNA, 20 bp, synthetic construct
  source 1..20: mol_type = other DNA
ttcttcccttaataacaaga

SEQ ID NO: 218576 - DNA, 20 bp, synthetic construct
  source 1..20: mol_type = other DNA
attcttcccttaataacaag

SEQ ID NO: 218577 - DNA, 20 bp, synthetic construct
  source 1..20: mol_type = other DNA
tattcttcccttaataacaa

SEQ ID NO: 218578 - DNA, 20 bp, synthetic construct
  source 1..20: mol_type = other DNA
atattcttcccttaataaca

SEQ ID NO: 218579 - DNA, 20 bp, synthetic construct
  source 1..20: mol_type = other DNA
catattcttcccttaataac

SEQ ID NO: 218580 - DNA, 20 bp, synthetic construct
  source 1..20: mol_type = other DNA
acatattcttcccttaataa

SEQ ID NO: 218581 - DNA, 20 bp, synthetic construct
  source 1..20: mol_type = other DNA
cacatattcttcccttaata

SEQ ID NO: 218582 - DNA, 20 bp, synthetic construct
  source 1..20: mol_type = other DNA
acacatattcttcccttaat

SEQ ID NO: 218583 - DNA, 20 bp, synthetic construct
  source 1..20: mol_type = other DNA
cacacatattcttcccttaa

SEQ ID NO: 218584 - DNA, 20 bp, synthetic construct
  source 1..20: mol_type = other DNA
ccacacatattcttccctta

SEQ ID NO: 218585 - DNA, 20 bp, synthetic construct
  source 1..20: mol_type = other DNA
gccacacatattcttccctt

SEQ ID NO: 218586 - DNA, 20 bp, synthetic construct
  source 1..20: mol_type = other DNA
agccacacatattcttccct

SEQ ID NO: 218587 - DNA, 20 bp, synthetic construct
  source 1..20: mol_type = other DNA
tagccacacatattcttccc

SEQ ID NO: 218588 - DNA, 20 bp, synthetic construct
  source 1..20: mol_type = other DNA
ttagccacacatattcttcc

SEQ ID NO: 218589 - DNA, 20 bp, synthetic construct
  source 1..20: mol_type = other DNA
tttagccacacatattcttc

SEQ ID NO: 218590 - DNA, 20 bp, synthetic construct
  source 1..20: mol_type = other DNA
ttttagccacacatattctt

SEQ ID NO: 218591 - DNA, 20 bp, synthetic construct
  source 1..20: mol_type = other DNA
tttttagccacacatattct

SEQ ID NO: 218592 - DNA, 20 bp, synthetic construct
  source 1..20: mol_type = other DNA
ctttttagccacacatattc

SEQ ID NO: 218593 - DNA, 20 bp, synthetic construct
  source 1..20: mol_type = other DNA
cctttttagccacacatatt

SEQ ID NO: 218594 - DNA, 20 bp, synthetic construct
  source 1..20: mol_type = other DNA
ccctttttagccacacatat

SEQ ID NO: 218595 - DNA, 20 bp, synthetic construct
  source 1..20: mol_type = other DNA
tccctttttagccacacata

SEQ ID NO: 218596 - DNA, 20 bp, synthetic construct
  source 1..20: mol_type = other DNA
atccctttttagccacacat

SEQ ID NO: 218597 - DNA, 20 bp, synthetic construct
  source 1..20: mol_type = other DNA
gatccctttttagccacaca

SEQ ID NO: 218598 - DNA, 20 bp, synthetic construct
  source 1..20: mol_type = other DNA
cgatccctttttagccacac

SEQ ID NO: 218599 - DNA, 20 bp, synthetic construct
  source 1..20: mol_type = other DNA
tcgatccctttttagccaca

SEQ ID NO: 218600 - DNA, 20 bp, synthetic construct
  source 1..20: mol_type = other DNA
ttcgatccctttttagccac

SEQ ID NO: 218601 - DNA, 20 bp, synthetic construct
  source 1..20: mol_type = other DNA
cttcgatccctttttagcca

SEQ ID NO: 218602 - DNA, 20 bp, synthetic construct
  source 1..20: mol_type = other DNA
tcttcgatccctttttagcc

SEQ ID NO: 218603 - DNA, 20 bp, synthetic construct
  source 1..20: mol_type = other DNA
atcttcgatccctttttagc

SEQ ID NO: 218604 - DNA, 20 bp, synthetic construct
  source 1..20: mol_type = other DNA
catcttcgatccctttttag

SEQ ID NO: 218605 - DNA, 20 bp, synthetic construct
  source 1..20: mol_type = other DNA
acatcttcgatcccttttta

SEQ ID NO: 218606 - DNA, 20 bp, synthetic construct
  source 1..20: mol_type = other DNA
tacatcttcgatcccttttt

SEQ ID NO: 218607 - DNA, 20 bp, synthetic construct
  source 1..20: mol_type = other DNA
ttacatcttcgatccctttt

SEQ ID NO: 218608 - DNA, 20 bp, synthetic construct
  source 1..20: mol_type = other DNA
tttacatcttcgatcccttt

SEQ ID NO: 218609 - DNA, 20 bp, synthetic construct
  source 1..20: mol_type = other DNA
ttttacatcttcgatccctt

SEQ ID NO: 218610 - DNA, 20 bp, synthetic construct
  source 1..20: mol_type = other DNA
cttttacatcttcgatccct

SEQ ID NO: 218611 - DNA, 20 bp, synthetic construct
  source 1..20: mol_type = other DNA
gcttttacatcttcgatccc

SEQ ID NO: 218612 - DNA, 20 bp, synthetic construct
  source 1..20: mol_type = other DNA
ggcttttacatcttcgatcc

SEQ ID NO: 218613 - DNA, 20 bp, synthetic construct
  source 1..20: mol_type = other DNA
tggcttttacatcttcgatc

SEQ ID NO: 218614 - DNA, 20 bp, synthetic construct
  source 1..20: mol_type = other DNA
ttggcttttacatcttcgat

SEQ ID NO: 218615 - DNA, 20 bp, synthetic construct
  source 1..20: mol_type = other DNA
attggcttttacatcttcga

SEQ ID NO: 218616 - DNA, 20 bp, synthetic construct
  source 1..20: mol_type = other DNA
gattggcttttacatcttcg

SEQ ID NO: 218617 - DNA, 20 bp, synthetic construct
  source 1..20: mol_type = other DNA
ggattggcttttacatcttc

SEQ ID NO: 218618 - DNA, 20 bp, synthetic construct
  source 1..20: mol_type = other DNA
gggattggcttttacatctt

SEQ ID NO: 218619 - DNA, 20 bp, synthetic construct
  source 1..20: mol_type = other DNA
agggattggcttttacatct

SEQ ID NO: 218620 - DNA, 20 bp, synthetic construct
  source 1..20: mol_type = other DNA
gagggattggcttttacatc

SEQ ID NO: 218621 - DNA, 20 bp, synthetic construct
  source 1..20: mol_type = other DNA
ggagggattggcttttacat

SEQ ID NO: 218622 - DNA, 20 bp, synthetic construct
  source 1..20: mol_type = other DNA
gggagggattggcttttaca

SEQ ID NO: 218623 - DNA, 20 bp, synthetic construct
  source 1..20: mol_type = other DNA
ggggagggattggcttttac

SEQ ID NO: 218624 - DNA, 20 bp, synthetic construct
  source 1..20: mol_type = other DNA
gggggagggattggctttta

SEQ ID NO: 218625 - DNA, 20 bp, synthetic construct
  source 1..20: mol_type = other DNA
agggggagggattggctttt

SEQ ID NO: 218626 - DNA, 20 bp, synthetic construct
  source 1..20: mol_type = other DNA
gagggggagggattggcttt

SEQ ID NO: 218627 - DNA, 20 bp, synthetic construct
  source 1..20: mol_type = other DNA
agagggggagggattggctt

SEQ ID NO: 218628 - DNA, 20 bp, synthetic construct
  source 1..20: mol_type = other DNA
tagagggggagggattggct

SEQ ID NO: 218629 - DNA, 20 bp, synthetic construct
  source 1..20: mol_type = other DNA
ctagagggggagggattggc

SEQ ID NO: 218630 - DNA, 20 bp, synthetic construct
  source 1..20: mol_type = other DNA
gctagagggggagggattgg

SEQ ID NO: 218631 - DNA, 20 bp, synthetic construct
  source 1..20: mol_type = other DNA
tgctagagggggagggattg

SEQ ID NO: 218632 - DNA, 20 bp, synthetic construct
  source 1..20: mol_type = other DNA
atgctagagggggagggatt

SEQ ID NO: 218633 - DNA, 20 bp, synthetic construct
  source 1..20: mol_type = other DNA
tatgctagagggggagggat

SEQ ID NO: 218634 - DNA, 20 bp, synthetic construct
  source 1..20: mol_type = other DNA
atatgctagagggggaggga

SEQ ID NO: 218635 - DNA, 20 bp, synthetic construct
  source 1..20: mol_type = other DNA
aatatgctagagggggaggg

SEQ ID NO: 218636 - DNA, 20 bp, synthetic construct
  source 1..20: mol_type = other DNA
aaatatgctagagggggagg

SEQ ID NO: 218637 - DNA, 20 bp, synthetic construct
  source 1..20: mol_type = other DNA
taaatatgctagagggggag

SEQ ID NO: 218638 - DNA, 20 bp, synthetic construct
  source 1..20: mol_type = other DNA
ttaaatatgctagaggggga

SEQ ID NO: 218639 - DNA, 20 bp, synthetic construct
  source 1..20: mol_type = other DNA
cttaaatatgctagaggggg

SEQ ID NO: 218640 - DNA, 20 bp, synthetic construct
  source 1..20: mol_type = other DNA
ccttaaatatgctagagggg

SEQ ID NO: 218641 - DNA, 20 bp, synthetic construct
  source 1..20: mol_type = other DNA
cccttaaatatgctagaggg

SEQ ID NO: 218642 - DNA, 20 bp, synthetic construct
  source 1..20: mol_type = other DNA
acccttaaatatgctagagg

SEQ ID NO: 218643 - DNA, 20 bp, synthetic construct
  source 1..20: mol_type = other DNA
tacccttaaatatgctagag

SEQ ID NO: 218644 - DNA, 20 bp, synthetic construct
  source 1..20: mol_type = other DNA
ttacccttaaatatgctaga

SEQ ID NO: 218645 - DNA, 20 bp, synthetic construct
  source 1..20: mol_type = other DNA
attacccttaaatatgctag

SEQ ID NO: 218646 - DNA, 20 bp, synthetic construct
  source 1..20: mol_type = other DNA
cattacccttaaatatgcta

SEQ ID NO: 218647 - DNA, 20 bp, synthetic construct
  source 1..20: mol_type = other DNA
acattacccttaaatatgct

SEQ ID NO: 218648 - DNA, 20 bp, synthetic construct
  source 1..20: mol_type = other DNA
aacattacccttaaatatgc

SEQ ID NO: 218649 - DNA, 20 bp, synthetic construct
  source 1..20: mol_type = other DNA
caacattacccttaaatatg

SEQ ID NO: 218650 - DNA, 20 bp, synthetic construct
  source 1..20: mol_type = other DNA
tcaacattacccttaaatat

SEQ ID NO: 218651 - DNA, 20 bp, synthetic construct
  source 1..20: mol_type = other DNA
ctcaacattacccttaaata

SEQ ID NO: 218652 - DNA, 20 bp, synthetic construct
  source 1..20: mol_type = other DNA
actcaacattacccttaaat

SEQ ID NO: 218653 - DNA, 20 bp, synthetic construct
  source 1..20: mol_type = other DNA
aactcaacattacccttaaa

SEQ ID NO: 218654 - DNA, 20 bp, synthetic construct
  source 1..20: mol_type = other DNA
caactcaacattacccttaa

SEQ ID NO: 218655 - DNA, 20 bp, synthetic construct
  source 1..20: mol_type = other DNA
ccaactcaacattaccctta

SEQ ID NO: 218656 - DNA, 20 bp, synthetic construct
  source 1..20: mol_type = other DNA
accaactcaacattaccctt

SEQ ID NO: 218657 - DNA, 20 bp, synthetic construct
  source 1..20: mol_type = other DNA
aaccaactcaacattaccct

SEQ ID NO: 218658 - DNA, 20 bp, synthetic construct
  source 1..20: mol_type = other DNA
aaaccaactcaacattaccc

SEQ ID NO: 218659 - DNA, 20 bp, synthetic construct
  source 1..20: mol_type = other DNA
caaaccaactcaacattacc

SEQ ID NO: 218660 - DNA, 20 bp, synthetic construct
  source 1..20: mol_type = other DNA
acaaaccaactcaacattac

SEQ ID NO: 218661 - DNA, 20 bp, synthetic construct
  source 1..20: mol_type = other DNA
cacaaaccaactcaacatta

SEQ ID NO: 218662 - DNA, 20 bp, synthetic construct
  source 1..20: mol_type = other DNA
ccacaaaccaactcaacatt

SEQ ID NO: 218663 - DNA, 20 bp, synthetic construct
  source 1..20: mol_type = other DNA
tccacaaaccaactcaacat

SEQ ID NO: 218664 - DNA, 20 bp, synthetic construct
  source 1..20: mol_type = other DNA
gtccacaaaccaactcaaca

SEQ ID NO: 218665 - DNA, 20 bp, synthetic construct
  source 1..20: mol_type = other DNA
ggtccacaaaccaactcaac

SEQ ID NO: 218666 - DNA, 20 bp, synthetic construct
  source 1..20: mol_type = other DNA
tggtccacaaaccaactcaa

SEQ ID NO: 218667 - DNA, 20 bp, synthetic construct
  source 1..20: mol_type = other DNA
atggtccacaaaccaactca

SEQ ID NO: 218668 - DNA, 20 bp, synthetic construct
  source 1..20: mol_type = other DNA
aatggtccacaaaccaactc

SEQ ID NO: 218669 - DNA, 20 bp, synthetic construct
  source 1..20: mol_type = other DNA
aaatggtccacaaaccaact

SEQ ID NO: 218670 - DNA, 20 bp, synthetic construct
  source 1..20: mol_type = other DNA
caaatggtccacaaaccaac

SEQ ID NO: 218671 - DNA, 20 bp, synthetic construct
  source 1..20: mol_type = other DNA
gcaaatggtccacaaaccaa

SEQ ID NO: 218672 - DNA, 20 bp, synthetic construct
  source 1..20: mol_type = other DNA
agcaaatggtccacaaacca

SEQ ID NO: 218673 - DNA, 20 bp, synthetic construct
  source 1..20: mol_type = other DNA
cagcaaatggtccacaaacc

SEQ ID NO: 218674 - DNA, 20 bp, synthetic construct
  source 1..20: mol_type = other DNA
gcagcaaatggtccacaaac

SEQ ID NO: 218675 - DNA, 20 bp, synthetic construct
  source 1..20: mol_type = other DNA
ggcagcaaatggtccacaaa

SEQ ID NO: 218676 - DNA, 20 bp, synthetic construct
  source 1..20: mol_type = other DNA
aggcagcaaatggtccacaa

SEQ ID NO: 218677 - DNA, 20 bp, synthetic construct
  source 1..20: mol_type = other DNA
caggcagcaaatggtccaca

SEQ ID NO: 218678 - DNA, 20 bp, synthetic construct
  source 1..20: mol_type = other DNA
acaggcagcaaatggtccac

SEQ ID NO: 218679 - DNA, 20 bp, synthetic construct
  source 1..20: mol_type = other DNA
aacaggcagcaaatggtcca

SEQ ID NO: 218680 - DNA, 20 bp, synthetic construct
  source 1..20: mol_type = other DNA
taacaggcagcaaatggtcc

SEQ ID NO: 218681 - DNA, 20 bp, synthetic construct
  source 1..20: mol_type = other DNA
ctaacaggcagcaaatggtc

SEQ ID NO: 218682 - DNA, 20 bp, synthetic construct
  source 1..20: mol_type = other DNA
tctaacaggcagcaaatggt

SEQ ID NO: 218683 - DNA, 20 bp, synthetic construct
  source 1..20: mol_type = other DNA
ctctaacaggcagcaaatgg

SEQ ID NO: 218684 - DNA, 20 bp, synthetic construct
  source 1..20: mol_type = other DNA
gctctaacaggcagcaaatg

SEQ ID NO: 218685 - DNA, 20 bp, synthetic construct
  source 1..20: mol_type = other DNA
agctctaacaggcagcaaat

SEQ ID NO: 218686 - DNA, 20 bp, synthetic construct
  source 1..20: mol_type = other DNA
cagctctaacaggcagcaaa

SEQ ID NO: 218687 - DNA, 20 bp, synthetic construct
  source 1..20: mol_type = other DNA
ccagctctaacaggcagcaa

SEQ ID NO: 218688 - DNA, 20 bp, synthetic construct
  source 1..20: mol_type = other DNA
tccagctctaacaggcagca

SEQ ID NO: 218689 - DNA, 20 bp, synthetic construct
  source 1..20: mol_type = other DNA
ttccagctctaacaggcagc

SEQ ID NO: 218690 - DNA, 20 bp, synthetic construct
  source 1..20: mol_type = other DNA
cttccagctctaacaggcag

SEQ ID NO: 218691 - DNA, 20 bp, synthetic construct
  source 1..20: mol_type = other DNA
ccttccagctctaacaggca

SEQ ID NO: 218692 - DNA, 20 bp, synthetic construct
  source 1..20: mol_type = other DNA
accttccagctctaacaggc

SEQ ID NO: 218693 - DNA, 20 bp, synthetic construct
  source 1..20: mol_type = other DNA
taccttccagctctaacagg

SEQ ID NO: 218694 - DNA, 20 bp, synthetic construct
  source 1..20: mol_type = other DNA
ctaccttccagctctaacag

SEQ ID NO: 218695 - DNA, 20 bp, synthetic construct
  source 1..20: mol_type = other DNA
cctaccttccagctctaaca

SEQ ID NO: 218696 - DNA, 20 bp, synthetic construct
  source 1..20: mol_type = other DNA
ccctaccttccagctctaac

SEQ ID NO: 218697 - DNA, 20 bp, synthetic construct
  source 1..20: mol_type = other DNA
tccctaccttccagctctaa

SEQ ID NO: 218698 - DNA, 20 bp, synthetic construct
  source 1..20: mol_type = other DNA
gtccctaccttccagctcta

SEQ ID NO: 218699 - DNA, 20 bp, synthetic construct
  source 1..20: mol_type = other DNA
ggtccctaccttccagctct

SEQ ID NO: 218700 - DNA, 20 bp, synthetic construct
  source 1..20: mol_type = other DNA
gggtccctaccttccagctc

SEQ ID NO: 218701 - DNA, 20 bp, synthetic construct
  source 1..20: mol_type = other DNA
ggggtccctaccttccagct

SEQ ID NO: 218702 - DNA, 20 bp, synthetic construct
  source 1..20: mol_type = other DNA
gggggtccctaccttccagc

SEQ ID NO: 218703 - DNA, 20 bp, synthetic construct
  source 1..20: mol_type = other DNA
agggggtccctaccttccag

SEQ ID NO: 218704 - DNA, 20 bp, synthetic construct
  source 1..20: mol_type = other DNA
gagggggtccctaccttcca

SEQ ID NO: 218705 - DNA, 20 bp, synthetic construct
  source 1..20: mol_type = other DNA
agagggggtccctaccttcc

SEQ ID NO: 218706 - DNA, 20 bp, synthetic construct
  source 1..20: mol_type = other DNA
gagagggggtccctaccttc

SEQ ID NO: 218707 - DNA, 20 bp, synthetic construct
  source 1..20: mol_type = other DNA
tgagagggggtccctacctt

SEQ ID NO: 218708 - DNA, 20 bp, synthetic construct
  source 1..20: mol_type = other DNA
ttgagagggggtccctacct

SEQ ID NO: 218709 - DNA, 20 bp, synthetic construct
  source 1..20: mol_type = other DNA
gttgagagggggtccctacc

SEQ ID NO: 218710 - DNA, 20 bp, synthetic construct
  source 1..20: mol_type = other DNA
tgttgagagggggtccctac

SEQ ID NO: 218711 - DNA, 20 bp, synthetic construct
  source 1..20: mol_type = other DNA
ctgttgagagggggtcccta

SEQ ID NO: 218712 - DNA, 20 bp, synthetic construct
  source 1..20: mol_type = other DNA
gctgttgagagggggtccct

SEQ ID NO: 218713 - DNA, 20 bp, synthetic construct
  source 1..20: mol_type = other DNA
cgctgttgagagggggtccc

SEQ ID NO: 218714 - DNA, 20 bp, synthetic construct
  source 1..20: mol_type = other DNA
tcgctgttgagagggggtcc

SEQ ID NO: 218715 - DNA, 20 bp, synthetic construct
  source 1..20: mol_type = other DNA
atcgctgttgagagggggtc

SEQ ID NO: 218716 - DNA, 20 bp, synthetic construct
  source 1..20: mol_type = other DNA
catcgctgttgagagggggt

SEQ ID NO: 218717 - DNA, 20 bp, synthetic construct
  source 1..20: mol_type = other DNA
gcatcgctgttgagaggggg

SEQ ID NO: 218718 - DNA, 20 bp, synthetic construct
  source 1..20: mol_type = other DNA
agcatcgctgttgagagggg

SEQ ID NO: 218719 - DNA, 20 bp, synthetic construct
  source 1..20: mol_type = other DNA
tagcatcgctgttgagaggg

SEQ ID NO: 218720 - DNA, 20 bp, synthetic construct
  source 1..20: mol_type = other DNA
gtagcatcgctgttgagagg

SEQ ID NO: 218721 - DNA, 20 bp, synthetic construct
  source 1..20: mol_type = other DNA
tgtagcatcgctgttgagag

SEQ ID NO: 218722 - DNA, 20 bp, synthetic construct
  source 1..20: mol_type = other DNA
ttgtagcatcgctgttgaga

SEQ ID NO: 218723 - DNA, 20 bp, synthetic construct
  source 1..20: mol_type = other DNA
tttgtagcatcgctgttgag

SEQ ID NO: 218724 - DNA, 20 bp, synthetic construct
  source 1..20: mol_type = other DNA
atttgtagcatcgctgttga

SEQ ID NO: 218725 - DNA, 20 bp, synthetic construct
  source 1..20: mol_type = other DNA
aatttgtagcatcgctgttg

SEQ ID NO: 218726 - DNA, 20 bp, synthetic construct
  source 1..20: mol_type = other DNA
taatttgtagcatcgctgtt

SEQ ID NO: 218727 - DNA, 20 bp, synthetic construct
  source 1..20: mol_type = other DNA
ataatttgtagcatcgctgt

SEQ ID NO: 218728 - DNA, 20 bp, synthetic construct
  source 1..20: mol_type = other DNA
tataatttgtagcatcgctg

SEQ ID NO: 218729 - DNA, 20 bp, synthetic construct
  source 1..20: mol_type = other DNA
gtataatttgtagcatcgct

SEQ ID NO: 218730 - DNA, 20 bp, synthetic construct
  source 1..20: mol_type = other DNA
ggtataatttgtagcatcgc

SEQ ID NO: 218731 - DNA, 20 bp, synthetic construct
  source 1..20: mol_type = other DNA
gggtataatttgtagcatcg

SEQ ID NO: 218732 - DNA, 20 bp, synthetic construct
  source 1..20: mol_type = other DNA
tgggtataatttgtagcatc

SEQ ID NO: 218733 - DNA, 20 bp, synthetic construct
  source 1..20: mol_type = other DNA
atgggtataatttgtagcat

SEQ ID NO: 218734 - DNA, 20 bp, synthetic construct
  source 1..20: mol_type = other DNA
aatgggtataatttgtagca

SEQ ID NO: 218735 - DNA, 20 bp, synthetic construct
  source 1..20: mol_type = other DNA
caatgggtataatttgtagc

SEQ ID NO: 218736 - DNA, 20 bp, synthetic construct
  source 1..20: mol_type = other DNA
ccaatgggtataatttgtag

SEQ ID NO: 218737 - DNA, 20 bp, synthetic construct
  source 1..20: mol_type = other DNA
tccaatgggtataatttgta

SEQ ID NO: 218738 - DNA, 20 bp, synthetic construct
  source 1..20: mol_type = other DNA
ctccaatgggtataatttgt

SEQ ID NO: 218739 - DNA, 20 bp, synthetic construct
  source 1..20: mol_type = other DNA
cctccaatgggtataatttg

SEQ ID NO: 218740 - DNA, 20 bp, synthetic construct
  source 1..20: mol_type = other DNA
acctccaatgggtataattt

SEQ ID NO: 218741 - DNA, 20 bp, synthetic construct
  source 1..20: mol_type = other DNA
gacctccaatgggtataatt

SEQ ID NO: 218742 - DNA, 20 bp, synthetic construct
  source 1..20: mol_type = other DNA
tgacctccaatgggtataat

SEQ ID NO: 218743 - DNA, 20 bp, synthetic construct
  source 1..20: mol_type = other DNA
ttgacctccaatgggtataa

SEQ ID NO: 218744 - DNA, 20 bp, synthetic construct
  source 1..20: mol_type = other DNA
gttgacctccaatgggtata

SEQ ID NO: 218745 - DNA, 20 bp, synthetic construct
  source 1..20: mol_type = other DNA
ggttgacctccaatgggtat

SEQ ID NO: 218746 - DNA, 20 bp, synthetic construct
  source 1..20: mol_type = other DNA
tggttgacctccaatgggta

SEQ ID NO: 218747 - DNA, 20 bp, synthetic construct
  source 1..20: mol_type = other DNA
ttggttgacctccaatgggt

SEQ ID NO: 218748 - DNA, 20 bp, synthetic construct
  source 1..20: mol_type = other DNA
tttggttgacctccaatggg

SEQ ID NO: 218749 - DNA, 20 bp, synthetic construct
  source 1..20: mol_type = other DNA
ttttggttgacctccaatgg

SEQ ID NO: 218750 - DNA, 20 bp, synthetic construct
  source 1..20: mol_type = other DNA
cttttggttgacctccaatg

SEQ ID NO: 218751 - DNA, 20 bp, synthetic construct
  source 1..20: mol_type = other DNA
tcttttggttgacctccaat

SEQ ID NO: 218752 - DNA, 20 bp, synthetic construct
  source 1..20: mol_type = other DNA
gtcttttggttgacctccaa

SEQ ID NO: 218753 - DNA, 20 bp, synthetic construct
  source 1..20: mol_type = other DNA
tgtcttttggttgacctcca

SEQ ID NO: 218754 - DNA, 20 bp, synthetic construct
  source 1..20: mol_type = other DNA
ttgtcttttggttgacctcc

SEQ ID NO: 218755 - DNA, 20 bp, synthetic construct
  source 1..20: mol_type = other DNA
tttgtcttttggttgacctc

SEQ ID NO: 218756 - DNA, 20 bp, synthetic construct
  source 1..20: mol_type = other DNA
ctttgtcttttggttgacct

SEQ ID NO: 218757 - DNA, 20 bp, synthetic construct
  source 1..20: mol_type = other DNA
gctttgtcttttggttgacc

SEQ ID NO: 218758 - DNA, 20 bp, synthetic construct
  source 1..20: mol_type = other DNA
agctttgtcttttggttgac

SEQ ID NO: 218759 - DNA, 20 bp, synthetic construct
  source 1..20: mol_type = other DNA
aagctttgtcttttggttga

SEQ ID NO: 218760 - DNA, 20 bp, synthetic construct
  source 1..20: mol_type = other DNA
taagctttgtcttttggttg

SEQ ID NO: 218761 - DNA, 20 bp, synthetic construct
  source 1..20: mol_type = other DNA
ataagctttgtcttttggtt

SEQ ID NO: 218762 - DNA, 20 bp, synthetic construct
  source 1..20: mol_type = other DNA
aataagctttgtcttttggt

SEQ ID NO: 218763 - DNA, 20 bp, synthetic construct
  source 1..20: mol_type = other DNA
caataagctttgtcttttgg

SEQ ID NO: 218764 - DNA, 20 bp, synthetic construct
  source 1..20: mol_type = other DNA
ccaataagctttgtcttttg

SEQ ID NO: 218765 - DNA, 20 bp, synthetic construct
  source 1..20: mol_type = other DNA
gccaataagctttgtctttt

SEQ ID NO: 218766 - DNA, 20 bp, synthetic construct
  source 1..20: mol_type = other DNA
agccaataagctttgtcttt

SEQ ID NO: 218767 - DNA, 20 bp, synthetic construct
  source 1..20: mol_type = other DNA
cagccaataagctttgtctt

SEQ ID NO: 218768 - DNA, 20 bp, synthetic construct
  source 1..20: mol_type = other DNA
ccagccaataagctttgtct

SEQ ID NO: 218769 - DNA, 20 bp, synthetic construct
  source 1..20: mol_type = other DNA
tccagccaataagctttgtc

SEQ ID NO: 218770 - DNA, 20 bp, synthetic construct
  source 1..20: mol_type = other DNA
gtccagccaataagctttgt

SEQ ID NO: 218771 - DNA, 20 bp, synthetic construct
  source 1..20: mol_type = other DNA
tgtccagccaataagctttg

SEQ ID NO: 218772 - DNA, 20 bp, synthetic construct
  source 1..20: mol_type = other DNA
atgtccagccaataagcttt

SEQ ID NO: 218773 - DNA, 20 bp, synthetic construct
  source 1..20: mol_type = other DNA
catgtccagccaataagctt

SEQ ID NO: 218774 - DNA, 20 bp, synthetic construct
  source 1..20: mol_type = other DNA
ccatgtccagccaataagct

SEQ ID NO: 218775 - DNA, 20 bp, synthetic construct
  source 1..20: mol_type = other DNA
accatgtccagccaataagc

SEQ ID NO: 218776 - DNA, 20 bp, synthetic construct
  source 1..20: mol_type = other DNA
caccatgtccagccaataag

SEQ ID NO: 218777 - DNA, 20 bp, synthetic construct
  source 1..20: mol_type = other DNA
ccaccatgtccagccaataa

SEQ ID NO: 218778 - DNA, 20 bp, synthetic construct
  source 1..20: mol_type = other DNA
gccaccatgtccagccaata

SEQ ID NO: 218779 - DNA, 20 bp, synthetic construct
  source 1..20: mol_type = other DNA
agccaccatgtccagccaat

SEQ ID NO: 218780 - DNA, 20 bp, synthetic construct
  source 1..20: mol_type = other DNA
gagccaccatgtccagccaa

SEQ ID NO: 218781 - DNA, 20 bp, synthetic construct
  source 1..20: mol_type = other DNA
tgagccaccatgtccagcca

SEQ ID NO: 218782 - DNA, 20 bp, synthetic construct
  source 1..20: mol_type = other DNA
gtgagccaccatgtccagcc

SEQ ID NO: 218783 - DNA, 20 bp, synthetic construct
  source 1..20: mol_type = other DNA
tgtgagccaccatgtccagc

SEQ ID NO: 218784 - DNA, 20 bp, synthetic construct
  source 1..20: mol_type = other DNA
gtgtgagccaccatgtccag

SEQ ID NO: 218785 - DNA, 20 bp, synthetic construct
  source 1..20: mol_type = other DNA
ggtgtgagccaccatgtcca

SEQ ID NO: 218786 - DNA, 20 bp, synthetic construct
  source 1..20: mol_type = other DNA
aggtgtgagccaccatgtcc

SEQ ID NO: 218787 - DNA, 20 bp, synthetic construct
  source 1..20: mol_type = other DNA
caggtgtgagccaccatgtc

SEQ ID NO: 218788 - DNA, 20 bp, synthetic construct
  source 1..20: mol_type = other DNA
acaggtgtgagccaccatgt

SEQ ID NO: 218789 - DNA, 20 bp, synthetic construct
  source 1..20: mol_type = other DNA
tacaggtgtgagccaccatg

SEQ ID NO: 218790 - DNA, 20 bp, synthetic construct
  source 1..20: mol_type = other DNA
ttacaggtgtgagccaccat

SEQ ID NO: 218791 - DNA, 20 bp, synthetic construct
  source 1..20: mol_type = other DNA
attacaggtgtgagccacca

SEQ ID NO: 218792 - DNA, 20 bp, synthetic construct
  source 1..20: mol_type = other DNA
gattacaggtgtgagccacc

SEQ ID NO: 218793 - DNA, 20 bp, synthetic construct
  source 1..20: mol_type = other DNA
ggattacaggtgtgagccac

SEQ ID NO: 218794 - DNA, 20 bp, synthetic construct
  source 1..20: mol_type = other DNA
aggattacaggtgtgagcca

SEQ ID NO: 218795 - DNA, 20 bp, synthetic construct
  source 1..20: mol_type = other DNA
taggattacaggtgtgagcc

SEQ ID NO: 218796 - DNA, 20 bp, synthetic construct
  source 1..20: mol_type = other DNA
ctaggattacaggtgtgagc

SEQ ID NO: 218797 - DNA, 20 bp, synthetic construct
  source 1..20: mol_type = other DNA
gctaggattacaggtgtgag

SEQ ID NO: 218798 - DNA, 20 bp, synthetic construct
  source 1..20: mol_type = other DNA
tgctaggattacaggtgtga

SEQ ID NO: 218799 - DNA, 20 bp, synthetic construct
  source 1..20: mol_type = other DNA
gtgctaggattacaggtgtg

SEQ ID NO: 218800 - DNA, 20 bp, synthetic construct
  source 1..20: mol_type = other DNA
agtgctaggattacaggtgt

SEQ ID NO: 218801 - DNA, 20 bp, synthetic construct
  source 1..20: mol_type = other DNA
aagtgctaggattacaggtg

SEQ ID NO: 218802 - DNA, 20 bp, synthetic construct
  source 1..20: mol_type = other DNA
aaagtgctaggattacaggt

SEQ ID NO: 218803 - DNA, 20 bp, synthetic construct
  source 1..20: mol_type = other DNA
caaagtgctaggattacagg

SEQ ID NO: 218804 - DNA, 20 bp, synthetic construct
  source 1..20: mol_type = other DNA
ccaaagtgctaggattacag

SEQ ID NO: 218805 - DNA, 20 bp, synthetic construct
  source 1..20: mol_type = other DNA
cccaaagtgctaggattaca

SEQ ID NO: 218806 - DNA, 20 bp, synthetic construct
  source 1..20: mol_type = other DNA
tcccaaagtgctaggattac

SEQ ID NO: 218807 - DNA, 20 bp, synthetic construct
  source 1..20: mol_type = other DNA
ctcccaaagtgctaggatta

SEQ ID NO: 218808 - DNA, 20 bp, synthetic construct
  source 1..20: mol_type = other DNA
cctcccaaagtgctaggatt

SEQ ID NO: 218809 - DNA, 20 bp, synthetic construct
  source 1..20: mol_type = other DNA
gcctcccaaagtgctaggat

SEQ ID NO: 218810 - DNA, 20 bp, synthetic construct
  source 1..20: mol_type = other DNA
ggcctcccaaagtgctagga

SEQ ID NO: 218811 - DNA, 20 bp, synthetic construct
  source 1..20: mol_type = other DNA
tggcctcccaaagtgctagg

SEQ ID NO: 218812 - DNA, 20 bp, synthetic construct
  source 1..20: mol_type = other DNA
ttggcctcccaaagtgctag

SEQ ID NO: 218813 - DNA, 20 bp, synthetic construct
  source 1..20: mol_type = other DNA
cttggcctcccaaagtgcta

SEQ ID NO: 218814 - DNA, 20 bp, synthetic construct
  source 1..20: mol_type = other DNA
ccttggcctcccaaagtgct

SEQ ID NO: 218815 - DNA, 20 bp, synthetic construct
  source 1..20: mol_type = other DNA
gccttggcctcccaaagtgc

SEQ ID NO: 218816 - DNA, 20 bp, synthetic construct
  source 1..20: mol_type = other DNA
tgccttggcctcccaaagtg

SEQ ID NO: 218817 - DNA, 20 bp, synthetic construct
  source 1..20: mol_type = other DNA
ctgccttggcctcccaaagt

SEQ ID NO: 218818 - DNA, 20 bp, synthetic construct
  source 1..20: mol_type = other DNA
cctgccttggcctcccaaag

SEQ ID NO: 218819 - DNA, 20 bp, synthetic construct
  source 1..20: mol_type = other DNA
gcctgccttggcctcccaaa

SEQ ID NO: 218820 - DNA, 20 bp, synthetic construct
  source 1..20: mol_type = other DNA
cgcctgccttggcctcccaa

SEQ ID NO: 218821 - DNA, 20 bp, synthetic construct
  source 1..20: mol_type = other DNA
ccgcctgccttggcctccca

SEQ ID NO: 218822 - DNA, 20 bp, synthetic construct
  source 1..20: mol_type = other DNA
tccgcctgccttggcctccc

SEQ ID NO: 218823 - DNA, 20 bp, synthetic construct
  source 1..20: mol_type = other DNA
atccgcctgccttggcctcc

SEQ ID NO: 218824 - DNA, 20 bp, synthetic construct
  source 1..20: mol_type = other DNA
gatccgcctgccttggcctc

SEQ ID NO: 218825 - DNA, 20 bp, synthetic construct
  source 1..20: mol_type = other DNA
tgatccgcctgccttggcct

SEQ ID NO: 218826 - DNA, 20 bp, synthetic construct
  source 1..20: mol_type = other DNA
gtgatccgcctgccttggcc

SEQ ID NO: 218827 - DNA, 20 bp, synthetic construct
  source 1..20: mol_type = other DNA
agtgatccgcctgccttggc

SEQ ID NO: 218828 - DNA, 20 bp, synthetic construct
  source 1..20: mol_type = other DNA
aagtgatccgcctgccttgg

SEQ ID NO: 218829 - DNA, 20 bp, synthetic construct
  source 1..20: mol_type = other DNA
caagtgatccgcctgccttg

SEQ ID NO: 218830 - DNA, 20 bp, synthetic construct
  source 1..20: mol_type = other DNA
tcaagtgatccgcctgcctt

SEQ ID NO: 218831 - DNA, 20 bp, synthetic construct
  source 1..20: mol_type = other DNA
ctcaagtgatccgcctgcct

SEQ ID NO: 218832 - DNA, 20 bp, synthetic construct
  source 1..20: mol_type = other DNA
tctcaagtgatccgcctgcc

SEQ ID NO: 218833 - DNA, 20 bp, synthetic construct
  source 1..20: mol_type = other DNA
atctcaagtgatccgcctgc

SEQ ID NO: 218834 - DNA, 20 bp, synthetic construct
  source 1..20: mol_type = other DNA
gatctcaagtgatccgcctg

SEQ ID NO: 218835 - DNA, 20 bp, synthetic construct
  source 1..20: mol_type = other DNA
tgatctcaagtgatccgcct

SEQ ID NO: 218836 - DNA, 20 bp, synthetic construct
  source 1..20: mol_type = other DNA
ctgatctcaagtgatccgcc

SEQ ID NO: 218837 - DNA, 20 bp, synthetic construct
  source 1..20: mol_type = other DNA
cctgatctcaagtgatccgc

SEQ ID NO: 218838 - DNA, 20 bp, synthetic construct
  source 1..20: mol_type = other DNA
tcctgatctcaagtgatccg

SEQ ID NO: 218839 - DNA, 20 bp, synthetic construct
  source 1..20: mol_type = other DNA
ctcctgatctcaagtgatcc

SEQ ID NO: 218840 - DNA, 20 bp, synthetic construct
  source 1..20: mol_type = other DNA
actcctgatctcaagtgatc

SEQ ID NO: 218841 - DNA, 20 bp, synthetic construct
  source 1..20: mol_type = other DNA
aactcctgatctcaagtgat

SEQ ID NO: 218842 - DNA, 20 bp, synthetic construct
  source 1..20: mol_type = other DNA
gaactcctgatctcaagtga

SEQ ID NO: 218843 - DNA, 20 bp, synthetic construct
  source 1..20: mol_type = other DNA
cgaactcctgatctcaagtg

SEQ ID NO: 218844 - DNA, 20 bp, synthetic construct
  source 1..20: mol_type = other DNA
tcgaactcctgatctcaagt

SEQ ID NO: 218845 - DNA, 20 bp, synthetic construct
  source 1..20: mol_type = other DNA
ctcgaactcctgatctcaag

SEQ ID NO: 218846 - DNA, 20 bp, synthetic construct
  source 1..20: mol_type = other DNA
tctcgaactcctgatctcaa

SEQ ID NO: 218847 - DNA, 20 bp, synthetic construct
  source 1..20: mol_type = other DNA
gtctcgaactcctgatctca

SEQ ID NO: 218848 - DNA, 20 bp, synthetic construct
  source 1..20: mol_type = other DNA
ggtctcgaactcctgatctc

SEQ ID NO: 218849 - DNA, 20 bp, synthetic construct
  source 1..20: mol_type = other DNA
tggtctcgaactcctgatct

SEQ ID NO: 218850 - DNA, 20 bp, synthetic construct
  source 1..20: mol_type = other DNA
ctggtctcgaactcctgatc

SEQ ID NO: 218851 - DNA, 20 bp, synthetic construct
  source 1..20: mol_type = other DNA
gctggtctcgaactcctgat

SEQ ID NO: 218852 - DNA, 20 bp, synthetic construct
  source 1..20: mol_type = other DNA
ggctggtctcgaactcctga

SEQ ID NO: 218853 - DNA, 20 bp, synthetic construct
  source 1..20: mol_type = other DNA
aggctggtctcgaactcctg

SEQ ID NO: 218854 - DNA, 20 bp, synthetic construct
  source 1..20: mol_type = other DNA
caggctggtctcgaactcct

SEQ ID NO: 218855 - DNA, 20 bp, synthetic construct
  source 1..20: mol_type = other DNA
ccaggctggtctcgaactcc

SEQ ID NO: 218856 - DNA, 20 bp, synthetic construct
  source 1..20: mol_type = other DNA
gccaggctggtctcgaactc

SEQ ID NO: 218857 - DNA, 20 bp, synthetic construct
  source 1..20: mol_type = other DNA
ggccaggctggtctcgaact

SEQ ID NO: 218858 - DNA, 20 bp, synthetic construct
  source 1..20: mol_type = other DNA
tggccaggctggtctcgaac

SEQ ID NO: 218859 - DNA, 20 bp, synthetic construct
  source 1..20: mol_type = other DNA
ttggccaggctggtctcgaa

SEQ ID NO: 218860 - DNA, 20 bp, synthetic construct
  source 1..20: mol_type = other DNA
gttggccaggctggtctcga

SEQ ID NO: 218861 - DNA, 20 bp, synthetic construct
  source 1..20: mol_type = other DNA
tgttggccaggctggtctcg

SEQ ID NO: 218862 - DNA, 20 bp, synthetic construct
  source 1..20: mol_type = other DNA
atgttggccaggctggtctc

SEQ ID NO: 218863 - DNA, 20 bp, synthetic construct
  source 1..20: mol_type = other DNA
catgttggccaggctggtct

SEQ ID NO: 218864 - DNA, 20 bp, synthetic construct
  source 1..20: mol_type = other DNA
ccatgttggccaggctggtc

SEQ ID NO: 218865 - DNA, 20 bp, synthetic construct
  source 1..20: mol_type = other DNA
accatgttggccaggctggt

SEQ ID NO: 218866 - DNA, 20 bp, synthetic construct
  source 1..20: mol_type = other DNA
caccatgttggccaggctgg

SEQ ID NO: 218867 - DNA, 20 bp, synthetic construct
  source 1..20: mol_type = other DNA
tcaccatgttggccaggctg

SEQ ID NO: 218868 - DNA, 20 bp, synthetic construct
  source 1..20: mol_type = other DNA
ttcaccatgttggccaggct

SEQ ID NO: 218869 - DNA, 20 bp, synthetic construct
  source 1..20: mol_type = other DNA
tttcaccatgttggccaggc

SEQ ID NO: 218870 - DNA, 20 bp, synthetic construct
  source 1..20: mol_type = other DNA
gtttcaccatgttggccagg

SEQ ID NO: 218871 - DNA, 20 bp, synthetic construct
  source 1..20: mol_type = other DNA
ggtttcaccatgttggccag

SEQ ID NO: 218872 - DNA, 20 bp, synthetic construct
  source 1..20: mol_type = other DNA
gggtttcaccatgttggcca

SEQ ID NO: 218873 - DNA, 20 bp, synthetic construct
  source 1..20: mol_type = other DNA
ggggtttcaccatgttggcc

SEQ ID NO: 218874 - DNA, 20 bp, synthetic construct
  source 1..20: mol_type = other DNA
tggggtttcaccatgttggc

SEQ ID NO: 218875 - DNA, 20 bp, synthetic construct
  source 1..20: mol_type = other DNA
atggggtttcaccatgttgg

SEQ ID NO: 218876 - DNA, 20 bp, synthetic construct
  source 1..20: mol_type = other DNA
gatggggtttcaccatgttg

SEQ ID NO: 218877 - DNA, 20 bp, synthetic construct
  source 1..20: mol_type = other DNA
ggatggggtttcaccatgtt

SEQ ID NO: 218878 - DNA, 20 bp, synthetic construct
  source 1..20: mol_type = other DNA
gggatggggtttcaccatgt

SEQ ID NO: 218879 - DNA, 20 bp, synthetic construct
  source 1..20: mol_type = other DNA
agggatggggtttcaccatg

SEQ ID NO: 218880 - DNA, 20 bp, synthetic construct
  source 1..20: mol_type = other DNA
tagggatggggtttcaccat

SEQ ID NO: 218881 - DNA, 20 bp, synthetic construct
  source 1..20: mol_type = other DNA
gtagggatggggtttcacca

SEQ ID NO: 218882 - DNA, 20 bp, synthetic construct
  source 1..20: mol_type = other DNA
agtagggatggggtttcacc

SEQ ID NO: 218883 - DNA, 20 bp, synthetic construct
  source 1..20: mol_type = other DNA
tagtagggatggggtttcac

SEQ ID NO: 218884 - DNA, 20 bp, synthetic construct
  source 1..20: mol_type = other DNA
ttagtagggatggggtttca

SEQ ID NO: 218885 - DNA, 20 bp, synthetic construct
  source 1..20: mol_type = other DNA
tttagtagggatggggtttc

SEQ ID NO: 218886 - DNA, 20 bp, synthetic construct
  source 1..20: mol_type = other DNA
ttttagtagggatggggttt

SEQ ID NO: 218887 - DNA, 20 bp, synthetic construct
  source 1..20: mol_type = other DNA
tttttagtagggatggggtt

SEQ ID NO: 218888 - DNA, 20 bp, synthetic construct
  source 1..20: mol_type = other DNA
atttttagtagggatggggt

SEQ ID NO: 218889 - DNA, 20 bp, synthetic construct
  source 1..20: mol_type = other DNA
tatttttagtagggatgggg

SEQ ID NO: 218890 - DNA, 20 bp, synthetic construct
  source 1..20: mol_type = other DNA
gtatttttagtagggatggg

SEQ ID NO: 218891 - DNA, 20 bp, synthetic construct
  source 1..20: mol_type = other DNA
tgtatttttagtagggatgg

SEQ ID NO: 218892 - DNA, 20 bp, synthetic construct
  source 1..20: mol_type = other DNA
ttgtatttttagtagggatg

SEQ ID NO: 218893 - DNA, 20 bp, synthetic construct
  source 1..20: mol_type = other DNA
tttgtatttttagtagggat

SEQ ID NO: 218894 - DNA, 20 bp, synthetic construct
  source 1..20: mol_type = other DNA
ttttgtatttttagtaggga

SEQ ID NO: 218895 - DNA, 20 bp, synthetic construct
  source 1..20: mol_type = other DNA
tttttgtatttttagtaggg

SEQ ID NO: 218896 - DNA, 20 bp, synthetic construct
  source 1..20: mol_type = other DNA
atttttgtatttttagtagg

SEQ ID NO: 218897 - DNA, 20 bp, synthetic construct
  source 1..20: mol_type = other DNA
aatttttgtatttttagtag

SEQ ID NO: 218898 - DNA, 20 bp, synthetic construct
  source 1..20: mol_type = other DNA
taatttttgtatttttagta

SEQ ID NO: 218899 - DNA, 20 bp, synthetic construct
  source 1..20: mol_type = other DNA
ctaatttttgtatttttagt

SEQ ID NO: 218900 - DNA, 20 bp, synthetic construct
  source 1..20: mol_type = other DNA
gctaatttttgtatttttag

SEQ ID NO: 218901 - DNA, 20 bp, synthetic construct
  source 1..20: mol_type = other DNA
agctaatttttgtattttta

SEQ ID NO: 218902 - DNA, 20 bp, synthetic construct
  source 1..20: mol_type = other DNA
cagctaatttttgtattttt

SEQ ID NO: 218903 - DNA, 20 bp, synthetic construct
  source 1..20: mol_type = other DNA
ccagctaatttttgtatttt

SEQ ID NO: 218904 - DNA, 20 bp, synthetic construct
  source 1..20: mol_type = other DNA
cccagctaatttttgtattt

SEQ ID NO: 218905 - DNA, 20 bp, synthetic construct
  source 1..20: mol_type = other DNA
gcccagctaatttttgtatt

SEQ ID NO: 218906 - DNA, 20 bp, synthetic construct
  source 1..20: mol_type = other DNA
cgcccagctaatttttgtat

SEQ ID NO: 218907 - DNA, 20 bp, synthetic construct
  source 1..20: mol_type = other DNA
acgcccagctaatttttgta

SEQ ID NO: 218908 - DNA, 20 bp, synthetic construct
  source 1..20: mol_type = other DNA
cacgcccagctaatttttgt

SEQ ID NO: 218909 - DNA, 20 bp, synthetic construct
  source 1..20: mol_type = other DNA
ccacgcccagctaatttttg

SEQ ID NO: 218910 - DNA, 20 bp, synthetic construct
  source 1..20: mol_type = other DNA
accacgcccagctaattttt

SEQ ID NO: 218911 - DNA, 20 bp, synthetic construct
  source 1..20: mol_type = other DNA
caccacgcccagctaatttt

SEQ ID NO: 218912 - DNA, 20 bp, synthetic construct
  source 1..20: mol_type = other DNA
ccaccacgcccagctaattt

SEQ ID NO: 218913 - DNA, 20 bp, synthetic construct
  source 1..20: mol_type = other DNA
accaccacgcccagctaatt

SEQ ID NO: 218914 - DNA, 20 bp, synthetic construct
  source 1..20: mol_type = other DNA
caccaccacgcccagctaat

SEQ ID NO: 218915 - DNA, 20 bp, synthetic construct
  source 1..20: mol_type = other DNA
gcaccaccacgcccagctaa

SEQ ID NO: 218916 - DNA, 20 bp, synthetic construct
  source 1..20: mol_type = other DNA
tgcaccaccacgcccagcta

SEQ ID NO: 218917 - DNA, 20 bp, synthetic construct
  source 1..20: mol_type = other DNA
gtgcaccaccacgcccagct

SEQ ID NO: 218918 - DNA, 20 bp, synthetic construct
  source 1..20: mol_type = other DNA
tgtgcaccaccacgcccagc

SEQ ID NO: 218919 - DNA, 20 bp, synthetic construct
  source 1..20: mol_type = other DNA
gtgtgcaccaccacgcccag

SEQ ID NO: 218920 - DNA, 20 bp, synthetic construct
  source 1..20: mol_type = other DNA
ggtgtgcaccaccacgccca

SEQ ID NO: 218921 - DNA, 20 bp, synthetic construct
  source 1..20: mol_type = other DNA
aggtgtgcaccaccacgccc

SEQ ID NO: 218922 - DNA, 20 bp, synthetic construct
  source 1..20: mol_type = other DNA
caggtgtgcaccaccacgcc

SEQ ID NO: 218923 - DNA, 20 bp, synthetic construct
  source 1..20: mol_type = other DNA
acaggtgtgcaccaccacgc

SEQ ID NO: 218924 - DNA, 20 bp, synthetic construct
  source 1..20: mol_type = other DNA
tacaggtgtgcaccaccacg

SEQ ID NO: 218925 - DNA, 20 bp, synthetic construct
  source 1..20: mol_type = other DNA
ttacaggtgtgcaccaccac

SEQ ID NO: 218926 - DNA, 20 bp, synthetic construct
  source 1..20: mol_type = other DNA
attacaggtgtgcaccacca

SEQ ID NO: 218927 - DNA, 20 bp, synthetic construct
  source 1..20: mol_type = other DNA
gattacaggtgtgcaccacc

SEQ ID NO: 218928 - DNA, 20 bp, synthetic construct
  source 1..20: mol_type = other DNA
ggattacaggtgtgcaccac

SEQ ID NO: 218929 - DNA, 20 bp, synthetic construct
  source 1..20: mol_type = other DNA
gggattacaggtgtgcacca

SEQ ID NO: 218930 - DNA, 20 bp, synthetic construct
  source 1..20: mol_type = other DNA
tgggattacaggtgtgcacc

SEQ ID NO: 218931 - DNA, 20 bp, synthetic construct
  source 1..20: mol_type = other DNA
ctgggattacaggtgtgcac

SEQ ID NO: 218932 - DNA, 20 bp, synthetic construct
  source 1..20: mol_type = other DNA
gctgggattacaggtgtgca

SEQ ID NO: 218933 - DNA, 20 bp, synthetic construct
  source 1..20: mol_type = other DNA
agctgggattacaggtgtgc

SEQ ID NO: 218934 - DNA, 20 bp, synthetic construct
  source 1..20: mol_type = other DNA
tagctgggattacaggtgtg

SEQ ID NO: 218935 - DNA, 20 bp, synthetic construct
  source 1..20: mol_type = other DNA
gtagctgggattacaggtgt

SEQ ID NO: 218936 - DNA, 20 bp, synthetic construct
  source 1..20: mol_type = other DNA
agtagctgggattacaggtg

SEQ ID NO: 218937 - DNA, 20 bp, synthetic construct
  source 1..20: mol_type = other DNA
gagtagctgggattacaggt

SEQ ID NO: 218938 - DNA, 20 bp, synthetic construct
  source 1..20: mol_type = other DNA
tgagtagctgggattacagg

SEQ ID NO: 218939 - DNA, 20 bp, synthetic construct
  source 1..20: mol_type = other DNA
ctgagtagctgggattacag

SEQ ID NO: 218940 - DNA, 20 bp, synthetic construct
  source 1..20: mol_type = other DNA
cctgagtagctgggattaca

SEQ ID NO: 218941 - DNA, 20 bp, synthetic construct
  source 1..20: mol_type = other DNA
tcctgagtagctgggattac

SEQ ID NO: 218942 - DNA, 20 bp, synthetic construct
  source 1..20: mol_type = other DNA
ctcctgagtagctgggatta

SEQ ID NO: 218943 - DNA, 20 bp, synthetic construct
  source 1..20: mol_type = other DNA
cctcctgagtagctgggatt

SEQ ID NO: 218944 - DNA, 20 bp, synthetic construct
  source 1..20: mol_type = other DNA
gcctcctgagtagctgggat

SEQ ID NO: 218945 - DNA, 20 bp, synthetic construct
  source 1..20: mol_type = other DNA
agcctcctgagtagctggga

SEQ ID NO: 218946 - DNA, 20 bp, synthetic construct
  source 1..20: mol_type = other DNA
cagcctcctgagtagctggg

SEQ ID NO: 218947 - DNA, 20 bp, synthetic construct
  source 1..20: mol_type = other DNA
tcagcctcctgagtagctgg

SEQ ID NO: 218948 - DNA, 20 bp, synthetic construct
  source 1..20: mol_type = other DNA
ctcagcctcctgagtagctg

SEQ ID NO: 218949 - DNA, 20 bp, synthetic construct
  source 1..20: mol_type = other DNA
cctcagcctcctgagtagct

SEQ ID NO: 218950 - DNA, 20 bp, synthetic construct
  source 1..20: mol_type = other DNA
gcctcagcctcctgagtagc

SEQ ID NO: 218951 - DNA, 20 bp, synthetic construct
  source 1..20: mol_type = other DNA
tgcctcagcctcctgagtag

SEQ ID NO: 218952 - DNA, 20 bp, synthetic construct
  source 1..20: mol_type = other DNA
ctgcctcagcctcctgagta

SEQ ID NO: 218953 - DNA, 20 bp, synthetic construct
  source 1..20: mol_type = other DNA
cctgcctcagcctcctgagt

SEQ ID NO: 218954 - DNA, 20 bp, synthetic construct
  source 1..20: mol_type = other DNA
tcctgcctcagcctcctgag

SEQ ID NO: 218955 - DNA, 20 bp, synthetic construct
  source 1..20: mol_type = other DNA
ctcctgcctcagcctcctga

SEQ ID NO: 218956 - DNA, 20 bp, synthetic construct
  source 1..20: mol_type = other DNA
tctcctgcctcagcctcctg

SEQ ID NO: 218957 - DNA, 20 bp, synthetic construct
  source 1..20: mol_type = other DNA
ttctcctgcctcagcctcct

SEQ ID NO: 218958 - DNA, 20 bp, synthetic construct
  source 1..20: mol_type = other DNA
attctcctgcctcagcctcc

SEQ ID NO: 218959 - DNA, 20 bp, synthetic construct
  source 1..20: mol_type = other DNA
gattctcctgcctcagcctc

SEQ ID NO: 218960 - DNA, 20 bp, synthetic construct
  source 1..20: mol_type = other DNA
tgattctcctgcctcagcct

SEQ ID NO: 218961 - DNA, 20 bp, synthetic construct
  source 1..20: mol_type = other DNA
gtgattctcctgcctcagcc

SEQ ID NO: 218962 - DNA, 20 bp, synthetic construct
  source 1..20: mol_type = other DNA
agtgattctcctgcctcagc

SEQ ID NO: 218963 - DNA, 20 bp, synthetic construct
  source 1..20: mol_type = other DNA
tagtgattctcctgcctcag

SEQ ID NO: 218964 - DNA, 20 bp, synthetic construct
  source 1..20: mol_type = other DNA
ctagtgattctcctgcctca

SEQ ID NO: 218965 - DNA, 20 bp, synthetic construct
  source 1..20: mol_type = other DNA
tctagtgattctcctgcctc

SEQ ID NO: 218966 - DNA, 20 bp, synthetic construct
  source 1..20: mol_type = other DNA
ttctagtgattctcctgcct

SEQ ID NO: 218967 - DNA, 20 bp, synthetic construct
  source 1..20: mol_type = other DNA
gttctagtgattctcctgcc

SEQ ID NO: 218968 - DNA, 20 bp, synthetic construct
  source 1..20: mol_type = other DNA
ggttctagtgattctcctgc

SEQ ID NO: 218969 - DNA, 20 bp, synthetic construct
  source 1..20: mol_type = other DNA
gggttctagtgattctcctg

SEQ ID NO: 218970 - DNA, 20 bp, synthetic construct
  source 1..20: mol_type = other DNA
tgggttctagtgattctcct

SEQ ID NO: 218971 - DNA, 20 bp, synthetic construct
  source 1..20: mol_type = other DNA
ctgggttctagtgattctcc

SEQ ID NO: 218972 - DNA, 20 bp, synthetic construct
  source 1..20: mol_type = other DNA
cctgggttctagtgattctc

SEQ ID NO: 218973 - DNA, 20 bp, synthetic construct
  source 1..20: mol_type = other DNA
tcctgggttctagtgattct

SEQ ID NO: 218974 - DNA, 20 bp, synthetic construct
  source 1..20: mol_type = other DNA
ctcctgggttctagtgattc

SEQ ID NO: 218975 - DNA, 20 bp, synthetic construct
  source 1..20: mol_type = other DNA
cctcctgggttctagtgatt

SEQ ID NO: 218976 - DNA, 20 bp, synthetic construct
  source 1..20: mol_type = other DNA
acctcctgggttctagtgat

SEQ ID NO: 218977 - DNA, 20 bp, synthetic construct
  source 1..20: mol_type = other DNA
cacctcctgggttctagtga

SEQ ID NO: 218978 - DNA, 20 bp, synthetic construct
  source 1..20: mol_type = other DNA
tcacctcctgggttctagtg

SEQ ID NO: 218979 - DNA, 20 bp, synthetic construct
  source 1..20: mol_type = other DNA
ttcacctcctgggttctagt

SEQ ID NO: 218980 - DNA, 20 bp, synthetic construct
  source 1..20: mol_type = other DNA
cttcacctcctgggttctag

SEQ ID NO: 218981 - DNA, 20 bp, synthetic construct
  source 1..20: mol_type = other DNA
ccttcacctcctgggttcta

SEQ ID NO: 218982 - DNA, 20 bp, synthetic construct
  source 1..20: mol_type = other DNA
accttcacctcctgggttct

SEQ ID NO: 218983 - DNA, 20 bp, synthetic construct
  source 1..20: mol_type = other DNA
aaccttcacctcctgggttc

SEQ ID NO: 218984 - DNA, 20 bp, synthetic construct
  source 1..20: mol_type = other DNA
caaccttcacctcctgggtt

SEQ ID NO: 218985 - DNA, 20 bp, synthetic construct
  source 1..20: mol_type = other DNA
gcaaccttcacctcctgggt

SEQ ID NO: 218986 - DNA, 20 bp, synthetic construct
  source 1..20: mol_type = other DNA
tgcaaccttcacctcctggg

SEQ ID NO: 218987 - DNA, 20 bp, synthetic construct
  source 1..20: mol_type = other DNA
ctgcaaccttcacctcctgg

SEQ ID NO: 218988 - DNA, 20 bp, synthetic construct
  source 1..20: mol_type = other DNA
actgcaaccttcacctcctg

SEQ ID NO: 218989 - DNA, 20 bp, synthetic construct
  source 1..20: mol_type = other DNA
cactgcaaccttcacctcct

SEQ ID NO: 218990 - DNA, 20 bp, synthetic construct
  source 1..20: mol_type = other DNA
tcactgcaaccttcacctcc

SEQ ID NO: 218991 - DNA, 20 bp, synthetic construct
  source 1..20: mol_type = other DNA
ctcactgcaaccttcacctc

SEQ ID NO: 218992 - DNA, 20 bp, synthetic construct
  source 1..20: mol_type = other DNA
gctcactgcaaccttcacct

SEQ ID NO: 218993 - DNA, 20 bp, synthetic construct
  source 1..20: mol_type = other DNA
ggctcactgcaaccttcacc

SEQ ID NO: 218994 - DNA, 20 bp, synthetic construct
  source 1..20: mol_type = other DNA
cggctcactgcaaccttcac

SEQ ID NO: 218995 - DNA, 20 bp, synthetic construct
  source 1..20: mol_type = other DNA
tcggctcactgcaaccttca

SEQ ID NO: 218996 - DNA, 20 bp, synthetic construct
  source 1..20: mol_type = other DNA
ctcggctcactgcaaccttc

SEQ ID NO: 218997 - DNA, 20 bp, synthetic construct
  source 1..20: mol_type = other DNA
tctcggctcactgcaacctt

SEQ ID NO: 218998 - DNA, 20 bp, synthetic construct
  source 1..20: mol_type = other DNA
atctcggctcactgcaacct

SEQ ID NO: 218999 - DNA, 20 bp, synthetic construct
  source 1..20: mol_type = other DNA
gatctcggctcactgcaacc

SEQ ID NO: 219000 - DNA, 20 bp, synthetic construct
  source 1..20: mol_type = other DNA
cgatctcggctcactgcaac

SEQ ID NO: 219001 - DNA, 20 bp, synthetic construct
  source 1..20: mol_type = other DNA
gcgatctcggctcactgcaa

SEQ ID NO: 219002 - DNA, 20 bp, synthetic construct
  source 1..20: mol_type = other DNA
tgcgatctcggctcactgca

SEQ ID NO: 219003 - DNA, 20 bp, synthetic construct
  source 1..20: mol_type = other DNA
gtgcgatctcggctcactgc

SEQ ID NO: 219004 - DNA, 20 bp, synthetic construct
  source 1..20: mol_type = other DNA
ggtgcgatctcggctcactg

SEQ ID NO: 219005 - DNA, 20 bp, synthetic construct
  source 1..20: mol_type = other DNA
tggtgcgatctcggctcact

SEQ ID NO: 219006 - DNA, 20 bp, synthetic construct
  source 1..20: mol_type = other DNA
gtggtgcgatctcggctcac

SEQ ID NO: 219007 - DNA, 20 bp, synthetic construct
  source 1..20: mol_type = other DNA
agtggtgcgatctcggctca

SEQ ID NO: 219008 - DNA, 20 bp, synthetic construct
  source 1..20: mol_type = other DNA
cagtggtgcgatctcggctc

SEQ ID NO: 219009 - DNA, 20 bp, synthetic construct
  source 1..20: mol_type = other DNA
acagtggtgcgatctcggct

SEQ ID NO: 219010 - DNA, 20 bp, synthetic construct
  source 1..20: mol_type = other DNA
tacagtggtgcgatctcggc

SEQ ID NO: 219011 - DNA, 20 bp, synthetic construct
  source 1..20: mol_type = other DNA
gtacagtggtgcgatctcgg

SEQ ID NO: 219012 - DNA, 20 bp, synthetic construct
  source 1..20: mol_type = other DNA
agtacagtggtgcgatctcg

SEQ ID NO: 219013 - DNA, 20 bp, synthetic construct
  source 1..20: mol_type = other DNA
gagtacagtggtgcgatctc

SEQ ID NO: 219014 - DNA, 20 bp, synthetic construct
  source 1..20: mol_type = other DNA
tgagtacagtggtgcgatct

SEQ ID NO: 219015 - DNA, 20 bp, synthetic construct
  source 1..20: mol_type = other DNA
ttgagtacagtggtgcgatc

SEQ ID NO: 219016 - DNA, 20 bp, synthetic construct
  source 1..20: mol_type = other DNA
tttgagtacagtggtgcgat

SEQ ID NO: 219017 - DNA, 20 bp, synthetic construct
  source 1..20: mol_type = other DNA
gtttgagtacagtggtgcga

SEQ ID NO: 219018 - DNA, 20 bp, synthetic construct
  source 1..20: mol_type = other DNA
ggtttgagtacagtggtgcg

SEQ ID NO: 219019 - DNA, 20 bp, synthetic construct
  source 1..20: mol_type = other DNA
cggtttgagtacagtggtgc

SEQ ID NO: 219020 - DNA, 20 bp, synthetic construct
  source 1..20: mol_type = other DNA
tcggtttgagtacagtggtg

SEQ ID NO: 219021 - DNA, 20 bp, synthetic construct
  source 1..20: mol_type = other DNA
ctcggtttgagtacagtggt

SEQ ID NO: 219022 - DNA, 20 bp, synthetic construct
  source 1..20: mol_type = other DNA
cctcggtttgagtacagtgg

SEQ ID NO: 219023 - DNA, 20 bp, synthetic construct
  source 1..20: mol_type = other DNA
gcctcggtttgagtacagtg

SEQ ID NO: 219024 - DNA, 20 bp, synthetic construct
  source 1..20: mol_type = other DNA
tgcctcggtttgagtacagt

SEQ ID NO: 219025 - DNA, 20 bp, synthetic construct
  source 1..20: mol_type = other DNA
ttgcctcggtttgagtacag

SEQ ID NO: 219026 - DNA, 20 bp, synthetic construct
  source 1..20: mol_type = other DNA
gttgcctcggtttgagtaca

SEQ ID NO: 219027 - DNA, 20 bp, synthetic construct
  source 1..20: mol_type = other DNA
tgttgcctcggtttgagtac

SEQ ID NO: 219028 - DNA, 20 bp, synthetic construct
  source 1..20: mol_type = other DNA
ctgttgcctcggtttgagta

SEQ ID NO: 219029 - DNA, 20 bp, synthetic construct
  source 1..20: mol_type = other DNA
tctgttgcctcggtttgagt

SEQ ID NO: 219030 - DNA, 20 bp, synthetic construct
  source 1..20: mol_type = other DNA
ctctgttgcctcggtttgag

SEQ ID NO: 219031 - DNA, 20 bp, synthetic construct
  source 1..20: mol_type = other DNA
cctctgttgcctcggtttga

SEQ ID NO: 219032 - DNA, 20 bp, synthetic construct
  source 1..20: mol_type = other DNA
ccctctgttgcctcggtttg

SEQ ID NO: 219033 - DNA, 20 bp, synthetic construct
  source 1..20: mol_type = other DNA
tccctctgttgcctcggttt

SEQ ID NO: 219034 - DNA, 20 bp, synthetic construct
  source 1..20: mol_type = other DNA
ctccctctgttgcctcggtt

SEQ ID NO: 219035 - DNA, 20 bp, synthetic construct
  source 1..20: mol_type = other DNA
tctccctctgttgcctcggt

SEQ ID NO: 219036 - DNA, 20 bp, synthetic construct
  source 1..20: mol_type = other DNA
gtctccctctgttgcctcgg

SEQ ID NO: 219037 - DNA, 20 bp, synthetic construct
  source 1..20: mol_type = other DNA
cgtctccctctgttgcctcg

SEQ ID NO: 219038 - DNA, 20 bp, synthetic construct
  source 1..20: mol_type = other DNA
gcgtctccctctgttgcctc

SEQ ID NO: 219039 - DNA, 20 bp, synthetic construct
  source 1..20: mol_type = other DNA
tgcgtctccctctgttgcct

SEQ ID NO: 219040 - DNA, 20 bp, synthetic construct
  source 1..20: mol_type = other DNA
ttgcgtctccctctgttgcc

SEQ ID NO: 219041 - DNA, 20 bp, synthetic construct
  source 1..20: mol_type = other DNA
attgcgtctccctctgttgc

SEQ ID NO: 219042 - DNA, 20 bp, synthetic construct
  source 1..20: mol_type = other DNA
gattgcgtctccctctgttg

SEQ ID NO: 219043 - DNA, 20 bp, synthetic construct
  source 1..20: mol_type = other DNA
agattgcgtctccctctgtt

SEQ ID NO: 219044 - DNA, 20 bp, synthetic construct
  source 1..20: mol_type = other DNA
gagattgcgtctccctctgt

SEQ ID NO: 219045 - DNA, 20 bp, synthetic construct
  source 1..20: mol_type = other DNA
tgagattgcgtctccctctg

SEQ ID NO: 219046 - DNA, 20 bp, synthetic construct
  source 1..20: mol_type = other DNA
ttgagattgcgtctccctct

SEQ ID NO: 219047 - DNA, 20 bp, synthetic construct
  source 1..20: mol_type = other DNA
tttgagattgcgtctccctc

SEQ ID NO: 219048 - DNA, 20 bp, synthetic construct
  source 1..20: mol_type = other DNA
ttttgagattgcgtctccct

SEQ ID NO: 219049 - DNA, 20 bp, synthetic construct
  source 1..20: mol_type = other DNA
tttttgagattgcgtctccc

SEQ ID NO: 219050 - DNA, 20 bp, synthetic construct
  source 1..20: mol_type = other DNA
ttttttgagattgcgtctcc

SEQ ID NO: 219051 - DNA, 20 bp, synthetic construct
  source 1..20: mol_type = other DNA
tttttttgagattgcgtctc

SEQ ID NO: 219052 - DNA, 20 bp, synthetic construct
  source 1..20: mol_type = other DNA
ttttttttgagattgcgtct

SEQ ID NO: 219053 - DNA, 20 bp, synthetic construct
  source 1..20: mol_type = other DNA
tttttttttgagattgcgtc

SEQ ID NO: 219054 - DNA, 20 bp, synthetic construct
  source 1..20: mol_type = other DNA
ctttttttttgagattgcgt

SEQ ID NO: 219055 - DNA, 20 bp, synthetic construct
  source 1..20: mol_type = other DNA
tctttttttttgagattgcg

SEQ ID NO: 219056 - DNA, 20 bp, synthetic construct
  source 1..20: mol_type = other DNA
ttctttttttttgagattgc

SEQ ID NO: 219057 - DNA, 20 bp, synthetic construct
  source 1..20: mol_type = other DNA
tttctttttttttgagattg

SEQ ID NO: 219058 - DNA, 20 bp, synthetic construct
  source 1..20: mol_type = other DNA
ttttctttttttttgagatt

SEQ ID NO: 219059 - DNA, 20 bp, synthetic construct
  source 1..20: mol_type = other DNA
tttttctttttttttgagat

SEQ ID NO: 219060 - DNA, 20 bp, synthetic construct
  source 1..20: mol_type = other DNA
ttttttctttttttttgaga

SEQ ID NO: 219061 - DNA, 20 bp, synthetic construct
  source 1..20: mol_type = other DNA
tttttttctttttttttgag

SEQ ID NO: 219062 - DNA, 20 bp, synthetic construct
  source 1..20: mol_type = other DNA
ctttttttctttttttttga

SEQ ID NO: 219063 - DNA, 20 bp, synthetic construct
  source 1..20: mol_type = other DNA
tctttttttctttttttttg

SEQ ID NO: 219064 - DNA, 20 bp, synthetic construct
  source 1..20: mol_type = other DNA
gtctttttttcttttttttt

SEQ ID NO: 219065 - DNA, 20 bp, synthetic construct
  source 1..20: mol_type = other DNA
tgtctttttttctttttttt

SEQ ID NO: 219066 - DNA, 20 bp, synthetic construct
  source 1..20: mol_type = other DNA
ttgtctttttttcttttttt

SEQ ID NO: 219067 - DNA, 20 bp, synthetic construct
  source 1..20: mol_type = other DNA
tttgtctttttttctttttt

SEQ ID NO: 219068 - DNA, 20 bp, synthetic construct
  source 1..20: mol_type = other DNA
ctttgtctttttttcttttt

SEQ ID NO: 219069 - DNA, 20 bp, synthetic construct
  source 1..20: mol_type = other DNA
gctttgtctttttttctttt

SEQ ID NO: 219070 - DNA, 20 bp, synthetic construct
  source 1..20: mol_type = other DNA
agctttgtctttttttcttt

SEQ ID NO: 219071 - DNA, 20 bp, synthetic construct
  source 1..20: mol_type = other DNA
aagctttgtctttttttctt

SEQ ID NO: 219072 - DNA, 20 bp, synthetic construct
  source 1..20: mol_type = other DNA
caagctttgtctttttttct

SEQ ID NO: 219073 - DNA, 20 bp, synthetic construct
  source 1..20: mol_type = other DNA
acaagctttgtctttttttc

SEQ ID NO: 219074 - DNA, 20 bp, synthetic construct
  source 1..20: mol_type = other DNA
aacaagctttgtcttttttt

SEQ ID NO: 219075 - DNA, 20 bp, synthetic construct
  source 1..20: mol_type = other DNA
taacaagctttgtctttttt

SEQ ID NO: 219076 - DNA, 20 bp, synthetic construct
  source 1..20: mol_type = other DNA
ttaacaagctttgtcttttt

SEQ ID NO: 219077 - DNA, 20 bp, synthetic construct
  source 1..20: mol_type = other DNA
attaacaagctttgtctttt

SEQ ID NO: 219078 - DNA, 20 bp, synthetic construct
  source 1..20: mol_type = other DNA
tattaacaagctttgtcttt

SEQ ID NO: 219079 - DNA, 20 bp, synthetic construct
  source 1..20: mol_type = other DNA
gtattaacaagctttgtctt

SEQ ID NO: 219080 - DNA, 20 bp, synthetic construct
  source 1..20: mol_type = other DNA
ggtattaacaagctttgtct

SEQ ID NO: 219081 - DNA, 20 bp, synthetic construct
  source 1..20: mol_type = other DNA
tggtattaacaagctttgtc

SEQ ID NO: 219082 - DNA, 20 bp, synthetic construct
  source 1..20: mol_type = other DNA
ctggtattaacaagctttgt

SEQ ID NO: 219083 - DNA, 20 bp, synthetic construct
  source 1..20: mol_type = other DNA
gctggtattaacaagctttg

SEQ ID NO: 219084 - DNA, 20 bp, synthetic construct
  source 1..20: mol_type = other DNA
tgctggtattaacaagcttt

SEQ ID NO: 219085 - DNA, 20 bp, synthetic construct
  source 1..20: mol_type = other DNA
atgctggtattaacaagctt

SEQ ID NO: 219086 - DNA, 20 bp, synthetic construct
  source 1..20: mol_type = other DNA
tatgctggtattaacaagct

SEQ ID NO: 219087 - DNA, 20 bp, synthetic construct
  source 1..20: mol_type = other DNA
atatgctggtattaacaagc

SEQ ID NO: 219088 - DNA, 20 bp, synthetic construct
  source 1..20: mol_type = other DNA
aatatgctggtattaacaag

SEQ ID NO: 219089 - DNA, 20 bp, synthetic construct
  source 1..20: mol_type = other DNA
caatatgctggtattaacaa

SEQ ID NO: 219090 - DNA, 20 bp, synthetic construct
  source 1..20: mol_type = other DNA
acaatatgctggtattaaca

SEQ ID NO: 219091 - DNA, 20 bp, synthetic construct
  source 1..20: mol_type = other DNA
aacaatatgctggtattaac

SEQ ID NO: 219092 - DNA, 20 bp, synthetic construct
  source 1..20: mol_type = other DNA
taacaatatgctggtattaa

SEQ ID NO: 219093 - DNA, 20 bp, synthetic construct
  source 1..20: mol_type = other DNA
ttaacaatatgctggtatta

SEQ ID NO: 219094 - DNA, 20 bp, synthetic construct
  source 1..20: mol_type = other DNA
cttaacaatatgctggtatt

SEQ ID NO: 219095 - DNA, 20 bp, synthetic construct
  source 1..20: mol_type = other DNA
ccttaacaatatgctggtat

SEQ ID NO: 219096 - DNA, 20 bp, synthetic construct
  source 1..20: mol_type = other DNA
cccttaacaatatgctggta

SEQ ID NO: 219097 - DNA, 20 bp, synthetic construct
  source 1..20: mol_type = other DNA
tcccttaacaatatgctggt

SEQ ID NO: 219098 - DNA, 20 bp, synthetic construct
  source 1..20: mol_type = other DNA
ttcccttaacaatatgctgg

SEQ ID NO: 219099 - DNA, 20 bp, synthetic construct
  source 1..20: mol_type = other DNA
attcccttaacaatatgctg

SEQ ID NO: 219100 - DNA, 20 bp, synthetic construct
  source 1..20: mol_type = other DNA
tattcccttaacaatatgct

SEQ ID NO: 219101 - DNA, 20 bp, synthetic construct
  source 1..20: mol_type = other DNA
ttattcccttaacaatatgc

SEQ ID NO: 219102 - DNA, 20 bp, synthetic construct
  source 1..20: mol_type = other DNA
tttattcccttaacaatatg

SEQ ID NO: 219103 - DNA, 20 bp, synthetic construct
  source 1..20: mol_type = other DNA
ctttattcccttaacaatat

SEQ ID NO: 219104 - DNA, 20 bp, synthetic construct
  source 1..20: mol_type = other DNA
actttattcccttaacaata

SEQ ID NO: 219105 - DNA, 20 bp, synthetic construct
  source 1..20: mol_type = other DNA
tactttattcccttaacaat

SEQ ID NO: 219106 - DNA, 20 bp, synthetic construct
  source 1..20: mol_type = other DNA
ctactttattcccttaacaa

SEQ ID NO: 219107 - DNA, 20 bp, synthetic construct
  source 1..20: mol_type = other DNA
cctactttattcccttaaca

SEQ ID NO: 219108 - DNA, 20 bp, synthetic construct
  source 1..20: mol_type = other DNA
gcctactttattcccttaac

SEQ ID NO: 219109 - DNA, 20 bp, synthetic construct
  source 1..20: mol_type = other DNA
agcctactttattcccttaa

SEQ ID NO: 219110 - DNA, 20 bp, synthetic construct
  source 1..20: mol_type = other DNA
cagcctactttattccctta

SEQ ID NO: 219111 - DNA, 20 bp, synthetic construct
  source 1..20: mol_type = other DNA
gcagcctactttattccctt

SEQ ID NO: 219112 - DNA, 20 bp, synthetic construct
  source 1..20: mol_type = other DNA
tgcagcctactttattccct

SEQ ID NO: 219113 - DNA, 20 bp, synthetic construct
  source 1..20: mol_type = other DNA
ctgcagcctactttattccc

SEQ ID NO: 219114 - DNA, 20 bp, synthetic construct
  source 1..20: mol_type = other DNA
tctgcagcctactttattcc

SEQ ID NO: 219115 - DNA, 20 bp, synthetic construct
  source 1..20: mol_type = other DNA
ttctgcagcctactttattc

SEQ ID NO: 219116 - DNA, 20 bp, synthetic construct
  source 1..20: mol_type = other DNA
gttctgcagcctactttatt

SEQ ID NO: 219117 - DNA, 20 bp, synthetic construct
  source 1..20: mol_type = other DNA
tgttctgcagcctactttat

SEQ ID NO: 219118 - DNA, 20 bp, synthetic construct
  source 1..20: mol_type = other DNA
ttgttctgcagcctacttta

SEQ ID NO: 219119 - DNA, 20 bp, synthetic construct
  source 1..20: mol_type = other DNA
gttgttctgcagcctacttt

SEQ ID NO: 219120 - DNA, 20 bp, synthetic construct
  source 1..20: mol_type = other DNA
agttgttctgcagcctactt

SEQ ID NO: 219121 - DNA, 20 bp, synthetic construct
  source 1..20: mol_type = other DNA
cagttgttctgcagcctact

SEQ ID NO: 219122 - DNA, 20 bp, synthetic construct
  source 1..20: mol_type = other DNA
ccagttgttctgcagcctac

SEQ ID NO: 219123 - DNA, 20 bp, synthetic construct
  source 1..20: mol_type = other DNA
accagttgttctgcagccta

SEQ ID NO: 219124 - DNA, 20 bp, synthetic construct
  source 1..20: mol_type = other DNA
caccagttgttctgcagcct

SEQ ID NO: 219125 - DNA, 20 bp, synthetic construct
  source 1..20: mol_type = other DNA
acaccagttgttctgcagcc

SEQ ID NO: 219126 - DNA, 20 bp, synthetic construct
  source 1..20: mol_type = other DNA
tacaccagttgttctgcagc

SEQ ID NO: 219127 - DNA, 20 bp, synthetic construct
  source 1..20: mol_type = other DNA
ttacaccagttgttctgcag

SEQ ID NO: 219128 - DNA, 20 bp, synthetic construct
  source 1..20: mol_type = other DNA
attacaccagttgttctgca

SEQ ID NO: 219129 - DNA, 20 bp, synthetic construct
  source 1..20: mol_type = other DNA
tattacaccagttgttctgc

SEQ ID NO: 219130 - DNA, 20 bp, synthetic construct
  source 1..20: mol_type = other DNA
atattacaccagttgttctg

SEQ ID NO: 219131 - DNA, 20 bp, synthetic construct
  source 1..20: mol_type = other DNA
catattacaccagttgttct

SEQ ID NO: 219132 - DNA, 20 bp, synthetic construct
  source 1..20: mol_type = other DNA
ccatattacaccagttgttc

SEQ ID NO: 219133 - DNA, 20 bp, synthetic construct
  source 1..20: mol_type = other DNA
accatattacaccagttgtt

SEQ ID NO: 219134 - DNA, 20 bp, synthetic construct
  source 1..20: mol_type = other DNA
caccatattacaccagttgt

SEQ ID NO: 219135 - DNA, 20 bp, synthetic construct
  source 1..20: mol_type = other DNA
gcaccatattacaccagttg

SEQ ID NO: 219136 - DNA, 20 bp, synthetic construct
  source 1..20: mol_type = other DNA
ggcaccatattacaccagtt

SEQ ID NO: 219137 - DNA, 20 bp, synthetic construct
  source 1..20: mol_type = other DNA
tggcaccatattacaccagt

SEQ ID NO: 219138 - DNA, 20 bp, synthetic construct
  source 1..20: mol_type = other DNA
atggcaccatattacaccag

SEQ ID NO: 219139 - DNA, 20 bp, synthetic construct
  source 1..20: mol_type = other DNA
catggcaccatattacacca

SEQ ID NO: 219140 - DNA, 20 bp, synthetic construct
  source 1..20: mol_type = other DNA
acatggcaccatattacacc

SEQ ID NO: 219141 - DNA, 20 bp, synthetic construct
  source 1..20: mol_type = other DNA
tacatggcaccatattacac

SEQ ID NO: 219142 - DNA, 20 bp, synthetic construct
  source 1..20: mol_type = other DNA
ctacatggcaccatattaca

SEQ ID NO: 219143 - DNA, 20 bp, synthetic construct
  source 1..20: mol_type = other DNA
cctacatggcaccatattac

SEQ ID NO: 219144 - DNA, 20 bp, synthetic construct
  source 1..20: mol_type = other DNA
ccctacatggcaccatatta

SEQ ID NO: 219145 - DNA, 20 bp, synthetic construct
  source 1..20: mol_type = other DNA
tccctacatggcaccatatt

SEQ ID NO: 219146 - DNA, 20 bp, synthetic construct
  source 1..20: mol_type = other DNA
ttccctacatggcaccatat

SEQ ID NO: 219147 - DNA, 20 bp, synthetic construct
  source 1..20: mol_type = other DNA
tttccctacatggcaccata

SEQ ID NO: 219148 - DNA, 20 bp, synthetic construct
  source 1..20: mol_type = other DNA
ttttccctacatggcaccat

SEQ ID NO: 219149 - DNA, 20 bp, synthetic construct
  source 1..20: mol_type = other DNA
attttccctacatggcacca

SEQ ID NO: 219150 - DNA, 20 bp, synthetic construct
  source 1..20: mol_type = other DNA
aattttccctacatggcacc

SEQ ID NO: 219151 - DNA, 20 bp, synthetic construct
  source 1..20: mol_type = other DNA
taattttccctacatggcac

SEQ ID NO: 219152 - DNA, 20 bp, synthetic construct
  source 1..20: mol_type = other DNA
gtaattttccctacatggca

SEQ ID NO: 219153 - DNA, 20 bp, synthetic construct
  source 1..20: mol_type = other DNA
tgtaattttccctacatggc

SEQ ID NO: 219154 - DNA, 20 bp, synthetic construct
  source 1..20: mol_type = other DNA
atgtaattttccctacatgg

SEQ ID NO: 219155 - DNA, 20 bp, synthetic construct
  source 1..20: mol_type = other DNA
catgtaattttccctacatg

SEQ ID NO: 219156 - DNA, 20 bp, synthetic construct
  source 1..20: mol_type = other DNA
acatgtaattttccctacat

SEQ ID NO: 219157 - DNA, 20 bp, synthetic construct
  source 1..20: mol_type = other DNA
cacatgtaattttccctaca

SEQ ID NO: 219158 - DNA, 20 bp, synthetic construct
  source 1..20: mol_type = other DNA
acacatgtaattttccctac

SEQ ID NO: 219159 - DNA, 20 bp, synthetic construct
  source 1..20: mol_type = other DNA
cacacatgtaattttcccta

SEQ ID NO: 219160 - DNA, 20 bp, synthetic construct
  source 1..20: mol_type = other DNA
gcacacatgtaattttccct

SEQ ID NO: 219161 - DNA, 20 bp, synthetic construct
  source 1..20: mol_type = other DNA
tgcacacatgtaattttccc

SEQ ID NO: 219162 - DNA, 20 bp, synthetic construct
  source 1..20: mol_type = other DNA
atgcacacatgtaattttcc

SEQ ID NO: 219163 - DNA, 20 bp, synthetic construct
  source 1..20: mol_type = other DNA
tatgcacacatgtaattttc

SEQ ID NO: 219164 - DNA, 20 bp, synthetic construct
  source 1..20: mol_type = other DNA
ctatgcacacatgtaatttt

SEQ ID NO: 219165 - DNA, 20 bp, synthetic construct
  source 1..20: mol_type = other DNA
cctatgcacacatgtaattt

SEQ ID NO: 219166 - DNA, 20 bp, synthetic construct
  source 1..20: mol_type = other DNA
tcctatgcacacatgtaatt

SEQ ID NO: 219167 - DNA, 20 bp, synthetic construct
  source 1..20: mol_type = other DNA
ctcctatgcacacatgtaat

SEQ ID NO: 219168 - DNA, 20 bp, synthetic construct
  source 1..20: mol_type = other DNA
tctcctatgcacacatgtaa

SEQ ID NO: 219169 - DNA, 20 bp, synthetic construct
  source 1..20: mol_type = other DNA
ctctcctatgcacacatgta

SEQ ID NO: 219170 - DNA, 20 bp, synthetic construct
  source 1..20: mol_type = other DNA
cctctcctatgcacacatgt

SEQ ID NO: 219171 - DNA, 20 bp, synthetic construct
  source 1..20: mol_type = other DNA
ccctctcctatgcacacatg

SEQ ID NO: 219172 - DNA, 20 bp, synthetic construct
  source 1..20: mol_type = other DNA
cccctctcctatgcacacat

SEQ ID NO: 219173 - DNA, 20 bp, synthetic construct
  source 1..20: mol_type = other DNA
acccctctcctatgcacaca

SEQ ID NO: 219174 - DNA, 20 bp, synthetic construct
  source 1..20: mol_type = other DNA
gacccctctcctatgcacac

SEQ ID NO: 219175 - DNA, 20 bp, synthetic construct
  source 1..20: mol_type = other DNA
agacccctctcctatgcaca

SEQ ID NO: 219176 - DNA, 20 bp, synthetic construct
  source 1..20: mol_type = other DNA
cagacccctctcctatgcac

SEQ ID NO: 219177 - DNA, 20 bp, synthetic construct
  source 1..20: mol_type = other DNA
gcagacccctctcctatgca

SEQ ID NO: 219178 - DNA, 20 bp, synthetic construct
  source 1..20: mol_type = other DNA
tgcagacccctctcctatgc

SEQ ID NO: 219179 - DNA, 20 bp, synthetic construct
  source 1..20: mol_type = other DNA
ttgcagacccctctcctatg

SEQ ID NO: 219180 - DNA, 20 bp, synthetic construct
  source 1..20: mol_type = other DNA
cttgcagacccctctcctat

SEQ ID NO: 219181 - DNA, 20 bp, synthetic construct
  source 1..20: mol_type = other DNA
ccttgcagacccctctccta

SEQ ID NO: 219182 - DNA, 20 bp, synthetic construct
  source 1..20: mol_type = other DNA
accttgcagacccctctcct

SEQ ID NO: 219183 - DNA, 20 bp, synthetic construct
  source 1..20: mol_type = other DNA
aaccttgcagacccctctcc

SEQ ID NO: 219184 - DNA, 20 bp, synthetic construct
  source 1..20: mol_type = other DNA
caaccttgcagacccctctc

SEQ ID NO: 219185 - DNA, 20 bp, synthetic construct
  source 1..20: mol_type = other DNA
acaaccttgcagacccctct

SEQ ID NO: 219186 - DNA, 20 bp, synthetic construct
  source 1..20: mol_type = other DNA
cacaaccttgcagacccctc

SEQ ID NO: 219187 - DNA, 20 bp, synthetic construct
  source 1..20: mol_type = other DNA
gcacaaccttgcagacccct

SEQ ID NO: 219188 - DNA, 20 bp, synthetic construct
  source 1..20: mol_type = other DNA
ggcacaaccttgcagacccc

SEQ ID NO: 219189 - DNA, 20 bp, synthetic construct
  source 1..20: mol_type = other DNA
gggcacaaccttgcagaccc

SEQ ID NO: 219190 - DNA, 20 bp, synthetic construct
  source 1..20: mol_type = other DNA
agggcacaaccttgcagacc

SEQ ID NO: 219191 - DNA, 20 bp, synthetic construct
  source 1..20: mol_type = other DNA
tagggcacaaccttgcagac

SEQ ID NO: 219192 - DNA, 20 bp, synthetic construct
  source 1..20: mol_type = other DNA
ttagggcacaaccttgcaga

SEQ ID NO: 219193 - DNA, 20 bp, synthetic construct
  source 1..20: mol_type = other DNA
cttagggcacaaccttgcag

SEQ ID NO: 219194 - DNA, 20 bp, synthetic construct
  source 1..20: mol_type = other DNA
tcttagggcacaaccttgca

SEQ ID NO: 219195 - DNA, 20 bp, synthetic construct
  source 1..20: mol_type = other DNA
atcttagggcacaaccttgc

SEQ ID NO: 219196 - DNA, 20 bp, synthetic construct
  source 1..20: mol_type = other DNA
catcttagggcacaaccttg

SEQ ID NO: 219197 - DNA, 20 bp, synthetic construct
  source 1..20: mol_type = other DNA
acatcttagggcacaacctt

SEQ ID NO: 219198 - DNA, 20 bp, synthetic construct
  source 1..20: mol_type = other DNA
aacatcttagggcacaacct

SEQ ID NO: 219199 - DNA, 20 bp, synthetic construct
  source 1..20: mol_type = other DNA
taacatcttagggcacaacc

SEQ ID NO: 219200 - DNA, 20 bp, synthetic construct
  source 1..20: mol_type = other DNA
ctaacatcttagggcacaac

SEQ ID NO: 219201 - DNA, 20 bp, synthetic construct
  source 1..20: mol_type = other DNA
tctaacatcttagggcacaa

SEQ ID NO: 219202 - DNA, 20 bp, synthetic construct
  source 1..20: mol_type = other DNA
ctctaacatcttagggcaca

SEQ ID NO: 219203 - DNA, 20 bp, synthetic construct
  source 1..20: mol_type = other DNA
actctaacatcttagggcac

SEQ ID NO: 219204 - DNA, 20 bp, synthetic construct
  source 1..20: mol_type = other DNA
cactctaacatcttagggca

SEQ ID NO: 219205 - DNA, 20 bp, synthetic construct
  source 1..20: mol_type = other DNA
ccactctaacatcttagggc

SEQ ID NO: 219206 - DNA, 20 bp, synthetic construct
  source 1..20: mol_type = other DNA
accactctaacatcttaggg

SEQ ID NO: 219207 - DNA, 20 bp, synthetic construct
  source 1..20: mol_type = other DNA
aaccactctaacatcttagg

SEQ ID NO: 219208 - DNA, 20 bp, synthetic construct
  source 1..20: mol_type = other DNA
gaaccactctaacatcttag

SEQ ID NO: 219209 - DNA, 20 bp, synthetic construct
  source 1..20: mol_type = other DNA
ggaaccactctaacatctta

SEQ ID NO: 219210 - DNA, 20 bp, synthetic construct
  source 1..20: mol_type = other DNA
aggaaccactctaacatctt

SEQ ID NO: 219211 - DNA, 20 bp, synthetic construct
  source 1..20: mol_type = other DNA
aaggaaccactctaacatct

SEQ ID NO: 219212 - DNA, 20 bp, synthetic construct
  source 1..20: mol_type = other DNA
aaaggaaccactctaacatc

SEQ ID NO: 219213 - DNA, 20 bp, synthetic construct
  source 1..20: mol_type = other DNA
caaaggaaccactctaacat

SEQ ID NO: 219214 - DNA, 20 bp, synthetic construct
  source 1..20: mol_type = other DNA
gcaaaggaaccactctaaca

SEQ ID NO: 219215 - DNA, 20 bp, synthetic construct
  source 1..20: mol_type = other DNA
agcaaaggaaccactctaac

SEQ ID NO: 219216 - DNA, 20 bp, synthetic construct
  source 1..20: mol_type = other DNA
aagcaaaggaaccactctaa

SEQ ID NO: 219217 - DNA, 20 bp, synthetic construct
  source 1..20: mol_type = other DNA
aaagcaaaggaaccactcta

SEQ ID NO: 219218 - DNA, 20 bp, synthetic construct
  source 1..20: mol_type = other DNA
aaaagcaaaggaaccactct

SEQ ID NO: 219219 - DNA, 20 bp, synthetic construct
  source 1..20: mol_type = other DNA
gaaaagcaaaggaaccactc

SEQ ID NO: 219220 - DNA, 20 bp, synthetic construct
  source 1..20: mol_type = other DNA
agaaaagcaaaggaaccact

SEQ ID NO: 219221 - DNA, 20 bp, synthetic construct
  source 1..20: mol_type = other DNA
gagaaaagcaaaggaaccac

SEQ ID NO: 219222 - DNA, 20 bp, synthetic construct
  source 1..20: mol_type = other DNA
agagaaaagcaaaggaacca

SEQ ID NO: 219223 - DNA, 20 bp, synthetic construct
  source 1..20: mol_type = other DNA
aagagaaaagcaaaggaacc

SEQ ID NO: 219224 - DNA, 20 bp, synthetic construct
  source 1..20: mol_type = other DNA
aaagagaaaagcaaaggaac

SEQ ID NO: 219225 - DNA, 20 bp, synthetic construct
  source 1..20: mol_type = other DNA
aaaagagaaaagcaaaggaa

SEQ ID NO: 219226 - DNA, 20 bp, synthetic construct
  source 1..20: mol_type = other DNA
taaaagagaaaagcaaagga

SEQ ID NO: 219227 - DNA, 20 bp, synthetic construct
  source 1..20: mol_type = other DNA
ataaaagagaaaagcaaagg

SEQ ID NO: 219228 - DNA, 20 bp, synthetic construct
  source 1..20: mol_type = other DNA
tataaaagagaaaagcaaag

SEQ ID NO: 219229 - DNA, 20 bp, synthetic construct
  source 1..20: mol_type = other DNA
ttataaaagagaaaagcaaa

SEQ ID NO: 219230 - DNA, 20 bp, synthetic construct
  source 1..20: mol_type = other DNA
attataaaagagaaaagcaa

SEQ ID NO: 219231 - DNA, 20 bp, synthetic construct
  source 1..20: mol_type = other DNA
aattataaaagagaaaagca

SEQ ID NO: 219232 - DNA, 20 bp, synthetic construct
  source 1..20: mol_type = other DNA
aaattataaaagagaaaagc

SEQ ID NO: 219233 - DNA, 20 bp, synthetic construct
  source 1..20: mol_type = other DNA
aaaattataaaagagaaaag

SEQ ID NO: 219234 - DNA, 20 bp, synthetic construct
  source 1..20: mol_type = other DNA
caaaattataaaagagaaaa

SEQ ID NO: 219235 - DNA, 20 bp, synthetic construct
  source 1..20: mol_type = other DNA
acaaaattataaaagagaaa

SEQ ID NO: 219236 - DNA, 20 bp, synthetic construct
  source 1..20: mol_type = other DNA
tacaaaattataaaagagaa

SEQ ID NO: 219237 - DNA, 20 bp, synthetic construct
  source 1..20: mol_type = other DNA
atacaaaattataaaagaga

SEQ ID NO: 219238 - DNA, 20 bp, synthetic construct
  source 1..20: mol_type = other DNA
aatacaaaattataaaagag

SEQ ID NO: 219239 - DNA, 20 bp, synthetic construct
  source 1..20: mol_type = other DNA
aaatacaaaattataaaaga

SEQ ID NO: 219240 - DNA, 20 bp, synthetic construct
  source 1..20: mol_type = other DNA
caaatacaaaattataaaag

SEQ ID NO: 219241 - DNA, 20 bp, synthetic construct
  source 1..20: mol_type = other DNA
tcaaatacaaaattataaaa

SEQ ID NO: 219242 - DNA, 20 bp, synthetic construct
  source 1..20: mol_type = other DNA
gtcaaatacaaaattataaa

SEQ ID NO: 219243 - DNA, 20 bp, synthetic construct
  source 1..20: mol_type = other DNA
agtcaaatacaaaattataa

SEQ ID NO: 219244 - DNA, 20 bp, synthetic construct
  source 1..20: mol_type = other DNA
aagtcaaatacaaaattata

SEQ ID NO: 219245 - DNA, 20 bp, synthetic construct
  source 1..20: mol_type = other DNA
aaagtcaaatacaaaattat

SEQ ID NO: 219246 - DNA, 20 bp, synthetic construct
  source 1..20: mol_type = other DNA
aaaagtcaaatacaaaatta

SEQ ID NO: 219247 - DNA, 20 bp, synthetic construct
  source 1..20: mol_type = other DNA
taaaagtcaaatacaaaatt

SEQ ID NO: 219248 - DNA, 20 bp, synthetic construct
  source 1..20: mol_type = other DNA
ttaaaagtcaaatacaaaat

SEQ ID NO: 219249 - DNA, 20 bp, synthetic construct
  source 1..20: mol_type = other DNA
tttaaaagtcaaatacaaaa

SEQ ID NO: 219250 - DNA, 20 bp, synthetic construct
  source 1..20: mol_type = other DNA
atttaaaagtcaaatacaaa

SEQ ID NO: 219251 - DNA, 20 bp, synthetic construct
  source 1..20: mol_type = other DNA
tatttaaaagtcaaatacaa

SEQ ID NO: 219252 - DNA, 20 bp, synthetic construct
  source 1..20: mol_type = other DNA
ttatttaaaagtcaaataca

SEQ ID NO: 219253 - DNA, 20 bp, synthetic construct
  source 1..20: mol_type = other DNA
cttatttaaaagtcaaatac

SEQ ID NO: 219254 - DNA, 20 bp, synthetic construct
  source 1..20: mol_type = other DNA
ccttatttaaaagtcaaata

SEQ ID NO: 219255 - DNA, 20 bp, synthetic construct
  source 1..20: mol_type = other DNA
tccttatttaaaagtcaaat

SEQ ID NO: 219256 - DNA, 20 bp, synthetic construct
  source 1..20: mol_type = other DNA
gtccttatttaaaagtcaaa

SEQ ID NO: 219257 - DNA, 20 bp, synthetic construct
  source 1..20: mol_type = other DNA
ggtccttatttaaaagtcaa

SEQ ID NO: 219258 - DNA, 20 bp, synthetic construct
  source 1..20: mol_type = other DNA
tggtccttatttaaaagtca

SEQ ID NO: 219259 - DNA, 20 bp, synthetic construct
  source 1..20: mol_type = other DNA
atggtccttatttaaaagtc

SEQ ID NO: 219260 - DNA, 20 bp, synthetic construct
  source 1..20: mol_type = other DNA
tatggtccttatttaaaagt

SEQ ID NO: 219261 - DNA, 20 bp, synthetic construct
  source 1..20: mol_type = other DNA
ttatggtccttatttaaaag

SEQ ID NO: 219262 - DNA, 20 bp, synthetic construct
  source 1..20: mol_type = other DNA
tttatggtccttatttaaaa

SEQ ID NO: 219263 - DNA, 20 bp, synthetic construct
  source 1..20: mol_type = other DNA
atttatggtccttatttaaa

SEQ ID NO: 219264 - DNA, 20 bp, synthetic construct
  source 1..20: mol_type = other DNA
gatttatggtccttatttaa

SEQ ID NO: 219265 - DNA, 20 bp, synthetic construct
  source 1..20: mol_type = other DNA
tgatttatggtccttattta

SEQ ID NO: 219266 - DNA, 20 bp, synthetic construct
  source 1..20: mol_type = other DNA
gtgatttatggtccttattt

SEQ ID NO: 219267 - DNA, 20 bp, synthetic construct
  source 1..20: mol_type = other DNA
agtgatttatggtccttatt

SEQ ID NO: 219268 - DNA, 20 bp, synthetic construct
  source 1..20: mol_type = other DNA
aagtgatttatggtccttat

SEQ ID NO: 219269 - DNA, 20 bp, synthetic construct
  source 1..20: mol_type = other DNA
aaagtgatttatggtcctta

SEQ ID NO: 219270 - DNA, 20 bp, synthetic construct
  source 1..20: mol_type = other DNA
aaaagtgatttatggtcctt

SEQ ID NO: 219271 - DNA, 20 bp, synthetic construct
  source 1..20: mol_type = other DNA
taaaagtgatttatggtcct

SEQ ID NO: 219272 - DNA, 20 bp, synthetic construct
  source 1..20: mol_type = other DNA
ataaaagtgatttatggtcc

SEQ ID NO: 219273 - DNA, 20 bp, synthetic construct
  source 1..20: mol_type = other DNA
tataaaagtgatttatggtc

SEQ ID NO: 219274 - DNA, 20 bp, synthetic construct
  source 1..20: mol_type = other DNA
ttataaaagtgatttatggt

SEQ ID NO: 219275 - DNA, 20 bp, synthetic construct
  source 1..20: mol_type = other DNA
tttataaaagtgatttatgg

SEQ ID NO: 219276 - DNA, 20 bp, synthetic construct
  source 1..20: mol_type = other DNA
ttttataaaagtgatttatg

SEQ ID NO: 219277 - DNA, 20 bp, synthetic construct
  source 1..20: mol_type = other DNA
attttataaaagtgatttat

SEQ ID NO: 219278 - DNA, 20 bp, synthetic construct
  source 1..20: mol_type = other DNA
tattttataaaagtgattta

SEQ ID NO: 219279 - DNA, 20 bp, synthetic construct
  source 1..20: mol_type = other DNA
gtattttataaaagtgattt

SEQ ID NO: 219280 - DNA, 20 bp, synthetic construct
  source 1..20: mol_type = other DNA
tgtattttataaaagtgatt

SEQ ID NO: 219281 - DNA, 20 bp, synthetic construct
  source 1..20: mol_type = other DNA
atgtattttataaaagtgat

SEQ ID NO: 219282 - DNA, 20 bp, synthetic construct
  source 1..20: mol_type = other DNA
aatgtattttataaaagtga

SEQ ID NO: 219283 - DNA, 20 bp, synthetic construct
  source 1..20: mol_type = other DNA
gaatgtattttataaaagtg

SEQ ID NO: 219284 - DNA, 20 bp, synthetic construct
  source 1..20: mol_type = other DNA
agaatgtattttataaaagt

SEQ ID NO: 219285 - DNA, 20 bp, synthetic construct
  source 1..20: mol_type = other DNA
gagaatgtattttataaaag

SEQ ID NO: 219286 - DNA, 20 bp, synthetic construct
  source 1..20: mol_type = other DNA
agagaatgtattttataaaa

SEQ ID NO: 219287 - DNA, 20 bp, synthetic construct
  source 1..20: mol_type = other DNA
gagagaatgtattttataaa

SEQ ID NO: 219288 - DNA, 20 bp, synthetic construct
  source 1..20: mol_type = other DNA
ggagagaatgtattttataa

SEQ ID NO: 219289 - DNA, 20 bp, synthetic construct
  source 1..20: mol_type = other DNA
tggagagaatgtattttata

SEQ ID NO: 219290 - DNA, 20 bp, synthetic construct
  source 1..20: mol_type = other DNA
ctggagagaatgtattttat

SEQ ID NO: 219291 - DNA, 20 bp, synthetic construct
  source 1..20: mol_type = other DNA
gctggagagaatgtatttta

SEQ ID NO: 219292 - DNA, 20 bp, synthetic construct
  source 1..20: mol_type = other DNA
ggctggagagaatgtatttt

SEQ ID NO: 219293 - DNA, 20 bp, synthetic construct
  source 1..20: mol_type = other DNA
gggctggagagaatgtattt

SEQ ID NO: 219294 - DNA, 20 bp, synthetic construct
  source 1..20: mol_type = other DNA
ggggctggagagaatgtatt

SEQ ID NO: 219295 - DNA, 20 bp, synthetic construct
  source 1..20: mol_type = other DNA
aggggctggagagaatgtat

SEQ ID NO: 219296 - DNA, 20 bp, synthetic construct
  source 1..20: mol_type = other DNA
taggggctggagagaatgta

SEQ ID NO: 219297 - DNA, 20 bp, synthetic construct
  source 1..20: mol_type = other DNA
gtaggggctggagagaatgt

SEQ ID NO: 219298 - DNA, 20 bp, synthetic construct
  source 1..20: mol_type = other DNA
agtaggggctggagagaatg

SEQ ID NO: 219299 - DNA, 20 bp, synthetic construct
  source 1..20: mol_type = other DNA
tagtaggggctggagagaat

SEQ ID NO: 219300 - DNA, 20 bp, synthetic construct
  source 1..20: mol_type = other DNA
gtagtaggggctggagagaa

SEQ ID NO: 219301 - DNA, 20 bp, synthetic construct
  source 1..20: mol_type = other DNA
agtagtaggggctggagaga

SEQ ID NO: 219302 - DNA, 20 bp, synthetic construct
  source 1..20: mol_type = other DNA
gagtagtaggggctggagag

SEQ ID NO: 219303 - DNA, 20 bp, synthetic construct
  source 1..20: mol_type = other DNA
ggagtagtaggggctggaga

SEQ ID NO: 219304 - DNA, 20 bp, synthetic construct
  source 1..20: mol_type = other DNA
aggagtagtaggggctggag

SEQ ID NO: 219305 - DNA, 20 bp, synthetic construct
  source 1..20: mol_type = other DNA
aaggagtagtaggggctgga

SEQ ID NO: 219306 - DNA, 20 bp, synthetic construct
  source 1..20: mol_type = other DNA
aaaggagtagtaggggctgg

SEQ ID NO: 219307 - DNA, 20 bp, synthetic construct
  source 1..20: mol_type = other DNA
taaaggagtagtaggggctg

SEQ ID NO: 219308 - DNA, 20 bp, synthetic construct
  source 1..20: mol_type = other DNA
ttaaaggagtagtaggggct

SEQ ID NO: 219309 - DNA, 20 bp, synthetic construct
  source 1..20: mol_type = other DNA
tttaaaggagtagtaggggc

SEQ ID NO: 219310 - DNA, 20 bp, synthetic construct
  source 1..20: mol_type = other DNA
ctttaaaggagtagtagggg

SEQ ID NO: 219311 - DNA, 20 bp, synthetic construct
  source 1..20: mol_type = other DNA
tctttaaaggagtagtaggg

SEQ ID NO: 219312 - DNA, 20 bp, synthetic construct
  source 1..20: mol_type = other DNA
ttctttaaaggagtagtagg

SEQ ID NO: 219313 - DNA, 20 bp, synthetic construct
  source 1..20: mol_type = other DNA
attctttaaaggagtagtag

SEQ ID NO: 219314 - DNA, 20 bp, synthetic construct
  source 1..20: mol_type = other DNA
tattctttaaaggagtagta

SEQ ID NO: 219315 - DNA, 20 bp, synthetic construct
  source 1..20: mol_type = other DNA
ttattctttaaaggagtagt

SEQ ID NO: 219316 - DNA, 20 bp, synthetic construct
  source 1..20: mol_type = other DNA
cttattctttaaaggagtag

SEQ ID NO: 219317 - DNA, 20 bp, synthetic construct
  source 1..20: mol_type = other DNA
tcttattctttaaaggagta

SEQ ID NO: 219318 - DNA, 20 bp, synthetic construct
  source 1..20: mol_type = other DNA
ctcttattctttaaaggagt

SEQ ID NO: 219319 - DNA, 20 bp, synthetic construct
  source 1..20: mol_type = other DNA
actcttattctttaaaggag

SEQ ID NO: 219320 - DNA, 20 bp, synthetic construct
  source 1..20: mol_type = other DNA
cactcttattctttaaagga

SEQ ID NO: 219321 - DNA, 20 bp, synthetic construct
  source 1..20: mol_type = other DNA
ccactcttattctttaaagg

SEQ ID NO: 219322 - DNA, 20 bp, synthetic construct
  source 1..20: mol_type = other DNA
accactcttattctttaaag

SEQ ID NO: 219323 - DNA, 20 bp, synthetic construct
  source 1..20: mol_type = other DNA
aaccactcttattctttaaa

SEQ ID NO: 219324 - DNA, 20 bp, synthetic construct
  source 1..20: mol_type = other DNA
aaaccactcttattctttaa

SEQ ID NO: 219325 - DNA, 20 bp, synthetic construct
  source 1..20: mol_type = other DNA
caaaccactcttattcttta

SEQ ID NO: 219326 - DNA, 20 bp, synthetic construct
  source 1..20: mol_type = other DNA
gcaaaccactcttattcttt

SEQ ID NO: 219327 - DNA, 20 bp, synthetic construct
  source 1..20: mol_type = other DNA
ggcaaaccactcttattctt

SEQ ID NO: 219328 - DNA, 20 bp, synthetic construct
  source 1..20: mol_type = other DNA
gggcaaaccactcttattct

SEQ ID NO: 219329 - DNA, 20 bp, synthetic construct
  source 1..20: mol_type = other DNA
tgggcaaaccactcttattc

SEQ ID NO: 219330 - DNA, 20 bp, synthetic construct
  source 1..20: mol_type = other DNA
ttgggcaaaccactcttatt

SEQ ID NO: 219331 - DNA, 20 bp, synthetic construct
  source 1..20: mol_type = other DNA
cttgggcaaaccactcttat

SEQ ID NO: 219332 - DNA, 20 bp, synthetic construct
  source 1..20: mol_type = other DNA
tcttgggcaaaccactctta

SEQ ID NO: 219333 - DNA, 20 bp, synthetic construct
  source 1..20: mol_type = other DNA
ttcttgggcaaaccactctt

SEQ ID NO: 219334 - DNA, 20 bp, synthetic construct
  source 1..20: mol_type = other DNA
tttcttgggcaaaccactct

SEQ ID NO: 219335 - DNA, 20 bp, synthetic construct
  source 1..20: mol_type = other DNA
ctttcttgggcaaaccactc

SEQ ID NO: 219336 - DNA, 20 bp, synthetic construct
  source 1..20: mol_type = other DNA
tctttcttgggcaaaccact

SEQ ID NO: 219337 - DNA, 20 bp, synthetic construct
  source 1..20: mol_type = other DNA
gtctttcttgggcaaaccac

SEQ ID NO: 219338 - DNA, 20 bp, synthetic construct
  source 1..20: mol_type = other DNA
tgtctttcttgggcaaacca

SEQ ID NO: 219339 - DNA, 20 bp, synthetic construct
  source 1..20: mol_type = other DNA
ctgtctttcttgggcaaacc

SEQ ID NO: 219340 - DNA, 20 bp, synthetic construct
  source 1..20: mol_type = other DNA
actgtctttcttgggcaaac

SEQ ID NO: 219341 - DNA, 20 bp, synthetic construct
  source 1..20: mol_type = other DNA
aactgtctttcttgggcaaa

SEQ ID NO: 219342 - DNA, 20 bp, synthetic construct
  source 1..20: mol_type = other DNA
aaactgtctttcttgggcaa

SEQ ID NO: 219343 - DNA, 20 bp, synthetic construct
  source 1..20: mol_type = other DNA
aaaactgtctttcttgggca

SEQ ID NO: 219344 - DNA, 20 bp, synthetic construct
  source 1..20: mol_type = other DNA
aaaaactgtctttcttgggc

SEQ ID NO: 219345 - DNA, 20 bp, synthetic construct
  source 1..20: mol_type = other DNA
aaaaaactgtctttcttggg

SEQ ID NO: 219346 - DNA, 20 bp, synthetic construct
  source 1..20: mol_type = other DNA
aaaaaaactgtctttcttgg

SEQ ID NO: 219347 - DNA, 20 bp, synthetic construct
  source 1..20: mol_type = other DNA
aaaaaaaactgtctttcttg

SEQ ID NO: 219348 - DNA, 20 bp, synthetic construct
  source 1..20: mol_type = other DNA
caaaaaaaactgtctttctt

SEQ ID NO: 219349 - DNA, 20 bp, synthetic construct
  source 1..20: mol_type = other DNA
gcaaaaaaaactgtctttct

SEQ ID NO: 219350 - DNA, 20 bp, synthetic construct
  source 1..20: mol_type = other DNA
agcaaaaaaaactgtctttc

SEQ ID NO: 219351 - DNA, 20 bp, synthetic construct
  source 1..20: mol_type = other DNA
gagcaaaaaaaactgtcttt

SEQ ID NO: 219352 - DNA, 20 bp, synthetic construct
  source 1..20: mol_type = other DNA
agagcaaaaaaaactgtctt

SEQ ID NO: 219353 - DNA, 20 bp, synthetic construct
  source 1..20: mol_type = other DNA
cagagcaaaaaaaactgtct

SEQ ID NO: 219354 - DNA, 20 bp, synthetic construct
  source 1..20: mol_type = other DNA
ccagagcaaaaaaaactgtc

SEQ ID NO: 219355 - DNA, 20 bp, synthetic construct
  source 1..20: mol_type = other DNA
accagagcaaaaaaaactgt

SEQ ID NO: 219356 - DNA, 20 bp, synthetic construct
  source 1..20: mol_type = other DNA
aaccagagcaaaaaaaactg

SEQ ID NO: 219357 - DNA, 20 bp, synthetic construct
  source 1..20: mol_type = other DNA
aaaccagagcaaaaaaaact

SEQ ID NO: 219358 - DNA, 20 bp, synthetic construct
  source 1..20: mol_type = other DNA
aaaaccagagcaaaaaaaac

SEQ ID NO: 219359 - DNA, 20 bp, synthetic construct
  source 1..20: mol_type = other DNA
gaaaaccagagcaaaaaaaa

SEQ ID NO: 219360 - DNA, 20 bp, synthetic construct
  source 1..20: mol_type = other DNA
agaaaaccagagcaaaaaaa

SEQ ID NO: 219361 - DNA, 20 bp, synthetic construct
  source 1..20: mol_type = other DNA
aagaaaaccagagcaaaaaa

SEQ ID NO: 219362 - DNA, 20 bp, synthetic construct
  source 1..20: mol_type = other DNA
caagaaaaccagagcaaaaa

SEQ ID NO: 219363 - DNA, 20 bp, synthetic construct
  source 1..20: mol_type = other DNA
tcaagaaaaccagagcaaaa

SEQ ID NO: 219364 - DNA, 20 bp, synthetic construct
  source 1..20: mol_type = other DNA
atcaagaaaaccagagcaaa

SEQ ID NO: 219365 - DNA, 20 bp, synthetic construct
  source 1..20: mol_type = other DNA
aatcaagaaaaccagagcaa

SEQ ID NO: 219366 - DNA, 20 bp, synthetic construct
  source 1..20: mol_type = other DNA
gaatcaagaaaaccagagca

SEQ ID NO: 219367 - DNA, 20 bp, synthetic construct
  source 1..20: mol_type = other DNA
agaatcaagaaaaccagagc

SEQ ID NO: 219368 - DNA, 20 bp, synthetic construct
  source 1..20: mol_type = other DNA
cagaatcaagaaaaccagag

SEQ ID NO: 219369 - DNA, 20 bp, synthetic construct
  source 1..20: mol_type = other DNA
tcagaatcaagaaaaccaga

SEQ ID NO: 219370 - DNA, 20 bp, synthetic construct
  source 1..20: mol_type = other DNA
gtcagaatcaagaaaaccag

SEQ ID NO: 219371 - DNA, 20 bp, synthetic construct
  source 1..20: mol_type = other DNA
tgtcagaatcaagaaaacca

SEQ ID NO: 219372 - DNA, 20 bp, synthetic construct
  source 1..20: mol_type = other DNA
atgtcagaatcaagaaaacc

SEQ ID NO: 219373 - DNA, 20 bp, synthetic construct
  source 1..20: mol_type = other DNA
gatgtcagaatcaagaaaac

SEQ ID NO: 219374 - DNA, 20 bp, synthetic construct
  source 1..20: mol_type = other DNA
tgatgtcagaatcaagaaaa

SEQ ID NO: 219375 - DNA, 20 bp, synthetic construct
  source 1..20: mol_type = other DNA
ctgatgtcagaatcaagaaa

SEQ ID NO: 219376 - DNA, 20 bp, synthetic construct
  source 1..20: mol_type = other DNA
tctgatgtcagaatcaagaa

SEQ ID NO: 219377 - DNA, 20 bp, synthetic construct
  source 1..20: mol_type = other DNA
ctctgatgtcagaatcaaga

SEQ ID NO: 219378 - DNA, 20 bp, synthetic construct
  source 1..20: mol_type = other DNA
cctctgatgtcagaatcaag

SEQ ID NO: 219379 - DNA, 20 bp, synthetic construct
  source 1..20: mol_type = other DNA
tcctctgatgtcagaatcaa

SEQ ID NO: 219380 - DNA, 20 bp, synthetic construct
  source 1..20: mol_type = other DNA
ttcctctgatgtcagaatca

SEQ ID NO: 219381 - DNA, 20 bp, synthetic construct
  source 1..20: mol_type = other DNA
tttcctctgatgtcagaatc

SEQ ID NO: 219382 - DNA, 20 bp, synthetic construct
  source 1..20: mol_type = other DNA
gtttcctctgatgtcagaat

SEQ ID NO: 219383 - DNA, 20 bp, synthetic construct
  source 1..20: mol_type = other DNA
agtttcctctgatgtcagaa

SEQ ID NO: 219384 - DNA, 20 bp, synthetic construct
  source 1..20: mol_type = other DNA
cagtttcctctgatgtcaga

SEQ ID NO: 219385 - DNA, 20 bp, synthetic construct
  source 1..20: mol_type = other DNA
gcagtttcctctgatgtcag

SEQ ID NO: 219386 - DNA, 20 bp, synthetic construct
  source 1..20: mol_type = other DNA
agcagtttcctctgatgtca

SEQ ID NO: 219387 - DNA, 20 bp, synthetic construct
  source 1..20: mol_type = other DNA
aagcagtttcctctgatgtc

SEQ ID NO: 219388 - DNA, 20 bp, synthetic construct
  source 1..20: mol_type = other DNA
gaagcagtttcctctgatgt

SEQ ID NO: 219389 - DNA, 20 bp, synthetic construct
  source 1..20: mol_type = other DNA
agaagcagtttcctctgatg

SEQ ID NO: 219390 - DNA, 20 bp, synthetic construct
  source 1..20: mol_type = other DNA
gagaagcagtttcctctgat

SEQ ID NO: 219391 - DNA, 20 bp, synthetic construct
  source 1..20: mol_type = other DNA
tgagaagcagtttcctctga

SEQ ID NO: 219392 - DNA, 20 bp, synthetic construct
  source 1..20: mol_type = other DNA
atgagaagcagtttcctctg

SEQ ID NO: 219393 - DNA, 20 bp, synthetic construct
  source 1..20: mol_type = other DNA
gatgagaagcagtttcctct

SEQ ID NO: 219394 - DNA, 20 bp, synthetic construct
  source 1..20: mol_type = other DNA
ggatgagaagcagtttcctc

SEQ ID NO: 219395 - DNA, 20 bp, synthetic construct
  source 1..20: mol_type = other DNA
tggatgagaagcagtttcct

SEQ ID NO: 219396 - DNA, 20 bp, synthetic construct
  source 1..20: mol_type = other DNA
gtggatgagaagcagtttcc

SEQ ID NO: 219397 - DNA, 20 bp, synthetic construct
  source 1..20: mol_type = other DNA
agtggatgagaagcagtttc

SEQ ID NO: 219398 - DNA, 20 bp, synthetic construct
  source 1..20: mol_type = other DNA
aagtggatgagaagcagttt

SEQ ID NO: 219399 - DNA, 20 bp, synthetic construct
  source 1..20: mol_type = other DNA
caagtggatgagaagcagtt

SEQ ID NO: 219400 - DNA, 20 bp, synthetic construct
  source 1..20: mol_type = other DNA
ccaagtggatgagaagcagt

SEQ ID NO: 219401 - DNA, 20 bp, synthetic construct
  source 1..20: mol_type = other DNA
cccaagtggatgagaagcag

SEQ ID NO: 219402 - DNA, 20 bp, synthetic construct
  source 1..20: mol_type = other DNA
ccccaagtggatgagaagca

SEQ ID NO: 219403 - DNA, 20 bp, synthetic construct
  source 1..20: mol_type = other DNA
gccccaagtggatgagaagc

SEQ ID NO: 219404 - DNA, 20 bp, synthetic construct
  source 1..20: mol_type = other DNA
agccccaagtggatgagaag

SEQ ID NO: 219405 - DNA, 20 bp, synthetic construct
  source 1..20: mol_type = other DNA
gagccccaagtggatgagaa

SEQ ID NO: 219406 - DNA, 20 bp, synthetic construct
  source 1..20: mol_type = other DNA
agagccccaagtggatgaga

SEQ ID NO: 219407 - DNA, 20 bp, synthetic construct
  source 1..20: mol_type = other DNA
cagagccccaagtggatgag

SEQ ID NO: 219408 - DNA, 20 bp, synthetic construct
  source 1..20: mol_type = other DNA
ccagagccccaagtggatga

SEQ ID NO: 219409 - DNA, 20 bp, synthetic construct
  source 1..20: mol_type = other DNA
cccagagccccaagtggatg

SEQ ID NO: 219410 - DNA, 20 bp, synthetic construct
  source 1..20: mol_type = other DNA
acccagagccccaagtggat

SEQ ID NO: 219411 - DNA, 20 bp, synthetic construct
  source 1..20: mol_type = other DNA
aacccagagccccaagtgga

SEQ ID NO: 219412 - DNA, 20 bp, synthetic construct
  source 1..20: mol_type = other DNA
gaacccagagccccaagtgg

SEQ ID NO: 219413 - DNA, 20 bp, synthetic construct
  source 1..20: mol_type = other DNA
tgaacccagagccccaagtg

SEQ ID NO: 219414 - DNA, 20 bp, synthetic construct
  source 1..20: mol_type = other DNA
ctgaacccagagccccaagt

SEQ ID NO: 219415 - DNA, 20 bp, synthetic construct
  source 1..20: mol_type = other DNA
cctgaacccagagccccaag

SEQ ID NO: 219416 - DNA, 20 bp, synthetic construct
  source 1..20: mol_type = other DNA
ccctgaacccagagccccaa

SEQ ID NO: 219417 - DNA, 20 bp, synthetic construct
  source 1..20: mol_type = other DNA
cccctgaacccagagcccca

SEQ ID NO: 219418 - DNA, 20 bp, synthetic construct
  source 1..20: mol_type = other DNA
tcccctgaacccagagcccc

SEQ ID NO: 219419 - DNA, 20 bp, synthetic construct
  source 1..20: mol_type = other DNA
atcccctgaacccagagccc

SEQ ID NO: 219420 - DNA, 20 bp, synthetic construct
  source 1..20: mol_type = other DNA
aatcccctgaacccagagcc

SEQ ID NO: 219421 - DNA, 20 bp, synthetic construct
  source 1..20: mol_type = other DNA
gaatcccctgaacccagagc

SEQ ID NO: 219422 - DNA, 20 bp, synthetic construct
  source 1..20: mol_type = other DNA
tgaatcccctgaacccagag

SEQ ID NO: 219423 - DNA, 20 bp, synthetic construct
  source 1..20: mol_type = other DNA
atgaatcccctgaacccaga

SEQ ID NO: 219424 - DNA, 20 bp, synthetic construct
  source 1..20: mol_type = other DNA
aatgaatcccctgaacccag

SEQ ID NO: 219425 - DNA, 20 bp, synthetic construct
  source 1..20: mol_type = other DNA
aaatgaatcccctgaaccca

SEQ ID NO: 219426 - DNA, 20 bp, synthetic construct
  source 1..20: mol_type = other DNA
gaaatgaatcccctgaaccc

SEQ ID NO: 219427 - DNA, 20 bp, synthetic construct
  source 1..20: mol_type = other DNA
tgaaatgaatcccctgaacc

SEQ ID NO: 219428 - DNA, 20 bp, synthetic construct
  source 1..20: mol_type = other DNA
ctgaaatgaatcccctgaac

SEQ ID NO: 219429 - DNA, 20 bp, synthetic construct
  source 1..20: mol_type = other DNA
cctgaaatgaatcccctgaa

SEQ ID NO: 219430 - DNA, 20 bp, synthetic construct
  source 1..20: mol_type = other DNA
gcctgaaatgaatcccctga

SEQ ID NO: 219431 - DNA, 20 bp, synthetic construct
  source 1..20: mol_type = other DNA
tgcctgaaatgaatcccctg

SEQ ID NO: 219432 - DNA, 20 bp, synthetic construct
  source 1..20: mol_type = other DNA
ctgcctgaaatgaatcccct

SEQ ID NO: 219433 - DNA, 20 bp, synthetic construct
  source 1..20: mol_type = other DNA
tctgcctgaaatgaatcccc

SEQ ID NO: 219434 - DNA, 20 bp, synthetic construct
  source 1..20: mol_type = other DNA
atctgcctgaaatgaatccc

SEQ ID NO: 219435 - DNA, 20 bp, synthetic construct
  source 1..20: mol_type = other DNA
aatctgcctgaaatgaatcc

SEQ ID NO: 219436 - DNA, 20 bp, synthetic construct
  source 1..20: mol_type = other DNA
taatctgcctgaaatgaatc

SEQ ID NO: 219437 - DNA, 20 bp, synthetic construct
  source 1..20: mol_type = other DNA
ttaatctgcctgaaatgaat

SEQ ID NO: 219438 - DNA, 20 bp, synthetic construct
  source 1..20: mol_type = other DNA
tttaatctgcctgaaatgaa

SEQ ID NO: 219439 - DNA, 20 bp, synthetic construct
  source 1..20: mol_type = other DNA
ctttaatctgcctgaaatga

SEQ ID NO: 219440 - DNA, 20 bp, synthetic construct
  source 1..20: mol_type = other DNA
actttaatctgcctgaaatg

SEQ ID NO: 219441 - DNA, 20 bp, synthetic construct
  source 1..20: mol_type = other DNA
cactttaatctgcctgaaat

SEQ ID NO: 219442 - DNA, 20 bp, synthetic construct
  source 1..20: mol_type = other DNA
ccactttaatctgcctgaaa

SEQ ID NO: 219443 - DNA, 20 bp, synthetic construct
  source 1..20: mol_type = other DNA
accactttaatctgcctgaa

SEQ ID NO: 219444 - DNA, 20 bp, synthetic construct
  source 1..20: mol_type = other DNA
caccactttaatctgcctga

SEQ ID NO: 219445 - DNA, 20 bp, synthetic construct
  source 1..20: mol_type = other DNA
tcaccactttaatctgcctg

SEQ ID NO: 219446 - DNA, 20 bp, synthetic construct
  source 1..20: mol_type = other DNA
gtcaccactttaatctgcct

SEQ ID NO: 219447 - DNA, 20 bp, synthetic construct
  source 1..20: mol_type = other DNA
ggtcaccactttaatctgcc

SEQ ID NO: 219448 - DNA, 20 bp, synthetic construct
  source 1..20: mol_type = other DNA
tggtcaccactttaatctgc

SEQ ID NO: 219449 - DNA, 20 bp, synthetic construct
  source 1..20: mol_type = other DNA
ctggtcaccactttaatctg

SEQ ID NO: 219450 - DNA, 20 bp, synthetic construct
  source 1..20: mol_type = other DNA
cctggtcaccactttaatct

SEQ ID NO: 219451 - DNA, 20 bp, synthetic construct
  source 1..20: mol_type = other DNA
ccctggtcaccactttaatc

SEQ ID NO: 219452 - DNA, 20 bp, synthetic construct
  source 1..20: mol_type = other DNA
cccctggtcaccactttaat

SEQ ID NO: 219453 - DNA, 20 bp, synthetic construct
  source 1..20: mol_type = other DNA
gcccctggtcaccactttaa

SEQ ID NO: 219454 - DNA, 20 bp, synthetic construct
  source 1..20: mol_type = other DNA
tgcccctggtcaccacttta

SEQ ID NO: 219455 - DNA, 20 bp, synthetic construct
  source 1..20: mol_type = other DNA
atgcccctggtcaccacttt

SEQ ID NO: 219456 - DNA, 20 bp, synthetic construct
  source 1..20: mol_type = other DNA
aatgcccctggtcaccactt

SEQ ID NO: 219457 - DNA, 20 bp, synthetic construct
  source 1..20: mol_type = other DNA
gaatgcccctggtcaccact

SEQ ID NO: 219458 - DNA, 20 bp, synthetic construct
  source 1..20: mol_type = other DNA
cgaatgcccctggtcaccac

SEQ ID NO: 219459 - DNA, 20 bp, synthetic construct
  source 1..20: mol_type = other DNA
acgaatgcccctggtcacca

SEQ ID NO: 219460 - DNA, 20 bp, synthetic construct
  source 1..20: mol_type = other DNA
cacgaatgcccctggtcacc

SEQ ID NO: 219461 - DNA, 20 bp, synthetic construct
  source 1..20: mol_type = other DNA
ccacgaatgcccctggtcac

SEQ ID NO: 219462 - DNA, 20 bp, synthetic construct
  source 1..20: mol_type = other DNA
tccacgaatgcccctggtca

SEQ ID NO: 219463 - DNA, 20 bp, synthetic construct
  source 1..20: mol_type = other DNA
gtccacgaatgcccctggtc

SEQ ID NO: 219464 - DNA, 20 bp, synthetic construct
  source 1..20: mol_type = other DNA
tgtccacgaatgcccctggt

SEQ ID NO: 219465 - DNA, 20 bp, synthetic construct
  source 1..20: mol_type = other DNA
gtgtccacgaatgcccctgg

SEQ ID NO: 219466 - DNA, 20 bp, synthetic construct
  source 1..20: mol_type = other DNA
tgtgtccacgaatgcccctg

SEQ ID NO: 219467 - DNA, 20 bp, synthetic construct
  source 1..20: mol_type = other DNA
ctgtgtccacgaatgcccct

SEQ ID NO: 219468 - DNA, 20 bp, synthetic construct
  source 1..20: mol_type = other DNA
cctgtgtccacgaatgcccc

SEQ ID NO: 219469 - DNA, 20 bp, synthetic construct
  source 1..20: mol_type = other DNA
ccctgtgtccacgaatgccc

SEQ ID NO: 219470 - DNA, 20 bp, synthetic construct
  source 1..20: mol_type = other DNA
tccctgtgtccacgaatgcc

SEQ ID NO: 219471 - DNA, 20 bp, synthetic construct
  source 1..20: mol_type = other DNA
ctccctgtgtccacgaatgc

SEQ ID NO: 219472 - DNA, 20 bp, synthetic construct
  source 1..20: mol_type = other DNA
cctccctgtgtccacgaatg

SEQ ID NO: 219473 - DNA, 20 bp, synthetic construct
  source 1..20: mol_type = other DNA
ccctccctgtgtccacgaat

SEQ ID NO: 219474 - DNA, 20 bp, synthetic construct
  source 1..20: mol_type = other DNA
tccctccctgtgtccacgaa

SEQ ID NO: 219475 - DNA, 20 bp, synthetic construct
  source 1..20: mol_type = other DNA
gtccctccctgtgtccacga

SEQ ID NO: 219476 - DNA, 20 bp, synthetic construct
  source 1..20: mol_type = other DNA
tgtccctccctgtgtccacg

SEQ ID NO: 219477 - DNA, 20 bp, synthetic construct
  source 1..20: mol_type = other DNA
ctgtccctccctgtgtccac

SEQ ID NO: 219478 - DNA, 20 bp, synthetic construct
  source 1..20: mol_type = other DNA
cctgtccctccctgtgtcca

SEQ ID NO: 219479 - DNA, 20 bp, synthetic construct
  source 1..20: mol_type = other DNA
tcctgtccctccctgtgtcc

SEQ ID NO: 219480 - DNA, 20 bp, synthetic construct
  source 1..20: mol_type = other DNA
ctcctgtccctccctgtgtc

SEQ ID NO: 219481 - DNA, 20 bp, synthetic construct
  source 1..20: mol_type = other DNA
gctcctgtccctccctgtgt

SEQ ID NO: 219482 - DNA, 20 bp, synthetic construct
  source 1..20: mol_type = other DNA
tgctcctgtccctccctgtg

SEQ ID NO: 219483 - DNA, 20 bp, synthetic construct
  source 1..20: mol_type = other DNA
gtgctcctgtccctccctgt

SEQ ID NO: 219484 - DNA, 20 bp, synthetic construct
  source 1..20: mol_type = other DNA
ggtgctcctgtccctccctg

SEQ ID NO: 219485 - DNA, 20 bp, synthetic construct
  source 1..20: mol_type = other DNA
tggtgctcctgtccctccct

SEQ ID NO: 219486 - DNA, 20 bp, synthetic construct
  source 1..20: mol_type = other DNA
atggtgctcctgtccctccc

SEQ ID NO: 219487 - DNA, 20 bp, synthetic construct
  source 1..20: mol_type = other DNA
gatggtgctcctgtccctcc

SEQ ID NO: 219488 - DNA, 20 bp, synthetic construct
  source 1..20: mol_type = other DNA
tgatggtgctcctgtccctc

SEQ ID NO: 219489 - DNA, 20 bp, synthetic construct
  source 1..20: mol_type = other DNA
ctgatggtgctcctgtccct

SEQ ID NO: 219490 - DNA, 20 bp, synthetic construct
  source 1..20: mol_type = other DNA
actgatggtgctcctgtccc

SEQ ID NO: 219491 - DNA, 20 bp, synthetic construct
  source 1..20: mol_type = other DNA
aactgatggtgctcctgtcc

SEQ ID NO: 219492 - DNA, 20 bp, synthetic construct
  source 1..20: mol_type = other DNA
aaactgatggtgctcctgtc

SEQ ID NO: 219493 - DNA, 20 bp, synthetic construct
  source 1..20: mol_type = other DNA
caaactgatggtgctcctgt

SEQ ID NO: 219494 - DNA, 20 bp, synthetic construct
  source 1..20: mol_type = other DNA
acaaactgatggtgctcctg

SEQ ID NO: 219495 - DNA, 20 bp, synthetic construct
  source 1..20: mol_type = other DNA
gacaaactgatggtgctcct

SEQ ID NO: 219496 - DNA, 20 bp, synthetic construct
  source 1..20: mol_type = other DNA
agacaaactgatggtgctcc

SEQ ID NO: 219497 - DNA, 20 bp, synthetic construct
  source 1..20: mol_type = other DNA
gagacaaactgatggtgctc

SEQ ID NO: 219498 - DNA, 20 bp, synthetic construct
  source 1..20: mol_type = other DNA
tgagacaaactgatggtgct

SEQ ID NO: 219499 - DNA, 20 bp, synthetic construct
  source 1..20: mol_type = other DNA
gtgagacaaactgatggtgc

SEQ ID NO: 219500 - DNA, 20 bp, synthetic construct
  source 1..20: mol_type = other DNA
tgtgagacaaactgatggtg

SEQ ID NO: 219501 - DNA, 20 bp, synthetic construct
  source 1..20: mol_type = other DNA
gtgtgagacaaactgatggt

SEQ ID NO: 219502 - DNA, 20 bp, synthetic construct
  source 1..20: mol_type = other DNA
tgtgtgagacaaactgatgg

SEQ ID NO: 219503 - DNA, 20 bp, synthetic construct
  source 1..20: mol_type = other DNA
ttgtgtgagacaaactgatg

SEQ ID NO: 219504 - DNA, 20 bp, synthetic construct
  source 1..20: mol_type = other DNA
gttgtgtgagacaaactgat

SEQ ID NO: 219505 - DNA, 20 bp, synthetic construct
  source 1..20: mol_type = other DNA
ggttgtgtgagacaaactga

SEQ ID NO: 219506 - DNA, 20 bp, synthetic construct
  source 1..20: mol_type = other DNA
tggttgtgtgagacaaactg

SEQ ID NO: 219507 - DNA, 20 bp, synthetic construct
  source 1..20: mol_type = other DNA
gtggttgtgtgagacaaact

SEQ ID NO: 219508 - DNA, 20 bp, synthetic construct
  source 1..20: mol_type = other DNA
agtggttgtgtgagacaaac

SEQ ID NO: 219509 - DNA, 20 bp, synthetic construct
  source 1..20: mol_type = other DNA
cagtggttgtgtgagacaaa

SEQ ID NO: 219510 - DNA, 20 bp, synthetic construct
  source 1..20: mol_type = other DNA
acagtggttgtgtgagacaa

SEQ ID NO: 219511 - DNA, 20 bp, synthetic construct
  source 1..20: mol_type = other DNA
gacagtggttgtgtgagaca

SEQ ID NO: 219512 - DNA, 20 bp, synthetic construct
  source 1..20: mol_type = other DNA
tgacagtggttgtgtgagac

SEQ ID NO: 219513 - DNA, 20 bp, synthetic construct
  source 1..20: mol_type = other DNA
atgacagtggttgtgtgaga

SEQ ID NO: 219514 - DNA, 20 bp, synthetic construct
  source 1..20: mol_type = other DNA
gatgacagtggttgtgtgag

SEQ ID NO: 219515 - DNA, 20 bp, synthetic construct
  source 1..20: mol_type = other DNA
ggatgacagtggttgtgtga

SEQ ID NO: 219516 - DNA, 20 bp, synthetic construct
  source 1..20: mol_type = other DNA
aggatgacagtggttgtgtg

SEQ ID NO: 219517 - DNA, 20 bp, synthetic construct
  source 1..20: mol_type = other DNA
gaggatgacagtggttgtgt

SEQ ID NO: 219518 - DNA, 20 bp, synthetic construct
  source 1..20: mol_type = other DNA
tgaggatgacagtggttgtg

SEQ ID NO: 219519 - DNA, 20 bp, synthetic construct
  source 1..20: mol_type = other DNA
gtgaggatgacagtggttgt

SEQ ID NO: 219520 - DNA, 20 bp, synthetic construct
  source 1..20: mol_type = other DNA
agtgaggatgacagtggttg

SEQ ID NO: 219521 - DNA, 20 bp, synthetic construct
  source 1..20: mol_type = other DNA
cagtgaggatgacagtggtt

SEQ ID NO: 219522 - DNA, 20 bp, synthetic construct
  source 1..20: mol_type = other DNA
tcagtgaggatgacagtggt

SEQ ID NO: 219523 - DNA, 20 bp, synthetic construct
  source 1..20: mol_type = other DNA
ttcagtgaggatgacagtgg

SEQ ID NO: 219524 - DNA, 20 bp, synthetic construct
  source 1..20: mol_type = other DNA
cttcagtgaggatgacagtg

SEQ ID NO: 219525 - DNA, 20 bp, synthetic construct
  source 1..20: mol_type = other DNA
ccttcagtgaggatgacagt

SEQ ID NO: 219526 - DNA, 20 bp, synthetic construct
  source 1..20: mol_type = other DNA
gccttcagtgaggatgacag

SEQ ID NO: 219527 - DNA, 20 bp, synthetic construct
  source 1..20: mol_type = other DNA
agccttcagtgaggatgaca

SEQ ID NO: 219528 - DNA, 20 bp, synthetic construct
  source 1..20: mol_type = other DNA
cagccttcagtgaggatgac

SEQ ID NO: 219529 - DNA, 20 bp, synthetic construct
  source 1..20: mol_type = other DNA
acagccttcagtgaggatga

SEQ ID NO: 219530 - DNA, 20 bp, synthetic construct
  source 1..20: mol_type = other DNA
aacagccttcagtgaggatg

SEQ ID NO: 219531 - DNA, 20 bp, synthetic construct
  source 1..20: mol_type = other DNA
caacagccttcagtgaggat

SEQ ID NO: 219532 - DNA, 20 bp, synthetic construct
  source 1..20: mol_type = other DNA
gcaacagccttcagtgagga

SEQ ID NO: 219533 - DNA, 20 bp, synthetic construct
  source 1..20: mol_type = other DNA
ggcaacagccttcagtgagg

SEQ ID NO: 219534 - DNA, 20 bp, synthetic construct
  source 1..20: mol_type = other DNA
aggcaacagccttcagtgag

SEQ ID NO: 219535 - DNA, 20 bp, synthetic construct
  source 1..20: mol_type = other DNA
caggcaacagccttcagtga

SEQ ID NO: 219536 - DNA, 20 bp, synthetic construct
  source 1..20: mol_type = other DNA
tcaggcaacagccttcagtg

SEQ ID NO: 219537 - DNA, 20 bp, synthetic construct
  source 1..20: mol_type = other DNA
atcaggcaacagccttcagt

SEQ ID NO: 219538 - DNA, 20 bp, synthetic construct
  source 1..20: mol_type = other DNA
gatcaggcaacagccttcag

SEQ ID NO: 219539 - DNA, 20 bp, synthetic construct
  source 1..20: mol_type = other DNA
tgatcaggcaacagccttca

SEQ ID NO: 219540 - DNA, 20 bp, synthetic construct
  source 1..20: mol_type = other DNA
ttgatcaggcaacagccttc

SEQ ID NO: 219541 - DNA, 20 bp, synthetic construct
  source 1..20: mol_type = other DNA
tttgatcaggcaacagcctt

SEQ ID NO: 219542 - DNA, 20 bp, synthetic construct
  source 1..20: mol_type = other DNA
ttttgatcaggcaacagcct

SEQ ID NO: 219543 - DNA, 20 bp, synthetic construct
  source 1..20: mol_type = other DNA
tttttgatcaggcaacagcc

SEQ ID NO: 219544 - DNA, 20 bp, synthetic construct
  source 1..20: mol_type = other DNA
gtttttgatcaggcaacagc

SEQ ID NO: 219545 - DNA, 20 bp, synthetic construct
  source 1..20: mol_type = other DNA
tgtttttgatcaggcaacag

SEQ ID NO: 219546 - DNA, 20 bp, synthetic construct
  source 1..20: mol_type = other DNA
ctgtttttgatcaggcaaca

SEQ ID NO: 219547 - DNA, 20 bp, synthetic construct
  source 1..20: mol_type = other DNA
actgtttttgatcaggcaac

SEQ ID NO: 219548 - DNA, 20 bp, synthetic construct
  source 1..20: mol_type = other DNA
tactgtttttgatcaggcaa

SEQ ID NO: 219549 - DNA, 20 bp, synthetic construct
  source 1..20: mol_type = other DNA
atactgtttttgatcaggca

SEQ ID NO: 219550 - DNA, 20 bp, synthetic construct
  source 1..20: mol_type = other DNA
aatactgtttttgatcaggc

SEQ ID NO: 219551 - DNA, 20 bp, synthetic construct
  source 1..20: mol_type = other DNA
caatactgtttttgatcagg

SEQ ID NO: 219552 - DNA, 20 bp, synthetic construct
  source 1..20: mol_type = other DNA
ccaatactgtttttgatcag

SEQ ID NO: 219553 - DNA, 20 bp, synthetic construct
  source 1..20: mol_type = other DNA
cccaatactgtttttgatca

SEQ ID NO: 219554 - DNA, 20 bp, synthetic construct
  source 1..20: mol_type = other DNA
gcccaatactgtttttgatc

SEQ ID NO: 219555 - DNA, 20 bp, synthetic construct
  source 1..20: mol_type = other DNA
ggcccaatactgtttttgat

SEQ ID NO: 219556 - DNA, 20 bp, synthetic construct
  source 1..20: mol_type = other DNA
tggcccaatactgtttttga

SEQ ID NO: 219557 - DNA, 20 bp, synthetic construct
  source 1..20: mol_type = other DNA
ctggcccaatactgtttttg

SEQ ID NO: 219558 - DNA, 20 bp, synthetic construct
  source 1..20: mol_type = other DNA
cctggcccaatactgttttt

SEQ ID NO: 219559 - DNA, 20 bp, synthetic construct
  source 1..20: mol_type = other DNA
gcctggcccaatactgtttt

SEQ ID NO: 219560 - DNA, 20 bp, synthetic construct
  source 1..20: mol_type = other DNA
tgcctggcccaatactgttt

SEQ ID NO: 219561 - DNA, 20 bp, synthetic construct
  source 1..20: mol_type = other DNA
gtgcctggcccaatactgtt

SEQ ID NO: 219562 - DNA, 20 bp, synthetic construct
  source 1..20: mol_type = other DNA
cgtgcctggcccaatactgt

SEQ ID NO: 219563 - DNA, 20 bp, synthetic construct
  source 1..20: mol_type = other DNA
ccgtgcctggcccaatactg

SEQ ID NO: 219564 - DNA, 20 bp, synthetic construct
  source 1..20: mol_type = other DNA
accgtgcctggcccaatact

SEQ ID NO: 219565 - DNA, 20 bp, synthetic construct
  source 1..20: mol_type = other DNA
caccgtgcctggcccaatac

SEQ ID NO: 219566 - DNA, 20 bp, synthetic construct
  source 1..20: mol_type = other DNA
ccaccgtgcctggcccaata

SEQ ID NO: 219567 - DNA, 20 bp, synthetic construct
  source 1..20: mol_type = other DNA
gccaccgtgcctggcccaat

SEQ ID NO: 219568 - DNA, 20 bp, synthetic construct
  source 1..20: mol_type = other DNA
agccaccgtgcctggcccaa

SEQ ID NO: 219569 - DNA, 20 bp, synthetic construct
  source 1..20: mol_type = other DNA
gagccaccgtgcctggccca

SEQ ID NO: 219570 - DNA, 20 bp, synthetic construct
  source 1..20: mol_type = other DNA
tgagccaccgtgcctggccc

SEQ ID NO: 219571 - DNA, 20 bp, synthetic construct
  source 1..20: mol_type = other DNA
gtgagccaccgtgcctggcc

SEQ ID NO: 219572 - DNA, 20 bp, synthetic construct
  source 1..20: mol_type = other DNA
tgtgagccaccgtgcctggc

SEQ ID NO: 219573 - DNA, 20 bp, synthetic construct
  source 1..20: mol_type = other DNA
gtgtgagccaccgtgcctgg

SEQ ID NO: 219574 - DNA, 20 bp, synthetic construct
  source 1..20: mol_type = other DNA
ggtgtgagccaccgtgcctg

SEQ ID NO: 219575 - DNA, 20 bp, synthetic construct
  source 1..20: mol_type = other DNA
aggtgtgagccaccgtgcct

SEQ ID NO: 219576 - DNA, 20 bp, synthetic construct
  source 1..20: mol_type = other DNA
caggtgtgagccaccgtgcc

SEQ ID NO: 219577 - DNA, 20 bp, synthetic construct
  source 1..20: mol_type = other DNA
acaggtgtgagccaccgtgc

SEQ ID NO: 219578 - DNA, 20 bp, synthetic construct
  source 1..20: mol_type = other DNA
tacaggtgtgagccaccgtg

SEQ ID NO: 219579 - DNA, 20 bp, synthetic construct
  source 1..20: mol_type = other DNA
ttacaggtgtgagccaccgt

SEQ ID NO: 219580 - DNA, 20 bp, synthetic construct
  source 1..20: mol_type = other DNA
attacaggtgtgagccaccg

SEQ ID NO: 219581 - DNA, 20 bp, synthetic construct
  source 1..20: mol_type = other DNA
tattacaggtgtgagccacc

SEQ ID NO: 219582 - DNA, 20 bp, synthetic construct
  source 1..20: mol_type = other DNA
gtattacaggtgtgagccac

SEQ ID NO: 219583 - DNA, 20 bp, synthetic construct
  source 1..20: mol_type = other DNA
ggtattacaggtgtgagcca

SEQ ID NO: 219584 - DNA, 20 bp, synthetic construct
  source 1..20: mol_type = other DNA
tggtattacaggtgtgagcc

SEQ ID NO: 219585 - DNA, 20 bp, synthetic construct
  source 1..20: mol_type = other DNA
gtggtattacaggtgtgagc

SEQ ID NO: 219586 - DNA, 20 bp, synthetic construct
  source 1..20: mol_type = other DNA
ggtggtattacaggtgtgag

SEQ ID NO: 219587 - DNA, 20 bp, synthetic construct
  source 1..20: mol_type = other DNA
tggtggtattacaggtgtga

SEQ ID NO: 219588 - DNA, 20 bp, synthetic construct
  source 1..20: mol_type = other DNA
gtggtggtattacaggtgtg

SEQ ID NO: 219589 - DNA, 20 bp, synthetic construct
  source 1..20: mol_type = other DNA
agtggtggtattacaggtgt

SEQ ID NO: 219590 - DNA, 20 bp, synthetic construct
  source 1..20: mol_type = other DNA
aagtggtggtattacaggtg

SEQ ID NO: 219591 - DNA, 20 bp, synthetic construct
  source 1..20: mol_type = other DNA
aaagtggtggtattacaggt

SEQ ID NO: 219592 - DNA, 20 bp, synthetic construct
  source 1..20: mol_type = other DNA
caaagtggtggtattacagg

SEQ ID NO: 219593 - DNA, 20 bp, synthetic construct
  source 1..20: mol_type = other DNA
ccaaagtggtggtattacag

SEQ ID NO: 219594 - DNA, 20 bp, synthetic construct
  source 1..20: mol_type = other DNA
cccaaagtggtggtattaca

SEQ ID NO: 219595 - DNA, 20 bp, synthetic construct
  source 1..20: mol_type = other DNA
tcccaaagtggtggtattac

SEQ ID NO: 219596 - DNA, 20 bp, synthetic construct
  source 1..20: mol_type = other DNA
ctcccaaagtggtggtatta

SEQ ID NO: 219597 - DNA, 20 bp, synthetic construct
  source 1..20: mol_type = other DNA
cctcccaaagtggtggtatt

SEQ ID NO: 219598 - DNA, 20 bp, synthetic construct
  source 1..20: mol_type = other DNA
gcctcccaaagtggtggtat

SEQ ID NO: 219599 - DNA, 20 bp, synthetic construct
  source 1..20: mol_type = other DNA
agcctcccaaagtggtggta

SEQ ID NO: 219600 - DNA, 20 bp, synthetic construct
  source 1..20: mol_type = other DNA
cagcctcccaaagtggtggt

SEQ ID NO: 219601 - DNA, 20 bp, synthetic construct
  source 1..20: mol_type = other DNA
tcagcctcccaaagtggtgg

SEQ ID NO: 219602 - DNA, 20 bp, synthetic construct
  source 1..20: mol_type = other DNA
ctcagcctcccaaagtggtg

SEQ ID NO: 219603 - DNA, 20 bp, synthetic construct
  source 1..20: mol_type = other DNA
cctcagcctcccaaagtggt

SEQ ID NO: 219604 - DNA, 20 bp, synthetic construct
  source 1..20: mol_type = other DNA
acctcagcctcccaaagtgg

SEQ ID NO: 219605 - DNA, 20 bp, synthetic construct
  source 1..20: mol_type = other DNA
cacctcagcctcccaaagtg

SEQ ID NO: 219606 - DNA, 20 bp, synthetic construct
  source 1..20: mol_type = other DNA
tcacctcagcctcccaaagt

SEQ ID NO: 219607 - DNA, 20 bp, synthetic construct
  source 1..20: mol_type = other DNA
ctcacctcagcctcccaaag

SEQ ID NO: 219608 - DNA, 20 bp, synthetic construct
  source 1..20: mol_type = other DNA
actcacctcagcctcccaaa

SEQ ID NO: 219609 - DNA, 20 bp, synthetic construct
  source 1..20: mol_type = other DNA
cactcacctcagcctcccaa

SEQ ID NO: 219610 - DNA, 20 bp, synthetic construct
  source 1..20: mol_type = other DNA
ccactcacctcagcctccca

SEQ ID NO: 219611 - DNA, 20 bp, synthetic construct
  source 1..20: mol_type = other DNA
tccactcacctcagcctccc

SEQ ID NO: 219612 - DNA, 20 bp, synthetic construct
  source 1..20: mol_type = other DNA
atccactcacctcagcctcc

SEQ ID NO: 219613 - DNA, 20 bp, synthetic construct
  source 1..20: mol_type = other DNA
gatccactcacctcagcctc

SEQ ID NO: 219614 - DNA, 20 bp, synthetic construct
  source 1..20: mol_type = other DNA
tgatccactcacctcagcct

SEQ ID NO: 219615 - DNA, 20 bp, synthetic construct
  source 1..20: mol_type = other DNA
gtgatccactcacctcagcc

SEQ ID NO: 219616 - DNA, 20 bp, synthetic construct
  source 1..20: mol_type = other DNA
agtgatccactcacctcagc

SEQ ID NO: 219617 - DNA, 20 bp, synthetic construct
  source 1..20: mol_type = other DNA
aagtgatccactcacctcag

SEQ ID NO: 219618 - DNA, 20 bp, synthetic construct
  source 1..20: mol_type = other DNA
caagtgatccactcacctca

SEQ ID NO: 219619 - DNA, 20 bp, synthetic construct
  source 1..20: mol_type = other DNA
tcaagtgatccactcacctc

SEQ ID NO: 219620 - DNA, 20 bp, synthetic construct
  source 1..20: mol_type = other DNA
ctcaagtgatccactcacct

SEQ ID NO: 219621 - DNA, 20 bp, synthetic construct
  source 1..20: mol_type = other DNA
cctcaagtgatccactcacc

SEQ ID NO: 219622 - DNA, 20 bp, synthetic construct
  source 1..20: mol_type = other DNA
acctcaagtgatccactcac

SEQ ID NO: 219623 - DNA, 20 bp, synthetic construct
  source 1..20: mol_type = other DNA
gacctcaagtgatccactca

SEQ ID NO: 219624 - DNA, 20 bp, synthetic construct
  source 1..20: mol_type = other DNA
tgacctcaagtgatccactc

SEQ ID NO: 219625 - DNA, 20 bp, synthetic construct
  source 1..20: mol_type = other DNA
ctgacctcaagtgatccact

SEQ ID NO: 219626 - DNA, 20 bp, synthetic construct
  source 1..20: mol_type = other DNA
cctgacctcaagtgatccac

SEQ ID NO: 219627 - DNA, 20 bp, synthetic construct
  source 1..20: mol_type = other DNA
tcctgacctcaagtgatcca

SEQ ID NO: 219628 - DNA, 20 bp, synthetic construct
  source 1..20: mol_type = other DNA
ctcctgacctcaagtgatcc

SEQ ID NO: 219629 - DNA, 20 bp, synthetic construct
  source 1..20: mol_type = other DNA
actcctgacctcaagtgatc

SEQ ID NO: 219630 - DNA, 20 bp, synthetic construct
  source 1..20: mol_type = other DNA
aactcctgacctcaagtgat

SEQ ID NO: 219631 - DNA, 20 bp, synthetic construct
  source 1..20: mol_type = other DNA
gaactcctgacctcaagtga

SEQ ID NO: 219632 - DNA, 20 bp, synthetic construct
  source 1..20: mol_type = other DNA
cgaactcctgacctcaagtg

SEQ ID NO: 219633 - DNA, 20 bp, synthetic construct
  source 1..20: mol_type = other DNA
tcgaactcctgacctcaagt

SEQ ID NO: 219634 - DNA, 20 bp, synthetic construct
  source 1..20: mol_type = other DNA
ctcgaactcctgacctcaag

SEQ ID NO: 219635 - DNA, 20 bp, synthetic construct
  source 1..20: mol_type = other DNA
tctcgaactcctgacctcaa

SEQ ID NO: 219636 - DNA, 20 bp, synthetic construct
  source 1..20: mol_type = other DNA
atctcgaactcctgacctca

SEQ ID NO: 219637 - DNA, 20 bp, synthetic construct
  source 1..20: mol_type = other DNA
gatctcgaactcctgacctc

SEQ ID NO: 219638 - DNA, 20 bp, synthetic construct
  source 1..20: mol_type = other DNA
tgatctcgaactcctgacct

SEQ ID NO: 219639 - DNA, 20 bp, synthetic construct
  source 1..20: mol_type = other DNA
ttgatctcgaactcctgacc

SEQ ID NO: 219640 - DNA, 20 bp, synthetic construct
  source 1..20: mol_type = other DNA
gttgatctcgaactcctgac

SEQ ID NO: 219641 - DNA, 20 bp, synthetic construct
  source 1..20: mol_type = other DNA
ggttgatctcgaactcctga

SEQ ID NO: 219642 - DNA, 20 bp, synthetic construct
  source 1..20: mol_type = other DNA
aggttgatctcgaactcctg

SEQ ID NO: 219643 - DNA, 20 bp, synthetic construct
  source 1..20: mol_type = other DNA
caggttgatctcgaactcct

SEQ ID NO: 219644 - DNA, 20 bp, synthetic construct
  source 1..20: mol_type = other DNA
ccaggttgatctcgaactcc

SEQ ID NO: 219645 - DNA, 20 bp, synthetic construct
  source 1..20: mol_type = other DNA
gccaggttgatctcgaactc

SEQ ID NO: 219646 - DNA, 20 bp, synthetic construct
  source 1..20: mol_type = other DNA
ggccaggttgatctcgaact

SEQ ID NO: 219647 - DNA, 20 bp, synthetic construct
  source 1..20: mol_type = other DNA
tggccaggttgatctcgaac

SEQ ID NO: 219648 - DNA, 20 bp, synthetic construct
  source 1..20: mol_type = other DNA
ttggccaggttgatctcgaa

SEQ ID NO: 219649 - DNA, 20 bp, synthetic construct
  source 1..20: mol_type = other DNA
gttggccaggttgatctcga

SEQ ID NO: 219650 - DNA, 20 bp, synthetic construct
  source 1..20: mol_type = other DNA
tgttggccaggttgatctcg

SEQ ID NO: 219651 - DNA, 20 bp, synthetic construct
  source 1..20: mol_type = other DNA
atgttggccaggttgatctc

SEQ ID NO: 219652 - DNA, 20 bp, synthetic construct
  source 1..20: mol_type = other DNA
catgttggccaggttgatct

SEQ ID NO: 219653 - DNA, 20 bp, synthetic construct
  source 1..20: mol_type = other DNA
ccatgttggccaggttgatc

SEQ ID NO: 219654 - DNA, 20 bp, synthetic construct
  source 1..20: mol_type = other DNA
accatgttggccaggttgat

SEQ ID NO: 219655 - DNA, 20 bp, synthetic construct
  source 1..20: mol_type = other DNA
caccatgttggccaggttga

SEQ ID NO: 219656 - DNA, 20 bp, synthetic construct
  source 1..20: mol_type = other DNA
tcaccatgttggccaggttg

SEQ ID NO: 219657 - DNA, 20 bp, synthetic construct
  source 1..20: mol_type = other DNA
ttcaccatgttggccaggtt

SEQ ID NO: 219658 - DNA, 20 bp, synthetic construct
  source 1..20: mol_type = other DNA
tttcaccatgttggccaggt

SEQ ID NO: 219659 - DNA, 20 bp, synthetic construct
  source 1..20: mol_type = other DNA
gtttcaccatgttggccagg

SEQ ID NO: 219660 - DNA, 20 bp, synthetic construct
  source 1..20: mol_type = other DNA
ggtttcaccatgttggccag

SEQ ID NO: 219661 - DNA, 20 bp, synthetic construct
  source 1..20: mol_type = other DNA
aggtttcaccatgttggcca

SEQ ID NO: 219662 - DNA, 20 bp, synthetic construct
  source 1..20: mol_type = other DNA
aaggtttcaccatgttggcc

SEQ ID NO: 219663 - DNA, 20 bp, synthetic construct
  source 1..20: mol_type = other DNA
caaggtttcaccatgttggc

SEQ ID NO: 219664 - DNA, 20 bp, synthetic construct
  source 1..20: mol_type = other DNA
acaaggtttcaccatgttgg

SEQ ID NO: 219665 - DNA, 20 bp, synthetic construct
  source 1..20: mol_type = other DNA
gacaaggtttcaccatgttg

SEQ ID NO: 219666 - DNA, 20 bp, synthetic construct
  source 1..20: mol_type = other DNA
agacaaggtttcaccatgtt

SEQ ID NO: 219667 - DNA, 20 bp, synthetic construct
  source 1..20: mol_type = other DNA
gagacaaggtttcaccatgt

SEQ ID NO: 219668 - DNA, 20 bp, synthetic construct
  source 1..20: mol_type = other DNA
agagacaaggtttcaccatg

SEQ ID NO: 219669 - DNA, 20 bp, synthetic construct
  source 1..20: mol_type = other DNA
tagagacaaggtttcaccat

SEQ ID NO: 219670 - DNA, 20 bp, synthetic construct
  source 1..20: mol_type = other DNA
gtagagacaaggtttcacca

SEQ ID NO: 219671 - DNA, 20 bp, synthetic construct
  source 1..20: mol_type = other DNA
agtagagacaaggtttcacc

SEQ ID NO: 219672 - DNA, 20 bp, synthetic construct
  source 1..20: mol_type = other DNA
tagtagagacaaggtttcac

SEQ ID NO: 219673 - DNA, 20 bp, synthetic construct
  source 1..20: mol_type = other DNA
ttagtagagacaaggtttca

SEQ ID NO: 219674 - DNA, 20 bp, synthetic construct
  source 1..20: mol_type = other DNA
tttagtagagacaaggtttc

SEQ ID NO: 219675 - DNA, 20 bp, synthetic construct
  source 1..20: mol_type = other DNA
ttttagtagagacaaggttt

SEQ ID NO: 219676 - DNA, 20 bp, synthetic construct
  source 1..20: mol_type = other DNA
cttttagtagagacaaggtt

SEQ ID NO: 219677 - DNA, 20 bp, synthetic construct
  source 1..20: mol_type = other DNA
acttttagtagagacaaggt

SEQ ID NO: 219678 - DNA, 20 bp, synthetic construct
  source 1..20: mol_type = other DNA
aacttttagtagagacaagg

SEQ ID NO: 219679 - DNA, 20 bp, synthetic construct
  source 1..20: mol_type = other DNA
gaacttttagtagagacaag

SEQ ID NO: 219680 - DNA, 20 bp, synthetic construct
  source 1..20: mol_type = other DNA
tgaacttttagtagagacaa

SEQ ID NO: 219681 - DNA, 20 bp, synthetic construct
  source 1..20: mol_type = other DNA
ttgaacttttagtagagaca

SEQ ID NO: 219682 - DNA, 20 bp, synthetic construct
  source 1..20: mol_type = other DNA
tttgaacttttagtagagac

SEQ ID NO: 219683 - DNA, 20 bp, synthetic construct
  source 1..20: mol_type = other DNA
ttttgaacttttagtagaga

SEQ ID NO: 219684 - DNA, 20 bp, synthetic construct
  source 1..20: mol_type = other DNA
tttttgaacttttagtagag

SEQ ID NO: 219685 - DNA, 20 bp, synthetic construct
  source 1..20: mol_type = other DNA
atttttgaacttttagtaga

SEQ ID NO: 219686 - DNA, 20 bp, synthetic construct
  source 1..20: mol_type = other DNA
aatttttgaacttttagtag

SEQ ID NO: 219687 - DNA, 20 bp, synthetic construct
  source 1..20: mol_type = other DNA
taatttttgaacttttagta

SEQ ID NO: 219688 - DNA, 20 bp, synthetic construct
  source 1..20: mol_type = other DNA
ctaatttttgaacttttagt

SEQ ID NO: 219689 - DNA, 20 bp, synthetic construct
  source 1..20: mol_type = other DNA
gctaatttttgaacttttag

SEQ ID NO: 219690 - DNA, 20 bp, synthetic construct
  source 1..20: mol_type = other DNA
ggctaatttttgaactttta

SEQ ID NO: 219691 - DNA, 20 bp, synthetic construct
  source 1..20: mol_type = other DNA
tggctaatttttgaactttt

SEQ ID NO: 219692 - DNA, 20 bp, synthetic construct
  source 1..20: mol_type = other DNA
ctggctaatttttgaacttt

SEQ ID NO: 219693 - DNA, 20 bp, synthetic construct
  source 1..20: mol_type = other DNA
cctggctaatttttgaactt

SEQ ID NO: 219694 - DNA, 20 bp, synthetic construct
  source 1..20: mol_type = other DNA
gcctggctaatttttgaact

SEQ ID NO: 219695 - DNA, 20 bp, synthetic construct
  source 1..20: mol_type = other DNA
cgcctggctaatttttgaac

SEQ ID NO: 219696 - DNA, 20 bp, synthetic construct
  source 1..20: mol_type = other DNA
acgcctggctaatttttgaa

SEQ ID NO: 219697 - DNA, 20 bp, synthetic construct
  source 1..20: mol_type = other DNA
cacgcctggctaatttttga

SEQ ID NO: 219698 - DNA, 20 bp, synthetic construct
  source 1..20: mol_type = other DNA
ccacgcctggctaatttttg

SEQ ID NO: 219699 - DNA, 20 bp, synthetic construct
  source 1..20: mol_type = other DNA
accacgcctggctaattttt

SEQ ID NO: 219700 - DNA, 20 bp, synthetic construct
  source 1..20: mol_type = other DNA
caccacgcctggctaatttt

SEQ ID NO: 219701 - DNA, 20 bp, synthetic construct
  source 1..20: mol_type = other DNA
ccaccacgcctggctaattt

SEQ ID NO: 219702 - DNA, 20 bp, synthetic construct
  source 1..20: mol_type = other DNA
cccaccacgcctggctaatt

SEQ ID NO: 219703 - DNA, 20 bp, synthetic construct
  source 1..20: mol_type = other DNA
acccaccacgcctggctaat

SEQ ID NO: 219704 - DNA, 20 bp, synthetic construct
  source 1..20: mol_type = other DNA
cacccaccacgcctggctaa

SEQ ID NO: 219705 - DNA, 20 bp, synthetic construct
  source 1..20: mol_type = other DNA
gcacccaccacgcctggcta

SEQ ID NO: 219706 - DNA, 20 bp, synthetic construct
  source 1..20: mol_type = other DNA
ggcacccaccacgcctggct

SEQ ID NO: 219707 - DNA, 20 bp, synthetic construct
  source 1..20: mol_type = other DNA
aggcacccaccacgcctggc

SEQ ID NO: 219708 - DNA, 20 bp, synthetic construct
  source 1..20: mol_type = other DNA
caggcacccaccacgcctgg

SEQ ID NO: 219709 - DNA, 20 bp, synthetic construct
  source 1..20: mol_type = other DNA
acaggcacccaccacgcctg

SEQ ID NO: 219710 - DNA, 20 bp, synthetic construct
  source 1..20: mol_type = other DNA
tacaggcacccaccacgcct

SEQ ID NO: 219711 - DNA, 20 bp, synthetic construct
  source 1..20: mol_type = other DNA
ctacaggcacccaccacgcc

SEQ ID NO: 219712 - DNA, 20 bp, synthetic construct
  source 1..20: mol_type = other DNA
actacaggcacccaccacgc

SEQ ID NO: 219713 - DNA, 20 bp, synthetic construct
  source 1..20: mol_type = other DNA
gactacaggcacccaccacg

SEQ ID NO: 219714 - DNA, 20 bp, synthetic construct
  source 1..20: mol_type = other DNA
ggactacaggcacccaccac

SEQ ID NO: 219715 - DNA, 20 bp, synthetic construct
  source 1..20: mol_type = other DNA
gggactacaggcacccacca

SEQ ID NO: 219716 - DNA, 20 bp, synthetic construct
  source 1..20: mol_type = other DNA
tgggactacaggcacccacc

SEQ ID NO: 219717 - DNA, 20 bp, synthetic construct
  source 1..20: mol_type = other DNA
ctgggactacaggcacccac

SEQ ID NO: 219718 - DNA, 20 bp, synthetic construct
  source 1..20: mol_type = other DNA
gctgggactacaggcaccca

SEQ ID NO: 219719 - DNA, 20 bp, synthetic construct
  source 1..20: mol_type = other DNA
agctgggactacaggcaccc

SEQ ID NO: 219720 - DNA, 20 bp, synthetic construct
  source 1..20: mol_type = other DNA
tagctgggactacaggcacc

SEQ ID NO: 219721 - DNA, 20 bp, synthetic construct
  source 1..20: mol_type = other DNA
gtagctgggactacaggcac

SEQ ID NO: 219722 - DNA, 20 bp, synthetic construct
  source 1..20: mol_type = other DNA
agtagctgggactacaggca

SEQ ID NO: 219723 - DNA, 20 bp, synthetic construct
  source 1..20: mol_type = other DNA
aagtagctgggactacaggc

SEQ ID NO: 219724 - DNA, 20 bp, synthetic construct
  source 1..20: mol_type = other DNA
caagtagctgggactacagg

SEQ ID NO: 219725 - DNA, 20 bp, synthetic construct
  source 1..20: mol_type = other DNA
ccaagtagctgggactacag

SEQ ID NO: 219726 - DNA, 20 bp, synthetic construct
  source 1..20: mol_type = other DNA
cccaagtagctgggactaca

SEQ ID NO: 219727 - DNA, 20 bp, synthetic construct
  source 1..20: mol_type = other DNA
tcccaagtagctgggactac

SEQ ID NO: 219728 - DNA, 20 bp, synthetic construct
  source 1..20: mol_type = other DNA
ctcccaagtagctgggacta

SEQ ID NO: 219729 - DNA, 20 bp, synthetic construct
  source 1..20: mol_type = other DNA
cctcccaagtagctgggact

SEQ ID NO: 219730 - DNA, 20 bp, synthetic construct
  source 1..20: mol_type = other DNA
gcctcccaagtagctgggac

SEQ ID NO: 219731 - DNA, 20 bp, synthetic construct
  source 1..20: mol_type = other DNA
agcctcccaagtagctggga

SEQ ID NO: 219732 - DNA, 20 bp, synthetic construct
  source 1..20: mol_type = other DNA
cagcctcccaagtagctggg

SEQ ID NO: 219733 - DNA, 20 bp, synthetic construct
  source 1..20: mol_type = other DNA
tcagcctcccaagtagctgg

SEQ ID NO: 219734 - DNA, 20 bp, synthetic construct
  source 1..20: mol_type = other DNA
ctcagcctcccaagtagctg

SEQ ID NO: 219735 - DNA, 20 bp, synthetic construct
  source 1..20: mol_type = other DNA
cctcagcctcccaagtagct

SEQ ID NO: 219736 - DNA, 20 bp, synthetic construct
  source 1..20: mol_type = other DNA
gcctcagcctcccaagtagc

SEQ ID NO: 219737 - DNA, 20 bp, synthetic construct
  source 1..20: mol_type = other DNA
tgcctcagcctcccaagtag

SEQ ID NO: 219738 - DNA, 20 bp, synthetic construct
  source 1..20: mol_type = other DNA
ctgcctcagcctcccaagta

SEQ ID NO: 219739 - DNA, 20 bp, synthetic construct
  source 1..20: mol_type = other DNA
cctgcctcagcctcccaagt

SEQ ID NO: 219740 - DNA, 20 bp, synthetic construct
  source 1..20: mol_type = other DNA
tcctgcctcagcctcccaag

SEQ ID NO: 219741 - DNA, 20 bp, synthetic construct
  source 1..20: mol_type = other DNA
ctcctgcctcagcctcccaa

SEQ ID NO: 219742 - DNA, 20 bp, synthetic construct
  source 1..20: mol_type = other DNA
tctcctgcctcagcctccca

SEQ ID NO: 219743 - DNA, 20 bp, synthetic construct
  source 1..20: mol_type = other DNA
ttctcctgcctcagcctccc

SEQ ID NO: 219744 - DNA, 20 bp, synthetic construct
  source 1..20: mol_type = other DNA
attctcctgcctcagcctcc

SEQ ID NO: 219745 - DNA, 20 bp, synthetic construct
  source 1..20: mol_type = other DNA
aattctcctgcctcagcctc

SEQ ID NO: 219746 - DNA, 20 bp, synthetic construct
  source 1..20: mol_type = other DNA
caattctcctgcctcagcct

SEQ ID NO: 219747 - DNA, 20 bp, synthetic construct
  source 1..20: mol_type = other DNA
gcaattctcctgcctcagcc

SEQ ID NO: 219748 - DNA, 20 bp, synthetic construct
  source 1..20: mol_type = other DNA
agcaattctcctgcctcagc

SEQ ID NO: 219749 - DNA, 20 bp, synthetic construct
  source 1..20: mol_type = other DNA
aagcaattctcctgcctcag

SEQ ID NO: 219750 - DNA, 20 bp, synthetic construct
  source 1..20: mol_type = other DNA
caagcaattctcctgcctca

SEQ ID NO: 219751 - DNA, 20 bp, synthetic construct
  source 1..20: mol_type = other DNA
tcaagcaattctcctgcctc

SEQ ID NO: 219752 - DNA, 20 bp, synthetic construct
  source 1..20: mol_type = other DNA
ttcaagcaattctcctgcct

SEQ ID NO: 219753 - DNA, 20 bp, synthetic construct
  source 1..20: mol_type = other DNA
gttcaagcaattctcctgcc

SEQ ID NO: 219754 - DNA, 20 bp, synthetic construct
  source 1..20: mol_type = other DNA
ggttcaagcaattctcctgc

SEQ ID NO: 219755 - DNA, 20 bp, synthetic construct
  source 1..20: mol_type = other DNA
gggttcaagcaattctcctg

SEQ ID NO: 219756 - DNA, 20 bp, synthetic construct
  source 1..20: mol_type = other DNA
cgggttcaagcaattctcct

SEQ ID NO: 219757 - DNA, 20 bp, synthetic construct
  source 1..20: mol_type = other DNA
tcgggttcaagcaattctcc

SEQ ID NO: 219758 - DNA, 20 bp, synthetic construct
  source 1..20: mol_type = other DNA
ctcgggttcaagcaattctc

SEQ ID NO: 219759 - DNA, 20 bp, synthetic construct
  source 1..20: mol_type = other DNA
tctcgggttcaagcaattct

SEQ ID NO: 219760 - DNA, 20 bp, synthetic construct
  source 1..20: mol_type = other DNA
ctctcgggttcaagcaattc

SEQ ID NO: 219761 - DNA, 20 bp, synthetic construct
  source 1..20: mol_type = other DNA
cctctcgggttcaagcaatt

SEQ ID NO: 219762 - DNA, 20 bp, synthetic construct
  source 1..20: mol_type = other DNA
acctctcgggttcaagcaat

SEQ ID NO: 219763 - DNA, 20 bp, synthetic construct
  source 1..20: mol_type = other DNA
tacctctcgggttcaagcaa

SEQ ID NO: 219764 - DNA, 20 bp, synthetic construct
  source 1..20: mol_type = other DNA
ctacctctcgggttcaagca

SEQ ID NO: 219765 - DNA, 20 bp, synthetic construct
  source 1..20: mol_type = other DNA
tctacctctcgggttcaagc

SEQ ID NO: 219766 - DNA, 20 bp, synthetic construct
  source 1..20: mol_type = other DNA
ctctacctctcgggttcaag

SEQ ID NO: 219767 - DNA, 20 bp, synthetic construct
  source 1..20: mol_type = other DNA
cctctacctctcgggttcaa

SEQ ID NO: 219768 - DNA, 20 bp, synthetic construct
  source 1..20: mol_type = other DNA
acctctacctctcgggttca

SEQ ID NO: 219769 - DNA, 20 bp, synthetic construct
  source 1..20: mol_type = other DNA
aacctctacctctcgggttc

SEQ ID NO: 219770 - DNA, 20 bp, synthetic construct
  source 1..20: mol_type = other DNA
caacctctacctctcgggtt

SEQ ID NO: 219771 - DNA, 20 bp, synthetic construct
  source 1..20: mol_type = other DNA
gcaacctctacctctcgggt

SEQ ID NO: 219772 - DNA, 20 bp, synthetic construct
  source 1..20: mol_type = other DNA
tgcaacctctacctctcggg

SEQ ID NO: 219773 - DNA, 20 bp, synthetic construct
  source 1..20: mol_type = other DNA
ctgcaacctctacctctcgg

SEQ ID NO: 219774 - DNA, 20 bp, synthetic construct
  source 1..20: mol_type = other DNA
actgcaacctctacctctcg

SEQ ID NO: 219775 - DNA, 20 bp, synthetic construct
  source 1..20: mol_type = other DNA
cactgcaacctctacctctc

SEQ ID NO: 219776 - DNA, 20 bp, synthetic construct
  source 1..20: mol_type = other DNA
tcactgcaacctctacctct

SEQ ID NO: 219777 - DNA, 20 bp, synthetic construct
  source 1..20: mol_type = other DNA
ctcactgcaacctctacctc

SEQ ID NO: 219778 - DNA, 20 bp, synthetic construct
  source 1..20: mol_type = other DNA
gctcactgcaacctctacct

SEQ ID NO: 219779 - DNA, 20 bp, synthetic construct
  source 1..20: mol_type = other DNA
ggctcactgcaacctctacc

SEQ ID NO: 219780 - DNA, 20 bp, synthetic construct
  source 1..20: mol_type = other DNA
cggctcactgcaacctctac

SEQ ID NO: 219781 - DNA, 20 bp, synthetic construct
  source 1..20: mol_type = other DNA
tcggctcactgcaacctcta

SEQ ID NO: 219782 - DNA, 20 bp, synthetic construct
  source 1..20: mol_type = other DNA
ctcggctcactgcaacctct

SEQ ID NO: 219783 - DNA, 20 bp, synthetic construct
  source 1..20: mol_type = other DNA
tctcggctcactgcaacctc

SEQ ID NO: 219784 - DNA, 20 bp, synthetic construct
  source 1..20: mol_type = other DNA
atctcggctcactgcaacct

SEQ ID NO: 219785 - DNA, 20 bp, synthetic construct
  source 1..20: mol_type = other DNA
catctcggctcactgcaacc

SEQ ID NO: 219786 - DNA, 20 bp, synthetic construct
  source 1..20: mol_type = other DNA
ccatctcggctcactgcaac

SEQ ID NO: 219787 - DNA, 20 bp, synthetic construct
  source 1..20: mol_type = other DNA
gccatctcggctcactgcaa

SEQ ID NO: 219788 - DNA, 20 bp, synthetic construct
  source 1..20: mol_type = other DNA
tgccatctcggctcactgca

SEQ ID NO: 219789 - DNA, 20 bp, synthetic construct
  source 1..20: mol_type = other DNA
gtgccatctcggctcactgc

SEQ ID NO: 219790 - DNA, 20 bp, synthetic construct
  source 1..20: mol_type = other DNA
ggtgccatctcggctcactg

SEQ ID NO: 219791 - DNA, 20 bp, synthetic construct
  source 1..20: mol_type = other DNA
tggtgccatctcggctcact

SEQ ID NO: 219792 - DNA, 20 bp, synthetic construct
  source 1..20: mol_type = other DNA
gtggtgccatctcggctcac

SEQ ID NO: 219793 - DNA, 20 bp, synthetic construct
  source 1..20: mol_type = other DNA
ggtggtgccatctcggctca

SEQ ID NO: 219794 - DNA, 20 bp, synthetic construct
  source 1..20: mol_type = other DNA
tggtggtgccatctcggctc

SEQ ID NO: 219795 - DNA, 20 bp, synthetic construct
  source 1..20: mol_type = other DNA
gtggtggtgccatctcggct

SEQ ID NO: 219796 - DNA, 20 bp, synthetic construct
  source 1..20: mol_type = other DNA
tgtggtggtgccatctcggc

SEQ ID NO: 219797 - DNA, 20 bp, synthetic construct
  source 1..20: mol_type = other DNA
gtgtggtggtgccatctcgg

SEQ ID NO: 219798 - DNA, 20 bp, synthetic construct
  source 1..20: mol_type = other DNA
agtgtggtggtgccatctcg

SEQ ID NO: 219799 - DNA, 20 bp, synthetic construct
  source 1..20: mol_type = other DNA
gagtgtggtggtgccatctc

SEQ ID NO: 219800 - DNA, 20 bp, synthetic construct
  source 1..20: mol_type = other DNA
ggagtgtggtggtgccatct

SEQ ID NO: 219801 - DNA, 20 bp, synthetic construct
  source 1..20: mol_type = other DNA
tggagtgtggtggtgccatc

SEQ ID NO: 219802 - DNA, 20 bp, synthetic construct
  source 1..20: mol_type = other DNA
ctggagtgtggtggtgccat

SEQ ID NO: 219803 - DNA, 20 bp, synthetic construct
  source 1..20: mol_type = other DNA
gctggagtgtggtggtgcca

SEQ ID NO: 219804 - DNA, 20 bp, synthetic construct
  source 1..20: mol_type = other DNA
ggctggagtgtggtggtgcc

SEQ ID NO: 219805 - DNA, 20 bp, synthetic construct
  source 1..20: mol_type = other DNA
aggctggagtgtggtggtgc

SEQ ID NO: 219806 - DNA, 20 bp, synthetic construct
  source 1..20: mol_type = other DNA
caggctggagtgtggtggtg

SEQ ID NO: 219807 - DNA, 20 bp, synthetic construct
  source 1..20: mol_type = other DNA
ccaggctggagtgtggtggt

SEQ ID NO: 219808 - DNA, 20 bp, synthetic construct
  source 1..20: mol_type = other DNA
cccaggctggagtgtggtgg

SEQ ID NO: 219809 - DNA, 20 bp, synthetic construct
  source 1..20: mol_type = other DNA
gcccaggctggagtgtggtg

SEQ ID NO: 219810 - DNA, 20 bp, synthetic construct
  source 1..20: mol_type = other DNA
cgcccaggctggagtgtggt

SEQ ID NO: 219811 - DNA, 20 bp, synthetic construct
  source 1..20: mol_type = other DNA
tcgcccaggctggagtgtgg

SEQ ID NO: 219812 - DNA, 20 bp, synthetic construct
  source 1..20: mol_type = other DNA
gtcgcccaggctggagtgtg

SEQ ID NO: 219813 - DNA, 20 bp, synthetic construct
  source 1..20: mol_type = other DNA
ggtcgcccaggctggagtgt

SEQ ID NO: 219814 - DNA, 20 bp, synthetic construct
  source 1..20: mol_type = other DNA
cggtcgcccaggctggagtg

SEQ ID NO: 219815 - DNA, 20 bp, synthetic construct
  source 1..20: mol_type = other DNA
tcggtcgcccaggctggagt

SEQ ID NO: 219816 - DNA, 20 bp, synthetic construct
  source 1..20: mol_type = other DNA
ctcggtcgcccaggctggag

SEQ ID NO: 219817 - DNA, 20 bp, synthetic construct
  source 1..20: mol_type = other DNA
cctcggtcgcccaggctgga

SEQ ID NO: 219818 - DNA, 20 bp, synthetic construct
  source 1..20: mol_type = other DNA
ccctcggtcgcccaggctgg

SEQ ID NO: 219819 - DNA, 20 bp, synthetic construct
  source 1..20: mol_type = other DNA
cccctcggtcgcccaggctg

SEQ ID NO: 219820 - DNA, 20 bp, synthetic construct
  source 1..20: mol_type = other DNA
ccccctcggtcgcccaggct

SEQ ID NO: 219821 - DNA, 20 bp, synthetic construct
  source 1..20: mol_type = other DNA
tccccctcggtcgcccaggc

SEQ ID NO: 219822 - DNA, 20 bp, synthetic construct
  source 1..20: mol_type = other DNA
gtccccctcggtcgcccagg

SEQ ID NO: 219823 - DNA, 20 bp, synthetic construct
  source 1..20: mol_type = other DNA
agtccccctcggtcgcccag

SEQ ID NO: 219824 - DNA, 20 bp, synthetic construct
  source 1..20: mol_type = other DNA
gagtccccctcggtcgccca

SEQ ID NO: 219825 - DNA, 20 bp, synthetic construct
  source 1..20: mol_type = other DNA
agagtccccctcggtcgccc

SEQ ID NO: 219826 - DNA, 20 bp, synthetic construct
  source 1..20: mol_type = other DNA
cagagtccccctcggtcgcc

SEQ ID NO: 219827 - DNA, 20 bp, synthetic construct
  source 1..20: mol_type = other DNA
acagagtccccctcggtcgc

SEQ ID NO: 219828 - DNA, 20 bp, synthetic construct
  source 1..20: mol_type = other DNA
gacagagtccccctcggtcg

SEQ ID NO: 219829 - DNA, 20 bp, synthetic construct
  source 1..20: mol_type = other DNA
agacagagtccccctcggtc

SEQ ID NO: 219830 - DNA, 20 bp, synthetic construct
  source 1..20: mol_type = other DNA
aagacagagtccccctcggt

SEQ ID NO: 219831 - DNA, 20 bp, synthetic construct
  source 1..20: mol_type = other DNA
taagacagagtccccctcgg

SEQ ID NO: 219832 - DNA, 20 bp, synthetic construct
  source 1..20: mol_type = other DNA
ttaagacagagtccccctcg

SEQ ID NO: 219833 - DNA, 20 bp, synthetic construct
  source 1..20: mol_type = other DNA
tttaagacagagtccccctc

SEQ ID NO: 219834 - DNA, 20 bp, synthetic construct
  source 1..20: mol_type = other DNA
ttttaagacagagtccccct

SEQ ID NO: 219835 - DNA, 20 bp, synthetic construct
  source 1..20: mol_type = other DNA
tttttaagacagagtccccc

SEQ ID NO: 219836 - DNA, 20 bp, synthetic construct
  source 1..20: mol_type = other DNA
ttttttaagacagagtcccc

SEQ ID NO: 219837 - DNA, 20 bp, synthetic construct
  source 1..20: mol_type = other DNA
tttttttaagacagagtccc

SEQ ID NO: 219838 - DNA, 20 bp, synthetic construct
  source 1..20: mol_type = other DNA
ttttttttaagacagagtcc

SEQ ID NO: 219839 - DNA, 20 bp, synthetic construct
  source 1..20: mol_type = other DNA
tttttttttaagacagagtc

SEQ ID NO: 219840 - DNA, 20 bp, synthetic construct
  source 1..20: mol_type = other DNA
ttttttttttaagacagagt

SEQ ID NO: 219841 - DNA, 20 bp, synthetic construct
  source 1..20: mol_type = other DNA
tttttttttttaagacagag

SEQ ID NO: 219842 - DNA, 20 bp, synthetic construct
  source 1..20: mol_type = other DNA
ttttttttttttaagacaga

SEQ ID NO: 219843 - DNA, 20 bp, synthetic construct
  source 1..20: mol_type = other DNA
tttttttttttttaagacag

SEQ ID NO: 219844 - DNA, 20 bp, synthetic construct
  source 1..20: mol_type = other DNA
ttttttttttttttaagaca

SEQ ID NO: 219845 - DNA, 20 bp, synthetic construct
  source 1..20: mol_type = other DNA
tttttttttttttttaagac

SEQ ID NO: 219846 - DNA, 20 bp, synthetic construct
  source 1..20: mol_type = other DNA
ttttttttttttttttaaga

SEQ ID NO: 219847 - DNA, 20 bp, synthetic construct
  source 1..20: mol_type = other DNA
tttttttttttttttttaag

SEQ ID NO: 219848 - DNA, 20 bp, synthetic construct
  source 1..20: mol_type = other DNA
ttttttttttttttttttaa

SEQ ID NO: 219849 - DNA, 20 bp, synthetic construct
  source 1..20: mol_type = other DNA
atttttttttttttttttta

SEQ ID NO: 219850 - DNA, 20 bp, synthetic construct
  source 1..20: mol_type = other DNA
tatttttttttttttttttt

SEQ ID NO: 219851 - DNA, 20 bp, synthetic construct
  source 1..20: mol_type = other DNA
atattttttttttttttttt

SEQ ID NO: 219852 - DNA, 20 bp, synthetic construct
  source 1..20: mol_type = other DNA
tatatttttttttttttttt

SEQ ID NO: 219853 - DNA, 20 bp, synthetic construct
  source 1..20: mol_type = other DNA
atatattttttttttttttt

SEQ ID NO: 219854 - DNA, 20 bp, synthetic construct
  source 1..20: mol_type = other DNA
tatatatttttttttttttt

SEQ ID NO: 219855 - DNA, 20 bp, synthetic construct
  source 1..20: mol_type = other DNA
atatatattttttttttttt

SEQ ID NO: 219856 - DNA, 20 bp, synthetic construct
  source 1..20: mol_type = other DNA
tatatatatttttttttttt

SEQ ID NO: 219857 - DNA, 20 bp, synthetic construct
  source 1..20: mol_type = other DNA
atatatatattttttttttt

SEQ ID NO: 219858 - DNA, 20 bp, synthetic construct
  source 1..20: mol_type = other DNA
tatatatatatttttttttt

SEQ ID NO: 219859 - DNA, 20 bp, synthetic construct
  source 1..20: mol_type = other DNA
atatatatatattttttttt

SEQ ID NO: 219860 - DNA, 20 bp, synthetic construct
  source 1..20: mol_type = other DNA
tatatatatatatttttttt

SEQ ID NO: 219861 - DNA, 20 bp, synthetic construct
  source 1..20: mol_type = other DNA
atatatatatatattttttt

SEQ ID NO: 219862 - DNA, 20 bp, synthetic construct
  source 1..20: mol_type = other DNA
tatatatatatatatttttt

SEQ ID NO: 219863 - DNA, 20 bp, synthetic construct
  source 1..20: mol_type = other DNA
atatatatatatatattttt

SEQ ID NO: 219864 - DNA, 20 bp, synthetic construct
  source 1..20: mol_type = other DNA
tatatatatatatatatttt

SEQ ID NO: 219865 - DNA, 20 bp, synthetic construct
  source 1..20: mol_type = other DNA
atatatatatatatatattt

SEQ ID NO: 219866 - DNA, 20 bp, synthetic construct
  source 1..20: mol_type = other DNA
tatatatatatatatatatt

SEQ ID NO: 219867 - DNA, 20 bp, synthetic construct
  source 1..20: mol_type = other DNA
atatatatatatatatatat

SEQ ID NO: 219868 - DNA, 20 bp, synthetic construct
  source 1..20: mol_type = other DNA
tatatatatatatatatata

SEQ ID NO: 219869 - DNA, 20 bp, synthetic construct
  source 1..20: mol_type = other DNA
atatatatatatatatatat

SEQ ID NO: 219870 - DNA, 20 bp, synthetic construct
  source 1..20: mol_type = other DNA
tatatatatatatatatata

SEQ ID NO: 219871 - DNA, 20 bp, synthetic construct
  source 1..20: mol_type = other DNA
atatatatatatatatatat

SEQ ID NO: 219872 - DNA, 20 bp, synthetic construct
  source 1..20: mol_type = other DNA
catatatatatatatatata

SEQ ID NO: 219873 - DNA, 20 bp, synthetic construct
  source 1..20: mol_type = other DNA
acatatatatatatatatat

SEQ ID NO: 219874 - DNA, 20 bp, synthetic construct
  source 1..20: mol_type = other DNA
gacatatatatatatatata

SEQ ID NO: 219875 - DNA, 20 bp, synthetic construct
  source 1..20: mol_type = other DNA
tgacatatatatatatatat

SEQ ID NO: 219876 - DNA, 20 bp, synthetic construct
  source 1..20: mol_type = other DNA
ttgacatatatatatatata

SEQ ID NO: 219877 - DNA, 20 bp, synthetic construct
  source 1..20: mol_type = other DNA
tttgacatatatatatatat

SEQ ID NO: 219878 - DNA, 20 bp, synthetic construct
  source 1..20: mol_type = other DNA
ttttgacatatatatatata

SEQ ID NO: 219879 - DNA, 20 bp, synthetic construct
  source 1..20: mol_type = other DNA
tttttgacatatatatatat

SEQ ID NO: 219880 - DNA, 20 bp, synthetic construct
  source 1..20: mol_type = other DNA
atttttgacatatatatata

SEQ ID NO: 219881 - DNA, 20 bp, synthetic construct
  source 1..20: mol_type = other DNA
catttttgacatatatatat

SEQ ID NO: 219882 - DNA, 20 bp, synthetic construct
  source 1..20: mol_type = other DNA
ccatttttgacatatatata

SEQ ID NO: 219883 - DNA, 20 bp, synthetic construct
  source 1..20: mol_type = other DNA
cccatttttgacatatatat

SEQ ID NO: 219884 - DNA, 20 bp, synthetic construct
  source 1..20: mol_type = other DNA
ccccatttttgacatatata

SEQ ID NO: 219885 - DNA, 20 bp, synthetic construct
  source 1..20: mol_type = other DNA
accccatttttgacatatat

SEQ ID NO: 219886 - DNA, 20 bp, synthetic construct
  source 1..20: mol_type = other DNA
taccccatttttgacatata

SEQ ID NO: 219887 - DNA, 20 bp, synthetic construct
  source 1..20: mol_type = other DNA
ctaccccatttttgacatat

SEQ ID NO: 219888 - DNA, 20 bp, synthetic construct
  source 1..20: mol_type = other DNA
actaccccatttttgacata

SEQ ID NO: 219889 - DNA, 20 bp, synthetic construct
  source 1..20: mol_type = other DNA
aactaccccatttttgacat

SEQ ID NO: 219890 - DNA, 20 bp, synthetic construct
  source 1..20: mol_type = other DNA
aaactaccccatttttgaca

SEQ ID NO: 219891 - DNA, 20 bp, synthetic construct
  source 1..20: mol_type = other DNA
aaaactaccccatttttgac

SEQ ID NO: 219892 - DNA, 20 bp, synthetic construct
  source 1..20: mol_type = other DNA
aaaaactaccccatttttga

SEQ ID NO: 219893 - DNA, 20 bp, synthetic construct
  source 1..20: mol_type = other DNA
taaaaactaccccatttttg

SEQ ID NO: 219894 - DNA, 20 bp, synthetic construct
  source 1..20: mol_type = other DNA
ctaaaaactaccccattttt

SEQ ID NO: 219895 - DNA, 20 bp, synthetic construct
  source 1..20: mol_type = other DNA
tctaaaaactaccccatttt

SEQ ID NO: 219896 - DNA, 20 bp, synthetic construct
  source 1..20: mol_type = other DNA
atctaaaaactaccccattt

SEQ ID NO: 219897 - DNA, 20 bp, synthetic construct
  source 1..20: mol_type = other DNA
gatctaaaaactaccccatt

SEQ ID NO: 219898 - DNA, 20 bp, synthetic construct
  source 1..20: mol_type = other DNA
agatctaaaaactaccccat

SEQ ID NO: 219899 - DNA, 20 bp, synthetic construct
  source 1..20: mol_type = other DNA
tagatctaaaaactacccca

SEQ ID NO: 219900 - DNA, 20 bp, synthetic construct
  source 1..20: mol_type = other DNA
atagatctaaaaactacccc

SEQ ID NO: 219901 - DNA, 20 bp, synthetic construct
  source 1..20: mol_type = other DNA
tatagatctaaaaactaccc

SEQ ID NO: 219902 - DNA, 20 bp, synthetic construct
  source 1..20: mol_type = other DNA
ctatagatctaaaaactacc

SEQ ID NO: 219903 - DNA, 20 bp, synthetic construct
  source 1..20: mol_type = other DNA
actatagatctaaaaactac

SEQ ID NO: 219904 - DNA, 20 bp, synthetic construct
  source 1..20: mol_type = other DNA
tactatagatctaaaaacta

SEQ ID NO: 219905 - DNA, 20 bp, synthetic construct
  source 1..20: mol_type = other DNA
ctactatagatctaaaaact

SEQ ID NO: 219906 - DNA, 20 bp, synthetic construct
  source 1..20: mol_type = other DNA
actactatagatctaaaaac

SEQ ID NO: 219907 - DNA, 20 bp, synthetic construct
  source 1..20: mol_type = other DNA
aactactatagatctaaaaa

SEQ ID NO: 219908 - DNA, 20 bp, synthetic construct
  source 1..20: mol_type = other DNA
gaactactatagatctaaaa

SEQ ID NO: 219909 - DNA, 20 bp, synthetic construct
  source 1..20: mol_type = other DNA
agaactactatagatctaaa

SEQ ID NO: 219910 - DNA, 20 bp, synthetic construct
  source 1..20: mol_type = other DNA
tagaactactatagatctaa

SEQ ID NO: 219911 - DNA, 20 bp, synthetic construct
  source 1..20: mol_type = other DNA
ttagaactactatagatcta

SEQ ID NO: 219912 - DNA, 20 bp, synthetic construct
  source 1..20: mol_type = other DNA
tttagaactactatagatct

SEQ ID NO: 219913 - DNA, 20 bp, synthetic construct
  source 1..20: mol_type = other DNA
ttttagaactactatagatc

SEQ ID NO: 219914 - DNA, 20 bp, synthetic construct
  source 1..20: mol_type = other DNA
tttttagaactactatagat

SEQ ID NO: 219915 - DNA, 20 bp, synthetic construct
  source 1..20: mol_type = other DNA
gtttttagaactactataga

SEQ ID NO: 219916 - DNA, 20 bp, synthetic construct
  source 1..20: mol_type = other DNA
tgtttttagaactactatag

SEQ ID NO: 219917 - DNA, 20 bp, synthetic construct
  source 1..20: mol_type = other DNA
ttgtttttagaactactata

SEQ ID NO: 219918 - DNA, 20 bp, synthetic construct
  source 1..20: mol_type = other DNA
tttgtttttagaactactat

SEQ ID NO: 219919 - DNA, 20 bp, synthetic construct
  source 1..20: mol_type = other DNA
ctttgtttttagaactacta

SEQ ID NO: 219920 - DNA, 20 bp, synthetic construct
  source 1..20: mol_type = other DNA
cctttgtttttagaactact

SEQ ID NO: 219921 - DNA, 20 bp, synthetic construct
  source 1..20: mol_type = other DNA
gcctttgtttttagaactac

SEQ ID NO: 219922 - DNA, 20 bp, synthetic construct
  source 1..20: mol_type = other DNA
ggcctttgtttttagaacta

SEQ ID NO: 219923 - DNA, 20 bp, synthetic construct
  source 1..20: mol_type = other DNA
tggcctttgtttttagaact

SEQ ID NO: 219924 - DNA, 20 bp, synthetic construct
  source 1..20: mol_type = other DNA
atggcctttgtttttagaac

SEQ ID NO: 219925 - DNA, 20 bp, synthetic construct
  source 1..20: mol_type = other DNA
gatggcctttgtttttagaa

SEQ ID NO: 219926 - DNA, 20 bp, synthetic construct
  source 1..20: mol_type = other DNA
ggatggcctttgtttttaga

SEQ ID NO: 219927 - DNA, 20 bp, synthetic construct
  source 1..20: mol_type = other DNA
tggatggcctttgtttttag

SEQ ID NO: 219928 - DNA, 20 bp, synthetic construct
  source 1..20: mol_type = other DNA
ttggatggcctttgttttta

SEQ ID NO: 219929 - DNA, 20 bp, synthetic construct
  source 1..20: mol_type = other DNA
cttggatggcctttgttttt

SEQ ID NO: 219930 - DNA, 20 bp, synthetic construct
  source 1..20: mol_type = other DNA
gcttggatggcctttgtttt

SEQ ID NO: 219931 - DNA, 20 bp, synthetic construct
  source 1..20: mol_type = other DNA
tgcttggatggcctttgttt

SEQ ID NO: 219932 - DNA, 20 bp, synthetic construct
  source 1..20: mol_type = other DNA
atgcttggatggcctttgtt

SEQ ID NO: 219933 - DNA, 20 bp, synthetic construct
  source 1..20: mol_type = other DNA
catgcttggatggcctttgt

SEQ ID NO: 219934 - DNA, 20 bp, synthetic construct
  source 1..20: mol_type = other DNA
tcatgcttggatggcctttg

SEQ ID NO: 219935 - DNA, 20 bp, synthetic construct
  source 1..20: mol_type = other DNA
gtcatgcttggatggccttt

SEQ ID NO: 219936 - DNA, 20 bp, synthetic construct
  source 1..20: mol_type = other DNA
tgtcatgcttggatggcctt

SEQ ID NO: 219937 - DNA, 20 bp, synthetic construct
  source 1..20: mol_type = other DNA
ctgtcatgcttggatggcct

SEQ ID NO: 219938 - DNA, 20 bp, synthetic construct
  source 1..20: mol_type = other DNA
tctgtcatgcttggatggcc

SEQ ID NO: 219939 - DNA, 20 bp, synthetic construct
  source 1..20: mol_type = other DNA
atctgtcatgcttggatggc

SEQ ID NO: 219940 - DNA, 20 bp, synthetic construct
  source 1..20: mol_type = other DNA
aatctgtcatgcttggatgg

SEQ ID NO: 219941 - DNA, 20 bp, synthetic construct
  source 1..20: mol_type = other DNA
aaatctgtcatgcttggatg

SEQ ID NO: 219942 - DNA, 20 bp, synthetic construct
  source 1..20: mol_type = other DNA
taaatctgtcatgcttggat

SEQ ID NO: 219943 - DNA, 20 bp, synthetic construct
  source 1..20: mol_type = other DNA
gtaaatctgtcatgcttgga

SEQ ID NO: 219944 - DNA, 20 bp, synthetic construct
  source 1..20: mol_type = other DNA
tgtaaatctgtcatgcttgg

SEQ ID NO: 219945 - DNA, 20 bp, synthetic construct
  source 1..20: mol_type = other DNA
ttgtaaatctgtcatgcttg

SEQ ID NO: 219946 - DNA, 20 bp, synthetic construct
  source 1..20: mol_type = other DNA
cttgtaaatctgtcatgctt

SEQ ID NO: 219947 - DNA, 20 bp, synthetic construct
  source 1..20: mol_type = other DNA
gcttgtaaatctgtcatgct

SEQ ID NO: 219948 - DNA, 20 bp, synthetic construct
  source 1..20: mol_type = other DNA
tgcttgtaaatctgtcatgc

SEQ ID NO: 219949 - DNA, 20 bp, synthetic construct
  source 1..20: mol_type = other DNA
gtgcttgtaaatctgtcatg

SEQ ID NO: 219950 - DNA, 20 bp, synthetic construct
  source 1..20: mol_type = other DNA
agtgcttgtaaatctgtcat

SEQ ID NO: 219951 - DNA, 20 bp, synthetic construct
  source 1..20: mol_type = other DNA
tagtgcttgtaaatctgtca

SEQ ID NO: 219952 - DNA, 20 bp, synthetic construct
  source 1..20: mol_type = other DNA
atagtgcttgtaaatctgtc

SEQ ID NO: 219953 - DNA, 20 bp, synthetic construct
  source 1..20: mol_type = other DNA
aatagtgcttgtaaatctgt

SEQ ID NO: 219954 - DNA, 20 bp, synthetic construct
  source 1..20: mol_type = other DNA
caatagtgcttgtaaatctg

SEQ ID NO: 219955 - DNA, 20 bp, synthetic construct
  source 1..20: mol_type = other DNA
ccaatagtgcttgtaaatct

SEQ ID NO: 219956 - DNA, 20 bp, synthetic construct
  source 1..20: mol_type = other DNA
gccaatagtgcttgtaaatc

SEQ ID NO: 219957 - DNA, 20 bp, synthetic construct
  source 1..20: mol_type = other DNA
agccaatagtgcttgtaaat

SEQ ID NO: 219958 - DNA, 20 bp, synthetic construct
  source 1..20: mol_type = other DNA
tagccaatagtgcttgtaaa

SEQ ID NO: 219959 - DNA, 20 bp, synthetic construct
  source 1..20: mol_type = other DNA
atagccaatagtgcttgtaa

SEQ ID NO: 219960 - DNA, 20 bp, synthetic construct
  source 1..20: mol_type = other DNA
aatagccaatagtgcttgta

SEQ ID NO: 219961 - DNA, 20 bp, synthetic construct
  source 1..20: mol_type = other DNA
gaatagccaatagtgcttgt

SEQ ID NO: 219962 - DNA, 20 bp, synthetic construct
  source 1..20: mol_type = other DNA
ggaatagccaatagtgcttg

SEQ ID NO: 219963 - DNA, 20 bp, synthetic construct
  source 1..20: mol_type = other DNA
tggaatagccaatagtgctt

SEQ ID NO: 219964 - DNA, 20 bp, synthetic construct
  source 1..20: mol_type = other DNA
ctggaatagccaatagtgct

SEQ ID NO: 219965 - DNA, 20 bp, synthetic construct
  source 1..20: mol_type = other DNA
actggaatagccaatagtgc

SEQ ID NO: 219966 - DNA, 20 bp, synthetic construct
  source 1..20: mol_type = other DNA
tactggaatagccaatagtg

SEQ ID NO: 219967 - DNA, 20 bp, synthetic construct
  source 1..20: mol_type = other DNA
ctactggaatagccaatagt

SEQ ID NO: 219968 - DNA, 20 bp, synthetic construct
  source 1..20: mol_type = other DNA
actactggaatagccaatag

SEQ ID NO: 219969 - DNA, 20 bp, synthetic construct
  source 1..20: mol_type = other DNA
aactactggaatagccaata

SEQ ID NO: 219970 - DNA, 20 bp, synthetic construct
  source 1..20: mol_type = other DNA
taactactggaatagccaat

SEQ ID NO: 219971 - DNA, 20 bp, synthetic construct
  source 1..20: mol_type = other DNA
gtaactactggaatagccaa

SEQ ID NO: 219972 - DNA, 20 bp, synthetic construct
  source 1..20: mol_type = other DNA
tgtaactactggaatagcca

SEQ ID NO: 219973 - DNA, 20 bp, synthetic construct
  source 1..20: mol_type = other DNA
ttgtaactactggaatagcc

SEQ ID NO: 219974 - DNA, 20 bp, synthetic construct
  source 1..20: mol_type = other DNA
attgtaactactggaatagc

SEQ ID NO: 219975 - DNA, 20 bp, synthetic construct
  source 1..20: mol_type = other DNA
cattgtaactactggaatag

SEQ ID NO: 219976 - DNA, 20 bp, synthetic construct
  source 1..20: mol_type = other DNA
ccattgtaactactggaata

SEQ ID NO: 219977 - DNA, 20 bp, synthetic construct
  source 1..20: mol_type = other DNA
tccattgtaactactggaat

SEQ ID NO: 219978 - DNA, 20 bp, synthetic construct
  source 1..20: mol_type = other DNA
ctccattgtaactactggaa

SEQ ID NO: 219979 - DNA, 20 bp, synthetic construct
  source 1..20: mol_type = other DNA
cctccattgtaactactgga

SEQ ID NO: 219980 - DNA, 20 bp, synthetic construct
  source 1..20: mol_type = other DNA
tcctccattgtaactactgg

SEQ ID NO: 219981 - DNA, 20 bp, synthetic construct
  source 1..20: mol_type = other DNA
ctcctccattgtaactactg

SEQ ID NO: 219982 - DNA, 20 bp, synthetic construct
  source 1..20: mol_type = other DNA
tctcctccattgtaactact

SEQ ID NO: 219983 - DNA, 20 bp, synthetic construct
  source 1..20: mol_type = other DNA
ctctcctccattgtaactac

SEQ ID NO: 219984 - DNA, 20 bp, synthetic construct
  source 1..20: mol_type = other DNA
tctctcctccattgtaacta

SEQ ID NO: 219985 - DNA, 20 bp, synthetic construct
  source 1..20: mol_type = other DNA
ttctctcctccattgtaact

SEQ ID NO: 219986 - DNA, 20 bp, synthetic construct
  source 1..20: mol_type = other DNA
cttctctcctccattgtaac

SEQ ID NO: 219987 - DNA, 20 bp, synthetic construct
  source 1..20: mol_type = other DNA
gcttctctcctccattgtaa

SEQ ID NO: 219988 - DNA, 20 bp, synthetic construct
  source 1..20: mol_type = other DNA
agcttctctcctccattgta

SEQ ID NO: 219989 - DNA, 20 bp, synthetic construct
  source 1..20: mol_type = other DNA
aagcttctctcctccattgt

SEQ ID NO: 219990 - DNA, 20 bp, synthetic construct
  source 1..20: mol_type = other DNA
aaagcttctctcctccattg

SEQ ID NO: 219991 - DNA, 20 bp, synthetic construct
  source 1..20: mol_type = other DNA
aaaagcttctctcctccatt

SEQ ID NO: 219992 - DNA, 20 bp, synthetic construct
  source 1..20: mol_type = other DNA
taaaagcttctctcctccat

SEQ ID NO: 219993 - DNA, 20 bp, synthetic construct
  source 1..20: mol_type = other DNA
ctaaaagcttctctcctcca

SEQ ID NO: 219994 - DNA, 20 bp, synthetic construct
  source 1..20: mol_type = other DNA
actaaaagcttctctcctcc

SEQ ID NO: 219995 - DNA, 20 bp, synthetic construct
  source 1..20: mol_type = other DNA
aactaaaagcttctctcctc

SEQ ID NO: 219996 - DNA, 20 bp, synthetic construct
  source 1..20: mol_type = other DNA
taactaaaagcttctctcct

SEQ ID NO: 219997 - DNA, 20 bp, synthetic construct
  source 1..20: mol_type = other DNA
ttaactaaaagcttctctcc

SEQ ID NO: 219998 - DNA, 20 bp, synthetic construct
  source 1..20: mol_type = other DNA
tttaactaaaagcttctctc

SEQ ID NO: 219999 - DNA, 20 bp, synthetic construct
  source 1..20: mol_type = other DNA
ttttaactaaaagcttctct

SEQ ID NO: 220000 - DNA, 20 bp, synthetic construct
  source 1..20: mol_type = other DNA
gttttaactaaaagcttctc

SEQ ID NO: 220001 - DNA, 20 bp, synthetic construct
  source 1..20: mol_type = other DNA
tgttttaactaaaagcttct

SEQ ID NO: 220002 - DNA, 20 bp, synthetic construct
  source 1..20: mol_type = other DNA
ttgttttaactaaaagcttc

SEQ ID NO: 220003 - DNA, 20 bp, synthetic construct
  source 1..20: mol_type = other DNA
tttgttttaactaaaagctt

SEQ ID NO: 220004 - DNA, 20 bp, synthetic construct
  source 1..20: mol_type = other DNA
gtttgttttaactaaaagct

SEQ ID NO: 220005 - DNA, 20 bp, synthetic construct
  source 1..20: mol_type = other DNA
tgtttgttttaactaaaagc

SEQ ID NO: 220006 - DNA, 20 bp, synthetic construct
  source 1..20: mol_type = other DNA
ttgtttgttttaactaaaag

SEQ ID NO: 220007 - DNA, 20 bp, synthetic construct
  source 1..20: mol_type = other DNA
tttgtttgttttaactaaaa

SEQ ID NO: 220008 - DNA, 20 bp, synthetic construct
  source 1..20: mol_type = other DNA
gtttgtttgttttaactaaa

SEQ ID NO: 220009 - DNA, 20 bp, synthetic construct
  source 1..20: mol_type = other DNA
tgtttgtttgttttaactaa

SEQ ID NO: 220010 - DNA, 20 bp, synthetic construct
  source 1..20: mol_type = other DNA
ttgtttgtttgttttaacta

SEQ ID NO: 220011 - DNA, 20 bp, synthetic construct
  source 1..20: mol_type = other DNA
gttgtttgtttgttttaact

SEQ ID NO: 220012 - DNA, 20 bp, synthetic construct
  source 1..20: mol_type = other DNA
tgttgtttgtttgttttaac

SEQ ID NO: 220013 - DNA, 20 bp, synthetic construct
  source 1..20: mol_type = other DNA
gtgttgtttgtttgttttaa

SEQ ID NO: 220014 - DNA, 20 bp, synthetic construct
  source 1..20: mol_type = other DNA
tgtgttgtttgtttgtttta

SEQ ID NO: 220015 - DNA, 20 bp, synthetic construct
  source 1..20: mol_type = other DNA
ttgtgttgtttgtttgtttt

SEQ ID NO: 220016 - DNA, 20 bp, synthetic construct
  source 1..20: mol_type = other DNA
gttgtgttgtttgtttgttt

SEQ ID NO: 220017 - DNA, 20 bp, synthetic construct
  source 1..20: mol_type = other DNA
tgttgtgttgtttgtttgtt

SEQ ID NO: 220018 - DNA, 20 bp, synthetic construct
  source 1..20: mol_type = other DNA
ttgttgtgttgtttgtttgt

SEQ ID NO: 220019 - DNA, 20 bp, synthetic construct
  source 1..20: mol_type = other DNA
tttgttgtgttgtttgtttg

SEQ ID NO: 220020 - DNA, 20 bp, synthetic construct
  source 1..20: mol_type = other DNA
gtttgttgtgttgtttgttt

SEQ ID NO: 220021 - DNA, 20 bp, synthetic construct
  source 1..20: mol_type = other DNA
ggtttgttgtgttgtttgtt

SEQ ID NO: 220022 - DNA, 20 bp, synthetic construct
  source 1..20: mol_type = other DNA
gggtttgttgtgttgtttgt

SEQ ID NO: 220023 - DNA, 20 bp, synthetic construct
  source 1..20: mol_type = other DNA
tgggtttgttgtgttgtttg

SEQ ID NO: 220024 - DNA, 20 bp, synthetic construct
  source 1..20: mol_type = other DNA
ctgggtttgttgtgttgttt

SEQ ID NO: 220025 - DNA, 20 bp, synthetic construct
  source 1..20: mol_type = other DNA
tctgggtttgttgtgttgtt

SEQ ID NO: 220026 - DNA, 20 bp, synthetic construct
  source 1..20: mol_type = other DNA
ttctgggtttgttgtgttgt

SEQ ID NO: 220027 - DNA, 20 bp, synthetic construct
  source 1..20: mol_type = other DNA
tttctgggtttgttgtgttg

SEQ ID NO: 220028 - DNA, 20 bp, synthetic construct
  source 1..20: mol_type = other DNA
gtttctgggtttgttgtgtt

SEQ ID NO: 220029 - DNA, 20 bp, synthetic construct
  source 1..20: mol_type = other DNA
ggtttctgggtttgttgtgt

SEQ ID NO: 220030 - DNA, 20 bp, synthetic construct
  source 1..20: mol_type = other DNA
aggtttctgggtttgttgtg

SEQ ID NO: 220031 - DNA, 20 bp, synthetic construct
  source 1..20: mol_type = other DNA
aaggtttctgggtttgttgt

SEQ ID NO: 220032 - DNA, 20 bp, synthetic construct
  source 1..20: mol_type = other DNA
taaggtttctgggtttgttg

SEQ ID NO: 220033 - DNA, 20 bp, synthetic construct
  source 1..20: mol_type = other DNA
ctaaggtttctgggtttgtt

SEQ ID NO: 220034 - DNA, 20 bp, synthetic construct
  source 1..20: mol_type = other DNA
cctaaggtttctgggtttgt

SEQ ID NO: 220035 - DNA, 20 bp, synthetic construct
  source 1..20: mol_type = other DNA
acctaaggtttctgggtttg

SEQ ID NO: 220036 - DNA, 20 bp, synthetic construct
  source 1..20: mol_type = other DNA
gacctaaggtttctgggttt

SEQ ID NO: 220037 - DNA, 20 bp, synthetic construct
  source 1..20: mol_type = other DNA
tgacctaaggtttctgggtt

SEQ ID NO: 220038 - DNA, 20 bp, synthetic construct
  source 1..20: mol_type = other DNA
ttgacctaaggtttctgggt

SEQ ID NO: 220039 - DNA, 20 bp, synthetic construct
  source 1..20: mol_type = other DNA
tttgacctaaggtttctggg

SEQ ID NO: 220040 - DNA, 20 bp, synthetic construct
  source 1..20: mol_type = other DNA
ttttgacctaaggtttctgg

SEQ ID NO: 220041 - DNA, 20 bp, synthetic construct
  source 1..20: mol_type = other DNA
gttttgacctaaggtttctg

SEQ ID NO: 220042 - DNA, 20 bp, synthetic construct
  source 1..20: mol_type = other DNA
ggttttgacctaaggtttct

SEQ ID NO: 220043 - DNA, 20 bp, synthetic construct
  source 1..20: mol_type = other DNA
tggttttgacctaaggtttc

SEQ ID NO: 220044 - DNA, 20 bp, synthetic construct
  source 1..20: mol_type = other DNA
ttggttttgacctaaggttt

SEQ ID NO: 220045 - DNA, 20 bp, synthetic construct
  source 1..20: mol_type = other DNA
tttggttttgacctaaggtt

SEQ ID NO: 220046 - DNA, 20 bp, synthetic construct
  source 1..20: mol_type = other DNA
ttttggttttgacctaaggt

SEQ ID NO: 220047 - DNA, 20 bp, synthetic construct
  source 1..20: mol_type = other DNA
attttggttttgacctaagg

SEQ ID NO: 220048 - DNA, 20 bp, synthetic construct
  source 1..20: mol_type = other DNA
aattttggttttgacctaag

SEQ ID NO: 220049 - DNA, 20 bp, synthetic construct
  source 1..20: mol_type = other DNA
caattttggttttgacctaa

SEQ ID NO: 220050 - DNA, 20 bp, synthetic construct
  source 1..20: mol_type = other DNA
acaattttggttttgaccta

SEQ ID NO: 220051 - DNA, 20 bp, synthetic construct
  source 1..20: mol_type = other DNA
gacaattttggttttgacct

SEQ ID NO: 220052 - DNA, 20 bp, synthetic construct
  source 1..20: mol_type = other DNA
ggacaattttggttttgacc

SEQ ID NO: 220053 - DNA, 20 bp, synthetic construct
  source 1..20: mol_type = other DNA
aggacaattttggttttgac

SEQ ID NO: 220054 - DNA, 20 bp, synthetic construct
  source 1..20: mol_type = other DNA
gaggacaattttggttttga

SEQ ID NO: 220055 - DNA, 20 bp, synthetic construct
  source 1..20: mol_type = other DNA
agaggacaattttggttttg

SEQ ID NO: 220056 - DNA, 20 bp, synthetic construct
  source 1..20: mol_type = other DNA
gagaggacaattttggtttt

SEQ ID NO: 220057 - DNA, 20 bp, synthetic construct
  source 1..20: mol_type = other DNA
tgagaggacaattttggttt

SEQ ID NO: 220058 - DNA, 20 bp, synthetic construct
  source 1..20: mol_type = other DNA
ctgagaggacaattttggtt

SEQ ID NO: 220059 - DNA, 20 bp, synthetic construct
  source 1..20: mol_type = other DNA
tctgagaggacaattttggt

SEQ ID NO: 220060 - DNA, 20 bp, synthetic construct
  source 1..20: mol_type = other DNA
gtctgagaggacaattttgg

SEQ ID NO: 220061 - DNA, 20 bp, synthetic construct
  source 1..20: mol_type = other DNA
tgtctgagaggacaattttg

SEQ ID NO: 220062 - DNA, 20 bp, synthetic construct
  source 1..20: mol_type = other DNA
gtgtctgagaggacaatttt

SEQ ID NO: 220063 - DNA, 20 bp, synthetic construct
  source 1..20: mol_type = other DNA
tgtgtctgagaggacaattt

SEQ ID NO: 220064 - DNA, 20 bp, synthetic construct
  source 1..20: mol_type = other DNA
ttgtgtctgagaggacaatt

SEQ ID NO: 220065 - DNA, 20 bp, synthetic construct
  source 1..20: mol_type = other DNA
attgtgtctgagaggacaat

SEQ ID NO: 220066 - DNA, 20 bp, synthetic construct
  source 1..20: mol_type = other DNA
gattgtgtctgagaggacaa

SEQ ID NO: 220067 - DNA, 20 bp, synthetic construct
  source 1..20: mol_type = other DNA
agattgtgtctgagaggaca

SEQ ID NO: 220068 - DNA, 20 bp, synthetic construct
  source 1..20: mol_type = other DNA
cagattgtgtctgagaggac

SEQ ID NO: 220069 - DNA, 20 bp, synthetic construct
  source 1..20: mol_type = other DNA
ccagattgtgtctgagagga

SEQ ID NO: 220070 - DNA, 20 bp, synthetic construct
  source 1..20: mol_type = other DNA
cccagattgtgtctgagagg

SEQ ID NO: 220071 - DNA, 20 bp, synthetic construct
  source 1..20: mol_type = other DNA
tcccagattgtgtctgagag

SEQ ID NO: 220072 - DNA, 20 bp, synthetic construct
  source 1..20: mol_type = other DNA
ttcccagattgtgtctgaga

SEQ ID NO: 220073 - DNA, 20 bp, synthetic construct
  source 1..20: mol_type = other DNA
attcccagattgtgtctgag

SEQ ID NO: 220074 - DNA, 20 bp, synthetic construct
  source 1..20: mol_type = other DNA
aattcccagattgtgtctga

SEQ ID NO: 220075 - DNA, 20 bp, synthetic construct
  source 1..20: mol_type = other DNA
aaattcccagattgtgtctg

SEQ ID NO: 220076 - DNA, 20 bp, synthetic construct
  source 1..20: mol_type = other DNA
aaaattcccagattgtgtct

SEQ ID NO: 220077 - DNA, 20 bp, synthetic construct
  source 1..20: mol_type = other DNA
gaaaattcccagattgtgtc

SEQ ID NO: 220078 - DNA, 20 bp, synthetic construct
  source 1..20: mol_type = other DNA
agaaaattcccagattgtgt

SEQ ID NO: 220079 - DNA, 20 bp, synthetic construct
  source 1..20: mol_type = other DNA
gagaaaattcccagattgtg

SEQ ID NO: 220080 - DNA, 20 bp, synthetic construct
  source 1..20: mol_type = other DNA
tgagaaaattcccagattgt

SEQ ID NO: 220081 - DNA, 20 bp, synthetic construct
  source 1..20: mol_type = other DNA
atgagaaaattcccagattg

SEQ ID NO: 220082 - DNA, 20 bp, synthetic construct
  source 1..20: mol_type = other DNA
catgagaaaattcccagatt

SEQ ID NO: 220083 - DNA, 20 bp, synthetic construct
  source 1..20: mol_type = other DNA
tcatgagaaaattcccagat

SEQ ID NO: 220084 - DNA, 20 bp, synthetic construct
  source 1..20: mol_type = other DNA
gtcatgagaaaattcccaga

SEQ ID NO: 220085 - DNA, 20 bp, synthetic construct
  source 1..20: mol_type = other DNA
tgtcatgagaaaattcccag

SEQ ID NO: 220086 - DNA, 20 bp, synthetic construct
  source 1..20: mol_type = other DNA
ctgtcatgagaaaattccca

SEQ ID NO: 220087 - DNA, 20 bp, synthetic construct
  source 1..20: mol_type = other DNA
actgtcatgagaaaattccc

SEQ ID NO: 220088 - DNA, 20 bp, synthetic construct
  source 1..20: mol_type = other DNA
cactgtcatgagaaaattcc

SEQ ID NO: 220089 - DNA, 20 bp, synthetic construct
  source 1..20: mol_type = other DNA
ccactgtcatgagaaaattc

SEQ ID NO: 220090 - DNA, 20 bp, synthetic construct
  source 1..20: mol_type = other DNA
cccactgtcatgagaaaatt

SEQ ID NO: 220091 - DNA, 20 bp, synthetic construct
  source 1..20: mol_type = other DNA
gcccactgtcatgagaaaat

SEQ ID NO: 220092 - DNA, 20 bp, synthetic construct
  source 1..20: mol_type = other DNA
tgcccactgtcatgagaaaa

SEQ ID NO: 220093 - DNA, 20 bp, synthetic construct
  source 1..20: mol_type = other DNA
atgcccactgtcatgagaaa

SEQ ID NO: 220094 - DNA, 20 bp, synthetic construct
  source 1..20: mol_type = other DNA
aatgcccactgtcatgagaa

SEQ ID NO: 220095 - DNA, 20 bp, synthetic construct
  source 1..20: mol_type = other DNA
taatgcccactgtcatgaga

SEQ ID NO: 220096 - DNA, 20 bp, synthetic construct
  source 1..20: mol_type = other DNA
ctaatgcccactgtcatgag

SEQ ID NO: 220097 - DNA, 20 bp, synthetic construct
  source 1..20: mol_type = other DNA
gctaatgcccactgtcatga

SEQ ID NO: 220098 - DNA, 20 bp, synthetic construct
  source 1..20: mol_type = other DNA
ggctaatgcccactgtcatg

SEQ ID NO: 220099 - DNA, 20 bp, synthetic construct
  source 1..20: mol_type = other DNA
tggctaatgcccactgtcat

SEQ ID NO: 220100 - DNA, 20 bp, synthetic construct
  source 1..20: mol_type = other DNA
ttggctaatgcccactgtca

SEQ ID NO: 220101 - DNA, 20 bp, synthetic construct
  source 1..20: mol_type = other DNA
gttggctaatgcccactgtc

SEQ ID NO: 220102 - DNA, 20 bp, synthetic construct
  source 1..20: mol_type = other DNA
agttggctaatgcccactgt

SEQ ID NO: 220103 - DNA, 20 bp, synthetic construct
  source 1..20: mol_type = other DNA
cagttggctaatgcccactg

SEQ ID NO: 220104 - DNA, 20 bp, synthetic construct
  source 1..20: mol_type = other DNA
tcagttggctaatgcccact

SEQ ID NO: 220105 - DNA, 20 bp, synthetic construct
  source 1..20: mol_type = other DNA
gtcagttggctaatgcccac

SEQ ID NO: 220106 - DNA, 20 bp, synthetic construct
  source 1..20: mol_type = other DNA
tgtcagttggctaatgccca

SEQ ID NO: 220107 - DNA, 20 bp, synthetic construct
  source 1..20: mol_type = other DNA
atgtcagttggctaatgccc

SEQ ID NO: 220108 - DNA, 20 bp, synthetic construct
  source 1..20: mol_type = other DNA
gatgtcagttggctaatgcc

SEQ ID NO: 220109 - DNA, 20 bp, synthetic construct
  source 1..20: mol_type = other DNA
tgatgtcagttggctaatgc

SEQ ID NO: 220110 - DNA, 20 bp, synthetic construct
  source 1..20: mol_type = other DNA
ctgatgtcagttggctaatg

SEQ ID NO: 220111 - DNA, 20 bp, synthetic construct
  source 1..20: mol_type = other DNA
gctgatgtcagttggctaat

SEQ ID NO: 220112 - DNA, 20 bp, synthetic construct
  source 1..20: mol_type = other DNA
tgctgatgtcagttggctaa

SEQ ID NO: 220113 - DNA, 20 bp, synthetic construct
  source 1..20: mol_type = other DNA
ctgctgatgtcagttggcta

SEQ ID NO: 220114 - DNA, 20 bp, synthetic construct
  source 1..20: mol_type = other DNA
gctgctgatgtcagttggct

SEQ ID NO: 220115 - DNA, 20 bp, synthetic construct
  source 1..20: mol_type = other DNA
tgctgctgatgtcagttggc

SEQ ID NO: 220116 - DNA, 20 bp, synthetic construct
  source 1..20: mol_type = other DNA
ttgctgctgatgtcagttgg

SEQ ID NO: 220117 - DNA, 20 bp, synthetic construct
  source 1..20: mol_type = other DNA
gttgctgctgatgtcagttg

SEQ ID NO: 220118 - DNA, 20 bp, synthetic construct
  source 1..20: mol_type = other DNA
ggttgctgctgatgtcagtt

SEQ ID NO: 220119 - DNA, 20 bp, synthetic construct
  source 1..20: mol_type = other DNA
tggttgctgctgatgtcagt

SEQ ID NO: 220120 - DNA, 20 bp, synthetic construct
  source 1..20: mol_type = other DNA
atggttgctgctgatgtcag

SEQ ID NO: 220121 - DNA, 20 bp, synthetic construct
  source 1..20: mol_type = other DNA
gatggttgctgctgatgtca

SEQ ID NO: 220122 - DNA, 20 bp, synthetic construct
  source 1..20: mol_type = other DNA
ggatggttgctgctgatgtc

SEQ ID NO: 220123 - DNA, 20 bp, synthetic construct
  source 1..20: mol_type = other DNA
cggatggttgctgctgatgt

SEQ ID NO: 220124 - DNA, 20 bp, synthetic construct
  source 1..20: mol_type = other DNA
acggatggttgctgctgatg

SEQ ID NO: 220125 - DNA, 20 bp, synthetic construct
  source 1..20: mol_type = other DNA
cacggatggttgctgctgat

SEQ ID NO: 220126 - DNA, 20 bp, synthetic construct
  source 1..20: mol_type = other DNA
acacggatggttgctgctga

SEQ ID NO: 220127 - DNA, 20 bp, synthetic construct
  source 1..20: mol_type = other DNA
cacacggatggttgctgctg

SEQ ID NO: 220128 - DNA, 20 bp, synthetic construct
  source 1..20: mol_type = other DNA
gcacacggatggttgctgct

SEQ ID NO: 220129 - DNA, 20 bp, synthetic construct
  source 1..20: mol_type = other DNA
tgcacacggatggttgctgc

SEQ ID NO: 220130 - DNA, 20 bp, synthetic construct
  source 1..20: mol_type = other DNA
gtgcacacggatggttgctg

SEQ ID NO: 220131 - DNA, 20 bp, synthetic construct
  source 1..20: mol_type = other DNA
tgtgcacacggatggttgct

SEQ ID NO: 220132 - DNA, 20 bp, synthetic construct
  source 1..20: mol_type = other DNA
gtgtgcacacggatggttgc

SEQ ID NO: 220133 - DNA, 20 bp, synthetic construct
  source 1..20: mol_type = other DNA
tgtgtgcacacggatggttg

SEQ ID NO: 220134 - DNA, 20 bp, synthetic construct
  source 1..20: mol_type = other DNA
ctgtgtgcacacggatggtt

SEQ ID NO: 220135 - DNA, 20 bp, synthetic construct
  source 1..20: mol_type = other DNA
actgtgtgcacacggatggt

SEQ ID NO: 220136 - DNA, 20 bp, synthetic construct
  source 1..20: mol_type = other DNA
cactgtgtgcacacggatgg

SEQ ID NO: 220137 - DNA, 20 bp, synthetic construct
  source 1..20: mol_type = other DNA
ccactgtgtgcacacggatg

SEQ ID NO: 220138 - DNA, 20 bp, synthetic construct
  source 1..20: mol_type = other DNA
gccactgtgtgcacacggat

SEQ ID NO: 220139 - DNA, 20 bp, synthetic construct
  source 1..20: mol_type = other DNA
tgccactgtgtgcacacgga

SEQ ID NO: 220140 - DNA, 20 bp, synthetic construct
  source 1..20: mol_type = other DNA
gtgccactgtgtgcacacgg

SEQ ID NO: 220141 - DNA, 20 bp, synthetic construct
  source 1..20: mol_type = other DNA
ggtgccactgtgtgcacacg

SEQ ID NO: 220142 - DNA, 20 bp, synthetic construct
  source 1..20: mol_type = other DNA
tggtgccactgtgtgcacac

SEQ ID NO: 220143 - DNA, 20 bp, synthetic construct
  source 1..20: mol_type = other DNA
gtggtgccactgtgtgcaca

SEQ ID NO: 220144 - DNA, 20 bp, synthetic construct
  source 1..20: mol_type = other DNA
ggtggtgccactgtgtgcac

SEQ ID NO: 220145 - DNA, 20 bp, synthetic construct
  source 1..20: mol_type = other DNA
aggtggtgccactgtgtgca

SEQ ID NO: 220146 - DNA, 20 bp, synthetic construct
  source 1..20: mol_type = other DNA
gaggtggtgccactgtgtgc

SEQ ID NO: 220147 - DNA, 20 bp, synthetic construct
  source 1..20: mol_type = other DNA
ggaggtggtgccactgtgtg

SEQ ID NO: 220148 - DNA, 20 bp, synthetic construct
  source 1..20: mol_type = other DNA
aggaggtggtgccactgtgt

SEQ ID NO: 220149 - DNA, 20 bp, synthetic construct
  source 1..20: mol_type = other DNA
gaggaggtggtgccactgtg

SEQ ID NO: 220150 - DNA, 20 bp, synthetic construct
  source 1..20: mol_type = other DNA
ggaggaggtggtgccactgt

SEQ ID NO: 220151 - DNA, 20 bp, synthetic construct
  source 1..20: mol_type = other DNA
gggaggaggtggtgccactg

SEQ ID NO: 220152 - DNA, 20 bp, synthetic construct
  source 1..20: mol_type = other DNA
tgggaggaggtggtgccact

SEQ ID NO: 220153 - DNA, 20 bp, synthetic construct
  source 1..20: mol_type = other DNA
ttgggaggaggtggtgccac

SEQ ID NO: 220154 - DNA, 20 bp, synthetic construct
  source 1..20: mol_type = other DNA
tttgggaggaggtggtgcca

SEQ ID NO: 220155 - DNA, 20 bp, synthetic construct
  source 1..20: mol_type = other DNA
ttttgggaggaggtggtgcc

SEQ ID NO: 220156 - DNA, 20 bp, synthetic construct
  source 1..20: mol_type = other DNA
tttttgggaggaggtggtgc

SEQ ID NO: 220157 - DNA, 20 bp, synthetic construct
  source 1..20: mol_type = other DNA
ctttttgggaggaggtggtg

SEQ ID NO: 220158 - DNA, 20 bp, synthetic construct
  source 1..20: mol_type = other DNA
gctttttgggaggaggtggt

SEQ ID NO: 220159 - DNA, 20 bp, synthetic construct
  source 1..20: mol_type = other DNA
tgctttttgggaggaggtgg

SEQ ID NO: 220160 - DNA, 20 bp, synthetic construct
  source 1..20: mol_type = other DNA
ctgctttttgggaggaggtg

SEQ ID NO: 220161 - DNA, 20 bp, synthetic construct
  source 1..20: mol_type = other DNA
gctgctttttgggaggaggt

SEQ ID NO: 220162 - DNA, 20 bp, synthetic construct
  source 1..20: mol_type = other DNA
ggctgctttttgggaggagg

SEQ ID NO: 220163 - DNA, 20 bp, synthetic construct
  source 1..20: mol_type = other DNA
aggctgctttttgggaggag

SEQ ID NO: 220164 - DNA, 20 bp, synthetic construct
  source 1..20: mol_type = other DNA
aaggctgctttttgggagga

SEQ ID NO: 220165 - DNA, 20 bp, synthetic construct
  source 1..20: mol_type = other DNA
gaaggctgctttttgggagg

SEQ ID NO: 220166 - DNA, 20 bp, synthetic construct
  source 1..20: mol_type = other DNA
tgaaggctgctttttgggag

SEQ ID NO: 220167 - DNA, 20 bp, synthetic construct
  source 1..20: mol_type = other DNA
atgaaggctgctttttggga

SEQ ID NO: 220168 - DNA, 20 bp, synthetic construct
  source 1..20: mol_type = other DNA
gatgaaggctgctttttggg

SEQ ID NO: 220169 - DNA, 20 bp, synthetic construct
  source 1..20: mol_type = other DNA
agatgaaggctgctttttgg

SEQ ID NO: 220170 - DNA, 20 bp, synthetic construct
  source 1..20: mol_type = other DNA
tagatgaaggctgctttttg

SEQ ID NO: 220171 - DNA, 20 bp, synthetic construct
  source 1..20: mol_type = other DNA
atagatgaaggctgcttttt

SEQ ID NO: 220172 - DNA, 20 bp, synthetic construct
  source 1..20: mol_type = other DNA
catagatgaaggctgctttt

SEQ ID NO: 220173 - DNA, 20 bp, synthetic construct
  source 1..20: mol_type = other DNA
gcatagatgaaggctgcttt

SEQ ID NO: 220174 - DNA, 20 bp, synthetic construct
  source 1..20: mol_type = other DNA
ggcatagatgaaggctgctt

SEQ ID NO: 220175 - DNA, 20 bp, synthetic construct
  source 1..20: mol_type = other DNA
gggcatagatgaaggctgct

SEQ ID NO: 220176 - DNA, 20 bp, synthetic construct
  source 1..20: mol_type = other DNA
agggcatagatgaaggctgc

SEQ ID NO: 220177 - DNA, 20 bp, synthetic construct
  source 1..20: mol_type = other DNA
gagggcatagatgaaggctg

SEQ ID NO: 220178 - DNA, 20 bp, synthetic construct
  source 1..20: mol_type = other DNA
tgagggcatagatgaaggct

SEQ ID NO: 220179 - DNA, 20 bp, synthetic construct
  source 1..20: mol_type = other DNA
atgagggcatagatgaaggc

SEQ ID NO: 220180 - DNA, 20 bp, synthetic construct
  source 1..20: mol_type = other DNA
tatgagggcatagatgaagg

SEQ ID NO: 220181 - DNA, 20 bp, synthetic construct
  source 1..20: mol_type = other DNA
gtatgagggcatagatgaag

SEQ ID NO: 220182 - DNA, 20 bp, synthetic construct
  source 1..20: mol_type = other DNA
tgtatgagggcatagatgaa

SEQ ID NO: 220183 - DNA, 20 bp, synthetic construct
  source 1..20: mol_type = other DNA
ttgtatgagggcatagatga

SEQ ID NO: 220184 - DNA, 20 bp, synthetic construct
  source 1..20: mol_type = other DNA
attgtatgagggcatagatg

SEQ ID NO: 220185 - DNA, 20 bp, synthetic construct
  source 1..20: mol_type = other DNA
gattgtatgagggcatagat

SEQ ID NO: 220186 - DNA, 20 bp, synthetic construct
  source 1..20: mol_type = other DNA
cgattgtatgagggcataga

SEQ ID NO: 220187 - DNA, 20 bp, synthetic construct
  source 1..20: mol_type = other DNA
acgattgtatgagggcatag

SEQ ID NO: 220188 - DNA, 20 bp, synthetic construct
  source 1..20: mol_type = other DNA
aacgattgtatgagggcata

SEQ ID NO: 220189 - DNA, 20 bp, synthetic construct
  source 1..20: mol_type = other DNA
caacgattgtatgagggcat

SEQ ID NO: 220190 - DNA, 20 bp, synthetic construct
  source 1..20: mol_type = other DNA
tcaacgattgtatgagggca

SEQ ID NO: 220191 - DNA, 20 bp, synthetic construct
  source 1..20: mol_type = other DNA
atcaacgattgtatgagggc

SEQ ID NO: 220192 - DNA, 20 bp, synthetic construct
  source 1..20: mol_type = other DNA
aatcaacgattgtatgaggg

SEQ ID NO: 220193 - DNA, 20 bp, synthetic construct
  source 1..20: mol_type = other DNA
taatcaacgattgtatgagg

SEQ ID NO: 220194 - DNA, 20 bp, synthetic construct
  source 1..20: mol_type = other DNA
ataatcaacgattgtatgag

SEQ ID NO: 220195 - DNA, 20 bp, synthetic construct
  source 1..20: mol_type = other DNA
aataatcaacgattgtatga

SEQ ID NO: 220196 - DNA, 20 bp, synthetic construct
  source 1..20: mol_type = other DNA
gaataatcaacgattgtatg

SEQ ID NO: 220197 - DNA, 20 bp, synthetic construct
  source 1..20: mol_type = other DNA
agaataatcaacgattgtat

SEQ ID NO: 220198 - DNA, 20 bp, synthetic construct
  source 1..20: mol_type = other DNA
gagaataatcaacgattgta

SEQ ID NO: 220199 - DNA, 20 bp, synthetic construct
  source 1..20: mol_type = other DNA
agagaataatcaacgattgt

SEQ ID NO: 220200 - DNA, 20 bp, synthetic construct
  source 1..20: mol_type = other DNA
aagagaataatcaacgattg

SEQ ID NO: 220201 - DNA, 20 bp, synthetic construct
  source 1..20: mol_type = other DNA
aaagagaataatcaacgatt

SEQ ID NO: 220202 - DNA, 20 bp, synthetic construct
  source 1..20: mol_type = other DNA
caaagagaataatcaacgat

SEQ ID NO: 220203 - DNA, 20 bp, synthetic construct
  source 1..20: mol_type = other DNA
ccaaagagaataatcaacga

SEQ ID NO: 220204 - DNA, 20 bp, synthetic construct
  source 1..20: mol_type = other DNA
tccaaagagaataatcaacg

SEQ ID NO: 220205 - DNA, 20 bp, synthetic construct
  source 1..20: mol_type = other DNA
atccaaagagaataatcaac

SEQ ID NO: 220206 - DNA, 20 bp, synthetic construct
  source 1..20: mol_type = other DNA
aatccaaagagaataatcaa

SEQ ID NO: 220207 - DNA, 20 bp, synthetic construct
  source 1..20: mol_type = other DNA
caatccaaagagaataatca

SEQ ID NO: 220208 - DNA, 20 bp, synthetic construct
  source 1..20: mol_type = other DNA
tcaatccaaagagaataatc

SEQ ID NO: 220209 - DNA, 20 bp, synthetic construct
  source 1..20: mol_type = other DNA
ctcaatccaaagagaataat

SEQ ID NO: 220210 - DNA, 20 bp, synthetic construct
  source 1..20: mol_type = other DNA
cctcaatccaaagagaataa

SEQ ID NO: 220211 - DNA, 20 bp, synthetic construct
  source 1..20: mol_type = other DNA
gcctcaatccaaagagaata

SEQ ID NO: 220212 - DNA, 20 bp, synthetic construct
  source 1..20: mol_type = other DNA
ggcctcaatccaaagagaat

SEQ ID NO: 220213 - DNA, 20 bp, synthetic construct
  source 1..20: mol_type = other DNA
gggcctcaatccaaagagaa

SEQ ID NO: 220214 - DNA, 20 bp, synthetic construct
  source 1..20: mol_type = other DNA
cgggcctcaatccaaagaga

SEQ ID NO: 220215 - DNA, 20 bp, synthetic construct
  source 1..20: mol_type = other DNA
ccgggcctcaatccaaagag

SEQ ID NO: 220216 - DNA, 20 bp, synthetic construct
  source 1..20: mol_type = other DNA
tccgggcctcaatccaaaga

SEQ ID NO: 220217 - DNA, 20 bp, synthetic construct
  source 1..20: mol_type = other DNA
ttccgggcctcaatccaaag

SEQ ID NO: 220218 - DNA, 20 bp, synthetic construct
  source 1..20: mol_type = other DNA
attccgggcctcaatccaaa

SEQ ID NO: 220219 - DNA, 20 bp, synthetic construct
  source 1..20: mol_type = other DNA
aattccgggcctcaatccaa

SEQ ID NO: 220220 - DNA, 20 bp, synthetic construct
  source 1..20: mol_type = other DNA
taattccgggcctcaatcca

SEQ ID NO: 220221 - DNA, 20 bp, synthetic construct
  source 1..20: mol_type = other DNA
ataattccgggcctcaatcc

SEQ ID NO: 220222 - DNA, 20 bp, synthetic construct
  source 1..20: mol_type = other DNA
aataattccgggcctcaatc

SEQ ID NO: 220223 - DNA, 20 bp, synthetic construct
  source 1..20: mol_type = other DNA
aaataattccgggcctcaat

SEQ ID NO: 220224 - DNA, 20 bp, synthetic construct
  source 1..20: mol_type = other DNA
taaataattccgggcctcaa

SEQ ID NO: 220225 - DNA, 20 bp, synthetic construct
  source 1..20: mol_type = other DNA
ttaaataattccgggcctca

SEQ ID NO: 220226 - DNA, 20 bp, synthetic construct
  source 1..20: mol_type = other DNA
cttaaataattccgggcctc

SEQ ID NO: 220227 - DNA, 20 bp, synthetic construct
  source 1..20: mol_type = other DNA
acttaaataattccgggcct

SEQ ID NO: 220228 - DNA, 20 bp, synthetic construct
  source 1..20: mol_type = other DNA
aacttaaataattccgggcc

SEQ ID NO: 220229 - DNA, 20 bp, synthetic construct
  source 1..20: mol_type = other DNA
aaacttaaataattccgggc

SEQ ID NO: 220230 - DNA, 20 bp, synthetic construct
  source 1..20: mol_type = other DNA
gaaacttaaataattccggg

SEQ ID NO: 220231 - DNA, 20 bp, synthetic construct
  source 1..20: mol_type = other DNA
agaaacttaaataattccgg

SEQ ID NO: 220232 - DNA, 20 bp, synthetic construct
  source 1..20: mol_type = other DNA
aagaaacttaaataattccg

SEQ ID NO: 220233 - DNA, 20 bp, synthetic construct
  source 1..20: mol_type = other DNA
gaagaaacttaaataattcc

SEQ ID NO: 220234 - DNA, 20 bp, synthetic construct
  source 1..20: mol_type = other DNA
agaagaaacttaaataattc

SEQ ID NO: 220235 - DNA, 20 bp, synthetic construct
  source 1..20: mol_type = other DNA
aagaagaaacttaaataatt

SEQ ID NO: 220236 - DNA, 20 bp, synthetic construct
  source 1..20: mol_type = other DNA
caagaagaaacttaaataat

SEQ ID NO: 220237 - DNA, 20 bp, synthetic construct
  source 1..20: mol_type = other DNA
gcaagaagaaacttaaataa

SEQ ID NO: 220238 - DNA, 20 bp, synthetic construct
  source 1..20: mol_type = other DNA
ggcaagaagaaacttaaata

SEQ ID NO: 220239 - DNA, 20 bp, synthetic construct
  source 1..20: mol_type = other DNA
tggcaagaagaaacttaaat

SEQ ID NO: 220240 - DNA, 20 bp, synthetic construct
  source 1..20: mol_type = other DNA
ctggcaagaagaaacttaaa

SEQ ID NO: 220241 - DNA, 20 bp, synthetic construct
  source 1..20: mol_type = other DNA
gctggcaagaagaaacttaa

SEQ ID NO: 220242 - DNA, 20 bp, synthetic construct
  source 1..20: mol_type = other DNA
tgctggcaagaagaaactta

SEQ ID NO: 220243 - DNA, 20 bp, synthetic construct
  source 1..20: mol_type = other DNA
atgctggcaagaagaaactt

SEQ ID NO: 220244 - DNA, 20 bp, synthetic construct
  source 1..20: mol_type = other DNA
catgctggcaagaagaaact

SEQ ID NO: 220245 - DNA, 20 bp, synthetic construct
  source 1..20: mol_type = other DNA
tcatgctggcaagaagaaac

SEQ ID NO: 220246 - DNA, 20 bp, synthetic construct
  source 1..20: mol_type = other DNA
ctcatgctggcaagaagaaa

SEQ ID NO: 220247 - DNA, 20 bp, synthetic construct
  source 1..20: mol_type = other DNA
actcatgctggcaagaagaa

SEQ ID NO: 220248 - DNA, 20 bp, synthetic construct
  source 1..20: mol_type = other DNA
gactcatgctggcaagaaga

SEQ ID NO: 220249 - DNA, 20 bp, synthetic construct
  source 1..20: mol_type = other DNA
agactcatgctggcaagaag

SEQ ID NO: 220250 - DNA, 20 bp, synthetic construct
  source 1..20: mol_type = other DNA
aagactcatgctggcaagaa

SEQ ID NO: 220251 - DNA, 20 bp, synthetic construct
  source 1..20: mol_type = other DNA
aaagactcatgctggcaaga

SEQ ID NO: 220252 - DNA, 20 bp, synthetic construct
  source 1..20: mol_type = other DNA
gaaagactcatgctggcaag

SEQ ID NO: 220253 - DNA, 20 bp, synthetic construct
  source 1..20: mol_type = other DNA
ggaaagactcatgctggcaa

SEQ ID NO: 220254 - DNA, 20 bp, synthetic construct
  source 1..20: mol_type = other DNA
aggaaagactcatgctggca

SEQ ID NO: 220255 - DNA, 20 bp, synthetic construct
  source 1..20: mol_type = other DNA
aaggaaagactcatgctggc

SEQ ID NO: 220256 - DNA, 20 bp, synthetic construct
  source 1..20: mol_type = other DNA
aaaggaaagactcatgctgg

SEQ ID NO: 220257 - DNA, 20 bp, synthetic construct
  source 1..20: mol_type = other DNA
gaaaggaaagactcatgctg

SEQ ID NO: 220258 - DNA, 20 bp, synthetic construct
  source 1..20: mol_type = other DNA
agaaaggaaagactcatgct

SEQ ID NO: 220259 - DNA, 20 bp, synthetic construct
  source 1..20: mol_type = other DNA
cagaaaggaaagactcatgc

SEQ ID NO: 220260 - DNA, 20 bp, synthetic construct
  source 1..20: mol_type = other DNA
acagaaaggaaagactcatg

SEQ ID NO: 220261 - DNA, 20 bp, synthetic construct
  source 1..20: mol_type = other DNA
tacagaaaggaaagactcat

SEQ ID NO: 220262 - DNA, 20 bp, synthetic construct
  source 1..20: mol_type = other DNA
atacagaaaggaaagactca

SEQ ID NO: 220263 - DNA, 20 bp, synthetic construct
  source 1..20: mol_type = other DNA
catacagaaaggaaagactc

SEQ ID NO: 220264 - DNA, 20 bp, synthetic construct
  source 1..20: mol_type = other DNA
gcatacagaaaggaaagact

SEQ ID NO: 220265 - DNA, 20 bp, synthetic construct
  source 1..20: mol_type = other DNA
agcatacagaaaggaaagac

SEQ ID NO: 220266 - DNA, 20 bp, synthetic construct
  source 1..20: mol_type = other DNA
gagcatacagaaaggaaaga

SEQ ID NO: 220267 - DNA, 20 bp, synthetic construct
  source 1..20: mol_type = other DNA
ggagcatacagaaaggaaag

SEQ ID NO: 220268 - DNA, 20 bp, synthetic construct
  source 1..20: mol_type = other DNA
aggagcatacagaaaggaaa

SEQ ID NO: 220269 - DNA, 20 bp, synthetic construct
  source 1..20: mol_type = other DNA
aaggagcatacagaaaggaa

SEQ ID NO: 220270 - DNA, 20 bp, synthetic construct
  source 1..20: mol_type = other DNA
taaggagcatacagaaagga

SEQ ID NO: 220271 - DNA, 20 bp, synthetic construct
  source 1..20: mol_type = other DNA
ataaggagcatacagaaagg

SEQ ID NO: 220272 - DNA, 20 bp, synthetic construct
  source 1..20: mol_type = other DNA
gataaggagcatacagaaag

SEQ ID NO: 220273 - DNA, 20 bp, synthetic construct
  source 1..20: mol_type = other DNA
agataaggagcatacagaaa

SEQ ID NO: 220274 - DNA, 20 bp, synthetic construct
  source 1..20: mol_type = other DNA
aagataaggagcatacagaa

SEQ ID NO: 220275 - DNA, 20 bp, synthetic construct
  source 1..20: mol_type = other DNA
gaagataaggagcatacaga

SEQ ID NO: 220276 - DNA, 20 bp, synthetic construct
  source 1..20: mol_type = other DNA
agaagataaggagcatacag

SEQ ID NO: 220277 - DNA, 20 bp, synthetic construct
  source 1..20: mol_type = other DNA
gagaagataaggagcataca

SEQ ID NO: 220278 - DNA, 20 bp, synthetic construct
  source 1..20: mol_type = other DNA
agagaagataaggagcatac

SEQ ID NO: 220279 - DNA, 20 bp, synthetic construct
  source 1..20: mol_type = other DNA
gagagaagataaggagcata

SEQ ID NO: 220280 - DNA, 20 bp, synthetic construct
  source 1..20: mol_type = other DNA
agagagaagataaggagcat

SEQ ID NO: 220281 - DNA, 20 bp, synthetic construct
  source 1..20: mol_type = other DNA
aagagagaagataaggagca

SEQ ID NO: 220282 - DNA, 20 bp, synthetic construct
  source 1..20: mol_type = other DNA
aaagagagaagataaggagc

SEQ ID NO: 220283 - DNA, 20 bp, synthetic construct
  source 1..20: mol_type = other DNA
taaagagagaagataaggag

SEQ ID NO: 220284 - DNA, 20 bp, synthetic construct
  source 1..20: mol_type = other DNA
ttaaagagagaagataagga

SEQ ID NO: 220285 - DNA, 20 bp, synthetic construct
  source 1..20: mol_type = other DNA
attaaagagagaagataagg

SEQ ID NO: 220286 - DNA, 20 bp, synthetic construct
  source 1..20: mol_type = other DNA
aattaaagagagaagataag

SEQ ID NO: 220287 - DNA, 20 bp, synthetic construct
  source 1..20: mol_type = other DNA
aaattaaagagagaagataa

SEQ ID NO: 220288 - DNA, 20 bp, synthetic construct
  source 1..20: mol_type = other DNA
caaattaaagagagaagata

SEQ ID NO: 220289 - DNA, 20 bp, synthetic construct
  source 1..20: mol_type = other DNA
ccaaattaaagagagaagat

SEQ ID NO: 220290 - DNA, 20 bp, synthetic construct
  source 1..20: mol_type = other DNA
gccaaattaaagagagaaga

SEQ ID NO: 220291 - DNA, 20 bp, synthetic construct
  source 1..20: mol_type = other DNA
tgccaaattaaagagagaag

SEQ ID NO: 220292 - DNA, 20 bp, synthetic construct
  source 1..20: mol_type = other DNA
ctgccaaattaaagagagaa

SEQ ID NO: 220293 - DNA, 20 bp, synthetic construct
  source 1..20: mol_type = other DNA
actgccaaattaaagagaga

SEQ ID NO: 220294 - DNA, 20 bp, synthetic construct
  source 1..20: mol_type = other DNA
aactgccaaattaaagagag

SEQ ID NO: 220295 - DNA, 20 bp, synthetic construct
  source 1..20: mol_type = other DNA
gaactgccaaattaaagaga

SEQ ID NO: 220296 - DNA, 20 bp, synthetic construct
  source 1..20: mol_type = other DNA
agaactgccaaattaaagag

SEQ ID NO: 220297 - DNA, 20 bp, synthetic construct
  source 1..20: mol_type = other DNA
cagaactgccaaattaaaga

SEQ ID NO: 220298 - DNA, 20 bp, synthetic construct
  source 1..20: mol_type = other DNA
gcagaactgccaaattaaag

SEQ ID NO: 220299 - DNA, 20 bp, synthetic construct
  source 1..20: mol_type = other DNA
agcagaactgccaaattaaa

SEQ ID NO: 220300 - DNA, 20 bp, synthetic construct
  source 1..20: mol_type = other DNA
aagcagaactgccaaattaa

SEQ ID NO: 220301 - DNA, 20 bp, synthetic construct
  source 1..20: mol_type = other DNA
caagcagaactgccaaatta

SEQ ID NO: 220302 - DNA, 20 bp, synthetic construct
  source 1..20: mol_type = other DNA
tcaagcagaactgccaaatt

SEQ ID NO: 220303 - DNA, 20 bp, synthetic construct
  source 1..20: mol_type = other DNA
ttcaagcagaactgccaaat

SEQ ID NO: 220304 - DNA, 20 bp, synthetic construct
  source 1..20: mol_type = other DNA
tttcaagcagaactgccaaa

SEQ ID NO: 220305 - DNA, 20 bp, synthetic construct
  source 1..20: mol_type = other DNA
atttcaagcagaactgccaa

SEQ ID NO: 220306 - DNA, 20 bp, synthetic construct
  source 1..20: mol_type = other DNA
gatttcaagcagaactgcca

SEQ ID NO: 220307 - DNA, 20 bp, synthetic construct
  source 1..20: mol_type = other DNA
agatttcaagcagaactgcc

SEQ ID NO: 220308 - DNA, 20 bp, synthetic construct
  source 1..20: mol_type = other DNA
cagatttcaagcagaactgc

SEQ ID NO: 220309 - DNA, 20 bp, synthetic construct
  source 1..20: mol_type = other DNA
ccagatttcaagcagaactg

SEQ ID NO: 220310 - DNA, 20 bp, synthetic construct
  source 1..20: mol_type = other DNA
cccagatttcaagcagaact

SEQ ID NO: 220311 - DNA, 20 bp, synthetic construct
  source 1..20: mol_type = other DNA
acccagatttcaagcagaac

SEQ ID NO: 220312 - DNA, 20 bp, synthetic construct
  source 1..20: mol_type = other DNA
gacccagatttcaagcagaa

SEQ ID NO: 220313 - DNA, 20 bp, synthetic construct
  source 1..20: mol_type = other DNA
agacccagatttcaagcaga

SEQ ID NO: 220314 - DNA, 20 bp, synthetic construct
  source 1..20: mol_type = other DNA
aagacccagatttcaagcag

SEQ ID NO: 220315 - DNA, 20 bp, synthetic construct
  source 1..20: mol_type = other DNA
aaagacccagatttcaagca

SEQ ID NO: 220316 - DNA, 20 bp, synthetic construct
  source 1..20: mol_type = other DNA
gaaagacccagatttcaagc

SEQ ID NO: 220317 - DNA, 20 bp, synthetic construct
  source 1..20: mol_type = other DNA
tgaaagacccagatttcaag

SEQ ID NO: 220318 - DNA, 20 bp, synthetic construct
  source 1..20: mol_type = other DNA
atgaaagacccagatttcaa

SEQ ID NO: 220319 - DNA, 20 bp, synthetic construct
  source 1..20: mol_type = other DNA
aatgaaagacccagatttca

SEQ ID NO: 220320 - DNA, 20 bp, synthetic construct
  source 1..20: mol_type = other DNA
taatgaaagacccagatttc

SEQ ID NO: 220321 - DNA, 20 bp, synthetic construct
  source 1..20: mol_type = other DNA
ctaatgaaagacccagattt

SEQ ID NO: 220322 - DNA, 20 bp, synthetic construct
  source 1..20: mol_type = other DNA
actaatgaaagacccagatt

SEQ ID NO: 220323 - DNA, 20 bp, synthetic construct
  source 1..20: mol_type = other DNA
tactaatgaaagacccagat

SEQ ID NO: 220324 - DNA, 20 bp, synthetic construct
  source 1..20: mol_type = other DNA
ctactaatgaaagacccaga

SEQ ID NO: 220325 - DNA, 20 bp, synthetic construct
  source 1..20: mol_type = other DNA
actactaatgaaagacccag

SEQ ID NO: 220326 - DNA, 20 bp, synthetic construct
  source 1..20: mol_type = other DNA
tactactaatgaaagaccca

SEQ ID NO: 220327 - DNA, 20 bp, synthetic construct
  source 1..20: mol_type = other DNA
ctactactaatgaaagaccc

SEQ ID NO: 220328 - DNA, 20 bp, synthetic construct
  source 1..20: mol_type = other DNA
actactactaatgaaagacc

SEQ ID NO: 220329 - DNA, 20 bp, synthetic construct
  source 1..20: mol_type = other DNA
aactactactaatgaaagac

SEQ ID NO: 220330 - DNA, 20 bp, synthetic construct
  source 1..20: mol_type = other DNA
gaactactactaatgaaaga

SEQ ID NO: 220331 - DNA, 20 bp, synthetic construct
  source 1..20: mol_type = other DNA
tgaactactactaatgaaag

SEQ ID NO: 220332 - DNA, 20 bp, synthetic construct
  source 1..20: mol_type = other DNA
ttgaactactactaatgaaa

SEQ ID NO: 220333 - DNA, 20 bp, synthetic construct
  source 1..20: mol_type = other DNA
attgaactactactaatgaa

SEQ ID NO: 220334 - DNA, 20 bp, synthetic construct
  source 1..20: mol_type = other DNA
aattgaactactactaatga

SEQ ID NO: 220335 - DNA, 20 bp, synthetic construct
  source 1..20: mol_type = other DNA
aaattgaactactactaatg

SEQ ID NO: 220336 - DNA, 20 bp, synthetic construct
  source 1..20: mol_type = other DNA
caaattgaactactactaat

SEQ ID NO: 220337 - DNA, 20 bp, synthetic construct
  source 1..20: mol_type = other DNA
ccaaattgaactactactaa

SEQ ID NO: 220338 - DNA, 20 bp, synthetic construct
  source 1..20: mol_type = other DNA
accaaattgaactactacta

SEQ ID NO: 220339 - DNA, 20 bp, synthetic construct
  source 1..20: mol_type = other DNA
aaccaaattgaactactact

SEQ ID NO: 220340 - DNA, 20 bp, synthetic construct
  source 1..20: mol_type = other DNA
gaaccaaattgaactactac

SEQ ID NO: 220341 - DNA, 20 bp, synthetic construct
  source 1..20: mol_type = other DNA
ggaaccaaattgaactacta

SEQ ID NO: 220342 - DNA, 20 bp, synthetic construct
  source 1..20: mol_type = other DNA
tggaaccaaattgaactact

SEQ ID NO: 220343 - DNA, 20 bp, synthetic construct
  source 1..20: mol_type = other DNA
ctggaaccaaattgaactac

SEQ ID NO: 220344 - DNA, 20 bp, synthetic construct
  source 1..20: mol_type = other DNA
tctggaaccaaattgaacta

SEQ ID NO: 220345 - DNA, 20 bp, synthetic construct
  source 1..20: mol_type = other DNA
ttctggaaccaaattgaact

SEQ ID NO: 220346 - DNA, 20 bp, synthetic construct
  source 1..20: mol_type = other DNA
gttctggaaccaaattgaac

SEQ ID NO: 220347 - DNA, 20 bp, synthetic construct
  source 1..20: mol_type = other DNA
tgttctggaaccaaattgaa

SEQ ID NO: 220348 - DNA, 20 bp, synthetic construct
  source 1..20: mol_type = other DNA
atgttctggaaccaaattga

SEQ ID NO: 220349 - DNA, 20 bp, synthetic construct
  source 1..20: mol_type = other DNA
aatgttctggaaccaaattg

SEQ ID NO: 220350 - DNA, 20 bp, synthetic construct
  source 1..20: mol_type = other DNA
gaatgttctggaaccaaatt

SEQ ID NO: 220351 - DNA, 20 bp, synthetic construct
  source 1..20: mol_type = other DNA
agaatgttctggaaccaaat

SEQ ID NO: 220352 - DNA, 20 bp, synthetic construct
  source 1..20: mol_type = other DNA
cagaatgttctggaaccaaa

SEQ ID NO: 220353 - DNA, 20 bp, synthetic construct
  source 1..20: mol_type = other DNA
acagaatgttctggaaccaa

SEQ ID NO: 220354 - DNA, 20 bp, synthetic construct
  source 1..20: mol_type = other DNA
cacagaatgttctggaacca

SEQ ID NO: 220355 - DNA, 20 bp, synthetic construct
  source 1..20: mol_type = other DNA
ccacagaatgttctggaacc

SEQ ID NO: 220356 - DNA, 20 bp, synthetic construct
  source 1..20: mol_type = other DNA
accacagaatgttctggaac

SEQ ID NO: 220357 - DNA, 20 bp, synthetic construct
  source 1..20: mol_type = other DNA
caccacagaatgttctggaa

SEQ ID NO: 220358 - DNA, 20 bp, synthetic construct
  source 1..20: mol_type = other DNA
acaccacagaatgttctgga

SEQ ID NO: 220359 - DNA, 20 bp, synthetic construct
  source 1..20: mol_type = other DNA
cacaccacagaatgttctgg

SEQ ID NO: 220360 - DNA, 20 bp, synthetic construct
  source 1..20: mol_type = other DNA
tcacaccacagaatgttctg

SEQ ID NO: 220361 - DNA, 20 bp, synthetic construct
  source 1..20: mol_type = other DNA
atcacaccacagaatgttct

SEQ ID NO: 220362 - DNA, 20 bp, synthetic construct
  source 1..20: mol_type = other DNA
catcacaccacagaatgttc

SEQ ID NO: 220363 - DNA, 20 bp, synthetic construct
  source 1..20: mol_type = other DNA
gcatcacaccacagaatgtt

SEQ ID NO: 220364 - DNA, 20 bp, synthetic construct
  source 1..20: mol_type = other DNA
tgcatcacaccacagaatgt

SEQ ID NO: 220365 - DNA, 20 bp, synthetic construct
  source 1..20: mol_type = other DNA
ttgcatcacaccacagaatg

SEQ ID NO: 220366 - DNA, 20 bp, synthetic construct
  source 1..20: mol_type = other DNA
attgcatcacaccacagaat

SEQ ID NO: 220367 - DNA, 20 bp, synthetic construct
  source 1..20: mol_type = other DNA
cattgcatcacaccacagaa

SEQ ID NO: 220368 - DNA, 20 bp, synthetic construct
  source 1..20: mol_type = other DNA
acattgcatcacaccacaga

SEQ ID NO: 220369 - DNA, 20 bp, synthetic construct
  source 1..20: mol_type = other DNA
cacattgcatcacaccacag

SEQ ID NO: 220370 - DNA, 20 bp, synthetic construct
  source 1..20: mol_type = other DNA
tcacattgcatcacaccaca

SEQ ID NO: 220371 - DNA, 20 bp, synthetic construct
  source 1..20: mol_type = other DNA
gtcacattgcatcacaccac

SEQ ID NO: 220372 - DNA, 20 bp, synthetic construct
  source 1..20: mol_type = other DNA
ggtcacattgcatcacacca

SEQ ID NO: 220373 - DNA, 20 bp, synthetic construct
  source 1..20: mol_type = other DNA
tggtcacattgcatcacacc

SEQ ID NO: 220374 - DNA, 20 bp, synthetic construct
  source 1..20: mol_type = other DNA
ctggtcacattgcatcacac

SEQ ID NO: 220375 - DNA, 20 bp, synthetic construct
  source 1..20: mol_type = other DNA
tctggtcacattgcatcaca

SEQ ID NO: 220376 - DNA, 20 bp, synthetic construct
  source 1..20: mol_type = other DNA
ctctggtcacattgcatcac

SEQ ID NO: 220377 - DNA, 20 bp, synthetic construct
  source 1..20: mol_type = other DNA
gctctggtcacattgcatca

SEQ ID NO: 220378 - DNA, 20 bp, synthetic construct
  source 1..20: mol_type = other DNA
agctctggtcacattgcatc

SEQ ID NO: 220379 - DNA, 20 bp, synthetic construct
  source 1..20: mol_type = other DNA
gagctctggtcacattgcat

SEQ ID NO: 220380 - DNA, 20 bp, synthetic construct
  source 1..20: mol_type = other DNA
tgagctctggtcacattgca

SEQ ID NO: 220381 - DNA, 20 bp, synthetic construct
  source 1..20: mol_type = other DNA
gtgagctctggtcacattgc

SEQ ID NO: 220382 - DNA, 20 bp, synthetic construct
  source 1..20: mol_type = other DNA
tgtgagctctggtcacattg

SEQ ID NO: 220383 - DNA, 20 bp, synthetic construct
  source 1..20: mol_type = other DNA
gtgtgagctctggtcacatt

SEQ ID NO: 220384 - DNA, 20 bp, synthetic construct
  source 1..20: mol_type = other DNA
agtgtgagctctggtcacat

SEQ ID NO: 220385 - DNA, 20 bp, synthetic construct
  source 1..20: mol_type = other DNA
aagtgtgagctctggtcaca

SEQ ID NO: 220386 - DNA, 20 bp, synthetic construct
  source 1..20: mol_type = other DNA
gaagtgtgagctctggtcac

SEQ ID NO: 220387 - DNA, 20 bp, synthetic construct
  source 1..20: mol_type = other DNA
tgaagtgtgagctctggtca

SEQ ID NO: 220388 - DNA, 20 bp, synthetic construct
  source 1..20: mol_type = other DNA
ctgaagtgtgagctctggtc

SEQ ID NO: 220389 - DNA, 20 bp, synthetic construct
  source 1..20: mol_type = other DNA
tctgaagtgtgagctctggt

SEQ ID NO: 220390 - DNA, 20 bp, synthetic construct
  source 1..20: mol_type = other DNA
ctctgaagtgtgagctctgg

SEQ ID NO: 220391 - DNA, 20 bp, synthetic construct
  source 1..20: mol_type = other DNA
gctctgaagtgtgagctctg

SEQ ID NO: 220392 - DNA, 20 bp, synthetic construct
  source 1..20: mol_type = other DNA
agctctgaagtgtgagctct

SEQ ID NO: 220393 - DNA, 20 bp, synthetic construct
  source 1..20: mol_type = other DNA
gagctctgaagtgtgagctc

SEQ ID NO: 220394 - DNA, 20 bp, synthetic construct
  source 1..20: mol_type = other DNA
agagctctgaagtgtgagct

SEQ ID NO: 220395 - DNA, 20 bp, synthetic construct
  source 1..20: mol_type = other DNA
aagagctctgaagtgtgagc

SEQ ID NO: 220396 - DNA, 20 bp, synthetic construct
  source 1..20: mol_type = other DNA
gaagagctctgaagtgtgag

SEQ ID NO: 220397 - DNA, 20 bp, synthetic construct
  source 1..20: mol_type = other DNA
tgaagagctctgaagtgtga

SEQ ID NO: 220398 - DNA, 20 bp, synthetic construct
  source 1..20: mol_type = other DNA
ttgaagagctctgaagtgtg

SEQ ID NO: 220399 - DNA, 20 bp, synthetic construct
  source 1..20: mol_type = other DNA
cttgaagagctctgaagtgt

SEQ ID NO: 220400 - DNA, 20 bp, synthetic construct
  source 1..20: mol_type = other DNA
ccttgaagagctctgaagtg

SEQ ID NO: 220401 - DNA, 20 bp, synthetic construct
  source 1..20: mol_type = other DNA
cccttgaagagctctgaagt

SEQ ID NO: 220402 - DNA, 20 bp, synthetic construct
  source 1..20: mol_type = other DNA
gcccttgaagagctctgaag

SEQ ID NO: 220403 - DNA, 20 bp, synthetic construct
  source 1..20: mol_type = other DNA
ggcccttgaagagctctgaa

SEQ ID NO: 220404 - DNA, 20 bp, synthetic construct
  source 1..20: mol_type = other DNA
tggcccttgaagagctctga

SEQ ID NO: 220405 - DNA, 20 bp, synthetic construct
  source 1..20: mol_type = other DNA
ctggcccttgaagagctctg

SEQ ID NO: 220406 - DNA, 20 bp, synthetic construct
  source 1..20: mol_type = other DNA
actggcccttgaagagctct

SEQ ID NO: 220407 - DNA, 20 bp, synthetic construct
  source 1..20: mol_type = other DNA
gactggcccttgaagagctc

SEQ ID NO: 220408 - DNA, 20 bp, synthetic construct
  source 1..20: mol_type = other DNA
agactggcccttgaagagct

SEQ ID NO: 220409 - DNA, 20 bp, synthetic construct
  source 1..20: mol_type = other DNA
aagactggcccttgaagagc

SEQ ID NO: 220410 - DNA, 20 bp, synthetic construct
  source 1..20: mol_type = other DNA
taagactggcccttgaagag

SEQ ID NO: 220411 - DNA, 20 bp, synthetic construct
  source 1..20: mol_type = other DNA
gtaagactggcccttgaaga

SEQ ID NO: 220412 - DNA, 20 bp, synthetic construct
  source 1..20: mol_type = other DNA
agtaagactggcccttgaag

SEQ ID NO: 220413 - DNA, 20 bp, synthetic construct
  source 1..20: mol_type = other DNA
cagtaagactggcccttgaa

SEQ ID NO: 220414 - DNA, 20 bp, synthetic construct
  source 1..20: mol_type = other DNA
tcagtaagactggcccttga

SEQ ID NO: 220415 - DNA, 20 bp, synthetic construct
  source 1..20: mol_type = other DNA
ctcagtaagactggcccttg

SEQ ID NO: 220416 - DNA, 20 bp, synthetic construct
  source 1..20: mol_type = other DNA
gctcagtaagactggccctt

SEQ ID NO: 220417 - DNA, 20 bp, synthetic construct
  source 1..20: mol_type = other DNA
tgctcagtaagactggccct

SEQ ID NO: 220418 - DNA, 20 bp, synthetic construct
  source 1..20: mol_type = other DNA
gtgctcagtaagactggccc

SEQ ID NO: 220419 - DNA, 20 bp, synthetic construct
  source 1..20: mol_type = other DNA
ggtgctcagtaagactggcc

SEQ ID NO: 220420 - DNA, 20 bp, synthetic construct
  source 1..20: mol_type = other DNA
aggtgctcagtaagactggc

SEQ ID NO: 220421 - DNA, 20 bp, synthetic construct
  source 1..20: mol_type = other DNA
gaggtgctcagtaagactgg

SEQ ID NO: 220422 - DNA, 20 bp, synthetic construct
  source 1..20: mol_type = other DNA
ggaggtgctcagtaagactg

SEQ ID NO: 220423 - DNA, 20 bp, synthetic construct
  source 1..20: mol_type = other DNA
gggaggtgctcagtaagact

SEQ ID NO: 220424 - DNA, 20 bp, synthetic construct
  source 1..20: mol_type = other DNA
tgggaggtgctcagtaagac

SEQ ID NO: 220425 - DNA, 20 bp, synthetic construct
  source 1..20: mol_type = other DNA
ctgggaggtgctcagtaaga

SEQ ID NO: 220426 - DNA, 20 bp, synthetic construct
  source 1..20: mol_type = other DNA
actgggaggtgctcagtaag

SEQ ID NO: 220427 - DNA, 20 bp, synthetic construct
  source 1..20: mol_type = other DNA
cactgggaggtgctcagtaa

SEQ ID NO: 220428 - DNA, 20 bp, synthetic construct
  source 1..20: mol_type = other DNA
ccactgggaggtgctcagta

SEQ ID NO: 220429 - DNA, 20 bp, synthetic construct
  source 1..20: mol_type = other DNA
gccactgggaggtgctcagt

SEQ ID NO: 220430 - DNA, 20 bp, synthetic construct
  source 1..20: mol_type = other DNA
agccactgggaggtgctcag

SEQ ID NO: 220431 - DNA, 20 bp, synthetic construct
  source 1..20: mol_type = other DNA
cagccactgggaggtgctca

SEQ ID NO: 220432 - DNA, 20 bp, synthetic construct
  source 1..20: mol_type = other DNA
gcagccactgggaggtgctc

SEQ ID NO: 220433 - DNA, 20 bp, synthetic construct
  source 1..20: mol_type = other DNA
ggcagccactgggaggtgct

SEQ ID NO: 220434 - DNA, 20 bp, synthetic construct
  source 1..20: mol_type = other DNA
aggcagccactgggaggtgc

SEQ ID NO: 220435 - DNA, 20 bp, synthetic construct
  source 1..20: mol_type = other DNA
caggcagccactgggaggtg

SEQ ID NO: 220436 - DNA, 20 bp, synthetic construct
  source 1..20: mol_type = other DNA
acaggcagccactgggaggt

SEQ ID NO: 220437 - DNA, 20 bp, synthetic construct
  source 1..20: mol_type = other DNA
cacaggcagccactgggagg

SEQ ID NO: 220438 - DNA, 20 bp, synthetic construct
  source 1..20: mol_type = other DNA
acacaggcagccactgggag

SEQ ID NO: 220439 - DNA, 20 bp, synthetic construct
  source 1..20: mol_type = other DNA
cacacaggcagccactggga

SEQ ID NO: 220440 - DNA, 20 bp, synthetic construct
  source 1..20: mol_type = other DNA
gcacacaggcagccactggg

SEQ ID NO: 220441 - DNA, 20 bp, synthetic construct
  source 1..20: mol_type = other DNA
agcacacaggcagccactgg

SEQ ID NO: 220442 - DNA, 20 bp, synthetic construct
  source 1..20: mol_type = other DNA
cagcacacaggcagccactg

SEQ ID NO: 220443 - DNA, 20 bp, synthetic construct
  source 1..20: mol_type = other DNA
ccagcacacaggcagccact

SEQ ID NO: 220444 - DNA, 20 bp, synthetic construct
  source 1..20: mol_type = other DNA
cccagcacacaggcagccac

SEQ ID NO: 220445 - DNA, 20 bp, synthetic construct
  source 1..20: mol_type = other DNA
gcccagcacacaggcagcca

SEQ ID NO: 220446 - DNA, 20 bp, synthetic construct
  source 1..20: mol_type = other DNA
cgcccagcacacaggcagcc

SEQ ID NO: 220447 - DNA, 20 bp, synthetic construct
  source 1..20: mol_type = other DNA
gcgcccagcacacaggcagc

SEQ ID NO: 220448 - DNA, 20 bp, synthetic construct
  source 1..20: mol_type = other DNA
ggcgcccagcacacaggcag

SEQ ID NO: 220449 - DNA, 20 bp, synthetic construct
  source 1..20: mol_type = other DNA
tggcgcccagcacacaggca

SEQ ID NO: 220450 - DNA, 20 bp, synthetic construct
  source 1..20: mol_type = other DNA
gtggcgcccagcacacaggc

SEQ ID NO: 220451 - DNA, 20 bp, synthetic construct
  source 1..20: mol_type = other DNA
agtggcgcccagcacacagg

SEQ ID NO: 220452 - DNA, 20 bp, synthetic construct
  source 1..20: mol_type = other DNA
aagtggcgcccagcacacag

SEQ ID NO: 220453 - DNA, 20 bp, synthetic construct
  source 1..20: mol_type = other DNA
caagtggcgcccagcacaca

SEQ ID NO: 220454 - DNA, 20 bp, synthetic construct
  source 1..20: mol_type = other DNA
acaagtggcgcccagcacac

SEQ ID NO: 220455 - DNA, 20 bp, synthetic construct
  source 1..20: mol_type = other DNA
cacaagtggcgcccagcaca

SEQ ID NO: 220456 - DNA, 20 bp, synthetic construct
  source 1..20: mol_type = other DNA
ccacaagtggcgcccagcac

SEQ ID NO: 220457 - DNA, 20 bp, synthetic construct
  source 1..20: mol_type = other DNA
accacaagtggcgcccagca

SEQ ID NO: 220458 - DNA, 20 bp, synthetic construct
  source 1..20: mol_type = other DNA
caccacaagtggcgcccagc

SEQ ID NO: 220459 - DNA, 20 bp, synthetic construct
  source 1..20: mol_type = other DNA
ccaccacaagtggcgcccag

SEQ ID NO: 220460 - DNA, 20 bp, synthetic construct
  source 1..20: mol_type = other DNA
cccaccacaagtggcgccca

SEQ ID NO: 220461 - DNA, 20 bp, synthetic construct
  source 1..20: mol_type = other DNA
gcccaccacaagtggcgccc

SEQ ID NO: 220462 - DNA, 20 bp, synthetic construct
  source 1..20: mol_type = other DNA
tgcccaccacaagtggcgcc

SEQ ID NO: 220463 - DNA, 20 bp, synthetic construct
  source 1..20: mol_type = other DNA
ctgcccaccacaagtggcgc

SEQ ID NO: 220464 - DNA, 20 bp, synthetic construct
  source 1..20: mol_type = other DNA
cctgcccaccacaagtggcg

SEQ ID NO: 220465 - DNA, 20 bp, synthetic construct
  source 1..20: mol_type = other DNA
tcctgcccaccacaagtggc

SEQ ID NO: 220466 - DNA, 20 bp, synthetic construct
  source 1..20: mol_type = other DNA
ctcctgcccaccacaagtgg

SEQ ID NO: 220467 - DNA, 20 bp, synthetic construct
  source 1..20: mol_type = other DNA
tctcctgcccaccacaagtg

SEQ ID NO: 220468 - DNA, 20 bp, synthetic construct
  source 1..20: mol_type = other DNA
ctctcctgcccaccacaagt

SEQ ID NO: 220469 - DNA, 20 bp, synthetic construct
  source 1..20: mol_type = other DNA
tctctcctgcccaccacaag

SEQ ID NO: 220470 - DNA, 20 bp, synthetic construct
  source 1..20: mol_type = other DNA
ctctctcctgcccaccacaa

SEQ ID NO: 220471 - DNA, 20 bp, synthetic construct
  source 1..20: mol_type = other DNA
cctctctcctgcccaccaca

SEQ ID NO: 220472 - DNA, 20 bp, synthetic construct
  source 1..20: mol_type = other DNA
tcctctctcctgcccaccac

SEQ ID NO: 220473 - DNA, 20 bp, synthetic construct
  source 1..20: mol_type = other DNA
ctcctctctcctgcccacca

SEQ ID NO: 220474 - DNA, 20 bp, synthetic construct
  source 1..20: mol_type = other DNA
cctcctctctcctgcccacc

SEQ ID NO: 220475 - DNA, 20 bp, synthetic construct
  source 1..20: mol_type = other DNA
ccctcctctctcctgcccac

SEQ ID NO: 220476 - DNA, 20 bp, synthetic construct
  source 1..20: mol_type = other DNA
cccctcctctctcctgccca

SEQ ID NO: 220477 - DNA, 20 bp, synthetic construct
  source 1..20: mol_type = other DNA
tcccctcctctctcctgccc

SEQ ID NO: 220478 - DNA, 20 bp, synthetic construct
  source 1..20: mol_type = other DNA
gtcccctcctctctcctgcc

SEQ ID NO: 220479 - DNA, 20 bp, synthetic construct
  source 1..20: mol_type = other DNA
tgtcccctcctctctcctgc

SEQ ID NO: 220480 - DNA, 20 bp, synthetic construct
  source 1..20: mol_type = other DNA
gtgtcccctcctctctcctg

SEQ ID NO: 220481 - DNA, 20 bp, synthetic construct
  source 1..20: mol_type = other DNA
tgtgtcccctcctctctcct

SEQ ID NO: 220482 - DNA, 20 bp, synthetic construct
  source 1..20: mol_type = other DNA
ttgtgtcccctcctctctcc

SEQ ID NO: 220483 - DNA, 20 bp, synthetic construct
  source 1..20: mol_type = other DNA
tttgtgtcccctcctctctc

SEQ ID NO: 220484 - DNA, 20 bp, synthetic construct
  source 1..20: mol_type = other DNA
ttttgtgtcccctcctctct

SEQ ID NO: 220485 - DNA, 20 bp, synthetic construct
  source 1..20: mol_type = other DNA
cttttgtgtcccctcctctc

SEQ ID NO: 220486 - DNA, 20 bp, synthetic construct
  source 1..20: mol_type = other DNA
ccttttgtgtcccctcctct

SEQ ID NO: 220487 - DNA, 20 bp, synthetic construct
  source 1..20: mol_type = other DNA
tccttttgtgtcccctcctc

SEQ ID NO: 220488 - DNA, 20 bp, synthetic construct
  source 1..20: mol_type = other DNA
ctccttttgtgtcccctcct

SEQ ID NO: 220489 - DNA, 20 bp, synthetic construct
  source 1..20: mol_type = other DNA
tctccttttgtgtcccctcc

SEQ ID NO: 220490 - DNA, 20 bp, synthetic construct
  source 1..20: mol_type = other DNA
gtctccttttgtgtcccctc

SEQ ID NO: 220491 - DNA, 20 bp, synthetic construct
  source 1..20: mol_type = other DNA
tgtctccttttgtgtcccct

SEQ ID NO: 220492 - DNA, 20 bp, synthetic construct
  source 1..20: mol_type = other DNA
gtgtctccttttgtgtcccc

SEQ ID NO: 220493 - DNA, 20 bp, synthetic construct
  source 1..20: mol_type = other DNA
tgtgtctccttttgtgtccc

SEQ ID NO: 220494 - DNA, 20 bp, synthetic construct
  source 1..20: mol_type = other DNA
ctgtgtctccttttgtgtcc

SEQ ID NO: 220495 - DNA, 20 bp, synthetic construct
  source 1..20: mol_type = other DNA
gctgtgtctccttttgtgtc

SEQ ID NO: 220496 - DNA, 20 bp, synthetic construct
  source 1..20: mol_type = other DNA
agctgtgtctccttttgtgt

SEQ ID NO: 220497 - DNA, 20 bp, synthetic construct
  source 1..20: mol_type = other DNA
gagctgtgtctccttttgtg

SEQ ID NO: 220498 - DNA, 20 bp, synthetic construct
  source 1..20: mol_type = other DNA
ggagctgtgtctccttttgt

SEQ ID NO: 220499 - DNA, 20 bp, synthetic construct
  source 1..20: mol_type = other DNA
aggagctgtgtctccttttg

SEQ ID NO: 220500 - DNA, 20 bp, synthetic construct
  source 1..20: mol_type = other DNA
aaggagctgtgtctcctttt

SEQ ID NO: 220501 - DNA, 20 bp, synthetic construct
  source 1..20: mol_type = other DNA
gaaggagctgtgtctccttt

SEQ ID NO: 220502 - DNA, 20 bp, synthetic construct
  source 1..20: mol_type = other DNA
agaaggagctgtgtctcctt

SEQ ID NO: 220503 - DNA, 20 bp, synthetic construct
  source 1..20: mol_type = other DNA
aagaaggagctgtgtctcct

SEQ ID NO: 220504 - DNA, 20 bp, synthetic construct
  source 1..20: mol_type = other DNA
taagaaggagctgtgtctcc

SEQ ID NO: 220505 - DNA, 20 bp, synthetic construct
  source 1..20: mol_type = other DNA
ctaagaaggagctgtgtctc

SEQ ID NO: 220506 - DNA, 20 bp, synthetic construct
  source 1..20: mol_type = other DNA
tctaagaaggagctgtgtct

SEQ ID NO: 220507 - DNA, 20 bp, synthetic construct
  source 1..20: mol_type = other DNA
ttctaagaaggagctgtgtc

SEQ ID NO: 220508 - DNA, 20 bp, synthetic construct
  source 1..20: mol_type = other DNA
cttctaagaaggagctgtgt

SEQ ID NO: 220509 - DNA, 20 bp, synthetic construct
  source 1..20: mol_type = other DNA
gcttctaagaaggagctgtg

SEQ ID NO: 220510 - DNA, 20 bp, synthetic construct
  source 1..20: mol_type = other DNA
agcttctaagaaggagctgt

SEQ ID NO: 220511 - DNA, 20 bp, synthetic construct
  source 1..20: mol_type = other DNA
gagcttctaagaaggagctg

SEQ ID NO: 220512 - DNA, 20 bp, synthetic construct
  source 1..20: mol_type = other DNA
tgagcttctaagaaggagct

SEQ ID NO: 220513 - DNA, 20 bp, synthetic construct
  source 1..20: mol_type = other DNA
ttgagcttctaagaaggagc

SEQ ID NO: 220514 - DNA, 20 bp, synthetic construct
  source 1..20: mol_type = other DNA
tttgagcttctaagaaggag

SEQ ID NO: 220515 - DNA, 20 bp, synthetic construct
  source 1..20: mol_type = other DNA
ctttgagcttctaagaagga

SEQ ID NO: 220516 - DNA, 20 bp, synthetic construct
  source 1..20: mol_type = other DNA
actttgagcttctaagaagg

SEQ ID NO: 220517 - DNA, 20 bp, synthetic construct
  source 1..20: mol_type = other DNA
aactttgagcttctaagaag

SEQ ID NO: 220518 - DNA, 20 bp, synthetic construct
  source 1..20: mol_type = other DNA
caactttgagcttctaagaa

SEQ ID NO: 220519 - DNA, 20 bp, synthetic construct
  source 1..20: mol_type = other DNA
ccaactttgagcttctaaga

SEQ ID NO: 220520 - DNA, 20 bp, synthetic construct
  source 1..20: mol_type = other DNA
cccaactttgagcttctaag

SEQ ID NO: 220521 - DNA, 20 bp, synthetic construct
  source 1..20: mol_type = other DNA
ccccaactttgagcttctaa

SEQ ID NO: 220522 - DNA, 20 bp, synthetic construct
  source 1..20: mol_type = other DNA
tccccaactttgagcttcta

SEQ ID NO: 220523 - DNA, 20 bp, synthetic construct
  source 1..20: mol_type = other DNA
gtccccaactttgagcttct

SEQ ID NO: 220524 - DNA, 20 bp, synthetic construct
  source 1..20: mol_type = other DNA
ggtccccaactttgagcttc

SEQ ID NO: 220525 - DNA, 20 bp, synthetic construct
  source 1..20: mol_type = other DNA
tggtccccaactttgagctt

SEQ ID NO: 220526 - DNA, 20 bp, synthetic construct
  source 1..20: mol_type = other DNA
ctggtccccaactttgagct

SEQ ID NO: 220527 - DNA, 20 bp, synthetic construct
  source 1..20: mol_type = other DNA
gctggtccccaactttgagc

SEQ ID NO: 220528 - DNA, 20 bp, synthetic construct
  source 1..20: mol_type = other DNA
agctggtccccaactttgag

SEQ ID NO: 220529 - DNA, 20 bp, synthetic construct
  source 1..20: mol_type = other DNA
cagctggtccccaactttga

SEQ ID NO: 220530 - DNA, 20 bp, synthetic construct
  source 1..20: mol_type = other DNA
gcagctggtccccaactttg

SEQ ID NO: 220531 - DNA, 20 bp, synthetic construct
  source 1..20: mol_type = other DNA
ggcagctggtccccaacttt

SEQ ID NO: 220532 - DNA, 20 bp, synthetic construct
  source 1..20: mol_type = other DNA
tggcagctggtccccaactt

SEQ ID NO: 220533 - DNA, 20 bp, synthetic construct
  source 1..20: mol_type = other DNA
gtggcagctggtccccaact

SEQ ID NO: 220534 - DNA, 20 bp, synthetic construct
  source 1..20: mol_type = other DNA
tgtggcagctggtccccaac

SEQ ID NO: 220535 - DNA, 20 bp, synthetic construct
  source 1..20: mol_type = other DNA
ctgtggcagctggtccccaa

SEQ ID NO: 220536 - DNA, 20 bp, synthetic construct
  source 1..20: mol_type = other DNA
tctgtggcagctggtcccca

SEQ ID NO: 220537 - DNA, 20 bp, synthetic construct
  source 1..20: mol_type = other DNA
ttctgtggcagctggtcccc

SEQ ID NO: 220538 - DNA, 20 bp, synthetic construct
  source 1..20: mol_type = other DNA
cttctgtggcagctggtccc

SEQ ID NO: 220539 - DNA, 20 bp, synthetic construct
  source 1..20: mol_type = other DNA
tcttctgtggcagctggtcc

SEQ ID NO: 220540 - DNA, 20 bp, synthetic construct
  source 1..20: mol_type = other DNA
ctcttctgtggcagctggtc

SEQ ID NO: 220541 - DNA, 20 bp, synthetic construct
  source 1..20: mol_type = other DNA
actcttctgtggcagctggt

SEQ ID NO: 220542 - DNA, 20 bp, synthetic construct
  source 1..20: mol_type = other DNA
tactcttctgtggcagctgg

SEQ ID NO: 220543 - DNA, 20 bp, synthetic construct
  source 1..20: mol_type = other DNA
atactcttctgtggcagctg

SEQ ID NO: 220544 - DNA, 20 bp, synthetic construct
  source 1..20: mol_type = other DNA
catactcttctgtggcagct

SEQ ID NO: 220545 - DNA, 20 bp, synthetic construct
  source 1..20: mol_type = other DNA
acatactcttctgtggcagc

SEQ ID NO: 220546 - DNA, 20 bp, synthetic construct
  source 1..20: mol_type = other DNA
aacatactcttctgtggcag

SEQ ID NO: 220547 - DNA, 20 bp, synthetic construct
  source 1..20: mol_type = other DNA
aaacatactcttctgtggca

SEQ ID NO: 220548 - DNA, 20 bp, synthetic construct
  source 1..20: mol_type = other DNA
taaacatactcttctgtggc

SEQ ID NO: 220549 - DNA, 20 bp, synthetic construct
  source 1..20: mol_type = other DNA
ctaaacatactcttctgtgg

SEQ ID NO: 220550 - DNA, 20 bp, synthetic construct
  source 1..20: mol_type = other DNA
gctaaacatactcttctgtg

SEQ ID NO: 220551 - DNA, 20 bp, synthetic construct
  source 1..20: mol_type = other DNA
tgctaaacatactcttctgt

SEQ ID NO: 220552 - DNA, 20 bp, synthetic construct
  source 1..20: mol_type = other DNA
atgctaaacatactcttctg

SEQ ID NO: 220553 - DNA, 20 bp, synthetic construct
  source 1..20: mol_type = other DNA
gatgctaaacatactcttct

SEQ ID NO: 220554 - DNA, 20 bp, synthetic construct
  source 1..20: mol_type = other DNA
agatgctaaacatactcttc

SEQ ID NO: 220555 - DNA, 20 bp, synthetic construct
  source 1..20: mol_type = other DNA
cagatgctaaacatactctt

SEQ ID NO: 220556 - DNA, 20 bp, synthetic construct
  source 1..20: mol_type = other DNA
tcagatgctaaacatactct

SEQ ID NO: 220557 - DNA, 20 bp, synthetic construct
  source 1..20: mol_type = other DNA
ctcagatgctaaacatactc

SEQ ID NO: 220558 - DNA, 20 bp, synthetic construct
  source 1..20: mol_type = other DNA
tctcagatgctaaacatact

SEQ ID NO: 220559 - DNA, 20 bp, synthetic construct
  source 1..20: mol_type = other DNA
gtctcagatgctaaacatac

SEQ ID NO: 220560 - DNA, 20 bp, synthetic construct
  source 1..20: mol_type = other DNA
tgtctcagatgctaaacata

SEQ ID NO: 220561 - DNA, 20 bp, synthetic construct
  source 1..20: mol_type = other DNA
gtgtctcagatgctaaacat

SEQ ID NO: 220562 - DNA, 20 bp, synthetic construct
  source 1..20: mol_type = other DNA
ggtgtctcagatgctaaaca

SEQ ID NO: 220563 - DNA, 20 bp, synthetic construct
  source 1..20: mol_type = other DNA
tggtgtctcagatgctaaac

SEQ ID NO: 220564 - DNA, 20 bp, synthetic construct
  source 1..20: mol_type = other DNA
ttggtgtctcagatgctaaa

SEQ ID NO: 220565 - DNA, 20 bp, synthetic construct
  source 1..20: mol_type = other DNA
cttggtgtctcagatgctaa

SEQ ID NO: 220566 - DNA, 20 bp, synthetic construct
  source 1..20: mol_type = other DNA
tcttggtgtctcagatgcta

SEQ ID NO: 220567 - DNA, 20 bp, synthetic construct
  source 1..20: mol_type = other DNA
atcttggtgtctcagatgct

SEQ ID NO: 220568 - DNA, 20 bp, synthetic construct
  source 1..20: mol_type = other DNA
gatcttggtgtctcagatgc

SEQ ID NO: 220569 - DNA, 20 bp, synthetic construct
  source 1..20: mol_type = other DNA
ggatcttggtgtctcagatg

SEQ ID NO: 220570 - DNA, 20 bp, synthetic construct
  source 1..20: mol_type = other DNA
tggatcttggtgtctcagat

SEQ ID NO: 220571 - DNA, 20 bp, synthetic construct
  source 1..20: mol_type = other DNA
ctggatcttggtgtctcaga

SEQ ID NO: 220572 - DNA, 20 bp, synthetic construct
  source 1..20: mol_type = other DNA
gctggatcttggtgtctcag

SEQ ID NO: 220573 - DNA, 20 bp, synthetic construct
  source 1..20: mol_type = other DNA
cgctggatcttggtgtctca

SEQ ID NO: 220574 - DNA, 20 bp, synthetic construct
  source 1..20: mol_type = other DNA
acgctggatcttggtgtctc

SEQ ID NO: 220575 - DNA, 20 bp, synthetic construct
  source 1..20: mol_type = other DNA
gacgctggatcttggtgtct

SEQ ID NO: 220576 - DNA, 20 bp, synthetic construct
  source 1..20: mol_type = other DNA
tgacgctggatcttggtgtc

SEQ ID NO: 220577 - DNA, 20 bp, synthetic construct
  source 1..20: mol_type = other DNA
gtgacgctggatcttggtgt

SEQ ID NO: 220578 - DNA, 20 bp, synthetic construct
  source 1..20: mol_type = other DNA
tgtgacgctggatcttggtg

SEQ ID NO: 220579 - DNA, 20 bp, synthetic construct
  source 1..20: mol_type = other DNA
ttgtgacgctggatcttggt

SEQ ID NO: 220580 - DNA, 20 bp, synthetic construct
  source 1..20: mol_type = other DNA
cttgtgacgctggatcttgg

SEQ ID NO: 220581 - DNA, 20 bp, synthetic construct
  source 1..20: mol_type = other DNA
ccttgtgacgctggatcttg

SEQ ID NO: 220582 - DNA, 20 bp, synthetic construct
  source 1..20: mol_type = other DNA
cccttgtgacgctggatctt

SEQ ID NO: 220583 - DNA, 20 bp, synthetic construct
  source 1..20: mol_type = other DNA
acccttgtgacgctggatct

SEQ ID NO: 220584 - DNA, 20 bp, synthetic construct
  source 1..20: mol_type = other DNA
cacccttgtgacgctggatc

SEQ ID NO: 220585 - DNA, 20 bp, synthetic construct
  source 1..20: mol_type = other DNA
acacccttgtgacgctggat

SEQ ID NO: 220586 - DNA, 20 bp, synthetic construct
  source 1..20: mol_type = other DNA
aacacccttgtgacgctgga

SEQ ID NO: 220587 - DNA, 20 bp, synthetic construct
  source 1..20: mol_type = other DNA
aaacacccttgtgacgctgg

SEQ ID NO: 220588 - DNA, 20 bp, synthetic construct
  source 1..20: mol_type = other DNA
taaacacccttgtgacgctg

SEQ ID NO: 220589 - DNA, 20 bp, synthetic construct
  source 1..20: mol_type = other DNA
ataaacacccttgtgacgct

SEQ ID NO: 220590 - DNA, 20 bp, synthetic construct
  source 1..20: mol_type = other DNA
aataaacacccttgtgacgc

SEQ ID NO: 220591 - DNA, 20 bp, synthetic construct
  source 1..20: mol_type = other DNA
taataaacacccttgtgacg

SEQ ID NO: 220592 - DNA, 20 bp, synthetic construct
  source 1..20: mol_type = other DNA
ttaataaacacccttgtgac

SEQ ID NO: 220593 - DNA, 20 bp, synthetic construct
  source 1..20: mol_type = other DNA
cttaataaacacccttgtga

SEQ ID NO: 220594 - DNA, 20 bp, synthetic construct
  source 1..20: mol_type = other DNA
gcttaataaacacccttgtg

SEQ ID NO: 220595 - DNA, 20 bp, synthetic construct
  source 1..20: mol_type = other DNA
ggcttaataaacacccttgt

SEQ ID NO: 220596 - DNA, 20 bp, synthetic construct
  source 1..20: mol_type = other DNA
aggcttaataaacacccttg

SEQ ID NO: 220597 - DNA, 20 bp, synthetic construct
  source 1..20: mol_type = other DNA
gaggcttaataaacaccctt

SEQ ID NO: 220598 - DNA, 20 bp, synthetic construct
  source 1..20: mol_type = other DNA
ggaggcttaataaacaccct

SEQ ID NO: 220599 - DNA, 20 bp, synthetic construct
  source 1..20: mol_type = other DNA
aggaggcttaataaacaccc

SEQ ID NO: 220600 - DNA, 20 bp, synthetic construct
  source 1..20: mol_type = other DNA
gaggaggcttaataaacacc

SEQ ID NO: 220601 - DNA, 20 bp, synthetic construct
  source 1..20: mol_type = other DNA
tgaggaggcttaataaacac

SEQ ID NO: 220602 - DNA, 20 bp, synthetic construct
  source 1..20: mol_type = other DNA
atgaggaggcttaataaaca

SEQ ID NO: 220603 - DNA, 20 bp, synthetic construct
  source 1..20: mol_type = other DNA
gatgaggaggcttaataaac

SEQ ID NO: 220604 - DNA, 20 bp, synthetic construct
  source 1..20: mol_type = other DNA
agatgaggaggcttaataaa

SEQ ID NO: 220605 - DNA, 20 bp, synthetic construct
  source 1..20: mol_type = other DNA
gagatgaggaggcttaataa

SEQ ID NO: 220606 - DNA, 20 bp, synthetic construct
  source 1..20: mol_type = other DNA
agagatgaggaggcttaata

SEQ ID NO: 220607 - DNA, 20 bp, synthetic construct
  source 1..20: mol_type = other DNA
aagagatgaggaggcttaat

SEQ ID NO: 220608 - DNA, 20 bp, synthetic construct
  source 1..20: mol_type = other DNA
aaagagatgaggaggcttaa

SEQ ID NO: 220609 - DNA, 20 bp, synthetic construct
  source 1..20: mol_type = other DNA
gaaagagatgaggaggctta

SEQ ID NO: 220610 - DNA, 20 bp, synthetic construct
  source 1..20: mol_type = other DNA
agaaagagatgaggaggctt

SEQ ID NO: 220611 - DNA, 20 bp, synthetic construct
  source 1..20: mol_type = other DNA
aagaaagagatgaggaggct

SEQ ID NO: 220612 - DNA, 20 bp, synthetic construct
  source 1..20: mol_type = other DNA
aaagaaagagatgaggaggc

SEQ ID NO: 220613 - DNA, 20 bp, synthetic construct
  source 1..20: mol_type = other DNA
aaaagaaagagatgaggagg

SEQ ID NO: 220614 - DNA, 20 bp, synthetic construct
  source 1..20: mol_type = other DNA
aaaaagaaagagatgaggag

SEQ ID NO: 220615 - DNA, 20 bp, synthetic construct
  source 1..20: mol_type = other DNA
gaaaaagaaagagatgagga

SEQ ID NO: 220616 - DNA, 20 bp, synthetic construct
  source 1..20: mol_type = other DNA
agaaaaagaaagagatgagg

SEQ ID NO: 220617 - DNA, 20 bp, synthetic construct
  source 1..20: mol_type = other DNA
aagaaaaagaaagagatgag

SEQ ID NO: 220618 - DNA, 20 bp, synthetic construct
  source 1..20: mol_type = other DNA
aaagaaaaagaaagagatga

SEQ ID NO: 220619 - DNA, 20 bp, synthetic construct
  source 1..20: mol_type = other DNA
aaaagaaaaagaaagagatg

SEQ ID NO: 220620 - DNA, 20 bp, synthetic construct
  source 1..20: mol_type = other DNA
aaaaagaaaaagaaagagat

SEQ ID NO: 220621 - DNA, 20 bp, synthetic construct
  source 1..20: mol_type = other DNA
aaaaaagaaaaagaaagaga

SEQ ID NO: 220622 - DNA, 20 bp, synthetic construct
  source 1..20: mol_type = other DNA
aaaaaaagaaaaagaaagag

SEQ ID NO: 220623 - DNA, 20 bp, synthetic construct
  source 1..20: mol_type = other DNA
aaaaaaaagaaaaagaaaga

SEQ ID NO: 220624 - DNA, 20 bp, synthetic construct
  source 1..20: mol_type = other DNA
aaaaaaaaagaaaaagaaag

SEQ ID NO: 220625 - DNA, 20 bp, synthetic construct
  source 1..20: mol_type = other DNA
aaaaaaaaaagaaaaagaaa

SEQ ID NO: 220626 - DNA, 20 bp, synthetic construct
  source 1..20: mol_type = other DNA
aaaaaaaaaaagaaaaagaa

SEQ ID NO: 220627 - DNA, 20 bp, synthetic construct
  source 1..20: mol_type = other DNA
aaaaaaaaaaaagaaaaaga

SEQ ID NO: 220628 - DNA, 20 bp, synthetic construct
  source 1..20: mol_type = other DNA
aaaaaaaaaaaaagaaaaag

SEQ ID NO: 220629 - DNA, 20 bp, synthetic construct
  source 1..20: mol_type = other DNA
aaaaaaaaaaaaaagaaaaa

SEQ ID NO: 220630 - DNA, 20 bp, synthetic construct
  source 1..20: mol_type = other DNA
aaaaaaaaaaaaaaagaaaa

SEQ ID NO: 220631 - DNA, 20 bp, synthetic construct
  source 1..20: mol_type = other DNA
aaaaaaaaaaaaaaaagaaa

SEQ ID NO: 220632 - DNA, 20 bp, synthetic construct
  source 1..20: mol_type = other DNA
aaaaaaaaaaaaaaaaagaa

SEQ ID NO: 220633 - DNA, 20 bp, synthetic construct
  source 1..20: mol_type = other DNA
gaaaaaaaaaaaaaaaaaga

SEQ ID NO: 220634 - DNA, 20 bp, synthetic construct
  source 1..20: mol_type = other DNA
ggaaaaaaaaaaaaaaaaag

SEQ ID NO: 220635 - DNA, 20 bp, synthetic construct
  source 1..20: mol_type = other DNA
aggaaaaaaaaaaaaaaaaa

SEQ ID NO: 220636 - DNA, 20 bp, synthetic construct
  source 1..20: mol_type = other DNA
gaggaaaaaaaaaaaaaaaa

SEQ ID NO: 220637 - DNA, 20 bp, synthetic construct
  source 1..20: mol_type = other DNA
tgaggaaaaaaaaaaaaaaa

SEQ ID NO: 220638 - DNA, 20 bp, synthetic construct
  source 1..20: mol_type = other DNA
ctgaggaaaaaaaaaaaaaa

SEQ ID NO: 220639 - DNA, 20 bp, synthetic construct
  source 1..20: mol_type = other DNA
cctgaggaaaaaaaaaaaaa

SEQ ID NO: 220640 - DNA, 20 bp, synthetic construct
  source 1..20: mol_type = other DNA
gcctgaggaaaaaaaaaaaa

SEQ ID NO: 220641 - DNA, 20 bp, synthetic construct
  source 1..20: mol_type = other DNA
tgcctgaggaaaaaaaaaaa

SEQ ID NO: 220642 - DNA, 20 bp, synthetic construct
  source 1..20: mol_type = other DNA
ctgcctgaggaaaaaaaaaa

SEQ ID NO: 220643 - DNA, 20 bp, synthetic construct
  source 1..20: mol_type = other DNA
actgcctgaggaaaaaaaaa

SEQ ID NO: 220644 - DNA, 20 bp, synthetic construct
  source 1..20: mol_type = other DNA
gactgcctgaggaaaaaaaa

SEQ ID NO: 220645 - DNA, 20 bp, synthetic construct
  source 1..20: mol_type = other DNA
agactgcctgaggaaaaaaa

SEQ ID NO: 220646 - DNA, 20 bp, synthetic construct
  source 1..20: mol_type = other DNA
aagactgcctgaggaaaaaa

SEQ ID NO: 220647 - DNA, 20 bp, synthetic construct
  source 1..20: mol_type = other DNA
taagactgcctgaggaaaaa

SEQ ID NO: 220648 - DNA, 20 bp, synthetic construct
  source 1..20: mol_type = other DNA
gtaagactgcctgaggaaaa

SEQ ID NO: 220649 - DNA, 20 bp, synthetic construct
  source 1..20: mol_type = other DNA
agtaagactgcctgaggaaa

SEQ ID NO: 220650 - DNA, 20 bp, synthetic construct
  source 1..20: mol_type = other DNA
gagtaagactgcctgaggaa

SEQ ID NO: 220651 - DNA, 20 bp, synthetic construct
  source 1..20: mol_type = other DNA
agagtaagactgcctgagga

SEQ ID NO: 220652 - DNA, 20 bp, synthetic construct
  source 1..20: mol_type = other DNA
cagagtaagactgcctgagg

SEQ ID NO: 220653 - DNA, 20 bp, synthetic construct
  source 1..20: mol_type = other DNA
acagagtaagactgcctgag

SEQ ID NO: 220654 - DNA, 20 bp, synthetic construct
  source 1..20: mol_type = other DNA
gacagagtaagactgcctga

SEQ ID NO: 220655 - DNA, 20 bp, synthetic construct
  source 1..20: mol_type = other DNA
tgacagagtaagactgcctg

SEQ ID NO: 220656 - DNA, 20 bp, synthetic construct
  source 1..20: mol_type = other DNA
gtgacagagtaagactgcct

SEQ ID NO: 220657 - DNA, 20 bp, synthetic construct
  source 1..20: mol_type = other DNA
ggtgacagagtaagactgcc

SEQ ID NO: 220658 - DNA, 20 bp, synthetic construct
  source 1..20: mol_type = other DNA
gggtgacagagtaagactgc

SEQ ID NO: 220659 - DNA, 20 bp, synthetic construct
  source 1..20: mol_type = other DNA
tgggtgacagagtaagactg

SEQ ID NO: 220660 - DNA, 20 bp, synthetic construct
  source 1..20: mol_type = other DNA
ctgggtgacagagtaagact

SEQ ID NO: 220661 - DNA, 20 bp, synthetic construct
  source 1..20: mol_type = other DNA
cctgggtgacagagtaagac

SEQ ID NO: 220662 - DNA, 20 bp, synthetic construct
  source 1..20: mol_type = other DNA
gcctgggtgacagagtaaga

SEQ ID NO: 220663 - DNA, 20 bp, synthetic construct
  source 1..20: mol_type = other DNA
agcctgggtgacagagtaag

SEQ ID NO: 220664 - DNA, 20 bp, synthetic construct
  source 1..20: mol_type = other DNA
cagcctgggtgacagagtaa

SEQ ID NO: 220665 - DNA, 20 bp, synthetic construct
  source 1..20: mol_type = other DNA
ccagcctgggtgacagagta

SEQ ID NO: 220666 - DNA, 20 bp, synthetic construct
  source 1..20: mol_type = other DNA
tccagcctgggtgacagagt

SEQ ID NO: 220667 - DNA, 20 bp, synthetic construct
  source 1..20: mol_type = other DNA
ctccagcctgggtgacagag

SEQ ID NO: 220668 - DNA, 20 bp, synthetic construct
  source 1..20: mol_type = other DNA
actccagcctgggtgacaga

SEQ ID NO: 220669 - DNA, 20 bp, synthetic construct
  source 1..20: mol_type = other DNA
cactccagcctgggtgacag

SEQ ID NO: 220670 - DNA, 20 bp, synthetic construct
  source 1..20: mol_type = other DNA
gcactccagcctgggtgaca

SEQ ID NO: 220671 - DNA, 20 bp, synthetic construct
  source 1..20: mol_type = other DNA
tgcactccagcctgggtgac

SEQ ID NO: 220672 - DNA, 20 bp, synthetic construct
  source 1..20: mol_type = other DNA
ctgcactccagcctgggtga

SEQ ID NO: 220673 - DNA, 20 bp, synthetic construct
  source 1..20: mol_type = other DNA
actgcactccagcctgggtg

SEQ ID NO: 220674 - DNA, 20 bp, synthetic construct
  source 1..20: mol_type = other DNA
cactgcactccagcctgggt

SEQ ID NO: 220675 - DNA, 20 bp, synthetic construct
  source 1..20: mol_type = other DNA
ccactgcactccagcctggg

SEQ ID NO: 220676 - DNA, 20 bp, synthetic construct
  source 1..20: mol_type = other DNA
gccactgcactccagcctgg

SEQ ID NO: 220677 - DNA, 20 bp, synthetic construct
  source 1..20: mol_type = other DNA
tgccactgcactccagcctg

SEQ ID NO: 220678 - DNA, 20 bp, synthetic construct
  source 1..20: mol_type = other DNA
atgccactgcactccagcct

SEQ ID NO: 220679 - DNA, 20 bp, synthetic construct
  source 1..20: mol_type = other DNA
catgccactgcactccagcc

SEQ ID NO: 220680 - DNA, 20 bp, synthetic construct
  source 1..20: mol_type = other DNA
tcatgccactgcactccagc

SEQ ID NO: 220681 - DNA, 20 bp, synthetic construct
  source 1..20: mol_type = other DNA
atcatgccactgcactccag

SEQ ID NO: 220682 - DNA, 20 bp, synthetic construct
  source 1..20: mol_type = other DNA
gatcatgccactgcactcca

SEQ ID NO: 220683 - DNA, 20 bp, synthetic construct
  source 1..20: mol_type = other DNA
agatcatgccactgcactcc

SEQ ID NO: 220684 - DNA, 20 bp, synthetic construct
  source 1..20: mol_type = other DNA
gagatcatgccactgcactc

SEQ ID NO: 220685 - DNA, 20 bp, synthetic construct
  source 1..20: mol_type = other DNA
cgagatcatgccactgcact

SEQ ID NO: 220686 - DNA, 20 bp, synthetic construct
  source 1..20: mol_type = other DNA
ccgagatcatgccactgcac

SEQ ID NO: 220687 - DNA, 20 bp, synthetic construct
  source 1..20: mol_type = other DNA
gccgagatcatgccactgca

SEQ ID NO: 220688 - DNA, 20 bp, synthetic construct
  source 1..20: mol_type = other DNA
agccgagatcatgccactgc

SEQ ID NO: 220689 - DNA, 20 bp, synthetic construct
  source 1..20: mol_type = other DNA
gagccgagatcatgccactg

SEQ ID NO: 220690 - DNA, 20 bp, synthetic construct
  source 1..20: mol_type = other DNA
tgagccgagatcatgccact

SEQ ID NO: 220691 - DNA, 20 bp, synthetic construct
  source 1..20: mol_type = other DNA
gtgagccgagatcatgccac

SEQ ID NO: 220692 - DNA, 20 bp, synthetic construct
  source 1..20: mol_type = other DNA
agtgagccgagatcatgcca

SEQ ID NO: 220693 - DNA, 20 bp, synthetic construct
  source 1..20: mol_type = other DNA
cagtgagccgagatcatgcc

SEQ ID NO: 220694 - DNA, 20 bp, synthetic construct
  source 1..20: mol_type = other DNA
gcagtgagccgagatcatgc

SEQ ID NO: 220695 - DNA, 20 bp, synthetic construct
  source 1..20: mol_type = other DNA
tgcagtgagccgagatcatg

SEQ ID NO: 220696 - DNA, 20 bp, synthetic construct
  source 1..20: mol_type = other DNA
atgcagtgagccgagatcat

SEQ ID NO: 220697 - DNA, 20 bp, synthetic construct
  source 1..20: mol_type = other DNA
catgcagtgagccgagatca

SEQ ID NO: 220698 - DNA, 20 bp, synthetic construct
  source 1..20: mol_type = other DNA
gcatgcagtgagccgagatc

SEQ ID NO: 220699 - DNA, 20 bp, synthetic construct
  source 1..20: mol_type = other DNA
tgcatgcagtgagccgagat

SEQ ID NO: 220700 - DNA, 20 bp, synthetic construct
  source 1..20: mol_type = other DNA
ttgcatgcagtgagccgaga

SEQ ID NO: 220701 - DNA, 20 bp, synthetic construct
  source 1..20: mol_type = other DNA
gttgcatgcagtgagccgag

SEQ ID NO: 220702 - DNA, 20 bp, synthetic construct
  source 1..20: mol_type = other DNA
ggttgcatgcagtgagccga

SEQ ID NO: 220703 - DNA, 20 bp, synthetic construct
  source 1..20: mol_type = other DNA
tggttgcatgcagtgagccg

SEQ ID NO: 220704 - DNA, 20 bp, synthetic construct
  source 1..20: mol_type = other DNA
gtggttgcatgcagtgagcc

SEQ ID NO: 220705 - DNA, 20 bp, synthetic construct
  source 1..20: mol_type = other DNA
ggtggttgcatgcagtgagc

SEQ ID NO: 220706 - DNA, 20 bp, synthetic construct
  source 1..20: mol_type = other DNA
tggtggttgcatgcagtgag

SEQ ID NO: 220707 - DNA, 20 bp, synthetic construct
  source 1..20: mol_type = other DNA
gtggtggttgcatgcagtga

SEQ ID NO: 220708 - DNA, 20 bp, synthetic construct
  source 1..20: mol_type = other DNA
ggtggtggttgcatgcagtg

SEQ ID NO: 220709 - DNA, 20 bp, synthetic construct
  source 1..20: mol_type = other DNA
aggtggtggttgcatgcagt

SEQ ID NO: 220710 - DNA, 20 bp, synthetic construct
  source 1..20: mol_type = other DNA
gaggtggtggttgcatgcag

SEQ ID NO: 220711 - DNA, 20 bp, synthetic construct
  source 1..20: mol_type = other DNA
ggaggtggtggttgcatgca

SEQ ID NO: 220712 - DNA, 20 bp, synthetic construct
  source 1..20: mol_type = other DNA
gggaggtggtggttgcatgc

SEQ ID NO: 220713 - DNA, 20 bp, synthetic construct
  source 1..20: mol_type = other DNA
cgggaggtggtggttgcatg

SEQ ID NO: 220714 - DNA, 20 bp, synthetic construct
  source 1..20: mol_type = other DNA
ccgggaggtggtggttgcat

SEQ ID NO: 220715 - DNA, 20 bp, synthetic construct
  source 1..20: mol_type = other DNA
cccgggaggtggtggttgca

SEQ ID NO: 220716 - DNA, 20 bp, synthetic construct
  source 1..20: mol_type = other DNA
acccgggaggtggtggttgc

SEQ ID NO: 220717 - DNA, 20 bp, synthetic construct
  source 1..20: mol_type = other DNA
aacccgggaggtggtggttg

SEQ ID NO: 220718 - DNA, 20 bp, synthetic construct
  source 1..20: mol_type = other DNA
aaacccgggaggtggtggtt

SEQ ID NO: 220719 - DNA, 20 bp, synthetic construct
  source 1..20: mol_type = other DNA
taaacccgggaggtggtggt

SEQ ID NO: 220720 - DNA, 20 bp, synthetic construct
  source 1..20: mol_type = other DNA
ttaaacccgggaggtggtgg

SEQ ID NO: 220721 - DNA, 20 bp, synthetic construct
  source 1..20: mol_type = other DNA
cttaaacccgggaggtggtg

SEQ ID NO: 220722 - DNA, 20 bp, synthetic construct
  source 1..20: mol_type = other DNA
gcttaaacccgggaggtggt

SEQ ID NO: 220723 - DNA, 20 bp, synthetic construct
  source 1..20: mol_type = other DNA
tgcttaaacccgggaggtgg

SEQ ID NO: 220724 - DNA, 20 bp, synthetic construct
  source 1..20: mol_type = other DNA
ttgcttaaacccgggaggtg

SEQ ID NO: 220725 - DNA, 20 bp, synthetic construct
  source 1..20: mol_type = other DNA
attgcttaaacccgggaggt

SEQ ID NO: 220726 - DNA, 20 bp, synthetic construct
  source 1..20: mol_type = other DNA
aattgcttaaacccgggagg

SEQ ID NO: 220727 - DNA, 20 bp, synthetic construct
  source 1..20: mol_type = other DNA
gaattgcttaaacccgggag

SEQ ID NO: 220728 - DNA, 20 bp, synthetic construct
  source 1..20: mol_type = other DNA
agaattgcttaaacccggga

SEQ ID NO: 220729 - DNA, 20 bp, synthetic construct
  source 1..20: mol_type = other DNA
gagaattgcttaaacccggg

SEQ ID NO: 220730 - DNA, 20 bp, synthetic construct
  source 1..20: mol_type = other DNA
ggagaattgcttaaacccgg

SEQ ID NO: 220731 - DNA, 20 bp, synthetic construct
  source 1..20: mol_type = other DNA
aggagaattgcttaaacccg

SEQ ID NO: 220732 - DNA, 20 bp, synthetic construct
  source 1..20: mol_type = other DNA
caggagaattgcttaaaccc

SEQ ID NO: 220733 - DNA, 20 bp, synthetic construct
  source 1..20: mol_type = other DNA
gcaggagaattgcttaaacc

SEQ ID NO: 220734 - DNA, 20 bp, synthetic construct
  source 1..20: mol_type = other DNA
ggcaggagaattgcttaaac

SEQ ID NO: 220735 - DNA, 20 bp, synthetic construct
  source 1..20: mol_type = other DNA
aggcaggagaattgcttaaa

SEQ ID NO: 220736 - DNA, 20 bp, synthetic construct
  source 1..20: mol_type = other DNA
gaggcaggagaattgcttaa

SEQ ID NO: 220737 - DNA, 20 bp, synthetic construct
  source 1..20: mol_type = other DNA
tgaggcaggagaattgctta

SEQ ID NO: 220738 - DNA, 20 bp, synthetic construct
  source 1..20: mol_type = other DNA
ctgaggcaggagaattgctt

SEQ ID NO: 220739 - DNA, 20 bp, synthetic construct
  source 1..20: mol_type = other DNA
gctgaggcaggagaattgct

SEQ ID NO: 220740 - DNA, 20 bp, synthetic construct
  source 1..20: mol_type = other DNA
ggctgaggcaggagaattgc

SEQ ID NO: 220741 - DNA, 20 bp, synthetic construct
  source 1..20: mol_type = other DNA
aggctgaggcaggagaattg

SEQ ID NO: 220742 - DNA, 20 bp, synthetic construct
  source 1..20: mol_type = other DNA
gaggctgaggcaggagaatt

SEQ ID NO: 220743 - DNA, 20 bp, synthetic construct
  source 1..20: mol_type = other DNA
ggaggctgaggcaggagaat

SEQ ID NO: 220744 - DNA, 20 bp, synthetic construct
  source 1..20: mol_type = other DNA
gggaggctgaggcaggagaa

SEQ ID NO: 220745 - DNA, 20 bp, synthetic construct
  source 1..20: mol_type = other DNA
ggggaggctgaggcaggaga

SEQ ID NO: 220746 - DNA, 20 bp, synthetic construct
  source 1..20: mol_type = other DNA
tggggaggctgaggcaggag

SEQ ID NO: 220747 - DNA, 20 bp, synthetic construct
  source 1..20: mol_type = other DNA
ctggggaggctgaggcagga

SEQ ID NO: 220748 - DNA, 20 bp, synthetic construct
  source 1..20: mol_type = other DNA
actggggaggctgaggcagg

SEQ ID NO: 220749 - DNA, 20 bp, synthetic construct
  source 1..20: mol_type = other DNA
tactggggaggctgaggcag

SEQ ID NO: 220750 - DNA, 20 bp, synthetic construct
  source 1..20: mol_type = other DNA
ctactggggaggctgaggca

SEQ ID NO: 220751 - DNA, 20 bp, synthetic construct
  source 1..20: mol_type = other DNA
gctactggggaggctgaggc

SEQ ID NO: 220752 - DNA, 20 bp, synthetic construct
  source 1..20: mol_type = other DNA
agctactggggaggctgagg

SEQ ID NO: 220753 - DNA, 20 bp, synthetic construct
  source 1..20: mol_type = other DNA
cagctactggggaggctgag

SEQ ID NO: 220754 - DNA, 20 bp, synthetic construct
  source 1..20: mol_type = other DNA
ccagctactggggaggctga

SEQ ID NO: 220755 - DNA, 20 bp, synthetic construct
  source 1..20: mol_type = other DNA
cccagctactggggaggctg

SEQ ID NO: 220756 - DNA, 20 bp, synthetic construct
  source 1..20: mol_type = other DNA
tcccagctactggggaggct

SEQ ID NO: 220757 - DNA, 20 bp, synthetic construct
  source 1..20: mol_type = other DNA
atcccagctactggggaggc

SEQ ID NO: 220758 - DNA, 20 bp, synthetic construct
  source 1..20: mol_type = other DNA
aatcccagctactggggagg

SEQ ID NO: 220759 - DNA, 20 bp, synthetic construct
  source 1..20: mol_type = other DNA
taatcccagctactggggag

SEQ ID NO: 220760 - DNA, 20 bp, synthetic construct
  source 1..20: mol_type = other DNA
gtaatcccagctactgggga

SEQ ID NO: 220761 - DNA, 20 bp, synthetic construct
  source 1..20: mol_type = other DNA
tgtaatcccagctactgggg

SEQ ID NO: 220762 - DNA, 20 bp, synthetic construct
  source 1..20: mol_type = other DNA
ctgtaatcccagctactggg

SEQ ID NO: 220763 - DNA, 20 bp, synthetic construct
  source 1..20: mol_type = other DNA
cctgtaatcccagctactgg

SEQ ID NO: 220764 - DNA, 20 bp, synthetic construct
  source 1..20: mol_type = other DNA
acctgtaatcccagctactg

SEQ ID NO: 220765 - DNA, 20 bp, synthetic construct
  source 1..20: mol_type = other DNA
cacctgtaatcccagctact

SEQ ID NO: 220766 - DNA, 20 bp, synthetic construct
  source 1..20: mol_type = other DNA
gcacctgtaatcccagctac

SEQ ID NO: 220767 - DNA, 20 bp, synthetic construct
  source 1..20: mol_type = other DNA
ggcacctgtaatcccagcta

SEQ ID NO: 220768 - DNA, 20 bp, synthetic construct
  source 1..20: mol_type = other DNA
gggcacctgtaatcccagct

SEQ ID NO: 220769 - DNA, 20 bp, synthetic construct
  source 1..20: mol_type = other DNA
tgggcacctgtaatcccagc

SEQ ID NO: 220770 - DNA, 20 bp, synthetic construct
  source 1..20: mol_type = other DNA
gtgggcacctgtaatcccag

SEQ ID NO: 220771 - DNA, 20 bp, synthetic construct
  source 1..20: mol_type = other DNA
ggtgggcacctgtaatccca

SEQ ID NO: 220772 - DNA, 20 bp, synthetic construct
  source 1..20: mol_type = other DNA
tggtgggcacctgtaatccc

SEQ ID NO: 220773 - DNA, 20 bp, synthetic construct
  source 1..20: mol_type = other DNA
gtggtgggcacctgtaatcc

SEQ ID NO: 220774 - DNA, 20 bp, synthetic construct
  source 1..20: mol_type = other DNA
ggtggtgggcacctgtaatc

SEQ ID NO: 220775 - DNA, 20 bp, synthetic construct
  source 1..20: mol_type = other DNA
tggtggtgggcacctgtaat

SEQ ID NO: 220776 - DNA, 20 bp, synthetic construct
  source 1..20: mol_type = other DNA
gtggtggtgggcacctgtaa

SEQ ID NO: 220777 - DNA, 20 bp, synthetic construct
  source 1..20: mol_type = other DNA
tgtggtggtgggcacctgta

SEQ ID NO: 220778 - DNA, 20 bp, synthetic construct
  source 1..20: mol_type = other DNA
gtgtggtggtgggcacctgt

SEQ ID NO: 220779 - DNA, 20 bp, synthetic construct
  source 1..20: mol_type = other DNA
ggtgtggtggtgggcacctg

SEQ ID NO: 220780 - DNA, 20 bp, synthetic construct
  source 1..20: mol_type = other DNA
gggtgtggtggtgggcacct

SEQ ID NO: 220781 - DNA, 20 bp, synthetic construct
  source 1..20: mol_type = other DNA
tgggtgtggtggtgggcacc

SEQ ID NO: 220782 - DNA, 20 bp, synthetic construct
  source 1..20: mol_type = other DNA
ctgggtgtggtggtgggcac

SEQ ID NO: 220783 - DNA, 20 bp, synthetic construct
  source 1..20: mol_type = other DNA
gctgggtgtggtggtgggca

SEQ ID NO: 220784 - DNA, 20 bp, synthetic construct
  source 1..20: mol_type = other DNA
agctgggtgtggtggtgggc

SEQ ID NO: 220785 - DNA, 20 bp, synthetic construct
  source 1..20: mol_type = other DNA
tagctgggtgtggtggtggg

SEQ ID NO: 220786 - DNA, 20 bp, synthetic construct
  source 1..20: mol_type = other DNA
ttagctgggtgtggtggtgg

SEQ ID NO: 220787 - DNA, 20 bp, synthetic construct
  source 1..20: mol_type = other DNA
attagctgggtgtggtggtg

SEQ ID NO: 220788 - DNA, 20 bp, synthetic construct
  source 1..20: mol_type = other DNA
aattagctgggtgtggtggt

SEQ ID NO: 220789 - DNA, 20 bp, synthetic construct
  source 1..20: mol_type = other DNA
aaattagctgggtgtggtgg

SEQ ID NO: 220790 - DNA, 20 bp, synthetic construct
  source 1..20: mol_type = other DNA
aaaattagctgggtgtggtg

SEQ ID NO: 220791 - DNA, 20 bp, synthetic construct
  source 1..20: mol_type = other DNA
aaaaattagctgggtgtggt

SEQ ID NO: 220792 - DNA, 20 bp, synthetic construct
  source 1..20: mol_type = other DNA
caaaaattagctgggtgtgg

SEQ ID NO: 220793 - DNA, 20 bp, synthetic construct
  source 1..20: mol_type = other DNA
acaaaaattagctgggtgtg

SEQ ID NO: 220794 - DNA, 20 bp, synthetic construct
  source 1..20: mol_type = other DNA
cacaaaaattagctgggtgt

SEQ ID NO: 220795 - DNA, 20 bp, synthetic construct
  source 1..20: mol_type = other DNA
acacaaaaattagctgggtg

SEQ ID NO: 220796 - DNA, 20 bp, synthetic construct
  source 1..20: mol_type = other DNA
aacacaaaaattagctgggt

SEQ ID NO: 220797 - DNA, 20 bp, synthetic construct
  source 1..20: mol_type = other DNA
aaacacaaaaattagctggg

SEQ ID NO: 220798 - DNA, 20 bp, synthetic construct
  source 1..20: mol_type = other DNA
aaaacacaaaaattagctgg

SEQ ID NO: 220799 - DNA, 20 bp, synthetic construct
  source 1..20: mol_type = other DNA
aaaaacacaaaaattagctg

SEQ ID NO: 220800 - DNA, 20 bp, synthetic construct
  source 1..20: mol_type = other DNA
taaaaacacaaaaattagct

SEQ ID NO: 220801 - DNA, 20 bp, synthetic construct
  source 1..20: mol_type = other DNA
ctaaaaacacaaaaattagc

SEQ ID NO: 220802 - DNA, 20 bp, synthetic construct
  source 1..20: mol_type = other DNA
actaaaaacacaaaaattag

SEQ ID NO: 220803 - DNA, 20 bp, synthetic construct
  source 1..20: mol_type = other DNA
tactaaaaacacaaaaatta

SEQ ID NO: 220804 - DNA, 20 bp, synthetic construct
  source 1..20: mol_type = other DNA
ctactaaaaacacaaaaatt

SEQ ID NO: 220805 - DNA, 20 bp, synthetic construct
  source 1..20: mol_type = other DNA
tctactaaaaacacaaaaat

SEQ ID NO: 220806 - DNA, 20 bp, synthetic construct
  source 1..20: mol_type = other DNA
ctctactaaaaacacaaaaa

SEQ ID NO: 220807 - DNA, 20 bp, synthetic construct
  source 1..20: mol_type = other DNA
tctctactaaaaacacaaaa

SEQ ID NO: 220808 - DNA, 20 bp, synthetic construct
  source 1..20: mol_type = other DNA
gtctctactaaaaacacaaa

SEQ ID NO: 220809 - DNA, 20 bp, synthetic construct
  source 1..20: mol_type = other DNA
tgtctctactaaaaacacaa

SEQ ID NO: 220810 - DNA, 20 bp, synthetic construct
  source 1..20: mol_type = other DNA
ctgtctctactaaaaacaca

SEQ ID NO: 220811 - DNA, 20 bp, synthetic construct
  source 1..20: mol_type = other DNA
cctgtctctactaaaaacac

SEQ ID NO: 220812 - DNA, 20 bp, synthetic construct
  source 1..20: mol_type = other DNA
ccctgtctctactaaaaaca

SEQ ID NO: 220813 - DNA, 20 bp, synthetic construct
  source 1..20: mol_type = other DNA
accctgtctctactaaaaac

SEQ ID NO: 220814 - DNA, 20 bp, synthetic construct
  source 1..20: mol_type = other DNA
aaccctgtctctactaaaaa

SEQ ID NO: 220815 - DNA, 20 bp, synthetic construct
  source 1..20: mol_type = other DNA
aaaccctgtctctactaaaa

SEQ ID NO: 220816 - DNA, 20 bp, synthetic construct
  source 1..20: mol_type = other DNA
gaaaccctgtctctactaaa

SEQ ID NO: 220817 - DNA, 20 bp, synthetic construct
  source 1..20: mol_type = other DNA
tgaaaccctgtctctactaa

SEQ ID NO: 220818 - DNA, 20 bp, synthetic construct
  source 1..20: mol_type = other DNA
gtgaaaccctgtctctacta

SEQ ID NO: 220819 - DNA, 20 bp, synthetic construct
  source 1..20: mol_type = other DNA
ggtgaaaccctgtctctact

SEQ ID NO: 220820 - DNA, 20 bp, synthetic construct
  source 1..20: mol_type = other DNA
tggtgaaaccctgtctctac

SEQ ID NO: 220821 - DNA, 20 bp, synthetic construct
  source 1..20: mol_type = other DNA
atggtgaaaccctgtctcta

SEQ ID NO: 220822 - DNA, 20 bp, synthetic construct
  source 1..20: mol_type = other DNA
catggtgaaaccctgtctct

SEQ ID NO: 220823 - DNA, 20 bp, synthetic construct
  source 1..20: mol_type = other DNA
acatggtgaaaccctgtctc

SEQ ID NO: 220824 - DNA, 20 bp, synthetic construct
  source 1..20: mol_type = other DNA
aacatggtgaaaccctgtct

SEQ ID NO: 220825 - DNA, 20 bp, synthetic construct
  source 1..20: mol_type = other DNA
caacatggtgaaaccctgtc

SEQ ID NO: 220826 - DNA, 20 bp, synthetic construct
  source 1..20: mol_type = other DNA
ccaacatggtgaaaccctgt

SEQ ID NO: 220827 - DNA, 20 bp, synthetic construct
  source 1..20: mol_type = other DNA
accaacatggtgaaaccctg

SEQ ID NO: 220828 - DNA, 20 bp, synthetic construct
  source 1..20: mol_type = other DNA
gaccaacatggtgaaaccct

SEQ ID NO: 220829 - DNA, 20 bp, synthetic construct
  source 1..20: mol_type = other DNA
tgaccaacatggtgaaaccc

SEQ ID NO: 220830 - DNA, 20 bp, synthetic construct
  source 1..20: mol_type = other DNA
ctgaccaacatggtgaaacc

SEQ ID NO: 220831 - DNA, 20 bp, synthetic construct
  source 1..20: mol_type = other DNA
cctgaccaacatggtgaaac

SEQ ID NO: 220832 - DNA, 20 bp, synthetic construct
  source 1..20: mol_type = other DNA
gcctgaccaacatggtgaaa

SEQ ID NO: 220833 - DNA, 20 bp, synthetic construct
  source 1..20: mol_type = other DNA
agcctgaccaacatggtgaa

SEQ ID NO: 220834 - DNA, 20 bp, synthetic construct
  source 1..20: mol_type = other DNA
cagcctgaccaacatggtga

SEQ ID NO: 220835 - DNA, 20 bp, synthetic construct
  source 1..20: mol_type = other DNA
ccagcctgaccaacatggtg

SEQ ID NO: 220836 - DNA, 20 bp, synthetic construct
  source 1..20: mol_type = other DNA
accagcctgaccaacatggt

SEQ ID NO: 220837 - DNA, 20 bp, synthetic construct
  source 1..20: mol_type = other DNA
gaccagcctgaccaacatgg

SEQ ID NO: 220838 - DNA, 20 bp, synthetic construct
  source 1..20: mol_type = other DNA
agaccagcctgaccaacatg

SEQ ID NO: 220839 - DNA, 20 bp, synthetic construct
  source 1..20: mol_type = other DNA
gagaccagcctgaccaacat

SEQ ID NO: 220840 - DNA, 20 bp, synthetic construct
  source 1..20: mol_type = other DNA
cgagaccagcctgaccaaca

SEQ ID NO: 220841 - DNA, 20 bp, synthetic construct
  source 1..20: mol_type = other DNA
tcgagaccagcctgaccaac

SEQ ID NO: 220842 - DNA, 20 bp, synthetic construct
  source 1..20: mol_type = other DNA
ttcgagaccagcctgaccaa

SEQ ID NO: 220843 - DNA, 20 bp, synthetic construct
  source 1..20: mol_type = other DNA
gttcgagaccagcctgacca

SEQ ID NO: 220844 - DNA, 20 bp, synthetic construct
  source 1..20: mol_type = other DNA
agttcgagaccagcctgacc

SEQ ID NO: 220845 - DNA, 20 bp, synthetic construct
  source 1..20: mol_type = other DNA
gagttcgagaccagcctgac

SEQ ID NO: 220846 - DNA, 20 bp, synthetic construct
  source 1..20: mol_type = other DNA
ggagttcgagaccagcctga

SEQ ID NO: 220847 - DNA, 20 bp, synthetic construct
  source 1..20: mol_type = other DNA
aggagttcgagaccagcctg

SEQ ID NO: 220848 - DNA, 20 bp, synthetic construct
  source 1..20: mol_type = other DNA
caggagttcgagaccagcct

SEQ ID NO: 220849 - DNA, 20 bp, synthetic construct
  source 1..20: mol_type = other DNA
tcaggagttcgagaccagcc

SEQ ID NO: 220850 - DNA, 20 bp, synthetic construct
  source 1..20: mol_type = other DNA
gtcaggagttcgagaccagc

SEQ ID NO: 220851 - DNA, 20 bp, synthetic construct
  source 1..20: mol_type = other DNA
ggtcaggagttcgagaccag

SEQ ID NO: 220852 - DNA, 20 bp, synthetic construct
  source 1..20: mol_type = other DNA
aggtcaggagttcgagacca

SEQ ID NO: 220853 - DNA, 20 bp, synthetic construct
  source 1..20: mol_type = other DNA
gaggtcaggagttcgagacc

SEQ ID NO: 220854 - DNA, 20 bp, synthetic construct
  source 1..20: mol_type = other DNA
tgaggtcaggagttcgagac

SEQ ID NO: 220855 - DNA, 20 bp, synthetic construct
  source 1..20: mol_type = other DNA
ctgaggtcaggagttcgaga

SEQ ID NO: 220856 - DNA, 20 bp, synthetic construct
  source 1..20: mol_type = other DNA
tctgaggtcaggagttcgag

SEQ ID NO: 220857 - DNA, 20 bp, synthetic construct
  source 1..20: mol_type = other DNA
atctgaggtcaggagttcga

SEQ ID NO: 220858 - DNA, 20 bp, synthetic construct
  source 1..20: mol_type = other DNA
catctgaggtcaggagttcg

SEQ ID NO: 220859 - DNA, 20 bp, synthetic construct
  source 1..20: mol_type = other DNA
tcatctgaggtcaggagttc

SEQ ID NO: 220860 - DNA, 20 bp, synthetic construct
  source 1..20: mol_type = other DNA
atcatctgaggtcaggagtt

SEQ ID NO: 220861 - DNA, 20 bp, synthetic construct
  source 1..20: mol_type = other DNA
aatcatctgaggtcaggagt

SEQ ID NO: 220862 - DNA, 20 bp, synthetic construct
  source 1..20: mol_type = other DNA
gaatcatctgaggtcaggag

SEQ ID NO: 220863 - DNA, 20 bp, synthetic construct
  source 1..20: mol_type = other DNA
tgaatcatctgaggtcagga

SEQ ID NO: 220864 - DNA, 20 bp, synthetic construct
  source 1..20: mol_type = other DNA
gtgaatcatctgaggtcagg

SEQ ID NO: 220865 - DNA, 20 bp, synthetic construct
  source 1..20: mol_type = other DNA
ggtgaatcatctgaggtcag

SEQ ID NO: 220866 - DNA, 20 bp, synthetic construct
  source 1..20: mol_type = other DNA
gggtgaatcatctgaggtca

SEQ ID NO: 220867 - DNA, 20 bp, synthetic construct
  source 1..20: mol_type = other DNA
tgggtgaatcatctgaggtc

SEQ ID NO: 220868 - DNA, 20 bp, synthetic construct
  source 1..20: mol_type = other DNA
gtgggtgaatcatctgaggt

SEQ ID NO: 220869 - DNA, 20 bp, synthetic construct
  source 1..20: mol_type = other DNA
ggtgggtgaatcatctgagg

SEQ ID NO: 220870 - DNA, 20 bp, synthetic construct
  source 1..20: mol_type = other DNA
aggtgggtgaatcatctgag

SEQ ID NO: 220871 - DNA, 20 bp, synthetic construct
  source 1..20: mol_type = other DNA
gaggtgggtgaatcatctga

SEQ ID NO: 220872 - DNA, 20 bp, synthetic construct
  source 1..20: mol_type = other DNA
cgaggtgggtgaatcatctg

SEQ ID NO: 220873 - DNA, 20 bp, synthetic construct
  source 1..20: mol_type = other DNA
ccgaggtgggtgaatcatct

SEQ ID NO: 220874 - DNA, 20 bp, synthetic construct
  source 1..20: mol_type = other DNA
gccgaggtgggtgaatcatc

SEQ ID NO: 220875 - DNA, 20 bp, synthetic construct
  source 1..20: mol_type = other DNA
ggccgaggtgggtgaatcat

SEQ ID NO: 220876 - DNA, 20 bp, synthetic construct
  source 1..20: mol_type = other DNA
aggccgaggtgggtgaatca

SEQ ID NO: 220877 - DNA, 20 bp, synthetic construct
  source 1..20: mol_type = other DNA
gaggccgaggtgggtgaatc

SEQ ID NO: 220878 - DNA, 20 bp, synthetic construct
  source 1..20: mol_type = other DNA
ggaggccgaggtgggtgaat

SEQ ID NO: 220879 - DNA, 20 bp, synthetic construct
  source 1..20: mol_type = other DNA
gggaggccgaggtgggtgaa

SEQ ID NO: 220880 - DNA, 20 bp, synthetic construct
  source 1..20: mol_type = other DNA
tgggaggccgaggtgggtga

SEQ ID NO: 220881 - DNA, 20 bp, synthetic construct
  source 1..20: mol_type = other DNA
ctgggaggccgaggtgggtg

SEQ ID NO: 220882 - DNA, 20 bp, synthetic construct
  source 1..20: mol_type = other DNA
actgggaggccgaggtgggt

SEQ ID NO: 220883 - DNA, 20 bp, synthetic construct
  source 1..20: mol_type = other DNA
cactgggaggccgaggtggg

SEQ ID NO: 220884 - DNA, 20 bp, synthetic construct
  source 1..20: mol_type = other DNA
acactgggaggccgaggtgg

SEQ ID NO: 220885 - DNA, 20 bp, synthetic construct
  source 1..20: mol_type = other DNA
cacactgggaggccgaggtg

SEQ ID NO: 220886 - DNA, 20 bp, synthetic construct
  source 1..20: mol_type = other DNA
gcacactgggaggccgaggt

SEQ ID NO: 220887 - DNA, 20 bp, synthetic construct
  source 1..20: mol_type = other DNA
agcacactgggaggccgagg

SEQ ID NO: 220888 - DNA, 20 bp, synthetic construct
  source 1..20: mol_type = other DNA
cagcacactgggaggccgag

SEQ ID NO: 220889 - DNA, 20 bp, synthetic construct
  source 1..20: mol_type = other DNA
ccagcacactgggaggccga

SEQ ID NO: 220890 - DNA, 20 bp, synthetic construct
  source 1..20: mol_type = other DNA
cccagcacactgggaggccg

SEQ ID NO: 220891 - DNA, 20 bp, synthetic construct
  source 1..20: mol_type = other DNA
tcccagcacactgggaggcc

SEQ ID NO: 220892 - DNA, 20 bp, synthetic construct
  source 1..20: mol_type = other DNA
atcccagcacactgggaggc

SEQ ID NO: 220893 - DNA, 20 bp, synthetic construct
  source 1..20: mol_type = other DNA
aatcccagcacactgggagg

SEQ ID NO: 220894 - DNA, 20 bp, synthetic construct
  source 1..20: mol_type = other DNA
taatcccagcacactgggag

SEQ ID NO: 220895 - DNA, 20 bp, synthetic construct
  source 1..20: mol_type = other DNA
gtaatcccagcacactggga

SEQ ID NO: 220896 - DNA, 20 bp, synthetic construct
  source 1..20: mol_type = other DNA
tgtaatcccagcacactggg

SEQ ID NO: 220897 - DNA, 20 bp, synthetic construct
  source 1..20: mol_type = other DNA
ctgtaatcccagcacactgg

SEQ ID NO: 220898 - DNA, 20 bp, synthetic construct
  source 1..20: mol_type = other DNA
cctgtaatcccagcacactg

SEQ ID NO: 220899 - DNA, 20 bp, synthetic construct
  source 1..20: mol_type = other DNA
acctgtaatcccagcacact

SEQ ID NO: 220900 - DNA, 20 bp, synthetic construct
  source 1..20: mol_type = other DNA
cacctgtaatcccagcacac

SEQ ID NO: 220901 - DNA, 20 bp, synthetic construct
  source 1..20: mol_type = other DNA
acacctgtaatcccagcaca

SEQ ID NO: 220902 - DNA, 20 bp, synthetic construct
  source 1..20: mol_type = other DNA
cacacctgtaatcccagcac

SEQ ID NO: 220903 - DNA, 20 bp, synthetic construct
  source 1..20: mol_type = other DNA
tcacacctgtaatcccagca

SEQ ID NO: 220904 - DNA, 20 bp, synthetic construct
  source 1..20: mol_type = other DNA
ctcacacctgtaatcccagc

SEQ ID NO: 220905 - DNA, 20 bp, synthetic construct
  source 1..20: mol_type = other DNA
gctcacacctgtaatcccag

SEQ ID NO: 220906 - DNA, 20 bp, synthetic construct
  source 1..20: mol_type = other DNA
ggctcacacctgtaatccca

SEQ ID NO: 220907 - DNA, 20 bp, synthetic construct
  source 1..20: mol_type = other DNA
tggctcacacctgtaatccc

SEQ ID NO: 220908 - DNA, 20 bp, synthetic construct
  source 1..20: mol_type = other DNA
gtggctcacacctgtaatcc

SEQ ID NO: 220909 - DNA, 20 bp, synthetic construct
  source 1..20: mol_type = other DNA
ggtggctcacacctgtaatc

SEQ ID NO: 220910 - DNA, 20 bp, synthetic construct
  source 1..20: mol_type = other DNA
cggtggctcacacctgtaat

SEQ ID NO: 220911 - DNA, 20 bp, synthetic construct
  source 1..20: mol_type = other DNA
gcggtggctcacacctgtaa

SEQ ID NO: 220912 - DNA, 20 bp, synthetic construct
  source 1..20: mol_type = other DNA
cgcggtggctcacacctgta

SEQ ID NO: 220913 - DNA, 20 bp, synthetic construct
  source 1..20: mol_type = other DNA
gcgcggtggctcacacctgt

SEQ ID NO: 220914 - DNA, 20 bp, synthetic construct
  source 1..20: mol_type = other DNA
ggcgcggtggctcacacctg

SEQ ID NO: 220915 - DNA, 20 bp, synthetic construct
  source 1..20: mol_type = other DNA
aggcgcggtggctcacacct

SEQ ID NO: 220916 - DNA, 20 bp, synthetic construct
  source 1..20: mol_type = other DNA
caggcgcggtggctcacacc

SEQ ID NO: 220917 - DNA, 20 bp, synthetic construct
  source 1..20: mol_type = other DNA
ccaggcgcggtggctcacac

SEQ ID NO: 220918 - DNA, 20 bp, synthetic construct
  source 1..20: mol_type = other DNA
gccaggcgcggtggctcaca

SEQ ID NO: 220919 - DNA, 20 bp, synthetic construct
  source 1..20: mol_type = other DNA
ggccaggcgcggtggctcac

SEQ ID NO: 220920 - DNA, 20 bp, synthetic construct
  source 1..20: mol_type = other DNA
aggccaggcgcggtggctca

SEQ ID NO: 220921 - DNA, 20 bp, synthetic construct
  source 1..20: mol_type = other DNA
aaggccaggcgcggtggctc

SEQ ID NO: 220922 - DNA, 20 bp, synthetic construct
  source 1..20: mol_type = other DNA
caaggccaggcgcggtggct

SEQ ID NO: 220923 - DNA, 20 bp, synthetic construct
  source 1..20: mol_type = other DNA
gcaaggccaggcgcggtggc

SEQ ID NO: 220924 - DNA, 20 bp, synthetic construct
  source 1..20: mol_type = other DNA
agcaaggccaggcgcggtgg

SEQ ID NO: 220925 - DNA, 20 bp, synthetic construct
  source 1..20: mol_type = other DNA
cagcaaggccaggcgcggtg

SEQ ID NO: 220926 - DNA, 20 bp, synthetic construct
  source 1..20: mol_type = other DNA
acagcaaggccaggcgcggt

SEQ ID NO: 220927 - DNA, 20 bp, synthetic construct
  source 1..20: mol_type = other DNA
aacagcaaggccaggcgcgg

SEQ ID NO: 220928 - DNA, 20 bp, synthetic construct
  source 1..20: mol_type = other DNA
caacagcaaggccaggcgcg

SEQ ID NO: 220929 - DNA, 20 bp, synthetic construct
  source 1..20: mol_type = other DNA
tcaacagcaaggccaggcgc

SEQ ID NO: 220930 - DNA, 20 bp, synthetic construct
  source 1..20: mol_type = other DNA
atcaacagcaaggccaggcg

SEQ ID NO: 220931 - DNA, 20 bp, synthetic construct
  source 1..20: mol_type = other DNA
aatcaacagcaaggccaggc

SEQ ID NO: 220932 - DNA, 20 bp, synthetic construct
  source 1..20: mol_type = other DNA
gaatcaacagcaaggccagg

SEQ ID NO: 220933 - DNA, 20 bp, synthetic construct
  source 1..20: mol_type = other DNA
tgaatcaacagcaaggccag

SEQ ID NO: 220934 - DNA, 20 bp, synthetic construct
  source 1..20: mol_type = other DNA
atgaatcaacagcaaggcca

SEQ ID NO: 220935 - DNA, 20 bp, synthetic construct
  source 1..20: mol_type = other DNA
gatgaatcaacagcaaggcc

SEQ ID NO: 220936 - DNA, 20 bp, synthetic construct
  source 1..20: mol_type = other DNA
agatgaatcaacagcaaggc

SEQ ID NO: 220937 - DNA, 20 bp, synthetic construct
  source 1..20: mol_type = other DNA
tagatgaatcaacagcaagg

SEQ ID NO: 220938 - DNA, 20 bp, synthetic construct
  source 1..20: mol_type = other DNA
atagatgaatcaacagcaag

SEQ ID NO: 220939 - DNA, 20 bp, synthetic construct
  source 1..20: mol_type = other DNA
tatagatgaatcaacagcaa

SEQ ID NO: 220940 - DNA, 20 bp, synthetic construct
  source 1..20: mol_type = other DNA
ctatagatgaatcaacagca

SEQ ID NO: 220941 - DNA, 20 bp, synthetic construct
  source 1..20: mol_type = other DNA
actatagatgaatcaacagc

SEQ ID NO: 220942 - DNA, 20 bp, synthetic construct
  source 1..20: mol_type = other DNA
tactatagatgaatcaacag

SEQ ID NO: 220943 - DNA, 20 bp, synthetic construct
  source 1..20: mol_type = other DNA
atactatagatgaatcaaca

SEQ ID NO: 220944 - DNA, 20 bp, synthetic construct
  source 1..20: mol_type = other DNA
catactatagatgaatcaac

SEQ ID NO: 220945 - DNA, 20 bp, synthetic construct
  source 1..20: mol_type = other DNA
acatactatagatgaatcaa

SEQ ID NO: 220946 - DNA, 20 bp, synthetic construct
  source 1..20: mol_type = other DNA
aacatactatagatgaatca

SEQ ID NO: 220947 - DNA, 20 bp, synthetic construct
  source 1..20: mol_type = other DNA
aaacatactatagatgaatc

SEQ ID NO: 220948 - DNA, 20 bp, synthetic construct
  source 1..20: mol_type = other DNA
caaacatactatagatgaat

SEQ ID NO: 220949 - DNA, 20 bp, synthetic construct
  source 1..20: mol_type = other DNA
tcaaacatactatagatgaa

SEQ ID NO: 220950 - DNA, 20 bp, synthetic construct
  source 1..20: mol_type = other DNA
gtcaaacatactatagatga

SEQ ID NO: 220951 - DNA, 20 bp, synthetic construct
  source 1..20: mol_type = other DNA
agtcaaacatactatagatg

SEQ ID NO: 220952 - DNA, 20 bp, synthetic construct
  source 1..20: mol_type = other DNA
aagtcaaacatactatagat

SEQ ID NO: 220953 - DNA, 20 bp, synthetic construct
  source 1..20: mol_type = other DNA
caagtcaaacatactataga

SEQ ID NO: 220954 - DNA, 20 bp, synthetic construct
  source 1..20: mol_type = other DNA
tcaagtcaaacatactatag

SEQ ID NO: 220955 - DNA, 20 bp, synthetic construct
  source 1..20: mol_type = other DNA
atcaagtcaaacatactata

SEQ ID NO: 220956 - DNA, 20 bp, synthetic construct
  source 1..20: mol_type = other DNA
catcaagtcaaacatactat

SEQ ID NO: 220957 - DNA, 20 bp, synthetic construct
  source 1..20: mol_type = other DNA
tcatcaagtcaaacatacta

SEQ ID NO: 220958 - DNA, 20 bp, synthetic construct
  source 1..20: mol_type = other DNA
gtcatcaagtcaaacatact

SEQ ID NO: 220959 - DNA, 20 bp, synthetic construct
  source 1..20: mol_type = other DNA
ggtcatcaagtcaaacatac

SEQ ID NO: 220960 - DNA, 20 bp, synthetic construct
  source 1..20: mol_type = other DNA
aggtcatcaagtcaaacata

SEQ ID NO: 220961 - DNA, 20 bp, synthetic construct
  source 1..20: mol_type = other DNA
gaggtcatcaagtcaaacat

SEQ ID NO: 220962 - DNA, 20 bp, synthetic construct
  source 1..20: mol_type = other DNA
ggaggtcatcaagtcaaaca

SEQ ID NO: 220963 - DNA, 20 bp, synthetic construct
  source 1..20: mol_type = other DNA
tggaggtcatcaagtcaaac

SEQ ID NO: 220964 - DNA, 20 bp, synthetic construct
  source 1..20: mol_type = other DNA
ctggaggtcatcaagtcaaa

SEQ ID NO: 220965 - DNA, 20 bp, synthetic construct
  source 1..20: mol_type = other DNA
actggaggtcatcaagtcaa

SEQ ID NO: 220966 - DNA, 20 bp, synthetic construct
  source 1..20: mol_type = other DNA
aactggaggtcatcaagtca

SEQ ID NO: 220967 - DNA, 20 bp, synthetic construct
  source 1..20: mol_type = other DNA
taactggaggtcatcaagtc

SEQ ID NO: 220968 - DNA, 20 bp, synthetic construct
  source 1..20: mol_type = other DNA
gtaactggaggtcatcaagt

SEQ ID NO: 220969 - DNA, 20 bp, synthetic construct
  source 1..20: mol_type = other DNA
ggtaactggaggtcatcaag

SEQ ID NO: 220970 - DNA, 20 bp, synthetic construct
  source 1..20: mol_type = other DNA
aggtaactggaggtcatcaa

SEQ ID NO: 220971 - DNA, 20 bp, synthetic construct
  source 1..20: mol_type = other DNA
aaggtaactggaggtcatca

SEQ ID NO: 220972 - DNA, 20 bp, synthetic construct
  source 1..20: mol_type = other DNA
taaggtaactggaggtcatc

SEQ ID NO: 220973 - DNA, 20 bp, synthetic construct
  source 1..20: mol_type = other DNA
ctaaggtaactggaggtcat

SEQ ID NO: 220974 - DNA, 20 bp, synthetic construct
  source 1..20: mol_type = other DNA
tctaaggtaactggaggtca

SEQ ID NO: 220975 - DNA, 20 bp, synthetic construct
  source 1..20: mol_type = other DNA
gtctaaggtaactggaggtc

SEQ ID NO: 220976 - DNA, 20 bp, synthetic construct
  source 1..20: mol_type = other DNA
tgtctaaggtaactggaggt

SEQ ID NO: 220977 - DNA, 20 bp, synthetic construct
  source 1..20: mol_type = other DNA
ctgtctaaggtaactggagg

SEQ ID NO: 220978 - DNA, 20 bp, synthetic construct
  source 1..20: mol_type = other DNA
tctgtctaaggtaactggag

SEQ ID NO: 220979 - DNA, 20 bp, synthetic construct
  source 1..20: mol_type = other DNA
ctctgtctaaggtaactgga

SEQ ID NO: 220980 - DNA, 20 bp, synthetic construct
  source 1..20: mol_type = other DNA
cctctgtctaaggtaactgg

SEQ ID NO: 220981 - DNA, 20 bp, synthetic construct
  source 1..20: mol_type = other DNA
acctctgtctaaggtaactg

SEQ ID NO: 220982 - DNA, 20 bp, synthetic construct
  source 1..20: mol_type = other DNA
aacctctgtctaaggtaact

SEQ ID NO: 220983 - DNA, 20 bp, synthetic construct
  source 1..20: mol_type = other DNA
gaacctctgtctaaggtaac

SEQ ID NO: 220984 - DNA, 20 bp, synthetic construct
  source 1..20: mol_type = other DNA
agaacctctgtctaaggtaa

SEQ ID NO: 220985 - DNA, 20 bp, synthetic construct
  source 1..20: mol_type = other DNA
gagaacctctgtctaaggta

SEQ ID NO: 220986 - DNA, 20 bp, synthetic construct
  source 1..20: mol_type = other DNA
tgagaacctctgtctaaggt

SEQ ID NO: 220987 - DNA, 20 bp, synthetic construct
  source 1..20: mol_type = other DNA
atgagaacctctgtctaagg

SEQ ID NO: 220988 - DNA, 20 bp, synthetic construct
  source 1..20: mol_type = other DNA
gatgagaacctctgtctaag

SEQ ID NO: 220989 - DNA, 20 bp, synthetic construct
  source 1..20: mol_type = other DNA
agatgagaacctctgtctaa

SEQ ID NO: 220990 - DNA, 20 bp, synthetic construct
  source 1..20: mol_type = other DNA
tagatgagaacctctgtcta

SEQ ID NO: 220991 - DNA, 20 bp, synthetic construct
  source 1..20: mol_type = other DNA
ttagatgagaacctctgtct

SEQ ID NO: 220992 - DNA, 20 bp, synthetic construct
  source 1..20: mol_type = other DNA
cttagatgagaacctctgtc

SEQ ID NO: 220993 - DNA, 20 bp, synthetic construct
  source 1..20: mol_type = other DNA
gcttagatgagaacctctgt

SEQ ID NO: 220994 - DNA, 20 bp, synthetic construct
  source 1..20: mol_type = other DNA
agcttagatgagaacctctg

SEQ ID NO: 220995 - DNA, 20 bp, synthetic construct
  source 1..20: mol_type = other DNA
gagcttagatgagaacctct

SEQ ID NO: 220996 - DNA, 20 bp, synthetic construct
  source 1..20: mol_type = other DNA
ggagcttagatgagaacctc

SEQ ID NO: 220997 - DNA, 20 bp, synthetic construct
  source 1..20: mol_type = other DNA
tggagcttagatgagaacct

SEQ ID NO: 220998 - DNA, 20 bp, synthetic construct
  source 1..20: mol_type = other DNA
ttggagcttagatgagaacc

SEQ ID NO: 220999 - DNA, 20 bp, synthetic construct
  source 1..20: mol_type = other DNA
gttggagcttagatgagaac

SEQ ID NO: 221000 - DNA, 20 bp, synthetic construct
  source 1..20: mol_type = other DNA
agttggagcttagatgagaa

SEQ ID NO: 221001 - DNA, 20 bp, synthetic construct
  source 1..20: mol_type = other DNA
aagttggagcttagatgaga

SEQ ID NO: 221002 - DNA, 20 bp, synthetic construct
  source 1..20: mol_type = other DNA
aaagttggagcttagatgag

SEQ ID NO: 221003 - DNA, 20 bp, synthetic construct
  source 1..20: mol_type = other DNA
gaaagttggagcttagatga

SEQ ID NO: 221004 - DNA, 20 bp, synthetic construct
  source 1..20: mol_type = other DNA
ggaaagttggagcttagatg

SEQ ID NO: 221005 - DNA, 20 bp, synthetic construct
  source 1..20: mol_type = other DNA
tggaaagttggagcttagat

SEQ ID NO: 221006 - DNA, 20 bp, synthetic construct
  source 1..20: mol_type = other DNA
atggaaagttggagcttaga

SEQ ID NO: 221007 - DNA, 20 bp, synthetic construct
  source 1..20: mol_type = other DNA
aatggaaagttggagcttag

SEQ ID NO: 221008 - DNA, 20 bp, synthetic construct
  source 1..20: mol_type = other DNA
aaatggaaagttggagctta

SEQ ID NO: 221009 - DNA, 20 bp, synthetic construct
  source 1..20: mol_type = other DNA
gaaatggaaagttggagctt

SEQ ID NO: 221010 - DNA, 20 bp, synthetic construct
  source 1..20: mol_type = other DNA
ggaaatggaaagttggagct

SEQ ID NO: 221011 - DNA, 20 bp, synthetic construct
  source 1..20: mol_type = other DNA
aggaaatggaaagttggagc

SEQ ID NO: 221012 - DNA, 20 bp, synthetic construct
  source 1..20: mol_type = other DNA
aaggaaatggaaagttggag

SEQ ID NO: 221013 - DNA, 20 bp, synthetic construct
  source 1..20: mol_type = other DNA
aaaggaaatggaaagttgga

SEQ ID NO: 221014 - DNA, 20 bp, synthetic construct
  source 1..20: mol_type = other DNA
caaaggaaatggaaagttgg

SEQ ID NO: 221015 - DNA, 20 bp, synthetic construct
  source 1..20: mol_type = other DNA
acaaaggaaatggaaagttg

SEQ ID NO: 221016 - DNA, 20 bp, synthetic construct
  source 1..20: mol_type = other DNA
gacaaaggaaatggaaagtt

SEQ ID NO: 221017 - DNA, 20 bp, synthetic construct
  source 1..20: mol_type = other DNA
ggacaaaggaaatggaaagt

SEQ ID NO: 221018 - DNA, 20 bp, synthetic construct
  source 1..20: mol_type = other DNA
aggacaaaggaaatggaaag

SEQ ID NO: 221019 - DNA, 20 bp, synthetic construct
  source 1..20: mol_type = other DNA
gaggacaaaggaaatggaaa

SEQ ID NO: 221020 - DNA, 20 bp, synthetic construct
  source 1..20: mol_type = other DNA
cgaggacaaaggaaatggaa

SEQ ID NO: 221021 - DNA, 20 bp, synthetic construct
  source 1..20: mol_type = other DNA
acgaggacaaaggaaatgga

SEQ ID NO: 221022 - DNA, 20 bp, synthetic construct
  source 1..20: mol_type = other DNA
gacgaggacaaaggaaatgg

SEQ ID NO: 221023 - DNA, 20 bp, synthetic construct
  source 1..20: mol_type = other DNA
agacgaggacaaaggaaatg

SEQ ID NO: 221024 - DNA, 20 bp, synthetic construct
  source 1..20: mol_type = other DNA
aagacgaggacaaaggaaat

SEQ ID NO: 221025 - DNA, 20 bp, synthetic construct
  source 1..20: mol_type = other DNA
aaagacgaggacaaaggaaa

SEQ ID NO: 221026 - DNA, 20 bp, synthetic construct
  source 1..20: mol_type = other DNA
gaaagacgaggacaaaggaa

SEQ ID NO: 221027 - DNA, 20 bp, synthetic construct
  source 1..20: mol_type = other DNA
ggaaagacgaggacaaagga

SEQ ID NO: 221028 - DNA, 20 bp, synthetic construct
  source 1..20: mol_type = other DNA
gggaaagacgaggacaaagg

SEQ ID NO: 221029 - DNA, 20 bp, synthetic construct
  source 1..20: mol_type = other DNA
ggggaaagacgaggacaaag

SEQ ID NO: 221030 - DNA, 20 bp, synthetic construct
  source 1..20: mol_type = other DNA
aggggaaagacgaggacaaa

SEQ ID NO: 221031 - DNA, 20 bp, synthetic construct
  source 1..20: mol_type = other DNA
aaggggaaagacgaggacaa

SEQ ID NO: 221032 - DNA, 20 bp, synthetic construct
  source 1..20: mol_type = other DNA
taaggggaaagacgaggaca

SEQ ID NO: 221033 - DNA, 20 bp, synthetic construct
  source 1..20: mol_type = other DNA
ttaaggggaaagacgaggac

SEQ ID NO: 221034 - DNA, 20 bp, synthetic construct
  source 1..20: mol_type = other DNA
gttaaggggaaagacgagga

SEQ ID NO: 221035 - DNA, 20 bp, synthetic construct
  source 1..20: mol_type = other DNA
ggttaaggggaaagacgagg

SEQ ID NO: 221036 - DNA, 20 bp, synthetic construct
  source 1..20: mol_type = other DNA
gggttaaggggaaagacgag

SEQ ID NO: 221037 - DNA, 20 bp, synthetic construct
  source 1..20: mol_type = other DNA
ggggttaaggggaaagacga

SEQ ID NO: 221038 - DNA, 20 bp, synthetic construct
  source 1..20: mol_type = other DNA
aggggttaaggggaaagacg

SEQ ID NO: 221039 - DNA, 20 bp, synthetic construct
  source 1..20: mol_type = other DNA
gaggggttaaggggaaagac

SEQ ID NO: 221040 - DNA, 20 bp, synthetic construct
  source 1..20: mol_type = other DNA
ggaggggttaaggggaaaga

SEQ ID NO: 221041 - DNA, 20 bp, synthetic construct
  source 1..20: mol_type = other DNA
tggaggggttaaggggaaag

SEQ ID NO: 221042 - DNA, 20 bp, synthetic construct
  source 1..20: mol_type = other DNA
gtggaggggttaaggggaaa

SEQ ID NO: 221043 - DNA, 20 bp, synthetic construct
  source 1..20: mol_type = other DNA
tgtggaggggttaaggggaa

SEQ ID NO: 221044 - DNA, 20 bp, synthetic construct
  source 1..20: mol_type = other DNA
atgtggaggggttaagggga

SEQ ID NO: 221045 - DNA, 20 bp, synthetic construct
  source 1..20: mol_type = other DNA
aatgtggaggggttaagggg

SEQ ID NO: 221046 - DNA, 20 bp, synthetic construct
  source 1..20: mol_type = other DNA
aaatgtggaggggttaaggg

SEQ ID NO: 221047 - DNA, 20 bp, synthetic construct
  source 1..20: mol_type = other DNA
gaaatgtggaggggttaagg

SEQ ID NO: 221048 - DNA, 20 bp, synthetic construct
  source 1..20: mol_type = other DNA
agaaatgtggaggggttaag

SEQ ID NO: 221049 - DNA, 20 bp, synthetic construct
  source 1..20: mol_type = other DNA
gagaaatgtggaggggttaa

SEQ ID NO: 221050 - DNA, 20 bp, synthetic construct
  source 1..20: mol_type = other DNA
agagaaatgtggaggggtta

SEQ ID NO: 221051 - DNA, 20 bp, synthetic construct
  source 1..20: mol_type = other DNA
gagagaaatgtggaggggtt

SEQ ID NO: 221052 - DNA, 20 bp, synthetic construct
  source 1..20: mol_type = other DNA
tgagagaaatgtggaggggt

SEQ ID NO: 221053 - DNA, 20 bp, synthetic construct
  source 1..20: mol_type = other DNA
ttgagagaaatgtggagggg

SEQ ID NO: 221054 - DNA, 20 bp, synthetic construct
  source 1..20: mol_type = other DNA
tttgagagaaatgtggaggg

SEQ ID NO: 221055 - DNA, 20 bp, synthetic construct
  source 1..20: mol_type = other DNA
ttttgagagaaatgtggagg

SEQ ID NO: 221056 - DNA, 20 bp, synthetic construct
  source 1..20: mol_type = other DNA
attttgagagaaatgtggag

SEQ ID NO: 221057 - DNA, 20 bp, synthetic construct
  source 1..20: mol_type = other DNA
gattttgagagaaatgtgga

SEQ ID NO: 221058 - DNA, 20 bp, synthetic construct
  source 1..20: mol_type = other DNA
tgattttgagagaaatgtgg

SEQ ID NO: 221059 - DNA, 20 bp, synthetic construct
  source 1..20: mol_type = other DNA
gtgattttgagagaaatgtg

SEQ ID NO: 221060 - DNA, 20 bp, synthetic construct
  source 1..20: mol_type = other DNA
ggtgattttgagagaaatgt

SEQ ID NO: 221061 - DNA, 20 bp, synthetic construct
  source 1..20: mol_type = other DNA
gggtgattttgagagaaatg

SEQ ID NO: 221062 - DNA, 20 bp, synthetic construct
  source 1..20: mol_type = other DNA
ggggtgattttgagagaaat

SEQ ID NO: 221063 - DNA, 20 bp, synthetic construct
  source 1..20: mol_type = other DNA
tggggtgattttgagagaaa

SEQ ID NO: 221064 - DNA, 20 bp, synthetic construct
  source 1..20: mol_type = other DNA
gtggggtgattttgagagaa

SEQ ID NO: 221065 - DNA, 20 bp, synthetic construct
  source 1..20: mol_type = other DNA
agtggggtgattttgagaga

SEQ ID NO: 221066 - DNA, 20 bp, synthetic construct
  source 1..20: mol_type = other DNA
aagtggggtgattttgagag

SEQ ID NO: 221067 - DNA, 20 bp, synthetic construct
  source 1..20: mol_type = other DNA
gaagtggggtgattttgaga

SEQ ID NO: 221068 - DNA, 20 bp, synthetic construct
  source 1..20: mol_type = other DNA
agaagtggggtgattttgag

SEQ ID NO: 221069 - DNA, 20 bp, synthetic construct
  source 1..20: mol_type = other DNA
tagaagtggggtgattttga

SEQ ID NO: 221070 - DNA, 20 bp, synthetic construct
  source 1..20: mol_type = other DNA
ttagaagtggggtgattttg

SEQ ID NO: 221071 - DNA, 20 bp, synthetic construct
  source 1..20: mol_type = other DNA
tttagaagtggggtgatttt

SEQ ID NO: 221072 - DNA, 20 bp, synthetic construct
  source 1..20: mol_type = other DNA
ttttagaagtggggtgattt

SEQ ID NO: 221073 - DNA, 20 bp, synthetic construct
  source 1..20: mol_type = other DNA
tttttagaagtggggtgatt

SEQ ID NO: 221074 - DNA, 20 bp, synthetic construct
  source 1..20: mol_type = other DNA
ttttttagaagtggggtgat

SEQ ID NO: 221075 - DNA, 20 bp, synthetic construct
  source 1..20: mol_type = other DNA
attttttagaagtggggtga

SEQ ID NO: 221076 - DNA, 20 bp, synthetic construct
  source 1..20: mol_type = other DNA
tattttttagaagtggggtg

SEQ ID NO: 221077 - DNA, 20 bp, synthetic construct
  source 1..20: mol_type = other DNA
gtattttttagaagtggggt

SEQ ID NO: 221078 - DNA, 20 bp, synthetic construct
  source 1..20: mol_type = other DNA
agtattttttagaagtgggg

SEQ ID NO: 221079 - DNA, 20 bp, synthetic construct
  source 1..20: mol_type = other DNA
cagtattttttagaagtggg

SEQ ID NO: 221080 - DNA, 20 bp, synthetic construct
  source 1..20: mol_type = other DNA
acagtattttttagaagtgg

SEQ ID NO: 221081 - DNA, 20 bp, synthetic construct
  source 1..20: mol_type = other DNA
aacagtattttttagaagtg

SEQ ID NO: 221082 - DNA, 20 bp, synthetic construct
  source 1..20: mol_type = other DNA
aaacagtattttttagaagt

SEQ ID NO: 221083 - DNA, 20 bp, synthetic construct
  source 1..20: mol_type = other DNA
taaacagtattttttagaag

SEQ ID NO: 221084 - DNA, 20 bp, synthetic construct
  source 1..20: mol_type = other DNA
ataaacagtattttttagaa

SEQ ID NO: 221085 - DNA, 20 bp, synthetic construct
  source 1..20: mol_type = other DNA
aataaacagtattttttaga

SEQ ID NO: 221086 - DNA, 20 bp, synthetic construct
  source 1..20: mol_type = other DNA
aaataaacagtattttttag

SEQ ID NO: 221087 - DNA, 20 bp, synthetic construct
  source 1..20: mol_type = other DNA
aaaataaacagtatttttta

SEQ ID NO: 221088 - DNA, 20 bp, synthetic construct
  source 1..20: mol_type = other DNA
aaaaataaacagtatttttt

SEQ ID NO: 221089 - DNA, 20 bp, synthetic construct
  source 1..20: mol_type = other DNA
gaaaaataaacagtattttt

SEQ ID NO: 221090 - DNA, 20 bp, synthetic construct
  source 1..20: mol_type = other DNA
agaaaaataaacagtatttt

SEQ ID NO: 221091 - DNA, 20 bp, synthetic construct
  source 1..20: mol_type = other DNA
aagaaaaataaacagtattt

SEQ ID NO: 221092 - DNA, 20 bp, synthetic construct
  source 1..20: mol_type = other DNA
aaagaaaaataaacagtatt

SEQ ID NO: 221093 - DNA, 20 bp, synthetic construct
  source 1..20: mol_type = other DNA
aaaagaaaaataaacagtat

SEQ ID NO: 221094 - DNA, 20 bp, synthetic construct
  source 1..20: mol_type = other DNA
taaaagaaaaataaacagta

SEQ ID NO: 221095 - DNA, 20 bp, synthetic construct
  source 1..20: mol_type = other DNA
ttaaaagaaaaataaacagt

SEQ ID NO: 221096 - DNA, 20 bp, synthetic construct
  source 1..20: mol_type = other DNA
tttaaaagaaaaataaacag

SEQ ID NO: 221097 - DNA, 20 bp, synthetic construct
  source 1..20: mol_type = other DNA
atttaaaagaaaaataaaca

SEQ ID NO: 221098 - DNA, 20 bp, synthetic construct
  source 1..20: mol_type = other DNA
aatttaaaagaaaaataaac

SEQ ID NO: 221099 - DNA, 20 bp, synthetic construct
  source 1..20: mol_type = other DNA
aaatttaaaagaaaaataaa

SEQ ID NO: 221100 - DNA, 20 bp, synthetic construct
  source 1..20: mol_type = other DNA
gaaatttaaaagaaaaataa

SEQ ID NO: 221101 - DNA, 20 bp, synthetic construct
  source 1..20: mol_type = other DNA
tgaaatttaaaagaaaaata

SEQ ID NO: 221102 - DNA, 20 bp, synthetic construct
  source 1..20: mol_type = other DNA
ttgaaatttaaaagaaaaat

SEQ ID NO: 221103 - DNA, 20 bp, synthetic construct
  source 1..20: mol_type = other DNA
tttgaaatttaaaagaaaaa

SEQ ID NO: 221104 - DNA, 20 bp, synthetic construct
  source 1..20: mol_type = other DNA
atttgaaatttaaaagaaaa

SEQ ID NO: 221105 - DNA, 20 bp, synthetic construct
  source 1..20: mol_type = other DNA
aatttgaaatttaaaagaaa

SEQ ID NO: 221106 - DNA, 20 bp, synthetic construct
  source 1..20: mol_type = other DNA
taatttgaaatttaaaagaa

SEQ ID NO: 221107 - DNA, 20 bp, synthetic construct
  source 1..20: mol_type = other DNA
ataatttgaaatttaaaaga

SEQ ID NO: 221108 - DNA, 20 bp, synthetic construct
  source 1..20: mol_type = other DNA
gataatttgaaatttaaaag

SEQ ID NO: 221109 - DNA, 20 bp, synthetic construct
  source 1..20: mol_type = other DNA
agataatttgaaatttaaaa

SEQ ID NO: 221110 - DNA, 20 bp, synthetic construct
  source 1..20: mol_type = other DNA
tagataatttgaaatttaaa

SEQ ID NO: 221111 - DNA, 20 bp, synthetic construct
  source 1..20: mol_type = other DNA
atagataatttgaaatttaa

SEQ ID NO: 221112 - DNA, 20 bp, synthetic construct
  source 1..20: mol_type = other DNA
tatagataatttgaaattta

SEQ ID NO: 221113 - DNA, 20 bp, synthetic construct
  source 1..20: mol_type = other DNA
gtatagataatttgaaattt

SEQ ID NO: 221114 - DNA, 20 bp, synthetic construct
  source 1..20: mol_type = other DNA
agtatagataatttgaaatt

SEQ ID NO: 221115 - DNA, 20 bp, synthetic construct
  source 1..20: mol_type = other DNA
gagtatagataatttgaaat

SEQ ID NO: 221116 - DNA, 20 bp, synthetic construct
  source 1..20: mol_type = other DNA
tgagtatagataatttgaaa

SEQ ID NO: 221117 - DNA, 20 bp, synthetic construct
  source 1..20: mol_type = other DNA
atgagtatagataatttgaa

SEQ ID NO: 221118 - DNA, 20 bp, synthetic construct
  source 1..20: mol_type = other DNA
aatgagtatagataatttga

SEQ ID NO: 221119 - DNA, 20 bp, synthetic construct
  source 1..20: mol_type = other DNA
caatgagtatagataatttg

SEQ ID NO: 221120 - DNA, 20 bp, synthetic construct
  source 1..20: mol_type = other DNA
tcaatgagtatagataattt

SEQ ID NO: 221121 - DNA, 20 bp, synthetic construct
  source 1..20: mol_type = other DNA
ttcaatgagtatagataatt

SEQ ID NO: 221122 - DNA, 20 bp, synthetic construct
  source 1..20: mol_type = other DNA
tttcaatgagtatagataat

SEQ ID NO: 221123 - DNA, 20 bp, synthetic construct
  source 1..20: mol_type = other DNA
atttcaatgagtatagataa

SEQ ID NO: 221124 - DNA, 20 bp, synthetic construct
  source 1..20: mol_type = other DNA
tatttcaatgagtatagata

SEQ ID NO: 221125 - DNA, 20 bp, synthetic construct
  source 1..20: mol_type = other DNA
ttatttcaatgagtatagat

SEQ ID NO: 221126 - DNA, 20 bp, synthetic construct
  source 1..20: mol_type = other DNA
tttatttcaatgagtataga

SEQ ID NO: 221127 - DNA, 20 bp, synthetic construct
  source 1..20: mol_type = other DNA
atttatttcaatgagtatag

SEQ ID NO: 221128 - DNA, 20 bp, synthetic construct
  source 1..20: mol_type = other DNA
gatttatttcaatgagtata

SEQ ID NO: 221129 - DNA, 20 bp, synthetic construct
  source 1..20: mol_type = other DNA
tgatttatttcaatgagtat

SEQ ID NO: 221130 - DNA, 20 bp, synthetic construct
  source 1..20: mol_type = other DNA
ttgatttatttcaatgagta

SEQ ID NO: 221131 - DNA, 20 bp, synthetic construct
  source 1..20: mol_type = other DNA
tttgatttatttcaatgagt

SEQ ID NO: 221132 - DNA, 20 bp, synthetic construct
  source 1..20: mol_type = other DNA
ttttgatttatttcaatgag

SEQ ID NO: 221133 - DNA, 20 bp, synthetic construct
  source 1..20: mol_type = other DNA
attttgatttatttcaatga

SEQ ID NO: 221134 - DNA, 20 bp, synthetic construct
  source 1..20: mol_type = other DNA
tattttgatttatttcaatg

SEQ ID NO: 221135 - DNA, 20 bp, synthetic construct
  source 1..20: mol_type = other DNA
ctattttgatttatttcaat

SEQ ID NO: 221136 - DNA, 20 bp, synthetic construct
  source 1..20: mol_type = other DNA
gctattttgatttatttcaa

SEQ ID NO: 221137 - DNA, 20 bp, synthetic construct
  source 1..20: mol_type = other DNA
tgctattttgatttatttca

SEQ ID NO: 221138 - DNA, 20 bp, synthetic construct
  source 1..20: mol_type = other DNA
atgctattttgatttatttc

SEQ ID NO: 221139 - DNA, 20 bp, synthetic construct
  source 1..20: mol_type = other DNA
catgctattttgatttattt

SEQ ID NO: 221140 - DNA, 20 bp, synthetic construct
  source 1..20: mol_type = other DNA
ccatgctattttgatttatt

SEQ ID NO: 221141 - DNA, 20 bp, synthetic construct
  source 1..20: mol_type = other DNA
tccatgctattttgatttat

SEQ ID NO: 221142 - DNA, 20 bp, synthetic construct
  source 1..20: mol_type = other DNA
ttccatgctattttgattta

SEQ ID NO: 221143 - DNA, 20 bp, synthetic construct
  source 1..20: mol_type = other DNA
attccatgctattttgattt

SEQ ID NO: 221144 - DNA, 20 bp, synthetic construct
  source 1..20: mol_type = other DNA
tattccatgctattttgatt

SEQ ID NO: 221145 - DNA, 20 bp, synthetic construct
  source 1..20: mol_type = other DNA
ttattccatgctattttgat

SEQ ID NO: 221146 - DNA, 20 bp, synthetic construct
  source 1..20: mol_type = other DNA
cttattccatgctattttga

SEQ ID NO: 221147 - DNA, 20 bp, synthetic construct
  source 1..20: mol_type = other DNA
gcttattccatgctattttg

SEQ ID NO: 221148 - DNA, 20 bp, synthetic construct
  source 1..20: mol_type = other DNA
cgcttattccatgctatttt

SEQ ID NO: 221149 - DNA, 20 bp, synthetic construct
  source 1..20: mol_type = other DNA
tcgcttattccatgctattt

SEQ ID NO: 221150 - DNA, 20 bp, synthetic construct
  source 1..20: mol_type = other DNA
ttcgcttattccatgctatt

SEQ ID NO: 221151 - DNA, 20 bp, synthetic construct
  source 1..20: mol_type = other DNA
tttcgcttattccatgctat

SEQ ID NO: 221152 - DNA, 20 bp, synthetic construct
  source 1..20: mol_type = other DNA
ttttcgcttattccatgcta

SEQ ID NO: 221153 - DNA, 20 bp, synthetic construct
  source 1..20: mol_type = other DNA
tttttcgcttattccatgct

SEQ ID NO: 221154 - DNA, 20 bp, synthetic construct
  source 1..20: mol_type = other DNA
ttttttcgcttattccatgc

SEQ ID NO: 221155 - DNA, 20 bp, synthetic construct
  source 1..20: mol_type = other DNA
tttttttcgcttattccatg

SEQ ID NO: 221156 - DNA, 20 bp, synthetic construct
  source 1..20: mol_type = other DNA
atttttttcgcttattccat

SEQ ID NO: 221157 - DNA, 20 bp, synthetic construct
  source 1..20: mol_type = other DNA
catttttttcgcttattcca

SEQ ID NO: 221158 - DNA, 20 bp, synthetic construct
  source 1..20: mol_type = other DNA
ccatttttttcgcttattcc

SEQ ID NO: 221159 - DNA, 20 bp, synthetic construct
  source 1..20: mol_type = other DNA
tccatttttttcgcttattc

SEQ ID NO: 221160 - DNA, 20 bp, synthetic construct
  source 1..20: mol_type = other DNA
atccatttttttcgcttatt

SEQ ID NO: 221161 - DNA, 20 bp, synthetic construct
  source 1..20: mol_type = other DNA
gatccatttttttcgcttat

SEQ ID NO: 221162 - DNA, 20 bp, synthetic construct
  source 1..20: mol_type = other DNA
ggatccatttttttcgctta

SEQ ID NO: 221163 - DNA, 20 bp, synthetic construct
  source 1..20: mol_type = other DNA
gggatccatttttttcgctt

SEQ ID NO: 221164 - DNA, 20 bp, synthetic construct
  source 1..20: mol_type = other DNA
tgggatccatttttttcgct

SEQ ID NO: 221165 - DNA, 20 bp, synthetic construct
  source 1..20: mol_type = other DNA
gtgggatccatttttttcgc

SEQ ID NO: 221166 - DNA, 20 bp, synthetic construct
  source 1..20: mol_type = other DNA
ggtgggatccatttttttcg

SEQ ID NO: 221167 - DNA, 20 bp, synthetic construct
  source 1..20: mol_type = other DNA
gggtgggatccatttttttc

SEQ ID NO: 221168 - DNA, 20 bp, synthetic construct
  source 1..20: mol_type = other DNA
agggtgggatccattttttt

SEQ ID NO: 221169 - DNA, 20 bp, synthetic construct
  source 1..20: mol_type = other DNA
aagggtgggatccatttttt

SEQ ID NO: 221170 - DNA, 20 bp, synthetic construct
  source 1..20: mol_type = other DNA
gaagggtgggatccattttt

SEQ ID NO: 221171 - DNA, 20 bp, synthetic construct
  source 1..20: mol_type = other DNA
ggaagggtgggatccatttt

SEQ ID NO: 221172 - DNA, 20 bp, synthetic construct
  source 1..20: mol_type = other DNA
gggaagggtgggatccattt

SEQ ID NO: 221173 - DNA, 20 bp, synthetic construct
  source 1..20: mol_type = other DNA
ggggaagggtgggatccatt

SEQ ID NO: 221174 - DNA, 20 bp, synthetic construct
  source 1..20: mol_type = other DNA
tggggaagggtgggatccat

SEQ ID NO: 221175 - DNA, 20 bp, synthetic construct
  source 1..20: mol_type = other DNA
gtggggaagggtgggatcca

SEQ ID NO: 221176 - DNA, 20 bp, synthetic construct
  source 1..20: mol_type = other DNA
agtggggaagggtgggatcc

SEQ ID NO: 221177 - DNA, 20 bp, synthetic construct
  source 1..20: mol_type = other DNA
gagtggggaagggtgggatc

SEQ ID NO: 221178 - DNA, 20 bp, synthetic construct
  source 1..20: mol_type = other DNA
ggagtggggaagggtgggat

SEQ ID NO: 221179 - DNA, 20 bp, synthetic construct
  source 1..20: mol_type = other DNA
gggagtggggaagggtggga

SEQ ID NO: 221180 - DNA, 20 bp, synthetic construct
  source 1..20: mol_type = other DNA
tgggagtggggaagggtggg

SEQ ID NO: 221181 - DNA, 20 bp, synthetic construct
  source 1..20: mol_type = other DNA
atgggagtggggaagggtgg

SEQ ID NO: 221182 - DNA, 20 bp, synthetic construct
  source 1..20: mol_type = other DNA
aatgggagtggggaagggtg

SEQ ID NO: 221183 - DNA, 20 bp, synthetic construct
  source 1..20: mol_type = other DNA
gaatgggagtggggaagggt

SEQ ID NO: 221184 - DNA, 20 bp, synthetic construct
  source 1..20: mol_type = other DNA
ggaatgggagtggggaaggg

SEQ ID NO: 221185 - DNA, 20 bp, synthetic construct
  source 1..20: mol_type = other DNA
gggaatgggagtggggaagg

SEQ ID NO: 221186 - DNA, 20 bp, synthetic construct
  source 1..20: mol_type = other DNA
agggaatgggagtggggaag

SEQ ID NO: 221187 - DNA, 20 bp, synthetic construct
  source 1..20: mol_type = other DNA
tagggaatgggagtggggaa

SEQ ID NO: 221188 - DNA, 20 bp, synthetic construct
  source 1..20: mol_type = other DNA
ctagggaatgggagtgggga

SEQ ID NO: 221189 - DNA, 20 bp, synthetic construct
  source 1..20: mol_type = other DNA
cctagggaatgggagtgggg

SEQ ID NO: 221190 - DNA, 20 bp, synthetic construct
  source 1..20: mol_type = other DNA
ccctagggaatgggagtggg

SEQ ID NO: 221191 - DNA, 20 bp, synthetic construct
  source 1..20: mol_type = other DNA
gccctagggaatgggagtgg

SEQ ID NO: 221192 - DNA, 20 bp, synthetic construct
  source 1..20: mol_type = other DNA
agccctagggaatgggagtg

SEQ ID NO: 221193 - DNA, 20 bp, synthetic construct
  source 1..20: mol_type = other DNA
tagccctagggaatgggagt

SEQ ID NO: 221194 - DNA, 20 bp, synthetic construct
  source 1..20: mol_type = other DNA
ttagccctagggaatgggag

SEQ ID NO: 221195 - DNA, 20 bp, synthetic construct
  source 1..20: mol_type = other DNA
gttagccctagggaatggga

SEQ ID NO: 221196 - DNA, 20 bp, synthetic construct
  source 1..20: mol_type = other DNA
ggttagccctagggaatggg

SEQ ID NO: 221197 - DNA, 20 bp, synthetic construct
  source 1..20: mol_type = other DNA
tggttagccctagggaatgg

SEQ ID NO: 221198 - DNA, 20 bp, synthetic construct
  source 1..20: mol_type = other DNA
atggttagccctagggaatg

SEQ ID NO: 221199 - DNA, 20 bp, synthetic construct
  source 1..20: mol_type = other DNA
tatggttagccctagggaat

SEQ ID NO: 221200 - DNA, 20 bp, synthetic construct
  source 1..20: mol_type = other DNA
ctatggttagccctagggaa

SEQ ID NO: 221201 - DNA, 20 bp, synthetic construct
  source 1..20: mol_type = other DNA
actatggttagccctaggga

SEQ ID NO: 221202 - DNA, 20 bp, synthetic construct
  source 1..20: mol_type = other DNA
aactatggttagccctaggg

SEQ ID NO: 221203 - DNA, 20 bp, synthetic construct
  source 1..20: mol_type = other DNA
taactatggttagccctagg

SEQ ID NO: 221204 - DNA, 20 bp, synthetic construct
  source 1..20: mol_type = other DNA
ttaactatggttagccctag

SEQ ID NO: 221205 - DNA, 20 bp, synthetic construct
  source 1..20: mol_type = other DNA
gttaactatggttagcccta

SEQ ID NO: 221206 - DNA, 20 bp, synthetic construct
  source 1..20: mol_type = other DNA
ggttaactatggttagccct

SEQ ID NO: 221207 - DNA, 20 bp, synthetic construct
  source 1..20: mol_type = other DNA
tggttaactatggttagccc

SEQ ID NO: 221208 - DNA, 20 bp, synthetic construct
  source 1..20: mol_type = other DNA
atggttaactatggttagcc

SEQ ID NO: 221209 - DNA, 20 bp, synthetic construct
  source 1..20: mol_type = other DNA
aatggttaactatggttagc

SEQ ID NO: 221210 - DNA, 20 bp, synthetic construct
  source 1..20: mol_type = other DNA
aaatggttaactatggttag

SEQ ID NO: 221211 - DNA, 20 bp, synthetic construct
  source 1..20: mol_type = other DNA
taaatggttaactatggtta

SEQ ID NO: 221212 - DNA, 20 bp, synthetic construct
  source 1..20: mol_type = other DNA
ttaaatggttaactatggtt

SEQ ID NO: 221213 - DNA, 20 bp, synthetic construct
  source 1..20: mol_type = other DNA
attaaatggttaactatggt

SEQ ID NO: 221214 - DNA, 20 bp, synthetic construct
  source 1..20: mol_type = other DNA
cattaaatggttaactatgg

SEQ ID NO: 221215 - DNA, 20 bp, synthetic construct
  source 1..20: mol_type = other DNA
tcattaaatggttaactatg

SEQ ID NO: 221216 - DNA, 20 bp, synthetic construct
  source 1..20: mol_type = other DNA
gtcattaaatggttaactat

SEQ ID NO: 221217 - DNA, 20 bp, synthetic construct
  source 1..20: mol_type = other DNA
agtcattaaatggttaacta

SEQ ID NO: 221218 - DNA, 20 bp, synthetic construct
  source 1..20: mol_type = other DNA
tagtcattaaatggttaact

SEQ ID NO: 221219 - DNA, 20 bp, synthetic construct
  source 1..20: mol_type = other DNA
ctagtcattaaatggttaac

SEQ ID NO: 221220 - DNA, 20 bp, synthetic construct
  source 1..20: mol_type = other DNA
cctagtcattaaatggttaa

SEQ ID NO: 221221 - DNA, 20 bp, synthetic construct
  source 1..20: mol_type = other DNA
acctagtcattaaatggtta

SEQ ID NO: 221222 - DNA, 20 bp, synthetic construct
  source 1..20: mol_type = other DNA
aacctagtcattaaatggtt

SEQ ID NO: 221223 - DNA, 20 bp, synthetic construct
  source 1..20: mol_type = other DNA
aaacctagtcattaaatggt

SEQ ID NO: 221224 - DNA, 20 bp, synthetic construct
  source 1..20: mol_type = other DNA
aaaacctagtcattaaatgg

SEQ ID NO: 221225 - DNA, 20 bp, synthetic construct
  source 1..20: mol_type = other DNA
aaaaacctagtcattaaatg

SEQ ID NO: 221226 - DNA, 20 bp, synthetic construct
  source 1..20: mol_type = other DNA
aaaaaacctagtcattaaat

SEQ ID NO: 221227 - DNA, 20 bp, synthetic construct
  source 1..20: mol_type = other DNA
aaaaaaacctagtcattaaa

SEQ ID NO: 221228 - DNA, 20 bp, synthetic construct
  source 1..20: mol_type = other DNA
caaaaaaacctagtcattaa

SEQ ID NO: 221229 - DNA, 20 bp, synthetic construct
  source 1..20: mol_type = other DNA
acaaaaaaacctagtcatta

SEQ ID NO: 221230 - DNA, 20 bp, synthetic construct
  source 1..20: mol_type = other DNA
aacaaaaaaacctagtcatt

SEQ ID NO: 221231 - DNA, 20 bp, synthetic construct
  source 1..20: mol_type = other DNA
caacaaaaaaacctagtcat

SEQ ID NO: 221232 - DNA, 20 bp, synthetic construct
  source 1..20: mol_type = other DNA
acaacaaaaaaacctagtca

SEQ ID NO: 221233 - DNA, 20 bp, synthetic construct
  source 1..20: mol_type = other DNA
aacaacaaaaaaacctagtc

SEQ ID NO: 221234 - DNA, 20 bp, synthetic construct
  source 1..20: mol_type = other DNA
caacaacaaaaaaacctagt

SEQ ID NO: 221235 - DNA, 20 bp, synthetic construct
  source 1..20: mol_type = other DNA
acaacaacaaaaaaacctag

SEQ ID NO: 221236 - DNA, 20 bp, synthetic construct
  source 1..20: mol_type = other DNA
aacaacaacaaaaaaaccta

SEQ ID NO: 221237 - DNA, 20 bp, synthetic construct
  source 1..20: mol_type = other DNA
taacaacaacaaaaaaacct

SEQ ID NO: 221238 - DNA, 20 bp, synthetic construct
  source 1..20: mol_type = other DNA
ataacaacaacaaaaaaacc

SEQ ID NO: 221239 - DNA, 20 bp, synthetic construct
  source 1..20: mol_type = other DNA
aataacaacaacaaaaaaac

SEQ ID NO: 221240 - DNA, 20 bp, synthetic construct
  source 1..20: mol_type = other DNA
aaataacaacaacaaaaaaa

SEQ ID NO: 221241 - DNA, 20 bp, synthetic construct
  source 1..20: mol_type = other DNA
aaaataacaacaacaaaaaa

SEQ ID NO: 221242 - DNA, 20 bp, synthetic construct
  source 1..20: mol_type = other DNA
aaaaataacaacaacaaaaa

SEQ ID NO: 221243 - DNA, 20 bp, synthetic construct
  source 1..20: mol_type = other DNA
aaaaaataacaacaacaaaa

SEQ ID NO: 221244 - DNA, 20 bp, synthetic construct
  source 1..20: mol_type = other DNA
taaaaaataacaacaacaaa

SEQ ID NO: 221245 - DNA, 20 bp, synthetic construct
  source 1..20: mol_type = other DNA
ataaaaaataacaacaacaa

SEQ ID NO: 221246 - DNA, 20 bp, synthetic construct
  source 1..20: mol_type = other DNA
aataaaaaataacaacaaca

SEQ ID NO: 221247 - DNA, 20 bp, synthetic construct
  source 1..20: mol_type = other DNA
aaataaaaaataacaacaac

SEQ ID NO: 221248 - DNA, 20 bp, synthetic construct
  source 1..20: mol_type = other DNA
taaataaaaaataacaacaa

SEQ ID NO: 221249 - DNA, 20 bp, synthetic construct
  source 1..20: mol_type = other DNA
ataaataaaaaataacaaca

SEQ ID NO: 221250 - DNA, 20 bp, synthetic construct
  source 1..20: mol_type = other DNA
aataaataaaaaataacaac

SEQ ID NO: 221251 - DNA, 20 bp, synthetic construct
  source 1..20: mol_type = other DNA
aaataaataaaaaataacaa

SEQ ID NO: 221252 - DNA, 20 bp, synthetic construct
  source 1..20: mol_type = other DNA
taaataaataaaaaataaca

SEQ ID NO: 221253 - DNA, 20 bp, synthetic construct
  source 1..20: mol_type = other DNA
ataaataaataaaaaataac

SEQ ID NO: 221254 - DNA, 20 bp, synthetic construct
  source 1..20: mol_type = other DNA
aataaataaataaaaaataa

SEQ ID NO: 221255 - DNA, 20 bp, synthetic construct
  source 1..20: mol_type = other DNA
aaataaataaataaaaaata

SEQ ID NO: 221256 - DNA, 20 bp, synthetic construct
  source 1..20: mol_type = other DNA
aaaataaataaataaaaaat

SEQ ID NO: 221257 - DNA, 20 bp, synthetic construct
  source 1..20: mol_type = other DNA
caaaataaataaataaaaaa

SEQ ID NO: 221258 - DNA, 20 bp, synthetic construct
  source 1..20: mol_type = other DNA
tcaaaataaataaataaaaa

SEQ ID NO: 221259 - DNA, 20 bp, synthetic construct
  source 1..20: mol_type = other DNA
ctcaaaataaataaataaaa

SEQ ID NO: 221260 - DNA, 20 bp, synthetic construct
  source 1..20: mol_type = other DNA
tctcaaaataaataaataaa

SEQ ID NO: 221261 - DNA, 20 bp, synthetic construct
  source 1..20: mol_type = other DNA
gtctcaaaataaataaataa

SEQ ID NO: 221262 - DNA, 20 bp, synthetic construct
  source 1..20: mol_type = other DNA
tgtctcaaaataaataaata

SEQ ID NO: 221263 - DNA, 20 bp, synthetic construct
  source 1..20: mol_type = other DNA
ctgtctcaaaataaataaat

SEQ ID NO: 221264 - DNA, 20 bp, synthetic construct
  source 1..20: mol_type = other DNA
tctgtctcaaaataaataaa

SEQ ID NO: 221265 - DNA, 20 bp, synthetic construct
  source 1..20: mol_type = other DNA
ctctgtctcaaaataaataa

SEQ ID NO: 221266 - DNA, 20 bp, synthetic construct
  source 1..20: mol_type = other DNA
actctgtctcaaaataaata

SEQ ID NO: 221267 - DNA, 20 bp, synthetic construct
  source 1..20: mol_type = other DNA
gactctgtctcaaaataaat

SEQ ID NO: 221268 - DNA, 20 bp, synthetic construct
  source 1..20: mol_type = other DNA
agactctgtctcaaaataaa

SEQ ID NO: 221269 - DNA, 20 bp, synthetic construct
  source 1..20: mol_type = other DNA
aagactctgtctcaaaataa

SEQ ID NO: 221270 - DNA, 20 bp, synthetic construct
  source 1..20: mol_type = other DNA
taagactctgtctcaaaata

SEQ ID NO: 221271 - DNA, 20 bp, synthetic construct
  source 1..20: mol_type = other DNA
gtaagactctgtctcaaaat

SEQ ID NO: 221272 - DNA, 20 bp, synthetic construct
  source 1..20: mol_type = other DNA
agtaagactctgtctcaaaa

SEQ ID NO: 221273 - DNA, 20 bp, synthetic construct
  source 1..20: mol_type = other DNA
gagtaagactctgtctcaaa

SEQ ID NO: 221274 - DNA, 20 bp, synthetic construct
  source 1..20: mol_type = other DNA
agagtaagactctgtctcaa

SEQ ID NO: 221275 - DNA, 20 bp, synthetic construct
  source 1..20: mol_type = other DNA
cagagtaagactctgtctca

SEQ ID NO: 221276 - DNA, 20 bp, synthetic construct
  source 1..20: mol_type = other DNA
acagagtaagactctgtctc

SEQ ID NO: 221277 - DNA, 20 bp, synthetic construct
  source 1..20: mol_type = other DNA
gacagagtaagactctgtct

SEQ ID NO: 221278 - DNA, 20 bp, synthetic construct
  source 1..20: mol_type = other DNA
tgacagagtaagactctgtc

SEQ ID NO: 221279 - DNA, 20 bp, synthetic construct
  source 1..20: mol_type = other DNA
gtgacagagtaagactctgt

SEQ ID NO: 221280 - DNA, 20 bp, synthetic construct
  source 1..20: mol_type = other DNA
ggtgacagagtaagactctg

SEQ ID NO: 221281 - DNA, 20 bp, synthetic construct
  source 1..20: mol_type = other DNA
gggtgacagagtaagactct

SEQ ID NO: 221282 - DNA, 20 bp, synthetic construct
  source 1..20: mol_type = other DNA
tgggtgacagagtaagactc

SEQ ID NO: 221283 - DNA, 20 bp, synthetic construct
  source 1..20: mol_type = other DNA
ctgggtgacagagtaagact

SEQ ID NO: 221284 - DNA, 20 bp, synthetic construct
  source 1..20: mol_type = other DNA
cctgggtgacagagtaagac

SEQ ID NO: 221285 - DNA, 20 bp, synthetic construct
  source 1..20: mol_type = other DNA
gcctgggtgacagagtaaga

SEQ ID NO: 221286 - DNA, 20 bp, synthetic construct
  source 1..20: mol_type = other DNA
agcctgggtgacagagtaag

SEQ ID NO: 221287 - DNA, 20 bp, synthetic construct
  source 1..20: mol_type = other DNA
cagcctgggtgacagagtaa

SEQ ID NO: 221288 - DNA, 20 bp, synthetic construct
  source 1..20: mol_type = other DNA
ccagcctgggtgacagagta

SEQ ID NO: 221289 - DNA, 20 bp, synthetic construct
  source 1..20: mol_type = other DNA
tccagcctgggtgacagagt

SEQ ID NO: 221290 - DNA, 20 bp, synthetic construct
  source 1..20: mol_type = other DNA
ctccagcctgggtgacagag

SEQ ID NO: 221291 - DNA, 20 bp, synthetic construct
  source 1..20: mol_type = other DNA
actccagcctgggtgacaga

SEQ ID NO: 221292 - DNA, 20 bp, synthetic construct
  source 1..20: mol_type = other DNA
cactccagcctgggtgacag

SEQ ID NO: 221293 - DNA, 20 bp, synthetic construct
  source 1..20: mol_type = other DNA
gcactccagcctgggtgaca

SEQ ID NO: 221294 - DNA, 20 bp, synthetic construct
  source 1..20: mol_type = other DNA
tgcactccagcctgggtgac

SEQ ID NO: 221295 - DNA, 20 bp, synthetic construct
  source 1..20: mol_type = other DNA
ctgcactccagcctgggtga

SEQ ID NO: 221296 - DNA, 20 bp, synthetic construct
  source 1..20: mol_type = other DNA
actgcactccagcctgggtg

SEQ ID NO: 221297 - DNA, 20 bp, synthetic construct
  source 1..20: mol_type = other DNA
cactgcactccagcctgggt

SEQ ID NO: 221298 - DNA, 20 bp, synthetic construct
  source 1..20: mol_type = other DNA
ccactgcactccagcctggg

SEQ ID NO: 221299 - DNA, 20 bp, synthetic construct
  source 1..20: mol_type = other DNA
accactgcactccagcctgg

SEQ ID NO: 221300 - DNA, 20 bp, synthetic construct
  source 1..20: mol_type = other DNA
caccactgcactccagcctg

SEQ ID NO: 221301 - DNA, 20 bp, synthetic construct
  source 1..20: mol_type = other DNA
acaccactgcactccagcct

SEQ ID NO: 221302 - DNA, 20 bp, synthetic construct
  source 1..20: mol_type = other DNA
cacaccactgcactccagcc

SEQ ID NO: 221303 - DNA, 20 bp, synthetic construct
  source 1..20: mol_type = other DNA
tcacaccactgcactccagc

SEQ ID NO: 221304 - DNA, 20 bp, synthetic construct
  source 1..20: mol_type = other DNA
atcacaccactgcactccag

SEQ ID NO: 221305 - DNA, 20 bp, synthetic construct
  source 1..20: mol_type = other DNA
gatcacaccactgcactcca

SEQ ID NO: 221306 - DNA, 20 bp, synthetic construct
  source 1..20: mol_type = other DNA
agatcacaccactgcactcc

SEQ ID NO: 221307 - DNA, 20 bp, synthetic construct
  source 1..20: mol_type = other DNA
gagatcacaccactgcactc

SEQ ID NO: 221308 - DNA, 20 bp, synthetic construct
  source 1..20: mol_type = other DNA
cgagatcacaccactgcact

SEQ ID NO: 221309 - DNA, 20 bp, synthetic construct
  source 1..20: mol_type = other DNA
ccgagatcacaccactgcac

SEQ ID NO: 221310 - DNA, 20 bp, synthetic construct
  source 1..20: mol_type = other DNA
gccgagatcacaccactgca

SEQ ID NO: 221311 - DNA, 20 bp, synthetic construct
  source 1..20: mol_type = other DNA
agccgagatcacaccactgc

SEQ ID NO: 221312 - DNA, 20 bp, synthetic construct
  source 1..20: mol_type = other DNA
gagccgagatcacaccactg

SEQ ID NO: 221313 - DNA, 20 bp, synthetic construct
  source 1..20: mol_type = other DNA
tgagccgagatcacaccact

SEQ ID NO: 221314 - DNA, 20 bp, synthetic construct
  source 1..20: mol_type = other DNA
gtgagccgagatcacaccac

SEQ ID NO: 221315 - DNA, 20 bp, synthetic construct
  source 1..20: mol_type = other DNA
agtgagccgagatcacacca

SEQ ID NO: 221316 - DNA, 20 bp, synthetic construct
  source 1..20: mol_type = other DNA
cagtgagccgagatcacacc

SEQ ID NO: 221317 - DNA, 20 bp, synthetic construct
  source 1..20: mol_type = other DNA
gcagtgagccgagatcacac

SEQ ID NO: 221318 - DNA, 20 bp, synthetic construct
  source 1..20: mol_type = other DNA
tgcagtgagccgagatcaca

SEQ ID NO: 221319 - DNA, 20 bp, synthetic construct
  source 1..20: mol_type = other DNA
ttgcagtgagccgagatcac

SEQ ID NO: 221320 - DNA, 20 bp, synthetic construct
  source 1..20: mol_type = other DNA
gttgcagtgagccgagatca

SEQ ID NO: 221321 - DNA, 20 bp, synthetic construct
  source 1..20: mol_type = other DNA
ggttgcagtgagccgagatc

SEQ ID NO: 221322 - DNA, 20 bp, synthetic construct
  source 1..20: mol_type = other DNA
aggttgcagtgagccgagat

SEQ ID NO: 221323 - DNA, 20 bp, synthetic construct
  source 1..20: mol_type = other DNA
gaggttgcagtgagccgaga

SEQ ID NO: 221324 - DNA, 20 bp, synthetic construct
  source 1..20: mol_type = other DNA
agaggttgcagtgagccgag

SEQ ID NO: 221325 - DNA, 20 bp, synthetic construct
  source 1..20: mol_type = other DNA
cagaggttgcagtgagccga

SEQ ID NO: 221326 - DNA, 20 bp, synthetic construct
  source 1..20: mol_type = other DNA
gcagaggttgcagtgagccg

SEQ ID NO: 221327 - DNA, 20 bp, synthetic construct
  source 1..20: mol_type = other DNA
ggcagaggttgcagtgagcc

SEQ ID NO: 221328 - DNA, 20 bp, synthetic construct
  source 1..20: mol_type = other DNA
aggcagaggttgcagtgagc

SEQ ID NO: 221329 - DNA, 20 bp, synthetic construct
  source 1..20: mol_type = other DNA
gaggcagaggttgcagtgag

SEQ ID NO: 221330 - DNA, 20 bp, synthetic construct
  source 1..20: mol_type = other DNA
ggaggcagaggttgcagtga

SEQ ID NO: 221331 - DNA, 20 bp, synthetic construct
  source 1..20: mol_type = other DNA
gggaggcagaggttgcagtg

SEQ ID NO: 221332 - DNA, 20 bp, synthetic construct
  source 1..20: mol_type = other DNA
tgggaggcagaggttgcagt

SEQ ID NO: 221333 - DNA, 20 bp, synthetic construct
  source 1..20: mol_type = other DNA
ctgggaggcagaggttgcag

SEQ ID NO: 221334 - DNA, 20 bp, synthetic construct
  source 1..20: mol_type = other DNA
cctgggaggcagaggttgca

SEQ ID NO: 221335 - DNA, 20 bp, synthetic construct
  source 1..20: mol_type = other DNA
acctgggaggcagaggttgc

SEQ ID NO: 221336 - DNA, 20 bp, synthetic construct
  source 1..20: mol_type = other DNA
aacctgggaggcagaggttg

SEQ ID NO: 221337 - DNA, 20 bp, synthetic construct
  source 1..20: mol_type = other DNA
gaacctgggaggcagaggtt

SEQ ID NO: 221338 - DNA, 20 bp, synthetic construct
  source 1..20: mol_type = other DNA
tgaacctgggaggcagaggt

SEQ ID NO: 221339 - DNA, 20 bp, synthetic construct
  source 1..20: mol_type = other DNA
ttgaacctgggaggcagagg

SEQ ID NO: 221340 - DNA, 20 bp, synthetic construct
  source 1..20: mol_type = other DNA
cttgaacctgggaggcagag

SEQ ID NO: 221341 - DNA, 20 bp, synthetic construct
  source 1..20: mol_type = other DNA
gcttgaacctgggaggcaga

SEQ ID NO: 221342 - DNA, 20 bp, synthetic construct
  source 1..20: mol_type = other DNA
tgcttgaacctgggaggcag

SEQ ID NO: 221343 - DNA, 20 bp, synthetic construct
  source 1..20: mol_type = other DNA
atgcttgaacctgggaggca

SEQ ID NO: 221344 - DNA, 20 bp, synthetic construct
  source 1..20: mol_type = other DNA
aatgcttgaacctgggaggc

SEQ ID NO: 221345 - DNA, 20 bp, synthetic construct
  source 1..20: mol_type = other DNA
gaatgcttgaacctgggagg

SEQ ID NO: 221346 - DNA, 20 bp, synthetic construct
  source 1..20: mol_type = other DNA
agaatgcttgaacctgggag

SEQ ID NO: 221347 - DNA, 20 bp, synthetic construct
  source 1..20: mol_type = other DNA
gagaatgcttgaacctggga

SEQ ID NO: 221348 - DNA, 20 bp, synthetic construct
  source 1..20: mol_type = other DNA
ggagaatgcttgaacctggg

SEQ ID NO: 221349 - DNA, 20 bp, synthetic construct
  source 1..20: mol_type = other DNA
aggagaatgcttgaacctgg

SEQ ID NO: 221350 - DNA, 20 bp, synthetic construct
  source 1..20: mol_type = other DNA
caggagaatgcttgaacctg

SEQ ID NO: 221351 - DNA, 20 bp, synthetic construct
  source 1..20: mol_type = other DNA
gcaggagaatgcttgaacct

SEQ ID NO: 221352 - DNA, 20 bp, synthetic construct
  source 1..20: mol_type = other DNA
ggcaggagaatgcttgaacc

SEQ ID NO: 221353 - DNA, 20 bp, synthetic construct
  source 1..20: mol_type = other DNA
aggcaggagaatgcttgaac

SEQ ID NO: 221354 - DNA, 20 bp, synthetic construct
  source 1..20: mol_type = other DNA
gaggcaggagaatgcttgaa

SEQ ID NO: 221355 - DNA, 20 bp, synthetic construct
  source 1..20: mol_type = other DNA
agaggcaggagaatgcttga

SEQ ID NO: 221356 - DNA, 20 bp, synthetic construct
  source 1..20: mol_type = other DNA
cagaggcaggagaatgcttg

SEQ ID NO: 221357 - DNA, 20 bp, synthetic construct
  source 1..20: mol_type = other DNA
gcagaggcaggagaatgctt

SEQ ID NO: 221358 - DNA, 20 bp, synthetic construct
  source 1..20: mol_type = other DNA
ggcagaggcaggagaatgct

SEQ ID NO: 221359 - DNA, 20 bp, synthetic construct
  source 1..20: mol_type = other DNA
aggcagaggcaggagaatgc

SEQ ID NO: 221360 - DNA, 20 bp, synthetic construct
  source 1..20: mol_type = other DNA
gaggcagaggcaggagaatg

SEQ ID NO: 221361 - DNA, 20 bp, synthetic construct
  source 1..20: mol_type = other DNA
ggaggcagaggcaggagaat

SEQ ID NO: 221362 - DNA, 20 bp, synthetic construct
  source 1..20: mol_type = other DNA
aggaggcagaggcaggagaa

SEQ ID NO: 221363 - DNA, 20 bp, synthetic construct
  source 1..20: mol_type = other DNA
caggaggcagaggcaggaga

SEQ ID NO: 221364 - DNA, 20 bp, synthetic construct
  source 1..20: mol_type = other DNA
tcaggaggcagaggcaggag

SEQ ID NO: 221365 - DNA, 20 bp, synthetic construct
  source 1..20: mol_type = other DNA
ctcaggaggcagaggcagga

SEQ ID NO: 221366 - DNA, 20 bp, synthetic construct
  source 1..20: mol_type = other DNA
actcaggaggcagaggcagg

SEQ ID NO: 221367 - DNA, 20 bp, synthetic construct
  source 1..20: mol_type = other DNA
tactcaggaggcagaggcag

SEQ ID NO: 221368 - DNA, 20 bp, synthetic construct
  source 1..20: mol_type = other DNA
ctactcaggaggcagaggca

SEQ ID NO: 221369 - DNA, 20 bp, synthetic construct
  source 1..20: mol_type = other DNA
gctactcaggaggcagaggc

SEQ ID NO: 221370 - DNA, 20 bp, synthetic construct
  source 1..20: mol_type = other DNA
agctactcaggaggcagagg

SEQ ID NO: 221371 - DNA, 20 bp, synthetic construct
  source 1..20: mol_type = other DNA
cagctactcaggaggcagag

SEQ ID NO: 221372 - DNA, 20 bp, synthetic construct
  source 1..20: mol_type = other DNA
ccagctactcaggaggcaga

SEQ ID NO: 221373 - DNA, 20 bp, synthetic construct
  source 1..20: mol_type = other DNA
cccagctactcaggaggcag

SEQ ID NO: 221374 - DNA, 20 bp, synthetic construct
  source 1..20: mol_type = other DNA
tcccagctactcaggaggca

SEQ ID NO: 221375 - DNA, 20 bp, synthetic construct
  source 1..20: mol_type = other DNA
atcccagctactcaggaggc

SEQ ID NO: 221376 - DNA, 20 bp, synthetic construct
  source 1..20: mol_type = other DNA
aatcccagctactcaggagg

SEQ ID NO: 221377 - DNA, 20 bp, synthetic construct
  source 1..20: mol_type = other DNA
taatcccagctactcaggag

SEQ ID NO: 221378 - DNA, 20 bp, synthetic construct
  source 1..20: mol_type = other DNA
gtaatcccagctactcagga

SEQ ID NO: 221379 - DNA, 20 bp, synthetic construct
  source 1..20: mol_type = other DNA
tgtaatcccagctactcagg

SEQ ID NO: 221380 - DNA, 20 bp, synthetic construct
  source 1..20: mol_type = other DNA
ctgtaatcccagctactcag

SEQ ID NO: 221381 - DNA, 20 bp, synthetic construct
  source 1..20: mol_type = other DNA
cctgtaatcccagctactca

SEQ ID NO: 221382 - DNA, 20 bp, synthetic construct
  source 1..20: mol_type = other DNA
acctgtaatcccagctactc

SEQ ID NO: 221383 - DNA, 20 bp, synthetic construct
  source 1..20: mol_type = other DNA
cacctgtaatcccagctact

SEQ ID NO: 221384 - DNA, 20 bp, synthetic construct
  source 1..20: mol_type = other DNA
gcacctgtaatcccagctac

SEQ ID NO: 221385 - DNA, 20 bp, synthetic construct
  source 1..20: mol_type = other DNA
ggcacctgtaatcccagcta

SEQ ID NO: 221386 - DNA, 20 bp, synthetic construct
  source 1..20: mol_type = other DNA
aggcacctgtaatcccagct

SEQ ID NO: 221387 - DNA, 20 bp, synthetic construct
  source 1..20: mol_type = other DNA
caggcacctgtaatcccagc

SEQ ID NO: 221388 - DNA, 20 bp, synthetic construct
  source 1..20: mol_type = other DNA
gcaggcacctgtaatcccag

SEQ ID NO: 221389 - DNA, 20 bp, synthetic construct
  source 1..20: mol_type = other DNA
ggcaggcacctgtaatccca

SEQ ID NO: 221390 - DNA, 20 bp, synthetic construct
  source 1..20: mol_type = other DNA
tggcaggcacctgtaatccc

SEQ ID NO: 221391 - DNA, 20 bp, synthetic construct
  source 1..20: mol_type = other DNA
gtggcaggcacctgtaatcc

SEQ ID NO: 221392 - DNA, 20 bp, synthetic construct
  source 1..20: mol_type = other DNA
ggtggcaggcacctgtaatc

SEQ ID NO: 221393 - DNA, 20 bp, synthetic construct
  source 1..20: mol_type = other DNA
tggtggcaggcacctgtaat

SEQ ID NO: 221394 - DNA, 20 bp, synthetic construct
  source 1..20: mol_type = other DNA
gtggtggcaggcacctgtaa

SEQ ID NO: 221395 - DNA, 20 bp, synthetic construct
  source 1..20: mol_type = other DNA
tgtggtggcaggcacctgta

SEQ ID NO: 221396 - DNA, 20 bp, synthetic construct
  source 1..20: mol_type = other DNA
gtgtggtggcaggcacctgt

SEQ ID NO: 221397 - DNA, 20 bp, synthetic construct
  source 1..20: mol_type = other DNA
ggtgtggtggcaggcacctg

SEQ ID NO: 221398 - DNA, 20 bp, synthetic construct
  source 1..20: mol_type = other DNA
aggtgtggtggcaggcacct

SEQ ID NO: 221399 - DNA, 20 bp, synthetic construct
  source 1..20: mol_type = other DNA
caggtgtggtggcaggcacc

SEQ ID NO: 221400 - DNA, 20 bp, synthetic construct
  source 1..20: mol_type = other DNA
ccaggtgtggtggcaggcac

SEQ ID NO: 221401 - DNA, 20 bp, synthetic construct
  source 1..20: mol_type = other DNA
gccaggtgtggtggcaggca

SEQ ID NO: 221402 - DNA, 20 bp, synthetic construct
  source 1..20: mol_type = other DNA
agccaggtgtggtggcaggc

SEQ ID NO: 221403 - DNA, 20 bp, synthetic construct
  source 1..20: mol_type = other DNA
tagccaggtgtggtggcagg

SEQ ID NO: 221404 - DNA, 20 bp, synthetic construct
  source 1..20: mol_type = other DNA
ttagccaggtgtggtggcag

SEQ ID NO: 221405 - DNA, 20 bp, synthetic construct
  source 1..20: mol_type = other DNA
attagccaggtgtggtggca

SEQ ID NO: 221406 - DNA, 20 bp, synthetic construct
  source 1..20: mol_type = other DNA
aattagccaggtgtggtggc

SEQ ID NO: 221407 - DNA, 20 bp, synthetic construct
  source 1..20: mol_type = other DNA
aaattagccaggtgtggtgg

SEQ ID NO: 221408 - DNA, 20 bp, synthetic construct
  source 1..20: mol_type = other DNA
aaaattagccaggtgtggtg

SEQ ID NO: 221409 - DNA, 20 bp, synthetic construct
  source 1..20: mol_type = other DNA
aaaaattagccaggtgtggt

SEQ ID NO: 221410 - DNA, 20 bp, synthetic construct
  source 1..20: mol_type = other DNA
caaaaattagccaggtgtgg

SEQ ID NO: 221411 - DNA, 20 bp, synthetic construct
  source 1..20: mol_type = other DNA
acaaaaattagccaggtgtg

SEQ ID NO: 221412 - DNA, 20 bp, synthetic construct
  source 1..20: mol_type = other DNA
tacaaaaattagccaggtgt

SEQ ID NO: 221413 - DNA, 20 bp, synthetic construct
  source 1..20: mol_type = other DNA
gtacaaaaattagccaggtg

SEQ ID NO: 221414 - DNA, 20 bp, synthetic construct
  source 1..20: mol_type = other DNA
agtacaaaaattagccaggt

SEQ ID NO: 221415 - DNA, 20 bp, synthetic construct
  source 1..20: mol_type = other DNA
aagtacaaaaattagccagg

SEQ ID NO: 221416 - DNA, 20 bp, synthetic construct
  source 1..20: mol_type = other DNA
aaagtacaaaaattagccag

SEQ ID NO: 221417 - DNA, 20 bp, synthetic construct
  source 1..20: mol_type = other DNA
aaaagtacaaaaattagcca

SEQ ID NO: 221418 - DNA, 20 bp, synthetic construct
  source 1..20: mol_type = other DNA
caaaagtacaaaaattagcc

SEQ ID NO: 221419 - DNA, 20 bp, synthetic construct
  source 1..20: mol_type = other DNA
ccaaaagtacaaaaattagc

SEQ ID NO: 221420 - DNA, 20 bp, synthetic construct
  source 1..20: mol_type = other DNA
accaaaagtacaaaaattag

SEQ ID NO: 221421 - DNA, 20 bp, synthetic construct
  source 1..20: mol_type = other DNA
taccaaaagtacaaaaatta

SEQ ID NO: 221422 - DNA, 20 bp, synthetic construct
  source 1..20: mol_type = other DNA
ctaccaaaagtacaaaaatt

SEQ ID NO: 221423 - DNA, 20 bp, synthetic construct
  source 1..20: mol_type = other DNA
tctaccaaaagtacaaaaat

SEQ ID NO: 221424 - DNA, 20 bp, synthetic construct
  source 1..20: mol_type = other DNA
ctctaccaaaagtacaaaaa

SEQ ID NO: 221425 - DNA, 20 bp, synthetic construct
  source 1..20: mol_type = other DNA
tctctaccaaaagtacaaaa

SEQ ID NO: 221426 - DNA, 20 bp, synthetic construct
  source 1..20: mol_type = other DNA
gtctctaccaaaagtacaaa

SEQ ID NO: 221427 - DNA, 20 bp, synthetic construct
  source 1..20: mol_type = other DNA
tgtctctaccaaaagtacaa

SEQ ID NO: 221428 - DNA, 20 bp, synthetic construct
  source 1..20: mol_type = other DNA
ctgtctctaccaaaagtaca

SEQ ID NO: 221429 - DNA, 20 bp, synthetic construct
  source 1..20: mol_type = other DNA
cctgtctctaccaaaagtac

SEQ ID NO: 221430 - DNA, 20 bp, synthetic construct
  source 1..20: mol_type = other DNA
ccctgtctctaccaaaagta

SEQ ID NO: 221431 - DNA, 20 bp, synthetic construct
  source 1..20: mol_type = other DNA
accctgtctctaccaaaagt

SEQ ID NO: 221432 - DNA, 20 bp, synthetic construct
  source 1..20: mol_type = other DNA
aaccctgtctctaccaaaag

SEQ ID NO: 221433 - DNA, 20 bp, synthetic construct
  source 1..20: mol_type = other DNA
aaaccctgtctctaccaaaa

SEQ ID NO: 221434 - DNA, 20 bp, synthetic construct
  source 1..20: mol_type = other DNA
gaaaccctgtctctaccaaa

SEQ ID NO: 221435 - DNA, 20 bp, synthetic construct
  source 1..20: mol_type = other DNA
agaaaccctgtctctaccaa

SEQ ID NO: 221436 - DNA, 20 bp, synthetic construct
  source 1..20: mol_type = other DNA
gagaaaccctgtctctacca

SEQ ID NO: 221437 - DNA, 20 bp, synthetic construct
  source 1..20: mol_type = other DNA
tgagaaaccctgtctctacc

SEQ ID NO: 221438 - DNA, 20 bp, synthetic construct
  source 1..20: mol_type = other DNA
ttgagaaaccctgtctctac

SEQ ID NO: 221439 - DNA, 20 bp, synthetic construct
  source 1..20: mol_type = other DNA
attgagaaaccctgtctcta

SEQ ID NO: 221440 - DNA, 20 bp, synthetic construct
  source 1..20: mol_type = other DNA
cattgagaaaccctgtctct

SEQ ID NO: 221441 - DNA, 20 bp, synthetic construct
  source 1..20: mol_type = other DNA
acattgagaaaccctgtctc

SEQ ID NO: 221442 - DNA, 20 bp, synthetic construct
  source 1..20: mol_type = other DNA
aacattgagaaaccctgtct

SEQ ID NO: 221443 - DNA, 20 bp, synthetic construct
  source 1..20: mol_type = other DNA
taacattgagaaaccctgtc

SEQ ID NO: 221444 - DNA, 20 bp, synthetic construct
  source 1..20: mol_type = other DNA
ctaacattgagaaaccctgt

SEQ ID NO: 221445 - DNA, 20 bp, synthetic construct
  source 1..20: mol_type = other DNA
gctaacattgagaaaccctg

SEQ ID NO: 221446 - DNA, 20 bp, synthetic construct
  source 1..20: mol_type = other DNA
ggctaacattgagaaaccct

SEQ ID NO: 221447 - DNA, 20 bp, synthetic construct
  source 1..20: mol_type = other DNA
tggctaacattgagaaaccc

SEQ ID NO: 221448 - DNA, 20 bp, synthetic construct
  source 1..20: mol_type = other DNA
ctggctaacattgagaaacc

SEQ ID NO: 221449 - DNA, 20 bp, synthetic construct
  source 1..20: mol_type = other DNA
cctggctaacattgagaaac

SEQ ID NO: 221450 - DNA, 20 bp, synthetic construct
  source 1..20: mol_type = other DNA
gcctggctaacattgagaaa

SEQ ID NO: 221451 - DNA, 20 bp, synthetic construct
  source 1..20: mol_type = other DNA
agcctggctaacattgagaa

SEQ ID NO: 221452 - DNA, 20 bp, synthetic construct
  source 1..20: mol_type = other DNA
cagcctggctaacattgaga

SEQ ID NO: 221453 - DNA, 20 bp, synthetic construct
  source 1..20: mol_type = other DNA
ccagcctggctaacattgag

SEQ ID NO: 221454 - DNA, 20 bp, synthetic construct
  source 1..20: mol_type = other DNA
accagcctggctaacattga

SEQ ID NO: 221455 - DNA, 20 bp, synthetic construct
  source 1..20: mol_type = other DNA
gaccagcctggctaacattg

SEQ ID NO: 221456 - DNA, 20 bp, synthetic construct
  source 1..20: mol_type = other DNA
agaccagcctggctaacatt

SEQ ID NO: 221457 - DNA, 20 bp, synthetic construct
  source 1..20: mol_type = other DNA
gagaccagcctggctaacat

SEQ ID NO: 221458 - DNA, 20 bp, synthetic construct
  source 1..20: mol_type = other DNA
cgagaccagcctggctaaca

SEQ ID NO: 221459 - DNA, 20 bp, synthetic construct
  source 1..20: mol_type = other DNA
tcgagaccagcctggctaac

SEQ ID NO: 221460 - DNA, 20 bp, synthetic construct
  source 1..20: mol_type = other DNA
ttcgagaccagcctggctaa

SEQ ID NO: 221461 - DNA, 20 bp, synthetic construct
  source 1..20: mol_type = other DNA
gttcgagaccagcctggcta

SEQ ID NO: 221462 - DNA, 20 bp, synthetic construct
  source 1..20: mol_type = other DNA
agttcgagaccagcctggct

SEQ ID NO: 221463 - DNA, 20 bp, synthetic construct
  source 1..20: mol_type = other DNA
gagttcgagaccagcctggc

SEQ ID NO: 221464 - DNA, 20 bp, synthetic construct
  source 1..20: mol_type = other DNA
ggagttcgagaccagcctgg

SEQ ID NO: 221465 - DNA, 20 bp, synthetic construct
  source 1..20: mol_type = other DNA
aggagttcgagaccagcctg

SEQ ID NO: 221466 - DNA, 20 bp, synthetic construct
  source 1..20: mol_type = other DNA
caggagttcgagaccagcct

SEQ ID NO: 221467 - DNA, 20 bp, synthetic construct
  source 1..20: mol_type = other DNA
ccaggagttcgagaccagcc

SEQ ID NO: 221468 - DNA, 20 bp, synthetic construct
  source 1..20: mol_type = other DNA
gccaggagttcgagaccagc

SEQ ID NO: 221469 - DNA, 20 bp, synthetic construct
  source 1..20: mol_type = other DNA
ggccaggagttcgagaccag

SEQ ID NO: 221470 - DNA, 20 bp, synthetic construct
  source 1..20: mol_type = other DNA
aggccaggagttcgagacca

SEQ ID NO: 221471 - DNA, 20 bp, synthetic construct
  source 1..20: mol_type = other DNA
gaggccaggagttcgagacc

SEQ ID NO: 221472 - DNA, 20 bp, synthetic construct
  source 1..20: mol_type = other DNA
tgaggccaggagttcgagac

SEQ ID NO: 221473 - DNA, 20 bp, synthetic construct
  source 1..20: mol_type = other DNA
ttgaggccaggagttcgaga

SEQ ID NO: 221474 - DNA, 20 bp, synthetic construct
  source 1..20: mol_type = other DNA
cttgaggccaggagttcgag

SEQ ID NO: 221475 - DNA, 20 bp, synthetic construct
  source 1..20: mol_type = other DNA
acttgaggccaggagttcga

SEQ ID NO: 221476 - DNA, 20 bp, synthetic construct
  source 1..20: mol_type = other DNA
cacttgaggccaggagttcg

SEQ ID NO: 221477 - DNA, 20 bp, synthetic construct
  source 1..20: mol_type = other DNA
tcacttgaggccaggagttc

SEQ ID NO: 221478 - DNA, 20 bp, synthetic construct
  source 1..20: mol_type = other DNA
atcacttgaggccaggagtt

SEQ ID NO: 221479 - DNA, 20 bp, synthetic construct
  source 1..20: mol_type = other DNA
gatcacttgaggccaggagt

SEQ ID NO: 221480 - DNA, 20 bp, synthetic construct
  source 1..20: mol_type = other DNA
agatcacttgaggccaggag

SEQ ID NO: 221481 - DNA, 20 bp, synthetic construct
  source 1..20: mol_type = other DNA
cagatcacttgaggccagga

SEQ ID NO: 221482 - DNA, 20 bp, synthetic construct
  source 1..20: mol_type = other DNA
gcagatcacttgaggccagg

SEQ ID NO: 221483 - DNA, 20 bp, synthetic construct
  source 1..20: mol_type = other DNA
ggcagatcacttgaggccag

SEQ ID NO: 221484 - DNA, 20 bp, synthetic construct
  source 1..20: mol_type = other DNA
gggcagatcacttgaggcca

SEQ ID NO: 221485 - DNA, 20 bp, synthetic construct
  source 1..20: mol_type = other DNA
tgggcagatcacttgaggcc

SEQ ID NO: 221486 - DNA, 20 bp, synthetic construct
  source 1..20: mol_type = other DNA
gtgggcagatcacttgaggc

SEQ ID NO: 221487 - DNA, 20 bp, synthetic construct
  source 1..20: mol_type = other DNA
ggtgggcagatcacttgagg

SEQ ID NO: 221488 - DNA, 20 bp, synthetic construct
  source 1..20: mol_type = other DNA
aggtgggcagatcacttgag

SEQ ID NO: 221489 - DNA, 20 bp, synthetic construct
  source 1..20: mol_type = other DNA
aaggtgggcagatcacttga

SEQ ID NO: 221490 - DNA, 20 bp, synthetic construct
  source 1..20: mol_type = other DNA
caaggtgggcagatcacttg

SEQ ID NO: 221491 - DNA, 20 bp, synthetic construct
  source 1..20: mol_type = other DNA
ccaaggtgggcagatcactt

SEQ ID NO: 221492 - DNA, 20 bp, synthetic construct
  source 1..20: mol_type = other DNA
gccaaggtgggcagatcact

SEQ ID NO: 221493 - DNA, 20 bp, synthetic construct
  source 1..20: mol_type = other DNA
ggccaaggtgggcagatcac

SEQ ID NO: 221494 - DNA, 20 bp, synthetic construct
  source 1..20: mol_type = other DNA
aggccaaggtgggcagatca

SEQ ID NO: 221495 - DNA, 20 bp, synthetic construct
  source 1..20: mol_type = other DNA
aaggccaaggtgggcagatc

SEQ ID NO: 221496 - DNA, 20 bp, synthetic construct
  source 1..20: mol_type = other DNA
gaaggccaaggtgggcagat

SEQ ID NO: 221497 - DNA, 20 bp, synthetic construct
  source 1..20: mol_type = other DNA
ggaaggccaaggtgggcaga

SEQ ID NO: 221498 - DNA, 20 bp, synthetic construct
  source 1..20: mol_type = other DNA
tggaaggccaaggtgggcag

SEQ ID NO: 221499 - DNA, 20 bp, synthetic construct
  source 1..20: mol_type = other DNA
ttggaaggccaaggtgggca

SEQ ID NO: 221500 - DNA, 20 bp, synthetic construct
  source 1..20: mol_type = other DNA
tttggaaggccaaggtgggc

SEQ ID NO: 221501 - DNA, 20 bp, synthetic construct
  source 1..20: mol_type = other DNA
ttttggaaggccaaggtggg

SEQ ID NO: 221502 - DNA, 20 bp, synthetic construct
  source 1..20: mol_type = other DNA
attttggaaggccaaggtgg

SEQ ID NO: 221503 - DNA, 20 bp, synthetic construct
  source 1..20: mol_type = other DNA
tattttggaaggccaaggtg

SEQ ID NO: 221504 - DNA, 20 bp, synthetic construct
  source 1..20: mol_type = other DNA
gtattttggaaggccaaggt

SEQ ID NO: 221505 - DNA, 20 bp, synthetic construct
  source 1..20: mol_type = other DNA
agtattttggaaggccaagg

SEQ ID NO: 221506 - DNA, 20 bp, synthetic construct
  source 1..20: mol_type = other DNA
cagtattttggaaggccaag

SEQ ID NO: 221507 - DNA, 20 bp, synthetic construct
  source 1..20: mol_type = other DNA
ccagtattttggaaggccaa

SEQ ID NO: 221508 - DNA, 20 bp, synthetic construct
  source 1..20: mol_type = other DNA
cccagtattttggaaggcca

SEQ ID NO: 221509 - DNA, 20 bp, synthetic construct
  source 1..20: mol_type = other DNA
tcccagtattttggaaggcc

SEQ ID NO: 221510 - DNA, 20 bp, synthetic construct
  source 1..20: mol_type = other DNA
atcccagtattttggaaggc

SEQ ID NO: 221511 - DNA, 20 bp, synthetic construct
  source 1..20: mol_type = other DNA
aatcccagtattttggaagg

SEQ ID NO: 221512 - DNA, 20 bp, synthetic construct
  source 1..20: mol_type = other DNA
taatcccagtattttggaag

SEQ ID NO: 221513 - DNA, 20 bp, synthetic construct
  source 1..20: mol_type = other DNA
ttaatcccagtattttggaa

SEQ ID NO: 221514 - DNA, 20 bp, synthetic construct
  source 1..20: mol_type = other DNA
cttaatcccagtattttgga

SEQ ID NO: 221515 - DNA, 20 bp, synthetic construct
  source 1..20: mol_type = other DNA
ccttaatcccagtattttgg

SEQ ID NO: 221516 - DNA, 20 bp, synthetic construct
  source 1..20: mol_type = other DNA
accttaatcccagtattttg

SEQ ID NO: 221517 - DNA, 20 bp, synthetic construct
  source 1..20: mol_type = other DNA
taccttaatcccagtatttt

SEQ ID NO: 221518 - DNA, 20 bp, synthetic construct
  source 1..20: mol_type = other DNA
ataccttaatcccagtattt

SEQ ID NO: 221519 - DNA, 20 bp, synthetic construct
  source 1..20: mol_type = other DNA
cataccttaatcccagtatt

SEQ ID NO: 221520 - DNA, 20 bp, synthetic construct
  source 1..20: mol_type = other DNA
tcataccttaatcccagtat

SEQ ID NO: 221521 - DNA, 20 bp, synthetic construct
  source 1..20: mol_type = other DNA
ctcataccttaatcccagta

SEQ ID NO: 221522 - DNA, 20 bp, synthetic construct
  source 1..20: mol_type = other DNA
gctcataccttaatcccagt

SEQ ID NO: 221523 - DNA, 20 bp, synthetic construct
  source 1..20: mol_type = other DNA
ggctcataccttaatcccag

SEQ ID NO: 221524 - DNA, 20 bp, synthetic construct
  source 1..20: mol_type = other DNA
tggctcataccttaatccca

SEQ ID NO: 221525 - DNA, 20 bp, synthetic construct
  source 1..20: mol_type = other DNA
gtggctcataccttaatccc

SEQ ID NO: 221526 - DNA, 20 bp, synthetic construct
  source 1..20: mol_type = other DNA
ggtggctcataccttaatcc

SEQ ID NO: 221527 - DNA, 20 bp, synthetic construct
  source 1..20: mol_type = other DNA
cggtggctcataccttaatc

SEQ ID NO: 221528 - DNA, 20 bp, synthetic construct
  source 1..20: mol_type = other DNA
gcggtggctcataccttaat

SEQ ID NO: 221529 - DNA, 20 bp, synthetic construct
  source 1..20: mol_type = other DNA
tgcggtggctcataccttaa

SEQ ID NO: 221530 - DNA, 20 bp, synthetic construct
  source 1..20: mol_type = other DNA
gtgcggtggctcatacctta

SEQ ID NO: 221531 - DNA, 20 bp, synthetic construct
  source 1..20: mol_type = other DNA
ggtgcggtggctcatacctt

SEQ ID NO: 221532 - DNA, 20 bp, synthetic construct
  source 1..20: mol_type = other DNA
gggtgcggtggctcatacct

SEQ ID NO: 221533 - DNA, 20 bp, synthetic construct
  source 1..20: mol_type = other DNA
tgggtgcggtggctcatacc

SEQ ID NO: 221534 - DNA, 20 bp, synthetic construct
  source 1..20: mol_type = other DNA
ctgggtgcggtggctcatac

SEQ ID NO: 221535 - DNA, 20 bp, synthetic construct
  source 1..20: mol_type = other DNA
gctgggtgcggtggctcata

SEQ ID NO: 221536 - DNA, 20 bp, synthetic construct
  source 1..20: mol_type = other DNA
ggctgggtgcggtggctcat

SEQ ID NO: 221537 - DNA, 20 bp, synthetic construct
  source 1..20: mol_type = other DNA
gggctgggtgcggtggctca

SEQ ID NO: 221538 - DNA, 20 bp, synthetic construct
  source 1..20: mol_type = other DNA
agggctgggtgcggtggctc

SEQ ID NO: 221539 - DNA, 20 bp, synthetic construct
  source 1..20: mol_type = other DNA
gagggctgggtgcggtggct

SEQ ID NO: 221540 - DNA, 20 bp, synthetic construct
  source 1..20: mol_type = other DNA
ggagggctgggtgcggtggc

SEQ ID NO: 221541 - DNA, 20 bp, synthetic construct
  source 1..20: mol_type = other DNA
aggagggctgggtgcggtgg

SEQ ID NO: 221542 - DNA, 20 bp, synthetic construct
  source 1..20: mol_type = other DNA
caggagggctgggtgcggtg

SEQ ID NO: 221543 - DNA, 20 bp, synthetic construct
  source 1..20: mol_type = other DNA
ccaggagggctgggtgcggt

SEQ ID NO: 221544 - DNA, 20 bp, synthetic construct
  source 1..20: mol_type = other DNA
cccaggagggctgggtgcgg

SEQ ID NO: 221545 - DNA, 20 bp, synthetic construct
  source 1..20: mol_type = other DNA
gcccaggagggctgggtgcg

SEQ ID NO: 221546 - DNA, 20 bp, synthetic construct
  source 1..20: mol_type = other DNA
agcccaggagggctgggtgc

SEQ ID NO: 221547 - DNA, 20 bp, synthetic construct
  source 1..20: mol_type = other DNA
gagcccaggagggctgggtg

SEQ ID NO: 221548 - DNA, 20 bp, synthetic construct
  source 1..20: mol_type = other DNA
agagcccaggagggctgggt

SEQ ID NO: 221549 - DNA, 20 bp, synthetic construct
  source 1..20: mol_type = other DNA
aagagcccaggagggctggg

SEQ ID NO: 221550 - DNA, 20 bp, synthetic construct
  source 1..20: mol_type = other DNA
aaagagcccaggagggctgg

SEQ ID NO: 221551 - DNA, 20 bp, synthetic construct
  source 1..20: mol_type = other DNA
aaaagagcccaggagggctg

SEQ ID NO: 221552 - DNA, 20 bp, synthetic construct
  source 1..20: mol_type = other DNA
gaaaagagcccaggagggct

SEQ ID NO: 221553 - DNA, 20 bp, synthetic construct
  source 1..20: mol_type = other DNA
ggaaaagagcccaggagggc

SEQ ID NO: 221554 - DNA, 20 bp, synthetic construct
  source 1..20: mol_type = other DNA
aggaaaagagcccaggaggg

SEQ ID NO: 221555 - DNA, 20 bp, synthetic construct
  source 1..20: mol_type = other DNA
aaggaaaagagcccaggagg

SEQ ID NO: 221556 - DNA, 20 bp, synthetic construct
  source 1..20: mol_type = other DNA
aaaggaaaagagcccaggag

SEQ ID NO: 221557 - DNA, 20 bp, synthetic construct
  source 1..20: mol_type = other DNA
taaaggaaaagagcccagga

SEQ ID NO: 221558 - DNA, 20 bp, synthetic construct
  source 1..20: mol_type = other DNA
ctaaaggaaaagagcccagg

SEQ ID NO: 221559 - DNA, 20 bp, synthetic construct
  source 1..20: mol_type = other DNA
actaaaggaaaagagcccag

SEQ ID NO: 221560 - DNA, 20 bp, synthetic construct
  source 1..20: mol_type = other DNA
aactaaaggaaaagagccca

SEQ ID NO: 221561 - DNA, 20 bp, synthetic construct
  source 1..20: mol_type = other DNA
caactaaaggaaaagagccc

SEQ ID NO: 221562 - DNA, 20 bp, synthetic construct
  source 1..20: mol_type = other DNA
gcaactaaaggaaaagagcc

SEQ ID NO: 221563 - DNA, 20 bp, synthetic construct
  source 1..20: mol_type = other DNA
tgcaactaaaggaaaagagc

SEQ ID NO: 221564 - DNA, 20 bp, synthetic construct
  source 1..20: mol_type = other DNA
gtgcaactaaaggaaaagag

SEQ ID NO: 221565 - DNA, 20 bp, synthetic construct
  source 1..20: mol_type = other DNA
agtgcaactaaaggaaaaga

SEQ ID NO: 221566 - DNA, 20 bp, synthetic construct
  source 1..20: mol_type = other DNA
gagtgcaactaaaggaaaag

SEQ ID NO: 221567 - DNA, 20 bp, synthetic construct
  source 1..20: mol_type = other DNA
cgagtgcaactaaaggaaaa

SEQ ID NO: 221568 - DNA, 20 bp, synthetic construct
  source 1..20: mol_type = other DNA
gcgagtgcaactaaaggaaa

SEQ ID NO: 221569 - DNA, 20 bp, synthetic construct
  source 1..20: mol_type = other DNA
agcgagtgcaactaaaggaa

SEQ ID NO: 221570 - DNA, 20 bp, synthetic construct
  source 1..20: mol_type = other DNA
gagcgagtgcaactaaagga

SEQ ID NO: 221571 - DNA, 20 bp, synthetic construct
  source 1..20: mol_type = other DNA
ggagcgagtgcaactaaagg

SEQ ID NO: 221572 - DNA, 20 bp, synthetic construct
  source 1..20: mol_type = other DNA
gggagcgagtgcaactaaag

SEQ ID NO: 221573 - DNA, 20 bp, synthetic construct
  source 1..20: mol_type = other DNA
ggggagcgagtgcaactaaa

SEQ ID NO: 221574 - DNA, 20 bp, synthetic construct
  source 1..20: mol_type = other DNA
cggggagcgagtgcaactaa

SEQ ID NO: 221575 - DNA, 20 bp, synthetic construct
  source 1..20: mol_type = other DNA
gcggggagcgagtgcaacta

SEQ ID NO: 221576 - DNA, 20 bp, synthetic construct
  source 1..20: mol_type = other DNA
agcggggagcgagtgcaact

SEQ ID NO: 221577 - DNA, 20 bp, synthetic construct
  source 1..20: mol_type = other DNA
gagcggggagcgagtgcaac

SEQ ID NO: 221578 - DNA, 20 bp, synthetic construct
  source 1..20: mol_type = other DNA
ggagcggggagcgagtgcaa

SEQ ID NO: 221579 - DNA, 20 bp, synthetic construct
  source 1..20: mol_type = other DNA
aggagcggggagcgagtgca

SEQ ID NO: 221580 - DNA, 20 bp, synthetic construct
  source 1..20: mol_type = other DNA
caggagcggggagcgagtgc

SEQ ID NO: 221581 - DNA, 20 bp, synthetic construct
  source 1..20: mol_type = other DNA
ccaggagcggggagcgagtg

SEQ ID NO: 221582 - DNA, 20 bp, synthetic construct
  source 1..20: mol_type = other DNA
tccaggagcggggagcgagt

SEQ ID NO: 221583 - DNA, 20 bp, synthetic construct
  source 1..20: mol_type = other DNA
ctccaggagcggggagcgag

SEQ ID NO: 221584 - DNA, 20 bp, synthetic construct
  source 1..20: mol_type = other DNA
actccaggagcggggagcga

SEQ ID NO: 221585 - DNA, 20 bp, synthetic construct
  source 1..20: mol_type = other DNA
tactccaggagcggggagcg

SEQ ID NO: 221586 - DNA, 20 bp, synthetic construct
  source 1..20: mol_type = other DNA
ctactccaggagcggggagc

SEQ ID NO: 221587 - DNA, 20 bp, synthetic construct
  source 1..20: mol_type = other DNA
tctactccaggagcggggag

SEQ ID NO: 221588 - DNA, 20 bp, synthetic construct
  source 1..20: mol_type = other DNA
ctctactccaggagcgggga

SEQ ID NO: 221589 - DNA, 20 bp, synthetic construct
  source 1..20: mol_type = other DNA
cctctactccaggagcgggg

SEQ ID NO: 221590 - DNA, 20 bp, synthetic construct
  source 1..20: mol_type = other DNA
ccctctactccaggagcggg

SEQ ID NO: 221591 - DNA, 20 bp, synthetic construct
  source 1..20: mol_type = other DNA
tccctctactccaggagcgg

SEQ ID NO: 221592 - DNA, 20 bp, synthetic construct
  source 1..20: mol_type = other DNA
atccctctactccaggagcg

SEQ ID NO: 221593 - DNA, 20 bp, synthetic construct
  source 1..20: mol_type = other DNA
aatccctctactccaggagc

SEQ ID NO: 221594 - DNA, 20 bp, synthetic construct
  source 1..20: mol_type = other DNA
aaatccctctactccaggag

SEQ ID NO: 221595 - DNA, 20 bp, synthetic construct
  source 1..20: mol_type = other DNA
gaaatccctctactccagga

SEQ ID NO: 221596 - DNA, 20 bp, synthetic construct
  source 1..20: mol_type = other DNA
ggaaatccctctactccagg

SEQ ID NO: 221597 - DNA, 20 bp, synthetic construct
  source 1..20: mol_type = other DNA
cggaaatccctctactccag

SEQ ID NO: 221598 - DNA, 20 bp, synthetic construct
  source 1..20: mol_type = other DNA
tcggaaatccctctactcca

SEQ ID NO: 221599 - DNA, 20 bp, synthetic construct
  source 1..20: mol_type = other DNA
ctcggaaatccctctactcc

SEQ ID NO: 221600 - DNA, 20 bp, synthetic construct
  source 1..20: mol_type = other DNA
tctcggaaatccctctactc

SEQ ID NO: 221601 - DNA, 20 bp, synthetic construct
  source 1..20: mol_type = other DNA
ctctcggaaatccctctact

SEQ ID NO: 221602 - DNA, 20 bp, synthetic construct
  source 1..20: mol_type = other DNA
tctctcggaaatccctctac

SEQ ID NO: 221603 - DNA, 20 bp, synthetic construct
  source 1..20: mol_type = other DNA
gtctctcggaaatccctcta

SEQ ID NO: 221604 - DNA, 20 bp, synthetic construct
  source 1..20: mol_type = other DNA
agtctctcggaaatccctct

SEQ ID NO: 221605 - DNA, 20 bp, synthetic construct
  source 1..20: mol_type = other DNA
cagtctctcggaaatccctc

SEQ ID NO: 221606 - DNA, 20 bp, synthetic construct
  source 1..20: mol_type = other DNA
acagtctctcggaaatccct

SEQ ID NO: 221607 - DNA, 20 bp, synthetic construct
  source 1..20: mol_type = other DNA
cacagtctctcggaaatccc

SEQ ID NO: 221608 - DNA, 20 bp, synthetic construct
  source 1..20: mol_type = other DNA
ccacagtctctcggaaatcc

SEQ ID NO: 221609 - DNA, 20 bp, synthetic construct
  source 1..20: mol_type = other DNA
cccacagtctctcggaaatc

SEQ ID NO: 221610 - DNA, 20 bp, synthetic construct
  source 1..20: mol_type = other DNA
gcccacagtctctcggaaat

SEQ ID NO: 221611 - DNA, 20 bp, synthetic construct
  source 1..20: mol_type = other DNA
agcccacagtctctcggaaa

SEQ ID NO: 221612 - DNA, 20 bp, synthetic construct
  source 1..20: mol_type = other DNA
gagcccacagtctctcggaa

SEQ ID NO: 221613 - DNA, 20 bp, synthetic construct
  source 1..20: mol_type = other DNA
ggagcccacagtctctcgga

SEQ ID NO: 221614 - DNA, 20 bp, synthetic construct
  source 1..20: mol_type = other DNA
tggagcccacagtctctcgg

SEQ ID NO: 221615 - DNA, 20 bp, synthetic construct
  source 1..20: mol_type = other DNA
ctggagcccacagtctctcg

SEQ ID NO: 221616 - DNA, 20 bp, synthetic construct
  source 1..20: mol_type = other DNA
gctggagcccacagtctctc

SEQ ID NO: 221617 - DNA, 20 bp, synthetic construct
  source 1..20: mol_type = other DNA
ggctggagcccacagtctct

SEQ ID NO: 221618 - DNA, 20 bp, synthetic construct
  source 1..20: mol_type = other DNA
aggctggagcccacagtctc

SEQ ID NO: 221619 - DNA, 20 bp, synthetic construct
  source 1..20: mol_type = other DNA
aaggctggagcccacagtct

SEQ ID NO: 221620 - DNA, 20 bp, synthetic construct
  source 1..20: mol_type = other DNA
gaaggctggagcccacagtc

SEQ ID NO: 221621 - DNA, 20 bp, synthetic construct
  source 1..20: mol_type = other DNA
tgaaggctggagcccacagt

SEQ ID NO: 221622 - DNA, 20 bp, synthetic construct
  source 1..20: mol_type = other DNA
gtgaaggctggagcccacag

SEQ ID NO: 221623 - DNA, 20 bp, synthetic construct
  source 1..20: mol_type = other DNA
ggtgaaggctggagcccaca

SEQ ID NO: 221624 - DNA, 20 bp, synthetic construct
  source 1..20: mol_type = other DNA
aggtgaaggctggagcccac

SEQ ID NO: 221625 - DNA, 20 bp, synthetic construct
  source 1..20: mol_type = other DNA
taggtgaaggctggagccca

SEQ ID NO: 221626 - DNA, 20 bp, synthetic construct
  source 1..20: mol_type = other DNA
ctaggtgaaggctggagccc

SEQ ID NO: 221627 - DNA, 20 bp, synthetic construct
  source 1..20: mol_type = other DNA
cctaggtgaaggctggagcc

SEQ ID NO: 221628 - DNA, 20 bp, synthetic construct
  source 1..20: mol_type = other DNA
gcctaggtgaaggctggagc

SEQ ID NO: 221629 - DNA, 20 bp, synthetic construct
  source 1..20: mol_type = other DNA
ggcctaggtgaaggctggag

SEQ ID NO: 221630 - DNA, 20 bp, synthetic construct
  source 1..20: mol_type = other DNA
gggcctaggtgaaggctgga

SEQ ID NO: 221631 - DNA, 20 bp, synthetic construct
  source 1..20: mol_type = other DNA
tgggcctaggtgaaggctgg

SEQ ID NO: 221632 - DNA, 20 bp, synthetic construct
  source 1..20: mol_type = other DNA
ctgggcctaggtgaaggctg

SEQ ID NO: 221633 - DNA, 20 bp, synthetic construct
  source 1..20: mol_type = other DNA
cctgggcctaggtgaaggct

SEQ ID NO: 221634 - DNA, 20 bp, synthetic construct
  source 1..20: mol_type = other DNA
tcctgggcctaggtgaaggc

SEQ ID NO: 221635 - DNA, 20 bp, synthetic construct
  source 1..20: mol_type = other DNA
gtcctgggcctaggtgaagg

SEQ ID NO: 221636 - DNA, 20 bp, synthetic construct
  source 1..20: mol_type = other DNA
agtcctgggcctaggtgaag

SEQ ID NO: 221637 - DNA, 20 bp, synthetic construct
  source 1..20: mol_type = other DNA
tagtcctgggcctaggtgaa

SEQ ID NO: 221638 - DNA, 20 bp, synthetic construct
  source 1..20: mol_type = other DNA
ctagtcctgggcctaggtga

SEQ ID NO: 221639 - DNA, 20 bp, synthetic construct
  source 1..20: mol_type = other DNA
cctagtcctgggcctaggtg

SEQ ID NO: 221640 - DNA, 20 bp, synthetic construct
  source 1..20: mol_type = other DNA
tcctagtcctgggcctaggt

SEQ ID NO: 221641 - DNA, 20 bp, synthetic construct
  source 1..20: mol_type = other DNA
atcctagtcctgggcctagg

SEQ ID NO: 221642 - DNA, 20 bp, synthetic construct
  source 1..20: mol_type = other DNA
catcctagtcctgggcctag

SEQ ID NO: 221643 - DNA, 20 bp, synthetic construct
  source 1..20: mol_type = other DNA
gcatcctagtcctgggccta

SEQ ID NO: 221644 - DNA, 20 bp, synthetic construct
  source 1..20: mol_type = other DNA
ggcatcctagtcctgggcct

SEQ ID NO: 221645 - DNA, 20 bp, synthetic construct
  source 1..20: mol_type = other DNA
aggcatcctagtcctgggcc

SEQ ID NO: 221646 - DNA, 20 bp, synthetic construct
  source 1..20: mol_type = other DNA
caggcatcctagtcctgggc

SEQ ID NO: 221647 - DNA, 20 bp, synthetic construct
  source 1..20: mol_type = other DNA
gcaggcatcctagtcctggg

SEQ ID NO: 221648 - DNA, 20 bp, synthetic construct
  source 1..20: mol_type = other DNA
ggcaggcatcctagtcctgg

SEQ ID NO: 221649 - DNA, 20 bp, synthetic construct
  source 1..20: mol_type = other DNA
gggcaggcatcctagtcctg

SEQ ID NO: 221650 - DNA, 20 bp, synthetic construct
  source 1..20: mol_type = other DNA
agggcaggcatcctagtcct

SEQ ID NO: 221651 - DNA, 20 bp, synthetic construct
  source 1..20: mol_type = other DNA
tagggcaggcatcctagtcc

SEQ ID NO: 221652 - DNA, 20 bp, synthetic construct
  source 1..20: mol_type = other DNA
ttagggcaggcatcctagtc

SEQ ID NO: 221653 - DNA, 20 bp, synthetic construct
  source 1..20: mol_type = other DNA
gttagggcaggcatcctagt

SEQ ID NO: 221654 - DNA, 20 bp, synthetic construct
  source 1..20: mol_type = other DNA
tgttagggcaggcatcctag

SEQ ID NO: 221655 - DNA, 20 bp, synthetic construct
  source 1..20: mol_type = other DNA
atgttagggcaggcatccta

SEQ ID NO: 221656 - DNA, 20 bp, synthetic construct
  source 1..20: mol_type = other DNA
aatgttagggcaggcatcct

SEQ ID NO: 221657 - DNA, 20 bp, synthetic construct
  source 1..20: mol_type = other DNA
aaatgttagggcaggcatcc

SEQ ID NO: 221658 - DNA, 20 bp, synthetic construct
  source 1..20: mol_type = other DNA
taaatgttagggcaggcatc

SEQ ID NO: 221659 - DNA, 20 bp, synthetic construct
  source 1..20: mol_type = other DNA
ataaatgttagggcaggcat

SEQ ID NO: 221660 - DNA, 20 bp, synthetic construct
  source 1..20: mol_type = other DNA
gataaatgttagggcaggca

SEQ ID NO: 221661 - DNA, 20 bp, synthetic construct
  source 1..20: mol_type = other DNA
agataaatgttagggcaggc

SEQ ID NO: 221662 - DNA, 20 bp, synthetic construct
  source 1..20: mol_type = other DNA
aagataaatgttagggcagg

SEQ ID NO: 221663 - DNA, 20 bp, synthetic construct
  source 1..20: mol_type = other DNA
aaagataaatgttagggcag

SEQ ID NO: 221664 - DNA, 20 bp, synthetic construct
  source 1..20: mol_type = other DNA
taaagataaatgttagggca

SEQ ID NO: 221665 - DNA, 20 bp, synthetic construct
  source 1..20: mol_type = other DNA
ataaagataaatgttagggc

SEQ ID NO: 221666 - DNA, 20 bp, synthetic construct
  source 1..20: mol_type = other DNA
tataaagataaatgttaggg

SEQ ID NO: 221667 - DNA, 20 bp, synthetic construct
  source 1..20: mol_type = other DNA
gtataaagataaatgttagg

SEQ ID NO: 221668 - DNA, 20 bp, synthetic construct
  source 1..20: mol_type = other DNA
ggtataaagataaatgttag

SEQ ID NO: 221669 - DNA, 20 bp, synthetic construct
  source 1..20: mol_type = other DNA
aggtataaagataaatgtta

SEQ ID NO: 221670 - DNA, 20 bp, synthetic construct
  source 1..20: mol_type = other DNA
aaggtataaagataaatgtt

SEQ ID NO: 221671 - DNA, 20 bp, synthetic construct
  source 1..20: mol_type = other DNA
taaggtataaagataaatgt

SEQ ID NO: 221672 - DNA, 20 bp, synthetic construct
  source 1..20: mol_type = other DNA
ttaaggtataaagataaatg

SEQ ID NO: 221673 - DNA, 20 bp, synthetic construct
  source 1..20: mol_type = other DNA
tttaaggtataaagataaat

SEQ ID NO: 221674 - DNA, 20 bp, synthetic construct
  source 1..20: mol_type = other DNA
ctttaaggtataaagataaa

SEQ ID NO: 221675 - DNA, 20 bp, synthetic construct
  source 1..20: mol_type = other DNA
gctttaaggtataaagataa

SEQ ID NO: 221676 - DNA, 20 bp, synthetic construct
  source 1..20: mol_type = other DNA
tgctttaaggtataaagata

SEQ ID NO: 221677 - DNA, 20 bp, synthetic construct
  source 1..20: mol_type = other DNA
ttgctttaaggtataaagat

SEQ ID NO: 221678 - DNA, 20 bp, synthetic construct
  source 1..20: mol_type = other DNA
tttgctttaaggtataaaga

SEQ ID NO: 221679 - DNA, 20 bp, synthetic construct
  source 1..20: mol_type = other DNA
ttttgctttaaggtataaag

SEQ ID NO: 221680 - DNA, 20 bp, synthetic construct
  source 1..20: mol_type = other DNA
gttttgctttaaggtataaa

SEQ ID NO: 221681 - DNA, 20 bp, synthetic construct
  source 1..20: mol_type = other DNA
tgttttgctttaaggtataa

SEQ ID NO: 221682 - DNA, 20 bp, synthetic construct
  source 1..20: mol_type = other DNA
ctgttttgctttaaggtata

SEQ ID NO: 221683 - DNA, 20 bp, synthetic construct
  source 1..20: mol_type = other DNA
gctgttttgctttaaggtat

SEQ ID NO: 221684 - DNA, 20 bp, synthetic construct
  source 1..20: mol_type = other DNA
agctgttttgctttaaggta

SEQ ID NO: 221685 - DNA, 20 bp, synthetic construct
  source 1..20: mol_type = other DNA
cagctgttttgctttaaggt

SEQ ID NO: 221686 - DNA, 20 bp, synthetic construct
  source 1..20: mol_type = other DNA
ccagctgttttgctttaagg

SEQ ID NO: 221687 - DNA, 20 bp, synthetic construct
  source 1..20: mol_type = other DNA
tccagctgttttgctttaag

SEQ ID NO: 221688 - DNA, 20 bp, synthetic construct
  source 1..20: mol_type = other DNA
gtccagctgttttgctttaa

SEQ ID NO: 221689 - DNA, 20 bp, synthetic construct
  source 1..20: mol_type = other DNA
ggtccagctgttttgcttta

SEQ ID NO: 221690 - DNA, 20 bp, synthetic construct
  source 1..20: mol_type = other DNA
tggtccagctgttttgcttt

SEQ ID NO: 221691 - DNA, 20 bp, synthetic construct
  source 1..20: mol_type = other DNA
atggtccagctgttttgctt

SEQ ID NO: 221692 - DNA, 20 bp, synthetic construct
  source 1..20: mol_type = other DNA
tatggtccagctgttttgct

SEQ ID NO: 221693 - DNA, 20 bp, synthetic construct
  source 1..20: mol_type = other DNA
ttatggtccagctgttttgc

SEQ ID NO: 221694 - DNA, 20 bp, synthetic construct
  source 1..20: mol_type = other DNA
cttatggtccagctgttttg

SEQ ID NO: 221695 - DNA, 20 bp, synthetic construct
  source 1..20: mol_type = other DNA
gcttatggtccagctgtttt

SEQ ID NO: 221696 - DNA, 20 bp, synthetic construct
  source 1..20: mol_type = other DNA
tgcttatggtccagctgttt

SEQ ID NO: 221697 - DNA, 20 bp, synthetic construct
  source 1..20: mol_type = other DNA
atgcttatggtccagctgtt

SEQ ID NO: 221698 - DNA, 20 bp, synthetic construct
  source 1..20: mol_type = other DNA
aatgcttatggtccagctgt

SEQ ID NO: 221699 - DNA, 20 bp, synthetic construct
  source 1..20: mol_type = other DNA
gaatgcttatggtccagctg

SEQ ID NO: 221700 - DNA, 20 bp, synthetic construct
  source 1..20: mol_type = other DNA
tgaatgcttatggtccagct

SEQ ID NO: 221701 - DNA, 20 bp, synthetic construct
  source 1..20: mol_type = other DNA
ttgaatgcttatggtccagc

SEQ ID NO: 221702 - DNA, 20 bp, synthetic construct
  source 1..20: mol_type = other DNA
cttgaatgcttatggtccag

SEQ ID NO: 221703 - DNA, 20 bp, synthetic construct
  source 1..20: mol_type = other DNA
tcttgaatgcttatggtcca

SEQ ID NO: 221704 - DNA, 20 bp, synthetic construct
  source 1..20: mol_type = other DNA
ttcttgaatgcttatggtcc

SEQ ID NO: 221705 - DNA, 20 bp, synthetic construct
  source 1..20: mol_type = other DNA
gttcttgaatgcttatggtc

SEQ ID NO: 221706 - DNA, 20 bp, synthetic construct
  source 1..20: mol_type = other DNA
tgttcttgaatgcttatggt

SEQ ID NO: 221707 - DNA, 20 bp, synthetic construct
  source 1..20: mol_type = other DNA
ttgttcttgaatgcttatgg

SEQ ID NO: 221708 - DNA, 20 bp, synthetic construct
  source 1..20: mol_type = other DNA
tttgttcttgaatgcttatg

SEQ ID NO: 221709 - DNA, 20 bp, synthetic construct
  source 1..20: mol_type = other DNA
gtttgttcttgaatgcttat

SEQ ID NO: 221710 - DNA, 20 bp, synthetic construct
  source 1..20: mol_type = other DNA
agtttgttcttgaatgctta

SEQ ID NO: 221711 - DNA, 20 bp, synthetic construct
  source 1..20: mol_type = other DNA
cagtttgttcttgaatgctt

SEQ ID NO: 221712 - DNA, 20 bp, synthetic construct
  source 1..20: mol_type = other DNA
acagtttgttcttgaatgct

SEQ ID NO: 221713 - DNA, 20 bp, synthetic construct
  source 1..20: mol_type = other DNA
cacagtttgttcttgaatgc

SEQ ID NO: 221714 - DNA, 20 bp, synthetic construct
  source 1..20: mol_type = other DNA
tcacagtttgttcttgaatg

SEQ ID NO: 221715 - DNA, 20 bp, synthetic construct
  source 1..20: mol_type = other DNA
ttcacagtttgttcttgaat

SEQ ID NO: 221716 - DNA, 20 bp, synthetic construct
  source 1..20: mol_type = other DNA
attcacagtttgttcttgaa

SEQ ID NO: 221717 - DNA, 20 bp, synthetic construct
  source 1..20: mol_type = other DNA
tattcacagtttgttcttga

SEQ ID NO: 221718 - DNA, 20 bp, synthetic construct
  source 1..20: mol_type = other DNA
ttattcacagtttgttcttg

SEQ ID NO: 221719 - DNA, 20 bp, synthetic construct
  source 1..20: mol_type = other DNA
cttattcacagtttgttctt

SEQ ID NO: 221720 - DNA, 20 bp, synthetic construct
  source 1..20: mol_type = other DNA
ccttattcacagtttgttct

SEQ ID NO: 221721 - DNA, 20 bp, synthetic construct
  source 1..20: mol_type = other DNA
tccttattcacagtttgttc

SEQ ID NO: 221722 - DNA, 20 bp, synthetic construct
  source 1..20: mol_type = other DNA
ctccttattcacagtttgtt

SEQ ID NO: 221723 - DNA, 20 bp, synthetic construct
  source 1..20: mol_type = other DNA
tctccttattcacagtttgt

SEQ ID NO: 221724 - DNA, 20 bp, synthetic construct
  source 1..20: mol_type = other DNA
ttctccttattcacagtttg

SEQ ID NO: 221725 - DNA, 20 bp, synthetic construct
  source 1..20: mol_type = other DNA
tttctccttattcacagttt

SEQ ID NO: 221726 - DNA, 20 bp, synthetic construct
  source 1..20: mol_type = other DNA
ctttctccttattcacagtt

SEQ ID NO: 221727 - DNA, 20 bp, synthetic construct
  source 1..20: mol_type = other DNA
actttctccttattcacagt

SEQ ID NO: 221728 - DNA, 20 bp, synthetic construct
  source 1..20: mol_type = other DNA
aactttctccttattcacag

SEQ ID NO: 221729 - DNA, 20 bp, synthetic construct
  source 1..20: mol_type = other DNA
gaactttctccttattcaca

SEQ ID NO: 221730 - DNA, 20 bp, synthetic construct
  source 1..20: mol_type = other DNA
agaactttctccttattcac

SEQ ID NO: 221731 - DNA, 20 bp, synthetic construct
  source 1..20: mol_type = other DNA
gagaactttctccttattca

SEQ ID NO: 221732 - DNA, 20 bp, synthetic construct
  source 1..20: mol_type = other DNA
ggagaactttctccttattc

SEQ ID NO: 221733 - DNA, 20 bp, synthetic construct
  source 1..20: mol_type = other DNA
gggagaactttctccttatt

SEQ ID NO: 221734 - DNA, 20 bp, synthetic construct
  source 1..20: mol_type = other DNA
tgggagaactttctccttat

SEQ ID NO: 221735 - DNA, 20 bp, synthetic construct
  source 1..20: mol_type = other DNA
ctgggagaactttctcctta

SEQ ID NO: 221736 - DNA, 20 bp, synthetic construct
  source 1..20: mol_type = other DNA
cctgggagaactttctcctt

SEQ ID NO: 221737 - DNA, 20 bp, synthetic construct
  source 1..20: mol_type = other DNA
tcctgggagaactttctcct

SEQ ID NO: 221738 - DNA, 20 bp, synthetic construct
  source 1..20: mol_type = other DNA
ttcctgggagaactttctcc

SEQ ID NO: 221739 - DNA, 20 bp, synthetic construct
  source 1..20: mol_type = other DNA
tttcctgggagaactttctc

SEQ ID NO: 221740 - DNA, 20 bp, synthetic construct
  source 1..20: mol_type = other DNA
gtttcctgggagaactttct

SEQ ID NO: 221741 - DNA, 20 bp, synthetic construct
  source 1..20: mol_type = other DNA
tgtttcctgggagaactttc

SEQ ID NO: 221742 - DNA, 20 bp, synthetic construct
  source 1..20: mol_type = other DNA
ttgtttcctgggagaacttt

SEQ ID NO: 221743 - DNA, 20 bp, synthetic construct
  source 1..20: mol_type = other DNA
cttgtttcctgggagaactt

SEQ ID NO: 221744 - DNA, 20 bp, synthetic construct
  source 1..20: mol_type = other DNA
tcttgtttcctgggagaact

SEQ ID NO: 221745 - DNA, 20 bp, synthetic construct
  source 1..20: mol_type = other DNA
ctcttgtttcctgggagaac

SEQ ID NO: 221746 - DNA, 20 bp, synthetic construct
  source 1..20: mol_type = other DNA
gctcttgtttcctgggagaa

SEQ ID NO: 221747 - DNA, 20 bp, synthetic construct
  source 1..20: mol_type = other DNA
agctcttgtttcctgggaga

SEQ ID NO: 221748 - DNA, 20 bp, synthetic construct
  source 1..20: mol_type = other DNA
aagctcttgtttcctgggag

SEQ ID NO: 221749 - DNA, 20 bp, synthetic construct
  source 1..20: mol_type = other DNA
aaagctcttgtttcctggga

SEQ ID NO: 221750 - DNA, 20 bp, synthetic construct
  source 1..20: mol_type = other DNA
taaagctcttgtttcctggg

SEQ ID NO: 221751 - DNA, 20 bp, synthetic construct
  source 1..20: mol_type = other DNA
ctaaagctcttgtttcctgg

SEQ ID NO: 221752 - DNA, 20 bp, synthetic construct
  source 1..20: mol_type = other DNA
actaaagctcttgtttcctg

SEQ ID NO: 221753 - DNA, 20 bp, synthetic construct
  source 1..20: mol_type = other DNA
aactaaagctcttgtttcct

SEQ ID NO: 221754 - DNA, 20 bp, synthetic construct
  source 1..20: mol_type = other DNA
gaactaaagctcttgtttcc

SEQ ID NO: 221755 - DNA, 20 bp, synthetic construct
  source 1..20: mol_type = other DNA
agaactaaagctcttgtttc

SEQ ID NO: 221756 - DNA, 20 bp, synthetic construct
  source 1..20: mol_type = other DNA
cagaactaaagctcttgttt

SEQ ID NO: 221757 - DNA, 20 bp, synthetic construct
  source 1..20: mol_type = other DNA
acagaactaaagctcttgtt

SEQ ID NO: 221758 - DNA, 20 bp, synthetic construct
  source 1..20: mol_type = other DNA
aacagaactaaagctcttgt

SEQ ID NO: 221759 - DNA, 20 bp, synthetic construct
  source 1..20: mol_type = other DNA
caacagaactaaagctcttg

SEQ ID NO: 221760 - DNA, 20 bp, synthetic construct
  source 1..20: mol_type = other DNA
ccaacagaactaaagctctt

SEQ ID NO: 221761 - DNA, 20 bp, synthetic construct
  source 1..20: mol_type = other DNA
cccaacagaactaaagctct

SEQ ID NO: 221762 - DNA, 20 bp, synthetic construct
  source 1..20: mol_type = other DNA
gcccaacagaactaaagctc

SEQ ID NO: 221763 - DNA, 20 bp, synthetic construct
  source 1..20: mol_type = other DNA
ggcccaacagaactaaagct

SEQ ID NO: 221764 - DNA, 20 bp, synthetic construct
  source 1..20: mol_type = other DNA
tggcccaacagaactaaagc

SEQ ID NO: 221765 - DNA, 20 bp, synthetic construct
  source 1..20: mol_type = other DNA
ctggcccaacagaactaaag

SEQ ID NO: 221766 - DNA, 20 bp, synthetic construct
  source 1..20: mol_type = other DNA
gctggcccaacagaactaaa

SEQ ID NO: 221767 - DNA, 20 bp, synthetic construct
  source 1..20: mol_type = other DNA
ggctggcccaacagaactaa

SEQ ID NO: 221768 - DNA, 20 bp, synthetic construct
  source 1..20: mol_type = other DNA
gggctggcccaacagaacta

SEQ ID NO: 221769 - DNA, 20 bp, synthetic construct
  source 1..20: mol_type = other DNA
agggctggcccaacagaact

SEQ ID NO: 221770 - DNA, 20 bp, synthetic construct
  source 1..20: mol_type = other DNA
aagggctggcccaacagaac

SEQ ID NO: 221771 - DNA, 20 bp, synthetic construct
  source 1..20: mol_type = other DNA
taagggctggcccaacagaa

SEQ ID NO: 221772 - DNA, 20 bp, synthetic construct
  source 1..20: mol_type = other DNA
ataagggctggcccaacaga

SEQ ID NO: 221773 - DNA, 20 bp, synthetic construct
  source 1..20: mol_type = other DNA
tataagggctggcccaacag

SEQ ID NO: 221774 - DNA, 20 bp, synthetic construct
  source 1..20: mol_type = other DNA
atataagggctggcccaaca

SEQ ID NO: 221775 - DNA, 20 bp, synthetic construct
  source 1..20: mol_type = other DNA
aatataagggctggcccaac

SEQ ID NO: 221776 - DNA, 20 bp, synthetic construct
  source 1..20: mol_type = other DNA
gaatataagggctggcccaa

SEQ ID NO: 221777 - DNA, 20 bp, synthetic construct
  source 1..20: mol_type = other DNA
ggaatataagggctggccca

SEQ ID NO: 221778 - DNA, 20 bp, synthetic construct
  source 1..20: mol_type = other DNA
aggaatataagggctggccc

SEQ ID NO: 221779 - DNA, 20 bp, synthetic construct
  source 1..20: mol_type = other DNA
aaggaatataagggctggcc

SEQ ID NO: 221780 - DNA, 20 bp, synthetic construct
  source 1..20: mol_type = other DNA
taaggaatataagggctggc

SEQ ID NO: 221781 - DNA, 20 bp, synthetic construct
  source 1..20: mol_type = other DNA
ctaaggaatataagggctgg

SEQ ID NO: 221782 - DNA, 20 bp, synthetic construct
  source 1..20: mol_type = other DNA
gctaaggaatataagggctg

SEQ ID NO: 221783 - DNA, 20 bp, synthetic construct
  source 1..20: mol_type = other DNA
agctaaggaatataagggct

SEQ ID NO: 221784 - DNA, 20 bp, synthetic construct
  source 1..20: mol_type = other DNA
cagctaaggaatataagggc

SEQ ID NO: 221785 - DNA, 20 bp, synthetic construct
  source 1..20: mol_type = other DNA
acagctaaggaatataaggg

SEQ ID NO: 221786 - DNA, 20 bp, synthetic construct
  source 1..20: mol_type = other DNA
aacagctaaggaatataagg

SEQ ID NO: 221787 - DNA, 20 bp, synthetic construct
  source 1..20: mol_type = other DNA
taacagctaaggaatataag

SEQ ID NO: 221788 - DNA, 20 bp, synthetic construct
  source 1..20: mol_type = other DNA
gtaacagctaaggaatataa

SEQ ID NO: 221789 - DNA, 20 bp, synthetic construct
  source 1..20: mol_type = other DNA
ggtaacagctaaggaatata

SEQ ID NO: 221790 - DNA, 20 bp, synthetic construct
  source 1..20: mol_type = other DNA
tggtaacagctaaggaatat

SEQ ID NO: 221791 - DNA, 20 bp, synthetic construct
  source 1..20: mol_type = other DNA
ctggtaacagctaaggaata

SEQ ID NO: 221792 - DNA, 20 bp, synthetic construct
  source 1..20: mol_type = other DNA
actggtaacagctaaggaat

SEQ ID NO: 221793 - DNA, 20 bp, synthetic construct
  source 1..20: mol_type = other DNA
gactggtaacagctaaggaa

SEQ ID NO: 221794 - DNA, 20 bp, synthetic construct
  source 1..20: mol_type = other DNA
tgactggtaacagctaagga

SEQ ID NO: 221795 - DNA, 20 bp, synthetic construct
  source 1..20: mol_type = other DNA
gtgactggtaacagctaagg

SEQ ID NO: 221796 - DNA, 20 bp, synthetic construct
  source 1..20: mol_type = other DNA
agtgactggtaacagctaag

SEQ ID NO: 221797 - DNA, 20 bp, synthetic construct
  source 1..20: mol_type = other DNA
cagtgactggtaacagctaa

SEQ ID NO: 221798 - DNA, 20 bp, synthetic construct
  source 1..20: mol_type = other DNA
gcagtgactggtaacagcta

SEQ ID NO: 221799 - DNA, 20 bp, synthetic construct
  source 1..20: mol_type = other DNA
agcagtgactggtaacagct

SEQ ID NO: 221800 - DNA, 20 bp, synthetic construct
  source 1..20: mol_type = other DNA
aagcagtgactggtaacagc

SEQ ID NO: 221801 - DNA, 20 bp, synthetic construct
  source 1..20: mol_type = other DNA
caagcagtgactggtaacag

SEQ ID NO: 221802 - DNA, 20 bp, synthetic construct
  source 1..20: mol_type = other DNA
tcaagcagtgactggtaaca

SEQ ID NO: 221803 - DNA, 20 bp, synthetic construct
  source 1..20: mol_type = other DNA
atcaagcagtgactggtaac

SEQ ID NO: 221804 - DNA, 20 bp, synthetic construct
  source 1..20: mol_type = other DNA
aatcaagcagtgactggtaa

SEQ ID NO: 221805 - DNA, 20 bp, synthetic construct
  source 1..20: mol_type = other DNA
aaatcaagcagtgactggta

SEQ ID NO: 221806 - DNA, 20 bp, synthetic construct
  source 1..20: mol_type = other DNA
taaatcaagcagtgactggt

SEQ ID NO: 221807 - DNA, 20 bp, synthetic construct
  source 1..20: mol_type = other DNA
ttaaatcaagcagtgactgg

SEQ ID NO: 221808 - DNA, 20 bp, synthetic construct
  source 1..20: mol_type = other DNA
attaaatcaagcagtgactg

SEQ ID NO: 221809 - DNA, 20 bp, synthetic construct
  source 1..20: mol_type = other DNA
gattaaatcaagcagtgact

SEQ ID NO: 221810 - DNA, 20 bp, synthetic construct
  source 1..20: mol_type = other DNA
agattaaatcaagcagtgac

SEQ ID NO: 221811 - DNA, 20 bp, synthetic construct
  source 1..20: mol_type = other DNA
gagattaaatcaagcagtga

SEQ ID NO: 221812 - DNA, 20 bp, synthetic construct
  source 1..20: mol_type = other DNA
cgagattaaatcaagcagtg

SEQ ID NO: 221813 - DNA, 20 bp, synthetic construct
  source 1..20: mol_type = other DNA
ccgagattaaatcaagcagt

SEQ ID NO: 221814 - DNA, 20 bp, synthetic construct
  source 1..20: mol_type = other DNA
gccgagattaaatcaagcag

SEQ ID NO: 221815 - DNA, 20 bp, synthetic construct
  source 1..20: mol_type = other DNA
agccgagattaaatcaagca

SEQ ID NO: 221816 - DNA, 20 bp, synthetic construct
  source 1..20: mol_type = other DNA
tagccgagattaaatcaagc

SEQ ID NO: 221817 - DNA, 20 bp, synthetic construct
  source 1..20: mol_type = other DNA
atagccgagattaaatcaag

SEQ ID NO: 221818 - DNA, 20 bp, synthetic construct
  source 1..20: mol_type = other DNA
gatagccgagattaaatcaa

SEQ ID NO: 221819 - DNA, 20 bp, synthetic construct
  source 1..20: mol_type = other DNA
tgatagccgagattaaatca

SEQ ID NO: 221820 - DNA, 20 bp, synthetic construct
  source 1..20: mol_type = other DNA
gtgatagccgagattaaatc

SEQ ID NO: 221821 - DNA, 20 bp, synthetic construct
  source 1..20: mol_type = other DNA
agtgatagccgagattaaat

SEQ ID NO: 221822 - DNA, 20 bp, synthetic construct
  source 1..20: mol_type = other DNA
aagtgatagccgagattaaa

SEQ ID NO: 221823 - DNA, 20 bp, synthetic construct
  source 1..20: mol_type = other DNA
caagtgatagccgagattaa

SEQ ID NO: 221824 - DNA, 20 bp, synthetic construct
  source 1..20: mol_type = other DNA
ccaagtgatagccgagatta

SEQ ID NO: 221825 - DNA, 20 bp, synthetic construct
  source 1..20: mol_type = other DNA
gccaagtgatagccgagatt

SEQ ID NO: 221826 - DNA, 20 bp, synthetic construct
  source 1..20: mol_type = other DNA
ggccaagtgatagccgagat

SEQ ID NO: 221827 - DNA, 20 bp, synthetic construct
  source 1..20: mol_type = other DNA
aggccaagtgatagccgaga

SEQ ID NO: 221828 - DNA, 20 bp, synthetic construct
  source 1..20: mol_type = other DNA
caggccaagtgatagccgag

SEQ ID NO: 221829 - DNA, 20 bp, synthetic construct
  source 1..20: mol_type = other DNA
tcaggccaagtgatagccga

SEQ ID NO: 221830 - DNA, 20 bp, synthetic construct
  source 1..20: mol_type = other DNA
gtcaggccaagtgatagccg

SEQ ID NO: 221831 - DNA, 20 bp, synthetic construct
  source 1..20: mol_type = other DNA
tgtcaggccaagtgatagcc

SEQ ID NO: 221832 - DNA, 20 bp, synthetic construct
  source 1..20: mol_type = other DNA
ctgtcaggccaagtgatagc

SEQ ID NO: 221833 - DNA, 20 bp, synthetic construct
  source 1..20: mol_type = other DNA
cctgtcaggccaagtgatag

SEQ ID NO: 221834 - DNA, 20 bp, synthetic construct
  source 1..20: mol_type = other DNA
acctgtcaggccaagtgata

SEQ ID NO: 221835 - DNA, 20 bp, synthetic construct
  source 1..20: mol_type = other DNA
gacctgtcaggccaagtgat

SEQ ID NO: 221836 - DNA, 20 bp, synthetic construct
  source 1..20: mol_type = other DNA
agacctgtcaggccaagtga

SEQ ID NO: 221837 - DNA, 20 bp, synthetic construct
  source 1..20: mol_type = other DNA
cagacctgtcaggccaagtg

SEQ ID NO: 221838 - DNA, 20 bp, synthetic construct
  source 1..20: mol_type = other DNA
gcagacctgtcaggccaagt

SEQ ID NO: 221839 - DNA, 20 bp, synthetic construct
  source 1..20: mol_type = other DNA
agcagacctgtcaggccaag

SEQ ID NO: 221840 - DNA, 20 bp, synthetic construct
  source 1..20: mol_type = other DNA
cagcagacctgtcaggccaa

SEQ ID NO: 221841 - DNA, 20 bp, synthetic construct
  source 1..20: mol_type = other DNA
gcagcagacctgtcaggcca

SEQ ID NO: 221842 - DNA, 20 bp, synthetic construct
  source 1..20: mol_type = other DNA
agcagcagacctgtcaggcc

SEQ ID NO: 221843 - DNA, 20 bp, synthetic construct
  source 1..20: mol_type = other DNA
cagcagcagacctgtcaggc

SEQ ID NO: 221844 - DNA, 20 bp, synthetic construct
  source 1..20: mol_type = other DNA
ccagcagcagacctgtcagg

SEQ ID NO: 221845 - DNA, 20 bp, synthetic construct
  source 1..20: mol_type = other DNA
accagcagcagacctgtcag

SEQ ID NO: 221846 - DNA, 20 bp, synthetic construct
  source 1..20: mol_type = other DNA
caccagcagcagacctgtca

SEQ ID NO: 221847 - DNA, 20 bp, synthetic construct
  source 1..20: mol_type = other DNA
gcaccagcagcagacctgtc

SEQ ID NO: 221848 - DNA, 20 bp, synthetic construct
  source 1..20: mol_type = other DNA
ggcaccagcagcagacctgt

SEQ ID NO: 221849 - DNA, 20 bp, synthetic construct
  source 1..20: mol_type = other DNA
tggcaccagcagcagacctg

SEQ ID NO: 221850 - DNA, 20 bp, synthetic construct
  source 1..20: mol_type = other DNA
ctggcaccagcagcagacct

SEQ ID NO: 221851 - DNA, 20 bp, synthetic construct
  source 1..20: mol_type = other DNA
cctggcaccagcagcagacc

SEQ ID NO: 221852 - DNA, 20 bp, synthetic construct
  source 1..20: mol_type = other DNA
tcctggcaccagcagcagac

SEQ ID NO: 221853 - DNA, 20 bp, synthetic construct
  source 1..20: mol_type = other DNA
atcctggcaccagcagcaga

SEQ ID NO: 221854 - DNA, 20 bp, synthetic construct
  source 1..20: mol_type = other DNA
catcctggcaccagcagcag

SEQ ID NO: 221855 - DNA, 20 bp, synthetic construct
  source 1..20: mol_type = other DNA
acatcctggcaccagcagca

SEQ ID NO: 221856 - DNA, 20 bp, synthetic construct
  source 1..20: mol_type = other DNA
gacatcctggcaccagcagc

SEQ ID NO: 221857 - DNA, 20 bp, synthetic construct
  source 1..20: mol_type = other DNA
agacatcctggcaccagcag

SEQ ID NO: 221858 - DNA, 20 bp, synthetic construct
  source 1..20: mol_type = other DNA
cagacatcctggcaccagca

SEQ ID NO: 221859 - DNA, 20 bp, synthetic construct
  source 1..20: mol_type = other DNA
ccagacatcctggcaccagc

SEQ ID NO: 221860 - DNA, 20 bp, synthetic construct
  source 1..20: mol_type = other DNA
cccagacatcctggcaccag

SEQ ID NO: 221861 - DNA, 20 bp, synthetic construct
  source 1..20: mol_type = other DNA
acccagacatcctggcacca

SEQ ID NO: 221862 - DNA, 20 bp, synthetic construct
  source 1..20: mol_type = other DNA
aacccagacatcctggcacc

SEQ ID NO: 221863 - DNA, 20 bp, synthetic construct
  source 1..20: mol_type = other DNA
aaacccagacatcctggcac

SEQ ID NO: 221864 - DNA, 20 bp, synthetic construct
  source 1..20: mol_type = other DNA
aaaacccagacatcctggca

SEQ ID NO: 221865 - DNA, 20 bp, synthetic construct
  source 1..20: mol_type = other DNA
caaaacccagacatcctggc

SEQ ID NO: 221866 - DNA, 20 bp, synthetic construct
  source 1..20: mol_type = other DNA
tcaaaacccagacatcctgg

SEQ ID NO: 221867 - DNA, 20 bp, synthetic construct
  source 1..20: mol_type = other DNA
ttcaaaacccagacatcctg

SEQ ID NO: 221868 - DNA, 20 bp, synthetic construct
  source 1..20: mol_type = other DNA
cttcaaaacccagacatcct

SEQ ID NO: 221869 - DNA, 20 bp, synthetic construct
  source 1..20: mol_type = other DNA
gcttcaaaacccagacatcc

SEQ ID NO: 221870 - DNA, 20 bp, synthetic construct
  source 1..20: mol_type = other DNA
ggcttcaaaacccagacatc

SEQ ID NO: 221871 - DNA, 20 bp, synthetic construct
  source 1..20: mol_type = other DNA
aggcttcaaaacccagacat

SEQ ID NO: 221872 - DNA, 20 bp, synthetic construct
  source 1..20: mol_type = other DNA
caggcttcaaaacccagaca

SEQ ID NO: 221873 - DNA, 20 bp, synthetic construct
  source 1..20: mol_type = other DNA
ccaggcttcaaaacccagac

SEQ ID NO: 221874 - DNA, 20 bp, synthetic construct
  source 1..20: mol_type = other DNA
gccaggcttcaaaacccaga

SEQ ID NO: 221875 - DNA, 20 bp, synthetic construct
  source 1..20: mol_type = other DNA
agccaggcttcaaaacccag

SEQ ID NO: 221876 - DNA, 20 bp, synthetic construct
  source 1..20: mol_type = other DNA
gagccaggcttcaaaaccca

SEQ ID NO: 221877 - DNA, 20 bp, synthetic construct
  source 1..20: mol_type = other DNA
ggagccaggcttcaaaaccc

SEQ ID NO: 221878 - DNA, 20 bp, synthetic construct
  source 1..20: mol_type = other DNA
tggagccaggcttcaaaacc

SEQ ID NO: 221879 - DNA, 20 bp, synthetic construct
  source 1..20: mol_type = other DNA
atggagccaggcttcaaaac

SEQ ID NO: 221880 - DNA, 20 bp, synthetic construct
  source 1..20: mol_type = other DNA
aatggagccaggcttcaaaa

SEQ ID NO: 221881 - DNA, 20 bp, synthetic construct
  source 1..20: mol_type = other DNA
taatggagccaggcttcaaa

SEQ ID NO: 221882 - DNA, 20 bp, synthetic construct
  source 1..20: mol_type = other DNA
gtaatggagccaggcttcaa

SEQ ID NO: 221883 - DNA, 20 bp, synthetic construct
  source 1..20: mol_type = other DNA
tgtaatggagccaggcttca

SEQ ID NO: 221884 - DNA, 20 bp, synthetic construct
  source 1..20: mol_type = other DNA
atgtaatggagccaggcttc

SEQ ID NO: 221885 - DNA, 20 bp, synthetic construct
  source 1..20: mol_type = other DNA
tatgtaatggagccaggctt

SEQ ID NO: 221886 - DNA, 20 bp, synthetic construct
  source 1..20: mol_type = other DNA
gtatgtaatggagccaggct

SEQ ID NO: 221887 - DNA, 20 bp, synthetic construct
  source 1..20: mol_type = other DNA
agtatgtaatggagccaggc

SEQ ID NO: 221888 - DNA, 20 bp, synthetic construct
  source 1..20: mol_type = other DNA
aagtatgtaatggagccagg

SEQ ID NO: 221889 - DNA, 20 bp, synthetic construct
  source 1..20: mol_type = other DNA
gaagtatgtaatggagccag

SEQ ID NO: 221890 - DNA, 20 bp, synthetic construct
  source 1..20: mol_type = other DNA
ggaagtatgtaatggagcca

SEQ ID NO: 221891 - DNA, 20 bp, synthetic construct
  source 1..20: mol_type = other DNA
aggaagtatgtaatggagcc

SEQ ID NO: 221892 - DNA, 20 bp, synthetic construct
  source 1..20: mol_type = other DNA
caggaagtatgtaatggagc

SEQ ID NO: 221893 - DNA, 20 bp, synthetic construct
  source 1..20: mol_type = other DNA
acaggaagtatgtaatggag

SEQ ID NO: 221894 - DNA, 20 bp, synthetic construct
  source 1..20: mol_type = other DNA
cacaggaagtatgtaatgga

SEQ ID NO: 221895 - DNA, 20 bp, synthetic construct
  source 1..20: mol_type = other DNA
acacaggaagtatgtaatgg

SEQ ID NO: 221896 - DNA, 20 bp, synthetic construct
  source 1..20: mol_type = other DNA
cacacaggaagtatgtaatg

SEQ ID NO: 221897 - DNA, 20 bp, synthetic construct
  source 1..20: mol_type = other DNA
tcacacaggaagtatgtaat

SEQ ID NO: 221898 - DNA, 20 bp, synthetic construct
  source 1..20: mol_type = other DNA
gtcacacaggaagtatgtaa

SEQ ID NO: 221899 - DNA, 20 bp, synthetic construct
  source 1..20: mol_type = other DNA
ggtcacacaggaagtatgta

SEQ ID NO: 221900 - DNA, 20 bp, synthetic construct
  source 1..20: mol_type = other DNA
aggtcacacaggaagtatgt

SEQ ID NO: 221901 - DNA, 20 bp, synthetic construct
  source 1..20: mol_type = other DNA
aaggtcacacaggaagtatg

SEQ ID NO: 221902 - DNA, 20 bp, synthetic construct
  source 1..20: mol_type = other DNA
caaggtcacacaggaagtat

SEQ ID NO: 221903 - DNA, 20 bp, synthetic construct
  source 1..20: mol_type = other DNA
ccaaggtcacacaggaagta

SEQ ID NO: 221904 - DNA, 20 bp, synthetic construct
  source 1..20: mol_type = other DNA
cccaaggtcacacaggaagt

SEQ ID NO: 221905 - DNA, 20 bp, synthetic construct
  source 1..20: mol_type = other DNA
gcccaaggtcacacaggaag

SEQ ID NO: 221906 - DNA, 20 bp, synthetic construct
  source 1..20: mol_type = other DNA
tgcccaaggtcacacaggaa

SEQ ID NO: 221907 - DNA, 20 bp, synthetic construct
  source 1..20: mol_type = other DNA
ttgcccaaggtcacacagga

SEQ ID NO: 221908 - DNA, 20 bp, synthetic construct
  source 1..20: mol_type = other DNA
gttgcccaaggtcacacagg

SEQ ID NO: 221909 - DNA, 20 bp, synthetic construct
  source 1..20: mol_type = other DNA
agttgcccaaggtcacacag

SEQ ID NO: 221910 - DNA, 20 bp, synthetic construct
  source 1..20: mol_type = other DNA
aagttgcccaaggtcacaca

SEQ ID NO: 221911 - DNA, 20 bp, synthetic construct
  source 1..20: mol_type = other DNA
taagttgcccaaggtcacac

SEQ ID NO: 221912 - DNA, 20 bp, synthetic construct
  source 1..20: mol_type = other DNA
gtaagttgcccaaggtcaca

SEQ ID NO: 221913 - DNA, 20 bp, synthetic construct
  source 1..20: mol_type = other DNA
agtaagttgcccaaggtcac

SEQ ID NO: 221914 - DNA, 20 bp, synthetic construct
  source 1..20: mol_type = other DNA
gagtaagttgcccaaggtca

SEQ ID NO: 221915 - DNA, 20 bp, synthetic construct
  source 1..20: mol_type = other DNA
tgagtaagttgcccaaggtc

SEQ ID NO: 221916 - DNA, 20 bp, synthetic construct
  source 1..20: mol_type = other DNA
ttgagtaagttgcccaaggt

SEQ ID NO: 221917 - DNA, 20 bp, synthetic construct
  source 1..20: mol_type = other DNA
gttgagtaagttgcccaagg

SEQ ID NO: 221918 - DNA, 20 bp, synthetic construct
  source 1..20: mol_type = other DNA
ggttgagtaagttgcccaag

SEQ ID NO: 221919 - DNA, 20 bp, synthetic construct
  source 1..20: mol_type = other DNA
aggttgagtaagttgcccaa

SEQ ID NO: 221920 - DNA, 20 bp, synthetic construct
  source 1..20: mol_type = other DNA
caggttgagtaagttgccca

SEQ ID NO: 221921 - DNA, 20 bp, synthetic construct
  source 1..20: mol_type = other DNA
acaggttgagtaagttgccc

SEQ ID NO: 221922 - DNA, 20 bp, synthetic construct
  source 1..20: mol_type = other DNA
gacaggttgagtaagttgcc

SEQ ID NO: 221923 - DNA, 20 bp, synthetic construct
  source 1..20: mol_type = other DNA
agacaggttgagtaagttgc

SEQ ID NO: 221924 - DNA, 20 bp, synthetic construct
  source 1..20: mol_type = other DNA
cagacaggttgagtaagttg

SEQ ID NO: 221925 - DNA, 20 bp, synthetic construct
  source 1..20: mol_type = other DNA
acagacaggttgagtaagtt

SEQ ID NO: 221926 - DNA, 20 bp, synthetic construct
  source 1..20: mol_type = other DNA
aacagacaggttgagtaagt

SEQ ID NO: 221927 - DNA, 20 bp, synthetic construct
  source 1..20: mol_type = other DNA
gaacagacaggttgagtaag

SEQ ID NO: 221928 - DNA, 20 bp, synthetic construct
  source 1..20: mol_type = other DNA
ggaacagacaggttgagtaa

SEQ ID NO: 221929 - DNA, 20 bp, synthetic construct
  source 1..20: mol_type = other DNA
aggaacagacaggttgagta

SEQ ID NO: 221930 - DNA, 20 bp, synthetic construct
  source 1..20: mol_type = other DNA
gaggaacagacaggttgagt

SEQ ID NO: 221931 - DNA, 20 bp, synthetic construct
  source 1..20: mol_type = other DNA
tgaggaacagacaggttgag

SEQ ID NO: 221932 - DNA, 20 bp, synthetic construct
  source 1..20: mol_type = other DNA
ctgaggaacagacaggttga

SEQ ID NO: 221933 - DNA, 20 bp, synthetic construct
  source 1..20: mol_type = other DNA
actgaggaacagacaggttg

SEQ ID NO: 221934 - DNA, 20 bp, synthetic construct
  source 1..20: mol_type = other DNA
aactgaggaacagacaggtt

SEQ ID NO: 221935 - DNA, 20 bp, synthetic construct
  source 1..20: mol_type = other DNA
aaactgaggaacagacaggt

SEQ ID NO: 221936 - DNA, 20 bp, synthetic construct
  source 1..20: mol_type = other DNA
gaaactgaggaacagacagg

SEQ ID NO: 221937 - DNA, 20 bp, synthetic construct
  source 1..20: mol_type = other DNA
ggaaactgaggaacagacag

SEQ ID NO: 221938 - DNA, 20 bp, synthetic construct
  source 1..20: mol_type = other DNA
gggaaactgaggaacagaca

SEQ ID NO: 221939 - DNA, 20 bp, synthetic construct
  source 1..20: mol_type = other DNA
ggggaaactgaggaacagac

SEQ ID NO: 221940 - DNA, 20 bp, synthetic construct
  source 1..20: mol_type = other DNA
tggggaaactgaggaacaga

SEQ ID NO: 221941 - DNA, 20 bp, synthetic construct
  source 1..20: mol_type = other DNA
ctggggaaactgaggaacag

SEQ ID NO: 221942 - DNA, 20 bp, synthetic construct
  source 1..20: mol_type = other DNA
gctggggaaactgaggaaca

SEQ ID NO: 221943 - DNA, 20 bp, synthetic construct
  source 1..20: mol_type = other DNA
agctggggaaactgaggaac

SEQ ID NO: 221944 - DNA, 20 bp, synthetic construct
  source 1..20: mol_type = other DNA
cagctggggaaactgaggaa

SEQ ID NO: 221945 - DNA, 20 bp, synthetic construct
  source 1..20: mol_type = other DNA
acagctggggaaactgagga

SEQ ID NO: 221946 - DNA, 20 bp, synthetic construct
  source 1..20: mol_type = other DNA
tacagctggggaaactgagg

SEQ ID NO: 221947 - DNA, 20 bp, synthetic construct
  source 1..20: mol_type = other DNA
atacagctggggaaactgag

SEQ ID NO: 221948 - DNA, 20 bp, synthetic construct
  source 1..20: mol_type = other DNA
aatacagctggggaaactga

SEQ ID NO: 221949 - DNA, 20 bp, synthetic construct
  source 1..20: mol_type = other DNA
taatacagctggggaaactg

SEQ ID NO: 221950 - DNA, 20 bp, synthetic construct
  source 1..20: mol_type = other DNA
ataatacagctggggaaact

SEQ ID NO: 221951 - DNA, 20 bp, synthetic construct
  source 1..20: mol_type = other DNA
cataatacagctggggaaac

SEQ ID NO: 221952 - DNA, 20 bp, synthetic construct
  source 1..20: mol_type = other DNA
acataatacagctggggaaa

SEQ ID NO: 221953 - DNA, 20 bp, synthetic construct
  source 1..20: mol_type = other DNA
gacataatacagctggggaa

SEQ ID NO: 221954 - DNA, 20 bp, synthetic construct
  source 1..20: mol_type = other DNA
tgacataatacagctgggga

SEQ ID NO: 221955 - DNA, 20 bp, synthetic construct
  source 1..20: mol_type = other DNA
ctgacataatacagctgggg

SEQ ID NO: 221956 - DNA, 20 bp, synthetic construct
  source 1..20: mol_type = other DNA
gctgacataatacagctggg

SEQ ID NO: 221957 - DNA, 20 bp, synthetic construct
  source 1..20: mol_type = other DNA
tgctgacataatacagctgg

SEQ ID NO: 221958 - DNA, 20 bp, synthetic construct
  source 1..20: mol_type = other DNA
atgctgacataatacagctg

SEQ ID NO: 221959 - DNA, 20 bp, synthetic construct
  source 1..20: mol_type = other DNA
tatgctgacataatacagct

SEQ ID NO: 221960 - DNA, 20 bp, synthetic construct
  source 1..20: mol_type = other DNA
ttatgctgacataatacagc

SEQ ID NO: 221961 - DNA, 20 bp, synthetic construct
  source 1..20: mol_type = other DNA
attatgctgacataatacag

SEQ ID NO: 221962 - DNA, 20 bp, synthetic construct
  source 1..20: mol_type = other DNA
tattatgctgacataataca

SEQ ID NO: 221963 - DNA, 20 bp, synthetic construct
  source 1..20: mol_type = other DNA
ctattatgctgacataatac

SEQ ID NO: 221964 - DNA, 20 bp, synthetic construct
  source 1..20: mol_type = other DNA
actattatgctgacataata

SEQ ID NO: 221965 - DNA, 20 bp, synthetic construct
  source 1..20: mol_type = other DNA
aactattatgctgacataat

SEQ ID NO: 221966 - DNA, 20 bp, synthetic construct
  source 1..20: mol_type = other DNA
aaactattatgctgacataa

SEQ ID NO: 221967 - DNA, 20 bp, synthetic construct
  source 1..20: mol_type = other DNA
caaactattatgctgacata

SEQ ID NO: 221968 - DNA, 20 bp, synthetic construct
  source 1..20: mol_type = other DNA
acaaactattatgctgacat

SEQ ID NO: 221969 - DNA, 20 bp, synthetic construct
  source 1..20: mol_type = other DNA
aacaaactattatgctgaca

SEQ ID NO: 221970 - DNA, 20 bp, synthetic construct
  source 1..20: mol_type = other DNA
caacaaactattatgctgac

SEQ ID NO: 221971 - DNA, 20 bp, synthetic construct
  source 1..20: mol_type = other DNA
acaacaaactattatgctga

SEQ ID NO: 221972 - DNA, 20 bp, synthetic construct
  source 1..20: mol_type = other DNA
cacaacaaactattatgctg

SEQ ID NO: 221973 - DNA, 20 bp, synthetic construct
  source 1..20: mol_type = other DNA
acacaacaaactattatgct

SEQ ID NO: 221974 - DNA, 20 bp, synthetic construct
  source 1..20: mol_type = other DNA
cacacaacaaactattatgc

SEQ ID NO: 221975 - DNA, 20 bp, synthetic construct
  source 1..20: mol_type = other DNA
tcacacaacaaactattatg

SEQ ID NO: 221976 - DNA, 20 bp, synthetic construct
  source 1..20: mol_type = other DNA
ttcacacaacaaactattat

SEQ ID NO: 221977 - DNA, 20 bp, synthetic construct
  source 1..20: mol_type = other DNA
attcacacaacaaactatta

SEQ ID NO: 221978 - DNA, 20 bp, synthetic construct
  source 1..20: mol_type = other DNA
aattcacacaacaaactatt

SEQ ID NO: 221979 - DNA, 20 bp, synthetic construct
  source 1..20: mol_type = other DNA
taattcacacaacaaactat

SEQ ID NO: 221980 - DNA, 20 bp, synthetic construct
  source 1..20: mol_type = other DNA
ttaattcacacaacaaacta

SEQ ID NO: 221981 - DNA, 20 bp, synthetic construct
  source 1..20: mol_type = other DNA
tttaattcacacaacaaact

SEQ ID NO: 221982 - DNA, 20 bp, synthetic construct
  source 1..20: mol_type = other DNA
atttaattcacacaacaaac

SEQ ID NO: 221983 - DNA, 20 bp, synthetic construct
  source 1..20: mol_type = other DNA
catttaattcacacaacaaa

SEQ ID NO: 221984 - DNA, 20 bp, synthetic construct
  source 1..20: mol_type = other DNA
tcatttaattcacacaacaa

SEQ ID NO: 221985 - DNA, 20 bp, synthetic construct
  source 1..20: mol_type = other DNA
ctcatttaattcacacaaca

SEQ ID NO: 221986 - DNA, 20 bp, synthetic construct
  source 1..20: mol_type = other DNA
cctcatttaattcacacaac

SEQ ID NO: 221987 - DNA, 20 bp, synthetic construct
  source 1..20: mol_type = other DNA
acctcatttaattcacacaa

SEQ ID NO: 221988 - DNA, 20 bp, synthetic construct
  source 1..20: mol_type = other DNA
tacctcatttaattcacaca

SEQ ID NO: 221989 - DNA, 20 bp, synthetic construct
  source 1..20: mol_type = other DNA
ttacctcatttaattcacac

SEQ ID NO: 221990 - DNA, 20 bp, synthetic construct
  source 1..20: mol_type = other DNA
attacctcatttaattcaca

SEQ ID NO: 221991 - DNA, 20 bp, synthetic construct
  source 1..20: mol_type = other DNA
tattacctcatttaattcac

SEQ ID NO: 221992 - DNA, 20 bp, synthetic construct
  source 1..20: mol_type = other DNA
ttattacctcatttaattca

SEQ ID NO: 221993 - DNA, 20 bp, synthetic construct
  source 1..20: mol_type = other DNA
gttattacctcatttaattc

SEQ ID NO: 221994 - DNA, 20 bp, synthetic construct
  source 1..20: mol_type = other DNA
agttattacctcatttaatt

SEQ ID NO: 221995 - DNA, 20 bp, synthetic construct
  source 1..20: mol_type = other DNA
cagttattacctcatttaat

SEQ ID NO: 221996 - DNA, 20 bp, synthetic construct
  source 1..20: mol_type = other DNA
ccagttattacctcatttaa

SEQ ID NO: 221997 - DNA, 20 bp, synthetic construct
  source 1..20: mol_type = other DNA
tccagttattacctcattta

SEQ ID NO: 221998 - DNA, 20 bp, synthetic construct
  source 1..20: mol_type = other DNA
ttccagttattacctcattt

SEQ ID NO: 221999 - DNA, 20 bp, synthetic construct
  source 1..20: mol_type = other DNA
tttccagttattacctcatt

SEQ ID NO: 222000 - DNA, 20 bp, synthetic construct
  source 1..20: mol_type = other DNA
atttccagttattacctcat

SEQ ID NO: 222001 - DNA, 20 bp, synthetic construct
  source 1..20: mol_type = other DNA
catttccagttattacctca

SEQ ID NO: 222002 - DNA, 20 bp, synthetic construct
  source 1..20: mol_type = other DNA
gcatttccagttattacctc

SEQ ID NO: 222003 - DNA, 20 bp, synthetic construct
  source 1..20: mol_type = other DNA
agcatttccagttattacct

SEQ ID NO: 222004 - DNA, 20 bp, synthetic construct
  source 1..20: mol_type = other DNA
aagcatttccagttattacc

SEQ ID NO: 222005 - DNA, 20 bp, synthetic construct
  source 1..20: mol_type = other DNA
gaagcatttccagttattac

SEQ ID NO: 222006 - DNA, 20 bp, synthetic construct
  source 1..20: mol_type = other DNA
tgaagcatttccagttatta

SEQ ID NO: 222007 - DNA, 20 bp, synthetic construct
  source 1..20: mol_type = other DNA
ttgaagcatttccagttatt

SEQ ID NO: 222008 - DNA, 20 bp, synthetic construct
  source 1..20: mol_type = other DNA
tttgaagcatttccagttat

SEQ ID NO: 222009 - DNA, 20 bp, synthetic construct
  source 1..20: mol_type = other DNA
gtttgaagcatttccagtta

SEQ ID NO: 222010 - DNA, 20 bp, synthetic construct
  source 1..20: mol_type = other DNA
tgtttgaagcatttccagtt

SEQ ID NO: 222011 - DNA, 20 bp, synthetic construct
  source 1..20: mol_type = other DNA
atgtttgaagcatttccagt

SEQ ID NO: 222012 - DNA, 20 bp, synthetic construct
  source 1..20: mol_type = other DNA
catgtttgaagcatttccag

SEQ ID NO: 222013 - DNA, 20 bp, synthetic construct
  source 1..20: mol_type = other DNA
ccatgtttgaagcatttcca

SEQ ID NO: 222014 - DNA, 20 bp, synthetic construct
  source 1..20: mol_type = other DNA
accatgtttgaagcatttcc

SEQ ID NO: 222015 - DNA, 20 bp, synthetic construct
  source 1..20: mol_type = other DNA
aaccatgtttgaagcatttc

SEQ ID NO: 222016 - DNA, 20 bp, synthetic construct
  source 1..20: mol_type = other DNA
gaaccatgtttgaagcattt

SEQ ID NO: 222017 - DNA, 20 bp, synthetic construct
  source 1..20: mol_type = other DNA
ggaaccatgtttgaagcatt

SEQ ID NO: 222018 - DNA, 20 bp, synthetic construct
  source 1..20: mol_type = other DNA
aggaaccatgtttgaagcat

SEQ ID NO: 222019 - DNA, 20 bp, synthetic construct
  source 1..20: mol_type = other DNA
taggaaccatgtttgaagca

SEQ ID NO: 222020 - DNA, 20 bp, synthetic construct
  source 1..20: mol_type = other DNA
ataggaaccatgtttgaagc

SEQ ID NO: 222021 - DNA, 20 bp, synthetic construct
  source 1..20: mol_type = other DNA
gataggaaccatgtttgaag

SEQ ID NO: 222022 - DNA, 20 bp, synthetic construct
  source 1..20: mol_type = other DNA
tgataggaaccatgtttgaa

SEQ ID NO: 222023 - DNA, 20 bp, synthetic construct
  source 1..20: mol_type = other DNA
atgataggaaccatgtttga

SEQ ID NO: 222024 - DNA, 20 bp, synthetic construct
  source 1..20: mol_type = other DNA
catgataggaaccatgtttg

SEQ ID NO: 222025 - DNA, 20 bp, synthetic construct
  source 1..20: mol_type = other DNA
tcatgataggaaccatgttt

SEQ ID NO: 222026 - DNA, 20 bp, synthetic construct
  source 1..20: mol_type = other DNA
ctcatgataggaaccatgtt

SEQ ID NO: 222027 - DNA, 20 bp, synthetic construct
  source 1..20: mol_type = other DNA
tctcatgataggaaccatgt

SEQ ID NO: 222028 - DNA, 20 bp, synthetic construct
  source 1..20: mol_type = other DNA
ttctcatgataggaaccatg

SEQ ID NO: 222029 - DNA, 20 bp, synthetic construct
  source 1..20: mol_type = other DNA
tttctcatgataggaaccat

SEQ ID NO: 222030 - DNA, 20 bp, synthetic construct
  source 1..20: mol_type = other DNA
atttctcatgataggaacca

SEQ ID NO: 222031 - DNA, 20 bp, synthetic construct
  source 1..20: mol_type = other DNA
gatttctcatgataggaacc

SEQ ID NO: 222032 - DNA, 20 bp, synthetic construct
  source 1..20: mol_type = other DNA
ggatttctcatgataggaac

SEQ ID NO: 222033 - DNA, 20 bp, synthetic construct
  source 1..20: mol_type = other DNA
aggatttctcatgataggaa

SEQ ID NO: 222034 - DNA, 20 bp, synthetic construct
  source 1..20: mol_type = other DNA
caggatttctcatgatagga

SEQ ID NO: 222035 - DNA, 20 bp, synthetic construct
  source 1..20: mol_type = other DNA
gcaggatttctcatgatagg

SEQ ID NO: 222036 - DNA, 20 bp, synthetic construct
  source 1..20: mol_type = other DNA
agcaggatttctcatgatag

SEQ ID NO: 222037 - DNA, 20 bp, synthetic construct
  source 1..20: mol_type = other DNA
aagcaggatttctcatgata

SEQ ID NO: 222038 - DNA, 20 bp, synthetic construct
  source 1..20: mol_type = other DNA
aaagcaggatttctcatgat

SEQ ID NO: 222039 - DNA, 20 bp, synthetic construct
  source 1..20: mol_type = other DNA
gaaagcaggatttctcatga

SEQ ID NO: 222040 - DNA, 20 bp, synthetic construct
  source 1..20: mol_type = other DNA
ggaaagcaggatttctcatg

SEQ ID NO: 222041 - DNA, 20 bp, synthetic construct
  source 1..20: mol_type = other DNA
cggaaagcaggatttctcat

SEQ ID NO: 222042 - DNA, 20 bp, synthetic construct
  source 1..20: mol_type = other DNA
gcggaaagcaggatttctca

SEQ ID NO: 222043 - DNA, 20 bp, synthetic construct
  source 1..20: mol_type = other DNA
ggcggaaagcaggatttctc

SEQ ID NO: 222044 - DNA, 20 bp, synthetic construct
  source 1..20: mol_type = other DNA
aggcggaaagcaggatttct

SEQ ID NO: 222045 - DNA, 20 bp, synthetic construct
  source 1..20: mol_type = other DNA
taggcggaaagcaggatttc

SEQ ID NO: 222046 - DNA, 20 bp, synthetic construct
  source 1..20: mol_type = other DNA
ttaggcggaaagcaggattt

SEQ ID NO: 222047 - DNA, 20 bp, synthetic construct
  source 1..20: mol_type = other DNA
tttaggcggaaagcaggatt

SEQ ID NO: 222048 - DNA, 20 bp, synthetic construct
  source 1..20: mol_type = other DNA
atttaggcggaaagcaggat

SEQ ID NO: 222049 - DNA, 20 bp, synthetic construct
  source 1..20: mol_type = other DNA
catttaggcggaaagcagga

SEQ ID NO: 222050 - DNA, 20 bp, synthetic construct
  source 1..20: mol_type = other DNA
acatttaggcggaaagcagg

SEQ ID NO: 222051 - DNA, 20 bp, synthetic construct
  source 1..20: mol_type = other DNA
cacatttaggcggaaagcag

SEQ ID NO: 222052 - DNA, 20 bp, synthetic construct
  source 1..20: mol_type = other DNA
gcacatttaggcggaaagca

SEQ ID NO: 222053 - DNA, 20 bp, synthetic construct
  source 1..20: mol_type = other DNA
agcacatttaggcggaaagc

SEQ ID NO: 222054 - DNA, 20 bp, synthetic construct
  source 1..20: mol_type = other DNA
cagcacatttaggcggaaag

SEQ ID NO: 222055 - DNA, 20 bp, synthetic construct
  source 1..20: mol_type = other DNA
ccagcacatttaggcggaaa

SEQ ID NO: 222056 - DNA, 20 bp, synthetic construct
  source 1..20: mol_type = other DNA
tccagcacatttaggcggaa

SEQ ID NO: 222057 - DNA, 20 bp, synthetic construct
  source 1..20: mol_type = other DNA
ttccagcacatttaggcgga

SEQ ID NO: 222058 - DNA, 20 bp, synthetic construct
  source 1..20: mol_type = other DNA
tttccagcacatttaggcgg

SEQ ID NO: 222059 - DNA, 20 bp, synthetic construct
  source 1..20: mol_type = other DNA
ttttccagcacatttaggcg

SEQ ID NO: 222060 - DNA, 20 bp, synthetic construct
  source 1..20: mol_type = other DNA
attttccagcacatttaggc

SEQ ID NO: 222061 - DNA, 20 bp, synthetic construct
  source 1..20: mol_type = other DNA
aattttccagcacatttagg

SEQ ID NO: 222062 - DNA, 20 bp, synthetic construct
  source 1..20: mol_type = other DNA
gaattttccagcacatttag

SEQ ID NO: 222063 - DNA, 20 bp, synthetic construct
  source 1..20: mol_type = other DNA
ggaattttccagcacattta

SEQ ID NO: 222064 - DNA, 20 bp, synthetic construct
  source 1..20: mol_type = other DNA
aggaattttccagcacattt

SEQ ID NO: 222065 - DNA, 20 bp, synthetic construct
  source 1..20: mol_type = other DNA
caggaattttccagcacatt

SEQ ID NO: 222066 - DNA, 20 bp, synthetic construct
  source 1..20: mol_type = other DNA
ccaggaattttccagcacat

SEQ ID NO: 222067 - DNA, 20 bp, synthetic construct
  source 1..20: mol_type = other DNA
accaggaattttccagcaca

SEQ ID NO: 222068 - DNA, 20 bp, synthetic construct
  source 1..20: mol_type = other DNA
caccaggaattttccagcac

SEQ ID NO: 222069 - DNA, 20 bp, synthetic construct
  source 1..20: mol_type = other DNA
ccaccaggaattttccagca

SEQ ID NO: 222070 - DNA, 20 bp, synthetic construct
  source 1..20: mol_type = other DNA
accaccaggaattttccagc

SEQ ID NO: 222071 - DNA, 20 bp, synthetic construct
  source 1..20: mol_type = other DNA
caccaccaggaattttccag

SEQ ID NO: 222072 - DNA, 20 bp, synthetic construct
  source 1..20: mol_type = other DNA
gcaccaccaggaattttcca

SEQ ID NO: 222073 - DNA, 20 bp, synthetic construct
  source 1..20: mol_type = other DNA
tgcaccaccaggaattttcc

SEQ ID NO: 222074 - DNA, 20 bp, synthetic construct
  source 1..20: mol_type = other DNA
ctgcaccaccaggaattttc

SEQ ID NO: 222075 - DNA, 20 bp, synthetic construct
  source 1..20: mol_type = other DNA
tctgcaccaccaggaatttt

SEQ ID NO: 222076 - DNA, 20 bp, synthetic construct
  source 1..20: mol_type = other DNA
ttctgcaccaccaggaattt

SEQ ID NO: 222077 - DNA, 20 bp, synthetic construct
  source 1..20: mol_type = other DNA
gttctgcaccaccaggaatt

SEQ ID NO: 222078 - DNA, 20 bp, synthetic construct
  source 1..20: mol_type = other DNA
tgttctgcaccaccaggaat

SEQ ID NO: 222079 - DNA, 20 bp, synthetic construct
  source 1..20: mol_type = other DNA
ctgttctgcaccaccaggaa

SEQ ID NO: 222080 - DNA, 20 bp, synthetic construct
  source 1..20: mol_type = other DNA
cctgttctgcaccaccagga

SEQ ID NO: 222081 - DNA, 20 bp, synthetic construct
  source 1..20: mol_type = other DNA
tcctgttctgcaccaccagg

SEQ ID NO: 222082 - DNA, 20 bp, synthetic construct
  source 1..20: mol_type = other DNA
ctcctgttctgcaccaccag

SEQ ID NO: 222083 - DNA, 20 bp, synthetic construct
  source 1..20: mol_type = other DNA
tctcctgttctgcaccacca

SEQ ID NO: 222084 - DNA, 20 bp, synthetic construct
  source 1..20: mol_type = other DNA
gtctcctgttctgcaccacc

SEQ ID NO: 222085 - DNA, 20 bp, synthetic construct
  source 1..20: mol_type = other DNA
ggtctcctgttctgcaccac

SEQ ID NO: 222086 - DNA, 20 bp, synthetic construct
  source 1..20: mol_type = other DNA
tggtctcctgttctgcacca

SEQ ID NO: 222087 - DNA, 20 bp, synthetic construct
  source 1..20: mol_type = other DNA
ctggtctcctgttctgcacc

SEQ ID NO: 222088 - DNA, 20 bp, synthetic construct
  source 1..20: mol_type = other DNA
tctggtctcctgttctgcac

SEQ ID NO: 222089 - DNA, 20 bp, synthetic construct
  source 1..20: mol_type = other DNA
ctctggtctcctgttctgca

SEQ ID NO: 222090 - DNA, 20 bp, synthetic construct
  source 1..20: mol_type = other DNA
gctctggtctcctgttctgc

SEQ ID NO: 222091 - DNA, 20 bp, synthetic construct
  source 1..20: mol_type = other DNA
tgctctggtctcctgttctg

SEQ ID NO: 222092 - DNA, 20 bp, synthetic construct
  source 1..20: mol_type = other DNA
ttgctctggtctcctgttct

SEQ ID NO: 222093 - DNA, 20 bp, synthetic construct
  source 1..20: mol_type = other DNA
tttgctctggtctcctgttc

SEQ ID NO: 222094 - DNA, 20 bp, synthetic construct
  source 1..20: mol_type = other DNA
ctttgctctggtctcctgtt

SEQ ID NO: 222095 - DNA, 20 bp, synthetic construct
  source 1..20: mol_type = other DNA
cctttgctctggtctcctgt

SEQ ID NO: 222096 - DNA, 20 bp, synthetic construct
  source 1..20: mol_type = other DNA
tcctttgctctggtctcctg

SEQ ID NO: 222097 - DNA, 20 bp, synthetic construct
  source 1..20: mol_type = other DNA
ttcctttgctctggtctcct

SEQ ID NO: 222098 - DNA, 20 bp, synthetic construct
  source 1..20: mol_type = other DNA
tttcctttgctctggtctcc

SEQ ID NO: 222099 - DNA, 20 bp, synthetic construct
  source 1..20: mol_type = other DNA
ctttcctttgctctggtctc

SEQ ID NO: 222100 - DNA, 20 bp, synthetic construct
  source 1..20: mol_type = other DNA
tctttcctttgctctggtct

SEQ ID NO: 222101 - DNA, 20 bp, synthetic construct
  source 1..20: mol_type = other DNA
gtctttcctttgctctggtc

SEQ ID NO: 222102 - DNA, 20 bp, synthetic construct
  source 1..20: mol_type = other DNA
tgtctttcctttgctctggt

SEQ ID NO: 222103 - DNA, 20 bp, synthetic construct
  source 1..20: mol_type = other DNA
ctgtctttcctttgctctgg

SEQ ID NO: 222104 - DNA, 20 bp, synthetic construct
  source 1..20: mol_type = other DNA
cctgtctttcctttgctctg

SEQ ID NO: 222105 - DNA, 20 bp, synthetic construct
  source 1..20: mol_type = other DNA
ccctgtctttcctttgctct

SEQ ID NO: 222106 - DNA, 20 bp, synthetic construct
  source 1..20: mol_type = other DNA
accctgtctttcctttgctc

SEQ ID NO: 222107 - DNA, 20 bp, synthetic construct
  source 1..20: mol_type = other DNA
caccctgtctttcctttgct

SEQ ID NO: 222108 - DNA, 20 bp, synthetic construct
  source 1..20: mol_type = other DNA
gcaccctgtctttcctttgc

SEQ ID NO: 222109 - DNA, 20 bp, synthetic construct
  source 1..20: mol_type = other DNA
tgcaccctgtctttcctttg

SEQ ID NO: 222110 - DNA, 20 bp, synthetic construct
  source 1..20: mol_type = other DNA
ctgcaccctgtctttccttt

SEQ ID NO: 222111 - DNA, 20 bp, synthetic construct
  source 1..20: mol_type = other DNA
tctgcaccctgtctttcctt

SEQ ID NO: 222112 - DNA, 20 bp, synthetic construct
  source 1..20: mol_type = other DNA
ttctgcaccctgtctttcct

SEQ ID NO: 222113 - DNA, 20 bp, synthetic construct
  source 1..20: mol_type = other DNA
cttctgcaccctgtctttcc

SEQ ID NO: 222114 - DNA, 20 bp, synthetic construct
  source 1..20: mol_type = other DNA
gcttctgcaccctgtctttc

SEQ ID NO: 222115 - DNA, 20 bp, synthetic construct
  source 1..20: mol_type = other DNA
ggcttctgcaccctgtcttt

SEQ ID NO: 222116 - DNA, 20 bp, synthetic construct
  source 1..20: mol_type = other DNA
tggcttctgcaccctgtctt

SEQ ID NO: 222117 - DNA, 20 bp, synthetic construct
  source 1..20: mol_type = other DNA
ttggcttctgcaccctgtct

SEQ ID NO: 222118 - DNA, 20 bp, synthetic construct
  source 1..20: mol_type = other DNA
tttggcttctgcaccctgtc

SEQ ID NO: 222119 - DNA, 20 bp, synthetic construct
  source 1..20: mol_type = other DNA
ttttggcttctgcaccctgt

SEQ ID NO: 222120 - DNA, 20 bp, synthetic construct
  source 1..20: mol_type = other DNA
tttttggcttctgcaccctg

SEQ ID NO: 222121 - DNA, 20 bp, synthetic construct
  source 1..20: mol_type = other DNA
atttttggcttctgcaccct

SEQ ID NO: 222122 - DNA, 20 bp, synthetic construct
  source 1..20: mol_type = other DNA
aatttttggcttctgcaccc

SEQ ID NO: 222123 - DNA, 20 bp, synthetic construct
  source 1..20: mol_type = other DNA
taatttttggcttctgcacc

SEQ ID NO: 222124 - DNA, 20 bp, synthetic construct
  source 1..20: mol_type = other DNA
gtaatttttggcttctgcac

SEQ ID NO: 222125 - DNA, 20 bp, synthetic construct
  source 1..20: mol_type = other DNA
ggtaatttttggcttctgca

SEQ ID NO: 222126 - DNA, 20 bp, synthetic construct
  source 1..20: mol_type = other DNA
aggtaatttttggcttctgc

SEQ ID NO: 222127 - DNA, 20 bp, synthetic construct
  source 1..20: mol_type = other DNA
aaggtaatttttggcttctg

SEQ ID NO: 222128 - DNA, 20 bp, synthetic construct
  source 1..20: mol_type = other DNA
caaggtaatttttggcttct

SEQ ID NO: 222129 - DNA, 20 bp, synthetic construct
  source 1..20: mol_type = other DNA
ccaaggtaatttttggcttc

SEQ ID NO: 222130 - DNA, 20 bp, synthetic construct
  source 1..20: mol_type = other DNA
tccaaggtaatttttggctt

SEQ ID NO: 222131 - DNA, 20 bp, synthetic construct
  source 1..20: mol_type = other DNA
ctccaaggtaatttttggct

SEQ ID NO: 222132 - DNA, 20 bp, synthetic construct
  source 1..20: mol_type = other DNA
tctccaaggtaatttttggc

SEQ ID NO: 222133 - DNA, 20 bp, synthetic construct
  source 1..20: mol_type = other DNA
ttctccaaggtaatttttgg

SEQ ID NO: 222134 - DNA, 20 bp, synthetic construct
  source 1..20: mol_type = other DNA
gttctccaaggtaatttttg

SEQ ID NO: 222135 - DNA, 20 bp, synthetic construct
  source 1..20: mol_type = other DNA
tgttctccaaggtaattttt

SEQ ID NO: 222136 - DNA, 20 bp, synthetic construct
  source 1..20: mol_type = other DNA
ttgttctccaaggtaatttt

SEQ ID NO: 222137 - DNA, 20 bp, synthetic construct
  source 1..20: mol_type = other DNA
tttgttctccaaggtaattt

SEQ ID NO: 222138 - DNA, 20 bp, synthetic construct
  source 1..20: mol_type = other DNA
ctttgttctccaaggtaatt

SEQ ID NO: 222139 - DNA, 20 bp, synthetic construct
  source 1..20: mol_type = other DNA
gctttgttctccaaggtaat

SEQ ID NO: 222140 - DNA, 20 bp, synthetic construct
  source 1..20: mol_type = other DNA
cgctttgttctccaaggtaa

SEQ ID NO: 222141 - DNA, 20 bp, synthetic construct
  source 1..20: mol_type = other DNA
gcgctttgttctccaaggta

SEQ ID NO: 222142 - DNA, 20 bp, synthetic construct
  source 1..20: mol_type = other DNA
tgcgctttgttctccaaggt

SEQ ID NO: 222143 - DNA, 20 bp, synthetic construct
  source 1..20: mol_type = other DNA
atgcgctttgttctccaagg

SEQ ID NO: 222144 - DNA, 20 bp, synthetic construct
  source 1..20: mol_type = other DNA
catgcgctttgttctccaag

SEQ ID NO: 222145 - DNA, 20 bp, synthetic construct
  source 1..20: mol_type = other DNA
acatgcgctttgttctccaa

SEQ ID NO: 222146 - DNA, 20 bp, synthetic construct
  source 1..20: mol_type = other DNA
aacatgcgctttgttctcca

SEQ ID NO: 222147 - DNA, 20 bp, synthetic construct
  source 1..20: mol_type = other DNA
taacatgcgctttgttctcc

SEQ ID NO: 222148 - DNA, 20 bp, synthetic construct
  source 1..20: mol_type = other DNA
ttaacatgcgctttgttctc

SEQ ID NO: 222149 - DNA, 20 bp, synthetic construct
  source 1..20: mol_type = other DNA
cttaacatgcgctttgttct

SEQ ID NO: 222150 - DNA, 20 bp, synthetic construct
  source 1..20: mol_type = other DNA
ccttaacatgcgctttgttc

SEQ ID NO: 222151 - DNA, 20 bp, synthetic construct
  source 1..20: mol_type = other DNA
accttaacatgcgctttgtt

SEQ ID NO: 222152 - DNA, 20 bp, synthetic construct
  source 1..20: mol_type = other DNA
aaccttaacatgcgctttgt

SEQ ID NO: 222153 - DNA, 20 bp, synthetic construct
  source 1..20: mol_type = other DNA
taaccttaacatgcgctttg

SEQ ID NO: 222154 - DNA, 20 bp, synthetic construct
  source 1..20: mol_type = other DNA
ataaccttaacatgcgcttt

SEQ ID NO: 222155 - DNA, 20 bp, synthetic construct
  source 1..20: mol_type = other DNA
aataaccttaacatgcgctt

SEQ ID NO: 222156 - DNA, 20 bp, synthetic construct
  source 1..20: mol_type = other DNA
aaataaccttaacatgcgct

SEQ ID NO: 222157 - DNA, 20 bp, synthetic construct
  source 1..20: mol_type = other DNA
aaaataaccttaacatgcgc

SEQ ID NO: 222158 - DNA, 20 bp, synthetic construct
  source 1..20: mol_type = other DNA
aaaaataaccttaacatgcg

SEQ ID NO: 222159 - DNA, 20 bp, synthetic construct
  source 1..20: mol_type = other DNA
caaaaataaccttaacatgc

SEQ ID NO: 222160 - DNA, 20 bp, synthetic construct
  source 1..20: mol_type = other DNA
ccaaaaataaccttaacatg

SEQ ID NO: 222161 - DNA, 20 bp, synthetic construct
  source 1..20: mol_type = other DNA
tccaaaaataaccttaacat

SEQ ID NO: 222162 - DNA, 20 bp, synthetic construct
  source 1..20: mol_type = other DNA
atccaaaaataaccttaaca

SEQ ID NO: 222163 - DNA, 20 bp, synthetic construct
  source 1..20: mol_type = other DNA
aatccaaaaataaccttaac

SEQ ID NO: 222164 - DNA, 20 bp, synthetic construct
  source 1..20: mol_type = other DNA
gaatccaaaaataaccttaa

SEQ ID NO: 222165 - DNA, 20 bp, synthetic construct
  source 1..20: mol_type = other DNA
agaatccaaaaataacctta

SEQ ID NO: 222166 - DNA, 20 bp, synthetic construct
  source 1..20: mol_type = other DNA
tagaatccaaaaataacctt

SEQ ID NO: 222167 - DNA, 20 bp, synthetic construct
  source 1..20: mol_type = other DNA
ctagaatccaaaaataacct

SEQ ID NO: 222168 - DNA, 20 bp, synthetic construct
  source 1..20: mol_type = other DNA
cctagaatccaaaaataacc

SEQ ID NO: 222169 - DNA, 20 bp, synthetic construct
  source 1..20: mol_type = other DNA
acctagaatccaaaaataac

SEQ ID NO: 222170 - DNA, 20 bp, synthetic construct
  source 1..20: mol_type = other DNA
aacctagaatccaaaaataa

SEQ ID NO: 222171 - DNA, 20 bp, synthetic construct
  source 1..20: mol_type = other DNA
aaacctagaatccaaaaata

SEQ ID NO: 222172 - DNA, 20 bp, synthetic construct
  source 1..20: mol_type = other DNA
taaacctagaatccaaaaat

SEQ ID NO: 222173 - DNA, 20 bp, synthetic construct
  source 1..20: mol_type = other DNA
ataaacctagaatccaaaaa

SEQ ID NO: 222174 - DNA, 20 bp, synthetic construct
  source 1..20: mol_type = other DNA
gataaacctagaatccaaaa

SEQ ID NO: 222175 - DNA, 20 bp, synthetic construct
  source 1..20: mol_type = other DNA
agataaacctagaatccaaa

SEQ ID NO: 222176 - DNA, 20 bp, synthetic construct
  source 1..20: mol_type = other DNA
gagataaacctagaatccaa

SEQ ID NO: 222177 - DNA, 20 bp, synthetic construct
  source 1..20: mol_type = other DNA
agagataaacctagaatcca

SEQ ID NO: 222178 - DNA, 20 bp, synthetic construct
  source 1..20: mol_type = other DNA
cagagataaacctagaatcc

SEQ ID NO: 222179 - DNA, 20 bp, synthetic construct
  source 1..20: mol_type = other DNA
gcagagataaacctagaatc

SEQ ID NO: 222180 - DNA, 20 bp, synthetic construct
  source 1..20: mol_type = other DNA
agcagagataaacctagaat

SEQ ID NO: 222181 - DNA, 20 bp, synthetic construct
  source 1..20: mol_type = other DNA
aagcagagataaacctagaa

SEQ ID NO: 222182 - DNA, 20 bp, synthetic construct
  source 1..20: mol_type = other DNA
caagcagagataaacctaga

SEQ ID NO: 222183 - DNA, 20 bp, synthetic construct
  source 1..20: mol_type = other DNA
ccaagcagagataaacctag

SEQ ID NO: 222184 - DNA, 20 bp, synthetic construct
  source 1..20: mol_type = other DNA
accaagcagagataaaccta

SEQ ID NO: 222185 - DNA, 20 bp, synthetic construct
  source 1..20: mol_type = other DNA
gaccaagcagagataaacct

SEQ ID NO: 222186 - DNA, 20 bp, synthetic construct
  source 1..20: mol_type = other DNA
agaccaagcagagataaacc

SEQ ID NO: 222187 - DNA, 20 bp, synthetic construct
  source 1..20: mol_type = other DNA
aagaccaagcagagataaac

SEQ ID NO: 222188 - DNA, 20 bp, synthetic construct
  source 1..20: mol_type = other DNA
gaagaccaagcagagataaa

SEQ ID NO: 222189 - DNA, 20 bp, synthetic construct
  source 1..20: mol_type = other DNA
tgaagaccaagcagagataa

SEQ ID NO: 222190 - DNA, 20 bp, synthetic construct
  source 1..20: mol_type = other DNA
ctgaagaccaagcagagata

SEQ ID NO: 222191 - DNA, 20 bp, synthetic construct
  source 1..20: mol_type = other DNA
actgaagaccaagcagagat

SEQ ID NO: 222192 - DNA, 20 bp, synthetic construct
  source 1..20: mol_type = other DNA
aactgaagaccaagcagaga

SEQ ID NO: 222193 - DNA, 20 bp, synthetic construct
  source 1..20: mol_type = other DNA
taactgaagaccaagcagag

SEQ ID NO: 222194 - DNA, 20 bp, synthetic construct
  source 1..20: mol_type = other DNA
gtaactgaagaccaagcaga

SEQ ID NO: 222195 - DNA, 20 bp, synthetic construct
  source 1..20: mol_type = other DNA
ggtaactgaagaccaagcag

SEQ ID NO: 222196 - DNA, 20 bp, synthetic construct
  source 1..20: mol_type = other DNA
aggtaactgaagaccaagca

SEQ ID NO: 222197 - DNA, 20 bp, synthetic construct
  source 1..20: mol_type = other DNA
caggtaactgaagaccaagc

SEQ ID NO: 222198 - DNA, 20 bp, synthetic construct
  source 1..20: mol_type = other DNA
gcaggtaactgaagaccaag

SEQ ID NO: 222199 - DNA, 20 bp, synthetic construct
  source 1..20: mol_type = other DNA
tgcaggtaactgaagaccaa

SEQ ID NO: 222200 - DNA, 20 bp, synthetic construct
  source 1..20: mol_type = other DNA
ttgcaggtaactgaagacca

SEQ ID NO: 222201 - DNA, 20 bp, synthetic construct
  source 1..20: mol_type = other DNA
cttgcaggtaactgaagacc

SEQ ID NO: 222202 - DNA, 20 bp, synthetic construct
  source 1..20: mol_type = other DNA
tcttgcaggtaactgaagac

SEQ ID NO: 222203 - DNA, 20 bp, synthetic construct
  source 1..20: mol_type = other DNA
ctcttgcaggtaactgaaga

SEQ ID NO: 222204 - DNA, 20 bp, synthetic construct
  source 1..20: mol_type = other DNA
tctcttgcaggtaactgaag

SEQ ID NO: 222205 - DNA, 20 bp, synthetic construct
  source 1..20: mol_type = other DNA
atctcttgcaggtaactgaa

SEQ ID NO: 222206 - DNA, 20 bp, synthetic construct
  source 1..20: mol_type = other DNA
gatctcttgcaggtaactga

SEQ ID NO: 222207 - DNA, 20 bp, synthetic construct
  source 1..20: mol_type = other DNA
ggatctcttgcaggtaactg

SEQ ID NO: 222208 - DNA, 20 bp, synthetic construct
  source 1..20: mol_type = other DNA
tggatctcttgcaggtaact

SEQ ID NO: 222209 - DNA, 20 bp, synthetic construct
  source 1..20: mol_type = other DNA
atggatctcttgcaggtaac

SEQ ID NO: 222210 - DNA, 20 bp, synthetic construct
  source 1..20: mol_type = other DNA
aatggatctcttgcaggtaa

SEQ ID NO: 222211 - DNA, 20 bp, synthetic construct
  source 1..20: mol_type = other DNA
aaatggatctcttgcaggta

SEQ ID NO: 222212 - DNA, 20 bp, synthetic construct
  source 1..20: mol_type = other DNA
taaatggatctcttgcaggt

SEQ ID NO: 222213 - DNA, 20 bp, synthetic construct
  source 1..20: mol_type = other DNA
ctaaatggatctcttgcagg

SEQ ID NO: 222214 - DNA, 20 bp, synthetic construct
  source 1..20: mol_type = other DNA
cctaaatggatctcttgcag

SEQ ID NO: 222215 - DNA, 20 bp, synthetic construct
  source 1..20: mol_type = other DNA
ccctaaatggatctcttgca

SEQ ID NO: 222216 - DNA, 20 bp, synthetic construct
  source 1..20: mol_type = other DNA
cccctaaatggatctcttgc

SEQ ID NO: 222217 - DNA, 20 bp, synthetic construct
  source 1..20: mol_type = other DNA
tcccctaaatggatctcttg

SEQ ID NO: 222218 - DNA, 20 bp, synthetic construct
  source 1..20: mol_type = other DNA
atcccctaaatggatctctt

SEQ ID NO: 222219 - DNA, 20 bp, synthetic construct
  source 1..20: mol_type = other DNA
aatcccctaaatggatctct

SEQ ID NO: 222220 - DNA, 20 bp, synthetic construct
  source 1..20: mol_type = other DNA
aaatcccctaaatggatctc

SEQ ID NO: 222221 - DNA, 20 bp, synthetic construct
  source 1..20: mol_type = other DNA
aaaatcccctaaatggatct

SEQ ID NO: 222222 - DNA, 20 bp, synthetic construct
  source 1..20: mol_type = other DNA
aaaaatcccctaaatggatc

SEQ ID NO: 222223 - DNA, 20 bp, synthetic construct
  source 1..20: mol_type = other DNA
caaaaatcccctaaatggat

SEQ ID NO: 222224 - DNA, 20 bp, synthetic construct
  source 1..20: mol_type = other DNA
acaaaaatcccctaaatgga

SEQ ID NO: 222225 - DNA, 20 bp, synthetic construct
  source 1..20: mol_type = other DNA
aacaaaaatcccctaaatgg

SEQ ID NO: 222226 - DNA, 20 bp, synthetic construct
  source 1..20: mol_type = other DNA
aaacaaaaatcccctaaatg

SEQ ID NO: 222227 - DNA, 20 bp, synthetic construct
  source 1..20: mol_type = other DNA
caaacaaaaatcccctaaat

SEQ ID NO: 222228 - DNA, 20 bp, synthetic construct
  source 1..20: mol_type = other DNA
acaaacaaaaatcccctaaa

SEQ ID NO: 222229 - DNA, 20 bp, synthetic construct
  source 1..20: mol_type = other DNA
aacaaacaaaaatcccctaa

SEQ ID NO: 222230 - DNA, 20 bp, synthetic construct
  source 1..20: mol_type = other DNA
aaacaaacaaaaatccccta

SEQ ID NO: 222231 - DNA, 20 bp, synthetic construct
  source 1..20: mol_type = other DNA
aaaacaaacaaaaatcccct

SEQ ID NO: 222232 - DNA, 20 bp, synthetic construct
  source 1..20: mol_type = other DNA
aaaaacaaacaaaaatcccc

SEQ ID NO: 222233 - DNA, 20 bp, synthetic construct
  source 1..20: mol_type = other DNA
taaaaacaaacaaaaatccc

SEQ ID NO: 222234 - DNA, 20 bp, synthetic construct
  source 1..20: mol_type = other DNA
ttaaaaacaaacaaaaatcc

SEQ ID NO: 222235 - DNA, 20 bp, synthetic construct
  source 1..20: mol_type = other DNA
gttaaaaacaaacaaaaatc

SEQ ID NO: 222236 - DNA, 20 bp, synthetic construct
  source 1..20: mol_type = other DNA
cgttaaaaacaaacaaaaat

SEQ ID NO: 222237 - DNA, 20 bp, synthetic construct
  source 1..20: mol_type = other DNA
tcgttaaaaacaaacaaaaa

SEQ ID NO: 222238 - DNA, 20 bp, synthetic construct
  source 1..20: mol_type = other DNA
atcgttaaaaacaaacaaaa

SEQ ID NO: 222239 - DNA, 20 bp, synthetic construct
  source 1..20: mol_type = other DNA
tatcgttaaaaacaaacaaa

SEQ ID NO: 222240 - DNA, 20 bp, synthetic construct
  source 1..20: mol_type = other DNA
ctatcgttaaaaacaaacaa

SEQ ID NO: 222241 - DNA, 20 bp, synthetic construct
  source 1..20: mol_type = other DNA
gctatcgttaaaaacaaaca

SEQ ID NO: 222242 - DNA, 20 bp, synthetic construct
  source 1..20: mol_type = other DNA
agctatcgttaaaaacaaac

SEQ ID NO: 222243 - DNA, 20 bp, synthetic construct
  source 1..20: mol_type = other DNA
aagctatcgttaaaaacaaa

SEQ ID NO: 222244 - DNA, 20 bp, synthetic construct
  source 1..20: mol_type = other DNA
aaagctatcgttaaaaacaa

SEQ ID NO: 222245 - DNA, 20 bp, synthetic construct
  source 1..20: mol_type = other DNA
taaagctatcgttaaaaaca

SEQ ID NO: 222246 - DNA, 20 bp, synthetic construct
  source 1..20: mol_type = other DNA
ataaagctatcgttaaaaac

SEQ ID NO: 222247 - DNA, 20 bp, synthetic construct
  source 1..20: mol_type = other DNA
aataaagctatcgttaaaaa

SEQ ID NO: 222248 - DNA, 20 bp, synthetic construct
  source 1..20: mol_type = other DNA
caataaagctatcgttaaaa

SEQ ID NO: 222249 - DNA, 20 bp, synthetic construct
  source 1..20: mol_type = other DNA
tcaataaagctatcgttaaa

SEQ ID NO: 222250 - DNA, 20 bp, synthetic construct
  source 1..20: mol_type = other DNA
ctcaataaagctatcgttaa

SEQ ID NO: 222251 - DNA, 20 bp, synthetic construct
  source 1..20: mol_type = other DNA
tctcaataaagctatcgtta

SEQ ID NO: 222252 - DNA, 20 bp, synthetic construct
  source 1..20: mol_type = other DNA
atctcaataaagctatcgtt

SEQ ID NO: 222253 - DNA, 20 bp, synthetic construct
  source 1..20: mol_type = other DNA
tatctcaataaagctatcgt

SEQ ID NO: 222254 - DNA, 20 bp, synthetic construct
  source 1..20: mol_type = other DNA
atatctcaataaagctatcg

SEQ ID NO: 222255 - DNA, 20 bp, synthetic construct
  source 1..20: mol_type = other DNA
tatatctcaataaagctatc

SEQ ID NO: 222256 - DNA, 20 bp, synthetic construct
  source 1..20: mol_type = other DNA
ttatatctcaataaagctat

SEQ ID NO: 222257 - DNA, 20 bp, synthetic construct
  source 1..20: mol_type = other DNA
attatatctcaataaagcta

SEQ ID NO: 222258 - DNA, 20 bp, synthetic construct
  source 1..20: mol_type = other DNA
aattatatctcaataaagct

SEQ ID NO: 222259 - DNA, 20 bp, synthetic construct
  source 1..20: mol_type = other DNA
gaattatatctcaataaagc

SEQ ID NO: 222260 - DNA, 20 bp, synthetic construct
  source 1..20: mol_type = other DNA
tgaattatatctcaataaag

SEQ ID NO: 222261 - DNA, 20 bp, synthetic construct
  source 1..20: mol_type = other DNA
atgaattatatctcaataaa

SEQ ID NO: 222262 - DNA, 20 bp, synthetic construct
  source 1..20: mol_type = other DNA
tatgaattatatctcaataa

SEQ ID NO: 222263 - DNA, 20 bp, synthetic construct
  source 1..20: mol_type = other DNA
atatgaattatatctcaata

SEQ ID NO: 222264 - DNA, 20 bp, synthetic construct
  source 1..20: mol_type = other DNA
catatgaattatatctcaat

SEQ ID NO: 222265 - DNA, 20 bp, synthetic construct
  source 1..20: mol_type = other DNA
gcatatgaattatatctcaa

SEQ ID NO: 222266 - DNA, 20 bp, synthetic construct
  source 1..20: mol_type = other DNA
ggcatatgaattatatctca

SEQ ID NO: 222267 - DNA, 20 bp, synthetic construct
  source 1..20: mol_type = other DNA
tggcatatgaattatatctc

SEQ ID NO: 222268 - DNA, 20 bp, synthetic construct
  source 1..20: mol_type = other DNA
atggcatatgaattatatct

SEQ ID NO: 222269 - DNA, 20 bp, synthetic construct
  source 1..20: mol_type = other DNA
tatggcatatgaattatatc

SEQ ID NO: 222270 - DNA, 20 bp, synthetic construct
  source 1..20: mol_type = other DNA
ttatggcatatgaattatat

SEQ ID NO: 222271 - DNA, 20 bp, synthetic construct
  source 1..20: mol_type = other DNA
tttatggcatatgaattata

SEQ ID NO: 222272 - DNA, 20 bp, synthetic construct
  source 1..20: mol_type = other DNA
ttttatggcatatgaattat

SEQ ID NO: 222273 - DNA, 20 bp, synthetic construct
  source 1..20: mol_type = other DNA
cttttatggcatatgaatta

SEQ ID NO: 222274 - DNA, 20 bp, synthetic construct
  source 1..20: mol_type = other DNA
acttttatggcatatgaatt

SEQ ID NO: 222275 - DNA, 20 bp, synthetic construct
  source 1..20: mol_type = other DNA
gacttttatggcatatgaat

SEQ ID NO: 222276 - DNA, 20 bp, synthetic construct
  source 1..20: mol_type = other DNA
tgacttttatggcatatgaa

SEQ ID NO: 222277 - DNA, 20 bp, synthetic construct
  source 1..20: mol_type = other DNA
gtgacttttatggcatatga

SEQ ID NO: 222278 - DNA, 20 bp, synthetic construct
  source 1..20: mol_type = other DNA
agtgacttttatggcatatg

SEQ ID NO: 222279 - DNA, 20 bp, synthetic construct
  source 1..20: mol_type = other DNA
gagtgacttttatggcatat

SEQ ID NO: 222280 - DNA, 20 bp, synthetic construct
  source 1..20: mol_type = other DNA
agagtgacttttatggcata

SEQ ID NO: 222281 - DNA, 20 bp, synthetic construct
  source 1..20: mol_type = other DNA
aagagtgacttttatggcat

SEQ ID NO: 222282 - DNA, 20 bp, synthetic construct
  source 1..20: mol_type = other DNA
aaagagtgacttttatggca

SEQ ID NO: 222283 - DNA, 20 bp, synthetic construct
  source 1..20: mol_type = other DNA
aaaagagtgacttttatggc

SEQ ID NO: 222284 - DNA, 20 bp, synthetic construct
  source 1..20: mol_type = other DNA
taaaagagtgacttttatgg

SEQ ID NO: 222285 - DNA, 20 bp, synthetic construct
  source 1..20: mol_type = other DNA
ttaaaagagtgacttttatg

SEQ ID NO: 222286 - DNA, 20 bp, synthetic construct
  source 1..20: mol_type = other DNA
tttaaaagagtgacttttat

SEQ ID NO: 222287 - DNA, 20 bp, synthetic construct
  source 1..20: mol_type = other DNA
ttttaaaagagtgactttta

SEQ ID NO: 222288 - DNA, 20 bp, synthetic construct
  source 1..20: mol_type = other DNA
attttaaaagagtgactttt

SEQ ID NO: 222289 - DNA, 20 bp, synthetic construct
  source 1..20: mol_type = other DNA
cattttaaaagagtgacttt

SEQ ID NO: 222290 - DNA, 20 bp, synthetic construct
  source 1..20: mol_type = other DNA
acattttaaaagagtgactt

SEQ ID NO: 222291 - DNA, 20 bp, synthetic construct
  source 1..20: mol_type = other DNA
aacattttaaaagagtgact

SEQ ID NO: 222292 - DNA, 20 bp, synthetic construct
  source 1..20: mol_type = other DNA
aaacattttaaaagagtgac

SEQ ID NO: 222293 - DNA, 20 bp, synthetic construct
  source 1..20: mol_type = other DNA
gaaacattttaaaagagtga

SEQ ID NO: 222294 - DNA, 20 bp, synthetic construct
  source 1..20: mol_type = other DNA
ggaaacattttaaaagagtg

SEQ ID NO: 222295 - DNA, 20 bp, synthetic construct
  source 1..20: mol_type = other DNA
cggaaacattttaaaagagt

SEQ ID NO: 222296 - DNA, 20 bp, synthetic construct
  source 1..20: mol_type = other DNA
ccggaaacattttaaaagag

SEQ ID NO: 222297 - DNA, 20 bp, synthetic construct
  source 1..20: mol_type = other DNA
accggaaacattttaaaaga

SEQ ID NO: 222298 - DNA, 20 bp, synthetic construct
  source 1..20: mol_type = other DNA
taccggaaacattttaaaag

SEQ ID NO: 222299 - DNA, 20 bp, synthetic construct
  source 1..20: mol_type = other DNA
ataccggaaacattttaaaa

SEQ ID NO: 222300 - DNA, 20 bp, synthetic construct
  source 1..20: mol_type = other DNA
tataccggaaacattttaaa

SEQ ID NO: 222301 - DNA, 20 bp, synthetic construct
  source 1..20: mol_type = other DNA
atataccggaaacattttaa

SEQ ID NO: 222302 - DNA, 20 bp, synthetic construct
  source 1..20: mol_type = other DNA
aatataccggaaacatttta

SEQ ID NO: 222303 - DNA, 20 bp, synthetic construct
  source 1..20: mol_type = other DNA
gaatataccggaaacatttt

SEQ ID NO: 222304 - DNA, 20 bp, synthetic construct
  source 1..20: mol_type = other DNA
tgaatataccggaaacattt

SEQ ID NO: 222305 - DNA, 20 bp, synthetic construct
  source 1..20: mol_type = other DNA
gtgaatataccggaaacatt

SEQ ID NO: 222306 - DNA, 20 bp, synthetic construct
  source 1..20: mol_type = other DNA
tgtgaatataccggaaacat

SEQ ID NO: 222307 - DNA, 20 bp, synthetic construct
  source 1..20: mol_type = other DNA
ttgtgaatataccggaaaca

SEQ ID NO: 222308 - DNA, 20 bp, synthetic construct
  source 1..20: mol_type = other DNA
cttgtgaatataccggaaac

SEQ ID NO: 222309 - DNA, 20 bp, synthetic construct
  source 1..20: mol_type = other DNA
ccttgtgaatataccggaaa

SEQ ID NO: 222310 - DNA, 20 bp, synthetic construct
  source 1..20: mol_type = other DNA
gccttgtgaatataccggaa

SEQ ID NO: 222311 - DNA, 20 bp, synthetic construct
  source 1..20: mol_type = other DNA
agccttgtgaatataccgga

SEQ ID NO: 222312 - DNA, 20 bp, synthetic construct
  source 1..20: mol_type = other DNA
cagccttgtgaatataccgg

SEQ ID NO: 222313 - DNA, 20 bp, synthetic construct
  source 1..20: mol_type = other DNA
acagccttgtgaatataccg

SEQ ID NO: 222314 - DNA, 20 bp, synthetic construct
  source 1..20: mol_type = other DNA
cacagccttgtgaatatacc

SEQ ID NO: 222315 - DNA, 20 bp, synthetic construct
  source 1..20: mol_type = other DNA
gcacagccttgtgaatatac

SEQ ID NO: 222316 - DNA, 20 bp, synthetic construct
  source 1..20: mol_type = other DNA
tgcacagccttgtgaatata

SEQ ID NO: 222317 - DNA, 20 bp, synthetic construct
  source 1..20: mol_type = other DNA
ctgcacagccttgtgaatat

SEQ ID NO: 222318 - DNA, 20 bp, synthetic construct
  source 1..20: mol_type = other DNA
gctgcacagccttgtgaata

SEQ ID NO: 222319 - DNA, 20 bp, synthetic construct
  source 1..20: mol_type = other DNA
ggctgcacagccttgtgaat

SEQ ID NO: 222320 - DNA, 20 bp, synthetic construct
  source 1..20: mol_type = other DNA
aggctgcacagccttgtgaa

SEQ ID NO: 222321 - DNA, 20 bp, synthetic construct
  source 1..20: mol_type = other DNA
aaggctgcacagccttgtga

SEQ ID NO: 222322 - DNA, 20 bp, synthetic construct
  source 1..20: mol_type = other DNA
gaaggctgcacagccttgtg

SEQ ID NO: 222323 - DNA, 20 bp, synthetic construct
  source 1..20: mol_type = other DNA
ggaaggctgcacagccttgt

SEQ ID NO: 222324 - DNA, 20 bp, synthetic construct
  source 1..20: mol_type = other DNA
gggaaggctgcacagccttg

SEQ ID NO: 222325 - DNA, 20 bp, synthetic construct
  source 1..20: mol_type = other DNA
agggaaggctgcacagcctt

SEQ ID NO: 222326 - DNA, 20 bp, synthetic construct
  source 1..20: mol_type = other DNA
cagggaaggctgcacagcct

SEQ ID NO: 222327 - DNA, 20 bp, synthetic construct
  source 1..20: mol_type = other DNA
acagggaaggctgcacagcc

SEQ ID NO: 222328 - DNA, 20 bp, synthetic construct
  source 1..20: mol_type = other DNA
gacagggaaggctgcacagc

SEQ ID NO: 222329 - DNA, 20 bp, synthetic construct
  source 1..20: mol_type = other DNA
ggacagggaaggctgcacag

SEQ ID NO: 222330 - DNA, 20 bp, synthetic construct
  source 1..20: mol_type = other DNA
aggacagggaaggctgcaca

SEQ ID NO: 222331 - DNA, 20 bp, synthetic construct
  source 1..20: mol_type = other DNA
aaggacagggaaggctgcac

SEQ ID NO: 222332 - DNA, 20 bp, synthetic construct
  source 1..20: mol_type = other DNA
caaggacagggaaggctgca

SEQ ID NO: 222333 - DNA, 20 bp, synthetic construct
  source 1..20: mol_type = other DNA
tcaaggacagggaaggctgc

SEQ ID NO: 222334 - DNA, 20 bp, synthetic construct
  source 1..20: mol_type = other DNA
atcaaggacagggaaggctg

SEQ ID NO: 222335 - DNA, 20 bp, synthetic construct
  source 1..20: mol_type = other DNA
aatcaaggacagggaaggct

SEQ ID NO: 222336 - DNA, 20 bp, synthetic construct
  source 1..20: mol_type = other DNA
gaatcaaggacagggaaggc

SEQ ID NO: 222337 - DNA, 20 bp, synthetic construct
  source 1..20: mol_type = other DNA
ggaatcaaggacagggaagg

SEQ ID NO: 222338 - DNA, 20 bp, synthetic construct
  source 1..20: mol_type = other DNA
tggaatcaaggacagggaag

SEQ ID NO: 222339 - DNA, 20 bp, synthetic construct
  source 1..20: mol_type = other DNA
ctggaatcaaggacagggaa

SEQ ID NO: 222340 - DNA, 20 bp, synthetic construct
  source 1..20: mol_type = other DNA
actggaatcaaggacaggga

SEQ ID NO: 222341 - DNA, 20 bp, synthetic construct
  source 1..20: mol_type = other DNA
gactggaatcaaggacaggg

SEQ ID NO: 222342 - DNA, 20 bp, synthetic construct
  source 1..20: mol_type = other DNA
agactggaatcaaggacagg

SEQ ID NO: 222343 - DNA, 20 bp, synthetic construct
  source 1..20: mol_type = other DNA
cagactggaatcaaggacag

SEQ ID NO: 222344 - DNA, 20 bp, synthetic construct
  source 1..20: mol_type = other DNA
tcagactggaatcaaggaca

SEQ ID NO: 222345 - DNA, 20 bp, synthetic construct
  source 1..20: mol_type = other DNA
ctcagactggaatcaaggac

SEQ ID NO: 222346 - DNA, 20 bp, synthetic construct
  source 1..20: mol_type = other DNA
actcagactggaatcaagga

SEQ ID NO: 222347 - DNA, 20 bp, synthetic construct
  source 1..20: mol_type = other DNA
aactcagactggaatcaagg

SEQ ID NO: 222348 - DNA, 20 bp, synthetic construct
  source 1..20: mol_type = other DNA
aaactcagactggaatcaag

SEQ ID NO: 222349 - DNA, 20 bp, synthetic construct
  source 1..20: mol_type = other DNA
aaaactcagactggaatcaa

SEQ ID NO: 222350 - DNA, 20 bp, synthetic construct
  source 1..20: mol_type = other DNA
aaaaactcagactggaatca

SEQ ID NO: 222351 - DNA, 20 bp, synthetic construct
  source 1..20: mol_type = other DNA
taaaaactcagactggaatc

SEQ ID NO: 222352 - DNA, 20 bp, synthetic construct
  source 1..20: mol_type = other DNA
ttaaaaactcagactggaat

SEQ ID NO: 222353 - DNA, 20 bp, synthetic construct
  source 1..20: mol_type = other DNA
gttaaaaactcagactggaa

SEQ ID NO: 222354 - DNA, 20 bp, synthetic construct
  source 1..20: mol_type = other DNA
agttaaaaactcagactgga

SEQ ID NO: 222355 - DNA, 20 bp, synthetic construct
  source 1..20: mol_type = other DNA
cagttaaaaactcagactgg

SEQ ID NO: 222356 - DNA, 20 bp, synthetic construct
  source 1..20: mol_type = other DNA
tcagttaaaaactcagactg

SEQ ID NO: 222357 - DNA, 20 bp, synthetic construct
  source 1..20: mol_type = other DNA
ttcagttaaaaactcagact

SEQ ID NO: 222358 - DNA, 20 bp, synthetic construct
  source 1..20: mol_type = other DNA
cttcagttaaaaactcagac

SEQ ID NO: 222359 - DNA, 20 bp, synthetic construct
  source 1..20: mol_type = other DNA
ccttcagttaaaaactcaga

SEQ ID NO: 222360 - DNA, 20 bp, synthetic construct
  source 1..20: mol_type = other DNA
cccttcagttaaaaactcag

SEQ ID NO: 222361 - DNA, 20 bp, synthetic construct
  source 1..20: mol_type = other DNA
tcccttcagttaaaaactca

SEQ ID NO: 222362 - DNA, 20 bp, synthetic construct
  source 1..20: mol_type = other DNA
atcccttcagttaaaaactc

SEQ ID NO: 222363 - DNA, 20 bp, synthetic construct
  source 1..20: mol_type = other DNA
tatcccttcagttaaaaact

SEQ ID NO: 222364 - DNA, 20 bp, synthetic construct
  source 1..20: mol_type = other DNA
ttatcccttcagttaaaaac

SEQ ID NO: 222365 - DNA, 20 bp, synthetic construct
  source 1..20: mol_type = other DNA
cttatcccttcagttaaaaa

SEQ ID NO: 222366 - DNA, 20 bp, synthetic construct
  source 1..20: mol_type = other DNA
ccttatcccttcagttaaaa

SEQ ID NO: 222367 - DNA, 20 bp, synthetic construct
  source 1..20: mol_type = other DNA
tccttatcccttcagttaaa

SEQ ID NO: 222368 - DNA, 20 bp, synthetic construct
  source 1..20: mol_type = other DNA
ctccttatcccttcagttaa

SEQ ID NO: 222369 - DNA, 20 bp, synthetic construct
  source 1..20: mol_type = other DNA
cctccttatcccttcagtta

SEQ ID NO: 222370 - DNA, 20 bp, synthetic construct
  source 1..20: mol_type = other DNA
tcctccttatcccttcagtt

SEQ ID NO: 222371 - DNA, 20 bp, synthetic construct
  source 1..20: mol_type = other DNA
gtcctccttatcccttcagt

SEQ ID NO: 222372 - DNA, 20 bp, synthetic construct
  source 1..20: mol_type = other DNA
ggtcctccttatcccttcag

SEQ ID NO: 222373 - DNA, 20 bp, synthetic construct
  source 1..20: mol_type = other DNA
tggtcctccttatcccttca

SEQ ID NO: 222374 - DNA, 20 bp, synthetic construct
  source 1..20: mol_type = other DNA
gtggtcctccttatcccttc

SEQ ID NO: 222375 - DNA, 20 bp, synthetic construct
  source 1..20: mol_type = other DNA
cgtggtcctccttatccctt

SEQ ID NO: 222376 - DNA, 20 bp, synthetic construct
  source 1..20: mol_type = other DNA
gcgtggtcctccttatccct

SEQ ID NO: 222377 - DNA, 20 bp, synthetic construct
  source 1..20: mol_type = other DNA
agcgtggtcctccttatccc

SEQ ID NO: 222378 - DNA, 20 bp, synthetic construct
  source 1..20: mol_type = other DNA
aagcgtggtcctccttatcc

SEQ ID NO: 222379 - DNA, 20 bp, synthetic construct
  source 1..20: mol_type = other DNA
aaagcgtggtcctccttatc

SEQ ID NO: 222380 - DNA, 20 bp, synthetic construct
  source 1..20: mol_type = other DNA
gaaagcgtggtcctccttat

SEQ ID NO: 222381 - DNA, 20 bp, synthetic construct
  source 1..20: mol_type = other DNA
ggaaagcgtggtcctcctta

SEQ ID NO: 222382 - DNA, 20 bp, synthetic construct
  source 1..20: mol_type = other DNA
gggaaagcgtggtcctcctt

SEQ ID NO: 222383 - DNA, 20 bp, synthetic construct
  source 1..20: mol_type = other DNA
ggggaaagcgtggtcctcct

SEQ ID NO: 222384 - DNA, 20 bp, synthetic construct
  source 1..20: mol_type = other DNA
tggggaaagcgtggtcctcc

SEQ ID NO: 222385 - DNA, 20 bp, synthetic construct
  source 1..20: mol_type = other DNA
ctggggaaagcgtggtcctc

SEQ ID NO: 222386 - DNA, 20 bp, synthetic construct
  source 1..20: mol_type = other DNA
tctggggaaagcgtggtcct

SEQ ID NO: 222387 - DNA, 20 bp, synthetic construct
  source 1..20: mol_type = other DNA
gtctggggaaagcgtggtcc

SEQ ID NO: 222388 - DNA, 20 bp, synthetic construct
  source 1..20: mol_type = other DNA
ggtctggggaaagcgtggtc

SEQ ID NO: 222389 - DNA, 20 bp, synthetic construct
  source 1..20: mol_type = other DNA
tggtctggggaaagcgtggt

SEQ ID NO: 222390 - DNA, 20 bp, synthetic construct
  source 1..20: mol_type = other DNA
ctggtctggggaaagcgtgg

SEQ ID NO: 222391 - DNA, 20 bp, synthetic construct
  source 1..20: mol_type = other DNA
tctggtctggggaaagcgtg

SEQ ID NO: 222392 - DNA, 20 bp, synthetic construct
  source 1..20: mol_type = other DNA
ttctggtctggggaaagcgt

SEQ ID NO: 222393 - DNA, 20 bp, synthetic construct
  source 1..20: mol_type = other DNA
gttctggtctggggaaagcg

SEQ ID NO: 222394 - DNA, 20 bp, synthetic construct
  source 1..20: mol_type = other DNA
ggttctggtctggggaaagc

SEQ ID NO: 222395 - DNA, 20 bp, synthetic construct
  source 1..20: mol_type = other DNA
cggttctggtctggggaaag

SEQ ID NO: 222396 - DNA, 20 bp, synthetic construct
  source 1..20: mol_type = other DNA
gcggttctggtctggggaaa

SEQ ID NO: 222397 - DNA, 20 bp, synthetic construct
  source 1..20: mol_type = other DNA
cgcggttctggtctggggaa

SEQ ID NO: 222398 - DNA, 20 bp, synthetic construct
  source 1..20: mol_type = other DNA
ccgcggttctggtctgggga

SEQ ID NO: 222399 - DNA, 20 bp, synthetic construct
  source 1..20: mol_type = other DNA
cccgcggttctggtctgggg

SEQ ID NO: 222400 - DNA, 20 bp, synthetic construct
  source 1..20: mol_type = other DNA
gcccgcggttctggtctggg

SEQ ID NO: 222401 - DNA, 20 bp, synthetic construct
  source 1..20: mol_type = other DNA
ggcccgcggttctggtctgg

SEQ ID NO: 222402 - DNA, 20 bp, synthetic construct
  source 1..20: mol_type = other DNA
tggcccgcggttctggtctg

SEQ ID NO: 222403 - DNA, 20 bp, synthetic construct
  source 1..20: mol_type = other DNA
ctggcccgcggttctggtct

SEQ ID NO: 222404 - DNA, 20 bp, synthetic construct
  source 1..20: mol_type = other DNA
cctggcccgcggttctggtc

SEQ ID NO: 222405 - DNA, 20 bp, synthetic construct
  source 1..20: mol_type = other DNA
ccctggcccgcggttctggt

SEQ ID NO: 222406 - DNA, 20 bp, synthetic construct
  source 1..20: mol_type = other DNA
cccctggcccgcggttctgg

SEQ ID NO: 222407 - DNA, 20 bp, synthetic construct
  source 1..20: mol_type = other DNA
ccccctggcccgcggttctg

SEQ ID NO: 222408 - DNA, 20 bp, synthetic construct
  source 1..20: mol_type = other DNA
gccccctggcccgcggttct

SEQ ID NO: 222409 - DNA, 20 bp, synthetic construct
  source 1..20: mol_type = other DNA
cgccccctggcccgcggttc

SEQ ID NO: 222410 - DNA, 20 bp, synthetic construct
  source 1..20: mol_type = other DNA
tcgccccctggcccgcggtt

SEQ ID NO: 222411 - DNA, 20 bp, synthetic construct
  source 1..20: mol_type = other DNA
atcgccccctggcccgcggt

SEQ ID NO: 222412 - DNA, 20 bp, synthetic construct
  source 1..20: mol_type = other DNA
aatcgccccctggcccgcgg

SEQ ID NO: 222413 - DNA, 20 bp, synthetic construct
  source 1..20: mol_type = other DNA
gaatcgccccctggcccgcg

SEQ ID NO: 222414 - DNA, 20 bp, synthetic construct
  source 1..20: mol_type = other DNA
agaatcgccccctggcccgc

SEQ ID NO: 222415 - DNA, 20 bp, synthetic construct
  source 1..20: mol_type = other DNA
cagaatcgccccctggcccg

SEQ ID NO: 222416 - DNA, 20 bp, synthetic construct
  source 1..20: mol_type = other DNA
gcagaatcgccccctggccc

SEQ ID NO: 222417 - DNA, 20 bp, synthetic construct
  source 1..20: mol_type = other DNA
agcagaatcgccccctggcc

SEQ ID NO: 222418 - DNA, 20 bp, synthetic construct
  source 1..20: mol_type = other DNA
cagcagaatcgccccctggc

SEQ ID NO: 222419 - DNA, 20 bp, synthetic construct
  source 1..20: mol_type = other DNA
tcagcagaatcgccccctgg

SEQ ID NO: 222420 - DNA, 20 bp, synthetic construct
  source 1..20: mol_type = other DNA
ctcagcagaatcgccccctg

SEQ ID NO: 222421 - DNA, 20 bp, synthetic construct
  source 1..20: mol_type = other DNA
actcagcagaatcgccccct

SEQ ID NO: 222422 - DNA, 20 bp, synthetic construct
  source 1..20: mol_type = other DNA
gactcagcagaatcgccccc

SEQ ID NO: 222423 - DNA, 20 bp, synthetic construct
  source 1..20: mol_type = other DNA
tgactcagcagaatcgcccc

SEQ ID NO: 222424 - DNA, 20 bp, synthetic construct
  source 1..20: mol_type = other DNA
gtgactcagcagaatcgccc

SEQ ID NO: 222425 - DNA, 20 bp, synthetic construct
  source 1..20: mol_type = other DNA
ggtgactcagcagaatcgcc

SEQ ID NO: 222426 - DNA, 20 bp, synthetic construct
  source 1..20: mol_type = other DNA
cggtgactcagcagaatcgc

SEQ ID NO: 222427 - DNA, 20 bp, synthetic construct
  source 1..20: mol_type = other DNA
gcggtgactcagcagaatcg

SEQ ID NO: 222428 - DNA, 20 bp, synthetic construct
  source 1..20: mol_type = other DNA
cgcggtgactcagcagaatc

SEQ ID NO: 222429 - DNA, 20 bp, synthetic construct
  source 1..20: mol_type = other DNA
ccgcggtgactcagcagaat

SEQ ID NO: 222430 - DNA, 20 bp, synthetic construct
  source 1..20: mol_type = other DNA
cccgcggtgactcagcagaa

SEQ ID NO: 222431 - DNA, 20 bp, synthetic construct
  source 1..20: mol_type = other DNA
gcccgcggtgactcagcaga

SEQ ID NO: 222432 - DNA, 20 bp, synthetic construct
  source 1..20: mol_type = other DNA
cgcccgcggtgactcagcag

SEQ ID NO: 222433 - DNA, 20 bp, synthetic construct
  source 1..20: mol_type = other DNA
gcgcccgcggtgactcagca

SEQ ID NO: 222434 - DNA, 20 bp, synthetic construct
  source 1..20: mol_type = other DNA
ggcgcccgcggtgactcagc

SEQ ID NO: 222435 - DNA, 20 bp, synthetic construct
  source 1..20: mol_type = other DNA
aggcgcccgcggtgactcag

SEQ ID NO: 222436 - DNA, 20 bp, synthetic construct
  source 1..20: mol_type = other DNA
caggcgcccgcggtgactca

SEQ ID NO: 222437 - DNA, 20 bp, synthetic construct
  source 1..20: mol_type = other DNA
ccaggcgcccgcggtgactc

SEQ ID NO: 222438 - DNA, 20 bp, synthetic construct
  source 1..20: mol_type = other DNA
accaggcgcccgcggtgact

SEQ ID NO: 222439 - DNA, 20 bp, synthetic construct
  source 1..20: mol_type = other DNA
caccaggcgcccgcggtgac

SEQ ID NO: 222440 - DNA, 20 bp, synthetic construct
  source 1..20: mol_type = other DNA
gcaccaggcgcccgcggtga

SEQ ID NO: 222441 - DNA, 20 bp, synthetic construct
  source 1..20: mol_type = other DNA
cgcaccaggcgcccgcggtg

SEQ ID NO: 222442 - DNA, 20 bp, synthetic construct
  source 1..20: mol_type = other DNA
gcgcaccaggcgcccgcggt

SEQ ID NO: 222443 - DNA, 20 bp, synthetic construct
  source 1..20: mol_type = other DNA
cgcgcaccaggcgcccgcgg

SEQ ID NO: 222444 - DNA, 20 bp, synthetic construct
  source 1..20: mol_type = other DNA
ccgcgcaccaggcgcccgcg

SEQ ID NO: 222445 - DNA, 20 bp, synthetic construct
  source 1..20: mol_type = other DNA
gccgcgcaccaggcgcccgc

SEQ ID NO: 222446 - DNA, 20 bp, synthetic construct
  source 1..20: mol_type = other DNA
cgccgcgcaccaggcgcccg

SEQ ID NO: 222447 - DNA, 20 bp, synthetic construct
  source 1..20: mol_type = other DNA
ccgccgcgcaccaggcgccc

SEQ ID NO: 222448 - DNA, 20 bp, synthetic construct
  source 1..20: mol_type = other DNA
gccgccgcgcaccaggcgcc

SEQ ID NO: 222449 - DNA, 20 bp, synthetic construct
  source 1..20: mol_type = other DNA
cgccgccgcgcaccaggcgc

SEQ ID NO: 222450 - DNA, 20 bp, synthetic construct
  source 1..20: mol_type = other DNA
ccgccgccgcgcaccaggcg

SEQ ID NO: 222451 - DNA, 20 bp, synthetic construct
  source 1..20: mol_type = other DNA
tccgccgccgcgcaccaggc

SEQ ID NO: 222452 - DNA, 20 bp, synthetic construct
  source 1..20: mol_type = other DNA
ctccgccgccgcgcaccagg

SEQ ID NO: 222453 - DNA, 20 bp, synthetic construct
  source 1..20: mol_type = other DNA
gctccgccgccgcgcaccag

SEQ ID NO: 222454 - DNA, 20 bp, synthetic construct
  source 1..20: mol_type = other DNA
ggctccgccgccgcgcacca

SEQ ID NO: 222455 - DNA, 20 bp, synthetic construct
  source 1..20: mol_type = other DNA
gggctccgccgccgcgcacc

SEQ ID NO: 222456 - DNA, 20 bp, synthetic construct
  source 1..20: mol_type = other DNA
cgggctccgccgccgcgcac

SEQ ID NO: 222457 - DNA, 20 bp, synthetic construct
  source 1..20: mol_type = other DNA
ccgggctccgccgccgcgca

SEQ ID NO: 222458 - DNA, 20 bp, synthetic construct
  source 1..20: mol_type = other DNA
cccgggctccgccgccgcgc

SEQ ID NO: 222459 - DNA, 20 bp, synthetic construct
  source 1..20: mol_type = other DNA
tcccgggctccgccgccgcg

SEQ ID NO: 222460 - DNA, 20 bp, synthetic construct
  source 1..20: mol_type = other DNA
gtcccgggctccgccgccgc

SEQ ID NO: 222461 - DNA, 20 bp, synthetic construct
  source 1..20: mol_type = other DNA
ggtcccgggctccgccgccg

SEQ ID NO: 222462 - DNA, 20 bp, synthetic construct
  source 1..20: mol_type = other DNA
aggtcccgggctccgccgcc

SEQ ID NO: 222463 - DNA, 20 bp, synthetic construct
  source 1..20: mol_type = other DNA
aaggtcccgggctccgccgc

SEQ ID NO: 222464 - DNA, 20 bp, synthetic construct
  source 1..20: mol_type = other DNA
gaaggtcccgggctccgccg

SEQ ID NO: 222465 - DNA, 20 bp, synthetic construct
  source 1..20: mol_type = other DNA
ggaaggtcccgggctccgcc

SEQ ID NO: 222466 - DNA, 20 bp, synthetic construct
  source 1..20: mol_type = other DNA
aggaaggtcccgggctccgc

SEQ ID NO: 222467 - DNA, 20 bp, synthetic construct
  source 1..20: mol_type = other DNA
aaggaaggtcccgggctccg

SEQ ID NO: 222468 - DNA, 20 bp, synthetic construct
  source 1..20: mol_type = other DNA
caaggaaggtcccgggctcc

SEQ ID NO: 222469 - DNA, 20 bp, synthetic construct
  source 1..20: mol_type = other DNA
ccaaggaaggtcccgggctc

SEQ ID NO: 222470 - DNA, 20 bp, synthetic construct
  source 1..20: mol_type = other DNA
gccaaggaaggtcccgggct

SEQ ID NO: 222471 - DNA, 20 bp, synthetic construct
  source 1..20: mol_type = other DNA
agccaaggaaggtcccgggc

SEQ ID NO: 222472 - DNA, 20 bp, synthetic construct
  source 1..20: mol_type = other DNA
cagccaaggaaggtcccggg

SEQ ID NO: 222473 - DNA, 20 bp, synthetic construct
  source 1..20: mol_type = other DNA
gcagccaaggaaggtcccgg

SEQ ID NO: 222474 - DNA, 20 bp, synthetic construct
  source 1..20: mol_type = other DNA
ggcagccaaggaaggtcccg

SEQ ID NO: 222475 - DNA, 20 bp, synthetic construct
  source 1..20: mol_type = other DNA
gggcagccaaggaaggtccc

SEQ ID NO: 222476 - DNA, 20 bp, synthetic construct
  source 1..20: mol_type = other DNA
ggggcagccaaggaaggtcc

SEQ ID NO: 222477 - DNA, 20 bp, synthetic construct
  source 1..20: mol_type = other DNA
gggggcagccaaggaaggtc

SEQ ID NO: 222478 - DNA, 20 bp, synthetic construct
  source 1..20: mol_type = other DNA
agggggcagccaaggaaggt

SEQ ID NO: 222479 - DNA, 20 bp, synthetic construct
  source 1..20: mol_type = other DNA
tagggggcagccaaggaagg

SEQ ID NO: 222480 - DNA, 20 bp, synthetic construct
  source 1..20: mol_type = other DNA
ctagggggcagccaaggaag

SEQ ID NO: 222481 - DNA, 20 bp, synthetic construct
  source 1..20: mol_type = other DNA
gctagggggcagccaaggaa

SEQ ID NO: 222482 - DNA, 20 bp, synthetic construct
  source 1..20: mol_type = other DNA
cgctagggggcagccaagga

SEQ ID NO: 222483 - DNA, 20 bp, synthetic construct
  source 1..20: mol_type = other DNA
tcgctagggggcagccaagg

SEQ ID NO: 222484 - DNA, 20 bp, synthetic construct
  source 1..20: mol_type = other DNA
ctcgctagggggcagccaag

SEQ ID NO: 222485 - DNA, 20 bp, synthetic construct
  source 1..20: mol_type = other DNA
cctcgctagggggcagccaa

SEQ ID NO: 222486 - DNA, 20 bp, synthetic construct
  source 1..20: mol_type = other DNA
ccctcgctagggggcagcca

SEQ ID NO: 222487 - DNA, 20 bp, synthetic construct
  source 1..20: mol_type = other DNA
gccctcgctagggggcagcc

SEQ ID NO: 222488 - DNA, 20 bp, synthetic construct
  source 1..20: mol_type = other DNA
ggccctcgctagggggcagc

SEQ ID NO: 222489 - DNA, 20 bp, synthetic construct
  source 1..20: mol_type = other DNA
cggccctcgctagggggcag

SEQ ID NO: 222490 - DNA, 20 bp, synthetic construct
  source 1..20: mol_type = other DNA
gcggccctcgctagggggca

SEQ ID NO: 222491 - DNA, 20 bp, synthetic construct
  source 1..20: mol_type = other DNA
tgcggccctcgctagggggc

SEQ ID NO: 222492 - DNA, 20 bp, synthetic construct
  source 1..20: mol_type = other DNA
ctgcggccctcgctaggggg

SEQ ID NO: 222493 - DNA, 20 bp, synthetic construct
  source 1..20: mol_type = other DNA
gctgcggccctcgctagggg

SEQ ID NO: 222494 - DNA, 20 bp, synthetic construct
  source 1..20: mol_type = other DNA
cgctgcggccctcgctaggg

SEQ ID NO: 222495 - DNA, 20 bp, synthetic construct
  source 1..20: mol_type = other DNA
gcgctgcggccctcgctagg

SEQ ID NO: 222496 - DNA, 20 bp, synthetic construct
  source 1..20: mol_type = other DNA
tgcgctgcggccctcgctag

SEQ ID NO: 222497 - DNA, 20 bp, synthetic construct
  source 1..20: mol_type = other DNA
ctgcgctgcggccctcgcta

SEQ ID NO: 222498 - DNA, 20 bp, synthetic construct
  source 1..20: mol_type = other DNA
gctgcgctgcggccctcgct

SEQ ID NO: 222499 - DNA, 20 bp, synthetic construct
  source 1..20: mol_type = other DNA
ggctgcgctgcggccctcgc

SEQ ID NO: 222500 - DNA, 20 bp, synthetic construct
  source 1..20: mol_type = other DNA
aggctgcgctgcggccctcg

SEQ ID NO: 222501 - DNA, 20 bp, synthetic construct
  source 1..20: mol_type = other DNA
caggctgcgctgcggccctc

SEQ ID NO: 222502 - DNA, 20 bp, synthetic construct
  source 1..20: mol_type = other DNA
tcaggctgcgctgcggccct

SEQ ID NO: 222503 - DNA, 20 bp, synthetic construct
  source 1..20: mol_type = other DNA
ctcaggctgcgctgcggccc

SEQ ID NO: 222504 - DNA, 20 bp, synthetic construct
  source 1..20: mol_type = other DNA
tctcaggctgcgctgcggcc

SEQ ID NO: 222505 - DNA, 20 bp, synthetic construct
  source 1..20: mol_type = other DNA
gtctcaggctgcgctgcggc

SEQ ID NO: 222506 - DNA, 20 bp, synthetic construct
  source 1..20: mol_type = other DNA
tgtctcaggctgcgctgcgg

SEQ ID NO: 222507 - DNA, 20 bp, synthetic construct
  source 1..20: mol_type = other DNA
gtgtctcaggctgcgctgcg

SEQ ID NO: 222508 - DNA, 20 bp, synthetic construct
  source 1..20: mol_type = other DNA
ggtgtctcaggctgcgctgc

SEQ ID NO: 222509 - DNA, 20 bp, synthetic construct
  source 1..20: mol_type = other DNA
gggtgtctcaggctgcgctg

SEQ ID NO: 222510 - DNA, 20 bp, synthetic construct
  source 1..20: mol_type = other DNA
cgggtgtctcaggctgcgct

SEQ ID NO: 222511 - DNA, 20 bp, synthetic construct
  source 1..20: mol_type = other DNA
gcgggtgtctcaggctgcgc

SEQ ID NO: 222512 - DNA, 20 bp, synthetic construct
  source 1..20: mol_type = other DNA
ggcgggtgtctcaggctgcg

SEQ ID NO: 222513 - DNA, 20 bp, synthetic construct
  source 1..20: mol_type = other DNA
cggcgggtgtctcaggctgc

SEQ ID NO: 222514 - DNA, 20 bp, synthetic construct
  source 1..20: mol_type = other DNA
ccggcgggtgtctcaggctg

SEQ ID NO: 222515 - DNA, 20 bp, synthetic construct
  source 1..20: mol_type = other DNA
cccggcgggtgtctcaggct

SEQ ID NO: 222516 - DNA, 20 bp, synthetic construct
  source 1..20: mol_type = other DNA
ccccggcgggtgtctcaggc

SEQ ID NO: 222517 - DNA, 20 bp, synthetic construct
  source 1..20: mol_type = other DNA
gccccggcgggtgtctcagg

SEQ ID NO: 222518 - DNA, 20 bp, synthetic construct
  source 1..20: mol_type = other DNA
ggccccggcgggtgtctcag

SEQ ID NO: 222519 - DNA, 20 bp, synthetic construct
  source 1..20: mol_type = other DNA
cggccccggcgggtgtctca

SEQ ID NO: 222520 - DNA, 20 bp, synthetic construct
  source 1..20: mol_type = other DNA
gcggccccggcgggtgtctc

SEQ ID NO: 222521 - DNA, 20 bp, synthetic construct
  source 1..20: mol_type = other DNA
agcggccccggcgggtgtct

SEQ ID NO: 222522 - DNA, 20 bp, synthetic construct
  source 1..20: mol_type = other DNA
gagcggccccggcgggtgtc

SEQ ID NO: 222523 - DNA, 20 bp, synthetic construct
  source 1..20: mol_type = other DNA
ggagcggccccggcgggtgt

SEQ ID NO: 222524 - DNA, 20 bp, synthetic construct
  source 1..20: mol_type = other DNA
tggagcggccccggcgggtg

SEQ ID NO: 222525 - DNA, 20 bp, synthetic construct
  source 1..20: mol_type = other DNA
gtggagcggccccggcgggt

SEQ ID NO: 222526 - DNA, 20 bp, synthetic construct
  source 1..20: mol_type = other DNA
cgtggagcggccccggcggg

SEQ ID NO: 222527 - DNA, 20 bp, synthetic construct
  source 1..20: mol_type = other DNA
ccgtggagcggccccggcgg

SEQ ID NO: 222528 - DNA, 20 bp, synthetic construct
  source 1..20: mol_type = other DNA
gccgtggagcggccccggcg

SEQ ID NO: 222529 - DNA, 20 bp, synthetic construct
  source 1..20: mol_type = other DNA
ggccgtggagcggccccggc

SEQ ID NO: 222530 - DNA, 20 bp, synthetic construct
  source 1..20: mol_type = other DNA
cggccgtggagcggccccgg

SEQ ID NO: 222531 - DNA, 20 bp, synthetic construct
  source 1..20: mol_type = other DNA
acggccgtggagcggccccg

SEQ ID NO: 222532 - DNA, 20 bp, synthetic construct
  source 1..20: mol_type = other DNA
gacggccgtggagcggcccc

SEQ ID NO: 222533 - DNA, 20 bp, synthetic construct
  source 1..20: mol_type = other DNA
cgacggccgtggagcggccc

SEQ ID NO: 222534 - DNA, 20 bp, synthetic construct
  source 1..20: mol_type = other DNA
ccgacggccgtggagcggcc

SEQ ID NO: 222535 - DNA, 20 bp, synthetic construct
  source 1..20: mol_type = other DNA
tccgacggccgtggagcggc

SEQ ID NO: 222536 - DNA, 20 bp, synthetic construct
  source 1..20: mol_type = other DNA
atccgacggccgtggagcgg

SEQ ID NO: 222537 - DNA, 20 bp, synthetic construct
  source 1..20: mol_type = other DNA
aatccgacggccgtggagcg

SEQ ID NO: 222538 - DNA, 20 bp, synthetic construct
  source 1..20: mol_type = other DNA
aaatccgacggccgtggagc

SEQ ID NO: 222539 - DNA, 20 bp, synthetic construct
  source 1..20: mol_type = other DNA
taaatccgacggccgtggag

SEQ ID NO: 222540 - DNA, 20 bp, synthetic construct
  source 1..20: mol_type = other DNA
ctaaatccgacggccgtgga

SEQ ID NO: 222541 - DNA, 20 bp, synthetic construct
  source 1..20: mol_type = other DNA
tctaaatccgacggccgtgg

SEQ ID NO: 222542 - DNA, 20 bp, synthetic construct
  source 1..20: mol_type = other DNA
gtctaaatccgacggccgtg

SEQ ID NO: 222543 - DNA, 20 bp, synthetic construct
  source 1..20: mol_type = other DNA
agtctaaatccgacggccgt

SEQ ID NO: 222544 - DNA, 20 bp, synthetic construct
  source 1..20: mol_type = other DNA
cagtctaaatccgacggccg

SEQ ID NO: 222545 - DNA, 20 bp, synthetic construct
  source 1..20: mol_type = other DNA
ccagtctaaatccgacggcc

SEQ ID NO: 222546 - DNA, 20 bp, synthetic construct
  source 1..20: mol_type = other DNA
tccagtctaaatccgacggc

SEQ ID NO: 222547 - DNA, 20 bp, synthetic construct
  source 1..20: mol_type = other DNA
ttccagtctaaatccgacgg

SEQ ID NO: 222548 - DNA, 20 bp, synthetic construct
  source 1..20: mol_type = other DNA
cttccagtctaaatccgacg

SEQ ID NO: 222549 - DNA, 20 bp, synthetic construct
  source 1..20: mol_type = other DNA
gcttccagtctaaatccgac

SEQ ID NO: 222550 - DNA, 20 bp, synthetic construct
  source 1..20: mol_type = other DNA
agcttccagtctaaatccga

SEQ ID NO: 222551 - DNA, 20 bp, synthetic construct
  source 1..20: mol_type = other DNA
gagcttccagtctaaatccg

SEQ ID NO: 222552 - DNA, 20 bp, synthetic construct
  source 1..20: mol_type = other DNA
cgagcttccagtctaaatcc

SEQ ID NO: 222553 - DNA, 20 bp, synthetic construct
  source 1..20: mol_type = other DNA
ccgagcttccagtctaaatc

SEQ ID NO: 222554 - DNA, 20 bp, synthetic construct
  source 1..20: mol_type = other DNA
accgagcttccagtctaaat

SEQ ID NO: 222555 - DNA, 20 bp, synthetic construct
  source 1..20: mol_type = other DNA
gaccgagcttccagtctaaa

SEQ ID NO: 222556 - DNA, 20 bp, synthetic construct
  source 1..20: mol_type = other DNA
ggaccgagcttccagtctaa

SEQ ID NO: 222557 - DNA, 20 bp, synthetic construct
  source 1..20: mol_type = other DNA
tggaccgagcttccagtcta

SEQ ID NO: 222558 - DNA, 20 bp, synthetic construct
  source 1..20: mol_type = other DNA
ctggaccgagcttccagtct

SEQ ID NO: 222559 - DNA, 20 bp, synthetic construct
  source 1..20: mol_type = other DNA
cctggaccgagcttccagtc

SEQ ID NO: 222560 - DNA, 20 bp, synthetic construct
  source 1..20: mol_type = other DNA
acctggaccgagcttccagt

SEQ ID NO: 222561 - DNA, 20 bp, synthetic construct
  source 1..20: mol_type = other DNA
gacctggaccgagcttccag

SEQ ID NO: 222562 - DNA, 20 bp, synthetic construct
  source 1..20: mol_type = other DNA
ggacctggaccgagcttcca

SEQ ID NO: 222563 - DNA, 20 bp, synthetic construct
  source 1..20: mol_type = other DNA
gggacctggaccgagcttcc

SEQ ID NO: 222564 - DNA, 20 bp, synthetic construct
  source 1..20: mol_type = other DNA
ggggacctggaccgagcttc

SEQ ID NO: 222565 - DNA, 20 bp, synthetic construct
  source 1..20: mol_type = other DNA
tggggacctggaccgagctt

SEQ ID NO: 222566 - DNA, 20 bp, synthetic construct
  source 1..20: mol_type = other DNA
ctggggacctggaccgagct

SEQ ID NO: 222567 - DNA, 20 bp, synthetic construct
  source 1..20: mol_type = other DNA
gctggggacctggaccgagc

SEQ ID NO: 222568 - DNA, 20 bp, synthetic construct
  source 1..20: mol_type = other DNA
agctggggacctggaccgag

SEQ ID NO: 222569 - DNA, 20 bp, synthetic construct
  source 1..20: mol_type = other DNA
aagctggggacctggaccga

SEQ ID NO: 222570 - DNA, 20 bp, synthetic construct
  source 1..20: mol_type = other DNA
caagctggggacctggaccg

SEQ ID NO: 222571 - DNA, 20 bp, synthetic construct
  source 1..20: mol_type = other DNA
tcaagctggggacctggacc

SEQ ID NO: 222572 - DNA, 20 bp, synthetic construct
  source 1..20: mol_type = other DNA
atcaagctggggacctggac

SEQ ID NO: 222573 - DNA, 20 bp, synthetic construct
  source 1..20: mol_type = other DNA
catcaagctggggacctgga

SEQ ID NO: 222574 - DNA, 20 bp, synthetic construct
  source 1..20: mol_type = other DNA
gcatcaagctggggacctgg

SEQ ID NO: 222575 - DNA, 20 bp, synthetic construct
  source 1..20: mol_type = other DNA
cgcatcaagctggggacctg

SEQ ID NO: 222576 - DNA, 20 bp, synthetic construct
  source 1..20: mol_type = other DNA
gcgcatcaagctggggacct

SEQ ID NO: 222577 - DNA, 20 bp, synthetic construct
  source 1..20: mol_type = other DNA
ggcgcatcaagctggggacc

SEQ ID NO: 222578 - DNA, 20 bp, synthetic construct
  source 1..20: mol_type = other DNA
gggcgcatcaagctggggac

SEQ ID NO: 222579 - DNA, 20 bp, synthetic construct
  source 1..20: mol_type = other DNA
cgggcgcatcaagctgggga

SEQ ID NO: 222580 - DNA, 20 bp, synthetic construct
  source 1..20: mol_type = other DNA
gcgggcgcatcaagctgggg

SEQ ID NO: 222581 - DNA, 20 bp, synthetic construct
  source 1..20: mol_type = other DNA
cgcgggcgcatcaagctggg

SEQ ID NO: 222582 - DNA, 20 bp, synthetic construct
  source 1..20: mol_type = other DNA
ccgcgggcgcatcaagctgg

SEQ ID NO: 222583 - DNA, 20 bp, synthetic construct
  source 1..20: mol_type = other DNA
accgcgggcgcatcaagctg

SEQ ID NO: 222584 - DNA, 20 bp, synthetic construct
  source 1..20: mol_type = other DNA
caccgcgggcgcatcaagct

SEQ ID NO: 222585 - DNA, 20 bp, synthetic construct
  source 1..20: mol_type = other DNA
acaccgcgggcgcatcaagc

SEQ ID NO: 222586 - DNA, 20 bp, synthetic construct
  source 1..20: mol_type = other DNA
tacaccgcgggcgcatcaag

SEQ ID NO: 222587 - DNA, 20 bp, synthetic construct
  source 1..20: mol_type = other DNA
ctacaccgcgggcgcatcaa

SEQ ID NO: 222588 - DNA, 20 bp, synthetic construct
  source 1..20: mol_type = other DNA
cctacaccgcgggcgcatca

SEQ ID NO: 222589 - DNA, 20 bp, synthetic construct
  source 1..20: mol_type = other DNA
tcctacaccgcgggcgcatc

SEQ ID NO: 222590 - DNA, 20 bp, synthetic construct
  source 1..20: mol_type = other DNA
ctcctacaccgcgggcgcat

SEQ ID NO: 222591 - DNA, 20 bp, synthetic construct
  source 1..20: mol_type = other DNA
tctcctacaccgcgggcgca

SEQ ID NO: 222592 - DNA, 20 bp, synthetic construct
  source 1..20: mol_type = other DNA
gtctcctacaccgcgggcgc

SEQ ID NO: 222593 - DNA, 20 bp, synthetic construct
  source 1..20: mol_type = other DNA
ggtctcctacaccgcgggcg

SEQ ID NO: 222594 - DNA, 20 bp, synthetic construct
  source 1..20: mol_type = other DNA
tggtctcctacaccgcgggc

SEQ ID NO: 222595 - DNA, 20 bp, synthetic construct
  source 1..20: mol_type = other DNA
ctggtctcctacaccgcggg

SEQ ID NO: 222596 - DNA, 20 bp, synthetic construct
  source 1..20: mol_type = other DNA
gctggtctcctacaccgcgg

SEQ ID NO: 222597 - DNA, 20 bp, synthetic construct
  source 1..20: mol_type = other DNA
ggctggtctcctacaccgcg

SEQ ID NO: 222598 - DNA, 20 bp, synthetic construct
  source 1..20: mol_type = other DNA
gggctggtctcctacaccgc

SEQ ID NO: 222599 - DNA, 20 bp, synthetic construct
  source 1..20: mol_type = other DNA
cgggctggtctcctacaccg

SEQ ID NO: 222600 - DNA, 20 bp, synthetic construct
  source 1..20: mol_type = other DNA
tcgggctggtctcctacacc

SEQ ID NO: 222601 - DNA, 20 bp, synthetic construct
  source 1..20: mol_type = other DNA
gtcgggctggtctcctacac

SEQ ID NO: 222602 - DNA, 20 bp, synthetic construct
  source 1..20: mol_type = other DNA
agtcgggctggtctcctaca

SEQ ID NO: 222603 - DNA, 20 bp, synthetic construct
  source 1..20: mol_type = other DNA
gagtcgggctggtctcctac

SEQ ID NO: 222604 - DNA, 20 bp, synthetic construct
  source 1..20: mol_type = other DNA
cgagtcgggctggtctccta

SEQ ID NO: 222605 - DNA, 20 bp, synthetic construct
  source 1..20: mol_type = other DNA
ccgagtcgggctggtctcct

SEQ ID NO: 222606 - DNA, 20 bp, synthetic construct
  source 1..20: mol_type = other DNA
cccgagtcgggctggtctcc

SEQ ID NO: 222607 - DNA, 20 bp, synthetic construct
  source 1..20: mol_type = other DNA
gcccgagtcgggctggtctc

SEQ ID NO: 222608 - DNA, 20 bp, synthetic construct
  source 1..20: mol_type = other DNA
agcccgagtcgggctggtct

SEQ ID NO: 222609 - DNA, 20 bp, synthetic construct
  source 1..20: mol_type = other DNA
aagcccgagtcgggctggtc

SEQ ID NO: 222610 - DNA, 20 bp, synthetic construct
  source 1..20: mol_type = other DNA
gaagcccgagtcgggctggt

SEQ ID NO: 222611 - DNA, 20 bp, synthetic construct
  source 1..20: mol_type = other DNA
ggaagcccgagtcgggctgg

SEQ ID NO: 222612 - DNA, 20 bp, synthetic construct
  source 1..20: mol_type = other DNA
gggaagcccgagtcgggctg

SEQ ID NO: 222613 - DNA, 20 bp, synthetic construct
  source 1..20: mol_type = other DNA
ggggaagcccgagtcgggct

SEQ ID NO: 222614 - DNA, 20 bp, synthetic construct
  source 1..20: mol_type = other DNA
aggggaagcccgagtcgggc

SEQ ID NO: 222615 - DNA, 20 bp, synthetic construct
  source 1..20: mol_type = other DNA
caggggaagcccgagtcggg

SEQ ID NO: 222616 - DNA, 20 bp, synthetic construct
  source 1..20: mol_type = other DNA
tcaggggaagcccgagtcgg

SEQ ID NO: 222617 - DNA, 20 bp, synthetic construct
  source 1..20: mol_type = other DNA
ctcaggggaagcccgagtcg

SEQ ID NO: 222618 - DNA, 20 bp, synthetic construct
  source 1..20: mol_type = other DNA
gctcaggggaagcccgagtc

SEQ ID NO: 222619 - DNA, 20 bp, synthetic construct
  source 1..20: mol_type = other DNA
ggctcaggggaagcccgagt

SEQ ID NO: 222620 - DNA, 20 bp, synthetic construct
  source 1..20: mol_type = other DNA
gggctcaggggaagcccgag

SEQ ID NO: 222621 - DNA, 20 bp, synthetic construct
  source 1..20: mol_type = other DNA
ggggctcaggggaagcccga

SEQ ID NO: 222622 - DNA, 20 bp, synthetic construct
  source 1..20: mol_type = other DNA
aggggctcaggggaagcccg

SEQ ID NO: 222623 - DNA, 20 bp, synthetic construct
  source 1..20: mol_type = other DNA
caggggctcaggggaagccc

SEQ ID NO: 222624 - DNA, 20 bp, synthetic construct
  source 1..20: mol_type = other DNA
ccaggggctcaggggaagcc

SEQ ID NO: 222625 - DNA, 20 bp, synthetic construct
  source 1..20: mol_type = other DNA
tccaggggctcaggggaagc

SEQ ID NO: 222626 - DNA, 20 bp, synthetic construct
  source 1..20: mol_type = other DNA
gtccaggggctcaggggaag

SEQ ID NO: 222627 - DNA, 20 bp, synthetic construct
  source 1..20: mol_type = other DNA
agtccaggggctcaggggaa

SEQ ID NO: 222628 - DNA, 20 bp, synthetic construct
  source 1..20: mol_type = other DNA
gagtccaggggctcagggga

SEQ ID NO: 222629 - DNA, 20 bp, synthetic construct
  source 1..20: mol_type = other DNA
agagtccaggggctcagggg

SEQ ID NO: 222630 - DNA, 20 bp, synthetic construct
  source 1..20: mol_type = other DNA
aagagtccaggggctcaggg

SEQ ID NO: 222631 - DNA, 20 bp, synthetic construct
  source 1..20: mol_type = other DNA
caagagtccaggggctcagg

SEQ ID NO: 222632 - DNA, 20 bp, synthetic construct
  source 1..20: mol_type = other DNA
tcaagagtccaggggctcag

SEQ ID NO: 222633 - DNA, 20 bp, synthetic construct
  source 1..20: mol_type = other DNA
gtcaagagtccaggggctca

SEQ ID NO: 222634 - DNA, 20 bp, synthetic construct
  source 1..20: mol_type = other DNA
agtcaagagtccaggggctc

SEQ ID NO: 222635 - DNA, 20 bp, synthetic construct
  source 1..20: mol_type = other DNA
gagtcaagagtccaggggct

SEQ ID NO: 222636 - DNA, 20 bp, synthetic construct
  source 1..20: mol_type = other DNA
ggagtcaagagtccaggggc

SEQ ID NO: 222637 - DNA, 20 bp, synthetic construct
  source 1..20: mol_type = other DNA
tggagtcaagagtccagggg

SEQ ID NO: 222638 - DNA, 20 bp, synthetic construct
  source 1..20: mol_type = other DNA
ctggagtcaagagtccaggg

SEQ ID NO: 222639 - DNA, 20 bp, synthetic construct
  source 1..20: mol_type = other DNA
gctggagtcaagagtccagg

SEQ ID NO: 222640 - DNA, 20 bp, synthetic construct
  source 1..20: mol_type = other DNA
tgctggagtcaagagtccag

SEQ ID NO: 222641 - DNA, 20 bp, synthetic construct
  source 1..20: mol_type = other DNA
ctgctggagtcaagagtcca

SEQ ID NO: 222642 - DNA, 20 bp, synthetic construct
  source 1..20: mol_type = other DNA
cctgctggagtcaagagtcc

SEQ ID NO: 222643 - DNA, 20 bp, synthetic construct
  source 1..20: mol_type = other DNA
ccctgctggagtcaagagtc

SEQ ID NO: 222644 - DNA, 20 bp, synthetic construct
  source 1..20: mol_type = other DNA
gccctgctggagtcaagagt

SEQ ID NO: 222645 - DNA, 20 bp, synthetic construct
  source 1..20: mol_type = other DNA
ggccctgctggagtcaagag

SEQ ID NO: 222646 - DNA, 20 bp, synthetic construct
  source 1..20: mol_type = other DNA
aggccctgctggagtcaaga

SEQ ID NO: 222647 - DNA, 20 bp, synthetic construct
  source 1..20: mol_type = other DNA
caggccctgctggagtcaag

SEQ ID NO: 222648 - DNA, 20 bp, synthetic construct
  source 1..20: mol_type = other DNA
ccaggccctgctggagtcaa

SEQ ID NO: 222649 - DNA, 20 bp, synthetic construct
  source 1..20: mol_type = other DNA
cccaggccctgctggagtca

SEQ ID NO: 222650 - DNA, 20 bp, synthetic construct
  source 1..20: mol_type = other DNA
acccaggccctgctggagtc

SEQ ID NO: 222651 - DNA, 20 bp, synthetic construct
  source 1..20: mol_type = other DNA
tacccaggccctgctggagt

SEQ ID NO: 222652 - DNA, 20 bp, synthetic construct
  source 1..20: mol_type = other DNA
ttacccaggccctgctggag

SEQ ID NO: 222653 - DNA, 20 bp, synthetic construct
  source 1..20: mol_type = other DNA
attacccaggccctgctgga

SEQ ID NO: 222654 - DNA, 20 bp, synthetic construct
  source 1..20: mol_type = other DNA
cattacccaggccctgctgg

SEQ ID NO: 222655 - DNA, 20 bp, synthetic construct
  source 1..20: mol_type = other DNA
tcattacccaggccctgctg

SEQ ID NO: 222656 - DNA, 20 bp, synthetic construct
  source 1..20: mol_type = other DNA
ttcattacccaggccctgct

SEQ ID NO: 222657 - DNA, 20 bp, synthetic construct
  source 1..20: mol_type = other DNA
gttcattacccaggccctgc

SEQ ID NO: 222658 - DNA, 20 bp, synthetic construct
  source 1..20: mol_type = other DNA
cgttcattacccaggccctg

SEQ ID NO: 222659 - DNA, 20 bp, synthetic construct
  source 1..20: mol_type = other DNA
acgttcattacccaggccct

SEQ ID NO: 222660 - DNA, 20 bp, synthetic construct
  source 1..20: mol_type = other DNA
gacgttcattacccaggccc

SEQ ID NO: 222661 - DNA, 20 bp, synthetic construct
  source 1..20: mol_type = other DNA
tgacgttcattacccaggcc

SEQ ID NO: 222662 - DNA, 20 bp, synthetic construct
  source 1..20: mol_type = other DNA
ctgacgttcattacccaggc

SEQ ID NO: 222663 - DNA, 20 bp, synthetic construct
  source 1..20: mol_type = other DNA
gctgacgttcattacccagg

SEQ ID NO: 222664 - DNA, 20 bp, synthetic construct
  source 1..20: mol_type = other DNA
agctgacgttcattacccag

SEQ ID NO: 222665 - DNA, 20 bp, synthetic construct
  source 1..20: mol_type = other DNA
gagctgacgttcattaccca

SEQ ID NO: 222666 - DNA, 20 bp, synthetic construct
  source 1..20: mol_type = other DNA
ggagctgacgttcattaccc

SEQ ID NO: 222667 - DNA, 20 bp, synthetic construct
  source 1..20: mol_type = other DNA
gggagctgacgttcattacc

SEQ ID NO: 222668 - DNA, 20 bp, synthetic construct
  source 1..20: mol_type = other DNA
ggggagctgacgttcattac

SEQ ID NO: 222669 - DNA, 20 bp, synthetic construct
  source 1..20: mol_type = other DNA
aggggagctgacgttcatta

SEQ ID NO: 222670 - DNA, 20 bp, synthetic construct
  source 1..20: mol_type = other DNA
aaggggagctgacgttcatt

SEQ ID NO: 222671 - DNA, 20 bp, synthetic construct
  source 1..20: mol_type = other DNA
aaaggggagctgacgttcat

SEQ ID NO: 222672 - DNA, 20 bp, synthetic construct
  source 1..20: mol_type = other DNA
gaaaggggagctgacgttca

SEQ ID NO: 222673 - DNA, 20 bp, synthetic construct
  source 1..20: mol_type = other DNA
ggaaaggggagctgacgttc

SEQ ID NO: 222674 - DNA, 20 bp, synthetic construct
  source 1..20: mol_type = other DNA
gggaaaggggagctgacgtt

SEQ ID NO: 222675 - DNA, 20 bp, synthetic construct
  source 1..20: mol_type = other DNA
tgggaaaggggagctgacgt

SEQ ID NO: 222676 - DNA, 20 bp, synthetic construct
  source 1..20: mol_type = other DNA
ttgggaaaggggagctgacg

SEQ ID NO: 222677 - DNA, 20 bp, synthetic construct
  source 1..20: mol_type = other DNA
tttgggaaaggggagctgac

SEQ ID NO: 222678 - DNA, 20 bp, synthetic construct
  source 1..20: mol_type = other DNA
ctttgggaaaggggagctga

SEQ ID NO: 222679 - DNA, 20 bp, synthetic construct
  source 1..20: mol_type = other DNA
cctttgggaaaggggagctg

SEQ ID NO: 222680 - DNA, 20 bp, synthetic construct
  source 1..20: mol_type = other DNA
ccctttgggaaaggggagct

SEQ ID NO: 222681 - DNA, 20 bp, synthetic construct
  source 1..20: mol_type = other DNA
cccctttgggaaaggggagc

SEQ ID NO: 222682 - DNA, 20 bp, synthetic construct
  source 1..20: mol_type = other DNA
acccctttgggaaaggggag

SEQ ID NO: 222683 - DNA, 20 bp, synthetic construct
  source 1..20: mol_type = other DNA
aacccctttgggaaagggga

SEQ ID NO: 222684 - DNA, 20 bp, synthetic construct
  source 1..20: mol_type = other DNA
caacccctttgggaaagggg

SEQ ID NO: 222685 - DNA, 20 bp, synthetic construct
  source 1..20: mol_type = other DNA
gcaacccctttgggaaaggg

SEQ ID NO: 222686 - DNA, 20 bp, synthetic construct
  source 1..20: mol_type = other DNA
agcaacccctttgggaaagg

SEQ ID NO: 222687 - DNA, 20 bp, synthetic construct
  source 1..20: mol_type = other DNA
gagcaacccctttgggaaag

SEQ ID NO: 222688 - DNA, 20 bp, synthetic construct
  source 1..20: mol_type = other DNA
agagcaacccctttgggaaa

SEQ ID NO: 222689 - DNA, 20 bp, synthetic construct
  source 1..20: mol_type = other DNA
cagagcaacccctttgggaa

SEQ ID NO: 222690 - DNA, 20 bp, synthetic construct
  source 1..20: mol_type = other DNA
acagagcaacccctttggga

SEQ ID NO: 222691 - DNA, 20 bp, synthetic construct
  source 1..20: mol_type = other DNA
aacagagcaacccctttggg

SEQ ID NO: 222692 - DNA, 20 bp, synthetic construct
  source 1..20: mol_type = other DNA
caacagagcaacccctttgg

SEQ ID NO: 222693 - DNA, 20 bp, synthetic construct
  source 1..20: mol_type = other DNA
ccaacagagcaacccctttg

SEQ ID NO: 222694 - DNA, 20 bp, synthetic construct
  source 1..20: mol_type = other DNA
cccaacagagcaaccccttt

SEQ ID NO: 222695 - DNA, 20 bp, synthetic construct
  source 1..20: mol_type = other DNA
tcccaacagagcaacccctt

SEQ ID NO: 222696 - DNA, 20 bp, synthetic construct
  source 1..20: mol_type = other DNA
ttcccaacagagcaacccct

SEQ ID NO: 222697 - DNA, 20 bp, synthetic construct
  source 1..20: mol_type = other DNA
cttcccaacagagcaacccc

SEQ ID NO: 222698 - DNA, 20 bp, synthetic construct
  source 1..20: mol_type = other DNA
ccttcccaacagagcaaccc

SEQ ID NO: 222699 - DNA, 20 bp, synthetic construct
  source 1..20: mol_type = other DNA
gccttcccaacagagcaacc

SEQ ID NO: 222700 - DNA, 20 bp, synthetic construct
  source 1..20: mol_type = other DNA
tgccttcccaacagagcaac

SEQ ID NO: 222701 - DNA, 20 bp, synthetic construct
  source 1..20: mol_type = other DNA
gtgccttcccaacagagcaa

SEQ ID NO: 222702 - DNA, 20 bp, synthetic construct
  source 1..20: mol_type = other DNA
ggtgccttcccaacagagca

SEQ ID NO: 222703 - DNA, 20 bp, synthetic construct
  source 1..20: mol_type = other DNA
gggtgccttcccaacagagc

SEQ ID NO: 222704 - DNA, 20 bp, synthetic construct
  source 1..20: mol_type = other DNA
cgggtgccttcccaacagag

SEQ ID NO: 222705 - DNA, 20 bp, synthetic construct
  source 1..20: mol_type = other DNA
acgggtgccttcccaacaga

SEQ ID NO: 222706 - DNA, 20 bp, synthetic construct
  source 1..20: mol_type = other DNA
aacgggtgccttcccaacag

SEQ ID NO: 222707 - DNA, 20 bp, synthetic construct
  source 1..20: mol_type = other DNA
aaacgggtgccttcccaaca

SEQ ID NO: 222708 - DNA, 20 bp, synthetic construct
  source 1..20: mol_type = other DNA
caaacgggtgccttcccaac

SEQ ID NO: 222709 - DNA, 20 bp, synthetic construct
  source 1..20: mol_type = other DNA
tcaaacgggtgccttcccaa

SEQ ID NO: 222710 - DNA, 20 bp, synthetic construct
  source 1..20: mol_type = other DNA
atcaaacgggtgccttccca

SEQ ID NO: 222711 - DNA, 20 bp, synthetic construct
  source 1..20: mol_type = other DNA
tatcaaacgggtgccttccc

SEQ ID NO: 222712 - DNA, 20 bp, synthetic construct
  source 1..20: mol_type = other DNA
gtatcaaacgggtgccttcc

SEQ ID NO: 222713 - DNA, 20 bp, synthetic construct
  source 1..20: mol_type = other DNA
tgtatcaaacgggtgccttc

SEQ ID NO: 222714 - DNA, 20 bp, synthetic construct
  source 1..20: mol_type = other DNA
ctgtatcaaacgggtgcctt

SEQ ID NO: 222715 - DNA, 20 bp, synthetic construct
  source 1..20: mol_type = other DNA
actgtatcaaacgggtgcct

SEQ ID NO: 222716 - DNA, 20 bp, synthetic construct
  source 1..20: mol_type = other DNA
tactgtatcaaacgggtgcc

SEQ ID NO: 222717 - DNA, 20 bp, synthetic construct
  source 1..20: mol_type = other DNA
ctactgtatcaaacgggtgc

SEQ ID NO: 222718 - DNA, 20 bp, synthetic construct
  source 1..20: mol_type = other DNA
gctactgtatcaaacgggtg

SEQ ID NO: 222719 - DNA, 20 bp, synthetic construct
  source 1..20: mol_type = other DNA
tgctactgtatcaaacgggt

SEQ ID NO: 222720 - DNA, 20 bp, synthetic construct
  source 1..20: mol_type = other DNA
atgctactgtatcaaacggg

SEQ ID NO: 222721 - DNA, 20 bp, synthetic construct
  source 1..20: mol_type = other DNA
tatgctactgtatcaaacgg

SEQ ID NO: 222722 - DNA, 20 bp, synthetic construct
  source 1..20: mol_type = other DNA
ctatgctactgtatcaaacg

SEQ ID NO: 222723 - DNA, 20 bp, synthetic construct
  source 1..20: mol_type = other DNA
tctatgctactgtatcaaac

SEQ ID NO: 222724 - DNA, 20 bp, synthetic construct
  source 1..20: mol_type = other DNA
ctctatgctactgtatcaaa

SEQ ID NO: 222725 - DNA, 20 bp, synthetic construct
  source 1..20: mol_type = other DNA
tctctatgctactgtatcaa

SEQ ID NO: 222726 - DNA, 20 bp, synthetic construct
  source 1..20: mol_type = other DNA
atctctatgctactgtatca

SEQ ID NO: 222727 - DNA, 20 bp, synthetic construct
  source 1..20: mol_type = other DNA
catctctatgctactgtatc

SEQ ID NO: 222728 - DNA, 20 bp, synthetic construct
  source 1..20: mol_type = other DNA
ccatctctatgctactgtat

SEQ ID NO: 222729 - DNA, 20 bp, synthetic construct
  source 1..20: mol_type = other DNA
cccatctctatgctactgta

SEQ ID NO: 222730 - DNA, 20 bp, synthetic construct
  source 1..20: mol_type = other DNA
acccatctctatgctactgt

SEQ ID NO: 222731 - DNA, 20 bp, synthetic construct
  source 1..20: mol_type = other DNA
aacccatctctatgctactg

SEQ ID NO: 222732 - DNA, 20 bp, synthetic construct
  source 1..20: mol_type = other DNA
aaacccatctctatgctact

SEQ ID NO: 222733 - DNA, 20 bp, synthetic construct
  source 1..20: mol_type = other DNA
aaaacccatctctatgctac

SEQ ID NO: 222734 - DNA, 20 bp, synthetic construct
  source 1..20: mol_type = other DNA
taaaacccatctctatgcta

SEQ ID NO: 222735 - DNA, 20 bp, synthetic construct
  source 1..20: mol_type = other DNA
ctaaaacccatctctatgct

SEQ ID NO: 222736 - DNA, 20 bp, synthetic construct
  source 1..20: mol_type = other DNA
gctaaaacccatctctatgc

SEQ ID NO: 222737 - DNA, 20 bp, synthetic construct
  source 1..20: mol_type = other DNA
tgctaaaacccatctctatg

SEQ ID NO: 222738 - DNA, 20 bp, synthetic construct
  source 1..20: mol_type = other DNA
atgctaaaacccatctctat

SEQ ID NO: 222739 - DNA, 20 bp, synthetic construct
  source 1..20: mol_type = other DNA
gatgctaaaacccatctcta

SEQ ID NO: 222740 - DNA, 20 bp, synthetic construct
  source 1..20: mol_type = other DNA
tgatgctaaaacccatctct

SEQ ID NO: 222741 - DNA, 20 bp, synthetic construct
  source 1..20: mol_type = other DNA
ttgatgctaaaacccatctc

SEQ ID NO: 222742 - DNA, 20 bp, synthetic construct
  source 1..20: mol_type = other DNA
tttgatgctaaaacccatct

SEQ ID NO: 222743 - DNA, 20 bp, synthetic construct
  source 1..20: mol_type = other DNA
ttttgatgctaaaacccatc

SEQ ID NO: 222744 - DNA, 20 bp, synthetic construct
  source 1..20: mol_type = other DNA
attttgatgctaaaacccat

SEQ ID NO: 222745 - DNA, 20 bp, synthetic construct
  source 1..20: mol_type = other DNA
tattttgatgctaaaaccca

SEQ ID NO: 222746 - DNA, 20 bp, synthetic construct
  source 1..20: mol_type = other DNA
atattttgatgctaaaaccc

SEQ ID NO: 222747 - DNA, 20 bp, synthetic construct
  source 1..20: mol_type = other DNA
gatattttgatgctaaaacc

SEQ ID NO: 222748 - DNA, 20 bp, synthetic construct
  source 1..20: mol_type = other DNA
tgatattttgatgctaaaac

SEQ ID NO: 222749 - DNA, 20 bp, synthetic construct
  source 1..20: mol_type = other DNA
ctgatattttgatgctaaaa

SEQ ID NO: 222750 - DNA, 20 bp, synthetic construct
  source 1..20: mol_type = other DNA
tctgatattttgatgctaaa

SEQ ID NO: 222751 - DNA, 20 bp, synthetic construct
  source 1..20: mol_type = other DNA
ttctgatattttgatgctaa

SEQ ID NO: 222752 - DNA, 20 bp, synthetic construct
  source 1..20: mol_type = other DNA
attctgatattttgatgcta

SEQ ID NO: 222753 - DNA, 20 bp, synthetic construct
  source 1..20: mol_type = other DNA
aattctgatattttgatgct

SEQ ID NO: 222754 - DNA, 20 bp, synthetic construct
  source 1..20: mol_type = other DNA
gaattctgatattttgatgc

SEQ ID NO: 222755 - DNA, 20 bp, synthetic construct
  source 1..20: mol_type = other DNA
tgaattctgatattttgatg

SEQ ID NO: 222756 - DNA, 20 bp, synthetic construct
  source 1..20: mol_type = other DNA
ttgaattctgatattttgat

SEQ ID NO: 222757 - DNA, 20 bp, synthetic construct
  source 1..20: mol_type = other DNA
cttgaattctgatattttga

SEQ ID NO: 222758 - DNA, 20 bp, synthetic construct
  source 1..20: mol_type = other DNA
gcttgaattctgatattttg

SEQ ID NO: 222759 - DNA, 20 bp, synthetic construct
  source 1..20: mol_type = other DNA
ggcttgaattctgatatttt

SEQ ID NO: 222760 - DNA, 20 bp, synthetic construct
  source 1..20: mol_type = other DNA
aggcttgaattctgatattt

SEQ ID NO: 222761 - DNA, 20 bp, synthetic construct
  source 1..20: mol_type = other DNA
aaggcttgaattctgatatt

SEQ ID NO: 222762 - DNA, 20 bp, synthetic construct
  source 1..20: mol_type = other DNA
caaggcttgaattctgatat

SEQ ID NO: 222763 - DNA, 20 bp, synthetic construct
  source 1..20: mol_type = other DNA
gcaaggcttgaattctgata

SEQ ID NO: 222764 - DNA, 20 bp, synthetic construct
  source 1..20: mol_type = other DNA
agcaaggcttgaattctgat

SEQ ID NO: 222765 - DNA, 20 bp, synthetic construct
  source 1..20: mol_type = other DNA
gagcaaggcttgaattctga

SEQ ID NO: 222766 - DNA, 20 bp, synthetic construct
  source 1..20: mol_type = other DNA
agagcaaggcttgaattctg

SEQ ID NO: 222767 - DNA, 20 bp, synthetic construct
  source 1..20: mol_type = other DNA
gagagcaaggcttgaattct

SEQ ID NO: 222768 - DNA, 20 bp, synthetic construct
  source 1..20: mol_type = other DNA
agagagcaaggcttgaattc

SEQ ID NO: 222769 - DNA, 20 bp, synthetic construct
  source 1..20: mol_type = other DNA
cagagagcaaggcttgaatt

SEQ ID NO: 222770 - DNA, 20 bp, synthetic construct
  source 1..20: mol_type = other DNA
gcagagagcaaggcttgaat

SEQ ID NO: 222771 - DNA, 20 bp, synthetic construct
  source 1..20: mol_type = other DNA
agcagagagcaaggcttgaa

SEQ ID NO: 222772 - DNA, 20 bp, synthetic construct
  source 1..20: mol_type = other DNA
aagcagagagcaaggcttga

SEQ ID NO: 222773 - DNA, 20 bp, synthetic construct
  source 1..20: mol_type = other DNA
taagcagagagcaaggcttg

SEQ ID NO: 222774 - DNA, 20 bp, synthetic construct
  source 1..20: mol_type = other DNA
gtaagcagagagcaaggctt

SEQ ID NO: 222775 - DNA, 20 bp, synthetic construct
  source 1..20: mol_type = other DNA
agtaagcagagagcaaggct

SEQ ID NO: 222776 - DNA, 20 bp, synthetic construct
  source 1..20: mol_type = other DNA
tagtaagcagagagcaaggc

SEQ ID NO: 222777 - DNA, 20 bp, synthetic construct
  source 1..20: mol_type = other DNA
ctagtaagcagagagcaagg

SEQ ID NO: 222778 - DNA, 20 bp, synthetic construct
  source 1..20: mol_type = other DNA
gctagtaagcagagagcaag

SEQ ID NO: 222779 - DNA, 20 bp, synthetic construct
  source 1..20: mol_type = other DNA
agctagtaagcagagagcaa

SEQ ID NO: 222780 - DNA, 20 bp, synthetic construct
  source 1..20: mol_type = other DNA
cagctagtaagcagagagca

SEQ ID NO: 222781 - DNA, 20 bp, synthetic construct
  source 1..20: mol_type = other DNA
acagctagtaagcagagagc

SEQ ID NO: 222782 - DNA, 20 bp, synthetic construct
  source 1..20: mol_type = other DNA
cacagctagtaagcagagag

SEQ ID NO: 222783 - DNA, 20 bp, synthetic construct
  source 1..20: mol_type = other DNA
acacagctagtaagcagaga

SEQ ID NO: 222784 - DNA, 20 bp, synthetic construct
  source 1..20: mol_type = other DNA
cacacagctagtaagcagag

SEQ ID NO: 222785 - DNA, 20 bp, synthetic construct
  source 1..20: mol_type = other DNA
tcacacagctagtaagcaga

SEQ ID NO: 222786 - DNA, 20 bp, synthetic construct
  source 1..20: mol_type = other DNA
gtcacacagctagtaagcag

SEQ ID NO: 222787 - DNA, 20 bp, synthetic construct
  source 1..20: mol_type = other DNA
ggtcacacagctagtaagca

SEQ ID NO: 222788 - DNA, 20 bp, synthetic construct
  source 1..20: mol_type = other DNA
gggtcacacagctagtaagc

SEQ ID NO: 222789 - DNA, 20 bp, synthetic construct
  source 1..20: mol_type = other DNA
agggtcacacagctagtaag

SEQ ID NO: 222790 - DNA, 20 bp, synthetic construct
  source 1..20: mol_type = other DNA
tagggtcacacagctagtaa

SEQ ID NO: 222791 - DNA, 20 bp, synthetic construct
  source 1..20: mol_type = other DNA
ttagggtcacacagctagta

SEQ ID NO: 222792 - DNA, 20 bp, synthetic construct
  source 1..20: mol_type = other DNA
tttagggtcacacagctagt

SEQ ID NO: 222793 - DNA, 20 bp, synthetic construct
  source 1..20: mol_type = other DNA
ttttagggtcacacagctag

SEQ ID NO: 222794 - DNA, 20 bp, synthetic construct
  source 1..20: mol_type = other DNA
tttttagggtcacacagcta

SEQ ID NO: 222795 - DNA, 20 bp, synthetic construct
  source 1..20: mol_type = other DNA
ctttttagggtcacacagct

SEQ ID NO: 222796 - DNA, 20 bp, synthetic construct
  source 1..20: mol_type = other DNA
cctttttagggtcacacagc

SEQ ID NO: 222797 - DNA, 20 bp, synthetic construct
  source 1..20: mol_type = other DNA
acctttttagggtcacacag

SEQ ID NO: 222798 - DNA, 20 bp, synthetic construct
  source 1..20: mol_type = other DNA
aacctttttagggtcacaca

SEQ ID NO: 222799 - DNA, 20 bp, synthetic construct
  source 1..20: mol_type = other DNA
aaacctttttagggtcacac

SEQ ID NO: 222800 - DNA, 20 bp, synthetic construct
  source 1..20: mol_type = other DNA
gaaacctttttagggtcaca

SEQ ID NO: 222801 - DNA, 20 bp, synthetic construct
  source 1..20: mol_type = other DNA
agaaacctttttagggtcac

SEQ ID NO: 222802 - DNA, 20 bp, synthetic construct
  source 1..20: mol_type = other DNA
cagaaacctttttagggtca

SEQ ID NO: 222803 - DNA, 20 bp, synthetic construct
  source 1..20: mol_type = other DNA
tcagaaacctttttagggtc

SEQ ID NO: 222804 - DNA, 20 bp, synthetic construct
  source 1..20: mol_type = other DNA
ttcagaaacctttttagggt

SEQ ID NO: 222805 - DNA, 20 bp, synthetic construct
  source 1..20: mol_type = other DNA
gttcagaaacctttttaggg

SEQ ID NO: 222806 - DNA, 20 bp, synthetic construct
  source 1..20: mol_type = other DNA
cgttcagaaacctttttagg

SEQ ID NO: 222807 - DNA, 20 bp, synthetic construct
  source 1..20: mol_type = other DNA
acgttcagaaacctttttag

SEQ ID NO: 222808 - DNA, 20 bp, synthetic construct
  source 1..20: mol_type = other DNA
gacgttcagaaaccttttta

SEQ ID NO: 222809 - DNA, 20 bp, synthetic construct
  source 1..20: mol_type = other DNA
agacgttcagaaaccttttt

SEQ ID NO: 222810 - DNA, 20 bp, synthetic construct
  source 1..20: mol_type = other DNA
gagacgttcagaaacctttt

SEQ ID NO: 222811 - DNA, 20 bp, synthetic construct
  source 1..20: mol_type = other DNA
agagacgttcagaaaccttt

SEQ ID NO: 222812 - DNA, 20 bp, synthetic construct
  source 1..20: mol_type = other DNA
cagagacgttcagaaacctt

SEQ ID NO: 222813 - DNA, 20 bp, synthetic construct
  source 1..20: mol_type = other DNA
tcagagacgttcagaaacct

SEQ ID NO: 222814 - DNA, 20 bp, synthetic construct
  source 1..20: mol_type = other DNA
ctcagagacgttcagaaacc

SEQ ID NO: 222815 - DNA, 20 bp, synthetic construct
  source 1..20: mol_type = other DNA
gctcagagacgttcagaaac

SEQ ID NO: 222816 - DNA, 20 bp, synthetic construct
  source 1..20: mol_type = other DNA
agctcagagacgttcagaaa

SEQ ID NO: 222817 - DNA, 20 bp, synthetic construct
  source 1..20: mol_type = other DNA
aagctcagagacgttcagaa

SEQ ID NO: 222818 - DNA, 20 bp, synthetic construct
  source 1..20: mol_type = other DNA
gaagctcagagacgttcaga

SEQ ID NO: 222819 - DNA, 20 bp, synthetic construct
  source 1..20: mol_type = other DNA
tgaagctcagagacgttcag

SEQ ID NO: 222820 - DNA, 20 bp, synthetic construct
  source 1..20: mol_type = other DNA
ctgaagctcagagacgttca

SEQ ID NO: 222821 - DNA, 20 bp, synthetic construct
  source 1..20: mol_type = other DNA
actgaagctcagagacgttc

SEQ ID NO: 222822 - DNA, 20 bp, synthetic construct
  source 1..20: mol_type = other DNA
aactgaagctcagagacgtt

SEQ ID NO: 222823 - DNA, 20 bp, synthetic construct
  source 1..20: mol_type = other DNA
aaactgaagctcagagacgt

SEQ ID NO: 222824 - DNA, 20 bp, synthetic construct
  source 1..20: mol_type = other DNA
gaaactgaagctcagagacg

SEQ ID NO: 222825 - DNA, 20 bp, synthetic construct
  source 1..20: mol_type = other DNA
ggaaactgaagctcagagac

SEQ ID NO: 222826 - DNA, 20 bp, synthetic construct
  source 1..20: mol_type = other DNA
aggaaactgaagctcagaga

SEQ ID NO: 222827 - DNA, 20 bp, synthetic construct
  source 1..20: mol_type = other DNA
gaggaaactgaagctcagag

SEQ ID NO: 222828 - DNA, 20 bp, synthetic construct
  source 1..20: mol_type = other DNA
tgaggaaactgaagctcaga

SEQ ID NO: 222829 - DNA, 20 bp, synthetic construct
  source 1..20: mol_type = other DNA
atgaggaaactgaagctcag

SEQ ID NO: 222830 - DNA, 20 bp, synthetic construct
  source 1..20: mol_type = other DNA
gatgaggaaactgaagctca

SEQ ID NO: 222831 - DNA, 20 bp, synthetic construct
  source 1..20: mol_type = other DNA
tgatgaggaaactgaagctc

SEQ ID NO: 222832 - DNA, 20 bp, synthetic construct
  source 1..20: mol_type = other DNA
atgatgaggaaactgaagct

SEQ ID NO: 222833 - DNA, 20 bp, synthetic construct
  source 1..20: mol_type = other DNA
aatgatgaggaaactgaagc

SEQ ID NO: 222834 - DNA, 20 bp, synthetic construct
  source 1..20: mol_type = other DNA
gaatgatgaggaaactgaag

SEQ ID NO: 222835 - DNA, 20 bp, synthetic construct
  source 1..20: mol_type = other DNA
ggaatgatgaggaaactgaa

SEQ ID NO: 222836 - DNA, 20 bp, synthetic construct
  source 1..20: mol_type = other DNA
aggaatgatgaggaaactga

SEQ ID NO: 222837 - DNA, 20 bp, synthetic construct
  source 1..20: mol_type = other DNA
aaggaatgatgaggaaactg

SEQ ID NO: 222838 - DNA, 20 bp, synthetic construct
  source 1..20: mol_type = other DNA
gaaggaatgatgaggaaact

SEQ ID NO: 222839 - DNA, 20 bp, synthetic construct
  source 1..20: mol_type = other DNA
agaaggaatgatgaggaaac

SEQ ID NO: 222840 - DNA, 20 bp, synthetic construct
  source 1..20: mol_type = other DNA
gagaaggaatgatgaggaaa

SEQ ID NO: 222841 - DNA, 20 bp, synthetic construct
  source 1..20: mol_type = other DNA
tgagaaggaatgatgaggaa

SEQ ID NO: 222842 - DNA, 20 bp, synthetic construct
  source 1..20: mol_type = other DNA
gtgagaaggaatgatgagga

SEQ ID NO: 222843 - DNA, 20 bp, synthetic construct
  source 1..20: mol_type = other DNA
cgtgagaaggaatgatgagg

SEQ ID NO: 222844 - DNA, 20 bp, synthetic construct
  source 1..20: mol_type = other DNA
ccgtgagaaggaatgatgag

SEQ ID NO: 222845 - DNA, 20 bp, synthetic construct
  source 1..20: mol_type = other DNA
cccgtgagaaggaatgatga

SEQ ID NO: 222846 - DNA, 20 bp, synthetic construct
  source 1..20: mol_type = other DNA
ccccgtgagaaggaatgatg

SEQ ID NO: 222847 - DNA, 20 bp, synthetic construct
  source 1..20: mol_type = other DNA
accccgtgagaaggaatgat

SEQ ID NO: 222848 - DNA, 20 bp, synthetic construct
  source 1..20: mol_type = other DNA
caccccgtgagaaggaatga

SEQ ID NO: 222849 - DNA, 20 bp, synthetic construct
  source 1..20: mol_type = other DNA
ccaccccgtgagaaggaatg

SEQ ID NO: 222850 - DNA, 20 bp, synthetic construct
  source 1..20: mol_type = other DNA
accaccccgtgagaaggaat

SEQ ID NO: 222851 - DNA, 20 bp, synthetic construct
  source 1..20: mol_type = other DNA
aaccaccccgtgagaaggaa

SEQ ID NO: 222852 - DNA, 20 bp, synthetic construct
  source 1..20: mol_type = other DNA
caaccaccccgtgagaagga

SEQ ID NO: 222853 - DNA, 20 bp, synthetic construct
  source 1..20: mol_type = other DNA
acaaccaccccgtgagaagg

SEQ ID NO: 222854 - DNA, 20 bp, synthetic construct
  source 1..20: mol_type = other DNA
cacaaccaccccgtgagaag

SEQ ID NO: 222855 - DNA, 20 bp, synthetic construct
  source 1..20: mol_type = other DNA
tcacaaccaccccgtgagaa

SEQ ID NO: 222856 - DNA, 20 bp, synthetic construct
  source 1..20: mol_type = other DNA
ctcacaaccaccccgtgaga

SEQ ID NO: 222857 - DNA, 20 bp, synthetic construct
  source 1..20: mol_type = other DNA
gctcacaaccaccccgtgag

SEQ ID NO: 222858 - DNA, 20 bp, synthetic construct
  source 1..20: mol_type = other DNA
tgctcacaaccaccccgtga

SEQ ID NO: 222859 - DNA, 20 bp, synthetic construct
  source 1..20: mol_type = other DNA
atgctcacaaccaccccgtg

SEQ ID NO: 222860 - DNA, 20 bp, synthetic construct
  source 1..20: mol_type = other DNA
aatgctcacaaccaccccgt

SEQ ID NO: 222861 - DNA, 20 bp, synthetic construct
  source 1..20: mol_type = other DNA
taatgctcacaaccaccccg

SEQ ID NO: 222862 - DNA, 20 bp, synthetic construct
  source 1..20: mol_type = other DNA
gtaatgctcacaaccacccc

SEQ ID NO: 222863 - DNA, 20 bp, synthetic construct
  source 1..20: mol_type = other DNA
tgtaatgctcacaaccaccc

SEQ ID NO: 222864 - DNA, 20 bp, synthetic construct
  source 1..20: mol_type = other DNA
ctgtaatgctcacaaccacc

SEQ ID NO: 222865 - DNA, 20 bp, synthetic construct
  source 1..20: mol_type = other DNA
tctgtaatgctcacaaccac

SEQ ID NO: 222866 - DNA, 20 bp, synthetic construct
  source 1..20: mol_type = other DNA
ctctgtaatgctcacaacca

SEQ ID NO: 222867 - DNA, 20 bp, synthetic construct
  source 1..20: mol_type = other DNA
tctctgtaatgctcacaacc

SEQ ID NO: 222868 - DNA, 20 bp, synthetic construct
  source 1..20: mol_type = other DNA
atctctgtaatgctcacaac

SEQ ID NO: 222869 - DNA, 20 bp, synthetic construct
  source 1..20: mol_type = other DNA
gatctctgtaatgctcacaa

SEQ ID NO: 222870 - DNA, 20 bp, synthetic construct
  source 1..20: mol_type = other DNA
ggatctctgtaatgctcaca

SEQ ID NO: 222871 - DNA, 20 bp, synthetic construct
  source 1..20: mol_type = other DNA
aggatctctgtaatgctcac

SEQ ID NO: 222872 - DNA, 20 bp, synthetic construct
  source 1..20: mol_type = other DNA
gaggatctctgtaatgctca

SEQ ID NO: 222873 - DNA, 20 bp, synthetic construct
  source 1..20: mol_type = other DNA
agaggatctctgtaatgctc

SEQ ID NO: 222874 - DNA, 20 bp, synthetic construct
  source 1..20: mol_type = other DNA
gagaggatctctgtaatgct

SEQ ID NO: 222875 - DNA, 20 bp, synthetic construct
  source 1..20: mol_type = other DNA
agagaggatctctgtaatgc

SEQ ID NO: 222876 - DNA, 20 bp, synthetic construct
  source 1..20: mol_type = other DNA
cagagaggatctctgtaatg

SEQ ID NO: 222877 - DNA, 20 bp, synthetic construct
  source 1..20: mol_type = other DNA
acagagaggatctctgtaat

SEQ ID NO: 222878 - DNA, 20 bp, synthetic construct
  source 1..20: mol_type = other DNA
cacagagaggatctctgtaa

SEQ ID NO: 222879 - DNA, 20 bp, synthetic construct
  source 1..20: mol_type = other DNA
tcacagagaggatctctgta

SEQ ID NO: 222880 - DNA, 20 bp, synthetic construct
  source 1..20: mol_type = other DNA
ttcacagagaggatctctgt

SEQ ID NO: 222881 - DNA, 20 bp, synthetic construct
  source 1..20: mol_type = other DNA
cttcacagagaggatctctg

SEQ ID NO: 222882 - DNA, 20 bp, synthetic construct
  source 1..20: mol_type = other DNA
gcttcacagagaggatctct

SEQ ID NO: 222883 - DNA, 20 bp, synthetic construct
  source 1..20: mol_type = other DNA
ggcttcacagagaggatctc

SEQ ID NO: 222884 - DNA, 20 bp, synthetic construct
  source 1..20: mol_type = other DNA
gggcttcacagagaggatct

SEQ ID NO: 222885 - DNA, 20 bp, synthetic construct
  source 1..20: mol_type = other DNA
ggggcttcacagagaggatc

SEQ ID NO: 222886 - DNA, 20 bp, synthetic construct
  source 1..20: mol_type = other DNA
aggggcttcacagagaggat

SEQ ID NO: 222887 - DNA, 20 bp, synthetic construct
  source 1..20: mol_type = other DNA
caggggcttcacagagagga

SEQ ID NO: 222888 - DNA, 20 bp, synthetic construct
  source 1..20: mol_type = other DNA
acaggggcttcacagagagg

SEQ ID NO: 222889 - DNA, 20 bp, synthetic construct
  source 1..20: mol_type = other DNA
cacaggggcttcacagagag

SEQ ID NO: 222890 - DNA, 20 bp, synthetic construct
  source 1..20: mol_type = other DNA
tcacaggggcttcacagaga

SEQ ID NO: 222891 - DNA, 20 bp, synthetic construct
  source 1..20: mol_type = other DNA
ctcacaggggcttcacagag

SEQ ID NO: 222892 - DNA, 20 bp, synthetic construct
  source 1..20: mol_type = other DNA
actcacaggggcttcacaga

SEQ ID NO: 222893 - DNA, 20 bp, synthetic construct
  source 1..20: mol_type = other DNA
cactcacaggggcttcacag

SEQ ID NO: 222894 - DNA, 20 bp, synthetic construct
  source 1..20: mol_type = other DNA
ccactcacaggggcttcaca

SEQ ID NO: 222895 - DNA, 20 bp, synthetic construct
  source 1..20: mol_type = other DNA
gccactcacaggggcttcac

SEQ ID NO: 222896 - DNA, 20 bp, synthetic construct
  source 1..20: mol_type = other DNA
agccactcacaggggcttca

SEQ ID NO: 222897 - DNA, 20 bp, synthetic construct
  source 1..20: mol_type = other DNA
gagccactcacaggggcttc

SEQ ID NO: 222898 - DNA, 20 bp, synthetic construct
  source 1..20: mol_type = other DNA
tgagccactcacaggggctt

SEQ ID NO: 222899 - DNA, 20 bp, synthetic construct
  source 1..20: mol_type = other DNA
atgagccactcacaggggct

SEQ ID NO: 222900 - DNA, 20 bp, synthetic construct
  source 1..20: mol_type = other DNA
gatgagccactcacaggggc

SEQ ID NO: 222901 - DNA, 20 bp, synthetic construct
  source 1..20: mol_type = other DNA
ggatgagccactcacagggg

SEQ ID NO: 222902 - DNA, 20 bp, synthetic construct
  source 1..20: mol_type = other DNA
aggatgagccactcacaggg

SEQ ID NO: 222903 - DNA, 20 bp, synthetic construct
  source 1..20: mol_type = other DNA
caggatgagccactcacagg

SEQ ID NO: 222904 - DNA, 20 bp, synthetic construct
  source 1..20: mol_type = other DNA
tcaggatgagccactcacag

SEQ ID NO: 222905 - DNA, 20 bp, synthetic construct
  source 1..20: mol_type = other DNA
ctcaggatgagccactcaca

SEQ ID NO: 222906 - DNA, 20 bp, synthetic construct
  source 1..20: mol_type = other DNA
cctcaggatgagccactcac

SEQ ID NO: 222907 - DNA, 20 bp, synthetic construct
  source 1..20: mol_type = other DNA
ccctcaggatgagccactca

SEQ ID NO: 222908 - DNA, 20 bp, synthetic construct
  source 1..20: mol_type = other DNA
gccctcaggatgagccactc

SEQ ID NO: 222909 - DNA, 20 bp, synthetic construct
  source 1..20: mol_type = other DNA
agccctcaggatgagccact

SEQ ID NO: 222910 - DNA, 20 bp, synthetic construct
  source 1..20: mol_type = other DNA
cagccctcaggatgagccac

SEQ ID NO: 222911 - DNA, 20 bp, synthetic construct
  source 1..20: mol_type = other DNA
tcagccctcaggatgagcca

SEQ ID NO: 222912 - DNA, 20 bp, synthetic construct
  source 1..20: mol_type = other DNA
ttcagccctcaggatgagcc

SEQ ID NO: 222913 - DNA, 20 bp, synthetic construct
  source 1..20: mol_type = other DNA
tttcagccctcaggatgagc

SEQ ID NO: 222914 - DNA, 20 bp, synthetic construct
  source 1..20: mol_type = other DNA
atttcagccctcaggatgag

SEQ ID NO: 222915 - DNA, 20 bp, synthetic construct
  source 1..20: mol_type = other DNA
tatttcagccctcaggatga

SEQ ID NO: 222916 - DNA, 20 bp, synthetic construct
  source 1..20: mol_type = other DNA
ttatttcagccctcaggatg

SEQ ID NO: 222917 - DNA, 20 bp, synthetic construct
  source 1..20: mol_type = other DNA
tttatttcagccctcaggat

SEQ ID NO: 222918 - DNA, 20 bp, synthetic construct
  source 1..20: mol_type = other DNA
gtttatttcagccctcagga

SEQ ID NO: 222919 - DNA, 20 bp, synthetic construct
  source 1..20: mol_type = other DNA
tgtttatttcagccctcagg

SEQ ID NO: 222920 - DNA, 20 bp, synthetic construct
  source 1..20: mol_type = other DNA
atgtttatttcagccctcag

SEQ ID NO: 222921 - DNA, 20 bp, synthetic construct
  source 1..20: mol_type = other DNA
catgtttatttcagccctca

SEQ ID NO: 222922 - DNA, 20 bp, synthetic construct
  source 1..20: mol_type = other DNA
acatgtttatttcagccctc

SEQ ID NO: 222923 - DNA, 20 bp, synthetic construct
  source 1..20: mol_type = other DNA
aacatgtttatttcagccct

SEQ ID NO: 222924 - DNA, 20 bp, synthetic construct
  source 1..20: mol_type = other DNA
taacatgtttatttcagccc

SEQ ID NO: 222925 - DNA, 20 bp, synthetic construct
  source 1..20: mol_type = other DNA
ataacatgtttatttcagcc

SEQ ID NO: 222926 - DNA, 20 bp, synthetic construct
  source 1..20: mol_type = other DNA
aataacatgtttatttcagc

SEQ ID NO: 222927 - DNA, 20 bp, synthetic construct
  source 1..20: mol_type = other DNA
taataacatgtttatttcag

SEQ ID NO: 222928 - DNA, 20 bp, synthetic construct
  source 1..20: mol_type = other DNA
ttaataacatgtttatttca

SEQ ID NO: 222929 - DNA, 20 bp, synthetic construct
  source 1..20: mol_type = other DNA
attaataacatgtttatttc

SEQ ID NO: 222930 - DNA, 20 bp, synthetic construct
  source 1..20: mol_type = other DNA
tattaataacatgtttattt

SEQ ID NO: 222931 - DNA, 20 bp, synthetic construct
  source 1..20: mol_type = other DNA
ttattaataacatgtttatt

SEQ ID NO: 222932 - DNA, 20 bp, synthetic construct
  source 1..20: mol_type = other DNA
attattaataacatgtttat

SEQ ID NO: 222933 - DNA, 20 bp, synthetic construct
  source 1..20: mol_type = other DNA
gattattaataacatgttta

SEQ ID NO: 222934 - DNA, 20 bp, synthetic construct
  source 1..20: mol_type = other DNA
ggattattaataacatgttt

SEQ ID NO: 222935 - DNA, 20 bp, synthetic construct
  source 1..20: mol_type = other DNA
tggattattaataacatgtt

SEQ ID NO: 222936 - DNA, 20 bp, synthetic construct
  source 1..20: mol_type = other DNA
ttggattattaataacatgt

SEQ ID NO: 222937 - DNA, 20 bp, synthetic construct
  source 1..20: mol_type = other DNA
tttggattattaataacatg

SEQ ID NO: 222938 - DNA, 20 bp, synthetic construct
  source 1..20: mol_type = other DNA
ttttggattattaataacat

SEQ ID NO: 222939 - DNA, 20 bp, synthetic construct
  source 1..20: mol_type = other DNA
gttttggattattaataaca

SEQ ID NO: 222940 - DNA, 20 bp, synthetic construct
  source 1..20: mol_type = other DNA
agttttggattattaataac

SEQ ID NO: 222941 - DNA, 20 bp, synthetic construct
  source 1..20: mol_type = other DNA
cagttttggattattaataa

SEQ ID NO: 222942 - DNA, 20 bp, synthetic construct
  source 1..20: mol_type = other DNA
ccagttttggattattaata

SEQ ID NO: 222943 - DNA, 20 bp, synthetic construct
  source 1..20: mol_type = other DNA
gccagttttggattattaat

SEQ ID NO: 222944 - DNA, 20 bp, synthetic construct
  source 1..20: mol_type = other DNA
tgccagttttggattattaa

SEQ ID NO: 222945 - DNA, 20 bp, synthetic construct
  source 1..20: mol_type = other DNA
ttgccagttttggattatta

SEQ ID NO: 222946 - DNA, 20 bp, synthetic construct
  source 1..20: mol_type = other DNA
cttgccagttttggattatt

SEQ ID NO: 222947 - DNA, 20 bp, synthetic construct
  source 1..20: mol_type = other DNA
ccttgccagttttggattat

SEQ ID NO: 222948 - DNA, 20 bp, synthetic construct
  source 1..20: mol_type = other DNA
cccttgccagttttggatta

SEQ ID NO: 222949 - DNA, 20 bp, synthetic construct
  source 1..20: mol_type = other DNA
tcccttgccagttttggatt

SEQ ID NO: 222950 - DNA, 20 bp, synthetic construct
  source 1..20: mol_type = other DNA
atcccttgccagttttggat

SEQ ID NO: 222951 - DNA, 20 bp, synthetic construct
  source 1..20: mol_type = other DNA
catcccttgccagttttgga

SEQ ID NO: 222952 - DNA, 20 bp, synthetic construct
  source 1..20: mol_type = other DNA
acatcccttgccagttttgg

SEQ ID NO: 222953 - DNA, 20 bp, synthetic construct
  source 1..20: mol_type = other DNA
aacatcccttgccagttttg

SEQ ID NO: 222954 - DNA, 20 bp, synthetic construct
  source 1..20: mol_type = other DNA
caacatcccttgccagtttt

SEQ ID NO: 222955 - DNA, 20 bp, synthetic construct
  source 1..20: mol_type = other DNA
tcaacatcccttgccagttt

SEQ ID NO: 222956 - DNA, 20 bp, synthetic construct
  source 1..20: mol_type = other DNA
gtcaacatcccttgccagtt

SEQ ID NO: 222957 - DNA, 20 bp, synthetic construct
  source 1..20: mol_type = other DNA
agtcaacatcccttgccagt

SEQ ID NO: 222958 - DNA, 20 bp, synthetic construct
  source 1..20: mol_type = other DNA
cagtcaacatcccttgccag

SEQ ID NO: 222959 - DNA, 20 bp, synthetic construct
  source 1..20: mol_type = other DNA
ccagtcaacatcccttgcca

SEQ ID NO: 222960 - DNA, 20 bp, synthetic construct
  source 1..20: mol_type = other DNA
accagtcaacatcccttgcc

SEQ ID NO: 222961 - DNA, 20 bp, synthetic construct
  source 1..20: mol_type = other DNA
gaccagtcaacatcccttgc

SEQ ID NO: 222962 - DNA, 20 bp, synthetic construct
  source 1..20: mol_type = other DNA
ggaccagtcaacatcccttg

SEQ ID NO: 222963 - DNA, 20 bp, synthetic construct
  source 1..20: mol_type = other DNA
gggaccagtcaacatccctt

SEQ ID NO: 222964 - DNA, 20 bp, synthetic construct
  source 1..20: mol_type = other DNA
ggggaccagtcaacatccct

SEQ ID NO: 222965 - DNA, 20 bp, synthetic construct
  source 1..20: mol_type = other DNA
gggggaccagtcaacatccc

SEQ ID NO: 222966 - DNA, 20 bp, synthetic construct
  source 1..20: mol_type = other DNA
agggggaccagtcaacatcc

SEQ ID NO: 222967 - DNA, 20 bp, synthetic construct
  source 1..20: mol_type = other DNA
gagggggaccagtcaacatc

SEQ ID NO: 222968 - DNA, 20 bp, synthetic construct
  source 1..20: mol_type = other DNA
ggagggggaccagtcaacat

SEQ ID NO: 222969 - DNA, 20 bp, synthetic construct
  source 1..20: mol_type = other DNA
gggagggggaccagtcaaca

SEQ ID NO: 222970 - DNA, 20 bp, synthetic construct
  source 1..20: mol_type = other DNA
agggagggggaccagtcaac

SEQ ID NO: 222971 - DNA, 20 bp, synthetic construct
  source 1..20: mol_type = other DNA
aagggagggggaccagtcaa

SEQ ID NO: 222972 - DNA, 20 bp, synthetic construct
  source 1..20: mol_type = other DNA
caagggagggggaccagtca

SEQ ID NO: 222973 - DNA, 20 bp, synthetic construct
  source 1..20: mol_type = other DNA
gcaagggagggggaccagtc

SEQ ID NO: 222974 - DNA, 20 bp, synthetic construct
  source 1..20: mol_type = other DNA
ggcaagggagggggaccagt

SEQ ID NO: 222975 - DNA, 20 bp, synthetic construct
  source 1..20: mol_type = other DNA
gggcaagggagggggaccag

SEQ ID NO: 222976 - DNA, 20 bp, synthetic construct
  source 1..20: mol_type = other DNA
tgggcaagggagggggacca

SEQ ID NO: 222977 - DNA, 20 bp, synthetic construct
  source 1..20: mol_type = other DNA
ttgggcaagggagggggacc

SEQ ID NO: 222978 - DNA, 20 bp, synthetic construct
  source 1..20: mol_type = other DNA
cttgggcaagggagggggac

SEQ ID NO: 222979 - DNA, 20 bp, synthetic construct
  source 1..20: mol_type = other DNA
ccttgggcaagggaggggga

SEQ ID NO: 222980 - DNA, 20 bp, synthetic construct
  source 1..20: mol_type = other DNA
tccttgggcaagggaggggg

SEQ ID NO: 222981 - DNA, 20 bp, synthetic construct
  source 1..20: mol_type = other DNA
ctccttgggcaagggagggg

SEQ ID NO: 222982 - DNA, 20 bp, synthetic construct
  source 1..20: mol_type = other DNA
gctccttgggcaagggaggg

SEQ ID NO: 222983 - DNA, 20 bp, synthetic construct
  source 1..20: mol_type = other DNA
agctccttgggcaagggagg

SEQ ID NO: 222984 - DNA, 20 bp, synthetic construct
  source 1..20: mol_type = other DNA
aagctccttgggcaagggag

SEQ ID NO: 222985 - DNA, 20 bp, synthetic construct
  source 1..20: mol_type = other DNA
aaagctccttgggcaaggga

SEQ ID NO: 222986 - DNA, 20 bp, synthetic construct
  source 1..20: mol_type = other DNA
gaaagctccttgggcaaggg

SEQ ID NO: 222987 - DNA, 20 bp, synthetic construct
  source 1..20: mol_type = other DNA
agaaagctccttgggcaagg

SEQ ID NO: 222988 - DNA, 20 bp, synthetic construct
  source 1..20: mol_type = other DNA
tagaaagctccttgggcaag

SEQ ID NO: 222989 - DNA, 20 bp, synthetic construct
  source 1..20: mol_type = other DNA
ctagaaagctccttgggcaa

SEQ ID NO: 222990 - DNA, 20 bp, synthetic construct
  source 1..20: mol_type = other DNA
tctagaaagctccttgggca

SEQ ID NO: 222991 - DNA, 20 bp, synthetic construct
  source 1..20: mol_type = other DNA
ttctagaaagctccttgggc

SEQ ID NO: 222992 - DNA, 20 bp, synthetic construct
  source 1..20: mol_type = other DNA
gttctagaaagctccttggg

SEQ ID NO: 222993 - DNA, 20 bp, synthetic construct
  source 1..20: mol_type = other DNA
ggttctagaaagctccttgg

SEQ ID NO: 222994 - DNA, 20 bp, synthetic construct
  source 1..20: mol_type = other DNA
aggttctagaaagctccttg

SEQ ID NO: 222995 - DNA, 20 bp, synthetic construct
  source 1..20: mol_type = other DNA
caggttctagaaagctcctt

SEQ ID NO: 222996 - DNA, 20 bp, synthetic construct
  source 1..20: mol_type = other DNA
tcaggttctagaaagctcct

SEQ ID NO: 222997 - DNA, 20 bp, synthetic construct
  source 1..20: mol_type = other DNA
ctcaggttctagaaagctcc

SEQ ID NO: 222998 - DNA, 20 bp, synthetic construct
  source 1..20: mol_type = other DNA
actcaggttctagaaagctc

SEQ ID NO: 222999 - DNA, 20 bp, synthetic construct
  source 1..20: mol_type = other DNA
aactcaggttctagaaagct

SEQ ID NO: 223000 - DNA, 20 bp, synthetic construct
  source 1..20: mol_type = other DNA
taactcaggttctagaaagc

SEQ ID NO: 223001 - DNA, 20 bp, synthetic construct
  source 1..20: mol_type = other DNA
ataactcaggttctagaaag

SEQ ID NO: 223002 - DNA, 20 bp, synthetic construct
  source 1..20: mol_type = other DNA
gataactcaggttctagaaa

SEQ ID NO: 223003 - DNA, 20 bp, synthetic construct
  source 1..20: mol_type = other DNA
tgataactcaggttctagaa

SEQ ID NO: 223004 - DNA, 20 bp, synthetic construct
  source 1..20: mol_type = other DNA
atgataactcaggttctaga

SEQ ID NO: 223005 - DNA, 20 bp, synthetic construct
  source 1..20: mol_type = other DNA
aatgataactcaggttctag

SEQ ID NO: 223006 - DNA, 20 bp, synthetic construct
  source 1..20: mol_type = other DNA
taatgataactcaggttcta

SEQ ID NO: 223007 - DNA, 20 bp, synthetic construct
  source 1..20: mol_type = other DNA
gtaatgataactcaggttct

SEQ ID NO: 223008 - DNA, 20 bp, synthetic construct
  source 1..20: mol_type = other DNA
ggtaatgataactcaggttc

SEQ ID NO: 223009 - DNA, 20 bp, synthetic construct
  source 1..20: mol_type = other DNA
tggtaatgataactcaggtt

SEQ ID NO: 223010 - DNA, 20 bp, synthetic construct
  source 1..20: mol_type = other DNA
ttggtaatgataactcaggt

SEQ ID NO: 223011 - DNA, 20 bp, synthetic construct
  source 1..20: mol_type = other DNA
tttggtaatgataactcagg

SEQ ID NO: 223012 - DNA, 20 bp, synthetic construct
  source 1..20: mol_type = other DNA
gtttggtaatgataactcag

SEQ ID NO: 223013 - DNA, 20 bp, synthetic construct
  source 1..20: mol_type = other DNA
agtttggtaatgataactca

SEQ ID NO: 223014 - DNA, 20 bp, synthetic construct
  source 1..20: mol_type = other DNA
cagtttggtaatgataactc

SEQ ID NO: 223015 - DNA, 20 bp, synthetic construct
  source 1..20: mol_type = other DNA
acagtttggtaatgataact

SEQ ID NO: 223016 - DNA, 20 bp, synthetic construct
  source 1..20: mol_type = other DNA
tacagtttggtaatgataac

SEQ ID NO: 223017 - DNA, 20 bp, synthetic construct
  source 1..20: mol_type = other DNA
gtacagtttggtaatgataa

SEQ ID NO: 223018 - DNA, 20 bp, synthetic construct
  source 1..20: mol_type = other DNA
agtacagtttggtaatgata

SEQ ID NO: 223019 - DNA, 20 bp, synthetic construct
  source 1..20: mol_type = other DNA
cagtacagtttggtaatgat

SEQ ID NO: 223020 - DNA, 20 bp, synthetic construct
  source 1..20: mol_type = other DNA
gcagtacagtttggtaatga

SEQ ID NO: 223021 - DNA, 20 bp, synthetic construct
  source 1..20: mol_type = other DNA
ggcagtacagtttggtaatg

SEQ ID NO: 223022 - DNA, 20 bp, synthetic construct
  source 1..20: mol_type = other DNA
aggcagtacagtttggtaat

SEQ ID NO: 223023 - DNA, 20 bp, synthetic construct
  source 1..20: mol_type = other DNA
aaggcagtacagtttggtaa

SEQ ID NO: 223024 - DNA, 20 bp, synthetic construct
  source 1..20: mol_type = other DNA
caaggcagtacagtttggta

SEQ ID NO: 223025 - DNA, 20 bp, synthetic construct
  source 1..20: mol_type = other DNA
tcaaggcagtacagtttggt

SEQ ID NO: 223026 - DNA, 20 bp, synthetic construct
  source 1..20: mol_type = other DNA
ctcaaggcagtacagtttgg

SEQ ID NO: 223027 - DNA, 20 bp, synthetic construct
  source 1..20: mol_type = other DNA
actcaaggcagtacagtttg

SEQ ID NO: 223028 - DNA, 20 bp, synthetic construct
  source 1..20: mol_type = other DNA
tactcaaggcagtacagttt

SEQ ID NO: 223029 - DNA, 20 bp, synthetic construct
  source 1..20: mol_type = other DNA
ttactcaaggcagtacagtt

SEQ ID NO: 223030 - DNA, 20 bp, synthetic construct
  source 1..20: mol_type = other DNA
cttactcaaggcagtacagt

SEQ ID NO: 223031 - DNA, 20 bp, synthetic construct
  source 1..20: mol_type = other DNA
tcttactcaaggcagtacag

SEQ ID NO: 223032 - DNA, 20 bp, synthetic construct
  source 1..20: mol_type = other DNA
ttcttactcaaggcagtaca

SEQ ID NO: 223033 - DNA, 20 bp, synthetic construct
  source 1..20: mol_type = other DNA
tttcttactcaaggcagtac

SEQ ID NO: 223034 - DNA, 20 bp, synthetic construct
  source 1..20: mol_type = other DNA
ctttcttactcaaggcagta

SEQ ID NO: 223035 - DNA, 20 bp, synthetic construct
  source 1..20: mol_type = other DNA
actttcttactcaaggcagt

SEQ ID NO: 223036 - DNA, 20 bp, synthetic construct
  source 1..20: mol_type = other DNA
aactttcttactcaaggcag

SEQ ID NO: 223037 - DNA, 20 bp, synthetic construct
  source 1..20: mol_type = other DNA
taactttcttactcaaggca

SEQ ID NO: 223038 - DNA, 20 bp, synthetic construct
  source 1..20: mol_type = other DNA
ctaactttcttactcaaggc

SEQ ID NO: 223039 - DNA, 20 bp, synthetic construct
  source 1..20: mol_type = other DNA
tctaactttcttactcaagg

SEQ ID NO: 223040 - DNA, 20 bp, synthetic construct
  source 1..20: mol_type = other DNA
ttctaactttcttactcaag

SEQ ID NO: 223041 - DNA, 20 bp, synthetic construct
  source 1..20: mol_type = other DNA
cttctaactttcttactcaa

SEQ ID NO: 223042 - DNA, 20 bp, synthetic construct
  source 1..20: mol_type = other DNA
ccttctaactttcttactca

SEQ ID NO: 223043 - DNA, 20 bp, synthetic construct
  source 1..20: mol_type = other DNA
tccttctaactttcttactc

SEQ ID NO: 223044 - DNA, 20 bp, synthetic construct
  source 1..20: mol_type = other DNA
ttccttctaactttcttact

SEQ ID NO: 223045 - DNA, 20 bp, synthetic construct
  source 1..20: mol_type = other DNA
attccttctaactttcttac

SEQ ID NO: 223046 - DNA, 20 bp, synthetic construct
  source 1..20: mol_type = other DNA
cattccttctaactttctta

SEQ ID NO: 223047 - DNA, 20 bp, synthetic construct
  source 1..20: mol_type = other DNA
ccattccttctaactttctt

SEQ ID NO: 223048 - DNA, 20 bp, synthetic construct
  source 1..20: mol_type = other DNA
cccattccttctaactttct

SEQ ID NO: 223049 - DNA, 20 bp, synthetic construct
  source 1..20: mol_type = other DNA
tcccattccttctaactttc

SEQ ID NO: 223050 - DNA, 20 bp, synthetic construct
  source 1..20: mol_type = other DNA
ttcccattccttctaacttt

SEQ ID NO: 223051 - DNA, 20 bp, synthetic construct
  source 1..20: mol_type = other DNA
cttcccattccttctaactt

SEQ ID NO: 223052 - DNA, 20 bp, synthetic construct
  source 1..20: mol_type = other DNA
ccttcccattccttctaact

SEQ ID NO: 223053 - DNA, 20 bp, synthetic construct
  source 1..20: mol_type = other DNA
tccttcccattccttctaac

SEQ ID NO: 223054 - DNA, 20 bp, synthetic construct
  source 1..20: mol_type = other DNA
atccttcccattccttctaa

SEQ ID NO: 223055 - DNA, 20 bp, synthetic construct
  source 1..20: mol_type = other DNA
catccttcccattccttcta

SEQ ID NO: 223056 - DNA, 20 bp, synthetic construct
  source 1..20: mol_type = other DNA
ccatccttcccattccttct

SEQ ID NO: 223057 - DNA, 20 bp, synthetic construct
  source 1..20: mol_type = other DNA
accatccttcccattccttc

SEQ ID NO: 223058 - DNA, 20 bp, synthetic construct
  source 1..20: mol_type = other DNA
caccatccttcccattcctt

SEQ ID NO: 223059 - DNA, 20 bp, synthetic construct
  source 1..20: mol_type = other DNA
ccaccatccttcccattcct

SEQ ID NO: 223060 - DNA, 20 bp, synthetic construct
  source 1..20: mol_type = other DNA
gccaccatccttcccattcc

SEQ ID NO: 223061 - DNA, 20 bp, synthetic construct
  source 1..20: mol_type = other DNA
tgccaccatccttcccattc

SEQ ID NO: 223062 - DNA, 20 bp, synthetic construct
  source 1..20: mol_type = other DNA
ctgccaccatccttcccatt

SEQ ID NO: 223063 - DNA, 20 bp, synthetic construct
  source 1..20: mol_type = other DNA
cctgccaccatccttcccat

SEQ ID NO: 223064 - DNA, 20 bp, synthetic construct
  source 1..20: mol_type = other DNA
acctgccaccatccttccca

SEQ ID NO: 223065 - DNA, 20 bp, synthetic construct
  source 1..20: mol_type = other DNA
cacctgccaccatccttccc

SEQ ID NO: 223066 - DNA, 20 bp, synthetic construct
  source 1..20: mol_type = other DNA
ccacctgccaccatccttcc

SEQ ID NO: 223067 - DNA, 20 bp, synthetic construct
  source 1..20: mol_type = other DNA
tccacctgccaccatccttc

SEQ ID NO: 223068 - DNA, 20 bp, synthetic construct
  source 1..20: mol_type = other DNA
ctccacctgccaccatcctt

SEQ ID NO: 223069 - DNA, 20 bp, synthetic construct
  source 1..20: mol_type = other DNA
cctccacctgccaccatcct

SEQ ID NO: 223070 - DNA, 20 bp, synthetic construct
  source 1..20: mol_type = other DNA
tcctccacctgccaccatcc

SEQ ID NO: 223071 - DNA, 20 bp, synthetic construct
  source 1..20: mol_type = other DNA
ttcctccacctgccaccatc

SEQ ID NO: 223072 - DNA, 20 bp, synthetic construct
  source 1..20: mol_type = other DNA
cttcctccacctgccaccat

SEQ ID NO: 223073 - DNA, 20 bp, synthetic construct
  source 1..20: mol_type = other DNA
ccttcctccacctgccacca

SEQ ID NO: 223074 - DNA, 20 bp, synthetic construct
  source 1..20: mol_type = other DNA
gccttcctccacctgccacc

SEQ ID NO: 223075 - DNA, 20 bp, synthetic construct
  source 1..20: mol_type = other DNA
cgccttcctccacctgccac

SEQ ID NO: 223076 - DNA, 20 bp, synthetic construct
  source 1..20: mol_type = other DNA
ccgccttcctccacctgcca

SEQ ID NO: 223077 - DNA, 20 bp, synthetic construct
  source 1..20: mol_type = other DNA
tccgccttcctccacctgcc

SEQ ID NO: 223078 - DNA, 20 bp, synthetic construct
  source 1..20: mol_type = other DNA
atccgccttcctccacctgc

SEQ ID NO: 223079 - DNA, 20 bp, synthetic construct
  source 1..20: mol_type = other DNA
aatccgccttcctccacctg

SEQ ID NO: 223080 - DNA, 20 bp, synthetic construct
  source 1..20: mol_type = other DNA
caatccgccttcctccacct

SEQ ID NO: 223081 - DNA, 20 bp, synthetic construct
  source 1..20: mol_type = other DNA
ccaatccgccttcctccacc

SEQ ID NO: 223082 - DNA, 20 bp, synthetic construct
  source 1..20: mol_type = other DNA
accaatccgccttcctccac

SEQ ID NO: 223083 - DNA, 20 bp, synthetic construct
  source 1..20: mol_type = other DNA
gaccaatccgccttcctcca

SEQ ID NO: 223084 - DNA, 20 bp, synthetic construct
  source 1..20: mol_type = other DNA
tgaccaatccgccttcctcc

SEQ ID NO: 223085 - DNA, 20 bp, synthetic construct
  source 1..20: mol_type = other DNA
atgaccaatccgccttcctc

SEQ ID NO: 223086 - DNA, 20 bp, synthetic construct
  source 1..20: mol_type = other DNA
gatgaccaatccgccttcct

SEQ ID NO: 223087 - DNA, 20 bp, synthetic construct
  source 1..20: mol_type = other DNA
tgatgaccaatccgccttcc

SEQ ID NO: 223088 - DNA, 20 bp, synthetic construct
  source 1..20: mol_type = other DNA
gtgatgaccaatccgccttc

SEQ ID NO: 223089 - DNA, 20 bp, synthetic construct
  source 1..20: mol_type = other DNA
ggtgatgaccaatccgcctt

SEQ ID NO: 223090 - DNA, 20 bp, synthetic construct
  source 1..20: mol_type = other DNA
aggtgatgaccaatccgcct

SEQ ID NO: 223091 - DNA, 20 bp, synthetic construct
  source 1..20: mol_type = other DNA
gaggtgatgaccaatccgcc

SEQ ID NO: 223092 - DNA, 20 bp, synthetic construct
  source 1..20: mol_type = other DNA
ggaggtgatgaccaatccgc

SEQ ID NO: 223093 - DNA, 20 bp, synthetic construct
  source 1..20: mol_type = other DNA
aggaggtgatgaccaatccg

SEQ ID NO: 223094 - DNA, 20 bp, synthetic construct
  source 1..20: mol_type = other DNA
aaggaggtgatgaccaatcc

SEQ ID NO: 223095 - DNA, 20 bp, synthetic construct
  source 1..20: mol_type = other DNA
caaggaggtgatgaccaatc

SEQ ID NO: 223096 - DNA, 20 bp, synthetic construct
  source 1..20: mol_type = other DNA
gcaaggaggtgatgaccaat

SEQ ID NO: 223097 - DNA, 20 bp, synthetic construct
  source 1..20: mol_type = other DNA
tgcaaggaggtgatgaccaa

SEQ ID NO: 223098 - DNA, 20 bp, synthetic construct
  source 1..20: mol_type = other DNA
ctgcaaggaggtgatgacca

SEQ ID NO: 223099 - DNA, 20 bp, synthetic construct
  source 1..20: mol_type = other DNA
gctgcaaggaggtgatgacc

SEQ ID NO: 223100 - DNA, 20 bp, synthetic construct
  source 1..20: mol_type = other DNA
tgctgcaaggaggtgatgac

SEQ ID NO: 223101 - DNA, 20 bp, synthetic construct
  source 1..20: mol_type = other DNA
ttgctgcaaggaggtgatga

SEQ ID NO: 223102 - DNA, 20 bp, synthetic construct
  source 1..20: mol_type = other DNA
cttgctgcaaggaggtgatg

SEQ ID NO: 223103 - DNA, 20 bp, synthetic construct
  source 1..20: mol_type = other DNA
tcttgctgcaaggaggtgat

SEQ ID NO: 223104 - DNA, 20 bp, synthetic construct
  source 1..20: mol_type = other DNA
ttcttgctgcaaggaggtga

SEQ ID NO: 223105 - DNA, 20 bp, synthetic construct
  source 1..20: mol_type = other DNA
tttcttgctgcaaggaggtg

SEQ ID NO: 223106 - DNA, 20 bp, synthetic construct
  source 1..20: mol_type = other DNA
gtttcttgctgcaaggaggt

SEQ ID NO: 223107 - DNA, 20 bp, synthetic construct
  source 1..20: mol_type = other DNA
tgtttcttgctgcaaggagg

SEQ ID NO: 223108 - DNA, 20 bp, synthetic construct
  source 1..20: mol_type = other DNA
ctgtttcttgctgcaaggag

SEQ ID NO: 223109 - DNA, 20 bp, synthetic construct
  source 1..20: mol_type = other DNA
gctgtttcttgctgcaagga

SEQ ID NO: 223110 - DNA, 20 bp, synthetic construct
  source 1..20: mol_type = other DNA
ggctgtttcttgctgcaagg

SEQ ID NO: 223111 - DNA, 20 bp, synthetic construct
  source 1..20: mol_type = other DNA
gggctgtttcttgctgcaag

SEQ ID NO: 223112 - DNA, 20 bp, synthetic construct
  source 1..20: mol_type = other DNA
ggggctgtttcttgctgcaa

SEQ ID NO: 223113 - DNA, 20 bp, synthetic construct
  source 1..20: mol_type = other DNA
tggggctgtttcttgctgca

SEQ ID NO: 223114 - DNA, 20 bp, synthetic construct
  source 1..20: mol_type = other DNA
ctggggctgtttcttgctgc

SEQ ID NO: 223115 - DNA, 20 bp, synthetic construct
  source 1..20: mol_type = other DNA
tctggggctgtttcttgctg

SEQ ID NO: 223116 - DNA, 20 bp, synthetic construct
  source 1..20: mol_type = other DNA
atctggggctgtttcttgct

SEQ ID NO: 223117 - DNA, 20 bp, synthetic construct
  source 1..20: mol_type = other DNA
gatctggggctgtttcttgc

SEQ ID NO: 223118 - DNA, 20 bp, synthetic construct
  source 1..20: mol_type = other DNA
cgatctggggctgtttcttg

SEQ ID NO: 223119 - DNA, 20 bp, synthetic construct
  source 1..20: mol_type = other DNA
acgatctggggctgtttctt

SEQ ID NO: 223120 - DNA, 20 bp, synthetic construct
  source 1..20: mol_type = other DNA
cacgatctggggctgtttct

SEQ ID NO: 223121 - DNA, 20 bp, synthetic construct
  source 1..20: mol_type = other DNA
ccacgatctggggctgtttc

SEQ ID NO: 223122 - DNA, 20 bp, synthetic construct
  source 1..20: mol_type = other DNA
cccacgatctggggctgttt

SEQ ID NO: 223123 - DNA, 20 bp, synthetic construct
  source 1..20: mol_type = other DNA
tcccacgatctggggctgtt

SEQ ID NO: 223124 - DNA, 20 bp, synthetic construct
  source 1..20: mol_type = other DNA
ttcccacgatctggggctgt

SEQ ID NO: 223125 - DNA, 20 bp, synthetic construct
  source 1..20: mol_type = other DNA
tttcccacgatctggggctg

SEQ ID NO: 223126 - DNA, 20 bp, synthetic construct
  source 1..20: mol_type = other DNA
gtttcccacgatctggggct

SEQ ID NO: 223127 - DNA, 20 bp, synthetic construct
  source 1..20: mol_type = other DNA
ggtttcccacgatctggggc

SEQ ID NO: 223128 - DNA, 20 bp, synthetic construct
  source 1..20: mol_type = other DNA
aggtttcccacgatctgggg

SEQ ID NO: 223129 - DNA, 20 bp, synthetic construct
  source 1..20: mol_type = other DNA
taggtttcccacgatctggg

SEQ ID NO: 223130 - DNA, 20 bp, synthetic construct
  source 1..20: mol_type = other DNA
gtaggtttcccacgatctgg

SEQ ID NO: 223131 - DNA, 20 bp, synthetic construct
  source 1..20: mol_type = other DNA
tgtaggtttcccacgatctg

SEQ ID NO: 223132 - DNA, 20 bp, synthetic construct
  source 1..20: mol_type = other DNA
ctgtaggtttcccacgatct

SEQ ID NO: 223133 - DNA, 20 bp, synthetic construct
  source 1..20: mol_type = other DNA
tctgtaggtttcccacgatc

SEQ ID NO: 223134 - DNA, 20 bp, synthetic construct
  source 1..20: mol_type = other DNA
gtctgtaggtttcccacgat

SEQ ID NO: 223135 - DNA, 20 bp, synthetic construct
  source 1..20: mol_type = other DNA
ggtctgtaggtttcccacga

SEQ ID NO: 223136 - DNA, 20 bp, synthetic construct
  source 1..20: mol_type = other DNA
aggtctgtaggtttcccacg

SEQ ID NO: 223137 - DNA, 20 bp, synthetic construct
  source 1..20: mol_type = other DNA
caggtctgtaggtttcccac

SEQ ID NO: 223138 - DNA, 20 bp, synthetic construct
  source 1..20: mol_type = other DNA
gcaggtctgtaggtttccca

SEQ ID NO: 223139 - DNA, 20 bp, synthetic construct
  source 1..20: mol_type = other DNA
agcaggtctgtaggtttccc

SEQ ID NO: 223140 - DNA, 20 bp, synthetic construct
  source 1..20: mol_type = other DNA
tagcaggtctgtaggtttcc

SEQ ID NO: 223141 - DNA, 20 bp, synthetic construct
  source 1..20: mol_type = other DNA
ctagcaggtctgtaggtttc

SEQ ID NO: 223142 - DNA, 20 bp, synthetic construct
  source 1..20: mol_type = other DNA
tctagcaggtctgtaggttt

SEQ ID NO: 223143 - DNA, 20 bp, synthetic construct
  source 1..20: mol_type = other DNA
gtctagcaggtctgtaggtt

SEQ ID NO: 223144 - DNA, 20 bp, synthetic construct
  source 1..20: mol_type = other DNA
tgtctagcaggtctgtaggt

SEQ ID NO: 223145 - DNA, 20 bp, synthetic construct
  source 1..20: mol_type = other DNA
ctgtctagcaggtctgtagg

SEQ ID NO: 223146 - DNA, 20 bp, synthetic construct
  source 1..20: mol_type = other DNA
tctgtctagcaggtctgtag

SEQ ID NO: 223147 - DNA, 20 bp, synthetic construct
  source 1..20: mol_type = other DNA
gtctgtctagcaggtctgta

SEQ ID NO: 223148 - DNA, 20 bp, synthetic construct
  source 1..20: mol_type = other DNA
agtctgtctagcaggtctgt

SEQ ID NO: 223149 - DNA, 20 bp, synthetic construct
  source 1..20: mol_type = other DNA
tagtctgtctagcaggtctg

SEQ ID NO: 223150 - DNA, 20 bp, synthetic construct
  source 1..20: mol_type = other DNA
ctagtctgtctagcaggtct

SEQ ID NO: 223151 - DNA, 20 bp, synthetic construct
  source 1..20: mol_type = other DNA
cctagtctgtctagcaggtc

SEQ ID NO: 223152 - DNA, 20 bp, synthetic construct
  source 1..20: mol_type = other DNA
tcctagtctgtctagcaggt

SEQ ID NO: 223153 - DNA, 20 bp, synthetic construct
  source 1..20: mol_type = other DNA
ctcctagtctgtctagcagg

SEQ ID NO: 223154 - DNA, 20 bp, synthetic construct
  source 1..20: mol_type = other DNA
gctcctagtctgtctagcag

SEQ ID NO: 223155 - DNA, 20 bp, synthetic construct
  source 1..20: mol_type = other DNA
tgctcctagtctgtctagca

SEQ ID NO: 223156 - DNA, 20 bp, synthetic construct
  source 1..20: mol_type = other DNA
ttgctcctagtctgtctagc

SEQ ID NO: 223157 - DNA, 20 bp, synthetic construct
  source 1..20: mol_type = other DNA
tttgctcctagtctgtctag

SEQ ID NO: 223158 - DNA, 20 bp, synthetic construct
  source 1..20: mol_type = other DNA
ttttgctcctagtctgtcta

SEQ ID NO: 223159 - DNA, 20 bp, synthetic construct
  source 1..20: mol_type = other DNA
cttttgctcctagtctgtct

SEQ ID NO: 223160 - DNA, 20 bp, synthetic construct
  source 1..20: mol_type = other DNA
gcttttgctcctagtctgtc

SEQ ID NO: 223161 - DNA, 20 bp, synthetic construct
  source 1..20: mol_type = other DNA
agcttttgctcctagtctgt

SEQ ID NO: 223162 - DNA, 20 bp, synthetic construct
  source 1..20: mol_type = other DNA
cagcttttgctcctagtctg

SEQ ID NO: 223163 - DNA, 20 bp, synthetic construct
  source 1..20: mol_type = other DNA
ccagcttttgctcctagtct

SEQ ID NO: 223164 - DNA, 20 bp, synthetic construct
  source 1..20: mol_type = other DNA
cccagcttttgctcctagtc

SEQ ID NO: 223165 - DNA, 20 bp, synthetic construct
  source 1..20: mol_type = other DNA
ccccagcttttgctcctagt

SEQ ID NO: 223166 - DNA, 20 bp, synthetic construct
  source 1..20: mol_type = other DNA
gccccagcttttgctcctag

SEQ ID NO: 223167 - DNA, 20 bp, synthetic construct
  source 1..20: mol_type = other DNA
agccccagcttttgctccta

SEQ ID NO: 223168 - DNA, 20 bp, synthetic construct
  source 1..20: mol_type = other DNA
aagccccagcttttgctcct

SEQ ID NO: 223169 - DNA, 20 bp, synthetic construct
  source 1..20: mol_type = other DNA
aaagccccagcttttgctcc

SEQ ID NO: 223170 - DNA, 20 bp, synthetic construct
  source 1..20: mol_type = other DNA
taaagccccagcttttgctc

SEQ ID NO: 223171 - DNA, 20 bp, synthetic construct
  source 1..20: mol_type = other DNA
ttaaagccccagcttttgct

SEQ ID NO: 223172 - DNA, 20 bp, synthetic construct
  source 1..20: mol_type = other DNA
cttaaagccccagcttttgc

SEQ ID NO: 223173 - DNA, 20 bp, synthetic construct
  source 1..20: mol_type = other DNA
tcttaaagccccagcttttg

SEQ ID NO: 223174 - DNA, 20 bp, synthetic construct
  source 1..20: mol_type = other DNA
ttcttaaagccccagctttt

SEQ ID NO: 223175 - DNA, 20 bp, synthetic construct
  source 1..20: mol_type = other DNA
attcttaaagccccagcttt

SEQ ID NO: 223176 - DNA, 20 bp, synthetic construct
  source 1..20: mol_type = other DNA
gattcttaaagccccagctt

SEQ ID NO: 223177 - DNA, 20 bp, synthetic construct
  source 1..20: mol_type = other DNA
ggattcttaaagccccagct

SEQ ID NO: 223178 - DNA, 20 bp, synthetic construct
  source 1..20: mol_type = other DNA
gggattcttaaagccccagc

SEQ ID NO: 223179 - DNA, 20 bp, synthetic construct
  source 1..20: mol_type = other DNA
ggggattcttaaagccccag

SEQ ID NO: 223180 - DNA, 20 bp, synthetic construct
  source 1..20: mol_type = other DNA
tggggattcttaaagcccca

SEQ ID NO: 223181 - DNA, 20 bp, synthetic construct
  source 1..20: mol_type = other DNA
ctggggattcttaaagcccc

SEQ ID NO: 223182 - DNA, 20 bp, synthetic construct
  source 1..20: mol_type = other DNA
cctggggattcttaaagccc

SEQ ID NO: 223183 - DNA, 20 bp, synthetic construct
  source 1..20: mol_type = other DNA
ccctggggattcttaaagcc

SEQ ID NO: 223184 - DNA, 20 bp, synthetic construct
  source 1..20: mol_type = other DNA
tccctggggattcttaaagc

SEQ ID NO: 223185 - DNA, 20 bp, synthetic construct
  source 1..20: mol_type = other DNA
ctccctggggattcttaaag

SEQ ID NO: 223186 - DNA, 20 bp, synthetic construct
  source 1..20: mol_type = other DNA
cctccctggggattcttaaa

SEQ ID NO: 223187 - DNA, 20 bp, synthetic construct
  source 1..20: mol_type = other DNA
acctccctggggattcttaa

SEQ ID NO: 223188 - DNA, 20 bp, synthetic construct
  source 1..20: mol_type = other DNA
aacctccctggggattctta

SEQ ID NO: 223189 - DNA, 20 bp, synthetic construct
  source 1..20: mol_type = other DNA
gaacctccctggggattctt

SEQ ID NO: 223190 - DNA, 20 bp, synthetic construct
  source 1..20: mol_type = other DNA
agaacctccctggggattct

SEQ ID NO: 223191 - DNA, 20 bp, synthetic construct
  source 1..20: mol_type = other DNA
gagaacctccctggggattc

SEQ ID NO: 223192 - DNA, 20 bp, synthetic construct
  source 1..20: mol_type = other DNA
ggagaacctccctggggatt

SEQ ID NO: 223193 - DNA, 20 bp, synthetic construct
  source 1..20: mol_type = other DNA
aggagaacctccctggggat

SEQ ID NO: 223194 - DNA, 20 bp, synthetic construct
  source 1..20: mol_type = other DNA
caggagaacctccctgggga

SEQ ID NO: 223195 - DNA, 20 bp, synthetic construct
  source 1..20: mol_type = other DNA
tcaggagaacctccctgggg

SEQ ID NO: 223196 - DNA, 20 bp, synthetic construct
  source 1..20: mol_type = other DNA
ctcaggagaacctccctggg

SEQ ID NO: 223197 - DNA, 20 bp, synthetic construct
  source 1..20: mol_type = other DNA
tctcaggagaacctccctgg

SEQ ID NO: 223198 - DNA, 20 bp, synthetic construct
  source 1..20: mol_type = other DNA
ctctcaggagaacctccctg

SEQ ID NO: 223199 - DNA, 20 bp, synthetic construct
  source 1..20: mol_type = other DNA
tctctcaggagaacctccct

SEQ ID NO: 223200 - DNA, 20 bp, synthetic construct
  source 1..20: mol_type = other DNA
ctctctcaggagaacctccc

SEQ ID NO: 223201 - DNA, 20 bp, synthetic construct
  source 1..20: mol_type = other DNA
actctctcaggagaacctcc

SEQ ID NO: 223202 - DNA, 20 bp, synthetic construct
  source 1..20: mol_type = other DNA
tactctctcaggagaacctc

SEQ ID NO: 223203 - DNA, 20 bp, synthetic construct
  source 1..20: mol_type = other DNA
ctactctctcaggagaacct

SEQ ID NO: 223204 - DNA, 20 bp, synthetic construct
  source 1..20: mol_type = other DNA
gctactctctcaggagaacc

SEQ ID NO: 223205 - DNA, 20 bp, synthetic construct
  source 1..20: mol_type = other DNA
ggctactctctcaggagaac

SEQ ID NO: 223206 - DNA, 20 bp, synthetic construct
  source 1..20: mol_type = other DNA
tggctactctctcaggagaa

SEQ ID NO: 223207 - DNA, 20 bp, synthetic construct
  source 1..20: mol_type = other DNA
ctggctactctctcaggaga

SEQ ID NO: 223208 - DNA, 20 bp, synthetic construct
  source 1..20: mol_type = other DNA
actggctactctctcaggag

SEQ ID NO: 223209 - DNA, 20 bp, synthetic construct
  source 1..20: mol_type = other DNA
aactggctactctctcagga

SEQ ID NO: 223210 - DNA, 20 bp, synthetic construct
  source 1..20: mol_type = other DNA
caactggctactctctcagg

SEQ ID NO: 223211 - DNA, 20 bp, synthetic construct
  source 1..20: mol_type = other DNA
ccaactggctactctctcag

SEQ ID NO: 223212 - DNA, 20 bp, synthetic construct
  source 1..20: mol_type = other DNA
tccaactggctactctctca

SEQ ID NO: 223213 - DNA, 20 bp, synthetic construct
  source 1..20: mol_type = other DNA
atccaactggctactctctc

SEQ ID NO: 223214 - DNA, 20 bp, synthetic construct
  source 1..20: mol_type = other DNA
aatccaactggctactctct

SEQ ID NO: 223215 - DNA, 20 bp, synthetic construct
  source 1..20: mol_type = other DNA
aaatccaactggctactctc

SEQ ID NO: 223216 - DNA, 20 bp, synthetic construct
  source 1..20: mol_type = other DNA
aaaatccaactggctactct

SEQ ID NO: 223217 - DNA, 20 bp, synthetic construct
  source 1..20: mol_type = other DNA
caaaatccaactggctactc

SEQ ID NO: 223218 - DNA, 20 bp, synthetic construct
  source 1..20: mol_type = other DNA
acaaaatccaactggctact

SEQ ID NO: 223219 - DNA, 20 bp, synthetic construct
  source 1..20: mol_type = other DNA
tacaaaatccaactggctac

SEQ ID NO: 223220 - DNA, 20 bp, synthetic construct
  source 1..20: mol_type = other DNA
ttacaaaatccaactggcta

SEQ ID NO: 223221 - DNA, 20 bp, synthetic construct
  source 1..20: mol_type = other DNA
cttacaaaatccaactggct

SEQ ID NO: 223222 - DNA, 20 bp, synthetic construct
  source 1..20: mol_type = other DNA
gcttacaaaatccaactggc

SEQ ID NO: 223223 - DNA, 20 bp, synthetic construct
  source 1..20: mol_type = other DNA
tgcttacaaaatccaactgg

SEQ ID NO: 223224 - DNA, 20 bp, synthetic construct
  source 1..20: mol_type = other DNA
ctgcttacaaaatccaactg

SEQ ID NO: 223225 - DNA, 20 bp, synthetic construct
  source 1..20: mol_type = other DNA
tctgcttacaaaatccaact

SEQ ID NO: 223226 - DNA, 20 bp, synthetic construct
  source 1..20: mol_type = other DNA
ctctgcttacaaaatccaac

SEQ ID NO: 223227 - DNA, 20 bp, synthetic construct
  source 1..20: mol_type = other DNA
tctctgcttacaaaatccaa

SEQ ID NO: 223228 - DNA, 20 bp, synthetic construct
  source 1..20: mol_type = other DNA
atctctgcttacaaaatcca

SEQ ID NO: 223229 - DNA, 20 bp, synthetic construct
  source 1..20: mol_type = other DNA
aatctctgcttacaaaatcc

SEQ ID NO: 223230 - DNA, 20 bp, synthetic construct
  source 1..20: mol_type = other DNA
aaatctctgcttacaaaatc

SEQ ID NO: 223231 - DNA, 20 bp, synthetic construct
  source 1..20: mol_type = other DNA
caaatctctgcttacaaaat

SEQ ID NO: 223232 - DNA, 20 bp, synthetic construct
  source 1..20: mol_type = other DNA
acaaatctctgcttacaaaa

SEQ ID NO: 223233 - DNA, 20 bp, synthetic construct
  source 1..20: mol_type = other DNA
aacaaatctctgcttacaaa

SEQ ID NO: 223234 - DNA, 20 bp, synthetic construct
  source 1..20: mol_type = other DNA
aaacaaatctctgcttacaa

SEQ ID NO: 223235 - DNA, 20 bp, synthetic construct
  source 1..20: mol_type = other DNA
caaacaaatctctgcttaca

SEQ ID NO: 223236 - DNA, 20 bp, synthetic construct
  source 1..20: mol_type = other DNA
ccaaacaaatctctgcttac

SEQ ID NO: 223237 - DNA, 20 bp, synthetic construct
  source 1..20: mol_type = other DNA
cccaaacaaatctctgctta

SEQ ID NO: 223238 - DNA, 20 bp, synthetic construct
  source 1..20: mol_type = other DNA
ccccaaacaaatctctgctt

SEQ ID NO: 223239 - DNA, 20 bp, synthetic construct
  source 1..20: mol_type = other DNA
tccccaaacaaatctctgct

SEQ ID NO: 223240 - DNA, 20 bp, synthetic construct
  source 1..20: mol_type = other DNA
ctccccaaacaaatctctgc

SEQ ID NO: 223241 - DNA, 20 bp, synthetic construct
  source 1..20: mol_type = other DNA
cctccccaaacaaatctctg

SEQ ID NO: 223242 - DNA, 20 bp, synthetic construct
  source 1..20: mol_type = other DNA
tcctccccaaacaaatctct

SEQ ID NO: 223243 - DNA, 20 bp, synthetic construct
  source 1..20: mol_type = other DNA
ctcctccccaaacaaatctc

SEQ ID NO: 223244 - DNA, 20 bp, synthetic construct
  source 1..20: mol_type = other DNA
cctcctccccaaacaaatct

SEQ ID NO: 223245 - DNA, 20 bp, synthetic construct
  source 1..20: mol_type = other DNA
acctcctccccaaacaaatc

SEQ ID NO: 223246 - DNA, 20 bp, synthetic construct
  source 1..20: mol_type = other DNA
cacctcctccccaaacaaat

SEQ ID NO: 223247 - DNA, 20 bp, synthetic construct
  source 1..20: mol_type = other DNA
tcacctcctccccaaacaaa

SEQ ID NO: 223248 - DNA, 20 bp, synthetic construct
  source 1..20: mol_type = other DNA
gtcacctcctccccaaacaa

SEQ ID NO: 223249 - DNA, 20 bp, synthetic construct
  source 1..20: mol_type = other DNA
tgtcacctcctccccaaaca

SEQ ID NO: 223250 - DNA, 20 bp, synthetic construct
  source 1..20: mol_type = other DNA
ttgtcacctcctccccaaac

SEQ ID NO: 223251 - DNA, 20 bp, synthetic construct
  source 1..20: mol_type = other DNA
gttgtcacctcctccccaaa

SEQ ID NO: 223252 - DNA, 20 bp, synthetic construct
  source 1..20: mol_type = other DNA
cgttgtcacctcctccccaa

SEQ ID NO: 223253 - DNA, 20 bp, synthetic construct
  source 1..20: mol_type = other DNA
acgttgtcacctcctcccca

SEQ ID NO: 223254 - DNA, 20 bp, synthetic construct
  source 1..20: mol_type = other DNA
tacgttgtcacctcctcccc

SEQ ID NO: 223255 - DNA, 20 bp, synthetic construct
  source 1..20: mol_type = other DNA
ctacgttgtcacctcctccc

SEQ ID NO: 223256 - DNA, 20 bp, synthetic construct
  source 1..20: mol_type = other DNA
cctacgttgtcacctcctcc

SEQ ID NO: 223257 - DNA, 20 bp, synthetic construct
  source 1..20: mol_type = other DNA
ccctacgttgtcacctcctc

SEQ ID NO: 223258 - DNA, 20 bp, synthetic construct
  source 1..20: mol_type = other DNA
tccctacgttgtcacctcct

SEQ ID NO: 223259 - DNA, 20 bp, synthetic construct
  source 1..20: mol_type = other DNA
ctccctacgttgtcacctcc

SEQ ID NO: 223260 - DNA, 20 bp, synthetic construct
  source 1..20: mol_type = other DNA
gctccctacgttgtcacctc

SEQ ID NO: 223261 - DNA, 20 bp, synthetic construct
  source 1..20: mol_type = other DNA
tgctccctacgttgtcacct

SEQ ID NO: 223262 - DNA, 20 bp, synthetic construct
  source 1..20: mol_type = other DNA
ctgctccctacgttgtcacc

SEQ ID NO: 223263 - DNA, 20 bp, synthetic construct
  source 1..20: mol_type = other DNA
tctgctccctacgttgtcac

SEQ ID NO: 223264 - DNA, 20 bp, synthetic construct
  source 1..20: mol_type = other DNA
ctctgctccctacgttgtca

SEQ ID NO: 223265 - DNA, 20 bp, synthetic construct
  source 1..20: mol_type = other DNA
cctctgctccctacgttgtc

SEQ ID NO: 223266 - DNA, 20 bp, synthetic construct
  source 1..20: mol_type = other DNA
ccctctgctccctacgttgt

SEQ ID NO: 223267 - DNA, 20 bp, synthetic construct
  source 1..20: mol_type = other DNA
cccctctgctccctacgttg

SEQ ID NO: 223268 - DNA, 20 bp, synthetic construct
  source 1..20: mol_type = other DNA
gcccctctgctccctacgtt

SEQ ID NO: 223269 - DNA, 20 bp, synthetic construct
  source 1..20: mol_type = other DNA
tgcccctctgctccctacgt

SEQ ID NO: 223270 - DNA, 20 bp, synthetic construct
  source 1..20: mol_type = other DNA
ttgcccctctgctccctacg

SEQ ID NO: 223271 - DNA, 20 bp, synthetic construct
  source 1..20: mol_type = other DNA
tttgcccctctgctccctac

SEQ ID NO: 223272 - DNA, 20 bp, synthetic construct
  source 1..20: mol_type = other DNA
ctttgcccctctgctcccta

SEQ ID NO: 223273 - DNA, 20 bp, synthetic construct
  source 1..20: mol_type = other DNA
gctttgcccctctgctccct

SEQ ID NO: 223274 - DNA, 20 bp, synthetic construct
  source 1..20: mol_type = other DNA
agctttgcccctctgctccc

SEQ ID NO: 223275 - DNA, 20 bp, synthetic construct
  source 1..20: mol_type = other DNA
cagctttgcccctctgctcc

SEQ ID NO: 223276 - DNA, 20 bp, synthetic construct
  source 1..20: mol_type = other DNA
acagctttgcccctctgctc

SEQ ID NO: 223277 - DNA, 20 bp, synthetic construct
  source 1..20: mol_type = other DNA
gacagctttgcccctctgct

SEQ ID NO: 223278 - DNA, 20 bp, synthetic construct
  source 1..20: mol_type = other DNA
cgacagctttgcccctctgc

SEQ ID NO: 223279 - DNA, 20 bp, synthetic construct
  source 1..20: mol_type = other DNA
ccgacagctttgcccctctg

SEQ ID NO: 223280 - DNA, 20 bp, synthetic construct
  source 1..20: mol_type = other DNA
cccgacagctttgcccctct

SEQ ID NO: 223281 - DNA, 20 bp, synthetic construct
  source 1..20: mol_type = other DNA
tcccgacagctttgcccctc

SEQ ID NO: 223282 - DNA, 20 bp, synthetic construct
  source 1..20: mol_type = other DNA
ttcccgacagctttgcccct

SEQ ID NO: 223283 - DNA, 20 bp, synthetic construct
  source 1..20: mol_type = other DNA
attcccgacagctttgcccc

SEQ ID NO: 223284 - DNA, 20 bp, synthetic construct
  source 1..20: mol_type = other DNA
gattcccgacagctttgccc

SEQ ID NO: 223285 - DNA, 20 bp, synthetic construct
  source 1..20: mol_type = other DNA
ggattcccgacagctttgcc

SEQ ID NO: 223286 - DNA, 20 bp, synthetic construct
  source 1..20: mol_type = other DNA
aggattcccgacagctttgc

SEQ ID NO: 223287 - DNA, 20 bp, synthetic construct
  source 1..20: mol_type = other DNA
caggattcccgacagctttg

SEQ ID NO: 223288 - DNA, 20 bp, synthetic construct
  source 1..20: mol_type = other DNA
gcaggattcccgacagcttt

SEQ ID NO: 223289 - DNA, 20 bp, synthetic construct
  source 1..20: mol_type = other DNA
ggcaggattcccgacagctt

SEQ ID NO: 223290 - DNA, 20 bp, synthetic construct
  source 1..20: mol_type = other DNA
aggcaggattcccgacagct

SEQ ID NO: 223291 - DNA, 20 bp, synthetic construct
  source 1..20: mol_type = other DNA
aaggcaggattcccgacagc

SEQ ID NO: 223292 - DNA, 20 bp, synthetic construct
  source 1..20: mol_type = other DNA
caaggcaggattcccgacag

SEQ ID NO: 223293 - DNA, 20 bp, synthetic construct
  source 1..20: mol_type = other DNA
tcaaggcaggattcccgaca

SEQ ID NO: 223294 - DNA, 20 bp, synthetic construct
  source 1..20: mol_type = other DNA
ctcaaggcaggattcccgac

SEQ ID NO: 223295 - DNA, 20 bp, synthetic construct
  source 1..20: mol_type = other DNA
cctcaaggcaggattcccga

SEQ ID NO: 223296 - DNA, 20 bp, synthetic construct
  source 1..20: mol_type = other DNA
ccctcaaggcaggattcccg

SEQ ID NO: 223297 - DNA, 20 bp, synthetic construct
  source 1..20: mol_type = other DNA
gccctcaaggcaggattccc

SEQ ID NO: 223298 - DNA, 20 bp, synthetic construct
  source 1..20: mol_type = other DNA
tgccctcaaggcaggattcc

SEQ ID NO: 223299 - DNA, 20 bp, synthetic construct
  source 1..20: mol_type = other DNA
ctgccctcaaggcaggattc

SEQ ID NO: 223300 - DNA, 20 bp, synthetic construct
  source 1..20: mol_type = other DNA
cctgccctcaaggcaggatt

SEQ ID NO: 223301 - DNA, 20 bp, synthetic construct
  source 1..20: mol_type = other DNA
ccctgccctcaaggcaggat

SEQ ID NO: 223302 - DNA, 20 bp, synthetic construct
  source 1..20: mol_type = other DNA
tccctgccctcaaggcagga

SEQ ID NO: 223303 - DNA, 20 bp, synthetic construct
  source 1..20: mol_type = other DNA
atccctgccctcaaggcagg

SEQ ID NO: 223304 - DNA, 20 bp, synthetic construct
  source 1..20: mol_type = other DNA
catccctgccctcaaggcag

SEQ ID NO: 223305 - DNA, 20 bp, synthetic construct
  source 1..20: mol_type = other DNA
acatccctgccctcaaggca

SEQ ID NO: 223306 - DNA, 20 bp, synthetic construct
  source 1..20: mol_type = other DNA
cacatccctgccctcaaggc

SEQ ID NO: 223307 - DNA, 20 bp, synthetic construct
  source 1..20: mol_type = other DNA
acacatccctgccctcaagg

SEQ ID NO: 223308 - DNA, 20 bp, synthetic construct
  source 1..20: mol_type = other DNA
cacacatccctgccctcaag

SEQ ID NO: 223309 - DNA, 20 bp, synthetic construct
  source 1..20: mol_type = other DNA
acacacatccctgccctcaa

SEQ ID NO: 223310 - DNA, 20 bp, synthetic construct
  source 1..20: mol_type = other DNA
aacacacatccctgccctca

SEQ ID NO: 223311 - DNA, 20 bp, synthetic construct
  source 1..20: mol_type = other DNA
caacacacatccctgccctc

SEQ ID NO: 223312 - DNA, 20 bp, synthetic construct
  source 1..20: mol_type = other DNA
ccaacacacatccctgccct

SEQ ID NO: 223313 - DNA, 20 bp, synthetic construct
  source 1..20: mol_type = other DNA
cccaacacacatccctgccc

SEQ ID NO: 223314 - DNA, 20 bp, synthetic construct
  source 1..20: mol_type = other DNA
ccccaacacacatccctgcc

SEQ ID NO: 223315 - DNA, 20 bp, synthetic construct
  source 1..20: mol_type = other DNA
cccccaacacacatccctgc

SEQ ID NO: 223316 - DNA, 20 bp, synthetic construct
  source 1..20: mol_type = other DNA
ccccccaacacacatccctg

SEQ ID NO: 223317 - DNA, 20 bp, synthetic construct
  source 1..20: mol_type = other DNA
tccccccaacacacatccct

SEQ ID NO: 223318 - DNA, 20 bp, synthetic construct
  source 1..20: mol_type = other DNA
ctccccccaacacacatccc

SEQ ID NO: 223319 - DNA, 20 bp, synthetic construct
  source 1..20: mol_type = other DNA
actccccccaacacacatcc

SEQ ID NO: 223320 - DNA, 20 bp, synthetic construct
  source 1..20: mol_type = other DNA
aactccccccaacacacatc

SEQ ID NO: 223321 - DNA, 20 bp, synthetic construct
  source 1..20: mol_type = other DNA
caactccccccaacacacat

SEQ ID NO: 223322 - DNA, 20 bp, synthetic construct
  source 1..20: mol_type = other DNA
ccaactccccccaacacaca

SEQ ID NO: 223323 - DNA, 20 bp, synthetic construct
  source 1..20: mol_type = other DNA
cccaactccccccaacacac

SEQ ID NO: 223324 - DNA, 20 bp, synthetic construct
  source 1..20: mol_type = other DNA
acccaactccccccaacaca

SEQ ID NO: 223325 - DNA, 20 bp, synthetic construct
  source 1..20: mol_type = other DNA
gacccaactccccccaacac

SEQ ID NO: 223326 - DNA, 20 bp, synthetic construct
  source 1..20: mol_type = other DNA
tgacccaactccccccaaca

SEQ ID NO: 223327 - DNA, 20 bp, synthetic construct
  source 1..20: mol_type = other DNA
gtgacccaactccccccaac

SEQ ID NO: 223328 - DNA, 20 bp, synthetic construct
  source 1..20: mol_type = other DNA
agtgacccaactccccccaa

SEQ ID NO: 223329 - DNA, 20 bp, synthetic construct
  source 1..20: mol_type = other DNA
cagtgacccaactcccccca

SEQ ID NO: 223330 - DNA, 20 bp, synthetic construct
  source 1..20: mol_type = other DNA
ccagtgacccaactcccccc

SEQ ID NO: 223331 - DNA, 20 bp, synthetic construct
  source 1..20: mol_type = other DNA
cccagtgacccaactccccc

SEQ ID NO: 223332 - DNA, 20 bp, synthetic construct
  source 1..20: mol_type = other DNA
ccccagtgacccaactcccc

SEQ ID NO: 223333 - DNA, 20 bp, synthetic construct
  source 1..20: mol_type = other DNA
gccccagtgacccaactccc

SEQ ID NO: 223334 - DNA, 20 bp, synthetic construct
  source 1..20: mol_type = other DNA
agccccagtgacccaactcc

SEQ ID NO: 223335 - DNA, 20 bp, synthetic construct
  source 1..20: mol_type = other DNA
gagccccagtgacccaactc

SEQ ID NO: 223336 - DNA, 20 bp, synthetic construct
  source 1..20: mol_type = other DNA
cgagccccagtgacccaact

SEQ ID NO: 223337 - DNA, 20 bp, synthetic construct
  source 1..20: mol_type = other DNA
ccgagccccagtgacccaac

SEQ ID NO: 223338 - DNA, 20 bp, synthetic construct
  source 1..20: mol_type = other DNA
accgagccccagtgacccaa

SEQ ID NO: 223339 - DNA, 20 bp, synthetic construct
  source 1..20: mol_type = other DNA
caccgagccccagtgaccca

SEQ ID NO: 223340 - DNA, 20 bp, synthetic construct
  source 1..20: mol_type = other DNA
ccaccgagccccagtgaccc

SEQ ID NO: 223341 - DNA, 20 bp, synthetic construct
  source 1..20: mol_type = other DNA
gccaccgagccccagtgacc

SEQ ID NO: 223342 - DNA, 20 bp, synthetic construct
  source 1..20: mol_type = other DNA
ggccaccgagccccagtgac

SEQ ID NO: 223343 - DNA, 20 bp, synthetic construct
  source 1..20: mol_type = other DNA
aggccaccgagccccagtga

SEQ ID NO: 223344 - DNA, 20 bp, synthetic construct
  source 1..20: mol_type = other DNA
aaggccaccgagccccagtg

SEQ ID NO: 223345 - DNA, 20 bp, synthetic construct
  source 1..20: mol_type = other DNA
caaggccaccgagccccagt

SEQ ID NO: 223346 - DNA, 20 bp, synthetic construct
  source 1..20: mol_type = other DNA
ccaaggccaccgagccccag

SEQ ID NO: 223347 - DNA, 20 bp, synthetic construct
  source 1..20: mol_type = other DNA
cccaaggccaccgagcccca

SEQ ID NO: 223348 - DNA, 20 bp, synthetic construct
  source 1..20: mol_type = other DNA
gcccaaggccaccgagcccc

SEQ ID NO: 223349 - DNA, 20 bp, synthetic construct
  source 1..20: mol_type = other DNA
tgcccaaggccaccgagccc

SEQ ID NO: 223350 - DNA, 20 bp, synthetic construct
  source 1..20: mol_type = other DNA
ttgcccaaggccaccgagcc

SEQ ID NO: 223351 - DNA, 20 bp, synthetic construct
  source 1..20: mol_type = other DNA
cttgcccaaggccaccgagc

SEQ ID NO: 223352 - DNA, 20 bp, synthetic construct
  source 1..20: mol_type = other DNA
acttgcccaaggccaccgag

SEQ ID NO: 223353 - DNA, 20 bp, synthetic construct
  source 1..20: mol_type = other DNA
aacttgcccaaggccaccga

SEQ ID NO: 223354 - DNA, 20 bp, synthetic construct
  source 1..20: mol_type = other DNA
aaacttgcccaaggccaccg

SEQ ID NO: 223355 - DNA, 20 bp, synthetic construct
  source 1..20: mol_type = other DNA
gaaacttgcccaaggccacc

SEQ ID NO: 223356 - DNA, 20 bp, synthetic construct
  source 1..20: mol_type = other DNA
agaaacttgcccaaggccac

SEQ ID NO: 223357 - DNA, 20 bp, synthetic construct
  source 1..20: mol_type = other DNA
tagaaacttgcccaaggcca

SEQ ID NO: 223358 - DNA, 20 bp, synthetic construct
  source 1..20: mol_type = other DNA
gtagaaacttgcccaaggcc

SEQ ID NO: 223359 - DNA, 20 bp, synthetic construct
  source 1..20: mol_type = other DNA
ggtagaaacttgcccaaggc

SEQ ID NO: 223360 - DNA, 20 bp, synthetic construct
  source 1..20: mol_type = other DNA
aggtagaaacttgcccaagg

SEQ ID NO: 223361 - DNA, 20 bp, synthetic construct
  source 1..20: mol_type = other DNA
gaggtagaaacttgcccaag

SEQ ID NO: 223362 - DNA, 20 bp, synthetic construct
  source 1..20: mol_type = other DNA
agaggtagaaacttgcccaa

SEQ ID NO: 223363 - DNA, 20 bp, synthetic construct
  source 1..20: mol_type = other DNA
gagaggtagaaacttgccca

SEQ ID NO: 223364 - DNA, 20 bp, synthetic construct
  source 1..20: mol_type = other DNA
tgagaggtagaaacttgccc

SEQ ID NO: 223365 - DNA, 20 bp, synthetic construct
  source 1..20: mol_type = other DNA
ctgagaggtagaaacttgcc

SEQ ID NO: 223366 - DNA, 20 bp, synthetic construct
  source 1..20: mol_type = other DNA
cctgagaggtagaaacttgc

SEQ ID NO: 223367 - DNA, 20 bp, synthetic construct
  source 1..20: mol_type = other DNA
acctgagaggtagaaacttg

SEQ ID NO: 223368 - DNA, 20 bp, synthetic construct
  source 1..20: mol_type = other DNA
gacctgagaggtagaaactt

SEQ ID NO: 223369 - DNA, 20 bp, synthetic construct
  source 1..20: mol_type = other DNA
ggacctgagaggtagaaact

SEQ ID NO: 223370 - DNA, 20 bp, synthetic construct
  source 1..20: mol_type = other DNA
aggacctgagaggtagaaac

SEQ ID NO: 223371 - DNA, 20 bp, synthetic construct
  source 1..20: mol_type = other DNA
aaggacctgagaggtagaaa

SEQ ID NO: 223372 - DNA, 20 bp, synthetic construct
  source 1..20: mol_type = other DNA
aaaggacctgagaggtagaa

SEQ ID NO: 223373 - DNA, 20 bp, synthetic construct
  source 1..20: mol_type = other DNA
taaaggacctgagaggtaga

SEQ ID NO: 223374 - DNA, 20 bp, synthetic construct
  source 1..20: mol_type = other DNA
gtaaaggacctgagaggtag

SEQ ID NO: 223375 - DNA, 20 bp, synthetic construct
  source 1..20: mol_type = other DNA
ggtaaaggacctgagaggta

SEQ ID NO: 223376 - DNA, 20 bp, synthetic construct
  source 1..20: mol_type = other DNA
gggtaaaggacctgagaggt

SEQ ID NO: 223377 - DNA, 20 bp, synthetic construct
  source 1..20: mol_type = other DNA
tgggtaaaggacctgagagg

SEQ ID NO: 223378 - DNA, 20 bp, synthetic construct
  source 1..20: mol_type = other DNA
gtgggtaaaggacctgagag

SEQ ID NO: 223379 - DNA, 20 bp, synthetic construct
  source 1..20: mol_type = other DNA
ggtgggtaaaggacctgaga

SEQ ID NO: 223380 - DNA, 20 bp, synthetic construct
  source 1..20: mol_type = other DNA
aggtgggtaaaggacctgag

SEQ ID NO: 223381 - DNA, 20 bp, synthetic construct
  source 1..20: mol_type = other DNA
taggtgggtaaaggacctga

SEQ ID NO: 223382 - DNA, 20 bp, synthetic construct
  source 1..20: mol_type = other DNA
ctaggtgggtaaaggacctg

SEQ ID NO: 223383 - DNA, 20 bp, synthetic construct
  source 1..20: mol_type = other DNA
cctaggtgggtaaaggacct

SEQ ID NO: 223384 - DNA, 20 bp, synthetic construct
  source 1..20: mol_type = other DNA
ccctaggtgggtaaaggacc

SEQ ID NO: 223385 - DNA, 20 bp, synthetic construct
  source 1..20: mol_type = other DNA
accctaggtgggtaaaggac

SEQ ID NO: 223386 - DNA, 20 bp, synthetic construct
  source 1..20: mol_type = other DNA
gaccctaggtgggtaaagga

SEQ ID NO: 223387 - DNA, 20 bp, synthetic construct
  source 1..20: mol_type = other DNA
cgaccctaggtgggtaaagg

SEQ ID NO: 223388 - DNA, 20 bp, synthetic construct
  source 1..20: mol_type = other DNA
gcgaccctaggtgggtaaag

SEQ ID NO: 223389 - DNA, 20 bp, synthetic construct
  source 1..20: mol_type = other DNA
ggcgaccctaggtgggtaaa

SEQ ID NO: 223390 - DNA, 20 bp, synthetic construct
  source 1..20: mol_type = other DNA
tggcgaccctaggtgggtaa

SEQ ID NO: 223391 - DNA, 20 bp, synthetic construct
  source 1..20: mol_type = other DNA
atggcgaccctaggtgggta

SEQ ID NO: 223392 - DNA, 20 bp, synthetic construct
  source 1..20: mol_type = other DNA
gatggcgaccctaggtgggt

SEQ ID NO: 223393 - DNA, 20 bp, synthetic construct
  source 1..20: mol_type = other DNA
ggatggcgaccctaggtggg

SEQ ID NO: 223394 - DNA, 20 bp, synthetic construct
  source 1..20: mol_type = other DNA
aggatggcgaccctaggtgg

SEQ ID NO: 223395 - DNA, 20 bp, synthetic construct
  source 1..20: mol_type = other DNA
caggatggcgaccctaggtg

SEQ ID NO: 223396 - DNA, 20 bp, synthetic construct
  source 1..20: mol_type = other DNA
gcaggatggcgaccctaggt

SEQ ID NO: 223397 - DNA, 20 bp, synthetic construct
  source 1..20: mol_type = other DNA
ggcaggatggcgaccctagg

SEQ ID NO: 223398 - DNA, 20 bp, synthetic construct
  source 1..20: mol_type = other DNA
gggcaggatggcgaccctag

SEQ ID NO: 223399 - DNA, 20 bp, synthetic construct
  source 1..20: mol_type = other DNA
tgggcaggatggcgacccta

SEQ ID NO: 223400 - DNA, 20 bp, synthetic construct
  source 1..20: mol_type = other DNA
gtgggcaggatggcgaccct

SEQ ID NO: 223401 - DNA, 20 bp, synthetic construct
  source 1..20: mol_type = other DNA
ggtgggcaggatggcgaccc

SEQ ID NO: 223402 - DNA, 20 bp, synthetic construct
  source 1..20: mol_type = other DNA
aggtgggcaggatggcgacc

SEQ ID NO: 223403 - DNA, 20 bp, synthetic construct
  source 1..20: mol_type = other DNA
gaggtgggcaggatggcgac

SEQ ID NO: 223404 - DNA, 20 bp, synthetic construct
  source 1..20: mol_type = other DNA
tgaggtgggcaggatggcga

SEQ ID NO: 223405 - DNA, 20 bp, synthetic construct
  source 1..20: mol_type = other DNA
gtgaggtgggcaggatggcg

SEQ ID NO: 223406 - DNA, 20 bp, synthetic construct
  source 1..20: mol_type = other DNA
tgtgaggtgggcaggatggc

SEQ ID NO: 223407 - DNA, 20 bp, synthetic construct
  source 1..20: mol_type = other DNA
ctgtgaggtgggcaggatgg

SEQ ID NO: 223408 - DNA, 20 bp, synthetic construct
  source 1..20: mol_type = other DNA
cctgtgaggtgggcaggatg

SEQ ID NO: 223409 - DNA, 20 bp, synthetic construct
  source 1..20: mol_type = other DNA
acctgtgaggtgggcaggat

SEQ ID NO: 223410 - DNA, 20 bp, synthetic construct
  source 1..20: mol_type = other DNA
aacctgtgaggtgggcagga

SEQ ID NO: 223411 - DNA, 20 bp, synthetic construct
  source 1..20: mol_type = other DNA
taacctgtgaggtgggcagg

SEQ ID NO: 223412 - DNA, 20 bp, synthetic construct
  source 1..20: mol_type = other DNA
gtaacctgtgaggtgggcag

SEQ ID NO: 223413 - DNA, 20 bp, synthetic construct
  source 1..20: mol_type = other DNA
tgtaacctgtgaggtgggca

SEQ ID NO: 223414 - DNA, 20 bp, synthetic construct
  source 1..20: mol_type = other DNA
ctgtaacctgtgaggtgggc

SEQ ID NO: 223415 - DNA, 20 bp, synthetic construct
  source 1..20: mol_type = other DNA
actgtaacctgtgaggtggg

SEQ ID NO: 223416 - DNA, 20 bp, synthetic construct
  source 1..20: mol_type = other DNA
cactgtaacctgtgaggtgg

SEQ ID NO: 223417 - DNA, 20 bp, synthetic construct
  source 1..20: mol_type = other DNA
tcactgtaacctgtgaggtg

SEQ ID NO: 223418 - DNA, 20 bp, synthetic construct
  source 1..20: mol_type = other DNA
ctcactgtaacctgtgaggt

SEQ ID NO: 223419 - DNA, 20 bp, synthetic construct
  source 1..20: mol_type = other DNA
gctcactgtaacctgtgagg

SEQ ID NO: 223420 - DNA, 20 bp, synthetic construct
  source 1..20: mol_type = other DNA
ggctcactgtaacctgtgag

SEQ ID NO: 223421 - DNA, 20 bp, synthetic construct
  source 1..20: mol_type = other DNA
aggctcactgtaacctgtga

SEQ ID NO: 223422 - DNA, 20 bp, synthetic construct
  source 1..20: mol_type = other DNA
caggctcactgtaacctgtg

SEQ ID NO: 223423 - DNA, 20 bp, synthetic construct
  source 1..20: mol_type = other DNA
ccaggctcactgtaacctgt

SEQ ID NO: 223424 - DNA, 20 bp, synthetic construct
  source 1..20: mol_type = other DNA
tccaggctcactgtaacctg

SEQ ID NO: 223425 - DNA, 20 bp, synthetic construct
  source 1..20: mol_type = other DNA
atccaggctcactgtaacct

SEQ ID NO: 223426 - DNA, 20 bp, synthetic construct
  source 1..20: mol_type = other DNA
catccaggctcactgtaacc

SEQ ID NO: 223427 - DNA, 20 bp, synthetic construct
  source 1..20: mol_type = other DNA
gcatccaggctcactgtaac

SEQ ID NO: 223428 - DNA, 20 bp, synthetic construct
  source 1..20: mol_type = other DNA
tgcatccaggctcactgtaa

SEQ ID NO: 223429 - DNA, 20 bp, synthetic construct
  source 1..20: mol_type = other DNA
gtgcatccaggctcactgta

SEQ ID NO: 223430 - DNA, 20 bp, synthetic construct
  source 1..20: mol_type = other DNA
agtgcatccaggctcactgt

SEQ ID NO: 223431 - DNA, 20 bp, synthetic construct
  source 1..20: mol_type = other DNA
cagtgcatccaggctcactg

SEQ ID NO: 223432 - DNA, 20 bp, synthetic construct
  source 1..20: mol_type = other DNA
acagtgcatccaggctcact

SEQ ID NO: 223433 - DNA, 20 bp, synthetic construct
  source 1..20: mol_type = other DNA
gacagtgcatccaggctcac

SEQ ID NO: 223434 - DNA, 20 bp, synthetic construct
  source 1..20: mol_type = other DNA
tgacagtgcatccaggctca

SEQ ID NO: 223435 - DNA, 20 bp, synthetic construct
  source 1..20: mol_type = other DNA
atgacagtgcatccaggctc

SEQ ID NO: 223436 - DNA, 20 bp, synthetic construct
  source 1..20: mol_type = other DNA
catgacagtgcatccaggct

SEQ ID NO: 223437 - DNA, 20 bp, synthetic construct
  source 1..20: mol_type = other DNA
ccatgacagtgcatccaggc

SEQ ID NO: 223438 - DNA, 20 bp, synthetic construct
  source 1..20: mol_type = other DNA
cccatgacagtgcatccagg

SEQ ID NO: 223439 - DNA, 20 bp, synthetic construct
  source 1..20: mol_type = other DNA
gcccatgacagtgcatccag

SEQ ID NO: 223440 - DNA, 20 bp, synthetic construct
  source 1..20: mol_type = other DNA
tgcccatgacagtgcatcca

SEQ ID NO: 223441 - DNA, 20 bp, synthetic construct
  source 1..20: mol_type = other DNA
ctgcccatgacagtgcatcc

SEQ ID NO: 223442 - DNA, 20 bp, synthetic construct
  source 1..20: mol_type = other DNA
cctgcccatgacagtgcatc

SEQ ID NO: 223443 - DNA, 20 bp, synthetic construct
  source 1..20: mol_type = other DNA
acctgcccatgacagtgcat

SEQ ID NO: 223444 - DNA, 20 bp, synthetic construct
  source 1..20: mol_type = other DNA
cacctgcccatgacagtgca

SEQ ID NO: 223445 - DNA, 20 bp, synthetic construct
  source 1..20: mol_type = other DNA
gcacctgcccatgacagtgc

SEQ ID NO: 223446 - DNA, 20 bp, synthetic construct
  source 1..20: mol_type = other DNA
ggcacctgcccatgacagtg

SEQ ID NO: 223447 - DNA, 20 bp, synthetic construct
  source 1..20: mol_type = other DNA
gggcacctgcccatgacagt

SEQ ID NO: 223448 - DNA, 20 bp, synthetic construct
  source 1..20: mol_type = other DNA
tgggcacctgcccatgacag

SEQ ID NO: 223449 - DNA, 20 bp, synthetic construct
  source 1..20: mol_type = other DNA
ctgggcacctgcccatgaca

SEQ ID NO: 223450 - DNA, 20 bp, synthetic construct
  source 1..20: mol_type = other DNA
cctgggcacctgcccatgac

SEQ ID NO: 223451 - DNA, 20 bp, synthetic construct
  source 1..20: mol_type = other DNA
tcctgggcacctgcccatga

SEQ ID NO: 223452 - DNA, 20 bp, synthetic construct
  source 1..20: mol_type = other DNA
ttcctgggcacctgcccatg

SEQ ID NO: 223453 - DNA, 20 bp, synthetic construct
  source 1..20: mol_type = other DNA
tttcctgggcacctgcccat

SEQ ID NO: 223454 - DNA, 20 bp, synthetic construct
  source 1..20: mol_type = other DNA
ttttcctgggcacctgccca

SEQ ID NO: 223455 - DNA, 20 bp, synthetic construct
  source 1..20: mol_type = other DNA
attttcctgggcacctgccc

SEQ ID NO: 223456 - DNA, 20 bp, synthetic construct
  source 1..20: mol_type = other DNA
cattttcctgggcacctgcc

SEQ ID NO: 223457 - DNA, 20 bp, synthetic construct
  source 1..20: mol_type = other DNA
ccattttcctgggcacctgc

SEQ ID NO: 223458 - DNA, 20 bp, synthetic construct
  source 1..20: mol_type = other DNA
gccattttcctgggcacctg

SEQ ID NO: 223459 - DNA, 20 bp, synthetic construct
  source 1..20: mol_type = other DNA
tgccattttcctgggcacct

SEQ ID NO: 223460 - DNA, 20 bp, synthetic construct
  source 1..20: mol_type = other DNA
ctgccattttcctgggcacc

SEQ ID NO: 223461 - DNA, 20 bp, synthetic construct
  source 1..20: mol_type = other DNA
tctgccattttcctgggcac

SEQ ID NO: 223462 - DNA, 20 bp, synthetic construct
  source 1..20: mol_type = other DNA
gtctgccattttcctgggca

SEQ ID NO: 223463 - DNA, 20 bp, synthetic construct
  source 1..20: mol_type = other DNA
tgtctgccattttcctgggc

SEQ ID NO: 223464 - DNA, 20 bp, synthetic construct
  source 1..20: mol_type = other DNA
atgtctgccattttcctggg

SEQ ID NO: 223465 - DNA, 20 bp, synthetic construct
  source 1..20: mol_type = other DNA
catgtctgccattttcctgg

SEQ ID NO: 223466 - DNA, 20 bp, synthetic construct
  source 1..20: mol_type = other DNA
acatgtctgccattttcctg

SEQ ID NO: 223467 - DNA, 20 bp, synthetic construct
  source 1..20: mol_type = other DNA
aacatgtctgccattttcct

SEQ ID NO: 223468 - DNA, 20 bp, synthetic construct
  source 1..20: mol_type = other DNA
gaacatgtctgccattttcc

SEQ ID NO: 223469 - DNA, 20 bp, synthetic construct
  source 1..20: mol_type = other DNA
ggaacatgtctgccattttc

SEQ ID NO: 223470 - DNA, 20 bp, synthetic construct
  source 1..20: mol_type = other DNA
tggaacatgtctgccatttt

SEQ ID NO: 223471 - DNA, 20 bp, synthetic construct
  source 1..20: mol_type = other DNA
ttggaacatgtctgccattt

SEQ ID NO: 223472 - DNA, 20 bp, synthetic construct
  source 1..20: mol_type = other DNA
tttggaacatgtctgccatt

SEQ ID NO: 223473 - DNA, 20 bp, synthetic construct
  source 1..20: mol_type = other DNA
gtttggaacatgtctgccat

SEQ ID NO: 223474 - DNA, 20 bp, synthetic construct
  source 1..20: mol_type = other DNA
tgtttggaacatgtctgcca

SEQ ID NO: 223475 - DNA, 20 bp, synthetic construct
  source 1..20: mol_type = other DNA
ctgtttggaacatgtctgcc

SEQ ID NO: 223476 - DNA, 20 bp, synthetic construct
  source 1..20: mol_type = other DNA
gctgtttggaacatgtctgc

SEQ ID NO: 223477 - DNA, 20 bp, synthetic construct
  source 1..20: mol_type = other DNA
tgctgtttggaacatgtctg

SEQ ID NO: 223478 - DNA, 20 bp, synthetic construct
  source 1..20: mol_type = other DNA
gtgctgtttggaacatgtct

SEQ ID NO: 223479 - DNA, 20 bp, synthetic construct
  source 1..20: mol_type = other DNA
cgtgctgtttggaacatgtc

SEQ ID NO: 223480 - DNA, 20 bp, synthetic construct
  source 1..20: mol_type = other DNA
gcgtgctgtttggaacatgt

SEQ ID NO: 223481 - DNA, 20 bp, synthetic construct
  source 1..20: mol_type = other DNA
tgcgtgctgtttggaacatg

SEQ ID NO: 223482 - DNA, 20 bp, synthetic construct
  source 1..20: mol_type = other DNA
ctgcgtgctgtttggaacat

SEQ ID NO: 223483 - DNA, 20 bp, synthetic construct
  source 1..20: mol_type = other DNA
gctgcgtgctgtttggaaca

SEQ ID NO: 223484 - DNA, 20 bp, synthetic construct
  source 1..20: mol_type = other DNA
tgctgcgtgctgtttggaac

SEQ ID NO: 223485 - DNA, 20 bp, synthetic construct
  source 1..20: mol_type = other DNA
atgctgcgtgctgtttggaa

SEQ ID NO: 223486 - DNA, 20 bp, synthetic construct
  source 1..20: mol_type = other DNA
aatgctgcgtgctgtttgga

SEQ ID NO: 223487 - DNA, 20 bp, synthetic construct
  source 1..20: mol_type = other DNA
gaatgctgcgtgctgtttgg

SEQ ID NO: 223488 - DNA, 20 bp, synthetic construct
  source 1..20: mol_type = other DNA
ggaatgctgcgtgctgtttg

SEQ ID NO: 223489 - DNA, 20 bp, synthetic construct
  source 1..20: mol_type = other DNA
gggaatgctgcgtgctgttt

SEQ ID NO: 223490 - DNA, 20 bp, synthetic construct
  source 1..20: mol_type = other DNA
ggggaatgctgcgtgctgtt

SEQ ID NO: 223491 - DNA, 20 bp, synthetic construct
  source 1..20: mol_type = other DNA
tggggaatgctgcgtgctgt

SEQ ID NO: 223492 - DNA, 20 bp, synthetic construct
  source 1..20: mol_type = other DNA
ctggggaatgctgcgtgctg

SEQ ID NO: 223493 - DNA, 20 bp, synthetic construct
  source 1..20: mol_type = other DNA
actggggaatgctgcgtgct

SEQ ID NO: 223494 - DNA, 20 bp, synthetic construct
  source 1..20: mol_type = other DNA
cactggggaatgctgcgtgc

SEQ ID NO: 223495 - DNA, 20 bp, synthetic construct
  source 1..20: mol_type = other DNA
tcactggggaatgctgcgtg

SEQ ID NO: 223496 - DNA, 20 bp, synthetic construct
  source 1..20: mol_type = other DNA
atcactggggaatgctgcgt

SEQ ID NO: 223497 - DNA, 20 bp, synthetic construct
  source 1..20: mol_type = other DNA
catcactggggaatgctgcg

SEQ ID NO: 223498 - DNA, 20 bp, synthetic construct
  source 1..20: mol_type = other DNA
gcatcactggggaatgctgc

SEQ ID NO: 223499 - DNA, 20 bp, synthetic construct
  source 1..20: mol_type = other DNA
ggcatcactggggaatgctg

SEQ ID NO: 223500 - DNA, 20 bp, synthetic construct
  source 1..20: mol_type = other DNA
gggcatcactggggaatgct

SEQ ID NO: 223501 - DNA, 20 bp, synthetic construct
  source 1..20: mol_type = other DNA
tgggcatcactggggaatgc

SEQ ID NO: 223502 - DNA, 20 bp, synthetic construct
  source 1..20: mol_type = other DNA
ctgggcatcactggggaatg

SEQ ID NO: 223503 - DNA, 20 bp, synthetic construct
  source 1..20: mol_type = other DNA
cctgggcatcactggggaat

SEQ ID NO: 223504 - DNA, 20 bp, synthetic construct
  source 1..20: mol_type = other DNA
ccctgggcatcactggggaa

SEQ ID NO: 223505 - DNA, 20 bp, synthetic construct
  source 1..20: mol_type = other DNA
accctgggcatcactgggga

SEQ ID NO: 223506 - DNA, 20 bp, synthetic construct
  source 1..20: mol_type = other DNA
gaccctgggcatcactgggg

SEQ ID NO: 223507 - DNA, 20 bp, synthetic construct
  source 1..20: mol_type = other DNA
tgaccctgggcatcactggg

SEQ ID NO: 223508 - DNA, 20 bp, synthetic construct
  source 1..20: mol_type = other DNA
gtgaccctgggcatcactgg

SEQ ID NO: 223509 - DNA, 20 bp, synthetic construct
  source 1..20: mol_type = other DNA
ggtgaccctgggcatcactg

SEQ ID NO: 223510 - DNA, 20 bp, synthetic construct
  source 1..20: mol_type = other DNA
aggtgaccctgggcatcact

SEQ ID NO: 223511 - DNA, 20 bp, synthetic construct
  source 1..20: mol_type = other DNA
aaggtgaccctgggcatcac

SEQ ID NO: 223512 - DNA, 20 bp, synthetic construct
  source 1..20: mol_type = other DNA
caaggtgaccctgggcatca

SEQ ID NO: 223513 - DNA, 20 bp, synthetic construct
  source 1..20: mol_type = other DNA
ccaaggtgaccctgggcatc

SEQ ID NO: 223514 - DNA, 20 bp, synthetic construct
  source 1..20: mol_type = other DNA
tccaaggtgaccctgggcat

SEQ ID NO: 223515 - DNA, 20 bp, synthetic construct
  source 1..20: mol_type = other DNA
ctccaaggtgaccctgggca

SEQ ID NO: 223516 - DNA, 20 bp, synthetic construct
  source 1..20: mol_type = other DNA
cctccaaggtgaccctgggc

SEQ ID NO: 223517 - DNA, 20 bp, synthetic construct
  source 1..20: mol_type = other DNA
acctccaaggtgaccctggg

SEQ ID NO: 223518 - DNA, 20 bp, synthetic construct
  source 1..20: mol_type = other DNA
cacctccaaggtgaccctgg

SEQ ID NO: 223519 - DNA, 20 bp, synthetic construct
  source 1..20: mol_type = other DNA
ccacctccaaggtgaccctg

SEQ ID NO: 223520 - DNA, 20 bp, synthetic construct
  source 1..20: mol_type = other DNA
cccacctccaaggtgaccct

SEQ ID NO: 223521 - DNA, 20 bp, synthetic construct
  source 1..20: mol_type = other DNA
gcccacctccaaggtgaccc

SEQ ID NO: 223522 - DNA, 20 bp, synthetic construct
  source 1..20: mol_type = other DNA
cgcccacctccaaggtgacc

SEQ ID NO: 223523 - DNA, 20 bp, synthetic construct
  source 1..20: mol_type = other DNA
tcgcccacctccaaggtgac

SEQ ID NO: 223524 - DNA, 20 bp, synthetic construct
  source 1..20: mol_type = other DNA
ctcgcccacctccaaggtga

SEQ ID NO: 223525 - DNA, 20 bp, synthetic construct
  source 1..20: mol_type = other DNA
tctcgcccacctccaaggtg

SEQ ID NO: 223526 - DNA, 20 bp, synthetic construct
  source 1..20: mol_type = other DNA
atctcgcccacctccaaggt

SEQ ID NO: 223527 - DNA, 20 bp, synthetic construct
  source 1..20: mol_type = other DNA
catctcgcccacctccaagg

SEQ ID NO: 223528 - DNA, 20 bp, synthetic construct
  source 1..20: mol_type = other DNA
gcatctcgcccacctccaag

SEQ ID NO: 223529 - DNA, 20 bp, synthetic construct
  source 1..20: mol_type = other DNA
ggcatctcgcccacctccaa

SEQ ID NO: 223530 - DNA, 20 bp, synthetic construct
  source 1..20: mol_type = other DNA
aggcatctcgcccacctcca

SEQ ID NO: 223531 - DNA, 20 bp, synthetic construct
  source 1..20: mol_type = other DNA
caggcatctcgcccacctcc

SEQ ID NO: 223532 - DNA, 20 bp, synthetic construct
  source 1..20: mol_type = other DNA
ccaggcatctcgcccacctc

SEQ ID NO: 223533 - DNA, 20 bp, synthetic construct
  source 1..20: mol_type = other DNA
cccaggcatctcgcccacct

SEQ ID NO: 223534 - DNA, 20 bp, synthetic construct
  source 1..20: mol_type = other DNA
ccccaggcatctcgcccacc

SEQ ID NO: 223535 - DNA, 20 bp, synthetic construct
  source 1..20: mol_type = other DNA
accccaggcatctcgcccac

SEQ ID NO: 223536 - DNA, 20 bp, synthetic construct
  source 1..20: mol_type = other DNA
aaccccaggcatctcgccca

SEQ ID NO: 223537 - DNA, 20 bp, synthetic construct
  source 1..20: mol_type = other DNA
aaaccccaggcatctcgccc

SEQ ID NO: 223538 - DNA, 20 bp, synthetic construct
  source 1..20: mol_type = other DNA
gaaaccccaggcatctcgcc

SEQ ID NO: 223539 - DNA, 20 bp, synthetic construct
  source 1..20: mol_type = other DNA
agaaaccccaggcatctcgc

SEQ ID NO: 223540 - DNA, 20 bp, synthetic construct
  source 1..20: mol_type = other DNA
gagaaaccccaggcatctcg

SEQ ID NO: 223541 - DNA, 20 bp, synthetic construct
  source 1..20: mol_type = other DNA
cgagaaaccccaggcatctc

SEQ ID NO: 223542 - DNA, 20 bp, synthetic construct
  source 1..20: mol_type = other DNA
acgagaaaccccaggcatct

SEQ ID NO: 223543 - DNA, 20 bp, synthetic construct
  source 1..20: mol_type = other DNA
gacgagaaaccccaggcatc

SEQ ID NO: 223544 - DNA, 20 bp, synthetic construct
  source 1..20: mol_type = other DNA
ggacgagaaaccccaggcat

SEQ ID NO: 223545 - DNA, 20 bp, synthetic construct
  source 1..20: mol_type = other DNA
tggacgagaaaccccaggca

SEQ ID NO: 223546 - DNA, 20 bp, synthetic construct
  source 1..20: mol_type = other DNA
gtggacgagaaaccccaggc

SEQ ID NO: 223547 - DNA, 20 bp, synthetic construct
  source 1..20: mol_type = other DNA
ggtggacgagaaaccccagg

SEQ ID NO: 223548 - DNA, 20 bp, synthetic construct
  source 1..20: mol_type = other DNA
gggtggacgagaaaccccag

SEQ ID NO: 223549 - DNA, 20 bp, synthetic construct
  source 1..20: mol_type = other DNA
ggggtggacgagaaacccca

SEQ ID NO: 223550 - DNA, 20 bp, synthetic construct
  source 1..20: mol_type = other DNA
tggggtggacgagaaacccc

SEQ ID NO: 223551 - DNA, 20 bp, synthetic construct
  source 1..20: mol_type = other DNA
gtggggtggacgagaaaccc

SEQ ID NO: 223552 - DNA, 20 bp, synthetic construct
  source 1..20: mol_type = other DNA
tgtggggtggacgagaaacc

SEQ ID NO: 223553 - DNA, 20 bp, synthetic construct
  source 1..20: mol_type = other DNA
ttgtggggtggacgagaaac

SEQ ID NO: 223554 - DNA, 20 bp, synthetic construct
  source 1..20: mol_type = other DNA
gttgtggggtggacgagaaa

SEQ ID NO: 223555 - DNA, 20 bp, synthetic construct
  source 1..20: mol_type = other DNA
tgttgtggggtggacgagaa

SEQ ID NO: 223556 - DNA, 20 bp, synthetic construct
  source 1..20: mol_type = other DNA
gtgttgtggggtggacgaga

SEQ ID NO: 223557 - DNA, 20 bp, synthetic construct
  source 1..20: mol_type = other DNA
ggtgttgtggggtggacgag

SEQ ID NO: 223558 - DNA, 20 bp, synthetic construct
  source 1..20: mol_type = other DNA
aggtgttgtggggtggacga

SEQ ID NO: 223559 - DNA, 20 bp, synthetic construct
  source 1..20: mol_type = other DNA
gaggtgttgtggggtggacg

SEQ ID NO: 223560 - DNA, 20 bp, synthetic construct
  source 1..20: mol_type = other DNA
tgaggtgttgtggggtggac

SEQ ID NO: 223561 - DNA, 20 bp, synthetic construct
  source 1..20: mol_type = other DNA
ctgaggtgttgtggggtgga

SEQ ID NO: 223562 - DNA, 20 bp, synthetic construct
  source 1..20: mol_type = other DNA
cctgaggtgttgtggggtgg

SEQ ID NO: 223563 - DNA, 20 bp, synthetic construct
  source 1..20: mol_type = other DNA
ccctgaggtgttgtggggtg

SEQ ID NO: 223564 - DNA, 20 bp, synthetic construct
  source 1..20: mol_type = other DNA
cccctgaggtgttgtggggt

SEQ ID NO: 223565 - DNA, 20 bp, synthetic construct
  source 1..20: mol_type = other DNA
tcccctgaggtgttgtgggg

SEQ ID NO: 223566 - DNA, 20 bp, synthetic construct
  source 1..20: mol_type = other DNA
gtcccctgaggtgttgtggg

SEQ ID NO: 223567 - DNA, 20 bp, synthetic construct
  source 1..20: mol_type = other DNA
tgtcccctgaggtgttgtgg

SEQ ID NO: 223568 - DNA, 20 bp, synthetic construct
  source 1..20: mol_type = other DNA
ctgtcccctgaggtgttgtg

SEQ ID NO: 223569 - DNA, 20 bp, synthetic construct
  source 1..20: mol_type = other DNA
gctgtcccctgaggtgttgt

SEQ ID NO: 223570 - DNA, 20 bp, synthetic construct
  source 1..20: mol_type = other DNA
ggctgtcccctgaggtgttg

SEQ ID NO: 223571 - DNA, 20 bp, synthetic construct
  source 1..20: mol_type = other DNA
tggctgtcccctgaggtgtt

SEQ ID NO: 223572 - DNA, 20 bp, synthetic construct
  source 1..20: mol_type = other DNA
ttggctgtcccctgaggtgt

SEQ ID NO: 223573 - DNA, 20 bp, synthetic construct
  source 1..20: mol_type = other DNA
tttggctgtcccctgaggtg

SEQ ID NO: 223574 - DNA, 20 bp, synthetic construct
  source 1..20: mol_type = other DNA
ctttggctgtcccctgaggt

SEQ ID NO: 223575 - DNA, 20 bp, synthetic construct
  source 1..20: mol_type = other DNA
gctttggctgtcccctgagg

SEQ ID NO: 223576 - DNA, 20 bp, synthetic construct
  source 1..20: mol_type = other DNA
agctttggctgtcccctgag

SEQ ID NO: 223577 - DNA, 20 bp, synthetic construct
  source 1..20: mol_type = other DNA
cagctttggctgtcccctga

SEQ ID NO: 223578 - DNA, 20 bp, synthetic construct
  source 1..20: mol_type = other DNA
acagctttggctgtcccctg

SEQ ID NO: 223579 - DNA, 20 bp, synthetic construct
  source 1..20: mol_type = other DNA
gacagctttggctgtcccct

SEQ ID NO: 223580 - DNA, 20 bp, synthetic construct
  source 1..20: mol_type = other DNA
ggacagctttggctgtcccc

SEQ ID NO: 223581 - DNA, 20 bp, synthetic construct
  source 1..20: mol_type = other DNA
gggacagctttggctgtccc

SEQ ID NO: 223582 - DNA, 20 bp, synthetic construct
  source 1..20: mol_type = other DNA
agggacagctttggctgtcc

SEQ ID NO: 223583 - DNA, 20 bp, synthetic construct
  source 1..20: mol_type = other DNA
aagggacagctttggctgtc

SEQ ID NO: 223584 - DNA, 20 bp, synthetic construct
  source 1..20: mol_type = other DNA
gaagggacagctttggctgt

SEQ ID NO: 223585 - DNA, 20 bp, synthetic construct
  source 1..20: mol_type = other DNA
tgaagggacagctttggctg

SEQ ID NO: 223586 - DNA, 20 bp, synthetic construct
  source 1..20: mol_type = other DNA
ctgaagggacagctttggct

SEQ ID NO: 223587 - DNA, 20 bp, synthetic construct
  source 1..20: mol_type = other DNA
cctgaagggacagctttggc

SEQ ID NO: 223588 - DNA, 20 bp, synthetic construct
  source 1..20: mol_type = other DNA
acctgaagggacagctttgg

SEQ ID NO: 223589 - DNA, 20 bp, synthetic construct
  source 1..20: mol_type = other DNA
tacctgaagggacagctttg

SEQ ID NO: 223590 - DNA, 20 bp, synthetic construct
  source 1..20: mol_type = other DNA
ttacctgaagggacagcttt

SEQ ID NO: 223591 - DNA, 20 bp, synthetic construct
  source 1..20: mol_type = other DNA
cttacctgaagggacagctt

SEQ ID NO: 223592 - DNA, 20 bp, synthetic construct
  source 1..20: mol_type = other DNA
gcttacctgaagggacagct

SEQ ID NO: 223593 - DNA, 20 bp, synthetic construct
  source 1..20: mol_type = other DNA
agcttacctgaagggacagc

SEQ ID NO: 223594 - DNA, 20 bp, synthetic construct
  source 1..20: mol_type = other DNA
cagcttacctgaagggacag

SEQ ID NO: 223595 - DNA, 20 bp, synthetic construct
  source 1..20: mol_type = other DNA
gcagcttacctgaagggaca

SEQ ID NO: 223596 - DNA, 20 bp, synthetic construct
  source 1..20: mol_type = other DNA
tgcagcttacctgaagggac

SEQ ID NO: 223597 - DNA, 20 bp, synthetic construct
  source 1..20: mol_type = other DNA
gtgcagcttacctgaaggga

SEQ ID NO: 223598 - DNA, 20 bp, synthetic construct
  source 1..20: mol_type = other DNA
tgtgcagcttacctgaaggg

SEQ ID NO: 223599 - DNA, 20 bp, synthetic construct
  source 1..20: mol_type = other DNA
ctgtgcagcttacctgaagg

SEQ ID NO: 223600 - DNA, 20 bp, synthetic construct
  source 1..20: mol_type = other DNA
tctgtgcagcttacctgaag

SEQ ID NO: 223601 - DNA, 20 bp, synthetic construct
  source 1..20: mol_type = other DNA
ttctgtgcagcttacctgaa

SEQ ID NO: 223602 - DNA, 20 bp, synthetic construct
  source 1..20: mol_type = other DNA
cttctgtgcagcttacctga

SEQ ID NO: 223603 - DNA, 20 bp, synthetic construct
  source 1..20: mol_type = other DNA
tcttctgtgcagcttacctg

SEQ ID NO: 223604 - DNA, 20 bp, synthetic construct
  source 1..20: mol_type = other DNA
atcttctgtgcagcttacct

SEQ ID NO: 223605 - DNA, 20 bp, synthetic construct
  source 1..20: mol_type = other DNA
catcttctgtgcagcttacc

SEQ ID NO: 223606 - DNA, 20 bp, synthetic construct
  source 1..20: mol_type = other DNA
acatcttctgtgcagcttac

SEQ ID NO: 223607 - DNA, 20 bp, synthetic construct
  source 1..20: mol_type = other DNA
cacatcttctgtgcagctta

SEQ ID NO: 223608 - DNA, 20 bp, synthetic construct
  source 1..20: mol_type = other DNA
tcacatcttctgtgcagctt

SEQ ID NO: 223609 - DNA, 20 bp, synthetic construct
  source 1..20: mol_type = other DNA
ttcacatcttctgtgcagct

SEQ ID NO: 223610 - DNA, 20 bp, synthetic construct
  source 1..20: mol_type = other DNA
gttcacatcttctgtgcagc

SEQ ID NO: 223611 - DNA, 20 bp, synthetic construct
  source 1..20: mol_type = other DNA
agttcacatcttctgtgcag

SEQ ID NO: 223612 - DNA, 20 bp, synthetic construct
  source 1..20: mol_type = other DNA
gagttcacatcttctgtgca

SEQ ID NO: 223613 - DNA, 20 bp, synthetic construct
  source 1..20: mol_type = other DNA
agagttcacatcttctgtgc

SEQ ID NO: 223614 - DNA, 20 bp, synthetic construct
  source 1..20: mol_type = other DNA
cagagttcacatcttctgtg

SEQ ID NO: 223615 - DNA, 20 bp, synthetic construct
  source 1..20: mol_type = other DNA
gcagagttcacatcttctgt

SEQ ID NO: 223616 - DNA, 20 bp, synthetic construct
  source 1..20: mol_type = other DNA
agcagagttcacatcttctg

SEQ ID NO: 223617 - DNA, 20 bp, synthetic construct
  source 1..20: mol_type = other DNA
cagcagagttcacatcttct

SEQ ID NO: 223618 - DNA, 20 bp, synthetic construct
  source 1..20: mol_type = other DNA
gcagcagagttcacatcttc

SEQ ID NO: 223619 - DNA, 20 bp, synthetic construct
  source 1..20: mol_type = other DNA
tgcagcagagttcacatctt

SEQ ID NO: 223620 - DNA, 20 bp, synthetic construct
  source 1..20: mol_type = other DNA
ttgcagcagagttcacatct

SEQ ID NO: 223621 - DNA, 20 bp, synthetic construct
  source 1..20: mol_type = other DNA
tttgcagcagagttcacatc

SEQ ID NO: 223622 - DNA, 20 bp, synthetic construct
  source 1..20: mol_type = other DNA
ctttgcagcagagttcacat

SEQ ID NO: 223623 - DNA, 20 bp, synthetic construct
  source 1..20: mol_type = other DNA
tctttgcagcagagttcaca

SEQ ID NO: 223624 - DNA, 20 bp, synthetic construct
  source 1..20: mol_type = other DNA
gtctttgcagcagagttcac

SEQ ID NO: 223625 - DNA, 20 bp, synthetic construct
  source 1..20: mol_type = other DNA
agtctttgcagcagagttca

SEQ ID NO: 223626 - DNA, 20 bp, synthetic construct
  source 1..20: mol_type = other DNA
gagtctttgcagcagagttc

SEQ ID NO: 223627 - DNA, 20 bp, synthetic construct
  source 1..20: mol_type = other DNA
agagtctttgcagcagagtt

SEQ ID NO: 223628 - DNA, 20 bp, synthetic construct
  source 1..20: mol_type = other DNA
tagagtctttgcagcagagt

SEQ ID NO: 223629 - DNA, 20 bp, synthetic construct
  source 1..20: mol_type = other DNA
atagagtctttgcagcagag

SEQ ID NO: 223630 - DNA, 20 bp, synthetic construct
  source 1..20: mol_type = other DNA
aatagagtctttgcagcaga

SEQ ID NO: 223631 - DNA, 20 bp, synthetic construct
  source 1..20: mol_type = other DNA
gaatagagtctttgcagcag

SEQ ID NO: 223632 - DNA, 20 bp, synthetic construct
  source 1..20: mol_type = other DNA
agaatagagtctttgcagca

SEQ ID NO: 223633 - DNA, 20 bp, synthetic construct
  source 1..20: mol_type = other DNA
aagaatagagtctttgcagc

SEQ ID NO: 223634 - DNA, 20 bp, synthetic construct
  source 1..20: mol_type = other DNA
aaagaatagagtctttgcag

SEQ ID NO: 223635 - DNA, 20 bp, synthetic construct
  source 1..20: mol_type = other DNA
caaagaatagagtctttgca

SEQ ID NO: 223636 - DNA, 20 bp, synthetic construct
  source 1..20: mol_type = other DNA
ccaaagaatagagtctttgc

SEQ ID NO: 223637 - DNA, 20 bp, synthetic construct
  source 1..20: mol_type = other DNA
cccaaagaatagagtctttg

SEQ ID NO: 223638 - DNA, 20 bp, synthetic construct
  source 1..20: mol_type = other DNA
tcccaaagaatagagtcttt

SEQ ID NO: 223639 - DNA, 20 bp, synthetic construct
  source 1..20: mol_type = other DNA
ctcccaaagaatagagtctt

SEQ ID NO: 223640 - DNA, 20 bp, synthetic construct
  source 1..20: mol_type = other DNA
gctcccaaagaatagagtct

SEQ ID NO: 223641 - DNA, 20 bp, synthetic construct
  source 1..20: mol_type = other DNA
tgctcccaaagaatagagtc

SEQ ID NO: 223642 - DNA, 20 bp, synthetic construct
  source 1..20: mol_type = other DNA
ttgctcccaaagaatagagt

SEQ ID NO: 223643 - DNA, 20 bp, synthetic construct
  source 1..20: mol_type = other DNA
tttgctcccaaagaatagag

SEQ ID NO: 223644 - DNA, 20 bp, synthetic construct
  source 1..20: mol_type = other DNA
ttttgctcccaaagaataga

SEQ ID NO: 223645 - DNA, 20 bp, synthetic construct
  source 1..20: mol_type = other DNA
cttttgctcccaaagaatag

SEQ ID NO: 223646 - DNA, 20 bp, synthetic construct
  source 1..20: mol_type = other DNA
ccttttgctcccaaagaata

SEQ ID NO: 223647 - DNA, 20 bp, synthetic construct
  source 1..20: mol_type = other DNA
cccttttgctcccaaagaat

SEQ ID NO: 223648 - DNA, 20 bp, synthetic construct
  source 1..20: mol_type = other DNA
tcccttttgctcccaaagaa

SEQ ID NO: 223649 - DNA, 20 bp, synthetic construct
  source 1..20: mol_type = other DNA
gtcccttttgctcccaaaga

SEQ ID NO: 223650 - DNA, 20 bp, synthetic construct
  source 1..20: mol_type = other DNA
ggtcccttttgctcccaaag

SEQ ID NO: 223651 - DNA, 20 bp, synthetic construct
  source 1..20: mol_type = other DNA
gggtcccttttgctcccaaa

SEQ ID NO: 223652 - DNA, 20 bp, synthetic construct
  source 1..20: mol_type = other DNA
tgggtcccttttgctcccaa

SEQ ID NO: 223653 - DNA, 20 bp, synthetic construct
  source 1..20: mol_type = other DNA
ctgggtcccttttgctccca

SEQ ID NO: 223654 - DNA, 20 bp, synthetic construct
  source 1..20: mol_type = other DNA
cctgggtcccttttgctccc

SEQ ID NO: 223655 - DNA, 20 bp, synthetic construct
  source 1..20: mol_type = other DNA
ccctgggtcccttttgctcc

SEQ ID NO: 223656 - DNA, 20 bp, synthetic construct
  source 1..20: mol_type = other DNA
accctgggtcccttttgctc

SEQ ID NO: 223657 - DNA, 20 bp, synthetic construct
  source 1..20: mol_type = other DNA
gaccctgggtcccttttgct

SEQ ID NO: 223658 - DNA, 20 bp, synthetic construct
  source 1..20: mol_type = other DNA
agaccctgggtcccttttgc

SEQ ID NO: 223659 - DNA, 20 bp, synthetic construct
  source 1..20: mol_type = other DNA
gagaccctgggtcccttttg

SEQ ID NO: 223660 - DNA, 20 bp, synthetic construct
  source 1..20: mol_type = other DNA
tgagaccctgggtccctttt

SEQ ID NO: 223661 - DNA, 20 bp, synthetic construct
  source 1..20: mol_type = other DNA
gtgagaccctgggtcccttt

SEQ ID NO: 223662 - DNA, 20 bp, synthetic construct
  source 1..20: mol_type = other DNA
ggtgagaccctgggtccctt

SEQ ID NO: 223663 - DNA, 20 bp, synthetic construct
  source 1..20: mol_type = other DNA
aggtgagaccctgggtccct

SEQ ID NO: 223664 - DNA, 20 bp, synthetic construct
  source 1..20: mol_type = other DNA
caggtgagaccctgggtccc

SEQ ID NO: 223665 - DNA, 20 bp, synthetic construct
  source 1..20: mol_type = other DNA
gcaggtgagaccctgggtcc

SEQ ID NO: 223666 - DNA, 20 bp, synthetic construct
  source 1..20: mol_type = other DNA
tgcaggtgagaccctgggtc

SEQ ID NO: 223667 - DNA, 20 bp, synthetic construct
  source 1..20: mol_type = other DNA
gtgcaggtgagaccctgggt

SEQ ID NO: 223668 - DNA, 20 bp, synthetic construct
  source 1..20: mol_type = other DNA
tgtgcaggtgagaccctggg

SEQ ID NO: 223669 - DNA, 20 bp, synthetic construct
  source 1..20: mol_type = other DNA
atgtgcaggtgagaccctgg

SEQ ID NO: 223670 - DNA, 20 bp, synthetic construct
  source 1..20: mol_type = other DNA
gatgtgcaggtgagaccctg

SEQ ID NO: 223671 - DNA, 20 bp, synthetic construct
  source 1..20: mol_type = other DNA
ggatgtgcaggtgagaccct

SEQ ID NO: 223672 - DNA, 20 bp, synthetic construct
  source 1..20: mol_type = other DNA
gggatgtgcaggtgagaccc

SEQ ID NO: 223673 - DNA, 20 bp, synthetic construct
  source 1..20: mol_type = other DNA
agggatgtgcaggtgagacc

SEQ ID NO: 223674 - DNA, 20 bp, synthetic construct
  source 1..20: mol_type = other DNA
cagggatgtgcaggtgagac

SEQ ID NO: 223675 - DNA, 20 bp, synthetic construct
  source 1..20: mol_type = other DNA
acagggatgtgcaggtgaga

SEQ ID NO: 223676 - DNA, 20 bp, synthetic construct
  source 1..20: mol_type = other DNA
gacagggatgtgcaggtgag

SEQ ID NO: 223677 - DNA, 20 bp, synthetic construct
  source 1..20: mol_type = other DNA
ggacagggatgtgcaggtga

SEQ ID NO: 223678 - DNA, 20 bp, synthetic construct
  source 1..20: mol_type = other DNA
gggacagggatgtgcaggtg

SEQ ID NO: 223679 - DNA, 20 bp, synthetic construct
  source 1..20: mol_type = other DNA
agggacagggatgtgcaggt

SEQ ID NO: 223680 - DNA, 20 bp, synthetic construct
  source 1..20: mol_type = other DNA
cagggacagggatgtgcagg

SEQ ID NO: 223681 - DNA, 20 bp, synthetic construct
  source 1..20: mol_type = other DNA
tcagggacagggatgtgcag

SEQ ID NO: 223682 - DNA, 20 bp, synthetic construct
  source 1..20: mol_type = other DNA
ctcagggacagggatgtgca

SEQ ID NO: 223683 - DNA, 20 bp, synthetic construct
  source 1..20: mol_type = other DNA
cctcagggacagggatgtgc

SEQ ID NO: 223684 - DNA, 20 bp, synthetic construct
  source 1..20: mol_type = other DNA
ccctcagggacagggatgtg

SEQ ID NO: 223685 - DNA, 20 bp, synthetic construct
  source 1..20: mol_type = other DNA
gccctcagggacagggatgt

SEQ ID NO: 223686 - DNA, 20 bp, synthetic construct
  source 1..20: mol_type = other DNA
ggccctcagggacagggatg

SEQ ID NO: 223687 - DNA, 20 bp, synthetic construct
  source 1..20: mol_type = other DNA
aggccctcagggacagggat

SEQ ID NO: 223688 - DNA, 20 bp, synthetic construct
  source 1..20: mol_type = other DNA
taggccctcagggacaggga

SEQ ID NO: 223689 - DNA, 20 bp, synthetic construct
  source 1..20: mol_type = other DNA
ctaggccctcagggacaggg

SEQ ID NO: 223690 - DNA, 20 bp, synthetic construct
  source 1..20: mol_type = other DNA
cctaggccctcagggacagg

SEQ ID NO: 223691 - DNA, 20 bp, synthetic construct
  source 1..20: mol_type = other DNA
ccctaggccctcagggacag

SEQ ID NO: 223692 - DNA, 20 bp, synthetic construct
  source 1..20: mol_type = other DNA
cccctaggccctcagggaca

SEQ ID NO: 223693 - DNA, 20 bp, synthetic construct
  source 1..20: mol_type = other DNA
acccctaggccctcagggac

SEQ ID NO: 223694 - DNA, 20 bp, synthetic construct
  source 1..20: mol_type = other DNA
aacccctaggccctcaggga

SEQ ID NO: 223695 - DNA, 20 bp, synthetic construct
  source 1..20: mol_type = other DNA
gaacccctaggccctcaggg

SEQ ID NO: 223696 - DNA, 20 bp, synthetic construct
  source 1..20: mol_type = other DNA
agaacccctaggccctcagg

SEQ ID NO: 223697 - DNA, 20 bp, synthetic construct
  source 1..20: mol_type = other DNA
aagaacccctaggccctcag

SEQ ID NO: 223698 - DNA, 20 bp, synthetic construct
  source 1..20: mol_type = other DNA
caagaacccctaggccctca

SEQ ID NO: 223699 - DNA, 20 bp, synthetic construct
  source 1..20: mol_type = other DNA
ccaagaacccctaggccctc

SEQ ID NO: 223700 - DNA, 20 bp, synthetic construct
  source 1..20: mol_type = other DNA
tccaagaacccctaggccct

SEQ ID NO: 223701 - DNA, 20 bp, synthetic construct
  source 1..20: mol_type = other DNA
ctccaagaacccctaggccc

SEQ ID NO: 223702 - DNA, 20 bp, synthetic construct
  source 1..20: mol_type = other DNA
cctccaagaacccctaggcc

SEQ ID NO: 223703 - DNA, 20 bp, synthetic construct
  source 1..20: mol_type = other DNA
gcctccaagaacccctaggc

SEQ ID NO: 223704 - DNA, 20 bp, synthetic construct
  source 1..20: mol_type = other DNA
ggcctccaagaacccctagg

SEQ ID NO: 223705 - DNA, 20 bp, synthetic construct
  source 1..20: mol_type = other DNA
gggcctccaagaacccctag

SEQ ID NO: 223706 - DNA, 20 bp, synthetic construct
  source 1..20: mol_type = other DNA
ggggcctccaagaaccccta

SEQ ID NO: 223707 - DNA, 20 bp, synthetic construct
  source 1..20: mol_type = other DNA
tggggcctccaagaacccct

SEQ ID NO: 223708 - DNA, 20 bp, synthetic construct
  source 1..20: mol_type = other DNA
ctggggcctccaagaacccc

SEQ ID NO: 223709 - DNA, 20 bp, synthetic construct
  source 1..20: mol_type = other DNA
gctggggcctccaagaaccc

SEQ ID NO: 223710 - DNA, 20 bp, synthetic construct
  source 1..20: mol_type = other DNA
ggctggggcctccaagaacc

SEQ ID NO: 223711 - DNA, 20 bp, synthetic construct
  source 1..20: mol_type = other DNA
aggctggggcctccaagaac

SEQ ID NO: 223712 - DNA, 20 bp, synthetic construct
  source 1..20: mol_type = other DNA
aaggctggggcctccaagaa

SEQ ID NO: 223713 - DNA, 20 bp, synthetic construct
  source 1..20: mol_type = other DNA
caaggctggggcctccaaga

SEQ ID NO: 223714 - DNA, 20 bp, synthetic construct
  source 1..20: mol_type = other DNA
ccaaggctggggcctccaag

SEQ ID NO: 223715 - DNA, 20 bp, synthetic construct
  source 1..20: mol_type = other DNA
gccaaggctggggcctccaa

SEQ ID NO: 223716 - DNA, 20 bp, synthetic construct
  source 1..20: mol_type = other DNA
tgccaaggctggggcctcca

SEQ ID NO: 223717 - DNA, 20 bp, synthetic construct
  source 1..20: mol_type = other DNA
ttgccaaggctggggcctcc

SEQ ID NO: 223718 - DNA, 20 bp, synthetic construct
  source 1..20: mol_type = other DNA
tttgccaaggctggggcctc

SEQ ID NO: 223719 - DNA, 20 bp, synthetic construct
  source 1..20: mol_type = other DNA
ttttgccaaggctggggcct

SEQ ID NO: 223720 - DNA, 20 bp, synthetic construct
  source 1..20: mol_type = other DNA
attttgccaaggctggggcc

SEQ ID NO: 223721 - DNA, 20 bp, synthetic construct
  source 1..20: mol_type = other DNA
cattttgccaaggctggggc

SEQ ID NO: 223722 - DNA, 20 bp, synthetic construct
  source 1..20: mol_type = other DNA
tcattttgccaaggctgggg

SEQ ID NO: 223723 - DNA, 20 bp, synthetic construct
  source 1..20: mol_type = other DNA
ctcattttgccaaggctggg

SEQ ID NO: 223724 - DNA, 20 bp, synthetic construct
  source 1..20: mol_type = other DNA
cctcattttgccaaggctgg

SEQ ID NO: 223725 - DNA, 20 bp, synthetic construct
  source 1..20: mol_type = other DNA
tcctcattttgccaaggctg

SEQ ID NO: 223726 - DNA, 20 bp, synthetic construct
  source 1..20: mol_type = other DNA
ttcctcattttgccaaggct

SEQ ID NO: 223727 - DNA, 20 bp, synthetic construct
  source 1..20: mol_type = other DNA
cttcctcattttgccaaggc

SEQ ID NO: 223728 - DNA, 20 bp, synthetic construct
  source 1..20: mol_type = other DNA
tcttcctcattttgccaagg

SEQ ID NO: 223729 - DNA, 20 bp, synthetic construct
  source 1..20: mol_type = other DNA
ttcttcctcattttgccaag

SEQ ID NO: 223730 - DNA, 20 bp, synthetic construct
  source 1..20: mol_type = other DNA
cttcttcctcattttgccaa

SEQ ID NO: 223731 - DNA, 20 bp, synthetic construct
  source 1..20: mol_type = other DNA
ccttcttcctcattttgcca

SEQ ID NO: 223732 - DNA, 20 bp, synthetic construct
  source 1..20: mol_type = other DNA
accttcttcctcattttgcc

SEQ ID NO: 223733 - DNA, 20 bp, synthetic construct
  source 1..20: mol_type = other DNA
caccttcttcctcattttgc

SEQ ID NO: 223734 - DNA, 20 bp, synthetic construct
  source 1..20: mol_type = other DNA
tcaccttcttcctcattttg

SEQ ID NO: 223735 - DNA, 20 bp, synthetic construct
  source 1..20: mol_type = other DNA
ttcaccttcttcctcatttt

SEQ ID NO: 223736 - DNA, 20 bp, synthetic construct
  source 1..20: mol_type = other DNA
cttcaccttcttcctcattt

SEQ ID NO: 223737 - DNA, 20 bp, synthetic construct
  source 1..20: mol_type = other DNA
ccttcaccttcttcctcatt

SEQ ID NO: 223738 - DNA, 20 bp, synthetic construct
  source 1..20: mol_type = other DNA
accttcaccttcttcctcat

SEQ ID NO: 223739 - DNA, 20 bp, synthetic construct
  source 1..20: mol_type = other DNA
aaccttcaccttcttcctca

SEQ ID NO: 223740 - DNA, 20 bp, synthetic construct
  source 1..20: mol_type = other DNA
caaccttcaccttcttcctc

SEQ ID NO: 223741 - DNA, 20 bp, synthetic construct
  source 1..20: mol_type = other DNA
acaaccttcaccttcttcct

SEQ ID NO: 223742 - DNA, 20 bp, synthetic construct
  source 1..20: mol_type = other DNA
gacaaccttcaccttcttcc

SEQ ID NO: 223743 - DNA, 20 bp, synthetic construct
  source 1..20: mol_type = other DNA
agacaaccttcaccttcttc

SEQ ID NO: 223744 - DNA, 20 bp, synthetic construct
  source 1..20: mol_type = other DNA
cagacaaccttcaccttctt

SEQ ID NO: 223745 - DNA, 20 bp, synthetic construct
  source 1..20: mol_type = other DNA
ccagacaaccttcaccttct

SEQ ID NO: 223746 - DNA, 20 bp, synthetic construct
  source 1..20: mol_type = other DNA
cccagacaaccttcaccttc

SEQ ID NO: 223747 - DNA, 20 bp, synthetic construct
  source 1..20: mol_type = other DNA
gcccagacaaccttcacctt

SEQ ID NO: 223748 - DNA, 20 bp, synthetic construct
  source 1..20: mol_type = other DNA
ggcccagacaaccttcacct

SEQ ID NO: 223749 - DNA, 20 bp, synthetic construct
  source 1..20: mol_type = other DNA
gggcccagacaaccttcacc

SEQ ID NO: 223750 - DNA, 20 bp, synthetic construct
  source 1..20: mol_type = other DNA
ggggcccagacaaccttcac

SEQ ID NO: 223751 - DNA, 20 bp, synthetic construct
  source 1..20: mol_type = other DNA
aggggcccagacaaccttca

SEQ ID NO: 223752 - DNA, 20 bp, synthetic construct
  source 1..20: mol_type = other DNA
caggggcccagacaaccttc

SEQ ID NO: 223753 - DNA, 20 bp, synthetic construct
  source 1..20: mol_type = other DNA
gcaggggcccagacaacctt

SEQ ID NO: 223754 - DNA, 20 bp, synthetic construct
  source 1..20: mol_type = other DNA
ggcaggggcccagacaacct

SEQ ID NO: 223755 - DNA, 20 bp, synthetic construct
  source 1..20: mol_type = other DNA
tggcaggggcccagacaacc

SEQ ID NO: 223756 - DNA, 20 bp, synthetic construct
  source 1..20: mol_type = other DNA
ctggcaggggcccagacaac

SEQ ID NO: 223757 - DNA, 20 bp, synthetic construct
  source 1..20: mol_type = other DNA
cctggcaggggcccagacaa

SEQ ID NO: 223758 - DNA, 20 bp, synthetic construct
  source 1..20: mol_type = other DNA
gcctggcaggggcccagaca

SEQ ID NO: 223759 - DNA, 20 bp, synthetic construct
  source 1..20: mol_type = other DNA
agcctggcaggggcccagac

SEQ ID NO: 223760 - DNA, 20 bp, synthetic construct
  source 1..20: mol_type = other DNA
gagcctggcaggggcccaga

SEQ ID NO: 223761 - DNA, 20 bp, synthetic construct
  source 1..20: mol_type = other DNA
ggagcctggcaggggcccag

SEQ ID NO: 223762 - DNA, 20 bp, synthetic construct
  source 1..20: mol_type = other DNA
aggagcctggcaggggccca

SEQ ID NO: 223763 - DNA, 20 bp, synthetic construct
  source 1..20: mol_type = other DNA
aaggagcctggcaggggccc

SEQ ID NO: 223764 - DNA, 20 bp, synthetic construct
  source 1..20: mol_type = other DNA
gaaggagcctggcaggggcc

SEQ ID NO: 223765 - DNA, 20 bp, synthetic construct
  source 1..20: mol_type = other DNA
ggaaggagcctggcaggggc

SEQ ID NO: 223766 - DNA, 20 bp, synthetic construct
  source 1..20: mol_type = other DNA
aggaaggagcctggcagggg

SEQ ID NO: 223767 - DNA, 20 bp, synthetic construct
  source 1..20: mol_type = other DNA
gaggaaggagcctggcaggg

SEQ ID NO: 223768 - DNA, 20 bp, synthetic construct
  source 1..20: mol_type = other DNA
cgaggaaggagcctggcagg

SEQ ID NO: 223769 - DNA, 20 bp, synthetic construct
  source 1..20: mol_type = other DNA
ccgaggaaggagcctggcag

SEQ ID NO: 223770 - DNA, 20 bp, synthetic construct
  source 1..20: mol_type = other DNA
gccgaggaaggagcctggca

SEQ ID NO: 223771 - DNA, 20 bp, synthetic construct
  source 1..20: mol_type = other DNA
ggccgaggaaggagcctggc

SEQ ID NO: 223772 - DNA, 20 bp, synthetic construct
  source 1..20: mol_type = other DNA
tggccgaggaaggagcctgg

SEQ ID NO: 223773 - DNA, 20 bp, synthetic construct
  source 1..20: mol_type = other DNA
gtggccgaggaaggagcctg

SEQ ID NO: 223774 - DNA, 20 bp, synthetic construct
  source 1..20: mol_type = other DNA
cgtggccgaggaaggagcct

SEQ ID NO: 223775 - DNA, 20 bp, synthetic construct
  source 1..20: mol_type = other DNA
gcgtggccgaggaaggagcc

SEQ ID NO: 223776 - DNA, 20 bp, synthetic construct
  source 1..20: mol_type = other DNA
tgcgtggccgaggaaggagc

SEQ ID NO: 223777 - DNA, 20 bp, synthetic construct
  source 1..20: mol_type = other DNA
gtgcgtggccgaggaaggag

SEQ ID NO: 223778 - DNA, 20 bp, synthetic construct
  source 1..20: mol_type = other DNA
agtgcgtggccgaggaagga

SEQ ID NO: 223779 - DNA, 20 bp, synthetic construct
  source 1..20: mol_type = other DNA
gagtgcgtggccgaggaagg

SEQ ID NO: 223780 - DNA, 20 bp, synthetic construct
  source 1..20: mol_type = other DNA
ggagtgcgtggccgaggaag

SEQ ID NO: 223781 - DNA, 20 bp, synthetic construct
  source 1..20: mol_type = other DNA
gggagtgcgtggccgaggaa

SEQ ID NO: 223782 - DNA, 20 bp, synthetic construct
  source 1..20: mol_type = other DNA
ggggagtgcgtggccgagga

SEQ ID NO: 223783 - DNA, 20 bp, synthetic construct
  source 1..20: mol_type = other DNA
aggggagtgcgtggccgagg

SEQ ID NO: 223784 - DNA, 20 bp, synthetic construct
  source 1..20: mol_type = other DNA
aaggggagtgcgtggccgag

SEQ ID NO: 223785 - DNA, 20 bp, synthetic construct
  source 1..20: mol_type = other DNA
gaaggggagtgcgtggccga

SEQ ID NO: 223786 - DNA, 20 bp, synthetic construct
  source 1..20: mol_type = other DNA
ggaaggggagtgcgtggccg

SEQ ID NO: 223787 - DNA, 20 bp, synthetic construct
  source 1..20: mol_type = other DNA
aggaaggggagtgcgtggcc

SEQ ID NO: 223788 - DNA, 20 bp, synthetic construct
  source 1..20: mol_type = other DNA
caggaaggggagtgcgtggc

SEQ ID NO: 223789 - DNA, 20 bp, synthetic construct
  source 1..20: mol_type = other DNA
gcaggaaggggagtgcgtgg

SEQ ID NO: 223790 - DNA, 20 bp, synthetic construct
  source 1..20: mol_type = other DNA
tgcaggaaggggagtgcgtg

SEQ ID NO: 223791 - DNA, 20 bp, synthetic construct
  source 1..20: mol_type = other DNA
gtgcaggaaggggagtgcgt

SEQ ID NO: 223792 - DNA, 20 bp, synthetic construct
  source 1..20: mol_type = other DNA
tgtgcaggaaggggagtgcg

SEQ ID NO: 223793 - DNA, 20 bp, synthetic construct
  source 1..20: mol_type = other DNA
gtgtgcaggaaggggagtgc

SEQ ID NO: 223794 - DNA, 20 bp, synthetic construct
  source 1..20: mol_type = other DNA
tgtgtgcaggaaggggagtg

SEQ ID NO: 223795 - DNA, 20 bp, synthetic construct
  source 1..20: mol_type = other DNA
gtgtgtgcaggaaggggagt

SEQ ID NO: 223796 - DNA, 20 bp, synthetic construct
  source 1..20: mol_type = other DNA
tgtgtgtgcaggaaggggag

SEQ ID NO: 223797 - DNA, 20 bp, synthetic construct
  source 1..20: mol_type = other DNA
gtgtgtgtgcaggaagggga

SEQ ID NO: 223798 - DNA, 20 bp, synthetic construct
  source 1..20: mol_type = other DNA
ggtgtgtgtgcaggaagggg

SEQ ID NO: 223799 - DNA, 20 bp, synthetic construct
  source 1..20: mol_type = other DNA
gggtgtgtgtgcaggaaggg

SEQ ID NO: 223800 - DNA, 20 bp, synthetic construct
  source 1..20: mol_type = other DNA
agggtgtgtgtgcaggaagg

SEQ ID NO: 223801 - DNA, 20 bp, synthetic construct
  source 1..20: mol_type = other DNA
aagggtgtgtgtgcaggaag

SEQ ID NO: 223802 - DNA, 20 bp, synthetic construct
  source 1..20: mol_type = other DNA
gaagggtgtgtgtgcaggaa

SEQ ID NO: 223803 - DNA, 20 bp, synthetic construct
  source 1..20: mol_type = other DNA
agaagggtgtgtgtgcagga

SEQ ID NO: 223804 - DNA, 20 bp, synthetic construct
  source 1..20: mol_type = other DNA
gagaagggtgtgtgtgcagg

SEQ ID NO: 223805 - DNA, 20 bp, synthetic construct
  source 1..20: mol_type = other DNA
ggagaagggtgtgtgtgcag

SEQ ID NO: 223806 - DNA, 20 bp, synthetic construct
  source 1..20: mol_type = other DNA
gggagaagggtgtgtgtgca

SEQ ID NO: 223807 - DNA, 20 bp, synthetic construct
  source 1..20: mol_type = other DNA
agggagaagggtgtgtgtgc

SEQ ID NO: 223808 - DNA, 20 bp, synthetic construct
  source 1..20: mol_type = other DNA
gagggagaagggtgtgtgtg

SEQ ID NO: 223809 - DNA, 20 bp, synthetic construct
  source 1..20: mol_type = other DNA
ggagggagaagggtgtgtgt

SEQ ID NO: 223810 - DNA, 20 bp, synthetic construct
  source 1..20: mol_type = other DNA
tggagggagaagggtgtgtg

SEQ ID NO: 223811 - DNA, 20 bp, synthetic construct
  source 1..20: mol_type = other DNA
gtggagggagaagggtgtgt

SEQ ID NO: 223812 - DNA, 20 bp, synthetic construct
  source 1..20: mol_type = other DNA
ggtggagggagaagggtgtg

SEQ ID NO: 223813 - DNA, 20 bp, synthetic construct
  source 1..20: mol_type = other DNA
gggtggagggagaagggtgt

SEQ ID NO: 223814 - DNA, 20 bp, synthetic construct
  source 1..20: mol_type = other DNA
ggggtggagggagaagggtg

SEQ ID NO: 223815 - DNA, 20 bp, synthetic construct
  source 1..20: mol_type = other DNA
tggggtggagggagaagggt

SEQ ID NO: 223816 - DNA, 20 bp, synthetic construct
  source 1..20: mol_type = other DNA
atggggtggagggagaaggg

SEQ ID NO: 223817 - DNA, 20 bp, synthetic construct
  source 1..20: mol_type = other DNA
gatggggtggagggagaagg

SEQ ID NO: 223818 - DNA, 20 bp, synthetic construct
  source 1..20: mol_type = other DNA
agatggggtggagggagaag

SEQ ID NO: 223819 - DNA, 20 bp, synthetic construct
  source 1..20: mol_type = other DNA
gagatggggtggagggagaa

SEQ ID NO: 223820 - DNA, 20 bp, synthetic construct
  source 1..20: mol_type = other DNA
ggagatggggtggagggaga

SEQ ID NO: 223821 - DNA, 20 bp, synthetic construct
  source 1..20: mol_type = other DNA
tggagatggggtggagggag

SEQ ID NO: 223822 - DNA, 20 bp, synthetic construct
  source 1..20: mol_type = other DNA
atggagatggggtggaggga

SEQ ID NO: 223823 - DNA, 20 bp, synthetic construct
  source 1..20: mol_type = other DNA
aatggagatggggtggaggg

SEQ ID NO: 223824 - DNA, 20 bp, synthetic construct
  source 1..20: mol_type = other DNA
caatggagatggggtggagg

SEQ ID NO: 223825 - DNA, 20 bp, synthetic construct
  source 1..20: mol_type = other DNA
acaatggagatggggtggag

SEQ ID NO: 223826 - DNA, 20 bp, synthetic construct
  source 1..20: mol_type = other DNA
aacaatggagatggggtgga

SEQ ID NO: 223827 - DNA, 20 bp, synthetic construct
  source 1..20: mol_type = other DNA
caacaatggagatggggtgg

SEQ ID NO: 223828 - DNA, 20 bp, synthetic construct
  source 1..20: mol_type = other DNA
acaacaatggagatggggtg

SEQ ID NO: 223829 - DNA, 20 bp, synthetic construct
  source 1..20: mol_type = other DNA
gacaacaatggagatggggt

SEQ ID NO: 223830 - DNA, 20 bp, synthetic construct
  source 1..20: mol_type = other DNA
tgacaacaatggagatgggg

SEQ ID NO: 223831 - DNA, 20 bp, synthetic construct
  source 1..20: mol_type = other DNA
ctgacaacaatggagatggg

SEQ ID NO: 223832 - DNA, 20 bp, synthetic construct
  source 1..20: mol_type = other DNA
tctgacaacaatggagatgg

SEQ ID NO: 223833 - DNA, 20 bp, synthetic construct
  source 1..20: mol_type = other DNA
ttctgacaacaatggagatg

SEQ ID NO: 223834 - DNA, 20 bp, synthetic construct
  source 1..20: mol_type = other DNA
tttctgacaacaatggagat

SEQ ID NO: 223835 - DNA, 20 bp, synthetic construct
  source 1..20: mol_type = other DNA
ttttctgacaacaatggaga

SEQ ID NO: 223836 - DNA, 20 bp, synthetic construct
  source 1..20: mol_type = other DNA
cttttctgacaacaatggag

SEQ ID NO: 223837 - DNA, 20 bp, synthetic construct
  source 1..20: mol_type = other DNA
acttttctgacaacaatgga

SEQ ID NO: 223838 - DNA, 20 bp, synthetic construct
  source 1..20: mol_type = other DNA
gacttttctgacaacaatgg

SEQ ID NO: 223839 - DNA, 20 bp, synthetic construct
  source 1..20: mol_type = other DNA
tgacttttctgacaacaatg

SEQ ID NO: 223840 - DNA, 20 bp, synthetic construct
  source 1..20: mol_type = other DNA
gtgacttttctgacaacaat

SEQ ID NO: 223841 - DNA, 20 bp, synthetic construct
  source 1..20: mol_type = other DNA
tgtgacttttctgacaacaa

SEQ ID NO: 223842 - DNA, 20 bp, synthetic construct
  source 1..20: mol_type = other DNA
ttgtgacttttctgacaaca

SEQ ID NO: 223843 - DNA, 20 bp, synthetic construct
  source 1..20: mol_type = other DNA
attgtgacttttctgacaac

SEQ ID NO: 223844 - DNA, 20 bp, synthetic construct
  source 1..20: mol_type = other DNA
tattgtgacttttctgacaa

SEQ ID NO: 223845 - DNA, 20 bp, synthetic construct
  source 1..20: mol_type = other DNA
ttattgtgacttttctgaca

SEQ ID NO: 223846 - DNA, 20 bp, synthetic construct
  source 1..20: mol_type = other DNA
tttattgtgacttttctgac

SEQ ID NO: 223847 - DNA, 20 bp, synthetic construct
  source 1..20: mol_type = other DNA
ttttattgtgacttttctga

SEQ ID NO: 223848 - DNA, 20 bp, synthetic construct
  source 1..20: mol_type = other DNA
tttttattgtgacttttctg

SEQ ID NO: 223849 - DNA, 20 bp, synthetic construct
  source 1..20: mol_type = other DNA
ctttttattgtgacttttct

SEQ ID NO: 223850 - DNA, 20 bp, synthetic construct
  source 1..20: mol_type = other DNA
cctttttattgtgacttttc

SEQ ID NO: 223851 - DNA, 20 bp, synthetic construct
  source 1..20: mol_type = other DNA
acctttttattgtgactttt

SEQ ID NO: 223852 - DNA, 20 bp, synthetic construct
  source 1..20: mol_type = other DNA
gacctttttattgtgacttt

SEQ ID NO: 223853 - DNA, 20 bp, synthetic construct
  source 1..20: mol_type = other DNA
ggacctttttattgtgactt

SEQ ID NO: 223854 - DNA, 20 bp, synthetic construct
  source 1..20: mol_type = other DNA
tggacctttttattgtgact

SEQ ID NO: 223855 - DNA, 20 bp, synthetic construct
  source 1..20: mol_type = other DNA
atggacctttttattgtgac

SEQ ID NO: 223856 - DNA, 20 bp, synthetic construct
  source 1..20: mol_type = other DNA
tatggacctttttattgtga

SEQ ID NO: 223857 - DNA, 20 bp, synthetic construct
  source 1..20: mol_type = other DNA
atatggacctttttattgtg

SEQ ID NO: 223858 - DNA, 20 bp, synthetic construct
  source 1..20: mol_type = other DNA
aatatggacctttttattgt

SEQ ID NO: 223859 - DNA, 20 bp, synthetic construct
  source 1..20: mol_type = other DNA
caatatggacctttttattg

SEQ ID NO: 223860 - DNA, 20 bp, synthetic construct
  source 1..20: mol_type = other DNA
acaatatggacctttttatt

SEQ ID NO: 223861 - DNA, 20 bp, synthetic construct
  source 1..20: mol_type = other DNA
gacaatatggacctttttat

SEQ ID NO: 223862 - DNA, 20 bp, synthetic construct
  source 1..20: mol_type = other DNA
agacaatatggaccttttta

SEQ ID NO: 223863 - DNA, 20 bp, synthetic construct
  source 1..20: mol_type = other DNA
tagacaatatggaccttttt

SEQ ID NO: 223864 - DNA, 20 bp, synthetic construct
  source 1..20: mol_type = other DNA
ctagacaatatggacctttt

SEQ ID NO: 223865 - DNA, 20 bp, synthetic construct
  source 1..20: mol_type = other DNA
actagacaatatggaccttt

SEQ ID NO: 223866 - DNA, 20 bp, synthetic construct
  source 1..20: mol_type = other DNA
aactagacaatatggacctt

SEQ ID NO: 223867 - DNA, 20 bp, synthetic construct
  source 1..20: mol_type = other DNA
gaactagacaatatggacct

SEQ ID NO: 223868 - DNA, 20 bp, synthetic construct
  source 1..20: mol_type = other DNA
ggaactagacaatatggacc

SEQ ID NO: 223869 - DNA, 20 bp, synthetic construct
  source 1..20: mol_type = other DNA
gggaactagacaatatggac

SEQ ID NO: 223870 - DNA, 20 bp, synthetic construct
  source 1..20: mol_type = other DNA
tgggaactagacaatatgga

SEQ ID NO: 223871 - DNA, 20 bp, synthetic construct
  source 1..20: mol_type = other DNA
atgggaactagacaatatgg

SEQ ID NO: 223872 - DNA, 20 bp, synthetic construct
  source 1..20: mol_type = other DNA
tatgggaactagacaatatg

SEQ ID NO: 223873 - DNA, 20 bp, synthetic construct
  source 1..20: mol_type = other DNA
gtatgggaactagacaatat

SEQ ID NO: 223874 - DNA, 20 bp, synthetic construct
  source 1..20: mol_type = other DNA
agtatgggaactagacaata

SEQ ID NO: 223875 - DNA, 20 bp, synthetic construct
  source 1..20: mol_type = other DNA
aagtatgggaactagacaat

SEQ ID NO: 223876 - DNA, 20 bp, synthetic construct
  source 1..20: mol_type = other DNA
aaagtatgggaactagacaa

SEQ ID NO: 223877 - DNA, 20 bp, synthetic construct
  source 1..20: mol_type = other DNA
aaaagtatgggaactagaca

SEQ ID NO: 223878 - DNA, 20 bp, synthetic construct
  source 1..20: mol_type = other DNA
taaaagtatgggaactagac

SEQ ID NO: 223879 - DNA, 20 bp, synthetic construct
  source 1..20: mol_type = other DNA
ttaaaagtatgggaactaga

SEQ ID NO: 223880 - DNA, 20 bp, synthetic construct
  source 1..20: mol_type = other DNA
attaaaagtatgggaactag

SEQ ID NO: 223881 - DNA, 20 bp, synthetic construct
  source 1..20: mol_type = other DNA
aattaaaagtatgggaacta

SEQ ID NO: 223882 - DNA, 20 bp, synthetic construct
  source 1..20: mol_type = other DNA
aaattaaaagtatgggaact

SEQ ID NO: 223883 - DNA, 20 bp, synthetic construct
  source 1..20: mol_type = other DNA
aaaattaaaagtatgggaac

SEQ ID NO: 223884 - DNA, 20 bp, synthetic construct
  source 1..20: mol_type = other DNA
aaaaattaaaagtatgggaa

SEQ ID NO: 223885 - DNA, 20 bp, synthetic construct
  source 1..20: mol_type = other DNA
taaaaattaaaagtatggga

SEQ ID NO: 223886 - DNA, 20 bp, synthetic construct
  source 1..20: mol_type = other DNA
ttaaaaattaaaagtatggg

SEQ ID NO: 223887 - DNA, 20 bp, synthetic construct
  source 1..20: mol_type = other DNA
tttaaaaattaaaagtatgg

SEQ ID NO: 223888 - DNA, 20 bp, synthetic construct
  source 1..20: mol_type = other DNA
ttttaaaaattaaaagtatg

SEQ ID NO: 223889 - DNA, 20 bp, synthetic construct
  source 1..20: mol_type = other DNA
attttaaaaattaaaagtat

SEQ ID NO: 223890 - DNA, 20 bp, synthetic construct
  source 1..20: mol_type = other DNA
aattttaaaaattaaaagta

SEQ ID NO: 223891 - DNA, 20 bp, synthetic construct
  source 1..20: mol_type = other DNA
aaattttaaaaattaaaagt

SEQ ID NO: 223892 - DNA, 20 bp, synthetic construct
  source 1..20: mol_type = other DNA
aaaattttaaaaattaaaag

SEQ ID NO: 223893 - DNA, 20 bp, synthetic construct
  source 1..20: mol_type = other DNA
taaaattttaaaaattaaaa

SEQ ID NO: 223894 - DNA, 20 bp, synthetic construct
  source 1..20: mol_type = other DNA
ataaaattttaaaaattaaa

SEQ ID NO: 223895 - DNA, 20 bp, synthetic construct
  source 1..20: mol_type = other DNA
aataaaattttaaaaattaa

SEQ ID NO: 223896 - DNA, 20 bp, synthetic construct
  source 1..20: mol_type = other DNA
aaataaaattttaaaaatta

SEQ ID NO: 223897 - DNA, 20 bp, synthetic construct
  source 1..20: mol_type = other DNA
taaataaaattttaaaaatt

SEQ ID NO: 223898 - DNA, 20 bp, synthetic construct
  source 1..20: mol_type = other DNA
ataaataaaattttaaaaat

SEQ ID NO: 223899 - DNA, 20 bp, synthetic construct
  source 1..20: mol_type = other DNA
aataaataaaattttaaaaa

SEQ ID NO: 223900 - DNA, 20 bp, synthetic construct
  source 1..20: mol_type = other DNA
aaataaataaaattttaaaa

SEQ ID NO: 223901 - DNA, 20 bp, synthetic construct
  source 1..20: mol_type = other DNA
taaataaataaaattttaaa

SEQ ID NO: 223902 - DNA, 20 bp, synthetic construct
  source 1..20: mol_type = other DNA
ataaataaataaaattttaa

SEQ ID NO: 223903 - DNA, 20 bp, synthetic construct
  source 1..20: mol_type = other DNA
aataaataaataaaatttta

SEQ ID NO: 223904 - DNA, 20 bp, synthetic construct
  source 1..20: mol_type = other DNA
aaataaataaataaaatttt

SEQ ID NO: 223905 - DNA, 20 bp, synthetic construct
  source 1..20: mol_type = other DNA
taaataaataaataaaattt

SEQ ID NO: 223906 - DNA, 20 bp, synthetic construct
  source 1..20: mol_type = other DNA
ataaataaataaataaaatt

SEQ ID NO: 223907 - DNA, 20 bp, synthetic construct
  source 1..20: mol_type = other DNA
aataaataaataaataaaat

SEQ ID NO: 223908 - DNA, 20 bp, synthetic construct
  source 1..20: mol_type = other DNA
aaataaataaataaataaaa

SEQ ID NO: 223909 - DNA, 20 bp, synthetic construct
  source 1..20: mol_type = other DNA
taaataaataaataaataaa

SEQ ID NO: 223910 - DNA, 20 bp, synthetic construct
  source 1..20: mol_type = other DNA
ataaataaataaataaataa

SEQ ID NO: 223911 - DNA, 20 bp, synthetic construct
  source 1..20: mol_type = other DNA
cataaataaataaataaata

SEQ ID NO: 223912 - DNA, 20 bp, synthetic construct
  source 1..20: mol_type = other DNA
acataaataaataaataaat

SEQ ID NO: 223913 - DNA, 20 bp, synthetic construct
  source 1..20: mol_type = other DNA
tacataaataaataaataaa

SEQ ID NO: 223914 - DNA, 20 bp, synthetic construct
  source 1..20: mol_type = other DNA
atacataaataaataaataa

SEQ ID NO: 223915 - DNA, 20 bp, synthetic construct
  source 1..20: mol_type = other DNA
aatacataaataaataaata

SEQ ID NO: 223916 - DNA, 20 bp, synthetic construct
  source 1..20: mol_type = other DNA
aaatacataaataaataaat

SEQ ID NO: 223917 - DNA, 20 bp, synthetic construct
  source 1..20: mol_type = other DNA
aaaatacataaataaataaa

SEQ ID NO: 223918 - DNA, 20 bp, synthetic construct
  source 1..20: mol_type = other DNA
aaaaatacataaataaataa

SEQ ID NO: 223919 - DNA, 20 bp, synthetic construct
  source 1..20: mol_type = other DNA
aaaaaatacataaataaata

SEQ ID NO: 223920 - DNA, 20 bp, synthetic construct
  source 1..20: mol_type = other DNA
caaaaaatacataaataaat

SEQ ID NO: 223921 - DNA, 20 bp, synthetic construct
  source 1..20: mol_type = other DNA
tcaaaaaatacataaataaa

SEQ ID NO: 223922 - DNA, 20 bp, synthetic construct
  source 1..20: mol_type = other DNA
ctcaaaaaatacataaataa

SEQ ID NO: 223923 - DNA, 20 bp, synthetic construct
  source 1..20: mol_type = other DNA
tctcaaaaaatacataaata

SEQ ID NO: 223924 - DNA, 20 bp, synthetic construct
  source 1..20: mol_type = other DNA
gtctcaaaaaatacataaat

SEQ ID NO: 223925 - DNA, 20 bp, synthetic construct
  source 1..20: mol_type = other DNA
tgtctcaaaaaatacataaa

SEQ ID NO: 223926 - DNA, 20 bp, synthetic construct
  source 1..20: mol_type = other DNA
ctgtctcaaaaaatacataa

SEQ ID NO: 223927 - DNA, 20 bp, synthetic construct
  source 1..20: mol_type = other DNA
tctgtctcaaaaaatacata

SEQ ID NO: 223928 - DNA, 20 bp, synthetic construct
  source 1..20: mol_type = other DNA
ctctgtctcaaaaaatacat

SEQ ID NO: 223929 - DNA, 20 bp, synthetic construct
  source 1..20: mol_type = other DNA
actctgtctcaaaaaataca

SEQ ID NO: 223930 - DNA, 20 bp, synthetic construct
  source 1..20: mol_type = other DNA
gactctgtctcaaaaaatac

SEQ ID NO: 223931 - DNA, 20 bp, synthetic construct
  source 1..20: mol_type = other DNA
agactctgtctcaaaaaata

SEQ ID NO: 223932 - DNA, 20 bp, synthetic construct
  source 1..20: mol_type = other DNA
aagactctgtctcaaaaaat

SEQ ID NO: 223933 - DNA, 20 bp, synthetic construct
  source 1..20: mol_type = other DNA
taagactctgtctcaaaaaa

SEQ ID NO: 223934 - DNA, 20 bp, synthetic construct
  source 1..20: mol_type = other DNA
ttaagactctgtctcaaaaa

SEQ ID NO: 223935 - DNA, 20 bp, synthetic construct
  source 1..20: mol_type = other DNA
gttaagactctgtctcaaaa

SEQ ID NO: 223936 - DNA, 20 bp, synthetic construct
  source 1..20: mol_type = other DNA
ggttaagactctgtctcaaa

SEQ ID NO: 223937 - DNA, 20 bp, synthetic construct
  source 1..20: mol_type = other DNA
gggttaagactctgtctcaa

SEQ ID NO: 223938 - DNA, 20 bp, synthetic construct
  source 1..20: mol_type = other DNA
tgggttaagactctgtctca

SEQ ID NO: 223939 - DNA, 20 bp, synthetic construct
  source 1..20: mol_type = other DNA
ctgggttaagactctgtctc

SEQ ID NO: 223940 - DNA, 20 bp, synthetic construct
  source 1..20: mol_type = other DNA
cctgggttaagactctgtct

SEQ ID NO: 223941 - DNA, 20 bp, synthetic construct
  source 1..20: mol_type = other DNA
gcctgggttaagactctgtc

SEQ ID NO: 223942 - DNA, 20 bp, synthetic construct
  source 1..20: mol_type = other DNA
agcctgggttaagactctgt

SEQ ID NO: 223943 - DNA, 20 bp, synthetic construct
  source 1..20: mol_type = other DNA
cagcctgggttaagactctg

SEQ ID NO: 223944 - DNA, 20 bp, synthetic construct
  source 1..20: mol_type = other DNA
ccagcctgggttaagactct

SEQ ID NO: 223945 - DNA, 20 bp, synthetic construct
  source 1..20: mol_type = other DNA
tccagcctgggttaagactc

SEQ ID NO: 223946 - DNA, 20 bp, synthetic construct
  source 1..20: mol_type = other DNA
ctccagcctgggttaagact

SEQ ID NO: 223947 - DNA, 20 bp, synthetic construct
  source 1..20: mol_type = other DNA
actccagcctgggttaagac

SEQ ID NO: 223948 - DNA, 20 bp, synthetic construct
  source 1..20: mol_type = other DNA
aactccagcctgggttaaga

SEQ ID NO: 223949 - DNA, 20 bp, synthetic construct
  source 1..20: mol_type = other DNA
gaactccagcctgggttaag

SEQ ID NO: 223950 - DNA, 20 bp, synthetic construct
  source 1..20: mol_type = other DNA
tgaactccagcctgggttaa

SEQ ID NO: 223951 - DNA, 20 bp, synthetic construct
  source 1..20: mol_type = other DNA
ctgaactccagcctgggtta

SEQ ID NO: 223952 - DNA, 20 bp, synthetic construct
  source 1..20: mol_type = other DNA
actgaactccagcctgggtt

SEQ ID NO: 223953 - DNA, 20 bp, synthetic construct
  source 1..20: mol_type = other DNA
cactgaactccagcctgggt

SEQ ID NO: 223954 - DNA, 20 bp, synthetic construct
  source 1..20: mol_type = other DNA
ccactgaactccagcctggg

SEQ ID NO: 223955 - DNA, 20 bp, synthetic construct
  source 1..20: mol_type = other DNA
gccactgaactccagcctgg

SEQ ID NO: 223956 - DNA, 20 bp, synthetic construct
  source 1..20: mol_type = other DNA
tgccactgaactccagcctg

SEQ ID NO: 223957 - DNA, 20 bp, synthetic construct
  source 1..20: mol_type = other DNA
atgccactgaactccagcct

SEQ ID NO: 223958 - DNA, 20 bp, synthetic construct
  source 1..20: mol_type = other DNA
catgccactgaactccagcc

SEQ ID NO: 223959 - DNA, 20 bp, synthetic construct
  source 1..20: mol_type = other DNA
tcatgccactgaactccagc

SEQ ID NO: 223960 - DNA, 20 bp, synthetic construct
  source 1..20: mol_type = other DNA
atcatgccactgaactccag

SEQ ID NO: 223961 - DNA, 20 bp, synthetic construct
  source 1..20: mol_type = other DNA
gatcatgccactgaactcca

SEQ ID NO: 223962 - DNA, 20 bp, synthetic construct
  source 1..20: mol_type = other DNA
agatcatgccactgaactcc

SEQ ID NO: 223963 - DNA, 20 bp, synthetic construct
  source 1..20: mol_type = other DNA
tagatcatgccactgaactc

SEQ ID NO: 223964 - DNA, 20 bp, synthetic construct
  source 1..20: mol_type = other DNA
ctagatcatgccactgaact

SEQ ID NO: 223965 - DNA, 20 bp, synthetic construct
  source 1..20: mol_type = other DNA
cctagatcatgccactgaac

SEQ ID NO: 223966 - DNA, 20 bp, synthetic construct
  source 1..20: mol_type = other DNA
gcctagatcatgccactgaa

SEQ ID NO: 223967 - DNA, 20 bp, synthetic construct
  source 1..20: mol_type = other DNA
agcctagatcatgccactga

SEQ ID NO: 223968 - DNA, 20 bp, synthetic construct
  source 1..20: mol_type = other DNA
gagcctagatcatgccactg

SEQ ID NO: 223969 - DNA, 20 bp, synthetic construct
  source 1..20: mol_type = other DNA
tgagcctagatcatgccact

SEQ ID NO: 223970 - DNA, 20 bp, synthetic construct
  source 1..20: mol_type = other DNA
gtgagcctagatcatgccac

SEQ ID NO: 223971 - DNA, 20 bp, synthetic construct
  source 1..20: mol_type = other DNA
agtgagcctagatcatgcca

SEQ ID NO: 223972 - DNA, 20 bp, synthetic construct
  source 1..20: mol_type = other DNA
cagtgagcctagatcatgcc

SEQ ID NO: 223973 - DNA, 20 bp, synthetic construct
  source 1..20: mol_type = other DNA
gcagtgagcctagatcatgc

SEQ ID NO: 223974 - DNA, 20 bp, synthetic construct
  source 1..20: mol_type = other DNA
tgcagtgagcctagatcatg

SEQ ID NO: 223975 - DNA, 20 bp, synthetic construct
  source 1..20: mol_type = other DNA
ttgcagtgagcctagatcat

SEQ ID NO: 223976 - DNA, 20 bp, synthetic construct
  source 1..20: mol_type = other DNA
gttgcagtgagcctagatca

SEQ ID NO: 223977 - DNA, 20 bp, synthetic construct
  source 1..20: mol_type = other DNA
ggttgcagtgagcctagatc

SEQ ID NO: 223978 - DNA, 20 bp, synthetic construct
  source 1..20: mol_type = other DNA
aggttgcagtgagcctagat

SEQ ID NO: 223979 - DNA, 20 bp, synthetic construct
  source 1..20: mol_type = other DNA
gaggttgcagtgagcctaga

SEQ ID NO: 223980 - DNA, 20 bp, synthetic construct
  source 1..20: mol_type = other DNA
agaggttgcagtgagcctag

SEQ ID NO: 223981 - DNA, 20 bp, synthetic construct
  source 1..20: mol_type = other DNA
gagaggttgcagtgagccta

SEQ ID NO: 223982 - DNA, 20 bp, synthetic construct
  source 1..20: mol_type = other DNA
ggagaggttgcagtgagcct

SEQ ID NO: 223983 - DNA, 20 bp, synthetic construct
  source 1..20: mol_type = other DNA
gggagaggttgcagtgagcc

SEQ ID NO: 223984 - DNA, 20 bp, synthetic construct
  source 1..20: mol_type = other DNA
agggagaggttgcagtgagc

SEQ ID NO: 223985 - DNA, 20 bp, synthetic construct
  source 1..20: mol_type = other DNA
gagggagaggttgcagtgag

SEQ ID NO: 223986 - DNA, 20 bp, synthetic construct
  source 1..20: mol_type = other DNA
ggagggagaggttgcagtga

SEQ ID NO: 223987 - DNA, 20 bp, synthetic construct
  source 1..20: mol_type = other DNA
aggagggagaggttgcagtg

SEQ ID NO: 223988 - DNA, 20 bp, synthetic construct
  source 1..20: mol_type = other DNA
caggagggagaggttgcagt

SEQ ID NO: 223989 - DNA, 20 bp, synthetic construct
  source 1..20: mol_type = other DNA
ccaggagggagaggttgcag

SEQ ID NO: 223990 - DNA, 20 bp, synthetic construct
  source 1..20: mol_type = other DNA
cccaggagggagaggttgca

SEQ ID NO: 223991 - DNA, 20 bp, synthetic construct
  source 1..20: mol_type = other DNA
acccaggagggagaggttgc

SEQ ID NO: 223992 - DNA, 20 bp, synthetic construct
  source 1..20: mol_type = other DNA
aacccaggagggagaggttg

SEQ ID NO: 223993 - DNA, 20 bp, synthetic construct
  source 1..20: mol_type = other DNA
gaacccaggagggagaggtt

SEQ ID NO: 223994 - DNA, 20 bp, synthetic construct
  source 1..20: mol_type = other DNA
tgaacccaggagggagaggt

SEQ ID NO: 223995 - DNA, 20 bp, synthetic construct
  source 1..20: mol_type = other DNA
ttgaacccaggagggagagg

SEQ ID NO: 223996 - DNA, 20 bp, synthetic construct
  source 1..20: mol_type = other DNA
cttgaacccaggagggagag

SEQ ID NO: 223997 - DNA, 20 bp, synthetic construct
  source 1..20: mol_type = other DNA
acttgaacccaggagggaga

SEQ ID NO: 223998 - DNA, 20 bp, synthetic construct
  source 1..20: mol_type = other DNA
cacttgaacccaggagggag

SEQ ID NO: 223999 - DNA, 20 bp, synthetic construct
  source 1..20: mol_type = other DNA
tcacttgaacccaggaggga

SEQ ID NO: 224000 - DNA, 20 bp, synthetic construct
  source 1..20: mol_type = other DNA
atcacttgaacccaggaggg

SEQ ID NO: 224001 - DNA, 20 bp, synthetic construct
  source 1..20: mol_type = other DNA
aatcacttgaacccaggagg

SEQ ID NO: 224002 - DNA, 20 bp, synthetic construct
  source 1..20: mol_type = other DNA
gaatcacttgaacccaggag

SEQ ID NO: 224003 - DNA, 20 bp, synthetic construct
  source 1..20: mol_type = other DNA
agaatcacttgaacccagga

SEQ ID NO: 224004 - DNA, 20 bp, synthetic construct
  source 1..20: mol_type = other DNA
gagaatcacttgaacccagg

SEQ ID NO: 224005 - DNA, 20 bp, synthetic construct
  source 1..20: mol_type = other DNA
tgagaatcacttgaacccag

SEQ ID NO: 224006 - DNA, 20 bp, synthetic construct
  source 1..20: mol_type = other DNA
atgagaatcacttgaaccca

SEQ ID NO: 224007 - DNA, 20 bp, synthetic construct
  source 1..20: mol_type = other DNA
catgagaatcacttgaaccc

SEQ ID NO: 224008 - DNA, 20 bp, synthetic construct
  source 1..20: mol_type = other DNA
gcatgagaatcacttgaacc

SEQ ID NO: 224009 - DNA, 20 bp, synthetic construct
  source 1..20: mol_type = other DNA
ggcatgagaatcacttgaac

SEQ ID NO: 224010 - DNA, 20 bp, synthetic construct
  source 1..20: mol_type = other DNA
aggcatgagaatcacttgaa

SEQ ID NO: 224011 - DNA, 20 bp, synthetic construct
  source 1..20: mol_type = other DNA
gaggcatgagaatcacttga

SEQ ID NO: 224012 - DNA, 20 bp, synthetic construct
  source 1..20: mol_type = other DNA
tgaggcatgagaatcacttg

SEQ ID NO: 224013 - DNA, 20 bp, synthetic construct
  source 1..20: mol_type = other DNA
ctgaggcatgagaatcactt

SEQ ID NO: 224014 - DNA, 20 bp, synthetic construct
  source 1..20: mol_type = other DNA
gctgaggcatgagaatcact

SEQ ID NO: 224015 - DNA, 20 bp, synthetic construct
  source 1..20: mol_type = other DNA
ggctgaggcatgagaatcac

SEQ ID NO: 224016 - DNA, 20 bp, synthetic construct
  source 1..20: mol_type = other DNA
aggctgaggcatgagaatca

SEQ ID NO: 224017 - DNA, 20 bp, synthetic construct
  source 1..20: mol_type = other DNA
gaggctgaggcatgagaatc

SEQ ID NO: 224018 - DNA, 20 bp, synthetic construct
  source 1..20: mol_type = other DNA
ggaggctgaggcatgagaat

SEQ ID NO: 224019 - DNA, 20 bp, synthetic construct
  source 1..20: mol_type = other DNA
gggaggctgaggcatgagaa

SEQ ID NO: 224020 - DNA, 20 bp, synthetic construct
  source 1..20: mol_type = other DNA
cgggaggctgaggcatgaga

SEQ ID NO: 224021 - DNA, 20 bp, synthetic construct
  source 1..20: mol_type = other DNA
tcgggaggctgaggcatgag

SEQ ID NO: 224022 - DNA, 20 bp, synthetic construct
  source 1..20: mol_type = other DNA
ctcgggaggctgaggcatga

SEQ ID NO: 224023 - DNA, 20 bp, synthetic construct
  source 1..20: mol_type = other DNA
actcgggaggctgaggcatg

SEQ ID NO: 224024 - DNA, 20 bp, synthetic construct
  source 1..20: mol_type = other DNA
tactcgggaggctgaggcat

SEQ ID NO: 224025 - DNA, 20 bp, synthetic construct
  source 1..20: mol_type = other DNA
ctactcgggaggctgaggca

SEQ ID NO: 224026 - DNA, 20 bp, synthetic construct
  source 1..20: mol_type = other DNA
gctactcgggaggctgaggc

SEQ ID NO: 224027 - DNA, 20 bp, synthetic construct
  source 1..20: mol_type = other DNA
agctactcgggaggctgagg

SEQ ID NO: 224028 - DNA, 20 bp, synthetic construct
  source 1..20: mol_type = other DNA
cagctactcgggaggctgag

SEQ ID NO: 224029 - DNA, 20 bp, synthetic construct
  source 1..20: mol_type = other DNA
tcagctactcgggaggctga

SEQ ID NO: 224030 - DNA, 20 bp, synthetic construct
  source 1..20: mol_type = other DNA
ctcagctactcgggaggctg

SEQ ID NO: 224031 - DNA, 20 bp, synthetic construct
  source 1..20: mol_type = other DNA
tctcagctactcgggaggct

SEQ ID NO: 224032 - DNA, 20 bp, synthetic construct
  source 1..20: mol_type = other DNA
atctcagctactcgggaggc

SEQ ID NO: 224033 - DNA, 20 bp, synthetic construct
  source 1..20: mol_type = other DNA
aatctcagctactcgggagg

SEQ ID NO: 224034 - DNA, 20 bp, synthetic construct
  source 1..20: mol_type = other DNA
taatctcagctactcgggag

SEQ ID NO: 224035 - DNA, 20 bp, synthetic construct
  source 1..20: mol_type = other DNA
gtaatctcagctactcggga

SEQ ID NO: 224036 - DNA, 20 bp, synthetic construct
  source 1..20: mol_type = other DNA
tgtaatctcagctactcggg

SEQ ID NO: 224037 - DNA, 20 bp, synthetic construct
  source 1..20: mol_type = other DNA
ctgtaatctcagctactcgg

SEQ ID NO: 224038 - DNA, 20 bp, synthetic construct
  source 1..20: mol_type = other DNA
tctgtaatctcagctactcg

SEQ ID NO: 224039 - DNA, 20 bp, synthetic construct
  source 1..20: mol_type = other DNA
atctgtaatctcagctactc

SEQ ID NO: 224040 - DNA, 20 bp, synthetic construct
  source 1..20: mol_type = other DNA
tatctgtaatctcagctact

SEQ ID NO: 224041 - DNA, 20 bp, synthetic construct
  source 1..20: mol_type = other DNA
atatctgtaatctcagctac

SEQ ID NO: 224042 - DNA, 20 bp, synthetic construct
  source 1..20: mol_type = other DNA
catatctgtaatctcagcta

SEQ ID NO: 224043 - DNA, 20 bp, synthetic construct
  source 1..20: mol_type = other DNA
acatatctgtaatctcagct

SEQ ID NO: 224044 - DNA, 20 bp, synthetic construct
  source 1..20: mol_type = other DNA
cacatatctgtaatctcagc

SEQ ID NO: 224045 - DNA, 20 bp, synthetic construct
  source 1..20: mol_type = other DNA
gcacatatctgtaatctcag

SEQ ID NO: 224046 - DNA, 20 bp, synthetic construct
  source 1..20: mol_type = other DNA
ggcacatatctgtaatctca

SEQ ID NO: 224047 - DNA, 20 bp, synthetic construct
  source 1..20: mol_type = other DNA
tggcacatatctgtaatctc

SEQ ID NO: 224048 - DNA, 20 bp, synthetic construct
  source 1..20: mol_type = other DNA
gtggcacatatctgtaatct

SEQ ID NO: 224049 - DNA, 20 bp, synthetic construct
  source 1..20: mol_type = other DNA
agtggcacatatctgtaatc

SEQ ID NO: 224050 - DNA, 20 bp, synthetic construct
  source 1..20: mol_type = other DNA
tagtggcacatatctgtaat

SEQ ID NO: 224051 - DNA, 20 bp, synthetic construct
  source 1..20: mol_type = other DNA
atagtggcacatatctgtaa

SEQ ID NO: 224052 - DNA, 20 bp, synthetic construct
  source 1..20: mol_type = other DNA
catagtggcacatatctgta

SEQ ID NO: 224053 - DNA, 20 bp, synthetic construct
  source 1..20: mol_type = other DNA
gcatagtggcacatatctgt

SEQ ID NO: 224054 - DNA, 20 bp, synthetic construct
  source 1..20: mol_type = other DNA
ggcatagtggcacatatctg

SEQ ID NO: 224055 - DNA, 20 bp, synthetic construct
  source 1..20: mol_type = other DNA
gggcatagtggcacatatct

SEQ ID NO: 224056 - DNA, 20 bp, synthetic construct
  source 1..20: mol_type = other DNA
tgggcatagtggcacatatc

SEQ ID NO: 224057 - DNA, 20 bp, synthetic construct
  source 1..20: mol_type = other DNA
ctgggcatagtggcacatat

SEQ ID NO: 224058 - DNA, 20 bp, synthetic construct
  source 1..20: mol_type = other DNA
gctgggcatagtggcacata

SEQ ID NO: 224059 - DNA, 20 bp, synthetic construct
  source 1..20: mol_type = other DNA
agctgggcatagtggcacat

SEQ ID NO: 224060 - DNA, 20 bp, synthetic construct
  source 1..20: mol_type = other DNA
tagctgggcatagtggcaca

SEQ ID NO: 224061 - DNA, 20 bp, synthetic construct
  source 1..20: mol_type = other DNA
ttagctgggcatagtggcac

SEQ ID NO: 224062 - DNA, 20 bp, synthetic construct
  source 1..20: mol_type = other DNA
attagctgggcatagtggca

SEQ ID NO: 224063 - DNA, 20 bp, synthetic construct
  source 1..20: mol_type = other DNA
aattagctgggcatagtggc

SEQ ID NO: 224064 - DNA, 20 bp, synthetic construct
  source 1..20: mol_type = other DNA
aaattagctgggcatagtgg

SEQ ID NO: 224065 - DNA, 20 bp, synthetic construct
  source 1..20: mol_type = other DNA
aaaattagctgggcatagtg

SEQ ID NO: 224066 - DNA, 20 bp, synthetic construct
  source 1..20: mol_type = other DNA
aaaaattagctgggcatagt

SEQ ID NO: 224067 - DNA, 20 bp, synthetic construct
  source 1..20: mol_type = other DNA
caaaaattagctgggcatag

SEQ ID NO: 224068 - DNA, 20 bp, synthetic construct
  source 1..20: mol_type = other DNA
acaaaaattagctgggcata

SEQ ID NO: 224069 - DNA, 20 bp, synthetic construct
  source 1..20: mol_type = other DNA
tacaaaaattagctgggcat

SEQ ID NO: 224070 - DNA, 20 bp, synthetic construct
  source 1..20: mol_type = other DNA
atacaaaaattagctgggca

SEQ ID NO: 224071 - DNA, 20 bp, synthetic construct
  source 1..20: mol_type = other DNA
aatacaaaaattagctgggc

SEQ ID NO: 224072 - DNA, 20 bp, synthetic construct
  source 1..20: mol_type = other DNA
aaatacaaaaattagctggg

SEQ ID NO: 224073 - DNA, 20 bp, synthetic construct
  source 1..20: mol_type = other DNA
aaaatacaaaaattagctgg

SEQ ID NO: 224074 - DNA, 20 bp, synthetic construct
  source 1..20: mol_type = other DNA
aaaaatacaaaaattagctg

SEQ ID NO: 224075 - DNA, 20 bp, synthetic construct
  source 1..20: mol_type = other DNA
taaaaatacaaaaattagct

SEQ ID NO: 224076 - DNA, 20 bp, synthetic construct
  source 1..20: mol_type = other DNA
ctaaaaatacaaaaattagc

SEQ ID NO: 224077 - DNA, 20 bp, synthetic construct
  source 1..20: mol_type = other DNA
actaaaaatacaaaaattag

SEQ ID NO: 224078 - DNA, 20 bp, synthetic construct
  source 1..20: mol_type = other DNA
tactaaaaatacaaaaatta

SEQ ID NO: 224079 - DNA, 20 bp, synthetic construct
  source 1..20: mol_type = other DNA
ctactaaaaatacaaaaatt

SEQ ID NO: 224080 - DNA, 20 bp, synthetic construct
  source 1..20: mol_type = other DNA
tctactaaaaatacaaaaat

SEQ ID NO: 224081 - DNA, 20 bp, synthetic construct
  source 1..20: mol_type = other DNA
ctctactaaaaatacaaaaa

SEQ ID NO: 224082 - DNA, 20 bp, synthetic construct
  source 1..20: mol_type = other DNA
tctctactaaaaatacaaaa

SEQ ID NO: 224083 - DNA, 20 bp, synthetic construct
  source 1..20: mol_type = other DNA
gtctctactaaaaatacaaa

SEQ ID NO: 224084 - DNA, 20 bp, synthetic construct
  source 1..20: mol_type = other DNA
cgtctctactaaaaatacaa

SEQ ID NO: 224085 - DNA, 20 bp, synthetic construct
  source 1..20: mol_type = other DNA
ccgtctctactaaaaataca

SEQ ID NO: 224086 - DNA, 20 bp, synthetic construct
  source 1..20: mol_type = other DNA
cccgtctctactaaaaatac

SEQ ID NO: 224087 - DNA, 20 bp, synthetic construct
  source 1..20: mol_type = other DNA
ccccgtctctactaaaaata

SEQ ID NO: 224088 - DNA, 20 bp, synthetic construct
  source 1..20: mol_type = other DNA
accccgtctctactaaaaat

SEQ ID NO: 224089 - DNA, 20 bp, synthetic construct
  source 1..20: mol_type = other DNA
aaccccgtctctactaaaaa

SEQ ID NO: 224090 - DNA, 20 bp, synthetic construct
  source 1..20: mol_type = other DNA
aaaccccgtctctactaaaa

SEQ ID NO: 224091 - DNA, 20 bp, synthetic construct
  source 1..20: mol_type = other DNA
gaaaccccgtctctactaaa

SEQ ID NO: 224092 - DNA, 20 bp, synthetic construct
  source 1..20: mol_type = other DNA
tgaaaccccgtctctactaa

SEQ ID NO: 224093 - DNA, 20 bp, synthetic construct
  source 1..20: mol_type = other DNA
gtgaaaccccgtctctacta

SEQ ID NO: 224094 - DNA, 20 bp, synthetic construct
  source 1..20: mol_type = other DNA
ggtgaaaccccgtctctact

SEQ ID NO: 224095 - DNA, 20 bp, synthetic construct
  source 1..20: mol_type = other DNA
tggtgaaaccccgtctctac

SEQ ID NO: 224096 - DNA, 20 bp, synthetic construct
  source 1..20: mol_type = other DNA
atggtgaaaccccgtctcta

SEQ ID NO: 224097 - DNA, 20 bp, synthetic construct
  source 1..20: mol_type = other DNA
catggtgaaaccccgtctct

SEQ ID NO: 224098 - DNA, 20 bp, synthetic construct
  source 1..20: mol_type = other DNA
acatggtgaaaccccgtctc

SEQ ID NO: 224099 - DNA, 20 bp, synthetic construct
  source 1..20: mol_type = other DNA
aacatggtgaaaccccgtct

SEQ ID NO: 224100 - DNA, 20 bp, synthetic construct
  source 1..20: mol_type = other DNA
caacatggtgaaaccccgtc

SEQ ID NO: 224101 - DNA, 20 bp, synthetic construct
  source 1..20: mol_type = other DNA
ccaacatggtgaaaccccgt

SEQ ID NO: 224102 - DNA, 20 bp, synthetic construct
  source 1..20: mol_type = other DNA
gccaacatggtgaaaccccg

SEQ ID NO: 224103 - DNA, 20 bp, synthetic construct
  source 1..20: mol_type = other DNA
ggccaacatggtgaaacccc

SEQ ID NO: 224104 - DNA, 20 bp, synthetic construct
  source 1..20: mol_type = other DNA
tggccaacatggtgaaaccc

SEQ ID NO: 224105 - DNA, 20 bp, synthetic construct
  source 1..20: mol_type = other DNA
ctggccaacatggtgaaacc

SEQ ID NO: 224106 - DNA, 20 bp, synthetic construct
  source 1..20: mol_type = other DNA
cctggccaacatggtgaaac

SEQ ID NO: 224107 - DNA, 20 bp, synthetic construct
  source 1..20: mol_type = other DNA
gcctggccaacatggtgaaa

SEQ ID NO: 224108 - DNA, 20 bp, synthetic construct
  source 1..20: mol_type = other DNA
agcctggccaacatggtgaa

SEQ ID NO: 224109 - DNA, 20 bp, synthetic construct
  source 1..20: mol_type = other DNA
cagcctggccaacatggtga

SEQ ID NO: 224110 - DNA, 20 bp, synthetic construct
  source 1..20: mol_type = other DNA
ccagcctggccaacatggtg

SEQ ID NO: 224111 - DNA, 20 bp, synthetic construct
  source 1..20: mol_type = other DNA
accagcctggccaacatggt

SEQ ID NO: 224112 - DNA, 20 bp, synthetic construct
  source 1..20: mol_type = other DNA
gaccagcctggccaacatgg

SEQ ID NO: 224113 - DNA, 20 bp, synthetic construct
  source 1..20: mol_type = other DNA
agaccagcctggccaacatg

SEQ ID NO: 224114 - DNA, 20 bp, synthetic construct
  source 1..20: mol_type = other DNA
gagaccagcctggccaacat

SEQ ID NO: 224115 - DNA, 20 bp, synthetic construct
  source 1..20: mol_type = other DNA
cgagaccagcctggccaaca

SEQ ID NO: 224116 - DNA, 20 bp, synthetic construct
  source 1..20: mol_type = other DNA
tcgagaccagcctggccaac

SEQ ID NO: 224117 - DNA, 20 bp, synthetic construct
  source 1..20: mol_type = other DNA
ttcgagaccagcctggccaa

SEQ ID NO: 224118 - DNA, 20 bp, synthetic construct
  source 1..20: mol_type = other DNA
gttcgagaccagcctggcca

SEQ ID NO: 224119 - DNA, 20 bp, synthetic construct
  source 1..20: mol_type = other DNA
agttcgagaccagcctggcc

SEQ ID NO: 224120 - DNA, 20 bp, synthetic construct
  source 1..20: mol_type = other DNA
gagttcgagaccagcctggc

SEQ ID NO: 224121 - DNA, 20 bp, synthetic construct
  source 1..20: mol_type = other DNA
ggagttcgagaccagcctgg

SEQ ID NO: 224122 - DNA, 20 bp, synthetic construct
  source 1..20: mol_type = other DNA
aggagttcgagaccagcctg

SEQ ID NO: 224123 - DNA, 20 bp, synthetic construct
  source 1..20: mol_type = other DNA
caggagttcgagaccagcct

SEQ ID NO: 224124 - DNA, 20 bp, synthetic construct
  source 1..20: mol_type = other DNA
ccaggagttcgagaccagcc

SEQ ID NO: 224125 - DNA, 20 bp, synthetic construct
  source 1..20: mol_type = other DNA
gccaggagttcgagaccagc

SEQ ID NO: 224126 - DNA, 20 bp, synthetic construct
  source 1..20: mol_type = other DNA
ggccaggagttcgagaccag

SEQ ID NO: 224127 - DNA, 20 bp, synthetic construct
  source 1..20: mol_type = other DNA
aggccaggagttcgagacca

SEQ ID NO: 224128 - DNA, 20 bp, synthetic construct
  source 1..20: mol_type = other DNA
gaggccaggagttcgagacc

SEQ ID NO: 224129 - DNA, 20 bp, synthetic construct
  source 1..20: mol_type = other DNA
tgaggccaggagttcgagac

SEQ ID NO: 224130 - DNA, 20 bp, synthetic construct
  source 1..20: mol_type = other DNA
ttgaggccaggagttcgaga

SEQ ID NO: 224131 - DNA, 20 bp, synthetic construct
  source 1..20: mol_type = other DNA
cttgaggccaggagttcgag

SEQ ID NO: 224132 - DNA, 20 bp, synthetic construct
  source 1..20: mol_type = other DNA
acttgaggccaggagttcga

SEQ ID NO: 224133 - DNA, 20 bp, synthetic construct
  source 1..20: mol_type = other DNA
cacttgaggccaggagttcg

SEQ ID NO: 224134 - DNA, 20 bp, synthetic construct
  source 1..20: mol_type = other DNA
tcacttgaggccaggagttc

SEQ ID NO: 224135 - DNA, 20 bp, synthetic construct
  source 1..20: mol_type = other DNA
atcacttgaggccaggagtt

SEQ ID NO: 224136 - DNA, 20 bp, synthetic construct
  source 1..20: mol_type = other DNA
gatcacttgaggccaggagt

SEQ ID NO: 224137 - DNA, 20 bp, synthetic construct
  source 1..20: mol_type = other DNA
agatcacttgaggccaggag

SEQ ID NO: 224138 - DNA, 20 bp, synthetic construct
  source 1..20: mol_type = other DNA
cagatcacttgaggccagga

SEQ ID NO: 224139 - DNA, 20 bp, synthetic construct
  source 1..20: mol_type = other DNA
gcagatcacttgaggccagg

SEQ ID NO: 224140 - DNA, 20 bp, synthetic construct
  source 1..20: mol_type = other DNA
ggcagatcacttgaggccag

SEQ ID NO: 224141 - DNA, 20 bp, synthetic construct
  source 1..20: mol_type = other DNA
aggcagatcacttgaggcca

SEQ ID NO: 224142 - DNA, 20 bp, synthetic construct
  source 1..20: mol_type = other DNA
caggcagatcacttgaggcc

SEQ ID NO: 224143 - DNA, 20 bp, synthetic construct
  source 1..20: mol_type = other DNA
gcaggcagatcacttgaggc

SEQ ID NO: 224144 - DNA, 20 bp, synthetic construct
  source 1..20: mol_type = other DNA
ggcaggcagatcacttgagg

SEQ ID NO: 224145 - DNA, 20 bp, synthetic construct
  source 1..20: mol_type = other DNA
aggcaggcagatcacttgag

SEQ ID NO: 224146 - DNA, 20 bp, synthetic construct
  source 1..20: mol_type = other DNA
caggcaggcagatcacttga

SEQ ID NO: 224147 - DNA, 20 bp, synthetic construct
  source 1..20: mol_type = other DNA
tcaggcaggcagatcacttg

SEQ ID NO: 224148 - DNA, 20 bp, synthetic construct
  source 1..20: mol_type = other DNA
ctcaggcaggcagatcactt

SEQ ID NO: 224149 - DNA, 20 bp, synthetic construct
  source 1..20: mol_type = other DNA
gctcaggcaggcagatcact

SEQ ID NO: 224150 - DNA, 20 bp, synthetic construct
  source 1..20: mol_type = other DNA
ggctcaggcaggcagatcac

SEQ ID NO: 224151 - DNA, 20 bp, synthetic construct
  source 1..20: mol_type = other DNA
aggctcaggcaggcagatca

SEQ ID NO: 224152 - DNA, 20 bp, synthetic construct
  source 1..20: mol_type = other DNA
gaggctcaggcaggcagatc

SEQ ID NO: 224153 - DNA, 20 bp, synthetic construct
  source 1..20: mol_type = other DNA
ggaggctcaggcaggcagat

SEQ ID NO: 224154 - DNA, 20 bp, synthetic construct
  source 1..20: mol_type = other DNA
cggaggctcaggcaggcaga

SEQ ID NO: 224155 - DNA, 20 bp, synthetic construct
  source 1..20: mol_type = other DNA
ccggaggctcaggcaggcag

SEQ ID NO: 224156 - DNA, 20 bp, synthetic construct
  source 1..20: mol_type = other DNA
tccggaggctcaggcaggca

SEQ ID NO: 224157 - DNA, 20 bp, synthetic construct
  source 1..20: mol_type = other DNA
ttccggaggctcaggcaggc

SEQ ID NO: 224158 - DNA, 20 bp, synthetic construct
  source 1..20: mol_type = other DNA
cttccggaggctcaggcagg

SEQ ID NO: 224159 - DNA, 20 bp, synthetic construct
  source 1..20: mol_type = other DNA
acttccggaggctcaggcag

SEQ ID NO: 224160 - DNA, 20 bp, synthetic construct
  source 1..20: mol_type = other DNA
cacttccggaggctcaggca

SEQ ID NO: 224161 - DNA, 20 bp, synthetic construct
  source 1..20: mol_type = other DNA
gcacttccggaggctcaggc

SEQ ID NO: 224162 - DNA, 20 bp, synthetic construct
  source 1..20: mol_type = other DNA
agcacttccggaggctcagg

SEQ ID NO: 224163 - DNA, 20 bp, synthetic construct
  source 1..20: mol_type = other DNA
cagcacttccggaggctcag

SEQ ID NO: 224164 - DNA, 20 bp, synthetic construct
  source 1..20: mol_type = other DNA
ccagcacttccggaggctca

SEQ ID NO: 224165 - DNA, 20 bp, synthetic construct
  source 1..20: mol_type = other DNA
cccagcacttccggaggctc

SEQ ID NO: 224166 - DNA, 20 bp, synthetic construct
  source 1..20: mol_type = other DNA
tcccagcacttccggaggct

SEQ ID NO: 224167 - DNA, 20 bp, synthetic construct
  source 1..20: mol_type = other DNA
atcccagcacttccggaggc

SEQ ID NO: 224168 - DNA, 20 bp, synthetic construct
  source 1..20: mol_type = other DNA
aatcccagcacttccggagg

SEQ ID NO: 224169 - DNA, 20 bp, synthetic construct
  source 1..20: mol_type = other DNA
aaatcccagcacttccggag

SEQ ID NO: 224170 - DNA, 20 bp, synthetic construct
  source 1..20: mol_type = other DNA
gaaatcccagcacttccgga

SEQ ID NO: 224171 - DNA, 20 bp, synthetic construct
  source 1..20: mol_type = other DNA
tgaaatcccagcacttccgg

SEQ ID NO: 224172 - DNA, 20 bp, synthetic construct
  source 1..20: mol_type = other DNA
ctgaaatcccagcacttccg

SEQ ID NO: 224173 - DNA, 20 bp, synthetic construct
  source 1..20: mol_type = other DNA
cctgaaatcccagcacttcc

SEQ ID NO: 224174 - DNA, 20 bp, synthetic construct
  source 1..20: mol_type = other DNA
acctgaaatcccagcacttc

SEQ ID NO: 224175 - DNA, 20 bp, synthetic construct
  source 1..20: mol_type = other DNA
cacctgaaatcccagcactt

SEQ ID NO: 224176 - DNA, 20 bp, synthetic construct
  source 1..20: mol_type = other DNA
acacctgaaatcccagcact

SEQ ID NO: 224177 - DNA, 20 bp, synthetic construct
  source 1..20: mol_type = other DNA
cacacctgaaatcccagcac

SEQ ID NO: 224178 - DNA, 20 bp, synthetic construct
  source 1..20: mol_type = other DNA
tcacacctgaaatcccagca

SEQ ID NO: 224179 - DNA, 20 bp, synthetic construct
  source 1..20: mol_type = other DNA
ctcacacctgaaatcccagc

SEQ ID NO: 224180 - DNA, 20 bp, synthetic construct
  source 1..20: mol_type = other DNA
gctcacacctgaaatcccag

SEQ ID NO: 224181 - DNA, 20 bp, synthetic construct
  source 1..20: mol_type = other DNA
ggctcacacctgaaatccca

SEQ ID NO: 224182 - DNA, 20 bp, synthetic construct
  source 1..20: mol_type = other DNA
tggctcacacctgaaatccc

SEQ ID NO: 224183 - DNA, 20 bp, synthetic construct
  source 1..20: mol_type = other DNA
gtggctcacacctgaaatcc

SEQ ID NO: 224184 - DNA, 20 bp, synthetic construct
  source 1..20: mol_type = other DNA
ggtggctcacacctgaaatc

SEQ ID NO: 224185 - DNA, 20 bp, synthetic construct
  source 1..20: mol_type = other DNA
cggtggctcacacctgaaat

SEQ ID NO: 224186 - DNA, 20 bp, synthetic construct
  source 1..20: mol_type = other DNA
gcggtggctcacacctgaaa

SEQ ID NO: 224187 - DNA, 20 bp, synthetic construct
  source 1..20: mol_type = other DNA
tgcggtggctcacacctgaa

SEQ ID NO: 224188 - DNA, 20 bp, synthetic construct
  source 1..20: mol_type = other DNA
gtgcggtggctcacacctga

SEQ ID NO: 224189 - DNA, 20 bp, synthetic construct
  source 1..20: mol_type = other DNA
agtgcggtggctcacacctg

SEQ ID NO: 224190 - DNA, 20 bp, synthetic construct
  source 1..20: mol_type = other DNA
gagtgcggtggctcacacct

SEQ ID NO: 224191 - DNA, 20 bp, synthetic construct
  source 1..20: mol_type = other DNA
cgagtgcggtggctcacacc

SEQ ID NO: 224192 - DNA, 20 bp, synthetic construct
  source 1..20: mol_type = other DNA
ccgagtgcggtggctcacac

SEQ ID NO: 224193 - DNA, 20 bp, synthetic construct
  source 1..20: mol_type = other DNA
gccgagtgcggtggctcaca

SEQ ID NO: 224194 - DNA, 20 bp, synthetic construct
  source 1..20: mol_type = other DNA
agccgagtgcggtggctcac

SEQ ID NO: 224195 - DNA, 20 bp, synthetic construct
  source 1..20: mol_type = other DNA
gagccgagtgcggtggctca

SEQ ID NO: 224196 - DNA, 20 bp, synthetic construct
  source 1..20: mol_type = other DNA
ggagccgagtgcggtggctc

SEQ ID NO: 224197 - DNA, 20 bp, synthetic construct
  source 1..20: mol_type = other DNA
tggagccgagtgcggtggct

SEQ ID NO: 224198 - DNA, 20 bp, synthetic construct
  source 1..20: mol_type = other DNA
gtggagccgagtgcggtggc

SEQ ID NO: 224199 - DNA, 20 bp, synthetic construct
  source 1..20: mol_type = other DNA
tgtggagccgagtgcggtgg

SEQ ID NO: 224200 - DNA, 20 bp, synthetic construct
  source 1..20: mol_type = other DNA
gtgtggagccgagtgcggtg

SEQ ID NO: 224201 - DNA, 20 bp, synthetic construct
  source 1..20: mol_type = other DNA
agtgtggagccgagtgcggt

SEQ ID NO: 224202 - DNA, 20 bp, synthetic construct
  source 1..20: mol_type = other DNA
aagtgtggagccgagtgcgg

SEQ ID NO: 224203 - DNA, 20 bp, synthetic construct
  source 1..20: mol_type = other DNA
aaagtgtggagccgagtgcg

SEQ ID NO: 224204 - DNA, 20 bp, synthetic construct
  source 1..20: mol_type = other DNA
aaaagtgtggagccgagtgc

SEQ ID NO: 224205 - DNA, 20 bp, synthetic construct
  source 1..20: mol_type = other DNA
gaaaagtgtggagccgagtg

SEQ ID NO: 224206 - DNA, 20 bp, synthetic construct
  source 1..20: mol_type = other DNA
tgaaaagtgtggagccgagt

SEQ ID NO: 224207 - DNA, 20 bp, synthetic construct
  source 1..20: mol_type = other DNA
gtgaaaagtgtggagccgag

SEQ ID NO: 224208 - DNA, 20 bp, synthetic construct
  source 1..20: mol_type = other DNA
agtgaaaagtgtggagccga

SEQ ID NO: 224209 - DNA, 20 bp, synthetic construct
  source 1..20: mol_type = other DNA
aagtgaaaagtgtggagccg

SEQ ID NO: 224210 - DNA, 20 bp, synthetic construct
  source 1..20: mol_type = other DNA
taagtgaaaagtgtggagcc

SEQ ID NO: 224211 - DNA, 20 bp, synthetic construct
  source 1..20: mol_type = other DNA
ataagtgaaaagtgtggagc

SEQ ID NO: 224212 - DNA, 20 bp, synthetic construct
  source 1..20: mol_type = other DNA
aataagtgaaaagtgtggag

SEQ ID NO: 224213 - DNA, 20 bp, synthetic construct
  source 1..20: mol_type = other DNA
taataagtgaaaagtgtgga

SEQ ID NO: 224214 - DNA, 20 bp, synthetic construct
  source 1..20: mol_type = other DNA
ttaataagtgaaaagtgtgg

SEQ ID NO: 224215 - DNA, 20 bp, synthetic construct
  source 1..20: mol_type = other DNA
tttaataagtgaaaagtgtg

SEQ ID NO: 224216 - DNA, 20 bp, synthetic construct
  source 1..20: mol_type = other DNA
ttttaataagtgaaaagtgt

SEQ ID NO: 224217 - DNA, 20 bp, synthetic construct
  source 1..20: mol_type = other DNA
cttttaataagtgaaaagtg

SEQ ID NO: 224218 - DNA, 20 bp, synthetic construct
  source 1..20: mol_type = other DNA
tcttttaataagtgaaaagt

SEQ ID NO: 224219 - DNA, 20 bp, synthetic construct
  source 1..20: mol_type = other DNA
gtcttttaataagtgaaaag

SEQ ID NO: 224220 - DNA, 20 bp, synthetic construct
  source 1..20: mol_type = other DNA
agtcttttaataagtgaaaa

SEQ ID NO: 224221 - DNA, 20 bp, synthetic construct
  source 1..20: mol_type = other DNA
cagtcttttaataagtgaaa

SEQ ID NO: 224222 - DNA, 20 bp, synthetic construct
  source 1..20: mol_type = other DNA
acagtcttttaataagtgaa

SEQ ID NO: 224223 - DNA, 20 bp, synthetic construct
  source 1..20: mol_type = other DNA
cacagtcttttaataagtga

SEQ ID NO: 224224 - DNA, 20 bp, synthetic construct
  source 1..20: mol_type = other DNA
ccacagtcttttaataagtg

SEQ ID NO: 224225 - DNA, 20 bp, synthetic construct
  source 1..20: mol_type = other DNA
accacagtcttttaataagt

SEQ ID NO: 224226 - DNA, 20 bp, synthetic construct
  source 1..20: mol_type = other DNA
caccacagtcttttaataag

SEQ ID NO: 224227 - DNA, 20 bp, synthetic construct
  source 1..20: mol_type = other DNA
acaccacagtcttttaataa

SEQ ID NO: 224228 - DNA, 20 bp, synthetic construct
  source 1..20: mol_type = other DNA
gacaccacagtcttttaata

SEQ ID NO: 224229 - DNA, 20 bp, synthetic construct
  source 1..20: mol_type = other DNA
ggacaccacagtcttttaat

SEQ ID NO: 224230 - DNA, 20 bp, synthetic construct
  source 1..20: mol_type = other DNA
tggacaccacagtcttttaa

SEQ ID NO: 224231 - DNA, 20 bp, synthetic construct
  source 1..20: mol_type = other DNA
atggacaccacagtctttta

SEQ ID NO: 224232 - DNA, 20 bp, synthetic construct
  source 1..20: mol_type = other DNA
gatggacaccacagtctttt

SEQ ID NO: 224233 - DNA, 20 bp, synthetic construct
  source 1..20: mol_type = other DNA
tgatggacaccacagtcttt

SEQ ID NO: 224234 - DNA, 20 bp, synthetic construct
  source 1..20: mol_type = other DNA
ttgatggacaccacagtctt

SEQ ID NO: 224235 - DNA, 20 bp, synthetic construct
  source 1..20: mol_type = other DNA
attgatggacaccacagtct

SEQ ID NO: 224236 - DNA, 20 bp, synthetic construct
  source 1..20: mol_type = other DNA
cattgatggacaccacagtc

SEQ ID NO: 224237 - DNA, 20 bp, synthetic construct
  source 1..20: mol_type = other DNA
ccattgatggacaccacagt

SEQ ID NO: 224238 - DNA, 20 bp, synthetic construct
  source 1..20: mol_type = other DNA
tccattgatggacaccacag

SEQ ID NO: 224239 - DNA, 20 bp, synthetic construct
  source 1..20: mol_type = other DNA
atccattgatggacaccaca

SEQ ID NO: 224240 - DNA, 20 bp, synthetic construct
  source 1..20: mol_type = other DNA
catccattgatggacaccac

SEQ ID NO: 224241 - DNA, 20 bp, synthetic construct
  source 1..20: mol_type = other DNA
tcatccattgatggacacca

SEQ ID NO: 224242 - DNA, 20 bp, synthetic construct
  source 1..20: mol_type = other DNA
ttcatccattgatggacacc

SEQ ID NO: 224243 - DNA, 20 bp, synthetic construct
  source 1..20: mol_type = other DNA
attcatccattgatggacac

SEQ ID NO: 224244 - DNA, 20 bp, synthetic construct
  source 1..20: mol_type = other DNA
cattcatccattgatggaca

SEQ ID NO: 224245 - DNA, 20 bp, synthetic construct
  source 1..20: mol_type = other DNA
tcattcatccattgatggac

SEQ ID NO: 224246 - DNA, 20 bp, synthetic construct
  source 1..20: mol_type = other DNA
ttcattcatccattgatgga

SEQ ID NO: 224247 - DNA, 20 bp, synthetic construct
  source 1..20: mol_type = other DNA
attcattcatccattgatgg

SEQ ID NO: 224248 - DNA, 20 bp, synthetic construct
  source 1..20: mol_type = other DNA
tattcattcatccattgatg

SEQ ID NO: 224249 - DNA, 20 bp, synthetic construct
  source 1..20: mol_type = other DNA
ttattcattcatccattgat

SEQ ID NO: 224250 - DNA, 20 bp, synthetic construct
  source 1..20: mol_type = other DNA
tttattcattcatccattga

SEQ ID NO: 224251 - DNA, 20 bp, synthetic construct
  source 1..20: mol_type = other DNA
gtttattcattcatccattg

SEQ ID NO: 224252 - DNA, 20 bp, synthetic construct
  source 1..20: mol_type = other DNA
ggtttattcattcatccatt

SEQ ID NO: 224253 - DNA, 20 bp, synthetic construct
  source 1..20: mol_type = other DNA
tggtttattcattcatccat

SEQ ID NO: 224254 - DNA, 20 bp, synthetic construct
  source 1..20: mol_type = other DNA
ttggtttattcattcatcca

SEQ ID NO: 224255 - DNA, 20 bp, synthetic construct
  source 1..20: mol_type = other DNA
attggtttattcattcatcc

SEQ ID NO: 224256 - DNA, 20 bp, synthetic construct
  source 1..20: mol_type = other DNA
cattggtttattcattcatc

SEQ ID NO: 224257 - DNA, 20 bp, synthetic construct
  source 1..20: mol_type = other DNA
acattggtttattcattcat

SEQ ID NO: 224258 - DNA, 20 bp, synthetic construct
  source 1..20: mol_type = other DNA
cacattggtttattcattca

SEQ ID NO: 224259 - DNA, 20 bp, synthetic construct
  source 1..20: mol_type = other DNA
ccacattggtttattcattc

SEQ ID NO: 224260 - DNA, 20 bp, synthetic construct
  source 1..20: mol_type = other DNA
tccacattggtttattcatt

SEQ ID NO: 224261 - DNA, 20 bp, synthetic construct
  source 1..20: mol_type = other DNA
gtccacattggtttattcat

SEQ ID NO: 224262 - DNA, 20 bp, synthetic construct
  source 1..20: mol_type = other DNA
agtccacattggtttattca

SEQ ID NO: 224263 - DNA, 20 bp, synthetic construct
  source 1..20: mol_type = other DNA
tagtccacattggtttattc

SEQ ID NO: 224264 - DNA, 20 bp, synthetic construct
  source 1..20: mol_type = other DNA
atagtccacattggtttatt

SEQ ID NO: 224265 - DNA, 20 bp, synthetic construct
  source 1..20: mol_type = other DNA
gatagtccacattggtttat

SEQ ID NO: 224266 - DNA, 20 bp, synthetic construct
  source 1..20: mol_type = other DNA
ggatagtccacattggttta

SEQ ID NO: 224267 - DNA, 20 bp, synthetic construct
  source 1..20: mol_type = other DNA
gggatagtccacattggttt

SEQ ID NO: 224268 - DNA, 20 bp, synthetic construct
  source 1..20: mol_type = other DNA
agggatagtccacattggtt

SEQ ID NO: 224269 - DNA, 20 bp, synthetic construct
  source 1..20: mol_type = other DNA
gagggatagtccacattggt

SEQ ID NO: 224270 - DNA, 20 bp, synthetic construct
  source 1..20: mol_type = other DNA
ggagggatagtccacattgg

SEQ ID NO: 224271 - DNA, 20 bp, synthetic construct
  source 1..20: mol_type = other DNA
gggagggatagtccacattg

SEQ ID NO: 224272 - DNA, 20 bp, synthetic construct
  source 1..20: mol_type = other DNA
tgggagggatagtccacatt

SEQ ID NO: 224273 - DNA, 20 bp, synthetic construct
  source 1..20: mol_type = other DNA
atgggagggatagtccacat

SEQ ID NO: 224274 - DNA, 20 bp, synthetic construct
  source 1..20: mol_type = other DNA
aatgggagggatagtccaca

SEQ ID NO: 224275 - DNA, 20 bp, synthetic construct
  source 1..20: mol_type = other DNA
taatgggagggatagtccac

SEQ ID NO: 224276 - DNA, 20 bp, synthetic construct
  source 1..20: mol_type = other DNA
gtaatgggagggatagtcca

SEQ ID NO: 224277 - DNA, 20 bp, synthetic construct
  source 1..20: mol_type = other DNA
ggtaatgggagggatagtcc

SEQ ID NO: 224278 - DNA, 20 bp, synthetic construct
  source 1..20: mol_type = other DNA
gggtaatgggagggatagtc

SEQ ID NO: 224279 - DNA, 20 bp, synthetic construct
  source 1..20: mol_type = other DNA
tgggtaatgggagggatagt

SEQ ID NO: 224280 - DNA, 20 bp, synthetic construct
  source 1..20: mol_type = other DNA
ttgggtaatgggagggatag

SEQ ID NO: 224281 - DNA, 20 bp, synthetic construct
  source 1..20: mol_type = other DNA
cttgggtaatgggagggata

SEQ ID NO: 224282 - DNA, 20 bp, synthetic construct
  source 1..20: mol_type = other DNA
ccttgggtaatgggagggat

SEQ ID NO: 224283 - DNA, 20 bp, synthetic construct
  source 1..20: mol_type = other DNA
tccttgggtaatgggaggga

SEQ ID NO: 224284 - DNA, 20 bp, synthetic construct
  source 1..20: mol_type = other DNA
ttccttgggtaatgggaggg

SEQ ID NO: 224285 - DNA, 20 bp, synthetic construct
  source 1..20: mol_type = other DNA
attccttgggtaatgggagg

SEQ ID NO: 224286 - DNA, 20 bp, synthetic construct
  source 1..20: mol_type = other DNA
cattccttgggtaatgggag

SEQ ID NO: 224287 - DNA, 20 bp, synthetic construct
  source 1..20: mol_type = other DNA
tcattccttgggtaatggga

SEQ ID NO: 224288 - DNA, 20 bp, synthetic construct
  source 1..20: mol_type = other DNA
ttcattccttgggtaatggg

SEQ ID NO: 224289 - DNA, 20 bp, synthetic construct
  source 1..20: mol_type = other DNA
cttcattccttgggtaatgg

SEQ ID NO: 224290 - DNA, 20 bp, synthetic construct
  source 1..20: mol_type = other DNA
gcttcattccttgggtaatg

SEQ ID NO: 224291 - DNA, 20 bp, synthetic construct
  source 1..20: mol_type = other DNA
tgcttcattccttgggtaat

SEQ ID NO: 224292 - DNA, 20 bp, synthetic construct
  source 1..20: mol_type = other DNA
gtgcttcattccttgggtaa

SEQ ID NO: 224293 - DNA, 20 bp, synthetic construct
  source 1..20: mol_type = other DNA
cgtgcttcattccttgggta

SEQ ID NO: 224294 - DNA, 20 bp, synthetic construct
  source 1..20: mol_type = other DNA
ccgtgcttcattccttgggt

SEQ ID NO: 224295 - DNA, 20 bp, synthetic construct
  source 1..20: mol_type = other DNA
tccgtgcttcattccttggg

SEQ ID NO: 224296 - DNA, 20 bp, synthetic construct
  source 1..20: mol_type = other DNA
ctccgtgcttcattccttgg

SEQ ID NO: 224297 - DNA, 20 bp, synthetic construct
  source 1..20: mol_type = other DNA
gctccgtgcttcattccttg

SEQ ID NO: 224298 - DNA, 20 bp, synthetic construct
  source 1..20: mol_type = other DNA
ggctccgtgcttcattcctt

SEQ ID NO: 224299 - DNA, 20 bp, synthetic construct
  source 1..20: mol_type = other DNA
cggctccgtgcttcattcct

SEQ ID NO: 224300 - DNA, 20 bp, synthetic construct
  source 1..20: mol_type = other DNA
acggctccgtgcttcattcc

SEQ ID NO: 224301 - DNA, 20 bp, synthetic construct
  source 1..20: mol_type = other DNA
cacggctccgtgcttcattc

SEQ ID NO: 224302 - DNA, 20 bp, synthetic construct
  source 1..20: mol_type = other DNA
gcacggctccgtgcttcatt

SEQ ID NO: 224303 - DNA, 20 bp, synthetic construct
  source 1..20: mol_type = other DNA
ggcacggctccgtgcttcat

SEQ ID NO: 224304 - DNA, 20 bp, synthetic construct
  source 1..20: mol_type = other DNA
tggcacggctccgtgcttca

SEQ ID NO: 224305 - DNA, 20 bp, synthetic construct
  source 1..20: mol_type = other DNA
ttggcacggctccgtgcttc

SEQ ID NO: 224306 - DNA, 20 bp, synthetic construct
  source 1..20: mol_type = other DNA
cttggcacggctccgtgctt

SEQ ID NO: 224307 - DNA, 20 bp, synthetic construct
  source 1..20: mol_type = other DNA
tcttggcacggctccgtgct

SEQ ID NO: 224308 - DNA, 20 bp, synthetic construct
  source 1..20: mol_type = other DNA
atcttggcacggctccgtgc

SEQ ID NO: 224309 - DNA, 20 bp, synthetic construct
  source 1..20: mol_type = other DNA
gatcttggcacggctccgtg

SEQ ID NO: 224310 - DNA, 20 bp, synthetic construct
  source 1..20: mol_type = other DNA
agatcttggcacggctccgt

SEQ ID NO: 224311 - DNA, 20 bp, synthetic construct
  source 1..20: mol_type = other DNA
cagatcttggcacggctccg

SEQ ID NO: 224312 - DNA, 20 bp, synthetic construct
  source 1..20: mol_type = other DNA
ccagatcttggcacggctcc

SEQ ID NO: 224313 - DNA, 20 bp, synthetic construct
  source 1..20: mol_type = other DNA
tccagatcttggcacggctc

SEQ ID NO: 224314 - DNA, 20 bp, synthetic construct
  source 1..20: mol_type = other DNA
atccagatcttggcacggct

SEQ ID NO: 224315 - DNA, 20 bp, synthetic construct
  source 1..20: mol_type = other DNA
aatccagatcttggcacggc

SEQ ID NO: 224316 - DNA, 20 bp, synthetic construct
  source 1..20: mol_type = other DNA
gaatccagatcttggcacgg

SEQ ID NO: 224317 - DNA, 20 bp, synthetic construct
  source 1..20: mol_type = other DNA
tgaatccagatcttggcacg

SEQ ID NO: 224318 - DNA, 20 bp, synthetic construct
  source 1..20: mol_type = other DNA
gtgaatccagatcttggcac

SEQ ID NO: 224319 - DNA, 20 bp, synthetic construct
  source 1..20: mol_type = other DNA
tgtgaatccagatcttggca

SEQ ID NO: 224320 - DNA, 20 bp, synthetic construct
  source 1..20: mol_type = other DNA
ctgtgaatccagatcttggc

SEQ ID NO: 224321 - DNA, 20 bp, synthetic construct
  source 1..20: mol_type = other DNA
actgtgaatccagatcttgg

SEQ ID NO: 224322 - DNA, 20 bp, synthetic construct
  source 1..20: mol_type = other DNA
cactgtgaatccagatcttg

SEQ ID NO: 224323 - DNA, 20 bp, synthetic construct
  source 1..20: mol_type = other DNA
tcactgtgaatccagatctt

SEQ ID NO: 224324 - DNA, 20 bp, synthetic construct
  source 1..20: mol_type = other DNA
ttcactgtgaatccagatct

SEQ ID NO: 224325 - DNA, 20 bp, synthetic construct
  source 1..20: mol_type = other DNA
tttcactgtgaatccagatc

SEQ ID NO: 224326 - DNA, 20 bp, synthetic construct
  source 1..20: mol_type = other DNA
ctttcactgtgaatccagat

SEQ ID NO: 224327 - DNA, 20 bp, synthetic construct
  source 1..20: mol_type = other DNA
tctttcactgtgaatccaga

SEQ ID NO: 224328 - DNA, 20 bp, synthetic construct
  source 1..20: mol_type = other DNA
ttctttcactgtgaatccag

SEQ ID NO: 224329 - DNA, 20 bp, synthetic construct
  source 1..20: mol_type = other DNA
cttctttcactgtgaatcca

SEQ ID NO: 224330 - DNA, 20 bp, synthetic construct
  source 1..20: mol_type = other DNA
gcttctttcactgtgaatcc

SEQ ID NO: 224331 - DNA, 20 bp, synthetic construct
  source 1..20: mol_type = other DNA
ggcttctttcactgtgaatc

SEQ ID NO: 224332 - DNA, 20 bp, synthetic construct
  source 1..20: mol_type = other DNA
tggcttctttcactgtgaat

SEQ ID NO: 224333 - DNA, 20 bp, synthetic construct
  source 1..20: mol_type = other DNA
ctggcttctttcactgtgaa

SEQ ID NO: 224334 - DNA, 20 bp, synthetic construct
  source 1..20: mol_type = other DNA
actggcttctttcactgtga

SEQ ID NO: 224335 - DNA, 20 bp, synthetic construct
  source 1..20: mol_type = other DNA
gactggcttctttcactgtg

SEQ ID NO: 224336 - DNA, 20 bp, synthetic construct
  source 1..20: mol_type = other DNA
tgactggcttctttcactgt

SEQ ID NO: 224337 - DNA, 20 bp, synthetic construct
  source 1..20: mol_type = other DNA
gtgactggcttctttcactg

SEQ ID NO: 224338 - DNA, 20 bp, synthetic construct
  source 1..20: mol_type = other DNA
ggtgactggcttctttcact

SEQ ID NO: 224339 - DNA, 20 bp, synthetic construct
  source 1..20: mol_type = other DNA
tggtgactggcttctttcac

SEQ ID NO: 224340 - DNA, 20 bp, synthetic construct
  source 1..20: mol_type = other DNA
ttggtgactggcttctttca

SEQ ID NO: 224341 - DNA, 20 bp, synthetic construct
  source 1..20: mol_type = other DNA
tttggtgactggcttctttc

SEQ ID NO: 224342 - DNA, 20 bp, synthetic construct
  source 1..20: mol_type = other DNA
ttttggtgactggcttcttt

SEQ ID NO: 224343 - DNA, 20 bp, synthetic construct
  source 1..20: mol_type = other DNA
cttttggtgactggcttctt

SEQ ID NO: 224344 - DNA, 20 bp, synthetic construct
  source 1..20: mol_type = other DNA
gcttttggtgactggcttct

SEQ ID NO: 224345 - DNA, 20 bp, synthetic construct
  source 1..20: mol_type = other DNA
ggcttttggtgactggcttc

SEQ ID NO: 224346 - DNA, 20 bp, synthetic construct
  source 1..20: mol_type = other DNA
tggcttttggtgactggctt

SEQ ID NO: 224347 - DNA, 20 bp, synthetic construct
  source 1..20: mol_type = other DNA
gtggcttttggtgactggct

SEQ ID NO: 224348 - DNA, 20 bp, synthetic construct
  source 1..20: mol_type = other DNA
cgtggcttttggtgactggc

SEQ ID NO: 224349 - DNA, 20 bp, synthetic construct
  source 1..20: mol_type = other DNA
acgtggcttttggtgactgg

SEQ ID NO: 224350 - DNA, 20 bp, synthetic construct
  source 1..20: mol_type = other DNA
cacgtggcttttggtgactg

SEQ ID NO: 224351 - DNA, 20 bp, synthetic construct
  source 1..20: mol_type = other DNA
gcacgtggcttttggtgact

SEQ ID NO: 224352 - DNA, 20 bp, synthetic construct
  source 1..20: mol_type = other DNA
agcacgtggcttttggtgac

SEQ ID NO: 224353 - DNA, 20 bp, synthetic construct
  source 1..20: mol_type = other DNA
cagcacgtggcttttggtga

SEQ ID NO: 224354 - DNA, 20 bp, synthetic construct
  source 1..20: mol_type = other DNA
acagcacgtggcttttggtg

SEQ ID NO: 224355 - DNA, 20 bp, synthetic construct
  source 1..20: mol_type = other DNA
cacagcacgtggcttttggt

SEQ ID NO: 224356 - DNA, 20 bp, synthetic construct
  source 1..20: mol_type = other DNA
acacagcacgtggcttttgg

SEQ ID NO: 224357 - DNA, 20 bp, synthetic construct
  source 1..20: mol_type = other DNA
cacacagcacgtggcttttg

SEQ ID NO: 224358 - DNA, 20 bp, synthetic construct
  source 1..20: mol_type = other DNA
tcacacagcacgtggctttt

SEQ ID NO: 224359 - DNA, 20 bp, synthetic construct
  source 1..20: mol_type = other DNA
gtcacacagcacgtggcttt

SEQ ID NO: 224360 - DNA, 20 bp, synthetic construct
  source 1..20: mol_type = other DNA
agtcacacagcacgtggctt

SEQ ID NO: 224361 - DNA, 20 bp, synthetic construct
  source 1..20: mol_type = other DNA
aagtcacacagcacgtggct

SEQ ID NO: 224362 - DNA, 20 bp, synthetic construct
  source 1..20: mol_type = other DNA
gaagtcacacagcacgtggc

SEQ ID NO: 224363 - DNA, 20 bp, synthetic construct
  source 1..20: mol_type = other DNA
ggaagtcacacagcacgtgg

SEQ ID NO: 224364 - DNA, 20 bp, synthetic construct
  source 1..20: mol_type = other DNA
gggaagtcacacagcacgtg

SEQ ID NO: 224365 - DNA, 20 bp, synthetic construct
  source 1..20: mol_type = other DNA
agggaagtcacacagcacgt

SEQ ID NO: 224366 - DNA, 20 bp, synthetic construct
  source 1..20: mol_type = other DNA
aagggaagtcacacagcacg

SEQ ID NO: 224367 - DNA, 20 bp, synthetic construct
  source 1..20: mol_type = other DNA
taagggaagtcacacagcac

SEQ ID NO: 224368 - DNA, 20 bp, synthetic construct
  source 1..20: mol_type = other DNA
ataagggaagtcacacagca

SEQ ID NO: 224369 - DNA, 20 bp, synthetic construct
  source 1..20: mol_type = other DNA
tataagggaagtcacacagc

SEQ ID NO: 224370 - DNA, 20 bp, synthetic construct
  source 1..20: mol_type = other DNA
gtataagggaagtcacacag

SEQ ID NO: 224371 - DNA, 20 bp, synthetic construct
  source 1..20: mol_type = other DNA
cgtataagggaagtcacaca

SEQ ID NO: 224372 - DNA, 20 bp, synthetic construct
  source 1..20: mol_type = other DNA
tcgtataagggaagtcacac

SEQ ID NO: 224373 - DNA, 20 bp, synthetic construct
  source 1..20: mol_type = other DNA
ttcgtataagggaagtcaca

SEQ ID NO: 224374 - DNA, 20 bp, synthetic construct
  source 1..20: mol_type = other DNA
tttcgtataagggaagtcac

SEQ ID NO: 224375 - DNA, 20 bp, synthetic construct
  source 1..20: mol_type = other DNA
atttcgtataagggaagtca

SEQ ID NO: 224376 - DNA, 20 bp, synthetic construct
  source 1..20: mol_type = other DNA
tatttcgtataagggaagtc

SEQ ID NO: 224377 - DNA, 20 bp, synthetic construct
  source 1..20: mol_type = other DNA
atatttcgtataagggaagt

SEQ ID NO: 224378 - DNA, 20 bp, synthetic construct
  source 1..20: mol_type = other DNA
gatatttcgtataagggaag

SEQ ID NO: 224379 - DNA, 20 bp, synthetic construct
  source 1..20: mol_type = other DNA
ggatatttcgtataagggaa

SEQ ID NO: 224380 - DNA, 20 bp, synthetic construct
  source 1..20: mol_type = other DNA
tggatatttcgtataaggga

SEQ ID NO: 224381 - DNA, 20 bp, synthetic construct
  source 1..20: mol_type = other DNA
ctggatatttcgtataaggg

SEQ ID NO: 224382 - DNA, 20 bp, synthetic construct
  source 1..20: mol_type = other DNA
tctggatatttcgtataagg

SEQ ID NO: 224383 - DNA, 20 bp, synthetic construct
  source 1..20: mol_type = other DNA
ttctggatatttcgtataag

SEQ ID NO: 224384 - DNA, 20 bp, synthetic construct
  source 1..20: mol_type = other DNA
cttctggatatttcgtataa

SEQ ID NO: 224385 - DNA, 20 bp, synthetic construct
  source 1..20: mol_type = other DNA
tcttctggatatttcgtata

SEQ ID NO: 224386 - DNA, 20 bp, synthetic construct
  source 1..20: mol_type = other DNA
ctcttctggatatttcgtat

SEQ ID NO: 224387 - DNA, 20 bp, synthetic construct
  source 1..20: mol_type = other DNA
tctcttctggatatttcgta

SEQ ID NO: 224388 - DNA, 20 bp, synthetic construct
  source 1..20: mol_type = other DNA
atctcttctggatatttcgt

SEQ ID NO: 224389 - DNA, 20 bp, synthetic construct
  source 1..20: mol_type = other DNA
tatctcttctggatatttcg

SEQ ID NO: 224390 - DNA, 20 bp, synthetic construct
  source 1..20: mol_type = other DNA
gtatctcttctggatatttc

SEQ ID NO: 224391 - DNA, 20 bp, synthetic construct
  source 1..20: mol_type = other DNA
tgtatctcttctggatattt

SEQ ID NO: 224392 - DNA, 20 bp, synthetic construct
  source 1..20: mol_type = other DNA
atgtatctcttctggatatt

SEQ ID NO: 224393 - DNA, 20 bp, synthetic construct
  source 1..20: mol_type = other DNA
gatgtatctcttctggatat

SEQ ID NO: 224394 - DNA, 20 bp, synthetic construct
  source 1..20: mol_type = other DNA
ggatgtatctcttctggata

SEQ ID NO: 224395 - DNA, 20 bp, synthetic construct
  source 1..20: mol_type = other DNA
tggatgtatctcttctggat

SEQ ID NO: 224396 - DNA, 20 bp, synthetic construct
  source 1..20: mol_type = other DNA
atggatgtatctcttctgga

SEQ ID NO: 224397 - DNA, 20 bp, synthetic construct
  source 1..20: mol_type = other DNA
catggatgtatctcttctgg

SEQ ID NO: 224398 - DNA, 20 bp, synthetic construct
  source 1..20: mol_type = other DNA
ccatggatgtatctcttctg

SEQ ID NO: 224399 - DNA, 20 bp, synthetic construct
  source 1..20: mol_type = other DNA
accatggatgtatctcttct

SEQ ID NO: 224400 - DNA, 20 bp, synthetic construct
  source 1..20: mol_type = other DNA
caccatggatgtatctcttc

SEQ ID NO: 224401 - DNA, 20 bp, synthetic construct
  source 1..20: mol_type = other DNA
tcaccatggatgtatctctt

SEQ ID NO: 224402 - DNA, 20 bp, synthetic construct
  source 1..20: mol_type = other DNA
gtcaccatggatgtatctct

SEQ ID NO: 224403 - DNA, 20 bp, synthetic construct
  source 1..20: mol_type = other DNA
tgtcaccatggatgtatctc

SEQ ID NO: 224404 - DNA, 20 bp, synthetic construct
  source 1..20: mol_type = other DNA
ctgtcaccatggatgtatct

SEQ ID NO: 224405 - DNA, 20 bp, synthetic construct
  source 1..20: mol_type = other DNA
tctgtcaccatggatgtatc

SEQ ID NO: 224406 - DNA, 20 bp, synthetic construct
  source 1..20: mol_type = other DNA
ttctgtcaccatggatgtat

SEQ ID NO: 224407 - DNA, 20 bp, synthetic construct
  source 1..20: mol_type = other DNA
tttctgtcaccatggatgta

SEQ ID NO: 224408 - DNA, 20 bp, synthetic construct
  source 1..20: mol_type = other DNA
ctttctgtcaccatggatgt

SEQ ID NO: 224409 - DNA, 20 bp, synthetic construct
  source 1..20: mol_type = other DNA
actttctgtcaccatggatg

SEQ ID NO: 224410 - DNA, 20 bp, synthetic construct
  source 1..20: mol_type = other DNA
tactttctgtcaccatggat

SEQ ID NO: 224411 - DNA, 20 bp, synthetic construct
  source 1..20: mol_type = other DNA
ctactttctgtcaccatgga

SEQ ID NO: 224412 - DNA, 20 bp, synthetic construct
  source 1..20: mol_type = other DNA
tctactttctgtcaccatgg

SEQ ID NO: 224413 - DNA, 20 bp, synthetic construct
  source 1..20: mol_type = other DNA
atctactttctgtcaccatg

SEQ ID NO: 224414 - DNA, 20 bp, synthetic construct
  source 1..20: mol_type = other DNA
catctactttctgtcaccat

SEQ ID NO: 224415 - DNA, 20 bp, synthetic construct
  source 1..20: mol_type = other DNA
tcatctactttctgtcacca

SEQ ID NO: 224416 - DNA, 20 bp, synthetic construct
  source 1..20: mol_type = other DNA
ctcatctactttctgtcacc

SEQ ID NO: 224417 - DNA, 20 bp, synthetic construct
  source 1..20: mol_type = other DNA
gctcatctactttctgtcac

SEQ ID NO: 224418 - DNA, 20 bp, synthetic construct
  source 1..20: mol_type = other DNA
tgctcatctactttctgtca

SEQ ID NO: 224419 - DNA, 20 bp, synthetic construct
  source 1..20: mol_type = other DNA
ctgctcatctactttctgtc

SEQ ID NO: 224420 - DNA, 20 bp, synthetic construct
  source 1..20: mol_type = other DNA
gctgctcatctactttctgt

SEQ ID NO: 224421 - DNA, 20 bp, synthetic construct
  source 1..20: mol_type = other DNA
agctgctcatctactttctg

SEQ ID NO: 224422 - DNA, 20 bp, synthetic construct
  source 1..20: mol_type = other DNA
cagctgctcatctactttct

SEQ ID NO: 224423 - DNA, 20 bp, synthetic construct
  source 1..20: mol_type = other DNA
ccagctgctcatctactttc

SEQ ID NO: 224424 - DNA, 20 bp, synthetic construct
  source 1..20: mol_type = other DNA
cccagctgctcatctacttt

SEQ ID NO: 224425 - DNA, 20 bp, synthetic construct
  source 1..20: mol_type = other DNA
ccccagctgctcatctactt

SEQ ID NO: 224426 - DNA, 20 bp, synthetic construct
  source 1..20: mol_type = other DNA
tccccagctgctcatctact

SEQ ID NO: 224427 - DNA, 20 bp, synthetic construct
  source 1..20: mol_type = other DNA
gtccccagctgctcatctac

SEQ ID NO: 224428 - DNA, 20 bp, synthetic construct
  source 1..20: mol_type = other DNA
agtccccagctgctcatcta

SEQ ID NO: 224429 - DNA, 20 bp, synthetic construct
  source 1..20: mol_type = other DNA
cagtccccagctgctcatct

SEQ ID NO: 224430 - DNA, 20 bp, synthetic construct
  source 1..20: mol_type = other DNA
ccagtccccagctgctcatc

SEQ ID NO: 224431 - DNA, 20 bp, synthetic construct
  source 1..20: mol_type = other DNA
gccagtccccagctgctcat

SEQ ID NO: 224432 - DNA, 20 bp, synthetic construct
  source 1..20: mol_type = other DNA
cgccagtccccagctgctca

SEQ ID NO: 224433 - DNA, 20 bp, synthetic construct
  source 1..20: mol_type = other DNA
tcgccagtccccagctgctc

SEQ ID NO: 224434 - DNA, 20 bp, synthetic construct
  source 1..20: mol_type = other DNA
ttcgccagtccccagctgct

SEQ ID NO: 224435 - DNA, 20 bp, synthetic construct
  source 1..20: mol_type = other DNA
cttcgccagtccccagctgc

SEQ ID NO: 224436 - DNA, 20 bp, synthetic construct
  source 1..20: mol_type = other DNA
ccttcgccagtccccagctg

SEQ ID NO: 224437 - DNA, 20 bp, synthetic construct
  source 1..20: mol_type = other DNA
cccttcgccagtccccagct

SEQ ID NO: 224438 - DNA, 20 bp, synthetic construct
  source 1..20: mol_type = other DNA
ccccttcgccagtccccagc

SEQ ID NO: 224439 - DNA, 20 bp, synthetic construct
  source 1..20: mol_type = other DNA
tccccttcgccagtccccag

SEQ ID NO: 224440 - DNA, 20 bp, synthetic construct
  source 1..20: mol_type = other DNA
ctccccttcgccagtcccca

SEQ ID NO: 224441 - DNA, 20 bp, synthetic construct
  source 1..20: mol_type = other DNA
tctccccttcgccagtcccc

SEQ ID NO: 224442 - DNA, 20 bp, synthetic construct
  source 1..20: mol_type = other DNA
ttctccccttcgccagtccc

SEQ ID NO: 224443 - DNA, 20 bp, synthetic construct
  source 1..20: mol_type = other DNA
cttctccccttcgccagtcc

SEQ ID NO: 224444 - DNA, 20 bp, synthetic construct
  source 1..20: mol_type = other DNA
ccttctccccttcgccagtc

SEQ ID NO: 224445 - DNA, 20 bp, synthetic construct
  source 1..20: mol_type = other DNA
cccttctccccttcgccagt

SEQ ID NO: 224446 - DNA, 20 bp, synthetic construct
  source 1..20: mol_type = other DNA
ccccttctccccttcgccag

SEQ ID NO: 224447 - DNA, 20 bp, synthetic construct
  source 1..20: mol_type = other DNA
cccccttctccccttcgcca

SEQ ID NO: 224448 - DNA, 20 bp, synthetic construct
  source 1..20: mol_type = other DNA
tcccccttctccccttcgcc

SEQ ID NO: 224449 - DNA, 20 bp, synthetic construct
  source 1..20: mol_type = other DNA
ctcccccttctccccttcgc

SEQ ID NO: 224450 - DNA, 20 bp, synthetic construct
  source 1..20: mol_type = other DNA
gctcccccttctccccttcg

SEQ ID NO: 224451 - DNA, 20 bp, synthetic construct
  source 1..20: mol_type = other DNA
tgctcccccttctccccttc

SEQ ID NO: 224452 - DNA, 20 bp, synthetic construct
  source 1..20: mol_type = other DNA
ctgctcccccttctcccctt

SEQ ID NO: 224453 - DNA, 20 bp, synthetic construct
  source 1..20: mol_type = other DNA
gctgctcccccttctcccct

SEQ ID NO: 224454 - DNA, 20 bp, synthetic construct
  source 1..20: mol_type = other DNA
agctgctcccccttctcccc

SEQ ID NO: 224455 - DNA, 20 bp, synthetic construct
  source 1..20: mol_type = other DNA
cagctgctcccccttctccc

SEQ ID NO: 224456 - DNA, 20 bp, synthetic construct
  source 1..20: mol_type = other DNA
acagctgctcccccttctcc

SEQ ID NO: 224457 - DNA, 20 bp, synthetic construct
  source 1..20: mol_type = other DNA
gacagctgctcccccttctc

SEQ ID NO: 224458 - DNA, 20 bp, synthetic construct
  source 1..20: mol_type = other DNA
agacagctgctcccccttct

SEQ ID NO: 224459 - DNA, 20 bp, synthetic construct
  source 1..20: mol_type = other DNA
tagacagctgctcccccttc

SEQ ID NO: 224460 - DNA, 20 bp, synthetic construct
  source 1..20: mol_type = other DNA
atagacagctgctccccctt

SEQ ID NO: 224461 - DNA, 20 bp, synthetic construct
  source 1..20: mol_type = other DNA
catagacagctgctccccct

SEQ ID NO: 224462 - DNA, 20 bp, synthetic construct
  source 1..20: mol_type = other DNA
tcatagacagctgctccccc

SEQ ID NO: 224463 - DNA, 20 bp, synthetic construct
  source 1..20: mol_type = other DNA
ctcatagacagctgctcccc

SEQ ID NO: 224464 - DNA, 20 bp, synthetic construct
  source 1..20: mol_type = other DNA
cctcatagacagctgctccc

SEQ ID NO: 224465 - DNA, 20 bp, synthetic construct
  source 1..20: mol_type = other DNA
acctcatagacagctgctcc

SEQ ID NO: 224466 - DNA, 20 bp, synthetic construct
  source 1..20: mol_type = other DNA
gacctcatagacagctgctc

SEQ ID NO: 224467 - DNA, 20 bp, synthetic construct
  source 1..20: mol_type = other DNA
ggacctcatagacagctgct

SEQ ID NO: 224468 - DNA, 20 bp, synthetic construct
  source 1..20: mol_type = other DNA
tggacctcatagacagctgc

SEQ ID NO: 224469 - DNA, 20 bp, synthetic construct
  source 1..20: mol_type = other DNA
ctggacctcatagacagctg

SEQ ID NO: 224470 - DNA, 20 bp, synthetic construct
  source 1..20: mol_type = other DNA
gctggacctcatagacagct

SEQ ID NO: 224471 - DNA, 20 bp, synthetic construct
  source 1..20: mol_type = other DNA
ggctggacctcatagacagc

SEQ ID NO: 224472 - DNA, 20 bp, synthetic construct
  source 1..20: mol_type = other DNA
aggctggacctcatagacag

SEQ ID NO: 224473 - DNA, 20 bp, synthetic construct
  source 1..20: mol_type = other DNA
aaggctggacctcatagaca

SEQ ID NO: 224474 - DNA, 20 bp, synthetic construct
  source 1..20: mol_type = other DNA
aaaggctggacctcatagac

SEQ ID NO: 224475 - DNA, 20 bp, synthetic construct
  source 1..20: mol_type = other DNA
gaaaggctggacctcataga

SEQ ID NO: 224476 - DNA, 20 bp, synthetic construct
  source 1..20: mol_type = other DNA
agaaaggctggacctcatag

SEQ ID NO: 224477 - DNA, 20 bp, synthetic construct
  source 1..20: mol_type = other DNA
aagaaaggctggacctcata

SEQ ID NO: 224478 - DNA, 20 bp, synthetic construct
  source 1..20: mol_type = other DNA
gaagaaaggctggacctcat

SEQ ID NO: 224479 - DNA, 20 bp, synthetic construct
  source 1..20: mol_type = other DNA
agaagaaaggctggacctca

SEQ ID NO: 224480 - DNA, 20 bp, synthetic construct
  source 1..20: mol_type = other DNA
cagaagaaaggctggacctc

SEQ ID NO: 224481 - DNA, 20 bp, synthetic construct
  source 1..20: mol_type = other DNA
ccagaagaaaggctggacct

SEQ ID NO: 224482 - DNA, 20 bp, synthetic construct
  source 1..20: mol_type = other DNA
cccagaagaaaggctggacc

SEQ ID NO: 224483 - DNA, 20 bp, synthetic construct
  source 1..20: mol_type = other DNA
acccagaagaaaggctggac

SEQ ID NO: 224484 - DNA, 20 bp, synthetic construct
  source 1..20: mol_type = other DNA
aacccagaagaaaggctgga

SEQ ID NO: 224485 - DNA, 20 bp, synthetic construct
  source 1..20: mol_type = other DNA
aaacccagaagaaaggctgg

SEQ ID NO: 224486 - DNA, 20 bp, synthetic construct
  source 1..20: mol_type = other DNA
caaacccagaagaaaggctg

SEQ ID NO: 224487 - DNA, 20 bp, synthetic construct
  source 1..20: mol_type = other DNA
ccaaacccagaagaaaggct

SEQ ID NO: 224488 - DNA, 20 bp, synthetic construct
  source 1..20: mol_type = other DNA
accaaacccagaagaaaggc

SEQ ID NO: 224489 - DNA, 20 bp, synthetic construct
  source 1..20: mol_type = other DNA
caccaaacccagaagaaagg

SEQ ID NO: 224490 - DNA, 20 bp, synthetic construct
  source 1..20: mol_type = other DNA
tcaccaaacccagaagaaag

SEQ ID NO: 224491 - DNA, 20 bp, synthetic construct
  source 1..20: mol_type = other DNA
ctcaccaaacccagaagaaa

SEQ ID NO: 224492 - DNA, 20 bp, synthetic construct
  source 1..20: mol_type = other DNA
tctcaccaaacccagaagaa

SEQ ID NO: 224493 - DNA, 20 bp, synthetic construct
  source 1..20: mol_type = other DNA
ttctcaccaaacccagaaga

SEQ ID NO: 224494 - DNA, 20 bp, synthetic construct
  source 1..20: mol_type = other DNA
attctcaccaaacccagaag

SEQ ID NO: 224495 - DNA, 20 bp, synthetic construct
  source 1..20: mol_type = other DNA
cattctcaccaaacccagaa

SEQ ID NO: 224496 - DNA, 20 bp, synthetic construct
  source 1..20: mol_type = other DNA
acattctcaccaaacccaga

SEQ ID NO: 224497 - DNA, 20 bp, synthetic construct
  source 1..20: mol_type = other DNA
aacattctcaccaaacccag

SEQ ID NO: 224498 - DNA, 20 bp, synthetic construct
  source 1..20: mol_type = other DNA
aaacattctcaccaaaccca

SEQ ID NO: 224499 - DNA, 20 bp, synthetic construct
  source 1..20: mol_type = other DNA
aaaacattctcaccaaaccc

SEQ ID NO: 224500 - DNA, 20 bp, synthetic construct
  source 1..20: mol_type = other DNA
caaaacattctcaccaaacc

SEQ ID NO: 224501 - DNA, 20 bp, synthetic construct
  source 1..20: mol_type = other DNA
ccaaaacattctcaccaaac

SEQ ID NO: 224502 - DNA, 20 bp, synthetic construct
  source 1..20: mol_type = other DNA
tccaaaacattctcaccaaa

SEQ ID NO: 224503 - DNA, 20 bp, synthetic construct
  source 1..20: mol_type = other DNA
ttccaaaacattctcaccaa

SEQ ID NO: 224504 - DNA, 20 bp, synthetic construct
  source 1..20: mol_type = other DNA
gttccaaaacattctcacca

SEQ ID NO: 224505 - DNA, 20 bp, synthetic construct
  source 1..20: mol_type = other DNA
agttccaaaacattctcacc

SEQ ID NO: 224506 - DNA, 20 bp, synthetic construct
  source 1..20: mol_type = other DNA
tagttccaaaacattctcac

SEQ ID NO: 224507 - DNA, 20 bp, synthetic construct
  source 1..20: mol_type = other DNA
ctagttccaaaacattctca

SEQ ID NO: 224508 - DNA, 20 bp, synthetic construct
  source 1..20: mol_type = other DNA
tctagttccaaaacattctc

SEQ ID NO: 224509 - DNA, 20 bp, synthetic construct
  source 1..20: mol_type = other DNA
atctagttccaaaacattct

SEQ ID NO: 224510 - DNA, 20 bp, synthetic construct
  source 1..20: mol_type = other DNA
tatctagttccaaaacattc

SEQ ID NO: 224511 - DNA, 20 bp, synthetic construct
  source 1..20: mol_type = other DNA
ctatctagttccaaaacatt

SEQ ID NO: 224512 - DNA, 20 bp, synthetic construct
  source 1..20: mol_type = other DNA
tctatctagttccaaaacat

SEQ ID NO: 224513 - DNA, 20 bp, synthetic construct
  source 1..20: mol_type = other DNA
ctctatctagttccaaaaca

SEQ ID NO: 224514 - DNA, 20 bp, synthetic construct
  source 1..20: mol_type = other DNA
cctctatctagttccaaaac

SEQ ID NO: 224515 - DNA, 20 bp, synthetic construct
  source 1..20: mol_type = other DNA
acctctatctagttccaaaa

SEQ ID NO: 224516 - DNA, 20 bp, synthetic construct
  source 1..20: mol_type = other DNA
cacctctatctagttccaaa

SEQ ID NO: 224517 - DNA, 20 bp, synthetic construct
  source 1..20: mol_type = other DNA
tcacctctatctagttccaa

SEQ ID NO: 224518 - DNA, 20 bp, synthetic construct
  source 1..20: mol_type = other DNA
atcacctctatctagttcca

SEQ ID NO: 224519 - DNA, 20 bp, synthetic construct
  source 1..20: mol_type = other DNA
tatcacctctatctagttcc

SEQ ID NO: 224520 - DNA, 20 bp, synthetic construct
  source 1..20: mol_type = other DNA
ctatcacctctatctagttc

SEQ ID NO: 224521 - DNA, 20 bp, synthetic construct
  source 1..20: mol_type = other DNA
actatcacctctatctagtt

SEQ ID NO: 224522 - DNA, 20 bp, synthetic construct
  source 1..20: mol_type = other DNA
aactatcacctctatctagt

SEQ ID NO: 224523 - DNA, 20 bp, synthetic construct
  source 1..20: mol_type = other DNA
caactatcacctctatctag

SEQ ID NO: 224524 - DNA, 20 bp, synthetic construct
  source 1..20: mol_type = other DNA
acaactatcacctctatcta

SEQ ID NO: 224525 - DNA, 20 bp, synthetic construct
  source 1..20: mol_type = other DNA
tacaactatcacctctatct

SEQ ID NO: 224526 - DNA, 20 bp, synthetic construct
  source 1..20: mol_type = other DNA
gtacaactatcacctctatc

SEQ ID NO: 224527 - DNA, 20 bp, synthetic construct
  source 1..20: mol_type = other DNA
tgtacaactatcacctctat

SEQ ID NO: 224528 - DNA, 20 bp, synthetic construct
  source 1..20: mol_type = other DNA
ttgtacaactatcacctcta

SEQ ID NO: 224529 - DNA, 20 bp, synthetic construct
  source 1..20: mol_type = other DNA
gttgtacaactatcacctct

SEQ ID NO: 224530 - DNA, 20 bp, synthetic construct
  source 1..20: mol_type = other DNA
tgttgtacaactatcacctc

SEQ ID NO: 224531 - DNA, 20 bp, synthetic construct
  source 1..20: mol_type = other DNA
atgttgtacaactatcacct

SEQ ID NO: 224532 - DNA, 20 bp, synthetic construct
  source 1..20: mol_type = other DNA
aatgttgtacaactatcacc

SEQ ID NO: 224533 - DNA, 20 bp, synthetic construct
  source 1..20: mol_type = other DNA
caatgttgtacaactatcac

SEQ ID NO: 224534 - DNA, 20 bp, synthetic construct
  source 1..20: mol_type = other DNA
acaatgttgtacaactatca

SEQ ID NO: 224535 - DNA, 20 bp, synthetic construct
  source 1..20: mol_type = other DNA
cacaatgttgtacaactatc

SEQ ID NO: 224536 - DNA, 20 bp, synthetic construct
  source 1..20: mol_type = other DNA
tcacaatgttgtacaactat

SEQ ID NO: 224537 - DNA, 20 bp, synthetic construct
  source 1..20: mol_type = other DNA
ttcacaatgttgtacaacta

SEQ ID NO: 224538 - DNA, 20 bp, synthetic construct
  source 1..20: mol_type = other DNA
attcacaatgttgtacaact

SEQ ID NO: 224539 - DNA, 20 bp, synthetic construct
  source 1..20: mol_type = other DNA
cattcacaatgttgtacaac

SEQ ID NO: 224540 - DNA, 20 bp, synthetic construct
  source 1..20: mol_type = other DNA
acattcacaatgttgtacaa

SEQ ID NO: 224541 - DNA, 20 bp, synthetic construct
  source 1..20: mol_type = other DNA
tacattcacaatgttgtaca

SEQ ID NO: 224542 - DNA, 20 bp, synthetic construct
  source 1..20: mol_type = other DNA
gtacattcacaatgttgtac

SEQ ID NO: 224543 - DNA, 20 bp, synthetic construct
  source 1..20: mol_type = other DNA
agtacattcacaatgttgta

SEQ ID NO: 224544 - DNA, 20 bp, synthetic construct
  source 1..20: mol_type = other DNA
tagtacattcacaatgttgt

SEQ ID NO: 224545 - DNA, 20 bp, synthetic construct
  source 1..20: mol_type = other DNA
ttagtacattcacaatgttg

SEQ ID NO: 224546 - DNA, 20 bp, synthetic construct
  source 1..20: mol_type = other DNA
tttagtacattcacaatgtt

SEQ ID NO: 224547 - DNA, 20 bp, synthetic construct
  source 1..20: mol_type = other DNA
atttagtacattcacaatgt

SEQ ID NO: 224548 - DNA, 20 bp, synthetic construct
  source 1..20: mol_type = other DNA
catttagtacattcacaatg

SEQ ID NO: 224549 - DNA, 20 bp, synthetic construct
  source 1..20: mol_type = other DNA
gcatttagtacattcacaat

SEQ ID NO: 224550 - DNA, 20 bp, synthetic construct
  source 1..20: mol_type = other DNA
ggcatttagtacattcacaa

SEQ ID NO: 224551 - DNA, 20 bp, synthetic construct
  source 1..20: mol_type = other DNA
tggcatttagtacattcaca

SEQ ID NO: 224552 - DNA, 20 bp, synthetic construct
  source 1..20: mol_type = other DNA
gtggcatttagtacattcac

SEQ ID NO: 224553 - DNA, 20 bp, synthetic construct
  source 1..20: mol_type = other DNA
agtggcatttagtacattca

SEQ ID NO: 224554 - DNA, 20 bp, synthetic construct
  source 1..20: mol_type = other DNA
cagtggcatttagtacattc

SEQ ID NO: 224555 - DNA, 20 bp, synthetic construct
  source 1..20: mol_type = other DNA
tcagtggcatttagtacatt

SEQ ID NO: 224556 - DNA, 20 bp, synthetic construct
  source 1..20: mol_type = other DNA
ttcagtggcatttagtacat

SEQ ID NO: 224557 - DNA, 20 bp, synthetic construct
  source 1..20: mol_type = other DNA
attcagtggcatttagtaca

SEQ ID NO: 224558 - DNA, 20 bp, synthetic construct
  source 1..20: mol_type = other DNA
gattcagtggcatttagtac

SEQ ID NO: 224559 - DNA, 20 bp, synthetic construct
  source 1..20: mol_type = other DNA
tgattcagtggcatttagta

SEQ ID NO: 224560 - DNA, 20 bp, synthetic construct
  source 1..20: mol_type = other DNA
atgattcagtggcatttagt

SEQ ID NO: 224561 - DNA, 20 bp, synthetic construct
  source 1..20: mol_type = other DNA
aatgattcagtggcatttag

SEQ ID NO: 224562 - DNA, 20 bp, synthetic construct
  source 1..20: mol_type = other DNA
gaatgattcagtggcattta

SEQ ID NO: 224563 - DNA, 20 bp, synthetic construct
  source 1..20: mol_type = other DNA
tgaatgattcagtggcattt

SEQ ID NO: 224564 - DNA, 20 bp, synthetic construct
  source 1..20: mol_type = other DNA
atgaatgattcagtggcatt

SEQ ID NO: 224565 - DNA, 20 bp, synthetic construct
  source 1..20: mol_type = other DNA
aatgaatgattcagtggcat

SEQ ID NO: 224566 - DNA, 20 bp, synthetic construct
  source 1..20: mol_type = other DNA
aaatgaatgattcagtggca

SEQ ID NO: 224567 - DNA, 20 bp, synthetic construct
  source 1..20: mol_type = other DNA
aaaatgaatgattcagtggc

SEQ ID NO: 224568 - DNA, 20 bp, synthetic construct
  source 1..20: mol_type = other DNA
taaaatgaatgattcagtgg

SEQ ID NO: 224569 - DNA, 20 bp, synthetic construct
  source 1..20: mol_type = other DNA
ttaaaatgaatgattcagtg

SEQ ID NO: 224570 - DNA, 20 bp, synthetic construct
  source 1..20: mol_type = other DNA
tttaaaatgaatgattcagt

SEQ ID NO: 224571 - DNA, 20 bp, synthetic construct
  source 1..20: mol_type = other DNA
atttaaaatgaatgattcag

SEQ ID NO: 224572 - DNA, 20 bp, synthetic construct
  source 1..20: mol_type = other DNA
gatttaaaatgaatgattca

SEQ ID NO: 224573 - DNA, 20 bp, synthetic construct
  source 1..20: mol_type = other DNA
cgatttaaaatgaatgattc

SEQ ID NO: 224574 - DNA, 20 bp, synthetic construct
  source 1..20: mol_type = other DNA
acgatttaaaatgaatgatt

SEQ ID NO: 224575 - DNA, 20 bp, synthetic construct
  source 1..20: mol_type = other DNA
aacgatttaaaatgaatgat

SEQ ID NO: 224576 - DNA, 20 bp, synthetic construct
  source 1..20: mol_type = other DNA
gaacgatttaaaatgaatga

SEQ ID NO: 224577 - DNA, 20 bp, synthetic construct
  source 1..20: mol_type = other DNA
agaacgatttaaaatgaatg

SEQ ID NO: 224578 - DNA, 20 bp, synthetic construct
  source 1..20: mol_type = other DNA
aagaacgatttaaaatgaat

SEQ ID NO: 224579 - DNA, 20 bp, synthetic construct
  source 1..20: mol_type = other DNA
aaagaacgatttaaaatgaa

SEQ ID NO: 224580 - DNA, 20 bp, synthetic construct
  source 1..20: mol_type = other DNA
taaagaacgatttaaaatga

SEQ ID NO: 224581 - DNA, 20 bp, synthetic construct
  source 1..20: mol_type = other DNA
gtaaagaacgatttaaaatg

SEQ ID NO: 224582 - DNA, 20 bp, synthetic construct
  source 1..20: mol_type = other DNA
cgtaaagaacgatttaaaat

SEQ ID NO: 224583 - DNA, 20 bp, synthetic construct
  source 1..20: mol_type = other DNA
acgtaaagaacgatttaaaa

SEQ ID NO: 224584 - DNA, 20 bp, synthetic construct
  source 1..20: mol_type = other DNA
aacgtaaagaacgatttaaa

SEQ ID NO: 224585 - DNA, 20 bp, synthetic construct
  source 1..20: mol_type = other DNA
caacgtaaagaacgatttaa

SEQ ID NO: 224586 - DNA, 20 bp, synthetic construct
  source 1..20: mol_type = other DNA
gcaacgtaaagaacgattta

SEQ ID NO: 224587 - DNA, 20 bp, synthetic construct
  source 1..20: mol_type = other DNA
tgcaacgtaaagaacgattt

SEQ ID NO: 224588 - DNA, 20 bp, synthetic construct
  source 1..20: mol_type = other DNA
atgcaacgtaaagaacgatt

SEQ ID NO: 224589 - DNA, 20 bp, synthetic construct
  source 1..20: mol_type = other DNA
catgcaacgtaaagaacgat

SEQ ID NO: 224590 - DNA, 20 bp, synthetic construct
  source 1..20: mol_type = other DNA
tcatgcaacgtaaagaacga

SEQ ID NO: 224591 - DNA, 20 bp, synthetic construct
  source 1..20: mol_type = other DNA
ttcatgcaacgtaaagaacg

SEQ ID NO: 224592 - DNA, 20 bp, synthetic construct
  source 1..20: mol_type = other DNA
attcatgcaacgtaaagaac

SEQ ID NO: 224593 - DNA, 20 bp, synthetic construct
  source 1..20: mol_type = other DNA
aattcatgcaacgtaaagaa

SEQ ID NO: 224594 - DNA, 20 bp, synthetic construct
  source 1..20: mol_type = other DNA
aaattcatgcaacgtaaaga

SEQ ID NO: 224595 - DNA, 20 bp, synthetic construct
  source 1..20: mol_type = other DNA
aaaattcatgcaacgtaaag

SEQ ID NO: 224596 - DNA, 20 bp, synthetic construct
  source 1..20: mol_type = other DNA
taaaattcatgcaacgtaaa

SEQ ID NO: 224597 - DNA, 20 bp, synthetic construct
  source 1..20: mol_type = other DNA
ttaaaattcatgcaacgtaa

SEQ ID NO: 224598 - DNA, 20 bp, synthetic construct
  source 1..20: mol_type = other DNA
cttaaaattcatgcaacgta

SEQ ID NO: 224599 - DNA, 20 bp, synthetic construct
  source 1..20: mol_type = other DNA
acttaaaattcatgcaacgt

SEQ ID NO: 224600 - DNA, 20 bp, synthetic construct
  source 1..20: mol_type = other DNA
gacttaaaattcatgcaacg

SEQ ID NO: 224601 - DNA, 20 bp, synthetic construct
  source 1..20: mol_type = other DNA
tgacttaaaattcatgcaac

SEQ ID NO: 224602 - DNA, 20 bp, synthetic construct
  source 1..20: mol_type = other DNA
ttgacttaaaattcatgcaa

SEQ ID NO: 224603 - DNA, 20 bp, synthetic construct
  source 1..20: mol_type = other DNA
attgacttaaaattcatgca

SEQ ID NO: 224604 - DNA, 20 bp, synthetic construct
  source 1..20: mol_type = other DNA
gattgacttaaaattcatgc

SEQ ID NO: 224605 - DNA, 20 bp, synthetic construct
  source 1..20: mol_type = other DNA
tgattgacttaaaattcatg

SEQ ID NO: 224606 - DNA, 20 bp, synthetic construct
  source 1..20: mol_type = other DNA
ttgattgacttaaaattcat

SEQ ID NO: 224607 - DNA, 20 bp, synthetic construct
  source 1..20: mol_type = other DNA
tttgattgacttaaaattca

SEQ ID NO: 224608 - DNA, 20 bp, synthetic construct
  source 1..20: mol_type = other DNA
ttttgattgacttaaaattc

SEQ ID NO: 224609 - DNA, 20 bp, synthetic construct
  source 1..20: mol_type = other DNA
tttttgattgacttaaaatt

SEQ ID NO: 224610 - DNA, 20 bp, synthetic construct
  source 1..20: mol_type = other DNA
gtttttgattgacttaaaat

SEQ ID NO: 224611 - DNA, 20 bp, synthetic construct
  source 1..20: mol_type = other DNA
tgtttttgattgacttaaaa

SEQ ID NO: 224612 - DNA, 20 bp, synthetic construct
  source 1..20: mol_type = other DNA
ctgtttttgattgacttaaa

SEQ ID NO: 224613 - DNA, 20 bp, synthetic construct
  source 1..20: mol_type = other DNA
actgtttttgattgacttaa

SEQ ID NO: 224614 - DNA, 20 bp, synthetic construct
  source 1..20: mol_type = other DNA
aactgtttttgattgactta

SEQ ID NO: 224615 - DNA, 20 bp, synthetic construct
  source 1..20: mol_type = other DNA
caactgtttttgattgactt

SEQ ID NO: 224616 - DNA, 20 bp, synthetic construct
  source 1..20: mol_type = other DNA
acaactgtttttgattgact

SEQ ID NO: 224617 - DNA, 20 bp, synthetic construct
  source 1..20: mol_type = other DNA
aacaactgtttttgattgac

SEQ ID NO: 224618 - DNA, 20 bp, synthetic construct
  source 1..20: mol_type = other DNA
aaacaactgtttttgattga

SEQ ID NO: 224619 - DNA, 20 bp, synthetic construct
  source 1..20: mol_type = other DNA
caaacaactgtttttgattg

SEQ ID NO: 224620 - DNA, 20 bp, synthetic construct
  source 1..20: mol_type = other DNA
tcaaacaactgtttttgatt

SEQ ID NO: 224621 - DNA, 20 bp, synthetic construct
  source 1..20: mol_type = other DNA
ttcaaacaactgtttttgat

SEQ ID NO: 224622 - DNA, 20 bp, synthetic construct
  source 1..20: mol_type = other DNA
tttcaaacaactgtttttga

SEQ ID NO: 224623 - DNA, 20 bp, synthetic construct
  source 1..20: mol_type = other DNA
ttttcaaacaactgtttttg

SEQ ID NO: 224624 - DNA, 20 bp, synthetic construct
  source 1..20: mol_type = other DNA
cttttcaaacaactgttttt

SEQ ID NO: 224625 - DNA, 20 bp, synthetic construct
  source 1..20: mol_type = other DNA
tcttttcaaacaactgtttt

SEQ ID NO: 224626 - DNA, 20 bp, synthetic construct
  source 1..20: mol_type = other DNA
ctcttttcaaacaactgttt

SEQ ID NO: 224627 - DNA, 20 bp, synthetic construct
  source 1..20: mol_type = other DNA
tctcttttcaaacaactgtt

SEQ ID NO: 224628 - DNA, 20 bp, synthetic construct
  source 1..20: mol_type = other DNA
ttctcttttcaaacaactgt

SEQ ID NO: 224629 - DNA, 20 bp, synthetic construct
  source 1..20: mol_type = other DNA
tttctcttttcaaacaactg

SEQ ID NO: 224630 - DNA, 20 bp, synthetic construct
  source 1..20: mol_type = other DNA
ttttctcttttcaaacaact

SEQ ID NO: 224631 - DNA, 20 bp, synthetic construct
  source 1..20: mol_type = other DNA
cttttctcttttcaaacaac

SEQ ID NO: 224632 - DNA, 20 bp, synthetic construct
  source 1..20: mol_type = other DNA
gcttttctcttttcaaacaa

SEQ ID NO: 224633 - DNA, 20 bp, synthetic construct
  source 1..20: mol_type = other DNA
ggcttttctcttttcaaaca

SEQ ID NO: 224634 - DNA, 20 bp, synthetic construct
  source 1..20: mol_type = other DNA
aggcttttctcttttcaaac

SEQ ID NO: 224635 - DNA, 20 bp, synthetic construct
  source 1..20: mol_type = other DNA
taggcttttctcttttcaaa

SEQ ID NO: 224636 - DNA, 20 bp, synthetic construct
  source 1..20: mol_type = other DNA
ataggcttttctcttttcaa

SEQ ID NO: 224637 - DNA, 20 bp, synthetic construct
  source 1..20: mol_type = other DNA
cataggcttttctcttttca

SEQ ID NO: 224638 - DNA, 20 bp, synthetic construct
  source 1..20: mol_type = other DNA
ccataggcttttctcttttc

SEQ ID NO: 224639 - DNA, 20 bp, synthetic construct
  source 1..20: mol_type = other DNA
cccataggcttttctctttt

SEQ ID NO: 224640 - DNA, 20 bp, synthetic construct
  source 1..20: mol_type = other DNA
acccataggcttttctcttt

SEQ ID NO: 224641 - DNA, 20 bp, synthetic construct
  source 1..20: mol_type = other DNA
tacccataggcttttctctt

SEQ ID NO: 224642 - DNA, 20 bp, synthetic construct
  source 1..20: mol_type = other DNA
ctacccataggcttttctct

SEQ ID NO: 224643 - DNA, 20 bp, synthetic construct
  source 1..20: mol_type = other DNA
gctacccataggcttttctc

SEQ ID NO: 224644 - DNA, 20 bp, synthetic construct
  source 1..20: mol_type = other DNA
cgctacccataggcttttct

SEQ ID NO: 224645 - DNA, 20 bp, synthetic construct
  source 1..20: mol_type = other DNA
ccgctacccataggcttttc

SEQ ID NO: 224646 - DNA, 20 bp, synthetic construct
  source 1..20: mol_type = other DNA
gccgctacccataggctttt

SEQ ID NO: 224647 - DNA, 20 bp, synthetic construct
  source 1..20: mol_type = other DNA
tgccgctacccataggcttt

SEQ ID NO: 224648 - DNA, 20 bp, synthetic construct
  source 1..20: mol_type = other DNA
ctgccgctacccataggctt

SEQ ID NO: 224649 - DNA, 20 bp, synthetic construct
  source 1..20: mol_type = other DNA
gctgccgctacccataggct

SEQ ID NO: 224650 - DNA, 20 bp, synthetic construct
  source 1..20: mol_type = other DNA
tgctgccgctacccataggc

SEQ ID NO: 224651 - DNA, 20 bp, synthetic construct
  source 1..20: mol_type = other DNA
ctgctgccgctacccatagg

SEQ ID NO: 224652 - DNA, 20 bp, synthetic construct
  source 1..20: mol_type = other DNA
actgctgccgctacccatag

SEQ ID NO: 224653 - DNA, 20 bp, synthetic construct
  source 1..20: mol_type = other DNA
cactgctgccgctacccata

SEQ ID NO: 224654 - DNA, 20 bp, synthetic construct
  source 1..20: mol_type = other DNA
tcactgctgccgctacccat

SEQ ID NO: 224655 - DNA, 20 bp, synthetic construct
  source 1..20: mol_type = other DNA
atcactgctgccgctaccca

SEQ ID NO: 224656 - DNA, 20 bp, synthetic construct
  source 1..20: mol_type = other DNA
aatcactgctgccgctaccc

SEQ ID NO: 224657 - DNA, 20 bp, synthetic construct
  source 1..20: mol_type = other DNA
caatcactgctgccgctacc

SEQ ID NO: 224658 - DNA, 20 bp, synthetic construct
  source 1..20: mol_type = other DNA
ccaatcactgctgccgctac

SEQ ID NO: 224659 - DNA, 20 bp, synthetic construct
  source 1..20: mol_type = other DNA
tccaatcactgctgccgcta

SEQ ID NO: 224660 - DNA, 20 bp, synthetic construct
  source 1..20: mol_type = other DNA
atccaatcactgctgccgct

SEQ ID NO: 224661 - DNA, 20 bp, synthetic construct
  source 1..20: mol_type = other DNA
aatccaatcactgctgccgc

SEQ ID NO: 224662 - DNA, 20 bp, synthetic construct
  source 1..20: mol_type = other DNA
aaatccaatcactgctgccg

SEQ ID NO: 224663 - DNA, 20 bp, synthetic construct
  source 1..20: mol_type = other DNA
taaatccaatcactgctgcc

SEQ ID NO: 224664 - DNA, 20 bp, synthetic construct
  source 1..20: mol_type = other DNA
ataaatccaatcactgctgc

SEQ ID NO: 224665 - DNA, 20 bp, synthetic construct
  source 1..20: mol_type = other DNA
cataaatccaatcactgctg

SEQ ID NO: 224666 - DNA, 20 bp, synthetic construct
  source 1..20: mol_type = other DNA
tcataaatccaatcactgct

SEQ ID NO: 224667 - DNA, 20 bp, synthetic construct
  source 1..20: mol_type = other DNA
atcataaatccaatcactgc

SEQ ID NO: 224668 - DNA, 20 bp, synthetic construct
  source 1..20: mol_type = other DNA
aatcataaatccaatcactg

SEQ ID NO: 224669 - DNA, 20 bp, synthetic construct
  source 1..20: mol_type = other DNA
gaatcataaatccaatcact

SEQ ID NO: 224670 - DNA, 20 bp, synthetic construct
  source 1..20: mol_type = other DNA
cgaatcataaatccaatcac

SEQ ID NO: 224671 - DNA, 20 bp, synthetic construct
  source 1..20: mol_type = other DNA
tcgaatcataaatccaatca

SEQ ID NO: 224672 - DNA, 20 bp, synthetic construct
  source 1..20: mol_type = other DNA
atcgaatcataaatccaatc

SEQ ID NO: 224673 - DNA, 20 bp, synthetic construct
  source 1..20: mol_type = other DNA
aatcgaatcataaatccaat

SEQ ID NO: 224674 - DNA, 20 bp, synthetic construct
  source 1..20: mol_type = other DNA
gaatcgaatcataaatccaa

SEQ ID NO: 224675 - DNA, 20 bp, synthetic construct
  source 1..20: mol_type = other DNA
ggaatcgaatcataaatcca

SEQ ID NO: 224676 - DNA, 20 bp, synthetic construct
  source 1..20: mol_type = other DNA
tggaatcgaatcataaatcc

SEQ ID NO: 224677 - DNA, 20 bp, synthetic construct
  source 1..20: mol_type = other DNA
atggaatcgaatcataaatc

SEQ ID NO: 224678 - DNA, 20 bp, synthetic construct
  source 1..20: mol_type = other DNA
catggaatcgaatcataaat

SEQ ID NO: 224679 - DNA, 20 bp, synthetic construct
  source 1..20: mol_type = other DNA
ccatggaatcgaatcataaa

SEQ ID NO: 224680 - DNA, 20 bp, synthetic construct
  source 1..20: mol_type = other DNA
gccatggaatcgaatcataa

SEQ ID NO: 224681 - DNA, 20 bp, synthetic construct
  source 1..20: mol_type = other DNA
agccatggaatcgaatcata

SEQ ID NO: 224682 - DNA, 20 bp, synthetic construct
  source 1..20: mol_type = other DNA
gagccatggaatcgaatcat

SEQ ID NO: 224683 - DNA, 20 bp, synthetic construct
  source 1..20: mol_type = other DNA
tgagccatggaatcgaatca

SEQ ID NO: 224684 - DNA, 20 bp, synthetic construct
  source 1..20: mol_type = other DNA
atgagccatggaatcgaatc

SEQ ID NO: 224685 - DNA, 20 bp, synthetic construct
  source 1..20: mol_type = other DNA
gatgagccatggaatcgaat

SEQ ID NO: 224686 - DNA, 20 bp, synthetic construct
  source 1..20: mol_type = other DNA
ggatgagccatggaatcgaa

SEQ ID NO: 224687 - DNA, 20 bp, synthetic construct
  source 1..20: mol_type = other DNA
gggatgagccatggaatcga

SEQ ID NO: 224688 - DNA, 20 bp, synthetic construct
  source 1..20: mol_type = other DNA
agggatgagccatggaatcg

SEQ ID NO: 224689 - DNA, 20 bp, synthetic construct
  source 1..20: mol_type = other DNA
gagggatgagccatggaatc

SEQ ID NO: 224690 - DNA, 20 bp, synthetic construct
  source 1..20: mol_type = other DNA
ggagggatgagccatggaat

SEQ ID NO: 224691 - DNA, 20 bp, synthetic construct
  source 1..20: mol_type = other DNA
gggagggatgagccatggaa

SEQ ID NO: 224692 - DNA, 20 bp, synthetic construct
  source 1..20: mol_type = other DNA
ggggagggatgagccatgga

SEQ ID NO: 224693 - DNA, 20 bp, synthetic construct
  source 1..20: mol_type = other DNA
aggggagggatgagccatgg

SEQ ID NO: 224694 - DNA, 20 bp, synthetic construct
  source 1..20: mol_type = other DNA
caggggagggatgagccatg

SEQ ID NO: 224695 - DNA, 20 bp, synthetic construct
  source 1..20: mol_type = other DNA
gcaggggagggatgagccat

SEQ ID NO: 224696 - DNA, 20 bp, synthetic construct
  source 1..20: mol_type = other DNA
ggcaggggagggatgagcca

SEQ ID NO: 224697 - DNA, 20 bp, synthetic construct
  source 1..20: mol_type = other DNA
aggcaggggagggatgagcc

SEQ ID NO: 224698 - DNA, 20 bp, synthetic construct
  source 1..20: mol_type = other DNA
gaggcaggggagggatgagc

SEQ ID NO: 224699 - DNA, 20 bp, synthetic construct
  source 1..20: mol_type = other DNA
tgaggcaggggagggatgag

SEQ ID NO: 224700 - DNA, 20 bp, synthetic construct
  source 1..20: mol_type = other DNA
gtgaggcaggggagggatga

SEQ ID NO: 224701 - DNA, 20 bp, synthetic construct
  source 1..20: mol_type = other DNA
ggtgaggcaggggagggatg

SEQ ID NO: 224702 - DNA, 20 bp, synthetic construct
  source 1..20: mol_type = other DNA
gggtgaggcaggggagggat

SEQ ID NO: 224703 - DNA, 20 bp, synthetic construct
  source 1..20: mol_type = other DNA
ggggtgaggcaggggaggga

SEQ ID NO: 224704 - DNA, 20 bp, synthetic construct
  source 1..20: mol_type = other DNA
gggggtgaggcaggggaggg

SEQ ID NO: 224705 - DNA, 20 bp, synthetic construct
  source 1..20: mol_type = other DNA
agggggtgaggcaggggagg

SEQ ID NO: 224706 - DNA, 20 bp, synthetic construct
  source 1..20: mol_type = other DNA
gagggggtgaggcaggggag

SEQ ID NO: 224707 - DNA, 20 bp, synthetic construct
  source 1..20: mol_type = other DNA
cgagggggtgaggcagggga

SEQ ID NO: 224708 - DNA, 20 bp, synthetic construct
  source 1..20: mol_type = other DNA
gcgagggggtgaggcagggg

SEQ ID NO: 224709 - DNA, 20 bp, synthetic construct
  source 1..20: mol_type = other DNA
ggcgagggggtgaggcaggg

SEQ ID NO: 224710 - DNA, 20 bp, synthetic construct
  source 1..20: mol_type = other DNA
gggcgagggggtgaggcagg

SEQ ID NO: 224711 - DNA, 20 bp, synthetic construct
  source 1..20: mol_type = other DNA
agggcgagggggtgaggcag

SEQ ID NO: 224712 - DNA, 20 bp, synthetic construct
  source 1..20: mol_type = other DNA
gagggcgagggggtgaggca

SEQ ID NO: 224713 - DNA, 20 bp, synthetic construct
  source 1..20: mol_type = other DNA
ggagggcgagggggtgaggc

SEQ ID NO: 224714 - DNA, 20 bp, synthetic construct
  source 1..20: mol_type = other DNA
cggagggcgagggggtgagg

SEQ ID NO: 224715 - DNA, 20 bp, synthetic construct
  source 1..20: mol_type = other DNA
tcggagggcgagggggtgag

SEQ ID NO: 224716 - DNA, 20 bp, synthetic construct
  source 1..20: mol_type = other DNA
gtcggagggcgagggggtga

SEQ ID NO: 224717 - DNA, 20 bp, synthetic construct
  source 1..20: mol_type = other DNA
cgtcggagggcgagggggtg

SEQ ID NO: 224718 - DNA, 20 bp, synthetic construct
  source 1..20: mol_type = other DNA
acgtcggagggcgagggggt

SEQ ID NO: 224719 - DNA, 20 bp, synthetic construct
  source 1..20: mol_type = other DNA
gacgtcggagggcgaggggg

SEQ ID NO: 224720 - DNA, 20 bp, synthetic construct
  source 1..20: mol_type = other DNA
agacgtcggagggcgagggg

SEQ ID NO: 224721 - DNA, 20 bp, synthetic construct
  source 1..20: mol_type = other DNA
aagacgtcggagggcgaggg

SEQ ID NO: 224722 - DNA, 20 bp, synthetic construct
  source 1..20: mol_type = other DNA
gaagacgtcggagggcgagg

SEQ ID NO: 224723 - DNA, 20 bp, synthetic construct
  source 1..20: mol_type = other DNA
agaagacgtcggagggcgag

SEQ ID NO: 224724 - DNA, 20 bp, synthetic construct
  source 1..20: mol_type = other DNA
aagaagacgtcggagggcga

SEQ ID NO: 224725 - DNA, 20 bp, synthetic construct
  source 1..20: mol_type = other DNA
gaagaagacgtcggagggcg

SEQ ID NO: 224726 - DNA, 20 bp, synthetic construct
  source 1..20: mol_type = other DNA
agaagaagacgtcggagggc

SEQ ID NO: 224727 - DNA, 20 bp, synthetic construct
  source 1..20: mol_type = other DNA
aagaagaagacgtcggaggg

SEQ ID NO: 224728 - DNA, 20 bp, synthetic construct
  source 1..20: mol_type = other DNA
aaagaagaagacgtcggagg

SEQ ID NO: 224729 - DNA, 20 bp, synthetic construct
  source 1..20: mol_type = other DNA
aaaagaagaagacgtcggag

SEQ ID NO: 224730 - DNA, 20 bp, synthetic construct
  source 1..20: mol_type = other DNA
taaaagaagaagacgtcgga

SEQ ID NO: 224731 - DNA, 20 bp, synthetic construct
  source 1..20: mol_type = other DNA
gtaaaagaagaagacgtcgg

SEQ ID NO: 224732 - DNA, 20 bp, synthetic construct
  source 1..20: mol_type = other DNA
agtaaaagaagaagacgtcg

SEQ ID NO: 224733 - DNA, 20 bp, synthetic construct
  source 1..20: mol_type = other DNA
gagtaaaagaagaagacgtc

SEQ ID NO: 224734 - DNA, 20 bp, synthetic construct
  source 1..20: mol_type = other DNA
agagtaaaagaagaagacgt

SEQ ID NO: 224735 - DNA, 20 bp, synthetic construct
  source 1..20: mol_type = other DNA
cagagtaaaagaagaagacg

SEQ ID NO: 224736 - DNA, 20 bp, synthetic construct
  source 1..20: mol_type = other DNA
tcagagtaaaagaagaagac

SEQ ID NO: 224737 - DNA, 20 bp, synthetic construct
  source 1..20: mol_type = other DNA
ttcagagtaaaagaagaaga

SEQ ID NO: 224738 - DNA, 20 bp, synthetic construct
  source 1..20: mol_type = other DNA
gttcagagtaaaagaagaag

SEQ ID NO: 224739 - DNA, 20 bp, synthetic construct
  source 1..20: mol_type = other DNA
agttcagagtaaaagaagaa

SEQ ID NO: 224740 - DNA, 20 bp, synthetic construct
  source 1..20: mol_type = other DNA
cagttcagagtaaaagaaga

SEQ ID NO: 224741 - DNA, 20 bp, synthetic construct
  source 1..20: mol_type = other DNA
acagttcagagtaaaagaag

SEQ ID NO: 224742 - DNA, 20 bp, synthetic construct
  source 1..20: mol_type = other DNA
aacagttcagagtaaaagaa

SEQ ID NO: 224743 - DNA, 20 bp, synthetic construct
  source 1..20: mol_type = other DNA
taacagttcagagtaaaaga

SEQ ID NO: 224744 - DNA, 20 bp, synthetic construct
  source 1..20: mol_type = other DNA
ataacagttcagagtaaaag

SEQ ID NO: 224745 - DNA, 20 bp, synthetic construct
  source 1..20: mol_type = other DNA
gataacagttcagagtaaaa

SEQ ID NO: 224746 - DNA, 20 bp, synthetic construct
  source 1..20: mol_type = other DNA
agataacagttcagagtaaa

SEQ ID NO: 224747 - DNA, 20 bp, synthetic construct
  source 1..20: mol_type = other DNA
aagataacagttcagagtaa

SEQ ID NO: 224748 - DNA, 20 bp, synthetic construct
  source 1..20: mol_type = other DNA
aaagataacagttcagagta

SEQ ID NO: 224749 - DNA, 20 bp, synthetic construct
  source 1..20: mol_type = other DNA
caaagataacagttcagagt

SEQ ID NO: 224750 - DNA, 20 bp, synthetic construct
  source 1..20: mol_type = other DNA
acaaagataacagttcagag

SEQ ID NO: 224751 - DNA, 20 bp, synthetic construct
  source 1..20: mol_type = other DNA
aacaaagataacagttcaga

SEQ ID NO: 224752 - DNA, 20 bp, synthetic construct
  source 1..20: mol_type = other DNA
gaacaaagataacagttcag

SEQ ID NO: 224753 - DNA, 20 bp, synthetic construct
  source 1..20: mol_type = other DNA
agaacaaagataacagttca

SEQ ID NO: 224754 - DNA, 20 bp, synthetic construct
  source 1..20: mol_type = other DNA
gagaacaaagataacagttc

SEQ ID NO: 224755 - DNA, 20 bp, synthetic construct
  source 1..20: mol_type = other DNA
tgagaacaaagataacagtt

SEQ ID NO: 224756 - DNA, 20 bp, synthetic construct
  source 1..20: mol_type = other DNA
atgagaacaaagataacagt

SEQ ID NO: 224757 - DNA, 20 bp, synthetic construct
  source 1..20: mol_type = other DNA
gatgagaacaaagataacag

SEQ ID NO: 224758 - DNA, 20 bp, synthetic construct
  source 1..20: mol_type = other DNA
agatgagaacaaagataaca

SEQ ID NO: 224759 - DNA, 20 bp, synthetic construct
  source 1..20: mol_type = other DNA
gagatgagaacaaagataac

SEQ ID NO: 224760 - DNA, 20 bp, synthetic construct
  source 1..20: mol_type = other DNA
agagatgagaacaaagataa

SEQ ID NO: 224761 - DNA, 20 bp, synthetic construct
  source 1..20: mol_type = other DNA
gagagatgagaacaaagata

SEQ ID NO: 224762 - DNA, 20 bp, synthetic construct
  source 1..20: mol_type = other DNA
agagagatgagaacaaagat

SEQ ID NO: 224763 - DNA, 20 bp, synthetic construct
  source 1..20: mol_type = other DNA
gagagagatgagaacaaaga

SEQ ID NO: 224764 - DNA, 20 bp, synthetic construct
  source 1..20: mol_type = other DNA
agagagagatgagaacaaag

SEQ ID NO: 224765 - DNA, 20 bp, synthetic construct
  source 1..20: mol_type = other DNA
gagagagagatgagaacaaa

SEQ ID NO: 224766 - DNA, 20 bp, synthetic construct
  source 1..20: mol_type = other DNA
agagagagagatgagaacaa

SEQ ID NO: 224767 - DNA, 20 bp, synthetic construct
  source 1..20: mol_type = other DNA
gagagagagagatgagaaca

SEQ ID NO: 224768 - DNA, 20 bp, synthetic construct
  source 1..20: mol_type = other DNA
agagagagagagatgagaac

SEQ ID NO: 224769 - DNA, 20 bp, synthetic construct
  source 1..20: mol_type = other DNA
gagagagagagagatgagaa

SEQ ID NO: 224770 - DNA, 20 bp, synthetic construct
  source 1..20: mol_type = other DNA
agagagagagagagatgaga

SEQ ID NO: 224771 - DNA, 20 bp, synthetic construct
  source 1..20: mol_type = other DNA
gagagagagagagagatgag

SEQ ID NO: 224772 - DNA, 20 bp, synthetic construct
  source 1..20: mol_type = other DNA
agagagagagagagagatga

SEQ ID NO: 224773 - DNA, 20 bp, synthetic construct
  source 1..20: mol_type = other DNA
gagagagagagagagagatg

SEQ ID NO: 224774 - DNA, 20 bp, synthetic construct
  source 1..20: mol_type = other DNA
tgagagagagagagagagat

SEQ ID NO: 224775 - DNA, 20 bp, synthetic construct
  source 1..20: mol_type = other DNA
ttgagagagagagagagaga

SEQ ID NO: 224776 - DNA, 20 bp, synthetic construct
  source 1..20: mol_type = other DNA
gttgagagagagagagagag

SEQ ID NO: 224777 - DNA, 20 bp, synthetic construct
  source 1..20: mol_type = other DNA
ggttgagagagagagagaga

SEQ ID NO: 224778 - DNA, 20 bp, synthetic construct
  source 1..20: mol_type = other DNA
gggttgagagagagagagag

SEQ ID NO: 224779 - DNA, 20 bp, synthetic construct
  source 1..20: mol_type = other DNA
agggttgagagagagagaga

SEQ ID NO: 224780 - DNA, 20 bp, synthetic construct
  source 1..20: mol_type = other DNA
cagggttgagagagagagag

SEQ ID NO: 224781 - DNA, 20 bp, synthetic construct
  source 1..20: mol_type = other DNA
gcagggttgagagagagaga

SEQ ID NO: 224782 - DNA, 20 bp, synthetic construct
  source 1..20: mol_type = other DNA
tgcagggttgagagagagag

SEQ ID NO: 224783 - DNA, 20 bp, synthetic construct
  source 1..20: mol_type = other DNA
ctgcagggttgagagagaga

SEQ ID NO: 224784 - DNA, 20 bp, synthetic construct
  source 1..20: mol_type = other DNA
tctgcagggttgagagagag

SEQ ID NO: 224785 - DNA, 20 bp, synthetic construct
  source 1..20: mol_type = other DNA
gtctgcagggttgagagaga

SEQ ID NO: 224786 - DNA, 20 bp, synthetic construct
  source 1..20: mol_type = other DNA
tgtctgcagggttgagagag

SEQ ID NO: 224787 - DNA, 20 bp, synthetic construct
  source 1..20: mol_type = other DNA
gtgtctgcagggttgagaga

SEQ ID NO: 224788 - DNA, 20 bp, synthetic construct
  source 1..20: mol_type = other DNA
agtgtctgcagggttgagag

SEQ ID NO: 224789 - DNA, 20 bp, synthetic construct
  source 1..20: mol_type = other DNA
aagtgtctgcagggttgaga

SEQ ID NO: 224790 - DNA, 20 bp, synthetic construct
  source 1..20: mol_type = other DNA
aaagtgtctgcagggttgag

SEQ ID NO: 224791 - DNA, 20 bp, synthetic construct
  source 1..20: mol_type = other DNA
aaaagtgtctgcagggttga

SEQ ID NO: 224792 - DNA, 20 bp, synthetic construct
  source 1..20: mol_type = other DNA
gaaaagtgtctgcagggttg

SEQ ID NO: 224793 - DNA, 20 bp, synthetic construct
  source 1..20: mol_type = other DNA
ggaaaagtgtctgcagggtt

SEQ ID NO: 224794 - DNA, 20 bp, synthetic construct
  source 1..20: mol_type = other DNA
gggaaaagtgtctgcagggt

SEQ ID NO: 224795 - DNA, 20 bp, synthetic construct
  source 1..20: mol_type = other DNA
agggaaaagtgtctgcaggg

SEQ ID NO: 224796 - DNA, 20 bp, synthetic construct
  source 1..20: mol_type = other DNA
aagggaaaagtgtctgcagg

SEQ ID NO: 224797 - DNA, 20 bp, synthetic construct
  source 1..20: mol_type = other DNA
aaagggaaaagtgtctgcag

SEQ ID NO: 224798 - DNA, 20 bp, synthetic construct
  source 1..20: mol_type = other DNA
gaaagggaaaagtgtctgca

SEQ ID NO: 224799 - DNA, 20 bp, synthetic construct
  source 1..20: mol_type = other DNA
agaaagggaaaagtgtctgc

SEQ ID NO: 224800 - DNA, 20 bp, synthetic construct
  source 1..20: mol_type = other DNA
aagaaagggaaaagtgtctg

SEQ ID NO: 224801 - DNA, 20 bp, synthetic construct
  source 1..20: mol_type = other DNA
aaagaaagggaaaagtgtct

SEQ ID NO: 224802 - DNA, 20 bp, synthetic construct
  source 1..20: mol_type = other DNA
caaagaaagggaaaagtgtc

SEQ ID NO: 224803 - DNA, 20 bp, synthetic construct
  source 1..20: mol_type = other DNA
acaaagaaagggaaaagtgt

SEQ ID NO: 224804 - DNA, 20 bp, synthetic construct
  source 1..20: mol_type = other DNA
gacaaagaaagggaaaagtg

SEQ ID NO: 224805 - DNA, 20 bp, synthetic construct
  source 1..20: mol_type = other DNA
agacaaagaaagggaaaagt

SEQ ID NO: 224806 - DNA, 20 bp, synthetic construct
  source 1..20: mol_type = other DNA
cagacaaagaaagggaaaag

SEQ ID NO: 224807 - DNA, 20 bp, synthetic construct
  source 1..20: mol_type = other DNA
gcagacaaagaaagggaaaa

SEQ ID NO: 224808 - DNA, 20 bp, synthetic construct
  source 1..20: mol_type = other DNA
ggcagacaaagaaagggaaa

SEQ ID NO: 224809 - DNA, 20 bp, synthetic construct
  source 1..20: mol_type = other DNA
gggcagacaaagaaagggaa

SEQ ID NO: 224810 - DNA, 20 bp, synthetic construct
  source 1..20: mol_type = other DNA
ggggcagacaaagaaaggga

SEQ ID NO: 224811 - DNA, 20 bp, synthetic construct
  source 1..20: mol_type = other DNA
gggggcagacaaagaaaggg

SEQ ID NO: 224812 - DNA, 20 bp, synthetic construct
  source 1..20: mol_type = other DNA
tgggggcagacaaagaaagg

SEQ ID NO: 224813 - DNA, 20 bp, synthetic construct
  source 1..20: mol_type = other DNA
gtgggggcagacaaagaaag

SEQ ID NO: 224814 - DNA, 20 bp, synthetic construct
  source 1..20: mol_type = other DNA
ggtgggggcagacaaagaaa

SEQ ID NO: 224815 - DNA, 20 bp, synthetic construct
  source 1..20: mol_type = other DNA
gggtgggggcagacaaagaa

SEQ ID NO: 224816 - DNA, 20 bp, synthetic construct
  source 1..20: mol_type = other DNA
agggtgggggcagacaaaga

SEQ ID NO: 224817 - DNA, 20 bp, synthetic construct
  source 1..20: mol_type = other DNA
gagggtgggggcagacaaag

SEQ ID NO: 224818 - DNA, 20 bp, synthetic construct
  source 1..20: mol_type = other DNA
ggagggtgggggcagacaaa

SEQ ID NO: 224819 - DNA, 20 bp, synthetic construct
  source 1..20: mol_type = other DNA
tggagggtgggggcagacaa

SEQ ID NO: 224820 - DNA, 20 bp, synthetic construct
  source 1..20: mol_type = other DNA
ctggagggtgggggcagaca

SEQ ID NO: 224821 - DNA, 20 bp, synthetic construct
  source 1..20: mol_type = other DNA
tctggagggtgggggcagac

SEQ ID NO: 224822 - DNA, 20 bp, synthetic construct
  source 1..20: mol_type = other DNA
atctggagggtgggggcaga

SEQ ID NO: 224823 - DNA, 20 bp, synthetic construct
  source 1..20: mol_type = other DNA
aatctggagggtgggggcag

SEQ ID NO: 224824 - DNA, 20 bp, synthetic construct
  source 1..20: mol_type = other DNA
aaatctggagggtgggggca

SEQ ID NO: 224825 - DNA, 20 bp, synthetic construct
  source 1..20: mol_type = other DNA
gaaatctggagggtgggggc

SEQ ID NO: 224826 - DNA, 20 bp, synthetic construct
  source 1..20: mol_type = other DNA
ggaaatctggagggtggggg

SEQ ID NO: 224827 - DNA, 20 bp, synthetic construct
  source 1..20: mol_type = other DNA
cggaaatctggagggtgggg

SEQ ID NO: 224828 - DNA, 20 bp, synthetic construct
  source 1..20: mol_type = other DNA
acggaaatctggagggtggg

SEQ ID NO: 224829 - DNA, 20 bp, synthetic construct
  source 1..20: mol_type = other DNA
cacggaaatctggagggtgg

SEQ ID NO: 224830 - DNA, 20 bp, synthetic construct
  source 1..20: mol_type = other DNA
acacggaaatctggagggtg

SEQ ID NO: 224831 - DNA, 20 bp, synthetic construct
  source 1..20: mol_type = other DNA
gacacggaaatctggagggt

SEQ ID NO: 224832 - DNA, 20 bp, synthetic construct
  source 1..20: mol_type = other DNA
agacacggaaatctggaggg

SEQ ID NO: 224833 - DNA, 20 bp, synthetic construct
  source 1..20: mol_type = other DNA
gagacacggaaatctggagg

SEQ ID NO: 224834 - DNA, 20 bp, synthetic construct
  source 1..20: mol_type = other DNA
ggagacacggaaatctggag

SEQ ID NO: 224835 - DNA, 20 bp, synthetic construct
  source 1..20: mol_type = other DNA
tggagacacggaaatctgga

SEQ ID NO: 224836 - DNA, 20 bp, synthetic construct
  source 1..20: mol_type = other DNA
ctggagacacggaaatctgg

SEQ ID NO: 224837 - DNA, 20 bp, synthetic construct
  source 1..20: mol_type = other DNA
actggagacacggaaatctg

SEQ ID NO: 224838 - DNA, 20 bp, synthetic construct
  source 1..20: mol_type = other DNA
cactggagacacggaaatct

SEQ ID NO: 224839 - DNA, 20 bp, synthetic construct
  source 1..20: mol_type = other DNA
acactggagacacggaaatc

SEQ ID NO: 224840 - DNA, 20 bp, synthetic construct
  source 1..20: mol_type = other DNA
gacactggagacacggaaat

SEQ ID NO: 224841 - DNA, 20 bp, synthetic construct
  source 1..20: mol_type = other DNA
agacactggagacacggaaa

SEQ ID NO: 224842 - DNA, 20 bp, synthetic construct
  source 1..20: mol_type = other DNA
gagacactggagacacggaa

SEQ ID NO: 224843 - DNA, 20 bp, synthetic construct
  source 1..20: mol_type = other DNA
ggagacactggagacacgga

SEQ ID NO: 224844 - DNA, 20 bp, synthetic construct
  source 1..20: mol_type = other DNA
gggagacactggagacacgg

SEQ ID NO: 224845 - DNA, 20 bp, synthetic construct
  source 1..20: mol_type = other DNA
agggagacactggagacacg

SEQ ID NO: 224846 - DNA, 20 bp, synthetic construct
  source 1..20: mol_type = other DNA
tagggagacactggagacac

SEQ ID NO: 224847 - DNA, 20 bp, synthetic construct
  source 1..20: mol_type = other DNA
gtagggagacactggagaca

SEQ ID NO: 224848 - DNA, 20 bp, synthetic construct
  source 1..20: mol_type = other DNA
cgtagggagacactggagac

SEQ ID NO: 224849 - DNA, 20 bp, synthetic construct
  source 1..20: mol_type = other DNA
tcgtagggagacactggaga

SEQ ID NO: 224850 - DNA, 20 bp, synthetic construct
  source 1..20: mol_type = other DNA
ctcgtagggagacactggag

SEQ ID NO: 224851 - DNA, 20 bp, synthetic construct
  source 1..20: mol_type = other DNA
cctcgtagggagacactgga

SEQ ID NO: 224852 - DNA, 20 bp, synthetic construct
  source 1..20: mol_type = other DNA
gcctcgtagggagacactgg

SEQ ID NO: 224853 - DNA, 20 bp, synthetic construct
  source 1..20: mol_type = other DNA
tgcctcgtagggagacactg

SEQ ID NO: 224854 - DNA, 20 bp, synthetic construct
  source 1..20: mol_type = other DNA
atgcctcgtagggagacact

SEQ ID NO: 224855 - DNA, 20 bp, synthetic construct
  source 1..20: mol_type = other DNA
catgcctcgtagggagacac

SEQ ID NO: 224856 - DNA, 20 bp, synthetic construct
  source 1..20: mol_type = other DNA
tcatgcctcgtagggagaca

SEQ ID NO: 224857 - DNA, 20 bp, synthetic construct
  source 1..20: mol_type = other DNA
ttcatgcctcgtagggagac

SEQ ID NO: 224858 - DNA, 20 bp, synthetic construct
  source 1..20: mol_type = other DNA
attcatgcctcgtagggaga

SEQ ID NO: 224859 - DNA, 20 bp, synthetic construct
  source 1..20: mol_type = other DNA
aattcatgcctcgtagggag

SEQ ID NO: 224860 - DNA, 20 bp, synthetic construct
  source 1..20: mol_type = other DNA
caattcatgcctcgtaggga

SEQ ID NO: 224861 - DNA, 20 bp, synthetic construct
  source 1..20: mol_type = other DNA
tcaattcatgcctcgtaggg

SEQ ID NO: 224862 - DNA, 20 bp, synthetic construct
  source 1..20: mol_type = other DNA
ctcaattcatgcctcgtagg

SEQ ID NO: 224863 - DNA, 20 bp, synthetic construct
  source 1..20: mol_type = other DNA
tctcaattcatgcctcgtag

SEQ ID NO: 224864 - DNA, 20 bp, synthetic construct
  source 1..20: mol_type = other DNA
gtctcaattcatgcctcgta

SEQ ID NO: 224865 - DNA, 20 bp, synthetic construct
  source 1..20: mol_type = other DNA
agtctcaattcatgcctcgt

SEQ ID NO: 224866 - DNA, 20 bp, synthetic construct
  source 1..20: mol_type = other DNA
cagtctcaattcatgcctcg

SEQ ID NO: 224867 - DNA, 20 bp, synthetic construct
  source 1..20: mol_type = other DNA
ccagtctcaattcatgcctc

SEQ ID NO: 224868 - DNA, 20 bp, synthetic construct
  source 1..20: mol_type = other DNA
cccagtctcaattcatgcct

SEQ ID NO: 224869 - DNA, 20 bp, synthetic construct
  source 1..20: mol_type = other DNA
tcccagtctcaattcatgcc

SEQ ID NO: 224870 - DNA, 20 bp, synthetic construct
  source 1..20: mol_type = other DNA
ctcccagtctcaattcatgc

SEQ ID NO: 224871 - DNA, 20 bp, synthetic construct
  source 1..20: mol_type = other DNA
cctcccagtctcaattcatg

SEQ ID NO: 224872 - DNA, 20 bp, synthetic construct
  source 1..20: mol_type = other DNA
ccctcccagtctcaattcat

SEQ ID NO: 224873 - DNA, 20 bp, synthetic construct
  source 1..20: mol_type = other DNA
accctcccagtctcaattca

SEQ ID NO: 224874 - DNA, 20 bp, synthetic construct
  source 1..20: mol_type = other DNA
caccctcccagtctcaattc

SEQ ID NO: 224875 - DNA, 20 bp, synthetic construct
  source 1..20: mol_type = other DNA
acaccctcccagtctcaatt

SEQ ID NO: 224876 - DNA, 20 bp, synthetic construct
  source 1..20: mol_type = other DNA
cacaccctcccagtctcaat

SEQ ID NO: 224877 - DNA, 20 bp, synthetic construct
  source 1..20: mol_type = other DNA
tcacaccctcccagtctcaa

SEQ ID NO: 224878 - DNA, 20 bp, synthetic construct
  source 1..20: mol_type = other DNA
atcacaccctcccagtctca

SEQ ID NO: 224879 - DNA, 20 bp, synthetic construct
  source 1..20: mol_type = other DNA
aatcacaccctcccagtctc

SEQ ID NO: 224880 - DNA, 20 bp, synthetic construct
  source 1..20: mol_type = other DNA
gaatcacaccctcccagtct

SEQ ID NO: 224881 - DNA, 20 bp, synthetic construct
  source 1..20: mol_type = other DNA
agaatcacaccctcccagtc

SEQ ID NO: 224882 - DNA, 20 bp, synthetic construct
  source 1..20: mol_type = other DNA
cagaatcacaccctcccagt

SEQ ID NO: 224883 - DNA, 20 bp, synthetic construct
  source 1..20: mol_type = other DNA
tcagaatcacaccctcccag

SEQ ID NO: 224884 - DNA, 20 bp, synthetic construct
  source 1..20: mol_type = other DNA
ttcagaatcacaccctccca

SEQ ID NO: 224885 - DNA, 20 bp, synthetic construct
  source 1..20: mol_type = other DNA
cttcagaatcacaccctccc

SEQ ID NO: 224886 - DNA, 20 bp, synthetic construct
  source 1..20: mol_type = other DNA
tcttcagaatcacaccctcc

SEQ ID NO: 224887 - DNA, 20 bp, synthetic construct
  source 1..20: mol_type = other DNA
ttcttcagaatcacaccctc

SEQ ID NO: 224888 - DNA, 20 bp, synthetic construct
  source 1..20: mol_type = other DNA
cttcttcagaatcacaccct

SEQ ID NO: 224889 - DNA, 20 bp, synthetic construct
  source 1..20: mol_type = other DNA
ccttcttcagaatcacaccc

SEQ ID NO: 224890 - DNA, 20 bp, synthetic construct
  source 1..20: mol_type = other DNA
gccttcttcagaatcacacc

SEQ ID NO: 224891 - DNA, 20 bp, synthetic construct
  source 1..20: mol_type = other DNA
tgccttcttcagaatcacac

SEQ ID NO: 224892 - DNA, 20 bp, synthetic construct
  source 1..20: mol_type = other DNA
gtgccttcttcagaatcaca

SEQ ID NO: 224893 - DNA, 20 bp, synthetic construct
  source 1..20: mol_type = other DNA
ggtgccttcttcagaatcac

SEQ ID NO: 224894 - DNA, 20 bp, synthetic construct
  source 1..20: mol_type = other DNA
tggtgccttcttcagaatca

SEQ ID NO: 224895 - DNA, 20 bp, synthetic construct
  source 1..20: mol_type = other DNA
ttggtgccttcttcagaatc

SEQ ID NO: 224896 - DNA, 20 bp, synthetic construct
  source 1..20: mol_type = other DNA
gttggtgccttcttcagaat

SEQ ID NO: 224897 - DNA, 20 bp, synthetic construct
  source 1..20: mol_type = other DNA
tgttggtgccttcttcagaa

SEQ ID NO: 224898 - DNA, 20 bp, synthetic construct
  source 1..20: mol_type = other DNA
ctgttggtgccttcttcaga

SEQ ID NO: 224899 - DNA, 20 bp, synthetic construct
  source 1..20: mol_type = other DNA
actgttggtgccttcttcag

SEQ ID NO: 224900 - DNA, 20 bp, synthetic construct
  source 1..20: mol_type = other DNA
cactgttggtgccttcttca

SEQ ID NO: 224901 - DNA, 20 bp, synthetic construct
  source 1..20: mol_type = other DNA
tcactgttggtgccttcttc

SEQ ID NO: 224902 - DNA, 20 bp, synthetic construct
  source 1..20: mol_type = other DNA
gtcactgttggtgccttctt

SEQ ID NO: 224903 - DNA, 20 bp, synthetic construct
  source 1..20: mol_type = other DNA
agtcactgttggtgccttct

SEQ ID NO: 224904 - DNA, 20 bp, synthetic construct
  source 1..20: mol_type = other DNA
gagtcactgttggtgccttc

SEQ ID NO: 224905 - DNA, 20 bp, synthetic construct
  source 1..20: mol_type = other DNA
tgagtcactgttggtgcctt

SEQ ID NO: 224906 - DNA, 20 bp, synthetic construct
  source 1..20: mol_type = other DNA
ctgagtcactgttggtgcct

SEQ ID NO: 224907 - DNA, 20 bp, synthetic construct
  source 1..20: mol_type = other DNA
gctgagtcactgttggtgcc

SEQ ID NO: 224908 - DNA, 20 bp, synthetic construct
  source 1..20: mol_type = other DNA
agctgagtcactgttggtgc

SEQ ID NO: 224909 - DNA, 20 bp, synthetic construct
  source 1..20: mol_type = other DNA
tagctgagtcactgttggtg

SEQ ID NO: 224910 - DNA, 20 bp, synthetic construct
  source 1..20: mol_type = other DNA
ctagctgagtcactgttggt

SEQ ID NO: 224911 - DNA, 20 bp, synthetic construct
  source 1..20: mol_type = other DNA
gctagctgagtcactgttgg

SEQ ID NO: 224912 - DNA, 20 bp, synthetic construct
  source 1..20: mol_type = other DNA
ggctagctgagtcactgttg

SEQ ID NO: 224913 - DNA, 20 bp, synthetic construct
  source 1..20: mol_type = other DNA
gggctagctgagtcactgtt

SEQ ID NO: 224914 - DNA, 20 bp, synthetic construct
  source 1..20: mol_type = other DNA
ggggctagctgagtcactgt

SEQ ID NO: 224915 - DNA, 20 bp, synthetic construct
  source 1..20: mol_type = other DNA
aggggctagctgagtcactg

SEQ ID NO: 224916 - DNA, 20 bp, synthetic construct
  source 1..20: mol_type = other DNA
aaggggctagctgagtcact

SEQ ID NO: 224917 - DNA, 20 bp, synthetic construct
  source 1..20: mol_type = other DNA
gaaggggctagctgagtcac

SEQ ID NO: 224918 - DNA, 20 bp, synthetic construct
  source 1..20: mol_type = other DNA
ggaaggggctagctgagtca

SEQ ID NO: 224919 - DNA, 20 bp, synthetic construct
  source 1..20: mol_type = other DNA
gggaaggggctagctgagtc

SEQ ID NO: 224920 - DNA, 20 bp, synthetic construct
  source 1..20: mol_type = other DNA
ggggaaggggctagctgagt

SEQ ID NO: 224921 - DNA, 20 bp, synthetic construct
  source 1..20: mol_type = other DNA
gggggaaggggctagctgag

SEQ ID NO: 224922 - DNA, 20 bp, synthetic construct
  source 1..20: mol_type = other DNA
tgggggaaggggctagctga

SEQ ID NO: 224923 - DNA, 20 bp, synthetic construct
  source 1..20: mol_type = other DNA
gtgggggaaggggctagctg

SEQ ID NO: 224924 - DNA, 20 bp, synthetic construct
  source 1..20: mol_type = other DNA
ggtgggggaaggggctagct

SEQ ID NO: 224925 - DNA, 20 bp, synthetic construct
  source 1..20: mol_type = other DNA
gggtgggggaaggggctagc

SEQ ID NO: 224926 - DNA, 20 bp, synthetic construct
  source 1..20: mol_type = other DNA
ggggtgggggaaggggctag

SEQ ID NO: 224927 - DNA, 20 bp, synthetic construct
  source 1..20: mol_type = other DNA
cggggtgggggaaggggcta

SEQ ID NO: 224928 - DNA, 20 bp, synthetic construct
  source 1..20: mol_type = other DNA
gcggggtgggggaaggggct

SEQ ID NO: 224929 - DNA, 20 bp, synthetic construct
  source 1..20: mol_type = other DNA
ggcggggtgggggaaggggc

SEQ ID NO: 224930 - DNA, 20 bp, synthetic construct
  source 1..20: mol_type = other DNA
gggcggggtgggggaagggg

SEQ ID NO: 224931 - DNA, 20 bp, synthetic construct
  source 1..20: mol_type = other DNA
ggggcggggtgggggaaggg

SEQ ID NO: 224932 - DNA, 20 bp, synthetic construct
  source 1..20: mol_type = other DNA
gggggcggggtgggggaagg

SEQ ID NO: 224933 - DNA, 20 bp, synthetic construct
  source 1..20: mol_type = other DNA
ggggggcggggtgggggaag

SEQ ID NO: 224934 - DNA, 20 bp, synthetic construct
  source 1..20: mol_type = other DNA
cggggggcggggtgggggaa

SEQ ID NO: 224935 - DNA, 20 bp, synthetic construct
  source 1..20: mol_type = other DNA
ccggggggcggggtggggga

SEQ ID NO: 224936 - DNA, 20 bp, synthetic construct
  source 1..20: mol_type = other DNA
cccggggggcggggtggggg

SEQ ID NO: 224937 - DNA, 20 bp, synthetic construct
  source 1..20: mol_type = other DNA
gcccggggggcggggtgggg

SEQ ID NO: 224938 - DNA, 20 bp, synthetic construct
  source 1..20: mol_type = other DNA
ggcccggggggcggggtggg

SEQ ID NO: 224939 - DNA, 20 bp, synthetic construct
  source 1..20: mol_type = other DNA
aggcccggggggcggggtgg

SEQ ID NO: 224940 - DNA, 20 bp, synthetic construct
  source 1..20: mol_type = other DNA
gaggcccggggggcggggtg

SEQ ID NO: 224941 - DNA, 20 bp, synthetic construct
  source 1..20: mol_type = other DNA
tgaggcccggggggcggggt

SEQ ID NO: 224942 - DNA, 20 bp, synthetic construct
  source 1..20: mol_type = other DNA
ttgaggcccggggggcgggg

SEQ ID NO: 224943 - DNA, 20 bp, synthetic construct
  source 1..20: mol_type = other DNA
attgaggcccggggggcggg

SEQ ID NO: 224944 - DNA, 20 bp, synthetic construct
  source 1..20: mol_type = other DNA
aattgaggcccggggggcgg

SEQ ID NO: 224945 - DNA, 20 bp, synthetic construct
  source 1..20: mol_type = other DNA
aaattgaggcccggggggcg

SEQ ID NO: 224946 - DNA, 20 bp, synthetic construct
  source 1..20: mol_type = other DNA
taaattgaggcccggggggc

SEQ ID NO: 224947 - DNA, 20 bp, synthetic construct
  source 1..20: mol_type = other DNA
ctaaattgaggcccgggggg

SEQ ID NO: 224948 - DNA, 20 bp, synthetic construct
  source 1..20: mol_type = other DNA
gctaaattgaggcccggggg

SEQ ID NO: 224949 - DNA, 20 bp, synthetic construct
  source 1..20: mol_type = other DNA
agctaaattgaggcccgggg

SEQ ID NO: 224950 - DNA, 20 bp, synthetic construct
  source 1..20: mol_type = other DNA
tagctaaattgaggcccggg

SEQ ID NO: 224951 - DNA, 20 bp, synthetic construct
  source 1..20: mol_type = other DNA
ttagctaaattgaggcccgg

SEQ ID NO: 224952 - DNA, 20 bp, synthetic construct
  source 1..20: mol_type = other DNA
tttagctaaattgaggcccg

SEQ ID NO: 224953 - DNA, 20 bp, synthetic construct
  source 1..20: mol_type = other DNA
ttttagctaaattgaggccc

SEQ ID NO: 224954 - DNA, 20 bp, synthetic construct
  source 1..20: mol_type = other DNA
tttttagctaaattgaggcc

SEQ ID NO: 224955 - DNA, 20 bp, synthetic construct
  source 1..20: mol_type = other DNA
ttttttagctaaattgaggc

SEQ ID NO: 224956 - DNA, 20 bp, synthetic construct
  source 1..20: mol_type = other DNA
gttttttagctaaattgagg

SEQ ID NO: 224957 - DNA, 20 bp, synthetic construct
  source 1..20: mol_type = other DNA
ggttttttagctaaattgag

SEQ ID NO: 224958 - DNA, 20 bp, synthetic construct
  source 1..20: mol_type = other DNA
tggttttttagctaaattga

SEQ ID NO: 224959 - DNA, 20 bp, synthetic construct
  source 1..20: mol_type = other DNA
gtggttttttagctaaattg

SEQ ID NO: 224960 - DNA, 20 bp, synthetic construct
  source 1..20: mol_type = other DNA
tgtggttttttagctaaatt

SEQ ID NO: 224961 - DNA, 20 bp, synthetic construct
  source 1..20: mol_type = other DNA
ctgtggttttttagctaaat

SEQ ID NO: 224962 - DNA, 20 bp, synthetic construct
  source 1..20: mol_type = other DNA
cctgtggttttttagctaaa

SEQ ID NO: 224963 - DNA, 20 bp, synthetic construct
  source 1..20: mol_type = other DNA
ccctgtggttttttagctaa

SEQ ID NO: 224964 - DNA, 20 bp, synthetic construct
  source 1..20: mol_type = other DNA
tccctgtggttttttagcta

SEQ ID NO: 224965 - DNA, 20 bp, synthetic construct
  source 1..20: mol_type = other DNA
gtccctgtggttttttagct

SEQ ID NO: 224966 - DNA, 20 bp, synthetic construct
  source 1..20: mol_type = other DNA
cgtccctgtggttttttagc

SEQ ID NO: 224967 - DNA, 20 bp, synthetic construct
  source 1..20: mol_type = other DNA
ccgtccctgtggttttttag

SEQ ID NO: 224968 - DNA, 20 bp, synthetic construct
  source 1..20: mol_type = other DNA
tccgtccctgtggtttttta

SEQ ID NO: 224969 - DNA, 20 bp, synthetic construct
  source 1..20: mol_type = other DNA
gtccgtccctgtggtttttt

SEQ ID NO: 224970 - DNA, 20 bp, synthetic construct
  source 1..20: mol_type = other DNA
agtccgtccctgtggttttt

SEQ ID NO: 224971 - DNA, 20 bp, synthetic construct
  source 1..20: mol_type = other DNA
gagtccgtccctgtggtttt

SEQ ID NO: 224972 - DNA, 20 bp, synthetic construct
  source 1..20: mol_type = other DNA
tgagtccgtccctgtggttt

SEQ ID NO: 224973 - DNA, 20 bp, synthetic construct
  source 1..20: mol_type = other DNA
ctgagtccgtccctgtggtt

SEQ ID NO: 224974 - DNA, 20 bp, synthetic construct
  source 1..20: mol_type = other DNA
cctgagtccgtccctgtggt

SEQ ID NO: 224975 - DNA, 20 bp, synthetic construct
  source 1..20: mol_type = other DNA
tcctgagtccgtccctgtgg

SEQ ID NO: 224976 - DNA, 20 bp, synthetic construct
  source 1..20: mol_type = other DNA
ctcctgagtccgtccctgtg

SEQ ID NO: 224977 - DNA, 20 bp, synthetic construct
  source 1..20: mol_type = other DNA
cctcctgagtccgtccctgt

SEQ ID NO: 224978 - DNA, 20 bp, synthetic construct
  source 1..20: mol_type = other DNA
gcctcctgagtccgtccctg

SEQ ID NO: 224979 - DNA, 20 bp, synthetic construct
  source 1..20: mol_type = other DNA
tgcctcctgagtccgtccct

SEQ ID NO: 224980 - DNA, 20 bp, synthetic construct
  source 1..20: mol_type = other DNA
ttgcctcctgagtccgtccc

SEQ ID NO: 224981 - DNA, 20 bp, synthetic construct
  source 1..20: mol_type = other DNA
attgcctcctgagtccgtcc

SEQ ID NO: 224982 - DNA, 20 bp, synthetic construct
  source 1..20: mol_type = other DNA
tattgcctcctgagtccgtc

SEQ ID NO: 224983 - DNA, 20 bp, synthetic construct
  source 1..20: mol_type = other DNA
gtattgcctcctgagtccgt

SEQ ID NO: 224984 - DNA, 20 bp, synthetic construct
  source 1..20: mol_type = other DNA
ggtattgcctcctgagtccg

SEQ ID NO: 224985 - DNA, 20 bp, synthetic construct
  source 1..20: mol_type = other DNA
aggtattgcctcctgagtcc

SEQ ID NO: 224986 - DNA, 20 bp, synthetic construct
  source 1..20: mol_type = other DNA
aaggtattgcctcctgagtc

SEQ ID NO: 224987 - DNA, 20 bp, synthetic construct
  source 1..20: mol_type = other DNA
aaaggtattgcctcctgagt

SEQ ID NO: 224988 - DNA, 20 bp, synthetic construct
  source 1..20: mol_type = other DNA
gaaaggtattgcctcctgag

SEQ ID NO: 224989 - DNA, 20 bp, synthetic construct
  source 1..20: mol_type = other DNA
ggaaaggtattgcctcctga

SEQ ID NO: 224990 - DNA, 20 bp, synthetic construct
  source 1..20: mol_type = other DNA
tggaaaggtattgcctcctg

SEQ ID NO: 224991 - DNA, 20 bp, synthetic construct
  source 1..20: mol_type = other DNA
ttggaaaggtattgcctcct

SEQ ID NO: 224992 - DNA, 20 bp, synthetic construct
  source 1..20: mol_type = other DNA
cttggaaaggtattgcctcc

SEQ ID NO: 224993 - DNA, 20 bp, synthetic construct
  source 1..20: mol_type = other DNA
ccttggaaaggtattgcctc

SEQ ID NO: 224994 - DNA, 20 bp, synthetic construct
  source 1..20: mol_type = other DNA
cccttggaaaggtattgcct

SEQ ID NO: 224995 - DNA, 20 bp, synthetic construct
  source 1..20: mol_type = other DNA
acccttggaaaggtattgcc

SEQ ID NO: 224996 - DNA, 20 bp, synthetic construct
  source 1..20: mol_type = other DNA
gacccttggaaaggtattgc

SEQ ID NO: 224997 - DNA, 20 bp, synthetic construct
  source 1..20: mol_type = other DNA
ggacccttggaaaggtattg

SEQ ID NO: 224998 - DNA, 20 bp, synthetic construct
  source 1..20: mol_type = other DNA
gggacccttggaaaggtatt

SEQ ID NO: 224999 - DNA, 20 bp, synthetic construct
  source 1..20: mol_type = other DNA
agggacccttggaaaggtat

SEQ ID NO: 225000 - DNA, 20 bp, synthetic construct
  source 1..20: mol_type = other DNA
tagggacccttggaaaggta

SEQ ID NO: 225001 - DNA, 20 bp, synthetic construct
  source 1..20: mol_type = other DNA
ttagggacccttggaaaggt

SEQ ID NO: 225002 - DNA, 20 bp, synthetic construct
  source 1..20: mol_type = other DNA
tttagggacccttggaaagg

SEQ ID NO: 225003 - DNA, 20 bp, synthetic construct
  source 1..20: mol_type = other DNA
ttttagggacccttggaaag

SEQ ID NO: 225004 - DNA, 20 bp, synthetic construct
  source 1..20: mol_type = other DNA
tttttagggacccttggaaa

SEQ ID NO: 225005 - DNA, 20 bp, synthetic construct
  source 1..20: mol_type = other DNA
ttttttagggacccttggaa

SEQ ID NO: 225006 - DNA, 20 bp, synthetic construct
  source 1..20: mol_type = other DNA
attttttagggacccttgga

SEQ ID NO: 225007 - DNA, 20 bp, synthetic construct
  source 1..20: mol_type = other DNA
cattttttagggacccttgg

SEQ ID NO: 225008 - DNA, 20 bp, synthetic construct
  source 1..20: mol_type = other DNA
acattttttagggacccttg

SEQ ID NO: 225009 - DNA, 20 bp, synthetic construct
  source 1..20: mol_type = other DNA
gacattttttagggaccctt

SEQ ID NO: 225010 - DNA, 20 bp, synthetic construct
  source 1..20: mol_type = other DNA
ggacattttttagggaccct

SEQ ID NO: 225011 - DNA, 20 bp, synthetic construct
  source 1..20: mol_type = other DNA
gggacattttttagggaccc

SEQ ID NO: 225012 - DNA, 20 bp, synthetic construct
  source 1..20: mol_type = other DNA
tgggacattttttagggacc

SEQ ID NO: 225013 - DNA, 20 bp, synthetic construct
  source 1..20: mol_type = other DNA
atgggacattttttagggac

SEQ ID NO: 225014 - DNA, 20 bp, synthetic construct
  source 1..20: mol_type = other DNA
aatgggacattttttaggga

SEQ ID NO: 225015 - DNA, 20 bp, synthetic construct
  source 1..20: mol_type = other DNA
aaatgggacattttttaggg

SEQ ID NO: 225016 - DNA, 20 bp, synthetic construct
  source 1..20: mol_type = other DNA
aaaatgggacattttttagg

SEQ ID NO: 225017 - DNA, 20 bp, synthetic construct
  source 1..20: mol_type = other DNA
taaaatgggacattttttag

SEQ ID NO: 225018 - DNA, 20 bp, synthetic construct
  source 1..20: mol_type = other DNA
ctaaaatgggacatttttta

SEQ ID NO: 225019 - DNA, 20 bp, synthetic construct
  source 1..20: mol_type = other DNA
actaaaatgggacatttttt

SEQ ID NO: 225020 - DNA, 20 bp, synthetic construct
  source 1..20: mol_type = other DNA
cactaaaatgggacattttt

SEQ ID NO: 225021 - DNA, 20 bp, synthetic construct
  source 1..20: mol_type = other DNA
acactaaaatgggacatttt

SEQ ID NO: 225022 - DNA, 20 bp, synthetic construct
  source 1..20: mol_type = other DNA
gacactaaaatgggacattt

SEQ ID NO: 225023 - DNA, 20 bp, synthetic construct
  source 1..20: mol_type = other DNA
ggacactaaaatgggacatt

SEQ ID NO: 225024 - DNA, 20 bp, synthetic construct
  source 1..20: mol_type = other DNA
tggacactaaaatgggacat

SEQ ID NO: 225025 - DNA, 20 bp, synthetic construct
  source 1..20: mol_type = other DNA
ctggacactaaaatgggaca

SEQ ID NO: 225026 - DNA, 20 bp, synthetic construct
  source 1..20: mol_type = other DNA
cctggacactaaaatgggac

SEQ ID NO: 225027 - DNA, 20 bp, synthetic construct
  source 1..20: mol_type = other DNA
acctggacactaaaatggga

SEQ ID NO: 225028 - DNA, 20 bp, synthetic construct
  source 1..20: mol_type = other DNA
aacctggacactaaaatggg

SEQ ID NO: 225029 - DNA, 20 bp, synthetic construct
  source 1..20: mol_type = other DNA
aaacctggacactaaaatgg

SEQ ID NO: 225030 - DNA, 20 bp, synthetic construct
  source 1..20: mol_type = other DNA
gaaacctggacactaaaatg

SEQ ID NO: 225031 - DNA, 20 bp, synthetic construct
  source 1..20: mol_type = other DNA
tgaaacctggacactaaaat

SEQ ID NO: 225032 - DNA, 20 bp, synthetic construct
  source 1..20: mol_type = other DNA
gtgaaacctggacactaaaa

SEQ ID NO: 225033 - DNA, 20 bp, synthetic construct
  source 1..20: mol_type = other DNA
agtgaaacctggacactaaa

SEQ ID NO: 225034 - DNA, 20 bp, synthetic construct
  source 1..20: mol_type = other DNA
gagtgaaacctggacactaa

SEQ ID NO: 225035 - DNA, 20 bp, synthetic construct
  source 1..20: mol_type = other DNA
tgagtgaaacctggacacta

SEQ ID NO: 225036 - DNA, 20 bp, synthetic construct
  source 1..20: mol_type = other DNA
ttgagtgaaacctggacact

SEQ ID NO: 225037 - DNA, 20 bp, synthetic construct
  source 1..20: mol_type = other DNA
gttgagtgaaacctggacac

SEQ ID NO: 225038 - DNA, 20 bp, synthetic construct
  source 1..20: mol_type = other DNA
agttgagtgaaacctggaca

SEQ ID NO: 225039 - DNA, 20 bp, synthetic construct
  source 1..20: mol_type = other DNA
aagttgagtgaaacctggac

SEQ ID NO: 225040 - DNA, 20 bp, synthetic construct
  source 1..20: mol_type = other DNA
aaagttgagtgaaacctgga

SEQ ID NO: 225041 - DNA, 20 bp, synthetic construct
  source 1..20: mol_type = other DNA
taaagttgagtgaaacctgg

SEQ ID NO: 225042 - DNA, 20 bp, synthetic construct
  source 1..20: mol_type = other DNA
ctaaagttgagtgaaacctg

SEQ ID NO: 225043 - DNA, 20 bp, synthetic construct
  source 1..20: mol_type = other DNA
actaaagttgagtgaaacct

SEQ ID NO: 225044 - DNA, 20 bp, synthetic construct
  source 1..20: mol_type = other DNA
cactaaagttgagtgaaacc

SEQ ID NO: 225045 - DNA, 20 bp, synthetic construct
  source 1..20: mol_type = other DNA
gcactaaagttgagtgaaac

SEQ ID NO: 225046 - DNA, 20 bp, synthetic construct
  source 1..20: mol_type = other DNA
ggcactaaagttgagtgaaa

SEQ ID NO: 225047 - DNA, 20 bp, synthetic construct
  source 1..20: mol_type = other DNA
aggcactaaagttgagtgaa

SEQ ID NO: 225048 - DNA, 20 bp, synthetic construct
  source 1..20: mol_type = other DNA
gaggcactaaagttgagtga

SEQ ID NO: 225049 - DNA, 20 bp, synthetic construct
  source 1..20: mol_type = other DNA
ggaggcactaaagttgagtg

SEQ ID NO: 225050 - DNA, 20 bp, synthetic construct
  source 1..20: mol_type = other DNA
gggaggcactaaagttgagt

SEQ ID NO: 225051 - DNA, 20 bp, synthetic construct
  source 1..20: mol_type = other DNA
ggggaggcactaaagttgag

SEQ ID NO: 225052 - DNA, 20 bp, synthetic construct
  source 1..20: mol_type = other DNA
aggggaggcactaaagttga

SEQ ID NO: 225053 - DNA, 20 bp, synthetic construct
  source 1..20: mol_type = other DNA
taggggaggcactaaagttg

SEQ ID NO: 225054 - DNA, 20 bp, synthetic construct
  source 1..20: mol_type = other DNA
ttaggggaggcactaaagtt

SEQ ID NO: 225055 - DNA, 20 bp, synthetic construct
  source 1..20: mol_type = other DNA
tttaggggaggcactaaagt

SEQ ID NO: 225056 - DNA, 20 bp, synthetic construct
  source 1..20: mol_type = other DNA
ttttaggggaggcactaaag

SEQ ID NO: 225057 - DNA, 20 bp, synthetic construct
  source 1..20: mol_type = other DNA
attttaggggaggcactaaa

SEQ ID NO: 225058 - DNA, 20 bp, synthetic construct
  source 1..20: mol_type = other DNA
cattttaggggaggcactaa

SEQ ID NO: 225059 - DNA, 20 bp, synthetic construct
  source 1..20: mol_type = other DNA
acattttaggggaggcacta

SEQ ID NO: 225060 - DNA, 20 bp, synthetic construct
  source 1..20: mol_type = other DNA
cacattttaggggaggcact

SEQ ID NO: 225061 - DNA, 20 bp, synthetic construct
  source 1..20: mol_type = other DNA
acacattttaggggaggcac

SEQ ID NO: 225062 - DNA, 20 bp, synthetic construct
  source 1..20: mol_type = other DNA
aacacattttaggggaggca

SEQ ID NO: 225063 - DNA, 20 bp, synthetic construct
  source 1..20: mol_type = other DNA
gaacacattttaggggaggc

SEQ ID NO: 225064 - DNA, 20 bp, synthetic construct
  source 1..20: mol_type = other DNA
ggaacacattttaggggagg

SEQ ID NO: 225065 - DNA, 20 bp, synthetic construct
  source 1..20: mol_type = other DNA
aggaacacattttaggggag

SEQ ID NO: 225066 - DNA, 20 bp, synthetic construct
  source 1..20: mol_type = other DNA
aaggaacacattttagggga

SEQ ID NO: 225067 - DNA, 20 bp, synthetic construct
  source 1..20: mol_type = other DNA
taaggaacacattttagggg

SEQ ID NO: 225068 - DNA, 20 bp, synthetic construct
  source 1..20: mol_type = other DNA
gtaaggaacacattttaggg

SEQ ID NO: 225069 - DNA, 20 bp, synthetic construct
  source 1..20: mol_type = other DNA
ggtaaggaacacattttagg

SEQ ID NO: 225070 - DNA, 20 bp, synthetic construct
  source 1..20: mol_type = other DNA
aggtaaggaacacattttag

SEQ ID NO: 225071 - DNA, 20 bp, synthetic construct
  source 1..20: mol_type = other DNA
gaggtaaggaacacatttta

SEQ ID NO: 225072 - DNA, 20 bp, synthetic construct
  source 1..20: mol_type = other DNA
ggaggtaaggaacacatttt

SEQ ID NO: 225073 - DNA, 20 bp, synthetic construct
  source 1..20: mol_type = other DNA
gggaggtaaggaacacattt

SEQ ID NO: 225074 - DNA, 20 bp, synthetic construct
  source 1..20: mol_type = other DNA
tgggaggtaaggaacacatt

SEQ ID NO: 225075 - DNA, 20 bp, synthetic construct
  source 1..20: mol_type = other DNA
gtgggaggtaaggaacacat

SEQ ID NO: 225076 - DNA, 20 bp, synthetic construct
  source 1..20: mol_type = other DNA
ggtgggaggtaaggaacaca

SEQ ID NO: 225077 - DNA, 20 bp, synthetic construct
  source 1..20: mol_type = other DNA
gggtgggaggtaaggaacac

SEQ ID NO: 225078 - DNA, 20 bp, synthetic construct
  source 1..20: mol_type = other DNA
ggggtgggaggtaaggaaca

SEQ ID NO: 225079 - DNA, 20 bp, synthetic construct
  source 1..20: mol_type = other DNA
tggggtgggaggtaaggaac

SEQ ID NO: 225080 - DNA, 20 bp, synthetic construct
  source 1..20: mol_type = other DNA
gtggggtgggaggtaaggaa

SEQ ID NO: 225081 - DNA, 20 bp, synthetic construct
  source 1..20: mol_type = other DNA
agtggggtgggaggtaagga

SEQ ID NO: 225082 - DNA, 20 bp, synthetic construct
  source 1..20: mol_type = other DNA
cagtggggtgggaggtaagg

SEQ ID NO: 225083 - DNA, 20 bp, synthetic construct
  source 1..20: mol_type = other DNA
gcagtggggtgggaggtaag

SEQ ID NO: 225084 - DNA, 20 bp, synthetic construct
  source 1..20: mol_type = other DNA
tgcagtggggtgggaggtaa

SEQ ID NO: 225085 - DNA, 20 bp, synthetic construct
  source 1..20: mol_type = other DNA
atgcagtggggtgggaggta

SEQ ID NO: 225086 - DNA, 20 bp, synthetic construct
  source 1..20: mol_type = other DNA
gatgcagtggggtgggaggt

SEQ ID NO: 225087 - DNA, 20 bp, synthetic construct
  source 1..20: mol_type = other DNA
agatgcagtggggtgggagg

SEQ ID NO: 225088 - DNA, 20 bp, synthetic construct
  source 1..20: mol_type = other DNA
tagatgcagtggggtgggag

SEQ ID NO: 225089 - DNA, 20 bp, synthetic construct
  source 1..20: mol_type = other DNA
ttagatgcagtggggtggga

SEQ ID NO: 225090 - DNA, 20 bp, synthetic construct
  source 1..20: mol_type = other DNA
cttagatgcagtggggtggg

SEQ ID NO: 225091 - DNA, 20 bp, synthetic construct
  source 1..20: mol_type = other DNA
acttagatgcagtggggtgg

SEQ ID NO: 225092 - DNA, 20 bp, synthetic construct
  source 1..20: mol_type = other DNA
gacttagatgcagtggggtg

SEQ ID NO: 225093 - DNA, 20 bp, synthetic construct
  source 1..20: mol_type = other DNA
tgacttagatgcagtggggt

SEQ ID NO: 225094 - DNA, 20 bp, synthetic construct
  source 1..20: mol_type = other DNA
gtgacttagatgcagtgggg

SEQ ID NO: 225095 - DNA, 20 bp, synthetic construct
  source 1..20: mol_type = other DNA
agtgacttagatgcagtggg

SEQ ID NO: 225096 - DNA, 20 bp, synthetic construct
  source 1..20: mol_type = other DNA
cagtgacttagatgcagtgg

SEQ ID NO: 225097 - DNA, 20 bp, synthetic construct
  source 1..20: mol_type = other DNA
gcagtgacttagatgcagtg

SEQ ID NO: 225098 - DNA, 20 bp, synthetic construct
  source 1..20: mol_type = other DNA
ggcagtgacttagatgcagt

SEQ ID NO: 225099 - DNA, 20 bp, synthetic construct
  source 1..20: mol_type = other DNA
aggcagtgacttagatgcag

SEQ ID NO: 225100 - DNA, 20 bp, synthetic construct
  source 1..20: mol_type = other DNA
caggcagtgacttagatgca

SEQ ID NO: 225101 - DNA, 20 bp, synthetic construct
  source 1..20: mol_type = other DNA
tcaggcagtgacttagatgc

SEQ ID NO: 225102 - DNA, 20 bp, synthetic construct
  source 1..20: mol_type = other DNA
ctcaggcagtgacttagatg

SEQ ID NO: 225103 - DNA, 20 bp, synthetic construct
  source 1..20: mol_type = other DNA
tctcaggcagtgacttagat

SEQ ID NO: 225104 - DNA, 20 bp, synthetic construct
  source 1..20: mol_type = other DNA
ttctcaggcagtgacttaga

SEQ ID NO: 225105 - DNA, 20 bp, synthetic construct
  source 1..20: mol_type = other DNA
tttctcaggcagtgacttag

SEQ ID NO: 225106 - DNA, 20 bp, synthetic construct
  source 1..20: mol_type = other DNA
ttttctcaggcagtgactta

SEQ ID NO: 225107 - DNA, 20 bp, synthetic construct
  source 1..20: mol_type = other DNA
gttttctcaggcagtgactt

SEQ ID NO: 225108 - DNA, 20 bp, synthetic construct
  source 1..20: mol_type = other DNA
tgttttctcaggcagtgact

SEQ ID NO: 225109 - DNA, 20 bp, synthetic construct
  source 1..20: mol_type = other DNA
ctgttttctcaggcagtgac

SEQ ID NO: 225110 - DNA, 20 bp, synthetic construct
  source 1..20: mol_type = other DNA
cctgttttctcaggcagtga

SEQ ID NO: 225111 - DNA, 20 bp, synthetic construct
  source 1..20: mol_type = other DNA
tcctgttttctcaggcagtg

SEQ ID NO: 225112 - DNA, 20 bp, synthetic construct
  source 1..20: mol_type = other DNA
atcctgttttctcaggcagt

SEQ ID NO: 225113 - DNA, 20 bp, synthetic construct
  source 1..20: mol_type = other DNA
aatcctgttttctcaggcag

SEQ ID NO: 225114 - DNA, 20 bp, synthetic construct
  source 1..20: mol_type = other DNA
caatcctgttttctcaggca

SEQ ID NO: 225115 - DNA, 20 bp, synthetic construct
  source 1..20: mol_type = other DNA
tcaatcctgttttctcaggc

SEQ ID NO: 225116 - DNA, 20 bp, synthetic construct
  source 1..20: mol_type = other DNA
ctcaatcctgttttctcagg

SEQ ID NO: 225117 - DNA, 20 bp, synthetic construct
  source 1..20: mol_type = other DNA
cctcaatcctgttttctcag

SEQ ID NO: 225118 - DNA, 20 bp, synthetic construct
  source 1..20: mol_type = other DNA
tcctcaatcctgttttctca

SEQ ID NO: 225119 - DNA, 20 bp, synthetic construct
  source 1..20: mol_type = other DNA
ttcctcaatcctgttttctc

SEQ ID NO: 225120 - DNA, 20 bp, synthetic construct
  source 1..20: mol_type = other DNA
tttcctcaatcctgttttct

SEQ ID NO: 225121 - DNA, 20 bp, synthetic construct
  source 1..20: mol_type = other DNA
ctttcctcaatcctgttttc

SEQ ID NO: 225122 - DNA, 20 bp, synthetic construct
  source 1..20: mol_type = other DNA
cctttcctcaatcctgtttt

SEQ ID NO: 225123 - DNA, 20 bp, synthetic construct
  source 1..20: mol_type = other DNA
tcctttcctcaatcctgttt

SEQ ID NO: 225124 - DNA, 20 bp, synthetic construct
  source 1..20: mol_type = other DNA
ctcctttcctcaatcctgtt

SEQ ID NO: 225125 - DNA, 20 bp, synthetic construct
  source 1..20: mol_type = other DNA
tctcctttcctcaatcctgt

SEQ ID NO: 225126 - DNA, 20 bp, synthetic construct
  source 1..20: mol_type = other DNA
ttctcctttcctcaatcctg

SEQ ID NO: 225127 - DNA, 20 bp, synthetic construct
  source 1..20: mol_type = other DNA
tttctcctttcctcaatcct

SEQ ID NO: 225128 - DNA, 20 bp, synthetic construct
  source 1..20: mol_type = other DNA
ctttctcctttcctcaatcc

SEQ ID NO: 225129 - DNA, 20 bp, synthetic construct
  source 1..20: mol_type = other DNA
cctttctcctttcctcaatc

SEQ ID NO: 225130 - DNA, 20 bp, synthetic construct
  source 1..20: mol_type = other DNA
tcctttctcctttcctcaat

SEQ ID NO: 225131 - DNA, 20 bp, synthetic construct
  source 1..20: mol_type = other DNA
ttcctttctcctttcctcaa

SEQ ID NO: 225132 - DNA, 20 bp, synthetic construct
  source 1..20: mol_type = other DNA
cttcctttctcctttcctca

SEQ ID NO: 225133 - DNA, 20 bp, synthetic construct
  source 1..20: mol_type = other DNA
tcttcctttctcctttcctc

SEQ ID NO: 225134 - DNA, 20 bp, synthetic construct
  source 1..20: mol_type = other DNA
ctcttcctttctcctttcct

SEQ ID NO: 225135 - DNA, 20 bp, synthetic construct
  source 1..20: mol_type = other DNA
tctcttcctttctcctttcc

SEQ ID NO: 225136 - DNA, 20 bp, synthetic construct
  source 1..20: mol_type = other DNA
ctctcttcctttctcctttc

SEQ ID NO: 225137 - DNA, 20 bp, synthetic construct
  source 1..20: mol_type = other DNA
tctctcttcctttctccttt

SEQ ID NO: 225138 - DNA, 20 bp, synthetic construct
  source 1..20: mol_type = other DNA
ctctctcttcctttctcctt

SEQ ID NO: 225139 - DNA, 20 bp, synthetic construct
  source 1..20: mol_type = other DNA
tctctctcttcctttctcct

SEQ ID NO: 225140 - DNA, 20 bp, synthetic construct
  source 1..20: mol_type = other DNA
ctctctctcttcctttctcc

SEQ ID NO: 225141 - DNA, 20 bp, synthetic construct
  source 1..20: mol_type = other DNA
tctctctctcttcctttctc

SEQ ID NO: 225142 - DNA, 20 bp, synthetic construct
  source 1..20: mol_type = other DNA
ctctctctctcttcctttct

SEQ ID NO: 225143 - DNA, 20 bp, synthetic construct
  source 1..20: mol_type = other DNA
tctctctctctcttcctttc

SEQ ID NO: 225144 - DNA, 20 bp, synthetic construct
  source 1..20: mol_type = other DNA
ctctctctctctcttccttt

SEQ ID NO: 225145 - DNA, 20 bp, synthetic construct
  source 1..20: mol_type = other DNA
cctctctctctctcttcctt

SEQ ID NO: 225146 - DNA, 20 bp, synthetic construct
  source 1..20: mol_type = other DNA
tcctctctctctctcttcct

SEQ ID NO: 225147 - DNA, 20 bp, synthetic construct
  source 1..20: mol_type = other DNA
ctcctctctctctctcttcc

SEQ ID NO: 225148 - DNA, 20 bp, synthetic construct
  source 1..20: mol_type = other DNA
cctcctctctctctctcttc

SEQ ID NO: 225149 - DNA, 20 bp, synthetic construct
  source 1..20: mol_type = other DNA
tcctcctctctctctctctt

SEQ ID NO: 225150 - DNA, 20 bp, synthetic construct
  source 1..20: mol_type = other DNA
ctcctcctctctctctctct

SEQ ID NO: 225151 - DNA, 20 bp, synthetic construct
  source 1..20: mol_type = other DNA
tctcctcctctctctctctc

SEQ ID NO: 225152 - DNA, 20 bp, synthetic construct
  source 1..20: mol_type = other DNA
ctctcctcctctctctctct

SEQ ID NO: 225153 - DNA, 20 bp, synthetic construct
  source 1..20: mol_type = other DNA
tctctcctcctctctctctc

SEQ ID NO: 225154 - DNA, 20 bp, synthetic construct
  source 1..20: mol_type = other DNA
ctctctcctcctctctctct

SEQ ID NO: 225155 - DNA, 20 bp, synthetic construct
  source 1..20: mol_type = other DNA
tctctctcctcctctctctc

SEQ ID NO: 225156 - DNA, 20 bp, synthetic construct
  source 1..20: mol_type = other DNA
ctctctctcctcctctctct

SEQ ID NO: 225157 - DNA, 20 bp, synthetic construct
  source 1..20: mol_type = other DNA
tctctctctcctcctctctc

SEQ ID NO: 225158 - DNA, 20 bp, synthetic construct
  source 1..20: mol_type = other DNA
ctctctctctcctcctctct

SEQ ID NO: 225159 - DNA, 20 bp, synthetic construct
  source 1..20: mol_type = other DNA
tctctctctctcctcctctc

SEQ ID NO: 225160 - DNA, 20 bp, synthetic construct
  source 1..20: mol_type = other DNA
ctctctctctctcctcctct

SEQ ID NO: 225161 - DNA, 20 bp, synthetic construct
  source 1..20: mol_type = other DNA
tctctctctctctcctcctc

SEQ ID NO: 225162 - DNA, 20 bp, synthetic construct
  source 1..20: mol_type = other DNA
ctctctctctctctcctcct

SEQ ID NO: 225163 - DNA, 20 bp, synthetic construct
  source 1..20: mol_type = other DNA
cctctctctctctctcctcc

SEQ ID NO: 225164 - DNA, 20 bp, synthetic construct
  source 1..20: mol_type = other DNA
ccctctctctctctctcctc

SEQ ID NO: 225165 - DNA, 20 bp, synthetic construct
  source 1..20: mol_type = other DNA
tccctctctctctctctcct

SEQ ID NO: 225166 - DNA, 20 bp, synthetic construct
  source 1..20: mol_type = other DNA
ctccctctctctctctctcc

SEQ ID NO: 225167 - DNA, 20 bp, synthetic construct
  source 1..20: mol_type = other DNA
cctccctctctctctctctc

SEQ ID NO: 225168 - DNA, 20 bp, synthetic construct
  source 1..20: mol_type = other DNA
tcctccctctctctctctct

SEQ ID NO: 225169 - DNA, 20 bp, synthetic construct
  source 1..20: mol_type = other DNA
ttcctccctctctctctctc

SEQ ID NO: 225170 - DNA, 20 bp, synthetic construct
  source 1..20: mol_type = other DNA
cttcctccctctctctctct

SEQ ID NO: 225171 - DNA, 20 bp, synthetic construct
  source 1..20: mol_type = other DNA
ccttcctccctctctctctc

SEQ ID NO: 225172 - DNA, 20 bp, synthetic construct
  source 1..20: mol_type = other DNA
gccttcctccctctctctct

SEQ ID NO: 225173 - DNA, 20 bp, synthetic construct
  source 1..20: mol_type = other DNA
agccttcctccctctctctc

SEQ ID NO: 225174 - DNA, 20 bp, synthetic construct
  source 1..20: mol_type = other DNA
cagccttcctccctctctct

SEQ ID NO: 225175 - DNA, 20 bp, synthetic construct
  source 1..20: mol_type = other DNA
tcagccttcctccctctctc

SEQ ID NO: 225176 - DNA, 20 bp, synthetic construct
  source 1..20: mol_type = other DNA
atcagccttcctccctctct

SEQ ID NO: 225177 - DNA, 20 bp, synthetic construct
  source 1..20: mol_type = other DNA
catcagccttcctccctctc

SEQ ID NO: 225178 - DNA, 20 bp, synthetic construct
  source 1..20: mol_type = other DNA
ccatcagccttcctccctct

SEQ ID NO: 225179 - DNA, 20 bp, synthetic construct
  source 1..20: mol_type = other DNA
tccatcagccttcctccctc

SEQ ID NO: 225180 - DNA, 20 bp, synthetic construct
  source 1..20: mol_type = other DNA
atccatcagccttcctccct

SEQ ID NO: 225181 - DNA, 20 bp, synthetic construct
  source 1..20: mol_type = other DNA
aatccatcagccttcctccc

SEQ ID NO: 225182 - DNA, 20 bp, synthetic construct
  source 1..20: mol_type = other DNA
aaatccatcagccttcctcc

SEQ ID NO: 225183 - DNA, 20 bp, synthetic construct
  source 1..20: mol_type = other DNA
taaatccatcagccttcctc

SEQ ID NO: 225184 - DNA, 20 bp, synthetic construct
  source 1..20: mol_type = other DNA
ctaaatccatcagccttcct

SEQ ID NO: 225185 - DNA, 20 bp, synthetic construct
  source 1..20: mol_type = other DNA
tctaaatccatcagccttcc

SEQ ID NO: 225186 - DNA, 20 bp, synthetic construct
  source 1..20: mol_type = other DNA
ttctaaatccatcagccttc

SEQ ID NO: 225187 - DNA, 20 bp, synthetic construct
  source 1..20: mol_type = other DNA
tttctaaatccatcagcctt

SEQ ID NO: 225188 - DNA, 20 bp, synthetic construct
  source 1..20: mol_type = other DNA
ttttctaaatccatcagcct

SEQ ID NO: 225189 - DNA, 20 bp, synthetic construct
  source 1..20: mol_type = other DNA
cttttctaaatccatcagcc

SEQ ID NO: 225190 - DNA, 20 bp, synthetic construct
  source 1..20: mol_type = other DNA
tcttttctaaatccatcagc

SEQ ID NO: 225191 - DNA, 20 bp, synthetic construct
  source 1..20: mol_type = other DNA
ttcttttctaaatccatcag

SEQ ID NO: 225192 - DNA, 20 bp, synthetic construct
  source 1..20: mol_type = other DNA
cttcttttctaaatccatca

SEQ ID NO: 225193 - DNA, 20 bp, synthetic construct
  source 1..20: mol_type = other DNA
tcttcttttctaaatccatc

SEQ ID NO: 225194 - DNA, 20 bp, synthetic construct
  source 1..20: mol_type = other DNA
ttcttcttttctaaatccat

SEQ ID NO: 225195 - DNA, 20 bp, synthetic construct
  source 1..20: mol_type = other DNA
tttcttcttttctaaatcca

SEQ ID NO: 225196 - DNA, 20 bp, synthetic construct
  source 1..20: mol_type = other DNA
ttttcttcttttctaaatcc

SEQ ID NO: 225197 - DNA, 20 bp, synthetic construct
  source 1..20: mol_type = other DNA
gttttcttcttttctaaatc

SEQ ID NO: 225198 - DNA, 20 bp, synthetic construct
  source 1..20: mol_type = other DNA
tgttttcttcttttctaaat

SEQ ID NO: 225199 - DNA, 20 bp, synthetic construct
  source 1..20: mol_type = other DNA
ttgttttcttcttttctaaa

SEQ ID NO: 225200 - DNA, 20 bp, synthetic construct
  source 1..20: mol_type = other DNA
cttgttttcttcttttctaa

SEQ ID NO: 225201 - DNA, 20 bp, synthetic construct
  source 1..20: mol_type = other DNA
acttgttttcttcttttcta

SEQ ID NO: 225202 - DNA, 20 bp, synthetic construct
  source 1..20: mol_type = other DNA
cacttgttttcttcttttct

SEQ ID NO: 225203 - DNA, 20 bp, synthetic construct
  source 1..20: mol_type = other DNA
ccacttgttttcttcttttc

SEQ ID NO: 225204 - DNA, 20 bp, synthetic construct
  source 1..20: mol_type = other DNA
accacttgttttcttctttt

SEQ ID NO: 225205 - DNA, 20 bp, synthetic construct
  source 1..20: mol_type = other DNA
gaccacttgttttcttcttt

SEQ ID NO: 225206 - DNA, 20 bp, synthetic construct
  source 1..20: mol_type = other DNA
agaccacttgttttcttctt

SEQ ID NO: 225207 - DNA, 20 bp, synthetic construct
  source 1..20: mol_type = other DNA
cagaccacttgttttcttct

SEQ ID NO: 225208 - DNA, 20 bp, synthetic construct
  source 1..20: mol_type = other DNA
tcagaccacttgttttcttc

SEQ ID NO: 225209 - DNA, 20 bp, synthetic construct
  source 1..20: mol_type = other DNA
ctcagaccacttgttttctt

SEQ ID NO: 225210 - DNA, 20 bp, synthetic construct
  source 1..20: mol_type = other DNA
cctcagaccacttgttttct

SEQ ID NO: 225211 - DNA, 20 bp, synthetic construct
  source 1..20: mol_type = other DNA
tcctcagaccacttgttttc

SEQ ID NO: 225212 - DNA, 20 bp, synthetic construct
  source 1..20: mol_type = other DNA
ttcctcagaccacttgtttt

SEQ ID NO: 225213 - DNA, 20 bp, synthetic construct
  source 1..20: mol_type = other DNA
tttcctcagaccacttgttt

SEQ ID NO: 225214 - DNA, 20 bp, synthetic construct
  source 1..20: mol_type = other DNA
ttttcctcagaccacttgtt

SEQ ID NO: 225215 - DNA, 20 bp, synthetic construct
  source 1..20: mol_type = other DNA
gttttcctcagaccacttgt

SEQ ID NO: 225216 - DNA, 20 bp, synthetic construct
  source 1..20: mol_type = other DNA
tgttttcctcagaccacttg

SEQ ID NO: 225217 - DNA, 20 bp, synthetic construct
  source 1..20: mol_type = other DNA
ctgttttcctcagaccactt

SEQ ID NO: 225218 - DNA, 20 bp, synthetic construct
  source 1..20: mol_type = other DNA
gctgttttcctcagaccact

SEQ ID NO: 225219 - DNA, 20 bp, synthetic construct
  source 1..20: mol_type = other DNA
ggctgttttcctcagaccac

SEQ ID NO: 225220 - DNA, 20 bp, synthetic construct
  source 1..20: mol_type = other DNA
aggctgttttcctcagacca

SEQ ID NO: 225221 - DNA, 20 bp, synthetic construct
  source 1..20: mol_type = other DNA
aaggctgttttcctcagacc

SEQ ID NO: 225222 - DNA, 20 bp, synthetic construct
  source 1..20: mol_type = other DNA
caaggctgttttcctcagac

SEQ ID NO: 225223 - DNA, 20 bp, synthetic construct
  source 1..20: mol_type = other DNA
ccaaggctgttttcctcaga

SEQ ID NO: 225224 - DNA, 20 bp, synthetic construct
  source 1..20: mol_type = other DNA
accaaggctgttttcctcag

SEQ ID NO: 225225 - DNA, 20 bp, synthetic construct
  source 1..20: mol_type = other DNA
caccaaggctgttttcctca

SEQ ID NO: 225226 - DNA, 20 bp, synthetic construct
  source 1..20: mol_type = other DNA
acaccaaggctgttttcctc

SEQ ID NO: 225227 - DNA, 20 bp, synthetic construct
  source 1..20: mol_type = other DNA
cacaccaaggctgttttcct

SEQ ID NO: 225228 - DNA, 20 bp, synthetic construct
  source 1..20: mol_type = other DNA
acacaccaaggctgttttcc

SEQ ID NO: 225229 - DNA, 20 bp, synthetic construct
  source 1..20: mol_type = other DNA
aacacaccaaggctgttttc

SEQ ID NO: 225230 - DNA, 20 bp, synthetic construct
  source 1..20: mol_type = other DNA
aaacacaccaaggctgtttt

SEQ ID NO: 225231 - DNA, 20 bp, synthetic construct
  source 1..20: mol_type = other DNA
taaacacaccaaggctgttt

SEQ ID NO: 225232 - DNA, 20 bp, synthetic construct
  source 1..20: mol_type = other DNA
ataaacacaccaaggctgtt

SEQ ID NO: 225233 - DNA, 20 bp, synthetic construct
  source 1..20: mol_type = other DNA
aataaacacaccaaggctgt

SEQ ID NO: 225234 - DNA, 20 bp, synthetic construct
  source 1..20: mol_type = other DNA
aaataaacacaccaaggctg

SEQ ID NO: 225235 - DNA, 20 bp, synthetic construct
  source 1..20: mol_type = other DNA
aaaataaacacaccaaggct

SEQ ID NO: 225236 - DNA, 20 bp, synthetic construct
  source 1..20: mol_type = other DNA
gaaaataaacacaccaaggc

SEQ ID NO: 225237 - DNA, 20 bp, synthetic construct
  source 1..20: mol_type = other DNA
ggaaaataaacacaccaagg

SEQ ID NO: 225238 - DNA, 20 bp, synthetic construct
  source 1..20: mol_type = other DNA
aggaaaataaacacaccaag

SEQ ID NO: 225239 - DNA, 20 bp, synthetic construct
  source 1..20: mol_type = other DNA
caggaaaataaacacaccaa

SEQ ID NO: 225240 - DNA, 20 bp, synthetic construct
  source 1..20: mol_type = other DNA
acaggaaaataaacacacca

SEQ ID NO: 225241 - DNA, 20 bp, synthetic construct
  source 1..20: mol_type = other DNA
gacaggaaaataaacacacc

SEQ ID NO: 225242 - DNA, 20 bp, synthetic construct
  source 1..20: mol_type = other DNA
agacaggaaaataaacacac

SEQ ID NO: 225243 - DNA, 20 bp, synthetic construct
  source 1..20: mol_type = other DNA
cagacaggaaaataaacaca

SEQ ID NO: 225244 - DNA, 20 bp, synthetic construct
  source 1..20: mol_type = other DNA
acagacaggaaaataaacac

SEQ ID NO: 225245 - DNA, 20 bp, synthetic construct
  source 1..20: mol_type = other DNA
cacagacaggaaaataaaca

SEQ ID NO: 225246 - DNA, 20 bp, synthetic construct
  source 1..20: mol_type = other DNA
acacagacaggaaaataaac

SEQ ID NO: 225247 - DNA, 20 bp, synthetic construct
  source 1..20: mol_type = other DNA
tacacagacaggaaaataaa

SEQ ID NO: 225248 - DNA, 20 bp, synthetic construct
  source 1..20: mol_type = other DNA
atacacagacaggaaaataa

SEQ ID NO: 225249 - DNA, 20 bp, synthetic construct
  source 1..20: mol_type = other DNA
gatacacagacaggaaaata

SEQ ID NO: 225250 - DNA, 20 bp, synthetic construct
  source 1..20: mol_type = other DNA
cgatacacagacaggaaaat

SEQ ID NO: 225251 - DNA, 20 bp, synthetic construct
  source 1..20: mol_type = other DNA
gcgatacacagacaggaaaa

SEQ ID NO: 225252 - DNA, 20 bp, synthetic construct
  source 1..20: mol_type = other DNA
agcgatacacagacaggaaa

SEQ ID NO: 225253 - DNA, 20 bp, synthetic construct
  source 1..20: mol_type = other DNA
aagcgatacacagacaggaa

SEQ ID NO: 225254 - DNA, 20 bp, synthetic construct
  source 1..20: mol_type = other DNA
gaagcgatacacagacagga

SEQ ID NO: 225255 - DNA, 20 bp, synthetic construct
  source 1..20: mol_type = other DNA
agaagcgatacacagacagg

SEQ ID NO: 225256 - DNA, 20 bp, synthetic construct
  source 1..20: mol_type = other DNA
gagaagcgatacacagacag

SEQ ID NO: 225257 - DNA, 20 bp, synthetic construct
  source 1..20: mol_type = other DNA
cgagaagcgatacacagaca

SEQ ID NO: 225258 - DNA, 20 bp, synthetic construct
  source 1..20: mol_type = other DNA
ccgagaagcgatacacagac

SEQ ID NO: 225259 - DNA, 20 bp, synthetic construct
  source 1..20: mol_type = other DNA
gccgagaagcgatacacaga

SEQ ID NO: 225260 - DNA, 20 bp, synthetic construct
  source 1..20: mol_type = other DNA
ggccgagaagcgatacacag

SEQ ID NO: 225261 - DNA, 20 bp, synthetic construct
  source 1..20: mol_type = other DNA
aggccgagaagcgatacaca

SEQ ID NO: 225262 - DNA, 20 bp, synthetic construct
  source 1..20: mol_type = other DNA
aaggccgagaagcgatacac

SEQ ID NO: 225263 - DNA, 20 bp, synthetic construct
  source 1..20: mol_type = other DNA
aaaggccgagaagcgataca

SEQ ID NO: 225264 - DNA, 20 bp, synthetic construct
  source 1..20: mol_type = other DNA
aaaaggccgagaagcgatac

SEQ ID NO: 225265 - DNA, 20 bp, synthetic construct
  source 1..20: mol_type = other DNA
caaaaggccgagaagcgata

SEQ ID NO: 225266 - DNA, 20 bp, synthetic construct
  source 1..20: mol_type = other DNA
ccaaaaggccgagaagcgat

SEQ ID NO: 225267 - DNA, 20 bp, synthetic construct
  source 1..20: mol_type = other DNA
gccaaaaggccgagaagcga

SEQ ID NO: 225268 - DNA, 20 bp, synthetic construct
  source 1..20: mol_type = other DNA
agccaaaaggccgagaagcg

SEQ ID NO: 225269 - DNA, 20 bp, synthetic construct
  source 1..20: mol_type = other DNA
tagccaaaaggccgagaagc

SEQ ID NO: 225270 - DNA, 20 bp, synthetic construct
  source 1..20: mol_type = other DNA
ttagccaaaaggccgagaag

SEQ ID NO: 225271 - DNA, 20 bp, synthetic construct
  source 1..20: mol_type = other DNA
cttagccaaaaggccgagaa

SEQ ID NO: 225272 - DNA, 20 bp, synthetic construct
  source 1..20: mol_type = other DNA
tcttagccaaaaggccgaga

SEQ ID NO: 225273 - DNA, 20 bp, synthetic construct
  source 1..20: mol_type = other DNA
atcttagccaaaaggccgag

SEQ ID NO: 225274 - DNA, 20 bp, synthetic construct
  source 1..20: mol_type = other DNA
gatcttagccaaaaggccga

SEQ ID NO: 225275 - DNA, 20 bp, synthetic construct
  source 1..20: mol_type = other DNA
tgatcttagccaaaaggccg

SEQ ID NO: 225276 - DNA, 20 bp, synthetic construct
  source 1..20: mol_type = other DNA
ttgatcttagccaaaaggcc

SEQ ID NO: 225277 - DNA, 20 bp, synthetic construct
  source 1..20: mol_type = other DNA
cttgatcttagccaaaaggc

SEQ ID NO: 225278 - DNA, 20 bp, synthetic construct
  source 1..20: mol_type = other DNA
acttgatcttagccaaaagg

SEQ ID NO: 225279 - DNA, 20 bp, synthetic construct
  source 1..20: mol_type = other DNA
cacttgatcttagccaaaag

SEQ ID NO: 225280 - DNA, 20 bp, synthetic construct
  source 1..20: mol_type = other DNA
acacttgatcttagccaaaa

SEQ ID NO: 225281 - DNA, 20 bp, synthetic construct
  source 1..20: mol_type = other DNA
tacacttgatcttagccaaa

SEQ ID NO: 225282 - DNA, 20 bp, synthetic construct
  source 1..20: mol_type = other DNA
atacacttgatcttagccaa

SEQ ID NO: 225283 - DNA, 20 bp, synthetic construct
  source 1..20: mol_type = other DNA
aatacacttgatcttagcca

SEQ ID NO: 225284 - DNA, 20 bp, synthetic construct
  source 1..20: mol_type = other DNA
aaatacacttgatcttagcc

SEQ ID NO: 225285 - DNA, 20 bp, synthetic construct
  source 1..20: mol_type = other DNA
aaaatacacttgatcttagc

SEQ ID NO: 225286 - DNA, 20 bp, synthetic construct
  source 1..20: mol_type = other DNA
gaaaatacacttgatcttag

SEQ ID NO: 225287 - DNA, 20 bp, synthetic construct
  source 1..20: mol_type = other DNA
ggaaaatacacttgatctta

SEQ ID NO: 225288 - DNA, 20 bp, synthetic construct
  source 1..20: mol_type = other DNA
aggaaaatacacttgatctt

SEQ ID NO: 225289 - DNA, 20 bp, synthetic construct
  source 1..20: mol_type = other DNA
caggaaaatacacttgatct

SEQ ID NO: 225290 - DNA, 20 bp, synthetic construct
  source 1..20: mol_type = other DNA
acaggaaaatacacttgatc

SEQ ID NO: 225291 - DNA, 20 bp, synthetic construct
  source 1..20: mol_type = other DNA
gacaggaaaatacacttgat

SEQ ID NO: 225292 - DNA, 20 bp, synthetic construct
  source 1..20: mol_type = other DNA
agacaggaaaatacacttga

SEQ ID NO: 225293 - DNA, 20 bp, synthetic construct
  source 1..20: mol_type = other DNA
cagacaggaaaatacacttg

SEQ ID NO: 225294 - DNA, 20 bp, synthetic construct
  source 1..20: mol_type = other DNA
acagacaggaaaatacactt

SEQ ID NO: 225295 - DNA, 20 bp, synthetic construct
  source 1..20: mol_type = other DNA
cacagacaggaaaatacact

SEQ ID NO: 225296 - DNA, 20 bp, synthetic construct
  source 1..20: mol_type = other DNA
acacagacaggaaaatacac

SEQ ID NO: 225297 - DNA, 20 bp, synthetic construct
  source 1..20: mol_type = other DNA
cacacagacaggaaaataca

SEQ ID NO: 225298 - DNA, 20 bp, synthetic construct
  source 1..20: mol_type = other DNA
acacacagacaggaaaatac

SEQ ID NO: 225299 - DNA, 20 bp, synthetic construct
  source 1..20: mol_type = other DNA
gacacacagacaggaaaata

SEQ ID NO: 225300 - DNA, 20 bp, synthetic construct
  source 1..20: mol_type = other DNA
agacacacagacaggaaaat

SEQ ID NO: 225301 - DNA, 20 bp, synthetic construct
  source 1..20: mol_type = other DNA
gagacacacagacaggaaaa

SEQ ID NO: 225302 - DNA, 20 bp, synthetic construct
  source 1..20: mol_type = other DNA
cgagacacacagacaggaaa

SEQ ID NO: 225303 - DNA, 20 bp, synthetic construct
  source 1..20: mol_type = other DNA
gcgagacacacagacaggaa

SEQ ID NO: 225304 - DNA, 20 bp, synthetic construct
  source 1..20: mol_type = other DNA
agcgagacacacagacagga

SEQ ID NO: 225305 - DNA, 20 bp, synthetic construct
  source 1..20: mol_type = other DNA
aagcgagacacacagacagg

SEQ ID NO: 225306 - DNA, 20 bp, synthetic construct
  source 1..20: mol_type = other DNA
taagcgagacacacagacag

SEQ ID NO: 225307 - DNA, 20 bp, synthetic construct
  source 1..20: mol_type = other DNA
ctaagcgagacacacagaca

SEQ ID NO: 225308 - DNA, 20 bp, synthetic construct
  source 1..20: mol_type = other DNA
tctaagcgagacacacagac

SEQ ID NO: 225309 - DNA, 20 bp, synthetic construct
  source 1..20: mol_type = other DNA
atctaagcgagacacacaga

SEQ ID NO: 225310 - DNA, 20 bp, synthetic construct
  source 1..20: mol_type = other DNA
aatctaagcgagacacacag

SEQ ID NO: 225311 - DNA, 20 bp, synthetic construct
  source 1..20: mol_type = other DNA
taatctaagcgagacacaca

SEQ ID NO: 225312 - DNA, 20 bp, synthetic construct
  source 1..20: mol_type = other DNA
gtaatctaagcgagacacac

SEQ ID NO: 225313 - DNA, 20 bp, synthetic construct
  source 1..20: mol_type = other DNA
tgtaatctaagcgagacaca

SEQ ID NO: 225314 - DNA, 20 bp, synthetic construct
  source 1..20: mol_type = other DNA
ctgtaatctaagcgagacac

SEQ ID NO: 225315 - DNA, 20 bp, synthetic construct
  source 1..20: mol_type = other DNA
cctgtaatctaagcgagaca

SEQ ID NO: 225316 - DNA, 20 bp, synthetic construct
  source 1..20: mol_type = other DNA
ccctgtaatctaagcgagac

SEQ ID NO: 225317 - DNA, 20 bp, synthetic construct
  source 1..20: mol_type = other DNA
tccctgtaatctaagcgaga

SEQ ID NO: 225318 - DNA, 20 bp, synthetic construct
  source 1..20: mol_type = other DNA
atccctgtaatctaagcgag

SEQ ID NO: 225319 - DNA, 20 bp, synthetic construct
  source 1..20: mol_type = other DNA
gatccctgtaatctaagcga

SEQ ID NO: 225320 - DNA, 20 bp, synthetic construct
  source 1..20: mol_type = other DNA
agatccctgtaatctaagcg

SEQ ID NO: 225321 - DNA, 20 bp, synthetic construct
  source 1..20: mol_type = other DNA
cagatccctgtaatctaagc

SEQ ID NO: 225322 - DNA, 20 bp, synthetic construct
  source 1..20: mol_type = other DNA
acagatccctgtaatctaag

SEQ ID NO: 225323 - DNA, 20 bp, synthetic construct
  source 1..20: mol_type = other DNA
cacagatccctgtaatctaa

SEQ ID NO: 225324 - DNA, 20 bp, synthetic construct
  source 1..20: mol_type = other DNA
ccacagatccctgtaatcta

SEQ ID NO: 225325 - DNA, 20 bp, synthetic construct
  source 1..20: mol_type = other DNA
cccacagatccctgtaatct

SEQ ID NO: 225326 - DNA, 20 bp, synthetic construct
  source 1..20: mol_type = other DNA
acccacagatccctgtaatc

SEQ ID NO: 225327 - DNA, 20 bp, synthetic construct
  source 1..20: mol_type = other DNA
cacccacagatccctgtaat

SEQ ID NO: 225328 - DNA, 20 bp, synthetic construct
  source 1..20: mol_type = other DNA
tcacccacagatccctgtaa

SEQ ID NO: 225329 - DNA, 20 bp, synthetic construct
  source 1..20: mol_type = other DNA
atcacccacagatccctgta

SEQ ID NO: 225330 - DNA, 20 bp, synthetic construct
  source 1..20: mol_type = other DNA
catcacccacagatccctgt

SEQ ID NO: 225331 - DNA, 20 bp, synthetic construct
  source 1..20: mol_type = other DNA
tcatcacccacagatccctg

SEQ ID NO: 225332 - DNA, 20 bp, synthetic construct
  source 1..20: mol_type = other DNA
gtcatcacccacagatccct

SEQ ID NO: 225333 - DNA, 20 bp, synthetic construct
  source 1..20: mol_type = other DNA
tgtcatcacccacagatccc

SEQ ID NO: 225334 - DNA, 20 bp, synthetic construct
  source 1..20: mol_type = other DNA
gtgtcatcacccacagatcc

SEQ ID NO: 225335 - DNA, 20 bp, synthetic construct
  source 1..20: mol_type = other DNA
cgtgtcatcacccacagatc

SEQ ID NO: 225336 - DNA, 20 bp, synthetic construct
  source 1..20: mol_type = other DNA
acgtgtcatcacccacagat

SEQ ID NO: 225337 - DNA, 20 bp, synthetic construct
  source 1..20: mol_type = other DNA
gacgtgtcatcacccacaga

SEQ ID NO: 225338 - DNA, 20 bp, synthetic construct
  source 1..20: mol_type = other DNA
agacgtgtcatcacccacag

SEQ ID NO: 225339 - DNA, 20 bp, synthetic construct
  source 1..20: mol_type = other DNA
cagacgtgtcatcacccaca

SEQ ID NO: 225340 - DNA, 20 bp, synthetic construct
  source 1..20: mol_type = other DNA
ccagacgtgtcatcacccac

SEQ ID NO: 225341 - DNA, 20 bp, synthetic construct
  source 1..20: mol_type = other DNA
accagacgtgtcatcaccca

SEQ ID NO: 225342 - DNA, 20 bp, synthetic construct
  source 1..20: mol_type = other DNA
gaccagacgtgtcatcaccc

SEQ ID NO: 225343 - DNA, 20 bp, synthetic construct
  source 1..20: mol_type = other DNA
ggaccagacgtgtcatcacc

SEQ ID NO: 225344 - DNA, 20 bp, synthetic construct
  source 1..20: mol_type = other DNA
tggaccagacgtgtcatcac

SEQ ID NO: 225345 - DNA, 20 bp, synthetic construct
  source 1..20: mol_type = other DNA
ctggaccagacgtgtcatca

SEQ ID NO: 225346 - DNA, 20 bp, synthetic construct
  source 1..20: mol_type = other DNA
cctggaccagacgtgtcatc

SEQ ID NO: 225347 - DNA, 20 bp, synthetic construct
  source 1..20: mol_type = other DNA
gcctggaccagacgtgtcat

SEQ ID NO: 225348 - DNA, 20 bp, synthetic construct
  source 1..20: mol_type = other DNA
agcctggaccagacgtgtca

SEQ ID NO: 225349 - DNA, 20 bp, synthetic construct
  source 1..20: mol_type = other DNA
cagcctggaccagacgtgtc

SEQ ID NO: 225350 - DNA, 20 bp, synthetic construct
  source 1..20: mol_type = other DNA
gcagcctggaccagacgtgt

SEQ ID NO: 225351 - DNA, 20 bp, synthetic construct
  source 1..20: mol_type = other DNA
cgcagcctggaccagacgtg

SEQ ID NO: 225352 - DNA, 20 bp, synthetic construct
  source 1..20: mol_type = other DNA
acgcagcctggaccagacgt

SEQ ID NO: 225353 - DNA, 20 bp, synthetic construct
  source 1..20: mol_type = other DNA
tacgcagcctggaccagacg

SEQ ID NO: 225354 - DNA, 20 bp, synthetic construct
  source 1..20: mol_type = other DNA
ctacgcagcctggaccagac

SEQ ID NO: 225355 - DNA, 20 bp, synthetic construct
  source 1..20: mol_type = other DNA
actacgcagcctggaccaga

SEQ ID NO: 225356 - DNA, 20 bp, synthetic construct
  source 1..20: mol_type = other DNA
gactacgcagcctggaccag

SEQ ID NO: 225357 - DNA, 20 bp, synthetic construct
  source 1..20: mol_type = other DNA
tgactacgcagcctggacca

SEQ ID NO: 225358 - DNA, 20 bp, synthetic construct
  source 1..20: mol_type = other DNA
gtgactacgcagcctggacc

SEQ ID NO: 225359 - DNA, 20 bp, synthetic construct
  source 1..20: mol_type = other DNA
ggtgactacgcagcctggac

SEQ ID NO: 225360 - DNA, 20 bp, synthetic construct
  source 1..20: mol_type = other DNA
aggtgactacgcagcctgga

SEQ ID NO: 225361 - DNA, 20 bp, synthetic construct
  source 1..20: mol_type = other DNA
gaggtgactacgcagcctgg

SEQ ID NO: 225362 - DNA, 20 bp, synthetic construct
  source 1..20: mol_type = other DNA
tgaggtgactacgcagcctg

SEQ ID NO: 225363 - DNA, 20 bp, synthetic construct
  source 1..20: mol_type = other DNA
ttgaggtgactacgcagcct

SEQ ID NO: 225364 - DNA, 20 bp, synthetic construct
  source 1..20: mol_type = other DNA
cttgaggtgactacgcagcc

SEQ ID NO: 225365 - DNA, 20 bp, synthetic construct
  source 1..20: mol_type = other DNA
ccttgaggtgactacgcagc

SEQ ID NO: 225366 - DNA, 20 bp, synthetic construct
  source 1..20: mol_type = other DNA
cccttgaggtgactacgcag

SEQ ID NO: 225367 - DNA, 20 bp, synthetic construct
  source 1..20: mol_type = other DNA
gcccttgaggtgactacgca

SEQ ID NO: 225368 - DNA, 20 bp, synthetic construct
  source 1..20: mol_type = other DNA
tgcccttgaggtgactacgc

SEQ ID NO: 225369 - DNA, 20 bp, synthetic construct
  source 1..20: mol_type = other DNA
atgcccttgaggtgactacg

SEQ ID NO: 225370 - DNA, 20 bp, synthetic construct
  source 1..20: mol_type = other DNA
catgcccttgaggtgactac

SEQ ID NO: 225371 - DNA, 20 bp, synthetic construct
  source 1..20: mol_type = other DNA
gcatgcccttgaggtgacta

SEQ ID NO: 225372 - DNA, 20 bp, synthetic construct
  source 1..20: mol_type = other DNA
agcatgcccttgaggtgact

SEQ ID NO: 225373 - DNA, 20 bp, synthetic construct
  source 1..20: mol_type = other DNA
aagcatgcccttgaggtgac

SEQ ID NO: 225374 - DNA, 20 bp, synthetic construct
  source 1..20: mol_type = other DNA
taagcatgcccttgaggtga

SEQ ID NO: 225375 - DNA, 20 bp, synthetic construct
  source 1..20: mol_type = other DNA
ataagcatgcccttgaggtg

SEQ ID NO: 225376 - DNA, 20 bp, synthetic construct
  source 1..20: mol_type = other DNA
aataagcatgcccttgaggt

SEQ ID NO: 225377 - DNA, 20 bp, synthetic construct
  source 1..20: mol_type = other DNA
caataagcatgcccttgagg

SEQ ID NO: 225378 - DNA, 20 bp, synthetic construct
  source 1..20: mol_type = other DNA
tcaataagcatgcccttgag

SEQ ID NO: 225379 - DNA, 20 bp, synthetic construct
  source 1..20: mol_type = other DNA
atcaataagcatgcccttga

SEQ ID NO: 225380 - DNA, 20 bp, synthetic construct
  source 1..20: mol_type = other DNA
catcaataagcatgcccttg

SEQ ID NO: 225381 - DNA, 20 bp, synthetic construct
  source 1..20: mol_type = other DNA
acatcaataagcatgccctt

SEQ ID NO: 225382 - DNA, 20 bp, synthetic construct
  source 1..20: mol_type = other DNA
cacatcaataagcatgccct

SEQ ID NO: 225383 - DNA, 20 bp, synthetic construct
  source 1..20: mol_type = other DNA
acacatcaataagcatgccc

SEQ ID NO: 225384 - DNA, 20 bp, synthetic construct
  source 1..20: mol_type = other DNA
aacacatcaataagcatgcc

SEQ ID NO: 225385 - DNA, 20 bp, synthetic construct
  source 1..20: mol_type = other DNA
aaacacatcaataagcatgc

SEQ ID NO: 225386 - DNA, 20 bp, synthetic construct
  source 1..20: mol_type = other DNA
aaaacacatcaataagcatg

SEQ ID NO: 225387 - DNA, 20 bp, synthetic construct
  source 1..20: mol_type = other DNA
aaaaacacatcaataagcat

SEQ ID NO: 225388 - DNA, 20 bp, synthetic construct
  source 1..20: mol_type = other DNA
gaaaaacacatcaataagca

SEQ ID NO: 225389 - DNA, 20 bp, synthetic construct
  source 1..20: mol_type = other DNA
tgaaaaacacatcaataagc

SEQ ID NO: 225390 - DNA, 20 bp, synthetic construct
  source 1..20: mol_type = other DNA
ttgaaaaacacatcaataag

SEQ ID NO: 225391 - DNA, 20 bp, synthetic construct
  source 1..20: mol_type = other DNA
attgaaaaacacatcaataa

SEQ ID NO: 225392 - DNA, 20 bp, synthetic construct
  source 1..20: mol_type = other DNA
aattgaaaaacacatcaata

SEQ ID NO: 225393 - DNA, 20 bp, synthetic construct
  source 1..20: mol_type = other DNA
gaattgaaaaacacatcaat

SEQ ID NO: 225394 - DNA, 20 bp, synthetic construct
  source 1..20: mol_type = other DNA
tgaattgaaaaacacatcaa

SEQ ID NO: 225395 - DNA, 20 bp, synthetic construct
  source 1..20: mol_type = other DNA
gtgaattgaaaaacacatca

SEQ ID NO: 225396 - DNA, 20 bp, synthetic construct
  source 1..20: mol_type = other DNA
agtgaattgaaaaacacatc

SEQ ID NO: 225397 - DNA, 20 bp, synthetic construct
  source 1..20: mol_type = other DNA
tagtgaattgaaaaacacat

SEQ ID NO: 225398 - DNA, 20 bp, synthetic construct
  source 1..20: mol_type = other DNA
atagtgaattgaaaaacaca

SEQ ID NO: 225399 - DNA, 20 bp, synthetic construct
  source 1..20: mol_type = other DNA
gatagtgaattgaaaaacac

SEQ ID NO: 225400 - DNA, 20 bp, synthetic construct
  source 1..20: mol_type = other DNA
agatagtgaattgaaaaaca

SEQ ID NO: 225401 - DNA, 20 bp, synthetic construct
  source 1..20: mol_type = other DNA
aagatagtgaattgaaaaac

SEQ ID NO: 225402 - DNA, 20 bp, synthetic construct
  source 1..20: mol_type = other DNA
aaagatagtgaattgaaaaa

SEQ ID NO: 225403 - DNA, 20 bp, synthetic construct
  source 1..20: mol_type = other DNA
caaagatagtgaattgaaaa

SEQ ID NO: 225404 - DNA, 20 bp, synthetic construct
  source 1..20: mol_type = other DNA
gcaaagatagtgaattgaaa

SEQ ID NO: 225405 - DNA, 20 bp, synthetic construct
  source 1..20: mol_type = other DNA
tgcaaagatagtgaattgaa

SEQ ID NO: 225406 - DNA, 20 bp, synthetic construct
  source 1..20: mol_type = other DNA
atgcaaagatagtgaattga

SEQ ID NO: 225407 - DNA, 20 bp, synthetic construct
  source 1..20: mol_type = other DNA
catgcaaagatagtgaattg

SEQ ID NO: 225408 - DNA, 20 bp, synthetic construct
  source 1..20: mol_type = other DNA
ccatgcaaagatagtgaatt

SEQ ID NO: 225409 - DNA, 20 bp, synthetic construct
  source 1..20: mol_type = other DNA
cccatgcaaagatagtgaat

SEQ ID NO: 225410 - DNA, 20 bp, synthetic construct
  source 1..20: mol_type = other DNA
tcccatgcaaagatagtgaa

SEQ ID NO: 225411 - DNA, 20 bp, synthetic construct
  source 1..20: mol_type = other DNA
ctcccatgcaaagatagtga

SEQ ID NO: 225412 - DNA, 20 bp, synthetic construct
  source 1..20: mol_type = other DNA
actcccatgcaaagatagtg

SEQ ID NO: 225413 - DNA, 20 bp, synthetic construct
  source 1..20: mol_type = other DNA
gactcccatgcaaagatagt

SEQ ID NO: 225414 - DNA, 20 bp, synthetic construct
  source 1..20: mol_type = other DNA
ggactcccatgcaaagatag

SEQ ID NO: 225415 - DNA, 20 bp, synthetic construct
  source 1..20: mol_type = other DNA
gggactcccatgcaaagata

SEQ ID NO: 225416 - DNA, 20 bp, synthetic construct
  source 1..20: mol_type = other DNA
tgggactcccatgcaaagat

SEQ ID NO: 225417 - DNA, 20 bp, synthetic construct
  source 1..20: mol_type = other DNA
ctgggactcccatgcaaaga

SEQ ID NO: 225418 - DNA, 20 bp, synthetic construct
  source 1..20: mol_type = other DNA
cctgggactcccatgcaaag

SEQ ID NO: 225419 - DNA, 20 bp, synthetic construct
  source 1..20: mol_type = other DNA
gcctgggactcccatgcaaa

SEQ ID NO: 225420 - DNA, 20 bp, synthetic construct
  source 1..20: mol_type = other DNA
ggcctgggactcccatgcaa

SEQ ID NO: 225421 - DNA, 20 bp, synthetic construct
  source 1..20: mol_type = other DNA
tggcctgggactcccatgca

SEQ ID NO: 225422 - DNA, 20 bp, synthetic construct
  source 1..20: mol_type = other DNA
ttggcctgggactcccatgc

SEQ ID NO: 225423 - DNA, 20 bp, synthetic construct
  source 1..20: mol_type = other DNA
cttggcctgggactcccatg

SEQ ID NO: 225424 - DNA, 20 bp, synthetic construct
  source 1..20: mol_type = other DNA
tcttggcctgggactcccat

SEQ ID NO: 225425 - DNA, 20 bp, synthetic construct
  source 1..20: mol_type = other DNA
ctcttggcctgggactccca

SEQ ID NO: 225426 - DNA, 20 bp, synthetic construct
  source 1..20: mol_type = other DNA
cctcttggcctgggactccc

SEQ ID NO: 225427 - DNA, 20 bp, synthetic construct
  source 1..20: mol_type = other DNA
gcctcttggcctgggactcc

SEQ ID NO: 225428 - DNA, 20 bp, synthetic construct
  source 1..20: mol_type = other DNA
tgcctcttggcctgggactc

SEQ ID NO: 225429 - DNA, 20 bp, synthetic construct
  source 1..20: mol_type = other DNA
gtgcctcttggcctgggact

SEQ ID NO: 225430 - DNA, 20 bp, synthetic construct
  source 1..20: mol_type = other DNA
tgtgcctcttggcctgggac

SEQ ID NO: 225431 - DNA, 20 bp, synthetic construct
  source 1..20: mol_type = other DNA
ctgtgcctcttggcctggga

SEQ ID NO: 225432 - DNA, 20 bp, synthetic construct
  source 1..20: mol_type = other DNA
gctgtgcctcttggcctggg

SEQ ID NO: 225433 - DNA, 20 bp, synthetic construct
  source 1..20: mol_type = other DNA
agctgtgcctcttggcctgg

SEQ ID NO: 225434 - DNA, 20 bp, synthetic construct
  source 1..20: mol_type = other DNA
cagctgtgcctcttggcctg

SEQ ID NO: 225435 - DNA, 20 bp, synthetic construct
  source 1..20: mol_type = other DNA
gcagctgtgcctcttggcct

SEQ ID NO: 225436 - DNA, 20 bp, synthetic construct
  source 1..20: mol_type = other DNA
cgcagctgtgcctcttggcc

SEQ ID NO: 225437 - DNA, 20 bp, synthetic construct
  source 1..20: mol_type = other DNA
gcgcagctgtgcctcttggc

SEQ ID NO: 225438 - DNA, 20 bp, synthetic construct
  source 1..20: mol_type = other DNA
ggcgcagctgtgcctcttgg

SEQ ID NO: 225439 - DNA, 20 bp, synthetic construct
  source 1..20: mol_type = other DNA
tggcgcagctgtgcctcttg

SEQ ID NO: 225440 - DNA, 20 bp, synthetic construct
  source 1..20: mol_type = other DNA
atggcgcagctgtgcctctt

SEQ ID NO: 225441 - DNA, 20 bp, synthetic construct
  source 1..20: mol_type = other DNA
aatggcgcagctgtgcctct

SEQ ID NO: 225442 - DNA, 20 bp, synthetic construct
  source 1..20: mol_type = other DNA
aaatggcgcagctgtgcctc

SEQ ID NO: 225443 - DNA, 20 bp, synthetic construct
  source 1..20: mol_type = other DNA
caaatggcgcagctgtgcct

SEQ ID NO: 225444 - DNA, 20 bp, synthetic construct
  source 1..20: mol_type = other DNA
acaaatggcgcagctgtgcc

SEQ ID NO: 225445 - DNA, 20 bp, synthetic construct
  source 1..20: mol_type = other DNA
gacaaatggcgcagctgtgc

SEQ ID NO: 225446 - DNA, 20 bp, synthetic construct
  source 1..20: mol_type = other DNA
agacaaatggcgcagctgtg

SEQ ID NO: 225447 - DNA, 20 bp, synthetic construct
  source 1..20: mol_type = other DNA
cagacaaatggcgcagctgt

SEQ ID NO: 225448 - DNA, 20 bp, synthetic construct
  source 1..20: mol_type = other DNA
acagacaaatggcgcagctg

SEQ ID NO: 225449 - DNA, 20 bp, synthetic construct
  source 1..20: mol_type = other DNA
aacagacaaatggcgcagct

SEQ ID NO: 225450 - DNA, 20 bp, synthetic construct
  source 1..20: mol_type = other DNA
caacagacaaatggcgcagc

SEQ ID NO: 225451 - DNA, 20 bp, synthetic construct
  source 1..20: mol_type = other DNA
ccaacagacaaatggcgcag

SEQ ID NO: 225452 - DNA, 20 bp, synthetic construct
  source 1..20: mol_type = other DNA
accaacagacaaatggcgca

SEQ ID NO: 225453 - DNA, 20 bp, synthetic construct
  source 1..20: mol_type = other DNA
aaccaacagacaaatggcgc

SEQ ID NO: 225454 - DNA, 20 bp, synthetic construct
  source 1..20: mol_type = other DNA
aaaccaacagacaaatggcg

SEQ ID NO: 225455 - DNA, 20 bp, synthetic construct
  source 1..20: mol_type = other DNA
taaaccaacagacaaatggc

SEQ ID NO: 225456 - DNA, 20 bp, synthetic construct
  source 1..20: mol_type = other DNA
ctaaaccaacagacaaatgg

SEQ ID NO: 225457 - DNA, 20 bp, synthetic construct
  source 1..20: mol_type = other DNA
tctaaaccaacagacaaatg

SEQ ID NO: 225458 - DNA, 20 bp, synthetic construct
  source 1..20: mol_type = other DNA
atctaaaccaacagacaaat

SEQ ID NO: 225459 - DNA, 20 bp, synthetic construct
  source 1..20: mol_type = other DNA
tatctaaaccaacagacaaa

SEQ ID NO: 225460 - DNA, 20 bp, synthetic construct
  source 1..20: mol_type = other DNA
atatctaaaccaacagacaa

SEQ ID NO: 225461 - DNA, 20 bp, synthetic construct
  source 1..20: mol_type = other DNA
gatatctaaaccaacagaca

SEQ ID NO: 225462 - DNA, 20 bp, synthetic construct
  source 1..20: mol_type = other DNA
ggatatctaaaccaacagac

SEQ ID NO: 225463 - DNA, 20 bp, synthetic construct
  source 1..20: mol_type = other DNA
aggatatctaaaccaacaga

SEQ ID NO: 225464 - DNA, 20 bp, synthetic construct
  source 1..20: mol_type = other DNA
aaggatatctaaaccaacag

SEQ ID NO: 225465 - DNA, 20 bp, synthetic construct
  source 1..20: mol_type = other DNA
aaaggatatctaaaccaaca

SEQ ID NO: 225466 - DNA, 20 bp, synthetic construct
  source 1..20: mol_type = other DNA
taaaggatatctaaaccaac

SEQ ID NO: 225467 - DNA, 20 bp, synthetic construct
  source 1..20: mol_type = other DNA
ataaaggatatctaaaccaa

SEQ ID NO: 225468 - DNA, 20 bp, synthetic construct
  source 1..20: mol_type = other DNA
gataaaggatatctaaacca

SEQ ID NO: 225469 - DNA, 20 bp, synthetic construct
  source 1..20: mol_type = other DNA
ggataaaggatatctaaacc

SEQ ID NO: 225470 - DNA, 20 bp, synthetic construct
  source 1..20: mol_type = other DNA
tggataaaggatatctaaac

SEQ ID NO: 225471 - DNA, 20 bp, synthetic construct
  source 1..20: mol_type = other DNA
ctggataaaggatatctaaa

SEQ ID NO: 225472 - DNA, 20 bp, synthetic construct
  source 1..20: mol_type = other DNA
actggataaaggatatctaa

SEQ ID NO: 225473 - DNA, 20 bp, synthetic construct
  source 1..20: mol_type = other DNA
aactggataaaggatatcta

SEQ ID NO: 225474 - DNA, 20 bp, synthetic construct
  source 1..20: mol_type = other DNA
gaactggataaaggatatct

SEQ ID NO: 225475 - DNA, 20 bp, synthetic construct
  source 1..20: mol_type = other DNA
agaactggataaaggatatc

SEQ ID NO: 225476 - DNA, 20 bp, synthetic construct
  source 1..20: mol_type = other DNA
aagaactggataaaggatat

SEQ ID NO: 225477 - DNA, 20 bp, synthetic construct
  source 1..20: mol_type = other DNA
gaagaactggataaaggata

SEQ ID NO: 225478 - DNA, 20 bp, synthetic construct
  source 1..20: mol_type = other DNA
ggaagaactggataaaggat

SEQ ID NO: 225479 - DNA, 20 bp, synthetic construct
  source 1..20: mol_type = other DNA
tggaagaactggataaagga

SEQ ID NO: 225480 - DNA, 20 bp, synthetic construct
  source 1..20: mol_type = other DNA
ctggaagaactggataaagg

SEQ ID NO: 225481 - DNA, 20 bp, synthetic construct
  source 1..20: mol_type = other DNA
tctggaagaactggataaag

SEQ ID NO: 225482 - DNA, 20 bp, synthetic construct
  source 1..20: mol_type = other DNA
ctctggaagaactggataaa

SEQ ID NO: 225483 - DNA, 20 bp, synthetic construct
  source 1..20: mol_type = other DNA
tctctggaagaactggataa

SEQ ID NO: 225484 - DNA, 20 bp, synthetic construct
  source 1..20: mol_type = other DNA
ttctctggaagaactggata

SEQ ID NO: 225485 - DNA, 20 bp, synthetic construct
  source 1..20: mol_type = other DNA
tttctctggaagaactggat

SEQ ID NO: 225486 - DNA, 20 bp, synthetic construct
  source 1..20: mol_type = other DNA
atttctctggaagaactgga

SEQ ID NO: 225487 - DNA, 20 bp, synthetic construct
  source 1..20: mol_type = other DNA
gatttctctggaagaactgg

SEQ ID NO: 225488 - DNA, 20 bp, synthetic construct
  source 1..20: mol_type = other DNA
tgatttctctggaagaactg

SEQ ID NO: 225489 - DNA, 20 bp, synthetic construct
  source 1..20: mol_type = other DNA
atgatttctctggaagaact

SEQ ID NO: 225490 - DNA, 20 bp, synthetic construct
  source 1..20: mol_type = other DNA
gatgatttctctggaagaac

SEQ ID NO: 225491 - DNA, 20 bp, synthetic construct
  source 1..20: mol_type = other DNA
ggatgatttctctggaagaa

SEQ ID NO: 225492 - DNA, 20 bp, synthetic construct
  source 1..20: mol_type = other DNA
aggatgatttctctggaaga

SEQ ID NO: 225493 - DNA, 20 bp, synthetic construct
  source 1..20: mol_type = other DNA
caggatgatttctctggaag

SEQ ID NO: 225494 - DNA, 20 bp, synthetic construct
  source 1..20: mol_type = other DNA
gcaggatgatttctctggaa

SEQ ID NO: 225495 - DNA, 20 bp, synthetic construct
  source 1..20: mol_type = other DNA
ggcaggatgatttctctgga

SEQ ID NO: 225496 - DNA, 20 bp, synthetic construct
  source 1..20: mol_type = other DNA
gggcaggatgatttctctgg

SEQ ID NO: 225497 - DNA, 20 bp, synthetic construct
  source 1..20: mol_type = other DNA
agggcaggatgatttctctg

SEQ ID NO: 225498 - DNA, 20 bp, synthetic construct
  source 1..20: mol_type = other DNA
aagggcaggatgatttctct

SEQ ID NO: 225499 - DNA, 20 bp, synthetic construct
  source 1..20: mol_type = other DNA
gaagggcaggatgatttctc

SEQ ID NO: 225500 - DNA, 20 bp, synthetic construct
  source 1..20: mol_type = other DNA
agaagggcaggatgatttct

SEQ ID NO: 225501 - DNA, 20 bp, synthetic construct
  source 1..20: mol_type = other DNA
cagaagggcaggatgatttc

SEQ ID NO: 225502 - DNA, 20 bp, synthetic construct
  source 1..20: mol_type = other DNA
ccagaagggcaggatgattt

SEQ ID NO: 225503 - DNA, 20 bp, synthetic construct
  source 1..20: mol_type = other DNA
tccagaagggcaggatgatt

SEQ ID NO: 225504 - DNA, 20 bp, synthetic construct
  source 1..20: mol_type = other DNA
ctccagaagggcaggatgat

SEQ ID NO: 225505 - DNA, 20 bp, synthetic construct
  source 1..20: mol_type = other DNA
cctccagaagggcaggatga

SEQ ID NO: 225506 - DNA, 20 bp, synthetic construct
  source 1..20: mol_type = other DNA
tcctccagaagggcaggatg

SEQ ID NO: 225507 - DNA, 20 bp, synthetic construct
  source 1..20: mol_type = other DNA
ctcctccagaagggcaggat

SEQ ID NO: 225508 - DNA, 20 bp, synthetic construct
  source 1..20: mol_type = other DNA
cctcctccagaagggcagga

SEQ ID NO: 225509 - DNA, 20 bp, synthetic construct
  source 1..20: mol_type = other DNA
acctcctccagaagggcagg

SEQ ID NO: 225510 - DNA, 20 bp, synthetic construct
  source 1..20: mol_type = other DNA
cacctcctccagaagggcag

SEQ ID NO: 225511 - DNA, 20 bp, synthetic construct
  source 1..20: mol_type = other DNA
ccacctcctccagaagggca

SEQ ID NO: 225512 - DNA, 20 bp, synthetic construct
  source 1..20: mol_type = other DNA
cccacctcctccagaagggc

SEQ ID NO: 225513 - DNA, 20 bp, synthetic construct
  source 1..20: mol_type = other DNA
gcccacctcctccagaaggg

SEQ ID NO: 225514 - DNA, 20 bp, synthetic construct
  source 1..20: mol_type = other DNA
tgcccacctcctccagaagg

SEQ ID NO: 225515 - DNA, 20 bp, synthetic construct
  source 1..20: mol_type = other DNA
ctgcccacctcctccagaag

SEQ ID NO: 225516 - DNA, 20 bp, synthetic construct
  source 1..20: mol_type = other DNA
gctgcccacctcctccagaa

SEQ ID NO: 225517 - DNA, 20 bp, synthetic construct
  source 1..20: mol_type = other DNA
tgctgcccacctcctccaga

SEQ ID NO: 225518 - DNA, 20 bp, synthetic construct
  source 1..20: mol_type = other DNA
ctgctgcccacctcctccag

SEQ ID NO: 225519 - DNA, 20 bp, synthetic construct
  source 1..20: mol_type = other DNA
cctgctgcccacctcctcca

SEQ ID NO: 225520 - DNA, 20 bp, synthetic construct
  source 1..20: mol_type = other DNA
ccctgctgcccacctcctcc

SEQ ID NO: 225521 - DNA, 20 bp, synthetic construct
  source 1..20: mol_type = other DNA
cccctgctgcccacctcctc

SEQ ID NO: 225522 - DNA, 20 bp, synthetic construct
  source 1..20: mol_type = other DNA
acccctgctgcccacctcct

SEQ ID NO: 225523 - DNA, 20 bp, synthetic construct
  source 1..20: mol_type = other DNA
gacccctgctgcccacctcc

SEQ ID NO: 225524 - DNA, 20 bp, synthetic construct
  source 1..20: mol_type = other DNA
tgacccctgctgcccacctc

SEQ ID NO: 225525 - DNA, 20 bp, synthetic construct
  source 1..20: mol_type = other DNA
ctgacccctgctgcccacct

SEQ ID NO: 225526 - DNA, 20 bp, synthetic construct
  source 1..20: mol_type = other DNA
tctgacccctgctgcccacc

SEQ ID NO: 225527 - DNA, 20 bp, synthetic construct
  source 1..20: mol_type = other DNA
ctctgacccctgctgcccac

SEQ ID NO: 225528 - DNA, 20 bp, synthetic construct
  source 1..20: mol_type = other DNA
tctctgacccctgctgccca

SEQ ID NO: 225529 - DNA, 20 bp, synthetic construct
  source 1..20: mol_type = other DNA
atctctgacccctgctgccc

SEQ ID NO: 225530 - DNA, 20 bp, synthetic construct
  source 1..20: mol_type = other DNA
catctctgacccctgctgcc

SEQ ID NO: 225531 - DNA, 20 bp, synthetic construct
  source 1..20: mol_type = other DNA
ccatctctgacccctgctgc

SEQ ID NO: 225532 - DNA, 20 bp, synthetic construct
  source 1..20: mol_type = other DNA
cccatctctgacccctgctg

SEQ ID NO: 225533 - DNA, 20 bp, synthetic construct
  source 1..20: mol_type = other DNA
tcccatctctgacccctgct

SEQ ID NO: 225534 - DNA, 20 bp, synthetic construct
  source 1..20: mol_type = other DNA
ctcccatctctgacccctgc

SEQ ID NO: 225535 - DNA, 20 bp, synthetic construct
  source 1..20: mol_type = other DNA
cctcccatctctgacccctg

SEQ ID NO: 225536 - DNA, 20 bp, synthetic construct
  source 1..20: mol_type = other DNA
ccctcccatctctgacccct

SEQ ID NO: 225537 - DNA, 20 bp, synthetic construct
  source 1..20: mol_type = other DNA
tccctcccatctctgacccc

SEQ ID NO: 225538 - DNA, 20 bp, synthetic construct
  source 1..20: mol_type = other DNA
ttccctcccatctctgaccc

SEQ ID NO: 225539 - DNA, 20 bp, synthetic construct
  source 1..20: mol_type = other DNA
tttccctcccatctctgacc

SEQ ID NO: 225540 - DNA, 20 bp, synthetic construct
  source 1..20: mol_type = other DNA
ctttccctcccatctctgac

SEQ ID NO: 225541 - DNA, 20 bp, synthetic construct
  source 1..20: mol_type = other DNA
cctttccctcccatctctga

SEQ ID NO: 225542 - DNA, 20 bp, synthetic construct
  source 1..20: mol_type = other DNA
tcctttccctcccatctctg

SEQ ID NO: 225543 - DNA, 20 bp, synthetic construct
  source 1..20: mol_type = other DNA
ttcctttccctcccatctct

SEQ ID NO: 225544 - DNA, 20 bp, synthetic construct
  source 1..20: mol_type = other DNA
cttcctttccctcccatctc

SEQ ID NO: 225545 - DNA, 20 bp, synthetic construct
  source 1..20: mol_type = other DNA
ccttcctttccctcccatct

SEQ ID NO: 225546 - DNA, 20 bp, synthetic construct
  source 1..20: mol_type = other DNA
tccttcctttccctcccatc

SEQ ID NO: 225547 - DNA, 20 bp, synthetic construct
  source 1..20: mol_type = other DNA
ctccttcctttccctcccat

SEQ ID NO: 225548 - DNA, 20 bp, synthetic construct
  source 1..20: mol_type = other DNA
gctccttcctttccctccca

SEQ ID NO: 225549 - DNA, 20 bp, synthetic construct
  source 1..20: mol_type = other DNA
ggctccttcctttccctccc

SEQ ID NO: 225550 - DNA, 20 bp, synthetic construct
  source 1..20: mol_type = other DNA
tggctccttcctttccctcc

SEQ ID NO: 225551 - DNA, 20 bp, synthetic construct
  source 1..20: mol_type = other DNA
ctggctccttcctttccctc

SEQ ID NO: 225552 - DNA, 20 bp, synthetic construct
  source 1..20: mol_type = other DNA
cctggctccttcctttccct

SEQ ID NO: 225553 - DNA, 20 bp, synthetic construct
  source 1..20: mol_type = other DNA
acctggctccttcctttccc

SEQ ID NO: 225554 - DNA, 20 bp, synthetic construct
  source 1..20: mol_type = other DNA
gacctggctccttcctttcc

SEQ ID NO: 225555 - DNA, 20 bp, synthetic construct
  source 1..20: mol_type = other DNA
ggacctggctccttcctttc

SEQ ID NO: 225556 - DNA, 20 bp, synthetic construct
  source 1..20: mol_type = other DNA
aggacctggctccttccttt

SEQ ID NO: 225557 - DNA, 20 bp, synthetic construct
  source 1..20: mol_type = other DNA
aaggacctggctccttcctt

SEQ ID NO: 225558 - DNA, 20 bp, synthetic construct
  source 1..20: mol_type = other DNA
caaggacctggctccttcct

SEQ ID NO: 225559 - DNA, 20 bp, synthetic construct
  source 1..20: mol_type = other DNA
ccaaggacctggctccttcc

SEQ ID NO: 225560 - DNA, 20 bp, synthetic construct
  source 1..20: mol_type = other DNA
gccaaggacctggctccttc

SEQ ID NO: 225561 - DNA, 20 bp, synthetic construct
  source 1..20: mol_type = other DNA
agccaaggacctggctcctt

SEQ ID NO: 225562 - DNA, 20 bp, synthetic construct
  source 1..20: mol_type = other DNA
tagccaaggacctggctcct

SEQ ID NO: 225563 - DNA, 20 bp, synthetic construct
  source 1..20: mol_type = other DNA
ctagccaaggacctggctcc

SEQ ID NO: 225564 - DNA, 20 bp, synthetic construct
  source 1..20: mol_type = other DNA
cctagccaaggacctggctc

SEQ ID NO: 225565 - DNA, 20 bp, synthetic construct
  source 1..20: mol_type = other DNA
tcctagccaaggacctggct

SEQ ID NO: 225566 - DNA, 20 bp, synthetic construct
  source 1..20: mol_type = other DNA
atcctagccaaggacctggc

SEQ ID NO: 225567 - DNA, 20 bp, synthetic construct
  source 1..20: mol_type = other DNA
catcctagccaaggacctgg

SEQ ID NO: 225568 - DNA, 20 bp, synthetic construct
  source 1..20: mol_type = other DNA
gcatcctagccaaggacctg

SEQ ID NO: 225569 - DNA, 20 bp, synthetic construct
  source 1..20: mol_type = other DNA
ggcatcctagccaaggacct

SEQ ID NO: 225570 - DNA, 20 bp, synthetic construct
  source 1..20: mol_type = other DNA
tggcatcctagccaaggacc

SEQ ID NO: 225571 - DNA, 20 bp, synthetic construct
  source 1..20: mol_type = other DNA
ctggcatcctagccaaggac

SEQ ID NO: 225572 - DNA, 20 bp, synthetic construct
  source 1..20: mol_type = other DNA
cctggcatcctagccaagga

SEQ ID NO: 225573 - DNA, 20 bp, synthetic construct
  source 1..20: mol_type = other DNA
ccctggcatcctagccaagg

SEQ ID NO: 225574 - DNA, 20 bp, synthetic construct
  source 1..20: mol_type = other DNA
accctggcatcctagccaag

SEQ ID NO: 225575 - DNA, 20 bp, synthetic construct
  source 1..20: mol_type = other DNA
gaccctggcatcctagccaa

SEQ ID NO: 225576 - DNA, 20 bp, synthetic construct
  source 1..20: mol_type = other DNA
ggaccctggcatcctagcca

SEQ ID NO: 225577 - DNA, 20 bp, synthetic construct
  source 1..20: mol_type = other DNA
gggaccctggcatcctagcc

SEQ ID NO: 225578 - DNA, 20 bp, synthetic construct
  source 1..20: mol_type = other DNA
ggggaccctggcatcctagc

SEQ ID NO: 225579 - DNA, 20 bp, synthetic construct
  source 1..20: mol_type = other DNA
aggggaccctggcatcctag

SEQ ID NO: 225580 - DNA, 20 bp, synthetic construct
  source 1..20: mol_type = other DNA
caggggaccctggcatccta

SEQ ID NO: 225581 - DNA, 20 bp, synthetic construct
  source 1..20: mol_type = other DNA
gcaggggaccctggcatcct

SEQ ID NO: 225582 - DNA, 20 bp, synthetic construct
  source 1..20: mol_type = other DNA
ggcaggggaccctggcatcc

SEQ ID NO: 225583 - DNA, 20 bp, synthetic construct
  source 1..20: mol_type = other DNA
aggcaggggaccctggcatc

SEQ ID NO: 225584 - DNA, 20 bp, synthetic construct
  source 1..20: mol_type = other DNA
gaggcaggggaccctggcat

SEQ ID NO: 225585 - DNA, 20 bp, synthetic construct
  source 1..20: mol_type = other DNA
agaggcaggggaccctggca

SEQ ID NO: 225586 - DNA, 20 bp, synthetic construct
  source 1..20: mol_type = other DNA
gagaggcaggggaccctggc

SEQ ID NO: 225587 - DNA, 20 bp, synthetic construct
  source 1..20: mol_type = other DNA
tgagaggcaggggaccctgg

SEQ ID NO: 225588 - DNA, 20 bp, synthetic construct
  source 1..20: mol_type = other DNA
gtgagaggcaggggaccctg

SEQ ID NO: 225589 - DNA, 20 bp, synthetic construct
  source 1..20: mol_type = other DNA
ggtgagaggcaggggaccct

SEQ ID NO: 225590 - DNA, 20 bp, synthetic construct
  source 1..20: mol_type = other DNA
aggtgagaggcaggggaccc

SEQ ID NO: 225591 - DNA, 20 bp, synthetic construct
  source 1..20: mol_type = other DNA
caggtgagaggcaggggacc

SEQ ID NO: 225592 - DNA, 20 bp, synthetic construct
  source 1..20: mol_type = other DNA
ccaggtgagaggcaggggac

SEQ ID NO: 225593 - DNA, 20 bp, synthetic construct
  source 1..20: mol_type = other DNA
gccaggtgagaggcagggga

SEQ ID NO: 225594 - DNA, 20 bp, synthetic construct
  source 1..20: mol_type = other DNA
ggccaggtgagaggcagggg

SEQ ID NO: 225595 - DNA, 20 bp, synthetic construct
  source 1..20: mol_type = other DNA
aggccaggtgagaggcaggg

SEQ ID NO: 225596 - DNA, 20 bp, synthetic construct
  source 1..20: mol_type = other DNA
caggccaggtgagaggcagg

SEQ ID NO: 225597 - DNA, 20 bp, synthetic construct
  source 1..20: mol_type = other DNA
ccaggccaggtgagaggcag

SEQ ID NO: 225598 - DNA, 20 bp, synthetic construct
  source 1..20: mol_type = other DNA
cccaggccaggtgagaggca

SEQ ID NO: 225599 - DNA, 20 bp, synthetic construct
  source 1..20: mol_type = other DNA
gcccaggccaggtgagaggc

SEQ ID NO: 225600 - DNA, 20 bp, synthetic construct
  source 1..20: mol_type = other DNA
agcccaggccaggtgagagg

SEQ ID NO: 225601 - DNA, 20 bp, synthetic construct
  source 1..20: mol_type = other DNA
cagcccaggccaggtgagag

SEQ ID NO: 225602 - DNA, 20 bp, synthetic construct
  source 1..20: mol_type = other DNA
ccagcccaggccaggtgaga

SEQ ID NO: 225603 - DNA, 20 bp, synthetic construct
  source 1..20: mol_type = other DNA
tccagcccaggccaggtgag

SEQ ID NO: 225604 - DNA, 20 bp, synthetic construct
  source 1..20: mol_type = other DNA
ctccagcccaggccaggtga

SEQ ID NO: 225605 - DNA, 20 bp, synthetic construct
  source 1..20: mol_type = other DNA
cctccagcccaggccaggtg

SEQ ID NO: 225606 - DNA, 20 bp, synthetic construct
  source 1..20: mol_type = other DNA
gcctccagcccaggccaggt

SEQ ID NO: 225607 - DNA, 20 bp, synthetic construct
  source 1..20: mol_type = other DNA
ggcctccagcccaggccagg

SEQ ID NO: 225608 - DNA, 20 bp, synthetic construct
  source 1..20: mol_type = other DNA
aggcctccagcccaggccag

SEQ ID NO: 225609 - DNA, 20 bp, synthetic construct
  source 1..20: mol_type = other DNA
gaggcctccagcccaggcca

SEQ ID NO: 225610 - DNA, 20 bp, synthetic construct
  source 1..20: mol_type = other DNA
ggaggcctccagcccaggcc

SEQ ID NO: 225611 - DNA, 20 bp, synthetic construct
  source 1..20: mol_type = other DNA
aggaggcctccagcccaggc

SEQ ID NO: 225612 - DNA, 20 bp, synthetic construct
  source 1..20: mol_type = other DNA
caggaggcctccagcccagg

SEQ ID NO: 225613 - DNA, 20 bp, synthetic construct
  source 1..20: mol_type = other DNA
gcaggaggcctccagcccag

SEQ ID NO: 225614 - DNA, 20 bp, synthetic construct
  source 1..20: mol_type = other DNA
agcaggaggcctccagccca

SEQ ID NO: 225615 - DNA, 20 bp, synthetic construct
  source 1..20: mol_type = other DNA
cagcaggaggcctccagccc

SEQ ID NO: 225616 - DNA, 20 bp, synthetic construct
  source 1..20: mol_type = other DNA
acagcaggaggcctccagcc

SEQ ID NO: 225617 - DNA, 20 bp, synthetic construct
  source 1..20: mol_type = other DNA
gacagcaggaggcctccagc

SEQ ID NO: 225618 - DNA, 20 bp, synthetic construct
  source 1..20: mol_type = other DNA
ggacagcaggaggcctccag

SEQ ID NO: 225619 - DNA, 20 bp, synthetic construct
  source 1..20: mol_type = other DNA
aggacagcaggaggcctcca

SEQ ID NO: 225620 - DNA, 20 bp, synthetic construct
  source 1..20: mol_type = other DNA
caggacagcaggaggcctcc

SEQ ID NO: 225621 - DNA, 20 bp, synthetic construct
  source 1..20: mol_type = other DNA
acaggacagcaggaggcctc

SEQ ID NO: 225622 - DNA, 20 bp, synthetic construct
  source 1..20: mol_type = other DNA
gacaggacagcaggaggcct

SEQ ID NO: 225623 - DNA, 20 bp, synthetic construct
  source 1..20: mol_type = other DNA
tgacaggacagcaggaggcc

SEQ ID NO: 225624 - DNA, 20 bp, synthetic construct
  source 1..20: mol_type = other DNA
gtgacaggacagcaggaggc

SEQ ID NO: 225625 - DNA, 20 bp, synthetic construct
  source 1..20: mol_type = other DNA
agtgacaggacagcaggagg

SEQ ID NO: 225626 - DNA, 20 bp, synthetic construct
  source 1..20: mol_type = other DNA
cagtgacaggacagcaggag

SEQ ID NO: 225627 - DNA, 20 bp, synthetic construct
  source 1..20: mol_type = other DNA
tcagtgacaggacagcagga

SEQ ID NO: 225628 - DNA, 20 bp, synthetic construct
  source 1..20: mol_type = other DNA
atcagtgacaggacagcagg

SEQ ID NO: 225629 - DNA, 20 bp, synthetic construct
  source 1..20: mol_type = other DNA
gatcagtgacaggacagcag

SEQ ID NO: 225630 - DNA, 20 bp, synthetic construct
  source 1..20: mol_type = other DNA
tgatcagtgacaggacagca

SEQ ID NO: 225631 - DNA, 20 bp, synthetic construct
  source 1..20: mol_type = other DNA
gtgatcagtgacaggacagc

SEQ ID NO: 225632 - DNA, 20 bp, synthetic construct
  source 1..20: mol_type = other DNA
agtgatcagtgacaggacag

SEQ ID NO: 225633 - DNA, 20 bp, synthetic construct
  source 1..20: mol_type = other DNA
tagtgatcagtgacaggaca

SEQ ID NO: 225634 - DNA, 20 bp, synthetic construct
  source 1..20: mol_type = other DNA
gtagtgatcagtgacaggac

SEQ ID NO: 225635 - DNA, 20 bp, synthetic construct
  source 1..20: mol_type = other DNA
ggtagtgatcagtgacagga

SEQ ID NO: 225636 - DNA, 20 bp, synthetic construct
  source 1..20: mol_type = other DNA
gggtagtgatcagtgacagg

SEQ ID NO: 225637 - DNA, 20 bp, synthetic construct
  source 1..20: mol_type = other DNA
ggggtagtgatcagtgacag

SEQ ID NO: 225638 - DNA, 20 bp, synthetic construct
  source 1..20: mol_type = other DNA
cggggtagtgatcagtgaca

SEQ ID NO: 225639 - DNA, 20 bp, synthetic construct
  source 1..20: mol_type = other DNA
gcggggtagtgatcagtgac

SEQ ID NO: 225640 - DNA, 20 bp, synthetic construct
  source 1..20: mol_type = other DNA
ggcggggtagtgatcagtga

SEQ ID NO: 225641 - DNA, 20 bp, synthetic construct
  source 1..20: mol_type = other DNA
gggcggggtagtgatcagtg

SEQ ID NO: 225642 - DNA, 20 bp, synthetic construct
  source 1..20: mol_type = other DNA
ggggcggggtagtgatcagt

SEQ ID NO: 225643 - DNA, 20 bp, synthetic construct
  source 1..20: mol_type = other DNA
tggggcggggtagtgatcag

SEQ ID NO: 225644 - DNA, 20 bp, synthetic construct
  source 1..20: mol_type = other DNA
ctggggcggggtagtgatca

SEQ ID NO: 225645 - DNA, 20 bp, synthetic construct
  source 1..20: mol_type = other DNA
gctggggcggggtagtgatc

SEQ ID NO: 225646 - DNA, 20 bp, synthetic construct
  source 1..20: mol_type = other DNA
ggctggggcggggtagtgat

SEQ ID NO: 225647 - DNA, 20 bp, synthetic construct
  source 1..20: mol_type = other DNA
aggctggggcggggtagtga

SEQ ID NO: 225648 - DNA, 20 bp, synthetic construct
  source 1..20: mol_type = other DNA
gaggctggggcggggtagtg

SEQ ID NO: 225649 - DNA, 20 bp, synthetic construct
  source 1..20: mol_type = other DNA
ggaggctggggcggggtagt

SEQ ID NO: 225650 - DNA, 20 bp, synthetic construct
  source 1..20: mol_type = other DNA
aggaggctggggcggggtag

SEQ ID NO: 225651 - DNA, 20 bp, synthetic construct
  source 1..20: mol_type = other DNA
caggaggctggggcggggta

SEQ ID NO: 225652 - DNA, 20 bp, synthetic construct
  source 1..20: mol_type = other DNA
tcaggaggctggggcggggt

SEQ ID NO: 225653 - DNA, 20 bp, synthetic construct
  source 1..20: mol_type = other DNA
ctcaggaggctggggcgggg

SEQ ID NO: 225654 - DNA, 20 bp, synthetic construct
  source 1..20: mol_type = other DNA
actcaggaggctggggcggg

SEQ ID NO: 225655 - DNA, 20 bp, synthetic construct
  source 1..20: mol_type = other DNA
aactcaggaggctggggcgg

SEQ ID NO: 225656 - DNA, 20 bp, synthetic construct
  source 1..20: mol_type = other DNA
taactcaggaggctggggcg

SEQ ID NO: 225657 - DNA, 20 bp, synthetic construct
  source 1..20: mol_type = other DNA
ctaactcaggaggctggggc

SEQ ID NO: 225658 - DNA, 20 bp, synthetic construct
  source 1..20: mol_type = other DNA
tctaactcaggaggctgggg

SEQ ID NO: 225659 - DNA, 20 bp, synthetic construct
  source 1..20: mol_type = other DNA
ttctaactcaggaggctggg

SEQ ID NO: 225660 - DNA, 20 bp, synthetic construct
  source 1..20: mol_type = other DNA
cttctaactcaggaggctgg

SEQ ID NO: 225661 - DNA, 20 bp, synthetic construct
  source 1..20: mol_type = other DNA
tcttctaactcaggaggctg

SEQ ID NO: 225662 - DNA, 20 bp, synthetic construct
  source 1..20: mol_type = other DNA
gtcttctaactcaggaggct

SEQ ID NO: 225663 - DNA, 20 bp, synthetic construct
  source 1..20: mol_type = other DNA
tgtcttctaactcaggaggc

SEQ ID NO: 225664 - DNA, 20 bp, synthetic construct
  source 1..20: mol_type = other DNA
gtgtcttctaactcaggagg

SEQ ID NO: 225665 - DNA, 20 bp, synthetic construct
  source 1..20: mol_type = other DNA
tgtgtcttctaactcaggag

SEQ ID NO: 225666 - DNA, 20 bp, synthetic construct
  source 1..20: mol_type = other DNA
ctgtgtcttctaactcagga

SEQ ID NO: 225667 - DNA, 20 bp, synthetic construct
  source 1..20: mol_type = other DNA
cctgtgtcttctaactcagg

SEQ ID NO: 225668 - DNA, 20 bp, synthetic construct
  source 1..20: mol_type = other DNA
gcctgtgtcttctaactcag

SEQ ID NO: 225669 - DNA, 20 bp, synthetic construct
  source 1..20: mol_type = other DNA
agcctgtgtcttctaactca

SEQ ID NO: 225670 - DNA, 20 bp, synthetic construct
  source 1..20: mol_type = other DNA
tagcctgtgtcttctaactc

SEQ ID NO: 225671 - DNA, 20 bp, synthetic construct
  source 1..20: mol_type = other DNA
ttagcctgtgtcttctaact

SEQ ID NO: 225672 - DNA, 20 bp, synthetic construct
  source 1..20: mol_type = other DNA
tttagcctgtgtcttctaac

SEQ ID NO: 225673 - DNA, 20 bp, synthetic construct
  source 1..20: mol_type = other DNA
ctttagcctgtgtcttctaa

SEQ ID NO: 225674 - DNA, 20 bp, synthetic construct
  source 1..20: mol_type = other DNA
actttagcctgtgtcttcta

SEQ ID NO: 225675 - DNA, 20 bp, synthetic construct
  source 1..20: mol_type = other DNA
tactttagcctgtgtcttct

SEQ ID NO: 225676 - DNA, 20 bp, synthetic construct
  source 1..20: mol_type = other DNA
ctactttagcctgtgtcttc

SEQ ID NO: 225677 - DNA, 20 bp, synthetic construct
  source 1..20: mol_type = other DNA
tctactttagcctgtgtctt

SEQ ID NO: 225678 - DNA, 20 bp, synthetic construct
  source 1..20: mol_type = other DNA
ctctactttagcctgtgtct

SEQ ID NO: 225679 - DNA, 20 bp, synthetic construct
  source 1..20: mol_type = other DNA
actctactttagcctgtgtc

SEQ ID NO: 225680 - DNA, 20 bp, synthetic construct
  source 1..20: mol_type = other DNA
tactctactttagcctgtgt

SEQ ID NO: 225681 - DNA, 20 bp, synthetic construct
  source 1..20: mol_type = other DNA
atactctactttagcctgtg

SEQ ID NO: 225682 - DNA, 20 bp, synthetic construct
  source 1..20: mol_type = other DNA
aatactctactttagcctgt

SEQ ID NO: 225683 - DNA, 20 bp, synthetic construct
  source 1..20: mol_type = other DNA
aaatactctactttagcctg

SEQ ID NO: 225684 - DNA, 20 bp, synthetic construct
  source 1..20: mol_type = other DNA
gaaatactctactttagcct

SEQ ID NO: 225685 - DNA, 20 bp, synthetic construct
  source 1..20: mol_type = other DNA
agaaatactctactttagcc

SEQ ID NO: 225686 - DNA, 20 bp, synthetic construct
  source 1..20: mol_type = other DNA
aagaaatactctactttagc

SEQ ID NO: 225687 - DNA, 20 bp, synthetic construct
  source 1..20: mol_type = other DNA
gaagaaatactctactttag

SEQ ID NO: 225688 - DNA, 20 bp, synthetic construct
  source 1..20: mol_type = other DNA
tgaagaaatactctacttta

SEQ ID NO: 225689 - DNA, 20 bp, synthetic construct
  source 1..20: mol_type = other DNA
atgaagaaatactctacttt

SEQ ID NO: 225690 - DNA, 20 bp, synthetic construct
  source 1..20: mol_type = other DNA
aatgaagaaatactctactt

SEQ ID NO: 225691 - DNA, 20 bp, synthetic construct
  source 1..20: mol_type = other DNA
caatgaagaaatactctact

SEQ ID NO: 225692 - DNA, 20 bp, synthetic construct
  source 1..20: mol_type = other DNA
tcaatgaagaaatactctac

SEQ ID NO: 225693 - DNA, 20 bp, synthetic construct
  source 1..20: mol_type = other DNA
ttcaatgaagaaatactcta

SEQ ID NO: 225694 - DNA, 20 bp, synthetic construct
  source 1..20: mol_type = other DNA
tttcaatgaagaaatactct

SEQ ID NO: 225695 - DNA, 20 bp, synthetic construct
  source 1..20: mol_type = other DNA
ttttcaatgaagaaatactc

SEQ ID NO: 225696 - DNA, 20 bp, synthetic construct
  source 1..20: mol_type = other DNA
tttttcaatgaagaaatact

SEQ ID NO: 225697 - DNA, 20 bp, synthetic construct
  source 1..20: mol_type = other DNA
gtttttcaatgaagaaatac

SEQ ID NO: 225698 - DNA, 20 bp, synthetic construct
  source 1..20: mol_type = other DNA
ggtttttcaatgaagaaata

SEQ ID NO: 225699 - DNA, 20 bp, synthetic construct
  source 1..20: mol_type = other DNA
gggtttttcaatgaagaaat

SEQ ID NO: 225700 - DNA, 20 bp, synthetic construct
  source 1..20: mol_type = other DNA
tgggtttttcaatgaagaaa

SEQ ID NO: 225701 - DNA, 20 bp, synthetic construct
  source 1..20: mol_type = other DNA
atgggtttttcaatgaagaa

SEQ ID NO: 225702 - DNA, 20 bp, synthetic construct
  source 1..20: mol_type = other DNA
tatgggtttttcaatgaaga

SEQ ID NO: 225703 - DNA, 20 bp, synthetic construct
  source 1..20: mol_type = other DNA
gtatgggtttttcaatgaag

SEQ ID NO: 225704 - DNA, 20 bp, synthetic construct
  source 1..20: mol_type = other DNA
tgtatgggtttttcaatgaa

SEQ ID NO: 225705 - DNA, 20 bp, synthetic construct
  source 1..20: mol_type = other DNA
ttgtatgggtttttcaatga

SEQ ID NO: 225706 - DNA, 20 bp, synthetic construct
  source 1..20: mol_type = other DNA
tttgtatgggtttttcaatg

SEQ ID NO: 225707 - DNA, 20 bp, synthetic construct
  source 1..20: mol_type = other DNA
ttttgtatgggtttttcaat

SEQ ID NO: 225708 - DNA, 20 bp, synthetic construct
  source 1..20: mol_type = other DNA
attttgtatgggtttttcaa

SEQ ID NO: 225709 - DNA, 20 bp, synthetic construct
  source 1..20: mol_type = other DNA
tattttgtatgggtttttca

SEQ ID NO: 225710 - DNA, 20 bp, synthetic construct
  source 1..20: mol_type = other DNA
ttattttgtatgggtttttc

SEQ ID NO: 225711 - DNA, 20 bp, synthetic construct
  source 1..20: mol_type = other DNA
tttattttgtatgggttttt

SEQ ID NO: 225712 - DNA, 20 bp, synthetic construct
  source 1..20: mol_type = other DNA
ctttattttgtatgggtttt

SEQ ID NO: 225713 - DNA, 20 bp, synthetic construct
  source 1..20: mol_type = other DNA
cctttattttgtatgggttt

SEQ ID NO: 225714 - DNA, 20 bp, synthetic construct
  source 1..20: mol_type = other DNA
acctttattttgtatgggtt

SEQ ID NO: 225715 - DNA, 20 bp, synthetic construct
  source 1..20: mol_type = other DNA
aacctttattttgtatgggt

SEQ ID NO: 225716 - DNA, 20 bp, synthetic construct
  source 1..20: mol_type = other DNA
gaacctttattttgtatggg

SEQ ID NO: 225717 - DNA, 20 bp, synthetic construct
  source 1..20: mol_type = other DNA
tgaacctttattttgtatgg

SEQ ID NO: 225718 - DNA, 20 bp, synthetic construct
  source 1..20: mol_type = other DNA
atgaacctttattttgtatg

SEQ ID NO: 225719 - DNA, 20 bp, synthetic construct
  source 1..20: mol_type = other DNA
tatgaacctttattttgtat

SEQ ID NO: 225720 - DNA, 20 bp, synthetic construct
  source 1..20: mol_type = other DNA
ttatgaacctttattttgta

SEQ ID NO: 225721 - DNA, 20 bp, synthetic construct
  source 1..20: mol_type = other DNA
tttatgaacctttattttgt

SEQ ID NO: 225722 - DNA, 20 bp, synthetic construct
  source 1..20: mol_type = other DNA
ttttatgaacctttattttg

SEQ ID NO: 225723 - DNA, 20 bp, synthetic construct
  source 1..20: mol_type = other DNA
tttttatgaacctttatttt

SEQ ID NO: 225724 - DNA, 20 bp, synthetic construct
  source 1..20: mol_type = other DNA
ttttttatgaacctttattt

SEQ ID NO: 225725 - DNA, 20 bp, synthetic construct
  source 1..20: mol_type = other DNA
attttttatgaacctttatt

SEQ ID NO: 225726 - DNA, 20 bp, synthetic construct
  source 1..20: mol_type = other DNA
tattttttatgaacctttat

SEQ ID NO: 225727 - DNA, 20 bp, synthetic construct
  source 1..20: mol_type = other DNA
ttattttttatgaaccttta

SEQ ID NO: 225728 - DNA, 20 bp, synthetic construct
  source 1..20: mol_type = other DNA
tttattttttatgaaccttt

SEQ ID NO: 225729 - DNA, 20 bp, synthetic construct
  source 1..20: mol_type = other DNA
ttttattttttatgaacctt

SEQ ID NO: 225730 - DNA, 20 bp, synthetic construct
  source 1..20: mol_type = other DNA
tttttattttttatgaacct

SEQ ID NO: 225731 - DNA, 20 bp, synthetic construct
  source 1..20: mol_type = other DNA
atttttattttttatgaacc

SEQ ID NO: 225732 - DNA, 20 bp, synthetic construct
  source 1..20: mol_type = other DNA
aatttttattttttatgaac

SEQ ID NO: 225733 - DNA, 20 bp, synthetic construct
  source 1..20: mol_type = other DNA
aaatttttattttttatgaa

SEQ ID NO: 225734 - DNA, 20 bp, synthetic construct
  source 1..20: mol_type = other DNA
taaatttttattttttatga

SEQ ID NO: 225735 - DNA, 20 bp, synthetic construct
  source 1..20: mol_type = other DNA
ctaaatttttattttttatg

SEQ ID NO: 225736 - DNA, 20 bp, synthetic construct
  source 1..20: mol_type = other DNA
tctaaatttttattttttat

SEQ ID NO: 225737 - DNA, 20 bp, synthetic construct
  source 1..20: mol_type = other DNA
gtctaaatttttatttttta

SEQ ID NO: 225738 - DNA, 20 bp, synthetic construct
  source 1..20: mol_type = other DNA
agtctaaatttttatttttt

SEQ ID NO: 225739 - DNA, 20 bp, synthetic construct
  source 1..20: mol_type = other DNA
cagtctaaatttttattttt

SEQ ID NO: 225740 - DNA, 20 bp, synthetic construct
  source 1..20: mol_type = other DNA
ccagtctaaatttttatttt

SEQ ID NO: 225741 - DNA, 20 bp, synthetic construct
  source 1..20: mol_type = other DNA
cccagtctaaatttttattt

SEQ ID NO: 225742 - DNA, 20 bp, synthetic construct
  source 1..20: mol_type = other DNA
acccagtctaaatttttatt

SEQ ID NO: 225743 - DNA, 20 bp, synthetic construct
  source 1..20: mol_type = other DNA
cacccagtctaaatttttat

SEQ ID NO: 225744 - DNA, 20 bp, synthetic construct
  source 1..20: mol_type = other DNA
gcacccagtctaaattttta

SEQ ID NO: 225745 - DNA, 20 bp, synthetic construct
  source 1..20: mol_type = other DNA
agcacccagtctaaattttt

SEQ ID NO: 225746 - DNA, 20 bp, synthetic construct
  source 1..20: mol_type = other DNA
cagcacccagtctaaatttt

SEQ ID NO: 225747 - DNA, 20 bp, synthetic construct
  source 1..20: mol_type = other DNA
acagcacccagtctaaattt

SEQ ID NO: 225748 - DNA, 20 bp, synthetic construct
  source 1..20: mol_type = other DNA
cacagcacccagtctaaatt

SEQ ID NO: 225749 - DNA, 20 bp, synthetic construct
  source 1..20: mol_type = other DNA
ccacagcacccagtctaaat

SEQ ID NO: 225750 - DNA, 20 bp, synthetic construct
  source 1..20: mol_type = other DNA
gccacagcacccagtctaaa

SEQ ID NO: 225751 - DNA, 20 bp, synthetic construct
  source 1..20: mol_type = other DNA
agccacagcacccagtctaa

SEQ ID NO: 225752 - DNA, 20 bp, synthetic construct
  source 1..20: mol_type = other DNA
gagccacagcacccagtcta

SEQ ID NO: 225753 - DNA, 20 bp, synthetic construct
  source 1..20: mol_type = other DNA
tgagccacagcacccagtct

SEQ ID NO: 225754 - DNA, 20 bp, synthetic construct
  source 1..20: mol_type = other DNA
gtgagccacagcacccagtc

SEQ ID NO: 225755 - DNA, 20 bp, synthetic construct
  source 1..20: mol_type = other DNA
tgtgagccacagcacccagt

SEQ ID NO: 225756 - DNA, 20 bp, synthetic construct
  source 1..20: mol_type = other DNA
gtgtgagccacagcacccag

SEQ ID NO: 225757 - DNA, 20 bp, synthetic construct
  source 1..20: mol_type = other DNA
ggtgtgagccacagcaccca

SEQ ID NO: 225758 - DNA, 20 bp, synthetic construct
  source 1..20: mol_type = other DNA
aggtgtgagccacagcaccc

SEQ ID NO: 225759 - DNA, 20 bp, synthetic construct
  source 1..20: mol_type = other DNA
caggtgtgagccacagcacc

SEQ ID NO: 225760 - DNA, 20 bp, synthetic construct
  source 1..20: mol_type = other DNA
acaggtgtgagccacagcac

SEQ ID NO: 225761 - DNA, 20 bp, synthetic construct
  source 1..20: mol_type = other DNA
cacaggtgtgagccacagca

SEQ ID NO: 225762 - DNA, 20 bp, synthetic construct
  source 1..20: mol_type = other DNA
tcacaggtgtgagccacagc

SEQ ID NO: 225763 - DNA, 20 bp, synthetic construct
  source 1..20: mol_type = other DNA
atcacaggtgtgagccacag

SEQ ID NO: 225764 - DNA, 20 bp, synthetic construct
  source 1..20: mol_type = other DNA
gatcacaggtgtgagccaca

SEQ ID NO: 225765 - DNA, 20 bp, synthetic construct
  source 1..20: mol_type = other DNA
ggatcacaggtgtgagccac

SEQ ID NO: 225766 - DNA, 20 bp, synthetic construct
  source 1..20: mol_type = other DNA
gggatcacaggtgtgagcca

SEQ ID NO: 225767 - DNA, 20 bp, synthetic construct
  source 1..20: mol_type = other DNA
tgggatcacaggtgtgagcc

SEQ ID NO: 225768 - DNA, 20 bp, synthetic construct
  source 1..20: mol_type = other DNA
ctgggatcacaggtgtgagc

SEQ ID NO: 225769 - DNA, 20 bp, synthetic construct
  source 1..20: mol_type = other DNA
gctgggatcacaggtgtgag

SEQ ID NO: 225770 - DNA, 20 bp, synthetic construct
  source 1..20: mol_type = other DNA
tgctgggatcacaggtgtga

SEQ ID NO: 225771 - DNA, 20 bp, synthetic construct
  source 1..20: mol_type = other DNA
gtgctgggatcacaggtgtg

SEQ ID NO: 225772 - DNA, 20 bp, synthetic construct
  source 1..20: mol_type = other DNA
agtgctgggatcacaggtgt

SEQ ID NO: 225773 - DNA, 20 bp, synthetic construct
  source 1..20: mol_type = other DNA
aagtgctgggatcacaggtg

SEQ ID NO: 225774 - DNA, 20 bp, synthetic construct
  source 1..20: mol_type = other DNA
aaagtgctgggatcacaggt

SEQ ID NO: 225775 - DNA, 20 bp, synthetic construct
  source 1..20: mol_type = other DNA
caaagtgctgggatcacagg

SEQ ID NO: 225776 - DNA, 20 bp, synthetic construct
  source 1..20: mol_type = other DNA
ccaaagtgctgggatcacag

SEQ ID NO: 225777 - DNA, 20 bp, synthetic construct
  source 1..20: mol_type = other DNA
cccaaagtgctgggatcaca

SEQ ID NO: 225778 - DNA, 20 bp, synthetic construct
  source 1..20: mol_type = other DNA
tcccaaagtgctgggatcac

SEQ ID NO: 225779 - DNA, 20 bp, synthetic construct
  source 1..20: mol_type = other DNA
ctcccaaagtgctgggatca

SEQ ID NO: 225780 - DNA, 20 bp, synthetic construct
  source 1..20: mol_type = other DNA
cctcccaaagtgctgggatc

SEQ ID NO: 225781 - DNA, 20 bp, synthetic construct
  source 1..20: mol_type = other DNA
gcctcccaaagtgctgggat

SEQ ID NO: 225782 - DNA, 20 bp, synthetic construct
  source 1..20: mol_type = other DNA
ggcctcccaaagtgctggga

SEQ ID NO: 225783 - DNA, 20 bp, synthetic construct
  source 1..20: mol_type = other DNA
tggcctcccaaagtgctggg

SEQ ID NO: 225784 - DNA, 20 bp, synthetic construct
  source 1..20: mol_type = other DNA
ttggcctcccaaagtgctgg

SEQ ID NO: 225785 - DNA, 20 bp, synthetic construct
  source 1..20: mol_type = other DNA
cttggcctcccaaagtgctg

SEQ ID NO: 225786 - DNA, 20 bp, synthetic construct
  source 1..20: mol_type = other DNA
ccttggcctcccaaagtgct

SEQ ID NO: 225787 - DNA, 20 bp, synthetic construct
  source 1..20: mol_type = other DNA
gccttggcctcccaaagtgc

SEQ ID NO: 225788 - DNA, 20 bp, synthetic construct
  source 1..20: mol_type = other DNA
tgccttggcctcccaaagtg

SEQ ID NO: 225789 - DNA, 20 bp, synthetic construct
  source 1..20: mol_type = other DNA
ctgccttggcctcccaaagt

SEQ ID NO: 225790 - DNA, 20 bp, synthetic construct
  source 1..20: mol_type = other DNA
cctgccttggcctcccaaag

SEQ ID NO: 225791 - DNA, 20 bp, synthetic construct
  source 1..20: mol_type = other DNA
acctgccttggcctcccaaa

SEQ ID NO: 225792 - DNA, 20 bp, synthetic construct
  source 1..20: mol_type = other DNA
cacctgccttggcctcccaa

SEQ ID NO: 225793 - DNA, 20 bp, synthetic construct
  source 1..20: mol_type = other DNA
ccacctgccttggcctccca

SEQ ID NO: 225794 - DNA, 20 bp, synthetic construct
  source 1..20: mol_type = other DNA
tccacctgccttggcctccc

SEQ ID NO: 225795 - DNA, 20 bp, synthetic construct
  source 1..20: mol_type = other DNA
atccacctgccttggcctcc

SEQ ID NO: 225796 - DNA, 20 bp, synthetic construct
  source 1..20: mol_type = other DNA
gatccacctgccttggcctc

SEQ ID NO: 225797 - DNA, 20 bp, synthetic construct
  source 1..20: mol_type = other DNA
cgatccacctgccttggcct

SEQ ID NO: 225798 - DNA, 20 bp, synthetic construct
  source 1..20: mol_type = other DNA
gcgatccacctgccttggcc

SEQ ID NO: 225799 - DNA, 20 bp, synthetic construct
  source 1..20: mol_type = other DNA
agcgatccacctgccttggc

SEQ ID NO: 225800 - DNA, 20 bp, synthetic construct
  source 1..20: mol_type = other DNA
aagcgatccacctgccttgg

SEQ ID NO: 225801 - DNA, 20 bp, synthetic construct
  source 1..20: mol_type = other DNA
caagcgatccacctgccttg

SEQ ID NO: 225802 - DNA, 20 bp, synthetic construct
  source 1..20: mol_type = other DNA
tcaagcgatccacctgcctt

SEQ ID NO: 225803 - DNA, 20 bp, synthetic construct
  source 1..20: mol_type = other DNA
ctcaagcgatccacctgcct

SEQ ID NO: 225804 - DNA, 20 bp, synthetic construct
  source 1..20: mol_type = other DNA
gctcaagcgatccacctgcc

SEQ ID NO: 225805 - DNA, 20 bp, synthetic construct
  source 1..20: mol_type = other DNA
ggctcaagcgatccacctgc

SEQ ID NO: 225806 - DNA, 20 bp, synthetic construct
  source 1..20: mol_type = other DNA
gggctcaagcgatccacctg

SEQ ID NO: 225807 - DNA, 20 bp, synthetic construct
  source 1..20: mol_type = other DNA
agggctcaagcgatccacct

SEQ ID NO: 225808 - DNA, 20 bp, synthetic construct
  source 1..20: mol_type = other DNA
cagggctcaagcgatccacc

SEQ ID NO: 225809 - DNA, 20 bp, synthetic construct
  source 1..20: mol_type = other DNA
ccagggctcaagcgatccac

SEQ ID NO: 225810 - DNA, 20 bp, synthetic construct
  source 1..20: mol_type = other DNA
cccagggctcaagcgatcca

SEQ ID NO: 225811 - DNA, 20 bp, synthetic construct
  source 1..20: mol_type = other DNA
ccccagggctcaagcgatcc

SEQ ID NO: 225812 - DNA, 20 bp, synthetic construct
  source 1..20: mol_type = other DNA
accccagggctcaagcgatc

SEQ ID NO: 225813 - DNA, 20 bp, synthetic construct
  source 1..20: mol_type = other DNA
aaccccagggctcaagcgat

SEQ ID NO: 225814 - DNA, 20 bp, synthetic construct
  source 1..20: mol_type = other DNA
gaaccccagggctcaagcga

SEQ ID NO: 225815 - DNA, 20 bp, synthetic construct
  source 1..20: mol_type = other DNA
tgaaccccagggctcaagcg

SEQ ID NO: 225816 - DNA, 20 bp, synthetic construct
  source 1..20: mol_type = other DNA
atgaaccccagggctcaagc

SEQ ID NO: 225817 - DNA, 20 bp, synthetic construct
  source 1..20: mol_type = other DNA
catgaaccccagggctcaag

SEQ ID NO: 225818 - DNA, 20 bp, synthetic construct
  source 1..20: mol_type = other DNA
tcatgaaccccagggctcaa

SEQ ID NO: 225819 - DNA, 20 bp, synthetic construct
  source 1..20: mol_type = other DNA
gtcatgaaccccagggctca

SEQ ID NO: 225820 - DNA, 20 bp, synthetic construct
  source 1..20: mol_type = other DNA
ggtcatgaaccccagggctc

SEQ ID NO: 225821 - DNA, 20 bp, synthetic construct
  source 1..20: mol_type = other DNA
tggtcatgaaccccagggct

SEQ ID NO: 225822 - DNA, 20 bp, synthetic construct
  source 1..20: mol_type = other DNA
ctggtcatgaaccccagggc

SEQ ID NO: 225823 - DNA, 20 bp, synthetic construct
  source 1..20: mol_type = other DNA
gctggtcatgaaccccaggg

SEQ ID NO: 225824 - DNA, 20 bp, synthetic construct
  source 1..20: mol_type = other DNA
ggctggtcatgaaccccagg

SEQ ID NO: 225825 - DNA, 20 bp, synthetic construct
  source 1..20: mol_type = other DNA
aggctggtcatgaaccccag

SEQ ID NO: 225826 - DNA, 20 bp, synthetic construct
  source 1..20: mol_type = other DNA
caggctggtcatgaacccca

SEQ ID NO: 225827 - DNA, 20 bp, synthetic construct
  source 1..20: mol_type = other DNA
ccaggctggtcatgaacccc

SEQ ID NO: 225828 - DNA, 20 bp, synthetic construct
  source 1..20: mol_type = other DNA
cccaggctggtcatgaaccc

SEQ ID NO: 225829 - DNA, 20 bp, synthetic construct
  source 1..20: mol_type = other DNA
gcccaggctggtcatgaacc

SEQ ID NO: 225830 - DNA, 20 bp, synthetic construct
  source 1..20: mol_type = other DNA
tgcccaggctggtcatgaac

SEQ ID NO: 225831 - DNA, 20 bp, synthetic construct
  source 1..20: mol_type = other DNA
ttgcccaggctggtcatgaa

SEQ ID NO: 225832 - DNA, 20 bp, synthetic construct
  source 1..20: mol_type = other DNA
gttgcccaggctggtcatga

SEQ ID NO: 225833 - DNA, 20 bp, synthetic construct
  source 1..20: mol_type = other DNA
tgttgcccaggctggtcatg

SEQ ID NO: 225834 - DNA, 20 bp, synthetic construct
  source 1..20: mol_type = other DNA
atgttgcccaggctggtcat

SEQ ID NO: 225835 - DNA, 20 bp, synthetic construct
  source 1..20: mol_type = other DNA
tatgttgcccaggctggtca

SEQ ID NO: 225836 - DNA, 20 bp, synthetic construct
  source 1..20: mol_type = other DNA
ctatgttgcccaggctggtc

SEQ ID NO: 225837 - DNA, 20 bp, synthetic construct
  source 1..20: mol_type = other DNA
actatgttgcccaggctggt

SEQ ID NO: 225838 - DNA, 20 bp, synthetic construct
  source 1..20: mol_type = other DNA
cactatgttgcccaggctgg

SEQ ID NO: 225839 - DNA, 20 bp, synthetic construct
  source 1..20: mol_type = other DNA
tcactatgttgcccaggctg

SEQ ID NO: 225840 - DNA, 20 bp, synthetic construct
  source 1..20: mol_type = other DNA
ttcactatgttgcccaggct

SEQ ID NO: 225841 - DNA, 20 bp, synthetic construct
  source 1..20: mol_type = other DNA
tttcactatgttgcccaggc

SEQ ID NO: 225842 - DNA, 20 bp, synthetic construct
  source 1..20: mol_type = other DNA
gtttcactatgttgcccagg

SEQ ID NO: 225843 - DNA, 20 bp, synthetic construct
  source 1..20: mol_type = other DNA
ggtttcactatgttgcccag

SEQ ID NO: 225844 - DNA, 20 bp, synthetic construct
  source 1..20: mol_type = other DNA
gggtttcactatgttgccca

SEQ ID NO: 225845 - DNA, 20 bp, synthetic construct
  source 1..20: mol_type = other DNA
ggggtttcactatgttgccc

SEQ ID NO: 225846 - DNA, 20 bp, synthetic construct
  source 1..20: mol_type = other DNA
tggggtttcactatgttgcc

SEQ ID NO: 225847 - DNA, 20 bp, synthetic construct
  source 1..20: mol_type = other DNA
atggggtttcactatgttgc

SEQ ID NO: 225848 - DNA, 20 bp, synthetic construct
  source 1..20: mol_type = other DNA
gatggggtttcactatgttg

SEQ ID NO: 225849 - DNA, 20 bp, synthetic construct
  source 1..20: mol_type = other DNA
agatggggtttcactatgtt

SEQ ID NO: 225850 - DNA, 20 bp, synthetic construct
  source 1..20: mol_type = other DNA
gagatggggtttcactatgt

SEQ ID NO: 225851 - DNA, 20 bp, synthetic construct
  source 1..20: mol_type = other DNA
agagatggggtttcactatg

SEQ ID NO: 225852 - DNA, 20 bp, synthetic construct
  source 1..20: mol_type = other DNA
tagagatggggtttcactat

SEQ ID NO: 225853 - DNA, 20 bp, synthetic construct
  source 1..20: mol_type = other DNA
gtagagatggggtttcacta

SEQ ID NO: 225854 - DNA, 20 bp, synthetic construct
  source 1..20: mol_type = other DNA
tgtagagatggggtttcact

SEQ ID NO: 225855 - DNA, 20 bp, synthetic construct
  source 1..20: mol_type = other DNA
ttgtagagatggggtttcac

SEQ ID NO: 225856 - DNA, 20 bp, synthetic construct
  source 1..20: mol_type = other DNA
tttgtagagatggggtttca

SEQ ID NO: 225857 - DNA, 20 bp, synthetic construct
  source 1..20: mol_type = other DNA
ttttgtagagatggggtttc

SEQ ID NO: 225858 - DNA, 20 bp, synthetic construct
  source 1..20: mol_type = other DNA
tttttgtagagatggggttt

SEQ ID NO: 225859 - DNA, 20 bp, synthetic construct
  source 1..20: mol_type = other DNA
ttttttgtagagatggggtt

SEQ ID NO: 225860 - DNA, 20 bp, synthetic construct
  source 1..20: mol_type = other DNA
attttttgtagagatggggt

SEQ ID NO: 225861 - DNA, 20 bp, synthetic construct
  source 1..20: mol_type = other DNA
tattttttgtagagatgggg

SEQ ID NO: 225862 - DNA, 20 bp, synthetic construct
  source 1..20: mol_type = other DNA
gtattttttgtagagatggg

SEQ ID NO: 225863 - DNA, 20 bp, synthetic construct
  source 1..20: mol_type = other DNA
tgtattttttgtagagatgg

SEQ ID NO: 225864 - DNA, 20 bp, synthetic construct
  source 1..20: mol_type = other DNA
ttgtattttttgtagagatg

SEQ ID NO: 225865 - DNA, 20 bp, synthetic construct
  source 1..20: mol_type = other DNA
tttgtattttttgtagagat

SEQ ID NO: 225866 - DNA, 20 bp, synthetic construct
  source 1..20: mol_type = other DNA
ttttgtattttttgtagaga

SEQ ID NO: 225867 - DNA, 20 bp, synthetic construct
  source 1..20: mol_type = other DNA
tttttgtattttttgtagag

SEQ ID NO: 225868 - DNA, 20 bp, synthetic construct
  source 1..20: mol_type = other DNA
ttttttgtattttttgtaga

SEQ ID NO: 225869 - DNA, 20 bp, synthetic construct
  source 1..20: mol_type = other DNA
attttttgtattttttgtag

SEQ ID NO: 225870 - DNA, 20 bp, synthetic construct
  source 1..20: mol_type = other DNA
aattttttgtattttttgta

SEQ ID NO: 225871 - DNA, 20 bp, synthetic construct
  source 1..20: mol_type = other DNA
taattttttgtattttttgt

SEQ ID NO: 225872 - DNA, 20 bp, synthetic construct
  source 1..20: mol_type = other DNA
ctaattttttgtattttttg

SEQ ID NO: 225873 - DNA, 20 bp, synthetic construct
  source 1..20: mol_type = other DNA
gctaattttttgtatttttt

SEQ ID NO: 225874 - DNA, 20 bp, synthetic construct
  source 1..20: mol_type = other DNA
ggctaattttttgtattttt

SEQ ID NO: 225875 - DNA, 20 bp, synthetic construct
  source 1..20: mol_type = other DNA
tggctaattttttgtatttt

SEQ ID NO: 225876 - DNA, 20 bp, synthetic construct
  source 1..20: mol_type = other DNA
ctggctaattttttgtattt

SEQ ID NO: 225877 - DNA, 20 bp, synthetic construct
  source 1..20: mol_type = other DNA
cctggctaattttttgtatt

SEQ ID NO: 225878 - DNA, 20 bp, synthetic construct
  source 1..20: mol_type = other DNA
gcctggctaattttttgtat

SEQ ID NO: 225879 - DNA, 20 bp, synthetic construct
  source 1..20: mol_type = other DNA
tgcctggctaattttttgta

SEQ ID NO: 225880 - DNA, 20 bp, synthetic construct
  source 1..20: mol_type = other DNA
atgcctggctaattttttgt

SEQ ID NO: 225881 - DNA, 20 bp, synthetic construct
  source 1..20: mol_type = other DNA
catgcctggctaattttttg

SEQ ID NO: 225882 - DNA, 20 bp, synthetic construct
  source 1..20: mol_type = other DNA
ccatgcctggctaatttttt

SEQ ID NO: 225883 - DNA, 20 bp, synthetic construct
  source 1..20: mol_type = other DNA
accatgcctggctaattttt

SEQ ID NO: 225884 - DNA, 20 bp, synthetic construct
  source 1..20: mol_type = other DNA
caccatgcctggctaatttt

SEQ ID NO: 225885 - DNA, 20 bp, synthetic construct
  source 1..20: mol_type = other DNA
ccaccatgcctggctaattt

SEQ ID NO: 225886 - DNA, 20 bp, synthetic construct
  source 1..20: mol_type = other DNA
accaccatgcctggctaatt

SEQ ID NO: 225887 - DNA, 20 bp, synthetic construct
  source 1..20: mol_type = other DNA
caccaccatgcctggctaat

SEQ ID NO: 225888 - DNA, 20 bp, synthetic construct
  source 1..20: mol_type = other DNA
gcaccaccatgcctggctaa

SEQ ID NO: 225889 - DNA, 20 bp, synthetic construct
  source 1..20: mol_type = other DNA
tgcaccaccatgcctggcta

SEQ ID NO: 225890 - DNA, 20 bp, synthetic construct
  source 1..20: mol_type = other DNA
atgcaccaccatgcctggct

SEQ ID NO: 225891 - DNA, 20 bp, synthetic construct
  source 1..20: mol_type = other DNA
tatgcaccaccatgcctggc

SEQ ID NO: 225892 - DNA, 20 bp, synthetic construct
  source 1..20: mol_type = other DNA
gtatgcaccaccatgcctgg

SEQ ID NO: 225893 - DNA, 20 bp, synthetic construct
  source 1..20: mol_type = other DNA
ggtatgcaccaccatgcctg

SEQ ID NO: 225894 - DNA, 20 bp, synthetic construct
  source 1..20: mol_type = other DNA
aggtatgcaccaccatgcct

SEQ ID NO: 225895 - DNA, 20 bp, synthetic construct
  source 1..20: mol_type = other DNA
caggtatgcaccaccatgcc

SEQ ID NO: 225896 - DNA, 20 bp, synthetic construct
  source 1..20: mol_type = other DNA
acaggtatgcaccaccatgc

SEQ ID NO: 225897 - DNA, 20 bp, synthetic construct
  source 1..20: mol_type = other DNA
cacaggtatgcaccaccatg

SEQ ID NO: 225898 - DNA, 20 bp, synthetic construct
  source 1..20: mol_type = other DNA
ccacaggtatgcaccaccat

SEQ ID NO: 225899 - DNA, 20 bp, synthetic construct
  source 1..20: mol_type = other DNA
accacaggtatgcaccacca

SEQ ID NO: 225900 - DNA, 20 bp, synthetic construct
  source 1..20: mol_type = other DNA
gaccacaggtatgcaccacc

SEQ ID NO: 225901 - DNA, 20 bp, synthetic construct
  source 1..20: mol_type = other DNA
ggaccacaggtatgcaccac

SEQ ID NO: 225902 - DNA, 20 bp, synthetic construct
  source 1..20: mol_type = other DNA
gggaccacaggtatgcacca

SEQ ID NO: 225903 - DNA, 20 bp, synthetic construct
  source 1..20: mol_type = other DNA
tgggaccacaggtatgcacc

SEQ ID NO: 225904 - DNA, 20 bp, synthetic construct
  source 1..20: mol_type = other DNA
ctgggaccacaggtatgcac

SEQ ID NO: 225905 - DNA, 20 bp, synthetic construct
  source 1..20: mol_type = other DNA
gctgggaccacaggtatgca

SEQ ID NO: 225906 - DNA, 20 bp, synthetic construct
  source 1..20: mol_type = other DNA
agctgggaccacaggtatgc

SEQ ID NO: 225907 - DNA, 20 bp, synthetic construct
  source 1..20: mol_type = other DNA
aagctgggaccacaggtatg

SEQ ID NO: 225908 - DNA, 20 bp, synthetic construct
  source 1..20: mol_type = other DNA
gaagctgggaccacaggtat

SEQ ID NO: 225909 - DNA, 20 bp, synthetic construct
  source 1..20: mol_type = other DNA
agaagctgggaccacaggta

SEQ ID NO: 225910 - DNA, 20 bp, synthetic construct
  source 1..20: mol_type = other DNA
gagaagctgggaccacaggt

SEQ ID NO: 225911 - DNA, 20 bp, synthetic construct
  source 1..20: mol_type = other DNA
tgagaagctgggaccacagg

SEQ ID NO: 225912 - DNA, 20 bp, synthetic construct
  source 1..20: mol_type = other DNA
ctgagaagctgggaccacag

SEQ ID NO: 225913 - DNA, 20 bp, synthetic construct
  source 1..20: mol_type = other DNA
gctgagaagctgggaccaca

SEQ ID NO: 225914 - DNA, 20 bp, synthetic construct
  source 1..20: mol_type = other DNA
ggctgagaagctgggaccac

SEQ ID NO: 225915 - DNA, 20 bp, synthetic construct
  source 1..20: mol_type = other DNA
aggctgagaagctgggacca

SEQ ID NO: 225916 - DNA, 20 bp, synthetic construct
  source 1..20: mol_type = other DNA
taggctgagaagctgggacc

SEQ ID NO: 225917 - DNA, 20 bp, synthetic construct
  source 1..20: mol_type = other DNA
ataggctgagaagctgggac

SEQ ID NO: 225918 - DNA, 20 bp, synthetic construct
  source 1..20: mol_type = other DNA
cataggctgagaagctggga

SEQ ID NO: 225919 - DNA, 20 bp, synthetic construct
  source 1..20: mol_type = other DNA
ccataggctgagaagctggg

SEQ ID NO: 225920 - DNA, 20 bp, synthetic construct
  source 1..20: mol_type = other DNA
tccataggctgagaagctgg

SEQ ID NO: 225921 - DNA, 20 bp, synthetic construct
  source 1..20: mol_type = other DNA
gtccataggctgagaagctg

SEQ ID NO: 225922 - DNA, 20 bp, synthetic construct
  source 1..20: mol_type = other DNA
ggtccataggctgagaagct

SEQ ID NO: 225923 - DNA, 20 bp, synthetic construct
  source 1..20: mol_type = other DNA
gggtccataggctgagaagc

SEQ ID NO: 225924 - DNA, 20 bp, synthetic construct
  source 1..20: mol_type = other DNA
tgggtccataggctgagaag

SEQ ID NO: 225925 - DNA, 20 bp, synthetic construct
  source 1..20: mol_type = other DNA
gtgggtccataggctgagaa

SEQ ID NO: 225926 - DNA, 20 bp, synthetic construct
  source 1..20: mol_type = other DNA
tgtgggtccataggctgaga

SEQ ID NO: 225927 - DNA, 20 bp, synthetic construct
  source 1..20: mol_type = other DNA
atgtgggtccataggctgag

SEQ ID NO: 225928 - DNA, 20 bp, synthetic construct
  source 1..20: mol_type = other DNA
tatgtgggtccataggctga

SEQ ID NO: 225929 - DNA, 20 bp, synthetic construct
  source 1..20: mol_type = other DNA
ctatgtgggtccataggctg

SEQ ID NO: 225930 - DNA, 20 bp, synthetic construct
  source 1..20: mol_type = other DNA
tctatgtgggtccataggct

SEQ ID NO: 225931 - DNA, 20 bp, synthetic construct
  source 1..20: mol_type = other DNA
ttctatgtgggtccataggc

SEQ ID NO: 225932 - DNA, 20 bp, synthetic construct
  source 1..20: mol_type = other DNA
attctatgtgggtccatagg

SEQ ID NO: 225933 - DNA, 20 bp, synthetic construct
  source 1..20: mol_type = other DNA
tattctatgtgggtccatag

SEQ ID NO: 225934 - DNA, 20 bp, synthetic construct
  source 1..20: mol_type = other DNA
gtattctatgtgggtccata

SEQ ID NO: 225935 - DNA, 20 bp, synthetic construct
  source 1..20: mol_type = other DNA
tgtattctatgtgggtccat

SEQ ID NO: 225936 - DNA, 20 bp, synthetic construct
  source 1..20: mol_type = other DNA
ttgtattctatgtgggtcca

SEQ ID NO: 225937 - DNA, 20 bp, synthetic construct
  source 1..20: mol_type = other DNA
attgtattctatgtgggtcc

SEQ ID NO: 225938 - DNA, 20 bp, synthetic construct
  source 1..20: mol_type = other DNA
cattgtattctatgtgggtc

SEQ ID NO: 225939 - DNA, 20 bp, synthetic construct
  source 1..20: mol_type = other DNA
acattgtattctatgtgggt

SEQ ID NO: 225940 - DNA, 20 bp, synthetic construct
  source 1..20: mol_type = other DNA
gacattgtattctatgtggg

SEQ ID NO: 225941 - DNA, 20 bp, synthetic construct
  source 1..20: mol_type = other DNA
tgacattgtattctatgtgg

SEQ ID NO: 225942 - DNA, 20 bp, synthetic construct
  source 1..20: mol_type = other DNA
ctgacattgtattctatgtg

SEQ ID NO: 225943 - DNA, 20 bp, synthetic construct
  source 1..20: mol_type = other DNA
gctgacattgtattctatgt

SEQ ID NO: 225944 - DNA, 20 bp, synthetic construct
  source 1..20: mol_type = other DNA
tgctgacattgtattctatg

SEQ ID NO: 225945 - DNA, 20 bp, synthetic construct
  source 1..20: mol_type = other DNA
atgctgacattgtattctat

SEQ ID NO: 225946 - DNA, 20 bp, synthetic construct
  source 1..20: mol_type = other DNA
tatgctgacattgtattcta

SEQ ID NO: 225947 - DNA, 20 bp, synthetic construct
  source 1..20: mol_type = other DNA
ttatgctgacattgtattct

SEQ ID NO: 225948 - DNA, 20 bp, synthetic construct
  source 1..20: mol_type = other DNA
cttatgctgacattgtattc

SEQ ID NO: 225949 - DNA, 20 bp, synthetic construct
  source 1..20: mol_type = other DNA
tcttatgctgacattgtatt

SEQ ID NO: 225950 - DNA, 20 bp, synthetic construct
  source 1..20: mol_type = other DNA
ttcttatgctgacattgtat

SEQ ID NO: 225951 - DNA, 20 bp, synthetic construct
  source 1..20: mol_type = other DNA
cttcttatgctgacattgta

SEQ ID NO: 225952 - DNA, 20 bp, synthetic construct
  source 1..20: mol_type = other DNA
ccttcttatgctgacattgt

SEQ ID NO: 225953 - DNA, 20 bp, synthetic construct
  source 1..20: mol_type = other DNA
cccttcttatgctgacattg

SEQ ID NO: 225954 - DNA, 20 bp, synthetic construct
  source 1..20: mol_type = other DNA
tcccttcttatgctgacatt

SEQ ID NO: 225955 - DNA, 20 bp, synthetic construct
  source 1..20: mol_type = other DNA
ctcccttcttatgctgacat

SEQ ID NO: 225956 - DNA, 20 bp, synthetic construct
  source 1..20: mol_type = other DNA
gctcccttcttatgctgaca

SEQ ID NO: 225957 - DNA, 20 bp, synthetic construct
  source 1..20: mol_type = other DNA
ggctcccttcttatgctgac

SEQ ID NO: 225958 - DNA, 20 bp, synthetic construct
  source 1..20: mol_type = other DNA
gggctcccttcttatgctga

SEQ ID NO: 225959 - DNA, 20 bp, synthetic construct
  source 1..20: mol_type = other DNA
agggctcccttcttatgctg

SEQ ID NO: 225960 - DNA, 20 bp, synthetic construct
  source 1..20: mol_type = other DNA
cagggctcccttcttatgct

SEQ ID NO: 225961 - DNA, 20 bp, synthetic construct
  source 1..20: mol_type = other DNA
ccagggctcccttcttatgc

SEQ ID NO: 225962 - DNA, 20 bp, synthetic construct
  source 1..20: mol_type = other DNA
cccagggctcccttcttatg

SEQ ID NO: 225963 - DNA, 20 bp, synthetic construct
  source 1..20: mol_type = other DNA
ccccagggctcccttcttat

SEQ ID NO: 225964 - DNA, 20 bp, synthetic construct
  source 1..20: mol_type = other DNA
accccagggctcccttctta

SEQ ID NO: 225965 - DNA, 20 bp, synthetic construct
  source 1..20: mol_type = other DNA
gaccccagggctcccttctt

SEQ ID NO: 225966 - DNA, 20 bp, synthetic construct
  source 1..20: mol_type = other DNA
tgaccccagggctcccttct

SEQ ID NO: 225967 - DNA, 20 bp, synthetic construct
  source 1..20: mol_type = other DNA
gtgaccccagggctcccttc

SEQ ID NO: 225968 - DNA, 20 bp, synthetic construct
  source 1..20: mol_type = other DNA
ggtgaccccagggctccctt

SEQ ID NO: 225969 - DNA, 20 bp, synthetic construct
  source 1..20: mol_type = other DNA
tggtgaccccagggctccct

SEQ ID NO: 225970 - DNA, 20 bp, synthetic construct
  source 1..20: mol_type = other DNA
ttggtgaccccagggctccc

SEQ ID NO: 225971 - DNA, 20 bp, synthetic construct
  source 1..20: mol_type = other DNA
tttggtgaccccagggctcc

SEQ ID NO: 225972 - DNA, 20 bp, synthetic construct
  source 1..20: mol_type = other DNA
atttggtgaccccagggctc

SEQ ID NO: 225973 - DNA, 20 bp, synthetic construct
  source 1..20: mol_type = other DNA
catttggtgaccccagggct

SEQ ID NO: 225974 - DNA, 20 bp, synthetic construct
  source 1..20: mol_type = other DNA
ccatttggtgaccccagggc

SEQ ID NO: 225975 - DNA, 20 bp, synthetic construct
  source 1..20: mol_type = other DNA
accatttggtgaccccaggg

SEQ ID NO: 225976 - DNA, 20 bp, synthetic construct
  source 1..20: mol_type = other DNA
aaccatttggtgaccccagg

SEQ ID NO: 225977 - DNA, 20 bp, synthetic construct
  source 1..20: mol_type = other DNA
aaaccatttggtgaccccag

SEQ ID NO: 225978 - DNA, 20 bp, synthetic construct
  source 1..20: mol_type = other DNA
caaaccatttggtgacccca

SEQ ID NO: 225979 - DNA, 20 bp, synthetic construct
  source 1..20: mol_type = other DNA
ccaaaccatttggtgacccc

SEQ ID NO: 225980 - DNA, 20 bp, synthetic construct
  source 1..20: mol_type = other DNA
cccaaaccatttggtgaccc

SEQ ID NO: 225981 - DNA, 20 bp, synthetic construct
  source 1..20: mol_type = other DNA
gcccaaaccatttggtgacc

SEQ ID NO: 225982 - DNA, 20 bp, synthetic construct
  source 1..20: mol_type = other DNA
cgcccaaaccatttggtgac

SEQ ID NO: 225983 - DNA, 20 bp, synthetic construct
  source 1..20: mol_type = other DNA
ccgcccaaaccatttggtga

SEQ ID NO: 225984 - DNA, 20 bp, synthetic construct
  source 1..20: mol_type = other DNA
gccgcccaaaccatttggtg

SEQ ID NO: 225985 - DNA, 20 bp, synthetic construct
  source 1..20: mol_type = other DNA
tgccgcccaaaccatttggt

SEQ ID NO: 225986 - DNA, 20 bp, synthetic construct
  source 1..20: mol_type = other DNA
ttgccgcccaaaccatttgg

SEQ ID NO: 225987 - DNA, 20 bp, synthetic construct
  source 1..20: mol_type = other DNA
tttgccgcccaaaccatttg

SEQ ID NO: 225988 - DNA, 20 bp, synthetic construct
  source 1..20: mol_type = other DNA
ctttgccgcccaaaccattt

SEQ ID NO: 225989 - DNA, 20 bp, synthetic construct
  source 1..20: mol_type = other DNA
tctttgccgcccaaaccatt

SEQ ID NO: 225990 - DNA, 20 bp, synthetic construct
  source 1..20: mol_type = other DNA
ttctttgccgcccaaaccat

SEQ ID NO: 225991 - DNA, 20 bp, synthetic construct
  source 1..20: mol_type = other DNA
gttctttgccgcccaaacca

SEQ ID NO: 225992 - DNA, 20 bp, synthetic construct
  source 1..20: mol_type = other DNA
ggttctttgccgcccaaacc

SEQ ID NO: 225993 - DNA, 20 bp, synthetic construct
  source 1..20: mol_type = other DNA
aggttctttgccgcccaaac

SEQ ID NO: 225994 - DNA, 20 bp, synthetic construct
  source 1..20: mol_type = other DNA
caggttctttgccgcccaaa

SEQ ID NO: 225995 - DNA, 20 bp, synthetic construct
  source 1..20: mol_type = other DNA
tcaggttctttgccgcccaa

SEQ ID NO: 225996 - DNA, 20 bp, synthetic construct
  source 1..20: mol_type = other DNA
ttcaggttctttgccgccca

SEQ ID NO: 225997 - DNA, 20 bp, synthetic construct
  source 1..20: mol_type = other DNA
cttcaggttctttgccgccc

SEQ ID NO: 225998 - DNA, 20 bp, synthetic construct
  source 1..20: mol_type = other DNA
ccttcaggttctttgccgcc

SEQ ID NO: 225999 - DNA, 20 bp, synthetic construct
  source 1..20: mol_type = other DNA
accttcaggttctttgccgc

SEQ ID NO: 226000 - DNA, 20 bp, synthetic construct
  source 1..20: mol_type = other DNA
aaccttcaggttctttgccg

SEQ ID NO: 226001 - DNA, 20 bp, synthetic construct
  source 1..20: mol_type = other DNA
caaccttcaggttctttgcc

SEQ ID NO: 226002 - DNA, 20 bp, synthetic construct
  source 1..20: mol_type = other DNA
tcaaccttcaggttctttgc

SEQ ID NO: 226003 - DNA, 20 bp, synthetic construct
  source 1..20: mol_type = other DNA
ctcaaccttcaggttctttg

SEQ ID NO: 226004 - DNA, 20 bp, synthetic construct
  source 1..20: mol_type = other DNA
tctcaaccttcaggttcttt

SEQ ID NO: 226005 - DNA, 20 bp, synthetic construct
  source 1..20: mol_type = other DNA
ctctcaaccttcaggttctt

SEQ ID NO: 226006 - DNA, 20 bp, synthetic construct
  source 1..20: mol_type = other DNA
tctctcaaccttcaggttct

SEQ ID NO: 226007 - DNA, 20 bp, synthetic construct
  source 1..20: mol_type = other DNA
ttctctcaaccttcaggttc

SEQ ID NO: 226008 - DNA, 20 bp, synthetic construct
  source 1..20: mol_type = other DNA
cttctctcaaccttcaggtt

SEQ ID NO: 226009 - DNA, 20 bp, synthetic construct
  source 1..20: mol_type = other DNA
acttctctcaaccttcaggt

SEQ ID NO: 226010 - DNA, 20 bp, synthetic construct
  source 1..20: mol_type = other DNA
cacttctctcaaccttcagg

SEQ ID NO: 226011 - DNA, 20 bp, synthetic construct
  source 1..20: mol_type = other DNA
ccacttctctcaaccttcag

SEQ ID NO: 226012 - DNA, 20 bp, synthetic construct
  source 1..20: mol_type = other DNA
gccacttctctcaaccttca

SEQ ID NO: 226013 - DNA, 20 bp, synthetic construct
  source 1..20: mol_type = other DNA
agccacttctctcaaccttc

SEQ ID NO: 226014 - DNA, 20 bp, synthetic construct
  source 1..20: mol_type = other DNA
aagccacttctctcaacctt

SEQ ID NO: 226015 - DNA, 20 bp, synthetic construct
  source 1..20: mol_type = other DNA
caagccacttctctcaacct

SEQ ID NO: 226016 - DNA, 20 bp, synthetic construct
  source 1..20: mol_type = other DNA
ccaagccacttctctcaacc

SEQ ID NO: 226017 - DNA, 20 bp, synthetic construct
  source 1..20: mol_type = other DNA
accaagccacttctctcaac

SEQ ID NO: 226018 - DNA, 20 bp, synthetic construct
  source 1..20: mol_type = other DNA
aaccaagccacttctctcaa

SEQ ID NO: 226019 - DNA, 20 bp, synthetic construct
  source 1..20: mol_type = other DNA
taaccaagccacttctctca

SEQ ID NO: 226020 - DNA, 20 bp, synthetic construct
  source 1..20: mol_type = other DNA
gtaaccaagccacttctctc

SEQ ID NO: 226021 - DNA, 20 bp, synthetic construct
  source 1..20: mol_type = other DNA
ggtaaccaagccacttctct

SEQ ID NO: 226022 - DNA, 20 bp, synthetic construct
  source 1..20: mol_type = other DNA
gggtaaccaagccacttctc

SEQ ID NO: 226023 - DNA, 20 bp, synthetic construct
  source 1..20: mol_type = other DNA
tgggtaaccaagccacttct

SEQ ID NO: 226024 - DNA, 20 bp, synthetic construct
  source 1..20: mol_type = other DNA
ctgggtaaccaagccacttc

SEQ ID NO: 226025 - DNA, 20 bp, synthetic construct
  source 1..20: mol_type = other DNA
gctgggtaaccaagccactt

SEQ ID NO: 226026 - DNA, 20 bp, synthetic construct
  source 1..20: mol_type = other DNA
agctgggtaaccaagccact

SEQ ID NO: 226027 - DNA, 20 bp, synthetic construct
  source 1..20: mol_type = other DNA
cagctgggtaaccaagccac

SEQ ID NO: 226028 - DNA, 20 bp, synthetic construct
  source 1..20: mol_type = other DNA
acagctgggtaaccaagcca

SEQ ID NO: 226029 - DNA, 20 bp, synthetic construct
  source 1..20: mol_type = other DNA
aacagctgggtaaccaagcc

SEQ ID NO: 226030 - DNA, 20 bp, synthetic construct
  source 1..20: mol_type = other DNA
caacagctgggtaaccaagc

SEQ ID NO: 226031 - DNA, 20 bp, synthetic construct
  source 1..20: mol_type = other DNA
ccaacagctgggtaaccaag

SEQ ID NO: 226032 - DNA, 20 bp, synthetic construct
  source 1..20: mol_type = other DNA
tccaacagctgggtaaccaa

SEQ ID NO: 226033 - DNA, 20 bp, synthetic construct
  source 1..20: mol_type = other DNA
atccaacagctgggtaacca

SEQ ID NO: 226034 - DNA, 20 bp, synthetic construct
  source 1..20: mol_type = other DNA
catccaacagctgggtaacc

SEQ ID NO: 226035 - DNA, 20 bp, synthetic construct
  source 1..20: mol_type = other DNA
acatccaacagctgggtaac

SEQ ID NO: 226036 - DNA, 20 bp, synthetic construct
  source 1..20: mol_type = other DNA
cacatccaacagctgggtaa

SEQ ID NO: 226037 - DNA, 20 bp, synthetic construct
  source 1..20: mol_type = other DNA
tcacatccaacagctgggta

SEQ ID NO: 226038 - DNA, 20 bp, synthetic construct
  source 1..20: mol_type = other DNA
ctcacatccaacagctgggt

SEQ ID NO: 226039 - DNA, 20 bp, synthetic construct
  source 1..20: mol_type = other DNA
tctcacatccaacagctggg

SEQ ID NO: 226040 - DNA, 20 bp, synthetic construct
  source 1..20: mol_type = other DNA
gtctcacatccaacagctgg

SEQ ID NO: 226041 - DNA, 20 bp, synthetic construct
  source 1..20: mol_type = other DNA
ggtctcacatccaacagctg

SEQ ID NO: 226042 - DNA, 20 bp, synthetic construct
  source 1..20: mol_type = other DNA
aggtctcacatccaacagct

SEQ ID NO: 226043 - DNA, 20 bp, synthetic construct
  source 1..20: mol_type = other DNA
caggtctcacatccaacagc

SEQ ID NO: 226044 - DNA, 20 bp, synthetic construct
  source 1..20: mol_type = other DNA
ccaggtctcacatccaacag

SEQ ID NO: 226045 - DNA, 20 bp, synthetic construct
  source 1..20: mol_type = other DNA
gccaggtctcacatccaaca

SEQ ID NO: 226046 - DNA, 20 bp, synthetic construct
  source 1..20: mol_type = other DNA
ggccaggtctcacatccaac

SEQ ID NO: 226047 - DNA, 20 bp, synthetic construct
  source 1..20: mol_type = other DNA
tggccaggtctcacatccaa

SEQ ID NO: 226048 - DNA, 20 bp, synthetic construct
  source 1..20: mol_type = other DNA
gtggccaggtctcacatcca

SEQ ID NO: 226049 - DNA, 20 bp, synthetic construct
  source 1..20: mol_type = other DNA
agtggccaggtctcacatcc

SEQ ID NO: 226050 - DNA, 20 bp, synthetic construct
  source 1..20: mol_type = other DNA
cagtggccaggtctcacatc

SEQ ID NO: 226051 - DNA, 20 bp, synthetic construct
  source 1..20: mol_type = other DNA
gcagtggccaggtctcacat

SEQ ID NO: 226052 - DNA, 20 bp, synthetic construct
  source 1..20: mol_type = other DNA
agcagtggccaggtctcaca

SEQ ID NO: 226053 - DNA, 20 bp, synthetic construct
  source 1..20: mol_type = other DNA
aagcagtggccaggtctcac

SEQ ID NO: 226054 - DNA, 20 bp, synthetic construct
  source 1..20: mol_type = other DNA
gaagcagtggccaggtctca

SEQ ID NO: 226055 - DNA, 20 bp, synthetic construct
  source 1..20: mol_type = other DNA
agaagcagtggccaggtctc

SEQ ID NO: 226056 - DNA, 20 bp, synthetic construct
  source 1..20: mol_type = other DNA
aagaagcagtggccaggtct

SEQ ID NO: 226057 - DNA, 20 bp, synthetic construct
  source 1..20: mol_type = other DNA
gaagaagcagtggccaggtc

SEQ ID NO: 226058 - DNA, 20 bp, synthetic construct
  source 1..20: mol_type = other DNA
ggaagaagcagtggccaggt

SEQ ID NO: 226059 - DNA, 20 bp, synthetic construct
  source 1..20: mol_type = other DNA
tggaagaagcagtggccagg

SEQ ID NO: 226060 - DNA, 20 bp, synthetic construct
  source 1..20: mol_type = other DNA
atggaagaagcagtggccag

SEQ ID NO: 226061 - DNA, 20 bp, synthetic construct
  source 1..20: mol_type = other DNA
tatggaagaagcagtggcca

SEQ ID NO: 226062 - DNA, 20 bp, synthetic construct
  source 1..20: mol_type = other DNA
gtatggaagaagcagtggcc

SEQ ID NO: 226063 - DNA, 20 bp, synthetic construct
  source 1..20: mol_type = other DNA
ggtatggaagaagcagtggc

SEQ ID NO: 226064 - DNA, 20 bp, synthetic construct
  source 1..20: mol_type = other DNA
gggtatggaagaagcagtgg

SEQ ID NO: 226065 - DNA, 20 bp, synthetic construct
  source 1..20: mol_type = other DNA
agggtatggaagaagcagtg

SEQ ID NO: 226066 - DNA, 20 bp, synthetic construct
  source 1..20: mol_type = other DNA
tagggtatggaagaagcagt

SEQ ID NO: 226067 - DNA, 20 bp, synthetic construct
  source 1..20: mol_type = other DNA
ctagggtatggaagaagcag

SEQ ID NO: 226068 - DNA, 20 bp, synthetic construct
  source 1..20: mol_type = other DNA
tctagggtatggaagaagca

SEQ ID NO: 226069 - DNA, 20 bp, synthetic construct
  source 1..20: mol_type = other DNA
gtctagggtatggaagaagc

SEQ ID NO: 226070 - DNA, 20 bp, synthetic construct
  source 1..20: mol_type = other DNA
ggtctagggtatggaagaag

SEQ ID NO: 226071 - DNA, 20 bp, synthetic construct
  source 1..20: mol_type = other DNA
aggtctagggtatggaagaa

SEQ ID NO: 226072 - DNA, 20 bp, synthetic construct
  source 1..20: mol_type = other DNA
caggtctagggtatggaaga

SEQ ID NO: 226073 - DNA, 20 bp, synthetic construct
  source 1..20: mol_type = other DNA
gcaggtctagggtatggaag

SEQ ID NO: 226074 - DNA, 20 bp, synthetic construct
  source 1..20: mol_type = other DNA
tgcaggtctagggtatggaa

SEQ ID NO: 226075 - DNA, 20 bp, synthetic construct
  source 1..20: mol_type = other DNA
gtgcaggtctagggtatgga

SEQ ID NO: 226076 - DNA, 20 bp, synthetic construct
  source 1..20: mol_type = other DNA
ggtgcaggtctagggtatgg

SEQ ID NO: 226077 - DNA, 20 bp, synthetic construct
  source 1..20: mol_type = other DNA
gggtgcaggtctagggtatg

SEQ ID NO: 226078 - DNA, 20 bp, synthetic construct
  source 1..20: mol_type = other DNA
agggtgcaggtctagggtat

SEQ ID NO: 226079 - DNA, 20 bp, synthetic construct
  source 1..20: mol_type = other DNA
cagggtgcaggtctagggta

SEQ ID NO: 226080 - DNA, 20 bp, synthetic construct
  source 1..20: mol_type = other DNA
tcagggtgcaggtctagggt

SEQ ID NO: 226081 - DNA, 20 bp, synthetic construct
  source 1..20: mol_type = other DNA
gtcagggtgcaggtctaggg

SEQ ID NO: 226082 - DNA, 20 bp, synthetic construct
  source 1..20: mol_type = other DNA
tgtcagggtgcaggtctagg

SEQ ID NO: 226083 - DNA, 20 bp, synthetic construct
  source 1..20: mol_type = other DNA
atgtcagggtgcaggtctag

SEQ ID NO: 226084 - DNA, 20 bp, synthetic construct
  source 1..20: mol_type = other DNA
gatgtcagggtgcaggtcta

SEQ ID NO: 226085 - DNA, 20 bp, synthetic construct
  source 1..20: mol_type = other DNA
agatgtcagggtgcaggtct

SEQ ID NO: 226086 - DNA, 20 bp, synthetic construct
  source 1..20: mol_type = other DNA
gagatgtcagggtgcaggtc

SEQ ID NO: 226087 - DNA, 20 bp, synthetic construct
  source 1..20: mol_type = other DNA
tgagatgtcagggtgcaggt

SEQ ID NO: 226088 - DNA, 20 bp, synthetic construct
  source 1..20: mol_type = other DNA
ttgagatgtcagggtgcagg

SEQ ID NO: 226089 - DNA, 20 bp, synthetic construct
  source 1..20: mol_type = other DNA
cttgagatgtcagggtgcag

SEQ ID NO: 226090 - DNA, 20 bp, synthetic construct
  source 1..20: mol_type = other DNA
acttgagatgtcagggtgca

SEQ ID NO: 226091 - DNA, 20 bp, synthetic construct
  source 1..20: mol_type = other DNA
tacttgagatgtcagggtgc

SEQ ID NO: 226092 - DNA, 20 bp, synthetic construct
  source 1..20: mol_type = other DNA
ttacttgagatgtcagggtg

SEQ ID NO: 226093 - DNA, 20 bp, synthetic construct
  source 1..20: mol_type = other DNA
tttacttgagatgtcagggt

SEQ ID NO: 226094 - DNA, 20 bp, synthetic construct
  source 1..20: mol_type = other DNA
ttttacttgagatgtcaggg

SEQ ID NO: 226095 - DNA, 20 bp, synthetic construct
  source 1..20: mol_type = other DNA
tttttacttgagatgtcagg

SEQ ID NO: 226096 - DNA, 20 bp, synthetic construct
  source 1..20: mol_type = other DNA
ctttttacttgagatgtcag

SEQ ID NO: 226097 - DNA, 20 bp, synthetic construct
  source 1..20: mol_type = other DNA
actttttacttgagatgtca

SEQ ID NO: 226098 - DNA, 20 bp, synthetic construct
  source 1..20: mol_type = other DNA
aactttttacttgagatgtc

SEQ ID NO: 226099 - DNA, 20 bp, synthetic construct
  source 1..20: mol_type = other DNA
caactttttacttgagatgt

SEQ ID NO: 226100 - DNA, 20 bp, synthetic construct
  source 1..20: mol_type = other DNA
ccaactttttacttgagatg

SEQ ID NO: 226101 - DNA, 20 bp, synthetic construct
  source 1..20: mol_type = other DNA
cccaactttttacttgagat

SEQ ID NO: 226102 - DNA, 20 bp, synthetic construct
  source 1..20: mol_type = other DNA
ccccaactttttacttgaga

SEQ ID NO: 226103 - DNA, 20 bp, synthetic construct
  source 1..20: mol_type = other DNA
cccccaactttttacttgag

SEQ ID NO: 226104 - DNA, 20 bp, synthetic construct
  source 1..20: mol_type = other DNA
tcccccaactttttacttga

SEQ ID NO: 226105 - DNA, 20 bp, synthetic construct
  source 1..20: mol_type = other DNA
atcccccaactttttacttg

SEQ ID NO: 226106 - DNA, 20 bp, synthetic construct
  source 1..20: mol_type = other DNA
catcccccaactttttactt

SEQ ID NO: 226107 - DNA, 20 bp, synthetic construct
  source 1..20: mol_type = other DNA
acatcccccaactttttact

SEQ ID NO: 226108 - DNA, 20 bp, synthetic construct
  source 1..20: mol_type = other DNA
aacatcccccaactttttac

SEQ ID NO: 226109 - DNA, 20 bp, synthetic construct
  source 1..20: mol_type = other DNA
aaacatcccccaacttttta

SEQ ID NO: 226110 - DNA, 20 bp, synthetic construct
  source 1..20: mol_type = other DNA
aaaacatcccccaacttttt

SEQ ID NO: 226111 - DNA, 20 bp, synthetic construct
  source 1..20: mol_type = other DNA
taaaacatcccccaactttt

SEQ ID NO: 226112 - DNA, 20 bp, synthetic construct
  source 1..20: mol_type = other DNA
ataaaacatcccccaacttt

SEQ ID NO: 226113 - DNA, 20 bp, synthetic construct
  source 1..20: mol_type = other DNA
cataaaacatcccccaactt

SEQ ID NO: 226114 - DNA, 20 bp, synthetic construct
  source 1..20: mol_type = other DNA
ccataaaacatcccccaact

SEQ ID NO: 226115 - DNA, 20 bp, synthetic construct
  source 1..20: mol_type = other DNA
accataaaacatcccccaac

SEQ ID NO: 226116 - DNA, 20 bp, synthetic construct
  source 1..20: mol_type = other DNA
gaccataaaacatcccccaa

SEQ ID NO: 226117 - DNA, 20 bp, synthetic construct
  source 1..20: mol_type = other DNA
ggaccataaaacatccccca

SEQ ID NO: 226118 - DNA, 20 bp, synthetic construct
  source 1..20: mol_type = other DNA
tggaccataaaacatccccc

SEQ ID NO: 226119 - DNA, 20 bp, synthetic construct
  source 1..20: mol_type = other DNA
ctggaccataaaacatcccc

SEQ ID NO: 226120 - DNA, 20 bp, synthetic construct
  source 1..20: mol_type = other DNA
cctggaccataaaacatccc

SEQ ID NO: 226121 - DNA, 20 bp, synthetic construct
  source 1..20: mol_type = other DNA
tcctggaccataaaacatcc

SEQ ID NO: 226122 - DNA, 20 bp, synthetic construct
  source 1..20: mol_type = other DNA
atcctggaccataaaacatc

SEQ ID NO: 226123 - DNA, 20 bp, synthetic construct
  source 1..20: mol_type = other DNA
catcctggaccataaaacat

SEQ ID NO: 226124 - DNA, 20 bp, synthetic construct
  source 1..20: mol_type = other DNA
tcatcctggaccataaaaca

SEQ ID NO: 226125 - DNA, 20 bp, synthetic construct
  source 1..20: mol_type = other DNA
ttcatcctggaccataaaac

SEQ ID NO: 226126 - DNA, 20 bp, synthetic construct
  source 1..20: mol_type = other DNA
cttcatcctggaccataaaa

SEQ ID NO: 226127 - DNA, 20 bp, synthetic construct
  source 1..20: mol_type = other DNA
ccttcatcctggaccataaa

SEQ ID NO: 226128 - DNA, 20 bp, synthetic construct
  source 1..20: mol_type = other DNA
tccttcatcctggaccataa

SEQ ID NO: 226129 - DNA, 20 bp, synthetic construct
  source 1..20: mol_type = other DNA
ttccttcatcctggaccata

SEQ ID NO: 226130 - DNA, 20 bp, synthetic construct
  source 1..20: mol_type = other DNA
cttccttcatcctggaccat

SEQ ID NO: 226131 - DNA, 20 bp, synthetic construct
  source 1..20: mol_type = other DNA
ccttccttcatcctggacca

SEQ ID NO: 226132 - DNA, 20 bp, synthetic construct
  source 1..20: mol_type = other DNA
cccttccttcatcctggacc

SEQ ID NO: 226133 - DNA, 20 bp, synthetic construct
  source 1..20: mol_type = other DNA
gcccttccttcatcctggac

SEQ ID NO: 226134 - DNA, 20 bp, synthetic construct
  source 1..20: mol_type = other DNA
tgcccttccttcatcctgga

SEQ ID NO: 226135 - DNA, 20 bp, synthetic construct
  source 1..20: mol_type = other DNA
ctgcccttccttcatcctgg

SEQ ID NO: 226136 - DNA, 20 bp, synthetic construct
  source 1..20: mol_type = other DNA
actgcccttccttcatcctg

SEQ ID NO: 226137 - DNA, 20 bp, synthetic construct
  source 1..20: mol_type = other DNA
cactgcccttccttcatcct

SEQ ID NO: 226138 - DNA, 20 bp, synthetic construct
  source 1..20: mol_type = other DNA
tcactgcccttccttcatcc

SEQ ID NO: 226139 - DNA, 20 bp, synthetic construct
  source 1..20: mol_type = other DNA
ctcactgcccttccttcatc

SEQ ID NO: 226140 - DNA, 20 bp, synthetic construct
  source 1..20: mol_type = other DNA
cctcactgcccttccttcat

SEQ ID NO: 226141 - DNA, 20 bp, synthetic construct
  source 1..20: mol_type = other DNA
ccctcactgcccttccttca

SEQ ID NO: 226142 - DNA, 20 bp, synthetic construct
  source 1..20: mol_type = other DNA
cccctcactgcccttccttc

SEQ ID NO: 226143 - DNA, 20 bp, synthetic construct
  source 1..20: mol_type = other DNA
gcccctcactgcccttcctt

SEQ ID NO: 226144 - DNA, 20 bp, synthetic construct
  source 1..20: mol_type = other DNA
tgcccctcactgcccttcct

SEQ ID NO: 226145 - DNA, 20 bp, synthetic construct
  source 1..20: mol_type = other DNA
ctgcccctcactgcccttcc

SEQ ID NO: 226146 - DNA, 20 bp, synthetic construct
  source 1..20: mol_type = other DNA
gctgcccctcactgcccttc

SEQ ID NO: 226147 - DNA, 20 bp, synthetic construct
  source 1..20: mol_type = other DNA
cgctgcccctcactgccctt

SEQ ID NO: 226148 - DNA, 20 bp, synthetic construct
  source 1..20: mol_type = other DNA
ccgctgcccctcactgccct

SEQ ID NO: 226149 - DNA, 20 bp, synthetic construct
  source 1..20: mol_type = other DNA
tccgctgcccctcactgccc

SEQ ID NO: 226150 - DNA, 20 bp, synthetic construct
  source 1..20: mol_type = other DNA
ctccgctgcccctcactgcc

SEQ ID NO: 226151 - DNA, 20 bp, synthetic construct
  source 1..20: mol_type = other DNA
gctccgctgcccctcactgc

SEQ ID NO: 226152 - DNA, 20 bp, synthetic construct
  source 1..20: mol_type = other DNA
tgctccgctgcccctcactg

SEQ ID NO: 226153 - DNA, 20 bp, synthetic construct
  source 1..20: mol_type = other DNA
atgctccgctgcccctcact

SEQ ID NO: 226154 - DNA, 20 bp, synthetic construct
  source 1..20: mol_type = other DNA
gatgctccgctgcccctcac

SEQ ID NO: 226155 - DNA, 20 bp, synthetic construct
  source 1..20: mol_type = other DNA
tgatgctccgctgcccctca

SEQ ID NO: 226156 - DNA, 20 bp, synthetic construct
  source 1..20: mol_type = other DNA
gtgatgctccgctgcccctc

SEQ ID NO: 226157 - DNA, 20 bp, synthetic construct
  source 1..20: mol_type = other DNA
agtgatgctccgctgcccct

SEQ ID NO: 226158 - DNA, 20 bp, synthetic construct
  source 1..20: mol_type = other DNA
aagtgatgctccgctgcccc

SEQ ID NO: 226159 - DNA, 20 bp, synthetic construct
  source 1..20: mol_type = other DNA
aaagtgatgctccgctgccc

SEQ ID NO: 226160 - DNA, 20 bp, synthetic construct
  source 1..20: mol_type = other DNA
caaagtgatgctccgctgcc

SEQ ID NO: 226161 - DNA, 20 bp, synthetic construct
  source 1..20: mol_type = other DNA
gcaaagtgatgctccgctgc

SEQ ID NO: 226162 - DNA, 20 bp, synthetic construct
  source 1..20: mol_type = other DNA
tgcaaagtgatgctccgctg

SEQ ID NO: 226163 - DNA, 20 bp, synthetic construct
  source 1..20: mol_type = other DNA
atgcaaagtgatgctccgct

SEQ ID NO: 226164 - DNA, 20 bp, synthetic construct
  source 1..20: mol_type = other DNA
aatgcaaagtgatgctccgc

SEQ ID NO: 226165 - DNA, 20 bp, synthetic construct
  source 1..20: mol_type = other DNA
aaatgcaaagtgatgctccg

SEQ ID NO: 226166 - DNA, 20 bp, synthetic construct
  source 1..20: mol_type = other DNA
gaaatgcaaagtgatgctcc

SEQ ID NO: 226167 - DNA, 20 bp, synthetic construct
  source 1..20: mol_type = other DNA
agaaatgcaaagtgatgctc

SEQ ID NO: 226168 - DNA, 20 bp, synthetic construct
  source 1..20: mol_type = other DNA
cagaaatgcaaagtgatgct

SEQ ID NO: 226169 - DNA, 20 bp, synthetic construct
  source 1..20: mol_type = other DNA
acagaaatgcaaagtgatgc

SEQ ID NO: 226170 - DNA, 20 bp, synthetic construct
  source 1..20: mol_type = other DNA
gacagaaatgcaaagtgatg

SEQ ID NO: 226171 - DNA, 20 bp, synthetic construct
  source 1..20: mol_type = other DNA
agacagaaatgcaaagtgat

SEQ ID NO: 226172 - DNA, 20 bp, synthetic construct
  source 1..20: mol_type = other DNA
cagacagaaatgcaaagtga

SEQ ID NO: 226173 - DNA, 20 bp, synthetic construct
  source 1..20: mol_type = other DNA
gcagacagaaatgcaaagtg

SEQ ID NO: 226174 - DNA, 20 bp, synthetic construct
  source 1..20: mol_type = other DNA
ggcagacagaaatgcaaagt

SEQ ID NO: 226175 - DNA, 20 bp, synthetic construct
  source 1..20: mol_type = other DNA
aggcagacagaaatgcaaag

SEQ ID NO: 226176 - DNA, 20 bp, synthetic construct
  source 1..20: mol_type = other DNA
gaggcagacagaaatgcaaa

SEQ ID NO: 226177 - DNA, 20 bp, synthetic construct
  source 1..20: mol_type = other DNA
agaggcagacagaaatgcaa

SEQ ID NO: 226178 - DNA, 20 bp, synthetic construct
  source 1..20: mol_type = other DNA
aagaggcagacagaaatgca

SEQ ID NO: 226179 - DNA, 20 bp, synthetic construct
  source 1..20: mol_type = other DNA
taagaggcagacagaaatgc

SEQ ID NO: 226180 - DNA, 20 bp, synthetic construct
  source 1..20: mol_type = other DNA
gtaagaggcagacagaaatg

SEQ ID NO: 226181 - DNA, 20 bp, synthetic construct
  source 1..20: mol_type = other DNA
agtaagaggcagacagaaat

SEQ ID NO: 226182 - DNA, 20 bp, synthetic construct
  source 1..20: mol_type = other DNA
cagtaagaggcagacagaaa

SEQ ID NO: 226183 - DNA, 20 bp, synthetic construct
  source 1..20: mol_type = other DNA
ccagtaagaggcagacagaa

SEQ ID NO: 226184 - DNA, 20 bp, synthetic construct
  source 1..20: mol_type = other DNA
gccagtaagaggcagacaga

SEQ ID NO: 226185 - DNA, 20 bp, synthetic construct
  source 1..20: mol_type = other DNA
agccagtaagaggcagacag

SEQ ID NO: 226186 - DNA, 20 bp, synthetic construct
  source 1..20: mol_type = other DNA
cagccagtaagaggcagaca

SEQ ID NO: 226187 - DNA, 20 bp, synthetic construct
  source 1..20: mol_type = other DNA
acagccagtaagaggcagac

SEQ ID NO: 226188 - DNA, 20 bp, synthetic construct
  source 1..20: mol_type = other DNA
cacagccagtaagaggcaga

SEQ ID NO: 226189 - DNA, 20 bp, synthetic construct
  source 1..20: mol_type = other DNA
acacagccagtaagaggcag

SEQ ID NO: 226190 - DNA, 20 bp, synthetic construct
  source 1..20: mol_type = other DNA
cacacagccagtaagaggca

SEQ ID NO: 226191 - DNA, 20 bp, synthetic construct
  source 1..20: mol_type = other DNA
tcacacagccagtaagaggc

SEQ ID NO: 226192 - DNA, 20 bp, synthetic construct
  source 1..20: mol_type = other DNA
gtcacacagccagtaagagg

SEQ ID NO: 226193 - DNA, 20 bp, synthetic construct
  source 1..20: mol_type = other DNA
ggtcacacagccagtaagag

SEQ ID NO: 226194 - DNA, 20 bp, synthetic construct
  source 1..20: mol_type = other DNA
aggtcacacagccagtaaga

SEQ ID NO: 226195 - DNA, 20 bp, synthetic construct
  source 1..20: mol_type = other DNA
caggtcacacagccagtaag

SEQ ID NO: 226196 - DNA, 20 bp, synthetic construct
  source 1..20: mol_type = other DNA
ccaggtcacacagccagtaa

SEQ ID NO: 226197 - DNA, 20 bp, synthetic construct
  source 1..20: mol_type = other DNA
cccaggtcacacagccagta

SEQ ID NO: 226198 - DNA, 20 bp, synthetic construct
  source 1..20: mol_type = other DNA
ccccaggtcacacagccagt

SEQ ID NO: 226199 - DNA, 20 bp, synthetic construct
  source 1..20: mol_type = other DNA
gccccaggtcacacagccag

SEQ ID NO: 226200 - DNA, 20 bp, synthetic construct
  source 1..20: mol_type = other DNA
tgccccaggtcacacagcca

SEQ ID NO: 226201 - DNA, 20 bp, synthetic construct
  source 1..20: mol_type = other DNA
ctgccccaggtcacacagcc

SEQ ID NO: 226202 - DNA, 20 bp, synthetic construct
  source 1..20: mol_type = other DNA
cctgccccaggtcacacagc

SEQ ID NO: 226203 - DNA, 20 bp, synthetic construct
  source 1..20: mol_type = other DNA
acctgccccaggtcacacag

SEQ ID NO: 226204 - DNA, 20 bp, synthetic construct
  source 1..20: mol_type = other DNA
tacctgccccaggtcacaca

SEQ ID NO: 226205 - DNA, 20 bp, synthetic construct
  source 1..20: mol_type = other DNA
ttacctgccccaggtcacac

SEQ ID NO: 226206 - DNA, 20 bp, synthetic construct
  source 1..20: mol_type = other DNA
gttacctgccccaggtcaca

SEQ ID NO: 226207 - DNA, 20 bp, synthetic construct
  source 1..20: mol_type = other DNA
agttacctgccccaggtcac

SEQ ID NO: 226208 - DNA, 20 bp, synthetic construct
  source 1..20: mol_type = other DNA
aagttacctgccccaggtca

SEQ ID NO: 226209 - DNA, 20 bp, synthetic construct
  source 1..20: mol_type = other DNA
gaagttacctgccccaggtc

SEQ ID NO: 226210 - DNA, 20 bp, synthetic construct
  source 1..20: mol_type = other DNA
ggaagttacctgccccaggt

SEQ ID NO: 226211 - DNA, 20 bp, synthetic construct
  source 1..20: mol_type = other DNA
gggaagttacctgccccagg

SEQ ID NO: 226212 - DNA, 20 bp, synthetic construct
  source 1..20: mol_type = other DNA
tgggaagttacctgccccag

SEQ ID NO: 226213 - DNA, 20 bp, synthetic construct
  source 1..20: mol_type = other DNA
ctgggaagttacctgcccca

SEQ ID NO: 226214 - DNA, 20 bp, synthetic construct
  source 1..20: mol_type = other DNA
tctgggaagttacctgcccc

SEQ ID NO: 226215 - DNA, 20 bp, synthetic construct
  source 1..20: mol_type = other DNA
gtctgggaagttacctgccc

SEQ ID NO: 226216 - DNA, 20 bp, synthetic construct
  source 1..20: mol_type = other DNA
agtctgggaagttacctgcc

SEQ ID NO: 226217 - DNA, 20 bp, synthetic construct
  source 1..20: mol_type = other DNA
gagtctgggaagttacctgc

SEQ ID NO: 226218 - DNA, 20 bp, synthetic construct
  source 1..20: mol_type = other DNA
ggagtctgggaagttacctg

SEQ ID NO: 226219 - DNA, 20 bp, synthetic construct
  source 1..20: mol_type = other DNA
aggagtctgggaagttacct

SEQ ID NO: 226220 - DNA, 20 bp, synthetic construct
  source 1..20: mol_type = other DNA
caggagtctgggaagttacc

SEQ ID NO: 226221 - DNA, 20 bp, synthetic construct
  source 1..20: mol_type = other DNA
ccaggagtctgggaagttac

SEQ ID NO: 226222 - DNA, 20 bp, synthetic construct
  source 1..20: mol_type = other DNA
cccaggagtctgggaagtta

SEQ ID NO: 226223 - DNA, 20 bp, synthetic construct
  source 1..20: mol_type = other DNA
tcccaggagtctgggaagtt

SEQ ID NO: 226224 - DNA, 20 bp, synthetic construct
  source 1..20: mol_type = other DNA
ttcccaggagtctgggaagt

SEQ ID NO: 226225 - DNA, 20 bp, synthetic construct
  source 1..20: mol_type = other DNA
attcccaggagtctgggaag

SEQ ID NO: 226226 - DNA, 20 bp, synthetic construct
  source 1..20: mol_type = other DNA
gattcccaggagtctgggaa

SEQ ID NO: 226227 - DNA, 20 bp, synthetic construct
  source 1..20: mol_type = other DNA
tgattcccaggagtctggga

SEQ ID NO: 226228 - DNA, 20 bp, synthetic construct
  source 1..20: mol_type = other DNA
atgattcccaggagtctggg

SEQ ID NO: 226229 - DNA, 20 bp, synthetic construct
  source 1..20: mol_type = other DNA
tatgattcccaggagtctgg

SEQ ID NO: 226230 - DNA, 20 bp, synthetic construct
  source 1..20: mol_type = other DNA
ttatgattcccaggagtctg

SEQ ID NO: 226231 - DNA, 20 bp, synthetic construct
  source 1..20: mol_type = other DNA
gttatgattcccaggagtct

SEQ ID NO: 226232 - DNA, 20 bp, synthetic construct
  source 1..20: mol_type = other DNA
tgttatgattcccaggagtc

SEQ ID NO: 226233 - DNA, 20 bp, synthetic construct
  source 1..20: mol_type = other DNA
gtgttatgattcccaggagt

SEQ ID NO: 226234 - DNA, 20 bp, synthetic construct
  source 1..20: mol_type = other DNA
ggtgttatgattcccaggag

SEQ ID NO: 226235 - DNA, 20 bp, synthetic construct
  source 1..20: mol_type = other DNA
aggtgttatgattcccagga

SEQ ID NO: 226236 - DNA, 20 bp, synthetic construct
  source 1..20: mol_type = other DNA
taggtgttatgattcccagg

SEQ ID NO: 226237 - DNA, 20 bp, synthetic construct
  source 1..20: mol_type = other DNA
ataggtgttatgattcccag

SEQ ID NO: 226238 - DNA, 20 bp, synthetic construct
  source 1..20: mol_type = other DNA
cataggtgttatgattccca

SEQ ID NO: 226239 - DNA, 20 bp, synthetic construct
  source 1..20: mol_type = other DNA
tcataggtgttatgattccc

SEQ ID NO: 226240 - DNA, 20 bp, synthetic construct
  source 1..20: mol_type = other DNA
atcataggtgttatgattcc

SEQ ID NO: 226241 - DNA, 20 bp, synthetic construct
  source 1..20: mol_type = other DNA
catcataggtgttatgattc

SEQ ID NO: 226242 - DNA, 20 bp, synthetic construct
  source 1..20: mol_type = other DNA
tcatcataggtgttatgatt

SEQ ID NO: 226243 - DNA, 20 bp, synthetic construct
  source 1..20: mol_type = other DNA
atcatcataggtgttatgat

SEQ ID NO: 226244 - DNA, 20 bp, synthetic construct
  source 1..20: mol_type = other DNA
catcatcataggtgttatga

SEQ ID NO: 226245 - DNA, 20 bp, synthetic construct
  source 1..20: mol_type = other DNA
tcatcatcataggtgttatg

SEQ ID NO: 226246 - DNA, 20 bp, synthetic construct
  source 1..20: mol_type = other DNA
atcatcatcataggtgttat

SEQ ID NO: 226247 - DNA, 20 bp, synthetic construct
  source 1..20: mol_type = other DNA
catcatcatcataggtgtta

SEQ ID NO: 226248 - DNA, 20 bp, synthetic construct
  source 1..20: mol_type = other DNA
tcatcatcatcataggtgtt

SEQ ID NO: 226249 - DNA, 20 bp, synthetic construct
  source 1..20: mol_type = other DNA
atcatcatcatcataggtgt

SEQ ID NO: 226250 - DNA, 20 bp, synthetic construct
  source 1..20: mol_type = other DNA
catcatcatcatcataggtg

SEQ ID NO: 226251 - DNA, 20 bp, synthetic construct
  source 1..20: mol_type = other DNA
tcatcatcatcatcataggt

SEQ ID NO: 226252 - DNA, 20 bp, synthetic construct
  source 1..20: mol_type = other DNA
atcatcatcatcatcatagg

SEQ ID NO: 226253 - DNA, 20 bp, synthetic construct
  source 1..20: mol_type = other DNA
catcatcatcatcatcatag

SEQ ID NO: 226254 - DNA, 20 bp, synthetic construct
  source 1..20: mol_type = other DNA
tcatcatcatcatcatcata

SEQ ID NO: 226255 - DNA, 20 bp, synthetic construct
  source 1..20: mol_type = other DNA
atcatcatcatcatcatcat

SEQ ID NO: 226256 - DNA, 20 bp, synthetic construct
  source 1..20: mol_type = other DNA
catcatcatcatcatcatca

SEQ ID NO: 226257 - DNA, 20 bp, synthetic construct
  source 1..20: mol_type = other DNA
tcatcatcatcatcatcatc

SEQ ID NO: 226258 - DNA, 20 bp, synthetic construct
  source 1..20: mol_type = other DNA
atcatcatcatcatcatcat

SEQ ID NO: 226259 - DNA, 20 bp, synthetic construct
  source 1..20: mol_type = other DNA
catcatcatcatcatcatca

SEQ ID NO: 226260 - DNA, 20 bp, synthetic construct
  source 1..20: mol_type = other DNA
tcatcatcatcatcatcatc

SEQ ID NO: 226261 - DNA, 20 bp, synthetic construct
  source 1..20: mol_type = other DNA
atcatcatcatcatcatcat

SEQ ID NO: 226262 - DNA, 20 bp, synthetic construct
  source 1..20: mol_type = other DNA
catcatcatcatcatcatca

SEQ ID NO: 226263 - DNA, 20 bp, synthetic construct
  source 1..20: mol_type = other DNA
tcatcatcatcatcatcatc

SEQ ID NO: 226264 - DNA, 20 bp, synthetic construct
  source 1..20: mol_type = other DNA
atcatcatcatcatcatcat

SEQ ID NO: 226265 - DNA, 20 bp, synthetic construct
  source 1..20: mol_type = other DNA
catcatcatcatcatcatca

SEQ ID NO: 226266 - DNA, 20 bp, synthetic construct
  source 1..20: mol_type = other DNA
tcatcatcatcatcatcatc

SEQ ID NO: 226267 - DNA, 20 bp, synthetic construct
  source 1..20: mol_type = other DNA
gtcatcatcatcatcatcat

SEQ ID NO: 226268 - DNA, 20 bp, synthetic construct
  source 1..20: mol_type = other DNA
tgtcatcatcatcatcatca

SEQ ID NO: 226269 - DNA, 20 bp, synthetic construct
  source 1..20: mol_type = other DNA
gtgtcatcatcatcatcatc

SEQ ID NO: 226270 - DNA, 20 bp, synthetic construct
  source 1..20: mol_type = other DNA
ggtgtcatcatcatcatcat

SEQ ID NO: 226271 - DNA, 20 bp, synthetic construct
  source 1..20: mol_type = other DNA
aggtgtcatcatcatcatca

SEQ ID NO: 226272 - DNA, 20 bp, synthetic construct
  source 1..20: mol_type = other DNA
taggtgtcatcatcatcatc

SEQ ID NO: 226273 - DNA, 20 bp, synthetic construct
  source 1..20: mol_type = other DNA
gtaggtgtcatcatcatcat

SEQ ID NO: 226274 - DNA, 20 bp, synthetic construct
  source 1..20: mol_type = other DNA
ggtaggtgtcatcatcatca

SEQ ID NO: 226275 - DNA, 20 bp, synthetic construct
  source 1..20: mol_type = other DNA
aggtaggtgtcatcatcatc

SEQ ID NO: 226276 - DNA, 20 bp, synthetic construct
  source 1..20: mol_type = other DNA
gaggtaggtgtcatcatcat

SEQ ID NO: 226277 - DNA, 20 bp, synthetic construct
  source 1..20: mol_type = other DNA
tgaggtaggtgtcatcatca

SEQ ID NO: 226278 - DNA, 20 bp, synthetic construct
  source 1..20: mol_type = other DNA
ttgaggtaggtgtcatcatc

SEQ ID NO: 226279 - DNA, 20 bp, synthetic construct
  source 1..20: mol_type = other DNA
cttgaggtaggtgtcatcat

SEQ ID NO: 226280 - DNA, 20 bp, synthetic construct
  source 1..20: mol_type = other DNA
ccttgaggtaggtgtcatca

SEQ ID NO: 226281 - DNA, 20 bp, synthetic construct
  source 1..20: mol_type = other DNA
tccttgaggtaggtgtcatc

SEQ ID NO: 226282 - DNA, 20 bp, synthetic construct
  source 1..20: mol_type = other DNA
atccttgaggtaggtgtcat

SEQ ID NO: 226283 - DNA, 20 bp, synthetic construct
  source 1..20: mol_type = other DNA
aatccttgaggtaggtgtca

SEQ ID NO: 226284 - DNA, 20 bp, synthetic construct
  source 1..20: mol_type = other DNA
caatccttgaggtaggtgtc

SEQ ID NO: 226285 - DNA, 20 bp, synthetic construct
  source 1..20: mol_type = other DNA
gcaatccttgaggtaggtgt

SEQ ID NO: 226286 - DNA, 20 bp, synthetic construct
  source 1..20: mol_type = other DNA
ggcaatccttgaggtaggtg

SEQ ID NO: 226287 - DNA, 20 bp, synthetic construct
  source 1..20: mol_type = other DNA
gggcaatccttgaggtaggt

SEQ ID NO: 226288 - DNA, 20 bp, synthetic construct
  source 1..20: mol_type = other DNA
agggcaatccttgaggtagg

SEQ ID NO: 226289 - DNA, 20 bp, synthetic construct
  source 1..20: mol_type = other DNA
cagggcaatccttgaggtag

SEQ ID NO: 226290 - DNA, 20 bp, synthetic construct
  source 1..20: mol_type = other DNA
tcagggcaatccttgaggta

SEQ ID NO: 226291 - DNA, 20 bp, synthetic construct
  source 1..20: mol_type = other DNA
ttcagggcaatccttgaggt

SEQ ID NO: 226292 - DNA, 20 bp, synthetic construct
  source 1..20: mol_type = other DNA
cttcagggcaatccttgagg

SEQ ID NO: 226293 - DNA, 20 bp, synthetic construct
  source 1..20: mol_type = other DNA
ccttcagggcaatccttgag

SEQ ID NO: 226294 - DNA, 20 bp, synthetic construct
  source 1..20: mol_type = other DNA
cccttcagggcaatccttga

SEQ ID NO: 226295 - DNA, 20 bp, synthetic construct
  source 1..20: mol_type = other DNA
acccttcagggcaatccttg

SEQ ID NO: 226296 - DNA, 20 bp, synthetic construct
  source 1..20: mol_type = other DNA
gacccttcagggcaatcctt

SEQ ID NO: 226297 - DNA, 20 bp, synthetic construct
  source 1..20: mol_type = other DNA
tgacccttcagggcaatcct

SEQ ID NO: 226298 - DNA, 20 bp, synthetic construct
  source 1..20: mol_type = other DNA
gtgacccttcagggcaatcc

SEQ ID NO: 226299 - DNA, 20 bp, synthetic construct
  source 1..20: mol_type = other DNA
tgtgacccttcagggcaatc

SEQ ID NO: 226300 - DNA, 20 bp, synthetic construct
  source 1..20: mol_type = other DNA
ctgtgacccttcagggcaat

SEQ ID NO: 226301 - DNA, 20 bp, synthetic construct
  source 1..20: mol_type = other DNA
tctgtgacccttcagggcaa

SEQ ID NO: 226302 - DNA, 20 bp, synthetic construct
  source 1..20: mol_type = other DNA
ctctgtgacccttcagggca

SEQ ID NO: 226303 - DNA, 20 bp, synthetic construct
  source 1..20: mol_type = other DNA
tctctgtgacccttcagggc

SEQ ID NO: 226304 - DNA, 20 bp, synthetic construct
  source 1..20: mol_type = other DNA
atctctgtgacccttcaggg

SEQ ID NO: 226305 - DNA, 20 bp, synthetic construct
  source 1..20: mol_type = other DNA
catctctgtgacccttcagg

SEQ ID NO: 226306 - DNA, 20 bp, synthetic construct
  source 1..20: mol_type = other DNA
gcatctctgtgacccttcag

SEQ ID NO: 226307 - DNA, 20 bp, synthetic construct
  source 1..20: mol_type = other DNA
ggcatctctgtgacccttca

SEQ ID NO: 226308 - DNA, 20 bp, synthetic construct
  source 1..20: mol_type = other DNA
aggcatctctgtgacccttc

SEQ ID NO: 226309 - DNA, 20 bp, synthetic construct
  source 1..20: mol_type = other DNA
caggcatctctgtgaccctt

SEQ ID NO: 226310 - DNA, 20 bp, synthetic construct
  source 1..20: mol_type = other DNA
gcaggcatctctgtgaccct

SEQ ID NO: 226311 - DNA, 20 bp, synthetic construct
  source 1..20: mol_type = other DNA
tgcaggcatctctgtgaccc

SEQ ID NO: 226312 - DNA, 20 bp, synthetic construct
  source 1..20: mol_type = other DNA
ttgcaggcatctctgtgacc

SEQ ID NO: 226313 - DNA, 20 bp, synthetic construct
  source 1..20: mol_type = other DNA
cttgcaggcatctctgtgac

SEQ ID NO: 226314 - DNA, 20 bp, synthetic construct
  source 1..20: mol_type = other DNA
ccttgcaggcatctctgtga

SEQ ID NO: 226315 - DNA, 20 bp, synthetic construct
  source 1..20: mol_type = other DNA
gccttgcaggcatctctgtg

SEQ ID NO: 226316 - DNA, 20 bp, synthetic construct
  source 1..20: mol_type = other DNA
tgccttgcaggcatctctgt

SEQ ID NO: 226317 - DNA, 20 bp, synthetic construct
  source 1..20: mol_type = other DNA
gtgccttgcaggcatctctg

SEQ ID NO: 226318 - DNA, 20 bp, synthetic construct
  source 1..20: mol_type = other DNA
ggtgccttgcaggcatctct

SEQ ID NO: 226319 - DNA, 20 bp, synthetic construct
  source 1..20: mol_type = other DNA
aggtgccttgcaggcatctc

SEQ ID NO: 226320 - DNA, 20 bp, synthetic construct
  source 1..20: mol_type = other DNA
caggtgccttgcaggcatct

SEQ ID NO: 226321 - DNA, 20 bp, synthetic construct
  source 1..20: mol_type = other DNA
gcaggtgccttgcaggcatc

SEQ ID NO: 226322 - DNA, 20 bp, synthetic construct
  source 1..20: mol_type = other DNA
tgcaggtgccttgcaggcat

SEQ ID NO: 226323 - DNA, 20 bp, synthetic construct
  source 1..20: mol_type = other DNA
atgcaggtgccttgcaggca

SEQ ID NO: 226324 - DNA, 20 bp, synthetic construct
  source 1..20: mol_type = other DNA
catgcaggtgccttgcaggc

SEQ ID NO: 226325 - DNA, 20 bp, synthetic construct
  source 1..20: mol_type = other DNA
ccatgcaggtgccttgcagg

SEQ ID NO: 226326 - DNA, 20 bp, synthetic construct
  source 1..20: mol_type = other DNA
tccatgcaggtgccttgcag

SEQ ID NO: 226327 - DNA, 20 bp, synthetic construct
  source 1..20: mol_type = other DNA
ctccatgcaggtgccttgca

SEQ ID NO: 226328 - DNA, 20 bp, synthetic construct
  source 1..20: mol_type = other DNA
gctccatgcaggtgccttgc

SEQ ID NO: 226329 - DNA, 20 bp, synthetic construct
  source 1..20: mol_type = other DNA
tgctccatgcaggtgccttg

SEQ ID NO: 226330 - DNA, 20 bp, synthetic construct
  source 1..20: mol_type = other DNA
ttgctccatgcaggtgcctt

SEQ ID NO: 226331 - DNA, 20 bp, synthetic construct
  source 1..20: mol_type = other DNA
cttgctccatgcaggtgcct

SEQ ID NO: 226332 - DNA, 20 bp, synthetic construct
  source 1..20: mol_type = other DNA
gcttgctccatgcaggtgcc

SEQ ID NO: 226333 - DNA, 20 bp, synthetic construct
  source 1..20: mol_type = other DNA
cgcttgctccatgcaggtgc

SEQ ID NO: 226334 - DNA, 20 bp, synthetic construct
  source 1..20: mol_type = other DNA
gcgcttgctccatgcaggtg

SEQ ID NO: 226335 - DNA, 20 bp, synthetic construct
  source 1..20: mol_type = other DNA
ggcgcttgctccatgcaggt

SEQ ID NO: 226336 - DNA, 20 bp, synthetic construct
  source 1..20: mol_type = other DNA
gggcgcttgctccatgcagg

SEQ ID NO: 226337 - DNA, 20 bp, synthetic construct
  source 1..20: mol_type = other DNA
ggggcgcttgctccatgcag

SEQ ID NO: 226338 - DNA, 20 bp, synthetic construct
  source 1..20: mol_type = other DNA
aggggcgcttgctccatgca

SEQ ID NO: 226339 - DNA, 20 bp, synthetic construct
  source 1..20: mol_type = other DNA
aaggggcgcttgctccatgc

SEQ ID NO: 226340 - DNA, 20 bp, synthetic construct
  source 1..20: mol_type = other DNA
gaaggggcgcttgctccatg

SEQ ID NO: 226341 - DNA, 20 bp, synthetic construct
  source 1..20: mol_type = other DNA
agaaggggcgcttgctccat

SEQ ID NO: 226342 - DNA, 20 bp, synthetic construct
  source 1..20: mol_type = other DNA
gagaaggggcgcttgctcca

SEQ ID NO: 226343 - DNA, 20 bp, synthetic construct
  source 1..20: mol_type = other DNA
agagaaggggcgcttgctcc

SEQ ID NO: 226344 - DNA, 20 bp, synthetic construct
  source 1..20: mol_type = other DNA
cagagaaggggcgcttgctc

SEQ ID NO: 226345 - DNA, 20 bp, synthetic construct
  source 1..20: mol_type = other DNA
ccagagaaggggcgcttgct

SEQ ID NO: 226346 - DNA, 20 bp, synthetic construct
  source 1..20: mol_type = other DNA
gccagagaaggggcgcttgc

SEQ ID NO: 226347 - DNA, 20 bp, synthetic construct
  source 1..20: mol_type = other DNA
tgccagagaaggggcgcttg

SEQ ID NO: 226348 - DNA, 20 bp, synthetic construct
  source 1..20: mol_type = other DNA
ctgccagagaaggggcgctt

SEQ ID NO: 226349 - DNA, 20 bp, synthetic construct
  source 1..20: mol_type = other DNA
cctgccagagaaggggcgct

SEQ ID NO: 226350 - DNA, 20 bp, synthetic construct
  source 1..20: mol_type = other DNA
acctgccagagaaggggcgc

SEQ ID NO: 226351 - DNA, 20 bp, synthetic construct
  source 1..20: mol_type = other DNA
cacctgccagagaaggggcg

SEQ ID NO: 226352 - DNA, 20 bp, synthetic construct
  source 1..20: mol_type = other DNA
gcacctgccagagaaggggc

SEQ ID NO: 226353 - DNA, 20 bp, synthetic construct
  source 1..20: mol_type = other DNA
agcacctgccagagaagggg

SEQ ID NO: 226354 - DNA, 20 bp, synthetic construct
  source 1..20: mol_type = other DNA
cagcacctgccagagaaggg

SEQ ID NO: 226355 - DNA, 20 bp, synthetic construct
  source 1..20: mol_type = other DNA
ccagcacctgccagagaagg

SEQ ID NO: 226356 - DNA, 20 bp, synthetic construct
  source 1..20: mol_type = other DNA
cccagcacctgccagagaag

SEQ ID NO: 226357 - DNA, 20 bp, synthetic construct
  source 1..20: mol_type = other DNA
acccagcacctgccagagaa

SEQ ID NO: 226358 - DNA, 20 bp, synthetic construct
  source 1..20: mol_type = other DNA
cacccagcacctgccagaga

SEQ ID NO: 226359 - DNA, 20 bp, synthetic construct
  source 1..20: mol_type = other DNA
tcacccagcacctgccagag

SEQ ID NO: 226360 - DNA, 20 bp, synthetic construct
  source 1..20: mol_type = other DNA
ctcacccagcacctgccaga

SEQ ID NO: 226361 - DNA, 20 bp, synthetic construct
  source 1..20: mol_type = other DNA
gctcacccagcacctgccag

SEQ ID NO: 226362 - DNA, 20 bp, synthetic construct
  source 1..20: mol_type = other DNA
tgctcacccagcacctgcca

SEQ ID NO: 226363 - DNA, 20 bp, synthetic construct
  source 1..20: mol_type = other DNA
gtgctcacccagcacctgcc

SEQ ID NO: 226364 - DNA, 20 bp, synthetic construct
  source 1..20: mol_type = other DNA
agtgctcacccagcacctgc

SEQ ID NO: 226365 - DNA, 20 bp, synthetic construct
  source 1..20: mol_type = other DNA
tagtgctcacccagcacctg

SEQ ID NO: 226366 - DNA, 20 bp, synthetic construct
  source 1..20: mol_type = other DNA
gtagtgctcacccagcacct

SEQ ID NO: 226367 - DNA, 20 bp, synthetic construct
  source 1..20: mol_type = other DNA
ggtagtgctcacccagcacc

SEQ ID NO: 226368 - DNA, 20 bp, synthetic construct
  source 1..20: mol_type = other DNA
aggtagtgctcacccagcac

SEQ ID NO: 226369 - DNA, 20 bp, synthetic construct
  source 1..20: mol_type = other DNA
caggtagtgctcacccagca

SEQ ID NO: 226370 - DNA, 20 bp, synthetic construct
  source 1..20: mol_type = other DNA
gcaggtagtgctcacccagc

SEQ ID NO: 226371 - DNA, 20 bp, synthetic construct
  source 1..20: mol_type = other DNA
agcaggtagtgctcacccag

SEQ ID NO: 226372 - DNA, 20 bp, synthetic construct
  source 1..20: mol_type = other DNA
cagcaggtagtgctcaccca

SEQ ID NO: 226373 - DNA, 20 bp, synthetic construct
  source 1..20: mol_type = other DNA
gcagcaggtagtgctcaccc

SEQ ID NO: 226374 - DNA, 20 bp, synthetic construct
  source 1..20: mol_type = other DNA
ggcagcaggtagtgctcacc

SEQ ID NO: 226375 - DNA, 20 bp, synthetic construct
  source 1..20: mol_type = other DNA
tggcagcaggtagtgctcac

SEQ ID NO: 226376 - DNA, 20 bp, synthetic construct
  source 1..20: mol_type = other DNA
ctggcagcaggtagtgctca

SEQ ID NO: 226377 - DNA, 20 bp, synthetic construct
  source 1..20: mol_type = other DNA
cctggcagcaggtagtgctc

SEQ ID NO: 226378 - DNA, 20 bp, synthetic construct
  source 1..20: mol_type = other DNA
gcctggcagcaggtagtgct

SEQ ID NO: 226379 - DNA, 20 bp, synthetic construct
  source 1..20: mol_type = other DNA
ggcctggcagcaggtagtgc

SEQ ID NO: 226380 - DNA, 20 bp, synthetic construct
  source 1..20: mol_type = other DNA
gggcctggcagcaggtagtg

SEQ ID NO: 226381 - DNA, 20 bp, synthetic construct
  source 1..20: mol_type = other DNA
agggcctggcagcaggtagt

SEQ ID NO: 226382 - DNA, 20 bp, synthetic construct
  source 1..20: mol_type = other DNA
cagggcctggcagcaggtag

SEQ ID NO: 226383 - DNA, 20 bp, synthetic construct
  source 1..20: mol_type = other DNA
ccagggcctggcagcaggta

SEQ ID NO: 226384 - DNA, 20 bp, synthetic construct
  source 1..20: mol_type = other DNA
cccagggcctggcagcaggt

SEQ ID NO: 226385 - DNA, 20 bp, synthetic construct
  source 1..20: mol_type = other DNA
ccccagggcctggcagcagg

SEQ ID NO: 226386 - DNA, 20 bp, synthetic construct
  source 1..20: mol_type = other DNA
gccccagggcctggcagcag

SEQ ID NO: 226387 - DNA, 20 bp, synthetic construct
  source 1..20: mol_type = other DNA
agccccagggcctggcagca

SEQ ID NO: 226388 - DNA, 20 bp, synthetic construct
  source 1..20: mol_type = other DNA
tagccccagggcctggcagc

SEQ ID NO: 226389 - DNA, 20 bp, synthetic construct
  source 1..20: mol_type = other DNA
atagccccagggcctggcag

SEQ ID NO: 226390 - DNA, 20 bp, synthetic construct
  source 1..20: mol_type = other DNA
catagccccagggcctggca

SEQ ID NO: 226391 - DNA, 20 bp, synthetic construct
  source 1..20: mol_type = other DNA
ccatagccccagggcctggc

SEQ ID NO: 226392 - DNA, 20 bp, synthetic construct
  source 1..20: mol_type = other DNA
gccatagccccagggcctgg

SEQ ID NO: 226393 - DNA, 20 bp, synthetic construct
  source 1..20: mol_type = other DNA
tgccatagccccagggcctg

SEQ ID NO: 226394 - DNA, 20 bp, synthetic construct
  source 1..20: mol_type = other DNA
gtgccatagccccagggcct

SEQ ID NO: 226395 - DNA, 20 bp, synthetic construct
  source 1..20: mol_type = other DNA
agtgccatagccccagggcc

SEQ ID NO: 226396 - DNA, 20 bp, synthetic construct
  source 1..20: mol_type = other DNA
cagtgccatagccccagggc

SEQ ID NO: 226397 - DNA, 20 bp, synthetic construct
  source 1..20: mol_type = other DNA
gcagtgccatagccccaggg

SEQ ID NO: 226398 - DNA, 20 bp, synthetic construct
  source 1..20: mol_type = other DNA
cgcagtgccatagccccagg

SEQ ID NO: 226399 - DNA, 20 bp, synthetic construct
  source 1..20: mol_type = other DNA
acgcagtgccatagccccag

SEQ ID NO: 226400 - DNA, 20 bp, synthetic construct
  source 1..20: mol_type = other DNA
cacgcagtgccatagcccca

SEQ ID NO: 226401 - DNA, 20 bp, synthetic construct
  source 1..20: mol_type = other DNA
tcacgcagtgccatagcccc

SEQ ID NO: 226402 - DNA, 20 bp, synthetic construct
  source 1..20: mol_type = other DNA
gtcacgcagtgccatagccc

SEQ ID NO: 226403 - DNA, 20 bp, synthetic construct
  source 1..20: mol_type = other DNA
ggtcacgcagtgccatagcc

SEQ ID NO: 226404 - DNA, 20 bp, synthetic construct
  source 1..20: mol_type = other DNA
gggtcacgcagtgccatagc

SEQ ID NO: 226405 - DNA, 20 bp, synthetic construct
  source 1..20: mol_type = other DNA
agggtcacgcagtgccatag

SEQ ID NO: 226406 - DNA, 20 bp, synthetic construct
  source 1..20: mol_type = other DNA
cagggtcacgcagtgccata

SEQ ID NO: 226407 - DNA, 20 bp, synthetic construct
  source 1..20: mol_type = other DNA
gcagggtcacgcagtgccat

SEQ ID NO: 226408 - DNA, 20 bp, synthetic construct
  source 1..20: mol_type = other DNA
tgcagggtcacgcagtgcca

SEQ ID NO: 226409 - DNA, 20 bp, synthetic construct
  source 1..20: mol_type = other DNA
ttgcagggtcacgcagtgcc

SEQ ID NO: 226410 - DNA, 20 bp, synthetic construct
  source 1..20: mol_type = other DNA
cttgcagggtcacgcagtgc

SEQ ID NO: 226411 - DNA, 20 bp, synthetic construct
  source 1..20: mol_type = other DNA
acttgcagggtcacgcagtg

SEQ ID NO: 226412 - DNA, 20 bp, synthetic construct
  source 1..20: mol_type = other DNA
gacttgcagggtcacgcagt

SEQ ID NO: 226413 - DNA, 20 bp, synthetic construct
  source 1..20: mol_type = other DNA
ggacttgcagggtcacgcag

SEQ ID NO: 226414 - DNA, 20 bp, synthetic construct
  source 1..20: mol_type = other DNA
aggacttgcagggtcacgca

SEQ ID NO: 226415 - DNA, 20 bp, synthetic construct
  source 1..20: mol_type = other DNA
taggacttgcagggtcacgc

SEQ ID NO: 226416 - DNA, 20 bp, synthetic construct
  source 1..20: mol_type = other DNA
gtaggacttgcagggtcacg

SEQ ID NO: 226417 - DNA, 20 bp, synthetic construct
  source 1..20: mol_type = other DNA
ggtaggacttgcagggtcac

SEQ ID NO: 226418 - DNA, 20 bp, synthetic construct
  source 1..20: mol_type = other DNA
aggtaggacttgcagggtca

SEQ ID NO: 226419 - DNA, 20 bp, synthetic construct
  source 1..20: mol_type = other DNA
caggtaggacttgcagggtc

SEQ ID NO: 226420 - DNA, 20 bp, synthetic construct
  source 1..20: mol_type = other DNA
ccaggtaggacttgcagggt

SEQ ID NO: 226421 - DNA, 20 bp, synthetic construct
  source 1..20: mol_type = other DNA
gccaggtaggacttgcaggg

SEQ ID NO: 226422 - DNA, 20 bp, synthetic construct
  source 1..20: mol_type = other DNA
cgccaggtaggacttgcagg

SEQ ID NO: 226423 - DNA, 20 bp, synthetic construct
  source 1..20: mol_type = other DNA
tcgccaggtaggacttgcag

SEQ ID NO: 226424 - DNA, 20 bp, synthetic construct
  source 1..20: mol_type = other DNA
ttcgccaggtaggacttgca

SEQ ID NO: 226425 - DNA, 20 bp, synthetic construct
  source 1..20: mol_type = other DNA
cttcgccaggtaggacttgc

SEQ ID NO: 226426 - DNA, 20 bp, synthetic construct
  source 1..20: mol_type = other DNA
gcttcgccaggtaggacttg

SEQ ID NO: 226427 - DNA, 20 bp, synthetic construct
  source 1..20: mol_type = other DNA
agcttcgccaggtaggactt

SEQ ID NO: 226428 - DNA, 20 bp, synthetic construct
  source 1..20: mol_type = other DNA
cagcttcgccaggtaggact

SEQ ID NO: 226429 - DNA, 20 bp, synthetic construct
  source 1..20: mol_type = other DNA
acagcttcgccaggtaggac

SEQ ID NO: 226430 - DNA, 20 bp, synthetic construct
  source 1..20: mol_type = other DNA
gacagcttcgccaggtagga

SEQ ID NO: 226431 - DNA, 20 bp, synthetic construct
  source 1..20: mol_type = other DNA
cgacagcttcgccaggtagg

SEQ ID NO: 226432 - DNA, 20 bp, synthetic construct
  source 1..20: mol_type = other DNA
acgacagcttcgccaggtag

SEQ ID NO: 226433 - DNA, 20 bp, synthetic construct
  source 1..20: mol_type = other DNA
aacgacagcttcgccaggta

SEQ ID NO: 226434 - DNA, 20 bp, synthetic construct
  source 1..20: mol_type = other DNA
gaacgacagcttcgccaggt

SEQ ID NO: 226435 - DNA, 20 bp, synthetic construct
  source 1..20: mol_type = other DNA
agaacgacagcttcgccagg

SEQ ID NO: 226436 - DNA, 20 bp, synthetic construct
  source 1..20: mol_type = other DNA
aagaacgacagcttcgccag

SEQ ID NO: 226437 - DNA, 20 bp, synthetic construct
  source 1..20: mol_type = other DNA
caagaacgacagcttcgcca

SEQ ID NO: 226438 - DNA, 20 bp, synthetic construct
  source 1..20: mol_type = other DNA
acaagaacgacagcttcgcc

SEQ ID NO: 226439 - DNA, 20 bp, synthetic construct
  source 1..20: mol_type = other DNA
cacaagaacgacagcttcgc

SEQ ID NO: 226440 - DNA, 20 bp, synthetic construct
  source 1..20: mol_type = other DNA
gcacaagaacgacagcttcg

SEQ ID NO: 226441 - DNA, 20 bp, synthetic construct
  source 1..20: mol_type = other DNA
agcacaagaacgacagcttc

SEQ ID NO: 226442 - DNA, 20 bp, synthetic construct
  source 1..20: mol_type = other DNA
gagcacaagaacgacagctt

SEQ ID NO: 226443 - DNA, 20 bp, synthetic construct
  source 1..20: mol_type = other DNA
tgagcacaagaacgacagct

SEQ ID NO: 226444 - DNA, 20 bp, synthetic construct
  source 1..20: mol_type = other DNA
ctgagcacaagaacgacagc

SEQ ID NO: 226445 - DNA, 20 bp, synthetic construct
  source 1..20: mol_type = other DNA
actgagcacaagaacgacag

SEQ ID NO: 226446 - DNA, 20 bp, synthetic construct
  source 1..20: mol_type = other DNA
gactgagcacaagaacgaca

SEQ ID NO: 226447 - DNA, 20 bp, synthetic construct
  source 1..20: mol_type = other DNA
tgactgagcacaagaacgac

SEQ ID NO: 226448 - DNA, 20 bp, synthetic construct
  source 1..20: mol_type = other DNA
ctgactgagcacaagaacga

SEQ ID NO: 226449 - DNA, 20 bp, synthetic construct
  source 1..20: mol_type = other DNA
actgactgagcacaagaacg

SEQ ID NO: 226450 - DNA, 20 bp, synthetic construct
  source 1..20: mol_type = other DNA
cactgactgagcacaagaac

SEQ ID NO: 226451 - DNA, 20 bp, synthetic construct
  source 1..20: mol_type = other DNA
acactgactgagcacaagaa

SEQ ID NO: 226452 - DNA, 20 bp, synthetic construct
  source 1..20: mol_type = other DNA
aacactgactgagcacaaga

SEQ ID NO: 226453 - DNA, 20 bp, synthetic construct
  source 1..20: mol_type = other DNA
caacactgactgagcacaag

SEQ ID NO: 226454 - DNA, 20 bp, synthetic construct
  source 1..20: mol_type = other DNA
ccaacactgactgagcacaa

SEQ ID NO: 226455 - DNA, 20 bp, synthetic construct
  source 1..20: mol_type = other DNA
accaacactgactgagcaca

SEQ ID NO: 226456 - DNA, 20 bp, synthetic construct
  source 1..20: mol_type = other DNA
aaccaacactgactgagcac

SEQ ID NO: 226457 - DNA, 20 bp, synthetic construct
  source 1..20: mol_type = other DNA
caaccaacactgactgagca

SEQ ID NO: 226458 - DNA, 20 bp, synthetic construct
  source 1..20: mol_type = other DNA
acaaccaacactgactgagc

SEQ ID NO: 226459 - DNA, 20 bp, synthetic construct
  source 1..20: mol_type = other DNA
tacaaccaacactgactgag

SEQ ID NO: 226460 - DNA, 20 bp, synthetic construct
  source 1..20: mol_type = other DNA
ttacaaccaacactgactga

SEQ ID NO: 226461 - DNA, 20 bp, synthetic construct
  source 1..20: mol_type = other DNA
cttacaaccaacactgactg

SEQ ID NO: 226462 - DNA, 20 bp, synthetic construct
  source 1..20: mol_type = other DNA
tcttacaaccaacactgact

SEQ ID NO: 226463 - DNA, 20 bp, synthetic construct
  source 1..20: mol_type = other DNA
gtcttacaaccaacactgac

SEQ ID NO: 226464 - DNA, 20 bp, synthetic construct
  source 1..20: mol_type = other DNA
agtcttacaaccaacactga

SEQ ID NO: 226465 - DNA, 20 bp, synthetic construct
  source 1..20: mol_type = other DNA
cagtcttacaaccaacactg

SEQ ID NO: 226466 - DNA, 20 bp, synthetic construct
  source 1..20: mol_type = other DNA
tcagtcttacaaccaacact

SEQ ID NO: 226467 - DNA, 20 bp, synthetic construct
  source 1..20: mol_type = other DNA
ctcagtcttacaaccaacac

SEQ ID NO: 226468 - DNA, 20 bp, synthetic construct
  source 1..20: mol_type = other DNA
tctcagtcttacaaccaaca

SEQ ID NO: 226469 - DNA, 20 bp, synthetic construct
  source 1..20: mol_type = other DNA
ttctcagtcttacaaccaac

SEQ ID NO: 226470 - DNA, 20 bp, synthetic construct
  source 1..20: mol_type = other DNA
cttctcagtcttacaaccaa

SEQ ID NO: 226471 - DNA, 20 bp, synthetic construct
  source 1..20: mol_type = other DNA
tcttctcagtcttacaacca

SEQ ID NO: 226472 - DNA, 20 bp, synthetic construct
  source 1..20: mol_type = other DNA
ctcttctcagtcttacaacc

SEQ ID NO: 226473 - DNA, 20 bp, synthetic construct
  source 1..20: mol_type = other DNA
actcttctcagtcttacaac

SEQ ID NO: 226474 - DNA, 20 bp, synthetic construct
  source 1..20: mol_type = other DNA
gactcttctcagtcttacaa

SEQ ID NO: 226475 - DNA, 20 bp, synthetic construct
  source 1..20: mol_type = other DNA
tgactcttctcagtcttaca

SEQ ID NO: 226476 - DNA, 20 bp, synthetic construct
  source 1..20: mol_type = other DNA
gtgactcttctcagtcttac

SEQ ID NO: 226477 - DNA, 20 bp, synthetic construct
  source 1..20: mol_type = other DNA
agtgactcttctcagtctta

SEQ ID NO: 226478 - DNA, 20 bp, synthetic construct
  source 1..20: mol_type = other DNA
aagtgactcttctcagtctt

SEQ ID NO: 226479 - DNA, 20 bp, synthetic construct
  source 1..20: mol_type = other DNA
gaagtgactcttctcagtct

SEQ ID NO: 226480 - DNA, 20 bp, synthetic construct
  source 1..20: mol_type = other DNA
tgaagtgactcttctcagtc

SEQ ID NO: 226481 - DNA, 20 bp, synthetic construct
  source 1..20: mol_type = other DNA
atgaagtgactcttctcagt

SEQ ID NO: 226482 - DNA, 20 bp, synthetic construct
  source 1..20: mol_type = other DNA
aatgaagtgactcttctcag

SEQ ID NO: 226483 - DNA, 20 bp, synthetic construct
  source 1..20: mol_type = other DNA
aaatgaagtgactcttctca

SEQ ID NO: 226484 - DNA, 20 bp, synthetic construct
  source 1..20: mol_type = other DNA
aaaatgaagtgactcttctc

SEQ ID NO: 226485 - DNA, 20 bp, synthetic construct
  source 1..20: mol_type = other DNA
caaaatgaagtgactcttct

SEQ ID NO: 226486 - DNA, 20 bp, synthetic construct
  source 1..20: mol_type = other DNA
gcaaaatgaagtgactcttc

SEQ ID NO: 226487 - DNA, 20 bp, synthetic construct
  source 1..20: mol_type = other DNA
agcaaaatgaagtgactctt

SEQ ID NO: 226488 - DNA, 20 bp, synthetic construct
  source 1..20: mol_type = other DNA
gagcaaaatgaagtgactct

SEQ ID NO: 226489 - DNA, 20 bp, synthetic construct
  source 1..20: mol_type = other DNA
agagcaaaatgaagtgactc

SEQ ID NO: 226490 - DNA, 20 bp, synthetic construct
  source 1..20: mol_type = other DNA
gagagcaaaatgaagtgact

SEQ ID NO: 226491 - DNA, 20 bp, synthetic construct
  source 1..20: mol_type = other DNA
ggagagcaaaatgaagtgac

SEQ ID NO: 226492 - DNA, 20 bp, synthetic construct
  source 1..20: mol_type = other DNA
tggagagcaaaatgaagtga

SEQ ID NO: 226493 - DNA, 20 bp, synthetic construct
  source 1..20: mol_type = other DNA
ctggagagcaaaatgaagtg

SEQ ID NO: 226494 - DNA, 20 bp, synthetic construct
  source 1..20: mol_type = other DNA
cctggagagcaaaatgaagt

SEQ ID NO: 226495 - DNA, 20 bp, synthetic construct
  source 1..20: mol_type = other DNA
ccctggagagcaaaatgaag

SEQ ID NO: 226496 - DNA, 20 bp, synthetic construct
  source 1..20: mol_type = other DNA
tccctggagagcaaaatgaa

SEQ ID NO: 226497 - DNA, 20 bp, synthetic construct
  source 1..20: mol_type = other DNA
gtccctggagagcaaaatga

SEQ ID NO: 226498 - DNA, 20 bp, synthetic construct
  source 1..20: mol_type = other DNA
tgtccctggagagcaaaatg

SEQ ID NO: 226499 - DNA, 20 bp, synthetic construct
  source 1..20: mol_type = other DNA
atgtccctggagagcaaaat

SEQ ID NO: 226500 - DNA, 20 bp, synthetic construct
  source 1..20: mol_type = other DNA
gatgtccctggagagcaaaa

SEQ ID NO: 226501 - DNA, 20 bp, synthetic construct
  source 1..20: mol_type = other DNA
agatgtccctggagagcaaa

SEQ ID NO: 226502 - DNA, 20 bp, synthetic construct
  source 1..20: mol_type = other DNA
aagatgtccctggagagcaa

SEQ ID NO: 226503 - DNA, 20 bp, synthetic construct
  source 1..20: mol_type = other DNA
aaagatgtccctggagagca

SEQ ID NO: 226504 - DNA, 20 bp, synthetic construct
  source 1..20: mol_type = other DNA
gaaagatgtccctggagagc

SEQ ID NO: 226505 - DNA, 20 bp, synthetic construct
  source 1..20: mol_type = other DNA
agaaagatgtccctggagag

SEQ ID NO: 226506 - DNA, 20 bp, synthetic construct
  source 1..20: mol_type = other DNA
cagaaagatgtccctggaga

SEQ ID NO: 226507 - DNA, 20 bp, synthetic construct
  source 1..20: mol_type = other DNA
ccagaaagatgtccctggag

SEQ ID NO: 226508 - DNA, 20 bp, synthetic construct
  source 1..20: mol_type = other DNA
cccagaaagatgtccctgga

SEQ ID NO: 226509 - DNA, 20 bp, synthetic construct
  source 1..20: mol_type = other DNA
acccagaaagatgtccctgg

SEQ ID NO: 226510 - DNA, 20 bp, synthetic construct
  source 1..20: mol_type = other DNA
gacccagaaagatgtccctg

SEQ ID NO: 226511 - DNA, 20 bp, synthetic construct
  source 1..20: mol_type = other DNA
ggacccagaaagatgtccct

SEQ ID NO: 226512 - DNA, 20 bp, synthetic construct
  source 1..20: mol_type = other DNA
aggacccagaaagatgtccc

SEQ ID NO: 226513 - DNA, 20 bp, synthetic construct
  source 1..20: mol_type = other DNA
taggacccagaaagatgtcc

SEQ ID NO: 226514 - DNA, 20 bp, synthetic construct
  source 1..20: mol_type = other DNA
ataggacccagaaagatgtc

SEQ ID NO: 226515 - DNA, 20 bp, synthetic construct
  source 1..20: mol_type = other DNA
aataggacccagaaagatgt

SEQ ID NO: 226516 - DNA, 20 bp, synthetic construct
  source 1..20: mol_type = other DNA
aaataggacccagaaagatg

SEQ ID NO: 226517 - DNA, 20 bp, synthetic construct
  source 1..20: mol_type = other DNA
aaaataggacccagaaagat

SEQ ID NO: 226518 - DNA, 20 bp, synthetic construct
  source 1..20: mol_type = other DNA
gaaaataggacccagaaaga

SEQ ID NO: 226519 - DNA, 20 bp, synthetic construct
  source 1..20: mol_type = other DNA
agaaaataggacccagaaag

SEQ ID NO: 226520 - DNA, 20 bp, synthetic construct
  source 1..20: mol_type = other DNA
cagaaaataggacccagaaa

SEQ ID NO: 226521 - DNA, 20 bp, synthetic construct
  source 1..20: mol_type = other DNA
gcagaaaataggacccagaa

SEQ ID NO: 226522 - DNA, 20 bp, synthetic construct
  source 1..20: mol_type = other DNA
ggcagaaaataggacccaga

SEQ ID NO: 226523 - DNA, 20 bp, synthetic construct
  source 1..20: mol_type = other DNA
aggcagaaaataggacccag

SEQ ID NO: 226524 - DNA, 20 bp, synthetic construct
  source 1..20: mol_type = other DNA
taggcagaaaataggaccca

SEQ ID NO: 226525 - DNA, 20 bp, synthetic construct
  source 1..20: mol_type = other DNA
ataggcagaaaataggaccc

SEQ ID NO: 226526 - DNA, 20 bp, synthetic construct
  source 1..20: mol_type = other DNA
cataggcagaaaataggacc

SEQ ID NO: 226527 - DNA, 20 bp, synthetic construct
  source 1..20: mol_type = other DNA
acataggcagaaaataggac

SEQ ID NO: 226528 - DNA, 20 bp, synthetic construct
  source 1..20: mol_type = other DNA
gacataggcagaaaatagga

SEQ ID NO: 226529 - DNA, 20 bp, synthetic construct
  source 1..20: mol_type = other DNA
tgacataggcagaaaatagg

SEQ ID NO: 226530 - DNA, 20 bp, synthetic construct
  source 1..20: mol_type = other DNA
ttgacataggcagaaaatag

SEQ ID NO: 226531 - DNA, 20 bp, synthetic construct
  source 1..20: mol_type = other DNA
cttgacataggcagaaaata

SEQ ID NO: 226532 - DNA, 20 bp, synthetic construct
  source 1..20: mol_type = other DNA
acttgacataggcagaaaat

SEQ ID NO: 226533 - DNA, 20 bp, synthetic construct
  source 1..20: mol_type = other DNA
tacttgacataggcagaaaa

SEQ ID NO: 226534 - DNA, 20 bp, synthetic construct
  source 1..20: mol_type = other DNA
ctacttgacataggcagaaa

SEQ ID NO: 226535 - DNA, 20 bp, synthetic construct
  source 1..20: mol_type = other DNA
gctacttgacataggcagaa

SEQ ID NO: 226536 - DNA, 20 bp, synthetic construct
  source 1..20: mol_type = other DNA
cgctacttgacataggcaga

SEQ ID NO: 226537 - DNA, 20 bp, synthetic construct
  source 1..20: mol_type = other DNA
gcgctacttgacataggcag

SEQ ID NO: 226538 - DNA, 20 bp, synthetic construct
  source 1..20: mol_type = other DNA
ggcgctacttgacataggca

SEQ ID NO: 226539 - DNA, 20 bp, synthetic construct
  source 1..20: mol_type = other DNA
aggcgctacttgacataggc

SEQ ID NO: 226540 - DNA, 20 bp, synthetic construct
  source 1..20: mol_type = other DNA
gaggcgctacttgacatagg

SEQ ID NO: 226541 - DNA, 20 bp, synthetic construct
  source 1..20: mol_type = other DNA
tgaggcgctacttgacatag

SEQ ID NO: 226542 - DNA, 20 bp, synthetic construct
  source 1..20: mol_type = other DNA
ttgaggcgctacttgacata

SEQ ID NO: 226543 - DNA, 20 bp, synthetic construct
  source 1..20: mol_type = other DNA
cttgaggcgctacttgacat

SEQ ID NO: 226544 - DNA, 20 bp, synthetic construct
  source 1..20: mol_type = other DNA
ccttgaggcgctacttgaca

SEQ ID NO: 226545 - DNA, 20 bp, synthetic construct
  source 1..20: mol_type = other DNA
tccttgaggcgctacttgac

SEQ ID NO: 226546 - DNA, 20 bp, synthetic construct
  source 1..20: mol_type = other DNA
atccttgaggcgctacttga

SEQ ID NO: 226547 - DNA, 20 bp, synthetic construct
  source 1..20: mol_type = other DNA
catccttgaggcgctacttg

SEQ ID NO: 226548 - DNA, 20 bp, synthetic construct
  source 1..20: mol_type = other DNA
gcatccttgaggcgctactt

SEQ ID NO: 226549 - DNA, 20 bp, synthetic construct
  source 1..20: mol_type = other DNA
agcatccttgaggcgctact

SEQ ID NO: 226550 - DNA, 20 bp, synthetic construct
  source 1..20: mol_type = other DNA
gagcatccttgaggcgctac

SEQ ID NO: 226551 - DNA, 20 bp, synthetic construct
  source 1..20: mol_type = other DNA
ggagcatccttgaggcgcta

SEQ ID NO: 226552 - DNA, 20 bp, synthetic construct
  source 1..20: mol_type = other DNA
aggagcatccttgaggcgct

SEQ ID NO: 226553 - DNA, 20 bp, synthetic construct
  source 1..20: mol_type = other DNA
caggagcatccttgaggcgc

SEQ ID NO: 226554 - DNA, 20 bp, synthetic construct
  source 1..20: mol_type = other DNA
tcaggagcatccttgaggcg

SEQ ID NO: 226555 - DNA, 20 bp, synthetic construct
  source 1..20: mol_type = other DNA
ttcaggagcatccttgaggc

SEQ ID NO: 226556 - DNA, 20 bp, synthetic construct
  source 1..20: mol_type = other DNA
tttcaggagcatccttgagg

SEQ ID NO: 226557 - DNA, 20 bp, synthetic construct
  source 1..20: mol_type = other DNA
ttttcaggagcatccttgag

SEQ ID NO: 226558 - DNA, 20 bp, synthetic construct
  source 1..20: mol_type = other DNA
attttcaggagcatccttga

SEQ ID NO: 226559 - DNA, 20 bp, synthetic construct
  source 1..20: mol_type = other DNA
cattttcaggagcatccttg

SEQ ID NO: 226560 - DNA, 20 bp, synthetic construct
  source 1..20: mol_type = other DNA
ccattttcaggagcatcctt

SEQ ID NO: 226561 - DNA, 20 bp, synthetic construct
  source 1..20: mol_type = other DNA
cccattttcaggagcatcct

SEQ ID NO: 226562 - DNA, 20 bp, synthetic construct
  source 1..20: mol_type = other DNA
gcccattttcaggagcatcc

SEQ ID NO: 226563 - DNA, 20 bp, synthetic construct
  source 1..20: mol_type = other DNA
agcccattttcaggagcatc

SEQ ID NO: 226564 - DNA, 20 bp, synthetic construct
  source 1..20: mol_type = other DNA
aagcccattttcaggagcat

SEQ ID NO: 226565 - DNA, 20 bp, synthetic construct
  source 1..20: mol_type = other DNA
caagcccattttcaggagca

SEQ ID NO: 226566 - DNA, 20 bp, synthetic construct
  source 1..20: mol_type = other DNA
acaagcccattttcaggagc

SEQ ID NO: 226567 - DNA, 20 bp, synthetic construct
  source 1..20: mol_type = other DNA
gacaagcccattttcaggag

SEQ ID NO: 226568 - DNA, 20 bp, synthetic construct
  source 1..20: mol_type = other DNA
agacaagcccattttcagga

SEQ ID NO: 226569 - DNA, 20 bp, synthetic construct
  source 1..20: mol_type = other DNA
aagacaagcccattttcagg

SEQ ID NO: 226570 - DNA, 20 bp, synthetic construct
  source 1..20: mol_type = other DNA
aaagacaagcccattttcag

SEQ ID NO: 226571 - DNA, 20 bp, synthetic construct
  source 1..20: mol_type = other DNA
gaaagacaagcccattttca

SEQ ID NO: 226572 - DNA, 20 bp, synthetic construct
  source 1..20: mol_type = other DNA
agaaagacaagcccattttc

SEQ ID NO: 226573 - DNA, 20 bp, synthetic construct
  source 1..20: mol_type = other DNA
aagaaagacaagcccatttt

SEQ ID NO: 226574 - DNA, 20 bp, synthetic construct
  source 1..20: mol_type = other DNA
taagaaagacaagcccattt

SEQ ID NO: 226575 - DNA, 20 bp, synthetic construct
  source 1..20: mol_type = other DNA
ttaagaaagacaagcccatt

SEQ ID NO: 226576 - DNA, 20 bp, synthetic construct
  source 1..20: mol_type = other DNA
gttaagaaagacaagcccat

SEQ ID NO: 226577 - DNA, 20 bp, synthetic construct
  source 1..20: mol_type = other DNA
tgttaagaaagacaagccca

SEQ ID NO: 226578 - DNA, 20 bp, synthetic construct
  source 1..20: mol_type = other DNA
atgttaagaaagacaagccc

SEQ ID NO: 226579 - DNA, 20 bp, synthetic construct
  source 1..20: mol_type = other DNA
catgttaagaaagacaagcc

SEQ ID NO: 226580 - DNA, 20 bp, synthetic construct
  source 1..20: mol_type = other DNA
ccatgttaagaaagacaagc

SEQ ID NO: 226581 - DNA, 20 bp, synthetic construct
  source 1..20: mol_type = other DNA
gccatgttaagaaagacaag

SEQ ID NO: 226582 - DNA, 20 bp, synthetic construct
  source 1..20: mol_type = other DNA
tgccatgttaagaaagacaa

SEQ ID NO: 226583 - DNA, 20 bp, synthetic construct
  source 1..20: mol_type = other DNA
ctgccatgttaagaaagaca

SEQ ID NO: 226584 - DNA, 20 bp, synthetic construct
  source 1..20: mol_type = other DNA
cctgccatgttaagaaagac

SEQ ID NO: 226585 - DNA, 20 bp, synthetic construct
  source 1..20: mol_type = other DNA
acctgccatgttaagaaaga

SEQ ID NO: 226586 - DNA, 20 bp, synthetic construct
  source 1..20: mol_type = other DNA
tacctgccatgttaagaaag

SEQ ID NO: 226587 - DNA, 20 bp, synthetic construct
  source 1..20: mol_type = other DNA
ctacctgccatgttaagaaa

SEQ ID NO: 226588 - DNA, 20 bp, synthetic construct
  source 1..20: mol_type = other DNA
cctacctgccatgttaagaa

SEQ ID NO: 226589 - DNA, 20 bp, synthetic construct
  source 1..20: mol_type = other DNA
acctacctgccatgttaaga

SEQ ID NO: 226590 - DNA, 20 bp, synthetic construct
  source 1..20: mol_type = other DNA
gacctacctgccatgttaag

SEQ ID NO: 226591 - DNA, 20 bp, synthetic construct
  source 1..20: mol_type = other DNA
ggacctacctgccatgttaa

SEQ ID NO: 226592 - DNA, 20 bp, synthetic construct
  source 1..20: mol_type = other DNA
gggacctacctgccatgtta

SEQ ID NO: 226593 - DNA, 20 bp, synthetic construct
  source 1..20: mol_type = other DNA
tgggacctacctgccatgtt

SEQ ID NO: 226594 - DNA, 20 bp, synthetic construct
  source 1..20: mol_type = other DNA
ttgggacctacctgccatgt

SEQ ID NO: 226595 - DNA, 20 bp, synthetic construct
  source 1..20: mol_type = other DNA
tttgggacctacctgccatg

SEQ ID NO: 226596 - DNA, 20 bp, synthetic construct
  source 1..20: mol_type = other DNA
ctttgggacctacctgccat

SEQ ID NO: 226597 - DNA, 20 bp, synthetic construct
  source 1..20: mol_type = other DNA
gctttgggacctacctgcca

SEQ ID NO: 226598 - DNA, 20 bp, synthetic construct
  source 1..20: mol_type = other DNA
tgctttgggacctacctgcc

SEQ ID NO: 226599 - DNA, 20 bp, synthetic construct
  source 1..20: mol_type = other DNA
atgctttgggacctacctgc

SEQ ID NO: 226600 - DNA, 20 bp, synthetic construct
  source 1..20: mol_type = other DNA
aatgctttgggacctacctg

SEQ ID NO: 226601 - DNA, 20 bp, synthetic construct
  source 1..20: mol_type = other DNA
taatgctttgggacctacct

SEQ ID NO: 226602 - DNA, 20 bp, synthetic construct
  source 1..20: mol_type = other DNA
ctaatgctttgggacctacc

SEQ ID NO: 226603 - DNA, 20 bp, synthetic construct
  source 1..20: mol_type = other DNA
gctaatgctttgggacctac

SEQ ID NO: 226604 - DNA, 20 bp, synthetic construct
  source 1..20: mol_type = other DNA
tgctaatgctttgggaccta

SEQ ID NO: 226605 - DNA, 20 bp, synthetic construct
  source 1..20: mol_type = other DNA
atgctaatgctttgggacct

SEQ ID NO: 226606 - DNA, 20 bp, synthetic construct
  source 1..20: mol_type = other DNA
catgctaatgctttgggacc

SEQ ID NO: 226607 - DNA, 20 bp, synthetic construct
  source 1..20: mol_type = other DNA
ccatgctaatgctttgggac

SEQ ID NO: 226608 - DNA, 20 bp, synthetic construct
  source 1..20: mol_type = other DNA
cccatgctaatgctttggga

SEQ ID NO: 226609 - DNA, 20 bp, synthetic construct
  source 1..20: mol_type = other DNA
ccccatgctaatgctttggg

SEQ ID NO: 226610 - DNA, 20 bp, synthetic construct
  source 1..20: mol_type = other DNA
gccccatgctaatgctttgg

SEQ ID NO: 226611 - DNA, 20 bp, synthetic construct
  source 1..20: mol_type = other DNA
tgccccatgctaatgctttg

SEQ ID NO: 226612 - DNA, 20 bp, synthetic construct
  source 1..20: mol_type = other DNA
ctgccccatgctaatgcttt

SEQ ID NO: 226613 - DNA, 20 bp, synthetic construct
  source 1..20: mol_type = other DNA
gctgccccatgctaatgctt

SEQ ID NO: 226614 - DNA, 20 bp, synthetic construct
  source 1..20: mol_type = other DNA
agctgccccatgctaatgct

SEQ ID NO: 226615 - DNA, 20 bp, synthetic construct
  source 1..20: mol_type = other DNA
cagctgccccatgctaatgc

SEQ ID NO: 226616 - DNA, 20 bp, synthetic construct
  source 1..20: mol_type = other DNA
tcagctgccccatgctaatg

SEQ ID NO: 226617 - DNA, 20 bp, synthetic construct
  source 1..20: mol_type = other DNA
gtcagctgccccatgctaat

SEQ ID NO: 226618 - DNA, 20 bp, synthetic construct
  source 1..20: mol_type = other DNA
ggtcagctgccccatgctaa

SEQ ID NO: 226619 - DNA, 20 bp, synthetic construct
  source 1..20: mol_type = other DNA
aggtcagctgccccatgcta

SEQ ID NO: 226620 - DNA, 20 bp, synthetic construct
  source 1..20: mol_type = other DNA
taggtcagctgccccatgct

SEQ ID NO: 226621 - DNA, 20 bp, synthetic construct
  source 1..20: mol_type = other DNA
ctaggtcagctgccccatgc

SEQ ID NO: 226622 - DNA, 20 bp, synthetic construct
  source 1..20: mol_type = other DNA
gctaggtcagctgccccatg

SEQ ID NO: 226623 - DNA, 20 bp, synthetic construct
  source 1..20: mol_type = other DNA
ggctaggtcagctgccccat

SEQ ID NO: 226624 - DNA, 20 bp, synthetic construct
  source 1..20: mol_type = other DNA
gggctaggtcagctgcccca

SEQ ID NO: 226625 - DNA, 20 bp, synthetic construct
  source 1..20: mol_type = other DNA
tgggctaggtcagctgcccc

SEQ ID NO: 226626 - DNA, 20 bp, synthetic construct
  source 1..20: mol_type = other DNA
ctgggctaggtcagctgccc

SEQ ID NO: 226627 - DNA, 20 bp, synthetic construct
  source 1..20: mol_type = other DNA
gctgggctaggtcagctgcc

SEQ ID NO: 226628 - DNA, 20 bp, synthetic construct
  source 1..20: mol_type = other DNA
ggctgggctaggtcagctgc

SEQ ID NO: 226629 - DNA, 20 bp, synthetic construct
  source 1..20: mol_type = other DNA
tggctgggctaggtcagctg

SEQ ID NO: 226630 - DNA, 20 bp, synthetic construct
  source 1..20: mol_type = other DNA
ttggctgggctaggtcagct

SEQ ID NO: 226631 - DNA, 20 bp, synthetic construct
  source 1..20: mol_type = other DNA
attggctgggctaggtcagc

SEQ ID NO: 226632 - DNA, 20 bp, synthetic construct
  source 1..20: mol_type = other DNA
cattggctgggctaggtcag

SEQ ID NO: 226633 - DNA, 20 bp, synthetic construct
  source 1..20: mol_type = other DNA
gcattggctgggctaggtca

SEQ ID NO: 226634 - DNA, 20 bp, synthetic construct
  source 1..20: mol_type = other DNA
tgcattggctgggctaggtc

SEQ ID NO: 226635 - DNA, 20 bp, synthetic construct
  source 1..20: mol_type = other DNA
ctgcattggctgggctaggt

SEQ ID NO: 226636 - DNA, 20 bp, synthetic construct
  source 1..20: mol_type = other DNA
actgcattggctgggctagg

SEQ ID NO: 226637 - DNA, 20 bp, synthetic construct
  source 1..20: mol_type = other DNA
cactgcattggctgggctag

SEQ ID NO: 226638 - DNA, 20 bp, synthetic construct
  source 1..20: mol_type = other DNA
gcactgcattggctgggcta

SEQ ID NO: 226639 - DNA, 20 bp, synthetic construct
  source 1..20: mol_type = other DNA
tgcactgcattggctgggct

SEQ ID NO: 226640 - DNA, 20 bp, synthetic construct
  source 1..20: mol_type = other DNA
ctgcactgcattggctgggc

SEQ ID NO: 226641 - DNA, 20 bp, synthetic construct
  source 1..20: mol_type = other DNA
actgcactgcattggctggg

SEQ ID NO: 226642 - DNA, 20 bp, synthetic construct
  source 1..20: mol_type = other DNA
cactgcactgcattggctgg

SEQ ID NO: 226643 - DNA, 20 bp, synthetic construct
  source 1..20: mol_type = other DNA
tcactgcactgcattggctg

SEQ ID NO: 226644 - DNA, 20 bp, synthetic construct
  source 1..20: mol_type = other DNA
gtcactgcactgcattggct

SEQ ID NO: 226645 - DNA, 20 bp, synthetic construct
  source 1..20: mol_type = other DNA
agtcactgcactgcattggc

SEQ ID NO: 226646 - DNA, 20 bp, synthetic construct
  source 1..20: mol_type = other DNA
gagtcactgcactgcattgg

SEQ ID NO: 226647 - DNA, 20 bp, synthetic construct
  source 1..20: mol_type = other DNA
agagtcactgcactgcattg

SEQ ID NO: 226648 - DNA, 20 bp, synthetic construct
  source 1..20: mol_type = other DNA
aagagtcactgcactgcatt

SEQ ID NO: 226649 - DNA, 20 bp, synthetic construct
  source 1..20: mol_type = other DNA
caagagtcactgcactgcat

SEQ ID NO: 226650 - DNA, 20 bp, synthetic construct
  source 1..20: mol_type = other DNA
gcaagagtcactgcactgca

SEQ ID NO: 226651 - DNA, 20 bp, synthetic construct
  source 1..20: mol_type = other DNA
tgcaagagtcactgcactgc

SEQ ID NO: 226652 - DNA, 20 bp, synthetic construct
  source 1..20: mol_type = other DNA
ttgcaagagtcactgcactg

SEQ ID NO: 226653 - DNA, 20 bp, synthetic construct
  source 1..20: mol_type = other DNA
gttgcaagagtcactgcact

SEQ ID NO: 226654 - DNA, 20 bp, synthetic construct
  source 1..20: mol_type = other DNA
ggttgcaagagtcactgcac

SEQ ID NO: 226655 - DNA, 20 bp, synthetic construct
  source 1..20: mol_type = other DNA
cggttgcaagagtcactgca

SEQ ID NO: 226656 - DNA, 20 bp, synthetic construct
  source 1..20: mol_type = other DNA
tcggttgcaagagtcactgc

SEQ ID NO: 226657 - DNA, 20 bp, synthetic construct
  source 1..20: mol_type = other DNA
ctcggttgcaagagtcactg

SEQ ID NO: 226658 - DNA, 20 bp, synthetic construct
  source 1..20: mol_type = other DNA
actcggttgcaagagtcact

SEQ ID NO: 226659 - DNA, 20 bp, synthetic construct
  source 1..20: mol_type = other DNA
gactcggttgcaagagtcac

SEQ ID NO: 226660 - DNA, 20 bp, synthetic construct
  source 1..20: mol_type = other DNA
agactcggttgcaagagtca

SEQ ID NO: 226661 - DNA, 20 bp, synthetic construct
  source 1..20: mol_type = other DNA
tagactcggttgcaagagtc

SEQ ID NO: 226662 - DNA, 20 bp, synthetic construct
  source 1..20: mol_type = other DNA
ttagactcggttgcaagagt

SEQ ID NO: 226663 - DNA, 20 bp, synthetic construct
  source 1..20: mol_type = other DNA
attagactcggttgcaagag

SEQ ID NO: 226664 - DNA, 20 bp, synthetic construct
  source 1..20: mol_type = other DNA
gattagactcggttgcaaga

SEQ ID NO: 226665 - DNA, 20 bp, synthetic construct
  source 1..20: mol_type = other DNA
tgattagactcggttgcaag

SEQ ID NO: 226666 - DNA, 20 bp, synthetic construct
  source 1..20: mol_type = other DNA
ctgattagactcggttgcaa

SEQ ID NO: 226667 - DNA, 20 bp, synthetic construct
  source 1..20: mol_type = other DNA
tctgattagactcggttgca

SEQ ID NO: 226668 - DNA, 20 bp, synthetic construct
  source 1..20: mol_type = other DNA
ttctgattagactcggttgc

SEQ ID NO: 226669 - DNA, 20 bp, synthetic construct
  source 1..20: mol_type = other DNA
cttctgattagactcggttg

SEQ ID NO: 226670 - DNA, 20 bp, synthetic construct
  source 1..20: mol_type = other DNA
ccttctgattagactcggtt

SEQ ID NO: 226671 - DNA, 20 bp, synthetic construct
  source 1..20: mol_type = other DNA
accttctgattagactcggt

SEQ ID NO: 226672 - DNA, 20 bp, synthetic construct
  source 1..20: mol_type = other DNA
gaccttctgattagactcgg

SEQ ID NO: 226673 - DNA, 20 bp, synthetic construct
  source 1..20: mol_type = other DNA
ggaccttctgattagactcg

SEQ ID NO: 226674 - DNA, 20 bp, synthetic construct
  source 1..20: mol_type = other DNA
tggaccttctgattagactc

SEQ ID NO: 226675 - DNA, 20 bp, synthetic construct
  source 1..20: mol_type = other DNA
atggaccttctgattagact

SEQ ID NO: 226676 - DNA, 20 bp, synthetic construct
  source 1..20: mol_type = other DNA
catggaccttctgattagac

SEQ ID NO: 226677 - DNA, 20 bp, synthetic construct
  source 1..20: mol_type = other DNA
tcatggaccttctgattaga

SEQ ID NO: 226678 - DNA, 20 bp, synthetic construct
  source 1..20: mol_type = other DNA
ttcatggaccttctgattag

SEQ ID NO: 226679 - DNA, 20 bp, synthetic construct
  source 1..20: mol_type = other DNA
gttcatggaccttctgatta

SEQ ID NO: 226680 - DNA, 20 bp, synthetic construct
  source 1..20: mol_type = other DNA
ggttcatggaccttctgatt

SEQ ID NO: 226681 - DNA, 20 bp, synthetic construct
  source 1..20: mol_type = other DNA
aggttcatggaccttctgat

SEQ ID NO: 226682 - DNA, 20 bp, synthetic construct
  source 1..20: mol_type = other DNA
taggttcatggaccttctga

SEQ ID NO: 226683 - DNA, 20 bp, synthetic construct
  source 1..20: mol_type = other DNA
gtaggttcatggaccttctg

SEQ ID NO: 226684 - DNA, 20 bp, synthetic construct
  source 1..20: mol_type = other DNA
cgtaggttcatggaccttct

SEQ ID NO: 226685 - DNA, 20 bp, synthetic construct
  source 1..20: mol_type = other DNA
tcgtaggttcatggaccttc

SEQ ID NO: 226686 - DNA, 20 bp, synthetic construct
  source 1..20: mol_type = other DNA
ctcgtaggttcatggacctt

SEQ ID NO: 226687 - DNA, 20 bp, synthetic construct
  source 1..20: mol_type = other DNA
gctcgtaggttcatggacct

SEQ ID NO: 226688 - DNA, 20 bp, synthetic construct
  source 1..20: mol_type = other DNA
tgctcgtaggttcatggacc

SEQ ID NO: 226689 - DNA, 20 bp, synthetic construct
  source 1..20: mol_type = other DNA
atgctcgtaggttcatggac

SEQ ID NO: 226690 - DNA, 20 bp, synthetic construct
  source 1..20: mol_type = other DNA
aatgctcgtaggttcatgga

SEQ ID NO: 226691 - DNA, 20 bp, synthetic construct
  source 1..20: mol_type = other DNA
aaatgctcgtaggttcatgg

SEQ ID NO: 226692 - DNA, 20 bp, synthetic construct
  source 1..20: mol_type = other DNA
gaaatgctcgtaggttcatg

SEQ ID NO: 226693 - DNA, 20 bp, synthetic construct
  source 1..20: mol_type = other DNA
ggaaatgctcgtaggttcat

SEQ ID NO: 226694 - DNA, 20 bp, synthetic construct
  source 1..20: mol_type = other DNA
aggaaatgctcgtaggttca

SEQ ID NO: 226695 - DNA, 20 bp, synthetic construct
  source 1..20: mol_type = other DNA
caggaaatgctcgtaggttc

SEQ ID NO: 226696 - DNA, 20 bp, synthetic construct
  source 1..20: mol_type = other DNA
acaggaaatgctcgtaggtt

SEQ ID NO: 226697 - DNA, 20 bp, synthetic construct
  source 1..20: mol_type = other DNA
gacaggaaatgctcgtaggt

SEQ ID NO: 226698 - DNA, 20 bp, synthetic construct
  source 1..20: mol_type = other DNA
ggacaggaaatgctcgtagg

SEQ ID NO: 226699 - DNA, 20 bp, synthetic construct
  source 1..20: mol_type = other DNA
gggacaggaaatgctcgtag

SEQ ID NO: 226700 - DNA, 20 bp, synthetic construct
  source 1..20: mol_type = other DNA
tgggacaggaaatgctcgta

SEQ ID NO: 226701 - DNA, 20 bp, synthetic construct
  source 1..20: mol_type = other DNA
ctgggacaggaaatgctcgt

SEQ ID NO: 226702 - DNA, 20 bp, synthetic construct
  source 1..20: mol_type = other DNA
cctgggacaggaaatgctcg

SEQ ID NO: 226703 - DNA, 20 bp, synthetic construct
  source 1..20: mol_type = other DNA
tcctgggacaggaaatgctc

SEQ ID NO: 226704 - DNA, 20 bp, synthetic construct
  source 1..20: mol_type = other DNA
atcctgggacaggaaatgct

SEQ ID NO: 226705 - DNA, 20 bp, synthetic construct
  source 1..20: mol_type = other DNA
gatcctgggacaggaaatgc

SEQ ID NO: 226706 - DNA, 20 bp, synthetic construct
  source 1..20: mol_type = other DNA
tgatcctgggacaggaaatg

SEQ ID NO: 226707 - DNA, 20 bp, synthetic construct
  source 1..20: mol_type = other DNA
ctgatcctgggacaggaaat

SEQ ID NO: 226708 - DNA, 20 bp, synthetic construct
  source 1..20: mol_type = other DNA
cctgatcctgggacaggaaa

SEQ ID NO: 226709 - DNA, 20 bp, synthetic construct
  source 1..20: mol_type = other DNA
ccctgatcctgggacaggaa

SEQ ID NO: 226710 - DNA, 20 bp, synthetic construct
  source 1..20: mol_type = other DNA
accctgatcctgggacagga

SEQ ID NO: 226711 - DNA, 20 bp, synthetic construct
  source 1..20: mol_type = other DNA
caccctgatcctgggacagg

SEQ ID NO: 226712 - DNA, 20 bp, synthetic construct
  source 1..20: mol_type = other DNA
ccaccctgatcctgggacag

SEQ ID NO: 226713 - DNA, 20 bp, synthetic construct
  source 1..20: mol_type = other DNA
tccaccctgatcctgggaca

SEQ ID NO: 226714 - DNA, 20 bp, synthetic construct
  source 1..20: mol_type = other DNA
ctccaccctgatcctgggac

SEQ ID NO: 226715 - DNA, 20 bp, synthetic construct
  source 1..20: mol_type = other DNA
cctccaccctgatcctggga

SEQ ID NO: 226716 - DNA, 20 bp, synthetic construct
  source 1..20: mol_type = other DNA
gcctccaccctgatcctggg

SEQ ID NO: 226717 - DNA, 20 bp, synthetic construct
  source 1..20: mol_type = other DNA
agcctccaccctgatcctgg

SEQ ID NO: 226718 - DNA, 20 bp, synthetic construct
  source 1..20: mol_type = other DNA
cagcctccaccctgatcctg

SEQ ID NO: 226719 - DNA, 20 bp, synthetic construct
  source 1..20: mol_type = other DNA
tcagcctccaccctgatcct

SEQ ID NO: 226720 - DNA, 20 bp, synthetic construct
  source 1..20: mol_type = other DNA
ctcagcctccaccctgatcc

SEQ ID NO: 226721 - DNA, 20 bp, synthetic construct
  source 1..20: mol_type = other DNA
gctcagcctccaccctgatc

SEQ ID NO: 226722 - DNA, 20 bp, synthetic construct
  source 1..20: mol_type = other DNA
ggctcagcctccaccctgat

SEQ ID NO: 226723 - DNA, 20 bp, synthetic construct
  source 1..20: mol_type = other DNA
aggctcagcctccaccctga

SEQ ID NO: 226724 - DNA, 20 bp, synthetic construct
  source 1..20: mol_type = other DNA
gaggctcagcctccaccctg

SEQ ID NO: 226725 - DNA, 20 bp, synthetic construct
  source 1..20: mol_type = other DNA
ggaggctcagcctccaccct

SEQ ID NO: 226726 - DNA, 20 bp, synthetic construct
  source 1..20: mol_type = other DNA
gggaggctcagcctccaccc

SEQ ID NO: 226727 - DNA, 20 bp, synthetic construct
  source 1..20: mol_type = other DNA
agggaggctcagcctccacc

SEQ ID NO: 226728 - DNA, 20 bp, synthetic construct
  source 1..20: mol_type = other DNA
cagggaggctcagcctccac

SEQ ID NO: 226729 - DNA, 20 bp, synthetic construct
  source 1..20: mol_type = other DNA
gcagggaggctcagcctcca

SEQ ID NO: 226730 - DNA, 20 bp, synthetic construct
  source 1..20: mol_type = other DNA
agcagggaggctcagcctcc

SEQ ID NO: 226731 - DNA, 20 bp, synthetic construct
  source 1..20: mol_type = other DNA
aagcagggaggctcagcctc

SEQ ID NO: 226732 - DNA, 20 bp, synthetic construct
  source 1..20: mol_type = other DNA
taagcagggaggctcagcct

SEQ ID NO: 226733 - DNA, 20 bp, synthetic construct
  source 1..20: mol_type = other DNA
ctaagcagggaggctcagcc

SEQ ID NO: 226734 - DNA, 20 bp, synthetic construct
  source 1..20: mol_type = other DNA
tctaagcagggaggctcagc

SEQ ID NO: 226735 - DNA, 20 bp, synthetic construct
  source 1..20: mol_type = other DNA
ctctaagcagggaggctcag

SEQ ID NO: 226736 - DNA, 20 bp, synthetic construct
  source 1..20: mol_type = other DNA
tctctaagcagggaggctca

SEQ ID NO: 226737 - DNA, 20 bp, synthetic construct
  source 1..20: mol_type = other DNA
atctctaagcagggaggctc

SEQ ID NO: 226738 - DNA, 20 bp, synthetic construct
  source 1..20: mol_type = other DNA
aatctctaagcagggaggct

SEQ ID NO: 226739 - DNA, 20 bp, synthetic construct
  source 1..20: mol_type = other DNA
gaatctctaagcagggaggc

SEQ ID NO: 226740 - DNA, 20 bp, synthetic construct
  source 1..20: mol_type = other DNA
agaatctctaagcagggagg

SEQ ID NO: 226741 - DNA, 20 bp, synthetic construct
  source 1..20: mol_type = other DNA
aagaatctctaagcagggag

SEQ ID NO: 226742 - DNA, 20 bp, synthetic construct
  source 1..20: mol_type = other DNA
gaagaatctctaagcaggga

SEQ ID NO: 226743 - DNA, 20 bp, synthetic construct
  source 1..20: mol_type = other DNA
ggaagaatctctaagcaggg

SEQ ID NO: 226744 - DNA, 20 bp, synthetic construct
  source 1..20: mol_type = other DNA
gggaagaatctctaagcagg

SEQ ID NO: 226745 - DNA, 20 bp, synthetic construct
  source 1..20: mol_type = other DNA
tgggaagaatctctaagcag

SEQ ID NO: 226746 - DNA, 20 bp, synthetic construct
  source 1..20: mol_type = other DNA
atgggaagaatctctaagca

SEQ ID NO: 226747 - DNA, 20 bp, synthetic construct
  source 1..20: mol_type = other DNA
catgggaagaatctctaagc

SEQ ID NO: 226748 - DNA, 20 bp, synthetic construct
  source 1..20: mol_type = other DNA
gcatgggaagaatctctaag

SEQ ID NO: 226749 - DNA, 20 bp, synthetic construct
  source 1..20: mol_type = other DNA
tgcatgggaagaatctctaa

SEQ ID NO: 226750 - DNA, 20 bp, synthetic construct
  source 1..20: mol_type = other DNA
atgcatgggaagaatctcta

SEQ ID NO: 226751 - DNA, 20 bp, synthetic construct
  source 1..20: mol_type = other DNA
aatgcatgggaagaatctct

SEQ ID NO: 226752 - DNA, 20 bp, synthetic construct
  source 1..20: mol_type = other DNA
gaatgcatgggaagaatctc

SEQ ID NO: 226753 - DNA, 20 bp, synthetic construct
  source 1..20: mol_type = other DNA
ggaatgcatgggaagaatct

SEQ ID NO: 226754 - DNA, 20 bp, synthetic construct
  source 1..20: mol_type = other DNA
tggaatgcatgggaagaatc

SEQ ID NO: 226755 - DNA, 20 bp, synthetic construct
  source 1..20: mol_type = other DNA
gtggaatgcatgggaagaat

SEQ ID NO: 226756 - DNA, 20 bp, synthetic construct
  source 1..20: mol_type = other DNA
agtggaatgcatgggaagaa

SEQ ID NO: 226757 - DNA, 20 bp, synthetic construct
  source 1..20: mol_type = other DNA
aagtggaatgcatgggaaga

SEQ ID NO: 226758 - DNA, 20 bp, synthetic construct
  source 1..20: mol_type = other DNA
aaagtggaatgcatgggaag

SEQ ID NO: 226759 - DNA, 20 bp, synthetic construct
  source 1..20: mol_type = other DNA
aaaagtggaatgcatgggaa

SEQ ID NO: 226760 - DNA, 20 bp, synthetic construct
  source 1..20: mol_type = other DNA
aaaaagtggaatgcatggga

SEQ ID NO: 226761 - DNA, 20 bp, synthetic construct
  source 1..20: mol_type = other DNA
aaaaaagtggaatgcatggg

SEQ ID NO: 226762 - DNA, 20 bp, synthetic construct
  source 1..20: mol_type = other DNA
gaaaaaagtggaatgcatgg

SEQ ID NO: 226763 - DNA, 20 bp, synthetic construct
  source 1..20: mol_type = other DNA
ggaaaaaagtggaatgcatg

SEQ ID NO: 226764 - DNA, 20 bp, synthetic construct
  source 1..20: mol_type = other DNA
gggaaaaaagtggaatgcat

SEQ ID NO: 226765 - DNA, 20 bp, synthetic construct
  source 1..20: mol_type = other DNA
ggggaaaaaagtggaatgca

SEQ ID NO: 226766 - DNA, 20 bp, synthetic construct
  source 1..20: mol_type = other DNA
tggggaaaaaagtggaatgc

SEQ ID NO: 226767 - DNA, 20 bp, synthetic construct
  source 1..20: mol_type = other DNA
ttggggaaaaaagtggaatg

SEQ ID NO: 226768 - DNA, 20 bp, synthetic construct
  source 1..20: mol_type = other DNA
tttggggaaaaaagtggaat

SEQ ID NO: 226769 - DNA, 20 bp, synthetic construct
  source 1..20: mol_type = other DNA
ttttggggaaaaaagtggaa

SEQ ID NO: 226770 - DNA, 20 bp, synthetic construct
  source 1..20: mol_type = other DNA
cttttggggaaaaaagtgga

SEQ ID NO: 226771 - DNA, 20 bp, synthetic construct
  source 1..20: mol_type = other DNA
tcttttggggaaaaaagtgg

SEQ ID NO: 226772 - DNA, 20 bp, synthetic construct
  source 1..20: mol_type = other DNA
ttcttttggggaaaaaagtg

SEQ ID NO: 226773 - DNA, 20 bp, synthetic construct
  source 1..20: mol_type = other DNA
tttcttttggggaaaaaagt

SEQ ID NO: 226774 - DNA, 20 bp, synthetic construct
  source 1..20: mol_type = other DNA
ttttcttttggggaaaaaag

SEQ ID NO: 226775 - DNA, 20 bp, synthetic construct
  source 1..20: mol_type = other DNA
attttcttttggggaaaaaa

SEQ ID NO: 226776 - DNA, 20 bp, synthetic construct
  source 1..20: mol_type = other DNA
tattttcttttggggaaaaa

SEQ ID NO: 226777 - DNA, 20 bp, synthetic construct
  source 1..20: mol_type = other DNA
atattttcttttggggaaaa

SEQ ID NO: 226778 - DNA, 20 bp, synthetic construct
  source 1..20: mol_type = other DNA
aatattttcttttggggaaa

SEQ ID NO: 226779 - DNA, 20 bp, synthetic construct
  source 1..20: mol_type = other DNA
caatattttcttttggggaa

SEQ ID NO: 226780 - DNA, 20 bp, synthetic construct
  source 1..20: mol_type = other DNA
tcaatattttcttttgggga

SEQ ID NO: 226781 - DNA, 20 bp, synthetic construct
  source 1..20: mol_type = other DNA
gtcaatattttcttttgggg

SEQ ID NO: 226782 - DNA, 20 bp, synthetic construct
  source 1..20: mol_type = other DNA
ggtcaatattttcttttggg

SEQ ID NO: 226783 - DNA, 20 bp, synthetic construct
  source 1..20: mol_type = other DNA
gggtcaatattttcttttgg

SEQ ID NO: 226784 - DNA, 20 bp, synthetic construct
  source 1..20: mol_type = other DNA
agggtcaatattttcttttg

SEQ ID NO: 226785 - DNA, 20 bp, synthetic construct
  source 1..20: mol_type = other DNA
aagggtcaatattttctttt

SEQ ID NO: 226786 - DNA, 20 bp, synthetic construct
  source 1..20: mol_type = other DNA
caagggtcaatattttcttt

SEQ ID NO: 226787 - DNA, 20 bp, synthetic construct
  source 1..20: mol_type = other DNA
tcaagggtcaatattttctt

SEQ ID NO: 226788 - DNA, 20 bp, synthetic construct
  source 1..20: mol_type = other DNA
ctcaagggtcaatattttct

SEQ ID NO: 226789 - DNA, 20 bp, synthetic construct
  source 1..20: mol_type = other DNA
tctcaagggtcaatattttc

SEQ ID NO: 226790 - DNA, 20 bp, synthetic construct
  source 1..20: mol_type = other DNA
ctctcaagggtcaatatttt

SEQ ID NO: 226791 - DNA, 20 bp, synthetic construct
  source 1..20: mol_type = other DNA
cctctcaagggtcaatattt

SEQ ID NO: 226792 - DNA, 20 bp, synthetic construct
  source 1..20: mol_type = other DNA
gcctctcaagggtcaatatt

SEQ ID NO: 226793 - DNA, 20 bp, synthetic construct
  source 1..20: mol_type = other DNA
tgcctctcaagggtcaatat

SEQ ID NO: 226794 - DNA, 20 bp, synthetic construct
  source 1..20: mol_type = other DNA
gtgcctctcaagggtcaata

SEQ ID NO: 226795 - DNA, 20 bp, synthetic construct
  source 1..20: mol_type = other DNA
tgtgcctctcaagggtcaat

SEQ ID NO: 226796 - DNA, 20 bp, synthetic construct
  source 1..20: mol_type = other DNA
gtgtgcctctcaagggtcaa

SEQ ID NO: 226797 - DNA, 20 bp, synthetic construct
  source 1..20: mol_type = other DNA
tgtgtgcctctcaagggtca

SEQ ID NO: 226798 - DNA, 20 bp, synthetic construct
  source 1..20: mol_type = other DNA
ctgtgtgcctctcaagggtc

SEQ ID NO: 226799 - DNA, 20 bp, synthetic construct
  source 1..20: mol_type = other DNA
actgtgtgcctctcaagggt

SEQ ID NO: 226800 - DNA, 20 bp, synthetic construct
  source 1..20: mol_type = other DNA
aactgtgtgcctctcaaggg

SEQ ID NO: 226801 - DNA, 20 bp, synthetic construct
  source 1..20: mol_type = other DNA
aaactgtgtgcctctcaagg

SEQ ID NO: 226802 - DNA, 20 bp, synthetic construct
  source 1..20: mol_type = other DNA
taaactgtgtgcctctcaag

SEQ ID NO: 226803 - DNA, 20 bp, synthetic construct
  source 1..20: mol_type = other DNA
ataaactgtgtgcctctcaa

SEQ ID NO: 226804 - DNA, 20 bp, synthetic construct
  source 1..20: mol_type = other DNA
aataaactgtgtgcctctca

SEQ ID NO: 226805 - DNA, 20 bp, synthetic construct
  source 1..20: mol_type = other DNA
aaataaactgtgtgcctctc

SEQ ID NO: 226806 - DNA, 20 bp, synthetic construct
  source 1..20: mol_type = other DNA
taaataaactgtgtgcctct

SEQ ID NO: 226807 - DNA, 20 bp, synthetic construct
  source 1..20: mol_type = other DNA
ataaataaactgtgtgcctc

SEQ ID NO: 226808 - DNA, 20 bp, synthetic construct
  source 1..20: mol_type = other DNA
aataaataaactgtgtgcct

SEQ ID NO: 226809 - DNA, 20 bp, synthetic construct
  source 1..20: mol_type = other DNA
aaataaataaactgtgtgcc

SEQ ID NO: 226810 - DNA, 20 bp, synthetic construct
  source 1..20: mol_type = other DNA
aaaataaataaactgtgtgc

SEQ ID NO: 226811 - DNA, 20 bp, synthetic construct
  source 1..20: mol_type = other DNA
caaaataaataaactgtgtg

SEQ ID NO: 226812 - DNA, 20 bp, synthetic construct
  source 1..20: mol_type = other DNA
gcaaaataaataaactgtgt

SEQ ID NO: 226813 - DNA, 20 bp, synthetic construct
  source 1..20: mol_type = other DNA
tgcaaaataaataaactgtg

SEQ ID NO: 226814 - DNA, 20 bp, synthetic construct
  source 1..20: mol_type = other DNA
atgcaaaataaataaactgt

SEQ ID NO: 226815 - DNA, 20 bp, synthetic construct
  source 1..20: mol_type = other DNA
tatgcaaaataaataaactg

SEQ ID NO: 226816 - DNA, 20 bp, synthetic construct
  source 1..20: mol_type = other DNA
ctatgcaaaataaataaact

SEQ ID NO: 226817 - DNA, 20 bp, synthetic construct
  source 1..20: mol_type = other DNA
actatgcaaaataaataaac

SEQ ID NO: 226818 - DNA, 20 bp, synthetic construct
  source 1..20: mol_type = other DNA
tactatgcaaaataaataaa

SEQ ID NO: 226819 - DNA, 20 bp, synthetic construct
  source 1..20: mol_type = other DNA
ttactatgcaaaataaataa

SEQ ID NO: 226820 - DNA, 20 bp, synthetic construct
  source 1..20: mol_type = other DNA
tttactatgcaaaataaata

SEQ ID NO: 226821 - DNA, 20 bp, synthetic construct
  source 1..20: mol_type = other DNA
atttactatgcaaaataaat

SEQ ID NO: 226822 - DNA, 20 bp, synthetic construct
  source 1..20: mol_type = other DNA
tatttactatgcaaaataaa

SEQ ID NO: 226823 - DNA, 20 bp, synthetic construct
  source 1..20: mol_type = other DNA
ctatttactatgcaaaataa

SEQ ID NO: 226824 - DNA, 20 bp, synthetic construct
  source 1..20: mol_type = other DNA
actatttactatgcaaaata

SEQ ID NO: 226825 - DNA, 20 bp, synthetic construct
  source 1..20: mol_type = other DNA
tactatttactatgcaaaat

SEQ ID NO: 226826 - DNA, 20 bp, synthetic construct
  source 1..20: mol_type = other DNA
ctactatttactatgcaaaa

SEQ ID NO: 226827 - DNA, 20 bp, synthetic construct
  source 1..20: mol_type = other DNA
gctactatttactatgcaaa

SEQ ID NO: 226828 - DNA, 20 bp, synthetic construct
  source 1..20: mol_type = other DNA
ggctactatttactatgcaa

SEQ ID NO: 226829 - DNA, 20 bp, synthetic construct
  source 1..20: mol_type = other DNA
aggctactatttactatgca

SEQ ID NO: 226830 - DNA, 20 bp, synthetic construct
  source 1..20: mol_type = other DNA
caggctactatttactatgc

SEQ ID NO: 226831 - DNA, 20 bp, synthetic construct
  source 1..20: mol_type = other DNA
acaggctactatttactatg

SEQ ID NO: 226832 - DNA, 20 bp, synthetic construct
  source 1..20: mol_type = other DNA
tacaggctactatttactat

SEQ ID NO: 226833 - DNA, 20 bp, synthetic construct
  source 1..20: mol_type = other DNA
atacaggctactatttacta

SEQ ID NO: 226834 - DNA, 20 bp, synthetic construct
  source 1..20: mol_type = other DNA
aatacaggctactatttact

SEQ ID NO: 226835 - DNA, 20 bp, synthetic construct
  source 1..20: mol_type = other DNA
aaatacaggctactatttac

SEQ ID NO: 226836 - DNA, 20 bp, synthetic construct
  source 1..20: mol_type = other DNA
aaaatacaggctactattta

SEQ ID NO: 226837 - DNA, 20 bp, synthetic construct
  source 1..20: mol_type = other DNA
taaaatacaggctactattt

SEQ ID NO: 226838 - DNA, 20 bp, synthetic construct
  source 1..20: mol_type = other DNA
ttaaaatacaggctactatt

SEQ ID NO: 226839 - DNA, 20 bp, synthetic construct
  source 1..20: mol_type = other DNA
cttaaaatacaggctactat

SEQ ID NO: 226840 - DNA, 20 bp, synthetic construct
  source 1..20: mol_type = other DNA
ccttaaaatacaggctacta

SEQ ID NO: 226841 - DNA, 20 bp, synthetic construct
  source 1..20: mol_type = other DNA
tccttaaaatacaggctact

SEQ ID NO: 226842 - DNA, 20 bp, synthetic construct
  source 1..20: mol_type = other DNA
atccttaaaatacaggctac

SEQ ID NO: 226843 - DNA, 20 bp, synthetic construct
  source 1..20: mol_type = other DNA
catccttaaaatacaggcta

SEQ ID NO: 226844 - DNA, 20 bp, synthetic construct
  source 1..20: mol_type = other DNA
tcatccttaaaatacaggct

SEQ ID NO: 226845 - DNA, 20 bp, synthetic construct
  source 1..20: mol_type = other DNA
ctcatccttaaaatacaggc

SEQ ID NO: 226846 - DNA, 20 bp, synthetic construct
  source 1..20: mol_type = other DNA
actcatccttaaaatacagg

SEQ ID NO: 226847 - DNA, 20 bp, synthetic construct
  source 1..20: mol_type = other DNA
aactcatccttaaaatacag

SEQ ID NO: 226848 - DNA, 20 bp, synthetic construct
  source 1..20: mol_type = other DNA
caactcatccttaaaataca

SEQ ID NO: 226849 - DNA, 20 bp, synthetic construct
  source 1..20: mol_type = other DNA
tcaactcatccttaaaatac

SEQ ID NO: 226850 - DNA, 20 bp, synthetic construct
  source 1..20: mol_type = other DNA
atcaactcatccttaaaata

SEQ ID NO: 226851 - DNA, 20 bp, synthetic construct
  source 1..20: mol_type = other DNA
aatcaactcatccttaaaat

SEQ ID NO: 226852 - DNA, 20 bp, synthetic construct
  source 1..20: mol_type = other DNA
aaatcaactcatccttaaaa

SEQ ID NO: 226853 - DNA, 20 bp, synthetic construct
  source 1..20: mol_type = other DNA
gaaatcaactcatccttaaa

SEQ ID NO: 226854 - DNA, 20 bp, synthetic construct
  source 1..20: mol_type = other DNA
agaaatcaactcatccttaa

SEQ ID NO: 226855 - DNA, 20 bp, synthetic construct
  source 1..20: mol_type = other DNA
cagaaatcaactcatcctta

SEQ ID NO: 226856 - DNA, 20 bp, synthetic construct
  source 1..20: mol_type = other DNA
gcagaaatcaactcatcctt

SEQ ID NO: 226857 - DNA, 20 bp, synthetic construct
  source 1..20: mol_type = other DNA
tgcagaaatcaactcatcct

SEQ ID NO: 226858 - DNA, 20 bp, synthetic construct
  source 1..20: mol_type = other DNA
atgcagaaatcaactcatcc

SEQ ID NO: 226859 - DNA, 20 bp, synthetic construct
  source 1..20: mol_type = other DNA
gatgcagaaatcaactcatc

SEQ ID NO: 226860 - DNA, 20 bp, synthetic construct
  source 1..20: mol_type = other DNA
tgatgcagaaatcaactcat

SEQ ID NO: 226861 - DNA, 20 bp, synthetic construct
  source 1..20: mol_type = other DNA
ctgatgcagaaatcaactca

SEQ ID NO: 226862 - DNA, 20 bp, synthetic construct
  source 1..20: mol_type = other DNA
gctgatgcagaaatcaactc

SEQ ID NO: 226863 - DNA, 20 bp, synthetic construct
  source 1..20: mol_type = other DNA
ggctgatgcagaaatcaact

SEQ ID NO: 226864 - DNA, 20 bp, synthetic construct
  source 1..20: mol_type = other DNA
gggctgatgcagaaatcaac

SEQ ID NO: 226865 - DNA, 20 bp, synthetic construct
  source 1..20: mol_type = other DNA
ggggctgatgcagaaatcaa

SEQ ID NO: 226866 - DNA, 20 bp, synthetic construct
  source 1..20: mol_type = other DNA
aggggctgatgcagaaatca

SEQ ID NO: 226867 - DNA, 20 bp, synthetic construct
  source 1..20: mol_type = other DNA
caggggctgatgcagaaatc

SEQ ID NO: 226868 - DNA, 20 bp, synthetic construct
  source 1..20: mol_type = other DNA
acaggggctgatgcagaaat

SEQ ID NO: 226869 - DNA, 20 bp, synthetic construct
  source 1..20: mol_type = other DNA
tacaggggctgatgcagaaa

SEQ ID NO: 226870 - DNA, 20 bp, synthetic construct
  source 1..20: mol_type = other DNA
ctacaggggctgatgcagaa

SEQ ID NO: 226871 - DNA, 20 bp, synthetic construct
  source 1..20: mol_type = other DNA
cctacaggggctgatgcaga

SEQ ID NO: 226872 - DNA, 20 bp, synthetic construct
  source 1..20: mol_type = other DNA
acctacaggggctgatgcag

SEQ ID NO: 226873 - DNA, 20 bp, synthetic construct
  source 1..20: mol_type = other DNA
gacctacaggggctgatgca

SEQ ID NO: 226874 - DNA, 20 bp, synthetic construct
  source 1..20: mol_type = other DNA
tgacctacaggggctgatgc

SEQ ID NO: 226875 - DNA, 20 bp, synthetic construct
  source 1..20: mol_type = other DNA
atgacctacaggggctgatg

SEQ ID NO: 226876 - DNA, 20 bp, synthetic construct
  source 1..20: mol_type = other DNA
gatgacctacaggggctgat

SEQ ID NO: 226877 - DNA, 20 bp, synthetic construct
  source 1..20: mol_type = other DNA
tgatgacctacaggggctga

SEQ ID NO: 226878 - DNA, 20 bp, synthetic construct
  source 1..20: mol_type = other DNA
ctgatgacctacaggggctg

SEQ ID NO: 226879 - DNA, 20 bp, synthetic construct
  source 1..20: mol_type = other DNA
gctgatgacctacaggggct

SEQ ID NO: 226880 - DNA, 20 bp, synthetic construct
  source 1..20: mol_type = other DNA
ggctgatgacctacaggggc

SEQ ID NO: 226881 - DNA, 20 bp, synthetic construct
  source 1..20: mol_type = other DNA
aggctgatgacctacagggg

SEQ ID NO: 226882 - DNA, 20 bp, synthetic construct
  source 1..20: mol_type = other DNA
aaggctgatgacctacaggg

SEQ ID NO: 226883 - DNA, 20 bp, synthetic construct
  source 1..20: mol_type = other DNA
gaaggctgatgacctacagg

SEQ ID NO: 226884 - DNA, 20 bp, synthetic construct
  source 1..20: mol_type = other DNA
agaaggctgatgacctacag

SEQ ID NO: 226885 - DNA, 20 bp, synthetic construct
  source 1..20: mol_type = other DNA
tagaaggctgatgacctaca

SEQ ID NO: 226886 - DNA, 20 bp, synthetic construct
  source 1..20: mol_type = other DNA
atagaaggctgatgacctac

SEQ ID NO: 226887 - DNA, 20 bp, synthetic construct
  source 1..20: mol_type = other DNA
aatagaaggctgatgaccta

SEQ ID NO: 226888 - DNA, 20 bp, synthetic construct
  source 1..20: mol_type = other DNA
caatagaaggctgatgacct

SEQ ID NO: 226889 - DNA, 20 bp, synthetic construct
  source 1..20: mol_type = other DNA
ccaatagaaggctgatgacc

SEQ ID NO: 226890 - DNA, 20 bp, synthetic construct
  source 1..20: mol_type = other DNA
accaatagaaggctgatgac

SEQ ID NO: 226891 - DNA, 20 bp, synthetic construct
  source 1..20: mol_type = other DNA
caccaatagaaggctgatga

SEQ ID NO: 226892 - DNA, 20 bp, synthetic construct
  source 1..20: mol_type = other DNA
gcaccaatagaaggctgatg

SEQ ID NO: 226893 - DNA, 20 bp, synthetic construct
  source 1..20: mol_type = other DNA
tgcaccaatagaaggctgat

SEQ ID NO: 226894 - DNA, 20 bp, synthetic construct
  source 1..20: mol_type = other DNA
atgcaccaatagaaggctga

SEQ ID NO: 226895 - DNA, 20 bp, synthetic construct
  source 1..20: mol_type = other DNA
gatgcaccaatagaaggctg

SEQ ID NO: 226896 - DNA, 20 bp, synthetic construct
  source 1..20: mol_type = other DNA
agatgcaccaatagaaggct

SEQ ID NO: 226897 - DNA, 20 bp, synthetic construct
  source 1..20: mol_type = other DNA
cagatgcaccaatagaaggc

SEQ ID NO: 226898 - DNA, 20 bp, synthetic construct
  source 1..20: mol_type = other DNA
tcagatgcaccaatagaagg

SEQ ID NO: 226899 - DNA, 20 bp, synthetic construct
  source 1..20: mol_type = other DNA
gtcagatgcaccaatagaag

SEQ ID NO: 226900 - DNA, 20 bp, synthetic construct
  source 1..20: mol_type = other DNA
agtcagatgcaccaatagaa

SEQ ID NO: 226901 - DNA, 20 bp, synthetic construct
  source 1..20: mol_type = other DNA
gagtcagatgcaccaataga

SEQ ID NO: 226902 - DNA, 20 bp, synthetic construct
  source 1..20: mol_type = other DNA
agagtcagatgcaccaatag

SEQ ID NO: 226903 - DNA, 20 bp, synthetic construct
  source 1..20: mol_type = other DNA
gagagtcagatgcaccaata

SEQ ID NO: 226904 - DNA, 20 bp, synthetic construct
  source 1..20: mol_type = other DNA
agagagtcagatgcaccaat

SEQ ID NO: 226905 - DNA, 20 bp, synthetic construct
  source 1..20: mol_type = other DNA
gagagagtcagatgcaccaa

SEQ ID NO: 226906 - DNA, 20 bp, synthetic construct
  source 1..20: mol_type = other DNA
agagagagtcagatgcacca

SEQ ID NO: 226907 - DNA, 20 bp, synthetic construct
  source 1..20: mol_type = other DNA
tagagagagtcagatgcacc

SEQ ID NO: 226908 - DNA, 20 bp, synthetic construct
  source 1..20: mol_type = other DNA
ctagagagagtcagatgcac

SEQ ID NO: 226909 - DNA, 20 bp, synthetic construct
  source 1..20: mol_type = other DNA
gctagagagagtcagatgca

SEQ ID NO: 226910 - DNA, 20 bp, synthetic construct
  source 1..20: mol_type = other DNA
ggctagagagagtcagatgc

SEQ ID NO: 226911 - DNA, 20 bp, synthetic construct
  source 1..20: mol_type = other DNA
gggctagagagagtcagatg

SEQ ID NO: 226912 - DNA, 20 bp, synthetic construct
  source 1..20: mol_type = other DNA
agggctagagagagtcagat

SEQ ID NO: 226913 - DNA, 20 bp, synthetic construct
  source 1..20: mol_type = other DNA
cagggctagagagagtcaga

SEQ ID NO: 226914 - DNA, 20 bp, synthetic construct
  source 1..20: mol_type = other DNA
gcagggctagagagagtcag

SEQ ID NO: 226915 - DNA, 20 bp, synthetic construct
  source 1..20: mol_type = other DNA
tgcagggctagagagagtca

SEQ ID NO: 226916 - DNA, 20 bp, synthetic construct
  source 1..20: mol_type = other DNA
ctgcagggctagagagagtc

SEQ ID NO: 226917 - DNA, 20 bp, synthetic construct
  source 1..20: mol_type = other DNA
cctgcagggctagagagagt

SEQ ID NO: 226918 - DNA, 20 bp, synthetic construct
  source 1..20: mol_type = other DNA
ccctgcagggctagagagag

SEQ ID NO: 226919 - DNA, 20 bp, synthetic construct
  source 1..20: mol_type = other DNA
tccctgcagggctagagaga

SEQ ID NO: 226920 - DNA, 20 bp, synthetic construct
  source 1..20: mol_type = other DNA
atccctgcagggctagagag

SEQ ID NO: 226921 - DNA, 20 bp, synthetic construct
  source 1..20: mol_type = other DNA
catccctgcagggctagaga

SEQ ID NO: 226922 - DNA, 20 bp, synthetic construct
  source 1..20: mol_type = other DNA
ccatccctgcagggctagag

SEQ ID NO: 226923 - DNA, 20 bp, synthetic construct
  source 1..20: mol_type = other DNA
accatccctgcagggctaga

SEQ ID NO: 226924 - DNA, 20 bp, synthetic construct
  source 1..20: mol_type = other DNA
caccatccctgcagggctag

SEQ ID NO: 226925 - DNA, 20 bp, synthetic construct
  source 1..20: mol_type = other DNA
ccaccatccctgcagggcta

SEQ ID NO: 226926 - DNA, 20 bp, synthetic construct
  source 1..20: mol_type = other DNA
tccaccatccctgcagggct

SEQ ID NO: 226927 - DNA, 20 bp, synthetic construct
  source 1..20: mol_type = other DNA
ctccaccatccctgcagggc

SEQ ID NO: 226928 - DNA, 20 bp, synthetic construct
  source 1..20: mol_type = other DNA
cctccaccatccctgcaggg

SEQ ID NO: 226929 - DNA, 20 bp, synthetic construct
  source 1..20: mol_type = other DNA
ccctccaccatccctgcagg

SEQ ID NO: 226930 - DNA, 20 bp, synthetic construct
  source 1..20: mol_type = other DNA
cccctccaccatccctgcag

SEQ ID NO: 226931 - DNA, 20 bp, synthetic construct
  source 1..20: mol_type = other DNA
ccccctccaccatccctgca

SEQ ID NO: 226932 - DNA, 20 bp, synthetic construct
  source 1..20: mol_type = other DNA
tccccctccaccatccctgc

SEQ ID NO: 226933 - DNA, 20 bp, synthetic construct
  source 1..20: mol_type = other DNA
ctccccctccaccatccctg

SEQ ID NO: 226934 - DNA, 20 bp, synthetic construct
  source 1..20: mol_type = other DNA
cctccccctccaccatccct

SEQ ID NO: 226935 - DNA, 20 bp, synthetic construct
  source 1..20: mol_type = other DNA
ccctccccctccaccatccc

SEQ ID NO: 226936 - DNA, 20 bp, synthetic construct
  source 1..20: mol_type = other DNA
cccctccccctccaccatcc

SEQ ID NO: 226937 - DNA, 20 bp, synthetic construct
  source 1..20: mol_type = other DNA
tcccctccccctccaccatc

SEQ ID NO: 226938 - DNA, 20 bp, synthetic construct
  source 1..20: mol_type = other DNA
ttcccctccccctccaccat

SEQ ID NO: 226939 - DNA, 20 bp, synthetic construct
  source 1..20: mol_type = other DNA
cttcccctccccctccacca

SEQ ID NO: 226940 - DNA, 20 bp, synthetic construct
  source 1..20: mol_type = other DNA
ccttcccctccccctccacc

SEQ ID NO: 226941 - DNA, 20 bp, synthetic construct
  source 1..20: mol_type = other DNA
tccttcccctccccctccac

SEQ ID NO: 226942 - DNA, 20 bp, synthetic construct
  source 1..20: mol_type = other DNA
ctccttcccctccccctcca

SEQ ID NO: 226943 - DNA, 20 bp, synthetic construct
  source 1..20: mol_type = other DNA
cctccttcccctccccctcc

SEQ ID NO: 226944 - DNA, 20 bp, synthetic construct
  source 1..20: mol_type = other DNA
ccctccttcccctccccctc

SEQ ID NO: 226945 - DNA, 20 bp, synthetic construct
  source 1..20: mol_type = other DNA
tccctccttcccctccccct

SEQ ID NO: 226946 - DNA, 20 bp, synthetic construct
  source 1..20: mol_type = other DNA
atccctccttcccctccccc

SEQ ID NO: 226947 - DNA, 20 bp, synthetic construct
  source 1..20: mol_type = other DNA
gatccctccttcccctcccc

SEQ ID NO: 226948 - DNA, 20 bp, synthetic construct
  source 1..20: mol_type = other DNA
agatccctccttcccctccc

SEQ ID NO: 226949 - DNA, 20 bp, synthetic construct
  source 1..20: mol_type = other DNA
aagatccctccttcccctcc

SEQ ID NO: 226950 - DNA, 20 bp, synthetic construct
  source 1..20: mol_type = other DNA
aaagatccctccttcccctc

SEQ ID NO: 226951 - DNA, 20 bp, synthetic construct
  source 1..20: mol_type = other DNA
taaagatccctccttcccct

SEQ ID NO: 226952 - DNA, 20 bp, synthetic construct
  source 1..20: mol_type = other DNA
ataaagatccctccttcccc

SEQ ID NO: 226953 - DNA, 20 bp, synthetic construct
  source 1..20: mol_type = other DNA
aataaagatccctccttccc

SEQ ID NO: 226954 - DNA, 20 bp, synthetic construct
  source 1..20: mol_type = other DNA
caataaagatccctccttcc

SEQ ID NO: 226955 - DNA, 20 bp, synthetic construct
  source 1..20: mol_type = other DNA
ccaataaagatccctccttc

SEQ ID NO: 226956 - DNA, 20 bp, synthetic construct
  source 1..20: mol_type = other DNA
tccaataaagatccctcctt

SEQ ID NO: 226957 - DNA, 20 bp, synthetic construct
  source 1..20: mol_type = other DNA
ttccaataaagatccctcct

SEQ ID NO: 226958 - DNA, 20 bp, synthetic construct
  source 1..20: mol_type = other DNA
tttccaataaagatccctcc

SEQ ID NO: 226959 - DNA, 20 bp, synthetic construct
  source 1..20: mol_type = other DNA
gtttccaataaagatccctc

SEQ ID NO: 226960 - DNA, 20 bp, synthetic construct
  source 1..20: mol_type = other DNA
ggtttccaataaagatccct

SEQ ID NO: 226961 - DNA, 20 bp, synthetic construct
  source 1..20: mol_type = other DNA
tggtttccaataaagatccc

SEQ ID NO: 226962 - DNA, 20 bp, synthetic construct
  source 1..20: mol_type = other DNA
ctggtttccaataaagatcc

SEQ ID NO: 226963 - DNA, 20 bp, synthetic construct
  source 1..20: mol_type = other DNA
cctggtttccaataaagatc

SEQ ID NO: 226964 - DNA, 20 bp, synthetic construct
  source 1..20: mol_type = other DNA
tcctggtttccaataaagat

SEQ ID NO: 226965 - DNA, 20 bp, synthetic construct
  source 1..20: mol_type = other DNA
gtcctggtttccaataaaga

SEQ ID NO: 226966 - DNA, 20 bp, synthetic construct
  source 1..20: mol_type = other DNA
tgtcctggtttccaataaag

SEQ ID NO: 226967 - DNA, 20 bp, synthetic construct
  source 1..20: mol_type = other DNA
ctgtcctggtttccaataaa

SEQ ID NO: 226968 - DNA, 20 bp, synthetic construct
  source 1..20: mol_type = other DNA
actgtcctggtttccaataa

SEQ ID NO: 226969 - DNA, 20 bp, synthetic construct
  source 1..20: mol_type = other DNA
cactgtcctggtttccaata

SEQ ID NO: 226970 - DNA, 20 bp, synthetic construct
  source 1..20: mol_type = other DNA
tcactgtcctggtttccaat

SEQ ID NO: 226971 - DNA, 20 bp, synthetic construct
  source 1..20: mol_type = other DNA
ctcactgtcctggtttccaa

SEQ ID NO: 226972 - DNA, 20 bp, synthetic construct
  source 1..20: mol_type = other DNA
tctcactgtcctggtttcca

SEQ ID NO: 226973 - DNA, 20 bp, synthetic construct
  source 1..20: mol_type = other DNA
gtctcactgtcctggtttcc

SEQ ID NO: 226974 - DNA, 20 bp, synthetic construct
  source 1..20: mol_type = other DNA
agtctcactgtcctggtttc

SEQ ID NO: 226975 - DNA, 20 bp, synthetic construct
  source 1..20: mol_type = other DNA
gagtctcactgtcctggttt

SEQ ID NO: 226976 - DNA, 20 bp, synthetic construct
  source 1..20: mol_type = other DNA
tgagtctcactgtcctggtt

SEQ ID NO: 226977 - DNA, 20 bp, synthetic construct
  source 1..20: mol_type = other DNA
atgagtctcactgtcctggt

SEQ ID NO: 226978 - DNA, 20 bp, synthetic construct
  source 1..20: mol_type = other DNA
aatgagtctcactgtcctgg

SEQ ID NO: 226979 - DNA, 20 bp, synthetic construct
  source 1..20: mol_type = other DNA
caatgagtctcactgtcctg

SEQ ID NO: 226980 - DNA, 20 bp, synthetic construct
  source 1..20: mol_type = other DNA
gcaatgagtctcactgtcct

SEQ ID NO: 226981 - DNA, 20 bp, synthetic construct
  source 1..20: mol_type = other DNA
ggcaatgagtctcactgtcc

SEQ ID NO: 226982 - DNA, 20 bp, synthetic construct
  source 1..20: mol_type = other DNA
gggcaatgagtctcactgtc

SEQ ID NO: 226983 - DNA, 20 bp, synthetic construct
  source 1..20: mol_type = other DNA
agggcaatgagtctcactgt

SEQ ID NO: 226984 - DNA, 20 bp, synthetic construct
  source 1..20: mol_type = other DNA
cagggcaatgagtctcactg

SEQ ID NO: 226985 - DNA, 20 bp, synthetic construct
  source 1..20: mol_type = other DNA
acagggcaatgagtctcact

SEQ ID NO: 226986 - DNA, 20 bp, synthetic construct
  source 1..20: mol_type = other DNA
gacagggcaatgagtctcac

SEQ ID NO: 226987 - DNA, 20 bp, synthetic construct
  source 1..20: mol_type = other DNA
tgacagggcaatgagtctca

SEQ ID NO: 226988 - DNA, 20 bp, synthetic construct
  source 1..20: mol_type = other DNA
atgacagggcaatgagtctc

SEQ ID NO: 226989 - DNA, 20 bp, synthetic construct
  source 1..20: mol_type = other DNA
gatgacagggcaatgagtct

SEQ ID NO: 226990 - DNA, 20 bp, synthetic construct
  source 1..20: mol_type = other DNA
agatgacagggcaatgagtc

SEQ ID NO: 226991 - DNA, 20 bp, synthetic construct
  source 1..20: mol_type = other DNA
cagatgacagggcaatgagt

SEQ ID NO: 226992 - DNA, 20 bp, synthetic construct
  source 1..20: mol_type = other DNA
gcagatgacagggcaatgag

SEQ ID NO: 226993 - DNA, 20 bp, synthetic construct
  source 1..20: mol_type = other DNA
agcagatgacagggcaatga

SEQ ID NO: 226994 - DNA, 20 bp, synthetic construct
  source 1..20: mol_type = other DNA
gagcagatgacagggcaatg

SEQ ID NO: 226995 - DNA, 20 bp, synthetic construct
  source 1..20: mol_type = other DNA
agagcagatgacagggcaat

SEQ ID NO: 226996 - DNA, 20 bp, synthetic construct
  source 1..20: mol_type = other DNA
cagagcagatgacagggcaa

SEQ ID NO: 226997 - DNA, 20 bp, synthetic construct
  source 1..20: mol_type = other DNA
acagagcagatgacagggca

SEQ ID NO: 226998 - DNA, 20 bp, synthetic construct
  source 1..20: mol_type = other DNA
cacagagcagatgacagggc

SEQ ID NO: 226999 - DNA, 20 bp, synthetic construct
  source 1..20: mol_type = other DNA
ccacagagcagatgacaggg

SEQ ID NO: 227000 - DNA, 20 bp, synthetic construct
  source 1..20: mol_type = other DNA
accacagagcagatgacagg

SEQ ID NO: 227001 - DNA, 20 bp, synthetic construct
  source 1..20: mol_type = other DNA
caccacagagcagatgacag

SEQ ID NO: 227002 - DNA, 20 bp, synthetic construct
  source 1..20: mol_type = other DNA
gcaccacagagcagatgaca

SEQ ID NO: 227003 - DNA, 20 bp, synthetic construct
  source 1..20: mol_type = other DNA
agcaccacagagcagatgac

SEQ ID NO: 227004 - DNA, 20 bp, synthetic construct
  source 1..20: mol_type = other DNA
cagcaccacagagcagatga

SEQ ID NO: 227005 - DNA, 20 bp, synthetic construct
  source 1..20: mol_type = other DNA
tcagcaccacagagcagatg

SEQ ID NO: 227006 - DNA, 20 bp, synthetic construct
  source 1..20: mol_type = other DNA
ttcagcaccacagagcagat

SEQ ID NO: 227007 - DNA, 20 bp, synthetic construct
  source 1..20: mol_type = other DNA
attcagcaccacagagcaga

SEQ ID NO: 227008 - DNA, 20 bp, synthetic construct
  source 1..20: mol_type = other DNA
cattcagcaccacagagcag

SEQ ID NO: 227009 - DNA, 20 bp, synthetic construct
  source 1..20: mol_type = other DNA
tcattcagcaccacagagca

SEQ ID NO: 227010 - DNA, 20 bp, synthetic construct
  source 1..20: mol_type = other DNA
ctcattcagcaccacagagc

SEQ ID NO: 227011 - DNA, 20 bp, synthetic construct
  source 1..20: mol_type = other DNA
cctcattcagcaccacagag

SEQ ID NO: 227012 - DNA, 20 bp, synthetic construct
  source 1..20: mol_type = other DNA
gcctcattcagcaccacaga

SEQ ID NO: 227013 - DNA, 20 bp, synthetic construct
  source 1..20: mol_type = other DNA
tgcctcattcagcaccacag

SEQ ID NO: 227014 - DNA, 20 bp, synthetic construct
  source 1..20: mol_type = other DNA
ctgcctcattcagcaccaca

SEQ ID NO: 227015 - DNA, 20 bp, synthetic construct
  source 1..20: mol_type = other DNA
gctgcctcattcagcaccac

SEQ ID NO: 227016 - DNA, 20 bp, synthetic construct
  source 1..20: mol_type = other DNA
ggctgcctcattcagcacca

SEQ ID NO: 227017 - DNA, 20 bp, synthetic construct
  source 1..20: mol_type = other DNA
gggctgcctcattcagcacc

SEQ ID NO: 227018 - DNA, 20 bp, synthetic construct
  source 1..20: mol_type = other DNA
tgggctgcctcattcagcac

SEQ ID NO: 227019 - DNA, 20 bp, synthetic construct
  source 1..20: mol_type = other DNA
ttgggctgcctcattcagca

SEQ ID NO: 227020 - DNA, 20 bp, synthetic construct
  source 1..20: mol_type = other DNA
gttgggctgcctcattcagc

SEQ ID NO: 227021 - DNA, 20 bp, synthetic construct
  source 1..20: mol_type = other DNA
tgttgggctgcctcattcag

SEQ ID NO: 227022 - DNA, 20 bp, synthetic construct
  source 1..20: mol_type = other DNA
ctgttgggctgcctcattca

SEQ ID NO: 227023 - DNA, 20 bp, synthetic construct
  source 1..20: mol_type = other DNA
tctgttgggctgcctcattc

SEQ ID NO: 227024 - DNA, 20 bp, synthetic construct
  source 1..20: mol_type = other DNA
ctctgttgggctgcctcatt

SEQ ID NO: 227025 - DNA, 20 bp, synthetic construct
  source 1..20: mol_type = other DNA
tctctgttgggctgcctcat

SEQ ID NO: 227026 - DNA, 20 bp, synthetic construct
  source 1..20: mol_type = other DNA
ttctctgttgggctgcctca

SEQ ID NO: 227027 - DNA, 20 bp, synthetic construct
  source 1..20: mol_type = other DNA
tttctctgttgggctgcctc

SEQ ID NO: 227028 - DNA, 20 bp, synthetic construct
  source 1..20: mol_type = other DNA
atttctctgttgggctgcct

SEQ ID NO: 227029 - DNA, 20 bp, synthetic construct
  source 1..20: mol_type = other DNA
tatttctctgttgggctgcc

SEQ ID NO: 227030 - DNA, 20 bp, synthetic construct
  source 1..20: mol_type = other DNA
gtatttctctgttgggctgc

SEQ ID NO: 227031 - DNA, 20 bp, synthetic construct
  source 1..20: mol_type = other DNA
ggtatttctctgttgggctg

SEQ ID NO: 227032 - DNA, 20 bp, synthetic construct
  source 1..20: mol_type = other DNA
gggtatttctctgttgggct

SEQ ID NO: 227033 - DNA, 20 bp, synthetic construct
  source 1..20: mol_type = other DNA
agggtatttctctgttgggc

SEQ ID NO: 227034 - DNA, 20 bp, synthetic construct
  source 1..20: mol_type = other DNA
cagggtatttctctgttggg

SEQ ID NO: 227035 - DNA, 20 bp, synthetic construct
  source 1..20: mol_type = other DNA
tcagggtatttctctgttgg

SEQ ID NO: 227036 - DNA, 20 bp, synthetic construct
  source 1..20: mol_type = other DNA
ctcagggtatttctctgttg

SEQ ID NO: 227037 - DNA, 20 bp, synthetic construct
  source 1..20: mol_type = other DNA
gctcagggtatttctctgtt

SEQ ID NO: 227038 - DNA, 20 bp, synthetic construct
  source 1..20: mol_type = other DNA
cgctcagggtatttctctgt

SEQ ID NO: 227039 - DNA, 20 bp, synthetic construct
  source 1..20: mol_type = other DNA
tcgctcagggtatttctctg

SEQ ID NO: 227040 - DNA, 20 bp, synthetic construct
  source 1..20: mol_type = other DNA
ctcgctcagggtatttctct

SEQ ID NO: 227041 - DNA, 20 bp, synthetic construct
  source 1..20: mol_type = other DNA
gctcgctcagggtatttctc

SEQ ID NO: 227042 - DNA, 20 bp, synthetic construct
  source 1..20: mol_type = other DNA
tgctcgctcagggtatttct

SEQ ID NO: 227043 - DNA, 20 bp, synthetic construct
  source 1..20: mol_type = other DNA
atgctcgctcagggtatttc

SEQ ID NO: 227044 - DNA, 20 bp, synthetic construct
  source 1..20: mol_type = other DNA
gatgctcgctcagggtattt

SEQ ID NO: 227045 - DNA, 20 bp, synthetic construct
  source 1..20: mol_type = other DNA
ggatgctcgctcagggtatt

SEQ ID NO: 227046 - DNA, 20 bp, synthetic construct
  source 1..20: mol_type = other DNA
gggatgctcgctcagggtat

SEQ ID NO: 227047 - DNA, 20 bp, synthetic construct
  source 1..20: mol_type = other DNA
ggggatgctcgctcagggta

SEQ ID NO: 227048 - DNA, 20 bp, synthetic construct
  source 1..20: mol_type = other DNA
tggggatgctcgctcagggt

SEQ ID NO: 227049 - DNA, 20 bp, synthetic construct
  source 1..20: mol_type = other DNA
ctggggatgctcgctcaggg

SEQ ID NO: 227050 - DNA, 20 bp, synthetic construct
  source 1..20: mol_type = other DNA
gctggggatgctcgctcagg

SEQ ID NO: 227051 - DNA, 20 bp, synthetic construct
  source 1..20: mol_type = other DNA
ggctggggatgctcgctcag

SEQ ID NO: 227052 - DNA, 20 bp, synthetic construct
  source 1..20: mol_type = other DNA
aggctggggatgctcgctca

SEQ ID NO: 227053 - DNA, 20 bp, synthetic construct
  source 1..20: mol_type = other DNA
gaggctggggatgctcgctc

SEQ ID NO: 227054 - DNA, 20 bp, synthetic construct
  source 1..20: mol_type = other DNA
ggaggctggggatgctcgct

SEQ ID NO: 227055 - DNA, 20 bp, synthetic construct
  source 1..20: mol_type = other DNA
tggaggctggggatgctcgc

SEQ ID NO: 227056 - DNA, 20 bp, synthetic construct
  source 1..20: mol_type = other DNA
ttggaggctggggatgctcg

SEQ ID NO: 227057 - DNA, 20 bp, synthetic construct
  source 1..20: mol_type = other DNA
tttggaggctggggatgctc

SEQ ID NO: 227058 - DNA, 20 bp, synthetic construct
  source 1..20: mol_type = other DNA
ttttggaggctggggatgct

SEQ ID NO: 227059 - DNA, 20 bp, synthetic construct
  source 1..20: mol_type = other DNA
gttttggaggctggggatgc

SEQ ID NO: 227060 - DNA, 20 bp, synthetic construct
  source 1..20: mol_type = other DNA
tgttttggaggctggggatg

SEQ ID NO: 227061 - DNA, 20 bp, synthetic construct
  source 1..20: mol_type = other DNA
ctgttttggaggctggggat

SEQ ID NO: 227062 - DNA, 20 bp, synthetic construct
  source 1..20: mol_type = other DNA
actgttttggaggctgggga

SEQ ID NO: 227063 - DNA, 20 bp, synthetic construct
  source 1..20: mol_type = other DNA
cactgttttggaggctgggg

SEQ ID NO: 227064 - DNA, 20 bp, synthetic construct
  source 1..20: mol_type = other DNA
ccactgttttggaggctggg

SEQ ID NO: 227065 - DNA, 20 bp, synthetic construct
  source 1..20: mol_type = other DNA
gccactgttttggaggctgg

SEQ ID NO: 227066 - DNA, 20 bp, synthetic construct
  source 1..20: mol_type = other DNA
cgccactgttttggaggctg

SEQ ID NO: 227067 - DNA, 20 bp, synthetic construct
  source 1..20: mol_type = other DNA
gcgccactgttttggaggct

SEQ ID NO: 227068 - DNA, 20 bp, synthetic construct
  source 1..20: mol_type = other DNA
tgcgccactgttttggaggc

SEQ ID NO: 227069 - DNA, 20 bp, synthetic construct
  source 1..20: mol_type = other DNA
atgcgccactgttttggagg

SEQ ID NO: 227070 - DNA, 20 bp, synthetic construct
  source 1..20: mol_type = other DNA
aatgcgccactgttttggag

SEQ ID NO: 227071 - DNA, 20 bp, synthetic construct
  source 1..20: mol_type = other DNA
caatgcgccactgttttgga

SEQ ID NO: 227072 - DNA, 20 bp, synthetic construct
  source 1..20: mol_type = other DNA
gcaatgcgccactgttttgg

SEQ ID NO: 227073 - DNA, 20 bp, synthetic construct
  source 1..20: mol_type = other DNA
ggcaatgcgccactgttttg

SEQ ID NO: 227074 - DNA, 20 bp, synthetic construct
  source 1..20: mol_type = other DNA
gggcaatgcgccactgtttt

SEQ ID NO: 227075 - DNA, 20 bp, synthetic construct
  source 1..20: mol_type = other DNA
agggcaatgcgccactgttt

SEQ ID NO: 227076 - DNA, 20 bp, synthetic construct
  source 1..20: mol_type = other DNA
cagggcaatgcgccactgtt

SEQ ID NO: 227077 - DNA, 20 bp, synthetic construct
  source 1..20: mol_type = other DNA
tcagggcaatgcgccactgt

SEQ ID NO: 227078 - DNA, 20 bp, synthetic construct
  source 1..20: mol_type = other DNA
ctcagggcaatgcgccactg

SEQ ID NO: 227079 - DNA, 20 bp, synthetic construct
  source 1..20: mol_type = other DNA
actcagggcaatgcgccact

SEQ ID NO: 227080 - DNA, 20 bp, synthetic construct
  source 1..20: mol_type = other DNA
gactcagggcaatgcgccac

SEQ ID NO: 227081 - DNA, 20 bp, synthetic construct
  source 1..20: mol_type = other DNA
ggactcagggcaatgcgcca

SEQ ID NO: 227082 - DNA, 20 bp, synthetic construct
  source 1..20: mol_type = other DNA
aggactcagggcaatgcgcc

SEQ ID NO: 227083 - DNA, 20 bp, synthetic construct
  source 1..20: mol_type = other DNA
caggactcagggcaatgcgc

SEQ ID NO: 227084 - DNA, 20 bp, synthetic construct
  source 1..20: mol_type = other DNA
ccaggactcagggcaatgcg

SEQ ID NO: 227085 - DNA, 20 bp, synthetic construct
  source 1..20: mol_type = other DNA
cccaggactcagggcaatgc

SEQ ID NO: 227086 - DNA, 20 bp, synthetic construct
  source 1..20: mol_type = other DNA
tcccaggactcagggcaatg

SEQ ID NO: 227087 - DNA, 20 bp, synthetic construct
  source 1..20: mol_type = other DNA
ttcccaggactcagggcaat

SEQ ID NO: 227088 - DNA, 20 bp, synthetic construct
  source 1..20: mol_type = other DNA
attcccaggactcagggcaa

SEQ ID NO: 227089 - DNA, 20 bp, synthetic construct
  source 1..20: mol_type = other DNA
cattcccaggactcagggca

SEQ ID NO: 227090 - DNA, 20 bp, synthetic construct
  source 1..20: mol_type = other DNA
tcattcccaggactcagggc

SEQ ID NO: 227091 - DNA, 20 bp, synthetic construct
  source 1..20: mol_type = other DNA
gtcattcccaggactcaggg

SEQ ID NO: 227092 - DNA, 20 bp, synthetic construct
  source 1..20: mol_type = other DNA
ggtcattcccaggactcagg

SEQ ID NO: 227093 - DNA, 20 bp, synthetic construct
  source 1..20: mol_type = other DNA
aggtcattcccaggactcag

SEQ ID NO: 227094 - DNA, 20 bp, synthetic construct
  source 1..20: mol_type = other DNA
aaggtcattcccaggactca

SEQ ID NO: 227095 - DNA, 20 bp, synthetic construct
  source 1..20: mol_type = other DNA
aaaggtcattcccaggactc

SEQ ID NO: 227096 - DNA, 20 bp, synthetic construct
  source 1..20: mol_type = other DNA
caaaggtcattcccaggact

SEQ ID NO: 227097 - DNA, 20 bp, synthetic construct
  source 1..20: mol_type = other DNA
tcaaaggtcattcccaggac

SEQ ID NO: 227098 - DNA, 20 bp, synthetic construct
  source 1..20: mol_type = other DNA
atcaaaggtcattcccagga

SEQ ID NO: 227099 - DNA, 20 bp, synthetic construct
  source 1..20: mol_type = other DNA
aatcaaaggtcattcccagg

SEQ ID NO: 227100 - DNA, 20 bp, synthetic construct
  source 1..20: mol_type = other DNA
gaatcaaaggtcattcccag

SEQ ID NO: 227101 - DNA, 20 bp, synthetic construct
  source 1..20: mol_type = other DNA
agaatcaaaggtcattccca

SEQ ID NO: 227102 - DNA, 20 bp, synthetic construct
  source 1..20: mol_type = other DNA
gagaatcaaaggtcattccc

SEQ ID NO: 227103 - DNA, 20 bp, synthetic construct
  source 1..20: mol_type = other DNA
ggagaatcaaaggtcattcc

SEQ ID NO: 227104 - DNA, 20 bp, synthetic construct
  source 1..20: mol_type = other DNA
aggagaatcaaaggtcattc

SEQ ID NO: 227105 - DNA, 20 bp, synthetic construct
  source 1..20: mol_type = other DNA
caggagaatcaaaggtcatt

SEQ ID NO: 227106 - DNA, 20 bp, synthetic construct
  source 1..20: mol_type = other DNA
gcaggagaatcaaaggtcat

SEQ ID NO: 227107 - DNA, 20 bp, synthetic construct
  source 1..20: mol_type = other DNA
agcaggagaatcaaaggtca

SEQ ID NO: 227108 - DNA, 20 bp, synthetic construct
  source 1..20: mol_type = other DNA
gagcaggagaatcaaaggtc

SEQ ID NO: 227109 - DNA, 20 bp, synthetic construct
  source 1..20: mol_type = other DNA
ggagcaggagaatcaaaggt

SEQ ID NO: 227110 - DNA, 20 bp, synthetic construct
  source 1..20: mol_type = other DNA
aggagcaggagaatcaaagg

SEQ ID NO: 227111 - DNA, 20 bp, synthetic construct
  source 1..20: mol_type = other DNA
caggagcaggagaatcaaag

SEQ ID NO: 227112 - DNA, 20 bp, synthetic construct
  source 1..20: mol_type = other DNA
tcaggagcaggagaatcaaa

SEQ ID NO: 227113 - DNA, 20 bp, synthetic construct
  source 1..20: mol_type = other DNA
gtcaggagcaggagaatcaa

SEQ ID NO: 227114 - DNA, 20 bp, synthetic construct
  source 1..20: mol_type = other DNA
agtcaggagcaggagaatca

SEQ ID NO: 227115 - DNA, 20 bp, synthetic construct
  source 1..20: mol_type = other DNA
aagtcaggagcaggagaatc

SEQ ID NO: 227116 - DNA, 20 bp, synthetic construct
  source 1..20: mol_type = other DNA
caagtcaggagcaggagaat

SEQ ID NO: 227117 - DNA, 20 bp, synthetic construct
  source 1..20: mol_type = other DNA
ccaagtcaggagcaggagaa

SEQ ID NO: 227118 - DNA, 20 bp, synthetic construct
  source 1..20: mol_type = other DNA
tccaagtcaggagcaggaga

SEQ ID NO: 227119 - DNA, 20 bp, synthetic construct
  source 1..20: mol_type = other DNA
ttccaagtcaggagcaggag

SEQ ID NO: 227120 - DNA, 20 bp, synthetic construct
  source 1..20: mol_type = other DNA
gttccaagtcaggagcagga

SEQ ID NO: 227121 - DNA, 20 bp, synthetic construct
  source 1..20: mol_type = other DNA
ggttccaagtcaggagcagg

SEQ ID NO: 227122 - DNA, 20 bp, synthetic construct
  source 1..20: mol_type = other DNA
gggttccaagtcaggagcag

SEQ ID NO: 227123 - DNA, 20 bp, synthetic construct
  source 1..20: mol_type = other DNA
tgggttccaagtcaggagca

SEQ ID NO: 227124 - DNA, 20 bp, synthetic construct
  source 1..20: mol_type = other DNA
atgggttccaagtcaggagc

SEQ ID NO: 227125 - DNA, 20 bp, synthetic construct
  source 1..20: mol_type = other DNA
catgggttccaagtcaggag

SEQ ID NO: 227126 - DNA, 20 bp, synthetic construct
  source 1..20: mol_type = other DNA
ccatgggttccaagtcagga

SEQ ID NO: 227127 - DNA, 20 bp, synthetic construct
  source 1..20: mol_type = other DNA
tccatgggttccaagtcagg

SEQ ID NO: 227128 - DNA, 20 bp, synthetic construct
  source 1..20: mol_type = other DNA
ttccatgggttccaagtcag

SEQ ID NO: 227129 - DNA, 20 bp, synthetic construct
  source 1..20: mol_type = other DNA
tttccatgggttccaagtca

SEQ ID NO: 227130 - DNA, 20 bp, synthetic construct
  source 1..20: mol_type = other DNA
gtttccatgggttccaagtc

SEQ ID NO: 227131 - DNA, 20 bp, synthetic construct
  source 1..20: mol_type = other DNA
ggtttccatgggttccaagt

SEQ ID NO: 227132 - DNA, 20 bp, synthetic construct
  source 1..20: mol_type = other DNA
aggtttccatgggttccaag

SEQ ID NO: 227133 - DNA, 20 bp, synthetic construct
  source 1..20: mol_type = other DNA
gaggtttccatgggttccaa

SEQ ID NO: 227134 - DNA, 20 bp, synthetic construct
  source 1..20: mol_type = other DNA
agaggtttccatgggttcca

SEQ ID NO: 227135 - DNA, 20 bp, synthetic construct
  source 1..20: mol_type = other DNA
tagaggtttccatgggttcc

SEQ ID NO: 227136 - DNA, 20 bp, synthetic construct
  source 1..20: mol_type = other DNA
ctagaggtttccatgggttc

SEQ ID NO: 227137 - DNA, 20 bp, synthetic construct
  source 1..20: mol_type = other DNA
tctagaggtttccatgggtt

SEQ ID NO: 227138 - DNA, 20 bp, synthetic construct
  source 1..20: mol_type = other DNA
ttctagaggtttccatgggt

SEQ ID NO: 227139 - DNA, 20 bp, synthetic construct
  source 1..20: mol_type = other DNA
cttctagaggtttccatggg

SEQ ID NO: 227140 - DNA, 20 bp, synthetic construct
  source 1..20: mol_type = other DNA
gcttctagaggtttccatgg

SEQ ID NO: 227141 - DNA, 20 bp, synthetic construct
  source 1..20: mol_type = other DNA
tgcttctagaggtttccatg

SEQ ID NO: 227142 - DNA, 20 bp, synthetic construct
  source 1..20: mol_type = other DNA
ctgcttctagaggtttccat

SEQ ID NO: 227143 - DNA, 20 bp, synthetic construct
  source 1..20: mol_type = other DNA
gctgcttctagaggtttcca

SEQ ID NO: 227144 - DNA, 20 bp, synthetic construct
  source 1..20: mol_type = other DNA
agctgcttctagaggtttcc

SEQ ID NO: 227145 - DNA, 20 bp, synthetic construct
  source 1..20: mol_type = other DNA
cagctgcttctagaggtttc

SEQ ID NO: 227146 - DNA, 20 bp, synthetic construct
  source 1..20: mol_type = other DNA
tcagctgcttctagaggttt

SEQ ID NO: 227147 - DNA, 20 bp, synthetic construct
  source 1..20: mol_type = other DNA
ctcagctgcttctagaggtt

SEQ ID NO: 227148 - DNA, 20 bp, synthetic construct
  source 1..20: mol_type = other DNA
cctcagctgcttctagaggt

SEQ ID NO: 227149 - DNA, 20 bp, synthetic construct
  source 1..20: mol_type = other DNA
tcctcagctgcttctagagg

SEQ ID NO: 227150 - DNA, 20 bp, synthetic construct
  source 1..20: mol_type = other DNA
ttcctcagctgcttctagag

SEQ ID NO: 227151 - DNA, 20 bp, synthetic construct
  source 1..20: mol_type = other DNA
tttcctcagctgcttctaga

SEQ ID NO: 227152 - DNA, 20 bp, synthetic construct
  source 1..20: mol_type = other DNA
ttttcctcagctgcttctag

SEQ ID NO: 227153 - DNA, 20 bp, synthetic construct
  source 1..20: mol_type = other DNA
gttttcctcagctgcttcta

SEQ ID NO: 227154 - DNA, 20 bp, synthetic construct
  source 1..20: mol_type = other DNA
ggttttcctcagctgcttct

SEQ ID NO: 227155 - DNA, 20 bp, synthetic construct
  source 1..20: mol_type = other DNA
gggttttcctcagctgcttc

SEQ ID NO: 227156 - DNA, 20 bp, synthetic construct
  source 1..20: mol_type = other DNA
tgggttttcctcagctgctt

SEQ ID NO: 227157 - DNA, 20 bp, synthetic construct
  source 1..20: mol_type = other DNA
ttgggttttcctcagctgct

SEQ ID NO: 227158 - DNA, 20 bp, synthetic construct
  source 1..20: mol_type = other DNA
gttgggttttcctcagctgc

SEQ ID NO: 227159 - DNA, 20 bp, synthetic construct
  source 1..20: mol_type = other DNA
tgttgggttttcctcagctg

SEQ ID NO: 227160 - DNA, 20 bp, synthetic construct
  source 1..20: mol_type = other DNA
atgttgggttttcctcagct

SEQ ID NO: 227161 - DNA, 20 bp, synthetic construct
  source 1..20: mol_type = other DNA
catgttgggttttcctcagc

SEQ ID NO: 227162 - DNA, 20 bp, synthetic construct
  source 1..20: mol_type = other DNA
tcatgttgggttttcctcag

SEQ ID NO: 227163 - DNA, 20 bp, synthetic construct
  source 1..20: mol_type = other DNA
ttcatgttgggttttcctca

SEQ ID NO: 227164 - DNA, 20 bp, synthetic construct
  source 1..20: mol_type = other DNA
tttcatgttgggttttcctc

SEQ ID NO: 227165 - DNA, 20 bp, synthetic construct
  source 1..20: mol_type = other DNA
ttttcatgttgggttttcct

SEQ ID NO: 227166 - DNA, 20 bp, synthetic construct
  source 1..20: mol_type = other DNA
cttttcatgttgggttttcc

SEQ ID NO: 227167 - DNA, 20 bp, synthetic construct
  source 1..20: mol_type = other DNA
gcttttcatgttgggttttc

SEQ ID NO: 227168 - DNA, 20 bp, synthetic construct
  source 1..20: mol_type = other DNA
tgcttttcatgttgggtttt

SEQ ID NO: 227169 - DNA, 20 bp, synthetic construct
  source 1..20: mol_type = other DNA
ctgcttttcatgttgggttt

SEQ ID NO: 227170 - DNA, 20 bp, synthetic construct
  source 1..20: mol_type = other DNA
tctgcttttcatgttgggtt

SEQ ID NO: 227171 - DNA, 20 bp, synthetic construct
  source 1..20: mol_type = other DNA
ttctgcttttcatgttgggt

SEQ ID NO: 227172 - DNA, 20 bp, synthetic construct
  source 1..20: mol_type = other DNA
gttctgcttttcatgttggg

SEQ ID NO: 227173 - DNA, 20 bp, synthetic construct
  source 1..20: mol_type = other DNA
agttctgcttttcatgttgg

SEQ ID NO: 227174 - DNA, 20 bp, synthetic construct
  source 1..20: mol_type = other DNA
gagttctgcttttcatgttg

SEQ ID NO: 227175 - DNA, 20 bp, synthetic construct
  source 1..20: mol_type = other DNA
ggagttctgcttttcatgtt

SEQ ID NO: 227176 - DNA, 20 bp, synthetic construct
  source 1..20: mol_type = other DNA
tggagttctgcttttcatgt

SEQ ID NO: 227177 - DNA, 20 bp, synthetic construct
  source 1..20: mol_type = other DNA
gtggagttctgcttttcatg

SEQ ID NO: 227178 - DNA, 20 bp, synthetic construct
  source 1..20: mol_type = other DNA
tgtggagttctgcttttcat

SEQ ID NO: 227179 - DNA, 20 bp, synthetic construct
  source 1..20: mol_type = other DNA
gtgtggagttctgcttttca

SEQ ID NO: 227180 - DNA, 20 bp, synthetic construct
  source 1..20: mol_type = other DNA
agtgtggagttctgcttttc

SEQ ID NO: 227181 - DNA, 20 bp, synthetic construct
  source 1..20: mol_type = other DNA
cagtgtggagttctgctttt

SEQ ID NO: 227182 - DNA, 20 bp, synthetic construct
  source 1..20: mol_type = other DNA
tcagtgtggagttctgcttt

SEQ ID NO: 227183 - DNA, 20 bp, synthetic construct
  source 1..20: mol_type = other DNA
ctcagtgtggagttctgctt

SEQ ID NO: 227184 - DNA, 20 bp, synthetic construct
  source 1..20: mol_type = other DNA
tctcagtgtggagttctgct

SEQ ID NO: 227185 - DNA, 20 bp, synthetic construct
  source 1..20: mol_type = other DNA
ttctcagtgtggagttctgc

SEQ ID NO: 227186 - DNA, 20 bp, synthetic construct
  source 1..20: mol_type = other DNA
attctcagtgtggagttctg

SEQ ID NO: 227187 - DNA, 20 bp, synthetic construct
  source 1..20: mol_type = other DNA
tattctcagtgtggagttct

SEQ ID NO: 227188 - DNA, 20 bp, synthetic construct
  source 1..20: mol_type = other DNA
atattctcagtgtggagttc

SEQ ID NO: 227189 - DNA, 20 bp, synthetic construct
  source 1..20: mol_type = other DNA
tatattctcagtgtggagtt

SEQ ID NO: 227190 - DNA, 20 bp, synthetic construct
  source 1..20: mol_type = other DNA
ctatattctcagtgtggagt

SEQ ID NO: 227191 - DNA, 20 bp, synthetic construct
  source 1..20: mol_type = other DNA
cctatattctcagtgtggag

SEQ ID NO: 227192 - DNA, 20 bp, synthetic construct
  source 1..20: mol_type = other DNA
tcctatattctcagtgtgga

SEQ ID NO: 227193 - DNA, 20 bp, synthetic construct
  source 1..20: mol_type = other DNA
ctcctatattctcagtgtgg

SEQ ID NO: 227194 - DNA, 20 bp, synthetic construct
  source 1..20: mol_type = other DNA
cctcctatattctcagtgtg

SEQ ID NO: 227195 - DNA, 20 bp, synthetic construct
  source 1..20: mol_type = other DNA
acctcctatattctcagtgt

SEQ ID NO: 227196 - DNA, 20 bp, synthetic construct
  source 1..20: mol_type = other DNA
cacctcctatattctcagtg

SEQ ID NO: 227197 - DNA, 20 bp, synthetic construct
  source 1..20: mol_type = other DNA
tcacctcctatattctcagt

SEQ ID NO: 227198 - DNA, 20 bp, synthetic construct
  source 1..20: mol_type = other DNA
atcacctcctatattctcag

SEQ ID NO: 227199 - DNA, 20 bp, synthetic construct
  source 1..20: mol_type = other DNA
gatcacctcctatattctca

SEQ ID NO: 227200 - DNA, 20 bp, synthetic construct
  source 1..20: mol_type = other DNA
cgatcacctcctatattctc

SEQ ID NO: 227201 - DNA, 20 bp, synthetic construct
  source 1..20: mol_type = other DNA
ccgatcacctcctatattct

SEQ ID NO: 227202 - DNA, 20 bp, synthetic construct
  source 1..20: mol_type = other DNA
tccgatcacctcctatattc

SEQ ID NO: 227203 - DNA, 20 bp, synthetic construct
  source 1..20: mol_type = other DNA
ttccgatcacctcctatatt

SEQ ID NO: 227204 - DNA, 20 bp, synthetic construct
  source 1..20: mol_type = other DNA
gttccgatcacctcctatat

SEQ ID NO: 227205 - DNA, 20 bp, synthetic construct
  source 1..20: mol_type = other DNA
tgttccgatcacctcctata

SEQ ID NO: 227206 - DNA, 20 bp, synthetic construct
  source 1..20: mol_type = other DNA
atgttccgatcacctcctat

SEQ ID NO: 227207 - DNA, 20 bp, synthetic construct
  source 1..20: mol_type = other DNA
tatgttccgatcacctccta

SEQ ID NO: 227208 - DNA, 20 bp, synthetic construct
  source 1..20: mol_type = other DNA
gtatgttccgatcacctcct

SEQ ID NO: 227209 - DNA, 20 bp, synthetic construct
  source 1..20: mol_type = other DNA
tgtatgttccgatcacctcc

SEQ ID NO: 227210 - DNA, 20 bp, synthetic construct
  source 1..20: mol_type = other DNA
ttgtatgttccgatcacctc

SEQ ID NO: 227211 - DNA, 20 bp, synthetic construct
  source 1..20: mol_type = other DNA
attgtatgttccgatcacct

SEQ ID NO: 227212 - DNA, 20 bp, synthetic construct
  source 1..20: mol_type = other DNA
cattgtatgttccgatcacc

SEQ ID NO: 227213 - DNA, 20 bp, synthetic construct
  source 1..20: mol_type = other DNA
tcattgtatgttccgatcac

SEQ ID NO: 227214 - DNA, 20 bp, synthetic construct
  source 1..20: mol_type = other DNA
atcattgtatgttccgatca

SEQ ID NO: 227215 - DNA, 20 bp, synthetic construct
  source 1..20: mol_type = other DNA
aatcattgtatgttccgatc

SEQ ID NO: 227216 - DNA, 20 bp, synthetic construct
  source 1..20: mol_type = other DNA
gaatcattgtatgttccgat

SEQ ID NO: 227217 - DNA, 20 bp, synthetic construct
  source 1..20: mol_type = other DNA
agaatcattgtatgttccga

SEQ ID NO: 227218 - DNA, 20 bp, synthetic construct
  source 1..20: mol_type = other DNA
aagaatcattgtatgttccg

SEQ ID NO: 227219 - DNA, 20 bp, synthetic construct
  source 1..20: mol_type = other DNA
caagaatcattgtatgttcc

SEQ ID NO: 227220 - DNA, 20 bp, synthetic construct
  source 1..20: mol_type = other DNA
gcaagaatcattgtatgttc

SEQ ID NO: 227221 - DNA, 20 bp, synthetic construct
  source 1..20: mol_type = other DNA
agcaagaatcattgtatgtt

SEQ ID NO: 227222 - DNA, 20 bp, synthetic construct
  source 1..20: mol_type = other DNA
tagcaagaatcattgtatgt

SEQ ID NO: 227223 - DNA, 20 bp, synthetic construct
  source 1..20: mol_type = other DNA
ttagcaagaatcattgtatg

SEQ ID NO: 227224 - DNA, 20 bp, synthetic construct
  source 1..20: mol_type = other DNA
cttagcaagaatcattgtat

SEQ ID NO: 227225 - DNA, 20 bp, synthetic construct
  source 1..20: mol_type = other DNA
tcttagcaagaatcattgta

SEQ ID NO: 227226 - DNA, 20 bp, synthetic construct
  source 1..20: mol_type = other DNA
gtcttagcaagaatcattgt

SEQ ID NO: 227227 - DNA, 20 bp, synthetic construct
  source 1..20: mol_type = other DNA
ggtcttagcaagaatcattg

SEQ ID NO: 227228 - DNA, 20 bp, synthetic construct
  source 1..20: mol_type = other DNA
cggtcttagcaagaatcatt

SEQ ID NO: 227229 - DNA, 20 bp, synthetic construct
  source 1..20: mol_type = other DNA
tcggtcttagcaagaatcat

SEQ ID NO: 227230 - DNA, 20 bp, synthetic construct
  source 1..20: mol_type = other DNA
atcggtcttagcaagaatca

SEQ ID NO: 227231 - DNA, 20 bp, synthetic construct
  source 1..20: mol_type = other DNA
aatcggtcttagcaagaatc

SEQ ID NO: 227232 - DNA, 20 bp, synthetic construct
  source 1..20: mol_type = other DNA
gaatcggtcttagcaagaat

SEQ ID NO: 227233 - DNA, 20 bp, synthetic construct
  source 1..20: mol_type = other DNA
tgaatcggtcttagcaagaa

SEQ ID NO: 227234 - DNA, 20 bp, synthetic construct
  source 1..20: mol_type = other DNA
gtgaatcggtcttagcaaga

SEQ ID NO: 227235 - DNA, 20 bp, synthetic construct
  source 1..20: mol_type = other DNA
tgtgaatcggtcttagcaag

SEQ ID NO: 227236 - DNA, 20 bp, synthetic construct
  source 1..20: mol_type = other DNA
ctgtgaatcggtcttagcaa

SEQ ID NO: 227237 - DNA, 20 bp, synthetic construct
  source 1..20: mol_type = other DNA
actgtgaatcggtcttagca

SEQ ID NO: 227238 - DNA, 20 bp, synthetic construct
  source 1..20: mol_type = other DNA
aactgtgaatcggtcttagc

SEQ ID NO: 227239 - DNA, 20 bp, synthetic construct
  source 1..20: mol_type = other DNA
aaactgtgaatcggtcttag

SEQ ID NO: 227240 - DNA, 20 bp, synthetic construct
  source 1..20: mol_type = other DNA
aaaactgtgaatcggtctta

SEQ ID NO: 227241 - DNA, 20 bp, synthetic construct
  source 1..20: mol_type = other DNA
aaaaactgtgaatcggtctt

SEQ ID NO: 227242 - DNA, 20 bp, synthetic construct
  source 1..20: mol_type = other DNA
gaaaaactgtgaatcggtct

SEQ ID NO: 227243 - DNA, 20 bp, synthetic construct
  source 1..20: mol_type = other DNA
agaaaaactgtgaatcggtc

SEQ ID NO: 227244 - DNA, 20 bp, synthetic construct
  source 1..20: mol_type = other DNA
aagaaaaactgtgaatcggt

SEQ ID NO: 227245 - DNA, 20 bp, synthetic construct
  source 1..20: mol_type = other DNA
aaagaaaaactgtgaatcgg

SEQ ID NO: 227246 - DNA, 20 bp, synthetic construct
  source 1..20: mol_type = other DNA
aaaagaaaaactgtgaatcg

SEQ ID NO: 227247 - DNA, 20 bp, synthetic construct
  source 1..20: mol_type = other DNA
aaaaagaaaaactgtgaatc

SEQ ID NO: 227248 - DNA, 20 bp, synthetic construct
  source 1..20: mol_type = other DNA
aaaaaagaaaaactgtgaat

SEQ ID NO: 227249 - DNA, 20 bp, synthetic construct
  source 1..20: mol_type = other DNA
aaaaaaagaaaaactgtgaa

SEQ ID NO: 227250 - DNA, 20 bp, synthetic construct
  source 1..20: mol_type = other DNA
aaaaaaaagaaaaactgtga

SEQ ID NO: 227251 - DNA, 20 bp, synthetic construct
  source 1..20: mol_type = other DNA
gaaaaaaaagaaaaactgtg

SEQ ID NO: 227252 - DNA, 20 bp, synthetic construct
  source 1..20: mol_type = other DNA
cgaaaaaaaagaaaaactgt

SEQ ID NO: 227253 - DNA, 20 bp, synthetic construct
  source 1..20: mol_type = other DNA
tcgaaaaaaaagaaaaactg

SEQ ID NO: 227254 - DNA, 20 bp, synthetic construct
  source 1..20: mol_type = other DNA
atcgaaaaaaaagaaaaact

SEQ ID NO: 227255 - DNA, 20 bp, synthetic construct
  source 1..20: mol_type = other DNA
gatcgaaaaaaaagaaaaac

SEQ ID NO: 227256 - DNA, 20 bp, synthetic construct
  source 1..20: mol_type = other DNA
cgatcgaaaaaaaagaaaaa

SEQ ID NO: 227257 - DNA, 20 bp, synthetic construct
  source 1..20: mol_type = other DNA
tcgatcgaaaaaaaagaaaa

SEQ ID NO: 227258 - DNA, 20 bp, synthetic construct
  source 1..20: mol_type = other DNA
ttcgatcgaaaaaaaagaaa

SEQ ID NO: 227259 - DNA, 20 bp, synthetic construct
  source 1..20: mol_type = other DNA
cttcgatcgaaaaaaaagaa

SEQ ID NO: 227260 - DNA, 20 bp, synthetic construct
  source 1..20: mol_type = other DNA
tcttcgatcgaaaaaaaaga

SEQ ID NO: 227261 - DNA, 20 bp, synthetic construct
  source 1..20: mol_type = other DNA
ttcttcgatcgaaaaaaaag

SEQ ID NO: 227262 - DNA, 20 bp, synthetic construct
  source 1..20: mol_type = other DNA
tttcttcgatcgaaaaaaaa

SEQ ID NO: 227263 - DNA, 20 bp, synthetic construct
  source 1..20: mol_type = other DNA
atttcttcgatcgaaaaaaa

SEQ ID NO: 227264 - DNA, 20 bp, synthetic construct
  source 1..20: mol_type = other DNA
tatttcttcgatcgaaaaaa

SEQ ID NO: 227265 - DNA, 20 bp, synthetic construct
  source 1..20: mol_type = other DNA
gtatttcttcgatcgaaaaa

SEQ ID NO: 227266 - DNA, 20 bp, synthetic construct
  source 1..20: mol_type = other DNA
agtatttcttcgatcgaaaa

SEQ ID NO: 227267 - DNA, 20 bp, synthetic construct
  source 1..20: mol_type = other DNA
cagtatttcttcgatcgaaa

SEQ ID NO: 227268 - DNA, 20 bp, synthetic construct
  source 1..20: mol_type = other DNA
ccagtatttcttcgatcgaa

SEQ ID NO: 227269 - DNA, 20 bp, synthetic construct
  source 1..20: mol_type = other DNA
tccagtatttcttcgatcga

SEQ ID NO: 227270 - DNA, 20 bp, synthetic construct
  source 1..20: mol_type = other DNA
ctccagtatttcttcgatcg

SEQ ID NO: 227271 - DNA, 20 bp, synthetic construct
  source 1..20: mol_type = other DNA
tctccagtatttcttcgatc

SEQ ID NO: 227272 - DNA, 20 bp, synthetic construct
  source 1..20: mol_type = other DNA
ttctccagtatttcttcgat

SEQ ID NO: 227273 - DNA, 20 bp, synthetic construct
  source 1..20: mol_type = other DNA
cttctccagtatttcttcga

SEQ ID NO: 227274 - DNA, 20 bp, synthetic construct
  source 1..20: mol_type = other DNA
gcttctccagtatttcttcg

SEQ ID NO: 227275 - DNA, 20 bp, synthetic construct
  source 1..20: mol_type = other DNA
ggcttctccagtatttcttc

SEQ ID NO: 227276 - DNA, 20 bp, synthetic construct
  source 1..20: mol_type = other DNA
aggcttctccagtatttctt

SEQ ID NO: 227277 - DNA, 20 bp, synthetic construct
  source 1..20: mol_type = other DNA
taggcttctccagtatttct

SEQ ID NO: 227278 - DNA, 20 bp, synthetic construct
  source 1..20: mol_type = other DNA
ttaggcttctccagtatttc

SEQ ID NO: 227279 - DNA, 20 bp, synthetic construct
  source 1..20: mol_type = other DNA
tttaggcttctccagtattt

SEQ ID NO: 227280 - DNA, 20 bp, synthetic construct
  source 1..20: mol_type = other DNA
ctttaggcttctccagtatt

SEQ ID NO: 227281 - DNA, 20 bp, synthetic construct
  source 1..20: mol_type = other DNA
tctttaggcttctccagtat

SEQ ID NO: 227282 - DNA, 20 bp, synthetic construct
  source 1..20: mol_type = other DNA
ttctttaggcttctccagta

SEQ ID NO: 227283 - DNA, 20 bp, synthetic construct
  source 1..20: mol_type = other DNA
cttctttaggcttctccagt

SEQ ID NO: 227284 - DNA, 20 bp, synthetic construct
  source 1..20: mol_type = other DNA
ccttctttaggcttctccag

SEQ ID NO: 227285 - DNA, 20 bp, synthetic construct
  source 1..20: mol_type = other DNA
tccttctttaggcttctcca

SEQ ID NO: 227286 - DNA, 20 bp, synthetic construct
  source 1..20: mol_type = other DNA
ctccttctttaggcttctcc

SEQ ID NO: 227287 - DNA, 20 bp, synthetic construct
  source 1..20: mol_type = other DNA
actccttctttaggcttctc

SEQ ID NO: 227288 - DNA, 20 bp, synthetic construct
  source 1..20: mol_type = other DNA
gactccttctttaggcttct

SEQ ID NO: 227289 - DNA, 20 bp, synthetic construct
  source 1..20: mol_type = other DNA
agactccttctttaggcttc

SEQ ID NO: 227290 - DNA, 20 bp, synthetic construct
  source 1..20: mol_type = other DNA
tagactccttctttaggctt

SEQ ID NO: 227291 - DNA, 20 bp, synthetic construct
  source 1..20: mol_type = other DNA
ttagactccttctttaggct

SEQ ID NO: 227292 - DNA, 20 bp, synthetic construct
  source 1..20: mol_type = other DNA
tttagactccttctttaggc

SEQ ID NO: 227293 - DNA, 20 bp, synthetic construct
  source 1..20: mol_type = other DNA
ttttagactccttctttagg

SEQ ID NO: 227294 - DNA, 20 bp, synthetic construct
  source 1..20: mol_type = other DNA
tttttagactccttctttag

SEQ ID NO: 227295 - DNA, 20 bp, synthetic construct
  source 1..20: mol_type = other DNA
gtttttagactccttcttta

SEQ ID NO: 227296 - DNA, 20 bp, synthetic construct
  source 1..20: mol_type = other DNA
agtttttagactccttcttt

SEQ ID NO: 227297 - DNA, 20 bp, synthetic construct
  source 1..20: mol_type = other DNA
gagtttttagactccttctt

SEQ ID NO: 227298 - DNA, 20 bp, synthetic construct
  source 1..20: mol_type = other DNA
agagtttttagactccttct

SEQ ID NO: 227299 - DNA, 20 bp, synthetic construct
  source 1..20: mol_type = other DNA
cagagtttttagactccttc

SEQ ID NO: 227300 - DNA, 20 bp, synthetic construct
  source 1..20: mol_type = other DNA
ccagagtttttagactcctt

SEQ ID NO: 227301 - DNA, 20 bp, synthetic construct
  source 1..20: mol_type = other DNA
gccagagtttttagactcct

SEQ ID NO: 227302 - DNA, 20 bp, synthetic construct
  source 1..20: mol_type = other DNA
tgccagagtttttagactcc

SEQ ID NO: 227303 - DNA, 20 bp, synthetic construct
  source 1..20: mol_type = other DNA
gtgccagagtttttagactc

SEQ ID NO: 227304 - DNA, 20 bp, synthetic construct
  source 1..20: mol_type = other DNA
cgtgccagagtttttagact

SEQ ID NO: 227305 - DNA, 20 bp, synthetic construct
  source 1..20: mol_type = other DNA
acgtgccagagtttttagac

SEQ ID NO: 227306 - DNA, 20 bp, synthetic construct
  source 1..20: mol_type = other DNA
cacgtgccagagtttttaga

SEQ ID NO: 227307 - DNA, 20 bp, synthetic construct
  source 1..20: mol_type = other DNA
ccacgtgccagagtttttag

SEQ ID NO: 227308 - DNA, 20 bp, synthetic construct
  source 1..20: mol_type = other DNA
cccacgtgccagagttttta

SEQ ID NO: 227309 - DNA, 20 bp, synthetic construct
  source 1..20: mol_type = other DNA
gcccacgtgccagagttttt

SEQ ID NO: 227310 - DNA, 20 bp, synthetic construct
  source 1..20: mol_type = other DNA
ggcccacgtgccagagtttt

SEQ ID NO: 227311 - DNA, 20 bp, synthetic construct
  source 1..20: mol_type = other DNA
tggcccacgtgccagagttt

SEQ ID NO: 227312 - DNA, 20 bp, synthetic construct
  source 1..20: mol_type = other DNA
ttggcccacgtgccagagtt

SEQ ID NO: 227313 - DNA, 20 bp, synthetic construct
  source 1..20: mol_type = other DNA
tttggcccacgtgccagagt

SEQ ID NO: 227314 - DNA, 20 bp, synthetic construct
  source 1..20: mol_type = other DNA
ttttggcccacgtgccagag

SEQ ID NO: 227315 - DNA, 20 bp, synthetic construct
  source 1..20: mol_type = other DNA
gttttggcccacgtgccaga

SEQ ID NO: 227316 - DNA, 20 bp, synthetic construct
  source 1..20: mol_type = other DNA
agttttggcccacgtgccag

SEQ ID NO: 227317 - DNA, 20 bp, synthetic construct
  source 1..20: mol_type = other DNA
cagttttggcccacgtgcca

SEQ ID NO: 227318 - DNA, 20 bp, synthetic construct
  source 1..20: mol_type = other DNA
acagttttggcccacgtgcc

SEQ ID NO: 227319 - DNA, 20 bp, synthetic construct
  source 1..20: mol_type = other DNA
gacagttttggcccacgtgc

SEQ ID NO: 227320 - DNA, 20 bp, synthetic construct
  source 1..20: mol_type = other DNA
ggacagttttggcccacgtg

SEQ ID NO: 227321 - DNA, 20 bp, synthetic construct
  source 1..20: mol_type = other DNA
aggacagttttggcccacgt

SEQ ID NO: 227322 - DNA, 20 bp, synthetic construct
  source 1..20: mol_type = other DNA
aaggacagttttggcccacg

SEQ ID NO: 227323 - DNA, 20 bp, synthetic construct
  source 1..20: mol_type = other DNA
caaggacagttttggcccac

SEQ ID NO: 227324 - DNA, 20 bp, synthetic construct
  source 1..20: mol_type = other DNA
tcaaggacagttttggccca

SEQ ID NO: 227325 - DNA, 20 bp, synthetic construct
  source 1..20: mol_type = other DNA
ctcaaggacagttttggccc

SEQ ID NO: 227326 - DNA, 20 bp, synthetic construct
  source 1..20: mol_type = other DNA
gctcaaggacagttttggcc

SEQ ID NO: 227327 - DNA, 20 bp, synthetic construct
  source 1..20: mol_type = other DNA
agctcaaggacagttttggc

SEQ ID NO: 227328 - DNA, 20 bp, synthetic construct
  source 1..20: mol_type = other DNA
tagctcaaggacagttttgg

SEQ ID NO: 227329 - DNA, 20 bp, synthetic construct
  source 1..20: mol_type = other DNA
ttagctcaaggacagttttg

SEQ ID NO: 227330 - DNA, 20 bp, synthetic construct
  source 1..20: mol_type = other DNA
cttagctcaaggacagtttt

SEQ ID NO: 227331 - DNA, 20 bp, synthetic construct
  source 1..20: mol_type = other DNA
tcttagctcaaggacagttt

SEQ ID NO: 227332 - DNA, 20 bp, synthetic construct
  source 1..20: mol_type = other DNA
ttcttagctcaaggacagtt

SEQ ID NO: 227333 - DNA, 20 bp, synthetic construct
  source 1..20: mol_type = other DNA
attcttagctcaaggacagt

SEQ ID NO: 227334 - DNA, 20 bp, synthetic construct
  source 1..20: mol_type = other DNA
cattcttagctcaaggacag

SEQ ID NO: 227335 - DNA, 20 bp, synthetic construct
  source 1..20: mol_type = other DNA
tcattcttagctcaaggaca

SEQ ID NO: 227336 - DNA, 20 bp, synthetic construct
  source 1..20: mol_type = other DNA
atcattcttagctcaaggac

SEQ ID NO: 227337 - DNA, 20 bp, synthetic construct
  source 1..20: mol_type = other DNA
aatcattcttagctcaagga

SEQ ID NO: 227338 - DNA, 20 bp, synthetic construct
  source 1..20: mol_type = other DNA
aaatcattcttagctcaagg

SEQ ID NO: 227339 - DNA, 20 bp, synthetic construct
  source 1..20: mol_type = other DNA
aaaatcattcttagctcaag

SEQ ID NO: 227340 - DNA, 20 bp, synthetic construct
  source 1..20: mol_type = other DNA
gaaaatcattcttagctcaa

SEQ ID NO: 227341 - DNA, 20 bp, synthetic construct
  source 1..20: mol_type = other DNA
tgaaaatcattcttagctca

SEQ ID NO: 227342 - DNA, 20 bp, synthetic construct
  source 1..20: mol_type = other DNA
gtgaaaatcattcttagctc

SEQ ID NO: 227343 - DNA, 20 bp, synthetic construct
  source 1..20: mol_type = other DNA
tgtgaaaatcattcttagct

SEQ ID NO: 227344 - DNA, 20 bp, synthetic construct
  source 1..20: mol_type = other DNA
atgtgaaaatcattcttagc

SEQ ID NO: 227345 - DNA, 20 bp, synthetic construct
  source 1..20: mol_type = other DNA
aatgtgaaaatcattcttag

SEQ ID NO: 227346 - DNA, 20 bp, synthetic construct
  source 1..20: mol_type = other DNA
aaatgtgaaaatcattctta

SEQ ID NO: 227347 - DNA, 20 bp, synthetic construct
  source 1..20: mol_type = other DNA
aaaatgtgaaaatcattctt

SEQ ID NO: 227348 - DNA, 20 bp, synthetic construct
  source 1..20: mol_type = other DNA
aaaaatgtgaaaatcattct

SEQ ID NO: 227349 - DNA, 20 bp, synthetic construct
  source 1..20: mol_type = other DNA
taaaaatgtgaaaatcattc

SEQ ID NO: 227350 - DNA, 20 bp, synthetic construct
  source 1..20: mol_type = other DNA
ttaaaaatgtgaaaatcatt

SEQ ID NO: 227351 - DNA, 20 bp, synthetic construct
  source 1..20: mol_type = other DNA
cttaaaaatgtgaaaatcat

SEQ ID NO: 227352 - DNA, 20 bp, synthetic construct
  source 1..20: mol_type = other DNA
acttaaaaatgtgaaaatca

SEQ ID NO: 227353 - DNA, 20 bp, synthetic construct
  source 1..20: mol_type = other DNA
cacttaaaaatgtgaaaatc

SEQ ID NO: 227354 - DNA, 20 bp, synthetic construct
  source 1..20: mol_type = other DNA
ccacttaaaaatgtgaaaat

SEQ ID NO: 227355 - DNA, 20 bp, synthetic construct
  source 1..20: mol_type = other DNA
accacttaaaaatgtgaaaa

SEQ ID NO: 227356 - DNA, 20 bp, synthetic construct
  source 1..20: mol_type = other DNA
aaccacttaaaaatgtgaaa

SEQ ID NO: 227357 - DNA, 20 bp, synthetic construct
  source 1..20: mol_type = other DNA
caaccacttaaaaatgtgaa

SEQ ID NO: 227358 - DNA, 20 bp, synthetic construct
  source 1..20: mol_type = other DNA
tcaaccacttaaaaatgtga

SEQ ID NO: 227359 - DNA, 20 bp, synthetic construct
  source 1..20: mol_type = other DNA
ttcaaccacttaaaaatgtg

SEQ ID NO: 227360 - DNA, 20 bp, synthetic construct
  source 1..20: mol_type = other DNA
tttcaaccacttaaaaatgt

SEQ ID NO: 227361 - DNA, 20 bp, synthetic construct
  source 1..20: mol_type = other DNA
ttttcaaccacttaaaaatg

SEQ ID NO: 227362 - DNA, 20 bp, synthetic construct
  source 1..20: mol_type = other DNA
tttttcaaccacttaaaaat

SEQ ID NO: 227363 - DNA, 20 bp, synthetic construct
  source 1..20: mol_type = other DNA
atttttcaaccacttaaaaa

SEQ ID NO: 227364 - DNA, 20 bp, synthetic construct
  source 1..20: mol_type = other DNA
catttttcaaccacttaaaa

SEQ ID NO: 227365 - DNA, 20 bp, synthetic construct
  source 1..20: mol_type = other DNA
tcatttttcaaccacttaaa

SEQ ID NO: 227366 - DNA, 20 bp, synthetic construct
  source 1..20: mol_type = other DNA
ttcatttttcaaccacttaa

SEQ ID NO: 227367 - DNA, 20 bp, synthetic construct
  source 1..20: mol_type = other DNA
tttcatttttcaaccactta

SEQ ID NO: 227368 - DNA, 20 bp, synthetic construct
  source 1..20: mol_type = other DNA
atttcatttttcaaccactt

SEQ ID NO: 227369 - DNA, 20 bp, synthetic construct
  source 1..20: mol_type = other DNA
tatttcatttttcaaccact

SEQ ID NO: 227370 - DNA, 20 bp, synthetic construct
  source 1..20: mol_type = other DNA
ttatttcatttttcaaccac

SEQ ID NO: 227371 - DNA, 20 bp, synthetic construct
  source 1..20: mol_type = other DNA
tttatttcatttttcaacca

SEQ ID NO: 227372 - DNA, 20 bp, synthetic construct
  source 1..20: mol_type = other DNA
ttttatttcatttttcaacc

SEQ ID NO: 227373 - DNA, 20 bp, synthetic construct
  source 1..20: mol_type = other DNA
attttatttcatttttcaac

SEQ ID NO: 227374 - DNA, 20 bp, synthetic construct
  source 1..20: mol_type = other DNA
tattttatttcatttttcaa

SEQ ID NO: 227375 - DNA, 20 bp, synthetic construct
  source 1..20: mol_type = other DNA
ttattttatttcatttttca

SEQ ID NO: 227376 - DNA, 20 bp, synthetic construct
  source 1..20: mol_type = other DNA
cttattttatttcatttttc

SEQ ID NO: 227377 - DNA, 20 bp, synthetic construct
  source 1..20: mol_type = other DNA
tcttattttatttcattttt

SEQ ID NO: 227378 - DNA, 20 bp, synthetic construct
  source 1..20: mol_type = other DNA
atcttattttatttcatttt

SEQ ID NO: 227379 - DNA, 20 bp, synthetic construct
  source 1..20: mol_type = other DNA
catcttattttatttcattt

SEQ ID NO: 227380 - DNA, 20 bp, synthetic construct
  source 1..20: mol_type = other DNA
tcatcttattttatttcatt

SEQ ID NO: 227381 - DNA, 20 bp, synthetic construct
  source 1..20: mol_type = other DNA
atcatcttattttatttcat

SEQ ID NO: 227382 - DNA, 20 bp, synthetic construct
  source 1..20: mol_type = other DNA
catcatcttattttatttca

SEQ ID NO: 227383 - DNA, 20 bp, synthetic construct
  source 1..20: mol_type = other DNA
acatcatcttattttatttc

SEQ ID NO: 227384 - DNA, 20 bp, synthetic construct
  source 1..20: mol_type = other DNA
aacatcatcttattttattt

SEQ ID NO: 227385 - DNA, 20 bp, synthetic construct
  source 1..20: mol_type = other DNA
aaacatcatcttattttatt

SEQ ID NO: 227386 - DNA, 20 bp, synthetic construct
  source 1..20: mol_type = other DNA
aaaacatcatcttattttat

SEQ ID NO: 227387 - DNA, 20 bp, synthetic construct
  source 1..20: mol_type = other DNA
caaaacatcatcttatttta

SEQ ID NO: 227388 - DNA, 20 bp, synthetic construct
  source 1..20: mol_type = other DNA
acaaaacatcatcttatttt

SEQ ID NO: 227389 - DNA, 20 bp, synthetic construct
  source 1..20: mol_type = other DNA
cacaaaacatcatcttattt

SEQ ID NO: 227390 - DNA, 20 bp, synthetic construct
  source 1..20: mol_type = other DNA
tcacaaaacatcatcttatt

SEQ ID NO: 227391 - DNA, 20 bp, synthetic construct
  source 1..20: mol_type = other DNA
gtcacaaaacatcatcttat

SEQ ID NO: 227392 - DNA, 20 bp, synthetic construct
  source 1..20: mol_type = other DNA
tgtcacaaaacatcatctta

SEQ ID NO: 227393 - DNA, 20 bp, synthetic construct
  source 1..20: mol_type = other DNA
gtgtcacaaaacatcatctt

SEQ ID NO: 227394 - DNA, 20 bp, synthetic construct
  source 1..20: mol_type = other DNA
tgtgtcacaaaacatcatct

SEQ ID NO: 227395 - DNA, 20 bp, synthetic construct
  source 1..20: mol_type = other DNA
atgtgtcacaaaacatcatc

SEQ ID NO: 227396 - DNA, 20 bp, synthetic construct
  source 1..20: mol_type = other DNA
catgtgtcacaaaacatcat

SEQ ID NO: 227397 - DNA, 20 bp, synthetic construct
  source 1..20: mol_type = other DNA
tcatgtgtcacaaaacatca

SEQ ID NO: 227398 - DNA, 20 bp, synthetic construct
  source 1..20: mol_type = other DNA
ttcatgtgtcacaaaacatc

SEQ ID NO: 227399 - DNA, 20 bp, synthetic construct
  source 1..20: mol_type = other DNA
tttcatgtgtcacaaaacat

SEQ ID NO: 227400 - DNA, 20 bp, synthetic construct
  source 1..20: mol_type = other DNA
ctttcatgtgtcacaaaaca

SEQ ID NO: 227401 - DNA, 20 bp, synthetic construct
  source 1..20: mol_type = other DNA
gctttcatgtgtcacaaaac

SEQ ID NO: 227402 - DNA, 20 bp, synthetic construct
  source 1..20: mol_type = other DNA
agctttcatgtgtcacaaaa

SEQ ID NO: 227403 - DNA, 20 bp, synthetic construct
  source 1..20: mol_type = other DNA
tagctttcatgtgtcacaaa

SEQ ID NO: 227404 - DNA, 20 bp, synthetic construct
  source 1..20: mol_type = other DNA
atagctttcatgtgtcacaa

SEQ ID NO: 227405 - DNA, 20 bp, synthetic construct
  source 1..20: mol_type = other DNA
catagctttcatgtgtcaca

SEQ ID NO: 227406 - DNA, 20 bp, synthetic construct
  source 1..20: mol_type = other DNA
ccatagctttcatgtgtcac

SEQ ID NO: 227407 - DNA, 20 bp, synthetic construct
  source 1..20: mol_type = other DNA
cccatagctttcatgtgtca

SEQ ID NO: 227408 - DNA, 20 bp, synthetic construct
  source 1..20: mol_type = other DNA
tcccatagctttcatgtgtc

SEQ ID NO: 227409 - DNA, 20 bp, synthetic construct
  source 1..20: mol_type = other DNA
ttcccatagctttcatgtgt

SEQ ID NO: 227410 - DNA, 20 bp, synthetic construct
  source 1..20: mol_type = other DNA
tttcccatagctttcatgtg

SEQ ID NO: 227411 - DNA, 20 bp, synthetic construct
  source 1..20: mol_type = other DNA
atttcccatagctttcatgt

SEQ ID NO: 227412 - DNA, 20 bp, synthetic construct
  source 1..20: mol_type = other DNA
aatttcccatagctttcatg

SEQ ID NO: 227413 - DNA, 20 bp, synthetic construct
  source 1..20: mol_type = other DNA
gaatttcccatagctttcat

SEQ ID NO: 227414 - DNA, 20 bp, synthetic construct
  source 1..20: mol_type = other DNA
tgaatttcccatagctttca

SEQ ID NO: 227415 - DNA, 20 bp, synthetic construct
  source 1..20: mol_type = other DNA
ttgaatttcccatagctttc

SEQ ID NO: 227416 - DNA, 20 bp, synthetic construct
  source 1..20: mol_type = other DNA
tttgaatttcccatagcttt

SEQ ID NO: 227417 - DNA, 20 bp, synthetic construct
  source 1..20: mol_type = other DNA
atttgaatttcccatagctt

SEQ ID NO: 227418 - DNA, 20 bp, synthetic construct
  source 1..20: mol_type = other DNA
aatttgaatttcccatagct

SEQ ID NO: 227419 - DNA, 20 bp, synthetic construct
  source 1..20: mol_type = other DNA
gaatttgaatttcccatagc

SEQ ID NO: 227420 - DNA, 20 bp, synthetic construct
  source 1..20: mol_type = other DNA
agaatttgaatttcccatag

SEQ ID NO: 227421 - DNA, 20 bp, synthetic construct
  source 1..20: mol_type = other DNA
tagaatttgaatttcccata

SEQ ID NO: 227422 - DNA, 20 bp, synthetic construct
  source 1..20: mol_type = other DNA
ttagaatttgaatttcccat

SEQ ID NO: 227423 - DNA, 20 bp, synthetic construct
  source 1..20: mol_type = other DNA
attagaatttgaatttccca

SEQ ID NO: 227424 - DNA, 20 bp, synthetic construct
  source 1..20: mol_type = other DNA
tattagaatttgaatttccc

SEQ ID NO: 227425 - DNA, 20 bp, synthetic construct
  source 1..20: mol_type = other DNA
atattagaatttgaatttcc

SEQ ID NO: 227426 - DNA, 20 bp, synthetic construct
  source 1..20: mol_type = other DNA
gatattagaatttgaatttc

SEQ ID NO: 227427 - DNA, 20 bp, synthetic construct
  source 1..20: mol_type = other DNA
agatattagaatttgaattt

SEQ ID NO: 227428 - DNA, 20 bp, synthetic construct
  source 1..20: mol_type = other DNA
tagatattagaatttgaatt

SEQ ID NO: 227429 - DNA, 20 bp, synthetic construct
  source 1..20: mol_type = other DNA
atagatattagaatttgaat

SEQ ID NO: 227430 - DNA, 20 bp, synthetic construct
  source 1..20: mol_type = other DNA
tatagatattagaatttgaa

SEQ ID NO: 227431 - DNA, 20 bp, synthetic construct
  source 1..20: mol_type = other DNA
ttatagatattagaatttga

SEQ ID NO: 227432 - DNA, 20 bp, synthetic construct
  source 1..20: mol_type = other DNA
tttatagatattagaatttg

SEQ ID NO: 227433 - DNA, 20 bp, synthetic construct
  source 1..20: mol_type = other DNA
atttatagatattagaattt

SEQ ID NO: 227434 - DNA, 20 bp, synthetic construct
  source 1..20: mol_type = other DNA
tatttatagatattagaatt

SEQ ID NO: 227435 - DNA, 20 bp, synthetic construct
  source 1..20: mol_type = other DNA
ctatttatagatattagaat

SEQ ID NO: 227436 - DNA, 20 bp, synthetic construct
  source 1..20: mol_type = other DNA
actatttatagatattagaa

SEQ ID NO: 227437 - DNA, 20 bp, synthetic construct
  source 1..20: mol_type = other DNA
cactatttatagatattaga

SEQ ID NO: 227438 - DNA, 20 bp, synthetic construct
  source 1..20: mol_type = other DNA
acactatttatagatattag

SEQ ID NO: 227439 - DNA, 20 bp, synthetic construct
  source 1..20: mol_type = other DNA
aacactatttatagatatta

SEQ ID NO: 227440 - DNA, 20 bp, synthetic construct
  source 1..20: mol_type = other DNA
aaacactatttatagatatt

SEQ ID NO: 227441 - DNA, 20 bp, synthetic construct
  source 1..20: mol_type = other DNA
aaaacactatttatagatat

SEQ ID NO: 227442 - DNA, 20 bp, synthetic construct
  source 1..20: mol_type = other DNA
taaaacactatttatagata

SEQ ID NO: 227443 - DNA, 20 bp, synthetic construct
  source 1..20: mol_type = other DNA
ataaaacactatttatagat

SEQ ID NO: 227444 - DNA, 20 bp, synthetic construct
  source 1..20: mol_type = other DNA
gataaaacactatttataga

SEQ ID NO: 227445 - DNA, 20 bp, synthetic construct
  source 1..20: mol_type = other DNA
tgataaaacactatttatag

SEQ ID NO: 227446 - DNA, 20 bp, synthetic construct
  source 1..20: mol_type = other DNA
ctgataaaacactatttata

SEQ ID NO: 227447 - DNA, 20 bp, synthetic construct
  source 1..20: mol_type = other DNA
tctgataaaacactatttat

SEQ ID NO: 227448 - DNA, 20 bp, synthetic construct
  source 1..20: mol_type = other DNA
ttctgataaaacactattta

SEQ ID NO: 227449 - DNA, 20 bp, synthetic construct
  source 1..20: mol_type = other DNA
gttctgataaaacactattt

SEQ ID NO: 227450 - DNA, 20 bp, synthetic construct
  source 1..20: mol_type = other DNA
tgttctgataaaacactatt

SEQ ID NO: 227451 - DNA, 20 bp, synthetic construct
  source 1..20: mol_type = other DNA
gtgttctgataaaacactat

SEQ ID NO: 227452 - DNA, 20 bp, synthetic construct
  source 1..20: mol_type = other DNA
tgtgttctgataaaacacta

SEQ ID NO: 227453 - DNA, 20 bp, synthetic construct
  source 1..20: mol_type = other DNA
ctgtgttctgataaaacact

SEQ ID NO: 227454 - DNA, 20 bp, synthetic construct
  source 1..20: mol_type = other DNA
actgtgttctgataaaacac

SEQ ID NO: 227455 - DNA, 20 bp, synthetic construct
  source 1..20: mol_type = other DNA
gactgtgttctgataaaaca

SEQ ID NO: 227456 - DNA, 20 bp, synthetic construct
  source 1..20: mol_type = other DNA
tgactgtgttctgataaaac

SEQ ID NO: 227457 - DNA, 20 bp, synthetic construct
  source 1..20: mol_type = other DNA
atgactgtgttctgataaaa

SEQ ID NO: 227458 - DNA, 20 bp, synthetic construct
  source 1..20: mol_type = other DNA
catgactgtgttctgataaa

SEQ ID NO: 227459 - DNA, 20 bp, synthetic construct
  source 1..20: mol_type = other DNA
gcatgactgtgttctgataa

SEQ ID NO: 227460 - DNA, 20 bp, synthetic construct
  source 1..20: mol_type = other DNA
agcatgactgtgttctgata

SEQ ID NO: 227461 - DNA, 20 bp, synthetic construct
  source 1..20: mol_type = other DNA
gagcatgactgtgttctgat

SEQ ID NO: 227462 - DNA, 20 bp, synthetic construct
  source 1..20: mol_type = other DNA
tgagcatgactgtgttctga

SEQ ID NO: 227463 - DNA, 20 bp, synthetic construct
  source 1..20: mol_type = other DNA
atgagcatgactgtgttctg

SEQ ID NO: 227464 - DNA, 20 bp, synthetic construct
  source 1..20: mol_type = other DNA
aatgagcatgactgtgttct

SEQ ID NO: 227465 - DNA, 20 bp, synthetic construct
  source 1..20: mol_type = other DNA
aaatgagcatgactgtgttc

SEQ ID NO: 227466 - DNA, 20 bp, synthetic construct
  source 1..20: mol_type = other DNA
taaatgagcatgactgtgtt

SEQ ID NO: 227467 - DNA, 20 bp, synthetic construct
  source 1..20: mol_type = other DNA
ataaatgagcatgactgtgt

SEQ ID NO: 227468 - DNA, 20 bp, synthetic construct
  source 1..20: mol_type = other DNA
aataaatgagcatgactgtg

SEQ ID NO: 227469 - DNA, 20 bp, synthetic construct
  source 1..20: mol_type = other DNA
aaataaatgagcatgactgt

SEQ ID NO: 227470 - DNA, 20 bp, synthetic construct
  source 1..20: mol_type = other DNA
taaataaatgagcatgactg

SEQ ID NO: 227471 - DNA, 20 bp, synthetic construct
  source 1..20: mol_type = other DNA
ataaataaatgagcatgact

SEQ ID NO: 227472 - DNA, 20 bp, synthetic construct
  source 1..20: mol_type = other DNA
cataaataaatgagcatgac

SEQ ID NO: 227473 - DNA, 20 bp, synthetic construct
  source 1..20: mol_type = other DNA
gcataaataaatgagcatga

SEQ ID NO: 227474 - DNA, 20 bp, synthetic construct
  source 1..20: mol_type = other DNA
agcataaataaatgagcatg

SEQ ID NO: 227475 - DNA, 20 bp, synthetic construct
  source 1..20: mol_type = other DNA
gagcataaataaatgagcat

SEQ ID NO: 227476 - DNA, 20 bp, synthetic construct
  source 1..20: mol_type = other DNA
cgagcataaataaatgagca

SEQ ID NO: 227477 - DNA, 20 bp, synthetic construct
  source 1..20: mol_type = other DNA
tcgagcataaataaatgagc

SEQ ID NO: 227478 - DNA, 20 bp, synthetic construct
  source 1..20: mol_type = other DNA
atcgagcataaataaatgag

SEQ ID NO: 227479 - DNA, 20 bp, synthetic construct
  source 1..20: mol_type = other DNA
catcgagcataaataaatga

SEQ ID NO: 227480 - DNA, 20 bp, synthetic construct
  source 1..20: mol_type = other DNA
ccatcgagcataaataaatg

SEQ ID NO: 227481 - DNA, 20 bp, synthetic construct
  source 1..20: mol_type = other DNA
gccatcgagcataaataaat

SEQ ID NO: 227482 - DNA, 20 bp, synthetic construct
  source 1..20: mol_type = other DNA
agccatcgagcataaataaa

SEQ ID NO: 227483 - DNA, 20 bp, synthetic construct
  source 1..20: mol_type = other DNA
cagccatcgagcataaataa

SEQ ID NO: 227484 - DNA, 20 bp, synthetic construct
  source 1..20: mol_type = other DNA
gcagccatcgagcataaata

SEQ ID NO: 227485 - DNA, 20 bp, synthetic construct
  source 1..20: mol_type = other DNA
agcagccatcgagcataaat

SEQ ID NO: 227486 - DNA, 20 bp, synthetic construct
  source 1..20: mol_type = other DNA
aagcagccatcgagcataaa

SEQ ID NO: 227487 - DNA, 20 bp, synthetic construct
  source 1..20: mol_type = other DNA
aaagcagccatcgagcataa

SEQ ID NO: 227488 - DNA, 20 bp, synthetic construct
  source 1..20: mol_type = other DNA
gaaagcagccatcgagcata

SEQ ID NO: 227489 - DNA, 20 bp, synthetic construct
  source 1..20: mol_type = other DNA
ggaaagcagccatcgagcat

SEQ ID NO: 227490 - DNA, 20 bp, synthetic construct
  source 1..20: mol_type = other DNA
gggaaagcagccatcgagca

SEQ ID NO: 227491 - DNA, 20 bp, synthetic construct
  source 1..20: mol_type = other DNA
cgggaaagcagccatcgagc

SEQ ID NO: 227492 - DNA, 20 bp, synthetic construct
  source 1..20: mol_type = other DNA
gcgggaaagcagccatcgag

SEQ ID NO: 227493 - DNA, 20 bp, synthetic construct
  source 1..20: mol_type = other DNA
agcgggaaagcagccatcga

SEQ ID NO: 227494 - DNA, 20 bp, synthetic construct
  source 1..20: mol_type = other DNA
tagcgggaaagcagccatcg

SEQ ID NO: 227495 - DNA, 20 bp, synthetic construct
  source 1..20: mol_type = other DNA
gtagcgggaaagcagccatc

SEQ ID NO: 227496 - DNA, 20 bp, synthetic construct
  source 1..20: mol_type = other DNA
tgtagcgggaaagcagccat

SEQ ID NO: 227497 - DNA, 20 bp, synthetic construct
  source 1..20: mol_type = other DNA
ttgtagcgggaaagcagcca

SEQ ID NO: 227498 - DNA, 20 bp, synthetic construct
  source 1..20: mol_type = other DNA
attgtagcgggaaagcagcc

SEQ ID NO: 227499 - DNA, 20 bp, synthetic construct
  source 1..20: mol_type = other DNA
aattgtagcgggaaagcagc

SEQ ID NO: 227500 - DNA, 20 bp, synthetic construct
  source 1..20: mol_type = other DNA
taattgtagcgggaaagcag

SEQ ID NO: 227501 - DNA, 20 bp, synthetic construct
  source 1..20: mol_type = other DNA
gtaattgtagcgggaaagca

SEQ ID NO: 227502 - DNA, 20 bp, synthetic construct
  source 1..20: mol_type = other DNA
cgtaattgtagcgggaaagc

SEQ ID NO: 227503 - DNA, 20 bp, synthetic construct
  source 1..20: mol_type = other DNA
acgtaattgtagcgggaaag

SEQ ID NO: 227504 - DNA, 20 bp, synthetic construct
  source 1..20: mol_type = other DNA
aacgtaattgtagcgggaaa

SEQ ID NO: 227505 - DNA, 20 bp, synthetic construct
  source 1..20: mol_type = other DNA
caacgtaattgtagcgggaa

SEQ ID NO: 227506 - DNA, 20 bp, synthetic construct
  source 1..20: mol_type = other DNA
tcaacgtaattgtagcggga

SEQ ID NO: 227507 - DNA, 20 bp, synthetic construct
  source 1..20: mol_type = other DNA
ctcaacgtaattgtagcggg

SEQ ID NO: 227508 - DNA, 20 bp, synthetic construct
  source 1..20: mol_type = other DNA
gctcaacgtaattgtagcgg

SEQ ID NO: 227509 - DNA, 20 bp, synthetic construct
  source 1..20: mol_type = other DNA
tgctcaacgtaattgtagcg

SEQ ID NO: 227510 - DNA, 20 bp, synthetic construct
  source 1..20: mol_type = other DNA
ctgctcaacgtaattgtagc

SEQ ID NO: 227511 - DNA, 20 bp, synthetic construct
  source 1..20: mol_type = other DNA
actgctcaacgtaattgtag

SEQ ID NO: 227512 - DNA, 20 bp, synthetic construct
  source 1..20: mol_type = other DNA
aactgctcaacgtaattgta

SEQ ID NO: 227513 - DNA, 20 bp, synthetic construct
  source 1..20: mol_type = other DNA
taactgctcaacgtaattgt

SEQ ID NO: 227514 - DNA, 20 bp, synthetic construct
  source 1..20: mol_type = other DNA
gtaactgctcaacgtaattg

SEQ ID NO: 227515 - DNA, 20 bp, synthetic construct
  source 1..20: mol_type = other DNA
tgtaactgctcaacgtaatt

SEQ ID NO: 227516 - DNA, 20 bp, synthetic construct
  source 1..20: mol_type = other DNA
ttgtaactgctcaacgtaat

SEQ ID NO: 227517 - DNA, 20 bp, synthetic construct
  source 1..20: mol_type = other DNA
gttgtaactgctcaacgtaa

SEQ ID NO: 227518 - DNA, 20 bp, synthetic construct
  source 1..20: mol_type = other DNA
tgttgtaactgctcaacgta

SEQ ID NO: 227519 - DNA, 20 bp, synthetic construct
  source 1..20: mol_type = other DNA
ctgttgtaactgctcaacgt

SEQ ID NO: 227520 - DNA, 20 bp, synthetic construct
  source 1..20: mol_type = other DNA
tctgttgtaactgctcaacg

SEQ ID NO: 227521 - DNA, 20 bp, synthetic construct
  source 1..20: mol_type = other DNA
ctctgttgtaactgctcaac

SEQ ID NO: 227522 - DNA, 20 bp, synthetic construct
  source 1..20: mol_type = other DNA
tctctgttgtaactgctcaa

SEQ ID NO: 227523 - DNA, 20 bp, synthetic construct
  source 1..20: mol_type = other DNA
gtctctgttgtaactgctca

SEQ ID NO: 227524 - DNA, 20 bp, synthetic construct
  source 1..20: mol_type = other DNA
ggtctctgttgtaactgctc

SEQ ID NO: 227525 - DNA, 20 bp, synthetic construct
  source 1..20: mol_type = other DNA
tggtctctgttgtaactgct

SEQ ID NO: 227526 - DNA, 20 bp, synthetic construct
  source 1..20: mol_type = other DNA
gtggtctctgttgtaactgc

SEQ ID NO: 227527 - DNA, 20 bp, synthetic construct
  source 1..20: mol_type = other DNA
cgtggtctctgttgtaactg

SEQ ID NO: 227528 - DNA, 20 bp, synthetic construct
  source 1..20: mol_type = other DNA
acgtggtctctgttgtaact

SEQ ID NO: 227529 - DNA, 20 bp, synthetic construct
  source 1..20: mol_type = other DNA
cacgtggtctctgttgtaac

SEQ ID NO: 227530 - DNA, 20 bp, synthetic construct
  source 1..20: mol_type = other DNA
ccacgtggtctctgttgtaa

SEQ ID NO: 227531 - DNA, 20 bp, synthetic construct
  source 1..20: mol_type = other DNA
gccacgtggtctctgttgta

SEQ ID NO: 227532 - DNA, 20 bp, synthetic construct
  source 1..20: mol_type = other DNA
ggccacgtggtctctgttgt

SEQ ID NO: 227533 - DNA, 20 bp, synthetic construct
  source 1..20: mol_type = other DNA
gggccacgtggtctctgttg

SEQ ID NO: 227534 - DNA, 20 bp, synthetic construct
  source 1..20: mol_type = other DNA
tgggccacgtggtctctgtt

SEQ ID NO: 227535 - DNA, 20 bp, synthetic construct
  source 1..20: mol_type = other DNA
gtgggccacgtggtctctgt

SEQ ID NO: 227536 - DNA, 20 bp, synthetic construct
  source 1..20: mol_type = other DNA
tgtgggccacgtggtctctg

SEQ ID NO: 227537 - DNA, 20 bp, synthetic construct
  source 1..20: mol_type = other DNA
ttgtgggccacgtggtctct

SEQ ID NO: 227538 - DNA, 20 bp, synthetic construct
  source 1..20: mol_type = other DNA
tttgtgggccacgtggtctc

SEQ ID NO: 227539 - DNA, 20 bp, synthetic construct
  source 1..20: mol_type = other DNA
ctttgtgggccacgtggtct

SEQ ID NO: 227540 - DNA, 20 bp, synthetic construct
  source 1..20: mol_type = other DNA
gctttgtgggccacgtggtc

SEQ ID NO: 227541 - DNA, 20 bp, synthetic construct
  source 1..20: mol_type = other DNA
ggctttgtgggccacgtggt

SEQ ID NO: 227542 - DNA, 20 bp, synthetic construct
  source 1..20: mol_type = other DNA
aggctttgtgggccacgtgg

SEQ ID NO: 227543 - DNA, 20 bp, synthetic construct
  source 1..20: mol_type = other DNA
aaggctttgtgggccacgtg

SEQ ID NO: 227544 - DNA, 20 bp, synthetic construct
  source 1..20: mol_type = other DNA
taaggctttgtgggccacgt

SEQ ID NO: 227545 - DNA, 20 bp, synthetic construct
  source 1..20: mol_type = other DNA
gtaaggctttgtgggccacg

SEQ ID NO: 227546 - DNA, 20 bp, synthetic construct
  source 1..20: mol_type = other DNA
tgtaaggctttgtgggccac

SEQ ID NO: 227547 - DNA, 20 bp, synthetic construct
  source 1..20: mol_type = other DNA
ttgtaaggctttgtgggcca

SEQ ID NO: 227548 - DNA, 20 bp, synthetic construct
  source 1..20: mol_type = other DNA
attgtaaggctttgtgggcc

SEQ ID NO: 227549 - DNA, 20 bp, synthetic construct
  source 1..20: mol_type = other DNA
tattgtaaggctttgtgggc

SEQ ID NO: 227550 - DNA, 20 bp, synthetic construct
  source 1..20: mol_type = other DNA
atattgtaaggctttgtggg

SEQ ID NO: 227551 - DNA, 20 bp, synthetic construct
  source 1..20: mol_type = other DNA
aatattgtaaggctttgtgg

SEQ ID NO: 227552 - DNA, 20 bp, synthetic construct
  source 1..20: mol_type = other DNA
aaatattgtaaggctttgtg

SEQ ID NO: 227553 - DNA, 20 bp, synthetic construct
  source 1..20: mol_type = other DNA
taaatattgtaaggctttgt

SEQ ID NO: 227554 - DNA, 20 bp, synthetic construct
  source 1..20: mol_type = other DNA
gtaaatattgtaaggctttg

SEQ ID NO: 227555 - DNA, 20 bp, synthetic construct
  source 1..20: mol_type = other DNA
agtaaatattgtaaggcttt

SEQ ID NO: 227556 - DNA, 20 bp, synthetic construct
  source 1..20: mol_type = other DNA
tagtaaatattgtaaggctt

SEQ ID NO: 227557 - DNA, 20 bp, synthetic construct
  source 1..20: mol_type = other DNA
atagtaaatattgtaaggct

SEQ ID NO: 227558 - DNA, 20 bp, synthetic construct
  source 1..20: mol_type = other DNA
gatagtaaatattgtaaggc

SEQ ID NO: 227559 - DNA, 20 bp, synthetic construct
  source 1..20: mol_type = other DNA
agatagtaaatattgtaagg

SEQ ID NO: 227560 - DNA, 20 bp, synthetic construct
  source 1..20: mol_type = other DNA
cagatagtaaatattgtaag

SEQ ID NO: 227561 - DNA, 20 bp, synthetic construct
  source 1..20: mol_type = other DNA
ccagatagtaaatattgtaa

SEQ ID NO: 227562 - DNA, 20 bp, synthetic construct
  source 1..20: mol_type = other DNA
gccagatagtaaatattgta

SEQ ID NO: 227563 - DNA, 20 bp, synthetic construct
  source 1..20: mol_type = other DNA
ggccagatagtaaatattgt

SEQ ID NO: 227564 - DNA, 20 bp, synthetic construct
  source 1..20: mol_type = other DNA
gggccagatagtaaatattg

SEQ ID NO: 227565 - DNA, 20 bp, synthetic construct
  source 1..20: mol_type = other DNA
agggccagatagtaaatatt

SEQ ID NO: 227566 - DNA, 20 bp, synthetic construct
  source 1..20: mol_type = other DNA
aagggccagatagtaaatat

SEQ ID NO: 227567 - DNA, 20 bp, synthetic construct
  source 1..20: mol_type = other DNA
aaagggccagatagtaaata

SEQ ID NO: 227568 - DNA, 20 bp, synthetic construct
  source 1..20: mol_type = other DNA
gaaagggccagatagtaaat

SEQ ID NO: 227569 - DNA, 20 bp, synthetic construct
  source 1..20: mol_type = other DNA
ggaaagggccagatagtaaa

SEQ ID NO: 227570 - DNA, 20 bp, synthetic construct
  source 1..20: mol_type = other DNA
tggaaagggccagatagtaa

SEQ ID NO: 227571 - DNA, 20 bp, synthetic construct
  source 1..20: mol_type = other DNA
ctggaaagggccagatagta

SEQ ID NO: 227572 - DNA, 20 bp, synthetic construct
  source 1..20: mol_type = other DNA
tctggaaagggccagatagt

SEQ ID NO: 227573 - DNA, 20 bp, synthetic construct
  source 1..20: mol_type = other DNA
ttctggaaagggccagatag

SEQ ID NO: 227574 - DNA, 20 bp, synthetic construct
  source 1..20: mol_type = other DNA
tttctggaaagggccagata

SEQ ID NO: 227575 - DNA, 20 bp, synthetic construct
  source 1..20: mol_type = other DNA
ttttctggaaagggccagat

SEQ ID NO: 227576 - DNA, 20 bp, synthetic construct
  source 1..20: mol_type = other DNA
tttttctggaaagggccaga

SEQ ID NO: 227577 - DNA, 20 bp, synthetic construct
  source 1..20: mol_type = other DNA
ttttttctggaaagggccag

SEQ ID NO: 227578 - DNA, 20 bp, synthetic construct
  source 1..20: mol_type = other DNA
tttttttctggaaagggcca

SEQ ID NO: 227579 - DNA, 20 bp, synthetic construct
  source 1..20: mol_type = other DNA
atttttttctggaaagggcc

SEQ ID NO: 227580 - DNA, 20 bp, synthetic construct
  source 1..20: mol_type = other DNA
catttttttctggaaagggc

SEQ ID NO: 227581 - DNA, 20 bp, synthetic construct
  source 1..20: mol_type = other DNA
acatttttttctggaaaggg

SEQ ID NO: 227582 - DNA, 20 bp, synthetic construct
  source 1..20: mol_type = other DNA
cacatttttttctggaaagg

SEQ ID NO: 227583 - DNA, 20 bp, synthetic construct
  source 1..20: mol_type = other DNA
gcacatttttttctggaaag

SEQ ID NO: 227584 - DNA, 20 bp, synthetic construct
  source 1..20: mol_type = other DNA
ggcacatttttttctggaaa

SEQ ID NO: 227585 - DNA, 20 bp, synthetic construct
  source 1..20: mol_type = other DNA
cggcacatttttttctggaa

SEQ ID NO: 227586 - DNA, 20 bp, synthetic construct
  source 1..20: mol_type = other DNA
tcggcacatttttttctgga

SEQ ID NO: 227587 - DNA, 20 bp, synthetic construct
  source 1..20: mol_type = other DNA
gtcggcacatttttttctgg

SEQ ID NO: 227588 - DNA, 20 bp, synthetic construct
  source 1..20: mol_type = other DNA
agtcggcacatttttttctg

SEQ ID NO: 227589 - DNA, 20 bp, synthetic construct
  source 1..20: mol_type = other DNA
gagtcggcacatttttttct

SEQ ID NO: 227590 - DNA, 20 bp, synthetic construct
  source 1..20: mol_type = other DNA
agagtcggcacatttttttc

SEQ ID NO: 227591 - DNA, 20 bp, synthetic construct
  source 1..20: mol_type = other DNA
aagagtcggcacattttttt

SEQ ID NO: 227592 - DNA, 20 bp, synthetic construct
  source 1..20: mol_type = other DNA
caagagtcggcacatttttt

SEQ ID NO: 227593 - DNA, 20 bp, synthetic construct
  source 1..20: mol_type = other DNA
tcaagagtcggcacattttt

SEQ ID NO: 227594 - DNA, 20 bp, synthetic construct
  source 1..20: mol_type = other DNA
gtcaagagtcggcacatttt

SEQ ID NO: 227595 - DNA, 20 bp, synthetic construct
  source 1..20: mol_type = other DNA
ggtcaagagtcggcacattt

SEQ ID NO: 227596 - DNA, 20 bp, synthetic construct
  source 1..20: mol_type = other DNA
aggtcaagagtcggcacatt

SEQ ID NO: 227597 - DNA, 20 bp, synthetic construct
  source 1..20: mol_type = other DNA
aaggtcaagagtcggcacat

SEQ ID NO: 227598 - DNA, 20 bp, synthetic construct
  source 1..20: mol_type = other DNA
taaggtcaagagtcggcaca

SEQ ID NO: 227599 - DNA, 20 bp, synthetic construct
  source 1..20: mol_type = other DNA
ttaaggtcaagagtcggcac

SEQ ID NO: 227600 - DNA, 20 bp, synthetic construct
  source 1..20: mol_type = other DNA
gttaaggtcaagagtcggca

SEQ ID NO: 227601 - DNA, 20 bp, synthetic construct
  source 1..20: mol_type = other DNA
ggttaaggtcaagagtcggc

SEQ ID NO: 227602 - DNA, 20 bp, synthetic construct
  source 1..20: mol_type = other DNA
aggttaaggtcaagagtcgg

SEQ ID NO: 227603 - DNA, 20 bp, synthetic construct
  source 1..20: mol_type = other DNA
gaggttaaggtcaagagtcg

SEQ ID NO: 227604 - DNA, 20 bp, synthetic construct
  source 1..20: mol_type = other DNA
tgaggttaaggtcaagagtc

SEQ ID NO: 227605 - DNA, 20 bp, synthetic construct
  source 1..20: mol_type = other DNA
ctgaggttaaggtcaagagt

SEQ ID NO: 227606 - DNA, 20 bp, synthetic construct
  source 1..20: mol_type = other DNA
gctgaggttaaggtcaagag

SEQ ID NO: 227607 - DNA, 20 bp, synthetic construct
  source 1..20: mol_type = other DNA
tgctgaggttaaggtcaaga

SEQ ID NO: 227608 - DNA, 20 bp, synthetic construct
  source 1..20: mol_type = other DNA
ttgctgaggttaaggtcaag

SEQ ID NO: 227609 - DNA, 20 bp, synthetic construct
  source 1..20: mol_type = other DNA
attgctgaggttaaggtcaa

SEQ ID NO: 227610 - DNA, 20 bp, synthetic construct
  source 1..20: mol_type = other DNA
aattgctgaggttaaggtca

SEQ ID NO: 227611 - DNA, 20 bp, synthetic construct
  source 1..20: mol_type = other DNA
aaattgctgaggttaaggtc

SEQ ID NO: 227612 - DNA, 20 bp, synthetic construct
  source 1..20: mol_type = other DNA
caaattgctgaggttaaggt

SEQ ID NO: 227613 - DNA, 20 bp, synthetic construct
  source 1..20: mol_type = other DNA
ccaaattgctgaggttaagg

SEQ ID NO: 227614 - DNA, 20 bp, synthetic construct
  source 1..20: mol_type = other DNA
cccaaattgctgaggttaag

SEQ ID NO: 227615 - DNA, 20 bp, synthetic construct
  source 1..20: mol_type = other DNA
tcccaaattgctgaggttaa

SEQ ID NO: 227616 - DNA, 20 bp, synthetic construct
  source 1..20: mol_type = other DNA
ctcccaaattgctgaggtta

SEQ ID NO: 227617 - DNA, 20 bp, synthetic construct
  source 1..20: mol_type = other DNA
cctcccaaattgctgaggtt

SEQ ID NO: 227618 - DNA, 20 bp, synthetic construct
  source 1..20: mol_type = other DNA
gcctcccaaattgctgaggt

SEQ ID NO: 227619 - DNA, 20 bp, synthetic construct
  source 1..20: mol_type = other DNA
ggcctcccaaattgctgagg

SEQ ID NO: 227620 - DNA, 20 bp, synthetic construct
  source 1..20: mol_type = other DNA
cggcctcccaaattgctgag

SEQ ID NO: 227621 - DNA, 20 bp, synthetic construct
  source 1..20: mol_type = other DNA
tcggcctcccaaattgctga

SEQ ID NO: 227622 - DNA, 20 bp, synthetic construct
  source 1..20: mol_type = other DNA
ctcggcctcccaaattgctg

SEQ ID NO: 227623 - DNA, 20 bp, synthetic construct
  source 1..20: mol_type = other DNA
cctcggcctcccaaattgct

SEQ ID NO: 227624 - DNA, 20 bp, synthetic construct
  source 1..20: mol_type = other DNA
gcctcggcctcccaaattgc

SEQ ID NO: 227625 - DNA, 20 bp, synthetic construct
  source 1..20: mol_type = other DNA
tgcctcggcctcccaaattg

SEQ ID NO: 227626 - DNA, 20 bp, synthetic construct
  source 1..20: mol_type = other DNA
ctgcctcggcctcccaaatt

SEQ ID NO: 227627 - DNA, 20 bp, synthetic construct
  source 1..20: mol_type = other DNA
cctgcctcggcctcccaaat

SEQ ID NO: 227628 - DNA, 20 bp, synthetic construct
  source 1..20: mol_type = other DNA
gcctgcctcggcctcccaaa

SEQ ID NO: 227629 - DNA, 20 bp, synthetic construct
  source 1..20: mol_type = other DNA
cgcctgcctcggcctcccaa

SEQ ID NO: 227630 - DNA, 20 bp, synthetic construct
  source 1..20: mol_type = other DNA
ccgcctgcctcggcctccca

SEQ ID NO: 227631 - DNA, 20 bp, synthetic construct
  source 1..20: mol_type = other DNA
tccgcctgcctcggcctccc

SEQ ID NO: 227632 - DNA, 20 bp, synthetic construct
  source 1..20: mol_type = other DNA
atccgcctgcctcggcctcc

SEQ ID NO: 227633 - DNA, 20 bp, synthetic construct
  source 1..20: mol_type = other DNA
gatccgcctgcctcggcctc

SEQ ID NO: 227634 - DNA, 20 bp, synthetic construct
  source 1..20: mol_type = other DNA
cgatccgcctgcctcggcct

SEQ ID NO: 227635 - DNA, 20 bp, synthetic construct
  source 1..20: mol_type = other DNA
gcgatccgcctgcctcggcc

SEQ ID NO: 227636 - DNA, 20 bp, synthetic construct
  source 1..20: mol_type = other DNA
agcgatccgcctgcctcggc

SEQ ID NO: 227637 - DNA, 20 bp, synthetic construct
  source 1..20: mol_type = other DNA
aagcgatccgcctgcctcgg

SEQ ID NO: 227638 - DNA, 20 bp, synthetic construct
  source 1..20: mol_type = other DNA
caagcgatccgcctgcctcg

SEQ ID NO: 227639 - DNA, 20 bp, synthetic construct
  source 1..20: mol_type = other DNA
tcaagcgatccgcctgcctc

SEQ ID NO: 227640 - DNA, 20 bp, synthetic construct
  source 1..20: mol_type = other DNA
ctcaagcgatccgcctgcct

SEQ ID NO: 227641 - DNA, 20 bp, synthetic construct
  source 1..20: mol_type = other DNA
gctcaagcgatccgcctgcc

SEQ ID NO: 227642 - DNA, 20 bp, synthetic construct
  source 1..20: mol_type = other DNA
agctcaagcgatccgcctgc

SEQ ID NO: 227643 - DNA, 20 bp, synthetic construct
  source 1..20: mol_type = other DNA
gagctcaagcgatccgcctg

SEQ ID NO: 227644 - DNA, 20 bp, synthetic construct
  source 1..20: mol_type = other DNA
agagctcaagcgatccgcct

SEQ ID NO: 227645 - DNA, 20 bp, synthetic construct
  source 1..20: mol_type = other DNA
cagagctcaagcgatccgcc

SEQ ID NO: 227646 - DNA, 20 bp, synthetic construct
  source 1..20: mol_type = other DNA
ccagagctcaagcgatccgc

SEQ ID NO: 227647 - DNA, 20 bp, synthetic construct
  source 1..20: mol_type = other DNA
tccagagctcaagcgatccg

SEQ ID NO: 227648 - DNA, 20 bp, synthetic construct
  source 1..20: mol_type = other DNA
ctccagagctcaagcgatcc

SEQ ID NO: 227649 - DNA, 20 bp, synthetic construct
  source 1..20: mol_type = other DNA
actccagagctcaagcgatc

SEQ ID NO: 227650 - DNA, 20 bp, synthetic construct
  source 1..20: mol_type = other DNA
aactccagagctcaagcgat

SEQ ID NO: 227651 - DNA, 20 bp, synthetic construct
  source 1..20: mol_type = other DNA
gaactccagagctcaagcga

SEQ ID NO: 227652 - DNA, 20 bp, synthetic construct
  source 1..20: mol_type = other DNA
tgaactccagagctcaagcg

SEQ ID NO: 227653 - DNA, 20 bp, synthetic construct
  source 1..20: mol_type = other DNA
atgaactccagagctcaagc

SEQ ID NO: 227654 - DNA, 20 bp, synthetic construct
  source 1..20: mol_type = other DNA
catgaactccagagctcaag

SEQ ID NO: 227655 - DNA, 20 bp, synthetic construct
  source 1..20: mol_type = other DNA
tcatgaactccagagctcaa

SEQ ID NO: 227656 - DNA, 20 bp, synthetic construct
  source 1..20: mol_type = other DNA
gtcatgaactccagagctca

SEQ ID NO: 227657 - DNA, 20 bp, synthetic construct
  source 1..20: mol_type = other DNA
ggtcatgaactccagagctc

SEQ ID NO: 227658 - DNA, 20 bp, synthetic construct
  source 1..20: mol_type = other DNA
tggtcatgaactccagagct

SEQ ID NO: 227659 - DNA, 20 bp, synthetic construct
  source 1..20: mol_type = other DNA
ctggtcatgaactccagagc

SEQ ID NO: 227660 - DNA, 20 bp, synthetic construct
  source 1..20: mol_type = other DNA
gctggtcatgaactccagag

SEQ ID NO: 227661 - DNA, 20 bp, synthetic construct
  source 1..20: mol_type = other DNA
ggctggtcatgaactccaga

SEQ ID NO: 227662 - DNA, 20 bp, synthetic construct
  source 1..20: mol_type = other DNA
aggctggtcatgaactccag

SEQ ID NO: 227663 - DNA, 20 bp, synthetic construct
  source 1..20: mol_type = other DNA
caggctggtcatgaactcca

SEQ ID NO: 227664 - DNA, 20 bp, synthetic construct
  source 1..20: mol_type = other DNA
ccaggctggtcatgaactcc

SEQ ID NO: 227665 - DNA, 20 bp, synthetic construct
  source 1..20: mol_type = other DNA
cccaggctggtcatgaactc

SEQ ID NO: 227666 - DNA, 20 bp, synthetic construct
  source 1..20: mol_type = other DNA
gcccaggctggtcatgaact

SEQ ID NO: 227667 - DNA, 20 bp, synthetic construct
  source 1..20: mol_type = other DNA
tgcccaggctggtcatgaac

SEQ ID NO: 227668 - DNA, 20 bp, synthetic construct
  source 1..20: mol_type = other DNA
ttgcccaggctggtcatgaa

SEQ ID NO: 227669 - DNA, 20 bp, synthetic construct
  source 1..20: mol_type = other DNA
gttgcccaggctggtcatga

SEQ ID NO: 227670 - DNA, 20 bp, synthetic construct
  source 1..20: mol_type = other DNA
tgttgcccaggctggtcatg

SEQ ID NO: 227671 - DNA, 20 bp, synthetic construct
  source 1..20: mol_type = other DNA
atgttgcccaggctggtcat

SEQ ID NO: 227672 - DNA, 20 bp, synthetic construct
  source 1..20: mol_type = other DNA
tatgttgcccaggctggtca

SEQ ID NO: 227673 - DNA, 20 bp, synthetic construct
  source 1..20: mol_type = other DNA
ctatgttgcccaggctggtc

SEQ ID NO: 227674 - DNA, 20 bp, synthetic construct
  source 1..20: mol_type = other DNA
actatgttgcccaggctggt

SEQ ID NO: 227675 - DNA, 20 bp, synthetic construct
  source 1..20: mol_type = other DNA
tactatgttgcccaggctgg

SEQ ID NO: 227676 - DNA, 20 bp, synthetic construct
  source 1..20: mol_type = other DNA
ttactatgttgcccaggctg

SEQ ID NO: 227677 - DNA, 20 bp, synthetic construct
  source 1..20: mol_type = other DNA
cttactatgttgcccaggct

SEQ ID NO: 227678 - DNA, 20 bp, synthetic construct
  source 1..20: mol_type = other DNA
tcttactatgttgcccaggc

SEQ ID NO: 227679 - DNA, 20 bp, synthetic construct
  source 1..20: mol_type = other DNA
gtcttactatgttgcccagg

SEQ ID NO: 227680 - DNA, 20 bp, synthetic construct
  source 1..20: mol_type = other DNA
agtcttactatgttgcccag

SEQ ID NO: 227681 - DNA, 20 bp, synthetic construct
  source 1..20: mol_type = other DNA
gagtcttactatgttgccca

SEQ ID NO: 227682 - DNA, 20 bp, synthetic construct
  source 1..20: mol_type = other DNA
ggagtcttactatgttgccc

SEQ ID NO: 227683 - DNA, 20 bp, synthetic construct
  source 1..20: mol_type = other DNA
tggagtcttactatgttgcc

SEQ ID NO: 227684 - DNA, 20 bp, synthetic construct
  source 1..20: mol_type = other DNA
atggagtcttactatgttgc

SEQ ID NO: 227685 - DNA, 20 bp, synthetic construct
  source 1..20: mol_type = other DNA
gatggagtcttactatgttg

SEQ ID NO: 227686 - DNA, 20 bp, synthetic construct
  source 1..20: mol_type = other DNA
agatggagtcttactatgtt

SEQ ID NO: 227687 - DNA, 20 bp, synthetic construct
  source 1..20: mol_type = other DNA
gagatggagtcttactatgt

SEQ ID NO: 227688 - DNA, 20 bp, synthetic construct
  source 1..20: mol_type = other DNA
agagatggagtcttactatg

SEQ ID NO: 227689 - DNA, 20 bp, synthetic construct
  source 1..20: mol_type = other DNA
tagagatggagtcttactat

SEQ ID NO: 227690 - DNA, 20 bp, synthetic construct
  source 1..20: mol_type = other DNA
gtagagatggagtcttacta

SEQ ID NO: 227691 - DNA, 20 bp, synthetic construct
  source 1..20: mol_type = other DNA
tgtagagatggagtcttact

SEQ ID NO: 227692 - DNA, 20 bp, synthetic construct
  source 1..20: mol_type = other DNA
ttgtagagatggagtcttac

SEQ ID NO: 227693 - DNA, 20 bp, synthetic construct
  source 1..20: mol_type = other DNA
tttgtagagatggagtctta

SEQ ID NO: 227694 - DNA, 20 bp, synthetic construct
  source 1..20: mol_type = other DNA
ttttgtagagatggagtctt

SEQ ID NO: 227695 - DNA, 20 bp, synthetic construct
  source 1..20: mol_type = other DNA
tttttgtagagatggagtct

SEQ ID NO: 227696 - DNA, 20 bp, synthetic construct
  source 1..20: mol_type = other DNA
ttttttgtagagatggagtc

SEQ ID NO: 227697 - DNA, 20 bp, synthetic construct
  source 1..20: mol_type = other DNA
attttttgtagagatggagt

SEQ ID NO: 227698 - DNA, 20 bp, synthetic construct
  source 1..20: mol_type = other DNA
tattttttgtagagatggag

SEQ ID NO: 227699 - DNA, 20 bp, synthetic construct
  source 1..20: mol_type = other DNA
gtattttttgtagagatgga

SEQ ID NO: 227700 - DNA, 20 bp, synthetic construct
  source 1..20: mol_type = other DNA
tgtattttttgtagagatgg

SEQ ID NO: 227701 - DNA, 20 bp, synthetic construct
  source 1..20: mol_type = other DNA
ttgtattttttgtagagatg

SEQ ID NO: 227702 - DNA, 20 bp, synthetic construct
  source 1..20: mol_type = other DNA
tttgtattttttgtagagat

SEQ ID NO: 227703 - DNA, 20 bp, synthetic construct
  source 1..20: mol_type = other DNA
ttttgtattttttgtagaga

SEQ ID NO: 227704 - DNA, 20 bp, synthetic construct
  source 1..20: mol_type = other DNA
gttttgtattttttgtagag

SEQ ID NO: 227705 - DNA, 20 bp, synthetic construct
  source 1..20: mol_type = other DNA
tgttttgtattttttgtaga

SEQ ID NO: 227706 - DNA, 20 bp, synthetic construct
  source 1..20: mol_type = other DNA
atgttttgtattttttgtag

SEQ ID NO: 227707 - DNA, 20 bp, synthetic construct
  source 1..20: mol_type = other DNA
aatgttttgtattttttgta

SEQ ID NO: 227708 - DNA, 20 bp, synthetic construct
  source 1..20: mol_type = other DNA
taatgttttgtattttttgt

SEQ ID NO: 227709 - DNA, 20 bp, synthetic construct
  source 1..20: mol_type = other DNA
ctaatgttttgtattttttg

SEQ ID NO: 227710 - DNA, 20 bp, synthetic construct
  source 1..20: mol_type = other DNA
gctaatgttttgtatttttt

SEQ ID NO: 227711 - DNA, 20 bp, synthetic construct
  source 1..20: mol_type = other DNA
ggctaatgttttgtattttt

SEQ ID NO: 227712 - DNA, 20 bp, synthetic construct
  source 1..20: mol_type = other DNA
tggctaatgttttgtatttt

SEQ ID NO: 227713 - DNA, 20 bp, synthetic construct
  source 1..20: mol_type = other DNA
ctggctaatgttttgtattt

SEQ ID NO: 227714 - DNA, 20 bp, synthetic construct
  source 1..20: mol_type = other DNA
cctggctaatgttttgtatt

SEQ ID NO: 227715 - DNA, 20 bp, synthetic construct
  source 1..20: mol_type = other DNA
gcctggctaatgttttgtat

SEQ ID NO: 227716 - DNA, 20 bp, synthetic construct
  source 1..20: mol_type = other DNA
tgcctggctaatgttttgta

SEQ ID NO: 227717 - DNA, 20 bp, synthetic construct
  source 1..20: mol_type = other DNA
atgcctggctaatgttttgt

SEQ ID NO: 227718 - DNA, 20 bp, synthetic construct
  source 1..20: mol_type = other DNA
catgcctggctaatgttttg

SEQ ID NO: 227719 - DNA, 20 bp, synthetic construct
  source 1..20: mol_type = other DNA
ccatgcctggctaatgtttt

SEQ ID NO: 227720 - DNA, 20 bp, synthetic construct
  source 1..20: mol_type = other DNA
accatgcctggctaatgttt

SEQ ID NO: 227721 - DNA, 20 bp, synthetic construct
  source 1..20: mol_type = other DNA
caccatgcctggctaatgtt

SEQ ID NO: 227722 - DNA, 20 bp, synthetic construct
  source 1..20: mol_type = other DNA
ccaccatgcctggctaatgt

SEQ ID NO: 227723 - DNA, 20 bp, synthetic construct
  source 1..20: mol_type = other DNA
accaccatgcctggctaatg

SEQ ID NO: 227724 - DNA, 20 bp, synthetic construct
  source 1..20: mol_type = other DNA
caccaccatgcctggctaat

SEQ ID NO: 227725 - DNA, 20 bp, synthetic construct
  source 1..20: mol_type = other DNA
gcaccaccatgcctggctaa

SEQ ID NO: 227726 - DNA, 20 bp, synthetic construct
  source 1..20: mol_type = other DNA
tgcaccaccatgcctggcta

SEQ ID NO: 227727 - DNA, 20 bp, synthetic construct
  source 1..20: mol_type = other DNA
gtgcaccaccatgcctggct

SEQ ID NO: 227728 - DNA, 20 bp, synthetic construct
  source 1..20: mol_type = other DNA
tgtgcaccaccatgcctggc

SEQ ID NO: 227729 - DNA, 20 bp, synthetic construct
  source 1..20: mol_type = other DNA
gtgtgcaccaccatgcctgg

SEQ ID NO: 227730 - DNA, 20 bp, synthetic construct
  source 1..20: mol_type = other DNA
ggtgtgcaccaccatgcctg

SEQ ID NO: 227731 - DNA, 20 bp, synthetic construct
  source 1..20: mol_type = other DNA
aggtgtgcaccaccatgcct

SEQ ID NO: 227732 - DNA, 20 bp, synthetic construct
  source 1..20: mol_type = other DNA
caggtgtgcaccaccatgcc

SEQ ID NO: 227733 - DNA, 20 bp, synthetic construct
  source 1..20: mol_type = other DNA
acaggtgtgcaccaccatgc

SEQ ID NO: 227734 - DNA, 20 bp, synthetic construct
  source 1..20: mol_type = other DNA
cacaggtgtgcaccaccatg

SEQ ID NO: 227735 - DNA, 20 bp, synthetic construct
  source 1..20: mol_type = other DNA
ccacaggtgtgcaccaccat

SEQ ID NO: 227736 - DNA, 20 bp, synthetic construct
  source 1..20: mol_type = other DNA
accacaggtgtgcaccacca

SEQ ID NO: 227737 - DNA, 20 bp, synthetic construct
  source 1..20: mol_type = other DNA
gaccacaggtgtgcaccacc

SEQ ID NO: 227738 - DNA, 20 bp, synthetic construct
  source 1..20: mol_type = other DNA
ggaccacaggtgtgcaccac

SEQ ID NO: 227739 - DNA, 20 bp, synthetic construct
  source 1..20: mol_type = other DNA
aggaccacaggtgtgcacca

SEQ ID NO: 227740 - DNA, 20 bp, synthetic construct
  source 1..20: mol_type = other DNA
taggaccacaggtgtgcacc

SEQ ID NO: 227741 - DNA, 20 bp, synthetic construct
  source 1..20: mol_type = other DNA
ctaggaccacaggtgtgcac

SEQ ID NO: 227742 - DNA, 20 bp, synthetic construct
  source 1..20: mol_type = other DNA
gctaggaccacaggtgtgca

SEQ ID NO: 227743 - DNA, 20 bp, synthetic construct
  source 1..20: mol_type = other DNA
ggctaggaccacaggtgtgc

SEQ ID NO: 227744 - DNA, 20 bp, synthetic construct
  source 1..20: mol_type = other DNA
tggctaggaccacaggtgtg

SEQ ID NO: 227745 - DNA, 20 bp, synthetic construct
  source 1..20: mol_type = other DNA
gtggctaggaccacaggtgt

SEQ ID NO: 227746 - DNA, 20 bp, synthetic construct
  source 1..20: mol_type = other DNA
agtggctaggaccacaggtg

SEQ ID NO: 227747 - DNA, 20 bp, synthetic construct
  source 1..20: mol_type = other DNA
gagtggctaggaccacaggt

SEQ ID NO: 227748 - DNA, 20 bp, synthetic construct
  source 1..20: mol_type = other DNA
cgagtggctaggaccacagg

SEQ ID NO: 227749 - DNA, 20 bp, synthetic construct
  source 1..20: mol_type = other DNA
ccgagtggctaggaccacag

SEQ ID NO: 227750 - DNA, 20 bp, synthetic construct
  source 1..20: mol_type = other DNA
cccgagtggctaggaccaca

SEQ ID NO: 227751 - DNA, 20 bp, synthetic construct
  source 1..20: mol_type = other DNA
tcccgagtggctaggaccac

SEQ ID NO: 227752 - DNA, 20 bp, synthetic construct
  source 1..20: mol_type = other DNA
ctcccgagtggctaggacca

SEQ ID NO: 227753 - DNA, 20 bp, synthetic construct
  source 1..20: mol_type = other DNA
tctcccgagtggctaggacc

SEQ ID NO: 227754 - DNA, 20 bp, synthetic construct
  source 1..20: mol_type = other DNA
gtctcccgagtggctaggac

SEQ ID NO: 227755 - DNA, 20 bp, synthetic construct
  source 1..20: mol_type = other DNA
agtctcccgagtggctagga

SEQ ID NO: 227756 - DNA, 20 bp, synthetic construct
  source 1..20: mol_type = other DNA
cagtctcccgagtggctagg

SEQ ID NO: 227757 - DNA, 20 bp, synthetic construct
  source 1..20: mol_type = other DNA
tcagtctcccgagtggctag

SEQ ID NO: 227758 - DNA, 20 bp, synthetic construct
  source 1..20: mol_type = other DNA
ctcagtctcccgagtggcta

SEQ ID NO: 227759 - DNA, 20 bp, synthetic construct
  source 1..20: mol_type = other DNA
cctcagtctcccgagtggct

SEQ ID NO: 227760 - DNA, 20 bp, synthetic construct
  source 1..20: mol_type = other DNA
acctcagtctcccgagtggc

SEQ ID NO: 227761 - DNA, 20 bp, synthetic construct
  source 1..20: mol_type = other DNA
cacctcagtctcccgagtgg

SEQ ID NO: 227762 - DNA, 20 bp, synthetic construct
  source 1..20: mol_type = other DNA
ccacctcagtctcccgagtg

SEQ ID NO: 227763 - DNA, 20 bp, synthetic construct
  source 1..20: mol_type = other DNA
cccacctcagtctcccgagt

SEQ ID NO: 227764 - DNA, 20 bp, synthetic construct
  source 1..20: mol_type = other DNA
tcccacctcagtctcccgag

SEQ ID NO: 227765 - DNA, 20 bp, synthetic construct
  source 1..20: mol_type = other DNA
ctcccacctcagtctcccga

SEQ ID NO: 227766 - DNA, 20 bp, synthetic construct
  source 1..20: mol_type = other DNA
cctcccacctcagtctcccg

SEQ ID NO: 227767 - DNA, 20 bp, synthetic construct
  source 1..20: mol_type = other DNA
tcctcccacctcagtctccc

SEQ ID NO: 227768 - DNA, 20 bp, synthetic construct
  source 1..20: mol_type = other DNA
atcctcccacctcagtctcc

SEQ ID NO: 227769 - DNA, 20 bp, synthetic construct
  source 1..20: mol_type = other DNA
gatcctcccacctcagtctc

SEQ ID NO: 227770 - DNA, 20 bp, synthetic construct
  source 1..20: mol_type = other DNA
cgatcctcccacctcagtct

SEQ ID NO: 227771 - DNA, 20 bp, synthetic construct
  source 1..20: mol_type = other DNA
gcgatcctcccacctcagtc

SEQ ID NO: 227772 - DNA, 20 bp, synthetic construct
  source 1..20: mol_type = other DNA
ggcgatcctcccacctcagt

SEQ ID NO: 227773 - DNA, 20 bp, synthetic construct
  source 1..20: mol_type = other DNA
aggcgatcctcccacctcag

SEQ ID NO: 227774 - DNA, 20 bp, synthetic construct
  source 1..20: mol_type = other DNA
caggcgatcctcccacctca

SEQ ID NO: 227775 - DNA, 20 bp, synthetic construct
  source 1..20: mol_type = other DNA
tcaggcgatcctcccacctc

SEQ ID NO: 227776 - DNA, 20 bp, synthetic construct
  source 1..20: mol_type = other DNA
ctcaggcgatcctcccacct

SEQ ID NO: 227777 - DNA, 20 bp, synthetic construct
  source 1..20: mol_type = other DNA
gctcaggcgatcctcccacc

SEQ ID NO: 227778 - DNA, 20 bp, synthetic construct
  source 1..20: mol_type = other DNA
ggctcaggcgatcctcccac

SEQ ID NO: 227779 - DNA, 20 bp, synthetic construct
  source 1..20: mol_type = other DNA
gggctcaggcgatcctccca

SEQ ID NO: 227780 - DNA, 20 bp, synthetic construct
  source 1..20: mol_type = other DNA
tgggctcaggcgatcctccc

SEQ ID NO: 227781 - DNA, 20 bp, synthetic construct
  source 1..20: mol_type = other DNA
ctgggctcaggcgatcctcc

SEQ ID NO: 227782 - DNA, 20 bp, synthetic construct
  source 1..20: mol_type = other DNA
cctgggctcaggcgatcctc

SEQ ID NO: 227783 - DNA, 20 bp, synthetic construct
  source 1..20: mol_type = other DNA
tcctgggctcaggcgatcct

SEQ ID NO: 227784 - DNA, 20 bp, synthetic construct
  source 1..20: mol_type = other DNA
ttcctgggctcaggcgatcc

SEQ ID NO: 227785 - DNA, 20 bp, synthetic construct
  source 1..20: mol_type = other DNA
cttcctgggctcaggcgatc

SEQ ID NO: 227786 - DNA, 20 bp, synthetic construct
  source 1..20: mol_type = other DNA
acttcctgggctcaggcgat

SEQ ID NO: 227787 - DNA, 20 bp, synthetic construct
  source 1..20: mol_type = other DNA
gacttcctgggctcaggcga

SEQ ID NO: 227788 - DNA, 20 bp, synthetic construct
  source 1..20: mol_type = other DNA
cgacttcctgggctcaggcg

SEQ ID NO: 227789 - DNA, 20 bp, synthetic construct
  source 1..20: mol_type = other DNA
tcgacttcctgggctcaggc

SEQ ID NO: 227790 - DNA, 20 bp, synthetic construct
  source 1..20: mol_type = other DNA
ctcgacttcctgggctcagg

SEQ ID NO: 227791 - DNA, 20 bp, synthetic construct
  source 1..20: mol_type = other DNA
cctcgacttcctgggctcag

SEQ ID NO: 227792 - DNA, 20 bp, synthetic construct
  source 1..20: mol_type = other DNA
gcctcgacttcctgggctca

SEQ ID NO: 227793 - DNA, 20 bp, synthetic construct
  source 1..20: mol_type = other DNA
agcctcgacttcctgggctc

SEQ ID NO: 227794 - DNA, 20 bp, synthetic construct
  source 1..20: mol_type = other DNA
cagcctcgacttcctgggct

SEQ ID NO: 227795 - DNA, 20 bp, synthetic construct
  source 1..20: mol_type = other DNA
gcagcctcgacttcctgggc

SEQ ID NO: 227796 - DNA, 20 bp, synthetic construct
  source 1..20: mol_type = other DNA
tgcagcctcgacttcctggg

SEQ ID NO: 227797 - DNA, 20 bp, synthetic construct
  source 1..20: mol_type = other DNA
ctgcagcctcgacttcctgg

SEQ ID NO: 227798 - DNA, 20 bp, synthetic construct
  source 1..20: mol_type = other DNA
actgcagcctcgacttcctg

SEQ ID NO: 227799 - DNA, 20 bp, synthetic construct
  source 1..20: mol_type = other DNA
cactgcagcctcgacttcct

SEQ ID NO: 227800 - DNA, 20 bp, synthetic construct
  source 1..20: mol_type = other DNA
tcactgcagcctcgacttcc

SEQ ID NO: 227801 - DNA, 20 bp, synthetic construct
  source 1..20: mol_type = other DNA
ctcactgcagcctcgacttc

SEQ ID NO: 227802 - DNA, 20 bp, synthetic construct
  source 1..20: mol_type = other DNA
gctcactgcagcctcgactt

SEQ ID NO: 227803 - DNA, 20 bp, synthetic construct
  source 1..20: mol_type = other DNA
agctcactgcagcctcgact

SEQ ID NO: 227804 - DNA, 20 bp, synthetic construct
  source 1..20: mol_type = other DNA
cagctcactgcagcctcgac

SEQ ID NO: 227805 - DNA, 20 bp, synthetic construct
  source 1..20: mol_type = other DNA
acagctcactgcagcctcga

SEQ ID NO: 227806 - DNA, 20 bp, synthetic construct
  source 1..20: mol_type = other DNA
cacagctcactgcagcctcg

SEQ ID NO: 227807 - DNA, 20 bp, synthetic construct
  source 1..20: mol_type = other DNA
tcacagctcactgcagcctc

SEQ ID NO: 227808 - DNA, 20 bp, synthetic construct
  source 1..20: mol_type = other DNA
atcacagctcactgcagcct

SEQ ID NO: 227809 - DNA, 20 bp, synthetic construct
  source 1..20: mol_type = other DNA
catcacagctcactgcagcc

SEQ ID NO: 227810 - DNA, 20 bp, synthetic construct
  source 1..20: mol_type = other DNA
ccatcacagctcactgcagc

SEQ ID NO: 227811 - DNA, 20 bp, synthetic construct
  source 1..20: mol_type = other DNA
gccatcacagctcactgcag

SEQ ID NO: 227812 - DNA, 20 bp, synthetic construct
  source 1..20: mol_type = other DNA
tgccatcacagctcactgca

SEQ ID NO: 227813 - DNA, 20 bp, synthetic construct
  source 1..20: mol_type = other DNA
gtgccatcacagctcactgc

SEQ ID NO: 227814 - DNA, 20 bp, synthetic construct
  source 1..20: mol_type = other DNA
ggtgccatcacagctcactg

SEQ ID NO: 227815 - DNA, 20 bp, synthetic construct
  source 1..20: mol_type = other DNA
tggtgccatcacagctcact

SEQ ID NO: 227816 - DNA, 20 bp, synthetic construct
  source 1..20: mol_type = other DNA
gtggtgccatcacagctcac

SEQ ID NO: 227817 - DNA, 20 bp, synthetic construct
  source 1..20: mol_type = other DNA
agtggtgccatcacagctca

SEQ ID NO: 227818 - DNA, 20 bp, synthetic construct
  source 1..20: mol_type = other DNA
cagtggtgccatcacagctc

SEQ ID NO: 227819 - DNA, 20 bp, synthetic construct
  source 1..20: mol_type = other DNA
gcagtggtgccatcacagct

SEQ ID NO: 227820 - DNA, 20 bp, synthetic construct
  source 1..20: mol_type = other DNA
tgcagtggtgccatcacagc

SEQ ID NO: 227821 - DNA, 20 bp, synthetic construct
  source 1..20: mol_type = other DNA
gtgcagtggtgccatcacag

SEQ ID NO: 227822 - DNA, 20 bp, synthetic construct
  source 1..20: mol_type = other DNA
ggtgcagtggtgccatcaca

SEQ ID NO: 227823 - DNA, 20 bp, synthetic construct
  source 1..20: mol_type = other DNA
aggtgcagtggtgccatcac

SEQ ID NO: 227824 - DNA, 20 bp, synthetic construct
  source 1..20: mol_type = other DNA
gaggtgcagtggtgccatca

SEQ ID NO: 227825 - DNA, 20 bp, synthetic construct
  source 1..20: mol_type = other DNA
tgaggtgcagtggtgccatc

SEQ ID NO: 227826 - DNA, 20 bp, synthetic construct
  source 1..20: mol_type = other DNA
ctgaggtgcagtggtgccat

SEQ ID NO: 227827 - DNA, 20 bp, synthetic construct
  source 1..20: mol_type = other DNA
gctgaggtgcagtggtgcca

SEQ ID NO: 227828 - DNA, 20 bp, synthetic construct
  source 1..20: mol_type = other DNA
ggctgaggtgcagtggtgcc

SEQ ID NO: 227829 - DNA, 20 bp, synthetic construct
  source 1..20: mol_type = other DNA
aggctgaggtgcagtggtgc

SEQ ID NO: 227830 - DNA, 20 bp, synthetic construct
  source 1..20: mol_type = other DNA
caggctgaggtgcagtggtg

SEQ ID NO: 227831 - DNA, 20 bp, synthetic construct
  source 1..20: mol_type = other DNA
ccaggctgaggtgcagtggt

SEQ ID NO: 227832 - DNA, 20 bp, synthetic construct
  source 1..20: mol_type = other DNA
cccaggctgaggtgcagtgg

SEQ ID NO: 227833 - DNA, 20 bp, synthetic construct
  source 1..20: mol_type = other DNA
gcccaggctgaggtgcagtg

SEQ ID NO: 227834 - DNA, 20 bp, synthetic construct
  source 1..20: mol_type = other DNA
cgcccaggctgaggtgcagt

SEQ ID NO: 227835 - DNA, 20 bp, synthetic construct
  source 1..20: mol_type = other DNA
tcgcccaggctgaggtgcag

SEQ ID NO: 227836 - DNA, 20 bp, synthetic construct
  source 1..20: mol_type = other DNA
gtcgcccaggctgaggtgca

SEQ ID NO: 227837 - DNA, 20 bp, synthetic construct
  source 1..20: mol_type = other DNA
tgtcgcccaggctgaggtgc

SEQ ID NO: 227838 - DNA, 20 bp, synthetic construct
  source 1..20: mol_type = other DNA
ctgtcgcccaggctgaggtg

SEQ ID NO: 227839 - DNA, 20 bp, synthetic construct
  source 1..20: mol_type = other DNA
tctgtcgcccaggctgaggt

SEQ ID NO: 227840 - DNA, 20 bp, synthetic construct
  source 1..20: mol_type = other DNA
ctctgtcgcccaggctgagg

SEQ ID NO: 227841 - DNA, 20 bp, synthetic construct
  source 1..20: mol_type = other DNA
gctctgtcgcccaggctgag

SEQ ID NO: 227842 - DNA, 20 bp, synthetic construct
  source 1..20: mol_type = other DNA
tgctctgtcgcccaggctga

SEQ ID NO: 227843 - DNA, 20 bp, synthetic construct
  source 1..20: mol_type = other DNA
ttgctctgtcgcccaggctg

SEQ ID NO: 227844 - DNA, 20 bp, synthetic construct
  source 1..20: mol_type = other DNA
cttgctctgtcgcccaggct

SEQ ID NO: 227845 - DNA, 20 bp, synthetic construct
  source 1..20: mol_type = other DNA
tcttgctctgtcgcccaggc

SEQ ID NO: 227846 - DNA, 20 bp, synthetic construct
  source 1..20: mol_type = other DNA
gtcttgctctgtcgcccagg

SEQ ID NO: 227847 - DNA, 20 bp, synthetic construct
  source 1..20: mol_type = other DNA
ggtcttgctctgtcgcccag

SEQ ID NO: 227848 - DNA, 20 bp, synthetic construct
  source 1..20: mol_type = other DNA
aggtcttgctctgtcgccca

SEQ ID NO: 227849 - DNA, 20 bp, synthetic construct
  source 1..20: mol_type = other DNA
aaggtcttgctctgtcgccc

SEQ ID NO: 227850 - DNA, 20 bp, synthetic construct
  source 1..20: mol_type = other DNA
caaggtcttgctctgtcgcc

SEQ ID NO: 227851 - DNA, 20 bp, synthetic construct
  source 1..20: mol_type = other DNA
acaaggtcttgctctgtcgc

SEQ ID NO: 227852 - DNA, 20 bp, synthetic construct
  source 1..20: mol_type = other DNA
gacaaggtcttgctctgtcg

SEQ ID NO: 227853 - DNA, 20 bp, synthetic construct
  source 1..20: mol_type = other DNA
agacaaggtcttgctctgtc

SEQ ID NO: 227854 - DNA, 20 bp, synthetic construct
  source 1..20: mol_type = other DNA
gagacaaggtcttgctctgt

SEQ ID NO: 227855 - DNA, 20 bp, synthetic construct
  source 1..20: mol_type = other DNA
ggagacaaggtcttgctctg

SEQ ID NO: 227856 - DNA, 20 bp, synthetic construct
  source 1..20: mol_type = other DNA
tggagacaaggtcttgctct

SEQ ID NO: 227857 - DNA, 20 bp, synthetic construct
  source 1..20: mol_type = other DNA
ttggagacaaggtcttgctc

SEQ ID NO: 227858 - DNA, 20 bp, synthetic construct
  source 1..20: mol_type = other DNA
tttggagacaaggtcttgct

SEQ ID NO: 227859 - DNA, 20 bp, synthetic construct
  source 1..20: mol_type = other DNA
atttggagacaaggtcttgc

SEQ ID NO: 227860 - DNA, 20 bp, synthetic construct
  source 1..20: mol_type = other DNA
tatttggagacaaggtcttg

SEQ ID NO: 227861 - DNA, 20 bp, synthetic construct
  source 1..20: mol_type = other DNA
ttatttggagacaaggtctt

SEQ ID NO: 227862 - DNA, 20 bp, synthetic construct
  source 1..20: mol_type = other DNA
tttatttggagacaaggtct

SEQ ID NO: 227863 - DNA, 20 bp, synthetic construct
  source 1..20: mol_type = other DNA
atttatttggagacaaggtc

SEQ ID NO: 227864 - DNA, 20 bp, synthetic construct
  source 1..20: mol_type = other DNA
tatttatttggagacaaggt

SEQ ID NO: 227865 - DNA, 20 bp, synthetic construct
  source 1..20: mol_type = other DNA
ttatttatttggagacaagg

SEQ ID NO: 227866 - DNA, 20 bp, synthetic construct
  source 1..20: mol_type = other DNA
tttatttatttggagacaag

SEQ ID NO: 227867 - DNA, 20 bp, synthetic construct
  source 1..20: mol_type = other DNA
atttatttatttggagacaa

SEQ ID NO: 227868 - DNA, 20 bp, synthetic construct
  source 1..20: mol_type = other DNA
tatttatttatttggagaca

SEQ ID NO: 227869 - DNA, 20 bp, synthetic construct
  source 1..20: mol_type = other DNA
ttatttatttatttggagac

SEQ ID NO: 227870 - DNA, 20 bp, synthetic construct
  source 1..20: mol_type = other DNA
attatttatttatttggaga

SEQ ID NO: 227871 - DNA, 20 bp, synthetic construct
  source 1..20: mol_type = other DNA
cattatttatttatttggag

SEQ ID NO: 227872 - DNA, 20 bp, synthetic construct
  source 1..20: mol_type = other DNA
gcattatttatttatttgga

SEQ ID NO: 227873 - DNA, 20 bp, synthetic construct
  source 1..20: mol_type = other DNA
tgcattatttatttatttgg

SEQ ID NO: 227874 - DNA, 20 bp, synthetic construct
  source 1..20: mol_type = other DNA
ttgcattatttatttatttg

SEQ ID NO: 227875 - DNA, 20 bp, synthetic construct
  source 1..20: mol_type = other DNA
tttgcattatttatttattt

SEQ ID NO: 227876 - DNA, 20 bp, synthetic construct
  source 1..20: mol_type = other DNA
ctttgcattatttatttatt

SEQ ID NO: 227877 - DNA, 20 bp, synthetic construct
  source 1..20: mol_type = other DNA
actttgcattatttatttat

SEQ ID NO: 227878 - DNA, 20 bp, synthetic construct
  source 1..20: mol_type = other DNA
tactttgcattatttattta

SEQ ID NO: 227879 - DNA, 20 bp, synthetic construct
  source 1..20: mol_type = other DNA
ttactttgcattatttattt

SEQ ID NO: 227880 - DNA, 20 bp, synthetic construct
  source 1..20: mol_type = other DNA
tttactttgcattatttatt

SEQ ID NO: 227881 - DNA, 20 bp, synthetic construct
  source 1..20: mol_type = other DNA
ttttactttgcattatttat

SEQ ID NO: 227882 - DNA, 20 bp, synthetic construct
  source 1..20: mol_type = other DNA
attttactttgcattattta

SEQ ID NO: 227883 - DNA, 20 bp, synthetic construct
  source 1..20: mol_type = other DNA
tattttactttgcattattt

SEQ ID NO: 227884 - DNA, 20 bp, synthetic construct
  source 1..20: mol_type = other DNA
ttattttactttgcattatt

SEQ ID NO: 227885 - DNA, 20 bp, synthetic construct
  source 1..20: mol_type = other DNA
tttattttactttgcattat

SEQ ID NO: 227886 - DNA, 20 bp, synthetic construct
  source 1..20: mol_type = other DNA
atttattttactttgcatta

SEQ ID NO: 227887 - DNA, 20 bp, synthetic construct
  source 1..20: mol_type = other DNA
tatttattttactttgcatt

SEQ ID NO: 227888 - DNA, 20 bp, synthetic construct
  source 1..20: mol_type = other DNA
ttatttattttactttgcat

SEQ ID NO: 227889 - DNA, 20 bp, synthetic construct
  source 1..20: mol_type = other DNA
tttatttattttactttgca

SEQ ID NO: 227890 - DNA, 20 bp, synthetic construct
  source 1..20: mol_type = other DNA
ttttatttattttactttgc

SEQ ID NO: 227891 - DNA, 20 bp, synthetic construct
  source 1..20: mol_type = other DNA
gttttatttattttactttg

SEQ ID NO: 227892 - DNA, 20 bp, synthetic construct
  source 1..20: mol_type = other DNA
ggttttatttattttacttt

SEQ ID NO: 227893 - DNA, 20 bp, synthetic construct
  source 1..20: mol_type = other DNA
tggttttatttattttactt

SEQ ID NO: 227894 - DNA, 20 bp, synthetic construct
  source 1..20: mol_type = other DNA
atggttttatttattttact

SEQ ID NO: 227895 - DNA, 20 bp, synthetic construct
  source 1..20: mol_type = other DNA
tatggttttatttattttac

SEQ ID NO: 227896 - DNA, 20 bp, synthetic construct
  source 1..20: mol_type = other DNA
atatggttttatttatttta

SEQ ID NO: 227897 - DNA, 20 bp, synthetic construct
  source 1..20: mol_type = other DNA
tatatggttttatttatttt

SEQ ID NO: 227898 - DNA, 20 bp, synthetic construct
  source 1..20: mol_type = other DNA
ttatatggttttatttattt

SEQ ID NO: 227899 - DNA, 20 bp, synthetic construct
  source 1..20: mol_type = other DNA
tttatatggttttatttatt

SEQ ID NO: 227900 - DNA, 20 bp, synthetic construct
  source 1..20: mol_type = other DNA
ttttatatggttttatttat

SEQ ID NO: 227901 - DNA, 20 bp, synthetic construct
  source 1..20: mol_type = other DNA
tttttatatggttttattta

SEQ ID NO: 227902 - DNA, 20 bp, synthetic construct
  source 1..20: mol_type = other DNA
ctttttatatggttttattt

SEQ ID NO: 227903 - DNA, 20 bp, synthetic construct
  source 1..20: mol_type = other DNA
cctttttatatggttttatt

SEQ ID NO: 227904 - DNA, 20 bp, synthetic construct
  source 1..20: mol_type = other DNA
tcctttttatatggttttat

SEQ ID NO: 227905 - DNA, 20 bp, synthetic construct
  source 1..20: mol_type = other DNA
ttcctttttatatggtttta

SEQ ID NO: 227906 - DNA, 20 bp, synthetic construct
  source 1..20: mol_type = other DNA
attcctttttatatggtttt

SEQ ID NO: 227907 - DNA, 20 bp, synthetic construct
  source 1..20: mol_type = other DNA
gattcctttttatatggttt

SEQ ID NO: 227908 - DNA, 20 bp, synthetic construct
  source 1..20: mol_type = other DNA
tgattcctttttatatggtt

SEQ ID NO: 227909 - DNA, 20 bp, synthetic construct
  source 1..20: mol_type = other DNA
ttgattcctttttatatggt

SEQ ID NO: 227910 - DNA, 20 bp, synthetic construct
  source 1..20: mol_type = other DNA
attgattcctttttatatgg

SEQ ID NO: 227911 - DNA, 20 bp, synthetic construct
  source 1..20: mol_type = other DNA
aattgattcctttttatatg

SEQ ID NO: 227912 - DNA, 20 bp, synthetic construct
  source 1..20: mol_type = other DNA
aaattgattcctttttatat

SEQ ID NO: 227913 - DNA, 20 bp, synthetic construct
  source 1..20: mol_type = other DNA
taaattgattcctttttata

SEQ ID NO: 227914 - DNA, 20 bp, synthetic construct
  source 1..20: mol_type = other DNA
ttaaattgattcctttttat

SEQ ID NO: 227915 - DNA, 20 bp, synthetic construct
  source 1..20: mol_type = other DNA
tttaaattgattccttttta

SEQ ID NO: 227916 - DNA, 20 bp, synthetic construct
  source 1..20: mol_type = other DNA
ttttaaattgattccttttt

SEQ ID NO: 227917 - DNA, 20 bp, synthetic construct
  source 1..20: mol_type = other DNA
attttaaattgattcctttt

SEQ ID NO: 227918 - DNA, 20 bp, synthetic construct
  source 1..20: mol_type = other DNA
aattttaaattgattccttt

SEQ ID NO: 227919 - DNA, 20 bp, synthetic construct
  source 1..20: mol_type = other DNA
taattttaaattgattcctt

SEQ ID NO: 227920 - DNA, 20 bp, synthetic construct
  source 1..20: mol_type = other DNA
ataattttaaattgattcct

SEQ ID NO: 227921 - DNA, 20 bp, synthetic construct
  source 1..20: mol_type = other DNA
tataattttaaattgattcc

SEQ ID NO: 227922 - DNA, 20 bp, synthetic construct
  source 1..20: mol_type = other DNA
ttataattttaaattgattc

SEQ ID NO: 227923 - DNA, 20 bp, synthetic construct
  source 1..20: mol_type = other DNA
attataattttaaattgatt

SEQ ID NO: 227924 - DNA, 20 bp, synthetic construct
  source 1..20: mol_type = other DNA
cattataattttaaattgat

SEQ ID NO: 227925 - DNA, 20 bp, synthetic construct
  source 1..20: mol_type = other DNA
tcattataattttaaattga

SEQ ID NO: 227926 - DNA, 20 bp, synthetic construct
  source 1..20: mol_type = other DNA
ttcattataattttaaattg

SEQ ID NO: 227927 - DNA, 20 bp, synthetic construct
  source 1..20: mol_type = other DNA
tttcattataattttaaatt

SEQ ID NO: 227928 - DNA, 20 bp, synthetic construct
  source 1..20: mol_type = other DNA
ctttcattataattttaaat

SEQ ID NO: 227929 - DNA, 20 bp, synthetic construct
  source 1..20: mol_type = other DNA
gctttcattataattttaaa

SEQ ID NO: 227930 - DNA, 20 bp, synthetic construct
  source 1..20: mol_type = other DNA
agctttcattataattttaa

SEQ ID NO: 227931 - DNA, 20 bp, synthetic construct
  source 1..20: mol_type = other DNA
cagctttcattataatttta

SEQ ID NO: 227932 - DNA, 20 bp, synthetic construct
  source 1..20: mol_type = other DNA
ccagctttcattataatttt

SEQ ID NO: 227933 - DNA, 20 bp, synthetic construct
  source 1..20: mol_type = other DNA
gccagctttcattataattt

SEQ ID NO: 227934 - DNA, 20 bp, synthetic construct
  source 1..20: mol_type = other DNA
ggccagctttcattataatt

SEQ ID NO: 227935 - DNA, 20 bp, synthetic construct
  source 1..20: mol_type = other DNA
cggccagctttcattataat

SEQ ID NO: 227936 - DNA, 20 bp, synthetic construct
  source 1..20: mol_type = other DNA
ccggccagctttcattataa

SEQ ID NO: 227937 - DNA, 20 bp, synthetic construct
  source 1..20: mol_type = other DNA
cccggccagctttcattata

SEQ ID NO: 227938 - DNA, 20 bp, synthetic construct
  source 1..20: mol_type = other DNA
gcccggccagctttcattat

SEQ ID NO: 227939 - DNA, 20 bp, synthetic construct
  source 1..20: mol_type = other DNA
tgcccggccagctttcatta

SEQ ID NO: 227940 - DNA, 20 bp, synthetic construct
  source 1..20: mol_type = other DNA
atgcccggccagctttcatt

SEQ ID NO: 227941 - DNA, 20 bp, synthetic construct
  source 1..20: mol_type = other DNA
catgcccggccagctttcat

SEQ ID NO: 227942 - DNA, 20 bp, synthetic construct
  source 1..20: mol_type = other DNA
ccatgcccggccagctttca

SEQ ID NO: 227943 - DNA, 20 bp, synthetic construct
  source 1..20: mol_type = other DNA
accatgcccggccagctttc

SEQ ID NO: 227944 - DNA, 20 bp, synthetic construct
  source 1..20: mol_type = other DNA
caccatgcccggccagcttt

SEQ ID NO: 227945 - DNA, 20 bp, synthetic construct
  source 1..20: mol_type = other DNA
ccaccatgcccggccagctt

SEQ ID NO: 227946 - DNA, 20 bp, synthetic construct
  source 1..20: mol_type = other DNA
gccaccatgcccggccagct

SEQ ID NO: 227947 - DNA, 20 bp, synthetic construct
  source 1..20: mol_type = other DNA
agccaccatgcccggccagc

SEQ ID NO: 227948 - DNA, 20 bp, synthetic construct
  source 1..20: mol_type = other DNA
gagccaccatgcccggccag

SEQ ID NO: 227949 - DNA, 20 bp, synthetic construct
  source 1..20: mol_type = other DNA
tgagccaccatgcccggcca

SEQ ID NO: 227950 - DNA, 20 bp, synthetic construct
  source 1..20: mol_type = other DNA
gtgagccaccatgcccggcc

SEQ ID NO: 227951 - DNA, 20 bp, synthetic construct
  source 1..20: mol_type = other DNA
cgtgagccaccatgcccggc

SEQ ID NO: 227952 - DNA, 20 bp, synthetic construct
  source 1..20: mol_type = other DNA
gcgtgagccaccatgcccgg

SEQ ID NO: 227953 - DNA, 20 bp, synthetic construct
  source 1..20: mol_type = other DNA
ggcgtgagccaccatgcccg

SEQ ID NO: 227954 - DNA, 20 bp, synthetic construct
  source 1..20: mol_type = other DNA
aggcgtgagccaccatgccc

SEQ ID NO: 227955 - DNA, 20 bp, synthetic construct
  source 1..20: mol_type = other DNA
caggcgtgagccaccatgcc

SEQ ID NO: 227956 - DNA, 20 bp, synthetic construct
  source 1..20: mol_type = other DNA
acaggcgtgagccaccatgc

SEQ ID NO: 227957 - DNA, 20 bp, synthetic construct
  source 1..20: mol_type = other DNA
tacaggcgtgagccaccatg

SEQ ID NO: 227958 - DNA, 20 bp, synthetic construct
  source 1..20: mol_type = other DNA
ttacaggcgtgagccaccat

SEQ ID NO: 227959 - DNA, 20 bp, synthetic construct
  source 1..20: mol_type = other DNA
attacaggcgtgagccacca

SEQ ID NO: 227960 - DNA, 20 bp, synthetic construct
  source 1..20: mol_type = other DNA
gattacaggcgtgagccacc

SEQ ID NO: 227961 - DNA, 20 bp, synthetic construct
  source 1..20: mol_type = other DNA
ggattacaggcgtgagccac

SEQ ID NO: 227962 - DNA, 20 bp, synthetic construct
  source 1..20: mol_type = other DNA
gggattacaggcgtgagcca

SEQ ID NO: 227963 - DNA, 20 bp, synthetic construct
  source 1..20: mol_type = other DNA
tgggattacaggcgtgagcc

SEQ ID NO: 227964 - DNA, 20 bp, synthetic construct
  source 1..20: mol_type = other DNA
ctgggattacaggcgtgagc

SEQ ID NO: 227965 - DNA, 20 bp, synthetic construct
  source 1..20: mol_type = other DNA
gctgggattacaggcgtgag

SEQ ID NO: 227966 - DNA, 20 bp, synthetic construct
  source 1..20: mol_type = other DNA
tgctgggattacaggcgtga

SEQ ID NO: 227967 - DNA, 20 bp, synthetic construct
  source 1..20: mol_type = other DNA
gtgctgggattacaggcgtg

SEQ ID NO: 227968 - DNA, 20 bp, synthetic construct
  source 1..20: mol_type = other DNA
agtgctgggattacaggcgt

SEQ ID NO: 227969 - DNA, 20 bp, synthetic construct
  source 1..20: mol_type = other DNA
aagtgctgggattacaggcg

SEQ ID NO: 227970 - DNA, 20 bp, synthetic construct
  source 1..20: mol_type = other DNA
aaagtgctgggattacaggc

SEQ ID NO: 227971 - DNA, 20 bp, synthetic construct
  source 1..20: mol_type = other DNA
caaagtgctgggattacagg

SEQ ID NO: 227972 - DNA, 20 bp, synthetic construct
  source 1..20: mol_type = other DNA
ccaaagtgctgggattacag

SEQ ID NO: 227973 - DNA, 20 bp, synthetic construct
  source 1..20: mol_type = other DNA
cccaaagtgctgggattaca

SEQ ID NO: 227974 - DNA, 20 bp, synthetic construct
  source 1..20: mol_type = other DNA
tcccaaagtgctgggattac

SEQ ID NO: 227975 - DNA, 20 bp, synthetic construct
  source 1..20: mol_type = other DNA
ctcccaaagtgctgggatta

SEQ ID NO: 227976 - DNA, 20 bp, synthetic construct
  source 1..20: mol_type = other DNA
cctcccaaagtgctgggatt

SEQ ID NO: 227977 - DNA, 20 bp, synthetic construct
  source 1..20: mol_type = other DNA
gcctcccaaagtgctgggat

SEQ ID NO: 227978 - DNA, 20 bp, synthetic construct
  source 1..20: mol_type = other DNA
agcctcccaaagtgctggga

SEQ ID NO: 227979 - DNA, 20 bp, synthetic construct
  source 1..20: mol_type = other DNA
cagcctcccaaagtgctggg

SEQ ID NO: 227980 - DNA, 20 bp, synthetic construct
  source 1..20: mol_type = other DNA
tcagcctcccaaagtgctgg

SEQ ID NO: 227981 - DNA, 20 bp, synthetic construct
  source 1..20: mol_type = other DNA
ctcagcctcccaaagtgctg

SEQ ID NO: 227982 - DNA, 20 bp, synthetic construct
  source 1..20: mol_type = other DNA
cctcagcctcccaaagtgct

SEQ ID NO: 227983 - DNA, 20 bp, synthetic construct
  source 1..20: mol_type = other DNA
acctcagcctcccaaagtgc

SEQ ID NO: 227984 - DNA, 20 bp, synthetic construct
  source 1..20: mol_type = other DNA
cacctcagcctcccaaagtg

SEQ ID NO: 227985 - DNA, 20 bp, synthetic construct
  source 1..20: mol_type = other DNA
ccacctcagcctcccaaagt

SEQ ID NO: 227986 - DNA, 20 bp, synthetic construct
  source 1..20: mol_type = other DNA
cccacctcagcctcccaaag

SEQ ID NO: 227987 - DNA, 20 bp, synthetic construct
  source 1..20: mol_type = other DNA
acccacctcagcctcccaaa

SEQ ID NO: 227988 - DNA, 20 bp, synthetic construct
  source 1..20: mol_type = other DNA
cacccacctcagcctcccaa

SEQ ID NO: 227989 - DNA, 20 bp, synthetic construct
  source 1..20: mol_type = other DNA
ccacccacctcagcctccca

SEQ ID NO: 227990 - DNA, 20 bp, synthetic construct
  source 1..20: mol_type = other DNA
tccacccacctcagcctccc

SEQ ID NO: 227991 - DNA, 20 bp, synthetic construct
  source 1..20: mol_type = other DNA
atccacccacctcagcctcc

SEQ ID NO: 227992 - DNA, 20 bp, synthetic construct
  source 1..20: mol_type = other DNA
gatccacccacctcagcctc

SEQ ID NO: 227993 - DNA, 20 bp, synthetic construct
  source 1..20: mol_type = other DNA
tgatccacccacctcagcct

SEQ ID NO: 227994 - DNA, 20 bp, synthetic construct
  source 1..20: mol_type = other DNA
gtgatccacccacctcagcc

SEQ ID NO: 227995 - DNA, 20 bp, synthetic construct
  source 1..20: mol_type = other DNA
cgtgatccacccacctcagc

SEQ ID NO: 227996 - DNA, 20 bp, synthetic construct
  source 1..20: mol_type = other DNA
tcgtgatccacccacctcag

SEQ ID NO: 227997 - DNA, 20 bp, synthetic construct
  source 1..20: mol_type = other DNA
ctcgtgatccacccacctca

SEQ ID NO: 227998 - DNA, 20 bp, synthetic construct
  source 1..20: mol_type = other DNA
cctcgtgatccacccacctc

SEQ ID NO: 227999 - DNA, 20 bp, synthetic construct
  source 1..20: mol_type = other DNA
gcctcgtgatccacccacct

SEQ ID NO: 228000 - DNA, 20 bp, synthetic construct
  source 1..20: mol_type = other DNA
ggcctcgtgatccacccacc

SEQ ID NO: 228001 - DNA, 20 bp, synthetic construct
  source 1..20: mol_type = other DNA
tggcctcgtgatccacccac

SEQ ID NO: 228002 - DNA, 20 bp, synthetic construct
  source 1..20: mol_type = other DNA
ctggcctcgtgatccaccca

SEQ ID NO: 228003 - DNA, 20 bp, synthetic construct
  source 1..20: mol_type = other DNA
cctggcctcgtgatccaccc

SEQ ID NO: 228004 - DNA, 20 bp, synthetic construct
  source 1..20: mol_type = other DNA
tcctggcctcgtgatccacc

SEQ ID NO: 228005 - DNA, 20 bp, synthetic construct
  source 1..20: mol_type = other DNA
ctcctggcctcgtgatccac

SEQ ID NO: 228006 - DNA, 20 bp, synthetic construct
  source 1..20: mol_type = other DNA
tctcctggcctcgtgatcca

SEQ ID NO: 228007 - DNA, 20 bp, synthetic construct
  source 1..20: mol_type = other DNA
atctcctggcctcgtgatcc

SEQ ID NO: 228008 - DNA, 20 bp, synthetic construct
  source 1..20: mol_type = other DNA
gatctcctggcctcgtgatc

SEQ ID NO: 228009 - DNA, 20 bp, synthetic construct
  source 1..20: mol_type = other DNA
cgatctcctggcctcgtgat

SEQ ID NO: 228010 - DNA, 20 bp, synthetic construct
  source 1..20: mol_type = other DNA
tcgatctcctggcctcgtga

SEQ ID NO: 228011 - DNA, 20 bp, synthetic construct
  source 1..20: mol_type = other DNA
ctcgatctcctggcctcgtg

SEQ ID NO: 228012 - DNA, 20 bp, synthetic construct
  source 1..20: mol_type = other DNA
tctcgatctcctggcctcgt

SEQ ID NO: 228013 - DNA, 20 bp, synthetic construct
  source 1..20: mol_type = other DNA
gtctcgatctcctggcctcg

SEQ ID NO: 228014 - DNA, 20 bp, synthetic construct
  source 1..20: mol_type = other DNA
ggtctcgatctcctggcctc

SEQ ID NO: 228015 - DNA, 20 bp, synthetic construct
  source 1..20: mol_type = other DNA
tggtctcgatctcctggcct

SEQ ID NO: 228016 - DNA, 20 bp, synthetic construct
  source 1..20: mol_type = other DNA
atggtctcgatctcctggcc

SEQ ID NO: 228017 - DNA, 20 bp, synthetic construct
  source 1..20: mol_type = other DNA
gatggtctcgatctcctggc

SEQ ID NO: 228018 - DNA, 20 bp, synthetic construct
  source 1..20: mol_type = other DNA
agatggtctcgatctcctgg

SEQ ID NO: 228019 - DNA, 20 bp, synthetic construct
  source 1..20: mol_type = other DNA
aagatggtctcgatctcctg

SEQ ID NO: 228020 - DNA, 20 bp, synthetic construct
  source 1..20: mol_type = other DNA
caagatggtctcgatctcct

SEQ ID NO: 228021 - DNA, 20 bp, synthetic construct
  source 1..20: mol_type = other DNA
ccaagatggtctcgatctcc

SEQ ID NO: 228022 - DNA, 20 bp, synthetic construct
  source 1..20: mol_type = other DNA
gccaagatggtctcgatctc

SEQ ID NO: 228023 - DNA, 20 bp, synthetic construct
  source 1..20: mol_type = other DNA
agccaagatggtctcgatct

SEQ ID NO: 228024 - DNA, 20 bp, synthetic construct
  source 1..20: mol_type = other DNA
tagccaagatggtctcgatc

SEQ ID NO: 228025 - DNA, 20 bp, synthetic construct
  source 1..20: mol_type = other DNA
ttagccaagatggtctcgat

SEQ ID NO: 228026 - DNA, 20 bp, synthetic construct
  source 1..20: mol_type = other DNA
gttagccaagatggtctcga

SEQ ID NO: 228027 - DNA, 20 bp, synthetic construct
  source 1..20: mol_type = other DNA
tgttagccaagatggtctcg

SEQ ID NO: 228028 - DNA, 20 bp, synthetic construct
  source 1..20: mol_type = other DNA
gtgttagccaagatggtctc

SEQ ID NO: 228029 - DNA, 20 bp, synthetic construct
  source 1..20: mol_type = other DNA
cgtgttagccaagatggtct

SEQ ID NO: 228030 - DNA, 20 bp, synthetic construct
  source 1..20: mol_type = other DNA
ccgtgttagccaagatggtc

SEQ ID NO: 228031 - DNA, 20 bp, synthetic construct
  source 1..20: mol_type = other DNA
accgtgttagccaagatggt

SEQ ID NO: 228032 - DNA, 20 bp, synthetic construct
  source 1..20: mol_type = other DNA
caccgtgttagccaagatgg

SEQ ID NO: 228033 - DNA, 20 bp, synthetic construct
  source 1..20: mol_type = other DNA
tcaccgtgttagccaagatg

SEQ ID NO: 228034 - DNA, 20 bp, synthetic construct
  source 1..20: mol_type = other DNA
ttcaccgtgttagccaagat

SEQ ID NO: 228035 - DNA, 20 bp, synthetic construct
  source 1..20: mol_type = other DNA
tttcaccgtgttagccaaga

SEQ ID NO: 228036 - DNA, 20 bp, synthetic construct
  source 1..20: mol_type = other DNA
gtttcaccgtgttagccaag

SEQ ID NO: 228037 - DNA, 20 bp, synthetic construct
  source 1..20: mol_type = other DNA
ggtttcaccgtgttagccaa

SEQ ID NO: 228038 - DNA, 20 bp, synthetic construct
  source 1..20: mol_type = other DNA
gggtttcaccgtgttagcca

SEQ ID NO: 228039 - DNA, 20 bp, synthetic construct
  source 1..20: mol_type = other DNA
ggggtttcaccgtgttagcc

SEQ ID NO: 228040 - DNA, 20 bp, synthetic construct
  source 1..20: mol_type = other DNA
cggggtttcaccgtgttagc

SEQ ID NO: 228041 - DNA, 20 bp, synthetic construct
  source 1..20: mol_type = other DNA
acggggtttcaccgtgttag

SEQ ID NO: 228042 - DNA, 20 bp, synthetic construct
  source 1..20: mol_type = other DNA
gacggggtttcaccgtgtta

SEQ ID NO: 228043 - DNA, 20 bp, synthetic construct
  source 1..20: mol_type = other DNA
agacggggtttcaccgtgtt

SEQ ID NO: 228044 - DNA, 20 bp, synthetic construct
  source 1..20: mol_type = other DNA
gagacggggtttcaccgtgt

SEQ ID NO: 228045 - DNA, 20 bp, synthetic construct
  source 1..20: mol_type = other DNA
agagacggggtttcaccgtg

SEQ ID NO: 228046 - DNA, 20 bp, synthetic construct
  source 1..20: mol_type = other DNA
tagagacggggtttcaccgt

SEQ ID NO: 228047 - DNA, 20 bp, synthetic construct
  source 1..20: mol_type = other DNA
gtagagacggggtttcaccg

SEQ ID NO: 228048 - DNA, 20 bp, synthetic construct
  source 1..20: mol_type = other DNA
agtagagacggggtttcacc

SEQ ID NO: 228049 - DNA, 20 bp, synthetic construct
  source 1..20: mol_type = other DNA
tagtagagacggggtttcac

SEQ ID NO: 228050 - DNA, 20 bp, synthetic construct
  source 1..20: mol_type = other DNA
ttagtagagacggggtttca

SEQ ID NO: 228051 - DNA, 20 bp, synthetic construct
  source 1..20: mol_type = other DNA
tttagtagagacggggtttc

SEQ ID NO: 228052 - DNA, 20 bp, synthetic construct
  source 1..20: mol_type = other DNA
ttttagtagagacggggttt

SEQ ID NO: 228053 - DNA, 20 bp, synthetic construct
  source 1..20: mol_type = other DNA
tttttagtagagacggggtt

SEQ ID NO: 228054 - DNA, 20 bp, synthetic construct
  source 1..20: mol_type = other DNA
atttttagtagagacggggt

SEQ ID NO: 228055 - DNA, 20 bp, synthetic construct
  source 1..20: mol_type = other DNA
tatttttagtagagacgggg

SEQ ID NO: 228056 - DNA, 20 bp, synthetic construct
  source 1..20: mol_type = other DNA
gtatttttagtagagacggg

SEQ ID NO: 228057 - DNA, 20 bp, synthetic construct
  source 1..20: mol_type = other DNA
tgtatttttagtagagacgg

SEQ ID NO: 228058 - DNA, 20 bp, synthetic construct
  source 1..20: mol_type = other DNA
ttgtatttttagtagagacg

SEQ ID NO: 228059 - DNA, 20 bp, synthetic construct
  source 1..20: mol_type = other DNA
tttgtatttttagtagagac

SEQ ID NO: 228060 - DNA, 20 bp, synthetic construct
  source 1..20: mol_type = other DNA
ttttgtatttttagtagaga

SEQ ID NO: 228061 - DNA, 20 bp, synthetic construct
  source 1..20: mol_type = other DNA
tttttgtatttttagtagag

SEQ ID NO: 228062 - DNA, 20 bp, synthetic construct
  source 1..20: mol_type = other DNA
ttttttgtatttttagtaga

SEQ ID NO: 228063 - DNA, 20 bp, synthetic construct
  source 1..20: mol_type = other DNA
tttttttgtatttttagtag

SEQ ID NO: 228064 - DNA, 20 bp, synthetic construct
  source 1..20: mol_type = other DNA
ttttttttgtatttttagta

SEQ ID NO: 228065 - DNA, 20 bp, synthetic construct
  source 1..20: mol_type = other DNA
tttttttttgtatttttagt

SEQ ID NO: 228066 - DNA, 20 bp, synthetic construct
  source 1..20: mol_type = other DNA
ttttttttttgtatttttag

SEQ ID NO: 228067 - DNA, 20 bp, synthetic construct
  source 1..20: mol_type = other DNA
attttttttttgtattttta

SEQ ID NO: 228068 - DNA, 20 bp, synthetic construct
  source 1..20: mol_type = other DNA
aattttttttttgtattttt

SEQ ID NO: 228069 - DNA, 20 bp, synthetic construct
  source 1..20: mol_type = other DNA
taattttttttttgtatttt

SEQ ID NO: 228070 - DNA, 20 bp, synthetic construct
  source 1..20: mol_type = other DNA
ctaattttttttttgtattt

SEQ ID NO: 228071 - DNA, 20 bp, synthetic construct
  source 1..20: mol_type = other DNA
gctaattttttttttgtatt

SEQ ID NO: 228072 - DNA, 20 bp, synthetic construct
  source 1..20: mol_type = other DNA
ggctaattttttttttgtat

SEQ ID NO: 228073 - DNA, 20 bp, synthetic construct
  source 1..20: mol_type = other DNA
cggctaattttttttttgta

SEQ ID NO: 228074 - DNA, 20 bp, synthetic construct
  source 1..20: mol_type = other DNA
ccggctaattttttttttgt

SEQ ID NO: 228075 - DNA, 20 bp, synthetic construct
  source 1..20: mol_type = other DNA
cccggctaattttttttttg

SEQ ID NO: 228076 - DNA, 20 bp, synthetic construct
  source 1..20: mol_type = other DNA
gcccggctaatttttttttt

SEQ ID NO: 228077 - DNA, 20 bp, synthetic construct
  source 1..20: mol_type = other DNA
tgcccggctaattttttttt

SEQ ID NO: 228078 - DNA, 20 bp, synthetic construct
  source 1..20: mol_type = other DNA
gtgcccggctaatttttttt

SEQ ID NO: 228079 - DNA, 20 bp, synthetic construct
  source 1..20: mol_type = other DNA
tgtgcccggctaattttttt

SEQ ID NO: 228080 - DNA, 20 bp, synthetic construct
  source 1..20: mol_type = other DNA
ctgtgcccggctaatttttt

SEQ ID NO: 228081 - DNA, 20 bp, synthetic construct
  source 1..20: mol_type = other DNA
actgtgcccggctaattttt

SEQ ID NO: 228082 - DNA, 20 bp, synthetic construct
  source 1..20: mol_type = other DNA
cactgtgcccggctaatttt

SEQ ID NO: 228083 - DNA, 20 bp, synthetic construct
  source 1..20: mol_type = other DNA
ccactgtgcccggctaattt

SEQ ID NO: 228084 - DNA, 20 bp, synthetic construct
  source 1..20: mol_type = other DNA
gccactgtgcccggctaatt

SEQ ID NO: 228085 - DNA, 20 bp, synthetic construct
  source 1..20: mol_type = other DNA
cgccactgtgcccggctaat

SEQ ID NO: 228086 - DNA, 20 bp, synthetic construct
  source 1..20: mol_type = other DNA
ccgccactgtgcccggctaa

SEQ ID NO: 228087 - DNA, 20 bp, synthetic construct
  source 1..20: mol_type = other DNA
cccgccactgtgcccggcta

SEQ ID NO: 228088 - DNA, 20 bp, synthetic construct
  source 1..20: mol_type = other DNA
gcccgccactgtgcccggct

SEQ ID NO: 228089 - DNA, 20 bp, synthetic construct
  source 1..20: mol_type = other DNA
cgcccgccactgtgcccggc

SEQ ID NO: 228090 - DNA, 20 bp, synthetic construct
  source 1..20: mol_type = other DNA
gcgcccgccactgtgcccgg

SEQ ID NO: 228091 - DNA, 20 bp, synthetic construct
  source 1..20: mol_type = other DNA
ggcgcccgccactgtgcccg

SEQ ID NO: 228092 - DNA, 20 bp, synthetic construct
  source 1..20: mol_type = other DNA
aggcgcccgccactgtgccc

SEQ ID NO: 228093 - DNA, 20 bp, synthetic construct
  source 1..20: mol_type = other DNA
caggcgcccgccactgtgcc

SEQ ID NO: 228094 - DNA, 20 bp, synthetic construct
  source 1..20: mol_type = other DNA
acaggcgcccgccactgtgc

SEQ ID NO: 228095 - DNA, 20 bp, synthetic construct
  source 1..20: mol_type = other DNA
tacaggcgcccgccactgtg

SEQ ID NO: 228096 - DNA, 20 bp, synthetic construct
  source 1..20: mol_type = other DNA
ctacaggcgcccgccactgt

SEQ ID NO: 228097 - DNA, 20 bp, synthetic construct
  source 1..20: mol_type = other DNA
actacaggcgcccgccactg

SEQ ID NO: 228098 - DNA, 20 bp, synthetic construct
  source 1..20: mol_type = other DNA
gactacaggcgcccgccact

SEQ ID NO: 228099 - DNA, 20 bp, synthetic construct
  source 1..20: mol_type = other DNA
ggactacaggcgcccgccac

SEQ ID NO: 228100 - DNA, 20 bp, synthetic construct
  source 1..20: mol_type = other DNA
gggactacaggcgcccgcca

SEQ ID NO: 228101 - DNA, 20 bp, synthetic construct
  source 1..20: mol_type = other DNA
tgggactacaggcgcccgcc

SEQ ID NO: 228102 - DNA, 20 bp, synthetic construct
  source 1..20: mol_type = other DNA
ctgggactacaggcgcccgc

SEQ ID NO: 228103 - DNA, 20 bp, synthetic construct
  source 1..20: mol_type = other DNA
gctgggactacaggcgcccg

SEQ ID NO: 228104 - DNA, 20 bp, synthetic construct
  source 1..20: mol_type = other DNA
agctgggactacaggcgccc

SEQ ID NO: 228105 - DNA, 20 bp, synthetic construct
  source 1..20: mol_type = other DNA
tagctgggactacaggcgcc

SEQ ID NO: 228106 - DNA, 20 bp, synthetic construct
  source 1..20: mol_type = other DNA
gtagctgggactacaggcgc

SEQ ID NO: 228107 - DNA, 20 bp, synthetic construct
  source 1..20: mol_type = other DNA
agtagctgggactacaggcg

SEQ ID NO: 228108 - DNA, 20 bp, synthetic construct
  source 1..20: mol_type = other DNA
gagtagctgggactacaggc

SEQ ID NO: 228109 - DNA, 20 bp, synthetic construct
  source 1..20: mol_type = other DNA
cgagtagctgggactacagg

SEQ ID NO: 228110 - DNA, 20 bp, synthetic construct
  source 1..20: mol_type = other DNA
ccgagtagctgggactacag

SEQ ID NO: 228111 - DNA, 20 bp, synthetic construct
  source 1..20: mol_type = other DNA
cccgagtagctgggactaca

SEQ ID NO: 228112 - DNA, 20 bp, synthetic construct
  source 1..20: mol_type = other DNA
tcccgagtagctgggactac

SEQ ID NO: 228113 - DNA, 20 bp, synthetic construct
  source 1..20: mol_type = other DNA
ctcccgagtagctgggacta

SEQ ID NO: 228114 - DNA, 20 bp, synthetic construct
  source 1..20: mol_type = other DNA
cctcccgagtagctgggact

SEQ ID NO: 228115 - DNA, 20 bp, synthetic construct
  source 1..20: mol_type = other DNA
gcctcccgagtagctgggac

SEQ ID NO: 228116 - DNA, 20 bp, synthetic construct
  source 1..20: mol_type = other DNA
agcctcccgagtagctggga

SEQ ID NO: 228117 - DNA, 20 bp, synthetic construct
  source 1..20: mol_type = other DNA
cagcctcccgagtagctggg

SEQ ID NO: 228118 - DNA, 20 bp, synthetic construct
  source 1..20: mol_type = other DNA
tcagcctcccgagtagctgg

SEQ ID NO: 228119 - DNA, 20 bp, synthetic construct
  source 1..20: mol_type = other DNA
ctcagcctcccgagtagctg

SEQ ID NO: 228120 - DNA, 20 bp, synthetic construct
  source 1..20: mol_type = other DNA
cctcagcctcccgagtagct

SEQ ID NO: 228121 - DNA, 20 bp, synthetic construct
  source 1..20: mol_type = other DNA
gcctcagcctcccgagtagc

SEQ ID NO: 228122 - DNA, 20 bp, synthetic construct
  source 1..20: mol_type = other DNA
tgcctcagcctcccgagtag

SEQ ID NO: 228123 - DNA, 20 bp, synthetic construct
  source 1..20: mol_type = other DNA
ctgcctcagcctcccgagta

SEQ ID NO: 228124 - DNA, 20 bp, synthetic construct
  source 1..20: mol_type = other DNA
cctgcctcagcctcccgagt

SEQ ID NO: 228125 - DNA, 20 bp, synthetic construct
  source 1..20: mol_type = other DNA
tcctgcctcagcctcccgag

SEQ ID NO: 228126 - DNA, 20 bp, synthetic construct
  source 1..20: mol_type = other DNA
ctcctgcctcagcctcccga

SEQ ID NO: 228127 - DNA, 20 bp, synthetic construct
  source 1..20: mol_type = other DNA
tctcctgcctcagcctcccg

SEQ ID NO: 228128 - DNA, 20 bp, synthetic construct
  source 1..20: mol_type = other DNA
ttctcctgcctcagcctccc

SEQ ID NO: 228129 - DNA, 20 bp, synthetic construct
  source 1..20: mol_type = other DNA
attctcctgcctcagcctcc

SEQ ID NO: 228130 - DNA, 20 bp, synthetic construct
  source 1..20: mol_type = other DNA
cattctcctgcctcagcctc

SEQ ID NO: 228131 - DNA, 20 bp, synthetic construct
  source 1..20: mol_type = other DNA
acattctcctgcctcagcct

SEQ ID NO: 228132 - DNA, 20 bp, synthetic construct
  source 1..20: mol_type = other DNA
gacattctcctgcctcagcc

SEQ ID NO: 228133 - DNA, 20 bp, synthetic construct
  source 1..20: mol_type = other DNA
agacattctcctgcctcagc

SEQ ID NO: 228134 - DNA, 20 bp, synthetic construct
  source 1..20: mol_type = other DNA
aagacattctcctgcctcag

SEQ ID NO: 228135 - DNA, 20 bp, synthetic construct
  source 1..20: mol_type = other DNA
caagacattctcctgcctca

SEQ ID NO: 228136 - DNA, 20 bp, synthetic construct
  source 1..20: mol_type = other DNA
tcaagacattctcctgcctc

SEQ ID NO: 228137 - DNA, 20 bp, synthetic construct
  source 1..20: mol_type = other DNA
ttcaagacattctcctgcct

SEQ ID NO: 228138 - DNA, 20 bp, synthetic construct
  source 1..20: mol_type = other DNA
gttcaagacattctcctgcc

SEQ ID NO: 228139 - DNA, 20 bp, synthetic construct
  source 1..20: mol_type = other DNA
ggttcaagacattctcctgc

SEQ ID NO: 228140 - DNA, 20 bp, synthetic construct
  source 1..20: mol_type = other DNA
gggttcaagacattctcctg

SEQ ID NO: 228141 - DNA, 20 bp, synthetic construct
  source 1..20: mol_type = other DNA
cgggttcaagacattctcct

SEQ ID NO: 228142 - DNA, 20 bp, synthetic construct
  source 1..20: mol_type = other DNA
ccgggttcaagacattctcc

SEQ ID NO: 228143 - DNA, 20 bp, synthetic construct
  source 1..20: mol_type = other DNA
cccgggttcaagacattctc

SEQ ID NO: 228144 - DNA, 20 bp, synthetic construct
  source 1..20: mol_type = other DNA
tcccgggttcaagacattct

SEQ ID NO: 228145 - DNA, 20 bp, synthetic construct
  source 1..20: mol_type = other DNA
ctcccgggttcaagacattc

SEQ ID NO: 228146 - DNA, 20 bp, synthetic construct
  source 1..20: mol_type = other DNA
cctcccgggttcaagacatt

SEQ ID NO: 228147 - DNA, 20 bp, synthetic construct
  source 1..20: mol_type = other DNA
acctcccgggttcaagacat

SEQ ID NO: 228148 - DNA, 20 bp, synthetic construct
  source 1..20: mol_type = other DNA
cacctcccgggttcaagaca

SEQ ID NO: 228149 - DNA, 20 bp, synthetic construct
  source 1..20: mol_type = other DNA
ccacctcccgggttcaagac

SEQ ID NO: 228150 - DNA, 20 bp, synthetic construct
  source 1..20: mol_type = other DNA
tccacctcccgggttcaaga

SEQ ID NO: 228151 - DNA, 20 bp, synthetic construct
  source 1..20: mol_type = other DNA
ctccacctcccgggttcaag

SEQ ID NO: 228152 - DNA, 20 bp, synthetic construct
  source 1..20: mol_type = other DNA
gctccacctcccgggttcaa

SEQ ID NO: 228153 - DNA, 20 bp, synthetic construct
  source 1..20: mol_type = other DNA
agctccacctcccgggttca

SEQ ID NO: 228154 - DNA, 20 bp, synthetic construct
  source 1..20: mol_type = other DNA
aagctccacctcccgggttc

SEQ ID NO: 228155 - DNA, 20 bp, synthetic construct
  source 1..20: mol_type = other DNA
caagctccacctcccgggtt

SEQ ID NO: 228156 - DNA, 20 bp, synthetic construct
  source 1..20: mol_type = other DNA
gcaagctccacctcccgggt

SEQ ID NO: 228157 - DNA, 20 bp, synthetic construct
  source 1..20: mol_type = other DNA
tgcaagctccacctcccggg

SEQ ID NO: 228158 - DNA, 20 bp, synthetic construct
  source 1..20: mol_type = other DNA
ctgcaagctccacctcccgg

SEQ ID NO: 228159 - DNA, 20 bp, synthetic construct
  source 1..20: mol_type = other DNA
actgcaagctccacctcccg

SEQ ID NO: 228160 - DNA, 20 bp, synthetic construct
  source 1..20: mol_type = other DNA
cactgcaagctccacctccc

SEQ ID NO: 228161 - DNA, 20 bp, synthetic construct
  source 1..20: mol_type = other DNA
tcactgcaagctccacctcc

SEQ ID NO: 228162 - DNA, 20 bp, synthetic construct
  source 1..20: mol_type = other DNA
ctcactgcaagctccacctc

SEQ ID NO: 228163 - DNA, 20 bp, synthetic construct
  source 1..20: mol_type = other DNA
gctcactgcaagctccacct

SEQ ID NO: 228164 - DNA, 20 bp, synthetic construct
  source 1..20: mol_type = other DNA
ggctcactgcaagctccacc

SEQ ID NO: 228165 - DNA, 20 bp, synthetic construct
  source 1..20: mol_type = other DNA
cggctcactgcaagctccac

SEQ ID NO: 228166 - DNA, 20 bp, synthetic construct
  source 1..20: mol_type = other DNA
tcggctcactgcaagctcca

SEQ ID NO: 228167 - DNA, 20 bp, synthetic construct
  source 1..20: mol_type = other DNA
ctcggctcactgcaagctcc

SEQ ID NO: 228168 - DNA, 20 bp, synthetic construct
  source 1..20: mol_type = other DNA
tctcggctcactgcaagctc

SEQ ID NO: 228169 - DNA, 20 bp, synthetic construct
  source 1..20: mol_type = other DNA
atctcggctcactgcaagct

SEQ ID NO: 228170 - DNA, 20 bp, synthetic construct
  source 1..20: mol_type = other DNA
gatctcggctcactgcaagc

SEQ ID NO: 228171 - DNA, 20 bp, synthetic construct
  source 1..20: mol_type = other DNA
cgatctcggctcactgcaag

SEQ ID NO: 228172 - DNA, 20 bp, synthetic construct
  source 1..20: mol_type = other DNA
acgatctcggctcactgcaa

SEQ ID NO: 228173 - DNA, 20 bp, synthetic construct
  source 1..20: mol_type = other DNA
cacgatctcggctcactgca

SEQ ID NO: 228174 - DNA, 20 bp, synthetic construct
  source 1..20: mol_type = other DNA
gcacgatctcggctcactgc

SEQ ID NO: 228175 - DNA, 20 bp, synthetic construct
  source 1..20: mol_type = other DNA
ggcacgatctcggctcactg

SEQ ID NO: 228176 - DNA, 20 bp, synthetic construct
  source 1..20: mol_type = other DNA
tggcacgatctcggctcact

SEQ ID NO: 228177 - DNA, 20 bp, synthetic construct
  source 1..20: mol_type = other DNA
gtggcacgatctcggctcac

SEQ ID NO: 228178 - DNA, 20 bp, synthetic construct
  source 1..20: mol_type = other DNA
agtggcacgatctcggctca

SEQ ID NO: 228179 - DNA, 20 bp, synthetic construct
  source 1..20: mol_type = other DNA
aagtggcacgatctcggctc

SEQ ID NO: 228180 - DNA, 20 bp, synthetic construct
  source 1..20: mol_type = other DNA
caagtggcacgatctcggct

SEQ ID NO: 228181 - DNA, 20 bp, synthetic construct
  source 1..20: mol_type = other DNA
gcaagtggcacgatctcggc

SEQ ID NO: 228182 - DNA, 20 bp, synthetic construct
  source 1..20: mol_type = other DNA
tgcaagtggcacgatctcgg

SEQ ID NO: 228183 - DNA, 20 bp, synthetic construct
  source 1..20: mol_type = other DNA
ctgcaagtggcacgatctcg

SEQ ID NO: 228184 - DNA, 20 bp, synthetic construct
  source 1..20: mol_type = other DNA
actgcaagtggcacgatctc

SEQ ID NO: 228185 - DNA, 20 bp, synthetic construct
  source 1..20: mol_type = other DNA
gactgcaagtggcacgatct

SEQ ID NO: 228186 - DNA, 20 bp, synthetic construct
  source 1..20: mol_type = other DNA
ggactgcaagtggcacgatc

SEQ ID NO: 228187 - DNA, 20 bp, synthetic construct
  source 1..20: mol_type = other DNA
tggactgcaagtggcacgat

SEQ ID NO: 228188 - DNA, 20 bp, synthetic construct
  source 1..20: mol_type = other DNA
ctggactgcaagtggcacga

SEQ ID NO: 228189 - DNA, 20 bp, synthetic construct
  source 1..20: mol_type = other DNA
gctggactgcaagtggcacg

SEQ ID NO: 228190 - DNA, 20 bp, synthetic construct
  source 1..20: mol_type = other DNA
ggctggactgcaagtggcac

SEQ ID NO: 228191 - DNA, 20 bp, synthetic construct
  source 1..20: mol_type = other DNA
aggctggactgcaagtggca

SEQ ID NO: 228192 - DNA, 20 bp, synthetic construct
  source 1..20: mol_type = other DNA
caggctggactgcaagtggc

SEQ ID NO: 228193 - DNA, 20 bp, synthetic construct
  source 1..20: mol_type = other DNA
ccaggctggactgcaagtgg

SEQ ID NO: 228194 - DNA, 20 bp, synthetic construct
  source 1..20: mol_type = other DNA
cccaggctggactgcaagtg

SEQ ID NO: 228195 - DNA, 20 bp, synthetic construct
  source 1..20: mol_type = other DNA
gcccaggctggactgcaagt

SEQ ID NO: 228196 - DNA, 20 bp, synthetic construct
  source 1..20: mol_type = other DNA
cgcccaggctggactgcaag

SEQ ID NO: 228197 - DNA, 20 bp, synthetic construct
  source 1..20: mol_type = other DNA
tcgcccaggctggactgcaa

SEQ ID NO: 228198 - DNA, 20 bp, synthetic construct
  source 1..20: mol_type = other DNA
ttcgcccaggctggactgca

SEQ ID NO: 228199 - DNA, 20 bp, synthetic construct
  source 1..20: mol_type = other DNA
tttcgcccaggctggactgc

SEQ ID NO: 228200 - DNA, 20 bp, synthetic construct
  source 1..20: mol_type = other DNA
ctttcgcccaggctggactg

SEQ ID NO: 228201 - DNA, 20 bp, synthetic construct
  source 1..20: mol_type = other DNA
tctttcgcccaggctggact

SEQ ID NO: 228202 - DNA, 20 bp, synthetic construct
  source 1..20: mol_type = other DNA
ctctttcgcccaggctggac

SEQ ID NO: 228203 - DNA, 20 bp, synthetic construct
  source 1..20: mol_type = other DNA
gctctttcgcccaggctgga

SEQ ID NO: 228204 - DNA, 20 bp, synthetic construct
  source 1..20: mol_type = other DNA
cgctctttcgcccaggctgg

SEQ ID NO: 228205 - DNA, 20 bp, synthetic construct
  source 1..20: mol_type = other DNA
tcgctctttcgcccaggctg

SEQ ID NO: 228206 - DNA, 20 bp, synthetic construct
  source 1..20: mol_type = other DNA
ctcgctctttcgcccaggct

SEQ ID NO: 228207 - DNA, 20 bp, synthetic construct
  source 1..20: mol_type = other DNA
tctcgctctttcgcccaggc

SEQ ID NO: 228208 - DNA, 20 bp, synthetic construct
  source 1..20: mol_type = other DNA
gtctcgctctttcgcccagg

SEQ ID NO: 228209 - DNA, 20 bp, synthetic construct
  source 1..20: mol_type = other DNA
agtctcgctctttcgcccag

SEQ ID NO: 228210 - DNA, 20 bp, synthetic construct
  source 1..20: mol_type = other DNA
gagtctcgctctttcgccca

SEQ ID NO: 228211 - DNA, 20 bp, synthetic construct
  source 1..20: mol_type = other DNA
ggagtctcgctctttcgccc

SEQ ID NO: 228212 - DNA, 20 bp, synthetic construct
  source 1..20: mol_type = other DNA
cggagtctcgctctttcgcc

SEQ ID NO: 228213 - DNA, 20 bp, synthetic construct
  source 1..20: mol_type = other DNA
acggagtctcgctctttcgc

SEQ ID NO: 228214 - DNA, 20 bp, synthetic construct
  source 1..20: mol_type = other DNA
gacggagtctcgctctttcg

SEQ ID NO: 228215 - DNA, 20 bp, synthetic construct
  source 1..20: mol_type = other DNA
agacggagtctcgctctttc

SEQ ID NO: 228216 - DNA, 20 bp, synthetic construct
  source 1..20: mol_type = other DNA
gagacggagtctcgctcttt

SEQ ID NO: 228217 - DNA, 20 bp, synthetic construct
  source 1..20: mol_type = other DNA
tgagacggagtctcgctctt

SEQ ID NO: 228218 - DNA, 20 bp, synthetic construct
  source 1..20: mol_type = other DNA
ttgagacggagtctcgctct

SEQ ID NO: 228219 - DNA, 20 bp, synthetic construct
  source 1..20: mol_type = other DNA
tttgagacggagtctcgctc

SEQ ID NO: 228220 - DNA, 20 bp, synthetic construct
  source 1..20: mol_type = other DNA
ttttgagacggagtctcgct

SEQ ID NO: 228221 - DNA, 20 bp, synthetic construct
  source 1..20: mol_type = other DNA
tttttgagacggagtctcgc

SEQ ID NO: 228222 - DNA, 20 bp, synthetic construct
  source 1..20: mol_type = other DNA
gtttttgagacggagtctcg

SEQ ID NO: 228223 - DNA, 20 bp, synthetic construct
  source 1..20: mol_type = other DNA
tgtttttgagacggagtctc

SEQ ID NO: 228224 - DNA, 20 bp, synthetic construct
  source 1..20: mol_type = other DNA
ttgtttttgagacggagtct

SEQ ID NO: 228225 - DNA, 20 bp, synthetic construct
  source 1..20: mol_type = other DNA
tttgtttttgagacggagtc

SEQ ID NO: 228226 - DNA, 20 bp, synthetic construct
  source 1..20: mol_type = other DNA
ttttgtttttgagacggagt

SEQ ID NO: 228227 - DNA, 20 bp, synthetic construct
  source 1..20: mol_type = other DNA
tttttgtttttgagacggag

SEQ ID NO: 228228 - DNA, 20 bp, synthetic construct
  source 1..20: mol_type = other DNA
gtttttgtttttgagacgga

SEQ ID NO: 228229 - DNA, 20 bp, synthetic construct
  source 1..20: mol_type = other DNA
tgtttttgtttttgagacgg

SEQ ID NO: 228230 - DNA, 20 bp, synthetic construct
  source 1..20: mol_type = other DNA
ttgtttttgtttttgagacg

SEQ ID NO: 228231 - DNA, 20 bp, synthetic construct
  source 1..20: mol_type = other DNA
tttgtttttgtttttgagac

SEQ ID NO: 228232 - DNA, 20 bp, synthetic construct
  source 1..20: mol_type = other DNA
ttttgtttttgtttttgaga

SEQ ID NO: 228233 - DNA, 20 bp, synthetic construct
  source 1..20: mol_type = other DNA
tttttgtttttgtttttgag

SEQ ID NO: 228234 - DNA, 20 bp, synthetic construct
  source 1..20: mol_type = other DNA
gtttttgtttttgtttttga

SEQ ID NO: 228235 - DNA, 20 bp, synthetic construct
  source 1..20: mol_type = other DNA
tgtttttgtttttgtttttg

SEQ ID NO: 228236 - DNA, 20 bp, synthetic construct
  source 1..20: mol_type = other DNA
ttgtttttgtttttgttttt

SEQ ID NO: 228237 - DNA, 20 bp, synthetic construct
  source 1..20: mol_type = other DNA
tttgtttttgtttttgtttt

SEQ ID NO: 228238 - DNA, 20 bp, synthetic construct
  source 1..20: mol_type = other DNA
ttttgtttttgtttttgttt

SEQ ID NO: 228239 - DNA, 20 bp, synthetic construct
  source 1..20: mol_type = other DNA
tttttgtttttgtttttgtt

SEQ ID NO: 228240 - DNA, 20 bp, synthetic construct
  source 1..20: mol_type = other DNA
gtttttgtttttgtttttgt

SEQ ID NO: 228241 - DNA, 20 bp, synthetic construct
  source 1..20: mol_type = other DNA
tgtttttgtttttgtttttg

SEQ ID NO: 228242 - DNA, 20 bp, synthetic construct
  source 1..20: mol_type = other DNA
ttgtttttgtttttgttttt

SEQ ID NO: 228243 - DNA, 20 bp, synthetic construct
  source 1..20: mol_type = other DNA
tttgtttttgtttttgtttt

SEQ ID NO: 228244 - DNA, 20 bp, synthetic construct
  source 1..20: mol_type = other DNA
ttttgtttttgtttttgttt

SEQ ID NO: 228245 - DNA, 20 bp, synthetic construct
  source 1..20: mol_type = other DNA
tttttgtttttgtttttgtt

SEQ ID NO: 228246 - DNA, 20 bp, synthetic construct
  source 1..20: mol_type = other DNA
ttttttgtttttgtttttgt

SEQ ID NO: 228247 - DNA, 20 bp, synthetic construct
  source 1..20: mol_type = other DNA
tttttttgtttttgtttttg

SEQ ID NO: 228248 - DNA, 20 bp, synthetic construct
  source 1..20: mol_type = other DNA
ttttttttgtttttgttttt

SEQ ID NO: 228249 - DNA, 20 bp, synthetic construct
  source 1..20: mol_type = other DNA
tttttttttgtttttgtttt

SEQ ID NO: 228250 - DNA, 20 bp, synthetic construct
  source 1..20: mol_type = other DNA
atttttttttgtttttgttt

SEQ ID NO: 228251 - DNA, 20 bp, synthetic construct
  source 1..20: mol_type = other DNA
aatttttttttgtttttgtt

SEQ ID NO: 228252 - DNA, 20 bp, synthetic construct
  source 1..20: mol_type = other DNA
taatttttttttgtttttgt

SEQ ID NO: 228253 - DNA, 20 bp, synthetic construct
  source 1..20: mol_type = other DNA
ataatttttttttgtttttg

SEQ ID NO: 228254 - DNA, 20 bp, synthetic construct
  source 1..20: mol_type = other DNA
tataatttttttttgttttt

SEQ ID NO: 228255 - DNA, 20 bp, synthetic construct
  source 1..20: mol_type = other DNA
ttataatttttttttgtttt

SEQ ID NO: 228256 - DNA, 20 bp, synthetic construct
  source 1..20: mol_type = other DNA
attataatttttttttgttt

SEQ ID NO: 228257 - DNA, 20 bp, synthetic construct
  source 1..20: mol_type = other DNA
cattataatttttttttgtt

SEQ ID NO: 228258 - DNA, 20 bp, synthetic construct
  source 1..20: mol_type = other DNA
tcattataatttttttttgt

SEQ ID NO: 228259 - DNA, 20 bp, synthetic construct
  source 1..20: mol_type = other DNA
ttcattataatttttttttg

SEQ ID NO: 228260 - DNA, 20 bp, synthetic construct
  source 1..20: mol_type = other DNA
tttcattataattttttttt

SEQ ID NO: 228261 - DNA, 20 bp, synthetic construct
  source 1..20: mol_type = other DNA
ctttcattataatttttttt

SEQ ID NO: 228262 - DNA, 20 bp, synthetic construct
  source 1..20: mol_type = other DNA
gctttcattataattttttt

SEQ ID NO: 228263 - DNA, 20 bp, synthetic construct
  source 1..20: mol_type = other DNA
ggctttcattataatttttt

SEQ ID NO: 228264 - DNA, 20 bp, synthetic construct
  source 1..20: mol_type = other DNA
tggctttcattataattttt

SEQ ID NO: 228265 - DNA, 20 bp, synthetic construct
  source 1..20: mol_type = other DNA
ttggctttcattataatttt

SEQ ID NO: 228266 - DNA, 20 bp, synthetic construct
  source 1..20: mol_type = other DNA
cttggctttcattataattt

SEQ ID NO: 228267 - DNA, 20 bp, synthetic construct
  source 1..20: mol_type = other DNA
ccttggctttcattataatt

SEQ ID NO: 228268 - DNA, 20 bp, synthetic construct
  source 1..20: mol_type = other DNA
cccttggctttcattataat

SEQ ID NO: 228269 - DNA, 20 bp, synthetic construct
  source 1..20: mol_type = other DNA
ccccttggctttcattataa

SEQ ID NO: 228270 - DNA, 20 bp, synthetic construct
  source 1..20: mol_type = other DNA
gccccttggctttcattata

SEQ ID NO: 228271 - DNA, 20 bp, synthetic construct
  source 1..20: mol_type = other DNA
tgccccttggctttcattat

SEQ ID NO: 228272 - DNA, 20 bp, synthetic construct
  source 1..20: mol_type = other DNA
atgccccttggctttcatta

SEQ ID NO: 228273 - DNA, 20 bp, synthetic construct
  source 1..20: mol_type = other DNA
tatgccccttggctttcatt

SEQ ID NO: 228274 - DNA, 20 bp, synthetic construct
  source 1..20: mol_type = other DNA
ctatgccccttggctttcat

SEQ ID NO: 228275 - DNA, 20 bp, synthetic construct
  source 1..20: mol_type = other DNA
actatgccccttggctttca

SEQ ID NO: 228276 - DNA, 20 bp, synthetic construct
  source 1..20: mol_type = other DNA
tactatgccccttggctttc

SEQ ID NO: 228277 - DNA, 20 bp, synthetic construct
  source 1..20: mol_type = other DNA
ctactatgccccttggcttt

SEQ ID NO: 228278 - DNA, 20 bp, synthetic construct
  source 1..20: mol_type = other DNA
tctactatgccccttggctt

SEQ ID NO: 228279 - DNA, 20 bp, synthetic construct
  source 1..20: mol_type = other DNA
ttctactatgccccttggct

SEQ ID NO: 228280 - DNA, 20 bp, synthetic construct
  source 1..20: mol_type = other DNA
gttctactatgccccttggc

SEQ ID NO: 228281 - DNA, 20 bp, synthetic construct
  source 1..20: mol_type = other DNA
tgttctactatgccccttgg

SEQ ID NO: 228282 - DNA, 20 bp, synthetic construct
  source 1..20: mol_type = other DNA
ttgttctactatgccccttg

SEQ ID NO: 228283 - DNA, 20 bp, synthetic construct
  source 1..20: mol_type = other DNA
tttgttctactatgcccctt

SEQ ID NO: 228284 - DNA, 20 bp, synthetic construct
  source 1..20: mol_type = other DNA
atttgttctactatgcccct

SEQ ID NO: 228285 - DNA, 20 bp, synthetic construct
  source 1..20: mol_type = other DNA
aatttgttctactatgcccc

SEQ ID NO: 228286 - DNA, 20 bp, synthetic construct
  source 1..20: mol_type = other DNA
aaatttgttctactatgccc

SEQ ID NO: 228287 - DNA, 20 bp, synthetic construct
  source 1..20: mol_type = other DNA
aaaatttgttctactatgcc

SEQ ID NO: 228288 - DNA, 20 bp, synthetic construct
  source 1..20: mol_type = other DNA
gaaaatttgttctactatgc

SEQ ID NO: 228289 - DNA, 20 bp, synthetic construct
  source 1..20: mol_type = other DNA
agaaaatttgttctactatg

SEQ ID NO: 228290 - DNA, 20 bp, synthetic construct
  source 1..20: mol_type = other DNA
tagaaaatttgttctactat

SEQ ID NO: 228291 - DNA, 20 bp, synthetic construct
  source 1..20: mol_type = other DNA
ctagaaaatttgttctacta

SEQ ID NO: 228292 - DNA, 20 bp, synthetic construct
  source 1..20: mol_type = other DNA
tctagaaaatttgttctact

SEQ ID NO: 228293 - DNA, 20 bp, synthetic construct
  source 1..20: mol_type = other DNA
ctctagaaaatttgttctac

SEQ ID NO: 228294 - DNA, 20 bp, synthetic construct
  source 1..20: mol_type = other DNA
gctctagaaaatttgttcta

SEQ ID NO: 228295 - DNA, 20 bp, synthetic construct
  source 1..20: mol_type = other DNA
agctctagaaaatttgttct

SEQ ID NO: 228296 - DNA, 20 bp, synthetic construct
  source 1..20: mol_type = other DNA
gagctctagaaaatttgttc

SEQ ID NO: 228297 - DNA, 20 bp, synthetic construct
  source 1..20: mol_type = other DNA
tgagctctagaaaatttgtt

SEQ ID NO: 228298 - DNA, 20 bp, synthetic construct
  source 1..20: mol_type = other DNA
atgagctctagaaaatttgt

SEQ ID NO: 228299 - DNA, 20 bp, synthetic construct
  source 1..20: mol_type = other DNA
aatgagctctagaaaatttg

SEQ ID NO: 228300 - DNA, 20 bp, synthetic construct
  source 1..20: mol_type = other DNA
taatgagctctagaaaattt

SEQ ID NO: 228301 - DNA, 20 bp, synthetic construct
  source 1..20: mol_type = other DNA
ttaatgagctctagaaaatt

SEQ ID NO: 228302 - DNA, 20 bp, synthetic construct
  source 1..20: mol_type = other DNA
cttaatgagctctagaaaat

SEQ ID NO: 228303 - DNA, 20 bp, synthetic construct
  source 1..20: mol_type = other DNA
acttaatgagctctagaaaa

SEQ ID NO: 228304 - DNA, 20 bp, synthetic construct
  source 1..20: mol_type = other DNA
gacttaatgagctctagaaa

SEQ ID NO: 228305 - DNA, 20 bp, synthetic construct
  source 1..20: mol_type = other DNA
tgacttaatgagctctagaa

SEQ ID NO: 228306 - DNA, 20 bp, synthetic construct
  source 1..20: mol_type = other DNA
ttgacttaatgagctctaga

SEQ ID NO: 228307 - DNA, 20 bp, synthetic construct
  source 1..20: mol_type = other DNA
tttgacttaatgagctctag

SEQ ID NO: 228308 - DNA, 20 bp, synthetic construct
  source 1..20: mol_type = other DNA
atttgacttaatgagctcta

SEQ ID NO: 228309 - DNA, 20 bp, synthetic construct
  source 1..20: mol_type = other DNA
catttgacttaatgagctct

SEQ ID NO: 228310 - DNA, 20 bp, synthetic construct
  source 1..20: mol_type = other DNA
tcatttgacttaatgagctc

SEQ ID NO: 228311 - DNA, 20 bp, synthetic construct
  source 1..20: mol_type = other DNA
ctcatttgacttaatgagct

SEQ ID NO: 228312 - DNA, 20 bp, synthetic construct
  source 1..20: mol_type = other DNA
actcatttgacttaatgagc

SEQ ID NO: 228313 - DNA, 20 bp, synthetic construct
  source 1..20: mol_type = other DNA
gactcatttgacttaatgag

SEQ ID NO: 228314 - DNA, 20 bp, synthetic construct
  source 1..20: mol_type = other DNA
tgactcatttgacttaatga

SEQ ID NO: 228315 - DNA, 20 bp, synthetic construct
  source 1..20: mol_type = other DNA
gtgactcatttgacttaatg

SEQ ID NO: 228316 - DNA, 20 bp, synthetic construct
  source 1..20: mol_type = other DNA
ggtgactcatttgacttaat

SEQ ID NO: 228317 - DNA, 20 bp, synthetic construct
  source 1..20: mol_type = other DNA
tggtgactcatttgacttaa

SEQ ID NO: 228318 - DNA, 20 bp, synthetic construct
  source 1..20: mol_type = other DNA
ctggtgactcatttgactta

SEQ ID NO: 228319 - DNA, 20 bp, synthetic construct
  source 1..20: mol_type = other DNA
actggtgactcatttgactt

SEQ ID NO: 228320 - DNA, 20 bp, synthetic construct
  source 1..20: mol_type = other DNA
aactggtgactcatttgact

SEQ ID NO: 228321 - DNA, 20 bp, synthetic construct
  source 1..20: mol_type = other DNA
taactggtgactcatttgac

SEQ ID NO: 228322 - DNA, 20 bp, synthetic construct
  source 1..20: mol_type = other DNA
ctaactggtgactcatttga

SEQ ID NO: 228323 - DNA, 20 bp, synthetic construct
  source 1..20: mol_type = other DNA
actaactggtgactcatttg

SEQ ID NO: 228324 - DNA, 20 bp, synthetic construct
  source 1..20: mol_type = other DNA
tactaactggtgactcattt

SEQ ID NO: 228325 - DNA, 20 bp, synthetic construct
  source 1..20: mol_type = other DNA
ttactaactggtgactcatt

SEQ ID NO: 228326 - DNA, 20 bp, synthetic construct
  source 1..20: mol_type = other DNA
tttactaactggtgactcat

SEQ ID NO: 228327 - DNA, 20 bp, synthetic construct
  source 1..20: mol_type = other DNA
ttttactaactggtgactca

SEQ ID NO: 228328 - DNA, 20 bp, synthetic construct
  source 1..20: mol_type = other DNA
gttttactaactggtgactc

SEQ ID NO: 228329 - DNA, 20 bp, synthetic construct
  source 1..20: mol_type = other DNA
cgttttactaactggtgact

SEQ ID NO: 228330 - DNA, 20 bp, synthetic construct
  source 1..20: mol_type = other DNA
gcgttttactaactggtgac

SEQ ID NO: 228331 - DNA, 20 bp, synthetic construct
  source 1..20: mol_type = other DNA
tgcgttttactaactggtga

SEQ ID NO: 228332 - DNA, 20 bp, synthetic construct
  source 1..20: mol_type = other DNA
ctgcgttttactaactggtg

SEQ ID NO: 228333 - DNA, 20 bp, synthetic construct
  source 1..20: mol_type = other DNA
actgcgttttactaactggt

SEQ ID NO: 228334 - DNA, 20 bp, synthetic construct
  source 1..20: mol_type = other DNA
gactgcgttttactaactgg

SEQ ID NO: 228335 - DNA, 20 bp, synthetic construct
  source 1..20: mol_type = other DNA
tgactgcgttttactaactg

SEQ ID NO: 228336 - DNA, 20 bp, synthetic construct
  source 1..20: mol_type = other DNA
gtgactgcgttttactaact

SEQ ID NO: 228337 - DNA, 20 bp, synthetic construct
  source 1..20: mol_type = other DNA
cgtgactgcgttttactaac

SEQ ID NO: 228338 - DNA, 20 bp, synthetic construct
  source 1..20: mol_type = other DNA
ccgtgactgcgttttactaa

SEQ ID NO: 228339 - DNA, 20 bp, synthetic construct
  source 1..20: mol_type = other DNA
cccgtgactgcgttttacta

SEQ ID NO: 228340 - DNA, 20 bp, synthetic construct
  source 1..20: mol_type = other DNA
ccccgtgactgcgttttact

SEQ ID NO: 228341 - DNA, 20 bp, synthetic construct
  source 1..20: mol_type = other DNA
tccccgtgactgcgttttac

SEQ ID NO: 228342 - DNA, 20 bp, synthetic construct
  source 1..20: mol_type = other DNA
ttccccgtgactgcgtttta

SEQ ID NO: 228343 - DNA, 20 bp, synthetic construct
  source 1..20: mol_type = other DNA
cttccccgtgactgcgtttt

SEQ ID NO: 228344 - DNA, 20 bp, synthetic construct
  source 1..20: mol_type = other DNA
tcttccccgtgactgcgttt

SEQ ID NO: 228345 - DNA, 20 bp, synthetic construct
  source 1..20: mol_type = other DNA
ctcttccccgtgactgcgtt

SEQ ID NO: 228346 - DNA, 20 bp, synthetic construct
  source 1..20: mol_type = other DNA
tctcttccccgtgactgcgt

SEQ ID NO: 228347 - DNA, 20 bp, synthetic construct
  source 1..20: mol_type = other DNA
ctctcttccccgtgactgcg

SEQ ID NO: 228348 - DNA, 20 bp, synthetic construct
  source 1..20: mol_type = other DNA
cctctcttccccgtgactgc

SEQ ID NO: 228349 - DNA, 20 bp, synthetic construct
  source 1..20: mol_type = other DNA
ccctctcttccccgtgactg

SEQ ID NO: 228350 - DNA, 20 bp, synthetic construct
  source 1..20: mol_type = other DNA
gccctctcttccccgtgact

SEQ ID NO: 228351 - DNA, 20 bp, synthetic construct
  source 1..20: mol_type = other DNA
tgccctctcttccccgtgac

SEQ ID NO: 228352 - DNA, 20 bp, synthetic construct
  source 1..20: mol_type = other DNA
ctgccctctcttccccgtga

SEQ ID NO: 228353 - DNA, 20 bp, synthetic construct
  source 1..20: mol_type = other DNA
cctgccctctcttccccgtg

SEQ ID NO: 228354 - DNA, 20 bp, synthetic construct
  source 1..20: mol_type = other DNA
tcctgccctctcttccccgt

SEQ ID NO: 228355 - DNA, 20 bp, synthetic construct
  source 1..20: mol_type = other DNA
atcctgccctctcttccccg

SEQ ID NO: 228356 - DNA, 20 bp, synthetic construct
  source 1..20: mol_type = other DNA
aatcctgccctctcttcccc

SEQ ID NO: 228357 - DNA, 20 bp, synthetic construct
  source 1..20: mol_type = other DNA
gaatcctgccctctcttccc

SEQ ID NO: 228358 - DNA, 20 bp, synthetic construct
  source 1..20: mol_type = other DNA
agaatcctgccctctcttcc

SEQ ID NO: 228359 - DNA, 20 bp, synthetic construct
  source 1..20: mol_type = other DNA
aagaatcctgccctctcttc

SEQ ID NO: 228360 - DNA, 20 bp, synthetic construct
  source 1..20: mol_type = other DNA
aaagaatcctgccctctctt

SEQ ID NO: 228361 - DNA, 20 bp, synthetic construct
  source 1..20: mol_type = other DNA
caaagaatcctgccctctct

SEQ ID NO: 228362 - DNA, 20 bp, synthetic construct
  source 1..20: mol_type = other DNA
tcaaagaatcctgccctctc

SEQ ID NO: 228363 - DNA, 20 bp, synthetic construct
  source 1..20: mol_type = other DNA
ttcaaagaatcctgccctct

SEQ ID NO: 228364 - DNA, 20 bp, synthetic construct
  source 1..20: mol_type = other DNA
cttcaaagaatcctgccctc

SEQ ID NO: 228365 - DNA, 20 bp, synthetic construct
  source 1..20: mol_type = other DNA
gcttcaaagaatcctgccct

SEQ ID NO: 228366 - DNA, 20 bp, synthetic construct
  source 1..20: mol_type = other DNA
tgcttcaaagaatcctgccc

SEQ ID NO: 228367 - DNA, 20 bp, synthetic construct
  source 1..20: mol_type = other DNA
ctgcttcaaagaatcctgcc

SEQ ID NO: 228368 - DNA, 20 bp, synthetic construct
  source 1..20: mol_type = other DNA
gctgcttcaaagaatcctgc

SEQ ID NO: 228369 - DNA, 20 bp, synthetic construct
  source 1..20: mol_type = other DNA
cgctgcttcaaagaatcctg

SEQ ID NO: 228370 - DNA, 20 bp, synthetic construct
  source 1..20: mol_type = other DNA
ccgctgcttcaaagaatcct

SEQ ID NO: 228371 - DNA, 20 bp, synthetic construct
  source 1..20: mol_type = other DNA
gccgctgcttcaaagaatcc

SEQ ID NO: 228372 - DNA, 20 bp, synthetic construct
  source 1..20: mol_type = other DNA
agccgctgcttcaaagaatc

SEQ ID NO: 228373 - DNA, 20 bp, synthetic construct
  source 1..20: mol_type = other DNA
gagccgctgcttcaaagaat

SEQ ID NO: 228374 - DNA, 20 bp, synthetic construct
  source 1..20: mol_type = other DNA
agagccgctgcttcaaagaa

SEQ ID NO: 228375 - DNA, 20 bp, synthetic construct
  source 1..20: mol_type = other DNA
gagagccgctgcttcaaaga

SEQ ID NO: 228376 - DNA, 20 bp, synthetic construct
  source 1..20: mol_type = other DNA
ggagagccgctgcttcaaag

SEQ ID NO: 228377 - DNA, 20 bp, synthetic construct
  source 1..20: mol_type = other DNA
aggagagccgctgcttcaaa

SEQ ID NO: 228378 - DNA, 20 bp, synthetic construct
  source 1..20: mol_type = other DNA
taggagagccgctgcttcaa

SEQ ID NO: 228379 - DNA, 20 bp, synthetic construct
  source 1..20: mol_type = other DNA
ttaggagagccgctgcttca

SEQ ID NO: 228380 - DNA, 20 bp, synthetic construct
  source 1..20: mol_type = other DNA
tttaggagagccgctgcttc

SEQ ID NO: 228381 - DNA, 20 bp, synthetic construct
  source 1..20: mol_type = other DNA
ttttaggagagccgctgctt

SEQ ID NO: 228382 - DNA, 20 bp, synthetic construct
  source 1..20: mol_type = other DNA
tttttaggagagccgctgct

SEQ ID NO: 228383 - DNA, 20 bp, synthetic construct
  source 1..20: mol_type = other DNA
gtttttaggagagccgctgc

SEQ ID NO: 228384 - DNA, 20 bp, synthetic construct
  source 1..20: mol_type = other DNA
tgtttttaggagagccgctg

SEQ ID NO: 228385 - DNA, 20 bp, synthetic construct
  source 1..20: mol_type = other DNA
ttgtttttaggagagccgct

SEQ ID NO: 228386 - DNA, 20 bp, synthetic construct
  source 1..20: mol_type = other DNA
gttgtttttaggagagccgc

SEQ ID NO: 228387 - DNA, 20 bp, synthetic construct
  source 1..20: mol_type = other DNA
ggttgtttttaggagagccg

SEQ ID NO: 228388 - DNA, 20 bp, synthetic construct
  source 1..20: mol_type = other DNA
gggttgtttttaggagagcc

SEQ ID NO: 228389 - DNA, 20 bp, synthetic construct
  source 1..20: mol_type = other DNA
tgggttgtttttaggagagc

SEQ ID NO: 228390 - DNA, 20 bp, synthetic construct
  source 1..20: mol_type = other DNA
gtgggttgtttttaggagag

SEQ ID NO: 228391 - DNA, 20 bp, synthetic construct
  source 1..20: mol_type = other DNA
ggtgggttgtttttaggaga

SEQ ID NO: 228392 - DNA, 20 bp, synthetic construct
  source 1..20: mol_type = other DNA
gggtgggttgtttttaggag

SEQ ID NO: 228393 - DNA, 20 bp, synthetic construct
  source 1..20: mol_type = other DNA
agggtgggttgtttttagga

SEQ ID NO: 228394 - DNA, 20 bp, synthetic construct
  source 1..20: mol_type = other DNA
aagggtgggttgtttttagg

SEQ ID NO: 228395 - DNA, 20 bp, synthetic construct
  source 1..20: mol_type = other DNA
caagggtgggttgtttttag

SEQ ID NO: 228396 - DNA, 20 bp, synthetic construct
  source 1..20: mol_type = other DNA
acaagggtgggttgttttta

SEQ ID NO: 228397 - DNA, 20 bp, synthetic construct
  source 1..20: mol_type = other DNA
gacaagggtgggttgttttt

SEQ ID NO: 228398 - DNA, 20 bp, synthetic construct
  source 1..20: mol_type = other DNA
ggacaagggtgggttgtttt

SEQ ID NO: 228399 - DNA, 20 bp, synthetic construct
  source 1..20: mol_type = other DNA
tggacaagggtgggttgttt

SEQ ID NO: 228400 - DNA, 20 bp, synthetic construct
  source 1..20: mol_type = other DNA
ctggacaagggtgggttgtt

SEQ ID NO: 228401 - DNA, 20 bp, synthetic construct
  source 1..20: mol_type = other DNA
gctggacaagggtgggttgt

SEQ ID NO: 228402 - DNA, 20 bp, synthetic construct
  source 1..20: mol_type = other DNA
agctggacaagggtgggttg

SEQ ID NO: 228403 - DNA, 20 bp, synthetic construct
  source 1..20: mol_type = other DNA
cagctggacaagggtgggtt

SEQ ID NO: 228404 - DNA, 20 bp, synthetic construct
  source 1..20: mol_type = other DNA
gcagctggacaagggtgggt

SEQ ID NO: 228405 - DNA, 20 bp, synthetic construct
  source 1..20: mol_type = other DNA
ggcagctggacaagggtggg

SEQ ID NO: 228406 - DNA, 20 bp, synthetic construct
  source 1..20: mol_type = other DNA
aggcagctggacaagggtgg

SEQ ID NO: 228407 - DNA, 20 bp, synthetic construct
  source 1..20: mol_type = other DNA
aaggcagctggacaagggtg

SEQ ID NO: 228408 - DNA, 20 bp, synthetic construct
  source 1..20: mol_type = other DNA
gaaggcagctggacaagggt

SEQ ID NO: 228409 - DNA, 20 bp, synthetic construct
  source 1..20: mol_type = other DNA
ggaaggcagctggacaaggg

SEQ ID NO: 228410 - DNA, 20 bp, synthetic construct
  source 1..20: mol_type = other DNA
gggaaggcagctggacaagg

SEQ ID NO: 228411 - DNA, 20 bp, synthetic construct
  source 1..20: mol_type = other DNA
agggaaggcagctggacaag

SEQ ID NO: 228412 - DNA, 20 bp, synthetic construct
  source 1..20: mol_type = other DNA
gagggaaggcagctggacaa

SEQ ID NO: 228413 - DNA, 20 bp, synthetic construct
  source 1..20: mol_type = other DNA
ggagggaaggcagctggaca

SEQ ID NO: 228414 - DNA, 20 bp, synthetic construct
  source 1..20: mol_type = other DNA
aggagggaaggcagctggac

SEQ ID NO: 228415 - DNA, 20 bp, synthetic construct
  source 1..20: mol_type = other DNA
caggagggaaggcagctgga

SEQ ID NO: 228416 - DNA, 20 bp, synthetic construct
  source 1..20: mol_type = other DNA
tcaggagggaaggcagctgg

SEQ ID NO: 228417 - DNA, 20 bp, synthetic construct
  source 1..20: mol_type = other DNA
ctcaggagggaaggcagctg

SEQ ID NO: 228418 - DNA, 20 bp, synthetic construct
  source 1..20: mol_type = other DNA
cctcaggagggaaggcagct

SEQ ID NO: 228419 - DNA, 20 bp, synthetic construct
  source 1..20: mol_type = other DNA
ccctcaggagggaaggcagc

SEQ ID NO: 228420 - DNA, 20 bp, synthetic construct
  source 1..20: mol_type = other DNA
accctcaggagggaaggcag

SEQ ID NO: 228421 - DNA, 20 bp, synthetic construct
  source 1..20: mol_type = other DNA
caccctcaggagggaaggca

SEQ ID NO: 228422 - DNA, 20 bp, synthetic construct
  source 1..20: mol_type = other DNA
acaccctcaggagggaaggc

SEQ ID NO: 228423 - DNA, 20 bp, synthetic construct
  source 1..20: mol_type = other DNA
aacaccctcaggagggaagg

SEQ ID NO: 228424 - DNA, 20 bp, synthetic construct
  source 1..20: mol_type = other DNA
gaacaccctcaggagggaag

SEQ ID NO: 228425 - DNA, 20 bp, synthetic construct
  source 1..20: mol_type = other DNA
ggaacaccctcaggagggaa

SEQ ID NO: 228426 - DNA, 20 bp, synthetic construct
  source 1..20: mol_type = other DNA
gggaacaccctcaggaggga

SEQ ID NO: 228427 - DNA, 20 bp, synthetic construct
  source 1..20: mol_type = other DNA
agggaacaccctcaggaggg

SEQ ID NO: 228428 - DNA, 20 bp, synthetic construct
  source 1..20: mol_type = other DNA
aagggaacaccctcaggagg

SEQ ID NO: 228429 - DNA, 20 bp, synthetic construct
  source 1..20: mol_type = other DNA
aaagggaacaccctcaggag

SEQ ID NO: 228430 - DNA, 20 bp, synthetic construct
  source 1..20: mol_type = other DNA
caaagggaacaccctcagga

SEQ ID NO: 228431 - DNA, 20 bp, synthetic construct
  source 1..20: mol_type = other DNA
tcaaagggaacaccctcagg

SEQ ID NO: 228432 - DNA, 20 bp, synthetic construct
  source 1..20: mol_type = other DNA
gtcaaagggaacaccctcag

SEQ ID NO: 228433 - DNA, 20 bp, synthetic construct
  source 1..20: mol_type = other DNA
agtcaaagggaacaccctca

SEQ ID NO: 228434 - DNA, 20 bp, synthetic construct
  source 1..20: mol_type = other DNA
cagtcaaagggaacaccctc

SEQ ID NO: 228435 - DNA, 20 bp, synthetic construct
  source 1..20: mol_type = other DNA
acagtcaaagggaacaccct

SEQ ID NO: 228436 - DNA, 20 bp, synthetic construct
  source 1..20: mol_type = other DNA
cacagtcaaagggaacaccc

SEQ ID NO: 228437 - DNA, 20 bp, synthetic construct
  source 1..20: mol_type = other DNA
acacagtcaaagggaacacc

SEQ ID NO: 228438 - DNA, 20 bp, synthetic construct
  source 1..20: mol_type = other DNA
cacacagtcaaagggaacac

SEQ ID NO: 228439 - DNA, 20 bp, synthetic construct
  source 1..20: mol_type = other DNA
tcacacagtcaaagggaaca

SEQ ID NO: 228440 - DNA, 20 bp, synthetic construct
  source 1..20: mol_type = other DNA
gtcacacagtcaaagggaac

SEQ ID NO: 228441 - DNA, 20 bp, synthetic construct
  source 1..20: mol_type = other DNA
ggtcacacagtcaaagggaa

SEQ ID NO: 228442 - DNA, 20 bp, synthetic construct
  source 1..20: mol_type = other DNA
gggtcacacagtcaaaggga

SEQ ID NO: 228443 - DNA, 20 bp, synthetic construct
  source 1..20: mol_type = other DNA
ggggtcacacagtcaaaggg

SEQ ID NO: 228444 - DNA, 20 bp, synthetic construct
  source 1..20: mol_type = other DNA
gggggtcacacagtcaaagg

SEQ ID NO: 228445 - DNA, 20 bp, synthetic construct
  source 1..20: mol_type = other DNA
tgggggtcacacagtcaaag

SEQ ID NO: 228446 - DNA, 20 bp, synthetic construct
  source 1..20: mol_type = other DNA
atgggggtcacacagtcaaa

SEQ ID NO: 228447 - DNA, 20 bp, synthetic construct
  source 1..20: mol_type = other DNA
gatgggggtcacacagtcaa

SEQ ID NO: 228448 - DNA, 20 bp, synthetic construct
  source 1..20: mol_type = other DNA
ggatgggggtcacacagtca

SEQ ID NO: 228449 - DNA, 20 bp, synthetic construct
  source 1..20: mol_type = other DNA
gggatgggggtcacacagtc

SEQ ID NO: 228450 - DNA, 20 bp, synthetic construct
  source 1..20: mol_type = other DNA
ggggatgggggtcacacagt

SEQ ID NO: 228451 - DNA, 20 bp, synthetic construct
  source 1..20: mol_type = other DNA
aggggatgggggtcacacag

SEQ ID NO: 228452 - DNA, 20 bp, synthetic construct
  source 1..20: mol_type = other DNA
taggggatgggggtcacaca

SEQ ID NO: 228453 - DNA, 20 bp, synthetic construct
  source 1..20: mol_type = other DNA
ataggggatgggggtcacac

SEQ ID NO: 228454 - DNA, 20 bp, synthetic construct
  source 1..20: mol_type = other DNA
aataggggatgggggtcaca

SEQ ID NO: 228455 - DNA, 20 bp, synthetic construct
  source 1..20: mol_type = other DNA
aaataggggatgggggtcac

SEQ ID NO: 228456 - DNA, 20 bp, synthetic construct
  source 1..20: mol_type = other DNA
gaaataggggatgggggtca

SEQ ID NO: 228457 - DNA, 20 bp, synthetic construct
  source 1..20: mol_type = other DNA
ggaaataggggatgggggtc

SEQ ID NO: 228458 - DNA, 20 bp, synthetic construct
  source 1..20: mol_type = other DNA
gggaaataggggatgggggt

SEQ ID NO: 228459 - DNA, 20 bp, synthetic construct
  source 1..20: mol_type = other DNA
tgggaaataggggatggggg

SEQ ID NO: 228460 - DNA, 20 bp, synthetic construct
  source 1..20: mol_type = other DNA
ttgggaaataggggatgggg

SEQ ID NO: 228461 - DNA, 20 bp, synthetic construct
  source 1..20: mol_type = other DNA
gttgggaaataggggatggg

SEQ ID NO: 228462 - DNA, 20 bp, synthetic construct
  source 1..20: mol_type = other DNA
ggttgggaaataggggatgg

SEQ ID NO: 228463 - DNA, 20 bp, synthetic construct
  source 1..20: mol_type = other DNA
cggttgggaaataggggatg

SEQ ID NO: 228464 - DNA, 20 bp, synthetic construct
  source 1..20: mol_type = other DNA
acggttgggaaataggggat

SEQ ID NO: 228465 - DNA, 20 bp, synthetic construct
  source 1..20: mol_type = other DNA
gacggttgggaaatagggga

SEQ ID NO: 228466 - DNA, 20 bp, synthetic construct
  source 1..20: mol_type = other DNA
ggacggttgggaaatagggg

SEQ ID NO: 228467 - DNA, 20 bp, synthetic construct
  source 1..20: mol_type = other DNA
tggacggttgggaaataggg

SEQ ID NO: 228468 - DNA, 20 bp, synthetic construct
  source 1..20: mol_type = other DNA
ttggacggttgggaaatagg

SEQ ID NO: 228469 - DNA, 20 bp, synthetic construct
  source 1..20: mol_type = other DNA
cttggacggttgggaaatag

SEQ ID NO: 228470 - DNA, 20 bp, synthetic construct
  source 1..20: mol_type = other DNA
gcttggacggttgggaaata

SEQ ID NO: 228471 - DNA, 20 bp, synthetic construct
  source 1..20: mol_type = other DNA
ggcttggacggttgggaaat

SEQ ID NO: 228472 - DNA, 20 bp, synthetic construct
  source 1..20: mol_type = other DNA
gggcttggacggttgggaaa

SEQ ID NO: 228473 - DNA, 20 bp, synthetic construct
  source 1..20: mol_type = other DNA
tgggcttggacggttgggaa

SEQ ID NO: 228474 - DNA, 20 bp, synthetic construct
  source 1..20: mol_type = other DNA
gtgggcttggacggttggga

SEQ ID NO: 228475 - DNA, 20 bp, synthetic construct
  source 1..20: mol_type = other DNA
ggtgggcttggacggttggg

SEQ ID NO: 228476 - DNA, 20 bp, synthetic construct
  source 1..20: mol_type = other DNA
aggtgggcttggacggttgg

SEQ ID NO: 228477 - DNA, 20 bp, synthetic construct
  source 1..20: mol_type = other DNA
gaggtgggcttggacggttg

SEQ ID NO: 228478 - DNA, 20 bp, synthetic construct
  source 1..20: mol_type = other DNA
agaggtgggcttggacggtt

SEQ ID NO: 228479 - DNA, 20 bp, synthetic construct
  source 1..20: mol_type = other DNA
tagaggtgggcttggacggt

SEQ ID NO: 228480 - DNA, 20 bp, synthetic construct
  source 1..20: mol_type = other DNA
ctagaggtgggcttggacgg

SEQ ID NO: 228481 - DNA, 20 bp, synthetic construct
  source 1..20: mol_type = other DNA
gctagaggtgggcttggacg

SEQ ID NO: 228482 - DNA, 20 bp, synthetic construct
  source 1..20: mol_type = other DNA
tgctagaggtgggcttggac

SEQ ID NO: 228483 - DNA, 20 bp, synthetic construct
  source 1..20: mol_type = other DNA
atgctagaggtgggcttgga

SEQ ID NO: 228484 - DNA, 20 bp, synthetic construct
  source 1..20: mol_type = other DNA
tatgctagaggtgggcttgg

SEQ ID NO: 228485 - DNA, 20 bp, synthetic construct
  source 1..20: mol_type = other DNA
ttatgctagaggtgggcttg

SEQ ID NO: 228486 - DNA, 20 bp, synthetic construct
  source 1..20: mol_type = other DNA
attatgctagaggtgggctt

SEQ ID NO: 228487 - DNA, 20 bp, synthetic construct
  source 1..20: mol_type = other DNA
tattatgctagaggtgggct

SEQ ID NO: 228488 - DNA, 20 bp, synthetic construct
  source 1..20: mol_type = other DNA
gtattatgctagaggtgggc

SEQ ID NO: 228489 - DNA, 20 bp, synthetic construct
  source 1..20: mol_type = other DNA
cgtattatgctagaggtggg

SEQ ID NO: 228490 - DNA, 20 bp, synthetic construct
  source 1..20: mol_type = other DNA
tcgtattatgctagaggtgg

SEQ ID NO: 228491 - DNA, 20 bp, synthetic construct
  source 1..20: mol_type = other DNA
ctcgtattatgctagaggtg

SEQ ID NO: 228492 - DNA, 20 bp, synthetic construct
  source 1..20: mol_type = other DNA
gctcgtattatgctagaggt

SEQ ID NO: 228493 - DNA, 20 bp, synthetic construct
  source 1..20: mol_type = other DNA
agctcgtattatgctagagg

SEQ ID NO: 228494 - DNA, 20 bp, synthetic construct
  source 1..20: mol_type = other DNA
aagctcgtattatgctagag

SEQ ID NO: 228495 - DNA, 20 bp, synthetic construct
  source 1..20: mol_type = other DNA
aaagctcgtattatgctaga

SEQ ID NO: 228496 - DNA, 20 bp, synthetic construct
  source 1..20: mol_type = other DNA
aaaagctcgtattatgctag

SEQ ID NO: 228497 - DNA, 20 bp, synthetic construct
  source 1..20: mol_type = other DNA
taaaagctcgtattatgcta

SEQ ID NO: 228498 - DNA, 20 bp, synthetic construct
  source 1..20: mol_type = other DNA
ttaaaagctcgtattatgct

SEQ ID NO: 228499 - DNA, 20 bp, synthetic construct
  source 1..20: mol_type = other DNA
attaaaagctcgtattatgc

SEQ ID NO: 228500 - DNA, 20 bp, synthetic construct
  source 1..20: mol_type = other DNA
gattaaaagctcgtattatg

SEQ ID NO: 228501 - DNA, 20 bp, synthetic construct
  source 1..20: mol_type = other DNA
ggattaaaagctcgtattat

SEQ ID NO: 228502 - DNA, 20 bp, synthetic construct
  source 1..20: mol_type = other DNA
gggattaaaagctcgtatta

SEQ ID NO: 228503 - DNA, 20 bp, synthetic construct
  source 1..20: mol_type = other DNA
agggattaaaagctcgtatt

SEQ ID NO: 228504 - DNA, 20 bp, synthetic construct
  source 1..20: mol_type = other DNA
gagggattaaaagctcgtat

SEQ ID NO: 228505 - DNA, 20 bp, synthetic construct
  source 1..20: mol_type = other DNA
agagggattaaaagctcgta

SEQ ID NO: 228506 - DNA, 20 bp, synthetic construct
  source 1..20: mol_type = other DNA
gagagggattaaaagctcgt

SEQ ID NO: 228507 - DNA, 20 bp, synthetic construct
  source 1..20: mol_type = other DNA
ggagagggattaaaagctcg

SEQ ID NO: 228508 - DNA, 20 bp, synthetic construct
  source 1..20: mol_type = other DNA
gggagagggattaaaagctc

SEQ ID NO: 228509 - DNA, 20 bp, synthetic construct
  source 1..20: mol_type = other DNA
agggagagggattaaaagct

SEQ ID NO: 228510 - DNA, 20 bp, synthetic construct
  source 1..20: mol_type = other DNA
cagggagagggattaaaagc

SEQ ID NO: 228511 - DNA, 20 bp, synthetic construct
  source 1..20: mol_type = other DNA
tcagggagagggattaaaag

SEQ ID NO: 228512 - DNA, 20 bp, synthetic construct
  source 1..20: mol_type = other DNA
gtcagggagagggattaaaa

SEQ ID NO: 228513 - DNA, 20 bp, synthetic construct
  source 1..20: mol_type = other DNA
ggtcagggagagggattaaa

SEQ ID NO: 228514 - DNA, 20 bp, synthetic construct
  source 1..20: mol_type = other DNA
gggtcagggagagggattaa

SEQ ID NO: 228515 - DNA, 20 bp, synthetic construct
  source 1..20: mol_type = other DNA
ggggtcagggagagggatta

SEQ ID NO: 228516 - DNA, 20 bp, synthetic construct
  source 1..20: mol_type = other DNA
tggggtcagggagagggatt

SEQ ID NO: 228517 - DNA, 20 bp, synthetic construct
  source 1..20: mol_type = other DNA
ttggggtcagggagagggat

SEQ ID NO: 228518 - DNA, 20 bp, synthetic construct
  source 1..20: mol_type = other DNA
gttggggtcagggagaggga

SEQ ID NO: 228519 - DNA, 20 bp, synthetic construct
  source 1..20: mol_type = other DNA
ggttggggtcagggagaggg

SEQ ID NO: 228520 - DNA, 20 bp, synthetic construct
  source 1..20: mol_type = other DNA
gggttggggtcagggagagg

SEQ ID NO: 228521 - DNA, 20 bp, synthetic construct
  source 1..20: mol_type = other DNA
cgggttggggtcagggagag

SEQ ID NO: 228522 - DNA, 20 bp, synthetic construct
  source 1..20: mol_type = other DNA
tcgggttggggtcagggaga

SEQ ID NO: 228523 - DNA, 20 bp, synthetic construct
  source 1..20: mol_type = other DNA
atcgggttggggtcagggag

SEQ ID NO: 228524 - DNA, 20 bp, synthetic construct
  source 1..20: mol_type = other DNA
aatcgggttggggtcaggga

SEQ ID NO: 228525 - DNA, 20 bp, synthetic construct
  source 1..20: mol_type = other DNA
aaatcgggttggggtcaggg

SEQ ID NO: 228526 - DNA, 20 bp, synthetic construct
  source 1..20: mol_type = other DNA
aaaatcgggttggggtcagg

SEQ ID NO: 228527 - DNA, 20 bp, synthetic construct
  source 1..20: mol_type = other DNA
caaaatcgggttggggtcag

SEQ ID NO: 228528 - DNA, 20 bp, synthetic construct
  source 1..20: mol_type = other DNA
tcaaaatcgggttggggtca

SEQ ID NO: 228529 - DNA, 20 bp, synthetic construct
  source 1..20: mol_type = other DNA
ttcaaaatcgggttggggtc

SEQ ID NO: 228530 - DNA, 20 bp, synthetic construct
  source 1..20: mol_type = other DNA
cttcaaaatcgggttggggt

SEQ ID NO: 228531 - DNA, 20 bp, synthetic construct
  source 1..20: mol_type = other DNA
gcttcaaaatcgggttgggg

SEQ ID NO: 228532 - DNA, 20 bp, synthetic construct
  source 1..20: mol_type = other DNA
ggcttcaaaatcgggttggg

SEQ ID NO: 228533 - DNA, 20 bp, synthetic construct
  source 1..20: mol_type = other DNA
gggcttcaaaatcgggttgg

SEQ ID NO: 228534 - DNA, 20 bp, synthetic construct
  source 1..20: mol_type = other DNA
tgggcttcaaaatcgggttg

SEQ ID NO: 228535 - DNA, 20 bp, synthetic construct
  source 1..20: mol_type = other DNA
ctgggcttcaaaatcgggtt

SEQ ID NO: 228536 - DNA, 20 bp, synthetic construct
  source 1..20: mol_type = other DNA
actgggcttcaaaatcgggt

SEQ ID NO: 228537 - DNA, 20 bp, synthetic construct
  source 1..20: mol_type = other DNA
gactgggcttcaaaatcggg

SEQ ID NO: 228538 - DNA, 20 bp, synthetic construct
  source 1..20: mol_type = other DNA
agactgggcttcaaaatcgg

SEQ ID NO: 228539 - DNA, 20 bp, synthetic construct
  source 1..20: mol_type = other DNA
tagactgggcttcaaaatcg

SEQ ID NO: 228540 - DNA, 20 bp, synthetic construct
  source 1..20: mol_type = other DNA
ctagactgggcttcaaaatc

SEQ ID NO: 228541 - DNA, 20 bp, synthetic construct
  source 1..20: mol_type = other DNA
actagactgggcttcaaaat

SEQ ID NO: 228542 - DNA, 20 bp, synthetic construct
  source 1..20: mol_type = other DNA
tactagactgggcttcaaaa

SEQ ID NO: 228543 - DNA, 20 bp, synthetic construct
  source 1..20: mol_type = other DNA
atactagactgggcttcaaa

SEQ ID NO: 228544 - DNA, 20 bp, synthetic construct
  source 1..20: mol_type = other DNA
aatactagactgggcttcaa

SEQ ID NO: 228545 - DNA, 20 bp, synthetic construct
  source 1..20: mol_type = other DNA
aaatactagactgggcttca

SEQ ID NO: 228546 - DNA, 20 bp, synthetic construct
  source 1..20: mol_type = other DNA
aaaatactagactgggcttc

SEQ ID NO: 228547 - DNA, 20 bp, synthetic construct
  source 1..20: mol_type = other DNA
gaaaatactagactgggctt

SEQ ID NO: 228548 - DNA, 20 bp, synthetic construct
  source 1..20: mol_type = other DNA
agaaaatactagactgggct

SEQ ID NO: 228549 - DNA, 20 bp, synthetic construct
  source 1..20: mol_type = other DNA
gagaaaatactagactgggc

SEQ ID NO: 228550 - DNA, 20 bp, synthetic construct
  source 1..20: mol_type = other DNA
tgagaaaatactagactggg

SEQ ID NO: 228551 - DNA, 20 bp, synthetic construct
  source 1..20: mol_type = other DNA
ttgagaaaatactagactgg

SEQ ID NO: 228552 - DNA, 20 bp, synthetic construct
  source 1..20: mol_type = other DNA
tttgagaaaatactagactg

SEQ ID NO: 228553 - DNA, 20 bp, synthetic construct
  source 1..20: mol_type = other DNA
atttgagaaaatactagact

SEQ ID NO: 228554 - DNA, 20 bp, synthetic construct
  source 1..20: mol_type = other DNA
tatttgagaaaatactagac

SEQ ID NO: 228555 - DNA, 20 bp, synthetic construct
  source 1..20: mol_type = other DNA
gtatttgagaaaatactaga

SEQ ID NO: 228556 - DNA, 20 bp, synthetic construct
  source 1..20: mol_type = other DNA
tgtatttgagaaaatactag

SEQ ID NO: 228557 - DNA, 20 bp, synthetic construct
  source 1..20: mol_type = other DNA
gtgtatttgagaaaatacta

SEQ ID NO: 228558 - DNA, 20 bp, synthetic construct
  source 1..20: mol_type = other DNA
agtgtatttgagaaaatact

SEQ ID NO: 228559 - DNA, 20 bp, synthetic construct
  source 1..20: mol_type = other DNA
aagtgtatttgagaaaatac

SEQ ID NO: 228560 - DNA, 20 bp, synthetic construct
  source 1..20: mol_type = other DNA
gaagtgtatttgagaaaata

SEQ ID NO: 228561 - DNA, 20 bp, synthetic construct
  source 1..20: mol_type = other DNA
agaagtgtatttgagaaaat

SEQ ID NO: 228562 - DNA, 20 bp, synthetic construct
  source 1..20: mol_type = other DNA
aagaagtgtatttgagaaaa

SEQ ID NO: 228563 - DNA, 20 bp, synthetic construct
  source 1..20: mol_type = other DNA
caagaagtgtatttgagaaa

SEQ ID NO: 228564 - DNA, 20 bp, synthetic construct
  source 1..20: mol_type = other DNA
ccaagaagtgtatttgagaa

SEQ ID NO: 228565 - DNA, 20 bp, synthetic construct
  source 1..20: mol_type = other DNA
gccaagaagtgtatttgaga

SEQ ID NO: 228566 - DNA, 20 bp, synthetic construct
  source 1..20: mol_type = other DNA
agccaagaagtgtatttgag

SEQ ID NO: 228567 - DNA, 20 bp, synthetic construct
  source 1..20: mol_type = other DNA
gagccaagaagtgtatttga

SEQ ID NO: 228568 - DNA, 20 bp, synthetic construct
  source 1..20: mol_type = other DNA
ggagccaagaagtgtatttg

SEQ ID NO: 228569 - DNA, 20 bp, synthetic construct
  source 1..20: mol_type = other DNA
tggagccaagaagtgtattt

SEQ ID NO: 228570 - DNA, 20 bp, synthetic construct
  source 1..20: mol_type = other DNA
atggagccaagaagtgtatt

SEQ ID NO: 228571 - DNA, 20 bp, synthetic construct
  source 1..20: mol_type = other DNA
aatggagccaagaagtgtat

SEQ ID NO: 228572 - DNA, 20 bp, synthetic construct
  source 1..20: mol_type = other DNA
gaatggagccaagaagtgta

SEQ ID NO: 228573 - DNA, 20 bp, synthetic construct
  source 1..20: mol_type = other DNA
ggaatggagccaagaagtgt

SEQ ID NO: 228574 - DNA, 20 bp, synthetic construct
  source 1..20: mol_type = other DNA
aggaatggagccaagaagtg

SEQ ID NO: 228575 - DNA, 20 bp, synthetic construct
  source 1..20: mol_type = other DNA
aaggaatggagccaagaagt

SEQ ID NO: 228576 - DNA, 20 bp, synthetic construct
  source 1..20: mol_type = other DNA
gaaggaatggagccaagaag

SEQ ID NO: 228577 - DNA, 20 bp, synthetic construct
  source 1..20: mol_type = other DNA
ggaaggaatggagccaagaa

SEQ ID NO: 228578 - DNA, 20 bp, synthetic construct
  source 1..20: mol_type = other DNA
aggaaggaatggagccaaga

SEQ ID NO: 228579 - DNA, 20 bp, synthetic construct
  source 1..20: mol_type = other DNA
aaggaaggaatggagccaag

SEQ ID NO: 228580 - DNA, 20 bp, synthetic construct
  source 1..20: mol_type = other DNA
aaaggaaggaatggagccaa

SEQ ID NO: 228581 - DNA, 20 bp, synthetic construct
  source 1..20: mol_type = other DNA
gaaaggaaggaatggagcca

SEQ ID NO: 228582 - DNA, 20 bp, synthetic construct
  source 1..20: mol_type = other DNA
ggaaaggaaggaatggagcc

SEQ ID NO: 228583 - DNA, 20 bp, synthetic construct
  source 1..20: mol_type = other DNA
tggaaaggaaggaatggagc

SEQ ID NO: 228584 - DNA, 20 bp, synthetic construct
  source 1..20: mol_type = other DNA
atggaaaggaaggaatggag

SEQ ID NO: 228585 - DNA, 20 bp, synthetic construct
  source 1..20: mol_type = other DNA
gatggaaaggaaggaatgga

SEQ ID NO: 228586 - DNA, 20 bp, synthetic construct
  source 1..20: mol_type = other DNA
tgatggaaaggaaggaatgg

SEQ ID NO: 228587 - DNA, 20 bp, synthetic construct
  source 1..20: mol_type = other DNA
gtgatggaaaggaaggaatg

SEQ ID NO: 228588 - DNA, 20 bp, synthetic construct
  source 1..20: mol_type = other DNA
ggtgatggaaaggaaggaat

SEQ ID NO: 228589 - DNA, 20 bp, synthetic construct
  source 1..20: mol_type = other DNA
aggtgatggaaaggaaggaa

SEQ ID NO: 228590 - DNA, 20 bp, synthetic construct
  source 1..20: mol_type = other DNA
gaggtgatggaaaggaagga

SEQ ID NO: 228591 - DNA, 20 bp, synthetic construct
  source 1..20: mol_type = other DNA
agaggtgatggaaaggaagg

SEQ ID NO: 228592 - DNA, 20 bp, synthetic construct
  source 1..20: mol_type = other DNA
cagaggtgatggaaaggaag

SEQ ID NO: 228593 - DNA, 20 bp, synthetic construct
  source 1..20: mol_type = other DNA
gcagaggtgatggaaaggaa

SEQ ID NO: 228594 - DNA, 20 bp, synthetic construct
  source 1..20: mol_type = other DNA
ggcagaggtgatggaaagga

SEQ ID NO: 228595 - DNA, 20 bp, synthetic construct
  source 1..20: mol_type = other DNA
aggcagaggtgatggaaagg

SEQ ID NO: 228596 - DNA, 20 bp, synthetic construct
  source 1..20: mol_type = other DNA
aaggcagaggtgatggaaag

SEQ ID NO: 228597 - DNA, 20 bp, synthetic construct
  source 1..20: mol_type = other DNA
aaaggcagaggtgatggaaa

SEQ ID NO: 228598 - DNA, 20 bp, synthetic construct
  source 1..20: mol_type = other DNA
aaaaggcagaggtgatggaa

SEQ ID NO: 228599 - DNA, 20 bp, synthetic construct
  source 1..20: mol_type = other DNA
gaaaaggcagaggtgatgga

SEQ ID NO: 228600 - DNA, 20 bp, synthetic construct
  source 1..20: mol_type = other DNA
tgaaaaggcagaggtgatgg

SEQ ID NO: 228601 - DNA, 20 bp, synthetic construct
  source 1..20: mol_type = other DNA
gtgaaaaggcagaggtgatg

SEQ ID NO: 228602 - DNA, 20 bp, synthetic construct
  source 1..20: mol_type = other DNA
agtgaaaaggcagaggtgat

SEQ ID NO: 228603 - DNA, 20 bp, synthetic construct
  source 1..20: mol_type = other DNA
cagtgaaaaggcagaggtga

SEQ ID NO: 228604 - DNA, 20 bp, synthetic construct
  source 1..20: mol_type = other DNA
gcagtgaaaaggcagaggtg

SEQ ID NO: 228605 - DNA, 20 bp, synthetic construct
  source 1..20: mol_type = other DNA
tgcagtgaaaaggcagaggt

SEQ ID NO: 228606 - DNA, 20 bp, synthetic construct
  source 1..20: mol_type = other DNA
atgcagtgaaaaggcagagg

SEQ ID NO: 228607 - DNA, 20 bp, synthetic construct
  source 1..20: mol_type = other DNA
catgcagtgaaaaggcagag

SEQ ID NO: 228608 - DNA, 20 bp, synthetic construct
  source 1..20: mol_type = other DNA
gcatgcagtgaaaaggcaga

SEQ ID NO: 228609 - DNA, 20 bp, synthetic construct
  source 1..20: mol_type = other DNA
agcatgcagtgaaaaggcag

SEQ ID NO: 228610 - DNA, 20 bp, synthetic construct
  source 1..20: mol_type = other DNA
aagcatgcagtgaaaaggca

SEQ ID NO: 228611 - DNA, 20 bp, synthetic construct
  source 1..20: mol_type = other DNA
caagcatgcagtgaaaaggc

SEQ ID NO: 228612 - DNA, 20 bp, synthetic construct
  source 1..20: mol_type = other DNA
ccaagcatgcagtgaaaagg

SEQ ID NO: 228613 - DNA, 20 bp, synthetic construct
  source 1..20: mol_type = other DNA
tccaagcatgcagtgaaaag

SEQ ID NO: 228614 - DNA, 20 bp, synthetic construct
  source 1..20: mol_type = other DNA
gtccaagcatgcagtgaaaa

SEQ ID NO: 228615 - DNA, 20 bp, synthetic construct
  source 1..20: mol_type = other DNA
ggtccaagcatgcagtgaaa

SEQ ID NO: 228616 - DNA, 20 bp, synthetic construct
  source 1..20: mol_type = other DNA
tggtccaagcatgcagtgaa

SEQ ID NO: 228617 - DNA, 20 bp, synthetic construct
  source 1..20: mol_type = other DNA
gtggtccaagcatgcagtga

SEQ ID NO: 228618 - DNA, 20 bp, synthetic construct
  source 1..20: mol_type = other DNA
agtggtccaagcatgcagtg

SEQ ID NO: 228619 - DNA, 20 bp, synthetic construct
  source 1..20: mol_type = other DNA
cagtggtccaagcatgcagt

SEQ ID NO: 228620 - DNA, 20 bp, synthetic construct
  source 1..20: mol_type = other DNA
gcagtggtccaagcatgcag

SEQ ID NO: 228621 - DNA, 20 bp, synthetic construct
  source 1..20: mol_type = other DNA
tgcagtggtccaagcatgca

SEQ ID NO: 228622 - DNA, 20 bp, synthetic construct
  source 1..20: mol_type = other DNA
ctgcagtggtccaagcatgc

SEQ ID NO: 228623 - DNA, 20 bp, synthetic construct
  source 1..20: mol_type = other DNA
actgcagtggtccaagcatg

SEQ ID NO: 228624 - DNA, 20 bp, synthetic construct
  source 1..20: mol_type = other DNA
gactgcagtggtccaagcat

SEQ ID NO: 228625 - DNA, 20 bp, synthetic construct
  source 1..20: mol_type = other DNA
tgactgcagtggtccaagca

SEQ ID NO: 228626 - DNA, 20 bp, synthetic construct
  source 1..20: mol_type = other DNA
ctgactgcagtggtccaagc

SEQ ID NO: 228627 - DNA, 20 bp, synthetic construct
  source 1..20: mol_type = other DNA
gctgactgcagtggtccaag

SEQ ID NO: 228628 - DNA, 20 bp, synthetic construct
  source 1..20: mol_type = other DNA
agctgactgcagtggtccaa

SEQ ID NO: 228629 - DNA, 20 bp, synthetic construct
  source 1..20: mol_type = other DNA
gagctgactgcagtggtcca

SEQ ID NO: 228630 - DNA, 20 bp, synthetic construct
  source 1..20: mol_type = other DNA
ggagctgactgcagtggtcc

SEQ ID NO: 228631 - DNA, 20 bp, synthetic construct
  source 1..20: mol_type = other DNA
gggagctgactgcagtggtc

SEQ ID NO: 228632 - DNA, 20 bp, synthetic construct
  source 1..20: mol_type = other DNA
agggagctgactgcagtggt

SEQ ID NO: 228633 - DNA, 20 bp, synthetic construct
  source 1..20: mol_type = other DNA
tagggagctgactgcagtgg

SEQ ID NO: 228634 - DNA, 20 bp, synthetic construct
  source 1..20: mol_type = other DNA
atagggagctgactgcagtg

SEQ ID NO: 228635 - DNA, 20 bp, synthetic construct
  source 1..20: mol_type = other DNA
catagggagctgactgcagt

SEQ ID NO: 228636 - DNA, 20 bp, synthetic construct
  source 1..20: mol_type = other DNA
tcatagggagctgactgcag

SEQ ID NO: 228637 - DNA, 20 bp, synthetic construct
  source 1..20: mol_type = other DNA
ttcatagggagctgactgca

SEQ ID NO: 228638 - DNA, 20 bp, synthetic construct
  source 1..20: mol_type = other DNA
gttcatagggagctgactgc

SEQ ID NO: 228639 - DNA, 20 bp, synthetic construct
  source 1..20: mol_type = other DNA
tgttcatagggagctgactg

SEQ ID NO: 228640 - DNA, 20 bp, synthetic construct
  source 1..20: mol_type = other DNA
ctgttcatagggagctgact

SEQ ID NO: 228641 - DNA, 20 bp, synthetic construct
  source 1..20: mol_type = other DNA
actgttcatagggagctgac

SEQ ID NO: 228642 - DNA, 20 bp, synthetic construct
  source 1..20: mol_type = other DNA
aactgttcatagggagctga

SEQ ID NO: 228643 - DNA, 20 bp, synthetic construct
  source 1..20: mol_type = other DNA
caactgttcatagggagctg

SEQ ID NO: 228644 - DNA, 20 bp, synthetic construct
  source 1..20: mol_type = other DNA
gcaactgttcatagggagct

SEQ ID NO: 228645 - DNA, 20 bp, synthetic construct
  source 1..20: mol_type = other DNA
agcaactgttcatagggagc

SEQ ID NO: 228646 - DNA, 20 bp, synthetic construct
  source 1..20: mol_type = other DNA
gagcaactgttcatagggag

SEQ ID NO: 228647 - DNA, 20 bp, synthetic construct
  source 1..20: mol_type = other DNA
agagcaactgttcataggga

SEQ ID NO: 228648 - DNA, 20 bp, synthetic construct
  source 1..20: mol_type = other DNA
gagagcaactgttcataggg

SEQ ID NO: 228649 - DNA, 20 bp, synthetic construct
  source 1..20: mol_type = other DNA
agagagcaactgttcatagg

SEQ ID NO: 228650 - DNA, 20 bp, synthetic construct
  source 1..20: mol_type = other DNA
tagagagcaactgttcatag

SEQ ID NO: 228651 - DNA, 20 bp, synthetic construct
  source 1..20: mol_type = other DNA
gtagagagcaactgttcata

SEQ ID NO: 228652 - DNA, 20 bp, synthetic construct
  source 1..20: mol_type = other DNA
ggtagagagcaactgttcat

SEQ ID NO: 228653 - DNA, 20 bp, synthetic construct
  source 1..20: mol_type = other DNA
gggtagagagcaactgttca

SEQ ID NO: 228654 - DNA, 20 bp, synthetic construct
  source 1..20: mol_type = other DNA
tgggtagagagcaactgttc

SEQ ID NO: 228655 - DNA, 20 bp, synthetic construct
  source 1..20: mol_type = other DNA
atgggtagagagcaactgtt

SEQ ID NO: 228656 - DNA, 20 bp, synthetic construct
  source 1..20: mol_type = other DNA
gatgggtagagagcaactgt

SEQ ID NO: 228657 - DNA, 20 bp, synthetic construct
  source 1..20: mol_type = other DNA
ggatgggtagagagcaactg

SEQ ID NO: 228658 - DNA, 20 bp, synthetic construct
  source 1..20: mol_type = other DNA
tggatgggtagagagcaact

SEQ ID NO: 228659 - DNA, 20 bp, synthetic construct
  source 1..20: mol_type = other DNA
ttggatgggtagagagcaac

SEQ ID NO: 228660 - DNA, 20 bp, synthetic construct
  source 1..20: mol_type = other DNA
attggatgggtagagagcaa

SEQ ID NO: 228661 - DNA, 20 bp, synthetic construct
  source 1..20: mol_type = other DNA
gattggatgggtagagagca

SEQ ID NO: 228662 - DNA, 20 bp, synthetic construct
  source 1..20: mol_type = other DNA
cgattggatgggtagagagc

SEQ ID NO: 228663 - DNA, 20 bp, synthetic construct
  source 1..20: mol_type = other DNA
ccgattggatgggtagagag

SEQ ID NO: 228664 - DNA, 20 bp, synthetic construct
  source 1..20: mol_type = other DNA
gccgattggatgggtagaga

SEQ ID NO: 228665 - DNA, 20 bp, synthetic construct
  source 1..20: mol_type = other DNA
ggccgattggatgggtagag

SEQ ID NO: 228666 - DNA, 20 bp, synthetic construct
  source 1..20: mol_type = other DNA
gggccgattggatgggtaga

SEQ ID NO: 228667 - DNA, 20 bp, synthetic construct
  source 1..20: mol_type = other DNA
ggggccgattggatgggtag

SEQ ID NO: 228668 - DNA, 20 bp, synthetic construct
  source 1..20: mol_type = other DNA
cggggccgattggatgggta

SEQ ID NO: 228669 - DNA, 20 bp, synthetic construct
  source 1..20: mol_type = other DNA
gcggggccgattggatgggt

SEQ ID NO: 228670 - DNA, 20 bp, synthetic construct
  source 1..20: mol_type = other DNA
ggcggggccgattggatggg

SEQ ID NO: 228671 - DNA, 20 bp, synthetic construct
  source 1..20: mol_type = other DNA
aggcggggccgattggatgg

SEQ ID NO: 228672 - DNA, 20 bp, synthetic construct
  source 1..20: mol_type = other DNA
caggcggggccgattggatg

SEQ ID NO: 228673 - DNA, 20 bp, synthetic construct
  source 1..20: mol_type = other DNA
gcaggcggggccgattggat

SEQ ID NO: 228674 - DNA, 20 bp, synthetic construct
  source 1..20: mol_type = other DNA
agcaggcggggccgattgga

SEQ ID NO: 228675 - DNA, 20 bp, synthetic construct
  source 1..20: mol_type = other DNA
cagcaggcggggccgattgg

SEQ ID NO: 228676 - DNA, 20 bp, synthetic construct
  source 1..20: mol_type = other DNA
gcagcaggcggggccgattg

SEQ ID NO: 228677 - DNA, 20 bp, synthetic construct
  source 1..20: mol_type = other DNA
agcagcaggcggggccgatt

SEQ ID NO: 228678 - DNA, 20 bp, synthetic construct
  source 1..20: mol_type = other DNA
cagcagcaggcggggccgat

SEQ ID NO: 228679 - DNA, 20 bp, synthetic construct
  source 1..20: mol_type = other DNA
gcagcagcaggcggggccga

SEQ ID NO: 228680 - DNA, 20 bp, synthetic construct
  source 1..20: mol_type = other DNA
ggcagcagcaggcggggccg

SEQ ID NO: 228681 - DNA, 20 bp, synthetic construct
  source 1..20: mol_type = other DNA
tggcagcagcaggcggggcc

SEQ ID NO: 228682 - DNA, 20 bp, synthetic construct
  source 1..20: mol_type = other DNA
ttggcagcagcaggcggggc

SEQ ID NO: 228683 - DNA, 20 bp, synthetic construct
  source 1..20: mol_type = other DNA
tttggcagcagcaggcgggg

SEQ ID NO: 228684 - DNA, 20 bp, synthetic construct
  source 1..20: mol_type = other DNA
atttggcagcagcaggcggg

SEQ ID NO: 228685 - DNA, 20 bp, synthetic construct
  source 1..20: mol_type = other DNA
aatttggcagcagcaggcgg

SEQ ID NO: 228686 - DNA, 20 bp, synthetic construct
  source 1..20: mol_type = other DNA
gaatttggcagcagcaggcg

SEQ ID NO: 228687 - DNA, 20 bp, synthetic construct
  source 1..20: mol_type = other DNA
tgaatttggcagcagcaggc

SEQ ID NO: 228688 - DNA, 20 bp, synthetic construct
  source 1..20: mol_type = other DNA
gtgaatttggcagcagcagg

SEQ ID NO: 228689 - DNA, 20 bp, synthetic construct
  source 1..20: mol_type = other DNA
ggtgaatttggcagcagcag

SEQ ID NO: 228690 - DNA, 20 bp, synthetic construct
  source 1..20: mol_type = other DNA
cggtgaatttggcagcagca

SEQ ID NO: 228691 - DNA, 20 bp, synthetic construct
  source 1..20: mol_type = other DNA
tcggtgaatttggcagcagc

SEQ ID NO: 228692 - DNA, 20 bp, synthetic construct
  source 1..20: mol_type = other DNA
ctcggtgaatttggcagcag

SEQ ID NO: 228693 - DNA, 20 bp, synthetic construct
  source 1..20: mol_type = other DNA
cctcggtgaatttggcagca

SEQ ID NO: 228694 - DNA, 20 bp, synthetic construct
  source 1..20: mol_type = other DNA
ccctcggtgaatttggcagc

SEQ ID NO: 228695 - DNA, 20 bp, synthetic construct
  source 1..20: mol_type = other DNA
gccctcggtgaatttggcag

SEQ ID NO: 228696 - DNA, 20 bp, synthetic construct
  source 1..20: mol_type = other DNA
tgccctcggtgaatttggca

SEQ ID NO: 228697 - DNA, 20 bp, synthetic construct
  source 1..20: mol_type = other DNA
gtgccctcggtgaatttggc

SEQ ID NO: 228698 - DNA, 20 bp, synthetic construct
  source 1..20: mol_type = other DNA
ggtgccctcggtgaatttgg

SEQ ID NO: 228699 - DNA, 20 bp, synthetic construct
  source 1..20: mol_type = other DNA
aggtgccctcggtgaatttg

SEQ ID NO: 228700 - DNA, 20 bp, synthetic construct
  source 1..20: mol_type = other DNA
gaggtgccctcggtgaattt

SEQ ID NO: 228701 - DNA, 20 bp, synthetic construct
  source 1..20: mol_type = other DNA
agaggtgccctcggtgaatt

SEQ ID NO: 228702 - DNA, 20 bp, synthetic construct
  source 1..20: mol_type = other DNA
cagaggtgccctcggtgaat

SEQ ID NO: 228703 - DNA, 20 bp, synthetic construct
  source 1..20: mol_type = other DNA
acagaggtgccctcggtgaa

SEQ ID NO: 228704 - DNA, 20 bp, synthetic construct
  source 1..20: mol_type = other DNA
cacagaggtgccctcggtga

SEQ ID NO: 228705 - DNA, 20 bp, synthetic construct
  source 1..20: mol_type = other DNA
ccacagaggtgccctcggtg

SEQ ID NO: 228706 - DNA, 20 bp, synthetic construct
  source 1..20: mol_type = other DNA
accacagaggtgccctcggt

SEQ ID NO: 228707 - DNA, 20 bp, synthetic construct
  source 1..20: mol_type = other DNA
caccacagaggtgccctcgg

SEQ ID NO: 228708 - DNA, 20 bp, synthetic construct
  source 1..20: mol_type = other DNA
gcaccacagaggtgccctcg

SEQ ID NO: 228709 - DNA, 20 bp, synthetic construct
  source 1..20: mol_type = other DNA
agcaccacagaggtgccctc

SEQ ID NO: 228710 - DNA, 20 bp, synthetic construct
  source 1..20: mol_type = other DNA
cagcaccacagaggtgccct

SEQ ID NO: 228711 - DNA, 20 bp, synthetic construct
  source 1..20: mol_type = other DNA
gcagcaccacagaggtgccc

SEQ ID NO: 228712 - DNA, 20 bp, synthetic construct
  source 1..20: mol_type = other DNA
ggcagcaccacagaggtgcc

SEQ ID NO: 228713 - DNA, 20 bp, synthetic construct
  source 1..20: mol_type = other DNA
aggcagcaccacagaggtgc

SEQ ID NO: 228714 - DNA, 20 bp, synthetic construct
  source 1..20: mol_type = other DNA
caggcagcaccacagaggtg

SEQ ID NO: 228715 - DNA, 20 bp, synthetic construct
  source 1..20: mol_type = other DNA
acaggcagcaccacagaggt

SEQ ID NO: 228716 - DNA, 20 bp, synthetic construct
  source 1..20: mol_type = other DNA
cacaggcagcaccacagagg

SEQ ID NO: 228717 - DNA, 20 bp, synthetic construct
  source 1..20: mol_type = other DNA
ccacaggcagcaccacagag

SEQ ID NO: 228718 - DNA, 20 bp, synthetic construct
  source 1..20: mol_type = other DNA
tccacaggcagcaccacaga

SEQ ID NO: 228719 - DNA, 20 bp, synthetic construct
  source 1..20: mol_type = other DNA
gtccacaggcagcaccacag

SEQ ID NO: 228720 - DNA, 20 bp, synthetic construct
  source 1..20: mol_type = other DNA
tgtccacaggcagcaccaca

SEQ ID NO: 228721 - DNA, 20 bp, synthetic construct
  source 1..20: mol_type = other DNA
ttgtccacaggcagcaccac

SEQ ID NO: 228722 - DNA, 20 bp, synthetic construct
  source 1..20: mol_type = other DNA
tttgtccacaggcagcacca

SEQ ID NO: 228723 - DNA, 20 bp, synthetic construct
  source 1..20: mol_type = other DNA
ctttgtccacaggcagcacc

SEQ ID NO: 228724 - DNA, 20 bp, synthetic construct
  source 1..20: mol_type = other DNA
actttgtccacaggcagcac

SEQ ID NO: 228725 - DNA, 20 bp, synthetic construct
  source 1..20: mol_type = other DNA
gactttgtccacaggcagca

SEQ ID NO: 228726 - DNA, 20 bp, synthetic construct
  source 1..20: mol_type = other DNA
ggactttgtccacaggcagc

SEQ ID NO: 228727 - DNA, 20 bp, synthetic construct
  source 1..20: mol_type = other DNA
tggactttgtccacaggcag

SEQ ID NO: 228728 - DNA, 20 bp, synthetic construct
  source 1..20: mol_type = other DNA
ttggactttgtccacaggca

SEQ ID NO: 228729 - DNA, 20 bp, synthetic construct
  source 1..20: mol_type = other DNA
cttggactttgtccacaggc

SEQ ID NO: 228730 - DNA, 20 bp, synthetic construct
  source 1..20: mol_type = other DNA
gcttggactttgtccacagg

SEQ ID NO: 228731 - DNA, 20 bp, synthetic construct
  source 1..20: mol_type = other DNA
ggcttggactttgtccacag

SEQ ID NO: 228732 - DNA, 20 bp, synthetic construct
  source 1..20: mol_type = other DNA
tggcttggactttgtccaca

SEQ ID NO: 228733 - DNA, 20 bp, synthetic construct
  source 1..20: mol_type = other DNA
ctggcttggactttgtccac

SEQ ID NO: 228734 - DNA, 20 bp, synthetic construct
  source 1..20: mol_type = other DNA
gctggcttggactttgtcca

SEQ ID NO: 228735 - DNA, 20 bp, synthetic construct
  source 1..20: mol_type = other DNA
ggctggcttggactttgtcc

SEQ ID NO: 228736 - DNA, 20 bp, synthetic construct
  source 1..20: mol_type = other DNA
tggctggcttggactttgtc

SEQ ID NO: 228737 - DNA, 20 bp, synthetic construct
  source 1..20: mol_type = other DNA
gtggctggcttggactttgt

SEQ ID NO: 228738 - DNA, 20 bp, synthetic construct
  source 1..20: mol_type = other DNA
ggtggctggcttggactttg

SEQ ID NO: 228739 - DNA, 20 bp, synthetic construct
  source 1..20: mol_type = other DNA
aggtggctggcttggacttt

SEQ ID NO: 228740 - DNA, 20 bp, synthetic construct
  source 1..20: mol_type = other DNA
gaggtggctggcttggactt

SEQ ID NO: 228741 - DNA, 20 bp, synthetic construct
  source 1..20: mol_type = other DNA
tgaggtggctggcttggact

SEQ ID NO: 228742 - DNA, 20 bp, synthetic construct
  source 1..20: mol_type = other DNA
gtgaggtggctggcttggac

SEQ ID NO: 228743 - DNA, 20 bp, synthetic construct
  source 1..20: mol_type = other DNA
ggtgaggtggctggcttgga

SEQ ID NO: 228744 - DNA, 20 bp, synthetic construct
  source 1..20: mol_type = other DNA
gggtgaggtggctggcttgg

SEQ ID NO: 228745 - DNA, 20 bp, synthetic construct
  source 1..20: mol_type = other DNA
tgggtgaggtggctggcttg

SEQ ID NO: 228746 - DNA, 20 bp, synthetic construct
  source 1..20: mol_type = other DNA
gtgggtgaggtggctggctt

SEQ ID NO: 228747 - DNA, 20 bp, synthetic construct
  source 1..20: mol_type = other DNA
ggtgggtgaggtggctggct

SEQ ID NO: 228748 - DNA, 20 bp, synthetic construct
  source 1..20: mol_type = other DNA
aggtgggtgaggtggctggc

SEQ ID NO: 228749 - DNA, 20 bp, synthetic construct
  source 1..20: mol_type = other DNA
taggtgggtgaggtggctgg

SEQ ID NO: 228750 - DNA, 20 bp, synthetic construct
  source 1..20: mol_type = other DNA
gtaggtgggtgaggtggctg

SEQ ID NO: 228751 - DNA, 20 bp, synthetic construct
  source 1..20: mol_type = other DNA
tgtaggtgggtgaggtggct

SEQ ID NO: 228752 - DNA, 20 bp, synthetic construct
  source 1..20: mol_type = other DNA
ctgtaggtgggtgaggtggc

SEQ ID NO: 228753 - DNA, 20 bp, synthetic construct
  source 1..20: mol_type = other DNA
cctgtaggtgggtgaggtgg

SEQ ID NO: 228754 - DNA, 20 bp, synthetic construct
  source 1..20: mol_type = other DNA
acctgtaggtgggtgaggtg

SEQ ID NO: 228755 - DNA, 20 bp, synthetic construct
  source 1..20: mol_type = other DNA
cacctgtaggtgggtgaggt

SEQ ID NO: 228756 - DNA, 20 bp, synthetic construct
  source 1..20: mol_type = other DNA
tcacctgtaggtgggtgagg

SEQ ID NO: 228757 - DNA, 20 bp, synthetic construct
  source 1..20: mol_type = other DNA
ctcacctgtaggtgggtgag

SEQ ID NO: 228758 - DNA, 20 bp, synthetic construct
  source 1..20: mol_type = other DNA
actcacctgtaggtgggtga

SEQ ID NO: 228759 - DNA, 20 bp, synthetic construct
  source 1..20: mol_type = other DNA
cactcacctgtaggtgggtg

SEQ ID NO: 228760 - DNA, 20 bp, synthetic construct
  source 1..20: mol_type = other DNA
ccactcacctgtaggtgggt

SEQ ID NO: 228761 - DNA, 20 bp, synthetic construct
  source 1..20: mol_type = other DNA
cccactcacctgtaggtggg

SEQ ID NO: 228762 - DNA, 20 bp, synthetic construct
  source 1..20: mol_type = other DNA
ccccactcacctgtaggtgg

SEQ ID NO: 228763 - DNA, 20 bp, synthetic construct
  source 1..20: mol_type = other DNA
tccccactcacctgtaggtg

SEQ ID NO: 228764 - DNA, 20 bp, synthetic construct
  source 1..20: mol_type = other DNA
ctccccactcacctgtaggt

SEQ ID NO: 228765 - DNA, 20 bp, synthetic construct
  source 1..20: mol_type = other DNA
gctccccactcacctgtagg

SEQ ID NO: 228766 - DNA, 20 bp, synthetic construct
  source 1..20: mol_type = other DNA
tgctccccactcacctgtag

SEQ ID NO: 228767 - DNA, 20 bp, synthetic construct
  source 1..20: mol_type = other DNA
ctgctccccactcacctgta

SEQ ID NO: 228768 - DNA, 20 bp, synthetic construct
  source 1..20: mol_type = other DNA
gctgctccccactcacctgt

SEQ ID NO: 228769 - DNA, 20 bp, synthetic construct
  source 1..20: mol_type = other DNA
ggctgctccccactcacctg

SEQ ID NO: 228770 - DNA, 20 bp, synthetic construct
  source 1..20: mol_type = other DNA
tggctgctccccactcacct

SEQ ID NO: 228771 - DNA, 20 bp, synthetic construct
  source 1..20: mol_type = other DNA
ctggctgctccccactcacc

SEQ ID NO: 228772 - DNA, 20 bp, synthetic construct
  source 1..20: mol_type = other DNA
gctggctgctccccactcac

SEQ ID NO: 228773 - DNA, 20 bp, synthetic construct
  source 1..20: mol_type = other DNA
cgctggctgctccccactca

SEQ ID NO: 228774 - DNA, 20 bp, synthetic construct
  source 1..20: mol_type = other DNA
acgctggctgctccccactc

SEQ ID NO: 228775 - DNA, 20 bp, synthetic construct
  source 1..20: mol_type = other DNA
cacgctggctgctccccact

SEQ ID NO: 228776 - DNA, 20 bp, synthetic construct
  source 1..20: mol_type = other DNA
acacgctggctgctccccac

SEQ ID NO: 228777 - DNA, 20 bp, synthetic construct
  source 1..20: mol_type = other DNA
gacacgctggctgctcccca

SEQ ID NO: 228778 - DNA, 20 bp, synthetic construct
  source 1..20: mol_type = other DNA
ggacacgctggctgctcccc

SEQ ID NO: 228779 - DNA, 20 bp, synthetic construct
  source 1..20: mol_type = other DNA
tggacacgctggctgctccc

SEQ ID NO: 228780 - DNA, 20 bp, synthetic construct
  source 1..20: mol_type = other DNA
ctggacacgctggctgctcc

SEQ ID NO: 228781 - DNA, 20 bp, synthetic construct
  source 1..20: mol_type = other DNA
actggacacgctggctgctc

SEQ ID NO: 228782 - DNA, 20 bp, synthetic construct
  source 1..20: mol_type = other DNA
cactggacacgctggctgct

SEQ ID NO: 228783 - DNA, 20 bp, synthetic construct
  source 1..20: mol_type = other DNA
ccactggacacgctggctgc

SEQ ID NO: 228784 - DNA, 20 bp, synthetic construct
  source 1..20: mol_type = other DNA
accactggacacgctggctg

SEQ ID NO: 228785 - DNA, 20 bp, synthetic construct
  source 1..20: mol_type = other DNA
aaccactggacacgctggct

SEQ ID NO: 228786 - DNA, 20 bp, synthetic construct
  source 1..20: mol_type = other DNA
aaaccactggacacgctggc

SEQ ID NO: 228787 - DNA, 20 bp, synthetic construct
  source 1..20: mol_type = other DNA
taaaccactggacacgctgg

SEQ ID NO: 228788 - DNA, 20 bp, synthetic construct
  source 1..20: mol_type = other DNA
gtaaaccactggacacgctg

SEQ ID NO: 228789 - DNA, 20 bp, synthetic construct
  source 1..20: mol_type = other DNA
ggtaaaccactggacacgct

SEQ ID NO: 228790 - DNA, 20 bp, synthetic construct
  source 1..20: mol_type = other DNA
gggtaaaccactggacacgc

SEQ ID NO: 228791 - DNA, 20 bp, synthetic construct
  source 1..20: mol_type = other DNA
ggggtaaaccactggacacg

SEQ ID NO: 228792 - DNA, 20 bp, synthetic construct
  source 1..20: mol_type = other DNA
tggggtaaaccactggacac

SEQ ID NO: 228793 - DNA, 20 bp, synthetic construct
  source 1..20: mol_type = other DNA
atggggtaaaccactggaca

SEQ ID NO: 228794 - DNA, 20 bp, synthetic construct
  source 1..20: mol_type = other DNA
gatggggtaaaccactggac

SEQ ID NO: 228795 - DNA, 20 bp, synthetic construct
  source 1..20: mol_type = other DNA
cgatggggtaaaccactgga

SEQ ID NO: 228796 - DNA, 20 bp, synthetic construct
  source 1..20: mol_type = other DNA
gcgatggggtaaaccactgg

SEQ ID NO: 228797 - DNA, 20 bp, synthetic construct
  source 1..20: mol_type = other DNA
ggcgatggggtaaaccactg

SEQ ID NO: 228798 - DNA, 20 bp, synthetic construct
  source 1..20: mol_type = other DNA
tggcgatggggtaaaccact

SEQ ID NO: 228799 - DNA, 20 bp, synthetic construct
  source 1..20: mol_type = other DNA
gtggcgatggggtaaaccac

SEQ ID NO: 228800 - DNA, 20 bp, synthetic construct
  source 1..20: mol_type = other DNA
tgtggcgatggggtaaacca

SEQ ID NO: 228801 - DNA, 20 bp, synthetic construct
  source 1..20: mol_type = other DNA
ctgtggcgatggggtaaacc

SEQ ID NO: 228802 - DNA, 20 bp, synthetic construct
  source 1..20: mol_type = other DNA
tctgtggcgatggggtaaac

SEQ ID NO: 228803 - DNA, 20 bp, synthetic construct
  source 1..20: mol_type = other DNA
gtctgtggcgatggggtaaa

SEQ ID NO: 228804 - DNA, 20 bp, synthetic construct
  source 1..20: mol_type = other DNA
agtctgtggcgatggggtaa

SEQ ID NO: 228805 - DNA, 20 bp, synthetic construct
  source 1..20: mol_type = other DNA
aagtctgtggcgatggggta

SEQ ID NO: 228806 - DNA, 20 bp, synthetic construct
  source 1..20: mol_type = other DNA
caagtctgtggcgatggggt

SEQ ID NO: 228807 - DNA, 20 bp, synthetic construct
  source 1..20: mol_type = other DNA
ccaagtctgtggcgatgggg

SEQ ID NO: 228808 - DNA, 20 bp, synthetic construct
  source 1..20: mol_type = other DNA
accaagtctgtggcgatggg

SEQ ID NO: 228809 - DNA, 20 bp, synthetic construct
  source 1..20: mol_type = other DNA
caccaagtctgtggcgatgg

SEQ ID NO: 228810 - DNA, 20 bp, synthetic construct
  source 1..20: mol_type = other DNA
tcaccaagtctgtggcgatg

SEQ ID NO: 228811 - DNA, 20 bp, synthetic construct
  source 1..20: mol_type = other DNA
atcaccaagtctgtggcgat

SEQ ID NO: 228812 - DNA, 20 bp, synthetic construct
  source 1..20: mol_type = other DNA
catcaccaagtctgtggcga

SEQ ID NO: 228813 - DNA, 20 bp, synthetic construct
  source 1..20: mol_type = other DNA
acatcaccaagtctgtggcg

SEQ ID NO: 228814 - DNA, 20 bp, synthetic construct
  source 1..20: mol_type = other DNA
cacatcaccaagtctgtggc

SEQ ID NO: 228815 - DNA, 20 bp, synthetic construct
  source 1..20: mol_type = other DNA
acacatcaccaagtctgtgg

SEQ ID NO: 228816 - DNA, 20 bp, synthetic construct
  source 1..20: mol_type = other DNA
gacacatcaccaagtctgtg

SEQ ID NO: 228817 - DNA, 20 bp, synthetic construct
  source 1..20: mol_type = other DNA
cgacacatcaccaagtctgt

SEQ ID NO: 228818 - DNA, 20 bp, synthetic construct
  source 1..20: mol_type = other DNA
tcgacacatcaccaagtctg

SEQ ID NO: 228819 - DNA, 20 bp, synthetic construct
  source 1..20: mol_type = other DNA
atcgacacatcaccaagtct

SEQ ID NO: 228820 - DNA, 20 bp, synthetic construct
  source 1..20: mol_type = other DNA
catcgacacatcaccaagtc

SEQ ID NO: 228821 - DNA, 20 bp, synthetic construct
  source 1..20: mol_type = other DNA
acatcgacacatcaccaagt

SEQ ID NO: 228822 - DNA, 20 bp, synthetic construct
  source 1..20: mol_type = other DNA
cacatcgacacatcaccaag

SEQ ID NO: 228823 - DNA, 20 bp, synthetic construct
  source 1..20: mol_type = other DNA
gcacatcgacacatcaccaa

SEQ ID NO: 228824 - DNA, 20 bp, synthetic construct
  source 1..20: mol_type = other DNA
tgcacatcgacacatcacca

SEQ ID NO: 228825 - DNA, 20 bp, synthetic construct
  source 1..20: mol_type = other DNA
ctgcacatcgacacatcacc

SEQ ID NO: 228826 - DNA, 20 bp, synthetic construct
  source 1..20: mol_type = other DNA
tctgcacatcgacacatcac

SEQ ID NO: 228827 - DNA, 20 bp, synthetic construct
  source 1..20: mol_type = other DNA
ctctgcacatcgacacatca

SEQ ID NO: 228828 - DNA, 20 bp, synthetic construct
  source 1..20: mol_type = other DNA
tctctgcacatcgacacatc

SEQ ID NO: 228829 - DNA, 20 bp, synthetic construct
  source 1..20: mol_type = other DNA
ttctctgcacatcgacacat

SEQ ID NO: 228830 - DNA, 20 bp, synthetic construct
  source 1..20: mol_type = other DNA
cttctctgcacatcgacaca

SEQ ID NO: 228831 - DNA, 20 bp, synthetic construct
  source 1..20: mol_type = other DNA
ccttctctgcacatcgacac

SEQ ID NO: 228832 - DNA, 20 bp, synthetic construct
  source 1..20: mol_type = other DNA
cccttctctgcacatcgaca

SEQ ID NO: 228833 - DNA, 20 bp, synthetic construct
  source 1..20: mol_type = other DNA
ccccttctctgcacatcgac

SEQ ID NO: 228834 - DNA, 20 bp, synthetic construct
  source 1..20: mol_type = other DNA
accccttctctgcacatcga

SEQ ID NO: 228835 - DNA, 20 bp, synthetic construct
  source 1..20: mol_type = other DNA
caccccttctctgcacatcg

SEQ ID NO: 228836 - DNA, 20 bp, synthetic construct
  source 1..20: mol_type = other DNA
acaccccttctctgcacatc

SEQ ID NO: 228837 - DNA, 20 bp, synthetic construct
  source 1..20: mol_type = other DNA
aacaccccttctctgcacat

SEQ ID NO: 228838 - DNA, 20 bp, synthetic construct
  source 1..20: mol_type = other DNA
caacaccccttctctgcaca

SEQ ID NO: 228839 - DNA, 20 bp, synthetic construct
  source 1..20: mol_type = other DNA
ccaacaccccttctctgcac

SEQ ID NO: 228840 - DNA, 20 bp, synthetic construct
  source 1..20: mol_type = other DNA
gccaacaccccttctctgca

SEQ ID NO: 228841 - DNA, 20 bp, synthetic construct
  source 1..20: mol_type = other DNA
tgccaacaccccttctctgc

SEQ ID NO: 228842 - DNA, 20 bp, synthetic construct
  source 1..20: mol_type = other DNA
ctgccaacaccccttctctg

SEQ ID NO: 228843 - DNA, 20 bp, synthetic construct
  source 1..20: mol_type = other DNA
gctgccaacaccccttctct

SEQ ID NO: 228844 - DNA, 20 bp, synthetic construct
  source 1..20: mol_type = other DNA
ggctgccaacaccccttctc

SEQ ID NO: 228845 - DNA, 20 bp, synthetic construct
  source 1..20: mol_type = other DNA
tggctgccaacaccccttct

SEQ ID NO: 228846 - DNA, 20 bp, synthetic construct
  source 1..20: mol_type = other DNA
gtggctgccaacaccccttc

SEQ ID NO: 228847 - DNA, 20 bp, synthetic construct
  source 1..20: mol_type = other DNA
tgtggctgccaacacccctt

SEQ ID NO: 228848 - DNA, 20 bp, synthetic construct
  source 1..20: mol_type = other DNA
ttgtggctgccaacacccct

SEQ ID NO: 228849 - DNA, 20 bp, synthetic construct
  source 1..20: mol_type = other DNA
gttgtggctgccaacacccc

SEQ ID NO: 228850 - DNA, 20 bp, synthetic construct
  source 1..20: mol_type = other DNA
tgttgtggctgccaacaccc

SEQ ID NO: 228851 - DNA, 20 bp, synthetic construct
  source 1..20: mol_type = other DNA
gtgttgtggctgccaacacc

SEQ ID NO: 228852 - DNA, 20 bp, synthetic construct
  source 1..20: mol_type = other DNA
tgtgttgtggctgccaacac

SEQ ID NO: 228853 - DNA, 20 bp, synthetic construct
  source 1..20: mol_type = other DNA
ttgtgttgtggctgccaaca

SEQ ID NO: 228854 - DNA, 20 bp, synthetic construct
  source 1..20: mol_type = other DNA
cttgtgttgtggctgccaac

SEQ ID NO: 228855 - DNA, 20 bp, synthetic construct
  source 1..20: mol_type = other DNA
gcttgtgttgtggctgccaa

SEQ ID NO: 228856 - DNA, 20 bp, synthetic construct
  source 1..20: mol_type = other DNA
tgcttgtgttgtggctgcca

SEQ ID NO: 228857 - DNA, 20 bp, synthetic construct
  source 1..20: mol_type = other DNA
ttgcttgtgttgtggctgcc

SEQ ID NO: 228858 - DNA, 20 bp, synthetic construct
  source 1..20: mol_type = other DNA
gttgcttgtgttgtggctgc

SEQ ID NO: 228859 - DNA, 20 bp, synthetic construct
  source 1..20: mol_type = other DNA
ggttgcttgtgttgtggctg

SEQ ID NO: 228860 - DNA, 20 bp, synthetic construct
  source 1..20: mol_type = other DNA
gggttgcttgtgttgtggct

SEQ ID NO: 228861 - DNA, 20 bp, synthetic construct
  source 1..20: mol_type = other DNA
ggggttgcttgtgttgtggc

SEQ ID NO: 228862 - DNA, 20 bp, synthetic construct
  source 1..20: mol_type = other DNA
cggggttgcttgtgttgtgg

SEQ ID NO: 228863 - DNA, 20 bp, synthetic construct
  source 1..20: mol_type = other DNA
gcggggttgcttgtgttgtg

SEQ ID NO: 228864 - DNA, 20 bp, synthetic construct
  source 1..20: mol_type = other DNA
ggcggggttgcttgtgttgt

SEQ ID NO: 228865 - DNA, 20 bp, synthetic construct
  source 1..20: mol_type = other DNA
gggcggggttgcttgtgttg

SEQ ID NO: 228866 - DNA, 20 bp, synthetic construct
  source 1..20: mol_type = other DNA
ggggcggggttgcttgtgtt

SEQ ID NO: 228867 - DNA, 20 bp, synthetic construct
  source 1..20: mol_type = other DNA
tggggcggggttgcttgtgt

SEQ ID NO: 228868 - DNA, 20 bp, synthetic construct
  source 1..20: mol_type = other DNA
atggggcggggttgcttgtg

SEQ ID NO: 228869 - DNA, 20 bp, synthetic construct
  source 1..20: mol_type = other DNA
catggggcggggttgcttgt

SEQ ID NO: 228870 - DNA, 20 bp, synthetic construct
  source 1..20: mol_type = other DNA
acatggggcggggttgcttg

SEQ ID NO: 228871 - DNA, 20 bp, synthetic construct
  source 1..20: mol_type = other DNA
cacatggggcggggttgctt

SEQ ID NO: 228872 - DNA, 20 bp, synthetic construct
  source 1..20: mol_type = other DNA
tcacatggggcggggttgct

SEQ ID NO: 228873 - DNA, 20 bp, synthetic construct
  source 1..20: mol_type = other DNA
ctcacatggggcggggttgc

SEQ ID NO: 228874 - DNA, 20 bp, synthetic construct
  source 1..20: mol_type = other DNA
tctcacatggggcggggttg

SEQ ID NO: 228875 - DNA, 20 bp, synthetic construct
  source 1..20: mol_type = other DNA
atctcacatggggcggggtt

SEQ ID NO: 228876 - DNA, 20 bp, synthetic construct
  source 1..20: mol_type = other DNA
gatctcacatggggcggggt

SEQ ID NO: 228877 - DNA, 20 bp, synthetic construct
  source 1..20: mol_type = other DNA
agatctcacatggggcgggg

SEQ ID NO: 228878 - DNA, 20 bp, synthetic construct
  source 1..20: mol_type = other DNA
tagatctcacatggggcggg

SEQ ID NO: 228879 - DNA, 20 bp, synthetic construct
  source 1..20: mol_type = other DNA
ttagatctcacatggggcgg

SEQ ID NO: 228880 - DNA, 20 bp, synthetic construct
  source 1..20: mol_type = other DNA
cttagatctcacatggggcg

SEQ ID NO: 228881 - DNA, 20 bp, synthetic construct
  source 1..20: mol_type = other DNA
tcttagatctcacatggggc

SEQ ID NO: 228882 - DNA, 20 bp, synthetic construct
  source 1..20: mol_type = other DNA
atcttagatctcacatgggg

SEQ ID NO: 228883 - DNA, 20 bp, synthetic construct
  source 1..20: mol_type = other DNA
catcttagatctcacatggg

SEQ ID NO: 228884 - DNA, 20 bp, synthetic construct
  source 1..20: mol_type = other DNA
ccatcttagatctcacatgg

SEQ ID NO: 228885 - DNA, 20 bp, synthetic construct
  source 1..20: mol_type = other DNA
cccatcttagatctcacatg

SEQ ID NO: 228886 - DNA, 20 bp, synthetic construct
  source 1..20: mol_type = other DNA
gcccatcttagatctcacat

SEQ ID NO: 228887 - DNA, 20 bp, synthetic construct
  source 1..20: mol_type = other DNA
cgcccatcttagatctcaca

SEQ ID NO: 228888 - DNA, 20 bp, synthetic construct
  source 1..20: mol_type = other DNA
acgcccatcttagatctcac

SEQ ID NO: 228889 - DNA, 20 bp, synthetic construct
  source 1..20: mol_type = other DNA
cacgcccatcttagatctca

SEQ ID NO: 228890 - DNA, 20 bp, synthetic construct
  source 1..20: mol_type = other DNA
gcacgcccatcttagatctc

SEQ ID NO: 228891 - DNA, 20 bp, synthetic construct
  source 1..20: mol_type = other DNA
agcacgcccatcttagatct

SEQ ID NO: 228892 - DNA, 20 bp, synthetic construct
  source 1..20: mol_type = other DNA
cagcacgcccatcttagatc

SEQ ID NO: 228893 - DNA, 20 bp, synthetic construct
  source 1..20: mol_type = other DNA
ccagcacgcccatcttagat

SEQ ID NO: 228894 - DNA, 20 bp, synthetic construct
  source 1..20: mol_type = other DNA
cccagcacgcccatcttaga

SEQ ID NO: 228895 - DNA, 20 bp, synthetic construct
  source 1..20: mol_type = other DNA
tcccagcacgcccatcttag

SEQ ID NO: 228896 - DNA, 20 bp, synthetic construct
  source 1..20: mol_type = other DNA
ctcccagcacgcccatctta

SEQ ID NO: 228897 - DNA, 20 bp, synthetic construct
  source 1..20: mol_type = other DNA
gctcccagcacgcccatctt

SEQ ID NO: 228898 - DNA, 20 bp, synthetic construct
  source 1..20: mol_type = other DNA
ggctcccagcacgcccatct

SEQ ID NO: 228899 - DNA, 20 bp, synthetic construct
  source 1..20: mol_type = other DNA
tggctcccagcacgcccatc

SEQ ID NO: 228900 - DNA, 20 bp, synthetic construct
  source 1..20: mol_type = other DNA
gtggctcccagcacgcccat

SEQ ID NO: 228901 - DNA, 20 bp, synthetic construct
  source 1..20: mol_type = other DNA
ggtggctcccagcacgccca

SEQ ID NO: 228902 - DNA, 20 bp, synthetic construct
  source 1..20: mol_type = other DNA
aggtggctcccagcacgccc

SEQ ID NO: 228903 - DNA, 20 bp, synthetic construct
  source 1..20: mol_type = other DNA
gaggtggctcccagcacgcc

SEQ ID NO: 228904 - DNA, 20 bp, synthetic construct
  source 1..20: mol_type = other DNA
agaggtggctcccagcacgc

SEQ ID NO: 228905 - DNA, 20 bp, synthetic construct
  source 1..20: mol_type = other DNA
cagaggtggctcccagcacg

SEQ ID NO: 228906 - DNA, 20 bp, synthetic construct
  source 1..20: mol_type = other DNA
tcagaggtggctcccagcac

SEQ ID NO: 228907 - DNA, 20 bp, synthetic construct
  source 1..20: mol_type = other DNA
ctcagaggtggctcccagca

SEQ ID NO: 228908 - DNA, 20 bp, synthetic construct
  source 1..20: mol_type = other DNA
tctcagaggtggctcccagc

SEQ ID NO: 228909 - DNA, 20 bp, synthetic construct
  source 1..20: mol_type = other DNA
ttctcagaggtggctcccag

SEQ ID NO: 228910 - DNA, 20 bp, synthetic construct
  source 1..20: mol_type = other DNA
attctcagaggtggctccca

SEQ ID NO: 228911 - DNA, 20 bp, synthetic construct
  source 1..20: mol_type = other DNA
gattctcagaggtggctccc

SEQ ID NO: 228912 - DNA, 20 bp, synthetic construct
  source 1..20: mol_type = other DNA
ggattctcagaggtggctcc

SEQ ID NO: 228913 - DNA, 20 bp, synthetic construct
  source 1..20: mol_type = other DNA
tggattctcagaggtggctc

SEQ ID NO: 228914 - DNA, 20 bp, synthetic construct
  source 1..20: mol_type = other DNA
ttggattctcagaggtggct

SEQ ID NO: 228915 - DNA, 20 bp, synthetic construct
  source 1..20: mol_type = other DNA
gttggattctcagaggtggc

SEQ ID NO: 228916 - DNA, 20 bp, synthetic construct
  source 1..20: mol_type = other DNA
tgttggattctcagaggtgg

SEQ ID NO: 228917 - DNA, 20 bp, synthetic construct
  source 1..20: mol_type = other DNA
ctgttggattctcagaggtg

SEQ ID NO: 228918 - DNA, 20 bp, synthetic construct
  source 1..20: mol_type = other DNA
tctgttggattctcagaggt

SEQ ID NO: 228919 - DNA, 20 bp, synthetic construct
  source 1..20: mol_type = other DNA
ttctgttggattctcagagg

SEQ ID NO: 228920 - DNA, 20 bp, synthetic construct
  source 1..20: mol_type = other DNA
cttctgttggattctcagag

SEQ ID NO: 228921 - DNA, 20 bp, synthetic construct
  source 1..20: mol_type = other DNA
ccttctgttggattctcaga

SEQ ID NO: 228922 - DNA, 20 bp, synthetic construct
  source 1..20: mol_type = other DNA
gccttctgttggattctcag

SEQ ID NO: 228923 - DNA, 20 bp, synthetic construct
  source 1..20: mol_type = other DNA
tgccttctgttggattctca

SEQ ID NO: 228924 - DNA, 20 bp, synthetic construct
  source 1..20: mol_type = other DNA
ctgccttctgttggattctc

SEQ ID NO: 228925 - DNA, 20 bp, synthetic construct
  source 1..20: mol_type = other DNA
tctgccttctgttggattct

SEQ ID NO: 228926 - DNA, 20 bp, synthetic construct
  source 1..20: mol_type = other DNA
ctctgccttctgttggattc

SEQ ID NO: 228927 - DNA, 20 bp, synthetic construct
  source 1..20: mol_type = other DNA
cctctgccttctgttggatt

SEQ ID NO: 228928 - DNA, 20 bp, synthetic construct
  source 1..20: mol_type = other DNA
ccctctgccttctgttggat

SEQ ID NO: 228929 - DNA, 20 bp, synthetic construct
  source 1..20: mol_type = other DNA
cccctctgccttctgttgga

SEQ ID NO: 228930 - DNA, 20 bp, synthetic construct
  source 1..20: mol_type = other DNA
tcccctctgccttctgttgg

SEQ ID NO: 228931 - DNA, 20 bp, synthetic construct
  source 1..20: mol_type = other DNA
ctcccctctgccttctgttg

SEQ ID NO: 228932 - DNA, 20 bp, synthetic construct
  source 1..20: mol_type = other DNA
tctcccctctgccttctgtt

SEQ ID NO: 228933 - DNA, 20 bp, synthetic construct
  source 1..20: mol_type = other DNA
ttctcccctctgccttctgt

SEQ ID NO: 228934 - DNA, 20 bp, synthetic construct
  source 1..20: mol_type = other DNA
gttctcccctctgccttctg

SEQ ID NO: 228935 - DNA, 20 bp, synthetic construct
  source 1..20: mol_type = other DNA
cgttctcccctctgccttct

SEQ ID NO: 228936 - DNA, 20 bp, synthetic construct
  source 1..20: mol_type = other DNA
ccgttctcccctctgccttc

SEQ ID NO: 228937 - DNA, 20 bp, synthetic construct
  source 1..20: mol_type = other DNA
gccgttctcccctctgcctt

SEQ ID NO: 228938 - DNA, 20 bp, synthetic construct
  source 1..20: mol_type = other DNA
agccgttctcccctctgcct

SEQ ID NO: 228939 - DNA, 20 bp, synthetic construct
  source 1..20: mol_type = other DNA
gagccgttctcccctctgcc

SEQ ID NO: 228940 - DNA, 20 bp, synthetic construct
  source 1..20: mol_type = other DNA
tgagccgttctcccctctgc

SEQ ID NO: 228941 - DNA, 20 bp, synthetic construct
  source 1..20: mol_type = other DNA
gtgagccgttctcccctctg

SEQ ID NO: 228942 - DNA, 20 bp, synthetic construct
  source 1..20: mol_type = other DNA
tgtgagccgttctcccctct

SEQ ID NO: 228943 - DNA, 20 bp, synthetic construct
  source 1..20: mol_type = other DNA
gtgtgagccgttctcccctc

SEQ ID NO: 228944 - DNA, 20 bp, synthetic construct
  source 1..20: mol_type = other DNA
cgtgtgagccgttctcccct

SEQ ID NO: 228945 - DNA, 20 bp, synthetic construct
  source 1..20: mol_type = other DNA
ccgtgtgagccgttctcccc

SEQ ID NO: 228946 - DNA, 20 bp, synthetic construct
  source 1..20: mol_type = other DNA
gccgtgtgagccgttctccc

SEQ ID NO: 228947 - DNA, 20 bp, synthetic construct
  source 1..20: mol_type = other DNA
tgccgtgtgagccgttctcc

SEQ ID NO: 228948 - DNA, 20 bp, synthetic construct
  source 1..20: mol_type = other DNA
gtgccgtgtgagccgttctc

SEQ ID NO: 228949 - DNA, 20 bp, synthetic construct
  source 1..20: mol_type = other DNA
tgtgccgtgtgagccgttct

SEQ ID NO: 228950 - DNA, 20 bp, synthetic construct
  source 1..20: mol_type = other DNA
ttgtgccgtgtgagccgttc

SEQ ID NO: 228951 - DNA, 20 bp, synthetic construct
  source 1..20: mol_type = other DNA
tttgtgccgtgtgagccgtt

SEQ ID NO: 228952 - DNA, 20 bp, synthetic construct
  source 1..20: mol_type = other DNA
gtttgtgccgtgtgagccgt

SEQ ID NO: 228953 - DNA, 20 bp, synthetic construct
  source 1..20: mol_type = other DNA
tgtttgtgccgtgtgagccg

SEQ ID NO: 228954 - DNA, 20 bp, synthetic construct
  source 1..20: mol_type = other DNA
gtgtttgtgccgtgtgagcc

SEQ ID NO: 228955 - DNA, 20 bp, synthetic construct
  source 1..20: mol_type = other DNA
agtgtttgtgccgtgtgagc

SEQ ID NO: 228956 - DNA, 20 bp, synthetic construct
  source 1..20: mol_type = other DNA
gagtgtttgtgccgtgtgag

SEQ ID NO: 228957 - DNA, 20 bp, synthetic construct
  source 1..20: mol_type = other DNA
ggagtgtttgtgccgtgtga

SEQ ID NO: 228958 - DNA, 20 bp, synthetic construct
  source 1..20: mol_type = other DNA
aggagtgtttgtgccgtgtg

SEQ ID NO: 228959 - DNA, 20 bp, synthetic construct
  source 1..20: mol_type = other DNA
aaggagtgtttgtgccgtgt

SEQ ID NO: 228960 - DNA, 20 bp, synthetic construct
  source 1..20: mol_type = other DNA
gaaggagtgtttgtgccgtg

SEQ ID NO: 228961 - DNA, 20 bp, synthetic construct
  source 1..20: mol_type = other DNA
ggaaggagtgtttgtgccgt

SEQ ID NO: 228962 - DNA, 20 bp, synthetic construct
  source 1..20: mol_type = other DNA
aggaaggagtgtttgtgccg

SEQ ID NO: 228963 - DNA, 20 bp, synthetic construct
  source 1..20: mol_type = other DNA
aaggaaggagtgtttgtgcc

SEQ ID NO: 228964 - DNA, 20 bp, synthetic construct
  source 1..20: mol_type = other DNA
aaaggaaggagtgtttgtgc

SEQ ID NO: 228965 - DNA, 20 bp, synthetic construct
  source 1..20: mol_type = other DNA
aaaaggaaggagtgtttgtg

SEQ ID NO: 228966 - DNA, 20 bp, synthetic construct
  source 1..20: mol_type = other DNA
aaaaaggaaggagtgtttgt

SEQ ID NO: 228967 - DNA, 20 bp, synthetic construct
  source 1..20: mol_type = other DNA
aaaaaaggaaggagtgtttg

SEQ ID NO: 228968 - DNA, 20 bp, synthetic construct
  source 1..20: mol_type = other DNA
aaaaaaaggaaggagtgttt

SEQ ID NO: 228969 - DNA, 20 bp, synthetic construct
  source 1..20: mol_type = other DNA
aaaaaaaaggaaggagtgtt

SEQ ID NO: 228970 - DNA, 20 bp, synthetic construct
  source 1..20: mol_type = other DNA
aaaaaaaaaggaaggagtgt

SEQ ID NO: 228971 - DNA, 20 bp, synthetic construct
  source 1..20: mol_type = other DNA
aaaaaaaaaaggaaggagtg

SEQ ID NO: 228972 - DNA, 20 bp, synthetic construct
  source 1..20: mol_type = other DNA
aaaaaaaaaaaggaaggagt

SEQ ID NO: 228973 - DNA, 20 bp, synthetic construct
  source 1..20: mol_type = other DNA
aaaaaaaaaaaaggaaggag

SEQ ID NO: 228974 - DNA, 20 bp, synthetic construct
  source 1..20: mol_type = other DNA
gaaaaaaaaaaaaggaagga

SEQ ID NO: 228975 - DNA, 20 bp, synthetic construct
  source 1..20: mol_type = other DNA
agaaaaaaaaaaaaggaagg

SEQ ID NO: 228976 - DNA, 20 bp, synthetic construct
  source 1..20: mol_type = other DNA
aagaaaaaaaaaaaaggaag

SEQ ID NO: 228977 - DNA, 20 bp, synthetic construct
  source 1..20: mol_type = other DNA
aaagaaaaaaaaaaaaggaa

SEQ ID NO: 228978 - DNA, 20 bp, synthetic construct
  source 1..20: mol_type = other DNA
aaaagaaaaaaaaaaaagga

SEQ ID NO: 228979 - DNA, 20 bp, synthetic construct
  source 1..20: mol_type = other DNA
aaaaagaaaaaaaaaaaagg

SEQ ID NO: 228980 - DNA, 20 bp, synthetic construct
  source 1..20: mol_type = other DNA
gaaaaagaaaaaaaaaaaag

SEQ ID NO: 228981 - DNA, 20 bp, synthetic construct
  source 1..20: mol_type = other DNA
ggaaaaagaaaaaaaaaaaa

SEQ ID NO: 228982 - DNA, 20 bp, synthetic construct
  source 1..20: mol_type = other DNA
aggaaaaagaaaaaaaaaaa

SEQ ID NO: 228983 - DNA, 20 bp, synthetic construct
  source 1..20: mol_type = other DNA
aaggaaaaagaaaaaaaaaa

SEQ ID NO: 228984 - DNA, 20 bp, synthetic construct
  source 1..20: mol_type = other DNA
aaaggaaaaagaaaaaaaaa

SEQ ID NO: 228985 - DNA, 20 bp, synthetic construct
  source 1..20: mol_type = other DNA
aaaaggaaaaagaaaaaaaa

SEQ ID NO: 228986 - DNA, 20 bp, synthetic construct
  source 1..20: mol_type = other DNA
aaaaaggaaaaagaaaaaaa

SEQ ID NO: 228987 - DNA, 20 bp, synthetic construct
  source 1..20: mol_type = other DNA
caaaaaggaaaaagaaaaaa

SEQ ID NO: 228988 - DNA, 20 bp, synthetic construct
  source 1..20: mol_type = other DNA
tcaaaaaggaaaaagaaaaa

SEQ ID NO: 228989 - DNA, 20 bp, synthetic construct
  source 1..20: mol_type = other DNA
ttcaaaaaggaaaaagaaaa

SEQ ID NO: 228990 - DNA, 20 bp, synthetic construct
  source 1..20: mol_type = other DNA
tttcaaaaaggaaaaagaaa

SEQ ID NO: 228991 - DNA, 20 bp, synthetic construct
  source 1..20: mol_type = other DNA
ctttcaaaaaggaaaaagaa

SEQ ID NO: 228992 - DNA, 20 bp, synthetic construct
  source 1..20: mol_type = other DNA
cctttcaaaaaggaaaaaga

SEQ ID NO: 228993 - DNA, 20 bp, synthetic construct
  source 1..20: mol_type = other DNA
tcctttcaaaaaggaaaaag

SEQ ID NO: 228994 - DNA, 20 bp, synthetic construct
  source 1..20: mol_type = other DNA
ctcctttcaaaaaggaaaaa

SEQ ID NO: 228995 - DNA, 20 bp, synthetic construct
  source 1..20: mol_type = other DNA
actcctttcaaaaaggaaaa

SEQ ID NO: 228996 - DNA, 20 bp, synthetic construct
  source 1..20: mol_type = other DNA
gactcctttcaaaaaggaaa

SEQ ID NO: 228997 - DNA, 20 bp, synthetic construct
  source 1..20: mol_type = other DNA
agactcctttcaaaaaggaa

SEQ ID NO: 228998 - DNA, 20 bp, synthetic construct
  source 1..20: mol_type = other DNA
gagactcctttcaaaaagga

SEQ ID NO: 228999 - DNA, 20 bp, synthetic construct
  source 1..20: mol_type = other DNA
tgagactcctttcaaaaagg

SEQ ID NO: 229000 - DNA, 20 bp, synthetic construct
  source 1..20: mol_type = other DNA
gtgagactcctttcaaaaag

SEQ ID NO: 229001 - DNA, 20 bp, synthetic construct
  source 1..20: mol_type = other DNA
agtgagactcctttcaaaaa

SEQ ID NO: 229002 - DNA, 20 bp, synthetic construct
  source 1..20: mol_type = other DNA
gagtgagactcctttcaaaa

SEQ ID NO: 229003 - DNA, 20 bp, synthetic construct
  source 1..20: mol_type = other DNA
agagtgagactcctttcaaa

SEQ ID NO: 229004 - DNA, 20 bp, synthetic construct
  source 1..20: mol_type = other DNA
tagagtgagactcctttcaa

SEQ ID NO: 229005 - DNA, 20 bp, synthetic construct
  source 1..20: mol_type = other DNA
atagagtgagactcctttca

SEQ ID NO: 229006 - DNA, 20 bp, synthetic construct
  source 1..20: mol_type = other DNA
aatagagtgagactcctttc

SEQ ID NO: 229007 - DNA, 20 bp, synthetic construct
  source 1..20: mol_type = other DNA
caatagagtgagactccttt

SEQ ID NO: 229008 - DNA, 20 bp, synthetic construct
  source 1..20: mol_type = other DNA
gcaatagagtgagactcctt

SEQ ID NO: 229009 - DNA, 20 bp, synthetic construct
  source 1..20: mol_type = other DNA
ggcaatagagtgagactcct

SEQ ID NO: 229010 - DNA, 20 bp, synthetic construct
  source 1..20: mol_type = other DNA
gggcaatagagtgagactcc

SEQ ID NO: 229011 - DNA, 20 bp, synthetic construct
  source 1..20: mol_type = other DNA
tgggcaatagagtgagactc

SEQ ID NO: 229012 - DNA, 20 bp, synthetic construct
  source 1..20: mol_type = other DNA
ctgggcaatagagtgagact

SEQ ID NO: 229013 - DNA, 20 bp, synthetic construct
  source 1..20: mol_type = other DNA
cctgggcaatagagtgagac

SEQ ID NO: 229014 - DNA, 20 bp, synthetic construct
  source 1..20: mol_type = other DNA
gcctgggcaatagagtgaga

SEQ ID NO: 229015 - DNA, 20 bp, synthetic construct
  source 1..20: mol_type = other DNA
tgcctgggcaatagagtgag

SEQ ID NO: 229016 - DNA, 20 bp, synthetic construct
  source 1..20: mol_type = other DNA
ctgcctgggcaatagagtga

SEQ ID NO: 229017 - DNA, 20 bp, synthetic construct
  source 1..20: mol_type = other DNA
cctgcctgggcaatagagtg

SEQ ID NO: 229018 - DNA, 20 bp, synthetic construct
  source 1..20: mol_type = other DNA
tcctgcctgggcaatagagt

SEQ ID NO: 229019 - DNA, 20 bp, synthetic construct
  source 1..20: mol_type = other DNA
ctcctgcctgggcaatagag

SEQ ID NO: 229020 - DNA, 20 bp, synthetic construct
  source 1..20: mol_type = other DNA
actcctgcctgggcaataga

SEQ ID NO: 229021 - DNA, 20 bp, synthetic construct
  source 1..20: mol_type = other DNA
cactcctgcctgggcaatag

SEQ ID NO: 229022 - DNA, 20 bp, synthetic construct
  source 1..20: mol_type = other DNA
gcactcctgcctgggcaata

SEQ ID NO: 229023 - DNA, 20 bp, synthetic construct
  source 1..20: mol_type = other DNA
tgcactcctgcctgggcaat

SEQ ID NO: 229024 - DNA, 20 bp, synthetic construct
  source 1..20: mol_type = other DNA
ctgcactcctgcctgggcaa

SEQ ID NO: 229025 - DNA, 20 bp, synthetic construct
  source 1..20: mol_type = other DNA
actgcactcctgcctgggca

SEQ ID NO: 229026 - DNA, 20 bp, synthetic construct
  source 1..20: mol_type = other DNA
cactgcactcctgcctgggc

SEQ ID NO: 229027 - DNA, 20 bp, synthetic construct
  source 1..20: mol_type = other DNA
ccactgcactcctgcctggg

SEQ ID NO: 229028 - DNA, 20 bp, synthetic construct
  source 1..20: mol_type = other DNA
accactgcactcctgcctgg

SEQ ID NO: 229029 - DNA, 20 bp, synthetic construct
  source 1..20: mol_type = other DNA
caccactgcactcctgcctg

SEQ ID NO: 229030 - DNA, 20 bp, synthetic construct
  source 1..20: mol_type = other DNA
gcaccactgcactcctgcct

SEQ ID NO: 229031 - DNA, 20 bp, synthetic construct
  source 1..20: mol_type = other DNA
tgcaccactgcactcctgcc

SEQ ID NO: 229032 - DNA, 20 bp, synthetic construct
  source 1..20: mol_type = other DNA
ttgcaccactgcactcctgc

SEQ ID NO: 229033 - DNA, 20 bp, synthetic construct
  source 1..20: mol_type = other DNA
attgcaccactgcactcctg

SEQ ID NO: 229034 - DNA, 20 bp, synthetic construct
  source 1..20: mol_type = other DNA
gattgcaccactgcactcct

SEQ ID NO: 229035 - DNA, 20 bp, synthetic construct
  source 1..20: mol_type = other DNA
agattgcaccactgcactcc

SEQ ID NO: 229036 - DNA, 20 bp, synthetic construct
  source 1..20: mol_type = other DNA
gagattgcaccactgcactc

SEQ ID NO: 229037 - DNA, 20 bp, synthetic construct
  source 1..20: mol_type = other DNA
tgagattgcaccactgcact

SEQ ID NO: 229038 - DNA, 20 bp, synthetic construct
  source 1..20: mol_type = other DNA
ctgagattgcaccactgcac

SEQ ID NO: 229039 - DNA, 20 bp, synthetic construct
  source 1..20: mol_type = other DNA
gctgagattgcaccactgca

SEQ ID NO: 229040 - DNA, 20 bp, synthetic construct
  source 1..20: mol_type = other DNA
agctgagattgcaccactgc

SEQ ID NO: 229041 - DNA, 20 bp, synthetic construct
  source 1..20: mol_type = other DNA
gagctgagattgcaccactg

SEQ ID NO: 229042 - DNA, 20 bp, synthetic construct
  source 1..20: mol_type = other DNA
tgagctgagattgcaccact

SEQ ID NO: 229043 - DNA, 20 bp, synthetic construct
  source 1..20: mol_type = other DNA
gtgagctgagattgcaccac

SEQ ID NO: 229044 - DNA, 20 bp, synthetic construct
  source 1..20: mol_type = other DNA
agtgagctgagattgcacca

SEQ ID NO: 229045 - DNA, 20 bp, synthetic construct
  source 1..20: mol_type = other DNA
cagtgagctgagattgcacc

SEQ ID NO: 229046 - DNA, 20 bp, synthetic construct
  source 1..20: mol_type = other DNA
gcagtgagctgagattgcac

SEQ ID NO: 229047 - DNA, 20 bp, synthetic construct
  source 1..20: mol_type = other DNA
tgcagtgagctgagattgca

SEQ ID NO: 229048 - DNA, 20 bp, synthetic construct
  source 1..20: mol_type = other DNA
ttgcagtgagctgagattgc

SEQ ID NO: 229049 - DNA, 20 bp, synthetic construct
  source 1..20: mol_type = other DNA
gttgcagtgagctgagattg

SEQ ID NO: 229050 - DNA, 20 bp, synthetic construct
  source 1..20: mol_type = other DNA
ggttgcagtgagctgagatt

SEQ ID NO: 229051 - DNA, 20 bp, synthetic construct
  source 1..20: mol_type = other DNA
aggttgcagtgagctgagat

SEQ ID NO: 229052 - DNA, 20 bp, synthetic construct
  source 1..20: mol_type = other DNA
gaggttgcagtgagctgaga

SEQ ID NO: 229053 - DNA, 20 bp, synthetic construct
  source 1..20: mol_type = other DNA
ggaggttgcagtgagctgag

SEQ ID NO: 229054 - DNA, 20 bp, synthetic construct
  source 1..20: mol_type = other DNA
cggaggttgcagtgagctga

SEQ ID NO: 229055 - DNA, 20 bp, synthetic construct
  source 1..20: mol_type = other DNA
gcggaggttgcagtgagctg

SEQ ID NO: 229056 - DNA, 20 bp, synthetic construct
  source 1..20: mol_type = other DNA
ggcggaggttgcagtgagct

SEQ ID NO: 229057 - DNA, 20 bp, synthetic construct
  source 1..20: mol_type = other DNA
aggcggaggttgcagtgagc

SEQ ID NO: 229058 - DNA, 20 bp, synthetic construct
  source 1..20: mol_type = other DNA
gaggcggaggttgcagtgag

SEQ ID NO: 229059 - DNA, 20 bp, synthetic construct
  source 1..20: mol_type = other DNA
ggaggcggaggttgcagtga

SEQ ID NO: 229060 - DNA, 20 bp, synthetic construct
  source 1..20: mol_type = other DNA
aggaggcggaggttgcagtg

SEQ ID NO: 229061 - DNA, 20 bp, synthetic construct
  source 1..20: mol_type = other DNA
taggaggcggaggttgcagt

SEQ ID NO: 229062 - DNA, 20 bp, synthetic construct
  source 1..20: mol_type = other DNA
ctaggaggcggaggttgcag

SEQ ID NO: 229063 - DNA, 20 bp, synthetic construct
  source 1..20: mol_type = other DNA
cctaggaggcggaggttgca

SEQ ID NO: 229064 - DNA, 20 bp, synthetic construct
  source 1..20: mol_type = other DNA
acctaggaggcggaggttgc

SEQ ID NO: 229065 - DNA, 20 bp, synthetic construct
  source 1..20: mol_type = other DNA
aacctaggaggcggaggttg

SEQ ID NO: 229066 - DNA, 20 bp, synthetic construct
  source 1..20: mol_type = other DNA
gaacctaggaggcggaggtt

SEQ ID NO: 229067 - DNA, 20 bp, synthetic construct
  source 1..20: mol_type = other DNA
tgaacctaggaggcggaggt

SEQ ID NO: 229068 - DNA, 20 bp, synthetic construct
  source 1..20: mol_type = other DNA
ttgaacctaggaggcggagg

SEQ ID NO: 229069 - DNA, 20 bp, synthetic construct
  source 1..20: mol_type = other DNA
cttgaacctaggaggcggag

SEQ ID NO: 229070 - DNA, 20 bp, synthetic construct
  source 1..20: mol_type = other DNA
gcttgaacctaggaggcgga

SEQ ID NO: 229071 - DNA, 20 bp, synthetic construct
  source 1..20: mol_type = other DNA
cgcttgaacctaggaggcgg

SEQ ID NO: 229072 - DNA, 20 bp, synthetic construct
  source 1..20: mol_type = other DNA
tcgcttgaacctaggaggcg

SEQ ID NO: 229073 - DNA, 20 bp, synthetic construct
  source 1..20: mol_type = other DNA
atcgcttgaacctaggaggc

SEQ ID NO: 229074 - DNA, 20 bp, synthetic construct
  source 1..20: mol_type = other DNA
aatcgcttgaacctaggagg

SEQ ID NO: 229075 - DNA, 20 bp, synthetic construct
  source 1..20: mol_type = other DNA
gaatcgcttgaacctaggag

SEQ ID NO: 229076 - DNA, 20 bp, synthetic construct
  source 1..20: mol_type = other DNA
agaatcgcttgaacctagga

SEQ ID NO: 229077 - DNA, 20 bp, synthetic construct
  source 1..20: mol_type = other DNA
gagaatcgcttgaacctagg

SEQ ID NO: 229078 - DNA, 20 bp, synthetic construct
  source 1..20: mol_type = other DNA
ggagaatcgcttgaacctag

SEQ ID NO: 229079 - DNA, 20 bp, synthetic construct
  source 1..20: mol_type = other DNA
tggagaatcgcttgaaccta

SEQ ID NO: 229080 - DNA, 20 bp, synthetic construct
  source 1..20: mol_type = other DNA
ctggagaatcgcttgaacct

SEQ ID NO: 229081 - DNA, 20 bp, synthetic construct
  source 1..20: mol_type = other DNA
gctggagaatcgcttgaacc

SEQ ID NO: 229082 - DNA, 20 bp, synthetic construct
  source 1..20: mol_type = other DNA
ggctggagaatcgcttgaac

SEQ ID NO: 229083 - DNA, 20 bp, synthetic construct
  source 1..20: mol_type = other DNA
aggctggagaatcgcttgaa

SEQ ID NO: 229084 - DNA, 20 bp, synthetic construct
  source 1..20: mol_type = other DNA
gaggctggagaatcgcttga

SEQ ID NO: 229085 - DNA, 20 bp, synthetic construct
  source 1..20: mol_type = other DNA
tgaggctggagaatcgcttg

SEQ ID NO: 229086 - DNA, 20 bp, synthetic construct
  source 1..20: mol_type = other DNA
ctgaggctggagaatcgctt

SEQ ID NO: 229087 - DNA, 20 bp, synthetic construct
  source 1..20: mol_type = other DNA
gctgaggctggagaatcgct

SEQ ID NO: 229088 - DNA, 20 bp, synthetic construct
  source 1..20: mol_type = other DNA
agctgaggctggagaatcgc

SEQ ID NO: 229089 - DNA, 20 bp, synthetic construct
  source 1..20: mol_type = other DNA
aagctgaggctggagaatcg

SEQ ID NO: 229090 - DNA, 20 bp, synthetic construct
  source 1..20: mol_type = other DNA
gaagctgaggctggagaatc

SEQ ID NO: 229091 - DNA, 20 bp, synthetic construct
  source 1..20: mol_type = other DNA
ggaagctgaggctggagaat

SEQ ID NO: 229092 - DNA, 20 bp, synthetic construct
  source 1..20: mol_type = other DNA
gggaagctgaggctggagaa

SEQ ID NO: 229093 - DNA, 20 bp, synthetic construct
  source 1..20: mol_type = other DNA
tgggaagctgaggctggaga

SEQ ID NO: 229094 - DNA, 20 bp, synthetic construct
  source 1..20: mol_type = other DNA
ttgggaagctgaggctggag

SEQ ID NO: 229095 - DNA, 20 bp, synthetic construct
  source 1..20: mol_type = other DNA
cttgggaagctgaggctgga

SEQ ID NO: 229096 - DNA, 20 bp, synthetic construct
  source 1..20: mol_type = other DNA
acttgggaagctgaggctgg

SEQ ID NO: 229097 - DNA, 20 bp, synthetic construct
  source 1..20: mol_type = other DNA
tacttgggaagctgaggctg

SEQ ID NO: 229098 - DNA, 20 bp, synthetic construct
  source 1..20: mol_type = other DNA
ctacttgggaagctgaggct

SEQ ID NO: 229099 - DNA, 20 bp, synthetic construct
  source 1..20: mol_type = other DNA
gctacttgggaagctgaggc

SEQ ID NO: 229100 - DNA, 20 bp, synthetic construct
  source 1..20: mol_type = other DNA
agctacttgggaagctgagg

SEQ ID NO: 229101 - DNA, 20 bp, synthetic construct
  source 1..20: mol_type = other DNA
cagctacttgggaagctgag

SEQ ID NO: 229102 - DNA, 20 bp, synthetic construct
  source 1..20: mol_type = other DNA
ccagctacttgggaagctga

SEQ ID NO: 229103 - DNA, 20 bp, synthetic construct
  source 1..20: mol_type = other DNA
cccagctacttgggaagctg

SEQ ID NO: 229104 - DNA, 20 bp, synthetic construct
  source 1..20: mol_type = other DNA
tcccagctacttgggaagct

SEQ ID NO: 229105 - DNA, 20 bp, synthetic construct
  source 1..20: mol_type = other DNA
atcccagctacttgggaagc

SEQ ID NO: 229106 - DNA, 20 bp, synthetic construct
  source 1..20: mol_type = other DNA
aatcccagctacttgggaag

SEQ ID NO: 229107 - DNA, 20 bp, synthetic construct
  source 1..20: mol_type = other DNA
taatcccagctacttgggaa

SEQ ID NO: 229108 - DNA, 20 bp, synthetic construct
  source 1..20: mol_type = other DNA
gtaatcccagctacttggga

SEQ ID NO: 229109 - DNA, 20 bp, synthetic construct
  source 1..20: mol_type = other DNA
tgtaatcccagctacttggg

SEQ ID NO: 229110 - DNA, 20 bp, synthetic construct
  source 1..20: mol_type = other DNA
ctgtaatcccagctacttgg

SEQ ID NO: 229111 - DNA, 20 bp, synthetic construct
  source 1..20: mol_type = other DNA
cctgtaatcccagctacttg

SEQ ID NO: 229112 - DNA, 20 bp, synthetic construct
  source 1..20: mol_type = other DNA
acctgtaatcccagctactt

SEQ ID NO: 229113 - DNA, 20 bp, synthetic construct
  source 1..20: mol_type = other DNA
tacctgtaatcccagctact

SEQ ID NO: 229114 - DNA, 20 bp, synthetic construct
  source 1..20: mol_type = other DNA
gtacctgtaatcccagctac

SEQ ID NO: 229115 - DNA, 20 bp, synthetic construct
  source 1..20: mol_type = other DNA
tgtacctgtaatcccagcta

SEQ ID NO: 229116 - DNA, 20 bp, synthetic construct
  source 1..20: mol_type = other DNA
gtgtacctgtaatcccagct

SEQ ID NO: 229117 - DNA, 20 bp, synthetic construct
  source 1..20: mol_type = other DNA
agtgtacctgtaatcccagc

SEQ ID NO: 229118 - DNA, 20 bp, synthetic construct
  source 1..20: mol_type = other DNA
gagtgtacctgtaatcccag

SEQ ID NO: 229119 - DNA, 20 bp, synthetic construct
  source 1..20: mol_type = other DNA
ggagtgtacctgtaatccca

SEQ ID NO: 229120 - DNA, 20 bp, synthetic construct
  source 1..20: mol_type = other DNA
tggagtgtacctgtaatccc

SEQ ID NO: 229121 - DNA, 20 bp, synthetic construct
  source 1..20: mol_type = other DNA
gtggagtgtacctgtaatcc

SEQ ID NO: 229122 - DNA, 20 bp, synthetic construct
  source 1..20: mol_type = other DNA
ggtggagtgtacctgtaatc

SEQ ID NO: 229123 - DNA, 20 bp, synthetic construct
  source 1..20: mol_type = other DNA
tggtggagtgtacctgtaat

SEQ ID NO: 229124 - DNA, 20 bp, synthetic construct
  source 1..20: mol_type = other DNA
atggtggagtgtacctgtaa

SEQ ID NO: 229125 - DNA, 20 bp, synthetic construct
  source 1..20: mol_type = other DNA
catggtggagtgtacctgta

SEQ ID NO: 229126 - DNA, 20 bp, synthetic construct
  source 1..20: mol_type = other DNA
gcatggtggagtgtacctgt

SEQ ID NO: 229127 - DNA, 20 bp, synthetic construct
  source 1..20: mol_type = other DNA
ggcatggtggagtgtacctg

SEQ ID NO: 229128 - DNA, 20 bp, synthetic construct
  source 1..20: mol_type = other DNA
gggcatggtggagtgtacct

SEQ ID NO: 229129 - DNA, 20 bp, synthetic construct
  source 1..20: mol_type = other DNA
cgggcatggtggagtgtacc

SEQ ID NO: 229130 - DNA, 20 bp, synthetic construct
  source 1..20: mol_type = other DNA
ccgggcatggtggagtgtac

SEQ ID NO: 229131 - DNA, 20 bp, synthetic construct
  source 1..20: mol_type = other DNA
gccgggcatggtggagtgta

SEQ ID NO: 229132 - DNA, 20 bp, synthetic construct
  source 1..20: mol_type = other DNA
agccgggcatggtggagtgt

SEQ ID NO: 229133 - DNA, 20 bp, synthetic construct
  source 1..20: mol_type = other DNA
tagccgggcatggtggagtg

SEQ ID NO: 229134 - DNA, 20 bp, synthetic construct
  source 1..20: mol_type = other DNA
ttagccgggcatggtggagt

SEQ ID NO: 229135 - DNA, 20 bp, synthetic construct
  source 1..20: mol_type = other DNA
attagccgggcatggtggag

SEQ ID NO: 229136 - DNA, 20 bp, synthetic construct
  source 1..20: mol_type = other DNA
aattagccgggcatggtgga

SEQ ID NO: 229137 - DNA, 20 bp, synthetic construct
  source 1..20: mol_type = other DNA
aaattagccgggcatggtgg

SEQ ID NO: 229138 - DNA, 20 bp, synthetic construct
  source 1..20: mol_type = other DNA
aaaattagccgggcatggtg

SEQ ID NO: 229139 - DNA, 20 bp, synthetic construct
  source 1..20: mol_type = other DNA
aaaaattagccgggcatggt

SEQ ID NO: 229140 - DNA, 20 bp, synthetic construct
  source 1..20: mol_type = other DNA
caaaaattagccgggcatgg

SEQ ID NO: 229141 - DNA, 20 bp, synthetic construct
  source 1..20: mol_type = other DNA
acaaaaattagccgggcatg

SEQ ID NO: 229142 - DNA, 20 bp, synthetic construct
  source 1..20: mol_type = other DNA
cacaaaaattagccgggcat

SEQ ID NO: 229143 - DNA, 20 bp, synthetic construct
  source 1..20: mol_type = other DNA
acacaaaaattagccgggca

SEQ ID NO: 229144 - DNA, 20 bp, synthetic construct
  source 1..20: mol_type = other DNA
aacacaaaaattagccgggc

SEQ ID NO: 229145 - DNA, 20 bp, synthetic construct
  source 1..20: mol_type = other DNA
aaacacaaaaattagccggg

SEQ ID NO: 229146 - DNA, 20 bp, synthetic construct
  source 1..20: mol_type = other DNA
aaaacacaaaaattagccgg

SEQ ID NO: 229147 - DNA, 20 bp, synthetic construct
  source 1..20: mol_type = other DNA
aaaaacacaaaaattagccg

SEQ ID NO: 229148 - DNA, 20 bp, synthetic construct
  source 1..20: mol_type = other DNA
taaaaacacaaaaattagcc

SEQ ID NO: 229149 - DNA, 20 bp, synthetic construct
  source 1..20: mol_type = other DNA
ctaaaaacacaaaaattagc

SEQ ID NO: 229150 - DNA, 20 bp, synthetic construct
  source 1..20: mol_type = other DNA
actaaaaacacaaaaattag

SEQ ID NO: 229151 - DNA, 20 bp, synthetic construct
  source 1..20: mol_type = other DNA
tactaaaaacacaaaaatta

SEQ ID NO: 229152 - DNA, 20 bp, synthetic construct
  source 1..20: mol_type = other DNA
ctactaaaaacacaaaaatt

SEQ ID NO: 229153 - DNA, 20 bp, synthetic construct
  source 1..20: mol_type = other DNA
tctactaaaaacacaaaaat

SEQ ID NO: 229154 - DNA, 20 bp, synthetic construct
  source 1..20: mol_type = other DNA
ctctactaaaaacacaaaaa

SEQ ID NO: 229155 - DNA, 20 bp, synthetic construct
  source 1..20: mol_type = other DNA
tctctactaaaaacacaaaa

SEQ ID NO: 229156 - DNA, 20 bp, synthetic construct
  source 1..20: mol_type = other DNA
gtctctactaaaaacacaaa

SEQ ID NO: 229157 - DNA, 20 bp, synthetic construct
  source 1..20: mol_type = other DNA
cgtctctactaaaaacacaa

SEQ ID NO: 229158 - DNA, 20 bp, synthetic construct
  source 1..20: mol_type = other DNA
ccgtctctactaaaaacaca

SEQ ID NO: 229159 - DNA, 20 bp, synthetic construct
  source 1..20: mol_type = other DNA
cccgtctctactaaaaacac

SEQ ID NO: 229160 - DNA, 20 bp, synthetic construct
  source 1..20: mol_type = other DNA
ccccgtctctactaaaaaca

SEQ ID NO: 229161 - DNA, 20 bp, synthetic construct
  source 1..20: mol_type = other DNA
accccgtctctactaaaaac

SEQ ID NO: 229162 - DNA, 20 bp, synthetic construct
  source 1..20: mol_type = other DNA
aaccccgtctctactaaaaa

SEQ ID NO: 229163 - DNA, 20 bp, synthetic construct
  source 1..20: mol_type = other DNA
aaaccccgtctctactaaaa

SEQ ID NO: 229164 - DNA, 20 bp, synthetic construct
  source 1..20: mol_type = other DNA
gaaaccccgtctctactaaa

SEQ ID NO: 229165 - DNA, 20 bp, synthetic construct
  source 1..20: mol_type = other DNA
ggaaaccccgtctctactaa

SEQ ID NO: 229166 - DNA, 20 bp, synthetic construct
  source 1..20: mol_type = other DNA
gggaaaccccgtctctacta

SEQ ID NO: 229167 - DNA, 20 bp, synthetic construct
  source 1..20: mol_type = other DNA
agggaaaccccgtctctact

SEQ ID NO: 229168 - DNA, 20 bp, synthetic construct
  source 1..20: mol_type = other DNA
tagggaaaccccgtctctac

SEQ ID NO: 229169 - DNA, 20 bp, synthetic construct
  source 1..20: mol_type = other DNA
atagggaaaccccgtctcta

SEQ ID NO: 229170 - DNA, 20 bp, synthetic construct
  source 1..20: mol_type = other DNA
catagggaaaccccgtctct

SEQ ID NO: 229171 - DNA, 20 bp, synthetic construct
  source 1..20: mol_type = other DNA
acatagggaaaccccgtctc

SEQ ID NO: 229172 - DNA, 20 bp, synthetic construct
  source 1..20: mol_type = other DNA
aacatagggaaaccccgtct

SEQ ID NO: 229173 - DNA, 20 bp, synthetic construct
  source 1..20: mol_type = other DNA
caacatagggaaaccccgtc

SEQ ID NO: 229174 - DNA, 20 bp, synthetic construct
  source 1..20: mol_type = other DNA
ccaacatagggaaaccccgt

SEQ ID NO: 229175 - DNA, 20 bp, synthetic construct
  source 1..20: mol_type = other DNA
gccaacatagggaaaccccg

SEQ ID NO: 229176 - DNA, 20 bp, synthetic construct
  source 1..20: mol_type = other DNA
ggccaacatagggaaacccc

SEQ ID NO: 229177 - DNA, 20 bp, synthetic construct
  source 1..20: mol_type = other DNA
tggccaacatagggaaaccc

SEQ ID NO: 229178 - DNA, 20 bp, synthetic construct
  source 1..20: mol_type = other DNA
ctggccaacatagggaaacc

SEQ ID NO: 229179 - DNA, 20 bp, synthetic construct
  source 1..20: mol_type = other DNA
cctggccaacatagggaaac

SEQ ID NO: 229180 - DNA, 20 bp, synthetic construct
  source 1..20: mol_type = other DNA
gcctggccaacatagggaaa

SEQ ID NO: 229181 - DNA, 20 bp, synthetic construct
  source 1..20: mol_type = other DNA
agcctggccaacatagggaa

SEQ ID NO: 229182 - DNA, 20 bp, synthetic construct
  source 1..20: mol_type = other DNA
cagcctggccaacataggga

SEQ ID NO: 229183 - DNA, 20 bp, synthetic construct
  source 1..20: mol_type = other DNA
ccagcctggccaacataggg

SEQ ID NO: 229184 - DNA, 20 bp, synthetic construct
  source 1..20: mol_type = other DNA
accagcctggccaacatagg

SEQ ID NO: 229185 - DNA, 20 bp, synthetic construct
  source 1..20: mol_type = other DNA
gaccagcctggccaacatag

SEQ ID NO: 229186 - DNA, 20 bp, synthetic construct
  source 1..20: mol_type = other DNA
agaccagcctggccaacata

SEQ ID NO: 229187 - DNA, 20 bp, synthetic construct
  source 1..20: mol_type = other DNA
aagaccagcctggccaacat

SEQ ID NO: 229188 - DNA, 20 bp, synthetic construct
  source 1..20: mol_type = other DNA
caagaccagcctggccaaca

SEQ ID NO: 229189 - DNA, 20 bp, synthetic construct
  source 1..20: mol_type = other DNA
tcaagaccagcctggccaac

SEQ ID NO: 229190 - DNA, 20 bp, synthetic construct
  source 1..20: mol_type = other DNA
ctcaagaccagcctggccaa

SEQ ID NO: 229191 - DNA, 20 bp, synthetic construct
  source 1..20: mol_type = other DNA
gctcaagaccagcctggcca

SEQ ID NO: 229192 - DNA, 20 bp, synthetic construct
  source 1..20: mol_type = other DNA
agctcaagaccagcctggcc

SEQ ID NO: 229193 - DNA, 20 bp, synthetic construct
  source 1..20: mol_type = other DNA
gagctcaagaccagcctggc

SEQ ID NO: 229194 - DNA, 20 bp, synthetic construct
  source 1..20: mol_type = other DNA
ggagctcaagaccagcctgg

SEQ ID NO: 229195 - DNA, 20 bp, synthetic construct
  source 1..20: mol_type = other DNA
aggagctcaagaccagcctg

SEQ ID NO: 229196 - DNA, 20 bp, synthetic construct
  source 1..20: mol_type = other DNA
caggagctcaagaccagcct

SEQ ID NO: 229197 - DNA, 20 bp, synthetic construct
  source 1..20: mol_type = other DNA
tcaggagctcaagaccagcc

SEQ ID NO: 229198 - DNA, 20 bp, synthetic construct
  source 1..20: mol_type = other DNA
gtcaggagctcaagaccagc

SEQ ID NO: 229199 - DNA, 20 bp, synthetic construct
  source 1..20: mol_type = other DNA
ggtcaggagctcaagaccag

SEQ ID NO: 229200 - DNA, 20 bp, synthetic construct
  source 1..20: mol_type = other DNA
aggtcaggagctcaagacca

SEQ ID NO: 229201 - DNA, 20 bp, synthetic construct
  source 1..20: mol_type = other DNA
gaggtcaggagctcaagacc

SEQ ID NO: 229202 - DNA, 20 bp, synthetic construct
  source 1..20: mol_type = other DNA
tgaggtcaggagctcaagac

SEQ ID NO: 229203 - DNA, 20 bp, synthetic construct
  source 1..20: mol_type = other DNA
ctgaggtcaggagctcaaga

SEQ ID NO: 229204 - DNA, 20 bp, synthetic construct
  source 1..20: mol_type = other DNA
cctgaggtcaggagctcaag

SEQ ID NO: 229205 - DNA, 20 bp, synthetic construct
  source 1..20: mol_type = other DNA
acctgaggtcaggagctcaa

SEQ ID NO: 229206 - DNA, 20 bp, synthetic construct
  source 1..20: mol_type = other DNA
cacctgaggtcaggagctca

SEQ ID NO: 229207 - DNA, 20 bp, synthetic construct
  source 1..20: mol_type = other DNA
tcacctgaggtcaggagctc

SEQ ID NO: 229208 - DNA, 20 bp, synthetic construct
  source 1..20: mol_type = other DNA
atcacctgaggtcaggagct

SEQ ID NO: 229209 - DNA, 20 bp, synthetic construct
  source 1..20: mol_type = other DNA
gatcacctgaggtcaggagc

SEQ ID NO: 229210 - DNA, 20 bp, synthetic construct
  source 1..20: mol_type = other DNA
agatcacctgaggtcaggag

SEQ ID NO: 229211 - DNA, 20 bp, synthetic construct
  source 1..20: mol_type = other DNA
cagatcacctgaggtcagga

SEQ ID NO: 229212 - DNA, 20 bp, synthetic construct
  source 1..20: mol_type = other DNA
gcagatcacctgaggtcagg

SEQ ID NO: 229213 - DNA, 20 bp, synthetic construct
  source 1..20: mol_type = other DNA
ggcagatcacctgaggtcag

SEQ ID NO: 229214 - DNA, 20 bp, synthetic construct
  source 1..20: mol_type = other DNA
aggcagatcacctgaggtca

SEQ ID NO: 229215 - DNA, 20 bp, synthetic construct
  source 1..20: mol_type = other DNA
caggcagatcacctgaggtc

SEQ ID NO: 229216 - DNA, 20 bp, synthetic construct
  source 1..20: mol_type = other DNA
gcaggcagatcacctgaggt

SEQ ID NO: 229217 - DNA, 20 bp, synthetic construct
  source 1..20: mol_type = other DNA
ggcaggcagatcacctgagg

SEQ ID NO: 229218 - DNA, 20 bp, synthetic construct
  source 1..20: mol_type = other DNA
aggcaggcagatcacctgag

SEQ ID NO: 229219 - DNA, 20 bp, synthetic construct
  source 1..20: mol_type = other DNA
aaggcaggcagatcacctga

SEQ ID NO: 229220 - DNA, 20 bp, synthetic construct
  source 1..20: mol_type = other DNA
caaggcaggcagatcacctg

SEQ ID NO: 229221 - DNA, 20 bp, synthetic construct
  source 1..20: mol_type = other DNA
ccaaggcaggcagatcacct

SEQ ID NO: 229222 - DNA, 20 bp, synthetic construct
  source 1..20: mol_type = other DNA
gccaaggcaggcagatcacc

SEQ ID NO: 229223 - DNA, 20 bp, synthetic construct
  source 1..20: mol_type = other DNA
ggccaaggcaggcagatcac

SEQ ID NO: 229224 - DNA, 20 bp, synthetic construct
  source 1..20: mol_type = other DNA
aggccaaggcaggcagatca

SEQ ID NO: 229225 - DNA, 20 bp, synthetic construct
  source 1..20: mol_type = other DNA
gaggccaaggcaggcagatc

SEQ ID NO: 229226 - DNA, 20 bp, synthetic construct
  source 1..20: mol_type = other DNA
ggaggccaaggcaggcagat

SEQ ID NO: 229227 - DNA, 20 bp, synthetic construct
  source 1..20: mol_type = other DNA
gggaggccaaggcaggcaga

SEQ ID NO: 229228 - DNA, 20 bp, synthetic construct
  source 1..20: mol_type = other DNA
tgggaggccaaggcaggcag

SEQ ID NO: 229229 - DNA, 20 bp, synthetic construct
  source 1..20: mol_type = other DNA
ttgggaggccaaggcaggca

SEQ ID NO: 229230 - DNA, 20 bp, synthetic construct
  source 1..20: mol_type = other DNA
tttgggaggccaaggcaggc

SEQ ID NO: 229231 - DNA, 20 bp, synthetic construct
  source 1..20: mol_type = other DNA
ctttgggaggccaaggcagg

SEQ ID NO: 229232 - DNA, 20 bp, synthetic construct
  source 1..20: mol_type = other DNA
actttgggaggccaaggcag

SEQ ID NO: 229233 - DNA, 20 bp, synthetic construct
  source 1..20: mol_type = other DNA
cactttgggaggccaaggca

SEQ ID NO: 229234 - DNA, 20 bp, synthetic construct
  source 1..20: mol_type = other DNA
gcactttgggaggccaaggc

SEQ ID NO: 229235 - DNA, 20 bp, synthetic construct
  source 1..20: mol_type = other DNA
agcactttgggaggccaagg

SEQ ID NO: 229236 - DNA, 20 bp, synthetic construct
  source 1..20: mol_type = other DNA
cagcactttgggaggccaag

SEQ ID NO: 229237 - DNA, 20 bp, synthetic construct
  source 1..20: mol_type = other DNA
ccagcactttgggaggccaa

SEQ ID NO: 229238 - DNA, 20 bp, synthetic construct
  source 1..20: mol_type = other DNA
cccagcactttgggaggcca

SEQ ID NO: 229239 - DNA, 20 bp, synthetic construct
  source 1..20: mol_type = other DNA
tcccagcactttgggaggcc

SEQ ID NO: 229240 - DNA, 20 bp, synthetic construct
  source 1..20: mol_type = other DNA
atcccagcactttgggaggc

SEQ ID NO: 229241 - DNA, 20 bp, synthetic construct
  source 1..20: mol_type = other DNA
aatcccagcactttgggagg

SEQ ID NO: 229242 - DNA, 20 bp, synthetic construct
  source 1..20: mol_type = other DNA
taatcccagcactttgggag

SEQ ID NO: 229243 - DNA, 20 bp, synthetic construct
  source 1..20: mol_type = other DNA
gtaatcccagcactttggga

SEQ ID NO: 229244 - DNA, 20 bp, synthetic construct
  source 1..20: mol_type = other DNA
tgtaatcccagcactttggg

SEQ ID NO: 229245 - DNA, 20 bp, synthetic construct
  source 1..20: mol_type = other DNA
ctgtaatcccagcactttgg

SEQ ID NO: 229246 - DNA, 20 bp, synthetic construct
  source 1..20: mol_type = other DNA
cctgtaatcccagcactttg

SEQ ID NO: 229247 - DNA, 20 bp, synthetic construct
  source 1..20: mol_type = other DNA
acctgtaatcccagcacttt

SEQ ID NO: 229248 - DNA, 20 bp, synthetic construct
  source 1..20: mol_type = other DNA
cacctgtaatcccagcactt

SEQ ID NO: 229249 - DNA, 20 bp, synthetic construct
  source 1..20: mol_type = other DNA
acacctgtaatcccagcact

SEQ ID NO: 229250 - DNA, 20 bp, synthetic construct
  source 1..20: mol_type = other DNA
cacacctgtaatcccagcac

SEQ ID NO: 229251 - DNA, 20 bp, synthetic construct
  source 1..20: mol_type = other DNA
tcacacctgtaatcccagca

SEQ ID NO: 229252 - DNA, 20 bp, synthetic construct
  source 1..20: mol_type = other DNA
ctcacacctgtaatcccagc

SEQ ID NO: 229253 - DNA, 20 bp, synthetic construct
  source 1..20: mol_type = other DNA
gctcacacctgtaatcccag

SEQ ID NO: 229254 - DNA, 20 bp, synthetic construct
  source 1..20: mol_type = other DNA
ggctcacacctgtaatccca

SEQ ID NO: 229255 - DNA, 20 bp, synthetic construct
  source 1..20: mol_type = other DNA
tggctcacacctgtaatccc

SEQ ID NO: 229256 - DNA, 20 bp, synthetic construct
  source 1..20: mol_type = other DNA
atggctcacacctgtaatcc

SEQ ID NO: 229257 - DNA, 20 bp, synthetic construct
  source 1..20: mol_type = other DNA
catggctcacacctgtaatc

SEQ ID NO: 229258 - DNA, 20 bp, synthetic construct
  source 1..20: mol_type = other DNA
ccatggctcacacctgtaat

SEQ ID NO: 229259 - DNA, 20 bp, synthetic construct
  source 1..20: mol_type = other DNA
cccatggctcacacctgtaa

SEQ ID NO: 229260 - DNA, 20 bp, synthetic construct
  source 1..20: mol_type = other DNA
ccccatggctcacacctgta

SEQ ID NO: 229261 - DNA, 20 bp, synthetic construct
  source 1..20: mol_type = other DNA
gccccatggctcacacctgt

SEQ ID NO: 229262 - DNA, 20 bp, synthetic construct
  source 1..20: mol_type = other DNA
ggccccatggctcacacctg

SEQ ID NO: 229263 - DNA, 20 bp, synthetic construct
  source 1..20: mol_type = other DNA
aggccccatggctcacacct

SEQ ID NO: 229264 - DNA, 20 bp, synthetic construct
  source 1..20: mol_type = other DNA
taggccccatggctcacacc

SEQ ID NO: 229265 - DNA, 20 bp, synthetic construct
  source 1..20: mol_type = other DNA
ctaggccccatggctcacac

SEQ ID NO: 229266 - DNA, 20 bp, synthetic construct
  source 1..20: mol_type = other DNA
gctaggccccatggctcaca

SEQ ID NO: 229267 - DNA, 20 bp, synthetic construct
  source 1..20: mol_type = other DNA
ggctaggccccatggctcac

SEQ ID NO: 229268 - DNA, 20 bp, synthetic construct
  source 1..20: mol_type = other DNA
aggctaggccccatggctca

SEQ ID NO: 229269 - DNA, 20 bp, synthetic construct
  source 1..20: mol_type = other DNA
gaggctaggccccatggctc

SEQ ID NO: 229270 - DNA, 20 bp, synthetic construct
  source 1..20: mol_type = other DNA
ggaggctaggccccatggct

SEQ ID NO: 229271 - DNA, 20 bp, synthetic construct
  source 1..20: mol_type = other DNA
aggaggctaggccccatggc

SEQ ID NO: 229272 - DNA, 20 bp, synthetic construct
  source 1..20: mol_type = other DNA
aaggaggctaggccccatgg

SEQ ID NO: 229273 - DNA, 20 bp, synthetic construct
  source 1..20: mol_type = other DNA
gaaggaggctaggccccatg

SEQ ID NO: 229274 - DNA, 20 bp, synthetic construct
  source 1..20: mol_type = other DNA
ggaaggaggctaggccccat

SEQ ID NO: 229275 - DNA, 20 bp, synthetic construct
  source 1..20: mol_type = other DNA
tggaaggaggctaggcccca

SEQ ID NO: 229276 - DNA, 20 bp, synthetic construct
  source 1..20: mol_type = other DNA
atggaaggaggctaggcccc

SEQ ID NO: 229277 - DNA, 20 bp, synthetic construct
  source 1..20: mol_type = other DNA
aatggaaggaggctaggccc

SEQ ID NO: 229278 - DNA, 20 bp, synthetic construct
  source 1..20: mol_type = other DNA
aaatggaaggaggctaggcc

SEQ ID NO: 229279 - DNA, 20 bp, synthetic construct
  source 1..20: mol_type = other DNA
taaatggaaggaggctaggc

SEQ ID NO: 229280 - DNA, 20 bp, synthetic construct
  source 1..20: mol_type = other DNA
ttaaatggaaggaggctagg

SEQ ID NO: 229281 - DNA, 20 bp, synthetic construct
  source 1..20: mol_type = other DNA
tttaaatggaaggaggctag

SEQ ID NO: 229282 - DNA, 20 bp, synthetic construct
  source 1..20: mol_type = other DNA
atttaaatggaaggaggcta

SEQ ID NO: 229283 - DNA, 20 bp, synthetic construct
  source 1..20: mol_type = other DNA
catttaaatggaaggaggct

SEQ ID NO: 229284 - DNA, 20 bp, synthetic construct
  source 1..20: mol_type = other DNA
acatttaaatggaaggaggc

SEQ ID NO: 229285 - DNA, 20 bp, synthetic construct
  source 1..20: mol_type = other DNA
tacatttaaatggaaggagg

SEQ ID NO: 229286 - DNA, 20 bp, synthetic construct
  source 1..20: mol_type = other DNA
atacatttaaatggaaggag

SEQ ID NO: 229287 - DNA, 20 bp, synthetic construct
  source 1..20: mol_type = other DNA
catacatttaaatggaagga

SEQ ID NO: 229288 - DNA, 20 bp, synthetic construct
  source 1..20: mol_type = other DNA
gcatacatttaaatggaagg

SEQ ID NO: 229289 - DNA, 20 bp, synthetic construct
  source 1..20: mol_type = other DNA
ggcatacatttaaatggaag

SEQ ID NO: 229290 - DNA, 20 bp, synthetic construct
  source 1..20: mol_type = other DNA
aggcatacatttaaatggaa

SEQ ID NO: 229291 - DNA, 20 bp, synthetic construct
  source 1..20: mol_type = other DNA
taggcatacatttaaatgga

SEQ ID NO: 229292 - DNA, 20 bp, synthetic construct
  source 1..20: mol_type = other DNA
ttaggcatacatttaaatgg

SEQ ID NO: 229293 - DNA, 20 bp, synthetic construct
  source 1..20: mol_type = other DNA
attaggcatacatttaaatg

SEQ ID NO: 229294 - DNA, 20 bp, synthetic construct
  source 1..20: mol_type = other DNA
aattaggcatacatttaaat

SEQ ID NO: 229295 - DNA, 20 bp, synthetic construct
  source 1..20: mol_type = other DNA
aaattaggcatacatttaaa

SEQ ID NO: 229296 - DNA, 20 bp, synthetic construct
  source 1..20: mol_type = other DNA
caaattaggcatacatttaa

SEQ ID NO: 229297 - DNA, 20 bp, synthetic construct
  source 1..20: mol_type = other DNA
gcaaattaggcatacattta

SEQ ID NO: 229298 - DNA, 20 bp, synthetic construct
  source 1..20: mol_type = other DNA
ggcaaattaggcatacattt

SEQ ID NO: 229299 - DNA, 20 bp, synthetic construct
  source 1..20: mol_type = other DNA
gggcaaattaggcatacatt

SEQ ID NO: 229300 - DNA, 20 bp, synthetic construct
  source 1..20: mol_type = other DNA
tgggcaaattaggcatacat

SEQ ID NO: 229301 - DNA, 20 bp, synthetic construct
  source 1..20: mol_type = other DNA
atgggcaaattaggcataca

SEQ ID NO: 229302 - DNA, 20 bp, synthetic construct
  source 1..20: mol_type = other DNA
aatgggcaaattaggcatac

SEQ ID NO: 229303 - DNA, 20 bp, synthetic construct
  source 1..20: mol_type = other DNA
caatgggcaaattaggcata

SEQ ID NO: 229304 - DNA, 20 bp, synthetic construct
  source 1..20: mol_type = other DNA
tcaatgggcaaattaggcat

SEQ ID NO: 229305 - DNA, 20 bp, synthetic construct
  source 1..20: mol_type = other DNA
ctcaatgggcaaattaggca

SEQ ID NO: 229306 - DNA, 20 bp, synthetic construct
  source 1..20: mol_type = other DNA
tctcaatgggcaaattaggc

SEQ ID NO: 229307 - DNA, 20 bp, synthetic construct
  source 1..20: mol_type = other DNA
ttctcaatgggcaaattagg

SEQ ID NO: 229308 - DNA, 20 bp, synthetic construct
  source 1..20: mol_type = other DNA
gttctcaatgggcaaattag

SEQ ID NO: 229309 - DNA, 20 bp, synthetic construct
  source 1..20: mol_type = other DNA
cgttctcaatgggcaaatta

SEQ ID NO: 229310 - DNA, 20 bp, synthetic construct
  source 1..20: mol_type = other DNA
ccgttctcaatgggcaaatt

SEQ ID NO: 229311 - DNA, 20 bp, synthetic construct
  source 1..20: mol_type = other DNA
gccgttctcaatgggcaaat

SEQ ID NO: 229312 - DNA, 20 bp, synthetic construct
  source 1..20: mol_type = other DNA
agccgttctcaatgggcaaa

SEQ ID NO: 229313 - DNA, 20 bp, synthetic construct
  source 1..20: mol_type = other DNA
cagccgttctcaatgggcaa

SEQ ID NO: 229314 - DNA, 20 bp, synthetic construct
  source 1..20: mol_type = other DNA
tcagccgttctcaatgggca

SEQ ID NO: 229315 - DNA, 20 bp, synthetic construct
  source 1..20: mol_type = other DNA
ctcagccgttctcaatgggc

SEQ ID NO: 229316 - DNA, 20 bp, synthetic construct
  source 1..20: mol_type = other DNA
tctcagccgttctcaatggg

SEQ ID NO: 229317 - DNA, 20 bp, synthetic construct
  source 1..20: mol_type = other DNA
gtctcagccgttctcaatgg

SEQ ID NO: 229318 - DNA, 20 bp, synthetic construct
  source 1..20: mol_type = other DNA
cgtctcagccgttctcaatg

SEQ ID NO: 229319 - DNA, 20 bp, synthetic construct
  source 1..20: mol_type = other DNA
gcgtctcagccgttctcaat

SEQ ID NO: 229320 - DNA, 20 bp, synthetic construct
  source 1..20: mol_type = other DNA
tgcgtctcagccgttctcaa

SEQ ID NO: 229321 - DNA, 20 bp, synthetic construct
  source 1..20: mol_type = other DNA
atgcgtctcagccgttctca

SEQ ID NO: 229322 - DNA, 20 bp, synthetic construct
  source 1..20: mol_type = other DNA
aatgcgtctcagccgttctc

SEQ ID NO: 229323 - DNA, 20 bp, synthetic construct
  source 1..20: mol_type = other DNA
aaatgcgtctcagccgttct

SEQ ID NO: 229324 - DNA, 20 bp, synthetic construct
  source 1..20: mol_type = other DNA
aaaatgcgtctcagccgttc

SEQ ID NO: 229325 - DNA, 20 bp, synthetic construct
  source 1..20: mol_type = other DNA
taaaatgcgtctcagccgtt

SEQ ID NO: 229326 - DNA, 20 bp, synthetic construct
  source 1..20: mol_type = other DNA
ttaaaatgcgtctcagccgt

SEQ ID NO: 229327 - DNA, 20 bp, synthetic construct
  source 1..20: mol_type = other DNA
cttaaaatgcgtctcagccg

SEQ ID NO: 229328 - DNA, 20 bp, synthetic construct
  source 1..20: mol_type = other DNA
acttaaaatgcgtctcagcc

SEQ ID NO: 229329 - DNA, 20 bp, synthetic construct
  source 1..20: mol_type = other DNA
cacttaaaatgcgtctcagc

SEQ ID NO: 229330 - DNA, 20 bp, synthetic construct
  source 1..20: mol_type = other DNA
ccacttaaaatgcgtctcag

SEQ ID NO: 229331 - DNA, 20 bp, synthetic construct
  source 1..20: mol_type = other DNA
gccacttaaaatgcgtctca

SEQ ID NO: 229332 - DNA, 20 bp, synthetic construct
  source 1..20: mol_type = other DNA
ggccacttaaaatgcgtctc

SEQ ID NO: 229333 - DNA, 20 bp, synthetic construct
  source 1..20: mol_type = other DNA
tggccacttaaaatgcgtct

SEQ ID NO: 229334 - DNA, 20 bp, synthetic construct
  source 1..20: mol_type = other DNA
ctggccacttaaaatgcgtc

SEQ ID NO: 229335 - DNA, 20 bp, synthetic construct
  source 1..20: mol_type = other DNA
cctggccacttaaaatgcgt

SEQ ID NO: 229336 - DNA, 20 bp, synthetic construct
  source 1..20: mol_type = other DNA
ccctggccacttaaaatgcg

SEQ ID NO: 229337 - DNA, 20 bp, synthetic construct
  source 1..20: mol_type = other DNA
accctggccacttaaaatgc

SEQ ID NO: 229338 - DNA, 20 bp, synthetic construct
  source 1..20: mol_type = other DNA
gaccctggccacttaaaatg

SEQ ID NO: 229339 - DNA, 20 bp, synthetic construct
  source 1..20: mol_type = other DNA
agaccctggccacttaaaat

SEQ ID NO: 229340 - DNA, 20 bp, synthetic construct
  source 1..20: mol_type = other DNA
tagaccctggccacttaaaa

SEQ ID NO: 229341 - DNA, 20 bp, synthetic construct
  source 1..20: mol_type = other DNA
gtagaccctggccacttaaa

SEQ ID NO: 229342 - DNA, 20 bp, synthetic construct
  source 1..20: mol_type = other DNA
agtagaccctggccacttaa

SEQ ID NO: 229343 - DNA, 20 bp, synthetic construct
  source 1..20: mol_type = other DNA
aagtagaccctggccactta

SEQ ID NO: 229344 - DNA, 20 bp, synthetic construct
  source 1..20: mol_type = other DNA
taagtagaccctggccactt

SEQ ID NO: 229345 - DNA, 20 bp, synthetic construct
  source 1..20: mol_type = other DNA
ctaagtagaccctggccact

SEQ ID NO: 229346 - DNA, 20 bp, synthetic construct
  source 1..20: mol_type = other DNA
tctaagtagaccctggccac

SEQ ID NO: 229347 - DNA, 20 bp, synthetic construct
  source 1..20: mol_type = other DNA
ctctaagtagaccctggcca

SEQ ID NO: 229348 - DNA, 20 bp, synthetic construct
  source 1..20: mol_type = other DNA
actctaagtagaccctggcc

SEQ ID NO: 229349 - DNA, 20 bp, synthetic construct
  source 1..20: mol_type = other DNA
aactctaagtagaccctggc

SEQ ID NO: 229350 - DNA, 20 bp, synthetic construct
  source 1..20: mol_type = other DNA
taactctaagtagaccctgg

SEQ ID NO: 229351 - DNA, 20 bp, synthetic construct
  source 1..20: mol_type = other DNA
ctaactctaagtagaccctg

SEQ ID NO: 229352 - DNA, 20 bp, synthetic construct
  source 1..20: mol_type = other DNA
actaactctaagtagaccct

SEQ ID NO: 229353 - DNA, 20 bp, synthetic construct
  source 1..20: mol_type = other DNA
cactaactctaagtagaccc

SEQ ID NO: 229354 - DNA, 20 bp, synthetic construct
  source 1..20: mol_type = other DNA
gcactaactctaagtagacc

SEQ ID NO: 229355 - DNA, 20 bp, synthetic construct
  source 1..20: mol_type = other DNA
agcactaactctaagtagac

SEQ ID NO: 229356 - DNA, 20 bp, synthetic construct
  source 1..20: mol_type = other DNA
gagcactaactctaagtaga

SEQ ID NO: 229357 - DNA, 20 bp, synthetic construct
  source 1..20: mol_type = other DNA
tgagcactaactctaagtag

SEQ ID NO: 229358 - DNA, 20 bp, synthetic construct
  source 1..20: mol_type = other DNA
atgagcactaactctaagta

SEQ ID NO: 229359 - DNA, 20 bp, synthetic construct
  source 1..20: mol_type = other DNA
catgagcactaactctaagt

SEQ ID NO: 229360 - DNA, 20 bp, synthetic construct
  source 1..20: mol_type = other DNA
tcatgagcactaactctaag

SEQ ID NO: 229361 - DNA, 20 bp, synthetic construct
  source 1..20: mol_type = other DNA
gtcatgagcactaactctaa

SEQ ID NO: 229362 - DNA, 20 bp, synthetic construct
  source 1..20: mol_type = other DNA
ggtcatgagcactaactcta

SEQ ID NO: 229363 - DNA, 20 bp, synthetic construct
  source 1..20: mol_type = other DNA
tggtcatgagcactaactct

SEQ ID NO: 229364 - DNA, 20 bp, synthetic construct
  source 1..20: mol_type = other DNA
ctggtcatgagcactaactc

SEQ ID NO: 229365 - DNA, 20 bp, synthetic construct
  source 1..20: mol_type = other DNA
cctggtcatgagcactaact

SEQ ID NO: 229366 - DNA, 20 bp, synthetic construct
  source 1..20: mol_type = other DNA
gcctggtcatgagcactaac

SEQ ID NO: 229367 - DNA, 20 bp, synthetic construct
  source 1..20: mol_type = other DNA
ggcctggtcatgagcactaa

SEQ ID NO: 229368 - DNA, 20 bp, synthetic construct
  source 1..20: mol_type = other DNA
gggcctggtcatgagcacta

SEQ ID NO: 229369 - DNA, 20 bp, synthetic construct
  source 1..20: mol_type = other DNA
tgggcctggtcatgagcact

SEQ ID NO: 229370 - DNA, 20 bp, synthetic construct
  source 1..20: mol_type = other DNA
ctgggcctggtcatgagcac

SEQ ID NO: 229371 - DNA, 20 bp, synthetic construct
  source 1..20: mol_type = other DNA
cctgggcctggtcatgagca

SEQ ID NO: 229372 - DNA, 20 bp, synthetic construct
  source 1..20: mol_type = other DNA
acctgggcctggtcatgagc

SEQ ID NO: 229373 - DNA, 20 bp, synthetic construct
  source 1..20: mol_type = other DNA
gacctgggcctggtcatgag

SEQ ID NO: 229374 - DNA, 20 bp, synthetic construct
  source 1..20: mol_type = other DNA
tgacctgggcctggtcatga

SEQ ID NO: 229375 - DNA, 20 bp, synthetic construct
  source 1..20: mol_type = other DNA
ttgacctgggcctggtcatg

SEQ ID NO: 229376 - DNA, 20 bp, synthetic construct
  source 1..20: mol_type = other DNA
cttgacctgggcctggtcat

SEQ ID NO: 229377 - DNA, 20 bp, synthetic construct
  source 1..20: mol_type = other DNA
gcttgacctgggcctggtca

SEQ ID NO: 229378 - DNA, 20 bp, synthetic construct
  source 1..20: mol_type = other DNA
ggcttgacctgggcctggtc

SEQ ID NO: 229379 - DNA, 20 bp, synthetic construct
  source 1..20: mol_type = other DNA
aggcttgacctgggcctggt

SEQ ID NO: 229380 - DNA, 20 bp, synthetic construct
  source 1..20: mol_type = other DNA
caggcttgacctgggcctgg

SEQ ID NO: 229381 - DNA, 20 bp, synthetic construct
  source 1..20: mol_type = other DNA
ccaggcttgacctgggcctg

SEQ ID NO: 229382 - DNA, 20 bp, synthetic construct
  source 1..20: mol_type = other DNA
gccaggcttgacctgggcct

SEQ ID NO: 229383 - DNA, 20 bp, synthetic construct
  source 1..20: mol_type = other DNA
agccaggcttgacctgggcc

SEQ ID NO: 229384 - DNA, 20 bp, synthetic construct
  source 1..20: mol_type = other DNA
cagccaggcttgacctgggc

SEQ ID NO: 229385 - DNA, 20 bp, synthetic construct
  source 1..20: mol_type = other DNA
ccagccaggcttgacctggg

SEQ ID NO: 229386 - DNA, 20 bp, synthetic construct
  source 1..20: mol_type = other DNA
gccagccaggcttgacctgg

SEQ ID NO: 229387 - DNA, 20 bp, synthetic construct
  source 1..20: mol_type = other DNA
ggccagccaggcttgacctg

SEQ ID NO: 229388 - DNA, 20 bp, synthetic construct
  source 1..20: mol_type = other DNA
tggccagccaggcttgacct

SEQ ID NO: 229389 - DNA, 20 bp, synthetic construct
  source 1..20: mol_type = other DNA
ctggccagccaggcttgacc

SEQ ID NO: 229390 - DNA, 20 bp, synthetic construct
  source 1..20: mol_type = other DNA
tctggccagccaggcttgac

SEQ ID NO: 229391 - DNA, 20 bp, synthetic construct
  source 1..20: mol_type = other DNA
atctggccagccaggcttga

SEQ ID NO: 229392 - DNA, 20 bp, synthetic construct
  source 1..20: mol_type = other DNA
catctggccagccaggcttg

SEQ ID NO: 229393 - DNA, 20 bp, synthetic construct
  source 1..20: mol_type = other DNA
ccatctggccagccaggctt

SEQ ID NO: 229394 - DNA, 20 bp, synthetic construct
  source 1..20: mol_type = other DNA
accatctggccagccaggct

SEQ ID NO: 229395 - DNA, 20 bp, synthetic construct
  source 1..20: mol_type = other DNA
caccatctggccagccaggc

SEQ ID NO: 229396 - DNA, 20 bp, synthetic construct
  source 1..20: mol_type = other DNA
gcaccatctggccagccagg

SEQ ID NO: 229397 - DNA, 20 bp, synthetic construct
  source 1..20: mol_type = other DNA
ggcaccatctggccagccag

SEQ ID NO: 229398 - DNA, 20 bp, synthetic construct
  source 1..20: mol_type = other DNA
aggcaccatctggccagcca

SEQ ID NO: 229399 - DNA, 20 bp, synthetic construct
  source 1..20: mol_type = other DNA
aaggcaccatctggccagcc

SEQ ID NO: 229400 - DNA, 20 bp, synthetic construct
  source 1..20: mol_type = other DNA
aaaggcaccatctggccagc

SEQ ID NO: 229401 - DNA, 20 bp, synthetic construct
  source 1..20: mol_type = other DNA
caaaggcaccatctggccag

SEQ ID NO: 229402 - DNA, 20 bp, synthetic construct
  source 1..20: mol_type = other DNA
tcaaaggcaccatctggcca

SEQ ID NO: 229403 - DNA, 20 bp, synthetic construct
  source 1..20: mol_type = other DNA
gtcaaaggcaccatctggcc

SEQ ID NO: 229404 - DNA, 20 bp, synthetic construct
  source 1..20: mol_type = other DNA
ggtcaaaggcaccatctggc

SEQ ID NO: 229405 - DNA, 20 bp, synthetic construct
  source 1..20: mol_type = other DNA
aggtcaaaggcaccatctgg

SEQ ID NO: 229406 - DNA, 20 bp, synthetic construct
  source 1..20: mol_type = other DNA
caggtcaaaggcaccatctg

SEQ ID NO: 229407 - DNA, 20 bp, synthetic construct
  source 1..20: mol_type = other DNA
gcaggtcaaaggcaccatct

SEQ ID NO: 229408 - DNA, 20 bp, synthetic construct
  source 1..20: mol_type = other DNA
agcaggtcaaaggcaccatc

SEQ ID NO: 229409 - DNA, 20 bp, synthetic construct
  source 1..20: mol_type = other DNA
gagcaggtcaaaggcaccat

SEQ ID NO: 229410 - DNA, 20 bp, synthetic construct
  source 1..20: mol_type = other DNA
agagcaggtcaaaggcacca

SEQ ID NO: 229411 - DNA, 20 bp, synthetic construct
  source 1..20: mol_type = other DNA
cagagcaggtcaaaggcacc

SEQ ID NO: 229412 - DNA, 20 bp, synthetic construct
  source 1..20: mol_type = other DNA
acagagcaggtcaaaggcac

SEQ ID NO: 229413 - DNA, 20 bp, synthetic construct
  source 1..20: mol_type = other DNA
gacagagcaggtcaaaggca

SEQ ID NO: 229414 - DNA, 20 bp, synthetic construct
  source 1..20: mol_type = other DNA
agacagagcaggtcaaaggc

SEQ ID NO: 229415 - DNA, 20 bp, synthetic construct
  source 1..20: mol_type = other DNA
gagacagagcaggtcaaagg

SEQ ID NO: 229416 - DNA, 20 bp, synthetic construct
  source 1..20: mol_type = other DNA
agagacagagcaggtcaaag

SEQ ID NO: 229417 - DNA, 20 bp, synthetic construct
  source 1..20: mol_type = other DNA
cagagacagagcaggtcaaa

SEQ ID NO: 229418 - DNA, 20 bp, synthetic construct
  source 1..20: mol_type = other DNA
acagagacagagcaggtcaa

SEQ ID NO: 229419 - DNA, 20 bp, synthetic construct
  source 1..20: mol_type = other DNA
cacagagacagagcaggtca

SEQ ID NO: 229420 - DNA, 20 bp, synthetic construct
  source 1..20: mol_type = other DNA
gcacagagacagagcaggtc

SEQ ID NO: 229421 - DNA, 20 bp, synthetic construct
  source 1..20: mol_type = other DNA
tgcacagagacagagcaggt

SEQ ID NO: 229422 - DNA, 20 bp, synthetic construct
  source 1..20: mol_type = other DNA
ttgcacagagacagagcagg

SEQ ID NO: 229423 - DNA, 20 bp, synthetic construct
  source 1..20: mol_type = other DNA
tttgcacagagacagagcag

SEQ ID NO: 229424 - DNA, 20 bp, synthetic construct
  source 1..20: mol_type = other DNA
ctttgcacagagacagagca

SEQ ID NO: 229425 - DNA, 20 bp, synthetic construct
  source 1..20: mol_type = other DNA
cctttgcacagagacagagc

SEQ ID NO: 229426 - DNA, 20 bp, synthetic construct
  source 1..20: mol_type = other DNA
tcctttgcacagagacagag

SEQ ID NO: 229427 - DNA, 20 bp, synthetic construct
  source 1..20: mol_type = other DNA
ttcctttgcacagagacaga

SEQ ID NO: 229428 - DNA, 20 bp, synthetic construct
  source 1..20: mol_type = other DNA
attcctttgcacagagacag

SEQ ID NO: 229429 - DNA, 20 bp, synthetic construct
  source 1..20: mol_type = other DNA
cattcctttgcacagagaca

SEQ ID NO: 229430 - DNA, 20 bp, synthetic construct
  source 1..20: mol_type = other DNA
tcattcctttgcacagagac

SEQ ID NO: 229431 - DNA, 20 bp, synthetic construct
  source 1..20: mol_type = other DNA
ctcattcctttgcacagaga

SEQ ID NO: 229432 - DNA, 20 bp, synthetic construct
  source 1..20: mol_type = other DNA
gctcattcctttgcacagag

SEQ ID NO: 229433 - DNA, 20 bp, synthetic construct
  source 1..20: mol_type = other DNA
agctcattcctttgcacaga

SEQ ID NO: 229434 - DNA, 20 bp, synthetic construct
  source 1..20: mol_type = other DNA
cagctcattcctttgcacag

SEQ ID NO: 229435 - DNA, 20 bp, synthetic construct
  source 1..20: mol_type = other DNA
tcagctcattcctttgcaca

SEQ ID NO: 229436 - DNA, 20 bp, synthetic construct
  source 1..20: mol_type = other DNA
ttcagctcattcctttgcac

SEQ ID NO: 229437 - DNA, 20 bp, synthetic construct
  source 1..20: mol_type = other DNA
cttcagctcattcctttgca

SEQ ID NO: 229438 - DNA, 20 bp, synthetic construct
  source 1..20: mol_type = other DNA
ccttcagctcattcctttgc

SEQ ID NO: 229439 - DNA, 20 bp, synthetic construct
  source 1..20: mol_type = other DNA
tccttcagctcattcctttg

SEQ ID NO: 229440 - DNA, 20 bp, synthetic construct
  source 1..20: mol_type = other DNA
atccttcagctcattccttt

SEQ ID NO: 229441 - DNA, 20 bp, synthetic construct
  source 1..20: mol_type = other DNA
catccttcagctcattcctt

SEQ ID NO: 229442 - DNA, 20 bp, synthetic construct
  source 1..20: mol_type = other DNA
ccatccttcagctcattcct

SEQ ID NO: 229443 - DNA, 20 bp, synthetic construct
  source 1..20: mol_type = other DNA
cccatccttcagctcattcc

SEQ ID NO: 229444 - DNA, 20 bp, synthetic construct
  source 1..20: mol_type = other DNA
ccccatccttcagctcattc

SEQ ID NO: 229445 - DNA, 20 bp, synthetic construct
  source 1..20: mol_type = other DNA
cccccatccttcagctcatt

SEQ ID NO: 229446 - DNA, 20 bp, synthetic construct
  source 1..20: mol_type = other DNA
acccccatccttcagctcat

SEQ ID NO: 229447 - DNA, 20 bp, synthetic construct
  source 1..20: mol_type = other DNA
cacccccatccttcagctca

SEQ ID NO: 229448 - DNA, 20 bp, synthetic construct
  source 1..20: mol_type = other DNA
gcacccccatccttcagctc

SEQ ID NO: 229449 - DNA, 20 bp, synthetic construct
  source 1..20: mol_type = other DNA
tgcacccccatccttcagct

SEQ ID NO: 229450 - DNA, 20 bp, synthetic construct
  source 1..20: mol_type = other DNA
ctgcacccccatccttcagc

SEQ ID NO: 229451 - DNA, 20 bp, synthetic construct
  source 1..20: mol_type = other DNA
actgcacccccatccttcag

SEQ ID NO: 229452 - DNA, 20 bp, synthetic construct
  source 1..20: mol_type = other DNA
cactgcacccccatccttca

SEQ ID NO: 229453 - DNA, 20 bp, synthetic construct
  source 1..20: mol_type = other DNA
acactgcacccccatccttc

SEQ ID NO: 229454 - DNA, 20 bp, synthetic construct
  source 1..20: mol_type = other DNA
cacactgcacccccatcctt

SEQ ID NO: 229455 - DNA, 20 bp, synthetic construct
  source 1..20: mol_type = other DNA
acacactgcacccccatcct

SEQ ID NO: 229456 - DNA, 20 bp, synthetic construct
  source 1..20: mol_type = other DNA
cacacactgcacccccatcc

SEQ ID NO: 229457 - DNA, 20 bp, synthetic construct
  source 1..20: mol_type = other DNA
ccacacactgcacccccatc

SEQ ID NO: 229458 - DNA, 20 bp, synthetic construct
  source 1..20: mol_type = other DNA
cccacacactgcacccccat

SEQ ID NO: 229459 - DNA, 20 bp, synthetic construct
  source 1..20: mol_type = other DNA
gcccacacactgcaccccca

SEQ ID NO: 229460 - DNA, 20 bp, synthetic construct
  source 1..20: mol_type = other DNA
tgcccacacactgcaccccc

SEQ ID NO: 229461 - DNA, 20 bp, synthetic construct
  source 1..20: mol_type = other DNA
ctgcccacacactgcacccc

SEQ ID NO: 229462 - DNA, 20 bp, synthetic construct
  source 1..20: mol_type = other DNA
actgcccacacactgcaccc

SEQ ID NO: 229463 - DNA, 20 bp, synthetic construct
  source 1..20: mol_type = other DNA
cactgcccacacactgcacc

SEQ ID NO: 229464 - DNA, 20 bp, synthetic construct
  source 1..20: mol_type = other DNA
ccactgcccacacactgcac

SEQ ID NO: 229465 - DNA, 20 bp, synthetic construct
  source 1..20: mol_type = other DNA
cccactgcccacacactgca

SEQ ID NO: 229466 - DNA, 20 bp, synthetic construct
  source 1..20: mol_type = other DNA
gcccactgcccacacactgc

SEQ ID NO: 229467 - DNA, 20 bp, synthetic construct
  source 1..20: mol_type = other DNA
agcccactgcccacacactg

SEQ ID NO: 229468 - DNA, 20 bp, synthetic construct
  source 1..20: mol_type = other DNA
cagcccactgcccacacact

SEQ ID NO: 229469 - DNA, 20 bp, synthetic construct
  source 1..20: mol_type = other DNA
ccagcccactgcccacacac

SEQ ID NO: 229470 - DNA, 20 bp, synthetic construct
  source 1..20: mol_type = other DNA
cccagcccactgcccacaca

SEQ ID NO: 229471 - DNA, 20 bp, synthetic construct
  source 1..20: mol_type = other DNA
ccccagcccactgcccacac

SEQ ID NO: 229472 - DNA, 20 bp, synthetic construct
  source 1..20: mol_type = other DNA
gccccagcccactgcccaca

SEQ ID NO: 229473 - DNA, 20 bp, synthetic construct
  source 1..20: mol_type = other DNA
agccccagcccactgcccac

SEQ ID NO: 229474 - DNA, 20 bp, synthetic construct
  source 1..20: mol_type = other DNA
cagccccagcccactgccca

SEQ ID NO: 229475 - DNA, 20 bp, synthetic construct
  source 1..20: mol_type = other DNA
ccagccccagcccactgccc

SEQ ID NO: 229476 - DNA, 20 bp, synthetic construct
  source 1..20: mol_type = other DNA
gccagccccagcccactgcc

SEQ ID NO: 229477 - DNA, 20 bp, synthetic construct
  source 1..20: mol_type = other DNA
tgccagccccagcccactgc

SEQ ID NO: 229478 - DNA, 20 bp, synthetic construct
  source 1..20: mol_type = other DNA
ctgccagccccagcccactg

SEQ ID NO: 229479 - DNA, 20 bp, synthetic construct
  source 1..20: mol_type = other DNA
cctgccagccccagcccact

SEQ ID NO: 229480 - DNA, 20 bp, synthetic construct
  source 1..20: mol_type = other DNA
tcctgccagccccagcccac

SEQ ID NO: 229481 - DNA, 20 bp, synthetic construct
  source 1..20: mol_type = other DNA
gtcctgccagccccagccca

SEQ ID NO: 229482 - DNA, 20 bp, synthetic construct
  source 1..20: mol_type = other DNA
agtcctgccagccccagccc

SEQ ID NO: 229483 - DNA, 20 bp, synthetic construct
  source 1..20: mol_type = other DNA
gagtcctgccagccccagcc

SEQ ID NO: 229484 - DNA, 20 bp, synthetic construct
  source 1..20: mol_type = other DNA
tgagtcctgccagccccagc

SEQ ID NO: 229485 - DNA, 20 bp, synthetic construct
  source 1..20: mol_type = other DNA
ctgagtcctgccagccccag

SEQ ID NO: 229486 - DNA, 20 bp, synthetic construct
  source 1..20: mol_type = other DNA
actgagtcctgccagcccca

SEQ ID NO: 229487 - DNA, 20 bp, synthetic construct
  source 1..20: mol_type = other DNA
cactgagtcctgccagcccc

SEQ ID NO: 229488 - DNA, 20 bp, synthetic construct
  source 1..20: mol_type = other DNA
tcactgagtcctgccagccc

SEQ ID NO: 229489 - DNA, 20 bp, synthetic construct
  source 1..20: mol_type = other DNA
gtcactgagtcctgccagcc

SEQ ID NO: 229490 - DNA, 20 bp, synthetic construct
  source 1..20: mol_type = other DNA
agtcactgagtcctgccagc

SEQ ID NO: 229491 - DNA, 20 bp, synthetic construct
  source 1..20: mol_type = other DNA
tagtcactgagtcctgccag

SEQ ID NO: 229492 - DNA, 20 bp, synthetic construct
  source 1..20: mol_type = other DNA
ttagtcactgagtcctgcca

SEQ ID NO: 229493 - DNA, 20 bp, synthetic construct
  source 1..20: mol_type = other DNA
cttagtcactgagtcctgcc

SEQ ID NO: 229494 - DNA, 20 bp, synthetic construct
  source 1..20: mol_type = other DNA
ccttagtcactgagtcctgc

SEQ ID NO: 229495 - DNA, 20 bp, synthetic construct
  source 1..20: mol_type = other DNA
cccttagtcactgagtcctg

SEQ ID NO: 229496 - DNA, 20 bp, synthetic construct
  source 1..20: mol_type = other DNA
tcccttagtcactgagtcct

SEQ ID NO: 229497 - DNA, 20 bp, synthetic construct
  source 1..20: mol_type = other DNA
ttcccttagtcactgagtcc

SEQ ID NO: 229498 - DNA, 20 bp, synthetic construct
  source 1..20: mol_type = other DNA
cttcccttagtcactgagtc

SEQ ID NO: 229499 - DNA, 20 bp, synthetic construct
  source 1..20: mol_type = other DNA
tcttcccttagtcactgagt

SEQ ID NO: 229500 - DNA, 20 bp, synthetic construct
  source 1..20: mol_type = other DNA
ctcttcccttagtcactgag

SEQ ID NO: 229501 - DNA, 20 bp, synthetic construct
  source 1..20: mol_type = other DNA
tctcttcccttagtcactga

SEQ ID NO: 229502 - DNA, 20 bp, synthetic construct
  source 1..20: mol_type = other DNA
ttctcttcccttagtcactg

SEQ ID NO: 229503 - DNA, 20 bp, synthetic construct
  source 1..20: mol_type = other DNA
gttctcttcccttagtcact

SEQ ID NO: 229504 - DNA, 20 bp, synthetic construct
  source 1..20: mol_type = other DNA
agttctcttcccttagtcac

SEQ ID NO: 229505 - DNA, 20 bp, synthetic construct
  source 1..20: mol_type = other DNA
aagttctcttcccttagtca

SEQ ID NO: 229506 - DNA, 20 bp, synthetic construct
  source 1..20: mol_type = other DNA
aaagttctcttcccttagtc

SEQ ID NO: 229507 - DNA, 20 bp, synthetic construct
  source 1..20: mol_type = other DNA
gaaagttctcttcccttagt

SEQ ID NO: 229508 - DNA, 20 bp, synthetic construct
  source 1..20: mol_type = other DNA
ggaaagttctcttcccttag

SEQ ID NO: 229509 - DNA, 20 bp, synthetic construct
  source 1..20: mol_type = other DNA
aggaaagttctcttccctta

SEQ ID NO: 229510 - DNA, 20 bp, synthetic construct
  source 1..20: mol_type = other DNA
gaggaaagttctcttccctt

SEQ ID NO: 229511 - DNA, 20 bp, synthetic construct
  source 1..20: mol_type = other DNA
tgaggaaagttctcttccct

SEQ ID NO: 229512 - DNA, 20 bp, synthetic construct
  source 1..20: mol_type = other DNA
gtgaggaaagttctcttccc

SEQ ID NO: 229513 - DNA, 20 bp, synthetic construct
  source 1..20: mol_type = other DNA
agtgaggaaagttctcttcc

SEQ ID NO: 229514 - DNA, 20 bp, synthetic construct
  source 1..20: mol_type = other DNA
tagtgaggaaagttctcttc

SEQ ID NO: 229515 - DNA, 20 bp, synthetic construct
  source 1..20: mol_type = other DNA
gtagtgaggaaagttctctt

SEQ ID NO: 229516 - DNA, 20 bp, synthetic construct
  source 1..20: mol_type = other DNA
ggtagtgaggaaagttctct

SEQ ID NO: 229517 - DNA, 20 bp, synthetic construct
  source 1..20: mol_type = other DNA
tggtagtgaggaaagttctc

SEQ ID NO: 229518 - DNA, 20 bp, synthetic construct
  source 1..20: mol_type = other DNA
ctggtagtgaggaaagttct

SEQ ID NO: 229519 - DNA, 20 bp, synthetic construct
  source 1..20: mol_type = other DNA
gctggtagtgaggaaagttc

SEQ ID NO: 229520 - DNA, 20 bp, synthetic construct
  source 1..20: mol_type = other DNA
ggctggtagtgaggaaagtt

SEQ ID NO: 229521 - DNA, 20 bp, synthetic construct
  source 1..20: mol_type = other DNA
aggctggtagtgaggaaagt

SEQ ID NO: 229522 - DNA, 20 bp, synthetic construct
  source 1..20: mol_type = other DNA
caggctggtagtgaggaaag

SEQ ID NO: 229523 - DNA, 20 bp, synthetic construct
  source 1..20: mol_type = other DNA
acaggctggtagtgaggaaa

SEQ ID NO: 229524 - DNA, 20 bp, synthetic construct
  source 1..20: mol_type = other DNA
gacaggctggtagtgaggaa

SEQ ID NO: 229525 - DNA, 20 bp, synthetic construct
  source 1..20: mol_type = other DNA
agacaggctggtagtgagga

SEQ ID NO: 229526 - DNA, 20 bp, synthetic construct
  source 1..20: mol_type = other DNA
aagacaggctggtagtgagg

SEQ ID NO: 229527 - DNA, 20 bp, synthetic construct
  source 1..20: mol_type = other DNA
aaagacaggctggtagtgag

SEQ ID NO: 229528 - DNA, 20 bp, synthetic construct
  source 1..20: mol_type = other DNA
aaaagacaggctggtagtga

SEQ ID NO: 229529 - DNA, 20 bp, synthetic construct
  source 1..20: mol_type = other DNA
gaaaagacaggctggtagtg

SEQ ID NO: 229530 - DNA, 20 bp, synthetic construct
  source 1..20: mol_type = other DNA
tgaaaagacaggctggtagt

SEQ ID NO: 229531 - DNA, 20 bp, synthetic construct
  source 1..20: mol_type = other DNA
ctgaaaagacaggctggtag

SEQ ID NO: 229532 - DNA, 20 bp, synthetic construct
  source 1..20: mol_type = other DNA
cctgaaaagacaggctggta

SEQ ID NO: 229533 - DNA, 20 bp, synthetic construct
  source 1..20: mol_type = other DNA
ccctgaaaagacaggctggt

SEQ ID NO: 229534 - DNA, 20 bp, synthetic construct
  source 1..20: mol_type = other DNA
gccctgaaaagacaggctgg

SEQ ID NO: 229535 - DNA, 20 bp, synthetic construct
  source 1..20: mol_type = other DNA
tgccctgaaaagacaggctg

SEQ ID NO: 229536 - DNA, 20 bp, synthetic construct
  source 1..20: mol_type = other DNA
gtgccctgaaaagacaggct

SEQ ID NO: 229537 - DNA, 20 bp, synthetic construct
  source 1..20: mol_type = other DNA
ggtgccctgaaaagacaggc

SEQ ID NO: 229538 - DNA, 20 bp, synthetic construct
  source 1..20: mol_type = other DNA
cggtgccctgaaaagacagg

SEQ ID NO: 229539 - DNA, 20 bp, synthetic construct
  source 1..20: mol_type = other DNA
gcggtgccctgaaaagacag

SEQ ID NO: 229540 - DNA, 20 bp, synthetic construct
  source 1..20: mol_type = other DNA
cgcggtgccctgaaaagaca

SEQ ID NO: 229541 - DNA, 20 bp, synthetic construct
  source 1..20: mol_type = other DNA
ccgcggtgccctgaaaagac

SEQ ID NO: 229542 - DNA, 20 bp, synthetic construct
  source 1..20: mol_type = other DNA
cccgcggtgccctgaaaaga

SEQ ID NO: 229543 - DNA, 20 bp, synthetic construct
  source 1..20: mol_type = other DNA
ccccgcggtgccctgaaaag

SEQ ID NO: 229544 - DNA, 20 bp, synthetic construct
  source 1..20: mol_type = other DNA
cccccgcggtgccctgaaaa

SEQ ID NO: 229545 - DNA, 20 bp, synthetic construct
  source 1..20: mol_type = other DNA
ccccccgcggtgccctgaaa

SEQ ID NO: 229546 - DNA, 20 bp, synthetic construct
  source 1..20: mol_type = other DNA
gccccccgcggtgccctgaa

SEQ ID NO: 229547 - DNA, 20 bp, synthetic construct
  source 1..20: mol_type = other DNA
agccccccgcggtgccctga

SEQ ID NO: 229548 - DNA, 20 bp, synthetic construct
  source 1..20: mol_type = other DNA
aagccccccgcggtgccctg

SEQ ID NO: 229549 - DNA, 20 bp, synthetic construct
  source 1..20: mol_type = other DNA
aaagccccccgcggtgccct

SEQ ID NO: 229550 - DNA, 20 bp, synthetic construct
  source 1..20: mol_type = other DNA
caaagccccccgcggtgccc

SEQ ID NO: 229551 - DNA, 20 bp, synthetic construct
  source 1..20: mol_type = other DNA
ccaaagccccccgcggtgcc

SEQ ID NO: 229552 - DNA, 20 bp, synthetic construct
  source 1..20: mol_type = other DNA
cccaaagccccccgcggtgc

SEQ ID NO: 229553 - DNA, 20 bp, synthetic construct
  source 1..20: mol_type = other DNA
tcccaaagccccccgcggtg

SEQ ID NO: 229554 - DNA, 20 bp, synthetic construct
  source 1..20: mol_type = other DNA
gtcccaaagccccccgcggt

SEQ ID NO: 229555 - DNA, 20 bp, synthetic construct
  source 1..20: mol_type = other DNA
agtcccaaagccccccgcgg

SEQ ID NO: 229556 - DNA, 20 bp, synthetic construct
  source 1..20: mol_type = other DNA
aagtcccaaagccccccgcg

SEQ ID NO: 229557 - DNA, 20 bp, synthetic construct
  source 1..20: mol_type = other DNA
caagtcccaaagccccccgc

SEQ ID NO: 229558 - DNA, 20 bp, synthetic construct
  source 1..20: mol_type = other DNA
ccaagtcccaaagccccccg

SEQ ID NO: 229559 - DNA, 20 bp, synthetic construct
  source 1..20: mol_type = other DNA
accaagtcccaaagcccccc

SEQ ID NO: 229560 - DNA, 20 bp, synthetic construct
  source 1..20: mol_type = other DNA
caccaagtcccaaagccccc

SEQ ID NO: 229561 - DNA, 20 bp, synthetic construct
  source 1..20: mol_type = other DNA
tcaccaagtcccaaagcccc

SEQ ID NO: 229562 - DNA, 20 bp, synthetic construct
  source 1..20: mol_type = other DNA
atcaccaagtcccaaagccc

SEQ ID NO: 229563 - DNA, 20 bp, synthetic construct
  source 1..20: mol_type = other DNA
catcaccaagtcccaaagcc

SEQ ID NO: 229564 - DNA, 20 bp, synthetic construct
  source 1..20: mol_type = other DNA
tcatcaccaagtcccaaagc

SEQ ID NO: 229565 - DNA, 20 bp, synthetic construct
  source 1..20: mol_type = other DNA
ttcatcaccaagtcccaaag

SEQ ID NO: 229566 - DNA, 20 bp, synthetic construct
  source 1..20: mol_type = other DNA
gttcatcaccaagtcccaaa

SEQ ID NO: 229567 - DNA, 20 bp, synthetic construct
  source 1..20: mol_type = other DNA
tgttcatcaccaagtcccaa

SEQ ID NO: 229568 - DNA, 20 bp, synthetic construct
  source 1..20: mol_type = other DNA
gtgttcatcaccaagtccca

SEQ ID NO: 229569 - DNA, 20 bp, synthetic construct
  source 1..20: mol_type = other DNA
tgtgttcatcaccaagtccc

SEQ ID NO: 229570 - DNA, 20 bp, synthetic construct
  source 1..20: mol_type = other DNA
ctgtgttcatcaccaagtcc

SEQ ID NO: 229571 - DNA, 20 bp, synthetic construct
  source 1..20: mol_type = other DNA
gctgtgttcatcaccaagtc

SEQ ID NO: 229572 - DNA, 20 bp, synthetic construct
  source 1..20: mol_type = other DNA
tgctgtgttcatcaccaagt

SEQ ID NO: 229573 - DNA, 20 bp, synthetic construct
  source 1..20: mol_type = other DNA
gtgctgtgttcatcaccaag

SEQ ID NO: 229574 - DNA, 20 bp, synthetic construct
  source 1..20: mol_type = other DNA
tgtgctgtgttcatcaccaa

SEQ ID NO: 229575 - DNA, 20 bp, synthetic construct
  source 1..20: mol_type = other DNA
ctgtgctgtgttcatcacca

SEQ ID NO: 229576 - DNA, 20 bp, synthetic construct
  source 1..20: mol_type = other DNA
tctgtgctgtgttcatcacc

SEQ ID NO: 229577 - DNA, 20 bp, synthetic construct
  source 1..20: mol_type = other DNA
ctctgtgctgtgttcatcac

SEQ ID NO: 229578 - DNA, 20 bp, synthetic construct
  source 1..20: mol_type = other DNA
tctctgtgctgtgttcatca

SEQ ID NO: 229579 - DNA, 20 bp, synthetic construct
  source 1..20: mol_type = other DNA
ctctctgtgctgtgttcatc

SEQ ID NO: 229580 - DNA, 20 bp, synthetic construct
  source 1..20: mol_type = other DNA
gctctctgtgctgtgttcat

SEQ ID NO: 229581 - DNA, 20 bp, synthetic construct
  source 1..20: mol_type = other DNA
agctctctgtgctgtgttca

SEQ ID NO: 229582 - DNA, 20 bp, synthetic construct
  source 1..20: mol_type = other DNA
cagctctctgtgctgtgttc

SEQ ID NO: 229583 - DNA, 20 bp, synthetic construct
  source 1..20: mol_type = other DNA
acagctctctgtgctgtgtt

SEQ ID NO: 229584 - DNA, 20 bp, synthetic construct
  source 1..20: mol_type = other DNA
gacagctctctgtgctgtgt

SEQ ID NO: 229585 - DNA, 20 bp, synthetic construct
  source 1..20: mol_type = other DNA
ggacagctctctgtgctgtg

SEQ ID NO: 229586 - DNA, 20 bp, synthetic construct
  source 1..20: mol_type = other DNA
tggacagctctctgtgctgt

SEQ ID NO: 229587 - DNA, 20 bp, synthetic construct
  source 1..20: mol_type = other DNA
ctggacagctctctgtgctg

SEQ ID NO: 229588 - DNA, 20 bp, synthetic construct
  source 1..20: mol_type = other DNA
gctggacagctctctgtgct

SEQ ID NO: 229589 - DNA, 20 bp, synthetic construct
  source 1..20: mol_type = other DNA
tgctggacagctctctgtgc

SEQ ID NO: 229590 - DNA, 20 bp, synthetic construct
  source 1..20: mol_type = other DNA
atgctggacagctctctgtg

SEQ ID NO: 229591 - DNA, 20 bp, synthetic construct
  source 1..20: mol_type = other DNA
catgctggacagctctctgt

SEQ ID NO: 229592 - DNA, 20 bp, synthetic construct
  source 1..20: mol_type = other DNA
gcatgctggacagctctctg

SEQ ID NO: 229593 - DNA, 20 bp, synthetic construct
  source 1..20: mol_type = other DNA
cgcatgctggacagctctct

SEQ ID NO: 229594 - DNA, 20 bp, synthetic construct
  source 1..20: mol_type = other DNA
ccgcatgctggacagctctc

SEQ ID NO: 229595 - DNA, 20 bp, synthetic construct
  source 1..20: mol_type = other DNA
cccgcatgctggacagctct

SEQ ID NO: 229596 - DNA, 20 bp, synthetic construct
  source 1..20: mol_type = other DNA
acccgcatgctggacagctc

SEQ ID NO: 229597 - DNA, 20 bp, synthetic construct
  source 1..20: mol_type = other DNA
gacccgcatgctggacagct

SEQ ID NO: 229598 - DNA, 20 bp, synthetic construct
  source 1..20: mol_type = other DNA
ggacccgcatgctggacagc

SEQ ID NO: 229599 - DNA, 20 bp, synthetic construct
  source 1..20: mol_type = other DNA
gggacccgcatgctggacag

SEQ ID NO: 229600 - DNA, 20 bp, synthetic construct
  source 1..20: mol_type = other DNA
agggacccgcatgctggaca

SEQ ID NO: 229601 - DNA, 20 bp, synthetic construct
  source 1..20: mol_type = other DNA
cagggacccgcatgctggac

SEQ ID NO: 229602 - DNA, 20 bp, synthetic construct
  source 1..20: mol_type = other DNA
ccagggacccgcatgctgga

SEQ ID NO: 229603 - DNA, 20 bp, synthetic construct
  source 1..20: mol_type = other DNA
gccagggacccgcatgctgg

SEQ ID NO: 229604 - DNA, 20 bp, synthetic construct
  source 1..20: mol_type = other DNA
agccagggacccgcatgctg

SEQ ID NO: 229605 - DNA, 20 bp, synthetic construct
  source 1..20: mol_type = other DNA
aagccagggacccgcatgct

SEQ ID NO: 229606 - DNA, 20 bp, synthetic construct
  source 1..20: mol_type = other DNA
gaagccagggacccgcatgc

SEQ ID NO: 229607 - DNA, 20 bp, synthetic construct
  source 1..20: mol_type = other DNA
agaagccagggacccgcatg

SEQ ID NO: 229608 - DNA, 20 bp, synthetic construct
  source 1..20: mol_type = other DNA
gagaagccagggacccgcat

SEQ ID NO: 229609 - DNA, 20 bp, synthetic construct
  source 1..20: mol_type = other DNA
tgagaagccagggacccgca

SEQ ID NO: 229610 - DNA, 20 bp, synthetic construct
  source 1..20: mol_type = other DNA
gtgagaagccagggacccgc

SEQ ID NO: 229611 - DNA, 20 bp, synthetic construct
  source 1..20: mol_type = other DNA
tgtgagaagccagggacccg

SEQ ID NO: 229612 - DNA, 20 bp, synthetic construct
  source 1..20: mol_type = other DNA
gtgtgagaagccagggaccc

SEQ ID NO: 229613 - DNA, 20 bp, synthetic construct
  source 1..20: mol_type = other DNA
agtgtgagaagccagggacc

SEQ ID NO: 229614 - DNA, 20 bp, synthetic construct
  source 1..20: mol_type = other DNA
aagtgtgagaagccagggac

SEQ ID NO: 229615 - DNA, 20 bp, synthetic construct
  source 1..20: mol_type = other DNA
gaagtgtgagaagccaggga

SEQ ID NO: 229616 - DNA, 20 bp, synthetic construct
  source 1..20: mol_type = other DNA
ggaagtgtgagaagccaggg

SEQ ID NO: 229617 - DNA, 20 bp, synthetic construct
  source 1..20: mol_type = other DNA
gggaagtgtgagaagccagg

SEQ ID NO: 229618 - DNA, 20 bp, synthetic construct
  source 1..20: mol_type = other DNA
tgggaagtgtgagaagccag

SEQ ID NO: 229619 - DNA, 20 bp, synthetic construct
  source 1..20: mol_type = other DNA
ctgggaagtgtgagaagcca

SEQ ID NO: 229620 - DNA, 20 bp, synthetic construct
  source 1..20: mol_type = other DNA
cctgggaagtgtgagaagcc

SEQ ID NO: 229621 - DNA, 20 bp, synthetic construct
  source 1..20: mol_type = other DNA
gcctgggaagtgtgagaagc

SEQ ID NO: 229622 - DNA, 20 bp, synthetic construct
  source 1..20: mol_type = other DNA
agcctgggaagtgtgagaag

SEQ ID NO: 229623 - DNA, 20 bp, synthetic construct
  source 1..20: mol_type = other DNA
gagcctgggaagtgtgagaa

SEQ ID NO: 229624 - DNA, 20 bp, synthetic construct
  source 1..20: mol_type = other DNA
ggagcctgggaagtgtgaga

SEQ ID NO: 229625 - DNA, 20 bp, synthetic construct
  source 1..20: mol_type = other DNA
aggagcctgggaagtgtgag

SEQ ID NO: 229626 - DNA, 20 bp, synthetic construct
  source 1..20: mol_type = other DNA
aaggagcctgggaagtgtga

SEQ ID NO: 229627 - DNA, 20 bp, synthetic construct
  source 1..20: mol_type = other DNA
gaaggagcctgggaagtgtg

SEQ ID NO: 229628 - DNA, 20 bp, synthetic construct
  source 1..20: mol_type = other DNA
tgaaggagcctgggaagtgt

SEQ ID NO: 229629 - DNA, 20 bp, synthetic construct
  source 1..20: mol_type = other DNA
ctgaaggagcctgggaagtg

SEQ ID NO: 229630 - DNA, 20 bp, synthetic construct
  source 1..20: mol_type = other DNA
tctgaaggagcctgggaagt

SEQ ID NO: 229631 - DNA, 20 bp, synthetic construct
  source 1..20: mol_type = other DNA
ctctgaaggagcctgggaag

SEQ ID NO: 229632 - DNA, 20 bp, synthetic construct
  source 1..20: mol_type = other DNA
cctctgaaggagcctgggaa

SEQ ID NO: 229633 - DNA, 20 bp, synthetic construct
  source 1..20: mol_type = other DNA
gcctctgaaggagcctggga

SEQ ID NO: 229634 - DNA, 20 bp, synthetic construct
  source 1..20: mol_type = other DNA
agcctctgaaggagcctggg

SEQ ID NO: 229635 - DNA, 20 bp, synthetic construct
  source 1..20: mol_type = other DNA
gagcctctgaaggagcctgg

SEQ ID NO: 229636 - DNA, 20 bp, synthetic construct
  source 1..20: mol_type = other DNA
agagcctctgaaggagcctg

SEQ ID NO: 229637 - DNA, 20 bp, synthetic construct
  source 1..20: mol_type = other DNA
gagagcctctgaaggagcct

SEQ ID NO: 229638 - DNA, 20 bp, synthetic construct
  source 1..20: mol_type = other DNA
agagagcctctgaaggagcc

SEQ ID NO: 229639 - DNA, 20 bp, synthetic construct
  source 1..20: mol_type = other DNA
gagagagcctctgaaggagc

SEQ ID NO: 229640 - DNA, 20 bp, synthetic construct
  source 1..20: mol_type = other DNA
ggagagagcctctgaaggag

SEQ ID NO: 229641 - DNA, 20 bp, synthetic construct
  source 1..20: mol_type = other DNA
tggagagagcctctgaagga

SEQ ID NO: 229642 - DNA, 20 bp, synthetic construct
  source 1..20: mol_type = other DNA
ttggagagagcctctgaagg

SEQ ID NO: 229643 - DNA, 20 bp, synthetic construct
  source 1..20: mol_type = other DNA
tttggagagagcctctgaag

SEQ ID NO: 229644 - DNA, 20 bp, synthetic construct
  source 1..20: mol_type = other DNA
ctttggagagagcctctgaa

SEQ ID NO: 229645 - DNA, 20 bp, synthetic construct
  source 1..20: mol_type = other DNA
cctttggagagagcctctga

SEQ ID NO: 229646 - DNA, 20 bp, synthetic construct
  source 1..20: mol_type = other DNA
ccctttggagagagcctctg

SEQ ID NO: 229647 - DNA, 20 bp, synthetic construct
  source 1..20: mol_type = other DNA
tccctttggagagagcctct

SEQ ID NO: 229648 - DNA, 20 bp, synthetic construct
  source 1..20: mol_type = other DNA
ctccctttggagagagcctc

SEQ ID NO: 229649 - DNA, 20 bp, synthetic construct
  source 1..20: mol_type = other DNA
gctccctttggagagagcct

SEQ ID NO: 229650 - DNA, 20 bp, synthetic construct
  source 1..20: mol_type = other DNA
agctccctttggagagagcc

SEQ ID NO: 229651 - DNA, 20 bp, synthetic construct
  source 1..20: mol_type = other DNA
cagctccctttggagagagc

SEQ ID NO: 229652 - DNA, 20 bp, synthetic construct
  source 1..20: mol_type = other DNA
gcagctccctttggagagag

SEQ ID NO: 229653 - DNA, 20 bp, synthetic construct
  source 1..20: mol_type = other DNA
agcagctccctttggagaga

SEQ ID NO: 229654 - DNA, 20 bp, synthetic construct
  source 1..20: mol_type = other DNA
gagcagctccctttggagag

SEQ ID NO: 229655 - DNA, 20 bp, synthetic construct
  source 1..20: mol_type = other DNA
agagcagctccctttggaga

SEQ ID NO: 229656 - DNA, 20 bp, synthetic construct
  source 1..20: mol_type = other DNA
gagagcagctccctttggag

SEQ ID NO: 229657 - DNA, 20 bp, synthetic construct
  source 1..20: mol_type = other DNA
agagagcagctccctttgga

SEQ ID NO: 229658 - DNA, 20 bp, synthetic construct
  source 1..20: mol_type = other DNA
gagagagcagctccctttgg

SEQ ID NO: 229659 - DNA, 20 bp, synthetic construct
  source 1..20: mol_type = other DNA
agagagagcagctccctttg

SEQ ID NO: 229660 - DNA, 20 bp, synthetic construct
  source 1..20: mol_type = other DNA
tagagagagcagctcccttt

SEQ ID NO: 229661 - DNA, 20 bp, synthetic construct
  source 1..20: mol_type = other DNA
ctagagagagcagctccctt

SEQ ID NO: 229662 - DNA, 20 bp, synthetic construct
  source 1..20: mol_type = other DNA
tctagagagagcagctccct

SEQ ID NO: 229663 - DNA, 20 bp, synthetic construct
  source 1..20: mol_type = other DNA
ttctagagagagcagctccc

SEQ ID NO: 229664 - DNA, 20 bp, synthetic construct
  source 1..20: mol_type = other DNA
gttctagagagagcagctcc

SEQ ID NO: 229665 - DNA, 20 bp, synthetic construct
  source 1..20: mol_type = other DNA
ggttctagagagagcagctc

SEQ ID NO: 229666 - DNA, 20 bp, synthetic construct
  source 1..20: mol_type = other DNA
gggttctagagagagcagct

SEQ ID NO: 229667 - DNA, 20 bp, synthetic construct
  source 1..20: mol_type = other DNA
tgggttctagagagagcagc

SEQ ID NO: 229668 - DNA, 20 bp, synthetic construct
  source 1..20: mol_type = other DNA
atgggttctagagagagcag

SEQ ID NO: 229669 - DNA, 20 bp, synthetic construct
  source 1..20: mol_type = other DNA
catgggttctagagagagca

SEQ ID NO: 229670 - DNA, 20 bp, synthetic construct
  source 1..20: mol_type = other DNA
tcatgggttctagagagagc

SEQ ID NO: 229671 - DNA, 20 bp, synthetic construct
  source 1..20: mol_type = other DNA
ttcatgggttctagagagag

SEQ ID NO: 229672 - DNA, 20 bp, synthetic construct
  source 1..20: mol_type = other DNA
attcatgggttctagagaga

SEQ ID NO: 229673 - DNA, 20 bp, synthetic construct
  source 1..20: mol_type = other DNA
aattcatgggttctagagag

SEQ ID NO: 229674 - DNA, 20 bp, synthetic construct
  source 1..20: mol_type = other DNA
aaattcatgggttctagaga

SEQ ID NO: 229675 - DNA, 20 bp, synthetic construct
  source 1..20: mol_type = other DNA
caaattcatgggttctagag

SEQ ID NO: 229676 - DNA, 20 bp, synthetic construct
  source 1..20: mol_type = other DNA
ccaaattcatgggttctaga

SEQ ID NO: 229677 - DNA, 20 bp, synthetic construct
  source 1..20: mol_type = other DNA
tccaaattcatgggttctag

SEQ ID NO: 229678 - DNA, 20 bp, synthetic construct
  source 1..20: mol_type = other DNA
ttccaaattcatgggttcta

SEQ ID NO: 229679 - DNA, 20 bp, synthetic construct
  source 1..20: mol_type = other DNA
attccaaattcatgggttct

SEQ ID NO: 229680 - DNA, 20 bp, synthetic construct
  source 1..20: mol_type = other DNA
tattccaaattcatgggttc

SEQ ID NO: 229681 - DNA, 20 bp, synthetic construct
  source 1..20: mol_type = other DNA
atattccaaattcatgggtt

SEQ ID NO: 229682 - DNA, 20 bp, synthetic construct
  source 1..20: mol_type = other DNA
tatattccaaattcatgggt

SEQ ID NO: 229683 - DNA, 20 bp, synthetic construct
  source 1..20: mol_type = other DNA
ctatattccaaattcatggg

SEQ ID NO: 229684 - DNA, 20 bp, synthetic construct
  source 1..20: mol_type = other DNA
cctatattccaaattcatgg

SEQ ID NO: 229685 - DNA, 20 bp, synthetic construct
  source 1..20: mol_type = other DNA
gcctatattccaaattcatg

SEQ ID NO: 229686 - DNA, 20 bp, synthetic construct
  source 1..20: mol_type = other DNA
tgcctatattccaaattcat

SEQ ID NO: 229687 - DNA, 20 bp, synthetic construct
  source 1..20: mol_type = other DNA
ttgcctatattccaaattca

SEQ ID NO: 229688 - DNA, 20 bp, synthetic construct
  source 1..20: mol_type = other DNA
gttgcctatattccaaattc

SEQ ID NO: 229689 - DNA, 20 bp, synthetic construct
  source 1..20: mol_type = other DNA
ggttgcctatattccaaatt

SEQ ID NO: 229690 - DNA, 20 bp, synthetic construct
  source 1..20: mol_type = other DNA
tggttgcctatattccaaat

SEQ ID NO: 229691 - DNA, 20 bp, synthetic construct
  source 1..20: mol_type = other DNA
gtggttgcctatattccaaa

SEQ ID NO: 229692 - DNA, 20 bp, synthetic construct
  source 1..20: mol_type = other DNA
agtggttgcctatattccaa

SEQ ID NO: 229693 - DNA, 20 bp, synthetic construct
  source 1..20: mol_type = other DNA
cagtggttgcctatattcca

SEQ ID NO: 229694 - DNA, 20 bp, synthetic construct
  source 1..20: mol_type = other DNA
gcagtggttgcctatattcc

SEQ ID NO: 229695 - DNA, 20 bp, synthetic construct
  source 1..20: mol_type = other DNA
tgcagtggttgcctatattc

SEQ ID NO: 229696 - DNA, 20 bp, synthetic construct
  source 1..20: mol_type = other DNA
atgcagtggttgcctatatt

SEQ ID NO: 229697 - DNA, 20 bp, synthetic construct
  source 1..20: mol_type = other DNA
aatgcagtggttgcctatat

SEQ ID NO: 229698 - DNA, 20 bp, synthetic construct
  source 1..20: mol_type = other DNA
caatgcagtggttgcctata

SEQ ID NO: 229699 - DNA, 20 bp, synthetic construct
  source 1..20: mol_type = other DNA
ccaatgcagtggttgcctat

SEQ ID NO: 229700 - DNA, 20 bp, synthetic construct
  source 1..20: mol_type = other DNA
cccaatgcagtggttgccta

SEQ ID NO: 229701 - DNA, 20 bp, synthetic construct
  source 1..20: mol_type = other DNA
ccccaatgcagtggttgcct

SEQ ID NO: 229702 - DNA, 20 bp, synthetic construct
  source 1..20: mol_type = other DNA
tccccaatgcagtggttgcc

SEQ ID NO: 229703 - DNA, 20 bp, synthetic construct
  source 1..20: mol_type = other DNA
gtccccaatgcagtggttgc

SEQ ID NO: 229704 - DNA, 20 bp, synthetic construct
  source 1..20: mol_type = other DNA
ggtccccaatgcagtggttg

SEQ ID NO: 229705 - DNA, 20 bp, synthetic construct
  source 1..20: mol_type = other DNA
tggtccccaatgcagtggtt

SEQ ID NO: 229706 - DNA, 20 bp, synthetic construct
  source 1..20: mol_type = other DNA
gtggtccccaatgcagtggt

SEQ ID NO: 229707 - DNA, 20 bp, synthetic construct
  source 1..20: mol_type = other DNA
agtggtccccaatgcagtgg

SEQ ID NO: 229708 - DNA, 20 bp, synthetic construct
  source 1..20: mol_type = other DNA
cagtggtccccaatgcagtg

SEQ ID NO: 229709 - DNA, 20 bp, synthetic construct
  source 1..20: mol_type = other DNA
tcagtggtccccaatgcagt

SEQ ID NO: 229710 - DNA, 20 bp, synthetic construct
  source 1..20: mol_type = other DNA
gtcagtggtccccaatgcag

SEQ ID NO: 229711 - DNA, 20 bp, synthetic construct
  source 1..20: mol_type = other DNA
ggtcagtggtccccaatgca

SEQ ID NO: 229712 - DNA, 20 bp, synthetic construct
  source 1..20: mol_type = other DNA
aggtcagtggtccccaatgc

SEQ ID NO: 229713 - DNA, 20 bp, synthetic construct
  source 1..20: mol_type = other DNA
gaggtcagtggtccccaatg

SEQ ID NO: 229714 - DNA, 20 bp, synthetic construct
  source 1..20: mol_type = other DNA
tgaggtcagtggtccccaat

SEQ ID NO: 229715 - DNA, 20 bp, synthetic construct
  source 1..20: mol_type = other DNA
ttgaggtcagtggtccccaa

SEQ ID NO: 229716 - DNA, 20 bp, synthetic construct
  source 1..20: mol_type = other DNA
tttgaggtcagtggtcccca

SEQ ID NO: 229717 - DNA, 20 bp, synthetic construct
  source 1..20: mol_type = other DNA
gtttgaggtcagtggtcccc

SEQ ID NO: 229718 - DNA, 20 bp, synthetic construct
  source 1..20: mol_type = other DNA
tgtttgaggtcagtggtccc

SEQ ID NO: 229719 - DNA, 20 bp, synthetic construct
  source 1..20: mol_type = other DNA
atgtttgaggtcagtggtcc

SEQ ID NO: 229720 - DNA, 20 bp, synthetic construct
  source 1..20: mol_type = other DNA
tatgtttgaggtcagtggtc

SEQ ID NO: 229721 - DNA, 20 bp, synthetic construct
  source 1..20: mol_type = other DNA
ctatgtttgaggtcagtggt

SEQ ID NO: 229722 - DNA, 20 bp, synthetic construct
  source 1..20: mol_type = other DNA
tctatgtttgaggtcagtgg

SEQ ID NO: 229723 - DNA, 20 bp, synthetic construct
  source 1..20: mol_type = other DNA
ctctatgtttgaggtcagtg

SEQ ID NO: 229724 - DNA, 20 bp, synthetic construct
  source 1..20: mol_type = other DNA
tctctatgtttgaggtcagt

SEQ ID NO: 229725 - DNA, 20 bp, synthetic construct
  source 1..20: mol_type = other DNA
gtctctatgtttgaggtcag

SEQ ID NO: 229726 - DNA, 20 bp, synthetic construct
  source 1..20: mol_type = other DNA
ggtctctatgtttgaggtca

SEQ ID NO: 229727 - DNA, 20 bp, synthetic construct
  source 1..20: mol_type = other DNA
tggtctctatgtttgaggtc

SEQ ID NO: 229728 - DNA, 20 bp, synthetic construct
  source 1..20: mol_type = other DNA
ctggtctctatgtttgaggt

SEQ ID NO: 229729 - DNA, 20 bp, synthetic construct
  source 1..20: mol_type = other DNA
tctggtctctatgtttgagg

SEQ ID NO: 229730 - DNA, 20 bp, synthetic construct
  source 1..20: mol_type = other DNA
ctctggtctctatgtttgag

SEQ ID NO: 229731 - DNA, 20 bp, synthetic construct
  source 1..20: mol_type = other DNA
gctctggtctctatgtttga

SEQ ID NO: 229732 - DNA, 20 bp, synthetic construct
  source 1..20: mol_type = other DNA
tgctctggtctctatgtttg

SEQ ID NO: 229733 - DNA, 20 bp, synthetic construct
  source 1..20: mol_type = other DNA
ttgctctggtctctatgttt

SEQ ID NO: 229734 - DNA, 20 bp, synthetic construct
  source 1..20: mol_type = other DNA
tttgctctggtctctatgtt

SEQ ID NO: 229735 - DNA, 20 bp, synthetic construct
  source 1..20: mol_type = other DNA
atttgctctggtctctatgt

SEQ ID NO: 229736 - DNA, 20 bp, synthetic construct
  source 1..20: mol_type = other DNA
catttgctctggtctctatg

SEQ ID NO: 229737 - DNA, 20 bp, synthetic construct
  source 1..20: mol_type = other DNA
ccatttgctctggtctctat

SEQ ID NO: 229738 - DNA, 20 bp, synthetic construct
  source 1..20: mol_type = other DNA
cccatttgctctggtctcta

SEQ ID NO: 229739 - DNA, 20 bp, synthetic construct
  source 1..20: mol_type = other DNA
ccccatttgctctggtctct

SEQ ID NO: 229740 - DNA, 20 bp, synthetic construct
  source 1..20: mol_type = other DNA
gccccatttgctctggtctc

SEQ ID NO: 229741 - DNA, 20 bp, synthetic construct
  source 1..20: mol_type = other DNA
agccccatttgctctggtct

SEQ ID NO: 229742 - DNA, 20 bp, synthetic construct
  source 1..20: mol_type = other DNA
gagccccatttgctctggtc

SEQ ID NO: 229743 - DNA, 20 bp, synthetic construct
  source 1..20: mol_type = other DNA
tgagccccatttgctctggt

SEQ ID NO: 229744 - DNA, 20 bp, synthetic construct
  source 1..20: mol_type = other DNA
atgagccccatttgctctgg

SEQ ID NO: 229745 - DNA, 20 bp, synthetic construct
  source 1..20: mol_type = other DNA
gatgagccccatttgctctg

SEQ ID NO: 229746 - DNA, 20 bp, synthetic construct
  source 1..20: mol_type = other DNA
tgatgagccccatttgctct

SEQ ID NO: 229747 - DNA, 20 bp, synthetic construct
  source 1..20: mol_type = other DNA
gtgatgagccccatttgctc

SEQ ID NO: 229748 - DNA, 20 bp, synthetic construct
  source 1..20: mol_type = other DNA
cgtgatgagccccatttgct

SEQ ID NO: 229749 - DNA, 20 bp, synthetic construct
  source 1..20: mol_type = other DNA
acgtgatgagccccatttgc

SEQ ID NO: 229750 - DNA, 20 bp, synthetic construct
  source 1..20: mol_type = other DNA
cacgtgatgagccccatttg

SEQ ID NO: 229751 - DNA, 20 bp, synthetic construct
  source 1..20: mol_type = other DNA
tcacgtgatgagccccattt

SEQ ID NO: 229752 - DNA, 20 bp, synthetic construct
  source 1..20: mol_type = other DNA
ttcacgtgatgagccccatt

SEQ ID NO: 229753 - DNA, 20 bp, synthetic construct
  source 1..20: mol_type = other DNA
tttcacgtgatgagccccat

SEQ ID NO: 229754 - DNA, 20 bp, synthetic construct
  source 1..20: mol_type = other DNA
gtttcacgtgatgagcccca

SEQ ID NO: 229755 - DNA, 20 bp, synthetic construct
  source 1..20: mol_type = other DNA
agtttcacgtgatgagcccc

SEQ ID NO: 229756 - DNA, 20 bp, synthetic construct
  source 1..20: mol_type = other DNA
gagtttcacgtgatgagccc

SEQ ID NO: 229757 - DNA, 20 bp, synthetic construct
  source 1..20: mol_type = other DNA
tgagtttcacgtgatgagcc

SEQ ID NO: 229758 - DNA, 20 bp, synthetic construct
  source 1..20: mol_type = other DNA
atgagtttcacgtgatgagc

SEQ ID NO: 229759 - DNA, 20 bp, synthetic construct
  source 1..20: mol_type = other DNA
gatgagtttcacgtgatgag

SEQ ID NO: 229760 - DNA, 20 bp, synthetic construct
  source 1..20: mol_type = other DNA
agatgagtttcacgtgatga

SEQ ID NO: 229761 - DNA, 20 bp, synthetic construct
  source 1..20: mol_type = other DNA
cagatgagtttcacgtgatg

SEQ ID NO: 229762 - DNA, 20 bp, synthetic construct
  source 1..20: mol_type = other DNA
ccagatgagtttcacgtgat

SEQ ID NO: 229763 - DNA, 20 bp, synthetic construct
  source 1..20: mol_type = other DNA
tccagatgagtttcacgtga

SEQ ID NO: 229764 - DNA, 20 bp, synthetic construct
  source 1..20: mol_type = other DNA
ttccagatgagtttcacgtg

SEQ ID NO: 229765 - DNA, 20 bp, synthetic construct
  source 1..20: mol_type = other DNA
gttccagatgagtttcacgt

SEQ ID NO: 229766 - DNA, 20 bp, synthetic construct
  source 1..20: mol_type = other DNA
agttccagatgagtttcacg

SEQ ID NO: 229767 - DNA, 20 bp, synthetic construct
  source 1..20: mol_type = other DNA
gagttccagatgagtttcac

SEQ ID NO: 229768 - DNA, 20 bp, synthetic construct
  source 1..20: mol_type = other DNA
agagttccagatgagtttca

SEQ ID NO: 229769 - DNA, 20 bp, synthetic construct
  source 1..20: mol_type = other DNA
tagagttccagatgagtttc

SEQ ID NO: 229770 - DNA, 20 bp, synthetic construct
  source 1..20: mol_type = other DNA
ctagagttccagatgagttt

SEQ ID NO: 229771 - DNA, 20 bp, synthetic construct
  source 1..20: mol_type = other DNA
gctagagttccagatgagtt

SEQ ID NO: 229772 - DNA, 20 bp, synthetic construct
  source 1..20: mol_type = other DNA
tgctagagttccagatgagt

SEQ ID NO: 229773 - DNA, 20 bp, synthetic construct
  source 1..20: mol_type = other DNA
ctgctagagttccagatgag

SEQ ID NO: 229774 - DNA, 20 bp, synthetic construct
  source 1..20: mol_type = other DNA
cctgctagagttccagatga

SEQ ID NO: 229775 - DNA, 20 bp, synthetic construct
  source 1..20: mol_type = other DNA
acctgctagagttccagatg

SEQ ID NO: 229776 - DNA, 20 bp, synthetic construct
  source 1..20: mol_type = other DNA
aacctgctagagttccagat

SEQ ID NO: 229777 - DNA, 20 bp, synthetic construct
  source 1..20: mol_type = other DNA
gaacctgctagagttccaga

SEQ ID NO: 229778 - DNA, 20 bp, synthetic construct
  source 1..20: mol_type = other DNA
agaacctgctagagttccag

SEQ ID NO: 229779 - DNA, 20 bp, synthetic construct
  source 1..20: mol_type = other DNA
aagaacctgctagagttcca

SEQ ID NO: 229780 - DNA, 20 bp, synthetic construct
  source 1..20: mol_type = other DNA
aaagaacctgctagagttcc

SEQ ID NO: 229781 - DNA, 20 bp, synthetic construct
  source 1..20: mol_type = other DNA
aaaagaacctgctagagttc

SEQ ID NO: 229782 - DNA, 20 bp, synthetic construct
  source 1..20: mol_type = other DNA
taaaagaacctgctagagtt

SEQ ID NO: 229783 - DNA, 20 bp, synthetic construct
  source 1..20: mol_type = other DNA
ataaaagaacctgctagagt

SEQ ID NO: 229784 - DNA, 20 bp, synthetic construct
  source 1..20: mol_type = other DNA
tataaaagaacctgctagag

SEQ ID NO: 229785 - DNA, 20 bp, synthetic construct
  source 1..20: mol_type = other DNA
atataaaagaacctgctaga

SEQ ID NO: 229786 - DNA, 20 bp, synthetic construct
  source 1..20: mol_type = other DNA
tatataaaagaacctgctag

SEQ ID NO: 229787 - DNA, 20 bp, synthetic construct
  source 1..20: mol_type = other DNA
atatataaaagaacctgcta

SEQ ID NO: 229788 - DNA, 20 bp, synthetic construct
  source 1..20: mol_type = other DNA
tatatataaaagaacctgct

SEQ ID NO: 229789 - DNA, 20 bp, synthetic construct
  source 1..20: mol_type = other DNA
atatatataaaagaacctgc

SEQ ID NO: 229790 - DNA, 20 bp, synthetic construct
  source 1..20: mol_type = other DNA
tatatatataaaagaacctg

SEQ ID NO: 229791 - DNA, 20 bp, synthetic construct
  source 1..20: mol_type = other DNA
atatatatataaaagaacct

SEQ ID NO: 229792 - DNA, 20 bp, synthetic construct
  source 1..20: mol_type = other DNA
tatatatatataaaagaacc

SEQ ID NO: 229793 - DNA, 20 bp, synthetic construct
  source 1..20: mol_type = other DNA
atatatatatataaaagaac

SEQ ID NO: 229794 - DNA, 20 bp, synthetic construct
  source 1..20: mol_type = other DNA
tatatatatatataaaagaa

SEQ ID NO: 229795 - DNA, 20 bp, synthetic construct
  source 1..20: mol_type = other DNA
atatatatatatataaaaga

SEQ ID NO: 229796 - DNA, 20 bp, synthetic construct
  source 1..20: mol_type = other DNA
tatatatatatatataaaag

SEQ ID NO: 229797 - DNA, 20 bp, synthetic construct
  source 1..20: mol_type = other DNA
atatatatatatatataaaa

SEQ ID NO: 229798 - DNA, 20 bp, synthetic construct
  source 1..20: mol_type = other DNA
tatatatatatatatataaa

SEQ ID NO: 229799 - DNA, 20 bp, synthetic construct
  source 1..20: mol_type = other DNA
atatatatatatatatataa

SEQ ID NO: 229800 - DNA, 20 bp, synthetic construct
  source 1..20: mol_type = other DNA
tatatatatatatatatata

SEQ ID NO: 229801 - DNA, 20 bp, synthetic construct
  source 1..20: mol_type = other DNA
atatatatatatatatatat

SEQ ID NO: 229802 - DNA, 20 bp, synthetic construct
  source 1..20: mol_type = other DNA
tatatatatatatatatata

SEQ ID NO: 229803 - DNA, 20 bp, synthetic construct
  source 1..20: mol_type = other DNA
atatatatatatatatatat

SEQ ID NO: 229804 - DNA, 20 bp, synthetic construct
  source 1..20: mol_type = other DNA
tatatatatatatatatata

SEQ ID NO: 229805 - DNA, 20 bp, synthetic construct
  source 1..20: mol_type = other DNA
atatatatatatatatatat

SEQ ID NO: 229806 - DNA, 20 bp, synthetic construct
  source 1..20: mol_type = other DNA
tatatatatatatatatata

SEQ ID NO: 229807 - DNA, 20 bp, synthetic construct
  source 1..20: mol_type = other DNA
atatatatatatatatatat

SEQ ID NO: 229808 - DNA, 20 bp, synthetic construct
  source 1..20: mol_type = other DNA
tatatatatatatatatata

SEQ ID NO: 229809 - DNA, 20 bp, synthetic construct
  source 1..20: mol_type = other DNA
atatatatatatatatatat

SEQ ID NO: 229810 - DNA, 20 bp, synthetic construct
  source 1..20: mol_type = other DNA
tatatatatatatatatata

SEQ ID NO: 229811 - DNA, 20 bp, synthetic construct
  source 1..20: mol_type = other DNA
atatatatatatatatatat

SEQ ID NO: 229812 - DNA, 20 bp, synthetic construct
  source 1..20: mol_type = other DNA
tatatatatatatatatata

SEQ ID NO: 229813 - DNA, 20 bp, synthetic construct
  source 1..20: mol_type = other DNA
atatatatatatatatatat

SEQ ID NO: 229814 - DNA, 20 bp, synthetic construct
  source 1..20: mol_type = other DNA
tatatatatatatatatata

SEQ ID NO: 229815 - DNA, 20 bp, synthetic construct
  source 1..20: mol_type = other DNA
atatatatatatatatatat

SEQ ID NO: 229816 - DNA, 20 bp, synthetic construct
  source 1..20: mol_type = other DNA
tatatatatatatatatata

SEQ ID NO: 229817 - DNA, 20 bp, synthetic construct
  source 1..20: mol_type = other DNA
atatatatatatatatatat

SEQ ID NO: 229818 - DNA, 20 bp, synthetic construct
  source 1..20: mol_type = other DNA
tatatatatatatatatata

SEQ ID NO: 229819 - DNA, 20 bp, synthetic construct
  source 1..20: mol_type = other DNA
atatatatatatatatatat

SEQ ID NO: 229820 - DNA, 20 bp, synthetic construct
  source 1..20: mol_type = other DNA
tatatatatatatatatata

SEQ ID NO: 229821 - DNA, 20 bp, synthetic construct
  source 1..20: mol_type = other DNA
atatatatatatatatatat

SEQ ID NO: 229822 - DNA, 20 bp, synthetic construct
  source 1..20: mol_type = other DNA
tatatatatatatatatata

SEQ ID NO: 229823 - DNA, 20 bp, synthetic construct
  source 1..20: mol_type = other DNA
atatatatatatatatatat

SEQ ID NO: 229824 - DNA, 20 bp, synthetic construct
  source 1..20: mol_type = other DNA
tatatatatatatatatata

SEQ ID NO: 229825 - DNA, 20 bp, synthetic construct
  source 1..20: mol_type = other DNA
atatatatatatatatatat

SEQ ID NO: 229826 - DNA, 20 bp, synthetic construct
  source 1..20: mol_type = other DNA
tatatatatatatatatata

SEQ ID NO: 229827 - DNA, 20 bp, synthetic construct
  source 1..20: mol_type = other DNA
atatatatatatatatatat

SEQ ID NO: 229828 - DNA, 20 bp, synthetic construct
  source 1..20: mol_type = other DNA
tatatatatatatatatata

SEQ ID NO: 229829 - DNA, 20 bp, synthetic construct
  source 1..20: mol_type = other DNA
atatatatatatatatatat

SEQ ID NO: 229830 - DNA, 20 bp, synthetic construct
  source 1..20: mol_type = other DNA
tatatatatatatatatata

SEQ ID NO: 229831 - DNA, 20 bp, synthetic construct
  source 1..20: mol_type = other DNA
atatatatatatatatatat

SEQ ID NO: 229832 - DNA, 20 bp, synthetic construct
  source 1..20: mol_type = other DNA
tatatatatatatatatata

SEQ ID NO: 229833 - DNA, 20 bp, synthetic construct
  source 1..20: mol_type = other DNA
atatatatatatatatatat

SEQ ID NO: 229834 - DNA, 20 bp, synthetic construct
  source 1..20: mol_type = other DNA
aatatatatatatatatata

SEQ ID NO: 229835 - DNA, 20 bp, synthetic construct
  source 1..20: mol_type = other DNA
aaatatatatatatatatat

SEQ ID NO: 229836 - DNA, 20 bp, synthetic construct
  source 1..20: mol_type = other DNA
aaaatatatatatatatata

SEQ ID NO: 229837 - DNA, 20 bp, synthetic construct
  source 1..20: mol_type = other DNA
aaaaatatatatatatatat

SEQ ID NO: 229838 - DNA, 20 bp, synthetic construct
  source 1..20: mol_type = other DNA
aaaaaatatatatatatata

SEQ ID NO: 229839 - DNA, 20 bp, synthetic construct
  source 1..20: mol_type = other DNA
taaaaaatatatatatatat

SEQ ID NO: 229840 - DNA, 20 bp, synthetic construct
  source 1..20: mol_type = other DNA
ataaaaaatatatatatata

SEQ ID NO: 229841 - DNA, 20 bp, synthetic construct
  source 1..20: mol_type = other DNA
aataaaaaatatatatatat

SEQ ID NO: 229842 - DNA, 20 bp, synthetic construct
  source 1..20: mol_type = other DNA
taataaaaaatatatatata

SEQ ID NO: 229843 - DNA, 20 bp, synthetic construct
  source 1..20: mol_type = other DNA
ataataaaaaatatatatat

SEQ ID NO: 229844 - DNA, 20 bp, synthetic construct
  source 1..20: mol_type = other DNA
aataataaaaaatatatata

SEQ ID NO: 229845 - DNA, 20 bp, synthetic construct
  source 1..20: mol_type = other DNA
taataataaaaaatatatat

SEQ ID NO: 229846 - DNA, 20 bp, synthetic construct
  source 1..20: mol_type = other DNA
ataataataaaaaatatata

SEQ ID NO: 229847 - DNA, 20 bp, synthetic construct
  source 1..20: mol_type = other DNA
tataataataaaaaatatat

SEQ ID NO: 229848 - DNA, 20 bp, synthetic construct
  source 1..20: mol_type = other DNA
gtataataataaaaaatata

SEQ ID NO: 229849 - DNA, 20 bp, synthetic construct
  source 1..20: mol_type = other DNA
agtataataataaaaaatat

SEQ ID NO: 229850 - DNA, 20 bp, synthetic construct
  source 1..20: mol_type = other DNA
aagtataataataaaaaata

SEQ ID NO: 229851 - DNA, 20 bp, synthetic construct
  source 1..20: mol_type = other DNA
aaagtataataataaaaaat

SEQ ID NO: 229852 - DNA, 20 bp, synthetic construct
  source 1..20: mol_type = other DNA
taaagtataataataaaaaa

SEQ ID NO: 229853 - DNA, 20 bp, synthetic construct
  source 1..20: mol_type = other DNA
ttaaagtataataataaaaa

SEQ ID NO: 229854 - DNA, 20 bp, synthetic construct
  source 1..20: mol_type = other DNA
cttaaagtataataataaaa

SEQ ID NO: 229855 - DNA, 20 bp, synthetic construct
  source 1..20: mol_type = other DNA
acttaaagtataataataaa

SEQ ID NO: 229856 - DNA, 20 bp, synthetic construct
  source 1..20: mol_type = other DNA
aacttaaagtataataataa

SEQ ID NO: 229857 - DNA, 20 bp, synthetic construct
  source 1..20: mol_type = other DNA
gaacttaaagtataataata

SEQ ID NO: 229858 - DNA, 20 bp, synthetic construct
  source 1..20: mol_type = other DNA
agaacttaaagtataataat

SEQ ID NO: 229859 - DNA, 20 bp, synthetic construct
  source 1..20: mol_type = other DNA
tagaacttaaagtataataa

SEQ ID NO: 229860 - DNA, 20 bp, synthetic construct
  source 1..20: mol_type = other DNA
ctagaacttaaagtataata

SEQ ID NO: 229861 - DNA, 20 bp, synthetic construct
  source 1..20: mol_type = other DNA
cctagaacttaaagtataat

SEQ ID NO: 229862 - DNA, 20 bp, synthetic construct
  source 1..20: mol_type = other DNA
ccctagaacttaaagtataa

SEQ ID NO: 229863 - DNA, 20 bp, synthetic construct
  source 1..20: mol_type = other DNA
accctagaacttaaagtata

SEQ ID NO: 229864 - DNA, 20 bp, synthetic construct
  source 1..20: mol_type = other DNA
taccctagaacttaaagtat

SEQ ID NO: 229865 - DNA, 20 bp, synthetic construct
  source 1..20: mol_type = other DNA
gtaccctagaacttaaagta

SEQ ID NO: 229866 - DNA, 20 bp, synthetic construct
  source 1..20: mol_type = other DNA
tgtaccctagaacttaaagt

SEQ ID NO: 229867 - DNA, 20 bp, synthetic construct
  source 1..20: mol_type = other DNA
atgtaccctagaacttaaag

SEQ ID NO: 229868 - DNA, 20 bp, synthetic construct
  source 1..20: mol_type = other DNA
catgtaccctagaacttaaa

SEQ ID NO: 229869 - DNA, 20 bp, synthetic construct
  source 1..20: mol_type = other DNA
acatgtaccctagaacttaa

SEQ ID NO: 229870 - DNA, 20 bp, synthetic construct
  source 1..20: mol_type = other DNA
cacatgtaccctagaactta

SEQ ID NO: 229871 - DNA, 20 bp, synthetic construct
  source 1..20: mol_type = other DNA
gcacatgtaccctagaactt

SEQ ID NO: 229872 - DNA, 20 bp, synthetic construct
  source 1..20: mol_type = other DNA
tgcacatgtaccctagaact

SEQ ID NO: 229873 - DNA, 20 bp, synthetic construct
  source 1..20: mol_type = other DNA
gtgcacatgtaccctagaac

SEQ ID NO: 229874 - DNA, 20 bp, synthetic construct
  source 1..20: mol_type = other DNA
tgtgcacatgtaccctagaa

SEQ ID NO: 229875 - DNA, 20 bp, synthetic construct
  source 1..20: mol_type = other DNA
ttgtgcacatgtaccctaga

SEQ ID NO: 229876 - DNA, 20 bp, synthetic construct
  source 1..20: mol_type = other DNA
gttgtgcacatgtaccctag

SEQ ID NO: 229877 - DNA, 20 bp, synthetic construct
  source 1..20: mol_type = other DNA
tgttgtgcacatgtacccta

SEQ ID NO: 229878 - DNA, 20 bp, synthetic construct
  source 1..20: mol_type = other DNA
atgttgtgcacatgtaccct

SEQ ID NO: 229879 - DNA, 20 bp, synthetic construct
  source 1..20: mol_type = other DNA
catgttgtgcacatgtaccc

SEQ ID NO: 229880 - DNA, 20 bp, synthetic construct
  source 1..20: mol_type = other DNA
gcatgttgtgcacatgtacc

SEQ ID NO: 229881 - DNA, 20 bp, synthetic construct
  source 1..20: mol_type = other DNA
tgcatgttgtgcacatgtac

SEQ ID NO: 229882 - DNA, 20 bp, synthetic construct
  source 1..20: mol_type = other DNA
ctgcatgttgtgcacatgta

SEQ ID NO: 229883 - DNA, 20 bp, synthetic construct
  source 1..20: mol_type = other DNA
cctgcatgttgtgcacatgt

SEQ ID NO: 229884 - DNA, 20 bp, synthetic construct
  source 1..20: mol_type = other DNA
acctgcatgttgtgcacatg

SEQ ID NO: 229885 - DNA, 20 bp, synthetic construct
  source 1..20: mol_type = other DNA
aacctgcatgttgtgcacat

SEQ ID NO: 229886 - DNA, 20 bp, synthetic construct
  source 1..20: mol_type = other DNA
aaacctgcatgttgtgcaca

SEQ ID NO: 229887 - DNA, 20 bp, synthetic construct
  source 1..20: mol_type = other DNA
caaacctgcatgttgtgcac

SEQ ID NO: 229888 - DNA, 20 bp, synthetic construct
  source 1..20: mol_type = other DNA
acaaacctgcatgttgtgca

SEQ ID NO: 229889 - DNA, 20 bp, synthetic construct
  source 1..20: mol_type = other DNA
aacaaacctgcatgttgtgc

SEQ ID NO: 229890 - DNA, 20 bp, synthetic construct
  source 1..20: mol_type = other DNA
taacaaacctgcatgttgtg

SEQ ID NO: 229891 - DNA, 20 bp, synthetic construct
  source 1..20: mol_type = other DNA
gtaacaaacctgcatgttgt

SEQ ID NO: 229892 - DNA, 20 bp, synthetic construct
  source 1..20: mol_type = other DNA
tgtaacaaacctgcatgttg

SEQ ID NO: 229893 - DNA, 20 bp, synthetic construct
  source 1..20: mol_type = other DNA
atgtaacaaacctgcatgtt

SEQ ID NO: 229894 - DNA, 20 bp, synthetic construct
  source 1..20: mol_type = other DNA
tatgtaacaaacctgcatgt

SEQ ID NO: 229895 - DNA, 20 bp, synthetic construct
  source 1..20: mol_type = other DNA
atatgtaacaaacctgcatg

SEQ ID NO: 229896 - DNA, 20 bp, synthetic construct
  source 1..20: mol_type = other DNA
catatgtaacaaacctgcat

SEQ ID NO: 229897 - DNA, 20 bp, synthetic construct
  source 1..20: mol_type = other DNA
acatatgtaacaaacctgca

SEQ ID NO: 229898 - DNA, 20 bp, synthetic construct
  source 1..20: mol_type = other DNA
tacatatgtaacaaacctgc

SEQ ID NO: 229899 - DNA, 20 bp, synthetic construct
  source 1..20: mol_type = other DNA
atacatatgtaacaaacctg

SEQ ID NO: 229900 - DNA, 20 bp, synthetic construct
  source 1..20: mol_type = other DNA
tatacatatgtaacaaacct

SEQ ID NO: 229901 - DNA, 20 bp, synthetic construct
  source 1..20: mol_type = other DNA
gtatacatatgtaacaaacc

SEQ ID NO: 229902 - DNA, 20 bp, synthetic construct
  source 1..20: mol_type = other DNA
tgtatacatatgtaacaaac

SEQ ID NO: 229903 - DNA, 20 bp, synthetic construct
  source 1..20: mol_type = other DNA
atgtatacatatgtaacaaa

SEQ ID NO: 229904 - DNA, 20 bp, synthetic construct
  source 1..20: mol_type = other DNA
catgtatacatatgtaacaa

SEQ ID NO: 229905 - DNA, 20 bp, synthetic construct
  source 1..20: mol_type = other DNA
acatgtatacatatgtaaca

SEQ ID NO: 229906 - DNA, 20 bp, synthetic construct
  source 1..20: mol_type = other DNA
cacatgtatacatatgtaac

SEQ ID NO: 229907 - DNA, 20 bp, synthetic construct
  source 1..20: mol_type = other DNA
gcacatgtatacatatgtaa

SEQ ID NO: 229908 - DNA, 20 bp, synthetic construct
  source 1..20: mol_type = other DNA
ggcacatgtatacatatgta

SEQ ID NO: 229909 - DNA, 20 bp, synthetic construct
  source 1..20: mol_type = other DNA
tggcacatgtatacatatgt

SEQ ID NO: 229910 - DNA, 20 bp, synthetic construct
  source 1..20: mol_type = other DNA
atggcacatgtatacatatg

SEQ ID NO: 229911 - DNA, 20 bp, synthetic construct
  source 1..20: mol_type = other DNA
catggcacatgtatacatat

SEQ ID NO: 229912 - DNA, 20 bp, synthetic construct
  source 1..20: mol_type = other DNA
acatggcacatgtatacata

SEQ ID NO: 229913 - DNA, 20 bp, synthetic construct
  source 1..20: mol_type = other DNA
aacatggcacatgtatacat

SEQ ID NO: 229914 - DNA, 20 bp, synthetic construct
  source 1..20: mol_type = other DNA
caacatggcacatgtataca

SEQ ID NO: 229915 - DNA, 20 bp, synthetic construct
  source 1..20: mol_type = other DNA
ccaacatggcacatgtatac

SEQ ID NO: 229916 - DNA, 20 bp, synthetic construct
  source 1..20: mol_type = other DNA
accaacatggcacatgtata

SEQ ID NO: 229917 - DNA, 20 bp, synthetic construct
  source 1..20: mol_type = other DNA
caccaacatggcacatgtat

SEQ ID NO: 229918 - DNA, 20 bp, synthetic construct
  source 1..20: mol_type = other DNA
acaccaacatggcacatgta

SEQ ID NO: 229919 - DNA, 20 bp, synthetic construct
  source 1..20: mol_type = other DNA
cacaccaacatggcacatgt

SEQ ID NO: 229920 - DNA, 20 bp, synthetic construct
  source 1..20: mol_type = other DNA
gcacaccaacatggcacatg

SEQ ID NO: 229921 - DNA, 20 bp, synthetic construct
  source 1..20: mol_type = other DNA
agcacaccaacatggcacat

SEQ ID NO: 229922 - DNA, 20 bp, synthetic construct
  source 1..20: mol_type = other DNA
cagcacaccaacatggcaca

SEQ ID NO: 229923 - DNA, 20 bp, synthetic construct
  source 1..20: mol_type = other DNA
gcagcacaccaacatggcac

SEQ ID NO: 229924 - DNA, 20 bp, synthetic construct
  source 1..20: mol_type = other DNA
tgcagcacaccaacatggca

SEQ ID NO: 229925 - DNA, 20 bp, synthetic construct
  source 1..20: mol_type = other DNA
gtgcagcacaccaacatggc

SEQ ID NO: 229926 - DNA, 20 bp, synthetic construct
  source 1..20: mol_type = other DNA
ggtgcagcacaccaacatgg

SEQ ID NO: 229927 - DNA, 20 bp, synthetic construct
  source 1..20: mol_type = other DNA
gggtgcagcacaccaacatg

SEQ ID NO: 229928 - DNA, 20 bp, synthetic construct
  source 1..20: mol_type = other DNA
tgggtgcagcacaccaacat

SEQ ID NO: 229929 - DNA, 20 bp, synthetic construct
  source 1..20: mol_type = other DNA
atgggtgcagcacaccaaca

SEQ ID NO: 229930 - DNA, 20 bp, synthetic construct
  source 1..20: mol_type = other DNA
aatgggtgcagcacaccaac

SEQ ID NO: 229931 - DNA, 20 bp, synthetic construct
  source 1..20: mol_type = other DNA
taatgggtgcagcacaccaa

SEQ ID NO: 229932 - DNA, 20 bp, synthetic construct
  source 1..20: mol_type = other DNA
ttaatgggtgcagcacacca

SEQ ID NO: 229933 - DNA, 20 bp, synthetic construct
  source 1..20: mol_type = other DNA
attaatgggtgcagcacacc

SEQ ID NO: 229934 - DNA, 20 bp, synthetic construct
  source 1..20: mol_type = other DNA
aattaatgggtgcagcacac

SEQ ID NO: 229935 - DNA, 20 bp, synthetic construct
  source 1..20: mol_type = other DNA
gaattaatgggtgcagcaca

SEQ ID NO: 229936 - DNA, 20 bp, synthetic construct
  source 1..20: mol_type = other DNA
tgaattaatgggtgcagcac

SEQ ID NO: 229937 - DNA, 20 bp, synthetic construct
  source 1..20: mol_type = other DNA
atgaattaatgggtgcagca

SEQ ID NO: 229938 - DNA, 20 bp, synthetic construct
  source 1..20: mol_type = other DNA
gatgaattaatgggtgcagc

SEQ ID NO: 229939 - DNA, 20 bp, synthetic construct
  source 1..20: mol_type = other DNA
tgatgaattaatgggtgcag

SEQ ID NO: 229940 - DNA, 20 bp, synthetic construct
  source 1..20: mol_type = other DNA
atgatgaattaatgggtgca

SEQ ID NO: 229941 - DNA, 20 bp, synthetic construct
  source 1..20: mol_type = other DNA
aatgatgaattaatgggtgc

SEQ ID NO: 229942 - DNA, 20 bp, synthetic construct
  source 1..20: mol_type = other DNA
aaatgatgaattaatgggtg

SEQ ID NO: 229943 - DNA, 20 bp, synthetic construct
  source 1..20: mol_type = other DNA
taaatgatgaattaatgggt

SEQ ID NO: 229944 - DNA, 20 bp, synthetic construct
  source 1..20: mol_type = other DNA
gtaaatgatgaattaatggg

SEQ ID NO: 229945 - DNA, 20 bp, synthetic construct
  source 1..20: mol_type = other DNA
tgtaaatgatgaattaatgg

SEQ ID NO: 229946 - DNA, 20 bp, synthetic construct
  source 1..20: mol_type = other DNA
atgtaaatgatgaattaatg

SEQ ID NO: 229947 - DNA, 20 bp, synthetic construct
  source 1..20: mol_type = other DNA
aatgtaaatgatgaattaat

SEQ ID NO: 229948 - DNA, 20 bp, synthetic construct
  source 1..20: mol_type = other DNA
taatgtaaatgatgaattaa

SEQ ID NO: 229949 - DNA, 20 bp, synthetic construct
  source 1..20: mol_type = other DNA
ctaatgtaaatgatgaatta

SEQ ID NO: 229950 - DNA, 20 bp, synthetic construct
  source 1..20: mol_type = other DNA
cctaatgtaaatgatgaatt

SEQ ID NO: 229951 - DNA, 20 bp, synthetic construct
  source 1..20: mol_type = other DNA
acctaatgtaaatgatgaat

SEQ ID NO: 229952 - DNA, 20 bp, synthetic construct
  source 1..20: mol_type = other DNA
tacctaatgtaaatgatgaa

SEQ ID NO: 229953 - DNA, 20 bp, synthetic construct
  source 1..20: mol_type = other DNA
atacctaatgtaaatgatga

SEQ ID NO: 229954 - DNA, 20 bp, synthetic construct
  source 1..20: mol_type = other DNA
tatacctaatgtaaatgatg

SEQ ID NO: 229955 - DNA, 20 bp, synthetic construct
  source 1..20: mol_type = other DNA
atatacctaatgtaaatgat

SEQ ID NO: 229956 - DNA, 20 bp, synthetic construct
  source 1..20: mol_type = other DNA
gatatacctaatgtaaatga

SEQ ID NO: 229957 - DNA, 20 bp, synthetic construct
  source 1..20: mol_type = other DNA
agatatacctaatgtaaatg

SEQ ID NO: 229958 - DNA, 20 bp, synthetic construct
  source 1..20: mol_type = other DNA
gagatatacctaatgtaaat

SEQ ID NO: 229959 - DNA, 20 bp, synthetic construct
  source 1..20: mol_type = other DNA
ggagatatacctaatgtaaa

SEQ ID NO: 229960 - DNA, 20 bp, synthetic construct
  source 1..20: mol_type = other DNA
aggagatatacctaatgtaa

SEQ ID NO: 229961 - DNA, 20 bp, synthetic construct
  source 1..20: mol_type = other DNA
taggagatatacctaatgta

SEQ ID NO: 229962 - DNA, 20 bp, synthetic construct
  source 1..20: mol_type = other DNA
ttaggagatatacctaatgt

SEQ ID NO: 229963 - DNA, 20 bp, synthetic construct
  source 1..20: mol_type = other DNA
attaggagatatacctaatg

SEQ ID NO: 229964 - DNA, 20 bp, synthetic construct
  source 1..20: mol_type = other DNA
cattaggagatatacctaat

SEQ ID NO: 229965 - DNA, 20 bp, synthetic construct
  source 1..20: mol_type = other DNA
gcattaggagatatacctaa

SEQ ID NO: 229966 - DNA, 20 bp, synthetic construct
  source 1..20: mol_type = other DNA
agcattaggagatataccta

SEQ ID NO: 229967 - DNA, 20 bp, synthetic construct
  source 1..20: mol_type = other DNA
tagcattaggagatatacct

SEQ ID NO: 229968 - DNA, 20 bp, synthetic construct
  source 1..20: mol_type = other DNA
atagcattaggagatatacc

SEQ ID NO: 229969 - DNA, 20 bp, synthetic construct
  source 1..20: mol_type = other DNA
gatagcattaggagatatac

SEQ ID NO: 229970 - DNA, 20 bp, synthetic construct
  source 1..20: mol_type = other DNA
ggatagcattaggagatata

SEQ ID NO: 229971 - DNA, 20 bp, synthetic construct
  source 1..20: mol_type = other DNA
gggatagcattaggagatat

SEQ ID NO: 229972 - DNA, 20 bp, synthetic construct
  source 1..20: mol_type = other DNA
agggatagcattaggagata

SEQ ID NO: 229973 - DNA, 20 bp, synthetic construct
  source 1..20: mol_type = other DNA
gagggatagcattaggagat

SEQ ID NO: 229974 - DNA, 20 bp, synthetic construct
  source 1..20: mol_type = other DNA
ggagggatagcattaggaga

SEQ ID NO: 229975 - DNA, 20 bp, synthetic construct
  source 1..20: mol_type = other DNA
gggagggatagcattaggag

SEQ ID NO: 229976 - DNA, 20 bp, synthetic construct
  source 1..20: mol_type = other DNA
ggggagggatagcattagga

SEQ ID NO: 229977 - DNA, 20 bp, synthetic construct
  source 1..20: mol_type = other DNA
tggggagggatagcattagg

SEQ ID NO: 229978 - DNA, 20 bp, synthetic construct
  source 1..20: mol_type = other DNA
gtggggagggatagcattag

SEQ ID NO: 229979 - DNA, 20 bp, synthetic construct
  source 1..20: mol_type = other DNA
agtggggagggatagcatta

SEQ ID NO: 229980 - DNA, 20 bp, synthetic construct
  source 1..20: mol_type = other DNA
gagtggggagggatagcatt

SEQ ID NO: 229981 - DNA, 20 bp, synthetic construct
  source 1..20: mol_type = other DNA
ggagtggggagggatagcat

SEQ ID NO: 229982 - DNA, 20 bp, synthetic construct
  source 1..20: mol_type = other DNA
gggagtggggagggatagca

SEQ ID NO: 229983 - DNA, 20 bp, synthetic construct
  source 1..20: mol_type = other DNA
ggggagtggggagggatagc

SEQ ID NO: 229984 - DNA, 20 bp, synthetic construct
  source 1..20: mol_type = other DNA
gggggagtggggagggatag

SEQ ID NO: 229985 - DNA, 20 bp, synthetic construct
  source 1..20: mol_type = other DNA
ggggggagtggggagggata

SEQ ID NO: 229986 - DNA, 20 bp, synthetic construct
  source 1..20: mol_type = other DNA
tggggggagtggggagggat

SEQ ID NO: 229987 - DNA, 20 bp, synthetic construct
  source 1..20: mol_type = other DNA
gtggggggagtggggaggga

SEQ ID NO: 229988 - DNA, 20 bp, synthetic construct
  source 1..20: mol_type = other DNA
ggtggggggagtggggaggg

SEQ ID NO: 229989 - DNA, 20 bp, synthetic construct
  source 1..20: mol_type = other DNA
gggtggggggagtggggagg

SEQ ID NO: 229990 - DNA, 20 bp, synthetic construct
  source 1..20: mol_type = other DNA
ggggtggggggagtggggag

SEQ ID NO: 229991 - DNA, 20 bp, synthetic construct
  source 1..20: mol_type = other DNA
tggggtggggggagtgggga

SEQ ID NO: 229992 - DNA, 20 bp, synthetic construct
  source 1..20: mol_type = other DNA
gtggggtggggggagtgggg

SEQ ID NO: 229993 - DNA, 20 bp, synthetic construct
  source 1..20: mol_type = other DNA
tgtggggtggggggagtggg

SEQ ID NO: 229994 - DNA, 20 bp, synthetic construct
  source 1..20: mol_type = other DNA
ttgtggggtggggggagtgg

SEQ ID NO: 229995 - DNA, 20 bp, synthetic construct
  source 1..20: mol_type = other DNA
gttgtggggtggggggagtg

SEQ ID NO: 229996 - DNA, 20 bp, synthetic construct
  source 1..20: mol_type = other DNA
tgttgtggggtggggggagt

SEQ ID NO: 229997 - DNA, 20 bp, synthetic construct
  source 1..20: mol_type = other DNA
ctgttgtggggtggggggag

SEQ ID NO: 229998 - DNA, 20 bp, synthetic construct
  source 1..20: mol_type = other DNA
cctgttgtggggtgggggga

SEQ ID NO: 229999 - DNA, 20 bp, synthetic construct
  source 1..20: mol_type = other DNA
gcctgttgtggggtgggggg

SEQ ID NO: 230000 - DNA, 20 bp, synthetic construct
  source 1..20: mol_type = other DNA
ggcctgttgtggggtggggg

SEQ ID NO: 230001 - DNA, 20 bp, synthetic construct
  source 1..20: mol_type = other DNA
gggcctgttgtggggtgggg

SEQ ID NO: 230002 - DNA, 20 bp, synthetic construct
  source 1..20: mol_type = other DNA
ggggcctgttgtggggtggg

SEQ ID NO: 230003 - DNA, 20 bp, synthetic construct
  source 1..20: mol_type = other DNA
tggggcctgttgtggggtgg

SEQ ID NO: 230004 - DNA, 20 bp, synthetic construct
  source 1..20: mol_type = other DNA
ctggggcctgttgtggggtg

SEQ ID NO: 230005 - DNA, 20 bp, synthetic construct
  source 1..20: mol_type = other DNA
actggggcctgttgtggggt

SEQ ID NO: 230006 - DNA, 20 bp, synthetic construct
  source 1..20: mol_type = other DNA
cactggggcctgttgtgggg

SEQ ID NO: 230007 - DNA, 20 bp, synthetic construct
  source 1..20: mol_type = other DNA
acactggggcctgttgtggg

SEQ ID NO: 230008 - DNA, 20 bp, synthetic construct
  source 1..20: mol_type = other DNA
cacactggggcctgttgtgg

SEQ ID NO: 230009 - DNA, 20 bp, synthetic construct
  source 1..20: mol_type = other DNA
acacactggggcctgttgtg

SEQ ID NO: 230010 - DNA, 20 bp, synthetic construct
  source 1..20: mol_type = other DNA
cacacactggggcctgttgt

SEQ ID NO: 230011 - DNA, 20 bp, synthetic construct
  source 1..20: mol_type = other DNA
tcacacactggggcctgttg

SEQ ID NO: 230012 - DNA, 20 bp, synthetic construct
  source 1..20: mol_type = other DNA
atcacacactggggcctgtt

SEQ ID NO: 230013 - DNA, 20 bp, synthetic construct
  source 1..20: mol_type = other DNA
catcacacactggggcctgt

SEQ ID NO: 230014 - DNA, 20 bp, synthetic construct
  source 1..20: mol_type = other DNA
acatcacacactggggcctg

SEQ ID NO: 230015 - DNA, 20 bp, synthetic construct
  source 1..20: mol_type = other DNA
aacatcacacactggggcct

SEQ ID NO: 230016 - DNA, 20 bp, synthetic construct
  source 1..20: mol_type = other DNA
gaacatcacacactggggcc

SEQ ID NO: 230017 - DNA, 20 bp, synthetic construct
  source 1..20: mol_type = other DNA
ggaacatcacacactggggc

SEQ ID NO: 230018 - DNA, 20 bp, synthetic construct
  source 1..20: mol_type = other DNA
gggaacatcacacactgggg

SEQ ID NO: 230019 - DNA, 20 bp, synthetic construct
  source 1..20: mol_type = other DNA
ggggaacatcacacactggg

SEQ ID NO: 230020 - DNA, 20 bp, synthetic construct
  source 1..20: mol_type = other DNA
aggggaacatcacacactgg

SEQ ID NO: 230021 - DNA, 20 bp, synthetic construct
  source 1..20: mol_type = other DNA
aaggggaacatcacacactg

SEQ ID NO: 230022 - DNA, 20 bp, synthetic construct
  source 1..20: mol_type = other DNA
gaaggggaacatcacacact

SEQ ID NO: 230023 - DNA, 20 bp, synthetic construct
  source 1..20: mol_type = other DNA
ggaaggggaacatcacacac

SEQ ID NO: 230024 - DNA, 20 bp, synthetic construct
  source 1..20: mol_type = other DNA
aggaaggggaacatcacaca

SEQ ID NO: 230025 - DNA, 20 bp, synthetic construct
  source 1..20: mol_type = other DNA
caggaaggggaacatcacac

SEQ ID NO: 230026 - DNA, 20 bp, synthetic construct
  source 1..20: mol_type = other DNA
acaggaaggggaacatcaca

SEQ ID NO: 230027 - DNA, 20 bp, synthetic construct
  source 1..20: mol_type = other DNA
cacaggaaggggaacatcac

SEQ ID NO: 230028 - DNA, 20 bp, synthetic construct
  source 1..20: mol_type = other DNA
acacaggaaggggaacatca

SEQ ID NO: 230029 - DNA, 20 bp, synthetic construct
  source 1..20: mol_type = other DNA
gacacaggaaggggaacatc

SEQ ID NO: 230030 - DNA, 20 bp, synthetic construct
  source 1..20: mol_type = other DNA
ggacacaggaaggggaacat

SEQ ID NO: 230031 - DNA, 20 bp, synthetic construct
  source 1..20: mol_type = other DNA
tggacacaggaaggggaaca

SEQ ID NO: 230032 - DNA, 20 bp, synthetic construct
  source 1..20: mol_type = other DNA
ttggacacaggaaggggaac

SEQ ID NO: 230033 - DNA, 20 bp, synthetic construct
  source 1..20: mol_type = other DNA
cttggacacaggaaggggaa

SEQ ID NO: 230034 - DNA, 20 bp, synthetic construct
  source 1..20: mol_type = other DNA
acttggacacaggaagggga

SEQ ID NO: 230035 - DNA, 20 bp, synthetic construct
  source 1..20: mol_type = other DNA
cacttggacacaggaagggg

SEQ ID NO: 230036 - DNA, 20 bp, synthetic construct
  source 1..20: mol_type = other DNA
acacttggacacaggaaggg

SEQ ID NO: 230037 - DNA, 20 bp, synthetic construct
  source 1..20: mol_type = other DNA
aacacttggacacaggaagg

SEQ ID NO: 230038 - DNA, 20 bp, synthetic construct
  source 1..20: mol_type = other DNA
gaacacttggacacaggaag

SEQ ID NO: 230039 - DNA, 20 bp, synthetic construct
  source 1..20: mol_type = other DNA
agaacacttggacacaggaa

SEQ ID NO: 230040 - DNA, 20 bp, synthetic construct
  source 1..20: mol_type = other DNA
gagaacacttggacacagga

SEQ ID NO: 230041 - DNA, 20 bp, synthetic construct
  source 1..20: mol_type = other DNA
tgagaacacttggacacagg

SEQ ID NO: 230042 - DNA, 20 bp, synthetic construct
  source 1..20: mol_type = other DNA
atgagaacacttggacacag

SEQ ID NO: 230043 - DNA, 20 bp, synthetic construct
  source 1..20: mol_type = other DNA
aatgagaacacttggacaca

SEQ ID NO: 230044 - DNA, 20 bp, synthetic construct
  source 1..20: mol_type = other DNA
caatgagaacacttggacac

SEQ ID NO: 230045 - DNA, 20 bp, synthetic construct
  source 1..20: mol_type = other DNA
acaatgagaacacttggaca

SEQ ID NO: 230046 - DNA, 20 bp, synthetic construct
  source 1..20: mol_type = other DNA
aacaatgagaacacttggac

SEQ ID NO: 230047 - DNA, 20 bp, synthetic construct
  source 1..20: mol_type = other DNA
gaacaatgagaacacttgga

SEQ ID NO: 230048 - DNA, 20 bp, synthetic construct
  source 1..20: mol_type = other DNA
tgaacaatgagaacacttgg

SEQ ID NO: 230049 - DNA, 20 bp, synthetic construct
  source 1..20: mol_type = other DNA
ttgaacaatgagaacacttg

SEQ ID NO: 230050 - DNA, 20 bp, synthetic construct
  source 1..20: mol_type = other DNA
attgaacaatgagaacactt

SEQ ID NO: 230051 - DNA, 20 bp, synthetic construct
  source 1..20: mol_type = other DNA
aattgaacaatgagaacact

SEQ ID NO: 230052 - DNA, 20 bp, synthetic construct
  source 1..20: mol_type = other DNA
gaattgaacaatgagaacac

SEQ ID NO: 230053 - DNA, 20 bp, synthetic construct
  source 1..20: mol_type = other DNA
ggaattgaacaatgagaaca

SEQ ID NO: 230054 - DNA, 20 bp, synthetic construct
  source 1..20: mol_type = other DNA
gggaattgaacaatgagaac

SEQ ID NO: 230055 - DNA, 20 bp, synthetic construct
  source 1..20: mol_type = other DNA
tgggaattgaacaatgagaa

SEQ ID NO: 230056 - DNA, 20 bp, synthetic construct
  source 1..20: mol_type = other DNA
gtgggaattgaacaatgaga

SEQ ID NO: 230057 - DNA, 20 bp, synthetic construct
  source 1..20: mol_type = other DNA
ggtgggaattgaacaatgag

SEQ ID NO: 230058 - DNA, 20 bp, synthetic construct
  source 1..20: mol_type = other DNA
aggtgggaattgaacaatga

SEQ ID NO: 230059 - DNA, 20 bp, synthetic construct
  source 1..20: mol_type = other DNA
taggtgggaattgaacaatg

SEQ ID NO: 230060 - DNA, 20 bp, synthetic construct
  source 1..20: mol_type = other DNA
gtaggtgggaattgaacaat

SEQ ID NO: 230061 - DNA, 20 bp, synthetic construct
  source 1..20: mol_type = other DNA
cgtaggtgggaattgaacaa

SEQ ID NO: 230062 - DNA, 20 bp, synthetic construct
  source 1..20: mol_type = other DNA
tcgtaggtgggaattgaaca

SEQ ID NO: 230063 - DNA, 20 bp, synthetic construct
  source 1..20: mol_type = other DNA
ctcgtaggtgggaattgaac

SEQ ID NO: 230064 - DNA, 20 bp, synthetic construct
  source 1..20: mol_type = other DNA
actcgtaggtgggaattgaa

SEQ ID NO: 230065 - DNA, 20 bp, synthetic construct
  source 1..20: mol_type = other DNA
cactcgtaggtgggaattga

SEQ ID NO: 230066 - DNA, 20 bp, synthetic construct
  source 1..20: mol_type = other DNA
tcactcgtaggtgggaattg

SEQ ID NO: 230067 - DNA, 20 bp, synthetic construct
  source 1..20: mol_type = other DNA
ctcactcgtaggtgggaatt

SEQ ID NO: 230068 - DNA, 20 bp, synthetic construct
  source 1..20: mol_type = other DNA
tctcactcgtaggtgggaat

SEQ ID NO: 230069 - DNA, 20 bp, synthetic construct
  source 1..20: mol_type = other DNA
ttctcactcgtaggtgggaa

SEQ ID NO: 230070 - DNA, 20 bp, synthetic construct
  source 1..20: mol_type = other DNA
gttctcactcgtaggtggga

SEQ ID NO: 230071 - DNA, 20 bp, synthetic construct
  source 1..20: mol_type = other DNA
tgttctcactcgtaggtggg

SEQ ID NO: 230072 - DNA, 20 bp, synthetic construct
  source 1..20: mol_type = other DNA
atgttctcactcgtaggtgg

SEQ ID NO: 230073 - DNA, 20 bp, synthetic construct
  source 1..20: mol_type = other DNA
catgttctcactcgtaggtg

SEQ ID NO: 230074 - DNA, 20 bp, synthetic construct
  source 1..20: mol_type = other DNA
gcatgttctcactcgtaggt

SEQ ID NO: 230075 - DNA, 20 bp, synthetic construct
  source 1..20: mol_type = other DNA
agcatgttctcactcgtagg

SEQ ID NO: 230076 - DNA, 20 bp, synthetic construct
  source 1..20: mol_type = other DNA
cagcatgttctcactcgtag

SEQ ID NO: 230077 - DNA, 20 bp, synthetic construct
  source 1..20: mol_type = other DNA
acagcatgttctcactcgta

SEQ ID NO: 230078 - DNA, 20 bp, synthetic construct
  source 1..20: mol_type = other DNA
cacagcatgttctcactcgt

SEQ ID NO: 230079 - DNA, 20 bp, synthetic construct
  source 1..20: mol_type = other DNA
acacagcatgttctcactcg

SEQ ID NO: 230080 - DNA, 20 bp, synthetic construct
  source 1..20: mol_type = other DNA
aacacagcatgttctcactc

SEQ ID NO: 230081 - DNA, 20 bp, synthetic construct
  source 1..20: mol_type = other DNA
aaacacagcatgttctcact

SEQ ID NO: 230082 - DNA, 20 bp, synthetic construct
  source 1..20: mol_type = other DNA
caaacacagcatgttctcac

SEQ ID NO: 230083 - DNA, 20 bp, synthetic construct
  source 1..20: mol_type = other DNA
ccaaacacagcatgttctca

SEQ ID NO: 230084 - DNA, 20 bp, synthetic construct
  source 1..20: mol_type = other DNA
accaaacacagcatgttctc

SEQ ID NO: 230085 - DNA, 20 bp, synthetic construct
  source 1..20: mol_type = other DNA
aaccaaacacagcatgttct

SEQ ID NO: 230086 - DNA, 20 bp, synthetic construct
  source 1..20: mol_type = other DNA
aaaccaaacacagcatgttc

SEQ ID NO: 230087 - DNA, 20 bp, synthetic construct
  source 1..20: mol_type = other DNA
aaaaccaaacacagcatgtt

SEQ ID NO: 230088 - DNA, 20 bp, synthetic construct
  source 1..20: mol_type = other DNA
aaaaaccaaacacagcatgt

SEQ ID NO: 230089 - DNA, 20 bp, synthetic construct
  source 1..20: mol_type = other DNA
aaaaaaccaaacacagcatg

SEQ ID NO: 230090 - DNA, 20 bp, synthetic construct
  source 1..20: mol_type = other DNA
aaaaaaaccaaacacagcat

SEQ ID NO: 230091 - DNA, 20 bp, synthetic construct
  source 1..20: mol_type = other DNA
caaaaaaaccaaacacagca

SEQ ID NO: 230092 - DNA, 20 bp, synthetic construct
  source 1..20: mol_type = other DNA
acaaaaaaaccaaacacagc

SEQ ID NO: 230093 - DNA, 20 bp, synthetic construct
  source 1..20: mol_type = other DNA
gacaaaaaaaccaaacacag

SEQ ID NO: 230094 - DNA, 20 bp, synthetic construct
  source 1..20: mol_type = other DNA
ggacaaaaaaaccaaacaca

SEQ ID NO: 230095 - DNA, 20 bp, synthetic construct
  source 1..20: mol_type = other DNA
aggacaaaaaaaccaaacac

SEQ ID NO: 230096 - DNA, 20 bp, synthetic construct
  source 1..20: mol_type = other DNA
aaggacaaaaaaaccaaaca

SEQ ID NO: 230097 - DNA, 20 bp, synthetic construct
  source 1..20: mol_type = other DNA
caaggacaaaaaaaccaaac

SEQ ID NO: 230098 - DNA, 20 bp, synthetic construct
  source 1..20: mol_type = other DNA
gcaaggacaaaaaaaccaaa

SEQ ID NO: 230099 - DNA, 20 bp, synthetic construct
  source 1..20: mol_type = other DNA
cgcaaggacaaaaaaaccaa

SEQ ID NO: 230100 - DNA, 20 bp, synthetic construct
  source 1..20: mol_type = other DNA
tcgcaaggacaaaaaaacca

SEQ ID NO: 230101 - DNA, 20 bp, synthetic construct
  source 1..20: mol_type = other DNA
atcgcaaggacaaaaaaacc

SEQ ID NO: 230102 - DNA, 20 bp, synthetic construct
  source 1..20: mol_type = other DNA
tatcgcaaggacaaaaaaac

SEQ ID NO: 230103 - DNA, 20 bp, synthetic construct
  source 1..20: mol_type = other DNA
ctatcgcaaggacaaaaaaa

SEQ ID NO: 230104 - DNA, 20 bp, synthetic construct
  source 1..20: mol_type = other DNA
actatcgcaaggacaaaaaa

SEQ ID NO: 230105 - DNA, 20 bp, synthetic construct
  source 1..20: mol_type = other DNA
aactatcgcaaggacaaaaa

SEQ ID NO: 230106 - DNA, 20 bp, synthetic construct
  source 1..20: mol_type = other DNA
aaactatcgcaaggacaaaa

SEQ ID NO: 230107 - DNA, 20 bp, synthetic construct
  source 1..20: mol_type = other DNA
caaactatcgcaaggacaaa

SEQ ID NO: 230108 - DNA, 20 bp, synthetic construct
  source 1..20: mol_type = other DNA
gcaaactatcgcaaggacaa

SEQ ID NO: 230109 - DNA, 20 bp, synthetic construct
  source 1..20: mol_type = other DNA
agcaaactatcgcaaggaca

SEQ ID NO: 230110 - DNA, 20 bp, synthetic construct
  source 1..20: mol_type = other DNA
cagcaaactatcgcaaggac

SEQ ID NO: 230111 - DNA, 20 bp, synthetic construct
  source 1..20: mol_type = other DNA
tcagcaaactatcgcaagga

SEQ ID NO: 230112 - DNA, 20 bp, synthetic construct
  source 1..20: mol_type = other DNA
ctcagcaaactatcgcaagg

SEQ ID NO: 230113 - DNA, 20 bp, synthetic construct
  source 1..20: mol_type = other DNA
tctcagcaaactatcgcaag

SEQ ID NO: 230114 - DNA, 20 bp, synthetic construct
  source 1..20: mol_type = other DNA
ttctcagcaaactatcgcaa

SEQ ID NO: 230115 - DNA, 20 bp, synthetic construct
  source 1..20: mol_type = other DNA
attctcagcaaactatcgca

SEQ ID NO: 230116 - DNA, 20 bp, synthetic construct
  source 1..20: mol_type = other DNA
cattctcagcaaactatcgc

SEQ ID NO: 230117 - DNA, 20 bp, synthetic construct
  source 1..20: mol_type = other DNA
tcattctcagcaaactatcg

SEQ ID NO: 230118 - DNA, 20 bp, synthetic construct
  source 1..20: mol_type = other DNA
atcattctcagcaaactatc

SEQ ID NO: 230119 - DNA, 20 bp, synthetic construct
  source 1..20: mol_type = other DNA
catcattctcagcaaactat

SEQ ID NO: 230120 - DNA, 20 bp, synthetic construct
  source 1..20: mol_type = other DNA
ccatcattctcagcaaacta

SEQ ID NO: 230121 - DNA, 20 bp, synthetic construct
  source 1..20: mol_type = other DNA
accatcattctcagcaaact

SEQ ID NO: 230122 - DNA, 20 bp, synthetic construct
  source 1..20: mol_type = other DNA
aaccatcattctcagcaaac

SEQ ID NO: 230123 - DNA, 20 bp, synthetic construct
  source 1..20: mol_type = other DNA
aaaccatcattctcagcaaa

SEQ ID NO: 230124 - DNA, 20 bp, synthetic construct
  source 1..20: mol_type = other DNA
gaaaccatcattctcagcaa

SEQ ID NO: 230125 - DNA, 20 bp, synthetic construct
  source 1..20: mol_type = other DNA
ggaaaccatcattctcagca

SEQ ID NO: 230126 - DNA, 20 bp, synthetic construct
  source 1..20: mol_type = other DNA
tggaaaccatcattctcagc

SEQ ID NO: 230127 - DNA, 20 bp, synthetic construct
  source 1..20: mol_type = other DNA
ctggaaaccatcattctcag

SEQ ID NO: 230128 - DNA, 20 bp, synthetic construct
  source 1..20: mol_type = other DNA
gctggaaaccatcattctca

SEQ ID NO: 230129 - DNA, 20 bp, synthetic construct
  source 1..20: mol_type = other DNA
agctggaaaccatcattctc

SEQ ID NO: 230130 - DNA, 20 bp, synthetic construct
  source 1..20: mol_type = other DNA
aagctggaaaccatcattct

SEQ ID NO: 230131 - DNA, 20 bp, synthetic construct
  source 1..20: mol_type = other DNA
gaagctggaaaccatcattc

SEQ ID NO: 230132 - DNA, 20 bp, synthetic construct
  source 1..20: mol_type = other DNA
tgaagctggaaaccatcatt

SEQ ID NO: 230133 - DNA, 20 bp, synthetic construct
  source 1..20: mol_type = other DNA
atgaagctggaaaccatcat

SEQ ID NO: 230134 - DNA, 20 bp, synthetic construct
  source 1..20: mol_type = other DNA
gatgaagctggaaaccatca

SEQ ID NO: 230135 - DNA, 20 bp, synthetic construct
  source 1..20: mol_type = other DNA
ggatgaagctggaaaccatc

SEQ ID NO: 230136 - DNA, 20 bp, synthetic construct
  source 1..20: mol_type = other DNA
tggatgaagctggaaaccat

SEQ ID NO: 230137 - DNA, 20 bp, synthetic construct
  source 1..20: mol_type = other DNA
atggatgaagctggaaacca

SEQ ID NO: 230138 - DNA, 20 bp, synthetic construct
  source 1..20: mol_type = other DNA
catggatgaagctggaaacc

SEQ ID NO: 230139 - DNA, 20 bp, synthetic construct
  source 1..20: mol_type = other DNA
acatggatgaagctggaaac

SEQ ID NO: 230140 - DNA, 20 bp, synthetic construct
  source 1..20: mol_type = other DNA
gacatggatgaagctggaaa

SEQ ID NO: 230141 - DNA, 20 bp, synthetic construct
  source 1..20: mol_type = other DNA
ggacatggatgaagctggaa

SEQ ID NO: 230142 - DNA, 20 bp, synthetic construct
  source 1..20: mol_type = other DNA
gggacatggatgaagctgga

SEQ ID NO: 230143 - DNA, 20 bp, synthetic construct
  source 1..20: mol_type = other DNA
agggacatggatgaagctgg

SEQ ID NO: 230144 - DNA, 20 bp, synthetic construct
  source 1..20: mol_type = other DNA
tagggacatggatgaagctg

SEQ ID NO: 230145 - DNA, 20 bp, synthetic construct
  source 1..20: mol_type = other DNA
gtagggacatggatgaagct

SEQ ID NO: 230146 - DNA, 20 bp, synthetic construct
  source 1..20: mol_type = other DNA
tgtagggacatggatgaagc

SEQ ID NO: 230147 - DNA, 20 bp, synthetic construct
  source 1..20: mol_type = other DNA
ttgtagggacatggatgaag

SEQ ID NO: 230148 - DNA, 20 bp, synthetic construct
  source 1..20: mol_type = other DNA
tttgtagggacatggatgaa

SEQ ID NO: 230149 - DNA, 20 bp, synthetic construct
  source 1..20: mol_type = other DNA
ctttgtagggacatggatga

SEQ ID NO: 230150 - DNA, 20 bp, synthetic construct
  source 1..20: mol_type = other DNA
cctttgtagggacatggatg

SEQ ID NO: 230151 - DNA, 20 bp, synthetic construct
  source 1..20: mol_type = other DNA
tcctttgtagggacatggat

SEQ ID NO: 230152 - DNA, 20 bp, synthetic construct
  source 1..20: mol_type = other DNA
gtcctttgtagggacatgga

SEQ ID NO: 230153 - DNA, 20 bp, synthetic construct
  source 1..20: mol_type = other DNA
tgtcctttgtagggacatgg

SEQ ID NO: 230154 - DNA, 20 bp, synthetic construct
  source 1..20: mol_type = other DNA
atgtcctttgtagggacatg

SEQ ID NO: 230155 - DNA, 20 bp, synthetic construct
  source 1..20: mol_type = other DNA
catgtcctttgtagggacat

SEQ ID NO: 230156 - DNA, 20 bp, synthetic construct
  source 1..20: mol_type = other DNA
tcatgtcctttgtagggaca

SEQ ID NO: 230157 - DNA, 20 bp, synthetic construct
  source 1..20: mol_type = other DNA
ttcatgtcctttgtagggac

SEQ ID NO: 230158 - DNA, 20 bp, synthetic construct
  source 1..20: mol_type = other DNA
gttcatgtcctttgtaggga

SEQ ID NO: 230159 - DNA, 20 bp, synthetic construct
  source 1..20: mol_type = other DNA
agttcatgtcctttgtaggg

SEQ ID NO: 230160 - DNA, 20 bp, synthetic construct
  source 1..20: mol_type = other DNA
gagttcatgtcctttgtagg

SEQ ID NO: 230161 - DNA, 20 bp, synthetic construct
  source 1..20: mol_type = other DNA
tgagttcatgtcctttgtag

SEQ ID NO: 230162 - DNA, 20 bp, synthetic construct
  source 1..20: mol_type = other DNA
atgagttcatgtcctttgta

SEQ ID NO: 230163 - DNA, 20 bp, synthetic construct
  source 1..20: mol_type = other DNA
gatgagttcatgtcctttgt

SEQ ID NO: 230164 - DNA, 20 bp, synthetic construct
  source 1..20: mol_type = other DNA
tgatgagttcatgtcctttg

SEQ ID NO: 230165 - DNA, 20 bp, synthetic construct
  source 1..20: mol_type = other DNA
atgatgagttcatgtccttt

SEQ ID NO: 230166 - DNA, 20 bp, synthetic construct
  source 1..20: mol_type = other DNA
aatgatgagttcatgtcctt

SEQ ID NO: 230167 - DNA, 20 bp, synthetic construct
  source 1..20: mol_type = other DNA
aaatgatgagttcatgtcct

SEQ ID NO: 230168 - DNA, 20 bp, synthetic construct
  source 1..20: mol_type = other DNA
aaaatgatgagttcatgtcc

SEQ ID NO: 230169 - DNA, 20 bp, synthetic construct
  source 1..20: mol_type = other DNA
aaaaatgatgagttcatgtc

SEQ ID NO: 230170 - DNA, 20 bp, synthetic construct
  source 1..20: mol_type = other DNA
aaaaaatgatgagttcatgt

SEQ ID NO: 230171 - DNA, 20 bp, synthetic construct
  source 1..20: mol_type = other DNA
taaaaaatgatgagttcatg

SEQ ID NO: 230172 - DNA, 20 bp, synthetic construct
  source 1..20: mol_type = other DNA
ataaaaaatgatgagttcat

SEQ ID NO: 230173 - DNA, 20 bp, synthetic construct
  source 1..20: mol_type = other DNA
cataaaaaatgatgagttca

SEQ ID NO: 230174 - DNA, 20 bp, synthetic construct
  source 1..20: mol_type = other DNA
ccataaaaaatgatgagttc

SEQ ID NO: 230175 - DNA, 20 bp, synthetic construct
  source 1..20: mol_type = other DNA
gccataaaaaatgatgagtt

SEQ ID NO: 230176 - DNA, 20 bp, synthetic construct
  source 1..20: mol_type = other DNA
agccataaaaaatgatgagt

SEQ ID NO: 230177 - DNA, 20 bp, synthetic construct
  source 1..20: mol_type = other DNA
cagccataaaaaatgatgag

SEQ ID NO: 230178 - DNA, 20 bp, synthetic construct
  source 1..20: mol_type = other DNA
gcagccataaaaaatgatga

SEQ ID NO: 230179 - DNA, 20 bp, synthetic construct
  source 1..20: mol_type = other DNA
tgcagccataaaaaatgatg

SEQ ID NO: 230180 - DNA, 20 bp, synthetic construct
  source 1..20: mol_type = other DNA
atgcagccataaaaaatgat

SEQ ID NO: 230181 - DNA, 20 bp, synthetic construct
  source 1..20: mol_type = other DNA
tatgcagccataaaaaatga

SEQ ID NO: 230182 - DNA, 20 bp, synthetic construct
  source 1..20: mol_type = other DNA
ctatgcagccataaaaaatg

SEQ ID NO: 230183 - DNA, 20 bp, synthetic construct
  source 1..20: mol_type = other DNA
actatgcagccataaaaaat

SEQ ID NO: 230184 - DNA, 20 bp, synthetic construct
  source 1..20: mol_type = other DNA
tactatgcagccataaaaaa

SEQ ID NO: 230185 - DNA, 20 bp, synthetic construct
  source 1..20: mol_type = other DNA
atactatgcagccataaaaa

SEQ ID NO: 230186 - DNA, 20 bp, synthetic construct
  source 1..20: mol_type = other DNA
aatactatgcagccataaaa

SEQ ID NO: 230187 - DNA, 20 bp, synthetic construct
  source 1..20: mol_type = other DNA
gaatactatgcagccataaa

SEQ ID NO: 230188 - DNA, 20 bp, synthetic construct
  source 1..20: mol_type = other DNA
ggaatactatgcagccataa

SEQ ID NO: 230189 - DNA, 20 bp, synthetic construct
  source 1..20: mol_type = other DNA
tggaatactatgcagccata

SEQ ID NO: 230190 - DNA, 20 bp, synthetic construct
  source 1..20: mol_type = other DNA
atggaatactatgcagccat

SEQ ID NO: 230191 - DNA, 20 bp, synthetic construct
  source 1..20: mol_type = other DNA
catggaatactatgcagcca

SEQ ID NO: 230192 - DNA, 20 bp, synthetic construct
  source 1..20: mol_type = other DNA
ccatggaatactatgcagcc

SEQ ID NO: 230193 - DNA, 20 bp, synthetic construct
  source 1..20: mol_type = other DNA
accatggaatactatgcagc

SEQ ID NO: 230194 - DNA, 20 bp, synthetic construct
  source 1..20: mol_type = other DNA
caccatggaatactatgcag

SEQ ID NO: 230195 - DNA, 20 bp, synthetic construct
  source 1..20: mol_type = other DNA
acaccatggaatactatgca

SEQ ID NO: 230196 - DNA, 20 bp, synthetic construct
  source 1..20: mol_type = other DNA
tacaccatggaatactatgc

SEQ ID NO: 230197 - DNA, 20 bp, synthetic construct
  source 1..20: mol_type = other DNA
atacaccatggaatactatg

SEQ ID NO: 230198 - DNA, 20 bp, synthetic construct
  source 1..20: mol_type = other DNA
tatacaccatggaatactat

SEQ ID NO: 230199 - DNA, 20 bp, synthetic construct
  source 1..20: mol_type = other DNA
atatacaccatggaatacta

SEQ ID NO: 230200 - DNA, 20 bp, synthetic construct
  source 1..20: mol_type = other DNA
catatacaccatggaatact

SEQ ID NO: 230201 - DNA, 20 bp, synthetic construct
  source 1..20: mol_type = other DNA
acatatacaccatggaatac

SEQ ID NO: 230202 - DNA, 20 bp, synthetic construct
  source 1..20: mol_type = other DNA
cacatatacaccatggaata

SEQ ID NO: 230203 - DNA, 20 bp, synthetic construct
  source 1..20: mol_type = other DNA
gcacatatacaccatggaat

SEQ ID NO: 230204 - DNA, 20 bp, synthetic construct
  source 1..20: mol_type = other DNA
ggcacatatacaccatggaa

SEQ ID NO: 230205 - DNA, 20 bp, synthetic construct
  source 1..20: mol_type = other DNA
tggcacatatacaccatgga

SEQ ID NO: 230206 - DNA, 20 bp, synthetic construct
  source 1..20: mol_type = other DNA
gtggcacatatacaccatgg

SEQ ID NO: 230207 - DNA, 20 bp, synthetic construct
  source 1..20: mol_type = other DNA
tgtggcacatatacaccatg

SEQ ID NO: 230208 - DNA, 20 bp, synthetic construct
  source 1..20: mol_type = other DNA
atgtggcacatatacaccat

SEQ ID NO: 230209 - DNA, 20 bp, synthetic construct
  source 1..20: mol_type = other DNA
aatgtggcacatatacacca

SEQ ID NO: 230210 - DNA, 20 bp, synthetic construct
  source 1..20: mol_type = other DNA
aaatgtggcacatatacacc

SEQ ID NO: 230211 - DNA, 20 bp, synthetic construct
  source 1..20: mol_type = other DNA
aaaatgtggcacatatacac

SEQ ID NO: 230212 - DNA, 20 bp, synthetic construct
  source 1..20: mol_type = other DNA
gaaaatgtggcacatataca

SEQ ID NO: 230213 - DNA, 20 bp, synthetic construct
  source 1..20: mol_type = other DNA
agaaaatgtggcacatatac

SEQ ID NO: 230214 - DNA, 20 bp, synthetic construct
  source 1..20: mol_type = other DNA
aagaaaatgtggcacatata

SEQ ID NO: 230215 - DNA, 20 bp, synthetic construct
  source 1..20: mol_type = other DNA
taagaaaatgtggcacatat

SEQ ID NO: 230216 - DNA, 20 bp, synthetic construct
  source 1..20: mol_type = other DNA
ttaagaaaatgtggcacata

SEQ ID NO: 230217 - DNA, 20 bp, synthetic construct
  source 1..20: mol_type = other DNA
attaagaaaatgtggcacat

SEQ ID NO: 230218 - DNA, 20 bp, synthetic construct
  source 1..20: mol_type = other DNA
gattaagaaaatgtggcaca

SEQ ID NO: 230219 - DNA, 20 bp, synthetic construct
  source 1..20: mol_type = other DNA
ggattaagaaaatgtggcac

SEQ ID NO: 230220 - DNA, 20 bp, synthetic construct
  source 1..20: mol_type = other DNA
tggattaagaaaatgtggca

SEQ ID NO: 230221 - DNA, 20 bp, synthetic construct
  source 1..20: mol_type = other DNA
ctggattaagaaaatgtggc

SEQ ID NO: 230222 - DNA, 20 bp, synthetic construct
  source 1..20: mol_type = other DNA
actggattaagaaaatgtgg

SEQ ID NO: 230223 - DNA, 20 bp, synthetic construct
  source 1..20: mol_type = other DNA
gactggattaagaaaatgtg

SEQ ID NO: 230224 - DNA, 20 bp, synthetic construct
  source 1..20: mol_type = other DNA
agactggattaagaaaatgt

SEQ ID NO: 230225 - DNA, 20 bp, synthetic construct
  source 1..20: mol_type = other DNA
tagactggattaagaaaatg

SEQ ID NO: 230226 - DNA, 20 bp, synthetic construct
  source 1..20: mol_type = other DNA
atagactggattaagaaaat

SEQ ID NO: 230227 - DNA, 20 bp, synthetic construct
  source 1..20: mol_type = other DNA
gatagactggattaagaaaa

SEQ ID NO: 230228 - DNA, 20 bp, synthetic construct
  source 1..20: mol_type = other DNA
tgatagactggattaagaaa

SEQ ID NO: 230229 - DNA, 20 bp, synthetic construct
  source 1..20: mol_type = other DNA
atgatagactggattaagaa

SEQ ID NO: 230230 - DNA, 20 bp, synthetic construct
  source 1..20: mol_type = other DNA
aatgatagactggattaaga

SEQ ID NO: 230231 - DNA, 20 bp, synthetic construct
  source 1..20: mol_type = other DNA
caatgatagactggattaag

SEQ ID NO: 230232 - DNA, 20 bp, synthetic construct
  source 1..20: mol_type = other DNA
acaatgatagactggattaa

SEQ ID NO: 230233 - DNA, 20 bp, synthetic construct
  source 1..20: mol_type = other DNA
aacaatgatagactggatta

SEQ ID NO: 230234 - DNA, 20 bp, synthetic construct
  source 1..20: mol_type = other DNA
caacaatgatagactggatt

SEQ ID NO: 230235 - DNA, 20 bp, synthetic construct
  source 1..20: mol_type = other DNA
ccaacaatgatagactggat

SEQ ID NO: 230236 - DNA, 20 bp, synthetic construct
  source 1..20: mol_type = other DNA
tccaacaatgatagactgga

SEQ ID NO: 230237 - DNA, 20 bp, synthetic construct
  source 1..20: mol_type = other DNA
gtccaacaatgatagactgg

SEQ ID NO: 230238 - DNA, 20 bp, synthetic construct
  source 1..20: mol_type = other DNA
tgtccaacaatgatagactg

SEQ ID NO: 230239 - DNA, 20 bp, synthetic construct
  source 1..20: mol_type = other DNA
atgtccaacaatgatagact

SEQ ID NO: 230240 - DNA, 20 bp, synthetic construct
  source 1..20: mol_type = other DNA
aatgtccaacaatgatagac

SEQ ID NO: 230241 - DNA, 20 bp, synthetic construct
  source 1..20: mol_type = other DNA
aaatgtccaacaatgataga

SEQ ID NO: 230242 - DNA, 20 bp, synthetic construct
  source 1..20: mol_type = other DNA
caaatgtccaacaatgatag

SEQ ID NO: 230243 - DNA, 20 bp, synthetic construct
  source 1..20: mol_type = other DNA
ccaaatgtccaacaatgata

SEQ ID NO: 230244 - DNA, 20 bp, synthetic construct
  source 1..20: mol_type = other DNA
cccaaatgtccaacaatgat

SEQ ID NO: 230245 - DNA, 20 bp, synthetic construct
  source 1..20: mol_type = other DNA
acccaaatgtccaacaatga

SEQ ID NO: 230246 - DNA, 20 bp, synthetic construct
  source 1..20: mol_type = other DNA
aacccaaatgtccaacaatg

SEQ ID NO: 230247 - DNA, 20 bp, synthetic construct
  source 1..20: mol_type = other DNA
caacccaaatgtccaacaat

SEQ ID NO: 230248 - DNA, 20 bp, synthetic construct
  source 1..20: mol_type = other DNA
ccaacccaaatgtccaacaa

SEQ ID NO: 230249 - DNA, 20 bp, synthetic construct
  source 1..20: mol_type = other DNA
accaacccaaatgtccaaca

SEQ ID NO: 230250 - DNA, 20 bp, synthetic construct
  source 1..20: mol_type = other DNA
aaccaacccaaatgtccaac

SEQ ID NO: 230251 - DNA, 20 bp, synthetic construct
  source 1..20: mol_type = other DNA
gaaccaacccaaatgtccaa

SEQ ID NO: 230252 - DNA, 20 bp, synthetic construct
  source 1..20: mol_type = other DNA
ggaaccaacccaaatgtcca

SEQ ID NO: 230253 - DNA, 20 bp, synthetic construct
  source 1..20: mol_type = other DNA
tggaaccaacccaaatgtcc

SEQ ID NO: 230254 - DNA, 20 bp, synthetic construct
  source 1..20: mol_type = other DNA
ttggaaccaacccaaatgtc

SEQ ID NO: 230255 - DNA, 20 bp, synthetic construct
  source 1..20: mol_type = other DNA
cttggaaccaacccaaatgt

SEQ ID NO: 230256 - DNA, 20 bp, synthetic construct
  source 1..20: mol_type = other DNA
acttggaaccaacccaaatg

SEQ ID NO: 230257 - DNA, 20 bp, synthetic construct
  source 1..20: mol_type = other DNA
gacttggaaccaacccaaat

SEQ ID NO: 230258 - DNA, 20 bp, synthetic construct
  source 1..20: mol_type = other DNA
agacttggaaccaacccaaa

SEQ ID NO: 230259 - DNA, 20 bp, synthetic construct
  source 1..20: mol_type = other DNA
aagacttggaaccaacccaa

SEQ ID NO: 230260 - DNA, 20 bp, synthetic construct
  source 1..20: mol_type = other DNA
aaagacttggaaccaaccca

SEQ ID NO: 230261 - DNA, 20 bp, synthetic construct
  source 1..20: mol_type = other DNA
caaagacttggaaccaaccc

SEQ ID NO: 230262 - DNA, 20 bp, synthetic construct
  source 1..20: mol_type = other DNA
gcaaagacttggaaccaacc

SEQ ID NO: 230263 - DNA, 20 bp, synthetic construct
  source 1..20: mol_type = other DNA
agcaaagacttggaaccaac

SEQ ID NO: 230264 - DNA, 20 bp, synthetic construct
  source 1..20: mol_type = other DNA
tagcaaagacttggaaccaa

SEQ ID NO: 230265 - DNA, 20 bp, synthetic construct
  source 1..20: mol_type = other DNA
atagcaaagacttggaacca

SEQ ID NO: 230266 - DNA, 20 bp, synthetic construct
  source 1..20: mol_type = other DNA
aatagcaaagacttggaacc

SEQ ID NO: 230267 - DNA, 20 bp, synthetic construct
  source 1..20: mol_type = other DNA
caatagcaaagacttggaac

SEQ ID NO: 230268 - DNA, 20 bp, synthetic construct
  source 1..20: mol_type = other DNA
acaatagcaaagacttggaa

SEQ ID NO: 230269 - DNA, 20 bp, synthetic construct
  source 1..20: mol_type = other DNA
cacaatagcaaagacttgga

SEQ ID NO: 230270 - DNA, 20 bp, synthetic construct
  source 1..20: mol_type = other DNA
tcacaatagcaaagacttgg

SEQ ID NO: 230271 - DNA, 20 bp, synthetic construct
  source 1..20: mol_type = other DNA
ttcacaatagcaaagacttg

SEQ ID NO: 230272 - DNA, 20 bp, synthetic construct
  source 1..20: mol_type = other DNA
attcacaatagcaaagactt

SEQ ID NO: 230273 - DNA, 20 bp, synthetic construct
  source 1..20: mol_type = other DNA
tattcacaatagcaaagact

SEQ ID NO: 230274 - DNA, 20 bp, synthetic construct
  source 1..20: mol_type = other DNA
ctattcacaatagcaaagac

SEQ ID NO: 230275 - DNA, 20 bp, synthetic construct
  source 1..20: mol_type = other DNA
actattcacaatagcaaaga

SEQ ID NO: 230276 - DNA, 20 bp, synthetic construct
  source 1..20: mol_type = other DNA
cactattcacaatagcaaag

SEQ ID NO: 230277 - DNA, 20 bp, synthetic construct
  source 1..20: mol_type = other DNA
gcactattcacaatagcaaa

SEQ ID NO: 230278 - DNA, 20 bp, synthetic construct
  source 1..20: mol_type = other DNA
ggcactattcacaatagcaa

SEQ ID NO: 230279 - DNA, 20 bp, synthetic construct
  source 1..20: mol_type = other DNA
cggcactattcacaatagca

SEQ ID NO: 230280 - DNA, 20 bp, synthetic construct
  source 1..20: mol_type = other DNA
gcggcactattcacaatagc

SEQ ID NO: 230281 - DNA, 20 bp, synthetic construct
  source 1..20: mol_type = other DNA
tgcggcactattcacaatag

SEQ ID NO: 230282 - DNA, 20 bp, synthetic construct
  source 1..20: mol_type = other DNA
ttgcggcactattcacaata

SEQ ID NO: 230283 - DNA, 20 bp, synthetic construct
  source 1..20: mol_type = other DNA
attgcggcactattcacaat

SEQ ID NO: 230284 - DNA, 20 bp, synthetic construct
  source 1..20: mol_type = other DNA
tattgcggcactattcacaa

SEQ ID NO: 230285 - DNA, 20 bp, synthetic construct
  source 1..20: mol_type = other DNA
ttattgcggcactattcaca

SEQ ID NO: 230286 - DNA, 20 bp, synthetic construct
  source 1..20: mol_type = other DNA
tttattgcggcactattcac

SEQ ID NO: 230287 - DNA, 20 bp, synthetic construct
  source 1..20: mol_type = other DNA
gtttattgcggcactattca

SEQ ID NO: 230288 - DNA, 20 bp, synthetic construct
  source 1..20: mol_type = other DNA
tgtttattgcggcactattc

SEQ ID NO: 230289 - DNA, 20 bp, synthetic construct
  source 1..20: mol_type = other DNA
atgtttattgcggcactatt

SEQ ID NO: 230290 - DNA, 20 bp, synthetic construct
  source 1..20: mol_type = other DNA
tatgtttattgcggcactat

SEQ ID NO: 230291 - DNA, 20 bp, synthetic construct
  source 1..20: mol_type = other DNA
gtatgtttattgcggcacta

SEQ ID NO: 230292 - DNA, 20 bp, synthetic construct
  source 1..20: mol_type = other DNA
cgtatgtttattgcggcact

SEQ ID NO: 230293 - DNA, 20 bp, synthetic construct
  source 1..20: mol_type = other DNA
acgtatgtttattgcggcac

SEQ ID NO: 230294 - DNA, 20 bp, synthetic construct
  source 1..20: mol_type = other DNA
cacgtatgtttattgcggca

SEQ ID NO: 230295 - DNA, 20 bp, synthetic construct
  source 1..20: mol_type = other DNA
acacgtatgtttattgcggc

SEQ ID NO: 230296 - DNA, 20 bp, synthetic construct
  source 1..20: mol_type = other DNA
cacacgtatgtttattgcgg

SEQ ID NO: 230297 - DNA, 20 bp, synthetic construct
  source 1..20: mol_type = other DNA
gcacacgtatgtttattgcg

SEQ ID NO: 230298 - DNA, 20 bp, synthetic construct
  source 1..20: mol_type = other DNA
tgcacacgtatgtttattgc

SEQ ID NO: 230299 - DNA, 20 bp, synthetic construct
  source 1..20: mol_type = other DNA
atgcacacgtatgtttattg

SEQ ID NO: 230300 - DNA, 20 bp, synthetic construct
  source 1..20: mol_type = other DNA
catgcacacgtatgtttatt

SEQ ID NO: 230301 - DNA, 20 bp, synthetic construct
  source 1..20: mol_type = other DNA
acatgcacacgtatgtttat

SEQ ID NO: 230302 - DNA, 20 bp, synthetic construct
  source 1..20: mol_type = other DNA
cacatgcacacgtatgttta

SEQ ID NO: 230303 - DNA, 20 bp, synthetic construct
  source 1..20: mol_type = other DNA
acacatgcacacgtatgttt

SEQ ID NO: 230304 - DNA, 20 bp, synthetic construct
  source 1..20: mol_type = other DNA
gacacatgcacacgtatgtt

SEQ ID NO: 230305 - DNA, 20 bp, synthetic construct
  source 1..20: mol_type = other DNA
agacacatgcacacgtatgt

SEQ ID NO: 230306 - DNA, 20 bp, synthetic construct
  source 1..20: mol_type = other DNA
aagacacatgcacacgtatg

SEQ ID NO: 230307 - DNA, 20 bp, synthetic construct
  source 1..20: mol_type = other DNA
aaagacacatgcacacgtat

SEQ ID NO: 230308 - DNA, 20 bp, synthetic construct
  source 1..20: mol_type = other DNA
taaagacacatgcacacgta

SEQ ID NO: 230309 - DNA, 20 bp, synthetic construct
  source 1..20: mol_type = other DNA
ataaagacacatgcacacgt

SEQ ID NO: 230310 - DNA, 20 bp, synthetic construct
  source 1..20: mol_type = other DNA
tataaagacacatgcacacg

SEQ ID NO: 230311 - DNA, 20 bp, synthetic construct
  source 1..20: mol_type = other DNA
ttataaagacacatgcacac

SEQ ID NO: 230312 - DNA, 20 bp, synthetic construct
  source 1..20: mol_type = other DNA
gttataaagacacatgcaca

SEQ ID NO: 230313 - DNA, 20 bp, synthetic construct
  source 1..20: mol_type = other DNA
tgttataaagacacatgcac

SEQ ID NO: 230314 - DNA, 20 bp, synthetic construct
  source 1..20: mol_type = other DNA
ctgttataaagacacatgca

SEQ ID NO: 230315 - DNA, 20 bp, synthetic construct
  source 1..20: mol_type = other DNA
gctgttataaagacacatgc

SEQ ID NO: 230316 - DNA, 20 bp, synthetic construct
  source 1..20: mol_type = other DNA
tgctgttataaagacacatg

SEQ ID NO: 230317 - DNA, 20 bp, synthetic construct
  source 1..20: mol_type = other DNA
atgctgttataaagacacat

SEQ ID NO: 230318 - DNA, 20 bp, synthetic construct
  source 1..20: mol_type = other DNA
catgctgttataaagacaca

SEQ ID NO: 230319 - DNA, 20 bp, synthetic construct
  source 1..20: mol_type = other DNA
tcatgctgttataaagacac

SEQ ID NO: 230320 - DNA, 20 bp, synthetic construct
  source 1..20: mol_type = other DNA
atcatgctgttataaagaca

SEQ ID NO: 230321 - DNA, 20 bp, synthetic construct
  source 1..20: mol_type = other DNA
aatcatgctgttataaagac

SEQ ID NO: 230322 - DNA, 20 bp, synthetic construct
  source 1..20: mol_type = other DNA
aaatcatgctgttataaaga

SEQ ID NO: 230323 - DNA, 20 bp, synthetic construct
  source 1..20: mol_type = other DNA
taaatcatgctgttataaag

SEQ ID NO: 230324 - DNA, 20 bp, synthetic construct
  source 1..20: mol_type = other DNA
ataaatcatgctgttataaa

SEQ ID NO: 230325 - DNA, 20 bp, synthetic construct
  source 1..20: mol_type = other DNA
tataaatcatgctgttataa

SEQ ID NO: 230326 - DNA, 20 bp, synthetic construct
  source 1..20: mol_type = other DNA
atataaatcatgctgttata

SEQ ID NO: 230327 - DNA, 20 bp, synthetic construct
  source 1..20: mol_type = other DNA
aatataaatcatgctgttat

SEQ ID NO: 230328 - DNA, 20 bp, synthetic construct
  source 1..20: mol_type = other DNA
gaatataaatcatgctgtta

SEQ ID NO: 230329 - DNA, 20 bp, synthetic construct
  source 1..20: mol_type = other DNA
ggaatataaatcatgctgtt

SEQ ID NO: 230330 - DNA, 20 bp, synthetic construct
  source 1..20: mol_type = other DNA
aggaatataaatcatgctgt

SEQ ID NO: 230331 - DNA, 20 bp, synthetic construct
  source 1..20: mol_type = other DNA
aaggaatataaatcatgctg

SEQ ID NO: 230332 - DNA, 20 bp, synthetic construct
  source 1..20: mol_type = other DNA
aaaggaatataaatcatgct

SEQ ID NO: 230333 - DNA, 20 bp, synthetic construct
  source 1..20: mol_type = other DNA
caaaggaatataaatcatgc

SEQ ID NO: 230334 - DNA, 20 bp, synthetic construct
  source 1..20: mol_type = other DNA
ccaaaggaatataaatcatg

SEQ ID NO: 230335 - DNA, 20 bp, synthetic construct
  source 1..20: mol_type = other DNA
accaaaggaatataaatcat

SEQ ID NO: 230336 - DNA, 20 bp, synthetic construct
  source 1..20: mol_type = other DNA
aaccaaaggaatataaatca

SEQ ID NO: 230337 - DNA, 20 bp, synthetic construct
  source 1..20: mol_type = other DNA
taaccaaaggaatataaatc

SEQ ID NO: 230338 - DNA, 20 bp, synthetic construct
  source 1..20: mol_type = other DNA
ataaccaaaggaatataaat

SEQ ID NO: 230339 - DNA, 20 bp, synthetic construct
  source 1..20: mol_type = other DNA
tataaccaaaggaatataaa

SEQ ID NO: 230340 - DNA, 20 bp, synthetic construct
  source 1..20: mol_type = other DNA
atataaccaaaggaatataa

SEQ ID NO: 230341 - DNA, 20 bp, synthetic construct
  source 1..20: mol_type = other DNA
tatataaccaaaggaatata

SEQ ID NO: 230342 - DNA, 20 bp, synthetic construct
  source 1..20: mol_type = other DNA
gtatataaccaaaggaatat

SEQ ID NO: 230343 - DNA, 20 bp, synthetic construct
  source 1..20: mol_type = other DNA
ggtatataaccaaaggaata

SEQ ID NO: 230344 - DNA, 20 bp, synthetic construct
  source 1..20: mol_type = other DNA
gggtatataaccaaaggaat

SEQ ID NO: 230345 - DNA, 20 bp, synthetic construct
  source 1..20: mol_type = other DNA
tgggtatataaccaaaggaa

SEQ ID NO: 230346 - DNA, 20 bp, synthetic construct
  source 1..20: mol_type = other DNA
ctgggtatataaccaaagga

SEQ ID NO: 230347 - DNA, 20 bp, synthetic construct
  source 1..20: mol_type = other DNA
actgggtatataaccaaagg

SEQ ID NO: 230348 - DNA, 20 bp, synthetic construct
  source 1..20: mol_type = other DNA
tactgggtatataaccaaag

SEQ ID NO: 230349 - DNA, 20 bp, synthetic construct
  source 1..20: mol_type = other DNA
ttactgggtatataaccaaa

SEQ ID NO: 230350 - DNA, 20 bp, synthetic construct
  source 1..20: mol_type = other DNA
attactgggtatataaccaa

SEQ ID NO: 230351 - DNA, 20 bp, synthetic construct
  source 1..20: mol_type = other DNA
cattactgggtatataacca

SEQ ID NO: 230352 - DNA, 20 bp, synthetic construct
  source 1..20: mol_type = other DNA
tcattactgggtatataacc

SEQ ID NO: 230353 - DNA, 20 bp, synthetic construct
  source 1..20: mol_type = other DNA
ctcattactgggtatataac

SEQ ID NO: 230354 - DNA, 20 bp, synthetic construct
  source 1..20: mol_type = other DNA
tctcattactgggtatataa

SEQ ID NO: 230355 - DNA, 20 bp, synthetic construct
  source 1..20: mol_type = other DNA
atctcattactgggtatata

SEQ ID NO: 230356 - DNA, 20 bp, synthetic construct
  source 1..20: mol_type = other DNA
catctcattactgggtatat

SEQ ID NO: 230357 - DNA, 20 bp, synthetic construct
  source 1..20: mol_type = other DNA
ccatctcattactgggtata

SEQ ID NO: 230358 - DNA, 20 bp, synthetic construct
  source 1..20: mol_type = other DNA
gccatctcattactgggtat

SEQ ID NO: 230359 - DNA, 20 bp, synthetic construct
  source 1..20: mol_type = other DNA
agccatctcattactgggta

SEQ ID NO: 230360 - DNA, 20 bp, synthetic construct
  source 1..20: mol_type = other DNA
cagccatctcattactgggt

SEQ ID NO: 230361 - DNA, 20 bp, synthetic construct
  source 1..20: mol_type = other DNA
ccagccatctcattactggg

SEQ ID NO: 230362 - DNA, 20 bp, synthetic construct
  source 1..20: mol_type = other DNA
cccagccatctcattactgg

SEQ ID NO: 230363 - DNA, 20 bp, synthetic construct
  source 1..20: mol_type = other DNA
acccagccatctcattactg

SEQ ID NO: 230364 - DNA, 20 bp, synthetic construct
  source 1..20: mol_type = other DNA
gacccagccatctcattact

SEQ ID NO: 230365 - DNA, 20 bp, synthetic construct
  source 1..20: mol_type = other DNA
tgacccagccatctcattac

SEQ ID NO: 230366 - DNA, 20 bp, synthetic construct
  source 1..20: mol_type = other DNA
ttgacccagccatctcatta

SEQ ID NO: 230367 - DNA, 20 bp, synthetic construct
  source 1..20: mol_type = other DNA
tttgacccagccatctcatt

SEQ ID NO: 230368 - DNA, 20 bp, synthetic construct
  source 1..20: mol_type = other DNA
atttgacccagccatctcat

SEQ ID NO: 230369 - DNA, 20 bp, synthetic construct
  source 1..20: mol_type = other DNA
catttgacccagccatctca

SEQ ID NO: 230370 - DNA, 20 bp, synthetic construct
  source 1..20: mol_type = other DNA
ccatttgacccagccatctc

SEQ ID NO: 230371 - DNA, 20 bp, synthetic construct
  source 1..20: mol_type = other DNA
accatttgacccagccatct

SEQ ID NO: 230372 - DNA, 20 bp, synthetic construct
  source 1..20: mol_type = other DNA
taccatttgacccagccatc

SEQ ID NO: 230373 - DNA, 20 bp, synthetic construct
  source 1..20: mol_type = other DNA
ataccatttgacccagccat

SEQ ID NO: 230374 - DNA, 20 bp, synthetic construct
  source 1..20: mol_type = other DNA
aataccatttgacccagcca

SEQ ID NO: 230375 - DNA, 20 bp, synthetic construct
  source 1..20: mol_type = other DNA
aaataccatttgacccagcc

SEQ ID NO: 230376 - DNA, 20 bp, synthetic construct
  source 1..20: mol_type = other DNA
gaaataccatttgacccagc

SEQ ID NO: 230377 - DNA, 20 bp, synthetic construct
  source 1..20: mol_type = other DNA
agaaataccatttgacccag

SEQ ID NO: 230378 - DNA, 20 bp, synthetic construct
  source 1..20: mol_type = other DNA
tagaaataccatttgaccca

SEQ ID NO: 230379 - DNA, 20 bp, synthetic construct
  source 1..20: mol_type = other DNA
ctagaaataccatttgaccc

SEQ ID NO: 230380 - DNA, 20 bp, synthetic construct
  source 1..20: mol_type = other DNA
actagaaataccatttgacc

SEQ ID NO: 230381 - DNA, 20 bp, synthetic construct
  source 1..20: mol_type = other DNA
aactagaaataccatttgac

SEQ ID NO: 230382 - DNA, 20 bp, synthetic construct
  source 1..20: mol_type = other DNA
gaactagaaataccatttga

SEQ ID NO: 230383 - DNA, 20 bp, synthetic construct
  source 1..20: mol_type = other DNA
agaactagaaataccatttg

SEQ ID NO: 230384 - DNA, 20 bp, synthetic construct
  source 1..20: mol_type = other DNA
tagaactagaaataccattt

SEQ ID NO: 230385 - DNA, 20 bp, synthetic construct
  source 1..20: mol_type = other DNA
ctagaactagaaataccatt

SEQ ID NO: 230386 - DNA, 20 bp, synthetic construct
  source 1..20: mol_type = other DNA
tctagaactagaaataccat

SEQ ID NO: 230387 - DNA, 20 bp, synthetic construct
  source 1..20: mol_type = other DNA
atctagaactagaaatacca

SEQ ID NO: 230388 - DNA, 20 bp, synthetic construct
  source 1..20: mol_type = other DNA
gatctagaactagaaatacc

SEQ ID NO: 230389 - DNA, 20 bp, synthetic construct
  source 1..20: mol_type = other DNA
ggatctagaactagaaatac

SEQ ID NO: 230390 - DNA, 20 bp, synthetic construct
  source 1..20: mol_type = other DNA
gggatctagaactagaaata

SEQ ID NO: 230391 - DNA, 20 bp, synthetic construct
  source 1..20: mol_type = other DNA
agggatctagaactagaaat

SEQ ID NO: 230392 - DNA, 20 bp, synthetic construct
  source 1..20: mol_type = other DNA
cagggatctagaactagaaa

SEQ ID NO: 230393 - DNA, 20 bp, synthetic construct
  source 1..20: mol_type = other DNA
tcagggatctagaactagaa

SEQ ID NO: 230394 - DNA, 20 bp, synthetic construct
  source 1..20: mol_type = other DNA
ctcagggatctagaactaga

SEQ ID NO: 230395 - DNA, 20 bp, synthetic construct
  source 1..20: mol_type = other DNA
cctcagggatctagaactag

SEQ ID NO: 230396 - DNA, 20 bp, synthetic construct
  source 1..20: mol_type = other DNA
tcctcagggatctagaacta

SEQ ID NO: 230397 - DNA, 20 bp, synthetic construct
  source 1..20: mol_type = other DNA
ttcctcagggatctagaact

SEQ ID NO: 230398 - DNA, 20 bp, synthetic construct
  source 1..20: mol_type = other DNA
attcctcagggatctagaac

SEQ ID NO: 230399 - DNA, 20 bp, synthetic construct
  source 1..20: mol_type = other DNA
gattcctcagggatctagaa

SEQ ID NO: 230400 - DNA, 20 bp, synthetic construct
  source 1..20: mol_type = other DNA
cgattcctcagggatctaga

SEQ ID NO: 230401 - DNA, 20 bp, synthetic construct
  source 1..20: mol_type = other DNA
gcgattcctcagggatctag

SEQ ID NO: 230402 - DNA, 20 bp, synthetic construct
  source 1..20: mol_type = other DNA
ggcgattcctcagggatcta

SEQ ID NO: 230403 - DNA, 20 bp, synthetic construct
  source 1..20: mol_type = other DNA
tggcgattcctcagggatct

SEQ ID NO: 230404 - DNA, 20 bp, synthetic construct
  source 1..20: mol_type = other DNA
gtggcgattcctcagggatc

SEQ ID NO: 230405 - DNA, 20 bp, synthetic construct
  source 1..20: mol_type = other DNA
tgtggcgattcctcagggat

SEQ ID NO: 230406 - DNA, 20 bp, synthetic construct
  source 1..20: mol_type = other DNA
gtgtggcgattcctcaggga

SEQ ID NO: 230407 - DNA, 20 bp, synthetic construct
  source 1..20: mol_type = other DNA
agtgtggcgattcctcaggg

SEQ ID NO: 230408 - DNA, 20 bp, synthetic construct
  source 1..20: mol_type = other DNA
cagtgtggcgattcctcagg

SEQ ID NO: 230409 - DNA, 20 bp, synthetic construct
  source 1..20: mol_type = other DNA
acagtgtggcgattcctcag

SEQ ID NO: 230410 - DNA, 20 bp, synthetic construct
  source 1..20: mol_type = other DNA
gacagtgtggcgattcctca

SEQ ID NO: 230411 - DNA, 20 bp, synthetic construct
  source 1..20: mol_type = other DNA
agacagtgtggcgattcctc

SEQ ID NO: 230412 - DNA, 20 bp, synthetic construct
  source 1..20: mol_type = other DNA
aagacagtgtggcgattcct

SEQ ID NO: 230413 - DNA, 20 bp, synthetic construct
  source 1..20: mol_type = other DNA
gaagacagtgtggcgattcc

SEQ ID NO: 230414 - DNA, 20 bp, synthetic construct
  source 1..20: mol_type = other DNA
ggaagacagtgtggcgattc

SEQ ID NO: 230415 - DNA, 20 bp, synthetic construct
  source 1..20: mol_type = other DNA
tggaagacagtgtggcgatt

SEQ ID NO: 230416 - DNA, 20 bp, synthetic construct
  source 1..20: mol_type = other DNA
gtggaagacagtgtggcgat

SEQ ID NO: 230417 - DNA, 20 bp, synthetic construct
  source 1..20: mol_type = other DNA
tgtggaagacagtgtggcga

SEQ ID NO: 230418 - DNA, 20 bp, synthetic construct
  source 1..20: mol_type = other DNA
ttgtggaagacagtgtggcg

SEQ ID NO: 230419 - DNA, 20 bp, synthetic construct
  source 1..20: mol_type = other DNA
attgtggaagacagtgtggc

SEQ ID NO: 230420 - DNA, 20 bp, synthetic construct
  source 1..20: mol_type = other DNA
cattgtggaagacagtgtgg

SEQ ID NO: 230421 - DNA, 20 bp, synthetic construct
  source 1..20: mol_type = other DNA
ccattgtggaagacagtgtg

SEQ ID NO: 230422 - DNA, 20 bp, synthetic construct
  source 1..20: mol_type = other DNA
accattgtggaagacagtgt

SEQ ID NO: 230423 - DNA, 20 bp, synthetic construct
  source 1..20: mol_type = other DNA
aaccattgtggaagacagtg

SEQ ID NO: 230424 - DNA, 20 bp, synthetic construct
  source 1..20: mol_type = other DNA
caaccattgtggaagacagt

SEQ ID NO: 230425 - DNA, 20 bp, synthetic construct
  source 1..20: mol_type = other DNA
tcaaccattgtggaagacag

SEQ ID NO: 230426 - DNA, 20 bp, synthetic construct
  source 1..20: mol_type = other DNA
ttcaaccattgtggaagaca

SEQ ID NO: 230427 - DNA, 20 bp, synthetic construct
  source 1..20: mol_type = other DNA
gttcaaccattgtggaagac

SEQ ID NO: 230428 - DNA, 20 bp, synthetic construct
  source 1..20: mol_type = other DNA
agttcaaccattgtggaaga

SEQ ID NO: 230429 - DNA, 20 bp, synthetic construct
  source 1..20: mol_type = other DNA
tagttcaaccattgtggaag

SEQ ID NO: 230430 - DNA, 20 bp, synthetic construct
  source 1..20: mol_type = other DNA
ctagttcaaccattgtggaa

SEQ ID NO: 230431 - DNA, 20 bp, synthetic construct
  source 1..20: mol_type = other DNA
actagttcaaccattgtgga

SEQ ID NO: 230432 - DNA, 20 bp, synthetic construct
  source 1..20: mol_type = other DNA
aactagttcaaccattgtgg

SEQ ID NO: 230433 - DNA, 20 bp, synthetic construct
  source 1..20: mol_type = other DNA
aaactagttcaaccattgtg

SEQ ID NO: 230434 - DNA, 20 bp, synthetic construct
  source 1..20: mol_type = other DNA
taaactagttcaaccattgt

SEQ ID NO: 230435 - DNA, 20 bp, synthetic construct
  source 1..20: mol_type = other DNA
gtaaactagttcaaccattg

SEQ ID NO: 230436 - DNA, 20 bp, synthetic construct
  source 1..20: mol_type = other DNA
tgtaaactagttcaaccatt

SEQ ID NO: 230437 - DNA, 20 bp, synthetic construct
  source 1..20: mol_type = other DNA
ctgtaaactagttcaaccat

SEQ ID NO: 230438 - DNA, 20 bp, synthetic construct
  source 1..20: mol_type = other DNA
actgtaaactagttcaacca

SEQ ID NO: 230439 - DNA, 20 bp, synthetic construct
  source 1..20: mol_type = other DNA
gactgtaaactagttcaacc

SEQ ID NO: 230440 - DNA, 20 bp, synthetic construct
  source 1..20: mol_type = other DNA
ggactgtaaactagttcaac

SEQ ID NO: 230441 - DNA, 20 bp, synthetic construct
  source 1..20: mol_type = other DNA
aggactgtaaactagttcaa

SEQ ID NO: 230442 - DNA, 20 bp, synthetic construct
  source 1..20: mol_type = other DNA
taggactgtaaactagttca

SEQ ID NO: 230443 - DNA, 20 bp, synthetic construct
  source 1..20: mol_type = other DNA
gtaggactgtaaactagttc

SEQ ID NO: 230444 - DNA, 20 bp, synthetic construct
  source 1..20: mol_type = other DNA
ggtaggactgtaaactagtt

SEQ ID NO: 230445 - DNA, 20 bp, synthetic construct
  source 1..20: mol_type = other DNA
tggtaggactgtaaactagt

SEQ ID NO: 230446 - DNA, 20 bp, synthetic construct
  source 1..20: mol_type = other DNA
ttggtaggactgtaaactag

SEQ ID NO: 230447 - DNA, 20 bp, synthetic construct
  source 1..20: mol_type = other DNA
gttggtaggactgtaaacta

SEQ ID NO: 230448 - DNA, 20 bp, synthetic construct
  source 1..20: mol_type = other DNA
tgttggtaggactgtaaact

SEQ ID NO: 230449 - DNA, 20 bp, synthetic construct
  source 1..20: mol_type = other DNA
ctgttggtaggactgtaaac

SEQ ID NO: 230450 - DNA, 20 bp, synthetic construct
  source 1..20: mol_type = other DNA
actgttggtaggactgtaaa

SEQ ID NO: 230451 - DNA, 20 bp, synthetic construct
  source 1..20: mol_type = other DNA
cactgttggtaggactgtaa

SEQ ID NO: 230452 - DNA, 20 bp, synthetic construct
  source 1..20: mol_type = other DNA
acactgttggtaggactgta

SEQ ID NO: 230453 - DNA, 20 bp, synthetic construct
  source 1..20: mol_type = other DNA
tacactgttggtaggactgt

SEQ ID NO: 230454 - DNA, 20 bp, synthetic construct
  source 1..20: mol_type = other DNA
ttacactgttggtaggactg

SEQ ID NO: 230455 - DNA, 20 bp, synthetic construct
  source 1..20: mol_type = other DNA
tttacactgttggtaggact

SEQ ID NO: 230456 - DNA, 20 bp, synthetic construct
  source 1..20: mol_type = other DNA
ttttacactgttggtaggac

SEQ ID NO: 230457 - DNA, 20 bp, synthetic construct
  source 1..20: mol_type = other DNA
cttttacactgttggtagga

SEQ ID NO: 230458 - DNA, 20 bp, synthetic construct
  source 1..20: mol_type = other DNA
acttttacactgttggtagg

SEQ ID NO: 230459 - DNA, 20 bp, synthetic construct
  source 1..20: mol_type = other DNA
cacttttacactgttggtag

SEQ ID NO: 230460 - DNA, 20 bp, synthetic construct
  source 1..20: mol_type = other DNA
acacttttacactgttggta

SEQ ID NO: 230461 - DNA, 20 bp, synthetic construct
  source 1..20: mol_type = other DNA
aacacttttacactgttggt

SEQ ID NO: 230462 - DNA, 20 bp, synthetic construct
  source 1..20: mol_type = other DNA
gaacacttttacactgttgg

SEQ ID NO: 230463 - DNA, 20 bp, synthetic construct
  source 1..20: mol_type = other DNA
ggaacacttttacactgttg

SEQ ID NO: 230464 - DNA, 20 bp, synthetic construct
  source 1..20: mol_type = other DNA
aggaacacttttacactgtt

SEQ ID NO: 230465 - DNA, 20 bp, synthetic construct
  source 1..20: mol_type = other DNA
taggaacacttttacactgt

SEQ ID NO: 230466 - DNA, 20 bp, synthetic construct
  source 1..20: mol_type = other DNA
ataggaacacttttacactg

SEQ ID NO: 230467 - DNA, 20 bp, synthetic construct
  source 1..20: mol_type = other DNA
aataggaacacttttacact

SEQ ID NO: 230468 - DNA, 20 bp, synthetic construct
  source 1..20: mol_type = other DNA
aaataggaacacttttacac

SEQ ID NO: 230469 - DNA, 20 bp, synthetic construct
  source 1..20: mol_type = other DNA
gaaataggaacacttttaca

SEQ ID NO: 230470 - DNA, 20 bp, synthetic construct
  source 1..20: mol_type = other DNA
agaaataggaacacttttac

SEQ ID NO: 230471 - DNA, 20 bp, synthetic construct
  source 1..20: mol_type = other DNA
gagaaataggaacactttta

SEQ ID NO: 230472 - DNA, 20 bp, synthetic construct
  source 1..20: mol_type = other DNA
ggagaaataggaacactttt

SEQ ID NO: 230473 - DNA, 20 bp, synthetic construct
  source 1..20: mol_type = other DNA
tggagaaataggaacacttt

SEQ ID NO: 230474 - DNA, 20 bp, synthetic construct
  source 1..20: mol_type = other DNA
gtggagaaataggaacactt

SEQ ID NO: 230475 - DNA, 20 bp, synthetic construct
  source 1..20: mol_type = other DNA
tgtggagaaataggaacact

SEQ ID NO: 230476 - DNA, 20 bp, synthetic construct
  source 1..20: mol_type = other DNA
atgtggagaaataggaacac

SEQ ID NO: 230477 - DNA, 20 bp, synthetic construct
  source 1..20: mol_type = other DNA
gatgtggagaaataggaaca

SEQ ID NO: 230478 - DNA, 20 bp, synthetic construct
  source 1..20: mol_type = other DNA
ggatgtggagaaataggaac

SEQ ID NO: 230479 - DNA, 20 bp, synthetic construct
  source 1..20: mol_type = other DNA
aggatgtggagaaataggaa

SEQ ID NO: 230480 - DNA, 20 bp, synthetic construct
  source 1..20: mol_type = other DNA
gaggatgtggagaaatagga

SEQ ID NO: 230481 - DNA, 20 bp, synthetic construct
  source 1..20: mol_type = other DNA
agaggatgtggagaaatagg

SEQ ID NO: 230482 - DNA, 20 bp, synthetic construct
  source 1..20: mol_type = other DNA
gagaggatgtggagaaatag

SEQ ID NO: 230483 - DNA, 20 bp, synthetic construct
  source 1..20: mol_type = other DNA
ggagaggatgtggagaaata

SEQ ID NO: 230484 - DNA, 20 bp, synthetic construct
  source 1..20: mol_type = other DNA
tggagaggatgtggagaaat

SEQ ID NO: 230485 - DNA, 20 bp, synthetic construct
  source 1..20: mol_type = other DNA
ctggagaggatgtggagaaa

SEQ ID NO: 230486 - DNA, 20 bp, synthetic construct
  source 1..20: mol_type = other DNA
gctggagaggatgtggagaa

SEQ ID NO: 230487 - DNA, 20 bp, synthetic construct
  source 1..20: mol_type = other DNA
tgctggagaggatgtggaga

SEQ ID NO: 230488 - DNA, 20 bp, synthetic construct
  source 1..20: mol_type = other DNA
ctgctggagaggatgtggag

SEQ ID NO: 230489 - DNA, 20 bp, synthetic construct
  source 1..20: mol_type = other DNA
gctgctggagaggatgtgga

SEQ ID NO: 230490 - DNA, 20 bp, synthetic construct
  source 1..20: mol_type = other DNA
agctgctggagaggatgtgg

SEQ ID NO: 230491 - DNA, 20 bp, synthetic construct
  source 1..20: mol_type = other DNA
cagctgctggagaggatgtg

SEQ ID NO: 230492 - DNA, 20 bp, synthetic construct
  source 1..20: mol_type = other DNA
acagctgctggagaggatgt

SEQ ID NO: 230493 - DNA, 20 bp, synthetic construct
  source 1..20: mol_type = other DNA
aacagctgctggagaggatg

SEQ ID NO: 230494 - DNA, 20 bp, synthetic construct
  source 1..20: mol_type = other DNA
caacagctgctggagaggat

SEQ ID NO: 230495 - DNA, 20 bp, synthetic construct
  source 1..20: mol_type = other DNA
acaacagctgctggagagga

SEQ ID NO: 230496 - DNA, 20 bp, synthetic construct
  source 1..20: mol_type = other DNA
aacaacagctgctggagagg

SEQ ID NO: 230497 - DNA, 20 bp, synthetic construct
  source 1..20: mol_type = other DNA
aaacaacagctgctggagag

SEQ ID NO: 230498 - DNA, 20 bp, synthetic construct
  source 1..20: mol_type = other DNA
gaaacaacagctgctggaga

SEQ ID NO: 230499 - DNA, 20 bp, synthetic construct
  source 1..20: mol_type = other DNA
ggaaacaacagctgctggag

SEQ ID NO: 230500 - DNA, 20 bp, synthetic construct
  source 1..20: mol_type = other DNA
aggaaacaacagctgctgga

SEQ ID NO: 230501 - DNA, 20 bp, synthetic construct
  source 1..20: mol_type = other DNA
caggaaacaacagctgctgg

SEQ ID NO: 230502 - DNA, 20 bp, synthetic construct
  source 1..20: mol_type = other DNA
tcaggaaacaacagctgctg

SEQ ID NO: 230503 - DNA, 20 bp, synthetic construct
  source 1..20: mol_type = other DNA
gtcaggaaacaacagctgct

SEQ ID NO: 230504 - DNA, 20 bp, synthetic construct
  source 1..20: mol_type = other DNA
agtcaggaaacaacagctgc

SEQ ID NO: 230505 - DNA, 20 bp, synthetic construct
  source 1..20: mol_type = other DNA
aagtcaggaaacaacagctg

SEQ ID NO: 230506 - DNA, 20 bp, synthetic construct
  source 1..20: mol_type = other DNA
aaagtcaggaaacaacagct

SEQ ID NO: 230507 - DNA, 20 bp, synthetic construct
  source 1..20: mol_type = other DNA
aaaagtcaggaaacaacagc

SEQ ID NO: 230508 - DNA, 20 bp, synthetic construct
  source 1..20: mol_type = other DNA
aaaaagtcaggaaacaacag

SEQ ID NO: 230509 - DNA, 20 bp, synthetic construct
  source 1..20: mol_type = other DNA
taaaaagtcaggaaacaaca

SEQ ID NO: 230510 - DNA, 20 bp, synthetic construct
  source 1..20: mol_type = other DNA
ttaaaaagtcaggaaacaac

SEQ ID NO: 230511 - DNA, 20 bp, synthetic construct
  source 1..20: mol_type = other DNA
attaaaaagtcaggaaacaa

SEQ ID NO: 230512 - DNA, 20 bp, synthetic construct
  source 1..20: mol_type = other DNA
cattaaaaagtcaggaaaca

SEQ ID NO: 230513 - DNA, 20 bp, synthetic construct
  source 1..20: mol_type = other DNA
tcattaaaaagtcaggaaac

SEQ ID NO: 230514 - DNA, 20 bp, synthetic construct
  source 1..20: mol_type = other DNA
atcattaaaaagtcaggaaa

SEQ ID NO: 230515 - DNA, 20 bp, synthetic construct
  source 1..20: mol_type = other DNA
gatcattaaaaagtcaggaa

SEQ ID NO: 230516 - DNA, 20 bp, synthetic construct
  source 1..20: mol_type = other DNA
cgatcattaaaaagtcagga

SEQ ID NO: 230517 - DNA, 20 bp, synthetic construct
  source 1..20: mol_type = other DNA
gcgatcattaaaaagtcagg

SEQ ID NO: 230518 - DNA, 20 bp, synthetic construct
  source 1..20: mol_type = other DNA
ggcgatcattaaaaagtcag

SEQ ID NO: 230519 - DNA, 20 bp, synthetic construct
  source 1..20: mol_type = other DNA
tggcgatcattaaaaagtca

SEQ ID NO: 230520 - DNA, 20 bp, synthetic construct
  source 1..20: mol_type = other DNA
atggcgatcattaaaaagtc

SEQ ID NO: 230521 - DNA, 20 bp, synthetic construct
  source 1..20: mol_type = other DNA
aatggcgatcattaaaaagt

SEQ ID NO: 230522 - DNA, 20 bp, synthetic construct
  source 1..20: mol_type = other DNA
gaatggcgatcattaaaaag

SEQ ID NO: 230523 - DNA, 20 bp, synthetic construct
  source 1..20: mol_type = other DNA
agaatggcgatcattaaaaa

SEQ ID NO: 230524 - DNA, 20 bp, synthetic construct
  source 1..20: mol_type = other DNA
tagaatggcgatcattaaaa

SEQ ID NO: 230525 - DNA, 20 bp, synthetic construct
  source 1..20: mol_type = other DNA
ttagaatggcgatcattaaa

SEQ ID NO: 230526 - DNA, 20 bp, synthetic construct
  source 1..20: mol_type = other DNA
gttagaatggcgatcattaa

SEQ ID NO: 230527 - DNA, 20 bp, synthetic construct
  source 1..20: mol_type = other DNA
agttagaatggcgatcatta

SEQ ID NO: 230528 - DNA, 20 bp, synthetic construct
  source 1..20: mol_type = other DNA
cagttagaatggcgatcatt

SEQ ID NO: 230529 - DNA, 20 bp, synthetic construct
  source 1..20: mol_type = other DNA
ccagttagaatggcgatcat

SEQ ID NO: 230530 - DNA, 20 bp, synthetic construct
  source 1..20: mol_type = other DNA
accagttagaatggcgatca

SEQ ID NO: 230531 - DNA, 20 bp, synthetic construct
  source 1..20: mol_type = other DNA
caccagttagaatggcgatc

SEQ ID NO: 230532 - DNA, 20 bp, synthetic construct
  source 1..20: mol_type = other DNA
acaccagttagaatggcgat

SEQ ID NO: 230533 - DNA, 20 bp, synthetic construct
  source 1..20: mol_type = other DNA
cacaccagttagaatggcga

SEQ ID NO: 230534 - DNA, 20 bp, synthetic construct
  source 1..20: mol_type = other DNA
tcacaccagttagaatggcg

SEQ ID NO: 230535 - DNA, 20 bp, synthetic construct
  source 1..20: mol_type = other DNA
ctcacaccagttagaatggc

SEQ ID NO: 230536 - DNA, 20 bp, synthetic construct
  source 1..20: mol_type = other DNA
tctcacaccagttagaatgg

SEQ ID NO: 230537 - DNA, 20 bp, synthetic construct
  source 1..20: mol_type = other DNA
atctcacaccagttagaatg

SEQ ID NO: 230538 - DNA, 20 bp, synthetic construct
  source 1..20: mol_type = other DNA
catctcacaccagttagaat

SEQ ID NO: 230539 - DNA, 20 bp, synthetic construct
  source 1..20: mol_type = other DNA
acatctcacaccagttagaa

SEQ ID NO: 230540 - DNA, 20 bp, synthetic construct
  source 1..20: mol_type = other DNA
aacatctcacaccagttaga

SEQ ID NO: 230541 - DNA, 20 bp, synthetic construct
  source 1..20: mol_type = other DNA
taacatctcacaccagttag

SEQ ID NO: 230542 - DNA, 20 bp, synthetic construct
  source 1..20: mol_type = other DNA
ataacatctcacaccagtta

SEQ ID NO: 230543 - DNA, 20 bp, synthetic construct
  source 1..20: mol_type = other DNA
gataacatctcacaccagtt

SEQ ID NO: 230544 - DNA, 20 bp, synthetic construct
  source 1..20: mol_type = other DNA
agataacatctcacaccagt

SEQ ID NO: 230545 - DNA, 20 bp, synthetic construct
  source 1..20: mol_type = other DNA
gagataacatctcacaccag

SEQ ID NO: 230546 - DNA, 20 bp, synthetic construct
  source 1..20: mol_type = other DNA
tgagataacatctcacacca

SEQ ID NO: 230547 - DNA, 20 bp, synthetic construct
  source 1..20: mol_type = other DNA
atgagataacatctcacacc

SEQ ID NO: 230548 - DNA, 20 bp, synthetic construct
  source 1..20: mol_type = other DNA
catgagataacatctcacac

SEQ ID NO: 230549 - DNA, 20 bp, synthetic construct
  source 1..20: mol_type = other DNA
ccatgagataacatctcaca

SEQ ID NO: 230550 - DNA, 20 bp, synthetic construct
  source 1..20: mol_type = other DNA
accatgagataacatctcac

SEQ ID NO: 230551 - DNA, 20 bp, synthetic construct
  source 1..20: mol_type = other DNA
caccatgagataacatctca

SEQ ID NO: 230552 - DNA, 20 bp, synthetic construct
  source 1..20: mol_type = other DNA
ccaccatgagataacatctc

SEQ ID NO: 230553 - DNA, 20 bp, synthetic construct
  source 1..20: mol_type = other DNA
accaccatgagataacatct

SEQ ID NO: 230554 - DNA, 20 bp, synthetic construct
  source 1..20: mol_type = other DNA
aaccaccatgagataacatc

SEQ ID NO: 230555 - DNA, 20 bp, synthetic construct
  source 1..20: mol_type = other DNA
aaaccaccatgagataacat

SEQ ID NO: 230556 - DNA, 20 bp, synthetic construct
  source 1..20: mol_type = other DNA
aaaaccaccatgagataaca

SEQ ID NO: 230557 - DNA, 20 bp, synthetic construct
  source 1..20: mol_type = other DNA
caaaaccaccatgagataac

SEQ ID NO: 230558 - DNA, 20 bp, synthetic construct
  source 1..20: mol_type = other DNA
tcaaaaccaccatgagataa

SEQ ID NO: 230559 - DNA, 20 bp, synthetic construct
  source 1..20: mol_type = other DNA
atcaaaaccaccatgagata

SEQ ID NO: 230560 - DNA, 20 bp, synthetic construct
  source 1..20: mol_type = other DNA
aatcaaaaccaccatgagat

SEQ ID NO: 230561 - DNA, 20 bp, synthetic construct
  source 1..20: mol_type = other DNA
aaatcaaaaccaccatgaga

SEQ ID NO: 230562 - DNA, 20 bp, synthetic construct
  source 1..20: mol_type = other DNA
caaatcaaaaccaccatgag

SEQ ID NO: 230563 - DNA, 20 bp, synthetic construct
  source 1..20: mol_type = other DNA
gcaaatcaaaaccaccatga

SEQ ID NO: 230564 - DNA, 20 bp, synthetic construct
  source 1..20: mol_type = other DNA
tgcaaatcaaaaccaccatg

SEQ ID NO: 230565 - DNA, 20 bp, synthetic construct
  source 1..20: mol_type = other DNA
atgcaaatcaaaaccaccat

SEQ ID NO: 230566 - DNA, 20 bp, synthetic construct
  source 1..20: mol_type = other DNA
aatgcaaatcaaaaccacca

SEQ ID NO: 230567 - DNA, 20 bp, synthetic construct
  source 1..20: mol_type = other DNA
aaatgcaaatcaaaaccacc

SEQ ID NO: 230568 - DNA, 20 bp, synthetic construct
  source 1..20: mol_type = other DNA
gaaatgcaaatcaaaaccac

SEQ ID NO: 230569 - DNA, 20 bp, synthetic construct
  source 1..20: mol_type = other DNA
agaaatgcaaatcaaaacca

SEQ ID NO: 230570 - DNA, 20 bp, synthetic construct
  source 1..20: mol_type = other DNA
gagaaatgcaaatcaaaacc

SEQ ID NO: 230571 - DNA, 20 bp, synthetic construct
  source 1..20: mol_type = other DNA
agagaaatgcaaatcaaaac

SEQ ID NO: 230572 - DNA, 20 bp, synthetic construct
  source 1..20: mol_type = other DNA
cagagaaatgcaaatcaaaa

SEQ ID NO: 230573 - DNA, 20 bp, synthetic construct
  source 1..20: mol_type = other DNA
tcagagaaatgcaaatcaaa

SEQ ID NO: 230574 - DNA, 20 bp, synthetic construct
  source 1..20: mol_type = other DNA
atcagagaaatgcaaatcaa

SEQ ID NO: 230575 - DNA, 20 bp, synthetic construct
  source 1..20: mol_type = other DNA
catcagagaaatgcaaatca

SEQ ID NO: 230576 - DNA, 20 bp, synthetic construct
  source 1..20: mol_type = other DNA
ccatcagagaaatgcaaatc

SEQ ID NO: 230577 - DNA, 20 bp, synthetic construct
  source 1..20: mol_type = other DNA
gccatcagagaaatgcaaat

SEQ ID NO: 230578 - DNA, 20 bp, synthetic construct
  source 1..20: mol_type = other DNA
ggccatcagagaaatgcaaa

SEQ ID NO: 230579 - DNA, 20 bp, synthetic construct
  source 1..20: mol_type = other DNA
tggccatcagagaaatgcaa

SEQ ID NO: 230580 - DNA, 20 bp, synthetic construct
  source 1..20: mol_type = other DNA
ctggccatcagagaaatgca

SEQ ID NO: 230581 - DNA, 20 bp, synthetic construct
  source 1..20: mol_type = other DNA
actggccatcagagaaatgc

SEQ ID NO: 230582 - DNA, 20 bp, synthetic construct
  source 1..20: mol_type = other DNA
cactggccatcagagaaatg

SEQ ID NO: 230583 - DNA, 20 bp, synthetic construct
  source 1..20: mol_type = other DNA
tcactggccatcagagaaat

SEQ ID NO: 230584 - DNA, 20 bp, synthetic construct
  source 1..20: mol_type = other DNA
atcactggccatcagagaaa

SEQ ID NO: 230585 - DNA, 20 bp, synthetic construct
  source 1..20: mol_type = other DNA
catcactggccatcagagaa

SEQ ID NO: 230586 - DNA, 20 bp, synthetic construct
  source 1..20: mol_type = other DNA
tcatcactggccatcagaga

SEQ ID NO: 230587 - DNA, 20 bp, synthetic construct
  source 1..20: mol_type = other DNA
atcatcactggccatcagag

SEQ ID NO: 230588 - DNA, 20 bp, synthetic construct
  source 1..20: mol_type = other DNA
catcatcactggccatcaga

SEQ ID NO: 230589 - DNA, 20 bp, synthetic construct
  source 1..20: mol_type = other DNA
tcatcatcactggccatcag

SEQ ID NO: 230590 - DNA, 20 bp, synthetic construct
  source 1..20: mol_type = other DNA
ctcatcatcactggccatca

SEQ ID NO: 230591 - DNA, 20 bp, synthetic construct
  source 1..20: mol_type = other DNA
gctcatcatcactggccatc

SEQ ID NO: 230592 - DNA, 20 bp, synthetic construct
  source 1..20: mol_type = other DNA
tgctcatcatcactggccat

SEQ ID NO: 230593 - DNA, 20 bp, synthetic construct
  source 1..20: mol_type = other DNA
atgctcatcatcactggcca

SEQ ID NO: 230594 - DNA, 20 bp, synthetic construct
  source 1..20: mol_type = other DNA
aatgctcatcatcactggcc

SEQ ID NO: 230595 - DNA, 20 bp, synthetic construct
  source 1..20: mol_type = other DNA
aaatgctcatcatcactggc

SEQ ID NO: 230596 - DNA, 20 bp, synthetic construct
  source 1..20: mol_type = other DNA
aaaatgctcatcatcactgg

SEQ ID NO: 230597 - DNA, 20 bp, synthetic construct
  source 1..20: mol_type = other DNA
aaaaatgctcatcatcactg

SEQ ID NO: 230598 - DNA, 20 bp, synthetic construct
  source 1..20: mol_type = other DNA
aaaaaatgctcatcatcact

SEQ ID NO: 230599 - DNA, 20 bp, synthetic construct
  source 1..20: mol_type = other DNA
gaaaaaatgctcatcatcac

SEQ ID NO: 230600 - DNA, 20 bp, synthetic construct
  source 1..20: mol_type = other DNA
tgaaaaaatgctcatcatca

SEQ ID NO: 230601 - DNA, 20 bp, synthetic construct
  source 1..20: mol_type = other DNA
gtgaaaaaatgctcatcatc

SEQ ID NO: 230602 - DNA, 20 bp, synthetic construct
  source 1..20: mol_type = other DNA
cgtgaaaaaatgctcatcat

SEQ ID NO: 230603 - DNA, 20 bp, synthetic construct
  source 1..20: mol_type = other DNA
acgtgaaaaaatgctcatca

SEQ ID NO: 230604 - DNA, 20 bp, synthetic construct
  source 1..20: mol_type = other DNA
cacgtgaaaaaatgctcatc

SEQ ID NO: 230605 - DNA, 20 bp, synthetic construct
  source 1..20: mol_type = other DNA
acacgtgaaaaaatgctcat

SEQ ID NO: 230606 - DNA, 20 bp, synthetic construct
  source 1..20: mol_type = other DNA
gacacgtgaaaaaatgctca

SEQ ID NO: 230607 - DNA, 20 bp, synthetic construct
  source 1..20: mol_type = other DNA
agacacgtgaaaaaatgctc

SEQ ID NO: 230608 - DNA, 20 bp, synthetic construct
  source 1..20: mol_type = other DNA
cagacacgtgaaaaaatgct

SEQ ID NO: 230609 - DNA, 20 bp, synthetic construct
  source 1..20: mol_type = other DNA
acagacacgtgaaaaaatgc

SEQ ID NO: 230610 - DNA, 20 bp, synthetic construct
  source 1..20: mol_type = other DNA
aacagacacgtgaaaaaatg

SEQ ID NO: 230611 - DNA, 20 bp, synthetic construct
  source 1..20: mol_type = other DNA
caacagacacgtgaaaaaat

SEQ ID NO: 230612 - DNA, 20 bp, synthetic construct
  source 1..20: mol_type = other DNA
ccaacagacacgtgaaaaaa

SEQ ID NO: 230613 - DNA, 20 bp, synthetic construct
  source 1..20: mol_type = other DNA
gccaacagacacgtgaaaaa

SEQ ID NO: 230614 - DNA, 20 bp, synthetic construct
  source 1..20: mol_type = other DNA
cgccaacagacacgtgaaaa

SEQ ID NO: 230615 - DNA, 20 bp, synthetic construct
  source 1..20: mol_type = other DNA
tcgccaacagacacgtgaaa

SEQ ID NO: 230616 - DNA, 20 bp, synthetic construct
  source 1..20: mol_type = other DNA
ttcgccaacagacacgtgaa

SEQ ID NO: 230617 - DNA, 20 bp, synthetic construct
  source 1..20: mol_type = other DNA
gttcgccaacagacacgtga

SEQ ID NO: 230618 - DNA, 20 bp, synthetic construct
  source 1..20: mol_type = other DNA
agttcgccaacagacacgtg

SEQ ID NO: 230619 - DNA, 20 bp, synthetic construct
  source 1..20: mol_type = other DNA
gagttcgccaacagacacgt

SEQ ID NO: 230620 - DNA, 20 bp, synthetic construct
  source 1..20: mol_type = other DNA
agagttcgccaacagacacg

SEQ ID NO: 230621 - DNA, 20 bp, synthetic construct
  source 1..20: mol_type = other DNA
tagagttcgccaacagacac

SEQ ID NO: 230622 - DNA, 20 bp, synthetic construct
  source 1..20: mol_type = other DNA
ctagagttcgccaacagaca

SEQ ID NO: 230623 - DNA, 20 bp, synthetic construct
  source 1..20: mol_type = other DNA
gctagagttcgccaacagac

SEQ ID NO: 230624 - DNA, 20 bp, synthetic construct
  source 1..20: mol_type = other DNA
tgctagagttcgccaacaga

SEQ ID NO: 230625 - DNA, 20 bp, synthetic construct
  source 1..20: mol_type = other DNA
ctgctagagttcgccaacag

SEQ ID NO: 230626 - DNA, 20 bp, synthetic construct
  source 1..20: mol_type = other DNA
gctgctagagttcgccaaca

SEQ ID NO: 230627 - DNA, 20 bp, synthetic construct
  source 1..20: mol_type = other DNA
agctgctagagttcgccaac

SEQ ID NO: 230628 - DNA, 20 bp, synthetic construct
  source 1..20: mol_type = other DNA
aagctgctagagttcgccaa

SEQ ID NO: 230629 - DNA, 20 bp, synthetic construct
  source 1..20: mol_type = other DNA
gaagctgctagagttcgcca

SEQ ID NO: 230630 - DNA, 20 bp, synthetic construct
  source 1..20: mol_type = other DNA
agaagctgctagagttcgcc

SEQ ID NO: 230631 - DNA, 20 bp, synthetic construct
  source 1..20: mol_type = other DNA
aagaagctgctagagttcgc

SEQ ID NO: 230632 - DNA, 20 bp, synthetic construct
  source 1..20: mol_type = other DNA
aaagaagctgctagagttcg

SEQ ID NO: 230633 - DNA, 20 bp, synthetic construct
  source 1..20: mol_type = other DNA
aaaagaagctgctagagttc

SEQ ID NO: 230634 - DNA, 20 bp, synthetic construct
  source 1..20: mol_type = other DNA
gaaaagaagctgctagagtt

SEQ ID NO: 230635 - DNA, 20 bp, synthetic construct
  source 1..20: mol_type = other DNA
tgaaaagaagctgctagagt

SEQ ID NO: 230636 - DNA, 20 bp, synthetic construct
  source 1..20: mol_type = other DNA
gtgaaaagaagctgctagag

SEQ ID NO: 230637 - DNA, 20 bp, synthetic construct
  source 1..20: mol_type = other DNA
tgtgaaaagaagctgctaga

SEQ ID NO: 230638 - DNA, 20 bp, synthetic construct
  source 1..20: mol_type = other DNA
ttgtgaaaagaagctgctag

SEQ ID NO: 230639 - DNA, 20 bp, synthetic construct
  source 1..20: mol_type = other DNA
cttgtgaaaagaagctgcta

SEQ ID NO: 230640 - DNA, 20 bp, synthetic construct
  source 1..20: mol_type = other DNA
acttgtgaaaagaagctgct

SEQ ID NO: 230641 - DNA, 20 bp, synthetic construct
  source 1..20: mol_type = other DNA
aacttgtgaaaagaagctgc

SEQ ID NO: 230642 - DNA, 20 bp, synthetic construct
  source 1..20: mol_type = other DNA
gaacttgtgaaaagaagctg

SEQ ID NO: 230643 - DNA, 20 bp, synthetic construct
  source 1..20: mol_type = other DNA
tgaacttgtgaaaagaagct

SEQ ID NO: 230644 - DNA, 20 bp, synthetic construct
  source 1..20: mol_type = other DNA
atgaacttgtgaaaagaagc

SEQ ID NO: 230645 - DNA, 20 bp, synthetic construct
  source 1..20: mol_type = other DNA
catgaacttgtgaaaagaag

SEQ ID NO: 230646 - DNA, 20 bp, synthetic construct
  source 1..20: mol_type = other DNA
ccatgaacttgtgaaaagaa

SEQ ID NO: 230647 - DNA, 20 bp, synthetic construct
  source 1..20: mol_type = other DNA
tccatgaacttgtgaaaaga

SEQ ID NO: 230648 - DNA, 20 bp, synthetic construct
  source 1..20: mol_type = other DNA
ctccatgaacttgtgaaaag

SEQ ID NO: 230649 - DNA, 20 bp, synthetic construct
  source 1..20: mol_type = other DNA
tctccatgaacttgtgaaaa

SEQ ID NO: 230650 - DNA, 20 bp, synthetic construct
  source 1..20: mol_type = other DNA
ctctccatgaacttgtgaaa

SEQ ID NO: 230651 - DNA, 20 bp, synthetic construct
  source 1..20: mol_type = other DNA
tctctccatgaacttgtgaa

SEQ ID NO: 230652 - DNA, 20 bp, synthetic construct
  source 1..20: mol_type = other DNA
ctctctccatgaacttgtga

SEQ ID NO: 230653 - DNA, 20 bp, synthetic construct
  source 1..20: mol_type = other DNA
cctctctccatgaacttgtg

SEQ ID NO: 230654 - DNA, 20 bp, synthetic construct
  source 1..20: mol_type = other DNA
acctctctccatgaacttgt

SEQ ID NO: 230655 - DNA, 20 bp, synthetic construct
  source 1..20: mol_type = other DNA
aacctctctccatgaacttg

SEQ ID NO: 230656 - DNA, 20 bp, synthetic construct
  source 1..20: mol_type = other DNA
aaacctctctccatgaactt

SEQ ID NO: 230657 - DNA, 20 bp, synthetic construct
  source 1..20: mol_type = other DNA
gaaacctctctccatgaact

SEQ ID NO: 230658 - DNA, 20 bp, synthetic construct
  source 1..20: mol_type = other DNA
ggaaacctctctccatgaac

SEQ ID NO: 230659 - DNA, 20 bp, synthetic construct
  source 1..20: mol_type = other DNA
gggaaacctctctccatgaa

SEQ ID NO: 230660 - DNA, 20 bp, synthetic construct
  source 1..20: mol_type = other DNA
tgggaaacctctctccatga

SEQ ID NO: 230661 - DNA, 20 bp, synthetic construct
  source 1..20: mol_type = other DNA
gtgggaaacctctctccatg

SEQ ID NO: 230662 - DNA, 20 bp, synthetic construct
  source 1..20: mol_type = other DNA
agtgggaaacctctctccat

SEQ ID NO: 230663 - DNA, 20 bp, synthetic construct
  source 1..20: mol_type = other DNA
cagtgggaaacctctctcca

SEQ ID NO: 230664 - DNA, 20 bp, synthetic construct
  source 1..20: mol_type = other DNA
tcagtgggaaacctctctcc

SEQ ID NO: 230665 - DNA, 20 bp, synthetic construct
  source 1..20: mol_type = other DNA
ctcagtgggaaacctctctc

SEQ ID NO: 230666 - DNA, 20 bp, synthetic construct
  source 1..20: mol_type = other DNA
cctcagtgggaaacctctct

SEQ ID NO: 230667 - DNA, 20 bp, synthetic construct
  source 1..20: mol_type = other DNA
ccctcagtgggaaacctctc

SEQ ID NO: 230668 - DNA, 20 bp, synthetic construct
  source 1..20: mol_type = other DNA
tccctcagtgggaaacctct

SEQ ID NO: 230669 - DNA, 20 bp, synthetic construct
  source 1..20: mol_type = other DNA
ttccctcagtgggaaacctc

SEQ ID NO: 230670 - DNA, 20 bp, synthetic construct
  source 1..20: mol_type = other DNA
attccctcagtgggaaacct

SEQ ID NO: 230671 - DNA, 20 bp, synthetic construct
  source 1..20: mol_type = other DNA
gattccctcagtgggaaacc

SEQ ID NO: 230672 - DNA, 20 bp, synthetic construct
  source 1..20: mol_type = other DNA
tgattccctcagtgggaaac

SEQ ID NO: 230673 - DNA, 20 bp, synthetic construct
  source 1..20: mol_type = other DNA
gtgattccctcagtgggaaa

SEQ ID NO: 230674 - DNA, 20 bp, synthetic construct
  source 1..20: mol_type = other DNA
tgtgattccctcagtgggaa

SEQ ID NO: 230675 - DNA, 20 bp, synthetic construct
  source 1..20: mol_type = other DNA
atgtgattccctcagtggga

SEQ ID NO: 230676 - DNA, 20 bp, synthetic construct
  source 1..20: mol_type = other DNA
gatgtgattccctcagtggg

SEQ ID NO: 230677 - DNA, 20 bp, synthetic construct
  source 1..20: mol_type = other DNA
agatgtgattccctcagtgg

SEQ ID NO: 230678 - DNA, 20 bp, synthetic construct
  source 1..20: mol_type = other DNA
cagatgtgattccctcagtg

SEQ ID NO: 230679 - DNA, 20 bp, synthetic construct
  source 1..20: mol_type = other DNA
acagatgtgattccctcagt

SEQ ID NO: 230680 - DNA, 20 bp, synthetic construct
  source 1..20: mol_type = other DNA
gacagatgtgattccctcag

SEQ ID NO: 230681 - DNA, 20 bp, synthetic construct
  source 1..20: mol_type = other DNA
agacagatgtgattccctca

SEQ ID NO: 230682 - DNA, 20 bp, synthetic construct
  source 1..20: mol_type = other DNA
cagacagatgtgattccctc

SEQ ID NO: 230683 - DNA, 20 bp, synthetic construct
  source 1..20: mol_type = other DNA
tcagacagatgtgattccct

SEQ ID NO: 230684 - DNA, 20 bp, synthetic construct
  source 1..20: mol_type = other DNA
atcagacagatgtgattccc

SEQ ID NO: 230685 - DNA, 20 bp, synthetic construct
  source 1..20: mol_type = other DNA
gatcagacagatgtgattcc

SEQ ID NO: 230686 - DNA, 20 bp, synthetic construct
  source 1..20: mol_type = other DNA
tgatcagacagatgtgattc

SEQ ID NO: 230687 - DNA, 20 bp, synthetic construct
  source 1..20: mol_type = other DNA
ttgatcagacagatgtgatt

SEQ ID NO: 230688 - DNA, 20 bp, synthetic construct
  source 1..20: mol_type = other DNA
tttgatcagacagatgtgat

SEQ ID NO: 230689 - DNA, 20 bp, synthetic construct
  source 1..20: mol_type = other DNA
ttttgatcagacagatgtga

SEQ ID NO: 230690 - DNA, 20 bp, synthetic construct
  source 1..20: mol_type = other DNA
cttttgatcagacagatgtg

SEQ ID NO: 230691 - DNA, 20 bp, synthetic construct
  source 1..20: mol_type = other DNA
tcttttgatcagacagatgt

SEQ ID NO: 230692 - DNA, 20 bp, synthetic construct
  source 1..20: mol_type = other DNA
ctcttttgatcagacagatg

SEQ ID NO: 230693 - DNA, 20 bp, synthetic construct
  source 1..20: mol_type = other DNA
cctcttttgatcagacagat

SEQ ID NO: 230694 - DNA, 20 bp, synthetic construct
  source 1..20: mol_type = other DNA
gcctcttttgatcagacaga

SEQ ID NO: 230695 - DNA, 20 bp, synthetic construct
  source 1..20: mol_type = other DNA
agcctcttttgatcagacag

SEQ ID NO: 230696 - DNA, 20 bp, synthetic construct
  source 1..20: mol_type = other DNA
aagcctcttttgatcagaca

SEQ ID NO: 230697 - DNA, 20 bp, synthetic construct
  source 1..20: mol_type = other DNA
caagcctcttttgatcagac

SEQ ID NO: 230698 - DNA, 20 bp, synthetic construct
  source 1..20: mol_type = other DNA
ccaagcctcttttgatcaga

SEQ ID NO: 230699 - DNA, 20 bp, synthetic construct
  source 1..20: mol_type = other DNA
cccaagcctcttttgatcag

SEQ ID NO: 230700 - DNA, 20 bp, synthetic construct
  source 1..20: mol_type = other DNA
tcccaagcctcttttgatca

SEQ ID NO: 230701 - DNA, 20 bp, synthetic construct
  source 1..20: mol_type = other DNA
ttcccaagcctcttttgatc

SEQ ID NO: 230702 - DNA, 20 bp, synthetic construct
  source 1..20: mol_type = other DNA
tttcccaagcctcttttgat

SEQ ID NO: 230703 - DNA, 20 bp, synthetic construct
  source 1..20: mol_type = other DNA
atttcccaagcctcttttga

SEQ ID NO: 230704 - DNA, 20 bp, synthetic construct
  source 1..20: mol_type = other DNA
catttcccaagcctcttttg

SEQ ID NO: 230705 - DNA, 20 bp, synthetic construct
  source 1..20: mol_type = other DNA
ccatttcccaagcctctttt

SEQ ID NO: 230706 - DNA, 20 bp, synthetic construct
  source 1..20: mol_type = other DNA
gccatttcccaagcctcttt

SEQ ID NO: 230707 - DNA, 20 bp, synthetic construct
  source 1..20: mol_type = other DNA
agccatttcccaagcctctt

SEQ ID NO: 230708 - DNA, 20 bp, synthetic construct
  source 1..20: mol_type = other DNA
gagccatttcccaagcctct

SEQ ID NO: 230709 - DNA, 20 bp, synthetic construct
  source 1..20: mol_type = other DNA
agagccatttcccaagcctc

SEQ ID NO: 230710 - DNA, 20 bp, synthetic construct
  source 1..20: mol_type = other DNA
gagagccatttcccaagcct

SEQ ID NO: 230711 - DNA, 20 bp, synthetic construct
  source 1..20: mol_type = other DNA
ggagagccatttcccaagcc

SEQ ID NO: 230712 - DNA, 20 bp, synthetic construct
  source 1..20: mol_type = other DNA
aggagagccatttcccaagc

SEQ ID NO: 230713 - DNA, 20 bp, synthetic construct
  source 1..20: mol_type = other DNA
caggagagccatttcccaag

SEQ ID NO: 230714 - DNA, 20 bp, synthetic construct
  source 1..20: mol_type = other DNA
acaggagagccatttcccaa

SEQ ID NO: 230715 - DNA, 20 bp, synthetic construct
  source 1..20: mol_type = other DNA
aacaggagagccatttccca

SEQ ID NO: 230716 - DNA, 20 bp, synthetic construct
  source 1..20: mol_type = other DNA
gaacaggagagccatttccc

SEQ ID NO: 230717 - DNA, 20 bp, synthetic construct
  source 1..20: mol_type = other DNA
tgaacaggagagccatttcc

SEQ ID NO: 230718 - DNA, 20 bp, synthetic construct
  source 1..20: mol_type = other DNA
atgaacaggagagccatttc

SEQ ID NO: 230719 - DNA, 20 bp, synthetic construct
  source 1..20: mol_type = other DNA
aatgaacaggagagccattt

SEQ ID NO: 230720 - DNA, 20 bp, synthetic construct
  source 1..20: mol_type = other DNA
gaatgaacaggagagccatt

SEQ ID NO: 230721 - DNA, 20 bp, synthetic construct
  source 1..20: mol_type = other DNA
ggaatgaacaggagagccat

SEQ ID NO: 230722 - DNA, 20 bp, synthetic construct
  source 1..20: mol_type = other DNA
gggaatgaacaggagagcca

SEQ ID NO: 230723 - DNA, 20 bp, synthetic construct
  source 1..20: mol_type = other DNA
agggaatgaacaggagagcc

SEQ ID NO: 230724 - DNA, 20 bp, synthetic construct
  source 1..20: mol_type = other DNA
cagggaatgaacaggagagc

SEQ ID NO: 230725 - DNA, 20 bp, synthetic construct
  source 1..20: mol_type = other DNA
tcagggaatgaacaggagag

SEQ ID NO: 230726 - DNA, 20 bp, synthetic construct
  source 1..20: mol_type = other DNA
ttcagggaatgaacaggaga

SEQ ID NO: 230727 - DNA, 20 bp, synthetic construct
  source 1..20: mol_type = other DNA
tttcagggaatgaacaggag

SEQ ID NO: 230728 - DNA, 20 bp, synthetic construct
  source 1..20: mol_type = other DNA
ttttcagggaatgaacagga

SEQ ID NO: 230729 - DNA, 20 bp, synthetic construct
  source 1..20: mol_type = other DNA
gttttcagggaatgaacagg

SEQ ID NO: 230730 - DNA, 20 bp, synthetic construct
  source 1..20: mol_type = other DNA
ggttttcagggaatgaacag

SEQ ID NO: 230731 - DNA, 20 bp, synthetic construct
  source 1..20: mol_type = other DNA
aggttttcagggaatgaaca

SEQ ID NO: 230732 - DNA, 20 bp, synthetic construct
  source 1..20: mol_type = other DNA
gaggttttcagggaatgaac

SEQ ID NO: 230733 - DNA, 20 bp, synthetic construct
  source 1..20: mol_type = other DNA
agaggttttcagggaatgaa

SEQ ID NO: 230734 - DNA, 20 bp, synthetic construct
  source 1..20: mol_type = other DNA
cagaggttttcagggaatga

SEQ ID NO: 230735 - DNA, 20 bp, synthetic construct
  source 1..20: mol_type = other DNA
tcagaggttttcagggaatg

SEQ ID NO: 230736 - DNA, 20 bp, synthetic construct
  source 1..20: mol_type = other DNA
atcagaggttttcagggaat

SEQ ID NO: 230737 - DNA, 20 bp, synthetic construct
  source 1..20: mol_type = other DNA
catcagaggttttcagggaa

SEQ ID NO: 230738 - DNA, 20 bp, synthetic construct
  source 1..20: mol_type = other DNA
ccatcagaggttttcaggga

SEQ ID NO: 230739 - DNA, 20 bp, synthetic construct
  source 1..20: mol_type = other DNA
tccatcagaggttttcaggg

SEQ ID NO: 230740 - DNA, 20 bp, synthetic construct
  source 1..20: mol_type = other DNA
ttccatcagaggttttcagg

SEQ ID NO: 230741 - DNA, 20 bp, synthetic construct
  source 1..20: mol_type = other DNA
gttccatcagaggttttcag

SEQ ID NO: 230742 - DNA, 20 bp, synthetic construct
  source 1..20: mol_type = other DNA
ggttccatcagaggttttca

SEQ ID NO: 230743 - DNA, 20 bp, synthetic construct
  source 1..20: mol_type = other DNA
tggttccatcagaggttttc

SEQ ID NO: 230744 - DNA, 20 bp, synthetic construct
  source 1..20: mol_type = other DNA
gtggttccatcagaggtttt

SEQ ID NO: 230745 - DNA, 20 bp, synthetic construct
  source 1..20: mol_type = other DNA
agtggttccatcagaggttt

SEQ ID NO: 230746 - DNA, 20 bp, synthetic construct
  source 1..20: mol_type = other DNA
cagtggttccatcagaggtt

SEQ ID NO: 230747 - DNA, 20 bp, synthetic construct
  source 1..20: mol_type = other DNA
gcagtggttccatcagaggt

SEQ ID NO: 230748 - DNA, 20 bp, synthetic construct
  source 1..20: mol_type = other DNA
ggcagtggttccatcagagg

SEQ ID NO: 230749 - DNA, 20 bp, synthetic construct
  source 1..20: mol_type = other DNA
tggcagtggttccatcagag

SEQ ID NO: 230750 - DNA, 20 bp, synthetic construct
  source 1..20: mol_type = other DNA
gtggcagtggttccatcaga

SEQ ID NO: 230751 - DNA, 20 bp, synthetic construct
  source 1..20: mol_type = other DNA
agtggcagtggttccatcag

SEQ ID NO: 230752 - DNA, 20 bp, synthetic construct
  source 1..20: mol_type = other DNA
cagtggcagtggttccatca

SEQ ID NO: 230753 - DNA, 20 bp, synthetic construct
  source 1..20: mol_type = other DNA
acagtggcagtggttccatc

SEQ ID NO: 230754 - DNA, 20 bp, synthetic construct
  source 1..20: mol_type = other DNA
cacagtggcagtggttccat

SEQ ID NO: 230755 - DNA, 20 bp, synthetic construct
  source 1..20: mol_type = other DNA
ccacagtggcagtggttcca

SEQ ID NO: 230756 - DNA, 20 bp, synthetic construct
  source 1..20: mol_type = other DNA
gccacagtggcagtggttcc

SEQ ID NO: 230757 - DNA, 20 bp, synthetic construct
  source 1..20: mol_type = other DNA
tgccacagtggcagtggttc

SEQ ID NO: 230758 - DNA, 20 bp, synthetic construct
  source 1..20: mol_type = other DNA
ctgccacagtggcagtggtt

SEQ ID NO: 230759 - DNA, 20 bp, synthetic construct
  source 1..20: mol_type = other DNA
gctgccacagtggcagtggt

SEQ ID NO: 230760 - DNA, 20 bp, synthetic construct
  source 1..20: mol_type = other DNA
ggctgccacagtggcagtgg

SEQ ID NO: 230761 - DNA, 20 bp, synthetic construct
  source 1..20: mol_type = other DNA
gggctgccacagtggcagtg

SEQ ID NO: 230762 - DNA, 20 bp, synthetic construct
  source 1..20: mol_type = other DNA
ggggctgccacagtggcagt

SEQ ID NO: 230763 - DNA, 20 bp, synthetic construct
  source 1..20: mol_type = other DNA
tggggctgccacagtggcag

SEQ ID NO: 230764 - DNA, 20 bp, synthetic construct
  source 1..20: mol_type = other DNA
ctggggctgccacagtggca

SEQ ID NO: 230765 - DNA, 20 bp, synthetic construct
  source 1..20: mol_type = other DNA
gctggggctgccacagtggc

SEQ ID NO: 230766 - DNA, 20 bp, synthetic construct
  source 1..20: mol_type = other DNA
tgctggggctgccacagtgg

SEQ ID NO: 230767 - DNA, 20 bp, synthetic construct
  source 1..20: mol_type = other DNA
gtgctggggctgccacagtg

SEQ ID NO: 230768 - DNA, 20 bp, synthetic construct
  source 1..20: mol_type = other DNA
agtgctggggctgccacagt

SEQ ID NO: 230769 - DNA, 20 bp, synthetic construct
  source 1..20: mol_type = other DNA
cagtgctggggctgccacag

SEQ ID NO: 230770 - DNA, 20 bp, synthetic construct
  source 1..20: mol_type = other DNA
ccagtgctggggctgccaca

SEQ ID NO: 230771 - DNA, 20 bp, synthetic construct
  source 1..20: mol_type = other DNA
gccagtgctggggctgccac

SEQ ID NO: 230772 - DNA, 20 bp, synthetic construct
  source 1..20: mol_type = other DNA
tgccagtgctggggctgcca

SEQ ID NO: 230773 - DNA, 20 bp, synthetic construct
  source 1..20: mol_type = other DNA
gtgccagtgctggggctgcc

SEQ ID NO: 230774 - DNA, 20 bp, synthetic construct
  source 1..20: mol_type = other DNA
ggtgccagtgctggggctgc

SEQ ID NO: 230775 - DNA, 20 bp, synthetic construct
  source 1..20: mol_type = other DNA
gggtgccagtgctggggctg

SEQ ID NO: 230776 - DNA, 20 bp, synthetic construct
  source 1..20: mol_type = other DNA
ggggtgccagtgctggggct

SEQ ID NO: 230777 - DNA, 20 bp, synthetic construct
  source 1..20: mol_type = other DNA
tggggtgccagtgctggggc

SEQ ID NO: 230778 - DNA, 20 bp, synthetic construct
  source 1..20: mol_type = other DNA
ctggggtgccagtgctgggg

SEQ ID NO: 230779 - DNA, 20 bp, synthetic construct
  source 1..20: mol_type = other DNA
gctggggtgccagtgctggg

SEQ ID NO: 230780 - DNA, 20 bp, synthetic construct
  source 1..20: mol_type = other DNA
ggctggggtgccagtgctgg

SEQ ID NO: 230781 - DNA, 20 bp, synthetic construct
  source 1..20: mol_type = other DNA
tggctggggtgccagtgctg

SEQ ID NO: 230782 - DNA, 20 bp, synthetic construct
  source 1..20: mol_type = other DNA
atggctggggtgccagtgct

SEQ ID NO: 230783 - DNA, 20 bp, synthetic construct
  source 1..20: mol_type = other DNA
catggctggggtgccagtgc

SEQ ID NO: 230784 - DNA, 20 bp, synthetic construct
  source 1..20: mol_type = other DNA
tcatggctggggtgccagtg

SEQ ID NO: 230785 - DNA, 20 bp, synthetic construct
  source 1..20: mol_type = other DNA
atcatggctggggtgccagt

SEQ ID NO: 230786 - DNA, 20 bp, synthetic construct
  source 1..20: mol_type = other DNA
aatcatggctggggtgccag

SEQ ID NO: 230787 - DNA, 20 bp, synthetic construct
  source 1..20: mol_type = other DNA
caatcatggctggggtgcca

SEQ ID NO: 230788 - DNA, 20 bp, synthetic construct
  source 1..20: mol_type = other DNA
ccaatcatggctggggtgcc

SEQ ID NO: 230789 - DNA, 20 bp, synthetic construct
  source 1..20: mol_type = other DNA
accaatcatggctggggtgc

SEQ ID NO: 230790 - DNA, 20 bp, synthetic construct
  source 1..20: mol_type = other DNA
caccaatcatggctggggtg

SEQ ID NO: 230791 - DNA, 20 bp, synthetic construct
  source 1..20: mol_type = other DNA
gcaccaatcatggctggggt

SEQ ID NO: 230792 - DNA, 20 bp, synthetic construct
  source 1..20: mol_type = other DNA
ggcaccaatcatggctgggg

SEQ ID NO: 230793 - DNA, 20 bp, synthetic construct
  source 1..20: mol_type = other DNA
gggcaccaatcatggctggg

SEQ ID NO: 230794 - DNA, 20 bp, synthetic construct
  source 1..20: mol_type = other DNA
ggggcaccaatcatggctgg

SEQ ID NO: 230795 - DNA, 20 bp, synthetic construct
  source 1..20: mol_type = other DNA
tggggcaccaatcatggctg

SEQ ID NO: 230796 - DNA, 20 bp, synthetic construct
  source 1..20: mol_type = other DNA
ctggggcaccaatcatggct

SEQ ID NO: 230797 - DNA, 20 bp, synthetic construct
  source 1..20: mol_type = other DNA
gctggggcaccaatcatggc

SEQ ID NO: 230798 - DNA, 20 bp, synthetic construct
  source 1..20: mol_type = other DNA
ggctggggcaccaatcatgg

SEQ ID NO: 230799 - DNA, 20 bp, synthetic construct
  source 1..20: mol_type = other DNA
tggctggggcaccaatcatg

SEQ ID NO: 230800 - DNA, 20 bp, synthetic construct
  source 1..20: mol_type = other DNA
gtggctggggcaccaatcat

SEQ ID NO: 230801 - DNA, 20 bp, synthetic construct
  source 1..20: mol_type = other DNA
tgtggctggggcaccaatca

SEQ ID NO: 230802 - DNA, 20 bp, synthetic construct
  source 1..20: mol_type = other DNA
atgtggctggggcaccaatc

SEQ ID NO: 230803 - DNA, 20 bp, synthetic construct
  source 1..20: mol_type = other DNA
gatgtggctggggcaccaat

SEQ ID NO: 230804 - DNA, 20 bp, synthetic construct
  source 1..20: mol_type = other DNA
agatgtggctggggcaccaa

SEQ ID NO: 230805 - DNA, 20 bp, synthetic construct
  source 1..20: mol_type = other DNA
gagatgtggctggggcacca

SEQ ID NO: 230806 - DNA, 20 bp, synthetic construct
  source 1..20: mol_type = other DNA
agagatgtggctggggcacc

SEQ ID NO: 230807 - DNA, 20 bp, synthetic construct
  source 1..20: mol_type = other DNA
cagagatgtggctggggcac

SEQ ID NO: 230808 - DNA, 20 bp, synthetic construct
  source 1..20: mol_type = other DNA
gcagagatgtggctggggca

SEQ ID NO: 230809 - DNA, 20 bp, synthetic construct
  source 1..20: mol_type = other DNA
agcagagatgtggctggggc

SEQ ID NO: 230810 - DNA, 20 bp, synthetic construct
  source 1..20: mol_type = other DNA
cagcagagatgtggctgggg

SEQ ID NO: 230811 - DNA, 20 bp, synthetic construct
  source 1..20: mol_type = other DNA
acagcagagatgtggctggg

SEQ ID NO: 230812 - DNA, 20 bp, synthetic construct
  source 1..20: mol_type = other DNA
cacagcagagatgtggctgg

SEQ ID NO: 230813 - DNA, 20 bp, synthetic construct
  source 1..20: mol_type = other DNA
tcacagcagagatgtggctg

SEQ ID NO: 230814 - DNA, 20 bp, synthetic construct
  source 1..20: mol_type = other DNA
ctcacagcagagatgtggct

SEQ ID NO: 230815 - DNA, 20 bp, synthetic construct
  source 1..20: mol_type = other DNA
gctcacagcagagatgtggc

SEQ ID NO: 230816 - DNA, 20 bp, synthetic construct
  source 1..20: mol_type = other DNA
ggctcacagcagagatgtgg

SEQ ID NO: 230817 - DNA, 20 bp, synthetic construct
  source 1..20: mol_type = other DNA
gggctcacagcagagatgtg

SEQ ID NO: 230818 - DNA, 20 bp, synthetic construct
  source 1..20: mol_type = other DNA
ggggctcacagcagagatgt

SEQ ID NO: 230819 - DNA, 20 bp, synthetic construct
  source 1..20: mol_type = other DNA
tggggctcacagcagagatg

SEQ ID NO: 230820 - DNA, 20 bp, synthetic construct
  source 1..20: mol_type = other DNA
ctggggctcacagcagagat

SEQ ID NO: 230821 - DNA, 20 bp, synthetic construct
  source 1..20: mol_type = other DNA
tctggggctcacagcagaga

SEQ ID NO: 230822 - DNA, 20 bp, synthetic construct
  source 1..20: mol_type = other DNA
ctctggggctcacagcagag

SEQ ID NO: 230823 - DNA, 20 bp, synthetic construct
  source 1..20: mol_type = other DNA
gctctggggctcacagcaga

SEQ ID NO: 230824 - DNA, 20 bp, synthetic construct
  source 1..20: mol_type = other DNA
ggctctggggctcacagcag

SEQ ID NO: 230825 - DNA, 20 bp, synthetic construct
  source 1..20: mol_type = other DNA
gggctctggggctcacagca

SEQ ID NO: 230826 - DNA, 20 bp, synthetic construct
  source 1..20: mol_type = other DNA
agggctctggggctcacagc

SEQ ID NO: 230827 - DNA, 20 bp, synthetic construct
  source 1..20: mol_type = other DNA
cagggctctggggctcacag

SEQ ID NO: 230828 - DNA, 20 bp, synthetic construct
  source 1..20: mol_type = other DNA
ccagggctctggggctcaca

SEQ ID NO: 230829 - DNA, 20 bp, synthetic construct
  source 1..20: mol_type = other DNA
accagggctctggggctcac

SEQ ID NO: 230830 - DNA, 20 bp, synthetic construct
  source 1..20: mol_type = other DNA
aaccagggctctggggctca

SEQ ID NO: 230831 - DNA, 20 bp, synthetic construct
  source 1..20: mol_type = other DNA
taaccagggctctggggctc

SEQ ID NO: 230832 - DNA, 20 bp, synthetic construct
  source 1..20: mol_type = other DNA
ttaaccagggctctggggct

SEQ ID NO: 230833 - DNA, 20 bp, synthetic construct
  source 1..20: mol_type = other DNA
attaaccagggctctggggc

SEQ ID NO: 230834 - DNA, 20 bp, synthetic construct
  source 1..20: mol_type = other DNA
aattaaccagggctctgggg

SEQ ID NO: 230835 - DNA, 20 bp, synthetic construct
  source 1..20: mol_type = other DNA
taattaaccagggctctggg

SEQ ID NO: 230836 - DNA, 20 bp, synthetic construct
  source 1..20: mol_type = other DNA
ttaattaaccagggctctgg

SEQ ID NO: 230837 - DNA, 20 bp, synthetic construct
  source 1..20: mol_type = other DNA
attaattaaccagggctctg

SEQ ID NO: 230838 - DNA, 20 bp, synthetic construct
  source 1..20: mol_type = other DNA
gattaattaaccagggctct

SEQ ID NO: 230839 - DNA, 20 bp, synthetic construct
  source 1..20: mol_type = other DNA
tgattaattaaccagggctc

SEQ ID NO: 230840 - DNA, 20 bp, synthetic construct
  source 1..20: mol_type = other DNA
atgattaattaaccagggct

SEQ ID NO: 230841 - DNA, 20 bp, synthetic construct
  source 1..20: mol_type = other DNA
gatgattaattaaccagggc

SEQ ID NO: 230842 - DNA, 20 bp, synthetic construct
  source 1..20: mol_type = other DNA
ggatgattaattaaccaggg

SEQ ID NO: 230843 - DNA, 20 bp, synthetic construct
  source 1..20: mol_type = other DNA
tggatgattaattaaccagg

SEQ ID NO: 230844 - DNA, 20 bp, synthetic construct
  source 1..20: mol_type = other DNA
gtggatgattaattaaccag

SEQ ID NO: 230845 - DNA, 20 bp, synthetic construct
  source 1..20: mol_type = other DNA
cgtggatgattaattaacca

SEQ ID NO: 230846 - DNA, 20 bp, synthetic construct
  source 1..20: mol_type = other DNA
acgtggatgattaattaacc

SEQ ID NO: 230847 - DNA, 20 bp, synthetic construct
  source 1..20: mol_type = other DNA
cacgtggatgattaattaac

SEQ ID NO: 230848 - DNA, 20 bp, synthetic construct
  source 1..20: mol_type = other DNA
acacgtggatgattaattaa

SEQ ID NO: 230849 - DNA, 20 bp, synthetic construct
  source 1..20: mol_type = other DNA
aacacgtggatgattaatta

SEQ ID NO: 230850 - DNA, 20 bp, synthetic construct
  source 1..20: mol_type = other DNA
caacacgtggatgattaatt

SEQ ID NO: 230851 - DNA, 20 bp, synthetic construct
  source 1..20: mol_type = other DNA
tcaacacgtggatgattaat

SEQ ID NO: 230852 - DNA, 20 bp, synthetic construct
  source 1..20: mol_type = other DNA
atcaacacgtggatgattaa

SEQ ID NO: 230853 - DNA, 20 bp, synthetic construct
  source 1..20: mol_type = other DNA
catcaacacgtggatgatta

SEQ ID NO: 230854 - DNA, 20 bp, synthetic construct
  source 1..20: mol_type = other DNA
ccatcaacacgtggatgatt

SEQ ID NO: 230855 - DNA, 20 bp, synthetic construct
  source 1..20: mol_type = other DNA
cccatcaacacgtggatgat

SEQ ID NO: 230856 - DNA, 20 bp, synthetic construct
  source 1..20: mol_type = other DNA
ccccatcaacacgtggatga

SEQ ID NO: 230857 - DNA, 20 bp, synthetic construct
  source 1..20: mol_type = other DNA
tccccatcaacacgtggatg

SEQ ID NO: 230858 - DNA, 20 bp, synthetic construct
  source 1..20: mol_type = other DNA
ctccccatcaacacgtggat

SEQ ID NO: 230859 - DNA, 20 bp, synthetic construct
  source 1..20: mol_type = other DNA
tctccccatcaacacgtgga

SEQ ID NO: 230860 - DNA, 20 bp, synthetic construct
  source 1..20: mol_type = other DNA
ctctccccatcaacacgtgg

SEQ ID NO: 230861 - DNA, 20 bp, synthetic construct
  source 1..20: mol_type = other DNA
cctctccccatcaacacgtg

SEQ ID NO: 230862 - DNA, 20 bp, synthetic construct
  source 1..20: mol_type = other DNA
gcctctccccatcaacacgt

SEQ ID NO: 230863 - DNA, 20 bp, synthetic construct
  source 1..20: mol_type = other DNA
ggcctctccccatcaacacg

SEQ ID NO: 230864 - DNA, 20 bp, synthetic construct
  source 1..20: mol_type = other DNA
gggcctctccccatcaacac

SEQ ID NO: 230865 - DNA, 20 bp, synthetic construct
  source 1..20: mol_type = other DNA
tgggcctctccccatcaaca

SEQ ID NO: 230866 - DNA, 20 bp, synthetic construct
  source 1..20: mol_type = other DNA
atgggcctctccccatcaac

SEQ ID NO: 230867 - DNA, 20 bp, synthetic construct
  source 1..20: mol_type = other DNA
aatgggcctctccccatcaa

SEQ ID NO: 230868 - DNA, 20 bp, synthetic construct
  source 1..20: mol_type = other DNA
gaatgggcctctccccatca

SEQ ID NO: 230869 - DNA, 20 bp, synthetic construct
  source 1..20: mol_type = other DNA
tgaatgggcctctccccatc

SEQ ID NO: 230870 - DNA, 20 bp, synthetic construct
  source 1..20: mol_type = other DNA
gtgaatgggcctctccccat

SEQ ID NO: 230871 - DNA, 20 bp, synthetic construct
  source 1..20: mol_type = other DNA
tgtgaatgggcctctcccca

SEQ ID NO: 230872 - DNA, 20 bp, synthetic construct
  source 1..20: mol_type = other DNA
ttgtgaatgggcctctcccc

SEQ ID NO: 230873 - DNA, 20 bp, synthetic construct
  source 1..20: mol_type = other DNA
tttgtgaatgggcctctccc

SEQ ID NO: 230874 - DNA, 20 bp, synthetic construct
  source 1..20: mol_type = other DNA
ttttgtgaatgggcctctcc

SEQ ID NO: 230875 - DNA, 20 bp, synthetic construct
  source 1..20: mol_type = other DNA
cttttgtgaatgggcctctc

SEQ ID NO: 230876 - DNA, 20 bp, synthetic construct
  source 1..20: mol_type = other DNA
gcttttgtgaatgggcctct

SEQ ID NO: 230877 - DNA, 20 bp, synthetic construct
  source 1..20: mol_type = other DNA
cgcttttgtgaatgggcctc

SEQ ID NO: 230878 - DNA, 20 bp, synthetic construct
  source 1..20: mol_type = other DNA
tcgcttttgtgaatgggcct

SEQ ID NO: 230879 - DNA, 20 bp, synthetic construct
  source 1..20: mol_type = other DNA
gtcgcttttgtgaatgggcc

SEQ ID NO: 230880 - DNA, 20 bp, synthetic construct
  source 1..20: mol_type = other DNA
tgtcgcttttgtgaatgggc

SEQ ID NO: 230881 - DNA, 20 bp, synthetic construct
  source 1..20: mol_type = other DNA
atgtcgcttttgtgaatggg

SEQ ID NO: 230882 - DNA, 20 bp, synthetic construct
  source 1..20: mol_type = other DNA
tatgtcgcttttgtgaatgg

SEQ ID NO: 230883 - DNA, 20 bp, synthetic construct
  source 1..20: mol_type = other DNA
ttatgtcgcttttgtgaatg

SEQ ID NO: 230884 - DNA, 20 bp, synthetic construct
  source 1..20: mol_type = other DNA
tttatgtcgcttttgtgaat

SEQ ID NO: 230885 - DNA, 20 bp, synthetic construct
  source 1..20: mol_type = other DNA
ctttatgtcgcttttgtgaa

SEQ ID NO: 230886 - DNA, 20 bp, synthetic construct
  source 1..20: mol_type = other DNA
gctttatgtcgcttttgtga

SEQ ID NO: 230887 - DNA, 20 bp, synthetic construct
  source 1..20: mol_type = other DNA
ggctttatgtcgcttttgtg

SEQ ID NO: 230888 - DNA, 20 bp, synthetic construct
  source 1..20: mol_type = other DNA
gggctttatgtcgcttttgt

SEQ ID NO: 230889 - DNA, 20 bp, synthetic construct
  source 1..20: mol_type = other DNA
tgggctttatgtcgcttttg

SEQ ID NO: 230890 - DNA, 20 bp, synthetic construct
  source 1..20: mol_type = other DNA
ctgggctttatgtcgctttt

SEQ ID NO: 230891 - DNA, 20 bp, synthetic construct
  source 1..20: mol_type = other DNA
cctgggctttatgtcgcttt

SEQ ID NO: 230892 - DNA, 20 bp, synthetic construct
  source 1..20: mol_type = other DNA
ccctgggctttatgtcgctt

SEQ ID NO: 230893 - DNA, 20 bp, synthetic construct
  source 1..20: mol_type = other DNA
tccctgggctttatgtcgct

SEQ ID NO: 230894 - DNA, 20 bp, synthetic construct
  source 1..20: mol_type = other DNA
ctccctgggctttatgtcgc

SEQ ID NO: 230895 - DNA, 20 bp, synthetic construct
  source 1..20: mol_type = other DNA
tctccctgggctttatgtcg

SEQ ID NO: 230896 - DNA, 20 bp, synthetic construct
  source 1..20: mol_type = other DNA
gtctccctgggctttatgtc

SEQ ID NO: 230897 - DNA, 20 bp, synthetic construct
  source 1..20: mol_type = other DNA
cgtctccctgggctttatgt

SEQ ID NO: 230898 - DNA, 20 bp, synthetic construct
  source 1..20: mol_type = other DNA
acgtctccctgggctttatg

SEQ ID NO: 230899 - DNA, 20 bp, synthetic construct
  source 1..20: mol_type = other DNA
cacgtctccctgggctttat

SEQ ID NO: 230900 - DNA, 20 bp, synthetic construct
  source 1..20: mol_type = other DNA
ccacgtctccctgggcttta

SEQ ID NO: 230901 - DNA, 20 bp, synthetic construct
  source 1..20: mol_type = other DNA
gccacgtctccctgggcttt

SEQ ID NO: 230902 - DNA, 20 bp, synthetic construct
  source 1..20: mol_type = other DNA
ggccacgtctccctgggctt

SEQ ID NO: 230903 - DNA, 20 bp, synthetic construct
  source 1..20: mol_type = other DNA
cggccacgtctccctgggct

SEQ ID NO: 230904 - DNA, 20 bp, synthetic construct
  source 1..20: mol_type = other DNA
acggccacgtctccctgggc

SEQ ID NO: 230905 - DNA, 20 bp, synthetic construct
  source 1..20: mol_type = other DNA
cacggccacgtctccctggg

SEQ ID NO: 230906 - DNA, 20 bp, synthetic construct
  source 1..20: mol_type = other DNA
ccacggccacgtctccctgg

SEQ ID NO: 230907 - DNA, 20 bp, synthetic construct
  source 1..20: mol_type = other DNA
gccacggccacgtctccctg

SEQ ID NO: 230908 - DNA, 20 bp, synthetic construct
  source 1..20: mol_type = other DNA
tgccacggccacgtctccct

SEQ ID NO: 230909 - DNA, 20 bp, synthetic construct
  source 1..20: mol_type = other DNA
ttgccacggccacgtctccc

SEQ ID NO: 230910 - DNA, 20 bp, synthetic construct
  source 1..20: mol_type = other DNA
cttgccacggccacgtctcc

SEQ ID NO: 230911 - DNA, 20 bp, synthetic construct
  source 1..20: mol_type = other DNA
tcttgccacggccacgtctc

SEQ ID NO: 230912 - DNA, 20 bp, synthetic construct
  source 1..20: mol_type = other DNA
ttcttgccacggccacgtct

SEQ ID NO: 230913 - DNA, 20 bp, synthetic construct
  source 1..20: mol_type = other DNA
cttcttgccacggccacgtc

SEQ ID NO: 230914 - DNA, 20 bp, synthetic construct
  source 1..20: mol_type = other DNA
ccttcttgccacggccacgt

SEQ ID NO: 230915 - DNA, 20 bp, synthetic construct
  source 1..20: mol_type = other DNA
cccttcttgccacggccacg

SEQ ID NO: 230916 - DNA, 20 bp, synthetic construct
  source 1..20: mol_type = other DNA
acccttcttgccacggccac

SEQ ID NO: 230917 - DNA, 20 bp, synthetic construct
  source 1..20: mol_type = other DNA
cacccttcttgccacggcca

SEQ ID NO: 230918 - DNA, 20 bp, synthetic construct
  source 1..20: mol_type = other DNA
acacccttcttgccacggcc

SEQ ID NO: 230919 - DNA, 20 bp, synthetic construct
  source 1..20: mol_type = other DNA
cacacccttcttgccacggc

SEQ ID NO: 230920 - DNA, 20 bp, synthetic construct
  source 1..20: mol_type = other DNA
ccacacccttcttgccacgg

SEQ ID NO: 230921 - DNA, 20 bp, synthetic construct
  source 1..20: mol_type = other DNA
cccacacccttcttgccacg

SEQ ID NO: 230922 - DNA, 20 bp, synthetic construct
  source 1..20: mol_type = other DNA
tcccacacccttcttgccac

SEQ ID NO: 230923 - DNA, 20 bp, synthetic construct
  source 1..20: mol_type = other DNA
gtcccacacccttcttgcca

SEQ ID NO: 230924 - DNA, 20 bp, synthetic construct
  source 1..20: mol_type = other DNA
agtcccacacccttcttgcc

SEQ ID NO: 230925 - DNA, 20 bp, synthetic construct
  source 1..20: mol_type = other DNA
tagtcccacacccttcttgc

SEQ ID NO: 230926 - DNA, 20 bp, synthetic construct
  source 1..20: mol_type = other DNA
gtagtcccacacccttcttg

SEQ ID NO: 230927 - DNA, 20 bp, synthetic construct
  source 1..20: mol_type = other DNA
tgtagtcccacacccttctt

SEQ ID NO: 230928 - DNA, 20 bp, synthetic construct
  source 1..20: mol_type = other DNA
atgtagtcccacacccttct

SEQ ID NO: 230929 - DNA, 20 bp, synthetic construct
  source 1..20: mol_type = other DNA
aatgtagtcccacacccttc

SEQ ID NO: 230930 - DNA, 20 bp, synthetic construct
  source 1..20: mol_type = other DNA
gaatgtagtcccacaccctt

SEQ ID NO: 230931 - DNA, 20 bp, synthetic construct
  source 1..20: mol_type = other DNA
ggaatgtagtcccacaccct

SEQ ID NO: 230932 - DNA, 20 bp, synthetic construct
  source 1..20: mol_type = other DNA
cggaatgtagtcccacaccc

SEQ ID NO: 230933 - DNA, 20 bp, synthetic construct
  source 1..20: mol_type = other DNA
gcggaatgtagtcccacacc

SEQ ID NO: 230934 - DNA, 20 bp, synthetic construct
  source 1..20: mol_type = other DNA
ggcggaatgtagtcccacac

SEQ ID NO: 230935 - DNA, 20 bp, synthetic construct
  source 1..20: mol_type = other DNA
gggcggaatgtagtcccaca

SEQ ID NO: 230936 - DNA, 20 bp, synthetic construct
  source 1..20: mol_type = other DNA
ggggcggaatgtagtcccac

SEQ ID NO: 230937 - DNA, 20 bp, synthetic construct
  source 1..20: mol_type = other DNA
gggggcggaatgtagtccca

SEQ ID NO: 230938 - DNA, 20 bp, synthetic construct
  source 1..20: mol_type = other DNA
tgggggcggaatgtagtccc

SEQ ID NO: 230939 - DNA, 20 bp, synthetic construct
  source 1..20: mol_type = other DNA
ttgggggcggaatgtagtcc

SEQ ID NO: 230940 - DNA, 20 bp, synthetic construct
  source 1..20: mol_type = other DNA
gttgggggcggaatgtagtc

SEQ ID NO: 230941 - DNA, 20 bp, synthetic construct
  source 1..20: mol_type = other DNA
agttgggggcggaatgtagt

SEQ ID NO: 230942 - DNA, 20 bp, synthetic construct
  source 1..20: mol_type = other DNA
cagttgggggcggaatgtag

SEQ ID NO: 230943 - DNA, 20 bp, synthetic construct
  source 1..20: mol_type = other DNA
tcagttgggggcggaatgta

SEQ ID NO: 230944 - DNA, 20 bp, synthetic construct
  source 1..20: mol_type = other DNA
ctcagttgggggcggaatgt

SEQ ID NO: 230945 - DNA, 20 bp, synthetic construct
  source 1..20: mol_type = other DNA
tctcagttgggggcggaatg

SEQ ID NO: 230946 - DNA, 20 bp, synthetic construct
  source 1..20: mol_type = other DNA
ctctcagttgggggcggaat

SEQ ID NO: 230947 - DNA, 20 bp, synthetic construct
  source 1..20: mol_type = other DNA
tctctcagttgggggcggaa

SEQ ID NO: 230948 - DNA, 20 bp, synthetic construct
  source 1..20: mol_type = other DNA
atctctcagttgggggcgga

SEQ ID NO: 230949 - DNA, 20 bp, synthetic construct
  source 1..20: mol_type = other DNA
aatctctcagttgggggcgg

SEQ ID NO: 230950 - DNA, 20 bp, synthetic construct
  source 1..20: mol_type = other DNA
gaatctctcagttgggggcg

SEQ ID NO: 230951 - DNA, 20 bp, synthetic construct
  source 1..20: mol_type = other DNA
tgaatctctcagttgggggc

SEQ ID NO: 230952 - DNA, 20 bp, synthetic construct
  source 1..20: mol_type = other DNA
ctgaatctctcagttggggg

SEQ ID NO: 230953 - DNA, 20 bp, synthetic construct
  source 1..20: mol_type = other DNA
tctgaatctctcagttgggg

SEQ ID NO: 230954 - DNA, 20 bp, synthetic construct
  source 1..20: mol_type = other DNA
ttctgaatctctcagttggg

SEQ ID NO: 230955 - DNA, 20 bp, synthetic construct
  source 1..20: mol_type = other DNA
tttctgaatctctcagttgg

SEQ ID NO: 230956 - DNA, 20 bp, synthetic construct
  source 1..20: mol_type = other DNA
gtttctgaatctctcagttg

SEQ ID NO: 230957 - DNA, 20 bp, synthetic construct
  source 1..20: mol_type = other DNA
ggtttctgaatctctcagtt

SEQ ID NO: 230958 - DNA, 20 bp, synthetic construct
  source 1..20: mol_type = other DNA
tggtttctgaatctctcagt

SEQ ID NO: 230959 - DNA, 20 bp, synthetic construct
  source 1..20: mol_type = other DNA
ctggtttctgaatctctcag

SEQ ID NO: 230960 - DNA, 20 bp, synthetic construct
  source 1..20: mol_type = other DNA
tctggtttctgaatctctca

SEQ ID NO: 230961 - DNA, 20 bp, synthetic construct
  source 1..20: mol_type = other DNA
ttctggtttctgaatctctc

SEQ ID NO: 230962 - DNA, 20 bp, synthetic construct
  source 1..20: mol_type = other DNA
tttctggtttctgaatctct

SEQ ID NO: 230963 - DNA, 20 bp, synthetic construct
  source 1..20: mol_type = other DNA
ttttctggtttctgaatctc

SEQ ID NO: 230964 - DNA, 20 bp, synthetic construct
  source 1..20: mol_type = other DNA
tttttctggtttctgaatct

SEQ ID NO: 230965 - DNA, 20 bp, synthetic construct
  source 1..20: mol_type = other DNA
ttttttctggtttctgaatc

SEQ ID NO: 230966 - DNA, 20 bp, synthetic construct
  source 1..20: mol_type = other DNA
tttttttctggtttctgaat

SEQ ID NO: 230967 - DNA, 20 bp, synthetic construct
  source 1..20: mol_type = other DNA
atttttttctggtttctgaa

SEQ ID NO: 230968 - DNA, 20 bp, synthetic construct
  source 1..20: mol_type = other DNA
catttttttctggtttctga

SEQ ID NO: 230969 - DNA, 20 bp, synthetic construct
  source 1..20: mol_type = other DNA
ccatttttttctggtttctg

SEQ ID NO: 230970 - DNA, 20 bp, synthetic construct
  source 1..20: mol_type = other DNA
tccatttttttctggtttct

SEQ ID NO: 230971 - DNA, 20 bp, synthetic construct
  source 1..20: mol_type = other DNA
ttccatttttttctggtttc

SEQ ID NO: 230972 - DNA, 20 bp, synthetic construct
  source 1..20: mol_type = other DNA
tttccatttttttctggttt

SEQ ID NO: 230973 - DNA, 20 bp, synthetic construct
  source 1..20: mol_type = other DNA
ttttccatttttttctggtt

SEQ ID NO: 230974 - DNA, 20 bp, synthetic construct
  source 1..20: mol_type = other DNA
tttttccatttttttctggt

SEQ ID NO: 230975 - DNA, 20 bp, synthetic construct
  source 1..20: mol_type = other DNA
gtttttccatttttttctgg

SEQ ID NO: 230976 - DNA, 20 bp, synthetic construct
  source 1..20: mol_type = other DNA
tgtttttccatttttttctg

SEQ ID NO: 230977 - DNA, 20 bp, synthetic construct
  source 1..20: mol_type = other DNA
atgtttttccatttttttct

SEQ ID NO: 230978 - DNA, 20 bp, synthetic construct
  source 1..20: mol_type = other DNA
tatgtttttccatttttttc

SEQ ID NO: 230979 - DNA, 20 bp, synthetic construct
  source 1..20: mol_type = other DNA
gtatgtttttccattttttt

SEQ ID NO: 230980 - DNA, 20 bp, synthetic construct
  source 1..20: mol_type = other DNA
agtatgtttttccatttttt

SEQ ID NO: 230981 - DNA, 20 bp, synthetic construct
  source 1..20: mol_type = other DNA
cagtatgtttttccattttt

SEQ ID NO: 230982 - DNA, 20 bp, synthetic construct
  source 1..20: mol_type = other DNA
acagtatgtttttccatttt

SEQ ID NO: 230983 - DNA, 20 bp, synthetic construct
  source 1..20: mol_type = other DNA
cacagtatgtttttccattt

SEQ ID NO: 230984 - DNA, 20 bp, synthetic construct
  source 1..20: mol_type = other DNA
gcacagtatgtttttccatt

SEQ ID NO: 230985 - DNA, 20 bp, synthetic construct
  source 1..20: mol_type = other DNA
agcacagtatgtttttccat

SEQ ID NO: 230986 - DNA, 20 bp, synthetic construct
  source 1..20: mol_type = other DNA
gagcacagtatgtttttcca

SEQ ID NO: 230987 - DNA, 20 bp, synthetic construct
  source 1..20: mol_type = other DNA
agagcacagtatgtttttcc

SEQ ID NO: 230988 - DNA, 20 bp, synthetic construct
  source 1..20: mol_type = other DNA
aagagcacagtatgtttttc

SEQ ID NO: 230989 - DNA, 20 bp, synthetic construct
  source 1..20: mol_type = other DNA
caagagcacagtatgttttt

SEQ ID NO: 230990 - DNA, 20 bp, synthetic construct
  source 1..20: mol_type = other DNA
ccaagagcacagtatgtttt

SEQ ID NO: 230991 - DNA, 20 bp, synthetic construct
  source 1..20: mol_type = other DNA
cccaagagcacagtatgttt

SEQ ID NO: 230992 - DNA, 20 bp, synthetic construct
  source 1..20: mol_type = other DNA
acccaagagcacagtatgtt

SEQ ID NO: 230993 - DNA, 20 bp, synthetic construct
  source 1..20: mol_type = other DNA
cacccaagagcacagtatgt

SEQ ID NO: 230994 - DNA, 20 bp, synthetic construct
  source 1..20: mol_type = other DNA
ccacccaagagcacagtatg

SEQ ID NO: 230995 - DNA, 20 bp, synthetic construct
  source 1..20: mol_type = other DNA
cccacccaagagcacagtat

SEQ ID NO: 230996 - DNA, 20 bp, synthetic construct
  source 1..20: mol_type = other DNA
tcccacccaagagcacagta

SEQ ID NO: 230997 - DNA, 20 bp, synthetic construct
  source 1..20: mol_type = other DNA
ttcccacccaagagcacagt

SEQ ID NO: 230998 - DNA, 20 bp, synthetic construct
  source 1..20: mol_type = other DNA
tttcccacccaagagcacag

SEQ ID NO: 230999 - DNA, 20 bp, synthetic construct
  source 1..20: mol_type = other DNA
ttttcccacccaagagcaca

SEQ ID NO: 231000 - DNA, 20 bp, synthetic construct
  source 1..20: mol_type = other DNA
gttttcccacccaagagcac

SEQ ID NO: 231001 - DNA, 20 bp, synthetic construct
  source 1..20: mol_type = other DNA
agttttcccacccaagagca

SEQ ID NO: 231002 - DNA, 20 bp, synthetic construct
  source 1..20: mol_type = other DNA
tagttttcccacccaagagc

SEQ ID NO: 231003 - DNA, 20 bp, synthetic construct
  source 1..20: mol_type = other DNA
ttagttttcccacccaagag

SEQ ID NO: 231004 - DNA, 20 bp, synthetic construct
  source 1..20: mol_type = other DNA
tttagttttcccacccaaga

SEQ ID NO: 231005 - DNA, 20 bp, synthetic construct
  source 1..20: mol_type = other DNA
atttagttttcccacccaag

SEQ ID NO: 231006 - DNA, 20 bp, synthetic construct
  source 1..20: mol_type = other DNA
tatttagttttcccacccaa

SEQ ID NO: 231007 - DNA, 20 bp, synthetic construct
  source 1..20: mol_type = other DNA
atatttagttttcccaccca

SEQ ID NO: 231008 - DNA, 20 bp, synthetic construct
  source 1..20: mol_type = other DNA
gatatttagttttcccaccc

SEQ ID NO: 231009 - DNA, 20 bp, synthetic construct
  source 1..20: mol_type = other DNA
tgatatttagttttcccacc

SEQ ID NO: 231010 - DNA, 20 bp, synthetic construct
  source 1..20: mol_type = other DNA
atgatatttagttttcccac

SEQ ID NO: 231011 - DNA, 20 bp, synthetic construct
  source 1..20: mol_type = other DNA
catgatatttagttttccca

SEQ ID NO: 231012 - DNA, 20 bp, synthetic construct
  source 1..20: mol_type = other DNA
tcatgatatttagttttccc

SEQ ID NO: 231013 - DNA, 20 bp, synthetic construct
  source 1..20: mol_type = other DNA
ttcatgatatttagttttcc

SEQ ID NO: 231014 - DNA, 20 bp, synthetic construct
  source 1..20: mol_type = other DNA
cttcatgatatttagttttc

SEQ ID NO: 231015 - DNA, 20 bp, synthetic construct
  source 1..20: mol_type = other DNA
ccttcatgatatttagtttt

SEQ ID NO: 231016 - DNA, 20 bp, synthetic construct
  source 1..20: mol_type = other DNA
cccttcatgatatttagttt

SEQ ID NO: 231017 - DNA, 20 bp, synthetic construct
  source 1..20: mol_type = other DNA
tcccttcatgatatttagtt

SEQ ID NO: 231018 - DNA, 20 bp, synthetic construct
  source 1..20: mol_type = other DNA
ctcccttcatgatatttagt

SEQ ID NO: 231019 - DNA, 20 bp, synthetic construct
  source 1..20: mol_type = other DNA
gctcccttcatgatatttag

SEQ ID NO: 231020 - DNA, 20 bp, synthetic construct
  source 1..20: mol_type = other DNA
tgctcccttcatgatattta

SEQ ID NO: 231021 - DNA, 20 bp, synthetic construct
  source 1..20: mol_type = other DNA
ttgctcccttcatgatattt

SEQ ID NO: 231022 - DNA, 20 bp, synthetic construct
  source 1..20: mol_type = other DNA
attgctcccttcatgatatt

SEQ ID NO: 231023 - DNA, 20 bp, synthetic construct
  source 1..20: mol_type = other DNA
aattgctcccttcatgatat

SEQ ID NO: 231024 - DNA, 20 bp, synthetic construct
  source 1..20: mol_type = other DNA
aaattgctcccttcatgata

SEQ ID NO: 231025 - DNA, 20 bp, synthetic construct
  source 1..20: mol_type = other DNA
aaaattgctcccttcatgat

SEQ ID NO: 231026 - DNA, 20 bp, synthetic construct
  source 1..20: mol_type = other DNA
aaaaattgctcccttcatga

SEQ ID NO: 231027 - DNA, 20 bp, synthetic construct
  source 1..20: mol_type = other DNA
taaaaattgctcccttcatg

SEQ ID NO: 231028 - DNA, 20 bp, synthetic construct
  source 1..20: mol_type = other DNA
ataaaaattgctcccttcat

SEQ ID NO: 231029 - DNA, 20 bp, synthetic construct
  source 1..20: mol_type = other DNA
tataaaaattgctcccttca

SEQ ID NO: 231030 - DNA, 20 bp, synthetic construct
  source 1..20: mol_type = other DNA
ctataaaaattgctcccttc

SEQ ID NO: 231031 - DNA, 20 bp, synthetic construct
  source 1..20: mol_type = other DNA
actataaaaattgctccctt

SEQ ID NO: 231032 - DNA, 20 bp, synthetic construct
  source 1..20: mol_type = other DNA
aactataaaaattgctccct

SEQ ID NO: 231033 - DNA, 20 bp, synthetic construct
  source 1..20: mol_type = other DNA
aaactataaaaattgctccc

SEQ ID NO: 231034 - DNA, 20 bp, synthetic construct
  source 1..20: mol_type = other DNA
aaaactataaaaattgctcc

SEQ ID NO: 231035 - DNA, 20 bp, synthetic construct
  source 1..20: mol_type = other DNA
caaaactataaaaattgctc

SEQ ID NO: 231036 - DNA, 20 bp, synthetic construct
  source 1..20: mol_type = other DNA
ccaaaactataaaaattgct

SEQ ID NO: 231037 - DNA, 20 bp, synthetic construct
  source 1..20: mol_type = other DNA
gccaaaactataaaaattgc

SEQ ID NO: 231038 - DNA, 20 bp, synthetic construct
  source 1..20: mol_type = other DNA
ggccaaaactataaaaattg

SEQ ID NO: 231039 - DNA, 20 bp, synthetic construct
  source 1..20: mol_type = other DNA
aggccaaaactataaaaatt

SEQ ID NO: 231040 - DNA, 20 bp, synthetic construct
  source 1..20: mol_type = other DNA
taggccaaaactataaaaat

SEQ ID NO: 231041 - DNA, 20 bp, synthetic construct
  source 1..20: mol_type = other DNA
ataggccaaaactataaaaa

SEQ ID NO: 231042 - DNA, 20 bp, synthetic construct
  source 1..20: mol_type = other DNA
tataggccaaaactataaaa

SEQ ID NO: 231043 - DNA, 20 bp, synthetic construct
  source 1..20: mol_type = other DNA
ttataggccaaaactataaa

SEQ ID NO: 231044 - DNA, 20 bp, synthetic construct
  source 1..20: mol_type = other DNA
attataggccaaaactataa

SEQ ID NO: 231045 - DNA, 20 bp, synthetic construct
  source 1..20: mol_type = other DNA
tattataggccaaaactata

SEQ ID NO: 231046 - DNA, 20 bp, synthetic construct
  source 1..20: mol_type = other DNA
gtattataggccaaaactat

SEQ ID NO: 231047 - DNA, 20 bp, synthetic construct
  source 1..20: mol_type = other DNA
tgtattataggccaaaacta

SEQ ID NO: 231048 - DNA, 20 bp, synthetic construct
  source 1..20: mol_type = other DNA
ttgtattataggccaaaact

SEQ ID NO: 231049 - DNA, 20 bp, synthetic construct
  source 1..20: mol_type = other DNA
attgtattataggccaaaac

SEQ ID NO: 231050 - DNA, 20 bp, synthetic construct
  source 1..20: mol_type = other DNA
aattgtattataggccaaaa

SEQ ID NO: 231051 - DNA, 20 bp, synthetic construct
  source 1..20: mol_type = other DNA
gaattgtattataggccaaa

SEQ ID NO: 231052 - DNA, 20 bp, synthetic construct
  source 1..20: mol_type = other DNA
ggaattgtattataggccaa

SEQ ID NO: 231053 - DNA, 20 bp, synthetic construct
  source 1..20: mol_type = other DNA
tggaattgtattataggcca

SEQ ID NO: 231054 - DNA, 20 bp, synthetic construct
  source 1..20: mol_type = other DNA
ctggaattgtattataggcc

SEQ ID NO: 231055 - DNA, 20 bp, synthetic construct
  source 1..20: mol_type = other DNA
gctggaattgtattataggc

SEQ ID NO: 231056 - DNA, 20 bp, synthetic construct
  source 1..20: mol_type = other DNA
ggctggaattgtattatagg

SEQ ID NO: 231057 - DNA, 20 bp, synthetic construct
  source 1..20: mol_type = other DNA
cggctggaattgtattatag

SEQ ID NO: 231058 - DNA, 20 bp, synthetic construct
  source 1..20: mol_type = other DNA
tcggctggaattgtattata

SEQ ID NO: 231059 - DNA, 20 bp, synthetic construct
  source 1..20: mol_type = other DNA
ttcggctggaattgtattat

SEQ ID NO: 231060 - DNA, 20 bp, synthetic construct
  source 1..20: mol_type = other DNA
tttcggctggaattgtatta

SEQ ID NO: 231061 - DNA, 20 bp, synthetic construct
  source 1..20: mol_type = other DNA
atttcggctggaattgtatt

SEQ ID NO: 231062 - DNA, 20 bp, synthetic construct
  source 1..20: mol_type = other DNA
gatttcggctggaattgtat

SEQ ID NO: 231063 - DNA, 20 bp, synthetic construct
  source 1..20: mol_type = other DNA
ggatttcggctggaattgta

SEQ ID NO: 231064 - DNA, 20 bp, synthetic construct
  source 1..20: mol_type = other DNA
gggatttcggctggaattgt

SEQ ID NO: 231065 - DNA, 20 bp, synthetic construct
  source 1..20: mol_type = other DNA
tgggatttcggctggaattg

SEQ ID NO: 231066 - DNA, 20 bp, synthetic construct
  source 1..20: mol_type = other DNA
ctgggatttcggctggaatt

SEQ ID NO: 231067 - DNA, 20 bp, synthetic construct
  source 1..20: mol_type = other DNA
actgggatttcggctggaat

SEQ ID NO: 231068 - DNA, 20 bp, synthetic construct
  source 1..20: mol_type = other DNA
cactgggatttcggctggaa

SEQ ID NO: 231069 - DNA, 20 bp, synthetic construct
  source 1..20: mol_type = other DNA
ccactgggatttcggctgga

SEQ ID NO: 231070 - DNA, 20 bp, synthetic construct
  source 1..20: mol_type = other DNA
tccactgggatttcggctgg

SEQ ID NO: 231071 - DNA, 20 bp, synthetic construct
  source 1..20: mol_type = other DNA
ttccactgggatttcggctg

SEQ ID NO: 231072 - DNA, 20 bp, synthetic construct
  source 1..20: mol_type = other DNA
gttccactgggatttcggct

SEQ ID NO: 231073 - DNA, 20 bp, synthetic construct
  source 1..20: mol_type = other DNA
agttccactgggatttcggc

SEQ ID NO: 231074 - DNA, 20 bp, synthetic construct
  source 1..20: mol_type = other DNA
aagttccactgggatttcgg

SEQ ID NO: 231075 - DNA, 20 bp, synthetic construct
  source 1..20: mol_type = other DNA
aaagttccactgggatttcg

SEQ ID NO: 231076 - DNA, 20 bp, synthetic construct
  source 1..20: mol_type = other DNA
caaagttccactgggatttc

SEQ ID NO: 231077 - DNA, 20 bp, synthetic construct
  source 1..20: mol_type = other DNA
tcaaagttccactgggattt

SEQ ID NO: 231078 - DNA, 20 bp, synthetic construct
  source 1..20: mol_type = other DNA
ctcaaagttccactgggatt

SEQ ID NO: 231079 - DNA, 20 bp, synthetic construct
  source 1..20: mol_type = other DNA
tctcaaagttccactgggat

SEQ ID NO: 231080 - DNA, 20 bp, synthetic construct
  source 1..20: mol_type = other DNA
ttctcaaagttccactggga

SEQ ID NO: 231081 - DNA, 20 bp, synthetic construct
  source 1..20: mol_type = other DNA
attctcaaagttccactggg

SEQ ID NO: 231082 - DNA, 20 bp, synthetic construct
  source 1..20: mol_type = other DNA
aattctcaaagttccactgg

SEQ ID NO: 231083 - DNA, 20 bp, synthetic construct
  source 1..20: mol_type = other DNA
aaattctcaaagttccactg

SEQ ID NO: 231084 - DNA, 20 bp, synthetic construct
  source 1..20: mol_type = other DNA
caaattctcaaagttccact

SEQ ID NO: 231085 - DNA, 20 bp, synthetic construct
  source 1..20: mol_type = other DNA
gcaaattctcaaagttccac

SEQ ID NO: 231086 - DNA, 20 bp, synthetic construct
  source 1..20: mol_type = other DNA
tgcaaattctcaaagttcca

SEQ ID NO: 231087 - DNA, 20 bp, synthetic construct
  source 1..20: mol_type = other DNA
ctgcaaattctcaaagttcc

SEQ ID NO: 231088 - DNA, 20 bp, synthetic construct
  source 1..20: mol_type = other DNA
cctgcaaattctcaaagttc

SEQ ID NO: 231089 - DNA, 20 bp, synthetic construct
  source 1..20: mol_type = other DNA
tcctgcaaattctcaaagtt

SEQ ID NO: 231090 - DNA, 20 bp, synthetic construct
  source 1..20: mol_type = other DNA
ttcctgcaaattctcaaagt

SEQ ID NO: 231091 - DNA, 20 bp, synthetic construct
  source 1..20: mol_type = other DNA
tttcctgcaaattctcaaag

SEQ ID NO: 231092 - DNA, 20 bp, synthetic construct
  source 1..20: mol_type = other DNA
ttttcctgcaaattctcaaa

SEQ ID NO: 231093 - DNA, 20 bp, synthetic construct
  source 1..20: mol_type = other DNA
tttttcctgcaaattctcaa

SEQ ID NO: 231094 - DNA, 20 bp, synthetic construct
  source 1..20: mol_type = other DNA
ttttttcctgcaaattctca

SEQ ID NO: 231095 - DNA, 20 bp, synthetic construct
  source 1..20: mol_type = other DNA
tttttttcctgcaaattctc

SEQ ID NO: 231096 - DNA, 20 bp, synthetic construct
  source 1..20: mol_type = other DNA
ttttttttcctgcaaattct

SEQ ID NO: 231097 - DNA, 20 bp, synthetic construct
  source 1..20: mol_type = other DNA
tttttttttcctgcaaattc

SEQ ID NO: 231098 - DNA, 20 bp, synthetic construct
  source 1..20: mol_type = other DNA
ttttttttttcctgcaaatt

SEQ ID NO: 231099 - DNA, 20 bp, synthetic construct
  source 1..20: mol_type = other DNA
tttttttttttcctgcaaat

SEQ ID NO: 231100 - DNA, 20 bp, synthetic construct
  source 1..20: mol_type = other DNA
atttttttttttcctgcaaa

SEQ ID NO: 231101 - DNA, 20 bp, synthetic construct
  source 1..20: mol_type = other DNA
catttttttttttcctgcaa

SEQ ID NO: 231102 - DNA, 20 bp, synthetic construct
  source 1..20: mol_type = other DNA
acatttttttttttcctgca

SEQ ID NO: 231103 - DNA, 20 bp, synthetic construct
  source 1..20: mol_type = other DNA
gacatttttttttttcctgc

SEQ ID NO: 231104 - DNA, 20 bp, synthetic construct
  source 1..20: mol_type = other DNA
agacatttttttttttcctg

SEQ ID NO: 231105 - DNA, 20 bp, synthetic construct
  source 1..20: mol_type = other DNA
tagacatttttttttttcct

SEQ ID NO: 231106 - DNA, 20 bp, synthetic construct
  source 1..20: mol_type = other DNA
ttagacatttttttttttcc

SEQ ID NO: 231107 - DNA, 20 bp, synthetic construct
  source 1..20: mol_type = other DNA
tttagacatttttttttttc

SEQ ID NO: 231108 - DNA, 20 bp, synthetic construct
  source 1..20: mol_type = other DNA
ctttagacattttttttttt

SEQ ID NO: 231109 - DNA, 20 bp, synthetic construct
  source 1..20: mol_type = other DNA
actttagacatttttttttt

SEQ ID NO: 231110 - DNA, 20 bp, synthetic construct
  source 1..20: mol_type = other DNA
tactttagacattttttttt

SEQ ID NO: 231111 - DNA, 20 bp, synthetic construct
  source 1..20: mol_type = other DNA
gtactttagacatttttttt

SEQ ID NO: 231112 - DNA, 20 bp, synthetic construct
  source 1..20: mol_type = other DNA
tgtactttagacattttttt

SEQ ID NO: 231113 - DNA, 20 bp, synthetic construct
  source 1..20: mol_type = other DNA
atgtactttagacatttttt

SEQ ID NO: 231114 - DNA, 20 bp, synthetic construct
  source 1..20: mol_type = other DNA
gatgtactttagacattttt

SEQ ID NO: 231115 - DNA, 20 bp, synthetic construct
  source 1..20: mol_type = other DNA
agatgtactttagacatttt

SEQ ID NO: 231116 - DNA, 20 bp, synthetic construct
  source 1..20: mol_type = other DNA
cagatgtactttagacattt

SEQ ID NO: 231117 - DNA, 20 bp, synthetic construct
  source 1..20: mol_type = other DNA
ccagatgtactttagacatt

SEQ ID NO: 231118 - DNA, 20 bp, synthetic construct
  source 1..20: mol_type = other DNA
tccagatgtactttagacat

SEQ ID NO: 231119 - DNA, 20 bp, synthetic construct
  source 1..20: mol_type = other DNA
ttccagatgtactttagaca

SEQ ID NO: 231120 - DNA, 20 bp, synthetic construct
  source 1..20: mol_type = other DNA
cttccagatgtactttagac

SEQ ID NO: 231121 - DNA, 20 bp, synthetic construct
  source 1..20: mol_type = other DNA
tcttccagatgtactttaga

SEQ ID NO: 231122 - DNA, 20 bp, synthetic construct
  source 1..20: mol_type = other DNA
gtcttccagatgtactttag

SEQ ID NO: 231123 - DNA, 20 bp, synthetic construct
  source 1..20: mol_type = other DNA
tgtcttccagatgtacttta

SEQ ID NO: 231124 - DNA, 20 bp, synthetic construct
  source 1..20: mol_type = other DNA
ttgtcttccagatgtacttt

SEQ ID NO: 231125 - DNA, 20 bp, synthetic construct
  source 1..20: mol_type = other DNA
tttgtcttccagatgtactt

SEQ ID NO: 231126 - DNA, 20 bp, synthetic construct
  source 1..20: mol_type = other DNA
gtttgtcttccagatgtact

SEQ ID NO: 231127 - DNA, 20 bp, synthetic construct
  source 1..20: mol_type = other DNA
agtttgtcttccagatgtac

SEQ ID NO: 231128 - DNA, 20 bp, synthetic construct
  source 1..20: mol_type = other DNA
aagtttgtcttccagatgta

SEQ ID NO: 231129 - DNA, 20 bp, synthetic construct
  source 1..20: mol_type = other DNA
taagtttgtcttccagatgt

SEQ ID NO: 231130 - DNA, 20 bp, synthetic construct
  source 1..20: mol_type = other DNA
gtaagtttgtcttccagatg

SEQ ID NO: 231131 - DNA, 20 bp, synthetic construct
  source 1..20: mol_type = other DNA
tgtaagtttgtcttccagat

SEQ ID NO: 231132 - DNA, 20 bp, synthetic construct
  source 1..20: mol_type = other DNA
ttgtaagtttgtcttccaga

SEQ ID NO: 231133 - DNA, 20 bp, synthetic construct
  source 1..20: mol_type = other DNA
cttgtaagtttgtcttccag

SEQ ID NO: 231134 - DNA, 20 bp, synthetic construct
  source 1..20: mol_type = other DNA
tcttgtaagtttgtcttcca

SEQ ID NO: 231135 - DNA, 20 bp, synthetic construct
  source 1..20: mol_type = other DNA
ttcttgtaagtttgtcttcc

SEQ ID NO: 231136 - DNA, 20 bp, synthetic construct
  source 1..20: mol_type = other DNA
cttcttgtaagtttgtcttc

SEQ ID NO: 231137 - DNA, 20 bp, synthetic construct
  source 1..20: mol_type = other DNA
ccttcttgtaagtttgtctt

SEQ ID NO: 231138 - DNA, 20 bp, synthetic construct
  source 1..20: mol_type = other DNA
accttcttgtaagtttgtct

SEQ ID NO: 231139 - DNA, 20 bp, synthetic construct
  source 1..20: mol_type = other DNA
gaccttcttgtaagtttgtc

SEQ ID NO: 231140 - DNA, 20 bp, synthetic construct
  source 1..20: mol_type = other DNA
tgaccttcttgtaagtttgt

SEQ ID NO: 231141 - DNA, 20 bp, synthetic construct
  source 1..20: mol_type = other DNA
ttgaccttcttgtaagtttg

SEQ ID NO: 231142 - DNA, 20 bp, synthetic construct
  source 1..20: mol_type = other DNA
tttgaccttcttgtaagttt

SEQ ID NO: 231143 - DNA, 20 bp, synthetic construct
  source 1..20: mol_type = other DNA
atttgaccttcttgtaagtt

SEQ ID NO: 231144 - DNA, 20 bp, synthetic construct
  source 1..20: mol_type = other DNA
tatttgaccttcttgtaagt

SEQ ID NO: 231145 - DNA, 20 bp, synthetic construct
  source 1..20: mol_type = other DNA
ttatttgaccttcttgtaag

SEQ ID NO: 231146 - DNA, 20 bp, synthetic construct
  source 1..20: mol_type = other DNA
attatttgaccttcttgtaa

SEQ ID NO: 231147 - DNA, 20 bp, synthetic construct
  source 1..20: mol_type = other DNA
aattatttgaccttcttgta

SEQ ID NO: 231148 - DNA, 20 bp, synthetic construct
  source 1..20: mol_type = other DNA
aaattatttgaccttcttgt

SEQ ID NO: 231149 - DNA, 20 bp, synthetic construct
  source 1..20: mol_type = other DNA
aaaattatttgaccttcttg

SEQ ID NO: 231150 - DNA, 20 bp, synthetic construct
  source 1..20: mol_type = other DNA
caaaattatttgaccttctt

SEQ ID NO: 231151 - DNA, 20 bp, synthetic construct
  source 1..20: mol_type = other DNA
tcaaaattatttgaccttct

SEQ ID NO: 231152 - DNA, 20 bp, synthetic construct
  source 1..20: mol_type = other DNA
ttcaaaattatttgaccttc

SEQ ID NO: 231153 - DNA, 20 bp, synthetic construct
  source 1..20: mol_type = other DNA
tttcaaaattatttgacctt

SEQ ID NO: 231154 - DNA, 20 bp, synthetic construct
  source 1..20: mol_type = other DNA
ttttcaaaattatttgacct

SEQ ID NO: 231155 - DNA, 20 bp, synthetic construct
  source 1..20: mol_type = other DNA
tttttcaaaattatttgacc

SEQ ID NO: 231156 - DNA, 20 bp, synthetic construct
  source 1..20: mol_type = other DNA
ctttttcaaaattatttgac

SEQ ID NO: 231157 - DNA, 20 bp, synthetic construct
  source 1..20: mol_type = other DNA
tctttttcaaaattatttga

SEQ ID NO: 231158 - DNA, 20 bp, synthetic construct
  source 1..20: mol_type = other DNA
ttctttttcaaaattatttg

SEQ ID NO: 231159 - DNA, 20 bp, synthetic construct
  source 1..20: mol_type = other DNA
tttctttttcaaaattattt

SEQ ID NO: 231160 - DNA, 20 bp, synthetic construct
  source 1..20: mol_type = other DNA
ttttctttttcaaaattatt

SEQ ID NO: 231161 - DNA, 20 bp, synthetic construct
  source 1..20: mol_type = other DNA
attttctttttcaaaattat

SEQ ID NO: 231162 - DNA, 20 bp, synthetic construct
  source 1..20: mol_type = other DNA
cattttctttttcaaaatta

SEQ ID NO: 231163 - DNA, 20 bp, synthetic construct
  source 1..20: mol_type = other DNA
tcattttctttttcaaaatt

SEQ ID NO: 231164 - DNA, 20 bp, synthetic construct
  source 1..20: mol_type = other DNA
atcattttctttttcaaaat

SEQ ID NO: 231165 - DNA, 20 bp, synthetic construct
  source 1..20: mol_type = other DNA
tatcattttctttttcaaaa

SEQ ID NO: 231166 - DNA, 20 bp, synthetic construct
  source 1..20: mol_type = other DNA
atatcattttctttttcaaa

SEQ ID NO: 231167 - DNA, 20 bp, synthetic construct
  source 1..20: mol_type = other DNA
gatatcattttctttttcaa

SEQ ID NO: 231168 - DNA, 20 bp, synthetic construct
  source 1..20: mol_type = other DNA
agatatcattttctttttca

SEQ ID NO: 231169 - DNA, 20 bp, synthetic construct
  source 1..20: mol_type = other DNA
tagatatcattttctttttc

SEQ ID NO: 231170 - DNA, 20 bp, synthetic construct
  source 1..20: mol_type = other DNA
ttagatatcattttcttttt

SEQ ID NO: 231171 - DNA, 20 bp, synthetic construct
  source 1..20: mol_type = other DNA
cttagatatcattttctttt

SEQ ID NO: 231172 - DNA, 20 bp, synthetic construct
  source 1..20: mol_type = other DNA
gcttagatatcattttcttt

SEQ ID NO: 231173 - DNA, 20 bp, synthetic construct
  source 1..20: mol_type = other DNA
ggcttagatatcattttctt

SEQ ID NO: 231174 - DNA, 20 bp, synthetic construct
  source 1..20: mol_type = other DNA
gggcttagatatcattttct

SEQ ID NO: 231175 - DNA, 20 bp, synthetic construct
  source 1..20: mol_type = other DNA
tgggcttagatatcattttc

SEQ ID NO: 231176 - DNA, 20 bp, synthetic construct
  source 1..20: mol_type = other DNA
gtgggcttagatatcatttt

SEQ ID NO: 231177 - DNA, 20 bp, synthetic construct
  source 1..20: mol_type = other DNA
ggtgggcttagatatcattt

SEQ ID NO: 231178 - DNA, 20 bp, synthetic construct
  source 1..20: mol_type = other DNA
aggtgggcttagatatcatt

SEQ ID NO: 231179 - DNA, 20 bp, synthetic construct
  source 1..20: mol_type = other DNA
taggtgggcttagatatcat

SEQ ID NO: 231180 - DNA, 20 bp, synthetic construct
  source 1..20: mol_type = other DNA
ctaggtgggcttagatatca

SEQ ID NO: 231181 - DNA, 20 bp, synthetic construct
  source 1..20: mol_type = other DNA
tctaggtgggcttagatatc

SEQ ID NO: 231182 - DNA, 20 bp, synthetic construct
  source 1..20: mol_type = other DNA
ctctaggtgggcttagatat

SEQ ID NO: 231183 - DNA, 20 bp, synthetic construct
  source 1..20: mol_type = other DNA
tctctaggtgggcttagata

SEQ ID NO: 231184 - DNA, 20 bp, synthetic construct
  source 1..20: mol_type = other DNA
ttctctaggtgggcttagat

SEQ ID NO: 231185 - DNA, 20 bp, synthetic construct
  source 1..20: mol_type = other DNA
attctctaggtgggcttaga

SEQ ID NO: 231186 - DNA, 20 bp, synthetic construct
  source 1..20: mol_type = other DNA
tattctctaggtgggcttag

SEQ ID NO: 231187 - DNA, 20 bp, synthetic construct
  source 1..20: mol_type = other DNA
ttattctctaggtgggctta

SEQ ID NO: 231188 - DNA, 20 bp, synthetic construct
  source 1..20: mol_type = other DNA
cttattctctaggtgggctt

SEQ ID NO: 231189 - DNA, 20 bp, synthetic construct
  source 1..20: mol_type = other DNA
tcttattctctaggtgggct

SEQ ID NO: 231190 - DNA, 20 bp, synthetic construct
  source 1..20: mol_type = other DNA
gtcttattctctaggtgggc

SEQ ID NO: 231191 - DNA, 20 bp, synthetic construct
  source 1..20: mol_type = other DNA
agtcttattctctaggtggg

SEQ ID NO: 231192 - DNA, 20 bp, synthetic construct
  source 1..20: mol_type = other DNA
aagtcttattctctaggtgg

SEQ ID NO: 231193 - DNA, 20 bp, synthetic construct
  source 1..20: mol_type = other DNA
caagtcttattctctaggtg

SEQ ID NO: 231194 - DNA, 20 bp, synthetic construct
  source 1..20: mol_type = other DNA
tcaagtcttattctctaggt

SEQ ID NO: 231195 - DNA, 20 bp, synthetic construct
  source 1..20: mol_type = other DNA
ctcaagtcttattctctagg

SEQ ID NO: 231196 - DNA, 20 bp, synthetic construct
  source 1..20: mol_type = other DNA
tctcaagtcttattctctag

SEQ ID NO: 231197 - DNA, 20 bp, synthetic construct
  source 1..20: mol_type = other DNA
atctcaagtcttattctcta

SEQ ID NO: 231198 - DNA, 20 bp, synthetic construct
  source 1..20: mol_type = other DNA
gatctcaagtcttattctct

SEQ ID NO: 231199 - DNA, 20 bp, synthetic construct
  source 1..20: mol_type = other DNA
ggatctcaagtcttattctc

SEQ ID NO: 231200 - DNA, 20 bp, synthetic construct
  source 1..20: mol_type = other DNA
tggatctcaagtcttattct

SEQ ID NO: 231201 - DNA, 20 bp, synthetic construct
  source 1..20: mol_type = other DNA
ttggatctcaagtcttattc

SEQ ID NO: 231202 - DNA, 20 bp, synthetic construct
  source 1..20: mol_type = other DNA
tttggatctcaagtcttatt

SEQ ID NO: 231203 - DNA, 20 bp, synthetic construct
  source 1..20: mol_type = other DNA
ctttggatctcaagtcttat

SEQ ID NO: 231204 - DNA, 20 bp, synthetic construct
  source 1..20: mol_type = other DNA
gctttggatctcaagtctta

SEQ ID NO: 231205 - DNA, 20 bp, synthetic construct
  source 1..20: mol_type = other DNA
agctttggatctcaagtctt

SEQ ID NO: 231206 - DNA, 20 bp, synthetic construct
  source 1..20: mol_type = other DNA
tagctttggatctcaagtct

SEQ ID NO: 231207 - DNA, 20 bp, synthetic construct
  source 1..20: mol_type = other DNA
ttagctttggatctcaagtc

SEQ ID NO: 231208 - DNA, 20 bp, synthetic construct
  source 1..20: mol_type = other DNA
tttagctttggatctcaagt

SEQ ID NO: 231209 - DNA, 20 bp, synthetic construct
  source 1..20: mol_type = other DNA
atttagctttggatctcaag

SEQ ID NO: 231210 - DNA, 20 bp, synthetic construct
  source 1..20: mol_type = other DNA
gatttagctttggatctcaa

SEQ ID NO: 231211 - DNA, 20 bp, synthetic construct
  source 1..20: mol_type = other DNA
tgatttagctttggatctca

SEQ ID NO: 231212 - DNA, 20 bp, synthetic construct
  source 1..20: mol_type = other DNA
ctgatttagctttggatctc

SEQ ID NO: 231213 - DNA, 20 bp, synthetic construct
  source 1..20: mol_type = other DNA
cctgatttagctttggatct

SEQ ID NO: 231214 - DNA, 20 bp, synthetic construct
  source 1..20: mol_type = other DNA
tcctgatttagctttggatc

SEQ ID NO: 231215 - DNA, 20 bp, synthetic construct
  source 1..20: mol_type = other DNA
ctcctgatttagctttggat

SEQ ID NO: 231216 - DNA, 20 bp, synthetic construct
  source 1..20: mol_type = other DNA
cctcctgatttagctttgga

SEQ ID NO: 231217 - DNA, 20 bp, synthetic construct
  source 1..20: mol_type = other DNA
gcctcctgatttagctttgg

SEQ ID NO: 231218 - DNA, 20 bp, synthetic construct
  source 1..20: mol_type = other DNA
agcctcctgatttagctttg

SEQ ID NO: 231219 - DNA, 20 bp, synthetic construct
  source 1..20: mol_type = other DNA
gagcctcctgatttagcttt

SEQ ID NO: 231220 - DNA, 20 bp, synthetic construct
  source 1..20: mol_type = other DNA
agagcctcctgatttagctt

SEQ ID NO: 231221 - DNA, 20 bp, synthetic construct
  source 1..20: mol_type = other DNA
tagagcctcctgatttagct

SEQ ID NO: 231222 - DNA, 20 bp, synthetic construct
  source 1..20: mol_type = other DNA
ctagagcctcctgatttagc

SEQ ID NO: 231223 - DNA, 20 bp, synthetic construct
  source 1..20: mol_type = other DNA
gctagagcctcctgatttag

SEQ ID NO: 231224 - DNA, 20 bp, synthetic construct
  source 1..20: mol_type = other DNA
tgctagagcctcctgattta

SEQ ID NO: 231225 - DNA, 20 bp, synthetic construct
  source 1..20: mol_type = other DNA
ttgctagagcctcctgattt

SEQ ID NO: 231226 - DNA, 20 bp, synthetic construct
  source 1..20: mol_type = other DNA
tttgctagagcctcctgatt

SEQ ID NO: 231227 - DNA, 20 bp, synthetic construct
  source 1..20: mol_type = other DNA
ttttgctagagcctcctgat

SEQ ID NO: 231228 - DNA, 20 bp, synthetic construct
  source 1..20: mol_type = other DNA
attttgctagagcctcctga

SEQ ID NO: 231229 - DNA, 20 bp, synthetic construct
  source 1..20: mol_type = other DNA
aattttgctagagcctcctg

SEQ ID NO: 231230 - DNA, 20 bp, synthetic construct
  source 1..20: mol_type = other DNA
caattttgctagagcctcct

SEQ ID NO: 231231 - DNA, 20 bp, synthetic construct
  source 1..20: mol_type = other DNA
tcaattttgctagagcctcc

SEQ ID NO: 231232 - DNA, 20 bp, synthetic construct
  source 1..20: mol_type = other DNA
gtcaattttgctagagcctc

SEQ ID NO: 231233 - DNA, 20 bp, synthetic construct
  source 1..20: mol_type = other DNA
tgtcaattttgctagagcct

SEQ ID NO: 231234 - DNA, 20 bp, synthetic construct
  source 1..20: mol_type = other DNA
ctgtcaattttgctagagcc

SEQ ID NO: 231235 - DNA, 20 bp, synthetic construct
  source 1..20: mol_type = other DNA
tctgtcaattttgctagagc

SEQ ID NO: 231236 - DNA, 20 bp, synthetic construct
  source 1..20: mol_type = other DNA
atctgtcaattttgctagag

SEQ ID NO: 231237 - DNA, 20 bp, synthetic construct
  source 1..20: mol_type = other DNA
tatctgtcaattttgctaga

SEQ ID NO: 231238 - DNA, 20 bp, synthetic construct
  source 1..20: mol_type = other DNA
ttatctgtcaattttgctag

SEQ ID NO: 231239 - DNA, 20 bp, synthetic construct
  source 1..20: mol_type = other DNA
cttatctgtcaattttgcta

SEQ ID NO: 231240 - DNA, 20 bp, synthetic construct
  source 1..20: mol_type = other DNA
gcttatctgtcaattttgct

SEQ ID NO: 231241 - DNA, 20 bp, synthetic construct
  source 1..20: mol_type = other DNA
tgcttatctgtcaattttgc

SEQ ID NO: 231242 - DNA, 20 bp, synthetic construct
  source 1..20: mol_type = other DNA
ctgcttatctgtcaattttg

SEQ ID NO: 231243 - DNA, 20 bp, synthetic construct
  source 1..20: mol_type = other DNA
cctgcttatctgtcaatttt

SEQ ID NO: 231244 - DNA, 20 bp, synthetic construct
  source 1..20: mol_type = other DNA
tcctgcttatctgtcaattt

SEQ ID NO: 231245 - DNA, 20 bp, synthetic construct
  source 1..20: mol_type = other DNA
gtcctgcttatctgtcaatt

SEQ ID NO: 231246 - DNA, 20 bp, synthetic construct
  source 1..20: mol_type = other DNA
tgtcctgcttatctgtcaat

SEQ ID NO: 231247 - DNA, 20 bp, synthetic construct
  source 1..20: mol_type = other DNA
ctgtcctgcttatctgtcaa

SEQ ID NO: 231248 - DNA, 20 bp, synthetic construct
  source 1..20: mol_type = other DNA
tctgtcctgcttatctgtca

SEQ ID NO: 231249 - DNA, 20 bp, synthetic construct
  source 1..20: mol_type = other DNA
ctctgtcctgcttatctgtc

SEQ ID NO: 231250 - DNA, 20 bp, synthetic construct
  source 1..20: mol_type = other DNA
actctgtcctgcttatctgt

SEQ ID NO: 231251 - DNA, 20 bp, synthetic construct
  source 1..20: mol_type = other DNA
cactctgtcctgcttatctg

SEQ ID NO: 231252 - DNA, 20 bp, synthetic construct
  source 1..20: mol_type = other DNA
gcactctgtcctgcttatct

SEQ ID NO: 231253 - DNA, 20 bp, synthetic construct
  source 1..20: mol_type = other DNA
tgcactctgtcctgcttatc

SEQ ID NO: 231254 - DNA, 20 bp, synthetic construct
  source 1..20: mol_type = other DNA
atgcactctgtcctgcttat

SEQ ID NO: 231255 - DNA, 20 bp, synthetic construct
  source 1..20: mol_type = other DNA
catgcactctgtcctgctta

SEQ ID NO: 231256 - DNA, 20 bp, synthetic construct
  source 1..20: mol_type = other DNA
ccatgcactctgtcctgctt

SEQ ID NO: 231257 - DNA, 20 bp, synthetic construct
  source 1..20: mol_type = other DNA
accatgcactctgtcctgct

SEQ ID NO: 231258 - DNA, 20 bp, synthetic construct
  source 1..20: mol_type = other DNA
caccatgcactctgtcctgc

SEQ ID NO: 231259 - DNA, 20 bp, synthetic construct
  source 1..20: mol_type = other DNA
gcaccatgcactctgtcctg

SEQ ID NO: 231260 - DNA, 20 bp, synthetic construct
  source 1..20: mol_type = other DNA
tgcaccatgcactctgtcct

SEQ ID NO: 231261 - DNA, 20 bp, synthetic construct
  source 1..20: mol_type = other DNA
atgcaccatgcactctgtcc

SEQ ID NO: 231262 - DNA, 20 bp, synthetic construct
  source 1..20: mol_type = other DNA
aatgcaccatgcactctgtc

SEQ ID NO: 231263 - DNA, 20 bp, synthetic construct
  source 1..20: mol_type = other DNA
gaatgcaccatgcactctgt

SEQ ID NO: 231264 - DNA, 20 bp, synthetic construct
  source 1..20: mol_type = other DNA
tgaatgcaccatgcactctg

SEQ ID NO: 231265 - DNA, 20 bp, synthetic construct
  source 1..20: mol_type = other DNA
gtgaatgcaccatgcactct

SEQ ID NO: 231266 - DNA, 20 bp, synthetic construct
  source 1..20: mol_type = other DNA
ggtgaatgcaccatgcactc

SEQ ID NO: 231267 - DNA, 20 bp, synthetic construct
  source 1..20: mol_type = other DNA
aggtgaatgcaccatgcact

SEQ ID NO: 231268 - DNA, 20 bp, synthetic construct
  source 1..20: mol_type = other DNA
caggtgaatgcaccatgcac

SEQ ID NO: 231269 - DNA, 20 bp, synthetic construct
  source 1..20: mol_type = other DNA
ccaggtgaatgcaccatgca

SEQ ID NO: 231270 - DNA, 20 bp, synthetic construct
  source 1..20: mol_type = other DNA
cccaggtgaatgcaccatgc

SEQ ID NO: 231271 - DNA, 20 bp, synthetic construct
  source 1..20: mol_type = other DNA
ccccaggtgaatgcaccatg

SEQ ID NO: 231272 - DNA, 20 bp, synthetic construct
  source 1..20: mol_type = other DNA
tccccaggtgaatgcaccat

SEQ ID NO: 231273 - DNA, 20 bp, synthetic construct
  source 1..20: mol_type = other DNA
ttccccaggtgaatgcacca

SEQ ID NO: 231274 - DNA, 20 bp, synthetic construct
  source 1..20: mol_type = other DNA
cttccccaggtgaatgcacc

SEQ ID NO: 231275 - DNA, 20 bp, synthetic construct
  source 1..20: mol_type = other DNA
tcttccccaggtgaatgcac

SEQ ID NO: 231276 - DNA, 20 bp, synthetic construct
  source 1..20: mol_type = other DNA
ctcttccccaggtgaatgca

SEQ ID NO: 231277 - DNA, 20 bp, synthetic construct
  source 1..20: mol_type = other DNA
cctcttccccaggtgaatgc

SEQ ID NO: 231278 - DNA, 20 bp, synthetic construct
  source 1..20: mol_type = other DNA
ccctcttccccaggtgaatg

SEQ ID NO: 231279 - DNA, 20 bp, synthetic construct
  source 1..20: mol_type = other DNA
gccctcttccccaggtgaat

SEQ ID NO: 231280 - DNA, 20 bp, synthetic construct
  source 1..20: mol_type = other DNA
tgccctcttccccaggtgaa

SEQ ID NO: 231281 - DNA, 20 bp, synthetic construct
  source 1..20: mol_type = other DNA
ctgccctcttccccaggtga

SEQ ID NO: 231282 - DNA, 20 bp, synthetic construct
  source 1..20: mol_type = other DNA
tctgccctcttccccaggtg

SEQ ID NO: 231283 - DNA, 20 bp, synthetic construct
  source 1..20: mol_type = other DNA
atctgccctcttccccaggt

SEQ ID NO: 231284 - DNA, 20 bp, synthetic construct
  source 1..20: mol_type = other DNA
aatctgccctcttccccagg

SEQ ID NO: 231285 - DNA, 20 bp, synthetic construct
  source 1..20: mol_type = other DNA
caatctgccctcttccccag

SEQ ID NO: 231286 - DNA, 20 bp, synthetic construct
  source 1..20: mol_type = other DNA
ccaatctgccctcttcccca

SEQ ID NO: 231287 - DNA, 20 bp, synthetic construct
  source 1..20: mol_type = other DNA
accaatctgccctcttcccc

SEQ ID NO: 231288 - DNA, 20 bp, synthetic construct
  source 1..20: mol_type = other DNA
gaccaatctgccctcttccc

SEQ ID NO: 231289 - DNA, 20 bp, synthetic construct
  source 1..20: mol_type = other DNA
agaccaatctgccctcttcc

SEQ ID NO: 231290 - DNA, 20 bp, synthetic construct
  source 1..20: mol_type = other DNA
tagaccaatctgccctcttc

SEQ ID NO: 231291 - DNA, 20 bp, synthetic construct
  source 1..20: mol_type = other DNA
gtagaccaatctgccctctt

SEQ ID NO: 231292 - DNA, 20 bp, synthetic construct
  source 1..20: mol_type = other DNA
tgtagaccaatctgccctct

SEQ ID NO: 231293 - DNA, 20 bp, synthetic construct
  source 1..20: mol_type = other DNA
ttgtagaccaatctgccctc

SEQ ID NO: 231294 - DNA, 20 bp, synthetic construct
  source 1..20: mol_type = other DNA
tttgtagaccaatctgccct

SEQ ID NO: 231295 - DNA, 20 bp, synthetic construct
  source 1..20: mol_type = other DNA
atttgtagaccaatctgccc

SEQ ID NO: 231296 - DNA, 20 bp, synthetic construct
  source 1..20: mol_type = other DNA
tatttgtagaccaatctgcc

SEQ ID NO: 231297 - DNA, 20 bp, synthetic construct
  source 1..20: mol_type = other DNA
ctatttgtagaccaatctgc

SEQ ID NO: 231298 - DNA, 20 bp, synthetic construct
  source 1..20: mol_type = other DNA
cctatttgtagaccaatctg

SEQ ID NO: 231299 - DNA, 20 bp, synthetic construct
  source 1..20: mol_type = other DNA
gcctatttgtagaccaatct

SEQ ID NO: 231300 - DNA, 20 bp, synthetic construct
  source 1..20: mol_type = other DNA
ggcctatttgtagaccaatc

SEQ ID NO: 231301 - DNA, 20 bp, synthetic construct
  source 1..20: mol_type = other DNA
aggcctatttgtagaccaat

SEQ ID NO: 231302 - DNA, 20 bp, synthetic construct
  source 1..20: mol_type = other DNA
caggcctatttgtagaccaa

SEQ ID NO: 231303 - DNA, 20 bp, synthetic construct
  source 1..20: mol_type = other DNA
ccaggcctatttgtagacca

SEQ ID NO: 231304 - DNA, 20 bp, synthetic construct
  source 1..20: mol_type = other DNA
cccaggcctatttgtagacc

SEQ ID NO: 231305 - DNA, 20 bp, synthetic construct
  source 1..20: mol_type = other DNA
acccaggcctatttgtagac

SEQ ID NO: 231306 - DNA, 20 bp, synthetic construct
  source 1..20: mol_type = other DNA
gacccaggcctatttgtaga

SEQ ID NO: 231307 - DNA, 20 bp, synthetic construct
  source 1..20: mol_type = other DNA
ggacccaggcctatttgtag

SEQ ID NO: 231308 - DNA, 20 bp, synthetic construct
  source 1..20: mol_type = other DNA
tggacccaggcctatttgta

SEQ ID NO: 231309 - DNA, 20 bp, synthetic construct
  source 1..20: mol_type = other DNA
gtggacccaggcctatttgt

SEQ ID NO: 231310 - DNA, 20 bp, synthetic construct
  source 1..20: mol_type = other DNA
agtggacccaggcctatttg

SEQ ID NO: 231311 - DNA, 20 bp, synthetic construct
  source 1..20: mol_type = other DNA
cagtggacccaggcctattt

SEQ ID NO: 231312 - DNA, 20 bp, synthetic construct
  source 1..20: mol_type = other DNA
tcagtggacccaggcctatt

SEQ ID NO: 231313 - DNA, 20 bp, synthetic construct
  source 1..20: mol_type = other DNA
gtcagtggacccaggcctat

SEQ ID NO: 231314 - DNA, 20 bp, synthetic construct
  source 1..20: mol_type = other DNA
agtcagtggacccaggccta

SEQ ID NO: 231315 - DNA, 20 bp, synthetic construct
  source 1..20: mol_type = other DNA
aagtcagtggacccaggcct

SEQ ID NO: 231316 - DNA, 20 bp, synthetic construct
  source 1..20: mol_type = other DNA
aaagtcagtggacccaggcc

SEQ ID NO: 231317 - DNA, 20 bp, synthetic construct
  source 1..20: mol_type = other DNA
taaagtcagtggacccaggc

SEQ ID NO: 231318 - DNA, 20 bp, synthetic construct
  source 1..20: mol_type = other DNA
ctaaagtcagtggacccagg

SEQ ID NO: 231319 - DNA, 20 bp, synthetic construct
  source 1..20: mol_type = other DNA
gctaaagtcagtggacccag

SEQ ID NO: 231320 - DNA, 20 bp, synthetic construct
  source 1..20: mol_type = other DNA
agctaaagtcagtggaccca

SEQ ID NO: 231321 - DNA, 20 bp, synthetic construct
  source 1..20: mol_type = other DNA
cagctaaagtcagtggaccc

SEQ ID NO: 231322 - DNA, 20 bp, synthetic construct
  source 1..20: mol_type = other DNA
acagctaaagtcagtggacc

SEQ ID NO: 231323 - DNA, 20 bp, synthetic construct
  source 1..20: mol_type = other DNA
aacagctaaagtcagtggac

SEQ ID NO: 231324 - DNA, 20 bp, synthetic construct
  source 1..20: mol_type = other DNA
taacagctaaagtcagtgga

SEQ ID NO: 231325 - DNA, 20 bp, synthetic construct
  source 1..20: mol_type = other DNA
ataacagctaaagtcagtgg

SEQ ID NO: 231326 - DNA, 20 bp, synthetic construct
  source 1..20: mol_type = other DNA
tataacagctaaagtcagtg

SEQ ID NO: 231327 - DNA, 20 bp, synthetic construct
  source 1..20: mol_type = other DNA
atataacagctaaagtcagt

SEQ ID NO: 231328 - DNA, 20 bp, synthetic construct
  source 1..20: mol_type = other DNA
aatataacagctaaagtcag

SEQ ID NO: 231329 - DNA, 20 bp, synthetic construct
  source 1..20: mol_type = other DNA
aaatataacagctaaagtca

SEQ ID NO: 231330 - DNA, 20 bp, synthetic construct
  source 1..20: mol_type = other DNA
caaatataacagctaaagtc

SEQ ID NO: 231331 - DNA, 20 bp, synthetic construct
  source 1..20: mol_type = other DNA
ccaaatataacagctaaagt

SEQ ID NO: 231332 - DNA, 20 bp, synthetic construct
  source 1..20: mol_type = other DNA
cccaaatataacagctaaag

SEQ ID NO: 231333 - DNA, 20 bp, synthetic construct
  source 1..20: mol_type = other DNA
ccccaaatataacagctaaa

SEQ ID NO: 231334 - DNA, 20 bp, synthetic construct
  source 1..20: mol_type = other DNA
tccccaaatataacagctaa

SEQ ID NO: 231335 - DNA, 20 bp, synthetic construct
  source 1..20: mol_type = other DNA
ctccccaaatataacagcta

SEQ ID NO: 231336 - DNA, 20 bp, synthetic construct
  source 1..20: mol_type = other DNA
tctccccaaatataacagct

SEQ ID NO: 231337 - DNA, 20 bp, synthetic construct
  source 1..20: mol_type = other DNA
ttctccccaaatataacagc

SEQ ID NO: 231338 - DNA, 20 bp, synthetic construct
  source 1..20: mol_type = other DNA
tttctccccaaatataacag

SEQ ID NO: 231339 - DNA, 20 bp, synthetic construct
  source 1..20: mol_type = other DNA
gtttctccccaaatataaca

SEQ ID NO: 231340 - DNA, 20 bp, synthetic construct
  source 1..20: mol_type = other DNA
agtttctccccaaatataac

SEQ ID NO: 231341 - DNA, 20 bp, synthetic construct
  source 1..20: mol_type = other DNA
aagtttctccccaaatataa

SEQ ID NO: 231342 - DNA, 20 bp, synthetic construct
  source 1..20: mol_type = other DNA
aaagtttctccccaaatata

SEQ ID NO: 231343 - DNA, 20 bp, synthetic construct
  source 1..20: mol_type = other DNA
aaaagtttctccccaaatat

SEQ ID NO: 231344 - DNA, 20 bp, synthetic construct
  source 1..20: mol_type = other DNA
gaaaagtttctccccaaata

SEQ ID NO: 231345 - DNA, 20 bp, synthetic construct
  source 1..20: mol_type = other DNA
tgaaaagtttctccccaaat

SEQ ID NO: 231346 - DNA, 20 bp, synthetic construct
  source 1..20: mol_type = other DNA
ttgaaaagtttctccccaaa

SEQ ID NO: 231347 - DNA, 20 bp, synthetic construct
  source 1..20: mol_type = other DNA
gttgaaaagtttctccccaa

SEQ ID NO: 231348 - DNA, 20 bp, synthetic construct
  source 1..20: mol_type = other DNA
ggttgaaaagtttctcccca

SEQ ID NO: 231349 - DNA, 20 bp, synthetic construct
  source 1..20: mol_type = other DNA
aggttgaaaagtttctcccc

SEQ ID NO: 231350 - DNA, 20 bp, synthetic construct
  source 1..20: mol_type = other DNA
gaggttgaaaagtttctccc

SEQ ID NO: 231351 - DNA, 20 bp, synthetic construct
  source 1..20: mol_type = other DNA
tgaggttgaaaagtttctcc

SEQ ID NO: 231352 - DNA, 20 bp, synthetic construct
  source 1..20: mol_type = other DNA
gtgaggttgaaaagtttctc

SEQ ID NO: 231353 - DNA, 20 bp, synthetic construct
  source 1..20: mol_type = other DNA
agtgaggttgaaaagtttct

SEQ ID NO: 231354 - DNA, 20 bp, synthetic construct
  source 1..20: mol_type = other DNA
gagtgaggttgaaaagtttc

SEQ ID NO: 231355 - DNA, 20 bp, synthetic construct
  source 1..20: mol_type = other DNA
ggagtgaggttgaaaagttt

SEQ ID NO: 231356 - DNA, 20 bp, synthetic construct
  source 1..20: mol_type = other DNA
tggagtgaggttgaaaagtt

SEQ ID NO: 231357 - DNA, 20 bp, synthetic construct
  source 1..20: mol_type = other DNA
atggagtgaggttgaaaagt

SEQ ID NO: 231358 - DNA, 20 bp, synthetic construct
  source 1..20: mol_type = other DNA
gatggagtgaggttgaaaag

SEQ ID NO: 231359 - DNA, 20 bp, synthetic construct
  source 1..20: mol_type = other DNA
agatggagtgaggttgaaaa

SEQ ID NO: 231360 - DNA, 20 bp, synthetic construct
  source 1..20: mol_type = other DNA
aagatggagtgaggttgaaa

SEQ ID NO: 231361 - DNA, 20 bp, synthetic construct
  source 1..20: mol_type = other DNA
taagatggagtgaggttgaa

SEQ ID NO: 231362 - DNA, 20 bp, synthetic construct
  source 1..20: mol_type = other DNA
ttaagatggagtgaggttga

SEQ ID NO: 231363 - DNA, 20 bp, synthetic construct
  source 1..20: mol_type = other DNA
tttaagatggagtgaggttg

SEQ ID NO: 231364 - DNA, 20 bp, synthetic construct
  source 1..20: mol_type = other DNA
gtttaagatggagtgaggtt

SEQ ID NO: 231365 - DNA, 20 bp, synthetic construct
  source 1..20: mol_type = other DNA
ggtttaagatggagtgaggt

SEQ ID NO: 231366 - DNA, 20 bp, synthetic construct
  source 1..20: mol_type = other DNA
aggtttaagatggagtgagg

SEQ ID NO: 231367 - DNA, 20 bp, synthetic construct
  source 1..20: mol_type = other DNA
taggtttaagatggagtgag

SEQ ID NO: 231368 - DNA, 20 bp, synthetic construct
  source 1..20: mol_type = other DNA
ttaggtttaagatggagtga

SEQ ID NO: 231369 - DNA, 20 bp, synthetic construct
  source 1..20: mol_type = other DNA
tttaggtttaagatggagtg

SEQ ID NO: 231370 - DNA, 20 bp, synthetic construct
  source 1..20: mol_type = other DNA
ttttaggtttaagatggagt

SEQ ID NO: 231371 - DNA, 20 bp, synthetic construct
  source 1..20: mol_type = other DNA
tttttaggtttaagatggag

SEQ ID NO: 231372 - DNA, 20 bp, synthetic construct
  source 1..20: mol_type = other DNA
atttttaggtttaagatgga

SEQ ID NO: 231373 - DNA, 20 bp, synthetic construct
  source 1..20: mol_type = other DNA
tatttttaggtttaagatgg

SEQ ID NO: 231374 - DNA, 20 bp, synthetic construct
  source 1..20: mol_type = other DNA
atatttttaggtttaagatg

SEQ ID NO: 231375 - DNA, 20 bp, synthetic construct
  source 1..20: mol_type = other DNA
aatatttttaggtttaagat

SEQ ID NO: 231376 - DNA, 20 bp, synthetic construct
  source 1..20: mol_type = other DNA
gaatatttttaggtttaaga

SEQ ID NO: 231377 - DNA, 20 bp, synthetic construct
  source 1..20: mol_type = other DNA
ggaatatttttaggtttaag

SEQ ID NO: 231378 - DNA, 20 bp, synthetic construct
  source 1..20: mol_type = other DNA
tggaatatttttaggtttaa

SEQ ID NO: 231379 - DNA, 20 bp, synthetic construct
  source 1..20: mol_type = other DNA
ctggaatatttttaggttta

SEQ ID NO: 231380 - DNA, 20 bp, synthetic construct
  source 1..20: mol_type = other DNA
tctggaatatttttaggttt

SEQ ID NO: 231381 - DNA, 20 bp, synthetic construct
  source 1..20: mol_type = other DNA
atctggaatatttttaggtt

SEQ ID NO: 231382 - DNA, 20 bp, synthetic construct
  source 1..20: mol_type = other DNA
catctggaatatttttaggt

SEQ ID NO: 231383 - DNA, 20 bp, synthetic construct
  source 1..20: mol_type = other DNA
tcatctggaatatttttagg

SEQ ID NO: 231384 - DNA, 20 bp, synthetic construct
  source 1..20: mol_type = other DNA
ttcatctggaatatttttag

SEQ ID NO: 231385 - DNA, 20 bp, synthetic construct
  source 1..20: mol_type = other DNA
attcatctggaatattttta

SEQ ID NO: 231386 - DNA, 20 bp, synthetic construct
  source 1..20: mol_type = other DNA
aattcatctggaatattttt

SEQ ID NO: 231387 - DNA, 20 bp, synthetic construct
  source 1..20: mol_type = other DNA
taattcatctggaatatttt

SEQ ID NO: 231388 - DNA, 20 bp, synthetic construct
  source 1..20: mol_type = other DNA
ttaattcatctggaatattt

SEQ ID NO: 231389 - DNA, 20 bp, synthetic construct
  source 1..20: mol_type = other DNA
attaattcatctggaatatt

SEQ ID NO: 231390 - DNA, 20 bp, synthetic construct
  source 1..20: mol_type = other DNA
tattaattcatctggaatat

SEQ ID NO: 231391 - DNA, 20 bp, synthetic construct
  source 1..20: mol_type = other DNA
ttattaattcatctggaata

SEQ ID NO: 231392 - DNA, 20 bp, synthetic construct
  source 1..20: mol_type = other DNA
tttattaattcatctggaat

SEQ ID NO: 231393 - DNA, 20 bp, synthetic construct
  source 1..20: mol_type = other DNA
atttattaattcatctggaa

SEQ ID NO: 231394 - DNA, 20 bp, synthetic construct
  source 1..20: mol_type = other DNA
tatttattaattcatctgga

SEQ ID NO: 231395 - DNA, 20 bp, synthetic construct
  source 1..20: mol_type = other DNA
atatttattaattcatctgg

SEQ ID NO: 231396 - DNA, 20 bp, synthetic construct
  source 1..20: mol_type = other DNA
tatatttattaattcatctg

SEQ ID NO: 231397 - DNA, 20 bp, synthetic construct
  source 1..20: mol_type = other DNA
ttatatttattaattcatct

SEQ ID NO: 231398 - DNA, 20 bp, synthetic construct
  source 1..20: mol_type = other DNA
tttatatttattaattcatc

SEQ ID NO: 231399 - DNA, 20 bp, synthetic construct
  source 1..20: mol_type = other DNA
ttttatatttattaattcat

SEQ ID NO: 231400 - DNA, 20 bp, synthetic construct
  source 1..20: mol_type = other DNA
tttttatatttattaattca

SEQ ID NO: 231401 - DNA, 20 bp, synthetic construct
  source 1..20: mol_type = other DNA
ttttttatatttattaattc

SEQ ID NO: 231402 - DNA, 20 bp, synthetic construct
  source 1..20: mol_type = other DNA
attttttatatttattaatt

SEQ ID NO: 231403 - DNA, 20 bp, synthetic construct
  source 1..20: mol_type = other DNA
aattttttatatttattaat

SEQ ID NO: 231404 - DNA, 20 bp, synthetic construct
  source 1..20: mol_type = other DNA
taattttttatatttattaa

SEQ ID NO: 231405 - DNA, 20 bp, synthetic construct
  source 1..20: mol_type = other DNA
ctaattttttatatttatta

SEQ ID NO: 231406 - DNA, 20 bp, synthetic construct
  source 1..20: mol_type = other DNA
tctaattttttatatttatt

SEQ ID NO: 231407 - DNA, 20 bp, synthetic construct
  source 1..20: mol_type = other DNA
gtctaattttttatatttat

SEQ ID NO: 231408 - DNA, 20 bp, synthetic construct
  source 1..20: mol_type = other DNA
ggtctaattttttatattta

SEQ ID NO: 231409 - DNA, 20 bp, synthetic construct
  source 1..20: mol_type = other DNA
tggtctaattttttatattt

SEQ ID NO: 231410 - DNA, 20 bp, synthetic construct
  source 1..20: mol_type = other DNA
gtggtctaattttttatatt

SEQ ID NO: 231411 - DNA, 20 bp, synthetic construct
  source 1..20: mol_type = other DNA
agtggtctaattttttatat

SEQ ID NO: 231412 - DNA, 20 bp, synthetic construct
  source 1..20: mol_type = other DNA
tagtggtctaattttttata

SEQ ID NO: 231413 - DNA, 20 bp, synthetic construct
  source 1..20: mol_type = other DNA
ttagtggtctaattttttat

SEQ ID NO: 231414 - DNA, 20 bp, synthetic construct
  source 1..20: mol_type = other DNA
tttagtggtctaatttttta

SEQ ID NO: 231415 - DNA, 20 bp, synthetic construct
  source 1..20: mol_type = other DNA
ttttagtggtctaatttttt

SEQ ID NO: 231416 - DNA, 20 bp, synthetic construct
  source 1..20: mol_type = other DNA
tttttagtggtctaattttt

SEQ ID NO: 231417 - DNA, 20 bp, synthetic construct
  source 1..20: mol_type = other DNA
atttttagtggtctaatttt

SEQ ID NO: 231418 - DNA, 20 bp, synthetic construct
  source 1..20: mol_type = other DNA
catttttagtggtctaattt

SEQ ID NO: 231419 - DNA, 20 bp, synthetic construct
  source 1..20: mol_type = other DNA
acatttttagtggtctaatt

SEQ ID NO: 231420 - DNA, 20 bp, synthetic construct
  source 1..20: mol_type = other DNA
tacatttttagtggtctaat

SEQ ID NO: 231421 - DNA, 20 bp, synthetic construct
  source 1..20: mol_type = other DNA
ctacatttttagtggtctaa

SEQ ID NO: 231422 - DNA, 20 bp, synthetic construct
  source 1..20: mol_type = other DNA
tctacatttttagtggtcta

SEQ ID NO: 231423 - DNA, 20 bp, synthetic construct
  source 1..20: mol_type = other DNA
ttctacatttttagtggtct

SEQ ID NO: 231424 - DNA, 20 bp, synthetic construct
  source 1..20: mol_type = other DNA
cttctacatttttagtggtc

SEQ ID NO: 231425 - DNA, 20 bp, synthetic construct
  source 1..20: mol_type = other DNA
tcttctacatttttagtggt

SEQ ID NO: 231426 - DNA, 20 bp, synthetic construct
  source 1..20: mol_type = other DNA
ttcttctacatttttagtgg

SEQ ID NO: 231427 - DNA, 20 bp, synthetic construct
  source 1..20: mol_type = other DNA
tttcttctacatttttagtg

SEQ ID NO: 231428 - DNA, 20 bp, synthetic construct
  source 1..20: mol_type = other DNA
ttttcttctacatttttagt

SEQ ID NO: 231429 - DNA, 20 bp, synthetic construct
  source 1..20: mol_type = other DNA
attttcttctacatttttag

SEQ ID NO: 231430 - DNA, 20 bp, synthetic construct
  source 1..20: mol_type = other DNA
cattttcttctacattttta

SEQ ID NO: 231431 - DNA, 20 bp, synthetic construct
  source 1..20: mol_type = other DNA
ccattttcttctacattttt

SEQ ID NO: 231432 - DNA, 20 bp, synthetic construct
  source 1..20: mol_type = other DNA
tccattttcttctacatttt

SEQ ID NO: 231433 - DNA, 20 bp, synthetic construct
  source 1..20: mol_type = other DNA
atccattttcttctacattt

SEQ ID NO: 231434 - DNA, 20 bp, synthetic construct
  source 1..20: mol_type = other DNA
catccattttcttctacatt

SEQ ID NO: 231435 - DNA, 20 bp, synthetic construct
  source 1..20: mol_type = other DNA
tcatccattttcttctacat

SEQ ID NO: 231436 - DNA, 20 bp, synthetic construct
  source 1..20: mol_type = other DNA
atcatccattttcttctaca

SEQ ID NO: 231437 - DNA, 20 bp, synthetic construct
  source 1..20: mol_type = other DNA
gatcatccattttcttctac

SEQ ID NO: 231438 - DNA, 20 bp, synthetic construct
  source 1..20: mol_type = other DNA
agatcatccattttcttcta

SEQ ID NO: 231439 - DNA, 20 bp, synthetic construct
  source 1..20: mol_type = other DNA
aagatcatccattttcttct

SEQ ID NO: 231440 - DNA, 20 bp, synthetic construct
  source 1..20: mol_type = other DNA
aaagatcatccattttcttc

SEQ ID NO: 231441 - DNA, 20 bp, synthetic construct
  source 1..20: mol_type = other DNA
gaaagatcatccattttctt

SEQ ID NO: 231442 - DNA, 20 bp, synthetic construct
  source 1..20: mol_type = other DNA
agaaagatcatccattttct

SEQ ID NO: 231443 - DNA, 20 bp, synthetic construct
  source 1..20: mol_type = other DNA
tagaaagatcatccattttc

SEQ ID NO: 231444 - DNA, 20 bp, synthetic construct
  source 1..20: mol_type = other DNA
atagaaagatcatccatttt

SEQ ID NO: 231445 - DNA, 20 bp, synthetic construct
  source 1..20: mol_type = other DNA
tatagaaagatcatccattt

SEQ ID NO: 231446 - DNA, 20 bp, synthetic construct
  source 1..20: mol_type = other DNA
gtatagaaagatcatccatt

SEQ ID NO: 231447 - DNA, 20 bp, synthetic construct
  source 1..20: mol_type = other DNA
ggtatagaaagatcatccat

SEQ ID NO: 231448 - DNA, 20 bp, synthetic construct
  source 1..20: mol_type = other DNA
tggtatagaaagatcatcca

SEQ ID NO: 231449 - DNA, 20 bp, synthetic construct
  source 1..20: mol_type = other DNA
atggtatagaaagatcatcc

SEQ ID NO: 231450 - DNA, 20 bp, synthetic construct
  source 1..20: mol_type = other DNA
tatggtatagaaagatcatc

SEQ ID NO: 231451 - DNA, 20 bp, synthetic construct
  source 1..20: mol_type = other DNA
ctatggtatagaaagatcat

SEQ ID NO: 231452 - DNA, 20 bp, synthetic construct
  source 1..20: mol_type = other DNA
tctatggtatagaaagatca

SEQ ID NO: 231453 - DNA, 20 bp, synthetic construct
  source 1..20: mol_type = other DNA
ctctatggtatagaaagatc

SEQ ID NO: 231454 - DNA, 20 bp, synthetic construct
  source 1..20: mol_type = other DNA
gctctatggtatagaaagat

SEQ ID NO: 231455 - DNA, 20 bp, synthetic construct
  source 1..20: mol_type = other DNA
tgctctatggtatagaaaga

SEQ ID NO: 231456 - DNA, 20 bp, synthetic construct
  source 1..20: mol_type = other DNA
ttgctctatggtatagaaag

SEQ ID NO: 231457 - DNA, 20 bp, synthetic construct
  source 1..20: mol_type = other DNA
attgctctatggtatagaaa

SEQ ID NO: 231458 - DNA, 20 bp, synthetic construct
  source 1..20: mol_type = other DNA
cattgctctatggtatagaa

SEQ ID NO: 231459 - DNA, 20 bp, synthetic construct
  source 1..20: mol_type = other DNA
ccattgctctatggtataga

SEQ ID NO: 231460 - DNA, 20 bp, synthetic construct
  source 1..20: mol_type = other DNA
tccattgctctatggtatag

SEQ ID NO: 231461 - DNA, 20 bp, synthetic construct
  source 1..20: mol_type = other DNA
ttccattgctctatggtata

SEQ ID NO: 231462 - DNA, 20 bp, synthetic construct
  source 1..20: mol_type = other DNA
attccattgctctatggtat

SEQ ID NO: 231463 - DNA, 20 bp, synthetic construct
  source 1..20: mol_type = other DNA
tattccattgctctatggta

SEQ ID NO: 231464 - DNA, 20 bp, synthetic construct
  source 1..20: mol_type = other DNA
ttattccattgctctatggt

SEQ ID NO: 231465 - DNA, 20 bp, synthetic construct
  source 1..20: mol_type = other DNA
tttattccattgctctatgg

SEQ ID NO: 231466 - DNA, 20 bp, synthetic construct
  source 1..20: mol_type = other DNA
atttattccattgctctatg

SEQ ID NO: 231467 - DNA, 20 bp, synthetic construct
  source 1..20: mol_type = other DNA
gatttattccattgctctat

SEQ ID NO: 231468 - DNA, 20 bp, synthetic construct
  source 1..20: mol_type = other DNA
tgatttattccattgctcta

SEQ ID NO: 231469 - DNA, 20 bp, synthetic construct
  source 1..20: mol_type = other DNA
gtgatttattccattgctct

SEQ ID NO: 231470 - DNA, 20 bp, synthetic construct
  source 1..20: mol_type = other DNA
tgtgatttattccattgctc

SEQ ID NO: 231471 - DNA, 20 bp, synthetic construct
  source 1..20: mol_type = other DNA
ttgtgatttattccattgct

SEQ ID NO: 231472 - DNA, 20 bp, synthetic construct
  source 1..20: mol_type = other DNA
tttgtgatttattccattgc

SEQ ID NO: 231473 - DNA, 20 bp, synthetic construct
  source 1..20: mol_type = other DNA
ctttgtgatttattccattg

SEQ ID NO: 231474 - DNA, 20 bp, synthetic construct
  source 1..20: mol_type = other DNA
cctttgtgatttattccatt

SEQ ID NO: 231475 - DNA, 20 bp, synthetic construct
  source 1..20: mol_type = other DNA
tcctttgtgatttattccat

SEQ ID NO: 231476 - DNA, 20 bp, synthetic construct
  source 1..20: mol_type = other DNA
ttcctttgtgatttattcca

SEQ ID NO: 231477 - DNA, 20 bp, synthetic construct
  source 1..20: mol_type = other DNA
tttcctttgtgatttattcc

SEQ ID NO: 231478 - DNA, 20 bp, synthetic construct
  source 1..20: mol_type = other DNA
ttttcctttgtgatttattc

SEQ ID NO: 231479 - DNA, 20 bp, synthetic construct
  source 1..20: mol_type = other DNA
gttttcctttgtgatttatt

SEQ ID NO: 231480 - DNA, 20 bp, synthetic construct
  source 1..20: mol_type = other DNA
tgttttcctttgtgatttat

SEQ ID NO: 231481 - DNA, 20 bp, synthetic construct
  source 1..20: mol_type = other DNA
ctgttttcctttgtgattta

SEQ ID NO: 231482 - DNA, 20 bp, synthetic construct
  source 1..20: mol_type = other DNA
tctgttttcctttgtgattt

SEQ ID NO: 231483 - DNA, 20 bp, synthetic construct
  source 1..20: mol_type = other DNA
atctgttttcctttgtgatt

SEQ ID NO: 231484 - DNA, 20 bp, synthetic construct
  source 1..20: mol_type = other DNA
aatctgttttcctttgtgat

SEQ ID NO: 231485 - DNA, 20 bp, synthetic construct
  source 1..20: mol_type = other DNA
aaatctgttttcctttgtga

SEQ ID NO: 231486 - DNA, 20 bp, synthetic construct
  source 1..20: mol_type = other DNA
caaatctgttttcctttgtg

SEQ ID NO: 231487 - DNA, 20 bp, synthetic construct
  source 1..20: mol_type = other DNA
tcaaatctgttttcctttgt

SEQ ID NO: 231488 - DNA, 20 bp, synthetic construct
  source 1..20: mol_type = other DNA
gtcaaatctgttttcctttg

SEQ ID NO: 231489 - DNA, 20 bp, synthetic construct
  source 1..20: mol_type = other DNA
agtcaaatctgttttccttt

SEQ ID NO: 231490 - DNA, 20 bp, synthetic construct
  source 1..20: mol_type = other DNA
tagtcaaatctgttttcctt

SEQ ID NO: 231491 - DNA, 20 bp, synthetic construct
  source 1..20: mol_type = other DNA
atagtcaaatctgttttcct

SEQ ID NO: 231492 - DNA, 20 bp, synthetic construct
  source 1..20: mol_type = other DNA
tatagtcaaatctgttttcc

SEQ ID NO: 231493 - DNA, 20 bp, synthetic construct
  source 1..20: mol_type = other DNA
atatagtcaaatctgttttc

SEQ ID NO: 231494 - DNA, 20 bp, synthetic construct
  source 1..20: mol_type = other DNA
tatatagtcaaatctgtttt

SEQ ID NO: 231495 - DNA, 20 bp, synthetic construct
  source 1..20: mol_type = other DNA
ttatatagtcaaatctgttt

SEQ ID NO: 231496 - DNA, 20 bp, synthetic construct
  source 1..20: mol_type = other DNA
tttatatagtcaaatctgtt

SEQ ID NO: 231497 - DNA, 20 bp, synthetic construct
  source 1..20: mol_type = other DNA
ttttatatagtcaaatctgt

SEQ ID NO: 231498 - DNA, 20 bp, synthetic construct
  source 1..20: mol_type = other DNA
gttttatatagtcaaatctg

SEQ ID NO: 231499 - DNA, 20 bp, synthetic construct
  source 1..20: mol_type = other DNA
agttttatatagtcaaatct

SEQ ID NO: 231500 - DNA, 20 bp, synthetic construct
  source 1..20: mol_type = other DNA
aagttttatatagtcaaatc

SEQ ID NO: 231501 - DNA, 20 bp, synthetic construct
  source 1..20: mol_type = other DNA
taagttttatatagtcaaat

SEQ ID NO: 231502 - DNA, 20 bp, synthetic construct
  source 1..20: mol_type = other DNA
ttaagttttatatagtcaaa

SEQ ID NO: 231503 - DNA, 20 bp, synthetic construct
  source 1..20: mol_type = other DNA
tttaagttttatatagtcaa

SEQ ID NO: 231504 - DNA, 20 bp, synthetic construct
  source 1..20: mol_type = other DNA
gtttaagttttatatagtca

SEQ ID NO: 231505 - DNA, 20 bp, synthetic construct
  source 1..20: mol_type = other DNA
ggtttaagttttatatagtc

SEQ ID NO: 231506 - DNA, 20 bp, synthetic construct
  source 1..20: mol_type = other DNA
gggtttaagttttatatagt

SEQ ID NO: 231507 - DNA, 20 bp, synthetic construct
  source 1..20: mol_type = other DNA
agggtttaagttttatatag

SEQ ID NO: 231508 - DNA, 20 bp, synthetic construct
  source 1..20: mol_type = other DNA
cagggtttaagttttatata

SEQ ID NO: 231509 - DNA, 20 bp, synthetic construct
  source 1..20: mol_type = other DNA
gcagggtttaagttttatat

SEQ ID NO: 231510 - DNA, 20 bp, synthetic construct
  source 1..20: mol_type = other DNA
ggcagggtttaagttttata

SEQ ID NO: 231511 - DNA, 20 bp, synthetic construct
  source 1..20: mol_type = other DNA
gggcagggtttaagttttat

SEQ ID NO: 231512 - DNA, 20 bp, synthetic construct
  source 1..20: mol_type = other DNA
tgggcagggtttaagtttta

SEQ ID NO: 231513 - DNA, 20 bp, synthetic construct
  source 1..20: mol_type = other DNA
atgggcagggtttaagtttt

SEQ ID NO: 231514 - DNA, 20 bp, synthetic construct
  source 1..20: mol_type = other DNA
gatgggcagggtttaagttt

SEQ ID NO: 231515 - DNA, 20 bp, synthetic construct
  source 1..20: mol_type = other DNA
tgatgggcagggtttaagtt

SEQ ID NO: 231516 - DNA, 20 bp, synthetic construct
  source 1..20: mol_type = other DNA
ttgatgggcagggtttaagt

SEQ ID NO: 231517 - DNA, 20 bp, synthetic construct
  source 1..20: mol_type = other DNA
tttgatgggcagggtttaag

SEQ ID NO: 231518 - DNA, 20 bp, synthetic construct
  source 1..20: mol_type = other DNA
ttttgatgggcagggtttaa

SEQ ID NO: 231519 - DNA, 20 bp, synthetic construct
  source 1..20: mol_type = other DNA
tttttgatgggcagggttta

SEQ ID NO: 231520 - DNA, 20 bp, synthetic construct
  source 1..20: mol_type = other DNA
gtttttgatgggcagggttt

SEQ ID NO: 231521 - DNA, 20 bp, synthetic construct
  source 1..20: mol_type = other DNA
ggtttttgatgggcagggtt

SEQ ID NO: 231522 - DNA, 20 bp, synthetic construct
  source 1..20: mol_type = other DNA
tggtttttgatgggcagggt

SEQ ID NO: 231523 - DNA, 20 bp, synthetic construct
  source 1..20: mol_type = other DNA
atggtttttgatgggcaggg

SEQ ID NO: 231524 - DNA, 20 bp, synthetic construct
  source 1..20: mol_type = other DNA
gatggtttttgatgggcagg

SEQ ID NO: 231525 - DNA, 20 bp, synthetic construct
  source 1..20: mol_type = other DNA
tgatggtttttgatgggcag

SEQ ID NO: 231526 - DNA, 20 bp, synthetic construct
  source 1..20: mol_type = other DNA
ctgatggtttttgatgggca

SEQ ID NO: 231527 - DNA, 20 bp, synthetic construct
  source 1..20: mol_type = other DNA
tctgatggtttttgatgggc

SEQ ID NO: 231528 - DNA, 20 bp, synthetic construct
  source 1..20: mol_type = other DNA
ttctgatggtttttgatggg

SEQ ID NO: 231529 - DNA, 20 bp, synthetic construct
  source 1..20: mol_type = other DNA
tttctgatggtttttgatgg

SEQ ID NO: 231530 - DNA, 20 bp, synthetic construct
  source 1..20: mol_type = other DNA
gtttctgatggtttttgatg

SEQ ID NO: 231531 - DNA, 20 bp, synthetic construct
  source 1..20: mol_type = other DNA
ggtttctgatggtttttgat

SEQ ID NO: 231532 - DNA, 20 bp, synthetic construct
  source 1..20: mol_type = other DNA
tggtttctgatggtttttga

SEQ ID NO: 231533 - DNA, 20 bp, synthetic construct
  source 1..20: mol_type = other DNA
ttggtttctgatggtttttg

SEQ ID NO: 231534 - DNA, 20 bp, synthetic construct
  source 1..20: mol_type = other DNA
tttggtttctgatggttttt

SEQ ID NO: 231535 - DNA, 20 bp, synthetic construct
  source 1..20: mol_type = other DNA
ttttggtttctgatggtttt

SEQ ID NO: 231536 - DNA, 20 bp, synthetic construct
  source 1..20: mol_type = other DNA
attttggtttctgatggttt

SEQ ID NO: 231537 - DNA, 20 bp, synthetic construct
  source 1..20: mol_type = other DNA
tattttggtttctgatggtt

SEQ ID NO: 231538 - DNA, 20 bp, synthetic construct
  source 1..20: mol_type = other DNA
ttattttggtttctgatggt

SEQ ID NO: 231539 - DNA, 20 bp, synthetic construct
  source 1..20: mol_type = other DNA
tttattttggtttctgatgg

SEQ ID NO: 231540 - DNA, 20 bp, synthetic construct
  source 1..20: mol_type = other DNA
ttttattttggtttctgatg

SEQ ID NO: 231541 - DNA, 20 bp, synthetic construct
  source 1..20: mol_type = other DNA
cttttattttggtttctgat

SEQ ID NO: 231542 - DNA, 20 bp, synthetic construct
  source 1..20: mol_type = other DNA
ccttttattttggtttctga

SEQ ID NO: 231543 - DNA, 20 bp, synthetic construct
  source 1..20: mol_type = other DNA
gccttttattttggtttctg

SEQ ID NO: 231544 - DNA, 20 bp, synthetic construct
  source 1..20: mol_type = other DNA
tgccttttattttggtttct

SEQ ID NO: 231545 - DNA, 20 bp, synthetic construct
  source 1..20: mol_type = other DNA
ttgccttttattttggtttc

SEQ ID NO: 231546 - DNA, 20 bp, synthetic construct
  source 1..20: mol_type = other DNA
gttgccttttattttggttt

SEQ ID NO: 231547 - DNA, 20 bp, synthetic construct
  source 1..20: mol_type = other DNA
ggttgccttttattttggtt

SEQ ID NO: 231548 - DNA, 20 bp, synthetic construct
  source 1..20: mol_type = other DNA
tggttgccttttattttggt

SEQ ID NO: 231549 - DNA, 20 bp, synthetic construct
  source 1..20: mol_type = other DNA
ttggttgccttttattttgg

SEQ ID NO: 231550 - DNA, 20 bp, synthetic construct
  source 1..20: mol_type = other DNA
gttggttgccttttattttg

SEQ ID NO: 231551 - DNA, 20 bp, synthetic construct
  source 1..20: mol_type = other DNA
agttggttgccttttatttt

SEQ ID NO: 231552 - DNA, 20 bp, synthetic construct
  source 1..20: mol_type = other DNA
cagttggttgccttttattt

SEQ ID NO: 231553 - DNA, 20 bp, synthetic construct
  source 1..20: mol_type = other DNA
ccagttggttgccttttatt

SEQ ID NO: 231554 - DNA, 20 bp, synthetic construct
  source 1..20: mol_type = other DNA
tccagttggttgccttttat

SEQ ID NO: 231555 - DNA, 20 bp, synthetic construct
  source 1..20: mol_type = other DNA
ctccagttggttgcctttta

SEQ ID NO: 231556 - DNA, 20 bp, synthetic construct
  source 1..20: mol_type = other DNA
tctccagttggttgcctttt

SEQ ID NO: 231557 - DNA, 20 bp, synthetic construct
  source 1..20: mol_type = other DNA
ttctccagttggttgccttt

SEQ ID NO: 231558 - DNA, 20 bp, synthetic construct
  source 1..20: mol_type = other DNA
cttctccagttggttgcctt

SEQ ID NO: 231559 - DNA, 20 bp, synthetic construct
  source 1..20: mol_type = other DNA
tcttctccagttggttgcct

SEQ ID NO: 231560 - DNA, 20 bp, synthetic construct
  source 1..20: mol_type = other DNA
atcttctccagttggttgcc

SEQ ID NO: 231561 - DNA, 20 bp, synthetic construct
  source 1..20: mol_type = other DNA
tatcttctccagttggttgc

SEQ ID NO: 231562 - DNA, 20 bp, synthetic construct
  source 1..20: mol_type = other DNA
ctatcttctccagttggttg

SEQ ID NO: 231563 - DNA, 20 bp, synthetic construct
  source 1..20: mol_type = other DNA
actatcttctccagttggtt

SEQ ID NO: 231564 - DNA, 20 bp, synthetic construct
  source 1..20: mol_type = other DNA
aactatcttctccagttggt

SEQ ID NO: 231565 - DNA, 20 bp, synthetic construct
  source 1..20: mol_type = other DNA
caactatcttctccagttgg

SEQ ID NO: 231566 - DNA, 20 bp, synthetic construct
  source 1..20: mol_type = other DNA
gcaactatcttctccagttg

SEQ ID NO: 231567 - DNA, 20 bp, synthetic construct
  source 1..20: mol_type = other DNA
ggcaactatcttctccagtt

SEQ ID NO: 231568 - DNA, 20 bp, synthetic construct
  source 1..20: mol_type = other DNA
tggcaactatcttctccagt

SEQ ID NO: 231569 - DNA, 20 bp, synthetic construct
  source 1..20: mol_type = other DNA
gtggcaactatcttctccag

SEQ ID NO: 231570 - DNA, 20 bp, synthetic construct
  source 1..20: mol_type = other DNA
tgtggcaactatcttctcca

SEQ ID NO: 231571 - DNA, 20 bp, synthetic construct
  source 1..20: mol_type = other DNA
ttgtggcaactatcttctcc

SEQ ID NO: 231572 - DNA, 20 bp, synthetic construct
  source 1..20: mol_type = other DNA
tttgtggcaactatcttctc

SEQ ID NO: 231573 - DNA, 20 bp, synthetic construct
  source 1..20: mol_type = other DNA
atttgtggcaactatcttct

SEQ ID NO: 231574 - DNA, 20 bp, synthetic construct
  source 1..20: mol_type = other DNA
tatttgtggcaactatcttc

SEQ ID NO: 231575 - DNA, 20 bp, synthetic construct
  source 1..20: mol_type = other DNA
atatttgtggcaactatctt

SEQ ID NO: 231576 - DNA, 20 bp, synthetic construct
  source 1..20: mol_type = other DNA
catatttgtggcaactatct

SEQ ID NO: 231577 - DNA, 20 bp, synthetic construct
  source 1..20: mol_type = other DNA
tcatatttgtggcaactatc

SEQ ID NO: 231578 - DNA, 20 bp, synthetic construct
  source 1..20: mol_type = other DNA
atcatatttgtggcaactat

SEQ ID NO: 231579 - DNA, 20 bp, synthetic construct
  source 1..20: mol_type = other DNA
gatcatatttgtggcaacta

SEQ ID NO: 231580 - DNA, 20 bp, synthetic construct
  source 1..20: mol_type = other DNA
tgatcatatttgtggcaact

SEQ ID NO: 231581 - DNA, 20 bp, synthetic construct
  source 1..20: mol_type = other DNA
ttgatcatatttgtggcaac

SEQ ID NO: 231582 - DNA, 20 bp, synthetic construct
  source 1..20: mol_type = other DNA
cttgatcatatttgtggcaa

SEQ ID NO: 231583 - DNA, 20 bp, synthetic construct
  source 1..20: mol_type = other DNA
ccttgatcatatttgtggca

SEQ ID NO: 231584 - DNA, 20 bp, synthetic construct
  source 1..20: mol_type = other DNA
cccttgatcatatttgtggc

SEQ ID NO: 231585 - DNA, 20 bp, synthetic construct
  source 1..20: mol_type = other DNA
acccttgatcatatttgtgg

SEQ ID NO: 231586 - DNA, 20 bp, synthetic construct
  source 1..20: mol_type = other DNA
aacccttgatcatatttgtg

SEQ ID NO: 231587 - DNA, 20 bp, synthetic construct
  source 1..20: mol_type = other DNA
taacccttgatcatatttgt

SEQ ID NO: 231588 - DNA, 20 bp, synthetic construct
  source 1..20: mol_type = other DNA
ttaacccttgatcatatttg

SEQ ID NO: 231589 - DNA, 20 bp, synthetic construct
  source 1..20: mol_type = other DNA
attaacccttgatcatattt

SEQ ID NO: 231590 - DNA, 20 bp, synthetic construct
  source 1..20: mol_type = other DNA
cattaacccttgatcatatt

SEQ ID NO: 231591 - DNA, 20 bp, synthetic construct
  source 1..20: mol_type = other DNA
acattaacccttgatcatat

SEQ ID NO: 231592 - DNA, 20 bp, synthetic construct
  source 1..20: mol_type = other DNA
aacattaacccttgatcata

SEQ ID NO: 231593 - DNA, 20 bp, synthetic construct
  source 1..20: mol_type = other DNA
taacattaacccttgatcat

SEQ ID NO: 231594 - DNA, 20 bp, synthetic construct
  source 1..20: mol_type = other DNA
ataacattaacccttgatca

SEQ ID NO: 231595 - DNA, 20 bp, synthetic construct
  source 1..20: mol_type = other DNA
aataacattaacccttgatc

SEQ ID NO: 231596 - DNA, 20 bp, synthetic construct
  source 1..20: mol_type = other DNA
gaataacattaacccttgat

SEQ ID NO: 231597 - DNA, 20 bp, synthetic construct
  source 1..20: mol_type = other DNA
tgaataacattaacccttga

SEQ ID NO: 231598 - DNA, 20 bp, synthetic construct
  source 1..20: mol_type = other DNA
atgaataacattaacccttg

SEQ ID NO: 231599 - DNA, 20 bp, synthetic construct
  source 1..20: mol_type = other DNA
tatgaataacattaaccctt

SEQ ID NO: 231600 - DNA, 20 bp, synthetic construct
  source 1..20: mol_type = other DNA
ttatgaataacattaaccct

SEQ ID NO: 231601 - DNA, 20 bp, synthetic construct
  source 1..20: mol_type = other DNA
tttatgaataacattaaccc

SEQ ID NO: 231602 - DNA, 20 bp, synthetic construct
  source 1..20: mol_type = other DNA
atttatgaataacattaacc

SEQ ID NO: 231603 - DNA, 20 bp, synthetic construct
  source 1..20: mol_type = other DNA
aatttatgaataacattaac

SEQ ID NO: 231604 - DNA, 20 bp, synthetic construct
  source 1..20: mol_type = other DNA
taatttatgaataacattaa

SEQ ID NO: 231605 - DNA, 20 bp, synthetic construct
  source 1..20: mol_type = other DNA
ttaatttatgaataacatta

SEQ ID NO: 231606 - DNA, 20 bp, synthetic construct
  source 1..20: mol_type = other DNA
cttaatttatgaataacatt

SEQ ID NO: 231607 - DNA, 20 bp, synthetic construct
  source 1..20: mol_type = other DNA
tcttaatttatgaataacat

SEQ ID NO: 231608 - DNA, 20 bp, synthetic construct
  source 1..20: mol_type = other DNA
ctcttaatttatgaataaca

SEQ ID NO: 231609 - DNA, 20 bp, synthetic construct
  source 1..20: mol_type = other DNA
gctcttaatttatgaataac

SEQ ID NO: 231610 - DNA, 20 bp, synthetic construct
  source 1..20: mol_type = other DNA
ggctcttaatttatgaataa

SEQ ID NO: 231611 - DNA, 20 bp, synthetic construct
  source 1..20: mol_type = other DNA
gggctcttaatttatgaata

SEQ ID NO: 231612 - DNA, 20 bp, synthetic construct
  source 1..20: mol_type = other DNA
tgggctcttaatttatgaat

SEQ ID NO: 231613 - DNA, 20 bp, synthetic construct
  source 1..20: mol_type = other DNA
gtgggctcttaatttatgaa

SEQ ID NO: 231614 - DNA, 20 bp, synthetic construct
  source 1..20: mol_type = other DNA
tgtgggctcttaatttatga

SEQ ID NO: 231615 - DNA, 20 bp, synthetic construct
  source 1..20: mol_type = other DNA
gtgtgggctcttaatttatg

SEQ ID NO: 231616 - DNA, 20 bp, synthetic construct
  source 1..20: mol_type = other DNA
tgtgtgggctcttaatttat

SEQ ID NO: 231617 - DNA, 20 bp, synthetic construct
  source 1..20: mol_type = other DNA
ttgtgtgggctcttaattta

SEQ ID NO: 231618 - DNA, 20 bp, synthetic construct
  source 1..20: mol_type = other DNA
cttgtgtgggctcttaattt

SEQ ID NO: 231619 - DNA, 20 bp, synthetic construct
  source 1..20: mol_type = other DNA
acttgtgtgggctcttaatt

SEQ ID NO: 231620 - DNA, 20 bp, synthetic construct
  source 1..20: mol_type = other DNA
gacttgtgtgggctcttaat

SEQ ID NO: 231621 - DNA, 20 bp, synthetic construct
  source 1..20: mol_type = other DNA
tgacttgtgtgggctcttaa

SEQ ID NO: 231622 - DNA, 20 bp, synthetic construct
  source 1..20: mol_type = other DNA
atgacttgtgtgggctctta

SEQ ID NO: 231623 - DNA, 20 bp, synthetic construct
  source 1..20: mol_type = other DNA
aatgacttgtgtgggctctt

SEQ ID NO: 231624 - DNA, 20 bp, synthetic construct
  source 1..20: mol_type = other DNA
taatgacttgtgtgggctct

SEQ ID NO: 231625 - DNA, 20 bp, synthetic construct
  source 1..20: mol_type = other DNA
ctaatgacttgtgtgggctc

SEQ ID NO: 231626 - DNA, 20 bp, synthetic construct
  source 1..20: mol_type = other DNA
tctaatgacttgtgtgggct

SEQ ID NO: 231627 - DNA, 20 bp, synthetic construct
  source 1..20: mol_type = other DNA
ttctaatgacttgtgtgggc

SEQ ID NO: 231628 - DNA, 20 bp, synthetic construct
  source 1..20: mol_type = other DNA
attctaatgacttgtgtggg

SEQ ID NO: 231629 - DNA, 20 bp, synthetic construct
  source 1..20: mol_type = other DNA
tattctaatgacttgtgtgg

SEQ ID NO: 231630 - DNA, 20 bp, synthetic construct
  source 1..20: mol_type = other DNA
ttattctaatgacttgtgtg

SEQ ID NO: 231631 - DNA, 20 bp, synthetic construct
  source 1..20: mol_type = other DNA
cttattctaatgacttgtgt

SEQ ID NO: 231632 - DNA, 20 bp, synthetic construct
  source 1..20: mol_type = other DNA
gcttattctaatgacttgtg

SEQ ID NO: 231633 - DNA, 20 bp, synthetic construct
  source 1..20: mol_type = other DNA
tgcttattctaatgacttgt

SEQ ID NO: 231634 - DNA, 20 bp, synthetic construct
  source 1..20: mol_type = other DNA
gtgcttattctaatgacttg

SEQ ID NO: 231635 - DNA, 20 bp, synthetic construct
  source 1..20: mol_type = other DNA
agtgcttattctaatgactt

SEQ ID NO: 231636 - DNA, 20 bp, synthetic construct
  source 1..20: mol_type = other DNA
cagtgcttattctaatgact

SEQ ID NO: 231637 - DNA, 20 bp, synthetic construct
  source 1..20: mol_type = other DNA
tcagtgcttattctaatgac

SEQ ID NO: 231638 - DNA, 20 bp, synthetic construct
  source 1..20: mol_type = other DNA
ctcagtgcttattctaatga

SEQ ID NO: 231639 - DNA, 20 bp, synthetic construct
  source 1..20: mol_type = other DNA
tctcagtgcttattctaatg

SEQ ID NO: 231640 - DNA, 20 bp, synthetic construct
  source 1..20: mol_type = other DNA
gtctcagtgcttattctaat

SEQ ID NO: 231641 - DNA, 20 bp, synthetic construct
  source 1..20: mol_type = other DNA
ggtctcagtgcttattctaa

SEQ ID NO: 231642 - DNA, 20 bp, synthetic construct
  source 1..20: mol_type = other DNA
aggtctcagtgcttattcta

SEQ ID NO: 231643 - DNA, 20 bp, synthetic construct
  source 1..20: mol_type = other DNA
caggtctcagtgcttattct

SEQ ID NO: 231644 - DNA, 20 bp, synthetic construct
  source 1..20: mol_type = other DNA
tcaggtctcagtgcttattc

SEQ ID NO: 231645 - DNA, 20 bp, synthetic construct
  source 1..20: mol_type = other DNA
ttcaggtctcagtgcttatt

SEQ ID NO: 231646 - DNA, 20 bp, synthetic construct
  source 1..20: mol_type = other DNA
gttcaggtctcagtgcttat

SEQ ID NO: 231647 - DNA, 20 bp, synthetic construct
  source 1..20: mol_type = other DNA
tgttcaggtctcagtgctta

SEQ ID NO: 231648 - DNA, 20 bp, synthetic construct
  source 1..20: mol_type = other DNA
ctgttcaggtctcagtgctt

SEQ ID NO: 231649 - DNA, 20 bp, synthetic construct
  source 1..20: mol_type = other DNA
tctgttcaggtctcagtgct

SEQ ID NO: 231650 - DNA, 20 bp, synthetic construct
  source 1..20: mol_type = other DNA
gtctgttcaggtctcagtgc

SEQ ID NO: 231651 - DNA, 20 bp, synthetic construct
  source 1..20: mol_type = other DNA
tgtctgttcaggtctcagtg

SEQ ID NO: 231652 - DNA, 20 bp, synthetic construct
  source 1..20: mol_type = other DNA
ttgtctgttcaggtctcagt

SEQ ID NO: 231653 - DNA, 20 bp, synthetic construct
  source 1..20: mol_type = other DNA
cttgtctgttcaggtctcag

SEQ ID NO: 231654 - DNA, 20 bp, synthetic construct
  source 1..20: mol_type = other DNA
gcttgtctgttcaggtctca

SEQ ID NO: 231655 - DNA, 20 bp, synthetic construct
  source 1..20: mol_type = other DNA
tgcttgtctgttcaggtctc

SEQ ID NO: 231656 - DNA, 20 bp, synthetic construct
  source 1..20: mol_type = other DNA
ttgcttgtctgttcaggtct

SEQ ID NO: 231657 - DNA, 20 bp, synthetic construct
  source 1..20: mol_type = other DNA
tttgcttgtctgttcaggtc

SEQ ID NO: 231658 - DNA, 20 bp, synthetic construct
  source 1..20: mol_type = other DNA
ttttgcttgtctgttcaggt

SEQ ID NO: 231659 - DNA, 20 bp, synthetic construct
  source 1..20: mol_type = other DNA
tttttgcttgtctgttcagg

SEQ ID NO: 231660 - DNA, 20 bp, synthetic construct
  source 1..20: mol_type = other DNA
ctttttgcttgtctgttcag

SEQ ID NO: 231661 - DNA, 20 bp, synthetic construct
  source 1..20: mol_type = other DNA
tctttttgcttgtctgttca

SEQ ID NO: 231662 - DNA, 20 bp, synthetic construct
  source 1..20: mol_type = other DNA
ttctttttgcttgtctgttc

SEQ ID NO: 231663 - DNA, 20 bp, synthetic construct
  source 1..20: mol_type = other DNA
attctttttgcttgtctgtt

SEQ ID NO: 231664 - DNA, 20 bp, synthetic construct
  source 1..20: mol_type = other DNA
cattctttttgcttgtctgt

SEQ ID NO: 231665 - DNA, 20 bp, synthetic construct
  source 1..20: mol_type = other DNA
tcattctttttgcttgtctg

SEQ ID NO: 231666 - DNA, 20 bp, synthetic construct
  source 1..20: mol_type = other DNA
ctcattctttttgcttgtct

SEQ ID NO: 231667 - DNA, 20 bp, synthetic construct
  source 1..20: mol_type = other DNA
tctcattctttttgcttgtc

SEQ ID NO: 231668 - DNA, 20 bp, synthetic construct
  source 1..20: mol_type = other DNA
ctctcattctttttgcttgt

SEQ ID NO: 231669 - DNA, 20 bp, synthetic construct
  source 1..20: mol_type = other DNA
actctcattctttttgcttg

SEQ ID NO: 231670 - DNA, 20 bp, synthetic construct
  source 1..20: mol_type = other DNA
cactctcattctttttgctt

SEQ ID NO: 231671 - DNA, 20 bp, synthetic construct
  source 1..20: mol_type = other DNA
ccactctcattctttttgct

SEQ ID NO: 231672 - DNA, 20 bp, synthetic construct
  source 1..20: mol_type = other DNA
cccactctcattctttttgc

SEQ ID NO: 231673 - DNA, 20 bp, synthetic construct
  source 1..20: mol_type = other DNA
acccactctcattctttttg

SEQ ID NO: 231674 - DNA, 20 bp, synthetic construct
  source 1..20: mol_type = other DNA
gacccactctcattcttttt

SEQ ID NO: 231675 - DNA, 20 bp, synthetic construct
  source 1..20: mol_type = other DNA
cgacccactctcattctttt

SEQ ID NO: 231676 - DNA, 20 bp, synthetic construct
  source 1..20: mol_type = other DNA
ccgacccactctcattcttt

SEQ ID NO: 231677 - DNA, 20 bp, synthetic construct
  source 1..20: mol_type = other DNA
gccgacccactctcattctt

SEQ ID NO: 231678 - DNA, 20 bp, synthetic construct
  source 1..20: mol_type = other DNA
cgccgacccactctcattct

SEQ ID NO: 231679 - DNA, 20 bp, synthetic construct
  source 1..20: mol_type = other DNA
gcgccgacccactctcattc

SEQ ID NO: 231680 - DNA, 20 bp, synthetic construct
  source 1..20: mol_type = other DNA
cgcgccgacccactctcatt

SEQ ID NO: 231681 - DNA, 20 bp, synthetic construct
  source 1..20: mol_type = other DNA
ccgcgccgacccactctcat

SEQ ID NO: 231682 - DNA, 20 bp, synthetic construct
  source 1..20: mol_type = other DNA
gccgcgccgacccactctca

SEQ ID NO: 231683 - DNA, 20 bp, synthetic construct
  source 1..20: mol_type = other DNA
cgccgcgccgacccactctc

SEQ ID NO: 231684 - DNA, 20 bp, synthetic construct
  source 1..20: mol_type = other DNA
ccgccgcgccgacccactct

SEQ ID NO: 231685 - DNA, 20 bp, synthetic construct
  source 1..20: mol_type = other DNA
gccgccgcgccgacccactc

SEQ ID NO: 231686 - DNA, 20 bp, synthetic construct
  source 1..20: mol_type = other DNA
agccgccgcgccgacccact

SEQ ID NO: 231687 - DNA, 20 bp, synthetic construct
  source 1..20: mol_type = other DNA
gagccgccgcgccgacccac

SEQ ID NO: 231688 - DNA, 20 bp, synthetic construct
  source 1..20: mol_type = other DNA
tgagccgccgcgccgaccca

SEQ ID NO: 231689 - DNA, 20 bp, synthetic construct
  source 1..20: mol_type = other DNA
atgagccgccgcgccgaccc

SEQ ID NO: 231690 - DNA, 20 bp, synthetic construct
  source 1..20: mol_type = other DNA
catgagccgccgcgccgacc

SEQ ID NO: 231691 - DNA, 20 bp, synthetic construct
  source 1..20: mol_type = other DNA
gcatgagccgccgcgccgac

SEQ ID NO: 231692 - DNA, 20 bp, synthetic construct
  source 1..20: mol_type = other DNA
ggcatgagccgccgcgccga

SEQ ID NO: 231693 - DNA, 20 bp, synthetic construct
  source 1..20: mol_type = other DNA
aggcatgagccgccgcgccg

SEQ ID NO: 231694 - DNA, 20 bp, synthetic construct
  source 1..20: mol_type = other DNA
caggcatgagccgccgcgcc

SEQ ID NO: 231695 - DNA, 20 bp, synthetic construct
  source 1..20: mol_type = other DNA
acaggcatgagccgccgcgc

SEQ ID NO: 231696 - DNA, 20 bp, synthetic construct
  source 1..20: mol_type = other DNA
tacaggcatgagccgccgcg

SEQ ID NO: 231697 - DNA, 20 bp, synthetic construct
  source 1..20: mol_type = other DNA
ttacaggcatgagccgccgc

SEQ ID NO: 231698 - DNA, 20 bp, synthetic construct
  source 1..20: mol_type = other DNA
attacaggcatgagccgccg

SEQ ID NO: 231699 - DNA, 20 bp, synthetic construct
  source 1..20: mol_type = other DNA
gattacaggcatgagccgcc

SEQ ID NO: 231700 - DNA, 20 bp, synthetic construct
  source 1..20: mol_type = other DNA
ggattacaggcatgagccgc

SEQ ID NO: 231701 - DNA, 20 bp, synthetic construct
  source 1..20: mol_type = other DNA
gggattacaggcatgagccg

SEQ ID NO: 231702 - DNA, 20 bp, synthetic construct
  source 1..20: mol_type = other DNA
tgggattacaggcatgagcc

SEQ ID NO: 231703 - DNA, 20 bp, synthetic construct
  source 1..20: mol_type = other DNA
ctgggattacaggcatgagc

SEQ ID NO: 231704 - DNA, 20 bp, synthetic construct
  source 1..20: mol_type = other DNA
gctgggattacaggcatgag

SEQ ID NO: 231705 - DNA, 20 bp, synthetic construct
  source 1..20: mol_type = other DNA
tgctgggattacaggcatga

SEQ ID NO: 231706 - DNA, 20 bp, synthetic construct
  source 1..20: mol_type = other DNA
gtgctgggattacaggcatg

SEQ ID NO: 231707 - DNA, 20 bp, synthetic construct
  source 1..20: mol_type = other DNA
agtgctgggattacaggcat

SEQ ID NO: 231708 - DNA, 20 bp, synthetic construct
  source 1..20: mol_type = other DNA
aagtgctgggattacaggca

SEQ ID NO: 231709 - DNA, 20 bp, synthetic construct
  source 1..20: mol_type = other DNA
aaagtgctgggattacaggc

SEQ ID NO: 231710 - DNA, 20 bp, synthetic construct
  source 1..20: mol_type = other DNA
caaagtgctgggattacagg

SEQ ID NO: 231711 - DNA, 20 bp, synthetic construct
  source 1..20: mol_type = other DNA
ccaaagtgctgggattacag

SEQ ID NO: 231712 - DNA, 20 bp, synthetic construct
  source 1..20: mol_type = other DNA
tccaaagtgctgggattaca

SEQ ID NO: 231713 - DNA, 20 bp, synthetic construct
  source 1..20: mol_type = other DNA
ttccaaagtgctgggattac

SEQ ID NO: 231714 - DNA, 20 bp, synthetic construct
  source 1..20: mol_type = other DNA
cttccaaagtgctgggatta

SEQ ID NO: 231715 - DNA, 20 bp, synthetic construct
  source 1..20: mol_type = other DNA
ccttccaaagtgctgggatt

SEQ ID NO: 231716 - DNA, 20 bp, synthetic construct
  source 1..20: mol_type = other DNA
gccttccaaagtgctgggat

SEQ ID NO: 231717 - DNA, 20 bp, synthetic construct
  source 1..20: mol_type = other DNA
agccttccaaagtgctggga

SEQ ID NO: 231718 - DNA, 20 bp, synthetic construct
  source 1..20: mol_type = other DNA
cagccttccaaagtgctggg

SEQ ID NO: 231719 - DNA, 20 bp, synthetic construct
  source 1..20: mol_type = other DNA
tcagccttccaaagtgctgg

SEQ ID NO: 231720 - DNA, 20 bp, synthetic construct
  source 1..20: mol_type = other DNA
ttcagccttccaaagtgctg

SEQ ID NO: 231721 - DNA, 20 bp, synthetic construct
  source 1..20: mol_type = other DNA
cttcagccttccaaagtgct

SEQ ID NO: 231722 - DNA, 20 bp, synthetic construct
  source 1..20: mol_type = other DNA
gcttcagccttccaaagtgc

SEQ ID NO: 231723 - DNA, 20 bp, synthetic construct
  source 1..20: mol_type = other DNA
tgcttcagccttccaaagtg

SEQ ID NO: 231724 - DNA, 20 bp, synthetic construct
  source 1..20: mol_type = other DNA
ctgcttcagccttccaaagt

SEQ ID NO: 231725 - DNA, 20 bp, synthetic construct
  source 1..20: mol_type = other DNA
cctgcttcagccttccaaag

SEQ ID NO: 231726 - DNA, 20 bp, synthetic construct
  source 1..20: mol_type = other DNA
gcctgcttcagccttccaaa

SEQ ID NO: 231727 - DNA, 20 bp, synthetic construct
  source 1..20: mol_type = other DNA
cgcctgcttcagccttccaa

SEQ ID NO: 231728 - DNA, 20 bp, synthetic construct
  source 1..20: mol_type = other DNA
ccgcctgcttcagccttcca

SEQ ID NO: 231729 - DNA, 20 bp, synthetic construct
  source 1..20: mol_type = other DNA
tccgcctgcttcagccttcc

SEQ ID NO: 231730 - DNA, 20 bp, synthetic construct
  source 1..20: mol_type = other DNA
atccgcctgcttcagccttc

SEQ ID NO: 231731 - DNA, 20 bp, synthetic construct
  source 1..20: mol_type = other DNA
gatccgcctgcttcagcctt

SEQ ID NO: 231732 - DNA, 20 bp, synthetic construct
  source 1..20: mol_type = other DNA
tgatccgcctgcttcagcct

SEQ ID NO: 231733 - DNA, 20 bp, synthetic construct
  source 1..20: mol_type = other DNA
gtgatccgcctgcttcagcc

SEQ ID NO: 231734 - DNA, 20 bp, synthetic construct
  source 1..20: mol_type = other DNA
agtgatccgcctgcttcagc

SEQ ID NO: 231735 - DNA, 20 bp, synthetic construct
  source 1..20: mol_type = other DNA
aagtgatccgcctgcttcag

SEQ ID NO: 231736 - DNA, 20 bp, synthetic construct
  source 1..20: mol_type = other DNA
caagtgatccgcctgcttca

SEQ ID NO: 231737 - DNA, 20 bp, synthetic construct
  source 1..20: mol_type = other DNA
tcaagtgatccgcctgcttc

SEQ ID NO: 231738 - DNA, 20 bp, synthetic construct
  source 1..20: mol_type = other DNA
atcaagtgatccgcctgctt

SEQ ID NO: 231739 - DNA, 20 bp, synthetic construct
  source 1..20: mol_type = other DNA
gatcaagtgatccgcctgct

SEQ ID NO: 231740 - DNA, 20 bp, synthetic construct
  source 1..20: mol_type = other DNA
ggatcaagtgatccgcctgc

SEQ ID NO: 231741 - DNA, 20 bp, synthetic construct
  source 1..20: mol_type = other DNA
gggatcaagtgatccgcctg

SEQ ID NO: 231742 - DNA, 20 bp, synthetic construct
  source 1..20: mol_type = other DNA
tgggatcaagtgatccgcct

SEQ ID NO: 231743 - DNA, 20 bp, synthetic construct
  source 1..20: mol_type = other DNA
ctgggatcaagtgatccgcc

SEQ ID NO: 231744 - DNA, 20 bp, synthetic construct
  source 1..20: mol_type = other DNA
cctgggatcaagtgatccgc

SEQ ID NO: 231745 - DNA, 20 bp, synthetic construct
  source 1..20: mol_type = other DNA
tcctgggatcaagtgatccg

SEQ ID NO: 231746 - DNA, 20 bp, synthetic construct
  source 1..20: mol_type = other DNA
ctcctgggatcaagtgatcc

SEQ ID NO: 231747 - DNA, 20 bp, synthetic construct
  source 1..20: mol_type = other DNA
actcctgggatcaagtgatc

SEQ ID NO: 231748 - DNA, 20 bp, synthetic construct
  source 1..20: mol_type = other DNA
aactcctgggatcaagtgat

SEQ ID NO: 231749 - DNA, 20 bp, synthetic construct
  source 1..20: mol_type = other DNA
gaactcctgggatcaagtga

SEQ ID NO: 231750 - DNA, 20 bp, synthetic construct
  source 1..20: mol_type = other DNA
ggaactcctgggatcaagtg

SEQ ID NO: 231751 - DNA, 20 bp, synthetic construct
  source 1..20: mol_type = other DNA
tggaactcctgggatcaagt

SEQ ID NO: 231752 - DNA, 20 bp, synthetic construct
  source 1..20: mol_type = other DNA
ttggaactcctgggatcaag

SEQ ID NO: 231753 - DNA, 20 bp, synthetic construct
  source 1..20: mol_type = other DNA
gttggaactcctgggatcaa

SEQ ID NO: 231754 - DNA, 20 bp, synthetic construct
  source 1..20: mol_type = other DNA
tgttggaactcctgggatca

SEQ ID NO: 231755 - DNA, 20 bp, synthetic construct
  source 1..20: mol_type = other DNA
gtgttggaactcctgggatc

SEQ ID NO: 231756 - DNA, 20 bp, synthetic construct
  source 1..20: mol_type = other DNA
ggtgttggaactcctgggat

SEQ ID NO: 231757 - DNA, 20 bp, synthetic construct
  source 1..20: mol_type = other DNA
tggtgttggaactcctggga

SEQ ID NO: 231758 - DNA, 20 bp, synthetic construct
  source 1..20: mol_type = other DNA
ctggtgttggaactcctggg

SEQ ID NO: 231759 - DNA, 20 bp, synthetic construct
  source 1..20: mol_type = other DNA
gctggtgttggaactcctgg

SEQ ID NO: 231760 - DNA, 20 bp, synthetic construct
  source 1..20: mol_type = other DNA
ggctggtgttggaactcctg

SEQ ID NO: 231761 - DNA, 20 bp, synthetic construct
  source 1..20: mol_type = other DNA
aggctggtgttggaactcct

SEQ ID NO: 231762 - DNA, 20 bp, synthetic construct
  source 1..20: mol_type = other DNA
caggctggtgttggaactcc

SEQ ID NO: 231763 - DNA, 20 bp, synthetic construct
  source 1..20: mol_type = other DNA
tcaggctggtgttggaactc

SEQ ID NO: 231764 - DNA, 20 bp, synthetic construct
  source 1..20: mol_type = other DNA
ctcaggctggtgttggaact

SEQ ID NO: 231765 - DNA, 20 bp, synthetic construct
  source 1..20: mol_type = other DNA
gctcaggctggtgttggaac

SEQ ID NO: 231766 - DNA, 20 bp, synthetic construct
  source 1..20: mol_type = other DNA
tgctcaggctggtgttggaa

SEQ ID NO: 231767 - DNA, 20 bp, synthetic construct
  source 1..20: mol_type = other DNA
ttgctcaggctggtgttgga

SEQ ID NO: 231768 - DNA, 20 bp, synthetic construct
  source 1..20: mol_type = other DNA
gttgctcaggctggtgttgg

SEQ ID NO: 231769 - DNA, 20 bp, synthetic construct
  source 1..20: mol_type = other DNA
tgttgctcaggctggtgttg

SEQ ID NO: 231770 - DNA, 20 bp, synthetic construct
  source 1..20: mol_type = other DNA
atgttgctcaggctggtgtt

SEQ ID NO: 231771 - DNA, 20 bp, synthetic construct
  source 1..20: mol_type = other DNA
catgttgctcaggctggtgt

SEQ ID NO: 231772 - DNA, 20 bp, synthetic construct
  source 1..20: mol_type = other DNA
ccatgttgctcaggctggtg

SEQ ID NO: 231773 - DNA, 20 bp, synthetic construct
  source 1..20: mol_type = other DNA
accatgttgctcaggctggt

SEQ ID NO: 231774 - DNA, 20 bp, synthetic construct
  source 1..20: mol_type = other DNA
caccatgttgctcaggctgg

SEQ ID NO: 231775 - DNA, 20 bp, synthetic construct
  source 1..20: mol_type = other DNA
tcaccatgttgctcaggctg

SEQ ID NO: 231776 - DNA, 20 bp, synthetic construct
  source 1..20: mol_type = other DNA
ttcaccatgttgctcaggct

SEQ ID NO: 231777 - DNA, 20 bp, synthetic construct
  source 1..20: mol_type = other DNA
tttcaccatgttgctcaggc

SEQ ID NO: 231778 - DNA, 20 bp, synthetic construct
  source 1..20: mol_type = other DNA
gtttcaccatgttgctcagg

SEQ ID NO: 231779 - DNA, 20 bp, synthetic construct
  source 1..20: mol_type = other DNA
ggtttcaccatgttgctcag

SEQ ID NO: 231780 - DNA, 20 bp, synthetic construct
  source 1..20: mol_type = other DNA
gggtttcaccatgttgctca

SEQ ID NO: 231781 - DNA, 20 bp, synthetic construct
  source 1..20: mol_type = other DNA
agggtttcaccatgttgctc

SEQ ID NO: 231782 - DNA, 20 bp, synthetic construct
  source 1..20: mol_type = other DNA
cagggtttcaccatgttgct

SEQ ID NO: 231783 - DNA, 20 bp, synthetic construct
  source 1..20: mol_type = other DNA
gcagggtttcaccatgttgc

SEQ ID NO: 231784 - DNA, 20 bp, synthetic construct
  source 1..20: mol_type = other DNA
ggcagggtttcaccatgttg

SEQ ID NO: 231785 - DNA, 20 bp, synthetic construct
  source 1..20: mol_type = other DNA
aggcagggtttcaccatgtt

SEQ ID NO: 231786 - DNA, 20 bp, synthetic construct
  source 1..20: mol_type = other DNA
gaggcagggtttcaccatgt

SEQ ID NO: 231787 - DNA, 20 bp, synthetic construct
  source 1..20: mol_type = other DNA
agaggcagggtttcaccatg

SEQ ID NO: 231788 - DNA, 20 bp, synthetic construct
  source 1..20: mol_type = other DNA
tagaggcagggtttcaccat

SEQ ID NO: 231789 - DNA, 20 bp, synthetic construct
  source 1..20: mol_type = other DNA
gtagaggcagggtttcacca

SEQ ID NO: 231790 - DNA, 20 bp, synthetic construct
  source 1..20: mol_type = other DNA
tgtagaggcagggtttcacc

SEQ ID NO: 231791 - DNA, 20 bp, synthetic construct
  source 1..20: mol_type = other DNA
ttgtagaggcagggtttcac

SEQ ID NO: 231792 - DNA, 20 bp, synthetic construct
  source 1..20: mol_type = other DNA
tttgtagaggcagggtttca

SEQ ID NO: 231793 - DNA, 20 bp, synthetic construct
  source 1..20: mol_type = other DNA
ttttgtagaggcagggtttc

SEQ ID NO: 231794 - DNA, 20 bp, synthetic construct
  source 1..20: mol_type = other DNA
cttttgtagaggcagggttt

SEQ ID NO: 231795 - DNA, 20 bp, synthetic construct
  source 1..20: mol_type = other DNA
acttttgtagaggcagggtt

SEQ ID NO: 231796 - DNA, 20 bp, synthetic construct
  source 1..20: mol_type = other DNA
gacttttgtagaggcagggt

SEQ ID NO: 231797 - DNA, 20 bp, synthetic construct
  source 1..20: mol_type = other DNA
tgacttttgtagaggcaggg

SEQ ID NO: 231798 - DNA, 20 bp, synthetic construct
  source 1..20: mol_type = other DNA
atgacttttgtagaggcagg

SEQ ID NO: 231799 - DNA, 20 bp, synthetic construct
  source 1..20: mol_type = other DNA
tatgacttttgtagaggcag

SEQ ID NO: 231800 - DNA, 20 bp, synthetic construct
  source 1..20: mol_type = other DNA
ttatgacttttgtagaggca

SEQ ID NO: 231801 - DNA, 20 bp, synthetic construct
  source 1..20: mol_type = other DNA
tttatgacttttgtagaggc

SEQ ID NO: 231802 - DNA, 20 bp, synthetic construct
  source 1..20: mol_type = other DNA
atttatgacttttgtagagg

SEQ ID NO: 231803 - DNA, 20 bp, synthetic construct
  source 1..20: mol_type = other DNA
tatttatgacttttgtagag

SEQ ID NO: 231804 - DNA, 20 bp, synthetic construct
  source 1..20: mol_type = other DNA
atatttatgacttttgtaga

SEQ ID NO: 231805 - DNA, 20 bp, synthetic construct
  source 1..20: mol_type = other DNA
aatatttatgacttttgtag

SEQ ID NO: 231806 - DNA, 20 bp, synthetic construct
  source 1..20: mol_type = other DNA
taatatttatgacttttgta

SEQ ID NO: 231807 - DNA, 20 bp, synthetic construct
  source 1..20: mol_type = other DNA
ctaatatttatgacttttgt

SEQ ID NO: 231808 - DNA, 20 bp, synthetic construct
  source 1..20: mol_type = other DNA
gctaatatttatgacttttg

SEQ ID NO: 231809 - DNA, 20 bp, synthetic construct
  source 1..20: mol_type = other DNA
ggctaatatttatgactttt

SEQ ID NO: 231810 - DNA, 20 bp, synthetic construct
  source 1..20: mol_type = other DNA
cggctaatatttatgacttt

SEQ ID NO: 231811 - DNA, 20 bp, synthetic construct
  source 1..20: mol_type = other DNA
ccggctaatatttatgactt

SEQ ID NO: 231812 - DNA, 20 bp, synthetic construct
  source 1..20: mol_type = other DNA
cccggctaatatttatgact

SEQ ID NO: 231813 - DNA, 20 bp, synthetic construct
  source 1..20: mol_type = other DNA
acccggctaatatttatgac

SEQ ID NO: 231814 - DNA, 20 bp, synthetic construct
  source 1..20: mol_type = other DNA
cacccggctaatatttatga

SEQ ID NO: 231815 - DNA, 20 bp, synthetic construct
  source 1..20: mol_type = other DNA
acacccggctaatatttatg

SEQ ID NO: 231816 - DNA, 20 bp, synthetic construct
  source 1..20: mol_type = other DNA
cacacccggctaatatttat

SEQ ID NO: 231817 - DNA, 20 bp, synthetic construct
  source 1..20: mol_type = other DNA
tcacacccggctaatattta

SEQ ID NO: 231818 - DNA, 20 bp, synthetic construct
  source 1..20: mol_type = other DNA
atcacacccggctaatattt

SEQ ID NO: 231819 - DNA, 20 bp, synthetic construct
  source 1..20: mol_type = other DNA
catcacacccggctaatatt

SEQ ID NO: 231820 - DNA, 20 bp, synthetic construct
  source 1..20: mol_type = other DNA
ccatcacacccggctaatat

SEQ ID NO: 231821 - DNA, 20 bp, synthetic construct
  source 1..20: mol_type = other DNA
gccatcacacccggctaata

SEQ ID NO: 231822 - DNA, 20 bp, synthetic construct
  source 1..20: mol_type = other DNA
tgccatcacacccggctaat

SEQ ID NO: 231823 - DNA, 20 bp, synthetic construct
  source 1..20: mol_type = other DNA
gtgccatcacacccggctaa

SEQ ID NO: 231824 - DNA, 20 bp, synthetic construct
  source 1..20: mol_type = other DNA
tgtgccatcacacccggcta

SEQ ID NO: 231825 - DNA, 20 bp, synthetic construct
  source 1..20: mol_type = other DNA
gtgtgccatcacacccggct

SEQ ID NO: 231826 - DNA, 20 bp, synthetic construct
  source 1..20: mol_type = other DNA
cgtgtgccatcacacccggc

SEQ ID NO: 231827 - DNA, 20 bp, synthetic construct
  source 1..20: mol_type = other DNA
gcgtgtgccatcacacccgg

SEQ ID NO: 231828 - DNA, 20 bp, synthetic construct
  source 1..20: mol_type = other DNA
ggcgtgtgccatcacacccg

SEQ ID NO: 231829 - DNA, 20 bp, synthetic construct
  source 1..20: mol_type = other DNA
aggcgtgtgccatcacaccc

SEQ ID NO: 231830 - DNA, 20 bp, synthetic construct
  source 1..20: mol_type = other DNA
caggcgtgtgccatcacacc

SEQ ID NO: 231831 - DNA, 20 bp, synthetic construct
  source 1..20: mol_type = other DNA
acaggcgtgtgccatcacac

SEQ ID NO: 231832 - DNA, 20 bp, synthetic construct
  source 1..20: mol_type = other DNA
tacaggcgtgtgccatcaca

SEQ ID NO: 231833 - DNA, 20 bp, synthetic construct
  source 1..20: mol_type = other DNA
ctacaggcgtgtgccatcac

SEQ ID NO: 231834 - DNA, 20 bp, synthetic construct
  source 1..20: mol_type = other DNA
actacaggcgtgtgccatca

SEQ ID NO: 231835 - DNA, 20 bp, synthetic construct
  source 1..20: mol_type = other DNA
gactacaggcgtgtgccatc

SEQ ID NO: 231836 - DNA, 20 bp, synthetic construct
  source 1..20: mol_type = other DNA
ggactacaggcgtgtgccat

SEQ ID NO: 231837 - DNA, 20 bp, synthetic construct
  source 1..20: mol_type = other DNA
gggactacaggcgtgtgcca

SEQ ID NO: 231838 - DNA, 20 bp, synthetic construct
  source 1..20: mol_type = other DNA
tgggactacaggcgtgtgcc

SEQ ID NO: 231839 - DNA, 20 bp, synthetic construct
  source 1..20: mol_type = other DNA
ctgggactacaggcgtgtgc

SEQ ID NO: 231840 - DNA, 20 bp, synthetic construct
  source 1..20: mol_type = other DNA
gctgggactacaggcgtgtg

SEQ ID NO: 231841 - DNA, 20 bp, synthetic construct
  source 1..20: mol_type = other DNA
agctgggactacaggcgtgt

SEQ ID NO: 231842 - DNA, 20 bp, synthetic construct
  source 1..20: mol_type = other DNA
tagctgggactacaggcgtg

SEQ ID NO: 231843 - DNA, 20 bp, synthetic construct
  source 1..20: mol_type = other DNA
gtagctgggactacaggcgt

SEQ ID NO: 231844 - DNA, 20 bp, synthetic construct
  source 1..20: mol_type = other DNA
agtagctgggactacaggcg

SEQ ID NO: 231845 - DNA, 20 bp, synthetic construct
  source 1..20: mol_type = other DNA
gagtagctgggactacaggc

SEQ ID NO: 231846 - DNA, 20 bp, synthetic construct
  source 1..20: mol_type = other DNA
tgagtagctgggactacagg

SEQ ID NO: 231847 - DNA, 20 bp, synthetic construct
  source 1..20: mol_type = other DNA
ctgagtagctgggactacag

SEQ ID NO: 231848 - DNA, 20 bp, synthetic construct
  source 1..20: mol_type = other DNA
cctgagtagctgggactaca

SEQ ID NO: 231849 - DNA, 20 bp, synthetic construct
  source 1..20: mol_type = other DNA
tcctgagtagctgggactac

SEQ ID NO: 231850 - DNA, 20 bp, synthetic construct
  source 1..20: mol_type = other DNA
ctcctgagtagctgggacta

SEQ ID NO: 231851 - DNA, 20 bp, synthetic construct
  source 1..20: mol_type = other DNA
cctcctgagtagctgggact

SEQ ID NO: 231852 - DNA, 20 bp, synthetic construct
  source 1..20: mol_type = other DNA
gcctcctgagtagctgggac

SEQ ID NO: 231853 - DNA, 20 bp, synthetic construct
  source 1..20: mol_type = other DNA
agcctcctgagtagctggga

SEQ ID NO: 231854 - DNA, 20 bp, synthetic construct
  source 1..20: mol_type = other DNA
cagcctcctgagtagctggg

SEQ ID NO: 231855 - DNA, 20 bp, synthetic construct
  source 1..20: mol_type = other DNA
tcagcctcctgagtagctgg

SEQ ID NO: 231856 - DNA, 20 bp, synthetic construct
  source 1..20: mol_type = other DNA
ctcagcctcctgagtagctg

SEQ ID NO: 231857 - DNA, 20 bp, synthetic construct
  source 1..20: mol_type = other DNA
cctcagcctcctgagtagct

SEQ ID NO: 231858 - DNA, 20 bp, synthetic construct
  source 1..20: mol_type = other DNA
acctcagcctcctgagtagc

SEQ ID NO: 231859 - DNA, 20 bp, synthetic construct
  source 1..20: mol_type = other DNA
cacctcagcctcctgagtag

SEQ ID NO: 231860 - DNA, 20 bp, synthetic construct
  source 1..20: mol_type = other DNA
ccacctcagcctcctgagta

SEQ ID NO: 231861 - DNA, 20 bp, synthetic construct
  source 1..20: mol_type = other DNA
cccacctcagcctcctgagt

SEQ ID NO: 231862 - DNA, 20 bp, synthetic construct
  source 1..20: mol_type = other DNA
acccacctcagcctcctgag

SEQ ID NO: 231863 - DNA, 20 bp, synthetic construct
  source 1..20: mol_type = other DNA
cacccacctcagcctcctga

SEQ ID NO: 231864 - DNA, 20 bp, synthetic construct
  source 1..20: mol_type = other DNA
ccacccacctcagcctcctg

SEQ ID NO: 231865 - DNA, 20 bp, synthetic construct
  source 1..20: mol_type = other DNA
tccacccacctcagcctcct

SEQ ID NO: 231866 - DNA, 20 bp, synthetic construct
  source 1..20: mol_type = other DNA
atccacccacctcagcctcc

SEQ ID NO: 231867 - DNA, 20 bp, synthetic construct
  source 1..20: mol_type = other DNA
gatccacccacctcagcctc

SEQ ID NO: 231868 - DNA, 20 bp, synthetic construct
  source 1..20: mol_type = other DNA
tgatccacccacctcagcct

SEQ ID NO: 231869 - DNA, 20 bp, synthetic construct
  source 1..20: mol_type = other DNA
gtgatccacccacctcagcc

SEQ ID NO: 231870 - DNA, 20 bp, synthetic construct
  source 1..20: mol_type = other DNA
agtgatccacccacctcagc

SEQ ID NO: 231871 - DNA, 20 bp, synthetic construct
  source 1..20: mol_type = other DNA
aagtgatccacccacctcag

SEQ ID NO: 231872 - DNA, 20 bp, synthetic construct
  source 1..20: mol_type = other DNA
caagtgatccacccacctca

SEQ ID NO: 231873 - DNA, 20 bp, synthetic construct
  source 1..20: mol_type = other DNA
tcaagtgatccacccacctc

SEQ ID NO: 231874 - DNA, 20 bp, synthetic construct
  source 1..20: mol_type = other DNA
ctcaagtgatccacccacct

SEQ ID NO: 231875 - DNA, 20 bp, synthetic construct
  source 1..20: mol_type = other DNA
gctcaagtgatccacccacc

SEQ ID NO: 231876 - DNA, 20 bp, synthetic construct
  source 1..20: mol_type = other DNA
ggctcaagtgatccacccac

SEQ ID NO: 231877 - DNA, 20 bp, synthetic construct
  source 1..20: mol_type = other DNA
gggctcaagtgatccaccca

SEQ ID NO: 231878 - DNA, 20 bp, synthetic construct
  source 1..20: mol_type = other DNA
cgggctcaagtgatccaccc

SEQ ID NO: 231879 - DNA, 20 bp, synthetic construct
  source 1..20: mol_type = other DNA
ccgggctcaagtgatccacc

SEQ ID NO: 231880 - DNA, 20 bp, synthetic construct
  source 1..20: mol_type = other DNA
cccgggctcaagtgatccac

SEQ ID NO: 231881 - DNA, 20 bp, synthetic construct
  source 1..20: mol_type = other DNA
tcccgggctcaagtgatcca

SEQ ID NO: 231882 - DNA, 20 bp, synthetic construct
  source 1..20: mol_type = other DNA
ctcccgggctcaagtgatcc

SEQ ID NO: 231883 - DNA, 20 bp, synthetic construct
  source 1..20: mol_type = other DNA
cctcccgggctcaagtgatc

SEQ ID NO: 231884 - DNA, 20 bp, synthetic construct
  source 1..20: mol_type = other DNA
acctcccgggctcaagtgat

SEQ ID NO: 231885 - DNA, 20 bp, synthetic construct
  source 1..20: mol_type = other DNA
tacctcccgggctcaagtga

SEQ ID NO: 231886 - DNA, 20 bp, synthetic construct
  source 1..20: mol_type = other DNA
ctacctcccgggctcaagtg

SEQ ID NO: 231887 - DNA, 20 bp, synthetic construct
  source 1..20: mol_type = other DNA
tctacctcccgggctcaagt

SEQ ID NO: 231888 - DNA, 20 bp, synthetic construct
  source 1..20: mol_type = other DNA
ctctacctcccgggctcaag

SEQ ID NO: 231889 - DNA, 20 bp, synthetic construct
  source 1..20: mol_type = other DNA
actctacctcccgggctcaa

SEQ ID NO: 231890 - DNA, 20 bp, synthetic construct
  source 1..20: mol_type = other DNA
gactctacctcccgggctca

SEQ ID NO: 231891 - DNA, 20 bp, synthetic construct
  source 1..20: mol_type = other DNA
agactctacctcccgggctc

SEQ ID NO: 231892 - DNA, 20 bp, synthetic construct
  source 1..20: mol_type = other DNA
cagactctacctcccgggct

SEQ ID NO: 231893 - DNA, 20 bp, synthetic construct
  source 1..20: mol_type = other DNA
gcagactctacctcccgggc

SEQ ID NO: 231894 - DNA, 20 bp, synthetic construct
  source 1..20: mol_type = other DNA
tgcagactctacctcccggg

SEQ ID NO: 231895 - DNA, 20 bp, synthetic construct
  source 1..20: mol_type = other DNA
ctgcagactctacctcccgg

SEQ ID NO: 231896 - DNA, 20 bp, synthetic construct
  source 1..20: mol_type = other DNA
actgcagactctacctcccg

SEQ ID NO: 231897 - DNA, 20 bp, synthetic construct
  source 1..20: mol_type = other DNA
cactgcagactctacctccc

SEQ ID NO: 231898 - DNA, 20 bp, synthetic construct
  source 1..20: mol_type = other DNA
tcactgcagactctacctcc

SEQ ID NO: 231899 - DNA, 20 bp, synthetic construct
  source 1..20: mol_type = other DNA
ctcactgcagactctacctc

SEQ ID NO: 231900 - DNA, 20 bp, synthetic construct
  source 1..20: mol_type = other DNA
gctcactgcagactctacct

SEQ ID NO: 231901 - DNA, 20 bp, synthetic construct
  source 1..20: mol_type = other DNA
ggctcactgcagactctacc

SEQ ID NO: 231902 - DNA, 20 bp, synthetic construct
  source 1..20: mol_type = other DNA
tggctcactgcagactctac

SEQ ID NO: 231903 - DNA, 20 bp, synthetic construct
  source 1..20: mol_type = other DNA
ttggctcactgcagactcta

SEQ ID NO: 231904 - DNA, 20 bp, synthetic construct
  source 1..20: mol_type = other DNA
cttggctcactgcagactct

SEQ ID NO: 231905 - DNA, 20 bp, synthetic construct
  source 1..20: mol_type = other DNA
tcttggctcactgcagactc

SEQ ID NO: 231906 - DNA, 20 bp, synthetic construct
  source 1..20: mol_type = other DNA
atcttggctcactgcagact

SEQ ID NO: 231907 - DNA, 20 bp, synthetic construct
  source 1..20: mol_type = other DNA
gatcttggctcactgcagac

SEQ ID NO: 231908 - DNA, 20 bp, synthetic construct
  source 1..20: mol_type = other DNA
tgatcttggctcactgcaga

SEQ ID NO: 231909 - DNA, 20 bp, synthetic construct
  source 1..20: mol_type = other DNA
gtgatcttggctcactgcag

SEQ ID NO: 231910 - DNA, 20 bp, synthetic construct
  source 1..20: mol_type = other DNA
tgtgatcttggctcactgca

SEQ ID NO: 231911 - DNA, 20 bp, synthetic construct
  source 1..20: mol_type = other DNA
gtgtgatcttggctcactgc

SEQ ID NO: 231912 - DNA, 20 bp, synthetic construct
  source 1..20: mol_type = other DNA
ggtgtgatcttggctcactg

SEQ ID NO: 231913 - DNA, 20 bp, synthetic construct
  source 1..20: mol_type = other DNA
cggtgtgatcttggctcact

SEQ ID NO: 231914 - DNA, 20 bp, synthetic construct
  source 1..20: mol_type = other DNA
gcggtgtgatcttggctcac

SEQ ID NO: 231915 - DNA, 20 bp, synthetic construct
  source 1..20: mol_type = other DNA
agcggtgtgatcttggctca

SEQ ID NO: 231916 - DNA, 20 bp, synthetic construct
  source 1..20: mol_type = other DNA
cagcggtgtgatcttggctc

SEQ ID NO: 231917 - DNA, 20 bp, synthetic construct
  source 1..20: mol_type = other DNA
gcagcggtgtgatcttggct

SEQ ID NO: 231918 - DNA, 20 bp, synthetic construct
  source 1..20: mol_type = other DNA
tgcagcggtgtgatcttggc

SEQ ID NO: 231919 - DNA, 20 bp, synthetic construct
  source 1..20: mol_type = other DNA
gtgcagcggtgtgatcttgg

SEQ ID NO: 231920 - DNA, 20 bp, synthetic construct
  source 1..20: mol_type = other DNA
agtgcagcggtgtgatcttg

SEQ ID NO: 231921 - DNA, 20 bp, synthetic construct
  source 1..20: mol_type = other DNA
gagtgcagcggtgtgatctt

SEQ ID NO: 231922 - DNA, 20 bp, synthetic construct
  source 1..20: mol_type = other DNA
ggagtgcagcggtgtgatct

SEQ ID NO: 231923 - DNA, 20 bp, synthetic construct
  source 1..20: mol_type = other DNA
tggagtgcagcggtgtgatc

SEQ ID NO: 231924 - DNA, 20 bp, synthetic construct
  source 1..20: mol_type = other DNA
ctggagtgcagcggtgtgat

SEQ ID NO: 231925 - DNA, 20 bp, synthetic construct
  source 1..20: mol_type = other DNA
gctggagtgcagcggtgtga

SEQ ID NO: 231926 - DNA, 20 bp, synthetic construct
  source 1..20: mol_type = other DNA
agctggagtgcagcggtgtg

SEQ ID NO: 231927 - DNA, 20 bp, synthetic construct
  source 1..20: mol_type = other DNA
cagctggagtgcagcggtgt

SEQ ID NO: 231928 - DNA, 20 bp, synthetic construct
  source 1..20: mol_type = other DNA
ccagctggagtgcagcggtg

SEQ ID NO: 231929 - DNA, 20 bp, synthetic construct
  source 1..20: mol_type = other DNA
tccagctggagtgcagcggt

SEQ ID NO: 231930 - DNA, 20 bp, synthetic construct
  source 1..20: mol_type = other DNA
ctccagctggagtgcagcgg

SEQ ID NO: 231931 - DNA, 20 bp, synthetic construct
  source 1..20: mol_type = other DNA
gctccagctggagtgcagcg

SEQ ID NO: 231932 - DNA, 20 bp, synthetic construct
  source 1..20: mol_type = other DNA
tgctccagctggagtgcagc

SEQ ID NO: 231933 - DNA, 20 bp, synthetic construct
  source 1..20: mol_type = other DNA
ttgctccagctggagtgcag

SEQ ID NO: 231934 - DNA, 20 bp, synthetic construct
  source 1..20: mol_type = other DNA
gttgctccagctggagtgca

SEQ ID NO: 231935 - DNA, 20 bp, synthetic construct
  source 1..20: mol_type = other DNA
tgttgctccagctggagtgc

SEQ ID NO: 231936 - DNA, 20 bp, synthetic construct
  source 1..20: mol_type = other DNA
ctgttgctccagctggagtg

SEQ ID NO: 231937 - DNA, 20 bp, synthetic construct
  source 1..20: mol_type = other DNA
tctgttgctccagctggagt

SEQ ID NO: 231938 - DNA, 20 bp, synthetic construct
  source 1..20: mol_type = other DNA
ctctgttgctccagctggag

SEQ ID NO: 231939 - DNA, 20 bp, synthetic construct
  source 1..20: mol_type = other DNA
actctgttgctccagctgga

SEQ ID NO: 231940 - DNA, 20 bp, synthetic construct
  source 1..20: mol_type = other DNA
cactctgttgctccagctgg

SEQ ID NO: 231941 - DNA, 20 bp, synthetic construct
  source 1..20: mol_type = other DNA
tcactctgttgctccagctg

SEQ ID NO: 231942 - DNA, 20 bp, synthetic construct
  source 1..20: mol_type = other DNA
ctcactctgttgctccagct

SEQ ID NO: 231943 - DNA, 20 bp, synthetic construct
  source 1..20: mol_type = other DNA
tctcactctgttgctccagc

SEQ ID NO: 231944 - DNA, 20 bp, synthetic construct
  source 1..20: mol_type = other DNA
gtctcactctgttgctccag

SEQ ID NO: 231945 - DNA, 20 bp, synthetic construct
  source 1..20: mol_type = other DNA
ggtctcactctgttgctcca

SEQ ID NO: 231946 - DNA, 20 bp, synthetic construct
  source 1..20: mol_type = other DNA
gggtctcactctgttgctcc

SEQ ID NO: 231947 - DNA, 20 bp, synthetic construct
  source 1..20: mol_type = other DNA
agggtctcactctgttgctc

SEQ ID NO: 231948 - DNA, 20 bp, synthetic construct
  source 1..20: mol_type = other DNA
cagggtctcactctgttgct

SEQ ID NO: 231949 - DNA, 20 bp, synthetic construct
  source 1..20: mol_type = other DNA
tcagggtctcactctgttgc

SEQ ID NO: 231950 - DNA, 20 bp, synthetic construct
  source 1..20: mol_type = other DNA
gtcagggtctcactctgttg

SEQ ID NO: 231951 - DNA, 20 bp, synthetic construct
  source 1..20: mol_type = other DNA
agtcagggtctcactctgtt

SEQ ID NO: 231952 - DNA, 20 bp, synthetic construct
  source 1..20: mol_type = other DNA
aagtcagggtctcactctgt

SEQ ID NO: 231953 - DNA, 20 bp, synthetic construct
  source 1..20: mol_type = other DNA
taagtcagggtctcactctg

SEQ ID NO: 231954 - DNA, 20 bp, synthetic construct
  source 1..20: mol_type = other DNA
ttaagtcagggtctcactct

SEQ ID NO: 231955 - DNA, 20 bp, synthetic construct
  source 1..20: mol_type = other DNA
tttaagtcagggtctcactc

SEQ ID NO: 231956 - DNA, 20 bp, synthetic construct
  source 1..20: mol_type = other DNA
ttttaagtcagggtctcact

SEQ ID NO: 231957 - DNA, 20 bp, synthetic construct
  source 1..20: mol_type = other DNA
cttttaagtcagggtctcac

SEQ ID NO: 231958 - DNA, 20 bp, synthetic construct
  source 1..20: mol_type = other DNA
tcttttaagtcagggtctca

SEQ ID NO: 231959 - DNA, 20 bp, synthetic construct
  source 1..20: mol_type = other DNA
ttcttttaagtcagggtctc

SEQ ID NO: 231960 - DNA, 20 bp, synthetic construct
  source 1..20: mol_type = other DNA
tttcttttaagtcagggtct

SEQ ID NO: 231961 - DNA, 20 bp, synthetic construct
  source 1..20: mol_type = other DNA
ttttcttttaagtcagggtc

SEQ ID NO: 231962 - DNA, 20 bp, synthetic construct
  source 1..20: mol_type = other DNA
tttttcttttaagtcagggt

SEQ ID NO: 231963 - DNA, 20 bp, synthetic construct
  source 1..20: mol_type = other DNA
ttttttcttttaagtcaggg

SEQ ID NO: 231964 - DNA, 20 bp, synthetic construct
  source 1..20: mol_type = other DNA
tttttttcttttaagtcagg

SEQ ID NO: 231965 - DNA, 20 bp, synthetic construct
  source 1..20: mol_type = other DNA
ttttttttcttttaagtcag

SEQ ID NO: 231966 - DNA, 20 bp, synthetic construct
  source 1..20: mol_type = other DNA
tttttttttcttttaagtca

SEQ ID NO: 231967 - DNA, 20 bp, synthetic construct
  source 1..20: mol_type = other DNA
ttttttttttcttttaagtc

SEQ ID NO: 231968 - DNA, 20 bp, synthetic construct
  source 1..20: mol_type = other DNA
tttttttttttcttttaagt

SEQ ID NO: 231969 - DNA, 20 bp, synthetic construct
  source 1..20: mol_type = other DNA
ttttttttttttcttttaag

SEQ ID NO: 231970 - DNA, 20 bp, synthetic construct
  source 1..20: mol_type = other DNA
tttttttttttttcttttaa

SEQ ID NO: 231971 - DNA, 20 bp, synthetic construct
  source 1..20: mol_type = other DNA
ttttttttttttttctttta

SEQ ID NO: 231972 - DNA, 20 bp, synthetic construct
  source 1..20: mol_type = other DNA
tttttttttttttttctttt

SEQ ID NO: 231973 - DNA, 20 bp, synthetic construct
  source 1..20: mol_type = other DNA
ctttttttttttttttcttt

SEQ ID NO: 231974 - DNA, 20 bp, synthetic construct
  source 1..20: mol_type = other DNA
tctttttttttttttttctt

SEQ ID NO: 231975 - DNA, 20 bp, synthetic construct
  source 1..20: mol_type = other DNA
ctctttttttttttttttct

SEQ ID NO: 231976 - DNA, 20 bp, synthetic construct
  source 1..20: mol_type = other DNA
cctctttttttttttttttc

SEQ ID NO: 231977 - DNA, 20 bp, synthetic construct
  source 1..20: mol_type = other DNA
tcctcttttttttttttttt

SEQ ID NO: 231978 - DNA, 20 bp, synthetic construct
  source 1..20: mol_type = other DNA
ctcctctttttttttttttt

SEQ ID NO: 231979 - DNA, 20 bp, synthetic construct
  source 1..20: mol_type = other DNA
tctcctcttttttttttttt

SEQ ID NO: 231980 - DNA, 20 bp, synthetic construct
  source 1..20: mol_type = other DNA
ttctcctctttttttttttt

SEQ ID NO: 231981 - DNA, 20 bp, synthetic construct
  source 1..20: mol_type = other DNA
tttctcctcttttttttttt

SEQ ID NO: 231982 - DNA, 20 bp, synthetic construct
  source 1..20: mol_type = other DNA
ttttctcctctttttttttt

SEQ ID NO: 231983 - DNA, 20 bp, synthetic construct
  source 1..20: mol_type = other DNA
tttttctcctcttttttttt

SEQ ID NO: 231984 - DNA, 20 bp, synthetic construct
  source 1..20: mol_type = other DNA
atttttctcctctttttttt

SEQ ID NO: 231985 - DNA, 20 bp, synthetic construct
  source 1..20: mol_type = other DNA
catttttctcctcttttttt

SEQ ID NO: 231986 - DNA, 20 bp, synthetic construct
  source 1..20: mol_type = other DNA
gcatttttctcctctttttt

SEQ ID NO: 231987 - DNA, 20 bp, synthetic construct
  source 1..20: mol_type = other DNA
agcatttttctcctcttttt

SEQ ID NO: 231988 - DNA, 20 bp, synthetic construct
  source 1..20: mol_type = other DNA
cagcatttttctcctctttt

SEQ ID NO: 231989 - DNA, 20 bp, synthetic construct
  source 1..20: mol_type = other DNA
tcagcatttttctcctcttt

SEQ ID NO: 231990 - DNA, 20 bp, synthetic construct
  source 1..20: mol_type = other DNA
atcagcatttttctcctctt

SEQ ID NO: 231991 - DNA, 20 bp, synthetic construct
  source 1..20: mol_type = other DNA
gatcagcatttttctcctct

SEQ ID NO: 231992 - DNA, 20 bp, synthetic construct
  source 1..20: mol_type = other DNA
agatcagcatttttctcctc

SEQ ID NO: 231993 - DNA, 20 bp, synthetic construct
  source 1..20: mol_type = other DNA
gagatcagcatttttctcct

SEQ ID NO: 231994 - DNA, 20 bp, synthetic construct
  source 1..20: mol_type = other DNA
tgagatcagcatttttctcc

SEQ ID NO: 231995 - DNA, 20 bp, synthetic construct
  source 1..20: mol_type = other DNA
gtgagatcagcatttttctc

SEQ ID NO: 231996 - DNA, 20 bp, synthetic construct
  source 1..20: mol_type = other DNA
agtgagatcagcatttttct

SEQ ID NO: 231997 - DNA, 20 bp, synthetic construct
  source 1..20: mol_type = other DNA
tagtgagatcagcatttttc

SEQ ID NO: 231998 - DNA, 20 bp, synthetic construct
  source 1..20: mol_type = other DNA
ctagtgagatcagcattttt

SEQ ID NO: 231999 - DNA, 20 bp, synthetic construct
  source 1..20: mol_type = other DNA
actagtgagatcagcatttt

SEQ ID NO: 232000 - DNA, 20 bp, synthetic construct
  source 1..20: mol_type = other DNA
tactagtgagatcagcattt

SEQ ID NO: 232001 - DNA, 20 bp, synthetic construct
  source 1..20: mol_type = other DNA
ttactagtgagatcagcatt

SEQ ID NO: 232002 - DNA, 20 bp, synthetic construct
  source 1..20: mol_type = other DNA
attactagtgagatcagcat

SEQ ID NO: 232003 - DNA, 20 bp, synthetic construct
  source 1..20: mol_type = other DNA
aattactagtgagatcagca

SEQ ID NO: 232004 - DNA, 20 bp, synthetic construct
  source 1..20: mol_type = other DNA
taattactagtgagatcagc

SEQ ID NO: 232005 - DNA, 20 bp, synthetic construct
  source 1..20: mol_type = other DNA
ttaattactagtgagatcag

SEQ ID NO: 232006 - DNA, 20 bp, synthetic construct
  source 1..20: mol_type = other DNA
tttaattactagtgagatca

SEQ ID NO: 232007 - DNA, 20 bp, synthetic construct
  source 1..20: mol_type = other DNA
ttttaattactagtgagatc

SEQ ID NO: 232008 - DNA, 20 bp, synthetic construct
  source 1..20: mol_type = other DNA
gttttaattactagtgagat

SEQ ID NO: 232009 - DNA, 20 bp, synthetic construct
  source 1..20: mol_type = other DNA
tgttttaattactagtgaga

SEQ ID NO: 232010 - DNA, 20 bp, synthetic construct
  source 1..20: mol_type = other DNA
atgttttaattactagtgag

SEQ ID NO: 232011 - DNA, 20 bp, synthetic construct
  source 1..20: mol_type = other DNA
gatgttttaattactagtga

SEQ ID NO: 232012 - DNA, 20 bp, synthetic construct
  source 1..20: mol_type = other DNA
tgatgttttaattactagtg

SEQ ID NO: 232013 - DNA, 20 bp, synthetic construct
  source 1..20: mol_type = other DNA
ctgatgttttaattactagt

SEQ ID NO: 232014 - DNA, 20 bp, synthetic construct
  source 1..20: mol_type = other DNA
cctgatgttttaattactag

SEQ ID NO: 232015 - DNA, 20 bp, synthetic construct
  source 1..20: mol_type = other DNA
gcctgatgttttaattacta

SEQ ID NO: 232016 - DNA, 20 bp, synthetic construct
  source 1..20: mol_type = other DNA
ggcctgatgttttaattact

SEQ ID NO: 232017 - DNA, 20 bp, synthetic construct
  source 1..20: mol_type = other DNA
tggcctgatgttttaattac

SEQ ID NO: 232018 - DNA, 20 bp, synthetic construct
  source 1..20: mol_type = other DNA
ctggcctgatgttttaatta

SEQ ID NO: 232019 - DNA, 20 bp, synthetic construct
  source 1..20: mol_type = other DNA
cctggcctgatgttttaatt

SEQ ID NO: 232020 - DNA, 20 bp, synthetic construct
  source 1..20: mol_type = other DNA
gcctggcctgatgttttaat

SEQ ID NO: 232021 - DNA, 20 bp, synthetic construct
  source 1..20: mol_type = other DNA
cgcctggcctgatgttttaa

SEQ ID NO: 232022 - DNA, 20 bp, synthetic construct
  source 1..20: mol_type = other DNA
gcgcctggcctgatgtttta

SEQ ID NO: 232023 - DNA, 20 bp, synthetic construct
  source 1..20: mol_type = other DNA
tgcgcctggcctgatgtttt

SEQ ID NO: 232024 - DNA, 20 bp, synthetic construct
  source 1..20: mol_type = other DNA
ctgcgcctggcctgatgttt

SEQ ID NO: 232025 - DNA, 20 bp, synthetic construct
  source 1..20: mol_type = other DNA
actgcgcctggcctgatgtt

SEQ ID NO: 232026 - DNA, 20 bp, synthetic construct
  source 1..20: mol_type = other DNA
cactgcgcctggcctgatgt

SEQ ID NO: 232027 - DNA, 20 bp, synthetic construct
  source 1..20: mol_type = other DNA
ccactgcgcctggcctgatg

SEQ ID NO: 232028 - DNA, 20 bp, synthetic construct
  source 1..20: mol_type = other DNA
gccactgcgcctggcctgat

SEQ ID NO: 232029 - DNA, 20 bp, synthetic construct
  source 1..20: mol_type = other DNA
agccactgcgcctggcctga

SEQ ID NO: 232030 - DNA, 20 bp, synthetic construct
  source 1..20: mol_type = other DNA
gagccactgcgcctggcctg

SEQ ID NO: 232031 - DNA, 20 bp, synthetic construct
  source 1..20: mol_type = other DNA
tgagccactgcgcctggcct

SEQ ID NO: 232032 - DNA, 20 bp, synthetic construct
  source 1..20: mol_type = other DNA
gtgagccactgcgcctggcc

SEQ ID NO: 232033 - DNA, 20 bp, synthetic construct
  source 1..20: mol_type = other DNA
tgtgagccactgcgcctggc

SEQ ID NO: 232034 - DNA, 20 bp, synthetic construct
  source 1..20: mol_type = other DNA
gtgtgagccactgcgcctgg

SEQ ID NO: 232035 - DNA, 20 bp, synthetic construct
  source 1..20: mol_type = other DNA
ggtgtgagccactgcgcctg

SEQ ID NO: 232036 - DNA, 20 bp, synthetic construct
  source 1..20: mol_type = other DNA
aggtgtgagccactgcgcct

SEQ ID NO: 232037 - DNA, 20 bp, synthetic construct
  source 1..20: mol_type = other DNA
aaggtgtgagccactgcgcc

SEQ ID NO: 232038 - DNA, 20 bp, synthetic construct
  source 1..20: mol_type = other DNA
aaaggtgtgagccactgcgc

SEQ ID NO: 232039 - DNA, 20 bp, synthetic construct
  source 1..20: mol_type = other DNA
taaaggtgtgagccactgcg

SEQ ID NO: 232040 - DNA, 20 bp, synthetic construct
  source 1..20: mol_type = other DNA
ttaaaggtgtgagccactgc

SEQ ID NO: 232041 - DNA, 20 bp, synthetic construct
  source 1..20: mol_type = other DNA
attaaaggtgtgagccactg

SEQ ID NO: 232042 - DNA, 20 bp, synthetic construct
  source 1..20: mol_type = other DNA
gattaaaggtgtgagccact

SEQ ID NO: 232043 - DNA, 20 bp, synthetic construct
  source 1..20: mol_type = other DNA
ggattaaaggtgtgagccac

SEQ ID NO: 232044 - DNA, 20 bp, synthetic construct
  source 1..20: mol_type = other DNA
gggattaaaggtgtgagcca

SEQ ID NO: 232045 - DNA, 20 bp, synthetic construct
  source 1..20: mol_type = other DNA
tgggattaaaggtgtgagcc

SEQ ID NO: 232046 - DNA, 20 bp, synthetic construct
  source 1..20: mol_type = other DNA
ctgggattaaaggtgtgagc

SEQ ID NO: 232047 - DNA, 20 bp, synthetic construct
  source 1..20: mol_type = other DNA
gctgggattaaaggtgtgag

SEQ ID NO: 232048 - DNA, 20 bp, synthetic construct
  source 1..20: mol_type = other DNA
tgctgggattaaaggtgtga

SEQ ID NO: 232049 - DNA, 20 bp, synthetic construct
  source 1..20: mol_type = other DNA
gtgctgggattaaaggtgtg

SEQ ID NO: 232050 - DNA, 20 bp, synthetic construct
  source 1..20: mol_type = other DNA
agtgctgggattaaaggtgt

SEQ ID NO: 232051 - DNA, 20 bp, synthetic construct
  source 1..20: mol_type = other DNA
gagtgctgggattaaaggtg

SEQ ID NO: 232052 - DNA, 20 bp, synthetic construct
  source 1..20: mol_type = other DNA
agagtgctgggattaaaggt

SEQ ID NO: 232053 - DNA, 20 bp, synthetic construct
  source 1..20: mol_type = other DNA
cagagtgctgggattaaagg

SEQ ID NO: 232054 - DNA, 20 bp, synthetic construct
  source 1..20: mol_type = other DNA
ccagagtgctgggattaaag

SEQ ID NO: 232055 - DNA, 20 bp, synthetic construct
  source 1..20: mol_type = other DNA
cccagagtgctgggattaaa

SEQ ID NO: 232056 - DNA, 20 bp, synthetic construct
  source 1..20: mol_type = other DNA
tcccagagtgctgggattaa

SEQ ID NO: 232057 - DNA, 20 bp, synthetic construct
  source 1..20: mol_type = other DNA
ctcccagagtgctgggatta

SEQ ID NO: 232058 - DNA, 20 bp, synthetic construct
  source 1..20: mol_type = other DNA
cctcccagagtgctgggatt

SEQ ID NO: 232059 - DNA, 20 bp, synthetic construct
  source 1..20: mol_type = other DNA
gcctcccagagtgctgggat

SEQ ID NO: 232060 - DNA, 20 bp, synthetic construct
  source 1..20: mol_type = other DNA
agcctcccagagtgctggga

SEQ ID NO: 232061 - DNA, 20 bp, synthetic construct
  source 1..20: mol_type = other DNA
cagcctcccagagtgctggg

SEQ ID NO: 232062 - DNA, 20 bp, synthetic construct
  source 1..20: mol_type = other DNA
tcagcctcccagagtgctgg

SEQ ID NO: 232063 - DNA, 20 bp, synthetic construct
  source 1..20: mol_type = other DNA
ctcagcctcccagagtgctg

SEQ ID NO: 232064 - DNA, 20 bp, synthetic construct
  source 1..20: mol_type = other DNA
cctcagcctcccagagtgct

SEQ ID NO: 232065 - DNA, 20 bp, synthetic construct
  source 1..20: mol_type = other DNA
gcctcagcctcccagagtgc

SEQ ID NO: 232066 - DNA, 20 bp, synthetic construct
  source 1..20: mol_type = other DNA
tgcctcagcctcccagagtg

SEQ ID NO: 232067 - DNA, 20 bp, synthetic construct
  source 1..20: mol_type = other DNA
ctgcctcagcctcccagagt

SEQ ID NO: 232068 - DNA, 20 bp, synthetic construct
  source 1..20: mol_type = other DNA
cctgcctcagcctcccagag

SEQ ID NO: 232069 - DNA, 20 bp, synthetic construct
  source 1..20: mol_type = other DNA
gcctgcctcagcctcccaga

SEQ ID NO: 232070 - DNA, 20 bp, synthetic construct
  source 1..20: mol_type = other DNA
tgcctgcctcagcctcccag

SEQ ID NO: 232071 - DNA, 20 bp, synthetic construct
  source 1..20: mol_type = other DNA
ctgcctgcctcagcctccca

SEQ ID NO: 232072 - DNA, 20 bp, synthetic construct
  source 1..20: mol_type = other DNA
tctgcctgcctcagcctccc

SEQ ID NO: 232073 - DNA, 20 bp, synthetic construct
  source 1..20: mol_type = other DNA
atctgcctgcctcagcctcc

SEQ ID NO: 232074 - DNA, 20 bp, synthetic construct
  source 1..20: mol_type = other DNA
gatctgcctgcctcagcctc

SEQ ID NO: 232075 - DNA, 20 bp, synthetic construct
  source 1..20: mol_type = other DNA
tgatctgcctgcctcagcct

SEQ ID NO: 232076 - DNA, 20 bp, synthetic construct
  source 1..20: mol_type = other DNA
gtgatctgcctgcctcagcc

SEQ ID NO: 232077 - DNA, 20 bp, synthetic construct
  source 1..20: mol_type = other DNA
agtgatctgcctgcctcagc

SEQ ID NO: 232078 - DNA, 20 bp, synthetic construct
  source 1..20: mol_type = other DNA
aagtgatctgcctgcctcag

SEQ ID NO: 232079 - DNA, 20 bp, synthetic construct
  source 1..20: mol_type = other DNA
caagtgatctgcctgcctca

SEQ ID NO: 232080 - DNA, 20 bp, synthetic construct
  source 1..20: mol_type = other DNA
tcaagtgatctgcctgcctc

SEQ ID NO: 232081 - DNA, 20 bp, synthetic construct
  source 1..20: mol_type = other DNA
ctcaagtgatctgcctgcct

SEQ ID NO: 232082 - DNA, 20 bp, synthetic construct
  source 1..20: mol_type = other DNA
tctcaagtgatctgcctgcc

SEQ ID NO: 232083 - DNA, 20 bp, synthetic construct
  source 1..20: mol_type = other DNA
atctcaagtgatctgcctgc

SEQ ID NO: 232084 - DNA, 20 bp, synthetic construct
  source 1..20: mol_type = other DNA
gatctcaagtgatctgcctg

SEQ ID NO: 232085 - DNA, 20 bp, synthetic construct
  source 1..20: mol_type = other DNA
tgatctcaagtgatctgcct

SEQ ID NO: 232086 - DNA, 20 bp, synthetic construct
  source 1..20: mol_type = other DNA
ctgatctcaagtgatctgcc

SEQ ID NO: 232087 - DNA, 20 bp, synthetic construct
  source 1..20: mol_type = other DNA
cctgatctcaagtgatctgc

SEQ ID NO: 232088 - DNA, 20 bp, synthetic construct
  source 1..20: mol_type = other DNA
tcctgatctcaagtgatctg

SEQ ID NO: 232089 - DNA, 20 bp, synthetic construct
  source 1..20: mol_type = other DNA
ctcctgatctcaagtgatct

SEQ ID NO: 232090 - DNA, 20 bp, synthetic construct
  source 1..20: mol_type = other DNA
actcctgatctcaagtgatc

SEQ ID NO: 232091 - DNA, 20 bp, synthetic construct
  source 1..20: mol_type = other DNA
aactcctgatctcaagtgat

SEQ ID NO: 232092 - DNA, 20 bp, synthetic construct
  source 1..20: mol_type = other DNA
gaactcctgatctcaagtga

SEQ ID NO: 232093 - DNA, 20 bp, synthetic construct
  source 1..20: mol_type = other DNA
agaactcctgatctcaagtg

SEQ ID NO: 232094 - DNA, 20 bp, synthetic construct
  source 1..20: mol_type = other DNA
tagaactcctgatctcaagt

SEQ ID NO: 232095 - DNA, 20 bp, synthetic construct
  source 1..20: mol_type = other DNA
ctagaactcctgatctcaag

SEQ ID NO: 232096 - DNA, 20 bp, synthetic construct
  source 1..20: mol_type = other DNA
tctagaactcctgatctcaa

SEQ ID NO: 232097 - DNA, 20 bp, synthetic construct
  source 1..20: mol_type = other DNA
gtctagaactcctgatctca

SEQ ID NO: 232098 - DNA, 20 bp, synthetic construct
  source 1..20: mol_type = other DNA
ggtctagaactcctgatctc

SEQ ID NO: 232099 - DNA, 20 bp, synthetic construct
  source 1..20: mol_type = other DNA
tggtctagaactcctgatct

SEQ ID NO: 232100 - DNA, 20 bp, synthetic construct
  source 1..20: mol_type = other DNA
ctggtctagaactcctgatc

SEQ ID NO: 232101 - DNA, 20 bp, synthetic construct
  source 1..20: mol_type = other DNA
gctggtctagaactcctgat

SEQ ID NO: 232102 - DNA, 20 bp, synthetic construct
  source 1..20: mol_type = other DNA
agctggtctagaactcctga

SEQ ID NO: 232103 - DNA, 20 bp, synthetic construct
  source 1..20: mol_type = other DNA
aagctggtctagaactcctg

SEQ ID NO: 232104 - DNA, 20 bp, synthetic construct
  source 1..20: mol_type = other DNA
caagctggtctagaactcct

SEQ ID NO: 232105 - DNA, 20 bp, synthetic construct
  source 1..20: mol_type = other DNA
ccaagctggtctagaactcc

SEQ ID NO: 232106 - DNA, 20 bp, synthetic construct
  source 1..20: mol_type = other DNA
gccaagctggtctagaactc

SEQ ID NO: 232107 - DNA, 20 bp, synthetic construct
  source 1..20: mol_type = other DNA
ggccaagctggtctagaact

SEQ ID NO: 232108 - DNA, 20 bp, synthetic construct
  source 1..20: mol_type = other DNA
tggccaagctggtctagaac

SEQ ID NO: 232109 - DNA, 20 bp, synthetic construct
  source 1..20: mol_type = other DNA
ttggccaagctggtctagaa

SEQ ID NO: 232110 - DNA, 20 bp, synthetic construct
  source 1..20: mol_type = other DNA
gttggccaagctggtctaga

SEQ ID NO: 232111 - DNA, 20 bp, synthetic construct
  source 1..20: mol_type = other DNA
tgttggccaagctggtctag

SEQ ID NO: 232112 - DNA, 20 bp, synthetic construct
  source 1..20: mol_type = other DNA
atgttggccaagctggtcta

SEQ ID NO: 232113 - DNA, 20 bp, synthetic construct
  source 1..20: mol_type = other DNA
catgttggccaagctggtct

SEQ ID NO: 232114 - DNA, 20 bp, synthetic construct
  source 1..20: mol_type = other DNA
ccatgttggccaagctggtc

SEQ ID NO: 232115 - DNA, 20 bp, synthetic construct
  source 1..20: mol_type = other DNA
accatgttggccaagctggt

SEQ ID NO: 232116 - DNA, 20 bp, synthetic construct
  source 1..20: mol_type = other DNA
caccatgttggccaagctgg

SEQ ID NO: 232117 - DNA, 20 bp, synthetic construct
  source 1..20: mol_type = other DNA
tcaccatgttggccaagctg

SEQ ID NO: 232118 - DNA, 20 bp, synthetic construct
  source 1..20: mol_type = other DNA
ttcaccatgttggccaagct

SEQ ID NO: 232119 - DNA, 20 bp, synthetic construct
  source 1..20: mol_type = other DNA
tttcaccatgttggccaagc

SEQ ID NO: 232120 - DNA, 20 bp, synthetic construct
  source 1..20: mol_type = other DNA
atttcaccatgttggccaag

SEQ ID NO: 232121 - DNA, 20 bp, synthetic construct
  source 1..20: mol_type = other DNA
gatttcaccatgttggccaa

SEQ ID NO: 232122 - DNA, 20 bp, synthetic construct
  source 1..20: mol_type = other DNA
ggatttcaccatgttggcca

SEQ ID NO: 232123 - DNA, 20 bp, synthetic construct
  source 1..20: mol_type = other DNA
gggatttcaccatgttggcc

SEQ ID NO: 232124 - DNA, 20 bp, synthetic construct
  source 1..20: mol_type = other DNA
cgggatttcaccatgttggc

SEQ ID NO: 232125 - DNA, 20 bp, synthetic construct
  source 1..20: mol_type = other DNA
acgggatttcaccatgttgg

SEQ ID NO: 232126 - DNA, 20 bp, synthetic construct
  source 1..20: mol_type = other DNA
gacgggatttcaccatgttg

SEQ ID NO: 232127 - DNA, 20 bp, synthetic construct
  source 1..20: mol_type = other DNA
agacgggatttcaccatgtt

SEQ ID NO: 232128 - DNA, 20 bp, synthetic construct
  source 1..20: mol_type = other DNA
gagacgggatttcaccatgt

SEQ ID NO: 232129 - DNA, 20 bp, synthetic construct
  source 1..20: mol_type = other DNA
agagacgggatttcaccatg

SEQ ID NO: 232130 - DNA, 20 bp, synthetic construct
  source 1..20: mol_type = other DNA
tagagacgggatttcaccat

SEQ ID NO: 232131 - DNA, 20 bp, synthetic construct
  source 1..20: mol_type = other DNA
gtagagacgggatttcacca

SEQ ID NO: 232132 - DNA, 20 bp, synthetic construct
  source 1..20: mol_type = other DNA
tgtagagacgggatttcacc

SEQ ID NO: 232133 - DNA, 20 bp, synthetic construct
  source 1..20: mol_type = other DNA
ttgtagagacgggatttcac

SEQ ID NO: 232134 - DNA, 20 bp, synthetic construct
  source 1..20: mol_type = other DNA
tttgtagagacgggatttca

SEQ ID NO: 232135 - DNA, 20 bp, synthetic construct
  source 1..20: mol_type = other DNA
ttttgtagagacgggatttc

SEQ ID NO: 232136 - DNA, 20 bp, synthetic construct
  source 1..20: mol_type = other DNA
tttttgtagagacgggattt

SEQ ID NO: 232137 - DNA, 20 bp, synthetic construct
  source 1..20: mol_type = other DNA
ttttttgtagagacgggatt

SEQ ID NO: 232138 - DNA, 20 bp, synthetic construct
  source 1..20: mol_type = other DNA
attttttgtagagacgggat

SEQ ID NO: 232139 - DNA, 20 bp, synthetic construct
  source 1..20: mol_type = other DNA
tattttttgtagagacggga

SEQ ID NO: 232140 - DNA, 20 bp, synthetic construct
  source 1..20: mol_type = other DNA
gtattttttgtagagacggg

SEQ ID NO: 232141 - DNA, 20 bp, synthetic construct
  source 1..20: mol_type = other DNA
tgtattttttgtagagacgg

SEQ ID NO: 232142 - DNA, 20 bp, synthetic construct
  source 1..20: mol_type = other DNA
ttgtattttttgtagagacg

SEQ ID NO: 232143 - DNA, 20 bp, synthetic construct
  source 1..20: mol_type = other DNA
tttgtattttttgtagagac

SEQ ID NO: 232144 - DNA, 20 bp, synthetic construct
  source 1..20: mol_type = other DNA
ttttgtattttttgtagaga

SEQ ID NO: 232145 - DNA, 20 bp, synthetic construct
  source 1..20: mol_type = other DNA
tttttgtattttttgtagag

SEQ ID NO: 232146 - DNA, 20 bp, synthetic construct
  source 1..20: mol_type = other DNA
atttttgtattttttgtaga

SEQ ID NO: 232147 - DNA, 20 bp, synthetic construct
  source 1..20: mol_type = other DNA
aatttttgtattttttgtag

SEQ ID NO: 232148 - DNA, 20 bp, synthetic construct
  source 1..20: mol_type = other DNA
gaatttttgtattttttgta

SEQ ID NO: 232149 - DNA, 20 bp, synthetic construct
  source 1..20: mol_type = other DNA
cgaatttttgtattttttgt

SEQ ID NO: 232150 - DNA, 20 bp, synthetic construct
  source 1..20: mol_type = other DNA
gcgaatttttgtattttttg

SEQ ID NO: 232151 - DNA, 20 bp, synthetic construct
  source 1..20: mol_type = other DNA
ggcgaatttttgtatttttt

SEQ ID NO: 232152 - DNA, 20 bp, synthetic construct
  source 1..20: mol_type = other DNA
tggcgaatttttgtattttt

SEQ ID NO: 232153 - DNA, 20 bp, synthetic construct
  source 1..20: mol_type = other DNA
ttggcgaatttttgtatttt

SEQ ID NO: 232154 - DNA, 20 bp, synthetic construct
  source 1..20: mol_type = other DNA
cttggcgaatttttgtattt

SEQ ID NO: 232155 - DNA, 20 bp, synthetic construct
  source 1..20: mol_type = other DNA
gcttggcgaatttttgtatt

SEQ ID NO: 232156 - DNA, 20 bp, synthetic construct
  source 1..20: mol_type = other DNA
cgcttggcgaatttttgtat

SEQ ID NO: 232157 - DNA, 20 bp, synthetic construct
  source 1..20: mol_type = other DNA
acgcttggcgaatttttgta

SEQ ID NO: 232158 - DNA, 20 bp, synthetic construct
  source 1..20: mol_type = other DNA
cacgcttggcgaatttttgt

SEQ ID NO: 232159 - DNA, 20 bp, synthetic construct
  source 1..20: mol_type = other DNA
ccacgcttggcgaatttttg

SEQ ID NO: 232160 - DNA, 20 bp, synthetic construct
  source 1..20: mol_type = other DNA
accacgcttggcgaattttt

SEQ ID NO: 232161 - DNA, 20 bp, synthetic construct
  source 1..20: mol_type = other DNA
caccacgcttggcgaatttt

SEQ ID NO: 232162 - DNA, 20 bp, synthetic construct
  source 1..20: mol_type = other DNA
ccaccacgcttggcgaattt

SEQ ID NO: 232163 - DNA, 20 bp, synthetic construct
  source 1..20: mol_type = other DNA
gccaccacgcttggcgaatt

SEQ ID NO: 232164 - DNA, 20 bp, synthetic construct
  source 1..20: mol_type = other DNA
tgccaccacgcttggcgaat

SEQ ID NO: 232165 - DNA, 20 bp, synthetic construct
  source 1..20: mol_type = other DNA
gtgccaccacgcttggcgaa

SEQ ID NO: 232166 - DNA, 20 bp, synthetic construct
  source 1..20: mol_type = other DNA
tgtgccaccacgcttggcga

SEQ ID NO: 232167 - DNA, 20 bp, synthetic construct
  source 1..20: mol_type = other DNA
atgtgccaccacgcttggcg

SEQ ID NO: 232168 - DNA, 20 bp, synthetic construct
  source 1..20: mol_type = other DNA
catgtgccaccacgcttggc

SEQ ID NO: 232169 - DNA, 20 bp, synthetic construct
  source 1..20: mol_type = other DNA
gcatgtgccaccacgcttgg

SEQ ID NO: 232170 - DNA, 20 bp, synthetic construct
  source 1..20: mol_type = other DNA
ggcatgtgccaccacgcttg

SEQ ID NO: 232171 - DNA, 20 bp, synthetic construct
  source 1..20: mol_type = other DNA
aggcatgtgccaccacgctt

SEQ ID NO: 232172 - DNA, 20 bp, synthetic construct
  source 1..20: mol_type = other DNA
caggcatgtgccaccacgct

SEQ ID NO: 232173 - DNA, 20 bp, synthetic construct
  source 1..20: mol_type = other DNA
acaggcatgtgccaccacgc

SEQ ID NO: 232174 - DNA, 20 bp, synthetic construct
  source 1..20: mol_type = other DNA
cacaggcatgtgccaccacg

SEQ ID NO: 232175 - DNA, 20 bp, synthetic construct
  source 1..20: mol_type = other DNA
tcacaggcatgtgccaccac

SEQ ID NO: 232176 - DNA, 20 bp, synthetic construct
  source 1..20: mol_type = other DNA
atcacaggcatgtgccacca

SEQ ID NO: 232177 - DNA, 20 bp, synthetic construct
  source 1..20: mol_type = other DNA
gatcacaggcatgtgccacc

SEQ ID NO: 232178 - DNA, 20 bp, synthetic construct
  source 1..20: mol_type = other DNA
ggatcacaggcatgtgccac

SEQ ID NO: 232179 - DNA, 20 bp, synthetic construct
  source 1..20: mol_type = other DNA
gggatcacaggcatgtgcca

SEQ ID NO: 232180 - DNA, 20 bp, synthetic construct
  source 1..20: mol_type = other DNA
tgggatcacaggcatgtgcc

SEQ ID NO: 232181 - DNA, 20 bp, synthetic construct
  source 1..20: mol_type = other DNA
ctgggatcacaggcatgtgc

SEQ ID NO: 232182 - DNA, 20 bp, synthetic construct
  source 1..20: mol_type = other DNA
gctgggatcacaggcatgtg

SEQ ID NO: 232183 - DNA, 20 bp, synthetic construct
  source 1..20: mol_type = other DNA
agctgggatcacaggcatgt

SEQ ID NO: 232184 - DNA, 20 bp, synthetic construct
  source 1..20: mol_type = other DNA
tagctgggatcacaggcatg

SEQ ID NO: 232185 - DNA, 20 bp, synthetic construct
  source 1..20: mol_type = other DNA
gtagctgggatcacaggcat

SEQ ID NO: 232186 - DNA, 20 bp, synthetic construct
  source 1..20: mol_type = other DNA
agtagctgggatcacaggca

SEQ ID NO: 232187 - DNA, 20 bp, synthetic construct
  source 1..20: mol_type = other DNA
gagtagctgggatcacaggc

SEQ ID NO: 232188 - DNA, 20 bp, synthetic construct
  source 1..20: mol_type = other DNA
cgagtagctgggatcacagg

SEQ ID NO: 232189 - DNA, 20 bp, synthetic construct
  source 1..20: mol_type = other DNA
ccgagtagctgggatcacag

SEQ ID NO: 232190 - DNA, 20 bp, synthetic construct
  source 1..20: mol_type = other DNA
cccgagtagctgggatcaca

SEQ ID NO: 232191 - DNA, 20 bp, synthetic construct
  source 1..20: mol_type = other DNA
tcccgagtagctgggatcac

SEQ ID NO: 232192 - DNA, 20 bp, synthetic construct
  source 1..20: mol_type = other DNA
ctcccgagtagctgggatca

SEQ ID NO: 232193 - DNA, 20 bp, synthetic construct
  source 1..20: mol_type = other DNA
cctcccgagtagctgggatc

SEQ ID NO: 232194 - DNA, 20 bp, synthetic construct
  source 1..20: mol_type = other DNA
gcctcccgagtagctgggat

SEQ ID NO: 232195 - DNA, 20 bp, synthetic construct
  source 1..20: mol_type = other DNA
agcctcccgagtagctggga

SEQ ID NO: 232196 - DNA, 20 bp, synthetic construct
  source 1..20: mol_type = other DNA
cagcctcccgagtagctggg

SEQ ID NO: 232197 - DNA, 20 bp, synthetic construct
  source 1..20: mol_type = other DNA
tcagcctcccgagtagctgg

SEQ ID NO: 232198 - DNA, 20 bp, synthetic construct
  source 1..20: mol_type = other DNA
ctcagcctcccgagtagctg

SEQ ID NO: 232199 - DNA, 20 bp, synthetic construct
  source 1..20: mol_type = other DNA
tctcagcctcccgagtagct

SEQ ID NO: 232200 - DNA, 20 bp, synthetic construct
  source 1..20: mol_type = other DNA
gtctcagcctcccgagtagc

SEQ ID NO: 232201 - DNA, 20 bp, synthetic construct
  source 1..20: mol_type = other DNA
tgtctcagcctcccgagtag

SEQ ID NO: 232202 - DNA, 20 bp, synthetic construct
  source 1..20: mol_type = other DNA
ctgtctcagcctcccgagta

SEQ ID NO: 232203 - DNA, 20 bp, synthetic construct
  source 1..20: mol_type = other DNA
cctgtctcagcctcccgagt

SEQ ID NO: 232204 - DNA, 20 bp, synthetic construct
  source 1..20: mol_type = other DNA
tcctgtctcagcctcccgag

SEQ ID NO: 232205 - DNA, 20 bp, synthetic construct
  source 1..20: mol_type = other DNA
ctcctgtctcagcctcccga

SEQ ID NO: 232206 - DNA, 20 bp, synthetic construct
  source 1..20: mol_type = other DNA
tctcctgtctcagcctcccg

SEQ ID NO: 232207 - DNA, 20 bp, synthetic construct
  source 1..20: mol_type = other DNA
ttctcctgtctcagcctccc

SEQ ID NO: 232208 - DNA, 20 bp, synthetic construct
  source 1..20: mol_type = other DNA
attctcctgtctcagcctcc

SEQ ID NO: 232209 - DNA, 20 bp, synthetic construct
  source 1..20: mol_type = other DNA
aattctcctgtctcagcctc

SEQ ID NO: 232210 - DNA, 20 bp, synthetic construct
  source 1..20: mol_type = other DNA
caattctcctgtctcagcct

SEQ ID NO: 232211 - DNA, 20 bp, synthetic construct
  source 1..20: mol_type = other DNA
gcaattctcctgtctcagcc

SEQ ID NO: 232212 - DNA, 20 bp, synthetic construct
  source 1..20: mol_type = other DNA
agcaattctcctgtctcagc

SEQ ID NO: 232213 - DNA, 20 bp, synthetic construct
  source 1..20: mol_type = other DNA
aagcaattctcctgtctcag

SEQ ID NO: 232214 - DNA, 20 bp, synthetic construct
  source 1..20: mol_type = other DNA
caagcaattctcctgtctca

SEQ ID NO: 232215 - DNA, 20 bp, synthetic construct
  source 1..20: mol_type = other DNA
tcaagcaattctcctgtctc

SEQ ID NO: 232216 - DNA, 20 bp, synthetic construct
  source 1..20: mol_type = other DNA
ttcaagcaattctcctgtct

SEQ ID NO: 232217 - DNA, 20 bp, synthetic construct
  source 1..20: mol_type = other DNA
gttcaagcaattctcctgtc

SEQ ID NO: 232218 - DNA, 20 bp, synthetic construct
  source 1..20: mol_type = other DNA
tgttcaagcaattctcctgt

SEQ ID NO: 232219 - DNA, 20 bp, synthetic construct
  source 1..20: mol_type = other DNA
gtgttcaagcaattctcctg

SEQ ID NO: 232220 - DNA, 20 bp, synthetic construct
  source 1..20: mol_type = other DNA
cgtgttcaagcaattctcct

SEQ ID NO: 232221 - DNA, 20 bp, synthetic construct
  source 1..20: mol_type = other DNA
ccgtgttcaagcaattctcc

SEQ ID NO: 232222 - DNA, 20 bp, synthetic construct
  source 1..20: mol_type = other DNA
cccgtgttcaagcaattctc

SEQ ID NO: 232223 - DNA, 20 bp, synthetic construct
  source 1..20: mol_type = other DNA
tcccgtgttcaagcaattct

SEQ ID NO: 232224 - DNA, 20 bp, synthetic construct
  source 1..20: mol_type = other DNA
ctcccgtgttcaagcaattc

SEQ ID NO: 232225 - DNA, 20 bp, synthetic construct
  source 1..20: mol_type = other DNA
cctcccgtgttcaagcaatt

SEQ ID NO: 232226 - DNA, 20 bp, synthetic construct
  source 1..20: mol_type = other DNA
gcctcccgtgttcaagcaat

SEQ ID NO: 232227 - DNA, 20 bp, synthetic construct
  source 1..20: mol_type = other DNA
tgcctcccgtgttcaagcaa

SEQ ID NO: 232228 - DNA, 20 bp, synthetic construct
  source 1..20: mol_type = other DNA
ctgcctcccgtgttcaagca

SEQ ID NO: 232229 - DNA, 20 bp, synthetic construct
  source 1..20: mol_type = other DNA
tctgcctcccgtgttcaagc

SEQ ID NO: 232230 - DNA, 20 bp, synthetic construct
  source 1..20: mol_type = other DNA
ctctgcctcccgtgttcaag

SEQ ID NO: 232231 - DNA, 20 bp, synthetic construct
  source 1..20: mol_type = other DNA
cctctgcctcccgtgttcaa

SEQ ID NO: 232232 - DNA, 20 bp, synthetic construct
  source 1..20: mol_type = other DNA
acctctgcctcccgtgttca

SEQ ID NO: 232233 - DNA, 20 bp, synthetic construct
  source 1..20: mol_type = other DNA
aacctctgcctcccgtgttc

SEQ ID NO: 232234 - DNA, 20 bp, synthetic construct
  source 1..20: mol_type = other DNA
caacctctgcctcccgtgtt

SEQ ID NO: 232235 - DNA, 20 bp, synthetic construct
  source 1..20: mol_type = other DNA
gcaacctctgcctcccgtgt

SEQ ID NO: 232236 - DNA, 20 bp, synthetic construct
  source 1..20: mol_type = other DNA
tgcaacctctgcctcccgtg

SEQ ID NO: 232237 - DNA, 20 bp, synthetic construct
  source 1..20: mol_type = other DNA
ctgcaacctctgcctcccgt

SEQ ID NO: 232238 - DNA, 20 bp, synthetic construct
  source 1..20: mol_type = other DNA
actgcaacctctgcctcccg

SEQ ID NO: 232239 - DNA, 20 bp, synthetic construct
  source 1..20: mol_type = other DNA
tactgcaacctctgcctccc

SEQ ID NO: 232240 - DNA, 20 bp, synthetic construct
  source 1..20: mol_type = other DNA
ttactgcaacctctgcctcc

SEQ ID NO: 232241 - DNA, 20 bp, synthetic construct
  source 1..20: mol_type = other DNA
cttactgcaacctctgcctc

SEQ ID NO: 232242 - DNA, 20 bp, synthetic construct
  source 1..20: mol_type = other DNA
gcttactgcaacctctgcct

SEQ ID NO: 232243 - DNA, 20 bp, synthetic construct
  source 1..20: mol_type = other DNA
agcttactgcaacctctgcc

SEQ ID NO: 232244 - DNA, 20 bp, synthetic construct
  source 1..20: mol_type = other DNA
cagcttactgcaacctctgc

SEQ ID NO: 232245 - DNA, 20 bp, synthetic construct
  source 1..20: mol_type = other DNA
tcagcttactgcaacctctg

SEQ ID NO: 232246 - DNA, 20 bp, synthetic construct
  source 1..20: mol_type = other DNA
ctcagcttactgcaacctct

SEQ ID NO: 232247 - DNA, 20 bp, synthetic construct
  source 1..20: mol_type = other DNA
tctcagcttactgcaacctc

SEQ ID NO: 232248 - DNA, 20 bp, synthetic construct
  source 1..20: mol_type = other DNA
atctcagcttactgcaacct

SEQ ID NO: 232249 - DNA, 20 bp, synthetic construct
  source 1..20: mol_type = other DNA
gatctcagcttactgcaacc

SEQ ID NO: 232250 - DNA, 20 bp, synthetic construct
  source 1..20: mol_type = other DNA
cgatctcagcttactgcaac

SEQ ID NO: 232251 - DNA, 20 bp, synthetic construct
  source 1..20: mol_type = other DNA
acgatctcagcttactgcaa

SEQ ID NO: 232252 - DNA, 20 bp, synthetic construct
  source 1..20: mol_type = other DNA
tacgatctcagcttactgca

SEQ ID NO: 232253 - DNA, 20 bp, synthetic construct
  source 1..20: mol_type = other DNA
gtacgatctcagcttactgc

SEQ ID NO: 232254 - DNA, 20 bp, synthetic construct
  source 1..20: mol_type = other DNA
ggtacgatctcagcttactg

SEQ ID NO: 232255 - DNA, 20 bp, synthetic construct
  source 1..20: mol_type = other DNA
tggtacgatctcagcttact

SEQ ID NO: 232256 - DNA, 20 bp, synthetic construct
  source 1..20: mol_type = other DNA
atggtacgatctcagcttac

SEQ ID NO: 232257 - DNA, 20 bp, synthetic construct
  source 1..20: mol_type = other DNA
aatggtacgatctcagctta

SEQ ID NO: 232258 - DNA, 20 bp, synthetic construct
  source 1..20: mol_type = other DNA
gaatggtacgatctcagctt

SEQ ID NO: 232259 - DNA, 20 bp, synthetic construct
  source 1..20: mol_type = other DNA
ggaatggtacgatctcagct

SEQ ID NO: 232260 - DNA, 20 bp, synthetic construct
  source 1..20: mol_type = other DNA
tggaatggtacgatctcagc

SEQ ID NO: 232261 - DNA, 20 bp, synthetic construct
  source 1..20: mol_type = other DNA
ctggaatggtacgatctcag

SEQ ID NO: 232262 - DNA, 20 bp, synthetic construct
  source 1..20: mol_type = other DNA
actggaatggtacgatctca

SEQ ID NO: 232263 - DNA, 20 bp, synthetic construct
  source 1..20: mol_type = other DNA
gactggaatggtacgatctc

SEQ ID NO: 232264 - DNA, 20 bp, synthetic construct
  source 1..20: mol_type = other DNA
ggactggaatggtacgatct

SEQ ID NO: 232265 - DNA, 20 bp, synthetic construct
  source 1..20: mol_type = other DNA
tggactggaatggtacgatc

SEQ ID NO: 232266 - DNA, 20 bp, synthetic construct
  source 1..20: mol_type = other DNA
ctggactggaatggtacgat

SEQ ID NO: 232267 - DNA, 20 bp, synthetic construct
  source 1..20: mol_type = other DNA
gctggactggaatggtacga

SEQ ID NO: 232268 - DNA, 20 bp, synthetic construct
  source 1..20: mol_type = other DNA
ggctggactggaatggtacg

SEQ ID NO: 232269 - DNA, 20 bp, synthetic construct
  source 1..20: mol_type = other DNA
aggctggactggaatggtac

SEQ ID NO: 232270 - DNA, 20 bp, synthetic construct
  source 1..20: mol_type = other DNA
caggctggactggaatggta

SEQ ID NO: 232271 - DNA, 20 bp, synthetic construct
  source 1..20: mol_type = other DNA
ccaggctggactggaatggt

SEQ ID NO: 232272 - DNA, 20 bp, synthetic construct
  source 1..20: mol_type = other DNA
cccaggctggactggaatgg

SEQ ID NO: 232273 - DNA, 20 bp, synthetic construct
  source 1..20: mol_type = other DNA
gcccaggctggactggaatg

SEQ ID NO: 232274 - DNA, 20 bp, synthetic construct
  source 1..20: mol_type = other DNA
agcccaggctggactggaat

SEQ ID NO: 232275 - DNA, 20 bp, synthetic construct
  source 1..20: mol_type = other DNA
tagcccaggctggactggaa

SEQ ID NO: 232276 - DNA, 20 bp, synthetic construct
  source 1..20: mol_type = other DNA
gtagcccaggctggactgga

SEQ ID NO: 232277 - DNA, 20 bp, synthetic construct
  source 1..20: mol_type = other DNA
tgtagcccaggctggactgg

SEQ ID NO: 232278 - DNA, 20 bp, synthetic construct
  source 1..20: mol_type = other DNA
ctgtagcccaggctggactg

SEQ ID NO: 232279 - DNA, 20 bp, synthetic construct
  source 1..20: mol_type = other DNA
tctgtagcccaggctggact

SEQ ID NO: 232280 - DNA, 20 bp, synthetic construct
  source 1..20: mol_type = other DNA
ctctgtagcccaggctggac

SEQ ID NO: 232281 - DNA, 20 bp, synthetic construct
  source 1..20: mol_type = other DNA
gctctgtagcccaggctgga

SEQ ID NO: 232282 - DNA, 20 bp, synthetic construct
  source 1..20: mol_type = other DNA
cgctctgtagcccaggctgg

SEQ ID NO: 232283 - DNA, 20 bp, synthetic construct
  source 1..20: mol_type = other DNA
tcgctctgtagcccaggctg

SEQ ID NO: 232284 - DNA, 20 bp, synthetic construct
  source 1..20: mol_type = other DNA
ctcgctctgtagcccaggct

SEQ ID NO: 232285 - DNA, 20 bp, synthetic construct
  source 1..20: mol_type = other DNA
tctcgctctgtagcccaggc

SEQ ID NO: 232286 - DNA, 20 bp, synthetic construct
  source 1..20: mol_type = other DNA
gtctcgctctgtagcccagg

SEQ ID NO: 232287 - DNA, 20 bp, synthetic construct
  source 1..20: mol_type = other DNA
agtctcgctctgtagcccag

SEQ ID NO: 232288 - DNA, 20 bp, synthetic construct
  source 1..20: mol_type = other DNA
gagtctcgctctgtagccca

SEQ ID NO: 232289 - DNA, 20 bp, synthetic construct
  source 1..20: mol_type = other DNA
agagtctcgctctgtagccc

SEQ ID NO: 232290 - DNA, 20 bp, synthetic construct
  source 1..20: mol_type = other DNA
cagagtctcgctctgtagcc

SEQ ID NO: 232291 - DNA, 20 bp, synthetic construct
  source 1..20: mol_type = other DNA
acagagtctcgctctgtagc

SEQ ID NO: 232292 - DNA, 20 bp, synthetic construct
  source 1..20: mol_type = other DNA
gacagagtctcgctctgtag

SEQ ID NO: 232293 - DNA, 20 bp, synthetic construct
  source 1..20: mol_type = other DNA
ggacagagtctcgctctgta

SEQ ID NO: 232294 - DNA, 20 bp, synthetic construct
  source 1..20: mol_type = other DNA
gggacagagtctcgctctgt

SEQ ID NO: 232295 - DNA, 20 bp, synthetic construct
  source 1..20: mol_type = other DNA
tgggacagagtctcgctctg

SEQ ID NO: 232296 - DNA, 20 bp, synthetic construct
  source 1..20: mol_type = other DNA
ctgggacagagtctcgctct

SEQ ID NO: 232297 - DNA, 20 bp, synthetic construct
  source 1..20: mol_type = other DNA
tctgggacagagtctcgctc

SEQ ID NO: 232298 - DNA, 20 bp, synthetic construct
  source 1..20: mol_type = other DNA
ttctgggacagagtctcgct

SEQ ID NO: 232299 - DNA, 20 bp, synthetic construct
  source 1..20: mol_type = other DNA
tttctgggacagagtctcgc

SEQ ID NO: 232300 - DNA, 20 bp, synthetic construct
  source 1..20: mol_type = other DNA
ttttctgggacagagtctcg

SEQ ID NO: 232301 - DNA, 20 bp, synthetic construct
  source 1..20: mol_type = other DNA
tttttctgggacagagtctc

SEQ ID NO: 232302 - DNA, 20 bp, synthetic construct
  source 1..20: mol_type = other DNA
ttttttctgggacagagtct

SEQ ID NO: 232303 - DNA, 20 bp, synthetic construct
  source 1..20: mol_type = other DNA
attttttctgggacagagtc

SEQ ID NO: 232304 - DNA, 20 bp, synthetic construct
  source 1..20: mol_type = other DNA
aattttttctgggacagagt

SEQ ID NO: 232305 - DNA, 20 bp, synthetic construct
  source 1..20: mol_type = other DNA
taattttttctgggacagag

SEQ ID NO: 232306 - DNA, 20 bp, synthetic construct
  source 1..20: mol_type = other DNA
ttaattttttctgggacaga

SEQ ID NO: 232307 - DNA, 20 bp, synthetic construct
  source 1..20: mol_type = other DNA
tttaattttttctgggacag

SEQ ID NO: 232308 - DNA, 20 bp, synthetic construct
  source 1..20: mol_type = other DNA
ttttaattttttctgggaca

SEQ ID NO: 232309 - DNA, 20 bp, synthetic construct
  source 1..20: mol_type = other DNA
gttttaattttttctgggac

SEQ ID NO: 232310 - DNA, 20 bp, synthetic construct
  source 1..20: mol_type = other DNA
tgttttaattttttctggga

SEQ ID NO: 232311 - DNA, 20 bp, synthetic construct
  source 1..20: mol_type = other DNA
atgttttaattttttctggg

SEQ ID NO: 232312 - DNA, 20 bp, synthetic construct
  source 1..20: mol_type = other DNA
gatgttttaattttttctgg

SEQ ID NO: 232313 - DNA, 20 bp, synthetic construct
  source 1..20: mol_type = other DNA
tgatgttttaattttttctg

SEQ ID NO: 232314 - DNA, 20 bp, synthetic construct
  source 1..20: mol_type = other DNA
gtgatgttttaattttttct

SEQ ID NO: 232315 - DNA, 20 bp, synthetic construct
  source 1..20: mol_type = other DNA
tgtgatgttttaattttttc

SEQ ID NO: 232316 - DNA, 20 bp, synthetic construct
  source 1..20: mol_type = other DNA
atgtgatgttttaatttttt

SEQ ID NO: 232317 - DNA, 20 bp, synthetic construct
  source 1..20: mol_type = other DNA
tatgtgatgttttaattttt

SEQ ID NO: 232318 - DNA, 20 bp, synthetic construct
  source 1..20: mol_type = other DNA
atatgtgatgttttaatttt

SEQ ID NO: 232319 - DNA, 20 bp, synthetic construct
  source 1..20: mol_type = other DNA
aatatgtgatgttttaattt

SEQ ID NO: 232320 - DNA, 20 bp, synthetic construct
  source 1..20: mol_type = other DNA
aaatatgtgatgttttaatt

SEQ ID NO: 232321 - DNA, 20 bp, synthetic construct
  source 1..20: mol_type = other DNA
taaatatgtgatgttttaat

SEQ ID NO: 232322 - DNA, 20 bp, synthetic construct
  source 1..20: mol_type = other DNA
ttaaatatgtgatgttttaa

SEQ ID NO: 232323 - DNA, 20 bp, synthetic construct
  source 1..20: mol_type = other DNA
tttaaatatgtgatgtttta

SEQ ID NO: 232324 - DNA, 20 bp, synthetic construct
  source 1..20: mol_type = other DNA
gtttaaatatgtgatgtttt

SEQ ID NO: 232325 - DNA, 20 bp, synthetic construct
  source 1..20: mol_type = other DNA
tgtttaaatatgtgatgttt

SEQ ID NO: 232326 - DNA, 20 bp, synthetic construct
  source 1..20: mol_type = other DNA
ttgtttaaatatgtgatgtt

SEQ ID NO: 232327 - DNA, 20 bp, synthetic construct
  source 1..20: mol_type = other DNA
gttgtttaaatatgtgatgt

SEQ ID NO: 232328 - DNA, 20 bp, synthetic construct
  source 1..20: mol_type = other DNA
agttgtttaaatatgtgatg

SEQ ID NO: 232329 - DNA, 20 bp, synthetic construct
  source 1..20: mol_type = other DNA
gagttgtttaaatatgtgat

SEQ ID NO: 232330 - DNA, 20 bp, synthetic construct
  source 1..20: mol_type = other DNA
agagttgtttaaatatgtga

SEQ ID NO: 232331 - DNA, 20 bp, synthetic construct
  source 1..20: mol_type = other DNA
tagagttgtttaaatatgtg

SEQ ID NO: 232332 - DNA, 20 bp, synthetic construct
  source 1..20: mol_type = other DNA
ctagagttgtttaaatatgt

SEQ ID NO: 232333 - DNA, 20 bp, synthetic construct
  source 1..20: mol_type = other DNA
cctagagttgtttaaatatg

SEQ ID NO: 232334 - DNA, 20 bp, synthetic construct
  source 1..20: mol_type = other DNA
tcctagagttgtttaaatat

SEQ ID NO: 232335 - DNA, 20 bp, synthetic construct
  source 1..20: mol_type = other DNA
atcctagagttgtttaaata

SEQ ID NO: 232336 - DNA, 20 bp, synthetic construct
  source 1..20: mol_type = other DNA
tatcctagagttgtttaaat

SEQ ID NO: 232337 - DNA, 20 bp, synthetic construct
  source 1..20: mol_type = other DNA
atatcctagagttgtttaaa

SEQ ID NO: 232338 - DNA, 20 bp, synthetic construct
  source 1..20: mol_type = other DNA
gatatcctagagttgtttaa

SEQ ID NO: 232339 - DNA, 20 bp, synthetic construct
  source 1..20: mol_type = other DNA
tgatatcctagagttgttta

SEQ ID NO: 232340 - DNA, 20 bp, synthetic construct
  source 1..20: mol_type = other DNA
atgatatcctagagttgttt

SEQ ID NO: 232341 - DNA, 20 bp, synthetic construct
  source 1..20: mol_type = other DNA
aatgatatcctagagttgtt

SEQ ID NO: 232342 - DNA, 20 bp, synthetic construct
  source 1..20: mol_type = other DNA
aaatgatatcctagagttgt

SEQ ID NO: 232343 - DNA, 20 bp, synthetic construct
  source 1..20: mol_type = other DNA
taaatgatatcctagagttg

SEQ ID NO: 232344 - DNA, 20 bp, synthetic construct
  source 1..20: mol_type = other DNA
ttaaatgatatcctagagtt

SEQ ID NO: 232345 - DNA, 20 bp, synthetic construct
  source 1..20: mol_type = other DNA
tttaaatgatatcctagagt

SEQ ID NO: 232346 - DNA, 20 bp, synthetic construct
  source 1..20: mol_type = other DNA
ttttaaatgatatcctagag

SEQ ID NO: 232347 - DNA, 20 bp, synthetic construct
  source 1..20: mol_type = other DNA
tttttaaatgatatcctaga

SEQ ID NO: 232348 - DNA, 20 bp, synthetic construct
  source 1..20: mol_type = other DNA
ttttttaaatgatatcctag

SEQ ID NO: 232349 - DNA, 20 bp, synthetic construct
  source 1..20: mol_type = other DNA
tttttttaaatgatatccta

SEQ ID NO: 232350 - DNA, 20 bp, synthetic construct
  source 1..20: mol_type = other DNA
gtttttttaaatgatatcct

SEQ ID NO: 232351 - DNA, 20 bp, synthetic construct
  source 1..20: mol_type = other DNA
tgtttttttaaatgatatcc

SEQ ID NO: 232352 - DNA, 20 bp, synthetic construct
  source 1..20: mol_type = other DNA
atgtttttttaaatgatatc

SEQ ID NO: 232353 - DNA, 20 bp, synthetic construct
  source 1..20: mol_type = other DNA
aatgtttttttaaatgatat

SEQ ID NO: 232354 - DNA, 20 bp, synthetic construct
  source 1..20: mol_type = other DNA
taatgtttttttaaatgata

SEQ ID NO: 232355 - DNA, 20 bp, synthetic construct
  source 1..20: mol_type = other DNA
ttaatgtttttttaaatgat

SEQ ID NO: 232356 - DNA, 20 bp, synthetic construct
  source 1..20: mol_type = other DNA
attaatgtttttttaaatga

SEQ ID NO: 232357 - DNA, 20 bp, synthetic construct
  source 1..20: mol_type = other DNA
tattaatgtttttttaaatg

SEQ ID NO: 232358 - DNA, 20 bp, synthetic construct
  source 1..20: mol_type = other DNA
ctattaatgtttttttaaat

SEQ ID NO: 232359 - DNA, 20 bp, synthetic construct
  source 1..20: mol_type = other DNA
tctattaatgtttttttaaa

SEQ ID NO: 232360 - DNA, 20 bp, synthetic construct
  source 1..20: mol_type = other DNA
gtctattaatgtttttttaa

SEQ ID NO: 232361 - DNA, 20 bp, synthetic construct
  source 1..20: mol_type = other DNA
agtctattaatgttttttta

SEQ ID NO: 232362 - DNA, 20 bp, synthetic construct
  source 1..20: mol_type = other DNA
cagtctattaatgttttttt

SEQ ID NO: 232363 - DNA, 20 bp, synthetic construct
  source 1..20: mol_type = other DNA
acagtctattaatgtttttt

SEQ ID NO: 232364 - DNA, 20 bp, synthetic construct
  source 1..20: mol_type = other DNA
aacagtctattaatgttttt

SEQ ID NO: 232365 - DNA, 20 bp, synthetic construct
  source 1..20: mol_type = other DNA
aaacagtctattaatgtttt

SEQ ID NO: 232366 - DNA, 20 bp, synthetic construct
  source 1..20: mol_type = other DNA
aaaacagtctattaatgttt

SEQ ID NO: 232367 - DNA, 20 bp, synthetic construct
  source 1..20: mol_type = other DNA
aaaaacagtctattaatgtt

SEQ ID NO: 232368 - DNA, 20 bp, synthetic construct
  source 1..20: mol_type = other DNA
aaaaaacagtctattaatgt

SEQ ID NO: 232369 - DNA, 20 bp, synthetic construct
  source 1..20: mol_type = other DNA
taaaaaacagtctattaatg

SEQ ID NO: 232370 - DNA, 20 bp, synthetic construct
  source 1..20: mol_type = other DNA
ctaaaaaacagtctattaat

SEQ ID NO: 232371 - DNA, 20 bp, synthetic construct
  source 1..20: mol_type = other DNA
tctaaaaaacagtctattaa

SEQ ID NO: 232372 - DNA, 20 bp, synthetic construct
  source 1..20: mol_type = other DNA
ctctaaaaaacagtctatta

SEQ ID NO: 232373 - DNA, 20 bp, synthetic construct
  source 1..20: mol_type = other DNA
gctctaaaaaacagtctatt

SEQ ID NO: 232374 - DNA, 20 bp, synthetic construct
  source 1..20: mol_type = other DNA
tgctctaaaaaacagtctat

SEQ ID NO: 232375 - DNA, 20 bp, synthetic construct
  source 1..20: mol_type = other DNA
gtgctctaaaaaacagtcta

SEQ ID NO: 232376 - DNA, 20 bp, synthetic construct
  source 1..20: mol_type = other DNA
agtgctctaaaaaacagtct

SEQ ID NO: 232377 - DNA, 20 bp, synthetic construct
  source 1..20: mol_type = other DNA
aagtgctctaaaaaacagtc

SEQ ID NO: 232378 - DNA, 20 bp, synthetic construct
  source 1..20: mol_type = other DNA
aaagtgctctaaaaaacagt

SEQ ID NO: 232379 - DNA, 20 bp, synthetic construct
  source 1..20: mol_type = other DNA
aaaagtgctctaaaaaacag

SEQ ID NO: 232380 - DNA, 20 bp, synthetic construct
  source 1..20: mol_type = other DNA
taaaagtgctctaaaaaaca

SEQ ID NO: 232381 - DNA, 20 bp, synthetic construct
  source 1..20: mol_type = other DNA
ctaaaagtgctctaaaaaac

SEQ ID NO: 232382 - DNA, 20 bp, synthetic construct
  source 1..20: mol_type = other DNA
cctaaaagtgctctaaaaaa

SEQ ID NO: 232383 - DNA, 20 bp, synthetic construct
  source 1..20: mol_type = other DNA
acctaaaagtgctctaaaaa

SEQ ID NO: 232384 - DNA, 20 bp, synthetic construct
  source 1..20: mol_type = other DNA
aacctaaaagtgctctaaaa

SEQ ID NO: 232385 - DNA, 20 bp, synthetic construct
  source 1..20: mol_type = other DNA
gaacctaaaagtgctctaaa

SEQ ID NO: 232386 - DNA, 20 bp, synthetic construct
  source 1..20: mol_type = other DNA
tgaacctaaaagtgctctaa

SEQ ID NO: 232387 - DNA, 20 bp, synthetic construct
  source 1..20: mol_type = other DNA
gtgaacctaaaagtgctcta

SEQ ID NO: 232388 - DNA, 20 bp, synthetic construct
  source 1..20: mol_type = other DNA
tgtgaacctaaaagtgctct

SEQ ID NO: 232389 - DNA, 20 bp, synthetic construct
  source 1..20: mol_type = other DNA
ctgtgaacctaaaagtgctc

SEQ ID NO: 232390 - DNA, 20 bp, synthetic construct
  source 1..20: mol_type = other DNA
actgtgaacctaaaagtgct

SEQ ID NO: 232391 - DNA, 20 bp, synthetic construct
  source 1..20: mol_type = other DNA
cactgtgaacctaaaagtgc

SEQ ID NO: 232392 - DNA, 20 bp, synthetic construct
  source 1..20: mol_type = other DNA
tcactgtgaacctaaaagtg

SEQ ID NO: 232393 - DNA, 20 bp, synthetic construct
  source 1..20: mol_type = other DNA
ttcactgtgaacctaaaagt

SEQ ID NO: 232394 - DNA, 20 bp, synthetic construct
  source 1..20: mol_type = other DNA
tttcactgtgaacctaaaag

SEQ ID NO: 232395 - DNA, 20 bp, synthetic construct
  source 1..20: mol_type = other DNA
gtttcactgtgaacctaaaa

SEQ ID NO: 232396 - DNA, 20 bp, synthetic construct
  source 1..20: mol_type = other DNA
agtttcactgtgaacctaaa

SEQ ID NO: 232397 - DNA, 20 bp, synthetic construct
  source 1..20: mol_type = other DNA
cagtttcactgtgaacctaa

SEQ ID NO: 232398 - DNA, 20 bp, synthetic construct
  source 1..20: mol_type = other DNA
tcagtttcactgtgaaccta

SEQ ID NO: 232399 - DNA, 20 bp, synthetic construct
  source 1..20: mol_type = other DNA
ctcagtttcactgtgaacct

SEQ ID NO: 232400 - DNA, 20 bp, synthetic construct
  source 1..20: mol_type = other DNA
actcagtttcactgtgaacc

SEQ ID NO: 232401 - DNA, 20 bp, synthetic construct
  source 1..20: mol_type = other DNA
cactcagtttcactgtgaac

SEQ ID NO: 232402 - DNA, 20 bp, synthetic construct
  source 1..20: mol_type = other DNA
ccactcagtttcactgtgaa

SEQ ID NO: 232403 - DNA, 20 bp, synthetic construct
  source 1..20: mol_type = other DNA
tccactcagtttcactgtga

SEQ ID NO: 232404 - DNA, 20 bp, synthetic construct
  source 1..20: mol_type = other DNA
ttccactcagtttcactgtg

SEQ ID NO: 232405 - DNA, 20 bp, synthetic construct
  source 1..20: mol_type = other DNA
cttccactcagtttcactgt

SEQ ID NO: 232406 - DNA, 20 bp, synthetic construct
  source 1..20: mol_type = other DNA
ccttccactcagtttcactg

SEQ ID NO: 232407 - DNA, 20 bp, synthetic construct
  source 1..20: mol_type = other DNA
accttccactcagtttcact

SEQ ID NO: 232408 - DNA, 20 bp, synthetic construct
  source 1..20: mol_type = other DNA
taccttccactcagtttcac

SEQ ID NO: 232409 - DNA, 20 bp, synthetic construct
  source 1..20: mol_type = other DNA
gtaccttccactcagtttca

SEQ ID NO: 232410 - DNA, 20 bp, synthetic construct
  source 1..20: mol_type = other DNA
tgtaccttccactcagtttc

SEQ ID NO: 232411 - DNA, 20 bp, synthetic construct
  source 1..20: mol_type = other DNA
ctgtaccttccactcagttt

SEQ ID NO: 232412 - DNA, 20 bp, synthetic construct
  source 1..20: mol_type = other DNA
tctgtaccttccactcagtt

SEQ ID NO: 232413 - DNA, 20 bp, synthetic construct
  source 1..20: mol_type = other DNA
ctctgtaccttccactcagt

SEQ ID NO: 232414 - DNA, 20 bp, synthetic construct
  source 1..20: mol_type = other DNA
tctctgtaccttccactcag

SEQ ID NO: 232415 - DNA, 20 bp, synthetic construct
  source 1..20: mol_type = other DNA
gtctctgtaccttccactca

SEQ ID NO: 232416 - DNA, 20 bp, synthetic construct
  source 1..20: mol_type = other DNA
agtctctgtaccttccactc

SEQ ID NO: 232417 - DNA, 20 bp, synthetic construct
  source 1..20: mol_type = other DNA
aagtctctgtaccttccact

SEQ ID NO: 232418 - DNA, 20 bp, synthetic construct
  source 1..20: mol_type = other DNA
gaagtctctgtaccttccac

SEQ ID NO: 232419 - DNA, 20 bp, synthetic construct
  source 1..20: mol_type = other DNA
ggaagtctctgtaccttcca

SEQ ID NO: 232420 - DNA, 20 bp, synthetic construct
  source 1..20: mol_type = other DNA
gggaagtctctgtaccttcc

SEQ ID NO: 232421 - DNA, 20 bp, synthetic construct
  source 1..20: mol_type = other DNA
cgggaagtctctgtaccttc

SEQ ID NO: 232422 - DNA, 20 bp, synthetic construct
  source 1..20: mol_type = other DNA
acgggaagtctctgtacctt

SEQ ID NO: 232423 - DNA, 20 bp, synthetic construct
  source 1..20: mol_type = other DNA
tacgggaagtctctgtacct

SEQ ID NO: 232424 - DNA, 20 bp, synthetic construct
  source 1..20: mol_type = other DNA
atacgggaagtctctgtacc

SEQ ID NO: 232425 - DNA, 20 bp, synthetic construct
  source 1..20: mol_type = other DNA
catacgggaagtctctgtac

SEQ ID NO: 232426 - DNA, 20 bp, synthetic construct
  source 1..20: mol_type = other DNA
acatacgggaagtctctgta

SEQ ID NO: 232427 - DNA, 20 bp, synthetic construct
  source 1..20: mol_type = other DNA
aacatacgggaagtctctgt

SEQ ID NO: 232428 - DNA, 20 bp, synthetic construct
  source 1..20: mol_type = other DNA
gaacatacgggaagtctctg

SEQ ID NO: 232429 - DNA, 20 bp, synthetic construct
  source 1..20: mol_type = other DNA
ggaacatacgggaagtctct

SEQ ID NO: 232430 - DNA, 20 bp, synthetic construct
  source 1..20: mol_type = other DNA
gggaacatacgggaagtctc

SEQ ID NO: 232431 - DNA, 20 bp, synthetic construct
  source 1..20: mol_type = other DNA
agggaacatacgggaagtct

SEQ ID NO: 232432 - DNA, 20 bp, synthetic construct
  source 1..20: mol_type = other DNA
cagggaacatacgggaagtc

SEQ ID NO: 232433 - DNA, 20 bp, synthetic construct
  source 1..20: mol_type = other DNA
gcagggaacatacgggaagt

SEQ ID NO: 232434 - DNA, 20 bp, synthetic construct
  source 1..20: mol_type = other DNA
ggcagggaacatacgggaag

SEQ ID NO: 232435 - DNA, 20 bp, synthetic construct
  source 1..20: mol_type = other DNA
gggcagggaacatacgggaa

SEQ ID NO: 232436 - DNA, 20 bp, synthetic construct
  source 1..20: mol_type = other DNA
agggcagggaacatacggga

SEQ ID NO: 232437 - DNA, 20 bp, synthetic construct
  source 1..20: mol_type = other DNA
gagggcagggaacatacggg

SEQ ID NO: 232438 - DNA, 20 bp, synthetic construct
  source 1..20: mol_type = other DNA
ggagggcagggaacatacgg

SEQ ID NO: 232439 - DNA, 20 bp, synthetic construct
  source 1..20: mol_type = other DNA
tggagggcagggaacatacg

SEQ ID NO: 232440 - DNA, 20 bp, synthetic construct
  source 1..20: mol_type = other DNA
gtggagggcagggaacatac

SEQ ID NO: 232441 - DNA, 20 bp, synthetic construct
  source 1..20: mol_type = other DNA
cgtggagggcagggaacata

SEQ ID NO: 232442 - DNA, 20 bp, synthetic construct
  source 1..20: mol_type = other DNA
acgtggagggcagggaacat

SEQ ID NO: 232443 - DNA, 20 bp, synthetic construct
  source 1..20: mol_type = other DNA
tacgtggagggcagggaaca

SEQ ID NO: 232444 - DNA, 20 bp, synthetic construct
  source 1..20: mol_type = other DNA
gtacgtggagggcagggaac

SEQ ID NO: 232445 - DNA, 20 bp, synthetic construct
  source 1..20: mol_type = other DNA
tgtacgtggagggcagggaa

SEQ ID NO: 232446 - DNA, 20 bp, synthetic construct
  source 1..20: mol_type = other DNA
ctgtacgtggagggcaggga

SEQ ID NO: 232447 - DNA, 20 bp, synthetic construct
  source 1..20: mol_type = other DNA
gctgtacgtggagggcaggg

SEQ ID NO: 232448 - DNA, 20 bp, synthetic construct
  source 1..20: mol_type = other DNA
ggctgtacgtggagggcagg

SEQ ID NO: 232449 - DNA, 20 bp, synthetic construct
  source 1..20: mol_type = other DNA
aggctgtacgtggagggcag

SEQ ID NO: 232450 - DNA, 20 bp, synthetic construct
  source 1..20: mol_type = other DNA
gaggctgtacgtggagggca

SEQ ID NO: 232451 - DNA, 20 bp, synthetic construct
  source 1..20: mol_type = other DNA
ggaggctgtacgtggagggc

SEQ ID NO: 232452 - DNA, 20 bp, synthetic construct
  source 1..20: mol_type = other DNA
gggaggctgtacgtggaggg

SEQ ID NO: 232453 - DNA, 20 bp, synthetic construct
  source 1..20: mol_type = other DNA
ggggaggctgtacgtggagg

SEQ ID NO: 232454 - DNA, 20 bp, synthetic construct
  source 1..20: mol_type = other DNA
gggggaggctgtacgtggag

SEQ ID NO: 232455 - DNA, 20 bp, synthetic construct
  source 1..20: mol_type = other DNA
tgggggaggctgtacgtgga

SEQ ID NO: 232456 - DNA, 20 bp, synthetic construct
  source 1..20: mol_type = other DNA
gtgggggaggctgtacgtgg

SEQ ID NO: 232457 - DNA, 20 bp, synthetic construct
  source 1..20: mol_type = other DNA
agtgggggaggctgtacgtg

SEQ ID NO: 232458 - DNA, 20 bp, synthetic construct
  source 1..20: mol_type = other DNA
cagtgggggaggctgtacgt

SEQ ID NO: 232459 - DNA, 20 bp, synthetic construct
  source 1..20: mol_type = other DNA
gcagtgggggaggctgtacg

SEQ ID NO: 232460 - DNA, 20 bp, synthetic construct
  source 1..20: mol_type = other DNA
ggcagtgggggaggctgtac

SEQ ID NO: 232461 - DNA, 20 bp, synthetic construct
  source 1..20: mol_type = other DNA
tggcagtgggggaggctgta

SEQ ID NO: 232462 - DNA, 20 bp, synthetic construct
  source 1..20: mol_type = other DNA
ttggcagtgggggaggctgt

SEQ ID NO: 232463 - DNA, 20 bp, synthetic construct
  source 1..20: mol_type = other DNA
gttggcagtgggggaggctg

SEQ ID NO: 232464 - DNA, 20 bp, synthetic construct
  source 1..20: mol_type = other DNA
cgttggcagtgggggaggct

SEQ ID NO: 232465 - DNA, 20 bp, synthetic construct
  source 1..20: mol_type = other DNA
acgttggcagtgggggaggc

SEQ ID NO: 232466 - DNA, 20 bp, synthetic construct
  source 1..20: mol_type = other DNA
gacgttggcagtgggggagg

SEQ ID NO: 232467 - DNA, 20 bp, synthetic construct
  source 1..20: mol_type = other DNA
ggacgttggcagtgggggag

SEQ ID NO: 232468 - DNA, 20 bp, synthetic construct
  source 1..20: mol_type = other DNA
aggacgttggcagtggggga

SEQ ID NO: 232469 - DNA, 20 bp, synthetic construct
  source 1..20: mol_type = other DNA
caggacgttggcagtggggg

SEQ ID NO: 232470 - DNA, 20 bp, synthetic construct
  source 1..20: mol_type = other DNA
gcaggacgttggcagtgggg

SEQ ID NO: 232471 - DNA, 20 bp, synthetic construct
  source 1..20: mol_type = other DNA
tgcaggacgttggcagtggg

SEQ ID NO: 232472 - DNA, 20 bp, synthetic construct
  source 1..20: mol_type = other DNA
gtgcaggacgttggcagtgg

SEQ ID NO: 232473 - DNA, 20 bp, synthetic construct
  source 1..20: mol_type = other DNA
ggtgcaggacgttggcagtg

SEQ ID NO: 232474 - DNA, 20 bp, synthetic construct
  source 1..20: mol_type = other DNA
tggtgcaggacgttggcagt

SEQ ID NO: 232475 - DNA, 20 bp, synthetic construct
  source 1..20: mol_type = other DNA
ctggtgcaggacgttggcag

SEQ ID NO: 232476 - DNA, 20 bp, synthetic construct
  source 1..20: mol_type = other DNA
tctggtgcaggacgttggca

SEQ ID NO: 232477 - DNA, 20 bp, synthetic construct
  source 1..20: mol_type = other DNA
ctctggtgcaggacgttggc

SEQ ID NO: 232478 - DNA, 20 bp, synthetic construct
  source 1..20: mol_type = other DNA
actctggtgcaggacgttgg

SEQ ID NO: 232479 - DNA, 20 bp, synthetic construct
  source 1..20: mol_type = other DNA
cactctggtgcaggacgttg

SEQ ID NO: 232480 - DNA, 20 bp, synthetic construct
  source 1..20: mol_type = other DNA
ccactctggtgcaggacgtt

SEQ ID NO: 232481 - DNA, 20 bp, synthetic construct
  source 1..20: mol_type = other DNA
accactctggtgcaggacgt

SEQ ID NO: 232482 - DNA, 20 bp, synthetic construct
  source 1..20: mol_type = other DNA
taccactctggtgcaggacg

SEQ ID NO: 232483 - DNA, 20 bp, synthetic construct
  source 1..20: mol_type = other DNA
gtaccactctggtgcaggac

SEQ ID NO: 232484 - DNA, 20 bp, synthetic construct
  source 1..20: mol_type = other DNA
tgtaccactctggtgcagga

SEQ ID NO: 232485 - DNA, 20 bp, synthetic construct
  source 1..20: mol_type = other DNA
gtgtaccactctggtgcagg

SEQ ID NO: 232486 - DNA, 20 bp, synthetic construct
  source 1..20: mol_type = other DNA
agtgtaccactctggtgcag

SEQ ID NO: 232487 - DNA, 20 bp, synthetic construct
  source 1..20: mol_type = other DNA
aagtgtaccactctggtgca

SEQ ID NO: 232488 - DNA, 20 bp, synthetic construct
  source 1..20: mol_type = other DNA
caagtgtaccactctggtgc

SEQ ID NO: 232489 - DNA, 20 bp, synthetic construct
  source 1..20: mol_type = other DNA
acaagtgtaccactctggtg

SEQ ID NO: 232490 - DNA, 20 bp, synthetic construct
  source 1..20: mol_type = other DNA
aacaagtgtaccactctggt

SEQ ID NO: 232491 - DNA, 20 bp, synthetic construct
  source 1..20: mol_type = other DNA
taacaagtgtaccactctgg

SEQ ID NO: 232492 - DNA, 20 bp, synthetic construct
  source 1..20: mol_type = other DNA
gtaacaagtgtaccactctg

SEQ ID NO: 232493 - DNA, 20 bp, synthetic construct
  source 1..20: mol_type = other DNA
tgtaacaagtgtaccactct

SEQ ID NO: 232494 - DNA, 20 bp, synthetic construct
  source 1..20: mol_type = other DNA
ttgtaacaagtgtaccactc

SEQ ID NO: 232495 - DNA, 20 bp, synthetic construct
  source 1..20: mol_type = other DNA
gttgtaacaagtgtaccact

SEQ ID NO: 232496 - DNA, 20 bp, synthetic construct
  source 1..20: mol_type = other DNA
ggttgtaacaagtgtaccac

SEQ ID NO: 232497 - DNA, 20 bp, synthetic construct
  source 1..20: mol_type = other DNA
tggttgtaacaagtgtacca

SEQ ID NO: 232498 - DNA, 20 bp, synthetic construct
  source 1..20: mol_type = other DNA
ttggttgtaacaagtgtacc

SEQ ID NO: 232499 - DNA, 20 bp, synthetic construct
  source 1..20: mol_type = other DNA
attggttgtaacaagtgtac

SEQ ID NO: 232500 - DNA, 20 bp, synthetic construct
  source 1..20: mol_type = other DNA
cattggttgtaacaagtgta

SEQ ID NO: 232501 - DNA, 20 bp, synthetic construct
  source 1..20: mol_type = other DNA
tcattggttgtaacaagtgt

SEQ ID NO: 232502 - DNA, 20 bp, synthetic construct
  source 1..20: mol_type = other DNA
ttcattggttgtaacaagtg

SEQ ID NO: 232503 - DNA, 20 bp, synthetic construct
  source 1..20: mol_type = other DNA
attcattggttgtaacaagt

SEQ ID NO: 232504 - DNA, 20 bp, synthetic construct
  source 1..20: mol_type = other DNA
gattcattggttgtaacaag

SEQ ID NO: 232505 - DNA, 20 bp, synthetic construct
  source 1..20: mol_type = other DNA
ggattcattggttgtaacaa

SEQ ID NO: 232506 - DNA, 20 bp, synthetic construct
  source 1..20: mol_type = other DNA
aggattcattggttgtaaca

SEQ ID NO: 232507 - DNA, 20 bp, synthetic construct
  source 1..20: mol_type = other DNA
gaggattcattggttgtaac

SEQ ID NO: 232508 - DNA, 20 bp, synthetic construct
  source 1..20: mol_type = other DNA
tgaggattcattggttgtaa

SEQ ID NO: 232509 - DNA, 20 bp, synthetic construct
  source 1..20: mol_type = other DNA
atgaggattcattggttgta

SEQ ID NO: 232510 - DNA, 20 bp, synthetic construct
  source 1..20: mol_type = other DNA
aatgaggattcattggttgt

SEQ ID NO: 232511 - DNA, 20 bp, synthetic construct
  source 1..20: mol_type = other DNA
taatgaggattcattggttg

SEQ ID NO: 232512 - DNA, 20 bp, synthetic construct
  source 1..20: mol_type = other DNA
ttaatgaggattcattggtt

SEQ ID NO: 232513 - DNA, 20 bp, synthetic construct
  source 1..20: mol_type = other DNA
gttaatgaggattcattggt

SEQ ID NO: 232514 - DNA, 20 bp, synthetic construct
  source 1..20: mol_type = other DNA
tgttaatgaggattcattgg

SEQ ID NO: 232515 - DNA, 20 bp, synthetic construct
  source 1..20: mol_type = other DNA
atgttaatgaggattcattg

SEQ ID NO: 232516 - DNA, 20 bp, synthetic construct
  source 1..20: mol_type = other DNA
tatgttaatgaggattcatt

SEQ ID NO: 232517 - DNA, 20 bp, synthetic construct
  source 1..20: mol_type = other DNA
atatgttaatgaggattcat

SEQ ID NO: 232518 - DNA, 20 bp, synthetic construct
  source 1..20: mol_type = other DNA
gatatgttaatgaggattca

SEQ ID NO: 232519 - DNA, 20 bp, synthetic construct
  source 1..20: mol_type = other DNA
tgatatgttaatgaggattc

SEQ ID NO: 232520 - DNA, 20 bp, synthetic construct
  source 1..20: mol_type = other DNA
atgatatgttaatgaggatt

SEQ ID NO: 232521 - DNA, 20 bp, synthetic construct
  source 1..20: mol_type = other DNA
aatgatatgttaatgaggat

SEQ ID NO: 232522 - DNA, 20 bp, synthetic construct
  source 1..20: mol_type = other DNA
taatgatatgttaatgagga

SEQ ID NO: 232523 - DNA, 20 bp, synthetic construct
  source 1..20: mol_type = other DNA
ataatgatatgttaatgagg

SEQ ID NO: 232524 - DNA, 20 bp, synthetic construct
  source 1..20: mol_type = other DNA
gataatgatatgttaatgag

SEQ ID NO: 232525 - DNA, 20 bp, synthetic construct
  source 1..20: mol_type = other DNA
tgataatgatatgttaatga

SEQ ID NO: 232526 - DNA, 20 bp, synthetic construct
  source 1..20: mol_type = other DNA
gtgataatgatatgttaatg

SEQ ID NO: 232527 - DNA, 20 bp, synthetic construct
  source 1..20: mol_type = other DNA
ggtgataatgatatgttaat

SEQ ID NO: 232528 - DNA, 20 bp, synthetic construct
  source 1..20: mol_type = other DNA
gggtgataatgatatgttaa

SEQ ID NO: 232529 - DNA, 20 bp, synthetic construct
  source 1..20: mol_type = other DNA
tgggtgataatgatatgtta

SEQ ID NO: 232530 - DNA, 20 bp, synthetic construct
  source 1..20: mol_type = other DNA
ttgggtgataatgatatgtt

SEQ ID NO: 232531 - DNA, 20 bp, synthetic construct
  source 1..20: mol_type = other DNA
cttgggtgataatgatatgt

SEQ ID NO: 232532 - DNA, 20 bp, synthetic construct
  source 1..20: mol_type = other DNA
acttgggtgataatgatatg

SEQ ID NO: 232533 - DNA, 20 bp, synthetic construct
  source 1..20: mol_type = other DNA
aacttgggtgataatgatat

SEQ ID NO: 232534 - DNA, 20 bp, synthetic construct
  source 1..20: mol_type = other DNA
gaacttgggtgataatgata

SEQ ID NO: 232535 - DNA, 20 bp, synthetic construct
  source 1..20: mol_type = other DNA
tgaacttgggtgataatgat

SEQ ID NO: 232536 - DNA, 20 bp, synthetic construct
  source 1..20: mol_type = other DNA
atgaacttgggtgataatga

SEQ ID NO: 232537 - DNA, 20 bp, synthetic construct
  source 1..20: mol_type = other DNA
tatgaacttgggtgataatg

SEQ ID NO: 232538 - DNA, 20 bp, synthetic construct
  source 1..20: mol_type = other DNA
ctatgaacttgggtgataat

SEQ ID NO: 232539 - DNA, 20 bp, synthetic construct
  source 1..20: mol_type = other DNA
actatgaacttgggtgataa

SEQ ID NO: 232540 - DNA, 20 bp, synthetic construct
  source 1..20: mol_type = other DNA
aactatgaacttgggtgata

SEQ ID NO: 232541 - DNA, 20 bp, synthetic construct
  source 1..20: mol_type = other DNA
aaactatgaacttgggtgat

SEQ ID NO: 232542 - DNA, 20 bp, synthetic construct
  source 1..20: mol_type = other DNA
taaactatgaacttgggtga

SEQ ID NO: 232543 - DNA, 20 bp, synthetic construct
  source 1..20: mol_type = other DNA
gtaaactatgaacttgggtg

SEQ ID NO: 232544 - DNA, 20 bp, synthetic construct
  source 1..20: mol_type = other DNA
tgtaaactatgaacttgggt

SEQ ID NO: 232545 - DNA, 20 bp, synthetic construct
  source 1..20: mol_type = other DNA
atgtaaactatgaacttggg

SEQ ID NO: 232546 - DNA, 20 bp, synthetic construct
  source 1..20: mol_type = other DNA
aatgtaaactatgaacttgg

SEQ ID NO: 232547 - DNA, 20 bp, synthetic construct
  source 1..20: mol_type = other DNA
taatgtaaactatgaacttg

SEQ ID NO: 232548 - DNA, 20 bp, synthetic construct
  source 1..20: mol_type = other DNA
ctaatgtaaactatgaactt

SEQ ID NO: 232549 - DNA, 20 bp, synthetic construct
  source 1..20: mol_type = other DNA
actaatgtaaactatgaact

SEQ ID NO: 232550 - DNA, 20 bp, synthetic construct
  source 1..20: mol_type = other DNA
tactaatgtaaactatgaac

SEQ ID NO: 232551 - DNA, 20 bp, synthetic construct
  source 1..20: mol_type = other DNA
ttactaatgtaaactatgaa

SEQ ID NO: 232552 - DNA, 20 bp, synthetic construct
  source 1..20: mol_type = other DNA
tttactaatgtaaactatga

SEQ ID NO: 232553 - DNA, 20 bp, synthetic construct
  source 1..20: mol_type = other DNA
ttttactaatgtaaactatg

SEQ ID NO: 232554 - DNA, 20 bp, synthetic construct
  source 1..20: mol_type = other DNA
gttttactaatgtaaactat

SEQ ID NO: 232555 - DNA, 20 bp, synthetic construct
  source 1..20: mol_type = other DNA
tgttttactaatgtaaacta

SEQ ID NO: 232556 - DNA, 20 bp, synthetic construct
  source 1..20: mol_type = other DNA
atgttttactaatgtaaact

SEQ ID NO: 232557 - DNA, 20 bp, synthetic construct
  source 1..20: mol_type = other DNA
gatgttttactaatgtaaac

SEQ ID NO: 232558 - DNA, 20 bp, synthetic construct
  source 1..20: mol_type = other DNA
tgatgttttactaatgtaaa

SEQ ID NO: 232559 - DNA, 20 bp, synthetic construct
  source 1..20: mol_type = other DNA
atgatgttttactaatgtaa

SEQ ID NO: 232560 - DNA, 20 bp, synthetic construct
  source 1..20: mol_type = other DNA
gatgatgttttactaatgta

SEQ ID NO: 232561 - DNA, 20 bp, synthetic construct
  source 1..20: mol_type = other DNA
agatgatgttttactaatgt

SEQ ID NO: 232562 - DNA, 20 bp, synthetic construct
  source 1..20: mol_type = other DNA
aagatgatgttttactaatg

SEQ ID NO: 232563 - DNA, 20 bp, synthetic construct
  source 1..20: mol_type = other DNA
aaagatgatgttttactaat

SEQ ID NO: 232564 - DNA, 20 bp, synthetic construct
  source 1..20: mol_type = other DNA
gaaagatgatgttttactaa

SEQ ID NO: 232565 - DNA, 20 bp, synthetic construct
  source 1..20: mol_type = other DNA
tgaaagatgatgttttacta

SEQ ID NO: 232566 - DNA, 20 bp, synthetic construct
  source 1..20: mol_type = other DNA
atgaaagatgatgttttact

SEQ ID NO: 232567 - DNA, 20 bp, synthetic construct
  source 1..20: mol_type = other DNA
gatgaaagatgatgttttac

SEQ ID NO: 232568 - DNA, 20 bp, synthetic construct
  source 1..20: mol_type = other DNA
agatgaaagatgatgtttta

SEQ ID NO: 232569 - DNA, 20 bp, synthetic construct
  source 1..20: mol_type = other DNA
tagatgaaagatgatgtttt

SEQ ID NO: 232570 - DNA, 20 bp, synthetic construct
  source 1..20: mol_type = other DNA
atagatgaaagatgatgttt

SEQ ID NO: 232571 - DNA, 20 bp, synthetic construct
  source 1..20: mol_type = other DNA
tatagatgaaagatgatgtt

SEQ ID NO: 232572 - DNA, 20 bp, synthetic construct
  source 1..20: mol_type = other DNA
ttatagatgaaagatgatgt

SEQ ID NO: 232573 - DNA, 20 bp, synthetic construct
  source 1..20: mol_type = other DNA
cttatagatgaaagatgatg

SEQ ID NO: 232574 - DNA, 20 bp, synthetic construct
  source 1..20: mol_type = other DNA
gcttatagatgaaagatgat

SEQ ID NO: 232575 - DNA, 20 bp, synthetic construct
  source 1..20: mol_type = other DNA
tgcttatagatgaaagatga

SEQ ID NO: 232576 - DNA, 20 bp, synthetic construct
  source 1..20: mol_type = other DNA
gtgcttatagatgaaagatg

SEQ ID NO: 232577 - DNA, 20 bp, synthetic construct
  source 1..20: mol_type = other DNA
tgtgcttatagatgaaagat

SEQ ID NO: 232578 - DNA, 20 bp, synthetic construct
  source 1..20: mol_type = other DNA
ttgtgcttatagatgaaaga

SEQ ID NO: 232579 - DNA, 20 bp, synthetic construct
  source 1..20: mol_type = other DNA
tttgtgcttatagatgaaag

SEQ ID NO: 232580 - DNA, 20 bp, synthetic construct
  source 1..20: mol_type = other DNA
ttttgtgcttatagatgaaa

SEQ ID NO: 232581 - DNA, 20 bp, synthetic construct
  source 1..20: mol_type = other DNA
tttttgtgcttatagatgaa

SEQ ID NO: 232582 - DNA, 20 bp, synthetic construct
  source 1..20: mol_type = other DNA
atttttgtgcttatagatga

SEQ ID NO: 232583 - DNA, 20 bp, synthetic construct
  source 1..20: mol_type = other DNA
aatttttgtgcttatagatg

SEQ ID NO: 232584 - DNA, 20 bp, synthetic construct
  source 1..20: mol_type = other DNA
aaatttttgtgcttatagat

SEQ ID NO: 232585 - DNA, 20 bp, synthetic construct
  source 1..20: mol_type = other DNA
aaaatttttgtgcttataga

SEQ ID NO: 232586 - DNA, 20 bp, synthetic construct
  source 1..20: mol_type = other DNA
aaaaatttttgtgcttatag

SEQ ID NO: 232587 - DNA, 20 bp, synthetic construct
  source 1..20: mol_type = other DNA
aaaaaatttttgtgcttata

SEQ ID NO: 232588 - DNA, 20 bp, synthetic construct
  source 1..20: mol_type = other DNA
caaaaaatttttgtgcttat

SEQ ID NO: 232589 - DNA, 20 bp, synthetic construct
  source 1..20: mol_type = other DNA
ccaaaaaatttttgtgctta

SEQ ID NO: 232590 - DNA, 20 bp, synthetic construct
  source 1..20: mol_type = other DNA
gccaaaaaatttttgtgctt

SEQ ID NO: 232591 - DNA, 20 bp, synthetic construct
  source 1..20: mol_type = other DNA
tgccaaaaaatttttgtgct

SEQ ID NO: 232592 - DNA, 20 bp, synthetic construct
  source 1..20: mol_type = other DNA
atgccaaaaaatttttgtgc

SEQ ID NO: 232593 - DNA, 20 bp, synthetic construct
  source 1..20: mol_type = other DNA
aatgccaaaaaatttttgtg

SEQ ID NO: 232594 - DNA, 20 bp, synthetic construct
  source 1..20: mol_type = other DNA
aaatgccaaaaaatttttgt

SEQ ID NO: 232595 - DNA, 20 bp, synthetic construct
  source 1..20: mol_type = other DNA
taaatgccaaaaaatttttg

SEQ ID NO: 232596 - DNA, 20 bp, synthetic construct
  source 1..20: mol_type = other DNA
ataaatgccaaaaaattttt

SEQ ID NO: 232597 - DNA, 20 bp, synthetic construct
  source 1..20: mol_type = other DNA
aataaatgccaaaaaatttt

SEQ ID NO: 232598 - DNA, 20 bp, synthetic construct
  source 1..20: mol_type = other DNA
aaataaatgccaaaaaattt

SEQ ID NO: 232599 - DNA, 20 bp, synthetic construct
  source 1..20: mol_type = other DNA
taaataaatgccaaaaaatt

SEQ ID NO: 232600 - DNA, 20 bp, synthetic construct
  source 1..20: mol_type = other DNA
ctaaataaatgccaaaaaat

SEQ ID NO: 232601 - DNA, 20 bp, synthetic construct
  source 1..20: mol_type = other DNA
cctaaataaatgccaaaaaa

SEQ ID NO: 232602 - DNA, 20 bp, synthetic construct
  source 1..20: mol_type = other DNA
acctaaataaatgccaaaaa

SEQ ID NO: 232603 - DNA, 20 bp, synthetic construct
  source 1..20: mol_type = other DNA
cacctaaataaatgccaaaa

SEQ ID NO: 232604 - DNA, 20 bp, synthetic construct
  source 1..20: mol_type = other DNA
acacctaaataaatgccaaa

SEQ ID NO: 232605 - DNA, 20 bp, synthetic construct
  source 1..20: mol_type = other DNA
tacacctaaataaatgccaa

SEQ ID NO: 232606 - DNA, 20 bp, synthetic construct
  source 1..20: mol_type = other DNA
atacacctaaataaatgcca

SEQ ID NO: 232607 - DNA, 20 bp, synthetic construct
  source 1..20: mol_type = other DNA
catacacctaaataaatgcc

SEQ ID NO: 232608 - DNA, 20 bp, synthetic construct
  source 1..20: mol_type = other DNA
tcatacacctaaataaatgc

SEQ ID NO: 232609 - DNA, 20 bp, synthetic construct
  source 1..20: mol_type = other DNA
atcatacacctaaataaatg

SEQ ID NO: 232610 - DNA, 20 bp, synthetic construct
  source 1..20: mol_type = other DNA
aatcatacacctaaataaat

SEQ ID NO: 232611 - DNA, 20 bp, synthetic construct
  source 1..20: mol_type = other DNA
taatcatacacctaaataaa

SEQ ID NO: 232612 - DNA, 20 bp, synthetic construct
  source 1..20: mol_type = other DNA
ttaatcatacacctaaataa

SEQ ID NO: 232613 - DNA, 20 bp, synthetic construct
  source 1..20: mol_type = other DNA
gttaatcatacacctaaata

SEQ ID NO: 232614 - DNA, 20 bp, synthetic construct
  source 1..20: mol_type = other DNA
agttaatcatacacctaaat

SEQ ID NO: 232615 - DNA, 20 bp, synthetic construct
  source 1..20: mol_type = other DNA
gagttaatcatacacctaaa

SEQ ID NO: 232616 - DNA, 20 bp, synthetic construct
  source 1..20: mol_type = other DNA
tgagttaatcatacacctaa

SEQ ID NO: 232617 - DNA, 20 bp, synthetic construct
  source 1..20: mol_type = other DNA
ctgagttaatcatacaccta

SEQ ID NO: 232618 - DNA, 20 bp, synthetic construct
  source 1..20: mol_type = other DNA
actgagttaatcatacacct

SEQ ID NO: 232619 - DNA, 20 bp, synthetic construct
  source 1..20: mol_type = other DNA
cactgagttaatcatacacc

SEQ ID NO: 232620 - DNA, 20 bp, synthetic construct
  source 1..20: mol_type = other DNA
acactgagttaatcatacac

SEQ ID NO: 232621 - DNA, 20 bp, synthetic construct
  source 1..20: mol_type = other DNA
aacactgagttaatcataca

SEQ ID NO: 232622 - DNA, 20 bp, synthetic construct
  source 1..20: mol_type = other DNA
caacactgagttaatcatac

SEQ ID NO: 232623 - DNA, 20 bp, synthetic construct
  source 1..20: mol_type = other DNA
tcaacactgagttaatcata

SEQ ID NO: 232624 - DNA, 20 bp, synthetic construct
  source 1..20: mol_type = other DNA
gtcaacactgagttaatcat

SEQ ID NO: 232625 - DNA, 20 bp, synthetic construct
  source 1..20: mol_type = other DNA
tgtcaacactgagttaatca

SEQ ID NO: 232626 - DNA, 20 bp, synthetic construct
  source 1..20: mol_type = other DNA
ttgtcaacactgagttaatc

SEQ ID NO: 232627 - DNA, 20 bp, synthetic construct
  source 1..20: mol_type = other DNA
cttgtcaacactgagttaat

SEQ ID NO: 232628 - DNA, 20 bp, synthetic construct
  source 1..20: mol_type = other DNA
tcttgtcaacactgagttaa

SEQ ID NO: 232629 - DNA, 20 bp, synthetic construct
  source 1..20: mol_type = other DNA
gtcttgtcaacactgagtta

SEQ ID NO: 232630 - DNA, 20 bp, synthetic construct
  source 1..20: mol_type = other DNA
agtcttgtcaacactgagtt

SEQ ID NO: 232631 - DNA, 20 bp, synthetic construct
  source 1..20: mol_type = other DNA
gagtcttgtcaacactgagt

SEQ ID NO: 232632 - DNA, 20 bp, synthetic construct
  source 1..20: mol_type = other DNA
tgagtcttgtcaacactgag

SEQ ID NO: 232633 - DNA, 20 bp, synthetic construct
  source 1..20: mol_type = other DNA
gtgagtcttgtcaacactga

SEQ ID NO: 232634 - DNA, 20 bp, synthetic construct
  source 1..20: mol_type = other DNA
tgtgagtcttgtcaacactg

SEQ ID NO: 232635 - DNA, 20 bp, synthetic construct
  source 1..20: mol_type = other DNA
gtgtgagtcttgtcaacact

SEQ ID NO: 232636 - DNA, 20 bp, synthetic construct
  source 1..20: mol_type = other DNA
agtgtgagtcttgtcaacac

SEQ ID NO: 232637 - DNA, 20 bp, synthetic construct
  source 1..20: mol_type = other DNA
aagtgtgagtcttgtcaaca

SEQ ID NO: 232638 - DNA, 20 bp, synthetic construct
  source 1..20: mol_type = other DNA
gaagtgtgagtcttgtcaac

SEQ ID NO: 232639 - DNA, 20 bp, synthetic construct
  source 1..20: mol_type = other DNA
tgaagtgtgagtcttgtcaa

SEQ ID NO: 232640 - DNA, 20 bp, synthetic construct
  source 1..20: mol_type = other DNA
atgaagtgtgagtcttgtca

SEQ ID NO: 232641 - DNA, 20 bp, synthetic construct
  source 1..20: mol_type = other DNA
tatgaagtgtgagtcttgtc

SEQ ID NO: 232642 - DNA, 20 bp, synthetic construct
  source 1..20: mol_type = other DNA
gtatgaagtgtgagtcttgt

SEQ ID NO: 232643 - DNA, 20 bp, synthetic construct
  source 1..20: mol_type = other DNA
ggtatgaagtgtgagtcttg

SEQ ID NO: 232644 - DNA, 20 bp, synthetic construct
  source 1..20: mol_type = other DNA
gggtatgaagtgtgagtctt

SEQ ID NO: 232645 - DNA, 20 bp, synthetic construct
  source 1..20: mol_type = other DNA
tgggtatgaagtgtgagtct

SEQ ID NO: 232646 - DNA, 20 bp, synthetic construct
  source 1..20: mol_type = other DNA
gtgggtatgaagtgtgagtc

SEQ ID NO: 232647 - DNA, 20 bp, synthetic construct
  source 1..20: mol_type = other DNA
agtgggtatgaagtgtgagt

SEQ ID NO: 232648 - DNA, 20 bp, synthetic construct
  source 1..20: mol_type = other DNA
aagtgggtatgaagtgtgag

SEQ ID NO: 232649 - DNA, 20 bp, synthetic construct
  source 1..20: mol_type = other DNA
caagtgggtatgaagtgtga

SEQ ID NO: 232650 - DNA, 20 bp, synthetic construct
  source 1..20: mol_type = other DNA
gcaagtgggtatgaagtgtg

SEQ ID NO: 232651 - DNA, 20 bp, synthetic construct
  source 1..20: mol_type = other DNA
tgcaagtgggtatgaagtgt

SEQ ID NO: 232652 - DNA, 20 bp, synthetic construct
  source 1..20: mol_type = other DNA
gtgcaagtgggtatgaagtg

SEQ ID NO: 232653 - DNA, 20 bp, synthetic construct
  source 1..20: mol_type = other DNA
agtgcaagtgggtatgaagt

SEQ ID NO: 232654 - DNA, 20 bp, synthetic construct
  source 1..20: mol_type = other DNA
cagtgcaagtgggtatgaag

SEQ ID NO: 232655 - DNA, 20 bp, synthetic construct
  source 1..20: mol_type = other DNA
gcagtgcaagtgggtatgaa

SEQ ID NO: 232656 - DNA, 20 bp, synthetic construct
  source 1..20: mol_type = other DNA
tgcagtgcaagtgggtatga

SEQ ID NO: 232657 - DNA, 20 bp, synthetic construct
  source 1..20: mol_type = other DNA
atgcagtgcaagtgggtatg

SEQ ID NO: 232658 - DNA, 20 bp, synthetic construct
  source 1..20: mol_type = other DNA
gatgcagtgcaagtgggtat

SEQ ID NO: 232659 - DNA, 20 bp, synthetic construct
  source 1..20: mol_type = other DNA
agatgcagtgcaagtgggta

SEQ ID NO: 232660 - DNA, 20 bp, synthetic construct
  source 1..20: mol_type = other DNA
cagatgcagtgcaagtgggt

SEQ ID NO: 232661 - DNA, 20 bp, synthetic construct
  source 1..20: mol_type = other DNA
tcagatgcagtgcaagtggg

SEQ ID NO: 232662 - DNA, 20 bp, synthetic construct
  source 1..20: mol_type = other DNA
ctcagatgcagtgcaagtgg

SEQ ID NO: 232663 - DNA, 20 bp, synthetic construct
  source 1..20: mol_type = other DNA
tctcagatgcagtgcaagtg

SEQ ID NO: 232664 - DNA, 20 bp, synthetic construct
  source 1..20: mol_type = other DNA
ttctcagatgcagtgcaagt

SEQ ID NO: 232665 - DNA, 20 bp, synthetic construct
  source 1..20: mol_type = other DNA
cttctcagatgcagtgcaag

SEQ ID NO: 232666 - DNA, 20 bp, synthetic construct
  source 1..20: mol_type = other DNA
gcttctcagatgcagtgcaa

SEQ ID NO: 232667 - DNA, 20 bp, synthetic construct
  source 1..20: mol_type = other DNA
tgcttctcagatgcagtgca

SEQ ID NO: 232668 - DNA, 20 bp, synthetic construct
  source 1..20: mol_type = other DNA
ttgcttctcagatgcagtgc

SEQ ID NO: 232669 - DNA, 20 bp, synthetic construct
  source 1..20: mol_type = other DNA
attgcttctcagatgcagtg

SEQ ID NO: 232670 - DNA, 20 bp, synthetic construct
  source 1..20: mol_type = other DNA
aattgcttctcagatgcagt

SEQ ID NO: 232671 - DNA, 20 bp, synthetic construct
  source 1..20: mol_type = other DNA
caattgcttctcagatgcag

SEQ ID NO: 232672 - DNA, 20 bp, synthetic construct
  source 1..20: mol_type = other DNA
ccaattgcttctcagatgca

SEQ ID NO: 232673 - DNA, 20 bp, synthetic construct
  source 1..20: mol_type = other DNA
accaattgcttctcagatgc

SEQ ID NO: 232674 - DNA, 20 bp, synthetic construct
  source 1..20: mol_type = other DNA
caccaattgcttctcagatg

SEQ ID NO: 232675 - DNA, 20 bp, synthetic construct
  source 1..20: mol_type = other DNA
acaccaattgcttctcagat

SEQ ID NO: 232676 - DNA, 20 bp, synthetic construct
  source 1..20: mol_type = other DNA
gacaccaattgcttctcaga

SEQ ID NO: 232677 - DNA, 20 bp, synthetic construct
  source 1..20: mol_type = other DNA
agacaccaattgcttctcag

SEQ ID NO: 232678 - DNA, 20 bp, synthetic construct
  source 1..20: mol_type = other DNA
tagacaccaattgcttctca

SEQ ID NO: 232679 - DNA, 20 bp, synthetic construct
  source 1..20: mol_type = other DNA
gtagacaccaattgcttctc

SEQ ID NO: 232680 - DNA, 20 bp, synthetic construct
  source 1..20: mol_type = other DNA
tgtagacaccaattgcttct

SEQ ID NO: 232681 - DNA, 20 bp, synthetic construct
  source 1..20: mol_type = other DNA
ctgtagacaccaattgcttc

SEQ ID NO: 232682 - DNA, 20 bp, synthetic construct
  source 1..20: mol_type = other DNA
gctgtagacaccaattgctt

SEQ ID NO: 232683 - DNA, 20 bp, synthetic construct
  source 1..20: mol_type = other DNA
ggctgtagacaccaattgct

SEQ ID NO: 232684 - DNA, 20 bp, synthetic construct
  source 1..20: mol_type = other DNA
cggctgtagacaccaattgc

SEQ ID NO: 232685 - DNA, 20 bp, synthetic construct
  source 1..20: mol_type = other DNA
gcggctgtagacaccaattg

SEQ ID NO: 232686 - DNA, 20 bp, synthetic construct
  source 1..20: mol_type = other DNA
agcggctgtagacaccaatt

SEQ ID NO: 232687 - DNA, 20 bp, synthetic construct
  source 1..20: mol_type = other DNA
tagcggctgtagacaccaat

SEQ ID NO: 232688 - DNA, 20 bp, synthetic construct
  source 1..20: mol_type = other DNA
gtagcggctgtagacaccaa

SEQ ID NO: 232689 - DNA, 20 bp, synthetic construct
  source 1..20: mol_type = other DNA
tgtagcggctgtagacacca

SEQ ID NO: 232690 - DNA, 20 bp, synthetic construct
  source 1..20: mol_type = other DNA
gtgtagcggctgtagacacc

SEQ ID NO: 232691 - DNA, 20 bp, synthetic construct
  source 1..20: mol_type = other DNA
ggtgtagcggctgtagacac

SEQ ID NO: 232692 - DNA, 20 bp, synthetic construct
  source 1..20: mol_type = other DNA
gggtgtagcggctgtagaca

SEQ ID NO: 232693 - DNA, 20 bp, synthetic construct
  source 1..20: mol_type = other DNA
agggtgtagcggctgtagac

SEQ ID NO: 232694 - DNA, 20 bp, synthetic construct
  source 1..20: mol_type = other DNA
gagggtgtagcggctgtaga

SEQ ID NO: 232695 - DNA, 20 bp, synthetic construct
  source 1..20: mol_type = other DNA
tgagggtgtagcggctgtag

SEQ ID NO: 232696 - DNA, 20 bp, synthetic construct
  source 1..20: mol_type = other DNA
ttgagggtgtagcggctgta

SEQ ID NO: 232697 - DNA, 20 bp, synthetic construct
  source 1..20: mol_type = other DNA
gttgagggtgtagcggctgt

SEQ ID NO: 232698 - DNA, 20 bp, synthetic construct
  source 1..20: mol_type = other DNA
tgttgagggtgtagcggctg

SEQ ID NO: 232699 - DNA, 20 bp, synthetic construct
  source 1..20: mol_type = other DNA
ttgttgagggtgtagcggct

SEQ ID NO: 232700 - DNA, 20 bp, synthetic construct
  source 1..20: mol_type = other DNA
cttgttgagggtgtagcggc

SEQ ID NO: 232701 - DNA, 20 bp, synthetic construct
  source 1..20: mol_type = other DNA
gcttgttgagggtgtagcgg

SEQ ID NO: 232702 - DNA, 20 bp, synthetic construct
  source 1..20: mol_type = other DNA
ggcttgttgagggtgtagcg

SEQ ID NO: 232703 - DNA, 20 bp, synthetic construct
  source 1..20: mol_type = other DNA
gggcttgttgagggtgtagc

SEQ ID NO: 232704 - DNA, 20 bp, synthetic construct
  source 1..20: mol_type = other DNA
cgggcttgttgagggtgtag

SEQ ID NO: 232705 - DNA, 20 bp, synthetic construct
  source 1..20: mol_type = other DNA
tcgggcttgttgagggtgta

SEQ ID NO: 232706 - DNA, 20 bp, synthetic construct
  source 1..20: mol_type = other DNA
atcgggcttgttgagggtgt

SEQ ID NO: 232707 - DNA, 20 bp, synthetic construct
  source 1..20: mol_type = other DNA
gatcgggcttgttgagggtg

SEQ ID NO: 232708 - DNA, 20 bp, synthetic construct
  source 1..20: mol_type = other DNA
agatcgggcttgttgagggt

SEQ ID NO: 232709 - DNA, 20 bp, synthetic construct
  source 1..20: mol_type = other DNA
aagatcgggcttgttgaggg

SEQ ID NO: 232710 - DNA, 20 bp, synthetic construct
  source 1..20: mol_type = other DNA
caagatcgggcttgttgagg

SEQ ID NO: 232711 - DNA, 20 bp, synthetic construct
  source 1..20: mol_type = other DNA
acaagatcgggcttgttgag

SEQ ID NO: 232712 - DNA, 20 bp, synthetic construct
  source 1..20: mol_type = other DNA
aacaagatcgggcttgttga

SEQ ID NO: 232713 - DNA, 20 bp, synthetic construct
  source 1..20: mol_type = other DNA
aaacaagatcgggcttgttg

SEQ ID NO: 232714 - DNA, 20 bp, synthetic construct
  source 1..20: mol_type = other DNA
caaacaagatcgggcttgtt

SEQ ID NO: 232715 - DNA, 20 bp, synthetic construct
  source 1..20: mol_type = other DNA
tcaaacaagatcgggcttgt

SEQ ID NO: 232716 - DNA, 20 bp, synthetic construct
  source 1..20: mol_type = other DNA
ttcaaacaagatcgggcttg

SEQ ID NO: 232717 - DNA, 20 bp, synthetic construct
  source 1..20: mol_type = other DNA
tttcaaacaagatcgggctt

SEQ ID NO: 232718 - DNA, 20 bp, synthetic construct
  source 1..20: mol_type = other DNA
ttttcaaacaagatcgggct

SEQ ID NO: 232719 - DNA, 20 bp, synthetic construct
  source 1..20: mol_type = other DNA
cttttcaaacaagatcgggc

SEQ ID NO: 232720 - DNA, 20 bp, synthetic construct
  source 1..20: mol_type = other DNA
gcttttcaaacaagatcggg

SEQ ID NO: 232721 - DNA, 20 bp, synthetic construct
  source 1..20: mol_type = other DNA
tgcttttcaaacaagatcgg

SEQ ID NO: 232722 - DNA, 20 bp, synthetic construct
  source 1..20: mol_type = other DNA
ttgcttttcaaacaagatcg

SEQ ID NO: 232723 - DNA, 20 bp, synthetic construct
  source 1..20: mol_type = other DNA
attgcttttcaaacaagatc

SEQ ID NO: 232724 - DNA, 20 bp, synthetic construct
  source 1..20: mol_type = other DNA
aattgcttttcaaacaagat

SEQ ID NO: 232725 - DNA, 20 bp, synthetic construct
  source 1..20: mol_type = other DNA
caattgcttttcaaacaaga

SEQ ID NO: 232726 - DNA, 20 bp, synthetic construct
  source 1..20: mol_type = other DNA
ccaattgcttttcaaacaag

SEQ ID NO: 232727 - DNA, 20 bp, synthetic construct
  source 1..20: mol_type = other DNA
accaattgcttttcaaacaa

SEQ ID NO: 232728 - DNA, 20 bp, synthetic construct
  source 1..20: mol_type = other DNA
caccaattgcttttcaaaca

SEQ ID NO: 232729 - DNA, 20 bp, synthetic construct
  source 1..20: mol_type = other DNA
tcaccaattgcttttcaaac

SEQ ID NO: 232730 - DNA, 20 bp, synthetic construct
  source 1..20: mol_type = other DNA
atcaccaattgcttttcaaa

SEQ ID NO: 232731 - DNA, 20 bp, synthetic construct
  source 1..20: mol_type = other DNA
catcaccaattgcttttcaa

SEQ ID NO: 232732 - DNA, 20 bp, synthetic construct
  source 1..20: mol_type = other DNA
gcatcaccaattgcttttca

SEQ ID NO: 232733 - DNA, 20 bp, synthetic construct
  source 1..20: mol_type = other DNA
agcatcaccaattgcttttc

SEQ ID NO: 232734 - DNA, 20 bp, synthetic construct
  source 1..20: mol_type = other DNA
aagcatcaccaattgctttt

SEQ ID NO: 232735 - DNA, 20 bp, synthetic construct
  source 1..20: mol_type = other DNA
gaagcatcaccaattgcttt

SEQ ID NO: 232736 - DNA, 20 bp, synthetic construct
  source 1..20: mol_type = other DNA
agaagcatcaccaattgctt

SEQ ID NO: 232737 - DNA, 20 bp, synthetic construct
  source 1..20: mol_type = other DNA
gagaagcatcaccaattgct

SEQ ID NO: 232738 - DNA, 20 bp, synthetic construct
  source 1..20: mol_type = other DNA
tgagaagcatcaccaattgc

SEQ ID NO: 232739 - DNA, 20 bp, synthetic construct
  source 1..20: mol_type = other DNA
ttgagaagcatcaccaattg

SEQ ID NO: 232740 - DNA, 20 bp, synthetic construct
  source 1..20: mol_type = other DNA
tttgagaagcatcaccaatt

SEQ ID NO: 232741 - DNA, 20 bp, synthetic construct
  source 1..20: mol_type = other DNA
ttttgagaagcatcaccaat

SEQ ID NO: 232742 - DNA, 20 bp, synthetic construct
  source 1..20: mol_type = other DNA
attttgagaagcatcaccaa

SEQ ID NO: 232743 - DNA, 20 bp, synthetic construct
  source 1..20: mol_type = other DNA
aattttgagaagcatcacca

SEQ ID NO: 232744 - DNA, 20 bp, synthetic construct
  source 1..20: mol_type = other DNA
gaattttgagaagcatcacc

SEQ ID NO: 232745 - DNA, 20 bp, synthetic construct
  source 1..20: mol_type = other DNA
agaattttgagaagcatcac

SEQ ID NO: 232746 - DNA, 20 bp, synthetic construct
  source 1..20: mol_type = other DNA
tagaattttgagaagcatca

SEQ ID NO: 232747 - DNA, 20 bp, synthetic construct
  source 1..20: mol_type = other DNA
atagaattttgagaagcatc

SEQ ID NO: 232748 - DNA, 20 bp, synthetic construct
  source 1..20: mol_type = other DNA
catagaattttgagaagcat

SEQ ID NO: 232749 - DNA, 20 bp, synthetic construct
  source 1..20: mol_type = other DNA
ccatagaattttgagaagca

SEQ ID NO: 232750 - DNA, 20 bp, synthetic construct
  source 1..20: mol_type = other DNA
tccatagaattttgagaagc

SEQ ID NO: 232751 - DNA, 20 bp, synthetic construct
  source 1..20: mol_type = other DNA
gtccatagaattttgagaag

SEQ ID NO: 232752 - DNA, 20 bp, synthetic construct
  source 1..20: mol_type = other DNA
tgtccatagaattttgagaa

SEQ ID NO: 232753 - DNA, 20 bp, synthetic construct
  source 1..20: mol_type = other DNA
ttgtccatagaattttgaga

SEQ ID NO: 232754 - DNA, 20 bp, synthetic construct
  source 1..20: mol_type = other DNA
tttgtccatagaattttgag

SEQ ID NO: 232755 - DNA, 20 bp, synthetic construct
  source 1..20: mol_type = other DNA
ctttgtccatagaattttga

SEQ ID NO: 232756 - DNA, 20 bp, synthetic construct
  source 1..20: mol_type = other DNA
actttgtccatagaattttg

SEQ ID NO: 232757 - DNA, 20 bp, synthetic construct
  source 1..20: mol_type = other DNA
gactttgtccatagaatttt

SEQ ID NO: 232758 - DNA, 20 bp, synthetic construct
  source 1..20: mol_type = other DNA
tgactttgtccatagaattt

SEQ ID NO: 232759 - DNA, 20 bp, synthetic construct
  source 1..20: mol_type = other DNA
ctgactttgtccatagaatt

SEQ ID NO: 232760 - DNA, 20 bp, synthetic construct
  source 1..20: mol_type = other DNA
gctgactttgtccatagaat

SEQ ID NO: 232761 - DNA, 20 bp, synthetic construct
  source 1..20: mol_type = other DNA
ggctgactttgtccatagaa

SEQ ID NO: 232762 - DNA, 20 bp, synthetic construct
  source 1..20: mol_type = other DNA
cggctgactttgtccataga

SEQ ID NO: 232763 - DNA, 20 bp, synthetic construct
  source 1..20: mol_type = other DNA
ccggctgactttgtccatag

SEQ ID NO: 232764 - DNA, 20 bp, synthetic construct
  source 1..20: mol_type = other DNA
cccggctgactttgtccata

SEQ ID NO: 232765 - DNA, 20 bp, synthetic construct
  source 1..20: mol_type = other DNA
gcccggctgactttgtccat

SEQ ID NO: 232766 - DNA, 20 bp, synthetic construct
  source 1..20: mol_type = other DNA
tgcccggctgactttgtcca

SEQ ID NO: 232767 - DNA, 20 bp, synthetic construct
  source 1..20: mol_type = other DNA
atgcccggctgactttgtcc

SEQ ID NO: 232768 - DNA, 20 bp, synthetic construct
  source 1..20: mol_type = other DNA
catgcccggctgactttgtc

SEQ ID NO: 232769 - DNA, 20 bp, synthetic construct
  source 1..20: mol_type = other DNA
ccatgcccggctgactttgt

SEQ ID NO: 232770 - DNA, 20 bp, synthetic construct
  source 1..20: mol_type = other DNA
accatgcccggctgactttg

SEQ ID NO: 232771 - DNA, 20 bp, synthetic construct
  source 1..20: mol_type = other DNA
caccatgcccggctgacttt

SEQ ID NO: 232772 - DNA, 20 bp, synthetic construct
  source 1..20: mol_type = other DNA
ccaccatgcccggctgactt

SEQ ID NO: 232773 - DNA, 20 bp, synthetic construct
  source 1..20: mol_type = other DNA
gccaccatgcccggctgact

SEQ ID NO: 232774 - DNA, 20 bp, synthetic construct
  source 1..20: mol_type = other DNA
agccaccatgcccggctgac

SEQ ID NO: 232775 - DNA, 20 bp, synthetic construct
  source 1..20: mol_type = other DNA
gagccaccatgcccggctga

SEQ ID NO: 232776 - DNA, 20 bp, synthetic construct
  source 1..20: mol_type = other DNA
tgagccaccatgcccggctg

SEQ ID NO: 232777 - DNA, 20 bp, synthetic construct
  source 1..20: mol_type = other DNA
atgagccaccatgcccggct

SEQ ID NO: 232778 - DNA, 20 bp, synthetic construct
  source 1..20: mol_type = other DNA
catgagccaccatgcccggc

SEQ ID NO: 232779 - DNA, 20 bp, synthetic construct
  source 1..20: mol_type = other DNA
gcatgagccaccatgcccgg

SEQ ID NO: 232780 - DNA, 20 bp, synthetic construct
  source 1..20: mol_type = other DNA
ggcatgagccaccatgcccg

SEQ ID NO: 232781 - DNA, 20 bp, synthetic construct
  source 1..20: mol_type = other DNA
aggcatgagccaccatgccc

SEQ ID NO: 232782 - DNA, 20 bp, synthetic construct
  source 1..20: mol_type = other DNA
caggcatgagccaccatgcc

SEQ ID NO: 232783 - DNA, 20 bp, synthetic construct
  source 1..20: mol_type = other DNA
acaggcatgagccaccatgc

SEQ ID NO: 232784 - DNA, 20 bp, synthetic construct
  source 1..20: mol_type = other DNA
tacaggcatgagccaccatg

SEQ ID NO: 232785 - DNA, 20 bp, synthetic construct
  source 1..20: mol_type = other DNA
ttacaggcatgagccaccat

SEQ ID NO: 232786 - DNA, 20 bp, synthetic construct
  source 1..20: mol_type = other DNA
attacaggcatgagccacca

SEQ ID NO: 232787 - DNA, 20 bp, synthetic construct
  source 1..20: mol_type = other DNA
gattacaggcatgagccacc

SEQ ID NO: 232788 - DNA, 20 bp, synthetic construct
  source 1..20: mol_type = other DNA
ggattacaggcatgagccac

SEQ ID NO: 232789 - DNA, 20 bp, synthetic construct
  source 1..20: mol_type = other DNA
gggattacaggcatgagcca

SEQ ID NO: 232790 - DNA, 20 bp, synthetic construct
  source 1..20: mol_type = other DNA
agggattacaggcatgagcc

SEQ ID NO: 232791 - DNA, 20 bp, synthetic construct
  source 1..20: mol_type = other DNA
tagggattacaggcatgagc

SEQ ID NO: 232792 - DNA, 20 bp, synthetic construct
  source 1..20: mol_type = other DNA
ttagggattacaggcatgag

SEQ ID NO: 232793 - DNA, 20 bp, synthetic construct
  source 1..20: mol_type = other DNA
tttagggattacaggcatga

SEQ ID NO: 232794 - DNA, 20 bp, synthetic construct
  source 1..20: mol_type = other DNA
gtttagggattacaggcatg

SEQ ID NO: 232795 - DNA, 20 bp, synthetic construct
  source 1..20: mol_type = other DNA
agtttagggattacaggcat

SEQ ID NO: 232796 - DNA, 20 bp, synthetic construct
  source 1..20: mol_type = other DNA
aagtttagggattacaggca

SEQ ID NO: 232797 - DNA, 20 bp, synthetic construct
  source 1..20: mol_type = other DNA
aaagtttagggattacaggc

SEQ ID NO: 232798 - DNA, 20 bp, synthetic construct
  source 1..20: mol_type = other DNA
caaagtttagggattacagg

SEQ ID NO: 232799 - DNA, 20 bp, synthetic construct
  source 1..20: mol_type = other DNA
ccaaagtttagggattacag

SEQ ID NO: 232800 - DNA, 20 bp, synthetic construct
  source 1..20: mol_type = other DNA
cccaaagtttagggattaca

SEQ ID NO: 232801 - DNA, 20 bp, synthetic construct
  source 1..20: mol_type = other DNA
tcccaaagtttagggattac

SEQ ID NO: 232802 - DNA, 20 bp, synthetic construct
  source 1..20: mol_type = other DNA
ctcccaaagtttagggatta

SEQ ID NO: 232803 - DNA, 20 bp, synthetic construct
  source 1..20: mol_type = other DNA
cctcccaaagtttagggatt

SEQ ID NO: 232804 - DNA, 20 bp, synthetic construct
  source 1..20: mol_type = other DNA
gcctcccaaagtttagggat

SEQ ID NO: 232805 - DNA, 20 bp, synthetic construct
  source 1..20: mol_type = other DNA
ggcctcccaaagtttaggga

SEQ ID NO: 232806 - DNA, 20 bp, synthetic construct
  source 1..20: mol_type = other DNA
cggcctcccaaagtttaggg

SEQ ID NO: 232807 - DNA, 20 bp, synthetic construct
  source 1..20: mol_type = other DNA
tcggcctcccaaagtttagg

SEQ ID NO: 232808 - DNA, 20 bp, synthetic construct
  source 1..20: mol_type = other DNA
ctcggcctcccaaagtttag

SEQ ID NO: 232809 - DNA, 20 bp, synthetic construct
  source 1..20: mol_type = other DNA
cctcggcctcccaaagttta

SEQ ID NO: 232810 - DNA, 20 bp, synthetic construct
  source 1..20: mol_type = other DNA
gcctcggcctcccaaagttt

SEQ ID NO: 232811 - DNA, 20 bp, synthetic construct
  source 1..20: mol_type = other DNA
tgcctcggcctcccaaagtt

SEQ ID NO: 232812 - DNA, 20 bp, synthetic construct
  source 1..20: mol_type = other DNA
ctgcctcggcctcccaaagt

SEQ ID NO: 232813 - DNA, 20 bp, synthetic construct
  source 1..20: mol_type = other DNA
cctgcctcggcctcccaaag

SEQ ID NO: 232814 - DNA, 20 bp, synthetic construct
  source 1..20: mol_type = other DNA
gcctgcctcggcctcccaaa

SEQ ID NO: 232815 - DNA, 20 bp, synthetic construct
  source 1..20: mol_type = other DNA
tgcctgcctcggcctcccaa

SEQ ID NO: 232816 - DNA, 20 bp, synthetic construct
  source 1..20: mol_type = other DNA
ctgcctgcctcggcctccca

SEQ ID NO: 232817 - DNA, 20 bp, synthetic construct
  source 1..20: mol_type = other DNA
tctgcctgcctcggcctccc

SEQ ID NO: 232818 - DNA, 20 bp, synthetic construct
  source 1..20: mol_type = other DNA
atctgcctgcctcggcctcc

SEQ ID NO: 232819 - DNA, 20 bp, synthetic construct
  source 1..20: mol_type = other DNA
gatctgcctgcctcggcctc

SEQ ID NO: 232820 - DNA, 20 bp, synthetic construct
  source 1..20: mol_type = other DNA
tgatctgcctgcctcggcct

SEQ ID NO: 232821 - DNA, 20 bp, synthetic construct
  source 1..20: mol_type = other DNA
gtgatctgcctgcctcggcc

SEQ ID NO: 232822 - DNA, 20 bp, synthetic construct
  source 1..20: mol_type = other DNA
ggtgatctgcctgcctcggc

SEQ ID NO: 232823 - DNA, 20 bp, synthetic construct
  source 1..20: mol_type = other DNA
aggtgatctgcctgcctcgg

SEQ ID NO: 232824 - DNA, 20 bp, synthetic construct
  source 1..20: mol_type = other DNA
caggtgatctgcctgcctcg

SEQ ID NO: 232825 - DNA, 20 bp, synthetic construct
  source 1..20: mol_type = other DNA
tcaggtgatctgcctgcctc

SEQ ID NO: 232826 - DNA, 20 bp, synthetic construct
  source 1..20: mol_type = other DNA
ctcaggtgatctgcctgcct

SEQ ID NO: 232827 - DNA, 20 bp, synthetic construct
  source 1..20: mol_type = other DNA
cctcaggtgatctgcctgcc

SEQ ID NO: 232828 - DNA, 20 bp, synthetic construct
  source 1..20: mol_type = other DNA
acctcaggtgatctgcctgc

SEQ ID NO: 232829 - DNA, 20 bp, synthetic construct
  source 1..20: mol_type = other DNA
gacctcaggtgatctgcctg

SEQ ID NO: 232830 - DNA, 20 bp, synthetic construct
  source 1..20: mol_type = other DNA
agacctcaggtgatctgcct

SEQ ID NO: 232831 - DNA, 20 bp, synthetic construct
  source 1..20: mol_type = other DNA
cagacctcaggtgatctgcc

SEQ ID NO: 232832 - DNA, 20 bp, synthetic construct
  source 1..20: mol_type = other DNA
ccagacctcaggtgatctgc

SEQ ID NO: 232833 - DNA, 20 bp, synthetic construct
  source 1..20: mol_type = other DNA
accagacctcaggtgatctg

SEQ ID NO: 232834 - DNA, 20 bp, synthetic construct
  source 1..20: mol_type = other DNA
caccagacctcaggtgatct

SEQ ID NO: 232835 - DNA, 20 bp, synthetic construct
  source 1..20: mol_type = other DNA
tcaccagacctcaggtgatc

SEQ ID NO: 232836 - DNA, 20 bp, synthetic construct
  source 1..20: mol_type = other DNA
ttcaccagacctcaggtgat

SEQ ID NO: 232837 - DNA, 20 bp, synthetic construct
  source 1..20: mol_type = other DNA
tttcaccagacctcaggtga

SEQ ID NO: 232838 - DNA, 20 bp, synthetic construct
  source 1..20: mol_type = other DNA
gtttcaccagacctcaggtg

SEQ ID NO: 232839 - DNA, 20 bp, synthetic construct
  source 1..20: mol_type = other DNA
ggtttcaccagacctcaggt

SEQ ID NO: 232840 - DNA, 20 bp, synthetic construct
  source 1..20: mol_type = other DNA
gggtttcaccagacctcagg

SEQ ID NO: 232841 - DNA, 20 bp, synthetic construct
  source 1..20: mol_type = other DNA
agggtttcaccagacctcag

SEQ ID NO: 232842 - DNA, 20 bp, synthetic construct
  source 1..20: mol_type = other DNA
cagggtttcaccagacctca

SEQ ID NO: 232843 - DNA, 20 bp, synthetic construct
  source 1..20: mol_type = other DNA
acagggtttcaccagacctc

SEQ ID NO: 232844 - DNA, 20 bp, synthetic construct
  source 1..20: mol_type = other DNA
gacagggtttcaccagacct

SEQ ID NO: 232845 - DNA, 20 bp, synthetic construct
  source 1..20: mol_type = other DNA
agacagggtttcaccagacc

SEQ ID NO: 232846 - DNA, 20 bp, synthetic construct
  source 1..20: mol_type = other DNA
gagacagggtttcaccagac

SEQ ID NO: 232847 - DNA, 20 bp, synthetic construct
  source 1..20: mol_type = other DNA
agagacagggtttcaccaga

SEQ ID NO: 232848 - DNA, 20 bp, synthetic construct
  source 1..20: mol_type = other DNA
tagagacagggtttcaccag

SEQ ID NO: 232849 - DNA, 20 bp, synthetic construct
  source 1..20: mol_type = other DNA
gtagagacagggtttcacca

SEQ ID NO: 232850 - DNA, 20 bp, synthetic construct
  source 1..20: mol_type = other DNA
agtagagacagggtttcacc

SEQ ID NO: 232851 - DNA, 20 bp, synthetic construct
  source 1..20: mol_type = other DNA
tagtagagacagggtttcac

SEQ ID NO: 232852 - DNA, 20 bp, synthetic construct
  source 1..20: mol_type = other DNA
ttagtagagacagggtttca

SEQ ID NO: 232853 - DNA, 20 bp, synthetic construct
  source 1..20: mol_type = other DNA
tttagtagagacagggtttc

SEQ ID NO: 232854 - DNA, 20 bp, synthetic construct
  source 1..20: mol_type = other DNA
ttttagtagagacagggttt

SEQ ID NO: 232855 - DNA, 20 bp, synthetic construct
  source 1..20: mol_type = other DNA
tttttagtagagacagggtt

SEQ ID NO: 232856 - DNA, 20 bp, synthetic construct
  source 1..20: mol_type = other DNA
atttttagtagagacagggt

SEQ ID NO: 232857 - DNA, 20 bp, synthetic construct
  source 1..20: mol_type = other DNA
catttttagtagagacaggg

SEQ ID NO: 232858 - DNA, 20 bp, synthetic construct
  source 1..20: mol_type = other DNA
gcatttttagtagagacagg

SEQ ID NO: 232859 - DNA, 20 bp, synthetic construct
  source 1..20: mol_type = other DNA
tgcatttttagtagagacag

SEQ ID NO: 232860 - DNA, 20 bp, synthetic construct
  source 1..20: mol_type = other DNA
ttgcatttttagtagagaca

SEQ ID NO: 232861 - DNA, 20 bp, synthetic construct
  source 1..20: mol_type = other DNA
tttgcatttttagtagagac

SEQ ID NO: 232862 - DNA, 20 bp, synthetic construct
  source 1..20: mol_type = other DNA
ttttgcatttttagtagaga

SEQ ID NO: 232863 - DNA, 20 bp, synthetic construct
  source 1..20: mol_type = other DNA
tttttgcatttttagtagag

SEQ ID NO: 232864 - DNA, 20 bp, synthetic construct
  source 1..20: mol_type = other DNA
atttttgcatttttagtaga

SEQ ID NO: 232865 - DNA, 20 bp, synthetic construct
  source 1..20: mol_type = other DNA
aatttttgcatttttagtag

SEQ ID NO: 232866 - DNA, 20 bp, synthetic construct
  source 1..20: mol_type = other DNA
taatttttgcatttttagta

SEQ ID NO: 232867 - DNA, 20 bp, synthetic construct
  source 1..20: mol_type = other DNA
gtaatttttgcatttttagt

SEQ ID NO: 232868 - DNA, 20 bp, synthetic construct
  source 1..20: mol_type = other DNA
ggtaatttttgcatttttag

SEQ ID NO: 232869 - DNA, 20 bp, synthetic construct
  source 1..20: mol_type = other DNA
gggtaatttttgcattttta

SEQ ID NO: 232870 - DNA, 20 bp, synthetic construct
  source 1..20: mol_type = other DNA
tgggtaatttttgcattttt

SEQ ID NO: 232871 - DNA, 20 bp, synthetic construct
  source 1..20: mol_type = other DNA
ctgggtaatttttgcatttt

SEQ ID NO: 232872 - DNA, 20 bp, synthetic construct
  source 1..20: mol_type = other DNA
cctgggtaatttttgcattt

SEQ ID NO: 232873 - DNA, 20 bp, synthetic construct
  source 1..20: mol_type = other DNA
gcctgggtaatttttgcatt

SEQ ID NO: 232874 - DNA, 20 bp, synthetic construct
  source 1..20: mol_type = other DNA
tgcctgggtaatttttgcat

SEQ ID NO: 232875 - DNA, 20 bp, synthetic construct
  source 1..20: mol_type = other DNA
atgcctgggtaatttttgca

SEQ ID NO: 232876 - DNA, 20 bp, synthetic construct
  source 1..20: mol_type = other DNA
catgcctgggtaatttttgc

SEQ ID NO: 232877 - DNA, 20 bp, synthetic construct
  source 1..20: mol_type = other DNA
ccatgcctgggtaatttttg

SEQ ID NO: 232878 - DNA, 20 bp, synthetic construct
  source 1..20: mol_type = other DNA
accatgcctgggtaattttt

SEQ ID NO: 232879 - DNA, 20 bp, synthetic construct
  source 1..20: mol_type = other DNA
caccatgcctgggtaatttt

SEQ ID NO: 232880 - DNA, 20 bp, synthetic construct
  source 1..20: mol_type = other DNA
ccaccatgcctgggtaattt

SEQ ID NO: 232881 - DNA, 20 bp, synthetic construct
  source 1..20: mol_type = other DNA
gccaccatgcctgggtaatt

SEQ ID NO: 232882 - DNA, 20 bp, synthetic construct
  source 1..20: mol_type = other DNA
agccaccatgcctgggtaat

SEQ ID NO: 232883 - DNA, 20 bp, synthetic construct
  source 1..20: mol_type = other DNA
cagccaccatgcctgggtaa

SEQ ID NO: 232884 - DNA, 20 bp, synthetic construct
  source 1..20: mol_type = other DNA
ccagccaccatgcctgggta

SEQ ID NO: 232885 - DNA, 20 bp, synthetic construct
  source 1..20: mol_type = other DNA
cccagccaccatgcctgggt

SEQ ID NO: 232886 - DNA, 20 bp, synthetic construct
  source 1..20: mol_type = other DNA
ccccagccaccatgcctggg

SEQ ID NO: 232887 - DNA, 20 bp, synthetic construct
  source 1..20: mol_type = other DNA
gccccagccaccatgcctgg

SEQ ID NO: 232888 - DNA, 20 bp, synthetic construct
  source 1..20: mol_type = other DNA
ggccccagccaccatgcctg

SEQ ID NO: 232889 - DNA, 20 bp, synthetic construct
  source 1..20: mol_type = other DNA
aggccccagccaccatgcct

SEQ ID NO: 232890 - DNA, 20 bp, synthetic construct
  source 1..20: mol_type = other DNA
caggccccagccaccatgcc

SEQ ID NO: 232891 - DNA, 20 bp, synthetic construct
  source 1..20: mol_type = other DNA
acaggccccagccaccatgc

SEQ ID NO: 232892 - DNA, 20 bp, synthetic construct
  source 1..20: mol_type = other DNA
tacaggccccagccaccatg

SEQ ID NO: 232893 - DNA, 20 bp, synthetic construct
  source 1..20: mol_type = other DNA
ttacaggccccagccaccat

SEQ ID NO: 232894 - DNA, 20 bp, synthetic construct
  source 1..20: mol_type = other DNA
attacaggccccagccacca

SEQ ID NO: 232895 - DNA, 20 bp, synthetic construct
  source 1..20: mol_type = other DNA
gattacaggccccagccacc

SEQ ID NO: 232896 - DNA, 20 bp, synthetic construct
  source 1..20: mol_type = other DNA
ggattacaggccccagccac

SEQ ID NO: 232897 - DNA, 20 bp, synthetic construct
  source 1..20: mol_type = other DNA
gggattacaggccccagcca

SEQ ID NO: 232898 - DNA, 20 bp, synthetic construct
  source 1..20: mol_type = other DNA
tgggattacaggccccagcc

SEQ ID NO: 232899 - DNA, 20 bp, synthetic construct
  source 1..20: mol_type = other DNA
ctgggattacaggccccagc

SEQ ID NO: 232900 - DNA, 20 bp, synthetic construct
  source 1..20: mol_type = other DNA
gctgggattacaggccccag

SEQ ID NO: 232901 - DNA, 20 bp, synthetic construct
  source 1..20: mol_type = other DNA
agctgggattacaggcccca

SEQ ID NO: 232902 - DNA, 20 bp, synthetic construct
  source 1..20: mol_type = other DNA
tagctgggattacaggcccc

SEQ ID NO: 232903 - DNA, 20 bp, synthetic construct
  source 1..20: mol_type = other DNA
gtagctgggattacaggccc

SEQ ID NO: 232904 - DNA, 20 bp, synthetic construct
  source 1..20: mol_type = other DNA
agtagctgggattacaggcc

SEQ ID NO: 232905 - DNA, 20 bp, synthetic construct
  source 1..20: mol_type = other DNA
gagtagctgggattacaggc

SEQ ID NO: 232906 - DNA, 20 bp, synthetic construct
  source 1..20: mol_type = other DNA
cgagtagctgggattacagg

SEQ ID NO: 232907 - DNA, 20 bp, synthetic construct
  source 1..20: mol_type = other DNA
ccgagtagctgggattacag

SEQ ID NO: 232908 - DNA, 20 bp, synthetic construct
  source 1..20: mol_type = other DNA
cccgagtagctgggattaca

SEQ ID NO: 232909 - DNA, 20 bp, synthetic construct
  source 1..20: mol_type = other DNA
tcccgagtagctgggattac

SEQ ID NO: 232910 - DNA, 20 bp, synthetic construct
  source 1..20: mol_type = other DNA
ctcccgagtagctgggatta

SEQ ID NO: 232911 - DNA, 20 bp, synthetic construct
  source 1..20: mol_type = other DNA
cctcccgagtagctgggatt

SEQ ID NO: 232912 - DNA, 20 bp, synthetic construct
  source 1..20: mol_type = other DNA
gcctcccgagtagctgggat

SEQ ID NO: 232913 - DNA, 20 bp, synthetic construct
  source 1..20: mol_type = other DNA
agcctcccgagtagctggga

SEQ ID NO: 232914 - DNA, 20 bp, synthetic construct
  source 1..20: mol_type = other DNA
cagcctcccgagtagctggg

SEQ ID NO: 232915 - DNA, 20 bp, synthetic construct
  source 1..20: mol_type = other DNA
tcagcctcccgagtagctgg

SEQ ID NO: 232916 - DNA, 20 bp, synthetic construct
  source 1..20: mol_type = other DNA
ctcagcctcccgagtagctg

SEQ ID NO: 232917 - DNA, 20 bp, synthetic construct
  source 1..20: mol_type = other DNA
cctcagcctcccgagtagct

SEQ ID NO: 232918 - DNA, 20 bp, synthetic construct
  source 1..20: mol_type = other DNA
gcctcagcctcccgagtagc

SEQ ID NO: 232919 - DNA, 20 bp, synthetic construct
  source 1..20: mol_type = other DNA
tgcctcagcctcccgagtag

SEQ ID NO: 232920 - DNA, 20 bp, synthetic construct
  source 1..20: mol_type = other DNA
ctgcctcagcctcccgagta

SEQ ID NO: 232921 - DNA, 20 bp, synthetic construct
  source 1..20: mol_type = other DNA
cctgcctcagcctcccgagt

SEQ ID NO: 232922 - DNA, 20 bp, synthetic construct
  source 1..20: mol_type = other DNA
tcctgcctcagcctcccgag

SEQ ID NO: 232923 - DNA, 20 bp, synthetic construct
  source 1..20: mol_type = other DNA
ctcctgcctcagcctcccga

SEQ ID NO: 232924 - DNA, 20 bp, synthetic construct
  source 1..20: mol_type = other DNA
tctcctgcctcagcctcccg

SEQ ID NO: 232925 - DNA, 20 bp, synthetic construct
  source 1..20: mol_type = other DNA
ttctcctgcctcagcctccc

SEQ ID NO: 232926 - DNA, 20 bp, synthetic construct
  source 1..20: mol_type = other DNA
attctcctgcctcagcctcc

SEQ ID NO: 232927 - DNA, 20 bp, synthetic construct
  source 1..20: mol_type = other DNA
gattctcctgcctcagcctc

SEQ ID NO: 232928 - DNA, 20 bp, synthetic construct
  source 1..20: mol_type = other DNA
cgattctcctgcctcagcct

SEQ ID NO: 232929 - DNA, 20 bp, synthetic construct
  source 1..20: mol_type = other DNA
gcgattctcctgcctcagcc

SEQ ID NO: 232930 - DNA, 20 bp, synthetic construct
  source 1..20: mol_type = other DNA
agcgattctcctgcctcagc

SEQ ID NO: 232931 - DNA, 20 bp, synthetic construct
  source 1..20: mol_type = other DNA
aagcgattctcctgcctcag

SEQ ID NO: 232932 - DNA, 20 bp, synthetic construct
  source 1..20: mol_type = other DNA
caagcgattctcctgcctca

SEQ ID NO: 232933 - DNA, 20 bp, synthetic construct
  source 1..20: mol_type = other DNA
tcaagcgattctcctgcctc

SEQ ID NO: 232934 - DNA, 20 bp, synthetic construct
  source 1..20: mol_type = other DNA
ttcaagcgattctcctgcct

SEQ ID NO: 232935 - DNA, 20 bp, synthetic construct
  source 1..20: mol_type = other DNA
cttcaagcgattctcctgcc

SEQ ID NO: 232936 - DNA, 20 bp, synthetic construct
  source 1..20: mol_type = other DNA
gcttcaagcgattctcctgc

SEQ ID NO: 232937 - DNA, 20 bp, synthetic construct
  source 1..20: mol_type = other DNA
tgcttcaagcgattctcctg

SEQ ID NO: 232938 - DNA, 20 bp, synthetic construct
  source 1..20: mol_type = other DNA
ttgcttcaagcgattctcct

SEQ ID NO: 232939 - DNA, 20 bp, synthetic construct
  source 1..20: mol_type = other DNA
cttgcttcaagcgattctcc

SEQ ID NO: 232940 - DNA, 20 bp, synthetic construct
  source 1..20: mol_type = other DNA
ccttgcttcaagcgattctc

SEQ ID NO: 232941 - DNA, 20 bp, synthetic construct
  source 1..20: mol_type = other DNA
tccttgcttcaagcgattct

SEQ ID NO: 232942 - DNA, 20 bp, synthetic construct
  source 1..20: mol_type = other DNA
ctccttgcttcaagcgattc

SEQ ID NO: 232943 - DNA, 20 bp, synthetic construct
  source 1..20: mol_type = other DNA
cctccttgcttcaagcgatt

SEQ ID NO: 232944 - DNA, 20 bp, synthetic construct
  source 1..20: mol_type = other DNA
gcctccttgcttcaagcgat

SEQ ID NO: 232945 - DNA, 20 bp, synthetic construct
  source 1..20: mol_type = other DNA
cgcctccttgcttcaagcga

SEQ ID NO: 232946 - DNA, 20 bp, synthetic construct
  source 1..20: mol_type = other DNA
ccgcctccttgcttcaagcg

SEQ ID NO: 232947 - DNA, 20 bp, synthetic construct
  source 1..20: mol_type = other DNA
tccgcctccttgcttcaagc

SEQ ID NO: 232948 - DNA, 20 bp, synthetic construct
  source 1..20: mol_type = other DNA
ctccgcctccttgcttcaag

SEQ ID NO: 232949 - DNA, 20 bp, synthetic construct
  source 1..20: mol_type = other DNA
cctccgcctccttgcttcaa

SEQ ID NO: 232950 - DNA, 20 bp, synthetic construct
  source 1..20: mol_type = other DNA
acctccgcctccttgcttca

SEQ ID NO: 232951 - DNA, 20 bp, synthetic construct
  source 1..20: mol_type = other DNA
aacctccgcctccttgcttc

SEQ ID NO: 232952 - DNA, 20 bp, synthetic construct
  source 1..20: mol_type = other DNA
aaacctccgcctccttgctt

SEQ ID NO: 232953 - DNA, 20 bp, synthetic construct
  source 1..20: mol_type = other DNA
gaaacctccgcctccttgct

SEQ ID NO: 232954 - DNA, 20 bp, synthetic construct
  source 1..20: mol_type = other DNA
tgaaacctccgcctccttgc

SEQ ID NO: 232955 - DNA, 20 bp, synthetic construct
  source 1..20: mol_type = other DNA
ctgaaacctccgcctccttg

SEQ ID NO: 232956 - DNA, 20 bp, synthetic construct
  source 1..20: mol_type = other DNA
actgaaacctccgcctcctt

SEQ ID NO: 232957 - DNA, 20 bp, synthetic construct
  source 1..20: mol_type = other DNA
cactgaaacctccgcctcct

SEQ ID NO: 232958 - DNA, 20 bp, synthetic construct
  source 1..20: mol_type = other DNA
tcactgaaacctccgcctcc

SEQ ID NO: 232959 - DNA, 20 bp, synthetic construct
  source 1..20: mol_type = other DNA
ctcactgaaacctccgcctc

SEQ ID NO: 232960 - DNA, 20 bp, synthetic construct
  source 1..20: mol_type = other DNA
gctcactgaaacctccgcct

SEQ ID NO: 232961 - DNA, 20 bp, synthetic construct
  source 1..20: mol_type = other DNA
ggctcactgaaacctccgcc

SEQ ID NO: 232962 - DNA, 20 bp, synthetic construct
  source 1..20: mol_type = other DNA
tggctcactgaaacctccgc

SEQ ID NO: 232963 - DNA, 20 bp, synthetic construct
  source 1..20: mol_type = other DNA
ttggctcactgaaacctccg

SEQ ID NO: 232964 - DNA, 20 bp, synthetic construct
  source 1..20: mol_type = other DNA
cttggctcactgaaacctcc

SEQ ID NO: 232965 - DNA, 20 bp, synthetic construct
  source 1..20: mol_type = other DNA
tcttggctcactgaaacctc

SEQ ID NO: 232966 - DNA, 20 bp, synthetic construct
  source 1..20: mol_type = other DNA
atcttggctcactgaaacct

SEQ ID NO: 232967 - DNA, 20 bp, synthetic construct
  source 1..20: mol_type = other DNA
aatcttggctcactgaaacc

SEQ ID NO: 232968 - DNA, 20 bp, synthetic construct
  source 1..20: mol_type = other DNA
caatcttggctcactgaaac

SEQ ID NO: 232969 - DNA, 20 bp, synthetic construct
  source 1..20: mol_type = other DNA
gcaatcttggctcactgaaa

SEQ ID NO: 232970 - DNA, 20 bp, synthetic construct
  source 1..20: mol_type = other DNA
tgcaatcttggctcactgaa

SEQ ID NO: 232971 - DNA, 20 bp, synthetic construct
  source 1..20: mol_type = other DNA
gtgcaatcttggctcactga

SEQ ID NO: 232972 - DNA, 20 bp, synthetic construct
  source 1..20: mol_type = other DNA
ggtgcaatcttggctcactg

SEQ ID NO: 232973 - DNA, 20 bp, synthetic construct
  source 1..20: mol_type = other DNA
tggtgcaatcttggctcact

SEQ ID NO: 232974 - DNA, 20 bp, synthetic construct
  source 1..20: mol_type = other DNA
gtggtgcaatcttggctcac

SEQ ID NO: 232975 - DNA, 20 bp, synthetic construct
  source 1..20: mol_type = other DNA
agtggtgcaatcttggctca

SEQ ID NO: 232976 - DNA, 20 bp, synthetic construct
  source 1..20: mol_type = other DNA
cagtggtgcaatcttggctc

SEQ ID NO: 232977 - DNA, 20 bp, synthetic construct
  source 1..20: mol_type = other DNA
gcagtggtgcaatcttggct

SEQ ID NO: 232978 - DNA, 20 bp, synthetic construct
  source 1..20: mol_type = other DNA
tgcagtggtgcaatcttggc

SEQ ID NO: 232979 - DNA, 20 bp, synthetic construct
  source 1..20: mol_type = other DNA
gtgcagtggtgcaatcttgg

SEQ ID NO: 232980 - DNA, 20 bp, synthetic construct
  source 1..20: mol_type = other DNA
agtgcagtggtgcaatcttg

SEQ ID NO: 232981 - DNA, 20 bp, synthetic construct
  source 1..20: mol_type = other DNA
gagtgcagtggtgcaatctt

SEQ ID NO: 232982 - DNA, 20 bp, synthetic construct
  source 1..20: mol_type = other DNA
ggagtgcagtggtgcaatct

SEQ ID NO: 232983 - DNA, 20 bp, synthetic construct
  source 1..20: mol_type = other DNA
tggagtgcagtggtgcaatc

SEQ ID NO: 232984 - DNA, 20 bp, synthetic construct
  source 1..20: mol_type = other DNA
ctggagtgcagtggtgcaat

SEQ ID NO: 232985 - DNA, 20 bp, synthetic construct
  source 1..20: mol_type = other DNA
gctggagtgcagtggtgcaa

SEQ ID NO: 232986 - DNA, 20 bp, synthetic construct
  source 1..20: mol_type = other DNA
ggctggagtgcagtggtgca

SEQ ID NO: 232987 - DNA, 20 bp, synthetic construct
  source 1..20: mol_type = other DNA
aggctggagtgcagtggtgc

SEQ ID NO: 232988 - DNA, 20 bp, synthetic construct
  source 1..20: mol_type = other DNA
caggctggagtgcagtggtg

SEQ ID NO: 232989 - DNA, 20 bp, synthetic construct
  source 1..20: mol_type = other DNA
ccaggctggagtgcagtggt

SEQ ID NO: 232990 - DNA, 20 bp, synthetic construct
  source 1..20: mol_type = other DNA
cccaggctggagtgcagtgg

SEQ ID NO: 232991 - DNA, 20 bp, synthetic construct
  source 1..20: mol_type = other DNA
acccaggctggagtgcagtg

SEQ ID NO: 232992 - DNA, 20 bp, synthetic construct
  source 1..20: mol_type = other DNA
cacccaggctggagtgcagt

SEQ ID NO: 232993 - DNA, 20 bp, synthetic construct
  source 1..20: mol_type = other DNA
tcacccaggctggagtgcag

SEQ ID NO: 232994 - DNA, 20 bp, synthetic construct
  source 1..20: mol_type = other DNA
gtcacccaggctggagtgca

SEQ ID NO: 232995 - DNA, 20 bp, synthetic construct
  source 1..20: mol_type = other DNA
tgtcacccaggctggagtgc

SEQ ID NO: 232996 - DNA, 20 bp, synthetic construct
  source 1..20: mol_type = other DNA
ttgtcacccaggctggagtg

SEQ ID NO: 232997 - DNA, 20 bp, synthetic construct
  source 1..20: mol_type = other DNA
cttgtcacccaggctggagt

SEQ ID NO: 232998 - DNA, 20 bp, synthetic construct
  source 1..20: mol_type = other DNA
tcttgtcacccaggctggag

SEQ ID NO: 232999 - DNA, 20 bp, synthetic construct
  source 1..20: mol_type = other DNA
ctcttgtcacccaggctgga

SEQ ID NO: 233000 - DNA, 20 bp, synthetic construct
  source 1..20: mol_type = other DNA
actcttgtcacccaggctgg

SEQ ID NO: 233001 - DNA, 20 bp, synthetic construct
  source 1..20: mol_type = other DNA
cactcttgtcacccaggctg

SEQ ID NO: 233002 - DNA, 20 bp, synthetic construct
  source 1..20: mol_type = other DNA
tcactcttgtcacccaggct

SEQ ID NO: 233003 - DNA, 20 bp, synthetic construct
  source 1..20: mol_type = other DNA
ttcactcttgtcacccaggc

SEQ ID NO: 233004 - DNA, 20 bp, synthetic construct
  source 1..20: mol_type = other DNA
tttcactcttgtcacccagg

SEQ ID NO: 233005 - DNA, 20 bp, synthetic construct
  source 1..20: mol_type = other DNA
gtttcactcttgtcacccag

SEQ ID NO: 233006 - DNA, 20 bp, synthetic construct
  source 1..20: mol_type = other DNA
agtttcactcttgtcaccca

SEQ ID NO: 233007 - DNA, 20 bp, synthetic construct
  source 1..20: mol_type = other DNA
gagtttcactcttgtcaccc

SEQ ID NO: 233008 - DNA, 20 bp, synthetic construct
  source 1..20: mol_type = other DNA
ggagtttcactcttgtcacc

SEQ ID NO: 233009 - DNA, 20 bp, synthetic construct
  source 1..20: mol_type = other DNA
tggagtttcactcttgtcac

SEQ ID NO: 233010 - DNA, 20 bp, synthetic construct
  source 1..20: mol_type = other DNA
atggagtttcactcttgtca

SEQ ID NO: 233011 - DNA, 20 bp, synthetic construct
  source 1..20: mol_type = other DNA
gatggagtttcactcttgtc

SEQ ID NO: 233012 - DNA, 20 bp, synthetic construct
  source 1..20: mol_type = other DNA
agatggagtttcactcttgt

SEQ ID NO: 233013 - DNA, 20 bp, synthetic construct
  source 1..20: mol_type = other DNA
tagatggagtttcactcttg

SEQ ID NO: 233014 - DNA, 20 bp, synthetic construct
  source 1..20: mol_type = other DNA
ttagatggagtttcactctt

SEQ ID NO: 233015 - DNA, 20 bp, synthetic construct
  source 1..20: mol_type = other DNA
tttagatggagtttcactct

SEQ ID NO: 233016 - DNA, 20 bp, synthetic construct
  source 1..20: mol_type = other DNA
ttttagatggagtttcactc

SEQ ID NO: 233017 - DNA, 20 bp, synthetic construct
  source 1..20: mol_type = other DNA
tttttagatggagtttcact

SEQ ID NO: 233018 - DNA, 20 bp, synthetic construct
  source 1..20: mol_type = other DNA
ttttttagatggagtttcac

SEQ ID NO: 233019 - DNA, 20 bp, synthetic construct
  source 1..20: mol_type = other DNA
tttttttagatggagtttca

SEQ ID NO: 233020 - DNA, 20 bp, synthetic construct
  source 1..20: mol_type = other DNA
ttttttttagatggagtttc

SEQ ID NO: 233021 - DNA, 20 bp, synthetic construct
  source 1..20: mol_type = other DNA
tttttttttagatggagttt

SEQ ID NO: 233022 - DNA, 20 bp, synthetic construct
  source 1..20: mol_type = other DNA
ttttttttttagatggagtt

SEQ ID NO: 233023 - DNA, 20 bp, synthetic construct
  source 1..20: mol_type = other DNA
tttttttttttagatggagt

SEQ ID NO: 233024 - DNA, 20 bp, synthetic construct
  source 1..20: mol_type = other DNA
ttttttttttttagatggag

SEQ ID NO: 233025 - DNA, 20 bp, synthetic construct
  source 1..20: mol_type = other DNA
attttttttttttagatgga

SEQ ID NO: 233026 - DNA, 20 bp, synthetic construct
  source 1..20: mol_type = other DNA
aattttttttttttagatgg

SEQ ID NO: 233027 - DNA, 20 bp, synthetic construct
  source 1..20: mol_type = other DNA
taattttttttttttagatg

SEQ ID NO: 233028 - DNA, 20 bp, synthetic construct
  source 1..20: mol_type = other DNA
ataattttttttttttagat

SEQ ID NO: 233029 - DNA, 20 bp, synthetic construct
  source 1..20: mol_type = other DNA
cataattttttttttttaga

SEQ ID NO: 233030 - DNA, 20 bp, synthetic construct
  source 1..20: mol_type = other DNA
ccataattttttttttttag

SEQ ID NO: 233031 - DNA, 20 bp, synthetic construct
  source 1..20: mol_type = other DNA
tccataatttttttttttta

SEQ ID NO: 233032 - DNA, 20 bp, synthetic construct
  source 1..20: mol_type = other DNA
gtccataatttttttttttt

SEQ ID NO: 233033 - DNA, 20 bp, synthetic construct
  source 1..20: mol_type = other DNA
tgtccataattttttttttt

SEQ ID NO: 233034 - DNA, 20 bp, synthetic construct
  source 1..20: mol_type = other DNA
ttgtccataatttttttttt

SEQ ID NO: 233035 - DNA, 20 bp, synthetic construct
  source 1..20: mol_type = other DNA
tttgtccataattttttttt

SEQ ID NO: 233036 - DNA, 20 bp, synthetic construct
  source 1..20: mol_type = other DNA
ctttgtccataatttttttt

SEQ ID NO: 233037 - DNA, 20 bp, synthetic construct
  source 1..20: mol_type = other DNA
actttgtccataattttttt

SEQ ID NO: 233038 - DNA, 20 bp, synthetic construct
  source 1..20: mol_type = other DNA
aactttgtccataatttttt

SEQ ID NO: 233039 - DNA, 20 bp, synthetic construct
  source 1..20: mol_type = other DNA
aaactttgtccataattttt

SEQ ID NO: 233040 - DNA, 20 bp, synthetic construct
  source 1..20: mol_type = other DNA
aaaactttgtccataatttt

SEQ ID NO: 233041 - DNA, 20 bp, synthetic construct
  source 1..20: mol_type = other DNA
aaaaactttgtccataattt

SEQ ID NO: 233042 - DNA, 20 bp, synthetic construct
  source 1..20: mol_type = other DNA
gaaaaactttgtccataatt

SEQ ID NO: 233043 - DNA, 20 bp, synthetic construct
  source 1..20: mol_type = other DNA
tgaaaaactttgtccataat

SEQ ID NO: 233044 - DNA, 20 bp, synthetic construct
  source 1..20: mol_type = other DNA
ttgaaaaactttgtccataa

SEQ ID NO: 233045 - DNA, 20 bp, synthetic construct
  source 1..20: mol_type = other DNA
tttgaaaaactttgtccata

SEQ ID NO: 233046 - DNA, 20 bp, synthetic construct
  source 1..20: mol_type = other DNA
ttttgaaaaactttgtccat

SEQ ID NO: 233047 - DNA, 20 bp, synthetic construct
  source 1..20: mol_type = other DNA
tttttgaaaaactttgtcca

SEQ ID NO: 233048 - DNA, 20 bp, synthetic construct
  source 1..20: mol_type = other DNA
ctttttgaaaaactttgtcc

SEQ ID NO: 233049 - DNA, 20 bp, synthetic construct
  source 1..20: mol_type = other DNA
tctttttgaaaaactttgtc

SEQ ID NO: 233050 - DNA, 20 bp, synthetic construct
  source 1..20: mol_type = other DNA
atctttttgaaaaactttgt

SEQ ID NO: 233051 - DNA, 20 bp, synthetic construct
  source 1..20: mol_type = other DNA
tatctttttgaaaaactttg

SEQ ID NO: 233052 - DNA, 20 bp, synthetic construct
  source 1..20: mol_type = other DNA
atatctttttgaaaaacttt

SEQ ID NO: 233053 - DNA, 20 bp, synthetic construct
  source 1..20: mol_type = other DNA
aatatctttttgaaaaactt

SEQ ID NO: 233054 - DNA, 20 bp, synthetic construct
  source 1..20: mol_type = other DNA
aaatatctttttgaaaaact

SEQ ID NO: 233055 - DNA, 20 bp, synthetic construct
  source 1..20: mol_type = other DNA
taaatatctttttgaaaaac

SEQ ID NO: 233056 - DNA, 20 bp, synthetic construct
  source 1..20: mol_type = other DNA
ttaaatatctttttgaaaaa

SEQ ID NO: 233057 - DNA, 20 bp, synthetic construct
  source 1..20: mol_type = other DNA
attaaatatctttttgaaaa

SEQ ID NO: 233058 - DNA, 20 bp, synthetic construct
  source 1..20: mol_type = other DNA
cattaaatatctttttgaaa

SEQ ID NO: 233059 - DNA, 20 bp, synthetic construct
  source 1..20: mol_type = other DNA
gcattaaatatctttttgaa

SEQ ID NO: 233060 - DNA, 20 bp, synthetic construct
  source 1..20: mol_type = other DNA
tgcattaaatatctttttga

SEQ ID NO: 233061 - DNA, 20 bp, synthetic construct
  source 1..20: mol_type = other DNA
ttgcattaaatatctttttg

SEQ ID NO: 233062 - DNA, 20 bp, synthetic construct
  source 1..20: mol_type = other DNA
gttgcattaaatatcttttt

SEQ ID NO: 233063 - DNA, 20 bp, synthetic construct
  source 1..20: mol_type = other DNA
agttgcattaaatatctttt

SEQ ID NO: 233064 - DNA, 20 bp, synthetic construct
  source 1..20: mol_type = other DNA
aagttgcattaaatatcttt

SEQ ID NO: 233065 - DNA, 20 bp, synthetic construct
  source 1..20: mol_type = other DNA
aaagttgcattaaatatctt

SEQ ID NO: 233066 - DNA, 20 bp, synthetic construct
  source 1..20: mol_type = other DNA
taaagttgcattaaatatct

SEQ ID NO: 233067 - DNA, 20 bp, synthetic construct
  source 1..20: mol_type = other DNA
ataaagttgcattaaatatc

SEQ ID NO: 233068 - DNA, 20 bp, synthetic construct
  source 1..20: mol_type = other DNA
aataaagttgcattaaatat

SEQ ID NO: 233069 - DNA, 20 bp, synthetic construct
  source 1..20: mol_type = other DNA
aaataaagttgcattaaata

SEQ ID NO: 233070 - DNA, 20 bp, synthetic construct
  source 1..20: mol_type = other DNA
caaataaagttgcattaaat

SEQ ID NO: 233071 - DNA, 20 bp, synthetic construct
  source 1..20: mol_type = other DNA
acaaataaagttgcattaaa

SEQ ID NO: 233072 - DNA, 20 bp, synthetic construct
  source 1..20: mol_type = other DNA
tacaaataaagttgcattaa

SEQ ID NO: 233073 - DNA, 20 bp, synthetic construct
  source 1..20: mol_type = other DNA
ttacaaataaagttgcatta

SEQ ID NO: 233074 - DNA, 20 bp, synthetic construct
  source 1..20: mol_type = other DNA
attacaaataaagttgcatt

SEQ ID NO: 233075 - DNA, 20 bp, synthetic construct
  source 1..20: mol_type = other DNA
tattacaaataaagttgcat

SEQ ID NO: 233076 - DNA, 20 bp, synthetic construct
  source 1..20: mol_type = other DNA
atattacaaataaagttgca

SEQ ID NO: 233077 - DNA, 20 bp, synthetic construct
  source 1..20: mol_type = other DNA
aatattacaaataaagttgc

SEQ ID NO: 233078 - DNA, 20 bp, synthetic construct
  source 1..20: mol_type = other DNA
caatattacaaataaagttg

SEQ ID NO: 233079 - DNA, 20 bp, synthetic construct
  source 1..20: mol_type = other DNA
ccaatattacaaataaagtt

SEQ ID NO: 233080 - DNA, 20 bp, synthetic construct
  source 1..20: mol_type = other DNA
tccaatattacaaataaagt

SEQ ID NO: 233081 - DNA, 20 bp, synthetic construct
  source 1..20: mol_type = other DNA
ttccaatattacaaataaag

SEQ ID NO: 233082 - DNA, 20 bp, synthetic construct
  source 1..20: mol_type = other DNA
gttccaatattacaaataaa

SEQ ID NO: 233083 - DNA, 20 bp, synthetic construct
  source 1..20: mol_type = other DNA
tgttccaatattacaaataa

SEQ ID NO: 233084 - DNA, 20 bp, synthetic construct
  source 1..20: mol_type = other DNA
atgttccaatattacaaata

SEQ ID NO: 233085 - DNA, 20 bp, synthetic construct
  source 1..20: mol_type = other DNA
gatgttccaatattacaaat

SEQ ID NO: 233086 - DNA, 20 bp, synthetic construct
  source 1..20: mol_type = other DNA
agatgttccaatattacaaa

SEQ ID NO: 233087 - DNA, 20 bp, synthetic construct
  source 1..20: mol_type = other DNA
cagatgttccaatattacaa

SEQ ID NO: 233088 - DNA, 20 bp, synthetic construct
  source 1..20: mol_type = other DNA
tcagatgttccaatattaca

SEQ ID NO: 233089 - DNA, 20 bp, synthetic construct
  source 1..20: mol_type = other DNA
ctcagatgttccaatattac

SEQ ID NO: 233090 - DNA, 20 bp, synthetic construct
  source 1..20: mol_type = other DNA
cctcagatgttccaatatta

SEQ ID NO: 233091 - DNA, 20 bp, synthetic construct
  source 1..20: mol_type = other DNA
gcctcagatgttccaatatt

SEQ ID NO: 233092 - DNA, 20 bp, synthetic construct
  source 1..20: mol_type = other DNA
ggcctcagatgttccaatat

SEQ ID NO: 233093 - DNA, 20 bp, synthetic construct
  source 1..20: mol_type = other DNA
tggcctcagatgttccaata

SEQ ID NO: 233094 - DNA, 20 bp, synthetic construct
  source 1..20: mol_type = other DNA
atggcctcagatgttccaat

SEQ ID NO: 233095 - DNA, 20 bp, synthetic construct
  source 1..20: mol_type = other DNA
aatggcctcagatgttccaa

SEQ ID NO: 233096 - DNA, 20 bp, synthetic construct
  source 1..20: mol_type = other DNA
aaatggcctcagatgttcca

SEQ ID NO: 233097 - DNA, 20 bp, synthetic construct
  source 1..20: mol_type = other DNA
gaaatggcctcagatgttcc

SEQ ID NO: 233098 - DNA, 20 bp, synthetic construct
  source 1..20: mol_type = other DNA
tgaaatggcctcagatgttc

SEQ ID NO: 233099 - DNA, 20 bp, synthetic construct
  source 1..20: mol_type = other DNA
ctgaaatggcctcagatgtt

SEQ ID NO: 233100 - DNA, 20 bp, synthetic construct
  source 1..20: mol_type = other DNA
actgaaatggcctcagatgt

SEQ ID NO: 233101 - DNA, 20 bp, synthetic construct
  source 1..20: mol_type = other DNA
cactgaaatggcctcagatg

SEQ ID NO: 233102 - DNA, 20 bp, synthetic construct
  source 1..20: mol_type = other DNA
gcactgaaatggcctcagat

SEQ ID NO: 233103 - DNA, 20 bp, synthetic construct
  source 1..20: mol_type = other DNA
agcactgaaatggcctcaga

SEQ ID NO: 233104 - DNA, 20 bp, synthetic construct
  source 1..20: mol_type = other DNA
tagcactgaaatggcctcag

SEQ ID NO: 233105 - DNA, 20 bp, synthetic construct
  source 1..20: mol_type = other DNA
ttagcactgaaatggcctca

SEQ ID NO: 233106 - DNA, 20 bp, synthetic construct
  source 1..20: mol_type = other DNA
gttagcactgaaatggcctc

SEQ ID NO: 233107 - DNA, 20 bp, synthetic construct
  source 1..20: mol_type = other DNA
agttagcactgaaatggcct

SEQ ID NO: 233108 - DNA, 20 bp, synthetic construct
  source 1..20: mol_type = other DNA
tagttagcactgaaatggcc

SEQ ID NO: 233109 - DNA, 20 bp, synthetic construct
  source 1..20: mol_type = other DNA
atagttagcactgaaatggc

SEQ ID NO: 233110 - DNA, 20 bp, synthetic construct
  source 1..20: mol_type = other DNA
aatagttagcactgaaatgg

SEQ ID NO: 233111 - DNA, 20 bp, synthetic construct
  source 1..20: mol_type = other DNA
taatagttagcactgaaatg

SEQ ID NO: 233112 - DNA, 20 bp, synthetic construct
  source 1..20: mol_type = other DNA
ctaatagttagcactgaaat

SEQ ID NO: 233113 - DNA, 20 bp, synthetic construct
  source 1..20: mol_type = other DNA
cctaatagttagcactgaaa

SEQ ID NO: 233114 - DNA, 20 bp, synthetic construct
  source 1..20: mol_type = other DNA
ccctaatagttagcactgaa

SEQ ID NO: 233115 - DNA, 20 bp, synthetic construct
  source 1..20: mol_type = other DNA
cccctaatagttagcactga

SEQ ID NO: 233116 - DNA, 20 bp, synthetic construct
  source 1..20: mol_type = other DNA
tcccctaatagttagcactg

SEQ ID NO: 233117 - DNA, 20 bp, synthetic construct
  source 1..20: mol_type = other DNA
atcccctaatagttagcact

SEQ ID NO: 233118 - DNA, 20 bp, synthetic construct
  source 1..20: mol_type = other DNA
catcccctaatagttagcac

SEQ ID NO: 233119 - DNA, 20 bp, synthetic construct
  source 1..20: mol_type = other DNA
ccatcccctaatagttagca

SEQ ID NO: 233120 - DNA, 20 bp, synthetic construct
  source 1..20: mol_type = other DNA
accatcccctaatagttagc

SEQ ID NO: 233121 - DNA, 20 bp, synthetic construct
  source 1..20: mol_type = other DNA
aaccatcccctaatagttag

SEQ ID NO: 233122 - DNA, 20 bp, synthetic construct
  source 1..20: mol_type = other DNA
taaccatcccctaatagtta

SEQ ID NO: 233123 - DNA, 20 bp, synthetic construct
  source 1..20: mol_type = other DNA
ctaaccatcccctaatagtt

SEQ ID NO: 233124 - DNA, 20 bp, synthetic construct
  source 1..20: mol_type = other DNA
cctaaccatcccctaatagt

SEQ ID NO: 233125 - DNA, 20 bp, synthetic construct
  source 1..20: mol_type = other DNA
tcctaaccatcccctaatag

SEQ ID NO: 233126 - DNA, 20 bp, synthetic construct
  source 1..20: mol_type = other DNA
ttcctaaccatcccctaata

SEQ ID NO: 233127 - DNA, 20 bp, synthetic construct
  source 1..20: mol_type = other DNA
tttcctaaccatcccctaat

SEQ ID NO: 233128 - DNA, 20 bp, synthetic construct
  source 1..20: mol_type = other DNA
ttttcctaaccatcccctaa

SEQ ID NO: 233129 - DNA, 20 bp, synthetic construct
  source 1..20: mol_type = other DNA
attttcctaaccatccccta

SEQ ID NO: 233130 - DNA, 20 bp, synthetic construct
  source 1..20: mol_type = other DNA
tattttcctaaccatcccct

SEQ ID NO: 233131 - DNA, 20 bp, synthetic construct
  source 1..20: mol_type = other DNA
atattttcctaaccatcccc

SEQ ID NO: 233132 - DNA, 20 bp, synthetic construct
  source 1..20: mol_type = other DNA
catattttcctaaccatccc

SEQ ID NO: 233133 - DNA, 20 bp, synthetic construct
  source 1..20: mol_type = other DNA
ccatattttcctaaccatcc

SEQ ID NO: 233134 - DNA, 20 bp, synthetic construct
  source 1..20: mol_type = other DNA
accatattttcctaaccatc

SEQ ID NO: 233135 - DNA, 20 bp, synthetic construct
  source 1..20: mol_type = other DNA
taccatattttcctaaccat

SEQ ID NO: 233136 - DNA, 20 bp, synthetic construct
  source 1..20: mol_type = other DNA
gtaccatattttcctaacca

SEQ ID NO: 233137 - DNA, 20 bp, synthetic construct
  source 1..20: mol_type = other DNA
tgtaccatattttcctaacc

SEQ ID NO: 233138 - DNA, 20 bp, synthetic construct
  source 1..20: mol_type = other DNA
atgtaccatattttcctaac

SEQ ID NO: 233139 - DNA, 20 bp, synthetic construct
  source 1..20: mol_type = other DNA
tatgtaccatattttcctaa

SEQ ID NO: 233140 - DNA, 20 bp, synthetic construct
  source 1..20: mol_type = other DNA
atatgtaccatattttccta

SEQ ID NO: 233141 - DNA, 20 bp, synthetic construct
  source 1..20: mol_type = other DNA
catatgtaccatattttcct

SEQ ID NO: 233142 - DNA, 20 bp, synthetic construct
  source 1..20: mol_type = other DNA
acatatgtaccatattttcc

SEQ ID NO: 233143 - DNA, 20 bp, synthetic construct
  source 1..20: mol_type = other DNA
cacatatgtaccatattttc

SEQ ID NO: 233144 - DNA, 20 bp, synthetic construct
  source 1..20: mol_type = other DNA
ccacatatgtaccatatttt

SEQ ID NO: 233145 - DNA, 20 bp, synthetic construct
  source 1..20: mol_type = other DNA
tccacatatgtaccatattt

SEQ ID NO: 233146 - DNA, 20 bp, synthetic construct
  source 1..20: mol_type = other DNA
ttccacatatgtaccatatt

SEQ ID NO: 233147 - DNA, 20 bp, synthetic construct
  source 1..20: mol_type = other DNA
tttccacatatgtaccatat

SEQ ID NO: 233148 - DNA, 20 bp, synthetic construct
  source 1..20: mol_type = other DNA
ctttccacatatgtaccata

SEQ ID NO: 233149 - DNA, 20 bp, synthetic construct
  source 1..20: mol_type = other DNA
cctttccacatatgtaccat

SEQ ID NO: 233150 - DNA, 20 bp, synthetic construct
  source 1..20: mol_type = other DNA
tcctttccacatatgtacca

SEQ ID NO: 233151 - DNA, 20 bp, synthetic construct
  source 1..20: mol_type = other DNA
ttcctttccacatatgtacc

SEQ ID NO: 233152 - DNA, 20 bp, synthetic construct
  source 1..20: mol_type = other DNA
gttcctttccacatatgtac

SEQ ID NO: 233153 - DNA, 20 bp, synthetic construct
  source 1..20: mol_type = other DNA
tgttcctttccacatatgta

SEQ ID NO: 233154 - DNA, 20 bp, synthetic construct
  source 1..20: mol_type = other DNA
atgttcctttccacatatgt

SEQ ID NO: 233155 - DNA, 20 bp, synthetic construct
  source 1..20: mol_type = other DNA
aatgttcctttccacatatg

SEQ ID NO: 233156 - DNA, 20 bp, synthetic construct
  source 1..20: mol_type = other DNA
aaatgttcctttccacatat

SEQ ID NO: 233157 - DNA, 20 bp, synthetic construct
  source 1..20: mol_type = other DNA
caaatgttcctttccacata

SEQ ID NO: 233158 - DNA, 20 bp, synthetic construct
  source 1..20: mol_type = other DNA
ccaaatgttcctttccacat

SEQ ID NO: 233159 - DNA, 20 bp, synthetic construct
  source 1..20: mol_type = other DNA
accaaatgttcctttccaca

SEQ ID NO: 233160 - DNA, 20 bp, synthetic construct
  source 1..20: mol_type = other DNA
taccaaatgttcctttccac

SEQ ID NO: 233161 - DNA, 20 bp, synthetic construct
  source 1..20: mol_type = other DNA
ctaccaaatgttcctttcca

SEQ ID NO: 233162 - DNA, 20 bp, synthetic construct
  source 1..20: mol_type = other DNA
actaccaaatgttcctttcc

SEQ ID NO: 233163 - DNA, 20 bp, synthetic construct
  source 1..20: mol_type = other DNA
aactaccaaatgttcctttc

SEQ ID NO: 233164 - DNA, 20 bp, synthetic construct
  source 1..20: mol_type = other DNA
taactaccaaatgttccttt

SEQ ID NO: 233165 - DNA, 20 bp, synthetic construct
  source 1..20: mol_type = other DNA
ctaactaccaaatgttcctt

SEQ ID NO: 233166 - DNA, 20 bp, synthetic construct
  source 1..20: mol_type = other DNA
actaactaccaaatgttcct

SEQ ID NO: 233167 - DNA, 20 bp, synthetic construct
  source 1..20: mol_type = other DNA
cactaactaccaaatgttcc

SEQ ID NO: 233168 - DNA, 20 bp, synthetic construct
  source 1..20: mol_type = other DNA
gcactaactaccaaatgttc

SEQ ID NO: 233169 - DNA, 20 bp, synthetic construct
  source 1..20: mol_type = other DNA
ggcactaactaccaaatgtt

SEQ ID NO: 233170 - DNA, 20 bp, synthetic construct
  source 1..20: mol_type = other DNA
gggcactaactaccaaatgt

SEQ ID NO: 233171 - DNA, 20 bp, synthetic construct
  source 1..20: mol_type = other DNA
ggggcactaactaccaaatg

SEQ ID NO: 233172 - DNA, 20 bp, synthetic construct
  source 1..20: mol_type = other DNA
aggggcactaactaccaaat

SEQ ID NO: 233173 - DNA, 20 bp, synthetic construct
  source 1..20: mol_type = other DNA
caggggcactaactaccaaa

SEQ ID NO: 233174 - DNA, 20 bp, synthetic construct
  source 1..20: mol_type = other DNA
tcaggggcactaactaccaa

SEQ ID NO: 233175 - DNA, 20 bp, synthetic construct
  source 1..20: mol_type = other DNA
atcaggggcactaactacca

SEQ ID NO: 233176 - DNA, 20 bp, synthetic construct
  source 1..20: mol_type = other DNA
catcaggggcactaactacc

SEQ ID NO: 233177 - DNA, 20 bp, synthetic construct
  source 1..20: mol_type = other DNA
acatcaggggcactaactac

SEQ ID NO: 233178 - DNA, 20 bp, synthetic construct
  source 1..20: mol_type = other DNA
aacatcaggggcactaacta

SEQ ID NO: 233179 - DNA, 20 bp, synthetic construct
  source 1..20: mol_type = other DNA
aaacatcaggggcactaact

SEQ ID NO: 233180 - DNA, 20 bp, synthetic construct
  source 1..20: mol_type = other DNA
taaacatcaggggcactaac

SEQ ID NO: 233181 - DNA, 20 bp, synthetic construct
  source 1..20: mol_type = other DNA
gtaaacatcaggggcactaa

SEQ ID NO: 233182 - DNA, 20 bp, synthetic construct
  source 1..20: mol_type = other DNA
tgtaaacatcaggggcacta

SEQ ID NO: 233183 - DNA, 20 bp, synthetic construct
  source 1..20: mol_type = other DNA
ttgtaaacatcaggggcact

SEQ ID NO: 233184 - DNA, 20 bp, synthetic construct
  source 1..20: mol_type = other DNA
tttgtaaacatcaggggcac

SEQ ID NO: 233185 - DNA, 20 bp, synthetic construct
  source 1..20: mol_type = other DNA
ctttgtaaacatcaggggca

SEQ ID NO: 233186 - DNA, 20 bp, synthetic construct
  source 1..20: mol_type = other DNA
cctttgtaaacatcaggggc

SEQ ID NO: 233187 - DNA, 20 bp, synthetic construct
  source 1..20: mol_type = other DNA
gcctttgtaaacatcagggg

SEQ ID NO: 233188 - DNA, 20 bp, synthetic construct
  source 1..20: mol_type = other DNA
agcctttgtaaacatcaggg

SEQ ID NO: 233189 - DNA, 20 bp, synthetic construct
  source 1..20: mol_type = other DNA
aagcctttgtaaacatcagg

SEQ ID NO: 233190 - DNA, 20 bp, synthetic construct
  source 1..20: mol_type = other DNA
aaagcctttgtaaacatcag

SEQ ID NO: 233191 - DNA, 20 bp, synthetic construct
  source 1..20: mol_type = other DNA
aaaagcctttgtaaacatca

SEQ ID NO: 233192 - DNA, 20 bp, synthetic construct
  source 1..20: mol_type = other DNA
taaaagcctttgtaaacatc

SEQ ID NO: 233193 - DNA, 20 bp, synthetic construct
  source 1..20: mol_type = other DNA
ctaaaagcctttgtaaacat

SEQ ID NO: 233194 - DNA, 20 bp, synthetic construct
  source 1..20: mol_type = other DNA
actaaaagcctttgtaaaca

SEQ ID NO: 233195 - DNA, 20 bp, synthetic construct
  source 1..20: mol_type = other DNA
cactaaaagcctttgtaaac

SEQ ID NO: 233196 - DNA, 20 bp, synthetic construct
  source 1..20: mol_type = other DNA
tcactaaaagcctttgtaaa

SEQ ID NO: 233197 - DNA, 20 bp, synthetic construct
  source 1..20: mol_type = other DNA
gtcactaaaagcctttgtaa

SEQ ID NO: 233198 - DNA, 20 bp, synthetic construct
  source 1..20: mol_type = other DNA
ggtcactaaaagcctttgta

SEQ ID NO: 233199 - DNA, 20 bp, synthetic construct
  source 1..20: mol_type = other DNA
tggtcactaaaagcctttgt

SEQ ID NO: 233200 - DNA, 20 bp, synthetic construct
  source 1..20: mol_type = other DNA
ttggtcactaaaagcctttg

SEQ ID NO: 233201 - DNA, 20 bp, synthetic construct
  source 1..20: mol_type = other DNA
gttggtcactaaaagccttt

SEQ ID NO: 233202 - DNA, 20 bp, synthetic construct
  source 1..20: mol_type = other DNA
tgttggtcactaaaagcctt

SEQ ID NO: 233203 - DNA, 20 bp, synthetic construct
  source 1..20: mol_type = other DNA
ttgttggtcactaaaagcct

SEQ ID NO: 233204 - DNA, 20 bp, synthetic construct
  source 1..20: mol_type = other DNA
tttgttggtcactaaaagcc

SEQ ID NO: 233205 - DNA, 20 bp, synthetic construct
  source 1..20: mol_type = other DNA
atttgttggtcactaaaagc

SEQ ID NO: 233206 - DNA, 20 bp, synthetic construct
  source 1..20: mol_type = other DNA
catttgttggtcactaaaag

SEQ ID NO: 233207 - DNA, 20 bp, synthetic construct
  source 1..20: mol_type = other DNA
gcatttgttggtcactaaaa

SEQ ID NO: 233208 - DNA, 20 bp, synthetic construct
  source 1..20: mol_type = other DNA
agcatttgttggtcactaaa

SEQ ID NO: 233209 - DNA, 20 bp, synthetic construct
  source 1..20: mol_type = other DNA
gagcatttgttggtcactaa

SEQ ID NO: 233210 - DNA, 20 bp, synthetic construct
  source 1..20: mol_type = other DNA
tgagcatttgttggtcacta

SEQ ID NO: 233211 - DNA, 20 bp, synthetic construct
  source 1..20: mol_type = other DNA
atgagcatttgttggtcact

SEQ ID NO: 233212 - DNA, 20 bp, synthetic construct
  source 1..20: mol_type = other DNA
catgagcatttgttggtcac

SEQ ID NO: 233213 - DNA, 20 bp, synthetic construct
  source 1..20: mol_type = other DNA
gcatgagcatttgttggtca

SEQ ID NO: 233214 - DNA, 20 bp, synthetic construct
  source 1..20: mol_type = other DNA
agcatgagcatttgttggtc

SEQ ID NO: 233215 - DNA, 20 bp, synthetic construct
  source 1..20: mol_type = other DNA
tagcatgagcatttgttggt

SEQ ID NO: 233216 - DNA, 20 bp, synthetic construct
  source 1..20: mol_type = other DNA
atagcatgagcatttgttgg

SEQ ID NO: 233217 - DNA, 20 bp, synthetic construct
  source 1..20: mol_type = other DNA
tatagcatgagcatttgttg

SEQ ID NO: 233218 - DNA, 20 bp, synthetic construct
  source 1..20: mol_type = other DNA
ttatagcatgagcatttgtt

SEQ ID NO: 233219 - DNA, 20 bp, synthetic construct
  source 1..20: mol_type = other DNA
attatagcatgagcatttgt

SEQ ID NO: 233220 - DNA, 20 bp, synthetic construct
  source 1..20: mol_type = other DNA
gattatagcatgagcatttg

SEQ ID NO: 233221 - DNA, 20 bp, synthetic construct
  source 1..20: mol_type = other DNA
agattatagcatgagcattt

SEQ ID NO: 233222 - DNA, 20 bp, synthetic construct
  source 1..20: mol_type = other DNA
aagattatagcatgagcatt

SEQ ID NO: 233223 - DNA, 20 bp, synthetic construct
  source 1..20: mol_type = other DNA
taagattatagcatgagcat

SEQ ID NO: 233224 - DNA, 20 bp, synthetic construct
  source 1..20: mol_type = other DNA
ataagattatagcatgagca

SEQ ID NO: 233225 - DNA, 20 bp, synthetic construct
  source 1..20: mol_type = other DNA
cataagattatagcatgagc

SEQ ID NO: 233226 - DNA, 20 bp, synthetic construct
  source 1..20: mol_type = other DNA
acataagattatagcatgag

SEQ ID NO: 233227 - DNA, 20 bp, synthetic construct
  source 1..20: mol_type = other DNA
cacataagattatagcatga

SEQ ID NO: 233228 - DNA, 20 bp, synthetic construct
  source 1..20: mol_type = other DNA
tcacataagattatagcatg

SEQ ID NO: 233229 - DNA, 20 bp, synthetic construct
  source 1..20: mol_type = other DNA
ttcacataagattatagcat

SEQ ID NO: 233230 - DNA, 20 bp, synthetic construct
  source 1..20: mol_type = other DNA
tttcacataagattatagca

SEQ ID NO: 233231 - DNA, 20 bp, synthetic construct
  source 1..20: mol_type = other DNA
ttttcacataagattatagc

SEQ ID NO: 233232 - DNA, 20 bp, synthetic construct
  source 1..20: mol_type = other DNA
tttttcacataagattatag

SEQ ID NO: 233233 - DNA, 20 bp, synthetic construct
  source 1..20: mol_type = other DNA
ttttttcacataagattata

SEQ ID NO: 233234 - DNA, 20 bp, synthetic construct
  source 1..20: mol_type = other DNA
cttttttcacataagattat

SEQ ID NO: 233235 - DNA, 20 bp, synthetic construct
  source 1..20: mol_type = other DNA
gcttttttcacataagatta

SEQ ID NO: 233236 - DNA, 20 bp, synthetic construct
  source 1..20: mol_type = other DNA
tgcttttttcacataagatt

SEQ ID NO: 233237 - DNA, 20 bp, synthetic construct
  source 1..20: mol_type = other DNA
ttgcttttttcacataagat

SEQ ID NO: 233238 - DNA, 20 bp, synthetic construct
  source 1..20: mol_type = other DNA
cttgcttttttcacataaga

SEQ ID NO: 233239 - DNA, 20 bp, synthetic construct
  source 1..20: mol_type = other DNA
acttgcttttttcacataag

SEQ ID NO: 233240 - DNA, 20 bp, synthetic construct
  source 1..20: mol_type = other DNA
tacttgcttttttcacataa

SEQ ID NO: 233241 - DNA, 20 bp, synthetic construct
  source 1..20: mol_type = other DNA
ctacttgcttttttcacata

SEQ ID NO: 233242 - DNA, 20 bp, synthetic construct
  source 1..20: mol_type = other DNA
gctacttgcttttttcacat

SEQ ID NO: 233243 - DNA, 20 bp, synthetic construct
  source 1..20: mol_type = other DNA
tgctacttgcttttttcaca

SEQ ID NO: 233244 - DNA, 20 bp, synthetic construct
  source 1..20: mol_type = other DNA
atgctacttgcttttttcac

SEQ ID NO: 233245 - DNA, 20 bp, synthetic construct
  source 1..20: mol_type = other DNA
tatgctacttgcttttttca

SEQ ID NO: 233246 - DNA, 20 bp, synthetic construct
  source 1..20: mol_type = other DNA
ttatgctacttgcttttttc

SEQ ID NO: 233247 - DNA, 20 bp, synthetic construct
  source 1..20: mol_type = other DNA
attatgctacttgctttttt

SEQ ID NO: 233248 - DNA, 20 bp, synthetic construct
  source 1..20: mol_type = other DNA
aattatgctacttgcttttt

SEQ ID NO: 233249 - DNA, 20 bp, synthetic construct
  source 1..20: mol_type = other DNA
caattatgctacttgctttt

SEQ ID NO: 233250 - DNA, 20 bp, synthetic construct
  source 1..20: mol_type = other DNA
gcaattatgctacttgcttt

SEQ ID NO: 233251 - DNA, 20 bp, synthetic construct
  source 1..20: mol_type = other DNA
tgcaattatgctacttgctt

SEQ ID NO: 233252 - DNA, 20 bp, synthetic construct
  source 1..20: mol_type = other DNA
ttgcaattatgctacttgct

SEQ ID NO: 233253 - DNA, 20 bp, synthetic construct
  source 1..20: mol_type = other DNA
gttgcaattatgctacttgc

SEQ ID NO: 233254 - DNA, 20 bp, synthetic construct
  source 1..20: mol_type = other DNA
agttgcaattatgctacttg

SEQ ID NO: 233255 - DNA, 20 bp, synthetic construct
  source 1..20: mol_type = other DNA
tagttgcaattatgctactt

SEQ ID NO: 233256 - DNA, 20 bp, synthetic construct
  source 1..20: mol_type = other DNA
atagttgcaattatgctact

SEQ ID NO: 233257 - DNA, 20 bp, synthetic construct
  source 1..20: mol_type = other DNA
tatagttgcaattatgctac

SEQ ID NO: 233258 - DNA, 20 bp, synthetic construct
  source 1..20: mol_type = other DNA
atatagttgcaattatgcta

SEQ ID NO: 233259 - DNA, 20 bp, synthetic construct
  source 1..20: mol_type = other DNA
aatatagttgcaattatgct

SEQ ID NO: 233260 - DNA, 20 bp, synthetic construct
  source 1..20: mol_type = other DNA
aaatatagttgcaattatgc

SEQ ID NO: 233261 - DNA, 20 bp, synthetic construct
  source 1..20: mol_type = other DNA
aaaatatagttgcaattatg

SEQ ID NO: 233262 - DNA, 20 bp, synthetic construct
  source 1..20: mol_type = other DNA
aaaaatatagttgcaattat

SEQ ID NO: 233263 - DNA, 20 bp, synthetic construct
  source 1..20: mol_type = other DNA
taaaaatatagttgcaatta

SEQ ID NO: 233264 - DNA, 20 bp, synthetic construct
  source 1..20: mol_type = other DNA
ttaaaaatatagttgcaatt

SEQ ID NO: 233265 - DNA, 20 bp, synthetic construct
  source 1..20: mol_type = other DNA
attaaaaatatagttgcaat

SEQ ID NO: 233266 - DNA, 20 bp, synthetic construct
  source 1..20: mol_type = other DNA
cattaaaaatatagttgcaa

SEQ ID NO: 233267 - DNA, 20 bp, synthetic construct
  source 1..20: mol_type = other DNA
gcattaaaaatatagttgca

SEQ ID NO: 233268 - DNA, 20 bp, synthetic construct
  source 1..20: mol_type = other DNA
tgcattaaaaatatagttgc

SEQ ID NO: 233269 - DNA, 20 bp, synthetic construct
  source 1..20: mol_type = other DNA
atgcattaaaaatatagttg

SEQ ID NO: 233270 - DNA, 20 bp, synthetic construct
  source 1..20: mol_type = other DNA
tatgcattaaaaatatagtt

SEQ ID NO: 233271 - DNA, 20 bp, synthetic construct
  source 1..20: mol_type = other DNA
ctatgcattaaaaatatagt

SEQ ID NO: 233272 - DNA, 20 bp, synthetic construct
  source 1..20: mol_type = other DNA
tctatgcattaaaaatatag

SEQ ID NO: 233273 - DNA, 20 bp, synthetic construct
  source 1..20: mol_type = other DNA
ttctatgcattaaaaatata

SEQ ID NO: 233274 - DNA, 20 bp, synthetic construct
  source 1..20: mol_type = other DNA
attctatgcattaaaaatat

SEQ ID NO: 233275 - DNA, 20 bp, synthetic construct
  source 1..20: mol_type = other DNA
tattctatgcattaaaaata

SEQ ID NO: 233276 - DNA, 20 bp, synthetic construct
  source 1..20: mol_type = other DNA
ttattctatgcattaaaaat

SEQ ID NO: 233277 - DNA, 20 bp, synthetic construct
  source 1..20: mol_type = other DNA
tttattctatgcattaaaaa

SEQ ID NO: 233278 - DNA, 20 bp, synthetic construct
  source 1..20: mol_type = other DNA
ttttattctatgcattaaaa

SEQ ID NO: 233279 - DNA, 20 bp, synthetic construct
  source 1..20: mol_type = other DNA
cttttattctatgcattaaa

SEQ ID NO: 233280 - DNA, 20 bp, synthetic construct
  source 1..20: mol_type = other DNA
ccttttattctatgcattaa

SEQ ID NO: 233281 - DNA, 20 bp, synthetic construct
  source 1..20: mol_type = other DNA
gccttttattctatgcatta

SEQ ID NO: 233282 - DNA, 20 bp, synthetic construct
  source 1..20: mol_type = other DNA
agccttttattctatgcatt

SEQ ID NO: 233283 - DNA, 20 bp, synthetic construct
  source 1..20: mol_type = other DNA
tagccttttattctatgcat

SEQ ID NO: 233284 - DNA, 20 bp, synthetic construct
  source 1..20: mol_type = other DNA
ctagccttttattctatgca

SEQ ID NO: 233285 - DNA, 20 bp, synthetic construct
  source 1..20: mol_type = other DNA
tctagccttttattctatgc

SEQ ID NO: 233286 - DNA, 20 bp, synthetic construct
  source 1..20: mol_type = other DNA
ttctagccttttattctatg

SEQ ID NO: 233287 - DNA, 20 bp, synthetic construct
  source 1..20: mol_type = other DNA
cttctagccttttattctat

SEQ ID NO: 233288 - DNA, 20 bp, synthetic construct
  source 1..20: mol_type = other DNA
ccttctagccttttattcta

SEQ ID NO: 233289 - DNA, 20 bp, synthetic construct
  source 1..20: mol_type = other DNA
tccttctagccttttattct

SEQ ID NO: 233290 - DNA, 20 bp, synthetic construct
  source 1..20: mol_type = other DNA
ttccttctagccttttattc

SEQ ID NO: 233291 - DNA, 20 bp, synthetic construct
  source 1..20: mol_type = other DNA
tttccttctagccttttatt

SEQ ID NO: 233292 - DNA, 20 bp, synthetic construct
  source 1..20: mol_type = other DNA
atttccttctagccttttat

SEQ ID NO: 233293 - DNA, 20 bp, synthetic construct
  source 1..20: mol_type = other DNA
tatttccttctagcctttta

SEQ ID NO: 233294 - DNA, 20 bp, synthetic construct
  source 1..20: mol_type = other DNA
atatttccttctagcctttt

SEQ ID NO: 233295 - DNA, 20 bp, synthetic construct
  source 1..20: mol_type = other DNA
gatatttccttctagccttt

SEQ ID NO: 233296 - DNA, 20 bp, synthetic construct
  source 1..20: mol_type = other DNA
tgatatttccttctagcctt

SEQ ID NO: 233297 - DNA, 20 bp, synthetic construct
  source 1..20: mol_type = other DNA
gtgatatttccttctagcct

SEQ ID NO: 233298 - DNA, 20 bp, synthetic construct
  source 1..20: mol_type = other DNA
tgtgatatttccttctagcc

SEQ ID NO: 233299 - DNA, 20 bp, synthetic construct
  source 1..20: mol_type = other DNA
ctgtgatatttccttctagc

SEQ ID NO: 233300 - DNA, 20 bp, synthetic construct
  source 1..20: mol_type = other DNA
tctgtgatatttccttctag

SEQ ID NO: 233301 - DNA, 20 bp, synthetic construct
  source 1..20: mol_type = other DNA
atctgtgatatttccttcta

SEQ ID NO: 233302 - DNA, 20 bp, synthetic construct
  source 1..20: mol_type = other DNA
gatctgtgatatttccttct

SEQ ID NO: 233303 - DNA, 20 bp, synthetic construct
  source 1..20: mol_type = other DNA
ggatctgtgatatttccttc

SEQ ID NO: 233304 - DNA, 20 bp, synthetic construct
  source 1..20: mol_type = other DNA
aggatctgtgatatttcctt

SEQ ID NO: 233305 - DNA, 20 bp, synthetic construct
  source 1..20: mol_type = other DNA
aaggatctgtgatatttcct

SEQ ID NO: 233306 - DNA, 20 bp, synthetic construct
  source 1..20: mol_type = other DNA
caaggatctgtgatatttcc

SEQ ID NO: 233307 - DNA, 20 bp, synthetic construct
  source 1..20: mol_type = other DNA
tcaaggatctgtgatatttc

SEQ ID NO: 233308 - DNA, 20 bp, synthetic construct
  source 1..20: mol_type = other DNA
gtcaaggatctgtgatattt

SEQ ID NO: 233309 - DNA, 20 bp, synthetic construct
  source 1..20: mol_type = other DNA
tgtcaaggatctgtgatatt

SEQ ID NO: 233310 - DNA, 20 bp, synthetic construct
  source 1..20: mol_type = other DNA
atgtcaaggatctgtgatat

SEQ ID NO: 233311 - DNA, 20 bp, synthetic construct
  source 1..20: mol_type = other DNA
tatgtcaaggatctgtgata

SEQ ID NO: 233312 - DNA, 20 bp, synthetic construct
  source 1..20: mol_type = other DNA
gtatgtcaaggatctgtgat

SEQ ID NO: 233313 - DNA, 20 bp, synthetic construct
  source 1..20: mol_type = other DNA
tgtatgtcaaggatctgtga

SEQ ID NO: 233314 - DNA, 20 bp, synthetic construct
  source 1..20: mol_type = other DNA
atgtatgtcaaggatctgtg

SEQ ID NO: 233315 - DNA, 20 bp, synthetic construct
  source 1..20: mol_type = other DNA
aatgtatgtcaaggatctgt

SEQ ID NO: 233316 - DNA, 20 bp, synthetic construct
  source 1..20: mol_type = other DNA
gaatgtatgtcaaggatctg

SEQ ID NO: 233317 - DNA, 20 bp, synthetic construct
  source 1..20: mol_type = other DNA
ggaatgtatgtcaaggatct

SEQ ID NO: 233318 - DNA, 20 bp, synthetic construct
  source 1..20: mol_type = other DNA
gggaatgtatgtcaaggatc

SEQ ID NO: 233319 - DNA, 20 bp, synthetic construct
  source 1..20: mol_type = other DNA
tgggaatgtatgtcaaggat

SEQ ID NO: 233320 - DNA, 20 bp, synthetic construct
  source 1..20: mol_type = other DNA
ttgggaatgtatgtcaagga

SEQ ID NO: 233321 - DNA, 20 bp, synthetic construct
  source 1..20: mol_type = other DNA
tttgggaatgtatgtcaagg

SEQ ID NO: 233322 - DNA, 20 bp, synthetic construct
  source 1..20: mol_type = other DNA
gtttgggaatgtatgtcaag

SEQ ID NO: 233323 - DNA, 20 bp, synthetic construct
  source 1..20: mol_type = other DNA
ggtttgggaatgtatgtcaa

SEQ ID NO: 233324 - DNA, 20 bp, synthetic construct
  source 1..20: mol_type = other DNA
aggtttgggaatgtatgtca

SEQ ID NO: 233325 - DNA, 20 bp, synthetic construct
  source 1..20: mol_type = other DNA
aaggtttgggaatgtatgtc

SEQ ID NO: 233326 - DNA, 20 bp, synthetic construct
  source 1..20: mol_type = other DNA
aaaggtttgggaatgtatgt

SEQ ID NO: 233327 - DNA, 20 bp, synthetic construct
  source 1..20: mol_type = other DNA
caaaggtttgggaatgtatg

SEQ ID NO: 233328 - DNA, 20 bp, synthetic construct
  source 1..20: mol_type = other DNA
acaaaggtttgggaatgtat

SEQ ID NO: 233329 - DNA, 20 bp, synthetic construct
  source 1..20: mol_type = other DNA
tacaaaggtttgggaatgta

SEQ ID NO: 233330 - DNA, 20 bp, synthetic construct
  source 1..20: mol_type = other DNA
ttacaaaggtttgggaatgt

SEQ ID NO: 233331 - DNA, 20 bp, synthetic construct
  source 1..20: mol_type = other DNA
tttacaaaggtttgggaatg

SEQ ID NO: 233332 - DNA, 20 bp, synthetic construct
  source 1..20: mol_type = other DNA
atttacaaaggtttgggaat

SEQ ID NO: 233333 - DNA, 20 bp, synthetic construct
  source 1..20: mol_type = other DNA
gatttacaaaggtttgggaa

SEQ ID NO: 233334 - DNA, 20 bp, synthetic construct
  source 1..20: mol_type = other DNA
ggatttacaaaggtttggga

SEQ ID NO: 233335 - DNA, 20 bp, synthetic construct
  source 1..20: mol_type = other DNA
cggatttacaaaggtttggg

SEQ ID NO: 233336 - DNA, 20 bp, synthetic construct
  source 1..20: mol_type = other DNA
gcggatttacaaaggtttgg

SEQ ID NO: 233337 - DNA, 20 bp, synthetic construct
  source 1..20: mol_type = other DNA
cgcggatttacaaaggtttg

SEQ ID NO: 233338 - DNA, 20 bp, synthetic construct
  source 1..20: mol_type = other DNA
ccgcggatttacaaaggttt

SEQ ID NO: 233339 - DNA, 20 bp, synthetic construct
  source 1..20: mol_type = other DNA
tccgcggatttacaaaggtt

SEQ ID NO: 233340 - DNA, 20 bp, synthetic construct
  source 1..20: mol_type = other DNA
atccgcggatttacaaaggt

SEQ ID NO: 233341 - DNA, 20 bp, synthetic construct
  source 1..20: mol_type = other DNA
aatccgcggatttacaaagg

SEQ ID NO: 233342 - DNA, 20 bp, synthetic construct
  source 1..20: mol_type = other DNA
gaatccgcggatttacaaag

SEQ ID NO: 233343 - DNA, 20 bp, synthetic construct
  source 1..20: mol_type = other DNA
tgaatccgcggatttacaaa

SEQ ID NO: 233344 - DNA, 20 bp, synthetic construct
  source 1..20: mol_type = other DNA
atgaatccgcggatttacaa

SEQ ID NO: 233345 - DNA, 20 bp, synthetic construct
  source 1..20: mol_type = other DNA
catgaatccgcggatttaca

SEQ ID NO: 233346 - DNA, 20 bp, synthetic construct
  source 1..20: mol_type = other DNA
tcatgaatccgcggatttac

SEQ ID NO: 233347 - DNA, 20 bp, synthetic construct
  source 1..20: mol_type = other DNA
ttcatgaatccgcggattta

SEQ ID NO: 233348 - DNA, 20 bp, synthetic construct
  source 1..20: mol_type = other DNA
tttcatgaatccgcggattt

SEQ ID NO: 233349 - DNA, 20 bp, synthetic construct
  source 1..20: mol_type = other DNA
ttttcatgaatccgcggatt

SEQ ID NO: 233350 - DNA, 20 bp, synthetic construct
  source 1..20: mol_type = other DNA
gttttcatgaatccgcggat

SEQ ID NO: 233351 - DNA, 20 bp, synthetic construct
  source 1..20: mol_type = other DNA
tgttttcatgaatccgcgga

SEQ ID NO: 233352 - DNA, 20 bp, synthetic construct
  source 1..20: mol_type = other DNA
ctgttttcatgaatccgcgg

SEQ ID NO: 233353 - DNA, 20 bp, synthetic construct
  source 1..20: mol_type = other DNA
tctgttttcatgaatccgcg

SEQ ID NO: 233354 - DNA, 20 bp, synthetic construct
  source 1..20: mol_type = other DNA
gtctgttttcatgaatccgc

SEQ ID NO: 233355 - DNA, 20 bp, synthetic construct
  source 1..20: mol_type = other DNA
tgtctgttttcatgaatccg

SEQ ID NO: 233356 - DNA, 20 bp, synthetic construct
  source 1..20: mol_type = other DNA
gtgtctgttttcatgaatcc

SEQ ID NO: 233357 - DNA, 20 bp, synthetic construct
  source 1..20: mol_type = other DNA
tgtgtctgttttcatgaatc

SEQ ID NO: 233358 - DNA, 20 bp, synthetic construct
  source 1..20: mol_type = other DNA
atgtgtctgttttcatgaat

SEQ ID NO: 233359 - DNA, 20 bp, synthetic construct
  source 1..20: mol_type = other DNA
aatgtgtctgttttcatgaa

SEQ ID NO: 233360 - DNA, 20 bp, synthetic construct
  source 1..20: mol_type = other DNA
aaatgtgtctgttttcatga

SEQ ID NO: 233361 - DNA, 20 bp, synthetic construct
  source 1..20: mol_type = other DNA
caaatgtgtctgttttcatg

SEQ ID NO: 233362 - DNA, 20 bp, synthetic construct
  source 1..20: mol_type = other DNA
gcaaatgtgtctgttttcat

SEQ ID NO: 233363 - DNA, 20 bp, synthetic construct
  source 1..20: mol_type = other DNA
tgcaaatgtgtctgttttca

SEQ ID NO: 233364 - DNA, 20 bp, synthetic construct
  source 1..20: mol_type = other DNA
gtgcaaatgtgtctgttttc

SEQ ID NO: 233365 - DNA, 20 bp, synthetic construct
  source 1..20: mol_type = other DNA
tgtgcaaatgtgtctgtttt

SEQ ID NO: 233366 - DNA, 20 bp, synthetic construct
  source 1..20: mol_type = other DNA
ttgtgcaaatgtgtctgttt

SEQ ID NO: 233367 - DNA, 20 bp, synthetic construct
  source 1..20: mol_type = other DNA
cttgtgcaaatgtgtctgtt

SEQ ID NO: 233368 - DNA, 20 bp, synthetic construct
  source 1..20: mol_type = other DNA
acttgtgcaaatgtgtctgt

SEQ ID NO: 233369 - DNA, 20 bp, synthetic construct
  source 1..20: mol_type = other DNA
cacttgtgcaaatgtgtctg

SEQ ID NO: 233370 - DNA, 20 bp, synthetic construct
  source 1..20: mol_type = other DNA
gcacttgtgcaaatgtgtct

SEQ ID NO: 233371 - DNA, 20 bp, synthetic construct
  source 1..20: mol_type = other DNA
ggcacttgtgcaaatgtgtc

SEQ ID NO: 233372 - DNA, 20 bp, synthetic construct
  source 1..20: mol_type = other DNA
aggcacttgtgcaaatgtgt

SEQ ID NO: 233373 - DNA, 20 bp, synthetic construct
  source 1..20: mol_type = other DNA
caggcacttgtgcaaatgtg

SEQ ID NO: 233374 - DNA, 20 bp, synthetic construct
  source 1..20: mol_type = other DNA
tcaggcacttgtgcaaatgt

SEQ ID NO: 233375 - DNA, 20 bp, synthetic construct
  source 1..20: mol_type = other DNA
atcaggcacttgtgcaaatg

SEQ ID NO: 233376 - DNA, 20 bp, synthetic construct
  source 1..20: mol_type = other DNA
gatcaggcacttgtgcaaat

SEQ ID NO: 233377 - DNA, 20 bp, synthetic construct
  source 1..20: mol_type = other DNA
agatcaggcacttgtgcaaa

SEQ ID NO: 233378 - DNA, 20 bp, synthetic construct
  source 1..20: mol_type = other DNA
aagatcaggcacttgtgcaa

SEQ ID NO: 233379 - DNA, 20 bp, synthetic construct
  source 1..20: mol_type = other DNA
aaagatcaggcacttgtgca

SEQ ID NO: 233380 - DNA, 20 bp, synthetic construct
  source 1..20: mol_type = other DNA
aaaagatcaggcacttgtgc

SEQ ID NO: 233381 - DNA, 20 bp, synthetic construct
  source 1..20: mol_type = other DNA
gaaaagatcaggcacttgtg

SEQ ID NO: 233382 - DNA, 20 bp, synthetic construct
  source 1..20: mol_type = other DNA
agaaaagatcaggcacttgt

SEQ ID NO: 233383 - DNA, 20 bp, synthetic construct
  source 1..20: mol_type = other DNA
cagaaaagatcaggcacttg

SEQ ID NO: 233384 - DNA, 20 bp, synthetic construct
  source 1..20: mol_type = other DNA
acagaaaagatcaggcactt

SEQ ID NO: 233385 - DNA, 20 bp, synthetic construct
  source 1..20: mol_type = other DNA
aacagaaaagatcaggcact

SEQ ID NO: 233386 - DNA, 20 bp, synthetic construct
  source 1..20: mol_type = other DNA
taacagaaaagatcaggcac

SEQ ID NO: 233387 - DNA, 20 bp, synthetic construct
  source 1..20: mol_type = other DNA
ataacagaaaagatcaggca

SEQ ID NO: 233388 - DNA, 20 bp, synthetic construct
  source 1..20: mol_type = other DNA
tataacagaaaagatcaggc

SEQ ID NO: 233389 - DNA, 20 bp, synthetic construct
  source 1..20: mol_type = other DNA
gtataacagaaaagatcagg

SEQ ID NO: 233390 - DNA, 20 bp, synthetic construct
  source 1..20: mol_type = other DNA
tgtataacagaaaagatcag

SEQ ID NO: 233391 - DNA, 20 bp, synthetic construct
  source 1..20: mol_type = other DNA
atgtataacagaaaagatca

SEQ ID NO: 233392 - DNA, 20 bp, synthetic construct
  source 1..20: mol_type = other DNA
aatgtataacagaaaagatc

SEQ ID NO: 233393 - DNA, 20 bp, synthetic construct
  source 1..20: mol_type = other DNA
gaatgtataacagaaaagat

SEQ ID NO: 233394 - DNA, 20 bp, synthetic construct
  source 1..20: mol_type = other DNA
tgaatgtataacagaaaaga

SEQ ID NO: 233395 - DNA, 20 bp, synthetic construct
  source 1..20: mol_type = other DNA
atgaatgtataacagaaaag

SEQ ID NO: 233396 - DNA, 20 bp, synthetic construct
  source 1..20: mol_type = other DNA
aatgaatgtataacagaaaa

SEQ ID NO: 233397 - DNA, 20 bp, synthetic construct
  source 1..20: mol_type = other DNA
taatgaatgtataacagaaa

SEQ ID NO: 233398 - DNA, 20 bp, synthetic construct
  source 1..20: mol_type = other DNA
ctaatgaatgtataacagaa

SEQ ID NO: 233399 - DNA, 20 bp, synthetic construct
  source 1..20: mol_type = other DNA
tctaatgaatgtataacaga

SEQ ID NO: 233400 - DNA, 20 bp, synthetic construct
  source 1..20: mol_type = other DNA
ttctaatgaatgtataacag

SEQ ID NO: 233401 - DNA, 20 bp, synthetic construct
  source 1..20: mol_type = other DNA
cttctaatgaatgtataaca

SEQ ID NO: 233402 - DNA, 20 bp, synthetic construct
  source 1..20: mol_type = other DNA
acttctaatgaatgtataac

SEQ ID NO: 233403 - DNA, 20 bp, synthetic construct
  source 1..20: mol_type = other DNA
gacttctaatgaatgtataa

SEQ ID NO: 233404 - DNA, 20 bp, synthetic construct
  source 1..20: mol_type = other DNA
tgacttctaatgaatgtata

SEQ ID NO: 233405 - DNA, 20 bp, synthetic construct
  source 1..20: mol_type = other DNA
ttgacttctaatgaatgtat

SEQ ID NO: 233406 - DNA, 20 bp, synthetic construct
  source 1..20: mol_type = other DNA
cttgacttctaatgaatgta

SEQ ID NO: 233407 - DNA, 20 bp, synthetic construct
  source 1..20: mol_type = other DNA
gcttgacttctaatgaatgt

SEQ ID NO: 233408 - DNA, 20 bp, synthetic construct
  source 1..20: mol_type = other DNA
ggcttgacttctaatgaatg

SEQ ID NO: 233409 - DNA, 20 bp, synthetic construct
  source 1..20: mol_type = other DNA
gggcttgacttctaatgaat

SEQ ID NO: 233410 - DNA, 20 bp, synthetic construct
  source 1..20: mol_type = other DNA
agggcttgacttctaatgaa

SEQ ID NO: 233411 - DNA, 20 bp, synthetic construct
  source 1..20: mol_type = other DNA
cagggcttgacttctaatga

SEQ ID NO: 233412 - DNA, 20 bp, synthetic construct
  source 1..20: mol_type = other DNA
ccagggcttgacttctaatg

SEQ ID NO: 233413 - DNA, 20 bp, synthetic construct
  source 1..20: mol_type = other DNA
accagggcttgacttctaat

SEQ ID NO: 233414 - DNA, 20 bp, synthetic construct
  source 1..20: mol_type = other DNA
caccagggcttgacttctaa

SEQ ID NO: 233415 - DNA, 20 bp, synthetic construct
  source 1..20: mol_type = other DNA
gcaccagggcttgacttcta

SEQ ID NO: 233416 - DNA, 20 bp, synthetic construct
  source 1..20: mol_type = other DNA
ggcaccagggcttgacttct

SEQ ID NO: 233417 - DNA, 20 bp, synthetic construct
  source 1..20: mol_type = other DNA
tggcaccagggcttgacttc

SEQ ID NO: 233418 - DNA, 20 bp, synthetic construct
  source 1..20: mol_type = other DNA
gtggcaccagggcttgactt

SEQ ID NO: 233419 - DNA, 20 bp, synthetic construct
  source 1..20: mol_type = other DNA
tgtggcaccagggcttgact

SEQ ID NO: 233420 - DNA, 20 bp, synthetic construct
  source 1..20: mol_type = other DNA
ttgtggcaccagggcttgac

SEQ ID NO: 233421 - DNA, 20 bp, synthetic construct
  source 1..20: mol_type = other DNA
tttgtggcaccagggcttga

SEQ ID NO: 233422 - DNA, 20 bp, synthetic construct
  source 1..20: mol_type = other DNA
ctttgtggcaccagggcttg

SEQ ID NO: 233423 - DNA, 20 bp, synthetic construct
  source 1..20: mol_type = other DNA
actttgtggcaccagggctt

SEQ ID NO: 233424 - DNA, 20 bp, synthetic construct
  source 1..20: mol_type = other DNA
tactttgtggcaccagggct

SEQ ID NO: 233425 - DNA, 20 bp, synthetic construct
  source 1..20: mol_type = other DNA
atactttgtggcaccagggc

SEQ ID NO: 233426 - DNA, 20 bp, synthetic construct
  source 1..20: mol_type = other DNA
gatactttgtggcaccaggg

SEQ ID NO: 233427 - DNA, 20 bp, synthetic construct
  source 1..20: mol_type = other DNA
agatactttgtggcaccagg

SEQ ID NO: 233428 - DNA, 20 bp, synthetic construct
  source 1..20: mol_type = other DNA
cagatactttgtggcaccag

SEQ ID NO: 233429 - DNA, 20 bp, synthetic construct
  source 1..20: mol_type = other DNA
gcagatactttgtggcacca

SEQ ID NO: 233430 - DNA, 20 bp, synthetic construct
  source 1..20: mol_type = other DNA
ggcagatactttgtggcacc

SEQ ID NO: 233431 - DNA, 20 bp, synthetic construct
  source 1..20: mol_type = other DNA
aggcagatactttgtggcac

SEQ ID NO: 233432 - DNA, 20 bp, synthetic construct
  source 1..20: mol_type = other DNA
aaggcagatactttgtggca

SEQ ID NO: 233433 - DNA, 20 bp, synthetic construct
  source 1..20: mol_type = other DNA
aaaggcagatactttgtggc

SEQ ID NO: 233434 - DNA, 20 bp, synthetic construct
  source 1..20: mol_type = other DNA
aaaaggcagatactttgtgg

SEQ ID NO: 233435 - DNA, 20 bp, synthetic construct
  source 1..20: mol_type = other DNA
gaaaaggcagatactttgtg

SEQ ID NO: 233436 - DNA, 20 bp, synthetic construct
  source 1..20: mol_type = other DNA
tgaaaaggcagatactttgt

SEQ ID NO: 233437 - DNA, 20 bp, synthetic construct
  source 1..20: mol_type = other DNA
ttgaaaaggcagatactttg

SEQ ID NO: 233438 - DNA, 20 bp, synthetic construct
  source 1..20: mol_type = other DNA
tttgaaaaggcagatacttt

SEQ ID NO: 233439 - DNA, 20 bp, synthetic construct
  source 1..20: mol_type = other DNA
atttgaaaaggcagatactt

SEQ ID NO: 233440 - DNA, 20 bp, synthetic construct
  source 1..20: mol_type = other DNA
catttgaaaaggcagatact

SEQ ID NO: 233441 - DNA, 20 bp, synthetic construct
  source 1..20: mol_type = other DNA
acatttgaaaaggcagatac

SEQ ID NO: 233442 - DNA, 20 bp, synthetic construct
  source 1..20: mol_type = other DNA
cacatttgaaaaggcagata

SEQ ID NO: 233443 - DNA, 20 bp, synthetic construct
  source 1..20: mol_type = other DNA
tcacatttgaaaaggcagat

SEQ ID NO: 233444 - DNA, 20 bp, synthetic construct
  source 1..20: mol_type = other DNA
atcacatttgaaaaggcaga

SEQ ID NO: 233445 - DNA, 20 bp, synthetic construct
  source 1..20: mol_type = other DNA
gatcacatttgaaaaggcag

SEQ ID NO: 233446 - DNA, 20 bp, synthetic construct
  source 1..20: mol_type = other DNA
tgatcacatttgaaaaggca

SEQ ID NO: 233447 - DNA, 20 bp, synthetic construct
  source 1..20: mol_type = other DNA
ctgatcacatttgaaaaggc

SEQ ID NO: 233448 - DNA, 20 bp, synthetic construct
  source 1..20: mol_type = other DNA
tctgatcacatttgaaaagg

SEQ ID NO: 233449 - DNA, 20 bp, synthetic construct
  source 1..20: mol_type = other DNA
ttctgatcacatttgaaaag

SEQ ID NO: 233450 - DNA, 20 bp, synthetic construct
  source 1..20: mol_type = other DNA
attctgatcacatttgaaaa

SEQ ID NO: 233451 - DNA, 20 bp, synthetic construct
  source 1..20: mol_type = other DNA
cattctgatcacatttgaaa

SEQ ID NO: 233452 - DNA, 20 bp, synthetic construct
  source 1..20: mol_type = other DNA
acattctgatcacatttgaa

SEQ ID NO: 233453 - DNA, 20 bp, synthetic construct
  source 1..20: mol_type = other DNA
aacattctgatcacatttga

SEQ ID NO: 233454 - DNA, 20 bp, synthetic construct
  source 1..20: mol_type = other DNA
gaacattctgatcacatttg

SEQ ID NO: 233455 - DNA, 20 bp, synthetic construct
  source 1..20: mol_type = other DNA
agaacattctgatcacattt

SEQ ID NO: 233456 - DNA, 20 bp, synthetic construct
  source 1..20: mol_type = other DNA
gagaacattctgatcacatt

SEQ ID NO: 233457 - DNA, 20 bp, synthetic construct
  source 1..20: mol_type = other DNA
agagaacattctgatcacat

SEQ ID NO: 233458 - DNA, 20 bp, synthetic construct
  source 1..20: mol_type = other DNA
aagagaacattctgatcaca

SEQ ID NO: 233459 - DNA, 20 bp, synthetic construct
  source 1..20: mol_type = other DNA
aaagagaacattctgatcac

SEQ ID NO: 233460 - DNA, 20 bp, synthetic construct
  source 1..20: mol_type = other DNA
aaaagagaacattctgatca

SEQ ID NO: 233461 - DNA, 20 bp, synthetic construct
  source 1..20: mol_type = other DNA
caaaagagaacattctgatc

SEQ ID NO: 233462 - DNA, 20 bp, synthetic construct
  source 1..20: mol_type = other DNA
gcaaaagagaacattctgat

SEQ ID NO: 233463 - DNA, 20 bp, synthetic construct
  source 1..20: mol_type = other DNA
agcaaaagagaacattctga

SEQ ID NO: 233464 - DNA, 20 bp, synthetic construct
  source 1..20: mol_type = other DNA
aagcaaaagagaacattctg

SEQ ID NO: 233465 - DNA, 20 bp, synthetic construct
  source 1..20: mol_type = other DNA
gaagcaaaagagaacattct

SEQ ID NO: 233466 - DNA, 20 bp, synthetic construct
  source 1..20: mol_type = other DNA
tgaagcaaaagagaacattc

SEQ ID NO: 233467 - DNA, 20 bp, synthetic construct
  source 1..20: mol_type = other DNA
ttgaagcaaaagagaacatt

SEQ ID NO: 233468 - DNA, 20 bp, synthetic construct
  source 1..20: mol_type = other DNA
cttgaagcaaaagagaacat

SEQ ID NO: 233469 - DNA, 20 bp, synthetic construct
  source 1..20: mol_type = other DNA
ccttgaagcaaaagagaaca

SEQ ID NO: 233470 - DNA, 20 bp, synthetic construct
  source 1..20: mol_type = other DNA
gccttgaagcaaaagagaac

SEQ ID NO: 233471 - DNA, 20 bp, synthetic construct
  source 1..20: mol_type = other DNA
ggccttgaagcaaaagagaa

SEQ ID NO: 233472 - DNA, 20 bp, synthetic construct
  source 1..20: mol_type = other DNA
tggccttgaagcaaaagaga

SEQ ID NO: 233473 - DNA, 20 bp, synthetic construct
  source 1..20: mol_type = other DNA
atggccttgaagcaaaagag

SEQ ID NO: 233474 - DNA, 20 bp, synthetic construct
  source 1..20: mol_type = other DNA
aatggccttgaagcaaaaga

SEQ ID NO: 233475 - DNA, 20 bp, synthetic construct
  source 1..20: mol_type = other DNA
aaatggccttgaagcaaaag

SEQ ID NO: 233476 - DNA, 20 bp, synthetic construct
  source 1..20: mol_type = other DNA
aaaatggccttgaagcaaaa

SEQ ID NO: 233477 - DNA, 20 bp, synthetic construct
  source 1..20: mol_type = other DNA
aaaaatggccttgaagcaaa

SEQ ID NO: 233478 - DNA, 20 bp, synthetic construct
  source 1..20: mol_type = other DNA
gaaaaatggccttgaagcaa

SEQ ID NO: 233479 - DNA, 20 bp, synthetic construct
  source 1..20: mol_type = other DNA
tgaaaaatggccttgaagca

SEQ ID NO: 233480 - DNA, 20 bp, synthetic construct
  source 1..20: mol_type = other DNA
gtgaaaaatggccttgaagc

SEQ ID NO: 233481 - DNA, 20 bp, synthetic construct
  source 1..20: mol_type = other DNA
cgtgaaaaatggccttgaag

SEQ ID NO: 233482 - DNA, 20 bp, synthetic construct
  source 1..20: mol_type = other DNA
tcgtgaaaaatggccttgaa

SEQ ID NO: 233483 - DNA, 20 bp, synthetic construct
  source 1..20: mol_type = other DNA
ttcgtgaaaaatggccttga

SEQ ID NO: 233484 - DNA, 20 bp, synthetic construct
  source 1..20: mol_type = other DNA
cttcgtgaaaaatggccttg

SEQ ID NO: 233485 - DNA, 20 bp, synthetic construct
  source 1..20: mol_type = other DNA
gcttcgtgaaaaatggcctt

SEQ ID NO: 233486 - DNA, 20 bp, synthetic construct
  source 1..20: mol_type = other DNA
tgcttcgtgaaaaatggcct

SEQ ID NO: 233487 - DNA, 20 bp, synthetic construct
  source 1..20: mol_type = other DNA
ctgcttcgtgaaaaatggcc

SEQ ID NO: 233488 - DNA, 20 bp, synthetic construct
  source 1..20: mol_type = other DNA
actgcttcgtgaaaaatggc

SEQ ID NO: 233489 - DNA, 20 bp, synthetic construct
  source 1..20: mol_type = other DNA
cactgcttcgtgaaaaatgg

SEQ ID NO: 233490 - DNA, 20 bp, synthetic construct
  source 1..20: mol_type = other DNA
ccactgcttcgtgaaaaatg

SEQ ID NO: 233491 - DNA, 20 bp, synthetic construct
  source 1..20: mol_type = other DNA
gccactgcttcgtgaaaaat

SEQ ID NO: 233492 - DNA, 20 bp, synthetic construct
  source 1..20: mol_type = other DNA
tgccactgcttcgtgaaaaa

SEQ ID NO: 233493 - DNA, 20 bp, synthetic construct
  source 1..20: mol_type = other DNA
atgccactgcttcgtgaaaa

SEQ ID NO: 233494 - DNA, 20 bp, synthetic construct
  source 1..20: mol_type = other DNA
aatgccactgcttcgtgaaa

SEQ ID NO: 233495 - DNA, 20 bp, synthetic construct
  source 1..20: mol_type = other DNA
aaatgccactgcttcgtgaa

SEQ ID NO: 233496 - DNA, 20 bp, synthetic construct
  source 1..20: mol_type = other DNA
aaaatgccactgcttcgtga

SEQ ID NO: 233497 - DNA, 20 bp, synthetic construct
  source 1..20: mol_type = other DNA
aaaaatgccactgcttcgtg

SEQ ID NO: 233498 - DNA, 20 bp, synthetic construct
  source 1..20: mol_type = other DNA
caaaaatgccactgcttcgt

SEQ ID NO: 233499 - DNA, 20 bp, synthetic construct
  source 1..20: mol_type = other DNA
gcaaaaatgccactgcttcg

SEQ ID NO: 233500 - DNA, 20 bp, synthetic construct
  source 1..20: mol_type = other DNA
ggcaaaaatgccactgcttc

SEQ ID NO: 233501 - DNA, 20 bp, synthetic construct
  source 1..20: mol_type = other DNA
aggcaaaaatgccactgctt

SEQ ID NO: 233502 - DNA, 20 bp, synthetic construct
  source 1..20: mol_type = other DNA
gaggcaaaaatgccactgct

SEQ ID NO: 233503 - DNA, 20 bp, synthetic construct
  source 1..20: mol_type = other DNA
agaggcaaaaatgccactgc

SEQ ID NO: 233504 - DNA, 20 bp, synthetic construct
  source 1..20: mol_type = other DNA
aagaggcaaaaatgccactg

SEQ ID NO: 233505 - DNA, 20 bp, synthetic construct
  source 1..20: mol_type = other DNA
gaagaggcaaaaatgccact

SEQ ID NO: 233506 - DNA, 20 bp, synthetic construct
  source 1..20: mol_type = other DNA
tgaagaggcaaaaatgccac

SEQ ID NO: 233507 - DNA, 20 bp, synthetic construct
  source 1..20: mol_type = other DNA
atgaagaggcaaaaatgcca

SEQ ID NO: 233508 - DNA, 20 bp, synthetic construct
  source 1..20: mol_type = other DNA
gatgaagaggcaaaaatgcc

SEQ ID NO: 233509 - DNA, 20 bp, synthetic construct
  source 1..20: mol_type = other DNA
tgatgaagaggcaaaaatgc

SEQ ID NO: 233510 - DNA, 20 bp, synthetic construct
  source 1..20: mol_type = other DNA
ctgatgaagaggcaaaaatg

SEQ ID NO: 233511 - DNA, 20 bp, synthetic construct
  source 1..20: mol_type = other DNA
tctgatgaagaggcaaaaat

SEQ ID NO: 233512 - DNA, 20 bp, synthetic construct
  source 1..20: mol_type = other DNA
ctctgatgaagaggcaaaaa

SEQ ID NO: 233513 - DNA, 20 bp, synthetic construct
  source 1..20: mol_type = other DNA
actctgatgaagaggcaaaa

SEQ ID NO: 233514 - DNA, 20 bp, synthetic construct
  source 1..20: mol_type = other DNA
gactctgatgaagaggcaaa

SEQ ID NO: 233515 - DNA, 20 bp, synthetic construct
  source 1..20: mol_type = other DNA
tgactctgatgaagaggcaa

SEQ ID NO: 233516 - DNA, 20 bp, synthetic construct
  source 1..20: mol_type = other DNA
gtgactctgatgaagaggca

SEQ ID NO: 233517 - DNA, 20 bp, synthetic construct
  source 1..20: mol_type = other DNA
ggtgactctgatgaagaggc

SEQ ID NO: 233518 - DNA, 20 bp, synthetic construct
  source 1..20: mol_type = other DNA
cggtgactctgatgaagagg

SEQ ID NO: 233519 - DNA, 20 bp, synthetic construct
  source 1..20: mol_type = other DNA
acggtgactctgatgaagag

SEQ ID NO: 233520 - DNA, 20 bp, synthetic construct
  source 1..20: mol_type = other DNA
cacggtgactctgatgaaga

SEQ ID NO: 233521 - DNA, 20 bp, synthetic construct
  source 1..20: mol_type = other DNA
acacggtgactctgatgaag

SEQ ID NO: 233522 - DNA, 20 bp, synthetic construct
  source 1..20: mol_type = other DNA
cacacggtgactctgatgaa

SEQ ID NO: 233523 - DNA, 20 bp, synthetic construct
  source 1..20: mol_type = other DNA
gcacacggtgactctgatga

SEQ ID NO: 233524 - DNA, 20 bp, synthetic construct
  source 1..20: mol_type = other DNA
ggcacacggtgactctgatg

SEQ ID NO: 233525 - DNA, 20 bp, synthetic construct
  source 1..20: mol_type = other DNA
gggcacacggtgactctgat

SEQ ID NO: 233526 - DNA, 20 bp, synthetic construct
  source 1..20: mol_type = other DNA
agggcacacggtgactctga

SEQ ID NO: 233527 - DNA, 20 bp, synthetic construct
  source 1..20: mol_type = other DNA
cagggcacacggtgactctg

SEQ ID NO: 233528 - DNA, 20 bp, synthetic construct
  source 1..20: mol_type = other DNA
ccagggcacacggtgactct

SEQ ID NO: 233529 - DNA, 20 bp, synthetic construct
  source 1..20: mol_type = other DNA
tccagggcacacggtgactc

SEQ ID NO: 233530 - DNA, 20 bp, synthetic construct
  source 1..20: mol_type = other DNA
ctccagggcacacggtgact

SEQ ID NO: 233531 - DNA, 20 bp, synthetic construct
  source 1..20: mol_type = other DNA
cctccagggcacacggtgac

SEQ ID NO: 233532 - DNA, 20 bp, synthetic construct
  source 1..20: mol_type = other DNA
tcctccagggcacacggtga

SEQ ID NO: 233533 - DNA, 20 bp, synthetic construct
  source 1..20: mol_type = other DNA
gtcctccagggcacacggtg

SEQ ID NO: 233534 - DNA, 20 bp, synthetic construct
  source 1..20: mol_type = other DNA
agtcctccagggcacacggt

SEQ ID NO: 233535 - DNA, 20 bp, synthetic construct
  source 1..20: mol_type = other DNA
cagtcctccagggcacacgg

SEQ ID NO: 233536 - DNA, 20 bp, synthetic construct
  source 1..20: mol_type = other DNA
tcagtcctccagggcacacg

SEQ ID NO: 233537 - DNA, 20 bp, synthetic construct
  source 1..20: mol_type = other DNA
ctcagtcctccagggcacac

SEQ ID NO: 233538 - DNA, 20 bp, synthetic construct
  source 1..20: mol_type = other DNA
tctcagtcctccagggcaca

SEQ ID NO: 233539 - DNA, 20 bp, synthetic construct
  source 1..20: mol_type = other DNA
ttctcagtcctccagggcac

SEQ ID NO: 233540 - DNA, 20 bp, synthetic construct
  source 1..20: mol_type = other DNA
gttctcagtcctccagggca

SEQ ID NO: 233541 - DNA, 20 bp, synthetic construct
  source 1..20: mol_type = other DNA
tgttctcagtcctccagggc

SEQ ID NO: 233542 - DNA, 20 bp, synthetic construct
  source 1..20: mol_type = other DNA
ctgttctcagtcctccaggg

SEQ ID NO: 233543 - DNA, 20 bp, synthetic construct
  source 1..20: mol_type = other DNA
gctgttctcagtcctccagg

SEQ ID NO: 233544 - DNA, 20 bp, synthetic construct
  source 1..20: mol_type = other DNA
tgctgttctcagtcctccag

SEQ ID NO: 233545 - DNA, 20 bp, synthetic construct
  source 1..20: mol_type = other DNA
ctgctgttctcagtcctcca

SEQ ID NO: 233546 - DNA, 20 bp, synthetic construct
  source 1..20: mol_type = other DNA
tctgctgttctcagtcctcc

SEQ ID NO: 233547 - DNA, 20 bp, synthetic construct
  source 1..20: mol_type = other DNA
ctctgctgttctcagtcctc

SEQ ID NO: 233548 - DNA, 20 bp, synthetic construct
  source 1..20: mol_type = other DNA
gctctgctgttctcagtcct

SEQ ID NO: 233549 - DNA, 20 bp, synthetic construct
  source 1..20: mol_type = other DNA
ggctctgctgttctcagtcc

SEQ ID NO: 233550 - DNA, 20 bp, synthetic construct
  source 1..20: mol_type = other DNA
cggctctgctgttctcagtc

SEQ ID NO: 233551 - DNA, 20 bp, synthetic construct
  source 1..20: mol_type = other DNA
acggctctgctgttctcagt

SEQ ID NO: 233552 - DNA, 20 bp, synthetic construct
  source 1..20: mol_type = other DNA
aacggctctgctgttctcag

SEQ ID NO: 233553 - DNA, 20 bp, synthetic construct
  source 1..20: mol_type = other DNA
aaacggctctgctgttctca

SEQ ID NO: 233554 - DNA, 20 bp, synthetic construct
  source 1..20: mol_type = other DNA
aaaacggctctgctgttctc

SEQ ID NO: 233555 - DNA, 20 bp, synthetic construct
  source 1..20: mol_type = other DNA
taaaacggctctgctgttct

SEQ ID NO: 233556 - DNA, 20 bp, synthetic construct
  source 1..20: mol_type = other DNA
ctaaaacggctctgctgttc

SEQ ID NO: 233557 - DNA, 20 bp, synthetic construct
  source 1..20: mol_type = other DNA
cctaaaacggctctgctgtt

SEQ ID NO: 233558 - DNA, 20 bp, synthetic construct
  source 1..20: mol_type = other DNA
tcctaaaacggctctgctgt

SEQ ID NO: 233559 - DNA, 20 bp, synthetic construct
  source 1..20: mol_type = other DNA
atcctaaaacggctctgctg

SEQ ID NO: 233560 - DNA, 20 bp, synthetic construct
  source 1..20: mol_type = other DNA
catcctaaaacggctctgct

SEQ ID NO: 233561 - DNA, 20 bp, synthetic construct
  source 1..20: mol_type = other DNA
ccatcctaaaacggctctgc

SEQ ID NO: 233562 - DNA, 20 bp, synthetic construct
  source 1..20: mol_type = other DNA
cccatcctaaaacggctctg

SEQ ID NO: 233563 - DNA, 20 bp, synthetic construct
  source 1..20: mol_type = other DNA
tcccatcctaaaacggctct

SEQ ID NO: 233564 - DNA, 20 bp, synthetic construct
  source 1..20: mol_type = other DNA
gtcccatcctaaaacggctc

SEQ ID NO: 233565 - DNA, 20 bp, synthetic construct
  source 1..20: mol_type = other DNA
tgtcccatcctaaaacggct

SEQ ID NO: 233566 - DNA, 20 bp, synthetic construct
  source 1..20: mol_type = other DNA
ctgtcccatcctaaaacggc

SEQ ID NO: 233567 - DNA, 20 bp, synthetic construct
  source 1..20: mol_type = other DNA
cctgtcccatcctaaaacgg

SEQ ID NO: 233568 - DNA, 20 bp, synthetic construct
  source 1..20: mol_type = other DNA
ccctgtcccatcctaaaacg

SEQ ID NO: 233569 - DNA, 20 bp, synthetic construct
  source 1..20: mol_type = other DNA
gccctgtcccatcctaaaac

SEQ ID NO: 233570 - DNA, 20 bp, synthetic construct
  source 1..20: mol_type = other DNA
tgccctgtcccatcctaaaa

SEQ ID NO: 233571 - DNA, 20 bp, synthetic construct
  source 1..20: mol_type = other DNA
ctgccctgtcccatcctaaa

SEQ ID NO: 233572 - DNA, 20 bp, synthetic construct
  source 1..20: mol_type = other DNA
gctgccctgtcccatcctaa

SEQ ID NO: 233573 - DNA, 20 bp, synthetic construct
  source 1..20: mol_type = other DNA
ggctgccctgtcccatccta

SEQ ID NO: 233574 - DNA, 20 bp, synthetic construct
  source 1..20: mol_type = other DNA
tggctgccctgtcccatcct

SEQ ID NO: 233575 - DNA, 20 bp, synthetic construct
  source 1..20: mol_type = other DNA
ctggctgccctgtcccatcc

SEQ ID NO: 233576 - DNA, 20 bp, synthetic construct
  source 1..20: mol_type = other DNA
cctggctgccctgtcccatc

SEQ ID NO: 233577 - DNA, 20 bp, synthetic construct
  source 1..20: mol_type = other DNA
tcctggctgccctgtcccat

SEQ ID NO: 233578 - DNA, 20 bp, synthetic construct
  source 1..20: mol_type = other DNA
ctcctggctgccctgtccca

SEQ ID NO: 233579 - DNA, 20 bp, synthetic construct
  source 1..20: mol_type = other DNA
cctcctggctgccctgtccc

SEQ ID NO: 233580 - DNA, 20 bp, synthetic construct
  source 1..20: mol_type = other DNA
tcctcctggctgccctgtcc

SEQ ID NO: 233581 - DNA, 20 bp, synthetic construct
  source 1..20: mol_type = other DNA
atcctcctggctgccctgtc

SEQ ID NO: 233582 - DNA, 20 bp, synthetic construct
  source 1..20: mol_type = other DNA
aatcctcctggctgccctgt

SEQ ID NO: 233583 - DNA, 20 bp, synthetic construct
  source 1..20: mol_type = other DNA
caatcctcctggctgccctg

SEQ ID NO: 233584 - DNA, 20 bp, synthetic construct
  source 1..20: mol_type = other DNA
ccaatcctcctggctgccct

SEQ ID NO: 233585 - DNA, 20 bp, synthetic construct
  source 1..20: mol_type = other DNA
cccaatcctcctggctgccc

SEQ ID NO: 233586 - DNA, 20 bp, synthetic construct
  source 1..20: mol_type = other DNA
gcccaatcctcctggctgcc

SEQ ID NO: 233587 - DNA, 20 bp, synthetic construct
  source 1..20: mol_type = other DNA
agcccaatcctcctggctgc

SEQ ID NO: 233588 - DNA, 20 bp, synthetic construct
  source 1..20: mol_type = other DNA
gagcccaatcctcctggctg

SEQ ID NO: 233589 - DNA, 20 bp, synthetic construct
  source 1..20: mol_type = other DNA
tgagcccaatcctcctggct

SEQ ID NO: 233590 - DNA, 20 bp, synthetic construct
  source 1..20: mol_type = other DNA
gtgagcccaatcctcctggc

SEQ ID NO: 233591 - DNA, 20 bp, synthetic construct
  source 1..20: mol_type = other DNA
agtgagcccaatcctcctgg

SEQ ID NO: 233592 - DNA, 20 bp, synthetic construct
  source 1..20: mol_type = other DNA
gagtgagcccaatcctcctg

SEQ ID NO: 233593 - DNA, 20 bp, synthetic construct
  source 1..20: mol_type = other DNA
ggagtgagcccaatcctcct

SEQ ID NO: 233594 - DNA, 20 bp, synthetic construct
  source 1..20: mol_type = other DNA
gggagtgagcccaatcctcc

SEQ ID NO: 233595 - DNA, 20 bp, synthetic construct
  source 1..20: mol_type = other DNA
agggagtgagcccaatcctc

SEQ ID NO: 233596 - DNA, 20 bp, synthetic construct
  source 1..20: mol_type = other DNA
tagggagtgagcccaatcct

SEQ ID NO: 233597 - DNA, 20 bp, synthetic construct
  source 1..20: mol_type = other DNA
gtagggagtgagcccaatcc

SEQ ID NO: 233598 - DNA, 20 bp, synthetic construct
  source 1..20: mol_type = other DNA
agtagggagtgagcccaatc

SEQ ID NO: 233599 - DNA, 20 bp, synthetic construct
  source 1..20: mol_type = other DNA
cagtagggagtgagcccaat

SEQ ID NO: 233600 - DNA, 20 bp, synthetic construct
  source 1..20: mol_type = other DNA
tcagtagggagtgagcccaa

SEQ ID NO: 233601 - DNA, 20 bp, synthetic construct
  source 1..20: mol_type = other DNA
ctcagtagggagtgagccca

SEQ ID NO: 233602 - DNA, 20 bp, synthetic construct
  source 1..20: mol_type = other DNA
actcagtagggagtgagccc

SEQ ID NO: 233603 - DNA, 20 bp, synthetic construct
  source 1..20: mol_type = other DNA
cactcagtagggagtgagcc

SEQ ID NO: 233604 - DNA, 20 bp, synthetic construct
  source 1..20: mol_type = other DNA
gcactcagtagggagtgagc

SEQ ID NO: 233605 - DNA, 20 bp, synthetic construct
  source 1..20: mol_type = other DNA
ggcactcagtagggagtgag

SEQ ID NO: 233606 - DNA, 20 bp, synthetic construct
  source 1..20: mol_type = other DNA
aggcactcagtagggagtga

SEQ ID NO: 233607 - DNA, 20 bp, synthetic construct
  source 1..20: mol_type = other DNA
gaggcactcagtagggagtg

SEQ ID NO: 233608 - DNA, 20 bp, synthetic construct
  source 1..20: mol_type = other DNA
tgaggcactcagtagggagt

SEQ ID NO: 233609 - DNA, 20 bp, synthetic construct
  source 1..20: mol_type = other DNA
gtgaggcactcagtagggag

SEQ ID NO: 233610 - DNA, 20 bp, synthetic construct
  source 1..20: mol_type = other DNA
agtgaggcactcagtaggga

SEQ ID NO: 233611 - DNA, 20 bp, synthetic construct
  source 1..20: mol_type = other DNA
gagtgaggcactcagtaggg

SEQ ID NO: 233612 - DNA, 20 bp, synthetic construct
  source 1..20: mol_type = other DNA
ggagtgaggcactcagtagg

SEQ ID NO: 233613 - DNA, 20 bp, synthetic construct
  source 1..20: mol_type = other DNA
gggagtgaggcactcagtag

SEQ ID NO: 233614 - DNA, 20 bp, synthetic construct
  source 1..20: mol_type = other DNA
cgggagtgaggcactcagta

SEQ ID NO: 233615 - DNA, 20 bp, synthetic construct
  source 1..20: mol_type = other DNA
acgggagtgaggcactcagt

SEQ ID NO: 233616 - DNA, 20 bp, synthetic construct
  source 1..20: mol_type = other DNA
tacgggagtgaggcactcag

SEQ ID NO: 233617 - DNA, 20 bp, synthetic construct
  source 1..20: mol_type = other DNA
gtacgggagtgaggcactca

SEQ ID NO: 233618 - DNA, 20 bp, synthetic construct
  source 1..20: mol_type = other DNA
tgtacgggagtgaggcactc

SEQ ID NO: 233619 - DNA, 20 bp, synthetic construct
  source 1..20: mol_type = other DNA
ctgtacgggagtgaggcact

SEQ ID NO: 233620 - DNA, 20 bp, synthetic construct
  source 1..20: mol_type = other DNA
gctgtacgggagtgaggcac

SEQ ID NO: 233621 - DNA, 20 bp, synthetic construct
  source 1..20: mol_type = other DNA
ggctgtacgggagtgaggca

SEQ ID NO: 233622 - DNA, 20 bp, synthetic construct
  source 1..20: mol_type = other DNA
gggctgtacgggagtgaggc

SEQ ID NO: 233623 - DNA, 20 bp, synthetic construct
  source 1..20: mol_type = other DNA
ggggctgtacgggagtgagg

SEQ ID NO: 233624 - DNA, 20 bp, synthetic construct
  source 1..20: mol_type = other DNA
gggggctgtacgggagtgag

SEQ ID NO: 233625 - DNA, 20 bp, synthetic construct
  source 1..20: mol_type = other DNA
tgggggctgtacgggagtga

SEQ ID NO: 233626 - DNA, 20 bp, synthetic construct
  source 1..20: mol_type = other DNA
atgggggctgtacgggagtg

SEQ ID NO: 233627 - DNA, 20 bp, synthetic construct
  source 1..20: mol_type = other DNA
tatgggggctgtacgggagt

SEQ ID NO: 233628 - DNA, 20 bp, synthetic construct
  source 1..20: mol_type = other DNA
ctatgggggctgtacgggag

SEQ ID NO: 233629 - DNA, 20 bp, synthetic construct
  source 1..20: mol_type = other DNA
tctatgggggctgtacggga

SEQ ID NO: 233630 - DNA, 20 bp, synthetic construct
  source 1..20: mol_type = other DNA
ctctatgggggctgtacggg

SEQ ID NO: 233631 - DNA, 20 bp, synthetic construct
  source 1..20: mol_type = other DNA
cctctatgggggctgtacgg

SEQ ID NO: 233632 - DNA, 20 bp, synthetic construct
  source 1..20: mol_type = other DNA
tcctctatgggggctgtacg

SEQ ID NO: 233633 - DNA, 20 bp, synthetic construct
  source 1..20: mol_type = other DNA
ttcctctatgggggctgtac

SEQ ID NO: 233634 - DNA, 20 bp, synthetic construct
  source 1..20: mol_type = other DNA
cttcctctatgggggctgta

SEQ ID NO: 233635 - DNA, 20 bp, synthetic construct
  source 1..20: mol_type = other DNA
tcttcctctatgggggctgt

SEQ ID NO: 233636 - DNA, 20 bp, synthetic construct
  source 1..20: mol_type = other DNA
ctcttcctctatgggggctg

SEQ ID NO: 233637 - DNA, 20 bp, synthetic construct
  source 1..20: mol_type = other DNA
cctcttcctctatgggggct

SEQ ID NO: 233638 - DNA, 20 bp, synthetic construct
  source 1..20: mol_type = other DNA
ccctcttcctctatgggggc

SEQ ID NO: 233639 - DNA, 20 bp, synthetic construct
  source 1..20: mol_type = other DNA
cccctcttcctctatggggg

SEQ ID NO: 233640 - DNA, 20 bp, synthetic construct
  source 1..20: mol_type = other DNA
acccctcttcctctatgggg

SEQ ID NO: 233641 - DNA, 20 bp, synthetic construct
  source 1..20: mol_type = other DNA
aacccctcttcctctatggg

SEQ ID NO: 233642 - DNA, 20 bp, synthetic construct
  source 1..20: mol_type = other DNA
gaacccctcttcctctatgg

SEQ ID NO: 233643 - DNA, 20 bp, synthetic construct
  source 1..20: mol_type = other DNA
tgaacccctcttcctctatg

SEQ ID NO: 233644 - DNA, 20 bp, synthetic construct
  source 1..20: mol_type = other DNA
ttgaacccctcttcctctat

SEQ ID NO: 233645 - DNA, 20 bp, synthetic construct
  source 1..20: mol_type = other DNA
tttgaacccctcttcctcta

SEQ ID NO: 233646 - DNA, 20 bp, synthetic construct
  source 1..20: mol_type = other DNA
atttgaacccctcttcctct

SEQ ID NO: 233647 - DNA, 20 bp, synthetic construct
  source 1..20: mol_type = other DNA
aatttgaacccctcttcctc

SEQ ID NO: 233648 - DNA, 20 bp, synthetic construct
  source 1..20: mol_type = other DNA
aaatttgaacccctcttcct

SEQ ID NO: 233649 - DNA, 20 bp, synthetic construct
  source 1..20: mol_type = other DNA
taaatttgaacccctcttcc

SEQ ID NO: 233650 - DNA, 20 bp, synthetic construct
  source 1..20: mol_type = other DNA
ataaatttgaacccctcttc

SEQ ID NO: 233651 - DNA, 20 bp, synthetic construct
  source 1..20: mol_type = other DNA
aataaatttgaacccctctt

SEQ ID NO: 233652 - DNA, 20 bp, synthetic construct
  source 1..20: mol_type = other DNA
gaataaatttgaacccctct

SEQ ID NO: 233653 - DNA, 20 bp, synthetic construct
  source 1..20: mol_type = other DNA
ggaataaatttgaacccctc

SEQ ID NO: 233654 - DNA, 20 bp, synthetic construct
  source 1..20: mol_type = other DNA
aggaataaatttgaacccct

SEQ ID NO: 233655 - DNA, 20 bp, synthetic construct
  source 1..20: mol_type = other DNA
gaggaataaatttgaacccc

SEQ ID NO: 233656 - DNA, 20 bp, synthetic construct
  source 1..20: mol_type = other DNA
tgaggaataaatttgaaccc

SEQ ID NO: 233657 - DNA, 20 bp, synthetic construct
  source 1..20: mol_type = other DNA
ctgaggaataaatttgaacc

SEQ ID NO: 233658 - DNA, 20 bp, synthetic construct
  source 1..20: mol_type = other DNA
gctgaggaataaatttgaac

SEQ ID NO: 233659 - DNA, 20 bp, synthetic construct
  source 1..20: mol_type = other DNA
ggctgaggaataaatttgaa

SEQ ID NO: 233660 - DNA, 20 bp, synthetic construct
  source 1..20: mol_type = other DNA
tggctgaggaataaatttga

SEQ ID NO: 233661 - DNA, 20 bp, synthetic construct
  source 1..20: mol_type = other DNA
ctggctgaggaataaatttg

SEQ ID NO: 233662 - DNA, 20 bp, synthetic construct
  source 1..20: mol_type = other DNA
tctggctgaggaataaattt

SEQ ID NO: 233663 - DNA, 20 bp, synthetic construct
  source 1..20: mol_type = other DNA
atctggctgaggaataaatt

SEQ ID NO: 233664 - DNA, 20 bp, synthetic construct
  source 1..20: mol_type = other DNA
catctggctgaggaataaat

SEQ ID NO: 233665 - DNA, 20 bp, synthetic construct
  source 1..20: mol_type = other DNA
ccatctggctgaggaataaa

SEQ ID NO: 233666 - DNA, 20 bp, synthetic construct
  source 1..20: mol_type = other DNA
gccatctggctgaggaataa

SEQ ID NO: 233667 - DNA, 20 bp, synthetic construct
  source 1..20: mol_type = other DNA
tgccatctggctgaggaata

SEQ ID NO: 233668 - DNA, 20 bp, synthetic construct
  source 1..20: mol_type = other DNA
atgccatctggctgaggaat

SEQ ID NO: 233669 - DNA, 20 bp, synthetic construct
  source 1..20: mol_type = other DNA
catgccatctggctgaggaa

SEQ ID NO: 233670 - DNA, 20 bp, synthetic construct
  source 1..20: mol_type = other DNA
acatgccatctggctgagga

SEQ ID NO: 233671 - DNA, 20 bp, synthetic construct
  source 1..20: mol_type = other DNA
cacatgccatctggctgagg

SEQ ID NO: 233672 - DNA, 20 bp, synthetic construct
  source 1..20: mol_type = other DNA
gcacatgccatctggctgag

SEQ ID NO: 233673 - DNA, 20 bp, synthetic construct
  source 1..20: mol_type = other DNA
ggcacatgccatctggctga

SEQ ID NO: 233674 - DNA, 20 bp, synthetic construct
  source 1..20: mol_type = other DNA
cggcacatgccatctggctg

SEQ ID NO: 233675 - DNA, 20 bp, synthetic construct
  source 1..20: mol_type = other DNA
gcggcacatgccatctggct

SEQ ID NO: 233676 - DNA, 20 bp, synthetic construct
  source 1..20: mol_type = other DNA
ggcggcacatgccatctggc

SEQ ID NO: 233677 - DNA, 20 bp, synthetic construct
  source 1..20: mol_type = other DNA
aggcggcacatgccatctgg

SEQ ID NO: 233678 - DNA, 20 bp, synthetic construct
  source 1..20: mol_type = other DNA
caggcggcacatgccatctg

SEQ ID NO: 233679 - DNA, 20 bp, synthetic construct
  source 1..20: mol_type = other DNA
acaggcggcacatgccatct

SEQ ID NO: 233680 - DNA, 20 bp, synthetic construct
  source 1..20: mol_type = other DNA
gacaggcggcacatgccatc

SEQ ID NO: 233681 - DNA, 20 bp, synthetic construct
  source 1..20: mol_type = other DNA
ggacaggcggcacatgccat

SEQ ID NO: 233682 - DNA, 20 bp, synthetic construct
  source 1..20: mol_type = other DNA
aggacaggcggcacatgcca

SEQ ID NO: 233683 - DNA, 20 bp, synthetic construct
  source 1..20: mol_type = other DNA
caggacaggcggcacatgcc

SEQ ID NO: 233684 - DNA, 20 bp, synthetic construct
  source 1..20: mol_type = other DNA
ccaggacaggcggcacatgc

SEQ ID NO: 233685 - DNA, 20 bp, synthetic construct
  source 1..20: mol_type = other DNA
tccaggacaggcggcacatg

SEQ ID NO: 233686 - DNA, 20 bp, synthetic construct
  source 1..20: mol_type = other DNA
ttccaggacaggcggcacat

SEQ ID NO: 233687 - DNA, 20 bp, synthetic construct
  source 1..20: mol_type = other DNA
attccaggacaggcggcaca

SEQ ID NO: 233688 - DNA, 20 bp, synthetic construct
  source 1..20: mol_type = other DNA
aattccaggacaggcggcac

SEQ ID NO: 233689 - DNA, 20 bp, synthetic construct
  source 1..20: mol_type = other DNA
aaattccaggacaggcggca

SEQ ID NO: 233690 - DNA, 20 bp, synthetic construct
  source 1..20: mol_type = other DNA
gaaattccaggacaggcggc

SEQ ID NO: 233691 - DNA, 20 bp, synthetic construct
  source 1..20: mol_type = other DNA
tgaaattccaggacaggcgg

SEQ ID NO: 233692 - DNA, 20 bp, synthetic construct
  source 1..20: mol_type = other DNA
gtgaaattccaggacaggcg

SEQ ID NO: 233693 - DNA, 20 bp, synthetic construct
  source 1..20: mol_type = other DNA
tgtgaaattccaggacaggc

SEQ ID NO: 233694 - DNA, 20 bp, synthetic construct
  source 1..20: mol_type = other DNA
atgtgaaattccaggacagg

SEQ ID NO: 233695 - DNA, 20 bp, synthetic construct
  source 1..20: mol_type = other DNA
gatgtgaaattccaggacag

SEQ ID NO: 233696 - DNA, 20 bp, synthetic construct
  source 1..20: mol_type = other DNA
tgatgtgaaattccaggaca

SEQ ID NO: 233697 - DNA, 20 bp, synthetic construct
  source 1..20: mol_type = other DNA
gtgatgtgaaattccaggac

SEQ ID NO: 233698 - DNA, 20 bp, synthetic construct
  source 1..20: mol_type = other DNA
agtgatgtgaaattccagga

SEQ ID NO: 233699 - DNA, 20 bp, synthetic construct
  source 1..20: mol_type = other DNA
aagtgatgtgaaattccagg

SEQ ID NO: 233700 - DNA, 20 bp, synthetic construct
  source 1..20: mol_type = other DNA
taagtgatgtgaaattccag

SEQ ID NO: 233701 - DNA, 20 bp, synthetic construct
  source 1..20: mol_type = other DNA
ataagtgatgtgaaattcca

SEQ ID NO: 233702 - DNA, 20 bp, synthetic construct
  source 1..20: mol_type = other DNA
cataagtgatgtgaaattcc

SEQ ID NO: 233703 - DNA, 20 bp, synthetic construct
  source 1..20: mol_type = other DNA
tcataagtgatgtgaaattc

SEQ ID NO: 233704 - DNA, 20 bp, synthetic construct
  source 1..20: mol_type = other DNA
atcataagtgatgtgaaatt

SEQ ID NO: 233705 - DNA, 20 bp, synthetic construct
  source 1..20: mol_type = other DNA
catcataagtgatgtgaaat

SEQ ID NO: 233706 - DNA, 20 bp, synthetic construct
  source 1..20: mol_type = other DNA
ccatcataagtgatgtgaaa

SEQ ID NO: 233707 - DNA, 20 bp, synthetic construct
  source 1..20: mol_type = other DNA
tccatcataagtgatgtgaa

SEQ ID NO: 233708 - DNA, 20 bp, synthetic construct
  source 1..20: mol_type = other DNA
gtccatcataagtgatgtga

SEQ ID NO: 233709 - DNA, 20 bp, synthetic construct
  source 1..20: mol_type = other DNA
ggtccatcataagtgatgtg

SEQ ID NO: 233710 - DNA, 20 bp, synthetic construct
  source 1..20: mol_type = other DNA
tggtccatcataagtgatgt

SEQ ID NO: 233711 - DNA, 20 bp, synthetic construct
  source 1..20: mol_type = other DNA
ttggtccatcataagtgatg

SEQ ID NO: 233712 - DNA, 20 bp, synthetic construct
  source 1..20: mol_type = other DNA
tttggtccatcataagtgat

SEQ ID NO: 233713 - DNA, 20 bp, synthetic construct
  source 1..20: mol_type = other DNA
ttttggtccatcataagtga

SEQ ID NO: 233714 - DNA, 20 bp, synthetic construct
  source 1..20: mol_type = other DNA
attttggtccatcataagtg

SEQ ID NO: 233715 - DNA, 20 bp, synthetic construct
  source 1..20: mol_type = other DNA
aattttggtccatcataagt

SEQ ID NO: 233716 - DNA, 20 bp, synthetic construct
  source 1..20: mol_type = other DNA
gaattttggtccatcataag

SEQ ID NO: 233717 - DNA, 20 bp, synthetic construct
  source 1..20: mol_type = other DNA
ggaattttggtccatcataa

SEQ ID NO: 233718 - DNA, 20 bp, synthetic construct
  source 1..20: mol_type = other DNA
tggaattttggtccatcata

SEQ ID NO: 233719 - DNA, 20 bp, synthetic construct
  source 1..20: mol_type = other DNA
ttggaattttggtccatcat

SEQ ID NO: 233720 - DNA, 20 bp, synthetic construct
  source 1..20: mol_type = other DNA
tttggaattttggtccatca

SEQ ID NO: 233721 - DNA, 20 bp, synthetic construct
  source 1..20: mol_type = other DNA
ttttggaattttggtccatc

SEQ ID NO: 233722 - DNA, 20 bp, synthetic construct
  source 1..20: mol_type = other DNA
cttttggaattttggtccat

SEQ ID NO: 233723 - DNA, 20 bp, synthetic construct
  source 1..20: mol_type = other DNA
gcttttggaattttggtcca

SEQ ID NO: 233724 - DNA, 20 bp, synthetic construct
  source 1..20: mol_type = other DNA
agcttttggaattttggtcc

SEQ ID NO: 233725 - DNA, 20 bp, synthetic construct
  source 1..20: mol_type = other DNA
cagcttttggaattttggtc

SEQ ID NO: 233726 - DNA, 20 bp, synthetic construct
  source 1..20: mol_type = other DNA
tcagcttttggaattttggt

SEQ ID NO: 233727 - DNA, 20 bp, synthetic construct
  source 1..20: mol_type = other DNA
ttcagcttttggaattttgg

SEQ ID NO: 233728 - DNA, 20 bp, synthetic construct
  source 1..20: mol_type = other DNA
attcagcttttggaattttg

SEQ ID NO: 233729 - DNA, 20 bp, synthetic construct
  source 1..20: mol_type = other DNA
gattcagcttttggaatttt

SEQ ID NO: 233730 - DNA, 20 bp, synthetic construct
  source 1..20: mol_type = other DNA
ggattcagcttttggaattt

SEQ ID NO: 233731 - DNA, 20 bp, synthetic construct
  source 1..20: mol_type = other DNA
tggattcagcttttggaatt

SEQ ID NO: 233732 - DNA, 20 bp, synthetic construct
  source 1..20: mol_type = other DNA
atggattcagcttttggaat

SEQ ID NO: 233733 - DNA, 20 bp, synthetic construct
  source 1..20: mol_type = other DNA
catggattcagcttttggaa

SEQ ID NO: 233734 - DNA, 20 bp, synthetic construct
  source 1..20: mol_type = other DNA
tcatggattcagcttttgga

SEQ ID NO: 233735 - DNA, 20 bp, synthetic construct
  source 1..20: mol_type = other DNA
atcatggattcagcttttgg

SEQ ID NO: 233736 - DNA, 20 bp, synthetic construct
  source 1..20: mol_type = other DNA
aatcatggattcagcttttg

SEQ ID NO: 233737 - DNA, 20 bp, synthetic construct
  source 1..20: mol_type = other DNA
caatcatggattcagctttt

SEQ ID NO: 233738 - DNA, 20 bp, synthetic construct
  source 1..20: mol_type = other DNA
acaatcatggattcagcttt

SEQ ID NO: 233739 - DNA, 20 bp, synthetic construct
  source 1..20: mol_type = other DNA
gacaatcatggattcagctt

SEQ ID NO: 233740 - DNA, 20 bp, synthetic construct
  source 1..20: mol_type = other DNA
tgacaatcatggattcagct

SEQ ID NO: 233741 - DNA, 20 bp, synthetic construct
  source 1..20: mol_type = other DNA
ttgacaatcatggattcagc

SEQ ID NO: 233742 - DNA, 20 bp, synthetic construct
  source 1..20: mol_type = other DNA
tttgacaatcatggattcag

SEQ ID NO: 233743 - DNA, 20 bp, synthetic construct
  source 1..20: mol_type = other DNA
ctttgacaatcatggattca

SEQ ID NO: 233744 - DNA, 20 bp, synthetic construct
  source 1..20: mol_type = other DNA
actttgacaatcatggattc

SEQ ID NO: 233745 - DNA, 20 bp, synthetic construct
  source 1..20: mol_type = other DNA
gactttgacaatcatggatt

SEQ ID NO: 233746 - DNA, 20 bp, synthetic construct
  source 1..20: mol_type = other DNA
agactttgacaatcatggat

SEQ ID NO: 233747 - DNA, 20 bp, synthetic construct
  source 1..20: mol_type = other DNA
cagactttgacaatcatgga

SEQ ID NO: 233748 - DNA, 20 bp, synthetic construct
  source 1..20: mol_type = other DNA
ccagactttgacaatcatgg

SEQ ID NO: 233749 - DNA, 20 bp, synthetic construct
  source 1..20: mol_type = other DNA
accagactttgacaatcatg

SEQ ID NO: 233750 - DNA, 20 bp, synthetic construct
  source 1..20: mol_type = other DNA
taccagactttgacaatcat

SEQ ID NO: 233751 - DNA, 20 bp, synthetic construct
  source 1..20: mol_type = other DNA
ataccagactttgacaatca

SEQ ID NO: 233752 - DNA, 20 bp, synthetic construct
  source 1..20: mol_type = other DNA
cataccagactttgacaatc

SEQ ID NO: 233753 - DNA, 20 bp, synthetic construct
  source 1..20: mol_type = other DNA
ccataccagactttgacaat

SEQ ID NO: 233754 - DNA, 20 bp, synthetic construct
  source 1..20: mol_type = other DNA
gccataccagactttgacaa

SEQ ID NO: 233755 - DNA, 20 bp, synthetic construct
  source 1..20: mol_type = other DNA
tgccataccagactttgaca

SEQ ID NO: 233756 - DNA, 20 bp, synthetic construct
  source 1..20: mol_type = other DNA
ctgccataccagactttgac

SEQ ID NO: 233757 - DNA, 20 bp, synthetic construct
  source 1..20: mol_type = other DNA
cctgccataccagactttga

SEQ ID NO: 233758 - DNA, 20 bp, synthetic construct
  source 1..20: mol_type = other DNA
tcctgccataccagactttg

SEQ ID NO: 233759 - DNA, 20 bp, synthetic construct
  source 1..20: mol_type = other DNA
atcctgccataccagacttt

SEQ ID NO: 233760 - DNA, 20 bp, synthetic construct
  source 1..20: mol_type = other DNA
catcctgccataccagactt

SEQ ID NO: 233761 - DNA, 20 bp, synthetic construct
  source 1..20: mol_type = other DNA
acatcctgccataccagact

SEQ ID NO: 233762 - DNA, 20 bp, synthetic construct
  source 1..20: mol_type = other DNA
gacatcctgccataccagac

SEQ ID NO: 233763 - DNA, 20 bp, synthetic construct
  source 1..20: mol_type = other DNA
tgacatcctgccataccaga

SEQ ID NO: 233764 - DNA, 20 bp, synthetic construct
  source 1..20: mol_type = other DNA
ttgacatcctgccataccag

SEQ ID NO: 233765 - DNA, 20 bp, synthetic construct
  source 1..20: mol_type = other DNA
gttgacatcctgccatacca

SEQ ID NO: 233766 - DNA, 20 bp, synthetic construct
  source 1..20: mol_type = other DNA
tgttgacatcctgccatacc

SEQ ID NO: 233767 - DNA, 20 bp, synthetic construct
  source 1..20: mol_type = other DNA
ctgttgacatcctgccatac

SEQ ID NO: 233768 - DNA, 20 bp, synthetic construct
  source 1..20: mol_type = other DNA
actgttgacatcctgccata

SEQ ID NO: 233769 - DNA, 20 bp, synthetic construct
  source 1..20: mol_type = other DNA
tactgttgacatcctgccat

SEQ ID NO: 233770 - DNA, 20 bp, synthetic construct
  source 1..20: mol_type = other DNA
ttactgttgacatcctgcca

SEQ ID NO: 233771 - DNA, 20 bp, synthetic construct
  source 1..20: mol_type = other DNA
attactgttgacatcctgcc

SEQ ID NO: 233772 - DNA, 20 bp, synthetic construct
  source 1..20: mol_type = other DNA
gattactgttgacatcctgc

SEQ ID NO: 233773 - DNA, 20 bp, synthetic construct
  source 1..20: mol_type = other DNA
cgattactgttgacatcctg

SEQ ID NO: 233774 - DNA, 20 bp, synthetic construct
  source 1..20: mol_type = other DNA
acgattactgttgacatcct

SEQ ID NO: 233775 - DNA, 20 bp, synthetic construct
  source 1..20: mol_type = other DNA
aacgattactgttgacatcc

SEQ ID NO: 233776 - DNA, 20 bp, synthetic construct
  source 1..20: mol_type = other DNA
aaacgattactgttgacatc

SEQ ID NO: 233777 - DNA, 20 bp, synthetic construct
  source 1..20: mol_type = other DNA
gaaacgattactgttgacat

SEQ ID NO: 233778 - DNA, 20 bp, synthetic construct
  source 1..20: mol_type = other DNA
agaaacgattactgttgaca

SEQ ID NO: 233779 - DNA, 20 bp, synthetic construct
  source 1..20: mol_type = other DNA
cagaaacgattactgttgac

SEQ ID NO: 233780 - DNA, 20 bp, synthetic construct
  source 1..20: mol_type = other DNA
ccagaaacgattactgttga

SEQ ID NO: 233781 - DNA, 20 bp, synthetic construct
  source 1..20: mol_type = other DNA
cccagaaacgattactgttg

SEQ ID NO: 233782 - DNA, 20 bp, synthetic construct
  source 1..20: mol_type = other DNA
gcccagaaacgattactgtt

SEQ ID NO: 233783 - DNA, 20 bp, synthetic construct
  source 1..20: mol_type = other DNA
tgcccagaaacgattactgt

SEQ ID NO: 233784 - DNA, 20 bp, synthetic construct
  source 1..20: mol_type = other DNA
ctgcccagaaacgattactg

SEQ ID NO: 233785 - DNA, 20 bp, synthetic construct
  source 1..20: mol_type = other DNA
tctgcccagaaacgattact

SEQ ID NO: 233786 - DNA, 20 bp, synthetic construct
  source 1..20: mol_type = other DNA
ctctgcccagaaacgattac

SEQ ID NO: 233787 - DNA, 20 bp, synthetic construct
  source 1..20: mol_type = other DNA
cctctgcccagaaacgatta

SEQ ID NO: 233788 - DNA, 20 bp, synthetic construct
  source 1..20: mol_type = other DNA
ccctctgcccagaaacgatt

SEQ ID NO: 233789 - DNA, 20 bp, synthetic construct
  source 1..20: mol_type = other DNA
tccctctgcccagaaacgat

SEQ ID NO: 233790 - DNA, 20 bp, synthetic construct
  source 1..20: mol_type = other DNA
atccctctgcccagaaacga

SEQ ID NO: 233791 - DNA, 20 bp, synthetic construct
  source 1..20: mol_type = other DNA
catccctctgcccagaaacg

SEQ ID NO: 233792 - DNA, 20 bp, synthetic construct
  source 1..20: mol_type = other DNA
tcatccctctgcccagaaac

SEQ ID NO: 233793 - DNA, 20 bp, synthetic construct
  source 1..20: mol_type = other DNA
atcatccctctgcccagaaa

SEQ ID NO: 233794 - DNA, 20 bp, synthetic construct
  source 1..20: mol_type = other DNA
aatcatccctctgcccagaa

SEQ ID NO: 233795 - DNA, 20 bp, synthetic construct
  source 1..20: mol_type = other DNA
aaatcatccctctgcccaga

SEQ ID NO: 233796 - DNA, 20 bp, synthetic construct
  source 1..20: mol_type = other DNA
aaaatcatccctctgcccag

SEQ ID NO: 233797 - DNA, 20 bp, synthetic construct
  source 1..20: mol_type = other DNA
gaaaatcatccctctgccca

SEQ ID NO: 233798 - DNA, 20 bp, synthetic construct
  source 1..20: mol_type = other DNA
agaaaatcatccctctgccc

SEQ ID NO: 233799 - DNA, 20 bp, synthetic construct
  source 1..20: mol_type = other DNA
gagaaaatcatccctctgcc

SEQ ID NO: 233800 - DNA, 20 bp, synthetic construct
  source 1..20: mol_type = other DNA
agagaaaatcatccctctgc

SEQ ID NO: 233801 - DNA, 20 bp, synthetic construct
  source 1..20: mol_type = other DNA
aagagaaaatcatccctctg

SEQ ID NO: 233802 - DNA, 20 bp, synthetic construct
  source 1..20: mol_type = other DNA
gaagagaaaatcatccctct

SEQ ID NO: 233803 - DNA, 20 bp, synthetic construct
  source 1..20: mol_type = other DNA
ggaagagaaaatcatccctc

SEQ ID NO: 233804 - DNA, 20 bp, synthetic construct
  source 1..20: mol_type = other DNA
gggaagagaaaatcatccct

SEQ ID NO: 233805 - DNA, 20 bp, synthetic construct
  source 1..20: mol_type = other DNA
tgggaagagaaaatcatccc

SEQ ID NO: 233806 - DNA, 20 bp, synthetic construct
  source 1..20: mol_type = other DNA
atgggaagagaaaatcatcc

SEQ ID NO: 233807 - DNA, 20 bp, synthetic construct
  source 1..20: mol_type = other DNA
gatgggaagagaaaatcatc

SEQ ID NO: 233808 - DNA, 20 bp, synthetic construct
  source 1..20: mol_type = other DNA
agatgggaagagaaaatcat

SEQ ID NO: 233809 - DNA, 20 bp, synthetic construct
  source 1..20: mol_type = other DNA
aagatgggaagagaaaatca

SEQ ID NO: 233810 - DNA, 20 bp, synthetic construct
  source 1..20: mol_type = other DNA
caagatgggaagagaaaatc

SEQ ID NO: 233811 - DNA, 20 bp, synthetic construct
  source 1..20: mol_type = other DNA
gcaagatgggaagagaaaat

SEQ ID NO: 233812 - DNA, 20 bp, synthetic construct
  source 1..20: mol_type = other DNA
agcaagatgggaagagaaaa

SEQ ID NO: 233813 - DNA, 20 bp, synthetic construct
  source 1..20: mol_type = other DNA
aagcaagatgggaagagaaa

SEQ ID NO: 233814 - DNA, 20 bp, synthetic construct
  source 1..20: mol_type = other DNA
aaagcaagatgggaagagaa

SEQ ID NO: 233815 - DNA, 20 bp, synthetic construct
  source 1..20: mol_type = other DNA
caaagcaagatgggaagaga

SEQ ID NO: 233816 - DNA, 20 bp, synthetic construct
  source 1..20: mol_type = other DNA
acaaagcaagatgggaagag

SEQ ID NO: 233817 - DNA, 20 bp, synthetic construct
  source 1..20: mol_type = other DNA
tacaaagcaagatgggaaga

SEQ ID NO: 233818 - DNA, 20 bp, synthetic construct
  source 1..20: mol_type = other DNA
atacaaagcaagatgggaag

SEQ ID NO: 233819 - DNA, 20 bp, synthetic construct
  source 1..20: mol_type = other DNA
tatacaaagcaagatgggaa

SEQ ID NO: 233820 - DNA, 20 bp, synthetic construct
  source 1..20: mol_type = other DNA
ttatacaaagcaagatggga

SEQ ID NO: 233821 - DNA, 20 bp, synthetic construct
  source 1..20: mol_type = other DNA
tttatacaaagcaagatggg

SEQ ID NO: 233822 - DNA, 20 bp, synthetic construct
  source 1..20: mol_type = other DNA
atttatacaaagcaagatgg

SEQ ID NO: 233823 - DNA, 20 bp, synthetic construct
  source 1..20: mol_type = other DNA
tatttatacaaagcaagatg

SEQ ID NO: 233824 - DNA, 20 bp, synthetic construct
  source 1..20: mol_type = other DNA
gtatttatacaaagcaagat

SEQ ID NO: 233825 - DNA, 20 bp, synthetic construct
  source 1..20: mol_type = other DNA
tgtatttatacaaagcaaga

SEQ ID NO: 233826 - DNA, 20 bp, synthetic construct
  source 1..20: mol_type = other DNA
atgtatttatacaaagcaag

SEQ ID NO: 233827 - DNA, 20 bp, synthetic construct
  source 1..20: mol_type = other DNA
aatgtatttatacaaagcaa

SEQ ID NO: 233828 - DNA, 20 bp, synthetic construct
  source 1..20: mol_type = other DNA
aaatgtatttatacaaagca

SEQ ID NO: 233829 - DNA, 20 bp, synthetic construct
  source 1..20: mol_type = other DNA
aaaatgtatttatacaaagc

SEQ ID NO: 233830 - DNA, 20 bp, synthetic construct
  source 1..20: mol_type = other DNA
gaaaatgtatttatacaaag

SEQ ID NO: 233831 - DNA, 20 bp, synthetic construct
  source 1..20: mol_type = other DNA
agaaaatgtatttatacaaa

SEQ ID NO: 233832 - DNA, 20 bp, synthetic construct
  source 1..20: mol_type = other DNA
tagaaaatgtatttatacaa

SEQ ID NO: 233833 - DNA, 20 bp, synthetic construct
  source 1..20: mol_type = other DNA
atagaaaatgtatttataca

SEQ ID NO: 233834 - DNA, 20 bp, synthetic construct
  source 1..20: mol_type = other DNA
tatagaaaatgtatttatac

SEQ ID NO: 233835 - DNA, 20 bp, synthetic construct
  source 1..20: mol_type = other DNA
ttatagaaaatgtatttata

SEQ ID NO: 233836 - DNA, 20 bp, synthetic construct
  source 1..20: mol_type = other DNA
attatagaaaatgtatttat

SEQ ID NO: 233837 - DNA, 20 bp, synthetic construct
  source 1..20: mol_type = other DNA
tattatagaaaatgtattta

SEQ ID NO: 233838 - DNA, 20 bp, synthetic construct
  source 1..20: mol_type = other DNA
ttattatagaaaatgtattt

SEQ ID NO: 233839 - DNA, 20 bp, synthetic construct
  source 1..20: mol_type = other DNA
cttattatagaaaatgtatt

SEQ ID NO: 233840 - DNA, 20 bp, synthetic construct
  source 1..20: mol_type = other DNA
ccttattatagaaaatgtat

SEQ ID NO: 233841 - DNA, 20 bp, synthetic construct
  source 1..20: mol_type = other DNA
accttattatagaaaatgta

SEQ ID NO: 233842 - DNA, 20 bp, synthetic construct
  source 1..20: mol_type = other DNA
aaccttattatagaaaatgt

SEQ ID NO: 233843 - DNA, 20 bp, synthetic construct
  source 1..20: mol_type = other DNA
caaccttattatagaaaatg

SEQ ID NO: 233844 - DNA, 20 bp, synthetic construct
  source 1..20: mol_type = other DNA
acaaccttattatagaaaat

SEQ ID NO: 233845 - DNA, 20 bp, synthetic construct
  source 1..20: mol_type = other DNA
tacaaccttattatagaaaa

SEQ ID NO: 233846 - DNA, 20 bp, synthetic construct
  source 1..20: mol_type = other DNA
atacaaccttattatagaaa

SEQ ID NO: 233847 - DNA, 20 bp, synthetic construct
  source 1..20: mol_type = other DNA
aatacaaccttattatagaa

SEQ ID NO: 233848 - DNA, 20 bp, synthetic construct
  source 1..20: mol_type = other DNA
taatacaaccttattataga

SEQ ID NO: 233849 - DNA, 20 bp, synthetic construct
  source 1..20: mol_type = other DNA
gtaatacaaccttattatag

SEQ ID NO: 233850 - DNA, 20 bp, synthetic construct
  source 1..20: mol_type = other DNA
agtaatacaaccttattata

SEQ ID NO: 233851 - DNA, 20 bp, synthetic construct
  source 1..20: mol_type = other DNA
aagtaatacaaccttattat

SEQ ID NO: 233852 - DNA, 20 bp, synthetic construct
  source 1..20: mol_type = other DNA
aaagtaatacaaccttatta

SEQ ID NO: 233853 - DNA, 20 bp, synthetic construct
  source 1..20: mol_type = other DNA
aaaagtaatacaaccttatt

SEQ ID NO: 233854 - DNA, 20 bp, synthetic construct
  source 1..20: mol_type = other DNA
gaaaagtaatacaaccttat

SEQ ID NO: 233855 - DNA, 20 bp, synthetic construct
  source 1..20: mol_type = other DNA
agaaaagtaatacaacctta

SEQ ID NO: 233856 - DNA, 20 bp, synthetic construct
  source 1..20: mol_type = other DNA
gagaaaagtaatacaacctt

SEQ ID NO: 233857 - DNA, 20 bp, synthetic construct
  source 1..20: mol_type = other DNA
tgagaaaagtaatacaacct

SEQ ID NO: 233858 - DNA, 20 bp, synthetic construct
  source 1..20: mol_type = other DNA
atgagaaaagtaatacaacc

SEQ ID NO: 233859 - DNA, 20 bp, synthetic construct
  source 1..20: mol_type = other DNA
gatgagaaaagtaatacaac

SEQ ID NO: 233860 - DNA, 20 bp, synthetic construct
  source 1..20: mol_type = other DNA
tgatgagaaaagtaatacaa

SEQ ID NO: 233861 - DNA, 20 bp, synthetic construct
  source 1..20: mol_type = other DNA
ttgatgagaaaagtaataca

SEQ ID NO: 233862 - DNA, 20 bp, synthetic construct
  source 1..20: mol_type = other DNA
cttgatgagaaaagtaatac

SEQ ID NO: 233863 - DNA, 20 bp, synthetic construct
  source 1..20: mol_type = other DNA
tcttgatgagaaaagtaata

SEQ ID NO: 233864 - DNA, 20 bp, synthetic construct
  source 1..20: mol_type = other DNA
ttcttgatgagaaaagtaat

SEQ ID NO: 233865 - DNA, 20 bp, synthetic construct
  source 1..20: mol_type = other DNA
tttcttgatgagaaaagtaa

SEQ ID NO: 233866 - DNA, 20 bp, synthetic construct
  source 1..20: mol_type = other DNA
atttcttgatgagaaaagta

SEQ ID NO: 233867 - DNA, 20 bp, synthetic construct
  source 1..20: mol_type = other DNA
tatttcttgatgagaaaagt

SEQ ID NO: 233868 - DNA, 20 bp, synthetic construct
  source 1..20: mol_type = other DNA
ctatttcttgatgagaaaag

SEQ ID NO: 233869 - DNA, 20 bp, synthetic construct
  source 1..20: mol_type = other DNA
gctatttcttgatgagaaaa

SEQ ID NO: 233870 - DNA, 20 bp, synthetic construct
  source 1..20: mol_type = other DNA
tgctatttcttgatgagaaa

SEQ ID NO: 233871 - DNA, 20 bp, synthetic construct
  source 1..20: mol_type = other DNA
ttgctatttcttgatgagaa

SEQ ID NO: 233872 - DNA, 20 bp, synthetic construct
  source 1..20: mol_type = other DNA
tttgctatttcttgatgaga

SEQ ID NO: 233873 - DNA, 20 bp, synthetic construct
  source 1..20: mol_type = other DNA
ctttgctatttcttgatgag

SEQ ID NO: 233874 - DNA, 20 bp, synthetic construct
  source 1..20: mol_type = other DNA
actttgctatttcttgatga

SEQ ID NO: 233875 - DNA, 20 bp, synthetic construct
  source 1..20: mol_type = other DNA
tactttgctatttcttgatg

SEQ ID NO: 233876 - DNA, 20 bp, synthetic construct
  source 1..20: mol_type = other DNA
gtactttgctatttcttgat

SEQ ID NO: 233877 - DNA, 20 bp, synthetic construct
  source 1..20: mol_type = other DNA
agtactttgctatttcttga

SEQ ID NO: 233878 - DNA, 20 bp, synthetic construct
  source 1..20: mol_type = other DNA
cagtactttgctatttcttg

SEQ ID NO: 233879 - DNA, 20 bp, synthetic construct
  source 1..20: mol_type = other DNA
acagtactttgctatttctt

SEQ ID NO: 233880 - DNA, 20 bp, synthetic construct
  source 1..20: mol_type = other DNA
aacagtactttgctatttct

SEQ ID NO: 233881 - DNA, 20 bp, synthetic construct
  source 1..20: mol_type = other DNA
aaacagtactttgctatttc

SEQ ID NO: 233882 - DNA, 20 bp, synthetic construct
  source 1..20: mol_type = other DNA
aaaacagtactttgctattt

SEQ ID NO: 233883 - DNA, 20 bp, synthetic construct
  source 1..20: mol_type = other DNA
taaaacagtactttgctatt

SEQ ID NO: 233884 - DNA, 20 bp, synthetic construct
  source 1..20: mol_type = other DNA
gtaaaacagtactttgctat

SEQ ID NO: 233885 - DNA, 20 bp, synthetic construct
  source 1..20: mol_type = other DNA
agtaaaacagtactttgcta

SEQ ID NO: 233886 - DNA, 20 bp, synthetic construct
  source 1..20: mol_type = other DNA
gagtaaaacagtactttgct

SEQ ID NO: 233887 - DNA, 20 bp, synthetic construct
  source 1..20: mol_type = other DNA
tgagtaaaacagtactttgc

SEQ ID NO: 233888 - DNA, 20 bp, synthetic construct
  source 1..20: mol_type = other DNA
ttgagtaaaacagtactttg

SEQ ID NO: 233889 - DNA, 20 bp, synthetic construct
  source 1..20: mol_type = other DNA
tttgagtaaaacagtacttt

SEQ ID NO: 233890 - DNA, 20 bp, synthetic construct
  source 1..20: mol_type = other DNA
ttttgagtaaaacagtactt

SEQ ID NO: 233891 - DNA, 20 bp, synthetic construct
  source 1..20: mol_type = other DNA
attttgagtaaaacagtact

SEQ ID NO: 233892 - DNA, 20 bp, synthetic construct
  source 1..20: mol_type = other DNA
tattttgagtaaaacagtac

SEQ ID NO: 233893 - DNA, 20 bp, synthetic construct
  source 1..20: mol_type = other DNA
atattttgagtaaaacagta

SEQ ID NO: 233894 - DNA, 20 bp, synthetic construct
  source 1..20: mol_type = other DNA
catattttgagtaaaacagt

SEQ ID NO: 233895 - DNA, 20 bp, synthetic construct
  source 1..20: mol_type = other DNA
tcatattttgagtaaaacag

SEQ ID NO: 233896 - DNA, 20 bp, synthetic construct
  source 1..20: mol_type = other DNA
ttcatattttgagtaaaaca

SEQ ID NO: 233897 - DNA, 20 bp, synthetic construct
  source 1..20: mol_type = other DNA
attcatattttgagtaaaac

SEQ ID NO: 233898 - DNA, 20 bp, synthetic construct
  source 1..20: mol_type = other DNA
tattcatattttgagtaaaa

SEQ ID NO: 233899 - DNA, 20 bp, synthetic construct
  source 1..20: mol_type = other DNA
ctattcatattttgagtaaa

SEQ ID NO: 233900 - DNA, 20 bp, synthetic construct
  source 1..20: mol_type = other DNA
tctattcatattttgagtaa

SEQ ID NO: 233901 - DNA, 20 bp, synthetic construct
  source 1..20: mol_type = other DNA
ctctattcatattttgagta

SEQ ID NO: 233902 - DNA, 20 bp, synthetic construct
  source 1..20: mol_type = other DNA
gctctattcatattttgagt

SEQ ID NO: 233903 - DNA, 20 bp, synthetic construct
  source 1..20: mol_type = other DNA
ggctctattcatattttgag

SEQ ID NO: 233904 - DNA, 20 bp, synthetic construct
  source 1..20: mol_type = other DNA
tggctctattcatattttga

SEQ ID NO: 233905 - DNA, 20 bp, synthetic construct
  source 1..20: mol_type = other DNA
ctggctctattcatattttg

SEQ ID NO: 233906 - DNA, 20 bp, synthetic construct
  source 1..20: mol_type = other DNA
cctggctctattcatatttt

SEQ ID NO: 233907 - DNA, 20 bp, synthetic construct
  source 1..20: mol_type = other DNA
gcctggctctattcatattt

SEQ ID NO: 233908 - DNA, 20 bp, synthetic construct
  source 1..20: mol_type = other DNA
tgcctggctctattcatatt

SEQ ID NO: 233909 - DNA, 20 bp, synthetic construct
  source 1..20: mol_type = other DNA
atgcctggctctattcatat

SEQ ID NO: 233910 - DNA, 20 bp, synthetic construct
  source 1..20: mol_type = other DNA
catgcctggctctattcata

SEQ ID NO: 233911 - DNA, 20 bp, synthetic construct
  source 1..20: mol_type = other DNA
ccatgcctggctctattcat

SEQ ID NO: 233912 - DNA, 20 bp, synthetic construct
  source 1..20: mol_type = other DNA
accatgcctggctctattca

SEQ ID NO: 233913 - DNA, 20 bp, synthetic construct
  source 1..20: mol_type = other DNA
caccatgcctggctctattc

SEQ ID NO: 233914 - DNA, 20 bp, synthetic construct
  source 1..20: mol_type = other DNA
ccaccatgcctggctctatt

SEQ ID NO: 233915 - DNA, 20 bp, synthetic construct
  source 1..20: mol_type = other DNA
gccaccatgcctggctctat

SEQ ID NO: 233916 - DNA, 20 bp, synthetic construct
  source 1..20: mol_type = other DNA
tgccaccatgcctggctcta

SEQ ID NO: 233917 - DNA, 20 bp, synthetic construct
  source 1..20: mol_type = other DNA
ctgccaccatgcctggctct

SEQ ID NO: 233918 - DNA, 20 bp, synthetic construct
  source 1..20: mol_type = other DNA
gctgccaccatgcctggctc

SEQ ID NO: 233919 - DNA, 20 bp, synthetic construct
  source 1..20: mol_type = other DNA
agctgccaccatgcctggct

SEQ ID NO: 233920 - DNA, 20 bp, synthetic construct
  source 1..20: mol_type = other DNA
aagctgccaccatgcctggc

SEQ ID NO: 233921 - DNA, 20 bp, synthetic construct
  source 1..20: mol_type = other DNA
taagctgccaccatgcctgg

SEQ ID NO: 233922 - DNA, 20 bp, synthetic construct
  source 1..20: mol_type = other DNA
ataagctgccaccatgcctg

SEQ ID NO: 233923 - DNA, 20 bp, synthetic construct
  source 1..20: mol_type = other DNA
cataagctgccaccatgcct

SEQ ID NO: 233924 - DNA, 20 bp, synthetic construct
  source 1..20: mol_type = other DNA
gcataagctgccaccatgcc

SEQ ID NO: 233925 - DNA, 20 bp, synthetic construct
  source 1..20: mol_type = other DNA
ggcataagctgccaccatgc

SEQ ID NO: 233926 - DNA, 20 bp, synthetic construct
  source 1..20: mol_type = other DNA
aggcataagctgccaccatg

SEQ ID NO: 233927 - DNA, 20 bp, synthetic construct
  source 1..20: mol_type = other DNA
caggcataagctgccaccat

SEQ ID NO: 233928 - DNA, 20 bp, synthetic construct
  source 1..20: mol_type = other DNA
acaggcataagctgccacca

SEQ ID NO: 233929 - DNA, 20 bp, synthetic construct
  source 1..20: mol_type = other DNA
tacaggcataagctgccacc

SEQ ID NO: 233930 - DNA, 20 bp, synthetic construct
  source 1..20: mol_type = other DNA
ttacaggcataagctgccac

SEQ ID NO: 233931 - DNA, 20 bp, synthetic construct
  source 1..20: mol_type = other DNA
attacaggcataagctgcca

SEQ ID NO: 233932 - DNA, 20 bp, synthetic construct
  source 1..20: mol_type = other DNA
gattacaggcataagctgcc

SEQ ID NO: 233933 - DNA, 20 bp, synthetic construct
  source 1..20: mol_type = other DNA
ggattacaggcataagctgc

SEQ ID NO: 233934 - DNA, 20 bp, synthetic construct
  source 1..20: mol_type = other DNA
gggattacaggcataagctg

SEQ ID NO: 233935 - DNA, 20 bp, synthetic construct
  source 1..20: mol_type = other DNA
tgggattacaggcataagct

SEQ ID NO: 233936 - DNA, 20 bp, synthetic construct
  source 1..20: mol_type = other DNA
ttgggattacaggcataagc

SEQ ID NO: 233937 - DNA, 20 bp, synthetic construct
  source 1..20: mol_type = other DNA
gttgggattacaggcataag

SEQ ID NO: 233938 - DNA, 20 bp, synthetic construct
  source 1..20: mol_type = other DNA
tgttgggattacaggcataa

SEQ ID NO: 233939 - DNA, 20 bp, synthetic construct
  source 1..20: mol_type = other DNA
gtgttgggattacaggcata

SEQ ID NO: 233940 - DNA, 20 bp, synthetic construct
  source 1..20: mol_type = other DNA
agtgttgggattacaggcat

SEQ ID NO: 233941 - DNA, 20 bp, synthetic construct
  source 1..20: mol_type = other DNA
aagtgttgggattacaggca

SEQ ID NO: 233942 - DNA, 20 bp, synthetic construct
  source 1..20: mol_type = other DNA
aaagtgttgggattacaggc

SEQ ID NO: 233943 - DNA, 20 bp, synthetic construct
  source 1..20: mol_type = other DNA
caaagtgttgggattacagg

SEQ ID NO: 233944 - DNA, 20 bp, synthetic construct
  source 1..20: mol_type = other DNA
tcaaagtgttgggattacag

SEQ ID NO: 233945 - DNA, 20 bp, synthetic construct
  source 1..20: mol_type = other DNA
ctcaaagtgttgggattaca

SEQ ID NO: 233946 - DNA, 20 bp, synthetic construct
  source 1..20: mol_type = other DNA
tctcaaagtgttgggattac

SEQ ID NO: 233947 - DNA, 20 bp, synthetic construct
  source 1..20: mol_type = other DNA
ctctcaaagtgttgggatta

SEQ ID NO: 233948 - DNA, 20 bp, synthetic construct
  source 1..20: mol_type = other DNA
cctctcaaagtgttgggatt

SEQ ID NO: 233949 - DNA, 20 bp, synthetic construct
  source 1..20: mol_type = other DNA
gcctctcaaagtgttgggat

SEQ ID NO: 233950 - DNA, 20 bp, synthetic construct
  source 1..20: mol_type = other DNA
cgcctctcaaagtgttggga

SEQ ID NO: 233951 - DNA, 20 bp, synthetic construct
  source 1..20: mol_type = other DNA
ccgcctctcaaagtgttggg

SEQ ID NO: 233952 - DNA, 20 bp, synthetic construct
  source 1..20: mol_type = other DNA
tccgcctctcaaagtgttgg

SEQ ID NO: 233953 - DNA, 20 bp, synthetic construct
  source 1..20: mol_type = other DNA
atccgcctctcaaagtgttg

SEQ ID NO: 233954 - DNA, 20 bp, synthetic construct
  source 1..20: mol_type = other DNA
tatccgcctctcaaagtgtt

SEQ ID NO: 233955 - DNA, 20 bp, synthetic construct
  source 1..20: mol_type = other DNA
atatccgcctctcaaagtgt

SEQ ID NO: 233956 - DNA, 20 bp, synthetic construct
  source 1..20: mol_type = other DNA
catatccgcctctcaaagtg

SEQ ID NO: 233957 - DNA, 20 bp, synthetic construct
  source 1..20: mol_type = other DNA
ccatatccgcctctcaaagt

SEQ ID NO: 233958 - DNA, 20 bp, synthetic construct
  source 1..20: mol_type = other DNA
cccatatccgcctctcaaag

SEQ ID NO: 233959 - DNA, 20 bp, synthetic construct
  source 1..20: mol_type = other DNA
tcccatatccgcctctcaaa

SEQ ID NO: 233960 - DNA, 20 bp, synthetic construct
  source 1..20: mol_type = other DNA
ctcccatatccgcctctcaa

SEQ ID NO: 233961 - DNA, 20 bp, synthetic construct
  source 1..20: mol_type = other DNA
cctcccatatccgcctctca

SEQ ID NO: 233962 - DNA, 20 bp, synthetic construct
  source 1..20: mol_type = other DNA
tcctcccatatccgcctctc

SEQ ID NO: 233963 - DNA, 20 bp, synthetic construct
  source 1..20: mol_type = other DNA
atcctcccatatccgcctct

SEQ ID NO: 233964 - DNA, 20 bp, synthetic construct
  source 1..20: mol_type = other DNA
gatcctcccatatccgcctc

SEQ ID NO: 233965 - DNA, 20 bp, synthetic construct
  source 1..20: mol_type = other DNA
tgatcctcccatatccgcct

SEQ ID NO: 233966 - DNA, 20 bp, synthetic construct
  source 1..20: mol_type = other DNA
gtgatcctcccatatccgcc

SEQ ID NO: 233967 - DNA, 20 bp, synthetic construct
  source 1..20: mol_type = other DNA
agtgatcctcccatatccgc

SEQ ID NO: 233968 - DNA, 20 bp, synthetic construct
  source 1..20: mol_type = other DNA
aagtgatcctcccatatccg

SEQ ID NO: 233969 - DNA, 20 bp, synthetic construct
  source 1..20: mol_type = other DNA
aaagtgatcctcccatatcc

SEQ ID NO: 233970 - DNA, 20 bp, synthetic construct
  source 1..20: mol_type = other DNA
taaagtgatcctcccatatc

SEQ ID NO: 233971 - DNA, 20 bp, synthetic construct
  source 1..20: mol_type = other DNA
ctaaagtgatcctcccatat

SEQ ID NO: 233972 - DNA, 20 bp, synthetic construct
  source 1..20: mol_type = other DNA
gctaaagtgatcctcccata

SEQ ID NO: 233973 - DNA, 20 bp, synthetic construct
  source 1..20: mol_type = other DNA
ggctaaagtgatcctcccat

SEQ ID NO: 233974 - DNA, 20 bp, synthetic construct
  source 1..20: mol_type = other DNA
gggctaaagtgatcctccca

SEQ ID NO: 233975 - DNA, 20 bp, synthetic construct
  source 1..20: mol_type = other DNA
tgggctaaagtgatcctccc

SEQ ID NO: 233976 - DNA, 20 bp, synthetic construct
  source 1..20: mol_type = other DNA
ctgggctaaagtgatcctcc

SEQ ID NO: 233977 - DNA, 20 bp, synthetic construct
  source 1..20: mol_type = other DNA
cctgggctaaagtgatcctc

SEQ ID NO: 233978 - DNA, 20 bp, synthetic construct
  source 1..20: mol_type = other DNA
tcctgggctaaagtgatcct

SEQ ID NO: 233979 - DNA, 20 bp, synthetic construct
  source 1..20: mol_type = other DNA
ctcctgggctaaagtgatcc

SEQ ID NO: 233980 - DNA, 20 bp, synthetic construct
  source 1..20: mol_type = other DNA
actcctgggctaaagtgatc

SEQ ID NO: 233981 - DNA, 20 bp, synthetic construct
  source 1..20: mol_type = other DNA
aactcctgggctaaagtgat

SEQ ID NO: 233982 - DNA, 20 bp, synthetic construct
  source 1..20: mol_type = other DNA
aaactcctgggctaaagtga

SEQ ID NO: 233983 - DNA, 20 bp, synthetic construct
  source 1..20: mol_type = other DNA
caaactcctgggctaaagtg

SEQ ID NO: 233984 - DNA, 20 bp, synthetic construct
  source 1..20: mol_type = other DNA
tcaaactcctgggctaaagt

SEQ ID NO: 233985 - DNA, 20 bp, synthetic construct
  source 1..20: mol_type = other DNA
ctcaaactcctgggctaaag

SEQ ID NO: 233986 - DNA, 20 bp, synthetic construct
  source 1..20: mol_type = other DNA
tctcaaactcctgggctaaa

SEQ ID NO: 233987 - DNA, 20 bp, synthetic construct
  source 1..20: mol_type = other DNA
gtctcaaactcctgggctaa

SEQ ID NO: 233988 - DNA, 20 bp, synthetic construct
  source 1..20: mol_type = other DNA
ggtctcaaactcctgggcta

SEQ ID NO: 233989 - DNA, 20 bp, synthetic construct
  source 1..20: mol_type = other DNA
tggtctcaaactcctgggct

SEQ ID NO: 233990 - DNA, 20 bp, synthetic construct
  source 1..20: mol_type = other DNA
ctggtctcaaactcctgggc

SEQ ID NO: 233991 - DNA, 20 bp, synthetic construct
  source 1..20: mol_type = other DNA
gctggtctcaaactcctggg

SEQ ID NO: 233992 - DNA, 20 bp, synthetic construct
  source 1..20: mol_type = other DNA
ggctggtctcaaactcctgg

SEQ ID NO: 233993 - DNA, 20 bp, synthetic construct
  source 1..20: mol_type = other DNA
aggctggtctcaaactcctg

SEQ ID NO: 233994 - DNA, 20 bp, synthetic construct
  source 1..20: mol_type = other DNA
caggctggtctcaaactcct

SEQ ID NO: 233995 - DNA, 20 bp, synthetic construct
  source 1..20: mol_type = other DNA
ccaggctggtctcaaactcc

SEQ ID NO: 233996 - DNA, 20 bp, synthetic construct
  source 1..20: mol_type = other DNA
cccaggctggtctcaaactc

SEQ ID NO: 233997 - DNA, 20 bp, synthetic construct
  source 1..20: mol_type = other DNA
gcccaggctggtctcaaact

SEQ ID NO: 233998 - DNA, 20 bp, synthetic construct
  source 1..20: mol_type = other DNA
tgcccaggctggtctcaaac

SEQ ID NO: 233999 - DNA, 20 bp, synthetic construct
  source 1..20: mol_type = other DNA
ttgcccaggctggtctcaaa

SEQ ID NO: 234000 - DNA, 20 bp, synthetic construct
  source 1..20: mol_type = other DNA
gttgcccaggctggtctcaa

SEQ ID NO: 234001 - DNA, 20 bp, synthetic construct
  source 1..20: mol_type = other DNA
tgttgcccaggctggtctca

SEQ ID NO: 234002 - DNA, 20 bp, synthetic construct
  source 1..20: mol_type = other DNA
atgttgcccaggctggtctc

SEQ ID NO: 234003 - DNA, 20 bp, synthetic construct
  source 1..20: mol_type = other DNA
tatgttgcccaggctggtct

SEQ ID NO: 234004 - DNA, 20 bp, synthetic construct
  source 1..20: mol_type = other DNA
ctatgttgcccaggctggtc

SEQ ID NO: 234005 - DNA, 20 bp, synthetic construct
  source 1..20: mol_type = other DNA
actatgttgcccaggctggt

SEQ ID NO: 234006 - DNA, 20 bp, synthetic construct
  source 1..20: mol_type = other DNA
cactatgttgcccaggctgg

SEQ ID NO: 234007 - DNA, 20 bp, synthetic construct
  source 1..20: mol_type = other DNA
tcactatgttgcccaggctg

SEQ ID NO: 234008 - DNA, 20 bp, synthetic construct
  source 1..20: mol_type = other DNA
ctcactatgttgcccaggct

SEQ ID NO: 234009 - DNA, 20 bp, synthetic construct
  source 1..20: mol_type = other DNA
tctcactatgttgcccaggc

SEQ ID NO: 234010 - DNA, 20 bp, synthetic construct
  source 1..20: mol_type = other DNA
gtctcactatgttgcccagg

SEQ ID NO: 234011 - DNA, 20 bp, synthetic construct
  source 1..20: mol_type = other DNA
ggtctcactatgttgcccag

SEQ ID NO: 234012 - DNA, 20 bp, synthetic construct
  source 1..20: mol_type = other DNA
gggtctcactatgttgccca

SEQ ID NO: 234013 - DNA, 20 bp, synthetic construct
  source 1..20: mol_type = other DNA
ggggtctcactatgttgccc

SEQ ID NO: 234014 - DNA, 20 bp, synthetic construct
  source 1..20: mol_type = other DNA
gggggtctcactatgttgcc

SEQ ID NO: 234015 - DNA, 20 bp, synthetic construct
  source 1..20: mol_type = other DNA
cgggggtctcactatgttgc

SEQ ID NO: 234016 - DNA, 20 bp, synthetic construct
  source 1..20: mol_type = other DNA
acgggggtctcactatgttg

SEQ ID NO: 234017 - DNA, 20 bp, synthetic construct
  source 1..20: mol_type = other DNA
gacgggggtctcactatgtt

SEQ ID NO: 234018 - DNA, 20 bp, synthetic construct
  source 1..20: mol_type = other DNA
ggacgggggtctcactatgt

SEQ ID NO: 234019 - DNA, 20 bp, synthetic construct
  source 1..20: mol_type = other DNA
gggacgggggtctcactatg

SEQ ID NO: 234020 - DNA, 20 bp, synthetic construct
  source 1..20: mol_type = other DNA
ggggacgggggtctcactat

SEQ ID NO: 234021 - DNA, 20 bp, synthetic construct
  source 1..20: mol_type = other DNA
tggggacgggggtctcacta

SEQ ID NO: 234022 - DNA, 20 bp, synthetic construct
  source 1..20: mol_type = other DNA
gtggggacgggggtctcact

SEQ ID NO: 234023 - DNA, 20 bp, synthetic construct
  source 1..20: mol_type = other DNA
agtggggacgggggtctcac

SEQ ID NO: 234024 - DNA, 20 bp, synthetic construct
  source 1..20: mol_type = other DNA
gagtggggacgggggtctca

SEQ ID NO: 234025 - DNA, 20 bp, synthetic construct
  source 1..20: mol_type = other DNA
ggagtggggacgggggtctc

SEQ ID NO: 234026 - DNA, 20 bp, synthetic construct
  source 1..20: mol_type = other DNA
gggagtggggacgggggtct

SEQ ID NO: 234027 - DNA, 20 bp, synthetic construct
  source 1..20: mol_type = other DNA
ggggagtggggacgggggtc

SEQ ID NO: 234028 - DNA, 20 bp, synthetic construct
  source 1..20: mol_type = other DNA
gggggagtggggacgggggt

SEQ ID NO: 234029 - DNA, 20 bp, synthetic construct
  source 1..20: mol_type = other DNA
tgggggagtggggacggggg

SEQ ID NO: 234030 - DNA, 20 bp, synthetic construct
  source 1..20: mol_type = other DNA
ttgggggagtggggacgggg

SEQ ID NO: 234031 - DNA, 20 bp, synthetic construct
  source 1..20: mol_type = other DNA
tttgggggagtggggacggg

SEQ ID NO: 234032 - DNA, 20 bp, synthetic construct
  source 1..20: mol_type = other DNA
ctttgggggagtggggacgg

SEQ ID NO: 234033 - DNA, 20 bp, synthetic construct
  source 1..20: mol_type = other DNA
tctttgggggagtggggacg

SEQ ID NO: 234034 - DNA, 20 bp, synthetic construct
  source 1..20: mol_type = other DNA
ttctttgggggagtggggac

SEQ ID NO: 234035 - DNA, 20 bp, synthetic construct
  source 1..20: mol_type = other DNA
tttctttgggggagtgggga

SEQ ID NO: 234036 - DNA, 20 bp, synthetic construct
  source 1..20: mol_type = other DNA
ttttctttgggggagtgggg

SEQ ID NO: 234037 - DNA, 20 bp, synthetic construct
  source 1..20: mol_type = other DNA
gttttctttgggggagtggg

SEQ ID NO: 234038 - DNA, 20 bp, synthetic construct
  source 1..20: mol_type = other DNA
ggttttctttgggggagtgg

SEQ ID NO: 234039 - DNA, 20 bp, synthetic construct
  source 1..20: mol_type = other DNA
gggttttctttgggggagtg

SEQ ID NO: 234040 - DNA, 20 bp, synthetic construct
  source 1..20: mol_type = other DNA
tgggttttctttgggggagt

SEQ ID NO: 234041 - DNA, 20 bp, synthetic construct
  source 1..20: mol_type = other DNA
gtgggttttctttgggggag

SEQ ID NO: 234042 - DNA, 20 bp, synthetic construct
  source 1..20: mol_type = other DNA
tgtgggttttctttggggga

SEQ ID NO: 234043 - DNA, 20 bp, synthetic construct
  source 1..20: mol_type = other DNA
ttgtgggttttctttggggg

SEQ ID NO: 234044 - DNA, 20 bp, synthetic construct
  source 1..20: mol_type = other DNA
tttgtgggttttctttgggg

SEQ ID NO: 234045 - DNA, 20 bp, synthetic construct
  source 1..20: mol_type = other DNA
ctttgtgggttttctttggg

SEQ ID NO: 234046 - DNA, 20 bp, synthetic construct
  source 1..20: mol_type = other DNA
gctttgtgggttttctttgg

SEQ ID NO: 234047 - DNA, 20 bp, synthetic construct
  source 1..20: mol_type = other DNA
tgctttgtgggttttctttg

SEQ ID NO: 234048 - DNA, 20 bp, synthetic construct
  source 1..20: mol_type = other DNA
atgctttgtgggttttcttt

SEQ ID NO: 234049 - DNA, 20 bp, synthetic construct
  source 1..20: mol_type = other DNA
aatgctttgtgggttttctt

SEQ ID NO: 234050 - DNA, 20 bp, synthetic construct
  source 1..20: mol_type = other DNA
aaatgctttgtgggttttct

SEQ ID NO: 234051 - DNA, 20 bp, synthetic construct
  source 1..20: mol_type = other DNA
taaatgctttgtgggttttc

SEQ ID NO: 234052 - DNA, 20 bp, synthetic construct
  source 1..20: mol_type = other DNA
ataaatgctttgtgggtttt

SEQ ID NO: 234053 - DNA, 20 bp, synthetic construct
  source 1..20: mol_type = other DNA
gataaatgctttgtgggttt

SEQ ID NO: 234054 - DNA, 20 bp, synthetic construct
  source 1..20: mol_type = other DNA
ggataaatgctttgtgggtt

SEQ ID NO: 234055 - DNA, 20 bp, synthetic construct
  source 1..20: mol_type = other DNA
aggataaatgctttgtgggt

SEQ ID NO: 234056 - DNA, 20 bp, synthetic construct
  source 1..20: mol_type = other DNA
caggataaatgctttgtggg

SEQ ID NO: 234057 - DNA, 20 bp, synthetic construct
  source 1..20: mol_type = other DNA
ccaggataaatgctttgtgg

SEQ ID NO: 234058 - DNA, 20 bp, synthetic construct
  source 1..20: mol_type = other DNA
tccaggataaatgctttgtg

SEQ ID NO: 234059 - DNA, 20 bp, synthetic construct
  source 1..20: mol_type = other DNA
atccaggataaatgctttgt

SEQ ID NO: 234060 - DNA, 20 bp, synthetic construct
  source 1..20: mol_type = other DNA
aatccaggataaatgctttg

SEQ ID NO: 234061 - DNA, 20 bp, synthetic construct
  source 1..20: mol_type = other DNA
taatccaggataaatgcttt

SEQ ID NO: 234062 - DNA, 20 bp, synthetic construct
  source 1..20: mol_type = other DNA
ataatccaggataaatgctt

SEQ ID NO: 234063 - DNA, 20 bp, synthetic construct
  source 1..20: mol_type = other DNA
aataatccaggataaatgct

SEQ ID NO: 234064 - DNA, 20 bp, synthetic construct
  source 1..20: mol_type = other DNA
gaataatccaggataaatgc

SEQ ID NO: 234065 - DNA, 20 bp, synthetic construct
  source 1..20: mol_type = other DNA
tgaataatccaggataaatg

SEQ ID NO: 234066 - DNA, 20 bp, synthetic construct
  source 1..20: mol_type = other DNA
gtgaataatccaggataaat

SEQ ID NO: 234067 - DNA, 20 bp, synthetic construct
  source 1..20: mol_type = other DNA
tgtgaataatccaggataaa

SEQ ID NO: 234068 - DNA, 20 bp, synthetic construct
  source 1..20: mol_type = other DNA
ctgtgaataatccaggataa

SEQ ID NO: 234069 - DNA, 20 bp, synthetic construct
  source 1..20: mol_type = other DNA
cctgtgaataatccaggata

SEQ ID NO: 234070 - DNA, 20 bp, synthetic construct
  source 1..20: mol_type = other DNA
ccctgtgaataatccaggat

SEQ ID NO: 234071 - DNA, 20 bp, synthetic construct
  source 1..20: mol_type = other DNA
cccctgtgaataatccagga

SEQ ID NO: 234072 - DNA, 20 bp, synthetic construct
  source 1..20: mol_type = other DNA
gcccctgtgaataatccagg

SEQ ID NO: 234073 - DNA, 20 bp, synthetic construct
  source 1..20: mol_type = other DNA
ggcccctgtgaataatccag

SEQ ID NO: 234074 - DNA, 20 bp, synthetic construct
  source 1..20: mol_type = other DNA
tggcccctgtgaataatcca

SEQ ID NO: 234075 - DNA, 20 bp, synthetic construct
  source 1..20: mol_type = other DNA
ttggcccctgtgaataatcc

SEQ ID NO: 234076 - DNA, 20 bp, synthetic construct
  source 1..20: mol_type = other DNA
tttggcccctgtgaataatc

SEQ ID NO: 234077 - DNA, 20 bp, synthetic construct
  source 1..20: mol_type = other DNA
ttttggcccctgtgaataat

SEQ ID NO: 234078 - DNA, 20 bp, synthetic construct
  source 1..20: mol_type = other DNA
tttttggcccctgtgaataa

SEQ ID NO: 234079 - DNA, 20 bp, synthetic construct
  source 1..20: mol_type = other DNA
ttttttggcccctgtgaata

SEQ ID NO: 234080 - DNA, 20 bp, synthetic construct
  source 1..20: mol_type = other DNA
tttttttggcccctgtgaat

SEQ ID NO: 234081 - DNA, 20 bp, synthetic construct
  source 1..20: mol_type = other DNA
ttttttttggcccctgtgaa

SEQ ID NO: 234082 - DNA, 20 bp, synthetic construct
  source 1..20: mol_type = other DNA
tttttttttggcccctgtga

SEQ ID NO: 234083 - DNA, 20 bp, synthetic construct
  source 1..20: mol_type = other DNA
ttttttttttggcccctgtg

SEQ ID NO: 234084 - DNA, 20 bp, synthetic construct
  source 1..20: mol_type = other DNA
tttttttttttggcccctgt

SEQ ID NO: 234085 - DNA, 20 bp, synthetic construct
  source 1..20: mol_type = other DNA
ttttttttttttggcccctg

SEQ ID NO: 234086 - DNA, 20 bp, synthetic construct
  source 1..20: mol_type = other DNA
tttttttttttttggcccct

SEQ ID NO: 234087 - DNA, 20 bp, synthetic construct
  source 1..20: mol_type = other DNA
ttttttttttttttggcccc

SEQ ID NO: 234088 - DNA, 20 bp, synthetic construct
  source 1..20: mol_type = other DNA
tttttttttttttttggccc

SEQ ID NO: 234089 - DNA, 20 bp, synthetic construct
  source 1..20: mol_type = other DNA
ttttttttttttttttggcc

SEQ ID NO: 234090 - DNA, 20 bp, synthetic construct
  source 1..20: mol_type = other DNA
tttttttttttttttttggc

SEQ ID NO: 234091 - DNA, 20 bp, synthetic construct
  source 1..20: mol_type = other DNA
atttttttttttttttttgg

SEQ ID NO: 234092 - DNA, 20 bp, synthetic construct
  source 1..20: mol_type = other DNA
aatttttttttttttttttg

SEQ ID NO: 234093 - DNA, 20 bp, synthetic construct
  source 1..20: mol_type = other DNA
gaattttttttttttttttt

SEQ ID NO: 234094 - DNA, 20 bp, synthetic construct
  source 1..20: mol_type = other DNA
tgaatttttttttttttttt

SEQ ID NO: 234095 - DNA, 20 bp, synthetic construct
  source 1..20: mol_type = other DNA
ctgaattttttttttttttt

SEQ ID NO: 234096 - DNA, 20 bp, synthetic construct
  source 1..20: mol_type = other DNA
cctgaatttttttttttttt

SEQ ID NO: 234097 - DNA, 20 bp, synthetic construct
  source 1..20: mol_type = other DNA
gcctgaattttttttttttt

SEQ ID NO: 234098 - DNA, 20 bp, synthetic construct
  source 1..20: mol_type = other DNA
ggcctgaatttttttttttt

SEQ ID NO: 234099 - DNA, 20 bp, synthetic construct
  source 1..20: mol_type = other DNA
aggcctgaattttttttttt

SEQ ID NO: 234100 - DNA, 20 bp, synthetic construct
  source 1..20: mol_type = other DNA
gaggcctgaatttttttttt

SEQ ID NO: 234101 - DNA, 20 bp, synthetic construct
  source 1..20: mol_type = other DNA
ggaggcctgaattttttttt

SEQ ID NO: 234102 - DNA, 20 bp, synthetic construct
  source 1..20: mol_type = other DNA
aggaggcctgaatttttttt

SEQ ID NO: 234103 - DNA, 20 bp, synthetic construct
  source 1..20: mol_type = other DNA
taggaggcctgaattttttt

SEQ ID NO: 234104 - DNA, 20 bp, synthetic construct
  source 1..20: mol_type = other DNA
ataggaggcctgaatttttt

SEQ ID NO: 234105 - DNA, 20 bp, synthetic construct
  source 1..20: mol_type = other DNA
tataggaggcctgaattttt

SEQ ID NO: 234106 - DNA, 20 bp, synthetic construct
  source 1..20: mol_type = other DNA
ctataggaggcctgaatttt

SEQ ID NO: 234107 - DNA, 20 bp, synthetic construct
  source 1..20: mol_type = other DNA
gctataggaggcctgaattt

SEQ ID NO: 234108 - DNA, 20 bp, synthetic construct
  source 1..20: mol_type = other DNA
ggctataggaggcctgaatt

SEQ ID NO: 234109 - DNA, 20 bp, synthetic construct
  source 1..20: mol_type = other DNA
tggctataggaggcctgaat

SEQ ID NO: 234110 - DNA, 20 bp, synthetic construct
  source 1..20: mol_type = other DNA
atggctataggaggcctgaa

SEQ ID NO: 234111 - DNA, 20 bp, synthetic construct
  source 1..20: mol_type = other DNA
catggctataggaggcctga

SEQ ID NO: 234112 - DNA, 20 bp, synthetic construct
  source 1..20: mol_type = other DNA
tcatggctataggaggcctg

SEQ ID NO: 234113 - DNA, 20 bp, synthetic construct
  source 1..20: mol_type = other DNA
ctcatggctataggaggcct

SEQ ID NO: 234114 - DNA, 20 bp, synthetic construct
  source 1..20: mol_type = other DNA
gctcatggctataggaggcc

SEQ ID NO: 234115 - DNA, 20 bp, synthetic construct
  source 1..20: mol_type = other DNA
agctcatggctataggaggc

SEQ ID NO: 234116 - DNA, 20 bp, synthetic construct
  source 1..20: mol_type = other DNA
tagctcatggctataggagg

SEQ ID NO: 234117 - DNA, 20 bp, synthetic construct
  source 1..20: mol_type = other DNA
gtagctcatggctataggag

SEQ ID NO: 234118 - DNA, 20 bp, synthetic construct
  source 1..20: mol_type = other DNA
cgtagctcatggctatagga

SEQ ID NO: 234119 - DNA, 20 bp, synthetic construct
  source 1..20: mol_type = other DNA
tcgtagctcatggctatagg

SEQ ID NO: 234120 - DNA, 20 bp, synthetic construct
  source 1..20: mol_type = other DNA
ttcgtagctcatggctatag

SEQ ID NO: 234121 - DNA, 20 bp, synthetic construct
  source 1..20: mol_type = other DNA
attcgtagctcatggctata

SEQ ID NO: 234122 - DNA, 20 bp, synthetic construct
  source 1..20: mol_type = other DNA
tattcgtagctcatggctat

SEQ ID NO: 234123 - DNA, 20 bp, synthetic construct
  source 1..20: mol_type = other DNA
atattcgtagctcatggcta

SEQ ID NO: 234124 - DNA, 20 bp, synthetic construct
  source 1..20: mol_type = other DNA
catattcgtagctcatggct

SEQ ID NO: 234125 - DNA, 20 bp, synthetic construct
  source 1..20: mol_type = other DNA
tcatattcgtagctcatggc

SEQ ID NO: 234126 - DNA, 20 bp, synthetic construct
  source 1..20: mol_type = other DNA
ttcatattcgtagctcatgg

SEQ ID NO: 234127 - DNA, 20 bp, synthetic construct
  source 1..20: mol_type = other DNA
tttcatattcgtagctcatg

SEQ ID NO: 234128 - DNA, 20 bp, synthetic construct
  source 1..20: mol_type = other DNA
ttttcatattcgtagctcat

SEQ ID NO: 234129 - DNA, 20 bp, synthetic construct
  source 1..20: mol_type = other DNA
attttcatattcgtagctca

SEQ ID NO: 234130 - DNA, 20 bp, synthetic construct
  source 1..20: mol_type = other DNA
tattttcatattcgtagctc

SEQ ID NO: 234131 - DNA, 20 bp, synthetic construct
  source 1..20: mol_type = other DNA
atattttcatattcgtagct

SEQ ID NO: 234132 - DNA, 20 bp, synthetic construct
  source 1..20: mol_type = other DNA
catattttcatattcgtagc

SEQ ID NO: 234133 - DNA, 20 bp, synthetic construct
  source 1..20: mol_type = other DNA
gcatattttcatattcgtag

SEQ ID NO: 234134 - DNA, 20 bp, synthetic construct
  source 1..20: mol_type = other DNA
tgcatattttcatattcgta

SEQ ID NO: 234135 - DNA, 20 bp, synthetic construct
  source 1..20: mol_type = other DNA
ttgcatattttcatattcgt

SEQ ID NO: 234136 - DNA, 20 bp, synthetic construct
  source 1..20: mol_type = other DNA
tttgcatattttcatattcg

SEQ ID NO: 234137 - DNA, 20 bp, synthetic construct
  source 1..20: mol_type = other DNA
atttgcatattttcatattc

SEQ ID NO: 234138 - DNA, 20 bp, synthetic construct
  source 1..20: mol_type = other DNA
catttgcatattttcatatt

SEQ ID NO: 234139 - DNA, 20 bp, synthetic construct
  source 1..20: mol_type = other DNA
acatttgcatattttcatat

SEQ ID NO: 234140 - DNA, 20 bp, synthetic construct
  source 1..20: mol_type = other DNA
cacatttgcatattttcata

SEQ ID NO: 234141 - DNA, 20 bp, synthetic construct
  source 1..20: mol_type = other DNA
acacatttgcatattttcat

SEQ ID NO: 234142 - DNA, 20 bp, synthetic construct
  source 1..20: mol_type = other DNA
tacacatttgcatattttca

SEQ ID NO: 234143 - DNA, 20 bp, synthetic construct
  source 1..20: mol_type = other DNA
ttacacatttgcatattttc

SEQ ID NO: 234144 - DNA, 20 bp, synthetic construct
  source 1..20: mol_type = other DNA
cttacacatttgcatatttt

SEQ ID NO: 234145 - DNA, 20 bp, synthetic construct
  source 1..20: mol_type = other DNA
tcttacacatttgcatattt

SEQ ID NO: 234146 - DNA, 20 bp, synthetic construct
  source 1..20: mol_type = other DNA
ttcttacacatttgcatatt

SEQ ID NO: 234147 - DNA, 20 bp, synthetic construct
  source 1..20: mol_type = other DNA
tttcttacacatttgcatat

SEQ ID NO: 234148 - DNA, 20 bp, synthetic construct
  source 1..20: mol_type = other DNA
ttttcttacacatttgcata

SEQ ID NO: 234149 - DNA, 20 bp, synthetic construct
  source 1..20: mol_type = other DNA
cttttcttacacatttgcat

SEQ ID NO: 234150 - DNA, 20 bp, synthetic construct
  source 1..20: mol_type = other DNA
gcttttcttacacatttgca

SEQ ID NO: 234151 - DNA, 20 bp, synthetic construct
  source 1..20: mol_type = other DNA
ggcttttcttacacatttgc

SEQ ID NO: 234152 - DNA, 20 bp, synthetic construct
  source 1..20: mol_type = other DNA
tggcttttcttacacatttg

SEQ ID NO: 234153 - DNA, 20 bp, synthetic construct
  source 1..20: mol_type = other DNA
ctggcttttcttacacattt

SEQ ID NO: 234154 - DNA, 20 bp, synthetic construct
  source 1..20: mol_type = other DNA
gctggcttttcttacacatt

SEQ ID NO: 234155 - DNA, 20 bp, synthetic construct
  source 1..20: mol_type = other DNA
tgctggcttttcttacacat

SEQ ID NO: 234156 - DNA, 20 bp, synthetic construct
  source 1..20: mol_type = other DNA
gtgctggcttttcttacaca

SEQ ID NO: 234157 - DNA, 20 bp, synthetic construct
  source 1..20: mol_type = other DNA
tgtgctggcttttcttacac

SEQ ID NO: 234158 - DNA, 20 bp, synthetic construct
  source 1..20: mol_type = other DNA
atgtgctggcttttcttaca

SEQ ID NO: 234159 - DNA, 20 bp, synthetic construct
  source 1..20: mol_type = other DNA
gatgtgctggcttttcttac

SEQ ID NO: 234160 - DNA, 20 bp, synthetic construct
  source 1..20: mol_type = other DNA
ggatgtgctggcttttctta

SEQ ID NO: 234161 - DNA, 20 bp, synthetic construct
  source 1..20: mol_type = other DNA
cggatgtgctggcttttctt

SEQ ID NO: 234162 - DNA, 20 bp, synthetic construct
  source 1..20: mol_type = other DNA
tcggatgtgctggcttttct

SEQ ID NO: 234163 - DNA, 20 bp, synthetic construct
  source 1..20: mol_type = other DNA
atcggatgtgctggcttttc

SEQ ID NO: 234164 - DNA, 20 bp, synthetic construct
  source 1..20: mol_type = other DNA
aatcggatgtgctggctttt

SEQ ID NO: 234165 - DNA, 20 bp, synthetic construct
  source 1..20: mol_type = other DNA
aaatcggatgtgctggcttt

SEQ ID NO: 234166 - DNA, 20 bp, synthetic construct
  source 1..20: mol_type = other DNA
aaaatcggatgtgctggctt

SEQ ID NO: 234167 - DNA, 20 bp, synthetic construct
  source 1..20: mol_type = other DNA
aaaaatcggatgtgctggct

SEQ ID NO: 234168 - DNA, 20 bp, synthetic construct
  source 1..20: mol_type = other DNA
taaaaatcggatgtgctggc

SEQ ID NO: 234169 - DNA, 20 bp, synthetic construct
  source 1..20: mol_type = other DNA
gtaaaaatcggatgtgctgg

SEQ ID NO: 234170 - DNA, 20 bp, synthetic construct
  source 1..20: mol_type = other DNA
agtaaaaatcggatgtgctg

SEQ ID NO: 234171 - DNA, 20 bp, synthetic construct
  source 1..20: mol_type = other DNA
aagtaaaaatcggatgtgct

SEQ ID NO: 234172 - DNA, 20 bp, synthetic construct
  source 1..20: mol_type = other DNA
aaagtaaaaatcggatgtgc

SEQ ID NO: 234173 - DNA, 20 bp, synthetic construct
  source 1..20: mol_type = other DNA
aaaagtaaaaatcggatgtg

SEQ ID NO: 234174 - DNA, 20 bp, synthetic construct
  source 1..20: mol_type = other DNA
taaaagtaaaaatcggatgt

SEQ ID NO: 234175 - DNA, 20 bp, synthetic construct
  source 1..20: mol_type = other DNA
gtaaaagtaaaaatcggatg

SEQ ID NO: 234176 - DNA, 20 bp, synthetic construct
  source 1..20: mol_type = other DNA
agtaaaagtaaaaatcggat

SEQ ID NO: 234177 - DNA, 20 bp, synthetic construct
  source 1..20: mol_type = other DNA
aagtaaaagtaaaaatcgga

SEQ ID NO: 234178 - DNA, 20 bp, synthetic construct
  source 1..20: mol_type = other DNA
aaagtaaaagtaaaaatcgg

SEQ ID NO: 234179 - DNA, 20 bp, synthetic construct
  source 1..20: mol_type = other DNA
gaaagtaaaagtaaaaatcg

SEQ ID NO: 234180 - DNA, 20 bp, synthetic construct
  source 1..20: mol_type = other DNA
tgaaagtaaaagtaaaaatc

SEQ ID NO: 234181 - DNA, 20 bp, synthetic construct
  source 1..20: mol_type = other DNA
gtgaaagtaaaagtaaaaat

SEQ ID NO: 234182 - DNA, 20 bp, synthetic construct
  source 1..20: mol_type = other DNA
tgtgaaagtaaaagtaaaaa

SEQ ID NO: 234183 - DNA, 20 bp, synthetic construct
  source 1..20: mol_type = other DNA
gtgtgaaagtaaaagtaaaa

SEQ ID NO: 234184 - DNA, 20 bp, synthetic construct
  source 1..20: mol_type = other DNA
ggtgtgaaagtaaaagtaaa

SEQ ID NO: 234185 - DNA, 20 bp, synthetic construct
  source 1..20: mol_type = other DNA
aggtgtgaaagtaaaagtaa

SEQ ID NO: 234186 - DNA, 20 bp, synthetic construct
  source 1..20: mol_type = other DNA
gaggtgtgaaagtaaaagta

SEQ ID NO: 234187 - DNA, 20 bp, synthetic construct
  source 1..20: mol_type = other DNA
agaggtgtgaaagtaaaagt

SEQ ID NO: 234188 - DNA, 20 bp, synthetic construct
  source 1..20: mol_type = other DNA
cagaggtgtgaaagtaaaag

SEQ ID NO: 234189 - DNA, 20 bp, synthetic construct
  source 1..20: mol_type = other DNA
acagaggtgtgaaagtaaaa

SEQ ID NO: 234190 - DNA, 20 bp, synthetic construct
  source 1..20: mol_type = other DNA
gacagaggtgtgaaagtaaa

SEQ ID NO: 234191 - DNA, 20 bp, synthetic construct
  source 1..20: mol_type = other DNA
ggacagaggtgtgaaagtaa

SEQ ID NO: 234192 - DNA, 20 bp, synthetic construct
  source 1..20: mol_type = other DNA
tggacagaggtgtgaaagta

SEQ ID NO: 234193 - DNA, 20 bp, synthetic construct
  source 1..20: mol_type = other DNA
gtggacagaggtgtgaaagt

SEQ ID NO: 234194 - DNA, 20 bp, synthetic construct
  source 1..20: mol_type = other DNA
ggtggacagaggtgtgaaag

SEQ ID NO: 234195 - DNA, 20 bp, synthetic construct
  source 1..20: mol_type = other DNA
tggtggacagaggtgtgaaa

SEQ ID NO: 234196 - DNA, 20 bp, synthetic construct
  source 1..20: mol_type = other DNA
atggtggacagaggtgtgaa

SEQ ID NO: 234197 - DNA, 20 bp, synthetic construct
  source 1..20: mol_type = other DNA
catggtggacagaggtgtga

SEQ ID NO: 234198 - DNA, 20 bp, synthetic construct
  source 1..20: mol_type = other DNA
acatggtggacagaggtgtg

SEQ ID NO: 234199 - DNA, 20 bp, synthetic construct
  source 1..20: mol_type = other DNA
aacatggtggacagaggtgt

SEQ ID NO: 234200 - DNA, 20 bp, synthetic construct
  source 1..20: mol_type = other DNA
gaacatggtggacagaggtg

SEQ ID NO: 234201 - DNA, 20 bp, synthetic construct
  source 1..20: mol_type = other DNA
ggaacatggtggacagaggt

SEQ ID NO: 234202 - DNA, 20 bp, synthetic construct
  source 1..20: mol_type = other DNA
tggaacatggtggacagagg

SEQ ID NO: 234203 - DNA, 20 bp, synthetic construct
  source 1..20: mol_type = other DNA
ttggaacatggtggacagag

SEQ ID NO: 234204 - DNA, 20 bp, synthetic construct
  source 1..20: mol_type = other DNA
cttggaacatggtggacaga

SEQ ID NO: 234205 - DNA, 20 bp, synthetic construct
  source 1..20: mol_type = other DNA
tcttggaacatggtggacag

SEQ ID NO: 234206 - DNA, 20 bp, synthetic construct
  source 1..20: mol_type = other DNA
ctcttggaacatggtggaca

SEQ ID NO: 234207 - DNA, 20 bp, synthetic construct
  source 1..20: mol_type = other DNA
tctcttggaacatggtggac

SEQ ID NO: 234208 - DNA, 20 bp, synthetic construct
  source 1..20: mol_type = other DNA
ttctcttggaacatggtgga

SEQ ID NO: 234209 - DNA, 20 bp, synthetic construct
  source 1..20: mol_type = other DNA
cttctcttggaacatggtgg

SEQ ID NO: 234210 - DNA, 20 bp, synthetic construct
  source 1..20: mol_type = other DNA
tcttctcttggaacatggtg

SEQ ID NO: 234211 - DNA, 20 bp, synthetic construct
  source 1..20: mol_type = other DNA
ttcttctcttggaacatggt

SEQ ID NO: 234212 - DNA, 20 bp, synthetic construct
  source 1..20: mol_type = other DNA
tttcttctcttggaacatgg

SEQ ID NO: 234213 - DNA, 20 bp, synthetic construct
  source 1..20: mol_type = other DNA
gtttcttctcttggaacatg

SEQ ID NO: 234214 - DNA, 20 bp, synthetic construct
  source 1..20: mol_type = other DNA
agtttcttctcttggaacat

SEQ ID NO: 234215 - DNA, 20 bp, synthetic construct
  source 1..20: mol_type = other DNA
aagtttcttctcttggaaca

SEQ ID NO: 234216 - DNA, 20 bp, synthetic construct
  source 1..20: mol_type = other DNA
caagtttcttctcttggaac

SEQ ID NO: 234217 - DNA, 20 bp, synthetic construct
  source 1..20: mol_type = other DNA
ccaagtttcttctcttggaa

SEQ ID NO: 234218 - DNA, 20 bp, synthetic construct
  source 1..20: mol_type = other DNA
accaagtttcttctcttgga

SEQ ID NO: 234219 - DNA, 20 bp, synthetic construct
  source 1..20: mol_type = other DNA
gaccaagtttcttctcttgg

SEQ ID NO: 234220 - DNA, 20 bp, synthetic construct
  source 1..20: mol_type = other DNA
tgaccaagtttcttctcttg

SEQ ID NO: 234221 - DNA, 20 bp, synthetic construct
  source 1..20: mol_type = other DNA
atgaccaagtttcttctctt

SEQ ID NO: 234222 - DNA, 20 bp, synthetic construct
  source 1..20: mol_type = other DNA
aatgaccaagtttcttctct

SEQ ID NO: 234223 - DNA, 20 bp, synthetic construct
  source 1..20: mol_type = other DNA
caatgaccaagtttcttctc

SEQ ID NO: 234224 - DNA, 20 bp, synthetic construct
  source 1..20: mol_type = other DNA
tcaatgaccaagtttcttct

SEQ ID NO: 234225 - DNA, 20 bp, synthetic construct
  source 1..20: mol_type = other DNA
ttcaatgaccaagtttcttc

SEQ ID NO: 234226 - DNA, 20 bp, synthetic construct
  source 1..20: mol_type = other DNA
tttcaatgaccaagtttctt

SEQ ID NO: 234227 - DNA, 20 bp, synthetic construct
  source 1..20: mol_type = other DNA
ctttcaatgaccaagtttct

SEQ ID NO: 234228 - DNA, 20 bp, synthetic construct
  source 1..20: mol_type = other DNA
cctttcaatgaccaagtttc

SEQ ID NO: 234229 - DNA, 20 bp, synthetic construct
  source 1..20: mol_type = other DNA
tcctttcaatgaccaagttt

SEQ ID NO: 234230 - DNA, 20 bp, synthetic construct
  source 1..20: mol_type = other DNA
ttcctttcaatgaccaagtt

SEQ ID NO: 234231 - DNA, 20 bp, synthetic construct
  source 1..20: mol_type = other DNA
attcctttcaatgaccaagt

SEQ ID NO: 234232 - DNA, 20 bp, synthetic construct
  source 1..20: mol_type = other DNA
tattcctttcaatgaccaag

SEQ ID NO: 234233 - DNA, 20 bp, synthetic construct
  source 1..20: mol_type = other DNA
ctattcctttcaatgaccaa

SEQ ID NO: 234234 - DNA, 20 bp, synthetic construct
  source 1..20: mol_type = other DNA
tctattcctttcaatgacca

SEQ ID NO: 234235 - DNA, 20 bp, synthetic construct
  source 1..20: mol_type = other DNA
atctattcctttcaatgacc

SEQ ID NO: 234236 - DNA, 20 bp, synthetic construct
  source 1..20: mol_type = other DNA
gatctattcctttcaatgac

SEQ ID NO: 234237 - DNA, 20 bp, synthetic construct
  source 1..20: mol_type = other DNA
tgatctattcctttcaatga

SEQ ID NO: 234238 - DNA, 20 bp, synthetic construct
  source 1..20: mol_type = other DNA
ttgatctattcctttcaatg

SEQ ID NO: 234239 - DNA, 20 bp, synthetic construct
  source 1..20: mol_type = other DNA
tttgatctattcctttcaat

SEQ ID NO: 234240 - DNA, 20 bp, synthetic construct
  source 1..20: mol_type = other DNA
atttgatctattcctttcaa

SEQ ID NO: 234241 - DNA, 20 bp, synthetic construct
  source 1..20: mol_type = other DNA
gatttgatctattcctttca

SEQ ID NO: 234242 - DNA, 20 bp, synthetic construct
  source 1..20: mol_type = other DNA
ggatttgatctattcctttc

SEQ ID NO: 234243 - DNA, 20 bp, synthetic construct
  source 1..20: mol_type = other DNA
tggatttgatctattccttt

SEQ ID NO: 234244 - DNA, 20 bp, synthetic construct
  source 1..20: mol_type = other DNA
ttggatttgatctattcctt

SEQ ID NO: 234245 - DNA, 20 bp, synthetic construct
  source 1..20: mol_type = other DNA
tttggatttgatctattcct

SEQ ID NO: 234246 - DNA, 20 bp, synthetic construct
  source 1..20: mol_type = other DNA
ctttggatttgatctattcc

SEQ ID NO: 234247 - DNA, 20 bp, synthetic construct
  source 1..20: mol_type = other DNA
tctttggatttgatctattc

SEQ ID NO: 234248 - DNA, 20 bp, synthetic construct
  source 1..20: mol_type = other DNA
ttctttggatttgatctatt

SEQ ID NO: 234249 - DNA, 20 bp, synthetic construct
  source 1..20: mol_type = other DNA
gttctttggatttgatctat

SEQ ID NO: 234250 - DNA, 20 bp, synthetic construct
  source 1..20: mol_type = other DNA
tgttctttggatttgatcta

SEQ ID NO: 234251 - DNA, 20 bp, synthetic construct
  source 1..20: mol_type = other DNA
ttgttctttggatttgatct

SEQ ID NO: 234252 - DNA, 20 bp, synthetic construct
  source 1..20: mol_type = other DNA
tttgttctttggatttgatc

SEQ ID NO: 234253 - DNA, 20 bp, synthetic construct
  source 1..20: mol_type = other DNA
ttttgttctttggatttgat

SEQ ID NO: 234254 - DNA, 20 bp, synthetic construct
  source 1..20: mol_type = other DNA
gttttgttctttggatttga

SEQ ID NO: 234255 - DNA, 20 bp, synthetic construct
  source 1..20: mol_type = other DNA
ggttttgttctttggatttg

SEQ ID NO: 234256 - DNA, 20 bp, synthetic construct
  source 1..20: mol_type = other DNA
tggttttgttctttggattt

SEQ ID NO: 234257 - DNA, 20 bp, synthetic construct
  source 1..20: mol_type = other DNA
gtggttttgttctttggatt

SEQ ID NO: 234258 - DNA, 20 bp, synthetic construct
  source 1..20: mol_type = other DNA
agtggttttgttctttggat

SEQ ID NO: 234259 - DNA, 20 bp, synthetic construct
  source 1..20: mol_type = other DNA
cagtggttttgttctttgga

SEQ ID NO: 234260 - DNA, 20 bp, synthetic construct
  source 1..20: mol_type = other DNA
acagtggttttgttctttgg

SEQ ID NO: 234261 - DNA, 20 bp, synthetic construct
  source 1..20: mol_type = other DNA
cacagtggttttgttctttg

SEQ ID NO: 234262 - DNA, 20 bp, synthetic construct
  source 1..20: mol_type = other DNA
gcacagtggttttgttcttt

SEQ ID NO: 234263 - DNA, 20 bp, synthetic construct
  source 1..20: mol_type = other DNA
agcacagtggttttgttctt

SEQ ID NO: 234264 - DNA, 20 bp, synthetic construct
  source 1..20: mol_type = other DNA
gagcacagtggttttgttct

SEQ ID NO: 234265 - DNA, 20 bp, synthetic construct
  source 1..20: mol_type = other DNA
tgagcacagtggttttgttc

SEQ ID NO: 234266 - DNA, 20 bp, synthetic construct
  source 1..20: mol_type = other DNA
atgagcacagtggttttgtt

SEQ ID NO: 234267 - DNA, 20 bp, synthetic construct
  source 1..20: mol_type = other DNA
aatgagcacagtggttttgt

SEQ ID NO: 234268 - DNA, 20 bp, synthetic construct
  source 1..20: mol_type = other DNA
taatgagcacagtggttttg

SEQ ID NO: 234269 - DNA, 20 bp, synthetic construct
  source 1..20: mol_type = other DNA
ttaatgagcacagtggtttt

SEQ ID NO: 234270 - DNA, 20 bp, synthetic construct
  source 1..20: mol_type = other DNA
tttaatgagcacagtggttt

SEQ ID NO: 234271 - DNA, 20 bp, synthetic construct
  source 1..20: mol_type = other DNA
gtttaatgagcacagtggtt

SEQ ID NO: 234272 - DNA, 20 bp, synthetic construct
  source 1..20: mol_type = other DNA
agtttaatgagcacagtggt

SEQ ID NO: 234273 - DNA, 20 bp, synthetic construct
  source 1..20: mol_type = other DNA
aagtttaatgagcacagtgg

SEQ ID NO: 234274 - DNA, 20 bp, synthetic construct
  source 1..20: mol_type = other DNA
gaagtttaatgagcacagtg

SEQ ID NO: 234275 - DNA, 20 bp, synthetic construct
  source 1..20: mol_type = other DNA
agaagtttaatgagcacagt

SEQ ID NO: 234276 - DNA, 20 bp, synthetic construct
  source 1..20: mol_type = other DNA
aagaagtttaatgagcacag

SEQ ID NO: 234277 - DNA, 20 bp, synthetic construct
  source 1..20: mol_type = other DNA
taagaagtttaatgagcaca

SEQ ID NO: 234278 - DNA, 20 bp, synthetic construct
  source 1..20: mol_type = other DNA
ctaagaagtttaatgagcac

SEQ ID NO: 234279 - DNA, 20 bp, synthetic construct
  source 1..20: mol_type = other DNA
actaagaagtttaatgagca

SEQ ID NO: 234280 - DNA, 20 bp, synthetic construct
  source 1..20: mol_type = other DNA
cactaagaagtttaatgagc

SEQ ID NO: 234281 - DNA, 20 bp, synthetic construct
  source 1..20: mol_type = other DNA
acactaagaagtttaatgag

SEQ ID NO: 234282 - DNA, 20 bp, synthetic construct
  source 1..20: mol_type = other DNA
aacactaagaagtttaatga

SEQ ID NO: 234283 - DNA, 20 bp, synthetic construct
  source 1..20: mol_type = other DNA
gaacactaagaagtttaatg

SEQ ID NO: 234284 - DNA, 20 bp, synthetic construct
  source 1..20: mol_type = other DNA
tgaacactaagaagtttaat

SEQ ID NO: 234285 - DNA, 20 bp, synthetic construct
  source 1..20: mol_type = other DNA
gtgaacactaagaagtttaa

SEQ ID NO: 234286 - DNA, 20 bp, synthetic construct
  source 1..20: mol_type = other DNA
tgtgaacactaagaagttta

SEQ ID NO: 234287 - DNA, 20 bp, synthetic construct
  source 1..20: mol_type = other DNA
ttgtgaacactaagaagttt

SEQ ID NO: 234288 - DNA, 20 bp, synthetic construct
  source 1..20: mol_type = other DNA
tttgtgaacactaagaagtt

SEQ ID NO: 234289 - DNA, 20 bp, synthetic construct
  source 1..20: mol_type = other DNA
ctttgtgaacactaagaagt

SEQ ID NO: 234290 - DNA, 20 bp, synthetic construct
  source 1..20: mol_type = other DNA
gctttgtgaacactaagaag

SEQ ID NO: 234291 - DNA, 20 bp, synthetic construct
  source 1..20: mol_type = other DNA
agctttgtgaacactaagaa

SEQ ID NO: 234292 - DNA, 20 bp, synthetic construct
  source 1..20: mol_type = other DNA
aagctttgtgaacactaaga

SEQ ID NO: 234293 - DNA, 20 bp, synthetic construct
  source 1..20: mol_type = other DNA
aaagctttgtgaacactaag

SEQ ID NO: 234294 - DNA, 20 bp, synthetic construct
  source 1..20: mol_type = other DNA
taaagctttgtgaacactaa

SEQ ID NO: 234295 - DNA, 20 bp, synthetic construct
  source 1..20: mol_type = other DNA
ctaaagctttgtgaacacta

SEQ ID NO: 234296 - DNA, 20 bp, synthetic construct
  source 1..20: mol_type = other DNA
gctaaagctttgtgaacact

SEQ ID NO: 234297 - DNA, 20 bp, synthetic construct
  source 1..20: mol_type = other DNA
agctaaagctttgtgaacac

SEQ ID NO: 234298 - DNA, 20 bp, synthetic construct
  source 1..20: mol_type = other DNA
cagctaaagctttgtgaaca

SEQ ID NO: 234299 - DNA, 20 bp, synthetic construct
  source 1..20: mol_type = other DNA
gcagctaaagctttgtgaac

SEQ ID NO: 234300 - DNA, 20 bp, synthetic construct
  source 1..20: mol_type = other DNA
tgcagctaaagctttgtgaa

SEQ ID NO: 234301 - DNA, 20 bp, synthetic construct
  source 1..20: mol_type = other DNA
ctgcagctaaagctttgtga

SEQ ID NO: 234302 - DNA, 20 bp, synthetic construct
  source 1..20: mol_type = other DNA
cctgcagctaaagctttgtg

SEQ ID NO: 234303 - DNA, 20 bp, synthetic construct
  source 1..20: mol_type = other DNA
acctgcagctaaagctttgt

SEQ ID NO: 234304 - DNA, 20 bp, synthetic construct
  source 1..20: mol_type = other DNA
aacctgcagctaaagctttg

SEQ ID NO: 234305 - DNA, 20 bp, synthetic construct
  source 1..20: mol_type = other DNA
caacctgcagctaaagcttt

SEQ ID NO: 234306 - DNA, 20 bp, synthetic construct
  source 1..20: mol_type = other DNA
tcaacctgcagctaaagctt

SEQ ID NO: 234307 - DNA, 20 bp, synthetic construct
  source 1..20: mol_type = other DNA
ttcaacctgcagctaaagct

SEQ ID NO: 234308 - DNA, 20 bp, synthetic construct
  source 1..20: mol_type = other DNA
attcaacctgcagctaaagc

SEQ ID NO: 234309 - DNA, 20 bp, synthetic construct
  source 1..20: mol_type = other DNA
cattcaacctgcagctaaag

SEQ ID NO: 234310 - DNA, 20 bp, synthetic construct
  source 1..20: mol_type = other DNA
ccattcaacctgcagctaaa

SEQ ID NO: 234311 - DNA, 20 bp, synthetic construct
  source 1..20: mol_type = other DNA
cccattcaacctgcagctaa

SEQ ID NO: 234312 - DNA, 20 bp, synthetic construct
  source 1..20: mol_type = other DNA
ccccattcaacctgcagcta

SEQ ID NO: 234313 - DNA, 20 bp, synthetic construct
  source 1..20: mol_type = other DNA
gccccattcaacctgcagct

SEQ ID NO: 234314 - DNA, 20 bp, synthetic construct
  source 1..20: mol_type = other DNA
tgccccattcaacctgcagc

SEQ ID NO: 234315 - DNA, 20 bp, synthetic construct
  source 1..20: mol_type = other DNA
ttgccccattcaacctgcag

SEQ ID NO: 234316 - DNA, 20 bp, synthetic construct
  source 1..20: mol_type = other DNA
gttgccccattcaacctgca

SEQ ID NO: 234317 - DNA, 20 bp, synthetic construct
  source 1..20: mol_type = other DNA
ggttgccccattcaacctgc

SEQ ID NO: 234318 - DNA, 20 bp, synthetic construct
  source 1..20: mol_type = other DNA
gggttgccccattcaacctg

SEQ ID NO: 234319 - DNA, 20 bp, synthetic construct
  source 1..20: mol_type = other DNA
cgggttgccccattcaacct

SEQ ID NO: 234320 - DNA, 20 bp, synthetic construct
  source 1..20: mol_type = other DNA
tcgggttgccccattcaacc

SEQ ID NO: 234321 - DNA, 20 bp, synthetic construct
  source 1..20: mol_type = other DNA
ttcgggttgccccattcaac

SEQ ID NO: 234322 - DNA, 20 bp, synthetic construct
  source 1..20: mol_type = other DNA
attcgggttgccccattcaa

SEQ ID NO: 234323 - DNA, 20 bp, synthetic construct
  source 1..20: mol_type = other DNA
aattcgggttgccccattca

SEQ ID NO: 234324 - DNA, 20 bp, synthetic construct
  source 1..20: mol_type = other DNA
caattcgggttgccccattc

SEQ ID NO: 234325 - DNA, 20 bp, synthetic construct
  source 1..20: mol_type = other DNA
ccaattcgggttgccccatt

SEQ ID NO: 234326 - DNA, 20 bp, synthetic construct
  source 1..20: mol_type = other DNA
gccaattcgggttgccccat

SEQ ID NO: 234327 - DNA, 20 bp, synthetic construct
  source 1..20: mol_type = other DNA
agccaattcgggttgcccca

SEQ ID NO: 234328 - DNA, 20 bp, synthetic construct
  source 1..20: mol_type = other DNA
cagccaattcgggttgcccc

SEQ ID NO: 234329 - DNA, 20 bp, synthetic construct
  source 1..20: mol_type = other DNA
ccagccaattcgggttgccc

SEQ ID NO: 234330 - DNA, 20 bp, synthetic construct
  source 1..20: mol_type = other DNA
gccagccaattcgggttgcc

SEQ ID NO: 234331 - DNA, 20 bp, synthetic construct
  source 1..20: mol_type = other DNA
agccagccaattcgggttgc

SEQ ID NO: 234332 - DNA, 20 bp, synthetic construct
  source 1..20: mol_type = other DNA
gagccagccaattcgggttg

SEQ ID NO: 234333 - DNA, 20 bp, synthetic construct
  source 1..20: mol_type = other DNA
tgagccagccaattcgggtt

SEQ ID NO: 234334 - DNA, 20 bp, synthetic construct
  source 1..20: mol_type = other DNA
gtgagccagccaattcgggt

SEQ ID NO: 234335 - DNA, 20 bp, synthetic construct
  source 1..20: mol_type = other DNA
ggtgagccagccaattcggg

SEQ ID NO: 234336 - DNA, 20 bp, synthetic construct
  source 1..20: mol_type = other DNA
aggtgagccagccaattcgg

SEQ ID NO: 234337 - DNA, 20 bp, synthetic construct
  source 1..20: mol_type = other DNA
caggtgagccagccaattcg

SEQ ID NO: 234338 - DNA, 20 bp, synthetic construct
  source 1..20: mol_type = other DNA
ccaggtgagccagccaattc

SEQ ID NO: 234339 - DNA, 20 bp, synthetic construct
  source 1..20: mol_type = other DNA
cccaggtgagccagccaatt

SEQ ID NO: 234340 - DNA, 20 bp, synthetic construct
  source 1..20: mol_type = other DNA
gcccaggtgagccagccaat

SEQ ID NO: 234341 - DNA, 20 bp, synthetic construct
  source 1..20: mol_type = other DNA
agcccaggtgagccagccaa

SEQ ID NO: 234342 - DNA, 20 bp, synthetic construct
  source 1..20: mol_type = other DNA
cagcccaggtgagccagcca

SEQ ID NO: 234343 - DNA, 20 bp, synthetic construct
  source 1..20: mol_type = other DNA
gcagcccaggtgagccagcc

SEQ ID NO: 234344 - DNA, 20 bp, synthetic construct
  source 1..20: mol_type = other DNA
tgcagcccaggtgagccagc

SEQ ID NO: 234345 - DNA, 20 bp, synthetic construct
  source 1..20: mol_type = other DNA
ctgcagcccaggtgagccag

SEQ ID NO: 234346 - DNA, 20 bp, synthetic construct
  source 1..20: mol_type = other DNA
cctgcagcccaggtgagcca

SEQ ID NO: 234347 - DNA, 20 bp, synthetic construct
  source 1..20: mol_type = other DNA
ccctgcagcccaggtgagcc

SEQ ID NO: 234348 - DNA, 20 bp, synthetic construct
  source 1..20: mol_type = other DNA
tccctgcagcccaggtgagc

SEQ ID NO: 234349 - DNA, 20 bp, synthetic construct
  source 1..20: mol_type = other DNA
ctccctgcagcccaggtgag

SEQ ID NO: 234350 - DNA, 20 bp, synthetic construct
  source 1..20: mol_type = other DNA
gctccctgcagcccaggtga

SEQ ID NO: 234351 - DNA, 20 bp, synthetic construct
  source 1..20: mol_type = other DNA
tgctccctgcagcccaggtg

SEQ ID NO: 234352 - DNA, 20 bp, synthetic construct
  source 1..20: mol_type = other DNA
ctgctccctgcagcccaggt

SEQ ID NO: 234353 - DNA, 20 bp, synthetic construct
  source 1..20: mol_type = other DNA
tctgctccctgcagcccagg

SEQ ID NO: 234354 - DNA, 20 bp, synthetic construct
  source 1..20: mol_type = other DNA
ctctgctccctgcagcccag

SEQ ID NO: 234355 - DNA, 20 bp, synthetic construct
  source 1..20: mol_type = other DNA
tctctgctccctgcagccca

SEQ ID NO: 234356 - DNA, 20 bp, synthetic construct
  source 1..20: mol_type = other DNA
atctctgctccctgcagccc

SEQ ID NO: 234357 - DNA, 20 bp, synthetic construct
  source 1..20: mol_type = other DNA
gatctctgctccctgcagcc

SEQ ID NO: 234358 - DNA, 20 bp, synthetic construct
  source 1..20: mol_type = other DNA
cgatctctgctccctgcagc

SEQ ID NO: 234359 - DNA, 20 bp, synthetic construct
  source 1..20: mol_type = other DNA
gcgatctctgctccctgcag

SEQ ID NO: 234360 - DNA, 20 bp, synthetic construct
  source 1..20: mol_type = other DNA
cgcgatctctgctccctgca

SEQ ID NO: 234361 - DNA, 20 bp, synthetic construct
  source 1..20: mol_type = other DNA
tcgcgatctctgctccctgc

SEQ ID NO: 234362 - DNA, 20 bp, synthetic construct
  source 1..20: mol_type = other DNA
gtcgcgatctctgctccctg

SEQ ID NO: 234363 - DNA, 20 bp, synthetic construct
  source 1..20: mol_type = other DNA
tgtcgcgatctctgctccct

SEQ ID NO: 234364 - DNA, 20 bp, synthetic construct
  source 1..20: mol_type = other DNA
gtgtcgcgatctctgctccc

SEQ ID NO: 234365 - DNA, 20 bp, synthetic construct
  source 1..20: mol_type = other DNA
agtgtcgcgatctctgctcc

SEQ ID NO: 234366 - DNA, 20 bp, synthetic construct
  source 1..20: mol_type = other DNA
cagtgtcgcgatctctgctc

SEQ ID NO: 234367 - DNA, 20 bp, synthetic construct
  source 1..20: mol_type = other DNA
gcagtgtcgcgatctctgct

SEQ ID NO: 234368 - DNA, 20 bp, synthetic construct
  source 1..20: mol_type = other DNA
tgcagtgtcgcgatctctgc

SEQ ID NO: 234369 - DNA, 20 bp, synthetic construct
  source 1..20: mol_type = other DNA
gtgcagtgtcgcgatctctg

SEQ ID NO: 234370 - DNA, 20 bp, synthetic construct
  source 1..20: mol_type = other DNA
agtgcagtgtcgcgatctct

SEQ ID NO: 234371 - DNA, 20 bp, synthetic construct
  source 1..20: mol_type = other DNA
gagtgcagtgtcgcgatctc

SEQ ID NO: 234372 - DNA, 20 bp, synthetic construct
  source 1..20: mol_type = other DNA
ggagtgcagtgtcgcgatct

SEQ ID NO: 234373 - DNA, 20 bp, synthetic construct
  source 1..20: mol_type = other DNA
tggagtgcagtgtcgcgatc

SEQ ID NO: 234374 - DNA, 20 bp, synthetic construct
  source 1..20: mol_type = other DNA
ctggagtgcagtgtcgcgat

SEQ ID NO: 234375 - DNA, 20 bp, synthetic construct
  source 1..20: mol_type = other DNA
gctggagtgcagtgtcgcga

SEQ ID NO: 234376 - DNA, 20 bp, synthetic construct
  source 1..20: mol_type = other DNA
ggctggagtgcagtgtcgcg

SEQ ID NO: 234377 - DNA, 20 bp, synthetic construct
  source 1..20: mol_type = other DNA
aggctggagtgcagtgtcgc

SEQ ID NO: 234378 - DNA, 20 bp, synthetic construct
  source 1..20: mol_type = other DNA
caggctggagtgcagtgtcg

SEQ ID NO: 234379 - DNA, 20 bp, synthetic construct
  source 1..20: mol_type = other DNA
ccaggctggagtgcagtgtc

SEQ ID NO: 234380 - DNA, 20 bp, synthetic construct
  source 1..20: mol_type = other DNA
cccaggctggagtgcagtgt

SEQ ID NO: 234381 - DNA, 20 bp, synthetic construct
  source 1..20: mol_type = other DNA
gcccaggctggagtgcagtg

SEQ ID NO: 234382 - DNA, 20 bp, synthetic construct
  source 1..20: mol_type = other DNA
tgcccaggctggagtgcagt

SEQ ID NO: 234383 - DNA, 20 bp, synthetic construct
  source 1..20: mol_type = other DNA
ttgcccaggctggagtgcag

SEQ ID NO: 234384 - DNA, 20 bp, synthetic construct
  source 1..20: mol_type = other DNA
gttgcccaggctggagtgca

SEQ ID NO: 234385 - DNA, 20 bp, synthetic construct
  source 1..20: mol_type = other DNA
tgttgcccaggctggagtgc

SEQ ID NO: 234386 - DNA, 20 bp, synthetic construct
  source 1..20: mol_type = other DNA
ttgttgcccaggctggagtg

SEQ ID NO: 234387 - DNA, 20 bp, synthetic construct
  source 1..20: mol_type = other DNA
tttgttgcccaggctggagt

SEQ ID NO: 234388 - DNA, 20 bp, synthetic construct
  source 1..20: mol_type = other DNA
ctttgttgcccaggctggag

SEQ ID NO: 234389 - DNA, 20 bp, synthetic construct
  source 1..20: mol_type = other DNA
gctttgttgcccaggctgga

SEQ ID NO: 234390 - DNA, 20 bp, synthetic construct
  source 1..20: mol_type = other DNA
cgctttgttgcccaggctgg

SEQ ID NO: 234391 - DNA, 20 bp, synthetic construct
  source 1..20: mol_type = other DNA
tcgctttgttgcccaggctg

SEQ ID NO: 234392 - DNA, 20 bp, synthetic construct
  source 1..20: mol_type = other DNA
ctcgctttgttgcccaggct

SEQ ID NO: 234393 - DNA, 20 bp, synthetic construct
  source 1..20: mol_type = other DNA
tctcgctttgttgcccaggc

SEQ ID NO: 234394 - DNA, 20 bp, synthetic construct
  source 1..20: mol_type = other DNA
gtctcgctttgttgcccagg

SEQ ID NO: 234395 - DNA, 20 bp, synthetic construct
  source 1..20: mol_type = other DNA
agtctcgctttgttgcccag

SEQ ID NO: 234396 - DNA, 20 bp, synthetic construct
  source 1..20: mol_type = other DNA
gagtctcgctttgttgccca

SEQ ID NO: 234397 - DNA, 20 bp, synthetic construct
  source 1..20: mol_type = other DNA
agagtctcgctttgttgccc

SEQ ID NO: 234398 - DNA, 20 bp, synthetic construct
  source 1..20: mol_type = other DNA
tagagtctcgctttgttgcc

SEQ ID NO: 234399 - DNA, 20 bp, synthetic construct
  source 1..20: mol_type = other DNA
atagagtctcgctttgttgc

SEQ ID NO: 234400 - DNA, 20 bp, synthetic construct
  source 1..20: mol_type = other DNA
gatagagtctcgctttgttg

SEQ ID NO: 234401 - DNA, 20 bp, synthetic construct
  source 1..20: mol_type = other DNA
agatagagtctcgctttgtt

SEQ ID NO: 234402 - DNA, 20 bp, synthetic construct
  source 1..20: mol_type = other DNA
gagatagagtctcgctttgt

SEQ ID NO: 234403 - DNA, 20 bp, synthetic construct
  source 1..20: mol_type = other DNA
tgagatagagtctcgctttg

SEQ ID NO: 234404 - DNA, 20 bp, synthetic construct
  source 1..20: mol_type = other DNA
ttgagatagagtctcgcttt

SEQ ID NO: 234405 - DNA, 20 bp, synthetic construct
  source 1..20: mol_type = other DNA
tttgagatagagtctcgctt

SEQ ID NO: 234406 - DNA, 20 bp, synthetic construct
  source 1..20: mol_type = other DNA
ttttgagatagagtctcgct

SEQ ID NO: 234407 - DNA, 20 bp, synthetic construct
  source 1..20: mol_type = other DNA
tttttgagatagagtctcgc

SEQ ID NO: 234408 - DNA, 20 bp, synthetic construct
  source 1..20: mol_type = other DNA
ttttttgagatagagtctcg

SEQ ID NO: 234409 - DNA, 20 bp, synthetic construct
  source 1..20: mol_type = other DNA
tttttttgagatagagtctc

SEQ ID NO: 234410 - DNA, 20 bp, synthetic construct
  source 1..20: mol_type = other DNA
ttttttttgagatagagtct

SEQ ID NO: 234411 - DNA, 20 bp, synthetic construct
  source 1..20: mol_type = other DNA
tttttttttgagatagagtc

SEQ ID NO: 234412 - DNA, 20 bp, synthetic construct
  source 1..20: mol_type = other DNA
ttttttttttgagatagagt

SEQ ID NO: 234413 - DNA, 20 bp, synthetic construct
  source 1..20: mol_type = other DNA
tttttttttttgagatagag

SEQ ID NO: 234414 - DNA, 20 bp, synthetic construct
  source 1..20: mol_type = other DNA
ttttttttttttgagataga

SEQ ID NO: 234415 - DNA, 20 bp, synthetic construct
  source 1..20: mol_type = other DNA
cttttttttttttgagatag

SEQ ID NO: 234416 - DNA, 20 bp, synthetic construct
  source 1..20: mol_type = other DNA
acttttttttttttgagata

SEQ ID NO: 234417 - DNA, 20 bp, synthetic construct
  source 1..20: mol_type = other DNA
aacttttttttttttgagat

SEQ ID NO: 234418 - DNA, 20 bp, synthetic construct
  source 1..20: mol_type = other DNA
gaacttttttttttttgaga

SEQ ID NO: 234419 - DNA, 20 bp, synthetic construct
  source 1..20: mol_type = other DNA
tgaacttttttttttttgag

SEQ ID NO: 234420 - DNA, 20 bp, synthetic construct
  source 1..20: mol_type = other DNA
atgaacttttttttttttga

SEQ ID NO: 234421 - DNA, 20 bp, synthetic construct
  source 1..20: mol_type = other DNA
tatgaacttttttttttttg

SEQ ID NO: 234422 - DNA, 20 bp, synthetic construct
  source 1..20: mol_type = other DNA
ttatgaactttttttttttt

SEQ ID NO: 234423 - DNA, 20 bp, synthetic construct
  source 1..20: mol_type = other DNA
tttatgaacttttttttttt

SEQ ID NO: 234424 - DNA, 20 bp, synthetic construct
  source 1..20: mol_type = other DNA
atttatgaactttttttttt

SEQ ID NO: 234425 - DNA, 20 bp, synthetic construct
  source 1..20: mol_type = other DNA
aatttatgaacttttttttt

SEQ ID NO: 234426 - DNA, 20 bp, synthetic construct
  source 1..20: mol_type = other DNA
gaatttatgaactttttttt

SEQ ID NO: 234427 - DNA, 20 bp, synthetic construct
  source 1..20: mol_type = other DNA
tgaatttatgaacttttttt

SEQ ID NO: 234428 - DNA, 20 bp, synthetic construct
  source 1..20: mol_type = other DNA
ttgaatttatgaactttttt

SEQ ID NO: 234429 - DNA, 20 bp, synthetic construct
  source 1..20: mol_type = other DNA
tttgaatttatgaacttttt

SEQ ID NO: 234430 - DNA, 20 bp, synthetic construct
  source 1..20: mol_type = other DNA
ctttgaatttatgaactttt

SEQ ID NO: 234431 - DNA, 20 bp, synthetic construct
  source 1..20: mol_type = other DNA
actttgaatttatgaacttt

SEQ ID NO: 234432 - DNA, 20 bp, synthetic construct
  source 1..20: mol_type = other DNA
aactttgaatttatgaactt

SEQ ID NO: 234433 - DNA, 20 bp, synthetic construct
  source 1..20: mol_type = other DNA
taactttgaatttatgaact

SEQ ID NO: 234434 - DNA, 20 bp, synthetic construct
  source 1..20: mol_type = other DNA
ataactttgaatttatgaac

SEQ ID NO: 234435 - DNA, 20 bp, synthetic construct
  source 1..20: mol_type = other DNA
cataactttgaatttatgaa

SEQ ID NO: 234436 - DNA, 20 bp, synthetic construct
  source 1..20: mol_type = other DNA
tcataactttgaatttatga

SEQ ID NO: 234437 - DNA, 20 bp, synthetic construct
  source 1..20: mol_type = other DNA
ttcataactttgaatttatg

SEQ ID NO: 234438 - DNA, 20 bp, synthetic construct
  source 1..20: mol_type = other DNA
attcataactttgaatttat

SEQ ID NO: 234439 - DNA, 20 bp, synthetic construct
  source 1..20: mol_type = other DNA
aattcataactttgaattta

SEQ ID NO: 234440 - DNA, 20 bp, synthetic construct
  source 1..20: mol_type = other DNA
taattcataactttgaattt

SEQ ID NO: 234441 - DNA, 20 bp, synthetic construct
  source 1..20: mol_type = other DNA
ataattcataactttgaatt

SEQ ID NO: 234442 - DNA, 20 bp, synthetic construct
  source 1..20: mol_type = other DNA
aataattcataactttgaat

SEQ ID NO: 234443 - DNA, 20 bp, synthetic construct
  source 1..20: mol_type = other DNA
aaataattcataactttgaa

SEQ ID NO: 234444 - DNA, 20 bp, synthetic construct
  source 1..20: mol_type = other DNA
aaaataattcataactttga

SEQ ID NO: 234445 - DNA, 20 bp, synthetic construct
  source 1..20: mol_type = other DNA
aaaaataattcataactttg

SEQ ID NO: 234446 - DNA, 20 bp, synthetic construct
  source 1..20: mol_type = other DNA
taaaaataattcataacttt

SEQ ID NO: 234447 - DNA, 20 bp, synthetic construct
  source 1..20: mol_type = other DNA
ttaaaaataattcataactt

SEQ ID NO: 234448 - DNA, 20 bp, synthetic construct
  source 1..20: mol_type = other DNA
tttaaaaataattcataact

SEQ ID NO: 234449 - DNA, 20 bp, synthetic construct
  source 1..20: mol_type = other DNA
ttttaaaaataattcataac

SEQ ID NO: 234450 - DNA, 20 bp, synthetic construct
  source 1..20: mol_type = other DNA
attttaaaaataattcataa

SEQ ID NO: 234451 - DNA, 20 bp, synthetic construct
  source 1..20: mol_type = other DNA
tattttaaaaataattcata

SEQ ID NO: 234452 - DNA, 20 bp, synthetic construct
  source 1..20: mol_type = other DNA
ttattttaaaaataattcat

SEQ ID NO: 234453 - DNA, 20 bp, synthetic construct
  source 1..20: mol_type = other DNA
attattttaaaaataattca

SEQ ID NO: 234454 - DNA, 20 bp, synthetic construct
  source 1..20: mol_type = other DNA
tattattttaaaaataattc

SEQ ID NO: 234455 - DNA, 20 bp, synthetic construct
  source 1..20: mol_type = other DNA
ttattattttaaaaataatt

SEQ ID NO: 234456 - DNA, 20 bp, synthetic construct
  source 1..20: mol_type = other DNA
attattattttaaaaataat

SEQ ID NO: 234457 - DNA, 20 bp, synthetic construct
  source 1..20: mol_type = other DNA
tattattattttaaaaataa

SEQ ID NO: 234458 - DNA, 20 bp, synthetic construct
  source 1..20: mol_type = other DNA
ttattattattttaaaaata

SEQ ID NO: 234459 - DNA, 20 bp, synthetic construct
  source 1..20: mol_type = other DNA
attattattattttaaaaat

SEQ ID NO: 234460 - DNA, 20 bp, synthetic construct
  source 1..20: mol_type = other DNA
aattattattattttaaaaa

SEQ ID NO: 234461 - DNA, 20 bp, synthetic construct
  source 1..20: mol_type = other DNA
aaattattattattttaaaa

SEQ ID NO: 234462 - DNA, 20 bp, synthetic construct
  source 1..20: mol_type = other DNA
taaattattattattttaaa

SEQ ID NO: 234463 - DNA, 20 bp, synthetic construct
  source 1..20: mol_type = other DNA
gtaaattattattattttaa

SEQ ID NO: 234464 - DNA, 20 bp, synthetic construct
  source 1..20: mol_type = other DNA
tgtaaattattattatttta

SEQ ID NO: 234465 - DNA, 20 bp, synthetic construct
  source 1..20: mol_type = other DNA
ttgtaaattattattatttt

SEQ ID NO: 234466 - DNA, 20 bp, synthetic construct
  source 1..20: mol_type = other DNA
attgtaaattattattattt

SEQ ID NO: 234467 - DNA, 20 bp, synthetic construct
  source 1..20: mol_type = other DNA
tattgtaaattattattatt

SEQ ID NO: 234468 - DNA, 20 bp, synthetic construct
  source 1..20: mol_type = other DNA
ttattgtaaattattattat

SEQ ID NO: 234469 - DNA, 20 bp, synthetic construct
  source 1..20: mol_type = other DNA
tttattgtaaattattatta

SEQ ID NO: 234470 - DNA, 20 bp, synthetic construct
  source 1..20: mol_type = other DNA
ctttattgtaaattattatt

SEQ ID NO: 234471 - DNA, 20 bp, synthetic construct
  source 1..20: mol_type = other DNA
tctttattgtaaattattat

SEQ ID NO: 234472 - DNA, 20 bp, synthetic construct
  source 1..20: mol_type = other DNA
atctttattgtaaattatta

SEQ ID NO: 234473 - DNA, 20 bp, synthetic construct
  source 1..20: mol_type = other DNA
catctttattgtaaattatt

SEQ ID NO: 234474 - DNA, 20 bp, synthetic construct
  source 1..20: mol_type = other DNA
tcatctttattgtaaattat

SEQ ID NO: 234475 - DNA, 20 bp, synthetic construct
  source 1..20: mol_type = other DNA
ctcatctttattgtaaatta

SEQ ID NO: 234476 - DNA, 20 bp, synthetic construct
  source 1..20: mol_type = other DNA
cctcatctttattgtaaatt

SEQ ID NO: 234477 - DNA, 20 bp, synthetic construct
  source 1..20: mol_type = other DNA
tcctcatctttattgtaaat

SEQ ID NO: 234478 - DNA, 20 bp, synthetic construct
  source 1..20: mol_type = other DNA
gtcctcatctttattgtaaa

SEQ ID NO: 234479 - DNA, 20 bp, synthetic construct
  source 1..20: mol_type = other DNA
tgtcctcatctttattgtaa

SEQ ID NO: 234480 - DNA, 20 bp, synthetic construct
  source 1..20: mol_type = other DNA
ttgtcctcatctttattgta

SEQ ID NO: 234481 - DNA, 20 bp, synthetic construct
  source 1..20: mol_type = other DNA
tttgtcctcatctttattgt

SEQ ID NO: 234482 - DNA, 20 bp, synthetic construct
  source 1..20: mol_type = other DNA
ctttgtcctcatctttattg

SEQ ID NO: 234483 - DNA, 20 bp, synthetic construct
  source 1..20: mol_type = other DNA
actttgtcctcatctttatt

SEQ ID NO: 234484 - DNA, 20 bp, synthetic construct
  source 1..20: mol_type = other DNA
cactttgtcctcatctttat

SEQ ID NO: 234485 - DNA, 20 bp, synthetic construct
  source 1..20: mol_type = other DNA
acactttgtcctcatcttta

SEQ ID NO: 234486 - DNA, 20 bp, synthetic construct
  source 1..20: mol_type = other DNA
cacactttgtcctcatcttt

SEQ ID NO: 234487 - DNA, 20 bp, synthetic construct
  source 1..20: mol_type = other DNA
tcacactttgtcctcatctt

SEQ ID NO: 234488 - DNA, 20 bp, synthetic construct
  source 1..20: mol_type = other DNA
ctcacactttgtcctcatct

SEQ ID NO: 234489 - DNA, 20 bp, synthetic construct
  source 1..20: mol_type = other DNA
actcacactttgtcctcatc

SEQ ID NO: 234490 - DNA, 20 bp, synthetic construct
  source 1..20: mol_type = other DNA
tactcacactttgtcctcat

SEQ ID NO: 234491 - DNA, 20 bp, synthetic construct
  source 1..20: mol_type = other DNA
ttactcacactttgtcctca

SEQ ID NO: 234492 - DNA, 20 bp, synthetic construct
  source 1..20: mol_type = other DNA
tttactcacactttgtcctc

SEQ ID NO: 234493 - DNA, 20 bp, synthetic construct
  source 1..20: mol_type = other DNA
atttactcacactttgtcct

SEQ ID NO: 234494 - DNA, 20 bp, synthetic construct
  source 1..20: mol_type = other DNA
catttactcacactttgtcc

SEQ ID NO: 234495 - DNA, 20 bp, synthetic construct
  source 1..20: mol_type = other DNA
ccatttactcacactttgtc

SEQ ID NO: 234496 - DNA, 20 bp, synthetic construct
  source 1..20: mol_type = other DNA
accatttactcacactttgt

SEQ ID NO: 234497 - DNA, 20 bp, synthetic construct
  source 1..20: mol_type = other DNA
caccatttactcacactttg

SEQ ID NO: 234498 - DNA, 20 bp, synthetic construct
  source 1..20: mol_type = other DNA
ccaccatttactcacacttt

SEQ ID NO: 234499 - DNA, 20 bp, synthetic construct
  source 1..20: mol_type = other DNA
accaccatttactcacactt

SEQ ID NO: 234500 - DNA, 20 bp, synthetic construct
  source 1..20: mol_type = other DNA
aaccaccatttactcacact

SEQ ID NO: 234501 - DNA, 20 bp, synthetic construct
  source 1..20: mol_type = other DNA
aaaccaccatttactcacac

SEQ ID NO: 234502 - DNA, 20 bp, synthetic construct
  source 1..20: mol_type = other DNA
gaaaccaccatttactcaca

SEQ ID NO: 234503 - DNA, 20 bp, synthetic construct
  source 1..20: mol_type = other DNA
agaaaccaccatttactcac

SEQ ID NO: 234504 - DNA, 20 bp, synthetic construct
  source 1..20: mol_type = other DNA
tagaaaccaccatttactca

SEQ ID NO: 234505 - DNA, 20 bp, synthetic construct
  source 1..20: mol_type = other DNA
atagaaaccaccatttactc

SEQ ID NO: 234506 - DNA, 20 bp, synthetic construct
  source 1..20: mol_type = other DNA
gatagaaaccaccatttact

SEQ ID NO: 234507 - DNA, 20 bp, synthetic construct
  source 1..20: mol_type = other DNA
ggatagaaaccaccatttac

SEQ ID NO: 234508 - DNA, 20 bp, synthetic construct
  source 1..20: mol_type = other DNA
tggatagaaaccaccattta

SEQ ID NO: 234509 - DNA, 20 bp, synthetic construct
  source 1..20: mol_type = other DNA
ctggatagaaaccaccattt

SEQ ID NO: 234510 - DNA, 20 bp, synthetic construct
  source 1..20: mol_type = other DNA
gctggatagaaaccaccatt

SEQ ID NO: 234511 - DNA, 20 bp, synthetic construct
  source 1..20: mol_type = other DNA
agctggatagaaaccaccat

SEQ ID NO: 234512 - DNA, 20 bp, synthetic construct
  source 1..20: mol_type = other DNA
gagctggatagaaaccacca

SEQ ID NO: 234513 - DNA, 20 bp, synthetic construct
  source 1..20: mol_type = other DNA
agagctggatagaaaccacc

SEQ ID NO: 234514 - DNA, 20 bp, synthetic construct
  source 1..20: mol_type = other DNA
cagagctggatagaaaccac

SEQ ID NO: 234515 - DNA, 20 bp, synthetic construct
  source 1..20: mol_type = other DNA
acagagctggatagaaacca

SEQ ID NO: 234516 - DNA, 20 bp, synthetic construct
  source 1..20: mol_type = other DNA
aacagagctggatagaaacc

SEQ ID NO: 234517 - DNA, 20 bp, synthetic construct
  source 1..20: mol_type = other DNA
caacagagctggatagaaac

SEQ ID NO: 234518 - DNA, 20 bp, synthetic construct
  source 1..20: mol_type = other DNA
tcaacagagctggatagaaa

SEQ ID NO: 234519 - DNA, 20 bp, synthetic construct
  source 1..20: mol_type = other DNA
ctcaacagagctggatagaa

SEQ ID NO: 234520 - DNA, 20 bp, synthetic construct
  source 1..20: mol_type = other DNA
gctcaacagagctggataga

SEQ ID NO: 234521 - DNA, 20 bp, synthetic construct
  source 1..20: mol_type = other DNA
agctcaacagagctggatag

SEQ ID NO: 234522 - DNA, 20 bp, synthetic construct
  source 1..20: mol_type = other DNA
cagctcaacagagctggata

SEQ ID NO: 234523 - DNA, 20 bp, synthetic construct
  source 1..20: mol_type = other DNA
tcagctcaacagagctggat

SEQ ID NO: 234524 - DNA, 20 bp, synthetic construct
  source 1..20: mol_type = other DNA
ttcagctcaacagagctgga

SEQ ID NO: 234525 - DNA, 20 bp, synthetic construct
  source 1..20: mol_type = other DNA
cttcagctcaacagagctgg

SEQ ID NO: 234526 - DNA, 20 bp, synthetic construct
  source 1..20: mol_type = other DNA
acttcagctcaacagagctg

SEQ ID NO: 234527 - DNA, 20 bp, synthetic construct
  source 1..20: mol_type = other DNA
cacttcagctcaacagagct

SEQ ID NO: 234528 - DNA, 20 bp, synthetic construct
  source 1..20: mol_type = other DNA
ccacttcagctcaacagagc

SEQ ID NO: 234529 - DNA, 20 bp, synthetic construct
  source 1..20: mol_type = other DNA
gccacttcagctcaacagag

SEQ ID NO: 234530 - DNA, 20 bp, synthetic construct
  source 1..20: mol_type = other DNA
tgccacttcagctcaacaga

SEQ ID NO: 234531 - DNA, 20 bp, synthetic construct
  source 1..20: mol_type = other DNA
atgccacttcagctcaacag

SEQ ID NO: 234532 - DNA, 20 bp, synthetic construct
  source 1..20: mol_type = other DNA
gatgccacttcagctcaaca

SEQ ID NO: 234533 - DNA, 20 bp, synthetic construct
  source 1..20: mol_type = other DNA
agatgccacttcagctcaac

SEQ ID NO: 234534 - DNA, 20 bp, synthetic construct
  source 1..20: mol_type = other DNA
gagatgccacttcagctcaa

SEQ ID NO: 234535 - DNA, 20 bp, synthetic construct
  source 1..20: mol_type = other DNA
ggagatgccacttcagctca

SEQ ID NO: 234536 - DNA, 20 bp, synthetic construct
  source 1..20: mol_type = other DNA
gggagatgccacttcagctc

SEQ ID NO: 234537 - DNA, 20 bp, synthetic construct
  source 1..20: mol_type = other DNA
agggagatgccacttcagct

SEQ ID NO: 234538 - DNA, 20 bp, synthetic construct
  source 1..20: mol_type = other DNA
cagggagatgccacttcagc

SEQ ID NO: 234539 - DNA, 20 bp, synthetic construct
  source 1..20: mol_type = other DNA
gcagggagatgccacttcag

SEQ ID NO: 234540 - DNA, 20 bp, synthetic construct
  source 1..20: mol_type = other DNA
agcagggagatgccacttca

SEQ ID NO: 234541 - DNA, 20 bp, synthetic construct
  source 1..20: mol_type = other DNA
cagcagggagatgccacttc

SEQ ID NO: 234542 - DNA, 20 bp, synthetic construct
  source 1..20: mol_type = other DNA
ccagcagggagatgccactt

SEQ ID NO: 234543 - DNA, 20 bp, synthetic construct
  source 1..20: mol_type = other DNA
cccagcagggagatgccact

SEQ ID NO: 234544 - DNA, 20 bp, synthetic construct
  source 1..20: mol_type = other DNA
ccccagcagggagatgccac

SEQ ID NO: 234545 - DNA, 20 bp, synthetic construct
  source 1..20: mol_type = other DNA
gccccagcagggagatgcca

SEQ ID NO: 234546 - DNA, 20 bp, synthetic construct
  source 1..20: mol_type = other DNA
agccccagcagggagatgcc

SEQ ID NO: 234547 - DNA, 20 bp, synthetic construct
  source 1..20: mol_type = other DNA
aagccccagcagggagatgc

SEQ ID NO: 234548 - DNA, 20 bp, synthetic construct
  source 1..20: mol_type = other DNA
aaagccccagcagggagatg

SEQ ID NO: 234549 - DNA, 20 bp, synthetic construct
  source 1..20: mol_type = other DNA
aaaagccccagcagggagat

SEQ ID NO: 234550 - DNA, 20 bp, synthetic construct
  source 1..20: mol_type = other DNA
caaaagccccagcagggaga

SEQ ID NO: 234551 - DNA, 20 bp, synthetic construct
  source 1..20: mol_type = other DNA
ccaaaagccccagcagggag

SEQ ID NO: 234552 - DNA, 20 bp, synthetic construct
  source 1..20: mol_type = other DNA
cccaaaagccccagcaggga

SEQ ID NO: 234553 - DNA, 20 bp, synthetic construct
  source 1..20: mol_type = other DNA
ccccaaaagccccagcaggg

SEQ ID NO: 234554 - DNA, 20 bp, synthetic construct
  source 1..20: mol_type = other DNA
tccccaaaagccccagcagg

SEQ ID NO: 234555 - DNA, 20 bp, synthetic construct
  source 1..20: mol_type = other DNA
ttccccaaaagccccagcag

SEQ ID NO: 234556 - DNA, 20 bp, synthetic construct
  source 1..20: mol_type = other DNA
cttccccaaaagccccagca

SEQ ID NO: 234557 - DNA, 20 bp, synthetic construct
  source 1..20: mol_type = other DNA
tcttccccaaaagccccagc

SEQ ID NO: 234558 - DNA, 20 bp, synthetic construct
  source 1..20: mol_type = other DNA
ttcttccccaaaagccccag

SEQ ID NO: 234559 - DNA, 20 bp, synthetic construct
  source 1..20: mol_type = other DNA
cttcttccccaaaagcccca

SEQ ID NO: 234560 - DNA, 20 bp, synthetic construct
  source 1..20: mol_type = other DNA
ccttcttccccaaaagcccc

SEQ ID NO: 234561 - DNA, 20 bp, synthetic construct
  source 1..20: mol_type = other DNA
cccttcttccccaaaagccc

SEQ ID NO: 234562 - DNA, 20 bp, synthetic construct
  source 1..20: mol_type = other DNA
acccttcttccccaaaagcc

SEQ ID NO: 234563 - DNA, 20 bp, synthetic construct
  source 1..20: mol_type = other DNA
cacccttcttccccaaaagc

SEQ ID NO: 234564 - DNA, 20 bp, synthetic construct
  source 1..20: mol_type = other DNA
acacccttcttccccaaaag

SEQ ID NO: 234565 - DNA, 20 bp, synthetic construct
  source 1..20: mol_type = other DNA
cacacccttcttccccaaaa

SEQ ID NO: 234566 - DNA, 20 bp, synthetic construct
  source 1..20: mol_type = other DNA
acacacccttcttccccaaa

SEQ ID NO: 234567 - DNA, 20 bp, synthetic construct
  source 1..20: mol_type = other DNA
cacacacccttcttccccaa

SEQ ID NO: 234568 - DNA, 20 bp, synthetic construct
  source 1..20: mol_type = other DNA
acacacacccttcttcccca

SEQ ID NO: 234569 - DNA, 20 bp, synthetic construct
  source 1..20: mol_type = other DNA
aacacacacccttcttcccc

SEQ ID NO: 234570 - DNA, 20 bp, synthetic construct
  source 1..20: mol_type = other DNA
caacacacacccttcttccc

SEQ ID NO: 234571 - DNA, 20 bp, synthetic construct
  source 1..20: mol_type = other DNA
gcaacacacacccttcttcc

SEQ ID NO: 234572 - DNA, 20 bp, synthetic construct
  source 1..20: mol_type = other DNA
agcaacacacacccttcttc

SEQ ID NO: 234573 - DNA, 20 bp, synthetic construct
  source 1..20: mol_type = other DNA
gagcaacacacacccttctt

SEQ ID NO: 234574 - DNA, 20 bp, synthetic construct
  source 1..20: mol_type = other DNA
agagcaacacacacccttct

SEQ ID NO: 234575 - DNA, 20 bp, synthetic construct
  source 1..20: mol_type = other DNA
aagagcaacacacacccttc

SEQ ID NO: 234576 - DNA, 20 bp, synthetic construct
  source 1..20: mol_type = other DNA
gaagagcaacacacaccctt

SEQ ID NO: 234577 - DNA, 20 bp, synthetic construct
  source 1..20: mol_type = other DNA
tgaagagcaacacacaccct

SEQ ID NO: 234578 - DNA, 20 bp, synthetic construct
  source 1..20: mol_type = other DNA
ctgaagagcaacacacaccc

SEQ ID NO: 234579 - DNA, 20 bp, synthetic construct
  source 1..20: mol_type = other DNA
tctgaagagcaacacacacc

SEQ ID NO: 234580 - DNA, 20 bp, synthetic construct
  source 1..20: mol_type = other DNA
atctgaagagcaacacacac

SEQ ID NO: 234581 - DNA, 20 bp, synthetic construct
  source 1..20: mol_type = other DNA
gatctgaagagcaacacaca

SEQ ID NO: 234582 - DNA, 20 bp, synthetic construct
  source 1..20: mol_type = other DNA
ggatctgaagagcaacacac

SEQ ID NO: 234583 - DNA, 20 bp, synthetic construct
  source 1..20: mol_type = other DNA
gggatctgaagagcaacaca

SEQ ID NO: 234584 - DNA, 20 bp, synthetic construct
  source 1..20: mol_type = other DNA
tgggatctgaagagcaacac

SEQ ID NO: 234585 - DNA, 20 bp, synthetic construct
  source 1..20: mol_type = other DNA
ttgggatctgaagagcaaca

SEQ ID NO: 234586 - DNA, 20 bp, synthetic construct
  source 1..20: mol_type = other DNA
cttgggatctgaagagcaac

SEQ ID NO: 234587 - DNA, 20 bp, synthetic construct
  source 1..20: mol_type = other DNA
gcttgggatctgaagagcaa

SEQ ID NO: 234588 - DNA, 20 bp, synthetic construct
  source 1..20: mol_type = other DNA
ggcttgggatctgaagagca

SEQ ID NO: 234589 - DNA, 20 bp, synthetic construct
  source 1..20: mol_type = other DNA
aggcttgggatctgaagagc

SEQ ID NO: 234590 - DNA, 20 bp, synthetic construct
  source 1..20: mol_type = other DNA
gaggcttgggatctgaagag

SEQ ID NO: 234591 - DNA, 20 bp, synthetic construct
  source 1..20: mol_type = other DNA
tgaggcttgggatctgaaga

SEQ ID NO: 234592 - DNA, 20 bp, synthetic construct
  source 1..20: mol_type = other DNA
atgaggcttgggatctgaag

SEQ ID NO: 234593 - DNA, 20 bp, synthetic construct
  source 1..20: mol_type = other DNA
catgaggcttgggatctgaa

SEQ ID NO: 234594 - DNA, 20 bp, synthetic construct
  source 1..20: mol_type = other DNA
gcatgaggcttgggatctga

SEQ ID NO: 234595 - DNA, 20 bp, synthetic construct
  source 1..20: mol_type = other DNA
ggcatgaggcttgggatctg

SEQ ID NO: 234596 - DNA, 20 bp, synthetic construct
  source 1..20: mol_type = other DNA
gggcatgaggcttgggatct

SEQ ID NO: 234597 - DNA, 20 bp, synthetic construct
  source 1..20: mol_type = other DNA
ggggcatgaggcttgggatc

SEQ ID NO: 234598 - DNA, 20 bp, synthetic construct
  source 1..20: mol_type = other DNA
aggggcatgaggcttgggat

SEQ ID NO: 234599 - DNA, 20 bp, synthetic construct
  source 1..20: mol_type = other DNA
taggggcatgaggcttggga

SEQ ID NO: 234600 - DNA, 20 bp, synthetic construct
  source 1..20: mol_type = other DNA
gtaggggcatgaggcttggg

SEQ ID NO: 234601 - DNA, 20 bp, synthetic construct
  source 1..20: mol_type = other DNA
agtaggggcatgaggcttgg

SEQ ID NO: 234602 - DNA, 20 bp, synthetic construct
  source 1..20: mol_type = other DNA
cagtaggggcatgaggcttg

SEQ ID NO: 234603 - DNA, 20 bp, synthetic construct
  source 1..20: mol_type = other DNA
ccagtaggggcatgaggctt

SEQ ID NO: 234604 - DNA, 20 bp, synthetic construct
  source 1..20: mol_type = other DNA
cccagtaggggcatgaggct

SEQ ID NO: 234605 - DNA, 20 bp, synthetic construct
  source 1..20: mol_type = other DNA
gcccagtaggggcatgaggc

SEQ ID NO: 234606 - DNA, 20 bp, synthetic construct
  source 1..20: mol_type = other DNA
ggcccagtaggggcatgagg

SEQ ID NO: 234607 - DNA, 20 bp, synthetic construct
  source 1..20: mol_type = other DNA
gggcccagtaggggcatgag

SEQ ID NO: 234608 - DNA, 20 bp, synthetic construct
  source 1..20: mol_type = other DNA
agggcccagtaggggcatga

SEQ ID NO: 234609 - DNA, 20 bp, synthetic construct
  source 1..20: mol_type = other DNA
cagggcccagtaggggcatg

SEQ ID NO: 234610 - DNA, 20 bp, synthetic construct
  source 1..20: mol_type = other DNA
acagggcccagtaggggcat

SEQ ID NO: 234611 - DNA, 20 bp, synthetic construct
  source 1..20: mol_type = other DNA
cacagggcccagtaggggca

SEQ ID NO: 234612 - DNA, 20 bp, synthetic construct
  source 1..20: mol_type = other DNA
ccacagggcccagtaggggc

SEQ ID NO: 234613 - DNA, 20 bp, synthetic construct
  source 1..20: mol_type = other DNA
cccacagggcccagtagggg

SEQ ID NO: 234614 - DNA, 20 bp, synthetic construct
  source 1..20: mol_type = other DNA
ccccacagggcccagtaggg

SEQ ID NO: 234615 - DNA, 20 bp, synthetic construct
  source 1..20: mol_type = other DNA
accccacagggcccagtagg

SEQ ID NO: 234616 - DNA, 20 bp, synthetic construct
  source 1..20: mol_type = other DNA
caccccacagggcccagtag

SEQ ID NO: 234617 - DNA, 20 bp, synthetic construct
  source 1..20: mol_type = other DNA
gcaccccacagggcccagta

SEQ ID NO: 234618 - DNA, 20 bp, synthetic construct
  source 1..20: mol_type = other DNA
agcaccccacagggcccagt

SEQ ID NO: 234619 - DNA, 20 bp, synthetic construct
  source 1..20: mol_type = other DNA
aagcaccccacagggcccag

SEQ ID NO: 234620 - DNA, 20 bp, synthetic construct
  source 1..20: mol_type = other DNA
gaagcaccccacagggccca

SEQ ID NO: 234621 - DNA, 20 bp, synthetic construct
  source 1..20: mol_type = other DNA
agaagcaccccacagggccc

SEQ ID NO: 234622 - DNA, 20 bp, synthetic construct
  source 1..20: mol_type = other DNA
gagaagcaccccacagggcc

SEQ ID NO: 234623 - DNA, 20 bp, synthetic construct
  source 1..20: mol_type = other DNA
tgagaagcaccccacagggc

SEQ ID NO: 234624 - DNA, 20 bp, synthetic construct
  source 1..20: mol_type = other DNA
ctgagaagcaccccacaggg

SEQ ID NO: 234625 - DNA, 20 bp, synthetic construct
  source 1..20: mol_type = other DNA
gctgagaagcaccccacagg

SEQ ID NO: 234626 - DNA, 20 bp, synthetic construct
  source 1..20: mol_type = other DNA
ggctgagaagcaccccacag

SEQ ID NO: 234627 - DNA, 20 bp, synthetic construct
  source 1..20: mol_type = other DNA
gggctgagaagcaccccaca

SEQ ID NO: 234628 - DNA, 20 bp, synthetic construct
  source 1..20: mol_type = other DNA
tgggctgagaagcaccccac

SEQ ID NO: 234629 - DNA, 20 bp, synthetic construct
  source 1..20: mol_type = other DNA
gtgggctgagaagcacccca

SEQ ID NO: 234630 - DNA, 20 bp, synthetic construct
  source 1..20: mol_type = other DNA
ggtgggctgagaagcacccc

SEQ ID NO: 234631 - DNA, 20 bp, synthetic construct
  source 1..20: mol_type = other DNA
tggtgggctgagaagcaccc

SEQ ID NO: 234632 - DNA, 20 bp, synthetic construct
  source 1..20: mol_type = other DNA
ctggtgggctgagaagcacc

SEQ ID NO: 234633 - DNA, 20 bp, synthetic construct
  source 1..20: mol_type = other DNA
cctggtgggctgagaagcac

SEQ ID NO: 234634 - DNA, 20 bp, synthetic construct
  source 1..20: mol_type = other DNA
tcctggtgggctgagaagca

SEQ ID NO: 234635 - DNA, 20 bp, synthetic construct
  source 1..20: mol_type = other DNA
ctcctggtgggctgagaagc

SEQ ID NO: 234636 - DNA, 20 bp, synthetic construct
  source 1..20: mol_type = other DNA
tctcctggtgggctgagaag

SEQ ID NO: 234637 - DNA, 20 bp, synthetic construct
  source 1..20: mol_type = other DNA
ctctcctggtgggctgagaa

SEQ ID NO: 234638 - DNA, 20 bp, synthetic construct
  source 1..20: mol_type = other DNA
gctctcctggtgggctgaga

SEQ ID NO: 234639 - DNA, 20 bp, synthetic construct
  source 1..20: mol_type = other DNA
ggctctcctggtgggctgag

SEQ ID NO: 234640 - DNA, 20 bp, synthetic construct
  source 1..20: mol_type = other DNA
tggctctcctggtgggctga

SEQ ID NO: 234641 - DNA, 20 bp, synthetic construct
  source 1..20: mol_type = other DNA
gtggctctcctggtgggctg

SEQ ID NO: 234642 - DNA, 20 bp, synthetic construct
  source 1..20: mol_type = other DNA
ggtggctctcctggtgggct

SEQ ID NO: 234643 - DNA, 20 bp, synthetic construct
  source 1..20: mol_type = other DNA
cggtggctctcctggtgggc

SEQ ID NO: 234644 - DNA, 20 bp, synthetic construct
  source 1..20: mol_type = other DNA
acggtggctctcctggtggg

SEQ ID NO: 234645 - DNA, 20 bp, synthetic construct
  source 1..20: mol_type = other DNA
aacggtggctctcctggtgg

SEQ ID NO: 234646 - DNA, 20 bp, synthetic construct
  source 1..20: mol_type = other DNA
caacggtggctctcctggtg

SEQ ID NO: 234647 - DNA, 20 bp, synthetic construct
  source 1..20: mol_type = other DNA
ccaacggtggctctcctggt

SEQ ID NO: 234648 - DNA, 20 bp, synthetic construct
  source 1..20: mol_type = other DNA
tccaacggtggctctcctgg

SEQ ID NO: 234649 - DNA, 20 bp, synthetic construct
  source 1..20: mol_type = other DNA
ttccaacggtggctctcctg

SEQ ID NO: 234650 - DNA, 20 bp, synthetic construct
  source 1..20: mol_type = other DNA
gttccaacggtggctctcct

SEQ ID NO: 234651 - DNA, 20 bp, synthetic construct
  source 1..20: mol_type = other DNA
tgttccaacggtggctctcc

SEQ ID NO: 234652 - DNA, 20 bp, synthetic construct
  source 1..20: mol_type = other DNA
gtgttccaacggtggctctc

SEQ ID NO: 234653 - DNA, 20 bp, synthetic construct
  source 1..20: mol_type = other DNA
tgtgttccaacggtggctct

SEQ ID NO: 234654 - DNA, 20 bp, synthetic construct
  source 1..20: mol_type = other DNA
gtgtgttccaacggtggctc

SEQ ID NO: 234655 - DNA, 20 bp, synthetic construct
  source 1..20: mol_type = other DNA
tgtgtgttccaacggtggct

SEQ ID NO: 234656 - DNA, 20 bp, synthetic construct
  source 1..20: mol_type = other DNA
gtgtgtgttccaacggtggc

SEQ ID NO: 234657 - DNA, 20 bp, synthetic construct
  source 1..20: mol_type = other DNA
cgtgtgtgttccaacggtgg

SEQ ID NO: 234658 - DNA, 20 bp, synthetic construct
  source 1..20: mol_type = other DNA
acgtgtgtgttccaacggtg

SEQ ID NO: 234659 - DNA, 20 bp, synthetic construct
  source 1..20: mol_type = other DNA
cacgtgtgtgttccaacggt

SEQ ID NO: 234660 - DNA, 20 bp, synthetic construct
  source 1..20: mol_type = other DNA
ccacgtgtgtgttccaacgg

SEQ ID NO: 234661 - DNA, 20 bp, synthetic construct
  source 1..20: mol_type = other DNA
cccacgtgtgtgttccaacg

SEQ ID NO: 234662 - DNA, 20 bp, synthetic construct
  source 1..20: mol_type = other DNA
ccccacgtgtgtgttccaac

SEQ ID NO: 234663 - DNA, 20 bp, synthetic construct
  source 1..20: mol_type = other DNA
cccccacgtgtgtgttccaa

SEQ ID NO: 234664 - DNA, 20 bp, synthetic construct
  source 1..20: mol_type = other DNA
tcccccacgtgtgtgttcca

SEQ ID NO: 234665 - DNA, 20 bp, synthetic construct
  source 1..20: mol_type = other DNA
gtcccccacgtgtgtgttcc

SEQ ID NO: 234666 - DNA, 20 bp, synthetic construct
  source 1..20: mol_type = other DNA
ggtcccccacgtgtgtgttc

SEQ ID NO: 234667 - DNA, 20 bp, synthetic construct
  source 1..20: mol_type = other DNA
aggtcccccacgtgtgtgtt

SEQ ID NO: 234668 - DNA, 20 bp, synthetic construct
  source 1..20: mol_type = other DNA
caggtcccccacgtgtgtgt

SEQ ID NO: 234669 - DNA, 20 bp, synthetic construct
  source 1..20: mol_type = other DNA
ccaggtcccccacgtgtgtg

SEQ ID NO: 234670 - DNA, 20 bp, synthetic construct
  source 1..20: mol_type = other DNA
accaggtcccccacgtgtgt

SEQ ID NO: 234671 - DNA, 20 bp, synthetic construct
  source 1..20: mol_type = other DNA
caccaggtcccccacgtgtg

SEQ ID NO: 234672 - DNA, 20 bp, synthetic construct
  source 1..20: mol_type = other DNA
ccaccaggtcccccacgtgt

SEQ ID NO: 234673 - DNA, 20 bp, synthetic construct
  source 1..20: mol_type = other DNA
cccaccaggtcccccacgtg

SEQ ID NO: 234674 - DNA, 20 bp, synthetic construct
  source 1..20: mol_type = other DNA
acccaccaggtcccccacgt

SEQ ID NO: 234675 - DNA, 20 bp, synthetic construct
  source 1..20: mol_type = other DNA
cacccaccaggtcccccacg

SEQ ID NO: 234676 - DNA, 20 bp, synthetic construct
  source 1..20: mol_type = other DNA
gcacccaccaggtcccccac

SEQ ID NO: 234677 - DNA, 20 bp, synthetic construct
  source 1..20: mol_type = other DNA
ggcacccaccaggtccccca

SEQ ID NO: 234678 - DNA, 20 bp, synthetic construct
  source 1..20: mol_type = other DNA
cggcacccaccaggtccccc

SEQ ID NO: 234679 - DNA, 20 bp, synthetic construct
  source 1..20: mol_type = other DNA
ccggcacccaccaggtcccc

SEQ ID NO: 234680 - DNA, 20 bp, synthetic construct
  source 1..20: mol_type = other DNA
accggcacccaccaggtccc

SEQ ID NO: 234681 - DNA, 20 bp, synthetic construct
  source 1..20: mol_type = other DNA
caccggcacccaccaggtcc

SEQ ID NO: 234682 - DNA, 20 bp, synthetic construct
  source 1..20: mol_type = other DNA
acaccggcacccaccaggtc

SEQ ID NO: 234683 - DNA, 20 bp, synthetic construct
  source 1..20: mol_type = other DNA
cacaccggcacccaccaggt

SEQ ID NO: 234684 - DNA, 20 bp, synthetic construct
  source 1..20: mol_type = other DNA
ccacaccggcacccaccagg

SEQ ID NO: 234685 - DNA, 20 bp, synthetic construct
  source 1..20: mol_type = other DNA
accacaccggcacccaccag

SEQ ID NO: 234686 - DNA, 20 bp, synthetic construct
  source 1..20: mol_type = other DNA
caccacaccggcacccacca

SEQ ID NO: 234687 - DNA, 20 bp, synthetic construct
  source 1..20: mol_type = other DNA
tcaccacaccggcacccacc

SEQ ID NO: 234688 - DNA, 20 bp, synthetic construct
  source 1..20: mol_type = other DNA
ttcaccacaccggcacccac

SEQ ID NO: 234689 - DNA, 20 bp, synthetic construct
  source 1..20: mol_type = other DNA
attcaccacaccggcaccca

SEQ ID NO: 234690 - DNA, 20 bp, synthetic construct
  source 1..20: mol_type = other DNA
cattcaccacaccggcaccc

SEQ ID NO: 234691 - DNA, 20 bp, synthetic construct
  source 1..20: mol_type = other DNA
ccattcaccacaccggcacc

SEQ ID NO: 234692 - DNA, 20 bp, synthetic construct
  source 1..20: mol_type = other DNA
cccattcaccacaccggcac

SEQ ID NO: 234693 - DNA, 20 bp, synthetic construct
  source 1..20: mol_type = other DNA
ccccattcaccacaccggca

SEQ ID NO: 234694 - DNA, 20 bp, synthetic construct
  source 1..20: mol_type = other DNA
cccccattcaccacaccggc

SEQ ID NO: 234695 - DNA, 20 bp, synthetic construct
  source 1..20: mol_type = other DNA
gcccccattcaccacaccgg

SEQ ID NO: 234696 - DNA, 20 bp, synthetic construct
  source 1..20: mol_type = other DNA
ggcccccattcaccacaccg

SEQ ID NO: 234697 - DNA, 20 bp, synthetic construct
  source 1..20: mol_type = other DNA
tggcccccattcaccacacc

SEQ ID NO: 234698 - DNA, 20 bp, synthetic construct
  source 1..20: mol_type = other DNA
gtggcccccattcaccacac

SEQ ID NO: 234699 - DNA, 20 bp, synthetic construct
  source 1..20: mol_type = other DNA
tgtggcccccattcaccaca

SEQ ID NO: 234700 - DNA, 20 bp, synthetic construct
  source 1..20: mol_type = other DNA
ctgtggcccccattcaccac

SEQ ID NO: 234701 - DNA, 20 bp, synthetic construct
  source 1..20: mol_type = other DNA
gctgtggcccccattcacca

SEQ ID NO: 234702 - DNA, 20 bp, synthetic construct
  source 1..20: mol_type = other DNA
ggctgtggcccccattcacc

SEQ ID NO: 234703 - DNA, 20 bp, synthetic construct
  source 1..20: mol_type = other DNA
aggctgtggcccccattcac

SEQ ID NO: 234704 - DNA, 20 bp, synthetic construct
  source 1..20: mol_type = other DNA
caggctgtggcccccattca

SEQ ID NO: 234705 - DNA, 20 bp, synthetic construct
  source 1..20: mol_type = other DNA
tcaggctgtggcccccattc

SEQ ID NO: 234706 - DNA, 20 bp, synthetic construct
  source 1..20: mol_type = other DNA
gtcaggctgtggcccccatt

SEQ ID NO: 234707 - DNA, 20 bp, synthetic construct
  source 1..20: mol_type = other DNA
agtcaggctgtggcccccat

SEQ ID NO: 234708 - DNA, 20 bp, synthetic construct
  source 1..20: mol_type = other DNA
gagtcaggctgtggccccca

SEQ ID NO: 234709 - DNA, 20 bp, synthetic construct
  source 1..20: mol_type = other DNA
ggagtcaggctgtggccccc

SEQ ID NO: 234710 - DNA, 20 bp, synthetic construct
  source 1..20: mol_type = other DNA
tggagtcaggctgtggcccc

SEQ ID NO: 234711 - DNA, 20 bp, synthetic construct
  source 1..20: mol_type = other DNA
ctggagtcaggctgtggccc

SEQ ID NO: 234712 - DNA, 20 bp, synthetic construct
  source 1..20: mol_type = other DNA
cctggagtcaggctgtggcc

SEQ ID NO: 234713 - DNA, 20 bp, synthetic construct
  source 1..20: mol_type = other DNA
tcctggagtcaggctgtggc

SEQ ID NO: 234714 - DNA, 20 bp, synthetic construct
  source 1..20: mol_type = other DNA
ttcctggagtcaggctgtgg

SEQ ID NO: 234715 - DNA, 20 bp, synthetic construct
  source 1..20: mol_type = other DNA
cttcctggagtcaggctgtg

SEQ ID NO: 234716 - DNA, 20 bp, synthetic construct
  source 1..20: mol_type = other DNA
gcttcctggagtcaggctgt

SEQ ID NO: 234717 - DNA, 20 bp, synthetic construct
  source 1..20: mol_type = other DNA
ggcttcctggagtcaggctg

SEQ ID NO: 234718 - DNA, 20 bp, synthetic construct
  source 1..20: mol_type = other DNA
tggcttcctggagtcaggct

SEQ ID NO: 234719 - DNA, 20 bp, synthetic construct
  source 1..20: mol_type = other DNA
ctggcttcctggagtcaggc

SEQ ID NO: 234720 - DNA, 20 bp, synthetic construct
  source 1..20: mol_type = other DNA
gctggcttcctggagtcagg

SEQ ID NO: 234721 - DNA, 20 bp, synthetic construct
  source 1..20: mol_type = other DNA
tgctggcttcctggagtcag

SEQ ID NO: 234722 - DNA, 20 bp, synthetic construct
  source 1..20: mol_type = other DNA
ttgctggcttcctggagtca

SEQ ID NO: 234723 - DNA, 20 bp, synthetic construct
  source 1..20: mol_type = other DNA
tttgctggcttcctggagtc

SEQ ID NO: 234724 - DNA, 20 bp, synthetic construct
  source 1..20: mol_type = other DNA
gtttgctggcttcctggagt

SEQ ID NO: 234725 - DNA, 20 bp, synthetic construct
  source 1..20: mol_type = other DNA
agtttgctggcttcctggag

SEQ ID NO: 234726 - DNA, 20 bp, synthetic construct
  source 1..20: mol_type = other DNA
gagtttgctggcttcctgga

SEQ ID NO: 234727 - DNA, 20 bp, synthetic construct
  source 1..20: mol_type = other DNA
cgagtttgctggcttcctgg

SEQ ID NO: 234728 - DNA, 20 bp, synthetic construct
  source 1..20: mol_type = other DNA
ccgagtttgctggcttcctg

SEQ ID NO: 234729 - DNA, 20 bp, synthetic construct
  source 1..20: mol_type = other DNA
tccgagtttgctggcttcct

SEQ ID NO: 234730 - DNA, 20 bp, synthetic construct
  source 1..20: mol_type = other DNA
ctccgagtttgctggcttcc

SEQ ID NO: 234731 - DNA, 20 bp, synthetic construct
  source 1..20: mol_type = other DNA
gctccgagtttgctggcttc

SEQ ID NO: 234732 - DNA, 20 bp, synthetic construct
  source 1..20: mol_type = other DNA
agctccgagtttgctggctt

SEQ ID NO: 234733 - DNA, 20 bp, synthetic construct
  source 1..20: mol_type = other DNA
cagctccgagtttgctggct

SEQ ID NO: 234734 - DNA, 20 bp, synthetic construct
  source 1..20: mol_type = other DNA
ccagctccgagtttgctggc

SEQ ID NO: 234735 - DNA, 20 bp, synthetic construct
  source 1..20: mol_type = other DNA
tccagctccgagtttgctgg

SEQ ID NO: 234736 - DNA, 20 bp, synthetic construct
  source 1..20: mol_type = other DNA
ctccagctccgagtttgctg

SEQ ID NO: 234737 - DNA, 20 bp, synthetic construct
  source 1..20: mol_type = other DNA
cctccagctccgagtttgct

SEQ ID NO: 234738 - DNA, 20 bp, synthetic construct
  source 1..20: mol_type = other DNA
tcctccagctccgagtttgc

SEQ ID NO: 234739 - DNA, 20 bp, synthetic construct
  source 1..20: mol_type = other DNA
ctcctccagctccgagtttg

SEQ ID NO: 234740 - DNA, 20 bp, synthetic construct
  source 1..20: mol_type = other DNA
actcctccagctccgagttt

SEQ ID NO: 234741 - DNA, 20 bp, synthetic construct
  source 1..20: mol_type = other DNA
gactcctccagctccgagtt

SEQ ID NO: 234742 - DNA, 20 bp, synthetic construct
  source 1..20: mol_type = other DNA
tgactcctccagctccgagt

SEQ ID NO: 234743 - DNA, 20 bp, synthetic construct
  source 1..20: mol_type = other DNA
ctgactcctccagctccgag

SEQ ID NO: 234744 - DNA, 20 bp, synthetic construct
  source 1..20: mol_type = other DNA
cctgactcctccagctccga

SEQ ID NO: 234745 - DNA, 20 bp, synthetic construct
  source 1..20: mol_type = other DNA
tcctgactcctccagctccg

SEQ ID NO: 234746 - DNA, 20 bp, synthetic construct
  source 1..20: mol_type = other DNA
gtcctgactcctccagctcc

SEQ ID NO: 234747 - DNA, 20 bp, synthetic construct
  source 1..20: mol_type = other DNA
tgtcctgactcctccagctc

SEQ ID NO: 234748 - DNA, 20 bp, synthetic construct
  source 1..20: mol_type = other DNA
gtgtcctgactcctccagct

SEQ ID NO: 234749 - DNA, 20 bp, synthetic construct
  source 1..20: mol_type = other DNA
ggtgtcctgactcctccagc

SEQ ID NO: 234750 - DNA, 20 bp, synthetic construct
  source 1..20: mol_type = other DNA
gggtgtcctgactcctccag

SEQ ID NO: 234751 - DNA, 20 bp, synthetic construct
  source 1..20: mol_type = other DNA
ggggtgtcctgactcctcca

SEQ ID NO: 234752 - DNA, 20 bp, synthetic construct
  source 1..20: mol_type = other DNA
gggggtgtcctgactcctcc

SEQ ID NO: 234753 - DNA, 20 bp, synthetic construct
  source 1..20: mol_type = other DNA
cgggggtgtcctgactcctc

SEQ ID NO: 234754 - DNA, 20 bp, synthetic construct
  source 1..20: mol_type = other DNA
tcgggggtgtcctgactcct

SEQ ID NO: 234755 - DNA, 20 bp, synthetic construct
  source 1..20: mol_type = other DNA
atcgggggtgtcctgactcc

SEQ ID NO: 234756 - DNA, 20 bp, synthetic construct
  source 1..20: mol_type = other DNA
catcgggggtgtcctgactc

SEQ ID NO: 234757 - DNA, 20 bp, synthetic construct
  source 1..20: mol_type = other DNA
tcatcgggggtgtcctgact

SEQ ID NO: 234758 - DNA, 20 bp, synthetic construct
  source 1..20: mol_type = other DNA
ctcatcgggggtgtcctgac

SEQ ID NO: 234759 - DNA, 20 bp, synthetic construct
  source 1..20: mol_type = other DNA
actcatcgggggtgtcctga

SEQ ID NO: 234760 - DNA, 20 bp, synthetic construct
  source 1..20: mol_type = other DNA
gactcatcgggggtgtcctg

SEQ ID NO: 234761 - DNA, 20 bp, synthetic construct
  source 1..20: mol_type = other DNA
tgactcatcgggggtgtcct

SEQ ID NO: 234762 - DNA, 20 bp, synthetic construct
  source 1..20: mol_type = other DNA
ttgactcatcgggggtgtcc

SEQ ID NO: 234763 - DNA, 20 bp, synthetic construct
  source 1..20: mol_type = other DNA
cttgactcatcgggggtgtc

SEQ ID NO: 234764 - DNA, 20 bp, synthetic construct
  source 1..20: mol_type = other DNA
tcttgactcatcgggggtgt

SEQ ID NO: 234765 - DNA, 20 bp, synthetic construct
  source 1..20: mol_type = other DNA
ctcttgactcatcgggggtg

SEQ ID NO: 234766 - DNA, 20 bp, synthetic construct
  source 1..20: mol_type = other DNA
actcttgactcatcgggggt

SEQ ID NO: 234767 - DNA, 20 bp, synthetic construct
  source 1..20: mol_type = other DNA
aactcttgactcatcggggg

SEQ ID NO: 234768 - DNA, 20 bp, synthetic construct
  source 1..20: mol_type = other DNA
caactcttgactcatcgggg

SEQ ID NO: 234769 - DNA, 20 bp, synthetic construct
  source 1..20: mol_type = other DNA
ccaactcttgactcatcggg

SEQ ID NO: 234770 - DNA, 20 bp, synthetic construct
  source 1..20: mol_type = other DNA
accaactcttgactcatcgg

SEQ ID NO: 234771 - DNA, 20 bp, synthetic construct
  source 1..20: mol_type = other DNA
aaccaactcttgactcatcg

SEQ ID NO: 234772 - DNA, 20 bp, synthetic construct
  source 1..20: mol_type = other DNA
aaaccaactcttgactcatc

SEQ ID NO: 234773 - DNA, 20 bp, synthetic construct
  source 1..20: mol_type = other DNA
aaaaccaactcttgactcat

SEQ ID NO: 234774 - DNA, 20 bp, synthetic construct
  source 1..20: mol_type = other DNA
caaaaccaactcttgactca

SEQ ID NO: 234775 - DNA, 20 bp, synthetic construct
  source 1..20: mol_type = other DNA
gcaaaaccaactcttgactc

SEQ ID NO: 234776 - DNA, 20 bp, synthetic construct
  source 1..20: mol_type = other DNA
agcaaaaccaactcttgact

SEQ ID NO: 234777 - DNA, 20 bp, synthetic construct
  source 1..20: mol_type = other DNA
cagcaaaaccaactcttgac

SEQ ID NO: 234778 - DNA, 20 bp, synthetic construct
  source 1..20: mol_type = other DNA
gcagcaaaaccaactcttga

SEQ ID NO: 234779 - DNA, 20 bp, synthetic construct
  source 1..20: mol_type = other DNA
ggcagcaaaaccaactcttg

SEQ ID NO: 234780 - DNA, 20 bp, synthetic construct
  source 1..20: mol_type = other DNA
tggcagcaaaaccaactctt

SEQ ID NO: 234781 - DNA, 20 bp, synthetic construct
  source 1..20: mol_type = other DNA
ctggcagcaaaaccaactct

SEQ ID NO: 234782 - DNA, 20 bp, synthetic construct
  source 1..20: mol_type = other DNA
actggcagcaaaaccaactc

SEQ ID NO: 234783 - DNA, 20 bp, synthetic construct
  source 1..20: mol_type = other DNA
aactggcagcaaaaccaact

SEQ ID NO: 234784 - DNA, 20 bp, synthetic construct
  source 1..20: mol_type = other DNA
caactggcagcaaaaccaac

SEQ ID NO: 234785 - DNA, 20 bp, synthetic construct
  source 1..20: mol_type = other DNA
tcaactggcagcaaaaccaa

SEQ ID NO: 234786 - DNA, 20 bp, synthetic construct
  source 1..20: mol_type = other DNA
gtcaactggcagcaaaacca

SEQ ID NO: 234787 - DNA, 20 bp, synthetic construct
  source 1..20: mol_type = other DNA
tgtcaactggcagcaaaacc

SEQ ID NO: 234788 - DNA, 20 bp, synthetic construct
  source 1..20: mol_type = other DNA
atgtcaactggcagcaaaac

SEQ ID NO: 234789 - DNA, 20 bp, synthetic construct
  source 1..20: mol_type = other DNA
gatgtcaactggcagcaaaa

SEQ ID NO: 234790 - DNA, 20 bp, synthetic construct
  source 1..20: mol_type = other DNA
agatgtcaactggcagcaaa

SEQ ID NO: 234791 - DNA, 20 bp, synthetic construct
  source 1..20: mol_type = other DNA
cagatgtcaactggcagcaa

SEQ ID NO: 234792 - DNA, 20 bp, synthetic construct
  source 1..20: mol_type = other DNA
tcagatgtcaactggcagca

SEQ ID NO: 234793 - DNA, 20 bp, synthetic construct
  source 1..20: mol_type = other DNA
atcagatgtcaactggcagc

SEQ ID NO: 234794 - DNA, 20 bp, synthetic construct
  source 1..20: mol_type = other DNA
aatcagatgtcaactggcag

SEQ ID NO: 234795 - DNA, 20 bp, synthetic construct
  source 1..20: mol_type = other DNA
caatcagatgtcaactggca

SEQ ID NO: 234796 - DNA, 20 bp, synthetic construct
  source 1..20: mol_type = other DNA
tcaatcagatgtcaactggc

SEQ ID NO: 234797 - DNA, 20 bp, synthetic construct
  source 1..20: mol_type = other DNA
ttcaatcagatgtcaactgg

SEQ ID NO: 234798 - DNA, 20 bp, synthetic construct
  source 1..20: mol_type = other DNA
gttcaatcagatgtcaactg

SEQ ID NO: 234799 - DNA, 20 bp, synthetic construct
  source 1..20: mol_type = other DNA
ggttcaatcagatgtcaact

SEQ ID NO: 234800 - DNA, 20 bp, synthetic construct
  source 1..20: mol_type = other DNA
tggttcaatcagatgtcaac

SEQ ID NO: 234801 - DNA, 20 bp, synthetic construct
  source 1..20: mol_type = other DNA
atggttcaatcagatgtcaa

SEQ ID NO: 234802 - DNA, 20 bp, synthetic construct
  source 1..20: mol_type = other DNA
gatggttcaatcagatgtca

SEQ ID NO: 234803 - DNA, 20 bp, synthetic construct
  source 1..20: mol_type = other DNA
agatggttcaatcagatgtc

SEQ ID NO: 234804 - DNA, 20 bp, synthetic construct
  source 1..20: mol_type = other DNA
gagatggttcaatcagatgt

SEQ ID NO: 234805 - DNA, 20 bp, synthetic construct
  source 1..20: mol_type = other DNA
agagatggttcaatcagatg

SEQ ID NO: 234806 - DNA, 20 bp, synthetic construct
  source 1..20: mol_type = other DNA
aagagatggttcaatcagat

SEQ ID NO: 234807 - DNA, 20 bp, synthetic construct
  source 1..20: mol_type = other DNA
gaagagatggttcaatcaga

SEQ ID NO: 234808 - DNA, 20 bp, synthetic construct
  source 1..20: mol_type = other DNA
tgaagagatggttcaatcag

SEQ ID NO: 234809 - DNA, 20 bp, synthetic construct
  source 1..20: mol_type = other DNA
gtgaagagatggttcaatca

SEQ ID NO: 234810 - DNA, 20 bp, synthetic construct
  source 1..20: mol_type = other DNA
agtgaagagatggttcaatc

SEQ ID NO: 234811 - DNA, 20 bp, synthetic construct
  source 1..20: mol_type = other DNA
aagtgaagagatggttcaat

SEQ ID NO: 234812 - DNA, 20 bp, synthetic construct
  source 1..20: mol_type = other DNA
gaagtgaagagatggttcaa

SEQ ID NO: 234813 - DNA, 20 bp, synthetic construct
  source 1..20: mol_type = other DNA
agaagtgaagagatggttca

SEQ ID NO: 234814 - DNA, 20 bp, synthetic construct
  source 1..20: mol_type = other DNA
gagaagtgaagagatggttc

SEQ ID NO: 234815 - DNA, 20 bp, synthetic construct
  source 1..20: mol_type = other DNA
ggagaagtgaagagatggtt

SEQ ID NO: 234816 - DNA, 20 bp, synthetic construct
  source 1..20: mol_type = other DNA
cggagaagtgaagagatggt

SEQ ID NO: 234817 - DNA, 20 bp, synthetic construct
  source 1..20: mol_type = other DNA
acggagaagtgaagagatgg

SEQ ID NO: 234818 - DNA, 20 bp, synthetic construct
  source 1..20: mol_type = other DNA
cacggagaagtgaagagatg

SEQ ID NO: 234819 - DNA, 20 bp, synthetic construct
  source 1..20: mol_type = other DNA
gcacggagaagtgaagagat

SEQ ID NO: 234820 - DNA, 20 bp, synthetic construct
  source 1..20: mol_type = other DNA
ggcacggagaagtgaagaga

SEQ ID NO: 234821 - DNA, 20 bp, synthetic construct
  source 1..20: mol_type = other DNA
aggcacggagaagtgaagag

SEQ ID NO: 234822 - DNA, 20 bp, synthetic construct
  source 1..20: mol_type = other DNA
gaggcacggagaagtgaaga

SEQ ID NO: 234823 - DNA, 20 bp, synthetic construct
  source 1..20: mol_type = other DNA
tgaggcacggagaagtgaag

SEQ ID NO: 234824 - DNA, 20 bp, synthetic construct
  source 1..20: mol_type = other DNA
gtgaggcacggagaagtgaa

SEQ ID NO: 234825 - DNA, 20 bp, synthetic construct
  source 1..20: mol_type = other DNA
agtgaggcacggagaagtga

SEQ ID NO: 234826 - DNA, 20 bp, synthetic construct
  source 1..20: mol_type = other DNA
aagtgaggcacggagaagtg

SEQ ID NO: 234827 - DNA, 20 bp, synthetic construct
  source 1..20: mol_type = other DNA
aaagtgaggcacggagaagt

SEQ ID NO: 234828 - DNA, 20 bp, synthetic construct
  source 1..20: mol_type = other DNA
gaaagtgaggcacggagaag

SEQ ID NO: 234829 - DNA, 20 bp, synthetic construct
  source 1..20: mol_type = other DNA
ggaaagtgaggcacggagaa

SEQ ID NO: 234830 - DNA, 20 bp, synthetic construct
  source 1..20: mol_type = other DNA
aggaaagtgaggcacggaga

SEQ ID NO: 234831 - DNA, 20 bp, synthetic construct
  source 1..20: mol_type = other DNA
aaggaaagtgaggcacggag

SEQ ID NO: 234832 - DNA, 20 bp, synthetic construct
  source 1..20: mol_type = other DNA
taaggaaagtgaggcacgga

SEQ ID NO: 234833 - DNA, 20 bp, synthetic construct
  source 1..20: mol_type = other DNA
gtaaggaaagtgaggcacgg

SEQ ID NO: 234834 - DNA, 20 bp, synthetic construct
  source 1..20: mol_type = other DNA
ggtaaggaaagtgaggcacg

SEQ ID NO: 234835 - DNA, 20 bp, synthetic construct
  source 1..20: mol_type = other DNA
tggtaaggaaagtgaggcac

SEQ ID NO: 234836 - DNA, 20 bp, synthetic construct
  source 1..20: mol_type = other DNA
ctggtaaggaaagtgaggca

SEQ ID NO: 234837 - DNA, 20 bp, synthetic construct
  source 1..20: mol_type = other DNA
tctggtaaggaaagtgaggc

SEQ ID NO: 234838 - DNA, 20 bp, synthetic construct
  source 1..20: mol_type = other DNA
gtctggtaaggaaagtgagg

SEQ ID NO: 234839 - DNA, 20 bp, synthetic construct
  source 1..20: mol_type = other DNA
tgtctggtaaggaaagtgag

SEQ ID NO: 234840 - DNA, 20 bp, synthetic construct
  source 1..20: mol_type = other DNA
ctgtctggtaaggaaagtga

SEQ ID NO: 234841 - DNA, 20 bp, synthetic construct
  source 1..20: mol_type = other DNA
cctgtctggtaaggaaagtg

SEQ ID NO: 234842 - DNA, 20 bp, synthetic construct
  source 1..20: mol_type = other DNA
gcctgtctggtaaggaaagt

SEQ ID NO: 234843 - DNA, 20 bp, synthetic construct
  source 1..20: mol_type = other DNA
agcctgtctggtaaggaaag

SEQ ID NO: 234844 - DNA, 20 bp, synthetic construct
  source 1..20: mol_type = other DNA
gagcctgtctggtaaggaaa

SEQ ID NO: 234845 - DNA, 20 bp, synthetic construct
  source 1..20: mol_type = other DNA
agagcctgtctggtaaggaa

SEQ ID NO: 234846 - DNA, 20 bp, synthetic construct
  source 1..20: mol_type = other DNA
cagagcctgtctggtaagga

SEQ ID NO: 234847 - DNA, 20 bp, synthetic construct
  source 1..20: mol_type = other DNA
gcagagcctgtctggtaagg

SEQ ID NO: 234848 - DNA, 20 bp, synthetic construct
  source 1..20: mol_type = other DNA
agcagagcctgtctggtaag

SEQ ID NO: 234849 - DNA, 20 bp, synthetic construct
  source 1..20: mol_type = other DNA
cagcagagcctgtctggtaa

SEQ ID NO: 234850 - DNA, 20 bp, synthetic construct
  source 1..20: mol_type = other DNA
tcagcagagcctgtctggta

SEQ ID NO: 234851 - DNA, 20 bp, synthetic construct
  source 1..20: mol_type = other DNA
atcagcagagcctgtctggt

SEQ ID NO: 234852 - DNA, 20 bp, synthetic construct
  source 1..20: mol_type = other DNA
catcagcagagcctgtctgg

SEQ ID NO: 234853 - DNA, 20 bp, synthetic construct
  source 1..20: mol_type = other DNA
gcatcagcagagcctgtctg

SEQ ID NO: 234854 - DNA, 20 bp, synthetic construct
  source 1..20: mol_type = other DNA
agcatcagcagagcctgtct

SEQ ID NO: 234855 - DNA, 20 bp, synthetic construct
  source 1..20: mol_type = other DNA
cagcatcagcagagcctgtc

SEQ ID NO: 234856 - DNA, 20 bp, synthetic construct
  source 1..20: mol_type = other DNA
acagcatcagcagagcctgt

SEQ ID NO: 234857 - DNA, 20 bp, synthetic construct
  source 1..20: mol_type = other DNA
gacagcatcagcagagcctg

SEQ ID NO: 234858 - DNA, 20 bp, synthetic construct
  source 1..20: mol_type = other DNA
ggacagcatcagcagagcct

SEQ ID NO: 234859 - DNA, 20 bp, synthetic construct
  source 1..20: mol_type = other DNA
gggacagcatcagcagagcc

SEQ ID NO: 234860 - DNA, 20 bp, synthetic construct
  source 1..20: mol_type = other DNA
agggacagcatcagcagagc

SEQ ID NO: 234861 - DNA, 20 bp, synthetic construct
  source 1..20: mol_type = other DNA
gagggacagcatcagcagag

SEQ ID NO: 234862 - DNA, 20 bp, synthetic construct
  source 1..20: mol_type = other DNA
agagggacagcatcagcaga

SEQ ID NO: 234863 - DNA, 20 bp, synthetic construct
  source 1..20: mol_type = other DNA
gagagggacagcatcagcag

SEQ ID NO: 234864 - DNA, 20 bp, synthetic construct
  source 1..20: mol_type = other DNA
ggagagggacagcatcagca

SEQ ID NO: 234865 - DNA, 20 bp, synthetic construct
  source 1..20: mol_type = other DNA
aggagagggacagcatcagc

SEQ ID NO: 234866 - DNA, 20 bp, synthetic construct
  source 1..20: mol_type = other DNA
caggagagggacagcatcag

SEQ ID NO: 234867 - DNA, 20 bp, synthetic construct
  source 1..20: mol_type = other DNA
acaggagagggacagcatca

SEQ ID NO: 234868 - DNA, 20 bp, synthetic construct
  source 1..20: mol_type = other DNA
aacaggagagggacagcatc

SEQ ID NO: 234869 - DNA, 20 bp, synthetic construct
  source 1..20: mol_type = other DNA
gaacaggagagggacagcat

SEQ ID NO: 234870 - DNA, 20 bp, synthetic construct
  source 1..20: mol_type = other DNA
tgaacaggagagggacagca

SEQ ID NO: 234871 - DNA, 20 bp, synthetic construct
  source 1..20: mol_type = other DNA
ctgaacaggagagggacagc

SEQ ID NO: 234872 - DNA, 20 bp, synthetic construct
  source 1..20: mol_type = other DNA
actgaacaggagagggacag

SEQ ID NO: 234873 - DNA, 20 bp, synthetic construct
  source 1..20: mol_type = other DNA
gactgaacaggagagggaca

SEQ ID NO: 234874 - DNA, 20 bp, synthetic construct
  source 1..20: mol_type = other DNA
cgactgaacaggagagggac

SEQ ID NO: 234875 - DNA, 20 bp, synthetic construct
  source 1..20: mol_type = other DNA
acgactgaacaggagaggga

SEQ ID NO: 234876 - DNA, 20 bp, synthetic construct
  source 1..20: mol_type = other DNA
cacgactgaacaggagaggg

SEQ ID NO: 234877 - DNA, 20 bp, synthetic construct
  source 1..20: mol_type = other DNA
gcacgactgaacaggagagg

SEQ ID NO: 234878 - DNA, 20 bp, synthetic construct
  source 1..20: mol_type = other DNA
ggcacgactgaacaggagag

SEQ ID NO: 234879 - DNA, 20 bp, synthetic construct
  source 1..20: mol_type = other DNA
gggcacgactgaacaggaga

SEQ ID NO: 234880 - DNA, 20 bp, synthetic construct
  source 1..20: mol_type = other DNA
agggcacgactgaacaggag

SEQ ID NO: 234881 - DNA, 20 bp, synthetic construct
  source 1..20: mol_type = other DNA
gagggcacgactgaacagga

SEQ ID NO: 234882 - DNA, 20 bp, synthetic construct
  source 1..20: mol_type = other DNA
tgagggcacgactgaacagg

SEQ ID NO: 234883 - DNA, 20 bp, synthetic construct
  source 1..20: mol_type = other DNA
gtgagggcacgactgaacag

SEQ ID NO: 234884 - DNA, 20 bp, synthetic construct
  source 1..20: mol_type = other DNA
ggtgagggcacgactgaaca

SEQ ID NO: 234885 - DNA, 20 bp, synthetic construct
  source 1..20: mol_type = other DNA
cggtgagggcacgactgaac

SEQ ID NO: 234886 - DNA, 20 bp, synthetic construct
  source 1..20: mol_type = other DNA
acggtgagggcacgactgaa

SEQ ID NO: 234887 - DNA, 20 bp, synthetic construct
  source 1..20: mol_type = other DNA
aacggtgagggcacgactga

SEQ ID NO: 234888 - DNA, 20 bp, synthetic construct
  source 1..20: mol_type = other DNA
taacggtgagggcacgactg

SEQ ID NO: 234889 - DNA, 20 bp, synthetic construct
  source 1..20: mol_type = other DNA
ttaacggtgagggcacgact

SEQ ID NO: 234890 - DNA, 20 bp, synthetic construct
  source 1..20: mol_type = other DNA
tttaacggtgagggcacgac

SEQ ID NO: 234891 - DNA, 20 bp, synthetic construct
  source 1..20: mol_type = other DNA
ctttaacggtgagggcacga

SEQ ID NO: 234892 - DNA, 20 bp, synthetic construct
  source 1..20: mol_type = other DNA
tctttaacggtgagggcacg

SEQ ID NO: 234893 - DNA, 20 bp, synthetic construct
  source 1..20: mol_type = other DNA
ctctttaacggtgagggcac

SEQ ID NO: 234894 - DNA, 20 bp, synthetic construct
  source 1..20: mol_type = other DNA
tctctttaacggtgagggca

SEQ ID NO: 234895 - DNA, 20 bp, synthetic construct
  source 1..20: mol_type = other DNA
ttctctttaacggtgagggc

SEQ ID NO: 234896 - DNA, 20 bp, synthetic construct
  source 1..20: mol_type = other DNA
tttctctttaacggtgaggg

SEQ ID NO: 234897 - DNA, 20 bp, synthetic construct
  source 1..20: mol_type = other DNA
ctttctctttaacggtgagg

SEQ ID NO: 234898 - DNA, 20 bp, synthetic construct
  source 1..20: mol_type = other DNA
tctttctctttaacggtgag

SEQ ID NO: 234899 - DNA, 20 bp, synthetic construct
  source 1..20: mol_type = other DNA
ctctttctctttaacggtga

SEQ ID NO: 234900 - DNA, 20 bp, synthetic construct
  source 1..20: mol_type = other DNA
gctctttctctttaacggtg

SEQ ID NO: 234901 - DNA, 20 bp, synthetic construct
  source 1..20: mol_type = other DNA
tgctctttctctttaacggt

SEQ ID NO: 234902 - DNA, 20 bp, synthetic construct
  source 1..20: mol_type = other DNA
ttgctctttctctttaacgg

SEQ ID NO: 234903 - DNA, 20 bp, synthetic construct
  source 1..20: mol_type = other DNA
tttgctctttctctttaacg

SEQ ID NO: 234904 - DNA, 20 bp, synthetic construct
  source 1..20: mol_type = other DNA
gtttgctctttctctttaac

SEQ ID NO: 234905 - DNA, 20 bp, synthetic construct
  source 1..20: mol_type = other DNA
agtttgctctttctctttaa

SEQ ID NO: 234906 - DNA, 20 bp, synthetic construct
  source 1..20: mol_type = other DNA
cagtttgctctttctcttta

SEQ ID NO: 234907 - DNA, 20 bp, synthetic construct
  source 1..20: mol_type = other DNA
gcagtttgctctttctcttt

SEQ ID NO: 234908 - DNA, 20 bp, synthetic construct
  source 1..20: mol_type = other DNA
agcagtttgctctttctctt

SEQ ID NO: 234909 - DNA, 20 bp, synthetic construct
  source 1..20: mol_type = other DNA
cagcagtttgctctttctct

SEQ ID NO: 234910 - DNA, 20 bp, synthetic construct
  source 1..20: mol_type = other DNA
ccagcagtttgctctttctc

SEQ ID NO: 234911 - DNA, 20 bp, synthetic construct
  source 1..20: mol_type = other DNA
cccagcagtttgctctttct

SEQ ID NO: 234912 - DNA, 20 bp, synthetic construct
  source 1..20: mol_type = other DNA
gcccagcagtttgctctttc

SEQ ID NO: 234913 - DNA, 20 bp, synthetic construct
  source 1..20: mol_type = other DNA
tgcccagcagtttgctcttt

SEQ ID NO: 234914 - DNA, 20 bp, synthetic construct
  source 1..20: mol_type = other DNA
ctgcccagcagtttgctctt

SEQ ID NO: 234915 - DNA, 20 bp, synthetic construct
  source 1..20: mol_type = other DNA
gctgcccagcagtttgctct

SEQ ID NO: 234916 - DNA, 20 bp, synthetic construct
  source 1..20: mol_type = other DNA
tgctgcccagcagtttgctc

SEQ ID NO: 234917 - DNA, 20 bp, synthetic construct
  source 1..20: mol_type = other DNA
ctgctgcccagcagtttgct

SEQ ID NO: 234918 - DNA, 20 bp, synthetic construct
  source 1..20: mol_type = other DNA
gctgctgcccagcagtttgc

SEQ ID NO: 234919 - DNA, 20 bp, synthetic construct
  source 1..20: mol_type = other DNA
tgctgctgcccagcagtttg

SEQ ID NO: 234920 - DNA, 20 bp, synthetic construct
  source 1..20: mol_type = other DNA
atgctgctgcccagcagttt

SEQ ID NO: 234921 - DNA, 20 bp, synthetic construct
  source 1..20: mol_type = other DNA
aatgctgctgcccagcagtt

SEQ ID NO: 234922 - DNA, 20 bp, synthetic construct
  source 1..20: mol_type = other DNA
caatgctgctgcccagcagt

SEQ ID NO: 234923 - DNA, 20 bp, synthetic construct
  source 1..20: mol_type = other DNA
tcaatgctgctgcccagcag

SEQ ID NO: 234924 - DNA, 20 bp, synthetic construct
  source 1..20: mol_type = other DNA
atcaatgctgctgcccagca

SEQ ID NO: 234925 - DNA, 20 bp, synthetic construct
  source 1..20: mol_type = other DNA
aatcaatgctgctgcccagc

SEQ ID NO: 234926 - DNA, 20 bp, synthetic construct
  source 1..20: mol_type = other DNA
aaatcaatgctgctgcccag

SEQ ID NO: 234927 - DNA, 20 bp, synthetic construct
  source 1..20: mol_type = other DNA
aaaatcaatgctgctgccca

SEQ ID NO: 234928 - DNA, 20 bp, synthetic construct
  source 1..20: mol_type = other DNA
aaaaatcaatgctgctgccc

SEQ ID NO: 234929 - DNA, 20 bp, synthetic construct
  source 1..20: mol_type = other DNA
aaaaaatcaatgctgctgcc

SEQ ID NO: 234930 - DNA, 20 bp, synthetic construct
  source 1..20: mol_type = other DNA
aaaaaaatcaatgctgctgc

SEQ ID NO: 234931 - DNA, 20 bp, synthetic construct
  source 1..20: mol_type = other DNA
taaaaaaatcaatgctgctg

SEQ ID NO: 234932 - DNA, 20 bp, synthetic construct
  source 1..20: mol_type = other DNA
ttaaaaaaatcaatgctgct

SEQ ID NO: 234933 - DNA, 20 bp, synthetic construct
  source 1..20: mol_type = other DNA
attaaaaaaatcaatgctgc

SEQ ID NO: 234934 - DNA, 20 bp, synthetic construct
  source 1..20: mol_type = other DNA
cattaaaaaaatcaatgctg

SEQ ID NO: 234935 - DNA, 20 bp, synthetic construct
  source 1..20: mol_type = other DNA
tcattaaaaaaatcaatgct

SEQ ID NO: 234936 - DNA, 20 bp, synthetic construct
  source 1..20: mol_type = other DNA
ttcattaaaaaaatcaatgc

SEQ ID NO: 234937 - DNA, 20 bp, synthetic construct
  source 1..20: mol_type = other DNA
cttcattaaaaaaatcaatg

SEQ ID NO: 234938 - DNA, 20 bp, synthetic construct
  source 1..20: mol_type = other DNA
acttcattaaaaaaatcaat

SEQ ID NO: 234939 - DNA, 20 bp, synthetic construct
  source 1..20: mol_type = other DNA
cacttcattaaaaaaatcaa

SEQ ID NO: 234940 - DNA, 20 bp, synthetic construct
  source 1..20: mol_type = other DNA
ccacttcattaaaaaaatca

SEQ ID NO: 234941 - DNA, 20 bp, synthetic construct
  source 1..20: mol_type = other DNA
tccacttcattaaaaaaatc

SEQ ID NO: 234942 - DNA, 20 bp, synthetic construct
  source 1..20: mol_type = other DNA
ttccacttcattaaaaaaat

SEQ ID NO: 234943 - DNA, 20 bp, synthetic construct
  source 1..20: mol_type = other DNA
tttccacttcattaaaaaaa

SEQ ID NO: 234944 - DNA, 20 bp, synthetic construct
  source 1..20: mol_type = other DNA
ctttccacttcattaaaaaa

SEQ ID NO: 234945 - DNA, 20 bp, synthetic construct
  source 1..20: mol_type = other DNA
tctttccacttcattaaaaa

SEQ ID NO: 234946 - DNA, 20 bp, synthetic construct
  source 1..20: mol_type = other DNA
ctctttccacttcattaaaa

SEQ ID NO: 234947 - DNA, 20 bp, synthetic construct
  source 1..20: mol_type = other DNA
tctctttccacttcattaaa

SEQ ID NO: 234948 - DNA, 20 bp, synthetic construct
  source 1..20: mol_type = other DNA
ctctctttccacttcattaa

SEQ ID NO: 234949 - DNA, 20 bp, synthetic construct
  source 1..20: mol_type = other DNA
gctctctttccacttcatta

SEQ ID NO: 234950 - DNA, 20 bp, synthetic construct
  source 1..20: mol_type = other DNA
agctctctttccacttcatt

SEQ ID NO: 234951 - DNA, 20 bp, synthetic construct
  source 1..20: mol_type = other DNA
cagctctctttccacttcat

SEQ ID NO: 234952 - DNA, 20 bp, synthetic construct
  source 1..20: mol_type = other DNA
ccagctctctttccacttca

SEQ ID NO: 234953 - DNA, 20 bp, synthetic construct
  source 1..20: mol_type = other DNA
cccagctctctttccacttc

SEQ ID NO: 234954 - DNA, 20 bp, synthetic construct
  source 1..20: mol_type = other DNA
tcccagctctctttccactt

SEQ ID NO: 234955 - DNA, 20 bp, synthetic construct
  source 1..20: mol_type = other DNA
ttcccagctctctttccact

SEQ ID NO: 234956 - DNA, 20 bp, synthetic construct
  source 1..20: mol_type = other DNA
attcccagctctctttccac

SEQ ID NO: 234957 - DNA, 20 bp, synthetic construct
  source 1..20: mol_type = other DNA
tattcccagctctctttcca

SEQ ID NO: 234958 - DNA, 20 bp, synthetic construct
  source 1..20: mol_type = other DNA
ttattcccagctctctttcc

SEQ ID NO: 234959 - DNA, 20 bp, synthetic construct
  source 1..20: mol_type = other DNA
gttattcccagctctctttc

SEQ ID NO: 234960 - DNA, 20 bp, synthetic construct
  source 1..20: mol_type = other DNA
tgttattcccagctctcttt

SEQ ID NO: 234961 - DNA, 20 bp, synthetic construct
  source 1..20: mol_type = other DNA
ttgttattcccagctctctt

SEQ ID NO: 234962 - DNA, 20 bp, synthetic construct
  source 1..20: mol_type = other DNA
cttgttattcccagctctct

SEQ ID NO: 234963 - DNA, 20 bp, synthetic construct
  source 1..20: mol_type = other DNA
acttgttattcccagctctc

SEQ ID NO: 234964 - DNA, 20 bp, synthetic construct
  source 1..20: mol_type = other DNA
gacttgttattcccagctct

SEQ ID NO: 234965 - DNA, 20 bp, synthetic construct
  source 1..20: mol_type = other DNA
cgacttgttattcccagctc

SEQ ID NO: 234966 - DNA, 20 bp, synthetic construct
  source 1..20: mol_type = other DNA
ccgacttgttattcccagct

SEQ ID NO: 234967 - DNA, 20 bp, synthetic construct
  source 1..20: mol_type = other DNA
cccgacttgttattcccagc

SEQ ID NO: 234968 - DNA, 20 bp, synthetic construct
  source 1..20: mol_type = other DNA
gcccgacttgttattcccag

SEQ ID NO: 234969 - DNA, 20 bp, synthetic construct
  source 1..20: mol_type = other DNA
ggcccgacttgttattccca

SEQ ID NO: 234970 - DNA, 20 bp, synthetic construct
  source 1..20: mol_type = other DNA
gggcccgacttgttattccc

SEQ ID NO: 234971 - DNA, 20 bp, synthetic construct
  source 1..20: mol_type = other DNA
tgggcccgacttgttattcc

SEQ ID NO: 234972 - DNA, 20 bp, synthetic construct
  source 1..20: mol_type = other DNA
gtgggcccgacttgttattc

SEQ ID NO: 234973 - DNA, 20 bp, synthetic construct
  source 1..20: mol_type = other DNA
ggtgggcccgacttgttatt

SEQ ID NO: 234974 - DNA, 20 bp, synthetic construct
  source 1..20: mol_type = other DNA
aggtgggcccgacttgttat

SEQ ID NO: 234975 - DNA, 20 bp, synthetic construct
  source 1..20: mol_type = other DNA
gaggtgggcccgacttgtta

SEQ ID NO: 234976 - DNA, 20 bp, synthetic construct
  source 1..20: mol_type = other DNA
tgaggtgggcccgacttgtt

SEQ ID NO: 234977 - DNA, 20 bp, synthetic construct
  source 1..20: mol_type = other DNA
gtgaggtgggcccgacttgt

SEQ ID NO: 234978 - DNA, 20 bp, synthetic construct
  source 1..20: mol_type = other DNA
ggtgaggtgggcccgacttg

SEQ ID NO: 234979 - DNA, 20 bp, synthetic construct
  source 1..20: mol_type = other DNA
aggtgaggtgggcccgactt

SEQ ID NO: 234980 - DNA, 20 bp, synthetic construct
  source 1..20: mol_type = other DNA
caggtgaggtgggcccgact

SEQ ID NO: 234981 - DNA, 20 bp, synthetic construct
  source 1..20: mol_type = other DNA
gcaggtgaggtgggcccgac

SEQ ID NO: 234982 - DNA, 20 bp, synthetic construct
  source 1..20: mol_type = other DNA
ggcaggtgaggtgggcccga

SEQ ID NO: 234983 - DNA, 20 bp, synthetic construct
  source 1..20: mol_type = other DNA
aggcaggtgaggtgggcccg

SEQ ID NO: 234984 - DNA, 20 bp, synthetic construct
  source 1..20: mol_type = other DNA
gaggcaggtgaggtgggccc

SEQ ID NO: 234985 - DNA, 20 bp, synthetic construct
  source 1..20: mol_type = other DNA
tgaggcaggtgaggtgggcc

SEQ ID NO: 234986 - DNA, 20 bp, synthetic construct
  source 1..20: mol_type = other DNA
gtgaggcaggtgaggtgggc

SEQ ID NO: 234987 - DNA, 20 bp, synthetic construct
  source 1..20: mol_type = other DNA
ggtgaggcaggtgaggtggg

SEQ ID NO: 234988 - DNA, 20 bp, synthetic construct
  source 1..20: mol_type = other DNA
aggtgaggcaggtgaggtgg

SEQ ID NO: 234989 - DNA, 20 bp, synthetic construct
  source 1..20: mol_type = other DNA
caggtgaggcaggtgaggtg

SEQ ID NO: 234990 - DNA, 20 bp, synthetic construct
  source 1..20: mol_type = other DNA
ccaggtgaggcaggtgaggt

SEQ ID NO: 234991 - DNA, 20 bp, synthetic construct
  source 1..20: mol_type = other DNA
accaggtgaggcaggtgagg

SEQ ID NO: 234992 - DNA, 20 bp, synthetic construct
  source 1..20: mol_type = other DNA
caccaggtgaggcaggtgag

SEQ ID NO: 234993 - DNA, 20 bp, synthetic construct
  source 1..20: mol_type = other DNA
ccaccaggtgaggcaggtga

SEQ ID NO: 234994 - DNA, 20 bp, synthetic construct
  source 1..20: mol_type = other DNA
cccaccaggtgaggcaggtg

SEQ ID NO: 234995 - DNA, 20 bp, synthetic construct
  source 1..20: mol_type = other DNA
acccaccaggtgaggcaggt

SEQ ID NO: 234996 - DNA, 20 bp, synthetic construct
  source 1..20: mol_type = other DNA
aacccaccaggtgaggcagg

SEQ ID NO: 234997 - DNA, 20 bp, synthetic construct
  source 1..20: mol_type = other DNA
aaacccaccaggtgaggcag

SEQ ID NO: 234998 - DNA, 20 bp, synthetic construct
  source 1..20: mol_type = other DNA
taaacccaccaggtgaggca

SEQ ID NO: 234999 - DNA, 20 bp, synthetic construct
  source 1..20: mol_type = other DNA
ataaacccaccaggtgaggc

SEQ ID NO: 235000 - DNA, 20 bp, synthetic construct
  source 1..20: mol_type = other DNA
aataaacccaccaggtgagg

SEQ ID NO: 235001 - DNA, 20 bp, synthetic construct
  source 1..20: mol_type = other DNA
aaataaacccaccaggtgag

SEQ ID NO: 235002 - DNA, 20 bp, synthetic construct
  source 1..20: mol_type = other DNA
caaataaacccaccaggtga

SEQ ID NO: 235003 - DNA, 20 bp, synthetic construct
  source 1..20: mol_type = other DNA
acaaataaacccaccaggtg

SEQ ID NO: 235004 - DNA, 20 bp, synthetic construct
  source 1..20: mol_type = other DNA
aacaaataaacccaccaggt

SEQ ID NO: 235005 - DNA, 20 bp, synthetic construct
  source 1..20: mol_type = other DNA
aaacaaataaacccaccagg

SEQ ID NO: 235006 - DNA, 20 bp, synthetic construct
  source 1..20: mol_type = other DNA
aaaacaaataaacccaccag

SEQ ID NO: 235007 - DNA, 20 bp, synthetic construct
  source 1..20: mol_type = other DNA
caaaacaaataaacccacca

SEQ ID NO: 235008 - DNA, 20 bp, synthetic construct
  source 1..20: mol_type = other DNA
acaaaacaaataaacccacc

SEQ ID NO: 235009 - DNA, 20 bp, synthetic construct
  source 1..20: mol_type = other DNA
aacaaaacaaataaacccac

SEQ ID NO: 235010 - DNA, 20 bp, synthetic construct
  source 1..20: mol_type = other DNA
aaacaaaacaaataaaccca

SEQ ID NO: 235011 - DNA, 20 bp, synthetic construct
  source 1..20: mol_type = other DNA
aaaacaaaacaaataaaccc

SEQ ID NO: 235012 - DNA, 20 bp, synthetic construct
  source 1..20: mol_type = other DNA
aaaaacaaaacaaataaacc

SEQ ID NO: 235013 - DNA, 20 bp, synthetic construct
  source 1..20: mol_type = other DNA
aaaaaacaaaacaaataaac

SEQ ID NO: 235014 - DNA, 20 bp, synthetic construct
  source 1..20: mol_type = other DNA
aaaaaaacaaaacaaataaa

SEQ ID NO: 235015 - DNA, 20 bp, synthetic construct
  source 1..20: mol_type = other DNA
aaaaaaaacaaaacaaataa

SEQ ID NO: 235016 - DNA, 20 bp, synthetic construct
  source 1..20: mol_type = other DNA
aaaaaaaaacaaaacaaata

SEQ ID NO: 235017 - DNA, 20 bp, synthetic construct
  source 1..20: mol_type = other DNA
aaaaaaaaaacaaaacaaat

SEQ ID NO: 235018 - DNA, 20 bp, synthetic construct
  source 1..20: mol_type = other DNA
aaaaaaaaaaacaaaacaaa

SEQ ID NO: 235019 - DNA, 20 bp, synthetic construct
  source 1..20: mol_type = other DNA
aaaaaaaaaaaacaaaacaa

SEQ ID NO: 235020 - DNA, 20 bp, synthetic construct
  source 1..20: mol_type = other DNA
aaaaaaaaaaaaacaaaaca

SEQ ID NO: 235021 - DNA, 20 bp, synthetic construct
  source 1..20: mol_type = other DNA
caaaaaaaaaaaaacaaaac

SEQ ID NO: 235022 - DNA, 20 bp, synthetic construct
  source 1..20: mol_type = other DNA
acaaaaaaaaaaaaacaaaa

SEQ ID NO: 235023 - DNA, 20 bp, synthetic construct
  source 1..20: mol_type = other DNA
aacaaaaaaaaaaaaacaaa

SEQ ID NO: 235024 - DNA, 20 bp, synthetic construct
  source 1..20: mol_type = other DNA
aaacaaaaaaaaaaaaacaa

SEQ ID NO: 235025 - DNA, 20 bp, synthetic construct
  source 1..20: mol_type = other DNA
aaaacaaaaaaaaaaaaaca

SEQ ID NO: 235026 - DNA, 20 bp, synthetic construct
  source 1..20: mol_type = other DNA
caaaacaaaaaaaaaaaaac

SEQ ID NO: 235027 - DNA, 20 bp, synthetic construct
  source 1..20: mol_type = other DNA
tcaaaacaaaaaaaaaaaaa

SEQ ID NO: 235028 - DNA, 20 bp, synthetic construct
  source 1..20: mol_type = other DNA
ctcaaaacaaaaaaaaaaaa

SEQ ID NO: 235029 - DNA, 20 bp, synthetic construct
  source 1..20: mol_type = other DNA
tctcaaaacaaaaaaaaaaa

SEQ ID NO: 235030 - DNA, 20 bp, synthetic construct
  source 1..20: mol_type = other DNA
gtctcaaaacaaaaaaaaaa

SEQ ID NO: 235031 - DNA, 20 bp, synthetic construct
  source 1..20: mol_type = other DNA
tgtctcaaaacaaaaaaaaa

SEQ ID NO: 235032 - DNA, 20 bp, synthetic construct
  source 1..20: mol_type = other DNA
ctgtctcaaaacaaaaaaaa

SEQ ID NO: 235033 - DNA, 20 bp, synthetic construct
  source 1..20: mol_type = other DNA
tctgtctcaaaacaaaaaaa

SEQ ID NO: 235034 - DNA, 20 bp, synthetic construct
  source 1..20: mol_type = other DNA
ctctgtctcaaaacaaaaaa

SEQ ID NO: 235035 - DNA, 20 bp, synthetic construct
  source 1..20: mol_type = other DNA
actctgtctcaaaacaaaaa

SEQ ID NO: 235036 - DNA, 20 bp, synthetic construct
  source 1..20: mol_type = other DNA
aactctgtctcaaaacaaaa

SEQ ID NO: 235037 - DNA, 20 bp, synthetic construct
  source 1..20: mol_type = other DNA
aaactctgtctcaaaacaaa

SEQ ID NO: 235038 - DNA, 20 bp, synthetic construct
  source 1..20: mol_type = other DNA
gaaactctgtctcaaaacaa

SEQ ID NO: 235039 - DNA, 20 bp, synthetic construct
  source 1..20: mol_type = other DNA
tgaaactctgtctcaaaaca

SEQ ID NO: 235040 - DNA, 20 bp, synthetic construct
  source 1..20: mol_type = other DNA
gtgaaactctgtctcaaaac

SEQ ID NO: 235041 - DNA, 20 bp, synthetic construct
  source 1..20: mol_type = other DNA
ggtgaaactctgtctcaaaa

SEQ ID NO: 235042 - DNA, 20 bp, synthetic construct
  source 1..20: mol_type = other DNA
gggtgaaactctgtctcaaa

SEQ ID NO: 235043 - DNA, 20 bp, synthetic construct
  source 1..20: mol_type = other DNA
agggtgaaactctgtctcaa

SEQ ID NO: 235044 - DNA, 20 bp, synthetic construct
  source 1..20: mol_type = other DNA
cagggtgaaactctgtctca

SEQ ID NO: 235045 - DNA, 20 bp, synthetic construct
  source 1..20: mol_type = other DNA
acagggtgaaactctgtctc

SEQ ID NO: 235046 - DNA, 20 bp, synthetic construct
  source 1..20: mol_type = other DNA
gacagggtgaaactctgtct

SEQ ID NO: 235047 - DNA, 20 bp, synthetic construct
  source 1..20: mol_type = other DNA
tgacagggtgaaactctgtc

SEQ ID NO: 235048 - DNA, 20 bp, synthetic construct
  source 1..20: mol_type = other DNA
gtgacagggtgaaactctgt

SEQ ID NO: 235049 - DNA, 20 bp, synthetic construct
  source 1..20: mol_type = other DNA
ggtgacagggtgaaactctg

SEQ ID NO: 235050 - DNA, 20 bp, synthetic construct
  source 1..20: mol_type = other DNA
gggtgacagggtgaaactct

SEQ ID NO: 235051 - DNA, 20 bp, synthetic construct
  source 1..20: mol_type = other DNA
tgggtgacagggtgaaactc

SEQ ID NO: 235052 - DNA, 20 bp, synthetic construct
  source 1..20: mol_type = other DNA
ctgggtgacagggtgaaact

SEQ ID NO: 235053 - DNA, 20 bp, synthetic construct
  source 1..20: mol_type = other DNA
cctgggtgacagggtgaaac

SEQ ID NO: 235054 - DNA, 20 bp, synthetic construct
  source 1..20: mol_type = other DNA
gcctgggtgacagggtgaaa

SEQ ID NO: 235055 - DNA, 20 bp, synthetic construct
  source 1..20: mol_type = other DNA
agcctgggtgacagggtgaa

SEQ ID NO: 235056 - DNA, 20 bp, synthetic construct
  source 1..20: mol_type = other DNA
cagcctgggtgacagggtga

SEQ ID NO: 235057 - DNA, 20 bp, synthetic construct
  source 1..20: mol_type = other DNA
ccagcctgggtgacagggtg

SEQ ID NO: 235058 - DNA, 20 bp, synthetic construct
  source 1..20: mol_type = other DNA
tccagcctgggtgacagggt

SEQ ID NO: 235059 - DNA, 20 bp, synthetic construct
  source 1..20: mol_type = other DNA
ctccagcctgggtgacaggg

SEQ ID NO: 235060 - DNA, 20 bp, synthetic construct
  source 1..20: mol_type = other DNA
actccagcctgggtgacagg

SEQ ID NO: 235061 - DNA, 20 bp, synthetic construct
  source 1..20: mol_type = other DNA
cactccagcctgggtgacag

SEQ ID NO: 235062 - DNA, 20 bp, synthetic construct
  source 1..20: mol_type = other DNA
gcactccagcctgggtgaca

SEQ ID NO: 235063 - DNA, 20 bp, synthetic construct
  source 1..20: mol_type = other DNA
tgcactccagcctgggtgac

SEQ ID NO: 235064 - DNA, 20 bp, synthetic construct
  source 1..20: mol_type = other DNA
ctgcactccagcctgggtga

SEQ ID NO: 235065 - DNA, 20 bp, synthetic construct
  source 1..20: mol_type = other DNA
actgcactccagcctgggtg

SEQ ID NO: 235066 - DNA, 20 bp, synthetic construct
  source 1..20: mol_type = other DNA
cactgcactccagcctgggt

SEQ ID NO: 235067 - DNA, 20 bp, synthetic construct
  source 1..20: mol_type = other DNA
ccactgcactccagcctggg

SEQ ID NO: 235068 - DNA, 20 bp, synthetic construct
  source 1..20: mol_type = other DNA
accactgcactccagcctgg

SEQ ID NO: 235069 - DNA, 20 bp, synthetic construct
  source 1..20: mol_type = other DNA
caccactgcactccagcctg

SEQ ID NO: 235070 - DNA, 20 bp, synthetic construct
  source 1..20: mol_type = other DNA
acaccactgcactccagcct

SEQ ID NO: 235071 - DNA, 20 bp, synthetic construct
  source 1..20: mol_type = other DNA
tacaccactgcactccagcc

SEQ ID NO: 235072 - DNA, 20 bp, synthetic construct
  source 1..20: mol_type = other DNA
ttacaccactgcactccagc

SEQ ID NO: 235073 - DNA, 20 bp, synthetic construct
  source 1..20: mol_type = other DNA
attacaccactgcactccag

SEQ ID NO: 235074 - DNA, 20 bp, synthetic construct
  source 1..20: mol_type = other DNA
gattacaccactgcactcca

SEQ ID NO: 235075 - DNA, 20 bp, synthetic construct
  source 1..20: mol_type = other DNA
agattacaccactgcactcc

SEQ ID NO: 235076 - DNA, 20 bp, synthetic construct
  source 1..20: mol_type = other DNA
gagattacaccactgcactc

SEQ ID NO: 235077 - DNA, 20 bp, synthetic construct
  source 1..20: mol_type = other DNA
tgagattacaccactgcact

SEQ ID NO: 235078 - DNA, 20 bp, synthetic construct
  source 1..20: mol_type = other DNA
ctgagattacaccactgcac

SEQ ID NO: 235079 - DNA, 20 bp, synthetic construct
  source 1..20: mol_type = other DNA
gctgagattacaccactgca

SEQ ID NO: 235080 - DNA, 20 bp, synthetic construct
  source 1..20: mol_type = other DNA
agctgagattacaccactgc

SEQ ID NO: 235081 - DNA, 20 bp, synthetic construct
  source 1..20: mol_type = other DNA
gagctgagattacaccactg

SEQ ID NO: 235082 - DNA, 20 bp, synthetic construct
  source 1..20: mol_type = other DNA
tgagctgagattacaccact

SEQ ID NO: 235083 - DNA, 20 bp, synthetic construct
  source 1..20: mol_type = other DNA
gtgagctgagattacaccac

SEQ ID NO: 235084 - DNA, 20 bp, synthetic construct
  source 1..20: mol_type = other DNA
agtgagctgagattacacca

SEQ ID NO: 235085 - DNA, 20 bp, synthetic construct
  source 1..20: mol_type = other DNA
cagtgagctgagattacacc

SEQ ID NO: 235086 - DNA, 20 bp, synthetic construct
  source 1..20: mol_type = other DNA
gcagtgagctgagattacac

SEQ ID NO: 235087 - DNA, 20 bp, synthetic construct
  source 1..20: mol_type = other DNA
tgcagtgagctgagattaca

SEQ ID NO: 235088 - DNA, 20 bp, synthetic construct
  source 1..20: mol_type = other DNA
ttgcagtgagctgagattac

SEQ ID NO: 235089 - DNA, 20 bp, synthetic construct
  source 1..20: mol_type = other DNA
gttgcagtgagctgagatta

SEQ ID NO: 235090 - DNA, 20 bp, synthetic construct
  source 1..20: mol_type = other DNA
ggttgcagtgagctgagatt

SEQ ID NO: 235091 - DNA, 20 bp, synthetic construct
  source 1..20: mol_type = other DNA
aggttgcagtgagctgagat

SEQ ID NO: 235092 - DNA, 20 bp, synthetic construct
  source 1..20: mol_type = other DNA
gaggttgcagtgagctgaga

SEQ ID NO: 235093 - DNA, 20 bp, synthetic construct
  source 1..20: mol_type = other DNA
ggaggttgcagtgagctgag

SEQ ID NO: 235094 - DNA, 20 bp, synthetic construct
  source 1..20: mol_type = other DNA
tggaggttgcagtgagctga

SEQ ID NO: 235095 - DNA, 20 bp, synthetic construct
  source 1..20: mol_type = other DNA
gtggaggttgcagtgagctg

SEQ ID NO: 235096 - DNA, 20 bp, synthetic construct
  source 1..20: mol_type = other DNA
ggtggaggttgcagtgagct

SEQ ID NO: 235097 - DNA, 20 bp, synthetic construct
  source 1..20: mol_type = other DNA
aggtggaggttgcagtgagc

SEQ ID NO: 235098 - DNA, 20 bp, synthetic construct
  source 1..20: mol_type = other DNA
caggtggaggttgcagtgag

SEQ ID NO: 235099 - DNA, 20 bp, synthetic construct
  source 1..20: mol_type = other DNA
gcaggtggaggttgcagtga

SEQ ID NO: 235100 - DNA, 20 bp, synthetic construct
  source 1..20: mol_type = other DNA
ggcaggtggaggttgcagtg

SEQ ID NO: 235101 - DNA, 20 bp, synthetic construct
  source 1..20: mol_type = other DNA
tggcaggtggaggttgcagt

SEQ ID NO: 235102 - DNA, 20 bp, synthetic construct
  source 1..20: mol_type = other DNA
ctggcaggtggaggttgcag

SEQ ID NO: 235103 - DNA, 20 bp, synthetic construct
  source 1..20: mol_type = other DNA
cctggcaggtggaggttgca

SEQ ID NO: 235104 - DNA, 20 bp, synthetic construct
  source 1..20: mol_type = other DNA
acctggcaggtggaggttgc

SEQ ID NO: 235105 - DNA, 20 bp, synthetic construct
  source 1..20: mol_type = other DNA
aacctggcaggtggaggttg

SEQ ID NO: 235106 - DNA, 20 bp, synthetic construct
  source 1..20: mol_type = other DNA
gaacctggcaggtggaggtt

SEQ ID NO: 235107 - DNA, 20 bp, synthetic construct
  source 1..20: mol_type = other DNA
tgaacctggcaggtggaggt

SEQ ID NO: 235108 - DNA, 20 bp, synthetic construct
  source 1..20: mol_type = other DNA
ttgaacctggcaggtggagg

SEQ ID NO: 235109 - DNA, 20 bp, synthetic construct
  source 1..20: mol_type = other DNA
attgaacctggcaggtggag

SEQ ID NO: 235110 - DNA, 20 bp, synthetic construct
  source 1..20: mol_type = other DNA
aattgaacctggcaggtgga

SEQ ID NO: 235111 - DNA, 20 bp, synthetic construct
  source 1..20: mol_type = other DNA
caattgaacctggcaggtgg

SEQ ID NO: 235112 - DNA, 20 bp, synthetic construct
  source 1..20: mol_type = other DNA
tcaattgaacctggcaggtg

SEQ ID NO: 235113 - DNA, 20 bp, synthetic construct
  source 1..20: mol_type = other DNA
atcaattgaacctggcaggt

SEQ ID NO: 235114 - DNA, 20 bp, synthetic construct
  source 1..20: mol_type = other DNA
aatcaattgaacctggcagg

SEQ ID NO: 235115 - DNA, 20 bp, synthetic construct
  source 1..20: mol_type = other DNA
gaatcaattgaacctggcag

SEQ ID NO: 235116 - DNA, 20 bp, synthetic construct
  source 1..20: mol_type = other DNA
agaatcaattgaacctggca

SEQ ID NO: 235117 - DNA, 20 bp, synthetic construct
  source 1..20: mol_type = other DNA
gagaatcaattgaacctggc

SEQ ID NO: 235118 - DNA, 20 bp, synthetic construct
  source 1..20: mol_type = other DNA
ggagaatcaattgaacctgg

SEQ ID NO: 235119 - DNA, 20 bp, synthetic construct
  source 1..20: mol_type = other DNA
aggagaatcaattgaacctg

SEQ ID NO: 235120 - DNA, 20 bp, synthetic construct
  source 1..20: mol_type = other DNA
caggagaatcaattgaacct

SEQ ID NO: 235121 - DNA, 20 bp, synthetic construct
  source 1..20: mol_type = other DNA
gcaggagaatcaattgaacc

SEQ ID NO: 235122 - DNA, 20 bp, synthetic construct
  source 1..20: mol_type = other DNA
ggcaggagaatcaattgaac

SEQ ID NO: 235123 - DNA, 20 bp, synthetic construct
  source 1..20: mol_type = other DNA
aggcaggagaatcaattgaa

SEQ ID NO: 235124 - DNA, 20 bp, synthetic construct
  source 1..20: mol_type = other DNA
gaggcaggagaatcaattga

SEQ ID NO: 235125 - DNA, 20 bp, synthetic construct
  source 1..20: mol_type = other DNA
tgaggcaggagaatcaattg

SEQ ID NO: 235126 - DNA, 20 bp, synthetic construct
  source 1..20: mol_type = other DNA
ctgaggcaggagaatcaatt

SEQ ID NO: 235127 - DNA, 20 bp, synthetic construct
  source 1..20: mol_type = other DNA
gctgaggcaggagaatcaat

SEQ ID NO: 235128 - DNA, 20 bp, synthetic construct
  source 1..20: mol_type = other DNA
ggctgaggcaggagaatcaa

SEQ ID NO: 235129 - DNA, 20 bp, synthetic construct
  source 1..20: mol_type = other DNA
aggctgaggcaggagaatca

SEQ ID NO: 235130 - DNA, 20 bp, synthetic construct
  source 1..20: mol_type = other DNA
gaggctgaggcaggagaatc

SEQ ID NO: 235131 - DNA, 20 bp, synthetic construct
  source 1..20: mol_type = other DNA
ggaggctgaggcaggagaat

SEQ ID NO: 235132 - DNA, 20 bp, synthetic construct
  source 1..20: mol_type = other DNA
gggaggctgaggcaggagaa

SEQ ID NO: 235133 - DNA, 20 bp, synthetic construct
  source 1..20: mol_type = other DNA
ggggaggctgaggcaggaga

SEQ ID NO: 235134 - DNA, 20 bp, synthetic construct
  source 1..20: mol_type = other DNA
tggggaggctgaggcaggag

SEQ ID NO: 235135 - DNA, 20 bp, synthetic construct
  source 1..20: mol_type = other DNA
ctggggaggctgaggcagga

SEQ ID NO: 235136 - DNA, 20 bp, synthetic construct
  source 1..20: mol_type = other DNA
actggggaggctgaggcagg

SEQ ID NO: 235137 - DNA, 20 bp, synthetic construct
  source 1..20: mol_type = other DNA
tactggggaggctgaggcag

SEQ ID NO: 235138 - DNA, 20 bp, synthetic construct
  source 1..20: mol_type = other DNA
ctactggggaggctgaggca

SEQ ID NO: 235139 - DNA, 20 bp, synthetic construct
  source 1..20: mol_type = other DNA
gctactggggaggctgaggc

SEQ ID NO: 235140 - DNA, 20 bp, synthetic construct
  source 1..20: mol_type = other DNA
agctactggggaggctgagg

SEQ ID NO: 235141 - DNA, 20 bp, synthetic construct
  source 1..20: mol_type = other DNA
cagctactggggaggctgag

SEQ ID NO: 235142 - DNA, 20 bp, synthetic construct
  source 1..20: mol_type = other DNA
ccagctactggggaggctga

SEQ ID NO: 235143 - DNA, 20 bp, synthetic construct
  source 1..20: mol_type = other DNA
cccagctactggggaggctg

SEQ ID NO: 235144 - DNA, 20 bp, synthetic construct
  source 1..20: mol_type = other DNA
tcccagctactggggaggct

SEQ ID NO: 235145 - DNA, 20 bp, synthetic construct
  source 1..20: mol_type = other DNA
atcccagctactggggaggc

SEQ ID NO: 235146 - DNA, 20 bp, synthetic construct
  source 1..20: mol_type = other DNA
aatcccagctactggggagg

SEQ ID NO: 235147 - DNA, 20 bp, synthetic construct
  source 1..20: mol_type = other DNA
taatcccagctactggggag

SEQ ID NO: 235148 - DNA, 20 bp, synthetic construct
  source 1..20: mol_type = other DNA
gtaatcccagctactgggga

SEQ ID NO: 235149 - DNA, 20 bp, synthetic construct
  source 1..20: mol_type = other DNA
tgtaatcccagctactgggg

SEQ ID NO: 235150 - DNA, 20 bp, synthetic construct
  source 1..20: mol_type = other DNA
ctgtaatcccagctactggg

SEQ ID NO: 235151 - DNA, 20 bp, synthetic construct
  source 1..20: mol_type = other DNA
cctgtaatcccagctactgg

SEQ ID NO: 235152 - DNA, 20 bp, synthetic construct
  source 1..20: mol_type = other DNA
gcctgtaatcccagctactg

SEQ ID NO: 235153 - DNA, 20 bp, synthetic construct
  source 1..20: mol_type = other DNA
tgcctgtaatcccagctact

SEQ ID NO: 235154 - DNA, 20 bp, synthetic construct
  source 1..20: mol_type = other DNA
gtgcctgtaatcccagctac

SEQ ID NO: 235155 - DNA, 20 bp, synthetic construct
  source 1..20: mol_type = other DNA
ggtgcctgtaatcccagcta

SEQ ID NO: 235156 - DNA, 20 bp, synthetic construct
  source 1..20: mol_type = other DNA
aggtgcctgtaatcccagct

SEQ ID NO: 235157 - DNA, 20 bp, synthetic construct
  source 1..20: mol_type = other DNA
caggtgcctgtaatcccagc

SEQ ID NO: 235158 - DNA, 20 bp, synthetic construct
  source 1..20: mol_type = other DNA
gcaggtgcctgtaatcccag

SEQ ID NO: 235159 - DNA, 20 bp, synthetic construct
  source 1..20: mol_type = other DNA
ggcaggtgcctgtaatccca

SEQ ID NO: 235160 - DNA, 20 bp, synthetic construct
  source 1..20: mol_type = other DNA
tggcaggtgcctgtaatccc

SEQ ID NO: 235161 - DNA, 20 bp, synthetic construct
  source 1..20: mol_type = other DNA
gtggcaggtgcctgtaatcc

SEQ ID NO: 235162 - DNA, 20 bp, synthetic construct
  source 1..20: mol_type = other DNA
tgtggcaggtgcctgtaatc

SEQ ID NO: 235163 - DNA, 20 bp, synthetic construct
  source 1..20: mol_type = other DNA
atgtggcaggtgcctgtaat

SEQ ID NO: 235164 - DNA, 20 bp, synthetic construct
  source 1..20: mol_type = other DNA
catgtggcaggtgcctgtaa

SEQ ID NO: 235165 - DNA, 20 bp, synthetic construct
  source 1..20: mol_type = other DNA
gcatgtggcaggtgcctgta

SEQ ID NO: 235166 - DNA, 20 bp, synthetic construct
  source 1..20: mol_type = other DNA
ggcatgtggcaggtgcctgt

SEQ ID NO: 235167 - DNA, 20 bp, synthetic construct
  source 1..20: mol_type = other DNA
aggcatgtggcaggtgcctg

SEQ ID NO: 235168 - DNA, 20 bp, synthetic construct
  source 1..20: mol_type = other DNA
caggcatgtggcaggtgcct

SEQ ID NO: 235169 - DNA, 20 bp, synthetic construct
  source 1..20: mol_type = other DNA
ccaggcatgtggcaggtgcc

SEQ ID NO: 235170 - DNA, 20 bp, synthetic construct
  source 1..20: mol_type = other DNA
gccaggcatgtggcaggtgc

SEQ ID NO: 235171 - DNA, 20 bp, synthetic construct
  source 1..20: mol_type = other DNA
agccaggcatgtggcaggtg

SEQ ID NO: 235172 - DNA, 20 bp, synthetic construct
  source 1..20: mol_type = other DNA
tagccaggcatgtggcaggt

SEQ ID NO: 235173 - DNA, 20 bp, synthetic construct
  source 1..20: mol_type = other DNA
ttagccaggcatgtggcagg

SEQ ID NO: 235174 - DNA, 20 bp, synthetic construct
  source 1..20: mol_type = other DNA
attagccaggcatgtggcag

SEQ ID NO: 235175 - DNA, 20 bp, synthetic construct
  source 1..20: mol_type = other DNA
aattagccaggcatgtggca

SEQ ID NO: 235176 - DNA, 20 bp, synthetic construct
  source 1..20: mol_type = other DNA
taattagccaggcatgtggc

SEQ ID NO: 235177 - DNA, 20 bp, synthetic construct
  source 1..20: mol_type = other DNA
ataattagccaggcatgtgg

SEQ ID NO: 235178 - DNA, 20 bp, synthetic construct
  source 1..20: mol_type = other DNA
aataattagccaggcatgtg

SEQ ID NO: 235179 - DNA, 20 bp, synthetic construct
  source 1..20: mol_type = other DNA
caataattagccaggcatgt

SEQ ID NO: 235180 - DNA, 20 bp, synthetic construct
  source 1..20: mol_type = other DNA
acaataattagccaggcatg

SEQ ID NO: 235181 - DNA, 20 bp, synthetic construct
  source 1..20: mol_type = other DNA
tacaataattagccaggcat

SEQ ID NO: 235182 - DNA, 20 bp, synthetic construct
  source 1..20: mol_type = other DNA
atacaataattagccaggca

SEQ ID NO: 235183 - DNA, 20 bp, synthetic construct
  source 1..20: mol_type = other DNA
aatacaataattagccaggc

SEQ ID NO: 235184 - DNA, 20 bp, synthetic construct
  source 1..20: mol_type = other DNA
aaatacaataattagccagg

SEQ ID NO: 235185 - DNA, 20 bp, synthetic construct
  source 1..20: mol_type = other DNA
aaaatacaataattagccag

SEQ ID NO: 235186 - DNA, 20 bp, synthetic construct
  source 1..20: mol_type = other DNA
aaaaatacaataattagcca

SEQ ID NO: 235187 - DNA, 20 bp, synthetic construct
  source 1..20: mol_type = other DNA
taaaaatacaataattagcc

SEQ ID NO: 235188 - DNA, 20 bp, synthetic construct
  source 1..20: mol_type = other DNA
ctaaaaatacaataattagc

SEQ ID NO: 235189 - DNA, 20 bp, synthetic construct
  source 1..20: mol_type = other DNA
actaaaaatacaataattag

SEQ ID NO: 235190 - DNA, 20 bp, synthetic construct
  source 1..20: mol_type = other DNA
tactaaaaatacaataatta

SEQ ID NO: 235191 - DNA, 20 bp, synthetic construct
  source 1..20: mol_type = other DNA
ctactaaaaatacaataatt

SEQ ID NO: 235192 - DNA, 20 bp, synthetic construct
  source 1..20: mol_type = other DNA
tctactaaaaatacaataat

SEQ ID NO: 235193 - DNA, 20 bp, synthetic construct
  source 1..20: mol_type = other DNA
ctctactaaaaatacaataa

SEQ ID NO: 235194 - DNA, 20 bp, synthetic construct
  source 1..20: mol_type = other DNA
tctctactaaaaatacaata

SEQ ID NO: 235195 - DNA, 20 bp, synthetic construct
  source 1..20: mol_type = other DNA
atctctactaaaaatacaat

SEQ ID NO: 235196 - DNA, 20 bp, synthetic construct
  source 1..20: mol_type = other DNA
catctctactaaaaatacaa

SEQ ID NO: 235197 - DNA, 20 bp, synthetic construct
  source 1..20: mol_type = other DNA
ccatctctactaaaaataca

SEQ ID NO: 235198 - DNA, 20 bp, synthetic construct
  source 1..20: mol_type = other DNA
cccatctctactaaaaatac

SEQ ID NO: 235199 - DNA, 20 bp, synthetic construct
  source 1..20: mol_type = other DNA
ccccatctctactaaaaata

SEQ ID NO: 235200 - DNA, 20 bp, synthetic construct
  source 1..20: mol_type = other DNA
accccatctctactaaaaat

SEQ ID NO: 235201 - DNA, 20 bp, synthetic construct
  source 1..20: mol_type = other DNA
aaccccatctctactaaaaa

SEQ ID NO: 235202 - DNA, 20 bp, synthetic construct
  source 1..20: mol_type = other DNA
aaaccccatctctactaaaa

SEQ ID NO: 235203 - DNA, 20 bp, synthetic construct
  source 1..20: mol_type = other DNA
aaaaccccatctctactaaa

SEQ ID NO: 235204 - DNA, 20 bp, synthetic construct
  source 1..20: mol_type = other DNA
taaaaccccatctctactaa

SEQ ID NO: 235205 - DNA, 20 bp, synthetic construct
  source 1..20: mol_type = other DNA
gtaaaaccccatctctacta

SEQ ID NO: 235206 - DNA, 20 bp, synthetic construct
  source 1..20: mol_type = other DNA
ggtaaaaccccatctctact

SEQ ID NO: 235207 - DNA, 20 bp, synthetic construct
  source 1..20: mol_type = other DNA
tggtaaaaccccatctctac

SEQ ID NO: 235208 - DNA, 20 bp, synthetic construct
  source 1..20: mol_type = other DNA
atggtaaaaccccatctcta

SEQ ID NO: 235209 - DNA, 20 bp, synthetic construct
  source 1..20: mol_type = other DNA
catggtaaaaccccatctct

SEQ ID NO: 235210 - DNA, 20 bp, synthetic construct
  source 1..20: mol_type = other DNA
acatggtaaaaccccatctc

SEQ ID NO: 235211 - DNA, 20 bp, synthetic construct
  source 1..20: mol_type = other DNA
aacatggtaaaaccccatct

SEQ ID NO: 235212 - DNA, 20 bp, synthetic construct
  source 1..20: mol_type = other DNA
caacatggtaaaaccccatc

SEQ ID NO: 235213 - DNA, 20 bp, synthetic construct
  source 1..20: mol_type = other DNA
ccaacatggtaaaaccccat

SEQ ID NO: 235214 - DNA, 20 bp, synthetic construct
  source 1..20: mol_type = other DNA
gccaacatggtaaaacccca

SEQ ID NO: 235215 - DNA, 20 bp, synthetic construct
  source 1..20: mol_type = other DNA
ggccaacatggtaaaacccc

SEQ ID NO: 235216 - DNA, 20 bp, synthetic construct
  source 1..20: mol_type = other DNA
tggccaacatggtaaaaccc

SEQ ID NO: 235217 - DNA, 20 bp, synthetic construct
  source 1..20: mol_type = other DNA
ctggccaacatggtaaaacc

SEQ ID NO: 235218 - DNA, 20 bp, synthetic construct
  source 1..20: mol_type = other DNA
cctggccaacatggtaaaac

SEQ ID NO: 235219 - DNA, 20 bp, synthetic construct
  source 1..20: mol_type = other DNA
gcctggccaacatggtaaaa

SEQ ID NO: 235220 - DNA, 20 bp, synthetic construct
  source 1..20: mol_type = other DNA
agcctggccaacatggtaaa

SEQ ID NO: 235221 - DNA, 20 bp, synthetic construct
  source 1..20: mol_type = other DNA
cagcctggccaacatggtaa

SEQ ID NO: 235222 - DNA, 20 bp, synthetic construct
  source 1..20: mol_type = other DNA
ccagcctggccaacatggta

SEQ ID NO: 235223 - DNA, 20 bp, synthetic construct
  source 1..20: mol_type = other DNA
accagcctggccaacatggt

SEQ ID NO: 235224 - DNA, 20 bp, synthetic construct
  source 1..20: mol_type = other DNA
gaccagcctggccaacatgg

SEQ ID NO: 235225 - DNA, 20 bp, synthetic construct
  source 1..20: mol_type = other DNA
agaccagcctggccaacatg

SEQ ID NO: 235226 - DNA, 20 bp, synthetic construct
  source 1..20: mol_type = other DNA
gagaccagcctggccaacat

SEQ ID NO: 235227 - DNA, 20 bp, synthetic construct
  source 1..20: mol_type = other DNA
cgagaccagcctggccaaca

SEQ ID NO: 235228 - DNA, 20 bp, synthetic construct
  source 1..20: mol_type = other DNA
tcgagaccagcctggccaac

SEQ ID NO: 235229 - DNA, 20 bp, synthetic construct
  source 1..20: mol_type = other DNA
atcgagaccagcctggccaa

SEQ ID NO: 235230 - DNA, 20 bp, synthetic construct
  source 1..20: mol_type = other DNA
gatcgagaccagcctggcca

SEQ ID NO: 235231 - DNA, 20 bp, synthetic construct
  source 1..20: mol_type = other DNA
ggatcgagaccagcctggcc

SEQ ID NO: 235232 - DNA, 20 bp, synthetic construct
  source 1..20: mol_type = other DNA
gggatcgagaccagcctggc

SEQ ID NO: 235233 - DNA, 20 bp, synthetic construct
  source 1..20: mol_type = other DNA
ggggatcgagaccagcctgg

SEQ ID NO: 235234 - DNA, 20 bp, synthetic construct
  source 1..20: mol_type = other DNA
aggggatcgagaccagcctg

SEQ ID NO: 235235 - DNA, 20 bp, synthetic construct
  source 1..20: mol_type = other DNA
caggggatcgagaccagcct

SEQ ID NO: 235236 - DNA, 20 bp, synthetic construct
  source 1..20: mol_type = other DNA
tcaggggatcgagaccagcc

SEQ ID NO: 235237 - DNA, 20 bp, synthetic construct
  source 1..20: mol_type = other DNA
gtcaggggatcgagaccagc

SEQ ID NO: 235238 - DNA, 20 bp, synthetic construct
  source 1..20: mol_type = other DNA
ggtcaggggatcgagaccag

SEQ ID NO: 235239 - DNA, 20 bp, synthetic construct
  source 1..20: mol_type = other DNA
aggtcaggggatcgagacca

SEQ ID NO: 235240 - DNA, 20 bp, synthetic construct
  source 1..20: mol_type = other DNA
gaggtcaggggatcgagacc

SEQ ID NO: 235241 - DNA, 20 bp, synthetic construct
  source 1..20: mol_type = other DNA
tgaggtcaggggatcgagac

SEQ ID NO: 235242 - DNA, 20 bp, synthetic construct
  source 1..20: mol_type = other DNA
ctgaggtcaggggatcgaga

SEQ ID NO: 235243 - DNA, 20 bp, synthetic construct
  source 1..20: mol_type = other DNA
cctgaggtcaggggatcgag

SEQ ID NO: 235244 - DNA, 20 bp, synthetic construct
  source 1..20: mol_type = other DNA
acctgaggtcaggggatcga

SEQ ID NO: 235245 - DNA, 20 bp, synthetic construct
  source 1..20: mol_type = other DNA
cacctgaggtcaggggatcg

SEQ ID NO: 235246 - DNA, 20 bp, synthetic construct
  source 1..20: mol_type = other DNA
tcacctgaggtcaggggatc

SEQ ID NO: 235247 - DNA, 20 bp, synthetic construct
  source 1..20: mol_type = other DNA
atcacctgaggtcaggggat

SEQ ID NO: 235248 - DNA, 20 bp, synthetic construct
  source 1..20: mol_type = other DNA
gatcacctgaggtcagggga

SEQ ID NO: 235249 - DNA, 20 bp, synthetic construct
  source 1..20: mol_type = other DNA
ggatcacctgaggtcagggg

SEQ ID NO: 235250 - DNA, 20 bp, synthetic construct
  source 1..20: mol_type = other DNA
tggatcacctgaggtcaggg

SEQ ID NO: 235251 - DNA, 20 bp, synthetic construct
  source 1..20: mol_type = other DNA
gtggatcacctgaggtcagg

SEQ ID NO: 235252 - DNA, 20 bp, synthetic construct
  source 1..20: mol_type = other DNA
ggtggatcacctgaggtcag

SEQ ID NO: 235253 - DNA, 20 bp, synthetic construct
  source 1..20: mol_type = other DNA
gggtggatcacctgaggtca

SEQ ID NO: 235254 - DNA, 20 bp, synthetic construct
  source 1..20: mol_type = other DNA
tgggtggatcacctgaggtc

SEQ ID NO: 235255 - DNA, 20 bp, synthetic construct
  source 1..20: mol_type = other DNA
gtgggtggatcacctgaggt

SEQ ID NO: 235256 - DNA, 20 bp, synthetic construct
  source 1..20: mol_type = other DNA
ggtgggtggatcacctgagg

SEQ ID NO: 235257 - DNA, 20 bp, synthetic construct
  source 1..20: mol_type = other DNA
aggtgggtggatcacctgag

SEQ ID NO: 235258 - DNA, 20 bp, synthetic construct
  source 1..20: mol_type = other DNA
gaggtgggtggatcacctga

SEQ ID NO: 235259 - DNA, 20 bp, synthetic construct
  source 1..20: mol_type = other DNA
cgaggtgggtggatcacctg

SEQ ID NO: 235260 - DNA, 20 bp, synthetic construct
  source 1..20: mol_type = other DNA
ccgaggtgggtggatcacct

SEQ ID NO: 235261 - DNA, 20 bp, synthetic construct
  source 1..20: mol_type = other DNA
gccgaggtgggtggatcacc

SEQ ID NO: 235262 - DNA, 20 bp, synthetic construct
  source 1..20: mol_type = other DNA
ggccgaggtgggtggatcac

SEQ ID NO: 235263 - DNA, 20 bp, synthetic construct
  source 1..20: mol_type = other DNA
aggccgaggtgggtggatca

SEQ ID NO: 235264 - DNA, 20 bp, synthetic construct
  source 1..20: mol_type = other DNA
gaggccgaggtgggtggatc

SEQ ID NO: 235265 - DNA, 20 bp, synthetic construct
  source 1..20: mol_type = other DNA
ggaggccgaggtgggtggat

SEQ ID NO: 235266 - DNA, 20 bp, synthetic construct
  source 1..20: mol_type = other DNA
gggaggccgaggtgggtgga

SEQ ID NO: 235267 - DNA, 20 bp, synthetic construct
  source 1..20: mol_type = other DNA
tgggaggccgaggtgggtgg

SEQ ID NO: 235268 - DNA, 20 bp, synthetic construct
  source 1..20: mol_type = other DNA
ttgggaggccgaggtgggtg

SEQ ID NO: 235269 - DNA, 20 bp, synthetic construct
  source 1..20: mol_type = other DNA
tttgggaggccgaggtgggt

SEQ ID NO: 235270 - DNA, 20 bp, synthetic construct
  source 1..20: mol_type = other DNA
ctttgggaggccgaggtggg

SEQ ID NO: 235271 - DNA, 20 bp, synthetic construct
  source 1..20: mol_type = other DNA
actttgggaggccgaggtgg

SEQ ID NO: 235272 - DNA, 20 bp, synthetic construct
  source 1..20: mol_type = other DNA
cactttgggaggccgaggtg

SEQ ID NO: 235273 - DNA, 20 bp, synthetic construct
  source 1..20: mol_type = other DNA
gcactttgggaggccgaggt

SEQ ID NO: 235274 - DNA, 20 bp, synthetic construct
  source 1..20: mol_type = other DNA
agcactttgggaggccgagg

SEQ ID NO: 235275 - DNA, 20 bp, synthetic construct
  source 1..20: mol_type = other DNA
cagcactttgggaggccgag

SEQ ID NO: 235276 - DNA, 20 bp, synthetic construct
  source 1..20: mol_type = other DNA
tcagcactttgggaggccga

SEQ ID NO: 235277 - DNA, 20 bp, synthetic construct
  source 1..20: mol_type = other DNA
ctcagcactttgggaggccg

SEQ ID NO: 235278 - DNA, 20 bp, synthetic construct
  source 1..20: mol_type = other DNA
tctcagcactttgggaggcc

SEQ ID NO: 235279 - DNA, 20 bp, synthetic construct
  source 1..20: mol_type = other DNA
atctcagcactttgggaggc

SEQ ID NO: 235280 - DNA, 20 bp, synthetic construct
  source 1..20: mol_type = other DNA
gatctcagcactttgggagg

SEQ ID NO: 235281 - DNA, 20 bp, synthetic construct
  source 1..20: mol_type = other DNA
tgatctcagcactttgggag

SEQ ID NO: 235282 - DNA, 20 bp, synthetic construct
  source 1..20: mol_type = other DNA
gtgatctcagcactttggga

SEQ ID NO: 235283 - DNA, 20 bp, synthetic construct
  source 1..20: mol_type = other DNA
tgtgatctcagcactttggg

SEQ ID NO: 235284 - DNA, 20 bp, synthetic construct
  source 1..20: mol_type = other DNA
ctgtgatctcagcactttgg

SEQ ID NO: 235285 - DNA, 20 bp, synthetic construct
  source 1..20: mol_type = other DNA
cctgtgatctcagcactttg

SEQ ID NO: 235286 - DNA, 20 bp, synthetic construct
  source 1..20: mol_type = other DNA
gcctgtgatctcagcacttt

SEQ ID NO: 235287 - DNA, 20 bp, synthetic construct
  source 1..20: mol_type = other DNA
cgcctgtgatctcagcactt

SEQ ID NO: 235288 - DNA, 20 bp, synthetic construct
  source 1..20: mol_type = other DNA
acgcctgtgatctcagcact

SEQ ID NO: 235289 - DNA, 20 bp, synthetic construct
  source 1..20: mol_type = other DNA
cacgcctgtgatctcagcac

SEQ ID NO: 235290 - DNA, 20 bp, synthetic construct
  source 1..20: mol_type = other DNA
tcacgcctgtgatctcagca

SEQ ID NO: 235291 - DNA, 20 bp, synthetic construct
  source 1..20: mol_type = other DNA
ctcacgcctgtgatctcagc

SEQ ID NO: 235292 - DNA, 20 bp, synthetic construct
  source 1..20: mol_type = other DNA
gctcacgcctgtgatctcag

SEQ ID NO: 235293 - DNA, 20 bp, synthetic construct
  source 1..20: mol_type = other DNA
ggctcacgcctgtgatctca

SEQ ID NO: 235294 - DNA, 20 bp, synthetic construct
  source 1..20: mol_type = other DNA
tggctcacgcctgtgatctc

SEQ ID NO: 235295 - DNA, 20 bp, synthetic construct
  source 1..20: mol_type = other DNA
gtggctcacgcctgtgatct

SEQ ID NO: 235296 - DNA, 20 bp, synthetic construct
  source 1..20: mol_type = other DNA
ggtggctcacgcctgtgatc

SEQ ID NO: 235297 - DNA, 20 bp, synthetic construct
  source 1..20: mol_type = other DNA
tggtggctcacgcctgtgat

SEQ ID NO: 235298 - DNA, 20 bp, synthetic construct
  source 1..20: mol_type = other DNA
atggtggctcacgcctgtga

SEQ ID NO: 235299 - DNA, 20 bp, synthetic construct
  source 1..20: mol_type = other DNA
catggtggctcacgcctgtg

SEQ ID NO: 235300 - DNA, 20 bp, synthetic construct
  source 1..20: mol_type = other DNA
gcatggtggctcacgcctgt

SEQ ID NO: 235301 - DNA, 20 bp, synthetic construct
  source 1..20: mol_type = other DNA
ggcatggtggctcacgcctg

SEQ ID NO: 235302 - DNA, 20 bp, synthetic construct
  source 1..20: mol_type = other DNA
aggcatggtggctcacgcct

SEQ ID NO: 235303 - DNA, 20 bp, synthetic construct
  source 1..20: mol_type = other DNA
caggcatggtggctcacgcc

SEQ ID NO: 235304 - DNA, 20 bp, synthetic construct
  source 1..20: mol_type = other DNA
ccaggcatggtggctcacgc

SEQ ID NO: 235305 - DNA, 20 bp, synthetic construct
  source 1..20: mol_type = other DNA
gccaggcatggtggctcacg

SEQ ID NO: 235306 - DNA, 20 bp, synthetic construct
  source 1..20: mol_type = other DNA
ggccaggcatggtggctcac

SEQ ID NO: 235307 - DNA, 20 bp, synthetic construct
  source 1..20: mol_type = other DNA
cggccaggcatggtggctca

SEQ ID NO: 235308 - DNA, 20 bp, synthetic construct
  source 1..20: mol_type = other DNA
acggccaggcatggtggctc

SEQ ID NO: 235309 - DNA, 20 bp, synthetic construct
  source 1..20: mol_type = other DNA
gacggccaggcatggtggct

SEQ ID NO: 235310 - DNA, 20 bp, synthetic construct
  source 1..20: mol_type = other DNA
tgacggccaggcatggtggc

SEQ ID NO: 235311 - DNA, 20 bp, synthetic construct
  source 1..20: mol_type = other DNA
gtgacggccaggcatggtgg

SEQ ID NO: 235312 - DNA, 20 bp, synthetic construct
  source 1..20: mol_type = other DNA
ggtgacggccaggcatggtg

SEQ ID NO: 235313 - DNA, 20 bp, synthetic construct
  source 1..20: mol_type = other DNA
aggtgacggccaggcatggt

SEQ ID NO: 235314 - DNA, 20 bp, synthetic construct
  source 1..20: mol_type = other DNA
caggtgacggccaggcatgg

SEQ ID NO: 235315 - DNA, 20 bp, synthetic construct
  source 1..20: mol_type = other DNA
ccaggtgacggccaggcatg

SEQ ID NO: 235316 - DNA, 20 bp, synthetic construct
  source 1..20: mol_type = other DNA
accaggtgacggccaggcat

SEQ ID NO: 235317 - DNA, 20 bp, synthetic construct
  source 1..20: mol_type = other DNA
caccaggtgacggccaggca

SEQ ID NO: 235318 - DNA, 20 bp, synthetic construct
  source 1..20: mol_type = other DNA
ccaccaggtgacggccaggc

SEQ ID NO: 235319 - DNA, 20 bp, synthetic construct
  source 1..20: mol_type = other DNA
accaccaggtgacggccagg

SEQ ID NO: 235320 - DNA, 20 bp, synthetic construct
  source 1..20: mol_type = other DNA
caccaccaggtgacggccag

SEQ ID NO: 235321 - DNA, 20 bp, synthetic construct
  source 1..20: mol_type = other DNA
acaccaccaggtgacggcca

SEQ ID NO: 235322 - DNA, 20 bp, synthetic construct
  source 1..20: mol_type = other DNA
aacaccaccaggtgacggcc

SEQ ID NO: 235323 - DNA, 20 bp, synthetic construct
  source 1..20: mol_type = other DNA
caacaccaccaggtgacggc

SEQ ID NO: 235324 - DNA, 20 bp, synthetic construct
  source 1..20: mol_type = other DNA
tcaacaccaccaggtgacgg

SEQ ID NO: 235325 - DNA, 20 bp, synthetic construct
  source 1..20: mol_type = other DNA
ttcaacaccaccaggtgacg

SEQ ID NO: 235326 - DNA, 20 bp, synthetic construct
  source 1..20: mol_type = other DNA
attcaacaccaccaggtgac

SEQ ID NO: 235327 - DNA, 20 bp, synthetic construct
  source 1..20: mol_type = other DNA
tattcaacaccaccaggtga

SEQ ID NO: 235328 - DNA, 20 bp, synthetic construct
  source 1..20: mol_type = other DNA
atattcaacaccaccaggtg

SEQ ID NO: 235329 - DNA, 20 bp, synthetic construct
  source 1..20: mol_type = other DNA
catattcaacaccaccaggt

SEQ ID NO: 235330 - DNA, 20 bp, synthetic construct
  source 1..20: mol_type = other DNA
tcatattcaacaccaccagg

SEQ ID NO: 235331 - DNA, 20 bp, synthetic construct
  source 1..20: mol_type = other DNA
ttcatattcaacaccaccag

SEQ ID NO: 235332 - DNA, 20 bp, synthetic construct
  source 1..20: mol_type = other DNA
gttcatattcaacaccacca

SEQ ID NO: 235333 - DNA, 20 bp, synthetic construct
  source 1..20: mol_type = other DNA
agttcatattcaacaccacc

SEQ ID NO: 235334 - DNA, 20 bp, synthetic construct
  source 1..20: mol_type = other DNA
cagttcatattcaacaccac

SEQ ID NO: 235335 - DNA, 20 bp, synthetic construct
  source 1..20: mol_type = other DNA
gcagttcatattcaacacca

SEQ ID NO: 235336 - DNA, 20 bp, synthetic construct
  source 1..20: mol_type = other DNA
agcagttcatattcaacacc

SEQ ID NO: 235337 - DNA, 20 bp, synthetic construct
  source 1..20: mol_type = other DNA
cagcagttcatattcaacac

SEQ ID NO: 235338 - DNA, 20 bp, synthetic construct
  source 1..20: mol_type = other DNA
gcagcagttcatattcaaca

SEQ ID NO: 235339 - DNA, 20 bp, synthetic construct
  source 1..20: mol_type = other DNA
cgcagcagttcatattcaac

SEQ ID NO: 235340 - DNA, 20 bp, synthetic construct
  source 1..20: mol_type = other DNA
ccgcagcagttcatattcaa

SEQ ID NO: 235341 - DNA, 20 bp, synthetic construct
  source 1..20: mol_type = other DNA
accgcagcagttcatattca

SEQ ID NO: 235342 - DNA, 20 bp, synthetic construct
  source 1..20: mol_type = other DNA
caccgcagcagttcatattc

SEQ ID NO: 235343 - DNA, 20 bp, synthetic construct
  source 1..20: mol_type = other DNA
acaccgcagcagttcatatt

SEQ ID NO: 235344 - DNA, 20 bp, synthetic construct
  source 1..20: mol_type = other DNA
aacaccgcagcagttcatat

SEQ ID NO: 235345 - DNA, 20 bp, synthetic construct
  source 1..20: mol_type = other DNA
caacaccgcagcagttcata

SEQ ID NO: 235346 - DNA, 20 bp, synthetic construct
  source 1..20: mol_type = other DNA
ccaacaccgcagcagttcat

SEQ ID NO: 235347 - DNA, 20 bp, synthetic construct
  source 1..20: mol_type = other DNA
accaacaccgcagcagttca

SEQ ID NO: 235348 - DNA, 20 bp, synthetic construct
  source 1..20: mol_type = other DNA
taccaacaccgcagcagttc

SEQ ID NO: 235349 - DNA, 20 bp, synthetic construct
  source 1..20: mol_type = other DNA
ttaccaacaccgcagcagtt

SEQ ID NO: 235350 - DNA, 20 bp, synthetic construct
  source 1..20: mol_type = other DNA
tttaccaacaccgcagcagt

SEQ ID NO: 235351 - DNA, 20 bp, synthetic construct
  source 1..20: mol_type = other DNA
atttaccaacaccgcagcag

SEQ ID NO: 235352 - DNA, 20 bp, synthetic construct
  source 1..20: mol_type = other DNA
aatttaccaacaccgcagca

SEQ ID NO: 235353 - DNA, 20 bp, synthetic construct
  source 1..20: mol_type = other DNA
taatttaccaacaccgcagc

SEQ ID NO: 235354 - DNA, 20 bp, synthetic construct
  source 1..20: mol_type = other DNA
ttaatttaccaacaccgcag

SEQ ID NO: 235355 - DNA, 20 bp, synthetic construct
  source 1..20: mol_type = other DNA
cttaatttaccaacaccgca

SEQ ID NO: 235356 - DNA, 20 bp, synthetic construct
  source 1..20: mol_type = other DNA
gcttaatttaccaacaccgc

SEQ ID NO: 235357 - DNA, 20 bp, synthetic construct
  source 1..20: mol_type = other DNA
tgcttaatttaccaacaccg

SEQ ID NO: 235358 - DNA, 20 bp, synthetic construct
  source 1..20: mol_type = other DNA
ttgcttaatttaccaacacc

SEQ ID NO: 235359 - DNA, 20 bp, synthetic construct
  source 1..20: mol_type = other DNA
cttgcttaatttaccaacac

SEQ ID NO: 235360 - DNA, 20 bp, synthetic construct
  source 1..20: mol_type = other DNA
gcttgcttaatttaccaaca

SEQ ID NO: 235361 - DNA, 20 bp, synthetic construct
  source 1..20: mol_type = other DNA
tgcttgcttaatttaccaac

SEQ ID NO: 235362 - DNA, 20 bp, synthetic construct
  source 1..20: mol_type = other DNA
ctgcttgcttaatttaccaa

SEQ ID NO: 235363 - DNA, 20 bp, synthetic construct
  source 1..20: mol_type = other DNA
tctgcttgcttaatttacca

SEQ ID NO: 235364 - DNA, 20 bp, synthetic construct
  source 1..20: mol_type = other DNA
atctgcttgcttaatttacc

SEQ ID NO: 235365 - DNA, 20 bp, synthetic construct
  source 1..20: mol_type = other DNA
tatctgcttgcttaatttac

SEQ ID NO: 235366 - DNA, 20 bp, synthetic construct
  source 1..20: mol_type = other DNA
ctatctgcttgcttaattta

SEQ ID NO: 235367 - DNA, 20 bp, synthetic construct
  source 1..20: mol_type = other DNA
tctatctgcttgcttaattt

SEQ ID NO: 235368 - DNA, 20 bp, synthetic construct
  source 1..20: mol_type = other DNA
atctatctgcttgcttaatt

SEQ ID NO: 235369 - DNA, 20 bp, synthetic construct
  source 1..20: mol_type = other DNA
catctatctgcttgcttaat

SEQ ID NO: 235370 - DNA, 20 bp, synthetic construct
  source 1..20: mol_type = other DNA
acatctatctgcttgcttaa

SEQ ID NO: 235371 - DNA, 20 bp, synthetic construct
  source 1..20: mol_type = other DNA
tacatctatctgcttgctta

SEQ ID NO: 235372 - DNA, 20 bp, synthetic construct
  source 1..20: mol_type = other DNA
ttacatctatctgcttgctt

SEQ ID NO: 235373 - DNA, 20 bp, synthetic construct
  source 1..20: mol_type = other DNA
tttacatctatctgcttgct

SEQ ID NO: 235374 - DNA, 20 bp, synthetic construct
  source 1..20: mol_type = other DNA
atttacatctatctgcttgc

SEQ ID NO: 235375 - DNA, 20 bp, synthetic construct
  source 1..20: mol_type = other DNA
tatttacatctatctgcttg

SEQ ID NO: 235376 - DNA, 20 bp, synthetic construct
  source 1..20: mol_type = other DNA
ttatttacatctatctgctt

SEQ ID NO: 235377 - DNA, 20 bp, synthetic construct
  source 1..20: mol_type = other DNA
gttatttacatctatctgct

SEQ ID NO: 235378 - DNA, 20 bp, synthetic construct
  source 1..20: mol_type = other DNA
cgttatttacatctatctgc

SEQ ID NO: 235379 - DNA, 20 bp, synthetic construct
  source 1..20: mol_type = other DNA
gcgttatttacatctatctg

SEQ ID NO: 235380 - DNA, 20 bp, synthetic construct
  source 1..20: mol_type = other DNA
agcgttatttacatctatct

SEQ ID NO: 235381 - DNA, 20 bp, synthetic construct
  source 1..20: mol_type = other DNA
aagcgttatttacatctatc

SEQ ID NO: 235382 - DNA, 20 bp, synthetic construct
  source 1..20: mol_type = other DNA
caagcgttatttacatctat

SEQ ID NO: 235383 - DNA, 20 bp, synthetic construct
  source 1..20: mol_type = other DNA
ccaagcgttatttacatcta

SEQ ID NO: 235384 - DNA, 20 bp, synthetic construct
  source 1..20: mol_type = other DNA
cccaagcgttatttacatct

SEQ ID NO: 235385 - DNA, 20 bp, synthetic construct
  source 1..20: mol_type = other DNA
gcccaagcgttatttacatc

SEQ ID NO: 235386 - DNA, 20 bp, synthetic construct
  source 1..20: mol_type = other DNA
tgcccaagcgttatttacat

SEQ ID NO: 235387 - DNA, 20 bp, synthetic construct
  source 1..20: mol_type = other DNA
ctgcccaagcgttatttaca

SEQ ID NO: 235388 - DNA, 20 bp, synthetic construct
  source 1..20: mol_type = other DNA
cctgcccaagcgttatttac

SEQ ID NO: 235389 - DNA, 20 bp, synthetic construct
  source 1..20: mol_type = other DNA
tcctgcccaagcgttattta

SEQ ID NO: 235390 - DNA, 20 bp, synthetic construct
  source 1..20: mol_type = other DNA
ttcctgcccaagcgttattt

SEQ ID NO: 235391 - DNA, 20 bp, synthetic construct
  source 1..20: mol_type = other DNA
attcctgcccaagcgttatt

SEQ ID NO: 235392 - DNA, 20 bp, synthetic construct
  source 1..20: mol_type = other DNA
tattcctgcccaagcgttat

SEQ ID NO: 235393 - DNA, 20 bp, synthetic construct
  source 1..20: mol_type = other DNA
atattcctgcccaagcgtta

SEQ ID NO: 235394 - DNA, 20 bp, synthetic construct
  source 1..20: mol_type = other DNA
catattcctgcccaagcgtt

SEQ ID NO: 235395 - DNA, 20 bp, synthetic construct
  source 1..20: mol_type = other DNA
ccatattcctgcccaagcgt

SEQ ID NO: 235396 - DNA, 20 bp, synthetic construct
  source 1..20: mol_type = other DNA
tccatattcctgcccaagcg

SEQ ID NO: 235397 - DNA, 20 bp, synthetic construct
  source 1..20: mol_type = other DNA
ctccatattcctgcccaagc

SEQ ID NO: 235398 - DNA, 20 bp, synthetic construct
  source 1..20: mol_type = other DNA
gctccatattcctgcccaag

SEQ ID NO: 235399 - DNA, 20 bp, synthetic construct
  source 1..20: mol_type = other DNA
tgctccatattcctgcccaa

SEQ ID NO: 235400 - DNA, 20 bp, synthetic construct
  source 1..20: mol_type = other DNA
gtgctccatattcctgccca

SEQ ID NO: 235401 - DNA, 20 bp, synthetic construct
  source 1..20: mol_type = other DNA
cgtgctccatattcctgccc

SEQ ID NO: 235402 - DNA, 20 bp, synthetic construct
  source 1..20: mol_type = other DNA
ccgtgctccatattcctgcc

SEQ ID NO: 235403 - DNA, 20 bp, synthetic construct
  source 1..20: mol_type = other DNA
cccgtgctccatattcctgc

SEQ ID NO: 235404 - DNA, 20 bp, synthetic construct
  source 1..20: mol_type = other DNA
tcccgtgctccatattcctg

SEQ ID NO: 235405 - DNA, 20 bp, synthetic construct
  source 1..20: mol_type = other DNA
atcccgtgctccatattcct

SEQ ID NO: 235406 - DNA, 20 bp, synthetic construct
  source 1..20: mol_type = other DNA
catcccgtgctccatattcc

SEQ ID NO: 235407 - DNA, 20 bp, synthetic construct
  source 1..20: mol_type = other DNA
tcatcccgtgctccatattc

SEQ ID NO: 235408 - DNA, 20 bp, synthetic construct
  source 1..20: mol_type = other DNA
ctcatcccgtgctccatatt

SEQ ID NO: 235409 - DNA, 20 bp, synthetic construct
  source 1..20: mol_type = other DNA
cctcatcccgtgctccatat

SEQ ID NO: 235410 - DNA, 20 bp, synthetic construct
  source 1..20: mol_type = other DNA
tcctcatcccgtgctccata

SEQ ID NO: 235411 - DNA, 20 bp, synthetic construct
  source 1..20: mol_type = other DNA
atcctcatcccgtgctccat

SEQ ID NO: 235412 - DNA, 20 bp, synthetic construct
  source 1..20: mol_type = other DNA
catcctcatcccgtgctcca

SEQ ID NO: 235413 - DNA, 20 bp, synthetic construct
  source 1..20: mol_type = other DNA
ccatcctcatcccgtgctcc

SEQ ID NO: 235414 - DNA, 20 bp, synthetic construct
  source 1..20: mol_type = other DNA
cccatcctcatcccgtgctc

SEQ ID NO: 235415 - DNA, 20 bp, synthetic construct
  source 1..20: mol_type = other DNA
gcccatcctcatcccgtgct

SEQ ID NO: 235416 - DNA, 20 bp, synthetic construct
  source 1..20: mol_type = other DNA
cgcccatcctcatcccgtgc

SEQ ID NO: 235417 - DNA, 20 bp, synthetic construct
  source 1..20: mol_type = other DNA
ccgcccatcctcatcccgtg

SEQ ID NO: 235418 - DNA, 20 bp, synthetic construct
  source 1..20: mol_type = other DNA
gccgcccatcctcatcccgt

SEQ ID NO: 235419 - DNA, 20 bp, synthetic construct
  source 1..20: mol_type = other DNA
ggccgcccatcctcatcccg

SEQ ID NO: 235420 - DNA, 20 bp, synthetic construct
  source 1..20: mol_type = other DNA
tggccgcccatcctcatccc

SEQ ID NO: 235421 - DNA, 20 bp, synthetic construct
  source 1..20: mol_type = other DNA
ttggccgcccatcctcatcc

SEQ ID NO: 235422 - DNA, 20 bp, synthetic construct
  source 1..20: mol_type = other DNA
gttggccgcccatcctcatc

SEQ ID NO: 235423 - DNA, 20 bp, synthetic construct
  source 1..20: mol_type = other DNA
agttggccgcccatcctcat

SEQ ID NO: 235424 - DNA, 20 bp, synthetic construct
  source 1..20: mol_type = other DNA
cagttggccgcccatcctca

SEQ ID NO: 235425 - DNA, 20 bp, synthetic construct
  source 1..20: mol_type = other DNA
acagttggccgcccatcctc

SEQ ID NO: 235426 - DNA, 20 bp, synthetic construct
  source 1..20: mol_type = other DNA
aacagttggccgcccatcct

SEQ ID NO: 235427 - DNA, 20 bp, synthetic construct
  source 1..20: mol_type = other DNA
taacagttggccgcccatcc

SEQ ID NO: 235428 - DNA, 20 bp, synthetic construct
  source 1..20: mol_type = other DNA
ctaacagttggccgcccatc

SEQ ID NO: 235429 - DNA, 20 bp, synthetic construct
  source 1..20: mol_type = other DNA
tctaacagttggccgcccat

SEQ ID NO: 235430 - DNA, 20 bp, synthetic construct
  source 1..20: mol_type = other DNA
ctctaacagttggccgccca

SEQ ID NO: 235431 - DNA, 20 bp, synthetic construct
  source 1..20: mol_type = other DNA
tctctaacagttggccgccc

SEQ ID NO: 235432 - DNA, 20 bp, synthetic construct
  source 1..20: mol_type = other DNA
ctctctaacagttggccgcc

SEQ ID NO: 235433 - DNA, 20 bp, synthetic construct
  source 1..20: mol_type = other DNA
cctctctaacagttggccgc

SEQ ID NO: 235434 - DNA, 20 bp, synthetic construct
  source 1..20: mol_type = other DNA
ccctctctaacagttggccg

SEQ ID NO: 235435 - DNA, 20 bp, synthetic construct
  source 1..20: mol_type = other DNA
accctctctaacagttggcc

SEQ ID NO: 235436 - DNA, 20 bp, synthetic construct
  source 1..20: mol_type = other DNA
taccctctctaacagttggc

SEQ ID NO: 235437 - DNA, 20 bp, synthetic construct
  source 1..20: mol_type = other DNA
ctaccctctctaacagttgg

SEQ ID NO: 235438 - DNA, 20 bp, synthetic construct
  source 1..20: mol_type = other DNA
gctaccctctctaacagttg

SEQ ID NO: 235439 - DNA, 20 bp, synthetic construct
  source 1..20: mol_type = other DNA
tgctaccctctctaacagtt

SEQ ID NO: 235440 - DNA, 20 bp, synthetic construct
  source 1..20: mol_type = other DNA
ctgctaccctctctaacagt

SEQ ID NO: 235441 - DNA, 20 bp, synthetic construct
  source 1..20: mol_type = other DNA
cctgctaccctctctaacag

SEQ ID NO: 235442 - DNA, 20 bp, synthetic construct
  source 1..20: mol_type = other DNA
ccctgctaccctctctaaca

SEQ ID NO: 235443 - DNA, 20 bp, synthetic construct
  source 1..20: mol_type = other DNA
tccctgctaccctctctaac

SEQ ID NO: 235444 - DNA, 20 bp, synthetic construct
  source 1..20: mol_type = other DNA
ctccctgctaccctctctaa

SEQ ID NO: 235445 - DNA, 20 bp, synthetic construct
  source 1..20: mol_type = other DNA
cctccctgctaccctctcta

SEQ ID NO: 235446 - DNA, 20 bp, synthetic construct
  source 1..20: mol_type = other DNA
gcctccctgctaccctctct

SEQ ID NO: 235447 - DNA, 20 bp, synthetic construct
  source 1..20: mol_type = other DNA
agcctccctgctaccctctc

SEQ ID NO: 235448 - DNA, 20 bp, synthetic construct
  source 1..20: mol_type = other DNA
cagcctccctgctaccctct

SEQ ID NO: 235449 - DNA, 20 bp, synthetic construct
  source 1..20: mol_type = other DNA
tcagcctccctgctaccctc

SEQ ID NO: 235450 - DNA, 20 bp, synthetic construct
  source 1..20: mol_type = other DNA
ctcagcctccctgctaccct

SEQ ID NO: 235451 - DNA, 20 bp, synthetic construct
  source 1..20: mol_type = other DNA
tctcagcctccctgctaccc

SEQ ID NO: 235452 - DNA, 20 bp, synthetic construct
  source 1..20: mol_type = other DNA
atctcagcctccctgctacc

SEQ ID NO: 235453 - DNA, 20 bp, synthetic construct
  source 1..20: mol_type = other DNA
gatctcagcctccctgctac

SEQ ID NO: 235454 - DNA, 20 bp, synthetic construct
  source 1..20: mol_type = other DNA
agatctcagcctccctgcta

SEQ ID NO: 235455 - DNA, 20 bp, synthetic construct
  source 1..20: mol_type = other DNA
cagatctcagcctccctgct

SEQ ID NO: 235456 - DNA, 20 bp, synthetic construct
  source 1..20: mol_type = other DNA
gcagatctcagcctccctgc

SEQ ID NO: 235457 - DNA, 20 bp, synthetic construct
  source 1..20: mol_type = other DNA
ggcagatctcagcctccctg

SEQ ID NO: 235458 - DNA, 20 bp, synthetic construct
  source 1..20: mol_type = other DNA
aggcagatctcagcctccct

SEQ ID NO: 235459 - DNA, 20 bp, synthetic construct
  source 1..20: mol_type = other DNA
caggcagatctcagcctccc

SEQ ID NO: 235460 - DNA, 20 bp, synthetic construct
  source 1..20: mol_type = other DNA
gcaggcagatctcagcctcc

SEQ ID NO: 235461 - DNA, 20 bp, synthetic construct
  source 1..20: mol_type = other DNA
ggcaggcagatctcagcctc

SEQ ID NO: 235462 - DNA, 20 bp, synthetic construct
  source 1..20: mol_type = other DNA
tggcaggcagatctcagcct

SEQ ID NO: 235463 - DNA, 20 bp, synthetic construct
  source 1..20: mol_type = other DNA
atggcaggcagatctcagcc

SEQ ID NO: 235464 - DNA, 20 bp, synthetic construct
  source 1..20: mol_type = other DNA
catggcaggcagatctcagc

SEQ ID NO: 235465 - DNA, 20 bp, synthetic construct
  source 1..20: mol_type = other DNA
tcatggcaggcagatctcag

SEQ ID NO: 235466 - DNA, 20 bp, synthetic construct
  source 1..20: mol_type = other DNA
ttcatggcaggcagatctca

SEQ ID NO: 235467 - DNA, 20 bp, synthetic construct
  source 1..20: mol_type = other DNA
gttcatggcaggcagatctc

SEQ ID NO: 235468 - DNA, 20 bp, synthetic construct
  source 1..20: mol_type = other DNA
agttcatggcaggcagatct

SEQ ID NO: 235469 - DNA, 20 bp, synthetic construct
  source 1..20: mol_type = other DNA
cagttcatggcaggcagatc

SEQ ID NO: 235470 - DNA, 20 bp, synthetic construct
  source 1..20: mol_type = other DNA
ccagttcatggcaggcagat

SEQ ID NO: 235471 - DNA, 20 bp, synthetic construct
  source 1..20: mol_type = other DNA
cccagttcatggcaggcaga

SEQ ID NO: 235472 - DNA, 20 bp, synthetic construct
  source 1..20: mol_type = other DNA
tcccagttcatggcaggcag

SEQ ID NO: 235473 - DNA, 20 bp, synthetic construct
  source 1..20: mol_type = other DNA
ctcccagttcatggcaggca

SEQ ID NO: 235474 - DNA, 20 bp, synthetic construct
  source 1..20: mol_type = other DNA
cctcccagttcatggcaggc

SEQ ID NO: 235475 - DNA, 20 bp, synthetic construct
  source 1..20: mol_type = other DNA
tcctcccagttcatggcagg

SEQ ID NO: 235476 - DNA, 20 bp, synthetic construct
  source 1..20: mol_type = other DNA
ctcctcccagttcatggcag

SEQ ID NO: 235477 - DNA, 20 bp, synthetic construct
  source 1..20: mol_type = other DNA
tctcctcccagttcatggca

SEQ ID NO: 235478 - DNA, 20 bp, synthetic construct
  source 1..20: mol_type = other DNA
ctctcctcccagttcatggc

SEQ ID NO: 235479 - DNA, 20 bp, synthetic construct
  source 1..20: mol_type = other DNA
cctctcctcccagttcatgg

SEQ ID NO: 235480 - DNA, 20 bp, synthetic construct
  source 1..20: mol_type = other DNA
gcctctcctcccagttcatg

SEQ ID NO: 235481 - DNA, 20 bp, synthetic construct
  source 1..20: mol_type = other DNA
agcctctcctcccagttcat

SEQ ID NO: 235482 - DNA, 20 bp, synthetic construct
  source 1..20: mol_type = other DNA
gagcctctcctcccagttca

SEQ ID NO: 235483 - DNA, 20 bp, synthetic construct
  source 1..20: mol_type = other DNA
ggagcctctcctcccagttc

SEQ ID NO: 235484 - DNA, 20 bp, synthetic construct
  source 1..20: mol_type = other DNA
aggagcctctcctcccagtt

SEQ ID NO: 235485 - DNA, 20 bp, synthetic construct
  source 1..20: mol_type = other DNA
gaggagcctctcctcccagt

SEQ ID NO: 235486 - DNA, 20 bp, synthetic construct
  source 1..20: mol_type = other DNA
agaggagcctctcctcccag

SEQ ID NO: 235487 - DNA, 20 bp, synthetic construct
  source 1..20: mol_type = other DNA
gagaggagcctctcctccca

SEQ ID NO: 235488 - DNA, 20 bp, synthetic construct
  source 1..20: mol_type = other DNA
agagaggagcctctcctccc

SEQ ID NO: 235489 - DNA, 20 bp, synthetic construct
  source 1..20: mol_type = other DNA
gagagaggagcctctcctcc

SEQ ID NO: 235490 - DNA, 20 bp, synthetic construct
  source 1..20: mol_type = other DNA
agagagaggagcctctcctc

SEQ ID NO: 235491 - DNA, 20 bp, synthetic construct
  source 1..20: mol_type = other DNA
gagagagaggagcctctcct

SEQ ID NO: 235492 - DNA, 20 bp, synthetic construct
  source 1..20: mol_type = other DNA
agagagagaggagcctctcc

SEQ ID NO: 235493 - DNA, 20 bp, synthetic construct
  source 1..20: mol_type = other DNA
aagagagagaggagcctctc

SEQ ID NO: 235494 - DNA, 20 bp, synthetic construct
  source 1..20: mol_type = other DNA
gaagagagagaggagcctct

SEQ ID NO: 235495 - DNA, 20 bp, synthetic construct
  source 1..20: mol_type = other DNA
tgaagagagagaggagcctc

SEQ ID NO: 235496 - DNA, 20 bp, synthetic construct
  source 1..20: mol_type = other DNA
gtgaagagagagaggagcct

SEQ ID NO: 235497 - DNA, 20 bp, synthetic construct
  source 1..20: mol_type = other DNA
ggtgaagagagagaggagcc

SEQ ID NO: 235498 - DNA, 20 bp, synthetic construct
  source 1..20: mol_type = other DNA
gggtgaagagagagaggagc

SEQ ID NO: 235499 - DNA, 20 bp, synthetic construct
  source 1..20: mol_type = other DNA
ggggtgaagagagagaggag

SEQ ID NO: 235500 - DNA, 20 bp, synthetic construct
  source 1..20: mol_type = other DNA
gggggtgaagagagagagga

SEQ ID NO: 235501 - DNA, 20 bp, synthetic construct
  source 1..20: mol_type = other DNA
tgggggtgaagagagagagg

SEQ ID NO: 235502 - DNA, 20 bp, synthetic construct
  source 1..20: mol_type = other DNA
gtgggggtgaagagagagag

SEQ ID NO: 235503 - DNA, 20 bp, synthetic construct
  source 1..20: mol_type = other DNA
agtgggggtgaagagagaga

SEQ ID NO: 235504 - DNA, 20 bp, synthetic construct
  source 1..20: mol_type = other DNA
gagtgggggtgaagagagag

SEQ ID NO: 235505 - DNA, 20 bp, synthetic construct
  source 1..20: mol_type = other DNA
agagtgggggtgaagagaga

SEQ ID NO: 235506 - DNA, 20 bp, synthetic construct
  source 1..20: mol_type = other DNA
cagagtgggggtgaagagag

SEQ ID NO: 235507 - DNA, 20 bp, synthetic construct
  source 1..20: mol_type = other DNA
gcagagtgggggtgaagaga

SEQ ID NO: 235508 - DNA, 20 bp, synthetic construct
  source 1..20: mol_type = other DNA
ggcagagtgggggtgaagag

SEQ ID NO: 235509 - DNA, 20 bp, synthetic construct
  source 1..20: mol_type = other DNA
gggcagagtgggggtgaaga

SEQ ID NO: 235510 - DNA, 20 bp, synthetic construct
  source 1..20: mol_type = other DNA
ggggcagagtgggggtgaag

SEQ ID NO: 235511 - DNA, 20 bp, synthetic construct
  source 1..20: mol_type = other DNA
gggggcagagtgggggtgaa

SEQ ID NO: 235512 - DNA, 20 bp, synthetic construct
  source 1..20: mol_type = other DNA
ggggggcagagtgggggtga

SEQ ID NO: 235513 - DNA, 20 bp, synthetic construct
  source 1..20: mol_type = other DNA
tggggggcagagtgggggtg

SEQ ID NO: 235514 - DNA, 20 bp, synthetic construct
  source 1..20: mol_type = other DNA
ttggggggcagagtgggggt

SEQ ID NO: 235515 - DNA, 20 bp, synthetic construct
  source 1..20: mol_type = other DNA
gttggggggcagagtggggg

SEQ ID NO: 235516 - DNA, 20 bp, synthetic construct
  source 1..20: mol_type = other DNA
tgttggggggcagagtgggg

SEQ ID NO: 235517 - DNA, 20 bp, synthetic construct
  source 1..20: mol_type = other DNA
gtgttggggggcagagtggg

SEQ ID NO: 235518 - DNA, 20 bp, synthetic construct
  source 1..20: mol_type = other DNA
agtgttggggggcagagtgg

SEQ ID NO: 235519 - DNA, 20 bp, synthetic construct
  source 1..20: mol_type = other DNA
gagtgttggggggcagagtg

SEQ ID NO: 235520 - DNA, 20 bp, synthetic construct
  source 1..20: mol_type = other DNA
ggagtgttggggggcagagt

SEQ ID NO: 235521 - DNA, 20 bp, synthetic construct
  source 1..20: mol_type = other DNA
aggagtgttggggggcagag

SEQ ID NO: 235522 - DNA, 20 bp, synthetic construct
  source 1..20: mol_type = other DNA
gaggagtgttggggggcaga

SEQ ID NO: 235523 - DNA, 20 bp, synthetic construct
  source 1..20: mol_type = other DNA
tgaggagtgttggggggcag

SEQ ID NO: 235524 - DNA, 20 bp, synthetic construct
  source 1..20: mol_type = other DNA
ctgaggagtgttggggggca

SEQ ID NO: 235525 - DNA, 20 bp, synthetic construct
  source 1..20: mol_type = other DNA
tctgaggagtgttggggggc

SEQ ID NO: 235526 - DNA, 20 bp, synthetic construct
  source 1..20: mol_type = other DNA
ttctgaggagtgttgggggg

SEQ ID NO: 235527 - DNA, 20 bp, synthetic construct
  source 1..20: mol_type = other DNA
gttctgaggagtgttggggg

SEQ ID NO: 235528 - DNA, 20 bp, synthetic construct
  source 1..20: mol_type = other DNA
agttctgaggagtgttgggg

SEQ ID NO: 235529 - DNA, 20 bp, synthetic construct
  source 1..20: mol_type = other DNA
aagttctgaggagtgttggg

SEQ ID NO: 235530 - DNA, 20 bp, synthetic construct
  source 1..20: mol_type = other DNA
taagttctgaggagtgttgg

SEQ ID NO: 235531 - DNA, 20 bp, synthetic construct
  source 1..20: mol_type = other DNA
ataagttctgaggagtgttg

SEQ ID NO: 235532 - DNA, 20 bp, synthetic construct
  source 1..20: mol_type = other DNA
gataagttctgaggagtgtt

SEQ ID NO: 235533 - DNA, 20 bp, synthetic construct
  source 1..20: mol_type = other DNA
ggataagttctgaggagtgt

SEQ ID NO: 235534 - DNA, 20 bp, synthetic construct
  source 1..20: mol_type = other DNA
aggataagttctgaggagtg

SEQ ID NO: 235535 - DNA, 20 bp, synthetic construct
  source 1..20: mol_type = other DNA
gaggataagttctgaggagt

SEQ ID NO: 235536 - DNA, 20 bp, synthetic construct
  source 1..20: mol_type = other DNA
agaggataagttctgaggag

SEQ ID NO: 235537 - DNA, 20 bp, synthetic construct
  source 1..20: mol_type = other DNA
gagaggataagttctgagga

SEQ ID NO: 235538 - DNA, 20 bp, synthetic construct
  source 1..20: mol_type = other DNA
ggagaggataagttctgagg

SEQ ID NO: 235539 - DNA, 20 bp, synthetic construct
  source 1..20: mol_type = other DNA
aggagaggataagttctgag

SEQ ID NO: 235540 - DNA, 20 bp, synthetic construct
  source 1..20: mol_type = other DNA
gaggagaggataagttctga

SEQ ID NO: 235541 - DNA, 20 bp, synthetic construct
  source 1..20: mol_type = other DNA
agaggagaggataagttctg

SEQ ID NO: 235542 - DNA, 20 bp, synthetic construct
  source 1..20: mol_type = other DNA
aagaggagaggataagttct

SEQ ID NO: 235543 - DNA, 20 bp, synthetic construct
  source 1..20: mol_type = other DNA
gaagaggagaggataagttc

SEQ ID NO: 235544 - DNA, 20 bp, synthetic construct
  source 1..20: mol_type = other DNA
agaagaggagaggataagtt

SEQ ID NO: 235545 - DNA, 20 bp, synthetic construct
  source 1..20: mol_type = other DNA
aagaagaggagaggataagt

SEQ ID NO: 235546 - DNA, 20 bp, synthetic construct
  source 1..20: mol_type = other DNA
aaagaagaggagaggataag

SEQ ID NO: 235547 - DNA, 20 bp, synthetic construct
  source 1..20: mol_type = other DNA
gaaagaagaggagaggataa

SEQ ID NO: 235548 - DNA, 20 bp, synthetic construct
  source 1..20: mol_type = other DNA
ggaaagaagaggagaggata

SEQ ID NO: 235549 - DNA, 20 bp, synthetic construct
  source 1..20: mol_type = other DNA
gggaaagaagaggagaggat

SEQ ID NO: 235550 - DNA, 20 bp, synthetic construct
  source 1..20: mol_type = other DNA
ggggaaagaagaggagagga

SEQ ID NO: 235551 - DNA, 20 bp, synthetic construct
  source 1..20: mol_type = other DNA
tggggaaagaagaggagagg

SEQ ID NO: 235552 - DNA, 20 bp, synthetic construct
  source 1..20: mol_type = other DNA
ctggggaaagaagaggagag

SEQ ID NO: 235553 - DNA, 20 bp, synthetic construct
  source 1..20: mol_type = other DNA
cctggggaaagaagaggaga

SEQ ID NO: 235554 - DNA, 20 bp, synthetic construct
  source 1..20: mol_type = other DNA
acctggggaaagaagaggag

SEQ ID NO: 235555 - DNA, 20 bp, synthetic construct
  source 1..20: mol_type = other DNA
cacctggggaaagaagagga

SEQ ID NO: 235556 - DNA, 20 bp, synthetic construct
  source 1..20: mol_type = other DNA
tcacctggggaaagaagagg

SEQ ID NO: 235557 - DNA, 20 bp, synthetic construct
  source 1..20: mol_type = other DNA
ttcacctggggaaagaagag

SEQ ID NO: 235558 - DNA, 20 bp, synthetic construct
  source 1..20: mol_type = other DNA
gttcacctggggaaagaaga

SEQ ID NO: 235559 - DNA, 20 bp, synthetic construct
  source 1..20: mol_type = other DNA
agttcacctggggaaagaag

SEQ ID NO: 235560 - DNA, 20 bp, synthetic construct
  source 1..20: mol_type = other DNA
aagttcacctggggaaagaa

SEQ ID NO: 235561 - DNA, 20 bp, synthetic construct
  source 1..20: mol_type = other DNA
aaagttcacctggggaaaga

SEQ ID NO: 235562 - DNA, 20 bp, synthetic construct
  source 1..20: mol_type = other DNA
caaagttcacctggggaaag

SEQ ID NO: 235563 - DNA, 20 bp, synthetic construct
  source 1..20: mol_type = other DNA
tcaaagttcacctggggaaa

SEQ ID NO: 235564 - DNA, 20 bp, synthetic construct
  source 1..20: mol_type = other DNA
ttcaaagttcacctggggaa

SEQ ID NO: 235565 - DNA, 20 bp, synthetic construct
  source 1..20: mol_type = other DNA
gttcaaagttcacctgggga

SEQ ID NO: 235566 - DNA, 20 bp, synthetic construct
  source 1..20: mol_type = other DNA
ggttcaaagttcacctgggg

SEQ ID NO: 235567 - DNA, 20 bp, synthetic construct
  source 1..20: mol_type = other DNA
tggttcaaagttcacctggg

SEQ ID NO: 235568 - DNA, 20 bp, synthetic construct
  source 1..20: mol_type = other DNA
ctggttcaaagttcacctgg

SEQ ID NO: 235569 - DNA, 20 bp, synthetic construct
  source 1..20: mol_type = other DNA
cctggttcaaagttcacctg

SEQ ID NO: 235570 - DNA, 20 bp, synthetic construct
  source 1..20: mol_type = other DNA
tcctggttcaaagttcacct

SEQ ID NO: 235571 - DNA, 20 bp, synthetic construct
  source 1..20: mol_type = other DNA
atcctggttcaaagttcacc

SEQ ID NO: 235572 - DNA, 20 bp, synthetic construct
  source 1..20: mol_type = other DNA
catcctggttcaaagttcac

SEQ ID NO: 235573 - DNA, 20 bp, synthetic construct
  source 1..20: mol_type = other DNA
ccatcctggttcaaagttca

SEQ ID NO: 235574 - DNA, 20 bp, synthetic construct
  source 1..20: mol_type = other DNA
gccatcctggttcaaagttc

SEQ ID NO: 235575 - DNA, 20 bp, synthetic construct
  source 1..20: mol_type = other DNA
agccatcctggttcaaagtt

SEQ ID NO: 235576 - DNA, 20 bp, synthetic construct
  source 1..20: mol_type = other DNA
cagccatcctggttcaaagt

SEQ ID NO: 235577 - DNA, 20 bp, synthetic construct
  source 1..20: mol_type = other DNA
tcagccatcctggttcaaag

SEQ ID NO: 235578 - DNA, 20 bp, synthetic construct
  source 1..20: mol_type = other DNA
ctcagccatcctggttcaaa

SEQ ID NO: 235579 - DNA, 20 bp, synthetic construct
  source 1..20: mol_type = other DNA
gctcagccatcctggttcaa

SEQ ID NO: 235580 - DNA, 20 bp, synthetic construct
  source 1..20: mol_type = other DNA
ggctcagccatcctggttca

SEQ ID NO: 235581 - DNA, 20 bp, synthetic construct
  source 1..20: mol_type = other DNA
gggctcagccatcctggttc

SEQ ID NO: 235582 - DNA, 20 bp, synthetic construct
  source 1..20: mol_type = other DNA
ggggctcagccatcctggtt

SEQ ID NO: 235583 - DNA, 20 bp, synthetic construct
  source 1..20: mol_type = other DNA
cggggctcagccatcctggt

SEQ ID NO: 235584 - DNA, 20 bp, synthetic construct
  source 1..20: mol_type = other DNA
gcggggctcagccatcctgg

SEQ ID NO: 235585 - DNA, 20 bp, synthetic construct
  source 1..20: mol_type = other DNA
ggcggggctcagccatcctg

SEQ ID NO: 235586 - DNA, 20 bp, synthetic construct
  source 1..20: mol_type = other DNA
tggcggggctcagccatcct

SEQ ID NO: 235587 - DNA, 20 bp, synthetic construct
  source 1..20: mol_type = other DNA
ctggcggggctcagccatcc

SEQ ID NO: 235588 - DNA, 20 bp, synthetic construct
  source 1..20: mol_type = other DNA
cctggcggggctcagccatc

SEQ ID NO: 235589 - DNA, 20 bp, synthetic construct
  source 1..20: mol_type = other DNA
tcctggcggggctcagccat

SEQ ID NO: 235590 - DNA, 20 bp, synthetic construct
  source 1..20: mol_type = other DNA
ctcctggcggggctcagcca

SEQ ID NO: 235591 - DNA, 20 bp, synthetic construct
  source 1..20: mol_type = other DNA
actcctggcggggctcagcc

SEQ ID NO: 235592 - DNA, 20 bp, synthetic construct
  source 1..20: mol_type = other DNA
aactcctggcggggctcagc

SEQ ID NO: 235593 - DNA, 20 bp, synthetic construct
  source 1..20: mol_type = other DNA
gaactcctggcggggctcag

SEQ ID NO: 235594 - DNA, 20 bp, synthetic construct
  source 1..20: mol_type = other DNA
cgaactcctggcggggctca

SEQ ID NO: 235595 - DNA, 20 bp, synthetic construct
  source 1..20: mol_type = other DNA
tcgaactcctggcggggctc

SEQ ID NO: 235596 - DNA, 20 bp, synthetic construct
  source 1..20: mol_type = other DNA
ttcgaactcctggcggggct

SEQ ID NO: 235597 - DNA, 20 bp, synthetic construct
  source 1..20: mol_type = other DNA
cttcgaactcctggcggggc

SEQ ID NO: 235598 - DNA, 20 bp, synthetic construct
  source 1..20: mol_type = other DNA
acttcgaactcctggcgggg

SEQ ID NO: 235599 - DNA, 20 bp, synthetic construct
  source 1..20: mol_type = other DNA
cacttcgaactcctggcggg

SEQ ID NO: 235600 - DNA, 20 bp, synthetic construct
  source 1..20: mol_type = other DNA
tcacttcgaactcctggcgg

SEQ ID NO: 235601 - DNA, 20 bp, synthetic construct
  source 1..20: mol_type = other DNA
atcacttcgaactcctggcg

SEQ ID NO: 235602 - DNA, 20 bp, synthetic construct
  source 1..20: mol_type = other DNA
catcacttcgaactcctggc

SEQ ID NO: 235603 - DNA, 20 bp, synthetic construct
  source 1..20: mol_type = other DNA
ccatcacttcgaactcctgg

SEQ ID NO: 235604 - DNA, 20 bp, synthetic construct
  source 1..20: mol_type = other DNA
tccatcacttcgaactcctg

SEQ ID NO: 235605 - DNA, 20 bp, synthetic construct
  source 1..20: mol_type = other DNA
ttccatcacttcgaactcct

SEQ ID NO: 235606 - DNA, 20 bp, synthetic construct
  source 1..20: mol_type = other DNA
cttccatcacttcgaactcc

SEQ ID NO: 235607 - DNA, 20 bp, synthetic construct
  source 1..20: mol_type = other DNA
tcttccatcacttcgaactc

SEQ ID NO: 235608 - DNA, 20 bp, synthetic construct
  source 1..20: mol_type = other DNA
atcttccatcacttcgaact

SEQ ID NO: 235609 - DNA, 20 bp, synthetic construct
  source 1..20: mol_type = other DNA
gatcttccatcacttcgaac

SEQ ID NO: 235610 - DNA, 20 bp, synthetic construct
  source 1..20: mol_type = other DNA
tgatcttccatcacttcgaa

SEQ ID NO: 235611 - DNA, 20 bp, synthetic construct
  source 1..20: mol_type = other DNA
gtgatcttccatcacttcga

SEQ ID NO: 235612 - DNA, 20 bp, synthetic construct
  source 1..20: mol_type = other DNA
cgtgatcttccatcacttcg

SEQ ID NO: 235613 - DNA, 20 bp, synthetic construct
  source 1..20: mol_type = other DNA
gcgtgatcttccatcacttc

SEQ ID NO: 235614 - DNA, 20 bp, synthetic construct
  source 1..20: mol_type = other DNA
agcgtgatcttccatcactt

SEQ ID NO: 235615 - DNA, 20 bp, synthetic construct
  source 1..20: mol_type = other DNA
cagcgtgatcttccatcact

SEQ ID NO: 235616 - DNA, 20 bp, synthetic construct
  source 1..20: mol_type = other DNA
ccagcgtgatcttccatcac

SEQ ID NO: 235617 - DNA, 20 bp, synthetic construct
  source 1..20: mol_type = other DNA
cccagcgtgatcttccatca

SEQ ID NO: 235618 - DNA, 20 bp, synthetic construct
  source 1..20: mol_type = other DNA
tcccagcgtgatcttccatc

SEQ ID NO: 235619 - DNA, 20 bp, synthetic construct
  source 1..20: mol_type = other DNA
gtcccagcgtgatcttccat

SEQ ID NO: 235620 - DNA, 20 bp, synthetic construct
  source 1..20: mol_type = other DNA
cgtcccagcgtgatcttcca

SEQ ID NO: 235621 - DNA, 20 bp, synthetic construct
  source 1..20: mol_type = other DNA
acgtcccagcgtgatcttcc

SEQ ID NO: 235622 - DNA, 20 bp, synthetic construct
  source 1..20: mol_type = other DNA
tacgtcccagcgtgatcttc

SEQ ID NO: 235623 - DNA, 20 bp, synthetic construct
  source 1..20: mol_type = other DNA
gtacgtcccagcgtgatctt

SEQ ID NO: 235624 - DNA, 20 bp, synthetic construct
  source 1..20: mol_type = other DNA
cgtacgtcccagcgtgatct

SEQ ID NO: 235625 - DNA, 20 bp, synthetic construct
  source 1..20: mol_type = other DNA
ccgtacgtcccagcgtgatc

SEQ ID NO: 235626 - DNA, 20 bp, synthetic construct
  source 1..20: mol_type = other DNA
cccgtacgtcccagcgtgat

SEQ ID NO: 235627 - DNA, 20 bp, synthetic construct
  source 1..20: mol_type = other DNA
acccgtacgtcccagcgtga

SEQ ID NO: 235628 - DNA, 20 bp, synthetic construct
  source 1..20: mol_type = other DNA
aacccgtacgtcccagcgtg

SEQ ID NO: 235629 - DNA, 20 bp, synthetic construct
  source 1..20: mol_type = other DNA
caacccgtacgtcccagcgt

SEQ ID NO: 235630 - DNA, 20 bp, synthetic construct
  source 1..20: mol_type = other DNA
ccaacccgtacgtcccagcg

SEQ ID NO: 235631 - DNA, 20 bp, synthetic construct
  source 1..20: mol_type = other DNA
cccaacccgtacgtcccagc

SEQ ID NO: 235632 - DNA, 20 bp, synthetic construct
  source 1..20: mol_type = other DNA
ccccaacccgtacgtcccag

SEQ ID NO: 235633 - DNA, 20 bp, synthetic construct
  source 1..20: mol_type = other DNA
cccccaacccgtacgtccca

SEQ ID NO: 235634 - DNA, 20 bp, synthetic construct
  source 1..20: mol_type = other DNA
tcccccaacccgtacgtccc

SEQ ID NO: 235635 - DNA, 20 bp, synthetic construct
  source 1..20: mol_type = other DNA
gtcccccaacccgtacgtcc

SEQ ID NO: 235636 - DNA, 20 bp, synthetic construct
  source 1..20: mol_type = other DNA
tgtcccccaacccgtacgtc

SEQ ID NO: 235637 - DNA, 20 bp, synthetic construct
  source 1..20: mol_type = other DNA
ctgtcccccaacccgtacgt

SEQ ID NO: 235638 - DNA, 20 bp, synthetic construct
  source 1..20: mol_type = other DNA
cctgtcccccaacccgtacg

SEQ ID NO: 235639 - DNA, 20 bp, synthetic construct
  source 1..20: mol_type = other DNA
tcctgtcccccaacccgtac

SEQ ID NO: 235640 - DNA, 20 bp, synthetic construct
  source 1..20: mol_type = other DNA
ttcctgtcccccaacccgta

SEQ ID NO: 235641 - DNA, 20 bp, synthetic construct
  source 1..20: mol_type = other DNA
tttcctgtcccccaacccgt

SEQ ID NO: 235642 - DNA, 20 bp, synthetic construct
  source 1..20: mol_type = other DNA
ctttcctgtcccccaacccg

SEQ ID NO: 235643 - DNA, 20 bp, synthetic construct
  source 1..20: mol_type = other DNA
tctttcctgtcccccaaccc

SEQ ID NO: 235644 - DNA, 20 bp, synthetic construct
  source 1..20: mol_type = other DNA
atctttcctgtcccccaacc

SEQ ID NO: 235645 - DNA, 20 bp, synthetic construct
  source 1..20: mol_type = other DNA
gatctttcctgtcccccaac

SEQ ID NO: 235646 - DNA, 20 bp, synthetic construct
  source 1..20: mol_type = other DNA
tgatctttcctgtcccccaa

SEQ ID NO: 235647 - DNA, 20 bp, synthetic construct
  source 1..20: mol_type = other DNA
ctgatctttcctgtccccca

SEQ ID NO: 235648 - DNA, 20 bp, synthetic construct
  source 1..20: mol_type = other DNA
cctgatctttcctgtccccc

SEQ ID NO: 235649 - DNA, 20 bp, synthetic construct
  source 1..20: mol_type = other DNA
ccctgatctttcctgtcccc

SEQ ID NO: 235650 - DNA, 20 bp, synthetic construct
  source 1..20: mol_type = other DNA
cccctgatctttcctgtccc

SEQ ID NO: 235651 - DNA, 20 bp, synthetic construct
  source 1..20: mol_type = other DNA
ccccctgatctttcctgtcc

SEQ ID NO: 235652 - DNA, 20 bp, synthetic construct
  source 1..20: mol_type = other DNA
cccccctgatctttcctgtc

SEQ ID NO: 235653 - DNA, 20 bp, synthetic construct
  source 1..20: mol_type = other DNA
gcccccctgatctttcctgt

SEQ ID NO: 235654 - DNA, 20 bp, synthetic construct
  source 1..20: mol_type = other DNA
agcccccctgatctttcctg

SEQ ID NO: 235655 - DNA, 20 bp, synthetic construct
  source 1..20: mol_type = other DNA
tagcccccctgatctttcct

SEQ ID NO: 235656 - DNA, 20 bp, synthetic construct
  source 1..20: mol_type = other DNA
gtagcccccctgatctttcc

SEQ ID NO: 235657 - DNA, 20 bp, synthetic construct
  source 1..20: mol_type = other DNA
tgtagcccccctgatctttc

SEQ ID NO: 235658 - DNA, 20 bp, synthetic construct
  source 1..20: mol_type = other DNA
gtgtagcccccctgatcttt

SEQ ID NO: 235659 - DNA, 20 bp, synthetic construct
  source 1..20: mol_type = other DNA
ggtgtagcccccctgatctt

SEQ ID NO: 235660 - DNA, 20 bp, synthetic construct
  source 1..20: mol_type = other DNA
tggtgtagcccccctgatct

SEQ ID NO: 235661 - DNA, 20 bp, synthetic construct
  source 1..20: mol_type = other DNA
atggtgtagcccccctgatc

SEQ ID NO: 235662 - DNA, 20 bp, synthetic construct
  source 1..20: mol_type = other DNA
catggtgtagcccccctgat

SEQ ID NO: 235663 - DNA, 20 bp, synthetic construct
  source 1..20: mol_type = other DNA
gcatggtgtagcccccctga

SEQ ID NO: 235664 - DNA, 20 bp, synthetic construct
  source 1..20: mol_type = other DNA
tgcatggtgtagcccccctg

SEQ ID NO: 235665 - DNA, 20 bp, synthetic construct
  source 1..20: mol_type = other DNA
gtgcatggtgtagcccccct

SEQ ID NO: 235666 - DNA, 20 bp, synthetic construct
  source 1..20: mol_type = other DNA
ggtgcatggtgtagcccccc

SEQ ID NO: 235667 - DNA, 20 bp, synthetic construct
  source 1..20: mol_type = other DNA
tggtgcatggtgtagccccc

SEQ ID NO: 235668 - DNA, 20 bp, synthetic construct
  source 1..20: mol_type = other DNA
ttggtgcatggtgtagcccc

SEQ ID NO: 235669 - DNA, 20 bp, synthetic construct
  source 1..20: mol_type = other DNA
cttggtgcatggtgtagccc

SEQ ID NO: 235670 - DNA, 20 bp, synthetic construct
  source 1..20: mol_type = other DNA
tcttggtgcatggtgtagcc

SEQ ID NO: 235671 - DNA, 20 bp, synthetic construct
  source 1..20: mol_type = other DNA
gtcttggtgcatggtgtagc

SEQ ID NO: 235672 - DNA, 20 bp, synthetic construct
  source 1..20: mol_type = other DNA
ggtcttggtgcatggtgtag

SEQ ID NO: 235673 - DNA, 20 bp, synthetic construct
  source 1..20: mol_type = other DNA
tggtcttggtgcatggtgta

SEQ ID NO: 235674 - DNA, 20 bp, synthetic construct
  source 1..20: mol_type = other DNA
ttggtcttggtgcatggtgt

SEQ ID NO: 235675 - DNA, 20 bp, synthetic construct
  source 1..20: mol_type = other DNA
cttggtcttggtgcatggtg

SEQ ID NO: 235676 - DNA, 20 bp, synthetic construct
  source 1..20: mol_type = other DNA
tcttggtcttggtgcatggt

SEQ ID NO: 235677 - DNA, 20 bp, synthetic construct
  source 1..20: mol_type = other DNA
ctcttggtcttggtgcatgg

SEQ ID NO: 235678 - DNA, 20 bp, synthetic construct
  source 1..20: mol_type = other DNA
cctcttggtcttggtgcatg

SEQ ID NO: 235679 - DNA, 20 bp, synthetic construct
  source 1..20: mol_type = other DNA
ccctcttggtcttggtgcat

SEQ ID NO: 235680 - DNA, 20 bp, synthetic construct
  source 1..20: mol_type = other DNA
accctcttggtcttggtgca

SEQ ID NO: 235681 - DNA, 20 bp, synthetic construct
  source 1..20: mol_type = other DNA
caccctcttggtcttggtgc

SEQ ID NO: 235682 - DNA, 20 bp, synthetic construct
  source 1..20: mol_type = other DNA
tcaccctcttggtcttggtg

SEQ ID NO: 235683 - DNA, 20 bp, synthetic construct
  source 1..20: mol_type = other DNA
gtcaccctcttggtcttggt

SEQ ID NO: 235684 - DNA, 20 bp, synthetic construct
  source 1..20: mol_type = other DNA
tgtcaccctcttggtcttgg

SEQ ID NO: 235685 - DNA, 20 bp, synthetic construct
  source 1..20: mol_type = other DNA
gtgtcaccctcttggtcttg

SEQ ID NO: 235686 - DNA, 20 bp, synthetic construct
  source 1..20: mol_type = other DNA
cgtgtcaccctcttggtctt

SEQ ID NO: 235687 - DNA, 20 bp, synthetic construct
  source 1..20: mol_type = other DNA
ccgtgtcaccctcttggtct

SEQ ID NO: 235688 - DNA, 20 bp, synthetic construct
  source 1..20: mol_type = other DNA
tccgtgtcaccctcttggtc

SEQ ID NO: 235689 - DNA, 20 bp, synthetic construct
  source 1..20: mol_type = other DNA
gtccgtgtcaccctcttggt

SEQ ID NO: 235690 - DNA, 20 bp, synthetic construct
  source 1..20: mol_type = other DNA
cgtccgtgtcaccctcttgg

SEQ ID NO: 235691 - DNA, 20 bp, synthetic construct
  source 1..20: mol_type = other DNA
gcgtccgtgtcaccctcttg

SEQ ID NO: 235692 - DNA, 20 bp, synthetic construct
  source 1..20: mol_type = other DNA
agcgtccgtgtcaccctctt

SEQ ID NO: 235693 - DNA, 20 bp, synthetic construct
  source 1..20: mol_type = other DNA
cagcgtccgtgtcaccctct

SEQ ID NO: 235694 - DNA, 20 bp, synthetic construct
  source 1..20: mol_type = other DNA
ccagcgtccgtgtcaccctc

SEQ ID NO: 235695 - DNA, 20 bp, synthetic construct
  source 1..20: mol_type = other DNA
gccagcgtccgtgtcaccct

SEQ ID NO: 235696 - DNA, 20 bp, synthetic construct
  source 1..20: mol_type = other DNA
ggccagcgtccgtgtcaccc

SEQ ID NO: 235697 - DNA, 20 bp, synthetic construct
  source 1..20: mol_type = other DNA
aggccagcgtccgtgtcacc

SEQ ID NO: 235698 - DNA, 20 bp, synthetic construct
  source 1..20: mol_type = other DNA
caggccagcgtccgtgtcac

SEQ ID NO: 235699 - DNA, 20 bp, synthetic construct
  source 1..20: mol_type = other DNA
tcaggccagcgtccgtgtca

SEQ ID NO: 235700 - DNA, 20 bp, synthetic construct
  source 1..20: mol_type = other DNA
ttcaggccagcgtccgtgtc

SEQ ID NO: 235701 - DNA, 20 bp, synthetic construct
  source 1..20: mol_type = other DNA
tttcaggccagcgtccgtgt

SEQ ID NO: 235702 - DNA, 20 bp, synthetic construct
  source 1..20: mol_type = other DNA
ctttcaggccagcgtccgtg

SEQ ID NO: 235703 - DNA, 20 bp, synthetic construct
  source 1..20: mol_type = other DNA
cctttcaggccagcgtccgt

SEQ ID NO: 235704 - DNA, 20 bp, synthetic construct
  source 1..20: mol_type = other DNA
acctttcaggccagcgtccg

SEQ ID NO: 235705 - DNA, 20 bp, synthetic construct
  source 1..20: mol_type = other DNA
aacctttcaggccagcgtcc

SEQ ID NO: 235706 - DNA, 20 bp, synthetic construct
  source 1..20: mol_type = other DNA
taacctttcaggccagcgtc

SEQ ID NO: 235707 - DNA, 20 bp, synthetic construct
  source 1..20: mol_type = other DNA
ctaacctttcaggccagcgt

SEQ ID NO: 235708 - DNA, 20 bp, synthetic construct
  source 1..20: mol_type = other DNA
actaacctttcaggccagcg

SEQ ID NO: 235709 - DNA, 20 bp, synthetic construct
  source 1..20: mol_type = other DNA
cactaacctttcaggccagc

SEQ ID NO: 235710 - DNA, 20 bp, synthetic construct
  source 1..20: mol_type = other DNA
ccactaacctttcaggccag

SEQ ID NO: 235711 - DNA, 20 bp, synthetic construct
  source 1..20: mol_type = other DNA
tccactaacctttcaggcca

SEQ ID NO: 235712 - DNA, 20 bp, synthetic construct
  source 1..20: mol_type = other DNA
gtccactaacctttcaggcc

SEQ ID NO: 235713 - DNA, 20 bp, synthetic construct
  source 1..20: mol_type = other DNA
tgtccactaacctttcaggc

SEQ ID NO: 235714 - DNA, 20 bp, synthetic construct
  source 1..20: mol_type = other DNA
ctgtccactaacctttcagg

SEQ ID NO: 235715 - DNA, 20 bp, synthetic construct
  source 1..20: mol_type = other DNA
gctgtccactaacctttcag

SEQ ID NO: 235716 - DNA, 20 bp, synthetic construct
  source 1..20: mol_type = other DNA
ggctgtccactaacctttca

SEQ ID NO: 235717 - DNA, 20 bp, synthetic construct
  source 1..20: mol_type = other DNA
tggctgtccactaacctttc

SEQ ID NO: 235718 - DNA, 20 bp, synthetic construct
  source 1..20: mol_type = other DNA
atggctgtccactaaccttt

SEQ ID NO: 235719 - DNA, 20 bp, synthetic construct
  source 1..20: mol_type = other DNA
catggctgtccactaacctt

SEQ ID NO: 235720 - DNA, 20 bp, synthetic construct
  source 1..20: mol_type = other DNA
gcatggctgtccactaacct

SEQ ID NO: 235721 - DNA, 20 bp, synthetic construct
  source 1..20: mol_type = other DNA
tgcatggctgtccactaacc

SEQ ID NO: 235722 - DNA, 20 bp, synthetic construct
  source 1..20: mol_type = other DNA
gtgcatggctgtccactaac

SEQ ID NO: 235723 - DNA, 20 bp, synthetic construct
  source 1..20: mol_type = other DNA
tgtgcatggctgtccactaa

SEQ ID NO: 235724 - DNA, 20 bp, synthetic construct
  source 1..20: mol_type = other DNA
ctgtgcatggctgtccacta

SEQ ID NO: 235725 - DNA, 20 bp, synthetic construct
  source 1..20: mol_type = other DNA
gctgtgcatggctgtccact

SEQ ID NO: 235726 - DNA, 20 bp, synthetic construct
  source 1..20: mol_type = other DNA
tgctgtgcatggctgtccac

SEQ ID NO: 235727 - DNA, 20 bp, synthetic construct
  source 1..20: mol_type = other DNA
ctgctgtgcatggctgtcca

SEQ ID NO: 235728 - DNA, 20 bp, synthetic construct
  source 1..20: mol_type = other DNA
cctgctgtgcatggctgtcc

SEQ ID NO: 235729 - DNA, 20 bp, synthetic construct
  source 1..20: mol_type = other DNA
gcctgctgtgcatggctgtc

SEQ ID NO: 235730 - DNA, 20 bp, synthetic construct
  source 1..20: mol_type = other DNA
ggcctgctgtgcatggctgt

SEQ ID NO: 235731 - DNA, 20 bp, synthetic construct
  source 1..20: mol_type = other DNA
gggcctgctgtgcatggctg

SEQ ID NO: 235732 - DNA, 20 bp, synthetic construct
  source 1..20: mol_type = other DNA
tgggcctgctgtgcatggct

SEQ ID NO: 235733 - DNA, 20 bp, synthetic construct
  source 1..20: mol_type = other DNA
ctgggcctgctgtgcatggc

SEQ ID NO: 235734 - DNA, 20 bp, synthetic construct
  source 1..20: mol_type = other DNA
tctgggcctgctgtgcatgg

SEQ ID NO: 235735 - DNA, 20 bp, synthetic construct
  source 1..20: mol_type = other DNA
atctgggcctgctgtgcatg

SEQ ID NO: 235736 - DNA, 20 bp, synthetic construct
  source 1..20: mol_type = other DNA
gatctgggcctgctgtgcat

SEQ ID NO: 235737 - DNA, 20 bp, synthetic construct
  source 1..20: mol_type = other DNA
tgatctgggcctgctgtgca

SEQ ID NO: 235738 - DNA, 20 bp, synthetic construct
  source 1..20: mol_type = other DNA
gtgatctgggcctgctgtgc

SEQ ID NO: 235739 - DNA, 20 bp, synthetic construct
  source 1..20: mol_type = other DNA
agtgatctgggcctgctgtg

SEQ ID NO: 235740 - DNA, 20 bp, synthetic construct
  source 1..20: mol_type = other DNA
cagtgatctgggcctgctgt

SEQ ID NO: 235741 - DNA, 20 bp, synthetic construct
  source 1..20: mol_type = other DNA
gcagtgatctgggcctgctg

SEQ ID NO: 235742 - DNA, 20 bp, synthetic construct
  source 1..20: mol_type = other DNA
tgcagtgatctgggcctgct

SEQ ID NO: 235743 - DNA, 20 bp, synthetic construct
  source 1..20: mol_type = other DNA
ttgcagtgatctgggcctgc

SEQ ID NO: 235744 - DNA, 20 bp, synthetic construct
  source 1..20: mol_type = other DNA
cttgcagtgatctgggcctg

SEQ ID NO: 235745 - DNA, 20 bp, synthetic construct
  source 1..20: mol_type = other DNA
gcttgcagtgatctgggcct

SEQ ID NO: 235746 - DNA, 20 bp, synthetic construct
  source 1..20: mol_type = other DNA
ggcttgcagtgatctgggcc

SEQ ID NO: 235747 - DNA, 20 bp, synthetic construct
  source 1..20: mol_type = other DNA
tggcttgcagtgatctgggc

SEQ ID NO: 235748 - DNA, 20 bp, synthetic construct
  source 1..20: mol_type = other DNA
ttggcttgcagtgatctggg

SEQ ID NO: 235749 - DNA, 20 bp, synthetic construct
  source 1..20: mol_type = other DNA
cttggcttgcagtgatctgg

SEQ ID NO: 235750 - DNA, 20 bp, synthetic construct
  source 1..20: mol_type = other DNA
ccttggcttgcagtgatctg

SEQ ID NO: 235751 - DNA, 20 bp, synthetic construct
  source 1..20: mol_type = other DNA
cccttggcttgcagtgatct

SEQ ID NO: 235752 - DNA, 20 bp, synthetic construct
  source 1..20: mol_type = other DNA
ccccttggcttgcagtgatc

SEQ ID NO: 235753 - DNA, 20 bp, synthetic construct
  source 1..20: mol_type = other DNA
accccttggcttgcagtgat

SEQ ID NO: 235754 - DNA, 20 bp, synthetic construct
  source 1..20: mol_type = other DNA
caccccttggcttgcagtga

SEQ ID NO: 235755 - DNA, 20 bp, synthetic construct
  source 1..20: mol_type = other DNA
ccaccccttggcttgcagtg

SEQ ID NO: 235756 - DNA, 20 bp, synthetic construct
  source 1..20: mol_type = other DNA
gccaccccttggcttgcagt

SEQ ID NO: 235757 - DNA, 20 bp, synthetic construct
  source 1..20: mol_type = other DNA
cgccaccccttggcttgcag

SEQ ID NO: 235758 - DNA, 20 bp, synthetic construct
  source 1..20: mol_type = other DNA
ccgccaccccttggcttgca

SEQ ID NO: 235759 - DNA, 20 bp, synthetic construct
  source 1..20: mol_type = other DNA
cccgccaccccttggcttgc

SEQ ID NO: 235760 - DNA, 20 bp, synthetic construct
  source 1..20: mol_type = other DNA
tcccgccaccccttggcttg

SEQ ID NO: 235761 - DNA, 20 bp, synthetic construct
  source 1..20: mol_type = other DNA
ttcccgccaccccttggctt

SEQ ID NO: 235762 - DNA, 20 bp, synthetic construct
  source 1..20: mol_type = other DNA
gttcccgccaccccttggct

SEQ ID NO: 235763 - DNA, 20 bp, synthetic construct
  source 1..20: mol_type = other DNA
tgttcccgccaccccttggc

SEQ ID NO: 235764 - DNA, 20 bp, synthetic construct
  source 1..20: mol_type = other DNA
ctgttcccgccaccccttgg

SEQ ID NO: 235765 - DNA, 20 bp, synthetic construct
  source 1..20: mol_type = other DNA
actgttcccgccaccccttg

SEQ ID NO: 235766 - DNA, 20 bp, synthetic construct
  source 1..20: mol_type = other DNA
aactgttcccgccacccctt

SEQ ID NO: 235767 - DNA, 20 bp, synthetic construct
  source 1..20: mol_type = other DNA
aaactgttcccgccacccct

SEQ ID NO: 235768 - DNA, 20 bp, synthetic construct
  source 1..20: mol_type = other DNA
caaactgttcccgccacccc

SEQ ID NO: 235769 - DNA, 20 bp, synthetic construct
  source 1..20: mol_type = other DNA
gcaaactgttcccgccaccc

SEQ ID NO: 235770 - DNA, 20 bp, synthetic construct
  source 1..20: mol_type = other DNA
tgcaaactgttcccgccacc

SEQ ID NO: 235771 - DNA, 20 bp, synthetic construct
  source 1..20: mol_type = other DNA
atgcaaactgttcccgccac

SEQ ID NO: 235772 - DNA, 20 bp, synthetic construct
  source 1..20: mol_type = other DNA
gatgcaaactgttcccgcca

SEQ ID NO: 235773 - DNA, 20 bp, synthetic construct
  source 1..20: mol_type = other DNA
ggatgcaaactgttcccgcc

SEQ ID NO: 235774 - DNA, 20 bp, synthetic construct
  source 1..20: mol_type = other DNA
tggatgcaaactgttcccgc

SEQ ID NO: 235775 - DNA, 20 bp, synthetic construct
  source 1..20: mol_type = other DNA
ctggatgcaaactgttcccg

SEQ ID NO: 235776 - DNA, 20 bp, synthetic construct
  source 1..20: mol_type = other DNA
tctggatgcaaactgttccc

SEQ ID NO: 235777 - DNA, 20 bp, synthetic construct
  source 1..20: mol_type = other DNA
ttctggatgcaaactgttcc

SEQ ID NO: 235778 - DNA, 20 bp, synthetic construct
  source 1..20: mol_type = other DNA
attctggatgcaaactgttc

SEQ ID NO: 235779 - DNA, 20 bp, synthetic construct
  source 1..20: mol_type = other DNA
aattctggatgcaaactgtt

SEQ ID NO: 235780 - DNA, 20 bp, synthetic construct
  source 1..20: mol_type = other DNA
caattctggatgcaaactgt

SEQ ID NO: 235781 - DNA, 20 bp, synthetic construct
  source 1..20: mol_type = other DNA
gcaattctggatgcaaactg

SEQ ID NO: 235782 - DNA, 20 bp, synthetic construct
  source 1..20: mol_type = other DNA
tgcaattctggatgcaaact

SEQ ID NO: 235783 - DNA, 20 bp, synthetic construct
  source 1..20: mol_type = other DNA
ttgcaattctggatgcaaac

SEQ ID NO: 235784 - DNA, 20 bp, synthetic construct
  source 1..20: mol_type = other DNA
tttgcaattctggatgcaaa

SEQ ID NO: 235785 - DNA, 20 bp, synthetic construct
  source 1..20: mol_type = other DNA
ctttgcaattctggatgcaa

SEQ ID NO: 235786 - DNA, 20 bp, synthetic construct
  source 1..20: mol_type = other DNA
tctttgcaattctggatgca

SEQ ID NO: 235787 - DNA, 20 bp, synthetic construct
  source 1..20: mol_type = other DNA
ttctttgcaattctggatgc

SEQ ID NO: 235788 - DNA, 20 bp, synthetic construct
  source 1..20: mol_type = other DNA
tttctttgcaattctggatg

SEQ ID NO: 235789 - DNA, 20 bp, synthetic construct
  source 1..20: mol_type = other DNA
atttctttgcaattctggat

SEQ ID NO: 235790 - DNA, 20 bp, synthetic construct
  source 1..20: mol_type = other DNA
aatttctttgcaattctgga

SEQ ID NO: 235791 - DNA, 20 bp, synthetic construct
  source 1..20: mol_type = other DNA
aaatttctttgcaattctgg

SEQ ID NO: 235792 - DNA, 20 bp, synthetic construct
  source 1..20: mol_type = other DNA
aaaatttctttgcaattctg

SEQ ID NO: 235793 - DNA, 20 bp, synthetic construct
  source 1..20: mol_type = other DNA
taaaatttctttgcaattct

SEQ ID NO: 235794 - DNA, 20 bp, synthetic construct
  source 1..20: mol_type = other DNA
ttaaaatttctttgcaattc

SEQ ID NO: 235795 - DNA, 20 bp, synthetic construct
  source 1..20: mol_type = other DNA
tttaaaatttctttgcaatt

SEQ ID NO: 235796 - DNA, 20 bp, synthetic construct
  source 1..20: mol_type = other DNA
atttaaaatttctttgcaat

SEQ ID NO: 235797 - DNA, 20 bp, synthetic construct
  source 1..20: mol_type = other DNA
tatttaaaatttctttgcaa

SEQ ID NO: 235798 - DNA, 20 bp, synthetic construct
  source 1..20: mol_type = other DNA
gtatttaaaatttctttgca

SEQ ID NO: 235799 - DNA, 20 bp, synthetic construct
  source 1..20: mol_type = other DNA
tgtatttaaaatttctttgc

SEQ ID NO: 235800 - DNA, 20 bp, synthetic construct
  source 1..20: mol_type = other DNA
atgtatttaaaatttctttg

SEQ ID NO: 235801 - DNA, 20 bp, synthetic construct
  source 1..20: mol_type = other DNA
aatgtatttaaaatttcttt

SEQ ID NO: 235802 - DNA, 20 bp, synthetic construct
  source 1..20: mol_type = other DNA
taatgtatttaaaatttctt

SEQ ID NO: 235803 - DNA, 20 bp, synthetic construct
  source 1..20: mol_type = other DNA
ataatgtatttaaaatttct

SEQ ID NO: 235804 - DNA, 20 bp, synthetic construct
  source 1..20: mol_type = other DNA
aataatgtatttaaaatttc

SEQ ID NO: 235805 - DNA, 20 bp, synthetic construct
  source 1..20: mol_type = other DNA
caataatgtatttaaaattt

SEQ ID NO: 235806 - DNA, 20 bp, synthetic construct
  source 1..20: mol_type = other DNA
acaataatgtatttaaaatt

SEQ ID NO: 235807 - DNA, 20 bp, synthetic construct
  source 1..20: mol_type = other DNA
gacaataatgtatttaaaat

SEQ ID NO: 235808 - DNA, 20 bp, synthetic construct
  source 1..20: mol_type = other DNA
agacaataatgtatttaaaa

SEQ ID NO: 235809 - DNA, 20 bp, synthetic construct
  source 1..20: mol_type = other DNA
aagacaataatgtatttaaa

SEQ ID NO: 235810 - DNA, 20 bp, synthetic construct
  source 1..20: mol_type = other DNA
taagacaataatgtatttaa

SEQ ID NO: 235811 - DNA, 20 bp, synthetic construct
  source 1..20: mol_type = other DNA
ctaagacaataatgtattta

SEQ ID NO: 235812 - DNA, 20 bp, synthetic construct
  source 1..20: mol_type = other DNA
tctaagacaataatgtattt

SEQ ID NO: 235813 - DNA, 20 bp, synthetic construct
  source 1..20: mol_type = other DNA
gtctaagacaataatgtatt

SEQ ID NO: 235814 - DNA, 20 bp, synthetic construct
  source 1..20: mol_type = other DNA
agtctaagacaataatgtat

SEQ ID NO: 235815 - DNA, 20 bp, synthetic construct
  source 1..20: mol_type = other DNA
cagtctaagacaataatgta

SEQ ID NO: 235816 - DNA, 20 bp, synthetic construct
  source 1..20: mol_type = other DNA
acagtctaagacaataatgt

SEQ ID NO: 235817 - DNA, 20 bp, synthetic construct
  source 1..20: mol_type = other DNA
gacagtctaagacaataatg

SEQ ID NO: 235818 - DNA, 20 bp, synthetic construct
  source 1..20: mol_type = other DNA
tgacagtctaagacaataat

SEQ ID NO: 235819 - DNA, 20 bp, synthetic construct
  source 1..20: mol_type = other DNA
ctgacagtctaagacaataa

SEQ ID NO: 235820 - DNA, 20 bp, synthetic construct
  source 1..20: mol_type = other DNA
actgacagtctaagacaata

SEQ ID NO: 235821 - DNA, 20 bp, synthetic construct
  source 1..20: mol_type = other DNA
tactgacagtctaagacaat

SEQ ID NO: 235822 - DNA, 20 bp, synthetic construct
  source 1..20: mol_type = other DNA
ttactgacagtctaagacaa

SEQ ID NO: 235823 - DNA, 20 bp, synthetic construct
  source 1..20: mol_type = other DNA
tttactgacagtctaagaca

SEQ ID NO: 235824 - DNA, 20 bp, synthetic construct
  source 1..20: mol_type = other DNA
ctttactgacagtctaagac

SEQ ID NO: 235825 - DNA, 20 bp, synthetic construct
  source 1..20: mol_type = other DNA
actttactgacagtctaaga

SEQ ID NO: 235826 - DNA, 20 bp, synthetic construct
  source 1..20: mol_type = other DNA
tactttactgacagtctaag

SEQ ID NO: 235827 - DNA, 20 bp, synthetic construct
  source 1..20: mol_type = other DNA
ttactttactgacagtctaa

SEQ ID NO: 235828 - DNA, 20 bp, synthetic construct
  source 1..20: mol_type = other DNA
tttactttactgacagtcta

SEQ ID NO: 235829 - DNA, 20 bp, synthetic construct
  source 1..20: mol_type = other DNA
ctttactttactgacagtct

SEQ ID NO: 235830 - DNA, 20 bp, synthetic construct
  source 1..20: mol_type = other DNA
gctttactttactgacagtc

SEQ ID NO: 235831 - DNA, 20 bp, synthetic construct
  source 1..20: mol_type = other DNA
ggctttactttactgacagt

SEQ ID NO: 235832 - DNA, 20 bp, synthetic construct
  source 1..20: mol_type = other DNA
aggctttactttactgacag

SEQ ID NO: 235833 - DNA, 20 bp, synthetic construct
  source 1..20: mol_type = other DNA
gaggctttactttactgaca

SEQ ID NO: 235834 - DNA, 20 bp, synthetic construct
  source 1..20: mol_type = other DNA
tgaggctttactttactgac

SEQ ID NO: 235835 - DNA, 20 bp, synthetic construct
  source 1..20: mol_type = other DNA
atgaggctttactttactga

SEQ ID NO: 235836 - DNA, 20 bp, synthetic construct
  source 1..20: mol_type = other DNA
aatgaggctttactttactg

SEQ ID NO: 235837 - DNA, 20 bp, synthetic construct
  source 1..20: mol_type = other DNA
taatgaggctttactttact

SEQ ID NO: 235838 - DNA, 20 bp, synthetic construct
  source 1..20: mol_type = other DNA
ttaatgaggctttactttac

SEQ ID NO: 235839 - DNA, 20 bp, synthetic construct
  source 1..20: mol_type = other DNA
attaatgaggctttacttta

SEQ ID NO: 235840 - DNA, 20 bp, synthetic construct
  source 1..20: mol_type = other DNA
aattaatgaggctttacttt

SEQ ID NO: 235841 - DNA, 20 bp, synthetic construct
  source 1..20: mol_type = other DNA
aaattaatgaggctttactt

SEQ ID NO: 235842 - DNA, 20 bp, synthetic construct
  source 1..20: mol_type = other DNA
caaattaatgaggctttact

SEQ ID NO: 235843 - DNA, 20 bp, synthetic construct
  source 1..20: mol_type = other DNA
tcaaattaatgaggctttac

SEQ ID NO: 235844 - DNA, 20 bp, synthetic construct
  source 1..20: mol_type = other DNA
ctcaaattaatgaggcttta

SEQ ID NO: 235845 - DNA, 20 bp, synthetic construct
  source 1..20: mol_type = other DNA
actcaaattaatgaggcttt

SEQ ID NO: 235846 - DNA, 20 bp, synthetic construct
  source 1..20: mol_type = other DNA
cactcaaattaatgaggctt

SEQ ID NO: 235847 - DNA, 20 bp, synthetic construct
  source 1..20: mol_type = other DNA
ccactcaaattaatgaggct

SEQ ID NO: 235848 - DNA, 20 bp, synthetic construct
  source 1..20: mol_type = other DNA
cccactcaaattaatgaggc

SEQ ID NO: 235849 - DNA, 20 bp, synthetic construct
  source 1..20: mol_type = other DNA
gcccactcaaattaatgagg

SEQ ID NO: 235850 - DNA, 20 bp, synthetic construct
  source 1..20: mol_type = other DNA
ggcccactcaaattaatgag

SEQ ID NO: 235851 - DNA, 20 bp, synthetic construct
  source 1..20: mol_type = other DNA
tggcccactcaaattaatga

SEQ ID NO: 235852 - DNA, 20 bp, synthetic construct
  source 1..20: mol_type = other DNA
ttggcccactcaaattaatg

SEQ ID NO: 235853 - DNA, 20 bp, synthetic construct
  source 1..20: mol_type = other DNA
cttggcccactcaaattaat

SEQ ID NO: 235854 - DNA, 20 bp, synthetic construct
  source 1..20: mol_type = other DNA
tcttggcccactcaaattaa

SEQ ID NO: 235855 - DNA, 20 bp, synthetic construct
  source 1..20: mol_type = other DNA
atcttggcccactcaaatta

SEQ ID NO: 235856 - DNA, 20 bp, synthetic construct
  source 1..20: mol_type = other DNA
tatcttggcccactcaaatt

SEQ ID NO: 235857 - DNA, 20 bp, synthetic construct
  source 1..20: mol_type = other DNA
ttatcttggcccactcaaat

SEQ ID NO: 235858 - DNA, 20 bp, synthetic construct
  source 1..20: mol_type = other DNA
gttatcttggcccactcaaa

SEQ ID NO: 235859 - DNA, 20 bp, synthetic construct
  source 1..20: mol_type = other DNA
agttatcttggcccactcaa

SEQ ID NO: 235860 - DNA, 20 bp, synthetic construct
  source 1..20: mol_type = other DNA
gagttatcttggcccactca

SEQ ID NO: 235861 - DNA, 20 bp, synthetic construct
  source 1..20: mol_type = other DNA
tgagttatcttggcccactc

SEQ ID NO: 235862 - DNA, 20 bp, synthetic construct
  source 1..20: mol_type = other DNA
ttgagttatcttggcccact

SEQ ID NO: 235863 - DNA, 20 bp, synthetic construct
  source 1..20: mol_type = other DNA
cttgagttatcttggcccac

SEQ ID NO: 235864 - DNA, 20 bp, synthetic construct
  source 1..20: mol_type = other DNA
gcttgagttatcttggccca

SEQ ID NO: 235865 - DNA, 20 bp, synthetic construct
  source 1..20: mol_type = other DNA
tgcttgagttatcttggccc

SEQ ID NO: 235866 - DNA, 20 bp, synthetic construct
  source 1..20: mol_type = other DNA
ctgcttgagttatcttggcc

SEQ ID NO: 235867 - DNA, 20 bp, synthetic construct
  source 1..20: mol_type = other DNA
actgcttgagttatcttggc

SEQ ID NO: 235868 - DNA, 20 bp, synthetic construct
  source 1..20: mol_type = other DNA
cactgcttgagttatcttgg

SEQ ID NO: 235869 - DNA, 20 bp, synthetic construct
  source 1..20: mol_type = other DNA
tcactgcttgagttatcttg

SEQ ID NO: 235870 - DNA, 20 bp, synthetic construct
  source 1..20: mol_type = other DNA
ctcactgcttgagttatctt

SEQ ID NO: 235871 - DNA, 20 bp, synthetic construct
  source 1..20: mol_type = other DNA
tctcactgcttgagttatct

SEQ ID NO: 235872 - DNA, 20 bp, synthetic construct
  source 1..20: mol_type = other DNA
atctcactgcttgagttatc

SEQ ID NO: 235873 - DNA, 20 bp, synthetic construct
  source 1..20: mol_type = other DNA
tatctcactgcttgagttat

SEQ ID NO: 235874 - DNA, 20 bp, synthetic construct
  source 1..20: mol_type = other DNA
ttatctcactgcttgagtta

SEQ ID NO: 235875 - DNA, 20 bp, synthetic construct
  source 1..20: mol_type = other DNA
attatctcactgcttgagtt

SEQ ID NO: 235876 - DNA, 20 bp, synthetic construct
  source 1..20: mol_type = other DNA
cattatctcactgcttgagt

SEQ ID NO: 235877 - DNA, 20 bp, synthetic construct
  source 1..20: mol_type = other DNA
ccattatctcactgcttgag

SEQ ID NO: 235878 - DNA, 20 bp, synthetic construct
  source 1..20: mol_type = other DNA
gccattatctcactgcttga

SEQ ID NO: 235879 - DNA, 20 bp, synthetic construct
  source 1..20: mol_type = other DNA
ggccattatctcactgcttg

SEQ ID NO: 235880 - DNA, 20 bp, synthetic construct
  source 1..20: mol_type = other DNA
tggccattatctcactgctt

SEQ ID NO: 235881 - DNA, 20 bp, synthetic construct
  source 1..20: mol_type = other DNA
ctggccattatctcactgct

SEQ ID NO: 235882 - DNA, 20 bp, synthetic construct
  source 1..20: mol_type = other DNA
tctggccattatctcactgc

SEQ ID NO: 235883 - DNA, 20 bp, synthetic construct
  source 1..20: mol_type = other DNA
gtctggccattatctcactg

SEQ ID NO: 235884 - DNA, 20 bp, synthetic construct
  source 1..20: mol_type = other DNA
tgtctggccattatctcact

SEQ ID NO: 235885 - DNA, 20 bp, synthetic construct
  source 1..20: mol_type = other DNA
gtgtctggccattatctcac

SEQ ID NO: 235886 - DNA, 20 bp, synthetic construct
  source 1..20: mol_type = other DNA
cgtgtctggccattatctca

SEQ ID NO: 235887 - DNA, 20 bp, synthetic construct
  source 1..20: mol_type = other DNA
ccgtgtctggccattatctc

SEQ ID NO: 235888 - DNA, 20 bp, synthetic construct
  source 1..20: mol_type = other DNA
accgtgtctggccattatct

SEQ ID NO: 235889 - DNA, 20 bp, synthetic construct
  source 1..20: mol_type = other DNA
caccgtgtctggccattatc

SEQ ID NO: 235890 - DNA, 20 bp, synthetic construct
  source 1..20: mol_type = other DNA
ccaccgtgtctggccattat

SEQ ID NO: 235891 - DNA, 20 bp, synthetic construct
  source 1..20: mol_type = other DNA
gccaccgtgtctggccatta

SEQ ID NO: 235892 - DNA, 20 bp, synthetic construct
  source 1..20: mol_type = other DNA
agccaccgtgtctggccatt

SEQ ID NO: 235893 - DNA, 20 bp, synthetic construct
  source 1..20: mol_type = other DNA
gagccaccgtgtctggccat

SEQ ID NO: 235894 - DNA, 20 bp, synthetic construct
  source 1..20: mol_type = other DNA
tgagccaccgtgtctggcca

SEQ ID NO: 235895 - DNA, 20 bp, synthetic construct
  source 1..20: mol_type = other DNA
gtgagccaccgtgtctggcc

SEQ ID NO: 235896 - DNA, 20 bp, synthetic construct
  source 1..20: mol_type = other DNA
cgtgagccaccgtgtctggc

SEQ ID NO: 235897 - DNA, 20 bp, synthetic construct
  source 1..20: mol_type = other DNA
gcgtgagccaccgtgtctgg

SEQ ID NO: 235898 - DNA, 20 bp, synthetic construct
  source 1..20: mol_type = other DNA
ggcgtgagccaccgtgtctg

SEQ ID NO: 235899 - DNA, 20 bp, synthetic construct
  source 1..20: mol_type = other DNA
aggcgtgagccaccgtgtct

SEQ ID NO: 235900 - DNA, 20 bp, synthetic construct
  source 1..20: mol_type = other DNA
caggcgtgagccaccgtgtc

SEQ ID NO: 235901 - DNA, 20 bp, synthetic construct
  source 1..20: mol_type = other DNA
acaggcgtgagccaccgtgt

SEQ ID NO: 235902 - DNA, 20 bp, synthetic construct
  source 1..20: mol_type = other DNA
tacaggcgtgagccaccgtg

SEQ ID NO: 235903 - DNA, 20 bp, synthetic construct
  source 1..20: mol_type = other DNA
ttacaggcgtgagccaccgt

SEQ ID NO: 235904 - DNA, 20 bp, synthetic construct
  source 1..20: mol_type = other DNA
attacaggcgtgagccaccg

SEQ ID NO: 235905 - DNA, 20 bp, synthetic construct
  source 1..20: mol_type = other DNA
gattacaggcgtgagccacc

SEQ ID NO: 235906 - DNA, 20 bp, synthetic construct
  source 1..20: mol_type = other DNA
ggattacaggcgtgagccac

SEQ ID NO: 235907 - DNA, 20 bp, synthetic construct
  source 1..20: mol_type = other DNA
gggattacaggcgtgagcca

SEQ ID NO: 235908 - DNA, 20 bp, synthetic construct
  source 1..20: mol_type = other DNA
tgggattacaggcgtgagcc

SEQ ID NO: 235909 - DNA, 20 bp, synthetic construct
  source 1..20: mol_type = other DNA
ctgggattacaggcgtgagc

SEQ ID NO: 235910 - DNA, 20 bp, synthetic construct
  source 1..20: mol_type = other DNA
gctgggattacaggcgtgag

SEQ ID NO: 235911 - DNA, 20 bp, synthetic construct
  source 1..20: mol_type = other DNA
tgctgggattacaggcgtga

SEQ ID NO: 235912 - DNA, 20 bp, synthetic construct
  source 1..20: mol_type = other DNA
gtgctgggattacaggcgtg

SEQ ID NO: 235913 - DNA, 20 bp, synthetic construct
  source 1..20: mol_type = other DNA
agtgctgggattacaggcgt

SEQ ID NO: 235914 - DNA, 20 bp, synthetic construct
  source 1..20: mol_type = other DNA
aagtgctgggattacaggcg

SEQ ID NO: 235915 - DNA, 20 bp, synthetic construct
  source 1..20: mol_type = other DNA
aaagtgctgggattacaggc

SEQ ID NO: 235916 - DNA, 20 bp, synthetic construct
  source 1..20: mol_type = other DNA
caaagtgctgggattacagg

SEQ ID NO: 235917 - DNA, 20 bp, synthetic construct
  source 1..20: mol_type = other DNA
ccaaagtgctgggattacag

SEQ ID NO: 235918 - DNA, 20 bp, synthetic construct
  source 1..20: mol_type = other DNA
tccaaagtgctgggattaca

SEQ ID NO: 235919 - DNA, 20 bp, synthetic construct
  source 1..20: mol_type = other DNA
ttccaaagtgctgggattac

SEQ ID NO: 235920 - DNA, 20 bp, synthetic construct
  source 1..20: mol_type = other DNA
cttccaaagtgctgggatta

SEQ ID NO: 235921 - DNA, 20 bp, synthetic construct
  source 1..20: mol_type = other DNA
ccttccaaagtgctgggatt

SEQ ID NO: 235922 - DNA, 20 bp, synthetic construct
  source 1..20: mol_type = other DNA
gccttccaaagtgctgggat

SEQ ID NO: 235923 - DNA, 20 bp, synthetic construct
  source 1..20: mol_type = other DNA
ggccttccaaagtgctggga

SEQ ID NO: 235924 - DNA, 20 bp, synthetic construct
  source 1..20: mol_type = other DNA
gggccttccaaagtgctggg

SEQ ID NO: 235925 - DNA, 20 bp, synthetic construct
  source 1..20: mol_type = other DNA
tgggccttccaaagtgctgg

SEQ ID NO: 235926 - DNA, 20 bp, synthetic construct
  source 1..20: mol_type = other DNA
ctgggccttccaaagtgctg

SEQ ID NO: 235927 - DNA, 20 bp, synthetic construct
  source 1..20: mol_type = other DNA
cctgggccttccaaagtgct

SEQ ID NO: 235928 - DNA, 20 bp, synthetic construct
  source 1..20: mol_type = other DNA
gcctgggccttccaaagtgc

SEQ ID NO: 235929 - DNA, 20 bp, synthetic construct
  source 1..20: mol_type = other DNA
tgcctgggccttccaaagtg

SEQ ID NO: 235930 - DNA, 20 bp, synthetic construct
  source 1..20: mol_type = other DNA
ctgcctgggccttccaaagt

SEQ ID NO: 235931 - DNA, 20 bp, synthetic construct
  source 1..20: mol_type = other DNA
cctgcctgggccttccaaag

SEQ ID NO: 235932 - DNA, 20 bp, synthetic construct
  source 1..20: mol_type = other DNA
tcctgcctgggccttccaaa

SEQ ID NO: 235933 - DNA, 20 bp, synthetic construct
  source 1..20: mol_type = other DNA
ctcctgcctgggccttccaa

SEQ ID NO: 235934 - DNA, 20 bp, synthetic construct
  source 1..20: mol_type = other DNA
cctcctgcctgggccttcca

SEQ ID NO: 235935 - DNA, 20 bp, synthetic construct
  source 1..20: mol_type = other DNA
tcctcctgcctgggccttcc

SEQ ID NO: 235936 - DNA, 20 bp, synthetic construct
  source 1..20: mol_type = other DNA
atcctcctgcctgggccttc

SEQ ID NO: 235937 - DNA, 20 bp, synthetic construct
  source 1..20: mol_type = other DNA
gatcctcctgcctgggcctt

SEQ ID NO: 235938 - DNA, 20 bp, synthetic construct
  source 1..20: mol_type = other DNA
ggatcctcctgcctgggcct

SEQ ID NO: 235939 - DNA, 20 bp, synthetic construct
  source 1..20: mol_type = other DNA
gggatcctcctgcctgggcc

SEQ ID NO: 235940 - DNA, 20 bp, synthetic construct
  source 1..20: mol_type = other DNA
agggatcctcctgcctgggc

SEQ ID NO: 235941 - DNA, 20 bp, synthetic construct
  source 1..20: mol_type = other DNA
aagggatcctcctgcctggg

SEQ ID NO: 235942 - DNA, 20 bp, synthetic construct
  source 1..20: mol_type = other DNA
caagggatcctcctgcctgg

SEQ ID NO: 235943 - DNA, 20 bp, synthetic construct
  source 1..20: mol_type = other DNA
tcaagggatcctcctgcctg

SEQ ID NO: 235944 - DNA, 20 bp, synthetic construct
  source 1..20: mol_type = other DNA
ctcaagggatcctcctgcct

SEQ ID NO: 235945 - DNA, 20 bp, synthetic construct
  source 1..20: mol_type = other DNA
cctcaagggatcctcctgcc

SEQ ID NO: 235946 - DNA, 20 bp, synthetic construct
  source 1..20: mol_type = other DNA
gcctcaagggatcctcctgc

SEQ ID NO: 235947 - DNA, 20 bp, synthetic construct
  source 1..20: mol_type = other DNA
ggcctcaagggatcctcctg

SEQ ID NO: 235948 - DNA, 20 bp, synthetic construct
  source 1..20: mol_type = other DNA
tggcctcaagggatcctcct

SEQ ID NO: 235949 - DNA, 20 bp, synthetic construct
  source 1..20: mol_type = other DNA
ctggcctcaagggatcctcc

SEQ ID NO: 235950 - DNA, 20 bp, synthetic construct
  source 1..20: mol_type = other DNA
cctggcctcaagggatcctc

SEQ ID NO: 235951 - DNA, 20 bp, synthetic construct
  source 1..20: mol_type = other DNA
tcctggcctcaagggatcct

SEQ ID NO: 235952 - DNA, 20 bp, synthetic construct
  source 1..20: mol_type = other DNA
ttcctggcctcaagggatcc

SEQ ID NO: 235953 - DNA, 20 bp, synthetic construct
  source 1..20: mol_type = other DNA
attcctggcctcaagggatc

SEQ ID NO: 235954 - DNA, 20 bp, synthetic construct
  source 1..20: mol_type = other DNA
aattcctggcctcaagggat

SEQ ID NO: 235955 - DNA, 20 bp, synthetic construct
  source 1..20: mol_type = other DNA
aaattcctggcctcaaggga

SEQ ID NO: 235956 - DNA, 20 bp, synthetic construct
  source 1..20: mol_type = other DNA
caaattcctggcctcaaggg

SEQ ID NO: 235957 - DNA, 20 bp, synthetic construct
  source 1..20: mol_type = other DNA
tcaaattcctggcctcaagg

SEQ ID NO: 235958 - DNA, 20 bp, synthetic construct
  source 1..20: mol_type = other DNA
ctcaaattcctggcctcaag

SEQ ID NO: 235959 - DNA, 20 bp, synthetic construct
  source 1..20: mol_type = other DNA
tctcaaattcctggcctcaa

SEQ ID NO: 235960 - DNA, 20 bp, synthetic construct
  source 1..20: mol_type = other DNA
gtctcaaattcctggcctca

SEQ ID NO: 235961 - DNA, 20 bp, synthetic construct
  source 1..20: mol_type = other DNA
ggtctcaaattcctggcctc

SEQ ID NO: 235962 - DNA, 20 bp, synthetic construct
  source 1..20: mol_type = other DNA
cggtctcaaattcctggcct

SEQ ID NO: 235963 - DNA, 20 bp, synthetic construct
  source 1..20: mol_type = other DNA
ccggtctcaaattcctggcc

SEQ ID NO: 235964 - DNA, 20 bp, synthetic construct
  source 1..20: mol_type = other DNA
gccggtctcaaattcctggc

SEQ ID NO: 235965 - DNA, 20 bp, synthetic construct
  source 1..20: mol_type = other DNA
ggccggtctcaaattcctgg

SEQ ID NO: 235966 - DNA, 20 bp, synthetic construct
  source 1..20: mol_type = other DNA
aggccggtctcaaattcctg

SEQ ID NO: 235967 - DNA, 20 bp, synthetic construct
  source 1..20: mol_type = other DNA
caggccggtctcaaattcct

SEQ ID NO: 235968 - DNA, 20 bp, synthetic construct
  source 1..20: mol_type = other DNA
ccaggccggtctcaaattcc

SEQ ID NO: 235969 - DNA, 20 bp, synthetic construct
  source 1..20: mol_type = other DNA
cccaggccggtctcaaattc

SEQ ID NO: 235970 - DNA, 20 bp, synthetic construct
  source 1..20: mol_type = other DNA
gcccaggccggtctcaaatt

SEQ ID NO: 235971 - DNA, 20 bp, synthetic construct
  source 1..20: mol_type = other DNA
tgcccaggccggtctcaaat

SEQ ID NO: 235972 - DNA, 20 bp, synthetic construct
  source 1..20: mol_type = other DNA
ttgcccaggccggtctcaaa

SEQ ID NO: 235973 - DNA, 20 bp, synthetic construct
  source 1..20: mol_type = other DNA
gttgcccaggccggtctcaa

SEQ ID NO: 235974 - DNA, 20 bp, synthetic construct
  source 1..20: mol_type = other DNA
tgttgcccaggccggtctca

SEQ ID NO: 235975 - DNA, 20 bp, synthetic construct
  source 1..20: mol_type = other DNA
atgttgcccaggccggtctc

SEQ ID NO: 235976 - DNA, 20 bp, synthetic construct
  source 1..20: mol_type = other DNA
tatgttgcccaggccggtct

SEQ ID NO: 235977 - DNA, 20 bp, synthetic construct
  source 1..20: mol_type = other DNA
ctatgttgcccaggccggtc

SEQ ID NO: 235978 - DNA, 20 bp, synthetic construct
  source 1..20: mol_type = other DNA
gctatgttgcccaggccggt

SEQ ID NO: 235979 - DNA, 20 bp, synthetic construct
  source 1..20: mol_type = other DNA
tgctatgttgcccaggccgg

SEQ ID NO: 235980 - DNA, 20 bp, synthetic construct
  source 1..20: mol_type = other DNA
ttgctatgttgcccaggccg

SEQ ID NO: 235981 - DNA, 20 bp, synthetic construct
  source 1..20: mol_type = other DNA
cttgctatgttgcccaggcc

SEQ ID NO: 235982 - DNA, 20 bp, synthetic construct
  source 1..20: mol_type = other DNA
tcttgctatgttgcccaggc

SEQ ID NO: 235983 - DNA, 20 bp, synthetic construct
  source 1..20: mol_type = other DNA
gtcttgctatgttgcccagg

SEQ ID NO: 235984 - DNA, 20 bp, synthetic construct
  source 1..20: mol_type = other DNA
ggtcttgctatgttgcccag

SEQ ID NO: 235985 - DNA, 20 bp, synthetic construct
  source 1..20: mol_type = other DNA
gggtcttgctatgttgccca

SEQ ID NO: 235986 - DNA, 20 bp, synthetic construct
  source 1..20: mol_type = other DNA
ggggtcttgctatgttgccc

SEQ ID NO: 235987 - DNA, 20 bp, synthetic construct
  source 1..20: mol_type = other DNA
cggggtcttgctatgttgcc

SEQ ID NO: 235988 - DNA, 20 bp, synthetic construct
  source 1..20: mol_type = other DNA
acggggtcttgctatgttgc

SEQ ID NO: 235989 - DNA, 20 bp, synthetic construct
  source 1..20: mol_type = other DNA
gacggggtcttgctatgttg

SEQ ID NO: 235990 - DNA, 20 bp, synthetic construct
  source 1..20: mol_type = other DNA
agacggggtcttgctatgtt

SEQ ID NO: 235991 - DNA, 20 bp, synthetic construct
  source 1..20: mol_type = other DNA
gagacggggtcttgctatgt

SEQ ID NO: 235992 - DNA, 20 bp, synthetic construct
  source 1..20: mol_type = other DNA
agagacggggtcttgctatg

SEQ ID NO: 235993 - DNA, 20 bp, synthetic construct
  source 1..20: mol_type = other DNA
tagagacggggtcttgctat

SEQ ID NO: 235994 - DNA, 20 bp, synthetic construct
  source 1..20: mol_type = other DNA
ttagagacggggtcttgcta

SEQ ID NO: 235995 - DNA, 20 bp, synthetic construct
  source 1..20: mol_type = other DNA
tttagagacggggtcttgct

SEQ ID NO: 235996 - DNA, 20 bp, synthetic construct
  source 1..20: mol_type = other DNA
ttttagagacggggtcttgc

SEQ ID NO: 235997 - DNA, 20 bp, synthetic construct
  source 1..20: mol_type = other DNA
attttagagacggggtcttg

SEQ ID NO: 235998 - DNA, 20 bp, synthetic construct
  source 1..20: mol_type = other DNA
tattttagagacggggtctt

SEQ ID NO: 235999 - DNA, 20 bp, synthetic construct
  source 1..20: mol_type = other DNA
ttattttagagacggggtct

SEQ ID NO: 236000 - DNA, 20 bp, synthetic construct
  source 1..20: mol_type = other DNA
attattttagagacggggtc

SEQ ID NO: 236001 - DNA, 20 bp, synthetic construct
  source 1..20: mol_type = other DNA
aattattttagagacggggt

SEQ ID NO: 236002 - DNA, 20 bp, synthetic construct
  source 1..20: mol_type = other DNA
aaattattttagagacgggg

SEQ ID NO: 236003 - DNA, 20 bp, synthetic construct
  source 1..20: mol_type = other DNA
taaattattttagagacggg

SEQ ID NO: 236004 - DNA, 20 bp, synthetic construct
  source 1..20: mol_type = other DNA
ttaaattattttagagacgg

SEQ ID NO: 236005 - DNA, 20 bp, synthetic construct
  source 1..20: mol_type = other DNA
tttaaattattttagagacg

SEQ ID NO: 236006 - DNA, 20 bp, synthetic construct
  source 1..20: mol_type = other DNA
ttttaaattattttagagac

SEQ ID NO: 236007 - DNA, 20 bp, synthetic construct
  source 1..20: mol_type = other DNA
tttttaaattattttagaga

SEQ ID NO: 236008 - DNA, 20 bp, synthetic construct
  source 1..20: mol_type = other DNA
atttttaaattattttagag

SEQ ID NO: 236009 - DNA, 20 bp, synthetic construct
  source 1..20: mol_type = other DNA
aatttttaaattattttaga

SEQ ID NO: 236010 - DNA, 20 bp, synthetic construct
  source 1..20: mol_type = other DNA
taatttttaaattattttag

SEQ ID NO: 236011 - DNA, 20 bp, synthetic construct
  source 1..20: mol_type = other DNA
ctaatttttaaattatttta

SEQ ID NO: 236012 - DNA, 20 bp, synthetic construct
  source 1..20: mol_type = other DNA
gctaatttttaaattatttt

SEQ ID NO: 236013 - DNA, 20 bp, synthetic construct
  source 1..20: mol_type = other DNA
ggctaatttttaaattattt

SEQ ID NO: 236014 - DNA, 20 bp, synthetic construct
  source 1..20: mol_type = other DNA
tggctaatttttaaattatt

SEQ ID NO: 236015 - DNA, 20 bp, synthetic construct
  source 1..20: mol_type = other DNA
ctggctaatttttaaattat

SEQ ID NO: 236016 - DNA, 20 bp, synthetic construct
  source 1..20: mol_type = other DNA
cctggctaatttttaaatta

SEQ ID NO: 236017 - DNA, 20 bp, synthetic construct
  source 1..20: mol_type = other DNA
acctggctaatttttaaatt

SEQ ID NO: 236018 - DNA, 20 bp, synthetic construct
  source 1..20: mol_type = other DNA
cacctggctaatttttaaat

SEQ ID NO: 236019 - DNA, 20 bp, synthetic construct
  source 1..20: mol_type = other DNA
acacctggctaatttttaaa

SEQ ID NO: 236020 - DNA, 20 bp, synthetic construct
  source 1..20: mol_type = other DNA
aacacctggctaatttttaa

SEQ ID NO: 236021 - DNA, 20 bp, synthetic construct
  source 1..20: mol_type = other DNA
caacacctggctaattttta

SEQ ID NO: 236022 - DNA, 20 bp, synthetic construct
  source 1..20: mol_type = other DNA
acaacacctggctaattttt

SEQ ID NO: 236023 - DNA, 20 bp, synthetic construct
  source 1..20: mol_type = other DNA
cacaacacctggctaatttt

SEQ ID NO: 236024 - DNA, 20 bp, synthetic construct
  source 1..20: mol_type = other DNA
ccacaacacctggctaattt

SEQ ID NO: 236025 - DNA, 20 bp, synthetic construct
  source 1..20: mol_type = other DNA
accacaacacctggctaatt

SEQ ID NO: 236026 - DNA, 20 bp, synthetic construct
  source 1..20: mol_type = other DNA
caccacaacacctggctaat

SEQ ID NO: 236027 - DNA, 20 bp, synthetic construct
  source 1..20: mol_type = other DNA
gcaccacaacacctggctaa

SEQ ID NO: 236028 - DNA, 20 bp, synthetic construct
  source 1..20: mol_type = other DNA
tgcaccacaacacctggcta

SEQ ID NO: 236029 - DNA, 20 bp, synthetic construct
  source 1..20: mol_type = other DNA
atgcaccacaacacctggct

SEQ ID NO: 236030 - DNA, 20 bp, synthetic construct
  source 1..20: mol_type = other DNA
catgcaccacaacacctggc

SEQ ID NO: 236031 - DNA, 20 bp, synthetic construct
  source 1..20: mol_type = other DNA
acatgcaccacaacacctgg

SEQ ID NO: 236032 - DNA, 20 bp, synthetic construct
  source 1..20: mol_type = other DNA
gacatgcaccacaacacctg

SEQ ID NO: 236033 - DNA, 20 bp, synthetic construct
  source 1..20: mol_type = other DNA
agacatgcaccacaacacct

SEQ ID NO: 236034 - DNA, 20 bp, synthetic construct
  source 1..20: mol_type = other DNA
tagacatgcaccacaacacc

SEQ ID NO: 236035 - DNA, 20 bp, synthetic construct
  source 1..20: mol_type = other DNA
atagacatgcaccacaacac

SEQ ID NO: 236036 - DNA, 20 bp, synthetic construct
  source 1..20: mol_type = other DNA
tatagacatgcaccacaaca

SEQ ID NO: 236037 - DNA, 20 bp, synthetic construct
  source 1..20: mol_type = other DNA
ctatagacatgcaccacaac

SEQ ID NO: 236038 - DNA, 20 bp, synthetic construct
  source 1..20: mol_type = other DNA
actatagacatgcaccacaa

SEQ ID NO: 236039 - DNA, 20 bp, synthetic construct
  source 1..20: mol_type = other DNA
gactatagacatgcaccaca

SEQ ID NO: 236040 - DNA, 20 bp, synthetic construct
  source 1..20: mol_type = other DNA
ggactatagacatgcaccac

SEQ ID NO: 236041 - DNA, 20 bp, synthetic construct
  source 1..20: mol_type = other DNA
aggactatagacatgcacca

SEQ ID NO: 236042 - DNA, 20 bp, synthetic construct
  source 1..20: mol_type = other DNA
taggactatagacatgcacc

SEQ ID NO: 236043 - DNA, 20 bp, synthetic construct
  source 1..20: mol_type = other DNA
ctaggactatagacatgcac

SEQ ID NO: 236044 - DNA, 20 bp, synthetic construct
  source 1..20: mol_type = other DNA
gctaggactatagacatgca

SEQ ID NO: 236045 - DNA, 20 bp, synthetic construct
  source 1..20: mol_type = other DNA
agctaggactatagacatgc

SEQ ID NO: 236046 - DNA, 20 bp, synthetic construct
  source 1..20: mol_type = other DNA
tagctaggactatagacatg

SEQ ID NO: 236047 - DNA, 20 bp, synthetic construct
  source 1..20: mol_type = other DNA
gtagctaggactatagacat

SEQ ID NO: 236048 - DNA, 20 bp, synthetic construct
  source 1..20: mol_type = other DNA
agtagctaggactatagaca

SEQ ID NO: 236049 - DNA, 20 bp, synthetic construct
  source 1..20: mol_type = other DNA
gagtagctaggactatagac

SEQ ID NO: 236050 - DNA, 20 bp, synthetic construct
  source 1..20: mol_type = other DNA
tgagtagctaggactataga

SEQ ID NO: 236051 - DNA, 20 bp, synthetic construct
  source 1..20: mol_type = other DNA
ctgagtagctaggactatag

SEQ ID NO: 236052 - DNA, 20 bp, synthetic construct
  source 1..20: mol_type = other DNA
cctgagtagctaggactata

SEQ ID NO: 236053 - DNA, 20 bp, synthetic construct
  source 1..20: mol_type = other DNA
tcctgagtagctaggactat

SEQ ID NO: 236054 - DNA, 20 bp, synthetic construct
  source 1..20: mol_type = other DNA
atcctgagtagctaggacta

SEQ ID NO: 236055 - DNA, 20 bp, synthetic construct
  source 1..20: mol_type = other DNA
catcctgagtagctaggact

SEQ ID NO: 236056 - DNA, 20 bp, synthetic construct
  source 1..20: mol_type = other DNA
gcatcctgagtagctaggac

SEQ ID NO: 236057 - DNA, 20 bp, synthetic construct
  source 1..20: mol_type = other DNA
agcatcctgagtagctagga

SEQ ID NO: 236058 - DNA, 20 bp, synthetic construct
  source 1..20: mol_type = other DNA
cagcatcctgagtagctagg

SEQ ID NO: 236059 - DNA, 20 bp, synthetic construct
  source 1..20: mol_type = other DNA
tcagcatcctgagtagctag

SEQ ID NO: 236060 - DNA, 20 bp, synthetic construct
  source 1..20: mol_type = other DNA
ctcagcatcctgagtagcta

SEQ ID NO: 236061 - DNA, 20 bp, synthetic construct
  source 1..20: mol_type = other DNA
cctcagcatcctgagtagct

SEQ ID NO: 236062 - DNA, 20 bp, synthetic construct
  source 1..20: mol_type = other DNA
gcctcagcatcctgagtagc

SEQ ID NO: 236063 - DNA, 20 bp, synthetic construct
  source 1..20: mol_type = other DNA
tgcctcagcatcctgagtag

SEQ ID NO: 236064 - DNA, 20 bp, synthetic construct
  source 1..20: mol_type = other DNA
ctgcctcagcatcctgagta

SEQ ID NO: 236065 - DNA, 20 bp, synthetic construct
  source 1..20: mol_type = other DNA
tctgcctcagcatcctgagt

SEQ ID NO: 236066 - DNA, 20 bp, synthetic construct
  source 1..20: mol_type = other DNA
ttctgcctcagcatcctgag

SEQ ID NO: 236067 - DNA, 20 bp, synthetic construct
  source 1..20: mol_type = other DNA
cttctgcctcagcatcctga

SEQ ID NO: 236068 - DNA, 20 bp, synthetic construct
  source 1..20: mol_type = other DNA
ccttctgcctcagcatcctg

SEQ ID NO: 236069 - DNA, 20 bp, synthetic construct
  source 1..20: mol_type = other DNA
tccttctgcctcagcatcct

SEQ ID NO: 236070 - DNA, 20 bp, synthetic construct
  source 1..20: mol_type = other DNA
atccttctgcctcagcatcc

SEQ ID NO: 236071 - DNA, 20 bp, synthetic construct
  source 1..20: mol_type = other DNA
gatccttctgcctcagcatc

SEQ ID NO: 236072 - DNA, 20 bp, synthetic construct
  source 1..20: mol_type = other DNA
tgatccttctgcctcagcat

SEQ ID NO: 236073 - DNA, 20 bp, synthetic construct
  source 1..20: mol_type = other DNA
gtgatccttctgcctcagca

SEQ ID NO: 236074 - DNA, 20 bp, synthetic construct
  source 1..20: mol_type = other DNA
agtgatccttctgcctcagc

SEQ ID NO: 236075 - DNA, 20 bp, synthetic construct
  source 1..20: mol_type = other DNA
aagtgatccttctgcctcag

SEQ ID NO: 236076 - DNA, 20 bp, synthetic construct
  source 1..20: mol_type = other DNA
caagtgatccttctgcctca

SEQ ID NO: 236077 - DNA, 20 bp, synthetic construct
  source 1..20: mol_type = other DNA
tcaagtgatccttctgcctc

SEQ ID NO: 236078 - DNA, 20 bp, synthetic construct
  source 1..20: mol_type = other DNA
ctcaagtgatccttctgcct

SEQ ID NO: 236079 - DNA, 20 bp, synthetic construct
  source 1..20: mol_type = other DNA
gctcaagtgatccttctgcc

SEQ ID NO: 236080 - DNA, 20 bp, synthetic construct
  source 1..20: mol_type = other DNA
ggctcaagtgatccttctgc

SEQ ID NO: 236081 - DNA, 20 bp, synthetic construct
  source 1..20: mol_type = other DNA
gggctcaagtgatccttctg

SEQ ID NO: 236082 - DNA, 20 bp, synthetic construct
  source 1..20: mol_type = other DNA
tgggctcaagtgatccttct

SEQ ID NO: 236083 - DNA, 20 bp, synthetic construct
  source 1..20: mol_type = other DNA
ctgggctcaagtgatccttc

SEQ ID NO: 236084 - DNA, 20 bp, synthetic construct
  source 1..20: mol_type = other DNA
cctgggctcaagtgatcctt

SEQ ID NO: 236085 - DNA, 20 bp, synthetic construct
  source 1..20: mol_type = other DNA
tcctgggctcaagtgatcct

SEQ ID NO: 236086 - DNA, 20 bp, synthetic construct
  source 1..20: mol_type = other DNA
ctcctgggctcaagtgatcc

SEQ ID NO: 236087 - DNA, 20 bp, synthetic construct
  source 1..20: mol_type = other DNA
actcctgggctcaagtgatc

SEQ ID NO: 236088 - DNA, 20 bp, synthetic construct
  source 1..20: mol_type = other DNA
aactcctgggctcaagtgat

SEQ ID NO: 236089 - DNA, 20 bp, synthetic construct
  source 1..20: mol_type = other DNA
gaactcctgggctcaagtga

SEQ ID NO: 236090 - DNA, 20 bp, synthetic construct
  source 1..20: mol_type = other DNA
tgaactcctgggctcaagtg

SEQ ID NO: 236091 - DNA, 20 bp, synthetic construct
  source 1..20: mol_type = other DNA
ttgaactcctgggctcaagt

SEQ ID NO: 236092 - DNA, 20 bp, synthetic construct
  source 1..20: mol_type = other DNA
cttgaactcctgggctcaag

SEQ ID NO: 236093 - DNA, 20 bp, synthetic construct
  source 1..20: mol_type = other DNA
ccttgaactcctgggctcaa

SEQ ID NO: 236094 - DNA, 20 bp, synthetic construct
  source 1..20: mol_type = other DNA
accttgaactcctgggctca

SEQ ID NO: 236095 - DNA, 20 bp, synthetic construct
  source 1..20: mol_type = other DNA
aaccttgaactcctgggctc

SEQ ID NO: 236096 - DNA, 20 bp, synthetic construct
  source 1..20: mol_type = other DNA
caaccttgaactcctgggct

SEQ ID NO: 236097 - DNA, 20 bp, synthetic construct
  source 1..20: mol_type = other DNA
gcaaccttgaactcctgggc

SEQ ID NO: 236098 - DNA, 20 bp, synthetic construct
  source 1..20: mol_type = other DNA
tgcaaccttgaactcctggg

SEQ ID NO: 236099 - DNA, 20 bp, synthetic construct
  source 1..20: mol_type = other DNA
ctgcaaccttgaactcctgg

SEQ ID NO: 236100 - DNA, 20 bp, synthetic construct
  source 1..20: mol_type = other DNA
actgcaaccttgaactcctg

SEQ ID NO: 236101 - DNA, 20 bp, synthetic construct
  source 1..20: mol_type = other DNA
tactgcaaccttgaactcct

SEQ ID NO: 236102 - DNA, 20 bp, synthetic construct
  source 1..20: mol_type = other DNA
ttactgcaaccttgaactcc

SEQ ID NO: 236103 - DNA, 20 bp, synthetic construct
  source 1..20: mol_type = other DNA
cttactgcaaccttgaactc

SEQ ID NO: 236104 - DNA, 20 bp, synthetic construct
  source 1..20: mol_type = other DNA
gcttactgcaaccttgaact

SEQ ID NO: 236105 - DNA, 20 bp, synthetic construct
  source 1..20: mol_type = other DNA
agcttactgcaaccttgaac

SEQ ID NO: 236106 - DNA, 20 bp, synthetic construct
  source 1..20: mol_type = other DNA
cagcttactgcaaccttgaa

SEQ ID NO: 236107 - DNA, 20 bp, synthetic construct
  source 1..20: mol_type = other DNA
acagcttactgcaaccttga

SEQ ID NO: 236108 - DNA, 20 bp, synthetic construct
  source 1..20: mol_type = other DNA
cacagcttactgcaaccttg

SEQ ID NO: 236109 - DNA, 20 bp, synthetic construct
  source 1..20: mol_type = other DNA
tcacagcttactgcaacctt

SEQ ID NO: 236110 - DNA, 20 bp, synthetic construct
  source 1..20: mol_type = other DNA
atcacagcttactgcaacct

SEQ ID NO: 236111 - DNA, 20 bp, synthetic construct
  source 1..20: mol_type = other DNA
aatcacagcttactgcaacc

SEQ ID NO: 236112 - DNA, 20 bp, synthetic construct
  source 1..20: mol_type = other DNA
taatcacagcttactgcaac

SEQ ID NO: 236113 - DNA, 20 bp, synthetic construct
  source 1..20: mol_type = other DNA
ataatcacagcttactgcaa

SEQ ID NO: 236114 - DNA, 20 bp, synthetic construct
  source 1..20: mol_type = other DNA
tataatcacagcttactgca

SEQ ID NO: 236115 - DNA, 20 bp, synthetic construct
  source 1..20: mol_type = other DNA
ttataatcacagcttactgc

SEQ ID NO: 236116 - DNA, 20 bp, synthetic construct
  source 1..20: mol_type = other DNA
tttataatcacagcttactg

SEQ ID NO: 236117 - DNA, 20 bp, synthetic construct
  source 1..20: mol_type = other DNA
ttttataatcacagcttact

SEQ ID NO: 236118 - DNA, 20 bp, synthetic construct
  source 1..20: mol_type = other DNA
gttttataatcacagcttac

SEQ ID NO: 236119 - DNA, 20 bp, synthetic construct
  source 1..20: mol_type = other DNA
agttttataatcacagctta

SEQ ID NO: 236120 - DNA, 20 bp, synthetic construct
  source 1..20: mol_type = other DNA
cagttttataatcacagctt

SEQ ID NO: 236121 - DNA, 20 bp, synthetic construct
  source 1..20: mol_type = other DNA
gcagttttataatcacagct

SEQ ID NO: 236122 - DNA, 20 bp, synthetic construct
  source 1..20: mol_type = other DNA
tgcagttttataatcacagc

SEQ ID NO: 236123 - DNA, 20 bp, synthetic construct
  source 1..20: mol_type = other DNA
gtgcagttttataatcacag

SEQ ID NO: 236124 - DNA, 20 bp, synthetic construct
  source 1..20: mol_type = other DNA
agtgcagttttataatcaca

SEQ ID NO: 236125 - DNA, 20 bp, synthetic construct
  source 1..20: mol_type = other DNA
gagtgcagttttataatcac

SEQ ID NO: 236126 - DNA, 20 bp, synthetic construct
  source 1..20: mol_type = other DNA
ggagtgcagttttataatca

SEQ ID NO: 236127 - DNA, 20 bp, synthetic construct
  source 1..20: mol_type = other DNA
tggagtgcagttttataatc

SEQ ID NO: 236128 - DNA, 20 bp, synthetic construct
  source 1..20: mol_type = other DNA
ctggagtgcagttttataat

SEQ ID NO: 236129 - DNA, 20 bp, synthetic construct
  source 1..20: mol_type = other DNA
gctggagtgcagttttataa

SEQ ID NO: 236130 - DNA, 20 bp, synthetic construct
  source 1..20: mol_type = other DNA
ggctggagtgcagttttata

SEQ ID NO: 236131 - DNA, 20 bp, synthetic construct
  source 1..20: mol_type = other DNA
aggctggagtgcagttttat

SEQ ID NO: 236132 - DNA, 20 bp, synthetic construct
  source 1..20: mol_type = other DNA
caggctggagtgcagtttta

SEQ ID NO: 236133 - DNA, 20 bp, synthetic construct
  source 1..20: mol_type = other DNA
tcaggctggagtgcagtttt

SEQ ID NO: 236134 - DNA, 20 bp, synthetic construct
  source 1..20: mol_type = other DNA
ctcaggctggagtgcagttt

SEQ ID NO: 236135 - DNA, 20 bp, synthetic construct
  source 1..20: mol_type = other DNA
gctcaggctggagtgcagtt

SEQ ID NO: 236136 - DNA, 20 bp, synthetic construct
  source 1..20: mol_type = other DNA
tgctcaggctggagtgcagt

SEQ ID NO: 236137 - DNA, 20 bp, synthetic construct
  source 1..20: mol_type = other DNA
ttgctcaggctggagtgcag

SEQ ID NO: 236138 - DNA, 20 bp, synthetic construct
  source 1..20: mol_type = other DNA
gttgctcaggctggagtgca

SEQ ID NO: 236139 - DNA, 20 bp, synthetic construct
  source 1..20: mol_type = other DNA
tgttgctcaggctggagtgc

SEQ ID NO: 236140 - DNA, 20 bp, synthetic construct
  source 1..20: mol_type = other DNA
ctgttgctcaggctggagtg

SEQ ID NO: 236141 - DNA, 20 bp, synthetic construct
  source 1..20: mol_type = other DNA
tctgttgctcaggctggagt

SEQ ID NO: 236142 - DNA, 20 bp, synthetic construct
  source 1..20: mol_type = other DNA
ctctgttgctcaggctggag

SEQ ID NO: 236143 - DNA, 20 bp, synthetic construct
  source 1..20: mol_type = other DNA
gctctgttgctcaggctgga

SEQ ID NO: 236144 - DNA, 20 bp, synthetic construct
  source 1..20: mol_type = other DNA
tgctctgttgctcaggctgg

SEQ ID NO: 236145 - DNA, 20 bp, synthetic construct
  source 1..20: mol_type = other DNA
ttgctctgttgctcaggctg

SEQ ID NO: 236146 - DNA, 20 bp, synthetic construct
  source 1..20: mol_type = other DNA
cttgctctgttgctcaggct

SEQ ID NO: 236147 - DNA, 20 bp, synthetic construct
  source 1..20: mol_type = other DNA
tcttgctctgttgctcaggc

SEQ ID NO: 236148 - DNA, 20 bp, synthetic construct
  source 1..20: mol_type = other DNA
gtcttgctctgttgctcagg

SEQ ID NO: 236149 - DNA, 20 bp, synthetic construct
  source 1..20: mol_type = other DNA
ggtcttgctctgttgctcag

SEQ ID NO: 236150 - DNA, 20 bp, synthetic construct
  source 1..20: mol_type = other DNA
gggtcttgctctgttgctca

SEQ ID NO: 236151 - DNA, 20 bp, synthetic construct
  source 1..20: mol_type = other DNA
agggtcttgctctgttgctc

SEQ ID NO: 236152 - DNA, 20 bp, synthetic construct
  source 1..20: mol_type = other DNA
cagggtcttgctctgttgct

SEQ ID NO: 236153 - DNA, 20 bp, synthetic construct
  source 1..20: mol_type = other DNA
acagggtcttgctctgttgc

SEQ ID NO: 236154 - DNA, 20 bp, synthetic construct
  source 1..20: mol_type = other DNA
gacagggtcttgctctgttg

SEQ ID NO: 236155 - DNA, 20 bp, synthetic construct
  source 1..20: mol_type = other DNA
tgacagggtcttgctctgtt

SEQ ID NO: 236156 - DNA, 20 bp, synthetic construct
  source 1..20: mol_type = other DNA
ttgacagggtcttgctctgt

SEQ ID NO: 236157 - DNA, 20 bp, synthetic construct
  source 1..20: mol_type = other DNA
tttgacagggtcttgctctg

SEQ ID NO: 236158 - DNA, 20 bp, synthetic construct
  source 1..20: mol_type = other DNA
ttttgacagggtcttgctct

SEQ ID NO: 236159 - DNA, 20 bp, synthetic construct
  source 1..20: mol_type = other DNA
tttttgacagggtcttgctc

SEQ ID NO: 236160 - DNA, 20 bp, synthetic construct
  source 1..20: mol_type = other DNA
ttttttgacagggtcttgct

SEQ ID NO: 236161 - DNA, 20 bp, synthetic construct
  source 1..20: mol_type = other DNA
tttttttgacagggtcttgc

SEQ ID NO: 236162 - DNA, 20 bp, synthetic construct
  source 1..20: mol_type = other DNA
ttttttttgacagggtcttg

SEQ ID NO: 236163 - DNA, 20 bp, synthetic construct
  source 1..20: mol_type = other DNA
tttttttttgacagggtctt

SEQ ID NO: 236164 - DNA, 20 bp, synthetic construct
  source 1..20: mol_type = other DNA
ttttttttttgacagggtct

SEQ ID NO: 236165 - DNA, 20 bp, synthetic construct
  source 1..20: mol_type = other DNA
cttttttttttgacagggtc

SEQ ID NO: 236166 - DNA, 20 bp, synthetic construct
  source 1..20: mol_type = other DNA
tcttttttttttgacagggt

SEQ ID NO: 236167 - DNA, 20 bp, synthetic construct
  source 1..20: mol_type = other DNA
ttcttttttttttgacaggg

SEQ ID NO: 236168 - DNA, 20 bp, synthetic construct
  source 1..20: mol_type = other DNA
tttcttttttttttgacagg

SEQ ID NO: 236169 - DNA, 20 bp, synthetic construct
  source 1..20: mol_type = other DNA
ttttcttttttttttgacag

SEQ ID NO: 236170 - DNA, 20 bp, synthetic construct
  source 1..20: mol_type = other DNA
cttttcttttttttttgaca

SEQ ID NO: 236171 - DNA, 20 bp, synthetic construct
  source 1..20: mol_type = other DNA
tcttttcttttttttttgac

SEQ ID NO: 236172 - DNA, 20 bp, synthetic construct
  source 1..20: mol_type = other DNA
ttcttttcttttttttttga

SEQ ID NO: 236173 - DNA, 20 bp, synthetic construct
  source 1..20: mol_type = other DNA
tttcttttcttttttttttg

SEQ ID NO: 236174 - DNA, 20 bp, synthetic construct
  source 1..20: mol_type = other DNA
ttttcttttctttttttttt

SEQ ID NO: 236175 - DNA, 20 bp, synthetic construct
  source 1..20: mol_type = other DNA
tttttcttttcttttttttt

SEQ ID NO: 236176 - DNA, 20 bp, synthetic construct
  source 1..20: mol_type = other DNA
ttttttcttttctttttttt

SEQ ID NO: 236177 - DNA, 20 bp, synthetic construct
  source 1..20: mol_type = other DNA
cttttttcttttcttttttt

SEQ ID NO: 236178 - DNA, 20 bp, synthetic construct
  source 1..20: mol_type = other DNA
tcttttttcttttctttttt

SEQ ID NO: 236179 - DNA, 20 bp, synthetic construct
  source 1..20: mol_type = other DNA
ttcttttttcttttcttttt

SEQ ID NO: 236180 - DNA, 20 bp, synthetic construct
  source 1..20: mol_type = other DNA
tttcttttttcttttctttt

SEQ ID NO: 236181 - DNA, 20 bp, synthetic construct
  source 1..20: mol_type = other DNA
ctttcttttttcttttcttt

SEQ ID NO: 236182 - DNA, 20 bp, synthetic construct
  source 1..20: mol_type = other DNA
tctttcttttttcttttctt

SEQ ID NO: 236183 - DNA, 20 bp, synthetic construct
  source 1..20: mol_type = other DNA
ttctttcttttttcttttct

SEQ ID NO: 236184 - DNA, 20 bp, synthetic construct
  source 1..20: mol_type = other DNA
tttctttcttttttcttttc

SEQ ID NO: 236185 - DNA, 20 bp, synthetic construct
  source 1..20: mol_type = other DNA
ctttctttcttttttctttt

SEQ ID NO: 236186 - DNA, 20 bp, synthetic construct
  source 1..20: mol_type = other DNA
tctttctttcttttttcttt

SEQ ID NO: 236187 - DNA, 20 bp, synthetic construct
  source 1..20: mol_type = other DNA
ttctttctttcttttttctt

SEQ ID NO: 236188 - DNA, 20 bp, synthetic construct
  source 1..20: mol_type = other DNA
tttctttctttcttttttct

SEQ ID NO: 236189 - DNA, 20 bp, synthetic construct
  source 1..20: mol_type = other DNA
atttctttctttcttttttc

SEQ ID NO: 236190 - DNA, 20 bp, synthetic construct
  source 1..20: mol_type = other DNA
aatttctttctttctttttt

SEQ ID NO: 236191 - DNA, 20 bp, synthetic construct
  source 1..20: mol_type = other DNA
aaatttctttctttcttttt

SEQ ID NO: 236192 - DNA, 20 bp, synthetic construct
  source 1..20: mol_type = other DNA
taaatttctttctttctttt

SEQ ID NO: 236193 - DNA, 20 bp, synthetic construct
  source 1..20: mol_type = other DNA
gtaaatttctttctttcttt

SEQ ID NO: 236194 - DNA, 20 bp, synthetic construct
  source 1..20: mol_type = other DNA
ggtaaatttctttctttctt

SEQ ID NO: 236195 - DNA, 20 bp, synthetic construct
  source 1..20: mol_type = other DNA
aggtaaatttctttctttct

SEQ ID NO: 236196 - DNA, 20 bp, synthetic construct
  source 1..20: mol_type = other DNA
aaggtaaatttctttctttc

SEQ ID NO: 236197 - DNA, 20 bp, synthetic construct
  source 1..20: mol_type = other DNA
caaggtaaatttctttcttt

SEQ ID NO: 236198 - DNA, 20 bp, synthetic construct
  source 1..20: mol_type = other DNA
tcaaggtaaatttctttctt

SEQ ID NO: 236199 - DNA, 20 bp, synthetic construct
  source 1..20: mol_type = other DNA
ctcaaggtaaatttctttct

SEQ ID NO: 236200 - DNA, 20 bp, synthetic construct
  source 1..20: mol_type = other DNA
actcaaggtaaatttctttc

SEQ ID NO: 236201 - DNA, 20 bp, synthetic construct
  source 1..20: mol_type = other DNA
aactcaaggtaaatttcttt

SEQ ID NO: 236202 - DNA, 20 bp, synthetic construct
  source 1..20: mol_type = other DNA
taactcaaggtaaatttctt

SEQ ID NO: 236203 - DNA, 20 bp, synthetic construct
  source 1..20: mol_type = other DNA
gtaactcaaggtaaatttct

SEQ ID NO: 236204 - DNA, 20 bp, synthetic construct
  source 1..20: mol_type = other DNA
ggtaactcaaggtaaatttc

SEQ ID NO: 236205 - DNA, 20 bp, synthetic construct
  source 1..20: mol_type = other DNA
gggtaactcaaggtaaattt

SEQ ID NO: 236206 - DNA, 20 bp, synthetic construct
  source 1..20: mol_type = other DNA
tgggtaactcaaggtaaatt

SEQ ID NO: 236207 - DNA, 20 bp, synthetic construct
  source 1..20: mol_type = other DNA
gtgggtaactcaaggtaaat

SEQ ID NO: 236208 - DNA, 20 bp, synthetic construct
  source 1..20: mol_type = other DNA
tgtgggtaactcaaggtaaa

SEQ ID NO: 236209 - DNA, 20 bp, synthetic construct
  source 1..20: mol_type = other DNA
atgtgggtaactcaaggtaa

SEQ ID NO: 236210 - DNA, 20 bp, synthetic construct
  source 1..20: mol_type = other DNA
catgtgggtaactcaaggta

SEQ ID NO: 236211 - DNA, 20 bp, synthetic construct
  source 1..20: mol_type = other DNA
tcatgtgggtaactcaaggt

SEQ ID NO: 236212 - DNA, 20 bp, synthetic construct
  source 1..20: mol_type = other DNA
ctcatgtgggtaactcaagg

SEQ ID NO: 236213 - DNA, 20 bp, synthetic construct
  source 1..20: mol_type = other DNA
actcatgtgggtaactcaag

SEQ ID NO: 236214 - DNA, 20 bp, synthetic construct
  source 1..20: mol_type = other DNA
cactcatgtgggtaactcaa

SEQ ID NO: 236215 - DNA, 20 bp, synthetic construct
  source 1..20: mol_type = other DNA
tcactcatgtgggtaactca

SEQ ID NO: 236216 - DNA, 20 bp, synthetic construct
  source 1..20: mol_type = other DNA
ttcactcatgtgggtaactc

SEQ ID NO: 236217 - DNA, 20 bp, synthetic construct
  source 1..20: mol_type = other DNA
attcactcatgtgggtaact

SEQ ID NO: 236218 - DNA, 20 bp, synthetic construct
  source 1..20: mol_type = other DNA
cattcactcatgtgggtaac

SEQ ID NO: 236219 - DNA, 20 bp, synthetic construct
  source 1..20: mol_type = other DNA
acattcactcatgtgggtaa

SEQ ID NO: 236220 - DNA, 20 bp, synthetic construct
  source 1..20: mol_type = other DNA
tacattcactcatgtgggta

SEQ ID NO: 236221 - DNA, 20 bp, synthetic construct
  source 1..20: mol_type = other DNA
ctacattcactcatgtgggt

SEQ ID NO: 236222 - DNA, 20 bp, synthetic construct
  source 1..20: mol_type = other DNA
cctacattcactcatgtggg

SEQ ID NO: 236223 - DNA, 20 bp, synthetic construct
  source 1..20: mol_type = other DNA
ccctacattcactcatgtgg

SEQ ID NO: 236224 - DNA, 20 bp, synthetic construct
  source 1..20: mol_type = other DNA
tccctacattcactcatgtg

SEQ ID NO: 236225 - DNA, 20 bp, synthetic construct
  source 1..20: mol_type = other DNA
gtccctacattcactcatgt

SEQ ID NO: 236226 - DNA, 20 bp, synthetic construct
  source 1..20: mol_type = other DNA
tgtccctacattcactcatg

SEQ ID NO: 236227 - DNA, 20 bp, synthetic construct
  source 1..20: mol_type = other DNA
ctgtccctacattcactcat

SEQ ID NO: 236228 - DNA, 20 bp, synthetic construct
  source 1..20: mol_type = other DNA
tctgtccctacattcactca

SEQ ID NO: 236229 - DNA, 20 bp, synthetic construct
  source 1..20: mol_type = other DNA
ctctgtccctacattcactc

SEQ ID NO: 236230 - DNA, 20 bp, synthetic construct
  source 1..20: mol_type = other DNA
tctctgtccctacattcact

SEQ ID NO: 236231 - DNA, 20 bp, synthetic construct
  source 1..20: mol_type = other DNA
atctctgtccctacattcac

SEQ ID NO: 236232 - DNA, 20 bp, synthetic construct
  source 1..20: mol_type = other DNA
aatctctgtccctacattca

SEQ ID NO: 236233 - DNA, 20 bp, synthetic construct
  source 1..20: mol_type = other DNA
aaatctctgtccctacattc

SEQ ID NO: 236234 - DNA, 20 bp, synthetic construct
  source 1..20: mol_type = other DNA
aaaatctctgtccctacatt

SEQ ID NO: 236235 - DNA, 20 bp, synthetic construct
  source 1..20: mol_type = other DNA
taaaatctctgtccctacat

SEQ ID NO: 236236 - DNA, 20 bp, synthetic construct
  source 1..20: mol_type = other DNA
ctaaaatctctgtccctaca

SEQ ID NO: 236237 - DNA, 20 bp, synthetic construct
  source 1..20: mol_type = other DNA
cctaaaatctctgtccctac

SEQ ID NO: 236238 - DNA, 20 bp, synthetic construct
  source 1..20: mol_type = other DNA
ccctaaaatctctgtcccta

SEQ ID NO: 236239 - DNA, 20 bp, synthetic construct
  source 1..20: mol_type = other DNA
gccctaaaatctctgtccct

SEQ ID NO: 236240 - DNA, 20 bp, synthetic construct
  source 1..20: mol_type = other DNA
ggccctaaaatctctgtccc

SEQ ID NO: 236241 - DNA, 20 bp, synthetic construct
  source 1..20: mol_type = other DNA
aggccctaaaatctctgtcc

SEQ ID NO: 236242 - DNA, 20 bp, synthetic construct
  source 1..20: mol_type = other DNA
aaggccctaaaatctctgtc

SEQ ID NO: 236243 - DNA, 20 bp, synthetic construct
  source 1..20: mol_type = other DNA
taaggccctaaaatctctgt

SEQ ID NO: 236244 - DNA, 20 bp, synthetic construct
  source 1..20: mol_type = other DNA
ttaaggccctaaaatctctg

SEQ ID NO: 236245 - DNA, 20 bp, synthetic construct
  source 1..20: mol_type = other DNA
gttaaggccctaaaatctct

SEQ ID NO: 236246 - DNA, 20 bp, synthetic construct
  source 1..20: mol_type = other DNA
tgttaaggccctaaaatctc

SEQ ID NO: 236247 - DNA, 20 bp, synthetic construct
  source 1..20: mol_type = other DNA
ttgttaaggccctaaaatct

SEQ ID NO: 236248 - DNA, 20 bp, synthetic construct
  source 1..20: mol_type = other DNA
attgttaaggccctaaaatc

SEQ ID NO: 236249 - DNA, 20 bp, synthetic construct
  source 1..20: mol_type = other DNA
gattgttaaggccctaaaat

SEQ ID NO: 236250 - DNA, 20 bp, synthetic construct
  source 1..20: mol_type = other DNA
agattgttaaggccctaaaa

SEQ ID NO: 236251 - DNA, 20 bp, synthetic construct
  source 1..20: mol_type = other DNA
gagattgttaaggccctaaa

SEQ ID NO: 236252 - DNA, 20 bp, synthetic construct
  source 1..20: mol_type = other DNA
agagattgttaaggccctaa

SEQ ID NO: 236253 - DNA, 20 bp, synthetic construct
  source 1..20: mol_type = other DNA
gagagattgttaaggcccta

SEQ ID NO: 236254 - DNA, 20 bp, synthetic construct
  source 1..20: mol_type = other DNA
tgagagattgttaaggccct

SEQ ID NO: 236255 - DNA, 20 bp, synthetic construct
  source 1..20: mol_type = other DNA
ttgagagattgttaaggccc

SEQ ID NO: 236256 - DNA, 20 bp, synthetic construct
  source 1..20: mol_type = other DNA
tttgagagattgttaaggcc

SEQ ID NO: 236257 - DNA, 20 bp, synthetic construct
  source 1..20: mol_type = other DNA
atttgagagattgttaaggc

SEQ ID NO: 236258 - DNA, 20 bp, synthetic construct
  source 1..20: mol_type = other DNA
tatttgagagattgttaagg

SEQ ID NO: 236259 - DNA, 20 bp, synthetic construct
  source 1..20: mol_type = other DNA
gtatttgagagattgttaag

SEQ ID NO: 236260 - DNA, 20 bp, synthetic construct
  source 1..20: mol_type = other DNA
tgtatttgagagattgttaa

SEQ ID NO: 236261 - DNA, 20 bp, synthetic construct
  source 1..20: mol_type = other DNA
ctgtatttgagagattgtta

SEQ ID NO: 236262 - DNA, 20 bp, synthetic construct
  source 1..20: mol_type = other DNA
cctgtatttgagagattgtt

SEQ ID NO: 236263 - DNA, 20 bp, synthetic construct
  source 1..20: mol_type = other DNA
ccctgtatttgagagattgt

SEQ ID NO: 236264 - DNA, 20 bp, synthetic construct
  source 1..20: mol_type = other DNA
accctgtatttgagagattg

SEQ ID NO: 236265 - DNA, 20 bp, synthetic construct
  source 1..20: mol_type = other DNA
taccctgtatttgagagatt

SEQ ID NO: 236266 - DNA, 20 bp, synthetic construct
  source 1..20: mol_type = other DNA
gtaccctgtatttgagagat

SEQ ID NO: 236267 - DNA, 20 bp, synthetic construct
  source 1..20: mol_type = other DNA
agtaccctgtatttgagaga

SEQ ID NO: 236268 - DNA, 20 bp, synthetic construct
  source 1..20: mol_type = other DNA
aagtaccctgtatttgagag

SEQ ID NO: 236269 - DNA, 20 bp, synthetic construct
  source 1..20: mol_type = other DNA
aaagtaccctgtatttgaga

SEQ ID NO: 236270 - DNA, 20 bp, synthetic construct
  source 1..20: mol_type = other DNA
aaaagtaccctgtatttgag

SEQ ID NO: 236271 - DNA, 20 bp, synthetic construct
  source 1..20: mol_type = other DNA
aaaaagtaccctgtatttga

SEQ ID NO: 236272 - DNA, 20 bp, synthetic construct
  source 1..20: mol_type = other DNA
caaaaagtaccctgtatttg

SEQ ID NO: 236273 - DNA, 20 bp, synthetic construct
  source 1..20: mol_type = other DNA
tcaaaaagtaccctgtattt

SEQ ID NO: 236274 - DNA, 20 bp, synthetic construct
  source 1..20: mol_type = other DNA
ctcaaaaagtaccctgtatt

SEQ ID NO: 236275 - DNA, 20 bp, synthetic construct
  source 1..20: mol_type = other DNA
cctcaaaaagtaccctgtat

SEQ ID NO: 236276 - DNA, 20 bp, synthetic construct
  source 1..20: mol_type = other DNA
gcctcaaaaagtaccctgta

SEQ ID NO: 236277 - DNA, 20 bp, synthetic construct
  source 1..20: mol_type = other DNA
tgcctcaaaaagtaccctgt

SEQ ID NO: 236278 - DNA, 20 bp, synthetic construct
  source 1..20: mol_type = other DNA
atgcctcaaaaagtaccctg

SEQ ID NO: 236279 - DNA, 20 bp, synthetic construct
  source 1..20: mol_type = other DNA
aatgcctcaaaaagtaccct

SEQ ID NO: 236280 - DNA, 20 bp, synthetic construct
  source 1..20: mol_type = other DNA
taatgcctcaaaaagtaccc

SEQ ID NO: 236281 - DNA, 20 bp, synthetic construct
  source 1..20: mol_type = other DNA
ctaatgcctcaaaaagtacc

SEQ ID NO: 236282 - DNA, 20 bp, synthetic construct
  source 1..20: mol_type = other DNA
gctaatgcctcaaaaagtac

SEQ ID NO: 236283 - DNA, 20 bp, synthetic construct
  source 1..20: mol_type = other DNA
ggctaatgcctcaaaaagta

SEQ ID NO: 236284 - DNA, 20 bp, synthetic construct
  source 1..20: mol_type = other DNA
tggctaatgcctcaaaaagt

SEQ ID NO: 236285 - DNA, 20 bp, synthetic construct
  source 1..20: mol_type = other DNA
gtggctaatgcctcaaaaag

SEQ ID NO: 236286 - DNA, 20 bp, synthetic construct
  source 1..20: mol_type = other DNA
tgtggctaatgcctcaaaaa

SEQ ID NO: 236287 - DNA, 20 bp, synthetic construct
  source 1..20: mol_type = other DNA
gtgtggctaatgcctcaaaa

SEQ ID NO: 236288 - DNA, 20 bp, synthetic construct
  source 1..20: mol_type = other DNA
ggtgtggctaatgcctcaaa

SEQ ID NO: 236289 - DNA, 20 bp, synthetic construct
  source 1..20: mol_type = other DNA
aggtgtggctaatgcctcaa

SEQ ID NO: 236290 - DNA, 20 bp, synthetic construct
  source 1..20: mol_type = other DNA
caggtgtggctaatgcctca

SEQ ID NO: 236291 - DNA, 20 bp, synthetic construct
  source 1..20: mol_type = other DNA
acaggtgtggctaatgcctc

SEQ ID NO: 236292 - DNA, 20 bp, synthetic construct
  source 1..20: mol_type = other DNA
aacaggtgtggctaatgcct

SEQ ID NO: 236293 - DNA, 20 bp, synthetic construct
  source 1..20: mol_type = other DNA
taacaggtgtggctaatgcc

SEQ ID NO: 236294 - DNA, 20 bp, synthetic construct
  source 1..20: mol_type = other DNA
ctaacaggtgtggctaatgc

SEQ ID NO: 236295 - DNA, 20 bp, synthetic construct
  source 1..20: mol_type = other DNA
gctaacaggtgtggctaatg

SEQ ID NO: 236296 - DNA, 20 bp, synthetic construct
  source 1..20: mol_type = other DNA
agctaacaggtgtggctaat

SEQ ID NO: 236297 - DNA, 20 bp, synthetic construct
  source 1..20: mol_type = other DNA
aagctaacaggtgtggctaa

SEQ ID NO: 236298 - DNA, 20 bp, synthetic construct
  source 1..20: mol_type = other DNA
taagctaacaggtgtggcta

SEQ ID NO: 236299 - DNA, 20 bp, synthetic construct
  source 1..20: mol_type = other DNA
ataagctaacaggtgtggct

SEQ ID NO: 236300 - DNA, 20 bp, synthetic construct
  source 1..20: mol_type = other DNA
tataagctaacaggtgtggc

SEQ ID NO: 236301 - DNA, 20 bp, synthetic construct
  source 1..20: mol_type = other DNA
ttataagctaacaggtgtgg

SEQ ID NO: 236302 - DNA, 20 bp, synthetic construct
  source 1..20: mol_type = other DNA
tttataagctaacaggtgtg

SEQ ID NO: 236303 - DNA, 20 bp, synthetic construct
  source 1..20: mol_type = other DNA
atttataagctaacaggtgt

SEQ ID NO: 236304 - DNA, 20 bp, synthetic construct
  source 1..20: mol_type = other DNA
gatttataagctaacaggtg

SEQ ID NO: 236305 - DNA, 20 bp, synthetic construct
  source 1..20: mol_type = other DNA
tgatttataagctaacaggt

SEQ ID NO: 236306 - DNA, 20 bp, synthetic construct
  source 1..20: mol_type = other DNA
ctgatttataagctaacagg

SEQ ID NO: 236307 - DNA, 20 bp, synthetic construct
  source 1..20: mol_type = other DNA
actgatttataagctaacag

SEQ ID NO: 236308 - DNA, 20 bp, synthetic construct
  source 1..20: mol_type = other DNA
cactgatttataagctaaca

SEQ ID NO: 236309 - DNA, 20 bp, synthetic construct
  source 1..20: mol_type = other DNA
ccactgatttataagctaac

SEQ ID NO: 236310 - DNA, 20 bp, synthetic construct
  source 1..20: mol_type = other DNA
accactgatttataagctaa

SEQ ID NO: 236311 - DNA, 20 bp, synthetic construct
  source 1..20: mol_type = other DNA
taccactgatttataagcta

SEQ ID NO: 236312 - DNA, 20 bp, synthetic construct
  source 1..20: mol_type = other DNA
ataccactgatttataagct

SEQ ID NO: 236313 - DNA, 20 bp, synthetic construct
  source 1..20: mol_type = other DNA
aataccactgatttataagc

SEQ ID NO: 236314 - DNA, 20 bp, synthetic construct
  source 1..20: mol_type = other DNA
caataccactgatttataag

SEQ ID NO: 236315 - DNA, 20 bp, synthetic construct
  source 1..20: mol_type = other DNA
tcaataccactgatttataa

SEQ ID NO: 236316 - DNA, 20 bp, synthetic construct
  source 1..20: mol_type = other DNA
atcaataccactgatttata

SEQ ID NO: 236317 - DNA, 20 bp, synthetic construct
  source 1..20: mol_type = other DNA
aatcaataccactgatttat

SEQ ID NO: 236318 - DNA, 20 bp, synthetic construct
  source 1..20: mol_type = other DNA
taatcaataccactgattta

SEQ ID NO: 236319 - DNA, 20 bp, synthetic construct
  source 1..20: mol_type = other DNA
ctaatcaataccactgattt

SEQ ID NO: 236320 - DNA, 20 bp, synthetic construct
  source 1..20: mol_type = other DNA
gctaatcaataccactgatt

SEQ ID NO: 236321 - DNA, 20 bp, synthetic construct
  source 1..20: mol_type = other DNA
tgctaatcaataccactgat

SEQ ID NO: 236322 - DNA, 20 bp, synthetic construct
  source 1..20: mol_type = other DNA
atgctaatcaataccactga

SEQ ID NO: 236323 - DNA, 20 bp, synthetic construct
  source 1..20: mol_type = other DNA
catgctaatcaataccactg

SEQ ID NO: 236324 - DNA, 20 bp, synthetic construct
  source 1..20: mol_type = other DNA
acatgctaatcaataccact

SEQ ID NO: 236325 - DNA, 20 bp, synthetic construct
  source 1..20: mol_type = other DNA
tacatgctaatcaataccac

SEQ ID NO: 236326 - DNA, 20 bp, synthetic construct
  source 1..20: mol_type = other DNA
ttacatgctaatcaatacca

SEQ ID NO: 236327 - DNA, 20 bp, synthetic construct
  source 1..20: mol_type = other DNA
tttacatgctaatcaatacc

SEQ ID NO: 236328 - DNA, 20 bp, synthetic construct
  source 1..20: mol_type = other DNA
ttttacatgctaatcaatac

SEQ ID NO: 236329 - DNA, 20 bp, synthetic construct
  source 1..20: mol_type = other DNA
attttacatgctaatcaata

SEQ ID NO: 236330 - DNA, 20 bp, synthetic construct
  source 1..20: mol_type = other DNA
tattttacatgctaatcaat

SEQ ID NO: 236331 - DNA, 20 bp, synthetic construct
  source 1..20: mol_type = other DNA
atattttacatgctaatcaa

SEQ ID NO: 236332 - DNA, 20 bp, synthetic construct
  source 1..20: mol_type = other DNA
catattttacatgctaatca

SEQ ID NO: 236333 - DNA, 20 bp, synthetic construct
  source 1..20: mol_type = other DNA
acatattttacatgctaatc

SEQ ID NO: 236334 - DNA, 20 bp, synthetic construct
  source 1..20: mol_type = other DNA
cacatattttacatgctaat

SEQ ID NO: 236335 - DNA, 20 bp, synthetic construct
  source 1..20: mol_type = other DNA
tcacatattttacatgctaa

SEQ ID NO: 236336 - DNA, 20 bp, synthetic construct
  source 1..20: mol_type = other DNA
gtcacatattttacatgcta

SEQ ID NO: 236337 - DNA, 20 bp, synthetic construct
  source 1..20: mol_type = other DNA
agtcacatattttacatgct

SEQ ID NO: 236338 - DNA, 20 bp, synthetic construct
  source 1..20: mol_type = other DNA
aagtcacatattttacatgc

SEQ ID NO: 236339 - DNA, 20 bp, synthetic construct
  source 1..20: mol_type = other DNA
aaagtcacatattttacatg

SEQ ID NO: 236340 - DNA, 20 bp, synthetic construct
  source 1..20: mol_type = other DNA
taaagtcacatattttacat

SEQ ID NO: 236341 - DNA, 20 bp, synthetic construct
  source 1..20: mol_type = other DNA
ttaaagtcacatattttaca

SEQ ID NO: 236342 - DNA, 20 bp, synthetic construct
  source 1..20: mol_type = other DNA
tttaaagtcacatattttac

SEQ ID NO: 236343 - DNA, 20 bp, synthetic construct
  source 1..20: mol_type = other DNA
gtttaaagtcacatatttta

SEQ ID NO: 236344 - DNA, 20 bp, synthetic construct
  source 1..20: mol_type = other DNA
tgtttaaagtcacatatttt

SEQ ID NO: 236345 - DNA, 20 bp, synthetic construct
  source 1..20: mol_type = other DNA
atgtttaaagtcacatattt

SEQ ID NO: 236346 - DNA, 20 bp, synthetic construct
  source 1..20: mol_type = other DNA
aatgtttaaagtcacatatt

SEQ ID NO: 236347 - DNA, 20 bp, synthetic construct
  source 1..20: mol_type = other DNA
caatgtttaaagtcacatat

SEQ ID NO: 236348 - DNA, 20 bp, synthetic construct
  source 1..20: mol_type = other DNA
gcaatgtttaaagtcacata

SEQ ID NO: 236349 - DNA, 20 bp, synthetic construct
  source 1..20: mol_type = other DNA
agcaatgtttaaagtcacat

SEQ ID NO: 236350 - DNA, 20 bp, synthetic construct
  source 1..20: mol_type = other DNA
aagcaatgtttaaagtcaca

SEQ ID NO: 236351 - DNA, 20 bp, synthetic construct
  source 1..20: mol_type = other DNA
aaagcaatgtttaaagtcac

SEQ ID NO: 236352 - DNA, 20 bp, synthetic construct
  source 1..20: mol_type = other DNA
aaaagcaatgtttaaagtca

SEQ ID NO: 236353 - DNA, 20 bp, synthetic construct
  source 1..20: mol_type = other DNA
aaaaagcaatgtttaaagtc

SEQ ID NO: 236354 - DNA, 20 bp, synthetic construct
  source 1..20: mol_type = other DNA
taaaaagcaatgtttaaagt

SEQ ID NO: 236355 - DNA, 20 bp, synthetic construct
  source 1..20: mol_type = other DNA
ataaaaagcaatgtttaaag

SEQ ID NO: 236356 - DNA, 20 bp, synthetic construct
  source 1..20: mol_type = other DNA
gataaaaagcaatgtttaaa

SEQ ID NO: 236357 - DNA, 20 bp, synthetic construct
  source 1..20: mol_type = other DNA
agataaaaagcaatgtttaa

SEQ ID NO: 236358 - DNA, 20 bp, synthetic construct
  source 1..20: mol_type = other DNA
gagataaaaagcaatgttta

SEQ ID NO: 236359 - DNA, 20 bp, synthetic construct
  source 1..20: mol_type = other DNA
agagataaaaagcaatgttt

SEQ ID NO: 236360 - DNA, 20 bp, synthetic construct
  source 1..20: mol_type = other DNA
aagagataaaaagcaatgtt

SEQ ID NO: 236361 - DNA, 20 bp, synthetic construct
  source 1..20: mol_type = other DNA
taagagataaaaagcaatgt

SEQ ID NO: 236362 - DNA, 20 bp, synthetic construct
  source 1..20: mol_type = other DNA
gtaagagataaaaagcaatg

SEQ ID NO: 236363 - DNA, 20 bp, synthetic construct
  source 1..20: mol_type = other DNA
agtaagagataaaaagcaat

SEQ ID NO: 236364 - DNA, 20 bp, synthetic construct
  source 1..20: mol_type = other DNA
aagtaagagataaaaagcaa

SEQ ID NO: 236365 - DNA, 20 bp, synthetic construct
  source 1..20: mol_type = other DNA
taagtaagagataaaaagca

SEQ ID NO: 236366 - DNA, 20 bp, synthetic construct
  source 1..20: mol_type = other DNA
ctaagtaagagataaaaagc

SEQ ID NO: 236367 - DNA, 20 bp, synthetic construct
  source 1..20: mol_type = other DNA
tctaagtaagagataaaaag

SEQ ID NO: 236368 - DNA, 20 bp, synthetic construct
  source 1..20: mol_type = other DNA
atctaagtaagagataaaaa

SEQ ID NO: 236369 - DNA, 20 bp, synthetic construct
  source 1..20: mol_type = other DNA
gatctaagtaagagataaaa

SEQ ID NO: 236370 - DNA, 20 bp, synthetic construct
  source 1..20: mol_type = other DNA
tgatctaagtaagagataaa

SEQ ID NO: 236371 - DNA, 20 bp, synthetic construct
  source 1..20: mol_type = other DNA
ctgatctaagtaagagataa

SEQ ID NO: 236372 - DNA, 20 bp, synthetic construct
  source 1..20: mol_type = other DNA
cctgatctaagtaagagata

SEQ ID NO: 236373 - DNA, 20 bp, synthetic construct
  source 1..20: mol_type = other DNA
gcctgatctaagtaagagat

SEQ ID NO: 236374 - DNA, 20 bp, synthetic construct
  source 1..20: mol_type = other DNA
ggcctgatctaagtaagaga

SEQ ID NO: 236375 - DNA, 20 bp, synthetic construct
  source 1..20: mol_type = other DNA
aggcctgatctaagtaagag

SEQ ID NO: 236376 - DNA, 20 bp, synthetic construct
  source 1..20: mol_type = other DNA
caggcctgatctaagtaaga

SEQ ID NO: 236377 - DNA, 20 bp, synthetic construct
  source 1..20: mol_type = other DNA
tcaggcctgatctaagtaag

SEQ ID NO: 236378 - DNA, 20 bp, synthetic construct
  source 1..20: mol_type = other DNA
ctcaggcctgatctaagtaa

SEQ ID NO: 236379 - DNA, 20 bp, synthetic construct
  source 1..20: mol_type = other DNA
actcaggcctgatctaagta

SEQ ID NO: 236380 - DNA, 20 bp, synthetic construct
  source 1..20: mol_type = other DNA
cactcaggcctgatctaagt

SEQ ID NO: 236381 - DNA, 20 bp, synthetic construct
  source 1..20: mol_type = other DNA
ccactcaggcctgatctaag

SEQ ID NO: 236382 - DNA, 20 bp, synthetic construct
  source 1..20: mol_type = other DNA
gccactcaggcctgatctaa

SEQ ID NO: 236383 - DNA, 20 bp, synthetic construct
  source 1..20: mol_type = other DNA
ggccactcaggcctgatcta

SEQ ID NO: 236384 - DNA, 20 bp, synthetic construct
  source 1..20: mol_type = other DNA
aggccactcaggcctgatct

SEQ ID NO: 236385 - DNA, 20 bp, synthetic construct
  source 1..20: mol_type = other DNA
gaggccactcaggcctgatc

SEQ ID NO: 236386 - DNA, 20 bp, synthetic construct
  source 1..20: mol_type = other DNA
agaggccactcaggcctgat

SEQ ID NO: 236387 - DNA, 20 bp, synthetic construct
  source 1..20: mol_type = other DNA
gagaggccactcaggcctga

SEQ ID NO: 236388 - DNA, 20 bp, synthetic construct
  source 1..20: mol_type = other DNA
agagaggccactcaggcctg

SEQ ID NO: 236389 - DNA, 20 bp, synthetic construct
  source 1..20: mol_type = other DNA
aagagaggccactcaggcct

SEQ ID NO: 236390 - DNA, 20 bp, synthetic construct
  source 1..20: mol_type = other DNA
aaagagaggccactcaggcc

SEQ ID NO: 236391 - DNA, 20 bp, synthetic construct
  source 1..20: mol_type = other DNA
taaagagaggccactcaggc

SEQ ID NO: 236392 - DNA, 20 bp, synthetic construct
  source 1..20: mol_type = other DNA
ctaaagagaggccactcagg

SEQ ID NO: 236393 - DNA, 20 bp, synthetic construct
  source 1..20: mol_type = other DNA
gctaaagagaggccactcag

SEQ ID NO: 236394 - DNA, 20 bp, synthetic construct
  source 1..20: mol_type = other DNA
tgctaaagagaggccactca

SEQ ID NO: 236395 - DNA, 20 bp, synthetic construct
  source 1..20: mol_type = other DNA
ttgctaaagagaggccactc

SEQ ID NO: 236396 - DNA, 20 bp, synthetic construct
  source 1..20: mol_type = other DNA
cttgctaaagagaggccact

SEQ ID NO: 236397 - DNA, 20 bp, synthetic construct
  source 1..20: mol_type = other DNA
tcttgctaaagagaggccac

SEQ ID NO: 236398 - DNA, 20 bp, synthetic construct
  source 1..20: mol_type = other DNA
ctcttgctaaagagaggcca

SEQ ID NO: 236399 - DNA, 20 bp, synthetic construct
  source 1..20: mol_type = other DNA
actcttgctaaagagaggcc

SEQ ID NO: 236400 - DNA, 20 bp, synthetic construct
  source 1..20: mol_type = other DNA
aactcttgctaaagagaggc

SEQ ID NO: 236401 - DNA, 20 bp, synthetic construct
  source 1..20: mol_type = other DNA
caactcttgctaaagagagg

SEQ ID NO: 236402 - DNA, 20 bp, synthetic construct
  source 1..20: mol_type = other DNA
ccaactcttgctaaagagag

SEQ ID NO: 236403 - DNA, 20 bp, synthetic construct
  source 1..20: mol_type = other DNA
accaactcttgctaaagaga

SEQ ID NO: 236404 - DNA, 20 bp, synthetic construct
  source 1..20: mol_type = other DNA
aaccaactcttgctaaagag

SEQ ID NO: 236405 - DNA, 20 bp, synthetic construct
  source 1..20: mol_type = other DNA
taaccaactcttgctaaaga

SEQ ID NO: 236406 - DNA, 20 bp, synthetic construct
  source 1..20: mol_type = other DNA
ctaaccaactcttgctaaag

SEQ ID NO: 236407 - DNA, 20 bp, synthetic construct
  source 1..20: mol_type = other DNA
gctaaccaactcttgctaaa

SEQ ID NO: 236408 - DNA, 20 bp, synthetic construct
  source 1..20: mol_type = other DNA
ggctaaccaactcttgctaa

SEQ ID NO: 236409 - DNA, 20 bp, synthetic construct
  source 1..20: mol_type = other DNA
gggctaaccaactcttgcta

SEQ ID NO: 236410 - DNA, 20 bp, synthetic construct
  source 1..20: mol_type = other DNA
agggctaaccaactcttgct

SEQ ID NO: 236411 - DNA, 20 bp, synthetic construct
  source 1..20: mol_type = other DNA
cagggctaaccaactcttgc

SEQ ID NO: 236412 - DNA, 20 bp, synthetic construct
  source 1..20: mol_type = other DNA
ccagggctaaccaactcttg

SEQ ID NO: 236413 - DNA, 20 bp, synthetic construct
  source 1..20: mol_type = other DNA
cccagggctaaccaactctt

SEQ ID NO: 236414 - DNA, 20 bp, synthetic construct
  source 1..20: mol_type = other DNA
tcccagggctaaccaactct

SEQ ID NO: 236415 - DNA, 20 bp, synthetic construct
  source 1..20: mol_type = other DNA
atcccagggctaaccaactc

SEQ ID NO: 236416 - DNA, 20 bp, synthetic construct
  source 1..20: mol_type = other DNA
aatcccagggctaaccaact

SEQ ID NO: 236417 - DNA, 20 bp, synthetic construct
  source 1..20: mol_type = other DNA
gaatcccagggctaaccaac

SEQ ID NO: 236418 - DNA, 20 bp, synthetic construct
  source 1..20: mol_type = other DNA
agaatcccagggctaaccaa

SEQ ID NO: 236419 - DNA, 20 bp, synthetic construct
  source 1..20: mol_type = other DNA
aagaatcccagggctaacca

SEQ ID NO: 236420 - DNA, 20 bp, synthetic construct
  source 1..20: mol_type = other DNA
taagaatcccagggctaacc

SEQ ID NO: 236421 - DNA, 20 bp, synthetic construct
  source 1..20: mol_type = other DNA
gtaagaatcccagggctaac

SEQ ID NO: 236422 - DNA, 20 bp, synthetic construct
  source 1..20: mol_type = other DNA
agtaagaatcccagggctaa

SEQ ID NO: 236423 - DNA, 20 bp, synthetic construct
  source 1..20: mol_type = other DNA
cagtaagaatcccagggcta

SEQ ID NO: 236424 - DNA, 20 bp, synthetic construct
  source 1..20: mol_type = other DNA
acagtaagaatcccagggct

SEQ ID NO: 236425 - DNA, 20 bp, synthetic construct
  source 1..20: mol_type = other DNA
tacagtaagaatcccagggc

SEQ ID NO: 236426 - DNA, 20 bp, synthetic construct
  source 1..20: mol_type = other DNA
ctacagtaagaatcccaggg

SEQ ID NO: 236427 - DNA, 20 bp, synthetic construct
  source 1..20: mol_type = other DNA
gctacagtaagaatcccagg

SEQ ID NO: 236428 - DNA, 20 bp, synthetic construct
  source 1..20: mol_type = other DNA
ggctacagtaagaatcccag

SEQ ID NO: 236429 - DNA, 20 bp, synthetic construct
  source 1..20: mol_type = other DNA
tggctacagtaagaatccca

SEQ ID NO: 236430 - DNA, 20 bp, synthetic construct
  source 1..20: mol_type = other DNA
gtggctacagtaagaatccc

SEQ ID NO: 236431 - DNA, 20 bp, synthetic construct
  source 1..20: mol_type = other DNA
tgtggctacagtaagaatcc

SEQ ID NO: 236432 - DNA, 20 bp, synthetic construct
  source 1..20: mol_type = other DNA
atgtggctacagtaagaatc

SEQ ID NO: 236433 - DNA, 20 bp, synthetic construct
  source 1..20: mol_type = other DNA
aatgtggctacagtaagaat

SEQ ID NO: 236434 - DNA, 20 bp, synthetic construct
  source 1..20: mol_type = other DNA
taatgtggctacagtaagaa

SEQ ID NO: 236435 - DNA, 20 bp, synthetic construct
  source 1..20: mol_type = other DNA
ttaatgtggctacagtaaga

SEQ ID NO: 236436 - DNA, 20 bp, synthetic construct
  source 1..20: mol_type = other DNA
attaatgtggctacagtaag

SEQ ID NO: 236437 - DNA, 20 bp, synthetic construct
  source 1..20: mol_type = other DNA
tattaatgtggctacagtaa

SEQ ID NO: 236438 - DNA, 20 bp, synthetic construct
  source 1..20: mol_type = other DNA
ttattaatgtggctacagta

SEQ ID NO: 236439 - DNA, 20 bp, synthetic construct
  source 1..20: mol_type = other DNA
tttattaatgtggctacagt

SEQ ID NO: 236440 - DNA, 20 bp, synthetic construct
  source 1..20: mol_type = other DNA
gtttattaatgtggctacag

SEQ ID NO: 236441 - DNA, 20 bp, synthetic construct
  source 1..20: mol_type = other DNA
tgtttattaatgtggctaca

SEQ ID NO: 236442 - DNA, 20 bp, synthetic construct
  source 1..20: mol_type = other DNA
ttgtttattaatgtggctac

SEQ ID NO: 236443 - DNA, 20 bp, synthetic construct
  source 1..20: mol_type = other DNA
gttgtttattaatgtggcta

SEQ ID NO: 236444 - DNA, 20 bp, synthetic construct
  source 1..20: mol_type = other DNA
tgttgtttattaatgtggct

SEQ ID NO: 236445 - DNA, 20 bp, synthetic construct
  source 1..20: mol_type = other DNA
atgttgtttattaatgtggc

SEQ ID NO: 236446 - DNA, 20 bp, synthetic construct
  source 1..20: mol_type = other DNA
gatgttgtttattaatgtgg

SEQ ID NO: 236447 - DNA, 20 bp, synthetic construct
  source 1..20: mol_type = other DNA
cgatgttgtttattaatgtg

SEQ ID NO: 236448 - DNA, 20 bp, synthetic construct
  source 1..20: mol_type = other DNA
tcgatgttgtttattaatgt

SEQ ID NO: 236449 - DNA, 20 bp, synthetic construct
  source 1..20: mol_type = other DNA
gtcgatgttgtttattaatg

SEQ ID NO: 236450 - DNA, 20 bp, synthetic construct
  source 1..20: mol_type = other DNA
agtcgatgttgtttattaat

SEQ ID NO: 236451 - DNA, 20 bp, synthetic construct
  source 1..20: mol_type = other DNA
aagtcgatgttgtttattaa

SEQ ID NO: 236452 - DNA, 20 bp, synthetic construct
  source 1..20: mol_type = other DNA
gaagtcgatgttgtttatta

SEQ ID NO: 236453 - DNA, 20 bp, synthetic construct
  source 1..20: mol_type = other DNA
agaagtcgatgttgtttatt

SEQ ID NO: 236454 - DNA, 20 bp, synthetic construct
  source 1..20: mol_type = other DNA
tagaagtcgatgttgtttat

SEQ ID NO: 236455 - DNA, 20 bp, synthetic construct
  source 1..20: mol_type = other DNA
ttagaagtcgatgttgttta

SEQ ID NO: 236456 - DNA, 20 bp, synthetic construct
  source 1..20: mol_type = other DNA
tttagaagtcgatgttgttt

SEQ ID NO: 236457 - DNA, 20 bp, synthetic construct
  source 1..20: mol_type = other DNA
gtttagaagtcgatgttgtt

SEQ ID NO: 236458 - DNA, 20 bp, synthetic construct
  source 1..20: mol_type = other DNA
tgtttagaagtcgatgttgt

SEQ ID NO: 236459 - DNA, 20 bp, synthetic construct
  source 1..20: mol_type = other DNA
atgtttagaagtcgatgttg

SEQ ID NO: 236460 - DNA, 20 bp, synthetic construct
  source 1..20: mol_type = other DNA
aatgtttagaagtcgatgtt

SEQ ID NO: 236461 - DNA, 20 bp, synthetic construct
  source 1..20: mol_type = other DNA
gaatgtttagaagtcgatgt

SEQ ID NO: 236462 - DNA, 20 bp, synthetic construct
  source 1..20: mol_type = other DNA
agaatgtttagaagtcgatg

SEQ ID NO: 236463 - DNA, 20 bp, synthetic construct
  source 1..20: mol_type = other DNA
tagaatgtttagaagtcgat

SEQ ID NO: 236464 - DNA, 20 bp, synthetic construct
  source 1..20: mol_type = other DNA
atagaatgtttagaagtcga

SEQ ID NO: 236465 - DNA, 20 bp, synthetic construct
  source 1..20: mol_type = other DNA
tatagaatgtttagaagtcg

SEQ ID NO: 236466 - DNA, 20 bp, synthetic construct
  source 1..20: mol_type = other DNA
ttatagaatgtttagaagtc

SEQ ID NO: 236467 - DNA, 20 bp, synthetic construct
  source 1..20: mol_type = other DNA
attatagaatgtttagaagt

SEQ ID NO: 236468 - DNA, 20 bp, synthetic construct
  source 1..20: mol_type = other DNA
tattatagaatgtttagaag

SEQ ID NO: 236469 - DNA, 20 bp, synthetic construct
  source 1..20: mol_type = other DNA
gtattatagaatgtttagaa

SEQ ID NO: 236470 - DNA, 20 bp, synthetic construct
  source 1..20: mol_type = other DNA
ggtattatagaatgtttaga

SEQ ID NO: 236471 - DNA, 20 bp, synthetic construct
  source 1..20: mol_type = other DNA
tggtattatagaatgtttag

SEQ ID NO: 236472 - DNA, 20 bp, synthetic construct
  source 1..20: mol_type = other DNA
atggtattatagaatgttta

SEQ ID NO: 236473 - DNA, 20 bp, synthetic construct
  source 1..20: mol_type = other DNA
gatggtattatagaatgttt

SEQ ID NO: 236474 - DNA, 20 bp, synthetic construct
  source 1..20: mol_type = other DNA
agatggtattatagaatgtt

SEQ ID NO: 236475 - DNA, 20 bp, synthetic construct
  source 1..20: mol_type = other DNA
aagatggtattatagaatgt

SEQ ID NO: 236476 - DNA, 20 bp, synthetic construct
  source 1..20: mol_type = other DNA
aaagatggtattatagaatg

SEQ ID NO: 236477 - DNA, 20 bp, synthetic construct
  source 1..20: mol_type = other DNA
aaaagatggtattatagaat

SEQ ID NO: 236478 - DNA, 20 bp, synthetic construct
  source 1..20: mol_type = other DNA
caaaagatggtattatagaa

SEQ ID NO: 236479 - DNA, 20 bp, synthetic construct
  source 1..20: mol_type = other DNA
ccaaaagatggtattataga

SEQ ID NO: 236480 - DNA, 20 bp, synthetic construct
  source 1..20: mol_type = other DNA
gccaaaagatggtattatag

SEQ ID NO: 236481 - DNA, 20 bp, synthetic construct
  source 1..20: mol_type = other DNA
ggccaaaagatggtattata

SEQ ID NO: 236482 - DNA, 20 bp, synthetic construct
  source 1..20: mol_type = other DNA
tggccaaaagatggtattat

SEQ ID NO: 236483 - DNA, 20 bp, synthetic construct
  source 1..20: mol_type = other DNA
ttggccaaaagatggtatta

SEQ ID NO: 236484 - DNA, 20 bp, synthetic construct
  source 1..20: mol_type = other DNA
tttggccaaaagatggtatt

SEQ ID NO: 236485 - DNA, 20 bp, synthetic construct
  source 1..20: mol_type = other DNA
atttggccaaaagatggtat

SEQ ID NO: 236486 - DNA, 20 bp, synthetic construct
  source 1..20: mol_type = other DNA
aatttggccaaaagatggta

SEQ ID NO: 236487 - DNA, 20 bp, synthetic construct
  source 1..20: mol_type = other DNA
caatttggccaaaagatggt

SEQ ID NO: 236488 - DNA, 20 bp, synthetic construct
  source 1..20: mol_type = other DNA
tcaatttggccaaaagatgg

SEQ ID NO: 236489 - DNA, 20 bp, synthetic construct
  source 1..20: mol_type = other DNA
gtcaatttggccaaaagatg

SEQ ID NO: 236490 - DNA, 20 bp, synthetic construct
  source 1..20: mol_type = other DNA
agtcaatttggccaaaagat

SEQ ID NO: 236491 - DNA, 20 bp, synthetic construct
  source 1..20: mol_type = other DNA
aagtcaatttggccaaaaga

SEQ ID NO: 236492 - DNA, 20 bp, synthetic construct
  source 1..20: mol_type = other DNA
gaagtcaatttggccaaaag

SEQ ID NO: 236493 - DNA, 20 bp, synthetic construct
  source 1..20: mol_type = other DNA
cgaagtcaatttggccaaaa

SEQ ID NO: 236494 - DNA, 20 bp, synthetic construct
  source 1..20: mol_type = other DNA
gcgaagtcaatttggccaaa

SEQ ID NO: 236495 - DNA, 20 bp, synthetic construct
  source 1..20: mol_type = other DNA
ggcgaagtcaatttggccaa

SEQ ID NO: 236496 - DNA, 20 bp, synthetic construct
  source 1..20: mol_type = other DNA
aggcgaagtcaatttggcca

SEQ ID NO: 236497 - DNA, 20 bp, synthetic construct
  source 1..20: mol_type = other DNA
gaggcgaagtcaatttggcc

SEQ ID NO: 236498 - DNA, 20 bp, synthetic construct
  source 1..20: mol_type = other DNA
agaggcgaagtcaatttggc

SEQ ID NO: 236499 - DNA, 20 bp, synthetic construct
  source 1..20: mol_type = other DNA
aagaggcgaagtcaatttgg

SEQ ID NO: 236500 - DNA, 20 bp, synthetic construct
  source 1..20: mol_type = other DNA
gaagaggcgaagtcaatttg

SEQ ID NO: 236501 - DNA, 20 bp, synthetic construct
  source 1..20: mol_type = other DNA
ggaagaggcgaagtcaattt

SEQ ID NO: 236502 - DNA, 20 bp, synthetic construct
  source 1..20: mol_type = other DNA
aggaagaggcgaagtcaatt

SEQ ID NO: 236503 - DNA, 20 bp, synthetic construct
  source 1..20: mol_type = other DNA
gaggaagaggcgaagtcaat

SEQ ID NO: 236504 - DNA, 20 bp, synthetic construct
  source 1..20: mol_type = other DNA
agaggaagaggcgaagtcaa

SEQ ID NO: 236505 - DNA, 20 bp, synthetic construct
  source 1..20: mol_type = other DNA
gagaggaagaggcgaagtca

SEQ ID NO: 236506 - DNA, 20 bp, synthetic construct
  source 1..20: mol_type = other DNA
agagaggaagaggcgaagtc

SEQ ID NO: 236507 - DNA, 20 bp, synthetic construct
  source 1..20: mol_type = other DNA
gagagaggaagaggcgaagt

SEQ ID NO: 236508 - DNA, 20 bp, synthetic construct
  source 1..20: mol_type = other DNA
agagagaggaagaggcgaag

SEQ ID NO: 236509 - DNA, 20 bp, synthetic construct
  source 1..20: mol_type = other DNA
aagagagaggaagaggcgaa

SEQ ID NO: 236510 - DNA, 20 bp, synthetic construct
  source 1..20: mol_type = other DNA
aaagagagaggaagaggcga

SEQ ID NO: 236511 - DNA, 20 bp, synthetic construct
  source 1..20: mol_type = other DNA
gaaagagagaggaagaggcg

SEQ ID NO: 236512 - DNA, 20 bp, synthetic construct
  source 1..20: mol_type = other DNA
ggaaagagagaggaagaggc

SEQ ID NO: 236513 - DNA, 20 bp, synthetic construct
  source 1..20: mol_type = other DNA
tggaaagagagaggaagagg

SEQ ID NO: 236514 - DNA, 20 bp, synthetic construct
  source 1..20: mol_type = other DNA
ttggaaagagagaggaagag

SEQ ID NO: 236515 - DNA, 20 bp, synthetic construct
  source 1..20: mol_type = other DNA
tttggaaagagagaggaaga

SEQ ID NO: 236516 - DNA, 20 bp, synthetic construct
  source 1..20: mol_type = other DNA
atttggaaagagagaggaag

SEQ ID NO: 236517 - DNA, 20 bp, synthetic construct
  source 1..20: mol_type = other DNA
catttggaaagagagaggaa

SEQ ID NO: 236518 - DNA, 20 bp, synthetic construct
  source 1..20: mol_type = other DNA
tcatttggaaagagagagga

SEQ ID NO: 236519 - DNA, 20 bp, synthetic construct
  source 1..20: mol_type = other DNA
ttcatttggaaagagagagg

SEQ ID NO: 236520 - DNA, 20 bp, synthetic construct
  source 1..20: mol_type = other DNA
tttcatttggaaagagagag

SEQ ID NO: 236521 - DNA, 20 bp, synthetic construct
  source 1..20: mol_type = other DNA
atttcatttggaaagagaga

SEQ ID NO: 236522 - DNA, 20 bp, synthetic construct
  source 1..20: mol_type = other DNA
catttcatttggaaagagag

SEQ ID NO: 236523 - DNA, 20 bp, synthetic construct
  source 1..20: mol_type = other DNA
acatttcatttggaaagaga

SEQ ID NO: 236524 - DNA, 20 bp, synthetic construct
  source 1..20: mol_type = other DNA
cacatttcatttggaaagag

SEQ ID NO: 236525 - DNA, 20 bp, synthetic construct
  source 1..20: mol_type = other DNA
acacatttcatttggaaaga

SEQ ID NO: 236526 - DNA, 20 bp, synthetic construct
  source 1..20: mol_type = other DNA
aacacatttcatttggaaag

SEQ ID NO: 236527 - DNA, 20 bp, synthetic construct
  source 1..20: mol_type = other DNA
aaacacatttcatttggaaa

SEQ ID NO: 236528 - DNA, 20 bp, synthetic construct
  source 1..20: mol_type = other DNA
gaaacacatttcatttggaa

SEQ ID NO: 236529 - DNA, 20 bp, synthetic construct
  source 1..20: mol_type = other DNA
tgaaacacatttcatttgga

SEQ ID NO: 236530 - DNA, 20 bp, synthetic construct
  source 1..20: mol_type = other DNA
atgaaacacatttcatttgg

SEQ ID NO: 236531 - DNA, 20 bp, synthetic construct
  source 1..20: mol_type = other DNA
aatgaaacacatttcatttg

SEQ ID NO: 236532 - DNA, 20 bp, synthetic construct
  source 1..20: mol_type = other DNA
aaatgaaacacatttcattt

SEQ ID NO: 236533 - DNA, 20 bp, synthetic construct
  source 1..20: mol_type = other DNA
gaaatgaaacacatttcatt

SEQ ID NO: 236534 - DNA, 20 bp, synthetic construct
  source 1..20: mol_type = other DNA
tgaaatgaaacacatttcat

SEQ ID NO: 236535 - DNA, 20 bp, synthetic construct
  source 1..20: mol_type = other DNA
gtgaaatgaaacacatttca

SEQ ID NO: 236536 - DNA, 20 bp, synthetic construct
  source 1..20: mol_type = other DNA
agtgaaatgaaacacatttc

SEQ ID NO: 236537 - DNA, 20 bp, synthetic construct
  source 1..20: mol_type = other DNA
cagtgaaatgaaacacattt

SEQ ID NO: 236538 - DNA, 20 bp, synthetic construct
  source 1..20: mol_type = other DNA
acagtgaaatgaaacacatt

SEQ ID NO: 236539 - DNA, 20 bp, synthetic construct
  source 1..20: mol_type = other DNA
gacagtgaaatgaaacacat

SEQ ID NO: 236540 - DNA, 20 bp, synthetic construct
  source 1..20: mol_type = other DNA
tgacagtgaaatgaaacaca

SEQ ID NO: 236541 - DNA, 20 bp, synthetic construct
  source 1..20: mol_type = other DNA
ctgacagtgaaatgaaacac

SEQ ID NO: 236542 - DNA, 20 bp, synthetic construct
  source 1..20: mol_type = other DNA
tctgacagtgaaatgaaaca

SEQ ID NO: 236543 - DNA, 20 bp, synthetic construct
  source 1..20: mol_type = other DNA
gtctgacagtgaaatgaaac

SEQ ID NO: 236544 - DNA, 20 bp, synthetic construct
  source 1..20: mol_type = other DNA
ggtctgacagtgaaatgaaa

SEQ ID NO: 236545 - DNA, 20 bp, synthetic construct
  source 1..20: mol_type = other DNA
tggtctgacagtgaaatgaa

SEQ ID NO: 236546 - DNA, 20 bp, synthetic construct
  source 1..20: mol_type = other DNA
gtggtctgacagtgaaatga

SEQ ID NO: 236547 - DNA, 20 bp, synthetic construct
  source 1..20: mol_type = other DNA
tgtggtctgacagtgaaatg

SEQ ID NO: 236548 - DNA, 20 bp, synthetic construct
  source 1..20: mol_type = other DNA
atgtggtctgacagtgaaat

SEQ ID NO: 236549 - DNA, 20 bp, synthetic construct
  source 1..20: mol_type = other DNA
catgtggtctgacagtgaaa

SEQ ID NO: 236550 - DNA, 20 bp, synthetic construct
  source 1..20: mol_type = other DNA
ccatgtggtctgacagtgaa

SEQ ID NO: 236551 - DNA, 20 bp, synthetic construct
  source 1..20: mol_type = other DNA
accatgtggtctgacagtga

SEQ ID NO: 236552 - DNA, 20 bp, synthetic construct
  source 1..20: mol_type = other DNA
aaccatgtggtctgacagtg

SEQ ID NO: 236553 - DNA, 20 bp, synthetic construct
  source 1..20: mol_type = other DNA
caaccatgtggtctgacagt

SEQ ID NO: 236554 - DNA, 20 bp, synthetic construct
  source 1..20: mol_type = other DNA
ccaaccatgtggtctgacag

SEQ ID NO: 236555 - DNA, 20 bp, synthetic construct
  source 1..20: mol_type = other DNA
cccaaccatgtggtctgaca

SEQ ID NO: 236556 - DNA, 20 bp, synthetic construct
  source 1..20: mol_type = other DNA
ccccaaccatgtggtctgac

SEQ ID NO: 236557 - DNA, 20 bp, synthetic construct
  source 1..20: mol_type = other DNA
tccccaaccatgtggtctga

SEQ ID NO: 236558 - DNA, 20 bp, synthetic construct
  source 1..20: mol_type = other DNA
gtccccaaccatgtggtctg

SEQ ID NO: 236559 - DNA, 20 bp, synthetic construct
  source 1..20: mol_type = other DNA
ggtccccaaccatgtggtct

SEQ ID NO: 236560 - DNA, 20 bp, synthetic construct
  source 1..20: mol_type = other DNA
gggtccccaaccatgtggtc

SEQ ID NO: 236561 - DNA, 20 bp, synthetic construct
  source 1..20: mol_type = other DNA
ggggtccccaaccatgtggt

SEQ ID NO: 236562 - DNA, 20 bp, synthetic construct
  source 1..20: mol_type = other DNA
tggggtccccaaccatgtgg

SEQ ID NO: 236563 - DNA, 20 bp, synthetic construct
  source 1..20: mol_type = other DNA
gtggggtccccaaccatgtg

SEQ ID NO: 236564 - DNA, 20 bp, synthetic construct
  source 1..20: mol_type = other DNA
tgtggggtccccaaccatgt

SEQ ID NO: 236565 - DNA, 20 bp, synthetic construct
  source 1..20: mol_type = other DNA
ctgtggggtccccaaccatg

SEQ ID NO: 236566 - DNA, 20 bp, synthetic construct
  source 1..20: mol_type = other DNA
tctgtggggtccccaaccat

SEQ ID NO: 236567 - DNA, 20 bp, synthetic construct
  source 1..20: mol_type = other DNA
ctctgtggggtccccaacca

SEQ ID NO: 236568 - DNA, 20 bp, synthetic construct
  source 1..20: mol_type = other DNA
gctctgtggggtccccaacc

SEQ ID NO: 236569 - DNA, 20 bp, synthetic construct
  source 1..20: mol_type = other DNA
tgctctgtggggtccccaac

SEQ ID NO: 236570 - DNA, 20 bp, synthetic construct
  source 1..20: mol_type = other DNA
gtgctctgtggggtccccaa

SEQ ID NO: 236571 - DNA, 20 bp, synthetic construct
  source 1..20: mol_type = other DNA
tgtgctctgtggggtcccca

SEQ ID NO: 236572 - DNA, 20 bp, synthetic construct
  source 1..20: mol_type = other DNA
gtgtgctctgtggggtcccc

SEQ ID NO: 236573 - DNA, 20 bp, synthetic construct
  source 1..20: mol_type = other DNA
tgtgtgctctgtggggtccc

SEQ ID NO: 236574 - DNA, 20 bp, synthetic construct
  source 1..20: mol_type = other DNA
ctgtgtgctctgtggggtcc

SEQ ID NO: 236575 - DNA, 20 bp, synthetic construct
  source 1..20: mol_type = other DNA
gctgtgtgctctgtggggtc

SEQ ID NO: 236576 - DNA, 20 bp, synthetic construct
  source 1..20: mol_type = other DNA
ggctgtgtgctctgtggggt

SEQ ID NO: 236577 - DNA, 20 bp, synthetic construct
  source 1..20: mol_type = other DNA
gggctgtgtgctctgtgggg

SEQ ID NO: 236578 - DNA, 20 bp, synthetic construct
  source 1..20: mol_type = other DNA
agggctgtgtgctctgtggg

SEQ ID NO: 236579 - DNA, 20 bp, synthetic construct
  source 1..20: mol_type = other DNA
gagggctgtgtgctctgtgg

SEQ ID NO: 236580 - DNA, 20 bp, synthetic construct
  source 1..20: mol_type = other DNA
ggagggctgtgtgctctgtg

SEQ ID NO: 236581 - DNA, 20 bp, synthetic construct
  source 1..20: mol_type = other DNA
gggagggctgtgtgctctgt

SEQ ID NO: 236582 - DNA, 20 bp, synthetic construct
  source 1..20: mol_type = other DNA
agggagggctgtgtgctctg

SEQ ID NO: 236583 - DNA, 20 bp, synthetic construct
  source 1..20: mol_type = other DNA
gagggagggctgtgtgctct

SEQ ID NO: 236584 - DNA, 20 bp, synthetic construct
  source 1..20: mol_type = other DNA
agagggagggctgtgtgctc

SEQ ID NO: 236585 - DNA, 20 bp, synthetic construct
  source 1..20: mol_type = other DNA
cagagggagggctgtgtgct

SEQ ID NO: 236586 - DNA, 20 bp, synthetic construct
  source 1..20: mol_type = other DNA
gcagagggagggctgtgtgc

SEQ ID NO: 236587 - DNA, 20 bp, synthetic construct
  source 1..20: mol_type = other DNA
ggcagagggagggctgtgtg

SEQ ID NO: 236588 - DNA, 20 bp, synthetic construct
  source 1..20: mol_type = other DNA
aggcagagggagggctgtgt

SEQ ID NO: 236589 - DNA, 20 bp, synthetic construct
  source 1..20: mol_type = other DNA
aaggcagagggagggctgtg

SEQ ID NO: 236590 - DNA, 20 bp, synthetic construct
  source 1..20: mol_type = other DNA
gaaggcagagggagggctgt

SEQ ID NO: 236591 - DNA, 20 bp, synthetic construct
  source 1..20: mol_type = other DNA
ggaaggcagagggagggctg

SEQ ID NO: 236592 - DNA, 20 bp, synthetic construct
  source 1..20: mol_type = other DNA
gggaaggcagagggagggct

SEQ ID NO: 236593 - DNA, 20 bp, synthetic construct
  source 1..20: mol_type = other DNA
tgggaaggcagagggagggc

SEQ ID NO: 236594 - DNA, 20 bp, synthetic construct
  source 1..20: mol_type = other DNA
atgggaaggcagagggaggg

SEQ ID NO: 236595 - DNA, 20 bp, synthetic construct
  source 1..20: mol_type = other DNA
catgggaaggcagagggagg

SEQ ID NO: 236596 - DNA, 20 bp, synthetic construct
  source 1..20: mol_type = other DNA
gcatgggaaggcagagggag

SEQ ID NO: 236597 - DNA, 20 bp, synthetic construct
  source 1..20: mol_type = other DNA
agcatgggaaggcagaggga

SEQ ID NO: 236598 - DNA, 20 bp, synthetic construct
  source 1..20: mol_type = other DNA
cagcatgggaaggcagaggg

SEQ ID NO: 236599 - DNA, 20 bp, synthetic construct
  source 1..20: mol_type = other DNA
ccagcatgggaaggcagagg

SEQ ID NO: 236600 - DNA, 20 bp, synthetic construct
  source 1..20: mol_type = other DNA
gccagcatgggaaggcagag

SEQ ID NO: 236601 - DNA, 20 bp, synthetic construct
  source 1..20: mol_type = other DNA
ggccagcatgggaaggcaga

SEQ ID NO: 236602 - DNA, 20 bp, synthetic construct
  source 1..20: mol_type = other DNA
gggccagcatgggaaggcag

SEQ ID NO: 236603 - DNA, 20 bp, synthetic construct
  source 1..20: mol_type = other DNA
agggccagcatgggaaggca

SEQ ID NO: 236604 - DNA, 20 bp, synthetic construct
  source 1..20: mol_type = other DNA
aagggccagcatgggaaggc

SEQ ID NO: 236605 - DNA, 20 bp, synthetic construct
  source 1..20: mol_type = other DNA
gaagggccagcatgggaagg

SEQ ID NO: 236606 - DNA, 20 bp, synthetic construct
  source 1..20: mol_type = other DNA
tgaagggccagcatgggaag

SEQ ID NO: 236607 - DNA, 20 bp, synthetic construct
  source 1..20: mol_type = other DNA
gtgaagggccagcatgggaa

SEQ ID NO: 236608 - DNA, 20 bp, synthetic construct
  source 1..20: mol_type = other DNA
ggtgaagggccagcatggga

SEQ ID NO: 236609 - DNA, 20 bp, synthetic construct
  source 1..20: mol_type = other DNA
gggtgaagggccagcatggg

SEQ ID NO: 236610 - DNA, 20 bp, synthetic construct
  source 1..20: mol_type = other DNA
tgggtgaagggccagcatgg

SEQ ID NO: 236611 - DNA, 20 bp, synthetic construct
  source 1..20: mol_type = other DNA
gtgggtgaagggccagcatg

SEQ ID NO: 236612 - DNA, 20 bp, synthetic construct
  source 1..20: mol_type = other DNA
agtgggtgaagggccagcat

SEQ ID NO: 236613 - DNA, 20 bp, synthetic construct
  source 1..20: mol_type = other DNA
cagtgggtgaagggccagca

SEQ ID NO: 236614 - DNA, 20 bp, synthetic construct
  source 1..20: mol_type = other DNA
gcagtgggtgaagggccagc

SEQ ID NO: 236615 - DNA, 20 bp, synthetic construct
  source 1..20: mol_type = other DNA
agcagtgggtgaagggccag

SEQ ID NO: 236616 - DNA, 20 bp, synthetic construct
  source 1..20: mol_type = other DNA
cagcagtgggtgaagggcca

SEQ ID NO: 236617 - DNA, 20 bp, synthetic construct
  source 1..20: mol_type = other DNA
ccagcagtgggtgaagggcc

SEQ ID NO: 236618 - DNA, 20 bp, synthetic construct
  source 1..20: mol_type = other DNA
tccagcagtgggtgaagggc

SEQ ID NO: 236619 - DNA, 20 bp, synthetic construct
  source 1..20: mol_type = other DNA
ctccagcagtgggtgaaggg

SEQ ID NO: 236620 - DNA, 20 bp, synthetic construct
  source 1..20: mol_type = other DNA
actccagcagtgggtgaagg

SEQ ID NO: 236621 - DNA, 20 bp, synthetic construct
  source 1..20: mol_type = other DNA
cactccagcagtgggtgaag

SEQ ID NO: 236622 - DNA, 20 bp, synthetic construct
  source 1..20: mol_type = other DNA
gcactccagcagtgggtgaa

SEQ ID NO: 236623 - DNA, 20 bp, synthetic construct
  source 1..20: mol_type = other DNA
ggcactccagcagtgggtga

SEQ ID NO: 236624 - DNA, 20 bp, synthetic construct
  source 1..20: mol_type = other DNA
tggcactccagcagtgggtg

SEQ ID NO: 236625 - DNA, 20 bp, synthetic construct
  source 1..20: mol_type = other DNA
ctggcactccagcagtgggt

SEQ ID NO: 236626 - DNA, 20 bp, synthetic construct
  source 1..20: mol_type = other DNA
cctggcactccagcagtggg

SEQ ID NO: 236627 - DNA, 20 bp, synthetic construct
  source 1..20: mol_type = other DNA
acctggcactccagcagtgg

SEQ ID NO: 236628 - DNA, 20 bp, synthetic construct
  source 1..20: mol_type = other DNA
aacctggcactccagcagtg

SEQ ID NO: 236629 - DNA, 20 bp, synthetic construct
  source 1..20: mol_type = other DNA
caacctggcactccagcagt

SEQ ID NO: 236630 - DNA, 20 bp, synthetic construct
  source 1..20: mol_type = other DNA
ccaacctggcactccagcag

SEQ ID NO: 236631 - DNA, 20 bp, synthetic construct
  source 1..20: mol_type = other DNA
accaacctggcactccagca

SEQ ID NO: 236632 - DNA, 20 bp, synthetic construct
  source 1..20: mol_type = other DNA
gaccaacctggcactccagc

SEQ ID NO: 236633 - DNA, 20 bp, synthetic construct
  source 1..20: mol_type = other DNA
ggaccaacctggcactccag

SEQ ID NO: 236634 - DNA, 20 bp, synthetic construct
  source 1..20: mol_type = other DNA
tggaccaacctggcactcca

SEQ ID NO: 236635 - DNA, 20 bp, synthetic construct
  source 1..20: mol_type = other DNA
ttggaccaacctggcactcc

SEQ ID NO: 236636 - DNA, 20 bp, synthetic construct
  source 1..20: mol_type = other DNA
cttggaccaacctggcactc

SEQ ID NO: 236637 - DNA, 20 bp, synthetic construct
  source 1..20: mol_type = other DNA
ccttggaccaacctggcact

SEQ ID NO: 236638 - DNA, 20 bp, synthetic construct
  source 1..20: mol_type = other DNA
cccttggaccaacctggcac

SEQ ID NO: 236639 - DNA, 20 bp, synthetic construct
  source 1..20: mol_type = other DNA
acccttggaccaacctggca

SEQ ID NO: 236640 - DNA, 20 bp, synthetic construct
  source 1..20: mol_type = other DNA
aacccttggaccaacctggc

SEQ ID NO: 236641 - DNA, 20 bp, synthetic construct
  source 1..20: mol_type = other DNA
caacccttggaccaacctgg

SEQ ID NO: 236642 - DNA, 20 bp, synthetic construct
  source 1..20: mol_type = other DNA
ccaacccttggaccaacctg

SEQ ID NO: 236643 - DNA, 20 bp, synthetic construct
  source 1..20: mol_type = other DNA
tccaacccttggaccaacct

SEQ ID NO: 236644 - DNA, 20 bp, synthetic construct
  source 1..20: mol_type = other DNA
gtccaacccttggaccaacc

SEQ ID NO: 236645 - DNA, 20 bp, synthetic construct
  source 1..20: mol_type = other DNA
ggtccaacccttggaccaac

SEQ ID NO: 236646 - DNA, 20 bp, synthetic construct
  source 1..20: mol_type = other DNA
tggtccaacccttggaccaa

SEQ ID NO: 236647 - DNA, 20 bp, synthetic construct
  source 1..20: mol_type = other DNA
ttggtccaacccttggacca

SEQ ID NO: 236648 - DNA, 20 bp, synthetic construct
  source 1..20: mol_type = other DNA
cttggtccaacccttggacc

SEQ ID NO: 236649 - DNA, 20 bp, synthetic construct
  source 1..20: mol_type = other DNA
acttggtccaacccttggac

SEQ ID NO: 236650 - DNA, 20 bp, synthetic construct
  source 1..20: mol_type = other DNA
aacttggtccaacccttgga

SEQ ID NO: 236651 - DNA, 20 bp, synthetic construct
  source 1..20: mol_type = other DNA
caacttggtccaacccttgg

SEQ ID NO: 236652 - DNA, 20 bp, synthetic construct
  source 1..20: mol_type = other DNA
acaacttggtccaacccttg

SEQ ID NO: 236653 - DNA, 20 bp, synthetic construct
  source 1..20: mol_type = other DNA
gacaacttggtccaaccctt

SEQ ID NO: 236654 - DNA, 20 bp, synthetic construct
  source 1..20: mol_type = other DNA
agacaacttggtccaaccct

SEQ ID NO: 236655 - DNA, 20 bp, synthetic construct
  source 1..20: mol_type = other DNA
cagacaacttggtccaaccc

SEQ ID NO: 236656 - DNA, 20 bp, synthetic construct
  source 1..20: mol_type = other DNA
tcagacaacttggtccaacc

SEQ ID NO: 236657 - DNA, 20 bp, synthetic construct
  source 1..20: mol_type = other DNA
ctcagacaacttggtccaac

SEQ ID NO: 236658 - DNA, 20 bp, synthetic construct
  source 1..20: mol_type = other DNA
cctcagacaacttggtccaa

SEQ ID NO: 236659 - DNA, 20 bp, synthetic construct
  source 1..20: mol_type = other DNA
acctcagacaacttggtcca

SEQ ID NO: 236660 - DNA, 20 bp, synthetic construct
  source 1..20: mol_type = other DNA
aacctcagacaacttggtcc

SEQ ID NO: 236661 - DNA, 20 bp, synthetic construct
  source 1..20: mol_type = other DNA
caacctcagacaacttggtc

SEQ ID NO: 236662 - DNA, 20 bp, synthetic construct
  source 1..20: mol_type = other DNA
acaacctcagacaacttggt

SEQ ID NO: 236663 - DNA, 20 bp, synthetic construct
  source 1..20: mol_type = other DNA
gacaacctcagacaacttgg

SEQ ID NO: 236664 - DNA, 20 bp, synthetic construct
  source 1..20: mol_type = other DNA
agacaacctcagacaacttg

SEQ ID NO: 236665 - DNA, 20 bp, synthetic construct
  source 1..20: mol_type = other DNA
gagacaacctcagacaactt

SEQ ID NO: 236666 - DNA, 20 bp, synthetic construct
  source 1..20: mol_type = other DNA
tgagacaacctcagacaact

SEQ ID NO: 236667 - DNA, 20 bp, synthetic construct
  source 1..20: mol_type = other DNA
ttgagacaacctcagacaac

SEQ ID NO: 236668 - DNA, 20 bp, synthetic construct
  source 1..20: mol_type = other DNA
cttgagacaacctcagacaa

SEQ ID NO: 236669 - DNA, 20 bp, synthetic construct
  source 1..20: mol_type = other DNA
ccttgagacaacctcagaca

SEQ ID NO: 236670 - DNA, 20 bp, synthetic construct
  source 1..20: mol_type = other DNA
accttgagacaacctcagac

SEQ ID NO: 236671 - DNA, 20 bp, synthetic construct
  source 1..20: mol_type = other DNA
aaccttgagacaacctcaga

SEQ ID NO: 236672 - DNA, 20 bp, synthetic construct
  source 1..20: mol_type = other DNA
caaccttgagacaacctcag

SEQ ID NO: 236673 - DNA, 20 bp, synthetic construct
  source 1..20: mol_type = other DNA
ccaaccttgagacaacctca

SEQ ID NO: 236674 - DNA, 20 bp, synthetic construct
  source 1..20: mol_type = other DNA
accaaccttgagacaacctc

SEQ ID NO: 236675 - DNA, 20 bp, synthetic construct
  source 1..20: mol_type = other DNA
gaccaaccttgagacaacct

SEQ ID NO: 236676 - DNA, 20 bp, synthetic construct
  source 1..20: mol_type = other DNA
cgaccaaccttgagacaacc

SEQ ID NO: 236677 - DNA, 20 bp, synthetic construct
  source 1..20: mol_type = other DNA
tcgaccaaccttgagacaac

SEQ ID NO: 236678 - DNA, 20 bp, synthetic construct
  source 1..20: mol_type = other DNA
ctcgaccaaccttgagacaa

SEQ ID NO: 236679 - DNA, 20 bp, synthetic construct
  source 1..20: mol_type = other DNA
cctcgaccaaccttgagaca

SEQ ID NO: 236680 - DNA, 20 bp, synthetic construct
  source 1..20: mol_type = other DNA
gcctcgaccaaccttgagac

SEQ ID NO: 236681 - DNA, 20 bp, synthetic construct
  source 1..20: mol_type = other DNA
agcctcgaccaaccttgaga

SEQ ID NO: 236682 - DNA, 20 bp, synthetic construct
  source 1..20: mol_type = other DNA
cagcctcgaccaaccttgag

SEQ ID NO: 236683 - DNA, 20 bp, synthetic construct
  source 1..20: mol_type = other DNA
acagcctcgaccaaccttga

SEQ ID NO: 236684 - DNA, 20 bp, synthetic construct
  source 1..20: mol_type = other DNA
gacagcctcgaccaaccttg

SEQ ID NO: 236685 - DNA, 20 bp, synthetic construct
  source 1..20: mol_type = other DNA
agacagcctcgaccaacctt

SEQ ID NO: 236686 - DNA, 20 bp, synthetic construct
  source 1..20: mol_type = other DNA
gagacagcctcgaccaacct

SEQ ID NO: 236687 - DNA, 20 bp, synthetic construct
  source 1..20: mol_type = other DNA
ggagacagcctcgaccaacc

SEQ ID NO: 236688 - DNA, 20 bp, synthetic construct
  source 1..20: mol_type = other DNA
cggagacagcctcgaccaac

SEQ ID NO: 236689 - DNA, 20 bp, synthetic construct
  source 1..20: mol_type = other DNA
gcggagacagcctcgaccaa

SEQ ID NO: 236690 - DNA, 20 bp, synthetic construct
  source 1..20: mol_type = other DNA
cgcggagacagcctcgacca

SEQ ID NO: 236691 - DNA, 20 bp, synthetic construct
  source 1..20: mol_type = other DNA
gcgcggagacagcctcgacc

SEQ ID NO: 236692 - DNA, 20 bp, synthetic construct
  source 1..20: mol_type = other DNA
agcgcggagacagcctcgac

SEQ ID NO: 236693 - DNA, 20 bp, synthetic construct
  source 1..20: mol_type = other DNA
cagcgcggagacagcctcga

SEQ ID NO: 236694 - DNA, 20 bp, synthetic construct
  source 1..20: mol_type = other DNA
ccagcgcggagacagcctcg

SEQ ID NO: 236695 - DNA, 20 bp, synthetic construct
  source 1..20: mol_type = other DNA
cccagcgcggagacagcctc

SEQ ID NO: 236696 - DNA, 20 bp, synthetic construct
  source 1..20: mol_type = other DNA
acccagcgcggagacagcct

SEQ ID NO: 236697 - DNA, 20 bp, synthetic construct
  source 1..20: mol_type = other DNA
aacccagcgcggagacagcc

SEQ ID NO: 236698 - DNA, 20 bp, synthetic construct
  source 1..20: mol_type = other DNA
caacccagcgcggagacagc

SEQ ID NO: 236699 - DNA, 20 bp, synthetic construct
  source 1..20: mol_type = other DNA
acaacccagcgcggagacag

SEQ ID NO: 236700 - DNA, 20 bp, synthetic construct
  source 1..20: mol_type = other DNA
cacaacccagcgcggagaca

SEQ ID NO: 236701 - DNA, 20 bp, synthetic construct
  source 1..20: mol_type = other DNA
gcacaacccagcgcggagac

SEQ ID NO: 236702 - DNA, 20 bp, synthetic construct
  source 1..20: mol_type = other DNA
agcacaacccagcgcggaga

SEQ ID NO: 236703 - DNA, 20 bp, synthetic construct
  source 1..20: mol_type = other DNA
tagcacaacccagcgcggag

SEQ ID NO: 236704 - DNA, 20 bp, synthetic construct
  source 1..20: mol_type = other DNA
gtagcacaacccagcgcgga

SEQ ID NO: 236705 - DNA, 20 bp, synthetic construct
  source 1..20: mol_type = other DNA
tgtagcacaacccagcgcgg

SEQ ID NO: 236706 - DNA, 20 bp, synthetic construct
  source 1..20: mol_type = other DNA
ttgtagcacaacccagcgcg

SEQ ID NO: 236707 - DNA, 20 bp, synthetic construct
  source 1..20: mol_type = other DNA
cttgtagcacaacccagcgc

SEQ ID NO: 236708 - DNA, 20 bp, synthetic construct
  source 1..20: mol_type = other DNA
ccttgtagcacaacccagcg

SEQ ID NO: 236709 - DNA, 20 bp, synthetic construct
  source 1..20: mol_type = other DNA
tccttgtagcacaacccagc

SEQ ID NO: 236710 - DNA, 20 bp, synthetic construct
  source 1..20: mol_type = other DNA
ctccttgtagcacaacccag

SEQ ID NO: 236711 - DNA, 20 bp, synthetic construct
  source 1..20: mol_type = other DNA
gctccttgtagcacaaccca

SEQ ID NO: 236712 - DNA, 20 bp, synthetic construct
  source 1..20: mol_type = other DNA
ggctccttgtagcacaaccc

SEQ ID NO: 236713 - DNA, 20 bp, synthetic construct
  source 1..20: mol_type = other DNA
gggctccttgtagcacaacc

SEQ ID NO: 236714 - DNA, 20 bp, synthetic construct
  source 1..20: mol_type = other DNA
agggctccttgtagcacaac

SEQ ID NO: 236715 - DNA, 20 bp, synthetic construct
  source 1..20: mol_type = other DNA
aagggctccttgtagcacaa

SEQ ID NO: 236716 - DNA, 20 bp, synthetic construct
  source 1..20: mol_type = other DNA
gaagggctccttgtagcaca

SEQ ID NO: 236717 - DNA, 20 bp, synthetic construct
  source 1..20: mol_type = other DNA
agaagggctccttgtagcac

SEQ ID NO: 236718 - DNA, 20 bp, synthetic construct
  source 1..20: mol_type = other DNA
aagaagggctccttgtagca

SEQ ID NO: 236719 - DNA, 20 bp, synthetic construct
  source 1..20: mol_type = other DNA
aaagaagggctccttgtagc

SEQ ID NO: 236720 - DNA, 20 bp, synthetic construct
  source 1..20: mol_type = other DNA
gaaagaagggctccttgtag

SEQ ID NO: 236721 - DNA, 20 bp, synthetic construct
  source 1..20: mol_type = other DNA
ggaaagaagggctccttgta

SEQ ID NO: 236722 - DNA, 20 bp, synthetic construct
  source 1..20: mol_type = other DNA
tggaaagaagggctccttgt

SEQ ID NO: 236723 - DNA, 20 bp, synthetic construct
  source 1..20: mol_type = other DNA
atggaaagaagggctccttg

SEQ ID NO: 236724 - DNA, 20 bp, synthetic construct
  source 1..20: mol_type = other DNA
catggaaagaagggctcctt

SEQ ID NO: 236725 - DNA, 20 bp, synthetic construct
  source 1..20: mol_type = other DNA
ccatggaaagaagggctcct

SEQ ID NO: 236726 - DNA, 20 bp, synthetic construct
  source 1..20: mol_type = other DNA
cccatggaaagaagggctcc

SEQ ID NO: 236727 - DNA, 20 bp, synthetic construct
  source 1..20: mol_type = other DNA
acccatggaaagaagggctc

SEQ ID NO: 236728 - DNA, 20 bp, synthetic construct
  source 1..20: mol_type = other DNA
cacccatggaaagaagggct

SEQ ID NO: 236729 - DNA, 20 bp, synthetic construct
  source 1..20: mol_type = other DNA
acacccatggaaagaagggc

SEQ ID NO: 236730 - DNA, 20 bp, synthetic construct
  source 1..20: mol_type = other DNA
cacacccatggaaagaaggg

SEQ ID NO: 236731 - DNA, 20 bp, synthetic construct
  source 1..20: mol_type = other DNA
ccacacccatggaaagaagg

SEQ ID NO: 236732 - DNA, 20 bp, synthetic construct
  source 1..20: mol_type = other DNA
gccacacccatggaaagaag

SEQ ID NO: 236733 - DNA, 20 bp, synthetic construct
  source 1..20: mol_type = other DNA
agccacacccatggaaagaa

SEQ ID NO: 236734 - DNA, 20 bp, synthetic construct
  source 1..20: mol_type = other DNA
cagccacacccatggaaaga

SEQ ID NO: 236735 - DNA, 20 bp, synthetic construct
  source 1..20: mol_type = other DNA
ccagccacacccatggaaag

SEQ ID NO: 236736 - DNA, 20 bp, synthetic construct
  source 1..20: mol_type = other DNA
gccagccacacccatggaaa

SEQ ID NO: 236737 - DNA, 20 bp, synthetic construct
  source 1..20: mol_type = other DNA
tgccagccacacccatggaa

SEQ ID NO: 236738 - DNA, 20 bp, synthetic construct
  source 1..20: mol_type = other DNA
ctgccagccacacccatgga

SEQ ID NO: 236739 - DNA, 20 bp, synthetic construct
  source 1..20: mol_type = other DNA
actgccagccacacccatgg

SEQ ID NO: 236740 - DNA, 20 bp, synthetic construct
  source 1..20: mol_type = other DNA
cactgccagccacacccatg

SEQ ID NO: 236741 - DNA, 20 bp, synthetic construct
  source 1..20: mol_type = other DNA
tcactgccagccacacccat

SEQ ID NO: 236742 - DNA, 20 bp, synthetic construct
  source 1..20: mol_type = other DNA
ctcactgccagccacaccca

SEQ ID NO: 236743 - DNA, 20 bp, synthetic construct
  source 1..20: mol_type = other DNA
actcactgccagccacaccc

SEQ ID NO: 236744 - DNA, 20 bp, synthetic construct
  source 1..20: mol_type = other DNA
cactcactgccagccacacc

SEQ ID NO: 236745 - DNA, 20 bp, synthetic construct
  source 1..20: mol_type = other DNA
gcactcactgccagccacac

SEQ ID NO: 236746 - DNA, 20 bp, synthetic construct
  source 1..20: mol_type = other DNA
agcactcactgccagccaca

SEQ ID NO: 236747 - DNA, 20 bp, synthetic construct
  source 1..20: mol_type = other DNA
gagcactcactgccagccac

SEQ ID NO: 236748 - DNA, 20 bp, synthetic construct
  source 1..20: mol_type = other DNA
tgagcactcactgccagcca

SEQ ID NO: 236749 - DNA, 20 bp, synthetic construct
  source 1..20: mol_type = other DNA
gtgagcactcactgccagcc

SEQ ID NO: 236750 - DNA, 20 bp, synthetic construct
  source 1..20: mol_type = other DNA
tgtgagcactcactgccagc

SEQ ID NO: 236751 - DNA, 20 bp, synthetic construct
  source 1..20: mol_type = other DNA
ctgtgagcactcactgccag

SEQ ID NO: 236752 - DNA, 20 bp, synthetic construct
  source 1..20: mol_type = other DNA
gctgtgagcactcactgcca

SEQ ID NO: 236753 - DNA, 20 bp, synthetic construct
  source 1..20: mol_type = other DNA
tgctgtgagcactcactgcc

SEQ ID NO: 236754 - DNA, 20 bp, synthetic construct
  source 1..20: mol_type = other DNA
ttgctgtgagcactcactgc

SEQ ID NO: 236755 - DNA, 20 bp, synthetic construct
  source 1..20: mol_type = other DNA
gttgctgtgagcactcactg

SEQ ID NO: 236756 - DNA, 20 bp, synthetic construct
  source 1..20: mol_type = other DNA
tgttgctgtgagcactcact

SEQ ID NO: 236757 - DNA, 20 bp, synthetic construct
  source 1..20: mol_type = other DNA
ctgttgctgtgagcactcac

SEQ ID NO: 236758 - DNA, 20 bp, synthetic construct
  source 1..20: mol_type = other DNA
gctgttgctgtgagcactca

SEQ ID NO: 236759 - DNA, 20 bp, synthetic construct
  source 1..20: mol_type = other DNA
ggctgttgctgtgagcactc

SEQ ID NO: 236760 - DNA, 20 bp, synthetic construct
  source 1..20: mol_type = other DNA
gggctgttgctgtgagcact

SEQ ID NO: 236761 - DNA, 20 bp, synthetic construct
  source 1..20: mol_type = other DNA
tgggctgttgctgtgagcac

SEQ ID NO: 236762 - DNA, 20 bp, synthetic construct
  source 1..20: mol_type = other DNA
gtgggctgttgctgtgagca

SEQ ID NO: 236763 - DNA, 20 bp, synthetic construct
  source 1..20: mol_type = other DNA
tgtgggctgttgctgtgagc

SEQ ID NO: 236764 - DNA, 20 bp, synthetic construct
  source 1..20: mol_type = other DNA
ctgtgggctgttgctgtgag

SEQ ID NO: 236765 - DNA, 20 bp, synthetic construct
  source 1..20: mol_type = other DNA
actgtgggctgttgctgtga

SEQ ID NO: 236766 - DNA, 20 bp, synthetic construct
  source 1..20: mol_type = other DNA
cactgtgggctgttgctgtg

SEQ ID NO: 236767 - DNA, 20 bp, synthetic construct
  source 1..20: mol_type = other DNA
gcactgtgggctgttgctgt

SEQ ID NO: 236768 - DNA, 20 bp, synthetic construct
  source 1..20: mol_type = other DNA
tgcactgtgggctgttgctg

SEQ ID NO: 236769 - DNA, 20 bp, synthetic construct
  source 1..20: mol_type = other DNA
ctgcactgtgggctgttgct

SEQ ID NO: 236770 - DNA, 20 bp, synthetic construct
  source 1..20: mol_type = other DNA
gctgcactgtgggctgttgc

SEQ ID NO: 236771 - DNA, 20 bp, synthetic construct
  source 1..20: mol_type = other DNA
ggctgcactgtgggctgttg

SEQ ID NO: 236772 - DNA, 20 bp, synthetic construct
  source 1..20: mol_type = other DNA
gggctgcactgtgggctgtt

SEQ ID NO: 236773 - DNA, 20 bp, synthetic construct
  source 1..20: mol_type = other DNA
cgggctgcactgtgggctgt

SEQ ID NO: 236774 - DNA, 20 bp, synthetic construct
  source 1..20: mol_type = other DNA
tcgggctgcactgtgggctg

SEQ ID NO: 236775 - DNA, 20 bp, synthetic construct
  source 1..20: mol_type = other DNA
ctcgggctgcactgtgggct

SEQ ID NO: 236776 - DNA, 20 bp, synthetic construct
  source 1..20: mol_type = other DNA
cctcgggctgcactgtgggc

SEQ ID NO: 236777 - DNA, 20 bp, synthetic construct
  source 1..20: mol_type = other DNA
ccctcgggctgcactgtggg

SEQ ID NO: 236778 - DNA, 20 bp, synthetic construct
  source 1..20: mol_type = other DNA
gccctcgggctgcactgtgg

SEQ ID NO: 236779 - DNA, 20 bp, synthetic construct
  source 1..20: mol_type = other DNA
tgccctcgggctgcactgtg

SEQ ID NO: 236780 - DNA, 20 bp, synthetic construct
  source 1..20: mol_type = other DNA
ctgccctcgggctgcactgt

SEQ ID NO: 236781 - DNA, 20 bp, synthetic construct
  source 1..20: mol_type = other DNA
cctgccctcgggctgcactg

SEQ ID NO: 236782 - DNA, 20 bp, synthetic construct
  source 1..20: mol_type = other DNA
tcctgccctcgggctgcact

SEQ ID NO: 236783 - DNA, 20 bp, synthetic construct
  source 1..20: mol_type = other DNA
atcctgccctcgggctgcac

SEQ ID NO: 236784 - DNA, 20 bp, synthetic construct
  source 1..20: mol_type = other DNA
catcctgccctcgggctgca

SEQ ID NO: 236785 - DNA, 20 bp, synthetic construct
  source 1..20: mol_type = other DNA
ccatcctgccctcgggctgc

SEQ ID NO: 236786 - DNA, 20 bp, synthetic construct
  source 1..20: mol_type = other DNA
tccatcctgccctcgggctg

SEQ ID NO: 236787 - DNA, 20 bp, synthetic construct
  source 1..20: mol_type = other DNA
gtccatcctgccctcgggct

SEQ ID NO: 236788 - DNA, 20 bp, synthetic construct
  source 1..20: mol_type = other DNA
agtccatcctgccctcgggc

SEQ ID NO: 236789 - DNA, 20 bp, synthetic construct
  source 1..20: mol_type = other DNA
gagtccatcctgccctcggg

SEQ ID NO: 236790 - DNA, 20 bp, synthetic construct
  source 1..20: mol_type = other DNA
tgagtccatcctgccctcgg

SEQ ID NO: 236791 - DNA, 20 bp, synthetic construct
  source 1..20: mol_type = other DNA
ctgagtccatcctgccctcg

SEQ ID NO: 236792 - DNA, 20 bp, synthetic construct
  source 1..20: mol_type = other DNA
actgagtccatcctgccctc

SEQ ID NO: 236793 - DNA, 20 bp, synthetic construct
  source 1..20: mol_type = other DNA
gactgagtccatcctgccct

SEQ ID NO: 236794 - DNA, 20 bp, synthetic construct
  source 1..20: mol_type = other DNA
ggactgagtccatcctgccc

SEQ ID NO: 236795 - DNA, 20 bp, synthetic construct
  source 1..20: mol_type = other DNA
gggactgagtccatcctgcc

SEQ ID NO: 236796 - DNA, 20 bp, synthetic construct
  source 1..20: mol_type = other DNA
agggactgagtccatcctgc

SEQ ID NO: 236797 - DNA, 20 bp, synthetic construct
  source 1..20: mol_type = other DNA
cagggactgagtccatcctg

SEQ ID NO: 236798 - DNA, 20 bp, synthetic construct
  source 1..20: mol_type = other DNA
gcagggactgagtccatcct

SEQ ID NO: 236799 - DNA, 20 bp, synthetic construct
  source 1..20: mol_type = other DNA
ggcagggactgagtccatcc

SEQ ID NO: 236800 - DNA, 20 bp, synthetic construct
  source 1..20: mol_type = other DNA
aggcagggactgagtccatc

SEQ ID NO: 236801 - DNA, 20 bp, synthetic construct
  source 1..20: mol_type = other DNA
gaggcagggactgagtccat

SEQ ID NO: 236802 - DNA, 20 bp, synthetic construct
  source 1..20: mol_type = other DNA
ggaggcagggactgagtcca

SEQ ID NO: 236803 - DNA, 20 bp, synthetic construct
  source 1..20: mol_type = other DNA
tggaggcagggactgagtcc

SEQ ID NO: 236804 - DNA, 20 bp, synthetic construct
  source 1..20: mol_type = other DNA
atggaggcagggactgagtc

SEQ ID NO: 236805 - DNA, 20 bp, synthetic construct
  source 1..20: mol_type = other DNA
tatggaggcagggactgagt

SEQ ID NO: 236806 - DNA, 20 bp, synthetic construct
  source 1..20: mol_type = other DNA
gtatggaggcagggactgag

SEQ ID NO: 236807 - DNA, 20 bp, synthetic construct
  source 1..20: mol_type = other DNA
ggtatggaggcagggactga

SEQ ID NO: 236808 - DNA, 20 bp, synthetic construct
  source 1..20: mol_type = other DNA
gggtatggaggcagggactg

SEQ ID NO: 236809 - DNA, 20 bp, synthetic construct
  source 1..20: mol_type = other DNA
tgggtatggaggcagggact

SEQ ID NO: 236810 - DNA, 20 bp, synthetic construct
  source 1..20: mol_type = other DNA
atgggtatggaggcagggac

SEQ ID NO: 236811 - DNA, 20 bp, synthetic construct
  source 1..20: mol_type = other DNA
aatgggtatggaggcaggga

SEQ ID NO: 236812 - DNA, 20 bp, synthetic construct
  source 1..20: mol_type = other DNA
aaatgggtatggaggcaggg

SEQ ID NO: 236813 - DNA, 20 bp, synthetic construct
  source 1..20: mol_type = other DNA
gaaatgggtatggaggcagg

SEQ ID NO: 236814 - DNA, 20 bp, synthetic construct
  source 1..20: mol_type = other DNA
agaaatgggtatggaggcag

SEQ ID NO: 236815 - DNA, 20 bp, synthetic construct
  source 1..20: mol_type = other DNA
tagaaatgggtatggaggca

SEQ ID NO: 236816 - DNA, 20 bp, synthetic construct
  source 1..20: mol_type = other DNA
ttagaaatgggtatggaggc

SEQ ID NO: 236817 - DNA, 20 bp, synthetic construct
  source 1..20: mol_type = other DNA
cttagaaatgggtatggagg

SEQ ID NO: 236818 - DNA, 20 bp, synthetic construct
  source 1..20: mol_type = other DNA
ccttagaaatgggtatggag

SEQ ID NO: 236819 - DNA, 20 bp, synthetic construct
  source 1..20: mol_type = other DNA
tccttagaaatgggtatgga

SEQ ID NO: 236820 - DNA, 20 bp, synthetic construct
  source 1..20: mol_type = other DNA
ctccttagaaatgggtatgg

SEQ ID NO: 236821 - DNA, 20 bp, synthetic construct
  source 1..20: mol_type = other DNA
cctccttagaaatgggtatg

SEQ ID NO: 236822 - DNA, 20 bp, synthetic construct
  source 1..20: mol_type = other DNA
gcctccttagaaatgggtat

SEQ ID NO: 236823 - DNA, 20 bp, synthetic construct
  source 1..20: mol_type = other DNA
tgcctccttagaaatgggta

SEQ ID NO: 236824 - DNA, 20 bp, synthetic construct
  source 1..20: mol_type = other DNA
ttgcctccttagaaatgggt

SEQ ID NO: 236825 - DNA, 20 bp, synthetic construct
  source 1..20: mol_type = other DNA
tttgcctccttagaaatggg

SEQ ID NO: 236826 - DNA, 20 bp, synthetic construct
  source 1..20: mol_type = other DNA
ttttgcctccttagaaatgg

SEQ ID NO: 236827 - DNA, 20 bp, synthetic construct
  source 1..20: mol_type = other DNA
attttgcctccttagaaatg

SEQ ID NO: 236828 - DNA, 20 bp, synthetic construct
  source 1..20: mol_type = other DNA
cattttgcctccttagaaat

SEQ ID NO: 236829 - DNA, 20 bp, synthetic construct
  source 1..20: mol_type = other DNA
ccattttgcctccttagaaa

SEQ ID NO: 236830 - DNA, 20 bp, synthetic construct
  source 1..20: mol_type = other DNA
gccattttgcctccttagaa

SEQ ID NO: 236831 - DNA, 20 bp, synthetic construct
  source 1..20: mol_type = other DNA
tgccattttgcctccttaga

SEQ ID NO: 236832 - DNA, 20 bp, synthetic construct
  source 1..20: mol_type = other DNA
ttgccattttgcctccttag

SEQ ID NO: 236833 - DNA, 20 bp, synthetic construct
  source 1..20: mol_type = other DNA
tttgccattttgcctcctta

SEQ ID NO: 236834 - DNA, 20 bp, synthetic construct
  source 1..20: mol_type = other DNA
gtttgccattttgcctcctt

SEQ ID NO: 236835 - DNA, 20 bp, synthetic construct
  source 1..20: mol_type = other DNA
tgtttgccattttgcctcct

SEQ ID NO: 236836 - DNA, 20 bp, synthetic construct
  source 1..20: mol_type = other DNA
gtgtttgccattttgcctcc

SEQ ID NO: 236837 - DNA, 20 bp, synthetic construct
  source 1..20: mol_type = other DNA
agtgtttgccattttgcctc

SEQ ID NO: 236838 - DNA, 20 bp, synthetic construct
  source 1..20: mol_type = other DNA
gagtgtttgccattttgcct

SEQ ID NO: 236839 - DNA, 20 bp, synthetic construct
  source 1..20: mol_type = other DNA
agagtgtttgccattttgcc

SEQ ID NO: 236840 - DNA, 20 bp, synthetic construct
  source 1..20: mol_type = other DNA
tagagtgtttgccattttgc

SEQ ID NO: 236841 - DNA, 20 bp, synthetic construct
  source 1..20: mol_type = other DNA
gtagagtgtttgccattttg

SEQ ID NO: 236842 - DNA, 20 bp, synthetic construct
  source 1..20: mol_type = other DNA
agtagagtgtttgccatttt

SEQ ID NO: 236843 - DNA, 20 bp, synthetic construct
  source 1..20: mol_type = other DNA
aagtagagtgtttgccattt

SEQ ID NO: 236844 - DNA, 20 bp, synthetic construct
  source 1..20: mol_type = other DNA
aaagtagagtgtttgccatt

SEQ ID NO: 236845 - DNA, 20 bp, synthetic construct
  source 1..20: mol_type = other DNA
aaaagtagagtgtttgccat

SEQ ID NO: 236846 - DNA, 20 bp, synthetic construct
  source 1..20: mol_type = other DNA
gaaaagtagagtgtttgcca

SEQ ID NO: 236847 - DNA, 20 bp, synthetic construct
  source 1..20: mol_type = other DNA
agaaaagtagagtgtttgcc

SEQ ID NO: 236848 - DNA, 20 bp, synthetic construct
  source 1..20: mol_type = other DNA
gagaaaagtagagtgtttgc

SEQ ID NO: 236849 - DNA, 20 bp, synthetic construct
  source 1..20: mol_type = other DNA
agagaaaagtagagtgtttg

SEQ ID NO: 236850 - DNA, 20 bp, synthetic construct
  source 1..20: mol_type = other DNA
aagagaaaagtagagtgttt

SEQ ID NO: 236851 - DNA, 20 bp, synthetic construct
  source 1..20: mol_type = other DNA
aaagagaaaagtagagtgtt

SEQ ID NO: 236852 - DNA, 20 bp, synthetic construct
  source 1..20: mol_type = other DNA
aaaagagaaaagtagagtgt

SEQ ID NO: 236853 - DNA, 20 bp, synthetic construct
  source 1..20: mol_type = other DNA
taaaagagaaaagtagagtg

SEQ ID NO: 236854 - DNA, 20 bp, synthetic construct
  source 1..20: mol_type = other DNA
ttaaaagagaaaagtagagt

SEQ ID NO: 236855 - DNA, 20 bp, synthetic construct
  source 1..20: mol_type = other DNA
attaaaagagaaaagtagag

SEQ ID NO: 236856 - DNA, 20 bp, synthetic construct
  source 1..20: mol_type = other DNA
cattaaaagagaaaagtaga

SEQ ID NO: 236857 - DNA, 20 bp, synthetic construct
  source 1..20: mol_type = other DNA
gcattaaaagagaaaagtag

SEQ ID NO: 236858 - DNA, 20 bp, synthetic construct
  source 1..20: mol_type = other DNA
agcattaaaagagaaaagta

SEQ ID NO: 236859 - DNA, 20 bp, synthetic construct
  source 1..20: mol_type = other DNA
tagcattaaaagagaaaagt

SEQ ID NO: 236860 - DNA, 20 bp, synthetic construct
  source 1..20: mol_type = other DNA
ttagcattaaaagagaaaag

SEQ ID NO: 236861 - DNA, 20 bp, synthetic construct
  source 1..20: mol_type = other DNA
tttagcattaaaagagaaaa

SEQ ID NO: 236862 - DNA, 20 bp, synthetic construct
  source 1..20: mol_type = other DNA
ttttagcattaaaagagaaa

SEQ ID NO: 236863 - DNA, 20 bp, synthetic construct
  source 1..20: mol_type = other DNA
tttttagcattaaaagagaa

SEQ ID NO: 236864 - DNA, 20 bp, synthetic construct
  source 1..20: mol_type = other DNA
atttttagcattaaaagaga

SEQ ID NO: 236865 - DNA, 20 bp, synthetic construct
  source 1..20: mol_type = other DNA
tatttttagcattaaaagag

SEQ ID NO: 236866 - DNA, 20 bp, synthetic construct
  source 1..20: mol_type = other DNA
ttatttttagcattaaaaga

SEQ ID NO: 236867 - DNA, 20 bp, synthetic construct
  source 1..20: mol_type = other DNA
cttatttttagcattaaaag

SEQ ID NO: 236868 - DNA, 20 bp, synthetic construct
  source 1..20: mol_type = other DNA
tcttatttttagcattaaaa

SEQ ID NO: 236869 - DNA, 20 bp, synthetic construct
  source 1..20: mol_type = other DNA
ttcttatttttagcattaaa

SEQ ID NO: 236870 - DNA, 20 bp, synthetic construct
  source 1..20: mol_type = other DNA
tttcttatttttagcattaa

SEQ ID NO: 236871 - DNA, 20 bp, synthetic construct
  source 1..20: mol_type = other DNA
ttttcttatttttagcatta

SEQ ID NO: 236872 - DNA, 20 bp, synthetic construct
  source 1..20: mol_type = other DNA
gttttcttatttttagcatt

SEQ ID NO: 236873 - DNA, 20 bp, synthetic construct
  source 1..20: mol_type = other DNA
tgttttcttatttttagcat

SEQ ID NO: 236874 - DNA, 20 bp, synthetic construct
  source 1..20: mol_type = other DNA
gtgttttcttatttttagca

SEQ ID NO: 236875 - DNA, 20 bp, synthetic construct
  source 1..20: mol_type = other DNA
ggtgttttcttatttttagc

SEQ ID NO: 236876 - DNA, 20 bp, synthetic construct
  source 1..20: mol_type = other DNA
aggtgttttcttatttttag

SEQ ID NO: 236877 - DNA, 20 bp, synthetic construct
  source 1..20: mol_type = other DNA
aaggtgttttcttattttta

SEQ ID NO: 236878 - DNA, 20 bp, synthetic construct
  source 1..20: mol_type = other DNA
caaggtgttttcttattttt

SEQ ID NO: 236879 - DNA, 20 bp, synthetic construct
  source 1..20: mol_type = other DNA
gcaaggtgttttcttatttt

SEQ ID NO: 236880 - DNA, 20 bp, synthetic construct
  source 1..20: mol_type = other DNA
tgcaaggtgttttcttattt

SEQ ID NO: 236881 - DNA, 20 bp, synthetic construct
  source 1..20: mol_type = other DNA
ctgcaaggtgttttcttatt

SEQ ID NO: 236882 - DNA, 20 bp, synthetic construct
  source 1..20: mol_type = other DNA
gctgcaaggtgttttcttat

SEQ ID NO: 236883 - DNA, 20 bp, synthetic construct
  source 1..20: mol_type = other DNA
ggctgcaaggtgttttctta

SEQ ID NO: 236884 - DNA, 20 bp, synthetic construct
  source 1..20: mol_type = other DNA
gggctgcaaggtgttttctt

SEQ ID NO: 236885 - DNA, 20 bp, synthetic construct
  source 1..20: mol_type = other DNA
tgggctgcaaggtgttttct

SEQ ID NO: 236886 - DNA, 20 bp, synthetic construct
  source 1..20: mol_type = other DNA
ctgggctgcaaggtgttttc

SEQ ID NO: 236887 - DNA, 20 bp, synthetic construct
  source 1..20: mol_type = other DNA
cctgggctgcaaggtgtttt

SEQ ID NO: 236888 - DNA, 20 bp, synthetic construct
  source 1..20: mol_type = other DNA
ccctgggctgcaaggtgttt

SEQ ID NO: 236889 - DNA, 20 bp, synthetic construct
  source 1..20: mol_type = other DNA
accctgggctgcaaggtgtt

SEQ ID NO: 236890 - DNA, 20 bp, synthetic construct
  source 1..20: mol_type = other DNA
taccctgggctgcaaggtgt

SEQ ID NO: 236891 - DNA, 20 bp, synthetic construct
  source 1..20: mol_type = other DNA
ataccctgggctgcaaggtg

SEQ ID NO: 236892 - DNA, 20 bp, synthetic construct
  source 1..20: mol_type = other DNA
cataccctgggctgcaaggt

SEQ ID NO: 236893 - DNA, 20 bp, synthetic construct
  source 1..20: mol_type = other DNA
ccataccctgggctgcaagg

SEQ ID NO: 236894 - DNA, 20 bp, synthetic construct
  source 1..20: mol_type = other DNA
cccataccctgggctgcaag

SEQ ID NO: 236895 - DNA, 20 bp, synthetic construct
  source 1..20: mol_type = other DNA
acccataccctgggctgcaa

SEQ ID NO: 236896 - DNA, 20 bp, synthetic construct
  source 1..20: mol_type = other DNA
tacccataccctgggctgca

SEQ ID NO: 236897 - DNA, 20 bp, synthetic construct
  source 1..20: mol_type = other DNA
ctacccataccctgggctgc

SEQ ID NO: 236898 - DNA, 20 bp, synthetic construct
  source 1..20: mol_type = other DNA
actacccataccctgggctg

SEQ ID NO: 236899 - DNA, 20 bp, synthetic construct
  source 1..20: mol_type = other DNA
cactacccataccctgggct

SEQ ID NO: 236900 - DNA, 20 bp, synthetic construct
  source 1..20: mol_type = other DNA
gcactacccataccctgggc

SEQ ID NO: 236901 - DNA, 20 bp, synthetic construct
  source 1..20: mol_type = other DNA
tgcactacccataccctggg

SEQ ID NO: 236902 - DNA, 20 bp, synthetic construct
  source 1..20: mol_type = other DNA
atgcactacccataccctgg

SEQ ID NO: 236903 - DNA, 20 bp, synthetic construct
  source 1..20: mol_type = other DNA
catgcactacccataccctg

SEQ ID NO: 236904 - DNA, 20 bp, synthetic construct
  source 1..20: mol_type = other DNA
ccatgcactacccataccct

SEQ ID NO: 236905 - DNA, 20 bp, synthetic construct
  source 1..20: mol_type = other DNA
tccatgcactacccataccc

SEQ ID NO: 236906 - DNA, 20 bp, synthetic construct
  source 1..20: mol_type = other DNA
ttccatgcactacccatacc

SEQ ID NO: 236907 - DNA, 20 bp, synthetic construct
  source 1..20: mol_type = other DNA
cttccatgcactacccatac

SEQ ID NO: 236908 - DNA, 20 bp, synthetic construct
  source 1..20: mol_type = other DNA
gcttccatgcactacccata

SEQ ID NO: 236909 - DNA, 20 bp, synthetic construct
  source 1..20: mol_type = other DNA
ggcttccatgcactacccat

SEQ ID NO: 236910 - DNA, 20 bp, synthetic construct
  source 1..20: mol_type = other DNA
cggcttccatgcactaccca

SEQ ID NO: 236911 - DNA, 20 bp, synthetic construct
  source 1..20: mol_type = other DNA
acggcttccatgcactaccc

SEQ ID NO: 236912 - DNA, 20 bp, synthetic construct
  source 1..20: mol_type = other DNA
cacggcttccatgcactacc

SEQ ID NO: 236913 - DNA, 20 bp, synthetic construct
  source 1..20: mol_type = other DNA
ccacggcttccatgcactac

SEQ ID NO: 236914 - DNA, 20 bp, synthetic construct
  source 1..20: mol_type = other DNA
tccacggcttccatgcacta

SEQ ID NO: 236915 - DNA, 20 bp, synthetic construct
  source 1..20: mol_type = other DNA
ctccacggcttccatgcact

SEQ ID NO: 236916 - DNA, 20 bp, synthetic construct
  source 1..20: mol_type = other DNA
actccacggcttccatgcac

SEQ ID NO: 236917 - DNA, 20 bp, synthetic construct
  source 1..20: mol_type = other DNA
aactccacggcttccatgca

SEQ ID NO: 236918 - DNA, 20 bp, synthetic construct
  source 1..20: mol_type = other DNA
caactccacggcttccatgc

SEQ ID NO: 236919 - DNA, 20 bp, synthetic construct
  source 1..20: mol_type = other DNA
acaactccacggcttccatg

SEQ ID NO: 236920 - DNA, 20 bp, synthetic construct
  source 1..20: mol_type = other DNA
cacaactccacggcttccat

SEQ ID NO: 236921 - DNA, 20 bp, synthetic construct
  source 1..20: mol_type = other DNA
tcacaactccacggcttcca

SEQ ID NO: 236922 - DNA, 20 bp, synthetic construct
  source 1..20: mol_type = other DNA
ctcacaactccacggcttcc

SEQ ID NO: 236923 - DNA, 20 bp, synthetic construct
  source 1..20: mol_type = other DNA
cctcacaactccacggcttc

SEQ ID NO: 236924 - DNA, 20 bp, synthetic construct
  source 1..20: mol_type = other DNA
acctcacaactccacggctt

SEQ ID NO: 236925 - DNA, 20 bp, synthetic construct
  source 1..20: mol_type = other DNA
cacctcacaactccacggct

SEQ ID NO: 236926 - DNA, 20 bp, synthetic construct
  source 1..20: mol_type = other DNA
ccacctcacaactccacggc

SEQ ID NO: 236927 - DNA, 20 bp, synthetic construct
  source 1..20: mol_type = other DNA
cccacctcacaactccacgg

SEQ ID NO: 236928 - DNA, 20 bp, synthetic construct
  source 1..20: mol_type = other DNA
tcccacctcacaactccacg

SEQ ID NO: 236929 - DNA, 20 bp, synthetic construct
  source 1..20: mol_type = other DNA
ttcccacctcacaactccac

SEQ ID NO: 236930 - DNA, 20 bp, synthetic construct
  source 1..20: mol_type = other DNA
cttcccacctcacaactcca

SEQ ID NO: 236931 - DNA, 20 bp, synthetic construct
  source 1..20: mol_type = other DNA
acttcccacctcacaactcc

SEQ ID NO: 236932 - DNA, 20 bp, synthetic construct
  source 1..20: mol_type = other DNA
cacttcccacctcacaactc

SEQ ID NO: 236933 - DNA, 20 bp, synthetic construct
  source 1..20: mol_type = other DNA
tcacttcccacctcacaact

SEQ ID NO: 236934 - DNA, 20 bp, synthetic construct
  source 1..20: mol_type = other DNA
gtcacttcccacctcacaac

SEQ ID NO: 236935 - DNA, 20 bp, synthetic construct
  source 1..20: mol_type = other DNA
ggtcacttcccacctcacaa

SEQ ID NO: 236936 - DNA, 20 bp, synthetic construct
  source 1..20: mol_type = other DNA
aggtcacttcccacctcaca

SEQ ID NO: 236937 - DNA, 20 bp, synthetic construct
  source 1..20: mol_type = other DNA
gaggtcacttcccacctcac

SEQ ID NO: 236938 - DNA, 20 bp, synthetic construct
  source 1..20: mol_type = other DNA
agaggtcacttcccacctca

SEQ ID NO: 236939 - DNA, 20 bp, synthetic construct
  source 1..20: mol_type = other DNA
cagaggtcacttcccacctc

SEQ ID NO: 236940 - DNA, 20 bp, synthetic construct
  source 1..20: mol_type = other DNA
gcagaggtcacttcccacct

SEQ ID NO: 236941 - DNA, 20 bp, synthetic construct
  source 1..20: mol_type = other DNA
agcagaggtcacttcccacc

SEQ ID NO: 236942 - DNA, 20 bp, synthetic construct
  source 1..20: mol_type = other DNA
cagcagaggtcacttcccac

SEQ ID NO: 236943 - DNA, 20 bp, synthetic construct
  source 1..20: mol_type = other DNA
ccagcagaggtcacttccca

SEQ ID NO: 236944 - DNA, 20 bp, synthetic construct
  source 1..20: mol_type = other DNA
tccagcagaggtcacttccc

SEQ ID NO: 236945 - DNA, 20 bp, synthetic construct
  source 1..20: mol_type = other DNA
atccagcagaggtcacttcc

SEQ ID NO: 236946 - DNA, 20 bp, synthetic construct
  source 1..20: mol_type = other DNA
tatccagcagaggtcacttc

SEQ ID NO: 236947 - DNA, 20 bp, synthetic construct
  source 1..20: mol_type = other DNA
atatccagcagaggtcactt

SEQ ID NO: 236948 - DNA, 20 bp, synthetic construct
  source 1..20: mol_type = other DNA
catatccagcagaggtcact

SEQ ID NO: 236949 - DNA, 20 bp, synthetic construct
  source 1..20: mol_type = other DNA
acatatccagcagaggtcac

SEQ ID NO: 236950 - DNA, 20 bp, synthetic construct
  source 1..20: mol_type = other DNA
gacatatccagcagaggtca

SEQ ID NO: 236951 - DNA, 20 bp, synthetic construct
  source 1..20: mol_type = other DNA
agacatatccagcagaggtc

SEQ ID NO: 236952 - DNA, 20 bp, synthetic construct
  source 1..20: mol_type = other DNA
tagacatatccagcagaggt

SEQ ID NO: 236953 - DNA, 20 bp, synthetic construct
  source 1..20: mol_type = other DNA
atagacatatccagcagagg

SEQ ID NO: 236954 - DNA, 20 bp, synthetic construct
  source 1..20: mol_type = other DNA
aatagacatatccagcagag

SEQ ID NO: 236955 - DNA, 20 bp, synthetic construct
  source 1..20: mol_type = other DNA
gaatagacatatccagcaga

SEQ ID NO: 236956 - DNA, 20 bp, synthetic construct
  source 1..20: mol_type = other DNA
tgaatagacatatccagcag

SEQ ID NO: 236957 - DNA, 20 bp, synthetic construct
  source 1..20: mol_type = other DNA
ctgaatagacatatccagca

SEQ ID NO: 236958 - DNA, 20 bp, synthetic construct
  source 1..20: mol_type = other DNA
cctgaatagacatatccagc

SEQ ID NO: 236959 - DNA, 20 bp, synthetic construct
  source 1..20: mol_type = other DNA
tcctgaatagacatatccag

SEQ ID NO: 236960 - DNA, 20 bp, synthetic construct
  source 1..20: mol_type = other DNA
ttcctgaatagacatatcca

SEQ ID NO: 236961 - DNA, 20 bp, synthetic construct
  source 1..20: mol_type = other DNA
cttcctgaatagacatatcc

SEQ ID NO: 236962 - DNA, 20 bp, synthetic construct
  source 1..20: mol_type = other DNA
tcttcctgaatagacatatc

SEQ ID NO: 236963 - DNA, 20 bp, synthetic construct
  source 1..20: mol_type = other DNA
atcttcctgaatagacatat

SEQ ID NO: 236964 - DNA, 20 bp, synthetic construct
  source 1..20: mol_type = other DNA
aatcttcctgaatagacata

SEQ ID NO: 236965 - DNA, 20 bp, synthetic construct
  source 1..20: mol_type = other DNA
caatcttcctgaatagacat

SEQ ID NO: 236966 - DNA, 20 bp, synthetic construct
  source 1..20: mol_type = other DNA
gcaatcttcctgaatagaca

SEQ ID NO: 236967 - DNA, 20 bp, synthetic construct
  source 1..20: mol_type = other DNA
agcaatcttcctgaatagac

SEQ ID NO: 236968 - DNA, 20 bp, synthetic construct
  source 1..20: mol_type = other DNA
cagcaatcttcctgaataga

SEQ ID NO: 236969 - DNA, 20 bp, synthetic construct
  source 1..20: mol_type = other DNA
ccagcaatcttcctgaatag

SEQ ID NO: 236970 - DNA, 20 bp, synthetic construct
  source 1..20: mol_type = other DNA
tccagcaatcttcctgaata

SEQ ID NO: 236971 - DNA, 20 bp, synthetic construct
  source 1..20: mol_type = other DNA
ctccagcaatcttcctgaat

SEQ ID NO: 236972 - DNA, 20 bp, synthetic construct
  source 1..20: mol_type = other DNA
actccagcaatcttcctgaa

SEQ ID NO: 236973 - DNA, 20 bp, synthetic construct
  source 1..20: mol_type = other DNA
cactccagcaatcttcctga

SEQ ID NO: 236974 - DNA, 20 bp, synthetic construct
  source 1..20: mol_type = other DNA
ccactccagcaatcttcctg

SEQ ID NO: 236975 - DNA, 20 bp, synthetic construct
  source 1..20: mol_type = other DNA
cccactccagcaatcttcct

SEQ ID NO: 236976 - DNA, 20 bp, synthetic construct
  source 1..20: mol_type = other DNA
acccactccagcaatcttcc

SEQ ID NO: 236977 - DNA, 20 bp, synthetic construct
  source 1..20: mol_type = other DNA
cacccactccagcaatcttc

SEQ ID NO: 236978 - DNA, 20 bp, synthetic construct
  source 1..20: mol_type = other DNA
ccacccactccagcaatctt

SEQ ID NO: 236979 - DNA, 20 bp, synthetic construct
  source 1..20: mol_type = other DNA
cccacccactccagcaatct

SEQ ID NO: 236980 - DNA, 20 bp, synthetic construct
  source 1..20: mol_type = other DNA
ccccacccactccagcaatc

SEQ ID NO: 236981 - DNA, 20 bp, synthetic construct
  source 1..20: mol_type = other DNA
accccacccactccagcaat

SEQ ID NO: 236982 - DNA, 20 bp, synthetic construct
  source 1..20: mol_type = other DNA
gaccccacccactccagcaa

SEQ ID NO: 236983 - DNA, 20 bp, synthetic construct
  source 1..20: mol_type = other DNA
agaccccacccactccagca

SEQ ID NO: 236984 - DNA, 20 bp, synthetic construct
  source 1..20: mol_type = other DNA
gagaccccacccactccagc

SEQ ID NO: 236985 - DNA, 20 bp, synthetic construct
  source 1..20: mol_type = other DNA
agagaccccacccactccag

SEQ ID NO: 236986 - DNA, 20 bp, synthetic construct
  source 1..20: mol_type = other DNA
cagagaccccacccactcca

SEQ ID NO: 236987 - DNA, 20 bp, synthetic construct
  source 1..20: mol_type = other DNA
ccagagaccccacccactcc

SEQ ID NO: 236988 - DNA, 20 bp, synthetic construct
  source 1..20: mol_type = other DNA
cccagagaccccacccactc

SEQ ID NO: 236989 - DNA, 20 bp, synthetic construct
  source 1..20: mol_type = other DNA
tcccagagaccccacccact

SEQ ID NO: 236990 - DNA, 20 bp, synthetic construct
  source 1..20: mol_type = other DNA
ctcccagagaccccacccac

SEQ ID NO: 236991 - DNA, 20 bp, synthetic construct
  source 1..20: mol_type = other DNA
cctcccagagaccccaccca

SEQ ID NO: 236992 - DNA, 20 bp, synthetic construct
  source 1..20: mol_type = other DNA
acctcccagagaccccaccc

SEQ ID NO: 236993 - DNA, 20 bp, synthetic construct
  source 1..20: mol_type = other DNA
gacctcccagagaccccacc

SEQ ID NO: 236994 - DNA, 20 bp, synthetic construct
  source 1..20: mol_type = other DNA
ggacctcccagagaccccac

SEQ ID NO: 236995 - DNA, 20 bp, synthetic construct
  source 1..20: mol_type = other DNA
gggacctcccagagacccca

SEQ ID NO: 236996 - DNA, 20 bp, synthetic construct
  source 1..20: mol_type = other DNA
ggggacctcccagagacccc

SEQ ID NO: 236997 - DNA, 20 bp, synthetic construct
  source 1..20: mol_type = other DNA
aggggacctcccagagaccc

SEQ ID NO: 236998 - DNA, 20 bp, synthetic construct
  source 1..20: mol_type = other DNA
caggggacctcccagagacc

SEQ ID NO: 236999 - DNA, 20 bp, synthetic construct
  source 1..20: mol_type = other DNA
tcaggggacctcccagagac

SEQ ID NO: 237000 - DNA, 20 bp, synthetic construct
  source 1..20: mol_type = other DNA
ctcaggggacctcccagaga

SEQ ID NO: 237001 - DNA, 20 bp, synthetic construct
  source 1..20: mol_type = other DNA
actcaggggacctcccagag

SEQ ID NO: 237002 - DNA, 20 bp, synthetic construct
  source 1..20: mol_type = other DNA
cactcaggggacctcccaga

SEQ ID NO: 237003 - DNA, 20 bp, synthetic construct
  source 1..20: mol_type = other DNA
acactcaggggacctcccag

SEQ ID NO: 237004 - DNA, 20 bp, synthetic construct
  source 1..20: mol_type = other DNA
cacactcaggggacctccca

SEQ ID NO: 237005 - DNA, 20 bp, synthetic construct
  source 1..20: mol_type = other DNA
ccacactcaggggacctccc

SEQ ID NO: 237006 - DNA, 20 bp, synthetic construct
  source 1..20: mol_type = other DNA
cccacactcaggggacctcc

SEQ ID NO: 237007 - DNA, 20 bp, synthetic construct
  source 1..20: mol_type = other DNA
tcccacactcaggggacctc

SEQ ID NO: 237008 - DNA, 20 bp, synthetic construct
  source 1..20: mol_type = other DNA
ttcccacactcaggggacct

SEQ ID NO: 237009 - DNA, 20 bp, synthetic construct
  source 1..20: mol_type = other DNA
cttcccacactcaggggacc

SEQ ID NO: 237010 - DNA, 20 bp, synthetic construct
  source 1..20: mol_type = other DNA
gcttcccacactcaggggac

SEQ ID NO: 237011 - DNA, 20 bp, synthetic construct
  source 1..20: mol_type = other DNA
agcttcccacactcagggga

SEQ ID NO: 237012 - DNA, 20 bp, synthetic construct
  source 1..20: mol_type = other DNA
cagcttcccacactcagggg

SEQ ID NO: 237013 - DNA, 20 bp, synthetic construct
  source 1..20: mol_type = other DNA
ccagcttcccacactcaggg

SEQ ID NO: 237014 - DNA, 20 bp, synthetic construct
  source 1..20: mol_type = other DNA
cccagcttcccacactcagg

SEQ ID NO: 237015 - DNA, 20 bp, synthetic construct
  source 1..20: mol_type = other DNA
tcccagcttcccacactcag

SEQ ID NO: 237016 - DNA, 20 bp, synthetic construct
  source 1..20: mol_type = other DNA
gtcccagcttcccacactca

SEQ ID NO: 237017 - DNA, 20 bp, synthetic construct
  source 1..20: mol_type = other DNA
ggtcccagcttcccacactc

SEQ ID NO: 237018 - DNA, 20 bp, synthetic construct
  source 1..20: mol_type = other DNA
tggtcccagcttcccacact

SEQ ID NO: 237019 - DNA, 20 bp, synthetic construct
  source 1..20: mol_type = other DNA
gtggtcccagcttcccacac

SEQ ID NO: 237020 - DNA, 20 bp, synthetic construct
  source 1..20: mol_type = other DNA
ggtggtcccagcttcccaca

SEQ ID NO: 237021 - DNA, 20 bp, synthetic construct
  source 1..20: mol_type = other DNA
tggtggtcccagcttcccac

SEQ ID NO: 237022 - DNA, 20 bp, synthetic construct
  source 1..20: mol_type = other DNA
ctggtggtcccagcttccca

SEQ ID NO: 237023 - DNA, 20 bp, synthetic construct
  source 1..20: mol_type = other DNA
gctggtggtcccagcttccc

SEQ ID NO: 237024 - DNA, 20 bp, synthetic construct
  source 1..20: mol_type = other DNA
agctggtggtcccagcttcc

SEQ ID NO: 237025 - DNA, 20 bp, synthetic construct
  source 1..20: mol_type = other DNA
aagctggtggtcccagcttc

SEQ ID NO: 237026 - DNA, 20 bp, synthetic construct
  source 1..20: mol_type = other DNA
aaagctggtggtcccagctt

SEQ ID NO: 237027 - DNA, 20 bp, synthetic construct
  source 1..20: mol_type = other DNA
gaaagctggtggtcccagct

SEQ ID NO: 237028 - DNA, 20 bp, synthetic construct
  source 1..20: mol_type = other DNA
agaaagctggtggtcccagc

SEQ ID NO: 237029 - DNA, 20 bp, synthetic construct
  source 1..20: mol_type = other DNA
gagaaagctggtggtcccag

SEQ ID NO: 237030 - DNA, 20 bp, synthetic construct
  source 1..20: mol_type = other DNA
cgagaaagctggtggtccca

SEQ ID NO: 237031 - DNA, 20 bp, synthetic construct
  source 1..20: mol_type = other DNA
gcgagaaagctggtggtccc

SEQ ID NO: 237032 - DNA, 20 bp, synthetic construct
  source 1..20: mol_type = other DNA
tgcgagaaagctggtggtcc

SEQ ID NO: 237033 - DNA, 20 bp, synthetic construct
  source 1..20: mol_type = other DNA
gtgcgagaaagctggtggtc

SEQ ID NO: 237034 - DNA, 20 bp, synthetic construct
  source 1..20: mol_type = other DNA
tgtgcgagaaagctggtggt

SEQ ID NO: 237035 - DNA, 20 bp, synthetic construct
  source 1..20: mol_type = other DNA
ctgtgcgagaaagctggtgg

SEQ ID NO: 237036 - DNA, 20 bp, synthetic construct
  source 1..20: mol_type = other DNA
cctgtgcgagaaagctggtg

SEQ ID NO: 237037 - DNA, 20 bp, synthetic construct
  source 1..20: mol_type = other DNA
ccctgtgcgagaaagctggt

SEQ ID NO: 237038 - DNA, 20 bp, synthetic construct
  source 1..20: mol_type = other DNA
tccctgtgcgagaaagctgg

SEQ ID NO: 237039 - DNA, 20 bp, synthetic construct
  source 1..20: mol_type = other DNA
ctccctgtgcgagaaagctg

SEQ ID NO: 237040 - DNA, 20 bp, synthetic construct
  source 1..20: mol_type = other DNA
actccctgtgcgagaaagct

SEQ ID NO: 237041 - DNA, 20 bp, synthetic construct
  source 1..20: mol_type = other DNA
cactccctgtgcgagaaagc

SEQ ID NO: 237042 - DNA, 20 bp, synthetic construct
  source 1..20: mol_type = other DNA
ccactccctgtgcgagaaag

SEQ ID NO: 237043 - DNA, 20 bp, synthetic construct
  source 1..20: mol_type = other DNA
gccactccctgtgcgagaaa

SEQ ID NO: 237044 - DNA, 20 bp, synthetic construct
  source 1..20: mol_type = other DNA
ggccactccctgtgcgagaa

SEQ ID NO: 237045 - DNA, 20 bp, synthetic construct
  source 1..20: mol_type = other DNA
tggccactccctgtgcgaga

SEQ ID NO: 237046 - DNA, 20 bp, synthetic construct
  source 1..20: mol_type = other DNA
atggccactccctgtgcgag

SEQ ID NO: 237047 - DNA, 20 bp, synthetic construct
  source 1..20: mol_type = other DNA
gatggccactccctgtgcga

SEQ ID NO: 237048 - DNA, 20 bp, synthetic construct
  source 1..20: mol_type = other DNA
ggatggccactccctgtgcg

SEQ ID NO: 237049 - DNA, 20 bp, synthetic construct
  source 1..20: mol_type = other DNA
gggatggccactccctgtgc

SEQ ID NO: 237050 - DNA, 20 bp, synthetic construct
  source 1..20: mol_type = other DNA
tgggatggccactccctgtg

SEQ ID NO: 237051 - DNA, 20 bp, synthetic construct
  source 1..20: mol_type = other DNA
ctgggatggccactccctgt

SEQ ID NO: 237052 - DNA, 20 bp, synthetic construct
  source 1..20: mol_type = other DNA
gctgggatggccactccctg

SEQ ID NO: 237053 - DNA, 20 bp, synthetic construct
  source 1..20: mol_type = other DNA
agctgggatggccactccct

SEQ ID NO: 237054 - DNA, 20 bp, synthetic construct
  source 1..20: mol_type = other DNA
aagctgggatggccactccc

SEQ ID NO: 237055 - DNA, 20 bp, synthetic construct
  source 1..20: mol_type = other DNA
caagctgggatggccactcc

SEQ ID NO: 237056 - DNA, 20 bp, synthetic construct
  source 1..20: mol_type = other DNA
ccaagctgggatggccactc

SEQ ID NO: 237057 - DNA, 20 bp, synthetic construct
  source 1..20: mol_type = other DNA
tccaagctgggatggccact

SEQ ID NO: 237058 - DNA, 20 bp, synthetic construct
  source 1..20: mol_type = other DNA
ctccaagctgggatggccac

SEQ ID NO: 237059 - DNA, 20 bp, synthetic construct
  source 1..20: mol_type = other DNA
tctccaagctgggatggcca

SEQ ID NO: 237060 - DNA, 20 bp, synthetic construct
  source 1..20: mol_type = other DNA
ctctccaagctgggatggcc

SEQ ID NO: 237061 - DNA, 20 bp, synthetic construct
  source 1..20: mol_type = other DNA
cctctccaagctgggatggc

SEQ ID NO: 237062 - DNA, 20 bp, synthetic construct
  source 1..20: mol_type = other DNA
acctctccaagctgggatgg

SEQ ID NO: 237063 - DNA, 20 bp, synthetic construct
  source 1..20: mol_type = other DNA
aacctctccaagctgggatg

SEQ ID NO: 237064 - DNA, 20 bp, synthetic construct
  source 1..20: mol_type = other DNA
gaacctctccaagctgggat

SEQ ID NO: 237065 - DNA, 20 bp, synthetic construct
  source 1..20: mol_type = other DNA
ggaacctctccaagctggga

SEQ ID NO: 237066 - DNA, 20 bp, synthetic construct
  source 1..20: mol_type = other DNA
tggaacctctccaagctggg

SEQ ID NO: 237067 - DNA, 20 bp, synthetic construct
  source 1..20: mol_type = other DNA
ctggaacctctccaagctgg

SEQ ID NO: 237068 - DNA, 20 bp, synthetic construct
  source 1..20: mol_type = other DNA
cctggaacctctccaagctg

SEQ ID NO: 237069 - DNA, 20 bp, synthetic construct
  source 1..20: mol_type = other DNA
tcctggaacctctccaagct

SEQ ID NO: 237070 - DNA, 20 bp, synthetic construct
  source 1..20: mol_type = other DNA
gtcctggaacctctccaagc

SEQ ID NO: 237071 - DNA, 20 bp, synthetic construct
  source 1..20: mol_type = other DNA
agtcctggaacctctccaag

SEQ ID NO: 237072 - DNA, 20 bp, synthetic construct
  source 1..20: mol_type = other DNA
cagtcctggaacctctccaa

SEQ ID NO: 237073 - DNA, 20 bp, synthetic construct
  source 1..20: mol_type = other DNA
ccagtcctggaacctctcca

SEQ ID NO: 237074 - DNA, 20 bp, synthetic construct
  source 1..20: mol_type = other DNA
accagtcctggaacctctcc

SEQ ID NO: 237075 - DNA, 20 bp, synthetic construct
  source 1..20: mol_type = other DNA
aaccagtcctggaacctctc

SEQ ID NO: 237076 - DNA, 20 bp, synthetic construct
  source 1..20: mol_type = other DNA
caaccagtcctggaacctct

SEQ ID NO: 237077 - DNA, 20 bp, synthetic construct
  source 1..20: mol_type = other DNA
ccaaccagtcctggaacctc

SEQ ID NO: 237078 - DNA, 20 bp, synthetic construct
  source 1..20: mol_type = other DNA
cccaaccagtcctggaacct

SEQ ID NO: 237079 - DNA, 20 bp, synthetic construct
  source 1..20: mol_type = other DNA
tcccaaccagtcctggaacc

SEQ ID NO: 237080 - DNA, 20 bp, synthetic construct
  source 1..20: mol_type = other DNA
ctcccaaccagtcctggaac

SEQ ID NO: 237081 - DNA, 20 bp, synthetic construct
  source 1..20: mol_type = other DNA
cctcccaaccagtcctggaa

SEQ ID NO: 237082 - DNA, 20 bp, synthetic construct
  source 1..20: mol_type = other DNA
gcctcccaaccagtcctgga

SEQ ID NO: 237083 - DNA, 20 bp, synthetic construct
  source 1..20: mol_type = other DNA
tgcctcccaaccagtcctgg

SEQ ID NO: 237084 - DNA, 20 bp, synthetic construct
  source 1..20: mol_type = other DNA
gtgcctcccaaccagtcctg

SEQ ID NO: 237085 - DNA, 20 bp, synthetic construct
  source 1..20: mol_type = other DNA
cgtgcctcccaaccagtcct

SEQ ID NO: 237086 - DNA, 20 bp, synthetic construct
  source 1..20: mol_type = other DNA
acgtgcctcccaaccagtcc

SEQ ID NO: 237087 - DNA, 20 bp, synthetic construct
  source 1..20: mol_type = other DNA
aacgtgcctcccaaccagtc

SEQ ID NO: 237088 - DNA, 20 bp, synthetic construct
  source 1..20: mol_type = other DNA
aaacgtgcctcccaaccagt

SEQ ID NO: 237089 - DNA, 20 bp, synthetic construct
  source 1..20: mol_type = other DNA
gaaacgtgcctcccaaccag

SEQ ID NO: 237090 - DNA, 20 bp, synthetic construct
  source 1..20: mol_type = other DNA
tgaaacgtgcctcccaacca

SEQ ID NO: 237091 - DNA, 20 bp, synthetic construct
  source 1..20: mol_type = other DNA
ctgaaacgtgcctcccaacc

SEQ ID NO: 237092 - DNA, 20 bp, synthetic construct
  source 1..20: mol_type = other DNA
tctgaaacgtgcctcccaac

SEQ ID NO: 237093 - DNA, 20 bp, synthetic construct
  source 1..20: mol_type = other DNA
atctgaaacgtgcctcccaa

SEQ ID NO: 237094 - DNA, 20 bp, synthetic construct
  source 1..20: mol_type = other DNA
aatctgaaacgtgcctccca

SEQ ID NO: 237095 - DNA, 20 bp, synthetic construct
  source 1..20: mol_type = other DNA
aaatctgaaacgtgcctccc

SEQ ID NO: 237096 - DNA, 20 bp, synthetic construct
  source 1..20: mol_type = other DNA
gaaatctgaaacgtgcctcc

SEQ ID NO: 237097 - DNA, 20 bp, synthetic construct
  source 1..20: mol_type = other DNA
agaaatctgaaacgtgcctc

SEQ ID NO: 237098 - DNA, 20 bp, synthetic construct
  source 1..20: mol_type = other DNA
tagaaatctgaaacgtgcct

SEQ ID NO: 237099 - DNA, 20 bp, synthetic construct
  source 1..20: mol_type = other DNA
atagaaatctgaaacgtgcc

SEQ ID NO: 237100 - DNA, 20 bp, synthetic construct
  source 1..20: mol_type = other DNA
gatagaaatctgaaacgtgc

SEQ ID NO: 237101 - DNA, 20 bp, synthetic construct
  source 1..20: mol_type = other DNA
agatagaaatctgaaacgtg

SEQ ID NO: 237102 - DNA, 20 bp, synthetic construct
  source 1..20: mol_type = other DNA
cagatagaaatctgaaacgt

SEQ ID NO: 237103 - DNA, 20 bp, synthetic construct
  source 1..20: mol_type = other DNA
acagatagaaatctgaaacg

SEQ ID NO: 237104 - DNA, 20 bp, synthetic construct
  source 1..20: mol_type = other DNA
aacagatagaaatctgaaac

SEQ ID NO: 237105 - DNA, 20 bp, synthetic construct
  source 1..20: mol_type = other DNA
caacagatagaaatctgaaa

SEQ ID NO: 237106 - DNA, 20 bp, synthetic construct
  source 1..20: mol_type = other DNA
tcaacagatagaaatctgaa

SEQ ID NO: 237107 - DNA, 20 bp, synthetic construct
  source 1..20: mol_type = other DNA
ttcaacagatagaaatctga

SEQ ID NO: 237108 - DNA, 20 bp, synthetic construct
  source 1..20: mol_type = other DNA
attcaacagatagaaatctg

SEQ ID NO: 237109 - DNA, 20 bp, synthetic construct
  source 1..20: mol_type = other DNA
gattcaacagatagaaatct

SEQ ID NO: 237110 - DNA, 20 bp, synthetic construct
  source 1..20: mol_type = other DNA
tgattcaacagatagaaatc

SEQ ID NO: 237111 - DNA, 20 bp, synthetic construct
  source 1..20: mol_type = other DNA
ctgattcaacagatagaaat

SEQ ID NO: 237112 - DNA, 20 bp, synthetic construct
  source 1..20: mol_type = other DNA
gctgattcaacagatagaaa

SEQ ID NO: 237113 - DNA, 20 bp, synthetic construct
  source 1..20: mol_type = other DNA
cgctgattcaacagatagaa

SEQ ID NO: 237114 - DNA, 20 bp, synthetic construct
  source 1..20: mol_type = other DNA
tcgctgattcaacagataga

SEQ ID NO: 237115 - DNA, 20 bp, synthetic construct
  source 1..20: mol_type = other DNA
ttcgctgattcaacagatag

SEQ ID NO: 237116 - DNA, 20 bp, synthetic construct
  source 1..20: mol_type = other DNA
cttcgctgattcaacagata

SEQ ID NO: 237117 - DNA, 20 bp, synthetic construct
  source 1..20: mol_type = other DNA
tcttcgctgattcaacagat

SEQ ID NO: 237118 - DNA, 20 bp, synthetic construct
  source 1..20: mol_type = other DNA
atcttcgctgattcaacaga

SEQ ID NO: 237119 - DNA, 20 bp, synthetic construct
  source 1..20: mol_type = other DNA
tatcttcgctgattcaacag

SEQ ID NO: 237120 - DNA, 20 bp, synthetic construct
  source 1..20: mol_type = other DNA
atatcttcgctgattcaaca

SEQ ID NO: 237121 - DNA, 20 bp, synthetic construct
  source 1..20: mol_type = other DNA
aatatcttcgctgattcaac

SEQ ID NO: 237122 - DNA, 20 bp, synthetic construct
  source 1..20: mol_type = other DNA
caatatcttcgctgattcaa

SEQ ID NO: 237123 - DNA, 20 bp, synthetic construct
  source 1..20: mol_type = other DNA
ccaatatcttcgctgattca

SEQ ID NO: 237124 - DNA, 20 bp, synthetic construct
  source 1..20: mol_type = other DNA
tccaatatcttcgctgattc

SEQ ID NO: 237125 - DNA, 20 bp, synthetic construct
  source 1..20: mol_type = other DNA
atccaatatcttcgctgatt

SEQ ID NO: 237126 - DNA, 20 bp, synthetic construct
  source 1..20: mol_type = other DNA
aatccaatatcttcgctgat

SEQ ID NO: 237127 - DNA, 20 bp, synthetic construct
  source 1..20: mol_type = other DNA
taatccaatatcttcgctga

SEQ ID NO: 237128 - DNA, 20 bp, synthetic construct
  source 1..20: mol_type = other DNA
ataatccaatatcttcgctg

SEQ ID NO: 237129 - DNA, 20 bp, synthetic construct
  source 1..20: mol_type = other DNA
cataatccaatatcttcgct

SEQ ID NO: 237130 - DNA, 20 bp, synthetic construct
  source 1..20: mol_type = other DNA
tcataatccaatatcttcgc

SEQ ID NO: 237131 - DNA, 20 bp, synthetic construct
  source 1..20: mol_type = other DNA
ctcataatccaatatcttcg

SEQ ID NO: 237132 - DNA, 20 bp, synthetic construct
  source 1..20: mol_type = other DNA
cctcataatccaatatcttc

SEQ ID NO: 237133 - DNA, 20 bp, synthetic construct
  source 1..20: mol_type = other DNA
tcctcataatccaatatctt

SEQ ID NO: 237134 - DNA, 20 bp, synthetic construct
  source 1..20: mol_type = other DNA
ttcctcataatccaatatct

SEQ ID NO: 237135 - DNA, 20 bp, synthetic construct
  source 1..20: mol_type = other DNA
attcctcataatccaatatc

SEQ ID NO: 237136 - DNA, 20 bp, synthetic construct
  source 1..20: mol_type = other DNA
aattcctcataatccaatat

SEQ ID NO: 237137 - DNA, 20 bp, synthetic construct
  source 1..20: mol_type = other DNA
aaattcctcataatccaata

SEQ ID NO: 237138 - DNA, 20 bp, synthetic construct
  source 1..20: mol_type = other DNA
caaattcctcataatccaat

SEQ ID NO: 237139 - DNA, 20 bp, synthetic construct
  source 1..20: mol_type = other DNA
ccaaattcctcataatccaa

SEQ ID NO: 237140 - DNA, 20 bp, synthetic construct
  source 1..20: mol_type = other DNA
cccaaattcctcataatcca

SEQ ID NO: 237141 - DNA, 20 bp, synthetic construct
  source 1..20: mol_type = other DNA
tcccaaattcctcataatcc

SEQ ID NO: 237142 - DNA, 20 bp, synthetic construct
  source 1..20: mol_type = other DNA
ttcccaaattcctcataatc

SEQ ID NO: 237143 - DNA, 20 bp, synthetic construct
  source 1..20: mol_type = other DNA
attcccaaattcctcataat

SEQ ID NO: 237144 - DNA, 20 bp, synthetic construct
  source 1..20: mol_type = other DNA
aattcccaaattcctcataa

SEQ ID NO: 237145 - DNA, 20 bp, synthetic construct
  source 1..20: mol_type = other DNA
taattcccaaattcctcata

SEQ ID NO: 237146 - DNA, 20 bp, synthetic construct
  source 1..20: mol_type = other DNA
ctaattcccaaattcctcat

SEQ ID NO: 237147 - DNA, 20 bp, synthetic construct
  source 1..20: mol_type = other DNA
cctaattcccaaattcctca

SEQ ID NO: 237148 - DNA, 20 bp, synthetic construct
  source 1..20: mol_type = other DNA
tcctaattcccaaattcctc

SEQ ID NO: 237149 - DNA, 20 bp, synthetic construct
  source 1..20: mol_type = other DNA
ttcctaattcccaaattcct

SEQ ID NO: 237150 - DNA, 20 bp, synthetic construct
  source 1..20: mol_type = other DNA
tttcctaattcccaaattcc

SEQ ID NO: 237151 - DNA, 20 bp, synthetic construct
  source 1..20: mol_type = other DNA
ctttcctaattcccaaattc

SEQ ID NO: 237152 - DNA, 20 bp, synthetic construct
  source 1..20: mol_type = other DNA
actttcctaattcccaaatt

SEQ ID NO: 237153 - DNA, 20 bp, synthetic construct
  source 1..20: mol_type = other DNA
cactttcctaattcccaaat

SEQ ID NO: 237154 - DNA, 20 bp, synthetic construct
  source 1..20: mol_type = other DNA
ccactttcctaattcccaaa

SEQ ID NO: 237155 - DNA, 20 bp, synthetic construct
  source 1..20: mol_type = other DNA
cccactttcctaattcccaa

SEQ ID NO: 237156 - DNA, 20 bp, synthetic construct
  source 1..20: mol_type = other DNA
acccactttcctaattccca

SEQ ID NO: 237157 - DNA, 20 bp, synthetic construct
  source 1..20: mol_type = other DNA
cacccactttcctaattccc

SEQ ID NO: 237158 - DNA, 20 bp, synthetic construct
  source 1..20: mol_type = other DNA
gcacccactttcctaattcc

SEQ ID NO: 237159 - DNA, 20 bp, synthetic construct
  source 1..20: mol_type = other DNA
tgcacccactttcctaattc

SEQ ID NO: 237160 - DNA, 20 bp, synthetic construct
  source 1..20: mol_type = other DNA
ctgcacccactttcctaatt

SEQ ID NO: 237161 - DNA, 20 bp, synthetic construct
  source 1..20: mol_type = other DNA
cctgcacccactttcctaat

SEQ ID NO: 237162 - DNA, 20 bp, synthetic construct
  source 1..20: mol_type = other DNA
acctgcacccactttcctaa

SEQ ID NO: 237163 - DNA, 20 bp, synthetic construct
  source 1..20: mol_type = other DNA
cacctgcacccactttccta

SEQ ID NO: 237164 - DNA, 20 bp, synthetic construct
  source 1..20: mol_type = other DNA
ccacctgcacccactttcct

SEQ ID NO: 237165 - DNA, 20 bp, synthetic construct
  source 1..20: mol_type = other DNA
cccacctgcacccactttcc

SEQ ID NO: 237166 - DNA, 20 bp, synthetic construct
  source 1..20: mol_type = other DNA
acccacctgcacccactttc

SEQ ID NO: 237167 - DNA, 20 bp, synthetic construct
  source 1..20: mol_type = other DNA
aacccacctgcacccacttt

SEQ ID NO: 237168 - DNA, 20 bp, synthetic construct
  source 1..20: mol_type = other DNA
caacccacctgcacccactt

SEQ ID NO: 237169 - DNA, 20 bp, synthetic construct
  source 1..20: mol_type = other DNA
ccaacccacctgcacccact

SEQ ID NO: 237170 - DNA, 20 bp, synthetic construct
  source 1..20: mol_type = other DNA
cccaacccacctgcacccac

SEQ ID NO: 237171 - DNA, 20 bp, synthetic construct
  source 1..20: mol_type = other DNA
ccccaacccacctgcaccca

SEQ ID NO: 237172 - DNA, 20 bp, synthetic construct
  source 1..20: mol_type = other DNA
cccccaacccacctgcaccc

SEQ ID NO: 237173 - DNA, 20 bp, synthetic construct
  source 1..20: mol_type = other DNA
acccccaacccacctgcacc

SEQ ID NO: 237174 - DNA, 20 bp, synthetic construct
  source 1..20: mol_type = other DNA
tacccccaacccacctgcac

SEQ ID NO: 237175 - DNA, 20 bp, synthetic construct
  source 1..20: mol_type = other DNA
ctacccccaacccacctgca

SEQ ID NO: 237176 - DNA, 20 bp, synthetic construct
  source 1..20: mol_type = other DNA
cctacccccaacccacctgc

SEQ ID NO: 237177 - DNA, 20 bp, synthetic construct
  source 1..20: mol_type = other DNA
acctacccccaacccacctg

SEQ ID NO: 237178 - DNA, 20 bp, synthetic construct
  source 1..20: mol_type = other DNA
cacctacccccaacccacct

SEQ ID NO: 237179 - DNA, 20 bp, synthetic construct
  source 1..20: mol_type = other DNA
tcacctacccccaacccacc

SEQ ID NO: 237180 - DNA, 20 bp, synthetic construct
  source 1..20: mol_type = other DNA
ttcacctacccccaacccac

SEQ ID NO: 237181 - DNA, 20 bp, synthetic construct
  source 1..20: mol_type = other DNA
cttcacctacccccaaccca

SEQ ID NO: 237182 - DNA, 20 bp, synthetic construct
  source 1..20: mol_type = other DNA
ccttcacctacccccaaccc

SEQ ID NO: 237183 - DNA, 20 bp, synthetic construct
  source 1..20: mol_type = other DNA
tccttcacctacccccaacc

SEQ ID NO: 237184 - DNA, 20 bp, synthetic construct
  source 1..20: mol_type = other DNA
ttccttcacctacccccaac

SEQ ID NO: 237185 - DNA, 20 bp, synthetic construct
  source 1..20: mol_type = other DNA
cttccttcacctacccccaa

SEQ ID NO: 237186 - DNA, 20 bp, synthetic construct
  source 1..20: mol_type = other DNA
tcttccttcacctaccccca

SEQ ID NO: 237187 - DNA, 20 bp, synthetic construct
  source 1..20: mol_type = other DNA
gtcttccttcacctaccccc

SEQ ID NO: 237188 - DNA, 20 bp, synthetic construct
  source 1..20: mol_type = other DNA
tgtcttccttcacctacccc

SEQ ID NO: 237189 - DNA, 20 bp, synthetic construct
  source 1..20: mol_type = other DNA
atgtcttccttcacctaccc

SEQ ID NO: 237190 - DNA, 20 bp, synthetic construct
  source 1..20: mol_type = other DNA
catgtcttccttcacctacc

SEQ ID NO: 237191 - DNA, 20 bp, synthetic construct
  source 1..20: mol_type = other DNA
ccatgtcttccttcacctac

SEQ ID NO: 237192 - DNA, 20 bp, synthetic construct
  source 1..20: mol_type = other DNA
cccatgtcttccttcaccta

SEQ ID NO: 237193 - DNA, 20 bp, synthetic construct
  source 1..20: mol_type = other DNA
gcccatgtcttccttcacct

SEQ ID NO: 237194 - DNA, 20 bp, synthetic construct
  source 1..20: mol_type = other DNA
cgcccatgtcttccttcacc

SEQ ID NO: 237195 - DNA, 20 bp, synthetic construct
  source 1..20: mol_type = other DNA
acgcccatgtcttccttcac

SEQ ID NO: 237196 - DNA, 20 bp, synthetic construct
  source 1..20: mol_type = other DNA
tacgcccatgtcttccttca

SEQ ID NO: 237197 - DNA, 20 bp, synthetic construct
  source 1..20: mol_type = other DNA
atacgcccatgtcttccttc

SEQ ID NO: 237198 - DNA, 20 bp, synthetic construct
  source 1..20: mol_type = other DNA
aatacgcccatgtcttcctt

SEQ ID NO: 237199 - DNA, 20 bp, synthetic construct
  source 1..20: mol_type = other DNA
caatacgcccatgtcttcct

SEQ ID NO: 237200 - DNA, 20 bp, synthetic construct
  source 1..20: mol_type = other DNA
ccaatacgcccatgtcttcc

SEQ ID NO: 237201 - DNA, 20 bp, synthetic construct
  source 1..20: mol_type = other DNA
cccaatacgcccatgtcttc

SEQ ID NO: 237202 - DNA, 20 bp, synthetic construct
  source 1..20: mol_type = other DNA
ccccaatacgcccatgtctt

SEQ ID NO: 237203 - DNA, 20 bp, synthetic construct
  source 1..20: mol_type = other DNA
cccccaatacgcccatgtct

SEQ ID NO: 237204 - DNA, 20 bp, synthetic construct
  source 1..20: mol_type = other DNA
tcccccaatacgcccatgtc

SEQ ID NO: 237205 - DNA, 20 bp, synthetic construct
  source 1..20: mol_type = other DNA
ctcccccaatacgcccatgt

SEQ ID NO: 237206 - DNA, 20 bp, synthetic construct
  source 1..20: mol_type = other DNA
gctcccccaatacgcccatg

SEQ ID NO: 237207 - DNA, 20 bp, synthetic construct
  source 1..20: mol_type = other DNA
tgctcccccaatacgcccat

SEQ ID NO: 237208 - DNA, 20 bp, synthetic construct
  source 1..20: mol_type = other DNA
ctgctcccccaatacgccca

SEQ ID NO: 237209 - DNA, 20 bp, synthetic construct
  source 1..20: mol_type = other DNA
cctgctcccccaatacgccc

SEQ ID NO: 237210 - DNA, 20 bp, synthetic construct
  source 1..20: mol_type = other DNA
ccctgctcccccaatacgcc

SEQ ID NO: 237211 - DNA, 20 bp, synthetic construct
  source 1..20: mol_type = other DNA
cccctgctcccccaatacgc

SEQ ID NO: 237212 - DNA, 20 bp, synthetic construct
  source 1..20: mol_type = other DNA
gcccctgctcccccaatacg

SEQ ID NO: 237213 - DNA, 20 bp, synthetic construct
  source 1..20: mol_type = other DNA
agcccctgctcccccaatac

SEQ ID NO: 237214 - DNA, 20 bp, synthetic construct
  source 1..20: mol_type = other DNA
cagcccctgctcccccaata

SEQ ID NO: 237215 - DNA, 20 bp, synthetic construct
  source 1..20: mol_type = other DNA
gcagcccctgctcccccaat

SEQ ID NO: 237216 - DNA, 20 bp, synthetic construct
  source 1..20: mol_type = other DNA
agcagcccctgctcccccaa

SEQ ID NO: 237217 - DNA, 20 bp, synthetic construct
  source 1..20: mol_type = other DNA
gagcagcccctgctccccca

SEQ ID NO: 237218 - DNA, 20 bp, synthetic construct
  source 1..20: mol_type = other DNA
tgagcagcccctgctccccc

SEQ ID NO: 237219 - DNA, 20 bp, synthetic construct
  source 1..20: mol_type = other DNA
ctgagcagcccctgctcccc

SEQ ID NO: 237220 - DNA, 20 bp, synthetic construct
  source 1..20: mol_type = other DNA
tctgagcagcccctgctccc

SEQ ID NO: 237221 - DNA, 20 bp, synthetic construct
  source 1..20: mol_type = other DNA
ctctgagcagcccctgctcc

SEQ ID NO: 237222 - DNA, 20 bp, synthetic construct
  source 1..20: mol_type = other DNA
cctctgagcagcccctgctc

SEQ ID NO: 237223 - DNA, 20 bp, synthetic construct
  source 1..20: mol_type = other DNA
acctctgagcagcccctgct

SEQ ID NO: 237224 - DNA, 20 bp, synthetic construct
  source 1..20: mol_type = other DNA
cacctctgagcagcccctgc

SEQ ID NO: 237225 - DNA, 20 bp, synthetic construct
  source 1..20: mol_type = other DNA
acacctctgagcagcccctg

SEQ ID NO: 237226 - DNA, 20 bp, synthetic construct
  source 1..20: mol_type = other DNA
aacacctctgagcagcccct

SEQ ID NO: 237227 - DNA, 20 bp, synthetic construct
  source 1..20: mol_type = other DNA
gaacacctctgagcagcccc

SEQ ID NO: 237228 - DNA, 20 bp, synthetic construct
  source 1..20: mol_type = other DNA
ggaacacctctgagcagccc

SEQ ID NO: 237229 - DNA, 20 bp, synthetic construct
  source 1..20: mol_type = other DNA
tggaacacctctgagcagcc

SEQ ID NO: 237230 - DNA, 20 bp, synthetic construct
  source 1..20: mol_type = other DNA
ctggaacacctctgagcagc

SEQ ID NO: 237231 - DNA, 20 bp, synthetic construct
  source 1..20: mol_type = other DNA
tctggaacacctctgagcag

SEQ ID NO: 237232 - DNA, 20 bp, synthetic construct
  source 1..20: mol_type = other DNA
ttctggaacacctctgagca

SEQ ID NO: 237233 - DNA, 20 bp, synthetic construct
  source 1..20: mol_type = other DNA
cttctggaacacctctgagc

SEQ ID NO: 237234 - DNA, 20 bp, synthetic construct
  source 1..20: mol_type = other DNA
gcttctggaacacctctgag

SEQ ID NO: 237235 - DNA, 20 bp, synthetic construct
  source 1..20: mol_type = other DNA
agcttctggaacacctctga

SEQ ID NO: 237236 - DNA, 20 bp, synthetic construct
  source 1..20: mol_type = other DNA
gagcttctggaacacctctg

SEQ ID NO: 237237 - DNA, 20 bp, synthetic construct
  source 1..20: mol_type = other DNA
agagcttctggaacacctct

SEQ ID NO: 237238 - DNA, 20 bp, synthetic construct
  source 1..20: mol_type = other DNA
cagagcttctggaacacctc

SEQ ID NO: 237239 - DNA, 20 bp, synthetic construct
  source 1..20: mol_type = other DNA
ccagagcttctggaacacct

SEQ ID NO: 237240 - DNA, 20 bp, synthetic construct
  source 1..20: mol_type = other DNA
cccagagcttctggaacacc

SEQ ID NO: 237241 - DNA, 20 bp, synthetic construct
  source 1..20: mol_type = other DNA
acccagagcttctggaacac

SEQ ID NO: 237242 - DNA, 20 bp, synthetic construct
  source 1..20: mol_type = other DNA
cacccagagcttctggaaca

SEQ ID NO: 237243 - DNA, 20 bp, synthetic construct
  source 1..20: mol_type = other DNA
tcacccagagcttctggaac

SEQ ID NO: 237244 - DNA, 20 bp, synthetic construct
  source 1..20: mol_type = other DNA
ctcacccagagcttctggaa

SEQ ID NO: 237245 - DNA, 20 bp, synthetic construct
  source 1..20: mol_type = other DNA
cctcacccagagcttctgga

SEQ ID NO: 237246 - DNA, 20 bp, synthetic construct
  source 1..20: mol_type = other DNA
tcctcacccagagcttctgg

SEQ ID NO: 237247 - DNA, 20 bp, synthetic construct
  source 1..20: mol_type = other DNA
ctcctcacccagagcttctg

SEQ ID NO: 237248 - DNA, 20 bp, synthetic construct
  source 1..20: mol_type = other DNA
cctcctcacccagagcttct

SEQ ID NO: 237249 - DNA, 20 bp, synthetic construct
  source 1..20: mol_type = other DNA
acctcctcacccagagcttc

SEQ ID NO: 237250 - DNA, 20 bp, synthetic construct
  source 1..20: mol_type = other DNA
cacctcctcacccagagctt

SEQ ID NO: 237251 - DNA, 20 bp, synthetic construct
  source 1..20: mol_type = other DNA
tcacctcctcacccagagct

SEQ ID NO: 237252 - DNA, 20 bp, synthetic construct
  source 1..20: mol_type = other DNA
ctcacctcctcacccagagc

SEQ ID NO: 237253 - DNA, 20 bp, synthetic construct
  source 1..20: mol_type = other DNA
tctcacctcctcacccagag

SEQ ID NO: 237254 - DNA, 20 bp, synthetic construct
  source 1..20: mol_type = other DNA
ctctcacctcctcacccaga

SEQ ID NO: 237255 - DNA, 20 bp, synthetic construct
  source 1..20: mol_type = other DNA
cctctcacctcctcacccag

SEQ ID NO: 237256 - DNA, 20 bp, synthetic construct
  source 1..20: mol_type = other DNA
ccctctcacctcctcaccca

SEQ ID NO: 237257 - DNA, 20 bp, synthetic construct
  source 1..20: mol_type = other DNA
tccctctcacctcctcaccc

SEQ ID NO: 237258 - DNA, 20 bp, synthetic construct
  source 1..20: mol_type = other DNA
gtccctctcacctcctcacc

SEQ ID NO: 237259 - DNA, 20 bp, synthetic construct
  source 1..20: mol_type = other DNA
ggtccctctcacctcctcac

SEQ ID NO: 237260 - DNA, 20 bp, synthetic construct
  source 1..20: mol_type = other DNA
cggtccctctcacctcctca

SEQ ID NO: 237261 - DNA, 20 bp, synthetic construct
  source 1..20: mol_type = other DNA
ccggtccctctcacctcctc

SEQ ID NO: 237262 - DNA, 20 bp, synthetic construct
  source 1..20: mol_type = other DNA
cccggtccctctcacctcct

SEQ ID NO: 237263 - DNA, 20 bp, synthetic construct
  source 1..20: mol_type = other DNA
ccccggtccctctcacctcc

SEQ ID NO: 237264 - DNA, 20 bp, synthetic construct
  source 1..20: mol_type = other DNA
tccccggtccctctcacctc

SEQ ID NO: 237265 - DNA, 20 bp, synthetic construct
  source 1..20: mol_type = other DNA
ttccccggtccctctcacct

SEQ ID NO: 237266 - DNA, 20 bp, synthetic construct
  source 1..20: mol_type = other DNA
attccccggtccctctcacc

SEQ ID NO: 237267 - DNA, 20 bp, synthetic construct
  source 1..20: mol_type = other DNA
cattccccggtccctctcac

SEQ ID NO: 237268 - DNA, 20 bp, synthetic construct
  source 1..20: mol_type = other DNA
gcattccccggtccctctca

SEQ ID NO: 237269 - DNA, 20 bp, synthetic construct
  source 1..20: mol_type = other DNA
tgcattccccggtccctctc

SEQ ID NO: 237270 - DNA, 20 bp, synthetic construct
  source 1..20: mol_type = other DNA
ctgcattccccggtccctct

SEQ ID NO: 237271 - DNA, 20 bp, synthetic construct
  source 1..20: mol_type = other DNA
gctgcattccccggtccctc

SEQ ID NO: 237272 - DNA, 20 bp, synthetic construct
  source 1..20: mol_type = other DNA
agctgcattccccggtccct

SEQ ID NO: 237273 - DNA, 20 bp, synthetic construct
  source 1..20: mol_type = other DNA
gagctgcattccccggtccc

SEQ ID NO: 237274 - DNA, 20 bp, synthetic construct
  source 1..20: mol_type = other DNA
cgagctgcattccccggtcc

SEQ ID NO: 237275 - DNA, 20 bp, synthetic construct
  source 1..20: mol_type = other DNA
ccgagctgcattccccggtc

SEQ ID NO: 237276 - DNA, 20 bp, synthetic construct
  source 1..20: mol_type = other DNA
gccgagctgcattccccggt

SEQ ID NO: 237277 - DNA, 20 bp, synthetic construct
  source 1..20: mol_type = other DNA
ggccgagctgcattccccgg

SEQ ID NO: 237278 - DNA, 20 bp, synthetic construct
  source 1..20: mol_type = other DNA
gggccgagctgcattccccg

SEQ ID NO: 237279 - DNA, 20 bp, synthetic construct
  source 1..20: mol_type = other DNA
tgggccgagctgcattcccc

SEQ ID NO: 237280 - DNA, 20 bp, synthetic construct
  source 1..20: mol_type = other DNA
ctgggccgagctgcattccc

SEQ ID NO: 237281 - DNA, 20 bp, synthetic construct
  source 1..20: mol_type = other DNA
gctgggccgagctgcattcc

SEQ ID NO: 237282 - DNA, 20 bp, synthetic construct
  source 1..20: mol_type = other DNA
ggctgggccgagctgcattc

SEQ ID NO: 237283 - DNA, 20 bp, synthetic construct
  source 1..20: mol_type = other DNA
aggctgggccgagctgcatt

SEQ ID NO: 237284 - DNA, 20 bp, synthetic construct
  source 1..20: mol_type = other DNA
gaggctgggccgagctgcat

SEQ ID NO: 237285 - DNA, 20 bp, synthetic construct
  source 1..20: mol_type = other DNA
ggaggctgggccgagctgca

SEQ ID NO: 237286 - DNA, 20 bp, synthetic construct
  source 1..20: mol_type = other DNA
gggaggctgggccgagctgc

SEQ ID NO: 237287 - DNA, 20 bp, synthetic construct
  source 1..20: mol_type = other DNA
agggaggctgggccgagctg

SEQ ID NO: 237288 - DNA, 20 bp, synthetic construct
  source 1..20: mol_type = other DNA
cagggaggctgggccgagct

SEQ ID NO: 237289 - DNA, 20 bp, synthetic construct
  source 1..20: mol_type = other DNA
gcagggaggctgggccgagc

SEQ ID NO: 237290 - DNA, 20 bp, synthetic construct
  source 1..20: mol_type = other DNA
ggcagggaggctgggccgag

SEQ ID NO: 237291 - DNA, 20 bp, synthetic construct
  source 1..20: mol_type = other DNA
aggcagggaggctgggccga

SEQ ID NO: 237292 - DNA, 20 bp, synthetic construct
  source 1..20: mol_type = other DNA
caggcagggaggctgggccg

SEQ ID NO: 237293 - DNA, 20 bp, synthetic construct
  source 1..20: mol_type = other DNA
tcaggcagggaggctgggcc

SEQ ID NO: 237294 - DNA, 20 bp, synthetic construct
  source 1..20: mol_type = other DNA
ctcaggcagggaggctgggc

SEQ ID NO: 237295 - DNA, 20 bp, synthetic construct
  source 1..20: mol_type = other DNA
cctcaggcagggaggctggg

SEQ ID NO: 237296 - DNA, 20 bp, synthetic construct
  source 1..20: mol_type = other DNA
acctcaggcagggaggctgg

SEQ ID NO: 237297 - DNA, 20 bp, synthetic construct
  source 1..20: mol_type = other DNA
gacctcaggcagggaggctg

SEQ ID NO: 237298 - DNA, 20 bp, synthetic construct
  source 1..20: mol_type = other DNA
tgacctcaggcagggaggct

SEQ ID NO: 237299 - DNA, 20 bp, synthetic construct
  source 1..20: mol_type = other DNA
ctgacctcaggcagggaggc

SEQ ID NO: 237300 - DNA, 20 bp, synthetic construct
  source 1..20: mol_type = other DNA
gctgacctcaggcagggagg

SEQ ID NO: 237301 - DNA, 20 bp, synthetic construct
  source 1..20: mol_type = other DNA
ggctgacctcaggcagggag

SEQ ID NO: 237302 - DNA, 20 bp, synthetic construct
  source 1..20: mol_type = other DNA
tggctgacctcaggcaggga

SEQ ID NO: 237303 - DNA, 20 bp, synthetic construct
  source 1..20: mol_type = other DNA
atggctgacctcaggcaggg

SEQ ID NO: 237304 - DNA, 20 bp, synthetic construct
  source 1..20: mol_type = other DNA
gatggctgacctcaggcagg

SEQ ID NO: 237305 - DNA, 20 bp, synthetic construct
  source 1..20: mol_type = other DNA
tgatggctgacctcaggcag

SEQ ID NO: 237306 - DNA, 20 bp, synthetic construct
  source 1..20: mol_type = other DNA
gtgatggctgacctcaggca

SEQ ID NO: 237307 - DNA, 20 bp, synthetic construct
  source 1..20: mol_type = other DNA
cgtgatggctgacctcaggc

SEQ ID NO: 237308 - DNA, 20 bp, synthetic construct
  source 1..20: mol_type = other DNA
acgtgatggctgacctcagg

SEQ ID NO: 237309 - DNA, 20 bp, synthetic construct
  source 1..20: mol_type = other DNA
cacgtgatggctgacctcag

SEQ ID NO: 237310 - DNA, 20 bp, synthetic construct
  source 1..20: mol_type = other DNA
ccacgtgatggctgacctca

SEQ ID NO: 237311 - DNA, 20 bp, synthetic construct
  source 1..20: mol_type = other DNA
accacgtgatggctgacctc

SEQ ID NO: 237312 - DNA, 20 bp, synthetic construct
  source 1..20: mol_type = other DNA
caccacgtgatggctgacct

SEQ ID NO: 237313 - DNA, 20 bp, synthetic construct
  source 1..20: mol_type = other DNA
tcaccacgtgatggctgacc

SEQ ID NO: 237314 - DNA, 20 bp, synthetic construct
  source 1..20: mol_type = other DNA
atcaccacgtgatggctgac

SEQ ID NO: 237315 - DNA, 20 bp, synthetic construct
  source 1..20: mol_type = other DNA
catcaccacgtgatggctga

SEQ ID NO: 237316 - DNA, 20 bp, synthetic construct
  source 1..20: mol_type = other DNA
ccatcaccacgtgatggctg

SEQ ID NO: 237317 - DNA, 20 bp, synthetic construct
  source 1..20: mol_type = other DNA
gccatcaccacgtgatggct

SEQ ID NO: 237318 - DNA, 20 bp, synthetic construct
  source 1..20: mol_type = other DNA
tgccatcaccacgtgatggc

SEQ ID NO: 237319 - DNA, 20 bp, synthetic construct
  source 1..20: mol_type = other DNA
ttgccatcaccacgtgatgg

SEQ ID NO: 237320 - DNA, 20 bp, synthetic construct
  source 1..20: mol_type = other DNA
cttgccatcaccacgtgatg

SEQ ID NO: 237321 - DNA, 20 bp, synthetic construct
  source 1..20: mol_type = other DNA
tcttgccatcaccacgtgat

SEQ ID NO: 237322 - DNA, 20 bp, synthetic construct
  source 1..20: mol_type = other DNA
atcttgccatcaccacgtga

SEQ ID NO: 237323 - DNA, 20 bp, synthetic construct
  source 1..20: mol_type = other DNA
catcttgccatcaccacgtg

SEQ ID NO: 237324 - DNA, 20 bp, synthetic construct
  source 1..20: mol_type = other DNA
ccatcttgccatcaccacgt

SEQ ID NO: 237325 - DNA, 20 bp, synthetic construct
  source 1..20: mol_type = other DNA
tccatcttgccatcaccacg

SEQ ID NO: 237326 - DNA, 20 bp, synthetic construct
  source 1..20: mol_type = other DNA
ttccatcttgccatcaccac

SEQ ID NO: 237327 - DNA, 20 bp, synthetic construct
  source 1..20: mol_type = other DNA
tttccatcttgccatcacca

SEQ ID NO: 237328 - DNA, 20 bp, synthetic construct
  source 1..20: mol_type = other DNA
atttccatcttgccatcacc

SEQ ID NO: 237329 - DNA, 20 bp, synthetic construct
  source 1..20: mol_type = other DNA
catttccatcttgccatcac

SEQ ID NO: 237330 - DNA, 20 bp, synthetic construct
  source 1..20: mol_type = other DNA
acatttccatcttgccatca

SEQ ID NO: 237331 - DNA, 20 bp, synthetic construct
  source 1..20: mol_type = other DNA
cacatttccatcttgccatc

SEQ ID NO: 237332 - DNA, 20 bp, synthetic construct
  source 1..20: mol_type = other DNA
gcacatttccatcttgccat

SEQ ID NO: 237333 - DNA, 20 bp, synthetic construct
  source 1..20: mol_type = other DNA
agcacatttccatcttgcca

SEQ ID NO: 237334 - DNA, 20 bp, synthetic construct
  source 1..20: mol_type = other DNA
aagcacatttccatcttgcc

SEQ ID NO: 237335 - DNA, 20 bp, synthetic construct
  source 1..20: mol_type = other DNA
aaagcacatttccatcttgc

SEQ ID NO: 237336 - DNA, 20 bp, synthetic construct
  source 1..20: mol_type = other DNA
gaaagcacatttccatcttg

SEQ ID NO: 237337 - DNA, 20 bp, synthetic construct
  source 1..20: mol_type = other DNA
agaaagcacatttccatctt

SEQ ID NO: 237338 - DNA, 20 bp, synthetic construct
  source 1..20: mol_type = other DNA
cagaaagcacatttccatct

SEQ ID NO: 237339 - DNA, 20 bp, synthetic construct
  source 1..20: mol_type = other DNA
tcagaaagcacatttccatc

SEQ ID NO: 237340 - DNA, 20 bp, synthetic construct
  source 1..20: mol_type = other DNA
gtcagaaagcacatttccat

SEQ ID NO: 237341 - DNA, 20 bp, synthetic construct
  source 1..20: mol_type = other DNA
agtcagaaagcacatttcca

SEQ ID NO: 237342 - DNA, 20 bp, synthetic construct
  source 1..20: mol_type = other DNA
cagtcagaaagcacatttcc

SEQ ID NO: 237343 - DNA, 20 bp, synthetic construct
  source 1..20: mol_type = other DNA
gcagtcagaaagcacatttc

SEQ ID NO: 237344 - DNA, 20 bp, synthetic construct
  source 1..20: mol_type = other DNA
agcagtcagaaagcacattt

SEQ ID NO: 237345 - DNA, 20 bp, synthetic construct
  source 1..20: mol_type = other DNA
gagcagtcagaaagcacatt

SEQ ID NO: 237346 - DNA, 20 bp, synthetic construct
  source 1..20: mol_type = other DNA
ggagcagtcagaaagcacat

SEQ ID NO: 237347 - DNA, 20 bp, synthetic construct
  source 1..20: mol_type = other DNA
tggagcagtcagaaagcaca

SEQ ID NO: 237348 - DNA, 20 bp, synthetic construct
  source 1..20: mol_type = other DNA
ctggagcagtcagaaagcac

SEQ ID NO: 237349 - DNA, 20 bp, synthetic construct
  source 1..20: mol_type = other DNA
gctggagcagtcagaaagca

SEQ ID NO: 237350 - DNA, 20 bp, synthetic construct
  source 1..20: mol_type = other DNA
ggctggagcagtcagaaagc

SEQ ID NO: 237351 - DNA, 20 bp, synthetic construct
  source 1..20: mol_type = other DNA
tggctggagcagtcagaaag

SEQ ID NO: 237352 - DNA, 20 bp, synthetic construct
  source 1..20: mol_type = other DNA
ctggctggagcagtcagaaa

SEQ ID NO: 237353 - DNA, 20 bp, synthetic construct
  source 1..20: mol_type = other DNA
actggctggagcagtcagaa

SEQ ID NO: 237354 - DNA, 20 bp, synthetic construct
  source 1..20: mol_type = other DNA
cactggctggagcagtcaga

SEQ ID NO: 237355 - DNA, 20 bp, synthetic construct
  source 1..20: mol_type = other DNA
gcactggctggagcagtcag

SEQ ID NO: 237356 - DNA, 20 bp, synthetic construct
  source 1..20: mol_type = other DNA
agcactggctggagcagtca

SEQ ID NO: 237357 - DNA, 20 bp, synthetic construct
  source 1..20: mol_type = other DNA
cagcactggctggagcagtc

SEQ ID NO: 237358 - DNA, 20 bp, synthetic construct
  source 1..20: mol_type = other DNA
gcagcactggctggagcagt

SEQ ID NO: 237359 - DNA, 20 bp, synthetic construct
  source 1..20: mol_type = other DNA
ggcagcactggctggagcag

SEQ ID NO: 237360 - DNA, 20 bp, synthetic construct
  source 1..20: mol_type = other DNA
tggcagcactggctggagca

SEQ ID NO: 237361 - DNA, 20 bp, synthetic construct
  source 1..20: mol_type = other DNA
ctggcagcactggctggagc

SEQ ID NO: 237362 - DNA, 20 bp, synthetic construct
  source 1..20: mol_type = other DNA
tctggcagcactggctggag

SEQ ID NO: 237363 - DNA, 20 bp, synthetic construct
  source 1..20: mol_type = other DNA
atctggcagcactggctgga

SEQ ID NO: 237364 - DNA, 20 bp, synthetic construct
  source 1..20: mol_type = other DNA
aatctggcagcactggctgg

SEQ ID NO: 237365 - DNA, 20 bp, synthetic construct
  source 1..20: mol_type = other DNA
gaatctggcagcactggctg

SEQ ID NO: 237366 - DNA, 20 bp, synthetic construct
  source 1..20: mol_type = other DNA
tgaatctggcagcactggct

SEQ ID NO: 237367 - DNA, 20 bp, synthetic construct
  source 1..20: mol_type = other DNA
ctgaatctggcagcactggc

SEQ ID NO: 237368 - DNA, 20 bp, synthetic construct
  source 1..20: mol_type = other DNA
gctgaatctggcagcactgg

SEQ ID NO: 237369 - DNA, 20 bp, synthetic construct
  source 1..20: mol_type = other DNA
agctgaatctggcagcactg

SEQ ID NO: 237370 - DNA, 20 bp, synthetic construct
  source 1..20: mol_type = other DNA
gagctgaatctggcagcact

SEQ ID NO: 237371 - DNA, 20 bp, synthetic construct
  source 1..20: mol_type = other DNA
ggagctgaatctggcagcac

SEQ ID NO: 237372 - DNA, 20 bp, synthetic construct
  source 1..20: mol_type = other DNA
gggagctgaatctggcagca

SEQ ID NO: 237373 - DNA, 20 bp, synthetic construct
  source 1..20: mol_type = other DNA
ggggagctgaatctggcagc

SEQ ID NO: 237374 - DNA, 20 bp, synthetic construct
  source 1..20: mol_type = other DNA
tggggagctgaatctggcag

SEQ ID NO: 237375 - DNA, 20 bp, synthetic construct
  source 1..20: mol_type = other DNA
ctggggagctgaatctggca

SEQ ID NO: 237376 - DNA, 20 bp, synthetic construct
  source 1..20: mol_type = other DNA
cctggggagctgaatctggc

SEQ ID NO: 237377 - DNA, 20 bp, synthetic construct
  source 1..20: mol_type = other DNA
ccctggggagctgaatctgg

SEQ ID NO: 237378 - DNA, 20 bp, synthetic construct
  source 1..20: mol_type = other DNA
tccctggggagctgaatctg

SEQ ID NO: 237379 - DNA, 20 bp, synthetic construct
  source 1..20: mol_type = other DNA
ctccctggggagctgaatct

SEQ ID NO: 237380 - DNA, 20 bp, synthetic construct
  source 1..20: mol_type = other DNA
cctccctggggagctgaatc

SEQ ID NO: 237381 - DNA, 20 bp, synthetic construct
  source 1..20: mol_type = other DNA
ccctccctggggagctgaat

SEQ ID NO: 237382 - DNA, 20 bp, synthetic construct
  source 1..20: mol_type = other DNA
gccctccctggggagctgaa

SEQ ID NO: 237383 - DNA, 20 bp, synthetic construct
  source 1..20: mol_type = other DNA
tgccctccctggggagctga

SEQ ID NO: 237384 - DNA, 20 bp, synthetic construct
  source 1..20: mol_type = other DNA
gtgccctccctggggagctg

SEQ ID NO: 237385 - DNA, 20 bp, synthetic construct
  source 1..20: mol_type = other DNA
ggtgccctccctggggagct

SEQ ID NO: 237386 - DNA, 20 bp, synthetic construct
  source 1..20: mol_type = other DNA
aggtgccctccctggggagc

SEQ ID NO: 237387 - DNA, 20 bp, synthetic construct
  source 1..20: mol_type = other DNA
caggtgccctccctggggag

SEQ ID NO: 237388 - DNA, 20 bp, synthetic construct
  source 1..20: mol_type = other DNA
tcaggtgccctccctgggga

SEQ ID NO: 237389 - DNA, 20 bp, synthetic construct
  source 1..20: mol_type = other DNA
ctcaggtgccctccctgggg

SEQ ID NO: 237390 - DNA, 20 bp, synthetic construct
  source 1..20: mol_type = other DNA
tctcaggtgccctccctggg

SEQ ID NO: 237391 - DNA, 20 bp, synthetic construct
  source 1..20: mol_type = other DNA
ctctcaggtgccctccctgg

SEQ ID NO: 237392 - DNA, 20 bp, synthetic construct
  source 1..20: mol_type = other DNA
cctctcaggtgccctccctg

SEQ ID NO: 237393 - DNA, 20 bp, synthetic construct
  source 1..20: mol_type = other DNA
gcctctcaggtgccctccct

SEQ ID NO: 237394 - DNA, 20 bp, synthetic construct
  source 1..20: mol_type = other DNA
agcctctcaggtgccctccc

SEQ ID NO: 237395 - DNA, 20 bp, synthetic construct
  source 1..20: mol_type = other DNA
gagcctctcaggtgccctcc

SEQ ID NO: 237396 - DNA, 20 bp, synthetic construct
  source 1..20: mol_type = other DNA
ggagcctctcaggtgccctc

SEQ ID NO: 237397 - DNA, 20 bp, synthetic construct
  source 1..20: mol_type = other DNA
tggagcctctcaggtgccct

SEQ ID NO: 237398 - DNA, 20 bp, synthetic construct
  source 1..20: mol_type = other DNA
ttggagcctctcaggtgccc

SEQ ID NO: 237399 - DNA, 20 bp, synthetic construct
  source 1..20: mol_type = other DNA
cttggagcctctcaggtgcc

SEQ ID NO: 237400 - DNA, 20 bp, synthetic construct
  source 1..20: mol_type = other DNA
gcttggagcctctcaggtgc

SEQ ID NO: 237401 - DNA, 20 bp, synthetic construct
  source 1..20: mol_type = other DNA
ggcttggagcctctcaggtg

SEQ ID NO: 237402 - DNA, 20 bp, synthetic construct
  source 1..20: mol_type = other DNA
tggcttggagcctctcaggt

SEQ ID NO: 237403 - DNA, 20 bp, synthetic construct
  source 1..20: mol_type = other DNA
ctggcttggagcctctcagg

SEQ ID NO: 237404 - DNA, 20 bp, synthetic construct
  source 1..20: mol_type = other DNA
cctggcttggagcctctcag

SEQ ID NO: 237405 - DNA, 20 bp, synthetic construct
  source 1..20: mol_type = other DNA
tcctggcttggagcctctca

SEQ ID NO: 237406 - DNA, 20 bp, synthetic construct
  source 1..20: mol_type = other DNA
ctcctggcttggagcctctc

SEQ ID NO: 237407 - DNA, 20 bp, synthetic construct
  source 1..20: mol_type = other DNA
tctcctggcttggagcctct

SEQ ID NO: 237408 - DNA, 20 bp, synthetic construct
  source 1..20: mol_type = other DNA
atctcctggcttggagcctc

SEQ ID NO: 237409 - DNA, 20 bp, synthetic construct
  source 1..20: mol_type = other DNA
gatctcctggcttggagcct

SEQ ID NO: 237410 - DNA, 20 bp, synthetic construct
  source 1..20: mol_type = other DNA
agatctcctggcttggagcc

SEQ ID NO: 237411 - DNA, 20 bp, synthetic construct
  source 1..20: mol_type = other DNA
cagatctcctggcttggagc

SEQ ID NO: 237412 - DNA, 20 bp, synthetic construct
  source 1..20: mol_type = other DNA
acagatctcctggcttggag

SEQ ID NO: 237413 - DNA, 20 bp, synthetic construct
  source 1..20: mol_type = other DNA
aacagatctcctggcttgga

SEQ ID NO: 237414 - DNA, 20 bp, synthetic construct
  source 1..20: mol_type = other DNA
aaacagatctcctggcttgg

SEQ ID NO: 237415 - DNA, 20 bp, synthetic construct
  source 1..20: mol_type = other DNA
aaaacagatctcctggcttg

SEQ ID NO: 237416 - DNA, 20 bp, synthetic construct
  source 1..20: mol_type = other DNA
gaaaacagatctcctggctt

SEQ ID NO: 237417 - DNA, 20 bp, synthetic construct
  source 1..20: mol_type = other DNA
agaaaacagatctcctggct

SEQ ID NO: 237418 - DNA, 20 bp, synthetic construct
  source 1..20: mol_type = other DNA
gagaaaacagatctcctggc

SEQ ID NO: 237419 - DNA, 20 bp, synthetic construct
  source 1..20: mol_type = other DNA
ggagaaaacagatctcctgg

SEQ ID NO: 237420 - DNA, 20 bp, synthetic construct
  source 1..20: mol_type = other DNA
aggagaaaacagatctcctg

SEQ ID NO: 237421 - DNA, 20 bp, synthetic construct
  source 1..20: mol_type = other DNA
aaggagaaaacagatctcct

SEQ ID NO: 237422 - DNA, 20 bp, synthetic construct
  source 1..20: mol_type = other DNA
aaaggagaaaacagatctcc

SEQ ID NO: 237423 - DNA, 20 bp, synthetic construct
  source 1..20: mol_type = other DNA
caaaggagaaaacagatctc

SEQ ID NO: 237424 - DNA, 20 bp, synthetic construct
  source 1..20: mol_type = other DNA
acaaaggagaaaacagatct

SEQ ID NO: 237425 - DNA, 20 bp, synthetic construct
  source 1..20: mol_type = other DNA
aacaaaggagaaaacagatc

SEQ ID NO: 237426 - DNA, 20 bp, synthetic construct
  source 1..20: mol_type = other DNA
aaacaaaggagaaaacagat

SEQ ID NO: 237427 - DNA, 20 bp, synthetic construct
  source 1..20: mol_type = other DNA
aaaacaaaggagaaaacaga

SEQ ID NO: 237428 - DNA, 20 bp, synthetic construct
  source 1..20: mol_type = other DNA
caaaacaaaggagaaaacag

SEQ ID NO: 237429 - DNA, 20 bp, synthetic construct
  source 1..20: mol_type = other DNA
acaaaacaaaggagaaaaca

SEQ ID NO: 237430 - DNA, 20 bp, synthetic construct
  source 1..20: mol_type = other DNA
aacaaaacaaaggagaaaac

SEQ ID NO: 237431 - DNA, 20 bp, synthetic construct
  source 1..20: mol_type = other DNA
aaacaaaacaaaggagaaaa

SEQ ID NO: 237432 - DNA, 20 bp, synthetic construct
  source 1..20: mol_type = other DNA
aaaacaaaacaaaggagaaa

SEQ ID NO: 237433 - DNA, 20 bp, synthetic construct
  source 1..20: mol_type = other DNA
aaaaacaaaacaaaggagaa

SEQ ID NO: 237434 - DNA, 20 bp, synthetic construct
  source 1..20: mol_type = other DNA
aaaaaacaaaacaaaggaga

SEQ ID NO: 237435 - DNA, 20 bp, synthetic construct
  source 1..20: mol_type = other DNA
aaaaaaacaaaacaaaggag

SEQ ID NO: 237436 - DNA, 20 bp, synthetic construct
  source 1..20: mol_type = other DNA
aaaaaaaacaaaacaaagga

SEQ ID NO: 237437 - DNA, 20 bp, synthetic construct
  source 1..20: mol_type = other DNA
aaaaaaaaacaaaacaaagg

SEQ ID NO: 237438 - DNA, 20 bp, synthetic construct
  source 1..20: mol_type = other DNA
caaaaaaaaacaaaacaaag

SEQ ID NO: 237439 - DNA, 20 bp, synthetic construct
  source 1..20: mol_type = other DNA
acaaaaaaaaacaaaacaaa

SEQ ID NO: 237440 - DNA, 20 bp, synthetic construct
  source 1..20: mol_type = other DNA
aacaaaaaaaaacaaaacaa

SEQ ID NO: 237441 - DNA, 20 bp, synthetic construct
  source 1..20: mol_type = other DNA
aaacaaaaaaaaacaaaaca

SEQ ID NO: 237442 - DNA, 20 bp, synthetic construct
  source 1..20: mol_type = other DNA
aaaacaaaaaaaaacaaaac

SEQ ID NO: 237443 - DNA, 20 bp, synthetic construct
  source 1..20: mol_type = other DNA
caaaacaaaaaaaaacaaaa

SEQ ID NO: 237444 - DNA, 20 bp, synthetic construct
  source 1..20: mol_type = other DNA
acaaaacaaaaaaaaacaaa

SEQ ID NO: 237445 - DNA, 20 bp, synthetic construct
  source 1..20: mol_type = other DNA
aacaaaacaaaaaaaaacaa

SEQ ID NO: 237446 - DNA, 20 bp, synthetic construct
  source 1..20: mol_type = other DNA
aaacaaaacaaaaaaaaaca

SEQ ID NO: 237447 - DNA, 20 bp, synthetic construct
  source 1..20: mol_type = other DNA
aaaacaaaacaaaaaaaaac

SEQ ID NO: 237448 - DNA, 20 bp, synthetic construct
  source 1..20: mol_type = other DNA
caaaacaaaacaaaaaaaaa

SEQ ID NO: 237449 - DNA, 20 bp, synthetic construct
  source 1..20: mol_type = other DNA
acaaaacaaaacaaaaaaaa

SEQ ID NO: 237450 - DNA, 20 bp, synthetic construct
  source 1..20: mol_type = other DNA
aacaaaacaaaacaaaaaaa

SEQ ID NO: 237451 - DNA, 20 bp, synthetic construct
  source 1..20: mol_type = other DNA
aaacaaaacaaaacaaaaaa

SEQ ID NO: 237452 - DNA, 20 bp, synthetic construct
  source 1..20: mol_type = other DNA
aaaacaaaacaaaacaaaaa

SEQ ID NO: 237453 - DNA, 20 bp, synthetic construct
  source 1..20: mol_type = other DNA
taaaacaaaacaaaacaaaa

SEQ ID NO: 237454 - DNA, 20 bp, synthetic construct
  source 1..20: mol_type = other DNA
ataaaacaaaacaaaacaaa

SEQ ID NO: 237455 - DNA, 20 bp, synthetic construct
  source 1..20: mol_type = other DNA
aataaaacaaaacaaaacaa

SEQ ID NO: 237456 - DNA, 20 bp, synthetic construct
  source 1..20: mol_type = other DNA
taataaaacaaaacaaaaca

SEQ ID NO: 237457 - DNA, 20 bp, synthetic construct
  source 1..20: mol_type = other DNA
ataataaaacaaaacaaaac

SEQ ID NO: 237458 - DNA, 20 bp, synthetic construct
  source 1..20: mol_type = other DNA
tataataaaacaaaacaaaa

SEQ ID NO: 237459 - DNA, 20 bp, synthetic construct
  source 1..20: mol_type = other DNA
gtataataaaacaaaacaaa

SEQ ID NO: 237460 - DNA, 20 bp, synthetic construct
  source 1..20: mol_type = other DNA
agtataataaaacaaaacaa

SEQ ID NO: 237461 - DNA, 20 bp, synthetic construct
  source 1..20: mol_type = other DNA
aagtataataaaacaaaaca

SEQ ID NO: 237462 - DNA, 20 bp, synthetic construct
  source 1..20: mol_type = other DNA
aaagtataataaaacaaaac

SEQ ID NO: 237463 - DNA, 20 bp, synthetic construct
  source 1..20: mol_type = other DNA
taaagtataataaaacaaaa

SEQ ID NO: 237464 - DNA, 20 bp, synthetic construct
  source 1..20: mol_type = other DNA
ttaaagtataataaaacaaa

SEQ ID NO: 237465 - DNA, 20 bp, synthetic construct
  source 1..20: mol_type = other DNA
cttaaagtataataaaacaa

SEQ ID NO: 237466 - DNA, 20 bp, synthetic construct
  source 1..20: mol_type = other DNA
acttaaagtataataaaaca

SEQ ID NO: 237467 - DNA, 20 bp, synthetic construct
  source 1..20: mol_type = other DNA
aacttaaagtataataaaac

SEQ ID NO: 237468 - DNA, 20 bp, synthetic construct
  source 1..20: mol_type = other DNA
gaacttaaagtataataaaa

SEQ ID NO: 237469 - DNA, 20 bp, synthetic construct
  source 1..20: mol_type = other DNA
agaacttaaagtataataaa

SEQ ID NO: 237470 - DNA, 20 bp, synthetic construct
  source 1..20: mol_type = other DNA
tagaacttaaagtataataa

SEQ ID NO: 237471 - DNA, 20 bp, synthetic construct
  source 1..20: mol_type = other DNA
ctagaacttaaagtataata

SEQ ID NO: 237472 - DNA, 20 bp, synthetic construct
  source 1..20: mol_type = other DNA
cctagaacttaaagtataat

SEQ ID NO: 237473 - DNA, 20 bp, synthetic construct
  source 1..20: mol_type = other DNA
ccctagaacttaaagtataa

SEQ ID NO: 237474 - DNA, 20 bp, synthetic construct
  source 1..20: mol_type = other DNA
accctagaacttaaagtata

SEQ ID NO: 237475 - DNA, 20 bp, synthetic construct
  source 1..20: mol_type = other DNA
taccctagaacttaaagtat

SEQ ID NO: 237476 - DNA, 20 bp, synthetic construct
  source 1..20: mol_type = other DNA
gtaccctagaacttaaagta

SEQ ID NO: 237477 - DNA, 20 bp, synthetic construct
  source 1..20: mol_type = other DNA
tgtaccctagaacttaaagt

SEQ ID NO: 237478 - DNA, 20 bp, synthetic construct
  source 1..20: mol_type = other DNA
atgtaccctagaacttaaag

SEQ ID NO: 237479 - DNA, 20 bp, synthetic construct
  source 1..20: mol_type = other DNA
catgtaccctagaacttaaa

SEQ ID NO: 237480 - DNA, 20 bp, synthetic construct
  source 1..20: mol_type = other DNA
acatgtaccctagaacttaa

SEQ ID NO: 237481 - DNA, 20 bp, synthetic construct
  source 1..20: mol_type = other DNA
cacatgtaccctagaactta

SEQ ID NO: 237482 - DNA, 20 bp, synthetic construct
  source 1..20: mol_type = other DNA
gcacatgtaccctagaactt

SEQ ID NO: 237483 - DNA, 20 bp, synthetic construct
  source 1..20: mol_type = other DNA
tgcacatgtaccctagaact

SEQ ID NO: 237484 - DNA, 20 bp, synthetic construct
  source 1..20: mol_type = other DNA
gtgcacatgtaccctagaac

SEQ ID NO: 237485 - DNA, 20 bp, synthetic construct
  source 1..20: mol_type = other DNA
tgtgcacatgtaccctagaa

SEQ ID NO: 237486 - DNA, 20 bp, synthetic construct
  source 1..20: mol_type = other DNA
ttgtgcacatgtaccctaga

SEQ ID NO: 237487 - DNA, 20 bp, synthetic construct
  source 1..20: mol_type = other DNA
gttgtgcacatgtaccctag

SEQ ID NO: 237488 - DNA, 20 bp, synthetic construct
  source 1..20: mol_type = other DNA
cgttgtgcacatgtacccta

SEQ ID NO: 237489 - DNA, 20 bp, synthetic construct
  source 1..20: mol_type = other DNA
acgttgtgcacatgtaccct

SEQ ID NO: 237490 - DNA, 20 bp, synthetic construct
  source 1..20: mol_type = other DNA
cacgttgtgcacatgtaccc

SEQ ID NO: 237491 - DNA, 20 bp, synthetic construct
  source 1..20: mol_type = other DNA
gcacgttgtgcacatgtacc

SEQ ID NO: 237492 - DNA, 20 bp, synthetic construct
  source 1..20: mol_type = other DNA
tgcacgttgtgcacatgtac

SEQ ID NO: 237493 - DNA, 20 bp, synthetic construct
  source 1..20: mol_type = other DNA
ctgcacgttgtgcacatgta

SEQ ID NO: 237494 - DNA, 20 bp, synthetic construct
  source 1..20: mol_type = other DNA
cctgcacgttgtgcacatgt

SEQ ID NO: 237495 - DNA, 20 bp, synthetic construct
  source 1..20: mol_type = other DNA
acctgcacgttgtgcacatg

SEQ ID NO: 237496 - DNA, 20 bp, synthetic construct
  source 1..20: mol_type = other DNA
aacctgcacgttgtgcacat

SEQ ID NO: 237497 - DNA, 20 bp, synthetic construct
  source 1..20: mol_type = other DNA
aaacctgcacgttgtgcaca

SEQ ID NO: 237498 - DNA, 20 bp, synthetic construct
  source 1..20: mol_type = other DNA
caaacctgcacgttgtgcac

SEQ ID NO: 237499 - DNA, 20 bp, synthetic construct
  source 1..20: mol_type = other DNA
acaaacctgcacgttgtgca

SEQ ID NO: 237500 - DNA, 20 bp, synthetic construct
  source 1..20: mol_type = other DNA
aacaaacctgcacgttgtgc

SEQ ID NO: 237501 - DNA, 20 bp, synthetic construct
  source 1..20: mol_type = other DNA
taacaaacctgcacgttgtg

SEQ ID NO: 237502 - DNA, 20 bp, synthetic construct
  source 1..20: mol_type = other DNA
gtaacaaacctgcacgttgt

SEQ ID NO: 237503 - DNA, 20 bp, synthetic construct
  source 1..20: mol_type = other DNA
tgtaacaaacctgcacgttg

SEQ ID NO: 237504 - DNA, 20 bp, synthetic construct
  source 1..20: mol_type = other DNA
atgtaacaaacctgcacgtt

SEQ ID NO: 237505 - DNA, 20 bp, synthetic construct
  source 1..20: mol_type = other DNA
tatgtaacaaacctgcacgt

SEQ ID NO: 237506 - DNA, 20 bp, synthetic construct
  source 1..20: mol_type = other DNA
atatgtaacaaacctgcacg

SEQ ID NO: 237507 - DNA, 20 bp, synthetic construct
  source 1..20: mol_type = other DNA
catatgtaacaaacctgcac

SEQ ID NO: 237508 - DNA, 20 bp, synthetic construct
  source 1..20: mol_type = other DNA
acatatgtaacaaacctgca

SEQ ID NO: 237509 - DNA, 20 bp, synthetic construct
  source 1..20: mol_type = other DNA
tacatatgtaacaaacctgc

SEQ ID NO: 237510 - DNA, 20 bp, synthetic construct
  source 1..20: mol_type = other DNA
atacatatgtaacaaacctg

SEQ ID NO: 237511 - DNA, 20 bp, synthetic construct
  source 1..20: mol_type = other DNA
tatacatatgtaacaaacct

SEQ ID NO: 237512 - DNA, 20 bp, synthetic construct
  source 1..20: mol_type = other DNA
gtatacatatgtaacaaacc

SEQ ID NO: 237513 - DNA, 20 bp, synthetic construct
  source 1..20: mol_type = other DNA
tgtatacatatgtaacaaac

SEQ ID NO: 237514 - DNA, 20 bp, synthetic construct
  source 1..20: mol_type = other DNA
atgtatacatatgtaacaaa

SEQ ID NO: 237515 - DNA, 20 bp, synthetic construct
  source 1..20: mol_type = other DNA
catgtatacatatgtaacaa

SEQ ID NO: 237516 - DNA, 20 bp, synthetic construct
  source 1..20: mol_type = other DNA
acatgtatacatatgtaaca

SEQ ID NO: 237517 - DNA, 20 bp, synthetic construct
  source 1..20: mol_type = other DNA
cacatgtatacatatgtaac

SEQ ID NO: 237518 - DNA, 20 bp, synthetic construct
  source 1..20: mol_type = other DNA
gcacatgtatacatatgtaa

SEQ ID NO: 237519 - DNA, 20 bp, synthetic construct
  source 1..20: mol_type = other DNA
ggcacatgtatacatatgta

SEQ ID NO: 237520 - DNA, 20 bp, synthetic construct
  source 1..20: mol_type = other DNA
tggcacatgtatacatatgt

SEQ ID NO: 237521 - DNA, 20 bp, synthetic construct
  source 1..20: mol_type = other DNA
atggcacatgtatacatatg

SEQ ID NO: 237522 - DNA, 20 bp, synthetic construct
  source 1..20: mol_type = other DNA
catggcacatgtatacatat

SEQ ID NO: 237523 - DNA, 20 bp, synthetic construct
  source 1..20: mol_type = other DNA
acatggcacatgtatacata

SEQ ID NO: 237524 - DNA, 20 bp, synthetic construct
  source 1..20: mol_type = other DNA
aacatggcacatgtatacat

SEQ ID NO: 237525 - DNA, 20 bp, synthetic construct
  source 1..20: mol_type = other DNA
caacatggcacatgtataca

SEQ ID NO: 237526 - DNA, 20 bp, synthetic construct
  source 1..20: mol_type = other DNA
ccaacatggcacatgtatac

SEQ ID NO: 237527 - DNA, 20 bp, synthetic construct
  source 1..20: mol_type = other DNA
accaacatggcacatgtata

SEQ ID NO: 237528 - DNA, 20 bp, synthetic construct
  source 1..20: mol_type = other DNA
caccaacatggcacatgtat

SEQ ID NO: 237529 - DNA, 20 bp, synthetic construct
  source 1..20: mol_type = other DNA
acaccaacatggcacatgta

SEQ ID NO: 237530 - DNA, 20 bp, synthetic construct
  source 1..20: mol_type = other DNA
cacaccaacatggcacatgt

SEQ ID NO: 237531 - DNA, 20 bp, synthetic construct
  source 1..20: mol_type = other DNA
gcacaccaacatggcacatg

SEQ ID NO: 237532 - DNA, 20 bp, synthetic construct
  source 1..20: mol_type = other DNA
agcacaccaacatggcacat

SEQ ID NO: 237533 - DNA, 20 bp, synthetic construct
  source 1..20: mol_type = other DNA
cagcacaccaacatggcaca

SEQ ID NO: 237534 - DNA, 20 bp, synthetic construct
  source 1..20: mol_type = other DNA
gcagcacaccaacatggcac

SEQ ID NO: 237535 - DNA, 20 bp, synthetic construct
  source 1..20: mol_type = other DNA
tgcagcacaccaacatggca

SEQ ID NO: 237536 - DNA, 20 bp, synthetic construct
  source 1..20: mol_type = other DNA
gtgcagcacaccaacatggc

SEQ ID NO: 237537 - DNA, 20 bp, synthetic construct
  source 1..20: mol_type = other DNA
ggtgcagcacaccaacatgg

SEQ ID NO: 237538 - DNA, 20 bp, synthetic construct
  source 1..20: mol_type = other DNA
gggtgcagcacaccaacatg

SEQ ID NO: 237539 - DNA, 20 bp, synthetic construct
  source 1..20: mol_type = other DNA
tgggtgcagcacaccaacat

SEQ ID NO: 237540 - DNA, 20 bp, synthetic construct
  source 1..20: mol_type = other DNA
atgggtgcagcacaccaaca

SEQ ID NO: 237541 - DNA, 20 bp, synthetic construct
  source 1..20: mol_type = other DNA
gatgggtgcagcacaccaac

SEQ ID NO: 237542 - DNA, 20 bp, synthetic construct
  source 1..20: mol_type = other DNA
tgatgggtgcagcacaccaa

SEQ ID NO: 237543 - DNA, 20 bp, synthetic construct
  source 1..20: mol_type = other DNA
ttgatgggtgcagcacacca

SEQ ID NO: 237544 - DNA, 20 bp, synthetic construct
  source 1..20: mol_type = other DNA
gttgatgggtgcagcacacc

SEQ ID NO: 237545 - DNA, 20 bp, synthetic construct
  source 1..20: mol_type = other DNA
agttgatgggtgcagcacac

SEQ ID NO: 237546 - DNA, 20 bp, synthetic construct
  source 1..20: mol_type = other DNA
aagttgatgggtgcagcaca

SEQ ID NO: 237547 - DNA, 20 bp, synthetic construct
  source 1..20: mol_type = other DNA
caagttgatgggtgcagcac

SEQ ID NO: 237548 - DNA, 20 bp, synthetic construct
  source 1..20: mol_type = other DNA
acaagttgatgggtgcagca

SEQ ID NO: 237549 - DNA, 20 bp, synthetic construct
  source 1..20: mol_type = other DNA
gacaagttgatgggtgcagc

SEQ ID NO: 237550 - DNA, 20 bp, synthetic construct
  source 1..20: mol_type = other DNA
tgacaagttgatgggtgcag

SEQ ID NO: 237551 - DNA, 20 bp, synthetic construct
  source 1..20: mol_type = other DNA
atgacaagttgatgggtgca

SEQ ID NO: 237552 - DNA, 20 bp, synthetic construct
  source 1..20: mol_type = other DNA
aatgacaagttgatgggtgc

SEQ ID NO: 237553 - DNA, 20 bp, synthetic construct
  source 1..20: mol_type = other DNA
aaatgacaagttgatgggtg

SEQ ID NO: 237554 - DNA, 20 bp, synthetic construct
  source 1..20: mol_type = other DNA
taaatgacaagttgatgggt

SEQ ID NO: 237555 - DNA, 20 bp, synthetic construct
  source 1..20: mol_type = other DNA
gtaaatgacaagttgatggg

SEQ ID NO: 237556 - DNA, 20 bp, synthetic construct
  source 1..20: mol_type = other DNA
tgtaaatgacaagttgatgg

SEQ ID NO: 237557 - DNA, 20 bp, synthetic construct
  source 1..20: mol_type = other DNA
atgtaaatgacaagttgatg

SEQ ID NO: 237558 - DNA, 20 bp, synthetic construct
  source 1..20: mol_type = other DNA
aatgtaaatgacaagttgat

SEQ ID NO: 237559 - DNA, 20 bp, synthetic construct
  source 1..20: mol_type = other DNA
taatgtaaatgacaagttga

SEQ ID NO: 237560 - DNA, 20 bp, synthetic construct
  source 1..20: mol_type = other DNA
ctaatgtaaatgacaagttg

SEQ ID NO: 237561 - DNA, 20 bp, synthetic construct
  source 1..20: mol_type = other DNA
cctaatgtaaatgacaagtt

SEQ ID NO: 237562 - DNA, 20 bp, synthetic construct
  source 1..20: mol_type = other DNA
acctaatgtaaatgacaagt

SEQ ID NO: 237563 - DNA, 20 bp, synthetic construct
  source 1..20: mol_type = other DNA
tacctaatgtaaatgacaag

SEQ ID NO: 237564 - DNA, 20 bp, synthetic construct
  source 1..20: mol_type = other DNA
atacctaatgtaaatgacaa

SEQ ID NO: 237565 - DNA, 20 bp, synthetic construct
  source 1..20: mol_type = other DNA
tatacctaatgtaaatgaca

SEQ ID NO: 237566 - DNA, 20 bp, synthetic construct
  source 1..20: mol_type = other DNA
atatacctaatgtaaatgac

SEQ ID NO: 237567 - DNA, 20 bp, synthetic construct
  source 1..20: mol_type = other DNA
gatatacctaatgtaaatga

SEQ ID NO: 237568 - DNA, 20 bp, synthetic construct
  source 1..20: mol_type = other DNA
agatatacctaatgtaaatg

SEQ ID NO: 237569 - DNA, 20 bp, synthetic construct
  source 1..20: mol_type = other DNA
gagatatacctaatgtaaat

SEQ ID NO: 237570 - DNA, 20 bp, synthetic construct
  source 1..20: mol_type = other DNA
ggagatatacctaatgtaaa

SEQ ID NO: 237571 - DNA, 20 bp, synthetic construct
  source 1..20: mol_type = other DNA
aggagatatacctaatgtaa

SEQ ID NO: 237572 - DNA, 20 bp, synthetic construct
  source 1..20: mol_type = other DNA
taggagatatacctaatgta

SEQ ID NO: 237573 - DNA, 20 bp, synthetic construct
  source 1..20: mol_type = other DNA
ttaggagatatacctaatgt

SEQ ID NO: 237574 - DNA, 20 bp, synthetic construct
  source 1..20: mol_type = other DNA
attaggagatatacctaatg

SEQ ID NO: 237575 - DNA, 20 bp, synthetic construct
  source 1..20: mol_type = other DNA
cattaggagatatacctaat

SEQ ID NO: 237576 - DNA, 20 bp, synthetic construct
  source 1..20: mol_type = other DNA
gcattaggagatatacctaa

SEQ ID NO: 237577 - DNA, 20 bp, synthetic construct
  source 1..20: mol_type = other DNA
agcattaggagatataccta

SEQ ID NO: 237578 - DNA, 20 bp, synthetic construct
  source 1..20: mol_type = other DNA
tagcattaggagatatacct

SEQ ID NO: 237579 - DNA, 20 bp, synthetic construct
  source 1..20: mol_type = other DNA
atagcattaggagatatacc

SEQ ID NO: 237580 - DNA, 20 bp, synthetic construct
  source 1..20: mol_type = other DNA
gatagcattaggagatatac

SEQ ID NO: 237581 - DNA, 20 bp, synthetic construct
  source 1..20: mol_type = other DNA
ggatagcattaggagatata

SEQ ID NO: 237582 - DNA, 20 bp, synthetic construct
  source 1..20: mol_type = other DNA
gggatagcattaggagatat

SEQ ID NO: 237583 - DNA, 20 bp, synthetic construct
  source 1..20: mol_type = other DNA
agggatagcattaggagata

SEQ ID NO: 237584 - DNA, 20 bp, synthetic construct
  source 1..20: mol_type = other DNA
gagggatagcattaggagat

SEQ ID NO: 237585 - DNA, 20 bp, synthetic construct
  source 1..20: mol_type = other DNA
ggagggatagcattaggaga

SEQ ID NO: 237586 - DNA, 20 bp, synthetic construct
  source 1..20: mol_type = other DNA
gggagggatagcattaggag

SEQ ID NO: 237587 - DNA, 20 bp, synthetic construct
  source 1..20: mol_type = other DNA
ggggagggatagcattagga

SEQ ID NO: 237588 - DNA, 20 bp, synthetic construct
  source 1..20: mol_type = other DNA
gggggagggatagcattagg

SEQ ID NO: 237589 - DNA, 20 bp, synthetic construct
  source 1..20: mol_type = other DNA
ggggggagggatagcattag

SEQ ID NO: 237590 - DNA, 20 bp, synthetic construct
  source 1..20: mol_type = other DNA
aggggggagggatagcatta

SEQ ID NO: 237591 - DNA, 20 bp, synthetic construct
  source 1..20: mol_type = other DNA
gaggggggagggatagcatt

SEQ ID NO: 237592 - DNA, 20 bp, synthetic construct
  source 1..20: mol_type = other DNA
ggaggggggagggatagcat

SEQ ID NO: 237593 - DNA, 20 bp, synthetic construct
  source 1..20: mol_type = other DNA
gggaggggggagggatagca

SEQ ID NO: 237594 - DNA, 20 bp, synthetic construct
  source 1..20: mol_type = other DNA
ggggaggggggagggatagc

SEQ ID NO: 237595 - DNA, 20 bp, synthetic construct
  source 1..20: mol_type = other DNA
gggggaggggggagggatag

SEQ ID NO: 237596 - DNA, 20 bp, synthetic construct
  source 1..20: mol_type = other DNA
ggggggaggggggagggata

SEQ ID NO: 237597 - DNA, 20 bp, synthetic construct
  source 1..20: mol_type = other DNA
tggggggaggggggagggat

SEQ ID NO: 237598 - DNA, 20 bp, synthetic construct
  source 1..20: mol_type = other DNA
gtggggggaggggggaggga

SEQ ID NO: 237599 - DNA, 20 bp, synthetic construct
  source 1..20: mol_type = other DNA
ggtggggggaggggggaggg

SEQ ID NO: 237600 - DNA, 20 bp, synthetic construct
  source 1..20: mol_type = other DNA
gggtggggggaggggggagg

SEQ ID NO: 237601 - DNA, 20 bp, synthetic construct
  source 1..20: mol_type = other DNA
ggggtggggggaggggggag

SEQ ID NO: 237602 - DNA, 20 bp, synthetic construct
  source 1..20: mol_type = other DNA
gggggtggggggagggggga

SEQ ID NO: 237603 - DNA, 20 bp, synthetic construct
  source 1..20: mol_type = other DNA
agggggtggggggagggggg

SEQ ID NO: 237604 - DNA, 20 bp, synthetic construct
  source 1..20: mol_type = other DNA
cagggggtggggggaggggg

SEQ ID NO: 237605 - DNA, 20 bp, synthetic construct
  source 1..20: mol_type = other DNA
acagggggtggggggagggg

SEQ ID NO: 237606 - DNA, 20 bp, synthetic construct
  source 1..20: mol_type = other DNA
aacagggggtggggggaggg

SEQ ID NO: 237607 - DNA, 20 bp, synthetic construct
  source 1..20: mol_type = other DNA
aaacagggggtggggggagg

SEQ ID NO: 237608 - DNA, 20 bp, synthetic construct
  source 1..20: mol_type = other DNA
aaaacagggggtggggggag

SEQ ID NO: 237609 - DNA, 20 bp, synthetic construct
  source 1..20: mol_type = other DNA
gaaaacagggggtgggggga

SEQ ID NO: 237610 - DNA, 20 bp, synthetic construct
  source 1..20: mol_type = other DNA
agaaaacagggggtgggggg

SEQ ID NO: 237611 - DNA, 20 bp, synthetic construct
  source 1..20: mol_type = other DNA
gagaaaacagggggtggggg

SEQ ID NO: 237612 - DNA, 20 bp, synthetic construct
  source 1..20: mol_type = other DNA
ggagaaaacagggggtgggg

SEQ ID NO: 237613 - DNA, 20 bp, synthetic construct
  source 1..20: mol_type = other DNA
aggagaaaacagggggtggg

SEQ ID NO: 237614 - DNA, 20 bp, synthetic construct
  source 1..20: mol_type = other DNA
aaggagaaaacagggggtgg

SEQ ID NO: 237615 - DNA, 20 bp, synthetic construct
  source 1..20: mol_type = other DNA
aaaggagaaaacagggggtg

SEQ ID NO: 237616 - DNA, 20 bp, synthetic construct
  source 1..20: mol_type = other DNA
caaaggagaaaacagggggt

SEQ ID NO: 237617 - DNA, 20 bp, synthetic construct
  source 1..20: mol_type = other DNA
tcaaaggagaaaacaggggg

SEQ ID NO: 237618 - DNA, 20 bp, synthetic construct
  source 1..20: mol_type = other DNA
ttcaaaggagaaaacagggg

SEQ ID NO: 237619 - DNA, 20 bp, synthetic construct
  source 1..20: mol_type = other DNA
attcaaaggagaaaacaggg

SEQ ID NO: 237620 - DNA, 20 bp, synthetic construct
  source 1..20: mol_type = other DNA
gattcaaaggagaaaacagg

SEQ ID NO: 237621 - DNA, 20 bp, synthetic construct
  source 1..20: mol_type = other DNA
ggattcaaaggagaaaacag

SEQ ID NO: 237622 - DNA, 20 bp, synthetic construct
  source 1..20: mol_type = other DNA
aggattcaaaggagaaaaca

SEQ ID NO: 237623 - DNA, 20 bp, synthetic construct
  source 1..20: mol_type = other DNA
aaggattcaaaggagaaaac

SEQ ID NO: 237624 - DNA, 20 bp, synthetic construct
  source 1..20: mol_type = other DNA
gaaggattcaaaggagaaaa

SEQ ID NO: 237625 - DNA, 20 bp, synthetic construct
  source 1..20: mol_type = other DNA
agaaggattcaaaggagaaa

SEQ ID NO: 237626 - DNA, 20 bp, synthetic construct
  source 1..20: mol_type = other DNA
aagaaggattcaaaggagaa

SEQ ID NO: 237627 - DNA, 20 bp, synthetic construct
  source 1..20: mol_type = other DNA
taagaaggattcaaaggaga

SEQ ID NO: 237628 - DNA, 20 bp, synthetic construct
  source 1..20: mol_type = other DNA
ctaagaaggattcaaaggag

SEQ ID NO: 237629 - DNA, 20 bp, synthetic construct
  source 1..20: mol_type = other DNA
tctaagaaggattcaaagga

SEQ ID NO: 237630 - DNA, 20 bp, synthetic construct
  source 1..20: mol_type = other DNA
ctctaagaaggattcaaagg

SEQ ID NO: 237631 - DNA, 20 bp, synthetic construct
  source 1..20: mol_type = other DNA
cctctaagaaggattcaaag

SEQ ID NO: 237632 - DNA, 20 bp, synthetic construct
  source 1..20: mol_type = other DNA
gcctctaagaaggattcaaa

SEQ ID NO: 237633 - DNA, 20 bp, synthetic construct
  source 1..20: mol_type = other DNA
ggcctctaagaaggattcaa

SEQ ID NO: 237634 - DNA, 20 bp, synthetic construct
  source 1..20: mol_type = other DNA
cggcctctaagaaggattca

SEQ ID NO: 237635 - DNA, 20 bp, synthetic construct
  source 1..20: mol_type = other DNA
ccggcctctaagaaggattc

SEQ ID NO: 237636 - DNA, 20 bp, synthetic construct
  source 1..20: mol_type = other DNA
cccggcctctaagaaggatt

SEQ ID NO: 237637 - DNA, 20 bp, synthetic construct
  source 1..20: mol_type = other DNA
gcccggcctctaagaaggat

SEQ ID NO: 237638 - DNA, 20 bp, synthetic construct
  source 1..20: mol_type = other DNA
cgcccggcctctaagaagga

SEQ ID NO: 237639 - DNA, 20 bp, synthetic construct
  source 1..20: mol_type = other DNA
gcgcccggcctctaagaagg

SEQ ID NO: 237640 - DNA, 20 bp, synthetic construct
  source 1..20: mol_type = other DNA
cgcgcccggcctctaagaag

SEQ ID NO: 237641 - DNA, 20 bp, synthetic construct
  source 1..20: mol_type = other DNA
ccgcgcccggcctctaagaa

SEQ ID NO: 237642 - DNA, 20 bp, synthetic construct
  source 1..20: mol_type = other DNA
accgcgcccggcctctaaga

SEQ ID NO: 237643 - DNA, 20 bp, synthetic construct
  source 1..20: mol_type = other DNA
caccgcgcccggcctctaag

SEQ ID NO: 237644 - DNA, 20 bp, synthetic construct
  source 1..20: mol_type = other DNA
ccaccgcgcccggcctctaa

SEQ ID NO: 237645 - DNA, 20 bp, synthetic construct
  source 1..20: mol_type = other DNA
gccaccgcgcccggcctcta

SEQ ID NO: 237646 - DNA, 20 bp, synthetic construct
  source 1..20: mol_type = other DNA
agccaccgcgcccggcctct

SEQ ID NO: 237647 - DNA, 20 bp, synthetic construct
  source 1..20: mol_type = other DNA
gagccaccgcgcccggcctc

SEQ ID NO: 237648 - DNA, 20 bp, synthetic construct
  source 1..20: mol_type = other DNA
tgagccaccgcgcccggcct

SEQ ID NO: 237649 - DNA, 20 bp, synthetic construct
  source 1..20: mol_type = other DNA
gtgagccaccgcgcccggcc

SEQ ID NO: 237650 - DNA, 20 bp, synthetic construct
  source 1..20: mol_type = other DNA
cgtgagccaccgcgcccggc

SEQ ID NO: 237651 - DNA, 20 bp, synthetic construct
  source 1..20: mol_type = other DNA
gcgtgagccaccgcgcccgg

SEQ ID NO: 237652 - DNA, 20 bp, synthetic construct
  source 1..20: mol_type = other DNA
ggcgtgagccaccgcgcccg

SEQ ID NO: 237653 - DNA, 20 bp, synthetic construct
  source 1..20: mol_type = other DNA
aggcgtgagccaccgcgccc

SEQ ID NO: 237654 - DNA, 20 bp, synthetic construct
  source 1..20: mol_type = other DNA
caggcgtgagccaccgcgcc

SEQ ID NO: 237655 - DNA, 20 bp, synthetic construct
  source 1..20: mol_type = other DNA
acaggcgtgagccaccgcgc

SEQ ID NO: 237656 - DNA, 20 bp, synthetic construct
  source 1..20: mol_type = other DNA
tacaggcgtgagccaccgcg

SEQ ID NO: 237657 - DNA, 20 bp, synthetic construct
  source 1..20: mol_type = other DNA
ttacaggcgtgagccaccgc

SEQ ID NO: 237658 - DNA, 20 bp, synthetic construct
  source 1..20: mol_type = other DNA
attacaggcgtgagccaccg

SEQ ID NO: 237659 - DNA, 20 bp, synthetic construct
  source 1..20: mol_type = other DNA
gattacaggcgtgagccacc

SEQ ID NO: 237660 - DNA, 20 bp, synthetic construct
  source 1..20: mol_type = other DNA
ggattacaggcgtgagccac

SEQ ID NO: 237661 - DNA, 20 bp, synthetic construct
  source 1..20: mol_type = other DNA
gggattacaggcgtgagcca

SEQ ID NO: 237662 - DNA, 20 bp, synthetic construct
  source 1..20: mol_type = other DNA
tgggattacaggcgtgagcc

SEQ ID NO: 237663 - DNA, 20 bp, synthetic construct
  source 1..20: mol_type = other DNA
ctgggattacaggcgtgagc

SEQ ID NO: 237664 - DNA, 20 bp, synthetic construct
  source 1..20: mol_type = other DNA
gctgggattacaggcgtgag

SEQ ID NO: 237665 - DNA, 20 bp, synthetic construct
  source 1..20: mol_type = other DNA
tgctgggattacaggcgtga

SEQ ID NO: 237666 - DNA, 20 bp, synthetic construct
  source 1..20: mol_type = other DNA
gtgctgggattacaggcgtg

SEQ ID NO: 237667 - DNA, 20 bp, synthetic construct
  source 1..20: mol_type = other DNA
agtgctgggattacaggcgt

SEQ ID NO: 237668 - DNA, 20 bp, synthetic construct
  source 1..20: mol_type = other DNA
aagtgctgggattacaggcg

SEQ ID NO: 237669 - DNA, 20 bp, synthetic construct
  source 1..20: mol_type = other DNA
aaagtgctgggattacaggc

SEQ ID NO: 237670 - DNA, 20 bp, synthetic construct
  source 1..20: mol_type = other DNA
caaagtgctgggattacagg

SEQ ID NO: 237671 - DNA, 20 bp, synthetic construct
  source 1..20: mol_type = other DNA
ccaaagtgctgggattacag

SEQ ID NO: 237672 - DNA, 20 bp, synthetic construct
  source 1..20: mol_type = other DNA
cccaaagtgctgggattaca

SEQ ID NO: 237673 - DNA, 20 bp, synthetic construct
  source 1..20: mol_type = other DNA
tcccaaagtgctgggattac

SEQ ID NO: 237674 - DNA, 20 bp, synthetic construct
  source 1..20: mol_type = other DNA
ctcccaaagtgctgggatta

SEQ ID NO: 237675 - DNA, 20 bp, synthetic construct
  source 1..20: mol_type = other DNA
cctcccaaagtgctgggatt

SEQ ID NO: 237676 - DNA, 20 bp, synthetic construct
  source 1..20: mol_type = other DNA
gcctcccaaagtgctgggat

SEQ ID NO: 237677 - DNA, 20 bp, synthetic construct
  source 1..20: mol_type = other DNA
agcctcccaaagtgctggga

SEQ ID NO: 237678 - DNA, 20 bp, synthetic construct
  source 1..20: mol_type = other DNA
cagcctcccaaagtgctggg

SEQ ID NO: 237679 - DNA, 20 bp, synthetic construct
  source 1..20: mol_type = other DNA
gcagcctcccaaagtgctgg

SEQ ID NO: 237680 - DNA, 20 bp, synthetic construct
  source 1..20: mol_type = other DNA
cgcagcctcccaaagtgctg

SEQ ID NO: 237681 - DNA, 20 bp, synthetic construct
  source 1..20: mol_type = other DNA
ccgcagcctcccaaagtgct

SEQ ID NO: 237682 - DNA, 20 bp, synthetic construct
  source 1..20: mol_type = other DNA
gccgcagcctcccaaagtgc

SEQ ID NO: 237683 - DNA, 20 bp, synthetic construct
  source 1..20: mol_type = other DNA
tgccgcagcctcccaaagtg

SEQ ID NO: 237684 - DNA, 20 bp, synthetic construct
  source 1..20: mol_type = other DNA
ctgccgcagcctcccaaagt

SEQ ID NO: 237685 - DNA, 20 bp, synthetic construct
  source 1..20: mol_type = other DNA
cctgccgcagcctcccaaag

SEQ ID NO: 237686 - DNA, 20 bp, synthetic construct
  source 1..20: mol_type = other DNA
tcctgccgcagcctcccaaa

SEQ ID NO: 237687 - DNA, 20 bp, synthetic construct
  source 1..20: mol_type = other DNA
ctcctgccgcagcctcccaa

SEQ ID NO: 237688 - DNA, 20 bp, synthetic construct
  source 1..20: mol_type = other DNA
cctcctgccgcagcctccca

SEQ ID NO: 237689 - DNA, 20 bp, synthetic construct
  source 1..20: mol_type = other DNA
tcctcctgccgcagcctccc

SEQ ID NO: 237690 - DNA, 20 bp, synthetic construct
  source 1..20: mol_type = other DNA
atcctcctgccgcagcctcc

SEQ ID NO: 237691 - DNA, 20 bp, synthetic construct
  source 1..20: mol_type = other DNA
aatcctcctgccgcagcctc

SEQ ID NO: 237692 - DNA, 20 bp, synthetic construct
  source 1..20: mol_type = other DNA
caatcctcctgccgcagcct

SEQ ID NO: 237693 - DNA, 20 bp, synthetic construct
  source 1..20: mol_type = other DNA
gcaatcctcctgccgcagcc

SEQ ID NO: 237694 - DNA, 20 bp, synthetic construct
  source 1..20: mol_type = other DNA
agcaatcctcctgccgcagc

SEQ ID NO: 237695 - DNA, 20 bp, synthetic construct
  source 1..20: mol_type = other DNA
aagcaatcctcctgccgcag

SEQ ID NO: 237696 - DNA, 20 bp, synthetic construct
  source 1..20: mol_type = other DNA
caagcaatcctcctgccgca

SEQ ID NO: 237697 - DNA, 20 bp, synthetic construct
  source 1..20: mol_type = other DNA
tcaagcaatcctcctgccgc

SEQ ID NO: 237698 - DNA, 20 bp, synthetic construct
  source 1..20: mol_type = other DNA
ctcaagcaatcctcctgccg

SEQ ID NO: 237699 - DNA, 20 bp, synthetic construct
  source 1..20: mol_type = other DNA
gctcaagcaatcctcctgcc

SEQ ID NO: 237700 - DNA, 20 bp, synthetic construct
  source 1..20: mol_type = other DNA
ggctcaagcaatcctcctgc

SEQ ID NO: 237701 - DNA, 20 bp, synthetic construct
  source 1..20: mol_type = other DNA
gggctcaagcaatcctcctg

SEQ ID NO: 237702 - DNA, 20 bp, synthetic construct
  source 1..20: mol_type = other DNA
tgggctcaagcaatcctcct

SEQ ID NO: 237703 - DNA, 20 bp, synthetic construct
  source 1..20: mol_type = other DNA
ctgggctcaagcaatcctcc

SEQ ID NO: 237704 - DNA, 20 bp, synthetic construct
  source 1..20: mol_type = other DNA
cctgggctcaagcaatcctc

SEQ ID NO: 237705 - DNA, 20 bp, synthetic construct
  source 1..20: mol_type = other DNA
tcctgggctcaagcaatcct

SEQ ID NO: 237706 - DNA, 20 bp, synthetic construct
  source 1..20: mol_type = other DNA
ctcctgggctcaagcaatcc

SEQ ID NO: 237707 - DNA, 20 bp, synthetic construct
  source 1..20: mol_type = other DNA
actcctgggctcaagcaatc

SEQ ID NO: 237708 - DNA, 20 bp, synthetic construct
  source 1..20: mol_type = other DNA
aactcctgggctcaagcaat

SEQ ID NO: 237709 - DNA, 20 bp, synthetic construct
  source 1..20: mol_type = other DNA
gaactcctgggctcaagcaa

SEQ ID NO: 237710 - DNA, 20 bp, synthetic construct
  source 1..20: mol_type = other DNA
ggaactcctgggctcaagca

SEQ ID NO: 237711 - DNA, 20 bp, synthetic construct
  source 1..20: mol_type = other DNA
tggaactcctgggctcaagc

SEQ ID NO: 237712 - DNA, 20 bp, synthetic construct
  source 1..20: mol_type = other DNA
ctggaactcctgggctcaag

SEQ ID NO: 237713 - DNA, 20 bp, synthetic construct
  source 1..20: mol_type = other DNA
tctggaactcctgggctcaa

SEQ ID NO: 237714 - DNA, 20 bp, synthetic construct
  source 1..20: mol_type = other DNA
gtctggaactcctgggctca

SEQ ID NO: 237715 - DNA, 20 bp, synthetic construct
  source 1..20: mol_type = other DNA
ggtctggaactcctgggctc

SEQ ID NO: 237716 - DNA, 20 bp, synthetic construct
  source 1..20: mol_type = other DNA
tggtctggaactcctgggct

SEQ ID NO: 237717 - DNA, 20 bp, synthetic construct
  source 1..20: mol_type = other DNA
ctggtctggaactcctgggc

SEQ ID NO: 237718 - DNA, 20 bp, synthetic construct
  source 1..20: mol_type = other DNA
gctggtctggaactcctggg

SEQ ID NO: 237719 - DNA, 20 bp, synthetic construct
  source 1..20: mol_type = other DNA
ggctggtctggaactcctgg

SEQ ID NO: 237720 - DNA, 20 bp, synthetic construct
  source 1..20: mol_type = other DNA
aggctggtctggaactcctg

SEQ ID NO: 237721 - DNA, 20 bp, synthetic construct
  source 1..20: mol_type = other DNA
caggctggtctggaactcct

SEQ ID NO: 237722 - DNA, 20 bp, synthetic construct
  source 1..20: mol_type = other DNA
ccaggctggtctggaactcc

SEQ ID NO: 237723 - DNA, 20 bp, synthetic construct
  source 1..20: mol_type = other DNA
cccaggctggtctggaactc

SEQ ID NO: 237724 - DNA, 20 bp, synthetic construct
  source 1..20: mol_type = other DNA
gcccaggctggtctggaact

SEQ ID NO: 237725 - DNA, 20 bp, synthetic construct
  source 1..20: mol_type = other DNA
tgcccaggctggtctggaac

SEQ ID NO: 237726 - DNA, 20 bp, synthetic construct
  source 1..20: mol_type = other DNA
ttgcccaggctggtctggaa

SEQ ID NO: 237727 - DNA, 20 bp, synthetic construct
  source 1..20: mol_type = other DNA
gttgcccaggctggtctgga

SEQ ID NO: 237728 - DNA, 20 bp, synthetic construct
  source 1..20: mol_type = other DNA
tgttgcccaggctggtctgg

SEQ ID NO: 237729 - DNA, 20 bp, synthetic construct
  source 1..20: mol_type = other DNA
atgttgcccaggctggtctg

SEQ ID NO: 237730 - DNA, 20 bp, synthetic construct
  source 1..20: mol_type = other DNA
tatgttgcccaggctggtct

SEQ ID NO: 237731 - DNA, 20 bp, synthetic construct
  source 1..20: mol_type = other DNA
ctatgttgcccaggctggtc

SEQ ID NO: 237732 - DNA, 20 bp, synthetic construct
  source 1..20: mol_type = other DNA
actatgttgcccaggctggt

SEQ ID NO: 237733 - DNA, 20 bp, synthetic construct
  source 1..20: mol_type = other DNA
cactatgttgcccaggctgg

SEQ ID NO: 237734 - DNA, 20 bp, synthetic construct
  source 1..20: mol_type = other DNA
tcactatgttgcccaggctg

SEQ ID NO: 237735 - DNA, 20 bp, synthetic construct
  source 1..20: mol_type = other DNA
ctcactatgttgcccaggct

SEQ ID NO: 237736 - DNA, 20 bp, synthetic construct
  source 1..20: mol_type = other DNA
tctcactatgttgcccaggc

SEQ ID NO: 237737 - DNA, 20 bp, synthetic construct
  source 1..20: mol_type = other DNA
gtctcactatgttgcccagg

SEQ ID NO: 237738 - DNA, 20 bp, synthetic construct
  source 1..20: mol_type = other DNA
ggtctcactatgttgcccag

SEQ ID NO: 237739 - DNA, 20 bp, synthetic construct
  source 1..20: mol_type = other DNA
aggtctcactatgttgccca

SEQ ID NO: 237740 - DNA, 20 bp, synthetic construct
  source 1..20: mol_type = other DNA
gaggtctcactatgttgccc

SEQ ID NO: 237741 - DNA, 20 bp, synthetic construct
  source 1..20: mol_type = other DNA
cgaggtctcactatgttgcc

SEQ ID NO: 237742 - DNA, 20 bp, synthetic construct
  source 1..20: mol_type = other DNA
acgaggtctcactatgttgc

SEQ ID NO: 237743 - DNA, 20 bp, synthetic construct
  source 1..20: mol_type = other DNA
gacgaggtctcactatgttg

SEQ ID NO: 237744 - DNA, 20 bp, synthetic construct
  source 1..20: mol_type = other DNA
agacgaggtctcactatgtt

SEQ ID NO: 237745 - DNA, 20 bp, synthetic construct
  source 1..20: mol_type = other DNA
gagacgaggtctcactatgt

SEQ ID NO: 237746 - DNA, 20 bp, synthetic construct
  source 1..20: mol_type = other DNA
agagacgaggtctcactatg

SEQ ID NO: 237747 - DNA, 20 bp, synthetic construct
  source 1..20: mol_type = other DNA
tagagacgaggtctcactat

SEQ ID NO: 237748 - DNA, 20 bp, synthetic construct
  source 1..20: mol_type = other DNA
gtagagacgaggtctcacta

SEQ ID NO: 237749 - DNA, 20 bp, synthetic construct
  source 1..20: mol_type = other DNA
tgtagagacgaggtctcact

SEQ ID NO: 237750 - DNA, 20 bp, synthetic construct
  source 1..20: mol_type = other DNA
ctgtagagacgaggtctcac

SEQ ID NO: 237751 - DNA, 20 bp, synthetic construct
  source 1..20: mol_type = other DNA
tctgtagagacgaggtctca

SEQ ID NO: 237752 - DNA, 20 bp, synthetic construct
  source 1..20: mol_type = other DNA
atctgtagagacgaggtctc

SEQ ID NO: 237753 - DNA, 20 bp, synthetic construct
  source 1..20: mol_type = other DNA
tatctgtagagacgaggtct

SEQ ID NO: 237754 - DNA, 20 bp, synthetic construct
  source 1..20: mol_type = other DNA
ttatctgtagagacgaggtc

SEQ ID NO: 237755 - DNA, 20 bp, synthetic construct
  source 1..20: mol_type = other DNA
attatctgtagagacgaggt

SEQ ID NO: 237756 - DNA, 20 bp, synthetic construct
  source 1..20: mol_type = other DNA
tattatctgtagagacgagg

SEQ ID NO: 237757 - DNA, 20 bp, synthetic construct
  source 1..20: mol_type = other DNA
ttattatctgtagagacgag

SEQ ID NO: 237758 - DNA, 20 bp, synthetic construct
  source 1..20: mol_type = other DNA
attattatctgtagagacga

SEQ ID NO: 237759 - DNA, 20 bp, synthetic construct
  source 1..20: mol_type = other DNA
aattattatctgtagagacg

SEQ ID NO: 237760 - DNA, 20 bp, synthetic construct
  source 1..20: mol_type = other DNA
aaattattatctgtagagac

SEQ ID NO: 237761 - DNA, 20 bp, synthetic construct
  source 1..20: mol_type = other DNA
aaaattattatctgtagaga

SEQ ID NO: 237762 - DNA, 20 bp, synthetic construct
  source 1..20: mol_type = other DNA
taaaattattatctgtagag

SEQ ID NO: 237763 - DNA, 20 bp, synthetic construct
  source 1..20: mol_type = other DNA
ttaaaattattatctgtaga

SEQ ID NO: 237764 - DNA, 20 bp, synthetic construct
  source 1..20: mol_type = other DNA
tttaaaattattatctgtag

SEQ ID NO: 237765 - DNA, 20 bp, synthetic construct
  source 1..20: mol_type = other DNA
ttttaaaattattatctgta

SEQ ID NO: 237766 - DNA, 20 bp, synthetic construct
  source 1..20: mol_type = other DNA
tttttaaaattattatctgt

SEQ ID NO: 237767 - DNA, 20 bp, synthetic construct
  source 1..20: mol_type = other DNA
atttttaaaattattatctg

SEQ ID NO: 237768 - DNA, 20 bp, synthetic construct
  source 1..20: mol_type = other DNA
aatttttaaaattattatct

SEQ ID NO: 237769 - DNA, 20 bp, synthetic construct
  source 1..20: mol_type = other DNA
taatttttaaaattattatc

SEQ ID NO: 237770 - DNA, 20 bp, synthetic construct
  source 1..20: mol_type = other DNA
ataatttttaaaattattat

SEQ ID NO: 237771 - DNA, 20 bp, synthetic construct
  source 1..20: mol_type = other DNA
gataatttttaaaattatta

SEQ ID NO: 237772 - DNA, 20 bp, synthetic construct
  source 1..20: mol_type = other DNA
ggataatttttaaaattatt

SEQ ID NO: 237773 - DNA, 20 bp, synthetic construct
  source 1..20: mol_type = other DNA
cggataatttttaaaattat

SEQ ID NO: 237774 - DNA, 20 bp, synthetic construct
  source 1..20: mol_type = other DNA
ccggataatttttaaaatta

SEQ ID NO: 237775 - DNA, 20 bp, synthetic construct
  source 1..20: mol_type = other DNA
cccggataatttttaaaatt

SEQ ID NO: 237776 - DNA, 20 bp, synthetic construct
  source 1..20: mol_type = other DNA
gcccggataatttttaaaat

SEQ ID NO: 237777 - DNA, 20 bp, synthetic construct
  source 1..20: mol_type = other DNA
tgcccggataatttttaaaa

SEQ ID NO: 237778 - DNA, 20 bp, synthetic construct
  source 1..20: mol_type = other DNA
atgcccggataatttttaaa

SEQ ID NO: 237779 - DNA, 20 bp, synthetic construct
  source 1..20: mol_type = other DNA
tatgcccggataatttttaa

SEQ ID NO: 237780 - DNA, 20 bp, synthetic construct
  source 1..20: mol_type = other DNA
ctatgcccggataattttta

SEQ ID NO: 237781 - DNA, 20 bp, synthetic construct
  source 1..20: mol_type = other DNA
actatgcccggataattttt

SEQ ID NO: 237782 - DNA, 20 bp, synthetic construct
  source 1..20: mol_type = other DNA
cactatgcccggataatttt

SEQ ID NO: 237783 - DNA, 20 bp, synthetic construct
  source 1..20: mol_type = other DNA
ccactatgcccggataattt

SEQ ID NO: 237784 - DNA, 20 bp, synthetic construct
  source 1..20: mol_type = other DNA
gccactatgcccggataatt

SEQ ID NO: 237785 - DNA, 20 bp, synthetic construct
  source 1..20: mol_type = other DNA
tgccactatgcccggataat

SEQ ID NO: 237786 - DNA, 20 bp, synthetic construct
  source 1..20: mol_type = other DNA
atgccactatgcccggataa

SEQ ID NO: 237787 - DNA, 20 bp, synthetic construct
  source 1..20: mol_type = other DNA
catgccactatgcccggata

SEQ ID NO: 237788 - DNA, 20 bp, synthetic construct
  source 1..20: mol_type = other DNA
gcatgccactatgcccggat

SEQ ID NO: 237789 - DNA, 20 bp, synthetic construct
  source 1..20: mol_type = other DNA
tgcatgccactatgcccgga

SEQ ID NO: 237790 - DNA, 20 bp, synthetic construct
  source 1..20: mol_type = other DNA
gtgcatgccactatgcccgg

SEQ ID NO: 237791 - DNA, 20 bp, synthetic construct
  source 1..20: mol_type = other DNA
ggtgcatgccactatgcccg

SEQ ID NO: 237792 - DNA, 20 bp, synthetic construct
  source 1..20: mol_type = other DNA
aggtgcatgccactatgccc

SEQ ID NO: 237793 - DNA, 20 bp, synthetic construct
  source 1..20: mol_type = other DNA
taggtgcatgccactatgcc

SEQ ID NO: 237794 - DNA, 20 bp, synthetic construct
  source 1..20: mol_type = other DNA
ataggtgcatgccactatgc

SEQ ID NO: 237795 - DNA, 20 bp, synthetic construct
  source 1..20: mol_type = other DNA
tataggtgcatgccactatg

SEQ ID NO: 237796 - DNA, 20 bp, synthetic construct
  source 1..20: mol_type = other DNA
ctataggtgcatgccactat

SEQ ID NO: 237797 - DNA, 20 bp, synthetic construct
  source 1..20: mol_type = other DNA
actataggtgcatgccacta

SEQ ID NO: 237798 - DNA, 20 bp, synthetic construct
  source 1..20: mol_type = other DNA
gactataggtgcatgccact

SEQ ID NO: 237799 - DNA, 20 bp, synthetic construct
  source 1..20: mol_type = other DNA
ggactataggtgcatgccac

SEQ ID NO: 237800 - DNA, 20 bp, synthetic construct
  source 1..20: mol_type = other DNA
gggactataggtgcatgcca

SEQ ID NO: 237801 - DNA, 20 bp, synthetic construct
  source 1..20: mol_type = other DNA
tgggactataggtgcatgcc

SEQ ID NO: 237802 - DNA, 20 bp, synthetic construct
  source 1..20: mol_type = other DNA
ctgggactataggtgcatgc

SEQ ID NO: 237803 - DNA, 20 bp, synthetic construct
  source 1..20: mol_type = other DNA
gctgggactataggtgcatg

SEQ ID NO: 237804 - DNA, 20 bp, synthetic construct
  source 1..20: mol_type = other DNA
agctgggactataggtgcat

SEQ ID NO: 237805 - DNA, 20 bp, synthetic construct
  source 1..20: mol_type = other DNA
tagctgggactataggtgca

SEQ ID NO: 237806 - DNA, 20 bp, synthetic construct
  source 1..20: mol_type = other DNA
gtagctgggactataggtgc

SEQ ID NO: 237807 - DNA, 20 bp, synthetic construct
  source 1..20: mol_type = other DNA
agtagctgggactataggtg

SEQ ID NO: 237808 - DNA, 20 bp, synthetic construct
  source 1..20: mol_type = other DNA
gagtagctgggactataggt

SEQ ID NO: 237809 - DNA, 20 bp, synthetic construct
  source 1..20: mol_type = other DNA
tgagtagctgggactatagg

SEQ ID NO: 237810 - DNA, 20 bp, synthetic construct
  source 1..20: mol_type = other DNA
ttgagtagctgggactatag

SEQ ID NO: 237811 - DNA, 20 bp, synthetic construct
  source 1..20: mol_type = other DNA
cttgagtagctgggactata

SEQ ID NO: 237812 - DNA, 20 bp, synthetic construct
  source 1..20: mol_type = other DNA
tcttgagtagctgggactat

SEQ ID NO: 237813 - DNA, 20 bp, synthetic construct
  source 1..20: mol_type = other DNA
ctcttgagtagctgggacta

SEQ ID NO: 237814 - DNA, 20 bp, synthetic construct
  source 1..20: mol_type = other DNA
cctcttgagtagctgggact

SEQ ID NO: 237815 - DNA, 20 bp, synthetic construct
  source 1..20: mol_type = other DNA
gcctcttgagtagctgggac

SEQ ID NO: 237816 - DNA, 20 bp, synthetic construct
  source 1..20: mol_type = other DNA
tgcctcttgagtagctggga

SEQ ID NO: 237817 - DNA, 20 bp, synthetic construct
  source 1..20: mol_type = other DNA
ctgcctcttgagtagctggg

SEQ ID NO: 237818 - DNA, 20 bp, synthetic construct
  source 1..20: mol_type = other DNA
tctgcctcttgagtagctgg

SEQ ID NO: 237819 - DNA, 20 bp, synthetic construct
  source 1..20: mol_type = other DNA
ctctgcctcttgagtagctg

SEQ ID NO: 237820 - DNA, 20 bp, synthetic construct
  source 1..20: mol_type = other DNA
cctctgcctcttgagtagct

SEQ ID NO: 237821 - DNA, 20 bp, synthetic construct
  source 1..20: mol_type = other DNA
gcctctgcctcttgagtagc

SEQ ID NO: 237822 - DNA, 20 bp, synthetic construct
  source 1..20: mol_type = other DNA
tgcctctgcctcttgagtag

SEQ ID NO: 237823 - DNA, 20 bp, synthetic construct
  source 1..20: mol_type = other DNA
ctgcctctgcctcttgagta

SEQ ID NO: 237824 - DNA, 20 bp, synthetic construct
  source 1..20: mol_type = other DNA
cctgcctctgcctcttgagt

SEQ ID NO: 237825 - DNA, 20 bp, synthetic construct
  source 1..20: mol_type = other DNA
tcctgcctctgcctcttgag

SEQ ID NO: 237826 - DNA, 20 bp, synthetic construct
  source 1..20: mol_type = other DNA
ctcctgcctctgcctcttga

SEQ ID NO: 237827 - DNA, 20 bp, synthetic construct
  source 1..20: mol_type = other DNA
cctcctgcctctgcctcttg

SEQ ID NO: 237828 - DNA, 20 bp, synthetic construct
  source 1..20: mol_type = other DNA
tcctcctgcctctgcctctt

SEQ ID NO: 237829 - DNA, 20 bp, synthetic construct
  source 1..20: mol_type = other DNA
atcctcctgcctctgcctct

SEQ ID NO: 237830 - DNA, 20 bp, synthetic construct
  source 1..20: mol_type = other DNA
gatcctcctgcctctgcctc

SEQ ID NO: 237831 - DNA, 20 bp, synthetic construct
  source 1..20: mol_type = other DNA
tgatcctcctgcctctgcct

SEQ ID NO: 237832 - DNA, 20 bp, synthetic construct
  source 1..20: mol_type = other DNA
gtgatcctcctgcctctgcc

SEQ ID NO: 237833 - DNA, 20 bp, synthetic construct
  source 1..20: mol_type = other DNA
agtgatcctcctgcctctgc

SEQ ID NO: 237834 - DNA, 20 bp, synthetic construct
  source 1..20: mol_type = other DNA
aagtgatcctcctgcctctg

SEQ ID NO: 237835 - DNA, 20 bp, synthetic construct
  source 1..20: mol_type = other DNA
caagtgatcctcctgcctct

SEQ ID NO: 237836 - DNA, 20 bp, synthetic construct
  source 1..20: mol_type = other DNA
tcaagtgatcctcctgcctc

SEQ ID NO: 237837 - DNA, 20 bp, synthetic construct
  source 1..20: mol_type = other DNA
ctcaagtgatcctcctgcct

SEQ ID NO: 237838 - DNA, 20 bp, synthetic construct
  source 1..20: mol_type = other DNA
gctcaagtgatcctcctgcc

SEQ ID NO: 237839 - DNA, 20 bp, synthetic construct
  source 1..20: mol_type = other DNA
ggctcaagtgatcctcctgc

SEQ ID NO: 237840 - DNA, 20 bp, synthetic construct
  source 1..20: mol_type = other DNA
gggctcaagtgatcctcctg

SEQ ID NO: 237841 - DNA, 20 bp, synthetic construct
  source 1..20: mol_type = other DNA
tgggctcaagtgatcctcct

SEQ ID NO: 237842 - DNA, 20 bp, synthetic construct
  source 1..20: mol_type = other DNA
ctgggctcaagtgatcctcc

SEQ ID NO: 237843 - DNA, 20 bp, synthetic construct
  source 1..20: mol_type = other DNA
cctgggctcaagtgatcctc

SEQ ID NO: 237844 - DNA, 20 bp, synthetic construct
  source 1..20: mol_type = other DNA
tcctgggctcaagtgatcct

SEQ ID NO: 237845 - DNA, 20 bp, synthetic construct
  source 1..20: mol_type = other DNA
ctcctgggctcaagtgatcc

SEQ ID NO: 237846 - DNA, 20 bp, synthetic construct
  source 1..20: mol_type = other DNA
cctcctgggctcaagtgatc

SEQ ID NO: 237847 - DNA, 20 bp, synthetic construct
  source 1..20: mol_type = other DNA
gcctcctgggctcaagtgat

SEQ ID NO: 237848 - DNA, 20 bp, synthetic construct
  source 1..20: mol_type = other DNA
cgcctcctgggctcaagtga

SEQ ID NO: 237849 - DNA, 20 bp, synthetic construct
  source 1..20: mol_type = other DNA
ccgcctcctgggctcaagtg

SEQ ID NO: 237850 - DNA, 20 bp, synthetic construct
  source 1..20: mol_type = other DNA
tccgcctcctgggctcaagt

SEQ ID NO: 237851 - DNA, 20 bp, synthetic construct
  source 1..20: mol_type = other DNA
ctccgcctcctgggctcaag

SEQ ID NO: 237852 - DNA, 20 bp, synthetic construct
  source 1..20: mol_type = other DNA
cctccgcctcctgggctcaa

SEQ ID NO: 237853 - DNA, 20 bp, synthetic construct
  source 1..20: mol_type = other DNA
acctccgcctcctgggctca

SEQ ID NO: 237854 - DNA, 20 bp, synthetic construct
  source 1..20: mol_type = other DNA
aacctccgcctcctgggctc

SEQ ID NO: 237855 - DNA, 20 bp, synthetic construct
  source 1..20: mol_type = other DNA
caacctccgcctcctgggct

SEQ ID NO: 237856 - DNA, 20 bp, synthetic construct
  source 1..20: mol_type = other DNA
gcaacctccgcctcctgggc

SEQ ID NO: 237857 - DNA, 20 bp, synthetic construct
  source 1..20: mol_type = other DNA
ggcaacctccgcctcctggg

SEQ ID NO: 237858 - DNA, 20 bp, synthetic construct
  source 1..20: mol_type = other DNA
cggcaacctccgcctcctgg

SEQ ID NO: 237859 - DNA, 20 bp, synthetic construct
  source 1..20: mol_type = other DNA
acggcaacctccgcctcctg

SEQ ID NO: 237860 - DNA, 20 bp, synthetic construct
  source 1..20: mol_type = other DNA
cacggcaacctccgcctcct

SEQ ID NO: 237861 - DNA, 20 bp, synthetic construct
  source 1..20: mol_type = other DNA
tcacggcaacctccgcctcc

SEQ ID NO: 237862 - DNA, 20 bp, synthetic construct
  source 1..20: mol_type = other DNA
ctcacggcaacctccgcctc

SEQ ID NO: 237863 - DNA, 20 bp, synthetic construct
  source 1..20: mol_type = other DNA
gctcacggcaacctccgcct

SEQ ID NO: 237864 - DNA, 20 bp, synthetic construct
  source 1..20: mol_type = other DNA
ggctcacggcaacctccgcc

SEQ ID NO: 237865 - DNA, 20 bp, synthetic construct
  source 1..20: mol_type = other DNA
tggctcacggcaacctccgc

SEQ ID NO: 237866 - DNA, 20 bp, synthetic construct
  source 1..20: mol_type = other DNA
ttggctcacggcaacctccg

SEQ ID NO: 237867 - DNA, 20 bp, synthetic construct
  source 1..20: mol_type = other DNA
cttggctcacggcaacctcc

SEQ ID NO: 237868 - DNA, 20 bp, synthetic construct
  source 1..20: mol_type = other DNA
tcttggctcacggcaacctc

SEQ ID NO: 237869 - DNA, 20 bp, synthetic construct
  source 1..20: mol_type = other DNA
atcttggctcacggcaacct

SEQ ID NO: 237870 - DNA, 20 bp, synthetic construct
  source 1..20: mol_type = other DNA
gatcttggctcacggcaacc

SEQ ID NO: 237871 - DNA, 20 bp, synthetic construct
  source 1..20: mol_type = other DNA
ggatcttggctcacggcaac

SEQ ID NO: 237872 - DNA, 20 bp, synthetic construct
  source 1..20: mol_type = other DNA
gggatcttggctcacggcaa

SEQ ID NO: 237873 - DNA, 20 bp, synthetic construct
  source 1..20: mol_type = other DNA
tgggatcttggctcacggca

SEQ ID NO: 237874 - DNA, 20 bp, synthetic construct
  source 1..20: mol_type = other DNA
gtgggatcttggctcacggc

SEQ ID NO: 237875 - DNA, 20 bp, synthetic construct
  source 1..20: mol_type = other DNA
ggtgggatcttggctcacgg

SEQ ID NO: 237876 - DNA, 20 bp, synthetic construct
  source 1..20: mol_type = other DNA
tggtgggatcttggctcacg

SEQ ID NO: 237877 - DNA, 20 bp, synthetic construct
  source 1..20: mol_type = other DNA
gtggtgggatcttggctcac

SEQ ID NO: 237878 - DNA, 20 bp, synthetic construct
  source 1..20: mol_type = other DNA
agtggtgggatcttggctca

SEQ ID NO: 237879 - DNA, 20 bp, synthetic construct
  source 1..20: mol_type = other DNA
cagtggtgggatcttggctc

SEQ ID NO: 237880 - DNA, 20 bp, synthetic construct
  source 1..20: mol_type = other DNA
gcagtggtgggatcttggct

SEQ ID NO: 237881 - DNA, 20 bp, synthetic construct
  source 1..20: mol_type = other DNA
tgcagtggtgggatcttggc

SEQ ID NO: 237882 - DNA, 20 bp, synthetic construct
  source 1..20: mol_type = other DNA
gtgcagtggtgggatcttgg

SEQ ID NO: 237883 - DNA, 20 bp, synthetic construct
  source 1..20: mol_type = other DNA
agtgcagtggtgggatcttg

SEQ ID NO: 237884 - DNA, 20 bp, synthetic construct
  source 1..20: mol_type = other DNA
gagtgcagtggtgggatctt

SEQ ID NO: 237885 - DNA, 20 bp, synthetic construct
  source 1..20: mol_type = other DNA
ggagtgcagtggtgggatct

SEQ ID NO: 237886 - DNA, 20 bp, synthetic construct
  source 1..20: mol_type = other DNA
tggagtgcagtggtgggatc

SEQ ID NO: 237887 - DNA, 20 bp, synthetic construct
  source 1..20: mol_type = other DNA
ctggagtgcagtggtgggat

SEQ ID NO: 237888 - DNA, 20 bp, synthetic construct
  source 1..20: mol_type = other DNA
gctggagtgcagtggtggga

SEQ ID NO: 237889 - DNA, 20 bp, synthetic construct
  source 1..20: mol_type = other DNA
ggctggagtgcagtggtggg

SEQ ID NO: 237890 - DNA, 20 bp, synthetic construct
  source 1..20: mol_type = other DNA
aggctggagtgcagtggtgg

SEQ ID NO: 237891 - DNA, 20 bp, synthetic construct
  source 1..20: mol_type = other DNA
caggctggagtgcagtggtg

SEQ ID NO: 237892 - DNA, 20 bp, synthetic construct
  source 1..20: mol_type = other DNA
ccaggctggagtgcagtggt

SEQ ID NO: 237893 - DNA, 20 bp, synthetic construct
  source 1..20: mol_type = other DNA
cccaggctggagtgcagtgg

SEQ ID NO: 237894 - DNA, 20 bp, synthetic construct
  source 1..20: mol_type = other DNA
gcccaggctggagtgcagtg

SEQ ID NO: 237895 - DNA, 20 bp, synthetic construct
  source 1..20: mol_type = other DNA
cgcccaggctggagtgcagt

SEQ ID NO: 237896 - DNA, 20 bp, synthetic construct
  source 1..20: mol_type = other DNA
tcgcccaggctggagtgcag

SEQ ID NO: 237897 - DNA, 20 bp, synthetic construct
  source 1..20: mol_type = other DNA
gtcgcccaggctggagtgca

SEQ ID NO: 237898 - DNA, 20 bp, synthetic construct
  source 1..20: mol_type = other DNA
tgtcgcccaggctggagtgc

SEQ ID NO: 237899 - DNA, 20 bp, synthetic construct
  source 1..20: mol_type = other DNA
ctgtcgcccaggctggagtg

SEQ ID NO: 237900 - DNA, 20 bp, synthetic construct
  source 1..20: mol_type = other DNA
tctgtcgcccaggctggagt

SEQ ID NO: 237901 - DNA, 20 bp, synthetic construct
  source 1..20: mol_type = other DNA
ctctgtcgcccaggctggag

SEQ ID NO: 237902 - DNA, 20 bp, synthetic construct
  source 1..20: mol_type = other DNA
tctctgtcgcccaggctgga

SEQ ID NO: 237903 - DNA, 20 bp, synthetic construct
  source 1..20: mol_type = other DNA
gtctctgtcgcccaggctgg

SEQ ID NO: 237904 - DNA, 20 bp, synthetic construct
  source 1..20: mol_type = other DNA
ggtctctgtcgcccaggctg

SEQ ID NO: 237905 - DNA, 20 bp, synthetic construct
  source 1..20: mol_type = other DNA
gggtctctgtcgcccaggct

SEQ ID NO: 237906 - DNA, 20 bp, synthetic construct
  source 1..20: mol_type = other DNA
ggggtctctgtcgcccaggc

SEQ ID NO: 237907 - DNA, 20 bp, synthetic construct
  source 1..20: mol_type = other DNA
gggggtctctgtcgcccagg

SEQ ID NO: 237908 - DNA, 20 bp, synthetic construct
  source 1..20: mol_type = other DNA
tgggggtctctgtcgcccag

SEQ ID NO: 237909 - DNA, 20 bp, synthetic construct
  source 1..20: mol_type = other DNA
atgggggtctctgtcgccca

SEQ ID NO: 237910 - DNA, 20 bp, synthetic construct
  source 1..20: mol_type = other DNA
catgggggtctctgtcgccc

SEQ ID NO: 237911 - DNA, 20 bp, synthetic construct
  source 1..20: mol_type = other DNA
acatgggggtctctgtcgcc

SEQ ID NO: 237912 - DNA, 20 bp, synthetic construct
  source 1..20: mol_type = other DNA
gacatgggggtctctgtcgc

SEQ ID NO: 237913 - DNA, 20 bp, synthetic construct
  source 1..20: mol_type = other DNA
tgacatgggggtctctgtcg

SEQ ID NO: 237914 - DNA, 20 bp, synthetic construct
  source 1..20: mol_type = other DNA
ttgacatgggggtctctgtc

SEQ ID NO: 237915 - DNA, 20 bp, synthetic construct
  source 1..20: mol_type = other DNA
tttgacatgggggtctctgt

SEQ ID NO: 237916 - DNA, 20 bp, synthetic construct
  source 1..20: mol_type = other DNA
atttgacatgggggtctctg

SEQ ID NO: 237917 - DNA, 20 bp, synthetic construct
  source 1..20: mol_type = other DNA
tatttgacatgggggtctct

SEQ ID NO: 237918 - DNA, 20 bp, synthetic construct
  source 1..20: mol_type = other DNA
ttatttgacatgggggtctc

SEQ ID NO: 237919 - DNA, 20 bp, synthetic construct
  source 1..20: mol_type = other DNA
attatttgacatgggggtct

SEQ ID NO: 237920 - DNA, 20 bp, synthetic construct
  source 1..20: mol_type = other DNA
tattatttgacatgggggtc

SEQ ID NO: 237921 - DNA, 20 bp, synthetic construct
  source 1..20: mol_type = other DNA
ttattatttgacatgggggt

SEQ ID NO: 237922 - DNA, 20 bp, synthetic construct
  source 1..20: mol_type = other DNA
attattatttgacatggggg

SEQ ID NO: 237923 - DNA, 20 bp, synthetic construct
  source 1..20: mol_type = other DNA
tattattatttgacatgggg

SEQ ID NO: 237924 - DNA, 20 bp, synthetic construct
  source 1..20: mol_type = other DNA
ttattattatttgacatggg

SEQ ID NO: 237925 - DNA, 20 bp, synthetic construct
  source 1..20: mol_type = other DNA
attattattatttgacatgg

SEQ ID NO: 237926 - DNA, 20 bp, synthetic construct
  source 1..20: mol_type = other DNA
tattattattatttgacatg

SEQ ID NO: 237927 - DNA, 20 bp, synthetic construct
  source 1..20: mol_type = other DNA
ttattattattatttgacat

SEQ ID NO: 237928 - DNA, 20 bp, synthetic construct
  source 1..20: mol_type = other DNA
attattattattatttgaca

SEQ ID NO: 237929 - DNA, 20 bp, synthetic construct
  source 1..20: mol_type = other DNA
tattattattattatttgac

SEQ ID NO: 237930 - DNA, 20 bp, synthetic construct
  source 1..20: mol_type = other DNA
ttattattattattatttga

SEQ ID NO: 237931 - DNA, 20 bp, synthetic construct
  source 1..20: mol_type = other DNA
tttattattattattatttg

SEQ ID NO: 237932 - DNA, 20 bp, synthetic construct
  source 1..20: mol_type = other DNA
atttattattattattattt

SEQ ID NO: 237933 - DNA, 20 bp, synthetic construct
  source 1..20: mol_type = other DNA
tatttattattattattatt

SEQ ID NO: 237934 - DNA, 20 bp, synthetic construct
  source 1..20: mol_type = other DNA
ttatttattattattattat

SEQ ID NO: 237935 - DNA, 20 bp, synthetic construct
  source 1..20: mol_type = other DNA
tttatttattattattatta

SEQ ID NO: 237936 - DNA, 20 bp, synthetic construct
  source 1..20: mol_type = other DNA
atttatttattattattatt

SEQ ID NO: 237937 - DNA, 20 bp, synthetic construct
  source 1..20: mol_type = other DNA
gatttatttattattattat

SEQ ID NO: 237938 - DNA, 20 bp, synthetic construct
  source 1..20: mol_type = other DNA
ggatttatttattattatta

SEQ ID NO: 237939 - DNA, 20 bp, synthetic construct
  source 1..20: mol_type = other DNA
aggatttatttattattatt

SEQ ID NO: 237940 - DNA, 20 bp, synthetic construct
  source 1..20: mol_type = other DNA
aaggatttatttattattat

SEQ ID NO: 237941 - DNA, 20 bp, synthetic construct
  source 1..20: mol_type = other DNA
gaaggatttatttattatta

SEQ ID NO: 237942 - DNA, 20 bp, synthetic construct
  source 1..20: mol_type = other DNA
agaaggatttatttattatt

SEQ ID NO: 237943 - DNA, 20 bp, synthetic construct
  source 1..20: mol_type = other DNA
gagaaggatttatttattat

SEQ ID NO: 237944 - DNA, 20 bp, synthetic construct
  source 1..20: mol_type = other DNA
tgagaaggatttatttatta

SEQ ID NO: 237945 - DNA, 20 bp, synthetic construct
  source 1..20: mol_type = other DNA
ctgagaaggatttatttatt

SEQ ID NO: 237946 - DNA, 20 bp, synthetic construct
  source 1..20: mol_type = other DNA
actgagaaggatttatttat

SEQ ID NO: 237947 - DNA, 20 bp, synthetic construct
  source 1..20: mol_type = other DNA
gactgagaaggatttattta

SEQ ID NO: 237948 - DNA, 20 bp, synthetic construct
  source 1..20: mol_type = other DNA
ggactgagaaggatttattt

SEQ ID NO: 237949 - DNA, 20 bp, synthetic construct
  source 1..20: mol_type = other DNA
gggactgagaaggatttatt

SEQ ID NO: 237950 - DNA, 20 bp, synthetic construct
  source 1..20: mol_type = other DNA
agggactgagaaggatttat

SEQ ID NO: 237951 - DNA, 20 bp, synthetic construct
  source 1..20: mol_type = other DNA
aagggactgagaaggattta

SEQ ID NO: 237952 - DNA, 20 bp, synthetic construct
  source 1..20: mol_type = other DNA
gaagggactgagaaggattt

SEQ ID NO: 237953 - DNA, 20 bp, synthetic construct
  source 1..20: mol_type = other DNA
ggaagggactgagaaggatt

SEQ ID NO: 237954 - DNA, 20 bp, synthetic construct
  source 1..20: mol_type = other DNA
aggaagggactgagaaggat

SEQ ID NO: 237955 - DNA, 20 bp, synthetic construct
  source 1..20: mol_type = other DNA
gaggaagggactgagaagga

SEQ ID NO: 237956 - DNA, 20 bp, synthetic construct
  source 1..20: mol_type = other DNA
tgaggaagggactgagaagg

SEQ ID NO: 237957 - DNA, 20 bp, synthetic construct
  source 1..20: mol_type = other DNA
gtgaggaagggactgagaag

SEQ ID NO: 237958 - DNA, 20 bp, synthetic construct
  source 1..20: mol_type = other DNA
agtgaggaagggactgagaa

SEQ ID NO: 237959 - DNA, 20 bp, synthetic construct
  source 1..20: mol_type = other DNA
cagtgaggaagggactgaga

SEQ ID NO: 237960 - DNA, 20 bp, synthetic construct
  source 1..20: mol_type = other DNA
acagtgaggaagggactgag

SEQ ID NO: 237961 - DNA, 20 bp, synthetic construct
  source 1..20: mol_type = other DNA
cacagtgaggaagggactga

SEQ ID NO: 237962 - DNA, 20 bp, synthetic construct
  source 1..20: mol_type = other DNA
acacagtgaggaagggactg

SEQ ID NO: 237963 - DNA, 20 bp, synthetic construct
  source 1..20: mol_type = other DNA
gacacagtgaggaagggact

SEQ ID NO: 237964 - DNA, 20 bp, synthetic construct
  source 1..20: mol_type = other DNA
ggacacagtgaggaagggac

SEQ ID NO: 237965 - DNA, 20 bp, synthetic construct
  source 1..20: mol_type = other DNA
gggacacagtgaggaaggga

SEQ ID NO: 237966 - DNA, 20 bp, synthetic construct
  source 1..20: mol_type = other DNA
ggggacacagtgaggaaggg

SEQ ID NO: 237967 - DNA, 20 bp, synthetic construct
  source 1..20: mol_type = other DNA
gggggacacagtgaggaagg

SEQ ID NO: 237968 - DNA, 20 bp, synthetic construct
  source 1..20: mol_type = other DNA
agggggacacagtgaggaag

SEQ ID NO: 237969 - DNA, 20 bp, synthetic construct
  source 1..20: mol_type = other DNA
gagggggacacagtgaggaa

SEQ ID NO: 237970 - DNA, 20 bp, synthetic construct
  source 1..20: mol_type = other DNA
ggagggggacacagtgagga

SEQ ID NO: 237971 - DNA, 20 bp, synthetic construct
  source 1..20: mol_type = other DNA
tggagggggacacagtgagg

SEQ ID NO: 237972 - DNA, 20 bp, synthetic construct
  source 1..20: mol_type = other DNA
gtggagggggacacagtgag

SEQ ID NO: 237973 - DNA, 20 bp, synthetic construct
  source 1..20: mol_type = other DNA
agtggagggggacacagtga

SEQ ID NO: 237974 - DNA, 20 bp, synthetic construct
  source 1..20: mol_type = other DNA
cagtggagggggacacagtg

SEQ ID NO: 237975 - DNA, 20 bp, synthetic construct
  source 1..20: mol_type = other DNA
tcagtggagggggacacagt

SEQ ID NO: 237976 - DNA, 20 bp, synthetic construct
  source 1..20: mol_type = other DNA
ttcagtggagggggacacag

SEQ ID NO: 237977 - DNA, 20 bp, synthetic construct
  source 1..20: mol_type = other DNA
attcagtggagggggacaca

SEQ ID NO: 237978 - DNA, 20 bp, synthetic construct
  source 1..20: mol_type = other DNA
aattcagtggagggggacac

SEQ ID NO: 237979 - DNA, 20 bp, synthetic construct
  source 1..20: mol_type = other DNA
aaattcagtggagggggaca

SEQ ID NO: 237980 - DNA, 20 bp, synthetic construct
  source 1..20: mol_type = other DNA
aaaattcagtggagggggac

SEQ ID NO: 237981 - DNA, 20 bp, synthetic construct
  source 1..20: mol_type = other DNA
aaaaattcagtggaggggga

SEQ ID NO: 237982 - DNA, 20 bp, synthetic construct
  source 1..20: mol_type = other DNA
gaaaaattcagtggaggggg

SEQ ID NO: 237983 - DNA, 20 bp, synthetic construct
  source 1..20: mol_type = other DNA
ggaaaaattcagtggagggg

SEQ ID NO: 237984 - DNA, 20 bp, synthetic construct
  source 1..20: mol_type = other DNA
tggaaaaattcagtggaggg

SEQ ID NO: 237985 - DNA, 20 bp, synthetic construct
  source 1..20: mol_type = other DNA
gtggaaaaattcagtggagg

SEQ ID NO: 237986 - DNA, 20 bp, synthetic construct
  source 1..20: mol_type = other DNA
ggtggaaaaattcagtggag

SEQ ID NO: 237987 - DNA, 20 bp, synthetic construct
  source 1..20: mol_type = other DNA
aggtggaaaaattcagtgga

SEQ ID NO: 237988 - DNA, 20 bp, synthetic construct
  source 1..20: mol_type = other DNA
gaggtggaaaaattcagtgg

SEQ ID NO: 237989 - DNA, 20 bp, synthetic construct
  source 1..20: mol_type = other DNA
ggaggtggaaaaattcagtg

SEQ ID NO: 237990 - DNA, 20 bp, synthetic construct
  source 1..20: mol_type = other DNA
aggaggtggaaaaattcagt

SEQ ID NO: 237991 - DNA, 20 bp, synthetic construct
  source 1..20: mol_type = other DNA
gaggaggtggaaaaattcag

SEQ ID NO: 237992 - DNA, 20 bp, synthetic construct
  source 1..20: mol_type = other DNA
agaggaggtggaaaaattca

SEQ ID NO: 237993 - DNA, 20 bp, synthetic construct
  source 1..20: mol_type = other DNA
gagaggaggtggaaaaattc

SEQ ID NO: 237994 - DNA, 20 bp, synthetic construct
  source 1..20: mol_type = other DNA
ggagaggaggtggaaaaatt

SEQ ID NO: 237995 - DNA, 20 bp, synthetic construct
  source 1..20: mol_type = other DNA
gggagaggaggtggaaaaat

SEQ ID NO: 237996 - DNA, 20 bp, synthetic construct
  source 1..20: mol_type = other DNA
tgggagaggaggtggaaaaa

SEQ ID NO: 237997 - DNA, 20 bp, synthetic construct
  source 1..20: mol_type = other DNA
gtgggagaggaggtggaaaa

SEQ ID NO: 237998 - DNA, 20 bp, synthetic construct
  source 1..20: mol_type = other DNA
agtgggagaggaggtggaaa

SEQ ID NO: 237999 - DNA, 20 bp, synthetic construct
  source 1..20: mol_type = other DNA
aagtgggagaggaggtggaa

SEQ ID NO: 238000 - DNA, 20 bp, synthetic construct
  source 1..20: mol_type = other DNA
gaagtgggagaggaggtgga

SEQ ID NO: 238001 - DNA, 20 bp, synthetic construct
  source 1..20: mol_type = other DNA
ggaagtgggagaggaggtgg

SEQ ID NO: 238002 - DNA, 20 bp, synthetic construct
  source 1..20: mol_type = other DNA
gggaagtgggagaggaggtg

SEQ ID NO: 238003 - DNA, 20 bp, synthetic construct
  source 1..20: mol_type = other DNA
ggggaagtgggagaggaggt

SEQ ID NO: 238004 - DNA, 20 bp, synthetic construct
  source 1..20: mol_type = other DNA
gggggaagtgggagaggagg

SEQ ID NO: 238005 - DNA, 20 bp, synthetic construct
  source 1..20: mol_type = other DNA
tgggggaagtgggagaggag

SEQ ID NO: 238006 - DNA, 20 bp, synthetic construct
  source 1..20: mol_type = other DNA
gtgggggaagtgggagagga

SEQ ID NO: 238007 - DNA, 20 bp, synthetic construct
  source 1..20: mol_type = other DNA
agtgggggaagtgggagagg

SEQ ID NO: 238008 - DNA, 20 bp, synthetic construct
  source 1..20: mol_type = other DNA
gagtgggggaagtgggagag

SEQ ID NO: 238009 - DNA, 20 bp, synthetic construct
  source 1..20: mol_type = other DNA
ggagtgggggaagtgggaga

SEQ ID NO: 238010 - DNA, 20 bp, synthetic construct
  source 1..20: mol_type = other DNA
gggagtgggggaagtgggag

SEQ ID NO: 238011 - DNA, 20 bp, synthetic construct
  source 1..20: mol_type = other DNA
cgggagtgggggaagtggga

SEQ ID NO: 238012 - DNA, 20 bp, synthetic construct
  source 1..20: mol_type = other DNA
gcgggagtgggggaagtggg

SEQ ID NO: 238013 - DNA, 20 bp, synthetic construct
  source 1..20: mol_type = other DNA
agcgggagtgggggaagtgg

SEQ ID NO: 238014 - DNA, 20 bp, synthetic construct
  source 1..20: mol_type = other DNA
aagcgggagtgggggaagtg

SEQ ID NO: 238015 - DNA, 20 bp, synthetic construct
  source 1..20: mol_type = other DNA
aaagcgggagtgggggaagt

SEQ ID NO: 238016 - DNA, 20 bp, synthetic construct
  source 1..20: mol_type = other DNA
gaaagcgggagtgggggaag

SEQ ID NO: 238017 - DNA, 20 bp, synthetic construct
  source 1..20: mol_type = other DNA
ggaaagcgggagtgggggaa

SEQ ID NO: 238018 - DNA, 20 bp, synthetic construct
  source 1..20: mol_type = other DNA
gggaaagcgggagtggggga

SEQ ID NO: 238019 - DNA, 20 bp, synthetic construct
  source 1..20: mol_type = other DNA
agggaaagcgggagtggggg

SEQ ID NO: 238020 - DNA, 20 bp, synthetic construct
  source 1..20: mol_type = other DNA
gagggaaagcgggagtgggg

SEQ ID NO: 238021 - DNA, 20 bp, synthetic construct
  source 1..20: mol_type = other DNA
agagggaaagcgggagtggg

SEQ ID NO: 238022 - DNA, 20 bp, synthetic construct
  source 1..20: mol_type = other DNA
gagagggaaagcgggagtgg

SEQ ID NO: 238023 - DNA, 20 bp, synthetic construct
  source 1..20: mol_type = other DNA
ggagagggaaagcgggagtg

SEQ ID NO: 238024 - DNA, 20 bp, synthetic construct
  source 1..20: mol_type = other DNA
aggagagggaaagcgggagt

SEQ ID NO: 238025 - DNA, 20 bp, synthetic construct
  source 1..20: mol_type = other DNA
aaggagagggaaagcgggag

SEQ ID NO: 238026 - DNA, 20 bp, synthetic construct
  source 1..20: mol_type = other DNA
gaaggagagggaaagcggga

SEQ ID NO: 238027 - DNA, 20 bp, synthetic construct
  source 1..20: mol_type = other DNA
agaaggagagggaaagcggg

SEQ ID NO: 238028 - DNA, 20 bp, synthetic construct
  source 1..20: mol_type = other DNA
gagaaggagagggaaagcgg

SEQ ID NO: 238029 - DNA, 20 bp, synthetic construct
  source 1..20: mol_type = other DNA
agagaaggagagggaaagcg

SEQ ID NO: 238030 - DNA, 20 bp, synthetic construct
  source 1..20: mol_type = other DNA
gagagaaggagagggaaagc

SEQ ID NO: 238031 - DNA, 20 bp, synthetic construct
  source 1..20: mol_type = other DNA
ggagagaaggagagggaaag

SEQ ID NO: 238032 - DNA, 20 bp, synthetic construct
  source 1..20: mol_type = other DNA
gggagagaaggagagggaaa

SEQ ID NO: 238033 - DNA, 20 bp, synthetic construct
  source 1..20: mol_type = other DNA
ggggagagaaggagagggaa

SEQ ID NO: 238034 - DNA, 20 bp, synthetic construct
  source 1..20: mol_type = other DNA
tggggagagaaggagaggga

SEQ ID NO: 238035 - DNA, 20 bp, synthetic construct
  source 1..20: mol_type = other DNA
gtggggagagaaggagaggg

SEQ ID NO: 238036 - DNA, 20 bp, synthetic construct
  source 1..20: mol_type = other DNA
agtggggagagaaggagagg

SEQ ID NO: 238037 - DNA, 20 bp, synthetic construct
  source 1..20: mol_type = other DNA
gagtggggagagaaggagag

SEQ ID NO: 238038 - DNA, 20 bp, synthetic construct
  source 1..20: mol_type = other DNA
ggagtggggagagaaggaga

SEQ ID NO: 238039 - DNA, 20 bp, synthetic construct
  source 1..20: mol_type = other DNA
tggagtggggagagaaggag

SEQ ID NO: 238040 - DNA, 20 bp, synthetic construct
  source 1..20: mol_type = other DNA
atggagtggggagagaagga

SEQ ID NO: 238041 - DNA, 20 bp, synthetic construct
  source 1..20: mol_type = other DNA
gatggagtggggagagaagg

SEQ ID NO: 238042 - DNA, 20 bp, synthetic construct
  source 1..20: mol_type = other DNA
agatggagtggggagagaag

SEQ ID NO: 238043 - DNA, 20 bp, synthetic construct
  source 1..20: mol_type = other DNA
aagatggagtggggagagaa

SEQ ID NO: 238044 - DNA, 20 bp, synthetic construct
  source 1..20: mol_type = other DNA
aaagatggagtggggagaga

SEQ ID NO: 238045 - DNA, 20 bp, synthetic construct
  source 1..20: mol_type = other DNA
aaaagatggagtggggagag

SEQ ID NO: 238046 - DNA, 20 bp, synthetic construct
  source 1..20: mol_type = other DNA
aaaaagatggagtggggaga

SEQ ID NO: 238047 - DNA, 20 bp, synthetic construct
  source 1..20: mol_type = other DNA
gaaaaagatggagtggggag

SEQ ID NO: 238048 - DNA, 20 bp, synthetic construct
  source 1..20: mol_type = other DNA
agaaaaagatggagtgggga

SEQ ID NO: 238049 - DNA, 20 bp, synthetic construct
  source 1..20: mol_type = other DNA
aagaaaaagatggagtgggg

SEQ ID NO: 238050 - DNA, 20 bp, synthetic construct
  source 1..20: mol_type = other DNA
aaagaaaaagatggagtggg

SEQ ID NO: 238051 - DNA, 20 bp, synthetic construct
  source 1..20: mol_type = other DNA
gaaagaaaaagatggagtgg

SEQ ID NO: 238052 - DNA, 20 bp, synthetic construct
  source 1..20: mol_type = other DNA
agaaagaaaaagatggagtg

SEQ ID NO: 238053 - DNA, 20 bp, synthetic construct
  source 1..20: mol_type = other DNA
gagaaagaaaaagatggagt

SEQ ID NO: 238054 - DNA, 20 bp, synthetic construct
  source 1..20: mol_type = other DNA
agagaaagaaaaagatggag

SEQ ID NO: 238055 - DNA, 20 bp, synthetic construct
  source 1..20: mol_type = other DNA
cagagaaagaaaaagatgga

SEQ ID NO: 238056 - DNA, 20 bp, synthetic construct
  source 1..20: mol_type = other DNA
gcagagaaagaaaaagatgg

SEQ ID NO: 238057 - DNA, 20 bp, synthetic construct
  source 1..20: mol_type = other DNA
agcagagaaagaaaaagatg

SEQ ID NO: 238058 - DNA, 20 bp, synthetic construct
  source 1..20: mol_type = other DNA
cagcagagaaagaaaaagat

SEQ ID NO: 238059 - DNA, 20 bp, synthetic construct
  source 1..20: mol_type = other DNA
acagcagagaaagaaaaaga

SEQ ID NO: 238060 - DNA, 20 bp, synthetic construct
  source 1..20: mol_type = other DNA
aacagcagagaaagaaaaag

SEQ ID NO: 238061 - DNA, 20 bp, synthetic construct
  source 1..20: mol_type = other DNA
aaacagcagagaaagaaaaa

SEQ ID NO: 238062 - DNA, 20 bp, synthetic construct
  source 1..20: mol_type = other DNA
gaaacagcagagaaagaaaa

SEQ ID NO: 238063 - DNA, 20 bp, synthetic construct
  source 1..20: mol_type = other DNA
agaaacagcagagaaagaaa

SEQ ID NO: 238064 - DNA, 20 bp, synthetic construct
  source 1..20: mol_type = other DNA
gagaaacagcagagaaagaa

SEQ ID NO: 238065 - DNA, 20 bp, synthetic construct
  source 1..20: mol_type = other DNA
cgagaaacagcagagaaaga

SEQ ID NO: 238066 - DNA, 20 bp, synthetic construct
  source 1..20: mol_type = other DNA
acgagaaacagcagagaaag

SEQ ID NO: 238067 - DNA, 20 bp, synthetic construct
  source 1..20: mol_type = other DNA
gacgagaaacagcagagaaa

SEQ ID NO: 238068 - DNA, 20 bp, synthetic construct
  source 1..20: mol_type = other DNA
ggacgagaaacagcagagaa

SEQ ID NO: 238069 - DNA, 20 bp, synthetic construct
  source 1..20: mol_type = other DNA
gggacgagaaacagcagaga

SEQ ID NO: 238070 - DNA, 20 bp, synthetic construct
  source 1..20: mol_type = other DNA
agggacgagaaacagcagag

SEQ ID NO: 238071 - DNA, 20 bp, synthetic construct
  source 1..20: mol_type = other DNA
gagggacgagaaacagcaga

SEQ ID NO: 238072 - DNA, 20 bp, synthetic construct
  source 1..20: mol_type = other DNA
ggagggacgagaaacagcag

SEQ ID NO: 238073 - DNA, 20 bp, synthetic construct
  source 1..20: mol_type = other DNA
gggagggacgagaaacagca

SEQ ID NO: 238074 - DNA, 20 bp, synthetic construct
  source 1..20: mol_type = other DNA
agggagggacgagaaacagc

SEQ ID NO: 238075 - DNA, 20 bp, synthetic construct
  source 1..20: mol_type = other DNA
gagggagggacgagaaacag

SEQ ID NO: 238076 - DNA, 20 bp, synthetic construct
  source 1..20: mol_type = other DNA
ggagggagggacgagaaaca

SEQ ID NO: 238077 - DNA, 20 bp, synthetic construct
  source 1..20: mol_type = other DNA
aggagggagggacgagaaac

SEQ ID NO: 238078 - DNA, 20 bp, synthetic construct
  source 1..20: mol_type = other DNA
gaggagggagggacgagaaa

SEQ ID NO: 238079 - DNA, 20 bp, synthetic construct
  source 1..20: mol_type = other DNA
agaggagggagggacgagaa

SEQ ID NO: 238080 - DNA, 20 bp, synthetic construct
  source 1..20: mol_type = other DNA
gagaggagggagggacgaga

SEQ ID NO: 238081 - DNA, 20 bp, synthetic construct
  source 1..20: mol_type = other DNA
ggagaggagggagggacgag

SEQ ID NO: 238082 - DNA, 20 bp, synthetic construct
  source 1..20: mol_type = other DNA
tggagaggagggagggacga

SEQ ID NO: 238083 - DNA, 20 bp, synthetic construct
  source 1..20: mol_type = other DNA
atggagaggagggagggacg

SEQ ID NO: 238084 - DNA, 20 bp, synthetic construct
  source 1..20: mol_type = other DNA
gatggagaggagggagggac

SEQ ID NO: 238085 - DNA, 20 bp, synthetic construct
  source 1..20: mol_type = other DNA
ggatggagaggagggaggga

SEQ ID NO: 238086 - DNA, 20 bp, synthetic construct
  source 1..20: mol_type = other DNA
gggatggagaggagggaggg

SEQ ID NO: 238087 - DNA, 20 bp, synthetic construct
  source 1..20: mol_type = other DNA
tgggatggagaggagggagg

SEQ ID NO: 238088 - DNA, 20 bp, synthetic construct
  source 1..20: mol_type = other DNA
gtgggatggagaggagggag

SEQ ID NO: 238089 - DNA, 20 bp, synthetic construct
  source 1..20: mol_type = other DNA
tgtgggatggagaggaggga

SEQ ID NO: 238090 - DNA, 20 bp, synthetic construct
  source 1..20: mol_type = other DNA
ttgtgggatggagaggaggg

SEQ ID NO: 238091 - DNA, 20 bp, synthetic construct
  source 1..20: mol_type = other DNA
gttgtgggatggagaggagg

SEQ ID NO: 238092 - DNA, 20 bp, synthetic construct
  source 1..20: mol_type = other DNA
tgttgtgggatggagaggag

SEQ ID NO: 238093 - DNA, 20 bp, synthetic construct
  source 1..20: mol_type = other DNA
gtgttgtgggatggagagga

SEQ ID NO: 238094 - DNA, 20 bp, synthetic construct
  source 1..20: mol_type = other DNA
agtgttgtgggatggagagg

SEQ ID NO: 238095 - DNA, 20 bp, synthetic construct
  source 1..20: mol_type = other DNA
cagtgttgtgggatggagag

SEQ ID NO: 238096 - DNA, 20 bp, synthetic construct
  source 1..20: mol_type = other DNA
gcagtgttgtgggatggaga

SEQ ID NO: 238097 - DNA, 20 bp, synthetic construct
  source 1..20: mol_type = other DNA
ggcagtgttgtgggatggag

SEQ ID NO: 238098 - DNA, 20 bp, synthetic construct
  source 1..20: mol_type = other DNA
aggcagtgttgtgggatgga

SEQ ID NO: 238099 - DNA, 20 bp, synthetic construct
  source 1..20: mol_type = other DNA
taggcagtgttgtgggatgg

SEQ ID NO: 238100 - DNA, 20 bp, synthetic construct
  source 1..20: mol_type = other DNA
gtaggcagtgttgtgggatg

SEQ ID NO: 238101 - DNA, 20 bp, synthetic construct
  source 1..20: mol_type = other DNA
ggtaggcagtgttgtgggat

SEQ ID NO: 238102 - DNA, 20 bp, synthetic construct
  source 1..20: mol_type = other DNA
gggtaggcagtgttgtggga

SEQ ID NO: 238103 - DNA, 20 bp, synthetic construct
  source 1..20: mol_type = other DNA
agggtaggcagtgttgtggg

SEQ ID NO: 238104 - DNA, 20 bp, synthetic construct
  source 1..20: mol_type = other DNA
cagggtaggcagtgttgtgg

SEQ ID NO: 238105 - DNA, 20 bp, synthetic construct
  source 1..20: mol_type = other DNA
acagggtaggcagtgttgtg

SEQ ID NO: 238106 - DNA, 20 bp, synthetic construct
  source 1..20: mol_type = other DNA
gacagggtaggcagtgttgt

SEQ ID NO: 238107 - DNA, 20 bp, synthetic construct
  source 1..20: mol_type = other DNA
ggacagggtaggcagtgttg

SEQ ID NO: 238108 - DNA, 20 bp, synthetic construct
  source 1..20: mol_type = other DNA
gggacagggtaggcagtgtt

SEQ ID NO: 238109 - DNA, 20 bp, synthetic construct
  source 1..20: mol_type = other DNA
agggacagggtaggcagtgt

SEQ ID NO: 238110 - DNA, 20 bp, synthetic construct
  source 1..20: mol_type = other DNA
cagggacagggtaggcagtg

SEQ ID NO: 238111 - DNA, 20 bp, synthetic construct
  source 1..20: mol_type = other DNA
gcagggacagggtaggcagt

SEQ ID NO: 238112 - DNA, 20 bp, synthetic construct
  source 1..20: mol_type = other DNA
ggcagggacagggtaggcag

SEQ ID NO: 238113 - DNA, 20 bp, synthetic construct
  source 1..20: mol_type = other DNA
gggcagggacagggtaggca

SEQ ID NO: 238114 - DNA, 20 bp, synthetic construct
  source 1..20: mol_type = other DNA
ggggcagggacagggtaggc

SEQ ID NO: 238115 - DNA, 20 bp, synthetic construct
  source 1..20: mol_type = other DNA
tggggcagggacagggtagg

SEQ ID NO: 238116 - DNA, 20 bp, synthetic construct
  source 1..20: mol_type = other DNA
gtggggcagggacagggtag

SEQ ID NO: 238117 - DNA, 20 bp, synthetic construct
  source 1..20: mol_type = other DNA
ggtggggcagggacagggta

SEQ ID NO: 238118 - DNA, 20 bp, synthetic construct
  source 1..20: mol_type = other DNA
gggtggggcagggacagggt

SEQ ID NO: 238119 - DNA, 20 bp, synthetic construct
  source 1..20: mol_type = other DNA
agggtggggcagggacaggg

SEQ ID NO: 238120 - DNA, 20 bp, synthetic construct
  source 1..20: mol_type = other DNA
cagggtggggcagggacagg

SEQ ID NO: 238121 - DNA, 20 bp, synthetic construct
  source 1..20: mol_type = other DNA
ccagggtggggcagggacag

SEQ ID NO: 238122 - DNA, 20 bp, synthetic construct
  source 1..20: mol_type = other DNA
accagggtggggcagggaca

SEQ ID NO: 238123 - DNA, 20 bp, synthetic construct
  source 1..20: mol_type = other DNA
caccagggtggggcagggac

SEQ ID NO: 238124 - DNA, 20 bp, synthetic construct
  source 1..20: mol_type = other DNA
gcaccagggtggggcaggga

SEQ ID NO: 238125 - DNA, 20 bp, synthetic construct
  source 1..20: mol_type = other DNA
agcaccagggtggggcaggg

SEQ ID NO: 238126 - DNA, 20 bp, synthetic construct
  source 1..20: mol_type = other DNA
gagcaccagggtggggcagg

SEQ ID NO: 238127 - DNA, 20 bp, synthetic construct
  source 1..20: mol_type = other DNA
tgagcaccagggtggggcag

SEQ ID NO: 238128 - DNA, 20 bp, synthetic construct
  source 1..20: mol_type = other DNA
ctgagcaccagggtggggca

SEQ ID NO: 238129 - DNA, 20 bp, synthetic construct
  source 1..20: mol_type = other DNA
cctgagcaccagggtggggc

SEQ ID NO: 238130 - DNA, 20 bp, synthetic construct
  source 1..20: mol_type = other DNA
tcctgagcaccagggtgggg

SEQ ID NO: 238131 - DNA, 20 bp, synthetic construct
  source 1..20: mol_type = other DNA
atcctgagcaccagggtggg

SEQ ID NO: 238132 - DNA, 20 bp, synthetic construct
  source 1..20: mol_type = other DNA
catcctgagcaccagggtgg

SEQ ID NO: 238133 - DNA, 20 bp, synthetic construct
  source 1..20: mol_type = other DNA
acatcctgagcaccagggtg

SEQ ID NO: 238134 - DNA, 20 bp, synthetic construct
  source 1..20: mol_type = other DNA
cacatcctgagcaccagggt

SEQ ID NO: 238135 - DNA, 20 bp, synthetic construct
  source 1..20: mol_type = other DNA
acacatcctgagcaccaggg

SEQ ID NO: 238136 - DNA, 20 bp, synthetic construct
  source 1..20: mol_type = other DNA
cacacatcctgagcaccagg

SEQ ID NO: 238137 - DNA, 20 bp, synthetic construct
  source 1..20: mol_type = other DNA
tcacacatcctgagcaccag

SEQ ID NO: 238138 - DNA, 20 bp, synthetic construct
  source 1..20: mol_type = other DNA
ttcacacatcctgagcacca

SEQ ID NO: 238139 - DNA, 20 bp, synthetic construct
  source 1..20: mol_type = other DNA
cttcacacatcctgagcacc

SEQ ID NO: 238140 - DNA, 20 bp, synthetic construct
  source 1..20: mol_type = other DNA
acttcacacatcctgagcac

SEQ ID NO: 238141 - DNA, 20 bp, synthetic construct
  source 1..20: mol_type = other DNA
cacttcacacatcctgagca

SEQ ID NO: 238142 - DNA, 20 bp, synthetic construct
  source 1..20: mol_type = other DNA
tcacttcacacatcctgagc

SEQ ID NO: 238143 - DNA, 20 bp, synthetic construct
  source 1..20: mol_type = other DNA
ctcacttcacacatcctgag

SEQ ID NO: 238144 - DNA, 20 bp, synthetic construct
  source 1..20: mol_type = other DNA
cctcacttcacacatcctga

SEQ ID NO: 238145 - DNA, 20 bp, synthetic construct
  source 1..20: mol_type = other DNA
ccctcacttcacacatcctg

SEQ ID NO: 238146 - DNA, 20 bp, synthetic construct
  source 1..20: mol_type = other DNA
cccctcacttcacacatcct

SEQ ID NO: 238147 - DNA, 20 bp, synthetic construct
  source 1..20: mol_type = other DNA
acccctcacttcacacatcc

SEQ ID NO: 238148 - DNA, 20 bp, synthetic construct
  source 1..20: mol_type = other DNA
cacccctcacttcacacatc

SEQ ID NO: 238149 - DNA, 20 bp, synthetic construct
  source 1..20: mol_type = other DNA
ccacccctcacttcacacat

SEQ ID NO: 238150 - DNA, 20 bp, synthetic construct
  source 1..20: mol_type = other DNA
accacccctcacttcacaca

SEQ ID NO: 238151 - DNA, 20 bp, synthetic construct
  source 1..20: mol_type = other DNA
taccacccctcacttcacac

SEQ ID NO: 238152 - DNA, 20 bp, synthetic construct
  source 1..20: mol_type = other DNA
ctaccacccctcacttcaca

SEQ ID NO: 238153 - DNA, 20 bp, synthetic construct
  source 1..20: mol_type = other DNA
gctaccacccctcacttcac

SEQ ID NO: 238154 - DNA, 20 bp, synthetic construct
  source 1..20: mol_type = other DNA
ggctaccacccctcacttca

SEQ ID NO: 238155 - DNA, 20 bp, synthetic construct
  source 1..20: mol_type = other DNA
gggctaccacccctcacttc

SEQ ID NO: 238156 - DNA, 20 bp, synthetic construct
  source 1..20: mol_type = other DNA
ggggctaccacccctcactt

SEQ ID NO: 238157 - DNA, 20 bp, synthetic construct
  source 1..20: mol_type = other DNA
gggggctaccacccctcact

SEQ ID NO: 238158 - DNA, 20 bp, synthetic construct
  source 1..20: mol_type = other DNA
tgggggctaccacccctcac

SEQ ID NO: 238159 - DNA, 20 bp, synthetic construct
  source 1..20: mol_type = other DNA
ttgggggctaccacccctca

SEQ ID NO: 238160 - DNA, 20 bp, synthetic construct
  source 1..20: mol_type = other DNA
cttgggggctaccacccctc

SEQ ID NO: 238161 - DNA, 20 bp, synthetic construct
  source 1..20: mol_type = other DNA
tcttgggggctaccacccct

SEQ ID NO: 238162 - DNA, 20 bp, synthetic construct
  source 1..20: mol_type = other DNA
gtcttgggggctaccacccc

SEQ ID NO: 238163 - DNA, 20 bp, synthetic construct
  source 1..20: mol_type = other DNA
ggtcttgggggctaccaccc

SEQ ID NO: 238164 - DNA, 20 bp, synthetic construct
  source 1..20: mol_type = other DNA
aggtcttgggggctaccacc

SEQ ID NO: 238165 - DNA, 20 bp, synthetic construct
  source 1..20: mol_type = other DNA
gaggtcttgggggctaccac

SEQ ID NO: 238166 - DNA, 20 bp, synthetic construct
  source 1..20: mol_type = other DNA
tgaggtcttgggggctacca

SEQ ID NO: 238167 - DNA, 20 bp, synthetic construct
  source 1..20: mol_type = other DNA
ttgaggtcttgggggctacc

SEQ ID NO: 238168 - DNA, 20 bp, synthetic construct
  source 1..20: mol_type = other DNA
gttgaggtcttgggggctac

SEQ ID NO: 238169 - DNA, 20 bp, synthetic construct
  source 1..20: mol_type = other DNA
ggttgaggtcttgggggcta

SEQ ID NO: 238170 - DNA, 20 bp, synthetic construct
  source 1..20: mol_type = other DNA
gggttgaggtcttgggggct

SEQ ID NO: 238171 - DNA, 20 bp, synthetic construct
  source 1..20: mol_type = other DNA
ggggttgaggtcttgggggc

SEQ ID NO: 238172 - DNA, 20 bp, synthetic construct
  source 1..20: mol_type = other DNA
cggggttgaggtcttggggg

SEQ ID NO: 238173 - DNA, 20 bp, synthetic construct
  source 1..20: mol_type = other DNA
tcggggttgaggtcttgggg

SEQ ID NO: 238174 - DNA, 20 bp, synthetic construct
  source 1..20: mol_type = other DNA
ttcggggttgaggtcttggg

SEQ ID NO: 238175 - DNA, 20 bp, synthetic construct
  source 1..20: mol_type = other DNA
cttcggggttgaggtcttgg

SEQ ID NO: 238176 - DNA, 20 bp, synthetic construct
  source 1..20: mol_type = other DNA
ccttcggggttgaggtcttg

SEQ ID NO: 238177 - DNA, 20 bp, synthetic construct
  source 1..20: mol_type = other DNA
accttcggggttgaggtctt

SEQ ID NO: 238178 - DNA, 20 bp, synthetic construct
  source 1..20: mol_type = other DNA
aaccttcggggttgaggtct

SEQ ID NO: 238179 - DNA, 20 bp, synthetic construct
  source 1..20: mol_type = other DNA
taaccttcggggttgaggtc

SEQ ID NO: 238180 - DNA, 20 bp, synthetic construct
  source 1..20: mol_type = other DNA
ctaaccttcggggttgaggt

SEQ ID NO: 238181 - DNA, 20 bp, synthetic construct
  source 1..20: mol_type = other DNA
gctaaccttcggggttgagg

SEQ ID NO: 238182 - DNA, 20 bp, synthetic construct
  source 1..20: mol_type = other DNA
ggctaaccttcggggttgag

SEQ ID NO: 238183 - DNA, 20 bp, synthetic construct
  source 1..20: mol_type = other DNA
aggctaaccttcggggttga

SEQ ID NO: 238184 - DNA, 20 bp, synthetic construct
  source 1..20: mol_type = other DNA
caggctaaccttcggggttg

SEQ ID NO: 238185 - DNA, 20 bp, synthetic construct
  source 1..20: mol_type = other DNA
acaggctaaccttcggggtt

SEQ ID NO: 238186 - DNA, 20 bp, synthetic construct
  source 1..20: mol_type = other DNA
aacaggctaaccttcggggt

SEQ ID NO: 238187 - DNA, 20 bp, synthetic construct
  source 1..20: mol_type = other DNA
caacaggctaaccttcgggg

SEQ ID NO: 238188 - DNA, 20 bp, synthetic construct
  source 1..20: mol_type = other DNA
tcaacaggctaaccttcggg

SEQ ID NO: 238189 - DNA, 20 bp, synthetic construct
  source 1..20: mol_type = other DNA
ttcaacaggctaaccttcgg

SEQ ID NO: 238190 - DNA, 20 bp, synthetic construct
  source 1..20: mol_type = other DNA
tttcaacaggctaaccttcg

SEQ ID NO: 238191 - DNA, 20 bp, synthetic construct
  source 1..20: mol_type = other DNA
gtttcaacaggctaaccttc

SEQ ID NO: 238192 - DNA, 20 bp, synthetic construct
  source 1..20: mol_type = other DNA
ggtttcaacaggctaacctt

SEQ ID NO: 238193 - DNA, 20 bp, synthetic construct
  source 1..20: mol_type = other DNA
tggtttcaacaggctaacct

SEQ ID NO: 238194 - DNA, 20 bp, synthetic construct
  source 1..20: mol_type = other DNA
gtggtttcaacaggctaacc

SEQ ID NO: 238195 - DNA, 20 bp, synthetic construct
  source 1..20: mol_type = other DNA
agtggtttcaacaggctaac

SEQ ID NO: 238196 - DNA, 20 bp, synthetic construct
  source 1..20: mol_type = other DNA
aagtggtttcaacaggctaa

SEQ ID NO: 238197 - DNA, 20 bp, synthetic construct
  source 1..20: mol_type = other DNA
aaagtggtttcaacaggcta

SEQ ID NO: 238198 - DNA, 20 bp, synthetic construct
  source 1..20: mol_type = other DNA
gaaagtggtttcaacaggct

SEQ ID NO: 238199 - DNA, 20 bp, synthetic construct
  source 1..20: mol_type = other DNA
agaaagtggtttcaacaggc

SEQ ID NO: 238200 - DNA, 20 bp, synthetic construct
  source 1..20: mol_type = other DNA
gagaaagtggtttcaacagg

SEQ ID NO: 238201 - DNA, 20 bp, synthetic construct
  source 1..20: mol_type = other DNA
ggagaaagtggtttcaacag

SEQ ID NO: 238202 - DNA, 20 bp, synthetic construct
  source 1..20: mol_type = other DNA
gggagaaagtggtttcaaca

SEQ ID NO: 238203 - DNA, 20 bp, synthetic construct
  source 1..20: mol_type = other DNA
tgggagaaagtggtttcaac

SEQ ID NO: 238204 - DNA, 20 bp, synthetic construct
  source 1..20: mol_type = other DNA
ctgggagaaagtggtttcaa

SEQ ID NO: 238205 - DNA, 20 bp, synthetic construct
  source 1..20: mol_type = other DNA
gctgggagaaagtggtttca

SEQ ID NO: 238206 - DNA, 20 bp, synthetic construct
  source 1..20: mol_type = other DNA
agctgggagaaagtggtttc

SEQ ID NO: 238207 - DNA, 20 bp, synthetic construct
  source 1..20: mol_type = other DNA
cagctgggagaaagtggttt

SEQ ID NO: 238208 - DNA, 20 bp, synthetic construct
  source 1..20: mol_type = other DNA
gcagctgggagaaagtggtt

SEQ ID NO: 238209 - DNA, 20 bp, synthetic construct
  source 1..20: mol_type = other DNA
ggcagctgggagaaagtggt

SEQ ID NO: 238210 - DNA, 20 bp, synthetic construct
  source 1..20: mol_type = other DNA
gggcagctgggagaaagtgg

SEQ ID NO: 238211 - DNA, 20 bp, synthetic construct
  source 1..20: mol_type = other DNA
ggggcagctgggagaaagtg

SEQ ID NO: 238212 - DNA, 20 bp, synthetic construct
  source 1..20: mol_type = other DNA
gggggcagctgggagaaagt

SEQ ID NO: 238213 - DNA, 20 bp, synthetic construct
  source 1..20: mol_type = other DNA
ggggggcagctgggagaaag

SEQ ID NO: 238214 - DNA, 20 bp, synthetic construct
  source 1..20: mol_type = other DNA
aggggggcagctgggagaaa

SEQ ID NO: 238215 - DNA, 20 bp, synthetic construct
  source 1..20: mol_type = other DNA
caggggggcagctgggagaa

SEQ ID NO: 238216 - DNA, 20 bp, synthetic construct
  source 1..20: mol_type = other DNA
ccaggggggcagctgggaga

SEQ ID NO: 238217 - DNA, 20 bp, synthetic construct
  source 1..20: mol_type = other DNA
gccaggggggcagctgggag

SEQ ID NO: 238218 - DNA, 20 bp, synthetic construct
  source 1..20: mol_type = other DNA
tgccaggggggcagctggga

SEQ ID NO: 238219 - DNA, 20 bp, synthetic construct
  source 1..20: mol_type = other DNA
ctgccaggggggcagctggg

SEQ ID NO: 238220 - DNA, 20 bp, synthetic construct
  source 1..20: mol_type = other DNA
actgccaggggggcagctgg

SEQ ID NO: 238221 - DNA, 20 bp, synthetic construct
  source 1..20: mol_type = other DNA
aactgccaggggggcagctg

SEQ ID NO: 238222 - DNA, 20 bp, synthetic construct
  source 1..20: mol_type = other DNA
caactgccaggggggcagct

SEQ ID NO: 238223 - DNA, 20 bp, synthetic construct
  source 1..20: mol_type = other DNA
ccaactgccaggggggcagc

SEQ ID NO: 238224 - DNA, 20 bp, synthetic construct
  source 1..20: mol_type = other DNA
accaactgccaggggggcag

SEQ ID NO: 238225 - DNA, 20 bp, synthetic construct
  source 1..20: mol_type = other DNA
caccaactgccaggggggca

SEQ ID NO: 238226 - DNA, 20 bp, synthetic construct
  source 1..20: mol_type = other DNA
gcaccaactgccaggggggc

SEQ ID NO: 238227 - DNA, 20 bp, synthetic construct
  source 1..20: mol_type = other DNA
agcaccaactgccagggggg

SEQ ID NO: 238228 - DNA, 20 bp, synthetic construct
  source 1..20: mol_type = other DNA
cagcaccaactgccaggggg

SEQ ID NO: 238229 - DNA, 20 bp, synthetic construct
  source 1..20: mol_type = other DNA
gcagcaccaactgccagggg

SEQ ID NO: 238230 - DNA, 20 bp, synthetic construct
  source 1..20: mol_type = other DNA
agcagcaccaactgccaggg

SEQ ID NO: 238231 - DNA, 20 bp, synthetic construct
  source 1..20: mol_type = other DNA
cagcagcaccaactgccagg

SEQ ID NO: 238232 - DNA, 20 bp, synthetic construct
  source 1..20: mol_type = other DNA
ccagcagcaccaactgccag

SEQ ID NO: 238233 - DNA, 20 bp, synthetic construct
  source 1..20: mol_type = other DNA
cccagcagcaccaactgcca

SEQ ID NO: 238234 - DNA, 20 bp, synthetic construct
  source 1..20: mol_type = other DNA
ccccagcagcaccaactgcc

SEQ ID NO: 238235 - DNA, 20 bp, synthetic construct
  source 1..20: mol_type = other DNA
cccccagcagcaccaactgc

SEQ ID NO: 238236 - DNA, 20 bp, synthetic construct
  source 1..20: mol_type = other DNA
tcccccagcagcaccaactg

SEQ ID NO: 238237 - DNA, 20 bp, synthetic construct
  source 1..20: mol_type = other DNA
ttcccccagcagcaccaact

SEQ ID NO: 238238 - DNA, 20 bp, synthetic construct
  source 1..20: mol_type = other DNA
tttcccccagcagcaccaac

SEQ ID NO: 238239 - DNA, 20 bp, synthetic construct
  source 1..20: mol_type = other DNA
gtttcccccagcagcaccaa

SEQ ID NO: 238240 - DNA, 20 bp, synthetic construct
  source 1..20: mol_type = other DNA
agtttcccccagcagcacca

SEQ ID NO: 238241 - DNA, 20 bp, synthetic construct
  source 1..20: mol_type = other DNA
cagtttcccccagcagcacc

SEQ ID NO: 238242 - DNA, 20 bp, synthetic construct
  source 1..20: mol_type = other DNA
ccagtttcccccagcagcac

SEQ ID NO: 238243 - DNA, 20 bp, synthetic construct
  source 1..20: mol_type = other DNA
cccagtttcccccagcagca

SEQ ID NO: 238244 - DNA, 20 bp, synthetic construct
  source 1..20: mol_type = other DNA
tcccagtttcccccagcagc

SEQ ID NO: 238245 - DNA, 20 bp, synthetic construct
  source 1..20: mol_type = other DNA
atcccagtttcccccagcag

SEQ ID NO: 238246 - DNA, 20 bp, synthetic construct
  source 1..20: mol_type = other DNA
aatcccagtttcccccagca

SEQ ID NO: 238247 - DNA, 20 bp, synthetic construct
  source 1..20: mol_type = other DNA
caatcccagtttcccccagc

SEQ ID NO: 238248 - DNA, 20 bp, synthetic construct
  source 1..20: mol_type = other DNA
ccaatcccagtttcccccag

SEQ ID NO: 238249 - DNA, 20 bp, synthetic construct
  source 1..20: mol_type = other DNA
cccaatcccagtttccccca

SEQ ID NO: 238250 - DNA, 20 bp, synthetic construct
  source 1..20: mol_type = other DNA
ccccaatcccagtttccccc

SEQ ID NO: 238251 - DNA, 20 bp, synthetic construct
  source 1..20: mol_type = other DNA
cccccaatcccagtttcccc

SEQ ID NO: 238252 - DNA, 20 bp, synthetic construct
  source 1..20: mol_type = other DNA
gcccccaatcccagtttccc

SEQ ID NO: 238253 - DNA, 20 bp, synthetic construct
  source 1..20: mol_type = other DNA
ggcccccaatcccagtttcc

SEQ ID NO: 238254 - DNA, 20 bp, synthetic construct
  source 1..20: mol_type = other DNA
tggcccccaatcccagtttc

SEQ ID NO: 238255 - DNA, 20 bp, synthetic construct
  source 1..20: mol_type = other DNA
ctggcccccaatcccagttt

SEQ ID NO: 238256 - DNA, 20 bp, synthetic construct
  source 1..20: mol_type = other DNA
tctggcccccaatcccagtt

SEQ ID NO: 238257 - DNA, 20 bp, synthetic construct
  source 1..20: mol_type = other DNA
atctggcccccaatcccagt

SEQ ID NO: 238258 - DNA, 20 bp, synthetic construct
  source 1..20: mol_type = other DNA
aatctggcccccaatcccag

SEQ ID NO: 238259 - DNA, 20 bp, synthetic construct
  source 1..20: mol_type = other DNA
aaatctggcccccaatccca

SEQ ID NO: 238260 - DNA, 20 bp, synthetic construct
  source 1..20: mol_type = other DNA
aaaatctggcccccaatccc

SEQ ID NO: 238261 - DNA, 20 bp, synthetic construct
  source 1..20: mol_type = other DNA
caaaatctggcccccaatcc

SEQ ID NO: 238262 - DNA, 20 bp, synthetic construct
  source 1..20: mol_type = other DNA
gcaaaatctggcccccaatc

SEQ ID NO: 238263 - DNA, 20 bp, synthetic construct
  source 1..20: mol_type = other DNA
ggcaaaatctggcccccaat

SEQ ID NO: 238264 - DNA, 20 bp, synthetic construct
  source 1..20: mol_type = other DNA
aggcaaaatctggcccccaa

SEQ ID NO: 238265 - DNA, 20 bp, synthetic construct
  source 1..20: mol_type = other DNA
gaggcaaaatctggccccca

SEQ ID NO: 238266 - DNA, 20 bp, synthetic construct
  source 1..20: mol_type = other DNA
agaggcaaaatctggccccc

SEQ ID NO: 238267 - DNA, 20 bp, synthetic construct
  source 1..20: mol_type = other DNA
aagaggcaaaatctggcccc

SEQ ID NO: 238268 - DNA, 20 bp, synthetic construct
  source 1..20: mol_type = other DNA
aaagaggcaaaatctggccc

SEQ ID NO: 238269 - DNA, 20 bp, synthetic construct
  source 1..20: mol_type = other DNA
aaaagaggcaaaatctggcc

SEQ ID NO: 238270 - DNA, 20 bp, synthetic construct
  source 1..20: mol_type = other DNA
gaaaagaggcaaaatctggc

SEQ ID NO: 238271 - DNA, 20 bp, synthetic construct
  source 1..20: mol_type = other DNA
ggaaaagaggcaaaatctgg

SEQ ID NO: 238272 - DNA, 20 bp, synthetic construct
  source 1..20: mol_type = other DNA
aggaaaagaggcaaaatctg

SEQ ID NO: 238273 - DNA, 20 bp, synthetic construct
  source 1..20: mol_type = other DNA
caggaaaagaggcaaaatct

SEQ ID NO: 238274 - DNA, 20 bp, synthetic construct
  source 1..20: mol_type = other DNA
tcaggaaaagaggcaaaatc

SEQ ID NO: 238275 - DNA, 20 bp, synthetic construct
  source 1..20: mol_type = other DNA
gtcaggaaaagaggcaaaat

SEQ ID NO: 238276 - DNA, 20 bp, synthetic construct
  source 1..20: mol_type = other DNA
tgtcaggaaaagaggcaaaa

SEQ ID NO: 238277 - DNA, 20 bp, synthetic construct
  source 1..20: mol_type = other DNA
ttgtcaggaaaagaggcaaa

SEQ ID NO: 238278 - DNA, 20 bp, synthetic construct
  source 1..20: mol_type = other DNA
tttgtcaggaaaagaggcaa

SEQ ID NO: 238279 - DNA, 20 bp, synthetic construct
  source 1..20: mol_type = other DNA
ctttgtcaggaaaagaggca

SEQ ID NO: 238280 - DNA, 20 bp, synthetic construct
  source 1..20: mol_type = other DNA
tctttgtcaggaaaagaggc

SEQ ID NO: 238281 - DNA, 20 bp, synthetic construct
  source 1..20: mol_type = other DNA
ctctttgtcaggaaaagagg

SEQ ID NO: 238282 - DNA, 20 bp, synthetic construct
  source 1..20: mol_type = other DNA
tctctttgtcaggaaaagag

SEQ ID NO: 238283 - DNA, 20 bp, synthetic construct
  source 1..20: mol_type = other DNA
ctctctttgtcaggaaaaga

SEQ ID NO: 238284 - DNA, 20 bp, synthetic construct
  source 1..20: mol_type = other DNA
tctctctttgtcaggaaaag

SEQ ID NO: 238285 - DNA, 20 bp, synthetic construct
  source 1..20: mol_type = other DNA
atctctctttgtcaggaaaa

SEQ ID NO: 238286 - DNA, 20 bp, synthetic construct
  source 1..20: mol_type = other DNA
catctctctttgtcaggaaa

SEQ ID NO: 238287 - DNA, 20 bp, synthetic construct
  source 1..20: mol_type = other DNA
tcatctctctttgtcaggaa

SEQ ID NO: 238288 - DNA, 20 bp, synthetic construct
  source 1..20: mol_type = other DNA
ttcatctctctttgtcagga

SEQ ID NO: 238289 - DNA, 20 bp, synthetic construct
  source 1..20: mol_type = other DNA
cttcatctctctttgtcagg

SEQ ID NO: 238290 - DNA, 20 bp, synthetic construct
  source 1..20: mol_type = other DNA
tcttcatctctctttgtcag

SEQ ID NO: 238291 - DNA, 20 bp, synthetic construct
  source 1..20: mol_type = other DNA
ctcttcatctctctttgtca

SEQ ID NO: 238292 - DNA, 20 bp, synthetic construct
  source 1..20: mol_type = other DNA
actcttcatctctctttgtc

SEQ ID NO: 238293 - DNA, 20 bp, synthetic construct
  source 1..20: mol_type = other DNA
aactcttcatctctctttgt

SEQ ID NO: 238294 - DNA, 20 bp, synthetic construct
  source 1..20: mol_type = other DNA
gaactcttcatctctctttg

SEQ ID NO: 238295 - DNA, 20 bp, synthetic construct
  source 1..20: mol_type = other DNA
agaactcttcatctctcttt

SEQ ID NO: 238296 - DNA, 20 bp, synthetic construct
  source 1..20: mol_type = other DNA
gagaactcttcatctctctt

SEQ ID NO: 238297 - DNA, 20 bp, synthetic construct
  source 1..20: mol_type = other DNA
agagaactcttcatctctct

SEQ ID NO: 238298 - DNA, 20 bp, synthetic construct
  source 1..20: mol_type = other DNA
gagagaactcttcatctctc

SEQ ID NO: 238299 - DNA, 20 bp, synthetic construct
  source 1..20: mol_type = other DNA
tgagagaactcttcatctct

SEQ ID NO: 238300 - DNA, 20 bp, synthetic construct
  source 1..20: mol_type = other DNA
gtgagagaactcttcatctc

SEQ ID NO: 238301 - DNA, 20 bp, synthetic construct
  source 1..20: mol_type = other DNA
ggtgagagaactcttcatct

SEQ ID NO: 238302 - DNA, 20 bp, synthetic construct
  source 1..20: mol_type = other DNA
tggtgagagaactcttcatc

SEQ ID NO: 238303 - DNA, 20 bp, synthetic construct
  source 1..20: mol_type = other DNA
ctggtgagagaactcttcat

SEQ ID NO: 238304 - DNA, 20 bp, synthetic construct
  source 1..20: mol_type = other DNA
cctggtgagagaactcttca

SEQ ID NO: 238305 - DNA, 20 bp, synthetic construct
  source 1..20: mol_type = other DNA
acctggtgagagaactcttc

SEQ ID NO: 238306 - DNA, 20 bp, synthetic construct
  source 1..20: mol_type = other DNA
cacctggtgagagaactctt

SEQ ID NO: 238307 - DNA, 20 bp, synthetic construct
  source 1..20: mol_type = other DNA
gcacctggtgagagaactct

SEQ ID NO: 238308 - DNA, 20 bp, synthetic construct
  source 1..20: mol_type = other DNA
ggcacctggtgagagaactc

SEQ ID NO: 238309 - DNA, 20 bp, synthetic construct
  source 1..20: mol_type = other DNA
aggcacctggtgagagaact

SEQ ID NO: 238310 - DNA, 20 bp, synthetic construct
  source 1..20: mol_type = other DNA
caggcacctggtgagagaac

SEQ ID NO: 238311 - DNA, 20 bp, synthetic construct
  source 1..20: mol_type = other DNA
ccaggcacctggtgagagaa

SEQ ID NO: 238312 - DNA, 20 bp, synthetic construct
  source 1..20: mol_type = other DNA
cccaggcacctggtgagaga

SEQ ID NO: 238313 - DNA, 20 bp, synthetic construct
  source 1..20: mol_type = other DNA
tcccaggcacctggtgagag

SEQ ID NO: 238314 - DNA, 20 bp, synthetic construct
  source 1..20: mol_type = other DNA
gtcccaggcacctggtgaga

SEQ ID NO: 238315 - DNA, 20 bp, synthetic construct
  source 1..20: mol_type = other DNA
agtcccaggcacctggtgag

SEQ ID NO: 238316 - DNA, 20 bp, synthetic construct
  source 1..20: mol_type = other DNA
cagtcccaggcacctggtga

SEQ ID NO: 238317 - DNA, 20 bp, synthetic construct
  source 1..20: mol_type = other DNA
ccagtcccaggcacctggtg

SEQ ID NO: 238318 - DNA, 20 bp, synthetic construct
  source 1..20: mol_type = other DNA
cccagtcccaggcacctggt

SEQ ID NO: 238319 - DNA, 20 bp, synthetic construct
  source 1..20: mol_type = other DNA
ccccagtcccaggcacctgg

SEQ ID NO: 238320 - DNA, 20 bp, synthetic construct
  source 1..20: mol_type = other DNA
accccagtcccaggcacctg

SEQ ID NO: 238321 - DNA, 20 bp, synthetic construct
  source 1..20: mol_type = other DNA
caccccagtcccaggcacct

SEQ ID NO: 238322 - DNA, 20 bp, synthetic construct
  source 1..20: mol_type = other DNA
acaccccagtcccaggcacc

SEQ ID NO: 238323 - DNA, 20 bp, synthetic construct
  source 1..20: mol_type = other DNA
cacaccccagtcccaggcac

SEQ ID NO: 238324 - DNA, 20 bp, synthetic construct
  source 1..20: mol_type = other DNA
ccacaccccagtcccaggca

SEQ ID NO: 238325 - DNA, 20 bp, synthetic construct
  source 1..20: mol_type = other DNA
cccacaccccagtcccaggc

SEQ ID NO: 238326 - DNA, 20 bp, synthetic construct
  source 1..20: mol_type = other DNA
acccacaccccagtcccagg

SEQ ID NO: 238327 - DNA, 20 bp, synthetic construct
  source 1..20: mol_type = other DNA
cacccacaccccagtcccag

SEQ ID NO: 238328 - DNA, 20 bp, synthetic construct
  source 1..20: mol_type = other DNA
acacccacaccccagtccca

SEQ ID NO: 238329 - DNA, 20 bp, synthetic construct
  source 1..20: mol_type = other DNA
gacacccacaccccagtccc

SEQ ID NO: 238330 - DNA, 20 bp, synthetic construct
  source 1..20: mol_type = other DNA
ggacacccacaccccagtcc

SEQ ID NO: 238331 - DNA, 20 bp, synthetic construct
  source 1..20: mol_type = other DNA
gggacacccacaccccagtc

SEQ ID NO: 238332 - DNA, 20 bp, synthetic construct
  source 1..20: mol_type = other DNA
tgggacacccacaccccagt

SEQ ID NO: 238333 - DNA, 20 bp, synthetic construct
  source 1..20: mol_type = other DNA
ctgggacacccacaccccag

SEQ ID NO: 238334 - DNA, 20 bp, synthetic construct
  source 1..20: mol_type = other DNA
gctgggacacccacacccca

SEQ ID NO: 238335 - DNA, 20 bp, synthetic construct
  source 1..20: mol_type = other DNA
ggctgggacacccacacccc

SEQ ID NO: 238336 - DNA, 20 bp, synthetic construct
  source 1..20: mol_type = other DNA
aggctgggacacccacaccc

SEQ ID NO: 238337 - DNA, 20 bp, synthetic construct
  source 1..20: mol_type = other DNA
taggctgggacacccacacc

SEQ ID NO: 238338 - DNA, 20 bp, synthetic construct
  source 1..20: mol_type = other DNA
ataggctgggacacccacac

SEQ ID NO: 238339 - DNA, 20 bp, synthetic construct
  source 1..20: mol_type = other DNA
gataggctgggacacccaca

SEQ ID NO: 238340 - DNA, 20 bp, synthetic construct
  source 1..20: mol_type = other DNA
ggataggctgggacacccac

SEQ ID NO: 238341 - DNA, 20 bp, synthetic construct
  source 1..20: mol_type = other DNA
gggataggctgggacaccca

SEQ ID NO: 238342 - DNA, 20 bp, synthetic construct
  source 1..20: mol_type = other DNA
tgggataggctgggacaccc

SEQ ID NO: 238343 - DNA, 20 bp, synthetic construct
  source 1..20: mol_type = other DNA
ctgggataggctgggacacc

SEQ ID NO: 238344 - DNA, 20 bp, synthetic construct
  source 1..20: mol_type = other DNA
gctgggataggctgggacac

SEQ ID NO: 238345 - DNA, 20 bp, synthetic construct
  source 1..20: mol_type = other DNA
cgctgggataggctgggaca

SEQ ID NO: 238346 - DNA, 20 bp, synthetic construct
  source 1..20: mol_type = other DNA
gcgctgggataggctgggac

SEQ ID NO: 238347 - DNA, 20 bp, synthetic construct
  source 1..20: mol_type = other DNA
tgcgctgggataggctggga

SEQ ID NO: 238348 - DNA, 20 bp, synthetic construct
  source 1..20: mol_type = other DNA
atgcgctgggataggctggg

SEQ ID NO: 238349 - DNA, 20 bp, synthetic construct
  source 1..20: mol_type = other DNA
gatgcgctgggataggctgg

SEQ ID NO: 238350 - DNA, 20 bp, synthetic construct
  source 1..20: mol_type = other DNA
agatgcgctgggataggctg

SEQ ID NO: 238351 - DNA, 20 bp, synthetic construct
  source 1..20: mol_type = other DNA
cagatgcgctgggataggct

SEQ ID NO: 238352 - DNA, 20 bp, synthetic construct
  source 1..20: mol_type = other DNA
acagatgcgctgggataggc

SEQ ID NO: 238353 - DNA, 20 bp, synthetic construct
  source 1..20: mol_type = other DNA
aacagatgcgctgggatagg

SEQ ID NO: 238354 - DNA, 20 bp, synthetic construct
  source 1..20: mol_type = other DNA
gaacagatgcgctgggatag

SEQ ID NO: 238355 - DNA, 20 bp, synthetic construct
  source 1..20: mol_type = other DNA
agaacagatgcgctgggata

SEQ ID NO: 238356 - DNA, 20 bp, synthetic construct
  source 1..20: mol_type = other DNA
cagaacagatgcgctgggat

SEQ ID NO: 238357 - DNA, 20 bp, synthetic construct
  source 1..20: mol_type = other DNA
gcagaacagatgcgctggga

SEQ ID NO: 238358 - DNA, 20 bp, synthetic construct
  source 1..20: mol_type = other DNA
tgcagaacagatgcgctggg

SEQ ID NO: 238359 - DNA, 20 bp, synthetic construct
  source 1..20: mol_type = other DNA
atgcagaacagatgcgctgg

SEQ ID NO: 238360 - DNA, 20 bp, synthetic construct
  source 1..20: mol_type = other DNA
gatgcagaacagatgcgctg

SEQ ID NO: 238361 - DNA, 20 bp, synthetic construct
  source 1..20: mol_type = other DNA
tgatgcagaacagatgcgct

SEQ ID NO: 238362 - DNA, 20 bp, synthetic construct
  source 1..20: mol_type = other DNA
atgatgcagaacagatgcgc

SEQ ID NO: 238363 - DNA, 20 bp, synthetic construct
  source 1..20: mol_type = other DNA
catgatgcagaacagatgcg

SEQ ID NO: 238364 - DNA, 20 bp, synthetic construct
  source 1..20: mol_type = other DNA
tcatgatgcagaacagatgc

SEQ ID NO: 238365 - DNA, 20 bp, synthetic construct
  source 1..20: mol_type = other DNA
atcatgatgcagaacagatg

SEQ ID NO: 238366 - DNA, 20 bp, synthetic construct
  source 1..20: mol_type = other DNA
aatcatgatgcagaacagat

SEQ ID NO: 238367 - DNA, 20 bp, synthetic construct
  source 1..20: mol_type = other DNA
taatcatgatgcagaacaga

SEQ ID NO: 238368 - DNA, 20 bp, synthetic construct
  source 1..20: mol_type = other DNA
ttaatcatgatgcagaacag

SEQ ID NO: 238369 - DNA, 20 bp, synthetic construct
  source 1..20: mol_type = other DNA
attaatcatgatgcagaaca

SEQ ID NO: 238370 - DNA, 20 bp, synthetic construct
  source 1..20: mol_type = other DNA
tattaatcatgatgcagaac

SEQ ID NO: 238371 - DNA, 20 bp, synthetic construct
  source 1..20: mol_type = other DNA
ctattaatcatgatgcagaa

SEQ ID NO: 238372 - DNA, 20 bp, synthetic construct
  source 1..20: mol_type = other DNA
actattaatcatgatgcaga

SEQ ID NO: 238373 - DNA, 20 bp, synthetic construct
  source 1..20: mol_type = other DNA
cactattaatcatgatgcag

SEQ ID NO: 238374 - DNA, 20 bp, synthetic construct
  source 1..20: mol_type = other DNA
gcactattaatcatgatgca

SEQ ID NO: 238375 - DNA, 20 bp, synthetic construct
  source 1..20: mol_type = other DNA
agcactattaatcatgatgc

SEQ ID NO: 238376 - DNA, 20 bp, synthetic construct
  source 1..20: mol_type = other DNA
cagcactattaatcatgatg

SEQ ID NO: 238377 - DNA, 20 bp, synthetic construct
  source 1..20: mol_type = other DNA
gcagcactattaatcatgat

SEQ ID NO: 238378 - DNA, 20 bp, synthetic construct
  source 1..20: mol_type = other DNA
agcagcactattaatcatga

SEQ ID NO: 238379 - DNA, 20 bp, synthetic construct
  source 1..20: mol_type = other DNA
aagcagcactattaatcatg

SEQ ID NO: 238380 - DNA, 20 bp, synthetic construct
  source 1..20: mol_type = other DNA
aaagcagcactattaatcat

SEQ ID NO: 238381 - DNA, 20 bp, synthetic construct
  source 1..20: mol_type = other DNA
gaaagcagcactattaatca

SEQ ID NO: 238382 - DNA, 20 bp, synthetic construct
  source 1..20: mol_type = other DNA
tgaaagcagcactattaatc

SEQ ID NO: 238383 - DNA, 20 bp, synthetic construct
  source 1..20: mol_type = other DNA
ctgaaagcagcactattaat

SEQ ID NO: 238384 - DNA, 20 bp, synthetic construct
  source 1..20: mol_type = other DNA
gctgaaagcagcactattaa

SEQ ID NO: 238385 - DNA, 20 bp, synthetic construct
  source 1..20: mol_type = other DNA
ggctgaaagcagcactatta

SEQ ID NO: 238386 - DNA, 20 bp, synthetic construct
  source 1..20: mol_type = other DNA
cggctgaaagcagcactatt

SEQ ID NO: 238387 - DNA, 20 bp, synthetic construct
  source 1..20: mol_type = other DNA
ccggctgaaagcagcactat

SEQ ID NO: 238388 - DNA, 20 bp, synthetic construct
  source 1..20: mol_type = other DNA
cccggctgaaagcagcacta

SEQ ID NO: 238389 - DNA, 20 bp, synthetic construct
  source 1..20: mol_type = other DNA
gcccggctgaaagcagcact

SEQ ID NO: 238390 - DNA, 20 bp, synthetic construct
  source 1..20: mol_type = other DNA
cgcccggctgaaagcagcac

SEQ ID NO: 238391 - DNA, 20 bp, synthetic construct
  source 1..20: mol_type = other DNA
gcgcccggctgaaagcagca

SEQ ID NO: 238392 - DNA, 20 bp, synthetic construct
  source 1..20: mol_type = other DNA
cgcgcccggctgaaagcagc

SEQ ID NO: 238393 - DNA, 20 bp, synthetic construct
  source 1..20: mol_type = other DNA
ccgcgcccggctgaaagcag

SEQ ID NO: 238394 - DNA, 20 bp, synthetic construct
  source 1..20: mol_type = other DNA
accgcgcccggctgaaagca

SEQ ID NO: 238395 - DNA, 20 bp, synthetic construct
  source 1..20: mol_type = other DNA
caccgcgcccggctgaaagc

SEQ ID NO: 238396 - DNA, 20 bp, synthetic construct
  source 1..20: mol_type = other DNA
ccaccgcgcccggctgaaag

SEQ ID NO: 238397 - DNA, 20 bp, synthetic construct
  source 1..20: mol_type = other DNA
gccaccgcgcccggctgaaa

SEQ ID NO: 238398 - DNA, 20 bp, synthetic construct
  source 1..20: mol_type = other DNA
agccaccgcgcccggctgaa

SEQ ID NO: 238399 - DNA, 20 bp, synthetic construct
  source 1..20: mol_type = other DNA
gagccaccgcgcccggctga

SEQ ID NO: 238400 - DNA, 20 bp, synthetic construct
  source 1..20: mol_type = other DNA
tgagccaccgcgcccggctg

SEQ ID NO: 238401 - DNA, 20 bp, synthetic construct
  source 1..20: mol_type = other DNA
gtgagccaccgcgcccggct

SEQ ID NO: 238402 - DNA, 20 bp, synthetic construct
  source 1..20: mol_type = other DNA
tgtgagccaccgcgcccggc

SEQ ID NO: 238403 - DNA, 20 bp, synthetic construct
  source 1..20: mol_type = other DNA
gtgtgagccaccgcgcccgg

SEQ ID NO: 238404 - DNA, 20 bp, synthetic construct
  source 1..20: mol_type = other DNA
ggtgtgagccaccgcgcccg

SEQ ID NO: 238405 - DNA, 20 bp, synthetic construct
  source 1..20: mol_type = other DNA
aggtgtgagccaccgcgccc

SEQ ID NO: 238406 - DNA, 20 bp, synthetic construct
  source 1..20: mol_type = other DNA
caggtgtgagccaccgcgcc

SEQ ID NO: 238407 - DNA, 20 bp, synthetic construct
  source 1..20: mol_type = other DNA
acaggtgtgagccaccgcgc

SEQ ID NO: 238408 - DNA, 20 bp, synthetic construct
  source 1..20: mol_type = other DNA
tacaggtgtgagccaccgcg

SEQ ID NO: 238409 - DNA, 20 bp, synthetic construct
  source 1..20: mol_type = other DNA
ttacaggtgtgagccaccgc

SEQ ID NO: 238410 - DNA, 20 bp, synthetic construct
  source 1..20: mol_type = other DNA
attacaggtgtgagccaccg

SEQ ID NO: 238411 - DNA, 20 bp, synthetic construct
  source 1..20: mol_type = other DNA
gattacaggtgtgagccacc

SEQ ID NO: 238412 - DNA, 20 bp, synthetic construct
  source 1..20: mol_type = other DNA
ggattacaggtgtgagccac

SEQ ID NO: 238413 - DNA, 20 bp, synthetic construct
  source 1..20: mol_type = other DNA
gggattacaggtgtgagcca

SEQ ID NO: 238414 - DNA, 20 bp, synthetic construct
  source 1..20: mol_type = other DNA
tgggattacaggtgtgagcc

SEQ ID NO: 238415 - DNA, 20 bp, synthetic construct
  source 1..20: mol_type = other DNA
ctgggattacaggtgtgagc

SEQ ID NO: 238416 - DNA, 20 bp, synthetic construct
  source 1..20: mol_type = other DNA
gctgggattacaggtgtgag

SEQ ID NO: 238417 - DNA, 20 bp, synthetic construct
  source 1..20: mol_type = other DNA
tgctgggattacaggtgtga

SEQ ID NO: 238418 - DNA, 20 bp, synthetic construct
  source 1..20: mol_type = other DNA
gtgctgggattacaggtgtg

SEQ ID NO: 238419 - DNA, 20 bp, synthetic construct
  source 1..20: mol_type = other DNA
agtgctgggattacaggtgt

SEQ ID NO: 238420 - DNA, 20 bp, synthetic construct
  source 1..20: mol_type = other DNA
aagtgctgggattacaggtg

SEQ ID NO: 238421 - DNA, 20 bp, synthetic construct
  source 1..20: mol_type = other DNA
aaagtgctgggattacaggt

SEQ ID NO: 238422 - DNA, 20 bp, synthetic construct
  source 1..20: mol_type = other DNA
caaagtgctgggattacagg

SEQ ID NO: 238423 - DNA, 20 bp, synthetic construct
  source 1..20: mol_type = other DNA
ccaaagtgctgggattacag

SEQ ID NO: 238424 - DNA, 20 bp, synthetic construct
  source 1..20: mol_type = other DNA
cccaaagtgctgggattaca

SEQ ID NO: 238425 - DNA, 20 bp, synthetic construct
  source 1..20: mol_type = other DNA
tcccaaagtgctgggattac

SEQ ID NO: 238426 - DNA, 20 bp, synthetic construct
  source 1..20: mol_type = other DNA
ctcccaaagtgctgggatta

SEQ ID NO: 238427 - DNA, 20 bp, synthetic construct
  source 1..20: mol_type = other DNA
cctcccaaagtgctgggatt

SEQ ID NO: 238428 - DNA, 20 bp, synthetic construct
  source 1..20: mol_type = other DNA
gcctcccaaagtgctgggat

SEQ ID NO: 238429 - DNA, 20 bp, synthetic construct
  source 1..20: mol_type = other DNA
agcctcccaaagtgctggga

SEQ ID NO: 238430 - DNA, 20 bp, synthetic construct
  source 1..20: mol_type = other DNA
tagcctcccaaagtgctggg

SEQ ID NO: 238431 - DNA, 20 bp, synthetic construct
  source 1..20: mol_type = other DNA
ttagcctcccaaagtgctgg

SEQ ID NO: 238432 - DNA, 20 bp, synthetic construct
  source 1..20: mol_type = other DNA
cttagcctcccaaagtgctg

SEQ ID NO: 238433 - DNA, 20 bp, synthetic construct
  source 1..20: mol_type = other DNA
ccttagcctcccaaagtgct

SEQ ID NO: 238434 - DNA, 20 bp, synthetic construct
  source 1..20: mol_type = other DNA
accttagcctcccaaagtgc

SEQ ID NO: 238435 - DNA, 20 bp, synthetic construct
  source 1..20: mol_type = other DNA
caccttagcctcccaaagtg

SEQ ID NO: 238436 - DNA, 20 bp, synthetic construct
  source 1..20: mol_type = other DNA
ccaccttagcctcccaaagt

SEQ ID NO: 238437 - DNA, 20 bp, synthetic construct
  source 1..20: mol_type = other DNA
cccaccttagcctcccaaag

SEQ ID NO: 238438 - DNA, 20 bp, synthetic construct
  source 1..20: mol_type = other DNA
gcccaccttagcctcccaaa

SEQ ID NO: 238439 - DNA, 20 bp, synthetic construct
  source 1..20: mol_type = other DNA
tgcccaccttagcctcccaa

SEQ ID NO: 238440 - DNA, 20 bp, synthetic construct
  source 1..20: mol_type = other DNA
ctgcccaccttagcctccca

SEQ ID NO: 238441 - DNA, 20 bp, synthetic construct
  source 1..20: mol_type = other DNA
tctgcccaccttagcctccc

SEQ ID NO: 238442 - DNA, 20 bp, synthetic construct
  source 1..20: mol_type = other DNA
atctgcccaccttagcctcc

SEQ ID NO: 238443 - DNA, 20 bp, synthetic construct
  source 1..20: mol_type = other DNA
gatctgcccaccttagcctc

SEQ ID NO: 238444 - DNA, 20 bp, synthetic construct
  source 1..20: mol_type = other DNA
tgatctgcccaccttagcct

SEQ ID NO: 238445 - DNA, 20 bp, synthetic construct
  source 1..20: mol_type = other DNA
gtgatctgcccaccttagcc

SEQ ID NO: 238446 - DNA, 20 bp, synthetic construct
  source 1..20: mol_type = other DNA
tgtgatctgcccaccttagc

SEQ ID NO: 238447 - DNA, 20 bp, synthetic construct
  source 1..20: mol_type = other DNA
ttgtgatctgcccaccttag

SEQ ID NO: 238448 - DNA, 20 bp, synthetic construct
  source 1..20: mol_type = other DNA
cttgtgatctgcccacctta

SEQ ID NO: 238449 - DNA, 20 bp, synthetic construct
  source 1..20: mol_type = other DNA
ccttgtgatctgcccacctt

SEQ ID NO: 238450 - DNA, 20 bp, synthetic construct
  source 1..20: mol_type = other DNA
accttgtgatctgcccacct

SEQ ID NO: 238451 - DNA, 20 bp, synthetic construct
  source 1..20: mol_type = other DNA
gaccttgtgatctgcccacc

SEQ ID NO: 238452 - DNA, 20 bp, synthetic construct
  source 1..20: mol_type = other DNA
tgaccttgtgatctgcccac

SEQ ID NO: 238453 - DNA, 20 bp, synthetic construct
  source 1..20: mol_type = other DNA
ctgaccttgtgatctgccca

SEQ ID NO: 238454 - DNA, 20 bp, synthetic construct
  source 1..20: mol_type = other DNA
cctgaccttgtgatctgccc

SEQ ID NO: 238455 - DNA, 20 bp, synthetic construct
  source 1..20: mol_type = other DNA
tcctgaccttgtgatctgcc

SEQ ID NO: 238456 - DNA, 20 bp, synthetic construct
  source 1..20: mol_type = other DNA
ctcctgaccttgtgatctgc

SEQ ID NO: 238457 - DNA, 20 bp, synthetic construct
  source 1..20: mol_type = other DNA
actcctgaccttgtgatctg

SEQ ID NO: 238458 - DNA, 20 bp, synthetic construct
  source 1..20: mol_type = other DNA
aactcctgaccttgtgatct

SEQ ID NO: 238459 - DNA, 20 bp, synthetic construct
  source 1..20: mol_type = other DNA
gaactcctgaccttgtgatc

SEQ ID NO: 238460 - DNA, 20 bp, synthetic construct
  source 1..20: mol_type = other DNA
cgaactcctgaccttgtgat

SEQ ID NO: 238461 - DNA, 20 bp, synthetic construct
  source 1..20: mol_type = other DNA
tcgaactcctgaccttgtga

SEQ ID NO: 238462 - DNA, 20 bp, synthetic construct
  source 1..20: mol_type = other DNA
ctcgaactcctgaccttgtg

SEQ ID NO: 238463 - DNA, 20 bp, synthetic construct
  source 1..20: mol_type = other DNA
tctcgaactcctgaccttgt

SEQ ID NO: 238464 - DNA, 20 bp, synthetic construct
  source 1..20: mol_type = other DNA
gtctcgaactcctgaccttg

SEQ ID NO: 238465 - DNA, 20 bp, synthetic construct
  source 1..20: mol_type = other DNA
ggtctcgaactcctgacctt

SEQ ID NO: 238466 - DNA, 20 bp, synthetic construct
  source 1..20: mol_type = other DNA
tggtctcgaactcctgacct

SEQ ID NO: 238467 - DNA, 20 bp, synthetic construct
  source 1..20: mol_type = other DNA
ctggtctcgaactcctgacc

SEQ ID NO: 238468 - DNA, 20 bp, synthetic construct
  source 1..20: mol_type = other DNA
gctggtctcgaactcctgac

SEQ ID NO: 238469 - DNA, 20 bp, synthetic construct
  source 1..20: mol_type = other DNA
ggctggtctcgaactcctga

SEQ ID NO: 238470 - DNA, 20 bp, synthetic construct
  source 1..20: mol_type = other DNA
aggctggtctcgaactcctg

SEQ ID NO: 238471 - DNA, 20 bp, synthetic construct
  source 1..20: mol_type = other DNA
caggctggtctcgaactcct

SEQ ID NO: 238472 - DNA, 20 bp, synthetic construct
  source 1..20: mol_type = other DNA
ccaggctggtctcgaactcc

SEQ ID NO: 238473 - DNA, 20 bp, synthetic construct
  source 1..20: mol_type = other DNA
gccaggctggtctcgaactc

SEQ ID NO: 238474 - DNA, 20 bp, synthetic construct
  source 1..20: mol_type = other DNA
ggccaggctggtctcgaact

SEQ ID NO: 238475 - DNA, 20 bp, synthetic construct
  source 1..20: mol_type = other DNA
tggccaggctggtctcgaac

SEQ ID NO: 238476 - DNA, 20 bp, synthetic construct
  source 1..20: mol_type = other DNA
ttggccaggctggtctcgaa

SEQ ID NO: 238477 - DNA, 20 bp, synthetic construct
  source 1..20: mol_type = other DNA
gttggccaggctggtctcga

SEQ ID NO: 238478 - DNA, 20 bp, synthetic construct
  source 1..20: mol_type = other DNA
tgttggccaggctggtctcg

SEQ ID NO: 238479 - DNA, 20 bp, synthetic construct
  source 1..20: mol_type = other DNA
atgttggccaggctggtctc

SEQ ID NO: 238480 - DNA, 20 bp, synthetic construct
  source 1..20: mol_type = other DNA
catgttggccaggctggtct

SEQ ID NO: 238481 - DNA, 20 bp, synthetic construct
  source 1..20: mol_type = other DNA
ccatgttggccaggctggtc

SEQ ID NO: 238482 - DNA, 20 bp, synthetic construct
  source 1..20: mol_type = other DNA
accatgttggccaggctggt

SEQ ID NO: 238483 - DNA, 20 bp, synthetic construct
  source 1..20: mol_type = other DNA
caccatgttggccaggctgg

SEQ ID NO: 238484 - DNA, 20 bp, synthetic construct
  source 1..20: mol_type = other DNA
tcaccatgttggccaggctg

SEQ ID NO: 238485 - DNA, 20 bp, synthetic construct
  source 1..20: mol_type = other DNA
ttcaccatgttggccaggct

SEQ ID NO: 238486 - DNA, 20 bp, synthetic construct
  source 1..20: mol_type = other DNA
tttcaccatgttggccaggc

SEQ ID NO: 238487 - DNA, 20 bp, synthetic construct
  source 1..20: mol_type = other DNA
gtttcaccatgttggccagg

SEQ ID NO: 238488 - DNA, 20 bp, synthetic construct
  source 1..20: mol_type = other DNA
ggtttcaccatgttggccag

SEQ ID NO: 238489 - DNA, 20 bp, synthetic construct
  source 1..20: mol_type = other DNA
aggtttcaccatgttggcca

SEQ ID NO: 238490 - DNA, 20 bp, synthetic construct
  source 1..20: mol_type = other DNA
gaggtttcaccatgttggcc

SEQ ID NO: 238491 - DNA, 20 bp, synthetic construct
  source 1..20: mol_type = other DNA
cgaggtttcaccatgttggc

SEQ ID NO: 238492 - DNA, 20 bp, synthetic construct
  source 1..20: mol_type = other DNA
acgaggtttcaccatgttgg

SEQ ID NO: 238493 - DNA, 20 bp, synthetic construct
  source 1..20: mol_type = other DNA
gacgaggtttcaccatgttg

SEQ ID NO: 238494 - DNA, 20 bp, synthetic construct
  source 1..20: mol_type = other DNA
agacgaggtttcaccatgtt

SEQ ID NO: 238495 - DNA, 20 bp, synthetic construct
  source 1..20: mol_type = other DNA
gagacgaggtttcaccatgt

SEQ ID NO: 238496 - DNA, 20 bp, synthetic construct
  source 1..20: mol_type = other DNA
agagacgaggtttcaccatg

SEQ ID NO: 238497 - DNA, 20 bp, synthetic construct
  source 1..20: mol_type = other DNA
tagagacgaggtttcaccat

SEQ ID NO: 238498 - DNA, 20 bp, synthetic construct
  source 1..20: mol_type = other DNA
gtagagacgaggtttcacca

SEQ ID NO: 238499 - DNA, 20 bp, synthetic construct
  source 1..20: mol_type = other DNA
agtagagacgaggtttcacc

SEQ ID NO: 238500 - DNA, 20 bp, synthetic construct
  source 1..20: mol_type = other DNA
tagtagagacgaggtttcac

SEQ ID NO: 238501 - DNA, 20 bp, synthetic construct
  source 1..20: mol_type = other DNA
ttagtagagacgaggtttca

SEQ ID NO: 238502 - DNA, 20 bp, synthetic construct
  source 1..20: mol_type = other DNA
tttagtagagacgaggtttc

SEQ ID NO: 238503 - DNA, 20 bp, synthetic construct
  source 1..20: mol_type = other DNA
ttttagtagagacgaggttt

SEQ ID NO: 238504 - DNA, 20 bp, synthetic construct
  source 1..20: mol_type = other DNA
tttttagtagagacgaggtt

SEQ ID NO: 238505 - DNA, 20 bp, synthetic construct
  source 1..20: mol_type = other DNA
atttttagtagagacgaggt

SEQ ID NO: 238506 - DNA, 20 bp, synthetic construct
  source 1..20: mol_type = other DNA
tatttttagtagagacgagg

SEQ ID NO: 238507 - DNA, 20 bp, synthetic construct
  source 1..20: mol_type = other DNA
gtatttttagtagagacgag

SEQ ID NO: 238508 - DNA, 20 bp, synthetic construct
  source 1..20: mol_type = other DNA
tgtatttttagtagagacga

SEQ ID NO: 238509 - DNA, 20 bp, synthetic construct
  source 1..20: mol_type = other DNA
ttgtatttttagtagagacg

SEQ ID NO: 238510 - DNA, 20 bp, synthetic construct
  source 1..20: mol_type = other DNA
tttgtatttttagtagagac

SEQ ID NO: 238511 - DNA, 20 bp, synthetic construct
  source 1..20: mol_type = other DNA
ttttgtatttttagtagaga

SEQ ID NO: 238512 - DNA, 20 bp, synthetic construct
  source 1..20: mol_type = other DNA
tttttgtatttttagtagag

SEQ ID NO: 238513 - DNA, 20 bp, synthetic construct
  source 1..20: mol_type = other DNA
atttttgtatttttagtaga

SEQ ID NO: 238514 - DNA, 20 bp, synthetic construct
  source 1..20: mol_type = other DNA
aatttttgtatttttagtag

SEQ ID NO: 238515 - DNA, 20 bp, synthetic construct
  source 1..20: mol_type = other DNA
taatttttgtatttttagta

SEQ ID NO: 238516 - DNA, 20 bp, synthetic construct
  source 1..20: mol_type = other DNA
ttaatttttgtatttttagt

SEQ ID NO: 238517 - DNA, 20 bp, synthetic construct
  source 1..20: mol_type = other DNA
gttaatttttgtatttttag

SEQ ID NO: 238518 - DNA, 20 bp, synthetic construct
  source 1..20: mol_type = other DNA
ggttaatttttgtattttta

SEQ ID NO: 238519 - DNA, 20 bp, synthetic construct
  source 1..20: mol_type = other DNA
tggttaatttttgtattttt

SEQ ID NO: 238520 - DNA, 20 bp, synthetic construct
  source 1..20: mol_type = other DNA
ctggttaatttttgtatttt

SEQ ID NO: 238521 - DNA, 20 bp, synthetic construct
  source 1..20: mol_type = other DNA
cctggttaatttttgtattt

SEQ ID NO: 238522 - DNA, 20 bp, synthetic construct
  source 1..20: mol_type = other DNA
acctggttaatttttgtatt

SEQ ID NO: 238523 - DNA, 20 bp, synthetic construct
  source 1..20: mol_type = other DNA
cacctggttaatttttgtat

SEQ ID NO: 238524 - DNA, 20 bp, synthetic construct
  source 1..20: mol_type = other DNA
acacctggttaatttttgta

SEQ ID NO: 238525 - DNA, 20 bp, synthetic construct
  source 1..20: mol_type = other DNA
cacacctggttaatttttgt

SEQ ID NO: 238526 - DNA, 20 bp, synthetic construct
  source 1..20: mol_type = other DNA
ccacacctggttaatttttg

SEQ ID NO: 238527 - DNA, 20 bp, synthetic construct
  source 1..20: mol_type = other DNA
accacacctggttaattttt

SEQ ID NO: 238528 - DNA, 20 bp, synthetic construct
  source 1..20: mol_type = other DNA
caccacacctggttaatttt

SEQ ID NO: 238529 - DNA, 20 bp, synthetic construct
  source 1..20: mol_type = other DNA
ccaccacacctggttaattt

SEQ ID NO: 238530 - DNA, 20 bp, synthetic construct
  source 1..20: mol_type = other DNA
accaccacacctggttaatt

SEQ ID NO: 238531 - DNA, 20 bp, synthetic construct
  source 1..20: mol_type = other DNA
caccaccacacctggttaat

SEQ ID NO: 238532 - DNA, 20 bp, synthetic construct
  source 1..20: mol_type = other DNA
ccaccaccacacctggttaa

SEQ ID NO: 238533 - DNA, 20 bp, synthetic construct
  source 1..20: mol_type = other DNA
cccaccaccacacctggtta

SEQ ID NO: 238534 - DNA, 20 bp, synthetic construct
  source 1..20: mol_type = other DNA
acccaccaccacacctggtt

SEQ ID NO: 238535 - DNA, 20 bp, synthetic construct
  source 1..20: mol_type = other DNA
cacccaccaccacacctggt

SEQ ID NO: 238536 - DNA, 20 bp, synthetic construct
  source 1..20: mol_type = other DNA
gcacccaccaccacacctgg

SEQ ID NO: 238537 - DNA, 20 bp, synthetic construct
  source 1..20: mol_type = other DNA
ggcacccaccaccacacctg

SEQ ID NO: 238538 - DNA, 20 bp, synthetic construct
  source 1..20: mol_type = other DNA
aggcacccaccaccacacct

SEQ ID NO: 238539 - DNA, 20 bp, synthetic construct
  source 1..20: mol_type = other DNA
caggcacccaccaccacacc

SEQ ID NO: 238540 - DNA, 20 bp, synthetic construct
  source 1..20: mol_type = other DNA
acaggcacccaccaccacac

SEQ ID NO: 238541 - DNA, 20 bp, synthetic construct
  source 1..20: mol_type = other DNA
tacaggcacccaccaccaca

SEQ ID NO: 238542 - DNA, 20 bp, synthetic construct
  source 1..20: mol_type = other DNA
ctacaggcacccaccaccac

SEQ ID NO: 238543 - DNA, 20 bp, synthetic construct
  source 1..20: mol_type = other DNA
actacaggcacccaccacca

SEQ ID NO: 238544 - DNA, 20 bp, synthetic construct
  source 1..20: mol_type = other DNA
gactacaggcacccaccacc

SEQ ID NO: 238545 - DNA, 20 bp, synthetic construct
  source 1..20: mol_type = other DNA
ggactacaggcacccaccac

SEQ ID NO: 238546 - DNA, 20 bp, synthetic construct
  source 1..20: mol_type = other DNA
gggactacaggcacccacca

SEQ ID NO: 238547 - DNA, 20 bp, synthetic construct
  source 1..20: mol_type = other DNA
tgggactacaggcacccacc

SEQ ID NO: 238548 - DNA, 20 bp, synthetic construct
  source 1..20: mol_type = other DNA
ctgggactacaggcacccac

SEQ ID NO: 238549 - DNA, 20 bp, synthetic construct
  source 1..20: mol_type = other DNA
gctgggactacaggcaccca

SEQ ID NO: 238550 - DNA, 20 bp, synthetic construct
  source 1..20: mol_type = other DNA
agctgggactacaggcaccc

SEQ ID NO: 238551 - DNA, 20 bp, synthetic construct
  source 1..20: mol_type = other DNA
tagctgggactacaggcacc

SEQ ID NO: 238552 - DNA, 20 bp, synthetic construct
  source 1..20: mol_type = other DNA
gtagctgggactacaggcac

SEQ ID NO: 238553 - DNA, 20 bp, synthetic construct
  source 1..20: mol_type = other DNA
agtagctgggactacaggca

SEQ ID NO: 238554 - DNA, 20 bp, synthetic construct
  source 1..20: mol_type = other DNA
aagtagctgggactacaggc

SEQ ID NO: 238555 - DNA, 20 bp, synthetic construct
  source 1..20: mol_type = other DNA
caagtagctgggactacagg

SEQ ID NO: 238556 - DNA, 20 bp, synthetic construct
  source 1..20: mol_type = other DNA
ccaagtagctgggactacag

SEQ ID NO: 238557 - DNA, 20 bp, synthetic construct
  source 1..20: mol_type = other DNA
cccaagtagctgggactaca

SEQ ID NO: 238558 - DNA, 20 bp, synthetic construct
  source 1..20: mol_type = other DNA
tcccaagtagctgggactac

SEQ ID NO: 238559 - DNA, 20 bp, synthetic construct
  source 1..20: mol_type = other DNA
ctcccaagtagctgggacta

SEQ ID NO: 238560 - DNA, 20 bp, synthetic construct
  source 1..20: mol_type = other DNA
cctcccaagtagctgggact

SEQ ID NO: 238561 - DNA, 20 bp, synthetic construct
  source 1..20: mol_type = other DNA
gcctcccaagtagctgggac

SEQ ID NO: 238562 - DNA, 20 bp, synthetic construct
  source 1..20: mol_type = other DNA
agcctcccaagtagctggga

SEQ ID NO: 238563 - DNA, 20 bp, synthetic construct
  source 1..20: mol_type = other DNA
cagcctcccaagtagctggg

SEQ ID NO: 238564 - DNA, 20 bp, synthetic construct
  source 1..20: mol_type = other DNA
tcagcctcccaagtagctgg

SEQ ID NO: 238565 - DNA, 20 bp, synthetic construct
  source 1..20: mol_type = other DNA
ctcagcctcccaagtagctg

SEQ ID NO: 238566 - DNA, 20 bp, synthetic construct
  source 1..20: mol_type = other DNA
cctcagcctcccaagtagct

SEQ ID NO: 238567 - DNA, 20 bp, synthetic construct
  source 1..20: mol_type = other DNA
gcctcagcctcccaagtagc

SEQ ID NO: 238568 - DNA, 20 bp, synthetic construct
  source 1..20: mol_type = other DNA
tgcctcagcctcccaagtag

SEQ ID NO: 238569 - DNA, 20 bp, synthetic construct
  source 1..20: mol_type = other DNA
ctgcctcagcctcccaagta

SEQ ID NO: 238570 - DNA, 20 bp, synthetic construct
  source 1..20: mol_type = other DNA
cctgcctcagcctcccaagt

SEQ ID NO: 238571 - DNA, 20 bp, synthetic construct
  source 1..20: mol_type = other DNA
tcctgcctcagcctcccaag

SEQ ID NO: 238572 - DNA, 20 bp, synthetic construct
  source 1..20: mol_type = other DNA
ctcctgcctcagcctcccaa

SEQ ID NO: 238573 - DNA, 20 bp, synthetic construct
  source 1..20: mol_type = other DNA
tctcctgcctcagcctccca

SEQ ID NO: 238574 - DNA, 20 bp, synthetic construct
  source 1..20: mol_type = other DNA
ttctcctgcctcagcctccc

SEQ ID NO: 238575 - DNA, 20 bp, synthetic construct
  source 1..20: mol_type = other DNA
attctcctgcctcagcctcc

SEQ ID NO: 238576 - DNA, 20 bp, synthetic construct
  source 1..20: mol_type = other DNA
gattctcctgcctcagcctc

SEQ ID NO: 238577 - DNA, 20 bp, synthetic construct
  source 1..20: mol_type = other DNA
tgattctcctgcctcagcct

SEQ ID NO: 238578 - DNA, 20 bp, synthetic construct
  source 1..20: mol_type = other DNA
gtgattctcctgcctcagcc

SEQ ID NO: 238579 - DNA, 20 bp, synthetic construct
  source 1..20: mol_type = other DNA
agtgattctcctgcctcagc

SEQ ID NO: 238580 - DNA, 20 bp, synthetic construct
  source 1..20: mol_type = other DNA
aagtgattctcctgcctcag

SEQ ID NO: 238581 - DNA, 20 bp, synthetic construct
  source 1..20: mol_type = other DNA
caagtgattctcctgcctca

SEQ ID NO: 238582 - DNA, 20 bp, synthetic construct
  source 1..20: mol_type = other DNA
tcaagtgattctcctgcctc

SEQ ID NO: 238583 - DNA, 20 bp, synthetic construct
  source 1..20: mol_type = other DNA
ttcaagtgattctcctgcct

SEQ ID NO: 238584 - DNA, 20 bp, synthetic construct
  source 1..20: mol_type = other DNA
attcaagtgattctcctgcc

SEQ ID NO: 238585 - DNA, 20 bp, synthetic construct
  source 1..20: mol_type = other DNA
gattcaagtgattctcctgc

SEQ ID NO: 238586 - DNA, 20 bp, synthetic construct
  source 1..20: mol_type = other DNA
agattcaagtgattctcctg

SEQ ID NO: 238587 - DNA, 20 bp, synthetic construct
  source 1..20: mol_type = other DNA
cagattcaagtgattctcct

SEQ ID NO: 238588 - DNA, 20 bp, synthetic construct
  source 1..20: mol_type = other DNA
ccagattcaagtgattctcc

SEQ ID NO: 238589 - DNA, 20 bp, synthetic construct
  source 1..20: mol_type = other DNA
cccagattcaagtgattctc

SEQ ID NO: 238590 - DNA, 20 bp, synthetic construct
  source 1..20: mol_type = other DNA
tcccagattcaagtgattct

SEQ ID NO: 238591 - DNA, 20 bp, synthetic construct
  source 1..20: mol_type = other DNA
ttcccagattcaagtgattc

SEQ ID NO: 238592 - DNA, 20 bp, synthetic construct
  source 1..20: mol_type = other DNA
cttcccagattcaagtgatt

SEQ ID NO: 238593 - DNA, 20 bp, synthetic construct
  source 1..20: mol_type = other DNA
gcttcccagattcaagtgat

SEQ ID NO: 238594 - DNA, 20 bp, synthetic construct
  source 1..20: mol_type = other DNA
tgcttcccagattcaagtga

SEQ ID NO: 238595 - DNA, 20 bp, synthetic construct
  source 1..20: mol_type = other DNA
ctgcttcccagattcaagtg

SEQ ID NO: 238596 - DNA, 20 bp, synthetic construct
  source 1..20: mol_type = other DNA
tctgcttcccagattcaagt

SEQ ID NO: 238597 - DNA, 20 bp, synthetic construct
  source 1..20: mol_type = other DNA
ctctgcttcccagattcaag

SEQ ID NO: 238598 - DNA, 20 bp, synthetic construct
  source 1..20: mol_type = other DNA
cctctgcttcccagattcaa

SEQ ID NO: 238599 - DNA, 20 bp, synthetic construct
  source 1..20: mol_type = other DNA
acctctgcttcccagattca

SEQ ID NO: 238600 - DNA, 20 bp, synthetic construct
  source 1..20: mol_type = other DNA
aacctctgcttcccagattc

SEQ ID NO: 238601 - DNA, 20 bp, synthetic construct
  source 1..20: mol_type = other DNA
caacctctgcttcccagatt

SEQ ID NO: 238602 - DNA, 20 bp, synthetic construct
  source 1..20: mol_type = other DNA
gcaacctctgcttcccagat

SEQ ID NO: 238603 - DNA, 20 bp, synthetic construct
  source 1..20: mol_type = other DNA
tgcaacctctgcttcccaga

SEQ ID NO: 238604 - DNA, 20 bp, synthetic construct
  source 1..20: mol_type = other DNA
ctgcaacctctgcttcccag

SEQ ID NO: 238605 - DNA, 20 bp, synthetic construct
  source 1..20: mol_type = other DNA
actgcaacctctgcttccca

SEQ ID NO: 238606 - DNA, 20 bp, synthetic construct
  source 1..20: mol_type = other DNA
cactgcaacctctgcttccc

SEQ ID NO: 238607 - DNA, 20 bp, synthetic construct
  source 1..20: mol_type = other DNA
tcactgcaacctctgcttcc

SEQ ID NO: 238608 - DNA, 20 bp, synthetic construct
  source 1..20: mol_type = other DNA
ctcactgcaacctctgcttc

SEQ ID NO: 238609 - DNA, 20 bp, synthetic construct
  source 1..20: mol_type = other DNA
gctcactgcaacctctgctt

SEQ ID NO: 238610 - DNA, 20 bp, synthetic construct
  source 1..20: mol_type = other DNA
ggctcactgcaacctctgct

SEQ ID NO: 238611 - DNA, 20 bp, synthetic construct
  source 1..20: mol_type = other DNA
tggctcactgcaacctctgc

SEQ ID NO: 238612 - DNA, 20 bp, synthetic construct
  source 1..20: mol_type = other DNA
ttggctcactgcaacctctg

SEQ ID NO: 238613 - DNA, 20 bp, synthetic construct
  source 1..20: mol_type = other DNA
cttggctcactgcaacctct

SEQ ID NO: 238614 - DNA, 20 bp, synthetic construct
  source 1..20: mol_type = other DNA
tcttggctcactgcaacctc

SEQ ID NO: 238615 - DNA, 20 bp, synthetic construct
  source 1..20: mol_type = other DNA
atcttggctcactgcaacct

SEQ ID NO: 238616 - DNA, 20 bp, synthetic construct
  source 1..20: mol_type = other DNA
gatcttggctcactgcaacc

SEQ ID NO: 238617 - DNA, 20 bp, synthetic construct
  source 1..20: mol_type = other DNA
cgatcttggctcactgcaac

SEQ ID NO: 238618 - DNA, 20 bp, synthetic construct
  source 1..20: mol_type = other DNA
acgatcttggctcactgcaa

SEQ ID NO: 238619 - DNA, 20 bp, synthetic construct
  source 1..20: mol_type = other DNA
cacgatcttggctcactgca

SEQ ID NO: 238620 - DNA, 20 bp, synthetic construct
  source 1..20: mol_type = other DNA
gcacgatcttggctcactgc

SEQ ID NO: 238621 - DNA, 20 bp, synthetic construct
  source 1..20: mol_type = other DNA
ggcacgatcttggctcactg

SEQ ID NO: 238622 - DNA, 20 bp, synthetic construct
  source 1..20: mol_type = other DNA
tggcacgatcttggctcact

SEQ ID NO: 238623 - DNA, 20 bp, synthetic construct
  source 1..20: mol_type = other DNA
gtggcacgatcttggctcac

SEQ ID NO: 238624 - DNA, 20 bp, synthetic construct
  source 1..20: mol_type = other DNA
agtggcacgatcttggctca

SEQ ID NO: 238625 - DNA, 20 bp, synthetic construct
  source 1..20: mol_type = other DNA
cagtggcacgatcttggctc

SEQ ID NO: 238626 - DNA, 20 bp, synthetic construct
  source 1..20: mol_type = other DNA
gcagtggcacgatcttggct

SEQ ID NO: 238627 - DNA, 20 bp, synthetic construct
  source 1..20: mol_type = other DNA
tgcagtggcacgatcttggc

SEQ ID NO: 238628 - DNA, 20 bp, synthetic construct
  source 1..20: mol_type = other DNA
gtgcagtggcacgatcttgg

SEQ ID NO: 238629 - DNA, 20 bp, synthetic construct
  source 1..20: mol_type = other DNA
agtgcagtggcacgatcttg

SEQ ID NO: 238630 - DNA, 20 bp, synthetic construct
  source 1..20: mol_type = other DNA
gagtgcagtggcacgatctt

SEQ ID NO: 238631 - DNA, 20 bp, synthetic construct
  source 1..20: mol_type = other DNA
ggagtgcagtggcacgatct

SEQ ID NO: 238632 - DNA, 20 bp, synthetic construct
  source 1..20: mol_type = other DNA
tggagtgcagtggcacgatc

SEQ ID NO: 238633 - DNA, 20 bp, synthetic construct
  source 1..20: mol_type = other DNA
ctggagtgcagtggcacgat

SEQ ID NO: 238634 - DNA, 20 bp, synthetic construct
  source 1..20: mol_type = other DNA
gctggagtgcagtggcacga

SEQ ID NO: 238635 - DNA, 20 bp, synthetic construct
  source 1..20: mol_type = other DNA
ggctggagtgcagtggcacg

SEQ ID NO: 238636 - DNA, 20 bp, synthetic construct
  source 1..20: mol_type = other DNA
aggctggagtgcagtggcac

SEQ ID NO: 238637 - DNA, 20 bp, synthetic construct
  source 1..20: mol_type = other DNA
caggctggagtgcagtggca

SEQ ID NO: 238638 - DNA, 20 bp, synthetic construct
  source 1..20: mol_type = other DNA
ccaggctggagtgcagtggc

SEQ ID NO: 238639 - DNA, 20 bp, synthetic construct
  source 1..20: mol_type = other DNA
cccaggctggagtgcagtgg

SEQ ID NO: 238640 - DNA, 20 bp, synthetic construct
  source 1..20: mol_type = other DNA
acccaggctggagtgcagtg

SEQ ID NO: 238641 - DNA, 20 bp, synthetic construct
  source 1..20: mol_type = other DNA
cacccaggctggagtgcagt

SEQ ID NO: 238642 - DNA, 20 bp, synthetic construct
  source 1..20: mol_type = other DNA
tcacccaggctggagtgcag

SEQ ID NO: 238643 - DNA, 20 bp, synthetic construct
  source 1..20: mol_type = other DNA
gtcacccaggctggagtgca

SEQ ID NO: 238644 - DNA, 20 bp, synthetic construct
  source 1..20: mol_type = other DNA
tgtcacccaggctggagtgc

SEQ ID NO: 238645 - DNA, 20 bp, synthetic construct
  source 1..20: mol_type = other DNA
ctgtcacccaggctggagtg

SEQ ID NO: 238646 - DNA, 20 bp, synthetic construct
  source 1..20: mol_type = other DNA
tctgtcacccaggctggagt

SEQ ID NO: 238647 - DNA, 20 bp, synthetic construct
  source 1..20: mol_type = other DNA
ctctgtcacccaggctggag

SEQ ID NO: 238648 - DNA, 20 bp, synthetic construct
  source 1..20: mol_type = other DNA
actctgtcacccaggctgga

SEQ ID NO: 238649 - DNA, 20 bp, synthetic construct
  source 1..20: mol_type = other DNA
cactctgtcacccaggctgg

SEQ ID NO: 238650 - DNA, 20 bp, synthetic construct
  source 1..20: mol_type = other DNA
tcactctgtcacccaggctg

SEQ ID NO: 238651 - DNA, 20 bp, synthetic construct
  source 1..20: mol_type = other DNA
ctcactctgtcacccaggct

SEQ ID NO: 238652 - DNA, 20 bp, synthetic construct
  source 1..20: mol_type = other DNA
tctcactctgtcacccaggc

SEQ ID NO: 238653 - DNA, 20 bp, synthetic construct
  source 1..20: mol_type = other DNA
gtctcactctgtcacccagg

SEQ ID NO: 238654 - DNA, 20 bp, synthetic construct
  source 1..20: mol_type = other DNA
agtctcactctgtcacccag

SEQ ID NO: 238655 - DNA, 20 bp, synthetic construct
  source 1..20: mol_type = other DNA
gagtctcactctgtcaccca

SEQ ID NO: 238656 - DNA, 20 bp, synthetic construct
  source 1..20: mol_type = other DNA
ggagtctcactctgtcaccc

SEQ ID NO: 238657 - DNA, 20 bp, synthetic construct
  source 1..20: mol_type = other DNA
cggagtctcactctgtcacc

SEQ ID NO: 238658 - DNA, 20 bp, synthetic construct
  source 1..20: mol_type = other DNA
acggagtctcactctgtcac

SEQ ID NO: 238659 - DNA, 20 bp, synthetic construct
  source 1..20: mol_type = other DNA
gacggagtctcactctgtca

SEQ ID NO: 238660 - DNA, 20 bp, synthetic construct
  source 1..20: mol_type = other DNA
ggacggagtctcactctgtc

SEQ ID NO: 238661 - DNA, 20 bp, synthetic construct
  source 1..20: mol_type = other DNA
aggacggagtctcactctgt

SEQ ID NO: 238662 - DNA, 20 bp, synthetic construct
  source 1..20: mol_type = other DNA
taggacggagtctcactctg

SEQ ID NO: 238663 - DNA, 20 bp, synthetic construct
  source 1..20: mol_type = other DNA
ttaggacggagtctcactct

SEQ ID NO: 238664 - DNA, 20 bp, synthetic construct
  source 1..20: mol_type = other DNA
tttaggacggagtctcactc

SEQ ID NO: 238665 - DNA, 20 bp, synthetic construct
  source 1..20: mol_type = other DNA
ttttaggacggagtctcact

SEQ ID NO: 238666 - DNA, 20 bp, synthetic construct
  source 1..20: mol_type = other DNA
tttttaggacggagtctcac

SEQ ID NO: 238667 - DNA, 20 bp, synthetic construct
  source 1..20: mol_type = other DNA
ttttttaggacggagtctca

SEQ ID NO: 238668 - DNA, 20 bp, synthetic construct
  source 1..20: mol_type = other DNA
tttttttaggacggagtctc

SEQ ID NO: 238669 - DNA, 20 bp, synthetic construct
  source 1..20: mol_type = other DNA
ttttttttaggacggagtct

SEQ ID NO: 238670 - DNA, 20 bp, synthetic construct
  source 1..20: mol_type = other DNA
tttttttttaggacggagtc

SEQ ID NO: 238671 - DNA, 20 bp, synthetic construct
  source 1..20: mol_type = other DNA
ctttttttttaggacggagt

SEQ ID NO: 238672 - DNA, 20 bp, synthetic construct
  source 1..20: mol_type = other DNA
cctttttttttaggacggag

SEQ ID NO: 238673 - DNA, 20 bp, synthetic construct
  source 1..20: mol_type = other DNA
tcctttttttttaggacgga

SEQ ID NO: 238674 - DNA, 20 bp, synthetic construct
  source 1..20: mol_type = other DNA
ctcctttttttttaggacgg

SEQ ID NO: 238675 - DNA, 20 bp, synthetic construct
  source 1..20: mol_type = other DNA
actcctttttttttaggacg

SEQ ID NO: 238676 - DNA, 20 bp, synthetic construct
  source 1..20: mol_type = other DNA
aactcctttttttttaggac

SEQ ID NO: 238677 - DNA, 20 bp, synthetic construct
  source 1..20: mol_type = other DNA
aaactcctttttttttagga

SEQ ID NO: 238678 - DNA, 20 bp, synthetic construct
  source 1..20: mol_type = other DNA
aaaactcctttttttttagg

SEQ ID NO: 238679 - DNA, 20 bp, synthetic construct
  source 1..20: mol_type = other DNA
caaaactcctttttttttag

SEQ ID NO: 238680 - DNA, 20 bp, synthetic construct
  source 1..20: mol_type = other DNA
gcaaaactccttttttttta

SEQ ID NO: 238681 - DNA, 20 bp, synthetic construct
  source 1..20: mol_type = other DNA
agcaaaactccttttttttt

SEQ ID NO: 238682 - DNA, 20 bp, synthetic construct
  source 1..20: mol_type = other DNA
gagcaaaactcctttttttt

SEQ ID NO: 238683 - DNA, 20 bp, synthetic construct
  source 1..20: mol_type = other DNA
agagcaaaactccttttttt

SEQ ID NO: 238684 - DNA, 20 bp, synthetic construct
  source 1..20: mol_type = other DNA
cagagcaaaactcctttttt

SEQ ID NO: 238685 - DNA, 20 bp, synthetic construct
  source 1..20: mol_type = other DNA
acagagcaaaactccttttt

SEQ ID NO: 238686 - DNA, 20 bp, synthetic construct
  source 1..20: mol_type = other DNA
gacagagcaaaactcctttt

SEQ ID NO: 238687 - DNA, 20 bp, synthetic construct
  source 1..20: mol_type = other DNA
cgacagagcaaaactccttt

SEQ ID NO: 238688 - DNA, 20 bp, synthetic construct
  source 1..20: mol_type = other DNA
gcgacagagcaaaactcctt

SEQ ID NO: 238689 - DNA, 20 bp, synthetic construct
  source 1..20: mol_type = other DNA
ggcgacagagcaaaactcct

SEQ ID NO: 238690 - DNA, 20 bp, synthetic construct
  source 1..20: mol_type = other DNA
gggcgacagagcaaaactcc

SEQ ID NO: 238691 - DNA, 20 bp, synthetic construct
  source 1..20: mol_type = other DNA
tgggcgacagagcaaaactc

SEQ ID NO: 238692 - DNA, 20 bp, synthetic construct
  source 1..20: mol_type = other DNA
ctgggcgacagagcaaaact

SEQ ID NO: 238693 - DNA, 20 bp, synthetic construct
  source 1..20: mol_type = other DNA
cctgggcgacagagcaaaac

SEQ ID NO: 238694 - DNA, 20 bp, synthetic construct
  source 1..20: mol_type = other DNA
gcctgggcgacagagcaaaa

SEQ ID NO: 238695 - DNA, 20 bp, synthetic construct
  source 1..20: mol_type = other DNA
agcctgggcgacagagcaaa

SEQ ID NO: 238696 - DNA, 20 bp, synthetic construct
  source 1..20: mol_type = other DNA
cagcctgggcgacagagcaa

SEQ ID NO: 238697 - DNA, 20 bp, synthetic construct
  source 1..20: mol_type = other DNA
ccagcctgggcgacagagca

SEQ ID NO: 238698 - DNA, 20 bp, synthetic construct
  source 1..20: mol_type = other DNA
tccagcctgggcgacagagc

SEQ ID NO: 238699 - DNA, 20 bp, synthetic construct
  source 1..20: mol_type = other DNA
ctccagcctgggcgacagag

SEQ ID NO: 238700 - DNA, 20 bp, synthetic construct
  source 1..20: mol_type = other DNA
actccagcctgggcgacaga

SEQ ID NO: 238701 - DNA, 20 bp, synthetic construct
  source 1..20: mol_type = other DNA
cactccagcctgggcgacag

SEQ ID NO: 238702 - DNA, 20 bp, synthetic construct
  source 1..20: mol_type = other DNA
acactccagcctgggcgaca

SEQ ID NO: 238703 - DNA, 20 bp, synthetic construct
  source 1..20: mol_type = other DNA
tacactccagcctgggcgac

SEQ ID NO: 238704 - DNA, 20 bp, synthetic construct
  source 1..20: mol_type = other DNA
ctacactccagcctgggcga

SEQ ID NO: 238705 - DNA, 20 bp, synthetic construct
  source 1..20: mol_type = other DNA
actacactccagcctgggcg

SEQ ID NO: 238706 - DNA, 20 bp, synthetic construct
  source 1..20: mol_type = other DNA
cactacactccagcctgggc

SEQ ID NO: 238707 - DNA, 20 bp, synthetic construct
  source 1..20: mol_type = other DNA
ccactacactccagcctggg

SEQ ID NO: 238708 - DNA, 20 bp, synthetic construct
  source 1..20: mol_type = other DNA
gccactacactccagcctgg

SEQ ID NO: 238709 - DNA, 20 bp, synthetic construct
  source 1..20: mol_type = other DNA
cgccactacactccagcctg

SEQ ID NO: 238710 - DNA, 20 bp, synthetic construct
  source 1..20: mol_type = other DNA
gcgccactacactccagcct

SEQ ID NO: 238711 - DNA, 20 bp, synthetic construct
  source 1..20: mol_type = other DNA
ggcgccactacactccagcc

SEQ ID NO: 238712 - DNA, 20 bp, synthetic construct
  source 1..20: mol_type = other DNA
tggcgccactacactccagc

SEQ ID NO: 238713 - DNA, 20 bp, synthetic construct
  source 1..20: mol_type = other DNA
atggcgccactacactccag

SEQ ID NO: 238714 - DNA, 20 bp, synthetic construct
  source 1..20: mol_type = other DNA
gatggcgccactacactcca

SEQ ID NO: 238715 - DNA, 20 bp, synthetic construct
  source 1..20: mol_type = other DNA
agatggcgccactacactcc

SEQ ID NO: 238716 - DNA, 20 bp, synthetic construct
  source 1..20: mol_type = other DNA
gagatggcgccactacactc

SEQ ID NO: 238717 - DNA, 20 bp, synthetic construct
  source 1..20: mol_type = other DNA
cgagatggcgccactacact

SEQ ID NO: 238718 - DNA, 20 bp, synthetic construct
  source 1..20: mol_type = other DNA
ccgagatggcgccactacac

SEQ ID NO: 238719 - DNA, 20 bp, synthetic construct
  source 1..20: mol_type = other DNA
gccgagatggcgccactaca

SEQ ID NO: 238720 - DNA, 20 bp, synthetic construct
  source 1..20: mol_type = other DNA
agccgagatggcgccactac

SEQ ID NO: 238721 - DNA, 20 bp, synthetic construct
  source 1..20: mol_type = other DNA
gagccgagatggcgccacta

SEQ ID NO: 238722 - DNA, 20 bp, synthetic construct
  source 1..20: mol_type = other DNA
tgagccgagatggcgccact

SEQ ID NO: 238723 - DNA, 20 bp, synthetic construct
  source 1..20: mol_type = other DNA
gtgagccgagatggcgccac

SEQ ID NO: 238724 - DNA, 20 bp, synthetic construct
  source 1..20: mol_type = other DNA
ggtgagccgagatggcgcca

SEQ ID NO: 238725 - DNA, 20 bp, synthetic construct
  source 1..20: mol_type = other DNA
cggtgagccgagatggcgcc

SEQ ID NO: 238726 - DNA, 20 bp, synthetic construct
  source 1..20: mol_type = other DNA
gcggtgagccgagatggcgc

SEQ ID NO: 238727 - DNA, 20 bp, synthetic construct
  source 1..20: mol_type = other DNA
tgcggtgagccgagatggcg

SEQ ID NO: 238728 - DNA, 20 bp, synthetic construct
  source 1..20: mol_type = other DNA
ttgcggtgagccgagatggc

SEQ ID NO: 238729 - DNA, 20 bp, synthetic construct
  source 1..20: mol_type = other DNA
gttgcggtgagccgagatgg

SEQ ID NO: 238730 - DNA, 20 bp, synthetic construct
  source 1..20: mol_type = other DNA
ggttgcggtgagccgagatg

SEQ ID NO: 238731 - DNA, 20 bp, synthetic construct
  source 1..20: mol_type = other DNA
aggttgcggtgagccgagat

SEQ ID NO: 238732 - DNA, 20 bp, synthetic construct
  source 1..20: mol_type = other DNA
caggttgcggtgagccgaga

SEQ ID NO: 238733 - DNA, 20 bp, synthetic construct
  source 1..20: mol_type = other DNA
gcaggttgcggtgagccgag

SEQ ID NO: 238734 - DNA, 20 bp, synthetic construct
  source 1..20: mol_type = other DNA
cgcaggttgcggtgagccga

SEQ ID NO: 238735 - DNA, 20 bp, synthetic construct
  source 1..20: mol_type = other DNA
gcgcaggttgcggtgagccg

SEQ ID NO: 238736 - DNA, 20 bp, synthetic construct
  source 1..20: mol_type = other DNA
ggcgcaggttgcggtgagcc

SEQ ID NO: 238737 - DNA, 20 bp, synthetic construct
  source 1..20: mol_type = other DNA
aggcgcaggttgcggtgagc

SEQ ID NO: 238738 - DNA, 20 bp, synthetic construct
  source 1..20: mol_type = other DNA
gaggcgcaggttgcggtgag

SEQ ID NO: 238739 - DNA, 20 bp, synthetic construct
  source 1..20: mol_type = other DNA
ggaggcgcaggttgcggtga

SEQ ID NO: 238740 - DNA, 20 bp, synthetic construct
  source 1..20: mol_type = other DNA
gggaggcgcaggttgcggtg

SEQ ID NO: 238741 - DNA, 20 bp, synthetic construct
  source 1..20: mol_type = other DNA
cgggaggcgcaggttgcggt

SEQ ID NO: 238742 - DNA, 20 bp, synthetic construct
  source 1..20: mol_type = other DNA
ccgggaggcgcaggttgcgg

SEQ ID NO: 238743 - DNA, 20 bp, synthetic construct
  source 1..20: mol_type = other DNA
cccgggaggcgcaggttgcg

SEQ ID NO: 238744 - DNA, 20 bp, synthetic construct
  source 1..20: mol_type = other DNA
acccgggaggcgcaggttgc

SEQ ID NO: 238745 - DNA, 20 bp, synthetic construct
  source 1..20: mol_type = other DNA
cacccgggaggcgcaggttg

SEQ ID NO: 238746 - DNA, 20 bp, synthetic construct
  source 1..20: mol_type = other DNA
gcacccgggaggcgcaggtt

SEQ ID NO: 238747 - DNA, 20 bp, synthetic construct
  source 1..20: mol_type = other DNA
tgcacccgggaggcgcaggt

SEQ ID NO: 238748 - DNA, 20 bp, synthetic construct
  source 1..20: mol_type = other DNA
ttgcacccgggaggcgcagg

SEQ ID NO: 238749 - DNA, 20 bp, synthetic construct
  source 1..20: mol_type = other DNA
cttgcacccgggaggcgcag

SEQ ID NO: 238750 - DNA, 20 bp, synthetic construct
  source 1..20: mol_type = other DNA
gcttgcacccgggaggcgca

SEQ ID NO: 238751 - DNA, 20 bp, synthetic construct
  source 1..20: mol_type = other DNA
cgcttgcacccgggaggcgc

SEQ ID NO: 238752 - DNA, 20 bp, synthetic construct
  source 1..20: mol_type = other DNA
tcgcttgcacccgggaggcg

SEQ ID NO: 238753 - DNA, 20 bp, synthetic construct
  source 1..20: mol_type = other DNA
atcgcttgcacccgggaggc

SEQ ID NO: 238754 - DNA, 20 bp, synthetic construct
  source 1..20: mol_type = other DNA
aatcgcttgcacccgggagg

SEQ ID NO: 238755 - DNA, 20 bp, synthetic construct
  source 1..20: mol_type = other DNA
gaatcgcttgcacccgggag

SEQ ID NO: 238756 - DNA, 20 bp, synthetic construct
  source 1..20: mol_type = other DNA
agaatcgcttgcacccggga

SEQ ID NO: 238757 - DNA, 20 bp, synthetic construct
  source 1..20: mol_type = other DNA
gagaatcgcttgcacccggg

SEQ ID NO: 238758 - DNA, 20 bp, synthetic construct
  source 1..20: mol_type = other DNA
ggagaatcgcttgcacccgg

SEQ ID NO: 238759 - DNA, 20 bp, synthetic construct
  source 1..20: mol_type = other DNA
aggagaatcgcttgcacccg

SEQ ID NO: 238760 - DNA, 20 bp, synthetic construct
  source 1..20: mol_type = other DNA
caggagaatcgcttgcaccc

SEQ ID NO: 238761 - DNA, 20 bp, synthetic construct
  source 1..20: mol_type = other DNA
gcaggagaatcgcttgcacc

SEQ ID NO: 238762 - DNA, 20 bp, synthetic construct
  source 1..20: mol_type = other DNA
ggcaggagaatcgcttgcac

SEQ ID NO: 238763 - DNA, 20 bp, synthetic construct
  source 1..20: mol_type = other DNA
aggcaggagaatcgcttgca

SEQ ID NO: 238764 - DNA, 20 bp, synthetic construct
  source 1..20: mol_type = other DNA
gaggcaggagaatcgcttgc

SEQ ID NO: 238765 - DNA, 20 bp, synthetic construct
  source 1..20: mol_type = other DNA
tgaggcaggagaatcgcttg

SEQ ID NO: 238766 - DNA, 20 bp, synthetic construct
  source 1..20: mol_type = other DNA
ctgaggcaggagaatcgctt

SEQ ID NO: 238767 - DNA, 20 bp, synthetic construct
  source 1..20: mol_type = other DNA
gctgaggcaggagaatcgct

SEQ ID NO: 238768 - DNA, 20 bp, synthetic construct
  source 1..20: mol_type = other DNA
ggctgaggcaggagaatcgc

SEQ ID NO: 238769 - DNA, 20 bp, synthetic construct
  source 1..20: mol_type = other DNA
aggctgaggcaggagaatcg

SEQ ID NO: 238770 - DNA, 20 bp, synthetic construct
  source 1..20: mol_type = other DNA
gaggctgaggcaggagaatc

SEQ ID NO: 238771 - DNA, 20 bp, synthetic construct
  source 1..20: mol_type = other DNA
ggaggctgaggcaggagaat

SEQ ID NO: 238772 - DNA, 20 bp, synthetic construct
  source 1..20: mol_type = other DNA
gggaggctgaggcaggagaa

SEQ ID NO: 238773 - DNA, 20 bp, synthetic construct
  source 1..20: mol_type = other DNA
tgggaggctgaggcaggaga

SEQ ID NO: 238774 - DNA, 20 bp, synthetic construct
  source 1..20: mol_type = other DNA
ttgggaggctgaggcaggag

SEQ ID NO: 238775 - DNA, 20 bp, synthetic construct
  source 1..20: mol_type = other DNA
cttgggaggctgaggcagga

SEQ ID NO: 238776 - DNA, 20 bp, synthetic construct
  source 1..20: mol_type = other DNA
acttgggaggctgaggcagg

SEQ ID NO: 238777 - DNA, 20 bp, synthetic construct
  source 1..20: mol_type = other DNA
tacttgggaggctgaggcag

SEQ ID NO: 238778 - DNA, 20 bp, synthetic construct
  source 1..20: mol_type = other DNA
ctacttgggaggctgaggca

SEQ ID NO: 238779 - DNA, 20 bp, synthetic construct
  source 1..20: mol_type = other DNA
gctacttgggaggctgaggc

SEQ ID NO: 238780 - DNA, 20 bp, synthetic construct
  source 1..20: mol_type = other DNA
agctacttgggaggctgagg

SEQ ID NO: 238781 - DNA, 20 bp, synthetic construct
  source 1..20: mol_type = other DNA
tagctacttgggaggctgag

SEQ ID NO: 238782 - DNA, 20 bp, synthetic construct
  source 1..20: mol_type = other DNA
ctagctacttgggaggctga

SEQ ID NO: 238783 - DNA, 20 bp, synthetic construct
  source 1..20: mol_type = other DNA
cctagctacttgggaggctg

SEQ ID NO: 238784 - DNA, 20 bp, synthetic construct
  source 1..20: mol_type = other DNA
tcctagctacttgggaggct

SEQ ID NO: 238785 - DNA, 20 bp, synthetic construct
  source 1..20: mol_type = other DNA
atcctagctacttgggaggc

SEQ ID NO: 238786 - DNA, 20 bp, synthetic construct
  source 1..20: mol_type = other DNA
aatcctagctacttgggagg

SEQ ID NO: 238787 - DNA, 20 bp, synthetic construct
  source 1..20: mol_type = other DNA
taatcctagctacttgggag

SEQ ID NO: 238788 - DNA, 20 bp, synthetic construct
  source 1..20: mol_type = other DNA
gtaatcctagctacttggga

SEQ ID NO: 238789 - DNA, 20 bp, synthetic construct
  source 1..20: mol_type = other DNA
tgtaatcctagctacttggg

SEQ ID NO: 238790 - DNA, 20 bp, synthetic construct
  source 1..20: mol_type = other DNA
ctgtaatcctagctacttgg

SEQ ID NO: 238791 - DNA, 20 bp, synthetic construct
  source 1..20: mol_type = other DNA
cctgtaatcctagctacttg

SEQ ID NO: 238792 - DNA, 20 bp, synthetic construct
  source 1..20: mol_type = other DNA
gcctgtaatcctagctactt

SEQ ID NO: 238793 - DNA, 20 bp, synthetic construct
  source 1..20: mol_type = other DNA
cgcctgtaatcctagctact

SEQ ID NO: 238794 - DNA, 20 bp, synthetic construct
  source 1..20: mol_type = other DNA
gcgcctgtaatcctagctac

SEQ ID NO: 238795 - DNA, 20 bp, synthetic construct
  source 1..20: mol_type = other DNA
ggcgcctgtaatcctagcta

SEQ ID NO: 238796 - DNA, 20 bp, synthetic construct
  source 1..20: mol_type = other DNA
aggcgcctgtaatcctagct

SEQ ID NO: 238797 - DNA, 20 bp, synthetic construct
  source 1..20: mol_type = other DNA
taggcgcctgtaatcctagc

SEQ ID NO: 238798 - DNA, 20 bp, synthetic construct
  source 1..20: mol_type = other DNA
gtaggcgcctgtaatcctag

SEQ ID NO: 238799 - DNA, 20 bp, synthetic construct
  source 1..20: mol_type = other DNA
ggtaggcgcctgtaatccta

SEQ ID NO: 238800 - DNA, 20 bp, synthetic construct
  source 1..20: mol_type = other DNA
tggtaggcgcctgtaatcct

SEQ ID NO: 238801 - DNA, 20 bp, synthetic construct
  source 1..20: mol_type = other DNA
gtggtaggcgcctgtaatcc

SEQ ID NO: 238802 - DNA, 20 bp, synthetic construct
  source 1..20: mol_type = other DNA
ggtggtaggcgcctgtaatc

SEQ ID NO: 238803 - DNA, 20 bp, synthetic construct
  source 1..20: mol_type = other DNA
tggtggtaggcgcctgtaat

SEQ ID NO: 238804 - DNA, 20 bp, synthetic construct
  source 1..20: mol_type = other DNA
gtggtggtaggcgcctgtaa

SEQ ID NO: 238805 - DNA, 20 bp, synthetic construct
  source 1..20: mol_type = other DNA
cgtggtggtaggcgcctgta

SEQ ID NO: 238806 - DNA, 20 bp, synthetic construct
  source 1..20: mol_type = other DNA
gcgtggtggtaggcgcctgt

SEQ ID NO: 238807 - DNA, 20 bp, synthetic construct
  source 1..20: mol_type = other DNA
ggcgtggtggtaggcgcctg

SEQ ID NO: 238808 - DNA, 20 bp, synthetic construct
  source 1..20: mol_type = other DNA
aggcgtggtggtaggcgcct

SEQ ID NO: 238809 - DNA, 20 bp, synthetic construct
  source 1..20: mol_type = other DNA
caggcgtggtggtaggcgcc

SEQ ID NO: 238810 - DNA, 20 bp, synthetic construct
  source 1..20: mol_type = other DNA
ccaggcgtggtggtaggcgc

SEQ ID NO: 238811 - DNA, 20 bp, synthetic construct
  source 1..20: mol_type = other DNA
gccaggcgtggtggtaggcg

SEQ ID NO: 238812 - DNA, 20 bp, synthetic construct
  source 1..20: mol_type = other DNA
ggccaggcgtggtggtaggc

SEQ ID NO: 238813 - DNA, 20 bp, synthetic construct
  source 1..20: mol_type = other DNA
tggccaggcgtggtggtagg

SEQ ID NO: 238814 - DNA, 20 bp, synthetic construct
  source 1..20: mol_type = other DNA
ctggccaggcgtggtggtag

SEQ ID NO: 238815 - DNA, 20 bp, synthetic construct
  source 1..20: mol_type = other DNA
actggccaggcgtggtggta

SEQ ID NO: 238816 - DNA, 20 bp, synthetic construct
  source 1..20: mol_type = other DNA
aactggccaggcgtggtggt

SEQ ID NO: 238817 - DNA, 20 bp, synthetic construct
  source 1..20: mol_type = other DNA
gaactggccaggcgtggtgg

SEQ ID NO: 238818 - DNA, 20 bp, synthetic construct
  source 1..20: mol_type = other DNA
agaactggccaggcgtggtg

SEQ ID NO: 238819 - DNA, 20 bp, synthetic construct
  source 1..20: mol_type = other DNA
aagaactggccaggcgtggt

SEQ ID NO: 238820 - DNA, 20 bp, synthetic construct
  source 1..20: mol_type = other DNA
caagaactggccaggcgtgg

SEQ ID NO: 238821 - DNA, 20 bp, synthetic construct
  source 1..20: mol_type = other DNA
acaagaactggccaggcgtg

SEQ ID NO: 238822 - DNA, 20 bp, synthetic construct
  source 1..20: mol_type = other DNA
tacaagaactggccaggcgt

SEQ ID NO: 238823 - DNA, 20 bp, synthetic construct
  source 1..20: mol_type = other DNA
atacaagaactggccaggcg

SEQ ID NO: 238824 - DNA, 20 bp, synthetic construct
  source 1..20: mol_type = other DNA
aatacaagaactggccaggc

SEQ ID NO: 238825 - DNA, 20 bp, synthetic construct
  source 1..20: mol_type = other DNA
aaatacaagaactggccagg

SEQ ID NO: 238826 - DNA, 20 bp, synthetic construct
  source 1..20: mol_type = other DNA
aaaatacaagaactggccag

SEQ ID NO: 238827 - DNA, 20 bp, synthetic construct
  source 1..20: mol_type = other DNA
aaaaatacaagaactggcca

SEQ ID NO: 238828 - DNA, 20 bp, synthetic construct
  source 1..20: mol_type = other DNA
taaaaatacaagaactggcc

SEQ ID NO: 238829 - DNA, 20 bp, synthetic construct
  source 1..20: mol_type = other DNA
ctaaaaatacaagaactggc

SEQ ID NO: 238830 - DNA, 20 bp, synthetic construct
  source 1..20: mol_type = other DNA
tctaaaaatacaagaactgg

SEQ ID NO: 238831 - DNA, 20 bp, synthetic construct
  source 1..20: mol_type = other DNA
ttctaaaaatacaagaactg

SEQ ID NO: 238832 - DNA, 20 bp, synthetic construct
  source 1..20: mol_type = other DNA
cttctaaaaatacaagaact

SEQ ID NO: 238833 - DNA, 20 bp, synthetic construct
  source 1..20: mol_type = other DNA
tcttctaaaaatacaagaac

SEQ ID NO: 238834 - DNA, 20 bp, synthetic construct
  source 1..20: mol_type = other DNA
ctcttctaaaaatacaagaa

SEQ ID NO: 238835 - DNA, 20 bp, synthetic construct
  source 1..20: mol_type = other DNA
tctcttctaaaaatacaaga

SEQ ID NO: 238836 - DNA, 20 bp, synthetic construct
  source 1..20: mol_type = other DNA
gtctcttctaaaaatacaag

SEQ ID NO: 238837 - DNA, 20 bp, synthetic construct
  source 1..20: mol_type = other DNA
cgtctcttctaaaaatacaa

SEQ ID NO: 238838 - DNA, 20 bp, synthetic construct
  source 1..20: mol_type = other DNA
ccgtctcttctaaaaataca

SEQ ID NO: 238839 - DNA, 20 bp, synthetic construct
  source 1..20: mol_type = other DNA
cccgtctcttctaaaaatac

SEQ ID NO: 238840 - DNA, 20 bp, synthetic construct
  source 1..20: mol_type = other DNA
ccccgtctcttctaaaaata

SEQ ID NO: 238841 - DNA, 20 bp, synthetic construct
  source 1..20: mol_type = other DNA
accccgtctcttctaaaaat

SEQ ID NO: 238842 - DNA, 20 bp, synthetic construct
  source 1..20: mol_type = other DNA
aaccccgtctcttctaaaaa

SEQ ID NO: 238843 - DNA, 20 bp, synthetic construct
  source 1..20: mol_type = other DNA
aaaccccgtctcttctaaaa

SEQ ID NO: 238844 - DNA, 20 bp, synthetic construct
  source 1..20: mol_type = other DNA
gaaaccccgtctcttctaaa

SEQ ID NO: 238845 - DNA, 20 bp, synthetic construct
  source 1..20: mol_type = other DNA
tgaaaccccgtctcttctaa

SEQ ID NO: 238846 - DNA, 20 bp, synthetic construct
  source 1..20: mol_type = other DNA
gtgaaaccccgtctcttcta

SEQ ID NO: 238847 - DNA, 20 bp, synthetic construct
  source 1..20: mol_type = other DNA
ggtgaaaccccgtctcttct

SEQ ID NO: 238848 - DNA, 20 bp, synthetic construct
  source 1..20: mol_type = other DNA
gggtgaaaccccgtctcttc

SEQ ID NO: 238849 - DNA, 20 bp, synthetic construct
  source 1..20: mol_type = other DNA
agggtgaaaccccgtctctt

SEQ ID NO: 238850 - DNA, 20 bp, synthetic construct
  source 1..20: mol_type = other DNA
cagggtgaaaccccgtctct

SEQ ID NO: 238851 - DNA, 20 bp, synthetic construct
  source 1..20: mol_type = other DNA
acagggtgaaaccccgtctc

SEQ ID NO: 238852 - DNA, 20 bp, synthetic construct
  source 1..20: mol_type = other DNA
aacagggtgaaaccccgtct

SEQ ID NO: 238853 - DNA, 20 bp, synthetic construct
  source 1..20: mol_type = other DNA
caacagggtgaaaccccgtc

SEQ ID NO: 238854 - DNA, 20 bp, synthetic construct
  source 1..20: mol_type = other DNA
ccaacagggtgaaaccccgt

SEQ ID NO: 238855 - DNA, 20 bp, synthetic construct
  source 1..20: mol_type = other DNA
gccaacagggtgaaaccccg

SEQ ID NO: 238856 - DNA, 20 bp, synthetic construct
  source 1..20: mol_type = other DNA
ggccaacagggtgaaacccc

SEQ ID NO: 238857 - DNA, 20 bp, synthetic construct
  source 1..20: mol_type = other DNA
tggccaacagggtgaaaccc

SEQ ID NO: 238858 - DNA, 20 bp, synthetic construct
  source 1..20: mol_type = other DNA
ctggccaacagggtgaaacc

SEQ ID NO: 238859 - DNA, 20 bp, synthetic construct
  source 1..20: mol_type = other DNA
cctggccaacagggtgaaac

SEQ ID NO: 238860 - DNA, 20 bp, synthetic construct
  source 1..20: mol_type = other DNA
gcctggccaacagggtgaaa

SEQ ID NO: 238861 - DNA, 20 bp, synthetic construct
  source 1..20: mol_type = other DNA
agcctggccaacagggtgaa

SEQ ID NO: 238862 - DNA, 20 bp, synthetic construct
  source 1..20: mol_type = other DNA
gagcctggccaacagggtga

SEQ ID NO: 238863 - DNA, 20 bp, synthetic construct
  source 1..20: mol_type = other DNA
cgagcctggccaacagggtg

SEQ ID NO: 238864 - DNA, 20 bp, synthetic construct
  source 1..20: mol_type = other DNA
acgagcctggccaacagggt

SEQ ID NO: 238865 - DNA, 20 bp, synthetic construct
  source 1..20: mol_type = other DNA
gacgagcctggccaacaggg

SEQ ID NO: 238866 - DNA, 20 bp, synthetic construct
  source 1..20: mol_type = other DNA
agacgagcctggccaacagg

SEQ ID NO: 238867 - DNA, 20 bp, synthetic construct
  source 1..20: mol_type = other DNA
cagacgagcctggccaacag

SEQ ID NO: 238868 - DNA, 20 bp, synthetic construct
  source 1..20: mol_type = other DNA
ccagacgagcctggccaaca

SEQ ID NO: 238869 - DNA, 20 bp, synthetic construct
  source 1..20: mol_type = other DNA
cccagacgagcctggccaac

SEQ ID NO: 238870 - DNA, 20 bp, synthetic construct
  source 1..20: mol_type = other DNA
tcccagacgagcctggccaa

SEQ ID NO: 238871 - DNA, 20 bp, synthetic construct
  source 1..20: mol_type = other DNA
gtcccagacgagcctggcca

SEQ ID NO: 238872 - DNA, 20 bp, synthetic construct
  source 1..20: mol_type = other DNA
agtcccagacgagcctggcc

SEQ ID NO: 238873 - DNA, 20 bp, synthetic construct
  source 1..20: mol_type = other DNA
gagtcccagacgagcctggc

SEQ ID NO: 238874 - DNA, 20 bp, synthetic construct
  source 1..20: mol_type = other DNA
ggagtcccagacgagcctgg

SEQ ID NO: 238875 - DNA, 20 bp, synthetic construct
  source 1..20: mol_type = other DNA
aggagtcccagacgagcctg

SEQ ID NO: 238876 - DNA, 20 bp, synthetic construct
  source 1..20: mol_type = other DNA
caggagtcccagacgagcct

SEQ ID NO: 238877 - DNA, 20 bp, synthetic construct
  source 1..20: mol_type = other DNA
tcaggagtcccagacgagcc

SEQ ID NO: 238878 - DNA, 20 bp, synthetic construct
  source 1..20: mol_type = other DNA
gtcaggagtcccagacgagc

SEQ ID NO: 238879 - DNA, 20 bp, synthetic construct
  source 1..20: mol_type = other DNA
ggtcaggagtcccagacgag

SEQ ID NO: 238880 - DNA, 20 bp, synthetic construct
  source 1..20: mol_type = other DNA
aggtcaggagtcccagacga

SEQ ID NO: 238881 - DNA, 20 bp, synthetic construct
  source 1..20: mol_type = other DNA
gaggtcaggagtcccagacg

SEQ ID NO: 238882 - DNA, 20 bp, synthetic construct
  source 1..20: mol_type = other DNA
tgaggtcaggagtcccagac

SEQ ID NO: 238883 - DNA, 20 bp, synthetic construct
  source 1..20: mol_type = other DNA
ctgaggtcaggagtcccaga

SEQ ID NO: 238884 - DNA, 20 bp, synthetic construct
  source 1..20: mol_type = other DNA
cctgaggtcaggagtcccag

SEQ ID NO: 238885 - DNA, 20 bp, synthetic construct
  source 1..20: mol_type = other DNA
acctgaggtcaggagtccca

SEQ ID NO: 238886 - DNA, 20 bp, synthetic construct
  source 1..20: mol_type = other DNA
tacctgaggtcaggagtccc

SEQ ID NO: 238887 - DNA, 20 bp, synthetic construct
  source 1..20: mol_type = other DNA
ttacctgaggtcaggagtcc

SEQ ID NO: 238888 - DNA, 20 bp, synthetic construct
  source 1..20: mol_type = other DNA
attacctgaggtcaggagtc

SEQ ID NO: 238889 - DNA, 20 bp, synthetic construct
  source 1..20: mol_type = other DNA
gattacctgaggtcaggagt

SEQ ID NO: 238890 - DNA, 20 bp, synthetic construct
  source 1..20: mol_type = other DNA
ggattacctgaggtcaggag

SEQ ID NO: 238891 - DNA, 20 bp, synthetic construct
  source 1..20: mol_type = other DNA
cggattacctgaggtcagga

SEQ ID NO: 238892 - DNA, 20 bp, synthetic construct
  source 1..20: mol_type = other DNA
gcggattacctgaggtcagg

SEQ ID NO: 238893 - DNA, 20 bp, synthetic construct
  source 1..20: mol_type = other DNA
ggcggattacctgaggtcag

SEQ ID NO: 238894 - DNA, 20 bp, synthetic construct
  source 1..20: mol_type = other DNA
gggcggattacctgaggtca

SEQ ID NO: 238895 - DNA, 20 bp, synthetic construct
  source 1..20: mol_type = other DNA
tgggcggattacctgaggtc

SEQ ID NO: 238896 - DNA, 20 bp, synthetic construct
  source 1..20: mol_type = other DNA
gtgggcggattacctgaggt

SEQ ID NO: 238897 - DNA, 20 bp, synthetic construct
  source 1..20: mol_type = other DNA
ggtgggcggattacctgagg

SEQ ID NO: 238898 - DNA, 20 bp, synthetic construct
  source 1..20: mol_type = other DNA
aggtgggcggattacctgag

SEQ ID NO: 238899 - DNA, 20 bp, synthetic construct
  source 1..20: mol_type = other DNA
gaggtgggcggattacctga

SEQ ID NO: 238900 - DNA, 20 bp, synthetic construct
  source 1..20: mol_type = other DNA
tgaggtgggcggattacctg

SEQ ID NO: 238901 - DNA, 20 bp, synthetic construct
  source 1..20: mol_type = other DNA
ctgaggtgggcggattacct

SEQ ID NO: 238902 - DNA, 20 bp, synthetic construct
  source 1..20: mol_type = other DNA
gctgaggtgggcggattacc

SEQ ID NO: 238903 - DNA, 20 bp, synthetic construct
  source 1..20: mol_type = other DNA
ggctgaggtgggcggattac

SEQ ID NO: 238904 - DNA, 20 bp, synthetic construct
  source 1..20: mol_type = other DNA
aggctgaggtgggcggatta

SEQ ID NO: 238905 - DNA, 20 bp, synthetic construct
  source 1..20: mol_type = other DNA
gaggctgaggtgggcggatt

SEQ ID NO: 238906 - DNA, 20 bp, synthetic construct
  source 1..20: mol_type = other DNA
ggaggctgaggtgggcggat

SEQ ID NO: 238907 - DNA, 20 bp, synthetic construct
  source 1..20: mol_type = other DNA
gggaggctgaggtgggcgga

SEQ ID NO: 238908 - DNA, 20 bp, synthetic construct
  source 1..20: mol_type = other DNA
tgggaggctgaggtgggcgg

SEQ ID NO: 238909 - DNA, 20 bp, synthetic construct
  source 1..20: mol_type = other DNA
ttgggaggctgaggtgggcg

SEQ ID NO: 238910 - DNA, 20 bp, synthetic construct
  source 1..20: mol_type = other DNA
tttgggaggctgaggtgggc

SEQ ID NO: 238911 - DNA, 20 bp, synthetic construct
  source 1..20: mol_type = other DNA
ctttgggaggctgaggtggg

SEQ ID NO: 238912 - DNA, 20 bp, synthetic construct
  source 1..20: mol_type = other DNA
actttgggaggctgaggtgg

SEQ ID NO: 238913 - DNA, 20 bp, synthetic construct
  source 1..20: mol_type = other DNA
cactttgggaggctgaggtg

SEQ ID NO: 238914 - DNA, 20 bp, synthetic construct
  source 1..20: mol_type = other DNA
gcactttgggaggctgaggt

SEQ ID NO: 238915 - DNA, 20 bp, synthetic construct
  source 1..20: mol_type = other DNA
agcactttgggaggctgagg

SEQ ID NO: 238916 - DNA, 20 bp, synthetic construct
  source 1..20: mol_type = other DNA
cagcactttgggaggctgag

SEQ ID NO: 238917 - DNA, 20 bp, synthetic construct
  source 1..20: mol_type = other DNA
ccagcactttgggaggctga

SEQ ID NO: 238918 - DNA, 20 bp, synthetic construct
  source 1..20: mol_type = other DNA
cccagcactttgggaggctg

SEQ ID NO: 238919 - DNA, 20 bp, synthetic construct
  source 1..20: mol_type = other DNA
tcccagcactttgggaggct

SEQ ID NO: 238920 - DNA, 20 bp, synthetic construct
  source 1..20: mol_type = other DNA
atcccagcactttgggaggc

SEQ ID NO: 238921 - DNA, 20 bp, synthetic construct
  source 1..20: mol_type = other DNA
aatcccagcactttgggagg

SEQ ID NO: 238922 - DNA, 20 bp, synthetic construct
  source 1..20: mol_type = other DNA
caatcccagcactttgggag

SEQ ID NO: 238923 - DNA, 20 bp, synthetic construct
  source 1..20: mol_type = other DNA
gcaatcccagcactttggga

SEQ ID NO: 238924 - DNA, 20 bp, synthetic construct
  source 1..20: mol_type = other DNA
tgcaatcccagcactttggg

SEQ ID NO: 238925 - DNA, 20 bp, synthetic construct
  source 1..20: mol_type = other DNA
ctgcaatcccagcactttgg

SEQ ID NO: 238926 - DNA, 20 bp, synthetic construct
  source 1..20: mol_type = other DNA
cctgcaatcccagcactttg

SEQ ID NO: 238927 - DNA, 20 bp, synthetic construct
  source 1..20: mol_type = other DNA
gcctgcaatcccagcacttt

SEQ ID NO: 238928 - DNA, 20 bp, synthetic construct
  source 1..20: mol_type = other DNA
tgcctgcaatcccagcactt

SEQ ID NO: 238929 - DNA, 20 bp, synthetic construct
  source 1..20: mol_type = other DNA
atgcctgcaatcccagcact

SEQ ID NO: 238930 - DNA, 20 bp, synthetic construct
  source 1..20: mol_type = other DNA
catgcctgcaatcccagcac

SEQ ID NO: 238931 - DNA, 20 bp, synthetic construct
  source 1..20: mol_type = other DNA
tcatgcctgcaatcccagca

SEQ ID NO: 238932 - DNA, 20 bp, synthetic construct
  source 1..20: mol_type = other DNA
ctcatgcctgcaatcccagc

SEQ ID NO: 238933 - DNA, 20 bp, synthetic construct
  source 1..20: mol_type = other DNA
gctcatgcctgcaatcccag

SEQ ID NO: 238934 - DNA, 20 bp, synthetic construct
  source 1..20: mol_type = other DNA
ggctcatgcctgcaatccca

SEQ ID NO: 238935 - DNA, 20 bp, synthetic construct
  source 1..20: mol_type = other DNA
tggctcatgcctgcaatccc

SEQ ID NO: 238936 - DNA, 20 bp, synthetic construct
  source 1..20: mol_type = other DNA
gtggctcatgcctgcaatcc

SEQ ID NO: 238937 - DNA, 20 bp, synthetic construct
  source 1..20: mol_type = other DNA
ggtggctcatgcctgcaatc

SEQ ID NO: 238938 - DNA, 20 bp, synthetic construct
  source 1..20: mol_type = other DNA
cggtggctcatgcctgcaat

SEQ ID NO: 238939 - DNA, 20 bp, synthetic construct
  source 1..20: mol_type = other DNA
acggtggctcatgcctgcaa

SEQ ID NO: 238940 - DNA, 20 bp, synthetic construct
  source 1..20: mol_type = other DNA
cacggtggctcatgcctgca

SEQ ID NO: 238941 - DNA, 20 bp, synthetic construct
  source 1..20: mol_type = other DNA
gcacggtggctcatgcctgc

SEQ ID NO: 238942 - DNA, 20 bp, synthetic construct
  source 1..20: mol_type = other DNA
ggcacggtggctcatgcctg

SEQ ID NO: 238943 - DNA, 20 bp, synthetic construct
  source 1..20: mol_type = other DNA
gggcacggtggctcatgcct

SEQ ID NO: 238944 - DNA, 20 bp, synthetic construct
  source 1..20: mol_type = other DNA
tgggcacggtggctcatgcc

SEQ ID NO: 238945 - DNA, 20 bp, synthetic construct
  source 1..20: mol_type = other DNA
ctgggcacggtggctcatgc

SEQ ID NO: 238946 - DNA, 20 bp, synthetic construct
  source 1..20: mol_type = other DNA
actgggcacggtggctcatg

SEQ ID NO: 238947 - DNA, 20 bp, synthetic construct
  source 1..20: mol_type = other DNA
gactgggcacggtggctcat

SEQ ID NO: 238948 - DNA, 20 bp, synthetic construct
  source 1..20: mol_type = other DNA
tgactgggcacggtggctca

SEQ ID NO: 238949 - DNA, 20 bp, synthetic construct
  source 1..20: mol_type = other DNA
ttgactgggcacggtggctc

SEQ ID NO: 238950 - DNA, 20 bp, synthetic construct
  source 1..20: mol_type = other DNA
gttgactgggcacggtggct

SEQ ID NO: 238951 - DNA, 20 bp, synthetic construct
  source 1..20: mol_type = other DNA
agttgactgggcacggtggc

SEQ ID NO: 238952 - DNA, 20 bp, synthetic construct
  source 1..20: mol_type = other DNA
gagttgactgggcacggtgg

SEQ ID NO: 238953 - DNA, 20 bp, synthetic construct
  source 1..20: mol_type = other DNA
ggagttgactgggcacggtg

SEQ ID NO: 238954 - DNA, 20 bp, synthetic construct
  source 1..20: mol_type = other DNA
aggagttgactgggcacggt

SEQ ID NO: 238955 - DNA, 20 bp, synthetic construct
  source 1..20: mol_type = other DNA
aaggagttgactgggcacgg

SEQ ID NO: 238956 - DNA, 20 bp, synthetic construct
  source 1..20: mol_type = other DNA
gaaggagttgactgggcacg

SEQ ID NO: 238957 - DNA, 20 bp, synthetic construct
  source 1..20: mol_type = other DNA
agaaggagttgactgggcac

SEQ ID NO: 238958 - DNA, 20 bp, synthetic construct
  source 1..20: mol_type = other DNA
gagaaggagttgactgggca

SEQ ID NO: 238959 - DNA, 20 bp, synthetic construct
  source 1..20: mol_type = other DNA
tgagaaggagttgactgggc

SEQ ID NO: 238960 - DNA, 20 bp, synthetic construct
  source 1..20: mol_type = other DNA
ttgagaaggagttgactggg

SEQ ID NO: 238961 - DNA, 20 bp, synthetic construct
  source 1..20: mol_type = other DNA
tttgagaaggagttgactgg

SEQ ID NO: 238962 - DNA, 20 bp, synthetic construct
  source 1..20: mol_type = other DNA
ttttgagaaggagttgactg

SEQ ID NO: 238963 - DNA, 20 bp, synthetic construct
  source 1..20: mol_type = other DNA
tttttgagaaggagttgact

SEQ ID NO: 238964 - DNA, 20 bp, synthetic construct
  source 1..20: mol_type = other DNA
ttttttgagaaggagttgac

SEQ ID NO: 238965 - DNA, 20 bp, synthetic construct
  source 1..20: mol_type = other DNA
tttttttgagaaggagttga

SEQ ID NO: 238966 - DNA, 20 bp, synthetic construct
  source 1..20: mol_type = other DNA
ttttttttgagaaggagttg

SEQ ID NO: 238967 - DNA, 20 bp, synthetic construct
  source 1..20: mol_type = other DNA
tttttttttgagaaggagtt

SEQ ID NO: 238968 - DNA, 20 bp, synthetic construct
  source 1..20: mol_type = other DNA
ttttttttttgagaaggagt

SEQ ID NO: 238969 - DNA, 20 bp, synthetic construct
  source 1..20: mol_type = other DNA
tttttttttttgagaaggag

SEQ ID NO: 238970 - DNA, 20 bp, synthetic construct
  source 1..20: mol_type = other DNA
ttttttttttttgagaagga

SEQ ID NO: 238971 - DNA, 20 bp, synthetic construct
  source 1..20: mol_type = other DNA
tttttttttttttgagaagg

SEQ ID NO: 238972 - DNA, 20 bp, synthetic construct
  source 1..20: mol_type = other DNA
atttttttttttttgagaag

SEQ ID NO: 238973 - DNA, 20 bp, synthetic construct
  source 1..20: mol_type = other DNA
tatttttttttttttgagaa

SEQ ID NO: 238974 - DNA, 20 bp, synthetic construct
  source 1..20: mol_type = other DNA
ctatttttttttttttgaga

SEQ ID NO: 238975 - DNA, 20 bp, synthetic construct
  source 1..20: mol_type = other DNA
actatttttttttttttgag

SEQ ID NO: 238976 - DNA, 20 bp, synthetic construct
  source 1..20: mol_type = other DNA
cactatttttttttttttga

SEQ ID NO: 238977 - DNA, 20 bp, synthetic construct
  source 1..20: mol_type = other DNA
gcactatttttttttttttg

SEQ ID NO: 238978 - DNA, 20 bp, synthetic construct
  source 1..20: mol_type = other DNA
agcactattttttttttttt

SEQ ID NO: 238979 - DNA, 20 bp, synthetic construct
  source 1..20: mol_type = other DNA
cagcactatttttttttttt

SEQ ID NO: 238980 - DNA, 20 bp, synthetic construct
  source 1..20: mol_type = other DNA
gcagcactattttttttttt

SEQ ID NO: 238981 - DNA, 20 bp, synthetic construct
  source 1..20: mol_type = other DNA
agcagcactatttttttttt

SEQ ID NO: 238982 - DNA, 20 bp, synthetic construct
  source 1..20: mol_type = other DNA
aagcagcactattttttttt

SEQ ID NO: 238983 - DNA, 20 bp, synthetic construct
  source 1..20: mol_type = other DNA
aaagcagcactatttttttt

SEQ ID NO: 238984 - DNA, 20 bp, synthetic construct
  source 1..20: mol_type = other DNA
gaaagcagcactattttttt

SEQ ID NO: 238985 - DNA, 20 bp, synthetic construct
  source 1..20: mol_type = other DNA
agaaagcagcactatttttt

SEQ ID NO: 238986 - DNA, 20 bp, synthetic construct
  source 1..20: mol_type = other DNA
gagaaagcagcactattttt

SEQ ID NO: 238987 - DNA, 20 bp, synthetic construct
  source 1..20: mol_type = other DNA
agagaaagcagcactatttt

SEQ ID NO: 238988 - DNA, 20 bp, synthetic construct
  source 1..20: mol_type = other DNA
aagagaaagcagcactattt

SEQ ID NO: 238989 - DNA, 20 bp, synthetic construct
  source 1..20: mol_type = other DNA
aaagagaaagcagcactatt

SEQ ID NO: 238990 - DNA, 20 bp, synthetic construct
  source 1..20: mol_type = other DNA
gaaagagaaagcagcactat

SEQ ID NO: 238991 - DNA, 20 bp, synthetic construct
  source 1..20: mol_type = other DNA
tgaaagagaaagcagcacta

SEQ ID NO: 238992 - DNA, 20 bp, synthetic construct
  source 1..20: mol_type = other DNA
ttgaaagagaaagcagcact

SEQ ID NO: 238993 - DNA, 20 bp, synthetic construct
  source 1..20: mol_type = other DNA
cttgaaagagaaagcagcac

SEQ ID NO: 238994 - DNA, 20 bp, synthetic construct
  source 1..20: mol_type = other DNA
acttgaaagagaaagcagca

SEQ ID NO: 238995 - DNA, 20 bp, synthetic construct
  source 1..20: mol_type = other DNA
cacttgaaagagaaagcagc

SEQ ID NO: 238996 - DNA, 20 bp, synthetic construct
  source 1..20: mol_type = other DNA
acacttgaaagagaaagcag

SEQ ID NO: 238997 - DNA, 20 bp, synthetic construct
  source 1..20: mol_type = other DNA
gacacttgaaagagaaagca

SEQ ID NO: 238998 - DNA, 20 bp, synthetic construct
  source 1..20: mol_type = other DNA
ggacacttgaaagagaaagc

SEQ ID NO: 238999 - DNA, 20 bp, synthetic construct
  source 1..20: mol_type = other DNA
aggacacttgaaagagaaag

SEQ ID NO: 239000 - DNA, 20 bp, synthetic construct
  source 1..20: mol_type = other DNA
caggacacttgaaagagaaa

SEQ ID NO: 239001 - DNA, 20 bp, synthetic construct
  source 1..20: mol_type = other DNA
tcaggacacttgaaagagaa

SEQ ID NO: 239002 - DNA, 20 bp, synthetic construct
  source 1..20: mol_type = other DNA
atcaggacacttgaaagaga

SEQ ID NO: 239003 - DNA, 20 bp, synthetic construct
  source 1..20: mol_type = other DNA
aatcaggacacttgaaagag

SEQ ID NO: 239004 - DNA, 20 bp, synthetic construct
  source 1..20: mol_type = other DNA
aaatcaggacacttgaaaga

SEQ ID NO: 239005 - DNA, 20 bp, synthetic construct
  source 1..20: mol_type = other DNA
caaatcaggacacttgaaag

SEQ ID NO: 239006 - DNA, 20 bp, synthetic construct
  source 1..20: mol_type = other DNA
ccaaatcaggacacttgaaa

SEQ ID NO: 239007 - DNA, 20 bp, synthetic construct
  source 1..20: mol_type = other DNA
cccaaatcaggacacttgaa

SEQ ID NO: 239008 - DNA, 20 bp, synthetic construct
  source 1..20: mol_type = other DNA
acccaaatcaggacacttga

SEQ ID NO: 239009 - DNA, 20 bp, synthetic construct
  source 1..20: mol_type = other DNA
cacccaaatcaggacacttg

SEQ ID NO: 239010 - DNA, 20 bp, synthetic construct
  source 1..20: mol_type = other DNA
tcacccaaatcaggacactt

SEQ ID NO: 239011 - DNA, 20 bp, synthetic construct
  source 1..20: mol_type = other DNA
atcacccaaatcaggacact

SEQ ID NO: 239012 - DNA, 20 bp, synthetic construct
  source 1..20: mol_type = other DNA
tatcacccaaatcaggacac

SEQ ID NO: 239013 - DNA, 20 bp, synthetic construct
  source 1..20: mol_type = other DNA
ctatcacccaaatcaggaca

SEQ ID NO: 239014 - DNA, 20 bp, synthetic construct
  source 1..20: mol_type = other DNA
actatcacccaaatcaggac

SEQ ID NO: 239015 - DNA, 20 bp, synthetic construct
  source 1..20: mol_type = other DNA
tactatcacccaaatcagga

SEQ ID NO: 239016 - DNA, 20 bp, synthetic construct
  source 1..20: mol_type = other DNA
ttactatcacccaaatcagg

SEQ ID NO: 239017 - DNA, 20 bp, synthetic construct
  source 1..20: mol_type = other DNA
tttactatcacccaaatcag

SEQ ID NO: 239018 - DNA, 20 bp, synthetic construct
  source 1..20: mol_type = other DNA
atttactatcacccaaatca

SEQ ID NO: 239019 - DNA, 20 bp, synthetic construct
  source 1..20: mol_type = other DNA
catttactatcacccaaatc

SEQ ID NO: 239020 - DNA, 20 bp, synthetic construct
  source 1..20: mol_type = other DNA
gcatttactatcacccaaat

SEQ ID NO: 239021 - DNA, 20 bp, synthetic construct
  source 1..20: mol_type = other DNA
ggcatttactatcacccaaa

SEQ ID NO: 239022 - DNA, 20 bp, synthetic construct
  source 1..20: mol_type = other DNA
tggcatttactatcacccaa

SEQ ID NO: 239023 - DNA, 20 bp, synthetic construct
  source 1..20: mol_type = other DNA
gtggcatttactatcaccca

SEQ ID NO: 239024 - DNA, 20 bp, synthetic construct
  source 1..20: mol_type = other DNA
agtggcatttactatcaccc

SEQ ID NO: 239025 - DNA, 20 bp, synthetic construct
  source 1..20: mol_type = other DNA
gagtggcatttactatcacc

SEQ ID NO: 239026 - DNA, 20 bp, synthetic construct
  source 1..20: mol_type = other DNA
agagtggcatttactatcac

SEQ ID NO: 239027 - DNA, 20 bp, synthetic construct
  source 1..20: mol_type = other DNA
tagagtggcatttactatca

SEQ ID NO: 239028 - DNA, 20 bp, synthetic construct
  source 1..20: mol_type = other DNA
gtagagtggcatttactatc

SEQ ID NO: 239029 - DNA, 20 bp, synthetic construct
  source 1..20: mol_type = other DNA
agtagagtggcatttactat

SEQ ID NO: 239030 - DNA, 20 bp, synthetic construct
  source 1..20: mol_type = other DNA
aagtagagtggcatttacta

SEQ ID NO: 239031 - DNA, 20 bp, synthetic construct
  source 1..20: mol_type = other DNA
taagtagagtggcatttact

SEQ ID NO: 239032 - DNA, 20 bp, synthetic construct
  source 1..20: mol_type = other DNA
ataagtagagtggcatttac

SEQ ID NO: 239033 - DNA, 20 bp, synthetic construct
  source 1..20: mol_type = other DNA
tataagtagagtggcattta

SEQ ID NO: 239034 - DNA, 20 bp, synthetic construct
  source 1..20: mol_type = other DNA
ttataagtagagtggcattt

SEQ ID NO: 239035 - DNA, 20 bp, synthetic construct
  source 1..20: mol_type = other DNA
cttataagtagagtggcatt

SEQ ID NO: 239036 - DNA, 20 bp, synthetic construct
  source 1..20: mol_type = other DNA
ccttataagtagagtggcat

SEQ ID NO: 239037 - DNA, 20 bp, synthetic construct
  source 1..20: mol_type = other DNA
cccttataagtagagtggca

SEQ ID NO: 239038 - DNA, 20 bp, synthetic construct
  source 1..20: mol_type = other DNA
tcccttataagtagagtggc

SEQ ID NO: 239039 - DNA, 20 bp, synthetic construct
  source 1..20: mol_type = other DNA
atcccttataagtagagtgg

SEQ ID NO: 239040 - DNA, 20 bp, synthetic construct
  source 1..20: mol_type = other DNA
gatcccttataagtagagtg

SEQ ID NO: 239041 - DNA, 20 bp, synthetic construct
  source 1..20: mol_type = other DNA
agatcccttataagtagagt

SEQ ID NO: 239042 - DNA, 20 bp, synthetic construct
  source 1..20: mol_type = other DNA
tagatcccttataagtagag

SEQ ID NO: 239043 - DNA, 20 bp, synthetic construct
  source 1..20: mol_type = other DNA
gtagatcccttataagtaga

SEQ ID NO: 239044 - DNA, 20 bp, synthetic construct
  source 1..20: mol_type = other DNA
ggtagatcccttataagtag

SEQ ID NO: 239045 - DNA, 20 bp, synthetic construct
  source 1..20: mol_type = other DNA
aggtagatcccttataagta

SEQ ID NO: 239046 - DNA, 20 bp, synthetic construct
  source 1..20: mol_type = other DNA
gaggtagatcccttataagt

SEQ ID NO: 239047 - DNA, 20 bp, synthetic construct
  source 1..20: mol_type = other DNA
tgaggtagatcccttataag

SEQ ID NO: 239048 - DNA, 20 bp, synthetic construct
  source 1..20: mol_type = other DNA
ctgaggtagatcccttataa

SEQ ID NO: 239049 - DNA, 20 bp, synthetic construct
  source 1..20: mol_type = other DNA
tctgaggtagatcccttata

SEQ ID NO: 239050 - DNA, 20 bp, synthetic construct
  source 1..20: mol_type = other DNA
ttctgaggtagatcccttat

SEQ ID NO: 239051 - DNA, 20 bp, synthetic construct
  source 1..20: mol_type = other DNA
attctgaggtagatccctta

SEQ ID NO: 239052 - DNA, 20 bp, synthetic construct
  source 1..20: mol_type = other DNA
cattctgaggtagatccctt

SEQ ID NO: 239053 - DNA, 20 bp, synthetic construct
  source 1..20: mol_type = other DNA
gcattctgaggtagatccct

SEQ ID NO: 239054 - DNA, 20 bp, synthetic construct
  source 1..20: mol_type = other DNA
agcattctgaggtagatccc

SEQ ID NO: 239055 - DNA, 20 bp, synthetic construct
  source 1..20: mol_type = other DNA
tagcattctgaggtagatcc

SEQ ID NO: 239056 - DNA, 20 bp, synthetic construct
  source 1..20: mol_type = other DNA
ttagcattctgaggtagatc

SEQ ID NO: 239057 - DNA, 20 bp, synthetic construct
  source 1..20: mol_type = other DNA
attagcattctgaggtagat

SEQ ID NO: 239058 - DNA, 20 bp, synthetic construct
  source 1..20: mol_type = other DNA
aattagcattctgaggtaga

SEQ ID NO: 239059 - DNA, 20 bp, synthetic construct
  source 1..20: mol_type = other DNA
caattagcattctgaggtag

SEQ ID NO: 239060 - DNA, 20 bp, synthetic construct
  source 1..20: mol_type = other DNA
ccaattagcattctgaggta

SEQ ID NO: 239061 - DNA, 20 bp, synthetic construct
  source 1..20: mol_type = other DNA
cccaattagcattctgaggt

SEQ ID NO: 239062 - DNA, 20 bp, synthetic construct
  source 1..20: mol_type = other DNA
tcccaattagcattctgagg

SEQ ID NO: 239063 - DNA, 20 bp, synthetic construct
  source 1..20: mol_type = other DNA
gtcccaattagcattctgag

SEQ ID NO: 239064 - DNA, 20 bp, synthetic construct
  source 1..20: mol_type = other DNA
tgtcccaattagcattctga

SEQ ID NO: 239065 - DNA, 20 bp, synthetic construct
  source 1..20: mol_type = other DNA
atgtcccaattagcattctg

SEQ ID NO: 239066 - DNA, 20 bp, synthetic construct
  source 1..20: mol_type = other DNA
aatgtcccaattagcattct

SEQ ID NO: 239067 - DNA, 20 bp, synthetic construct
  source 1..20: mol_type = other DNA
aaatgtcccaattagcattc

SEQ ID NO: 239068 - DNA, 20 bp, synthetic construct
  source 1..20: mol_type = other DNA
aaaatgtcccaattagcatt

SEQ ID NO: 239069 - DNA, 20 bp, synthetic construct
  source 1..20: mol_type = other DNA
aaaaatgtcccaattagcat

SEQ ID NO: 239070 - DNA, 20 bp, synthetic construct
  source 1..20: mol_type = other DNA
caaaaatgtcccaattagca

SEQ ID NO: 239071 - DNA, 20 bp, synthetic construct
  source 1..20: mol_type = other DNA
acaaaaatgtcccaattagc

SEQ ID NO: 239072 - DNA, 20 bp, synthetic construct
  source 1..20: mol_type = other DNA
tacaaaaatgtcccaattag

SEQ ID NO: 239073 - DNA, 20 bp, synthetic construct
  source 1..20: mol_type = other DNA
ctacaaaaatgtcccaatta

SEQ ID NO: 239074 - DNA, 20 bp, synthetic construct
  source 1..20: mol_type = other DNA
gctacaaaaatgtcccaatt

SEQ ID NO: 239075 - DNA, 20 bp, synthetic construct
  source 1..20: mol_type = other DNA
tgctacaaaaatgtcccaat

SEQ ID NO: 239076 - DNA, 20 bp, synthetic construct
  source 1..20: mol_type = other DNA
gtgctacaaaaatgtcccaa

SEQ ID NO: 239077 - DNA, 20 bp, synthetic construct
  source 1..20: mol_type = other DNA
agtgctacaaaaatgtccca

SEQ ID NO: 239078 - DNA, 20 bp, synthetic construct
  source 1..20: mol_type = other DNA
gagtgctacaaaaatgtccc

SEQ ID NO: 239079 - DNA, 20 bp, synthetic construct
  source 1..20: mol_type = other DNA
agagtgctacaaaaatgtcc

SEQ ID NO: 239080 - DNA, 20 bp, synthetic construct
  source 1..20: mol_type = other DNA
tagagtgctacaaaaatgtc

SEQ ID NO: 239081 - DNA, 20 bp, synthetic construct
  source 1..20: mol_type = other DNA
gtagagtgctacaaaaatgt

SEQ ID NO: 239082 - DNA, 20 bp, synthetic construct
  source 1..20: mol_type = other DNA
agtagagtgctacaaaaatg

SEQ ID NO: 239083 - DNA, 20 bp, synthetic construct
  source 1..20: mol_type = other DNA
cagtagagtgctacaaaaat

SEQ ID NO: 239084 - DNA, 20 bp, synthetic construct
  source 1..20: mol_type = other DNA
acagtagagtgctacaaaaa

SEQ ID NO: 239085 - DNA, 20 bp, synthetic construct
  source 1..20: mol_type = other DNA
aacagtagagtgctacaaaa

SEQ ID NO: 239086 - DNA, 20 bp, synthetic construct
  source 1..20: mol_type = other DNA
caacagtagagtgctacaaa

SEQ ID NO: 239087 - DNA, 20 bp, synthetic construct
  source 1..20: mol_type = other DNA
ccaacagtagagtgctacaa

SEQ ID NO: 239088 - DNA, 20 bp, synthetic construct
  source 1..20: mol_type = other DNA
gccaacagtagagtgctaca

SEQ ID NO: 239089 - DNA, 20 bp, synthetic construct
  source 1..20: mol_type = other DNA
tgccaacagtagagtgctac

SEQ ID NO: 239090 - DNA, 20 bp, synthetic construct
  source 1..20: mol_type = other DNA
ctgccaacagtagagtgcta

SEQ ID NO: 239091 - DNA, 20 bp, synthetic construct
  source 1..20: mol_type = other DNA
gctgccaacagtagagtgct

SEQ ID NO: 239092 - DNA, 20 bp, synthetic construct
  source 1..20: mol_type = other DNA
tgctgccaacagtagagtgc

SEQ ID NO: 239093 - DNA, 20 bp, synthetic construct
  source 1..20: mol_type = other DNA
ctgctgccaacagtagagtg

SEQ ID NO: 239094 - DNA, 20 bp, synthetic construct
  source 1..20: mol_type = other DNA
cctgctgccaacagtagagt

SEQ ID NO: 239095 - DNA, 20 bp, synthetic construct
  source 1..20: mol_type = other DNA
acctgctgccaacagtagag

SEQ ID NO: 239096 - DNA, 20 bp, synthetic construct
  source 1..20: mol_type = other DNA
cacctgctgccaacagtaga

SEQ ID NO: 239097 - DNA, 20 bp, synthetic construct
  source 1..20: mol_type = other DNA
tcacctgctgccaacagtag

SEQ ID NO: 239098 - DNA, 20 bp, synthetic construct
  source 1..20: mol_type = other DNA
atcacctgctgccaacagta

SEQ ID NO: 239099 - DNA, 20 bp, synthetic construct
  source 1..20: mol_type = other DNA
catcacctgctgccaacagt

SEQ ID NO: 239100 - DNA, 20 bp, synthetic construct
  source 1..20: mol_type = other DNA
gcatcacctgctgccaacag

SEQ ID NO: 239101 - DNA, 20 bp, synthetic construct
  source 1..20: mol_type = other DNA
agcatcacctgctgccaaca

SEQ ID NO: 239102 - DNA, 20 bp, synthetic construct
  source 1..20: mol_type = other DNA
gagcatcacctgctgccaac

SEQ ID NO: 239103 - DNA, 20 bp, synthetic construct
  source 1..20: mol_type = other DNA
tgagcatcacctgctgccaa

SEQ ID NO: 239104 - DNA, 20 bp, synthetic construct
  source 1..20: mol_type = other DNA
gtgagcatcacctgctgcca

SEQ ID NO: 239105 - DNA, 20 bp, synthetic construct
  source 1..20: mol_type = other DNA
tgtgagcatcacctgctgcc

SEQ ID NO: 239106 - DNA, 20 bp, synthetic construct
  source 1..20: mol_type = other DNA
ttgtgagcatcacctgctgc

SEQ ID NO: 239107 - DNA, 20 bp, synthetic construct
  source 1..20: mol_type = other DNA
gttgtgagcatcacctgctg

SEQ ID NO: 239108 - DNA, 20 bp, synthetic construct
  source 1..20: mol_type = other DNA
tgttgtgagcatcacctgct

SEQ ID NO: 239109 - DNA, 20 bp, synthetic construct
  source 1..20: mol_type = other DNA
ctgttgtgagcatcacctgc

SEQ ID NO: 239110 - DNA, 20 bp, synthetic construct
  source 1..20: mol_type = other DNA
gctgttgtgagcatcacctg

SEQ ID NO: 239111 - DNA, 20 bp, synthetic construct
  source 1..20: mol_type = other DNA
ggctgttgtgagcatcacct

SEQ ID NO: 239112 - DNA, 20 bp, synthetic construct
  source 1..20: mol_type = other DNA
gggctgttgtgagcatcacc

SEQ ID NO: 239113 - DNA, 20 bp, synthetic construct
  source 1..20: mol_type = other DNA
cgggctgttgtgagcatcac

SEQ ID NO: 239114 - DNA, 20 bp, synthetic construct
  source 1..20: mol_type = other DNA
acgggctgttgtgagcatca

SEQ ID NO: 239115 - DNA, 20 bp, synthetic construct
  source 1..20: mol_type = other DNA
cacgggctgttgtgagcatc

SEQ ID NO: 239116 - DNA, 20 bp, synthetic construct
  source 1..20: mol_type = other DNA
tcacgggctgttgtgagcat

SEQ ID NO: 239117 - DNA, 20 bp, synthetic construct
  source 1..20: mol_type = other DNA
ctcacgggctgttgtgagca

SEQ ID NO: 239118 - DNA, 20 bp, synthetic construct
  source 1..20: mol_type = other DNA
cctcacgggctgttgtgagc

SEQ ID NO: 239119 - DNA, 20 bp, synthetic construct
  source 1..20: mol_type = other DNA
ccctcacgggctgttgtgag

SEQ ID NO: 239120 - DNA, 20 bp, synthetic construct
  source 1..20: mol_type = other DNA
accctcacgggctgttgtga

SEQ ID NO: 239121 - DNA, 20 bp, synthetic construct
  source 1..20: mol_type = other DNA
caccctcacgggctgttgtg

SEQ ID NO: 239122 - DNA, 20 bp, synthetic construct
  source 1..20: mol_type = other DNA
ccaccctcacgggctgttgt

SEQ ID NO: 239123 - DNA, 20 bp, synthetic construct
  source 1..20: mol_type = other DNA
tccaccctcacgggctgttg

SEQ ID NO: 239124 - DNA, 20 bp, synthetic construct
  source 1..20: mol_type = other DNA
atccaccctcacgggctgtt

SEQ ID NO: 239125 - DNA, 20 bp, synthetic construct
  source 1..20: mol_type = other DNA
catccaccctcacgggctgt

SEQ ID NO: 239126 - DNA, 20 bp, synthetic construct
  source 1..20: mol_type = other DNA
tcatccaccctcacgggctg

SEQ ID NO: 239127 - DNA, 20 bp, synthetic construct
  source 1..20: mol_type = other DNA
gtcatccaccctcacgggct

SEQ ID NO: 239128 - DNA, 20 bp, synthetic construct
  source 1..20: mol_type = other DNA
cgtcatccaccctcacgggc

SEQ ID NO: 239129 - DNA, 20 bp, synthetic construct
  source 1..20: mol_type = other DNA
acgtcatccaccctcacggg

SEQ ID NO: 239130 - DNA, 20 bp, synthetic construct
  source 1..20: mol_type = other DNA
gacgtcatccaccctcacgg

SEQ ID NO: 239131 - DNA, 20 bp, synthetic construct
  source 1..20: mol_type = other DNA
ggacgtcatccaccctcacg

SEQ ID NO: 239132 - DNA, 20 bp, synthetic construct
  source 1..20: mol_type = other DNA
cggacgtcatccaccctcac

SEQ ID NO: 239133 - DNA, 20 bp, synthetic construct
  source 1..20: mol_type = other DNA
gcggacgtcatccaccctca

SEQ ID NO: 239134 - DNA, 20 bp, synthetic construct
  source 1..20: mol_type = other DNA
agcggacgtcatccaccctc

SEQ ID NO: 239135 - DNA, 20 bp, synthetic construct
  source 1..20: mol_type = other DNA
aagcggacgtcatccaccct

SEQ ID NO: 239136 - DNA, 20 bp, synthetic construct
  source 1..20: mol_type = other DNA
gaagcggacgtcatccaccc

SEQ ID NO: 239137 - DNA, 20 bp, synthetic construct
  source 1..20: mol_type = other DNA
tgaagcggacgtcatccacc

SEQ ID NO: 239138 - DNA, 20 bp, synthetic construct
  source 1..20: mol_type = other DNA
gtgaagcggacgtcatccac

SEQ ID NO: 239139 - DNA, 20 bp, synthetic construct
  source 1..20: mol_type = other DNA
tgtgaagcggacgtcatcca

SEQ ID NO: 239140 - DNA, 20 bp, synthetic construct
  source 1..20: mol_type = other DNA
ctgtgaagcggacgtcatcc

SEQ ID NO: 239141 - DNA, 20 bp, synthetic construct
  source 1..20: mol_type = other DNA
tctgtgaagcggacgtcatc

SEQ ID NO: 239142 - DNA, 20 bp, synthetic construct
  source 1..20: mol_type = other DNA
atctgtgaagcggacgtcat

SEQ ID NO: 239143 - DNA, 20 bp, synthetic construct
  source 1..20: mol_type = other DNA
catctgtgaagcggacgtca

SEQ ID NO: 239144 - DNA, 20 bp, synthetic construct
  source 1..20: mol_type = other DNA
tcatctgtgaagcggacgtc

SEQ ID NO: 239145 - DNA, 20 bp, synthetic construct
  source 1..20: mol_type = other DNA
gtcatctgtgaagcggacgt

SEQ ID NO: 239146 - DNA, 20 bp, synthetic construct
  source 1..20: mol_type = other DNA
tgtcatctgtgaagcggacg

SEQ ID NO: 239147 - DNA, 20 bp, synthetic construct
  source 1..20: mol_type = other DNA
ttgtcatctgtgaagcggac

SEQ ID NO: 239148 - DNA, 20 bp, synthetic construct
  source 1..20: mol_type = other DNA
tttgtcatctgtgaagcgga

SEQ ID NO: 239149 - DNA, 20 bp, synthetic construct
  source 1..20: mol_type = other DNA
ctttgtcatctgtgaagcgg

SEQ ID NO: 239150 - DNA, 20 bp, synthetic construct
  source 1..20: mol_type = other DNA
cctttgtcatctgtgaagcg

SEQ ID NO: 239151 - DNA, 20 bp, synthetic construct
  source 1..20: mol_type = other DNA
tcctttgtcatctgtgaagc

SEQ ID NO: 239152 - DNA, 20 bp, synthetic construct
  source 1..20: mol_type = other DNA
ctcctttgtcatctgtgaag

SEQ ID NO: 239153 - DNA, 20 bp, synthetic construct
  source 1..20: mol_type = other DNA
gctcctttgtcatctgtgaa

SEQ ID NO: 239154 - DNA, 20 bp, synthetic construct
  source 1..20: mol_type = other DNA
ggctcctttgtcatctgtga

SEQ ID NO: 239155 - DNA, 20 bp, synthetic construct
  source 1..20: mol_type = other DNA
aggctcctttgtcatctgtg

SEQ ID NO: 239156 - DNA, 20 bp, synthetic construct
  source 1..20: mol_type = other DNA
gaggctcctttgtcatctgt

SEQ ID NO: 239157 - DNA, 20 bp, synthetic construct
  source 1..20: mol_type = other DNA
tgaggctcctttgtcatctg

SEQ ID NO: 239158 - DNA, 20 bp, synthetic construct
  source 1..20: mol_type = other DNA
atgaggctcctttgtcatct

SEQ ID NO: 239159 - DNA, 20 bp, synthetic construct
  source 1..20: mol_type = other DNA
catgaggctcctttgtcatc

SEQ ID NO: 239160 - DNA, 20 bp, synthetic construct
  source 1..20: mol_type = other DNA
gcatgaggctcctttgtcat

SEQ ID NO: 239161 - DNA, 20 bp, synthetic construct
  source 1..20: mol_type = other DNA
agcatgaggctcctttgtca

SEQ ID NO: 239162 - DNA, 20 bp, synthetic construct
  source 1..20: mol_type = other DNA
gagcatgaggctcctttgtc

SEQ ID NO: 239163 - DNA, 20 bp, synthetic construct
  source 1..20: mol_type = other DNA
tgagcatgaggctcctttgt

SEQ ID NO: 239164 - DNA, 20 bp, synthetic construct
  source 1..20: mol_type = other DNA
ctgagcatgaggctcctttg

SEQ ID NO: 239165 - DNA, 20 bp, synthetic construct
  source 1..20: mol_type = other DNA
tctgagcatgaggctccttt

SEQ ID NO: 239166 - DNA, 20 bp, synthetic construct
  source 1..20: mol_type = other DNA
gtctgagcatgaggctcctt

SEQ ID NO: 239167 - DNA, 20 bp, synthetic construct
  source 1..20: mol_type = other DNA
ggtctgagcatgaggctcct

SEQ ID NO: 239168 - DNA, 20 bp, synthetic construct
  source 1..20: mol_type = other DNA
cggtctgagcatgaggctcc

SEQ ID NO: 239169 - DNA, 20 bp, synthetic construct
  source 1..20: mol_type = other DNA
acggtctgagcatgaggctc

SEQ ID NO: 239170 - DNA, 20 bp, synthetic construct
  source 1..20: mol_type = other DNA
cacggtctgagcatgaggct

SEQ ID NO: 239171 - DNA, 20 bp, synthetic construct
  source 1..20: mol_type = other DNA
ccacggtctgagcatgaggc

SEQ ID NO: 239172 - DNA, 20 bp, synthetic construct
  source 1..20: mol_type = other DNA
cccacggtctgagcatgagg

SEQ ID NO: 239173 - DNA, 20 bp, synthetic construct
  source 1..20: mol_type = other DNA
gcccacggtctgagcatgag

SEQ ID NO: 239174 - DNA, 20 bp, synthetic construct
  source 1..20: mol_type = other DNA
agcccacggtctgagcatga

SEQ ID NO: 239175 - DNA, 20 bp, synthetic construct
  source 1..20: mol_type = other DNA
cagcccacggtctgagcatg

SEQ ID NO: 239176 - DNA, 20 bp, synthetic construct
  source 1..20: mol_type = other DNA
gcagcccacggtctgagcat

SEQ ID NO: 239177 - DNA, 20 bp, synthetic construct
  source 1..20: mol_type = other DNA
ggcagcccacggtctgagca

SEQ ID NO: 239178 - DNA, 20 bp, synthetic construct
  source 1..20: mol_type = other DNA
tggcagcccacggtctgagc

SEQ ID NO: 239179 - DNA, 20 bp, synthetic construct
  source 1..20: mol_type = other DNA
ctggcagcccacggtctgag

SEQ ID NO: 239180 - DNA, 20 bp, synthetic construct
  source 1..20: mol_type = other DNA
tctggcagcccacggtctga

SEQ ID NO: 239181 - DNA, 20 bp, synthetic construct
  source 1..20: mol_type = other DNA
ctctggcagcccacggtctg

SEQ ID NO: 239182 - DNA, 20 bp, synthetic construct
  source 1..20: mol_type = other DNA
gctctggcagcccacggtct

SEQ ID NO: 239183 - DNA, 20 bp, synthetic construct
  source 1..20: mol_type = other DNA
tgctctggcagcccacggtc

SEQ ID NO: 239184 - DNA, 20 bp, synthetic construct
  source 1..20: mol_type = other DNA
ctgctctggcagcccacggt

SEQ ID NO: 239185 - DNA, 20 bp, synthetic construct
  source 1..20: mol_type = other DNA
cctgctctggcagcccacgg

SEQ ID NO: 239186 - DNA, 20 bp, synthetic construct
  source 1..20: mol_type = other DNA
acctgctctggcagcccacg

SEQ ID NO: 239187 - DNA, 20 bp, synthetic construct
  source 1..20: mol_type = other DNA
gacctgctctggcagcccac

SEQ ID NO: 239188 - DNA, 20 bp, synthetic construct
  source 1..20: mol_type = other DNA
ggacctgctctggcagccca

SEQ ID NO: 239189 - DNA, 20 bp, synthetic construct
  source 1..20: mol_type = other DNA
tggacctgctctggcagccc

SEQ ID NO: 239190 - DNA, 20 bp, synthetic construct
  source 1..20: mol_type = other DNA
atggacctgctctggcagcc

SEQ ID NO: 239191 - DNA, 20 bp, synthetic construct
  source 1..20: mol_type = other DNA
catggacctgctctggcagc

SEQ ID NO: 239192 - DNA, 20 bp, synthetic construct
  source 1..20: mol_type = other DNA
ccatggacctgctctggcag

SEQ ID NO: 239193 - DNA, 20 bp, synthetic construct
  source 1..20: mol_type = other DNA
gccatggacctgctctggca

SEQ ID NO: 239194 - DNA, 20 bp, synthetic construct
  source 1..20: mol_type = other DNA
agccatggacctgctctggc

SEQ ID NO: 239195 - DNA, 20 bp, synthetic construct
  source 1..20: mol_type = other DNA
cagccatggacctgctctgg

SEQ ID NO: 239196 - DNA, 20 bp, synthetic construct
  source 1..20: mol_type = other DNA
gcagccatggacctgctctg

SEQ ID NO: 239197 - DNA, 20 bp, synthetic construct
  source 1..20: mol_type = other DNA
tgcagccatggacctgctct

SEQ ID NO: 239198 - DNA, 20 bp, synthetic construct
  source 1..20: mol_type = other DNA
ctgcagccatggacctgctc

SEQ ID NO: 239199 - DNA, 20 bp, synthetic construct
  source 1..20: mol_type = other DNA
gctgcagccatggacctgct

SEQ ID NO: 239200 - DNA, 20 bp, synthetic construct
  source 1..20: mol_type = other DNA
ggctgcagccatggacctgc

SEQ ID NO: 239201 - DNA, 20 bp, synthetic construct
  source 1..20: mol_type = other DNA
gggctgcagccatggacctg

SEQ ID NO: 239202 - DNA, 20 bp, synthetic construct
  source 1..20: mol_type = other DNA
ggggctgcagccatggacct

SEQ ID NO: 239203 - DNA, 20 bp, synthetic construct
  source 1..20: mol_type = other DNA
tggggctgcagccatggacc

SEQ ID NO: 239204 - DNA, 20 bp, synthetic construct
  source 1..20: mol_type = other DNA
gtggggctgcagccatggac

SEQ ID NO: 239205 - DNA, 20 bp, synthetic construct
  source 1..20: mol_type = other DNA
tgtggggctgcagccatgga

SEQ ID NO: 239206 - DNA, 20 bp, synthetic construct
  source 1..20: mol_type = other DNA
atgtggggctgcagccatgg

SEQ ID NO: 239207 - DNA, 20 bp, synthetic construct
  source 1..20: mol_type = other DNA
catgtggggctgcagccatg

SEQ ID NO: 239208 - DNA, 20 bp, synthetic construct
  source 1..20: mol_type = other DNA
ccatgtggggctgcagccat

SEQ ID NO: 239209 - DNA, 20 bp, synthetic construct
  source 1..20: mol_type = other DNA
tccatgtggggctgcagcca

SEQ ID NO: 239210 - DNA, 20 bp, synthetic construct
  source 1..20: mol_type = other DNA
gtccatgtggggctgcagcc

SEQ ID NO: 239211 - DNA, 20 bp, synthetic construct
  source 1..20: mol_type = other DNA
ggtccatgtggggctgcagc

SEQ ID NO: 239212 - DNA, 20 bp, synthetic construct
  source 1..20: mol_type = other DNA
tggtccatgtggggctgcag

SEQ ID NO: 239213 - DNA, 20 bp, synthetic construct
  source 1..20: mol_type = other DNA
atggtccatgtggggctgca

SEQ ID NO: 239214 - DNA, 20 bp, synthetic construct
  source 1..20: mol_type = other DNA
tatggtccatgtggggctgc

SEQ ID NO: 239215 - DNA, 20 bp, synthetic construct
  source 1..20: mol_type = other DNA
atatggtccatgtggggctg

SEQ ID NO: 239216 - DNA, 20 bp, synthetic construct
  source 1..20: mol_type = other DNA
aatatggtccatgtggggct

SEQ ID NO: 239217 - DNA, 20 bp, synthetic construct
  source 1..20: mol_type = other DNA
aaatatggtccatgtggggc

SEQ ID NO: 239218 - DNA, 20 bp, synthetic construct
  source 1..20: mol_type = other DNA
gaaatatggtccatgtgggg

SEQ ID NO: 239219 - DNA, 20 bp, synthetic construct
  source 1..20: mol_type = other DNA
ggaaatatggtccatgtggg

SEQ ID NO: 239220 - DNA, 20 bp, synthetic construct
  source 1..20: mol_type = other DNA
gggaaatatggtccatgtgg

SEQ ID NO: 239221 - DNA, 20 bp, synthetic construct
  source 1..20: mol_type = other DNA
ggggaaatatggtccatgtg

SEQ ID NO: 239222 - DNA, 20 bp, synthetic construct
  source 1..20: mol_type = other DNA
gggggaaatatggtccatgt

SEQ ID NO: 239223 - DNA, 20 bp, synthetic construct
  source 1..20: mol_type = other DNA
agggggaaatatggtccatg

SEQ ID NO: 239224 - DNA, 20 bp, synthetic construct
  source 1..20: mol_type = other DNA
aagggggaaatatggtccat

SEQ ID NO: 239225 - DNA, 20 bp, synthetic construct
  source 1..20: mol_type = other DNA
caagggggaaatatggtcca

SEQ ID NO: 239226 - DNA, 20 bp, synthetic construct
  source 1..20: mol_type = other DNA
acaagggggaaatatggtcc

SEQ ID NO: 239227 - DNA, 20 bp, synthetic construct
  source 1..20: mol_type = other DNA
gacaagggggaaatatggtc

SEQ ID NO: 239228 - DNA, 20 bp, synthetic construct
  source 1..20: mol_type = other DNA
tgacaagggggaaatatggt

SEQ ID NO: 239229 - DNA, 20 bp, synthetic construct
  source 1..20: mol_type = other DNA
gtgacaagggggaaatatgg

SEQ ID NO: 239230 - DNA, 20 bp, synthetic construct
  source 1..20: mol_type = other DNA
agtgacaagggggaaatatg

SEQ ID NO: 239231 - DNA, 20 bp, synthetic construct
  source 1..20: mol_type = other DNA
gagtgacaagggggaaatat

SEQ ID NO: 239232 - DNA, 20 bp, synthetic construct
  source 1..20: mol_type = other DNA
agagtgacaagggggaaata

SEQ ID NO: 239233 - DNA, 20 bp, synthetic construct
  source 1..20: mol_type = other DNA
aagagtgacaagggggaaat

SEQ ID NO: 239234 - DNA, 20 bp, synthetic construct
  source 1..20: mol_type = other DNA
aaagagtgacaagggggaaa

SEQ ID NO: 239235 - DNA, 20 bp, synthetic construct
  source 1..20: mol_type = other DNA
gaaagagtgacaagggggaa

SEQ ID NO: 239236 - DNA, 20 bp, synthetic construct
  source 1..20: mol_type = other DNA
ggaaagagtgacaaggggga

SEQ ID NO: 239237 - DNA, 20 bp, synthetic construct
  source 1..20: mol_type = other DNA
tggaaagagtgacaaggggg

SEQ ID NO: 239238 - DNA, 20 bp, synthetic construct
  source 1..20: mol_type = other DNA
gtggaaagagtgacaagggg

SEQ ID NO: 239239 - DNA, 20 bp, synthetic construct
  source 1..20: mol_type = other DNA
ggtggaaagagtgacaaggg

SEQ ID NO: 239240 - DNA, 20 bp, synthetic construct
  source 1..20: mol_type = other DNA
tggtggaaagagtgacaagg

SEQ ID NO: 239241 - DNA, 20 bp, synthetic construct
  source 1..20: mol_type = other DNA
ttggtggaaagagtgacaag

SEQ ID NO: 239242 - DNA, 20 bp, synthetic construct
  source 1..20: mol_type = other DNA
cttggtggaaagagtgacaa

SEQ ID NO: 239243 - DNA, 20 bp, synthetic construct
  source 1..20: mol_type = other DNA
gcttggtggaaagagtgaca

SEQ ID NO: 239244 - DNA, 20 bp, synthetic construct
  source 1..20: mol_type = other DNA
agcttggtggaaagagtgac

SEQ ID NO: 239245 - DNA, 20 bp, synthetic construct
  source 1..20: mol_type = other DNA
gagcttggtggaaagagtga

SEQ ID NO: 239246 - DNA, 20 bp, synthetic construct
  source 1..20: mol_type = other DNA
ggagcttggtggaaagagtg

SEQ ID NO: 239247 - DNA, 20 bp, synthetic construct
  source 1..20: mol_type = other DNA
gggagcttggtggaaagagt

SEQ ID NO: 239248 - DNA, 20 bp, synthetic construct
  source 1..20: mol_type = other DNA
agggagcttggtggaaagag

SEQ ID NO: 239249 - DNA, 20 bp, synthetic construct
  source 1..20: mol_type = other DNA
aagggagcttggtggaaaga

SEQ ID NO: 239250 - DNA, 20 bp, synthetic construct
  source 1..20: mol_type = other DNA
caagggagcttggtggaaag

SEQ ID NO: 239251 - DNA, 20 bp, synthetic construct
  source 1..20: mol_type = other DNA
ccaagggagcttggtggaaa

SEQ ID NO: 239252 - DNA, 20 bp, synthetic construct
  source 1..20: mol_type = other DNA
tccaagggagcttggtggaa

SEQ ID NO: 239253 - DNA, 20 bp, synthetic construct
  source 1..20: mol_type = other DNA
ttccaagggagcttggtgga

SEQ ID NO: 239254 - DNA, 20 bp, synthetic construct
  source 1..20: mol_type = other DNA
gttccaagggagcttggtgg

SEQ ID NO: 239255 - DNA, 20 bp, synthetic construct
  source 1..20: mol_type = other DNA
agttccaagggagcttggtg

SEQ ID NO: 239256 - DNA, 20 bp, synthetic construct
  source 1..20: mol_type = other DNA
aagttccaagggagcttggt

SEQ ID NO: 239257 - DNA, 20 bp, synthetic construct
  source 1..20: mol_type = other DNA
gaagttccaagggagcttgg

SEQ ID NO: 239258 - DNA, 20 bp, synthetic construct
  source 1..20: mol_type = other DNA
tgaagttccaagggagcttg

SEQ ID NO: 239259 - DNA, 20 bp, synthetic construct
  source 1..20: mol_type = other DNA
ctgaagttccaagggagctt

SEQ ID NO: 239260 - DNA, 20 bp, synthetic construct
  source 1..20: mol_type = other DNA
actgaagttccaagggagct

SEQ ID NO: 239261 - DNA, 20 bp, synthetic construct
  source 1..20: mol_type = other DNA
aactgaagttccaagggagc

SEQ ID NO: 239262 - DNA, 20 bp, synthetic construct
  source 1..20: mol_type = other DNA
taactgaagttccaagggag

SEQ ID NO: 239263 - DNA, 20 bp, synthetic construct
  source 1..20: mol_type = other DNA
ataactgaagttccaaggga

SEQ ID NO: 239264 - DNA, 20 bp, synthetic construct
  source 1..20: mol_type = other DNA
aataactgaagttccaaggg

SEQ ID NO: 239265 - DNA, 20 bp, synthetic construct
  source 1..20: mol_type = other DNA
taataactgaagttccaagg

SEQ ID NO: 239266 - DNA, 20 bp, synthetic construct
  source 1..20: mol_type = other DNA
ttaataactgaagttccaag

SEQ ID NO: 239267 - DNA, 20 bp, synthetic construct
  source 1..20: mol_type = other DNA
cttaataactgaagttccaa

SEQ ID NO: 239268 - DNA, 20 bp, synthetic construct
  source 1..20: mol_type = other DNA
gcttaataactgaagttcca

SEQ ID NO: 239269 - DNA, 20 bp, synthetic construct
  source 1..20: mol_type = other DNA
agcttaataactgaagttcc

SEQ ID NO: 239270 - DNA, 20 bp, synthetic construct
  source 1..20: mol_type = other DNA
gagcttaataactgaagttc

SEQ ID NO: 239271 - DNA, 20 bp, synthetic construct
  source 1..20: mol_type = other DNA
agagcttaataactgaagtt

SEQ ID NO: 239272 - DNA, 20 bp, synthetic construct
  source 1..20: mol_type = other DNA
gagagcttaataactgaagt

SEQ ID NO: 239273 - DNA, 20 bp, synthetic construct
  source 1..20: mol_type = other DNA
agagagcttaataactgaag

SEQ ID NO: 239274 - DNA, 20 bp, synthetic construct
  source 1..20: mol_type = other DNA
aagagagcttaataactgaa

SEQ ID NO: 239275 - DNA, 20 bp, synthetic construct
  source 1..20: mol_type = other DNA
caagagagcttaataactga

SEQ ID NO: 239276 - DNA, 20 bp, synthetic construct
  source 1..20: mol_type = other DNA
ccaagagagcttaataactg

SEQ ID NO: 239277 - DNA, 20 bp, synthetic construct
  source 1..20: mol_type = other DNA
cccaagagagcttaataact

SEQ ID NO: 239278 - DNA, 20 bp, synthetic construct
  source 1..20: mol_type = other DNA
acccaagagagcttaataac

SEQ ID NO: 239279 - DNA, 20 bp, synthetic construct
  source 1..20: mol_type = other DNA
cacccaagagagcttaataa

SEQ ID NO: 239280 - DNA, 20 bp, synthetic construct
  source 1..20: mol_type = other DNA
ccacccaagagagcttaata

SEQ ID NO: 239281 - DNA, 20 bp, synthetic construct
  source 1..20: mol_type = other DNA
tccacccaagagagcttaat

SEQ ID NO: 239282 - DNA, 20 bp, synthetic construct
  source 1..20: mol_type = other DNA
ttccacccaagagagcttaa

SEQ ID NO: 239283 - DNA, 20 bp, synthetic construct
  source 1..20: mol_type = other DNA
attccacccaagagagctta

SEQ ID NO: 239284 - DNA, 20 bp, synthetic construct
  source 1..20: mol_type = other DNA
gattccacccaagagagctt

SEQ ID NO: 239285 - DNA, 20 bp, synthetic construct
  source 1..20: mol_type = other DNA
ggattccacccaagagagct

SEQ ID NO: 239286 - DNA, 20 bp, synthetic construct
  source 1..20: mol_type = other DNA
tggattccacccaagagagc

SEQ ID NO: 239287 - DNA, 20 bp, synthetic construct
  source 1..20: mol_type = other DNA
ttggattccacccaagagag

SEQ ID NO: 239288 - DNA, 20 bp, synthetic construct
  source 1..20: mol_type = other DNA
cttggattccacccaagaga

SEQ ID NO: 239289 - DNA, 20 bp, synthetic construct
  source 1..20: mol_type = other DNA
acttggattccacccaagag

SEQ ID NO: 239290 - DNA, 20 bp, synthetic construct
  source 1..20: mol_type = other DNA
aacttggattccacccaaga

SEQ ID NO: 239291 - DNA, 20 bp, synthetic construct
  source 1..20: mol_type = other DNA
taacttggattccacccaag

SEQ ID NO: 239292 - DNA, 20 bp, synthetic construct
  source 1..20: mol_type = other DNA
ctaacttggattccacccaa

SEQ ID NO: 239293 - DNA, 20 bp, synthetic construct
  source 1..20: mol_type = other DNA
tctaacttggattccaccca

SEQ ID NO: 239294 - DNA, 20 bp, synthetic construct
  source 1..20: mol_type = other DNA
ttctaacttggattccaccc

SEQ ID NO: 239295 - DNA, 20 bp, synthetic construct
  source 1..20: mol_type = other DNA
attctaacttggattccacc

SEQ ID NO: 239296 - DNA, 20 bp, synthetic construct
  source 1..20: mol_type = other DNA
gattctaacttggattccac

SEQ ID NO: 239297 - DNA, 20 bp, synthetic construct
  source 1..20: mol_type = other DNA
tgattctaacttggattcca

SEQ ID NO: 239298 - DNA, 20 bp, synthetic construct
  source 1..20: mol_type = other DNA
gtgattctaacttggattcc

SEQ ID NO: 239299 - DNA, 20 bp, synthetic construct
  source 1..20: mol_type = other DNA
tgtgattctaacttggattc

SEQ ID NO: 239300 - DNA, 20 bp, synthetic construct
  source 1..20: mol_type = other DNA
ttgtgattctaacttggatt

SEQ ID NO: 239301 - DNA, 20 bp, synthetic construct
  source 1..20: mol_type = other DNA
gttgtgattctaacttggat

SEQ ID NO: 239302 - DNA, 20 bp, synthetic construct
  source 1..20: mol_type = other DNA
tgttgtgattctaacttgga

SEQ ID NO: 239303 - DNA, 20 bp, synthetic construct
  source 1..20: mol_type = other DNA
atgttgtgattctaacttgg

SEQ ID NO: 239304 - DNA, 20 bp, synthetic construct
  source 1..20: mol_type = other DNA
catgttgtgattctaacttg

SEQ ID NO: 239305 - DNA, 20 bp, synthetic construct
  source 1..20: mol_type = other DNA
acatgttgtgattctaactt

SEQ ID NO: 239306 - DNA, 20 bp, synthetic construct
  source 1..20: mol_type = other DNA
cacatgttgtgattctaact

SEQ ID NO: 239307 - DNA, 20 bp, synthetic construct
  source 1..20: mol_type = other DNA
gcacatgttgtgattctaac

SEQ ID NO: 239308 - DNA, 20 bp, synthetic construct
  source 1..20: mol_type = other DNA
ggcacatgttgtgattctaa

SEQ ID NO: 239309 - DNA, 20 bp, synthetic construct
  source 1..20: mol_type = other DNA
aggcacatgttgtgattcta

SEQ ID NO: 239310 - DNA, 20 bp, synthetic construct
  source 1..20: mol_type = other DNA
gaggcacatgttgtgattct

SEQ ID NO: 239311 - DNA, 20 bp, synthetic construct
  source 1..20: mol_type = other DNA
tgaggcacatgttgtgattc

SEQ ID NO: 239312 - DNA, 20 bp, synthetic construct
  source 1..20: mol_type = other DNA
atgaggcacatgttgtgatt

SEQ ID NO: 239313 - DNA, 20 bp, synthetic construct
  source 1..20: mol_type = other DNA
tatgaggcacatgttgtgat

SEQ ID NO: 239314 - DNA, 20 bp, synthetic construct
  source 1..20: mol_type = other DNA
atatgaggcacatgttgtga

SEQ ID NO: 239315 - DNA, 20 bp, synthetic construct
  source 1..20: mol_type = other DNA
catatgaggcacatgttgtg

SEQ ID NO: 239316 - DNA, 20 bp, synthetic construct
  source 1..20: mol_type = other DNA
ccatatgaggcacatgttgt

SEQ ID NO: 239317 - DNA, 20 bp, synthetic construct
  source 1..20: mol_type = other DNA
tccatatgaggcacatgttg

SEQ ID NO: 239318 - DNA, 20 bp, synthetic construct
  source 1..20: mol_type = other DNA
atccatatgaggcacatgtt

SEQ ID NO: 239319 - DNA, 20 bp, synthetic construct
  source 1..20: mol_type = other DNA
aatccatatgaggcacatgt

SEQ ID NO: 239320 - DNA, 20 bp, synthetic construct
  source 1..20: mol_type = other DNA
caatccatatgaggcacatg

SEQ ID NO: 239321 - DNA, 20 bp, synthetic construct
  source 1..20: mol_type = other DNA
acaatccatatgaggcacat

SEQ ID NO: 239322 - DNA, 20 bp, synthetic construct
  source 1..20: mol_type = other DNA
cacaatccatatgaggcaca

SEQ ID NO: 239323 - DNA, 20 bp, synthetic construct
  source 1..20: mol_type = other DNA
gcacaatccatatgaggcac

SEQ ID NO: 239324 - DNA, 20 bp, synthetic construct
  source 1..20: mol_type = other DNA
ggcacaatccatatgaggca

SEQ ID NO: 239325 - DNA, 20 bp, synthetic construct
  source 1..20: mol_type = other DNA
tggcacaatccatatgaggc

SEQ ID NO: 239326 - DNA, 20 bp, synthetic construct
  source 1..20: mol_type = other DNA
ctggcacaatccatatgagg

SEQ ID NO: 239327 - DNA, 20 bp, synthetic construct
  source 1..20: mol_type = other DNA
actggcacaatccatatgag

SEQ ID NO: 239328 - DNA, 20 bp, synthetic construct
  source 1..20: mol_type = other DNA
cactggcacaatccatatga

SEQ ID NO: 239329 - DNA, 20 bp, synthetic construct
  source 1..20: mol_type = other DNA
tcactggcacaatccatatg

SEQ ID NO: 239330 - DNA, 20 bp, synthetic construct
  source 1..20: mol_type = other DNA
ttcactggcacaatccatat

SEQ ID NO: 239331 - DNA, 20 bp, synthetic construct
  source 1..20: mol_type = other DNA
tttcactggcacaatccata

SEQ ID NO: 239332 - DNA, 20 bp, synthetic construct
  source 1..20: mol_type = other DNA
ttttcactggcacaatccat

SEQ ID NO: 239333 - DNA, 20 bp, synthetic construct
  source 1..20: mol_type = other DNA
tttttcactggcacaatcca

SEQ ID NO: 239334 - DNA, 20 bp, synthetic construct
  source 1..20: mol_type = other DNA
atttttcactggcacaatcc

SEQ ID NO: 239335 - DNA, 20 bp, synthetic construct
  source 1..20: mol_type = other DNA
catttttcactggcacaatc

SEQ ID NO: 239336 - DNA, 20 bp, synthetic construct
  source 1..20: mol_type = other DNA
tcatttttcactggcacaat

SEQ ID NO: 239337 - DNA, 20 bp, synthetic construct
  source 1..20: mol_type = other DNA
gtcatttttcactggcacaa

SEQ ID NO: 239338 - DNA, 20 bp, synthetic construct
  source 1..20: mol_type = other DNA
tgtcatttttcactggcaca

SEQ ID NO: 239339 - DNA, 20 bp, synthetic construct
  source 1..20: mol_type = other DNA
atgtcatttttcactggcac

SEQ ID NO: 239340 - DNA, 20 bp, synthetic construct
  source 1..20: mol_type = other DNA
aatgtcatttttcactggca

SEQ ID NO: 239341 - DNA, 20 bp, synthetic construct
  source 1..20: mol_type = other DNA
gaatgtcatttttcactggc

SEQ ID NO: 239342 - DNA, 20 bp, synthetic construct
  source 1..20: mol_type = other DNA
agaatgtcatttttcactgg

SEQ ID NO: 239343 - DNA, 20 bp, synthetic construct
  source 1..20: mol_type = other DNA
tagaatgtcatttttcactg

SEQ ID NO: 239344 - DNA, 20 bp, synthetic construct
  source 1..20: mol_type = other DNA
atagaatgtcatttttcact

SEQ ID NO: 239345 - DNA, 20 bp, synthetic construct
  source 1..20: mol_type = other DNA
aatagaatgtcatttttcac

SEQ ID NO: 239346 - DNA, 20 bp, synthetic construct
  source 1..20: mol_type = other DNA
aaatagaatgtcatttttca

SEQ ID NO: 239347 - DNA, 20 bp, synthetic construct
  source 1..20: mol_type = other DNA
taaatagaatgtcatttttc

SEQ ID NO: 239348 - DNA, 20 bp, synthetic construct
  source 1..20: mol_type = other DNA
ctaaatagaatgtcattttt

SEQ ID NO: 239349 - DNA, 20 bp, synthetic construct
  source 1..20: mol_type = other DNA
tctaaatagaatgtcatttt

SEQ ID NO: 239350 - DNA, 20 bp, synthetic construct
  source 1..20: mol_type = other DNA
ctctaaatagaatgtcattt

SEQ ID NO: 239351 - DNA, 20 bp, synthetic construct
  source 1..20: mol_type = other DNA
cctctaaatagaatgtcatt

SEQ ID NO: 239352 - DNA, 20 bp, synthetic construct
  source 1..20: mol_type = other DNA
gcctctaaatagaatgtcat

SEQ ID NO: 239353 - DNA, 20 bp, synthetic construct
  source 1..20: mol_type = other DNA
tgcctctaaatagaatgtca

SEQ ID NO: 239354 - DNA, 20 bp, synthetic construct
  source 1..20: mol_type = other DNA
ctgcctctaaatagaatgtc

SEQ ID NO: 239355 - DNA, 20 bp, synthetic construct
  source 1..20: mol_type = other DNA
cctgcctctaaatagaatgt

SEQ ID NO: 239356 - DNA, 20 bp, synthetic construct
  source 1..20: mol_type = other DNA
ccctgcctctaaatagaatg

SEQ ID NO: 239357 - DNA, 20 bp, synthetic construct
  source 1..20: mol_type = other DNA
gccctgcctctaaatagaat

SEQ ID NO: 239358 - DNA, 20 bp, synthetic construct
  source 1..20: mol_type = other DNA
tgccctgcctctaaatagaa

SEQ ID NO: 239359 - DNA, 20 bp, synthetic construct
  source 1..20: mol_type = other DNA
ctgccctgcctctaaataga

SEQ ID NO: 239360 - DNA, 20 bp, synthetic construct
  source 1..20: mol_type = other DNA
gctgccctgcctctaaatag

SEQ ID NO: 239361 - DNA, 20 bp, synthetic construct
  source 1..20: mol_type = other DNA
ggctgccctgcctctaaata

SEQ ID NO: 239362 - DNA, 20 bp, synthetic construct
  source 1..20: mol_type = other DNA
aggctgccctgcctctaaat

SEQ ID NO: 239363 - DNA, 20 bp, synthetic construct
  source 1..20: mol_type = other DNA
caggctgccctgcctctaaa

SEQ ID NO: 239364 - DNA, 20 bp, synthetic construct
  source 1..20: mol_type = other DNA
ccaggctgccctgcctctaa

SEQ ID NO: 239365 - DNA, 20 bp, synthetic construct
  source 1..20: mol_type = other DNA
gccaggctgccctgcctcta

SEQ ID NO: 239366 - DNA, 20 bp, synthetic construct
  source 1..20: mol_type = other DNA
agccaggctgccctgcctct

SEQ ID NO: 239367 - DNA, 20 bp, synthetic construct
  source 1..20: mol_type = other DNA
aagccaggctgccctgcctc

SEQ ID NO: 239368 - DNA, 20 bp, synthetic construct
  source 1..20: mol_type = other DNA
taagccaggctgccctgcct

SEQ ID NO: 239369 - DNA, 20 bp, synthetic construct
  source 1..20: mol_type = other DNA
ctaagccaggctgccctgcc

SEQ ID NO: 239370 - DNA, 20 bp, synthetic construct
  source 1..20: mol_type = other DNA
tctaagccaggctgccctgc

SEQ ID NO: 239371 - DNA, 20 bp, synthetic construct
  source 1..20: mol_type = other DNA
ctctaagccaggctgccctg

SEQ ID NO: 239372 - DNA, 20 bp, synthetic construct
  source 1..20: mol_type = other DNA
actctaagccaggctgccct

SEQ ID NO: 239373 - DNA, 20 bp, synthetic construct
  source 1..20: mol_type = other DNA
gactctaagccaggctgccc

SEQ ID NO: 239374 - DNA, 20 bp, synthetic construct
  source 1..20: mol_type = other DNA
tgactctaagccaggctgcc

SEQ ID NO: 239375 - DNA, 20 bp, synthetic construct
  source 1..20: mol_type = other DNA
ctgactctaagccaggctgc

SEQ ID NO: 239376 - DNA, 20 bp, synthetic construct
  source 1..20: mol_type = other DNA
actgactctaagccaggctg

SEQ ID NO: 239377 - DNA, 20 bp, synthetic construct
  source 1..20: mol_type = other DNA
aactgactctaagccaggct

SEQ ID NO: 239378 - DNA, 20 bp, synthetic construct
  source 1..20: mol_type = other DNA
aaactgactctaagccaggc

SEQ ID NO: 239379 - DNA, 20 bp, synthetic construct
  source 1..20: mol_type = other DNA
taaactgactctaagccagg

SEQ ID NO: 239380 - DNA, 20 bp, synthetic construct
  source 1..20: mol_type = other DNA
ttaaactgactctaagccag

SEQ ID NO: 239381 - DNA, 20 bp, synthetic construct
  source 1..20: mol_type = other DNA
tttaaactgactctaagcca

SEQ ID NO: 239382 - DNA, 20 bp, synthetic construct
  source 1..20: mol_type = other DNA
ttttaaactgactctaagcc

SEQ ID NO: 239383 - DNA, 20 bp, synthetic construct
  source 1..20: mol_type = other DNA
attttaaactgactctaagc

SEQ ID NO: 239384 - DNA, 20 bp, synthetic construct
  source 1..20: mol_type = other DNA
tattttaaactgactctaag

SEQ ID NO: 239385 - DNA, 20 bp, synthetic construct
  source 1..20: mol_type = other DNA
atattttaaactgactctaa

SEQ ID NO: 239386 - DNA, 20 bp, synthetic construct
  source 1..20: mol_type = other DNA
catattttaaactgactcta

SEQ ID NO: 239387 - DNA, 20 bp, synthetic construct
  source 1..20: mol_type = other DNA
acatattttaaactgactct

SEQ ID NO: 239388 - DNA, 20 bp, synthetic construct
  source 1..20: mol_type = other DNA
tacatattttaaactgactc

SEQ ID NO: 239389 - DNA, 20 bp, synthetic construct
  source 1..20: mol_type = other DNA
atacatattttaaactgact

SEQ ID NO: 239390 - DNA, 20 bp, synthetic construct
  source 1..20: mol_type = other DNA
aatacatattttaaactgac

SEQ ID NO: 239391 - DNA, 20 bp, synthetic construct
  source 1..20: mol_type = other DNA
taatacatattttaaactga

SEQ ID NO: 239392 - DNA, 20 bp, synthetic construct
  source 1..20: mol_type = other DNA
ataatacatattttaaactg

SEQ ID NO: 239393 - DNA, 20 bp, synthetic construct
  source 1..20: mol_type = other DNA
cataatacatattttaaact

SEQ ID NO: 239394 - DNA, 20 bp, synthetic construct
  source 1..20: mol_type = other DNA
gcataatacatattttaaac

SEQ ID NO: 239395 - DNA, 20 bp, synthetic construct
  source 1..20: mol_type = other DNA
agcataatacatattttaaa

SEQ ID NO: 239396 - DNA, 20 bp, synthetic construct
  source 1..20: mol_type = other DNA
cagcataatacatattttaa

SEQ ID NO: 239397 - DNA, 20 bp, synthetic construct
  source 1..20: mol_type = other DNA
gcagcataatacatatttta

SEQ ID NO: 239398 - DNA, 20 bp, synthetic construct
  source 1..20: mol_type = other DNA
tgcagcataatacatatttt

SEQ ID NO: 239399 - DNA, 20 bp, synthetic construct
  source 1..20: mol_type = other DNA
ttgcagcataatacatattt

SEQ ID NO: 239400 - DNA, 20 bp, synthetic construct
  source 1..20: mol_type = other DNA
gttgcagcataatacatatt

SEQ ID NO: 239401 - DNA, 20 bp, synthetic construct
  source 1..20: mol_type = other DNA
tgttgcagcataatacatat

SEQ ID NO: 239402 - DNA, 20 bp, synthetic construct
  source 1..20: mol_type = other DNA
ttgttgcagcataatacata

SEQ ID NO: 239403 - DNA, 20 bp, synthetic construct
  source 1..20: mol_type = other DNA
tttgttgcagcataatacat

SEQ ID NO: 239404 - DNA, 20 bp, synthetic construct
  source 1..20: mol_type = other DNA
atttgttgcagcataataca

SEQ ID NO: 239405 - DNA, 20 bp, synthetic construct
  source 1..20: mol_type = other DNA
catttgttgcagcataatac

SEQ ID NO: 239406 - DNA, 20 bp, synthetic construct
  source 1..20: mol_type = other DNA
acatttgttgcagcataata

SEQ ID NO: 239407 - DNA, 20 bp, synthetic construct
  source 1..20: mol_type = other DNA
tacatttgttgcagcataat

SEQ ID NO: 239408 - DNA, 20 bp, synthetic construct
  source 1..20: mol_type = other DNA
gtacatttgttgcagcataa

SEQ ID NO: 239409 - DNA, 20 bp, synthetic construct
  source 1..20: mol_type = other DNA
ggtacatttgttgcagcata

SEQ ID NO: 239410 - DNA, 20 bp, synthetic construct
  source 1..20: mol_type = other DNA
tggtacatttgttgcagcat

SEQ ID NO: 239411 - DNA, 20 bp, synthetic construct
  source 1..20: mol_type = other DNA
atggtacatttgttgcagca

SEQ ID NO: 239412 - DNA, 20 bp, synthetic construct
  source 1..20: mol_type = other DNA
catggtacatttgttgcagc

SEQ ID NO: 239413 - DNA, 20 bp, synthetic construct
  source 1..20: mol_type = other DNA
tcatggtacatttgttgcag

SEQ ID NO: 239414 - DNA, 20 bp, synthetic construct
  source 1..20: mol_type = other DNA
atcatggtacatttgttgca

SEQ ID NO: 239415 - DNA, 20 bp, synthetic construct
  source 1..20: mol_type = other DNA
gatcatggtacatttgttgc

SEQ ID NO: 239416 - DNA, 20 bp, synthetic construct
  source 1..20: mol_type = other DNA
ggatcatggtacatttgttg

SEQ ID NO: 239417 - DNA, 20 bp, synthetic construct
  source 1..20: mol_type = other DNA
aggatcatggtacatttgtt

SEQ ID NO: 239418 - DNA, 20 bp, synthetic construct
  source 1..20: mol_type = other DNA
caggatcatggtacatttgt

SEQ ID NO: 239419 - DNA, 20 bp, synthetic construct
  source 1..20: mol_type = other DNA
acaggatcatggtacatttg

SEQ ID NO: 239420 - DNA, 20 bp, synthetic construct
  source 1..20: mol_type = other DNA
tacaggatcatggtacattt

SEQ ID NO: 239421 - DNA, 20 bp, synthetic construct
  source 1..20: mol_type = other DNA
ttacaggatcatggtacatt

SEQ ID NO: 239422 - DNA, 20 bp, synthetic construct
  source 1..20: mol_type = other DNA
cttacaggatcatggtacat

SEQ ID NO: 239423 - DNA, 20 bp, synthetic construct
  source 1..20: mol_type = other DNA
tcttacaggatcatggtaca

SEQ ID NO: 239424 - DNA, 20 bp, synthetic construct
  source 1..20: mol_type = other DNA
atcttacaggatcatggtac

SEQ ID NO: 239425 - DNA, 20 bp, synthetic construct
  source 1..20: mol_type = other DNA
catcttacaggatcatggta

SEQ ID NO: 239426 - DNA, 20 bp, synthetic construct
  source 1..20: mol_type = other DNA
acatcttacaggatcatggt

SEQ ID NO: 239427 - DNA, 20 bp, synthetic construct
  source 1..20: mol_type = other DNA
aacatcttacaggatcatgg

SEQ ID NO: 239428 - DNA, 20 bp, synthetic construct
  source 1..20: mol_type = other DNA
gaacatcttacaggatcatg

SEQ ID NO: 239429 - DNA, 20 bp, synthetic construct
  source 1..20: mol_type = other DNA
tgaacatcttacaggatcat

SEQ ID NO: 239430 - DNA, 20 bp, synthetic construct
  source 1..20: mol_type = other DNA
gtgaacatcttacaggatca

SEQ ID NO: 239431 - DNA, 20 bp, synthetic construct
  source 1..20: mol_type = other DNA
tgtgaacatcttacaggatc

SEQ ID NO: 239432 - DNA, 20 bp, synthetic construct
  source 1..20: mol_type = other DNA
ttgtgaacatcttacaggat

SEQ ID NO: 239433 - DNA, 20 bp, synthetic construct
  source 1..20: mol_type = other DNA
gttgtgaacatcttacagga

SEQ ID NO: 239434 - DNA, 20 bp, synthetic construct
  source 1..20: mol_type = other DNA
tgttgtgaacatcttacagg

SEQ ID NO: 239435 - DNA, 20 bp, synthetic construct
  source 1..20: mol_type = other DNA
ttgttgtgaacatcttacag

SEQ ID NO: 239436 - DNA, 20 bp, synthetic construct
  source 1..20: mol_type = other DNA
cttgttgtgaacatcttaca

SEQ ID NO: 239437 - DNA, 20 bp, synthetic construct
  source 1..20: mol_type = other DNA
ccttgttgtgaacatcttac

SEQ ID NO: 239438 - DNA, 20 bp, synthetic construct
  source 1..20: mol_type = other DNA
cccttgttgtgaacatctta

SEQ ID NO: 239439 - DNA, 20 bp, synthetic construct
  source 1..20: mol_type = other DNA
tcccttgttgtgaacatctt

SEQ ID NO: 239440 - DNA, 20 bp, synthetic construct
  source 1..20: mol_type = other DNA
ttcccttgttgtgaacatct

SEQ ID NO: 239441 - DNA, 20 bp, synthetic construct
  source 1..20: mol_type = other DNA
gttcccttgttgtgaacatc

SEQ ID NO: 239442 - DNA, 20 bp, synthetic construct
  source 1..20: mol_type = other DNA
agttcccttgttgtgaacat

SEQ ID NO: 239443 - DNA, 20 bp, synthetic construct
  source 1..20: mol_type = other DNA
cagttcccttgttgtgaaca

SEQ ID NO: 239444 - DNA, 20 bp, synthetic construct
  source 1..20: mol_type = other DNA
ccagttcccttgttgtgaac

SEQ ID NO: 239445 - DNA, 20 bp, synthetic construct
  source 1..20: mol_type = other DNA
tccagttcccttgttgtgaa

SEQ ID NO: 239446 - DNA, 20 bp, synthetic construct
  source 1..20: mol_type = other DNA
atccagttcccttgttgtga

SEQ ID NO: 239447 - DNA, 20 bp, synthetic construct
  source 1..20: mol_type = other DNA
catccagttcccttgttgtg

SEQ ID NO: 239448 - DNA, 20 bp, synthetic construct
  source 1..20: mol_type = other DNA
acatccagttcccttgttgt

SEQ ID NO: 239449 - DNA, 20 bp, synthetic construct
  source 1..20: mol_type = other DNA
cacatccagttcccttgttg

SEQ ID NO: 239450 - DNA, 20 bp, synthetic construct
  source 1..20: mol_type = other DNA
ccacatccagttcccttgtt

SEQ ID NO: 239451 - DNA, 20 bp, synthetic construct
  source 1..20: mol_type = other DNA
cccacatccagttcccttgt

SEQ ID NO: 239452 - DNA, 20 bp, synthetic construct
  source 1..20: mol_type = other DNA
ccccacatccagttcccttg

SEQ ID NO: 239453 - DNA, 20 bp, synthetic construct
  source 1..20: mol_type = other DNA
accccacatccagttccctt

SEQ ID NO: 239454 - DNA, 20 bp, synthetic construct
  source 1..20: mol_type = other DNA
taccccacatccagttccct

SEQ ID NO: 239455 - DNA, 20 bp, synthetic construct
  source 1..20: mol_type = other DNA
ataccccacatccagttccc

SEQ ID NO: 239456 - DNA, 20 bp, synthetic construct
  source 1..20: mol_type = other DNA
tataccccacatccagttcc

SEQ ID NO: 239457 - DNA, 20 bp, synthetic construct
  source 1..20: mol_type = other DNA
gtataccccacatccagttc

SEQ ID NO: 239458 - DNA, 20 bp, synthetic construct
  source 1..20: mol_type = other DNA
agtataccccacatccagtt

SEQ ID NO: 239459 - DNA, 20 bp, synthetic construct
  source 1..20: mol_type = other DNA
cagtataccccacatccagt

SEQ ID NO: 239460 - DNA, 20 bp, synthetic construct
  source 1..20: mol_type = other DNA
acagtataccccacatccag

SEQ ID NO: 239461 - DNA, 20 bp, synthetic construct
  source 1..20: mol_type = other DNA
gacagtataccccacatcca

SEQ ID NO: 239462 - DNA, 20 bp, synthetic construct
  source 1..20: mol_type = other DNA
agacagtataccccacatcc

SEQ ID NO: 239463 - DNA, 20 bp, synthetic construct
  source 1..20: mol_type = other DNA
cagacagtataccccacatc

SEQ ID NO: 239464 - DNA, 20 bp, synthetic construct
  source 1..20: mol_type = other DNA
acagacagtataccccacat

SEQ ID NO: 239465 - DNA, 20 bp, synthetic construct
  source 1..20: mol_type = other DNA
tacagacagtataccccaca

SEQ ID NO: 239466 - DNA, 20 bp, synthetic construct
  source 1..20: mol_type = other DNA
gtacagacagtataccccac

SEQ ID NO: 239467 - DNA, 20 bp, synthetic construct
  source 1..20: mol_type = other DNA
agtacagacagtatacccca

SEQ ID NO: 239468 - DNA, 20 bp, synthetic construct
  source 1..20: mol_type = other DNA
tagtacagacagtatacccc

SEQ ID NO: 239469 - DNA, 20 bp, synthetic construct
  source 1..20: mol_type = other DNA
ttagtacagacagtataccc

SEQ ID NO: 239470 - DNA, 20 bp, synthetic construct
  source 1..20: mol_type = other DNA
gttagtacagacagtatacc

SEQ ID NO: 239471 - DNA, 20 bp, synthetic construct
  source 1..20: mol_type = other DNA
agttagtacagacagtatac

SEQ ID NO: 239472 - DNA, 20 bp, synthetic construct
  source 1..20: mol_type = other DNA
aagttagtacagacagtata

SEQ ID NO: 239473 - DNA, 20 bp, synthetic construct
  source 1..20: mol_type = other DNA
gaagttagtacagacagtat

SEQ ID NO: 239474 - DNA, 20 bp, synthetic construct
  source 1..20: mol_type = other DNA
tgaagttagtacagacagta

SEQ ID NO: 239475 - DNA, 20 bp, synthetic construct
  source 1..20: mol_type = other DNA
gtgaagttagtacagacagt

SEQ ID NO: 239476 - DNA, 20 bp, synthetic construct
  source 1..20: mol_type = other DNA
tgtgaagttagtacagacag

SEQ ID NO: 239477 - DNA, 20 bp, synthetic construct
  source 1..20: mol_type = other DNA
ttgtgaagttagtacagaca

SEQ ID NO: 239478 - DNA, 20 bp, synthetic construct
  source 1..20: mol_type = other DNA
cttgtgaagttagtacagac

SEQ ID NO: 239479 - DNA, 20 bp, synthetic construct
  source 1..20: mol_type = other DNA
acttgtgaagttagtacaga

SEQ ID NO: 239480 - DNA, 20 bp, synthetic construct
  source 1..20: mol_type = other DNA
aacttgtgaagttagtacag

SEQ ID NO: 239481 - DNA, 20 bp, synthetic construct
  source 1..20: mol_type = other DNA
aaacttgtgaagttagtaca

SEQ ID NO: 239482 - DNA, 20 bp, synthetic construct
  source 1..20: mol_type = other DNA
aaaacttgtgaagttagtac

SEQ ID NO: 239483 - DNA, 20 bp, synthetic construct
  source 1..20: mol_type = other DNA
gaaaacttgtgaagttagta

SEQ ID NO: 239484 - DNA, 20 bp, synthetic construct
  source 1..20: mol_type = other DNA
agaaaacttgtgaagttagt

SEQ ID NO: 239485 - DNA, 20 bp, synthetic construct
  source 1..20: mol_type = other DNA
cagaaaacttgtgaagttag

SEQ ID NO: 239486 - DNA, 20 bp, synthetic construct
  source 1..20: mol_type = other DNA
acagaaaacttgtgaagtta

SEQ ID NO: 239487 - DNA, 20 bp, synthetic construct
  source 1..20: mol_type = other DNA
tacagaaaacttgtgaagtt

SEQ ID NO: 239488 - DNA, 20 bp, synthetic construct
  source 1..20: mol_type = other DNA
ttacagaaaacttgtgaagt

SEQ ID NO: 239489 - DNA, 20 bp, synthetic construct
  source 1..20: mol_type = other DNA
tttacagaaaacttgtgaag

SEQ ID NO: 239490 - DNA, 20 bp, synthetic construct
  source 1..20: mol_type = other DNA
atttacagaaaacttgtgaa

SEQ ID NO: 239491 - DNA, 20 bp, synthetic construct
  source 1..20: mol_type = other DNA
gatttacagaaaacttgtga

SEQ ID NO: 239492 - DNA, 20 bp, synthetic construct
  source 1..20: mol_type = other DNA
agatttacagaaaacttgtg

SEQ ID NO: 239493 - DNA, 20 bp, synthetic construct
  source 1..20: mol_type = other DNA
tagatttacagaaaacttgt

SEQ ID NO: 239494 - DNA, 20 bp, synthetic construct
  source 1..20: mol_type = other DNA
ttagatttacagaaaacttg

SEQ ID NO: 239495 - DNA, 20 bp, synthetic construct
  source 1..20: mol_type = other DNA
tttagatttacagaaaactt

SEQ ID NO: 239496 - DNA, 20 bp, synthetic construct
  source 1..20: mol_type = other DNA
ttttagatttacagaaaact

SEQ ID NO: 239497 - DNA, 20 bp, synthetic construct
  source 1..20: mol_type = other DNA
gttttagatttacagaaaac

SEQ ID NO: 239498 - DNA, 20 bp, synthetic construct
  source 1..20: mol_type = other DNA
agttttagatttacagaaaa

SEQ ID NO: 239499 - DNA, 20 bp, synthetic construct
  source 1..20: mol_type = other DNA
cagttttagatttacagaaa

SEQ ID NO: 239500 - DNA, 20 bp, synthetic construct
  source 1..20: mol_type = other DNA
acagttttagatttacagaa

SEQ ID NO: 239501 - DNA, 20 bp, synthetic construct
  source 1..20: mol_type = other DNA
aacagttttagatttacaga

SEQ ID NO: 239502 - DNA, 20 bp, synthetic construct
  source 1..20: mol_type = other DNA
gaacagttttagatttacag

SEQ ID NO: 239503 - DNA, 20 bp, synthetic construct
  source 1..20: mol_type = other DNA
ggaacagttttagatttaca

SEQ ID NO: 239504 - DNA, 20 bp, synthetic construct
  source 1..20: mol_type = other DNA
tggaacagttttagatttac

SEQ ID NO: 239505 - DNA, 20 bp, synthetic construct
  source 1..20: mol_type = other DNA
ttggaacagttttagattta

SEQ ID NO: 239506 - DNA, 20 bp, synthetic construct
  source 1..20: mol_type = other DNA
tttggaacagttttagattt

SEQ ID NO: 239507 - DNA, 20 bp, synthetic construct
  source 1..20: mol_type = other DNA
ttttggaacagttttagatt

SEQ ID NO: 239508 - DNA, 20 bp, synthetic construct
  source 1..20: mol_type = other DNA
attttggaacagttttagat

SEQ ID NO: 239509 - DNA, 20 bp, synthetic construct
  source 1..20: mol_type = other DNA
tattttggaacagttttaga

SEQ ID NO: 239510 - DNA, 20 bp, synthetic construct
  source 1..20: mol_type = other DNA
ttattttggaacagttttag

SEQ ID NO: 239511 - DNA, 20 bp, synthetic construct
  source 1..20: mol_type = other DNA
gttattttggaacagtttta

SEQ ID NO: 239512 - DNA, 20 bp, synthetic construct
  source 1..20: mol_type = other DNA
tgttattttggaacagtttt

SEQ ID NO: 239513 - DNA, 20 bp, synthetic construct
  source 1..20: mol_type = other DNA
ttgttattttggaacagttt

SEQ ID NO: 239514 - DNA, 20 bp, synthetic construct
  source 1..20: mol_type = other DNA
cttgttattttggaacagtt

SEQ ID NO: 239515 - DNA, 20 bp, synthetic construct
  source 1..20: mol_type = other DNA
acttgttattttggaacagt

SEQ ID NO: 239516 - DNA, 20 bp, synthetic construct
  source 1..20: mol_type = other DNA
aacttgttattttggaacag

SEQ ID NO: 239517 - DNA, 20 bp, synthetic construct
  source 1..20: mol_type = other DNA
gaacttgttattttggaaca

SEQ ID NO: 239518 - DNA, 20 bp, synthetic construct
  source 1..20: mol_type = other DNA
cgaacttgttattttggaac

SEQ ID NO: 239519 - DNA, 20 bp, synthetic construct
  source 1..20: mol_type = other DNA
acgaacttgttattttggaa

SEQ ID NO: 239520 - DNA, 20 bp, synthetic construct
  source 1..20: mol_type = other DNA
aacgaacttgttattttgga

SEQ ID NO: 239521 - DNA, 20 bp, synthetic construct
  source 1..20: mol_type = other DNA
aaacgaacttgttattttgg

SEQ ID NO: 239522 - DNA, 20 bp, synthetic construct
  source 1..20: mol_type = other DNA
taaacgaacttgttattttg

SEQ ID NO: 239523 - DNA, 20 bp, synthetic construct
  source 1..20: mol_type = other DNA
ttaaacgaacttgttatttt

SEQ ID NO: 239524 - DNA, 20 bp, synthetic construct
  source 1..20: mol_type = other DNA
tttaaacgaacttgttattt

SEQ ID NO: 239525 - DNA, 20 bp, synthetic construct
  source 1..20: mol_type = other DNA
ttttaaacgaacttgttatt

SEQ ID NO: 239526 - DNA, 20 bp, synthetic construct
  source 1..20: mol_type = other DNA
attttaaacgaacttgttat

SEQ ID NO: 239527 - DNA, 20 bp, synthetic construct
  source 1..20: mol_type = other DNA
aattttaaacgaacttgtta

SEQ ID NO: 239528 - DNA, 20 bp, synthetic construct
  source 1..20: mol_type = other DNA
taattttaaacgaacttgtt

SEQ ID NO: 239529 - DNA, 20 bp, synthetic construct
  source 1..20: mol_type = other DNA
ttaattttaaacgaacttgt

SEQ ID NO: 239530 - DNA, 20 bp, synthetic construct
  source 1..20: mol_type = other DNA
gttaattttaaacgaacttg

SEQ ID NO: 239531 - DNA, 20 bp, synthetic construct
  source 1..20: mol_type = other DNA
agttaattttaaacgaactt

SEQ ID NO: 239532 - DNA, 20 bp, synthetic construct
  source 1..20: mol_type = other DNA
gagttaattttaaacgaact

SEQ ID NO: 239533 - DNA, 20 bp, synthetic construct
  source 1..20: mol_type = other DNA
ggagttaattttaaacgaac

SEQ ID NO: 239534 - DNA, 20 bp, synthetic construct
  source 1..20: mol_type = other DNA
tggagttaattttaaacgaa

SEQ ID NO: 239535 - DNA, 20 bp, synthetic construct
  source 1..20: mol_type = other DNA
ctggagttaattttaaacga

SEQ ID NO: 239536 - DNA, 20 bp, synthetic construct
  source 1..20: mol_type = other DNA
cctggagttaattttaaacg

SEQ ID NO: 239537 - DNA, 20 bp, synthetic construct
  source 1..20: mol_type = other DNA
tcctggagttaattttaaac

SEQ ID NO: 239538 - DNA, 20 bp, synthetic construct
  source 1..20: mol_type = other DNA
ctcctggagttaattttaaa

SEQ ID NO: 239539 - DNA, 20 bp, synthetic construct
  source 1..20: mol_type = other DNA
tctcctggagttaattttaa

SEQ ID NO: 239540 - DNA, 20 bp, synthetic construct
  source 1..20: mol_type = other DNA
gtctcctggagttaatttta

SEQ ID NO: 239541 - DNA, 20 bp, synthetic construct
  source 1..20: mol_type = other DNA
ggtctcctggagttaatttt

SEQ ID NO: 239542 - DNA, 20 bp, synthetic construct
  source 1..20: mol_type = other DNA
tggtctcctggagttaattt

SEQ ID NO: 239543 - DNA, 20 bp, synthetic construct
  source 1..20: mol_type = other DNA
ctggtctcctggagttaatt

SEQ ID NO: 239544 - DNA, 20 bp, synthetic construct
  source 1..20: mol_type = other DNA
cctggtctcctggagttaat

SEQ ID NO: 239545 - DNA, 20 bp, synthetic construct
  source 1..20: mol_type = other DNA
acctggtctcctggagttaa

SEQ ID NO: 239546 - DNA, 20 bp, synthetic construct
  source 1..20: mol_type = other DNA
tacctggtctcctggagtta

SEQ ID NO: 239547 - DNA, 20 bp, synthetic construct
  source 1..20: mol_type = other DNA
gtacctggtctcctggagtt

SEQ ID NO: 239548 - DNA, 20 bp, synthetic construct
  source 1..20: mol_type = other DNA
cgtacctggtctcctggagt

SEQ ID NO: 239549 - DNA, 20 bp, synthetic construct
  source 1..20: mol_type = other DNA
ccgtacctggtctcctggag

SEQ ID NO: 239550 - DNA, 20 bp, synthetic construct
  source 1..20: mol_type = other DNA
accgtacctggtctcctgga

SEQ ID NO: 239551 - DNA, 20 bp, synthetic construct
  source 1..20: mol_type = other DNA
taccgtacctggtctcctgg

SEQ ID NO: 239552 - DNA, 20 bp, synthetic construct
  source 1..20: mol_type = other DNA
ctaccgtacctggtctcctg

SEQ ID NO: 239553 - DNA, 20 bp, synthetic construct
  source 1..20: mol_type = other DNA
gctaccgtacctggtctcct

SEQ ID NO: 239554 - DNA, 20 bp, synthetic construct
  source 1..20: mol_type = other DNA
agctaccgtacctggtctcc

SEQ ID NO: 239555 - DNA, 20 bp, synthetic construct
  source 1..20: mol_type = other DNA
tagctaccgtacctggtctc

SEQ ID NO: 239556 - DNA, 20 bp, synthetic construct
  source 1..20: mol_type = other DNA
ttagctaccgtacctggtct

SEQ ID NO: 239557 - DNA, 20 bp, synthetic construct
  source 1..20: mol_type = other DNA
attagctaccgtacctggtc

SEQ ID NO: 239558 - DNA, 20 bp, synthetic construct
  source 1..20: mol_type = other DNA
cattagctaccgtacctggt

SEQ ID NO: 239559 - DNA, 20 bp, synthetic construct
  source 1..20: mol_type = other DNA
gcattagctaccgtacctgg

SEQ ID NO: 239560 - DNA, 20 bp, synthetic construct
  source 1..20: mol_type = other DNA
ggcattagctaccgtacctg

SEQ ID NO: 239561 - DNA, 20 bp, synthetic construct
  source 1..20: mol_type = other DNA
aggcattagctaccgtacct

SEQ ID NO: 239562 - DNA, 20 bp, synthetic construct
  source 1..20: mol_type = other DNA
taggcattagctaccgtacc

SEQ ID NO: 239563 - DNA, 20 bp, synthetic construct
  source 1..20: mol_type = other DNA
ataggcattagctaccgtac

SEQ ID NO: 239564 - DNA, 20 bp, synthetic construct
  source 1..20: mol_type = other DNA
tataggcattagctaccgta

SEQ ID NO: 239565 - DNA, 20 bp, synthetic construct
  source 1..20: mol_type = other DNA
ttataggcattagctaccgt

SEQ ID NO: 239566 - DNA, 20 bp, synthetic construct
  source 1..20: mol_type = other DNA
attataggcattagctaccg

SEQ ID NO: 239567 - DNA, 20 bp, synthetic construct
  source 1..20: mol_type = other DNA
gattataggcattagctacc

SEQ ID NO: 239568 - DNA, 20 bp, synthetic construct
  source 1..20: mol_type = other DNA
ggattataggcattagctac

SEQ ID NO: 239569 - DNA, 20 bp, synthetic construct
  source 1..20: mol_type = other DNA
gggattataggcattagcta

SEQ ID NO: 239570 - DNA, 20 bp, synthetic construct
  source 1..20: mol_type = other DNA
tgggattataggcattagct

SEQ ID NO: 239571 - DNA, 20 bp, synthetic construct
  source 1..20: mol_type = other DNA
ctgggattataggcattagc

SEQ ID NO: 239572 - DNA, 20 bp, synthetic construct
  source 1..20: mol_type = other DNA
gctgggattataggcattag

SEQ ID NO: 239573 - DNA, 20 bp, synthetic construct
  source 1..20: mol_type = other DNA
tgctgggattataggcatta

SEQ ID NO: 239574 - DNA, 20 bp, synthetic construct
  source 1..20: mol_type = other DNA
gtgctgggattataggcatt

SEQ ID NO: 239575 - DNA, 20 bp, synthetic construct
  source 1..20: mol_type = other DNA
agtgctgggattataggcat

SEQ ID NO: 239576 - DNA, 20 bp, synthetic construct
  source 1..20: mol_type = other DNA
aagtgctgggattataggca

SEQ ID NO: 239577 - DNA, 20 bp, synthetic construct
  source 1..20: mol_type = other DNA
gaagtgctgggattataggc

SEQ ID NO: 239578 - DNA, 20 bp, synthetic construct
  source 1..20: mol_type = other DNA
cgaagtgctgggattatagg

SEQ ID NO: 239579 - DNA, 20 bp, synthetic construct
  source 1..20: mol_type = other DNA
ccgaagtgctgggattatag

SEQ ID NO: 239580 - DNA, 20 bp, synthetic construct
  source 1..20: mol_type = other DNA
tccgaagtgctgggattata

SEQ ID NO: 239581 - DNA, 20 bp, synthetic construct
  source 1..20: mol_type = other DNA
ttccgaagtgctgggattat

SEQ ID NO: 239582 - DNA, 20 bp, synthetic construct
  source 1..20: mol_type = other DNA
cttccgaagtgctgggatta

SEQ ID NO: 239583 - DNA, 20 bp, synthetic construct
  source 1..20: mol_type = other DNA
ccttccgaagtgctgggatt

SEQ ID NO: 239584 - DNA, 20 bp, synthetic construct
  source 1..20: mol_type = other DNA
gccttccgaagtgctgggat

SEQ ID NO: 239585 - DNA, 20 bp, synthetic construct
  source 1..20: mol_type = other DNA
agccttccgaagtgctggga

SEQ ID NO: 239586 - DNA, 20 bp, synthetic construct
  source 1..20: mol_type = other DNA
cagccttccgaagtgctggg

SEQ ID NO: 239587 - DNA, 20 bp, synthetic construct
  source 1..20: mol_type = other DNA
tcagccttccgaagtgctgg

SEQ ID NO: 239588 - DNA, 20 bp, synthetic construct
  source 1..20: mol_type = other DNA
ctcagccttccgaagtgctg

SEQ ID NO: 239589 - DNA, 20 bp, synthetic construct
  source 1..20: mol_type = other DNA
cctcagccttccgaagtgct

SEQ ID NO: 239590 - DNA, 20 bp, synthetic construct
  source 1..20: mol_type = other DNA
gcctcagccttccgaagtgc

SEQ ID NO: 239591 - DNA, 20 bp, synthetic construct
  source 1..20: mol_type = other DNA
tgcctcagccttccgaagtg

SEQ ID NO: 239592 - DNA, 20 bp, synthetic construct
  source 1..20: mol_type = other DNA
ctgcctcagccttccgaagt

SEQ ID NO: 239593 - DNA, 20 bp, synthetic construct
  source 1..20: mol_type = other DNA
cctgcctcagccttccgaag

SEQ ID NO: 239594 - DNA, 20 bp, synthetic construct
  source 1..20: mol_type = other DNA
acctgcctcagccttccgaa

SEQ ID NO: 239595 - DNA, 20 bp, synthetic construct
  source 1..20: mol_type = other DNA
cacctgcctcagccttccga

SEQ ID NO: 239596 - DNA, 20 bp, synthetic construct
  source 1..20: mol_type = other DNA
ccacctgcctcagccttccg

SEQ ID NO: 239597 - DNA, 20 bp, synthetic construct
  source 1..20: mol_type = other DNA
tccacctgcctcagccttcc

SEQ ID NO: 239598 - DNA, 20 bp, synthetic construct
  source 1..20: mol_type = other DNA
atccacctgcctcagccttc

SEQ ID NO: 239599 - DNA, 20 bp, synthetic construct
  source 1..20: mol_type = other DNA
aatccacctgcctcagcctt

SEQ ID NO: 239600 - DNA, 20 bp, synthetic construct
  source 1..20: mol_type = other DNA
caatccacctgcctcagcct

SEQ ID NO: 239601 - DNA, 20 bp, synthetic construct
  source 1..20: mol_type = other DNA
gcaatccacctgcctcagcc

SEQ ID NO: 239602 - DNA, 20 bp, synthetic construct
  source 1..20: mol_type = other DNA
agcaatccacctgcctcagc

SEQ ID NO: 239603 - DNA, 20 bp, synthetic construct
  source 1..20: mol_type = other DNA
aagcaatccacctgcctcag

SEQ ID NO: 239604 - DNA, 20 bp, synthetic construct
  source 1..20: mol_type = other DNA
caagcaatccacctgcctca

SEQ ID NO: 239605 - DNA, 20 bp, synthetic construct
  source 1..20: mol_type = other DNA
tcaagcaatccacctgcctc

SEQ ID NO: 239606 - DNA, 20 bp, synthetic construct
  source 1..20: mol_type = other DNA
ctcaagcaatccacctgcct

SEQ ID NO: 239607 - DNA, 20 bp, synthetic construct
  source 1..20: mol_type = other DNA
gctcaagcaatccacctgcc

SEQ ID NO: 239608 - DNA, 20 bp, synthetic construct
  source 1..20: mol_type = other DNA
ggctcaagcaatccacctgc

SEQ ID NO: 239609 - DNA, 20 bp, synthetic construct
  source 1..20: mol_type = other DNA
gggctcaagcaatccacctg

SEQ ID NO: 239610 - DNA, 20 bp, synthetic construct
  source 1..20: mol_type = other DNA
tgggctcaagcaatccacct

SEQ ID NO: 239611 - DNA, 20 bp, synthetic construct
  source 1..20: mol_type = other DNA
ctgggctcaagcaatccacc

SEQ ID NO: 239612 - DNA, 20 bp, synthetic construct
  source 1..20: mol_type = other DNA
cctgggctcaagcaatccac

SEQ ID NO: 239613 - DNA, 20 bp, synthetic construct
  source 1..20: mol_type = other DNA
tcctgggctcaagcaatcca

SEQ ID NO: 239614 - DNA, 20 bp, synthetic construct
  source 1..20: mol_type = other DNA
ctcctgggctcaagcaatcc

SEQ ID NO: 239615 - DNA, 20 bp, synthetic construct
  source 1..20: mol_type = other DNA
actcctgggctcaagcaatc

SEQ ID NO: 239616 - DNA, 20 bp, synthetic construct
  source 1..20: mol_type = other DNA
aactcctgggctcaagcaat

SEQ ID NO: 239617 - DNA, 20 bp, synthetic construct
  source 1..20: mol_type = other DNA
aaactcctgggctcaagcaa

SEQ ID NO: 239618 - DNA, 20 bp, synthetic construct
  source 1..20: mol_type = other DNA
caaactcctgggctcaagca

SEQ ID NO: 239619 - DNA, 20 bp, synthetic construct
  source 1..20: mol_type = other DNA
tcaaactcctgggctcaagc

SEQ ID NO: 239620 - DNA, 20 bp, synthetic construct
  source 1..20: mol_type = other DNA
ctcaaactcctgggctcaag

SEQ ID NO: 239621 - DNA, 20 bp, synthetic construct
  source 1..20: mol_type = other DNA
tctcaaactcctgggctcaa

SEQ ID NO: 239622 - DNA, 20 bp, synthetic construct
  source 1..20: mol_type = other DNA
gtctcaaactcctgggctca

SEQ ID NO: 239623 - DNA, 20 bp, synthetic construct
  source 1..20: mol_type = other DNA
tgtctcaaactcctgggctc

SEQ ID NO: 239624 - DNA, 20 bp, synthetic construct
  source 1..20: mol_type = other DNA
ttgtctcaaactcctgggct

SEQ ID NO: 239625 - DNA, 20 bp, synthetic construct
  source 1..20: mol_type = other DNA
cttgtctcaaactcctgggc

SEQ ID NO: 239626 - DNA, 20 bp, synthetic construct
  source 1..20: mol_type = other DNA
gcttgtctcaaactcctggg

SEQ ID NO: 239627 - DNA, 20 bp, synthetic construct
  source 1..20: mol_type = other DNA
ggcttgtctcaaactcctgg

SEQ ID NO: 239628 - DNA, 20 bp, synthetic construct
  source 1..20: mol_type = other DNA
aggcttgtctcaaactcctg

SEQ ID NO: 239629 - DNA, 20 bp, synthetic construct
  source 1..20: mol_type = other DNA
caggcttgtctcaaactcct

SEQ ID NO: 239630 - DNA, 20 bp, synthetic construct
  source 1..20: mol_type = other DNA
ccaggcttgtctcaaactcc

SEQ ID NO: 239631 - DNA, 20 bp, synthetic construct
  source 1..20: mol_type = other DNA
cccaggcttgtctcaaactc

SEQ ID NO: 239632 - DNA, 20 bp, synthetic construct
  source 1..20: mol_type = other DNA
gcccaggcttgtctcaaact

SEQ ID NO: 239633 - DNA, 20 bp, synthetic construct
  source 1..20: mol_type = other DNA
tgcccaggcttgtctcaaac

SEQ ID NO: 239634 - DNA, 20 bp, synthetic construct
  source 1..20: mol_type = other DNA
ttgcccaggcttgtctcaaa

SEQ ID NO: 239635 - DNA, 20 bp, synthetic construct
  source 1..20: mol_type = other DNA
gttgcccaggcttgtctcaa

SEQ ID NO: 239636 - DNA, 20 bp, synthetic construct
  source 1..20: mol_type = other DNA
tgttgcccaggcttgtctca

SEQ ID NO: 239637 - DNA, 20 bp, synthetic construct
  source 1..20: mol_type = other DNA
atgttgcccaggcttgtctc

SEQ ID NO: 239638 - DNA, 20 bp, synthetic construct
  source 1..20: mol_type = other DNA
catgttgcccaggcttgtct

SEQ ID NO: 239639 - DNA, 20 bp, synthetic construct
  source 1..20: mol_type = other DNA
ccatgttgcccaggcttgtc

SEQ ID NO: 239640 - DNA, 20 bp, synthetic construct
  source 1..20: mol_type = other DNA
accatgttgcccaggcttgt

SEQ ID NO: 239641 - DNA, 20 bp, synthetic construct
  source 1..20: mol_type = other DNA
caccatgttgcccaggcttg

SEQ ID NO: 239642 - DNA, 20 bp, synthetic construct
  source 1..20: mol_type = other DNA
tcaccatgttgcccaggctt

SEQ ID NO: 239643 - DNA, 20 bp, synthetic construct
  source 1..20: mol_type = other DNA
ttcaccatgttgcccaggct

SEQ ID NO: 239644 - DNA, 20 bp, synthetic construct
  source 1..20: mol_type = other DNA
tttcaccatgttgcccaggc

SEQ ID NO: 239645 - DNA, 20 bp, synthetic construct
  source 1..20: mol_type = other DNA
atttcaccatgttgcccagg

SEQ ID NO: 239646 - DNA, 20 bp, synthetic construct
  source 1..20: mol_type = other DNA
gatttcaccatgttgcccag

SEQ ID NO: 239647 - DNA, 20 bp, synthetic construct
  source 1..20: mol_type = other DNA
ggatttcaccatgttgccca

SEQ ID NO: 239648 - DNA, 20 bp, synthetic construct
  source 1..20: mol_type = other DNA
aggatttcaccatgttgccc

SEQ ID NO: 239649 - DNA, 20 bp, synthetic construct
  source 1..20: mol_type = other DNA
caggatttcaccatgttgcc

SEQ ID NO: 239650 - DNA, 20 bp, synthetic construct
  source 1..20: mol_type = other DNA
acaggatttcaccatgttgc

SEQ ID NO: 239651 - DNA, 20 bp, synthetic construct
  source 1..20: mol_type = other DNA
gacaggatttcaccatgttg

SEQ ID NO: 239652 - DNA, 20 bp, synthetic construct
  source 1..20: mol_type = other DNA
agacaggatttcaccatgtt

SEQ ID NO: 239653 - DNA, 20 bp, synthetic construct
  source 1..20: mol_type = other DNA
gagacaggatttcaccatgt

SEQ ID NO: 239654 - DNA, 20 bp, synthetic construct
  source 1..20: mol_type = other DNA
agagacaggatttcaccatg

SEQ ID NO: 239655 - DNA, 20 bp, synthetic construct
  source 1..20: mol_type = other DNA
tagagacaggatttcaccat

SEQ ID NO: 239656 - DNA, 20 bp, synthetic construct
  source 1..20: mol_type = other DNA
ttagagacaggatttcacca

SEQ ID NO: 239657 - DNA, 20 bp, synthetic construct
  source 1..20: mol_type = other DNA
tttagagacaggatttcacc

SEQ ID NO: 239658 - DNA, 20 bp, synthetic construct
  source 1..20: mol_type = other DNA
ttttagagacaggatttcac

SEQ ID NO: 239659 - DNA, 20 bp, synthetic construct
  source 1..20: mol_type = other DNA
tttttagagacaggatttca

SEQ ID NO: 239660 - DNA, 20 bp, synthetic construct
  source 1..20: mol_type = other DNA
ttttttagagacaggatttc

SEQ ID NO: 239661 - DNA, 20 bp, synthetic construct
  source 1..20: mol_type = other DNA
tttttttagagacaggattt

SEQ ID NO: 239662 - DNA, 20 bp, synthetic construct
  source 1..20: mol_type = other DNA
ttttttttagagacaggatt

SEQ ID NO: 239663 - DNA, 20 bp, synthetic construct
  source 1..20: mol_type = other DNA
attttttttagagacaggat

SEQ ID NO: 239664 - DNA, 20 bp, synthetic construct
  source 1..20: mol_type = other DNA
gattttttttagagacagga

SEQ ID NO: 239665 - DNA, 20 bp, synthetic construct
  source 1..20: mol_type = other DNA
tgattttttttagagacagg

SEQ ID NO: 239666 - DNA, 20 bp, synthetic construct
  source 1..20: mol_type = other DNA
gtgattttttttagagacag

SEQ ID NO: 239667 - DNA, 20 bp, synthetic construct
  source 1..20: mol_type = other DNA
tgtgattttttttagagaca

SEQ ID NO: 239668 - DNA, 20 bp, synthetic construct
  source 1..20: mol_type = other DNA
ttgtgattttttttagagac

SEQ ID NO: 239669 - DNA, 20 bp, synthetic construct
  source 1..20: mol_type = other DNA
tttgtgattttttttagaga

SEQ ID NO: 239670 - DNA, 20 bp, synthetic construct
  source 1..20: mol_type = other DNA
ttttgtgattttttttagag

SEQ ID NO: 239671 - DNA, 20 bp, synthetic construct
  source 1..20: mol_type = other DNA
tttttgtgattttttttaga

SEQ ID NO: 239672 - DNA, 20 bp, synthetic construct
  source 1..20: mol_type = other DNA
atttttgtgattttttttag

SEQ ID NO: 239673 - DNA, 20 bp, synthetic construct
  source 1..20: mol_type = other DNA
aatttttgtgatttttttta

SEQ ID NO: 239674 - DNA, 20 bp, synthetic construct
  source 1..20: mol_type = other DNA
taatttttgtgatttttttt

SEQ ID NO: 239675 - DNA, 20 bp, synthetic construct
  source 1..20: mol_type = other DNA
ctaatttttgtgattttttt

SEQ ID NO: 239676 - DNA, 20 bp, synthetic construct
  source 1..20: mol_type = other DNA
gctaatttttgtgatttttt

SEQ ID NO: 239677 - DNA, 20 bp, synthetic construct
  source 1..20: mol_type = other DNA
ggctaatttttgtgattttt

SEQ ID NO: 239678 - DNA, 20 bp, synthetic construct
  source 1..20: mol_type = other DNA
tggctaatttttgtgatttt

SEQ ID NO: 239679 - DNA, 20 bp, synthetic construct
  source 1..20: mol_type = other DNA
ctggctaatttttgtgattt

SEQ ID NO: 239680 - DNA, 20 bp, synthetic construct
  source 1..20: mol_type = other DNA
cctggctaatttttgtgatt

SEQ ID NO: 239681 - DNA, 20 bp, synthetic construct
  source 1..20: mol_type = other DNA
acctggctaatttttgtgat

SEQ ID NO: 239682 - DNA, 20 bp, synthetic construct
  source 1..20: mol_type = other DNA
cacctggctaatttttgtga

SEQ ID NO: 239683 - DNA, 20 bp, synthetic construct
  source 1..20: mol_type = other DNA
acacctggctaatttttgtg

SEQ ID NO: 239684 - DNA, 20 bp, synthetic construct
  source 1..20: mol_type = other DNA
cacacctggctaatttttgt

SEQ ID NO: 239685 - DNA, 20 bp, synthetic construct
  source 1..20: mol_type = other DNA
ccacacctggctaatttttg

SEQ ID NO: 239686 - DNA, 20 bp, synthetic construct
  source 1..20: mol_type = other DNA
accacacctggctaattttt

SEQ ID NO: 239687 - DNA, 20 bp, synthetic construct
  source 1..20: mol_type = other DNA
caccacacctggctaatttt

SEQ ID NO: 239688 - DNA, 20 bp, synthetic construct
  source 1..20: mol_type = other DNA
ccaccacacctggctaattt

SEQ ID NO: 239689 - DNA, 20 bp, synthetic construct
  source 1..20: mol_type = other DNA
gccaccacacctggctaatt

SEQ ID NO: 239690 - DNA, 20 bp, synthetic construct
  source 1..20: mol_type = other DNA
cgccaccacacctggctaat

SEQ ID NO: 239691 - DNA, 20 bp, synthetic construct
  source 1..20: mol_type = other DNA
gcgccaccacacctggctaa

SEQ ID NO: 239692 - DNA, 20 bp, synthetic construct
  source 1..20: mol_type = other DNA
tgcgccaccacacctggcta

SEQ ID NO: 239693 - DNA, 20 bp, synthetic construct
  source 1..20: mol_type = other DNA
atgcgccaccacacctggct

SEQ ID NO: 239694 - DNA, 20 bp, synthetic construct
  source 1..20: mol_type = other DNA
aatgcgccaccacacctggc

SEQ ID NO: 239695 - DNA, 20 bp, synthetic construct
  source 1..20: mol_type = other DNA
gaatgcgccaccacacctgg

SEQ ID NO: 239696 - DNA, 20 bp, synthetic construct
  source 1..20: mol_type = other DNA
ggaatgcgccaccacacctg

SEQ ID NO: 239697 - DNA, 20 bp, synthetic construct
  source 1..20: mol_type = other DNA
aggaatgcgccaccacacct

SEQ ID NO: 239698 - DNA, 20 bp, synthetic construct
  source 1..20: mol_type = other DNA
caggaatgcgccaccacacc

SEQ ID NO: 239699 - DNA, 20 bp, synthetic construct
  source 1..20: mol_type = other DNA
acaggaatgcgccaccacac

SEQ ID NO: 239700 - DNA, 20 bp, synthetic construct
  source 1..20: mol_type = other DNA
tacaggaatgcgccaccaca

SEQ ID NO: 239701 - DNA, 20 bp, synthetic construct
  source 1..20: mol_type = other DNA
ctacaggaatgcgccaccac

SEQ ID NO: 239702 - DNA, 20 bp, synthetic construct
  source 1..20: mol_type = other DNA
actacaggaatgcgccacca

SEQ ID NO: 239703 - DNA, 20 bp, synthetic construct
  source 1..20: mol_type = other DNA
gactacaggaatgcgccacc

SEQ ID NO: 239704 - DNA, 20 bp, synthetic construct
  source 1..20: mol_type = other DNA
ggactacaggaatgcgccac

SEQ ID NO: 239705 - DNA, 20 bp, synthetic construct
  source 1..20: mol_type = other DNA
gggactacaggaatgcgcca

SEQ ID NO: 239706 - DNA, 20 bp, synthetic construct
  source 1..20: mol_type = other DNA
tgggactacaggaatgcgcc

SEQ ID NO: 239707 - DNA, 20 bp, synthetic construct
  source 1..20: mol_type = other DNA
ctgggactacaggaatgcgc

SEQ ID NO: 239708 - DNA, 20 bp, synthetic construct
  source 1..20: mol_type = other DNA
gctgggactacaggaatgcg

SEQ ID NO: 239709 - DNA, 20 bp, synthetic construct
  source 1..20: mol_type = other DNA
agctgggactacaggaatgc

SEQ ID NO: 239710 - DNA, 20 bp, synthetic construct
  source 1..20: mol_type = other DNA
tagctgggactacaggaatg

SEQ ID NO: 239711 - DNA, 20 bp, synthetic construct
  source 1..20: mol_type = other DNA
gtagctgggactacaggaat

SEQ ID NO: 239712 - DNA, 20 bp, synthetic construct
  source 1..20: mol_type = other DNA
agtagctgggactacaggaa

SEQ ID NO: 239713 - DNA, 20 bp, synthetic construct
  source 1..20: mol_type = other DNA
aagtagctgggactacagga

SEQ ID NO: 239714 - DNA, 20 bp, synthetic construct
  source 1..20: mol_type = other DNA
caagtagctgggactacagg

SEQ ID NO: 239715 - DNA, 20 bp, synthetic construct
  source 1..20: mol_type = other DNA
gcaagtagctgggactacag

SEQ ID NO: 239716 - DNA, 20 bp, synthetic construct
  source 1..20: mol_type = other DNA
cgcaagtagctgggactaca

SEQ ID NO: 239717 - DNA, 20 bp, synthetic construct
  source 1..20: mol_type = other DNA
ccgcaagtagctgggactac

SEQ ID NO: 239718 - DNA, 20 bp, synthetic construct
  source 1..20: mol_type = other DNA
cccgcaagtagctgggacta

SEQ ID NO: 239719 - DNA, 20 bp, synthetic construct
  source 1..20: mol_type = other DNA
ccccgcaagtagctgggact

SEQ ID NO: 239720 - DNA, 20 bp, synthetic construct
  source 1..20: mol_type = other DNA
gccccgcaagtagctgggac

SEQ ID NO: 239721 - DNA, 20 bp, synthetic construct
  source 1..20: mol_type = other DNA
agccccgcaagtagctggga

SEQ ID NO: 239722 - DNA, 20 bp, synthetic construct
  source 1..20: mol_type = other DNA
cagccccgcaagtagctggg

SEQ ID NO: 239723 - DNA, 20 bp, synthetic construct
  source 1..20: mol_type = other DNA
tcagccccgcaagtagctgg

SEQ ID NO: 239724 - DNA, 20 bp, synthetic construct
  source 1..20: mol_type = other DNA
ctcagccccgcaagtagctg

SEQ ID NO: 239725 - DNA, 20 bp, synthetic construct
  source 1..20: mol_type = other DNA
cctcagccccgcaagtagct

SEQ ID NO: 239726 - DNA, 20 bp, synthetic construct
  source 1..20: mol_type = other DNA
acctcagccccgcaagtagc

SEQ ID NO: 239727 - DNA, 20 bp, synthetic construct
  source 1..20: mol_type = other DNA
cacctcagccccgcaagtag

SEQ ID NO: 239728 - DNA, 20 bp, synthetic construct
  source 1..20: mol_type = other DNA
ccacctcagccccgcaagta

SEQ ID NO: 239729 - DNA, 20 bp, synthetic construct
  source 1..20: mol_type = other DNA
cccacctcagccccgcaagt

SEQ ID NO: 239730 - DNA, 20 bp, synthetic construct
  source 1..20: mol_type = other DNA
tcccacctcagccccgcaag

SEQ ID NO: 239731 - DNA, 20 bp, synthetic construct
  source 1..20: mol_type = other DNA
ctcccacctcagccccgcaa

SEQ ID NO: 239732 - DNA, 20 bp, synthetic construct
  source 1..20: mol_type = other DNA
tctcccacctcagccccgca

SEQ ID NO: 239733 - DNA, 20 bp, synthetic construct
  source 1..20: mol_type = other DNA
ttctcccacctcagccccgc

SEQ ID NO: 239734 - DNA, 20 bp, synthetic construct
  source 1..20: mol_type = other DNA
attctcccacctcagccccg

SEQ ID NO: 239735 - DNA, 20 bp, synthetic construct
  source 1..20: mol_type = other DNA
gattctcccacctcagcccc

SEQ ID NO: 239736 - DNA, 20 bp, synthetic construct
  source 1..20: mol_type = other DNA
tgattctcccacctcagccc

SEQ ID NO: 239737 - DNA, 20 bp, synthetic construct
  source 1..20: mol_type = other DNA
atgattctcccacctcagcc

SEQ ID NO: 239738 - DNA, 20 bp, synthetic construct
  source 1..20: mol_type = other DNA
gatgattctcccacctcagc

SEQ ID NO: 239739 - DNA, 20 bp, synthetic construct
  source 1..20: mol_type = other DNA
agatgattctcccacctcag

SEQ ID NO: 239740 - DNA, 20 bp, synthetic construct
  source 1..20: mol_type = other DNA
cagatgattctcccacctca

SEQ ID NO: 239741 - DNA, 20 bp, synthetic construct
  source 1..20: mol_type = other DNA
tcagatgattctcccacctc

SEQ ID NO: 239742 - DNA, 20 bp, synthetic construct
  source 1..20: mol_type = other DNA
ctcagatgattctcccacct

SEQ ID NO: 239743 - DNA, 20 bp, synthetic construct
  source 1..20: mol_type = other DNA
gctcagatgattctcccacc

SEQ ID NO: 239744 - DNA, 20 bp, synthetic construct
  source 1..20: mol_type = other DNA
ggctcagatgattctcccac

SEQ ID NO: 239745 - DNA, 20 bp, synthetic construct
  source 1..20: mol_type = other DNA
gggctcagatgattctccca

SEQ ID NO: 239746 - DNA, 20 bp, synthetic construct
  source 1..20: mol_type = other DNA
tgggctcagatgattctccc

SEQ ID NO: 239747 - DNA, 20 bp, synthetic construct
  source 1..20: mol_type = other DNA
ctgggctcagatgattctcc

SEQ ID NO: 239748 - DNA, 20 bp, synthetic construct
  source 1..20: mol_type = other DNA
cctgggctcagatgattctc

SEQ ID NO: 239749 - DNA, 20 bp, synthetic construct
  source 1..20: mol_type = other DNA
tcctgggctcagatgattct

SEQ ID NO: 239750 - DNA, 20 bp, synthetic construct
  source 1..20: mol_type = other DNA
ctcctgggctcagatgattc

SEQ ID NO: 239751 - DNA, 20 bp, synthetic construct
  source 1..20: mol_type = other DNA
actcctgggctcagatgatt

SEQ ID NO: 239752 - DNA, 20 bp, synthetic construct
  source 1..20: mol_type = other DNA
aactcctgggctcagatgat

SEQ ID NO: 239753 - DNA, 20 bp, synthetic construct
  source 1..20: mol_type = other DNA
aaactcctgggctcagatga

SEQ ID NO: 239754 - DNA, 20 bp, synthetic construct
  source 1..20: mol_type = other DNA
caaactcctgggctcagatg

SEQ ID NO: 239755 - DNA, 20 bp, synthetic construct
  source 1..20: mol_type = other DNA
tcaaactcctgggctcagat

SEQ ID NO: 239756 - DNA, 20 bp, synthetic construct
  source 1..20: mol_type = other DNA
ctcaaactcctgggctcaga

SEQ ID NO: 239757 - DNA, 20 bp, synthetic construct
  source 1..20: mol_type = other DNA
cctcaaactcctgggctcag

SEQ ID NO: 239758 - DNA, 20 bp, synthetic construct
  source 1..20: mol_type = other DNA
gcctcaaactcctgggctca

SEQ ID NO: 239759 - DNA, 20 bp, synthetic construct
  source 1..20: mol_type = other DNA
agcctcaaactcctgggctc

SEQ ID NO: 239760 - DNA, 20 bp, synthetic construct
  source 1..20: mol_type = other DNA
cagcctcaaactcctgggct

SEQ ID NO: 239761 - DNA, 20 bp, synthetic construct
  source 1..20: mol_type = other DNA
gcagcctcaaactcctgggc

SEQ ID NO: 239762 - DNA, 20 bp, synthetic construct
  source 1..20: mol_type = other DNA
tgcagcctcaaactcctggg

SEQ ID NO: 239763 - DNA, 20 bp, synthetic construct
  source 1..20: mol_type = other DNA
ctgcagcctcaaactcctgg

SEQ ID NO: 239764 - DNA, 20 bp, synthetic construct
  source 1..20: mol_type = other DNA
actgcagcctcaaactcctg

SEQ ID NO: 239765 - DNA, 20 bp, synthetic construct
  source 1..20: mol_type = other DNA
cactgcagcctcaaactcct

SEQ ID NO: 239766 - DNA, 20 bp, synthetic construct
  source 1..20: mol_type = other DNA
tcactgcagcctcaaactcc

SEQ ID NO: 239767 - DNA, 20 bp, synthetic construct
  source 1..20: mol_type = other DNA
ctcactgcagcctcaaactc

SEQ ID NO: 239768 - DNA, 20 bp, synthetic construct
  source 1..20: mol_type = other DNA
gctcactgcagcctcaaact

SEQ ID NO: 239769 - DNA, 20 bp, synthetic construct
  source 1..20: mol_type = other DNA
agctcactgcagcctcaaac

SEQ ID NO: 239770 - DNA, 20 bp, synthetic construct
  source 1..20: mol_type = other DNA
cagctcactgcagcctcaaa

SEQ ID NO: 239771 - DNA, 20 bp, synthetic construct
  source 1..20: mol_type = other DNA
acagctcactgcagcctcaa

SEQ ID NO: 239772 - DNA, 20 bp, synthetic construct
  source 1..20: mol_type = other DNA
cacagctcactgcagcctca

SEQ ID NO: 239773 - DNA, 20 bp, synthetic construct
  source 1..20: mol_type = other DNA
tcacagctcactgcagcctc

SEQ ID NO: 239774 - DNA, 20 bp, synthetic construct
  source 1..20: mol_type = other DNA
atcacagctcactgcagcct

SEQ ID NO: 239775 - DNA, 20 bp, synthetic construct
  source 1..20: mol_type = other DNA
aatcacagctcactgcagcc

SEQ ID NO: 239776 - DNA, 20 bp, synthetic construct
  source 1..20: mol_type = other DNA
caatcacagctcactgcagc

SEQ ID NO: 239777 - DNA, 20 bp, synthetic construct
  source 1..20: mol_type = other DNA
acaatcacagctcactgcag

SEQ ID NO: 239778 - DNA, 20 bp, synthetic construct
  source 1..20: mol_type = other DNA
tacaatcacagctcactgca

SEQ ID NO: 239779 - DNA, 20 bp, synthetic construct
  source 1..20: mol_type = other DNA
gtacaatcacagctcactgc

SEQ ID NO: 239780 - DNA, 20 bp, synthetic construct
  source 1..20: mol_type = other DNA
ggtacaatcacagctcactg

SEQ ID NO: 239781 - DNA, 20 bp, synthetic construct
  source 1..20: mol_type = other DNA
tggtacaatcacagctcact

SEQ ID NO: 239782 - DNA, 20 bp, synthetic construct
  source 1..20: mol_type = other DNA
gtggtacaatcacagctcac

SEQ ID NO: 239783 - DNA, 20 bp, synthetic construct
  source 1..20: mol_type = other DNA
agtggtacaatcacagctca

SEQ ID NO: 239784 - DNA, 20 bp, synthetic construct
  source 1..20: mol_type = other DNA
cagtggtacaatcacagctc

SEQ ID NO: 239785 - DNA, 20 bp, synthetic construct
  source 1..20: mol_type = other DNA
gcagtggtacaatcacagct

SEQ ID NO: 239786 - DNA, 20 bp, synthetic construct
  source 1..20: mol_type = other DNA
tgcagtggtacaatcacagc

SEQ ID NO: 239787 - DNA, 20 bp, synthetic construct
  source 1..20: mol_type = other DNA
gtgcagtggtacaatcacag

SEQ ID NO: 239788 - DNA, 20 bp, synthetic construct
  source 1..20: mol_type = other DNA
agtgcagtggtacaatcaca

SEQ ID NO: 239789 - DNA, 20 bp, synthetic construct
  source 1..20: mol_type = other DNA
gagtgcagtggtacaatcac

SEQ ID NO: 239790 - DNA, 20 bp, synthetic construct
  source 1..20: mol_type = other DNA
ggagtgcagtggtacaatca

SEQ ID NO: 239791 - DNA, 20 bp, synthetic construct
  source 1..20: mol_type = other DNA
tggagtgcagtggtacaatc

SEQ ID NO: 239792 - DNA, 20 bp, synthetic construct
  source 1..20: mol_type = other DNA
ttggagtgcagtggtacaat

SEQ ID NO: 239793 - DNA, 20 bp, synthetic construct
  source 1..20: mol_type = other DNA
gttggagtgcagtggtacaa

SEQ ID NO: 239794 - DNA, 20 bp, synthetic construct
  source 1..20: mol_type = other DNA
ggttggagtgcagtggtaca

SEQ ID NO: 239795 - DNA, 20 bp, synthetic construct
  source 1..20: mol_type = other DNA
aggttggagtgcagtggtac

SEQ ID NO: 239796 - DNA, 20 bp, synthetic construct
  source 1..20: mol_type = other DNA
caggttggagtgcagtggta

SEQ ID NO: 239797 - DNA, 20 bp, synthetic construct
  source 1..20: mol_type = other DNA
ccaggttggagtgcagtggt

SEQ ID NO: 239798 - DNA, 20 bp, synthetic construct
  source 1..20: mol_type = other DNA
cccaggttggagtgcagtgg

SEQ ID NO: 239799 - DNA, 20 bp, synthetic construct
  source 1..20: mol_type = other DNA
gcccaggttggagtgcagtg

SEQ ID NO: 239800 - DNA, 20 bp, synthetic construct
  source 1..20: mol_type = other DNA
tgcccaggttggagtgcagt

SEQ ID NO: 239801 - DNA, 20 bp, synthetic construct
  source 1..20: mol_type = other DNA
ttgcccaggttggagtgcag

SEQ ID NO: 239802 - DNA, 20 bp, synthetic construct
  source 1..20: mol_type = other DNA
gttgcccaggttggagtgca

SEQ ID NO: 239803 - DNA, 20 bp, synthetic construct
  source 1..20: mol_type = other DNA
tgttgcccaggttggagtgc

SEQ ID NO: 239804 - DNA, 20 bp, synthetic construct
  source 1..20: mol_type = other DNA
ctgttgcccaggttggagtg

SEQ ID NO: 239805 - DNA, 20 bp, synthetic construct
  source 1..20: mol_type = other DNA
tctgttgcccaggttggagt

SEQ ID NO: 239806 - DNA, 20 bp, synthetic construct
  source 1..20: mol_type = other DNA
ctctgttgcccaggttggag

SEQ ID NO: 239807 - DNA, 20 bp, synthetic construct
  source 1..20: mol_type = other DNA
gctctgttgcccaggttgga

SEQ ID NO: 239808 - DNA, 20 bp, synthetic construct
  source 1..20: mol_type = other DNA
tgctctgttgcccaggttgg

SEQ ID NO: 239809 - DNA, 20 bp, synthetic construct
  source 1..20: mol_type = other DNA
ttgctctgttgcccaggttg

SEQ ID NO: 239810 - DNA, 20 bp, synthetic construct
  source 1..20: mol_type = other DNA
cttgctctgttgcccaggtt

SEQ ID NO: 239811 - DNA, 20 bp, synthetic construct
  source 1..20: mol_type = other DNA
tcttgctctgttgcccaggt

SEQ ID NO: 239812 - DNA, 20 bp, synthetic construct
  source 1..20: mol_type = other DNA
gtcttgctctgttgcccagg

SEQ ID NO: 239813 - DNA, 20 bp, synthetic construct
  source 1..20: mol_type = other DNA
ggtcttgctctgttgcccag

SEQ ID NO: 239814 - DNA, 20 bp, synthetic construct
  source 1..20: mol_type = other DNA
gggtcttgctctgttgccca

SEQ ID NO: 239815 - DNA, 20 bp, synthetic construct
  source 1..20: mol_type = other DNA
agggtcttgctctgttgccc

SEQ ID NO: 239816 - DNA, 20 bp, synthetic construct
  source 1..20: mol_type = other DNA
cagggtcttgctctgttgcc

SEQ ID NO: 239817 - DNA, 20 bp, synthetic construct
  source 1..20: mol_type = other DNA
acagggtcttgctctgttgc

SEQ ID NO: 239818 - DNA, 20 bp, synthetic construct
  source 1..20: mol_type = other DNA
gacagggtcttgctctgttg

SEQ ID NO: 239819 - DNA, 20 bp, synthetic construct
  source 1..20: mol_type = other DNA
agacagggtcttgctctgtt

SEQ ID NO: 239820 - DNA, 20 bp, synthetic construct
  source 1..20: mol_type = other DNA
gagacagggtcttgctctgt

SEQ ID NO: 239821 - DNA, 20 bp, synthetic construct
  source 1..20: mol_type = other DNA
tgagacagggtcttgctctg

SEQ ID NO: 239822 - DNA, 20 bp, synthetic construct
  source 1..20: mol_type = other DNA
ttgagacagggtcttgctct

SEQ ID NO: 239823 - DNA, 20 bp, synthetic construct
  source 1..20: mol_type = other DNA
tttgagacagggtcttgctc

SEQ ID NO: 239824 - DNA, 20 bp, synthetic construct
  source 1..20: mol_type = other DNA
ttttgagacagggtcttgct

SEQ ID NO: 239825 - DNA, 20 bp, synthetic construct
  source 1..20: mol_type = other DNA
tttttgagacagggtcttgc

SEQ ID NO: 239826 - DNA, 20 bp, synthetic construct
  source 1..20: mol_type = other DNA
ttttttgagacagggtcttg

SEQ ID NO: 239827 - DNA, 20 bp, synthetic construct
  source 1..20: mol_type = other DNA
gttttttgagacagggtctt

SEQ ID NO: 239828 - DNA, 20 bp, synthetic construct
  source 1..20: mol_type = other DNA
tgttttttgagacagggtct

SEQ ID NO: 239829 - DNA, 20 bp, synthetic construct
  source 1..20: mol_type = other DNA
ttgttttttgagacagggtc

SEQ ID NO: 239830 - DNA, 20 bp, synthetic construct
  source 1..20: mol_type = other DNA
tttgttttttgagacagggt

SEQ ID NO: 239831 - DNA, 20 bp, synthetic construct
  source 1..20: mol_type = other DNA
ttttgttttttgagacaggg

SEQ ID NO: 239832 - DNA, 20 bp, synthetic construct
  source 1..20: mol_type = other DNA
tttttgttttttgagacagg

SEQ ID NO: 239833 - DNA, 20 bp, synthetic construct
  source 1..20: mol_type = other DNA
atttttgttttttgagacag

SEQ ID NO: 239834 - DNA, 20 bp, synthetic construct
  source 1..20: mol_type = other DNA
catttttgttttttgagaca

SEQ ID NO: 239835 - DNA, 20 bp, synthetic construct
  source 1..20: mol_type = other DNA
tcatttttgttttttgagac

SEQ ID NO: 239836 - DNA, 20 bp, synthetic construct
  source 1..20: mol_type = other DNA
ttcatttttgttttttgaga

SEQ ID NO: 239837 - DNA, 20 bp, synthetic construct
  source 1..20: mol_type = other DNA
tttcatttttgttttttgag

SEQ ID NO: 239838 - DNA, 20 bp, synthetic construct
  source 1..20: mol_type = other DNA
atttcatttttgttttttga

SEQ ID NO: 239839 - DNA, 20 bp, synthetic construct
  source 1..20: mol_type = other DNA
tatttcatttttgttttttg

SEQ ID NO: 239840 - DNA, 20 bp, synthetic construct
  source 1..20: mol_type = other DNA
ttatttcatttttgtttttt

SEQ ID NO: 239841 - DNA, 20 bp, synthetic construct
  source 1..20: mol_type = other DNA
tttatttcatttttgttttt

SEQ ID NO: 239842 - DNA, 20 bp, synthetic construct
  source 1..20: mol_type = other DNA
ctttatttcatttttgtttt

SEQ ID NO: 239843 - DNA, 20 bp, synthetic construct
  source 1..20: mol_type = other DNA
actttatttcatttttgttt

SEQ ID NO: 239844 - DNA, 20 bp, synthetic construct
  source 1..20: mol_type = other DNA
gactttatttcatttttgtt

SEQ ID NO: 239845 - DNA, 20 bp, synthetic construct
  source 1..20: mol_type = other DNA
ggactttatttcatttttgt

SEQ ID NO: 239846 - DNA, 20 bp, synthetic construct
  source 1..20: mol_type = other DNA
tggactttatttcatttttg

SEQ ID NO: 239847 - DNA, 20 bp, synthetic construct
  source 1..20: mol_type = other DNA
ctggactttatttcattttt

SEQ ID NO: 239848 - DNA, 20 bp, synthetic construct
  source 1..20: mol_type = other DNA
cctggactttatttcatttt

SEQ ID NO: 239849 - DNA, 20 bp, synthetic construct
  source 1..20: mol_type = other DNA
tcctggactttatttcattt

SEQ ID NO: 239850 - DNA, 20 bp, synthetic construct
  source 1..20: mol_type = other DNA
ttcctggactttatttcatt

SEQ ID NO: 239851 - DNA, 20 bp, synthetic construct
  source 1..20: mol_type = other DNA
tttcctggactttatttcat

SEQ ID NO: 239852 - DNA, 20 bp, synthetic construct
  source 1..20: mol_type = other DNA
ctttcctggactttatttca

SEQ ID NO: 239853 - DNA, 20 bp, synthetic construct
  source 1..20: mol_type = other DNA
tctttcctggactttatttc

SEQ ID NO: 239854 - DNA, 20 bp, synthetic construct
  source 1..20: mol_type = other DNA
ttctttcctggactttattt

SEQ ID NO: 239855 - DNA, 20 bp, synthetic construct
  source 1..20: mol_type = other DNA
cttctttcctggactttatt

SEQ ID NO: 239856 - DNA, 20 bp, synthetic construct
  source 1..20: mol_type = other DNA
acttctttcctggactttat

SEQ ID NO: 239857 - DNA, 20 bp, synthetic construct
  source 1..20: mol_type = other DNA
tacttctttcctggacttta

SEQ ID NO: 239858 - DNA, 20 bp, synthetic construct
  source 1..20: mol_type = other DNA
ctacttctttcctggacttt

SEQ ID NO: 239859 - DNA, 20 bp, synthetic construct
  source 1..20: mol_type = other DNA
cctacttctttcctggactt

SEQ ID NO: 239860 - DNA, 20 bp, synthetic construct
  source 1..20: mol_type = other DNA
acctacttctttcctggact

SEQ ID NO: 239861 - DNA, 20 bp, synthetic construct
  source 1..20: mol_type = other DNA
aacctacttctttcctggac

SEQ ID NO: 239862 - DNA, 20 bp, synthetic construct
  source 1..20: mol_type = other DNA
aaacctacttctttcctgga

SEQ ID NO: 239863 - DNA, 20 bp, synthetic construct
  source 1..20: mol_type = other DNA
aaaacctacttctttcctgg

SEQ ID NO: 239864 - DNA, 20 bp, synthetic construct
  source 1..20: mol_type = other DNA
taaaacctacttctttcctg

SEQ ID NO: 239865 - DNA, 20 bp, synthetic construct
  source 1..20: mol_type = other DNA
gtaaaacctacttctttcct

SEQ ID NO: 239866 - DNA, 20 bp, synthetic construct
  source 1..20: mol_type = other DNA
ggtaaaacctacttctttcc

SEQ ID NO: 239867 - DNA, 20 bp, synthetic construct
  source 1..20: mol_type = other DNA
tggtaaaacctacttctttc

SEQ ID NO: 239868 - DNA, 20 bp, synthetic construct
  source 1..20: mol_type = other DNA
gtggtaaaacctacttcttt

SEQ ID NO: 239869 - DNA, 20 bp, synthetic construct
  source 1..20: mol_type = other DNA
agtggtaaaacctacttctt

SEQ ID NO: 239870 - DNA, 20 bp, synthetic construct
  source 1..20: mol_type = other DNA
gagtggtaaaacctacttct

SEQ ID NO: 239871 - DNA, 20 bp, synthetic construct
  source 1..20: mol_type = other DNA
agagtggtaaaacctacttc

SEQ ID NO: 239872 - DNA, 20 bp, synthetic construct
  source 1..20: mol_type = other DNA
aagagtggtaaaacctactt

SEQ ID NO: 239873 - DNA, 20 bp, synthetic construct
  source 1..20: mol_type = other DNA
taagagtggtaaaacctact

SEQ ID NO: 239874 - DNA, 20 bp, synthetic construct
  source 1..20: mol_type = other DNA
ataagagtggtaaaacctac

SEQ ID NO: 239875 - DNA, 20 bp, synthetic construct
  source 1..20: mol_type = other DNA
aataagagtggtaaaaccta

SEQ ID NO: 239876 - DNA, 20 bp, synthetic construct
  source 1..20: mol_type = other DNA
aaataagagtggtaaaacct

SEQ ID NO: 239877 - DNA, 20 bp, synthetic construct
  source 1..20: mol_type = other DNA
aaaataagagtggtaaaacc

SEQ ID NO: 239878 - DNA, 20 bp, synthetic construct
  source 1..20: mol_type = other DNA
gaaaataagagtggtaaaac

SEQ ID NO: 239879 - DNA, 20 bp, synthetic construct
  source 1..20: mol_type = other DNA
agaaaataagagtggtaaaa

SEQ ID NO: 239880 - DNA, 20 bp, synthetic construct
  source 1..20: mol_type = other DNA
cagaaaataagagtggtaaa

SEQ ID NO: 239881 - DNA, 20 bp, synthetic construct
  source 1..20: mol_type = other DNA
tcagaaaataagagtggtaa

SEQ ID NO: 239882 - DNA, 20 bp, synthetic construct
  source 1..20: mol_type = other DNA
ttcagaaaataagagtggta

SEQ ID NO: 239883 - DNA, 20 bp, synthetic construct
  source 1..20: mol_type = other DNA
cttcagaaaataagagtggt

SEQ ID NO: 239884 - DNA, 20 bp, synthetic construct
  source 1..20: mol_type = other DNA
tcttcagaaaataagagtgg

SEQ ID NO: 239885 - DNA, 20 bp, synthetic construct
  source 1..20: mol_type = other DNA
ctcttcagaaaataagagtg

SEQ ID NO: 239886 - DNA, 20 bp, synthetic construct
  source 1..20: mol_type = other DNA
tctcttcagaaaataagagt

SEQ ID NO: 239887 - DNA, 20 bp, synthetic construct
  source 1..20: mol_type = other DNA
ttctcttcagaaaataagag

SEQ ID NO: 239888 - DNA, 20 bp, synthetic construct
  source 1..20: mol_type = other DNA
tttctcttcagaaaataaga

SEQ ID NO: 239889 - DNA, 20 bp, synthetic construct
  source 1..20: mol_type = other DNA
ttttctcttcagaaaataag

SEQ ID NO: 239890 - DNA, 20 bp, synthetic construct
  source 1..20: mol_type = other DNA
gttttctcttcagaaaataa

SEQ ID NO: 239891 - DNA, 20 bp, synthetic construct
  source 1..20: mol_type = other DNA
agttttctcttcagaaaata

SEQ ID NO: 239892 - DNA, 20 bp, synthetic construct
  source 1..20: mol_type = other DNA
tagttttctcttcagaaaat

SEQ ID NO: 239893 - DNA, 20 bp, synthetic construct
  source 1..20: mol_type = other DNA
ttagttttctcttcagaaaa

SEQ ID NO: 239894 - DNA, 20 bp, synthetic construct
  source 1..20: mol_type = other DNA
tttagttttctcttcagaaa

SEQ ID NO: 239895 - DNA, 20 bp, synthetic construct
  source 1..20: mol_type = other DNA
atttagttttctcttcagaa

SEQ ID NO: 239896 - DNA, 20 bp, synthetic construct
  source 1..20: mol_type = other DNA
aatttagttttctcttcaga

SEQ ID NO: 239897 - DNA, 20 bp, synthetic construct
  source 1..20: mol_type = other DNA
aaatttagttttctcttcag

SEQ ID NO: 239898 - DNA, 20 bp, synthetic construct
  source 1..20: mol_type = other DNA
taaatttagttttctcttca

SEQ ID NO: 239899 - DNA, 20 bp, synthetic construct
  source 1..20: mol_type = other DNA
ttaaatttagttttctcttc

SEQ ID NO: 239900 - DNA, 20 bp, synthetic construct
  source 1..20: mol_type = other DNA
attaaatttagttttctctt

SEQ ID NO: 239901 - DNA, 20 bp, synthetic construct
  source 1..20: mol_type = other DNA
cattaaatttagttttctct

SEQ ID NO: 239902 - DNA, 20 bp, synthetic construct
  source 1..20: mol_type = other DNA
acattaaatttagttttctc

SEQ ID NO: 239903 - DNA, 20 bp, synthetic construct
  source 1..20: mol_type = other DNA
cacattaaatttagttttct

SEQ ID NO: 239904 - DNA, 20 bp, synthetic construct
  source 1..20: mol_type = other DNA
acacattaaatttagttttc

SEQ ID NO: 239905 - DNA, 20 bp, synthetic construct
  source 1..20: mol_type = other DNA
tacacattaaatttagtttt

SEQ ID NO: 239906 - DNA, 20 bp, synthetic construct
  source 1..20: mol_type = other DNA
ttacacattaaatttagttt

SEQ ID NO: 239907 - DNA, 20 bp, synthetic construct
  source 1..20: mol_type = other DNA
tttacacattaaatttagtt

SEQ ID NO: 239908 - DNA, 20 bp, synthetic construct
  source 1..20: mol_type = other DNA
ctttacacattaaatttagt

SEQ ID NO: 239909 - DNA, 20 bp, synthetic construct
  source 1..20: mol_type = other DNA
actttacacattaaatttag

SEQ ID NO: 239910 - DNA, 20 bp, synthetic construct
  source 1..20: mol_type = other DNA
cactttacacattaaattta

SEQ ID NO: 239911 - DNA, 20 bp, synthetic construct
  source 1..20: mol_type = other DNA
tcactttacacattaaattt

SEQ ID NO: 239912 - DNA, 20 bp, synthetic construct
  source 1..20: mol_type = other DNA
ctcactttacacattaaatt

SEQ ID NO: 239913 - DNA, 20 bp, synthetic construct
  source 1..20: mol_type = other DNA
cctcactttacacattaaat

SEQ ID NO: 239914 - DNA, 20 bp, synthetic construct
  source 1..20: mol_type = other DNA
tcctcactttacacattaaa

SEQ ID NO: 239915 - DNA, 20 bp, synthetic construct
  source 1..20: mol_type = other DNA
gtcctcactttacacattaa

SEQ ID NO: 239916 - DNA, 20 bp, synthetic construct
  source 1..20: mol_type = other DNA
tgtcctcactttacacatta

SEQ ID NO: 239917 - DNA, 20 bp, synthetic construct
  source 1..20: mol_type = other DNA
ttgtcctcactttacacatt

SEQ ID NO: 239918 - DNA, 20 bp, synthetic construct
  source 1..20: mol_type = other DNA
cttgtcctcactttacacat

SEQ ID NO: 239919 - DNA, 20 bp, synthetic construct
  source 1..20: mol_type = other DNA
acttgtcctcactttacaca

SEQ ID NO: 239920 - DNA, 20 bp, synthetic construct
  source 1..20: mol_type = other DNA
aacttgtcctcactttacac

SEQ ID NO: 239921 - DNA, 20 bp, synthetic construct
  source 1..20: mol_type = other DNA
gaacttgtcctcactttaca

SEQ ID NO: 239922 - DNA, 20 bp, synthetic construct
  source 1..20: mol_type = other DNA
tgaacttgtcctcactttac

SEQ ID NO: 239923 - DNA, 20 bp, synthetic construct
  source 1..20: mol_type = other DNA
gtgaacttgtcctcacttta

SEQ ID NO: 239924 - DNA, 20 bp, synthetic construct
  source 1..20: mol_type = other DNA
ggtgaacttgtcctcacttt

SEQ ID NO: 239925 - DNA, 20 bp, synthetic construct
  source 1..20: mol_type = other DNA
tggtgaacttgtcctcactt

SEQ ID NO: 239926 - DNA, 20 bp, synthetic construct
  source 1..20: mol_type = other DNA
ttggtgaacttgtcctcact

SEQ ID NO: 239927 - DNA, 20 bp, synthetic construct
  source 1..20: mol_type = other DNA
cttggtgaacttgtcctcac

SEQ ID NO: 239928 - DNA, 20 bp, synthetic construct
  source 1..20: mol_type = other DNA
acttggtgaacttgtcctca

SEQ ID NO: 239929 - DNA, 20 bp, synthetic construct
  source 1..20: mol_type = other DNA
aacttggtgaacttgtcctc

SEQ ID NO: 239930 - DNA, 20 bp, synthetic construct
  source 1..20: mol_type = other DNA
taacttggtgaacttgtcct

SEQ ID NO: 239931 - DNA, 20 bp, synthetic construct
  source 1..20: mol_type = other DNA
ctaacttggtgaacttgtcc

SEQ ID NO: 239932 - DNA, 20 bp, synthetic construct
  source 1..20: mol_type = other DNA
actaacttggtgaacttgtc

SEQ ID NO: 239933 - DNA, 20 bp, synthetic construct
  source 1..20: mol_type = other DNA
cactaacttggtgaacttgt

SEQ ID NO: 239934 - DNA, 20 bp, synthetic construct
  source 1..20: mol_type = other DNA
acactaacttggtgaacttg

SEQ ID NO: 239935 - DNA, 20 bp, synthetic construct
  source 1..20: mol_type = other DNA
aacactaacttggtgaactt

SEQ ID NO: 239936 - DNA, 20 bp, synthetic construct
  source 1..20: mol_type = other DNA
aaacactaacttggtgaact

SEQ ID NO: 239937 - DNA, 20 bp, synthetic construct
  source 1..20: mol_type = other DNA
caaacactaacttggtgaac

SEQ ID NO: 239938 - DNA, 20 bp, synthetic construct
  source 1..20: mol_type = other DNA
tcaaacactaacttggtgaa

SEQ ID NO: 239939 - DNA, 20 bp, synthetic construct
  source 1..20: mol_type = other DNA
ctcaaacactaacttggtga

SEQ ID NO: 239940 - DNA, 20 bp, synthetic construct
  source 1..20: mol_type = other DNA
actcaaacactaacttggtg

SEQ ID NO: 239941 - DNA, 20 bp, synthetic construct
  source 1..20: mol_type = other DNA
aactcaaacactaacttggt

SEQ ID NO: 239942 - DNA, 20 bp, synthetic construct
  source 1..20: mol_type = other DNA
caactcaaacactaacttgg

SEQ ID NO: 239943 - DNA, 20 bp, synthetic construct
  source 1..20: mol_type = other DNA
gcaactcaaacactaacttg

SEQ ID NO: 239944 - DNA, 20 bp, synthetic construct
  source 1..20: mol_type = other DNA
ggcaactcaaacactaactt

SEQ ID NO: 239945 - DNA, 20 bp, synthetic construct
  source 1..20: mol_type = other DNA
aggcaactcaaacactaact

SEQ ID NO: 239946 - DNA, 20 bp, synthetic construct
  source 1..20: mol_type = other DNA
taggcaactcaaacactaac

SEQ ID NO: 239947 - DNA, 20 bp, synthetic construct
  source 1..20: mol_type = other DNA
ttaggcaactcaaacactaa

SEQ ID NO: 239948 - DNA, 20 bp, synthetic construct
  source 1..20: mol_type = other DNA
tttaggcaactcaaacacta

SEQ ID NO: 239949 - DNA, 20 bp, synthetic construct
  source 1..20: mol_type = other DNA
ttttaggcaactcaaacact

SEQ ID NO: 239950 - DNA, 20 bp, synthetic construct
  source 1..20: mol_type = other DNA
attttaggcaactcaaacac

SEQ ID NO: 239951 - DNA, 20 bp, synthetic construct
  source 1..20: mol_type = other DNA
tattttaggcaactcaaaca

SEQ ID NO: 239952 - DNA, 20 bp, synthetic construct
  source 1..20: mol_type = other DNA
atattttaggcaactcaaac

SEQ ID NO: 239953 - DNA, 20 bp, synthetic construct
  source 1..20: mol_type = other DNA
catattttaggcaactcaaa

SEQ ID NO: 239954 - DNA, 20 bp, synthetic construct
  source 1..20: mol_type = other DNA
acatattttaggcaactcaa

SEQ ID NO: 239955 - DNA, 20 bp, synthetic construct
  source 1..20: mol_type = other DNA
aacatattttaggcaactca

SEQ ID NO: 239956 - DNA, 20 bp, synthetic construct
  source 1..20: mol_type = other DNA
aaacatattttaggcaactc

SEQ ID NO: 239957 - DNA, 20 bp, synthetic construct
  source 1..20: mol_type = other DNA
caaacatattttaggcaact

SEQ ID NO: 239958 - DNA, 20 bp, synthetic construct
  source 1..20: mol_type = other DNA
gcaaacatattttaggcaac

SEQ ID NO: 239959 - DNA, 20 bp, synthetic construct
  source 1..20: mol_type = other DNA
agcaaacatattttaggcaa

SEQ ID NO: 239960 - DNA, 20 bp, synthetic construct
  source 1..20: mol_type = other DNA
tagcaaacatattttaggca

SEQ ID NO: 239961 - DNA, 20 bp, synthetic construct
  source 1..20: mol_type = other DNA
ttagcaaacatattttaggc

SEQ ID NO: 239962 - DNA, 20 bp, synthetic construct
  source 1..20: mol_type = other DNA
tttagcaaacatattttagg

SEQ ID NO: 239963 - DNA, 20 bp, synthetic construct
  source 1..20: mol_type = other DNA
ttttagcaaacatattttag

SEQ ID NO: 239964 - DNA, 20 bp, synthetic construct
  source 1..20: mol_type = other DNA
gttttagcaaacatatttta

SEQ ID NO: 239965 - DNA, 20 bp, synthetic construct
  source 1..20: mol_type = other DNA
agttttagcaaacatatttt

SEQ ID NO: 239966 - DNA, 20 bp, synthetic construct
  source 1..20: mol_type = other DNA
tagttttagcaaacatattt

SEQ ID NO: 239967 - DNA, 20 bp, synthetic construct
  source 1..20: mol_type = other DNA
atagttttagcaaacatatt

SEQ ID NO: 239968 - DNA, 20 bp, synthetic construct
  source 1..20: mol_type = other DNA
aatagttttagcaaacatat

SEQ ID NO: 239969 - DNA, 20 bp, synthetic construct
  source 1..20: mol_type = other DNA
gaatagttttagcaaacata

SEQ ID NO: 239970 - DNA, 20 bp, synthetic construct
  source 1..20: mol_type = other DNA
tgaatagttttagcaaacat

SEQ ID NO: 239971 - DNA, 20 bp, synthetic construct
  source 1..20: mol_type = other DNA
ttgaatagttttagcaaaca

SEQ ID NO: 239972 - DNA, 20 bp, synthetic construct
  source 1..20: mol_type = other DNA
tttgaatagttttagcaaac

SEQ ID NO: 239973 - DNA, 20 bp, synthetic construct
  source 1..20: mol_type = other DNA
ctttgaatagttttagcaaa

SEQ ID NO: 239974 - DNA, 20 bp, synthetic construct
  source 1..20: mol_type = other DNA
gctttgaatagttttagcaa

SEQ ID NO: 239975 - DNA, 20 bp, synthetic construct
  source 1..20: mol_type = other DNA
agctttgaatagttttagca

SEQ ID NO: 239976 - DNA, 20 bp, synthetic construct
  source 1..20: mol_type = other DNA
aagctttgaatagttttagc

SEQ ID NO: 239977 - DNA, 20 bp, synthetic construct
  source 1..20: mol_type = other DNA
aaagctttgaatagttttag

SEQ ID NO: 239978 - DNA, 20 bp, synthetic construct
  source 1..20: mol_type = other DNA
gaaagctttgaatagtttta

SEQ ID NO: 239979 - DNA, 20 bp, synthetic construct
  source 1..20: mol_type = other DNA
tgaaagctttgaatagtttt

SEQ ID NO: 239980 - DNA, 20 bp, synthetic construct
  source 1..20: mol_type = other DNA
gtgaaagctttgaatagttt

SEQ ID NO: 239981 - DNA, 20 bp, synthetic construct
  source 1..20: mol_type = other DNA
tgtgaaagctttgaatagtt

SEQ ID NO: 239982 - DNA, 20 bp, synthetic construct
  source 1..20: mol_type = other DNA
atgtgaaagctttgaatagt

SEQ ID NO: 239983 - DNA, 20 bp, synthetic construct
  source 1..20: mol_type = other DNA
tatgtgaaagctttgaatag

SEQ ID NO: 239984 - DNA, 20 bp, synthetic construct
  source 1..20: mol_type = other DNA
ttatgtgaaagctttgaata

SEQ ID NO: 239985 - DNA, 20 bp, synthetic construct
  source 1..20: mol_type = other DNA
tttatgtgaaagctttgaat

SEQ ID NO: 239986 - DNA, 20 bp, synthetic construct
  source 1..20: mol_type = other DNA
ttttatgtgaaagctttgaa

SEQ ID NO: 239987 - DNA, 20 bp, synthetic construct
  source 1..20: mol_type = other DNA
gttttatgtgaaagctttga

SEQ ID NO: 239988 - DNA, 20 bp, synthetic construct
  source 1..20: mol_type = other DNA
tgttttatgtgaaagctttg

SEQ ID NO: 239989 - DNA, 20 bp, synthetic construct
  source 1..20: mol_type = other DNA
atgttttatgtgaaagcttt

SEQ ID NO: 239990 - DNA, 20 bp, synthetic construct
  source 1..20: mol_type = other DNA
catgttttatgtgaaagctt

SEQ ID NO: 239991 - DNA, 20 bp, synthetic construct
  source 1..20: mol_type = other DNA
tcatgttttatgtgaaagct

SEQ ID NO: 239992 - DNA, 20 bp, synthetic construct
  source 1..20: mol_type = other DNA
atcatgttttatgtgaaagc

SEQ ID NO: 239993 - DNA, 20 bp, synthetic construct
  source 1..20: mol_type = other DNA
gatcatgttttatgtgaaag

SEQ ID NO: 239994 - DNA, 20 bp, synthetic construct
  source 1..20: mol_type = other DNA
tgatcatgttttatgtgaaa

SEQ ID NO: 239995 - DNA, 20 bp, synthetic construct
  source 1..20: mol_type = other DNA
ctgatcatgttttatgtgaa

SEQ ID NO: 239996 - DNA, 20 bp, synthetic construct
  source 1..20: mol_type = other DNA
tctgatcatgttttatgtga

SEQ ID NO: 239997 - DNA, 20 bp, synthetic construct
  source 1..20: mol_type = other DNA
ttctgatcatgttttatgtg

SEQ ID NO: 239998 - DNA, 20 bp, synthetic construct
  source 1..20: mol_type = other DNA
cttctgatcatgttttatgt

SEQ ID NO: 239999 - DNA, 20 bp, synthetic construct
  source 1..20: mol_type = other DNA
acttctgatcatgttttatg

SEQ ID NO: 240000 - DNA, 20 bp, synthetic construct
  source 1..20: mol_type = other DNA
aacttctgatcatgttttat

SEQ ID NO: 240001 - DNA, 20 bp, synthetic construct
  source 1..20: mol_type = other DNA
gaacttctgatcatgtttta

SEQ ID NO: 240002 - DNA, 20 bp, synthetic construct
  source 1..20: mol_type = other DNA
agaacttctgatcatgtttt

SEQ ID NO: 240003 - DNA, 20 bp, synthetic construct
  source 1..20: mol_type = other DNA
tagaacttctgatcatgttt

SEQ ID NO: 240004 - DNA, 20 bp, synthetic construct
  source 1..20: mol_type = other DNA
atagaacttctgatcatgtt

SEQ ID NO: 240005 - DNA, 20 bp, synthetic construct
  source 1..20: mol_type = other DNA
catagaacttctgatcatgt

SEQ ID NO: 240006 - DNA, 20 bp, synthetic construct
  source 1..20: mol_type = other DNA
gcatagaacttctgatcatg

SEQ ID NO: 240007 - DNA, 20 bp, synthetic construct
  source 1..20: mol_type = other DNA
ggcatagaacttctgatcat

SEQ ID NO: 240008 - DNA, 20 bp, synthetic construct
  source 1..20: mol_type = other DNA
tggcatagaacttctgatca

SEQ ID NO: 240009 - DNA, 20 bp, synthetic construct
  source 1..20: mol_type = other DNA
ttggcatagaacttctgatc

SEQ ID NO: 240010 - DNA, 20 bp, synthetic construct
  source 1..20: mol_type = other DNA
tttggcatagaacttctgat

SEQ ID NO: 240011 - DNA, 20 bp, synthetic construct
  source 1..20: mol_type = other DNA
ttttggcatagaacttctga

SEQ ID NO: 240012 - DNA, 20 bp, synthetic construct
  source 1..20: mol_type = other DNA
gttttggcatagaacttctg

SEQ ID NO: 240013 - DNA, 20 bp, synthetic construct
  source 1..20: mol_type = other DNA
tgttttggcatagaacttct

SEQ ID NO: 240014 - DNA, 20 bp, synthetic construct
  source 1..20: mol_type = other DNA
atgttttggcatagaacttc

SEQ ID NO: 240015 - DNA, 20 bp, synthetic construct
  source 1..20: mol_type = other DNA
tatgttttggcatagaactt

SEQ ID NO: 240016 - DNA, 20 bp, synthetic construct
  source 1..20: mol_type = other DNA
atatgttttggcatagaact

SEQ ID NO: 240017 - DNA, 20 bp, synthetic construct
  source 1..20: mol_type = other DNA
catatgttttggcatagaac

SEQ ID NO: 240018 - DNA, 20 bp, synthetic construct
  source 1..20: mol_type = other DNA
acatatgttttggcatagaa

SEQ ID NO: 240019 - DNA, 20 bp, synthetic construct
  source 1..20: mol_type = other DNA
cacatatgttttggcataga

SEQ ID NO: 240020 - DNA, 20 bp, synthetic construct
  source 1..20: mol_type = other DNA
acacatatgttttggcatag

SEQ ID NO: 240021 - DNA, 20 bp, synthetic construct
  source 1..20: mol_type = other DNA
cacacatatgttttggcata

SEQ ID NO: 240022 - DNA, 20 bp, synthetic construct
  source 1..20: mol_type = other DNA
acacacatatgttttggcat

SEQ ID NO: 240023 - DNA, 20 bp, synthetic construct
  source 1..20: mol_type = other DNA
cacacacatatgttttggca

SEQ ID NO: 240024 - DNA, 20 bp, synthetic construct
  source 1..20: mol_type = other DNA
acacacacatatgttttggc

SEQ ID NO: 240025 - DNA, 20 bp, synthetic construct
  source 1..20: mol_type = other DNA
tacacacacatatgttttgg

SEQ ID NO: 240026 - DNA, 20 bp, synthetic construct
  source 1..20: mol_type = other DNA
atacacacacatatgttttg

SEQ ID NO: 240027 - DNA, 20 bp, synthetic construct
  source 1..20: mol_type = other DNA
tatacacacacatatgtttt

SEQ ID NO: 240028 - DNA, 20 bp, synthetic construct
  source 1..20: mol_type = other DNA
atatacacacacatatgttt

SEQ ID NO: 240029 - DNA, 20 bp, synthetic construct
  source 1..20: mol_type = other DNA
tatatacacacacatatgtt

SEQ ID NO: 240030 - DNA, 20 bp, synthetic construct
  source 1..20: mol_type = other DNA
atatatacacacacatatgt

SEQ ID NO: 240031 - DNA, 20 bp, synthetic construct
  source 1..20: mol_type = other DNA
tatatatacacacacatatg

SEQ ID NO: 240032 - DNA, 20 bp, synthetic construct
  source 1..20: mol_type = other DNA
atatatatacacacacatat

SEQ ID NO: 240033 - DNA, 20 bp, synthetic construct
  source 1..20: mol_type = other DNA
tatatatatacacacacata

SEQ ID NO: 240034 - DNA, 20 bp, synthetic construct
  source 1..20: mol_type = other DNA
atatatatatacacacacat

SEQ ID NO: 240035 - DNA, 20 bp, synthetic construct
  source 1..20: mol_type = other DNA
catatatatatacacacaca

SEQ ID NO: 240036 - DNA, 20 bp, synthetic construct
  source 1..20: mol_type = other DNA
gcatatatatatacacacac

SEQ ID NO: 240037 - DNA, 20 bp, synthetic construct
  source 1..20: mol_type = other DNA
tgcatatatatatacacaca

SEQ ID NO: 240038 - DNA, 20 bp, synthetic construct
  source 1..20: mol_type = other DNA
gtgcatatatatatacacac

SEQ ID NO: 240039 - DNA, 20 bp, synthetic construct
  source 1..20: mol_type = other DNA
agtgcatatatatatacaca

SEQ ID NO: 240040 - DNA, 20 bp, synthetic construct
  source 1..20: mol_type = other DNA
tagtgcatatatatatacac

SEQ ID NO: 240041 - DNA, 20 bp, synthetic construct
  source 1..20: mol_type = other DNA
atagtgcatatatatataca

SEQ ID NO: 240042 - DNA, 20 bp, synthetic construct
  source 1..20: mol_type = other DNA
tatagtgcatatatatatac

SEQ ID NO: 240043 - DNA, 20 bp, synthetic construct
  source 1..20: mol_type = other DNA
atatagtgcatatatatata

SEQ ID NO: 240044 - DNA, 20 bp, synthetic construct
  source 1..20: mol_type = other DNA
tatatagtgcatatatatat

SEQ ID NO: 240045 - DNA, 20 bp, synthetic construct
  source 1..20: mol_type = other DNA
atatatagtgcatatatata

SEQ ID NO: 240046 - DNA, 20 bp, synthetic construct
  source 1..20: mol_type = other DNA
tatatatagtgcatatatat

SEQ ID NO: 240047 - DNA, 20 bp, synthetic construct
  source 1..20: mol_type = other DNA
gtatatatagtgcatatata

SEQ ID NO: 240048 - DNA, 20 bp, synthetic construct
  source 1..20: mol_type = other DNA
agtatatatagtgcatatat

SEQ ID NO: 240049 - DNA, 20 bp, synthetic construct
  source 1..20: mol_type = other DNA
cagtatatatagtgcatata

SEQ ID NO: 240050 - DNA, 20 bp, synthetic construct
  source 1..20: mol_type = other DNA
acagtatatatagtgcatat

SEQ ID NO: 240051 - DNA, 20 bp, synthetic construct
  source 1..20: mol_type = other DNA
tacagtatatatagtgcata

SEQ ID NO: 240052 - DNA, 20 bp, synthetic construct
  source 1..20: mol_type = other DNA
atacagtatatatagtgcat

SEQ ID NO: 240053 - DNA, 20 bp, synthetic construct
  source 1..20: mol_type = other DNA
tatacagtatatatagtgca

SEQ ID NO: 240054 - DNA, 20 bp, synthetic construct
  source 1..20: mol_type = other DNA
atatacagtatatatagtgc

SEQ ID NO: 240055 - DNA, 20 bp, synthetic construct
  source 1..20: mol_type = other DNA
tatatacagtatatatagtg

SEQ ID NO: 240056 - DNA, 20 bp, synthetic construct
  source 1..20: mol_type = other DNA
ttatatacagtatatatagt

SEQ ID NO: 240057 - DNA, 20 bp, synthetic construct
  source 1..20: mol_type = other DNA
tttatatacagtatatatag

SEQ ID NO: 240058 - DNA, 20 bp, synthetic construct
  source 1..20: mol_type = other DNA
ttttatatacagtatatata

SEQ ID NO: 240059 - DNA, 20 bp, synthetic construct
  source 1..20: mol_type = other DNA
tttttatatacagtatatat

SEQ ID NO: 240060 - DNA, 20 bp, synthetic construct
  source 1..20: mol_type = other DNA
atttttatatacagtatata

SEQ ID NO: 240061 - DNA, 20 bp, synthetic construct
  source 1..20: mol_type = other DNA
catttttatatacagtatat

SEQ ID NO: 240062 - DNA, 20 bp, synthetic construct
  source 1..20: mol_type = other DNA
gcatttttatatacagtata

SEQ ID NO: 240063 - DNA, 20 bp, synthetic construct
  source 1..20: mol_type = other DNA
tgcatttttatatacagtat

SEQ ID NO: 240064 - DNA, 20 bp, synthetic construct
  source 1..20: mol_type = other DNA
ttgcatttttatatacagta

SEQ ID NO: 240065 - DNA, 20 bp, synthetic construct
  source 1..20: mol_type = other DNA
tttgcatttttatatacagt

SEQ ID NO: 240066 - DNA, 20 bp, synthetic construct
  source 1..20: mol_type = other DNA
ttttgcatttttatatacag

SEQ ID NO: 240067 - DNA, 20 bp, synthetic construct
  source 1..20: mol_type = other DNA
attttgcatttttatataca

SEQ ID NO: 240068 - DNA, 20 bp, synthetic construct
  source 1..20: mol_type = other DNA
gattttgcatttttatatac

SEQ ID NO: 240069 - DNA, 20 bp, synthetic construct
  source 1..20: mol_type = other DNA
agattttgcatttttatata

SEQ ID NO: 240070 - DNA, 20 bp, synthetic construct
  source 1..20: mol_type = other DNA
tagattttgcatttttatat

SEQ ID NO: 240071 - DNA, 20 bp, synthetic construct
  source 1..20: mol_type = other DNA
ttagattttgcatttttata

SEQ ID NO: 240072 - DNA, 20 bp, synthetic construct
  source 1..20: mol_type = other DNA
tttagattttgcatttttat

SEQ ID NO: 240073 - DNA, 20 bp, synthetic construct
  source 1..20: mol_type = other DNA
atttagattttgcattttta

SEQ ID NO: 240074 - DNA, 20 bp, synthetic construct
  source 1..20: mol_type = other DNA
aatttagattttgcattttt

SEQ ID NO: 240075 - DNA, 20 bp, synthetic construct
  source 1..20: mol_type = other DNA
caatttagattttgcatttt

SEQ ID NO: 240076 - DNA, 20 bp, synthetic construct
  source 1..20: mol_type = other DNA
gcaatttagattttgcattt

SEQ ID NO: 240077 - DNA, 20 bp, synthetic construct
  source 1..20: mol_type = other DNA
ggcaatttagattttgcatt

SEQ ID NO: 240078 - DNA, 20 bp, synthetic construct
  source 1..20: mol_type = other DNA
tggcaatttagattttgcat

SEQ ID NO: 240079 - DNA, 20 bp, synthetic construct
  source 1..20: mol_type = other DNA
ttggcaatttagattttgca

SEQ ID NO: 240080 - DNA, 20 bp, synthetic construct
  source 1..20: mol_type = other DNA
gttggcaatttagattttgc

SEQ ID NO: 240081 - DNA, 20 bp, synthetic construct
  source 1..20: mol_type = other DNA
ggttggcaatttagattttg

SEQ ID NO: 240082 - DNA, 20 bp, synthetic construct
  source 1..20: mol_type = other DNA
aggttggcaatttagatttt

SEQ ID NO: 240083 - DNA, 20 bp, synthetic construct
  source 1..20: mol_type = other DNA
aaggttggcaatttagattt

SEQ ID NO: 240084 - DNA, 20 bp, synthetic construct
  source 1..20: mol_type = other DNA
aaaggttggcaatttagatt

SEQ ID NO: 240085 - DNA, 20 bp, synthetic construct
  source 1..20: mol_type = other DNA
aaaaggttggcaatttagat

SEQ ID NO: 240086 - DNA, 20 bp, synthetic construct
  source 1..20: mol_type = other DNA
taaaaggttggcaatttaga

SEQ ID NO: 240087 - DNA, 20 bp, synthetic construct
  source 1..20: mol_type = other DNA
ctaaaaggttggcaatttag

SEQ ID NO: 240088 - DNA, 20 bp, synthetic construct
  source 1..20: mol_type = other DNA
tctaaaaggttggcaattta

SEQ ID NO: 240089 - DNA, 20 bp, synthetic construct
  source 1..20: mol_type = other DNA
ttctaaaaggttggcaattt

SEQ ID NO: 240090 - DNA, 20 bp, synthetic construct
  source 1..20: mol_type = other DNA
tttctaaaaggttggcaatt

SEQ ID NO: 240091 - DNA, 20 bp, synthetic construct
  source 1..20: mol_type = other DNA
atttctaaaaggttggcaat

SEQ ID NO: 240092 - DNA, 20 bp, synthetic construct
  source 1..20: mol_type = other DNA
aatttctaaaaggttggcaa

SEQ ID NO: 240093 - DNA, 20 bp, synthetic construct
  source 1..20: mol_type = other DNA
caatttctaaaaggttggca

SEQ ID NO: 240094 - DNA, 20 bp, synthetic construct
  source 1..20: mol_type = other DNA
gcaatttctaaaaggttggc

SEQ ID NO: 240095 - DNA, 20 bp, synthetic construct
  source 1..20: mol_type = other DNA
agcaatttctaaaaggttgg

SEQ ID NO: 240096 - DNA, 20 bp, synthetic construct
  source 1..20: mol_type = other DNA
gagcaatttctaaaaggttg

SEQ ID NO: 240097 - DNA, 20 bp, synthetic construct
  source 1..20: mol_type = other DNA
agagcaatttctaaaaggtt

SEQ ID NO: 240098 - DNA, 20 bp, synthetic construct
  source 1..20: mol_type = other DNA
cagagcaatttctaaaaggt

SEQ ID NO: 240099 - DNA, 20 bp, synthetic construct
  source 1..20: mol_type = other DNA
tcagagcaatttctaaaagg

SEQ ID NO: 240100 - DNA, 20 bp, synthetic construct
  source 1..20: mol_type = other DNA
ttcagagcaatttctaaaag

SEQ ID NO: 240101 - DNA, 20 bp, synthetic construct
  source 1..20: mol_type = other DNA
tttcagagcaatttctaaaa

SEQ ID NO: 240102 - DNA, 20 bp, synthetic construct
  source 1..20: mol_type = other DNA
ctttcagagcaatttctaaa

SEQ ID NO: 240103 - DNA, 20 bp, synthetic construct
  source 1..20: mol_type = other DNA
cctttcagagcaatttctaa

SEQ ID NO: 240104 - DNA, 20 bp, synthetic construct
  source 1..20: mol_type = other DNA
tcctttcagagcaatttcta

SEQ ID NO: 240105 - DNA, 20 bp, synthetic construct
  source 1..20: mol_type = other DNA
ttcctttcagagcaatttct

SEQ ID NO: 240106 - DNA, 20 bp, synthetic construct
  source 1..20: mol_type = other DNA
tttcctttcagagcaatttc

SEQ ID NO: 240107 - DNA, 20 bp, synthetic construct
  source 1..20: mol_type = other DNA
ctttcctttcagagcaattt

SEQ ID NO: 240108 - DNA, 20 bp, synthetic construct
  source 1..20: mol_type = other DNA
gctttcctttcagagcaatt

SEQ ID NO: 240109 - DNA, 20 bp, synthetic construct
  source 1..20: mol_type = other DNA
tgctttcctttcagagcaat

SEQ ID NO: 240110 - DNA, 20 bp, synthetic construct
  source 1..20: mol_type = other DNA
atgctttcctttcagagcaa

SEQ ID NO: 240111 - DNA, 20 bp, synthetic construct
  source 1..20: mol_type = other DNA
aatgctttcctttcagagca

SEQ ID NO: 240112 - DNA, 20 bp, synthetic construct
  source 1..20: mol_type = other DNA
aaatgctttcctttcagagc

SEQ ID NO: 240113 - DNA, 20 bp, synthetic construct
  source 1..20: mol_type = other DNA
gaaatgctttcctttcagag

SEQ ID NO: 240114 - DNA, 20 bp, synthetic construct
  source 1..20: mol_type = other DNA
tgaaatgctttcctttcaga

SEQ ID NO: 240115 - DNA, 20 bp, synthetic construct
  source 1..20: mol_type = other DNA
ttgaaatgctttcctttcag

SEQ ID NO: 240116 - DNA, 20 bp, synthetic construct
  source 1..20: mol_type = other DNA
cttgaaatgctttcctttca

SEQ ID NO: 240117 - DNA, 20 bp, synthetic construct
  source 1..20: mol_type = other DNA
tcttgaaatgctttcctttc

SEQ ID NO: 240118 - DNA, 20 bp, synthetic construct
  source 1..20: mol_type = other DNA
atcttgaaatgctttccttt

SEQ ID NO: 240119 - DNA, 20 bp, synthetic construct
  source 1..20: mol_type = other DNA
tatcttgaaatgctttcctt

SEQ ID NO: 240120 - DNA, 20 bp, synthetic construct
  source 1..20: mol_type = other DNA
ttatcttgaaatgctttcct

SEQ ID NO: 240121 - DNA, 20 bp, synthetic construct
  source 1..20: mol_type = other DNA
attatcttgaaatgctttcc

SEQ ID NO: 240122 - DNA, 20 bp, synthetic construct
  source 1..20: mol_type = other DNA
aattatcttgaaatgctttc

SEQ ID NO: 240123 - DNA, 20 bp, synthetic construct
  source 1..20: mol_type = other DNA
aaattatcttgaaatgcttt

SEQ ID NO: 240124 - DNA, 20 bp, synthetic construct
  source 1..20: mol_type = other DNA
caaattatcttgaaatgctt

SEQ ID NO: 240125 - DNA, 20 bp, synthetic construct
  source 1..20: mol_type = other DNA
gcaaattatcttgaaatgct

SEQ ID NO: 240126 - DNA, 20 bp, synthetic construct
  source 1..20: mol_type = other DNA
agcaaattatcttgaaatgc

SEQ ID NO: 240127 - DNA, 20 bp, synthetic construct
  source 1..20: mol_type = other DNA
aagcaaattatcttgaaatg

SEQ ID NO: 240128 - DNA, 20 bp, synthetic construct
  source 1..20: mol_type = other DNA
taagcaaattatcttgaaat

SEQ ID NO: 240129 - DNA, 20 bp, synthetic construct
  source 1..20: mol_type = other DNA
gtaagcaaattatcttgaaa

SEQ ID NO: 240130 - DNA, 20 bp, synthetic construct
  source 1..20: mol_type = other DNA
ggtaagcaaattatcttgaa

SEQ ID NO: 240131 - DNA, 20 bp, synthetic construct
  source 1..20: mol_type = other DNA
gggtaagcaaattatcttga

SEQ ID NO: 240132 - DNA, 20 bp, synthetic construct
  source 1..20: mol_type = other DNA
tgggtaagcaaattatcttg

SEQ ID NO: 240133 - DNA, 20 bp, synthetic construct
  source 1..20: mol_type = other DNA
ttgggtaagcaaattatctt

SEQ ID NO: 240134 - DNA, 20 bp, synthetic construct
  source 1..20: mol_type = other DNA
tttgggtaagcaaattatct

SEQ ID NO: 240135 - DNA, 20 bp, synthetic construct
  source 1..20: mol_type = other DNA
ctttgggtaagcaaattatc

SEQ ID NO: 240136 - DNA, 20 bp, synthetic construct
  source 1..20: mol_type = other DNA
tctttgggtaagcaaattat

SEQ ID NO: 240137 - DNA, 20 bp, synthetic construct
  source 1..20: mol_type = other DNA
ttctttgggtaagcaaatta

SEQ ID NO: 240138 - DNA, 20 bp, synthetic construct
  source 1..20: mol_type = other DNA
attctttgggtaagcaaatt

SEQ ID NO: 240139 - DNA, 20 bp, synthetic construct
  source 1..20: mol_type = other DNA
tattctttgggtaagcaaat

SEQ ID NO: 240140 - DNA, 20 bp, synthetic construct
  source 1..20: mol_type = other DNA
atattctttgggtaagcaaa

SEQ ID NO: 240141 - DNA, 20 bp, synthetic construct
  source 1..20: mol_type = other DNA
tatattctttgggtaagcaa

SEQ ID NO: 240142 - DNA, 20 bp, synthetic construct
  source 1..20: mol_type = other DNA
gtatattctttgggtaagca

SEQ ID NO: 240143 - DNA, 20 bp, synthetic construct
  source 1..20: mol_type = other DNA
agtatattctttgggtaagc

SEQ ID NO: 240144 - DNA, 20 bp, synthetic construct
  source 1..20: mol_type = other DNA
aagtatattctttgggtaag

SEQ ID NO: 240145 - DNA, 20 bp, synthetic construct
  source 1..20: mol_type = other DNA
aaagtatattctttgggtaa

SEQ ID NO: 240146 - DNA, 20 bp, synthetic construct
  source 1..20: mol_type = other DNA
gaaagtatattctttgggta

SEQ ID NO: 240147 - DNA, 20 bp, synthetic construct
  source 1..20: mol_type = other DNA
ggaaagtatattctttgggt

SEQ ID NO: 240148 - DNA, 20 bp, synthetic construct
  source 1..20: mol_type = other DNA
tggaaagtatattctttggg

SEQ ID NO: 240149 - DNA, 20 bp, synthetic construct
  source 1..20: mol_type = other DNA
ttggaaagtatattctttgg

SEQ ID NO: 240150 - DNA, 20 bp, synthetic construct
  source 1..20: mol_type = other DNA
cttggaaagtatattctttg

SEQ ID NO: 240151 - DNA, 20 bp, synthetic construct
  source 1..20: mol_type = other DNA
tcttggaaagtatattcttt

SEQ ID NO: 240152 - DNA, 20 bp, synthetic construct
  source 1..20: mol_type = other DNA
ttcttggaaagtatattctt

SEQ ID NO: 240153 - DNA, 20 bp, synthetic construct
  source 1..20: mol_type = other DNA
tttcttggaaagtatattct

SEQ ID NO: 240154 - DNA, 20 bp, synthetic construct
  source 1..20: mol_type = other DNA
ctttcttggaaagtatattc

SEQ ID NO: 240155 - DNA, 20 bp, synthetic construct
  source 1..20: mol_type = other DNA
gctttcttggaaagtatatt

SEQ ID NO: 240156 - DNA, 20 bp, synthetic construct
  source 1..20: mol_type = other DNA
tgctttcttggaaagtatat

SEQ ID NO: 240157 - DNA, 20 bp, synthetic construct
  source 1..20: mol_type = other DNA
ttgctttcttggaaagtata

SEQ ID NO: 240158 - DNA, 20 bp, synthetic construct
  source 1..20: mol_type = other DNA
cttgctttcttggaaagtat

SEQ ID NO: 240159 - DNA, 20 bp, synthetic construct
  source 1..20: mol_type = other DNA
acttgctttcttggaaagta

SEQ ID NO: 240160 - DNA, 20 bp, synthetic construct
  source 1..20: mol_type = other DNA
tacttgctttcttggaaagt

SEQ ID NO: 240161 - DNA, 20 bp, synthetic construct
  source 1..20: mol_type = other DNA
ttacttgctttcttggaaag

SEQ ID NO: 240162 - DNA, 20 bp, synthetic construct
  source 1..20: mol_type = other DNA
attacttgctttcttggaaa

SEQ ID NO: 240163 - DNA, 20 bp, synthetic construct
  source 1..20: mol_type = other DNA
tattacttgctttcttggaa

SEQ ID NO: 240164 - DNA, 20 bp, synthetic construct
  source 1..20: mol_type = other DNA
gtattacttgctttcttgga

SEQ ID NO: 240165 - DNA, 20 bp, synthetic construct
  source 1..20: mol_type = other DNA
agtattacttgctttcttgg

SEQ ID NO: 240166 - DNA, 20 bp, synthetic construct
  source 1..20: mol_type = other DNA
aagtattacttgctttcttg

SEQ ID NO: 240167 - DNA, 20 bp, synthetic construct
  source 1..20: mol_type = other DNA
taagtattacttgctttctt

SEQ ID NO: 240168 - DNA, 20 bp, synthetic construct
  source 1..20: mol_type = other DNA
ttaagtattacttgctttct

SEQ ID NO: 240169 - DNA, 20 bp, synthetic construct
  source 1..20: mol_type = other DNA
cttaagtattacttgctttc

SEQ ID NO: 240170 - DNA, 20 bp, synthetic construct
  source 1..20: mol_type = other DNA
ccttaagtattacttgcttt

SEQ ID NO: 240171 - DNA, 20 bp, synthetic construct
  source 1..20: mol_type = other DNA
accttaagtattacttgctt

SEQ ID NO: 240172 - DNA, 20 bp, synthetic construct
  source 1..20: mol_type = other DNA
caccttaagtattacttgct

SEQ ID NO: 240173 - DNA, 20 bp, synthetic construct
  source 1..20: mol_type = other DNA
acaccttaagtattacttgc

SEQ ID NO: 240174 - DNA, 20 bp, synthetic construct
  source 1..20: mol_type = other DNA
aacaccttaagtattacttg

SEQ ID NO: 240175 - DNA, 20 bp, synthetic construct
  source 1..20: mol_type = other DNA
gaacaccttaagtattactt

SEQ ID NO: 240176 - DNA, 20 bp, synthetic construct
  source 1..20: mol_type = other DNA
tgaacaccttaagtattact

SEQ ID NO: 240177 - DNA, 20 bp, synthetic construct
  source 1..20: mol_type = other DNA
atgaacaccttaagtattac

SEQ ID NO: 240178 - DNA, 20 bp, synthetic construct
  source 1..20: mol_type = other DNA
tatgaacaccttaagtatta

SEQ ID NO: 240179 - DNA, 20 bp, synthetic construct
  source 1..20: mol_type = other DNA
ttatgaacaccttaagtatt

SEQ ID NO: 240180 - DNA, 20 bp, synthetic construct
  source 1..20: mol_type = other DNA
attatgaacaccttaagtat

SEQ ID NO: 240181 - DNA, 20 bp, synthetic construct
  source 1..20: mol_type = other DNA
gattatgaacaccttaagta

SEQ ID NO: 240182 - DNA, 20 bp, synthetic construct
  source 1..20: mol_type = other DNA
ggattatgaacaccttaagt

SEQ ID NO: 240183 - DNA, 20 bp, synthetic construct
  source 1..20: mol_type = other DNA
aggattatgaacaccttaag

SEQ ID NO: 240184 - DNA, 20 bp, synthetic construct
  source 1..20: mol_type = other DNA
gaggattatgaacaccttaa

SEQ ID NO: 240185 - DNA, 20 bp, synthetic construct
  source 1..20: mol_type = other DNA
tgaggattatgaacacctta

SEQ ID NO: 240186 - DNA, 20 bp, synthetic construct
  source 1..20: mol_type = other DNA
atgaggattatgaacacctt

SEQ ID NO: 240187 - DNA, 20 bp, synthetic construct
  source 1..20: mol_type = other DNA
gatgaggattatgaacacct

SEQ ID NO: 240188 - DNA, 20 bp, synthetic construct
  source 1..20: mol_type = other DNA
tgatgaggattatgaacacc

SEQ ID NO: 240189 - DNA, 20 bp, synthetic construct
  source 1..20: mol_type = other DNA
ttgatgaggattatgaacac

SEQ ID NO: 240190 - DNA, 20 bp, synthetic construct
  source 1..20: mol_type = other DNA
tttgatgaggattatgaaca

SEQ ID NO: 240191 - DNA, 20 bp, synthetic construct
  source 1..20: mol_type = other DNA
atttgatgaggattatgaac

SEQ ID NO: 240192 - DNA, 20 bp, synthetic construct
  source 1..20: mol_type = other DNA
aatttgatgaggattatgaa

SEQ ID NO: 240193 - DNA, 20 bp, synthetic construct
  source 1..20: mol_type = other DNA
taatttgatgaggattatga

SEQ ID NO: 240194 - DNA, 20 bp, synthetic construct
  source 1..20: mol_type = other DNA
ttaatttgatgaggattatg

SEQ ID NO: 240195 - DNA, 20 bp, synthetic construct
  source 1..20: mol_type = other DNA
attaatttgatgaggattat

SEQ ID NO: 240196 - DNA, 20 bp, synthetic construct
  source 1..20: mol_type = other DNA
aattaatttgatgaggatta

SEQ ID NO: 240197 - DNA, 20 bp, synthetic construct
  source 1..20: mol_type = other DNA
gaattaatttgatgaggatt

SEQ ID NO: 240198 - DNA, 20 bp, synthetic construct
  source 1..20: mol_type = other DNA
agaattaatttgatgaggat

SEQ ID NO: 240199 - DNA, 20 bp, synthetic construct
  source 1..20: mol_type = other DNA
aagaattaatttgatgagga

SEQ ID NO: 240200 - DNA, 20 bp, synthetic construct
  source 1..20: mol_type = other DNA
caagaattaatttgatgagg

SEQ ID NO: 240201 - DNA, 20 bp, synthetic construct
  source 1..20: mol_type = other DNA
gcaagaattaatttgatgag

SEQ ID NO: 240202 - DNA, 20 bp, synthetic construct
  source 1..20: mol_type = other DNA
agcaagaattaatttgatga

SEQ ID NO: 240203 - DNA, 20 bp, synthetic construct
  source 1..20: mol_type = other DNA
tagcaagaattaatttgatg

SEQ ID NO: 240204 - DNA, 20 bp, synthetic construct
  source 1..20: mol_type = other DNA
gtagcaagaattaatttgat

SEQ ID NO: 240205 - DNA, 20 bp, synthetic construct
  source 1..20: mol_type = other DNA
agtagcaagaattaatttga

SEQ ID NO: 240206 - DNA, 20 bp, synthetic construct
  source 1..20: mol_type = other DNA
cagtagcaagaattaatttg

SEQ ID NO: 240207 - DNA, 20 bp, synthetic construct
  source 1..20: mol_type = other DNA
tcagtagcaagaattaattt

SEQ ID NO: 240208 - DNA, 20 bp, synthetic construct
  source 1..20: mol_type = other DNA
ttcagtagcaagaattaatt

SEQ ID NO: 240209 - DNA, 20 bp, synthetic construct
  source 1..20: mol_type = other DNA
tttcagtagcaagaattaat

SEQ ID NO: 240210 - DNA, 20 bp, synthetic construct
  source 1..20: mol_type = other DNA
ctttcagtagcaagaattaa

SEQ ID NO: 240211 - DNA, 20 bp, synthetic construct
  source 1..20: mol_type = other DNA
gctttcagtagcaagaatta

SEQ ID NO: 240212 - DNA, 20 bp, synthetic construct
  source 1..20: mol_type = other DNA
agctttcagtagcaagaatt

SEQ ID NO: 240213 - DNA, 20 bp, synthetic construct
  source 1..20: mol_type = other DNA
aagctttcagtagcaagaat

SEQ ID NO: 240214 - DNA, 20 bp, synthetic construct
  source 1..20: mol_type = other DNA
taagctttcagtagcaagaa

SEQ ID NO: 240215 - DNA, 20 bp, synthetic construct
  source 1..20: mol_type = other DNA
gtaagctttcagtagcaaga

SEQ ID NO: 240216 - DNA, 20 bp, synthetic construct
  source 1..20: mol_type = other DNA
tgtaagctttcagtagcaag

SEQ ID NO: 240217 - DNA, 20 bp, synthetic construct
  source 1..20: mol_type = other DNA
ttgtaagctttcagtagcaa

SEQ ID NO: 240218 - DNA, 20 bp, synthetic construct
  source 1..20: mol_type = other DNA
cttgtaagctttcagtagca

SEQ ID NO: 240219 - DNA, 20 bp, synthetic construct
  source 1..20: mol_type = other DNA
ccttgtaagctttcagtagc

SEQ ID NO: 240220 - DNA, 20 bp, synthetic construct
  source 1..20: mol_type = other DNA
tccttgtaagctttcagtag

SEQ ID NO: 240221 - DNA, 20 bp, synthetic construct
  source 1..20: mol_type = other DNA
ctccttgtaagctttcagta

SEQ ID NO: 240222 - DNA, 20 bp, synthetic construct
  source 1..20: mol_type = other DNA
gctccttgtaagctttcagt

SEQ ID NO: 240223 - DNA, 20 bp, synthetic construct
  source 1..20: mol_type = other DNA
agctccttgtaagctttcag

SEQ ID NO: 240224 - DNA, 20 bp, synthetic construct
  source 1..20: mol_type = other DNA
cagctccttgtaagctttca

SEQ ID NO: 240225 - DNA, 20 bp, synthetic construct
  source 1..20: mol_type = other DNA
acagctccttgtaagctttc

SEQ ID NO: 240226 - DNA, 20 bp, synthetic construct
  source 1..20: mol_type = other DNA
aacagctccttgtaagcttt

SEQ ID NO: 240227 - DNA, 20 bp, synthetic construct
  source 1..20: mol_type = other DNA
aaacagctccttgtaagctt

SEQ ID NO: 240228 - DNA, 20 bp, synthetic construct
  source 1..20: mol_type = other DNA
aaaacagctccttgtaagct

SEQ ID NO: 240229 - DNA, 20 bp, synthetic construct
  source 1..20: mol_type = other DNA
caaaacagctccttgtaagc

SEQ ID NO: 240230 - DNA, 20 bp, synthetic construct
  source 1..20: mol_type = other DNA
tcaaaacagctccttgtaag

SEQ ID NO: 240231 - DNA, 20 bp, synthetic construct
  source 1..20: mol_type = other DNA
atcaaaacagctccttgtaa

SEQ ID NO: 240232 - DNA, 20 bp, synthetic construct
  source 1..20: mol_type = other DNA
catcaaaacagctccttgta

SEQ ID NO: 240233 - DNA, 20 bp, synthetic construct
  source 1..20: mol_type = other DNA
acatcaaaacagctccttgt

SEQ ID NO: 240234 - DNA, 20 bp, synthetic construct
  source 1..20: mol_type = other DNA
gacatcaaaacagctccttg

SEQ ID NO: 240235 - DNA, 20 bp, synthetic construct
  source 1..20: mol_type = other DNA
cgacatcaaaacagctcctt

SEQ ID NO: 240236 - DNA, 20 bp, synthetic construct
  source 1..20: mol_type = other DNA
ccgacatcaaaacagctcct

SEQ ID NO: 240237 - DNA, 20 bp, synthetic construct
  source 1..20: mol_type = other DNA
cccgacatcaaaacagctcc

SEQ ID NO: 240238 - DNA, 20 bp, synthetic construct
  source 1..20: mol_type = other DNA
acccgacatcaaaacagctc

SEQ ID NO: 240239 - DNA, 20 bp, synthetic construct
  source 1..20: mol_type = other DNA
cacccgacatcaaaacagct

SEQ ID NO: 240240 - DNA, 20 bp, synthetic construct
  source 1..20: mol_type = other DNA
acacccgacatcaaaacagc

SEQ ID NO: 240241 - DNA, 20 bp, synthetic construct
  source 1..20: mol_type = other DNA
cacacccgacatcaaaacag

SEQ ID NO: 240242 - DNA, 20 bp, synthetic construct
  source 1..20: mol_type = other DNA
tcacacccgacatcaaaaca

SEQ ID NO: 240243 - DNA, 20 bp, synthetic construct
  source 1..20: mol_type = other DNA
gtcacacccgacatcaaaac

SEQ ID NO: 240244 - DNA, 20 bp, synthetic construct
  source 1..20: mol_type = other DNA
tgtcacacccgacatcaaaa

SEQ ID NO: 240245 - DNA, 20 bp, synthetic construct
  source 1..20: mol_type = other DNA
ctgtcacacccgacatcaaa

SEQ ID NO: 240246 - DNA, 20 bp, synthetic construct
  source 1..20: mol_type = other DNA
cctgtcacacccgacatcaa

SEQ ID NO: 240247 - DNA, 20 bp, synthetic construct
  source 1..20: mol_type = other DNA
acctgtcacacccgacatca

SEQ ID NO: 240248 - DNA, 20 bp, synthetic construct
  source 1..20: mol_type = other DNA
aacctgtcacacccgacatc

SEQ ID NO: 240249 - DNA, 20 bp, synthetic construct
  source 1..20: mol_type = other DNA
aaacctgtcacacccgacat

SEQ ID NO: 240250 - DNA, 20 bp, synthetic construct
  source 1..20: mol_type = other DNA
caaacctgtcacacccgaca

SEQ ID NO: 240251 - DNA, 20 bp, synthetic construct
  source 1..20: mol_type = other DNA
tcaaacctgtcacacccgac

SEQ ID NO: 240252 - DNA, 20 bp, synthetic construct
  source 1..20: mol_type = other DNA
gtcaaacctgtcacacccga

SEQ ID NO: 240253 - DNA, 20 bp, synthetic construct
  source 1..20: mol_type = other DNA
agtcaaacctgtcacacccg

SEQ ID NO: 240254 - DNA, 20 bp, synthetic construct
  source 1..20: mol_type = other DNA
aagtcaaacctgtcacaccc

SEQ ID NO: 240255 - DNA, 20 bp, synthetic construct
  source 1..20: mol_type = other DNA
caagtcaaacctgtcacacc

SEQ ID NO: 240256 - DNA, 20 bp, synthetic construct
  source 1..20: mol_type = other DNA
ccaagtcaaacctgtcacac

SEQ ID NO: 240257 - DNA, 20 bp, synthetic construct
  source 1..20: mol_type = other DNA
gccaagtcaaacctgtcaca

SEQ ID NO: 240258 - DNA, 20 bp, synthetic construct
  source 1..20: mol_type = other DNA
tgccaagtcaaacctgtcac

SEQ ID NO: 240259 - DNA, 20 bp, synthetic construct
  source 1..20: mol_type = other DNA
ctgccaagtcaaacctgtca

SEQ ID NO: 240260 - DNA, 20 bp, synthetic construct
  source 1..20: mol_type = other DNA
tctgccaagtcaaacctgtc

SEQ ID NO: 240261 - DNA, 20 bp, synthetic construct
  source 1..20: mol_type = other DNA
ttctgccaagtcaaacctgt

SEQ ID NO: 240262 - DNA, 20 bp, synthetic construct
  source 1..20: mol_type = other DNA
cttctgccaagtcaaacctg

SEQ ID NO: 240263 - DNA, 20 bp, synthetic construct
  source 1..20: mol_type = other DNA
ccttctgccaagtcaaacct

SEQ ID NO: 240264 - DNA, 20 bp, synthetic construct
  source 1..20: mol_type = other DNA
accttctgccaagtcaaacc

SEQ ID NO: 240265 - DNA, 20 bp, synthetic construct
  source 1..20: mol_type = other DNA
caccttctgccaagtcaaac

SEQ ID NO: 240266 - DNA, 20 bp, synthetic construct
  source 1..20: mol_type = other DNA
acaccttctgccaagtcaaa

SEQ ID NO: 240267 - DNA, 20 bp, synthetic construct
  source 1..20: mol_type = other DNA
gacaccttctgccaagtcaa

SEQ ID NO: 240268 - DNA, 20 bp, synthetic construct
  source 1..20: mol_type = other DNA
tgacaccttctgccaagtca

SEQ ID NO: 240269 - DNA, 20 bp, synthetic construct
  source 1..20: mol_type = other DNA
gtgacaccttctgccaagtc

SEQ ID NO: 240270 - DNA, 20 bp, synthetic construct
  source 1..20: mol_type = other DNA
agtgacaccttctgccaagt

SEQ ID NO: 240271 - DNA, 20 bp, synthetic construct
  source 1..20: mol_type = other DNA
aagtgacaccttctgccaag

SEQ ID NO: 240272 - DNA, 20 bp, synthetic construct
  source 1..20: mol_type = other DNA
aaagtgacaccttctgccaa

SEQ ID NO: 240273 - DNA, 20 bp, synthetic construct
  source 1..20: mol_type = other DNA
taaagtgacaccttctgcca

SEQ ID NO: 240274 - DNA, 20 bp, synthetic construct
  source 1..20: mol_type = other DNA
gtaaagtgacaccttctgcc

SEQ ID NO: 240275 - DNA, 20 bp, synthetic construct
  source 1..20: mol_type = other DNA
agtaaagtgacaccttctgc

SEQ ID NO: 240276 - DNA, 20 bp, synthetic construct
  source 1..20: mol_type = other DNA
tagtaaagtgacaccttctg

SEQ ID NO: 240277 - DNA, 20 bp, synthetic construct
  source 1..20: mol_type = other DNA
ttagtaaagtgacaccttct

SEQ ID NO: 240278 - DNA, 20 bp, synthetic construct
  source 1..20: mol_type = other DNA
gttagtaaagtgacaccttc

SEQ ID NO: 240279 - DNA, 20 bp, synthetic construct
  source 1..20: mol_type = other DNA
tgttagtaaagtgacacctt

SEQ ID NO: 240280 - DNA, 20 bp, synthetic construct
  source 1..20: mol_type = other DNA
ttgttagtaaagtgacacct

SEQ ID NO: 240281 - DNA, 20 bp, synthetic construct
  source 1..20: mol_type = other DNA
gttgttagtaaagtgacacc

SEQ ID NO: 240282 - DNA, 20 bp, synthetic construct
  source 1..20: mol_type = other DNA
tgttgttagtaaagtgacac

SEQ ID NO: 240283 - DNA, 20 bp, synthetic construct
  source 1..20: mol_type = other DNA
atgttgttagtaaagtgaca

SEQ ID NO: 240284 - DNA, 20 bp, synthetic construct
  source 1..20: mol_type = other DNA
aatgttgttagtaaagtgac

SEQ ID NO: 240285 - DNA, 20 bp, synthetic construct
  source 1..20: mol_type = other DNA
aaatgttgttagtaaagtga

SEQ ID NO: 240286 - DNA, 20 bp, synthetic construct
  source 1..20: mol_type = other DNA
aaaatgttgttagtaaagtg

SEQ ID NO: 240287 - DNA, 20 bp, synthetic construct
  source 1..20: mol_type = other DNA
taaaatgttgttagtaaagt

SEQ ID NO: 240288 - DNA, 20 bp, synthetic construct
  source 1..20: mol_type = other DNA
ttaaaatgttgttagtaaag

SEQ ID NO: 240289 - DNA, 20 bp, synthetic construct
  source 1..20: mol_type = other DNA
tttaaaatgttgttagtaaa

SEQ ID NO: 240290 - DNA, 20 bp, synthetic construct
  source 1..20: mol_type = other DNA
atttaaaatgttgttagtaa

SEQ ID NO: 240291 - DNA, 20 bp, synthetic construct
  source 1..20: mol_type = other DNA
tatttaaaatgttgttagta

SEQ ID NO: 240292 - DNA, 20 bp, synthetic construct
  source 1..20: mol_type = other DNA
ttatttaaaatgttgttagt

SEQ ID NO: 240293 - DNA, 20 bp, synthetic construct
  source 1..20: mol_type = other DNA
cttatttaaaatgttgttag

SEQ ID NO: 240294 - DNA, 20 bp, synthetic construct
  source 1..20: mol_type = other DNA
acttatttaaaatgttgtta

SEQ ID NO: 240295 - DNA, 20 bp, synthetic construct
  source 1..20: mol_type = other DNA
cacttatttaaaatgttgtt

SEQ ID NO: 240296 - DNA, 20 bp, synthetic construct
  source 1..20: mol_type = other DNA
tcacttatttaaaatgttgt

SEQ ID NO: 240297 - DNA, 20 bp, synthetic construct
  source 1..20: mol_type = other DNA
gtcacttatttaaaatgttg

SEQ ID NO: 240298 - DNA, 20 bp, synthetic construct
  source 1..20: mol_type = other DNA
tgtcacttatttaaaatgtt

SEQ ID NO: 240299 - DNA, 20 bp, synthetic construct
  source 1..20: mol_type = other DNA
ctgtcacttatttaaaatgt

SEQ ID NO: 240300 - DNA, 20 bp, synthetic construct
  source 1..20: mol_type = other DNA
tctgtcacttatttaaaatg

SEQ ID NO: 240301 - DNA, 20 bp, synthetic construct
  source 1..20: mol_type = other DNA
ttctgtcacttatttaaaat

SEQ ID NO: 240302 - DNA, 20 bp, synthetic construct
  source 1..20: mol_type = other DNA
cttctgtcacttatttaaaa

SEQ ID NO: 240303 - DNA, 20 bp, synthetic construct
  source 1..20: mol_type = other DNA
tcttctgtcacttatttaaa

SEQ ID NO: 240304 - DNA, 20 bp, synthetic construct
  source 1..20: mol_type = other DNA
gtcttctgtcacttatttaa

SEQ ID NO: 240305 - DNA, 20 bp, synthetic construct
  source 1..20: mol_type = other DNA
tgtcttctgtcacttattta

SEQ ID NO: 240306 - DNA, 20 bp, synthetic construct
  source 1..20: mol_type = other DNA
ttgtcttctgtcacttattt

SEQ ID NO: 240307 - DNA, 20 bp, synthetic construct
  source 1..20: mol_type = other DNA
cttgtcttctgtcacttatt

SEQ ID NO: 240308 - DNA, 20 bp, synthetic construct
  source 1..20: mol_type = other DNA
tcttgtcttctgtcacttat

SEQ ID NO: 240309 - DNA, 20 bp, synthetic construct
  source 1..20: mol_type = other DNA
ttcttgtcttctgtcactta

SEQ ID NO: 240310 - DNA, 20 bp, synthetic construct
  source 1..20: mol_type = other DNA
tttcttgtcttctgtcactt

SEQ ID NO: 240311 - DNA, 20 bp, synthetic construct
  source 1..20: mol_type = other DNA
gtttcttgtcttctgtcact

SEQ ID NO: 240312 - DNA, 20 bp, synthetic construct
  source 1..20: mol_type = other DNA
agtttcttgtcttctgtcac

SEQ ID NO: 240313 - DNA, 20 bp, synthetic construct
  source 1..20: mol_type = other DNA
tagtttcttgtcttctgtca

SEQ ID NO: 240314 - DNA, 20 bp, synthetic construct
  source 1..20: mol_type = other DNA
gtagtttcttgtcttctgtc

SEQ ID NO: 240315 - DNA, 20 bp, synthetic construct
  source 1..20: mol_type = other DNA
tgtagtttcttgtcttctgt

SEQ ID NO: 240316 - DNA, 20 bp, synthetic construct
  source 1..20: mol_type = other DNA
gtgtagtttcttgtcttctg

SEQ ID NO: 240317 - DNA, 20 bp, synthetic construct
  source 1..20: mol_type = other DNA
cgtgtagtttcttgtcttct

SEQ ID NO: 240318 - DNA, 20 bp, synthetic construct
  source 1..20: mol_type = other DNA
acgtgtagtttcttgtcttc

SEQ ID NO: 240319 - DNA, 20 bp, synthetic construct
  source 1..20: mol_type = other DNA
aacgtgtagtttcttgtctt

SEQ ID NO: 240320 - DNA, 20 bp, synthetic construct
  source 1..20: mol_type = other DNA
taacgtgtagtttcttgtct

SEQ ID NO: 240321 - DNA, 20 bp, synthetic construct
  source 1..20: mol_type = other DNA
ttaacgtgtagtttcttgtc

SEQ ID NO: 240322 - DNA, 20 bp, synthetic construct
  source 1..20: mol_type = other DNA
tttaacgtgtagtttcttgt

SEQ ID NO: 240323 - DNA, 20 bp, synthetic construct
  source 1..20: mol_type = other DNA
atttaacgtgtagtttcttg

SEQ ID NO: 240324 - DNA, 20 bp, synthetic construct
  source 1..20: mol_type = other DNA
catttaacgtgtagtttctt

SEQ ID NO: 240325 - DNA, 20 bp, synthetic construct
  source 1..20: mol_type = other DNA
gcatttaacgtgtagtttct

SEQ ID NO: 240326 - DNA, 20 bp, synthetic construct
  source 1..20: mol_type = other DNA
ggcatttaacgtgtagtttc

SEQ ID NO: 240327 - DNA, 20 bp, synthetic construct
  source 1..20: mol_type = other DNA
tggcatttaacgtgtagttt

SEQ ID NO: 240328 - DNA, 20 bp, synthetic construct
  source 1..20: mol_type = other DNA
ctggcatttaacgtgtagtt

SEQ ID NO: 240329 - DNA, 20 bp, synthetic construct
  source 1..20: mol_type = other DNA
tctggcatttaacgtgtagt

SEQ ID NO: 240330 - DNA, 20 bp, synthetic construct
  source 1..20: mol_type = other DNA
ttctggcatttaacgtgtag

SEQ ID NO: 240331 - DNA, 20 bp, synthetic construct
  source 1..20: mol_type = other DNA
gttctggcatttaacgtgta

SEQ ID NO: 240332 - DNA, 20 bp, synthetic construct
  source 1..20: mol_type = other DNA
tgttctggcatttaacgtgt

SEQ ID NO: 240333 - DNA, 20 bp, synthetic construct
  source 1..20: mol_type = other DNA
ttgttctggcatttaacgtg

SEQ ID NO: 240334 - DNA, 20 bp, synthetic construct
  source 1..20: mol_type = other DNA
tttgttctggcatttaacgt

SEQ ID NO: 240335 - DNA, 20 bp, synthetic construct
  source 1..20: mol_type = other DNA
ctttgttctggcatttaacg

SEQ ID NO: 240336 - DNA, 20 bp, synthetic construct
  source 1..20: mol_type = other DNA
tctttgttctggcatttaac

SEQ ID NO: 240337 - DNA, 20 bp, synthetic construct
  source 1..20: mol_type = other DNA
ctctttgttctggcatttaa

SEQ ID NO: 240338 - DNA, 20 bp, synthetic construct
  source 1..20: mol_type = other DNA
actctttgttctggcattta

SEQ ID NO: 240339 - DNA, 20 bp, synthetic construct
  source 1..20: mol_type = other DNA
cactctttgttctggcattt

SEQ ID NO: 240340 - DNA, 20 bp, synthetic construct
  source 1..20: mol_type = other DNA
acactctttgttctggcatt

SEQ ID NO: 240341 - DNA, 20 bp, synthetic construct
  source 1..20: mol_type = other DNA
gacactctttgttctggcat

SEQ ID NO: 240342 - DNA, 20 bp, synthetic construct
  source 1..20: mol_type = other DNA
agacactctttgttctggca

SEQ ID NO: 240343 - DNA, 20 bp, synthetic construct
  source 1..20: mol_type = other DNA
tagacactctttgttctggc

SEQ ID NO: 240344 - DNA, 20 bp, synthetic construct
  source 1..20: mol_type = other DNA
ttagacactctttgttctgg

SEQ ID NO: 240345 - DNA, 20 bp, synthetic construct
  source 1..20: mol_type = other DNA
cttagacactctttgttctg

SEQ ID NO: 240346 - DNA, 20 bp, synthetic construct
  source 1..20: mol_type = other DNA
acttagacactctttgttct

SEQ ID NO: 240347 - DNA, 20 bp, synthetic construct
  source 1..20: mol_type = other DNA
cacttagacactctttgttc

SEQ ID NO: 240348 - DNA, 20 bp, synthetic construct
  source 1..20: mol_type = other DNA
ccacttagacactctttgtt

SEQ ID NO: 240349 - DNA, 20 bp, synthetic construct
  source 1..20: mol_type = other DNA
tccacttagacactctttgt

SEQ ID NO: 240350 - DNA, 20 bp, synthetic construct
  source 1..20: mol_type = other DNA
atccacttagacactctttg

SEQ ID NO: 240351 - DNA, 20 bp, synthetic construct
  source 1..20: mol_type = other DNA
catccacttagacactcttt

SEQ ID NO: 240352 - DNA, 20 bp, synthetic construct
  source 1..20: mol_type = other DNA
gcatccacttagacactctt

SEQ ID NO: 240353 - DNA, 20 bp, synthetic construct
  source 1..20: mol_type = other DNA
agcatccacttagacactct

SEQ ID NO: 240354 - DNA, 20 bp, synthetic construct
  source 1..20: mol_type = other DNA
tagcatccacttagacactc

SEQ ID NO: 240355 - DNA, 20 bp, synthetic construct
  source 1..20: mol_type = other DNA
ttagcatccacttagacact

SEQ ID NO: 240356 - DNA, 20 bp, synthetic construct
  source 1..20: mol_type = other DNA
cttagcatccacttagacac

SEQ ID NO: 240357 - DNA, 20 bp, synthetic construct
  source 1..20: mol_type = other DNA
tcttagcatccacttagaca

SEQ ID NO: 240358 - DNA, 20 bp, synthetic construct
  source 1..20: mol_type = other DNA
ctcttagcatccacttagac

SEQ ID NO: 240359 - DNA, 20 bp, synthetic construct
  source 1..20: mol_type = other DNA
actcttagcatccacttaga

SEQ ID NO: 240360 - DNA, 20 bp, synthetic construct
  source 1..20: mol_type = other DNA
aactcttagcatccacttag

SEQ ID NO: 240361 - DNA, 20 bp, synthetic construct
  source 1..20: mol_type = other DNA
caactcttagcatccactta

SEQ ID NO: 240362 - DNA, 20 bp, synthetic construct
  source 1..20: mol_type = other DNA
tcaactcttagcatccactt

SEQ ID NO: 240363 - DNA, 20 bp, synthetic construct
  source 1..20: mol_type = other DNA
ttcaactcttagcatccact

SEQ ID NO: 240364 - DNA, 20 bp, synthetic construct
  source 1..20: mol_type = other DNA
tttcaactcttagcatccac

SEQ ID NO: 240365 - DNA, 20 bp, synthetic construct
  source 1..20: mol_type = other DNA
atttcaactcttagcatcca

SEQ ID NO: 240366 - DNA, 20 bp, synthetic construct
  source 1..20: mol_type = other DNA
tatttcaactcttagcatcc

SEQ ID NO: 240367 - DNA, 20 bp, synthetic construct
  source 1..20: mol_type = other DNA
atatttcaactcttagcatc

SEQ ID NO: 240368 - DNA, 20 bp, synthetic construct
  source 1..20: mol_type = other DNA
catatttcaactcttagcat

SEQ ID NO: 240369 - DNA, 20 bp, synthetic construct
  source 1..20: mol_type = other DNA
ccatatttcaactcttagca

SEQ ID NO: 240370 - DNA, 20 bp, synthetic construct
  source 1..20: mol_type = other DNA
gccatatttcaactcttagc

SEQ ID NO: 240371 - DNA, 20 bp, synthetic construct
  source 1..20: mol_type = other DNA
agccatatttcaactcttag

SEQ ID NO: 240372 - DNA, 20 bp, synthetic construct
  source 1..20: mol_type = other DNA
cagccatatttcaactctta

SEQ ID NO: 240373 - DNA, 20 bp, synthetic construct
  source 1..20: mol_type = other DNA
ccagccatatttcaactctt

SEQ ID NO: 240374 - DNA, 20 bp, synthetic construct
  source 1..20: mol_type = other DNA
tccagccatatttcaactct

SEQ ID NO: 240375 - DNA, 20 bp, synthetic construct
  source 1..20: mol_type = other DNA
atccagccatatttcaactc

SEQ ID NO: 240376 - DNA, 20 bp, synthetic construct
  source 1..20: mol_type = other DNA
tatccagccatatttcaact

SEQ ID NO: 240377 - DNA, 20 bp, synthetic construct
  source 1..20: mol_type = other DNA
gtatccagccatatttcaac

SEQ ID NO: 240378 - DNA, 20 bp, synthetic construct
  source 1..20: mol_type = other DNA
ggtatccagccatatttcaa

SEQ ID NO: 240379 - DNA, 20 bp, synthetic construct
  source 1..20: mol_type = other DNA
aggtatccagccatatttca

SEQ ID NO: 240380 - DNA, 20 bp, synthetic construct
  source 1..20: mol_type = other DNA
caggtatccagccatatttc

SEQ ID NO: 240381 - DNA, 20 bp, synthetic construct
  source 1..20: mol_type = other DNA
gcaggtatccagccatattt

SEQ ID NO: 240382 - DNA, 20 bp, synthetic construct
  source 1..20: mol_type = other DNA
ggcaggtatccagccatatt

SEQ ID NO: 240383 - DNA, 20 bp, synthetic construct
  source 1..20: mol_type = other DNA
gggcaggtatccagccatat

SEQ ID NO: 240384 - DNA, 20 bp, synthetic construct
  source 1..20: mol_type = other DNA
tgggcaggtatccagccata

SEQ ID NO: 240385 - DNA, 20 bp, synthetic construct
  source 1..20: mol_type = other DNA
ttgggcaggtatccagccat

SEQ ID NO: 240386 - DNA, 20 bp, synthetic construct
  source 1..20: mol_type = other DNA
cttgggcaggtatccagcca

SEQ ID NO: 240387 - DNA, 20 bp, synthetic construct
  source 1..20: mol_type = other DNA
tcttgggcaggtatccagcc

SEQ ID NO: 240388 - DNA, 20 bp, synthetic construct
  source 1..20: mol_type = other DNA
ctcttgggcaggtatccagc

SEQ ID NO: 240389 - DNA, 20 bp, synthetic construct
  source 1..20: mol_type = other DNA
tctcttgggcaggtatccag

SEQ ID NO: 240390 - DNA, 20 bp, synthetic construct
  source 1..20: mol_type = other DNA
ctctcttgggcaggtatcca

SEQ ID NO: 240391 - DNA, 20 bp, synthetic construct
  source 1..20: mol_type = other DNA
gctctcttgggcaggtatcc

SEQ ID NO: 240392 - DNA, 20 bp, synthetic construct
  source 1..20: mol_type = other DNA
agctctcttgggcaggtatc

SEQ ID NO: 240393 - DNA, 20 bp, synthetic construct
  source 1..20: mol_type = other DNA
cagctctcttgggcaggtat

SEQ ID NO: 240394 - DNA, 20 bp, synthetic construct
  source 1..20: mol_type = other DNA
tcagctctcttgggcaggta

SEQ ID NO: 240395 - DNA, 20 bp, synthetic construct
  source 1..20: mol_type = other DNA
ttcagctctcttgggcaggt

SEQ ID NO: 240396 - DNA, 20 bp, synthetic construct
  source 1..20: mol_type = other DNA
tttcagctctcttgggcagg

SEQ ID NO: 240397 - DNA, 20 bp, synthetic construct
  source 1..20: mol_type = other DNA
ttttcagctctcttgggcag

SEQ ID NO: 240398 - DNA, 20 bp, synthetic construct
  source 1..20: mol_type = other DNA
cttttcagctctcttgggca

SEQ ID NO: 240399 - DNA, 20 bp, synthetic construct
  source 1..20: mol_type = other DNA
acttttcagctctcttgggc

SEQ ID NO: 240400 - DNA, 20 bp, synthetic construct
  source 1..20: mol_type = other DNA
tacttttcagctctcttggg

SEQ ID NO: 240401 - DNA, 20 bp, synthetic construct
  source 1..20: mol_type = other DNA
ctacttttcagctctcttgg

SEQ ID NO: 240402 - DNA, 20 bp, synthetic construct
  source 1..20: mol_type = other DNA
tctacttttcagctctcttg

SEQ ID NO: 240403 - DNA, 20 bp, synthetic construct
  source 1..20: mol_type = other DNA
atctacttttcagctctctt

SEQ ID NO: 240404 - DNA, 20 bp, synthetic construct
  source 1..20: mol_type = other DNA
catctacttttcagctctct

SEQ ID NO: 240405 - DNA, 20 bp, synthetic construct
  source 1..20: mol_type = other DNA
tcatctacttttcagctctc

SEQ ID NO: 240406 - DNA, 20 bp, synthetic construct
  source 1..20: mol_type = other DNA
ttcatctacttttcagctct

SEQ ID NO: 240407 - DNA, 20 bp, synthetic construct
  source 1..20: mol_type = other DNA
tttcatctacttttcagctc

SEQ ID NO: 240408 - DNA, 20 bp, synthetic construct
  source 1..20: mol_type = other DNA
ctttcatctacttttcagct

SEQ ID NO: 240409 - DNA, 20 bp, synthetic construct
  source 1..20: mol_type = other DNA
actttcatctacttttcagc

SEQ ID NO: 240410 - DNA, 20 bp, synthetic construct
  source 1..20: mol_type = other DNA
aactttcatctacttttcag

SEQ ID NO: 240411 - DNA, 20 bp, synthetic construct
  source 1..20: mol_type = other DNA
caactttcatctacttttca

SEQ ID NO: 240412 - DNA, 20 bp, synthetic construct
  source 1..20: mol_type = other DNA
ccaactttcatctacttttc

SEQ ID NO: 240413 - DNA, 20 bp, synthetic construct
  source 1..20: mol_type = other DNA
accaactttcatctactttt

SEQ ID NO: 240414 - DNA, 20 bp, synthetic construct
  source 1..20: mol_type = other DNA
aaccaactttcatctacttt

SEQ ID NO: 240415 - DNA, 20 bp, synthetic construct
  source 1..20: mol_type = other DNA
taaccaactttcatctactt

SEQ ID NO: 240416 - DNA, 20 bp, synthetic construct
  source 1..20: mol_type = other DNA
gtaaccaactttcatctact

SEQ ID NO: 240417 - DNA, 20 bp, synthetic construct
  source 1..20: mol_type = other DNA
ggtaaccaactttcatctac

SEQ ID NO: 240418 - DNA, 20 bp, synthetic construct
  source 1..20: mol_type = other DNA
aggtaaccaactttcatcta

SEQ ID NO: 240419 - DNA, 20 bp, synthetic construct
  source 1..20: mol_type = other DNA
taggtaaccaactttcatct

SEQ ID NO: 240420 - DNA, 20 bp, synthetic construct
  source 1..20: mol_type = other DNA
ataggtaaccaactttcatc

SEQ ID NO: 240421 - DNA, 20 bp, synthetic construct
  source 1..20: mol_type = other DNA
tataggtaaccaactttcat

SEQ ID NO: 240422 - DNA, 20 bp, synthetic construct
  source 1..20: mol_type = other DNA
ttataggtaaccaactttca

SEQ ID NO: 240423 - DNA, 20 bp, synthetic construct
  source 1..20: mol_type = other DNA
tttataggtaaccaactttc

SEQ ID NO: 240424 - DNA, 20 bp, synthetic construct
  source 1..20: mol_type = other DNA
gtttataggtaaccaacttt

SEQ ID NO: 240425 - DNA, 20 bp, synthetic construct
  source 1..20: mol_type = other DNA
agtttataggtaaccaactt

SEQ ID NO: 240426 - DNA, 20 bp, synthetic construct
  source 1..20: mol_type = other DNA
tagtttataggtaaccaact

SEQ ID NO: 240427 - DNA, 20 bp, synthetic construct
  source 1..20: mol_type = other DNA
ctagtttataggtaaccaac

SEQ ID NO: 240428 - DNA, 20 bp, synthetic construct
  source 1..20: mol_type = other DNA
actagtttataggtaaccaa

SEQ ID NO: 240429 - DNA, 20 bp, synthetic construct
  source 1..20: mol_type = other DNA
cactagtttataggtaacca

SEQ ID NO: 240430 - DNA, 20 bp, synthetic construct
  source 1..20: mol_type = other DNA
gcactagtttataggtaacc

SEQ ID NO: 240431 - DNA, 20 bp, synthetic construct
  source 1..20: mol_type = other DNA
tgcactagtttataggtaac

SEQ ID NO: 240432 - DNA, 20 bp, synthetic construct
  source 1..20: mol_type = other DNA
gtgcactagtttataggtaa

SEQ ID NO: 240433 - DNA, 20 bp, synthetic construct
  source 1..20: mol_type = other DNA
ggtgcactagtttataggta

SEQ ID NO: 240434 - DNA, 20 bp, synthetic construct
  source 1..20: mol_type = other DNA
gggtgcactagtttataggt

SEQ ID NO: 240435 - DNA, 20 bp, synthetic construct
  source 1..20: mol_type = other DNA
agggtgcactagtttatagg

SEQ ID NO: 240436 - DNA, 20 bp, synthetic construct
  source 1..20: mol_type = other DNA
tagggtgcactagtttatag

SEQ ID NO: 240437 - DNA, 20 bp, synthetic construct
  source 1..20: mol_type = other DNA
ttagggtgcactagtttata

SEQ ID NO: 240438 - DNA, 20 bp, synthetic construct
  source 1..20: mol_type = other DNA
attagggtgcactagtttat

SEQ ID NO: 240439 - DNA, 20 bp, synthetic construct
  source 1..20: mol_type = other DNA
cattagggtgcactagttta

SEQ ID NO: 240440 - DNA, 20 bp, synthetic construct
  source 1..20: mol_type = other DNA
tcattagggtgcactagttt

SEQ ID NO: 240441 - DNA, 20 bp, synthetic construct
  source 1..20: mol_type = other DNA
ttcattagggtgcactagtt

SEQ ID NO: 240442 - DNA, 20 bp, synthetic construct
  source 1..20: mol_type = other DNA
attcattagggtgcactagt

SEQ ID NO: 240443 - DNA, 20 bp, synthetic construct
  source 1..20: mol_type = other DNA
aattcattagggtgcactag

SEQ ID NO: 240444 - DNA, 20 bp, synthetic construct
  source 1..20: mol_type = other DNA
taattcattagggtgcacta

SEQ ID NO: 240445 - DNA, 20 bp, synthetic construct
  source 1..20: mol_type = other DNA
ttaattcattagggtgcact

SEQ ID NO: 240446 - DNA, 20 bp, synthetic construct
  source 1..20: mol_type = other DNA
tttaattcattagggtgcac

SEQ ID NO: 240447 - DNA, 20 bp, synthetic construct
  source 1..20: mol_type = other DNA
ttttaattcattagggtgca

SEQ ID NO: 240448 - DNA, 20 bp, synthetic construct
  source 1..20: mol_type = other DNA
cttttaattcattagggtgc

SEQ ID NO: 240449 - DNA, 20 bp, synthetic construct
  source 1..20: mol_type = other DNA
ccttttaattcattagggtg

SEQ ID NO: 240450 - DNA, 20 bp, synthetic construct
  source 1..20: mol_type = other DNA
accttttaattcattagggt

SEQ ID NO: 240451 - DNA, 20 bp, synthetic construct
  source 1..20: mol_type = other DNA
caccttttaattcattaggg

SEQ ID NO: 240452 - DNA, 20 bp, synthetic construct
  source 1..20: mol_type = other DNA
acaccttttaattcattagg

SEQ ID NO: 240453 - DNA, 20 bp, synthetic construct
  source 1..20: mol_type = other DNA
aacaccttttaattcattag

SEQ ID NO: 240454 - DNA, 20 bp, synthetic construct
  source 1..20: mol_type = other DNA
caacaccttttaattcatta

SEQ ID NO: 240455 - DNA, 20 bp, synthetic construct
  source 1..20: mol_type = other DNA
tcaacaccttttaattcatt

SEQ ID NO: 240456 - DNA, 20 bp, synthetic construct
  source 1..20: mol_type = other DNA
atcaacaccttttaattcat

SEQ ID NO: 240457 - DNA, 20 bp, synthetic construct
  source 1..20: mol_type = other DNA
catcaacaccttttaattca

SEQ ID NO: 240458 - DNA, 20 bp, synthetic construct
  source 1..20: mol_type = other DNA
tcatcaacaccttttaattc

SEQ ID NO: 240459 - DNA, 20 bp, synthetic construct
  source 1..20: mol_type = other DNA
ctcatcaacaccttttaatt

SEQ ID NO: 240460 - DNA, 20 bp, synthetic construct
  source 1..20: mol_type = other DNA
actcatcaacaccttttaat

SEQ ID NO: 240461 - DNA, 20 bp, synthetic construct
  source 1..20: mol_type = other DNA
aactcatcaacaccttttaa

SEQ ID NO: 240462 - DNA, 20 bp, synthetic construct
  source 1..20: mol_type = other DNA
taactcatcaacacctttta

SEQ ID NO: 240463 - DNA, 20 bp, synthetic construct
  source 1..20: mol_type = other DNA
ttaactcatcaacacctttt

SEQ ID NO: 240464 - DNA, 20 bp, synthetic construct
  source 1..20: mol_type = other DNA
gttaactcatcaacaccttt

SEQ ID NO: 240465 - DNA, 20 bp, synthetic construct
  source 1..20: mol_type = other DNA
agttaactcatcaacacctt

SEQ ID NO: 240466 - DNA, 20 bp, synthetic construct
  source 1..20: mol_type = other DNA
aagttaactcatcaacacct

SEQ ID NO: 240467 - DNA, 20 bp, synthetic construct
  source 1..20: mol_type = other DNA
caagttaactcatcaacacc

SEQ ID NO: 240468 - DNA, 20 bp, synthetic construct
  source 1..20: mol_type = other DNA
acaagttaactcatcaacac

SEQ ID NO: 240469 - DNA, 20 bp, synthetic construct
  source 1..20: mol_type = other DNA
aacaagttaactcatcaaca

SEQ ID NO: 240470 - DNA, 20 bp, synthetic construct
  source 1..20: mol_type = other DNA
taacaagttaactcatcaac

SEQ ID NO: 240471 - DNA, 20 bp, synthetic construct
  source 1..20: mol_type = other DNA
ataacaagttaactcatcaa

SEQ ID NO: 240472 - DNA, 20 bp, synthetic construct
  source 1..20: mol_type = other DNA
cataacaagttaactcatca

SEQ ID NO: 240473 - DNA, 20 bp, synthetic construct
  source 1..20: mol_type = other DNA
gcataacaagttaactcatc

SEQ ID NO: 240474 - DNA, 20 bp, synthetic construct
  source 1..20: mol_type = other DNA
ggcataacaagttaactcat

SEQ ID NO: 240475 - DNA, 20 bp, synthetic construct
  source 1..20: mol_type = other DNA
aggcataacaagttaactca

SEQ ID NO: 240476 - DNA, 20 bp, synthetic construct
  source 1..20: mol_type = other DNA
aaggcataacaagttaactc

SEQ ID NO: 240477 - DNA, 20 bp, synthetic construct
  source 1..20: mol_type = other DNA
gaaggcataacaagttaact

SEQ ID NO: 240478 - DNA, 20 bp, synthetic construct
  source 1..20: mol_type = other DNA
ggaaggcataacaagttaac

SEQ ID NO: 240479 - DNA, 20 bp, synthetic construct
  source 1..20: mol_type = other DNA
tggaaggcataacaagttaa

SEQ ID NO: 240480 - DNA, 20 bp, synthetic construct
  source 1..20: mol_type = other DNA
ctggaaggcataacaagtta

SEQ ID NO: 240481 - DNA, 20 bp, synthetic construct
  source 1..20: mol_type = other DNA
tctggaaggcataacaagtt

SEQ ID NO: 240482 - DNA, 20 bp, synthetic construct
  source 1..20: mol_type = other DNA
atctggaaggcataacaagt

SEQ ID NO: 240483 - DNA, 20 bp, synthetic construct
  source 1..20: mol_type = other DNA
tatctggaaggcataacaag

SEQ ID NO: 240484 - DNA, 20 bp, synthetic construct
  source 1..20: mol_type = other DNA
ttatctggaaggcataacaa

SEQ ID NO: 240485 - DNA, 20 bp, synthetic construct
  source 1..20: mol_type = other DNA
cttatctggaaggcataaca

SEQ ID NO: 240486 - DNA, 20 bp, synthetic construct
  source 1..20: mol_type = other DNA
tcttatctggaaggcataac

SEQ ID NO: 240487 - DNA, 20 bp, synthetic construct
  source 1..20: mol_type = other DNA
gtcttatctggaaggcataa

SEQ ID NO: 240488 - DNA, 20 bp, synthetic construct
  source 1..20: mol_type = other DNA
tgtcttatctggaaggcata

SEQ ID NO: 240489 - DNA, 20 bp, synthetic construct
  source 1..20: mol_type = other DNA
atgtcttatctggaaggcat

SEQ ID NO: 240490 - DNA, 20 bp, synthetic construct
  source 1..20: mol_type = other DNA
catgtcttatctggaaggca

SEQ ID NO: 240491 - DNA, 20 bp, synthetic construct
  source 1..20: mol_type = other DNA
gcatgtcttatctggaaggc

SEQ ID NO: 240492 - DNA, 20 bp, synthetic construct
  source 1..20: mol_type = other DNA
tgcatgtcttatctggaagg

SEQ ID NO: 240493 - DNA, 20 bp, synthetic construct
  source 1..20: mol_type = other DNA
ttgcatgtcttatctggaag

SEQ ID NO: 240494 - DNA, 20 bp, synthetic construct
  source 1..20: mol_type = other DNA
tttgcatgtcttatctggaa

SEQ ID NO: 240495 - DNA, 20 bp, synthetic construct
  source 1..20: mol_type = other DNA
atttgcatgtcttatctgga

SEQ ID NO: 240496 - DNA, 20 bp, synthetic construct
  source 1..20: mol_type = other DNA
catttgcatgtcttatctgg

SEQ ID NO: 240497 - DNA, 20 bp, synthetic construct
  source 1..20: mol_type = other DNA
ccatttgcatgtcttatctg

SEQ ID NO: 240498 - DNA, 20 bp, synthetic construct
  source 1..20: mol_type = other DNA
cccatttgcatgtcttatct

SEQ ID NO: 240499 - DNA, 20 bp, synthetic construct
  source 1..20: mol_type = other DNA
ccccatttgcatgtcttatc

SEQ ID NO: 240500 - DNA, 20 bp, synthetic construct
  source 1..20: mol_type = other DNA
gccccatttgcatgtcttat

SEQ ID NO: 240501 - DNA, 20 bp, synthetic construct
  source 1..20: mol_type = other DNA
agccccatttgcatgtctta

SEQ ID NO: 240502 - DNA, 20 bp, synthetic construct
  source 1..20: mol_type = other DNA
aagccccatttgcatgtctt

SEQ ID NO: 240503 - DNA, 20 bp, synthetic construct
  source 1..20: mol_type = other DNA
gaagccccatttgcatgtct

SEQ ID NO: 240504 - DNA, 20 bp, synthetic construct
  source 1..20: mol_type = other DNA
agaagccccatttgcatgtc

SEQ ID NO: 240505 - DNA, 20 bp, synthetic construct
  source 1..20: mol_type = other DNA
aagaagccccatttgcatgt

SEQ ID NO: 240506 - DNA, 20 bp, synthetic construct
  source 1..20: mol_type = other DNA
gaagaagccccatttgcatg

SEQ ID NO: 240507 - DNA, 20 bp, synthetic construct
  source 1..20: mol_type = other DNA
ggaagaagccccatttgcat

SEQ ID NO: 240508 - DNA, 20 bp, synthetic construct
  source 1..20: mol_type = other DNA
aggaagaagccccatttgca

SEQ ID NO: 240509 - DNA, 20 bp, synthetic construct
  source 1..20: mol_type = other DNA
gaggaagaagccccatttgc

SEQ ID NO: 240510 - DNA, 20 bp, synthetic construct
  source 1..20: mol_type = other DNA
ggaggaagaagccccatttg

SEQ ID NO: 240511 - DNA, 20 bp, synthetic construct
  source 1..20: mol_type = other DNA
aggaggaagaagccccattt

SEQ ID NO: 240512 - DNA, 20 bp, synthetic construct
  source 1..20: mol_type = other DNA
aaggaggaagaagccccatt

SEQ ID NO: 240513 - DNA, 20 bp, synthetic construct
  source 1..20: mol_type = other DNA
gaaggaggaagaagccccat

SEQ ID NO: 240514 - DNA, 20 bp, synthetic construct
  source 1..20: mol_type = other DNA
tgaaggaggaagaagcccca

SEQ ID NO: 240515 - DNA, 20 bp, synthetic construct
  source 1..20: mol_type = other DNA
gtgaaggaggaagaagcccc

SEQ ID NO: 240516 - DNA, 20 bp, synthetic construct
  source 1..20: mol_type = other DNA
agtgaaggaggaagaagccc

SEQ ID NO: 240517 - DNA, 20 bp, synthetic construct
  source 1..20: mol_type = other DNA
tagtgaaggaggaagaagcc

SEQ ID NO: 240518 - DNA, 20 bp, synthetic construct
  source 1..20: mol_type = other DNA
gtagtgaaggaggaagaagc

SEQ ID NO: 240519 - DNA, 20 bp, synthetic construct
  source 1..20: mol_type = other DNA
agtagtgaaggaggaagaag

SEQ ID NO: 240520 - DNA, 20 bp, synthetic construct
  source 1..20: mol_type = other DNA
aagtagtgaaggaggaagaa

SEQ ID NO: 240521 - DNA, 20 bp, synthetic construct
  source 1..20: mol_type = other DNA
gaagtagtgaaggaggaaga

SEQ ID NO: 240522 - DNA, 20 bp, synthetic construct
  source 1..20: mol_type = other DNA
ggaagtagtgaaggaggaag

SEQ ID NO: 240523 - DNA, 20 bp, synthetic construct
  source 1..20: mol_type = other DNA
tggaagtagtgaaggaggaa

SEQ ID NO: 240524 - DNA, 20 bp, synthetic construct
  source 1..20: mol_type = other DNA
ttggaagtagtgaaggagga

SEQ ID NO: 240525 - DNA, 20 bp, synthetic construct
  source 1..20: mol_type = other DNA
cttggaagtagtgaaggagg

SEQ ID NO: 240526 - DNA, 20 bp, synthetic construct
  source 1..20: mol_type = other DNA
ccttggaagtagtgaaggag

SEQ ID NO: 240527 - DNA, 20 bp, synthetic construct
  source 1..20: mol_type = other DNA
cccttggaagtagtgaagga

SEQ ID NO: 240528 - DNA, 20 bp, synthetic construct
  source 1..20: mol_type = other DNA
tcccttggaagtagtgaagg

SEQ ID NO: 240529 - DNA, 20 bp, synthetic construct
  source 1..20: mol_type = other DNA
atcccttggaagtagtgaag

SEQ ID NO: 240530 - DNA, 20 bp, synthetic construct
  source 1..20: mol_type = other DNA
aatcccttggaagtagtgaa

SEQ ID NO: 240531 - DNA, 20 bp, synthetic construct
  source 1..20: mol_type = other DNA
aaatcccttggaagtagtga

SEQ ID NO: 240532 - DNA, 20 bp, synthetic construct
  source 1..20: mol_type = other DNA
taaatcccttggaagtagtg

SEQ ID NO: 240533 - DNA, 20 bp, synthetic construct
  source 1..20: mol_type = other DNA
ttaaatcccttggaagtagt

SEQ ID NO: 240534 - DNA, 20 bp, synthetic construct
  source 1..20: mol_type = other DNA
gttaaatcccttggaagtag

SEQ ID NO: 240535 - DNA, 20 bp, synthetic construct
  source 1..20: mol_type = other DNA
tgttaaatcccttggaagta

SEQ ID NO: 240536 - DNA, 20 bp, synthetic construct
  source 1..20: mol_type = other DNA
ttgttaaatcccttggaagt

SEQ ID NO: 240537 - DNA, 20 bp, synthetic construct
  source 1..20: mol_type = other DNA
cttgttaaatcccttggaag

SEQ ID NO: 240538 - DNA, 20 bp, synthetic construct
  source 1..20: mol_type = other DNA
ccttgttaaatcccttggaa

SEQ ID NO: 240539 - DNA, 20 bp, synthetic construct
  source 1..20: mol_type = other DNA
tccttgttaaatcccttgga

SEQ ID NO: 240540 - DNA, 20 bp, synthetic construct
  source 1..20: mol_type = other DNA
ctccttgttaaatcccttgg

SEQ ID NO: 240541 - DNA, 20 bp, synthetic construct
  source 1..20: mol_type = other DNA
tctccttgttaaatcccttg

SEQ ID NO: 240542 - DNA, 20 bp, synthetic construct
  source 1..20: mol_type = other DNA
gtctccttgttaaatccctt

SEQ ID NO: 240543 - DNA, 20 bp, synthetic construct
  source 1..20: mol_type = other DNA
ggtctccttgttaaatccct

SEQ ID NO: 240544 - DNA, 20 bp, synthetic construct
  source 1..20: mol_type = other DNA
tggtctccttgttaaatccc

SEQ ID NO: 240545 - DNA, 20 bp, synthetic construct
  source 1..20: mol_type = other DNA
ttggtctccttgttaaatcc

SEQ ID NO: 240546 - DNA, 20 bp, synthetic construct
  source 1..20: mol_type = other DNA
attggtctccttgttaaatc

SEQ ID NO: 240547 - DNA, 20 bp, synthetic construct
  source 1..20: mol_type = other DNA
cattggtctccttgttaaat

SEQ ID NO: 240548 - DNA, 20 bp, synthetic construct
  source 1..20: mol_type = other DNA
gcattggtctccttgttaaa

SEQ ID NO: 240549 - DNA, 20 bp, synthetic construct
  source 1..20: mol_type = other DNA
tgcattggtctccttgttaa

SEQ ID NO: 240550 - DNA, 20 bp, synthetic construct
  source 1..20: mol_type = other DNA
ttgcattggtctccttgtta

SEQ ID NO: 240551 - DNA, 20 bp, synthetic construct
  source 1..20: mol_type = other DNA
tttgcattggtctccttgtt

SEQ ID NO: 240552 - DNA, 20 bp, synthetic construct
  source 1..20: mol_type = other DNA
atttgcattggtctccttgt

SEQ ID NO: 240553 - DNA, 20 bp, synthetic construct
  source 1..20: mol_type = other DNA
catttgcattggtctccttg

SEQ ID NO: 240554 - DNA, 20 bp, synthetic construct
  source 1..20: mol_type = other DNA
tcatttgcattggtctcctt

SEQ ID NO: 240555 - DNA, 20 bp, synthetic construct
  source 1..20: mol_type = other DNA
atcatttgcattggtctcct

SEQ ID NO: 240556 - DNA, 20 bp, synthetic construct
  source 1..20: mol_type = other DNA
tatcatttgcattggtctcc

SEQ ID NO: 240557 - DNA, 20 bp, synthetic construct
  source 1..20: mol_type = other DNA
ttatcatttgcattggtctc

SEQ ID NO: 240558 - DNA, 20 bp, synthetic construct
  source 1..20: mol_type = other DNA
cttatcatttgcattggtct

SEQ ID NO: 240559 - DNA, 20 bp, synthetic construct
  source 1..20: mol_type = other DNA
ccttatcatttgcattggtc

SEQ ID NO: 240560 - DNA, 20 bp, synthetic construct
  source 1..20: mol_type = other DNA
tccttatcatttgcattggt

SEQ ID NO: 240561 - DNA, 20 bp, synthetic construct
  source 1..20: mol_type = other DNA
gtccttatcatttgcattgg

SEQ ID NO: 240562 - DNA, 20 bp, synthetic construct
  source 1..20: mol_type = other DNA
agtccttatcatttgcattg

SEQ ID NO: 240563 - DNA, 20 bp, synthetic construct
  source 1..20: mol_type = other DNA
cagtccttatcatttgcatt

SEQ ID NO: 240564 - DNA, 20 bp, synthetic construct
  source 1..20: mol_type = other DNA
acagtccttatcatttgcat

SEQ ID NO: 240565 - DNA, 20 bp, synthetic construct
  source 1..20: mol_type = other DNA
tacagtccttatcatttgca

SEQ ID NO: 240566 - DNA, 20 bp, synthetic construct
  source 1..20: mol_type = other DNA
ctacagtccttatcatttgc

SEQ ID NO: 240567 - DNA, 20 bp, synthetic construct
  source 1..20: mol_type = other DNA
cctacagtccttatcatttg

SEQ ID NO: 240568 - DNA, 20 bp, synthetic construct
  source 1..20: mol_type = other DNA
ccctacagtccttatcattt

SEQ ID NO: 240569 - DNA, 20 bp, synthetic construct
  source 1..20: mol_type = other DNA
gccctacagtccttatcatt

SEQ ID NO: 240570 - DNA, 20 bp, synthetic construct
  source 1..20: mol_type = other DNA
agccctacagtccttatcat

SEQ ID NO: 240571 - DNA, 20 bp, synthetic construct
  source 1..20: mol_type = other DNA
gagccctacagtccttatca

SEQ ID NO: 240572 - DNA, 20 bp, synthetic construct
  source 1..20: mol_type = other DNA
tgagccctacagtccttatc

SEQ ID NO: 240573 - DNA, 20 bp, synthetic construct
  source 1..20: mol_type = other DNA
ttgagccctacagtccttat

SEQ ID NO: 240574 - DNA, 20 bp, synthetic construct
  source 1..20: mol_type = other DNA
cttgagccctacagtcctta

SEQ ID NO: 240575 - DNA, 20 bp, synthetic construct
  source 1..20: mol_type = other DNA
gcttgagccctacagtcctt

SEQ ID NO: 240576 - DNA, 20 bp, synthetic construct
  source 1..20: mol_type = other DNA
agcttgagccctacagtcct

SEQ ID NO: 240577 - DNA, 20 bp, synthetic construct
  source 1..20: mol_type = other DNA
cagcttgagccctacagtcc

SEQ ID NO: 240578 - DNA, 20 bp, synthetic construct
  source 1..20: mol_type = other DNA
ccagcttgagccctacagtc

SEQ ID NO: 240579 - DNA, 20 bp, synthetic construct
  source 1..20: mol_type = other DNA
cccagcttgagccctacagt

SEQ ID NO: 240580 - DNA, 20 bp, synthetic construct
  source 1..20: mol_type = other DNA
ccccagcttgagccctacag

SEQ ID NO: 240581 - DNA, 20 bp, synthetic construct
  source 1..20: mol_type = other DNA
tccccagcttgagccctaca

SEQ ID NO: 240582 - DNA, 20 bp, synthetic construct
  source 1..20: mol_type = other DNA
gtccccagcttgagccctac

SEQ ID NO: 240583 - DNA, 20 bp, synthetic construct
  source 1..20: mol_type = other DNA
tgtccccagcttgagcccta

SEQ ID NO: 240584 - DNA, 20 bp, synthetic construct
  source 1..20: mol_type = other DNA
ctgtccccagcttgagccct

SEQ ID NO: 240585 - DNA, 20 bp, synthetic construct
  source 1..20: mol_type = other DNA
tctgtccccagcttgagccc

SEQ ID NO: 240586 - DNA, 20 bp, synthetic construct
  source 1..20: mol_type = other DNA
atctgtccccagcttgagcc

SEQ ID NO: 240587 - DNA, 20 bp, synthetic construct
  source 1..20: mol_type = other DNA
aatctgtccccagcttgagc

SEQ ID NO: 240588 - DNA, 20 bp, synthetic construct
  source 1..20: mol_type = other DNA
caatctgtccccagcttgag

SEQ ID NO: 240589 - DNA, 20 bp, synthetic construct
  source 1..20: mol_type = other DNA
ccaatctgtccccagcttga

SEQ ID NO: 240590 - DNA, 20 bp, synthetic construct
  source 1..20: mol_type = other DNA
cccaatctgtccccagcttg

SEQ ID NO: 240591 - DNA, 20 bp, synthetic construct
  source 1..20: mol_type = other DNA
ccccaatctgtccccagctt

SEQ ID NO: 240592 - DNA, 20 bp, synthetic construct
  source 1..20: mol_type = other DNA
tccccaatctgtccccagct

SEQ ID NO: 240593 - DNA, 20 bp, synthetic construct
  source 1..20: mol_type = other DNA
ttccccaatctgtccccagc

SEQ ID NO: 240594 - DNA, 20 bp, synthetic construct
  source 1..20: mol_type = other DNA
tttccccaatctgtccccag

SEQ ID NO: 240595 - DNA, 20 bp, synthetic construct
  source 1..20: mol_type = other DNA
ctttccccaatctgtcccca

SEQ ID NO: 240596 - DNA, 20 bp, synthetic construct
  source 1..20: mol_type = other DNA
cctttccccaatctgtcccc

SEQ ID NO: 240597 - DNA, 20 bp, synthetic construct
  source 1..20: mol_type = other DNA
ccctttccccaatctgtccc

SEQ ID NO: 240598 - DNA, 20 bp, synthetic construct
  source 1..20: mol_type = other DNA
cccctttccccaatctgtcc

SEQ ID NO: 240599 - DNA, 20 bp, synthetic construct
  source 1..20: mol_type = other DNA
ccccctttccccaatctgtc

SEQ ID NO: 240600 - DNA, 20 bp, synthetic construct
  source 1..20: mol_type = other DNA
tccccctttccccaatctgt

SEQ ID NO: 240601 - DNA, 20 bp, synthetic construct
  source 1..20: mol_type = other DNA
gtccccctttccccaatctg

SEQ ID NO: 240602 - DNA, 20 bp, synthetic construct
  source 1..20: mol_type = other DNA
ggtccccctttccccaatct

SEQ ID NO: 240603 - DNA, 20 bp, synthetic construct
  source 1..20: mol_type = other DNA
tggtccccctttccccaatc

SEQ ID NO: 240604 - DNA, 20 bp, synthetic construct
  source 1..20: mol_type = other DNA
atggtccccctttccccaat

SEQ ID NO: 240605 - DNA, 20 bp, synthetic construct
  source 1..20: mol_type = other DNA
gatggtccccctttccccaa

SEQ ID NO: 240606 - DNA, 20 bp, synthetic construct
  source 1..20: mol_type = other DNA
tgatggtccccctttcccca

SEQ ID NO: 240607 - DNA, 20 bp, synthetic construct
  source 1..20: mol_type = other DNA
atgatggtccccctttcccc

SEQ ID NO: 240608 - DNA, 20 bp, synthetic construct
  source 1..20: mol_type = other DNA
catgatggtccccctttccc

SEQ ID NO: 240609 - DNA, 20 bp, synthetic construct
  source 1..20: mol_type = other DNA
gcatgatggtccccctttcc

SEQ ID NO: 240610 - DNA, 20 bp, synthetic construct
  source 1..20: mol_type = other DNA
ggcatgatggtccccctttc

SEQ ID NO: 240611 - DNA, 20 bp, synthetic construct
  source 1..20: mol_type = other DNA
gggcatgatggtcccccttt

SEQ ID NO: 240612 - DNA, 20 bp, synthetic construct
  source 1..20: mol_type = other DNA
tgggcatgatggtccccctt

SEQ ID NO: 240613 - DNA, 20 bp, synthetic construct
  source 1..20: mol_type = other DNA
atgggcatgatggtccccct

SEQ ID NO: 240614 - DNA, 20 bp, synthetic construct
  source 1..20: mol_type = other DNA
tatgggcatgatggtccccc

SEQ ID NO: 240615 - DNA, 20 bp, synthetic construct
  source 1..20: mol_type = other DNA
atatgggcatgatggtcccc

SEQ ID NO: 240616 - DNA, 20 bp, synthetic construct
  source 1..20: mol_type = other DNA
tatatgggcatgatggtccc

SEQ ID NO: 240617 - DNA, 20 bp, synthetic construct
  source 1..20: mol_type = other DNA
ctatatgggcatgatggtcc

SEQ ID NO: 240618 - DNA, 20 bp, synthetic construct
  source 1..20: mol_type = other DNA
tctatatgggcatgatggtc

SEQ ID NO: 240619 - DNA, 20 bp, synthetic construct
  source 1..20: mol_type = other DNA
atctatatgggcatgatggt

SEQ ID NO: 240620 - DNA, 20 bp, synthetic construct
  source 1..20: mol_type = other DNA
catctatatgggcatgatgg

SEQ ID NO: 240621 - DNA, 20 bp, synthetic construct
  source 1..20: mol_type = other DNA
acatctatatgggcatgatg

SEQ ID NO: 240622 - DNA, 20 bp, synthetic construct
  source 1..20: mol_type = other DNA
gacatctatatgggcatgat

SEQ ID NO: 240623 - DNA, 20 bp, synthetic construct
  source 1..20: mol_type = other DNA
ggacatctatatgggcatga

SEQ ID NO: 240624 - DNA, 20 bp, synthetic construct
  source 1..20: mol_type = other DNA
gggacatctatatgggcatg

SEQ ID NO: 240625 - DNA, 20 bp, synthetic construct
  source 1..20: mol_type = other DNA
agggacatctatatgggcat

SEQ ID NO: 240626 - DNA, 20 bp, synthetic construct
  source 1..20: mol_type = other DNA
cagggacatctatatgggca

SEQ ID NO: 240627 - DNA, 20 bp, synthetic construct
  source 1..20: mol_type = other DNA
acagggacatctatatgggc

SEQ ID NO: 240628 - DNA, 20 bp, synthetic construct
  source 1..20: mol_type = other DNA
cacagggacatctatatggg

SEQ ID NO: 240629 - DNA, 20 bp, synthetic construct
  source 1..20: mol_type = other DNA
gcacagggacatctatatgg

SEQ ID NO: 240630 - DNA, 20 bp, synthetic construct
  source 1..20: mol_type = other DNA
ggcacagggacatctatatg

SEQ ID NO: 240631 - DNA, 20 bp, synthetic construct
  source 1..20: mol_type = other DNA
gggcacagggacatctatat

SEQ ID NO: 240632 - DNA, 20 bp, synthetic construct
  source 1..20: mol_type = other DNA
agggcacagggacatctata

SEQ ID NO: 240633 - DNA, 20 bp, synthetic construct
  source 1..20: mol_type = other DNA
cagggcacagggacatctat

SEQ ID NO: 240634 - DNA, 20 bp, synthetic construct
  source 1..20: mol_type = other DNA
ccagggcacagggacatcta

SEQ ID NO: 240635 - DNA, 20 bp, synthetic construct
  source 1..20: mol_type = other DNA
gccagggcacagggacatct

SEQ ID NO: 240636 - DNA, 20 bp, synthetic construct
  source 1..20: mol_type = other DNA
tgccagggcacagggacatc

SEQ ID NO: 240637 - DNA, 20 bp, synthetic construct
  source 1..20: mol_type = other DNA
ctgccagggcacagggacat

SEQ ID NO: 240638 - DNA, 20 bp, synthetic construct
  source 1..20: mol_type = other DNA
actgccagggcacagggaca

SEQ ID NO: 240639 - DNA, 20 bp, synthetic construct
  source 1..20: mol_type = other DNA
gactgccagggcacagggac

SEQ ID NO: 240640 - DNA, 20 bp, synthetic construct
  source 1..20: mol_type = other DNA
tgactgccagggcacaggga

SEQ ID NO: 240641 - DNA, 20 bp, synthetic construct
  source 1..20: mol_type = other DNA
ttgactgccagggcacaggg

SEQ ID NO: 240642 - DNA, 20 bp, synthetic construct
  source 1..20: mol_type = other DNA
cttgactgccagggcacagg

SEQ ID NO: 240643 - DNA, 20 bp, synthetic construct
  source 1..20: mol_type = other DNA
ccttgactgccagggcacag

SEQ ID NO: 240644 - DNA, 20 bp, synthetic construct
  source 1..20: mol_type = other DNA
gccttgactgccagggcaca

SEQ ID NO: 240645 - DNA, 20 bp, synthetic construct
  source 1..20: mol_type = other DNA
agccttgactgccagggcac

SEQ ID NO: 240646 - DNA, 20 bp, synthetic construct
  source 1..20: mol_type = other DNA
cagccttgactgccagggca

SEQ ID NO: 240647 - DNA, 20 bp, synthetic construct
  source 1..20: mol_type = other DNA
gcagccttgactgccagggc

SEQ ID NO: 240648 - DNA, 20 bp, synthetic construct
  source 1..20: mol_type = other DNA
agcagccttgactgccaggg

SEQ ID NO: 240649 - DNA, 20 bp, synthetic construct
  source 1..20: mol_type = other DNA
cagcagccttgactgccagg

SEQ ID NO: 240650 - DNA, 20 bp, synthetic construct
  source 1..20: mol_type = other DNA
tcagcagccttgactgccag

SEQ ID NO: 240651 - DNA, 20 bp, synthetic construct
  source 1..20: mol_type = other DNA
ttcagcagccttgactgcca

SEQ ID NO: 240652 - DNA, 20 bp, synthetic construct
  source 1..20: mol_type = other DNA
tttcagcagccttgactgcc

SEQ ID NO: 240653 - DNA, 20 bp, synthetic construct
  source 1..20: mol_type = other DNA
ttttcagcagccttgactgc

SEQ ID NO: 240654 - DNA, 20 bp, synthetic construct
  source 1..20: mol_type = other DNA
tttttcagcagccttgactg

SEQ ID NO: 240655 - DNA, 20 bp, synthetic construct
  source 1..20: mol_type = other DNA
atttttcagcagccttgact

SEQ ID NO: 240656 - DNA, 20 bp, synthetic construct
  source 1..20: mol_type = other DNA
tatttttcagcagccttgac

SEQ ID NO: 240657 - DNA, 20 bp, synthetic construct
  source 1..20: mol_type = other DNA
ttatttttcagcagccttga

SEQ ID NO: 240658 - DNA, 20 bp, synthetic construct
  source 1..20: mol_type = other DNA
gttatttttcagcagccttg

SEQ ID NO: 240659 - DNA, 20 bp, synthetic construct
  source 1..20: mol_type = other DNA
tgttatttttcagcagcctt

SEQ ID NO: 240660 - DNA, 20 bp, synthetic construct
  source 1..20: mol_type = other DNA
ttgttatttttcagcagcct

SEQ ID NO: 240661 - DNA, 20 bp, synthetic construct
  source 1..20: mol_type = other DNA
tttgttatttttcagcagcc

SEQ ID NO: 240662 - DNA, 20 bp, synthetic construct
  source 1..20: mol_type = other DNA
ttttgttatttttcagcagc

SEQ ID NO: 240663 - DNA, 20 bp, synthetic construct
  source 1..20: mol_type = other DNA
gttttgttatttttcagcag

SEQ ID NO: 240664 - DNA, 20 bp, synthetic construct
  source 1..20: mol_type = other DNA
ggttttgttatttttcagca

SEQ ID NO: 240665 - DNA, 20 bp, synthetic construct
  source 1..20: mol_type = other DNA
gggttttgttatttttcagc

SEQ ID NO: 240666 - DNA, 20 bp, synthetic construct
  source 1..20: mol_type = other DNA
tgggttttgttatttttcag

SEQ ID NO: 240667 - DNA, 20 bp, synthetic construct
  source 1..20: mol_type = other DNA
ctgggttttgttatttttca

SEQ ID NO: 240668 - DNA, 20 bp, synthetic construct
  source 1..20: mol_type = other DNA
tctgggttttgttatttttc

SEQ ID NO: 240669 - DNA, 20 bp, synthetic construct
  source 1..20: mol_type = other DNA
ttctgggttttgttattttt

SEQ ID NO: 240670 - DNA, 20 bp, synthetic construct
  source 1..20: mol_type = other DNA
cttctgggttttgttatttt

SEQ ID NO: 240671 - DNA, 20 bp, synthetic construct
  source 1..20: mol_type = other DNA
acttctgggttttgttattt

SEQ ID NO: 240672 - DNA, 20 bp, synthetic construct
  source 1..20: mol_type = other DNA
gacttctgggttttgttatt

SEQ ID NO: 240673 - DNA, 20 bp, synthetic construct
  source 1..20: mol_type = other DNA
agacttctgggttttgttat

SEQ ID NO: 240674 - DNA, 20 bp, synthetic construct
  source 1..20: mol_type = other DNA
cagacttctgggttttgtta

SEQ ID NO: 240675 - DNA, 20 bp, synthetic construct
  source 1..20: mol_type = other DNA
gcagacttctgggttttgtt

SEQ ID NO: 240676 - DNA, 20 bp, synthetic construct
  source 1..20: mol_type = other DNA
cgcagacttctgggttttgt

SEQ ID NO: 240677 - DNA, 20 bp, synthetic construct
  source 1..20: mol_type = other DNA
acgcagacttctgggttttg

SEQ ID NO: 240678 - DNA, 20 bp, synthetic construct
  source 1..20: mol_type = other DNA
cacgcagacttctgggtttt

SEQ ID NO: 240679 - DNA, 20 bp, synthetic construct
  source 1..20: mol_type = other DNA
tcacgcagacttctgggttt

SEQ ID NO: 240680 - DNA, 20 bp, synthetic construct
  source 1..20: mol_type = other DNA
atcacgcagacttctgggtt

SEQ ID NO: 240681 - DNA, 20 bp, synthetic construct
  source 1..20: mol_type = other DNA
catcacgcagacttctgggt

SEQ ID NO: 240682 - DNA, 20 bp, synthetic construct
  source 1..20: mol_type = other DNA
gcatcacgcagacttctggg

SEQ ID NO: 240683 - DNA, 20 bp, synthetic construct
  source 1..20: mol_type = other DNA
agcatcacgcagacttctgg

SEQ ID NO: 240684 - DNA, 20 bp, synthetic construct
  source 1..20: mol_type = other DNA
cagcatcacgcagacttctg

SEQ ID NO: 240685 - DNA, 20 bp, synthetic construct
  source 1..20: mol_type = other DNA
gcagcatcacgcagacttct

SEQ ID NO: 240686 - DNA, 20 bp, synthetic construct
  source 1..20: mol_type = other DNA
ggcagcatcacgcagacttc

SEQ ID NO: 240687 - DNA, 20 bp, synthetic construct
  source 1..20: mol_type = other DNA
aggcagcatcacgcagactt

SEQ ID NO: 240688 - DNA, 20 bp, synthetic construct
  source 1..20: mol_type = other DNA
gaggcagcatcacgcagact

SEQ ID NO: 240689 - DNA, 20 bp, synthetic construct
  source 1..20: mol_type = other DNA
agaggcagcatcacgcagac

SEQ ID NO: 240690 - DNA, 20 bp, synthetic construct
  source 1..20: mol_type = other DNA
gagaggcagcatcacgcaga

SEQ ID NO: 240691 - DNA, 20 bp, synthetic construct
  source 1..20: mol_type = other DNA
ggagaggcagcatcacgcag

SEQ ID NO: 240692 - DNA, 20 bp, synthetic construct
  source 1..20: mol_type = other DNA
tggagaggcagcatcacgca

SEQ ID NO: 240693 - DNA, 20 bp, synthetic construct
  source 1..20: mol_type = other DNA
atggagaggcagcatcacgc

SEQ ID NO: 240694 - DNA, 20 bp, synthetic construct
  source 1..20: mol_type = other DNA
aatggagaggcagcatcacg

SEQ ID NO: 240695 - DNA, 20 bp, synthetic construct
  source 1..20: mol_type = other DNA
aaatggagaggcagcatcac

SEQ ID NO: 240696 - DNA, 20 bp, synthetic construct
  source 1..20: mol_type = other DNA
caaatggagaggcagcatca

SEQ ID NO: 240697 - DNA, 20 bp, synthetic construct
  source 1..20: mol_type = other DNA
acaaatggagaggcagcatc

SEQ ID NO: 240698 - DNA, 20 bp, synthetic construct
  source 1..20: mol_type = other DNA
gacaaatggagaggcagcat

SEQ ID NO: 240699 - DNA, 20 bp, synthetic construct
  source 1..20: mol_type = other DNA
ggacaaatggagaggcagca

SEQ ID NO: 240700 - DNA, 20 bp, synthetic construct
  source 1..20: mol_type = other DNA
tggacaaatggagaggcagc

SEQ ID NO: 240701 - DNA, 20 bp, synthetic construct
  source 1..20: mol_type = other DNA
ttggacaaatggagaggcag

SEQ ID NO: 240702 - DNA, 20 bp, synthetic construct
  source 1..20: mol_type = other DNA
tttggacaaatggagaggca

SEQ ID NO: 240703 - DNA, 20 bp, synthetic construct
  source 1..20: mol_type = other DNA
ctttggacaaatggagaggc

SEQ ID NO: 240704 - DNA, 20 bp, synthetic construct
  source 1..20: mol_type = other DNA
gctttggacaaatggagagg

SEQ ID NO: 240705 - DNA, 20 bp, synthetic construct
  source 1..20: mol_type = other DNA
ggctttggacaaatggagag

SEQ ID NO: 240706 - DNA, 20 bp, synthetic construct
  source 1..20: mol_type = other DNA
aggctttggacaaatggaga

SEQ ID NO: 240707 - DNA, 20 bp, synthetic construct
  source 1..20: mol_type = other DNA
aaggctttggacaaatggag

SEQ ID NO: 240708 - DNA, 20 bp, synthetic construct
  source 1..20: mol_type = other DNA
gaaggctttggacaaatgga

SEQ ID NO: 240709 - DNA, 20 bp, synthetic construct
  source 1..20: mol_type = other DNA
agaaggctttggacaaatgg

SEQ ID NO: 240710 - DNA, 20 bp, synthetic construct
  source 1..20: mol_type = other DNA
aagaaggctttggacaaatg

SEQ ID NO: 240711 - DNA, 20 bp, synthetic construct
  source 1..20: mol_type = other DNA
caagaaggctttggacaaat

SEQ ID NO: 240712 - DNA, 20 bp, synthetic construct
  source 1..20: mol_type = other DNA
gcaagaaggctttggacaaa

SEQ ID NO: 240713 - DNA, 20 bp, synthetic construct
  source 1..20: mol_type = other DNA
cgcaagaaggctttggacaa

SEQ ID NO: 240714 - DNA, 20 bp, synthetic construct
  source 1..20: mol_type = other DNA
ccgcaagaaggctttggaca

SEQ ID NO: 240715 - DNA, 20 bp, synthetic construct
  source 1..20: mol_type = other DNA
gccgcaagaaggctttggac

SEQ ID NO: 240716 - DNA, 20 bp, synthetic construct
  source 1..20: mol_type = other DNA
tgccgcaagaaggctttgga

SEQ ID NO: 240717 - DNA, 20 bp, synthetic construct
  source 1..20: mol_type = other DNA
ctgccgcaagaaggctttgg

SEQ ID NO: 240718 - DNA, 20 bp, synthetic construct
  source 1..20: mol_type = other DNA
actgccgcaagaaggctttg

SEQ ID NO: 240719 - DNA, 20 bp, synthetic construct
  source 1..20: mol_type = other DNA
aactgccgcaagaaggcttt

SEQ ID NO: 240720 - DNA, 20 bp, synthetic construct
  source 1..20: mol_type = other DNA
aaactgccgcaagaaggctt

SEQ ID NO: 240721 - DNA, 20 bp, synthetic construct
  source 1..20: mol_type = other DNA
caaactgccgcaagaaggct

SEQ ID NO: 240722 - DNA, 20 bp, synthetic construct
  source 1..20: mol_type = other DNA
gcaaactgccgcaagaaggc

SEQ ID NO: 240723 - DNA, 20 bp, synthetic construct
  source 1..20: mol_type = other DNA
tgcaaactgccgcaagaagg

SEQ ID NO: 240724 - DNA, 20 bp, synthetic construct
  source 1..20: mol_type = other DNA
ctgcaaactgccgcaagaag

SEQ ID NO: 240725 - DNA, 20 bp, synthetic construct
  source 1..20: mol_type = other DNA
cctgcaaactgccgcaagaa

SEQ ID NO: 240726 - DNA, 20 bp, synthetic construct
  source 1..20: mol_type = other DNA
gcctgcaaactgccgcaaga

SEQ ID NO: 240727 - DNA, 20 bp, synthetic construct
  source 1..20: mol_type = other DNA
agcctgcaaactgccgcaag

SEQ ID NO: 240728 - DNA, 20 bp, synthetic construct
  source 1..20: mol_type = other DNA
aagcctgcaaactgccgcaa

SEQ ID NO: 240729 - DNA, 20 bp, synthetic construct
  source 1..20: mol_type = other DNA
aaagcctgcaaactgccgca

SEQ ID NO: 240730 - DNA, 20 bp, synthetic construct
  source 1..20: mol_type = other DNA
aaaagcctgcaaactgccgc

SEQ ID NO: 240731 - DNA, 20 bp, synthetic construct
  source 1..20: mol_type = other DNA
caaaagcctgcaaactgccg

SEQ ID NO: 240732 - DNA, 20 bp, synthetic construct
  source 1..20: mol_type = other DNA
gcaaaagcctgcaaactgcc

SEQ ID NO: 240733 - DNA, 20 bp, synthetic construct
  source 1..20: mol_type = other DNA
tgcaaaagcctgcaaactgc

SEQ ID NO: 240734 - DNA, 20 bp, synthetic construct
  source 1..20: mol_type = other DNA
ttgcaaaagcctgcaaactg

SEQ ID NO: 240735 - DNA, 20 bp, synthetic construct
  source 1..20: mol_type = other DNA
tttgcaaaagcctgcaaact

SEQ ID NO: 240736 - DNA, 20 bp, synthetic construct
  source 1..20: mol_type = other DNA
ttttgcaaaagcctgcaaac

SEQ ID NO: 240737 - DNA, 20 bp, synthetic construct
  source 1..20: mol_type = other DNA
cttttgcaaaagcctgcaaa

SEQ ID NO: 240738 - DNA, 20 bp, synthetic construct
  source 1..20: mol_type = other DNA
gcttttgcaaaagcctgcaa

SEQ ID NO: 240739 - DNA, 20 bp, synthetic construct
  source 1..20: mol_type = other DNA
agcttttgcaaaagcctgca

SEQ ID NO: 240740 - DNA, 20 bp, synthetic construct
  source 1..20: mol_type = other DNA
gagcttttgcaaaagcctgc

SEQ ID NO: 240741 - DNA, 20 bp, synthetic construct
  source 1..20: mol_type = other DNA
ggagcttttgcaaaagcctg

SEQ ID NO: 240742 - DNA, 20 bp, synthetic construct
  source 1..20: mol_type = other DNA
tggagcttttgcaaaagcct

SEQ ID NO: 240743 - DNA, 20 bp, synthetic construct
  source 1..20: mol_type = other DNA
ctggagcttttgcaaaagcc

SEQ ID NO: 240744 - DNA, 20 bp, synthetic construct
  source 1..20: mol_type = other DNA
cctggagcttttgcaaaagc

SEQ ID NO: 240745 - DNA, 20 bp, synthetic construct
  source 1..20: mol_type = other DNA
tcctggagcttttgcaaaag

SEQ ID NO: 240746 - DNA, 20 bp, synthetic construct
  source 1..20: mol_type = other DNA
gtcctggagcttttgcaaaa

SEQ ID NO: 240747 - DNA, 20 bp, synthetic construct
  source 1..20: mol_type = other DNA
ggtcctggagcttttgcaaa

SEQ ID NO: 240748 - DNA, 20 bp, synthetic construct
  source 1..20: mol_type = other DNA
tggtcctggagcttttgcaa

SEQ ID NO: 240749 - DNA, 20 bp, synthetic construct
  source 1..20: mol_type = other DNA
ttggtcctggagcttttgca

SEQ ID NO: 240750 - DNA, 20 bp, synthetic construct
  source 1..20: mol_type = other DNA
cttggtcctggagcttttgc

SEQ ID NO: 240751 - DNA, 20 bp, synthetic construct
  source 1..20: mol_type = other DNA
ccttggtcctggagcttttg

SEQ ID NO: 240752 - DNA, 20 bp, synthetic construct
  source 1..20: mol_type = other DNA
tccttggtcctggagctttt

SEQ ID NO: 240753 - DNA, 20 bp, synthetic construct
  source 1..20: mol_type = other DNA
ctccttggtcctggagcttt

SEQ ID NO: 240754 - DNA, 20 bp, synthetic construct
  source 1..20: mol_type = other DNA
gctccttggtcctggagctt

SEQ ID NO: 240755 - DNA, 20 bp, synthetic construct
  source 1..20: mol_type = other DNA
agctccttggtcctggagct

SEQ ID NO: 240756 - DNA, 20 bp, synthetic construct
  source 1..20: mol_type = other DNA
tagctccttggtcctggagc

SEQ ID NO: 240757 - DNA, 20 bp, synthetic construct
  source 1..20: mol_type = other DNA
atagctccttggtcctggag

SEQ ID NO: 240758 - DNA, 20 bp, synthetic construct
  source 1..20: mol_type = other DNA
catagctccttggtcctgga

SEQ ID NO: 240759 - DNA, 20 bp, synthetic construct
  source 1..20: mol_type = other DNA
acatagctccttggtcctgg

SEQ ID NO: 240760 - DNA, 20 bp, synthetic construct
  source 1..20: mol_type = other DNA
aacatagctccttggtcctg

SEQ ID NO: 240761 - DNA, 20 bp, synthetic construct
  source 1..20: mol_type = other DNA
gaacatagctccttggtcct

SEQ ID NO: 240762 - DNA, 20 bp, synthetic construct
  source 1..20: mol_type = other DNA
tgaacatagctccttggtcc

SEQ ID NO: 240763 - DNA, 20 bp, synthetic construct
  source 1..20: mol_type = other DNA
atgaacatagctccttggtc

SEQ ID NO: 240764 - DNA, 20 bp, synthetic construct
  source 1..20: mol_type = other DNA
catgaacatagctccttggt

SEQ ID NO: 240765 - DNA, 20 bp, synthetic construct
  source 1..20: mol_type = other DNA
gcatgaacatagctccttgg

SEQ ID NO: 240766 - DNA, 20 bp, synthetic construct
  source 1..20: mol_type = other DNA
agcatgaacatagctccttg

SEQ ID NO: 240767 - DNA, 20 bp, synthetic construct
  source 1..20: mol_type = other DNA
cagcatgaacatagctcctt

SEQ ID NO: 240768 - DNA, 20 bp, synthetic construct
  source 1..20: mol_type = other DNA
ccagcatgaacatagctcct

SEQ ID NO: 240769 - DNA, 20 bp, synthetic construct
  source 1..20: mol_type = other DNA
tccagcatgaacatagctcc

SEQ ID NO: 240770 - DNA, 20 bp, synthetic construct
  source 1..20: mol_type = other DNA
ttccagcatgaacatagctc

SEQ ID NO: 240771 - DNA, 20 bp, synthetic construct
  source 1..20: mol_type = other DNA
cttccagcatgaacatagct

SEQ ID NO: 240772 - DNA, 20 bp, synthetic construct
  source 1..20: mol_type = other DNA
gcttccagcatgaacatagc

SEQ ID NO: 240773 - DNA, 20 bp, synthetic construct
  source 1..20: mol_type = other DNA
agcttccagcatgaacatag

SEQ ID NO: 240774 - DNA, 20 bp, synthetic construct
  source 1..20: mol_type = other DNA
aagcttccagcatgaacata

SEQ ID NO: 240775 - DNA, 20 bp, synthetic construct
  source 1..20: mol_type = other DNA
caagcttccagcatgaacat

SEQ ID NO: 240776 - DNA, 20 bp, synthetic construct
  source 1..20: mol_type = other DNA
acaagcttccagcatgaaca

SEQ ID NO: 240777 - DNA, 20 bp, synthetic construct
  source 1..20: mol_type = other DNA
aacaagcttccagcatgaac

SEQ ID NO: 240778 - DNA, 20 bp, synthetic construct
  source 1..20: mol_type = other DNA
gaacaagcttccagcatgaa

SEQ ID NO: 240779 - DNA, 20 bp, synthetic construct
  source 1..20: mol_type = other DNA
tgaacaagcttccagcatga

SEQ ID NO: 240780 - DNA, 20 bp, synthetic construct
  source 1..20: mol_type = other DNA
ctgaacaagcttccagcatg

SEQ ID NO: 240781 - DNA, 20 bp, synthetic construct
  source 1..20: mol_type = other DNA
cctgaacaagcttccagcat

SEQ ID NO: 240782 - DNA, 20 bp, synthetic construct
  source 1..20: mol_type = other DNA
tcctgaacaagcttccagca

SEQ ID NO: 240783 - DNA, 20 bp, synthetic construct
  source 1..20: mol_type = other DNA
atcctgaacaagcttccagc

SEQ ID NO: 240784 - DNA, 20 bp, synthetic construct
  source 1..20: mol_type = other DNA
aatcctgaacaagcttccag

SEQ ID NO: 240785 - DNA, 20 bp, synthetic construct
  source 1..20: mol_type = other DNA
taatcctgaacaagcttcca

SEQ ID NO: 240786 - DNA, 20 bp, synthetic construct
  source 1..20: mol_type = other DNA
ctaatcctgaacaagcttcc

SEQ ID NO: 240787 - DNA, 20 bp, synthetic construct
  source 1..20: mol_type = other DNA
gctaatcctgaacaagcttc

SEQ ID NO: 240788 - DNA, 20 bp, synthetic construct
  source 1..20: mol_type = other DNA
agctaatcctgaacaagctt

SEQ ID NO: 240789 - DNA, 20 bp, synthetic construct
  source 1..20: mol_type = other DNA
cagctaatcctgaacaagct

SEQ ID NO: 240790 - DNA, 20 bp, synthetic construct
  source 1..20: mol_type = other DNA
acagctaatcctgaacaagc

SEQ ID NO: 240791 - DNA, 20 bp, synthetic construct
  source 1..20: mol_type = other DNA
aacagctaatcctgaacaag

SEQ ID NO: 240792 - DNA, 20 bp, synthetic construct
  source 1..20: mol_type = other DNA
gaacagctaatcctgaacaa

SEQ ID NO: 240793 - DNA, 20 bp, synthetic construct
  source 1..20: mol_type = other DNA
agaacagctaatcctgaaca

SEQ ID NO: 240794 - DNA, 20 bp, synthetic construct
  source 1..20: mol_type = other DNA
aagaacagctaatcctgaac

SEQ ID NO: 240795 - DNA, 20 bp, synthetic construct
  source 1..20: mol_type = other DNA
aaagaacagctaatcctgaa

SEQ ID NO: 240796 - DNA, 20 bp, synthetic construct
  source 1..20: mol_type = other DNA
caaagaacagctaatcctga

SEQ ID NO: 240797 - DNA, 20 bp, synthetic construct
  source 1..20: mol_type = other DNA
acaaagaacagctaatcctg

SEQ ID NO: 240798 - DNA, 20 bp, synthetic construct
  source 1..20: mol_type = other DNA
cacaaagaacagctaatcct

SEQ ID NO: 240799 - DNA, 20 bp, synthetic construct
  source 1..20: mol_type = other DNA
ccacaaagaacagctaatcc

SEQ ID NO: 240800 - DNA, 20 bp, synthetic construct
  source 1..20: mol_type = other DNA
cccacaaagaacagctaatc

SEQ ID NO: 240801 - DNA, 20 bp, synthetic construct
  source 1..20: mol_type = other DNA
tcccacaaagaacagctaat

SEQ ID NO: 240802 - DNA, 20 bp, synthetic construct
  source 1..20: mol_type = other DNA
atcccacaaagaacagctaa

SEQ ID NO: 240803 - DNA, 20 bp, synthetic construct
  source 1..20: mol_type = other DNA
catcccacaaagaacagcta

SEQ ID NO: 240804 - DNA, 20 bp, synthetic construct
  source 1..20: mol_type = other DNA
ccatcccacaaagaacagct

SEQ ID NO: 240805 - DNA, 20 bp, synthetic construct
  source 1..20: mol_type = other DNA
cccatcccacaaagaacagc

SEQ ID NO: 240806 - DNA, 20 bp, synthetic construct
  source 1..20: mol_type = other DNA
acccatcccacaaagaacag

SEQ ID NO: 240807 - DNA, 20 bp, synthetic construct
  source 1..20: mol_type = other DNA
cacccatcccacaaagaaca

SEQ ID NO: 240808 - DNA, 20 bp, synthetic construct
  source 1..20: mol_type = other DNA
gcacccatcccacaaagaac

SEQ ID NO: 240809 - DNA, 20 bp, synthetic construct
  source 1..20: mol_type = other DNA
tgcacccatcccacaaagaa

SEQ ID NO: 240810 - DNA, 20 bp, synthetic construct
  source 1..20: mol_type = other DNA
ctgcacccatcccacaaaga

SEQ ID NO: 240811 - DNA, 20 bp, synthetic construct
  source 1..20: mol_type = other DNA
gctgcacccatcccacaaag

SEQ ID NO: 240812 - DNA, 20 bp, synthetic construct
  source 1..20: mol_type = other DNA
ggctgcacccatcccacaaa

SEQ ID NO: 240813 - DNA, 20 bp, synthetic construct
  source 1..20: mol_type = other DNA
tggctgcacccatcccacaa

SEQ ID NO: 240814 - DNA, 20 bp, synthetic construct
  source 1..20: mol_type = other DNA
ctggctgcacccatcccaca

SEQ ID NO: 240815 - DNA, 20 bp, synthetic construct
  source 1..20: mol_type = other DNA
cctggctgcacccatcccac

SEQ ID NO: 240816 - DNA, 20 bp, synthetic construct
  source 1..20: mol_type = other DNA
ccctggctgcacccatccca

SEQ ID NO: 240817 - DNA, 20 bp, synthetic construct
  source 1..20: mol_type = other DNA
gccctggctgcacccatccc

SEQ ID NO: 240818 - DNA, 20 bp, synthetic construct
  source 1..20: mol_type = other DNA
ggccctggctgcacccatcc

SEQ ID NO: 240819 - DNA, 20 bp, synthetic construct
  source 1..20: mol_type = other DNA
tggccctggctgcacccatc

SEQ ID NO: 240820 - DNA, 20 bp, synthetic construct
  source 1..20: mol_type = other DNA
ctggccctggctgcacccat

SEQ ID NO: 240821 - DNA, 20 bp, synthetic construct
  source 1..20: mol_type = other DNA
cctggccctggctgcaccca

SEQ ID NO: 240822 - DNA, 20 bp, synthetic construct
  source 1..20: mol_type = other DNA
acctggccctggctgcaccc

SEQ ID NO: 240823 - DNA, 20 bp, synthetic construct
  source 1..20: mol_type = other DNA
cacctggccctggctgcacc

SEQ ID NO: 240824 - DNA, 20 bp, synthetic construct
  source 1..20: mol_type = other DNA
acacctggccctggctgcac

SEQ ID NO: 240825 - DNA, 20 bp, synthetic construct
  source 1..20: mol_type = other DNA
gacacctggccctggctgca

SEQ ID NO: 240826 - DNA, 20 bp, synthetic construct
  source 1..20: mol_type = other DNA
ggacacctggccctggctgc

SEQ ID NO: 240827 - DNA, 20 bp, synthetic construct
  source 1..20: mol_type = other DNA
tggacacctggccctggctg

SEQ ID NO: 240828 - DNA, 20 bp, synthetic construct
  source 1..20: mol_type = other DNA
ctggacacctggccctggct

SEQ ID NO: 240829 - DNA, 20 bp, synthetic construct
  source 1..20: mol_type = other DNA
cctggacacctggccctggc

SEQ ID NO: 240830 - DNA, 20 bp, synthetic construct
  source 1..20: mol_type = other DNA
ccctggacacctggccctgg

SEQ ID NO: 240831 - DNA, 20 bp, synthetic construct
  source 1..20: mol_type = other DNA
tccctggacacctggccctg

SEQ ID NO: 240832 - DNA, 20 bp, synthetic construct
  source 1..20: mol_type = other DNA
gtccctggacacctggccct

SEQ ID NO: 240833 - DNA, 20 bp, synthetic construct
  source 1..20: mol_type = other DNA
tgtccctggacacctggccc

SEQ ID NO: 240834 - DNA, 20 bp, synthetic construct
  source 1..20: mol_type = other DNA
ctgtccctggacacctggcc

SEQ ID NO: 240835 - DNA, 20 bp, synthetic construct
  source 1..20: mol_type = other DNA
actgtccctggacacctggc

SEQ ID NO: 240836 - DNA, 20 bp, synthetic construct
  source 1..20: mol_type = other DNA
cactgtccctggacacctgg

SEQ ID NO: 240837 - DNA, 20 bp, synthetic construct
  source 1..20: mol_type = other DNA
acactgtccctggacacctg

SEQ ID NO: 240838 - DNA, 20 bp, synthetic construct
  source 1..20: mol_type = other DNA
aacactgtccctggacacct

SEQ ID NO: 240839 - DNA, 20 bp, synthetic construct
  source 1..20: mol_type = other DNA
aaacactgtccctggacacc

SEQ ID NO: 240840 - DNA, 20 bp, synthetic construct
  source 1..20: mol_type = other DNA
aaaacactgtccctggacac

SEQ ID NO: 240841 - DNA, 20 bp, synthetic construct
  source 1..20: mol_type = other DNA
taaaacactgtccctggaca

SEQ ID NO: 240842 - DNA, 20 bp, synthetic construct
  source 1..20: mol_type = other DNA
ttaaaacactgtccctggac

SEQ ID NO: 240843 - DNA, 20 bp, synthetic construct
  source 1..20: mol_type = other DNA
gttaaaacactgtccctgga

SEQ ID NO: 240844 - DNA, 20 bp, synthetic construct
  source 1..20: mol_type = other DNA
tgttaaaacactgtccctgg

SEQ ID NO: 240845 - DNA, 20 bp, synthetic construct
  source 1..20: mol_type = other DNA
ttgttaaaacactgtccctg

SEQ ID NO: 240846 - DNA, 20 bp, synthetic construct
  source 1..20: mol_type = other DNA
tttgttaaaacactgtccct

SEQ ID NO: 240847 - DNA, 20 bp, synthetic construct
  source 1..20: mol_type = other DNA
ctttgttaaaacactgtccc

SEQ ID NO: 240848 - DNA, 20 bp, synthetic construct
  source 1..20: mol_type = other DNA
cctttgttaaaacactgtcc

SEQ ID NO: 240849 - DNA, 20 bp, synthetic construct
  source 1..20: mol_type = other DNA
ccctttgttaaaacactgtc

SEQ ID NO: 240850 - DNA, 20 bp, synthetic construct
  source 1..20: mol_type = other DNA
gccctttgttaaaacactgt

SEQ ID NO: 240851 - DNA, 20 bp, synthetic construct
  source 1..20: mol_type = other DNA
tgccctttgttaaaacactg

SEQ ID NO: 240852 - DNA, 20 bp, synthetic construct
  source 1..20: mol_type = other DNA
atgccctttgttaaaacact

SEQ ID NO: 240853 - DNA, 20 bp, synthetic construct
  source 1..20: mol_type = other DNA
catgccctttgttaaaacac

SEQ ID NO: 240854 - DNA, 20 bp, synthetic construct
  source 1..20: mol_type = other DNA
tcatgccctttgttaaaaca

SEQ ID NO: 240855 - DNA, 20 bp, synthetic construct
  source 1..20: mol_type = other DNA
ctcatgccctttgttaaaac

SEQ ID NO: 240856 - DNA, 20 bp, synthetic construct
  source 1..20: mol_type = other DNA
cctcatgccctttgttaaaa

SEQ ID NO: 240857 - DNA, 20 bp, synthetic construct
  source 1..20: mol_type = other DNA
acctcatgccctttgttaaa

SEQ ID NO: 240858 - DNA, 20 bp, synthetic construct
  source 1..20: mol_type = other DNA
cacctcatgccctttgttaa

SEQ ID NO: 240859 - DNA, 20 bp, synthetic construct
  source 1..20: mol_type = other DNA
acacctcatgccctttgtta

SEQ ID NO: 240860 - DNA, 20 bp, synthetic construct
  source 1..20: mol_type = other DNA
gacacctcatgccctttgtt

SEQ ID NO: 240861 - DNA, 20 bp, synthetic construct
  source 1..20: mol_type = other DNA
agacacctcatgccctttgt

SEQ ID NO: 240862 - DNA, 20 bp, synthetic construct
  source 1..20: mol_type = other DNA
cagacacctcatgccctttg

SEQ ID NO: 240863 - DNA, 20 bp, synthetic construct
  source 1..20: mol_type = other DNA
tcagacacctcatgcccttt

SEQ ID NO: 240864 - DNA, 20 bp, synthetic construct
  source 1..20: mol_type = other DNA
atcagacacctcatgccctt

SEQ ID NO: 240865 - DNA, 20 bp, synthetic construct
  source 1..20: mol_type = other DNA
gatcagacacctcatgccct

SEQ ID NO: 240866 - DNA, 20 bp, synthetic construct
  source 1..20: mol_type = other DNA
agatcagacacctcatgccc

SEQ ID NO: 240867 - DNA, 20 bp, synthetic construct
  source 1..20: mol_type = other DNA
gagatcagacacctcatgcc

SEQ ID NO: 240868 - DNA, 20 bp, synthetic construct
  source 1..20: mol_type = other DNA
tgagatcagacacctcatgc

SEQ ID NO: 240869 - DNA, 20 bp, synthetic construct
  source 1..20: mol_type = other DNA
gtgagatcagacacctcatg

SEQ ID NO: 240870 - DNA, 20 bp, synthetic construct
  source 1..20: mol_type = other DNA
tgtgagatcagacacctcat

SEQ ID NO: 240871 - DNA, 20 bp, synthetic construct
  source 1..20: mol_type = other DNA
ctgtgagatcagacacctca

SEQ ID NO: 240872 - DNA, 20 bp, synthetic construct
  source 1..20: mol_type = other DNA
actgtgagatcagacacctc

SEQ ID NO: 240873 - DNA, 20 bp, synthetic construct
  source 1..20: mol_type = other DNA
cactgtgagatcagacacct

SEQ ID NO: 240874 - DNA, 20 bp, synthetic construct
  source 1..20: mol_type = other DNA
ccactgtgagatcagacacc

SEQ ID NO: 240875 - DNA, 20 bp, synthetic construct
  source 1..20: mol_type = other DNA
tccactgtgagatcagacac

SEQ ID NO: 240876 - DNA, 20 bp, synthetic construct
  source 1..20: mol_type = other DNA
ttccactgtgagatcagaca

SEQ ID NO: 240877 - DNA, 20 bp, synthetic construct
  source 1..20: mol_type = other DNA
gttccactgtgagatcagac

SEQ ID NO: 240878 - DNA, 20 bp, synthetic construct
  source 1..20: mol_type = other DNA
agttccactgtgagatcaga

SEQ ID NO: 240879 - DNA, 20 bp, synthetic construct
  source 1..20: mol_type = other DNA
gagttccactgtgagatcag

SEQ ID NO: 240880 - DNA, 20 bp, synthetic construct
  source 1..20: mol_type = other DNA
ggagttccactgtgagatca

SEQ ID NO: 240881 - DNA, 20 bp, synthetic construct
  source 1..20: mol_type = other DNA
tggagttccactgtgagatc

SEQ ID NO: 240882 - DNA, 20 bp, synthetic construct
  source 1..20: mol_type = other DNA
gtggagttccactgtgagat

SEQ ID NO: 240883 - DNA, 20 bp, synthetic construct
  source 1..20: mol_type = other DNA
agtggagttccactgtgaga

SEQ ID NO: 240884 - DNA, 20 bp, synthetic construct
  source 1..20: mol_type = other DNA
aagtggagttccactgtgag

SEQ ID NO: 240885 - DNA, 20 bp, synthetic construct
  source 1..20: mol_type = other DNA
caagtggagttccactgtga

SEQ ID NO: 240886 - DNA, 20 bp, synthetic construct
  source 1..20: mol_type = other DNA
gcaagtggagttccactgtg

SEQ ID NO: 240887 - DNA, 20 bp, synthetic construct
  source 1..20: mol_type = other DNA
ggcaagtggagttccactgt

SEQ ID NO: 240888 - DNA, 20 bp, synthetic construct
  source 1..20: mol_type = other DNA
aggcaagtggagttccactg

SEQ ID NO: 240889 - DNA, 20 bp, synthetic construct
  source 1..20: mol_type = other DNA
aaggcaagtggagttccact

SEQ ID NO: 240890 - DNA, 20 bp, synthetic construct
  source 1..20: mol_type = other DNA
aaaggcaagtggagttccac

SEQ ID NO: 240891 - DNA, 20 bp, synthetic construct
  source 1..20: mol_type = other DNA
aaaaggcaagtggagttcca

SEQ ID NO: 240892 - DNA, 20 bp, synthetic construct
  source 1..20: mol_type = other DNA
aaaaaggcaagtggagttcc

SEQ ID NO: 240893 - DNA, 20 bp, synthetic construct
  source 1..20: mol_type = other DNA
aaaaaaggcaagtggagttc

SEQ ID NO: 240894 - DNA, 20 bp, synthetic construct
  source 1..20: mol_type = other DNA
aaaaaaaggcaagtggagtt

SEQ ID NO: 240895 - DNA, 20 bp, synthetic construct
  source 1..20: mol_type = other DNA
gaaaaaaaggcaagtggagt

SEQ ID NO: 240896 - DNA, 20 bp, synthetic construct
  source 1..20: mol_type = other DNA
tgaaaaaaaggcaagtggag

SEQ ID NO: 240897 - DNA, 20 bp, synthetic construct
  source 1..20: mol_type = other DNA
atgaaaaaaaggcaagtgga

SEQ ID NO: 240898 - DNA, 20 bp, synthetic construct
  source 1..20: mol_type = other DNA
gatgaaaaaaaggcaagtgg

SEQ ID NO: 240899 - DNA, 20 bp, synthetic construct
  source 1..20: mol_type = other DNA
agatgaaaaaaaggcaagtg

SEQ ID NO: 240900 - DNA, 20 bp, synthetic construct
  source 1..20: mol_type = other DNA
aagatgaaaaaaaggcaagt

SEQ ID NO: 240901 - DNA, 20 bp, synthetic construct
  source 1..20: mol_type = other DNA
gaagatgaaaaaaaggcaag

SEQ ID NO: 240902 - DNA, 20 bp, synthetic construct
  source 1..20: mol_type = other DNA
agaagatgaaaaaaaggcaa

SEQ ID NO: 240903 - DNA, 20 bp, synthetic construct
  source 1..20: mol_type = other DNA
gagaagatgaaaaaaaggca

SEQ ID NO: 240904 - DNA, 20 bp, synthetic construct
  source 1..20: mol_type = other DNA
tgagaagatgaaaaaaaggc

SEQ ID NO: 240905 - DNA, 20 bp, synthetic construct
  source 1..20: mol_type = other DNA
atgagaagatgaaaaaaagg

SEQ ID NO: 240906 - DNA, 20 bp, synthetic construct
  source 1..20: mol_type = other DNA
aatgagaagatgaaaaaaag

SEQ ID NO: 240907 - DNA, 20 bp, synthetic construct
  source 1..20: mol_type = other DNA
gaatgagaagatgaaaaaaa

SEQ ID NO: 240908 - DNA, 20 bp, synthetic construct
  source 1..20: mol_type = other DNA
agaatgagaagatgaaaaaa

SEQ ID NO: 240909 - DNA, 20 bp, synthetic construct
  source 1..20: mol_type = other DNA
cagaatgagaagatgaaaaa

SEQ ID NO: 240910 - DNA, 20 bp, synthetic construct
  source 1..20: mol_type = other DNA
gcagaatgagaagatgaaaa

SEQ ID NO: 240911 - DNA, 20 bp, synthetic construct
  source 1..20: mol_type = other DNA
agcagaatgagaagatgaaa

SEQ ID NO: 240912 - DNA, 20 bp, synthetic construct
  source 1..20: mol_type = other DNA
aagcagaatgagaagatgaa

SEQ ID NO: 240913 - DNA, 20 bp, synthetic construct
  source 1..20: mol_type = other DNA
gaagcagaatgagaagatga

SEQ ID NO: 240914 - DNA, 20 bp, synthetic construct
  source 1..20: mol_type = other DNA
tgaagcagaatgagaagatg

SEQ ID NO: 240915 - DNA, 20 bp, synthetic construct
  source 1..20: mol_type = other DNA
atgaagcagaatgagaagat

SEQ ID NO: 240916 - DNA, 20 bp, synthetic construct
  source 1..20: mol_type = other DNA
catgaagcagaatgagaaga

SEQ ID NO: 240917 - DNA, 20 bp, synthetic construct
  source 1..20: mol_type = other DNA
gcatgaagcagaatgagaag

SEQ ID NO: 240918 - DNA, 20 bp, synthetic construct
  source 1..20: mol_type = other DNA
tgcatgaagcagaatgagaa

SEQ ID NO: 240919 - DNA, 20 bp, synthetic construct
  source 1..20: mol_type = other DNA
gtgcatgaagcagaatgaga

SEQ ID NO: 240920 - DNA, 20 bp, synthetic construct
  source 1..20: mol_type = other DNA
tgtgcatgaagcagaatgag

SEQ ID NO: 240921 - DNA, 20 bp, synthetic construct
  source 1..20: mol_type = other DNA
ctgtgcatgaagcagaatga

SEQ ID NO: 240922 - DNA, 20 bp, synthetic construct
  source 1..20: mol_type = other DNA
tctgtgcatgaagcagaatg

SEQ ID NO: 240923 - DNA, 20 bp, synthetic construct
  source 1..20: mol_type = other DNA
ttctgtgcatgaagcagaat

SEQ ID NO: 240924 - DNA, 20 bp, synthetic construct
  source 1..20: mol_type = other DNA
gttctgtgcatgaagcagaa

SEQ ID NO: 240925 - DNA, 20 bp, synthetic construct
  source 1..20: mol_type = other DNA
ggttctgtgcatgaagcaga

SEQ ID NO: 240926 - DNA, 20 bp, synthetic construct
  source 1..20: mol_type = other DNA
tggttctgtgcatgaagcag

SEQ ID NO: 240927 - DNA, 20 bp, synthetic construct
  source 1..20: mol_type = other DNA
ctggttctgtgcatgaagca

SEQ ID NO: 240928 - DNA, 20 bp, synthetic construct
  source 1..20: mol_type = other DNA
gctggttctgtgcatgaagc

SEQ ID NO: 240929 - DNA, 20 bp, synthetic construct
  source 1..20: mol_type = other DNA
ggctggttctgtgcatgaag

SEQ ID NO: 240930 - DNA, 20 bp, synthetic construct
  source 1..20: mol_type = other DNA
gggctggttctgtgcatgaa

SEQ ID NO: 240931 - DNA, 20 bp, synthetic construct
  source 1..20: mol_type = other DNA
ggggctggttctgtgcatga

SEQ ID NO: 240932 - DNA, 20 bp, synthetic construct
  source 1..20: mol_type = other DNA
tggggctggttctgtgcatg

SEQ ID NO: 240933 - DNA, 20 bp, synthetic construct
  source 1..20: mol_type = other DNA
atggggctggttctgtgcat

SEQ ID NO: 240934 - DNA, 20 bp, synthetic construct
  source 1..20: mol_type = other DNA
gatggggctggttctgtgca

SEQ ID NO: 240935 - DNA, 20 bp, synthetic construct
  source 1..20: mol_type = other DNA
ggatggggctggttctgtgc

SEQ ID NO: 240936 - DNA, 20 bp, synthetic construct
  source 1..20: mol_type = other DNA
aggatggggctggttctgtg

SEQ ID NO: 240937 - DNA, 20 bp, synthetic construct
  source 1..20: mol_type = other DNA
caggatggggctggttctgt

SEQ ID NO: 240938 - DNA, 20 bp, synthetic construct
  source 1..20: mol_type = other DNA
tcaggatggggctggttctg

SEQ ID NO: 240939 - DNA, 20 bp, synthetic construct
  source 1..20: mol_type = other DNA
ttcaggatggggctggttct

SEQ ID NO: 240940 - DNA, 20 bp, synthetic construct
  source 1..20: mol_type = other DNA
tttcaggatggggctggttc

SEQ ID NO: 240941 - DNA, 20 bp, synthetic construct
  source 1..20: mol_type = other DNA
gtttcaggatggggctggtt

SEQ ID NO: 240942 - DNA, 20 bp, synthetic construct
  source 1..20: mol_type = other DNA
agtttcaggatggggctggt

SEQ ID NO: 240943 - DNA, 20 bp, synthetic construct
  source 1..20: mol_type = other DNA
cagtttcaggatggggctgg

SEQ ID NO: 240944 - DNA, 20 bp, synthetic construct
  source 1..20: mol_type = other DNA
tcagtttcaggatggggctg

SEQ ID NO: 240945 - DNA, 20 bp, synthetic construct
  source 1..20: mol_type = other DNA
gtcagtttcaggatggggct

SEQ ID NO: 240946 - DNA, 20 bp, synthetic construct
  source 1..20: mol_type = other DNA
agtcagtttcaggatggggc

SEQ ID NO: 240947 - DNA, 20 bp, synthetic construct
  source 1..20: mol_type = other DNA
gagtcagtttcaggatgggg

SEQ ID NO: 240948 - DNA, 20 bp, synthetic construct
  source 1..20: mol_type = other DNA
agagtcagtttcaggatggg

SEQ ID NO: 240949 - DNA, 20 bp, synthetic construct
  source 1..20: mol_type = other DNA
tagagtcagtttcaggatgg

SEQ ID NO: 240950 - DNA, 20 bp, synthetic construct
  source 1..20: mol_type = other DNA
ttagagtcagtttcaggatg

SEQ ID NO: 240951 - DNA, 20 bp, synthetic construct
  source 1..20: mol_type = other DNA
tttagagtcagtttcaggat

SEQ ID NO: 240952 - DNA, 20 bp, synthetic construct
  source 1..20: mol_type = other DNA
atttagagtcagtttcagga

SEQ ID NO: 240953 - DNA, 20 bp, synthetic construct
  source 1..20: mol_type = other DNA
aatttagagtcagtttcagg

SEQ ID NO: 240954 - DNA, 20 bp, synthetic construct
  source 1..20: mol_type = other DNA
taatttagagtcagtttcag

SEQ ID NO: 240955 - DNA, 20 bp, synthetic construct
  source 1..20: mol_type = other DNA
gtaatttagagtcagtttca

SEQ ID NO: 240956 - DNA, 20 bp, synthetic construct
  source 1..20: mol_type = other DNA
agtaatttagagtcagtttc

SEQ ID NO: 240957 - DNA, 20 bp, synthetic construct
  source 1..20: mol_type = other DNA
gagtaatttagagtcagttt

SEQ ID NO: 240958 - DNA, 20 bp, synthetic construct
  source 1..20: mol_type = other DNA
ggagtaatttagagtcagtt

SEQ ID NO: 240959 - DNA, 20 bp, synthetic construct
  source 1..20: mol_type = other DNA
gggagtaatttagagtcagt

SEQ ID NO: 240960 - DNA, 20 bp, synthetic construct
  source 1..20: mol_type = other DNA
cgggagtaatttagagtcag

SEQ ID NO: 240961 - DNA, 20 bp, synthetic construct
  source 1..20: mol_type = other DNA
gcgggagtaatttagagtca

SEQ ID NO: 240962 - DNA, 20 bp, synthetic construct
  source 1..20: mol_type = other DNA
ggcgggagtaatttagagtc

SEQ ID NO: 240963 - DNA, 20 bp, synthetic construct
  source 1..20: mol_type = other DNA
gggcgggagtaatttagagt

SEQ ID NO: 240964 - DNA, 20 bp, synthetic construct
  source 1..20: mol_type = other DNA
ggggcgggagtaatttagag

SEQ ID NO: 240965 - DNA, 20 bp, synthetic construct
  source 1..20: mol_type = other DNA
tggggcgggagtaatttaga

SEQ ID NO: 240966 - DNA, 20 bp, synthetic construct
  source 1..20: mol_type = other DNA
ctggggcgggagtaatttag

SEQ ID NO: 240967 - DNA, 20 bp, synthetic construct
  source 1..20: mol_type = other DNA
cctggggcgggagtaattta

SEQ ID NO: 240968 - DNA, 20 bp, synthetic construct
  source 1..20: mol_type = other DNA
acctggggcgggagtaattt

SEQ ID NO: 240969 - DNA, 20 bp, synthetic construct
  source 1..20: mol_type = other DNA
cacctggggcgggagtaatt

SEQ ID NO: 240970 - DNA, 20 bp, synthetic construct
  source 1..20: mol_type = other DNA
ccacctggggcgggagtaat

SEQ ID NO: 240971 - DNA, 20 bp, synthetic construct
  source 1..20: mol_type = other DNA
tccacctggggcgggagtaa

SEQ ID NO: 240972 - DNA, 20 bp, synthetic construct
  source 1..20: mol_type = other DNA
ctccacctggggcgggagta

SEQ ID NO: 240973 - DNA, 20 bp, synthetic construct
  source 1..20: mol_type = other DNA
actccacctggggcgggagt

SEQ ID NO: 240974 - DNA, 20 bp, synthetic construct
  source 1..20: mol_type = other DNA
cactccacctggggcgggag

SEQ ID NO: 240975 - DNA, 20 bp, synthetic construct
  source 1..20: mol_type = other DNA
gcactccacctggggcggga

SEQ ID NO: 240976 - DNA, 20 bp, synthetic construct
  source 1..20: mol_type = other DNA
ggcactccacctggggcggg

SEQ ID NO: 240977 - DNA, 20 bp, synthetic construct
  source 1..20: mol_type = other DNA
aggcactccacctggggcgg

SEQ ID NO: 240978 - DNA, 20 bp, synthetic construct
  source 1..20: mol_type = other DNA
aaggcactccacctggggcg

SEQ ID NO: 240979 - DNA, 20 bp, synthetic construct
  source 1..20: mol_type = other DNA
aaaggcactccacctggggc

SEQ ID NO: 240980 - DNA, 20 bp, synthetic construct
  source 1..20: mol_type = other DNA
gaaaggcactccacctgggg

SEQ ID NO: 240981 - DNA, 20 bp, synthetic construct
  source 1..20: mol_type = other DNA
agaaaggcactccacctggg

SEQ ID NO: 240982 - DNA, 20 bp, synthetic construct
  source 1..20: mol_type = other DNA
gagaaaggcactccacctgg

SEQ ID NO: 240983 - DNA, 20 bp, synthetic construct
  source 1..20: mol_type = other DNA
cgagaaaggcactccacctg

SEQ ID NO: 240984 - DNA, 20 bp, synthetic construct
  source 1..20: mol_type = other DNA
ccgagaaaggcactccacct

SEQ ID NO: 240985 - DNA, 20 bp, synthetic construct
  source 1..20: mol_type = other DNA
tccgagaaaggcactccacc

SEQ ID NO: 240986 - DNA, 20 bp, synthetic construct
  source 1..20: mol_type = other DNA
ctccgagaaaggcactccac

SEQ ID NO: 240987 - DNA, 20 bp, synthetic construct
  source 1..20: mol_type = other DNA
actccgagaaaggcactcca

SEQ ID NO: 240988 - DNA, 20 bp, synthetic construct
  source 1..20: mol_type = other DNA
aactccgagaaaggcactcc

SEQ ID NO: 240989 - DNA, 20 bp, synthetic construct
  source 1..20: mol_type = other DNA
gaactccgagaaaggcactc

SEQ ID NO: 240990 - DNA, 20 bp, synthetic construct
  source 1..20: mol_type = other DNA
tgaactccgagaaaggcact

SEQ ID NO: 240991 - DNA, 20 bp, synthetic construct
  source 1..20: mol_type = other DNA
ttgaactccgagaaaggcac

SEQ ID NO: 240992 - DNA, 20 bp, synthetic construct
  source 1..20: mol_type = other DNA
gttgaactccgagaaaggca

SEQ ID NO: 240993 - DNA, 20 bp, synthetic construct
  source 1..20: mol_type = other DNA
tgttgaactccgagaaaggc

SEQ ID NO: 240994 - DNA, 20 bp, synthetic construct
  source 1..20: mol_type = other DNA
ctgttgaactccgagaaagg

SEQ ID NO: 240995 - DNA, 20 bp, synthetic construct
  source 1..20: mol_type = other DNA
tctgttgaactccgagaaag

SEQ ID NO: 240996 - DNA, 20 bp, synthetic construct
  source 1..20: mol_type = other DNA
ctctgttgaactccgagaaa

SEQ ID NO: 240997 - DNA, 20 bp, synthetic construct
  source 1..20: mol_type = other DNA
gctctgttgaactccgagaa

SEQ ID NO: 240998 - DNA, 20 bp, synthetic construct
  source 1..20: mol_type = other DNA
ggctctgttgaactccgaga

SEQ ID NO: 240999 - DNA, 20 bp, synthetic construct
  source 1..20: mol_type = other DNA
aggctctgttgaactccgag

SEQ ID NO: 241000 - DNA, 20 bp, synthetic construct
  source 1..20: mol_type = other DNA
aaggctctgttgaactccga

SEQ ID NO: 241001 - DNA, 20 bp, synthetic construct
  source 1..20: mol_type = other DNA
gaaggctctgttgaactccg

SEQ ID NO: 241002 - DNA, 20 bp, synthetic construct
  source 1..20: mol_type = other DNA
ggaaggctctgttgaactcc

SEQ ID NO: 241003 - DNA, 20 bp, synthetic construct
  source 1..20: mol_type = other DNA
aggaaggctctgttgaactc

SEQ ID NO: 241004 - DNA, 20 bp, synthetic construct
  source 1..20: mol_type = other DNA
caggaaggctctgttgaact

SEQ ID NO: 241005 - DNA, 20 bp, synthetic construct
  source 1..20: mol_type = other DNA
acaggaaggctctgttgaac

SEQ ID NO: 241006 - DNA, 20 bp, synthetic construct
  source 1..20: mol_type = other DNA
gacaggaaggctctgttgaa

SEQ ID NO: 241007 - DNA, 20 bp, synthetic construct
  source 1..20: mol_type = other DNA
cgacaggaaggctctgttga

SEQ ID NO: 241008 - DNA, 20 bp, synthetic construct
  source 1..20: mol_type = other DNA
gcgacaggaaggctctgttg

SEQ ID NO: 241009 - DNA, 20 bp, synthetic construct
  source 1..20: mol_type = other DNA
ggcgacaggaaggctctgtt

SEQ ID NO: 241010 - DNA, 20 bp, synthetic construct
  source 1..20: mol_type = other DNA
gggcgacaggaaggctctgt

SEQ ID NO: 241011 - DNA, 20 bp, synthetic construct
  source 1..20: mol_type = other DNA
tgggcgacaggaaggctctg

SEQ ID NO: 241012 - DNA, 20 bp, synthetic construct
  source 1..20: mol_type = other DNA
ttgggcgacaggaaggctct

SEQ ID NO: 241013 - DNA, 20 bp, synthetic construct
  source 1..20: mol_type = other DNA
cttgggcgacaggaaggctc

SEQ ID NO: 241014 - DNA, 20 bp, synthetic construct
  source 1..20: mol_type = other DNA
ccttgggcgacaggaaggct

SEQ ID NO: 241015 - DNA, 20 bp, synthetic construct
  source 1..20: mol_type = other DNA
cccttgggcgacaggaaggc

SEQ ID NO: 241016 - DNA, 20 bp, synthetic construct
  source 1..20: mol_type = other DNA
tcccttgggcgacaggaagg

SEQ ID NO: 241017 - DNA, 20 bp, synthetic construct
  source 1..20: mol_type = other DNA
gtcccttgggcgacaggaag

SEQ ID NO: 241018 - DNA, 20 bp, synthetic construct
  source 1..20: mol_type = other DNA
tgtcccttgggcgacaggaa

SEQ ID NO: 241019 - DNA, 20 bp, synthetic construct
  source 1..20: mol_type = other DNA
ttgtcccttgggcgacagga

SEQ ID NO: 241020 - DNA, 20 bp, synthetic construct
  source 1..20: mol_type = other DNA
gttgtcccttgggcgacagg

SEQ ID NO: 241021 - DNA, 20 bp, synthetic construct
  source 1..20: mol_type = other DNA
agttgtcccttgggcgacag

SEQ ID NO: 241022 - DNA, 20 bp, synthetic construct
  source 1..20: mol_type = other DNA
gagttgtcccttgggcgaca

SEQ ID NO: 241023 - DNA, 20 bp, synthetic construct
  source 1..20: mol_type = other DNA
ggagttgtcccttgggcgac

SEQ ID NO: 241024 - DNA, 20 bp, synthetic construct
  source 1..20: mol_type = other DNA
tggagttgtcccttgggcga

SEQ ID NO: 241025 - DNA, 20 bp, synthetic construct
  source 1..20: mol_type = other DNA
gtggagttgtcccttgggcg

SEQ ID NO: 241026 - DNA, 20 bp, synthetic construct
  source 1..20: mol_type = other DNA
agtggagttgtcccttgggc

SEQ ID NO: 241027 - DNA, 20 bp, synthetic construct
  source 1..20: mol_type = other DNA
cagtggagttgtcccttggg

SEQ ID NO: 241028 - DNA, 20 bp, synthetic construct
  source 1..20: mol_type = other DNA
tcagtggagttgtcccttgg

SEQ ID NO: 241029 - DNA, 20 bp, synthetic construct
  source 1..20: mol_type = other DNA
ttcagtggagttgtcccttg

SEQ ID NO: 241030 - DNA, 20 bp, synthetic construct
  source 1..20: mol_type = other DNA
attcagtggagttgtccctt

SEQ ID NO: 241031 - DNA, 20 bp, synthetic construct
  source 1..20: mol_type = other DNA
cattcagtggagttgtccct

SEQ ID NO: 241032 - DNA, 20 bp, synthetic construct
  source 1..20: mol_type = other DNA
gcattcagtggagttgtccc

SEQ ID NO: 241033 - DNA, 20 bp, synthetic construct
  source 1..20: mol_type = other DNA
ggcattcagtggagttgtcc

SEQ ID NO: 241034 - DNA, 20 bp, synthetic construct
  source 1..20: mol_type = other DNA
gggcattcagtggagttgtc

SEQ ID NO: 241035 - DNA, 20 bp, synthetic construct
  source 1..20: mol_type = other DNA
tgggcattcagtggagttgt

SEQ ID NO: 241036 - DNA, 20 bp, synthetic construct
  source 1..20: mol_type = other DNA
ttgggcattcagtggagttg

SEQ ID NO: 241037 - DNA, 20 bp, synthetic construct
  source 1..20: mol_type = other DNA
cttgggcattcagtggagtt

SEQ ID NO: 241038 - DNA, 20 bp, synthetic construct
  source 1..20: mol_type = other DNA
gcttgggcattcagtggagt

SEQ ID NO: 241039 - DNA, 20 bp, synthetic construct
  source 1..20: mol_type = other DNA
ggcttgggcattcagtggag

SEQ ID NO: 241040 - DNA, 20 bp, synthetic construct
  source 1..20: mol_type = other DNA
tggcttgggcattcagtgga

SEQ ID NO: 241041 - DNA, 20 bp, synthetic construct
  source 1..20: mol_type = other DNA
gtggcttgggcattcagtgg

SEQ ID NO: 241042 - DNA, 20 bp, synthetic construct
  source 1..20: mol_type = other DNA
tgtggcttgggcattcagtg

SEQ ID NO: 241043 - DNA, 20 bp, synthetic construct
  source 1..20: mol_type = other DNA
gtgtggcttgggcattcagt

SEQ ID NO: 241044 - DNA, 20 bp, synthetic construct
  source 1..20: mol_type = other DNA
ggtgtggcttgggcattcag

SEQ ID NO: 241045 - DNA, 20 bp, synthetic construct
  source 1..20: mol_type = other DNA
gggtgtggcttgggcattca

SEQ ID NO: 241046 - DNA, 20 bp, synthetic construct
  source 1..20: mol_type = other DNA
tgggtgtggcttgggcattc

SEQ ID NO: 241047 - DNA, 20 bp, synthetic construct
  source 1..20: mol_type = other DNA
ttgggtgtggcttgggcatt

SEQ ID NO: 241048 - DNA, 20 bp, synthetic construct
  source 1..20: mol_type = other DNA
tttgggtgtggcttgggcat

SEQ ID NO: 241049 - DNA, 20 bp, synthetic construct
  source 1..20: mol_type = other DNA
ttttgggtgtggcttgggca

SEQ ID NO: 241050 - DNA, 20 bp, synthetic construct
  source 1..20: mol_type = other DNA
gttttgggtgtggcttgggc

SEQ ID NO: 241051 - DNA, 20 bp, synthetic construct
  source 1..20: mol_type = other DNA
ggttttgggtgtggcttggg

SEQ ID NO: 241052 - DNA, 20 bp, synthetic construct
  source 1..20: mol_type = other DNA
aggttttgggtgtggcttgg

SEQ ID NO: 241053 - DNA, 20 bp, synthetic construct
  source 1..20: mol_type = other DNA
taggttttgggtgtggcttg

SEQ ID NO: 241054 - DNA, 20 bp, synthetic construct
  source 1..20: mol_type = other DNA
ttaggttttgggtgtggctt

SEQ ID NO: 241055 - DNA, 20 bp, synthetic construct
  source 1..20: mol_type = other DNA
gttaggttttgggtgtggct

SEQ ID NO: 241056 - DNA, 20 bp, synthetic construct
  source 1..20: mol_type = other DNA
tgttaggttttgggtgtggc

SEQ ID NO: 241057 - DNA, 20 bp, synthetic construct
  source 1..20: mol_type = other DNA
ttgttaggttttgggtgtgg

SEQ ID NO: 241058 - DNA, 20 bp, synthetic construct
  source 1..20: mol_type = other DNA
cttgttaggttttgggtgtg

SEQ ID NO: 241059 - DNA, 20 bp, synthetic construct
  source 1..20: mol_type = other DNA
acttgttaggttttgggtgt

SEQ ID NO: 241060 - DNA, 20 bp, synthetic construct
  source 1..20: mol_type = other DNA
tacttgttaggttttgggtg

SEQ ID NO: 241061 - DNA, 20 bp, synthetic construct
  source 1..20: mol_type = other DNA
ttacttgttaggttttgggt

SEQ ID NO: 241062 - DNA, 20 bp, synthetic construct
  source 1..20: mol_type = other DNA
tttacttgttaggttttggg

SEQ ID NO: 241063 - DNA, 20 bp, synthetic construct
  source 1..20: mol_type = other DNA
ttttacttgttaggttttgg

SEQ ID NO: 241064 - DNA, 20 bp, synthetic construct
  source 1..20: mol_type = other DNA
tttttacttgttaggttttg

SEQ ID NO: 241065 - DNA, 20 bp, synthetic construct
  source 1..20: mol_type = other DNA
gtttttacttgttaggtttt

SEQ ID NO: 241066 - DNA, 20 bp, synthetic construct
  source 1..20: mol_type = other DNA
ggtttttacttgttaggttt

SEQ ID NO: 241067 - DNA, 20 bp, synthetic construct
  source 1..20: mol_type = other DNA
tggtttttacttgttaggtt

SEQ ID NO: 241068 - DNA, 20 bp, synthetic construct
  source 1..20: mol_type = other DNA
ttggtttttacttgttaggt

SEQ ID NO: 241069 - DNA, 20 bp, synthetic construct
  source 1..20: mol_type = other DNA
tttggtttttacttgttagg

SEQ ID NO: 241070 - DNA, 20 bp, synthetic construct
  source 1..20: mol_type = other DNA
atttggtttttacttgttag

SEQ ID NO: 241071 - DNA, 20 bp, synthetic construct
  source 1..20: mol_type = other DNA
aatttggtttttacttgtta

SEQ ID NO: 241072 - DNA, 20 bp, synthetic construct
  source 1..20: mol_type = other DNA
gaatttggtttttacttgtt

SEQ ID NO: 241073 - DNA, 20 bp, synthetic construct
  source 1..20: mol_type = other DNA
agaatttggtttttacttgt

SEQ ID NO: 241074 - DNA, 20 bp, synthetic construct
  source 1..20: mol_type = other DNA
cagaatttggtttttacttg

SEQ ID NO: 241075 - DNA, 20 bp, synthetic construct
  source 1..20: mol_type = other DNA
acagaatttggtttttactt

SEQ ID NO: 241076 - DNA, 20 bp, synthetic construct
  source 1..20: mol_type = other DNA
cacagaatttggtttttact

SEQ ID NO: 241077 - DNA, 20 bp, synthetic construct
  source 1..20: mol_type = other DNA
gcacagaatttggtttttac

SEQ ID NO: 241078 - DNA, 20 bp, synthetic construct
  source 1..20: mol_type = other DNA
agcacagaatttggttttta

SEQ ID NO: 241079 - DNA, 20 bp, synthetic construct
  source 1..20: mol_type = other DNA
gagcacagaatttggttttt

SEQ ID NO: 241080 - DNA, 20 bp, synthetic construct
  source 1..20: mol_type = other DNA
ggagcacagaatttggtttt

SEQ ID NO: 241081 - DNA, 20 bp, synthetic construct
  source 1..20: mol_type = other DNA
gggagcacagaatttggttt

SEQ ID NO: 241082 - DNA, 20 bp, synthetic construct
  source 1..20: mol_type = other DNA
ggggagcacagaatttggtt

SEQ ID NO: 241083 - DNA, 20 bp, synthetic construct
  source 1..20: mol_type = other DNA
gggggagcacagaatttggt

SEQ ID NO: 241084 - DNA, 20 bp, synthetic construct
  source 1..20: mol_type = other DNA
tgggggagcacagaatttgg

SEQ ID NO: 241085 - DNA, 20 bp, synthetic construct
  source 1..20: mol_type = other DNA
atgggggagcacagaatttg

SEQ ID NO: 241086 - DNA, 20 bp, synthetic construct
  source 1..20: mol_type = other DNA
gatgggggagcacagaattt

SEQ ID NO: 241087 - DNA, 20 bp, synthetic construct
  source 1..20: mol_type = other DNA
ggatgggggagcacagaatt

SEQ ID NO: 241088 - DNA, 20 bp, synthetic construct
  source 1..20: mol_type = other DNA
aggatgggggagcacagaat

SEQ ID NO: 241089 - DNA, 20 bp, synthetic construct
  source 1..20: mol_type = other DNA
caggatgggggagcacagaa

SEQ ID NO: 241090 - DNA, 20 bp, synthetic construct
  source 1..20: mol_type = other DNA
ccaggatgggggagcacaga

SEQ ID NO: 241091 - DNA, 20 bp, synthetic construct
  source 1..20: mol_type = other DNA
cccaggatgggggagcacag

SEQ ID NO: 241092 - DNA, 20 bp, synthetic construct
  source 1..20: mol_type = other DNA
gcccaggatgggggagcaca

SEQ ID NO: 241093 - DNA, 20 bp, synthetic construct
  source 1..20: mol_type = other DNA
ggcccaggatgggggagcac

SEQ ID NO: 241094 - DNA, 20 bp, synthetic construct
  source 1..20: mol_type = other DNA
tggcccaggatgggggagca

SEQ ID NO: 241095 - DNA, 20 bp, synthetic construct
  source 1..20: mol_type = other DNA
atggcccaggatgggggagc

SEQ ID NO: 241096 - DNA, 20 bp, synthetic construct
  source 1..20: mol_type = other DNA
aatggcccaggatgggggag

SEQ ID NO: 241097 - DNA, 20 bp, synthetic construct
  source 1..20: mol_type = other DNA
gaatggcccaggatggggga

SEQ ID NO: 241098 - DNA, 20 bp, synthetic construct
  source 1..20: mol_type = other DNA
ggaatggcccaggatggggg

SEQ ID NO: 241099 - DNA, 20 bp, synthetic construct
  source 1..20: mol_type = other DNA
aggaatggcccaggatgggg

SEQ ID NO: 241100 - DNA, 20 bp, synthetic construct
  source 1..20: mol_type = other DNA
caggaatggcccaggatggg

SEQ ID NO: 241101 - DNA, 20 bp, synthetic construct
  source 1..20: mol_type = other DNA
ccaggaatggcccaggatgg

SEQ ID NO: 241102 - DNA, 20 bp, synthetic construct
  source 1..20: mol_type = other DNA
accaggaatggcccaggatg

SEQ ID NO: 241103 - DNA, 20 bp, synthetic construct
  source 1..20: mol_type = other DNA
aaccaggaatggcccaggat

SEQ ID NO: 241104 - DNA, 20 bp, synthetic construct
  source 1..20: mol_type = other DNA
aaaccaggaatggcccagga

SEQ ID NO: 241105 - DNA, 20 bp, synthetic construct
  source 1..20: mol_type = other DNA
gaaaccaggaatggcccagg

SEQ ID NO: 241106 - DNA, 20 bp, synthetic construct
  source 1..20: mol_type = other DNA
agaaaccaggaatggcccag

SEQ ID NO: 241107 - DNA, 20 bp, synthetic construct
  source 1..20: mol_type = other DNA
gagaaaccaggaatggccca

SEQ ID NO: 241108 - DNA, 20 bp, synthetic construct
  source 1..20: mol_type = other DNA
agagaaaccaggaatggccc

SEQ ID NO: 241109 - DNA, 20 bp, synthetic construct
  source 1..20: mol_type = other DNA
tagagaaaccaggaatggcc

SEQ ID NO: 241110 - DNA, 20 bp, synthetic construct
  source 1..20: mol_type = other DNA
gtagagaaaccaggaatggc

SEQ ID NO: 241111 - DNA, 20 bp, synthetic construct
  source 1..20: mol_type = other DNA
agtagagaaaccaggaatgg

SEQ ID NO: 241112 - DNA, 20 bp, synthetic construct
  source 1..20: mol_type = other DNA
cagtagagaaaccaggaatg

SEQ ID NO: 241113 - DNA, 20 bp, synthetic construct
  source 1..20: mol_type = other DNA
gcagtagagaaaccaggaat

SEQ ID NO: 241114 - DNA, 20 bp, synthetic construct
  source 1..20: mol_type = other DNA
agcagtagagaaaccaggaa

SEQ ID NO: 241115 - DNA, 20 bp, synthetic construct
  source 1..20: mol_type = other DNA
cagcagtagagaaaccagga

SEQ ID NO: 241116 - DNA, 20 bp, synthetic construct
  source 1..20: mol_type = other DNA
acagcagtagagaaaccagg

SEQ ID NO: 241117 - DNA, 20 bp, synthetic construct
  source 1..20: mol_type = other DNA
aacagcagtagagaaaccag

SEQ ID NO: 241118 - DNA, 20 bp, synthetic construct
  source 1..20: mol_type = other DNA
caacagcagtagagaaacca

SEQ ID NO: 241119 - DNA, 20 bp, synthetic construct
  source 1..20: mol_type = other DNA
ccaacagcagtagagaaacc

SEQ ID NO: 241120 - DNA, 20 bp, synthetic construct
  source 1..20: mol_type = other DNA
accaacagcagtagagaaac

SEQ ID NO: 241121 - DNA, 20 bp, synthetic construct
  source 1..20: mol_type = other DNA
caccaacagcagtagagaaa

SEQ ID NO: 241122 - DNA, 20 bp, synthetic construct
  source 1..20: mol_type = other DNA
tcaccaacagcagtagagaa

SEQ ID NO: 241123 - DNA, 20 bp, synthetic construct
  source 1..20: mol_type = other DNA
atcaccaacagcagtagaga

SEQ ID NO: 241124 - DNA, 20 bp, synthetic construct
  source 1..20: mol_type = other DNA
tatcaccaacagcagtagag

SEQ ID NO: 241125 - DNA, 20 bp, synthetic construct
  source 1..20: mol_type = other DNA
gtatcaccaacagcagtaga

SEQ ID NO: 241126 - DNA, 20 bp, synthetic construct
  source 1..20: mol_type = other DNA
ggtatcaccaacagcagtag

SEQ ID NO: 241127 - DNA, 20 bp, synthetic construct
  source 1..20: mol_type = other DNA
tggtatcaccaacagcagta

SEQ ID NO: 241128 - DNA, 20 bp, synthetic construct
  source 1..20: mol_type = other DNA
gtggtatcaccaacagcagt

SEQ ID NO: 241129 - DNA, 20 bp, synthetic construct
  source 1..20: mol_type = other DNA
ggtggtatcaccaacagcag

SEQ ID NO: 241130 - DNA, 20 bp, synthetic construct
  source 1..20: mol_type = other DNA
tggtggtatcaccaacagca

SEQ ID NO: 241131 - DNA, 20 bp, synthetic construct
  source 1..20: mol_type = other DNA
atggtggtatcaccaacagc

SEQ ID NO: 241132 - DNA, 20 bp, synthetic construct
  source 1..20: mol_type = other DNA
gatggtggtatcaccaacag

SEQ ID NO: 241133 - DNA, 20 bp, synthetic construct
  source 1..20: mol_type = other DNA
tgatggtggtatcaccaaca

SEQ ID NO: 241134 - DNA, 20 bp, synthetic construct
  source 1..20: mol_type = other DNA
ctgatggtggtatcaccaac

SEQ ID NO: 241135 - DNA, 20 bp, synthetic construct
  source 1..20: mol_type = other DNA
gctgatggtggtatcaccaa

SEQ ID NO: 241136 - DNA, 20 bp, synthetic construct
  source 1..20: mol_type = other DNA
agctgatggtggtatcacca

SEQ ID NO: 241137 - DNA, 20 bp, synthetic construct
  source 1..20: mol_type = other DNA
aagctgatggtggtatcacc

SEQ ID NO: 241138 - DNA, 20 bp, synthetic construct
  source 1..20: mol_type = other DNA
caagctgatggtggtatcac

SEQ ID NO: 241139 - DNA, 20 bp, synthetic construct
  source 1..20: mol_type = other DNA
acaagctgatggtggtatca

SEQ ID NO: 241140 - DNA, 20 bp, synthetic construct
  source 1..20: mol_type = other DNA
gacaagctgatggtggtatc

SEQ ID NO: 241141 - DNA, 20 bp, synthetic construct
  source 1..20: mol_type = other DNA
ggacaagctgatggtggtat

SEQ ID NO: 241142 - DNA, 20 bp, synthetic construct
  source 1..20: mol_type = other DNA
tggacaagctgatggtggta

SEQ ID NO: 241143 - DNA, 20 bp, synthetic construct
  source 1..20: mol_type = other DNA
atggacaagctgatggtggt

SEQ ID NO: 241144 - DNA, 20 bp, synthetic construct
  source 1..20: mol_type = other DNA
gatggacaagctgatggtgg

SEQ ID NO: 241145 - DNA, 20 bp, synthetic construct
  source 1..20: mol_type = other DNA
tgatggacaagctgatggtg

SEQ ID NO: 241146 - DNA, 20 bp, synthetic construct
  source 1..20: mol_type = other DNA
atgatggacaagctgatggt

SEQ ID NO: 241147 - DNA, 20 bp, synthetic construct
  source 1..20: mol_type = other DNA
catgatggacaagctgatgg

SEQ ID NO: 241148 - DNA, 20 bp, synthetic construct
  source 1..20: mol_type = other DNA
tcatgatggacaagctgatg

SEQ ID NO: 241149 - DNA, 20 bp, synthetic construct
  source 1..20: mol_type = other DNA
gtcatgatggacaagctgat

SEQ ID NO: 241150 - DNA, 20 bp, synthetic construct
  source 1..20: mol_type = other DNA
ggtcatgatggacaagctga

SEQ ID NO: 241151 - DNA, 20 bp, synthetic construct
  source 1..20: mol_type = other DNA
gggtcatgatggacaagctg

SEQ ID NO: 241152 - DNA, 20 bp, synthetic construct
  source 1..20: mol_type = other DNA
agggtcatgatggacaagct

SEQ ID NO: 241153 - DNA, 20 bp, synthetic construct
  source 1..20: mol_type = other DNA
cagggtcatgatggacaagc

SEQ ID NO: 241154 - DNA, 20 bp, synthetic construct
  source 1..20: mol_type = other DNA
ccagggtcatgatggacaag

SEQ ID NO: 241155 - DNA, 20 bp, synthetic construct
  source 1..20: mol_type = other DNA
gccagggtcatgatggacaa

SEQ ID NO: 241156 - DNA, 20 bp, synthetic construct
  source 1..20: mol_type = other DNA
ggccagggtcatgatggaca

SEQ ID NO: 241157 - DNA, 20 bp, synthetic construct
  source 1..20: mol_type = other DNA
tggccagggtcatgatggac

SEQ ID NO: 241158 - DNA, 20 bp, synthetic construct
  source 1..20: mol_type = other DNA
ctggccagggtcatgatgga

SEQ ID NO: 241159 - DNA, 20 bp, synthetic construct
  source 1..20: mol_type = other DNA
actggccagggtcatgatgg

SEQ ID NO: 241160 - DNA, 20 bp, synthetic construct
  source 1..20: mol_type = other DNA
aactggccagggtcatgatg

SEQ ID NO: 241161 - DNA, 20 bp, synthetic construct
  source 1..20: mol_type = other DNA
gaactggccagggtcatgat

SEQ ID NO: 241162 - DNA, 20 bp, synthetic construct
  source 1..20: mol_type = other DNA
ggaactggccagggtcatga

SEQ ID NO: 241163 - DNA, 20 bp, synthetic construct
  source 1..20: mol_type = other DNA
aggaactggccagggtcatg

SEQ ID NO: 241164 - DNA, 20 bp, synthetic construct
  source 1..20: mol_type = other DNA
gaggaactggccagggtcat

SEQ ID NO: 241165 - DNA, 20 bp, synthetic construct
  source 1..20: mol_type = other DNA
ggaggaactggccagggtca

SEQ ID NO: 241166 - DNA, 20 bp, synthetic construct
  source 1..20: mol_type = other DNA
gggaggaactggccagggtc

SEQ ID NO: 241167 - DNA, 20 bp, synthetic construct
  source 1..20: mol_type = other DNA
tgggaggaactggccagggt

SEQ ID NO: 241168 - DNA, 20 bp, synthetic construct
  source 1..20: mol_type = other DNA
gtgggaggaactggccaggg

SEQ ID NO: 241169 - DNA, 20 bp, synthetic construct
  source 1..20: mol_type = other DNA
tgtgggaggaactggccagg

SEQ ID NO: 241170 - DNA, 20 bp, synthetic construct
  source 1..20: mol_type = other DNA
ttgtgggaggaactggccag

SEQ ID NO: 241171 - DNA, 20 bp, synthetic construct
  source 1..20: mol_type = other DNA
gttgtgggaggaactggcca

SEQ ID NO: 241172 - DNA, 20 bp, synthetic construct
  source 1..20: mol_type = other DNA
ggttgtgggaggaactggcc

SEQ ID NO: 241173 - DNA, 20 bp, synthetic construct
  source 1..20: mol_type = other DNA
gggttgtgggaggaactggc

SEQ ID NO: 241174 - DNA, 20 bp, synthetic construct
  source 1..20: mol_type = other DNA
agggttgtgggaggaactgg

SEQ ID NO: 241175 - DNA, 20 bp, synthetic construct
  source 1..20: mol_type = other DNA
gagggttgtgggaggaactg

SEQ ID NO: 241176 - DNA, 20 bp, synthetic construct
  source 1..20: mol_type = other DNA
ggagggttgtgggaggaact

SEQ ID NO: 241177 - DNA, 20 bp, synthetic construct
  source 1..20: mol_type = other DNA
tggagggttgtgggaggaac

SEQ ID NO: 241178 - DNA, 20 bp, synthetic construct
  source 1..20: mol_type = other DNA
gtggagggttgtgggaggaa

SEQ ID NO: 241179 - DNA, 20 bp, synthetic construct
  source 1..20: mol_type = other DNA
tgtggagggttgtgggagga

SEQ ID NO: 241180 - DNA, 20 bp, synthetic construct
  source 1..20: mol_type = other DNA
ctgtggagggttgtgggagg

SEQ ID NO: 241181 - DNA, 20 bp, synthetic construct
  source 1..20: mol_type = other DNA
gctgtggagggttgtgggag

SEQ ID NO: 241182 - DNA, 20 bp, synthetic construct
  source 1..20: mol_type = other DNA
tgctgtggagggttgtggga

SEQ ID NO: 241183 - DNA, 20 bp, synthetic construct
  source 1..20: mol_type = other DNA
gtgctgtggagggttgtggg

SEQ ID NO: 241184 - DNA, 20 bp, synthetic construct
  source 1..20: mol_type = other DNA
ggtgctgtggagggttgtgg

SEQ ID NO: 241185 - DNA, 20 bp, synthetic construct
  source 1..20: mol_type = other DNA
gggtgctgtggagggttgtg

SEQ ID NO: 241186 - DNA, 20 bp, synthetic construct
  source 1..20: mol_type = other DNA
tgggtgctgtggagggttgt

SEQ ID NO: 241187 - DNA, 20 bp, synthetic construct
  source 1..20: mol_type = other DNA
ctgggtgctgtggagggttg

SEQ ID NO: 241188 - DNA, 20 bp, synthetic construct
  source 1..20: mol_type = other DNA
cctgggtgctgtggagggtt

SEQ ID NO: 241189 - DNA, 20 bp, synthetic construct
  source 1..20: mol_type = other DNA
ccctgggtgctgtggagggt

SEQ ID NO: 241190 - DNA, 20 bp, synthetic construct
  source 1..20: mol_type = other DNA
tccctgggtgctgtggaggg

SEQ ID NO: 241191 - DNA, 20 bp, synthetic construct
  source 1..20: mol_type = other DNA
gtccctgggtgctgtggagg

SEQ ID NO: 241192 - DNA, 20 bp, synthetic construct
  source 1..20: mol_type = other DNA
ggtccctgggtgctgtggag

SEQ ID NO: 241193 - DNA, 20 bp, synthetic construct
  source 1..20: mol_type = other DNA
aggtccctgggtgctgtgga

SEQ ID NO: 241194 - DNA, 20 bp, synthetic construct
  source 1..20: mol_type = other DNA
gaggtccctgggtgctgtgg

SEQ ID NO: 241195 - DNA, 20 bp, synthetic construct
  source 1..20: mol_type = other DNA
tgaggtccctgggtgctgtg

SEQ ID NO: 241196 - DNA, 20 bp, synthetic construct
  source 1..20: mol_type = other DNA
gtgaggtccctgggtgctgt

SEQ ID NO: 241197 - DNA, 20 bp, synthetic construct
  source 1..20: mol_type = other DNA
ggtgaggtccctgggtgctg

SEQ ID NO: 241198 - DNA, 20 bp, synthetic construct
  source 1..20: mol_type = other DNA
aggtgaggtccctgggtgct

SEQ ID NO: 241199 - DNA, 20 bp, synthetic construct
  source 1..20: mol_type = other DNA
gaggtgaggtccctgggtgc

SEQ ID NO: 241200 - DNA, 20 bp, synthetic construct
  source 1..20: mol_type = other DNA
ggaggtgaggtccctgggtg

SEQ ID NO: 241201 - DNA, 20 bp, synthetic construct
  source 1..20: mol_type = other DNA
tggaggtgaggtccctgggt

SEQ ID NO: 241202 - DNA, 20 bp, synthetic construct
  source 1..20: mol_type = other DNA
atggaggtgaggtccctggg

SEQ ID NO: 241203 - DNA, 20 bp, synthetic construct
  source 1..20: mol_type = other DNA
aatggaggtgaggtccctgg

SEQ ID NO: 241204 - DNA, 20 bp, synthetic construct
  source 1..20: mol_type = other DNA
gaatggaggtgaggtccctg

SEQ ID NO: 241205 - DNA, 20 bp, synthetic construct
  source 1..20: mol_type = other DNA
ggaatggaggtgaggtccct

SEQ ID NO: 241206 - DNA, 20 bp, synthetic construct
  source 1..20: mol_type = other DNA
tggaatggaggtgaggtccc

SEQ ID NO: 241207 - DNA, 20 bp, synthetic construct
  source 1..20: mol_type = other DNA
atggaatggaggtgaggtcc

SEQ ID NO: 241208 - DNA, 20 bp, synthetic construct
  source 1..20: mol_type = other DNA
gatggaatggaggtgaggtc

SEQ ID NO: 241209 - DNA, 20 bp, synthetic construct
  source 1..20: mol_type = other DNA
ggatggaatggaggtgaggt

SEQ ID NO: 241210 - DNA, 20 bp, synthetic construct
  source 1..20: mol_type = other DNA
cggatggaatggaggtgagg

SEQ ID NO: 241211 - DNA, 20 bp, synthetic construct
  source 1..20: mol_type = other DNA
tcggatggaatggaggtgag

SEQ ID NO: 241212 - DNA, 20 bp, synthetic construct
  source 1..20: mol_type = other DNA
gtcggatggaatggaggtga

SEQ ID NO: 241213 - DNA, 20 bp, synthetic construct
  source 1..20: mol_type = other DNA
tgtcggatggaatggaggtg

SEQ ID NO: 241214 - DNA, 20 bp, synthetic construct
  source 1..20: mol_type = other DNA
gtgtcggatggaatggaggt

SEQ ID NO: 241215 - DNA, 20 bp, synthetic construct
  source 1..20: mol_type = other DNA
tgtgtcggatggaatggagg

SEQ ID NO: 241216 - DNA, 20 bp, synthetic construct
  source 1..20: mol_type = other DNA
ctgtgtcggatggaatggag

SEQ ID NO: 241217 - DNA, 20 bp, synthetic construct
  source 1..20: mol_type = other DNA
tctgtgtcggatggaatgga

SEQ ID NO: 241218 - DNA, 20 bp, synthetic construct
  source 1..20: mol_type = other DNA
atctgtgtcggatggaatgg

SEQ ID NO: 241219 - DNA, 20 bp, synthetic construct
  source 1..20: mol_type = other DNA
gatctgtgtcggatggaatg

SEQ ID NO: 241220 - DNA, 20 bp, synthetic construct
  source 1..20: mol_type = other DNA
agatctgtgtcggatggaat

SEQ ID NO: 241221 - DNA, 20 bp, synthetic construct
  source 1..20: mol_type = other DNA
gagatctgtgtcggatggaa

SEQ ID NO: 241222 - DNA, 20 bp, synthetic construct
  source 1..20: mol_type = other DNA
ggagatctgtgtcggatgga

SEQ ID NO: 241223 - DNA, 20 bp, synthetic construct
  source 1..20: mol_type = other DNA
aggagatctgtgtcggatgg

SEQ ID NO: 241224 - DNA, 20 bp, synthetic construct
  source 1..20: mol_type = other DNA
gaggagatctgtgtcggatg

SEQ ID NO: 241225 - DNA, 20 bp, synthetic construct
  source 1..20: mol_type = other DNA
tgaggagatctgtgtcggat

SEQ ID NO: 241226 - DNA, 20 bp, synthetic construct
  source 1..20: mol_type = other DNA
gtgaggagatctgtgtcgga

SEQ ID NO: 241227 - DNA, 20 bp, synthetic construct
  source 1..20: mol_type = other DNA
ggtgaggagatctgtgtcgg

SEQ ID NO: 241228 - DNA, 20 bp, synthetic construct
  source 1..20: mol_type = other DNA
tggtgaggagatctgtgtcg

SEQ ID NO: 241229 - DNA, 20 bp, synthetic construct
  source 1..20: mol_type = other DNA
gtggtgaggagatctgtgtc

SEQ ID NO: 241230 - DNA, 20 bp, synthetic construct
  source 1..20: mol_type = other DNA
tgtggtgaggagatctgtgt

SEQ ID NO: 241231 - DNA, 20 bp, synthetic construct
  source 1..20: mol_type = other DNA
ttgtggtgaggagatctgtg

SEQ ID NO: 241232 - DNA, 20 bp, synthetic construct
  source 1..20: mol_type = other DNA
tttgtggtgaggagatctgt

SEQ ID NO: 241233 - DNA, 20 bp, synthetic construct
  source 1..20: mol_type = other DNA
gtttgtggtgaggagatctg

SEQ ID NO: 241234 - DNA, 20 bp, synthetic construct
  source 1..20: mol_type = other DNA
ggtttgtggtgaggagatct

SEQ ID NO: 241235 - DNA, 20 bp, synthetic construct
  source 1..20: mol_type = other DNA
aggtttgtggtgaggagatc

SEQ ID NO: 241236 - DNA, 20 bp, synthetic construct
  source 1..20: mol_type = other DNA
aaggtttgtggtgaggagat

SEQ ID NO: 241237 - DNA, 20 bp, synthetic construct
  source 1..20: mol_type = other DNA
caaggtttgtggtgaggaga

SEQ ID NO: 241238 - DNA, 20 bp, synthetic construct
  source 1..20: mol_type = other DNA
ccaaggtttgtggtgaggag

SEQ ID NO: 241239 - DNA, 20 bp, synthetic construct
  source 1..20: mol_type = other DNA
accaaggtttgtggtgagga

SEQ ID NO: 241240 - DNA, 20 bp, synthetic construct
  source 1..20: mol_type = other DNA
aaccaaggtttgtggtgagg

SEQ ID NO: 241241 - DNA, 20 bp, synthetic construct
  source 1..20: mol_type = other DNA
aaaccaaggtttgtggtgag

SEQ ID NO: 241242 - DNA, 20 bp, synthetic construct
  source 1..20: mol_type = other DNA
aaaaccaaggtttgtggtga

SEQ ID NO: 241243 - DNA, 20 bp, synthetic construct
  source 1..20: mol_type = other DNA
caaaaccaaggtttgtggtg

SEQ ID NO: 241244 - DNA, 20 bp, synthetic construct
  source 1..20: mol_type = other DNA
gcaaaaccaaggtttgtggt

SEQ ID NO: 241245 - DNA, 20 bp, synthetic construct
  source 1..20: mol_type = other DNA
tgcaaaaccaaggtttgtgg

SEQ ID NO: 241246 - DNA, 20 bp, synthetic construct
  source 1..20: mol_type = other DNA
ttgcaaaaccaaggtttgtg

SEQ ID NO: 241247 - DNA, 20 bp, synthetic construct
  source 1..20: mol_type = other DNA
gttgcaaaaccaaggtttgt

SEQ ID NO: 241248 - DNA, 20 bp, synthetic construct
  source 1..20: mol_type = other DNA
tgttgcaaaaccaaggtttg

SEQ ID NO: 241249 - DNA, 20 bp, synthetic construct
  source 1..20: mol_type = other DNA
ctgttgcaaaaccaaggttt

SEQ ID NO: 241250 - DNA, 20 bp, synthetic construct
  source 1..20: mol_type = other DNA
gctgttgcaaaaccaaggtt

SEQ ID NO: 241251 - DNA, 20 bp, synthetic construct
  source 1..20: mol_type = other DNA
tgctgttgcaaaaccaaggt

SEQ ID NO: 241252 - DNA, 20 bp, synthetic construct
  source 1..20: mol_type = other DNA
ctgctgttgcaaaaccaagg

SEQ ID NO: 241253 - DNA, 20 bp, synthetic construct
  source 1..20: mol_type = other DNA
gctgctgttgcaaaaccaag

SEQ ID NO: 241254 - DNA, 20 bp, synthetic construct
  source 1..20: mol_type = other DNA
ggctgctgttgcaaaaccaa

SEQ ID NO: 241255 - DNA, 20 bp, synthetic construct
  source 1..20: mol_type = other DNA
tggctgctgttgcaaaacca

SEQ ID NO: 241256 - DNA, 20 bp, synthetic construct
  source 1..20: mol_type = other DNA
atggctgctgttgcaaaacc

SEQ ID NO: 241257 - DNA, 20 bp, synthetic construct
  source 1..20: mol_type = other DNA
catggctgctgttgcaaaac

SEQ ID NO: 241258 - DNA, 20 bp, synthetic construct
  source 1..20: mol_type = other DNA
tcatggctgctgttgcaaaa

SEQ ID NO: 241259 - DNA, 20 bp, synthetic construct
  source 1..20: mol_type = other DNA
ctcatggctgctgttgcaaa

SEQ ID NO: 241260 - DNA, 20 bp, synthetic construct
  source 1..20: mol_type = other DNA
tctcatggctgctgttgcaa

SEQ ID NO: 241261 - DNA, 20 bp, synthetic construct
  source 1..20: mol_type = other DNA
gtctcatggctgctgttgca

SEQ ID NO: 241262 - DNA, 20 bp, synthetic construct
  source 1..20: mol_type = other DNA
ggtctcatggctgctgttgc

SEQ ID NO: 241263 - DNA, 20 bp, synthetic construct
  source 1..20: mol_type = other DNA
aggtctcatggctgctgttg

SEQ ID NO: 241264 - DNA, 20 bp, synthetic construct
  source 1..20: mol_type = other DNA
aaggtctcatggctgctgtt

SEQ ID NO: 241265 - DNA, 20 bp, synthetic construct
  source 1..20: mol_type = other DNA
aaaggtctcatggctgctgt

SEQ ID NO: 241266 - DNA, 20 bp, synthetic construct
  source 1..20: mol_type = other DNA
taaaggtctcatggctgctg

SEQ ID NO: 241267 - DNA, 20 bp, synthetic construct
  source 1..20: mol_type = other DNA
gtaaaggtctcatggctgct

SEQ ID NO: 241268 - DNA, 20 bp, synthetic construct
  source 1..20: mol_type = other DNA
tgtaaaggtctcatggctgc

SEQ ID NO: 241269 - DNA, 20 bp, synthetic construct
  source 1..20: mol_type = other DNA
gtgtaaaggtctcatggctg

SEQ ID NO: 241270 - DNA, 20 bp, synthetic construct
  source 1..20: mol_type = other DNA
ggtgtaaaggtctcatggct

SEQ ID NO: 241271 - DNA, 20 bp, synthetic construct
  source 1..20: mol_type = other DNA
gggtgtaaaggtctcatggc

SEQ ID NO: 241272 - DNA, 20 bp, synthetic construct
  source 1..20: mol_type = other DNA
agggtgtaaaggtctcatgg

SEQ ID NO: 241273 - DNA, 20 bp, synthetic construct
  source 1..20: mol_type = other DNA
gagggtgtaaaggtctcatg

SEQ ID NO: 241274 - DNA, 20 bp, synthetic construct
  source 1..20: mol_type = other DNA
ggagggtgtaaaggtctcat

SEQ ID NO: 241275 - DNA, 20 bp, synthetic construct
  source 1..20: mol_type = other DNA
cggagggtgtaaaggtctca

SEQ ID NO: 241276 - DNA, 20 bp, synthetic construct
  source 1..20: mol_type = other DNA
gcggagggtgtaaaggtctc

SEQ ID NO: 241277 - DNA, 20 bp, synthetic construct
  source 1..20: mol_type = other DNA
ggcggagggtgtaaaggtct

SEQ ID NO: 241278 - DNA, 20 bp, synthetic construct
  source 1..20: mol_type = other DNA
gggcggagggtgtaaaggtc

SEQ ID NO: 241279 - DNA, 20 bp, synthetic construct
  source 1..20: mol_type = other DNA
agggcggagggtgtaaaggt

SEQ ID NO: 241280 - DNA, 20 bp, synthetic construct
  source 1..20: mol_type = other DNA
aagggcggagggtgtaaagg

SEQ ID NO: 241281 - DNA, 20 bp, synthetic construct
  source 1..20: mol_type = other DNA
gaagggcggagggtgtaaag

SEQ ID NO: 241282 - DNA, 20 bp, synthetic construct
  source 1..20: mol_type = other DNA
tgaagggcggagggtgtaaa

SEQ ID NO: 241283 - DNA, 20 bp, synthetic construct
  source 1..20: mol_type = other DNA
atgaagggcggagggtgtaa

SEQ ID NO: 241284 - DNA, 20 bp, synthetic construct
  source 1..20: mol_type = other DNA
gatgaagggcggagggtgta

SEQ ID NO: 241285 - DNA, 20 bp, synthetic construct
  source 1..20: mol_type = other DNA
ggatgaagggcggagggtgt

SEQ ID NO: 241286 - DNA, 20 bp, synthetic construct
  source 1..20: mol_type = other DNA
aggatgaagggcggagggtg

SEQ ID NO: 241287 - DNA, 20 bp, synthetic construct
  source 1..20: mol_type = other DNA
caggatgaagggcggagggt

SEQ ID NO: 241288 - DNA, 20 bp, synthetic construct
  source 1..20: mol_type = other DNA
acaggatgaagggcggaggg

SEQ ID NO: 241289 - DNA, 20 bp, synthetic construct
  source 1..20: mol_type = other DNA
gacaggatgaagggcggagg

SEQ ID NO: 241290 - DNA, 20 bp, synthetic construct
  source 1..20: mol_type = other DNA
ggacaggatgaagggcggag

SEQ ID NO: 241291 - DNA, 20 bp, synthetic construct
  source 1..20: mol_type = other DNA
gggacaggatgaagggcgga

SEQ ID NO: 241292 - DNA, 20 bp, synthetic construct
  source 1..20: mol_type = other DNA
ggggacaggatgaagggcgg

SEQ ID NO: 241293 - DNA, 20 bp, synthetic construct
  source 1..20: mol_type = other DNA
gggggacaggatgaagggcg

SEQ ID NO: 241294 - DNA, 20 bp, synthetic construct
  source 1..20: mol_type = other DNA
tgggggacaggatgaagggc

SEQ ID NO: 241295 - DNA, 20 bp, synthetic construct
  source 1..20: mol_type = other DNA
gtgggggacaggatgaaggg

SEQ ID NO: 241296 - DNA, 20 bp, synthetic construct
  source 1..20: mol_type = other DNA
agtgggggacaggatgaagg

SEQ ID NO: 241297 - DNA, 20 bp, synthetic construct
  source 1..20: mol_type = other DNA
cagtgggggacaggatgaag

SEQ ID NO: 241298 - DNA, 20 bp, synthetic construct
  source 1..20: mol_type = other DNA
tcagtgggggacaggatgaa

SEQ ID NO: 241299 - DNA, 20 bp, synthetic construct
  source 1..20: mol_type = other DNA
ctcagtgggggacaggatga

SEQ ID NO: 241300 - DNA, 20 bp, synthetic construct
  source 1..20: mol_type = other DNA
cctcagtgggggacaggatg

SEQ ID NO: 241301 - DNA, 20 bp, synthetic construct
  source 1..20: mol_type = other DNA
gcctcagtgggggacaggat

SEQ ID NO: 241302 - DNA, 20 bp, synthetic construct
  source 1..20: mol_type = other DNA
ggcctcagtgggggacagga

SEQ ID NO: 241303 - DNA, 20 bp, synthetic construct
  source 1..20: mol_type = other DNA
gggcctcagtgggggacagg

SEQ ID NO: 241304 - DNA, 20 bp, synthetic construct
  source 1..20: mol_type = other DNA
ggggcctcagtgggggacag

SEQ ID NO: 241305 - DNA, 20 bp, synthetic construct
  source 1..20: mol_type = other DNA
tggggcctcagtgggggaca

SEQ ID NO: 241306 - DNA, 20 bp, synthetic construct
  source 1..20: mol_type = other DNA
ctggggcctcagtgggggac

SEQ ID NO: 241307 - DNA, 20 bp, synthetic construct
  source 1..20: mol_type = other DNA
tctggggcctcagtggggga

SEQ ID NO: 241308 - DNA, 20 bp, synthetic construct
  source 1..20: mol_type = other DNA
ctctggggcctcagtggggg

SEQ ID NO: 241309 - DNA, 20 bp, synthetic construct
  source 1..20: mol_type = other DNA
gctctggggcctcagtgggg

SEQ ID NO: 241310 - DNA, 20 bp, synthetic construct
  source 1..20: mol_type = other DNA
ggctctggggcctcagtggg

SEQ ID NO: 241311 - DNA, 20 bp, synthetic construct
  source 1..20: mol_type = other DNA
tggctctggggcctcagtgg

SEQ ID NO: 241312 - DNA, 20 bp, synthetic construct
  source 1..20: mol_type = other DNA
atggctctggggcctcagtg

SEQ ID NO: 241313 - DNA, 20 bp, synthetic construct
  source 1..20: mol_type = other DNA
aatggctctggggcctcagt

SEQ ID NO: 241314 - DNA, 20 bp, synthetic construct
  source 1..20: mol_type = other DNA
gaatggctctggggcctcag

SEQ ID NO: 241315 - DNA, 20 bp, synthetic construct
  source 1..20: mol_type = other DNA
ggaatggctctggggcctca

SEQ ID NO: 241316 - DNA, 20 bp, synthetic construct
  source 1..20: mol_type = other DNA
aggaatggctctggggcctc

SEQ ID NO: 241317 - DNA, 20 bp, synthetic construct
  source 1..20: mol_type = other DNA
aaggaatggctctggggcct

SEQ ID NO: 241318 - DNA, 20 bp, synthetic construct
  source 1..20: mol_type = other DNA
taaggaatggctctggggcc

SEQ ID NO: 241319 - DNA, 20 bp, synthetic construct
  source 1..20: mol_type = other DNA
ttaaggaatggctctggggc

SEQ ID NO: 241320 - DNA, 20 bp, synthetic construct
  source 1..20: mol_type = other DNA
tttaaggaatggctctgggg

SEQ ID NO: 241321 - DNA, 20 bp, synthetic construct
  source 1..20: mol_type = other DNA
ctttaaggaatggctctggg

SEQ ID NO: 241322 - DNA, 20 bp, synthetic construct
  source 1..20: mol_type = other DNA
gctttaaggaatggctctgg

SEQ ID NO: 241323 - DNA, 20 bp, synthetic construct
  source 1..20: mol_type = other DNA
tgctttaaggaatggctctg

SEQ ID NO: 241324 - DNA, 20 bp, synthetic construct
  source 1..20: mol_type = other DNA
ctgctttaaggaatggctct

SEQ ID NO: 241325 - DNA, 20 bp, synthetic construct
  source 1..20: mol_type = other DNA
gctgctttaaggaatggctc

SEQ ID NO: 241326 - DNA, 20 bp, synthetic construct
  source 1..20: mol_type = other DNA
cgctgctttaaggaatggct

SEQ ID NO: 241327 - DNA, 20 bp, synthetic construct
  source 1..20: mol_type = other DNA
gcgctgctttaaggaatggc

SEQ ID NO: 241328 - DNA, 20 bp, synthetic construct
  source 1..20: mol_type = other DNA
cgcgctgctttaaggaatgg

SEQ ID NO: 241329 - DNA, 20 bp, synthetic construct
  source 1..20: mol_type = other DNA
gcgcgctgctttaaggaatg

SEQ ID NO: 241330 - DNA, 20 bp, synthetic construct
  source 1..20: mol_type = other DNA
ggcgcgctgctttaaggaat

SEQ ID NO: 241331 - DNA, 20 bp, synthetic construct
  source 1..20: mol_type = other DNA
tggcgcgctgctttaaggaa

SEQ ID NO: 241332 - DNA, 20 bp, synthetic construct
  source 1..20: mol_type = other DNA
gtggcgcgctgctttaagga

SEQ ID NO: 241333 - DNA, 20 bp, synthetic construct
  source 1..20: mol_type = other DNA
tgtggcgcgctgctttaagg

SEQ ID NO: 241334 - DNA, 20 bp, synthetic construct
  source 1..20: mol_type = other DNA
ttgtggcgcgctgctttaag

SEQ ID NO: 241335 - DNA, 20 bp, synthetic construct
  source 1..20: mol_type = other DNA
tttgtggcgcgctgctttaa

SEQ ID NO: 241336 - DNA, 20 bp, synthetic construct
  source 1..20: mol_type = other DNA
gtttgtggcgcgctgcttta

SEQ ID NO: 241337 - DNA, 20 bp, synthetic construct
  source 1..20: mol_type = other DNA
agtttgtggcgcgctgcttt

SEQ ID NO: 241338 - DNA, 20 bp, synthetic construct
  source 1..20: mol_type = other DNA
tagtttgtggcgcgctgctt

SEQ ID NO: 241339 - DNA, 20 bp, synthetic construct
  source 1..20: mol_type = other DNA
atagtttgtggcgcgctgct

SEQ ID NO: 241340 - DNA, 20 bp, synthetic construct
  source 1..20: mol_type = other DNA
tatagtttgtggcgcgctgc

SEQ ID NO: 241341 - DNA, 20 bp, synthetic construct
  source 1..20: mol_type = other DNA
ttatagtttgtggcgcgctg

SEQ ID NO: 241342 - DNA, 20 bp, synthetic construct
  source 1..20: mol_type = other DNA
gttatagtttgtggcgcgct

SEQ ID NO: 241343 - DNA, 20 bp, synthetic construct
  source 1..20: mol_type = other DNA
ggttatagtttgtggcgcgc

SEQ ID NO: 241344 - DNA, 20 bp, synthetic construct
  source 1..20: mol_type = other DNA
gggttatagtttgtggcgcg

SEQ ID NO: 241345 - DNA, 20 bp, synthetic construct
  source 1..20: mol_type = other DNA
tgggttatagtttgtggcgc

SEQ ID NO: 241346 - DNA, 20 bp, synthetic construct
  source 1..20: mol_type = other DNA
gtgggttatagtttgtggcg

SEQ ID NO: 241347 - DNA, 20 bp, synthetic construct
  source 1..20: mol_type = other DNA
tgtgggttatagtttgtggc

SEQ ID NO: 241348 - DNA, 20 bp, synthetic construct
  source 1..20: mol_type = other DNA
ttgtgggttatagtttgtgg

SEQ ID NO: 241349 - DNA, 20 bp, synthetic construct
  source 1..20: mol_type = other DNA
cttgtgggttatagtttgtg

SEQ ID NO: 241350 - DNA, 20 bp, synthetic construct
  source 1..20: mol_type = other DNA
gcttgtgggttatagtttgt

SEQ ID NO: 241351 - DNA, 20 bp, synthetic construct
  source 1..20: mol_type = other DNA
ggcttgtgggttatagtttg

SEQ ID NO: 241352 - DNA, 20 bp, synthetic construct
  source 1..20: mol_type = other DNA
tggcttgtgggttatagttt

SEQ ID NO: 241353 - DNA, 20 bp, synthetic construct
  source 1..20: mol_type = other DNA
ttggcttgtgggttatagtt

SEQ ID NO: 241354 - DNA, 20 bp, synthetic construct
  source 1..20: mol_type = other DNA
attggcttgtgggttatagt

SEQ ID NO: 241355 - DNA, 20 bp, synthetic construct
  source 1..20: mol_type = other DNA
aattggcttgtgggttatag

SEQ ID NO: 241356 - DNA, 20 bp, synthetic construct
  source 1..20: mol_type = other DNA
gaattggcttgtgggttata

SEQ ID NO: 241357 - DNA, 20 bp, synthetic construct
  source 1..20: mol_type = other DNA
agaattggcttgtgggttat

SEQ ID NO: 241358 - DNA, 20 bp, synthetic construct
  source 1..20: mol_type = other DNA
cagaattggcttgtgggtta

SEQ ID NO: 241359 - DNA, 20 bp, synthetic construct
  source 1..20: mol_type = other DNA
ccagaattggcttgtgggtt

SEQ ID NO: 241360 - DNA, 20 bp, synthetic construct
  source 1..20: mol_type = other DNA
accagaattggcttgtgggt

SEQ ID NO: 241361 - DNA, 20 bp, synthetic construct
  source 1..20: mol_type = other DNA
taccagaattggcttgtggg

SEQ ID NO: 241362 - DNA, 20 bp, synthetic construct
  source 1..20: mol_type = other DNA
gtaccagaattggcttgtgg

SEQ ID NO: 241363 - DNA, 20 bp, synthetic construct
  source 1..20: mol_type = other DNA
ggtaccagaattggcttgtg

SEQ ID NO: 241364 - DNA, 20 bp, synthetic construct
  source 1..20: mol_type = other DNA
gggtaccagaattggcttgt

SEQ ID NO: 241365 - DNA, 20 bp, synthetic construct
  source 1..20: mol_type = other DNA
tgggtaccagaattggcttg

SEQ ID NO: 241366 - DNA, 20 bp, synthetic construct
  source 1..20: mol_type = other DNA
ctgggtaccagaattggctt

SEQ ID NO: 241367 - DNA, 20 bp, synthetic construct
  source 1..20: mol_type = other DNA
gctgggtaccagaattggct

SEQ ID NO: 241368 - DNA, 20 bp, synthetic construct
  source 1..20: mol_type = other DNA
ggctgggtaccagaattggc

SEQ ID NO: 241369 - DNA, 20 bp, synthetic construct
  source 1..20: mol_type = other DNA
aggctgggtaccagaattgg

SEQ ID NO: 241370 - DNA, 20 bp, synthetic construct
  source 1..20: mol_type = other DNA
caggctgggtaccagaattg

SEQ ID NO: 241371 - DNA, 20 bp, synthetic construct
  source 1..20: mol_type = other DNA
acaggctgggtaccagaatt

SEQ ID NO: 241372 - DNA, 20 bp, synthetic construct
  source 1..20: mol_type = other DNA
aacaggctgggtaccagaat

SEQ ID NO: 241373 - DNA, 20 bp, synthetic construct
  source 1..20: mol_type = other DNA
aaacaggctgggtaccagaa

SEQ ID NO: 241374 - DNA, 20 bp, synthetic construct
  source 1..20: mol_type = other DNA
aaaacaggctgggtaccaga

SEQ ID NO: 241375 - DNA, 20 bp, synthetic construct
  source 1..20: mol_type = other DNA
caaaacaggctgggtaccag

SEQ ID NO: 241376 - DNA, 20 bp, synthetic construct
  source 1..20: mol_type = other DNA
gcaaaacaggctgggtacca

SEQ ID NO: 241377 - DNA, 20 bp, synthetic construct
  source 1..20: mol_type = other DNA
tgcaaaacaggctgggtacc

SEQ ID NO: 241378 - DNA, 20 bp, synthetic construct
  source 1..20: mol_type = other DNA
gtgcaaaacaggctgggtac

SEQ ID NO: 241379 - DNA, 20 bp, synthetic construct
  source 1..20: mol_type = other DNA
tgtgcaaaacaggctgggta

SEQ ID NO: 241380 - DNA, 20 bp, synthetic construct
  source 1..20: mol_type = other DNA
ctgtgcaaaacaggctgggt

SEQ ID NO: 241381 - DNA, 20 bp, synthetic construct
  source 1..20: mol_type = other DNA
gctgtgcaaaacaggctggg

SEQ ID NO: 241382 - DNA, 20 bp, synthetic construct
  source 1..20: mol_type = other DNA
ggctgtgcaaaacaggctgg

SEQ ID NO: 241383 - DNA, 20 bp, synthetic construct
  source 1..20: mol_type = other DNA
tggctgtgcaaaacaggctg

SEQ ID NO: 241384 - DNA, 20 bp, synthetic construct
  source 1..20: mol_type = other DNA
ctggctgtgcaaaacaggct

SEQ ID NO: 241385 - DNA, 20 bp, synthetic construct
  source 1..20: mol_type = other DNA
actggctgtgcaaaacaggc

SEQ ID NO: 241386 - DNA, 20 bp, synthetic construct
  source 1..20: mol_type = other DNA
cactggctgtgcaaaacagg

SEQ ID NO: 241387 - DNA, 20 bp, synthetic construct
  source 1..20: mol_type = other DNA
tcactggctgtgcaaaacag

SEQ ID NO: 241388 - DNA, 20 bp, synthetic construct
  source 1..20: mol_type = other DNA
ttcactggctgtgcaaaaca

SEQ ID NO: 241389 - DNA, 20 bp, synthetic construct
  source 1..20: mol_type = other DNA
gttcactggctgtgcaaaac

SEQ ID NO: 241390 - DNA, 20 bp, synthetic construct
  source 1..20: mol_type = other DNA
agttcactggctgtgcaaaa

SEQ ID NO: 241391 - DNA, 20 bp, synthetic construct
  source 1..20: mol_type = other DNA
cagttcactggctgtgcaaa

SEQ ID NO: 241392 - DNA, 20 bp, synthetic construct
  source 1..20: mol_type = other DNA
tcagttcactggctgtgcaa

SEQ ID NO: 241393 - DNA, 20 bp, synthetic construct
  source 1..20: mol_type = other DNA
gtcagttcactggctgtgca

SEQ ID NO: 241394 - DNA, 20 bp, synthetic construct
  source 1..20: mol_type = other DNA
tgtcagttcactggctgtgc

SEQ ID NO: 241395 - DNA, 20 bp, synthetic construct
  source 1..20: mol_type = other DNA
ttgtcagttcactggctgtg

SEQ ID NO: 241396 - DNA, 20 bp, synthetic construct
  source 1..20: mol_type = other DNA
attgtcagttcactggctgt

SEQ ID NO: 241397 - DNA, 20 bp, synthetic construct
  source 1..20: mol_type = other DNA
cattgtcagttcactggctg

SEQ ID NO: 241398 - DNA, 20 bp, synthetic construct
  source 1..20: mol_type = other DNA
tcattgtcagttcactggct

SEQ ID NO: 241399 - DNA, 20 bp, synthetic construct
  source 1..20: mol_type = other DNA
atcattgtcagttcactggc

SEQ ID NO: 241400 - DNA, 20 bp, synthetic construct
  source 1..20: mol_type = other DNA
gatcattgtcagttcactgg

SEQ ID NO: 241401 - DNA, 20 bp, synthetic construct
  source 1..20: mol_type = other DNA
agatcattgtcagttcactg

SEQ ID NO: 241402 - DNA, 20 bp, synthetic construct
  source 1..20: mol_type = other DNA
aagatcattgtcagttcact

SEQ ID NO: 241403 - DNA, 20 bp, synthetic construct
  source 1..20: mol_type = other DNA
aaagatcattgtcagttcac

SEQ ID NO: 241404 - DNA, 20 bp, synthetic construct
  source 1..20: mol_type = other DNA
aaaagatcattgtcagttca

SEQ ID NO: 241405 - DNA, 20 bp, synthetic construct
  source 1..20: mol_type = other DNA
gaaaagatcattgtcagttc

SEQ ID NO: 241406 - DNA, 20 bp, synthetic construct
  source 1..20: mol_type = other DNA
tgaaaagatcattgtcagtt

SEQ ID NO: 241407 - DNA, 20 bp, synthetic construct
  source 1..20: mol_type = other DNA
atgaaaagatcattgtcagt

SEQ ID NO: 241408 - DNA, 20 bp, synthetic construct
  source 1..20: mol_type = other DNA
tatgaaaagatcattgtcag

SEQ ID NO: 241409 - DNA, 20 bp, synthetic construct
  source 1..20: mol_type = other DNA
gtatgaaaagatcattgtca

SEQ ID NO: 241410 - DNA, 20 bp, synthetic construct
  source 1..20: mol_type = other DNA
tgtatgaaaagatcattgtc

SEQ ID NO: 241411 - DNA, 20 bp, synthetic construct
  source 1..20: mol_type = other DNA
ctgtatgaaaagatcattgt

SEQ ID NO: 241412 - DNA, 20 bp, synthetic construct
  source 1..20: mol_type = other DNA
gctgtatgaaaagatcattg

SEQ ID NO: 241413 - DNA, 20 bp, synthetic construct
  source 1..20: mol_type = other DNA
ggctgtatgaaaagatcatt

SEQ ID NO: 241414 - DNA, 20 bp, synthetic construct
  source 1..20: mol_type = other DNA
tggctgtatgaaaagatcat

SEQ ID NO: 241415 - DNA, 20 bp, synthetic construct
  source 1..20: mol_type = other DNA
ctggctgtatgaaaagatca

SEQ ID NO: 241416 - DNA, 20 bp, synthetic construct
  source 1..20: mol_type = other DNA
tctggctgtatgaaaagatc

SEQ ID NO: 241417 - DNA, 20 bp, synthetic construct
  source 1..20: mol_type = other DNA
ttctggctgtatgaaaagat

SEQ ID NO: 241418 - DNA, 20 bp, synthetic construct
  source 1..20: mol_type = other DNA
tttctggctgtatgaaaaga

SEQ ID NO: 241419 - DNA, 20 bp, synthetic construct
  source 1..20: mol_type = other DNA
ttttctggctgtatgaaaag

SEQ ID NO: 241420 - DNA, 20 bp, synthetic construct
  source 1..20: mol_type = other DNA
tttttctggctgtatgaaaa

SEQ ID NO: 241421 - DNA, 20 bp, synthetic construct
  source 1..20: mol_type = other DNA
gtttttctggctgtatgaaa

SEQ ID NO: 241422 - DNA, 20 bp, synthetic construct
  source 1..20: mol_type = other DNA
tgtttttctggctgtatgaa

SEQ ID NO: 241423 - DNA, 20 bp, synthetic construct
  source 1..20: mol_type = other DNA
ttgtttttctggctgtatga

SEQ ID NO: 241424 - DNA, 20 bp, synthetic construct
  source 1..20: mol_type = other DNA
tttgtttttctggctgtatg

SEQ ID NO: 241425 - DNA, 20 bp, synthetic construct
  source 1..20: mol_type = other DNA
ttttgtttttctggctgtat

SEQ ID NO: 241426 - DNA, 20 bp, synthetic construct
  source 1..20: mol_type = other DNA
gttttgtttttctggctgta

SEQ ID NO: 241427 - DNA, 20 bp, synthetic construct
  source 1..20: mol_type = other DNA
tgttttgtttttctggctgt

SEQ ID NO: 241428 - DNA, 20 bp, synthetic construct
  source 1..20: mol_type = other DNA
ttgttttgtttttctggctg

SEQ ID NO: 241429 - DNA, 20 bp, synthetic construct
  source 1..20: mol_type = other DNA
tttgttttgtttttctggct

SEQ ID NO: 241430 - DNA, 20 bp, synthetic construct
  source 1..20: mol_type = other DNA
ttttgttttgtttttctggc

SEQ ID NO: 241431 - DNA, 20 bp, synthetic construct
  source 1..20: mol_type = other DNA
gttttgttttgtttttctgg

SEQ ID NO: 241432 - DNA, 20 bp, synthetic construct
  source 1..20: mol_type = other DNA
tgttttgttttgtttttctg

SEQ ID NO: 241433 - DNA, 20 bp, synthetic construct
  source 1..20: mol_type = other DNA
ttgttttgttttgtttttct

SEQ ID NO: 241434 - DNA, 20 bp, synthetic construct
  source 1..20: mol_type = other DNA
tttgttttgttttgtttttc

SEQ ID NO: 241435 - DNA, 20 bp, synthetic construct
  source 1..20: mol_type = other DNA
ttttgttttgttttgttttt

SEQ ID NO: 241436 - DNA, 20 bp, synthetic construct
  source 1..20: mol_type = other DNA
tttttgttttgttttgtttt

SEQ ID NO: 241437 - DNA, 20 bp, synthetic construct
  source 1..20: mol_type = other DNA
ttttttgttttgttttgttt

SEQ ID NO: 241438 - DNA, 20 bp, synthetic construct
  source 1..20: mol_type = other DNA
gttttttgttttgttttgtt

SEQ ID NO: 241439 - DNA, 20 bp, synthetic construct
  source 1..20: mol_type = other DNA
tgttttttgttttgttttgt

SEQ ID NO: 241440 - DNA, 20 bp, synthetic construct
  source 1..20: mol_type = other DNA
ttgttttttgttttgttttg

SEQ ID NO: 241441 - DNA, 20 bp, synthetic construct
  source 1..20: mol_type = other DNA
gttgttttttgttttgtttt

SEQ ID NO: 241442 - DNA, 20 bp, synthetic construct
  source 1..20: mol_type = other DNA
tgttgttttttgttttgttt

SEQ ID NO: 241443 - DNA, 20 bp, synthetic construct
  source 1..20: mol_type = other DNA
ttgttgttttttgttttgtt

SEQ ID NO: 241444 - DNA, 20 bp, synthetic construct
  source 1..20: mol_type = other DNA
tttgttgttttttgttttgt

SEQ ID NO: 241445 - DNA, 20 bp, synthetic construct
  source 1..20: mol_type = other DNA
ttttgttgttttttgttttg

SEQ ID NO: 241446 - DNA, 20 bp, synthetic construct
  source 1..20: mol_type = other DNA
tttttgttgttttttgtttt

SEQ ID NO: 241447 - DNA, 20 bp, synthetic construct
  source 1..20: mol_type = other DNA
ttttttgttgttttttgttt

SEQ ID NO: 241448 - DNA, 20 bp, synthetic construct
  source 1..20: mol_type = other DNA
tttttttgttgttttttgtt

SEQ ID NO: 241449 - DNA, 20 bp, synthetic construct
  source 1..20: mol_type = other DNA
ttttttttgttgttttttgt

SEQ ID NO: 241450 - DNA, 20 bp, synthetic construct
  source 1..20: mol_type = other DNA
tttttttttgttgttttttg

SEQ ID NO: 241451 - DNA, 20 bp, synthetic construct
  source 1..20: mol_type = other DNA
gtttttttttgttgtttttt

SEQ ID NO: 241452 - DNA, 20 bp, synthetic construct
  source 1..20: mol_type = other DNA
ggtttttttttgttgttttt

SEQ ID NO: 241453 - DNA, 20 bp, synthetic construct
  source 1..20: mol_type = other DNA
gggtttttttttgttgtttt

SEQ ID NO: 241454 - DNA, 20 bp, synthetic construct
  source 1..20: mol_type = other DNA
ggggtttttttttgttgttt

SEQ ID NO: 241455 - DNA, 20 bp, synthetic construct
  source 1..20: mol_type = other DNA
tggggtttttttttgttgtt

SEQ ID NO: 241456 - DNA, 20 bp, synthetic construct
  source 1..20: mol_type = other DNA
gtggggtttttttttgttgt

SEQ ID NO: 241457 - DNA, 20 bp, synthetic construct
  source 1..20: mol_type = other DNA
ggtggggtttttttttgttg

SEQ ID NO: 241458 - DNA, 20 bp, synthetic construct
  source 1..20: mol_type = other DNA
tggtggggtttttttttgtt

SEQ ID NO: 241459 - DNA, 20 bp, synthetic construct
  source 1..20: mol_type = other DNA
atggtggggtttttttttgt

SEQ ID NO: 241460 - DNA, 20 bp, synthetic construct
  source 1..20: mol_type = other DNA
aatggtggggtttttttttg

SEQ ID NO: 241461 - DNA, 20 bp, synthetic construct
  source 1..20: mol_type = other DNA
gaatggtggggttttttttt

SEQ ID NO: 241462 - DNA, 20 bp, synthetic construct
  source 1..20: mol_type = other DNA
agaatggtggggtttttttt

SEQ ID NO: 241463 - DNA, 20 bp, synthetic construct
  source 1..20: mol_type = other DNA
cagaatggtggggttttttt

SEQ ID NO: 241464 - DNA, 20 bp, synthetic construct
  source 1..20: mol_type = other DNA
tcagaatggtggggtttttt

SEQ ID NO: 241465 - DNA, 20 bp, synthetic construct
  source 1..20: mol_type = other DNA
ctcagaatggtggggttttt

SEQ ID NO: 241466 - DNA, 20 bp, synthetic construct
  source 1..20: mol_type = other DNA
gctcagaatggtggggtttt

SEQ ID NO: 241467 - DNA, 20 bp, synthetic construct
  source 1..20: mol_type = other DNA
tgctcagaatggtggggttt

SEQ ID NO: 241468 - DNA, 20 bp, synthetic construct
  source 1..20: mol_type = other DNA
atgctcagaatggtggggtt

SEQ ID NO: 241469 - DNA, 20 bp, synthetic construct
  source 1..20: mol_type = other DNA
catgctcagaatggtggggt

SEQ ID NO: 241470 - DNA, 20 bp, synthetic construct
  source 1..20: mol_type = other DNA
acatgctcagaatggtgggg

SEQ ID NO: 241471 - DNA, 20 bp, synthetic construct
  source 1..20: mol_type = other DNA
cacatgctcagaatggtggg

SEQ ID NO: 241472 - DNA, 20 bp, synthetic construct
  source 1..20: mol_type = other DNA
tcacatgctcagaatggtgg

SEQ ID NO: 241473 - DNA, 20 bp, synthetic construct
  source 1..20: mol_type = other DNA
gtcacatgctcagaatggtg

SEQ ID NO: 241474 - DNA, 20 bp, synthetic construct
  source 1..20: mol_type = other DNA
agtcacatgctcagaatggt

SEQ ID NO: 241475 - DNA, 20 bp, synthetic construct
  source 1..20: mol_type = other DNA
aagtcacatgctcagaatgg

SEQ ID NO: 241476 - DNA, 20 bp, synthetic construct
  source 1..20: mol_type = other DNA
gaagtcacatgctcagaatg

SEQ ID NO: 241477 - DNA, 20 bp, synthetic construct
  source 1..20: mol_type = other DNA
ggaagtcacatgctcagaat

SEQ ID NO: 241478 - DNA, 20 bp, synthetic construct
  source 1..20: mol_type = other DNA
tggaagtcacatgctcagaa

SEQ ID NO: 241479 - DNA, 20 bp, synthetic construct
  source 1..20: mol_type = other DNA
atggaagtcacatgctcaga

SEQ ID NO: 241480 - DNA, 20 bp, synthetic construct
  source 1..20: mol_type = other DNA
catggaagtcacatgctcag

SEQ ID NO: 241481 - DNA, 20 bp, synthetic construct
  source 1..20: mol_type = other DNA
acatggaagtcacatgctca

SEQ ID NO: 241482 - DNA, 20 bp, synthetic construct
  source 1..20: mol_type = other DNA
aacatggaagtcacatgctc

SEQ ID NO: 241483 - DNA, 20 bp, synthetic construct
  source 1..20: mol_type = other DNA
gaacatggaagtcacatgct

SEQ ID NO: 241484 - DNA, 20 bp, synthetic construct
  source 1..20: mol_type = other DNA
tgaacatggaagtcacatgc

SEQ ID NO: 241485 - DNA, 20 bp, synthetic construct
  source 1..20: mol_type = other DNA
ttgaacatggaagtcacatg

SEQ ID NO: 241486 - DNA, 20 bp, synthetic construct
  source 1..20: mol_type = other DNA
cttgaacatggaagtcacat

SEQ ID NO: 241487 - DNA, 20 bp, synthetic construct
  source 1..20: mol_type = other DNA
tcttgaacatggaagtcaca

SEQ ID NO: 241488 - DNA, 20 bp, synthetic construct
  source 1..20: mol_type = other DNA
atcttgaacatggaagtcac

SEQ ID NO: 241489 - DNA, 20 bp, synthetic construct
  source 1..20: mol_type = other DNA
catcttgaacatggaagtca

SEQ ID NO: 241490 - DNA, 20 bp, synthetic construct
  source 1..20: mol_type = other DNA
acatcttgaacatggaagtc

SEQ ID NO: 241491 - DNA, 20 bp, synthetic construct
  source 1..20: mol_type = other DNA
gacatcttgaacatggaagt

SEQ ID NO: 241492 - DNA, 20 bp, synthetic construct
  source 1..20: mol_type = other DNA
agacatcttgaacatggaag

SEQ ID NO: 241493 - DNA, 20 bp, synthetic construct
  source 1..20: mol_type = other DNA
gagacatcttgaacatggaa

SEQ ID NO: 241494 - DNA, 20 bp, synthetic construct
  source 1..20: mol_type = other DNA
tgagacatcttgaacatgga

SEQ ID NO: 241495 - DNA, 20 bp, synthetic construct
  source 1..20: mol_type = other DNA
atgagacatcttgaacatgg

SEQ ID NO: 241496 - DNA, 20 bp, synthetic construct
  source 1..20: mol_type = other DNA
catgagacatcttgaacatg

SEQ ID NO: 241497 - DNA, 20 bp, synthetic construct
  source 1..20: mol_type = other DNA
acatgagacatcttgaacat

SEQ ID NO: 241498 - DNA, 20 bp, synthetic construct
  source 1..20: mol_type = other DNA
aacatgagacatcttgaaca

SEQ ID NO: 241499 - DNA, 20 bp, synthetic construct
  source 1..20: mol_type = other DNA
gaacatgagacatcttgaac

SEQ ID NO: 241500 - DNA, 20 bp, synthetic construct
  source 1..20: mol_type = other DNA
tgaacatgagacatcttgaa

SEQ ID NO: 241501 - DNA, 20 bp, synthetic construct
  source 1..20: mol_type = other DNA
ctgaacatgagacatcttga

SEQ ID NO: 241502 - DNA, 20 bp, synthetic construct
  source 1..20: mol_type = other DNA
tctgaacatgagacatcttg

SEQ ID NO: 241503 - DNA, 20 bp, synthetic construct
  source 1..20: mol_type = other DNA
ttctgaacatgagacatctt

SEQ ID NO: 241504 - DNA, 20 bp, synthetic construct
  source 1..20: mol_type = other DNA
tttctgaacatgagacatct

SEQ ID NO: 241505 - DNA, 20 bp, synthetic construct
  source 1..20: mol_type = other DNA
ctttctgaacatgagacatc

SEQ ID NO: 241506 - DNA, 20 bp, synthetic construct
  source 1..20: mol_type = other DNA
cctttctgaacatgagacat

SEQ ID NO: 241507 - DNA, 20 bp, synthetic construct
  source 1..20: mol_type = other DNA
gcctttctgaacatgagaca

SEQ ID NO: 241508 - DNA, 20 bp, synthetic construct
  source 1..20: mol_type = other DNA
ggcctttctgaacatgagac

SEQ ID NO: 241509 - DNA, 20 bp, synthetic construct
  source 1..20: mol_type = other DNA
gggcctttctgaacatgaga

SEQ ID NO: 241510 - DNA, 20 bp, synthetic construct
  source 1..20: mol_type = other DNA
ggggcctttctgaacatgag

SEQ ID NO: 241511 - DNA, 20 bp, synthetic construct
  source 1..20: mol_type = other DNA
aggggcctttctgaacatga

SEQ ID NO: 241512 - DNA, 20 bp, synthetic construct
  source 1..20: mol_type = other DNA
caggggcctttctgaacatg

SEQ ID NO: 241513 - DNA, 20 bp, synthetic construct
  source 1..20: mol_type = other DNA
ccaggggcctttctgaacat

SEQ ID NO: 241514 - DNA, 20 bp, synthetic construct
  source 1..20: mol_type = other DNA
tccaggggcctttctgaaca

SEQ ID NO: 241515 - DNA, 20 bp, synthetic construct
  source 1..20: mol_type = other DNA
ttccaggggcctttctgaac

SEQ ID NO: 241516 - DNA, 20 bp, synthetic construct
  source 1..20: mol_type = other DNA
tttccaggggcctttctgaa

SEQ ID NO: 241517 - DNA, 20 bp, synthetic construct
  source 1..20: mol_type = other DNA
ttttccaggggcctttctga

SEQ ID NO: 241518 - DNA, 20 bp, synthetic construct
  source 1..20: mol_type = other DNA
cttttccaggggcctttctg

SEQ ID NO: 241519 - DNA, 20 bp, synthetic construct
  source 1..20: mol_type = other DNA
ccttttccaggggcctttct

SEQ ID NO: 241520 - DNA, 20 bp, synthetic construct
  source 1..20: mol_type = other DNA
tccttttccaggggcctttc

SEQ ID NO: 241521 - DNA, 20 bp, synthetic construct
  source 1..20: mol_type = other DNA
ctccttttccaggggccttt

SEQ ID NO: 241522 - DNA, 20 bp, synthetic construct
  source 1..20: mol_type = other DNA
cctccttttccaggggcctt

SEQ ID NO: 241523 - DNA, 20 bp, synthetic construct
  source 1..20: mol_type = other DNA
tcctccttttccaggggcct

SEQ ID NO: 241524 - DNA, 20 bp, synthetic construct
  source 1..20: mol_type = other DNA
ttcctccttttccaggggcc

SEQ ID NO: 241525 - DNA, 20 bp, synthetic construct
  source 1..20: mol_type = other DNA
cttcctccttttccaggggc

SEQ ID NO: 241526 - DNA, 20 bp, synthetic construct
  source 1..20: mol_type = other DNA
ccttcctccttttccagggg

SEQ ID NO: 241527 - DNA, 20 bp, synthetic construct
  source 1..20: mol_type = other DNA
cccttcctccttttccaggg

SEQ ID NO: 241528 - DNA, 20 bp, synthetic construct
  source 1..20: mol_type = other DNA
ccccttcctccttttccagg

SEQ ID NO: 241529 - DNA, 20 bp, synthetic construct
  source 1..20: mol_type = other DNA
tccccttcctccttttccag

SEQ ID NO: 241530 - DNA, 20 bp, synthetic construct
  source 1..20: mol_type = other DNA
ctccccttcctccttttcca

SEQ ID NO: 241531 - DNA, 20 bp, synthetic construct
  source 1..20: mol_type = other DNA
gctccccttcctccttttcc

SEQ ID NO: 241532 - DNA, 20 bp, synthetic construct
  source 1..20: mol_type = other DNA
agctccccttcctccttttc

SEQ ID NO: 241533 - DNA, 20 bp, synthetic construct
  source 1..20: mol_type = other DNA
cagctccccttcctcctttt

SEQ ID NO: 241534 - DNA, 20 bp, synthetic construct
  source 1..20: mol_type = other DNA
ccagctccccttcctccttt

SEQ ID NO: 241535 - DNA, 20 bp, synthetic construct
  source 1..20: mol_type = other DNA
cccagctccccttcctcctt

SEQ ID NO: 241536 - DNA, 20 bp, synthetic construct
  source 1..20: mol_type = other DNA
gcccagctccccttcctcct

SEQ ID NO: 241537 - DNA, 20 bp, synthetic construct
  source 1..20: mol_type = other DNA
tgcccagctccccttcctcc

SEQ ID NO: 241538 - DNA, 20 bp, synthetic construct
  source 1..20: mol_type = other DNA
gtgcccagctccccttcctc

SEQ ID NO: 241539 - DNA, 20 bp, synthetic construct
  source 1..20: mol_type = other DNA
tgtgcccagctccccttcct

SEQ ID NO: 241540 - DNA, 20 bp, synthetic construct
  source 1..20: mol_type = other DNA
ttgtgcccagctccccttcc

SEQ ID NO: 241541 - DNA, 20 bp, synthetic construct
  source 1..20: mol_type = other DNA
tttgtgcccagctccccttc

SEQ ID NO: 241542 - DNA, 20 bp, synthetic construct
  source 1..20: mol_type = other DNA
ctttgtgcccagctcccctt

SEQ ID NO: 241543 - DNA, 20 bp, synthetic construct
  source 1..20: mol_type = other DNA
cctttgtgcccagctcccct

SEQ ID NO: 241544 - DNA, 20 bp, synthetic construct
  source 1..20: mol_type = other DNA
ccctttgtgcccagctcccc

SEQ ID NO: 241545 - DNA, 20 bp, synthetic construct
  source 1..20: mol_type = other DNA
tccctttgtgcccagctccc

SEQ ID NO: 241546 - DNA, 20 bp, synthetic construct
  source 1..20: mol_type = other DNA
ctccctttgtgcccagctcc

SEQ ID NO: 241547 - DNA, 20 bp, synthetic construct
  source 1..20: mol_type = other DNA
tctccctttgtgcccagctc

SEQ ID NO: 241548 - DNA, 20 bp, synthetic construct
  source 1..20: mol_type = other DNA
gtctccctttgtgcccagct

SEQ ID NO: 241549 - DNA, 20 bp, synthetic construct
  source 1..20: mol_type = other DNA
ggtctccctttgtgcccagc

SEQ ID NO: 241550 - DNA, 20 bp, synthetic construct
  source 1..20: mol_type = other DNA
gggtctccctttgtgcccag

SEQ ID NO: 241551 - DNA, 20 bp, synthetic construct
  source 1..20: mol_type = other DNA
agggtctccctttgtgccca

SEQ ID NO: 241552 - DNA, 20 bp, synthetic construct
  source 1..20: mol_type = other DNA
gagggtctccctttgtgccc

SEQ ID NO: 241553 - DNA, 20 bp, synthetic construct
  source 1..20: mol_type = other DNA
agagggtctccctttgtgcc

SEQ ID NO: 241554 - DNA, 20 bp, synthetic construct
  source 1..20: mol_type = other DNA
gagagggtctccctttgtgc

SEQ ID NO: 241555 - DNA, 20 bp, synthetic construct
  source 1..20: mol_type = other DNA
tgagagggtctccctttgtg

SEQ ID NO: 241556 - DNA, 20 bp, synthetic construct
  source 1..20: mol_type = other DNA
ctgagagggtctccctttgt

SEQ ID NO: 241557 - DNA, 20 bp, synthetic construct
  source 1..20: mol_type = other DNA
gctgagagggtctccctttg

SEQ ID NO: 241558 - DNA, 20 bp, synthetic construct
  source 1..20: mol_type = other DNA
agctgagagggtctcccttt

SEQ ID NO: 241559 - DNA, 20 bp, synthetic construct
  source 1..20: mol_type = other DNA
cagctgagagggtctccctt

SEQ ID NO: 241560 - DNA, 20 bp, synthetic construct
  source 1..20: mol_type = other DNA
tcagctgagagggtctccct

SEQ ID NO: 241561 - DNA, 20 bp, synthetic construct
  source 1..20: mol_type = other DNA
ctcagctgagagggtctccc

SEQ ID NO: 241562 - DNA, 20 bp, synthetic construct
  source 1..20: mol_type = other DNA
gctcagctgagagggtctcc

SEQ ID NO: 241563 - DNA, 20 bp, synthetic construct
  source 1..20: mol_type = other DNA
agctcagctgagagggtctc

SEQ ID NO: 241564 - DNA, 20 bp, synthetic construct
  source 1..20: mol_type = other DNA
gagctcagctgagagggtct

SEQ ID NO: 241565 - DNA, 20 bp, synthetic construct
  source 1..20: mol_type = other DNA
ggagctcagctgagagggtc

SEQ ID NO: 241566 - DNA, 20 bp, synthetic construct
  source 1..20: mol_type = other DNA
aggagctcagctgagagggt

SEQ ID NO: 241567 - DNA, 20 bp, synthetic construct
  source 1..20: mol_type = other DNA
gaggagctcagctgagaggg

SEQ ID NO: 241568 - DNA, 20 bp, synthetic construct
  source 1..20: mol_type = other DNA
ggaggagctcagctgagagg

SEQ ID NO: 241569 - DNA, 20 bp, synthetic construct
  source 1..20: mol_type = other DNA
gggaggagctcagctgagag

SEQ ID NO: 241570 - DNA, 20 bp, synthetic construct
  source 1..20: mol_type = other DNA
tgggaggagctcagctgaga

SEQ ID NO: 241571 - DNA, 20 bp, synthetic construct
  source 1..20: mol_type = other DNA
atgggaggagctcagctgag

SEQ ID NO: 241572 - DNA, 20 bp, synthetic construct
  source 1..20: mol_type = other DNA
gatgggaggagctcagctga

SEQ ID NO: 241573 - DNA, 20 bp, synthetic construct
  source 1..20: mol_type = other DNA
ggatgggaggagctcagctg

SEQ ID NO: 241574 - DNA, 20 bp, synthetic construct
  source 1..20: mol_type = other DNA
tggatgggaggagctcagct

SEQ ID NO: 241575 - DNA, 20 bp, synthetic construct
  source 1..20: mol_type = other DNA
ctggatgggaggagctcagc

SEQ ID NO: 241576 - DNA, 20 bp, synthetic construct
  source 1..20: mol_type = other DNA
tctggatgggaggagctcag

SEQ ID NO: 241577 - DNA, 20 bp, synthetic construct
  source 1..20: mol_type = other DNA
gtctggatgggaggagctca

SEQ ID NO: 241578 - DNA, 20 bp, synthetic construct
  source 1..20: mol_type = other DNA
tgtctggatgggaggagctc

SEQ ID NO: 241579 - DNA, 20 bp, synthetic construct
  source 1..20: mol_type = other DNA
atgtctggatgggaggagct

SEQ ID NO: 241580 - DNA, 20 bp, synthetic construct
  source 1..20: mol_type = other DNA
aatgtctggatgggaggagc

SEQ ID NO: 241581 - DNA, 20 bp, synthetic construct
  source 1..20: mol_type = other DNA
aaatgtctggatgggaggag

SEQ ID NO: 241582 - DNA, 20 bp, synthetic construct
  source 1..20: mol_type = other DNA
aaaatgtctggatgggagga

SEQ ID NO: 241583 - DNA, 20 bp, synthetic construct
  source 1..20: mol_type = other DNA
gaaaatgtctggatgggagg

SEQ ID NO: 241584 - DNA, 20 bp, synthetic construct
  source 1..20: mol_type = other DNA
ggaaaatgtctggatgggag

SEQ ID NO: 241585 - DNA, 20 bp, synthetic construct
  source 1..20: mol_type = other DNA
aggaaaatgtctggatggga

SEQ ID NO: 241586 - DNA, 20 bp, synthetic construct
  source 1..20: mol_type = other DNA
caggaaaatgtctggatggg

SEQ ID NO: 241587 - DNA, 20 bp, synthetic construct
  source 1..20: mol_type = other DNA
ccaggaaaatgtctggatgg

SEQ ID NO: 241588 - DNA, 20 bp, synthetic construct
  source 1..20: mol_type = other DNA
tccaggaaaatgtctggatg

SEQ ID NO: 241589 - DNA, 20 bp, synthetic construct
  source 1..20: mol_type = other DNA
gtccaggaaaatgtctggat

SEQ ID NO: 241590 - DNA, 20 bp, synthetic construct
  source 1..20: mol_type = other DNA
agtccaggaaaatgtctgga

SEQ ID NO: 241591 - DNA, 20 bp, synthetic construct
  source 1..20: mol_type = other DNA
aagtccaggaaaatgtctgg

SEQ ID NO: 241592 - DNA, 20 bp, synthetic construct
  source 1..20: mol_type = other DNA
gaagtccaggaaaatgtctg

SEQ ID NO: 241593 - DNA, 20 bp, synthetic construct
  source 1..20: mol_type = other DNA
ggaagtccaggaaaatgtct

SEQ ID NO: 241594 - DNA, 20 bp, synthetic construct
  source 1..20: mol_type = other DNA
aggaagtccaggaaaatgtc

SEQ ID NO: 241595 - DNA, 20 bp, synthetic construct
  source 1..20: mol_type = other DNA
taggaagtccaggaaaatgt

SEQ ID NO: 241596 - DNA, 20 bp, synthetic construct
  source 1..20: mol_type = other DNA
ataggaagtccaggaaaatg

SEQ ID NO: 241597 - DNA, 20 bp, synthetic construct
  source 1..20: mol_type = other DNA
gataggaagtccaggaaaat

SEQ ID NO: 241598 - DNA, 20 bp, synthetic construct
  source 1..20: mol_type = other DNA
ggataggaagtccaggaaaa

SEQ ID NO: 241599 - DNA, 20 bp, synthetic construct
  source 1..20: mol_type = other DNA
tggataggaagtccaggaaa

SEQ ID NO: 241600 - DNA, 20 bp, synthetic construct
  source 1..20: mol_type = other DNA
ttggataggaagtccaggaa

SEQ ID NO: 241601 - DNA, 20 bp, synthetic construct
  source 1..20: mol_type = other DNA
attggataggaagtccagga

SEQ ID NO: 241602 - DNA, 20 bp, synthetic construct
  source 1..20: mol_type = other DNA
cattggataggaagtccagg

SEQ ID NO: 241603 - DNA, 20 bp, synthetic construct
  source 1..20: mol_type = other DNA
tcattggataggaagtccag

SEQ ID NO: 241604 - DNA, 20 bp, synthetic construct
  source 1..20: mol_type = other DNA
gtcattggataggaagtcca

SEQ ID NO: 241605 - DNA, 20 bp, synthetic construct
  source 1..20: mol_type = other DNA
agtcattggataggaagtcc

SEQ ID NO: 241606 - DNA, 20 bp, synthetic construct
  source 1..20: mol_type = other DNA
aagtcattggataggaagtc

SEQ ID NO: 241607 - DNA, 20 bp, synthetic construct
  source 1..20: mol_type = other DNA
gaagtcattggataggaagt

SEQ ID NO: 241608 - DNA, 20 bp, synthetic construct
  source 1..20: mol_type = other DNA
ggaagtcattggataggaag

SEQ ID NO: 241609 - DNA, 20 bp, synthetic construct
  source 1..20: mol_type = other DNA
gggaagtcattggataggaa

SEQ ID NO: 241610 - DNA, 20 bp, synthetic construct
  source 1..20: mol_type = other DNA
agggaagtcattggatagga

SEQ ID NO: 241611 - DNA, 20 bp, synthetic construct
  source 1..20: mol_type = other DNA
aagggaagtcattggatagg

SEQ ID NO: 241612 - DNA, 20 bp, synthetic construct
  source 1..20: mol_type = other DNA
taagggaagtcattggatag

SEQ ID NO: 241613 - DNA, 20 bp, synthetic construct
  source 1..20: mol_type = other DNA
ctaagggaagtcattggata

SEQ ID NO: 241614 - DNA, 20 bp, synthetic construct
  source 1..20: mol_type = other DNA
gctaagggaagtcattggat

SEQ ID NO: 241615 - DNA, 20 bp, synthetic construct
  source 1..20: mol_type = other DNA
agctaagggaagtcattgga

SEQ ID NO: 241616 - DNA, 20 bp, synthetic construct
  source 1..20: mol_type = other DNA
aagctaagggaagtcattgg

SEQ ID NO: 241617 - DNA, 20 bp, synthetic construct
  source 1..20: mol_type = other DNA
gaagctaagggaagtcattg

SEQ ID NO: 241618 - DNA, 20 bp, synthetic construct
  source 1..20: mol_type = other DNA
agaagctaagggaagtcatt

SEQ ID NO: 241619 - DNA, 20 bp, synthetic construct
  source 1..20: mol_type = other DNA
aagaagctaagggaagtcat

SEQ ID NO: 241620 - DNA, 20 bp, synthetic construct
  source 1..20: mol_type = other DNA
taagaagctaagggaagtca

SEQ ID NO: 241621 - DNA, 20 bp, synthetic construct
  source 1..20: mol_type = other DNA
ataagaagctaagggaagtc

SEQ ID NO: 241622 - DNA, 20 bp, synthetic construct
  source 1..20: mol_type = other DNA
gataagaagctaagggaagt

SEQ ID NO: 241623 - DNA, 20 bp, synthetic construct
  source 1..20: mol_type = other DNA
tgataagaagctaagggaag

SEQ ID NO: 241624 - DNA, 20 bp, synthetic construct
  source 1..20: mol_type = other DNA
ctgataagaagctaagggaa

SEQ ID NO: 241625 - DNA, 20 bp, synthetic construct
  source 1..20: mol_type = other DNA
gctgataagaagctaaggga

SEQ ID NO: 241626 - DNA, 20 bp, synthetic construct
  source 1..20: mol_type = other DNA
ggctgataagaagctaaggg

SEQ ID NO: 241627 - DNA, 20 bp, synthetic construct
  source 1..20: mol_type = other DNA
tggctgataagaagctaagg

SEQ ID NO: 241628 - DNA, 20 bp, synthetic construct
  source 1..20: mol_type = other DNA
gtggctgataagaagctaag

SEQ ID NO: 241629 - DNA, 20 bp, synthetic construct
  source 1..20: mol_type = other DNA
ggtggctgataagaagctaa

SEQ ID NO: 241630 - DNA, 20 bp, synthetic construct
  source 1..20: mol_type = other DNA
gggtggctgataagaagcta

SEQ ID NO: 241631 - DNA, 20 bp, synthetic construct
  source 1..20: mol_type = other DNA
ggggtggctgataagaagct

SEQ ID NO: 241632 - DNA, 20 bp, synthetic construct
  source 1..20: mol_type = other DNA
aggggtggctgataagaagc

SEQ ID NO: 241633 - DNA, 20 bp, synthetic construct
  source 1..20: mol_type = other DNA
caggggtggctgataagaag

SEQ ID NO: 241634 - DNA, 20 bp, synthetic construct
  source 1..20: mol_type = other DNA
acaggggtggctgataagaa

SEQ ID NO: 241635 - DNA, 20 bp, synthetic construct
  source 1..20: mol_type = other DNA
gacaggggtggctgataaga

SEQ ID NO: 241636 - DNA, 20 bp, synthetic construct
  source 1..20: mol_type = other DNA
agacaggggtggctgataag

SEQ ID NO: 241637 - DNA, 20 bp, synthetic construct
  source 1..20: mol_type = other DNA
cagacaggggtggctgataa

SEQ ID NO: 241638 - DNA, 20 bp, synthetic construct
  source 1..20: mol_type = other DNA
gcagacaggggtggctgata

SEQ ID NO: 241639 - DNA, 20 bp, synthetic construct
  source 1..20: mol_type = other DNA
ggcagacaggggtggctgat

SEQ ID NO: 241640 - DNA, 20 bp, synthetic construct
  source 1..20: mol_type = other DNA
gggcagacaggggtggctga

SEQ ID NO: 241641 - DNA, 20 bp, synthetic construct
  source 1..20: mol_type = other DNA
tgggcagacaggggtggctg

SEQ ID NO: 241642 - DNA, 20 bp, synthetic construct
  source 1..20: mol_type = other DNA
ctgggcagacaggggtggct

SEQ ID NO: 241643 - DNA, 20 bp, synthetic construct
  source 1..20: mol_type = other DNA
cctgggcagacaggggtggc

SEQ ID NO: 241644 - DNA, 20 bp, synthetic construct
  source 1..20: mol_type = other DNA
tcctgggcagacaggggtgg

SEQ ID NO: 241645 - DNA, 20 bp, synthetic construct
  source 1..20: mol_type = other DNA
ctcctgggcagacaggggtg

SEQ ID NO: 241646 - DNA, 20 bp, synthetic construct
  source 1..20: mol_type = other DNA
cctcctgggcagacaggggt

SEQ ID NO: 241647 - DNA, 20 bp, synthetic construct
  source 1..20: mol_type = other DNA
gcctcctgggcagacagggg

SEQ ID NO: 241648 - DNA, 20 bp, synthetic construct
  source 1..20: mol_type = other DNA
agcctcctgggcagacaggg

SEQ ID NO: 241649 - DNA, 20 bp, synthetic construct
  source 1..20: mol_type = other DNA
cagcctcctgggcagacagg

SEQ ID NO: 241650 - DNA, 20 bp, synthetic construct
  source 1..20: mol_type = other DNA
ccagcctcctgggcagacag

SEQ ID NO: 241651 - DNA, 20 bp, synthetic construct
  source 1..20: mol_type = other DNA
tccagcctcctgggcagaca

SEQ ID NO: 241652 - DNA, 20 bp, synthetic construct
  source 1..20: mol_type = other DNA
ttccagcctcctgggcagac

SEQ ID NO: 241653 - DNA, 20 bp, synthetic construct
  source 1..20: mol_type = other DNA
cttccagcctcctgggcaga

SEQ ID NO: 241654 - DNA, 20 bp, synthetic construct
  source 1..20: mol_type = other DNA
tcttccagcctcctgggcag

SEQ ID NO: 241655 - DNA, 20 bp, synthetic construct
  source 1..20: mol_type = other DNA
atcttccagcctcctgggca

SEQ ID NO: 241656 - DNA, 20 bp, synthetic construct
  source 1..20: mol_type = other DNA
catcttccagcctcctgggc

SEQ ID NO: 241657 - DNA, 20 bp, synthetic construct
  source 1..20: mol_type = other DNA
acatcttccagcctcctggg

SEQ ID NO: 241658 - DNA, 20 bp, synthetic construct
  source 1..20: mol_type = other DNA
cacatcttccagcctcctgg

SEQ ID NO: 241659 - DNA, 20 bp, synthetic construct
  source 1..20: mol_type = other DNA
ccacatcttccagcctcctg

SEQ ID NO: 241660 - DNA, 20 bp, synthetic construct
  source 1..20: mol_type = other DNA
gccacatcttccagcctcct

SEQ ID NO: 241661 - DNA, 20 bp, synthetic construct
  source 1..20: mol_type = other DNA
ggccacatcttccagcctcc

SEQ ID NO: 241662 - DNA, 20 bp, synthetic construct
  source 1..20: mol_type = other DNA
aggccacatcttccagcctc

SEQ ID NO: 241663 - DNA, 20 bp, synthetic construct
  source 1..20: mol_type = other DNA
aaggccacatcttccagcct

SEQ ID NO: 241664 - DNA, 20 bp, synthetic construct
  source 1..20: mol_type = other DNA
aaaggccacatcttccagcc

SEQ ID NO: 241665 - DNA, 20 bp, synthetic construct
  source 1..20: mol_type = other DNA
aaaaggccacatcttccagc

SEQ ID NO: 241666 - DNA, 20 bp, synthetic construct
  source 1..20: mol_type = other DNA
taaaaggccacatcttccag

SEQ ID NO: 241667 - DNA, 20 bp, synthetic construct
  source 1..20: mol_type = other DNA
ttaaaaggccacatcttcca

SEQ ID NO: 241668 - DNA, 20 bp, synthetic construct
  source 1..20: mol_type = other DNA
gttaaaaggccacatcttcc

SEQ ID NO: 241669 - DNA, 20 bp, synthetic construct
  source 1..20: mol_type = other DNA
agttaaaaggccacatcttc

SEQ ID NO: 241670 - DNA, 20 bp, synthetic construct
  source 1..20: mol_type = other DNA
cagttaaaaggccacatctt

SEQ ID NO: 241671 - DNA, 20 bp, synthetic construct
  source 1..20: mol_type = other DNA
ccagttaaaaggccacatct

SEQ ID NO: 241672 - DNA, 20 bp, synthetic construct
  source 1..20: mol_type = other DNA
cccagttaaaaggccacatc

SEQ ID NO: 241673 - DNA, 20 bp, synthetic construct
  source 1..20: mol_type = other DNA
gcccagttaaaaggccacat

SEQ ID NO: 241674 - DNA, 20 bp, synthetic construct
  source 1..20: mol_type = other DNA
tgcccagttaaaaggccaca

SEQ ID NO: 241675 - DNA, 20 bp, synthetic construct
  source 1..20: mol_type = other DNA
gtgcccagttaaaaggccac

SEQ ID NO: 241676 - DNA, 20 bp, synthetic construct
  source 1..20: mol_type = other DNA
tgtgcccagttaaaaggcca

SEQ ID NO: 241677 - DNA, 20 bp, synthetic construct
  source 1..20: mol_type = other DNA
ctgtgcccagttaaaaggcc

SEQ ID NO: 241678 - DNA, 20 bp, synthetic construct
  source 1..20: mol_type = other DNA
gctgtgcccagttaaaaggc

SEQ ID NO: 241679 - DNA, 20 bp, synthetic construct
  source 1..20: mol_type = other DNA
agctgtgcccagttaaaagg

SEQ ID NO: 241680 - DNA, 20 bp, synthetic construct
  source 1..20: mol_type = other DNA
gagctgtgcccagttaaaag

SEQ ID NO: 241681 - DNA, 20 bp, synthetic construct
  source 1..20: mol_type = other DNA
agagctgtgcccagttaaaa

SEQ ID NO: 241682 - DNA, 20 bp, synthetic construct
  source 1..20: mol_type = other DNA
cagagctgtgcccagttaaa

SEQ ID NO: 241683 - DNA, 20 bp, synthetic construct
  source 1..20: mol_type = other DNA
acagagctgtgcccagttaa

SEQ ID NO: 241684 - DNA, 20 bp, synthetic construct
  source 1..20: mol_type = other DNA
gacagagctgtgcccagtta

SEQ ID NO: 241685 - DNA, 20 bp, synthetic construct
  source 1..20: mol_type = other DNA
ggacagagctgtgcccagtt

SEQ ID NO: 241686 - DNA, 20 bp, synthetic construct
  source 1..20: mol_type = other DNA
aggacagagctgtgcccagt

SEQ ID NO: 241687 - DNA, 20 bp, synthetic construct
  source 1..20: mol_type = other DNA
gaggacagagctgtgcccag

SEQ ID NO: 241688 - DNA, 20 bp, synthetic construct
  source 1..20: mol_type = other DNA
agaggacagagctgtgccca

SEQ ID NO: 241689 - DNA, 20 bp, synthetic construct
  source 1..20: mol_type = other DNA
tagaggacagagctgtgccc

SEQ ID NO: 241690 - DNA, 20 bp, synthetic construct
  source 1..20: mol_type = other DNA
atagaggacagagctgtgcc

SEQ ID NO: 241691 - DNA, 20 bp, synthetic construct
  source 1..20: mol_type = other DNA
gatagaggacagagctgtgc

SEQ ID NO: 241692 - DNA, 20 bp, synthetic construct
  source 1..20: mol_type = other DNA
tgatagaggacagagctgtg

SEQ ID NO: 241693 - DNA, 20 bp, synthetic construct
  source 1..20: mol_type = other DNA
atgatagaggacagagctgt

SEQ ID NO: 241694 - DNA, 20 bp, synthetic construct
  source 1..20: mol_type = other DNA
tatgatagaggacagagctg

SEQ ID NO: 241695 - DNA, 20 bp, synthetic construct
  source 1..20: mol_type = other DNA
atatgatagaggacagagct

SEQ ID NO: 241696 - DNA, 20 bp, synthetic construct
  source 1..20: mol_type = other DNA
gatatgatagaggacagagc

SEQ ID NO: 241697 - DNA, 20 bp, synthetic construct
  source 1..20: mol_type = other DNA
tgatatgatagaggacagag

SEQ ID NO: 241698 - DNA, 20 bp, synthetic construct
  source 1..20: mol_type = other DNA
ctgatatgatagaggacaga

SEQ ID NO: 241699 - DNA, 20 bp, synthetic construct
  source 1..20: mol_type = other DNA
cctgatatgatagaggacag

SEQ ID NO: 241700 - DNA, 20 bp, synthetic construct
  source 1..20: mol_type = other DNA
ccctgatatgatagaggaca

SEQ ID NO: 241701 - DNA, 20 bp, synthetic construct
  source 1..20: mol_type = other DNA
gccctgatatgatagaggac

SEQ ID NO: 241702 - DNA, 20 bp, synthetic construct
  source 1..20: mol_type = other DNA
agccctgatatgatagagga

SEQ ID NO: 241703 - DNA, 20 bp, synthetic construct
  source 1..20: mol_type = other DNA
gagccctgatatgatagagg

SEQ ID NO: 241704 - DNA, 20 bp, synthetic construct
  source 1..20: mol_type = other DNA
agagccctgatatgatagag

SEQ ID NO: 241705 - DNA, 20 bp, synthetic construct
  source 1..20: mol_type = other DNA
cagagccctgatatgataga

SEQ ID NO: 241706 - DNA, 20 bp, synthetic construct
  source 1..20: mol_type = other DNA
acagagccctgatatgatag

SEQ ID NO: 241707 - DNA, 20 bp, synthetic construct
  source 1..20: mol_type = other DNA
aacagagccctgatatgata

SEQ ID NO: 241708 - DNA, 20 bp, synthetic construct
  source 1..20: mol_type = other DNA
gaacagagccctgatatgat

SEQ ID NO: 241709 - DNA, 20 bp, synthetic construct
  source 1..20: mol_type = other DNA
ggaacagagccctgatatga

SEQ ID NO: 241710 - DNA, 20 bp, synthetic construct
  source 1..20: mol_type = other DNA
gggaacagagccctgatatg

SEQ ID NO: 241711 - DNA, 20 bp, synthetic construct
  source 1..20: mol_type = other DNA
tgggaacagagccctgatat

SEQ ID NO: 241712 - DNA, 20 bp, synthetic construct
  source 1..20: mol_type = other DNA
ttgggaacagagccctgata

SEQ ID NO: 241713 - DNA, 20 bp, synthetic construct
  source 1..20: mol_type = other DNA
cttgggaacagagccctgat

SEQ ID NO: 241714 - DNA, 20 bp, synthetic construct
  source 1..20: mol_type = other DNA
ccttgggaacagagccctga

SEQ ID NO: 241715 - DNA, 20 bp, synthetic construct
  source 1..20: mol_type = other DNA
tccttgggaacagagccctg

SEQ ID NO: 241716 - DNA, 20 bp, synthetic construct
  source 1..20: mol_type = other DNA
ctccttgggaacagagccct

SEQ ID NO: 241717 - DNA, 20 bp, synthetic construct
  source 1..20: mol_type = other DNA
cctccttgggaacagagccc

SEQ ID NO: 241718 - DNA, 20 bp, synthetic construct
  source 1..20: mol_type = other DNA
ccctccttgggaacagagcc

SEQ ID NO: 241719 - DNA, 20 bp, synthetic construct
  source 1..20: mol_type = other DNA
accctccttgggaacagagc

SEQ ID NO: 241720 - DNA, 20 bp, synthetic construct
  source 1..20: mol_type = other DNA
taccctccttgggaacagag

SEQ ID NO: 241721 - DNA, 20 bp, synthetic construct
  source 1..20: mol_type = other DNA
ctaccctccttgggaacaga

SEQ ID NO: 241722 - DNA, 20 bp, synthetic construct
  source 1..20: mol_type = other DNA
tctaccctccttgggaacag

SEQ ID NO: 241723 - DNA, 20 bp, synthetic construct
  source 1..20: mol_type = other DNA
ctctaccctccttgggaaca

SEQ ID NO: 241724 - DNA, 20 bp, synthetic construct
  source 1..20: mol_type = other DNA
tctctaccctccttgggaac

SEQ ID NO: 241725 - DNA, 20 bp, synthetic construct
  source 1..20: mol_type = other DNA
ctctctaccctccttgggaa

SEQ ID NO: 241726 - DNA, 20 bp, synthetic construct
  source 1..20: mol_type = other DNA
tctctctaccctccttggga

SEQ ID NO: 241727 - DNA, 20 bp, synthetic construct
  source 1..20: mol_type = other DNA
ttctctctaccctccttggg

SEQ ID NO: 241728 - DNA, 20 bp, synthetic construct
  source 1..20: mol_type = other DNA
attctctctaccctccttgg

SEQ ID NO: 241729 - DNA, 20 bp, synthetic construct
  source 1..20: mol_type = other DNA
cattctctctaccctccttg

SEQ ID NO: 241730 - DNA, 20 bp, synthetic construct
  source 1..20: mol_type = other DNA
ccattctctctaccctcctt

SEQ ID NO: 241731 - DNA, 20 bp, synthetic construct
  source 1..20: mol_type = other DNA
tccattctctctaccctcct

SEQ ID NO: 241732 - DNA, 20 bp, synthetic construct
  source 1..20: mol_type = other DNA
gtccattctctctaccctcc

SEQ ID NO: 241733 - DNA, 20 bp, synthetic construct
  source 1..20: mol_type = other DNA
tgtccattctctctaccctc

SEQ ID NO: 241734 - DNA, 20 bp, synthetic construct
  source 1..20: mol_type = other DNA
gtgtccattctctctaccct

SEQ ID NO: 241735 - DNA, 20 bp, synthetic construct
  source 1..20: mol_type = other DNA
ggtgtccattctctctaccc

SEQ ID NO: 241736 - DNA, 20 bp, synthetic construct
  source 1..20: mol_type = other DNA
tggtgtccattctctctacc

SEQ ID NO: 241737 - DNA, 20 bp, synthetic construct
  source 1..20: mol_type = other DNA
ctggtgtccattctctctac

SEQ ID NO: 241738 - DNA, 20 bp, synthetic construct
  source 1..20: mol_type = other DNA
cctggtgtccattctctcta

SEQ ID NO: 241739 - DNA, 20 bp, synthetic construct
  source 1..20: mol_type = other DNA
acctggtgtccattctctct

SEQ ID NO: 241740 - DNA, 20 bp, synthetic construct
  source 1..20: mol_type = other DNA
cacctggtgtccattctctc

SEQ ID NO: 241741 - DNA, 20 bp, synthetic construct
  source 1..20: mol_type = other DNA
ccacctggtgtccattctct

SEQ ID NO: 241742 - DNA, 20 bp, synthetic construct
  source 1..20: mol_type = other DNA
tccacctggtgtccattctc

SEQ ID NO: 241743 - DNA, 20 bp, synthetic construct
  source 1..20: mol_type = other DNA
gtccacctggtgtccattct

SEQ ID NO: 241744 - DNA, 20 bp, synthetic construct
  source 1..20: mol_type = other DNA
ggtccacctggtgtccattc

SEQ ID NO: 241745 - DNA, 20 bp, synthetic construct
  source 1..20: mol_type = other DNA
gggtccacctggtgtccatt

SEQ ID NO: 241746 - DNA, 20 bp, synthetic construct
  source 1..20: mol_type = other DNA
agggtccacctggtgtccat

SEQ ID NO: 241747 - DNA, 20 bp, synthetic construct
  source 1..20: mol_type = other DNA
gagggtccacctggtgtcca

SEQ ID NO: 241748 - DNA, 20 bp, synthetic construct
  source 1..20: mol_type = other DNA
tgagggtccacctggtgtcc

SEQ ID NO: 241749 - DNA, 20 bp, synthetic construct
  source 1..20: mol_type = other DNA
ctgagggtccacctggtgtc

SEQ ID NO: 241750 - DNA, 20 bp, synthetic construct
  source 1..20: mol_type = other DNA
gctgagggtccacctggtgt

SEQ ID NO: 241751 - DNA, 20 bp, synthetic construct
  source 1..20: mol_type = other DNA
tgctgagggtccacctggtg

SEQ ID NO: 241752 - DNA, 20 bp, synthetic construct
  source 1..20: mol_type = other DNA
ctgctgagggtccacctggt

SEQ ID NO: 241753 - DNA, 20 bp, synthetic construct
  source 1..20: mol_type = other DNA
actgctgagggtccacctgg

SEQ ID NO: 241754 - DNA, 20 bp, synthetic construct
  source 1..20: mol_type = other DNA
gactgctgagggtccacctg

SEQ ID NO: 241755 - DNA, 20 bp, synthetic construct
  source 1..20: mol_type = other DNA
agactgctgagggtccacct

SEQ ID NO: 241756 - DNA, 20 bp, synthetic construct
  source 1..20: mol_type = other DNA
cagactgctgagggtccacc

SEQ ID NO: 241757 - DNA, 20 bp, synthetic construct
  source 1..20: mol_type = other DNA
acagactgctgagggtccac

SEQ ID NO: 241758 - DNA, 20 bp, synthetic construct
  source 1..20: mol_type = other DNA
cacagactgctgagggtcca

SEQ ID NO: 241759 - DNA, 20 bp, synthetic construct
  source 1..20: mol_type = other DNA
gcacagactgctgagggtcc

SEQ ID NO: 241760 - DNA, 20 bp, synthetic construct
  source 1..20: mol_type = other DNA
ggcacagactgctgagggtc

SEQ ID NO: 241761 - DNA, 20 bp, synthetic construct
  source 1..20: mol_type = other DNA
tggcacagactgctgagggt

SEQ ID NO: 241762 - DNA, 20 bp, synthetic construct
  source 1..20: mol_type = other DNA
gtggcacagactgctgaggg

SEQ ID NO: 241763 - DNA, 20 bp, synthetic construct
  source 1..20: mol_type = other DNA
tgtggcacagactgctgagg

SEQ ID NO: 241764 - DNA, 20 bp, synthetic construct
  source 1..20: mol_type = other DNA
ctgtggcacagactgctgag

SEQ ID NO: 241765 - DNA, 20 bp, synthetic construct
  source 1..20: mol_type = other DNA
tctgtggcacagactgctga

SEQ ID NO: 241766 - DNA, 20 bp, synthetic construct
  source 1..20: mol_type = other DNA
ctctgtggcacagactgctg

SEQ ID NO: 241767 - DNA, 20 bp, synthetic construct
  source 1..20: mol_type = other DNA
cctctgtggcacagactgct

SEQ ID NO: 241768 - DNA, 20 bp, synthetic construct
  source 1..20: mol_type = other DNA
ccctctgtggcacagactgc

SEQ ID NO: 241769 - DNA, 20 bp, synthetic construct
  source 1..20: mol_type = other DNA
tccctctgtggcacagactg

SEQ ID NO: 241770 - DNA, 20 bp, synthetic construct
  source 1..20: mol_type = other DNA
ctccctctgtggcacagact

SEQ ID NO: 241771 - DNA, 20 bp, synthetic construct
  source 1..20: mol_type = other DNA
actccctctgtggcacagac

SEQ ID NO: 241772 - DNA, 20 bp, synthetic construct
  source 1..20: mol_type = other DNA
cactccctctgtggcacaga

SEQ ID NO: 241773 - DNA, 20 bp, synthetic construct
  source 1..20: mol_type = other DNA
acactccctctgtggcacag

SEQ ID NO: 241774 - DNA, 20 bp, synthetic construct
  source 1..20: mol_type = other DNA
aacactccctctgtggcaca

SEQ ID NO: 241775 - DNA, 20 bp, synthetic construct
  source 1..20: mol_type = other DNA
aaacactccctctgtggcac

SEQ ID NO: 241776 - DNA, 20 bp, synthetic construct
  source 1..20: mol_type = other DNA
caaacactccctctgtggca

SEQ ID NO: 241777 - DNA, 20 bp, synthetic construct
  source 1..20: mol_type = other DNA
gcaaacactccctctgtggc

SEQ ID NO: 241778 - DNA, 20 bp, synthetic construct
  source 1..20: mol_type = other DNA
tgcaaacactccctctgtgg

SEQ ID NO: 241779 - DNA, 20 bp, synthetic construct
  source 1..20: mol_type = other DNA
ttgcaaacactccctctgtg

SEQ ID NO: 241780 - DNA, 20 bp, synthetic construct
  source 1..20: mol_type = other DNA
attgcaaacactccctctgt

SEQ ID NO: 241781 - DNA, 20 bp, synthetic construct
  source 1..20: mol_type = other DNA
aattgcaaacactccctctg

SEQ ID NO: 241782 - DNA, 20 bp, synthetic construct
  source 1..20: mol_type = other DNA
aaattgcaaacactccctct

SEQ ID NO: 241783 - DNA, 20 bp, synthetic construct
  source 1..20: mol_type = other DNA
gaaattgcaaacactccctc

SEQ ID NO: 241784 - DNA, 20 bp, synthetic construct
  source 1..20: mol_type = other DNA
ggaaattgcaaacactccct

SEQ ID NO: 241785 - DNA, 20 bp, synthetic construct
  source 1..20: mol_type = other DNA
tggaaattgcaaacactccc

SEQ ID NO: 241786 - DNA, 20 bp, synthetic construct
  source 1..20: mol_type = other DNA
ctggaaattgcaaacactcc

SEQ ID NO: 241787 - DNA, 20 bp, synthetic construct
  source 1..20: mol_type = other DNA
tctggaaattgcaaacactc

SEQ ID NO: 241788 - DNA, 20 bp, synthetic construct
  source 1..20: mol_type = other DNA
gtctggaaattgcaaacact

SEQ ID NO: 241789 - DNA, 20 bp, synthetic construct
  source 1..20: mol_type = other DNA
agtctggaaattgcaaacac

SEQ ID NO: 241790 - DNA, 20 bp, synthetic construct
  source 1..20: mol_type = other DNA
tagtctggaaattgcaaaca

SEQ ID NO: 241791 - DNA, 20 bp, synthetic construct
  source 1..20: mol_type = other DNA
ttagtctggaaattgcaaac

SEQ ID NO: 241792 - DNA, 20 bp, synthetic construct
  source 1..20: mol_type = other DNA
tttagtctggaaattgcaaa

SEQ ID NO: 241793 - DNA, 20 bp, synthetic construct
  source 1..20: mol_type = other DNA
ttttagtctggaaattgcaa

SEQ ID NO: 241794 - DNA, 20 bp, synthetic construct
  source 1..20: mol_type = other DNA
cttttagtctggaaattgca

SEQ ID NO: 241795 - DNA, 20 bp, synthetic construct
  source 1..20: mol_type = other DNA
acttttagtctggaaattgc

SEQ ID NO: 241796 - DNA, 20 bp, synthetic construct
  source 1..20: mol_type = other DNA
gacttttagtctggaaattg

SEQ ID NO: 241797 - DNA, 20 bp, synthetic construct
  source 1..20: mol_type = other DNA
ggacttttagtctggaaatt

SEQ ID NO: 241798 - DNA, 20 bp, synthetic construct
  source 1..20: mol_type = other DNA
gggacttttagtctggaaat

SEQ ID NO: 241799 - DNA, 20 bp, synthetic construct
  source 1..20: mol_type = other DNA
ggggacttttagtctggaaa

SEQ ID NO: 241800 - DNA, 20 bp, synthetic construct
  source 1..20: mol_type = other DNA
tggggacttttagtctggaa

SEQ ID NO: 241801 - DNA, 20 bp, synthetic construct
  source 1..20: mol_type = other DNA
atggggacttttagtctgga

SEQ ID NO: 241802 - DNA, 20 bp, synthetic construct
  source 1..20: mol_type = other DNA
catggggacttttagtctgg

SEQ ID NO: 241803 - DNA, 20 bp, synthetic construct
  source 1..20: mol_type = other DNA
acatggggacttttagtctg

SEQ ID NO: 241804 - DNA, 20 bp, synthetic construct
  source 1..20: mol_type = other DNA
cacatggggacttttagtct

SEQ ID NO: 241805 - DNA, 20 bp, synthetic construct
  source 1..20: mol_type = other DNA
gcacatggggacttttagtc

SEQ ID NO: 241806 - DNA, 20 bp, synthetic construct
  source 1..20: mol_type = other DNA
agcacatggggacttttagt

SEQ ID NO: 241807 - DNA, 20 bp, synthetic construct
  source 1..20: mol_type = other DNA
aagcacatggggacttttag

SEQ ID NO: 241808 - DNA, 20 bp, synthetic construct
  source 1..20: mol_type = other DNA
caagcacatggggactttta

SEQ ID NO: 241809 - DNA, 20 bp, synthetic construct
  source 1..20: mol_type = other DNA
tcaagcacatggggactttt

SEQ ID NO: 241810 - DNA, 20 bp, synthetic construct
  source 1..20: mol_type = other DNA
gtcaagcacatggggacttt

SEQ ID NO: 241811 - DNA, 20 bp, synthetic construct
  source 1..20: mol_type = other DNA
cgtcaagcacatggggactt

SEQ ID NO: 241812 - DNA, 20 bp, synthetic construct
  source 1..20: mol_type = other DNA
ccgtcaagcacatggggact

SEQ ID NO: 241813 - DNA, 20 bp, synthetic construct
  source 1..20: mol_type = other DNA
cccgtcaagcacatggggac

SEQ ID NO: 241814 - DNA, 20 bp, synthetic construct
  source 1..20: mol_type = other DNA
ccccgtcaagcacatgggga

SEQ ID NO: 241815 - DNA, 20 bp, synthetic construct
  source 1..20: mol_type = other DNA
accccgtcaagcacatgggg

SEQ ID NO: 241816 - DNA, 20 bp, synthetic construct
  source 1..20: mol_type = other DNA
taccccgtcaagcacatggg

SEQ ID NO: 241817 - DNA, 20 bp, synthetic construct
  source 1..20: mol_type = other DNA
ataccccgtcaagcacatgg

SEQ ID NO: 241818 - DNA, 20 bp, synthetic construct
  source 1..20: mol_type = other DNA
cataccccgtcaagcacatg

SEQ ID NO: 241819 - DNA, 20 bp, synthetic construct
  source 1..20: mol_type = other DNA
acataccccgtcaagcacat

SEQ ID NO: 241820 - DNA, 20 bp, synthetic construct
  source 1..20: mol_type = other DNA
cacataccccgtcaagcaca

SEQ ID NO: 241821 - DNA, 20 bp, synthetic construct
  source 1..20: mol_type = other DNA
tcacataccccgtcaagcac

SEQ ID NO: 241822 - DNA, 20 bp, synthetic construct
  source 1..20: mol_type = other DNA
gtcacataccccgtcaagca

SEQ ID NO: 241823 - DNA, 20 bp, synthetic construct
  source 1..20: mol_type = other DNA
agtcacataccccgtcaagc

SEQ ID NO: 241824 - DNA, 20 bp, synthetic construct
  source 1..20: mol_type = other DNA
tagtcacataccccgtcaag

SEQ ID NO: 241825 - DNA, 20 bp, synthetic construct
  source 1..20: mol_type = other DNA
gtagtcacataccccgtcaa

SEQ ID NO: 241826 - DNA, 20 bp, synthetic construct
  source 1..20: mol_type = other DNA
tgtagtcacataccccgtca

SEQ ID NO: 241827 - DNA, 20 bp, synthetic construct
  source 1..20: mol_type = other DNA
ttgtagtcacataccccgtc

SEQ ID NO: 241828 - DNA, 20 bp, synthetic construct
  source 1..20: mol_type = other DNA
gttgtagtcacataccccgt

SEQ ID NO: 241829 - DNA, 20 bp, synthetic construct
  source 1..20: mol_type = other DNA
cgttgtagtcacataccccg

SEQ ID NO: 241830 - DNA, 20 bp, synthetic construct
  source 1..20: mol_type = other DNA
acgttgtagtcacatacccc

SEQ ID NO: 241831 - DNA, 20 bp, synthetic construct
  source 1..20: mol_type = other DNA
cacgttgtagtcacataccc

SEQ ID NO: 241832 - DNA, 20 bp, synthetic construct
  source 1..20: mol_type = other DNA
tcacgttgtagtcacatacc

SEQ ID NO: 241833 - DNA, 20 bp, synthetic construct
  source 1..20: mol_type = other DNA
atcacgttgtagtcacatac

SEQ ID NO: 241834 - DNA, 20 bp, synthetic construct
  source 1..20: mol_type = other DNA
catcacgttgtagtcacata

SEQ ID NO: 241835 - DNA, 20 bp, synthetic construct
  source 1..20: mol_type = other DNA
gcatcacgttgtagtcacat

SEQ ID NO: 241836 - DNA, 20 bp, synthetic construct
  source 1..20: mol_type = other DNA
agcatcacgttgtagtcaca

SEQ ID NO: 241837 - DNA, 20 bp, synthetic construct
  source 1..20: mol_type = other DNA
aagcatcacgttgtagtcac

SEQ ID NO: 241838 - DNA, 20 bp, synthetic construct
  source 1..20: mol_type = other DNA
caagcatcacgttgtagtca

SEQ ID NO: 241839 - DNA, 20 bp, synthetic construct
  source 1..20: mol_type = other DNA
tcaagcatcacgttgtagtc

SEQ ID NO: 241840 - DNA, 20 bp, synthetic construct
  source 1..20: mol_type = other DNA
gtcaagcatcacgttgtagt

SEQ ID NO: 241841 - DNA, 20 bp, synthetic construct
  source 1..20: mol_type = other DNA
agtcaagcatcacgttgtag

SEQ ID NO: 241842 - DNA, 20 bp, synthetic construct
  source 1..20: mol_type = other DNA
aagtcaagcatcacgttgta

SEQ ID NO: 241843 - DNA, 20 bp, synthetic construct
  source 1..20: mol_type = other DNA
aaagtcaagcatcacgttgt

SEQ ID NO: 241844 - DNA, 20 bp, synthetic construct
  source 1..20: mol_type = other DNA
aaaagtcaagcatcacgttg

SEQ ID NO: 241845 - DNA, 20 bp, synthetic construct
  source 1..20: mol_type = other DNA
gaaaagtcaagcatcacgtt

SEQ ID NO: 241846 - DNA, 20 bp, synthetic construct
  source 1..20: mol_type = other DNA
ggaaaagtcaagcatcacgt

SEQ ID NO: 241847 - DNA, 20 bp, synthetic construct
  source 1..20: mol_type = other DNA
aggaaaagtcaagcatcacg

SEQ ID NO: 241848 - DNA, 20 bp, synthetic construct
  source 1..20: mol_type = other DNA
gaggaaaagtcaagcatcac

SEQ ID NO: 241849 - DNA, 20 bp, synthetic construct
  source 1..20: mol_type = other DNA
tgaggaaaagtcaagcatca

SEQ ID NO: 241850 - DNA, 20 bp, synthetic construct
  source 1..20: mol_type = other DNA
atgaggaaaagtcaagcatc

SEQ ID NO: 241851 - DNA, 20 bp, synthetic construct
  source 1..20: mol_type = other DNA
tatgaggaaaagtcaagcat

SEQ ID NO: 241852 - DNA, 20 bp, synthetic construct
  source 1..20: mol_type = other DNA
atatgaggaaaagtcaagca

SEQ ID NO: 241853 - DNA, 20 bp, synthetic construct
  source 1..20: mol_type = other DNA
catatgaggaaaagtcaagc

SEQ ID NO: 241854 - DNA, 20 bp, synthetic construct
  source 1..20: mol_type = other DNA
tcatatgaggaaaagtcaag

SEQ ID NO: 241855 - DNA, 20 bp, synthetic construct
  source 1..20: mol_type = other DNA
gtcatatgaggaaaagtcaa

SEQ ID NO: 241856 - DNA, 20 bp, synthetic construct
  source 1..20: mol_type = other DNA
ggtcatatgaggaaaagtca

SEQ ID NO: 241857 - DNA, 20 bp, synthetic construct
  source 1..20: mol_type = other DNA
tggtcatatgaggaaaagtc

SEQ ID NO: 241858 - DNA, 20 bp, synthetic construct
  source 1..20: mol_type = other DNA
ctggtcatatgaggaaaagt

SEQ ID NO: 241859 - DNA, 20 bp, synthetic construct
  source 1..20: mol_type = other DNA
tctggtcatatgaggaaaag

SEQ ID NO: 241860 - DNA, 20 bp, synthetic construct
  source 1..20: mol_type = other DNA
ctctggtcatatgaggaaaa

SEQ ID NO: 241861 - DNA, 20 bp, synthetic construct
  source 1..20: mol_type = other DNA
gctctggtcatatgaggaaa

SEQ ID NO: 241862 - DNA, 20 bp, synthetic construct
  source 1..20: mol_type = other DNA
ggctctggtcatatgaggaa

SEQ ID NO: 241863 - DNA, 20 bp, synthetic construct
  source 1..20: mol_type = other DNA
tggctctggtcatatgagga

SEQ ID NO: 241864 - DNA, 20 bp, synthetic construct
  source 1..20: mol_type = other DNA
gtggctctggtcatatgagg

SEQ ID NO: 241865 - DNA, 20 bp, synthetic construct
  source 1..20: mol_type = other DNA
agtggctctggtcatatgag

SEQ ID NO: 241866 - DNA, 20 bp, synthetic construct
  source 1..20: mol_type = other DNA
aagtggctctggtcatatga

SEQ ID NO: 241867 - DNA, 20 bp, synthetic construct
  source 1..20: mol_type = other DNA
aaagtggctctggtcatatg

SEQ ID NO: 241868 - DNA, 20 bp, synthetic construct
  source 1..20: mol_type = other DNA
caaagtggctctggtcatat

SEQ ID NO: 241869 - DNA, 20 bp, synthetic construct
  source 1..20: mol_type = other DNA
acaaagtggctctggtcata

SEQ ID NO: 241870 - DNA, 20 bp, synthetic construct
  source 1..20: mol_type = other DNA
gacaaagtggctctggtcat

SEQ ID NO: 241871 - DNA, 20 bp, synthetic construct
  source 1..20: mol_type = other DNA
ggacaaagtggctctggtca

SEQ ID NO: 241872 - DNA, 20 bp, synthetic construct
  source 1..20: mol_type = other DNA
tggacaaagtggctctggtc

SEQ ID NO: 241873 - DNA, 20 bp, synthetic construct
  source 1..20: mol_type = other DNA
atggacaaagtggctctggt

SEQ ID NO: 241874 - DNA, 20 bp, synthetic construct
  source 1..20: mol_type = other DNA
gatggacaaagtggctctgg

SEQ ID NO: 241875 - DNA, 20 bp, synthetic construct
  source 1..20: mol_type = other DNA
agatggacaaagtggctctg

SEQ ID NO: 241876 - DNA, 20 bp, synthetic construct
  source 1..20: mol_type = other DNA
cagatggacaaagtggctct

SEQ ID NO: 241877 - DNA, 20 bp, synthetic construct
  source 1..20: mol_type = other DNA
ccagatggacaaagtggctc

SEQ ID NO: 241878 - DNA, 20 bp, synthetic construct
  source 1..20: mol_type = other DNA
accagatggacaaagtggct

SEQ ID NO: 241879 - DNA, 20 bp, synthetic construct
  source 1..20: mol_type = other DNA
taccagatggacaaagtggc

SEQ ID NO: 241880 - DNA, 20 bp, synthetic construct
  source 1..20: mol_type = other DNA
gtaccagatggacaaagtgg

SEQ ID NO: 241881 - DNA, 20 bp, synthetic construct
  source 1..20: mol_type = other DNA
tgtaccagatggacaaagtg

SEQ ID NO: 241882 - DNA, 20 bp, synthetic construct
  source 1..20: mol_type = other DNA
ttgtaccagatggacaaagt

SEQ ID NO: 241883 - DNA, 20 bp, synthetic construct
  source 1..20: mol_type = other DNA
attgtaccagatggacaaag

SEQ ID NO: 241884 - DNA, 20 bp, synthetic construct
  source 1..20: mol_type = other DNA
cattgtaccagatggacaaa

SEQ ID NO: 241885 - DNA, 20 bp, synthetic construct
  source 1..20: mol_type = other DNA
acattgtaccagatggacaa

SEQ ID NO: 241886 - DNA, 20 bp, synthetic construct
  source 1..20: mol_type = other DNA
gacattgtaccagatggaca

SEQ ID NO: 241887 - DNA, 20 bp, synthetic construct
  source 1..20: mol_type = other DNA
tgacattgtaccagatggac

SEQ ID NO: 241888 - DNA, 20 bp, synthetic construct
  source 1..20: mol_type = other DNA
ctgacattgtaccagatgga

SEQ ID NO: 241889 - DNA, 20 bp, synthetic construct
  source 1..20: mol_type = other DNA
gctgacattgtaccagatgg

SEQ ID NO: 241890 - DNA, 20 bp, synthetic construct
  source 1..20: mol_type = other DNA
agctgacattgtaccagatg

SEQ ID NO: 241891 - DNA, 20 bp, synthetic construct
  source 1..20: mol_type = other DNA
tagctgacattgtaccagat

SEQ ID NO: 241892 - DNA, 20 bp, synthetic construct
  source 1..20: mol_type = other DNA
atagctgacattgtaccaga

SEQ ID NO: 241893 - DNA, 20 bp, synthetic construct
  source 1..20: mol_type = other DNA
gatagctgacattgtaccag

SEQ ID NO: 241894 - DNA, 20 bp, synthetic construct
  source 1..20: mol_type = other DNA
agatagctgacattgtacca

SEQ ID NO: 241895 - DNA, 20 bp, synthetic construct
  source 1..20: mol_type = other DNA
cagatagctgacattgtacc

SEQ ID NO: 241896 - DNA, 20 bp, synthetic construct
  source 1..20: mol_type = other DNA
gcagatagctgacattgtac

SEQ ID NO: 241897 - DNA, 20 bp, synthetic construct
  source 1..20: mol_type = other DNA
agcagatagctgacattgta

SEQ ID NO: 241898 - DNA, 20 bp, synthetic construct
  source 1..20: mol_type = other DNA
tagcagatagctgacattgt

SEQ ID NO: 241899 - DNA, 20 bp, synthetic construct
  source 1..20: mol_type = other DNA
ctagcagatagctgacattg

SEQ ID NO: 241900 - DNA, 20 bp, synthetic construct
  source 1..20: mol_type = other DNA
cctagcagatagctgacatt

SEQ ID NO: 241901 - DNA, 20 bp, synthetic construct
  source 1..20: mol_type = other DNA
ccctagcagatagctgacat

SEQ ID NO: 241902 - DNA, 20 bp, synthetic construct
  source 1..20: mol_type = other DNA
cccctagcagatagctgaca

SEQ ID NO: 241903 - DNA, 20 bp, synthetic construct
  source 1..20: mol_type = other DNA
gcccctagcagatagctgac

SEQ ID NO: 241904 - DNA, 20 bp, synthetic construct
  source 1..20: mol_type = other DNA
ggcccctagcagatagctga

SEQ ID NO: 241905 - DNA, 20 bp, synthetic construct
  source 1..20: mol_type = other DNA
gggcccctagcagatagctg

SEQ ID NO: 241906 - DNA, 20 bp, synthetic construct
  source 1..20: mol_type = other DNA
agggcccctagcagatagct

SEQ ID NO: 241907 - DNA, 20 bp, synthetic construct
  source 1..20: mol_type = other DNA
gagggcccctagcagatagc

SEQ ID NO: 241908 - DNA, 20 bp, synthetic construct
  source 1..20: mol_type = other DNA
ggagggcccctagcagatag

SEQ ID NO: 241909 - DNA, 20 bp, synthetic construct
  source 1..20: mol_type = other DNA
tggagggcccctagcagata

SEQ ID NO: 241910 - DNA, 20 bp, synthetic construct
  source 1..20: mol_type = other DNA
ctggagggcccctagcagat

SEQ ID NO: 241911 - DNA, 20 bp, synthetic construct
  source 1..20: mol_type = other DNA
cctggagggcccctagcaga

SEQ ID NO: 241912 - DNA, 20 bp, synthetic construct
  source 1..20: mol_type = other DNA
tcctggagggcccctagcag

SEQ ID NO: 241913 - DNA, 20 bp, synthetic construct
  source 1..20: mol_type = other DNA
atcctggagggcccctagca

SEQ ID NO: 241914 - DNA, 20 bp, synthetic construct
  source 1..20: mol_type = other DNA
aatcctggagggcccctagc

SEQ ID NO: 241915 - DNA, 20 bp, synthetic construct
  source 1..20: mol_type = other DNA
gaatcctggagggcccctag

SEQ ID NO: 241916 - DNA, 20 bp, synthetic construct
  source 1..20: mol_type = other DNA
ggaatcctggagggccccta

SEQ ID NO: 241917 - DNA, 20 bp, synthetic construct
  source 1..20: mol_type = other DNA
gggaatcctggagggcccct

SEQ ID NO: 241918 - DNA, 20 bp, synthetic construct
  source 1..20: mol_type = other DNA
tgggaatcctggagggcccc

SEQ ID NO: 241919 - DNA, 20 bp, synthetic construct
  source 1..20: mol_type = other DNA
ctgggaatcctggagggccc

SEQ ID NO: 241920 - DNA, 20 bp, synthetic construct
  source 1..20: mol_type = other DNA
actgggaatcctggagggcc

SEQ ID NO: 241921 - DNA, 20 bp, synthetic construct
  source 1..20: mol_type = other DNA
gactgggaatcctggagggc

SEQ ID NO: 241922 - DNA, 20 bp, synthetic construct
  source 1..20: mol_type = other DNA
tgactgggaatcctggaggg

SEQ ID NO: 241923 - DNA, 20 bp, synthetic construct
  source 1..20: mol_type = other DNA
ttgactgggaatcctggagg

SEQ ID NO: 241924 - DNA, 20 bp, synthetic construct
  source 1..20: mol_type = other DNA
attgactgggaatcctggag

SEQ ID NO: 241925 - DNA, 20 bp, synthetic construct
  source 1..20: mol_type = other DNA
aattgactgggaatcctgga

SEQ ID NO: 241926 - DNA, 20 bp, synthetic construct
  source 1..20: mol_type = other DNA
gaattgactgggaatcctgg

SEQ ID NO: 241927 - DNA, 20 bp, synthetic construct
  source 1..20: mol_type = other DNA
ggaattgactgggaatcctg

SEQ ID NO: 241928 - DNA, 20 bp, synthetic construct
  source 1..20: mol_type = other DNA
tggaattgactgggaatcct

SEQ ID NO: 241929 - DNA, 20 bp, synthetic construct
  source 1..20: mol_type = other DNA
atggaattgactgggaatcc

SEQ ID NO: 241930 - DNA, 20 bp, synthetic construct
  source 1..20: mol_type = other DNA
tatggaattgactgggaatc

SEQ ID NO: 241931 - DNA, 20 bp, synthetic construct
  source 1..20: mol_type = other DNA
atatggaattgactgggaat

SEQ ID NO: 241932 - DNA, 20 bp, synthetic construct
  source 1..20: mol_type = other DNA
gatatggaattgactgggaa

SEQ ID NO: 241933 - DNA, 20 bp, synthetic construct
  source 1..20: mol_type = other DNA
agatatggaattgactggga

SEQ ID NO: 241934 - DNA, 20 bp, synthetic construct
  source 1..20: mol_type = other DNA
cagatatggaattgactggg

SEQ ID NO: 241935 - DNA, 20 bp, synthetic construct
  source 1..20: mol_type = other DNA
gcagatatggaattgactgg

SEQ ID NO: 241936 - DNA, 20 bp, synthetic construct
  source 1..20: mol_type = other DNA
tgcagatatggaattgactg

SEQ ID NO: 241937 - DNA, 20 bp, synthetic construct
  source 1..20: mol_type = other DNA
atgcagatatggaattgact

SEQ ID NO: 241938 - DNA, 20 bp, synthetic construct
  source 1..20: mol_type = other DNA
gatgcagatatggaattgac

SEQ ID NO: 241939 - DNA, 20 bp, synthetic construct
  source 1..20: mol_type = other DNA
tgatgcagatatggaattga

SEQ ID NO: 241940 - DNA, 20 bp, synthetic construct
  source 1..20: mol_type = other DNA
gtgatgcagatatggaattg

SEQ ID NO: 241941 - DNA, 20 bp, synthetic construct
  source 1..20: mol_type = other DNA
ggtgatgcagatatggaatt

SEQ ID NO: 241942 - DNA, 20 bp, synthetic construct
  source 1..20: mol_type = other DNA
tggtgatgcagatatggaat

SEQ ID NO: 241943 - DNA, 20 bp, synthetic construct
  source 1..20: mol_type = other DNA
gtggtgatgcagatatggaa

SEQ ID NO: 241944 - DNA, 20 bp, synthetic construct
  source 1..20: mol_type = other DNA
ggtggtgatgcagatatgga

SEQ ID NO: 241945 - DNA, 20 bp, synthetic construct
  source 1..20: mol_type = other DNA
tggtggtgatgcagatatgg

SEQ ID NO: 241946 - DNA, 20 bp, synthetic construct
  source 1..20: mol_type = other DNA
atggtggtgatgcagatatg

SEQ ID NO: 241947 - DNA, 20 bp, synthetic construct
  source 1..20: mol_type = other DNA
aatggtggtgatgcagatat

SEQ ID NO: 241948 - DNA, 20 bp, synthetic construct
  source 1..20: mol_type = other DNA
caatggtggtgatgcagata

SEQ ID NO: 241949 - DNA, 20 bp, synthetic construct
  source 1..20: mol_type = other DNA
ccaatggtggtgatgcagat

SEQ ID NO: 241950 - DNA, 20 bp, synthetic construct
  source 1..20: mol_type = other DNA
gccaatggtggtgatgcaga

SEQ ID NO: 241951 - DNA, 20 bp, synthetic construct
  source 1..20: mol_type = other DNA
tgccaatggtggtgatgcag

SEQ ID NO: 241952 - DNA, 20 bp, synthetic construct
  source 1..20: mol_type = other DNA
gtgccaatggtggtgatgca

SEQ ID NO: 241953 - DNA, 20 bp, synthetic construct
  source 1..20: mol_type = other DNA
agtgccaatggtggtgatgc

SEQ ID NO: 241954 - DNA, 20 bp, synthetic construct
  source 1..20: mol_type = other DNA
tagtgccaatggtggtgatg

SEQ ID NO: 241955 - DNA, 20 bp, synthetic construct
  source 1..20: mol_type = other DNA
ttagtgccaatggtggtgat

SEQ ID NO: 241956 - DNA, 20 bp, synthetic construct
  source 1..20: mol_type = other DNA
tttagtgccaatggtggtga

SEQ ID NO: 241957 - DNA, 20 bp, synthetic construct
  source 1..20: mol_type = other DNA
atttagtgccaatggtggtg

SEQ ID NO: 241958 - DNA, 20 bp, synthetic construct
  source 1..20: mol_type = other DNA
tatttagtgccaatggtggt

SEQ ID NO: 241959 - DNA, 20 bp, synthetic construct
  source 1..20: mol_type = other DNA
ttatttagtgccaatggtgg

SEQ ID NO: 241960 - DNA, 20 bp, synthetic construct
  source 1..20: mol_type = other DNA
tttatttagtgccaatggtg

SEQ ID NO: 241961 - DNA, 20 bp, synthetic construct
  source 1..20: mol_type = other DNA
ttttatttagtgccaatggt

SEQ ID NO: 241962 - DNA, 20 bp, synthetic construct
  source 1..20: mol_type = other DNA
attttatttagtgccaatgg

SEQ ID NO: 241963 - DNA, 20 bp, synthetic construct
  source 1..20: mol_type = other DNA
tattttatttagtgccaatg

SEQ ID NO: 241964 - DNA, 20 bp, synthetic construct
  source 1..20: mol_type = other DNA
ttattttatttagtgccaat

SEQ ID NO: 241965 - DNA, 20 bp, synthetic construct
  source 1..20: mol_type = other DNA
tttattttatttagtgccaa

SEQ ID NO: 241966 - DNA, 20 bp, synthetic construct
  source 1..20: mol_type = other DNA
ttttattttatttagtgcca

SEQ ID NO: 241967 - DNA, 20 bp, synthetic construct
  source 1..20: mol_type = other DNA
attttattttatttagtgcc

SEQ ID NO: 241968 - DNA, 20 bp, synthetic construct
  source 1..20: mol_type = other DNA
tattttattttatttagtgc

SEQ ID NO: 241969 - DNA, 20 bp, synthetic construct
  source 1..20: mol_type = other DNA
gtattttattttatttagtg

SEQ ID NO: 241970 - DNA, 20 bp, synthetic construct
  source 1..20: mol_type = other DNA
agtattttattttatttagt

SEQ ID NO: 241971 - DNA, 20 bp, synthetic construct
  source 1..20: mol_type = other DNA
gagtattttattttatttag

SEQ ID NO: 241972 - DNA, 20 bp, synthetic construct
  source 1..20: mol_type = other DNA
tgagtattttattttattta

SEQ ID NO: 241973 - DNA, 20 bp, synthetic construct
  source 1..20: mol_type = other DNA
ttgagtattttattttattt

SEQ ID NO: 241974 - DNA, 20 bp, synthetic construct
  source 1..20: mol_type = other DNA
cttgagtattttattttatt

SEQ ID NO: 241975 - DNA, 20 bp, synthetic construct
  source 1..20: mol_type = other DNA
acttgagtattttattttat

SEQ ID NO: 241976 - DNA, 20 bp, synthetic construct
  source 1..20: mol_type = other DNA
aacttgagtattttatttta

SEQ ID NO: 241977 - DNA, 20 bp, synthetic construct
  source 1..20: mol_type = other DNA
gaacttgagtattttatttt

SEQ ID NO: 241978 - DNA, 20 bp, synthetic construct
  source 1..20: mol_type = other DNA
ggaacttgagtattttattt

SEQ ID NO: 241979 - DNA, 20 bp, synthetic construct
  source 1..20: mol_type = other DNA
aggaacttgagtattttatt

SEQ ID NO: 241980 - DNA, 20 bp, synthetic construct
  source 1..20: mol_type = other DNA
caggaacttgagtattttat

SEQ ID NO: 241981 - DNA, 20 bp, synthetic construct
  source 1..20: mol_type = other DNA
gcaggaacttgagtatttta

SEQ ID NO: 241982 - DNA, 20 bp, synthetic construct
  source 1..20: mol_type = other DNA
agcaggaacttgagtatttt

SEQ ID NO: 241983 - DNA, 20 bp, synthetic construct
  source 1..20: mol_type = other DNA
cagcaggaacttgagtattt

SEQ ID NO: 241984 - DNA, 20 bp, synthetic construct
  source 1..20: mol_type = other DNA
ccagcaggaacttgagtatt

SEQ ID NO: 241985 - DNA, 20 bp, synthetic construct
  source 1..20: mol_type = other DNA
accagcaggaacttgagtat

SEQ ID NO: 241986 - DNA, 20 bp, synthetic construct
  source 1..20: mol_type = other DNA
caccagcaggaacttgagta

SEQ ID NO: 241987 - DNA, 20 bp, synthetic construct
  source 1..20: mol_type = other DNA
tcaccagcaggaacttgagt

SEQ ID NO: 241988 - DNA, 20 bp, synthetic construct
  source 1..20: mol_type = other DNA
ctcaccagcaggaacttgag

SEQ ID NO: 241989 - DNA, 20 bp, synthetic construct
  source 1..20: mol_type = other DNA
gctcaccagcaggaacttga

SEQ ID NO: 241990 - DNA, 20 bp, synthetic construct
  source 1..20: mol_type = other DNA
tgctcaccagcaggaacttg

SEQ ID NO: 241991 - DNA, 20 bp, synthetic construct
  source 1..20: mol_type = other DNA
atgctcaccagcaggaactt

SEQ ID NO: 241992 - DNA, 20 bp, synthetic construct
  source 1..20: mol_type = other DNA
catgctcaccagcaggaact

SEQ ID NO: 241993 - DNA, 20 bp, synthetic construct
  source 1..20: mol_type = other DNA
tcatgctcaccagcaggaac

SEQ ID NO: 241994 - DNA, 20 bp, synthetic construct
  source 1..20: mol_type = other DNA
ctcatgctcaccagcaggaa

SEQ ID NO: 241995 - DNA, 20 bp, synthetic construct
  source 1..20: mol_type = other DNA
gctcatgctcaccagcagga

SEQ ID NO: 241996 - DNA, 20 bp, synthetic construct
  source 1..20: mol_type = other DNA
tgctcatgctcaccagcagg

SEQ ID NO: 241997 - DNA, 20 bp, synthetic construct
  source 1..20: mol_type = other DNA
ctgctcatgctcaccagcag

SEQ ID NO: 241998 - DNA, 20 bp, synthetic construct
  source 1..20: mol_type = other DNA
actgctcatgctcaccagca

SEQ ID NO: 241999 - DNA, 20 bp, synthetic construct
  source 1..20: mol_type = other DNA
cactgctcatgctcaccagc

SEQ ID NO: 242000 - DNA, 20 bp, synthetic construct
  source 1..20: mol_type = other DNA
gcactgctcatgctcaccag

SEQ ID NO: 242001 - DNA, 20 bp, synthetic construct
  source 1..20: mol_type = other DNA
agcactgctcatgctcacca

SEQ ID NO: 242002 - DNA, 20 bp, synthetic construct
  source 1..20: mol_type = other DNA
tagcactgctcatgctcacc

SEQ ID NO: 242003 - DNA, 20 bp, synthetic construct
  source 1..20: mol_type = other DNA
gtagcactgctcatgctcac

SEQ ID NO: 242004 - DNA, 20 bp, synthetic construct
  source 1..20: mol_type = other DNA
tgtagcactgctcatgctca

SEQ ID NO: 242005 - DNA, 20 bp, synthetic construct
  source 1..20: mol_type = other DNA
gtgtagcactgctcatgctc

SEQ ID NO: 242006 - DNA, 20 bp, synthetic construct
  source 1..20: mol_type = other DNA
agtgtagcactgctcatgct

SEQ ID NO: 242007 - DNA, 20 bp, synthetic construct
  source 1..20: mol_type = other DNA
cagtgtagcactgctcatgc

SEQ ID NO: 242008 - DNA, 20 bp, synthetic construct
  source 1..20: mol_type = other DNA
ccagtgtagcactgctcatg

SEQ ID NO: 242009 - DNA, 20 bp, synthetic construct
  source 1..20: mol_type = other DNA
cccagtgtagcactgctcat

SEQ ID NO: 242010 - DNA, 20 bp, synthetic construct
  source 1..20: mol_type = other DNA
gcccagtgtagcactgctca

SEQ ID NO: 242011 - DNA, 20 bp, synthetic construct
  source 1..20: mol_type = other DNA
ggcccagtgtagcactgctc

SEQ ID NO: 242012 - DNA, 20 bp, synthetic construct
  source 1..20: mol_type = other DNA
gggcccagtgtagcactgct

SEQ ID NO: 242013 - DNA, 20 bp, synthetic construct
  source 1..20: mol_type = other DNA
agggcccagtgtagcactgc

SEQ ID NO: 242014 - DNA, 20 bp, synthetic construct
  source 1..20: mol_type = other DNA
aagggcccagtgtagcactg

SEQ ID NO: 242015 - DNA, 20 bp, synthetic construct
  source 1..20: mol_type = other DNA
gaagggcccagtgtagcact

SEQ ID NO: 242016 - DNA, 20 bp, synthetic construct
  source 1..20: mol_type = other DNA
tgaagggcccagtgtagcac

SEQ ID NO: 242017 - DNA, 20 bp, synthetic construct
  source 1..20: mol_type = other DNA
ttgaagggcccagtgtagca

SEQ ID NO: 242018 - DNA, 20 bp, synthetic construct
  source 1..20: mol_type = other DNA
gttgaagggcccagtgtagc

SEQ ID NO: 242019 - DNA, 20 bp, synthetic construct
  source 1..20: mol_type = other DNA
ggttgaagggcccagtgtag

SEQ ID NO: 242020 - DNA, 20 bp, synthetic construct
  source 1..20: mol_type = other DNA
tggttgaagggcccagtgta

SEQ ID NO: 242021 - DNA, 20 bp, synthetic construct
  source 1..20: mol_type = other DNA
ttggttgaagggcccagtgt

SEQ ID NO: 242022 - DNA, 20 bp, synthetic construct
  source 1..20: mol_type = other DNA
cttggttgaagggcccagtg

SEQ ID NO: 242023 - DNA, 20 bp, synthetic construct
  source 1..20: mol_type = other DNA
ccttggttgaagggcccagt

SEQ ID NO: 242024 - DNA, 20 bp, synthetic construct
  source 1..20: mol_type = other DNA
accttggttgaagggcccag

SEQ ID NO: 242025 - DNA, 20 bp, synthetic construct
  source 1..20: mol_type = other DNA
caccttggttgaagggccca

SEQ ID NO: 242026 - DNA, 20 bp, synthetic construct
  source 1..20: mol_type = other DNA
tcaccttggttgaagggccc

SEQ ID NO: 242027 - DNA, 20 bp, synthetic construct
  source 1..20: mol_type = other DNA
gtcaccttggttgaagggcc

SEQ ID NO: 242028 - DNA, 20 bp, synthetic construct
  source 1..20: mol_type = other DNA
tgtcaccttggttgaagggc

SEQ ID NO: 242029 - DNA, 20 bp, synthetic construct
  source 1..20: mol_type = other DNA
atgtcaccttggttgaaggg

SEQ ID NO: 242030 - DNA, 20 bp, synthetic construct
  source 1..20: mol_type = other DNA
catgtcaccttggttgaagg

SEQ ID NO: 242031 - DNA, 20 bp, synthetic construct
  source 1..20: mol_type = other DNA
tcatgtcaccttggttgaag

SEQ ID NO: 242032 - DNA, 20 bp, synthetic construct
  source 1..20: mol_type = other DNA
atcatgtcaccttggttgaa

SEQ ID NO: 242033 - DNA, 20 bp, synthetic construct
  source 1..20: mol_type = other DNA
tatcatgtcaccttggttga

SEQ ID NO: 242034 - DNA, 20 bp, synthetic construct
  source 1..20: mol_type = other DNA
ttatcatgtcaccttggttg

SEQ ID NO: 242035 - DNA, 20 bp, synthetic construct
  source 1..20: mol_type = other DNA
attatcatgtcaccttggtt

SEQ ID NO: 242036 - DNA, 20 bp, synthetic construct
  source 1..20: mol_type = other DNA
cattatcatgtcaccttggt

SEQ ID NO: 242037 - DNA, 20 bp, synthetic construct
  source 1..20: mol_type = other DNA
tcattatcatgtcaccttgg

SEQ ID NO: 242038 - DNA, 20 bp, synthetic construct
  source 1..20: mol_type = other DNA
gtcattatcatgtcaccttg

SEQ ID NO: 242039 - DNA, 20 bp, synthetic construct
  source 1..20: mol_type = other DNA
agtcattatcatgtcacctt

SEQ ID NO: 242040 - DNA, 20 bp, synthetic construct
  source 1..20: mol_type = other DNA
cagtcattatcatgtcacct

SEQ ID NO: 242041 - DNA, 20 bp, synthetic construct
  source 1..20: mol_type = other DNA
tcagtcattatcatgtcacc

SEQ ID NO: 242042 - DNA, 20 bp, synthetic construct
  source 1..20: mol_type = other DNA
ttcagtcattatcatgtcac

SEQ ID NO: 242043 - DNA, 20 bp, synthetic construct
  source 1..20: mol_type = other DNA
tttcagtcattatcatgtca

SEQ ID NO: 242044 - DNA, 20 bp, synthetic construct
  source 1..20: mol_type = other DNA
ttttcagtcattatcatgtc

SEQ ID NO: 242045 - DNA, 20 bp, synthetic construct
  source 1..20: mol_type = other DNA
attttcagtcattatcatgt

SEQ ID NO: 242046 - DNA, 20 bp, synthetic construct
  source 1..20: mol_type = other DNA
tattttcagtcattatcatg

SEQ ID NO: 242047 - DNA, 20 bp, synthetic construct
  source 1..20: mol_type = other DNA
ttattttcagtcattatcat

SEQ ID NO: 242048 - DNA, 20 bp, synthetic construct
  source 1..20: mol_type = other DNA
attattttcagtcattatca

SEQ ID NO: 242049 - DNA, 20 bp, synthetic construct
  source 1..20: mol_type = other DNA
gattattttcagtcattatc

SEQ ID NO: 242050 - DNA, 20 bp, synthetic construct
  source 1..20: mol_type = other DNA
tgattattttcagtcattat

SEQ ID NO: 242051 - DNA, 20 bp, synthetic construct
  source 1..20: mol_type = other DNA
gtgattattttcagtcatta

SEQ ID NO: 242052 - DNA, 20 bp, synthetic construct
  source 1..20: mol_type = other DNA
agtgattattttcagtcatt

SEQ ID NO: 242053 - DNA, 20 bp, synthetic construct
  source 1..20: mol_type = other DNA
cagtgattattttcagtcat

SEQ ID NO: 242054 - DNA, 20 bp, synthetic construct
  source 1..20: mol_type = other DNA
gcagtgattattttcagtca

SEQ ID NO: 242055 - DNA, 20 bp, synthetic construct
  source 1..20: mol_type = other DNA
ggcagtgattattttcagtc

SEQ ID NO: 242056 - DNA, 20 bp, synthetic construct
  source 1..20: mol_type = other DNA
tggcagtgattattttcagt

SEQ ID NO: 242057 - DNA, 20 bp, synthetic construct
  source 1..20: mol_type = other DNA
gtggcagtgattattttcag

SEQ ID NO: 242058 - DNA, 20 bp, synthetic construct
  source 1..20: mol_type = other DNA
agtggcagtgattattttca

SEQ ID NO: 242059 - DNA, 20 bp, synthetic construct
  source 1..20: mol_type = other DNA
aagtggcagtgattattttc

SEQ ID NO: 242060 - DNA, 20 bp, synthetic construct
  source 1..20: mol_type = other DNA
taagtggcagtgattatttt

SEQ ID NO: 242061 - DNA, 20 bp, synthetic construct
  source 1..20: mol_type = other DNA
ataagtggcagtgattattt

SEQ ID NO: 242062 - DNA, 20 bp, synthetic construct
  source 1..20: mol_type = other DNA
aataagtggcagtgattatt

SEQ ID NO: 242063 - DNA, 20 bp, synthetic construct
  source 1..20: mol_type = other DNA
caataagtggcagtgattat

SEQ ID NO: 242064 - DNA, 20 bp, synthetic construct
  source 1..20: mol_type = other DNA
ccaataagtggcagtgatta

SEQ ID NO: 242065 - DNA, 20 bp, synthetic construct
  source 1..20: mol_type = other DNA
cccaataagtggcagtgatt

SEQ ID NO: 242066 - DNA, 20 bp, synthetic construct
  source 1..20: mol_type = other DNA
ccccaataagtggcagtgat

SEQ ID NO: 242067 - DNA, 20 bp, synthetic construct
  source 1..20: mol_type = other DNA
tccccaataagtggcagtga

SEQ ID NO: 242068 - DNA, 20 bp, synthetic construct
  source 1..20: mol_type = other DNA
gtccccaataagtggcagtg

SEQ ID NO: 242069 - DNA, 20 bp, synthetic construct
  source 1..20: mol_type = other DNA
cgtccccaataagtggcagt

SEQ ID NO: 242070 - DNA, 20 bp, synthetic construct
  source 1..20: mol_type = other DNA
acgtccccaataagtggcag

SEQ ID NO: 242071 - DNA, 20 bp, synthetic construct
  source 1..20: mol_type = other DNA
gacgtccccaataagtggca

SEQ ID NO: 242072 - DNA, 20 bp, synthetic construct
  source 1..20: mol_type = other DNA
agacgtccccaataagtggc

SEQ ID NO: 242073 - DNA, 20 bp, synthetic construct
  source 1..20: mol_type = other DNA
gagacgtccccaataagtgg

SEQ ID NO: 242074 - DNA, 20 bp, synthetic construct
  source 1..20: mol_type = other DNA
tgagacgtccccaataagtg

SEQ ID NO: 242075 - DNA, 20 bp, synthetic construct
  source 1..20: mol_type = other DNA
atgagacgtccccaataagt

SEQ ID NO: 242076 - DNA, 20 bp, synthetic construct
  source 1..20: mol_type = other DNA
gatgagacgtccccaataag

SEQ ID NO: 242077 - DNA, 20 bp, synthetic construct
  source 1..20: mol_type = other DNA
agatgagacgtccccaataa

SEQ ID NO: 242078 - DNA, 20 bp, synthetic construct
  source 1..20: mol_type = other DNA
cagatgagacgtccccaata

SEQ ID NO: 242079 - DNA, 20 bp, synthetic construct
  source 1..20: mol_type = other DNA
gcagatgagacgtccccaat

SEQ ID NO: 242080 - DNA, 20 bp, synthetic construct
  source 1..20: mol_type = other DNA
ggcagatgagacgtccccaa

SEQ ID NO: 242081 - DNA, 20 bp, synthetic construct
  source 1..20: mol_type = other DNA
tggcagatgagacgtcccca

SEQ ID NO: 242082 - DNA, 20 bp, synthetic construct
  source 1..20: mol_type = other DNA
ctggcagatgagacgtcccc

SEQ ID NO: 242083 - DNA, 20 bp, synthetic construct
  source 1..20: mol_type = other DNA
cctggcagatgagacgtccc

SEQ ID NO: 242084 - DNA, 20 bp, synthetic construct
  source 1..20: mol_type = other DNA
gcctggcagatgagacgtcc

SEQ ID NO: 242085 - DNA, 20 bp, synthetic construct
  source 1..20: mol_type = other DNA
tgcctggcagatgagacgtc

SEQ ID NO: 242086 - DNA, 20 bp, synthetic construct
  source 1..20: mol_type = other DNA
atgcctggcagatgagacgt

SEQ ID NO: 242087 - DNA, 20 bp, synthetic construct
  source 1..20: mol_type = other DNA
catgcctggcagatgagacg

SEQ ID NO: 242088 - DNA, 20 bp, synthetic construct
  source 1..20: mol_type = other DNA
ccatgcctggcagatgagac

SEQ ID NO: 242089 - DNA, 20 bp, synthetic construct
  source 1..20: mol_type = other DNA
accatgcctggcagatgaga

SEQ ID NO: 242090 - DNA, 20 bp, synthetic construct
  source 1..20: mol_type = other DNA
taccatgcctggcagatgag

SEQ ID NO: 242091 - DNA, 20 bp, synthetic construct
  source 1..20: mol_type = other DNA
gtaccatgcctggcagatga

SEQ ID NO: 242092 - DNA, 20 bp, synthetic construct
  source 1..20: mol_type = other DNA
tgtaccatgcctggcagatg

SEQ ID NO: 242093 - DNA, 20 bp, synthetic construct
  source 1..20: mol_type = other DNA
ttgtaccatgcctggcagat

SEQ ID NO: 242094 - DNA, 20 bp, synthetic construct
  source 1..20: mol_type = other DNA
tttgtaccatgcctggcaga

SEQ ID NO: 242095 - DNA, 20 bp, synthetic construct
  source 1..20: mol_type = other DNA
ctttgtaccatgcctggcag

SEQ ID NO: 242096 - DNA, 20 bp, synthetic construct
  source 1..20: mol_type = other DNA
actttgtaccatgcctggca

SEQ ID NO: 242097 - DNA, 20 bp, synthetic construct
  source 1..20: mol_type = other DNA
cactttgtaccatgcctggc

SEQ ID NO: 242098 - DNA, 20 bp, synthetic construct
  source 1..20: mol_type = other DNA
gcactttgtaccatgcctgg

SEQ ID NO: 242099 - DNA, 20 bp, synthetic construct
  source 1..20: mol_type = other DNA
agcactttgtaccatgcctg

SEQ ID NO: 242100 - DNA, 20 bp, synthetic construct
  source 1..20: mol_type = other DNA
aagcactttgtaccatgcct

SEQ ID NO: 242101 - DNA, 20 bp, synthetic construct
  source 1..20: mol_type = other DNA
aaagcactttgtaccatgcc

SEQ ID NO: 242102 - DNA, 20 bp, synthetic construct
  source 1..20: mol_type = other DNA
taaagcactttgtaccatgc

SEQ ID NO: 242103 - DNA, 20 bp, synthetic construct
  source 1..20: mol_type = other DNA
ttaaagcactttgtaccatg

SEQ ID NO: 242104 - DNA, 20 bp, synthetic construct
  source 1..20: mol_type = other DNA
tttaaagcactttgtaccat

SEQ ID NO: 242105 - DNA, 20 bp, synthetic construct
  source 1..20: mol_type = other DNA
atttaaagcactttgtacca

SEQ ID NO: 242106 - DNA, 20 bp, synthetic construct
  source 1..20: mol_type = other DNA
tatttaaagcactttgtacc

SEQ ID NO: 242107 - DNA, 20 bp, synthetic construct
  source 1..20: mol_type = other DNA
ttatttaaagcactttgtac

SEQ ID NO: 242108 - DNA, 20 bp, synthetic construct
  source 1..20: mol_type = other DNA
cttatttaaagcactttgta

SEQ ID NO: 242109 - DNA, 20 bp, synthetic construct
  source 1..20: mol_type = other DNA
gcttatttaaagcactttgt

SEQ ID NO: 242110 - DNA, 20 bp, synthetic construct
  source 1..20: mol_type = other DNA
tgcttatttaaagcactttg

SEQ ID NO: 242111 - DNA, 20 bp, synthetic construct
  source 1..20: mol_type = other DNA
atgcttatttaaagcacttt

SEQ ID NO: 242112 - DNA, 20 bp, synthetic construct
  source 1..20: mol_type = other DNA
aatgcttatttaaagcactt

SEQ ID NO: 242113 - DNA, 20 bp, synthetic construct
  source 1..20: mol_type = other DNA
gaatgcttatttaaagcact

SEQ ID NO: 242114 - DNA, 20 bp, synthetic construct
  source 1..20: mol_type = other DNA
tgaatgcttatttaaagcac

SEQ ID NO: 242115 - DNA, 20 bp, synthetic construct
  source 1..20: mol_type = other DNA
ttgaatgcttatttaaagca

SEQ ID NO: 242116 - DNA, 20 bp, synthetic construct
  source 1..20: mol_type = other DNA
gttgaatgcttatttaaagc

SEQ ID NO: 242117 - DNA, 20 bp, synthetic construct
  source 1..20: mol_type = other DNA
tgttgaatgcttatttaaag

SEQ ID NO: 242118 - DNA, 20 bp, synthetic construct
  source 1..20: mol_type = other DNA
ttgttgaatgcttatttaaa

SEQ ID NO: 242119 - DNA, 20 bp, synthetic construct
  source 1..20: mol_type = other DNA
attgttgaatgcttatttaa

SEQ ID NO: 242120 - DNA, 20 bp, synthetic construct
  source 1..20: mol_type = other DNA
aattgttgaatgcttattta

SEQ ID NO: 242121 - DNA, 20 bp, synthetic construct
  source 1..20: mol_type = other DNA
aaattgttgaatgcttattt

SEQ ID NO: 242122 - DNA, 20 bp, synthetic construct
  source 1..20: mol_type = other DNA
gaaattgttgaatgcttatt

SEQ ID NO: 242123 - DNA, 20 bp, synthetic construct
  source 1..20: mol_type = other DNA
tgaaattgttgaatgcttat

SEQ ID NO: 242124 - DNA, 20 bp, synthetic construct
  source 1..20: mol_type = other DNA
atgaaattgttgaatgctta

SEQ ID NO: 242125 - DNA, 20 bp, synthetic construct
  source 1..20: mol_type = other DNA
catgaaattgttgaatgctt

SEQ ID NO: 242126 - DNA, 20 bp, synthetic construct
  source 1..20: mol_type = other DNA
gcatgaaattgttgaatgct

SEQ ID NO: 242127 - DNA, 20 bp, synthetic construct
  source 1..20: mol_type = other DNA
agcatgaaattgttgaatgc

SEQ ID NO: 242128 - DNA, 20 bp, synthetic construct
  source 1..20: mol_type = other DNA
cagcatgaaattgttgaatg

SEQ ID NO: 242129 - DNA, 20 bp, synthetic construct
  source 1..20: mol_type = other DNA
tcagcatgaaattgttgaat

SEQ ID NO: 242130 - DNA, 20 bp, synthetic construct
  source 1..20: mol_type = other DNA
gtcagcatgaaattgttgaa

SEQ ID NO: 242131 - DNA, 20 bp, synthetic construct
  source 1..20: mol_type = other DNA
tgtcagcatgaaattgttga

SEQ ID NO: 242132 - DNA, 20 bp, synthetic construct
  source 1..20: mol_type = other DNA
ctgtcagcatgaaattgttg

SEQ ID NO: 242133 - DNA, 20 bp, synthetic construct
  source 1..20: mol_type = other DNA
tctgtcagcatgaaattgtt

SEQ ID NO: 242134 - DNA, 20 bp, synthetic construct
  source 1..20: mol_type = other DNA
ttctgtcagcatgaaattgt

SEQ ID NO: 242135 - DNA, 20 bp, synthetic construct
  source 1..20: mol_type = other DNA
cttctgtcagcatgaaattg

SEQ ID NO: 242136 - DNA, 20 bp, synthetic construct
  source 1..20: mol_type = other DNA
gcttctgtcagcatgaaatt

SEQ ID NO: 242137 - DNA, 20 bp, synthetic construct
  source 1..20: mol_type = other DNA
ggcttctgtcagcatgaaat

SEQ ID NO: 242138 - DNA, 20 bp, synthetic construct
  source 1..20: mol_type = other DNA
gggcttctgtcagcatgaaa

SEQ ID NO: 242139 - DNA, 20 bp, synthetic construct
  source 1..20: mol_type = other DNA
agggcttctgtcagcatgaa

SEQ ID NO: 242140 - DNA, 20 bp, synthetic construct
  source 1..20: mol_type = other DNA
cagggcttctgtcagcatga

SEQ ID NO: 242141 - DNA, 20 bp, synthetic construct
  source 1..20: mol_type = other DNA
acagggcttctgtcagcatg

SEQ ID NO: 242142 - DNA, 20 bp, synthetic construct
  source 1..20: mol_type = other DNA
cacagggcttctgtcagcat

SEQ ID NO: 242143 - DNA, 20 bp, synthetic construct
  source 1..20: mol_type = other DNA
tcacagggcttctgtcagca

SEQ ID NO: 242144 - DNA, 20 bp, synthetic construct
  source 1..20: mol_type = other DNA
ctcacagggcttctgtcagc

SEQ ID NO: 242145 - DNA, 20 bp, synthetic construct
  source 1..20: mol_type = other DNA
gctcacagggcttctgtcag

SEQ ID NO: 242146 - DNA, 20 bp, synthetic construct
  source 1..20: mol_type = other DNA
ggctcacagggcttctgtca

SEQ ID NO: 242147 - DNA, 20 bp, synthetic construct
  source 1..20: mol_type = other DNA
tggctcacagggcttctgtc

SEQ ID NO: 242148 - DNA, 20 bp, synthetic construct
  source 1..20: mol_type = other DNA
ctggctcacagggcttctgt

SEQ ID NO: 242149 - DNA, 20 bp, synthetic construct
  source 1..20: mol_type = other DNA
actggctcacagggcttctg

SEQ ID NO: 242150 - DNA, 20 bp, synthetic construct
  source 1..20: mol_type = other DNA
cactggctcacagggcttct

SEQ ID NO: 242151 - DNA, 20 bp, synthetic construct
  source 1..20: mol_type = other DNA
ccactggctcacagggcttc

SEQ ID NO: 242152 - DNA, 20 bp, synthetic construct
  source 1..20: mol_type = other DNA
tccactggctcacagggctt

SEQ ID NO: 242153 - DNA, 20 bp, synthetic construct
  source 1..20: mol_type = other DNA
ctccactggctcacagggct

SEQ ID NO: 242154 - DNA, 20 bp, synthetic construct
  source 1..20: mol_type = other DNA
gctccactggctcacagggc

SEQ ID NO: 242155 - DNA, 20 bp, synthetic construct
  source 1..20: mol_type = other DNA
agctccactggctcacaggg

SEQ ID NO: 242156 - DNA, 20 bp, synthetic construct
  source 1..20: mol_type = other DNA
tagctccactggctcacagg

SEQ ID NO: 242157 - DNA, 20 bp, synthetic construct
  source 1..20: mol_type = other DNA
gtagctccactggctcacag

SEQ ID NO: 242158 - DNA, 20 bp, synthetic construct
  source 1..20: mol_type = other DNA
agtagctccactggctcaca

SEQ ID NO: 242159 - DNA, 20 bp, synthetic construct
  source 1..20: mol_type = other DNA
tagtagctccactggctcac

SEQ ID NO: 242160 - DNA, 20 bp, synthetic construct
  source 1..20: mol_type = other DNA
gtagtagctccactggctca

SEQ ID NO: 242161 - DNA, 20 bp, synthetic construct
  source 1..20: mol_type = other DNA
agtagtagctccactggctc

SEQ ID NO: 242162 - DNA, 20 bp, synthetic construct
  source 1..20: mol_type = other DNA
tagtagtagctccactggct

SEQ ID NO: 242163 - DNA, 20 bp, synthetic construct
  source 1..20: mol_type = other DNA
atagtagtagctccactggc

SEQ ID NO: 242164 - DNA, 20 bp, synthetic construct
  source 1..20: mol_type = other DNA
catagtagtagctccactgg

SEQ ID NO: 242165 - DNA, 20 bp, synthetic construct
  source 1..20: mol_type = other DNA
gcatagtagtagctccactg

SEQ ID NO: 242166 - DNA, 20 bp, synthetic construct
  source 1..20: mol_type = other DNA
ggcatagtagtagctccact

SEQ ID NO: 242167 - DNA, 20 bp, synthetic construct
  source 1..20: mol_type = other DNA
gggcatagtagtagctccac

SEQ ID NO: 242168 - DNA, 20 bp, synthetic construct
  source 1..20: mol_type = other DNA
tgggcatagtagtagctcca

SEQ ID NO: 242169 - DNA, 20 bp, synthetic construct
  source 1..20: mol_type = other DNA
atgggcatagtagtagctcc

SEQ ID NO: 242170 - DNA, 20 bp, synthetic construct
  source 1..20: mol_type = other DNA
aatgggcatagtagtagctc

SEQ ID NO: 242171 - DNA, 20 bp, synthetic construct
  source 1..20: mol_type = other DNA
taatgggcatagtagtagct

SEQ ID NO: 242172 - DNA, 20 bp, synthetic construct
  source 1..20: mol_type = other DNA
ataatgggcatagtagtagc

SEQ ID NO: 242173 - DNA, 20 bp, synthetic construct
  source 1..20: mol_type = other DNA
tataatgggcatagtagtag

SEQ ID NO: 242174 - DNA, 20 bp, synthetic construct
  source 1..20: mol_type = other DNA
gtataatgggcatagtagta

SEQ ID NO: 242175 - DNA, 20 bp, synthetic construct
  source 1..20: mol_type = other DNA
tgtataatgggcatagtagt

SEQ ID NO: 242176 - DNA, 20 bp, synthetic construct
  source 1..20: mol_type = other DNA
ctgtataatgggcatagtag

SEQ ID NO: 242177 - DNA, 20 bp, synthetic construct
  source 1..20: mol_type = other DNA
cctgtataatgggcatagta

SEQ ID NO: 242178 - DNA, 20 bp, synthetic construct
  source 1..20: mol_type = other DNA
ccctgtataatgggcatagt

SEQ ID NO: 242179 - DNA, 20 bp, synthetic construct
  source 1..20: mol_type = other DNA
cccctgtataatgggcatag

SEQ ID NO: 242180 - DNA, 20 bp, synthetic construct
  source 1..20: mol_type = other DNA
tcccctgtataatgggcata

SEQ ID NO: 242181 - DNA, 20 bp, synthetic construct
  source 1..20: mol_type = other DNA
ctcccctgtataatgggcat

SEQ ID NO: 242182 - DNA, 20 bp, synthetic construct
  source 1..20: mol_type = other DNA
tctcccctgtataatgggca

SEQ ID NO: 242183 - DNA, 20 bp, synthetic construct
  source 1..20: mol_type = other DNA
ttctcccctgtataatgggc

SEQ ID NO: 242184 - DNA, 20 bp, synthetic construct
  source 1..20: mol_type = other DNA
tttctcccctgtataatggg

SEQ ID NO: 242185 - DNA, 20 bp, synthetic construct
  source 1..20: mol_type = other DNA
ttttctcccctgtataatgg

SEQ ID NO: 242186 - DNA, 20 bp, synthetic construct
  source 1..20: mol_type = other DNA
gttttctcccctgtataatg

SEQ ID NO: 242187 - DNA, 20 bp, synthetic construct
  source 1..20: mol_type = other DNA
agttttctcccctgtataat

SEQ ID NO: 242188 - DNA, 20 bp, synthetic construct
  source 1..20: mol_type = other DNA
cagttttctcccctgtataa

SEQ ID NO: 242189 - DNA, 20 bp, synthetic construct
  source 1..20: mol_type = other DNA
tcagttttctcccctgtata

SEQ ID NO: 242190 - DNA, 20 bp, synthetic construct
  source 1..20: mol_type = other DNA
ctcagttttctcccctgtat

SEQ ID NO: 242191 - DNA, 20 bp, synthetic construct
  source 1..20: mol_type = other DNA
cctcagttttctcccctgta

SEQ ID NO: 242192 - DNA, 20 bp, synthetic construct
  source 1..20: mol_type = other DNA
gcctcagttttctcccctgt

SEQ ID NO: 242193 - DNA, 20 bp, synthetic construct
  source 1..20: mol_type = other DNA
tgcctcagttttctcccctg

SEQ ID NO: 242194 - DNA, 20 bp, synthetic construct
  source 1..20: mol_type = other DNA
ctgcctcagttttctcccct

SEQ ID NO: 242195 - DNA, 20 bp, synthetic construct
  source 1..20: mol_type = other DNA
tctgcctcagttttctcccc

SEQ ID NO: 242196 - DNA, 20 bp, synthetic construct
  source 1..20: mol_type = other DNA
ctctgcctcagttttctccc

SEQ ID NO: 242197 - DNA, 20 bp, synthetic construct
  source 1..20: mol_type = other DNA
tctctgcctcagttttctcc

SEQ ID NO: 242198 - DNA, 20 bp, synthetic construct
  source 1..20: mol_type = other DNA
ctctctgcctcagttttctc

SEQ ID NO: 242199 - DNA, 20 bp, synthetic construct
  source 1..20: mol_type = other DNA
tctctctgcctcagttttct

SEQ ID NO: 242200 - DNA, 20 bp, synthetic construct
  source 1..20: mol_type = other DNA
ctctctctgcctcagttttc

SEQ ID NO: 242201 - DNA, 20 bp, synthetic construct
  source 1..20: mol_type = other DNA
cctctctctgcctcagtttt

SEQ ID NO: 242202 - DNA, 20 bp, synthetic construct
  source 1..20: mol_type = other DNA
acctctctctgcctcagttt

SEQ ID NO: 242203 - DNA, 20 bp, synthetic construct
  source 1..20: mol_type = other DNA
aacctctctctgcctcagtt

SEQ ID NO: 242204 - DNA, 20 bp, synthetic construct
  source 1..20: mol_type = other DNA
taacctctctctgcctcagt

SEQ ID NO: 242205 - DNA, 20 bp, synthetic construct
  source 1..20: mol_type = other DNA
ctaacctctctctgcctcag

SEQ ID NO: 242206 - DNA, 20 bp, synthetic construct
  source 1..20: mol_type = other DNA
cctaacctctctctgcctca

SEQ ID NO: 242207 - DNA, 20 bp, synthetic construct
  source 1..20: mol_type = other DNA
acctaacctctctctgcctc

SEQ ID NO: 242208 - DNA, 20 bp, synthetic construct
  source 1..20: mol_type = other DNA
tacctaacctctctctgcct

SEQ ID NO: 242209 - DNA, 20 bp, synthetic construct
  source 1..20: mol_type = other DNA
ttacctaacctctctctgcc

SEQ ID NO: 242210 - DNA, 20 bp, synthetic construct
  source 1..20: mol_type = other DNA
attacctaacctctctctgc

SEQ ID NO: 242211 - DNA, 20 bp, synthetic construct
  source 1..20: mol_type = other DNA
aattacctaacctctctctg

SEQ ID NO: 242212 - DNA, 20 bp, synthetic construct
  source 1..20: mol_type = other DNA
gaattacctaacctctctct

SEQ ID NO: 242213 - DNA, 20 bp, synthetic construct
  source 1..20: mol_type = other DNA
cgaattacctaacctctctc

SEQ ID NO: 242214 - DNA, 20 bp, synthetic construct
  source 1..20: mol_type = other DNA
gcgaattacctaacctctct

SEQ ID NO: 242215 - DNA, 20 bp, synthetic construct
  source 1..20: mol_type = other DNA
agcgaattacctaacctctc

SEQ ID NO: 242216 - DNA, 20 bp, synthetic construct
  source 1..20: mol_type = other DNA
gagcgaattacctaacctct

SEQ ID NO: 242217 - DNA, 20 bp, synthetic construct
  source 1..20: mol_type = other DNA
tgagcgaattacctaacctc

SEQ ID NO: 242218 - DNA, 20 bp, synthetic construct
  source 1..20: mol_type = other DNA
ctgagcgaattacctaacct

SEQ ID NO: 242219 - DNA, 20 bp, synthetic construct
  source 1..20: mol_type = other DNA
gctgagcgaattacctaacc

SEQ ID NO: 242220 - DNA, 20 bp, synthetic construct
  source 1..20: mol_type = other DNA
ggctgagcgaattacctaac

SEQ ID NO: 242221 - DNA, 20 bp, synthetic construct
  source 1..20: mol_type = other DNA
aggctgagcgaattacctaa

SEQ ID NO: 242222 - DNA, 20 bp, synthetic construct
  source 1..20: mol_type = other DNA
gaggctgagcgaattaccta

SEQ ID NO: 242223 - DNA, 20 bp, synthetic construct
  source 1..20: mol_type = other DNA
tgaggctgagcgaattacct

SEQ ID NO: 242224 - DNA, 20 bp, synthetic construct
  source 1..20: mol_type = other DNA
gtgaggctgagcgaattacc

SEQ ID NO: 242225 - DNA, 20 bp, synthetic construct
  source 1..20: mol_type = other DNA
tgtgaggctgagcgaattac

SEQ ID NO: 242226 - DNA, 20 bp, synthetic construct
  source 1..20: mol_type = other DNA
gtgtgaggctgagcgaatta

SEQ ID NO: 242227 - DNA, 20 bp, synthetic construct
  source 1..20: mol_type = other DNA
tgtgtgaggctgagcgaatt

SEQ ID NO: 242228 - DNA, 20 bp, synthetic construct
  source 1..20: mol_type = other DNA
ttgtgtgaggctgagcgaat

SEQ ID NO: 242229 - DNA, 20 bp, synthetic construct
  source 1..20: mol_type = other DNA
gttgtgtgaggctgagcgaa

SEQ ID NO: 242230 - DNA, 20 bp, synthetic construct
  source 1..20: mol_type = other DNA
ggttgtgtgaggctgagcga

SEQ ID NO: 242231 - DNA, 20 bp, synthetic construct
  source 1..20: mol_type = other DNA
tggttgtgtgaggctgagcg

SEQ ID NO: 242232 - DNA, 20 bp, synthetic construct
  source 1..20: mol_type = other DNA
ttggttgtgtgaggctgagc

SEQ ID NO: 242233 - DNA, 20 bp, synthetic construct
  source 1..20: mol_type = other DNA
attggttgtgtgaggctgag

SEQ ID NO: 242234 - DNA, 20 bp, synthetic construct
  source 1..20: mol_type = other DNA
tattggttgtgtgaggctga

SEQ ID NO: 242235 - DNA, 20 bp, synthetic construct
  source 1..20: mol_type = other DNA
ctattggttgtgtgaggctg

SEQ ID NO: 242236 - DNA, 20 bp, synthetic construct
  source 1..20: mol_type = other DNA
cctattggttgtgtgaggct

SEQ ID NO: 242237 - DNA, 20 bp, synthetic construct
  source 1..20: mol_type = other DNA
acctattggttgtgtgaggc

SEQ ID NO: 242238 - DNA, 20 bp, synthetic construct
  source 1..20: mol_type = other DNA
cacctattggttgtgtgagg

SEQ ID NO: 242239 - DNA, 20 bp, synthetic construct
  source 1..20: mol_type = other DNA
ccacctattggttgtgtgag

SEQ ID NO: 242240 - DNA, 20 bp, synthetic construct
  source 1..20: mol_type = other DNA
accacctattggttgtgtga

SEQ ID NO: 242241 - DNA, 20 bp, synthetic construct
  source 1..20: mol_type = other DNA
caccacctattggttgtgtg

SEQ ID NO: 242242 - DNA, 20 bp, synthetic construct
  source 1..20: mol_type = other DNA
ccaccacctattggttgtgt

SEQ ID NO: 242243 - DNA, 20 bp, synthetic construct
  source 1..20: mol_type = other DNA
tccaccacctattggttgtg

SEQ ID NO: 242244 - DNA, 20 bp, synthetic construct
  source 1..20: mol_type = other DNA
ctccaccacctattggttgt

SEQ ID NO: 242245 - DNA, 20 bp, synthetic construct
  source 1..20: mol_type = other DNA
gctccaccacctattggttg

SEQ ID NO: 242246 - DNA, 20 bp, synthetic construct
  source 1..20: mol_type = other DNA
ggctccaccacctattggtt

SEQ ID NO: 242247 - DNA, 20 bp, synthetic construct
  source 1..20: mol_type = other DNA
tggctccaccacctattggt

SEQ ID NO: 242248 - DNA, 20 bp, synthetic construct
  source 1..20: mol_type = other DNA
ctggctccaccacctattgg

SEQ ID NO: 242249 - DNA, 20 bp, synthetic construct
  source 1..20: mol_type = other DNA
cctggctccaccacctattg

SEQ ID NO: 242250 - DNA, 20 bp, synthetic construct
  source 1..20: mol_type = other DNA
tcctggctccaccacctatt

SEQ ID NO: 242251 - DNA, 20 bp, synthetic construct
  source 1..20: mol_type = other DNA
atcctggctccaccacctat

SEQ ID NO: 242252 - DNA, 20 bp, synthetic construct
  source 1..20: mol_type = other DNA
aatcctggctccaccaccta

SEQ ID NO: 242253 - DNA, 20 bp, synthetic construct
  source 1..20: mol_type = other DNA
aaatcctggctccaccacct

SEQ ID NO: 242254 - DNA, 20 bp, synthetic construct
  source 1..20: mol_type = other DNA
caaatcctggctccaccacc

SEQ ID NO: 242255 - DNA, 20 bp, synthetic construct
  source 1..20: mol_type = other DNA
ccaaatcctggctccaccac

SEQ ID NO: 242256 - DNA, 20 bp, synthetic construct
  source 1..20: mol_type = other DNA
cccaaatcctggctccacca

SEQ ID NO: 242257 - DNA, 20 bp, synthetic construct
  source 1..20: mol_type = other DNA
gcccaaatcctggctccacc

SEQ ID NO: 242258 - DNA, 20 bp, synthetic construct
  source 1..20: mol_type = other DNA
ggcccaaatcctggctccac

SEQ ID NO: 242259 - DNA, 20 bp, synthetic construct
  source 1..20: mol_type = other DNA
gggcccaaatcctggctcca

SEQ ID NO: 242260 - DNA, 20 bp, synthetic construct
  source 1..20: mol_type = other DNA
ggggcccaaatcctggctcc

SEQ ID NO: 242261 - DNA, 20 bp, synthetic construct
  source 1..20: mol_type = other DNA
tggggcccaaatcctggctc

SEQ ID NO: 242262 - DNA, 20 bp, synthetic construct
  source 1..20: mol_type = other DNA
atggggcccaaatcctggct

SEQ ID NO: 242263 - DNA, 20 bp, synthetic construct
  source 1..20: mol_type = other DNA
gatggggcccaaatcctggc

SEQ ID NO: 242264 - DNA, 20 bp, synthetic construct
  source 1..20: mol_type = other DNA
agatggggcccaaatcctgg

SEQ ID NO: 242265 - DNA, 20 bp, synthetic construct
  source 1..20: mol_type = other DNA
cagatggggcccaaatcctg

SEQ ID NO: 242266 - DNA, 20 bp, synthetic construct
  source 1..20: mol_type = other DNA
gcagatggggcccaaatcct

SEQ ID NO: 242267 - DNA, 20 bp, synthetic construct
  source 1..20: mol_type = other DNA
ggcagatggggcccaaatcc

SEQ ID NO: 242268 - DNA, 20 bp, synthetic construct
  source 1..20: mol_type = other DNA
aggcagatggggcccaaatc

SEQ ID NO: 242269 - DNA, 20 bp, synthetic construct
  source 1..20: mol_type = other DNA
caggcagatggggcccaaat

SEQ ID NO: 242270 - DNA, 20 bp, synthetic construct
  source 1..20: mol_type = other DNA
tcaggcagatggggcccaaa

SEQ ID NO: 242271 - DNA, 20 bp, synthetic construct
  source 1..20: mol_type = other DNA
gtcaggcagatggggcccaa

SEQ ID NO: 242272 - DNA, 20 bp, synthetic construct
  source 1..20: mol_type = other DNA
agtcaggcagatggggccca

SEQ ID NO: 242273 - DNA, 20 bp, synthetic construct
  source 1..20: mol_type = other DNA
gagtcaggcagatggggccc

SEQ ID NO: 242274 - DNA, 20 bp, synthetic construct
  source 1..20: mol_type = other DNA
agagtcaggcagatggggcc

SEQ ID NO: 242275 - DNA, 20 bp, synthetic construct
  source 1..20: mol_type = other DNA
gagagtcaggcagatggggc

SEQ ID NO: 242276 - DNA, 20 bp, synthetic construct
  source 1..20: mol_type = other DNA
agagagtcaggcagatgggg

SEQ ID NO: 242277 - DNA, 20 bp, synthetic construct
  source 1..20: mol_type = other DNA
tagagagtcaggcagatggg

SEQ ID NO: 242278 - DNA, 20 bp, synthetic construct
  source 1..20: mol_type = other DNA
ctagagagtcaggcagatgg

SEQ ID NO: 242279 - DNA, 20 bp, synthetic construct
  source 1..20: mol_type = other DNA
tctagagagtcaggcagatg

SEQ ID NO: 242280 - DNA, 20 bp, synthetic construct
  source 1..20: mol_type = other DNA
ctctagagagtcaggcagat

SEQ ID NO: 242281 - DNA, 20 bp, synthetic construct
  source 1..20: mol_type = other DNA
cctctagagagtcaggcaga

SEQ ID NO: 242282 - DNA, 20 bp, synthetic construct
  source 1..20: mol_type = other DNA
gcctctagagagtcaggcag

SEQ ID NO: 242283 - DNA, 20 bp, synthetic construct
  source 1..20: mol_type = other DNA
agcctctagagagtcaggca

SEQ ID NO: 242284 - DNA, 20 bp, synthetic construct
  source 1..20: mol_type = other DNA
gagcctctagagagtcaggc

SEQ ID NO: 242285 - DNA, 20 bp, synthetic construct
  source 1..20: mol_type = other DNA
agagcctctagagagtcagg

SEQ ID NO: 242286 - DNA, 20 bp, synthetic construct
  source 1..20: mol_type = other DNA
tagagcctctagagagtcag

SEQ ID NO: 242287 - DNA, 20 bp, synthetic construct
  source 1..20: mol_type = other DNA
atagagcctctagagagtca

SEQ ID NO: 242288 - DNA, 20 bp, synthetic construct
  source 1..20: mol_type = other DNA
gatagagcctctagagagtc

SEQ ID NO: 242289 - DNA, 20 bp, synthetic construct
  source 1..20: mol_type = other DNA
agatagagcctctagagagt

SEQ ID NO: 242290 - DNA, 20 bp, synthetic construct
  source 1..20: mol_type = other DNA
aagatagagcctctagagag

SEQ ID NO: 242291 - DNA, 20 bp, synthetic construct
  source 1..20: mol_type = other DNA
gaagatagagcctctagaga

SEQ ID NO: 242292 - DNA, 20 bp, synthetic construct
  source 1..20: mol_type = other DNA
ggaagatagagcctctagag

SEQ ID NO: 242293 - DNA, 20 bp, synthetic construct
  source 1..20: mol_type = other DNA
tggaagatagagcctctaga

SEQ ID NO: 242294 - DNA, 20 bp, synthetic construct
  source 1..20: mol_type = other DNA
ctggaagatagagcctctag

SEQ ID NO: 242295 - DNA, 20 bp, synthetic construct
  source 1..20: mol_type = other DNA
actggaagatagagcctcta

SEQ ID NO: 242296 - DNA, 20 bp, synthetic construct
  source 1..20: mol_type = other DNA
gactggaagatagagcctct

SEQ ID NO: 242297 - DNA, 20 bp, synthetic construct
  source 1..20: mol_type = other DNA
agactggaagatagagcctc

SEQ ID NO: 242298 - DNA, 20 bp, synthetic construct
  source 1..20: mol_type = other DNA
aagactggaagatagagcct

SEQ ID NO: 242299 - DNA, 20 bp, synthetic construct
  source 1..20: mol_type = other DNA
gaagactggaagatagagcc

SEQ ID NO: 242300 - DNA, 20 bp, synthetic construct
  source 1..20: mol_type = other DNA
ggaagactggaagatagagc

SEQ ID NO: 242301 - DNA, 20 bp, synthetic construct
  source 1..20: mol_type = other DNA
tggaagactggaagatagag

SEQ ID NO: 242302 - DNA, 20 bp, synthetic construct
  source 1..20: mol_type = other DNA
ctggaagactggaagataga

SEQ ID NO: 242303 - DNA, 20 bp, synthetic construct
  source 1..20: mol_type = other DNA
tctggaagactggaagatag

SEQ ID NO: 242304 - DNA, 20 bp, synthetic construct
  source 1..20: mol_type = other DNA
ctctggaagactggaagata

SEQ ID NO: 242305 - DNA, 20 bp, synthetic construct
  source 1..20: mol_type = other DNA
actctggaagactggaagat

SEQ ID NO: 242306 - DNA, 20 bp, synthetic construct
  source 1..20: mol_type = other DNA
aactctggaagactggaaga

SEQ ID NO: 242307 - DNA, 20 bp, synthetic construct
  source 1..20: mol_type = other DNA
caactctggaagactggaag

SEQ ID NO: 242308 - DNA, 20 bp, synthetic construct
  source 1..20: mol_type = other DNA
tcaactctggaagactggaa

SEQ ID NO: 242309 - DNA, 20 bp, synthetic construct
  source 1..20: mol_type = other DNA
ctcaactctggaagactgga

SEQ ID NO: 242310 - DNA, 20 bp, synthetic construct
  source 1..20: mol_type = other DNA
actcaactctggaagactgg

SEQ ID NO: 242311 - DNA, 20 bp, synthetic construct
  source 1..20: mol_type = other DNA
gactcaactctggaagactg

SEQ ID NO: 242312 - DNA, 20 bp, synthetic construct
  source 1..20: mol_type = other DNA
agactcaactctggaagact

SEQ ID NO: 242313 - DNA, 20 bp, synthetic construct
  source 1..20: mol_type = other DNA
tagactcaactctggaagac

SEQ ID NO: 242314 - DNA, 20 bp, synthetic construct
  source 1..20: mol_type = other DNA
ttagactcaactctggaaga

SEQ ID NO: 242315 - DNA, 20 bp, synthetic construct
  source 1..20: mol_type = other DNA
cttagactcaactctggaag

SEQ ID NO: 242316 - DNA, 20 bp, synthetic construct
  source 1..20: mol_type = other DNA
gcttagactcaactctggaa

SEQ ID NO: 242317 - DNA, 20 bp, synthetic construct
  source 1..20: mol_type = other DNA
ggcttagactcaactctgga

SEQ ID NO: 242318 - DNA, 20 bp, synthetic construct
  source 1..20: mol_type = other DNA
tggcttagactcaactctgg

SEQ ID NO: 242319 - DNA, 20 bp, synthetic construct
  source 1..20: mol_type = other DNA
atggcttagactcaactctg

SEQ ID NO: 242320 - DNA, 20 bp, synthetic construct
  source 1..20: mol_type = other DNA
catggcttagactcaactct

SEQ ID NO: 242321 - DNA, 20 bp, synthetic construct
  source 1..20: mol_type = other DNA
tcatggcttagactcaactc

SEQ ID NO: 242322 - DNA, 20 bp, synthetic construct
  source 1..20: mol_type = other DNA
ttcatggcttagactcaact

SEQ ID NO: 242323 - DNA, 20 bp, synthetic construct
  source 1..20: mol_type = other DNA
attcatggcttagactcaac

SEQ ID NO: 242324 - DNA, 20 bp, synthetic construct
  source 1..20: mol_type = other DNA
tattcatggcttagactcaa

SEQ ID NO: 242325 - DNA, 20 bp, synthetic construct
  source 1..20: mol_type = other DNA
ctattcatggcttagactca

SEQ ID NO: 242326 - DNA, 20 bp, synthetic construct
  source 1..20: mol_type = other DNA
cctattcatggcttagactc

SEQ ID NO: 242327 - DNA, 20 bp, synthetic construct
  source 1..20: mol_type = other DNA
tcctattcatggcttagact

SEQ ID NO: 242328 - DNA, 20 bp, synthetic construct
  source 1..20: mol_type = other DNA
gtcctattcatggcttagac

SEQ ID NO: 242329 - DNA, 20 bp, synthetic construct
  source 1..20: mol_type = other DNA
tgtcctattcatggcttaga

SEQ ID NO: 242330 - DNA, 20 bp, synthetic construct
  source 1..20: mol_type = other DNA
ttgtcctattcatggcttag

SEQ ID NO: 242331 - DNA, 20 bp, synthetic construct
  source 1..20: mol_type = other DNA
attgtcctattcatggctta

SEQ ID NO: 242332 - DNA, 20 bp, synthetic construct
  source 1..20: mol_type = other DNA
aattgtcctattcatggctt

SEQ ID NO: 242333 - DNA, 20 bp, synthetic construct
  source 1..20: mol_type = other DNA
taattgtcctattcatggct

SEQ ID NO: 242334 - DNA, 20 bp, synthetic construct
  source 1..20: mol_type = other DNA
ctaattgtcctattcatggc

SEQ ID NO: 242335 - DNA, 20 bp, synthetic construct
  source 1..20: mol_type = other DNA
tctaattgtcctattcatgg

SEQ ID NO: 242336 - DNA, 20 bp, synthetic construct
  source 1..20: mol_type = other DNA
gtctaattgtcctattcatg

SEQ ID NO: 242337 - DNA, 20 bp, synthetic construct
  source 1..20: mol_type = other DNA
tgtctaattgtcctattcat

SEQ ID NO: 242338 - DNA, 20 bp, synthetic construct
  source 1..20: mol_type = other DNA
ctgtctaattgtcctattca

SEQ ID NO: 242339 - DNA, 20 bp, synthetic construct
  source 1..20: mol_type = other DNA
gctgtctaattgtcctattc

SEQ ID NO: 242340 - DNA, 20 bp, synthetic construct
  source 1..20: mol_type = other DNA
tgctgtctaattgtcctatt

SEQ ID NO: 242341 - DNA, 20 bp, synthetic construct
  source 1..20: mol_type = other DNA
ctgctgtctaattgtcctat

SEQ ID NO: 242342 - DNA, 20 bp, synthetic construct
  source 1..20: mol_type = other DNA
tctgctgtctaattgtccta

SEQ ID NO: 242343 - DNA, 20 bp, synthetic construct
  source 1..20: mol_type = other DNA
ctctgctgtctaattgtcct

SEQ ID NO: 242344 - DNA, 20 bp, synthetic construct
  source 1..20: mol_type = other DNA
cctctgctgtctaattgtcc

SEQ ID NO: 242345 - DNA, 20 bp, synthetic construct
  source 1..20: mol_type = other DNA
tcctctgctgtctaattgtc

SEQ ID NO: 242346 - DNA, 20 bp, synthetic construct
  source 1..20: mol_type = other DNA
ttcctctgctgtctaattgt

SEQ ID NO: 242347 - DNA, 20 bp, synthetic construct
  source 1..20: mol_type = other DNA
tttcctctgctgtctaattg

SEQ ID NO: 242348 - DNA, 20 bp, synthetic construct
  source 1..20: mol_type = other DNA
gtttcctctgctgtctaatt

SEQ ID NO: 242349 - DNA, 20 bp, synthetic construct
  source 1..20: mol_type = other DNA
ggtttcctctgctgtctaat

SEQ ID NO: 242350 - DNA, 20 bp, synthetic construct
  source 1..20: mol_type = other DNA
gggtttcctctgctgtctaa

SEQ ID NO: 242351 - DNA, 20 bp, synthetic construct
  source 1..20: mol_type = other DNA
tgggtttcctctgctgtcta

SEQ ID NO: 242352 - DNA, 20 bp, synthetic construct
  source 1..20: mol_type = other DNA
atgggtttcctctgctgtct

SEQ ID NO: 242353 - DNA, 20 bp, synthetic construct
  source 1..20: mol_type = other DNA
aatgggtttcctctgctgtc

SEQ ID NO: 242354 - DNA, 20 bp, synthetic construct
  source 1..20: mol_type = other DNA
gaatgggtttcctctgctgt

SEQ ID NO: 242355 - DNA, 20 bp, synthetic construct
  source 1..20: mol_type = other DNA
tgaatgggtttcctctgctg

SEQ ID NO: 242356 - DNA, 20 bp, synthetic construct
  source 1..20: mol_type = other DNA
ctgaatgggtttcctctgct

SEQ ID NO: 242357 - DNA, 20 bp, synthetic construct
  source 1..20: mol_type = other DNA
gctgaatgggtttcctctgc

SEQ ID NO: 242358 - DNA, 20 bp, synthetic construct
  source 1..20: mol_type = other DNA
ggctgaatgggtttcctctg

SEQ ID NO: 242359 - DNA, 20 bp, synthetic construct
  source 1..20: mol_type = other DNA
tggctgaatgggtttcctct

SEQ ID NO: 242360 - DNA, 20 bp, synthetic construct
  source 1..20: mol_type = other DNA
gtggctgaatgggtttcctc

SEQ ID NO: 242361 - DNA, 20 bp, synthetic construct
  source 1..20: mol_type = other DNA
ggtggctgaatgggtttcct

SEQ ID NO: 242362 - DNA, 20 bp, synthetic construct
  source 1..20: mol_type = other DNA
tggtggctgaatgggtttcc

SEQ ID NO: 242363 - DNA, 20 bp, synthetic construct
  source 1..20: mol_type = other DNA
atggtggctgaatgggtttc

SEQ ID NO: 242364 - DNA, 20 bp, synthetic construct
  source 1..20: mol_type = other DNA
catggtggctgaatgggttt

SEQ ID NO: 242365 - DNA, 20 bp, synthetic construct
  source 1..20: mol_type = other DNA
acatggtggctgaatgggtt

SEQ ID NO: 242366 - DNA, 20 bp, synthetic construct
  source 1..20: mol_type = other DNA
cacatggtggctgaatgggt

SEQ ID NO: 242367 - DNA, 20 bp, synthetic construct
  source 1..20: mol_type = other DNA
gcacatggtggctgaatggg

SEQ ID NO: 242368 - DNA, 20 bp, synthetic construct
  source 1..20: mol_type = other DNA
tgcacatggtggctgaatgg

SEQ ID NO: 242369 - DNA, 20 bp, synthetic construct
  source 1..20: mol_type = other DNA
atgcacatggtggctgaatg

SEQ ID NO: 242370 - DNA, 20 bp, synthetic construct
  source 1..20: mol_type = other DNA
catgcacatggtggctgaat

SEQ ID NO: 242371 - DNA, 20 bp, synthetic construct
  source 1..20: mol_type = other DNA
tcatgcacatggtggctgaa

SEQ ID NO: 242372 - DNA, 20 bp, synthetic construct
  source 1..20: mol_type = other DNA
ttcatgcacatggtggctga

SEQ ID NO: 242373 - DNA, 20 bp, synthetic construct
  source 1..20: mol_type = other DNA
cttcatgcacatggtggctg

SEQ ID NO: 242374 - DNA, 20 bp, synthetic construct
  source 1..20: mol_type = other DNA
tcttcatgcacatggtggct

SEQ ID NO: 242375 - DNA, 20 bp, synthetic construct
  source 1..20: mol_type = other DNA
ctcttcatgcacatggtggc

SEQ ID NO: 242376 - DNA, 20 bp, synthetic construct
  source 1..20: mol_type = other DNA
actcttcatgcacatggtgg

SEQ ID NO: 242377 - DNA, 20 bp, synthetic construct
  source 1..20: mol_type = other DNA
tactcttcatgcacatggtg

SEQ ID NO: 242378 - DNA, 20 bp, synthetic construct
  source 1..20: mol_type = other DNA
ttactcttcatgcacatggt

SEQ ID NO: 242379 - DNA, 20 bp, synthetic construct
  source 1..20: mol_type = other DNA
cttactcttcatgcacatgg

SEQ ID NO: 242380 - DNA, 20 bp, synthetic construct
  source 1..20: mol_type = other DNA
ccttactcttcatgcacatg

SEQ ID NO: 242381 - DNA, 20 bp, synthetic construct
  source 1..20: mol_type = other DNA
tccttactcttcatgcacat

SEQ ID NO: 242382 - DNA, 20 bp, synthetic construct
  source 1..20: mol_type = other DNA
ttccttactcttcatgcaca

SEQ ID NO: 242383 - DNA, 20 bp, synthetic construct
  source 1..20: mol_type = other DNA
attccttactcttcatgcac

SEQ ID NO: 242384 - DNA, 20 bp, synthetic construct
  source 1..20: mol_type = other DNA
aattccttactcttcatgca

SEQ ID NO: 242385 - DNA, 20 bp, synthetic construct
  source 1..20: mol_type = other DNA
aaattccttactcttcatgc

SEQ ID NO: 242386 - DNA, 20 bp, synthetic construct
  source 1..20: mol_type = other DNA
gaaattccttactcttcatg

SEQ ID NO: 242387 - DNA, 20 bp, synthetic construct
  source 1..20: mol_type = other DNA
agaaattccttactcttcat

SEQ ID NO: 242388 - DNA, 20 bp, synthetic construct
  source 1..20: mol_type = other DNA
cagaaattccttactcttca

SEQ ID NO: 242389 - DNA, 20 bp, synthetic construct
  source 1..20: mol_type = other DNA
acagaaattccttactcttc

SEQ ID NO: 242390 - DNA, 20 bp, synthetic construct
  source 1..20: mol_type = other DNA
gacagaaattccttactctt

SEQ ID NO: 242391 - DNA, 20 bp, synthetic construct
  source 1..20: mol_type = other DNA
tgacagaaattccttactct

SEQ ID NO: 242392 - DNA, 20 bp, synthetic construct
  source 1..20: mol_type = other DNA
atgacagaaattccttactc

SEQ ID NO: 242393 - DNA, 20 bp, synthetic construct
  source 1..20: mol_type = other DNA
tatgacagaaattccttact

SEQ ID NO: 242394 - DNA, 20 bp, synthetic construct
  source 1..20: mol_type = other DNA
gtatgacagaaattccttac

SEQ ID NO: 242395 - DNA, 20 bp, synthetic construct
  source 1..20: mol_type = other DNA
tgtatgacagaaattcctta

SEQ ID NO: 242396 - DNA, 20 bp, synthetic construct
  source 1..20: mol_type = other DNA
ctgtatgacagaaattcctt

SEQ ID NO: 242397 - DNA, 20 bp, synthetic construct
  source 1..20: mol_type = other DNA
tctgtatgacagaaattcct

SEQ ID NO: 242398 - DNA, 20 bp, synthetic construct
  source 1..20: mol_type = other DNA
ctctgtatgacagaaattcc

SEQ ID NO: 242399 - DNA, 20 bp, synthetic construct
  source 1..20: mol_type = other DNA
cctctgtatgacagaaattc

SEQ ID NO: 242400 - DNA, 20 bp, synthetic construct
  source 1..20: mol_type = other DNA
ccctctgtatgacagaaatt

SEQ ID NO: 242401 - DNA, 20 bp, synthetic construct
  source 1..20: mol_type = other DNA
cccctctgtatgacagaaat

SEQ ID NO: 242402 - DNA, 20 bp, synthetic construct
  source 1..20: mol_type = other DNA
tcccctctgtatgacagaaa

SEQ ID NO: 242403 - DNA, 20 bp, synthetic construct
  source 1..20: mol_type = other DNA
ctcccctctgtatgacagaa

SEQ ID NO: 242404 - DNA, 20 bp, synthetic construct
  source 1..20: mol_type = other DNA
actcccctctgtatgacaga

SEQ ID NO: 242405 - DNA, 20 bp, synthetic construct
  source 1..20: mol_type = other DNA
cactcccctctgtatgacag

SEQ ID NO: 242406 - DNA, 20 bp, synthetic construct
  source 1..20: mol_type = other DNA
tcactcccctctgtatgaca

SEQ ID NO: 242407 - DNA, 20 bp, synthetic construct
  source 1..20: mol_type = other DNA
ttcactcccctctgtatgac

SEQ ID NO: 242408 - DNA, 20 bp, synthetic construct
  source 1..20: mol_type = other DNA
attcactcccctctgtatga

SEQ ID NO: 242409 - DNA, 20 bp, synthetic construct
  source 1..20: mol_type = other DNA
aattcactcccctctgtatg

SEQ ID NO: 242410 - DNA, 20 bp, synthetic construct
  source 1..20: mol_type = other DNA
gaattcactcccctctgtat

SEQ ID NO: 242411 - DNA, 20 bp, synthetic construct
  source 1..20: mol_type = other DNA
tgaattcactcccctctgta

SEQ ID NO: 242412 - DNA, 20 bp, synthetic construct
  source 1..20: mol_type = other DNA
gtgaattcactcccctctgt

SEQ ID NO: 242413 - DNA, 20 bp, synthetic construct
  source 1..20: mol_type = other DNA
agtgaattcactcccctctg

SEQ ID NO: 242414 - DNA, 20 bp, synthetic construct
  source 1..20: mol_type = other DNA
cagtgaattcactcccctct

SEQ ID NO: 242415 - DNA, 20 bp, synthetic construct
  source 1..20: mol_type = other DNA
tcagtgaattcactcccctc

SEQ ID NO: 242416 - DNA, 20 bp, synthetic construct
  source 1..20: mol_type = other DNA
ctcagtgaattcactcccct

SEQ ID NO: 242417 - DNA, 20 bp, synthetic construct
  source 1..20: mol_type = other DNA
gctcagtgaattcactcccc

SEQ ID NO: 242418 - DNA, 20 bp, synthetic construct
  source 1..20: mol_type = other DNA
agctcagtgaattcactccc

SEQ ID NO: 242419 - DNA, 20 bp, synthetic construct
  source 1..20: mol_type = other DNA
cagctcagtgaattcactcc

SEQ ID NO: 242420 - DNA, 20 bp, synthetic construct
  source 1..20: mol_type = other DNA
tcagctcagtgaattcactc

SEQ ID NO: 242421 - DNA, 20 bp, synthetic construct
  source 1..20: mol_type = other DNA
ctcagctcagtgaattcact

SEQ ID NO: 242422 - DNA, 20 bp, synthetic construct
  source 1..20: mol_type = other DNA
tctcagctcagtgaattcac

SEQ ID NO: 242423 - DNA, 20 bp, synthetic construct
  source 1..20: mol_type = other DNA
ctctcagctcagtgaattca

SEQ ID NO: 242424 - DNA, 20 bp, synthetic construct
  source 1..20: mol_type = other DNA
gctctcagctcagtgaattc

SEQ ID NO: 242425 - DNA, 20 bp, synthetic construct
  source 1..20: mol_type = other DNA
agctctcagctcagtgaatt

SEQ ID NO: 242426 - DNA, 20 bp, synthetic construct
  source 1..20: mol_type = other DNA
cagctctcagctcagtgaat

SEQ ID NO: 242427 - DNA, 20 bp, synthetic construct
  source 1..20: mol_type = other DNA
tcagctctcagctcagtgaa

SEQ ID NO: 242428 - DNA, 20 bp, synthetic construct
  source 1..20: mol_type = other DNA
ctcagctctcagctcagtga

SEQ ID NO: 242429 - DNA, 20 bp, synthetic construct
  source 1..20: mol_type = other DNA
cctcagctctcagctcagtg

SEQ ID NO: 242430 - DNA, 20 bp, synthetic construct
  source 1..20: mol_type = other DNA
tcctcagctctcagctcagt

SEQ ID NO: 242431 - DNA, 20 bp, synthetic construct
  source 1..20: mol_type = other DNA
ttcctcagctctcagctcag

SEQ ID NO: 242432 - DNA, 20 bp, synthetic construct
  source 1..20: mol_type = other DNA
gttcctcagctctcagctca

SEQ ID NO: 242433 - DNA, 20 bp, synthetic construct
  source 1..20: mol_type = other DNA
ggttcctcagctctcagctc

SEQ ID NO: 242434 - DNA, 20 bp, synthetic construct
  source 1..20: mol_type = other DNA
tggttcctcagctctcagct

SEQ ID NO: 242435 - DNA, 20 bp, synthetic construct
  source 1..20: mol_type = other DNA
atggttcctcagctctcagc

SEQ ID NO: 242436 - DNA, 20 bp, synthetic construct
  source 1..20: mol_type = other DNA
aatggttcctcagctctcag

SEQ ID NO: 242437 - DNA, 20 bp, synthetic construct
  source 1..20: mol_type = other DNA
caatggttcctcagctctca

SEQ ID NO: 242438 - DNA, 20 bp, synthetic construct
  source 1..20: mol_type = other DNA
tcaatggttcctcagctctc

SEQ ID NO: 242439 - DNA, 20 bp, synthetic construct
  source 1..20: mol_type = other DNA
atcaatggttcctcagctct

SEQ ID NO: 242440 - DNA, 20 bp, synthetic construct
  source 1..20: mol_type = other DNA
gatcaatggttcctcagctc

SEQ ID NO: 242441 - DNA, 20 bp, synthetic construct
  source 1..20: mol_type = other DNA
agatcaatggttcctcagct

SEQ ID NO: 242442 - DNA, 20 bp, synthetic construct
  source 1..20: mol_type = other DNA
cagatcaatggttcctcagc

SEQ ID NO: 242443 - DNA, 20 bp, synthetic construct
  source 1..20: mol_type = other DNA
tcagatcaatggttcctcag

SEQ ID NO: 242444 - DNA, 20 bp, synthetic construct
  source 1..20: mol_type = other DNA
atcagatcaatggttcctca

SEQ ID NO: 242445 - DNA, 20 bp, synthetic construct
  source 1..20: mol_type = other DNA
catcagatcaatggttcctc

SEQ ID NO: 242446 - DNA, 20 bp, synthetic construct
  source 1..20: mol_type = other DNA
ccatcagatcaatggttcct

SEQ ID NO: 242447 - DNA, 20 bp, synthetic construct
  source 1..20: mol_type = other DNA
gccatcagatcaatggttcc

SEQ ID NO: 242448 - DNA, 20 bp, synthetic construct
  source 1..20: mol_type = other DNA
agccatcagatcaatggttc

SEQ ID NO: 242449 - DNA, 20 bp, synthetic construct
  source 1..20: mol_type = other DNA
cagccatcagatcaatggtt

SEQ ID NO: 242450 - DNA, 20 bp, synthetic construct
  source 1..20: mol_type = other DNA
tcagccatcagatcaatggt

SEQ ID NO: 242451 - DNA, 20 bp, synthetic construct
  source 1..20: mol_type = other DNA
ctcagccatcagatcaatgg

SEQ ID NO: 242452 - DNA, 20 bp, synthetic construct
  source 1..20: mol_type = other DNA
tctcagccatcagatcaatg

SEQ ID NO: 242453 - DNA, 20 bp, synthetic construct
  source 1..20: mol_type = other DNA
gtctcagccatcagatcaat

SEQ ID NO: 242454 - DNA, 20 bp, synthetic construct
  source 1..20: mol_type = other DNA
tgtctcagccatcagatcaa

SEQ ID NO: 242455 - DNA, 20 bp, synthetic construct
  source 1..20: mol_type = other DNA
gtgtctcagccatcagatca

SEQ ID NO: 242456 - DNA, 20 bp, synthetic construct
  source 1..20: mol_type = other DNA
ggtgtctcagccatcagatc

SEQ ID NO: 242457 - DNA, 20 bp, synthetic construct
  source 1..20: mol_type = other DNA
tggtgtctcagccatcagat

SEQ ID NO: 242458 - DNA, 20 bp, synthetic construct
  source 1..20: mol_type = other DNA
gtggtgtctcagccatcaga

SEQ ID NO: 242459 - DNA, 20 bp, synthetic construct
  source 1..20: mol_type = other DNA
agtggtgtctcagccatcag

SEQ ID NO: 242460 - DNA, 20 bp, synthetic construct
  source 1..20: mol_type = other DNA
cagtggtgtctcagccatca

SEQ ID NO: 242461 - DNA, 20 bp, synthetic construct
  source 1..20: mol_type = other DNA
ccagtggtgtctcagccatc

SEQ ID NO: 242462 - DNA, 20 bp, synthetic construct
  source 1..20: mol_type = other DNA
cccagtggtgtctcagccat

SEQ ID NO: 242463 - DNA, 20 bp, synthetic construct
  source 1..20: mol_type = other DNA
tcccagtggtgtctcagcca

SEQ ID NO: 242464 - DNA, 20 bp, synthetic construct
  source 1..20: mol_type = other DNA
ttcccagtggtgtctcagcc

SEQ ID NO: 242465 - DNA, 20 bp, synthetic construct
  source 1..20: mol_type = other DNA
cttcccagtggtgtctcagc

SEQ ID NO: 242466 - DNA, 20 bp, synthetic construct
  source 1..20: mol_type = other DNA
tcttcccagtggtgtctcag

SEQ ID NO: 242467 - DNA, 20 bp, synthetic construct
  source 1..20: mol_type = other DNA
gtcttcccagtggtgtctca

SEQ ID NO: 242468 - DNA, 20 bp, synthetic construct
  source 1..20: mol_type = other DNA
agtcttcccagtggtgtctc

SEQ ID NO: 242469 - DNA, 20 bp, synthetic construct
  source 1..20: mol_type = other DNA
cagtcttcccagtggtgtct

SEQ ID NO: 242470 - DNA, 20 bp, synthetic construct
  source 1..20: mol_type = other DNA
ccagtcttcccagtggtgtc

SEQ ID NO: 242471 - DNA, 20 bp, synthetic construct
  source 1..20: mol_type = other DNA
tccagtcttcccagtggtgt

SEQ ID NO: 242472 - DNA, 20 bp, synthetic construct
  source 1..20: mol_type = other DNA
ctccagtcttcccagtggtg

SEQ ID NO: 242473 - DNA, 20 bp, synthetic construct
  source 1..20: mol_type = other DNA
tctccagtcttcccagtggt

SEQ ID NO: 242474 - DNA, 20 bp, synthetic construct
  source 1..20: mol_type = other DNA
ctctccagtcttcccagtgg

SEQ ID NO: 242475 - DNA, 20 bp, synthetic construct
  source 1..20: mol_type = other DNA
cctctccagtcttcccagtg

SEQ ID NO: 242476 - DNA, 20 bp, synthetic construct
  source 1..20: mol_type = other DNA
gcctctccagtcttcccagt

SEQ ID NO: 242477 - DNA, 20 bp, synthetic construct
  source 1..20: mol_type = other DNA
agcctctccagtcttcccag

SEQ ID NO: 242478 - DNA, 20 bp, synthetic construct
  source 1..20: mol_type = other DNA
aagcctctccagtcttccca

SEQ ID NO: 242479 - DNA, 20 bp, synthetic construct
  source 1..20: mol_type = other DNA
aaagcctctccagtcttccc

SEQ ID NO: 242480 - DNA, 20 bp, synthetic construct
  source 1..20: mol_type = other DNA
aaaagcctctccagtcttcc

SEQ ID NO: 242481 - DNA, 20 bp, synthetic construct
  source 1..20: mol_type = other DNA
gaaaagcctctccagtcttc

SEQ ID NO: 242482 - DNA, 20 bp, synthetic construct
  source 1..20: mol_type = other DNA
agaaaagcctctccagtctt

SEQ ID NO: 242483 - DNA, 20 bp, synthetic construct
  source 1..20: mol_type = other DNA
cagaaaagcctctccagtct

SEQ ID NO: 242484 - DNA, 20 bp, synthetic construct
  source 1..20: mol_type = other DNA
ccagaaaagcctctccagtc

SEQ ID NO: 242485 - DNA, 20 bp, synthetic construct
  source 1..20: mol_type = other DNA
cccagaaaagcctctccagt

SEQ ID NO: 242486 - DNA, 20 bp, synthetic construct
  source 1..20: mol_type = other DNA
gcccagaaaagcctctccag

SEQ ID NO: 242487 - DNA, 20 bp, synthetic construct
  source 1..20: mol_type = other DNA
tgcccagaaaagcctctcca

SEQ ID NO: 242488 - DNA, 20 bp, synthetic construct
  source 1..20: mol_type = other DNA
atgcccagaaaagcctctcc

SEQ ID NO: 242489 - DNA, 20 bp, synthetic construct
  source 1..20: mol_type = other DNA
catgcccagaaaagcctctc

SEQ ID NO: 242490 - DNA, 20 bp, synthetic construct
  source 1..20: mol_type = other DNA
gcatgcccagaaaagcctct

SEQ ID NO: 242491 - DNA, 20 bp, synthetic construct
  source 1..20: mol_type = other DNA
tgcatgcccagaaaagcctc

SEQ ID NO: 242492 - DNA, 20 bp, synthetic construct
  source 1..20: mol_type = other DNA
ctgcatgcccagaaaagcct

SEQ ID NO: 242493 - DNA, 20 bp, synthetic construct
  source 1..20: mol_type = other DNA
actgcatgcccagaaaagcc

SEQ ID NO: 242494 - DNA, 20 bp, synthetic construct
  source 1..20: mol_type = other DNA
cactgcatgcccagaaaagc

SEQ ID NO: 242495 - DNA, 20 bp, synthetic construct
  source 1..20: mol_type = other DNA
gcactgcatgcccagaaaag

SEQ ID NO: 242496 - DNA, 20 bp, synthetic construct
  source 1..20: mol_type = other DNA
ggcactgcatgcccagaaaa

SEQ ID NO: 242497 - DNA, 20 bp, synthetic construct
  source 1..20: mol_type = other DNA
tggcactgcatgcccagaaa

SEQ ID NO: 242498 - DNA, 20 bp, synthetic construct
  source 1..20: mol_type = other DNA
ctggcactgcatgcccagaa

SEQ ID NO: 242499 - DNA, 20 bp, synthetic construct
  source 1..20: mol_type = other DNA
cctggcactgcatgcccaga

SEQ ID NO: 242500 - DNA, 20 bp, synthetic construct
  source 1..20: mol_type = other DNA
gcctggcactgcatgcccag

SEQ ID NO: 242501 - DNA, 20 bp, synthetic construct
  source 1..20: mol_type = other DNA
tgcctggcactgcatgccca

SEQ ID NO: 242502 - DNA, 20 bp, synthetic construct
  source 1..20: mol_type = other DNA
gtgcctggcactgcatgccc

SEQ ID NO: 242503 - DNA, 20 bp, synthetic construct
  source 1..20: mol_type = other DNA
tgtgcctggcactgcatgcc

SEQ ID NO: 242504 - DNA, 20 bp, synthetic construct
  source 1..20: mol_type = other DNA
ctgtgcctggcactgcatgc

SEQ ID NO: 242505 - DNA, 20 bp, synthetic construct
  source 1..20: mol_type = other DNA
cctgtgcctggcactgcatg

SEQ ID NO: 242506 - DNA, 20 bp, synthetic construct
  source 1..20: mol_type = other DNA
tcctgtgcctggcactgcat

SEQ ID NO: 242507 - DNA, 20 bp, synthetic construct
  source 1..20: mol_type = other DNA
ctcctgtgcctggcactgca

SEQ ID NO: 242508 - DNA, 20 bp, synthetic construct
  source 1..20: mol_type = other DNA
cctcctgtgcctggcactgc

SEQ ID NO: 242509 - DNA, 20 bp, synthetic construct
  source 1..20: mol_type = other DNA
tcctcctgtgcctggcactg

SEQ ID NO: 242510 - DNA, 20 bp, synthetic construct
  source 1..20: mol_type = other DNA
ctcctcctgtgcctggcact

SEQ ID NO: 242511 - DNA, 20 bp, synthetic construct
  source 1..20: mol_type = other DNA
gctcctcctgtgcctggcac

SEQ ID NO: 242512 - DNA, 20 bp, synthetic construct
  source 1..20: mol_type = other DNA
agctcctcctgtgcctggca

SEQ ID NO: 242513 - DNA, 20 bp, synthetic construct
  source 1..20: mol_type = other DNA
cagctcctcctgtgcctggc

SEQ ID NO: 242514 - DNA, 20 bp, synthetic construct
  source 1..20: mol_type = other DNA
tcagctcctcctgtgcctgg

SEQ ID NO: 242515 - DNA, 20 bp, synthetic construct
  source 1..20: mol_type = other DNA
ctcagctcctcctgtgcctg

SEQ ID NO: 242516 - DNA, 20 bp, synthetic construct
  source 1..20: mol_type = other DNA
cctcagctcctcctgtgcct

SEQ ID NO: 242517 - DNA, 20 bp, synthetic construct
  source 1..20: mol_type = other DNA
ccctcagctcctcctgtgcc

SEQ ID NO: 242518 - DNA, 20 bp, synthetic construct
  source 1..20: mol_type = other DNA
tccctcagctcctcctgtgc

SEQ ID NO: 242519 - DNA, 20 bp, synthetic construct
  source 1..20: mol_type = other DNA
ttccctcagctcctcctgtg

SEQ ID NO: 242520 - DNA, 20 bp, synthetic construct
  source 1..20: mol_type = other DNA
cttccctcagctcctcctgt

SEQ ID NO: 242521 - DNA, 20 bp, synthetic construct
  source 1..20: mol_type = other DNA
tcttccctcagctcctcctg

SEQ ID NO: 242522 - DNA, 20 bp, synthetic construct
  source 1..20: mol_type = other DNA
atcttccctcagctcctcct

SEQ ID NO: 242523 - DNA, 20 bp, synthetic construct
  source 1..20: mol_type = other DNA
catcttccctcagctcctcc

SEQ ID NO: 242524 - DNA, 20 bp, synthetic construct
  source 1..20: mol_type = other DNA
tcatcttccctcagctcctc

SEQ ID NO: 242525 - DNA, 20 bp, synthetic construct
  source 1..20: mol_type = other DNA
gtcatcttccctcagctcct

SEQ ID NO: 242526 - DNA, 20 bp, synthetic construct
  source 1..20: mol_type = other DNA
agtcatcttccctcagctcc

SEQ ID NO: 242527 - DNA, 20 bp, synthetic construct
  source 1..20: mol_type = other DNA
tagtcatcttccctcagctc

SEQ ID NO: 242528 - DNA, 20 bp, synthetic construct
  source 1..20: mol_type = other DNA
ttagtcatcttccctcagct

SEQ ID NO: 242529 - DNA, 20 bp, synthetic construct
  source 1..20: mol_type = other DNA
cttagtcatcttccctcagc

SEQ ID NO: 242530 - DNA, 20 bp, synthetic construct
  source 1..20: mol_type = other DNA
tcttagtcatcttccctcag

SEQ ID NO: 242531 - DNA, 20 bp, synthetic construct
  source 1..20: mol_type = other DNA
ctcttagtcatcttccctca

SEQ ID NO: 242532 - DNA, 20 bp, synthetic construct
  source 1..20: mol_type = other DNA
cctcttagtcatcttccctc

SEQ ID NO: 242533 - DNA, 20 bp, synthetic construct
  source 1..20: mol_type = other DNA
acctcttagtcatcttccct

SEQ ID NO: 242534 - DNA, 20 bp, synthetic construct
  source 1..20: mol_type = other DNA
tacctcttagtcatcttccc

SEQ ID NO: 242535 - DNA, 20 bp, synthetic construct
  source 1..20: mol_type = other DNA
gtacctcttagtcatcttcc

SEQ ID NO: 242536 - DNA, 20 bp, synthetic construct
  source 1..20: mol_type = other DNA
agtacctcttagtcatcttc

SEQ ID NO: 242537 - DNA, 20 bp, synthetic construct
  source 1..20: mol_type = other DNA
cagtacctcttagtcatctt

SEQ ID NO: 242538 - DNA, 20 bp, synthetic construct
  source 1..20: mol_type = other DNA
ccagtacctcttagtcatct

SEQ ID NO: 242539 - DNA, 20 bp, synthetic construct
  source 1..20: mol_type = other DNA
gccagtacctcttagtcatc

SEQ ID NO: 242540 - DNA, 20 bp, synthetic construct
  source 1..20: mol_type = other DNA
tgccagtacctcttagtcat

SEQ ID NO: 242541 - DNA, 20 bp, synthetic construct
  source 1..20: mol_type = other DNA
ttgccagtacctcttagtca

SEQ ID NO: 242542 - DNA, 20 bp, synthetic construct
  source 1..20: mol_type = other DNA
tttgccagtacctcttagtc

SEQ ID NO: 242543 - DNA, 20 bp, synthetic construct
  source 1..20: mol_type = other DNA
ctttgccagtacctcttagt

SEQ ID NO: 242544 - DNA, 20 bp, synthetic construct
  source 1..20: mol_type = other DNA
tctttgccagtacctcttag

SEQ ID NO: 242545 - DNA, 20 bp, synthetic construct
  source 1..20: mol_type = other DNA
ttctttgccagtacctctta

SEQ ID NO: 242546 - DNA, 20 bp, synthetic construct
  source 1..20: mol_type = other DNA
attctttgccagtacctctt

SEQ ID NO: 242547 - DNA, 20 bp, synthetic construct
  source 1..20: mol_type = other DNA
aattctttgccagtacctct

SEQ ID NO: 242548 - DNA, 20 bp, synthetic construct
  source 1..20: mol_type = other DNA
gaattctttgccagtacctc

SEQ ID NO: 242549 - DNA, 20 bp, synthetic construct
  source 1..20: mol_type = other DNA
tgaattctttgccagtacct

SEQ ID NO: 242550 - DNA, 20 bp, synthetic construct
  source 1..20: mol_type = other DNA
ctgaattctttgccagtacc

SEQ ID NO: 242551 - DNA, 20 bp, synthetic construct
  source 1..20: mol_type = other DNA
tctgaattctttgccagtac

SEQ ID NO: 242552 - DNA, 20 bp, synthetic construct
  source 1..20: mol_type = other DNA
ttctgaattctttgccagta

SEQ ID NO: 242553 - DNA, 20 bp, synthetic construct
  source 1..20: mol_type = other DNA
tttctgaattctttgccagt

SEQ ID NO: 242554 - DNA, 20 bp, synthetic construct
  source 1..20: mol_type = other DNA
atttctgaattctttgccag

SEQ ID NO: 242555 - DNA, 20 bp, synthetic construct
  source 1..20: mol_type = other DNA
aatttctgaattctttgcca

SEQ ID NO: 242556 - DNA, 20 bp, synthetic construct
  source 1..20: mol_type = other DNA
gaatttctgaattctttgcc

SEQ ID NO: 242557 - DNA, 20 bp, synthetic construct
  source 1..20: mol_type = other DNA
agaatttctgaattctttgc

SEQ ID NO: 242558 - DNA, 20 bp, synthetic construct
  source 1..20: mol_type = other DNA
cagaatttctgaattctttg

SEQ ID NO: 242559 - DNA, 20 bp, synthetic construct
  source 1..20: mol_type = other DNA
tcagaatttctgaattcttt

SEQ ID NO: 242560 - DNA, 20 bp, synthetic construct
  source 1..20: mol_type = other DNA
atcagaatttctgaattctt

SEQ ID NO: 242561 - DNA, 20 bp, synthetic construct
  source 1..20: mol_type = other DNA
catcagaatttctgaattct

SEQ ID NO: 242562 - DNA, 20 bp, synthetic construct
  source 1..20: mol_type = other DNA
ccatcagaatttctgaattc

SEQ ID NO: 242563 - DNA, 20 bp, synthetic construct
  source 1..20: mol_type = other DNA
tccatcagaatttctgaatt

SEQ ID NO: 242564 - DNA, 20 bp, synthetic construct
  source 1..20: mol_type = other DNA
ttccatcagaatttctgaat

SEQ ID NO: 242565 - DNA, 20 bp, synthetic construct
  source 1..20: mol_type = other DNA
cttccatcagaatttctgaa

SEQ ID NO: 242566 - DNA, 20 bp, synthetic construct
  source 1..20: mol_type = other DNA
gcttccatcagaatttctga

SEQ ID NO: 242567 - DNA, 20 bp, synthetic construct
  source 1..20: mol_type = other DNA
agcttccatcagaatttctg

SEQ ID NO: 242568 - DNA, 20 bp, synthetic construct
  source 1..20: mol_type = other DNA
aagcttccatcagaatttct

SEQ ID NO: 242569 - DNA, 20 bp, synthetic construct
  source 1..20: mol_type = other DNA
aaagcttccatcagaatttc

SEQ ID NO: 242570 - DNA, 20 bp, synthetic construct
  source 1..20: mol_type = other DNA
taaagcttccatcagaattt

SEQ ID NO: 242571 - DNA, 20 bp, synthetic construct
  source 1..20: mol_type = other DNA
gtaaagcttccatcagaatt

SEQ ID NO: 242572 - DNA, 20 bp, synthetic construct
  source 1..20: mol_type = other DNA
tgtaaagcttccatcagaat

SEQ ID NO: 242573 - DNA, 20 bp, synthetic construct
  source 1..20: mol_type = other DNA
atgtaaagcttccatcagaa

SEQ ID NO: 242574 - DNA, 20 bp, synthetic construct
  source 1..20: mol_type = other DNA
catgtaaagcttccatcaga

SEQ ID NO: 242575 - DNA, 20 bp, synthetic construct
  source 1..20: mol_type = other DNA
acatgtaaagcttccatcag

SEQ ID NO: 242576 - DNA, 20 bp, synthetic construct
  source 1..20: mol_type = other DNA
aacatgtaaagcttccatca

SEQ ID NO: 242577 - DNA, 20 bp, synthetic construct
  source 1..20: mol_type = other DNA
taacatgtaaagcttccatc

SEQ ID NO: 242578 - DNA, 20 bp, synthetic construct
  source 1..20: mol_type = other DNA
gtaacatgtaaagcttccat

SEQ ID NO: 242579 - DNA, 20 bp, synthetic construct
  source 1..20: mol_type = other DNA
ggtaacatgtaaagcttcca

SEQ ID NO: 242580 - DNA, 20 bp, synthetic construct
  source 1..20: mol_type = other DNA
tggtaacatgtaaagcttcc

SEQ ID NO: 242581 - DNA, 20 bp, synthetic construct
  source 1..20: mol_type = other DNA
atggtaacatgtaaagcttc

SEQ ID NO: 242582 - DNA, 20 bp, synthetic construct
  source 1..20: mol_type = other DNA
gatggtaacatgtaaagctt

SEQ ID NO: 242583 - DNA, 20 bp, synthetic construct
  source 1..20: mol_type = other DNA
tgatggtaacatgtaaagct

SEQ ID NO: 242584 - DNA, 20 bp, synthetic construct
  source 1..20: mol_type = other DNA
gtgatggtaacatgtaaagc

SEQ ID NO: 242585 - DNA, 20 bp, synthetic construct
  source 1..20: mol_type = other DNA
tgtgatggtaacatgtaaag

SEQ ID NO: 242586 - DNA, 20 bp, synthetic construct
  source 1..20: mol_type = other DNA
atgtgatggtaacatgtaaa

SEQ ID NO: 242587 - DNA, 20 bp, synthetic construct
  source 1..20: mol_type = other DNA
gatgtgatggtaacatgtaa

SEQ ID NO: 242588 - DNA, 20 bp, synthetic construct
  source 1..20: mol_type = other DNA
ggatgtgatggtaacatgta

SEQ ID NO: 242589 - DNA, 20 bp, synthetic construct
  source 1..20: mol_type = other DNA
tggatgtgatggtaacatgt

SEQ ID NO: 242590 - DNA, 20 bp, synthetic construct
  source 1..20: mol_type = other DNA
atggatgtgatggtaacatg

SEQ ID NO: 242591 - DNA, 20 bp, synthetic construct
  source 1..20: mol_type = other DNA
gatggatgtgatggtaacat

SEQ ID NO: 242592 - DNA, 20 bp, synthetic construct
  source 1..20: mol_type = other DNA
ggatggatgtgatggtaaca

SEQ ID NO: 242593 - DNA, 20 bp, synthetic construct
  source 1..20: mol_type = other DNA
tggatggatgtgatggtaac

SEQ ID NO: 242594 - DNA, 20 bp, synthetic construct
  source 1..20: mol_type = other DNA
atggatggatgtgatggtaa

SEQ ID NO: 242595 - DNA, 20 bp, synthetic construct
  source 1..20: mol_type = other DNA
gatggatggatgtgatggta

SEQ ID NO: 242596 - DNA, 20 bp, synthetic construct
  source 1..20: mol_type = other DNA
agatggatggatgtgatggt

SEQ ID NO: 242597 - DNA, 20 bp, synthetic construct
  source 1..20: mol_type = other DNA
tagatggatggatgtgatgg

SEQ ID NO: 242598 - DNA, 20 bp, synthetic construct
  source 1..20: mol_type = other DNA
atagatggatggatgtgatg

SEQ ID NO: 242599 - DNA, 20 bp, synthetic construct
  source 1..20: mol_type = other DNA
gatagatggatggatgtgat

SEQ ID NO: 242600 - DNA, 20 bp, synthetic construct
  source 1..20: mol_type = other DNA
ggatagatggatggatgtga

SEQ ID NO: 242601 - DNA, 20 bp, synthetic construct
  source 1..20: mol_type = other DNA
tggatagatggatggatgtg

SEQ ID NO: 242602 - DNA, 20 bp, synthetic construct
  source 1..20: mol_type = other DNA
gtggatagatggatggatgt

SEQ ID NO: 242603 - DNA, 20 bp, synthetic construct
  source 1..20: mol_type = other DNA
ggtggatagatggatggatg

SEQ ID NO: 242604 - DNA, 20 bp, synthetic construct
  source 1..20: mol_type = other DNA
gggtggatagatggatggat

SEQ ID NO: 242605 - DNA, 20 bp, synthetic construct
  source 1..20: mol_type = other DNA
tgggtggatagatggatgga

SEQ ID NO: 242606 - DNA, 20 bp, synthetic construct
  source 1..20: mol_type = other DNA
atgggtggatagatggatgg

SEQ ID NO: 242607 - DNA, 20 bp, synthetic construct
  source 1..20: mol_type = other DNA
gatgggtggatagatggatg

SEQ ID NO: 242608 - DNA, 20 bp, synthetic construct
  source 1..20: mol_type = other DNA
ggatgggtggatagatggat

SEQ ID NO: 242609 - DNA, 20 bp, synthetic construct
  source 1..20: mol_type = other DNA
tggatgggtggatagatgga

SEQ ID NO: 242610 - DNA, 20 bp, synthetic construct
  source 1..20: mol_type = other DNA
atggatgggtggatagatgg

SEQ ID NO: 242611 - DNA, 20 bp, synthetic construct
  source 1..20: mol_type = other DNA
gatggatgggtggatagatg

SEQ ID NO: 242612 - DNA, 20 bp, synthetic construct
  source 1..20: mol_type = other DNA
ggatggatgggtggatagat

SEQ ID NO: 242613 - DNA, 20 bp, synthetic construct
  source 1..20: mol_type = other DNA
tggatggatgggtggataga

SEQ ID NO: 242614 - DNA, 20 bp, synthetic construct
  source 1..20: mol_type = other DNA
gtggatggatgggtggatag

SEQ ID NO: 242615 - DNA, 20 bp, synthetic construct
  source 1..20: mol_type = other DNA
ggtggatggatgggtggata

SEQ ID NO: 242616 - DNA, 20 bp, synthetic construct
  source 1..20: mol_type = other DNA
gggtggatggatgggtggat

SEQ ID NO: 242617 - DNA, 20 bp, synthetic construct
  source 1..20: mol_type = other DNA
tgggtggatggatgggtgga

SEQ ID NO: 242618 - DNA, 20 bp, synthetic construct
  source 1..20: mol_type = other DNA
atgggtggatggatgggtgg

SEQ ID NO: 242619 - DNA, 20 bp, synthetic construct
  source 1..20: mol_type = other DNA
tatgggtggatggatgggtg

SEQ ID NO: 242620 - DNA, 20 bp, synthetic construct
  source 1..20: mol_type = other DNA
atatgggtggatggatgggt

SEQ ID NO: 242621 - DNA, 20 bp, synthetic construct
  source 1..20: mol_type = other DNA
gatatgggtggatggatggg

SEQ ID NO: 242622 - DNA, 20 bp, synthetic construct
  source 1..20: mol_type = other DNA
agatatgggtggatggatgg

SEQ ID NO: 242623 - DNA, 20 bp, synthetic construct
  source 1..20: mol_type = other DNA
aagatatgggtggatggatg

SEQ ID NO: 242624 - DNA, 20 bp, synthetic construct
  source 1..20: mol_type = other DNA
gaagatatgggtggatggat

SEQ ID NO: 242625 - DNA, 20 bp, synthetic construct
  source 1..20: mol_type = other DNA
ggaagatatgggtggatgga

SEQ ID NO: 242626 - DNA, 20 bp, synthetic construct
  source 1..20: mol_type = other DNA
aggaagatatgggtggatgg

SEQ ID NO: 242627 - DNA, 20 bp, synthetic construct
  source 1..20: mol_type = other DNA
gaggaagatatgggtggatg

SEQ ID NO: 242628 - DNA, 20 bp, synthetic construct
  source 1..20: mol_type = other DNA
ggaggaagatatgggtggat

SEQ ID NO: 242629 - DNA, 20 bp, synthetic construct
  source 1..20: mol_type = other DNA
gggaggaagatatgggtgga

SEQ ID NO: 242630 - DNA, 20 bp, synthetic construct
  source 1..20: mol_type = other DNA
agggaggaagatatgggtgg

SEQ ID NO: 242631 - DNA, 20 bp, synthetic construct
  source 1..20: mol_type = other DNA
gagggaggaagatatgggtg

SEQ ID NO: 242632 - DNA, 20 bp, synthetic construct
  source 1..20: mol_type = other DNA
ggagggaggaagatatgggt

SEQ ID NO: 242633 - DNA, 20 bp, synthetic construct
  source 1..20: mol_type = other DNA
tggagggaggaagatatggg

SEQ ID NO: 242634 - DNA, 20 bp, synthetic construct
  source 1..20: mol_type = other DNA
gtggagggaggaagatatgg

SEQ ID NO: 242635 - DNA, 20 bp, synthetic construct
  source 1..20: mol_type = other DNA
ggtggagggaggaagatatg

SEQ ID NO: 242636 - DNA, 20 bp, synthetic construct
  source 1..20: mol_type = other DNA
gggtggagggaggaagatat

SEQ ID NO: 242637 - DNA, 20 bp, synthetic construct
  source 1..20: mol_type = other DNA
tgggtggagggaggaagata

SEQ ID NO: 242638 - DNA, 20 bp, synthetic construct
  source 1..20: mol_type = other DNA
ttgggtggagggaggaagat

SEQ ID NO: 242639 - DNA, 20 bp, synthetic construct
  source 1..20: mol_type = other DNA
attgggtggagggaggaaga

SEQ ID NO: 242640 - DNA, 20 bp, synthetic construct
  source 1..20: mol_type = other DNA
gattgggtggagggaggaag

SEQ ID NO: 242641 - DNA, 20 bp, synthetic construct
  source 1..20: mol_type = other DNA
tgattgggtggagggaggaa

SEQ ID NO: 242642 - DNA, 20 bp, synthetic construct
  source 1..20: mol_type = other DNA
atgattgggtggagggagga

SEQ ID NO: 242643 - DNA, 20 bp, synthetic construct
  source 1..20: mol_type = other DNA
catgattgggtggagggagg

SEQ ID NO: 242644 - DNA, 20 bp, synthetic construct
  source 1..20: mol_type = other DNA
gcatgattgggtggagggag

SEQ ID NO: 242645 - DNA, 20 bp, synthetic construct
  source 1..20: mol_type = other DNA
tgcatgattgggtggaggga

SEQ ID NO: 242646 - DNA, 20 bp, synthetic construct
  source 1..20: mol_type = other DNA
atgcatgattgggtggaggg

SEQ ID NO: 242647 - DNA, 20 bp, synthetic construct
  source 1..20: mol_type = other DNA
tatgcatgattgggtggagg

SEQ ID NO: 242648 - DNA, 20 bp, synthetic construct
  source 1..20: mol_type = other DNA
gtatgcatgattgggtggag

SEQ ID NO: 242649 - DNA, 20 bp, synthetic construct
  source 1..20: mol_type = other DNA
tgtatgcatgattgggtgga

SEQ ID NO: 242650 - DNA, 20 bp, synthetic construct
  source 1..20: mol_type = other DNA
atgtatgcatgattgggtgg

SEQ ID NO: 242651 - DNA, 20 bp, synthetic construct
  source 1..20: mol_type = other DNA
gatgtatgcatgattgggtg

SEQ ID NO: 242652 - DNA, 20 bp, synthetic construct
  source 1..20: mol_type = other DNA
ggatgtatgcatgattgggt

SEQ ID NO: 242653 - DNA, 20 bp, synthetic construct
  source 1..20: mol_type = other DNA
tggatgtatgcatgattggg

SEQ ID NO: 242654 - DNA, 20 bp, synthetic construct
  source 1..20: mol_type = other DNA
ctggatgtatgcatgattgg

SEQ ID NO: 242655 - DNA, 20 bp, synthetic construct
  source 1..20: mol_type = other DNA
actggatgtatgcatgattg

SEQ ID NO: 242656 - DNA, 20 bp, synthetic construct
  source 1..20: mol_type = other DNA
gactggatgtatgcatgatt

SEQ ID NO: 242657 - DNA, 20 bp, synthetic construct
  source 1..20: mol_type = other DNA
tgactggatgtatgcatgat

SEQ ID NO: 242658 - DNA, 20 bp, synthetic construct
  source 1..20: mol_type = other DNA
atgactggatgtatgcatga

SEQ ID NO: 242659 - DNA, 20 bp, synthetic construct
  source 1..20: mol_type = other DNA
gatgactggatgtatgcatg

SEQ ID NO: 242660 - DNA, 20 bp, synthetic construct
  source 1..20: mol_type = other DNA
agatgactggatgtatgcat

SEQ ID NO: 242661 - DNA, 20 bp, synthetic construct
  source 1..20: mol_type = other DNA
tagatgactggatgtatgca

SEQ ID NO: 242662 - DNA, 20 bp, synthetic construct
  source 1..20: mol_type = other DNA
atagatgactggatgtatgc

SEQ ID NO: 242663 - DNA, 20 bp, synthetic construct
  source 1..20: mol_type = other DNA
tatagatgactggatgtatg

SEQ ID NO: 242664 - DNA, 20 bp, synthetic construct
  source 1..20: mol_type = other DNA
gtatagatgactggatgtat

SEQ ID NO: 242665 - DNA, 20 bp, synthetic construct
  source 1..20: mol_type = other DNA
tgtatagatgactggatgta

SEQ ID NO: 242666 - DNA, 20 bp, synthetic construct
  source 1..20: mol_type = other DNA
gtgtatagatgactggatgt

SEQ ID NO: 242667 - DNA, 20 bp, synthetic construct
  source 1..20: mol_type = other DNA
ggtgtatagatgactggatg

SEQ ID NO: 242668 - DNA, 20 bp, synthetic construct
  source 1..20: mol_type = other DNA
tggtgtatagatgactggat

SEQ ID NO: 242669 - DNA, 20 bp, synthetic construct
  source 1..20: mol_type = other DNA
gtggtgtatagatgactgga

SEQ ID NO: 242670 - DNA, 20 bp, synthetic construct
  source 1..20: mol_type = other DNA
ggtggtgtatagatgactgg

SEQ ID NO: 242671 - DNA, 20 bp, synthetic construct
  source 1..20: mol_type = other DNA
gggtggtgtatagatgactg

SEQ ID NO: 242672 - DNA, 20 bp, synthetic construct
  source 1..20: mol_type = other DNA
tgggtggtgtatagatgact

SEQ ID NO: 242673 - DNA, 20 bp, synthetic construct
  source 1..20: mol_type = other DNA
gtgggtggtgtatagatgac

SEQ ID NO: 242674 - DNA, 20 bp, synthetic construct
  source 1..20: mol_type = other DNA
ggtgggtggtgtatagatga

SEQ ID NO: 242675 - DNA, 20 bp, synthetic construct
  source 1..20: mol_type = other DNA
gggtgggtggtgtatagatg

SEQ ID NO: 242676 - DNA, 20 bp, synthetic construct
  source 1..20: mol_type = other DNA
tgggtgggtggtgtatagat

SEQ ID NO: 242677 - DNA, 20 bp, synthetic construct
  source 1..20: mol_type = other DNA
gtgggtgggtggtgtataga

SEQ ID NO: 242678 - DNA, 20 bp, synthetic construct
  source 1..20: mol_type = other DNA
ggtgggtgggtggtgtatag

SEQ ID NO: 242679 - DNA, 20 bp, synthetic construct
  source 1..20: mol_type = other DNA
gggtgggtgggtggtgtata

SEQ ID NO: 242680 - DNA, 20 bp, synthetic construct
  source 1..20: mol_type = other DNA
tgggtgggtgggtggtgtat

SEQ ID NO: 242681 - DNA, 20 bp, synthetic construct
  source 1..20: mol_type = other DNA
atgggtgggtgggtggtgta

SEQ ID NO: 242682 - DNA, 20 bp, synthetic construct
  source 1..20: mol_type = other DNA
gatgggtgggtgggtggtgt

SEQ ID NO: 242683 - DNA, 20 bp, synthetic construct
  source 1..20: mol_type = other DNA
ggatgggtgggtgggtggtg

SEQ ID NO: 242684 - DNA, 20 bp, synthetic construct
  source 1..20: mol_type = other DNA
tggatgggtgggtgggtggt

SEQ ID NO: 242685 - DNA, 20 bp, synthetic construct
  source 1..20: mol_type = other DNA
atggatgggtgggtgggtgg

SEQ ID NO: 242686 - DNA, 20 bp, synthetic construct
  source 1..20: mol_type = other DNA
gatggatgggtgggtgggtg

SEQ ID NO: 242687 - DNA, 20 bp, synthetic construct
  source 1..20: mol_type = other DNA
ggatggatgggtgggtgggt

SEQ ID NO: 242688 - DNA, 20 bp, synthetic construct
  source 1..20: mol_type = other DNA
tggatggatgggtgggtggg

SEQ ID NO: 242689 - DNA, 20 bp, synthetic construct
  source 1..20: mol_type = other DNA
atggatggatgggtgggtgg

SEQ ID NO: 242690 - DNA, 20 bp, synthetic construct
  source 1..20: mol_type = other DNA
gatggatggatgggtgggtg

SEQ ID NO: 242691 - DNA, 20 bp, synthetic construct
  source 1..20: mol_type = other DNA
ggatggatggatgggtgggt

SEQ ID NO: 242692 - DNA, 20 bp, synthetic construct
  source 1..20: mol_type = other DNA
tggatggatggatgggtggg

SEQ ID NO: 242693 - DNA, 20 bp, synthetic construct
  source 1..20: mol_type = other DNA
atggatggatggatgggtgg

SEQ ID NO: 242694 - DNA, 20 bp, synthetic construct
  source 1..20: mol_type = other DNA
gatggatggatggatgggtg

SEQ ID NO: 242695 - DNA, 20 bp, synthetic construct
  source 1..20: mol_type = other DNA
ggatggatggatggatgggt

SEQ ID NO: 242696 - DNA, 20 bp, synthetic construct
  source 1..20: mol_type = other DNA
tggatggatggatggatggg

SEQ ID NO: 242697 - DNA, 20 bp, synthetic construct
  source 1..20: mol_type = other DNA
atggatggatggatggatgg

SEQ ID NO: 242698 - DNA, 20 bp, synthetic construct
  source 1..20: mol_type = other DNA
gatggatggatggatggatg

SEQ ID NO: 242699 - DNA, 20 bp, synthetic construct
  source 1..20: mol_type = other DNA
ggatggatggatggatggat

SEQ ID NO: 242700 - DNA, 20 bp, synthetic construct
  source 1..20: mol_type = other DNA
gggatggatggatggatgga

SEQ ID NO: 242701 - DNA, 20 bp, synthetic construct
  source 1..20: mol_type = other DNA
agggatggatggatggatgg

SEQ ID NO: 242702 - DNA, 20 bp, synthetic construct
  source 1..20: mol_type = other DNA
aagggatggatggatggatg

SEQ ID NO: 242703 - DNA, 20 bp, synthetic construct
  source 1..20: mol_type = other DNA
gaagggatggatggatggat

SEQ ID NO: 242704 - DNA, 20 bp, synthetic construct
  source 1..20: mol_type = other DNA
tgaagggatggatggatgga

SEQ ID NO: 242705 - DNA, 20 bp, synthetic construct
  source 1..20: mol_type = other DNA
atgaagggatggatggatgg

SEQ ID NO: 242706 - DNA, 20 bp, synthetic construct
  source 1..20: mol_type = other DNA
gatgaagggatggatggatg

SEQ ID NO: 242707 - DNA, 20 bp, synthetic construct
  source 1..20: mol_type = other DNA
ggatgaagggatggatggat

SEQ ID NO: 242708 - DNA, 20 bp, synthetic construct
  source 1..20: mol_type = other DNA
tggatgaagggatggatgga

SEQ ID NO: 242709 - DNA, 20 bp, synthetic construct
  source 1..20: mol_type = other DNA
atggatgaagggatggatgg

SEQ ID NO: 242710 - DNA, 20 bp, synthetic construct
  source 1..20: mol_type = other DNA
gatggatgaagggatggatg

SEQ ID NO: 242711 - DNA, 20 bp, synthetic construct
  source 1..20: mol_type = other DNA
ggatggatgaagggatggat

SEQ ID NO: 242712 - DNA, 20 bp, synthetic construct
  source 1..20: mol_type = other DNA
gggatggatgaagggatgga

SEQ ID NO: 242713 - DNA, 20 bp, synthetic construct
  source 1..20: mol_type = other DNA
tgggatggatgaagggatgg

SEQ ID NO: 242714 - DNA, 20 bp, synthetic construct
  source 1..20: mol_type = other DNA
atgggatggatgaagggatg

SEQ ID NO: 242715 - DNA, 20 bp, synthetic construct
  source 1..20: mol_type = other DNA
gatgggatggatgaagggat

SEQ ID NO: 242716 - DNA, 20 bp, synthetic construct
  source 1..20: mol_type = other DNA
tgatgggatggatgaaggga

SEQ ID NO: 242717 - DNA, 20 bp, synthetic construct
  source 1..20: mol_type = other DNA
atgatgggatggatgaaggg

SEQ ID NO: 242718 - DNA, 20 bp, synthetic construct
  source 1..20: mol_type = other DNA
gatgatgggatggatgaagg

SEQ ID NO: 242719 - DNA, 20 bp, synthetic construct
  source 1..20: mol_type = other DNA
ggatgatgggatggatgaag

SEQ ID NO: 242720 - DNA, 20 bp, synthetic construct
  source 1..20: mol_type = other DNA
tggatgatgggatggatgaa

SEQ ID NO: 242721 - DNA, 20 bp, synthetic construct
  source 1..20: mol_type = other DNA
atggatgatgggatggatga

SEQ ID NO: 242722 - DNA, 20 bp, synthetic construct
  source 1..20: mol_type = other DNA
gatggatgatgggatggatg

SEQ ID NO: 242723 - DNA, 20 bp, synthetic construct
  source 1..20: mol_type = other DNA
ggatggatgatgggatggat

SEQ ID NO: 242724 - DNA, 20 bp, synthetic construct
  source 1..20: mol_type = other DNA
tggatggatgatgggatgga

SEQ ID NO: 242725 - DNA, 20 bp, synthetic construct
  source 1..20: mol_type = other DNA
ttggatggatgatgggatgg

SEQ ID NO: 242726 - DNA, 20 bp, synthetic construct
  source 1..20: mol_type = other DNA
attggatggatgatgggatg

SEQ ID NO: 242727 - DNA, 20 bp, synthetic construct
  source 1..20: mol_type = other DNA
aattggatggatgatgggat

SEQ ID NO: 242728 - DNA, 20 bp, synthetic construct
  source 1..20: mol_type = other DNA
taattggatggatgatggga

SEQ ID NO: 242729 - DNA, 20 bp, synthetic construct
  source 1..20: mol_type = other DNA
ataattggatggatgatggg

SEQ ID NO: 242730 - DNA, 20 bp, synthetic construct
  source 1..20: mol_type = other DNA
tataattggatggatgatgg

SEQ ID NO: 242731 - DNA, 20 bp, synthetic construct
  source 1..20: mol_type = other DNA
gtataattggatggatgatg

SEQ ID NO: 242732 - DNA, 20 bp, synthetic construct
  source 1..20: mol_type = other DNA
tgtataattggatggatgat

SEQ ID NO: 242733 - DNA, 20 bp, synthetic construct
  source 1..20: mol_type = other DNA
atgtataattggatggatga

SEQ ID NO: 242734 - DNA, 20 bp, synthetic construct
  source 1..20: mol_type = other DNA
tatgtataattggatggatg

SEQ ID NO: 242735 - DNA, 20 bp, synthetic construct
  source 1..20: mol_type = other DNA
gtatgtataattggatggat

SEQ ID NO: 242736 - DNA, 20 bp, synthetic construct
  source 1..20: mol_type = other DNA
tgtatgtataattggatgga

SEQ ID NO: 242737 - DNA, 20 bp, synthetic construct
  source 1..20: mol_type = other DNA
atgtatgtataattggatgg

SEQ ID NO: 242738 - DNA, 20 bp, synthetic construct
  source 1..20: mol_type = other DNA
gatgtatgtataattggatg

SEQ ID NO: 242739 - DNA, 20 bp, synthetic construct
  source 1..20: mol_type = other DNA
ggatgtatgtataattggat

SEQ ID NO: 242740 - DNA, 20 bp, synthetic construct
  source 1..20: mol_type = other DNA
tggatgtatgtataattgga

SEQ ID NO: 242741 - DNA, 20 bp, synthetic construct
  source 1..20: mol_type = other DNA
ttggatgtatgtataattgg

SEQ ID NO: 242742 - DNA, 20 bp, synthetic construct
  source 1..20: mol_type = other DNA
attggatgtatgtataattg

SEQ ID NO: 242743 - DNA, 20 bp, synthetic construct
  source 1..20: mol_type = other DNA
gattggatgtatgtataatt

SEQ ID NO: 242744 - DNA, 20 bp, synthetic construct
  source 1..20: mol_type = other DNA
tgattggatgtatgtataat

SEQ ID NO: 242745 - DNA, 20 bp, synthetic construct
  source 1..20: mol_type = other DNA
atgattggatgtatgtataa

SEQ ID NO: 242746 - DNA, 20 bp, synthetic construct
  source 1..20: mol_type = other DNA
tatgattggatgtatgtata

SEQ ID NO: 242747 - DNA, 20 bp, synthetic construct
  source 1..20: mol_type = other DNA
atatgattggatgtatgtat

SEQ ID NO: 242748 - DNA, 20 bp, synthetic construct
  source 1..20: mol_type = other DNA
tatatgattggatgtatgta

SEQ ID NO: 242749 - DNA, 20 bp, synthetic construct
  source 1..20: mol_type = other DNA
atatatgattggatgtatgt

SEQ ID NO: 242750 - DNA, 20 bp, synthetic construct
  source 1..20: mol_type = other DNA
gatatatgattggatgtatg

SEQ ID NO: 242751 - DNA, 20 bp, synthetic construct
  source 1..20: mol_type = other DNA
agatatatgattggatgtat

SEQ ID NO: 242752 - DNA, 20 bp, synthetic construct
  source 1..20: mol_type = other DNA
cagatatatgattggatgta

SEQ ID NO: 242753 - DNA, 20 bp, synthetic construct
  source 1..20: mol_type = other DNA
acagatatatgattggatgt

SEQ ID NO: 242754 - DNA, 20 bp, synthetic construct
  source 1..20: mol_type = other DNA
tacagatatatgattggatg

SEQ ID NO: 242755 - DNA, 20 bp, synthetic construct
  source 1..20: mol_type = other DNA
gtacagatatatgattggat

SEQ ID NO: 242756 - DNA, 20 bp, synthetic construct
  source 1..20: mol_type = other DNA
tgtacagatatatgattgga

SEQ ID NO: 242757 - DNA, 20 bp, synthetic construct
  source 1..20: mol_type = other DNA
atgtacagatatatgattgg

SEQ ID NO: 242758 - DNA, 20 bp, synthetic construct
  source 1..20: mol_type = other DNA
tatgtacagatatatgattg

SEQ ID NO: 242759 - DNA, 20 bp, synthetic construct
  source 1..20: mol_type = other DNA
ttatgtacagatatatgatt

SEQ ID NO: 242760 - DNA, 20 bp, synthetic construct
  source 1..20: mol_type = other DNA
attatgtacagatatatgat

SEQ ID NO: 242761 - DNA, 20 bp, synthetic construct
  source 1..20: mol_type = other DNA
gattatgtacagatatatga

SEQ ID NO: 242762 - DNA, 20 bp, synthetic construct
  source 1..20: mol_type = other DNA
ggattatgtacagatatatg

SEQ ID NO: 242763 - DNA, 20 bp, synthetic construct
  source 1..20: mol_type = other DNA
tggattatgtacagatatat

SEQ ID NO: 242764 - DNA, 20 bp, synthetic construct
  source 1..20: mol_type = other DNA
atggattatgtacagatata

SEQ ID NO: 242765 - DNA, 20 bp, synthetic construct
  source 1..20: mol_type = other DNA
aatggattatgtacagatat

SEQ ID NO: 242766 - DNA, 20 bp, synthetic construct
  source 1..20: mol_type = other DNA
gaatggattatgtacagata

SEQ ID NO: 242767 - DNA, 20 bp, synthetic construct
  source 1..20: mol_type = other DNA
agaatggattatgtacagat

SEQ ID NO: 242768 - DNA, 20 bp, synthetic construct
  source 1..20: mol_type = other DNA
aagaatggattatgtacaga

SEQ ID NO: 242769 - DNA, 20 bp, synthetic construct
  source 1..20: mol_type = other DNA
gaagaatggattatgtacag

SEQ ID NO: 242770 - DNA, 20 bp, synthetic construct
  source 1..20: mol_type = other DNA
ggaagaatggattatgtaca

SEQ ID NO: 242771 - DNA, 20 bp, synthetic construct
  source 1..20: mol_type = other DNA
gggaagaatggattatgtac

SEQ ID NO: 242772 - DNA, 20 bp, synthetic construct
  source 1..20: mol_type = other DNA
agggaagaatggattatgta

SEQ ID NO: 242773 - DNA, 20 bp, synthetic construct
  source 1..20: mol_type = other DNA
gagggaagaatggattatgt

SEQ ID NO: 242774 - DNA, 20 bp, synthetic construct
  source 1..20: mol_type = other DNA
cgagggaagaatggattatg

SEQ ID NO: 242775 - DNA, 20 bp, synthetic construct
  source 1..20: mol_type = other DNA
ccgagggaagaatggattat

SEQ ID NO: 242776 - DNA, 20 bp, synthetic construct
  source 1..20: mol_type = other DNA
accgagggaagaatggatta

SEQ ID NO: 242777 - DNA, 20 bp, synthetic construct
  source 1..20: mol_type = other DNA
aaccgagggaagaatggatt

SEQ ID NO: 242778 - DNA, 20 bp, synthetic construct
  source 1..20: mol_type = other DNA
gaaccgagggaagaatggat

SEQ ID NO: 242779 - DNA, 20 bp, synthetic construct
  source 1..20: mol_type = other DNA
tgaaccgagggaagaatgga

SEQ ID NO: 242780 - DNA, 20 bp, synthetic construct
  source 1..20: mol_type = other DNA
atgaaccgagggaagaatgg

SEQ ID NO: 242781 - DNA, 20 bp, synthetic construct
  source 1..20: mol_type = other DNA
gatgaaccgagggaagaatg

SEQ ID NO: 242782 - DNA, 20 bp, synthetic construct
  source 1..20: mol_type = other DNA
ggatgaaccgagggaagaat

SEQ ID NO: 242783 - DNA, 20 bp, synthetic construct
  source 1..20: mol_type = other DNA
tggatgaaccgagggaagaa

SEQ ID NO: 242784 - DNA, 20 bp, synthetic construct
  source 1..20: mol_type = other DNA
atggatgaaccgagggaaga

SEQ ID NO: 242785 - DNA, 20 bp, synthetic construct
  source 1..20: mol_type = other DNA
gatggatgaaccgagggaag

SEQ ID NO: 242786 - DNA, 20 bp, synthetic construct
  source 1..20: mol_type = other DNA
ggatggatgaaccgagggaa

SEQ ID NO: 242787 - DNA, 20 bp, synthetic construct
  source 1..20: mol_type = other DNA
tggatggatgaaccgaggga

SEQ ID NO: 242788 - DNA, 20 bp, synthetic construct
  source 1..20: mol_type = other DNA
atggatggatgaaccgaggg

SEQ ID NO: 242789 - DNA, 20 bp, synthetic construct
  source 1..20: mol_type = other DNA
gatggatggatgaaccgagg

SEQ ID NO: 242790 - DNA, 20 bp, synthetic construct
  source 1..20: mol_type = other DNA
ggatggatggatgaaccgag

SEQ ID NO: 242791 - DNA, 20 bp, synthetic construct
  source 1..20: mol_type = other DNA
tggatggatggatgaaccga

SEQ ID NO: 242792 - DNA, 20 bp, synthetic construct
  source 1..20: mol_type = other DNA
atggatggatggatgaaccg

SEQ ID NO: 242793 - DNA, 20 bp, synthetic construct
  source 1..20: mol_type = other DNA
aatggatggatggatgaacc

SEQ ID NO: 242794 - DNA, 20 bp, synthetic construct
  source 1..20: mol_type = other DNA
gaatggatggatggatgaac

SEQ ID NO: 242795 - DNA, 20 bp, synthetic construct
  source 1..20: mol_type = other DNA
tgaatggatggatggatgaa

SEQ ID NO: 242796 - DNA, 20 bp, synthetic construct
  source 1..20: mol_type = other DNA
atgaatggatggatggatga

SEQ ID NO: 242797 - DNA, 20 bp, synthetic construct
  source 1..20: mol_type = other DNA
gatgaatggatggatggatg

SEQ ID NO: 242798 - DNA, 20 bp, synthetic construct
  source 1..20: mol_type = other DNA
ggatgaatggatggatggat

SEQ ID NO: 242799 - DNA, 20 bp, synthetic construct
  source 1..20: mol_type = other DNA
tggatgaatggatggatgga

SEQ ID NO: 242800 - DNA, 20 bp, synthetic construct
  source 1..20: mol_type = other DNA
atggatgaatggatggatgg

SEQ ID NO: 242801 - DNA, 20 bp, synthetic construct
  source 1..20: mol_type = other DNA
gatggatgaatggatggatg

SEQ ID NO: 242802 - DNA, 20 bp, synthetic construct
  source 1..20: mol_type = other DNA
ggatggatgaatggatggat

SEQ ID NO: 242803 - DNA, 20 bp, synthetic construct
  source 1..20: mol_type = other DNA
tggatggatgaatggatgga

SEQ ID NO: 242804 - DNA, 20 bp, synthetic construct
  source 1..20: mol_type = other DNA
atggatggatgaatggatgg

SEQ ID NO: 242805 - DNA, 20 bp, synthetic construct
  source 1..20: mol_type = other DNA
gatggatggatgaatggatg

SEQ ID NO: 242806 - DNA, 20 bp, synthetic construct
  source 1..20: mol_type = other DNA
ggatggatggatgaatggat

SEQ ID NO: 242807 - DNA, 20 bp, synthetic construct
  source 1..20: mol_type = other DNA
tggatggatggatgaatgga

SEQ ID NO: 242808 - DNA, 20 bp, synthetic construct
  source 1..20: mol_type = other DNA
gtggatggatggatgaatgg

SEQ ID NO: 242809 - DNA, 20 bp, synthetic construct
  source 1..20: mol_type = other DNA
ggtggatggatggatgaatg

SEQ ID NO: 242810 - DNA, 20 bp, synthetic construct
  source 1..20: mol_type = other DNA
gggtggatggatggatgaat

SEQ ID NO: 242811 - DNA, 20 bp, synthetic construct
  source 1..20: mol_type = other DNA
tgggtggatggatggatgaa

SEQ ID NO: 242812 - DNA, 20 bp, synthetic construct
  source 1..20: mol_type = other DNA
atgggtggatggatggatga

SEQ ID NO: 242813 - DNA, 20 bp, synthetic construct
  source 1..20: mol_type = other DNA
gatgggtggatggatggatg

SEQ ID NO: 242814 - DNA, 20 bp, synthetic construct
  source 1..20: mol_type = other DNA
ggatgggtggatggatggat

SEQ ID NO: 242815 - DNA, 20 bp, synthetic construct
  source 1..20: mol_type = other DNA
gggatgggtggatggatgga

SEQ ID NO: 242816 - DNA, 20 bp, synthetic construct
  source 1..20: mol_type = other DNA
agggatgggtggatggatgg

SEQ ID NO: 242817 - DNA, 20 bp, synthetic construct
  source 1..20: mol_type = other DNA
aagggatgggtggatggatg

SEQ ID NO: 242818 - DNA, 20 bp, synthetic construct
  source 1..20: mol_type = other DNA
gaagggatgggtggatggat

SEQ ID NO: 242819 - DNA, 20 bp, synthetic construct
  source 1..20: mol_type = other DNA
ggaagggatgggtggatgga

SEQ ID NO: 242820 - DNA, 20 bp, synthetic construct
  source 1..20: mol_type = other DNA
aggaagggatgggtggatgg

SEQ ID NO: 242821 - DNA, 20 bp, synthetic construct
  source 1..20: mol_type = other DNA
aaggaagggatgggtggatg

SEQ ID NO: 242822 - DNA, 20 bp, synthetic construct
  source 1..20: mol_type = other DNA
gaaggaagggatgggtggat

SEQ ID NO: 242823 - DNA, 20 bp, synthetic construct
  source 1..20: mol_type = other DNA
tgaaggaagggatgggtgga

SEQ ID NO: 242824 - DNA, 20 bp, synthetic construct
  source 1..20: mol_type = other DNA
atgaaggaagggatgggtgg

SEQ ID NO: 242825 - DNA, 20 bp, synthetic construct
  source 1..20: mol_type = other DNA
gatgaaggaagggatgggtg

SEQ ID NO: 242826 - DNA, 20 bp, synthetic construct
  source 1..20: mol_type = other DNA
ggatgaaggaagggatgggt

SEQ ID NO: 242827 - DNA, 20 bp, synthetic construct
  source 1..20: mol_type = other DNA
aggatgaaggaagggatggg

SEQ ID NO: 242828 - DNA, 20 bp, synthetic construct
  source 1..20: mol_type = other DNA
aaggatgaaggaagggatgg

SEQ ID NO: 242829 - DNA, 20 bp, synthetic construct
  source 1..20: mol_type = other DNA
gaaggatgaaggaagggatg

SEQ ID NO: 242830 - DNA, 20 bp, synthetic construct
  source 1..20: mol_type = other DNA
ggaaggatgaaggaagggat

SEQ ID NO: 242831 - DNA, 20 bp, synthetic construct
  source 1..20: mol_type = other DNA
aggaaggatgaaggaaggga

SEQ ID NO: 242832 - DNA, 20 bp, synthetic construct
  source 1..20: mol_type = other DNA
taggaaggatgaaggaaggg

SEQ ID NO: 242833 - DNA, 20 bp, synthetic construct
  source 1..20: mol_type = other DNA
ataggaaggatgaaggaagg

SEQ ID NO: 242834 - DNA, 20 bp, synthetic construct
  source 1..20: mol_type = other DNA
gataggaaggatgaaggaag

SEQ ID NO: 242835 - DNA, 20 bp, synthetic construct
  source 1..20: mol_type = other DNA
tgataggaaggatgaaggaa

SEQ ID NO: 242836 - DNA, 20 bp, synthetic construct
  source 1..20: mol_type = other DNA
atgataggaaggatgaagga

SEQ ID NO: 242837 - DNA, 20 bp, synthetic construct
  source 1..20: mol_type = other DNA
gatgataggaaggatgaagg

SEQ ID NO: 242838 - DNA, 20 bp, synthetic construct
  source 1..20: mol_type = other DNA
ggatgataggaaggatgaag

SEQ ID NO: 242839 - DNA, 20 bp, synthetic construct
  source 1..20: mol_type = other DNA
tggatgataggaaggatgaa

SEQ ID NO: 242840 - DNA, 20 bp, synthetic construct
  source 1..20: mol_type = other DNA
atggatgataggaaggatga

SEQ ID NO: 242841 - DNA, 20 bp, synthetic construct
  source 1..20: mol_type = other DNA
gatggatgataggaaggatg

SEQ ID NO: 242842 - DNA, 20 bp, synthetic construct
  source 1..20: mol_type = other DNA
ggatggatgataggaaggat

SEQ ID NO: 242843 - DNA, 20 bp, synthetic construct
  source 1..20: mol_type = other DNA
tggatggatgataggaagga

SEQ ID NO: 242844 - DNA, 20 bp, synthetic construct
  source 1..20: mol_type = other DNA
ttggatggatgataggaagg

SEQ ID NO: 242845 - DNA, 20 bp, synthetic construct
  source 1..20: mol_type = other DNA
attggatggatgataggaag

SEQ ID NO: 242846 - DNA, 20 bp, synthetic construct
  source 1..20: mol_type = other DNA
gattggatggatgataggaa

SEQ ID NO: 242847 - DNA, 20 bp, synthetic construct
  source 1..20: mol_type = other DNA
tgattggatggatgatagga

SEQ ID NO: 242848 - DNA, 20 bp, synthetic construct
  source 1..20: mol_type = other DNA
atgattggatggatgatagg

SEQ ID NO: 242849 - DNA, 20 bp, synthetic construct
  source 1..20: mol_type = other DNA
tatgattggatggatgatag

SEQ ID NO: 242850 - DNA, 20 bp, synthetic construct
  source 1..20: mol_type = other DNA
atatgattggatggatgata

SEQ ID NO: 242851 - DNA, 20 bp, synthetic construct
  source 1..20: mol_type = other DNA
tatatgattggatggatgat

SEQ ID NO: 242852 - DNA, 20 bp, synthetic construct
  source 1..20: mol_type = other DNA
atatatgattggatggatga

SEQ ID NO: 242853 - DNA, 20 bp, synthetic construct
  source 1..20: mol_type = other DNA
gatatatgattggatggatg

SEQ ID NO: 242854 - DNA, 20 bp, synthetic construct
  source 1..20: mol_type = other DNA
agatatatgattggatggat

SEQ ID NO: 242855 - DNA, 20 bp, synthetic construct
  source 1..20: mol_type = other DNA
cagatatatgattggatgga

SEQ ID NO: 242856 - DNA, 20 bp, synthetic construct
  source 1..20: mol_type = other DNA
acagatatatgattggatgg

SEQ ID NO: 242857 - DNA, 20 bp, synthetic construct
  source 1..20: mol_type = other DNA
tacagatatatgattggatg

SEQ ID NO: 242858 - DNA, 20 bp, synthetic construct
  source 1..20: mol_type = other DNA
gtacagatatatgattggat

SEQ ID NO: 242859 - DNA, 20 bp, synthetic construct
  source 1..20: mol_type = other DNA
tgtacagatatatgattgga

SEQ ID NO: 242860 - DNA, 20 bp, synthetic construct
  source 1..20: mol_type = other DNA
atgtacagatatatgattgg

SEQ ID NO: 242861 - DNA, 20 bp, synthetic construct
  source 1..20: mol_type = other DNA
tatgtacagatatatgattg

SEQ ID NO: 242862 - DNA, 20 bp, synthetic construct
  source 1..20: mol_type = other DNA
ttatgtacagatatatgatt

SEQ ID NO: 242863 - DNA, 20 bp, synthetic construct
  source 1..20: mol_type = other DNA
attatgtacagatatatgat

SEQ ID NO: 242864 - DNA, 20 bp, synthetic construct
  source 1..20: mol_type = other DNA
gattatgtacagatatatga

SEQ ID NO: 242865 - DNA, 20 bp, synthetic construct
  source 1..20: mol_type = other DNA
ggattatgtacagatatatg

SEQ ID NO: 242866 - DNA, 20 bp, synthetic construct
  source 1..20: mol_type = other DNA
tggattatgtacagatatat

SEQ ID NO: 242867 - DNA, 20 bp, synthetic construct
  source 1..20: mol_type = other DNA
atggattatgtacagatata

SEQ ID NO: 242868 - DNA, 20 bp, synthetic construct
  source 1..20: mol_type = other DNA
aatggattatgtacagatat

SEQ ID NO: 242869 - DNA, 20 bp, synthetic construct
  source 1..20: mol_type = other DNA
gaatggattatgtacagata

SEQ ID NO: 242870 - DNA, 20 bp, synthetic construct
  source 1..20: mol_type = other DNA
agaatggattatgtacagat

SEQ ID NO: 242871 - DNA, 20 bp, synthetic construct
  source 1..20: mol_type = other DNA
aagaatggattatgtacaga

SEQ ID NO: 242872 - DNA, 20 bp, synthetic construct
  source 1..20: mol_type = other DNA
gaagaatggattatgtacag

SEQ ID NO: 242873 - DNA, 20 bp, synthetic construct
  source 1..20: mol_type = other DNA
ggaagaatggattatgtaca

SEQ ID NO: 242874 - DNA, 20 bp, synthetic construct
  source 1..20: mol_type = other DNA
gggaagaatggattatgtac

SEQ ID NO: 242875 - DNA, 20 bp, synthetic construct
  source 1..20: mol_type = other DNA
agggaagaatggattatgta

SEQ ID NO: 242876 - DNA, 20 bp, synthetic construct
  source 1..20: mol_type = other DNA
gagggaagaatggattatgt

SEQ ID NO: 242877 - DNA, 20 bp, synthetic construct
  source 1..20: mol_type = other DNA
cgagggaagaatggattatg

SEQ ID NO: 242878 - DNA, 20 bp, synthetic construct
  source 1..20: mol_type = other DNA
ccgagggaagaatggattat

SEQ ID NO: 242879 - DNA, 20 bp, synthetic construct
  source 1..20: mol_type = other DNA
accgagggaagaatggatta

SEQ ID NO: 242880 - DNA, 20 bp, synthetic construct
  source 1..20: mol_type = other DNA
aaccgagggaagaatggatt

SEQ ID NO: 242881 - DNA, 20 bp, synthetic construct
  source 1..20: mol_type = other DNA
gaaccgagggaagaatggat

SEQ ID NO: 242882 - DNA, 20 bp, synthetic construct
  source 1..20: mol_type = other DNA
tgaaccgagggaagaatgga

SEQ ID NO: 242883 - DNA, 20 bp, synthetic construct
  source 1..20: mol_type = other DNA
atgaaccgagggaagaatgg

SEQ ID NO: 242884 - DNA, 20 bp, synthetic construct
  source 1..20: mol_type = other DNA
gatgaaccgagggaagaatg

SEQ ID NO: 242885 - DNA, 20 bp, synthetic construct
  source 1..20: mol_type = other DNA
ggatgaaccgagggaagaat

SEQ ID NO: 242886 - DNA, 20 bp, synthetic construct
  source 1..20: mol_type = other DNA
tggatgaaccgagggaagaa

SEQ ID NO: 242887 - DNA, 20 bp, synthetic construct
  source 1..20: mol_type = other DNA
atggatgaaccgagggaaga

SEQ ID NO: 242888 - DNA, 20 bp, synthetic construct
  source 1..20: mol_type = other DNA
gatggatgaaccgagggaag

SEQ ID NO: 242889 - DNA, 20 bp, synthetic construct
  source 1..20: mol_type = other DNA
ggatggatgaaccgagggaa

SEQ ID NO: 242890 - DNA, 20 bp, synthetic construct
  source 1..20: mol_type = other DNA
tggatggatgaaccgaggga

SEQ ID NO: 242891 - DNA, 20 bp, synthetic construct
  source 1..20: mol_type = other DNA
atggatggatgaaccgaggg

SEQ ID NO: 242892 - DNA, 20 bp, synthetic construct
  source 1..20: mol_type = other DNA
gatggatggatgaaccgagg

SEQ ID NO: 242893 - DNA, 20 bp, synthetic construct
  source 1..20: mol_type = other DNA
ggatggatggatgaaccgag

SEQ ID NO: 242894 - DNA, 20 bp, synthetic construct
  source 1..20: mol_type = other DNA
tggatggatggatgaaccga

SEQ ID NO: 242895 - DNA, 20 bp, synthetic construct
  source 1..20: mol_type = other DNA
atggatggatggatgaaccg

SEQ ID NO: 242896 - DNA, 20 bp, synthetic construct
  source 1..20: mol_type = other DNA
aatggatggatggatgaacc

SEQ ID NO: 242897 - DNA, 20 bp, synthetic construct
  source 1..20: mol_type = other DNA
gaatggatggatggatgaac

SEQ ID NO: 242898 - DNA, 20 bp, synthetic construct
  source 1..20: mol_type = other DNA
tgaatggatggatggatgaa

SEQ ID NO: 242899 - DNA, 20 bp, synthetic construct
  source 1..20: mol_type = other DNA
atgaatggatggatggatga

SEQ ID NO: 242900 - DNA, 20 bp, synthetic construct
  source 1..20: mol_type = other DNA
gatgaatggatggatggatg

SEQ ID NO: 242901 - DNA, 20 bp, synthetic construct
  source 1..20: mol_type = other DNA
ggatgaatggatggatggat

SEQ ID NO: 242902 - DNA, 20 bp, synthetic construct
  source 1..20: mol_type = other DNA
tggatgaatggatggatgga

SEQ ID NO: 242903 - DNA, 20 bp, synthetic construct
  source 1..20: mol_type = other DNA
atggatgaatggatggatgg

SEQ ID NO: 242904 - DNA, 20 bp, synthetic construct
  source 1..20: mol_type = other DNA
gatggatgaatggatggatg

SEQ ID NO: 242905 - DNA, 20 bp, synthetic construct
  source 1..20: mol_type = other DNA
ggatggatgaatggatggat

SEQ ID NO: 242906 - DNA, 20 bp, synthetic construct
  source 1..20: mol_type = other DNA
tggatggatgaatggatgga

SEQ ID NO: 242907 - DNA, 20 bp, synthetic construct
  source 1..20: mol_type = other DNA
atggatggatgaatggatgg

SEQ ID NO: 242908 - DNA, 20 bp, synthetic construct
  source 1..20: mol_type = other DNA
gatggatggatgaatggatg

SEQ ID NO: 242909 - DNA, 20 bp, synthetic construct
  source 1..20: mol_type = other DNA
ggatggatggatgaatggat

SEQ ID NO: 242910 - DNA, 20 bp, synthetic construct
  source 1..20: mol_type = other DNA
tggatggatggatgaatgga

SEQ ID NO: 242911 - DNA, 20 bp, synthetic construct
  source 1..20: mol_type = other DNA
gtggatggatggatgaatgg

SEQ ID NO: 242912 - DNA, 20 bp, synthetic construct
  source 1..20: mol_type = other DNA
ggtggatggatggatgaatg

SEQ ID NO: 242913 - DNA, 20 bp, synthetic construct
  source 1..20: mol_type = other DNA
gggtggatggatggatgaat

SEQ ID NO: 242914 - DNA, 20 bp, synthetic construct
  source 1..20: mol_type = other DNA
tgggtggatggatggatgaa

SEQ ID NO: 242915 - DNA, 20 bp, synthetic construct
  source 1..20: mol_type = other DNA
atgggtggatggatggatga

SEQ ID NO: 242916 - DNA, 20 bp, synthetic construct
  source 1..20: mol_type = other DNA
gatgggtggatggatggatg

SEQ ID NO: 242917 - DNA, 20 bp, synthetic construct
  source 1..20: mol_type = other DNA
ggatgggtggatggatggat

SEQ ID NO: 242918 - DNA, 20 bp, synthetic construct
  source 1..20: mol_type = other DNA
gggatgggtggatggatgga

SEQ ID NO: 242919 - DNA, 20 bp, synthetic construct
  source 1..20: mol_type = other DNA
agggatgggtggatggatgg

SEQ ID NO: 242920 - DNA, 20 bp, synthetic construct
  source 1..20: mol_type = other DNA
aagggatgggtggatggatg

SEQ ID NO: 242921 - DNA, 20 bp, synthetic construct
  source 1..20: mol_type = other DNA
gaagggatgggtggatggat

SEQ ID NO: 242922 - DNA, 20 bp, synthetic construct
  source 1..20: mol_type = other DNA
ggaagggatgggtggatgga

SEQ ID NO: 242923 - DNA, 20 bp, synthetic construct
  source 1..20: mol_type = other DNA
aggaagggatgggtggatgg

SEQ ID NO: 242924 - DNA, 20 bp, synthetic construct
  source 1..20: mol_type = other DNA
aaggaagggatgggtggatg

SEQ ID NO: 242925 - DNA, 20 bp, synthetic construct
  source 1..20: mol_type = other DNA
gaaggaagggatgggtggat

SEQ ID NO: 242926 - DNA, 20 bp, synthetic construct
  source 1..20: mol_type = other DNA
tgaaggaagggatgggtgga

SEQ ID NO: 242927 - DNA, 20 bp, synthetic construct
  source 1..20: mol_type = other DNA
atgaaggaagggatgggtgg

SEQ ID NO: 242928 - DNA, 20 bp, synthetic construct
  source 1..20: mol_type = other DNA
gatgaaggaagggatgggtg

SEQ ID NO: 242929 - DNA, 20 bp, synthetic construct
  source 1..20: mol_type = other DNA
ggatgaaggaagggatgggt

SEQ ID NO: 242930 - DNA, 20 bp, synthetic construct
  source 1..20: mol_type = other DNA
aggatgaaggaagggatggg

SEQ ID NO: 242931 - DNA, 20 bp, synthetic construct
  source 1..20: mol_type = other DNA
aaggatgaaggaagggatgg

SEQ ID NO: 242932 - DNA, 20 bp, synthetic construct
  source 1..20: mol_type = other DNA
gaaggatgaaggaagggatg

SEQ ID NO: 242933 - DNA, 20 bp, synthetic construct
  source 1..20: mol_type = other DNA
ggaaggatgaaggaagggat

SEQ ID NO: 242934 - DNA, 20 bp, synthetic construct
  source 1..20: mol_type = other DNA
aggaaggatgaaggaaggga

SEQ ID NO: 242935 - DNA, 20 bp, synthetic construct
  source 1..20: mol_type = other DNA
taggaaggatgaaggaaggg

SEQ ID NO: 242936 - DNA, 20 bp, synthetic construct
  source 1..20: mol_type = other DNA
ataggaaggatgaaggaagg

SEQ ID NO: 242937 - DNA, 20 bp, synthetic construct
  source 1..20: mol_type = other DNA
gataggaaggatgaaggaag

SEQ ID NO: 242938 - DNA, 20 bp, synthetic construct
  source 1..20: mol_type = other DNA
tgataggaaggatgaaggaa

SEQ ID NO: 242939 - DNA, 20 bp, synthetic construct
  source 1..20: mol_type = other DNA
atgataggaaggatgaagga

SEQ ID NO: 242940 - DNA, 20 bp, synthetic construct
  source 1..20: mol_type = other DNA
gatgataggaaggatgaagg

SEQ ID NO: 242941 - DNA, 20 bp, synthetic construct
  source 1..20: mol_type = other DNA
ggatgataggaaggatgaag

SEQ ID NO: 242942 - DNA, 20 bp, synthetic construct
  source 1..20: mol_type = other DNA
tggatgataggaaggatgaa

SEQ ID NO: 242943 - DNA, 20 bp, synthetic construct
  source 1..20: mol_type = other DNA
atggatgataggaaggatga

SEQ ID NO: 242944 - DNA, 20 bp, synthetic construct
  source 1..20: mol_type = other DNA
gatggatgataggaaggatg

SEQ ID NO: 242945 - DNA, 20 bp, synthetic construct
  source 1..20: mol_type = other DNA
ggatggatgataggaaggat

SEQ ID NO: 242946 - DNA, 20 bp, synthetic construct
  source 1..20: mol_type = other DNA
tggatggatgataggaagga

SEQ ID NO: 242947 - DNA, 20 bp, synthetic construct
  source 1..20: mol_type = other DNA
ttggatggatgataggaagg

SEQ ID NO: 242948 - DNA, 20 bp, synthetic construct
  source 1..20: mol_type = other DNA
attggatggatgataggaag

SEQ ID NO: 242949 - DNA, 20 bp, synthetic construct
  source 1..20: mol_type = other DNA
gattggatggatgataggaa

SEQ ID NO: 242950 - DNA, 20 bp, synthetic construct
  source 1..20: mol_type = other DNA
tgattggatggatgatagga

SEQ ID NO: 242951 - DNA, 20 bp, synthetic construct
  source 1..20: mol_type = other DNA
atgattggatggatgatagg

SEQ ID NO: 242952 - DNA, 20 bp, synthetic construct
  source 1..20: mol_type = other DNA
tatgattggatggatgatag

SEQ ID NO: 242953 - DNA, 20 bp, synthetic construct
  source 1..20: mol_type = other DNA
gtatgattggatggatgata

SEQ ID NO: 242954 - DNA, 20 bp, synthetic construct
  source 1..20: mol_type = other DNA
tgtatgattggatggatgat

SEQ ID NO: 242955 - DNA, 20 bp, synthetic construct
  source 1..20: mol_type = other DNA
atgtatgattggatggatga

SEQ ID NO: 242956 - DNA, 20 bp, synthetic construct
  source 1..20: mol_type = other DNA
tatgtatgattggatggatg

SEQ ID NO: 242957 - DNA, 20 bp, synthetic construct
  source 1..20: mol_type = other DNA
atatgtatgattggatggat

SEQ ID NO: 242958 - DNA, 20 bp, synthetic construct
  source 1..20: mol_type = other DNA
tatatgtatgattggatgga

SEQ ID NO: 242959 - DNA, 20 bp, synthetic construct
  source 1..20: mol_type = other DNA
atatatgtatgattggatgg

SEQ ID NO: 242960 - DNA, 20 bp, synthetic construct
  source 1..20: mol_type = other DNA
gatatatgtatgattggatg

SEQ ID NO: 242961 - DNA, 20 bp, synthetic construct
  source 1..20: mol_type = other DNA
ggatatatgtatgattggat

SEQ ID NO: 242962 - DNA, 20 bp, synthetic construct
  source 1..20: mol_type = other DNA
tggatatatgtatgattgga

SEQ ID NO: 242963 - DNA, 20 bp, synthetic construct
  source 1..20: mol_type = other DNA
ttggatatatgtatgattgg

SEQ ID NO: 242964 - DNA, 20 bp, synthetic construct
  source 1..20: mol_type = other DNA
attggatatatgtatgattg

SEQ ID NO: 242965 - DNA, 20 bp, synthetic construct
  source 1..20: mol_type = other DNA
gattggatatatgtatgatt

SEQ ID NO: 242966 - DNA, 20 bp, synthetic construct
  source 1..20: mol_type = other DNA
tgattggatatatgtatgat

SEQ ID NO: 242967 - DNA, 20 bp, synthetic construct
  source 1..20: mol_type = other DNA
atgattggatatatgtatga

SEQ ID NO: 242968 - DNA, 20 bp, synthetic construct
  source 1..20: mol_type = other DNA
tatgattggatatatgtatg

SEQ ID NO: 242969 - DNA, 20 bp, synthetic construct
  source 1..20: mol_type = other DNA
gtatgattggatatatgtat

SEQ ID NO: 242970 - DNA, 20 bp, synthetic construct
  source 1..20: mol_type = other DNA
tgtatgattggatatatgta

SEQ ID NO: 242971 - DNA, 20 bp, synthetic construct
  source 1..20: mol_type = other DNA
atgtatgattggatatatgt

SEQ ID NO: 242972 - DNA, 20 bp, synthetic construct
  source 1..20: mol_type = other DNA
gatgtatgattggatatatg

SEQ ID NO: 242973 - DNA, 20 bp, synthetic construct
  source 1..20: mol_type = other DNA
agatgtatgattggatatat

SEQ ID NO: 242974 - DNA, 20 bp, synthetic construct
  source 1..20: mol_type = other DNA
cagatgtatgattggatata

SEQ ID NO: 242975 - DNA, 20 bp, synthetic construct
  source 1..20: mol_type = other DNA
gcagatgtatgattggatat

SEQ ID NO: 242976 - DNA, 20 bp, synthetic construct
  source 1..20: mol_type = other DNA
tgcagatgtatgattggata

SEQ ID NO: 242977 - DNA, 20 bp, synthetic construct
  source 1..20: mol_type = other DNA
gtgcagatgtatgattggat

SEQ ID NO: 242978 - DNA, 20 bp, synthetic construct
  source 1..20: mol_type = other DNA
tgtgcagatgtatgattgga

SEQ ID NO: 242979 - DNA, 20 bp, synthetic construct
  source 1..20: mol_type = other DNA
atgtgcagatgtatgattgg

SEQ ID NO: 242980 - DNA, 20 bp, synthetic construct
  source 1..20: mol_type = other DNA
gatgtgcagatgtatgattg

SEQ ID NO: 242981 - DNA, 20 bp, synthetic construct
  source 1..20: mol_type = other DNA
tgatgtgcagatgtatgatt

SEQ ID NO: 242982 - DNA, 20 bp, synthetic construct
  source 1..20: mol_type = other DNA
gtgatgtgcagatgtatgat

SEQ ID NO: 242983 - DNA, 20 bp, synthetic construct
  source 1..20: mol_type = other DNA
ggtgatgtgcagatgtatga

SEQ ID NO: 242984 - DNA, 20 bp, synthetic construct
  source 1..20: mol_type = other DNA
tggtgatgtgcagatgtatg

SEQ ID NO: 242985 - DNA, 20 bp, synthetic construct
  source 1..20: mol_type = other DNA
ctggtgatgtgcagatgtat

SEQ ID NO: 242986 - DNA, 20 bp, synthetic construct
  source 1..20: mol_type = other DNA
gctggtgatgtgcagatgta

SEQ ID NO: 242987 - DNA, 20 bp, synthetic construct
  source 1..20: mol_type = other DNA
agctggtgatgtgcagatgt

SEQ ID NO: 242988 - DNA, 20 bp, synthetic construct
  source 1..20: mol_type = other DNA
gagctggtgatgtgcagatg

SEQ ID NO: 242989 - DNA, 20 bp, synthetic construct
  source 1..20: mol_type = other DNA
tgagctggtgatgtgcagat

SEQ ID NO: 242990 - DNA, 20 bp, synthetic construct
  source 1..20: mol_type = other DNA
atgagctggtgatgtgcaga

SEQ ID NO: 242991 - DNA, 20 bp, synthetic construct
  source 1..20: mol_type = other DNA
gatgagctggtgatgtgcag

SEQ ID NO: 242992 - DNA, 20 bp, synthetic construct
  source 1..20: mol_type = other DNA
ggatgagctggtgatgtgca

SEQ ID NO: 242993 - DNA, 20 bp, synthetic construct
  source 1..20: mol_type = other DNA
tggatgagctggtgatgtgc

SEQ ID NO: 242994 - DNA, 20 bp, synthetic construct
  source 1..20: mol_type = other DNA
atggatgagctggtgatgtg

SEQ ID NO: 242995 - DNA, 20 bp, synthetic construct
  source 1..20: mol_type = other DNA
gatggatgagctggtgatgt

SEQ ID NO: 242996 - DNA, 20 bp, synthetic construct
  source 1..20: mol_type = other DNA
agatggatgagctggtgatg

SEQ ID NO: 242997 - DNA, 20 bp, synthetic construct
  source 1..20: mol_type = other DNA
tagatggatgagctggtgat

SEQ ID NO: 242998 - DNA, 20 bp, synthetic construct
  source 1..20: mol_type = other DNA
atagatggatgagctggtga

SEQ ID NO: 242999 - DNA, 20 bp, synthetic construct
  source 1..20: mol_type = other DNA
gatagatggatgagctggtg

SEQ ID NO: 243000 - DNA, 20 bp, synthetic construct
  source 1..20: mol_type = other DNA
ggatagatggatgagctggt

SEQ ID NO: 243001 - DNA, 20 bp, synthetic construct
  source 1..20: mol_type = other DNA
tggatagatggatgagctgg

SEQ ID NO: 243002 - DNA, 20 bp, synthetic construct
  source 1..20: mol_type = other DNA
atggatagatggatgagctg

SEQ ID NO: 243003 - DNA, 20 bp, synthetic construct
  source 1..20: mol_type = other DNA
aatggatagatggatgagct

SEQ ID NO: 243004 - DNA, 20 bp, synthetic construct
  source 1..20: mol_type = other DNA
aaatggatagatggatgagc

SEQ ID NO: 243005 - DNA, 20 bp, synthetic construct
  source 1..20: mol_type = other DNA
taaatggatagatggatgag

SEQ ID NO: 243006 - DNA, 20 bp, synthetic construct
  source 1..20: mol_type = other DNA
ataaatggatagatggatga

SEQ ID NO: 243007 - DNA, 20 bp, synthetic construct
  source 1..20: mol_type = other DNA
gataaatggatagatggatg

SEQ ID NO: 243008 - DNA, 20 bp, synthetic construct
  source 1..20: mol_type = other DNA
ggataaatggatagatggat

SEQ ID NO: 243009 - DNA, 20 bp, synthetic construct
  source 1..20: mol_type = other DNA
tggataaatggatagatgga

SEQ ID NO: 243010 - DNA, 20 bp, synthetic construct
  source 1..20: mol_type = other DNA
atggataaatggatagatgg

SEQ ID NO: 243011 - DNA, 20 bp, synthetic construct
  source 1..20: mol_type = other DNA
gatggataaatggatagatg

SEQ ID NO: 243012 - DNA, 20 bp, synthetic construct
  source 1..20: mol_type = other DNA
ggatggataaatggatagat

SEQ ID NO: 243013 - DNA, 20 bp, synthetic construct
  source 1..20: mol_type = other DNA
tggatggataaatggataga

SEQ ID NO: 243014 - DNA, 20 bp, synthetic construct
  source 1..20: mol_type = other DNA
atggatggataaatggatag

SEQ ID NO: 243015 - DNA, 20 bp, synthetic construct
  source 1..20: mol_type = other DNA
gatggatggataaatggata

SEQ ID NO: 243016 - DNA, 20 bp, synthetic construct
  source 1..20: mol_type = other DNA
ggatggatggataaatggat

SEQ ID NO: 243017 - DNA, 20 bp, synthetic construct
  source 1..20: mol_type = other DNA
aggatggatggataaatgga

SEQ ID NO: 243018 - DNA, 20 bp, synthetic construct
  source 1..20: mol_type = other DNA
aaggatggatggataaatgg

SEQ ID NO: 243019 - DNA, 20 bp, synthetic construct
  source 1..20: mol_type = other DNA
gaaggatggatggataaatg

SEQ ID NO: 243020 - DNA, 20 bp, synthetic construct
  source 1..20: mol_type = other DNA
ggaaggatggatggataaat

SEQ ID NO: 243021 - DNA, 20 bp, synthetic construct
  source 1..20: mol_type = other DNA
aggaaggatggatggataaa

SEQ ID NO: 243022 - DNA, 20 bp, synthetic construct
  source 1..20: mol_type = other DNA
aaggaaggatggatggataa

SEQ ID NO: 243023 - DNA, 20 bp, synthetic construct
  source 1..20: mol_type = other DNA
gaaggaaggatggatggata

SEQ ID NO: 243024 - DNA, 20 bp, synthetic construct
  source 1..20: mol_type = other DNA
ggaaggaaggatggatggat

SEQ ID NO: 243025 - DNA, 20 bp, synthetic construct
  source 1..20: mol_type = other DNA
tggaaggaaggatggatgga

SEQ ID NO: 243026 - DNA, 20 bp, synthetic construct
  source 1..20: mol_type = other DNA
atggaaggaaggatggatgg

SEQ ID NO: 243027 - DNA, 20 bp, synthetic construct
  source 1..20: mol_type = other DNA
gatggaaggaaggatggatg

SEQ ID NO: 243028 - DNA, 20 bp, synthetic construct
  source 1..20: mol_type = other DNA
ggatggaaggaaggatggat

SEQ ID NO: 243029 - DNA, 20 bp, synthetic construct
  source 1..20: mol_type = other DNA
tggatggaaggaaggatgga

SEQ ID NO: 243030 - DNA, 20 bp, synthetic construct
  source 1..20: mol_type = other DNA
atggatggaaggaaggatgg

SEQ ID NO: 243031 - DNA, 20 bp, synthetic construct
  source 1..20: mol_type = other DNA
gatggatggaaggaaggatg

SEQ ID NO: 243032 - DNA, 20 bp, synthetic construct
  source 1..20: mol_type = other DNA
tgatggatggaaggaaggat

SEQ ID NO: 243033 - DNA, 20 bp, synthetic construct
  source 1..20: mol_type = other DNA
atgatggatggaaggaagga

SEQ ID NO: 243034 - DNA, 20 bp, synthetic construct
  source 1..20: mol_type = other DNA
aatgatggatggaaggaagg

SEQ ID NO: 243035 - DNA, 20 bp, synthetic construct
  source 1..20: mol_type = other DNA
gaatgatggatggaaggaag

SEQ ID NO: 243036 - DNA, 20 bp, synthetic construct
  source 1..20: mol_type = other DNA
tgaatgatggatggaaggaa

SEQ ID NO: 243037 - DNA, 20 bp, synthetic construct
  source 1..20: mol_type = other DNA
atgaatgatggatggaagga

SEQ ID NO: 243038 - DNA, 20 bp, synthetic construct
  source 1..20: mol_type = other DNA
gatgaatgatggatggaagg

SEQ ID NO: 243039 - DNA, 20 bp, synthetic construct
  source 1..20: mol_type = other DNA
ggatgaatgatggatggaag

SEQ ID NO: 243040 - DNA, 20 bp, synthetic construct
  source 1..20: mol_type = other DNA
tggatgaatgatggatggaa

SEQ ID NO: 243041 - DNA, 20 bp, synthetic construct
  source 1..20: mol_type = other DNA
atggatgaatgatggatgga

SEQ ID NO: 243042 - DNA, 20 bp, synthetic construct
  source 1..20: mol_type = other DNA
gatggatgaatgatggatgg

SEQ ID NO: 243043 - DNA, 20 bp, synthetic construct
  source 1..20: mol_type = other DNA
tgatggatgaatgatggatg

SEQ ID NO: 243044 - DNA, 20 bp, synthetic construct
  source 1..20: mol_type = other DNA
atgatggatgaatgatggat

SEQ ID NO: 243045 - DNA, 20 bp, synthetic construct
  source 1..20: mol_type = other DNA
tatgatggatgaatgatgga

SEQ ID NO: 243046 - DNA, 20 bp, synthetic construct
  source 1..20: mol_type = other DNA
gtatgatggatgaatgatgg

SEQ ID NO: 243047 - DNA, 20 bp, synthetic construct
  source 1..20: mol_type = other DNA
tgtatgatggatgaatgatg

SEQ ID NO: 243048 - DNA, 20 bp, synthetic construct
  source 1..20: mol_type = other DNA
atgtatgatggatgaatgat

SEQ ID NO: 243049 - DNA, 20 bp, synthetic construct
  source 1..20: mol_type = other DNA
tatgtatgatggatgaatga

SEQ ID NO: 243050 - DNA, 20 bp, synthetic construct
  source 1..20: mol_type = other DNA
gtatgtatgatggatgaatg

SEQ ID NO: 243051 - DNA, 20 bp, synthetic construct
  source 1..20: mol_type = other DNA
tgtatgtatgatggatgaat

SEQ ID NO: 243052 - DNA, 20 bp, synthetic construct
  source 1..20: mol_type = other DNA
atgtatgtatgatggatgaa

SEQ ID NO: 243053 - DNA, 20 bp, synthetic construct
  source 1..20: mol_type = other DNA
gatgtatgtatgatggatga

SEQ ID NO: 243054 - DNA, 20 bp, synthetic construct
  source 1..20: mol_type = other DNA
agatgtatgtatgatggatg

SEQ ID NO: 243055 - DNA, 20 bp, synthetic construct
  source 1..20: mol_type = other DNA
tagatgtatgtatgatggat

SEQ ID NO: 243056 - DNA, 20 bp, synthetic construct
  source 1..20: mol_type = other DNA
ttagatgtatgtatgatgga

SEQ ID NO: 243057 - DNA, 20 bp, synthetic construct
  source 1..20: mol_type = other DNA
gttagatgtatgtatgatgg

SEQ ID NO: 243058 - DNA, 20 bp, synthetic construct
  source 1..20: mol_type = other DNA
ggttagatgtatgtatgatg

SEQ ID NO: 243059 - DNA, 20 bp, synthetic construct
  source 1..20: mol_type = other DNA
tggttagatgtatgtatgat

SEQ ID NO: 243060 - DNA, 20 bp, synthetic construct
  source 1..20: mol_type = other DNA
atggttagatgtatgtatga

SEQ ID NO: 243061 - DNA, 20 bp, synthetic construct
  source 1..20: mol_type = other DNA
tatggttagatgtatgtatg

SEQ ID NO: 243062 - DNA, 20 bp, synthetic construct
  source 1..20: mol_type = other DNA
gtatggttagatgtatgtat

SEQ ID NO: 243063 - DNA, 20 bp, synthetic construct
  source 1..20: mol_type = other DNA
tgtatggttagatgtatgta

SEQ ID NO: 243064 - DNA, 20 bp, synthetic construct
  source 1..20: mol_type = other DNA
atgtatggttagatgtatgt

SEQ ID NO: 243065 - DNA, 20 bp, synthetic construct
  source 1..20: mol_type = other DNA
gatgtatggttagatgtatg

SEQ ID NO: 243066 - DNA, 20 bp, synthetic construct
  source 1..20: mol_type = other DNA
agatgtatggttagatgtat

SEQ ID NO: 243067 - DNA, 20 bp, synthetic construct
  source 1..20: mol_type = other DNA
gagatgtatggttagatgta

SEQ ID NO: 243068 - DNA, 20 bp, synthetic construct
  source 1..20: mol_type = other DNA
agagatgtatggttagatgt

SEQ ID NO: 243069 - DNA, 20 bp, synthetic construct
  source 1..20: mol_type = other DNA
tagagatgtatggttagatg

SEQ ID NO: 243070 - DNA, 20 bp, synthetic construct
  source 1..20: mol_type = other DNA
gtagagatgtatggttagat

SEQ ID NO: 243071 - DNA, 20 bp, synthetic construct
  source 1..20: mol_type = other DNA
tgtagagatgtatggttaga

SEQ ID NO: 243072 - DNA, 20 bp, synthetic construct
  source 1..20: mol_type = other DNA
atgtagagatgtatggttag

SEQ ID NO: 243073 - DNA, 20 bp, synthetic construct
  source 1..20: mol_type = other DNA
gatgtagagatgtatggtta

SEQ ID NO: 243074 - DNA, 20 bp, synthetic construct
  source 1..20: mol_type = other DNA
tgatgtagagatgtatggtt

SEQ ID NO: 243075 - DNA, 20 bp, synthetic construct
  source 1..20: mol_type = other DNA
atgatgtagagatgtatggt

SEQ ID NO: 243076 - DNA, 20 bp, synthetic construct
  source 1..20: mol_type = other DNA
aatgatgtagagatgtatgg

SEQ ID NO: 243077 - DNA, 20 bp, synthetic construct
  source 1..20: mol_type = other DNA
gaatgatgtagagatgtatg

SEQ ID NO: 243078 - DNA, 20 bp, synthetic construct
  source 1..20: mol_type = other DNA
tgaatgatgtagagatgtat

SEQ ID NO: 243079 - DNA, 20 bp, synthetic construct
  source 1..20: mol_type = other DNA
atgaatgatgtagagatgta

SEQ ID NO: 243080 - DNA, 20 bp, synthetic construct
  source 1..20: mol_type = other DNA
aatgaatgatgtagagatgt

SEQ ID NO: 243081 - DNA, 20 bp, synthetic construct
  source 1..20: mol_type = other DNA
gaatgaatgatgtagagatg

SEQ ID NO: 243082 - DNA, 20 bp, synthetic construct
  source 1..20: mol_type = other DNA
agaatgaatgatgtagagat

SEQ ID NO: 243083 - DNA, 20 bp, synthetic construct
  source 1..20: mol_type = other DNA
aagaatgaatgatgtagaga

SEQ ID NO: 243084 - DNA, 20 bp, synthetic construct
  source 1..20: mol_type = other DNA
gaagaatgaatgatgtagag

SEQ ID NO: 243085 - DNA, 20 bp, synthetic construct
  source 1..20: mol_type = other DNA
ggaagaatgaatgatgtaga

SEQ ID NO: 243086 - DNA, 20 bp, synthetic construct
  source 1..20: mol_type = other DNA
tggaagaatgaatgatgtag

SEQ ID NO: 243087 - DNA, 20 bp, synthetic construct
  source 1..20: mol_type = other DNA
atggaagaatgaatgatgta

SEQ ID NO: 243088 - DNA, 20 bp, synthetic construct
  source 1..20: mol_type = other DNA
gatggaagaatgaatgatgt

SEQ ID NO: 243089 - DNA, 20 bp, synthetic construct
  source 1..20: mol_type = other DNA
cgatggaagaatgaatgatg

SEQ ID NO: 243090 - DNA, 20 bp, synthetic construct
  source 1..20: mol_type = other DNA
tcgatggaagaatgaatgat

SEQ ID NO: 243091 - DNA, 20 bp, synthetic construct
  source 1..20: mol_type = other DNA
atcgatggaagaatgaatga

SEQ ID NO: 243092 - DNA, 20 bp, synthetic construct
  source 1..20: mol_type = other DNA
aatcgatggaagaatgaatg

SEQ ID NO: 243093 - DNA, 20 bp, synthetic construct
  source 1..20: mol_type = other DNA
gaatcgatggaagaatgaat

SEQ ID NO: 243094 - DNA, 20 bp, synthetic construct
  source 1..20: mol_type = other DNA
tgaatcgatggaagaatgaa

SEQ ID NO: 243095 - DNA, 20 bp, synthetic construct
  source 1..20: mol_type = other DNA
atgaatcgatggaagaatga

SEQ ID NO: 243096 - DNA, 20 bp, synthetic construct
  source 1..20: mol_type = other DNA
gatgaatcgatggaagaatg

SEQ ID NO: 243097 - DNA, 20 bp, synthetic construct
  source 1..20: mol_type = other DNA
ggatgaatcgatggaagaat

SEQ ID NO: 243098 - DNA, 20 bp, synthetic construct
  source 1..20: mol_type = other DNA
tggatgaatcgatggaagaa

SEQ ID NO: 243099 - DNA, 20 bp, synthetic construct
  source 1..20: mol_type = other DNA
ttggatgaatcgatggaaga

SEQ ID NO: 243100 - DNA, 20 bp, synthetic construct
  source 1..20: mol_type = other DNA
attggatgaatcgatggaag

SEQ ID NO: 243101 - DNA, 20 bp, synthetic construct
  source 1..20: mol_type = other DNA
aattggatgaatcgatggaa

SEQ ID NO: 243102 - DNA, 20 bp, synthetic construct
  source 1..20: mol_type = other DNA
taattggatgaatcgatgga

SEQ ID NO: 243103 - DNA, 20 bp, synthetic construct
  source 1..20: mol_type = other DNA
ataattggatgaatcgatgg

SEQ ID NO: 243104 - DNA, 20 bp, synthetic construct
  source 1..20: mol_type = other DNA
gataattggatgaatcgatg

SEQ ID NO: 243105 - DNA, 20 bp, synthetic construct
  source 1..20: mol_type = other DNA
ggataattggatgaatcgat

SEQ ID NO: 243106 - DNA, 20 bp, synthetic construct
  source 1..20: mol_type = other DNA
tggataattggatgaatcga

SEQ ID NO: 243107 - DNA, 20 bp, synthetic construct
  source 1..20: mol_type = other DNA
atggataattggatgaatcg

SEQ ID NO: 243108 - DNA, 20 bp, synthetic construct
  source 1..20: mol_type = other DNA
gatggataattggatgaatc

SEQ ID NO: 243109 - DNA, 20 bp, synthetic construct
  source 1..20: mol_type = other DNA
tgatggataattggatgaat

SEQ ID NO: 243110 - DNA, 20 bp, synthetic construct
  source 1..20: mol_type = other DNA
atgatggataattggatgaa

SEQ ID NO: 243111 - DNA, 20 bp, synthetic construct
  source 1..20: mol_type = other DNA
aatgatggataattggatga

SEQ ID NO: 243112 - DNA, 20 bp, synthetic construct
  source 1..20: mol_type = other DNA
gaatgatggataattggatg

SEQ ID NO: 243113 - DNA, 20 bp, synthetic construct
  source 1..20: mol_type = other DNA
ggaatgatggataattggat

SEQ ID NO: 243114 - DNA, 20 bp, synthetic construct
  source 1..20: mol_type = other DNA
aggaatgatggataattgga

SEQ ID NO: 243115 - DNA, 20 bp, synthetic construct
  source 1..20: mol_type = other DNA
aaggaatgatggataattgg

SEQ ID NO: 243116 - DNA, 20 bp, synthetic construct
  source 1..20: mol_type = other DNA
gaaggaatgatggataattg

SEQ ID NO: 243117 - DNA, 20 bp, synthetic construct
  source 1..20: mol_type = other DNA
ggaaggaatgatggataatt

SEQ ID NO: 243118 - DNA, 20 bp, synthetic construct
  source 1..20: mol_type = other DNA
aggaaggaatgatggataat

SEQ ID NO: 243119 - DNA, 20 bp, synthetic construct
  source 1..20: mol_type = other DNA
gaggaaggaatgatggataa

SEQ ID NO: 243120 - DNA, 20 bp, synthetic construct
  source 1..20: mol_type = other DNA
ggaggaaggaatgatggata

SEQ ID NO: 243121 - DNA, 20 bp, synthetic construct
  source 1..20: mol_type = other DNA
tggaggaaggaatgatggat

SEQ ID NO: 243122 - DNA, 20 bp, synthetic construct
  source 1..20: mol_type = other DNA
atggaggaaggaatgatgga

SEQ ID NO: 243123 - DNA, 20 bp, synthetic construct
  source 1..20: mol_type = other DNA
gatggaggaaggaatgatgg

SEQ ID NO: 243124 - DNA, 20 bp, synthetic construct
  source 1..20: mol_type = other DNA
ggatggaggaaggaatgatg

SEQ ID NO: 243125 - DNA, 20 bp, synthetic construct
  source 1..20: mol_type = other DNA
tggatggaggaaggaatgat

SEQ ID NO: 243126 - DNA, 20 bp, synthetic construct
  source 1..20: mol_type = other DNA
atggatggaggaaggaatga

SEQ ID NO: 243127 - DNA, 20 bp, synthetic construct
  source 1..20: mol_type = other DNA
gatggatggaggaaggaatg

SEQ ID NO: 243128 - DNA, 20 bp, synthetic construct
  source 1..20: mol_type = other DNA
ggatggatggaggaaggaat

SEQ ID NO: 243129 - DNA, 20 bp, synthetic construct
  source 1..20: mol_type = other DNA
gggatggatggaggaaggaa

SEQ ID NO: 243130 - DNA, 20 bp, synthetic construct
  source 1..20: mol_type = other DNA
tgggatggatggaggaagga

SEQ ID NO: 243131 - DNA, 20 bp, synthetic construct
  source 1..20: mol_type = other DNA
atgggatggatggaggaagg

SEQ ID NO: 243132 - DNA, 20 bp, synthetic construct
  source 1..20: mol_type = other DNA
aatgggatggatggaggaag

SEQ ID NO: 243133 - DNA, 20 bp, synthetic construct
  source 1..20: mol_type = other DNA
taatgggatggatggaggaa

SEQ ID NO: 243134 - DNA, 20 bp, synthetic construct
  source 1..20: mol_type = other DNA
ataatgggatggatggagga

SEQ ID NO: 243135 - DNA, 20 bp, synthetic construct
  source 1..20: mol_type = other DNA
gataatgggatggatggagg

SEQ ID NO: 243136 - DNA, 20 bp, synthetic construct
  source 1..20: mol_type = other DNA
ggataatgggatggatggag

SEQ ID NO: 243137 - DNA, 20 bp, synthetic construct
  source 1..20: mol_type = other DNA
tggataatgggatggatgga

SEQ ID NO: 243138 - DNA, 20 bp, synthetic construct
  source 1..20: mol_type = other DNA
atggataatgggatggatgg

SEQ ID NO: 243139 - DNA, 20 bp, synthetic construct
  source 1..20: mol_type = other DNA
aatggataatgggatggatg

SEQ ID NO: 243140 - DNA, 20 bp, synthetic construct
  source 1..20: mol_type = other DNA
aaatggataatgggatggat

SEQ ID NO: 243141 - DNA, 20 bp, synthetic construct
  source 1..20: mol_type = other DNA
caaatggataatgggatgga

SEQ ID NO: 243142 - DNA, 20 bp, synthetic construct
  source 1..20: mol_type = other DNA
tcaaatggataatgggatgg

SEQ ID NO: 243143 - DNA, 20 bp, synthetic construct
  source 1..20: mol_type = other DNA
atcaaatggataatgggatg

SEQ ID NO: 243144 - DNA, 20 bp, synthetic construct
  source 1..20: mol_type = other DNA
gatcaaatggataatgggat

SEQ ID NO: 243145 - DNA, 20 bp, synthetic construct
  source 1..20: mol_type = other DNA
tgatcaaatggataatggga

SEQ ID NO: 243146 - DNA, 20 bp, synthetic construct
  source 1..20: mol_type = other DNA
atgatcaaatggataatggg

SEQ ID NO: 243147 - DNA, 20 bp, synthetic construct
  source 1..20: mol_type = other DNA
tatgatcaaatggataatgg

SEQ ID NO: 243148 - DNA, 20 bp, synthetic construct
  source 1..20: mol_type = other DNA
gtatgatcaaatggataatg

SEQ ID NO: 243149 - DNA, 20 bp, synthetic construct
  source 1..20: mol_type = other DNA
tgtatgatcaaatggataat

SEQ ID NO: 243150 - DNA, 20 bp, synthetic construct
  source 1..20: mol_type = other DNA
atgtatgatcaaatggataa

SEQ ID NO: 243151 - DNA, 20 bp, synthetic construct
  source 1..20: mol_type = other DNA
tatgtatgatcaaatggata

SEQ ID NO: 243152 - DNA, 20 bp, synthetic construct
  source 1..20: mol_type = other DNA
atatgtatgatcaaatggat

SEQ ID NO: 243153 - DNA, 20 bp, synthetic construct
  source 1..20: mol_type = other DNA
tatatgtatgatcaaatgga

SEQ ID NO: 243154 - DNA, 20 bp, synthetic construct
  source 1..20: mol_type = other DNA
atatatgtatgatcaaatgg

SEQ ID NO: 243155 - DNA, 20 bp, synthetic construct
  source 1..20: mol_type = other DNA
gatatatgtatgatcaaatg

SEQ ID NO: 243156 - DNA, 20 bp, synthetic construct
  source 1..20: mol_type = other DNA
tgatatatgtatgatcaaat

SEQ ID NO: 243157 - DNA, 20 bp, synthetic construct
  source 1..20: mol_type = other DNA
atgatatatgtatgatcaaa

SEQ ID NO: 243158 - DNA, 20 bp, synthetic construct
  source 1..20: mol_type = other DNA
gatgatatatgtatgatcaa

SEQ ID NO: 243159 - DNA, 20 bp, synthetic construct
  source 1..20: mol_type = other DNA
agatgatatatgtatgatca

SEQ ID NO: 243160 - DNA, 20 bp, synthetic construct
  source 1..20: mol_type = other DNA
tagatgatatatgtatgatc

SEQ ID NO: 243161 - DNA, 20 bp, synthetic construct
  source 1..20: mol_type = other DNA
atagatgatatatgtatgat

SEQ ID NO: 243162 - DNA, 20 bp, synthetic construct
  source 1..20: mol_type = other DNA
tatagatgatatatgtatga

SEQ ID NO: 243163 - DNA, 20 bp, synthetic construct
  source 1..20: mol_type = other DNA
gtatagatgatatatgtatg

SEQ ID NO: 243164 - DNA, 20 bp, synthetic construct
  source 1..20: mol_type = other DNA
tgtatagatgatatatgtat

SEQ ID NO: 243165 - DNA, 20 bp, synthetic construct
  source 1..20: mol_type = other DNA
atgtatagatgatatatgta

SEQ ID NO: 243166 - DNA, 20 bp, synthetic construct
  source 1..20: mol_type = other DNA
gatgtatagatgatatatgt

SEQ ID NO: 243167 - DNA, 20 bp, synthetic construct
  source 1..20: mol_type = other DNA
tgatgtatagatgatatatg

SEQ ID NO: 243168 - DNA, 20 bp, synthetic construct
  source 1..20: mol_type = other DNA
atgatgtatagatgatatat

SEQ ID NO: 243169 - DNA, 20 bp, synthetic construct
  source 1..20: mol_type = other DNA
gatgatgtatagatgatata

SEQ ID NO: 243170 - DNA, 20 bp, synthetic construct
  source 1..20: mol_type = other DNA
ggatgatgtatagatgatat

SEQ ID NO: 243171 - DNA, 20 bp, synthetic construct
  source 1..20: mol_type = other DNA
tggatgatgtatagatgata

SEQ ID NO: 243172 - DNA, 20 bp, synthetic construct
  source 1..20: mol_type = other DNA
atggatgatgtatagatgat

SEQ ID NO: 243173 - DNA, 20 bp, synthetic construct
  source 1..20: mol_type = other DNA
aatggatgatgtatagatga

SEQ ID NO: 243174 - DNA, 20 bp, synthetic construct
  source 1..20: mol_type = other DNA
gaatggatgatgtatagatg

SEQ ID NO: 243175 - DNA, 20 bp, synthetic construct
  source 1..20: mol_type = other DNA
tgaatggatgatgtatagat

SEQ ID NO: 243176 - DNA, 20 bp, synthetic construct
  source 1..20: mol_type = other DNA
atgaatggatgatgtataga

SEQ ID NO: 243177 - DNA, 20 bp, synthetic construct
  source 1..20: mol_type = other DNA
gatgaatggatgatgtatag

SEQ ID NO: 243178 - DNA, 20 bp, synthetic construct
  source 1..20: mol_type = other DNA
ggatgaatggatgatgtata

SEQ ID NO: 243179 - DNA, 20 bp, synthetic construct
  source 1..20: mol_type = other DNA
tggatgaatggatgatgtat

SEQ ID NO: 243180 - DNA, 20 bp, synthetic construct
  source 1..20: mol_type = other DNA
atggatgaatggatgatgta

SEQ ID NO: 243181 - DNA, 20 bp, synthetic construct
  source 1..20: mol_type = other DNA
gatggatgaatggatgatgt

SEQ ID NO: 243182 - DNA, 20 bp, synthetic construct
  source 1..20: mol_type = other DNA
ggatggatgaatggatgatg

SEQ ID NO: 243183 - DNA, 20 bp, synthetic construct
  source 1..20: mol_type = other DNA
tggatggatgaatggatgat

SEQ ID NO: 243184 - DNA, 20 bp, synthetic construct
  source 1..20: mol_type = other DNA
atggatggatgaatggatga

SEQ ID NO: 243185 - DNA, 20 bp, synthetic construct
  source 1..20: mol_type = other DNA
gatggatggatgaatggatg

SEQ ID NO: 243186 - DNA, 20 bp, synthetic construct
  source 1..20: mol_type = other DNA
ggatggatggatgaatggat

SEQ ID NO: 243187 - DNA, 20 bp, synthetic construct
  source 1..20: mol_type = other DNA
tggatggatggatgaatgga

SEQ ID NO: 243188 - DNA, 20 bp, synthetic construct
  source 1..20: mol_type = other DNA
atggatggatggatgaatgg

SEQ ID NO: 243189 - DNA, 20 bp, synthetic construct
  source 1..20: mol_type = other DNA
gatggatggatggatgaatg

SEQ ID NO: 243190 - DNA, 20 bp, synthetic construct
  source 1..20: mol_type = other DNA
ggatggatggatggatgaat

SEQ ID NO: 243191 - DNA, 20 bp, synthetic construct
  source 1..20: mol_type = other DNA
tggatggatggatggatgaa

SEQ ID NO: 243192 - DNA, 20 bp, synthetic construct
  source 1..20: mol_type = other DNA
atggatggatggatggatga

SEQ ID NO: 243193 - DNA, 20 bp, synthetic construct
  source 1..20: mol_type = other DNA
gatggatggatggatggatg

SEQ ID NO: 243194 - DNA, 20 bp, synthetic construct
  source 1..20: mol_type = other DNA
ggatggatggatggatggat

SEQ ID NO: 243195 - DNA, 20 bp, synthetic construct
  source 1..20: mol_type = other DNA
tggatggatggatggatgga

SEQ ID NO: 243196 - DNA, 20 bp, synthetic construct
  source 1..20: mol_type = other DNA
gtggatggatggatggatgg

SEQ ID NO: 243197 - DNA, 20 bp, synthetic construct
  source 1..20: mol_type = other DNA
ggtggatggatggatggatg

SEQ ID NO: 243198 - DNA, 20 bp, synthetic construct
  source 1..20: mol_type = other DNA
gggtggatggatggatggat

SEQ ID NO: 243199 - DNA, 20 bp, synthetic construct
  source 1..20: mol_type = other DNA
tgggtggatggatggatgga

SEQ ID NO: 243200 - DNA, 20 bp, synthetic construct
  source 1..20: mol_type = other DNA
atgggtggatggatggatgg

SEQ ID NO: 243201 - DNA, 20 bp, synthetic construct
  source 1..20: mol_type = other DNA
tatgggtggatggatggatg

SEQ ID NO: 243202 - DNA, 20 bp, synthetic construct
  source 1..20: mol_type = other DNA
atatgggtggatggatggat

SEQ ID NO: 243203 - DNA, 20 bp, synthetic construct
  source 1..20: mol_type = other DNA
gatatgggtggatggatgga

SEQ ID NO: 243204 - DNA, 20 bp, synthetic construct
  source 1..20: mol_type = other DNA
agatatgggtggatggatgg

SEQ ID NO: 243205 - DNA, 20 bp, synthetic construct
  source 1..20: mol_type = other DNA
aagatatgggtggatggatg

SEQ ID NO: 243206 - DNA, 20 bp, synthetic construct
  source 1..20: mol_type = other DNA
gaagatatgggtggatggat

SEQ ID NO: 243207 - DNA, 20 bp, synthetic construct
  source 1..20: mol_type = other DNA
tgaagatatgggtggatgga

SEQ ID NO: 243208 - DNA, 20 bp, synthetic construct
  source 1..20: mol_type = other DNA
atgaagatatgggtggatgg

SEQ ID NO: 243209 - DNA, 20 bp, synthetic construct
  source 1..20: mol_type = other DNA
gatgaagatatgggtggatg

SEQ ID NO: 243210 - DNA, 20 bp, synthetic construct
  source 1..20: mol_type = other DNA
ggatgaagatatgggtggat

SEQ ID NO: 243211 - DNA, 20 bp, synthetic construct
  source 1..20: mol_type = other DNA
tggatgaagatatgggtgga

SEQ ID NO: 243212 - DNA, 20 bp, synthetic construct
  source 1..20: mol_type = other DNA
ttggatgaagatatgggtgg

SEQ ID NO: 243213 - DNA, 20 bp, synthetic construct
  source 1..20: mol_type = other DNA
attggatgaagatatgggtg

SEQ ID NO: 243214 - DNA, 20 bp, synthetic construct
  source 1..20: mol_type = other DNA
gattggatgaagatatgggt

SEQ ID NO: 243215 - DNA, 20 bp, synthetic construct
  source 1..20: mol_type = other DNA
tgattggatgaagatatggg

SEQ ID NO: 243216 - DNA, 20 bp, synthetic construct
  source 1..20: mol_type = other DNA
ttgattggatgaagatatgg

SEQ ID NO: 243217 - DNA, 20 bp, synthetic construct
  source 1..20: mol_type = other DNA
attgattggatgaagatatg

SEQ ID NO: 243218 - DNA, 20 bp, synthetic construct
  source 1..20: mol_type = other DNA
gattgattggatgaagatat

SEQ ID NO: 243219 - DNA, 20 bp, synthetic construct
  source 1..20: mol_type = other DNA
tgattgattggatgaagata

SEQ ID NO: 243220 - DNA, 20 bp, synthetic construct
  source 1..20: mol_type = other DNA
atgattgattggatgaagat

SEQ ID NO: 243221 - DNA, 20 bp, synthetic construct
  source 1..20: mol_type = other DNA
tatgattgattggatgaaga

SEQ ID NO: 243222 - DNA, 20 bp, synthetic construct
  source 1..20: mol_type = other DNA
gtatgattgattggatgaag

SEQ ID NO: 243223 - DNA, 20 bp, synthetic construct
  source 1..20: mol_type = other DNA
tgtatgattgattggatgaa

SEQ ID NO: 243224 - DNA, 20 bp, synthetic construct
  source 1..20: mol_type = other DNA
atgtatgattgattggatga

SEQ ID NO: 243225 - DNA, 20 bp, synthetic construct
  source 1..20: mol_type = other DNA
tatgtatgattgattggatg

SEQ ID NO: 243226 - DNA, 20 bp, synthetic construct
  source 1..20: mol_type = other DNA
gtatgtatgattgattggat

SEQ ID NO: 243227 - DNA, 20 bp, synthetic construct
  source 1..20: mol_type = other DNA
tgtatgtatgattgattgga

SEQ ID NO: 243228 - DNA, 20 bp, synthetic construct
  source 1..20: mol_type = other DNA
atgtatgtatgattgattgg

SEQ ID NO: 243229 - DNA, 20 bp, synthetic construct
  source 1..20: mol_type = other DNA
gatgtatgtatgattgattg

SEQ ID NO: 243230 - DNA, 20 bp, synthetic construct
  source 1..20: mol_type = other DNA
cgatgtatgtatgattgatt

SEQ ID NO: 243231 - DNA, 20 bp, synthetic construct
  source 1..20: mol_type = other DNA
tcgatgtatgtatgattgat

SEQ ID NO: 243232 - DNA, 20 bp, synthetic construct
  source 1..20: mol_type = other DNA
ttcgatgtatgtatgattga

SEQ ID NO: 243233 - DNA, 20 bp, synthetic construct
  source 1..20: mol_type = other DNA
attcgatgtatgtatgattg

SEQ ID NO: 243234 - DNA, 20 bp, synthetic construct
  source 1..20: mol_type = other DNA
gattcgatgtatgtatgatt

SEQ ID NO: 243235 - DNA, 20 bp, synthetic construct
  source 1..20: mol_type = other DNA
tgattcgatgtatgtatgat

SEQ ID NO: 243236 - DNA, 20 bp, synthetic construct
  source 1..20: mol_type = other DNA
atgattcgatgtatgtatga

SEQ ID NO: 243237 - DNA, 20 bp, synthetic construct
  source 1..20: mol_type = other DNA
gatgattcgatgtatgtatg

SEQ ID NO: 243238 - DNA, 20 bp, synthetic construct
  source 1..20: mol_type = other DNA
agatgattcgatgtatgtat

SEQ ID NO: 243239 - DNA, 20 bp, synthetic construct
  source 1..20: mol_type = other DNA
tagatgattcgatgtatgta

SEQ ID NO: 243240 - DNA, 20 bp, synthetic construct
  source 1..20: mol_type = other DNA
gtagatgattcgatgtatgt

SEQ ID NO: 243241 - DNA, 20 bp, synthetic construct
  source 1..20: mol_type = other DNA
tgtagatgattcgatgtatg

SEQ ID NO: 243242 - DNA, 20 bp, synthetic construct
  source 1..20: mol_type = other DNA
gtgtagatgattcgatgtat

SEQ ID NO: 243243 - DNA, 20 bp, synthetic construct
  source 1..20: mol_type = other DNA
tgtgtagatgattcgatgta

SEQ ID NO: 243244 - DNA, 20 bp, synthetic construct
  source 1..20: mol_type = other DNA
atgtgtagatgattcgatgt

SEQ ID NO: 243245 - DNA, 20 bp, synthetic construct
  source 1..20: mol_type = other DNA
gatgtgtagatgattcgatg

SEQ ID NO: 243246 - DNA, 20 bp, synthetic construct
  source 1..20: mol_type = other DNA
tgatgtgtagatgattcgat

SEQ ID NO: 243247 - DNA, 20 bp, synthetic construct
  source 1..20: mol_type = other DNA
gtgatgtgtagatgattcga

SEQ ID NO: 243248 - DNA, 20 bp, synthetic construct
  source 1..20: mol_type = other DNA
ggtgatgtgtagatgattcg

SEQ ID NO: 243249 - DNA, 20 bp, synthetic construct
  source 1..20: mol_type = other DNA
gggtgatgtgtagatgattc

SEQ ID NO: 243250 - DNA, 20 bp, synthetic construct
  source 1..20: mol_type = other DNA
tgggtgatgtgtagatgatt

SEQ ID NO: 243251 - DNA, 20 bp, synthetic construct
  source 1..20: mol_type = other DNA
atgggtgatgtgtagatgat

SEQ ID NO: 243252 - DNA, 20 bp, synthetic construct
  source 1..20: mol_type = other DNA
gatgggtgatgtgtagatga

SEQ ID NO: 243253 - DNA, 20 bp, synthetic construct
  source 1..20: mol_type = other DNA
ggatgggtgatgtgtagatg

SEQ ID NO: 243254 - DNA, 20 bp, synthetic construct
  source 1..20: mol_type = other DNA
tggatgggtgatgtgtagat

SEQ ID NO: 243255 - DNA, 20 bp, synthetic construct
  source 1..20: mol_type = other DNA
atggatgggtgatgtgtaga

SEQ ID NO: 243256 - DNA, 20 bp, synthetic construct
  source 1..20: mol_type = other DNA
gatggatgggtgatgtgtag

SEQ ID NO: 243257 - DNA, 20 bp, synthetic construct
  source 1..20: mol_type = other DNA
ggatggatgggtgatgtgta

SEQ ID NO: 243258 - DNA, 20 bp, synthetic construct
  source 1..20: mol_type = other DNA
tggatggatgggtgatgtgt

SEQ ID NO: 243259 - DNA, 20 bp, synthetic construct
  source 1..20: mol_type = other DNA
atggatggatgggtgatgtg

SEQ ID NO: 243260 - DNA, 20 bp, synthetic construct
  source 1..20: mol_type = other DNA
gatggatggatgggtgatgt

SEQ ID NO: 243261 - DNA, 20 bp, synthetic construct
  source 1..20: mol_type = other DNA
ggatggatggatgggtgatg

SEQ ID NO: 243262 - DNA, 20 bp, synthetic construct
  source 1..20: mol_type = other DNA
tggatggatggatgggtgat

SEQ ID NO: 243263 - DNA, 20 bp, synthetic construct
  source 1..20: mol_type = other DNA
atggatggatggatgggtga

SEQ ID NO: 243264 - DNA, 20 bp, synthetic construct
  source 1..20: mol_type = other DNA
gatggatggatggatgggtg

SEQ ID NO: 243265 - DNA, 20 bp, synthetic construct
  source 1..20: mol_type = other DNA
ggatggatggatggatgggt

SEQ ID NO: 243266 - DNA, 20 bp, synthetic construct
  source 1..20: mol_type = other DNA
tggatggatggatggatggg

SEQ ID NO: 243267 - DNA, 20 bp, synthetic construct
  source 1..20: mol_type = other DNA
atggatggatggatggatgg

SEQ ID NO: 243268 - DNA, 20 bp, synthetic construct
  source 1..20: mol_type = other DNA
aatggatggatggatggatg

SEQ ID NO: 243269 - DNA, 20 bp, synthetic construct
  source 1..20: mol_type = other DNA
gaatggatggatggatggat

SEQ ID NO: 243270 - DNA, 20 bp, synthetic construct
  source 1..20: mol_type = other DNA
tgaatggatggatggatgga

SEQ ID NO: 243271 - DNA, 20 bp, synthetic construct
  source 1..20: mol_type = other DNA
atgaatggatggatggatgg

SEQ ID NO: 243272 - DNA, 20 bp, synthetic construct
  source 1..20: mol_type = other DNA
gatgaatggatggatggatg

SEQ ID NO: 243273 - DNA, 20 bp, synthetic construct
  source 1..20: mol_type = other DNA
agatgaatggatggatggat

SEQ ID NO: 243274 - DNA, 20 bp, synthetic construct
  source 1..20: mol_type = other DNA
tagatgaatggatggatgga

SEQ ID NO: 243275 - DNA, 20 bp, synthetic construct
  source 1..20: mol_type = other DNA
atagatgaatggatggatgg

SEQ ID NO: 243276 - DNA, 20 bp, synthetic construct
  source 1..20: mol_type = other DNA
gatagatgaatggatggatg

SEQ ID NO: 243277 - DNA, 20 bp, synthetic construct
  source 1..20: mol_type = other DNA
ggatagatgaatggatggat

SEQ ID NO: 243278 - DNA, 20 bp, synthetic construct
  source 1..20: mol_type = other DNA
tggatagatgaatggatgga

SEQ ID NO: 243279 - DNA, 20 bp, synthetic construct
  source 1..20: mol_type = other DNA
gtggatagatgaatggatgg

SEQ ID NO: 243280 - DNA, 20 bp, synthetic construct
  source 1..20: mol_type = other DNA
ggtggatagatgaatggatg

SEQ ID NO: 243281 - DNA, 20 bp, synthetic construct
  source 1..20: mol_type = other DNA
gggtggatagatgaatggat

SEQ ID NO: 243282 - DNA, 20 bp, synthetic construct
  source 1..20: mol_type = other DNA
tgggtggatagatgaatgga

SEQ ID NO: 243283 - DNA, 20 bp, synthetic construct
  source 1..20: mol_type = other DNA
atgggtggatagatgaatgg

SEQ ID NO: 243284 - DNA, 20 bp, synthetic construct
  source 1..20: mol_type = other DNA
gatgggtggatagatgaatg

SEQ ID NO: 243285 - DNA, 20 bp, synthetic construct
  source 1..20: mol_type = other DNA
ggatgggtggatagatgaat

SEQ ID NO: 243286 - DNA, 20 bp, synthetic construct
  source 1..20: mol_type = other DNA
tggatgggtggatagatgaa

SEQ ID NO: 243287 - DNA, 20 bp, synthetic construct
  source 1..20: mol_type = other DNA
atggatgggtggatagatga

SEQ ID NO: 243288 - DNA, 20 bp, synthetic construct
  source 1..20: mol_type = other DNA
gatggatgggtggatagatg

SEQ ID NO: 243289 - DNA, 20 bp, synthetic construct
  source 1..20: mol_type = other DNA
ggatggatgggtggatagat

SEQ ID NO: 243290 - DNA, 20 bp, synthetic construct
  source 1..20: mol_type = other DNA
tggatggatgggtggataga

SEQ ID NO: 243291 - DNA, 20 bp, synthetic construct
  source 1..20: mol_type = other DNA
atggatggatgggtggatag

SEQ ID NO: 243292 - DNA, 20 bp, synthetic construct
  source 1..20: mol_type = other DNA
gatggatggatgggtggata

SEQ ID NO: 243293 - DNA, 20 bp, synthetic construct
  source 1..20: mol_type = other DNA
ggatggatggatgggtggat

SEQ ID NO: 243294 - DNA, 20 bp, synthetic construct
  source 1..20: mol_type = other DNA
tggatggatggatgggtgga

SEQ ID NO: 243295 - DNA, 20 bp, synthetic construct
  source 1..20: mol_type = other DNA
atggatggatggatgggtgg

SEQ ID NO: 243296 - DNA, 20 bp, synthetic construct
  source 1..20: mol_type = other DNA
gatggatggatggatgggtg

SEQ ID NO: 243297 - DNA, 20 bp, synthetic construct
  source 1..20: mol_type = other DNA
ggatggatggatggatgggt

SEQ ID NO: 243298 - DNA, 20 bp, synthetic construct
  source 1..20: mol_type = other DNA
tggatggatggatggatggg

SEQ ID NO: 243299 - DNA, 20 bp, synthetic construct
  source 1..20: mol_type = other DNA
atggatggatggatggatgg

SEQ ID NO: 243300 - DNA, 20 bp, synthetic construct
  source 1..20: mol_type = other DNA
gatggatggatggatggatg

SEQ ID NO: 243301 - DNA, 20 bp, synthetic construct
  source 1..20: mol_type = other DNA
ggatggatggatggatggat

SEQ ID NO: 243302 - DNA, 20 bp, synthetic construct
  source 1..20: mol_type = other DNA
tggatggatggatggatgga

SEQ ID NO: 243303 - DNA, 20 bp, synthetic construct
  source 1..20: mol_type = other DNA
atggatggatggatggatgg

SEQ ID NO: 243304 - DNA, 20 bp, synthetic construct
  source 1..20: mol_type = other DNA
aatggatggatggatggatg

SEQ ID NO: 243305 - DNA, 20 bp, synthetic construct
  source 1..20: mol_type = other DNA
gaatggatggatggatggat

SEQ ID NO: 243306 - DNA, 20 bp, synthetic construct
  source 1..20: mol_type = other DNA
tgaatggatggatggatgga

SEQ ID NO: 243307 - DNA, 20 bp, synthetic construct
  source 1..20: mol_type = other DNA
atgaatggatggatggatgg

SEQ ID NO: 243308 - DNA, 20 bp, synthetic construct
  source 1..20: mol_type = other DNA
gatgaatggatggatggatg

SEQ ID NO: 243309 - DNA, 20 bp, synthetic construct
  source 1..20: mol_type = other DNA
agatgaatggatggatggat

SEQ ID NO: 243310 - DNA, 20 bp, synthetic construct
  source 1..20: mol_type = other DNA
tagatgaatggatggatgga

SEQ ID NO: 243311 - DNA, 20 bp, synthetic construct
  source 1..20: mol_type = other DNA
atagatgaatggatggatgg

SEQ ID NO: 243312 - DNA, 20 bp, synthetic construct
  source 1..20: mol_type = other DNA
gatagatgaatggatggatg

SEQ ID NO: 243313 - DNA, 20 bp, synthetic construct
  source 1..20: mol_type = other DNA
ggatagatgaatggatggat

SEQ ID NO: 243314 - DNA, 20 bp, synthetic construct
  source 1..20: mol_type = other DNA
tggatagatgaatggatgga

SEQ ID NO: 243315 - DNA, 20 bp, synthetic construct
  source 1..20: mol_type = other DNA
gtggatagatgaatggatgg

SEQ ID NO: 243316 - DNA, 20 bp, synthetic construct
  source 1..20: mol_type = other DNA
ggtggatagatgaatggatg

SEQ ID NO: 243317 - DNA, 20 bp, synthetic construct
  source 1..20: mol_type = other DNA
gggtggatagatgaatggat

SEQ ID NO: 243318 - DNA, 20 bp, synthetic construct
  source 1..20: mol_type = other DNA
tgggtggatagatgaatgga

SEQ ID NO: 243319 - DNA, 20 bp, synthetic construct
  source 1..20: mol_type = other DNA
atgggtggatagatgaatgg

SEQ ID NO: 243320 - DNA, 20 bp, synthetic construct
  source 1..20: mol_type = other DNA
gatgggtggatagatgaatg

SEQ ID NO: 243321 - DNA, 20 bp, synthetic construct
  source 1..20: mol_type = other DNA
ggatgggtggatagatgaat

SEQ ID NO: 243322 - DNA, 20 bp, synthetic construct
  source 1..20: mol_type = other DNA
tggatgggtggatagatgaa

SEQ ID NO: 243323 - DNA, 20 bp, synthetic construct
  source 1..20: mol_type = other DNA
atggatgggtggatagatga

SEQ ID NO: 243324 - DNA, 20 bp, synthetic construct
  source 1..20: mol_type = other DNA
gatggatgggtggatagatg

SEQ ID NO: 243325 - DNA, 20 bp, synthetic construct
  source 1..20: mol_type = other DNA
ggatggatgggtggatagat

SEQ ID NO: 243326 - DNA, 20 bp, synthetic construct
  source 1..20: mol_type = other DNA
tggatggatgggtggataga

SEQ ID NO: 243327 - DNA, 20 bp, synthetic construct
  source 1..20: mol_type = other DNA
atggatggatgggtggatag

SEQ ID NO: 243328 - DNA, 20 bp, synthetic construct
  source 1..20: mol_type = other DNA
gatggatggatgggtggata

SEQ ID NO: 243329 - DNA, 20 bp, synthetic construct
  source 1..20: mol_type = other DNA
ggatggatggatgggtggat

SEQ ID NO: 243330 - DNA, 20 bp, synthetic construct
  source 1..20: mol_type = other DNA
tggatggatggatgggtgga

SEQ ID NO: 243331 - DNA, 20 bp, synthetic construct
  source 1..20: mol_type = other DNA
atggatggatggatgggtgg

SEQ ID NO: 243332 - DNA, 20 bp, synthetic construct
  source 1..20: mol_type = other DNA
gatggatggatggatgggtg

SEQ ID NO: 243333 - DNA, 20 bp, synthetic construct
  source 1..20: mol_type = other DNA
ggatggatggatggatgggt

SEQ ID NO: 243334 - DNA, 20 bp, synthetic construct
  source 1..20: mol_type = other DNA
tggatggatggatggatggg

SEQ ID NO: 243335 - DNA, 20 bp, synthetic construct
  source 1..20: mol_type = other DNA
atggatggatggatggatgg

SEQ ID NO: 243336 - DNA, 20 bp, synthetic construct
  source 1..20: mol_type = other DNA
gatggatggatggatggatg

SEQ ID NO: 243337 - DNA, 20 bp, synthetic construct
  source 1..20: mol_type = other DNA
ggatggatggatggatggat

SEQ ID NO: 243338 - DNA, 20 bp, synthetic construct
  source 1..20: mol_type = other DNA
tggatggatggatggatgga

SEQ ID NO: 243339 - DNA, 20 bp, synthetic construct
  source 1..20: mol_type = other DNA
atggatggatggatggatgg

SEQ ID NO: 243340 - DNA, 20 bp, synthetic construct
  source 1..20: mol_type = other DNA
gatggatggatggatggatg

SEQ ID NO: 243341 - DNA, 20 bp, synthetic construct
  source 1..20: mol_type = other DNA
ggatggatggatggatggat

SEQ ID NO: 243342 - DNA, 20 bp, synthetic construct
  source 1..20: mol_type = other DNA
tggatggatggatggatgga

SEQ ID NO: 243343 - DNA, 20 bp, synthetic construct
  source 1..20: mol_type = other DNA
atggatggatggatggatgg

SEQ ID NO: 243344 - DNA, 20 bp, synthetic construct
  source 1..20: mol_type = other DNA
gatggatggatggatggatg

SEQ ID NO: 243345 - DNA, 20 bp, synthetic construct
  source 1..20: mol_type = other DNA
ggatggatggatggatggat

SEQ ID NO: 243346 - DNA, 20 bp, synthetic construct
  source 1..20: mol_type = other DNA
tggatggatggatggatgga

SEQ ID NO: 243347 - DNA, 20 bp, synthetic construct
  source 1..20: mol_type = other DNA
atggatggatggatggatgg

SEQ ID NO: 243348 - DNA, 20 bp, synthetic construct
  source 1..20: mol_type = other DNA
catggatggatggatggatg

SEQ ID NO: 243349 - DNA, 20 bp, synthetic construct
  source 1..20: mol_type = other DNA
acatggatggatggatggat

SEQ ID NO: 243350 - DNA, 20 bp, synthetic construct
  source 1..20: mol_type = other DNA
tacatggatggatggatgga

SEQ ID NO: 243351 - DNA, 20 bp, synthetic construct
  source 1..20: mol_type = other DNA
ttacatggatggatggatgg

SEQ ID NO: 243352 - DNA, 20 bp, synthetic construct
  source 1..20: mol_type = other DNA
gttacatggatggatggatg

SEQ ID NO: 243353 - DNA, 20 bp, synthetic construct
  source 1..20: mol_type = other DNA
ggttacatggatggatggat

SEQ ID NO: 243354 - DNA, 20 bp, synthetic construct
  source 1..20: mol_type = other DNA
tggttacatggatggatgga

SEQ ID NO: 243355 - DNA, 20 bp, synthetic construct
  source 1..20: mol_type = other DNA
atggttacatggatggatgg

SEQ ID NO: 243356 - DNA, 20 bp, synthetic construct
  source 1..20: mol_type = other DNA
gatggttacatggatggatg

SEQ ID NO: 243357 - DNA, 20 bp, synthetic construct
  source 1..20: mol_type = other DNA
ggatggttacatggatggat

SEQ ID NO: 243358 - DNA, 20 bp, synthetic construct
  source 1..20: mol_type = other DNA
tggatggttacatggatgga

SEQ ID NO: 243359 - DNA, 20 bp, synthetic construct
  source 1..20: mol_type = other DNA
ctggatggttacatggatgg

SEQ ID NO: 243360 - DNA, 20 bp, synthetic construct
  source 1..20: mol_type = other DNA
actggatggttacatggatg

SEQ ID NO: 243361 - DNA, 20 bp, synthetic construct
  source 1..20: mol_type = other DNA
gactggatggttacatggat

SEQ ID NO: 243362 - DNA, 20 bp, synthetic construct
  source 1..20: mol_type = other DNA
tgactggatggttacatgga

SEQ ID NO: 243363 - DNA, 20 bp, synthetic construct
  source 1..20: mol_type = other DNA
atgactggatggttacatgg

SEQ ID NO: 243364 - DNA, 20 bp, synthetic construct
  source 1..20: mol_type = other DNA
tatgactggatggttacatg

SEQ ID NO: 243365 - DNA, 20 bp, synthetic construct
  source 1..20: mol_type = other DNA
atatgactggatggttacat

SEQ ID NO: 243366 - DNA, 20 bp, synthetic construct
  source 1..20: mol_type = other DNA
tatatgactggatggttaca

SEQ ID NO: 243367 - DNA, 20 bp, synthetic construct
  source 1..20: mol_type = other DNA
atatatgactggatggttac

SEQ ID NO: 243368 - DNA, 20 bp, synthetic construct
  source 1..20: mol_type = other DNA
gatatatgactggatggtta

SEQ ID NO: 243369 - DNA, 20 bp, synthetic construct
  source 1..20: mol_type = other DNA
ggatatatgactggatggtt

SEQ ID NO: 243370 - DNA, 20 bp, synthetic construct
  source 1..20: mol_type = other DNA
tggatatatgactggatggt

SEQ ID NO: 243371 - DNA, 20 bp, synthetic construct
  source 1..20: mol_type = other DNA
ttggatatatgactggatgg

SEQ ID NO: 243372 - DNA, 20 bp, synthetic construct
  source 1..20: mol_type = other DNA
attggatatatgactggatg

SEQ ID NO: 243373 - DNA, 20 bp, synthetic construct
  source 1..20: mol_type = other DNA
aattggatatatgactggat

SEQ ID NO: 243374 - DNA, 20 bp, synthetic construct
  source 1..20: mol_type = other DNA
taattggatatatgactgga

SEQ ID NO: 243375 - DNA, 20 bp, synthetic construct
  source 1..20: mol_type = other DNA
gtaattggatatatgactgg

SEQ ID NO: 243376 - DNA, 20 bp, synthetic construct
  source 1..20: mol_type = other DNA
tgtaattggatatatgactg

SEQ ID NO: 243377 - DNA, 20 bp, synthetic construct
  source 1..20: mol_type = other DNA
gtgtaattggatatatgact

SEQ ID NO: 243378 - DNA, 20 bp, synthetic construct
  source 1..20: mol_type = other DNA
tgtgtaattggatatatgac

SEQ ID NO: 243379 - DNA, 20 bp, synthetic construct
  source 1..20: mol_type = other DNA
atgtgtaattggatatatga

SEQ ID NO: 243380 - DNA, 20 bp, synthetic construct
  source 1..20: mol_type = other DNA
gatgtgtaattggatatatg

SEQ ID NO: 243381 - DNA, 20 bp, synthetic construct
  source 1..20: mol_type = other DNA
ggatgtgtaattggatatat

SEQ ID NO: 243382 - DNA, 20 bp, synthetic construct
  source 1..20: mol_type = other DNA
tggatgtgtaattggatata

SEQ ID NO: 243383 - DNA, 20 bp, synthetic construct
  source 1..20: mol_type = other DNA
atggatgtgtaattggatat

SEQ ID NO: 243384 - DNA, 20 bp, synthetic construct
  source 1..20: mol_type = other DNA
gatggatgtgtaattggata

SEQ ID NO: 243385 - DNA, 20 bp, synthetic construct
  source 1..20: mol_type = other DNA
ggatggatgtgtaattggat

SEQ ID NO: 243386 - DNA, 20 bp, synthetic construct
  source 1..20: mol_type = other DNA
tggatggatgtgtaattgga

SEQ ID NO: 243387 - DNA, 20 bp, synthetic construct
  source 1..20: mol_type = other DNA
ctggatggatgtgtaattgg

SEQ ID NO: 243388 - DNA, 20 bp, synthetic construct
  source 1..20: mol_type = other DNA
actggatggatgtgtaattg

SEQ ID NO: 243389 - DNA, 20 bp, synthetic construct
  source 1..20: mol_type = other DNA
aactggatggatgtgtaatt

SEQ ID NO: 243390 - DNA, 20 bp, synthetic construct
  source 1..20: mol_type = other DNA
taactggatggatgtgtaat

SEQ ID NO: 243391 - DNA, 20 bp, synthetic construct
  source 1..20: mol_type = other DNA
ataactggatggatgtgtaa

SEQ ID NO: 243392 - DNA, 20 bp, synthetic construct
  source 1..20: mol_type = other DNA
tataactggatggatgtgta

SEQ ID NO: 243393 - DNA, 20 bp, synthetic construct
  source 1..20: mol_type = other DNA
gtataactggatggatgtgt

SEQ ID NO: 243394 - DNA, 20 bp, synthetic construct
  source 1..20: mol_type = other DNA
tgtataactggatggatgtg

SEQ ID NO: 243395 - DNA, 20 bp, synthetic construct
  source 1..20: mol_type = other DNA
atgtataactggatggatgt

SEQ ID NO: 243396 - DNA, 20 bp, synthetic construct
  source 1..20: mol_type = other DNA
aatgtataactggatggatg

SEQ ID NO: 243397 - DNA, 20 bp, synthetic construct
  source 1..20: mol_type = other DNA
gaatgtataactggatggat

SEQ ID NO: 243398 - DNA, 20 bp, synthetic construct
  source 1..20: mol_type = other DNA
tgaatgtataactggatgga

SEQ ID NO: 243399 - DNA, 20 bp, synthetic construct
  source 1..20: mol_type = other DNA
atgaatgtataactggatgg

SEQ ID NO: 243400 - DNA, 20 bp, synthetic construct
  source 1..20: mol_type = other DNA
tatgaatgtataactggatg

SEQ ID NO: 243401 - DNA, 20 bp, synthetic construct
  source 1..20: mol_type = other DNA
gtatgaatgtataactggat

SEQ ID NO: 243402 - DNA, 20 bp, synthetic construct
  source 1..20: mol_type = other DNA
tgtatgaatgtataactgga

SEQ ID NO: 243403 - DNA, 20 bp, synthetic construct
  source 1..20: mol_type = other DNA
atgtatgaatgtataactgg

SEQ ID NO: 243404 - DNA, 20 bp, synthetic construct
  source 1..20: mol_type = other DNA
catgtatgaatgtataactg

SEQ ID NO: 243405 - DNA, 20 bp, synthetic construct
  source 1..20: mol_type = other DNA
gcatgtatgaatgtataact

SEQ ID NO: 243406 - DNA, 20 bp, synthetic construct
  source 1..20: mol_type = other DNA
tgcatgtatgaatgtataac

SEQ ID NO: 243407 - DNA, 20 bp, synthetic construct
  source 1..20: mol_type = other DNA
atgcatgtatgaatgtataa

SEQ ID NO: 243408 - DNA, 20 bp, synthetic construct
  source 1..20: mol_type = other DNA
gatgcatgtatgaatgtata

SEQ ID NO: 243409 - DNA, 20 bp, synthetic construct
  source 1..20: mol_type = other DNA
agatgcatgtatgaatgtat

SEQ ID NO: 243410 - DNA, 20 bp, synthetic construct
  source 1..20: mol_type = other DNA
tagatgcatgtatgaatgta

SEQ ID NO: 243411 - DNA, 20 bp, synthetic construct
  source 1..20: mol_type = other DNA
ttagatgcatgtatgaatgt

SEQ ID NO: 243412 - DNA, 20 bp, synthetic construct
  source 1..20: mol_type = other DNA
attagatgcatgtatgaatg

SEQ ID NO: 243413 - DNA, 20 bp, synthetic construct
  source 1..20: mol_type = other DNA
gattagatgcatgtatgaat

SEQ ID NO: 243414 - DNA, 20 bp, synthetic construct
  source 1..20: mol_type = other DNA
tgattagatgcatgtatgaa

SEQ ID NO: 243415 - DNA, 20 bp, synthetic construct
  source 1..20: mol_type = other DNA
atgattagatgcatgtatga

SEQ ID NO: 243416 - DNA, 20 bp, synthetic construct
  source 1..20: mol_type = other DNA
aatgattagatgcatgtatg

SEQ ID NO: 243417 - DNA, 20 bp, synthetic construct
  source 1..20: mol_type = other DNA
gaatgattagatgcatgtat

SEQ ID NO: 243418 - DNA, 20 bp, synthetic construct
  source 1..20: mol_type = other DNA
tgaatgattagatgcatgta

SEQ ID NO: 243419 - DNA, 20 bp, synthetic construct
  source 1..20: mol_type = other DNA
ttgaatgattagatgcatgt

SEQ ID NO: 243420 - DNA, 20 bp, synthetic construct
  source 1..20: mol_type = other DNA
attgaatgattagatgcatg

SEQ ID NO: 243421 - DNA, 20 bp, synthetic construct
  source 1..20: mol_type = other DNA
aattgaatgattagatgcat

SEQ ID NO: 243422 - DNA, 20 bp, synthetic construct
  source 1..20: mol_type = other DNA
taattgaatgattagatgca

SEQ ID NO: 243423 - DNA, 20 bp, synthetic construct
  source 1..20: mol_type = other DNA
ataattgaatgattagatgc

SEQ ID NO: 243424 - DNA, 20 bp, synthetic construct
  source 1..20: mol_type = other DNA
tataattgaatgattagatg

SEQ ID NO: 243425 - DNA, 20 bp, synthetic construct
  source 1..20: mol_type = other DNA
gtataattgaatgattagat

SEQ ID NO: 243426 - DNA, 20 bp, synthetic construct
  source 1..20: mol_type = other DNA
tgtataattgaatgattaga

SEQ ID NO: 243427 - DNA, 20 bp, synthetic construct
  source 1..20: mol_type = other DNA
atgtataattgaatgattag

SEQ ID NO: 243428 - DNA, 20 bp, synthetic construct
  source 1..20: mol_type = other DNA
tatgtataattgaatgatta

SEQ ID NO: 243429 - DNA, 20 bp, synthetic construct
  source 1..20: mol_type = other DNA
gtatgtataattgaatgatt

SEQ ID NO: 243430 - DNA, 20 bp, synthetic construct
  source 1..20: mol_type = other DNA
tgtatgtataattgaatgat

SEQ ID NO: 243431 - DNA, 20 bp, synthetic construct
  source 1..20: mol_type = other DNA
gtgtatgtataattgaatga

SEQ ID NO: 243432 - DNA, 20 bp, synthetic construct
  source 1..20: mol_type = other DNA
tgtgtatgtataattgaatg

SEQ ID NO: 243433 - DNA, 20 bp, synthetic construct
  source 1..20: mol_type = other DNA
gtgtgtatgtataattgaat

SEQ ID NO: 243434 - DNA, 20 bp, synthetic construct
  source 1..20: mol_type = other DNA
tgtgtgtatgtataattgaa

SEQ ID NO: 243435 - DNA, 20 bp, synthetic construct
  source 1..20: mol_type = other DNA
atgtgtgtatgtataattga

SEQ ID NO: 243436 - DNA, 20 bp, synthetic construct
  source 1..20: mol_type = other DNA
gatgtgtgtatgtataattg

SEQ ID NO: 243437 - DNA, 20 bp, synthetic construct
  source 1..20: mol_type = other DNA
ggatgtgtgtatgtataatt

SEQ ID NO: 243438 - DNA, 20 bp, synthetic construct
  source 1..20: mol_type = other DNA
tggatgtgtgtatgtataat

SEQ ID NO: 243439 - DNA, 20 bp, synthetic construct
  source 1..20: mol_type = other DNA
atggatgtgtgtatgtataa

SEQ ID NO: 243440 - DNA, 20 bp, synthetic construct
  source 1..20: mol_type = other DNA
tatggatgtgtgtatgtata

SEQ ID NO: 243441 - DNA, 20 bp, synthetic construct
  source 1..20: mol_type = other DNA
atatggatgtgtgtatgtat

SEQ ID NO: 243442 - DNA, 20 bp, synthetic construct
  source 1..20: mol_type = other DNA
tatatggatgtgtgtatgta

SEQ ID NO: 243443 - DNA, 20 bp, synthetic construct
  source 1..20: mol_type = other DNA
ttatatggatgtgtgtatgt

SEQ ID NO: 243444 - DNA, 20 bp, synthetic construct
  source 1..20: mol_type = other DNA
attatatggatgtgtgtatg

SEQ ID NO: 243445 - DNA, 20 bp, synthetic construct
  source 1..20: mol_type = other DNA
aattatatggatgtgtgtat

SEQ ID NO: 243446 - DNA, 20 bp, synthetic construct
  source 1..20: mol_type = other DNA
gaattatatggatgtgtgta

SEQ ID NO: 243447 - DNA, 20 bp, synthetic construct
  source 1..20: mol_type = other DNA
agaattatatggatgtgtgt

SEQ ID NO: 243448 - DNA, 20 bp, synthetic construct
  source 1..20: mol_type = other DNA
tagaattatatggatgtgtg

SEQ ID NO: 243449 - DNA, 20 bp, synthetic construct
  source 1..20: mol_type = other DNA
gtagaattatatggatgtgt

SEQ ID NO: 243450 - DNA, 20 bp, synthetic construct
  source 1..20: mol_type = other DNA
tgtagaattatatggatgtg

SEQ ID NO: 243451 - DNA, 20 bp, synthetic construct
  source 1..20: mol_type = other DNA
atgtagaattatatggatgt

SEQ ID NO: 243452 - DNA, 20 bp, synthetic construct
  source 1..20: mol_type = other DNA
gatgtagaattatatggatg

SEQ ID NO: 243453 - DNA, 20 bp, synthetic construct
  source 1..20: mol_type = other DNA
ggatgtagaattatatggat

SEQ ID NO: 243454 - DNA, 20 bp, synthetic construct
  source 1..20: mol_type = other DNA
tggatgtagaattatatgga

SEQ ID NO: 243455 - DNA, 20 bp, synthetic construct
  source 1..20: mol_type = other DNA
ttggatgtagaattatatgg

SEQ ID NO: 243456 - DNA, 20 bp, synthetic construct
  source 1..20: mol_type = other DNA
attggatgtagaattatatg

SEQ ID NO: 243457 - DNA, 20 bp, synthetic construct
  source 1..20: mol_type = other DNA
aattggatgtagaattatat

SEQ ID NO: 243458 - DNA, 20 bp, synthetic construct
  source 1..20: mol_type = other DNA
taattggatgtagaattata

SEQ ID NO: 243459 - DNA, 20 bp, synthetic construct
  source 1..20: mol_type = other DNA
ataattggatgtagaattat

SEQ ID NO: 243460 - DNA, 20 bp, synthetic construct
  source 1..20: mol_type = other DNA
tataattggatgtagaatta

SEQ ID NO: 243461 - DNA, 20 bp, synthetic construct
  source 1..20: mol_type = other DNA
gtataattggatgtagaatt

SEQ ID NO: 243462 - DNA, 20 bp, synthetic construct
  source 1..20: mol_type = other DNA
ggtataattggatgtagaat

SEQ ID NO: 243463 - DNA, 20 bp, synthetic construct
  source 1..20: mol_type = other DNA
aggtataattggatgtagaa

SEQ ID NO: 243464 - DNA, 20 bp, synthetic construct
  source 1..20: mol_type = other DNA
gaggtataattggatgtaga

SEQ ID NO: 243465 - DNA, 20 bp, synthetic construct
  source 1..20: mol_type = other DNA
ggaggtataattggatgtag

SEQ ID NO: 243466 - DNA, 20 bp, synthetic construct
  source 1..20: mol_type = other DNA
tggaggtataattggatgta

SEQ ID NO: 243467 - DNA, 20 bp, synthetic construct
  source 1..20: mol_type = other DNA
atggaggtataattggatgt

SEQ ID NO: 243468 - DNA, 20 bp, synthetic construct
  source 1..20: mol_type = other DNA
gatggaggtataattggatg

SEQ ID NO: 243469 - DNA, 20 bp, synthetic construct
  source 1..20: mol_type = other DNA
ggatggaggtataattggat

SEQ ID NO: 243470 - DNA, 20 bp, synthetic construct
  source 1..20: mol_type = other DNA
tggatggaggtataattgga

SEQ ID NO: 243471 - DNA, 20 bp, synthetic construct
  source 1..20: mol_type = other DNA
ttggatggaggtataattgg

SEQ ID NO: 243472 - DNA, 20 bp, synthetic construct
  source 1..20: mol_type = other DNA
attggatggaggtataattg

SEQ ID NO: 243473 - DNA, 20 bp, synthetic construct
  source 1..20: mol_type = other DNA
aattggatggaggtataatt

SEQ ID NO: 243474 - DNA, 20 bp, synthetic construct
  source 1..20: mol_type = other DNA
taattggatggaggtataat

SEQ ID NO: 243475 - DNA, 20 bp, synthetic construct
  source 1..20: mol_type = other DNA
gtaattggatggaggtataa

SEQ ID NO: 243476 - DNA, 20 bp, synthetic construct
  source 1..20: mol_type = other DNA
tgtaattggatggaggtata

SEQ ID NO: 243477 - DNA, 20 bp, synthetic construct
  source 1..20: mol_type = other DNA
gtgtaattggatggaggtat

SEQ ID NO: 243478 - DNA, 20 bp, synthetic construct
  source 1..20: mol_type = other DNA
tgtgtaattggatggaggta

SEQ ID NO: 243479 - DNA, 20 bp, synthetic construct
  source 1..20: mol_type = other DNA
atgtgtaattggatggaggt

SEQ ID NO: 243480 - DNA, 20 bp, synthetic construct
  source 1..20: mol_type = other DNA
aatgtgtaattggatggagg

SEQ ID NO: 243481 - DNA, 20 bp, synthetic construct
  source 1..20: mol_type = other DNA
gaatgtgtaattggatggag

SEQ ID NO: 243482 - DNA, 20 bp, synthetic construct
  source 1..20: mol_type = other DNA
tgaatgtgtaattggatgga

SEQ ID NO: 243483 - DNA, 20 bp, synthetic construct
  source 1..20: mol_type = other DNA
atgaatgtgtaattggatgg

SEQ ID NO: 243484 - DNA, 20 bp, synthetic construct
  source 1..20: mol_type = other DNA
tatgaatgtgtaattggatg

SEQ ID NO: 243485 - DNA, 20 bp, synthetic construct
  source 1..20: mol_type = other DNA
gtatgaatgtgtaattggat

SEQ ID NO: 243486 - DNA, 20 bp, synthetic construct
  source 1..20: mol_type = other DNA
tgtatgaatgtgtaattgga

SEQ ID NO: 243487 - DNA, 20 bp, synthetic construct
  source 1..20: mol_type = other DNA
gtgtatgaatgtgtaattgg

SEQ ID NO: 243488 - DNA, 20 bp, synthetic construct
  source 1..20: mol_type = other DNA
ggtgtatgaatgtgtaattg

SEQ ID NO: 243489 - DNA, 20 bp, synthetic construct
  source 1..20: mol_type = other DNA
gggtgtatgaatgtgtaatt

SEQ ID NO: 243490 - DNA, 20 bp, synthetic construct
  source 1..20: mol_type = other DNA
tgggtgtatgaatgtgtaat

SEQ ID NO: 243491 - DNA, 20 bp, synthetic construct
  source 1..20: mol_type = other DNA
gtgggtgtatgaatgtgtaa

SEQ ID NO: 243492 - DNA, 20 bp, synthetic construct
  source 1..20: mol_type = other DNA
ggtgggtgtatgaatgtgta

SEQ ID NO: 243493 - DNA, 20 bp, synthetic construct
  source 1..20: mol_type = other DNA
aggtgggtgtatgaatgtgt

SEQ ID NO: 243494 - DNA, 20 bp, synthetic construct
  source 1..20: mol_type = other DNA
taggtgggtgtatgaatgtg

SEQ ID NO: 243495 - DNA, 20 bp, synthetic construct
  source 1..20: mol_type = other DNA
ttaggtgggtgtatgaatgt

SEQ ID NO: 243496 - DNA, 20 bp, synthetic construct
  source 1..20: mol_type = other DNA
attaggtgggtgtatgaatg

SEQ ID NO: 243497 - DNA, 20 bp, synthetic construct
  source 1..20: mol_type = other DNA
tattaggtgggtgtatgaat

SEQ ID NO: 243498 - DNA, 20 bp, synthetic construct
  source 1..20: mol_type = other DNA
ttattaggtgggtgtatgaa

SEQ ID NO: 243499 - DNA, 20 bp, synthetic construct
  source 1..20: mol_type = other DNA
tttattaggtgggtgtatga

SEQ ID NO: 243500 - DNA, 20 bp, synthetic construct
  source 1..20: mol_type = other DNA
atttattaggtgggtgtatg

SEQ ID NO: 243501 - DNA, 20 bp, synthetic construct
  source 1..20: mol_type = other DNA
aatttattaggtgggtgtat

SEQ ID NO: 243502 - DNA, 20 bp, synthetic construct
  source 1..20: mol_type = other DNA
taatttattaggtgggtgta

SEQ ID NO: 243503 - DNA, 20 bp, synthetic construct
  source 1..20: mol_type = other DNA
ataatttattaggtgggtgt

SEQ ID NO: 243504 - DNA, 20 bp, synthetic construct
  source 1..20: mol_type = other DNA
aataatttattaggtgggtg

SEQ ID NO: 243505 - DNA, 20 bp, synthetic construct
  source 1..20: mol_type = other DNA
taataatttattaggtgggt

SEQ ID NO: 243506 - DNA, 20 bp, synthetic construct
  source 1..20: mol_type = other DNA
ttaataatttattaggtggg

SEQ ID NO: 243507 - DNA, 20 bp, synthetic construct
  source 1..20: mol_type = other DNA
attaataatttattaggtgg

SEQ ID NO: 243508 - DNA, 20 bp, synthetic construct
  source 1..20: mol_type = other DNA
aattaataatttattaggtg

SEQ ID NO: 243509 - DNA, 20 bp, synthetic construct
  source 1..20: mol_type = other DNA
gaattaataatttattaggt

SEQ ID NO: 243510 - DNA, 20 bp, synthetic construct
  source 1..20: mol_type = other DNA
tgaattaataatttattagg

SEQ ID NO: 243511 - DNA, 20 bp, synthetic construct
  source 1..20: mol_type = other DNA
atgaattaataatttattag

SEQ ID NO: 243512 - DNA, 20 bp, synthetic construct
  source 1..20: mol_type = other DNA
tatgaattaataatttatta

SEQ ID NO: 243513 - DNA, 20 bp, synthetic construct
  source 1..20: mol_type = other DNA
atatgaattaataatttatt

SEQ ID NO: 243514 - DNA, 20 bp, synthetic construct
  source 1..20: mol_type = other DNA
tatatgaattaataatttat

SEQ ID NO: 243515 - DNA, 20 bp, synthetic construct
  source 1..20: mol_type = other DNA
atatatgaattaataattta

SEQ ID NO: 243516 - DNA, 20 bp, synthetic construct
  source 1..20: mol_type = other DNA
gatatatgaattaataattt

SEQ ID NO: 243517 - DNA, 20 bp, synthetic construct
  source 1..20: mol_type = other DNA
ggatatatgaattaataatt

SEQ ID NO: 243518 - DNA, 20 bp, synthetic construct
  source 1..20: mol_type = other DNA
tggatatatgaattaataat

SEQ ID NO: 243519 - DNA, 20 bp, synthetic construct
  source 1..20: mol_type = other DNA
atggatatatgaattaataa

SEQ ID NO: 243520 - DNA, 20 bp, synthetic construct
  source 1..20: mol_type = other DNA
gatggatatatgaattaata

SEQ ID NO: 243521 - DNA, 20 bp, synthetic construct
  source 1..20: mol_type = other DNA
ggatggatatatgaattaat

SEQ ID NO: 243522 - DNA, 20 bp, synthetic construct
  source 1..20: mol_type = other DNA
tggatggatatatgaattaa

SEQ ID NO: 243523 - DNA, 20 bp, synthetic construct
  source 1..20: mol_type = other DNA
atggatggatatatgaatta

SEQ ID NO: 243524 - DNA, 20 bp, synthetic construct
  source 1..20: mol_type = other DNA
tatggatggatatatgaatt

SEQ ID NO: 243525 - DNA, 20 bp, synthetic construct
  source 1..20: mol_type = other DNA
atatggatggatatatgaat

SEQ ID NO: 243526 - DNA, 20 bp, synthetic construct
  source 1..20: mol_type = other DNA
tatatggatggatatatgaa

SEQ ID NO: 243527 - DNA, 20 bp, synthetic construct
  source 1..20: mol_type = other DNA
ttatatggatggatatatga

SEQ ID NO: 243528 - DNA, 20 bp, synthetic construct
  source 1..20: mol_type = other DNA
attatatggatggatatatg

SEQ ID NO: 243529 - DNA, 20 bp, synthetic construct
  source 1..20: mol_type = other DNA
aattatatggatggatatat

SEQ ID NO: 243530 - DNA, 20 bp, synthetic construct
  source 1..20: mol_type = other DNA
taattatatggatggatata

SEQ ID NO: 243531 - DNA, 20 bp, synthetic construct
  source 1..20: mol_type = other DNA
ataattatatggatggatat

SEQ ID NO: 243532 - DNA, 20 bp, synthetic construct
  source 1..20: mol_type = other DNA
tataattatatggatggata

SEQ ID NO: 243533 - DNA, 20 bp, synthetic construct
  source 1..20: mol_type = other DNA
gtataattatatggatggat

SEQ ID NO: 243534 - DNA, 20 bp, synthetic construct
  source 1..20: mol_type = other DNA
tgtataattatatggatgga

SEQ ID NO: 243535 - DNA, 20 bp, synthetic construct
  source 1..20: mol_type = other DNA
atgtataattatatggatgg

SEQ ID NO: 243536 - DNA, 20 bp, synthetic construct
  source 1..20: mol_type = other DNA
gatgtataattatatggatg

SEQ ID NO: 243537 - DNA, 20 bp, synthetic construct
  source 1..20: mol_type = other DNA
tgatgtataattatatggat

SEQ ID NO: 243538 - DNA, 20 bp, synthetic construct
  source 1..20: mol_type = other DNA
ttgatgtataattatatgga

SEQ ID NO: 243539 - DNA, 20 bp, synthetic construct
  source 1..20: mol_type = other DNA
attgatgtataattatatgg

SEQ ID NO: 243540 - DNA, 20 bp, synthetic construct
  source 1..20: mol_type = other DNA
aattgatgtataattatatg

SEQ ID NO: 243541 - DNA, 20 bp, synthetic construct
  source 1..20: mol_type = other DNA
taattgatgtataattatat

SEQ ID NO: 243542 - DNA, 20 bp, synthetic construct
  source 1..20: mol_type = other DNA
ataattgatgtataattata

SEQ ID NO: 243543 - DNA, 20 bp, synthetic construct
  source 1..20: mol_type = other DNA
tataattgatgtataattat

SEQ ID NO: 243544 - DNA, 20 bp, synthetic construct
  source 1..20: mol_type = other DNA
gtataattgatgtataatta

SEQ ID NO: 243545 - DNA, 20 bp, synthetic construct
  source 1..20: mol_type = other DNA
tgtataattgatgtataatt

SEQ ID NO: 243546 - DNA, 20 bp, synthetic construct
  source 1..20: mol_type = other DNA
atgtataattgatgtataat

SEQ ID NO: 243547 - DNA, 20 bp, synthetic construct
  source 1..20: mol_type = other DNA
gatgtataattgatgtataa

SEQ ID NO: 243548 - DNA, 20 bp, synthetic construct
  source 1..20: mol_type = other DNA
ggatgtataattgatgtata

SEQ ID NO: 243549 - DNA, 20 bp, synthetic construct
  source 1..20: mol_type = other DNA
tggatgtataattgatgtat

SEQ ID NO: 243550 - DNA, 20 bp, synthetic construct
  source 1..20: mol_type = other DNA
atggatgtataattgatgta

SEQ ID NO: 243551 - DNA, 20 bp, synthetic construct
  source 1..20: mol_type = other DNA
gatggatgtataattgatgt

SEQ ID NO: 243552 - DNA, 20 bp, synthetic construct
  source 1..20: mol_type = other DNA
agatggatgtataattgatg

SEQ ID NO: 243553 - DNA, 20 bp, synthetic construct
  source 1..20: mol_type = other DNA
tagatggatgtataattgat

SEQ ID NO: 243554 - DNA, 20 bp, synthetic construct
  source 1..20: mol_type = other DNA
ttagatggatgtataattga

SEQ ID NO: 243555 - DNA, 20 bp, synthetic construct
  source 1..20: mol_type = other DNA
attagatggatgtataattg

SEQ ID NO: 243556 - DNA, 20 bp, synthetic construct
  source 1..20: mol_type = other DNA
gattagatggatgtataatt

SEQ ID NO: 243557 - DNA, 20 bp, synthetic construct
  source 1..20: mol_type = other DNA
tgattagatggatgtataat

SEQ ID NO: 243558 - DNA, 20 bp, synthetic construct
  source 1..20: mol_type = other DNA
atgattagatggatgtataa

SEQ ID NO: 243559 - DNA, 20 bp, synthetic construct
  source 1..20: mol_type = other DNA
aatgattagatggatgtata

SEQ ID NO: 243560 - DNA, 20 bp, synthetic construct
  source 1..20: mol_type = other DNA
gaatgattagatggatgtat

SEQ ID NO: 243561 - DNA, 20 bp, synthetic construct
  source 1..20: mol_type = other DNA
tgaatgattagatggatgta

SEQ ID NO: 243562 - DNA, 20 bp, synthetic construct
  source 1..20: mol_type = other DNA
ctgaatgattagatggatgt

SEQ ID NO: 243563 - DNA, 20 bp, synthetic construct
  source 1..20: mol_type = other DNA
actgaatgattagatggatg

SEQ ID NO: 243564 - DNA, 20 bp, synthetic construct
  source 1..20: mol_type = other DNA
tactgaatgattagatggat

SEQ ID NO: 243565 - DNA, 20 bp, synthetic construct
  source 1..20: mol_type = other DNA
ttactgaatgattagatgga

SEQ ID NO: 243566 - DNA, 20 bp, synthetic construct
  source 1..20: mol_type = other DNA
attactgaatgattagatgg

SEQ ID NO: 243567 - DNA, 20 bp, synthetic construct
  source 1..20: mol_type = other DNA
aattactgaatgattagatg

SEQ ID NO: 243568 - DNA, 20 bp, synthetic construct
  source 1..20: mol_type = other DNA
gaattactgaatgattagat

SEQ ID NO: 243569 - DNA, 20 bp, synthetic construct
  source 1..20: mol_type = other DNA
tgaattactgaatgattaga

SEQ ID NO: 243570 - DNA, 20 bp, synthetic construct
  source 1..20: mol_type = other DNA
gtgaattactgaatgattag

SEQ ID NO: 243571 - DNA, 20 bp, synthetic construct
  source 1..20: mol_type = other DNA
ggtgaattactgaatgatta

SEQ ID NO: 243572 - DNA, 20 bp, synthetic construct
  source 1..20: mol_type = other DNA
gggtgaattactgaatgatt

SEQ ID NO: 243573 - DNA, 20 bp, synthetic construct
  source 1..20: mol_type = other DNA
tgggtgaattactgaatgat

SEQ ID NO: 243574 - DNA, 20 bp, synthetic construct
  source 1..20: mol_type = other DNA
gtgggtgaattactgaatga

SEQ ID NO: 243575 - DNA, 20 bp, synthetic construct
  source 1..20: mol_type = other DNA
ggtgggtgaattactgaatg

SEQ ID NO: 243576 - DNA, 20 bp, synthetic construct
  source 1..20: mol_type = other DNA
tggtgggtgaattactgaat

SEQ ID NO: 243577 - DNA, 20 bp, synthetic construct
  source 1..20: mol_type = other DNA
atggtgggtgaattactgaa

SEQ ID NO: 243578 - DNA, 20 bp, synthetic construct
  source 1..20: mol_type = other DNA
gatggtgggtgaattactga

SEQ ID NO: 243579 - DNA, 20 bp, synthetic construct
  source 1..20: mol_type = other DNA
ggatggtgggtgaattactg

SEQ ID NO: 243580 - DNA, 20 bp, synthetic construct
  source 1..20: mol_type = other DNA
tggatggtgggtgaattact

SEQ ID NO: 243581 - DNA, 20 bp, synthetic construct
  source 1..20: mol_type = other DNA
ctggatggtgggtgaattac

SEQ ID NO: 243582 - DNA, 20 bp, synthetic construct
  source 1..20: mol_type = other DNA
actggatggtgggtgaatta

SEQ ID NO: 243583 - DNA, 20 bp, synthetic construct
  source 1..20: mol_type = other DNA
gactggatggtgggtgaatt

SEQ ID NO: 243584 - DNA, 20 bp, synthetic construct
  source 1..20: mol_type = other DNA
tgactggatggtgggtgaat

SEQ ID NO: 243585 - DNA, 20 bp, synthetic construct
  source 1..20: mol_type = other DNA
atgactggatggtgggtgaa

SEQ ID NO: 243586 - DNA, 20 bp, synthetic construct
  source 1..20: mol_type = other DNA
gatgactggatggtgggtga

SEQ ID NO: 243587 - DNA, 20 bp, synthetic construct
  source 1..20: mol_type = other DNA
agatgactggatggtgggtg

SEQ ID NO: 243588 - DNA, 20 bp, synthetic construct
  source 1..20: mol_type = other DNA
tagatgactggatggtgggt

SEQ ID NO: 243589 - DNA, 20 bp, synthetic construct
  source 1..20: mol_type = other DNA
atagatgactggatggtggg

SEQ ID NO: 243590 - DNA, 20 bp, synthetic construct
  source 1..20: mol_type = other DNA
gatagatgactggatggtgg

SEQ ID NO: 243591 - DNA, 20 bp, synthetic construct
  source 1..20: mol_type = other DNA
ggatagatgactggatggtg

SEQ ID NO: 243592 - DNA, 20 bp, synthetic construct
  source 1..20: mol_type = other DNA
tggatagatgactggatggt

SEQ ID NO: 243593 - DNA, 20 bp, synthetic construct
  source 1..20: mol_type = other DNA
ttggatagatgactggatgg

SEQ ID NO: 243594 - DNA, 20 bp, synthetic construct
  source 1..20: mol_type = other DNA
attggatagatgactggatg

SEQ ID NO: 243595 - DNA, 20 bp, synthetic construct
  source 1..20: mol_type = other DNA
tattggatagatgactggat

SEQ ID NO: 243596 - DNA, 20 bp, synthetic construct
  source 1..20: mol_type = other DNA
ttattggatagatgactgga

SEQ ID NO: 243597 - DNA, 20 bp, synthetic construct
  source 1..20: mol_type = other DNA
attattggatagatgactgg

SEQ ID NO: 243598 - DNA, 20 bp, synthetic construct
  source 1..20: mol_type = other DNA
tattattggatagatgactg

SEQ ID NO: 243599 - DNA, 20 bp, synthetic construct
  source 1..20: mol_type = other DNA
gtattattggatagatgact

SEQ ID NO: 243600 - DNA, 20 bp, synthetic construct
  source 1..20: mol_type = other DNA
tgtattattggatagatgac

SEQ ID NO: 243601 - DNA, 20 bp, synthetic construct
  source 1..20: mol_type = other DNA
atgtattattggatagatga

SEQ ID NO: 243602 - DNA, 20 bp, synthetic construct
  source 1..20: mol_type = other DNA
aatgtattattggatagatg

SEQ ID NO: 243603 - DNA, 20 bp, synthetic construct
  source 1..20: mol_type = other DNA
gaatgtattattggatagat

SEQ ID NO: 243604 - DNA, 20 bp, synthetic construct
  source 1..20: mol_type = other DNA
tgaatgtattattggataga

SEQ ID NO: 243605 - DNA, 20 bp, synthetic construct
  source 1..20: mol_type = other DNA
atgaatgtattattggatag

SEQ ID NO: 243606 - DNA, 20 bp, synthetic construct
  source 1..20: mol_type = other DNA
gatgaatgtattattggata

SEQ ID NO: 243607 - DNA, 20 bp, synthetic construct
  source 1..20: mol_type = other DNA
ggatgaatgtattattggat

SEQ ID NO: 243608 - DNA, 20 bp, synthetic construct
  source 1..20: mol_type = other DNA
tggatgaatgtattattgga

SEQ ID NO: 243609 - DNA, 20 bp, synthetic construct
  source 1..20: mol_type = other DNA
ttggatgaatgtattattgg

SEQ ID NO: 243610 - DNA, 20 bp, synthetic construct
  source 1..20: mol_type = other DNA
attggatgaatgtattattg

SEQ ID NO: 243611 - DNA, 20 bp, synthetic construct
  source 1..20: mol_type = other DNA
gattggatgaatgtattatt

SEQ ID NO: 243612 - DNA, 20 bp, synthetic construct
  source 1..20: mol_type = other DNA
tgattggatgaatgtattat

SEQ ID NO: 243613 - DNA, 20 bp, synthetic construct
  source 1..20: mol_type = other DNA
atgattggatgaatgtatta

SEQ ID NO: 243614 - DNA, 20 bp, synthetic construct
  source 1..20: mol_type = other DNA
gatgattggatgaatgtatt

SEQ ID NO: 243615 - DNA, 20 bp, synthetic construct
  source 1..20: mol_type = other DNA
ggatgattggatgaatgtat

SEQ ID NO: 243616 - DNA, 20 bp, synthetic construct
  source 1..20: mol_type = other DNA
tggatgattggatgaatgta

SEQ ID NO: 243617 - DNA, 20 bp, synthetic construct
  source 1..20: mol_type = other DNA
atggatgattggatgaatgt

SEQ ID NO: 243618 - DNA, 20 bp, synthetic construct
  source 1..20: mol_type = other DNA
gatggatgattggatgaatg

SEQ ID NO: 243619 - DNA, 20 bp, synthetic construct
  source 1..20: mol_type = other DNA
ggatggatgattggatgaat

SEQ ID NO: 243620 - DNA, 20 bp, synthetic construct
  source 1..20: mol_type = other DNA
tggatggatgattggatgaa

SEQ ID NO: 243621 - DNA, 20 bp, synthetic construct
  source 1..20: mol_type = other DNA
atggatggatgattggatga

SEQ ID NO: 243622 - DNA, 20 bp, synthetic construct
  source 1..20: mol_type = other DNA
gatggatggatgattggatg

SEQ ID NO: 243623 - DNA, 20 bp, synthetic construct
  source 1..20: mol_type = other DNA
ggatggatggatgattggat

SEQ ID NO: 243624 - DNA, 20 bp, synthetic construct
  source 1..20: mol_type = other DNA
tggatggatggatgattgga

SEQ ID NO: 243625 - DNA, 20 bp, synthetic construct
  source 1..20: mol_type = other DNA
atggatggatggatgattgg

SEQ ID NO: 243626 - DNA, 20 bp, synthetic construct
  source 1..20: mol_type = other DNA
gatggatggatggatgattg

SEQ ID NO: 243627 - DNA, 20 bp, synthetic construct
  source 1..20: mol_type = other DNA
ggatggatggatggatgatt

SEQ ID NO: 243628 - DNA, 20 bp, synthetic construct
  source 1..20: mol_type = other DNA
tggatggatggatggatgat

SEQ ID NO: 243629 - DNA, 20 bp, synthetic construct
  source 1..20: mol_type = other DNA
gtggatggatggatggatga

SEQ ID NO: 243630 - DNA, 20 bp, synthetic construct
  source 1..20: mol_type = other DNA
ggtggatggatggatggatg

SEQ ID NO: 243631 - DNA, 20 bp, synthetic construct
  source 1..20: mol_type = other DNA
gggtggatggatggatggat

SEQ ID NO: 243632 - DNA, 20 bp, synthetic construct
  source 1..20: mol_type = other DNA
tgggtggatggatggatgga

SEQ ID NO: 243633 - DNA, 20 bp, synthetic construct
  source 1..20: mol_type = other DNA
atgggtggatggatggatgg

SEQ ID NO: 243634 - DNA, 20 bp, synthetic construct
  source 1..20: mol_type = other DNA
aatgggtggatggatggatg

SEQ ID NO: 243635 - DNA, 20 bp, synthetic construct
  source 1..20: mol_type = other DNA
gaatgggtggatggatggat

SEQ ID NO: 243636 - DNA, 20 bp, synthetic construct
  source 1..20: mol_type = other DNA
tgaatgggtggatggatgga

SEQ ID NO: 243637 - DNA, 20 bp, synthetic construct
  source 1..20: mol_type = other DNA
atgaatgggtggatggatgg

SEQ ID NO: 243638 - DNA, 20 bp, synthetic construct
  source 1..20: mol_type = other DNA
gatgaatgggtggatggatg

SEQ ID NO: 243639 - DNA, 20 bp, synthetic construct
  source 1..20: mol_type = other DNA
ggatgaatgggtggatggat

SEQ ID NO: 243640 - DNA, 20 bp, synthetic construct
  source 1..20: mol_type = other DNA
tggatgaatgggtggatgga

SEQ ID NO: 243641 - DNA, 20 bp, synthetic construct
  source 1..20: mol_type = other DNA
atggatgaatgggtggatgg

SEQ ID NO: 243642 - DNA, 20 bp, synthetic construct
  source 1..20: mol_type = other DNA
gatggatgaatgggtggatg

SEQ ID NO: 243643 - DNA, 20 bp, synthetic construct
  source 1..20: mol_type = other DNA
ggatggatgaatgggtggat

SEQ ID NO: 243644 - DNA, 20 bp, synthetic construct
  source 1..20: mol_type = other DNA
tggatggatgaatgggtgga

SEQ ID NO: 243645 - DNA, 20 bp, synthetic construct
  source 1..20: mol_type = other DNA
atggatggatgaatgggtgg

SEQ ID NO: 243646 - DNA, 20 bp, synthetic construct
  source 1..20: mol_type = other DNA
gatggatggatgaatgggtg

SEQ ID NO: 243647 - DNA, 20 bp, synthetic construct
  source 1..20: mol_type = other DNA
ggatggatggatgaatgggt

SEQ ID NO: 243648 - DNA, 20 bp, synthetic construct
  source 1..20: mol_type = other DNA
cggatggatggatgaatggg

SEQ ID NO: 243649 - DNA, 20 bp, synthetic construct
  source 1..20: mol_type = other DNA
acggatggatggatgaatgg

SEQ ID NO: 243650 - DNA, 20 bp, synthetic construct
  source 1..20: mol_type = other DNA
gacggatggatggatgaatg

SEQ ID NO: 243651 - DNA, 20 bp, synthetic construct
  source 1..20: mol_type = other DNA
ggacggatggatggatgaat

SEQ ID NO: 243652 - DNA, 20 bp, synthetic construct
  source 1..20: mol_type = other DNA
cggacggatggatggatgaa

SEQ ID NO: 243653 - DNA, 20 bp, synthetic construct
  source 1..20: mol_type = other DNA
acggacggatggatggatga

SEQ ID NO: 243654 - DNA, 20 bp, synthetic construct
  source 1..20: mol_type = other DNA
gacggacggatggatggatg

SEQ ID NO: 243655 - DNA, 20 bp, synthetic construct
  source 1..20: mol_type = other DNA
ggacggacggatggatggat

SEQ ID NO: 243656 - DNA, 20 bp, synthetic construct
  source 1..20: mol_type = other DNA
tggacggacggatggatgga

SEQ ID NO: 243657 - DNA, 20 bp, synthetic construct
  source 1..20: mol_type = other DNA
gtggacggacggatggatgg

SEQ ID NO: 243658 - DNA, 20 bp, synthetic construct
  source 1..20: mol_type = other DNA
ggtggacggacggatggatg

SEQ ID NO: 243659 - DNA, 20 bp, synthetic construct
  source 1..20: mol_type = other DNA
gggtggacggacggatggat

SEQ ID NO: 243660 - DNA, 20 bp, synthetic construct
  source 1..20: mol_type = other DNA
tgggtggacggacggatgga

SEQ ID NO: 243661 - DNA, 20 bp, synthetic construct
  source 1..20: mol_type = other DNA
atgggtggacggacggatgg

SEQ ID NO: 243662 - DNA, 20 bp, synthetic construct
  source 1..20: mol_type = other DNA
gatgggtggacggacggatg

SEQ ID NO: 243663 - DNA, 20 bp, synthetic construct
  source 1..20: mol_type = other DNA
tgatgggtggacggacggat

SEQ ID NO: 243664 - DNA, 20 bp, synthetic construct
  source 1..20: mol_type = other DNA
atgatgggtggacggacgga

SEQ ID NO: 243665 - DNA, 20 bp, synthetic construct
  source 1..20: mol_type = other DNA
catgatgggtggacggacgg

SEQ ID NO: 243666 - DNA, 20 bp, synthetic construct
  source 1..20: mol_type = other DNA
ccatgatgggtggacggacg

SEQ ID NO: 243667 - DNA, 20 bp, synthetic construct
  source 1..20: mol_type = other DNA
accatgatgggtggacggac

SEQ ID NO: 243668 - DNA, 20 bp, synthetic construct
  source 1..20: mol_type = other DNA
taccatgatgggtggacgga

SEQ ID NO: 243669 - DNA, 20 bp, synthetic construct
  source 1..20: mol_type = other DNA
ataccatgatgggtggacgg

SEQ ID NO: 243670 - DNA, 20 bp, synthetic construct
  source 1..20: mol_type = other DNA
cataccatgatgggtggacg

SEQ ID NO: 243671 - DNA, 20 bp, synthetic construct
  source 1..20: mol_type = other DNA
tcataccatgatgggtggac

SEQ ID NO: 243672 - DNA, 20 bp, synthetic construct
  source 1..20: mol_type = other DNA
ctcataccatgatgggtgga

SEQ ID NO: 243673 - DNA, 20 bp, synthetic construct
  source 1..20: mol_type = other DNA
gctcataccatgatgggtgg

SEQ ID NO: 243674 - DNA, 20 bp, synthetic construct
  source 1..20: mol_type = other DNA
ggctcataccatgatgggtg

SEQ ID NO: 243675 - DNA, 20 bp, synthetic construct
  source 1..20: mol_type = other DNA
tggctcataccatgatgggt

SEQ ID NO: 243676 - DNA, 20 bp, synthetic construct
  source 1..20: mol_type = other DNA
atggctcataccatgatggg

SEQ ID NO: 243677 - DNA, 20 bp, synthetic construct
  source 1..20: mol_type = other DNA
catggctcataccatgatgg

SEQ ID NO: 243678 - DNA, 20 bp, synthetic construct
  source 1..20: mol_type = other DNA
tcatggctcataccatgatg

SEQ ID NO: 243679 - DNA, 20 bp, synthetic construct
  source 1..20: mol_type = other DNA
atcatggctcataccatgat

SEQ ID NO: 243680 - DNA, 20 bp, synthetic construct
  source 1..20: mol_type = other DNA
aatcatggctcataccatga

SEQ ID NO: 243681 - DNA, 20 bp, synthetic construct
  source 1..20: mol_type = other DNA
aaatcatggctcataccatg

SEQ ID NO: 243682 - DNA, 20 bp, synthetic construct
  source 1..20: mol_type = other DNA
taaatcatggctcataccat

SEQ ID NO: 243683 - DNA, 20 bp, synthetic construct
  source 1..20: mol_type = other DNA
gtaaatcatggctcatacca

SEQ ID NO: 243684 - DNA, 20 bp, synthetic construct
  source 1..20: mol_type = other DNA
ggtaaatcatggctcatacc

SEQ ID NO: 243685 - DNA, 20 bp, synthetic construct
  source 1..20: mol_type = other DNA
tggtaaatcatggctcatac

SEQ ID NO: 243686 - DNA, 20 bp, synthetic construct
  source 1..20: mol_type = other DNA
gtggtaaatcatggctcata

SEQ ID NO: 243687 - DNA, 20 bp, synthetic construct
  source 1..20: mol_type = other DNA
cgtggtaaatcatggctcat

SEQ ID NO: 243688 - DNA, 20 bp, synthetic construct
  source 1..20: mol_type = other DNA
tcgtggtaaatcatggctca

SEQ ID NO: 243689 - DNA, 20 bp, synthetic construct
  source 1..20: mol_type = other DNA
atcgtggtaaatcatggctc

SEQ ID NO: 243690 - DNA, 20 bp, synthetic construct
  source 1..20: mol_type = other DNA
catcgtggtaaatcatggct

SEQ ID NO: 243691 - DNA, 20 bp, synthetic construct
  source 1..20: mol_type = other DNA
ccatcgtggtaaatcatggc

SEQ ID NO: 243692 - DNA, 20 bp, synthetic construct
  source 1..20: mol_type = other DNA
accatcgtggtaaatcatgg

SEQ ID NO: 243693 - DNA, 20 bp, synthetic construct
  source 1..20: mol_type = other DNA
gaccatcgtggtaaatcatg

SEQ ID NO: 243694 - DNA, 20 bp, synthetic construct
  source 1..20: mol_type = other DNA
ggaccatcgtggtaaatcat

SEQ ID NO: 243695 - DNA, 20 bp, synthetic construct
  source 1..20: mol_type = other DNA
gggaccatcgtggtaaatca

SEQ ID NO: 243696 - DNA, 20 bp, synthetic construct
  source 1..20: mol_type = other DNA
ggggaccatcgtggtaaatc

SEQ ID NO: 243697 - DNA, 20 bp, synthetic construct
  source 1..20: mol_type = other DNA
aggggaccatcgtggtaaat

SEQ ID NO: 243698 - DNA, 20 bp, synthetic construct
  source 1..20: mol_type = other DNA
caggggaccatcgtggtaaa

SEQ ID NO: 243699 - DNA, 20 bp, synthetic construct
  source 1..20: mol_type = other DNA
acaggggaccatcgtggtaa

SEQ ID NO: 243700 - DNA, 20 bp, synthetic construct
  source 1..20: mol_type = other DNA
cacaggggaccatcgtggta

SEQ ID NO: 243701 - DNA, 20 bp, synthetic construct
  source 1..20: mol_type = other DNA
ccacaggggaccatcgtggt

SEQ ID NO: 243702 - DNA, 20 bp, synthetic construct
  source 1..20: mol_type = other DNA
tccacaggggaccatcgtgg

SEQ ID NO: 243703 - DNA, 20 bp, synthetic construct
  source 1..20: mol_type = other DNA
gtccacaggggaccatcgtg

SEQ ID NO: 243704 - DNA, 20 bp, synthetic construct
  source 1..20: mol_type = other DNA
tgtccacaggggaccatcgt

SEQ ID NO: 243705 - DNA, 20 bp, synthetic construct
  source 1..20: mol_type = other DNA
ctgtccacaggggaccatcg

SEQ ID NO: 243706 - DNA, 20 bp, synthetic construct
  source 1..20: mol_type = other DNA
gctgtccacaggggaccatc

SEQ ID NO: 243707 - DNA, 20 bp, synthetic construct
  source 1..20: mol_type = other DNA
ggctgtccacaggggaccat

SEQ ID NO: 243708 - DNA, 20 bp, synthetic construct
  source 1..20: mol_type = other DNA
gggctgtccacaggggacca

SEQ ID NO: 243709 - DNA, 20 bp, synthetic construct
  source 1..20: mol_type = other DNA
tgggctgtccacaggggacc

SEQ ID NO: 243710 - DNA, 20 bp, synthetic construct
  source 1..20: mol_type = other DNA
ctgggctgtccacaggggac

SEQ ID NO: 243711 - DNA, 20 bp, synthetic construct
  source 1..20: mol_type = other DNA
cctgggctgtccacagggga

SEQ ID NO: 243712 - DNA, 20 bp, synthetic construct
  source 1..20: mol_type = other DNA
acctgggctgtccacagggg

SEQ ID NO: 243713 - DNA, 20 bp, synthetic construct
  source 1..20: mol_type = other DNA
cacctgggctgtccacaggg

SEQ ID NO: 243714 - DNA, 20 bp, synthetic construct
  source 1..20: mol_type = other DNA
ccacctgggctgtccacagg

SEQ ID NO: 243715 - DNA, 20 bp, synthetic construct
  source 1..20: mol_type = other DNA
cccacctgggctgtccacag

SEQ ID NO: 243716 - DNA, 20 bp, synthetic construct
  source 1..20: mol_type = other DNA
ccccacctgggctgtccaca

SEQ ID NO: 243717 - DNA, 20 bp, synthetic construct
  source 1..20: mol_type = other DNA
gccccacctgggctgtccac

SEQ ID NO: 243718 - DNA, 20 bp, synthetic construct
  source 1..20: mol_type = other DNA
tgccccacctgggctgtcca

SEQ ID NO: 243719 - DNA, 20 bp, synthetic construct
  source 1..20: mol_type = other DNA
ctgccccacctgggctgtcc

SEQ ID NO: 243720 - DNA, 20 bp, synthetic construct
  source 1..20: mol_type = other DNA
tctgccccacctgggctgtc

SEQ ID NO: 243721 - DNA, 20 bp, synthetic construct
  source 1..20: mol_type = other DNA
ttctgccccacctgggctgt

SEQ ID NO: 243722 - DNA, 20 bp, synthetic construct
  source 1..20: mol_type = other DNA
gttctgccccacctgggctg

SEQ ID NO: 243723 - DNA, 20 bp, synthetic construct
  source 1..20: mol_type = other DNA
agttctgccccacctgggct

SEQ ID NO: 243724 - DNA, 20 bp, synthetic construct
  source 1..20: mol_type = other DNA
cagttctgccccacctgggc

SEQ ID NO: 243725 - DNA, 20 bp, synthetic construct
  source 1..20: mol_type = other DNA
tcagttctgccccacctggg

SEQ ID NO: 243726 - DNA, 20 bp, synthetic construct
  source 1..20: mol_type = other DNA
ttcagttctgccccacctgg

SEQ ID NO: 243727 - DNA, 20 bp, synthetic construct
  source 1..20: mol_type = other DNA
cttcagttctgccccacctg

SEQ ID NO: 243728 - DNA, 20 bp, synthetic construct
  source 1..20: mol_type = other DNA
ccttcagttctgccccacct

SEQ ID NO: 243729 - DNA, 20 bp, synthetic construct
  source 1..20: mol_type = other DNA
cccttcagttctgccccacc

SEQ ID NO: 243730 - DNA, 20 bp, synthetic construct
  source 1..20: mol_type = other DNA
tcccttcagttctgccccac

SEQ ID NO: 243731 - DNA, 20 bp, synthetic construct
  source 1..20: mol_type = other DNA
ttcccttcagttctgcccca

SEQ ID NO: 243732 - DNA, 20 bp, synthetic construct
  source 1..20: mol_type = other DNA
cttcccttcagttctgcccc

SEQ ID NO: 243733 - DNA, 20 bp, synthetic construct
  source 1..20: mol_type = other DNA
gcttcccttcagttctgccc

SEQ ID NO: 243734 - DNA, 20 bp, synthetic construct
  source 1..20: mol_type = other DNA
ggcttcccttcagttctgcc

SEQ ID NO: 243735 - DNA, 20 bp, synthetic construct
  source 1..20: mol_type = other DNA
gggcttcccttcagttctgc

SEQ ID NO: 243736 - DNA, 20 bp, synthetic construct
  source 1..20: mol_type = other DNA
tgggcttcccttcagttctg

SEQ ID NO: 243737 - DNA, 20 bp, synthetic construct
  source 1..20: mol_type = other DNA
ctgggcttcccttcagttct

SEQ ID NO: 243738 - DNA, 20 bp, synthetic construct
  source 1..20: mol_type = other DNA
cctgggcttcccttcagttc

SEQ ID NO: 243739 - DNA, 20 bp, synthetic construct
  source 1..20: mol_type = other DNA
ccctgggcttcccttcagtt

SEQ ID NO: 243740 - DNA, 20 bp, synthetic construct
  source 1..20: mol_type = other DNA
gccctgggcttcccttcagt

SEQ ID NO: 243741 - DNA, 20 bp, synthetic construct
  source 1..20: mol_type = other DNA
agccctgggcttcccttcag

SEQ ID NO: 243742 - DNA, 20 bp, synthetic construct
  source 1..20: mol_type = other DNA
cagccctgggcttcccttca

SEQ ID NO: 243743 - DNA, 20 bp, synthetic construct
  source 1..20: mol_type = other DNA
gcagccctgggcttcccttc

SEQ ID NO: 243744 - DNA, 20 bp, synthetic construct
  source 1..20: mol_type = other DNA
ggcagccctgggcttccctt

SEQ ID NO: 243745 - DNA, 20 bp, synthetic construct
  source 1..20: mol_type = other DNA
gggcagccctgggcttccct

SEQ ID NO: 243746 - DNA, 20 bp, synthetic construct
  source 1..20: mol_type = other DNA
ggggcagccctgggcttccc

SEQ ID NO: 243747 - DNA, 20 bp, synthetic construct
  source 1..20: mol_type = other DNA
gggggcagccctgggcttcc

SEQ ID NO: 243748 - DNA, 20 bp, synthetic construct
  source 1..20: mol_type = other DNA
tgggggcagccctgggcttc

SEQ ID NO: 243749 - DNA, 20 bp, synthetic construct
  source 1..20: mol_type = other DNA
atgggggcagccctgggctt

SEQ ID NO: 243750 - DNA, 20 bp, synthetic construct
  source 1..20: mol_type = other DNA
tatgggggcagccctgggct

SEQ ID NO: 243751 - DNA, 20 bp, synthetic construct
  source 1..20: mol_type = other DNA
ttatgggggcagccctgggc

SEQ ID NO: 243752 - DNA, 20 bp, synthetic construct
  source 1..20: mol_type = other DNA
tttatgggggcagccctggg

SEQ ID NO: 243753 - DNA, 20 bp, synthetic construct
  source 1..20: mol_type = other DNA
gtttatgggggcagccctgg

SEQ ID NO: 243754 - DNA, 20 bp, synthetic construct
  source 1..20: mol_type = other DNA
tgtttatgggggcagccctg

SEQ ID NO: 243755 - DNA, 20 bp, synthetic construct
  source 1..20: mol_type = other DNA
atgtttatgggggcagccct

SEQ ID NO: 243756 - DNA, 20 bp, synthetic construct
  source 1..20: mol_type = other DNA
aatgtttatgggggcagccc

SEQ ID NO: 243757 - DNA, 20 bp, synthetic construct
  source 1..20: mol_type = other DNA
aaatgtttatgggggcagcc

SEQ ID NO: 243758 - DNA, 20 bp, synthetic construct
  source 1..20: mol_type = other DNA
caaatgtttatgggggcagc

SEQ ID NO: 243759 - DNA, 20 bp, synthetic construct
  source 1..20: mol_type = other DNA
gcaaatgtttatgggggcag

SEQ ID NO: 243760 - DNA, 20 bp, synthetic construct
  source 1..20: mol_type = other DNA
ggcaaatgtttatgggggca

SEQ ID NO: 243761 - DNA, 20 bp, synthetic construct
  source 1..20: mol_type = other DNA
aggcaaatgtttatgggggc

SEQ ID NO: 243762 - DNA, 20 bp, synthetic construct
  source 1..20: mol_type = other DNA
gaggcaaatgtttatggggg

SEQ ID NO: 243763 - DNA, 20 bp, synthetic construct
  source 1..20: mol_type = other DNA
ggaggcaaatgtttatgggg

SEQ ID NO: 243764 - DNA, 20 bp, synthetic construct
  source 1..20: mol_type = other DNA
aggaggcaaatgtttatggg

SEQ ID NO: 243765 - DNA, 20 bp, synthetic construct
  source 1..20: mol_type = other DNA
aaggaggcaaatgtttatgg

SEQ ID NO: 243766 - DNA, 20 bp, synthetic construct
  source 1..20: mol_type = other DNA
aaaggaggcaaatgtttatg

SEQ ID NO: 243767 - DNA, 20 bp, synthetic construct
  source 1..20: mol_type = other DNA
taaaggaggcaaatgtttat

SEQ ID NO: 243768 - DNA, 20 bp, synthetic construct
  source 1..20: mol_type = other DNA
gtaaaggaggcaaatgttta

SEQ ID NO: 243769 - DNA, 20 bp, synthetic construct
  source 1..20: mol_type = other DNA
tgtaaaggaggcaaatgttt

SEQ ID NO: 243770 - DNA, 20 bp, synthetic construct
  source 1..20: mol_type = other DNA
atgtaaaggaggcaaatgtt

SEQ ID NO: 243771 - DNA, 20 bp, synthetic construct
  source 1..20: mol_type = other DNA
catgtaaaggaggcaaatgt

SEQ ID NO: 243772 - DNA, 20 bp, synthetic construct
  source 1..20: mol_type = other DNA
ccatgtaaaggaggcaaatg

SEQ ID NO: 243773 - DNA, 20 bp, synthetic construct
  source 1..20: mol_type = other DNA
tccatgtaaaggaggcaaat

SEQ ID NO: 243774 - DNA, 20 bp, synthetic construct
  source 1..20: mol_type = other DNA
atccatgtaaaggaggcaaa

SEQ ID NO: 243775 - DNA, 20 bp, synthetic construct
  source 1..20: mol_type = other DNA
catccatgtaaaggaggcaa

SEQ ID NO: 243776 - DNA, 20 bp, synthetic construct
  source 1..20: mol_type = other DNA
tcatccatgtaaaggaggca

SEQ ID NO: 243777 - DNA, 20 bp, synthetic construct
  source 1..20: mol_type = other DNA
ctcatccatgtaaaggaggc

SEQ ID NO: 243778 - DNA, 20 bp, synthetic construct
  source 1..20: mol_type = other DNA
tctcatccatgtaaaggagg

SEQ ID NO: 243779 - DNA, 20 bp, synthetic construct
  source 1..20: mol_type = other DNA
ttctcatccatgtaaaggag

SEQ ID NO: 243780 - DNA, 20 bp, synthetic construct
  source 1..20: mol_type = other DNA
gttctcatccatgtaaagga

SEQ ID NO: 243781 - DNA, 20 bp, synthetic construct
  source 1..20: mol_type = other DNA
agttctcatccatgtaaagg

SEQ ID NO: 243782 - DNA, 20 bp, synthetic construct
  source 1..20: mol_type = other DNA
tagttctcatccatgtaaag

SEQ ID NO: 243783 - DNA, 20 bp, synthetic construct
  source 1..20: mol_type = other DNA
ctagttctcatccatgtaaa

SEQ ID NO: 243784 - DNA, 20 bp, synthetic construct
  source 1..20: mol_type = other DNA
tctagttctcatccatgtaa

SEQ ID NO: 243785 - DNA, 20 bp, synthetic construct
  source 1..20: mol_type = other DNA
atctagttctcatccatgta

SEQ ID NO: 243786 - DNA, 20 bp, synthetic construct
  source 1..20: mol_type = other DNA
gatctagttctcatccatgt

SEQ ID NO: 243787 - DNA, 20 bp, synthetic construct
  source 1..20: mol_type = other DNA
ggatctagttctcatccatg

SEQ ID NO: 243788 - DNA, 20 bp, synthetic construct
  source 1..20: mol_type = other DNA
tggatctagttctcatccat

SEQ ID NO: 243789 - DNA, 20 bp, synthetic construct
  source 1..20: mol_type = other DNA
gtggatctagttctcatcca

SEQ ID NO: 243790 - DNA, 20 bp, synthetic construct
  source 1..20: mol_type = other DNA
tgtggatctagttctcatcc

SEQ ID NO: 243791 - DNA, 20 bp, synthetic construct
  source 1..20: mol_type = other DNA
atgtggatctagttctcatc

SEQ ID NO: 243792 - DNA, 20 bp, synthetic construct
  source 1..20: mol_type = other DNA
catgtggatctagttctcat

SEQ ID NO: 243793 - DNA, 20 bp, synthetic construct
  source 1..20: mol_type = other DNA
acatgtggatctagttctca

SEQ ID NO: 243794 - DNA, 20 bp, synthetic construct
  source 1..20: mol_type = other DNA
tacatgtggatctagttctc

SEQ ID NO: 243795 - DNA, 20 bp, synthetic construct
  source 1..20: mol_type = other DNA
atacatgtggatctagttct

SEQ ID NO: 243796 - DNA, 20 bp, synthetic construct
  source 1..20: mol_type = other DNA
tatacatgtggatctagttc

SEQ ID NO: 243797 - DNA, 20 bp, synthetic construct
  source 1..20: mol_type = other DNA
ttatacatgtggatctagtt

SEQ ID NO: 243798 - DNA, 20 bp, synthetic construct
  source 1..20: mol_type = other DNA
tttatacatgtggatctagt

SEQ ID NO: 243799 - DNA, 20 bp, synthetic construct
  source 1..20: mol_type = other DNA
atttatacatgtggatctag

SEQ ID NO: 243800 - DNA, 20 bp, synthetic construct
  source 1..20: mol_type = other DNA
gatttatacatgtggatcta

SEQ ID NO: 243801 - DNA, 20 bp, synthetic construct
  source 1..20: mol_type = other DNA
ggatttatacatgtggatct

SEQ ID NO: 243802 - DNA, 20 bp, synthetic construct
  source 1..20: mol_type = other DNA
aggatttatacatgtggatc

SEQ ID NO: 243803 - DNA, 20 bp, synthetic construct
  source 1..20: mol_type = other DNA
gaggatttatacatgtggat

SEQ ID NO: 243804 - DNA, 20 bp, synthetic construct
  source 1..20: mol_type = other DNA
tgaggatttatacatgtgga

SEQ ID NO: 243805 - DNA, 20 bp, synthetic construct
  source 1..20: mol_type = other DNA
atgaggatttatacatgtgg

SEQ ID NO: 243806 - DNA, 20 bp, synthetic construct
  source 1..20: mol_type = other DNA
catgaggatttatacatgtg

SEQ ID NO: 243807 - DNA, 20 bp, synthetic construct
  source 1..20: mol_type = other DNA
tcatgaggatttatacatgt

SEQ ID NO: 243808 - DNA, 20 bp, synthetic construct
  source 1..20: mol_type = other DNA
atcatgaggatttatacatg

SEQ ID NO: 243809 - DNA, 20 bp, synthetic construct
  source 1..20: mol_type = other DNA
aatcatgaggatttatacat

SEQ ID NO: 243810 - DNA, 20 bp, synthetic construct
  source 1..20: mol_type = other DNA
aaatcatgaggatttataca

SEQ ID NO: 243811 - DNA, 20 bp, synthetic construct
  source 1..20: mol_type = other DNA
caaatcatgaggatttatac

SEQ ID NO: 243812 - DNA, 20 bp, synthetic construct
  source 1..20: mol_type = other DNA
tcaaatcatgaggatttata

SEQ ID NO: 243813 - DNA, 20 bp, synthetic construct
  source 1..20: mol_type = other DNA
ttcaaatcatgaggatttat

SEQ ID NO: 243814 - DNA, 20 bp, synthetic construct
  source 1..20: mol_type = other DNA
cttcaaatcatgaggattta

SEQ ID NO: 243815 - DNA, 20 bp, synthetic construct
  source 1..20: mol_type = other DNA
ccttcaaatcatgaggattt

SEQ ID NO: 243816 - DNA, 20 bp, synthetic construct
  source 1..20: mol_type = other DNA
accttcaaatcatgaggatt

SEQ ID NO: 243817 - DNA, 20 bp, synthetic construct
  source 1..20: mol_type = other DNA
caccttcaaatcatgaggat

SEQ ID NO: 243818 - DNA, 20 bp, synthetic construct
  source 1..20: mol_type = other DNA
gcaccttcaaatcatgagga

SEQ ID NO: 243819 - DNA, 20 bp, synthetic construct
  source 1..20: mol_type = other DNA
agcaccttcaaatcatgagg

SEQ ID NO: 243820 - DNA, 20 bp, synthetic construct
  source 1..20: mol_type = other DNA
aagcaccttcaaatcatgag

SEQ ID NO: 243821 - DNA, 20 bp, synthetic construct
  source 1..20: mol_type = other DNA
aaagcaccttcaaatcatga

SEQ ID NO: 243822 - DNA, 20 bp, synthetic construct
  source 1..20: mol_type = other DNA
aaaagcaccttcaaatcatg

SEQ ID NO: 243823 - DNA, 20 bp, synthetic construct
  source 1..20: mol_type = other DNA
taaaagcaccttcaaatcat

SEQ ID NO: 243824 - DNA, 20 bp, synthetic construct
  source 1..20: mol_type = other DNA
gtaaaagcaccttcaaatca

SEQ ID NO: 243825 - DNA, 20 bp, synthetic construct
  source 1..20: mol_type = other DNA
ggtaaaagcaccttcaaatc

SEQ ID NO: 243826 - DNA, 20 bp, synthetic construct
  source 1..20: mol_type = other DNA
tggtaaaagcaccttcaaat

SEQ ID NO: 243827 - DNA, 20 bp, synthetic construct
  source 1..20: mol_type = other DNA
ttggtaaaagcaccttcaaa

SEQ ID NO: 243828 - DNA, 20 bp, synthetic construct
  source 1..20: mol_type = other DNA
gttggtaaaagcaccttcaa

SEQ ID NO: 243829 - DNA, 20 bp, synthetic construct
  source 1..20: mol_type = other DNA
tgttggtaaaagcaccttca

SEQ ID NO: 243830 - DNA, 20 bp, synthetic construct
  source 1..20: mol_type = other DNA
atgttggtaaaagcaccttc

SEQ ID NO: 243831 - DNA, 20 bp, synthetic construct
  source 1..20: mol_type = other DNA
aatgttggtaaaagcacctt

SEQ ID NO: 243832 - DNA, 20 bp, synthetic construct
  source 1..20: mol_type = other DNA
gaatgttggtaaaagcacct

SEQ ID NO: 243833 - DNA, 20 bp, synthetic construct
  source 1..20: mol_type = other DNA
tgaatgttggtaaaagcacc

SEQ ID NO: 243834 - DNA, 20 bp, synthetic construct
  source 1..20: mol_type = other DNA
gtgaatgttggtaaaagcac

SEQ ID NO: 243835 - DNA, 20 bp, synthetic construct
  source 1..20: mol_type = other DNA
agtgaatgttggtaaaagca

SEQ ID NO: 243836 - DNA, 20 bp, synthetic construct
  source 1..20: mol_type = other DNA
gagtgaatgttggtaaaagc

SEQ ID NO: 243837 - DNA, 20 bp, synthetic construct
  source 1..20: mol_type = other DNA
tgagtgaatgttggtaaaag

SEQ ID NO: 243838 - DNA, 20 bp, synthetic construct
  source 1..20: mol_type = other DNA
atgagtgaatgttggtaaaa

SEQ ID NO: 243839 - DNA, 20 bp, synthetic construct
  source 1..20: mol_type = other DNA
catgagtgaatgttggtaaa

SEQ ID NO: 243840 - DNA, 20 bp, synthetic construct
  source 1..20: mol_type = other DNA
ccatgagtgaatgttggtaa

SEQ ID NO: 243841 - DNA, 20 bp, synthetic construct
  source 1..20: mol_type = other DNA
cccatgagtgaatgttggta

SEQ ID NO: 243842 - DNA, 20 bp, synthetic construct
  source 1..20: mol_type = other DNA
tcccatgagtgaatgttggt

SEQ ID NO: 243843 - DNA, 20 bp, synthetic construct
  source 1..20: mol_type = other DNA
atcccatgagtgaatgttgg

SEQ ID NO: 243844 - DNA, 20 bp, synthetic construct
  source 1..20: mol_type = other DNA
aatcccatgagtgaatgttg

SEQ ID NO: 243845 - DNA, 20 bp, synthetic construct
  source 1..20: mol_type = other DNA
gaatcccatgagtgaatgtt

SEQ ID NO: 243846 - DNA, 20 bp, synthetic construct
  source 1..20: mol_type = other DNA
agaatcccatgagtgaatgt

SEQ ID NO: 243847 - DNA, 20 bp, synthetic construct
  source 1..20: mol_type = other DNA
gagaatcccatgagtgaatg

SEQ ID NO: 243848 - DNA, 20 bp, synthetic construct
  source 1..20: mol_type = other DNA
ggagaatcccatgagtgaat

SEQ ID NO: 243849 - DNA, 20 bp, synthetic construct
  source 1..20: mol_type = other DNA
gggagaatcccatgagtgaa

SEQ ID NO: 243850 - DNA, 20 bp, synthetic construct
  source 1..20: mol_type = other DNA
tgggagaatcccatgagtga

SEQ ID NO: 243851 - DNA, 20 bp, synthetic construct
  source 1..20: mol_type = other DNA
ctgggagaatcccatgagtg

SEQ ID NO: 243852 - DNA, 20 bp, synthetic construct
  source 1..20: mol_type = other DNA
cctgggagaatcccatgagt

SEQ ID NO: 243853 - DNA, 20 bp, synthetic construct
  source 1..20: mol_type = other DNA
tcctgggagaatcccatgag

SEQ ID NO: 243854 - DNA, 20 bp, synthetic construct
  source 1..20: mol_type = other DNA
ctcctgggagaatcccatga

SEQ ID NO: 243855 - DNA, 20 bp, synthetic construct
  source 1..20: mol_type = other DNA
gctcctgggagaatcccatg

SEQ ID NO: 243856 - DNA, 20 bp, synthetic construct
  source 1..20: mol_type = other DNA
agctcctgggagaatcccat

SEQ ID NO: 243857 - DNA, 20 bp, synthetic construct
  source 1..20: mol_type = other DNA
gagctcctgggagaatccca

SEQ ID NO: 243858 - DNA, 20 bp, synthetic construct
  source 1..20: mol_type = other DNA
agagctcctgggagaatccc

SEQ ID NO: 243859 - DNA, 20 bp, synthetic construct
  source 1..20: mol_type = other DNA
tagagctcctgggagaatcc

SEQ ID NO: 243860 - DNA, 20 bp, synthetic construct
  source 1..20: mol_type = other DNA
ctagagctcctgggagaatc

SEQ ID NO: 243861 - DNA, 20 bp, synthetic construct
  source 1..20: mol_type = other DNA
cctagagctcctgggagaat

SEQ ID NO: 243862 - DNA, 20 bp, synthetic construct
  source 1..20: mol_type = other DNA
tcctagagctcctgggagaa

SEQ ID NO: 243863 - DNA, 20 bp, synthetic construct
  source 1..20: mol_type = other DNA
ctcctagagctcctgggaga

SEQ ID NO: 243864 - DNA, 20 bp, synthetic construct
  source 1..20: mol_type = other DNA
cctcctagagctcctgggag

SEQ ID NO: 243865 - DNA, 20 bp, synthetic construct
  source 1..20: mol_type = other DNA
tcctcctagagctcctggga

SEQ ID NO: 243866 - DNA, 20 bp, synthetic construct
  source 1..20: mol_type = other DNA
ctcctcctagagctcctggg

SEQ ID NO: 243867 - DNA, 20 bp, synthetic construct
  source 1..20: mol_type = other DNA
cctcctcctagagctcctgg

SEQ ID NO: 243868 - DNA, 20 bp, synthetic construct
  source 1..20: mol_type = other DNA
gcctcctcctagagctcctg

SEQ ID NO: 243869 - DNA, 20 bp, synthetic construct
  source 1..20: mol_type = other DNA
tgcctcctcctagagctcct

SEQ ID NO: 243870 - DNA, 20 bp, synthetic construct
  source 1..20: mol_type = other DNA
ctgcctcctcctagagctcc

SEQ ID NO: 243871 - DNA, 20 bp, synthetic construct
  source 1..20: mol_type = other DNA
cctgcctcctcctagagctc

SEQ ID NO: 243872 - DNA, 20 bp, synthetic construct
  source 1..20: mol_type = other DNA
acctgcctcctcctagagct

SEQ ID NO: 243873 - DNA, 20 bp, synthetic construct
  source 1..20: mol_type = other DNA
tacctgcctcctcctagagc

SEQ ID NO: 243874 - DNA, 20 bp, synthetic construct
  source 1..20: mol_type = other DNA
ctacctgcctcctcctagag

SEQ ID NO: 243875 - DNA, 20 bp, synthetic construct
  source 1..20: mol_type = other DNA
tctacctgcctcctcctaga

SEQ ID NO: 243876 - DNA, 20 bp, synthetic construct
  source 1..20: mol_type = other DNA
ctctacctgcctcctcctag

SEQ ID NO: 243877 - DNA, 20 bp, synthetic construct
  source 1..20: mol_type = other DNA
actctacctgcctcctccta

SEQ ID NO: 243878 - DNA, 20 bp, synthetic construct
  source 1..20: mol_type = other DNA
aactctacctgcctcctcct

SEQ ID NO: 243879 - DNA, 20 bp, synthetic construct
  source 1..20: mol_type = other DNA
caactctacctgcctcctcc

SEQ ID NO: 243880 - DNA, 20 bp, synthetic construct
  source 1..20: mol_type = other DNA
tcaactctacctgcctcctc

SEQ ID NO: 243881 - DNA, 20 bp, synthetic construct
  source 1..20: mol_type = other DNA
ctcaactctacctgcctcct

SEQ ID NO: 243882 - DNA, 20 bp, synthetic construct
  source 1..20: mol_type = other DNA
cctcaactctacctgcctcc

SEQ ID NO: 243883 - DNA, 20 bp, synthetic construct
  source 1..20: mol_type = other DNA
acctcaactctacctgcctc

SEQ ID NO: 243884 - DNA, 20 bp, synthetic construct
  source 1..20: mol_type = other DNA
gacctcaactctacctgcct

SEQ ID NO: 243885 - DNA, 20 bp, synthetic construct
  source 1..20: mol_type = other DNA
tgacctcaactctacctgcc

SEQ ID NO: 243886 - DNA, 20 bp, synthetic construct
  source 1..20: mol_type = other DNA
atgacctcaactctacctgc

SEQ ID NO: 243887 - DNA, 20 bp, synthetic construct
  source 1..20: mol_type = other DNA
gatgacctcaactctacctg

SEQ ID NO: 243888 - DNA, 20 bp, synthetic construct
  source 1..20: mol_type = other DNA
agatgacctcaactctacct

SEQ ID NO: 243889 - DNA, 20 bp, synthetic construct
  source 1..20: mol_type = other DNA
gagatgacctcaactctacc

SEQ ID NO: 243890 - DNA, 20 bp, synthetic construct
  source 1..20: mol_type = other DNA
tgagatgacctcaactctac

SEQ ID NO: 243891 - DNA, 20 bp, synthetic construct
  source 1..20: mol_type = other DNA
gtgagatgacctcaactcta

SEQ ID NO: 243892 - DNA, 20 bp, synthetic construct
  source 1..20: mol_type = other DNA
cgtgagatgacctcaactct

SEQ ID NO: 243893 - DNA, 20 bp, synthetic construct
  source 1..20: mol_type = other DNA
gcgtgagatgacctcaactc

SEQ ID NO: 243894 - DNA, 20 bp, synthetic construct
  source 1..20: mol_type = other DNA
tgcgtgagatgacctcaact

SEQ ID NO: 243895 - DNA, 20 bp, synthetic construct
  source 1..20: mol_type = other DNA
atgcgtgagatgacctcaac

SEQ ID NO: 243896 - DNA, 20 bp, synthetic construct
  source 1..20: mol_type = other DNA
aatgcgtgagatgacctcaa

SEQ ID NO: 243897 - DNA, 20 bp, synthetic construct
  source 1..20: mol_type = other DNA
aaatgcgtgagatgacctca

SEQ ID NO: 243898 - DNA, 20 bp, synthetic construct
  source 1..20: mol_type = other DNA
aaaatgcgtgagatgacctc

SEQ ID NO: 243899 - DNA, 20 bp, synthetic construct
  source 1..20: mol_type = other DNA
taaaatgcgtgagatgacct

SEQ ID NO: 243900 - DNA, 20 bp, synthetic construct
  source 1..20: mol_type = other DNA
gtaaaatgcgtgagatgacc

SEQ ID NO: 243901 - DNA, 20 bp, synthetic construct
  source 1..20: mol_type = other DNA
tgtaaaatgcgtgagatgac

SEQ ID NO: 243902 - DNA, 20 bp, synthetic construct
  source 1..20: mol_type = other DNA
ctgtaaaatgcgtgagatga

SEQ ID NO: 243903 - DNA, 20 bp, synthetic construct
  source 1..20: mol_type = other DNA
tctgtaaaatgcgtgagatg

SEQ ID NO: 243904 - DNA, 20 bp, synthetic construct
  source 1..20: mol_type = other DNA
atctgtaaaatgcgtgagat

SEQ ID NO: 243905 - DNA, 20 bp, synthetic construct
  source 1..20: mol_type = other DNA
catctgtaaaatgcgtgaga

SEQ ID NO: 243906 - DNA, 20 bp, synthetic construct
  source 1..20: mol_type = other DNA
tcatctgtaaaatgcgtgag

SEQ ID NO: 243907 - DNA, 20 bp, synthetic construct
  source 1..20: mol_type = other DNA
ctcatctgtaaaatgcgtga

SEQ ID NO: 243908 - DNA, 20 bp, synthetic construct
  source 1..20: mol_type = other DNA
cctcatctgtaaaatgcgtg

SEQ ID NO: 243909 - DNA, 20 bp, synthetic construct
  source 1..20: mol_type = other DNA
tcctcatctgtaaaatgcgt

SEQ ID NO: 243910 - DNA, 20 bp, synthetic construct
  source 1..20: mol_type = other DNA
ttcctcatctgtaaaatgcg

SEQ ID NO: 243911 - DNA, 20 bp, synthetic construct
  source 1..20: mol_type = other DNA
tttcctcatctgtaaaatgc

SEQ ID NO: 243912 - DNA, 20 bp, synthetic construct
  source 1..20: mol_type = other DNA
gtttcctcatctgtaaaatg

SEQ ID NO: 243913 - DNA, 20 bp, synthetic construct
  source 1..20: mol_type = other DNA
cgtttcctcatctgtaaaat

SEQ ID NO: 243914 - DNA, 20 bp, synthetic construct
  source 1..20: mol_type = other DNA
ccgtttcctcatctgtaaaa

SEQ ID NO: 243915 - DNA, 20 bp, synthetic construct
  source 1..20: mol_type = other DNA
tccgtttcctcatctgtaaa

SEQ ID NO: 243916 - DNA, 20 bp, synthetic construct
  source 1..20: mol_type = other DNA
ctccgtttcctcatctgtaa

SEQ ID NO: 243917 - DNA, 20 bp, synthetic construct
  source 1..20: mol_type = other DNA
cctccgtttcctcatctgta

SEQ ID NO: 243918 - DNA, 20 bp, synthetic construct
  source 1..20: mol_type = other DNA
gcctccgtttcctcatctgt

SEQ ID NO: 243919 - DNA, 20 bp, synthetic construct
  source 1..20: mol_type = other DNA
ggcctccgtttcctcatctg

SEQ ID NO: 243920 - DNA, 20 bp, synthetic construct
  source 1..20: mol_type = other DNA
gggcctccgtttcctcatct

SEQ ID NO: 243921 - DNA, 20 bp, synthetic construct
  source 1..20: mol_type = other DNA
agggcctccgtttcctcatc

SEQ ID NO: 243922 - DNA, 20 bp, synthetic construct
  source 1..20: mol_type = other DNA
cagggcctccgtttcctcat

SEQ ID NO: 243923 - DNA, 20 bp, synthetic construct
  source 1..20: mol_type = other DNA
tcagggcctccgtttcctca

SEQ ID NO: 243924 - DNA, 20 bp, synthetic construct
  source 1..20: mol_type = other DNA
ctcagggcctccgtttcctc

SEQ ID NO: 243925 - DNA, 20 bp, synthetic construct
  source 1..20: mol_type = other DNA
tctcagggcctccgtttcct

SEQ ID NO: 243926 - DNA, 20 bp, synthetic construct
  source 1..20: mol_type = other DNA
ctctcagggcctccgtttcc

SEQ ID NO: 243927 - DNA, 20 bp, synthetic construct
  source 1..20: mol_type = other DNA
cctctcagggcctccgtttc

SEQ ID NO: 243928 - DNA, 20 bp, synthetic construct
  source 1..20: mol_type = other DNA
gcctctcagggcctccgttt

SEQ ID NO: 243929 - DNA, 20 bp, synthetic construct
  source 1..20: mol_type = other DNA
tgcctctcagggcctccgtt

SEQ ID NO: 243930 - DNA, 20 bp, synthetic construct
  source 1..20: mol_type = other DNA
ctgcctctcagggcctccgt

SEQ ID NO: 243931 - DNA, 20 bp, synthetic construct
  source 1..20: mol_type = other DNA
cctgcctctcagggcctccg

SEQ ID NO: 243932 - DNA, 20 bp, synthetic construct
  source 1..20: mol_type = other DNA
acctgcctctcagggcctcc

SEQ ID NO: 243933 - DNA, 20 bp, synthetic construct
  source 1..20: mol_type = other DNA
gacctgcctctcagggcctc

SEQ ID NO: 243934 - DNA, 20 bp, synthetic construct
  source 1..20: mol_type = other DNA
ggacctgcctctcagggcct

SEQ ID NO: 243935 - DNA, 20 bp, synthetic construct
  source 1..20: mol_type = other DNA
tggacctgcctctcagggcc

SEQ ID NO: 243936 - DNA, 20 bp, synthetic construct
  source 1..20: mol_type = other DNA
ttggacctgcctctcagggc

SEQ ID NO: 243937 - DNA, 20 bp, synthetic construct
  source 1..20: mol_type = other DNA
cttggacctgcctctcaggg

SEQ ID NO: 243938 - DNA, 20 bp, synthetic construct
  source 1..20: mol_type = other DNA
ccttggacctgcctctcagg

SEQ ID NO: 243939 - DNA, 20 bp, synthetic construct
  source 1..20: mol_type = other DNA
gccttggacctgcctctcag

SEQ ID NO: 243940 - DNA, 20 bp, synthetic construct
  source 1..20: mol_type = other DNA
ggccttggacctgcctctca

SEQ ID NO: 243941 - DNA, 20 bp, synthetic construct
  source 1..20: mol_type = other DNA
tggccttggacctgcctctc

SEQ ID NO: 243942 - DNA, 20 bp, synthetic construct
  source 1..20: mol_type = other DNA
gtggccttggacctgcctct

SEQ ID NO: 243943 - DNA, 20 bp, synthetic construct
  source 1..20: mol_type = other DNA
ggtggccttggacctgcctc

SEQ ID NO: 243944 - DNA, 20 bp, synthetic construct
  source 1..20: mol_type = other DNA
aggtggccttggacctgcct

SEQ ID NO: 243945 - DNA, 20 bp, synthetic construct
  source 1..20: mol_type = other DNA
caggtggccttggacctgcc

SEQ ID NO: 243946 - DNA, 20 bp, synthetic construct
  source 1..20: mol_type = other DNA
tcaggtggccttggacctgc

SEQ ID NO: 243947 - DNA, 20 bp, synthetic construct
  source 1..20: mol_type = other DNA
gtcaggtggccttggacctg

SEQ ID NO: 243948 - DNA, 20 bp, synthetic construct
  source 1..20: mol_type = other DNA
ggtcaggtggccttggacct

SEQ ID NO: 243949 - DNA, 20 bp, synthetic construct
  source 1..20: mol_type = other DNA
tggtcaggtggccttggacc

SEQ ID NO: 243950 - DNA, 20 bp, synthetic construct
  source 1..20: mol_type = other DNA
ctggtcaggtggccttggac

SEQ ID NO: 243951 - DNA, 20 bp, synthetic construct
  source 1..20: mol_type = other DNA
tctggtcaggtggccttgga

SEQ ID NO: 243952 - DNA, 20 bp, synthetic construct
  source 1..20: mol_type = other DNA
ttctggtcaggtggccttgg

SEQ ID NO: 243953 - DNA, 20 bp, synthetic construct
  source 1..20: mol_type = other DNA
tttctggtcaggtggccttg

SEQ ID NO: 243954 - DNA, 20 bp, synthetic construct
  source 1..20: mol_type = other DNA
ctttctggtcaggtggcctt

SEQ ID NO: 243955 - DNA, 20 bp, synthetic construct
  source 1..20: mol_type = other DNA
tctttctggtcaggtggcct

SEQ ID NO: 243956 - DNA, 20 bp, synthetic construct
  source 1..20: mol_type = other DNA
ttctttctggtcaggtggcc

SEQ ID NO: 243957 - DNA, 20 bp, synthetic construct
  source 1..20: mol_type = other DNA
cttctttctggtcaggtggc

SEQ ID NO: 243958 - DNA, 20 bp, synthetic construct
  source 1..20: mol_type = other DNA
acttctttctggtcaggtgg

SEQ ID NO: 243959 - DNA, 20 bp, synthetic construct
  source 1..20: mol_type = other DNA
cacttctttctggtcaggtg

SEQ ID NO: 243960 - DNA, 20 bp, synthetic construct
  source 1..20: mol_type = other DNA
ccacttctttctggtcaggt

SEQ ID NO: 243961 - DNA, 20 bp, synthetic construct
  source 1..20: mol_type = other DNA
tccacttctttctggtcagg

SEQ ID NO: 243962 - DNA, 20 bp, synthetic construct
  source 1..20: mol_type = other DNA
ttccacttctttctggtcag

SEQ ID NO: 243963 - DNA, 20 bp, synthetic construct
  source 1..20: mol_type = other DNA
gttccacttctttctggtca

SEQ ID NO: 243964 - DNA, 20 bp, synthetic construct
  source 1..20: mol_type = other DNA
agttccacttctttctggtc

SEQ ID NO: 243965 - DNA, 20 bp, synthetic construct
  source 1..20: mol_type = other DNA
cagttccacttctttctggt

SEQ ID NO: 243966 - DNA, 20 bp, synthetic construct
  source 1..20: mol_type = other DNA
ccagttccacttctttctgg

SEQ ID NO: 243967 - DNA, 20 bp, synthetic construct
  source 1..20: mol_type = other DNA
cccagttccacttctttctg

SEQ ID NO: 243968 - DNA, 20 bp, synthetic construct
  source 1..20: mol_type = other DNA
tcccagttccacttctttct

SEQ ID NO: 243969 - DNA, 20 bp, synthetic construct
  source 1..20: mol_type = other DNA
gtcccagttccacttctttc

SEQ ID NO: 243970 - DNA, 20 bp, synthetic construct
  source 1..20: mol_type = other DNA
agtcccagttccacttcttt

SEQ ID NO: 243971 - DNA, 20 bp, synthetic construct
  source 1..20: mol_type = other DNA
aagtcccagttccacttctt

SEQ ID NO: 243972 - DNA, 20 bp, synthetic construct
  source 1..20: mol_type = other DNA
caagtcccagttccacttct

SEQ ID NO: 243973 - DNA, 20 bp, synthetic construct
  source 1..20: mol_type = other DNA
tcaagtcccagttccacttc

SEQ ID NO: 243974 - DNA, 20 bp, synthetic construct
  source 1..20: mol_type = other DNA
ttcaagtcccagttccactt

SEQ ID NO: 243975 - DNA, 20 bp, synthetic construct
  source 1..20: mol_type = other DNA
gttcaagtcccagttccact

SEQ ID NO: 243976 - DNA, 20 bp, synthetic construct
  source 1..20: mol_type = other DNA
ggttcaagtcccagttccac

SEQ ID NO: 243977 - DNA, 20 bp, synthetic construct
  source 1..20: mol_type = other DNA
gggttcaagtcccagttcca

SEQ ID NO: 243978 - DNA, 20 bp, synthetic construct
  source 1..20: mol_type = other DNA
tgggttcaagtcccagttcc

SEQ ID NO: 243979 - DNA, 20 bp, synthetic construct
  source 1..20: mol_type = other DNA
ctgggttcaagtcccagttc

SEQ ID NO: 243980 - DNA, 20 bp, synthetic construct
  source 1..20: mol_type = other DNA
gctgggttcaagtcccagtt

SEQ ID NO: 243981 - DNA, 20 bp, synthetic construct
  source 1..20: mol_type = other DNA
ggctgggttcaagtcccagt

SEQ ID NO: 243982 - DNA, 20 bp, synthetic construct
  source 1..20: mol_type = other DNA
tggctgggttcaagtcccag

SEQ ID NO: 243983 - DNA, 20 bp, synthetic construct
  source 1..20: mol_type = other DNA
atggctgggttcaagtccca

SEQ ID NO: 243984 - DNA, 20 bp, synthetic construct
  source 1..20: mol_type = other DNA
gatggctgggttcaagtccc

SEQ ID NO: 243985 - DNA, 20 bp, synthetic construct
  source 1..20: mol_type = other DNA
agatggctgggttcaagtcc

SEQ ID NO: 243986 - DNA, 20 bp, synthetic construct
  source 1..20: mol_type = other DNA
aagatggctgggttcaagtc

SEQ ID NO: 243987 - DNA, 20 bp, synthetic construct
  source 1..20: mol_type = other DNA
caagatggctgggttcaagt

SEQ ID NO: 243988 - DNA, 20 bp, synthetic construct
  source 1..20: mol_type = other DNA
gcaagatggctgggttcaag

SEQ ID NO: 243989 - DNA, 20 bp, synthetic construct
  source 1..20: mol_type = other DNA
ggcaagatggctgggttcaa

SEQ ID NO: 243990 - DNA, 20 bp, synthetic construct
  source 1..20: mol_type = other DNA
gggcaagatggctgggttca

SEQ ID NO: 243991 - DNA, 20 bp, synthetic construct
  source 1..20: mol_type = other DNA
ggggcaagatggctgggttc

SEQ ID NO: 243992 - DNA, 20 bp, synthetic construct
  source 1..20: mol_type = other DNA
aggggcaagatggctgggtt

SEQ ID NO: 243993 - DNA, 20 bp, synthetic construct
  source 1..20: mol_type = other DNA
aaggggcaagatggctgggt

SEQ ID NO: 243994 - DNA, 20 bp, synthetic construct
  source 1..20: mol_type = other DNA
caaggggcaagatggctggg

SEQ ID NO: 243995 - DNA, 20 bp, synthetic construct
  source 1..20: mol_type = other DNA
ccaaggggcaagatggctgg

SEQ ID NO: 243996 - DNA, 20 bp, synthetic construct
  source 1..20: mol_type = other DNA
accaaggggcaagatggctg

SEQ ID NO: 243997 - DNA, 20 bp, synthetic construct
  source 1..20: mol_type = other DNA
gaccaaggggcaagatggct

SEQ ID NO: 243998 - DNA, 20 bp, synthetic construct
  source 1..20: mol_type = other DNA
ggaccaaggggcaagatggc

SEQ ID NO: 243999 - DNA, 20 bp, synthetic construct
  source 1..20: mol_type = other DNA
gggaccaaggggcaagatgg

SEQ ID NO: 244000 - DNA, 20 bp, synthetic construct
  source 1..20: mol_type = other DNA
tgggaccaaggggcaagatg

SEQ ID NO: 244001 - DNA, 20 bp, synthetic construct
  source 1..20: mol_type = other DNA
atgggaccaaggggcaagat

SEQ ID NO: 244002 - DNA, 20 bp, synthetic construct
  source 1..20: mol_type = other DNA
catgggaccaaggggcaaga

SEQ ID NO: 244003 - DNA, 20 bp, synthetic construct
  source 1..20: mol_type = other DNA
gcatgggaccaaggggcaag

SEQ ID NO: 244004 - DNA, 20 bp, synthetic construct
  source 1..20: mol_type = other DNA
agcatgggaccaaggggcaa

SEQ ID NO: 244005 - DNA, 20 bp, synthetic construct
  source 1..20: mol_type = other DNA
gagcatgggaccaaggggca

SEQ ID NO: 244006 - DNA, 20 bp, synthetic construct
  source 1..20: mol_type = other DNA
agagcatgggaccaaggggc

SEQ ID NO: 244007 - DNA, 20 bp, synthetic construct
  source 1..20: mol_type = other DNA
gagagcatgggaccaagggg

SEQ ID NO: 244008 - DNA, 20 bp, synthetic construct
  source 1..20: mol_type = other DNA
agagagcatgggaccaaggg

SEQ ID NO: 244009 - DNA, 20 bp, synthetic construct
  source 1..20: mol_type = other DNA
tagagagcatgggaccaagg

SEQ ID NO: 244010 - DNA, 20 bp, synthetic construct
  source 1..20: mol_type = other DNA
ctagagagcatgggaccaag

SEQ ID NO: 244011 - DNA, 20 bp, synthetic construct
  source 1..20: mol_type = other DNA
gctagagagcatgggaccaa

SEQ ID NO: 244012 - DNA, 20 bp, synthetic construct
  source 1..20: mol_type = other DNA
ggctagagagcatgggacca

SEQ ID NO: 244013 - DNA, 20 bp, synthetic construct
  source 1..20: mol_type = other DNA
aggctagagagcatgggacc

SEQ ID NO: 244014 - DNA, 20 bp, synthetic construct
  source 1..20: mol_type = other DNA
caggctagagagcatgggac

SEQ ID NO: 244015 - DNA, 20 bp, synthetic construct
  source 1..20: mol_type = other DNA
acaggctagagagcatggga

SEQ ID NO: 244016 - DNA, 20 bp, synthetic construct
  source 1..20: mol_type = other DNA
tacaggctagagagcatggg

SEQ ID NO: 244017 - DNA, 20 bp, synthetic construct
  source 1..20: mol_type = other DNA
ttacaggctagagagcatgg

SEQ ID NO: 244018 - DNA, 20 bp, synthetic construct
  source 1..20: mol_type = other DNA
gttacaggctagagagcatg

SEQ ID NO: 244019 - DNA, 20 bp, synthetic construct
  source 1..20: mol_type = other DNA
agttacaggctagagagcat

SEQ ID NO: 244020 - DNA, 20 bp, synthetic construct
  source 1..20: mol_type = other DNA
gagttacaggctagagagca

SEQ ID NO: 244021 - DNA, 20 bp, synthetic construct
  source 1..20: mol_type = other DNA
ggagttacaggctagagagc

SEQ ID NO: 244022 - DNA, 20 bp, synthetic construct
  source 1..20: mol_type = other DNA
aggagttacaggctagagag

SEQ ID NO: 244023 - DNA, 20 bp, synthetic construct
  source 1..20: mol_type = other DNA
caggagttacaggctagaga

SEQ ID NO: 244024 - DNA, 20 bp, synthetic construct
  source 1..20: mol_type = other DNA
gcaggagttacaggctagag

SEQ ID NO: 244025 - DNA, 20 bp, synthetic construct
  source 1..20: mol_type = other DNA
agcaggagttacaggctaga

SEQ ID NO: 244026 - DNA, 20 bp, synthetic construct
  source 1..20: mol_type = other DNA
aagcaggagttacaggctag

SEQ ID NO: 244027 - DNA, 20 bp, synthetic construct
  source 1..20: mol_type = other DNA
gaagcaggagttacaggcta

SEQ ID NO: 244028 - DNA, 20 bp, synthetic construct
  source 1..20: mol_type = other DNA
ggaagcaggagttacaggct

SEQ ID NO: 244029 - DNA, 20 bp, synthetic construct
  source 1..20: mol_type = other DNA
aggaagcaggagttacaggc

SEQ ID NO: 244030 - DNA, 20 bp, synthetic construct
  source 1..20: mol_type = other DNA
caggaagcaggagttacagg

SEQ ID NO: 244031 - DNA, 20 bp, synthetic construct
  source 1..20: mol_type = other DNA
ccaggaagcaggagttacag

SEQ ID NO: 244032 - DNA, 20 bp, synthetic construct
  source 1..20: mol_type = other DNA
accaggaagcaggagttaca

SEQ ID NO: 244033 - DNA, 20 bp, synthetic construct
  source 1..20: mol_type = other DNA
caccaggaagcaggagttac

SEQ ID NO: 244034 - DNA, 20 bp, synthetic construct
  source 1..20: mol_type = other DNA
ccaccaggaagcaggagtta

SEQ ID NO: 244035 - DNA, 20 bp, synthetic construct
  source 1..20: mol_type = other DNA
cccaccaggaagcaggagtt

SEQ ID NO: 244036 - DNA, 20 bp, synthetic construct
  source 1..20: mol_type = other DNA
ccccaccaggaagcaggagt

SEQ ID NO: 244037 - DNA, 20 bp, synthetic construct
  source 1..20: mol_type = other DNA
gccccaccaggaagcaggag

SEQ ID NO: 244038 - DNA, 20 bp, synthetic construct
  source 1..20: mol_type = other DNA
tgccccaccaggaagcagga

SEQ ID NO: 244039 - DNA, 20 bp, synthetic construct
  source 1..20: mol_type = other DNA
atgccccaccaggaagcagg

SEQ ID NO: 244040 - DNA, 20 bp, synthetic construct
  source 1..20: mol_type = other DNA
gatgccccaccaggaagcag

SEQ ID NO: 244041 - DNA, 20 bp, synthetic construct
  source 1..20: mol_type = other DNA
agatgccccaccaggaagca

SEQ ID NO: 244042 - DNA, 20 bp, synthetic construct
  source 1..20: mol_type = other DNA
gagatgccccaccaggaagc

SEQ ID NO: 244043 - DNA, 20 bp, synthetic construct
  source 1..20: mol_type = other DNA
ggagatgccccaccaggaag

SEQ ID NO: 244044 - DNA, 20 bp, synthetic construct
  source 1..20: mol_type = other DNA
tggagatgccccaccaggaa

SEQ ID NO: 244045 - DNA, 20 bp, synthetic construct
  source 1..20: mol_type = other DNA
ctggagatgccccaccagga

SEQ ID NO: 244046 - DNA, 20 bp, synthetic construct
  source 1..20: mol_type = other DNA
cctggagatgccccaccagg

SEQ ID NO: 244047 - DNA, 20 bp, synthetic construct
  source 1..20: mol_type = other DNA
tcctggagatgccccaccag

SEQ ID NO: 244048 - DNA, 20 bp, synthetic construct
  source 1..20: mol_type = other DNA
ctcctggagatgccccacca

SEQ ID NO: 244049 - DNA, 20 bp, synthetic construct
  source 1..20: mol_type = other DNA
cctcctggagatgccccacc

SEQ ID NO: 244050 - DNA, 20 bp, synthetic construct
  source 1..20: mol_type = other DNA
tcctcctggagatgccccac

SEQ ID NO: 244051 - DNA, 20 bp, synthetic construct
  source 1..20: mol_type = other DNA
gtcctcctggagatgcccca

SEQ ID NO: 244052 - DNA, 20 bp, synthetic construct
  source 1..20: mol_type = other DNA
ggtcctcctggagatgcccc

SEQ ID NO: 244053 - DNA, 20 bp, synthetic construct
  source 1..20: mol_type = other DNA
gggtcctcctggagatgccc

SEQ ID NO: 244054 - DNA, 20 bp, synthetic construct
  source 1..20: mol_type = other DNA
agggtcctcctggagatgcc

SEQ ID NO: 244055 - DNA, 20 bp, synthetic construct
  source 1..20: mol_type = other DNA
tagggtcctcctggagatgc

SEQ ID NO: 244056 - DNA, 20 bp, synthetic construct
  source 1..20: mol_type = other DNA
atagggtcctcctggagatg

SEQ ID NO: 244057 - DNA, 20 bp, synthetic construct
  source 1..20: mol_type = other DNA
gatagggtcctcctggagat

SEQ ID NO: 244058 - DNA, 20 bp, synthetic construct
  source 1..20: mol_type = other DNA
cgatagggtcctcctggaga

SEQ ID NO: 244059 - DNA, 20 bp, synthetic construct
  source 1..20: mol_type = other DNA
ccgatagggtcctcctggag

SEQ ID NO: 244060 - DNA, 20 bp, synthetic construct
  source 1..20: mol_type = other DNA
gccgatagggtcctcctgga

SEQ ID NO: 244061 - DNA, 20 bp, synthetic construct
  source 1..20: mol_type = other DNA
agccgatagggtcctcctgg

SEQ ID NO: 244062 - DNA, 20 bp, synthetic construct
  source 1..20: mol_type = other DNA
cagccgatagggtcctcctg

SEQ ID NO: 244063 - DNA, 20 bp, synthetic construct
  source 1..20: mol_type = other DNA
ccagccgatagggtcctcct

SEQ ID NO: 244064 - DNA, 20 bp, synthetic construct
  source 1..20: mol_type = other DNA
gccagccgatagggtcctcc

SEQ ID NO: 244065 - DNA, 20 bp, synthetic construct
  source 1..20: mol_type = other DNA
ggccagccgatagggtcctc

SEQ ID NO: 244066 - DNA, 20 bp, synthetic construct
  source 1..20: mol_type = other DNA
tggccagccgatagggtcct

SEQ ID NO: 244067 - DNA, 20 bp, synthetic construct
  source 1..20: mol_type = other DNA
atggccagccgatagggtcc

SEQ ID NO: 244068 - DNA, 20 bp, synthetic construct
  source 1..20: mol_type = other DNA
catggccagccgatagggtc

SEQ ID NO: 244069 - DNA, 20 bp, synthetic construct
  source 1..20: mol_type = other DNA
ccatggccagccgatagggt

SEQ ID NO: 244070 - DNA, 20 bp, synthetic construct
  source 1..20: mol_type = other DNA
cccatggccagccgataggg

SEQ ID NO: 244071 - DNA, 20 bp, synthetic construct
  source 1..20: mol_type = other DNA
gcccatggccagccgatagg

SEQ ID NO: 244072 - DNA, 20 bp, synthetic construct
  source 1..20: mol_type = other DNA
ggcccatggccagccgatag

SEQ ID NO: 244073 - DNA, 20 bp, synthetic construct
  source 1..20: mol_type = other DNA
aggcccatggccagccgata

SEQ ID NO: 244074 - DNA, 20 bp, synthetic construct
  source 1..20: mol_type = other DNA
caggcccatggccagccgat

SEQ ID NO: 244075 - DNA, 20 bp, synthetic construct
  source 1..20: mol_type = other DNA
gcaggcccatggccagccga

SEQ ID NO: 244076 - DNA, 20 bp, synthetic construct
  source 1..20: mol_type = other DNA
ggcaggcccatggccagccg

SEQ ID NO: 244077 - DNA, 20 bp, synthetic construct
  source 1..20: mol_type = other DNA
gggcaggcccatggccagcc

SEQ ID NO: 244078 - DNA, 20 bp, synthetic construct
  source 1..20: mol_type = other DNA
agggcaggcccatggccagc

SEQ ID NO: 244079 - DNA, 20 bp, synthetic construct
  source 1..20: mol_type = other DNA
cagggcaggcccatggccag

SEQ ID NO: 244080 - DNA, 20 bp, synthetic construct
  source 1..20: mol_type = other DNA
ccagggcaggcccatggcca

SEQ ID NO: 244081 - DNA, 20 bp, synthetic construct
  source 1..20: mol_type = other DNA
tccagggcaggcccatggcc

SEQ ID NO: 244082 - DNA, 20 bp, synthetic construct
  source 1..20: mol_type = other DNA
ctccagggcaggcccatggc

SEQ ID NO: 244083 - DNA, 20 bp, synthetic construct
  source 1..20: mol_type = other DNA
actccagggcaggcccatgg

SEQ ID NO: 244084 - DNA, 20 bp, synthetic construct
  source 1..20: mol_type = other DNA
gactccagggcaggcccatg

SEQ ID NO: 244085 - DNA, 20 bp, synthetic construct
  source 1..20: mol_type = other DNA
agactccagggcaggcccat

SEQ ID NO: 244086 - DNA, 20 bp, synthetic construct
  source 1..20: mol_type = other DNA
aagactccagggcaggccca

SEQ ID NO: 244087 - DNA, 20 bp, synthetic construct
  source 1..20: mol_type = other DNA
aaagactccagggcaggccc

SEQ ID NO: 244088 - DNA, 20 bp, synthetic construct
  source 1..20: mol_type = other DNA
aaaagactccagggcaggcc

SEQ ID NO: 244089 - DNA, 20 bp, synthetic construct
  source 1..20: mol_type = other DNA
caaaagactccagggcaggc

SEQ ID NO: 244090 - DNA, 20 bp, synthetic construct
  source 1..20: mol_type = other DNA
gcaaaagactccagggcagg

SEQ ID NO: 244091 - DNA, 20 bp, synthetic construct
  source 1..20: mol_type = other DNA
agcaaaagactccagggcag

SEQ ID NO: 244092 - DNA, 20 bp, synthetic construct
  source 1..20: mol_type = other DNA
gagcaaaagactccagggca

SEQ ID NO: 244093 - DNA, 20 bp, synthetic construct
  source 1..20: mol_type = other DNA
agagcaaaagactccagggc

SEQ ID NO: 244094 - DNA, 20 bp, synthetic construct
  source 1..20: mol_type = other DNA
cagagcaaaagactccaggg

SEQ ID NO: 244095 - DNA, 20 bp, synthetic construct
  source 1..20: mol_type = other DNA
acagagcaaaagactccagg

SEQ ID NO: 244096 - DNA, 20 bp, synthetic construct
  source 1..20: mol_type = other DNA
cacagagcaaaagactccag

SEQ ID NO: 244097 - DNA, 20 bp, synthetic construct
  source 1..20: mol_type = other DNA
acacagagcaaaagactcca

SEQ ID NO: 244098 - DNA, 20 bp, synthetic construct
  source 1..20: mol_type = other DNA
cacacagagcaaaagactcc

SEQ ID NO: 244099 - DNA, 20 bp, synthetic construct
  source 1..20: mol_type = other DNA
ccacacagagcaaaagactc

SEQ ID NO: 244100 - DNA, 20 bp, synthetic construct
  source 1..20: mol_type = other DNA
gccacacagagcaaaagact

SEQ ID NO: 244101 - DNA, 20 bp, synthetic construct
  source 1..20: mol_type = other DNA
ggccacacagagcaaaagac

SEQ ID NO: 244102 - DNA, 20 bp, synthetic construct
  source 1..20: mol_type = other DNA
tggccacacagagcaaaaga

SEQ ID NO: 244103 - DNA, 20 bp, synthetic construct
  source 1..20: mol_type = other DNA
atggccacacagagcaaaag

SEQ ID NO: 244104 - DNA, 20 bp, synthetic construct
  source 1..20: mol_type = other DNA
gatggccacacagagcaaaa

SEQ ID NO: 244105 - DNA, 20 bp, synthetic construct
  source 1..20: mol_type = other DNA
ggatggccacacagagcaaa

SEQ ID NO: 244106 - DNA, 20 bp, synthetic construct
  source 1..20: mol_type = other DNA
aggatggccacacagagcaa

SEQ ID NO: 244107 - DNA, 20 bp, synthetic construct
  source 1..20: mol_type = other DNA
aaggatggccacacagagca

SEQ ID NO: 244108 - DNA, 20 bp, synthetic construct
  source 1..20: mol_type = other DNA
gaaggatggccacacagagc

SEQ ID NO: 244109 - DNA, 20 bp, synthetic construct
  source 1..20: mol_type = other DNA
ggaaggatggccacacagag

SEQ ID NO: 244110 - DNA, 20 bp, synthetic construct
  source 1..20: mol_type = other DNA
aggaaggatggccacacaga

SEQ ID NO: 244111 - DNA, 20 bp, synthetic construct
  source 1..20: mol_type = other DNA
gaggaaggatggccacacag

SEQ ID NO: 244112 - DNA, 20 bp, synthetic construct
  source 1..20: mol_type = other DNA
ggaggaaggatggccacaca

SEQ ID NO: 244113 - DNA, 20 bp, synthetic construct
  source 1..20: mol_type = other DNA
gggaggaaggatggccacac

SEQ ID NO: 244114 - DNA, 20 bp, synthetic construct
  source 1..20: mol_type = other DNA
agggaggaaggatggccaca

SEQ ID NO: 244115 - DNA, 20 bp, synthetic construct
  source 1..20: mol_type = other DNA
gagggaggaaggatggccac

SEQ ID NO: 244116 - DNA, 20 bp, synthetic construct
  source 1..20: mol_type = other DNA
tgagggaggaaggatggcca

SEQ ID NO: 244117 - DNA, 20 bp, synthetic construct
  source 1..20: mol_type = other DNA
ctgagggaggaaggatggcc

SEQ ID NO: 244118 - DNA, 20 bp, synthetic construct
  source 1..20: mol_type = other DNA
cctgagggaggaaggatggc

SEQ ID NO: 244119 - DNA, 20 bp, synthetic construct
  source 1..20: mol_type = other DNA
tcctgagggaggaaggatgg

SEQ ID NO: 244120 - DNA, 20 bp, synthetic construct
  source 1..20: mol_type = other DNA
ctcctgagggaggaaggatg

SEQ ID NO: 244121 - DNA, 20 bp, synthetic construct
  source 1..20: mol_type = other DNA
tctcctgagggaggaaggat

SEQ ID NO: 244122 - DNA, 20 bp, synthetic construct
  source 1..20: mol_type = other DNA
ctctcctgagggaggaagga

SEQ ID NO: 244123 - DNA, 20 bp, synthetic construct
  source 1..20: mol_type = other DNA
actctcctgagggaggaagg

SEQ ID NO: 244124 - DNA, 20 bp, synthetic construct
  source 1..20: mol_type = other DNA
cactctcctgagggaggaag

SEQ ID NO: 244125 - DNA, 20 bp, synthetic construct
  source 1..20: mol_type = other DNA
acactctcctgagggaggaa

SEQ ID NO: 244126 - DNA, 20 bp, synthetic construct
  source 1..20: mol_type = other DNA
cacactctcctgagggagga

SEQ ID NO: 244127 - DNA, 20 bp, synthetic construct
  source 1..20: mol_type = other DNA
acacactctcctgagggagg

SEQ ID NO: 244128 - DNA, 20 bp, synthetic construct
  source 1..20: mol_type = other DNA
cacacactctcctgagggag

SEQ ID NO: 244129 - DNA, 20 bp, synthetic construct
  source 1..20: mol_type = other DNA
gcacacactctcctgaggga

SEQ ID NO: 244130 - DNA, 20 bp, synthetic construct
  source 1..20: mol_type = other DNA
agcacacactctcctgaggg

SEQ ID NO: 244131 - DNA, 20 bp, synthetic construct
  source 1..20: mol_type = other DNA
gagcacacactctcctgagg

SEQ ID NO: 244132 - DNA, 20 bp, synthetic construct
  source 1..20: mol_type = other DNA
ggagcacacactctcctgag

SEQ ID NO: 244133 - DNA, 20 bp, synthetic construct
  source 1..20: mol_type = other DNA
gggagcacacactctcctga

SEQ ID NO: 244134 - DNA, 20 bp, synthetic construct
  source 1..20: mol_type = other DNA
tgggagcacacactctcctg

SEQ ID NO: 244135 - DNA, 20 bp, synthetic construct
  source 1..20: mol_type = other DNA
ctgggagcacacactctcct

SEQ ID NO: 244136 - DNA, 20 bp, synthetic construct
  source 1..20: mol_type = other DNA
tctgggagcacacactctcc

SEQ ID NO: 244137 - DNA, 20 bp, synthetic construct
  source 1..20: mol_type = other DNA
ctctgggagcacacactctc

SEQ ID NO: 244138 - DNA, 20 bp, synthetic construct
  source 1..20: mol_type = other DNA
gctctgggagcacacactct

SEQ ID NO: 244139 - DNA, 20 bp, synthetic construct
  source 1..20: mol_type = other DNA
tgctctgggagcacacactc

SEQ ID NO: 244140 - DNA, 20 bp, synthetic construct
  source 1..20: mol_type = other DNA
gtgctctgggagcacacact

SEQ ID NO: 244141 - DNA, 20 bp, synthetic construct
  source 1..20: mol_type = other DNA
tgtgctctgggagcacacac

SEQ ID NO: 244142 - DNA, 20 bp, synthetic construct
  source 1..20: mol_type = other DNA
ctgtgctctgggagcacaca

SEQ ID NO: 244143 - DNA, 20 bp, synthetic construct
  source 1..20: mol_type = other DNA
cctgtgctctgggagcacac

SEQ ID NO: 244144 - DNA, 20 bp, synthetic construct
  source 1..20: mol_type = other DNA
gcctgtgctctgggagcaca

SEQ ID NO: 244145 - DNA, 20 bp, synthetic construct
  source 1..20: mol_type = other DNA
agcctgtgctctgggagcac

SEQ ID NO: 244146 - DNA, 20 bp, synthetic construct
  source 1..20: mol_type = other DNA
cagcctgtgctctgggagca

SEQ ID NO: 244147 - DNA, 20 bp, synthetic construct
  source 1..20: mol_type = other DNA
acagcctgtgctctgggagc

SEQ ID NO: 244148 - DNA, 20 bp, synthetic construct
  source 1..20: mol_type = other DNA
tacagcctgtgctctgggag

SEQ ID NO: 244149 - DNA, 20 bp, synthetic construct
  source 1..20: mol_type = other DNA
atacagcctgtgctctggga

SEQ ID NO: 244150 - DNA, 20 bp, synthetic construct
  source 1..20: mol_type = other DNA
gatacagcctgtgctctggg

SEQ ID NO: 244151 - DNA, 20 bp, synthetic construct
  source 1..20: mol_type = other DNA
agatacagcctgtgctctgg

SEQ ID NO: 244152 - DNA, 20 bp, synthetic construct
  source 1..20: mol_type = other DNA
aagatacagcctgtgctctg

SEQ ID NO: 244153 - DNA, 20 bp, synthetic construct
  source 1..20: mol_type = other DNA
gaagatacagcctgtgctct

SEQ ID NO: 244154 - DNA, 20 bp, synthetic construct
  source 1..20: mol_type = other DNA
agaagatacagcctgtgctc

SEQ ID NO: 244155 - DNA, 20 bp, synthetic construct
  source 1..20: mol_type = other DNA
cagaagatacagcctgtgct

SEQ ID NO: 244156 - DNA, 20 bp, synthetic construct
  source 1..20: mol_type = other DNA
tcagaagatacagcctgtgc

SEQ ID NO: 244157 - DNA, 20 bp, synthetic construct
  source 1..20: mol_type = other DNA
ctcagaagatacagcctgtg

SEQ ID NO: 244158 - DNA, 20 bp, synthetic construct
  source 1..20: mol_type = other DNA
gctcagaagatacagcctgt

SEQ ID NO: 244159 - DNA, 20 bp, synthetic construct
  source 1..20: mol_type = other DNA
tgctcagaagatacagcctg

SEQ ID NO: 244160 - DNA, 20 bp, synthetic construct
  source 1..20: mol_type = other DNA
atgctcagaagatacagcct

SEQ ID NO: 244161 - DNA, 20 bp, synthetic construct
  source 1..20: mol_type = other DNA
aatgctcagaagatacagcc

SEQ ID NO: 244162 - DNA, 20 bp, synthetic construct
  source 1..20: mol_type = other DNA
aaatgctcagaagatacagc

SEQ ID NO: 244163 - DNA, 20 bp, synthetic construct
  source 1..20: mol_type = other DNA
aaaatgctcagaagatacag

SEQ ID NO: 244164 - DNA, 20 bp, synthetic construct
  source 1..20: mol_type = other DNA
caaaatgctcagaagataca

SEQ ID NO: 244165 - DNA, 20 bp, synthetic construct
  source 1..20: mol_type = other DNA
acaaaatgctcagaagatac

SEQ ID NO: 244166 - DNA, 20 bp, synthetic construct
  source 1..20: mol_type = other DNA
gacaaaatgctcagaagata

SEQ ID NO: 244167 - DNA, 20 bp, synthetic construct
  source 1..20: mol_type = other DNA
ggacaaaatgctcagaagat

SEQ ID NO: 244168 - DNA, 20 bp, synthetic construct
  source 1..20: mol_type = other DNA
gggacaaaatgctcagaaga

SEQ ID NO: 244169 - DNA, 20 bp, synthetic construct
  source 1..20: mol_type = other DNA
agggacaaaatgctcagaag

SEQ ID NO: 244170 - DNA, 20 bp, synthetic construct
  source 1..20: mol_type = other DNA
aagggacaaaatgctcagaa

SEQ ID NO: 244171 - DNA, 20 bp, synthetic construct
  source 1..20: mol_type = other DNA
gaagggacaaaatgctcaga

SEQ ID NO: 244172 - DNA, 20 bp, synthetic construct
  source 1..20: mol_type = other DNA
ggaagggacaaaatgctcag

SEQ ID NO: 244173 - DNA, 20 bp, synthetic construct
  source 1..20: mol_type = other DNA
gggaagggacaaaatgctca

SEQ ID NO: 244174 - DNA, 20 bp, synthetic construct
  source 1..20: mol_type = other DNA
tgggaagggacaaaatgctc

SEQ ID NO: 244175 - DNA, 20 bp, synthetic construct
  source 1..20: mol_type = other DNA
ctgggaagggacaaaatgct

SEQ ID NO: 244176 - DNA, 20 bp, synthetic construct
  source 1..20: mol_type = other DNA
actgggaagggacaaaatgc

SEQ ID NO: 244177 - DNA, 20 bp, synthetic construct
  source 1..20: mol_type = other DNA
tactgggaagggacaaaatg

SEQ ID NO: 244178 - DNA, 20 bp, synthetic construct
  source 1..20: mol_type = other DNA
gtactgggaagggacaaaat

SEQ ID NO: 244179 - DNA, 20 bp, synthetic construct
  source 1..20: mol_type = other DNA
ggtactgggaagggacaaaa

SEQ ID NO: 244180 - DNA, 20 bp, synthetic construct
  source 1..20: mol_type = other DNA
aggtactgggaagggacaaa

SEQ ID NO: 244181 - DNA, 20 bp, synthetic construct
  source 1..20: mol_type = other DNA
taggtactgggaagggacaa

SEQ ID NO: 244182 - DNA, 20 bp, synthetic construct
  source 1..20: mol_type = other DNA
ctaggtactgggaagggaca

SEQ ID NO: 244183 - DNA, 20 bp, synthetic construct
  source 1..20: mol_type = other DNA
gctaggtactgggaagggac

SEQ ID NO: 244184 - DNA, 20 bp, synthetic construct
  source 1..20: mol_type = other DNA
tgctaggtactgggaaggga

SEQ ID NO: 244185 - DNA, 20 bp, synthetic construct
  source 1..20: mol_type = other DNA
gtgctaggtactgggaaggg

SEQ ID NO: 244186 - DNA, 20 bp, synthetic construct
  source 1..20: mol_type = other DNA
agtgctaggtactgggaagg

SEQ ID NO: 244187 - DNA, 20 bp, synthetic construct
  source 1..20: mol_type = other DNA
gagtgctaggtactgggaag

SEQ ID NO: 244188 - DNA, 20 bp, synthetic construct
  source 1..20: mol_type = other DNA
tgagtgctaggtactgggaa

SEQ ID NO: 244189 - DNA, 20 bp, synthetic construct
  source 1..20: mol_type = other DNA
ctgagtgctaggtactggga

SEQ ID NO: 244190 - DNA, 20 bp, synthetic construct
  source 1..20: mol_type = other DNA
gctgagtgctaggtactggg

SEQ ID NO: 244191 - DNA, 20 bp, synthetic construct
  source 1..20: mol_type = other DNA
agctgagtgctaggtactgg

SEQ ID NO: 244192 - DNA, 20 bp, synthetic construct
  source 1..20: mol_type = other DNA
gagctgagtgctaggtactg

SEQ ID NO: 244193 - DNA, 20 bp, synthetic construct
  source 1..20: mol_type = other DNA
agagctgagtgctaggtact

SEQ ID NO: 244194 - DNA, 20 bp, synthetic construct
  source 1..20: mol_type = other DNA
cagagctgagtgctaggtac

SEQ ID NO: 244195 - DNA, 20 bp, synthetic construct
  source 1..20: mol_type = other DNA
acagagctgagtgctaggta

SEQ ID NO: 244196 - DNA, 20 bp, synthetic construct
  source 1..20: mol_type = other DNA
tacagagctgagtgctaggt

SEQ ID NO: 244197 - DNA, 20 bp, synthetic construct
  source 1..20: mol_type = other DNA
atacagagctgagtgctagg

SEQ ID NO: 244198 - DNA, 20 bp, synthetic construct
  source 1..20: mol_type = other DNA
tatacagagctgagtgctag

SEQ ID NO: 244199 - DNA, 20 bp, synthetic construct
  source 1..20: mol_type = other DNA
gtatacagagctgagtgcta

SEQ ID NO: 244200 - DNA, 20 bp, synthetic construct
  source 1..20: mol_type = other DNA
tgtatacagagctgagtgct

SEQ ID NO: 244201 - DNA, 20 bp, synthetic construct
  source 1..20: mol_type = other DNA
atgtatacagagctgagtgc

SEQ ID NO: 244202 - DNA, 20 bp, synthetic construct
  source 1..20: mol_type = other DNA
aatgtatacagagctgagtg

SEQ ID NO: 244203 - DNA, 20 bp, synthetic construct
  source 1..20: mol_type = other DNA
caatgtatacagagctgagt

SEQ ID NO: 244204 - DNA, 20 bp, synthetic construct
  source 1..20: mol_type = other DNA
ccaatgtatacagagctgag

SEQ ID NO: 244205 - DNA, 20 bp, synthetic construct
  source 1..20: mol_type = other DNA
cccaatgtatacagagctga

SEQ ID NO: 244206 - DNA, 20 bp, synthetic construct
  source 1..20: mol_type = other DNA
gcccaatgtatacagagctg

SEQ ID NO: 244207 - DNA, 20 bp, synthetic construct
  source 1..20: mol_type = other DNA
agcccaatgtatacagagct

SEQ ID NO: 244208 - DNA, 20 bp, synthetic construct
  source 1..20: mol_type = other DNA
gagcccaatgtatacagagc

SEQ ID NO: 244209 - DNA, 20 bp, synthetic construct
  source 1..20: mol_type = other DNA
agagcccaatgtatacagag

SEQ ID NO: 244210 - DNA, 20 bp, synthetic construct
  source 1..20: mol_type = other DNA
gagagcccaatgtatacaga

SEQ ID NO: 244211 - DNA, 20 bp, synthetic construct
  source 1..20: mol_type = other DNA
tgagagcccaatgtatacag

SEQ ID NO: 244212 - DNA, 20 bp, synthetic construct
  source 1..20: mol_type = other DNA
ttgagagcccaatgtataca

SEQ ID NO: 244213 - DNA, 20 bp, synthetic construct
  source 1..20: mol_type = other DNA
cttgagagcccaatgtatac

SEQ ID NO: 244214 - DNA, 20 bp, synthetic construct
  source 1..20: mol_type = other DNA
tcttgagagcccaatgtata

SEQ ID NO: 244215 - DNA, 20 bp, synthetic construct
  source 1..20: mol_type = other DNA
ttcttgagagcccaatgtat

SEQ ID NO: 244216 - DNA, 20 bp, synthetic construct
  source 1..20: mol_type = other DNA
attcttgagagcccaatgta

SEQ ID NO: 244217 - DNA, 20 bp, synthetic construct
  source 1..20: mol_type = other DNA
aattcttgagagcccaatgt
